United States Patent Application Publication US 2005/0244851 A1 - sequence listing, part 82

SEQ ID NO: 3192641 - DNA, 25 bp, Homo sapien
ttttcctcttcagtagagatttcta

SEQ ID NO: 3192642 - DNA, 25 bp, Homo sapien
aagagagagctatcttttagatctc

SEQ ID NO: 3192643 - DNA, 25 bp, Homo sapien
tcaagagagagctatcttttagatc

SEQ ID NO: 3192644 - DNA, 25 bp, Homo sapien
agagagagctatcttttagatctcc

SEQ ID NO: 3192645 - DNA, 25 bp, Homo sapien
caagagagagctatcttttagatct

SEQ ID NO: 3192646 - DNA, 25 bp, Homo sapien
tgatagcactcttaatggtataact

SEQ ID NO: 3192647 - DNA, 25 bp, Homo sapien
tttgatagcactcttaatggtataa

SEQ ID NO: 3192648 - DNA, 25 bp, Homo sapien
tagcactcttaatggtataacttct

SEQ ID NO: 3192649 - DNA, 25 bp, Homo sapien
gatagcactcttaatggtataactt

SEQ ID NO: 3192650 - DNA, 25 bp, Homo sapien
tgcgttaacgcccacactgtgtgca

SEQ ID NO: 3192651 - DNA, 25 bp, Homo sapien
ggttcctacctaatcagcaattgcg

SEQ ID NO: 3192652 - DNA, 25 bp, Homo sapien
cccttctggaggagaacacgaatct

SEQ ID NO: 3192653 - DNA, 25 bp, Homo sapien
tgggctcccttcaactttaacatgg

SEQ ID NO: 3192654 - DNA, 25 bp, Homo sapien
ctttttgtagcgctaaatactcttt

SEQ ID NO: 3192655 - DNA, 25 bp, Homo sapien
tttgaggtactccactgtctgtttc

SEQ ID NO: 3192656 - DNA, 25 bp, Homo sapien
ttccatttctgactctgattttatt

SEQ ID NO: 3192657 - DNA, 25 bp, Homo sapien
taaagaagccatgctagctttttgt

SEQ ID NO: 3192658 - DNA, 25 bp, Homo sapien
tatataagtacattataatgttgtc

SEQ ID NO: 3192659 - DNA, 25 bp, Homo sapien
catatataagtacattataatgttg

SEQ ID NO: 3192660 - DNA, 25 bp, Homo sapien
tgtcaaaactatcagtgatctttac

SEQ ID NO: 3192661 - DNA, 25 bp, Homo sapien
atgttgtcaaaactatcagtgatct

SEQ ID NO: 3192662 - DNA, 25 bp, Homo sapien
tccactcacgaactgtggtcctgtt

SEQ ID NO: 3192663 - DNA, 25 bp, Homo sapien
tggtcctgttgcattaactttctcc

SEQ ID NO: 3192664 - DNA, 25 bp, Homo sapien
tgggtgcgacactcttccctgttgg

SEQ ID NO: 3192665 - DNA, 25 bp, Homo sapien
gaggctctgtgctaatgatcttcac

SEQ ID NO: 3192666 - DNA, 25 bp, Homo sapien
cccttctagcaaatcaacataaaga

SEQ ID NO: 3192667 - DNA, 25 bp, Homo sapien
caggagttttaaatctagcatggca

SEQ ID NO: 3192668 - DNA, 25 bp, Homo sapien
gaaaggatctcgagtttccagcagt

SEQ ID NO: 3192669 - DNA, 25 bp, Homo sapien
ttctgtatccccttctagcaaatca

SEQ ID NO: 3192670 - DNA, 25 bp, Homo sapien
ttaaaaacaaacaaagactctgatg

SEQ ID NO: 3192671 - DNA, 25 bp, Homo sapien
cttaaaaacaaacaaagactctgat

SEQ ID NO: 3192672 - DNA, 25 bp, Homo sapien
gaggctgattaagttttgcctgtct

SEQ ID NO: 3192673 - DNA, 25 bp, Homo sapien
ctcttttcttttcccgaggctgatt

SEQ ID NO: 3192674 - DNA, 25 bp, Homo sapien
tgccaatacctttgttcgtgatcac

SEQ ID NO: 3192675 - DNA, 25 bp, Homo sapien
taagttttgcctgtctatcaaccaa

SEQ ID NO: 3192676 - DNA, 25 bp, Homo sapien
tcaccaaactacaagacatagcagc

SEQ ID NO: 3192677 - DNA, 25 bp, Homo sapien
gactttggcattaaacgttcaagga

SEQ ID NO: 3192678 - DNA, 25 bp, Homo sapien
tgactacctagtactgactttggca

SEQ ID NO: 3192679 - DNA, 25 bp, Homo sapien
gcttatcgttgctataggaaacact

SEQ ID NO: 3192680 - DNA, 25 bp, Homo sapien
agctggaaagcagtggctattccca

SEQ ID NO: 3192681 - DNA, 25 bp, Homo sapien
ttgcctaagctggaaagcagtggct

SEQ ID NO: 3192682 - DNA, 25 bp, Homo sapien
gaaagcagtggctattcccaggtgt

SEQ ID NO: 3192683 - DNA, 25 bp, Homo sapien
cctaagctggaaagcagtggctatt

SEQ ID NO: 3192684 - DNA, 25 bp, Homo sapien
caggaaataggacttttaacttgct

SEQ ID NO: 3192685 - DNA, 25 bp, Homo sapien
tctaaattttgatgactgtagttaa

SEQ ID NO: 3192686 - DNA, 25 bp, Homo sapien
tattatgtaccctactttgttccag

SEQ ID NO: 3192687 - DNA, 25 bp, Homo sapien
cttgctcacctaacaaaaaaggaag

SEQ ID NO: 3192688 - DNA, 25 bp, Homo sapien
caatcctgacgtcataactgagttg

SEQ ID NO: 3192689 - DNA, 25 bp, Homo sapien
tgaaagaatccttgggaagcacagg

SEQ ID NO: 3192690 - DNA, 25 bp, Homo sapien
catttcacgacaagagtcaactggc

SEQ ID NO: 3192691 - DNA, 25 bp, Homo sapien
cttcctagtcaaagatgagctctaa

SEQ ID NO: 3192692 - DNA, 25 bp, Homo sapien
gacaacctcagctgttacaatgctc

SEQ ID NO: 3192693 - DNA, 25 bp, Homo sapien
ccaggttccaagaatggtgcctaac

SEQ ID NO: 3192694 - DNA, 25 bp, Homo sapien
tttctgtctagcactggtcatcacc

SEQ ID NO: 3192695 - DNA, 25 bp, Homo sapien
tgtgattcatggctttaccccaggt

SEQ ID NO: 3192696 - DNA, 25 bp, Homo sapien
taaattctgcctttacctgctgagt

SEQ ID NO: 3192697 - DNA, 25 bp, Homo sapien
gattacatgtgcgtgccagctggct

SEQ ID NO: 3192698 - DNA, 25 bp, Homo sapien
tagcaaaatgaataggagacatccc

SEQ ID NO: 3192699 - DNA, 25 bp, Homo sapien
tgtgttcaaaatcatagggcatact

SEQ ID NO: 3192700 - DNA, 25 bp, Homo sapien
aatgtattggatactcaaaacacac

SEQ ID NO: 3192701 - DNA, 25 bp, Homo sapien
tttactcgcttgttgagtctttgcc

SEQ ID NO: 3192702 - DNA, 25 bp, Homo sapien
gtctttgccagtctaatcttttcag

SEQ ID NO: 3192703 - DNA, 25 bp, Homo sapien
tcttatatgtttactcgcttgttga

SEQ ID NO: 3192704 - DNA, 25 bp, Homo sapien
cagtctaatcttttcagctttggtg

SEQ ID NO: 3192705 - DNA, 25 bp, Homo sapien
gtgaagtattaagaggtgaactgtt

SEQ ID NO: 3192706 - DNA, 25 bp, Homo sapien
tgaagtattaagaggtgaactgttt

SEQ ID NO: 3192707 - DNA, 25 bp, Homo sapien
aacagctcaagtatcttgtgaagta

SEQ ID NO: 3192708 - DNA, 25 bp, Homo sapien
tgtgaagtattaagaggtgaactgt

SEQ ID NO: 3192709 - DNA, 25 bp, Homo sapien
cacattaattatgcagtgctaccat

SEQ ID NO: 3192710 - DNA, 25 bp, Homo sapien
tgtggtatacatcatatttgtctct

SEQ ID NO: 3192711 - DNA, 25 bp, Homo sapien
tactaaatcacctgacactgacatc

SEQ ID NO: 3192712 - DNA, 25 bp, Homo sapien
tttacaagttgaggaacaaagatat

SEQ ID NO: 3192713 - DNA, 25 bp, Homo sapien
tggaagctcagataggcaaagtgga

SEQ ID NO: 3192714 - DNA, 25 bp, Homo sapien
ccctatggtctattgttcaatggaa

SEQ ID NO: 3192715 - DNA, 25 bp, Homo sapien
tagaatgaactattaaacatgtctg

SEQ ID NO: 3192716 - DNA, 25 bp, Homo sapien
ggtattgaaggtattgcaagttaca

SEQ ID NO: 3192717 - DNA, 25 bp, Homo sapien
tttattagatgatgctcatgtgtct

SEQ ID NO: 3192718 - DNA, 25 bp, Homo sapien
gattattcctagtgcagtcctccct

SEQ ID NO: 3192719 - DNA, 25 bp, Homo sapien
tcaatagaactatttaacctagggc

SEQ ID NO: 3192720 - DNA, 25 bp, Homo sapien
actatttaacctagggctgggcaca

SEQ ID NO: 3192721 - DNA, 25 bp, Homo sapien
gccttgtaaagtgctgggtaaacag

SEQ ID NO: 3192722 - DNA, 25 bp, Homo sapien
tggccttgtaaagtgctgggtaaac

SEQ ID NO: 3192723 - DNA, 25 bp, Homo sapien
ttgtaaagtgctgggtaaacaggca

SEQ ID NO: 3192724 - DNA, 25 bp, Homo sapien
cttgtaaagtgctgggtaaacaggc

SEQ ID NO: 3192725 - DNA, 25 bp, Homo sapien
gaatgggacacggtacaaagtctcc

SEQ ID NO: 3192726 - DNA, 25 bp, Homo sapien
aagaatgggacacggtacaaagtct

SEQ ID NO: 3192727 - DNA, 25 bp, Homo sapien
atgggacacggtacaaagtctccat

SEQ ID NO: 3192728 - DNA, 25 bp, Homo sapien
ctaagaatgggacacggtacaaagt

SEQ ID NO: 3192729 - DNA, 25 bp, Homo sapien
catacacagtcatggccgatggtat

SEQ ID NO: 3192730 - DNA, 25 bp, Homo sapien
acagtcatggccgatggtatgtgca

SEQ ID NO: 3192731 - DNA, 25 bp, Homo sapien
ggccgatggtatgtgcagccagggc

SEQ ID NO: 3192732 - DNA, 25 bp, Homo sapien
tcatggccgatggtatgtgcagcca

SEQ ID NO: 3192733 - DNA, 25 bp, Homo sapien
cagtgatgaggaagtaagataccgt

SEQ ID NO: 3192734 - DNA, 25 bp, Homo sapien
caacataaattattcctccagtgat

SEQ ID NO: 3192735 - DNA, 25 bp, Homo sapien
taacaacataaattattcctccagt

SEQ ID NO: 3192736 - DNA, 25 bp, Homo sapien
tgatgaggaagtaagataccgtcac

SEQ ID NO: 3192737 - DNA, 25 bp, Homo sapien
gggatctttggtgcactcaatgggt

SEQ ID NO: 3192738 - DNA, 25 bp, Homo sapien
ccctgtagaccaagaaaggtactgg

SEQ ID NO: 3192739 - DNA, 25 bp, Homo sapien
catttaccctgtagaccaagaaagg

SEQ ID NO: 3192740 - DNA, 25 bp, Homo sapien
ctttggtgcactcaatgggtccagg

SEQ ID NO: 3192741 - DNA, 25 bp, Homo sapien
acactctagttaaaggcaaagcacc

SEQ ID NO: 3192742 - DNA, 25 bp, Homo sapien
catcagcgggaaagttttgacctac

SEQ ID NO: 3192743 - DNA, 25 bp, Homo sapien
cagacaagtgattggtatagcacac

SEQ ID NO: 3192744 - DNA, 25 bp, Homo sapien
tagtgcagacaagtgattggtatag

SEQ ID NO: 3192745 - DNA, 25 bp, Homo sapien
ggcacaattgcactactcatcagcg

SEQ ID NO: 3192746 - DNA, 25 bp, Homo sapien
caatatgatggacaagtttgccaga

SEQ ID NO: 3192747 - DNA, 25 bp, Homo sapien
atatgatggacaagtttgccagatc

SEQ ID NO: 3192748 - DNA, 25 bp, Homo sapien
tcaatatgatggacaagtttgccag

SEQ ID NO: 3192749 - DNA, 25 bp, Homo sapien
gtcaatatgatggacaagtttgcca

SEQ ID NO: 3192750 - DNA, 25 bp, Homo sapien
gaaatatgtctatatgcaccactga

SEQ ID NO: 3192751 - DNA, 25 bp, Homo sapien
cgagctgccgggcttattctagcgg

SEQ ID NO: 3192752 - DNA, 25 bp, Homo sapien
gccatgagctcatggacagctccca

SEQ ID NO: 3192753 - DNA, 25 bp, Homo sapien
tagccgctgccgctatcgccaggag

SEQ ID NO: 3192754 - DNA, 25 bp, Homo sapien
gctcctgcgccgcagagtggaaggg

SEQ ID NO: 3192755 - DNA, 25 bp, Homo sapien
gcgccacctacatcccggccggcgg

SEQ ID NO: 3192756 - DNA, 25 bp, Homo sapien
tcggacgcgaccttggccgcggggc

SEQ ID NO: 3192757 - DNA, 25 bp, Homo sapien
tcgcccagccgaagtccctcccgcg

SEQ ID NO: 3192758 - DNA, 25 bp, Homo sapien
tcttcctgcggctccgggtttcttc

SEQ ID NO: 3192759 - DNA, 25 bp, Homo sapien
tgacgaatccgcggcgggttcggcg

SEQ ID NO: 3192760 - DNA, 25 bp, Homo sapien
tcttcctcctgtcacgcccgggtct

SEQ ID NO: 3192761 - DNA, 25 bp, Homo sapien
cgggtctcccgcgtctcctcggtct

SEQ ID NO: 3192762 - DNA, 25 bp, Homo sapien
ttcttctaacggtatagctctgcag

SEQ ID NO: 3192763 - DNA, 25 bp, Homo sapien
ttctaacggtatagctctgcagtgg

SEQ ID NO: 3192764 - DNA, 25 bp, Homo sapien
taacggtatagctctgcagtgggtc

SEQ ID NO: 3192765 - DNA, 25 bp, Homo sapien
aacggtatagctctgcagtgggtca

SEQ ID NO: 3192766 - DNA, 25 bp, Homo sapien
cagttgttgggtgaagctttgcccg

SEQ ID NO: 3192767 - DNA, 25 bp, Homo sapien
tttgcccgaaagttgagaaatggtg

SEQ ID NO: 3192768 - DNA, 25 bp, Homo sapien
tcctatgggtggaagtaaatgcttc

SEQ ID NO: 3192769 - DNA, 25 bp, Homo sapien
cctctagatgaggttcctgctctcc

SEQ ID NO: 3192770 - DNA, 25 bp, Homo sapien
ggcaaacatgggcttctgaaccttg

SEQ ID NO: 3192771 - DNA, 25 bp, Homo sapien
atgtacacaaccctgagagtagctg

SEQ ID NO: 3192772 - DNA, 25 bp, Homo sapien
ctttcatgtacacaaccctgagagt

SEQ ID NO: 3192773 - DNA, 25 bp, Homo sapien
agctggcaaacatgggcttctgaac

SEQ ID NO: 3192774 - DNA, 25 bp, Homo sapien
gcctatttatcctgttgtgtgtgtg

SEQ ID NO: 3192775 - DNA, 25 bp, Homo sapien
cagcctatttatcctgttgtgtgtg

SEQ ID NO: 3192776 - DNA, 25 bp, Homo sapien
cccagcctatttatcctgttgtgtg

SEQ ID NO: 3192777 - DNA, 25 bp, Homo sapien
gcccagcctatttatcctgttgtgt

SEQ ID NO: 3192778 - DNA, 25 bp, Homo sapien
ggcaaaacgcccagattacttccta

SEQ ID NO: 3192779 - DNA, 25 bp, Homo sapien
aatgtctcccaaaaatggtggttat

SEQ ID NO: 3192780 - DNA, 25 bp, Homo sapien
cgtggcataagaatacaagagaacc

SEQ ID NO: 3192781 - DNA, 25 bp, Homo sapien
tgaaatcccgaaagaaaaacgatga

SEQ ID NO: 3192782 - DNA, 25 bp, Homo sapien
gccacctcggtaggcagcccagagg

SEQ ID NO: 3192783 - DNA, 25 bp, Homo sapien
tgccacctcggtaggcagcccagag

SEQ ID NO: 3192784 - DNA, 25 bp, Homo sapien
cacctcggtaggcagcccagaggaa

SEQ ID NO: 3192785 - DNA, 25 bp, Homo sapien
gctgccacctcggtaggcagcccag

SEQ ID NO: 3192786 - DNA, 25 bp, Homo sapien
ttcacaacgggtctgagggcagccg

SEQ ID NO: 3192787 - DNA, 25 bp, Homo sapien
gcttcattttgacatatgggtctga

SEQ ID NO: 3192788 - DNA, 25 bp, Homo sapien
acgcttcattttgacatatgggtct

SEQ ID NO: 3192789 - DNA, 25 bp, Homo sapien
cagttacgcttcattttgacatatg

SEQ ID NO: 3192790 - DNA, 25 bp, Homo sapien
ttggtttttgtgagcgacctcagca

SEQ ID NO: 3192791 - DNA, 25 bp, Homo sapien
gcggttcttggtttttgtgagcgac

SEQ ID NO: 3192792 - DNA, 25 bp, Homo sapien
gttcttggtttttgtgagcgacctc

SEQ ID NO: 3192793 - DNA, 25 bp, Homo sapien
ctttgcggttcttggtttttgtgag

SEQ ID NO: 3192794 - DNA, 25 bp, Homo sapien
gctctctgaagagggccaactgaag

SEQ ID NO: 3192795 - DNA, 25 bp, Homo sapien
tatgcaacgaaaagggagctctctg

SEQ ID NO: 3192796 - DNA, 25 bp, Homo sapien
taagaagcagcatggacagagcagg

SEQ ID NO: 3192797 - DNA, 25 bp, Homo sapien
caactgaagggatgcttgggcttgc

SEQ ID NO: 3192798 - DNA, 25 bp, Homo sapien
ggatccgccactgcagtacagcctg

SEQ ID NO: 3192799 - DNA, 25 bp, Homo sapien
gagctggatccgccactgcagtaca

SEQ ID NO: 3192800 - DNA, 25 bp, Homo sapien
gctggatccgccactgcagtacagc

SEQ ID NO: 3192801 - DNA, 25 bp, Homo sapien
tggatccgccactgcagtacagcct

SEQ ID NO: 3192802 - DNA, 25 bp, Homo sapien
cctgaggctcgaggaaaataatatg

SEQ ID NO: 3192803 - DNA, 25 bp, Homo sapien
tcagcagatgaagcaagactcattc

SEQ ID NO: 3192804 - DNA, 25 bp, Homo sapien
ctcattcttcgagtccgggagaagc

SEQ ID NO: 3192805 - DNA, 25 bp, Homo sapien
gggaggcaccaatgtgctctctgaa

SEQ ID NO: 3192806 - DNA, 25 bp, Homo sapien
ctgcacacatccacaagttcactaa

SEQ ID NO: 3192807 - DNA, 25 bp, Homo sapien
ccatcatgggcacaaggttcctcat

SEQ ID NO: 3192808 - DNA, 25 bp, Homo sapien
ataactatgttgctatgtgattcga

SEQ ID NO: 3192809 - DNA, 25 bp, Homo sapien
gaaattctccctagaatcaccatca

SEQ ID NO: 3192810 - DNA, 25 bp, Homo sapien
ccctggaacgaagggctagttatca

SEQ ID NO: 3192811 - DNA, 25 bp, Homo sapien
cctggaacgaagggctagttatcat

SEQ ID NO: 3192812 - DNA, 25 bp, Homo sapien
tcagccggttatgctcccaagaagc

SEQ ID NO: 3192813 - DNA, 25 bp, Homo sapien
cctcagccggttatgctcccaagaa

SEQ ID NO: 3192814 - DNA, 25 bp, Homo sapien
tactttttggatccaattccacagg

SEQ ID NO: 3192815 - DNA, 25 bp, Homo sapien
ttgtactttttggatccaattccac

SEQ ID NO: 3192816 - DNA, 25 bp, Homo sapien
gaagattgccccatatagtttgagg

SEQ ID NO: 3192817 - DNA, 25 bp, Homo sapien
taagaagtagcaactggatgacaaa

SEQ ID NO: 3192818 - DNA, 25 bp, Homo sapien
tcacctcgggaggaatcatgggcag

SEQ ID NO: 3192819 - DNA, 25 bp, Homo sapien
agtctacattgcctgtcacttcaag

SEQ ID NO: 3192820 - DNA, 25 bp, Homo sapien
tgagcatcagtcttgataagagatg

SEQ ID NO: 3192821 - DNA, 25 bp, Homo sapien
taagagatgtaatgttggatgcttg

SEQ ID NO: 3192822 - DNA, 25 bp, Homo sapien
tgataagagatgtaatgttggatgc

SEQ ID NO: 3192823 - DNA, 25 bp, Homo sapien
cagtgagtaccagttgagcatcagt

SEQ ID NO: 3192824 - DNA, 25 bp, Homo sapien
cactaaaagcagcagttataacaac

SEQ ID NO: 3192825 - DNA, 25 bp, Homo sapien
taacaacagccagtaatcagaccaa

SEQ ID NO: 3192826 - DNA, 25 bp, Homo sapien
cagtaatcagaccaatcagaacaga

SEQ ID NO: 3192827 - DNA, 25 bp, Homo sapien
gctataaataaccactgcagcctac

SEQ ID NO: 3192828 - DNA, 25 bp, Homo sapien
tattttaatagcaaccgtgatagga

SEQ ID NO: 3192829 - DNA, 25 bp, Homo sapien
gtattttaatagcaaccgtgatagg

SEQ ID NO: 3192830 - DNA, 25 bp, Homo sapien
ttaatagcaaccgtgataggaaaca

SEQ ID NO: 3192831 - DNA, 25 bp, Homo sapien
atagcaaccgtgataggaaacagga

SEQ ID NO: 3192832 - DNA, 25 bp, Homo sapien
aagcaaaatcatagcccgcttagac

SEQ ID NO: 3192833 - DNA, 25 bp, Homo sapien
atcatagcccgcttagacagctgtg

SEQ ID NO: 3192834 - DNA, 25 bp, Homo sapien
agcaaaatcatagcccgcttagaca

SEQ ID NO: 3192835 - DNA, 25 bp, Homo sapien
aaaatcatagcccgcttagacagct

SEQ ID NO: 3192836 - DNA, 25 bp, Homo sapien
ccctgcaagctgatgtctatgagac

SEQ ID NO: 3192837 - DNA, 25 bp, Homo sapien
caggaaccgactttcccattacagc

SEQ ID NO: 3192838 - DNA, 25 bp, Homo sapien
tctctgcaatgtgcctgtgagtcac

SEQ ID NO: 3192839 - DNA, 25 bp, Homo sapien
aatccatgtgctttcggcgggccag

SEQ ID NO: 3192840 - DNA, 25 bp, Homo sapien
cccaatctgaactaggtgtgatggt

SEQ ID NO: 3192841 - DNA, 25 bp, Homo sapien
atttcccaatctgaactaggtgtga

SEQ ID NO: 3192842 - DNA, 25 bp, Homo sapien
ttcccaatctgaactaggtgtgatg

SEQ ID NO: 3192843 - DNA, 25 bp, Homo sapien
aatctgaactaggtgtgatggtgca

SEQ ID NO: 3192844 - DNA, 25 bp, Homo sapien
gaaagtgttacttctgttccaggga

SEQ ID NO: 3192845 - DNA, 25 bp, Homo sapien
tagggaaagtgttacttctgttcca

SEQ ID NO: 3192846 - DNA, 25 bp, Homo sapien
ctggtagggaaagtgttacttctgt

SEQ ID NO: 3192847 - DNA, 25 bp, Homo sapien
ctgctggtagggaaagtgttacttc

SEQ ID NO: 3192848 - DNA, 25 bp, Homo sapien
ctgaggaatgtgtaagtgtggtcac

SEQ ID NO: 3192849 - DNA, 25 bp, Homo sapien
tctgaatggtcaatgctgaggaatg

SEQ ID NO: 3192850 - DNA, 25 bp, Homo sapien
gatttctgaatggtcaatgctgagg

SEQ ID NO: 3192851 - DNA, 25 bp, Homo sapien
cagatttctgaatggtcaatgctga

SEQ ID NO: 3192852 - DNA, 25 bp, Homo sapien
tgagtagaagatgcttgaagcaaca

SEQ ID NO: 3192853 - DNA, 25 bp, Homo sapien
gagtagaagatgcttgaagcaacag

SEQ ID NO: 3192854 - DNA, 25 bp, Homo sapien
gtagaagatgcttgaagcaacagaa

SEQ ID NO: 3192855 - DNA, 25 bp, Homo sapien
tagaagatgcttgaagcaacagaat

SEQ ID NO: 3192856 - DNA, 25 bp, Homo sapien
atggttcatctttacatgactgaat

SEQ ID NO: 3192857 - DNA, 25 bp, Homo sapien
atgctgagcaattgcagtcagtttt

SEQ ID NO: 3192858 - DNA, 25 bp, Homo sapien
aaatttgaggtgtgacctggtatca

SEQ ID NO: 3192859 - DNA, 25 bp, Homo sapien
tttcaagaaatttgaggtgtgacct

SEQ ID NO: 3192860 - DNA, 25 bp, Homo sapien
cttttcaagaaatttgaggtgtgac

SEQ ID NO: 3192861 - DNA, 25 bp, Homo sapien
caagaaatttgaggtgtgacctggt

SEQ ID NO: 3192862 - DNA, 25 bp, Homo sapien
tcttgtgattcttagatgaagcaac

SEQ ID NO: 3192863 - DNA, 25 bp, Homo sapien
gagagtagagtggtcccttcagaag

SEQ ID NO: 3192864 - DNA, 25 bp, Homo sapien
tcacttccaagttctagtggtctct

SEQ ID NO: 3192865 - DNA, 25 bp, Homo sapien
gctgtaactcattggctttctgctt

SEQ ID NO: 3192866 - DNA, 25 bp, Homo sapien
agggcttaacaacagactgaaggta

SEQ ID NO: 3192867 - DNA, 25 bp, Homo sapien
acagactgaaggtaggagtaattca

SEQ ID NO: 3192868 - DNA, 25 bp, Homo sapien
cagactgaaggtaggagtaattcat

SEQ ID NO: 3192869 - DNA, 25 bp, Homo sapien
cacagcatggagagctgagcatcca

SEQ ID NO: 3192870 - DNA, 25 bp, Homo sapien
acagcatggagagctgagcatccat

SEQ ID NO: 3192871 - DNA, 25 bp, Homo sapien
cttcatgtctcttttcattacttac

SEQ ID NO: 3192872 - DNA, 25 bp, Homo sapien
ttgaaataccaattcttcatgtctc

SEQ ID NO: 3192873 - DNA, 25 bp, Homo sapien
attcttcatgtctcttttcattact

SEQ ID NO: 3192874 - DNA, 25 bp, Homo sapien
tgaaataccaattcttcatgtctct

SEQ ID NO: 3192875 - DNA, 25 bp, Homo sapien
gttcaccatgtaattgtttcctctg

SEQ ID NO: 3192876 - DNA, 25 bp, Homo sapien
gtttcctctgtaaccaaatgagatg

SEQ ID NO: 3192877 - DNA, 25 bp, Homo sapien
ttttcacaatatttcgtagattcct

SEQ ID NO: 3192878 - DNA, 25 bp, Homo sapien
tgttaatggtgtcatacaactcatc

SEQ ID NO: 3192879 - DNA, 25 bp, Homo sapien
caatggagccaccagattcaatgag

SEQ ID NO: 3192880 - DNA, 25 bp, Homo sapien
tcaatggagccaccagattcaatga

SEQ ID NO: 3192881 - DNA, 25 bp, Homo sapien
gcacttctaaaagccgtaagcattt

SEQ ID NO: 3192882 - DNA, 25 bp, Homo sapien
ttctaaaagccgtaagcattttaca

SEQ ID NO: 3192883 - DNA, 25 bp, Homo sapien
gaagcacttctaaaagccgtaagca

SEQ ID NO: 3192884 - DNA, 25 bp, Homo sapien
taaaagccgtaagcattttacaatg

SEQ ID NO: 3192885 - DNA, 25 bp, Homo sapien
caatcatttcaactgtgatacagga

SEQ ID NO: 3192886 - DNA, 25 bp, Homo sapien
tgctattatatcagcctttgctgca

SEQ ID NO: 3192887 - DNA, 25 bp, Homo sapien
ctttgctgcattaagctttccaaaa

SEQ ID NO: 3192888 - DNA, 25 bp, Homo sapien
cagaggcagccgtcacttgctatta

SEQ ID NO: 3192889 - DNA, 25 bp, Homo sapien
gccaagtttcatattagcagggacc

SEQ ID NO: 3192890 - DNA, 25 bp, Homo sapien
caagtttattccattcaagtaggca

SEQ ID NO: 3192891 - DNA, 25 bp, Homo sapien
tattgggaactaggaggactatgcc

SEQ ID NO: 3192892 - DNA, 25 bp, Homo sapien
cagggacctgcagattgaagctatt

SEQ ID NO: 3192893 - DNA, 25 bp, Homo sapien
aaggcaaatctgagtcacgtaagga

SEQ ID NO: 3192894 - DNA, 25 bp, Homo sapien
ccccaggcctatgctattcttgtaa

SEQ ID NO: 3192895 - DNA, 25 bp, Homo sapien
taatgagtaatttcccaccagatgg

SEQ ID NO: 3192896 - DNA, 25 bp, Homo sapien
cctgatccagtgacatgtagtgacg

SEQ ID NO: 3192897 - DNA, 25 bp, Homo sapien
ctgccacgcccctgttcacaaaagt

SEQ ID NO: 3192898 - DNA, 25 bp, Homo sapien
tgatgtaggataagaagaattagct

SEQ ID NO: 3192899 - DNA, 25 bp, Homo sapien
taccatatttagactctgccacgcc

SEQ ID NO: 3192900 - DNA, 25 bp, Homo sapien
ttagctaactgttgaagccccatct

SEQ ID NO: 3192901 - DNA, 25 bp, Homo sapien
cttttacgagtgttagaagatatca

SEQ ID NO: 3192902 - DNA, 25 bp, Homo sapien
cagttacaaacgtgaagaaactctt

SEQ ID NO: 3192903 - DNA, 25 bp, Homo sapien
ttaaaagagttatgctcgaattgca

SEQ ID NO: 3192904 - DNA, 25 bp, Homo sapien
aagttctacacctaacaatgtgaaa

SEQ ID NO: 3192905 - DNA, 25 bp, Homo sapien
cagctctggcacatgattatgtaac

SEQ ID NO: 3192906 - DNA, 25 bp, Homo sapien
aaggttattacgctgggctctgccg

SEQ ID NO: 3192907 - DNA, 25 bp, Homo sapien
tcatttcagtaacccttttcacaga

SEQ ID NO: 3192908 - DNA, 25 bp, Homo sapien
tctgaagctctaaactaaatggtgg

SEQ ID NO: 3192909 - DNA, 25 bp, Homo sapien
gcagtggcccacatgaaatgtttca

SEQ ID NO: 3192910 - DNA, 25 bp, Homo sapien
caatagctagaagtggccttgcatc

SEQ ID NO: 3192911 - DNA, 25 bp, Homo sapien
taacccctaacaacaatgcagtggc

SEQ ID NO: 3192912 - DNA, 25 bp, Homo sapien
tagaaagacaaactcccagcagatg

SEQ ID NO: 3192913 - DNA, 25 bp, Homo sapien
aaggatcctgtgacattgttatgct

SEQ ID NO: 3192914 - DNA, 25 bp, Homo sapien
caagctcacatgttagtgatctaca

SEQ ID NO: 3192915 - DNA, 25 bp, Homo sapien
ttagtgatctacagagtcaagatat

SEQ ID NO: 3192916 - DNA, 25 bp, Homo sapien
ctggtcccagagaaataatctactc

SEQ ID NO: 3192917 - DNA, 25 bp, Homo sapien
gaccacagtgtactaaccagacata

SEQ ID NO: 3192918 - DNA, 25 bp, Homo sapien
taaatctagcattgtaaacacctca

SEQ ID NO: 3192919 - DNA, 25 bp, Homo sapien
gaattctctgattctatgaaccaga

SEQ ID NO: 3192920 - DNA, 25 bp, Homo sapien
catgatcaacagttccctaactgga

SEQ ID NO: 3192921 - DNA, 25 bp, Homo sapien
gcaggcttagtttcgtggtgcccca

SEQ ID NO: 3192922 - DNA, 25 bp, Homo sapien
tatacacttcaggaattttgtcccc

SEQ ID NO: 3192923 - DNA, 25 bp, Homo sapien
aatgtaaaaagagctcatgctgggc

SEQ ID NO: 3192924 - DNA, 25 bp, Homo sapien
caaagttttagtgaaccaagacagc

SEQ ID NO: 3192925 - DNA, 25 bp, Homo sapien
tcattcagtccacatggttggggtt

SEQ ID NO: 3192926 - DNA, 25 bp, Homo sapien
gacatatatcacagcaatctgtggg

SEQ ID NO: 3192927 - DNA, 25 bp, Homo sapien
acagcaatctgtgggccggatatgg

SEQ ID NO: 3192928 - DNA, 25 bp, Homo sapien
tatatcacagcaatctgtgggccgg

SEQ ID NO: 3192929 - DNA, 25 bp, Homo sapien
tcaagcatgcacaggtattccccat

SEQ ID NO: 3192930 - DNA, 25 bp, Homo sapien
catccaacttcaagcatgcacaggt

SEQ ID NO: 3192931 - DNA, 25 bp, Homo sapien
atcaccatccaacttcaagcatgca

SEQ ID NO: 3192932 - DNA, 25 bp, Homo sapien
caacttcaagcatgcacaggtattc

SEQ ID NO: 3192933 - DNA, 25 bp, Homo sapien
tccaataatggtggccccaggaaga

SEQ ID NO: 3192934 - DNA, 25 bp, Homo sapien
tagctcttggcatcctgatataatg

SEQ ID NO: 3192935 - DNA, 25 bp, Homo sapien
ccagggcagaagcatatggttccgc

SEQ ID NO: 3192936 - DNA, 25 bp, Homo sapien
tcctgatataatgctgcagtctcca

SEQ ID NO: 3192937 - DNA, 25 bp, Homo sapien
tttagttcttagagtaccttggcca

SEQ ID NO: 3192938 - DNA, 25 bp, Homo sapien
ttcttagagtaccttggccattcac

SEQ ID NO: 3192939 - DNA, 25 bp, Homo sapien
gaaataatataagccatagtcatca

SEQ ID NO: 3192940 - DNA, 25 bp, Homo sapien
tagaaataatataagccatagtcat

SEQ ID NO: 3192941 - DNA, 25 bp, Homo sapien
gagtgaaagccactcttggtatctg

SEQ ID NO: 3192942 - DNA, 25 bp, Homo sapien
agtgaaagccactcttggtatctgt

SEQ ID NO: 3192943 - DNA, 25 bp, Homo sapien
acaaatgctatggtgttttacccac

SEQ ID NO: 3192944 - DNA, 25 bp, Homo sapien
taaggagcagattaaatggccagtg

SEQ ID NO: 3192945 - DNA, 25 bp, Homo sapien
ttccactagaaaacacagacattgg

SEQ ID NO: 3192946 - DNA, 25 bp, Homo sapien
gacattggaagacgtatgagactac

SEQ ID NO: 3192947 - DNA, 25 bp, Homo sapien
gatggatgtgccaactgaagaaggc

SEQ ID NO: 3192948 - DNA, 25 bp, Homo sapien
ccacatcggtgagggtgaatcttct

SEQ ID NO: 3192949 - DNA, 25 bp, Homo sapien
gtctgaaggcctagaactggaaact

SEQ ID NO: 3192950 - DNA, 25 bp, Homo sapien
tgagactccaagaaccagggtgagg

SEQ ID NO: 3192951 - DNA, 25 bp, Homo sapien
gctggaccccatgctagttactggg

SEQ ID NO: 3192952 - DNA, 25 bp, Homo sapien
gggctttggcatgaactagataatc

SEQ ID NO: 3192953 - DNA, 25 bp, Homo sapien
ttagtagttacaccatcagcatcag

SEQ ID NO: 3192954 - DNA, 25 bp, Homo sapien
taaagctagtgatggtcatagaacc

SEQ ID NO: 3192955 - DNA, 25 bp, Homo sapien
caaagcaggaagaccacttaagccc

SEQ ID NO: 3192956 - DNA, 25 bp, Homo sapien
gccaagtgtctgtcctagtgttagt

SEQ ID NO: 3192957 - DNA, 25 bp, Homo sapien
ttgttggaatgtacacagagttggg

SEQ ID NO: 3192958 - DNA, 25 bp, Homo sapien
aaaagccactggtcaaccaggcaca

SEQ ID NO: 3192959 - DNA, 25 bp, Homo sapien
gtgccgcctgtacagaccactagcg

SEQ ID NO: 3192960 - DNA, 25 bp, Homo sapien
tacagaccactagcgggtatgcact

SEQ ID NO: 3192961 - DNA, 25 bp, Homo sapien
gtatgcacttactggaggaaagcag

SEQ ID NO: 3192962 - DNA, 25 bp, Homo sapien
atatctctgccatcaaaccgtgccg

SEQ ID NO: 3192963 - DNA, 25 bp, Homo sapien
cctctgactactgccgttgaacttc

SEQ ID NO: 3192964 - DNA, 25 bp, Homo sapien
acttctctccactgtcgcttttctg

SEQ ID NO: 3192965 - DNA, 25 bp, Homo sapien
ttctcctctgactactgccgttgaa

SEQ ID NO: 3192966 - DNA, 25 bp, Homo sapien
tctccactgtcgcttttctgagctg

SEQ ID NO: 3192967 - DNA, 25 bp, Homo sapien
gaggcctaagagcacgctcacgtgc

SEQ ID NO: 3192968 - DNA, 25 bp, Homo sapien
cgtgcacgcctgtgtgttttgtggg

SEQ ID NO: 3192969 - DNA, 25 bp, Homo sapien
tgcaaaaactgtaagaggcctaaga

SEQ ID NO: 3192970 - DNA, 25 bp, Homo sapien
ccagcccctgtggtcggcttgcaaa

SEQ ID NO: 3192971 - DNA, 25 bp, Homo sapien
ttttacttccaggactttgatcctc

SEQ ID NO: 3192972 - DNA, 25 bp, Homo sapien
tttacttccaggactttgatcctca

SEQ ID NO: 3192973 - DNA, 25 bp, Homo sapien
ttacttccaggactttgatcctcat

SEQ ID NO: 3192974 - DNA, 25 bp, Homo sapien
cttttacttccaggactttgatcct

SEQ ID NO: 3192975 - DNA, 25 bp, Homo sapien
cccaggacttcggatgaggttaaca

SEQ ID NO: 3192976 - DNA, 25 bp, Homo sapien
tctgaaatgtacacgcaggatcagg

SEQ ID NO: 3192977 - DNA, 25 bp, Homo sapien
gcatggagcggagagtttattcacc

SEQ ID NO: 3192978 - DNA, 25 bp, Homo sapien
cactgtggaccaactctactatggg

SEQ ID NO: 3192979 - DNA, 25 bp, Homo sapien
atgaagccagagctccatcattata

SEQ ID NO: 3192980 - DNA, 25 bp, Homo sapien
caggtaaccctgaagttatcatgaa

SEQ ID NO: 3192981 - DNA, 25 bp, Homo sapien
aaccctgaagttatcatgaagccag

SEQ ID NO: 3192982 - DNA, 25 bp, Homo sapien
tatctatagggtaatggcaaaagtg

SEQ ID NO: 3192983 - DNA, 25 bp, Homo sapien
catggaaacaagaccgtatgctgtt

SEQ ID NO: 3192984 - DNA, 25 bp, Homo sapien
ggaaacaagaccgtatgctgtttta

SEQ ID NO: 3192985 - DNA, 25 bp, Homo sapien
atggaaacaagaccgtatgctgttt

SEQ ID NO: 3192986 - DNA, 25 bp, Homo sapien
gaaacaagaccgtatgctgttttaa

SEQ ID NO: 3192987 - DNA, 25 bp, Homo sapien
cgatgatcagcaggagagtcaagct

SEQ ID NO: 3192988 - DNA, 25 bp, Homo sapien
cacagctatgggtggcttctttccc

SEQ ID NO: 3192989 - DNA, 25 bp, Homo sapien
ccattggatgaggtgtttccgtggc

SEQ ID NO: 3192990 - DNA, 25 bp, Homo sapien
agcatgctgcgtagaggcggcctgg

SEQ ID NO: 3192991 - DNA, 25 bp, Homo sapien
cttttaggagtagcacatgagaaaa

SEQ ID NO: 3192992 - DNA, 25 bp, Homo sapien
aaacgtatttgagttcatagctagc

SEQ ID NO: 3192993 - DNA, 25 bp, Homo sapien
tgtgttagtcactgggtattcacag

SEQ ID NO: 3192994 - DNA, 25 bp, Homo sapien
cctagtctttgatcctctacctgga

SEQ ID NO: 3192995 - DNA, 25 bp, Homo sapien
tgattctcacatcaactgcatttgt

SEQ ID NO: 3192996 - DNA, 25 bp, Homo sapien
tctcaggccgtccttaggtctttgc

SEQ ID NO: 3192997 - DNA, 25 bp, Homo sapien
tgcttaacatgttttgacctgtcca

SEQ ID NO: 3192998 - DNA, 25 bp, Homo sapien
aaaaatgatcttgctaagtcctcta

SEQ ID NO: 3192999 - DNA, 25 bp, Homo sapien
ttttccctcctagatacatgcagag

SEQ ID NO: 3193000 - DNA, 25 bp, Homo sapien
taagattatatagcgcaccagagaa

SEQ ID NO: 3193001 - DNA, 25 bp, Homo sapien
aaaagttaaatgtcaggctcaaggt

SEQ ID NO: 3193002 - DNA, 25 bp, Homo sapien
agtctgtgtaattcccattccagtg

SEQ ID NO: 3193003 - DNA, 25 bp, Homo sapien
gctcaaggtcaaaagaattgggact

SEQ ID NO: 3193004 - DNA, 25 bp, Homo sapien
ctcacttgataatggtatataaatc

SEQ ID NO: 3193005 - DNA, 25 bp, Homo sapien
tagaattagggttataccagcctca

SEQ ID NO: 3193006 - DNA, 25 bp, Homo sapien
gaaccagccttgtatacacagaata

SEQ ID NO: 3193007 - DNA, 25 bp, Homo sapien
tgtcctgtctttattgggttttaga

SEQ ID NO: 3193008 - DNA, 25 bp, Homo sapien
catgtcttattagaattacacataa

SEQ ID NO: 3193009 - DNA, 25 bp, Homo sapien
tccacaagacaacttgctgagattt

SEQ ID NO: 3193010 - DNA, 25 bp, Homo sapien
gtcagtatccacaagacaacttgct

SEQ ID NO: 3193011 - DNA, 25 bp, Homo sapien
agtatccacaagacaacttgctgag

SEQ ID NO: 3193012 - DNA, 25 bp, Homo sapien
gacacatcccttgggatccatattg

SEQ ID NO: 3193013 - DNA, 25 bp, Homo sapien
cactaagacaagttcctggtgccaa

SEQ ID NO: 3193014 - DNA, 25 bp, Homo sapien
tagagtccagttaacaccactaatg

SEQ ID NO: 3193015 - DNA, 25 bp, Homo sapien
aactgacgtgttatatgagctctgt

SEQ ID NO: 3193016 - DNA, 25 bp, Homo sapien
tgacctctgcacagacaaggcacca

SEQ ID NO: 3193017 - DNA, 25 bp, Homo sapien
ggagctcacagccattgaaatgatg

SEQ ID NO: 3193018 - DNA, 25 bp, Homo sapien
gctcacagccattgaaatgatgcat

SEQ ID NO: 3193019 - DNA, 25 bp, Homo sapien
gagctcacagccattgaaatgatgc

SEQ ID NO: 3193020 - DNA, 25 bp, Homo sapien
tagagcacagggtgttctgaatgcc

SEQ ID NO: 3193021 - DNA, 25 bp, Homo sapien
ggtgtcaaagcagtcattaggaaag

SEQ ID NO: 3193022 - DNA, 25 bp, Homo sapien
tttgtcctctgaagtactctggaga

SEQ ID NO: 3193023 - DNA, 25 bp, Homo sapien
gaatcagctgttgtggtgtcaaagc

SEQ ID NO: 3193024 - DNA, 25 bp, Homo sapien
gacacacatcaccaattggaacagt

SEQ ID NO: 3193025 - DNA, 25 bp, Homo sapien
cttccaaccacacctctatgcaggg

SEQ ID NO: 3193026 - DNA, 25 bp, Homo sapien
catccttagacacacatcaccaatt

SEQ ID NO: 3193027 - DNA, 25 bp, Homo sapien
gggtgggtagtttattgctgcttcc

SEQ ID NO: 3193028 - DNA, 25 bp, Homo sapien
gcggagcactagacttccagctctt

SEQ ID NO: 3193029 - DNA, 25 bp, Homo sapien
ctgcacgcacacaggcataggtgtg

SEQ ID NO: 3193030 - DNA, 25 bp, Homo sapien
agctcttcagcagttgggtggctgc

SEQ ID NO: 3193031 - DNA, 25 bp, Homo sapien
gggaaggcggagcactagacttcca

SEQ ID NO: 3193032 - DNA, 25 bp, Homo sapien
tggcagccagaacactcacaagata

SEQ ID NO: 3193033 - DNA, 25 bp, Homo sapien
caatgaactaaggtcccaaaccgag

SEQ ID NO: 3193034 - DNA, 25 bp, Homo sapien
ccccgagctaggtcataatcttgct

SEQ ID NO: 3193035 - DNA, 25 bp, Homo sapien
aagcagtagcagaggatcagtttcc

SEQ ID NO: 3193036 - DNA, 25 bp, Homo sapien
cttttttaatagaagcagcagcgtg

SEQ ID NO: 3193037 - DNA, 25 bp, Homo sapien
ttttaatagaagcagcagcgtgagc

SEQ ID NO: 3193038 - DNA, 25 bp, Homo sapien
taatagaagcagcagcgtgagccat

SEQ ID NO: 3193039 - DNA, 25 bp, Homo sapien
tttaatagaagcagcagcgtgagcc

SEQ ID NO: 3193040 - DNA, 25 bp, Homo sapien
tctttttcgttccatacgttctctg

SEQ ID NO: 3193041 - DNA, 25 bp, Homo sapien
ctttttcgttccatacgttctctgg

SEQ ID NO: 3193042 - DNA, 25 bp, Homo sapien
cgttccatacgttctctggggattt

SEQ ID NO: 3193043 - DNA, 25 bp, Homo sapien
tttcgttccatacgttctctgggga

SEQ ID NO: 3193044 - DNA, 25 bp, Homo sapien
agggttaaaaggatgctcctcatac

SEQ ID NO: 3193045 - DNA, 25 bp, Homo sapien
aagagggttaaaaggatgctcctca

SEQ ID NO: 3193046 - DNA, 25 bp, Homo sapien
agagggttaaaaggatgctcctcat

SEQ ID NO: 3193047 - DNA, 25 bp, Homo sapien
gagggttaaaaggatgctcctcata

SEQ ID NO: 3193048 - DNA, 25 bp, Homo sapien
ggaggatgaagttgccagttctgag

SEQ ID NO: 3193049 - DNA, 25 bp, Homo sapien
aggatgaagttgccagttctgaggc

SEQ ID NO: 3193050 - DNA, 25 bp, Homo sapien
gatgaagttgccagttctgaggctg

SEQ ID NO: 3193051 - DNA, 25 bp, Homo sapien
aagggaggatgaagttgccagttct

SEQ ID NO: 3193052 - DNA, 25 bp, Homo sapien
tttagcaagtttgttgtgctgtgta

SEQ ID NO: 3193053 - DNA, 25 bp, Homo sapien
ccactcttttagcaagtttgttgtg

SEQ ID NO: 3193054 - DNA, 25 bp, Homo sapien
ctcttttagcaagtttgttgtgctg

SEQ ID NO: 3193055 - DNA, 25 bp, Homo sapien
gcaagtttgttgtgctgtgtaaata

SEQ ID NO: 3193056 - DNA, 25 bp, Homo sapien
ggtggatctcatctgaatttttcaa

SEQ ID NO: 3193057 - DNA, 25 bp, Homo sapien
tctgcattggggtggatctcatctg

SEQ ID NO: 3193058 - DNA, 25 bp, Homo sapien
cattggggtggatctcatctgaatt

SEQ ID NO: 3193059 - DNA, 25 bp, Homo sapien
ctttcaagccccataattggctttt

SEQ ID NO: 3193060 - DNA, 25 bp, Homo sapien
ggtatgtaaagaacacgcatgtaac

SEQ ID NO: 3193061 - DNA, 25 bp, Homo sapien
ccaagggagagattcgttaggtgta

SEQ ID NO: 3193062 - DNA, 25 bp, Homo sapien
cctcaaagtacatgggcttagggaa

SEQ ID NO: 3193063 - DNA, 25 bp, Homo sapien
gcagagcaagcttgtcaaatcccat

SEQ ID NO: 3193064 - DNA, 25 bp, Homo sapien
cagtaatgcagcctattcccagaca

SEQ ID NO: 3193065 - DNA, 25 bp, Homo sapien
cattgcaggagcattgcattcatca

SEQ ID NO: 3193066 - DNA, 25 bp, Homo sapien
tctcattgcaggagcattgcattca

SEQ ID NO: 3193067 - DNA, 25 bp, Homo sapien
agcctattcccagacaattcagatg

SEQ ID NO: 3193068 - DNA, 25 bp, Homo sapien
ttaatctttggttatccctattgca

SEQ ID NO: 3193069 - DNA, 25 bp, Homo sapien
ttggttatccctattgcatgcagaa

SEQ ID NO: 3193070 - DNA, 25 bp, Homo sapien
gccgacatagtcacatgaatccaag

SEQ ID NO: 3193071 - DNA, 25 bp, Homo sapien
tgcatgcagaattctcgatgccgac

SEQ ID NO: 3193072 - DNA, 25 bp, Homo sapien
cctgacagactcacagggaggatga

SEQ ID NO: 3193073 - DNA, 25 bp, Homo sapien
ggctttgctcagtagtgtttccctg

SEQ ID NO: 3193074 - DNA, 25 bp, Homo sapien
ctaacacaaggccatagttgaaggt

SEQ ID NO: 3193075 - DNA, 25 bp, Homo sapien
gaaggtgatcacctatttagtccat

SEQ ID NO: 3193076 - DNA, 25 bp, Homo sapien
taatgtgggcaattcatcaagatga

SEQ ID NO: 3193077 - DNA, 25 bp, Homo sapien
cagagagaactcaaaacccccggca

SEQ ID NO: 3193078 - DNA, 25 bp, Homo sapien
gggcaattcatcaagatgatccttg

SEQ ID NO: 3193079 - DNA, 25 bp, Homo sapien
gggtacactaatgtgggcaattcat

SEQ ID NO: 3193080 - DNA, 25 bp, Homo sapien
cctgctgtcagtgggcccgtccttg

SEQ ID NO: 3193081 - DNA, 25 bp, Homo sapien
ctgctgtcagtgggcccgtccttgc

SEQ ID NO: 3193082 - DNA, 25 bp, Homo sapien
ctcagctctacagttcctgctgtca

SEQ ID NO: 3193083 - DNA, 25 bp, Homo sapien
gctcttatgctcttatccgcatggc

SEQ ID NO: 3193084 - DNA, 25 bp, Homo sapien
ttatgctcttatccgcatggcaaga

SEQ ID NO: 3193085 - DNA, 25 bp, Homo sapien
tgctcttatccgcatggcaagaaga

SEQ ID NO: 3193086 - DNA, 25 bp, Homo sapien
ctcttatccgcatggcaagaagagc

SEQ ID NO: 3193087 - DNA, 25 bp, Homo sapien
gttctttgacgtcctcactgttaca

SEQ ID NO: 3193088 - DNA, 25 bp, Homo sapien
gacgtcctcactgttacagccatag

SEQ ID NO: 3193089 - DNA, 25 bp, Homo sapien
actgttacagccatagtagtctggg

SEQ ID NO: 3193090 - DNA, 25 bp, Homo sapien
tctggggttttatccagttcctgca

SEQ ID NO: 3193091 - DNA, 25 bp, Homo sapien
ctccattgttaacatcctaatccaa

SEQ ID NO: 3193092 - DNA, 25 bp, Homo sapien
gttaacatcctaatccaatcctcca

SEQ ID NO: 3193093 - DNA, 25 bp, Homo sapien
tccatccttgttcacttcagggctg

SEQ ID NO: 3193094 - DNA, 25 bp, Homo sapien
ggctgcaaaccttgaaaccagttaa

SEQ ID NO: 3193095 - DNA, 25 bp, Homo sapien
tcaccttttcaatgttggcggcctc

SEQ ID NO: 3193096 - DNA, 25 bp, Homo sapien
ttccatcaccttttcaatgttggcg

SEQ ID NO: 3193097 - DNA, 25 bp, Homo sapien
catcaccttttcaatgttggcggcc

SEQ ID NO: 3193098 - DNA, 25 bp, Homo sapien
ccttttcaatgttggcggcctctgg

SEQ ID NO: 3193099 - DNA, 25 bp, Homo sapien
cattgcattttatgtacaacttgat

SEQ ID NO: 3193100 - DNA, 25 bp, Homo sapien
acttgatatagagaataacaattca

SEQ ID NO: 3193101 - DNA, 25 bp, Homo sapien
aaagtgagtaagaggcacagcagat

SEQ ID NO: 3193102 - DNA, 25 bp, Homo sapien
aaaagtgagtaagaggcacagcaga

SEQ ID NO: 3193103 - DNA, 25 bp, Homo sapien
ctaaaagtgagtaagaggcacagca

SEQ ID NO: 3193104 - DNA, 25 bp, Homo sapien
taaaagtgagtaagaggcacagcag

SEQ ID NO: 3193105 - DNA, 25 bp, Homo sapien
gcagtccctactagccttaaaagag

SEQ ID NO: 3193106 - DNA, 25 bp, Homo sapien
tgagaaccacttgtctaaaacggtg

SEQ ID NO: 3193107 - DNA, 25 bp, Homo sapien
gctgactggctaaccttacgtaaag

SEQ ID NO: 3193108 - DNA, 25 bp, Homo sapien
tctctggcttatggtgcgccctaca

SEQ ID NO: 3193109 - DNA, 25 bp, Homo sapien
ttgcaggtattgatgtctatgcccc

SEQ ID NO: 3193110 - DNA, 25 bp, Homo sapien
tattgatgtctatgccccccttcag

SEQ ID NO: 3193111 - DNA, 25 bp, Homo sapien
gattgcaggtattgatgtctatgcc

SEQ ID NO: 3193112 - DNA, 25 bp, Homo sapien
ctgattgcaggtattgatgtctatg

SEQ ID NO: 3193113 - DNA, 25 bp, Homo sapien
gctttcctgtctgcatattgcaaaa

SEQ ID NO: 3193114 - DNA, 25 bp, Homo sapien
ctgtgttgctaaagttccaagttcc

SEQ ID NO: 3193115 - DNA, 25 bp, Homo sapien
ccagtttgcgggacttgctttcctg

SEQ ID NO: 3193116 - DNA, 25 bp, Homo sapien
tcaaatttcctgtgttgctaaagtt

SEQ ID NO: 3193117 - DNA, 25 bp, Homo sapien
cacttcatccatagcggagtcccgt

SEQ ID NO: 3193118 - DNA, 25 bp, Homo sapien
gatcttttctccctgtctagcccca

SEQ ID NO: 3193119 - DNA, 25 bp, Homo sapien
gagtcccgtctagcgccccggatgg

SEQ ID NO: 3193120 - DNA, 25 bp, Homo sapien
agcgccccggatggtagctcccttt

SEQ ID NO: 3193121 - DNA, 25 bp, Homo sapien
gccagatggagagcgttgagtccat

SEQ ID NO: 3193122 - DNA, 25 bp, Homo sapien
accagccccacgtggccttccttgg

SEQ ID NO: 3193123 - DNA, 25 bp, Homo sapien
gcagccagatggagagcgttgagtc

SEQ ID NO: 3193124 - DNA, 25 bp, Homo sapien
gccccacgtggccttccttggcagc

SEQ ID NO: 3193125 - DNA, 25 bp, Homo sapien
taatattggctccttccttaacaag

SEQ ID NO: 3193126 - DNA, 25 bp, Homo sapien
gcaatgtgaagagcggtatttccct

SEQ ID NO: 3193127 - DNA, 25 bp, Homo sapien
ttgtccagccaaagatgcaatgtga

SEQ ID NO: 3193128 - DNA, 25 bp, Homo sapien
taacaagaactttgacaacttctgc

SEQ ID NO: 3193129 - DNA, 25 bp, Homo sapien
cccaaagaatagatggaacagagct

SEQ ID NO: 3193130 - DNA, 25 bp, Homo sapien
tggaacagagctggcttattttgct

SEQ ID NO: 3193131 - DNA, 25 bp, Homo sapien
atcctccatgatatagtctgtgtta

SEQ ID NO: 3193132 - DNA, 25 bp, Homo sapien
tttgctaatatcctccatgatatag

SEQ ID NO: 3193133 - DNA, 25 bp, Homo sapien
gttcatcaatggttgacgggataaa

SEQ ID NO: 3193134 - DNA, 25 bp, Homo sapien
tgttcatcaatggttgacgggataa

SEQ ID NO: 3193135 - DNA, 25 bp, Homo sapien
gccattatcctacatgaaataactc

SEQ ID NO: 3193136 - DNA, 25 bp, Homo sapien
agtgttcatcaatggttgacgggat

SEQ ID NO: 3193137 - DNA, 25 bp, Homo sapien
caaaatgtcaacaaagagtgctaca

SEQ ID NO: 3193138 - DNA, 25 bp, Homo sapien
ggaaatcatcccaacatcacgtatg

SEQ ID NO: 3193139 - DNA, 25 bp, Homo sapien
caaatgtcccatacagcttaaatgg

SEQ ID NO: 3193140 - DNA, 25 bp, Homo sapien
tataaaagtgaccaaacaaatgtcc

SEQ ID NO: 3193141 - DNA, 25 bp, Homo sapien
tagttatagcagcatctaagcgcct

SEQ ID NO: 3193142 - DNA, 25 bp, Homo sapien
tgcggaaggctcttagttatagcag

SEQ ID NO: 3193143 - DNA, 25 bp, Homo sapien
catctaagcgcctaggcaagcaggg

SEQ ID NO: 3193144 - DNA, 25 bp, Homo sapien
tagctttgcggaaggctcttagtta

SEQ ID NO: 3193145 - DNA, 25 bp, Homo sapien
cgtgtgcacgctttgtagagtagta

SEQ ID NO: 3193146 - DNA, 25 bp, Homo sapien
tgtgcgtgtgcacgctttgtagagt

SEQ ID NO: 3193147 - DNA, 25 bp, Homo sapien
tattgtcttttaggatgtgggagtg

SEQ ID NO: 3193148 - DNA, 25 bp, Homo sapien
tattattgtcttttaggatgtggga

SEQ ID NO: 3193149 - DNA, 25 bp, Homo sapien
gctgttagatttgaggtaagaagca

SEQ ID NO: 3193150 - DNA, 25 bp, Homo sapien
tttaaccatttactaccagagtagc

SEQ ID NO: 3193151 - DNA, 25 bp, Homo sapien
caataacattggacttggataggcc

SEQ ID NO: 3193152 - DNA, 25 bp, Homo sapien
tattaacagaacttggagaccattt

SEQ ID NO: 3193153 - DNA, 25 bp, Homo sapien
cgtgcagcctattcgctgcactaac

SEQ ID NO: 3193154 - DNA, 25 bp, Homo sapien
gacatttctgaagcgagcgtcttcg

SEQ ID NO: 3193155 - DNA, 25 bp, Homo sapien
cattactgtgtgagttgtgcaattc

SEQ ID NO: 3193156 - DNA, 25 bp, Homo sapien
gaaaagaaggaacaatggtcgtgcc

SEQ ID NO: 3193157 - DNA, 25 bp, Homo sapien
tatcaaccctctgtagtaaatacta

SEQ ID NO: 3193158 - DNA, 25 bp, Homo sapien
gaatggagtcgctaagaggttaagt

SEQ ID NO: 3193159 - DNA, 25 bp, Homo sapien
cacaaatagtggattaatgaaacat

SEQ ID NO: 3193160 - DNA, 25 bp, Homo sapien
aaagattgtacccagttatgttcag

SEQ ID NO: 3193161 - DNA, 25 bp, Homo sapien
tgtgttttctcaacagtcgtcagaa

SEQ ID NO: 3193162 - DNA, 25 bp, Homo sapien
aattaaaacatgcattctgacacaa

SEQ ID NO: 3193163 - DNA, 25 bp, Homo sapien
tcactccatgtctggtattaacagt

SEQ ID NO: 3193164 - DNA, 25 bp, Homo sapien
caaatatactgacacattccaaggg

SEQ ID NO: 3193165 - DNA, 25 bp, Homo sapien
gcagcgttagaagctgagaaaggca

SEQ ID NO: 3193166 - DNA, 25 bp, Homo sapien
aagaaaagggattctcacctagagc

SEQ ID NO: 3193167 - DNA, 25 bp, Homo sapien
tggattatccaaacaggctctatgt

SEQ ID NO: 3193168 - DNA, 25 bp, Homo sapien
gggccgtgatccaagaatgcagcgt

SEQ ID NO: 3193169 - DNA, 25 bp, Homo sapien
attgtataagtgtggaaacattatt

SEQ ID NO: 3193170 - DNA, 25 bp, Homo sapien
acattgtataagtgtggaaacatta

SEQ ID NO: 3193171 - DNA, 25 bp, Homo sapien
cattgtataagtgtggaaacattat

SEQ ID NO: 3193172 - DNA, 25 bp, Homo sapien
ctctgtagcagtgctctgattagct

SEQ ID NO: 3193173 - DNA, 25 bp, Homo sapien
tagcagtgctctgattagctccatt

SEQ ID NO: 3193174 - DNA, 25 bp, Homo sapien
agtgctctgattagctccattttcc

SEQ ID NO: 3193175 - DNA, 25 bp, Homo sapien
tgtagcagtgctctgattagctcca

SEQ ID NO: 3193176 - DNA, 25 bp, Homo sapien
catggtaatcatggacagaactagt

SEQ ID NO: 3193177 - DNA, 25 bp, Homo sapien
gctctgcctgaagatattcccatgg

SEQ ID NO: 3193178 - DNA, 25 bp, Homo sapien
gatattcccatggtaatcatggaca

SEQ ID NO: 3193179 - DNA, 25 bp, Homo sapien
gcctgaagatattcccatggtaatc

SEQ ID NO: 3193180 - DNA, 25 bp, Homo sapien
ggtgtcgtctttcctagcggcaata

SEQ ID NO: 3193181 - DNA, 25 bp, Homo sapien
gcaatatgcagagctggcagcctca

SEQ ID NO: 3193182 - DNA, 25 bp, Homo sapien
ccacagctagaggagtaaagccatc

SEQ ID NO: 3193183 - DNA, 25 bp, Homo sapien
cagcattgtggtcattctgaagcag

SEQ ID NO: 3193184 - DNA, 25 bp, Homo sapien
ccccaggaggagtctggcagccaaa

SEQ ID NO: 3193185 - DNA, 25 bp, Homo sapien
tcctttccacaaatgtgttcagctt

SEQ ID NO: 3193186 - DNA, 25 bp, Homo sapien
ggcagccaaagagttcctttccaca

SEQ ID NO: 3193187 - DNA, 25 bp, Homo sapien
gagtctggcagccaaagagttcctt

SEQ ID NO: 3193188 - DNA, 25 bp, Homo sapien
catttccgtaatgtgcagctatgtg

SEQ ID NO: 3193189 - DNA, 25 bp, Homo sapien
ccggtttagaagaagagttgccacg

SEQ ID NO: 3193190 - DNA, 25 bp, Homo sapien
gagttgccacgttgacatttccgta

SEQ ID NO: 3193191 - DNA, 25 bp, Homo sapien
cgtaatgtgcagctatgtgcaaagg

SEQ ID NO: 3193192 - DNA, 25 bp, Homo sapien
ctatctagaatgagaaactatttca

SEQ ID NO: 3193193 - DNA, 25 bp, Homo sapien
gccacatgcagaggagtgattccat

SEQ ID NO: 3193194 - DNA, 25 bp, Homo sapien
ccacatgcagaggagtgattccatt

SEQ ID NO: 3193195 - DNA, 25 bp, Homo sapien
tctgaccgcctcgatccagtaagag

SEQ ID NO: 3193196 - DNA, 25 bp, Homo sapien
ctcgatccagtaagagcttcaccat

SEQ ID NO: 3193197 - DNA, 25 bp, Homo sapien
ttttggcatcgatctgaccgcctcg

SEQ ID NO: 3193198 - DNA, 25 bp, Homo sapien
cctagttttggcatcgatctgaccg

SEQ ID NO: 3193199 - DNA, 25 bp, Homo sapien
tgtgcatccttaagacattggccaa

SEQ ID NO: 3193200 - DNA, 25 bp, Homo sapien
tatttgctgtatctaaaggctgcac

SEQ ID NO: 3193201 - DNA, 25 bp, Homo sapien
cgtatcttcagggttcacagcacca

SEQ ID NO: 3193202 - DNA, 25 bp, Homo sapien
gcaccaagtaggaactcaatagtta

SEQ ID NO: 3193203 - DNA, 25 bp, Homo sapien
tgaattctatttcccgtaatcccta

SEQ ID NO: 3193204 - DNA, 25 bp, Homo sapien
tttttgtgacagtgagttagttctc

SEQ ID NO: 3193205 - DNA, 25 bp, Homo sapien
ggttaccctcatgctatttttgtga

SEQ ID NO: 3193206 - DNA, 25 bp, Homo sapien
tcaatgttttgatttaggcgtcacc

SEQ ID NO: 3193207 - DNA, 25 bp, Homo sapien
caacagaagttccaccacttggtca

SEQ ID NO: 3193208 - DNA, 25 bp, Homo sapien
cacttcgtgcagcacagtgaagtgg

SEQ ID NO: 3193209 - DNA, 25 bp, Homo sapien
taactgaatcaggagggcggattcc

SEQ ID NO: 3193210 - DNA, 25 bp, Homo sapien
ccataattcccttgtgttgcgagag

SEQ ID NO: 3193211 - DNA, 25 bp, Homo sapien
ggagagcggtatcccctcactctaa

SEQ ID NO: 3193212 - DNA, 25 bp, Homo sapien
tctttatcagtagcgtgaaacggac

SEQ ID NO: 3193213 - DNA, 25 bp, Homo sapien
aagtacagcaaagttgattcttgat

SEQ ID NO: 3193214 - DNA, 25 bp, Homo sapien
aaagtacagcaaagttgattcttga

SEQ ID NO: 3193215 - DNA, 25 bp, Homo sapien
caaagtacagcaaagttgattcttg

SEQ ID NO: 3193216 - DNA, 25 bp, Homo sapien
agtacagcaaagttgattcttgatc

SEQ ID NO: 3193217 - DNA, 25 bp, Homo sapien
tgacatcatcaacaggtgccttgtg

SEQ ID NO: 3193218 - DNA, 25 bp, Homo sapien
gagtttggttacacggtagtggcca

SEQ ID NO: 3193219 - DNA, 25 bp, Homo sapien
gtgcttcacacattccacgtggtct

SEQ ID NO: 3193220 - DNA, 25 bp, Homo sapien
ggctctggcgttcggattggctctc

SEQ ID NO: 3193221 - DNA, 25 bp, Homo sapien
taaaatgctccctgaagccgtaaca

SEQ ID NO: 3193222 - DNA, 25 bp, Homo sapien
tttgggaattaggacacaagaggca

SEQ ID NO: 3193223 - DNA, 25 bp, Homo sapien
catatctgtaaccttgcattgctgg

SEQ ID NO: 3193224 - DNA, 25 bp, Homo sapien
cataaagctgctctagggacagcct

SEQ ID NO: 3193225 - DNA, 25 bp, Homo sapien
caatgtgcagtggagtaaaaccatt

SEQ ID NO: 3193226 - DNA, 25 bp, Homo sapien
ctctgttatagcttggattgaagcc

SEQ ID NO: 3193227 - DNA, 25 bp, Homo sapien
agcttggattgaagccccatatttc

SEQ ID NO: 3193228 - DNA, 25 bp, Homo sapien
cagttccatgactttgatgcggttt

SEQ ID NO: 3193229 - DNA, 25 bp, Homo sapien
agccacatgtattggtgtgaggcca

SEQ ID NO: 3193230 - DNA, 25 bp, Homo sapien
aggaggacaatgttcaagtggccca

SEQ ID NO: 3193231 - DNA, 25 bp, Homo sapien
ccacatgtattggtgtgaggccaga

SEQ ID NO: 3193232 - DNA, 25 bp, Homo sapien
acaatgttcaagtggcccatgaagg

SEQ ID NO: 3193233 - DNA, 25 bp, Homo sapien
ctatccaggttcttttcagtgaagt

SEQ ID NO: 3193234 - DNA, 25 bp, Homo sapien
cctatccaggttcttttcagtgaag

SEQ ID NO: 3193235 - DNA, 25 bp, Homo sapien
tatccaggttcttttcagtgaagtt

SEQ ID NO: 3193236 - DNA, 25 bp, Homo sapien
ggcagttcggcattctaagtttcaa

SEQ ID NO: 3193237 - DNA, 25 bp, Homo sapien
taaaactgactctgctgacagggct

SEQ ID NO: 3193238 - DNA, 25 bp, Homo sapien
caagagaatgggtatgctcatgtcc

SEQ ID NO: 3193239 - DNA, 25 bp, Homo sapien
tacgtgattgagttactggtacacc

SEQ ID NO: 3193240 - DNA, 25 bp, Homo sapien
gaaatttgatttgcccaggaggtcc

SEQ ID NO: 3193241 - DNA, 25 bp, Homo sapien
tagatgctgaagatcaacacgttgc

SEQ ID NO: 3193242 - DNA, 25 bp, Homo sapien
gaggtaggccatgcatcatgcctca

SEQ ID NO: 3193243 - DNA, 25 bp, Homo sapien
gaaggcagggtttcattcactcaag

SEQ ID NO: 3193244 - DNA, 25 bp, Homo sapien
gctctggcatcaacaagggcaccat

SEQ ID NO: 3193245 - DNA, 25 bp, Homo sapien
catttctcaggaggcatcggaccac

SEQ ID NO: 3193246 - DNA, 25 bp, Homo sapien
ggaggcatcggaccacttccacctg

SEQ ID NO: 3193247 - DNA, 25 bp, Homo sapien
tgccatgtgtagtgccgtctcacca

SEQ ID NO: 3193248 - DNA, 25 bp, Homo sapien
caagctattagaaacaggacaagtc

SEQ ID NO: 3193249 - DNA, 25 bp, Homo sapien
cactaaaacttggagaataacttga

SEQ ID NO: 3193250 - DNA, 25 bp, Homo sapien
ggacaagtctgatcaagcaatcttc

SEQ ID NO: 3193251 - DNA, 25 bp, Homo sapien
tgtcagtgcaaaagttaaccaaacc

SEQ ID NO: 3193252 - DNA, 25 bp, Homo sapien
caagtaaaaagttagtgccgggcag

SEQ ID NO: 3193253 - DNA, 25 bp, Homo sapien
ttggaatctctaggaaccccaccca

SEQ ID NO: 3193254 - DNA, 25 bp, Homo sapien
aaatcattactgctttaaccatggc

SEQ ID NO: 3193255 - DNA, 25 bp, Homo sapien
tttgctacagcagtgaccctgttgg

SEQ ID NO: 3193256 - DNA, 25 bp, Homo sapien
cttacccaggcgggaggcaatatgt

SEQ ID NO: 3193257 - DNA, 25 bp, Homo sapien
acccaggcgggaggcaatatgtaaa

SEQ ID NO: 3193258 - DNA, 25 bp, Homo sapien
ggcaatatgtaaaggtgtctgttcc

SEQ ID NO: 3193259 - DNA, 25 bp, Homo sapien
caatatgtaaaggtgtctgttcctc

SEQ ID NO: 3193260 - DNA, 25 bp, Homo sapien
cccatttgtagtggccgcatctgga

SEQ ID NO: 3193261 - DNA, 25 bp, Homo sapien
gtagaagcagctggacaatttctgt

SEQ ID NO: 3193262 - DNA, 25 bp, Homo sapien
tagctaaggagtgggctgctcctgc

SEQ ID NO: 3193263 - DNA, 25 bp, Homo sapien
cctgcttccaataggactgatgcca

SEQ ID NO: 3193264 - DNA, 25 bp, Homo sapien
tagtgggctgctcctacttacaaga

SEQ ID NO: 3193265 - DNA, 25 bp, Homo sapien
cagataagccataacagctagtggg

SEQ ID NO: 3193266 - DNA, 25 bp, Homo sapien
cagccataggcaaccaggtaagtca

SEQ ID NO: 3193267 - DNA, 25 bp, Homo sapien
gaaaaattactctgccctgtcatga

SEQ ID NO: 3193268 - DNA, 25 bp, Homo sapien
gcgttgcaagagaagttttgccaca

SEQ ID NO: 3193269 - DNA, 25 bp, Homo sapien
ctacatgcaggggagtaaaaccctt

SEQ ID NO: 3193270 - DNA, 25 bp, Homo sapien
caggcttccatacttggctgctaca

SEQ ID NO: 3193271 - DNA, 25 bp, Homo sapien
cagaatctgcggcagcacggcgttg

SEQ ID NO: 3193272 - DNA, 25 bp, Homo sapien
tctccagtaacagcagcgccacctt

SEQ ID NO: 3193273 - DNA, 25 bp, Homo sapien
accttctggttgtcataatgagcag

SEQ ID NO: 3193274 - DNA, 25 bp, Homo sapien
cttctggttgtcataatgagcagca

SEQ ID NO: 3193275 - DNA, 25 bp, Homo sapien
tggttgtcataatgagcagcaacat

SEQ ID NO: 3193276 - DNA, 25 bp, Homo sapien
gatgaagggctcatgttcattgaca

SEQ ID NO: 3193277 - DNA, 25 bp, Homo sapien
gagccctctaggagtggccccaaag

SEQ ID NO: 3193278 - DNA, 25 bp, Homo sapien
gagtggccccaaagatgaagggctc

SEQ ID NO: 3193279 - DNA, 25 bp, Homo sapien
catctggagccctctaggagtggcc

SEQ ID NO: 3193280 - DNA, 25 bp, Homo sapien
tcttggcagcaatatgtaacggagt

SEQ ID NO: 3193281 - DNA, 25 bp, Homo sapien
tctgctccatagttcaggagtgtgg

SEQ ID NO: 3193282 - DNA, 25 bp, Homo sapien
tattggctcccttatccagaagcaa

SEQ ID NO: 3193283 - DNA, 25 bp, Homo sapien
gagtgtggaagctatctgcatttga

SEQ ID NO: 3193284 - DNA, 25 bp, Homo sapien
tgatcagctccatgcttggtgagaa

SEQ ID NO: 3193285 - DNA, 25 bp, Homo sapien
caaggtgtaaggatgtgagtccact

SEQ ID NO: 3193286 - DNA, 25 bp, Homo sapien
ttcctgggctgcaaggtgtaaggat

SEQ ID NO: 3193287 - DNA, 25 bp, Homo sapien
gcatcctgatcagctccatgcttgg

SEQ ID NO: 3193288 - DNA, 25 bp, Homo sapien
cttggtttttgcgttaacatttgct

SEQ ID NO: 3193289 - DNA, 25 bp, Homo sapien
tttttgcgttaacatttgctccctg

SEQ ID NO: 3193290 - DNA, 25 bp, Homo sapien
ttgcgttaacatttgctccctgctt

SEQ ID NO: 3193291 - DNA, 25 bp, Homo sapien
gacaggccacaattaaaggtgtgta

SEQ ID NO: 3193292 - DNA, 25 bp, Homo sapien
ggcccatctggctaggagctctaga

SEQ ID NO: 3193293 - DNA, 25 bp, Homo sapien
tcttgccctcaatagatcagtggac

SEQ ID NO: 3193294 - DNA, 25 bp, Homo sapien
ccaggtctggttcgtcccaagttgc

SEQ ID NO: 3193295 - DNA, 25 bp, Homo sapien
ctttacctgaaatccccagtgagga

SEQ ID NO: 3193296 - DNA, 25 bp, Homo sapien
tgtctgcccataggaacatgcccac

SEQ ID NO: 3193297 - DNA, 25 bp, Homo sapien
cctgggctctaagttctgagtggcc

SEQ ID NO: 3193298 - DNA, 25 bp, Homo sapien
aagtaatttctccacaatcgggcga

SEQ ID NO: 3193299 - DNA, 25 bp, Homo sapien
catgcccacatgtatcagggttacc

SEQ ID NO: 3193300 - DNA, 25 bp, Homo sapien
ggtggcgttgggcttggccccatgc

SEQ ID NO: 3193301 - DNA, 25 bp, Homo sapien
accctgctgagcggcctggtgcaaa

SEQ ID NO: 3193302 - DNA, 25 bp, Homo sapien
ggcgttgggcttggccccatgctgg

SEQ ID NO: 3193303 - DNA, 25 bp, Homo sapien
cctggtgcaaaggcgtgtagccgtt

SEQ ID NO: 3193304 - DNA, 25 bp, Homo sapien
taagatgttaccatcgggaacacgg

SEQ ID NO: 3193305 - DNA, 25 bp, Homo sapien
ataacacaggcaagcaattcgggct

SEQ ID NO: 3193306 - DNA, 25 bp, Homo sapien
gaagctcactgtgcagcaaaataac

SEQ ID NO: 3193307 - DNA, 25 bp, Homo sapien
taacatatttagctacagctgtgca

SEQ ID NO: 3193308 - DNA, 25 bp, Homo sapien
cacggagatgtagcccagacgctta

SEQ ID NO: 3193309 - DNA, 25 bp, Homo sapien
cagacgcttagcaatcgccaaggca

SEQ ID NO: 3193310 - DNA, 25 bp, Homo sapien
tagcaatcgccaaggcagtgttgcc

SEQ ID NO: 3193311 - DNA, 25 bp, Homo sapien
acaaccttcagggtgtcgaccacgg

SEQ ID NO: 3193312 - DNA, 25 bp, Homo sapien
tggagtgtgttaccgctttgccagc

SEQ ID NO: 3193313 - DNA, 25 bp, Homo sapien
agtttgcagtggagtgtgttaccgc

SEQ ID NO: 3193314 - DNA, 25 bp, Homo sapien
ctaaggtaagtttgcagtggagtgt

SEQ ID NO: 3193315 - DNA, 25 bp, Homo sapien
ctttgccagcggtaggtgtcacaca

SEQ ID NO: 3193316 - DNA, 25 bp, Homo sapien
gagcttctcatgtcgtactgttcta

SEQ ID NO: 3193317 - DNA, 25 bp, Homo sapien
ccaagcatttcaaactctatatgca

SEQ ID NO: 3193318 - DNA, 25 bp, Homo sapien
ttcaaactctatatgcatttttagt

SEQ ID NO: 3193319 - DNA, 25 bp, Homo sapien
tggagcatttactagaacctccttc

SEQ ID NO: 3193320 - DNA, 25 bp, Homo sapien
caattagcggaaggatgagtcatat

SEQ ID NO: 3193321 - DNA, 25 bp, Homo sapien
cagtaatttatggtctgcataccaa

SEQ ID NO: 3193322 - DNA, 25 bp, Homo sapien
aatcccaggagaatgctaaaatgtc

SEQ ID NO: 3193323 - DNA, 25 bp, Homo sapien
tattccctgctgtatctcacaaagt

SEQ ID NO: 3193324 - DNA, 25 bp, Homo sapien
gacactaagtacaagtttaatggga

SEQ ID NO: 3193325 - DNA, 25 bp, Homo sapien
ttagtgatcttggttatgatgccac

SEQ ID NO: 3193326 - DNA, 25 bp, Homo sapien
aagccaccacagcatacttagtgat

SEQ ID NO: 3193327 - DNA, 25 bp, Homo sapien
ttttaaggccctcatccatagcttc

SEQ ID NO: 3193328 - DNA, 25 bp, Homo sapien
tacatttagtttgtgtttttctgta

SEQ ID NO: 3193329 - DNA, 25 bp, Homo sapien
ctcaggtacatttagtttgtgtttt

SEQ ID NO: 3193330 - DNA, 25 bp, Homo sapien
catttagtttgtgtttttctgtaat

SEQ ID NO: 3193331 - DNA, 25 bp, Homo sapien
cgtctcaggtacatttagtttgtgt

SEQ ID NO: 3193332 - DNA, 25 bp, Homo sapien
tcaataaagtggtcaccaaactgtt

SEQ ID NO: 3193333 - DNA, 25 bp, Homo sapien
gaatcactaagtgcctccccatcaa

SEQ ID NO: 3193334 - DNA, 25 bp, Homo sapien
tccccatcaataaagtggtcaccaa

SEQ ID NO: 3193335 - DNA, 25 bp, Homo sapien
taagtgcctccccatcaataaagtg

SEQ ID NO: 3193336 - DNA, 25 bp, Homo sapien
ttaaatctggatgctataattctgt

SEQ ID NO: 3193337 - DNA, 25 bp, Homo sapien
tataattctgttagactgaattccc

SEQ ID NO: 3193338 - DNA, 25 bp, Homo sapien
gttagactgaattcccatttctgtc

SEQ ID NO: 3193339 - DNA, 25 bp, Homo sapien
catctttggttaaatctggatgcta

SEQ ID NO: 3193340 - DNA, 25 bp, Homo sapien
tcctcagtgatagtgagtggtatat

SEQ ID NO: 3193341 - DNA, 25 bp, Homo sapien
tggtatatttaacccctgtaggaca

SEQ ID NO: 3193342 - DNA, 25 bp, Homo sapien
taggacacgggtgacaatagcatgg

SEQ ID NO: 3193343 - DNA, 25 bp, Homo sapien
taacccctgtaggacacgggtgaca

SEQ ID NO: 3193344 - DNA, 25 bp, Homo sapien
ggtaattcataccatccaggaactg

SEQ ID NO: 3193345 - DNA, 25 bp, Homo sapien
tccctccaagctgtatcgcaggtaa

SEQ ID NO: 3193346 - DNA, 25 bp, Homo sapien
cacccagttcttttaggtcctcagg

SEQ ID NO: 3193347 - DNA, 25 bp, Homo sapien
gactgctgggtagtgagtcatcacc

SEQ ID NO: 3193348 - DNA, 25 bp, Homo sapien
gctgacatcaattataagttttatg

SEQ ID NO: 3193349 - DNA, 25 bp, Homo sapien
tctggctgacatcaattataagttt

SEQ ID NO: 3193350 - DNA, 25 bp, Homo sapien
ttctggctgacatcaattataagtt

SEQ ID NO: 3193351 - DNA, 25 bp, Homo sapien
tggctgacatcaattataagtttta

SEQ ID NO: 3193352 - DNA, 25 bp, Homo sapien
tcatcataaaaaatatgttgcacat

SEQ ID NO: 3193353 - DNA, 25 bp, Homo sapien
atcatcatcataaaaaatatgttgc

SEQ ID NO: 3193354 - DNA, 25 bp, Homo sapien
atcataaaaaatatgttgcacatac

SEQ ID NO: 3193355 - DNA, 25 bp, Homo sapien
catcatcataaaaaatatgttgcac

SEQ ID NO: 3193356 - DNA, 25 bp, Homo sapien
tctgttaatacctacctgggcatgg

SEQ ID NO: 3193357 - DNA, 25 bp, Homo sapien
tatcttctccaactacacataggct

SEQ ID NO: 3193358 - DNA, 25 bp, Homo sapien
tagctcagctagttattcagttcaa

SEQ ID NO: 3193359 - DNA, 25 bp, Homo sapien
gtgttatcaaccacaggtgcagcag

SEQ ID NO: 3193360 - DNA, 25 bp, Homo sapien
ggtgactgggaatcacaactgagtc

SEQ ID NO: 3193361 - DNA, 25 bp, Homo sapien
ggaggcatggctcagagtgtgagac

SEQ ID NO: 3193362 - DNA, 25 bp, Homo sapien
catcacggcactgtccctcaggtag

SEQ ID NO: 3193363 - DNA, 25 bp, Homo sapien
acggcactgtccctcaggtaggagg

SEQ ID NO: 3193364 - DNA, 25 bp, Homo sapien
cagcttaggcgataagaattccttt

SEQ ID NO: 3193365 - DNA, 25 bp, Homo sapien
actagaagaaagagccacgttgtct

SEQ ID NO: 3193366 - DNA, 25 bp, Homo sapien
tcagtgccccagcttaggcgataag

SEQ ID NO: 3193367 - DNA, 25 bp, Homo sapien
acgttgtctaagttctcagtgcccc

SEQ ID NO: 3193368 - DNA, 25 bp, Homo sapien
tgttgtcacgttcaagacatggaga

SEQ ID NO: 3193369 - DNA, 25 bp, Homo sapien
gctgttgtcacgttcaagacatgga

SEQ ID NO: 3193370 - DNA, 25 bp, Homo sapien
ctgttgtcacgttcaagacatggag

SEQ ID NO: 3193371 - DNA, 25 bp, Homo sapien
cagtctgtggcgcttgaccagtcgg

SEQ ID NO: 3193372 - DNA, 25 bp, Homo sapien
gaaggtccaacttcgatcaggcgac

SEQ ID NO: 3193373 - DNA, 25 bp, Homo sapien
tggagcagtacatttccgaggtgga

SEQ ID NO: 3193374 - DNA, 25 bp, Homo sapien
tgattcggagcccattgtgtctgca

SEQ ID NO: 3193375 - DNA, 25 bp, Homo sapien
attgtcttccacagaaccccagcgt

SEQ ID NO: 3193376 - DNA, 25 bp, Homo sapien
accgagacccagagtgtacaatgga

SEQ ID NO: 3193377 - DNA, 25 bp, Homo sapien
ttcacactgcgtttggttctgcccc

SEQ ID NO: 3193378 - DNA, 25 bp, Homo sapien
cctccattggtcacaaagagcaagg

SEQ ID NO: 3193379 - DNA, 25 bp, Homo sapien
agaatgcggctgaccaaactttctc

SEQ ID NO: 3193380 - DNA, 25 bp, Homo sapien
cccagctgaagaatgcggctgacca

SEQ ID NO: 3193381 - DNA, 25 bp, Homo sapien
caggaggccccagctgaagaatgcg

SEQ ID NO: 3193382 - DNA, 25 bp, Homo sapien
tgaagaatgcggctgaccaaacttt

SEQ ID NO: 3193383 - DNA, 25 bp, Homo sapien
attctcactgcgcaggaccaccagt

SEQ ID NO: 3193384 - DNA, 25 bp, Homo sapien
gtgagggatctccacgatcacaggc

SEQ ID NO: 3193385 - DNA, 25 bp, Homo sapien
cctttcctcgaagggccgcaaagtg

SEQ ID NO: 3193386 - DNA, 25 bp, Homo sapien
tgtccccattctcactgcgcaggac

SEQ ID NO: 3193387 - DNA, 25 bp, Homo sapien
catccatgccgttaagaatttcatt

SEQ ID NO: 3193388 - DNA, 25 bp, Homo sapien
cactgcaaagtactgtgggaagtct

SEQ ID NO: 3193389 - DNA, 25 bp, Homo sapien
tgtttgatacgagacaccactgcaa

SEQ ID NO: 3193390 - DNA, 25 bp, Homo sapien
tacgcggatccgcttggtgagtgcc

SEQ ID NO: 3193391 - DNA, 25 bp, Homo sapien
tccttctgggccaatcagattgctg

SEQ ID NO: 3193392 - DNA, 25 bp, Homo sapien
ggtaacagtccttgacaaagctaat

SEQ ID NO: 3193393 - DNA, 25 bp, Homo sapien
cattaatgctaccttcctttttggt

SEQ ID NO: 3193394 - DNA, 25 bp, Homo sapien
ggttaattgtccaaatataagttga

SEQ ID NO: 3193395 - DNA, 25 bp, Homo sapien
tcattagaatacaatcctgttagga

SEQ ID NO: 3193396 - DNA, 25 bp, Homo sapien
tgttgcctaggatcttcttaaccag

SEQ ID NO: 3193397 - DNA, 25 bp, Homo sapien
ccaaagtgactatagggctgaaggt

SEQ ID NO: 3193398 - DNA, 25 bp, Homo sapien
taatcttaaggttggtgcatctccc

SEQ ID NO: 3193399 - DNA, 25 bp, Homo sapien
tcttaaccagctcactgtgcatagg

SEQ ID NO: 3193400 - DNA, 25 bp, Homo sapien
ctggcagacacgtttgttgtaaagg

SEQ ID NO: 3193401 - DNA, 25 bp, Homo sapien
ggcagacacgtttgttgtaaaggaa

SEQ ID NO: 3193402 - DNA, 25 bp, Homo sapien
taatggcgtagttcctgtaatatct

SEQ ID NO: 3193403 - DNA, 25 bp, Homo sapien
acaaatgttaatggcgtagttcctg

SEQ ID NO: 3193404 - DNA, 25 bp, Homo sapien
cttgtgatgcaaaagtaacggattc

SEQ ID NO: 3193405 - DNA, 25 bp, Homo sapien
gatctgtcgacaatctatcagccag

SEQ ID NO: 3193406 - DNA, 25 bp, Homo sapien
caaatttggccatataaggtacgca

SEQ ID NO: 3193407 - DNA, 25 bp, Homo sapien
catcagtcatgcagaaacacctcaa

SEQ ID NO: 3193408 - DNA, 25 bp, Homo sapien
tagttaatggtaccaagttgccgaa

SEQ ID NO: 3193409 - DNA, 25 bp, Homo sapien
aaactgaatatatgatgctggccac

SEQ ID NO: 3193410 - DNA, 25 bp, Homo sapien
caatcaacgtagatgggttttcctt

SEQ ID NO: 3193411 - DNA, 25 bp, Homo sapien
cttgacaaatagaggaagtctattt

SEQ ID NO: 3193412 - DNA, 25 bp, Homo sapien
tatagctgtctatgttaaatggatc

SEQ ID NO: 3193413 - DNA, 25 bp, Homo sapien
ttaaatggatccattacctctgagc

SEQ ID NO: 3193414 - DNA, 25 bp, Homo sapien
gatgtcaaacattagcttaattata

SEQ ID NO: 3193415 - DNA, 25 bp, Homo sapien
cattacctctgagcagttactgctt

SEQ ID NO: 3193416 - DNA, 25 bp, Homo sapien
cggcaaagtgatgtttaagttgcaa

SEQ ID NO: 3193417 - DNA, 25 bp, Homo sapien
ccttcataaatgatagtcgtccgca

SEQ ID NO: 3193418 - DNA, 25 bp, Homo sapien
gttgcaaatagcttgatgcaccagg

SEQ ID NO: 3193419 - DNA, 25 bp, Homo sapien
caccaggcctctcgtggattttggc

SEQ ID NO: 3193420 - DNA, 25 bp, Homo sapien
gaaatcagccaaagctcagtcatct

SEQ ID NO: 3193421 - DNA, 25 bp, Homo sapien
gtggcttgcccgcagcagtacatat

SEQ ID NO: 3193422 - DNA, 25 bp, Homo sapien
tgacaacttctgcatccacctatag

SEQ ID NO: 3193423 - DNA, 25 bp, Homo sapien
tatagattgccatgtgagagcttcc

SEQ ID NO: 3193424 - DNA, 25 bp, Homo sapien
tattttcaatgtacaatgtctggga

SEQ ID NO: 3193425 - DNA, 25 bp, Homo sapien
tggactatcacagcattaatagctg

SEQ ID NO: 3193426 - DNA, 25 bp, Homo sapien
gccaagagctactaaatactaaggt

SEQ ID NO: 3193427 - DNA, 25 bp, Homo sapien
ttagaaaattgtactggactatcac

SEQ ID NO: 3193428 - DNA, 25 bp, Homo sapien
gaccttaaatgaactggatggcatt

SEQ ID NO: 3193429 - DNA, 25 bp, Homo sapien
tccgccccaagatgccatgcaagat

SEQ ID NO: 3193430 - DNA, 25 bp, Homo sapien
taattccagatactaggtcaccacg

SEQ ID NO: 3193431 - DNA, 25 bp, Homo sapien
tttcaacaagcatcaacaggcaagc

SEQ ID NO: 3193432 - DNA, 25 bp, Homo sapien
tcttcctcctgttcttgatctgact

SEQ ID NO: 3193433 - DNA, 25 bp, Homo sapien
ctcctgttcttgatctgactctgat

SEQ ID NO: 3193434 - DNA, 25 bp, Homo sapien
cctgttcttgatctgactctgattc

SEQ ID NO: 3193435 - DNA, 25 bp, Homo sapien
ttcctcctgttcttgatctgactct

SEQ ID NO: 3193436 - DNA, 25 bp, Homo sapien
ggtagccagctttcaaacaaactca

SEQ ID NO: 3193437 - DNA, 25 bp, Homo sapien
gagctctctacagaagtcactattg

SEQ ID NO: 3193438 - DNA, 25 bp, Homo sapien
taacagcaataccagggttaacaag

SEQ ID NO: 3193439 - DNA, 25 bp, Homo sapien
tagacagtatcacttttgcaggtgt

SEQ ID NO: 3193440 - DNA, 25 bp, Homo sapien
ttaaaaaagccctcagatcattgtg

SEQ ID NO: 3193441 - DNA, 25 bp, Homo sapien
ggccacatgagcatattaaacatgg

SEQ ID NO: 3193442 - DNA, 25 bp, Homo sapien
tcttactagtttgtatcaggagagc

SEQ ID NO: 3193443 - DNA, 25 bp, Homo sapien
taatgctttaacatgagggtaagcc

SEQ ID NO: 3193444 - DNA, 25 bp, Homo sapien
gaacctgccttatcagacacatctg

SEQ ID NO: 3193445 - DNA, 25 bp, Homo sapien
gacttgctaggacaggaacttcatt

SEQ ID NO: 3193446 - DNA, 25 bp, Homo sapien
tctgtggtcaagatggcggtcattt

SEQ ID NO: 3193447 - DNA, 25 bp, Homo sapien
cagaccgagagctctgcacactgct

SEQ ID NO: 3193448 - DNA, 25 bp, Homo sapien
caggtattcagatcatcagtaaggt

SEQ ID NO: 3193449 - DNA, 25 bp, Homo sapien
tccctgccttatcttgaactgtctg

SEQ ID NO: 3193450 - DNA, 25 bp, Homo sapien
ctgtgtctcatctgggggtatgtct

SEQ ID NO: 3193451 - DNA, 25 bp, Homo sapien
gcacacaggtattcagatcatcagt

SEQ ID NO: 3193452 - DNA, 25 bp, Homo sapien
tggcttctttattcccaagcttggt

SEQ ID NO: 3193453 - DNA, 25 bp, Homo sapien
ctggcttctttattcccaagcttgg

SEQ ID NO: 3193454 - DNA, 25 bp, Homo sapien
cacctaatgactcttctgaactacc

SEQ ID NO: 3193455 - DNA, 25 bp, Homo sapien
tctctgcactagcttgtaaaccttc

SEQ ID NO: 3193456 - DNA, 25 bp, Homo sapien
ttgtcctttatggaaccaatgggag

SEQ ID NO: 3193457 - DNA, 25 bp, Homo sapien
ccaatgggagtttcttctatcaaag

SEQ ID NO: 3193458 - DNA, 25 bp, Homo sapien
tcatcagctcccgaacagacatggt

SEQ ID NO: 3193459 - DNA, 25 bp, Homo sapien
cagttttactcgatgatgacgcagg

SEQ ID NO: 3193460 - DNA, 25 bp, Homo sapien
tgacttcagagagggtgacgcagct

SEQ ID NO: 3193461 - DNA, 25 bp, Homo sapien
taatgtctttggtcgtgggatgctc

SEQ ID NO: 3193462 - DNA, 25 bp, Homo sapien
ggtacgttgaccttcatcacaggct

SEQ ID NO: 3193463 - DNA, 25 bp, Homo sapien
tgtgggctgaactaccaaaggtacg

SEQ ID NO: 3193464 - DNA, 25 bp, Homo sapien
taatgctacactacagctgcctgtg

SEQ ID NO: 3193465 - DNA, 25 bp, Homo sapien
gaaaactctcagtagaggtctctga

SEQ ID NO: 3193466 - DNA, 25 bp, Homo sapien
gaggacttcgctatctcggctaggg

SEQ ID NO: 3193467 - DNA, 25 bp, Homo sapien
cactggttctggtaaaaggcctgag

SEQ ID NO: 3193468 - DNA, 25 bp, Homo sapien
tcggctagggagtgcaagttctaac

SEQ ID NO: 3193469 - DNA, 25 bp, Homo sapien
tgccatcagggtctcggagtagccg

SEQ ID NO: 3193470 - DNA, 25 bp, Homo sapien
ggctggaattgtacttcttctggac

SEQ ID NO: 3193471 - DNA, 25 bp, Homo sapien
agtatattgtttggaaacgacaggc

SEQ ID NO: 3193472 - DNA, 25 bp, Homo sapien
ggtcttcagctaaatgggattcaga

SEQ ID NO: 3193473 - DNA, 25 bp, Homo sapien
tgtttggaaacgacaggctggaatt

SEQ ID NO: 3193474 - DNA, 25 bp, Homo sapien
tcagctaggtcagacacgggaacat

SEQ ID NO: 3193475 - DNA, 25 bp, Homo sapien
gttccactagaggagcttgccacta

SEQ ID NO: 3193476 - DNA, 25 bp, Homo sapien
caccagtcggactctgtagacctga

SEQ ID NO: 3193477 - DNA, 25 bp, Homo sapien
tgccactacaacgtcttcaacaggg

SEQ ID NO: 3193478 - DNA, 25 bp, Homo sapien
tcatatcaatggcaccacttcgggt

SEQ ID NO: 3193479 - DNA, 25 bp, Homo sapien
tcaaaggcttcatcgtcttcccgaa

SEQ ID NO: 3193480 - DNA, 25 bp, Homo sapien
catctggaagtaagtctgcctcatc

SEQ ID NO: 3193481 - DNA, 25 bp, Homo sapien
gctagtgattcagctgatgtctcca

SEQ ID NO: 3193482 - DNA, 25 bp, Homo sapien
ccatttgggagttaagttgagcatc

SEQ ID NO: 3193483 - DNA, 25 bp, Homo sapien
ttaagttgagcatccgaagcaggta

SEQ ID NO: 3193484 - DNA, 25 bp, Homo sapien
tgagcatccgaagcaggtatttcct

SEQ ID NO: 3193485 - DNA, 25 bp, Homo sapien
atccccatttgggagttaagttgag

SEQ ID NO: 3193486 - DNA, 25 bp, Homo sapien
ggaggtatatcacccgtttgcacgg

SEQ ID NO: 3193487 - DNA, 25 bp, Homo sapien
gagaggaggtatatcacccgtttgc

SEQ ID NO: 3193488 - DNA, 25 bp, Homo sapien
gtatatcacccgtttgcacggtggg

SEQ ID NO: 3193489 - DNA, 25 bp, Homo sapien
agagagaggaggtatatcacccgtt

SEQ ID NO: 3193490 - DNA, 25 bp, Homo sapien
ctggacttgtacagctggttcagaa

SEQ ID NO: 3193491 - DNA, 25 bp, Homo sapien
gctggttcagaagagtcggggcagg

SEQ ID NO: 3193492 - DNA, 25 bp, Homo sapien
gttcagaagagtcggggcaggatat

SEQ ID NO: 3193493 - DNA, 25 bp, Homo sapien
ggacttgtacagctggttcagaaga

SEQ ID NO: 3193494 - DNA, 25 bp, Homo sapien
ccatgggtgcagtaggaatctcgat

SEQ ID NO: 3193495 - DNA, 25 bp, Homo sapien
gaagtgggcatagtccttacaggaa

SEQ ID NO: 3193496 - DNA, 25 bp, Homo sapien
gctcttaactggcaatcgggatgta

SEQ ID NO: 3193497 - DNA, 25 bp, Homo sapien
tctattatctggtgcgatgcttgcc

SEQ ID NO: 3193498 - DNA, 25 bp, Homo sapien
ctatccactaatttggaagcctcat

SEQ ID NO: 3193499 - DNA, 25 bp, Homo sapien
caaagaattctatggaatttctgta

SEQ ID NO: 3193500 - DNA, 25 bp, Homo sapien
ggaagcctcatcactaatctcctca

SEQ ID NO: 3193501 - DNA, 25 bp, Homo sapien
taaaggtcaaagaaatgctccttac

SEQ ID NO: 3193502 - DNA, 25 bp, Homo sapien
aactatttcctgctccctctctgac

SEQ ID NO: 3193503 - DNA, 25 bp, Homo sapien
actttcatcgtctgaaactatttcc

SEQ ID NO: 3193504 - DNA, 25 bp, Homo sapien
tactttcatcgtctgaaactatttc

SEQ ID NO: 3193505 - DNA, 25 bp, Homo sapien
ctgctccctctctgactgtgtcagc

SEQ ID NO: 3193506 - DNA, 25 bp, Homo sapien
gggccttgtgtcaaagatgtcctca

SEQ ID NO: 3193507 - DNA, 25 bp, Homo sapien
ctgagtgctcggtctcaacaggtgg

SEQ ID NO: 3193508 - DNA, 25 bp, Homo sapien
ttcatcagggatgcgttcaatcaga

SEQ ID NO: 3193509 - DNA, 25 bp, Homo sapien
agactcatcccaaatgggccttgtg

SEQ ID NO: 3193510 - DNA, 25 bp, Homo sapien
gacatgcgtagcacagggaatcccg

SEQ ID NO: 3193511 - DNA, 25 bp, Homo sapien
cgtagcacagggaatcccggtggct

SEQ ID NO: 3193512 - DNA, 25 bp, Homo sapien
atgcgtagcacagggaatcccggtg

SEQ ID NO: 3193513 - DNA, 25 bp, Homo sapien
ttatgacatgcgtagcacagggaat

SEQ ID NO: 3193514 - DNA, 25 bp, Homo sapien
ccatcttgttcatgaaacaccagag

SEQ ID NO: 3193515 - DNA, 25 bp, Homo sapien
gaagaccaccatcttgttcatgaaa

SEQ ID NO: 3193516 - DNA, 25 bp, Homo sapien
tgttcatgaaacaccagagaaatca

SEQ ID NO: 3193517 - DNA, 25 bp, Homo sapien
caagaagaccaccatcttgttcatg

SEQ ID NO: 3193518 - DNA, 25 bp, Homo sapien
caaggtgatcagcaatataagccag

SEQ ID NO: 3193519 - DNA, 25 bp, Homo sapien
gtgatcagcaatataagccagcctt

SEQ ID NO: 3193520 - DNA, 25 bp, Homo sapien
agccagcctttcctcgatccgttcc

SEQ ID NO: 3193521 - DNA, 25 bp, Homo sapien
tcctcgatccgttcctgctcatcct

SEQ ID NO: 3193522 - DNA, 25 bp, Homo sapien
tctctagccagtacttcaacagtgc

SEQ ID NO: 3193523 - DNA, 25 bp, Homo sapien
caattcgaatttgatgaatttgctc

SEQ ID NO: 3193524 - DNA, 25 bp, Homo sapien
caacagtgcatgactctggtcttga

SEQ ID NO: 3193525 - DNA, 25 bp, Homo sapien
gagagttgggattttcaattcgaat

SEQ ID NO: 3193526 - DNA, 25 bp, Homo sapien
ccagtgaaacaatgctaagtaaagc

SEQ ID NO: 3193527 - DNA, 25 bp, Homo sapien
gccccaaatattacaagggatatgc

SEQ ID NO: 3193528 - DNA, 25 bp, Homo sapien
cagaaggtaatgcactaccagtgaa

SEQ ID NO: 3193529 - DNA, 25 bp, Homo sapien
ggttcatacgcatatcgtgcaagag

SEQ ID NO: 3193530 - DNA, 25 bp, Homo sapien
ccattcggttgatcttggtgagaca

SEQ ID NO: 3193531 - DNA, 25 bp, Homo sapien
taactatgactgatgcgctcctgga

SEQ ID NO: 3193532 - DNA, 25 bp, Homo sapien
tgtaatggtctgttcaatttctgca

SEQ ID NO: 3193533 - DNA, 25 bp, Homo sapien
tcctggagaggttctgtgttggtct

SEQ ID NO: 3193534 - DNA, 25 bp, Homo sapien
taggagggtgatcgcaggtctcact

SEQ ID NO: 3193535 - DNA, 25 bp, Homo sapien
tcctgaaaagtggaataaccaacag

SEQ ID NO: 3193536 - DNA, 25 bp, Homo sapien
gtgcagtgcataactcctcttgaag

SEQ ID NO: 3193537 - DNA, 25 bp, Homo sapien
tcttcctctgagacgataggagggt

SEQ ID NO: 3193538 - DNA, 25 bp, Homo sapien
aggtctcaggctggttatcggcaga

SEQ ID NO: 3193539 - DNA, 25 bp, Homo sapien
tatcggcagactccactattacgag

SEQ ID NO: 3193540 - DNA, 25 bp, Homo sapien
catcgagtctttcacaggtctcagg

SEQ ID NO: 3193541 - DNA, 25 bp, Homo sapien
tattacgaggctggttttccgcgga

SEQ ID NO: 3193542 - DNA, 25 bp, Homo sapien
tccacatgggaagcttaagagaaat

SEQ ID NO: 3193543 - DNA, 25 bp, Homo sapien
tatgagaaataagggtccacatggg

SEQ ID NO: 3193544 - DNA, 25 bp, Homo sapien
ttagtagtactcattcaagccaaga

SEQ ID NO: 3193545 - DNA, 25 bp, Homo sapien
gagaaatgcctgatactcatcaaga

SEQ ID NO: 3193546 - DNA, 25 bp, Homo sapien
agttaccatcgcctcctcatctgag

SEQ ID NO: 3193547 - DNA, 25 bp, Homo sapien
agctcccctaattcctctgttagct

SEQ ID NO: 3193548 - DNA, 25 bp, Homo sapien
tgaataatcactcgccggcggacaa

SEQ ID NO: 3193549 - DNA, 25 bp, Homo sapien
gcggacaaccctggtagttaccatc

SEQ ID NO: 3193550 - DNA, 25 bp, Homo sapien
tcatcaatgtattcttcttctgtga

SEQ ID NO: 3193551 - DNA, 25 bp, Homo sapien
cacggtgtgtccatgctcatcaatg

SEQ ID NO: 3193552 - DNA, 25 bp, Homo sapien
ggtgtgtccatgctcatcaatgtat

SEQ ID NO: 3193553 - DNA, 25 bp, Homo sapien
gtgactgtttctgggggtatttcag

SEQ ID NO: 3193554 - DNA, 25 bp, Homo sapien
tggaatagccatccccttcctcgat

SEQ ID NO: 3193555 - DNA, 25 bp, Homo sapien
tgccttcagaggatacataccgcct

SEQ ID NO: 3193556 - DNA, 25 bp, Homo sapien
tctgactgctcggtgtcactcttca

SEQ ID NO: 3193557 - DNA, 25 bp, Homo sapien
tcctcgatgttgacaggttcctgtg

SEQ ID NO: 3193558 - DNA, 25 bp, Homo sapien
tgtgaggtactggacaaaatgctgg

SEQ ID NO: 3193559 - DNA, 25 bp, Homo sapien
gaaattgtgaggtactggacaaaat

SEQ ID NO: 3193560 - DNA, 25 bp, Homo sapien
ctgaaattgtgaggtactggacaaa

SEQ ID NO: 3193561 - DNA, 25 bp, Homo sapien
aattgtgaggtactggacaaaatgc

SEQ ID NO: 3193562 - DNA, 25 bp, Homo sapien
tccaagtaccacagttgttttaaca

SEQ ID NO: 3193563 - DNA, 25 bp, Homo sapien
acaactttgctgactctacggcctt

SEQ ID NO: 3193564 - DNA, 25 bp, Homo sapien
ttgctgactctacggccttccactg

SEQ ID NO: 3193565 - DNA, 25 bp, Homo sapien
gatcagtggctaaactagaatcccc

SEQ ID NO: 3193566 - DNA, 25 bp, Homo sapien
tacaaaagctgctaagcaacatcca

SEQ ID NO: 3193567 - DNA, 25 bp, Homo sapien
ttcctagaagcagacttaagtttgg

SEQ ID NO: 3193568 - DNA, 25 bp, Homo sapien
aacaaggcccaaatggtataacaca

SEQ ID NO: 3193569 - DNA, 25 bp, Homo sapien
ccattcaagattgccagttgtcaaa

SEQ ID NO: 3193570 - DNA, 25 bp, Homo sapien
aggatttcattctctactaaactgg

SEQ ID NO: 3193571 - DNA, 25 bp, Homo sapien
ctctactaaactgggtaagtggact

SEQ ID NO: 3193572 - DNA, 25 bp, Homo sapien
tttaattattgatccatcctctttc

SEQ ID NO: 3193573 - DNA, 25 bp, Homo sapien
tgtggctacctgtgtaactcaaagc

SEQ ID NO: 3193574 - DNA, 25 bp, Homo sapien
ttagggtagatgtagggattctccc

SEQ ID NO: 3193575 - DNA, 25 bp, Homo sapien
tagttggcaaagcatcaccccatgc

SEQ ID NO: 3193576 - DNA, 25 bp, Homo sapien
tattataatacaggagagtaggcag

SEQ ID NO: 3193577 - DNA, 25 bp, Homo sapien
cagttttctatcctctttagggtag

SEQ ID NO: 3193578 - DNA, 25 bp, Homo sapien
gttattggccactcacatgcagaat

SEQ ID NO: 3193579 - DNA, 25 bp, Homo sapien
caagaggatacttcagggatgatac

SEQ ID NO: 3193580 - DNA, 25 bp, Homo sapien
tatgctctctgaatctatcgacaca

SEQ ID NO: 3193581 - DNA, 25 bp, Homo sapien
gccccaggtttcagcatcgctaggt

SEQ ID NO: 3193582 - DNA, 25 bp, Homo sapien
cagaccagtgtgcctcacagtcagc

SEQ ID NO: 3193583 - DNA, 25 bp, Homo sapien
ttgtataagcgtaaaaatgtgctgc

SEQ ID NO: 3193584 - DNA, 25 bp, Homo sapien
acagtcagcccccttgtataagcgt

SEQ ID NO: 3193585 - DNA, 25 bp, Homo sapien
ccccttgtataagcgtaaaaatgtg

SEQ ID NO: 3193586 - DNA, 25 bp, Homo sapien
agtgctgttagaggaccagtgagaa

SEQ ID NO: 3193587 - DNA, 25 bp, Homo sapien
tctgtggaacagtgcccaagtttat

SEQ ID NO: 3193588 - DNA, 25 bp, Homo sapien
gcccaagtttatacatcaaatccat

SEQ ID NO: 3193589 - DNA, 25 bp, Homo sapien
cagtgagaagccagagtagatctgt

SEQ ID NO: 3193590 - DNA, 25 bp, Homo sapien
taaaatagttctgtagcatactctg

SEQ ID NO: 3193591 - DNA, 25 bp, Homo sapien
cactcttttaaattcctagctgctg

SEQ ID NO: 3193592 - DNA, 25 bp, Homo sapien
tgtgtcttttcaccgagaagctgag

SEQ ID NO: 3193593 - DNA, 25 bp, Homo sapien
tgagaagcacaattgtaacttggat

SEQ ID NO: 3193594 - DNA, 25 bp, Homo sapien
gatgttttcctaaatacgcggcagc

SEQ ID NO: 3193595 - DNA, 25 bp, Homo sapien
cagagcctgagtccataaccataca

SEQ ID NO: 3193596 - DNA, 25 bp, Homo sapien
gacgaatgtgttgtatgggccagac

SEQ ID NO: 3193597 - DNA, 25 bp, Homo sapien
tcactatacacttccaaatgcgggt

SEQ ID NO: 3193598 - DNA, 25 bp, Homo sapien
ctcccttataagactggtggttact

SEQ ID NO: 3193599 - DNA, 25 bp, Homo sapien
gatctgcccaggtctctaaggcttc

SEQ ID NO: 3193600 - DNA, 25 bp, Homo sapien
gagacaactgcttcctccggattct

SEQ ID NO: 3193601 - DNA, 25 bp, Homo sapien
tcaatatataagaaggtggctccca

SEQ ID NO: 3193602 - DNA, 25 bp, Homo sapien
cagacaagagagaattacgctcttt

SEQ ID NO: 3193603 - DNA, 25 bp, Homo sapien
cgctcttttcactgccagagggcag

SEQ ID NO: 3193604 - DNA, 25 bp, Homo sapien
caagagagaattacgctcttttcac

SEQ ID NO: 3193605 - DNA, 25 bp, Homo sapien
gaattacgctcttttcactgccaga

SEQ ID NO: 3193606 - DNA, 25 bp, Homo sapien
tcgcgctggaggtcgtcctggtcta

SEQ ID NO: 3193607 - DNA, 25 bp, Homo sapien
caagtcaatgcgttttccatgctgg

SEQ ID NO: 3193608 - DNA, 25 bp, Homo sapien
gcttctggtacatcctccaggtgct

SEQ ID NO: 3193609 - DNA, 25 bp, Homo sapien
caggtgctccaagtcaatgcgtttt

SEQ ID NO: 3193610 - DNA, 25 bp, Homo sapien
catagtgtcacttgaagaggtctgc

SEQ ID NO: 3193611 - DNA, 25 bp, Homo sapien
gatgcccagtgtagttacaataggc

SEQ ID NO: 3193612 - DNA, 25 bp, Homo sapien
cagttcccaggttagcacagacaca

SEQ ID NO: 3193613 - DNA, 25 bp, Homo sapien
taattaggccagttaggtcactccc

SEQ ID NO: 3193614 - DNA, 25 bp, Homo sapien
gacctgaagatgctagaatgccaca

SEQ ID NO: 3193615 - DNA, 25 bp, Homo sapien
gacagcgtggtttgctaaagcagca

SEQ ID NO: 3193616 - DNA, 25 bp, Homo sapien
gaatgccacacaatgtagctgccag

SEQ ID NO: 3193617 - DNA, 25 bp, Homo sapien
tcagagtggctgttggagtcctaag

SEQ ID NO: 3193618 - DNA, 25 bp, Homo sapien
tttcctatccaactgccaaaaagtg

SEQ ID NO: 3193619 - DNA, 25 bp, Homo sapien
aaagtgctagcatttgaggcttagg

SEQ ID NO: 3193620 - DNA, 25 bp, Homo sapien
gctagcatttgaggcttaggagatt

SEQ ID NO: 3193621 - DNA, 25 bp, Homo sapien
tccaactgccaaaaagtgctagcat

SEQ ID NO: 3193622 - DNA, 25 bp, Homo sapien
caagaaggccatagggtgtctcaaa

SEQ ID NO: 3193623 - DNA, 25 bp, Homo sapien
cagtgaaggttttgacaagaaggcc

SEQ ID NO: 3193624 - DNA, 25 bp, Homo sapien
tcaaaaagtttcaccatcggcctct

SEQ ID NO: 3193625 - DNA, 25 bp, Homo sapien
caagatgctgattcgtcaactgaaa

SEQ ID NO: 3193626 - DNA, 25 bp, Homo sapien
tatttaattaaatcagccattgtac

SEQ ID NO: 3193627 - DNA, 25 bp, Homo sapien
gcagctatgtattgttagtgttgta

SEQ ID NO: 3193628 - DNA, 25 bp, Homo sapien
tacatgccctcatagatatattcaa

SEQ ID NO: 3193629 - DNA, 25 bp, Homo sapien
aatcagccattgtacacattgcagc

SEQ ID NO: 3193630 - DNA, 25 bp, Homo sapien
gacgaggtctgagttctgatcaaca

SEQ ID NO: 3193631 - DNA, 25 bp, Homo sapien
cagccaggaaaaactggcacaatgc

SEQ ID NO: 3193632 - DNA, 25 bp, Homo sapien
tttttgtggatatcatgattcagtt

SEQ ID NO: 3193633 - DNA, 25 bp, Homo sapien
gaaaaactggcacaatgcgtatgtg

SEQ ID NO: 3193634 - DNA, 25 bp, Homo sapien
tgtaaagcccaggtataaacacatt

SEQ ID NO: 3193635 - DNA, 25 bp, Homo sapien
catttctgaataccagttacagctt

SEQ ID NO: 3193636 - DNA, 25 bp, Homo sapien
ggccttcttcttagaccacactgaa

SEQ ID NO: 3193637 - DNA, 25 bp, Homo sapien
cctgtccttggtaaaaagcattctg

SEQ ID NO: 3193638 - DNA, 25 bp, Homo sapien
aggttaagaacgcagaagagtcagg

SEQ ID NO: 3193639 - DNA, 25 bp, Homo sapien
actggatatgaagacacggcgagga

SEQ ID NO: 3193640 - DNA, 25 bp, Homo sapien
cgaaggactggatatgaagacacgg

SEQ ID NO: 3193641 - DNA, 25 bp, Homo sapien
taagaacgcagaagagtcaggtgga

SEQ ID NO: 3193642 - DNA, 25 bp, Homo sapien
ctccactgtatggtctgggcaccca

SEQ ID NO: 3193643 - DNA, 25 bp, Homo sapien
tcctaactgaggaaacagctcccat

SEQ ID NO: 3193644 - DNA, 25 bp, Homo sapien
tctggggcatgtttcagggaactcc

SEQ ID NO: 3193645 - DNA, 25 bp, Homo sapien
gctcccatgggtgattgctgttctc

SEQ ID NO: 3193646 - DNA, 25 bp, Homo sapien
tctcggtgaacgatcagcccagatg

SEQ ID NO: 3193647 - DNA, 25 bp, Homo sapien
gactgttggttgtctgccaaaatcc

SEQ ID NO: 3193648 - DNA, 25 bp, Homo sapien
tgagctctcaagacagcagctgggc

SEQ ID NO: 3193649 - DNA, 25 bp, Homo sapien
aatccatattcctttacttccagaa

SEQ ID NO: 3193650 - DNA, 25 bp, Homo sapien
tgatatgcaggtccacattgtactt

SEQ ID NO: 3193651 - DNA, 25 bp, Homo sapien
gccagtgatatgcaggtccacattg

SEQ ID NO: 3193652 - DNA, 25 bp, Homo sapien
ctggctcttgaagatctactggcca

SEQ ID NO: 3193653 - DNA, 25 bp, Homo sapien
gatctactggccagtgatatgcagg

SEQ ID NO: 3193654 - DNA, 25 bp, Homo sapien
cagtgcaacttgtctgctgatgatc

SEQ ID NO: 3193655 - DNA, 25 bp, Homo sapien
tgcaacttgtctgctgatgatcagc

SEQ ID NO: 3193656 - DNA, 25 bp, Homo sapien
caggtgctgatcaacagtgcaactt

SEQ ID NO: 3193657 - DNA, 25 bp, Homo sapien
gatcaacagtgcaacttgtctgctg

SEQ ID NO: 3193658 - DNA, 25 bp, Homo sapien
catctctgtctccttctcggcacca

SEQ ID NO: 3193659 - DNA, 25 bp, Homo sapien
atctctgtctccttctcggcaccac

SEQ ID NO: 3193660 - DNA, 25 bp, Homo sapien
tcatctctgtctccttctcggcacc

SEQ ID NO: 3193661 - DNA, 25 bp, Homo sapien
gtgactgcagacgttgccaaatatt

SEQ ID NO: 3193662 - DNA, 25 bp, Homo sapien
actgcagacgttgccaaatattatg

SEQ ID NO: 3193663 - DNA, 25 bp, Homo sapien
gactgcagacgttgccaaatattat

SEQ ID NO: 3193664 - DNA, 25 bp, Homo sapien
tgactgcagacgttgccaaatatta

SEQ ID NO: 3193665 - DNA, 25 bp, Homo sapien
cacagcctttataactgagagtcta

SEQ ID NO: 3193666 - DNA, 25 bp, Homo sapien
acctttgatgcatccttggtagaaa

SEQ ID NO: 3193667 - DNA, 25 bp, Homo sapien
tgatgcatccttggtagaaaaagaa

SEQ ID NO: 3193668 - DNA, 25 bp, Homo sapien
gcacagcctttataactgagagtct

SEQ ID NO: 3193669 - DNA, 25 bp, Homo sapien
tcctggaaaagtagagctagttctc

SEQ ID NO: 3193670 - DNA, 25 bp, Homo sapien
agtgtctccaccttgcgttgcatct

SEQ ID NO: 3193671 - DNA, 25 bp, Homo sapien
tctgtactggaattcacccggcagc

SEQ ID NO: 3193672 - DNA, 25 bp, Homo sapien
atgcttctagggaaattcctagttt

SEQ ID NO: 3193673 - DNA, 25 bp, Homo sapien
tttagcagggacttctaggaatata

SEQ ID NO: 3193674 - DNA, 25 bp, Homo sapien
tcagattagctttagccactgtgga

SEQ ID NO: 3193675 - DNA, 25 bp, Homo sapien
ggattataacctgcagttacttgtt

SEQ ID NO: 3193676 - DNA, 25 bp, Homo sapien
aggaatatatagtccttaaacccag

SEQ ID NO: 3193677 - DNA, 25 bp, Homo sapien
tatgcacaggggtgattccattact

SEQ ID NO: 3193678 - DNA, 25 bp, Homo sapien
tgattccattactgatgagaacagc

SEQ ID NO: 3193679 - DNA, 25 bp, Homo sapien
tggctatgcacaggggtgattccat

SEQ ID NO: 3193680 - DNA, 25 bp, Homo sapien
gggtgattccattactgatgagaac

SEQ ID NO: 3193681 - DNA, 25 bp, Homo sapien
gccatgggaaaaccatctatgtgat

SEQ ID NO: 3193682 - DNA, 25 bp, Homo sapien
acatttggtgaaatcacaggtgtca

SEQ ID NO: 3193683 - DNA, 25 bp, Homo sapien
ttgccatgggaaaaccatctatgtg

SEQ ID NO: 3193684 - DNA, 25 bp, Homo sapien
gacttgccatgggaaaaccatctat

SEQ ID NO: 3193685 - DNA, 25 bp, Homo sapien
gaatgcttgcctcatcttgaagaca

SEQ ID NO: 3193686 - DNA, 25 bp, Homo sapien
gaagacatcaggtgcattcctgaga

SEQ ID NO: 3193687 - DNA, 25 bp, Homo sapien
cggccagggcaaatctctttaacta

SEQ ID NO: 3193688 - DNA, 25 bp, Homo sapien
aaaaccagatccgaccagggtggag

SEQ ID NO: 3193689 - DNA, 25 bp, Homo sapien
ttttcacaggtagttagaattggat

SEQ ID NO: 3193690 - DNA, 25 bp, Homo sapien
ttagaattggatgacacttcagcat

SEQ ID NO: 3193691 - DNA, 25 bp, Homo sapien
ggtagttagaattggatgacacttc

SEQ ID NO: 3193692 - DNA, 25 bp, Homo sapien
cacaggtagttagaattggatgaca

SEQ ID NO: 3193693 - DNA, 25 bp, Homo sapien
atgggattgagagtagaaacctttt

SEQ ID NO: 3193694 - DNA, 25 bp, Homo sapien
catgggattgagagtagaaaccttt

SEQ ID NO: 3193695 - DNA, 25 bp, Homo sapien
ttttaatcaagacgatccgccctgc

SEQ ID NO: 3193696 - DNA, 25 bp, Homo sapien
taatcaagacgatccgccctgctgc

SEQ ID NO: 3193697 - DNA, 25 bp, Homo sapien
gtctactcaacttctgtttcagcag

SEQ ID NO: 3193698 - DNA, 25 bp, Homo sapien
gcaaaactgttcactagggtttcta

SEQ ID NO: 3193699 - DNA, 25 bp, Homo sapien
ctaattggctcgtctccatgcaaaa

SEQ ID NO: 3193700 - DNA, 25 bp, Homo sapien
tatttcctgtctactcaacttctgt

SEQ ID NO: 3193701 - DNA, 25 bp, Homo sapien
gaaccatgcaggtgtcatcttgctc

SEQ ID NO: 3193702 - DNA, 25 bp, Homo sapien
gatgctctctttggaaccagaatct

SEQ ID NO: 3193703 - DNA, 25 bp, Homo sapien
agatgctctctttggaaccagaatc

SEQ ID NO: 3193704 - DNA, 25 bp, Homo sapien
aaccatgcaggtgtcatcttgctcc

SEQ ID NO: 3193705 - DNA, 25 bp, Homo sapien
gcacgttttcacacatcttaatcac

SEQ ID NO: 3193706 - DNA, 25 bp, Homo sapien
taatcacagtatgacgaatatgatc

SEQ ID NO: 3193707 - DNA, 25 bp, Homo sapien
gttttcacacatcttaatcacagta

SEQ ID NO: 3193708 - DNA, 25 bp, Homo sapien
gagaagcacgttttcacacatctta

SEQ ID NO: 3193709 - DNA, 25 bp, Homo sapien
gattcagtgtacagcatcatgctcc

SEQ ID NO: 3193710 - DNA, 25 bp, Homo sapien
gttatcatttctgggatacaggcaa

SEQ ID NO: 3193711 - DNA, 25 bp, Homo sapien
tgcattcctaaacccaaaccaaggc

SEQ ID NO: 3193712 - DNA, 25 bp, Homo sapien
tgctactccccagcttgaacttgag

SEQ ID NO: 3193713 - DNA, 25 bp, Homo sapien
tgtgaagcagctatacgtggcatac

SEQ ID NO: 3193714 - DNA, 25 bp, Homo sapien
tgttaacctgccaatgagatctgtg

SEQ ID NO: 3193715 - DNA, 25 bp, Homo sapien
gatcaagtttgtcttccgcactaag

SEQ ID NO: 3193716 - DNA, 25 bp, Homo sapien
tgccaggaggataccaacttgatag

SEQ ID NO: 3193717 - DNA, 25 bp, Homo sapien
taaagtgggatgatatgtgggcaaa

SEQ ID NO: 3193718 - DNA, 25 bp, Homo sapien
tttgctaccacataaagccatgctg

SEQ ID NO: 3193719 - DNA, 25 bp, Homo sapien
ttttggtcaaactgtgtaaactgga

SEQ ID NO: 3193720 - DNA, 25 bp, Homo sapien
gggcaaaatcacttatgaaagtaga

SEQ ID NO: 3193721 - DNA, 25 bp, Homo sapien
taaactcttgacctgaaagatatat

SEQ ID NO: 3193722 - DNA, 25 bp, Homo sapien
gttgaaatcattacagcacccaggg

SEQ ID NO: 3193723 - DNA, 25 bp, Homo sapien
tataaaattgattagcagagttagt

SEQ ID NO: 3193724 - DNA, 25 bp, Homo sapien
gatatatgctccgttttgactaata

SEQ ID NO: 3193725 - DNA, 25 bp, Homo sapien
attcaccacgagcttggatctcttg

SEQ ID NO: 3193726 - DNA, 25 bp, Homo sapien
ttcaccacgagcttggatctcttgc

SEQ ID NO: 3193727 - DNA, 25 bp, Homo sapien
cctctccaatgtaaagaaacatgga

SEQ ID NO: 3193728 - DNA, 25 bp, Homo sapien
tccaatgtaaagaaacatggagttg

SEQ ID NO: 3193729 - DNA, 25 bp, Homo sapien
gtgtcctctccaatgtaaagaaaca

SEQ ID NO: 3193730 - DNA, 25 bp, Homo sapien
gtcctctccaatgtaaagaaacatg

SEQ ID NO: 3193731 - DNA, 25 bp, Homo sapien
caaactactgtaatccacaaccctg

SEQ ID NO: 3193732 - DNA, 25 bp, Homo sapien
gccccaaactactgtaatccacaac

SEQ ID NO: 3193733 - DNA, 25 bp, Homo sapien
ccaaactactgtaatccacaaccct

SEQ ID NO: 3193734 - DNA, 25 bp, Homo sapien
tcagagttttagctccagtgtcctt

SEQ ID NO: 3193735 - DNA, 25 bp, Homo sapien
cagagttttagctccagtgtccttg

SEQ ID NO: 3193736 - DNA, 25 bp, Homo sapien
tacagttccaaactaccatggtgac

SEQ ID NO: 3193737 - DNA, 25 bp, Homo sapien
tatgctgcatacgtgaaggccactg

SEQ ID NO: 3193738 - DNA, 25 bp, Homo sapien
gcctgaaaaatactcacatttgggt

SEQ ID NO: 3193739 - DNA, 25 bp, Homo sapien
gccactgaaatatatagcctgaaaa

SEQ ID NO: 3193740 - DNA, 25 bp, Homo sapien
tggtaagacataagagctaatctgc

SEQ ID NO: 3193741 - DNA, 25 bp, Homo sapien
gcttgcacagccctgaattcattat

SEQ ID NO: 3193742 - DNA, 25 bp, Homo sapien
gcttctgaagaggtaatctgactca

SEQ ID NO: 3193743 - DNA, 25 bp, Homo sapien
gtaggactggtgcaaaactatgcag

SEQ ID NO: 3193744 - DNA, 25 bp, Homo sapien
ggatgcttattaaattggtgccttc

SEQ ID NO: 3193745 - DNA, 25 bp, Homo sapien
gtcagtgacattctgctatgaaaga

SEQ ID NO: 3193746 - DNA, 25 bp, Homo sapien
caatatctgtggactgtcagtgaca

SEQ ID NO: 3193747 - DNA, 25 bp, Homo sapien
tgccgagacggataataaaagcagt

SEQ ID NO: 3193748 - DNA, 25 bp, Homo sapien
ccttttggaactctgatgacatgag

SEQ ID NO: 3193749 - DNA, 25 bp, Homo sapien
gaatgggtccatctttgtttggcaa

SEQ ID NO: 3193750 - DNA, 25 bp, Homo sapien
tttgttagagtctaagaggtccctg

SEQ ID NO: 3193751 - DNA, 25 bp, Homo sapien
ttacttatttggagctcacttagcc

SEQ ID NO: 3193752 - DNA, 25 bp, Homo sapien
acctcttttctaggggctgtcctgg

SEQ ID NO: 3193753 - DNA, 25 bp, Homo sapien
gggctgtcctggtttactggtataa

SEQ ID NO: 3193754 - DNA, 25 bp, Homo sapien
ccttgtgggtgggatagccacacta

SEQ ID NO: 3193755 - DNA, 25 bp, Homo sapien
ggcgtcactttgtggcccgggctgg

SEQ ID NO: 3193756 - DNA, 25 bp, Homo sapien
ccagggagccccaaatatgtcatga

SEQ ID NO: 3193757 - DNA, 25 bp, Homo sapien
tatacccgttttatttacgtgcatc

SEQ ID NO: 3193758 - DNA, 25 bp, Homo sapien
cccgttttatttacgtgcatcatct

SEQ ID NO: 3193759 - DNA, 25 bp, Homo sapien
agctgtttttgccagggagccccaa

SEQ ID NO: 3193760 - DNA, 25 bp, Homo sapien
atagcacaatcaaataatacacaca

SEQ ID NO: 3193761 - DNA, 25 bp, Homo sapien
gcaatagcacaatcaaataatacac

SEQ ID NO: 3193762 - DNA, 25 bp, Homo sapien
tccagcctggcagagtatctctcta

SEQ ID NO: 3193763 - DNA, 25 bp, Homo sapien
ctctctatggggtatcacccaggct

SEQ ID NO: 3193764 - DNA, 25 bp, Homo sapien
tagcactttatctagagttgcttgc

SEQ ID NO: 3193765 - DNA, 25 bp, Homo sapien
gctaggttattagctgcctgggaag

SEQ ID NO: 3193766 - DNA, 25 bp, Homo sapien
tgtctttggactacctctgtttctc

SEQ ID NO: 3193767 - DNA, 25 bp, Homo sapien
ttaccacaattgtctccctaacatg

SEQ ID NO: 3193768 - DNA, 25 bp, Homo sapien
tggtgattgatacagctggcttagc

SEQ ID NO: 3193769 - DNA, 25 bp, Homo sapien
tgggccctggactatttgttctaca

SEQ ID NO: 3193770 - DNA, 25 bp, Homo sapien
tctacacactttaaatttgggtgca

SEQ ID NO: 3193771 - DNA, 25 bp, Homo sapien
gtccggaccctgttcttatgactgg

SEQ ID NO: 3193772 - DNA, 25 bp, Homo sapien
tctggctaaaatgactatcaatggc

SEQ ID NO: 3193773 - DNA, 25 bp, Homo sapien
gctaaaatgactatcaatggccctg

SEQ ID NO: 3193774 - DNA, 25 bp, Homo sapien
tccttctggctaaaatgactatcaa

SEQ ID NO: 3193775 - DNA, 25 bp, Homo sapien
aaatgactatcaatggccctgggct

SEQ ID NO: 3193776 - DNA, 25 bp, Homo sapien
tcatttgtgtatatcccatcagact

SEQ ID NO: 3193777 - DNA, 25 bp, Homo sapien
ctttcatttgtgtatatcccatcag

SEQ ID NO: 3193778 - DNA, 25 bp, Homo sapien
ttgttggctcaactactttcatttg

SEQ ID NO: 3193779 - DNA, 25 bp, Homo sapien
atttgtgtatatcccatcagacttg

SEQ ID NO: 3193780 - DNA, 25 bp, Homo sapien
cctcttcaggatggaaatatttggc

SEQ ID NO: 3193781 - DNA, 25 bp, Homo sapien
gatggaaatatttggctgtgactgt

SEQ ID NO: 3193782 - DNA, 25 bp, Homo sapien
catgtgagcatcctcttcaggatgg

SEQ ID NO: 3193783 - DNA, 25 bp, Homo sapien
aaatatttggctgtgactgtgatca

SEQ ID NO: 3193784 - DNA, 25 bp, Homo sapien
cagtctaagaaagcgacgcagtttt

SEQ ID NO: 3193785 - DNA, 25 bp, Homo sapien
ttttctgtgacctctcccttattga

SEQ ID NO: 3193786 - DNA, 25 bp, Homo sapien
gtctttttcaatggcatcagaagtt

SEQ ID NO: 3193787 - DNA, 25 bp, Homo sapien
ggcatcagaagttgagcaacagtct

SEQ ID NO: 3193788 - DNA, 25 bp, Homo sapien
tactatttgattgtagactgagggt

SEQ ID NO: 3193789 - DNA, 25 bp, Homo sapien
gctctattatgcctaaaagtcaaaa

SEQ ID NO: 3193790 - DNA, 25 bp, Homo sapien
taatctctagatagccaaagcttga

SEQ ID NO: 3193791 - DNA, 25 bp, Homo sapien
tggaattgtgcagcaaatttctcac

SEQ ID NO: 3193792 - DNA, 25 bp, Homo sapien
aaaacagctagcagttcccttgtgt

SEQ ID NO: 3193793 - DNA, 25 bp, Homo sapien
tgcaagtacttaaaccgaaacatct

SEQ ID NO: 3193794 - DNA, 25 bp, Homo sapien
gcatgtctgatataaggactttttc

SEQ ID NO: 3193795 - DNA, 25 bp, Homo sapien
caaatatgttaagtagcatgtctga

SEQ ID NO: 3193796 - DNA, 25 bp, Homo sapien
gcaccagggggtgtatggtactgac

SEQ ID NO: 3193797 - DNA, 25 bp, Homo sapien
ggcctgtttcaggcttgacagcctc

SEQ ID NO: 3193798 - DNA, 25 bp, Homo sapien
atggtactgacactctttgtcacct

SEQ ID NO: 3193799 - DNA, 25 bp, Homo sapien
tgtatggtactgacactctttgtca

SEQ ID NO: 3193800 - DNA, 25 bp, Homo sapien
catttgttaggaagccttctttaag

SEQ ID NO: 3193801 - DNA, 25 bp, Homo sapien
tccatttgttaggaagccttcttta

SEQ ID NO: 3193802 - DNA, 25 bp, Homo sapien
aggaagccttctttaagctctgaga

SEQ ID NO: 3193803 - DNA, 25 bp, Homo sapien
gttaggaagccttctttaagctctg

SEQ ID NO: 3193804 - DNA, 25 bp, Homo sapien
ggaaaggatcttcccctgtctgcac

SEQ ID NO: 3193805 - DNA, 25 bp, Homo sapien
cctctgattccatgggaactttacc

SEQ ID NO: 3193806 - DNA, 25 bp, Homo sapien
atactaactttttgtggaaccaatg

SEQ ID NO: 3193807 - DNA, 25 bp, Homo sapien
ccaatgagttagatccttttgacag

SEQ ID NO: 3193808 - DNA, 25 bp, Homo sapien
atcagtgctgctctgcggtgccctg

SEQ ID NO: 3193809 - DNA, 25 bp, Homo sapien
cacagtttcctgtgcaggtggtgga

SEQ ID NO: 3193810 - DNA, 25 bp, Homo sapien
tgcttgaaactgaaccattacaccc

SEQ ID NO: 3193811 - DNA, 25 bp, Homo sapien
cggtgccctgtctggttttcagtca

SEQ ID NO: 3193812 - DNA, 25 bp, Homo sapien
cactgcctccagtgggacagagtgg

SEQ ID NO: 3193813 - DNA, 25 bp, Homo sapien
actgcctccagtgggacagagtgga

SEQ ID NO: 3193814 - DNA, 25 bp, Homo sapien
caagaagggatgtaggaaacaggta

SEQ ID NO: 3193815 - DNA, 25 bp, Homo sapien
gaaccaagaagggatgtaggaaaca

SEQ ID NO: 3193816 - DNA, 25 bp, Homo sapien
gaaacaggtagggtgcctgatgatt

SEQ ID NO: 3193817 - DNA, 25 bp, Homo sapien
tataatgtttgcacaagattctctg

SEQ ID NO: 3193818 - DNA, 25 bp, Homo sapien
caaagacctcccttagtatggtgca

SEQ ID NO: 3193819 - DNA, 25 bp, Homo sapien
taataacaacccttgagaagaccag

SEQ ID NO: 3193820 - DNA, 25 bp, Homo sapien
catgtggatatctgtggcaagagct

SEQ ID NO: 3193821 - DNA, 25 bp, Homo sapien
gaagaaaatgcctacctccatggag

SEQ ID NO: 3193822 - DNA, 25 bp, Homo sapien
cagttcctcgttcattttattgtca

SEQ ID NO: 3193823 - DNA, 25 bp, Homo sapien
gccatgcagcccagttcttgagaat

SEQ ID NO: 3193824 - DNA, 25 bp, Homo sapien
cagccatgcagcccagttcttgaga

SEQ ID NO: 3193825 - DNA, 25 bp, Homo sapien
catgcagcccagttcttgagaattg

SEQ ID NO: 3193826 - DNA, 25 bp, Homo sapien
aaggacatgaactctggcaaacatc

SEQ ID NO: 3193827 - DNA, 25 bp, Homo sapien
ggacatgaactctggcaaacatcac

SEQ ID NO: 3193828 - DNA, 25 bp, Homo sapien
taaaggacatgaactctggcaaaca

SEQ ID NO: 3193829 - DNA, 25 bp, Homo sapien
ctaaaggacatgaactctggcaaac

SEQ ID NO: 3193830 - DNA, 25 bp, Homo sapien
caagtgtttcgacattaaaaaggag

SEQ ID NO: 3193831 - DNA, 25 bp, Homo sapien
gtcatgtggcaatgcaagtgtttcg

SEQ ID NO: 3193832 - DNA, 25 bp, Homo sapien
gctgtcatgtggcaatgcaagtgtt

SEQ ID NO: 3193833 - DNA, 25 bp, Homo sapien
tgcaagtgtttcgacattaaaaagg

SEQ ID NO: 3193834 - DNA, 25 bp, Homo sapien
agatggaattcttcataatgcgcat

SEQ ID NO: 3193835 - DNA, 25 bp, Homo sapien
aagatggaattcttcataatgcgca

SEQ ID NO: 3193836 - DNA, 25 bp, Homo sapien
ggaaagatggaattcttcataatgc

SEQ ID NO: 3193837 - DNA, 25 bp, Homo sapien
aaagatggaattcttcataatgcgc

SEQ ID NO: 3193838 - DNA, 25 bp, Homo sapien
gagaatggaggagacagcgttatcc

SEQ ID NO: 3193839 - DNA, 25 bp, Homo sapien
cagagaatggaggagacagcgttat

SEQ ID NO: 3193840 - DNA, 25 bp, Homo sapien
ccagagaatggaggagacagcgtta

SEQ ID NO: 3193841 - DNA, 25 bp, Homo sapien
gaatggaggagacagcgttatccag

SEQ ID NO: 3193842 - DNA, 25 bp, Homo sapien
acttctggagtgtgggtaaggaaca

SEQ ID NO: 3193843 - DNA, 25 bp, Homo sapien
tgtgcccagtgctgtaaggcctgcc

SEQ ID NO: 3193844 - DNA, 25 bp, Homo sapien
gacatttcctaattgagttctgtag

SEQ ID NO: 3193845 - DNA, 25 bp, Homo sapien
aaggcctgccatccccgtgtggcat

SEQ ID NO: 3193846 - DNA, 25 bp, Homo sapien
ctcctttaagatccagtgcaggtcc

SEQ ID NO: 3193847 - DNA, 25 bp, Homo sapien
agtactctctcctttaagatccagt

SEQ ID NO: 3193848 - DNA, 25 bp, Homo sapien
taagatccagtgcaggtcctgcctc

SEQ ID NO: 3193849 - DNA, 25 bp, Homo sapien
ctggtactgttgcagtactctctcc

SEQ ID NO: 3193850 - DNA, 25 bp, Homo sapien
aagatgtatgaaaattcctactgga

SEQ ID NO: 3193851 - DNA, 25 bp, Homo sapien
tatcatcctgagaagtgtgcgcgcg

SEQ ID NO: 3193852 - DNA, 25 bp, Homo sapien
tagagatgcctcctggttagccggc

SEQ ID NO: 3193853 - DNA, 25 bp, Homo sapien
tgtcggccgtatgacccaggtactg

SEQ ID NO: 3193854 - DNA, 25 bp, Homo sapien
gtaggacccttactccaactgtggc

SEQ ID NO: 3193855 - DNA, 25 bp, Homo sapien
tcgcgggcgagctactttcggacca

SEQ ID NO: 3193856 - DNA, 25 bp, Homo sapien
gacgagtatcagcttttcgaggagc

SEQ ID NO: 3193857 - DNA, 25 bp, Homo sapien
tgcaccaggttcacggacgagtatc

SEQ ID NO: 3193858 - DNA, 25 bp, Homo sapien
tcggaccaggaaagtaagagcggcc

SEQ ID NO: 3193859 - DNA, 25 bp, Homo sapien
gggaacagccaggttgatgcacact

SEQ ID NO: 3193860 - DNA, 25 bp, Homo sapien
gacaccctccgtaaccacatataag

SEQ ID NO: 3193861 - DNA, 25 bp, Homo sapien
cacttaaatttggtccatgtgctgg

SEQ ID NO: 3193862 - DNA, 25 bp, Homo sapien
tcctaattggagttgaaagagatac

SEQ ID NO: 3193863 - DNA, 25 bp, Homo sapien
ctattcctgggcatctcatacagcc

SEQ ID NO: 3193864 - DNA, 25 bp, Homo sapien
tccagtgttggactctgactgaagg

SEQ ID NO: 3193865 - DNA, 25 bp, Homo sapien
gaaattgtgatttgtccgcagagca

SEQ ID NO: 3193866 - DNA, 25 bp, Homo sapien
ccagtctattggctgagtgacacca

SEQ ID NO: 3193867 - DNA, 25 bp, Homo sapien
gaggttgcttttatcgtcatagttg

SEQ ID NO: 3193868 - DNA, 25 bp, Homo sapien
catagttgttggattgttttattcc

SEQ ID NO: 3193869 - DNA, 25 bp, Homo sapien
gcttttatcgtcatagttgttggat

SEQ ID NO: 3193870 - DNA, 25 bp, Homo sapien
tcgtcatagttgttggattgtttta

SEQ ID NO: 3193871 - DNA, 25 bp, Homo sapien
catggcttccgtcaaccaaaagacc

SEQ ID NO: 3193872 - DNA, 25 bp, Homo sapien
caaaagacctttacaaagagtgaag

SEQ ID NO: 3193873 - DNA, 25 bp, Homo sapien
gtactctgaggcacttttcctaaca

SEQ ID NO: 3193874 - DNA, 25 bp, Homo sapien
tctgctttctcagtagtactctgag

SEQ ID NO: 3193875 - DNA, 25 bp, Homo sapien
ggatgctgaactaaagatgctgaca

SEQ ID NO: 3193876 - DNA, 25 bp, Homo sapien
acagccaaggatgctgaactaaaga

SEQ ID NO: 3193877 - DNA, 25 bp, Homo sapien
caaggatgctgaactaaagatgctg

SEQ ID NO: 3193878 - DNA, 25 bp, Homo sapien
gccaaggatgctgaactaaagatgc

SEQ ID NO: 3193879 - DNA, 25 bp, Homo sapien
tctcagtccacattttactccagct

SEQ ID NO: 3193880 - DNA, 25 bp, Homo sapien
gcttgcaggtatgattgacagtact

SEQ ID NO: 3193881 - DNA, 25 bp, Homo sapien
cagctgcttgcaggtatgattgaca

SEQ ID NO: 3193882 - DNA, 25 bp, Homo sapien
tgattgacagtactttgcttcagct

SEQ ID NO: 3193883 - DNA, 25 bp, Homo sapien
tcccataaaagctttagtctccaac

SEQ ID NO: 3193884 - DNA, 25 bp, Homo sapien
tctgcatgtacatataatataacca

SEQ ID NO: 3193885 - DNA, 25 bp, Homo sapien
caactcccatggtctgagtgacaca

SEQ ID NO: 3193886 - DNA, 25 bp, Homo sapien
gtgtctattgtgtccacagtggtcc

SEQ ID NO: 3193887 - DNA, 25 bp, Homo sapien
gtctgaagagtaagaacaatcacat

SEQ ID NO: 3193888 - DNA, 25 bp, Homo sapien
ctaggtctgaagagtaagaacaatc

SEQ ID NO: 3193889 - DNA, 25 bp, Homo sapien
tcaaatatatccacacctaatttaa

SEQ ID NO: 3193890 - DNA, 25 bp, Homo sapien
aggtctgaagagtaagaacaatcac

SEQ ID NO: 3193891 - DNA, 25 bp, Homo sapien
ttctatggatagacagaagtgagga

SEQ ID NO: 3193892 - DNA, 25 bp, Homo sapien
tccttaacttataggtcttcatcct

SEQ ID NO: 3193893 - DNA, 25 bp, Homo sapien
tcttcatcctcgtgcttttcatttc

SEQ ID NO: 3193894 - DNA, 25 bp, Homo sapien
tctcttctccactatccttaactta

SEQ ID NO: 3193895 - DNA, 25 bp, Homo sapien
ctataatcccgtcatggttgccaga

SEQ ID NO: 3193896 - DNA, 25 bp, Homo sapien
gaatcaaagattcaggtgaccacct

SEQ ID NO: 3193897 - DNA, 25 bp, Homo sapien
ttaacacagggccaagcagatttcc

SEQ ID NO: 3193898 - DNA, 25 bp, Homo sapien
tgttacagaccacaggctctttggc

SEQ ID NO: 3193899 - DNA, 25 bp, Homo sapien
catgtcaggttttagggttccctct

SEQ ID NO: 3193900 - DNA, 25 bp, Homo sapien
gcatgtcaggttttagggttccctc

SEQ ID NO: 3193901 - DNA, 25 bp, Homo sapien
ttctggcatgtcaggttttagggtt

SEQ ID NO: 3193902 - DNA, 25 bp, Homo sapien
tctggcatgtcaggttttagggttc

SEQ ID NO: 3193903 - DNA, 25 bp, Homo sapien
tacaacttggagttccagaacctgt

SEQ ID NO: 3193904 - DNA, 25 bp, Homo sapien
tgcagggccttagaaaagagatact

SEQ ID NO: 3193905 - DNA, 25 bp, Homo sapien
ttaaagccttgaacctagccactga

SEQ ID NO: 3193906 - DNA, 25 bp, Homo sapien
tacccagacgttacactcaaagcat

SEQ ID NO: 3193907 - DNA, 25 bp, Homo sapien
ggcagtcatgatcctaggcccctgt

SEQ ID NO: 3193908 - DNA, 25 bp, Homo sapien
ggaatccaaactgcttcctggcatg

SEQ ID NO: 3193909 - DNA, 25 bp, Homo sapien
cacagaatggtactcagggcagtca

SEQ ID NO: 3193910 - DNA, 25 bp, Homo sapien
tgtggcaaggattcctgcacagggc

SEQ ID NO: 3193911 - DNA, 25 bp, Homo sapien
tatacacatgcatcccttatctggc

SEQ ID NO: 3193912 - DNA, 25 bp, Homo sapien
cacatagatccatacagattcataa

SEQ ID NO: 3193913 - DNA, 25 bp, Homo sapien
tctacctgcaaatcgtttcctaaag

SEQ ID NO: 3193914 - DNA, 25 bp, Homo sapien
taaacaggagtcctacatgtcatcc

SEQ ID NO: 3193915 - DNA, 25 bp, Homo sapien
ccatgagtccatgcaaatttacgac

SEQ ID NO: 3193916 - DNA, 25 bp, Homo sapien
tacgacctaaaagaagctggcaaat

SEQ ID NO: 3193917 - DNA, 25 bp, Homo sapien
tcaatctagatttatggcagtgcca

SEQ ID NO: 3193918 - DNA, 25 bp, Homo sapien
taactgctaatggactttctcaatc

SEQ ID NO: 3193919 - DNA, 25 bp, Homo sapien
ctttggattatcactgccagagtac

SEQ ID NO: 3193920 - DNA, 25 bp, Homo sapien
ttgtactttcccactaggcccgcat

SEQ ID NO: 3193921 - DNA, 25 bp, Homo sapien
gcttcctttggtagagtgttcttca

SEQ ID NO: 3193922 - DNA, 25 bp, Homo sapien
taggcccgcatcctcattttcctgt

SEQ ID NO: 3193923 - DNA, 25 bp, Homo sapien
ggcgctctggccacgaaaagttcct

SEQ ID NO: 3193924 - DNA, 25 bp, Homo sapien
tggagagtcttcaccgtctgttggg

SEQ ID NO: 3193925 - DNA, 25 bp, Homo sapien
aattgctgcccggagtttctgcgga

SEQ ID NO: 3193926 - DNA, 25 bp, Homo sapien
taaagttgtcggacatggtgacagc

SEQ ID NO: 3193927 - DNA, 25 bp, Homo sapien
tgtctccttcttgcacagaacatgg

SEQ ID NO: 3193928 - DNA, 25 bp, Homo sapien
gcttggaacctcaactgaaaatgtg

SEQ ID NO: 3193929 - DNA, 25 bp, Homo sapien
catgaattttggtatccctcagggt

SEQ ID NO: 3193930 - DNA, 25 bp, Homo sapien
gaaactaatccctgatagatgcgac

SEQ ID NO: 3193931 - DNA, 25 bp, Homo sapien
tttcatgggtcaggtcagcaccttc

SEQ ID NO: 3193932 - DNA, 25 bp, Homo sapien
cacttgaatttcatgggtcaggtca

SEQ ID NO: 3193933 - DNA, 25 bp, Homo sapien
gaatttcatgggtcaggtcagcacc

SEQ ID NO: 3193934 - DNA, 25 bp, Homo sapien
gcagaagccagatgccacttgaatt

SEQ ID NO: 3193935 - DNA, 25 bp, Homo sapien
cactttagagtggagaactaccctt

SEQ ID NO: 3193936 - DNA, 25 bp, Homo sapien
tccaggatcaatgtgcagacagaga

SEQ ID NO: 3193937 - DNA, 25 bp, Homo sapien
tctgttcaagattgcaagaagccct

SEQ ID NO: 3193938 - DNA, 25 bp, Homo sapien
gctggtaggtgtacaaaggtgatct

SEQ ID NO: 3193939 - DNA, 25 bp, Homo sapien
gaccctttgctgtcaggtagatgtc

SEQ ID NO: 3193940 - DNA, 25 bp, Homo sapien
ccctggaatcagttcttattggtat

SEQ ID NO: 3193941 - DNA, 25 bp, Homo sapien
attggtattccccttctcacctcag

SEQ ID NO: 3193942 - DNA, 25 bp, Homo sapien
ttaggatgagcctccaccgatgctg

SEQ ID NO: 3193943 - DNA, 25 bp, Homo sapien
tctctgaggtctgtttatgatgctg

SEQ ID NO: 3193944 - DNA, 25 bp, Homo sapien
attaactccagcaactctccgatct

SEQ ID NO: 3193945 - DNA, 25 bp, Homo sapien
gcgatgtgtgaagaagtgctcctta

SEQ ID NO: 3193946 - DNA, 25 bp, Homo sapien
tctctagagctgtgcgatgtgtgaa

SEQ ID NO: 3193947 - DNA, 25 bp, Homo sapien
ctgcgaataattgtataaggcaatt

SEQ ID NO: 3193948 - DNA, 25 bp, Homo sapien
tttcttgttaaagtgatcatgctta

SEQ ID NO: 3193949 - DNA, 25 bp, Homo sapien
taaagtgatcatgcttaataagtat

SEQ ID NO: 3193950 - DNA, 25 bp, Homo sapien
aatcagataaggtctgggcaagcct

SEQ ID NO: 3193951 - DNA, 25 bp, Homo sapien
cagctatgggctgtagtaaaagcta

SEQ ID NO: 3193952 - DNA, 25 bp, Homo sapien
tacagctatgggctgtagtaaaagc

SEQ ID NO: 3193953 - DNA, 25 bp, Homo sapien
ggctgtagtaaaagctacagacttt

SEQ ID NO: 3193954 - DNA, 25 bp, Homo sapien
tatgggctgtagtaaaagctacaga

SEQ ID NO: 3193955 - DNA, 25 bp, Homo sapien
ccagacccatttgaatggcagttag

SEQ ID NO: 3193956 - DNA, 25 bp, Homo sapien
ttagttaacaccagcagttcagttg

SEQ ID NO: 3193957 - DNA, 25 bp, Homo sapien
gaatttttctctgtaggcctcgcag

SEQ ID NO: 3193958 - DNA, 25 bp, Homo sapien
ccagcagttcagttgaagtcttgga

SEQ ID NO: 3193959 - DNA, 25 bp, Homo sapien
cgtagtatggttaccatggcagcag

SEQ ID NO: 3193960 - DNA, 25 bp, Homo sapien
tatctaaatacgtgaaactgaaaca

SEQ ID NO: 3193961 - DNA, 25 bp, Homo sapien
gggcatatctaaatacgtgaaactg

SEQ ID NO: 3193962 - DNA, 25 bp, Homo sapien
aacactcatacttgcttgggagcgt

SEQ ID NO: 3193963 - DNA, 25 bp, Homo sapien
gggagtcgacagatcctgcatttgg

SEQ ID NO: 3193964 - DNA, 25 bp, Homo sapien
taccctggggagtcgacagatcctg

SEQ ID NO: 3193965 - DNA, 25 bp, Homo sapien
cagtactcctccagtacacttgcta

SEQ ID NO: 3193966 - DNA, 25 bp, Homo sapien
tacacttgctagaggccaaaagata

SEQ ID NO: 3193967 - DNA, 25 bp, Homo sapien
tctatatcccacttgataacccctc

SEQ ID NO: 3193968 - DNA, 25 bp, Homo sapien
gcatcatattttctatatcccactt

SEQ ID NO: 3193969 - DNA, 25 bp, Homo sapien
tatatcccacttgataacccctctt

SEQ ID NO: 3193970 - DNA, 25 bp, Homo sapien
tgcatcatattttctatatcccact

SEQ ID NO: 3193971 - DNA, 25 bp, Homo sapien
tctattcaacgtagtcctggaagtc

SEQ ID NO: 3193972 - DNA, 25 bp, Homo sapien
gactggtatatgaattcagcgaagt

SEQ ID NO: 3193973 - DNA, 25 bp, Homo sapien
gcttctaggactggtatatgaattc

SEQ ID NO: 3193974 - DNA, 25 bp, Homo sapien
agaaatcacaggcatccaaattggt

SEQ ID NO: 3193975 - DNA, 25 bp, Homo sapien
ggacgcatggcccaagttgccttga

SEQ ID NO: 3193976 - DNA, 25 bp, Homo sapien
ttccagagggtccagtaagcagcgg

SEQ ID NO: 3193977 - DNA, 25 bp, Homo sapien
taaccttcggctgtggccaatttgg

SEQ ID NO: 3193978 - DNA, 25 bp, Homo sapien
gcaagatcatgaacccaacggaagg

SEQ ID NO: 3193979 - DNA, 25 bp, Homo sapien
tttcactgggggtttatgttcctca

SEQ ID NO: 3193980 - DNA, 25 bp, Homo sapien
cactgggggtttatgttcctcaatg

SEQ ID NO: 3193981 - DNA, 25 bp, Homo sapien
tcactgggggtttatgttcctcaat

SEQ ID NO: 3193982 - DNA, 25 bp, Homo sapien
ctgggggtttatgttcctcaatggt

SEQ ID NO: 3193983 - DNA, 25 bp, Homo sapien
cattaatgtacggagttgttgagcc

SEQ ID NO: 3193984 - DNA, 25 bp, Homo sapien
cagcagcagacatagtatccataat

SEQ ID NO: 3193985 - DNA, 25 bp, Homo sapien
tgtctattgctcacagtatgatgcc

SEQ ID NO: 3193986 - DNA, 25 bp, Homo sapien
gaaagttattagagttctgctgcta

SEQ ID NO: 3193987 - DNA, 25 bp, Homo sapien
tacatgggagacattgctgaggagt

SEQ ID NO: 3193988 - DNA, 25 bp, Homo sapien
tgaccacagcctgatattactgtga

SEQ ID NO: 3193989 - DNA, 25 bp, Homo sapien
tccatattgaataatgccctatttg

SEQ ID NO: 3193990 - DNA, 25 bp, Homo sapien
tgataattaaaatttgaccacagcc

SEQ ID NO: 3193991 - DNA, 25 bp, Homo sapien
aagtgagagggagttaaaatctgaa

SEQ ID NO: 3193992 - DNA, 25 bp, Homo sapien
caagtgagagggagttaaaatctga

SEQ ID NO: 3193993 - DNA, 25 bp, Homo sapien
tagttttgttcaggtacagttaaca

SEQ ID NO: 3193994 - DNA, 25 bp, Homo sapien
ccaggtgagggttttcaaaggcatc

SEQ ID NO: 3193995 - DNA, 25 bp, Homo sapien
tgctttgagatatgagcttctgtga

SEQ ID NO: 3193996 - DNA, 25 bp, Homo sapien
ttgctttgagatatgagcttctgtg

SEQ ID NO: 3193997 - DNA, 25 bp, Homo sapien
agccattacgtgctaaagtatgcat

SEQ ID NO: 3193998 - DNA, 25 bp, Homo sapien
tccttcttgacatctttcgtctgtt

SEQ ID NO: 3193999 - DNA, 25 bp, Homo sapien
ccttcttgacatctttcgtctgttt

SEQ ID NO: 3194000 - DNA, 25 bp, Homo sapien
ttgtagatgtagagggaaacagagc

SEQ ID NO: 3194001 - DNA, 25 bp, Homo sapien
agatgtagagggaaacagagcaaag

SEQ ID NO: 3194002 - DNA, 25 bp, Homo sapien
tgcattcctatgacttgggataagc

SEQ ID NO: 3194003 - DNA, 25 bp, Homo sapien
tccatgggcctactctttaagatag

SEQ ID NO: 3194004 - DNA, 25 bp, Homo sapien
agatagtcctagatattggtgtaag

SEQ ID NO: 3194005 - DNA, 25 bp, Homo sapien
gtattgcccctaagcccatcactga

SEQ ID NO: 3194006 - DNA, 25 bp, Homo sapien
cataacataacagtgtgctcagccc

SEQ ID NO: 3194007 - DNA, 25 bp, Homo sapien
tcattggaagacctgagataaactc

SEQ ID NO: 3194008 - DNA, 25 bp, Homo sapien
ctcgggtaatggcaagatcacaaaa

SEQ ID NO: 3194009 - DNA, 25 bp, Homo sapien
cagcccttttagagagcaagccttc

SEQ ID NO: 3194010 - DNA, 25 bp, Homo sapien
cagtgggtagagagtcttaacgtgc

SEQ ID NO: 3194011 - DNA, 25 bp, Homo sapien
gggtagagagtcttaacgtgcctac

SEQ ID NO: 3194012 - DNA, 25 bp, Homo sapien
ttacagtgggtagagagtcttaacg

SEQ ID NO: 3194013 - DNA, 25 bp, Homo sapien
tgggtagagagtcttaacgtgccta

SEQ ID NO: 3194014 - DNA, 25 bp, Homo sapien
atgtcatctgacacaatttcaccca

SEQ ID NO: 3194015 - DNA, 25 bp, Homo sapien
gaaaggtgcatttgaaaatcgacat

SEQ ID NO: 3194016 - DNA, 25 bp, Homo sapien
agagaaaggtgcatttgaaaatcga

SEQ ID NO: 3194017 - DNA, 25 bp, Homo sapien
gttattgagtatccaagtgctaact

SEQ ID NO: 3194018 - DNA, 25 bp, Homo sapien
aagtgctaacttgtgtgattctgag

SEQ ID NO: 3194019 - DNA, 25 bp, Homo sapien
tataaggcttccttacttgaagcaa

SEQ ID NO: 3194020 - DNA, 25 bp, Homo sapien
tacttgaagcaactagaacataatg

SEQ ID NO: 3194021 - DNA, 25 bp, Homo sapien
ccttacttgaagcaactagaacata

SEQ ID NO: 3194022 - DNA, 25 bp, Homo sapien
gcttccttacttgaagcaactagaa

SEQ ID NO: 3194023 - DNA, 25 bp, Homo sapien
tgttttgatctctggtgtcttacaa

SEQ ID NO: 3194024 - DNA, 25 bp, Homo sapien
caaaatccaaaatatcatcgacagt

SEQ ID NO: 3194025 - DNA, 25 bp, Homo sapien
catagtggctttgatgtctgtgagt

SEQ ID NO: 3194026 - DNA, 25 bp, Homo sapien
catcgacagtatgtgtaatgctgta

SEQ ID NO: 3194027 - DNA, 25 bp, Homo sapien
tctgaacctggaattgatacactat

SEQ ID NO: 3194028 - DNA, 25 bp, Homo sapien
tgccaatgccaagactcccatagta

SEQ ID NO: 3194029 - DNA, 25 bp, Homo sapien
aagatgctatgtaattaataagaca

SEQ ID NO: 3194030 - DNA, 25 bp, Homo sapien
cagcaacagaaagattgtgagatgg

SEQ ID NO: 3194031 - DNA, 25 bp, Homo sapien
ttcagtgacggctgtgcagattaac

SEQ ID NO: 3194032 - DNA, 25 bp, Homo sapien
tatagattcagtgacggctgtgcag

SEQ ID NO: 3194033 - DNA, 25 bp, Homo sapien
caatatagattcagtgacggctgtg

SEQ ID NO: 3194034 - DNA, 25 bp, Homo sapien
tgacggctgtgcagattaactcttg

SEQ ID NO: 3194035 - DNA, 25 bp, Homo sapien
ttccttctccttgcctccagggccc

SEQ ID NO: 3194036 - DNA, 25 bp, Homo sapien
aattccttctccttgcctccagggc

SEQ ID NO: 3194037 - DNA, 25 bp, Homo sapien
tcagttgctagcaagaacaattcct

SEQ ID NO: 3194038 - DNA, 25 bp, Homo sapien
gttgctagcaagaacaattccttct

SEQ ID NO: 3194039 - DNA, 25 bp, Homo sapien
atcacttgcttcagtgctgcaagca

SEQ ID NO: 3194040 - DNA, 25 bp, Homo sapien
ctgacatgtctgcagtggtgttctg

SEQ ID NO: 3194041 - DNA, 25 bp, Homo sapien
aatttcctttgccattgcctgccat

SEQ ID NO: 3194042 - DNA, 25 bp, Homo sapien
acttgcttcagtgctgcaagcagct

SEQ ID NO: 3194043 - DNA, 25 bp, Homo sapien
ccaggaagggaattcgattgggaca

SEQ ID NO: 3194044 - DNA, 25 bp, Homo sapien
gggaattcgattgggacacatgctc

SEQ ID NO: 3194045 - DNA, 25 bp, Homo sapien
gcatatacattcaccaggaagggaa

SEQ ID NO: 3194046 - DNA, 25 bp, Homo sapien
ttgcatatacattcaccaggaaggg

SEQ ID NO: 3194047 - DNA, 25 bp, Homo sapien
catgctccagactgtacgcattggg

SEQ ID NO: 3194048 - DNA, 25 bp, Homo sapien
gcattgggcaaactagtttctgcag

SEQ ID NO: 3194049 - DNA, 25 bp, Homo sapien
tcagagttttacatgaagattcaca

SEQ ID NO: 3194050 - DNA, 25 bp, Homo sapien
gcagttagcgctgtgcccaaaaagg

SEQ ID NO: 3194051 - DNA, 25 bp, Homo sapien
catgaagaagacatagccgacaaaa

SEQ ID NO: 3194052 - DNA, 25 bp, Homo sapien
gaagacatagccgacaaaaatgcat

SEQ ID NO: 3194053 - DNA, 25 bp, Homo sapien
gacatagccgacaaaaatgcattcc

SEQ ID NO: 3194054 - DNA, 25 bp, Homo sapien
atagccgacaaaaatgcattccaga

SEQ ID NO: 3194055 - DNA, 25 bp, Homo sapien
tctttgttgtcccatagctctttat

SEQ ID NO: 3194056 - DNA, 25 bp, Homo sapien
gtttttcttgtatgatgtgtcactt

SEQ ID NO: 3194057 - DNA, 25 bp, Homo sapien
tagctctttatcattctccactgat

SEQ ID NO: 3194058 - DNA, 25 bp, Homo sapien
tcccatagctctttatcattctcca

SEQ ID NO: 3194059 - DNA, 25 bp, Homo sapien
ctagctgttgcctcttgcatagtct

SEQ ID NO: 3194060 - DNA, 25 bp, Homo sapien
ttcatgagttccttgtgccaacacg

SEQ ID NO: 3194061 - DNA, 25 bp, Homo sapien
ggctcatgttaactggccagtcagt

SEQ ID NO: 3194062 - DNA, 25 bp, Homo sapien
caacacgaaggtggctgatggcaga

SEQ ID NO: 3194063 - DNA, 25 bp, Homo sapien
ttgccttattagacagtactctcat

SEQ ID NO: 3194064 - DNA, 25 bp, Homo sapien
tctaaattcccccagctgaccgaat

SEQ ID NO: 3194065 - DNA, 25 bp, Homo sapien
aattcccccagctgaccgaatggac

SEQ ID NO: 3194066 - DNA, 25 bp, Homo sapien
tgaccgaatggactccactctcagc

SEQ ID NO: 3194067 - DNA, 25 bp, Homo sapien
cagctgaccgaatggactccactct

SEQ ID NO: 3194068 - DNA, 25 bp, Homo sapien
gggatgggatgaccttaagccagat

SEQ ID NO: 3194069 - DNA, 25 bp, Homo sapien
atgaccttaagccagatgcatggag

SEQ ID NO: 3194070 - DNA, 25 bp, Homo sapien
gagtttaggaacacacacaggtaga

SEQ ID NO: 3194071 - DNA, 25 bp, Homo sapien
cttaagtggagatcagggatgggat

SEQ ID NO: 3194072 - DNA, 25 bp, Homo sapien
ttaccacaaacaattatgagaacta

SEQ ID NO: 3194073 - DNA, 25 bp, Homo sapien
attaccacaaacaattatgagaact

SEQ ID NO: 3194074 - DNA, 25 bp, Homo sapien
gagaagattcgttcttttggattaa

SEQ ID NO: 3194075 - DNA, 25 bp, Homo sapien
taccacaaacaattatgagaactac

SEQ ID NO: 3194076 - DNA, 25 bp, Homo sapien
gtctccatctgtggacatacaccag

SEQ ID NO: 3194077 - DNA, 25 bp, Homo sapien
catctgtggacatacaccagttcag

SEQ ID NO: 3194078 - DNA, 25 bp, Homo sapien
tttccccaatctcaagttcacgctg

SEQ ID NO: 3194079 - DNA, 25 bp, Homo sapien
tggacatacaccagttcagagcctt

SEQ ID NO: 3194080 - DNA, 25 bp, Homo sapien
gctgctacattgccctgtggggcac

SEQ ID NO: 3194081 - DNA, 25 bp, Homo sapien
ctgctacattgccctgtggggcact

SEQ ID NO: 3194082 - DNA, 25 bp, Homo sapien
gagggaggtatctgtcatccttttc

SEQ ID NO: 3194083 - DNA, 25 bp, Homo sapien
tatctgtcatccttttcagagccca

SEQ ID NO: 3194084 - DNA, 25 bp, Homo sapien
ggtatctgtcatccttttcagagcc

SEQ ID NO: 3194085 - DNA, 25 bp, Homo sapien
gaggtatctgtcatccttttcagag

SEQ ID NO: 3194086 - DNA, 25 bp, Homo sapien
cttcctgagcatcaacctccttttt

SEQ ID NO: 3194087 - DNA, 25 bp, Homo sapien
ttctgcttttgccttggaaataatg

SEQ ID NO: 3194088 - DNA, 25 bp, Homo sapien
gcttttgccttggaaataatgacag

SEQ ID NO: 3194089 - DNA, 25 bp, Homo sapien
tttgccttggaaataatgacagtgt

SEQ ID NO: 3194090 - DNA, 25 bp, Homo sapien
aattactagttacagctctagaacc

SEQ ID NO: 3194091 - DNA, 25 bp, Homo sapien
tactagttacagctctagaaccacc

SEQ ID NO: 3194092 - DNA, 25 bp, Homo sapien
tagttacagctctagaaccacccag

SEQ ID NO: 3194093 - DNA, 25 bp, Homo sapien
ttacagctctagaaccacccagcag

SEQ ID NO: 3194094 - DNA, 25 bp, Homo sapien
cacaggaacggtcaatacctgacaa

SEQ ID NO: 3194095 - DNA, 25 bp, Homo sapien
tcacaggaacggtcaatacctgaca

SEQ ID NO: 3194096 - DNA, 25 bp, Homo sapien
tcaaatatcacaggaacggtcaata

SEQ ID NO: 3194097 - DNA, 25 bp, Homo sapien
aatatcacaggaacggtcaatacct

SEQ ID NO: 3194098 - DNA, 25 bp, Homo sapien
agactctagaaaatgccctgcattg

SEQ ID NO: 3194099 - DNA, 25 bp, Homo sapien
tctgctgaatcaagtaagactctag

SEQ ID NO: 3194100 - DNA, 25 bp, Homo sapien
gaaggaagcatggaaccaggagctc

SEQ ID NO: 3194101 - DNA, 25 bp, Homo sapien
cagggatcatcttttcaggcttgga

SEQ ID NO: 3194102 - DNA, 25 bp, Homo sapien
aattgcctgaaggtcttttgatgac

SEQ ID NO: 3194103 - DNA, 25 bp, Homo sapien
aggtcttttgatgacgaatagaaac

SEQ ID NO: 3194104 - DNA, 25 bp, Homo sapien
catgtctcttattaattgcctgaag

SEQ ID NO: 3194105 - DNA, 25 bp, Homo sapien
tcctttatacacttattaacatgct

SEQ ID NO: 3194106 - DNA, 25 bp, Homo sapien
gagactccttgattcttataacttc

SEQ ID NO: 3194107 - DNA, 25 bp, Homo sapien
tcagtgaatactcctttaaaagcca

SEQ ID NO: 3194108 - DNA, 25 bp, Homo sapien
ctgaagtgagactccttgattctta

SEQ ID NO: 3194109 - DNA, 25 bp, Homo sapien
taacttcagtgaatactcctttaaa

SEQ ID NO: 3194110 - DNA, 25 bp, Homo sapien
gtatagtaatgaagtgtaatgccat

SEQ ID NO: 3194111 - DNA, 25 bp, Homo sapien
taatgaagtgtaatgccattaaaac

SEQ ID NO: 3194112 - DNA, 25 bp, Homo sapien
tttttaagacgttgttgccataaca

SEQ ID NO: 3194113 - DNA, 25 bp, Homo sapien
tcctctgctacacaggtcatagcaa

SEQ ID NO: 3194114 - DNA, 25 bp, Homo sapien
atgttccttgaatatcagcttctcc

SEQ ID NO: 3194115 - DNA, 25 bp, Homo sapien
atatgttccttgaatatcagcttct

SEQ ID NO: 3194116 - DNA, 25 bp, Homo sapien
tgtgcaatatgaagatctttaatat

SEQ ID NO: 3194117 - DNA, 25 bp, Homo sapien
atgaagatctttaatatgttccttg

SEQ ID NO: 3194118 - DNA, 25 bp, Homo sapien
attttgttaaagcttgggtgaagtg

SEQ ID NO: 3194119 - DNA, 25 bp, Homo sapien
tcagatgattttgttaaagcttggg

SEQ ID NO: 3194120 - DNA, 25 bp, Homo sapien
aagcttgggtgaagtggcagtaaga

SEQ ID NO: 3194121 - DNA, 25 bp, Homo sapien
gatgattttgttaaagcttgggtga

SEQ ID NO: 3194122 - DNA, 25 bp, Homo sapien
ccttggtgcagagaacttggatata

SEQ ID NO: 3194123 - DNA, 25 bp, Homo sapien
gctcagcgggtaatgctgcttgccc

SEQ ID NO: 3194124 - DNA, 25 bp, Homo sapien
aattggccttcaatggtcaaatcag

SEQ ID NO: 3194125 - DNA, 25 bp, Homo sapien
agtagacactacattaactgaagtc

SEQ ID NO: 3194126 - DNA, 25 bp, Homo sapien
tctcattgtgagtatctccattgcc

SEQ ID NO: 3194127 - DNA, 25 bp, Homo sapien
tcattgtgagtatctccattgcctt

SEQ ID NO: 3194128 - DNA, 25 bp, Homo sapien
aatctcattgtgagtatctccattg

SEQ ID NO: 3194129 - DNA, 25 bp, Homo sapien
ggaatctcattgtgagtatctccat

SEQ ID NO: 3194130 - DNA, 25 bp, Homo sapien
gatagaaaaggagtatatattatgt

SEQ ID NO: 3194131 - DNA, 25 bp, Homo sapien
tttggatagaaaaggagtatatatt

SEQ ID NO: 3194132 - DNA, 25 bp, Homo sapien
tatatattatgtgtagatatgtcca

SEQ ID NO: 3194133 - DNA, 25 bp, Homo sapien
tagaaaaggagtatatattatgtgt

SEQ ID NO: 3194134 - DNA, 25 bp, Homo sapien
ttctggctctcttgtagcggaaagc

SEQ ID NO: 3194135 - DNA, 25 bp, Homo sapien
tcaattctggctctcttgtagcgga

SEQ ID NO: 3194136 - DNA, 25 bp, Homo sapien
gccaacccaggcttcaattctggct

SEQ ID NO: 3194137 - DNA, 25 bp, Homo sapien
tctcttgtagcggaaagccttaaaa

SEQ ID NO: 3194138 - DNA, 25 bp, Homo sapien
ggcatggatgcagacgcgccttcgt

SEQ ID NO: 3194139 - DNA, 25 bp, Homo sapien
tagcaatgctttaaccgtgtcctcc

SEQ ID NO: 3194140 - DNA, 25 bp, Homo sapien
gggctctctgggttcacagttgata

SEQ ID NO: 3194141 - DNA, 25 bp, Homo sapien
gcgtgttggctaaggagggctctct

SEQ ID NO: 3194142 - DNA, 25 bp, Homo sapien
tgaatcaggtgtcgccgccttcggt

SEQ ID NO: 3194143 - DNA, 25 bp, Homo sapien
ccgcgtaattgtatccgggacagaa

SEQ ID NO: 3194144 - DNA, 25 bp, Homo sapien
cagaagggacctgtgtttgtgcgct

SEQ ID NO: 3194145 - DNA, 25 bp, Homo sapien
tgtgcgctgaatcaggtgtcgccgc

SEQ ID NO: 3194146 - DNA, 25 bp, Homo sapien
ggctgccccgcgcgagtttgagtgt

SEQ ID NO: 3194147 - DNA, 25 bp, Homo sapien
ttggctgccccgcgcgagtttgagt

SEQ ID NO: 3194148 - DNA, 25 bp, Homo sapien
tcttggctgccccgcgcgagtttga

SEQ ID NO: 3194149 - DNA, 25 bp, Homo sapien
ctgccccgcgcgagtttgagtgtgt

SEQ ID NO: 3194150 - DNA, 25 bp, Homo sapien
cccttccgccctctggaacggcgtg

SEQ ID NO: 3194151 - DNA, 25 bp, Homo sapien
ttccgccctctggaacggcgtggtc

SEQ ID NO: 3194152 - DNA, 25 bp, Homo sapien
ctcagggagcaaacaacgcccctct

SEQ ID NO: 3194153 - DNA, 25 bp, Homo sapien
tggaacggcgtggtccctccgctca

SEQ ID NO: 3194154 - DNA, 25 bp, Homo sapien
catatggcagaaacaggatcgcggg

SEQ ID NO: 3194155 - DNA, 25 bp, Homo sapien
ctcgaacggatgccatatggcagaa

SEQ ID NO: 3194156 - DNA, 25 bp, Homo sapien
tgccatatggcagaaacaggatcgc

SEQ ID NO: 3194157 - DNA, 25 bp, Homo sapien
atatggcagaaacaggatcgcgggc

SEQ ID NO: 3194158 - DNA, 25 bp, Homo sapien
cttgagcgcacaaacgcgagagaac

SEQ ID NO: 3194159 - DNA, 25 bp, Homo sapien
ttgagcgcacaaacgcgagagaacc

SEQ ID NO: 3194160 - DNA, 25 bp, Homo sapien
atcccttcaggggtcaagtacaagg

SEQ ID NO: 3194161 - DNA, 25 bp, Homo sapien
ggtcaagtacaaggtcctcggccga

SEQ ID NO: 3194162 - DNA, 25 bp, Homo sapien
aagtacaaggtcctcggccgaatcg

SEQ ID NO: 3194163 - DNA, 25 bp, Homo sapien
tggcctctgggctccgcggtgccca

SEQ ID NO: 3194164 - DNA, 25 bp, Homo sapien
ttgaagaggtcccgaagctcctcct

SEQ ID NO: 3194165 - DNA, 25 bp, Homo sapien
agttgaagaggtcccgaagctcctc

SEQ ID NO: 3194166 - DNA, 25 bp, Homo sapien
gggagttgaagaggtcccgaagctc

SEQ ID NO: 3194167 - DNA, 25 bp, Homo sapien
gagttgaagaggtcccgaagctcct

SEQ ID NO: 3194168 - DNA, 25 bp, Homo sapien
tacactgtccattgtcgagagtcgc

SEQ ID NO: 3194169 - DNA, 25 bp, Homo sapien
cgtaccattcccaaatcggcgcggg

SEQ ID NO: 3194170 - DNA, 25 bp, Homo sapien
ttctctaatgcaagggcaccccgta

SEQ ID NO: 3194171 - DNA, 25 bp, Homo sapien
aaagtctcagcgagcttgtacagcc

SEQ ID NO: 3194172 - DNA, 25 bp, Homo sapien
gattgtccttttgccccgacgcact

SEQ ID NO: 3194173 - DNA, 25 bp, Homo sapien
ccttttgccccgacgcactgcatct

SEQ ID NO: 3194174 - DNA, 25 bp, Homo sapien
tcagattgtccttttgccccgacgc

SEQ ID NO: 3194175 - DNA, 25 bp, Homo sapien
cttttgccccgacgcactgcatcta

SEQ ID NO: 3194176 - DNA, 25 bp, Homo sapien
tgttaagggcactaacgcttcccaa

SEQ ID NO: 3194177 - DNA, 25 bp, Homo sapien
tgactacaagattctggcagtggag

SEQ ID NO: 3194178 - DNA, 25 bp, Homo sapien
ggacttccatttaacagtagccact

SEQ ID NO: 3194179 - DNA, 25 bp, Homo sapien
cagtggagtaacatgctgccagaat

SEQ ID NO: 3194180 - DNA, 25 bp, Homo sapien
gtctctccaatgttgccttctcaca

SEQ ID NO: 3194181 - DNA, 25 bp, Homo sapien
tatgtgtctctccaatgttgccttc

SEQ ID NO: 3194182 - DNA, 25 bp, Homo sapien
ctatgtgtctctccaatgttgcctt

SEQ ID NO: 3194183 - DNA, 25 bp, Homo sapien
tctccaatgttgccttctcacaaat

SEQ ID NO: 3194184 - DNA, 25 bp, Homo sapien
tatagaattgaaagcaaagttgaca

SEQ ID NO: 3194185 - DNA, 25 bp, Homo sapien
ttgataaggctgaatgacacataat

SEQ ID NO: 3194186 - DNA, 25 bp, Homo sapien
ctaattgaatgtcaatgttaatccc

SEQ ID NO: 3194187 - DNA, 25 bp, Homo sapien
gaaatatctatggaacatctgttca

SEQ ID NO: 3194188 - DNA, 25 bp, Homo sapien
taacatacaaaaaaaatcactatta

SEQ ID NO: 3194189 - DNA, 25 bp, Homo sapien
tacactaacatacaaaaaaaatcac

SEQ ID NO: 3194190 - DNA, 25 bp, Homo sapien
cattctatagtattatacactaaca

SEQ ID NO: 3194191 - DNA, 25 bp, Homo sapien
atgcattctatagtattatacacta

SEQ ID NO: 3194192 - DNA, 25 bp, Homo sapien
aatatctgatctaatactttgtcta

SEQ ID NO: 3194193 - DNA, 25 bp, Homo sapien
agggatctagaacccagccatccca

SEQ ID NO: 3194194 - DNA, 25 bp, Homo sapien
tttccccaaaaatatctgatctaat

SEQ ID NO: 3194195 - DNA, 25 bp, Homo sapien
aacaaaatacaatgctcaccattca

SEQ ID NO: 3194196 - DNA, 25 bp, Homo sapien
gaaagctgacccctaatctggaaat

SEQ ID NO: 3194197 - DNA, 25 bp, Homo sapien
ggaattccagtgctacgtcagtaca

SEQ ID NO: 3194198 - DNA, 25 bp, Homo sapien
tgtatggtggcctctctcgtgcaag

SEQ ID NO: 3194199 - DNA, 25 bp, Homo sapien
tgctaatggagcaggagcacccact

SEQ ID NO: 3194200 - DNA, 25 bp, Homo sapien
tacttcccaggcagtctattgacca

SEQ ID NO: 3194201 - DNA, 25 bp, Homo sapien
gaaatgctcattcaaagcaggaatg

SEQ ID NO: 3194202 - DNA, 25 bp, Homo sapien
tggacccacataaagggactttgga

SEQ ID NO: 3194203 - DNA, 25 bp, Homo sapien
catatggcatagtggtcttttcagt

SEQ ID NO: 3194204 - DNA, 25 bp, Homo sapien
tgctgcaactcaagacaaatataca

SEQ ID NO: 3194205 - DNA, 25 bp, Homo sapien
actcaagacaaatatacagcaggaa

SEQ ID NO: 3194206 - DNA, 25 bp, Homo sapien
caactcaagacaaatatacagcagg

SEQ ID NO: 3194207 - DNA, 25 bp, Homo sapien
tgcaactcaagacaaatatacagca

SEQ ID NO: 3194208 - DNA, 25 bp, Homo sapien
gaatcatgtgttctacgcagctact

SEQ ID NO: 3194209 - DNA, 25 bp, Homo sapien
tctacgcagctactttctgggcctt

SEQ ID NO: 3194210 - DNA, 25 bp, Homo sapien
tgtgttctacgcagctactttctgg

SEQ ID NO: 3194211 - DNA, 25 bp, Homo sapien
tatgtgaatcatgtgttctacgcag

SEQ ID NO: 3194212 - DNA, 25 bp, Homo sapien
taactctgttgctcaatctctcatt

SEQ ID NO: 3194213 - DNA, 25 bp, Homo sapien
ctaataactctgttgctcaatctct

SEQ ID NO: 3194214 - DNA, 25 bp, Homo sapien
atctctcattgtccccaagatcatt

SEQ ID NO: 3194215 - DNA, 25 bp, Homo sapien
caatctctcattgtccccaagatca

SEQ ID NO: 3194216 - DNA, 25 bp, Homo sapien
tatctcttcttgtaacatctaatgc

SEQ ID NO: 3194217 - DNA, 25 bp, Homo sapien
tctcttcttgtaacatctaatgctt

SEQ ID NO: 3194218 - DNA, 25 bp, Homo sapien
atctcttcttgtaacatctaatgct

SEQ ID NO: 3194219 - DNA, 25 bp, Homo sapien
attatctcttcttgtaacatctaat

SEQ ID NO: 3194220 - DNA, 25 bp, Homo sapien
ggcaaacagtgcaccgaactgacat

SEQ ID NO: 3194221 - DNA, 25 bp, Homo sapien
gtgatgcctaagagccagcagcctg

SEQ ID NO: 3194222 - DNA, 25 bp, Homo sapien
gatacaagcagtccttaccttctag

SEQ ID NO: 3194223 - DNA, 25 bp, Homo sapien
tttgcaaattccagtaccctagagt

SEQ ID NO: 3194224 - DNA, 25 bp, Homo sapien
taataaacggaggtgaaactctcac

SEQ ID NO: 3194225 - DNA, 25 bp, Homo sapien
tcccgaggatatgatgatggcaagg

SEQ ID NO: 3194226 - DNA, 25 bp, Homo sapien
taaactacaattacgctacagaagc

SEQ ID NO: 3194227 - DNA, 25 bp, Homo sapien
agaatgaaataagcacccagaaggg

SEQ ID NO: 3194228 - DNA, 25 bp, Homo sapien
tcaggaagagttattgccatgcctg

SEQ ID NO: 3194229 - DNA, 25 bp, Homo sapien
aggaagagttattgccatgcctgtg

SEQ ID NO: 3194230 - DNA, 25 bp, Homo sapien
ctcaggaagagttattgccatgcct

SEQ ID NO: 3194231 - DNA, 25 bp, Homo sapien
gaagagttattgccatgcctgtgtc

SEQ ID NO: 3194232 - DNA, 25 bp, Homo sapien
tgacagatacttgacaccagctcca

SEQ ID NO: 3194233 - DNA, 25 bp, Homo sapien
agagctcctgccagtttgttagcaa

SEQ ID NO: 3194234 - DNA, 25 bp, Homo sapien
cagctccaaaagacaccaagacaaa

SEQ ID NO: 3194235 - DNA, 25 bp, Homo sapien
agacaccaagacaaagccatgttca

SEQ ID NO: 3194236 - DNA, 25 bp, Homo sapien
ttgtggtaaccattctatgagttta

SEQ ID NO: 3194237 - DNA, 25 bp, Homo sapien
cattttgtggtaaccattctatgag

SEQ ID NO: 3194238 - DNA, 25 bp, Homo sapien
ttttgtggtaaccattctatgagtt

SEQ ID NO: 3194239 - DNA, 25 bp, Homo sapien
agtttagtgttgtttcctagattct

SEQ ID NO: 3194240 - DNA, 25 bp, Homo sapien
ttaaaataaattgactgttcccatg

SEQ ID NO: 3194241 - DNA, 25 bp, Homo sapien
aatatagaggcccaaaggtttacat

SEQ ID NO: 3194242 - DNA, 25 bp, Homo sapien
cagagcagataatccagttaaagtt

SEQ ID NO: 3194243 - DNA, 25 bp, Homo sapien
gataattaaaattgatggctggtct

SEQ ID NO: 3194244 - DNA, 25 bp, Homo sapien
tgttcaaaccaccatggctcaggaa

SEQ ID NO: 3194245 - DNA, 25 bp, Homo sapien
caggcacaccatgatatatagtttc

SEQ ID NO: 3194246 - DNA, 25 bp, Homo sapien
gagtggaattcccactacaggcaca

SEQ ID NO: 3194247 - DNA, 25 bp, Homo sapien
taaccttcactagtgcttcatagag

SEQ ID NO: 3194248 - DNA, 25 bp, Homo sapien
tattgaaaataattggctactgaca

SEQ ID NO: 3194249 - DNA, 25 bp, Homo sapien
ctgacaatatactgtggtatgtaag

SEQ ID NO: 3194250 - DNA, 25 bp, Homo sapien
ctattgaaaataattggctactgac

SEQ ID NO: 3194251 - DNA, 25 bp, Homo sapien
ggtatgtaagttcatcagctttaat

SEQ ID NO: 3194252 - DNA, 25 bp, Homo sapien
gctattataattgtattgcaataaa

SEQ ID NO: 3194253 - DNA, 25 bp, Homo sapien
ctggaaagcacgttacctctttcct

SEQ ID NO: 3194254 - DNA, 25 bp, Homo sapien
gaatccaaagcattaggaaacagag

SEQ ID NO: 3194255 - DNA, 25 bp, Homo sapien
ttaatgctatatactattccatggt

SEQ ID NO: 3194256 - DNA, 25 bp, Homo sapien
ccaaagagccattatatcagggaga

SEQ ID NO: 3194257 - DNA, 25 bp, Homo sapien
cagtaacacagaacacgggacatgc

SEQ ID NO: 3194258 - DNA, 25 bp, Homo sapien
gaaaggtcgagagagccactagaaa

SEQ ID NO: 3194259 - DNA, 25 bp, Homo sapien
ccagcttgaatgactcacatggcag

SEQ ID NO: 3194260 - DNA, 25 bp, Homo sapien
gagttgggaaacaccatgaagtcag

SEQ ID NO: 3194261 - DNA, 25 bp, Homo sapien
tcatgtgccaatctttgacaaatgg

SEQ ID NO: 3194262 - DNA, 25 bp, Homo sapien
taatctaaaaacatgtgactgcaca

SEQ ID NO: 3194263 - DNA, 25 bp, Homo sapien
gatacagaacttcattctatcactt

SEQ ID NO: 3194264 - DNA, 25 bp, Homo sapien
gatgggctccattgtgacgaataat

SEQ ID NO: 3194265 - DNA, 25 bp, Homo sapien
gagaaagtataacaaggcagcacca

SEQ ID NO: 3194266 - DNA, 25 bp, Homo sapien
gatagttcgattgacagggtgacca

SEQ ID NO: 3194267 - DNA, 25 bp, Homo sapien
gagatctgatggacagcggcacgta

SEQ ID NO: 3194268 - DNA, 25 bp, Homo sapien
caatgagtgaaccaatttatttcta

SEQ ID NO: 3194269 - DNA, 25 bp, Homo sapien
atgagtgaaccaatttatttctatc

SEQ ID NO: 3194270 - DNA, 25 bp, Homo sapien
gagtgaaccaatttatttctatcac

SEQ ID NO: 3194271 - DNA, 25 bp, Homo sapien
ttcaatgagtgaaccaatttatttc

SEQ ID NO: 3194272 - DNA, 25 bp, Homo sapien
taatatagattgtatggcccagaca

SEQ ID NO: 3194273 - DNA, 25 bp, Homo sapien
gaaaccattcctgatccgggacacg

SEQ ID NO: 3194274 - DNA, 25 bp, Homo sapien
gaagtggccatactctatcagaaaa

SEQ ID NO: 3194275 - DNA, 25 bp, Homo sapien
ccgggacacgcacatatcaagattt

SEQ ID NO: 3194276 - DNA, 25 bp, Homo sapien
tagaatctagcccaagtgtggaaaa

SEQ ID NO: 3194277 - DNA, 25 bp, Homo sapien
gtctcacatttaacacgtgtttcca

SEQ ID NO: 3194278 - DNA, 25 bp, Homo sapien
catgtcgatgtccttgtaaggtaac

SEQ ID NO: 3194279 - DNA, 25 bp, Homo sapien
tgatcagtaaatacctacacttaac

SEQ ID NO: 3194280 - DNA, 25 bp, Homo sapien
taaggaagatcactaatcttgcagg

SEQ ID NO: 3194281 - DNA, 25 bp, Homo sapien
ttacccaaaagtgaagatatgagtc

SEQ ID NO: 3194282 - DNA, 25 bp, Homo sapien
taattgtgtggacatctaagaccct

SEQ ID NO: 3194283 - DNA, 25 bp, Homo sapien
tcttggaagcatgataagcagctct

SEQ ID NO: 3194284 - DNA, 25 bp, Homo sapien
taaggataggtcactgagcctgaca

SEQ ID NO: 3194285 - DNA, 25 bp, Homo sapien
ttgagctttctccactgcgttaaaa

SEQ ID NO: 3194286 - DNA, 25 bp, Homo sapien
gaaggatcgagaacaactattccac

SEQ ID NO: 3194287 - DNA, 25 bp, Homo sapien
gaaaggcaactacttgacaaagatt

SEQ ID NO: 3194288 - DNA, 25 bp, Homo sapien
caacttatctcaatgtctctcaaga

SEQ ID NO: 3194289 - DNA, 25 bp, Homo sapien
taaaggttgtttatctcttttctgc

SEQ ID NO: 3194290 - DNA, 25 bp, Homo sapien
tctcaatgtctctcaagatatatac

SEQ ID NO: 3194291 - DNA, 25 bp, Homo sapien
tttattcaatctccaacttatctca

SEQ ID NO: 3194292 - DNA, 25 bp, Homo sapien
ttcagttcaggactctatcttaata

SEQ ID NO: 3194293 - DNA, 25 bp, Homo sapien
caacaattatgtttagctgatgtga

SEQ ID NO: 3194294 - DNA, 25 bp, Homo sapien
gcaatgcctaccgaaagctataaag

SEQ ID NO: 3194295 - DNA, 25 bp, Homo sapien
gtactcttatactttcatcaattca

SEQ ID NO: 3194296 - DNA, 25 bp, Homo sapien
cagcgtcctccattgtatagttcac

SEQ ID NO: 3194297 - DNA, 25 bp, Homo sapien
tcatggctctatcatccctcagagg

SEQ ID NO: 3194298 - DNA, 25 bp, Homo sapien
aacatagccccacttaataaagagg

SEQ ID NO: 3194299 - DNA, 25 bp, Homo sapien
gtatgttctgctacctacactcaga

SEQ ID NO: 3194300 - DNA, 25 bp, Homo sapien
tctaaaatatggctgagtaaatcac

SEQ ID NO: 3194301 - DNA, 25 bp, Homo sapien
gtaatgcctttcgaaactcatccaa

SEQ ID NO: 3194302 - DNA, 25 bp, Homo sapien
tagttttatctctgctggctcatcc

SEQ ID NO: 3194303 - DNA, 25 bp, Homo sapien
ggcagctggatagaccttcatggaa

SEQ ID NO: 3194304 - DNA, 25 bp, Homo sapien
tatactaaaatgcaagcagcttgtg

SEQ ID NO: 3194305 - DNA, 25 bp, Homo sapien
aatatgggatggtcttcaaacagta

SEQ ID NO: 3194306 - DNA, 25 bp, Homo sapien
tatgtcaactgcagcataaagtcag

SEQ ID NO: 3194307 - DNA, 25 bp, Homo sapien
gcaagacatagtacctccaatcatg

SEQ ID NO: 3194308 - DNA, 25 bp, Homo sapien
tccaaagtagtaatgttagaaagct

SEQ ID NO: 3194309 - DNA, 25 bp, Homo sapien
gctgctattcttacagttagaaggg

SEQ ID NO: 3194310 - DNA, 25 bp, Homo sapien
cattcagcggtgagcattgcttagg

SEQ ID NO: 3194311 - DNA, 25 bp, Homo sapien
gggaacttgtagatattgcaacgca

SEQ ID NO: 3194312 - DNA, 25 bp, Homo sapien
gatggacatgtaccaaattaacttc

SEQ ID NO: 3194313 - DNA, 25 bp, Homo sapien
tggacatgtaccaaattaacttctt

SEQ ID NO: 3194314 - DNA, 25 bp, Homo sapien
ttaatgatggacatgtaccaaatta

SEQ ID NO: 3194315 - DNA, 25 bp, Homo sapien
ccttcttagaagcatgaaaatccag

SEQ ID NO: 3194316 - DNA, 25 bp, Homo sapien
tggtgcaggtaccttacagtctctc

SEQ ID NO: 3194317 - DNA, 25 bp, Homo sapien
gctcatggttgggtgcacattcgca

SEQ ID NO: 3194318 - DNA, 25 bp, Homo sapien
tgaagttggcttttattgtgggacc

SEQ ID NO: 3194319 - DNA, 25 bp, Homo sapien
cgcataattgtggtagcgcagcact

SEQ ID NO: 3194320 - DNA, 25 bp, Homo sapien
acttgagaggtattgtctaaaatcc

SEQ ID NO: 3194321 - DNA, 25 bp, Homo sapien
taagctatcaaaaacaatagtagcg

SEQ ID NO: 3194322 - DNA, 25 bp, Homo sapien
tgttaagcacttacaacttgagagg

SEQ ID NO: 3194323 - DNA, 25 bp, Homo sapien
ccaaagaacaatggagatagtgatt

SEQ ID NO: 3194324 - DNA, 25 bp, Homo sapien
cagagagtgtcttggtctcatggga

SEQ ID NO: 3194325 - DNA, 25 bp, Homo sapien
tccccttgtctaccacgatgtgaga

SEQ ID NO: 3194326 - DNA, 25 bp, Homo sapien
gtctccccaaccacgtagaactgta

SEQ ID NO: 3194327 - DNA, 25 bp, Homo sapien
taatacgcctaatgatggagatcca

SEQ ID NO: 3194328 - DNA, 25 bp, Homo sapien
accggattgatgcagaactcagtgc

SEQ ID NO: 3194329 - DNA, 25 bp, Homo sapien
ccggattgatgcagaactcagtgca

SEQ ID NO: 3194330 - DNA, 25 bp, Homo sapien
acctgatacccacaatgcactacag

SEQ ID NO: 3194331 - DNA, 25 bp, Homo sapien
gatacctgatacccacaatgcacta

SEQ ID NO: 3194332 - DNA, 25 bp, Homo sapien
agcttctgccttgtcaacttagaga

SEQ ID NO: 3194333 - DNA, 25 bp, Homo sapien
cagttcttatcaggaacgttttcaa

SEQ ID NO: 3194334 - DNA, 25 bp, Homo sapien
gattgttctatctaagacttctagt

SEQ ID NO: 3194335 - DNA, 25 bp, Homo sapien
tttgcattccgaaaatgtactgcag

SEQ ID NO: 3194336 - DNA, 25 bp, Homo sapien
cagcagaaacgagaaaccaggaacc

SEQ ID NO: 3194337 - DNA, 25 bp, Homo sapien
gcattcctatgacccctgatggcca

SEQ ID NO: 3194338 - DNA, 25 bp, Homo sapien
gcatttgactattgaggctcttgag

SEQ ID NO: 3194339 - DNA, 25 bp, Homo sapien
ccaggaaccaatgcacaagaataca

SEQ ID NO: 3194340 - DNA, 25 bp, Homo sapien
aaggtacagctaggatcagggttgg

SEQ ID NO: 3194341 - DNA, 25 bp, Homo sapien
ttaaggtacagctaggatcagggtt

SEQ ID NO: 3194342 - DNA, 25 bp, Homo sapien
aggtacagctaggatcagggttggg

SEQ ID NO: 3194343 - DNA, 25 bp, Homo sapien
taaggtacagctaggatcagggttg

SEQ ID NO: 3194344 - DNA, 25 bp, Homo sapien
tttaagtccaagttgattggaggca

SEQ ID NO: 3194345 - DNA, 25 bp, Homo sapien
ctttaagtccaagttgattggaggc

SEQ ID NO: 3194346 - DNA, 25 bp, Homo sapien
ttaagtccaagttgattggaggcat

SEQ ID NO: 3194347 - DNA, 25 bp, Homo sapien
acctgcattcgggtttaactgccaa

SEQ ID NO: 3194348 - DNA, 25 bp, Homo sapien
gtactacaagtacgtcagaaagcat

SEQ ID NO: 3194349 - DNA, 25 bp, Homo sapien
taactgccaacatgacaagctgtac

SEQ ID NO: 3194350 - DNA, 25 bp, Homo sapien
gttcaggcacctgcattcgggttta

SEQ ID NO: 3194351 - DNA, 25 bp, Homo sapien
tcccagaatgatctgatttcccagt

SEQ ID NO: 3194352 - DNA, 25 bp, Homo sapien
acttggctgtgatgtgtaaccatga

SEQ ID NO: 3194353 - DNA, 25 bp, Homo sapien
ggccttgtcggactgactgtctctg

SEQ ID NO: 3194354 - DNA, 25 bp, Homo sapien
tctctcccagaatgatctgatttcc

SEQ ID NO: 3194355 - DNA, 25 bp, Homo sapien
cattctctgacaggtacaaggaggg

SEQ ID NO: 3194356 - DNA, 25 bp, Homo sapien
ggacttggcttgatgcagaagctag

SEQ ID NO: 3194357 - DNA, 25 bp, Homo sapien
cttggcttgatgcagaagctagaac

SEQ ID NO: 3194358 - DNA, 25 bp, Homo sapien
ggagggggacttggcttgatgcaga

SEQ ID NO: 3194359 - DNA, 25 bp, Homo sapien
tgtgcttatttgatttttggctgac

SEQ ID NO: 3194360 - DNA, 25 bp, Homo sapien
ataaaaatgagatgtgcttatttga

SEQ ID NO: 3194361 - DNA, 25 bp, Homo sapien
aaaatgagatgtgcttatttgattt

SEQ ID NO: 3194362 - DNA, 25 bp, Homo sapien
aggaatttgttgtaataaaaatgag

SEQ ID NO: 3194363 - DNA, 25 bp, Homo sapien
tactgtctttgacggctttccttgt

SEQ ID NO: 3194364 - DNA, 25 bp, Homo sapien
gagggctcccttttccattgtctta

SEQ ID NO: 3194365 - DNA, 25 bp, Homo sapien
cattgtcttatccttttccccagct

SEQ ID NO: 3194366 - DNA, 25 bp, Homo sapien
ctttcctttgctgagggctcccttt

SEQ ID NO: 3194367 - DNA, 25 bp, Homo sapien
caatgtggagtttgacatagggcac

SEQ ID NO: 3194368 - DNA, 25 bp, Homo sapien
aaatctttaggtgcccagctgtgag

SEQ ID NO: 3194369 - DNA, 25 bp, Homo sapien
gaactccctagatctcccttgtcag

SEQ ID NO: 3194370 - DNA, 25 bp, Homo sapien
gattcagttctatgggtagcagtca

SEQ ID NO: 3194371 - DNA, 25 bp, Homo sapien
cagaggagctggctccatatctcat

SEQ ID NO: 3194372 - DNA, 25 bp, Homo sapien
agcagaggagctggctccatatctc

SEQ ID NO: 3194373 - DNA, 25 bp, Homo sapien
tagcagaggagctggctccatatct

SEQ ID NO: 3194374 - DNA, 25 bp, Homo sapien
gtagcagaggagctggctccatatc

SEQ ID NO: 3194375 - DNA, 25 bp, Homo sapien
tagaagttatatttgcacgtaagta

SEQ ID NO: 3194376 - DNA, 25 bp, Homo sapien
ttatagaagttatatttgcacgtaa

SEQ ID NO: 3194377 - DNA, 25 bp, Homo sapien
tgctttatagaagttatatttgcac

SEQ ID NO: 3194378 - DNA, 25 bp, Homo sapien
gctttatagaagttatatttgcacg

SEQ ID NO: 3194379 - DNA, 25 bp, Homo sapien
tttaacggtgtgctgaacagaggtt

SEQ ID NO: 3194380 - DNA, 25 bp, Homo sapien
aacggtgtgctgaacagaggtttga

SEQ ID NO: 3194381 - DNA, 25 bp, Homo sapien
ttaacggtgtgctgaacagaggttt

SEQ ID NO: 3194382 - DNA, 25 bp, Homo sapien
taacggtgtgctgaacagaggtttg

SEQ ID NO: 3194383 - DNA, 25 bp, Homo sapien
caggagcagctggtattccggtgat

SEQ ID NO: 3194384 - DNA, 25 bp, Homo sapien
ttgctgtactcggtctgctccctgg

SEQ ID NO: 3194385 - DNA, 25 bp, Homo sapien
tgctccctggtgtaattctcgtgtc

SEQ ID NO: 3194386 - DNA, 25 bp, Homo sapien
ccggtgattaaatagttctcatagc

SEQ ID NO: 3194387 - DNA, 25 bp, Homo sapien
gctgtttctgccaatcataatccgg

SEQ ID NO: 3194388 - DNA, 25 bp, Homo sapien
catcgctgaattagcttctgttgga

SEQ ID NO: 3194389 - DNA, 25 bp, Homo sapien
gctccaggtccttgaaagtcttgag

SEQ ID NO: 3194390 - DNA, 25 bp, Homo sapien
tgtgagcggaatgcagcccatcgct

SEQ ID NO: 3194391 - DNA, 25 bp, Homo sapien
taggcctggcgacttgacaaaatag

SEQ ID NO: 3194392 - DNA, 25 bp, Homo sapien
cttggccacgggaggttcactaaat

SEQ ID NO: 3194393 - DNA, 25 bp, Homo sapien
gagaggagacatgcgcaaagcatat

SEQ ID NO: 3194394 - DNA, 25 bp, Homo sapien
caaaatagccgagcactgagaggag

SEQ ID NO: 3194395 - DNA, 25 bp, Homo sapien
gagtgtccccgtgagtgcagtatta

SEQ ID NO: 3194396 - DNA, 25 bp, Homo sapien
tccccgtgagtgcagtattaagtat

SEQ ID NO: 3194397 - DNA, 25 bp, Homo sapien
tgtccccgtgagtgcagtattaagt

SEQ ID NO: 3194398 - DNA, 25 bp, Homo sapien
cccgtgagtgcagtattaagtattg

SEQ ID NO: 3194399 - DNA, 25 bp, Homo sapien
catctttaaaatcttgatgcttatc

SEQ ID NO: 3194400 - DNA, 25 bp, Homo sapien
aagcttctttagtcctttttgctca

SEQ ID NO: 3194401 - DNA, 25 bp, Homo sapien
tgctgctcttttcccttctcgtttc

SEQ ID NO: 3194402 - DNA, 25 bp, Homo sapien
tggtttctcctttccacgaagcttc

SEQ ID NO: 3194403 - DNA, 25 bp, Homo sapien
catttcagaccggtatttccatcca

SEQ ID NO: 3194404 - DNA, 25 bp, Homo sapien
atttccatccaagtgttgcagattt

SEQ ID NO: 3194405 - DNA, 25 bp, Homo sapien
ccatccaagtgttgcagatttactt

SEQ ID NO: 3194406 - DNA, 25 bp, Homo sapien
tttcagaccggtatttccatccaag

SEQ ID NO: 3194407 - DNA, 25 bp, Homo sapien
aggaatagcccttaaataatctatg

SEQ ID NO: 3194408 - DNA, 25 bp, Homo sapien
tccatgcccagtgtagtgaaaacta

SEQ ID NO: 3194409 - DNA, 25 bp, Homo sapien
gaaaactactgatttgccacattgc

SEQ ID NO: 3194410 - DNA, 25 bp, Homo sapien
agtagctaagctggccacgtcttat

SEQ ID NO: 3194411 - DNA, 25 bp, Homo sapien
tttcctgacaattgggatggtcatc

SEQ ID NO: 3194412 - DNA, 25 bp, Homo sapien
taatgtgagagatttgggtcagatg

SEQ ID NO: 3194413 - DNA, 25 bp, Homo sapien
agatgttggatttaactttcagccg

SEQ ID NO: 3194414 - DNA, 25 bp, Homo sapien
cagatgtttggatcaagatgttgga

SEQ ID NO: 3194415 - DNA, 25 bp, Homo sapien
ctcagctcgcagggagttgtggaga

SEQ ID NO: 3194416 - DNA, 25 bp, Homo sapien
cggcgctgcgctcgggccttagctg

SEQ ID NO: 3194417 - DNA, 25 bp, Homo sapien
acagcattctggcagtcctcgcagc

SEQ ID NO: 3194418 - DNA, 25 bp, Homo sapien
tggtgagaagtgacagcattctggc

SEQ ID NO: 3194419 - DNA, 25 bp, Homo sapien
aataatgtctacaggctaaaggaag

SEQ ID NO: 3194420 - DNA, 25 bp, Homo sapien
gcagaattcagtagactaaaatagg

SEQ ID NO: 3194421 - DNA, 25 bp, Homo sapien
gacagtagccaaacaaagttgtcag

SEQ ID NO: 3194422 - DNA, 25 bp, Homo sapien
atgtgttcttaccaagttgcaaaac

SEQ ID NO: 3194423 - DNA, 25 bp, Homo sapien
tggcatcagacggatccaatgctgg

SEQ ID NO: 3194424 - DNA, 25 bp, Homo sapien
gaagtcattcctgcttggcatcaga

SEQ ID NO: 3194425 - DNA, 25 bp, Homo sapien
tttcgcagctgggaagcagttagcc

SEQ ID NO: 3194426 - DNA, 25 bp, Homo sapien
tgaccaagaagagtctaagcccaga

SEQ ID NO: 3194427 - DNA, 25 bp, Homo sapien
gctaacagccaaggatttggacaga

SEQ ID NO: 3194428 - DNA, 25 bp, Homo sapien
agtctcctgagccactagattttga

SEQ ID NO: 3194429 - DNA, 25 bp, Homo sapien
tcttaactctaactgtggttacctc

SEQ ID NO: 3194430 - DNA, 25 bp, Homo sapien
tggttacctcctttgctaacagcca

SEQ ID NO: 3194431 - DNA, 25 bp, Homo sapien
ggcatatgtaatttgctctgtgttc

SEQ ID NO: 3194432 - DNA, 25 bp, Homo sapien
cctgcagggtaaatgtcaagtgaat

SEQ ID NO: 3194433 - DNA, 25 bp, Homo sapien
ggccatatctgattagtaaagctgt

SEQ ID NO: 3194434 - DNA, 25 bp, Homo sapien
cagcatattcaattgccaggcatat

SEQ ID NO: 3194435 - DNA, 25 bp, Homo sapien
tccaaattctaggactttttctgca

SEQ ID NO: 3194436 - DNA, 25 bp, Homo sapien
tgctccaaattctaggactttttct

SEQ ID NO: 3194437 - DNA, 25 bp, Homo sapien
gaatgctccaaattctaggactttt

SEQ ID NO: 3194438 - DNA, 25 bp, Homo sapien
ctgaatgctccaaattctaggactt

SEQ ID NO: 3194439 - DNA, 25 bp, Homo sapien
gagccagcagctgtagaggcagttt

SEQ ID NO: 3194440 - DNA, 25 bp, Homo sapien
gcagcagagatagtgccccttggct

SEQ ID NO: 3194441 - DNA, 25 bp, Homo sapien
gggagatgctcattgtggtatcctg

SEQ ID NO: 3194442 - DNA, 25 bp, Homo sapien
aatgtaggctgattctgcagacagc

SEQ ID NO: 3194443 - DNA, 25 bp, Homo sapien
cttggtccgtttgtaatatttcttg

SEQ ID NO: 3194444 - DNA, 25 bp, Homo sapien
tcattacaaccagttgctctgttac

SEQ ID NO: 3194445 - DNA, 25 bp, Homo sapien
gggtataagccatggtcttgacttc

SEQ ID NO: 3194446 - DNA, 25 bp, Homo sapien
caaccagttgctctgttacttggtc

SEQ ID NO: 3194447 - DNA, 25 bp, Homo sapien
tgacattaagtggatctgattaggc

SEQ ID NO: 3194448 - DNA, 25 bp, Homo sapien
taagtggatctgattaggctggaga

SEQ ID NO: 3194449 - DNA, 25 bp, Homo sapien
gacattaagtggatctgattaggct

SEQ ID NO: 3194450 - DNA, 25 bp, Homo sapien
cattaagtggatctgattaggctgg

SEQ ID NO: 3194451 - DNA, 25 bp, Homo sapien
cacaggtactgcaactgaacaggtc

SEQ ID NO: 3194452 - DNA, 25 bp, Homo sapien
aatcaggaaacccatccgcactctc

SEQ ID NO: 3194453 - DNA, 25 bp, Homo sapien
gaaacccatccgcactctcaaatct

SEQ ID NO: 3194454 - DNA, 25 bp, Homo sapien
gaacaggtccctgccaatcaggaaa

SEQ ID NO: 3194455 - DNA, 25 bp, Homo sapien
gacaatgtctgactcacggagagtc

SEQ ID NO: 3194456 - DNA, 25 bp, Homo sapien
actaacatcccagagacaatgtctg

SEQ ID NO: 3194457 - DNA, 25 bp, Homo sapien
taacatcccagagacaatgtctgac

SEQ ID NO: 3194458 - DNA, 25 bp, Homo sapien
gtctgactcacggagagtcaggatg

SEQ ID NO: 3194459 - DNA, 25 bp, Homo sapien
gggttgttgttgttgtcgttttgca

SEQ ID NO: 3194460 - DNA, 25 bp, Homo sapien
ggttgttgttgttgtcgttttgcat

SEQ ID NO: 3194461 - DNA, 25 bp, Homo sapien
cctgagggttgttgttgttgtcgtt

SEQ ID NO: 3194462 - DNA, 25 bp, Homo sapien
ctgagggttgttgttgttgtcgttt

SEQ ID NO: 3194463 - DNA, 25 bp, Homo sapien
gacaaatttcccagttagcttcgta

SEQ ID NO: 3194464 - DNA, 25 bp, Homo sapien
ttctcaaacctaaagccaatatcca

SEQ ID NO: 3194465 - DNA, 25 bp, Homo sapien
aacctaaagccaatatccatgaggg

SEQ ID NO: 3194466 - DNA, 25 bp, Homo sapien
ctaaacgtagaagccaaaactgaag

SEQ ID NO: 3194467 - DNA, 25 bp, Homo sapien
tctgctggtatatctgctggttgga

SEQ ID NO: 3194468 - DNA, 25 bp, Homo sapien
gagttatattgacacaagtcttcat

SEQ ID NO: 3194469 - DNA, 25 bp, Homo sapien
tctgtatctgctggtatatctgctg

SEQ ID NO: 3194470 - DNA, 25 bp, Homo sapien
tttatgtaaagagttatattgacac

SEQ ID NO: 3194471 - DNA, 25 bp, Homo sapien
ggttcatactacacattaaggtcca

SEQ ID NO: 3194472 - DNA, 25 bp, Homo sapien
tatctaccattgtagtgttgtacag

SEQ ID NO: 3194473 - DNA, 25 bp, Homo sapien
cagtatgtagcctattaaggttctc

SEQ ID NO: 3194474 - DNA, 25 bp, Homo sapien
ggtccactcttggtactctgtaatc

SEQ ID NO: 3194475 - DNA, 25 bp, Homo sapien
acttctggatctgtaagttctggcc

SEQ ID NO: 3194476 - DNA, 25 bp, Homo sapien
caatgatgctattactaatgtgctc

SEQ ID NO: 3194477 - DNA, 25 bp, Homo sapien
atcatcaatgatgctattactaatg

SEQ ID NO: 3194478 - DNA, 25 bp, Homo sapien
gatgctattactaatgtgctcaact

SEQ ID NO: 3194479 - DNA, 25 bp, Homo sapien
tatagaaaagcttggatattcccat

SEQ ID NO: 3194480 - DNA, 25 bp, Homo sapien
atcgtgatggtggatcatggcattc

SEQ ID NO: 3194481 - DNA, 25 bp, Homo sapien
cctccatatagaaaagcttggatat

SEQ ID NO: 3194482 - DNA, 25 bp, Homo sapien
tgtggtcagagtctaagatatcatt

SEQ ID NO: 3194483 - DNA, 25 bp, Homo sapien
cacataggtctggtatacggttgtt

SEQ ID NO: 3194484 - DNA, 25 bp, Homo sapien
ccaccatagtaagtatgagttgagt

SEQ ID NO: 3194485 - DNA, 25 bp, Homo sapien
ggccacataggtctggtatacggtt

SEQ ID NO: 3194486 - DNA, 25 bp, Homo sapien
tcaggccacataggtctggtatacg

SEQ ID NO: 3194487 - DNA, 25 bp, Homo sapien
tggcttgaaagttgttggcatttgc

SEQ ID NO: 3194488 - DNA, 25 bp, Homo sapien
ggcttgaaagttgttggcatttgca

SEQ ID NO: 3194489 - DNA, 25 bp, Homo sapien
tcggaacccgatccaatgaggtttc

SEQ ID NO: 3194490 - DNA, 25 bp, Homo sapien
gaacccgatccaatgaggtttccat

SEQ ID NO: 3194491 - DNA, 25 bp, Homo sapien
tccatttctcctctatctacagaaa

SEQ ID NO: 3194492 - DNA, 25 bp, Homo sapien
tcctctatctacagaaatctttctc

SEQ ID NO: 3194493 - DNA, 25 bp, Homo sapien
taatgcatgtgctgtgcagtctctt

SEQ ID NO: 3194494 - DNA, 25 bp, Homo sapien
tcttccccttttaatgcatgtgctg

SEQ ID NO: 3194495 - DNA, 25 bp, Homo sapien
tatgaattgaattgggagaagtcct

SEQ ID NO: 3194496 - DNA, 25 bp, Homo sapien
cagaacagccttcagggaattgtca

SEQ ID NO: 3194497 - DNA, 25 bp, Homo sapien
agtctgcagactagtattcttgttg

SEQ ID NO: 3194498 - DNA, 25 bp, Homo sapien
caaacatagagagggttgctctgaa

SEQ ID NO: 3194499 - DNA, 25 bp, Homo sapien
gctgcagtactaaggattttgcact

SEQ ID NO: 3194500 - DNA, 25 bp, Homo sapien
ggaggtgctcgtatgatatcccacc

SEQ ID NO: 3194501 - DNA, 25 bp, Homo sapien
cattgatcaaatgcagctgcagtac

SEQ ID NO: 3194502 - DNA, 25 bp, Homo sapien
aaagtagaaactgctgtcaagtagg

SEQ ID NO: 3194503 - DNA, 25 bp, Homo sapien
tcataatcggcatatttggcaccat

SEQ ID NO: 3194504 - DNA, 25 bp, Homo sapien
agtgttttgacagtacttttatagc

SEQ ID NO: 3194505 - DNA, 25 bp, Homo sapien
tatgcatatcgaaaatatgctcgtt

SEQ ID NO: 3194506 - DNA, 25 bp, Homo sapien
gctgtgaattctgaatatgcatatc

SEQ ID NO: 3194507 - DNA, 25 bp, Homo sapien
aatataacaaagactcttaccacag

SEQ ID NO: 3194508 - DNA, 25 bp, Homo sapien
gactcttaccacagtattacttgtt

SEQ ID NO: 3194509 - DNA, 25 bp, Homo sapien
tttctagtctattgagtccagaaac

SEQ ID NO: 3194510 - DNA, 25 bp, Homo sapien
tatgtttgcctattatccttaagga

SEQ ID NO: 3194511 - DNA, 25 bp, Homo sapien
tccatacagctttgatggcttttgt

SEQ ID NO: 3194512 - DNA, 25 bp, Homo sapien
tggcttttgttggaatttctattaa

SEQ ID NO: 3194513 - DNA, 25 bp, Homo sapien
ctccatacagctttgatggcttttg

SEQ ID NO: 3194514 - DNA, 25 bp, Homo sapien
gttggaatttctattaattcatttg

SEQ ID NO: 3194515 - DNA, 25 bp, Homo sapien
tatatttatctggtatatgtgatat

SEQ ID NO: 3194516 - DNA, 25 bp, Homo sapien
taacttttgtgggtacatactagat

SEQ ID NO: 3194517 - DNA, 25 bp, Homo sapien
tctcaaacttcaagtgacctcaagt

SEQ ID NO: 3194518 - DNA, 25 bp, Homo sapien
gcaatgtaaaataatcacattaggg

SEQ ID NO: 3194519 - DNA, 25 bp, Homo sapien
ctgaccggcgcctagctgggtgcct

SEQ ID NO: 3194520 - DNA, 25 bp, Homo sapien
tgctgaccggcgcctagctgggtgc

SEQ ID NO: 3194521 - DNA, 25 bp, Homo sapien
gctgaccggcgcctagctgggtgcc

SEQ ID NO: 3194522 - DNA, 25 bp, Homo sapien
agcccctagggtctgcatagatgct

SEQ ID NO: 3194523 - DNA, 25 bp, Homo sapien
ccgccgtcaggaccgccgcctggaa

SEQ ID NO: 3194524 - DNA, 25 bp, Homo sapien
ccagagcccctagggtctgcataga

SEQ ID NO: 3194525 - DNA, 25 bp, Homo sapien
gaaccagagcccctagggtctgcat

SEQ ID NO: 3194526 - DNA, 25 bp, Homo sapien
ctggacgcctcccactcctgccaga

SEQ ID NO: 3194527 - DNA, 25 bp, Homo sapien
tggacgcctcccactcctgccagac

SEQ ID NO: 3194528 - DNA, 25 bp, Homo sapien
ctcccactcctgccagacccccggc

SEQ ID NO: 3194529 - DNA, 25 bp, Homo sapien
ccactcctgccagacccccggccat

SEQ ID NO: 3194530 - DNA, 25 bp, Homo sapien
gcttccagttcacggtctccaggct

SEQ ID NO: 3194531 - DNA, 25 bp, Homo sapien
gtcttcgatggtcttgaggtaatgg

SEQ ID NO: 3194532 - DNA, 25 bp, Homo sapien
aggtcttcgatggtcttgaggtaat

SEQ ID NO: 3194533 - DNA, 25 bp, Homo sapien
acctgcggtcccttgttctccaggt

SEQ ID NO: 3194534 - DNA, 25 bp, Homo sapien
caatctgcaaaacgatgcggggatt

SEQ ID NO: 3194535 - DNA, 25 bp, Homo sapien
atctgcaaaacgatgcggggattgt

SEQ ID NO: 3194536 - DNA, 25 bp, Homo sapien
gtcaatctgcaaaacgatgcgggga

SEQ ID NO: 3194537 - DNA, 25 bp, Homo sapien
ctgcaaaacgatgcggggattgtcc

SEQ ID NO: 3194538 - DNA, 25 bp, Homo sapien
cggagcccatgtatgttgctctcta

SEQ ID NO: 3194539 - DNA, 25 bp, Homo sapien
gcggagcccatgtatgttgctctct

SEQ ID NO: 3194540 - DNA, 25 bp, Homo sapien
cagctcatcatattggtcccggatg

SEQ ID NO: 3194541 - DNA, 25 bp, Homo sapien
ccgagccagctcatcatattggtcc

SEQ ID NO: 3194542 - DNA, 25 bp, Homo sapien
gagccagctcatcatattggtcccg

SEQ ID NO: 3194543 - DNA, 25 bp, Homo sapien
gctcatcatattggtcccggatgtc

SEQ ID NO: 3194544 - DNA, 25 bp, Homo sapien
tcagcagctgcaacctcgacagact

SEQ ID NO: 3194545 - DNA, 25 bp, Homo sapien
gcagctgcaacctcgacagactgcg

SEQ ID NO: 3194546 - DNA, 25 bp, Homo sapien
tctcagcagctgcaacctcgacaga

SEQ ID NO: 3194547 - DNA, 25 bp, Homo sapien
ctgcaacctcgacagactgcgtggt

SEQ ID NO: 3194548 - DNA, 25 bp, Homo sapien
actttaccattcactatctggcagg

SEQ ID NO: 3194549 - DNA, 25 bp, Homo sapien
ccactttaccattcactatctggca

SEQ ID NO: 3194550 - DNA, 25 bp, Homo sapien
gacaccactttaccattcactatct

SEQ ID NO: 3194551 - DNA, 25 bp, Homo sapien
caccactttaccattcactatctgg

SEQ ID NO: 3194552 - DNA, 25 bp, Homo sapien
tacttaagtactaagggacctggca

SEQ ID NO: 3194553 - DNA, 25 bp, Homo sapien
aacttcccatgtgacatcattaaaa

SEQ ID NO: 3194554 - DNA, 25 bp, Homo sapien
tatagttacacagttatgtatggta

SEQ ID NO: 3194555 - DNA, 25 bp, Homo sapien
cacagttatgtatggtaagataata

SEQ ID NO: 3194556 - DNA, 25 bp, Homo sapien
tctcaggatatgatggataaaactc

SEQ ID NO: 3194557 - DNA, 25 bp, Homo sapien
cagtttgtagtttcaccagtgttct

SEQ ID NO: 3194558 - DNA, 25 bp, Homo sapien
gaagtgatccagcattacctcagag

SEQ ID NO: 3194559 - DNA, 25 bp, Homo sapien
tcttggttaaacatccaggagtgaa

SEQ ID NO: 3194560 - DNA, 25 bp, Homo sapien
gcgctaacgagtcagggccgatctt

SEQ ID NO: 3194561 - DNA, 25 bp, Homo sapien
ccagctaaaggtgtagatgagcaaa

SEQ ID NO: 3194562 - DNA, 25 bp, Homo sapien
gcaaatatggctggagcgctaacga

SEQ ID NO: 3194563 - DNA, 25 bp, Homo sapien
tgatctgttagccagccagctaaag

SEQ ID NO: 3194564 - DNA, 25 bp, Homo sapien
catggtcctgttggaaggtataacc

SEQ ID NO: 3194565 - DNA, 25 bp, Homo sapien
atggtcctgttggaaggtataaccg

SEQ ID NO: 3194566 - DNA, 25 bp, Homo sapien
acgtgcatgatccaccagcacaaca

SEQ ID NO: 3194567 - DNA, 25 bp, Homo sapien
gcaatccaacagattttgcacctcg

SEQ ID NO: 3194568 - DNA, 25 bp, Homo sapien
aggcaatccaacagattttgcacct

SEQ ID NO: 3194569 - DNA, 25 bp, Homo sapien
acaccaacttcaccctgtccacgtg

SEQ ID NO: 3194570 - DNA, 25 bp, Homo sapien
gtagctttgtaatacactttgtaac

SEQ ID NO: 3194571 - DNA, 25 bp, Homo sapien
tattgtatagtatgaacactttaac

SEQ ID NO: 3194572 - DNA, 25 bp, Homo sapien
taactttgtattggtaattatagct

SEQ ID NO: 3194573 - DNA, 25 bp, Homo sapien
gttaattaggaacattggtctgtag

SEQ ID NO: 3194574 - DNA, 25 bp, Homo sapien
taaggccataacccagctttctcat

SEQ ID NO: 3194575 - DNA, 25 bp, Homo sapien
ctttaaggccataacccagctttct

SEQ ID NO: 3194576 - DNA, 25 bp, Homo sapien
cctcctttaaggccataacccagct

SEQ ID NO: 3194577 - DNA, 25 bp, Homo sapien
ctcctttaaggccataacccagctt

SEQ ID NO: 3194578 - DNA, 25 bp, Homo sapien
caccaagtgtcagtgacatactcat

SEQ ID NO: 3194579 - DNA, 25 bp, Homo sapien
ttcaccaagtgtcagtgacatactc

SEQ ID NO: 3194580 - DNA, 25 bp, Homo sapien
tcaccaagtgtcagtgacatactca

SEQ ID NO: 3194581 - DNA, 25 bp, Homo sapien
ccttcaccaagtgtcagtgacatac

SEQ ID NO: 3194582 - DNA, 25 bp, Homo sapien
tttcagaaggggaatcaggaagcaa

SEQ ID NO: 3194583 - DNA, 25 bp, Homo sapien
ctttcagaaggggaatcaggaagca

SEQ ID NO: 3194584 - DNA, 25 bp, Homo sapien
aatgttttctgtgtcgctacaagga

SEQ ID NO: 3194585 - DNA, 25 bp, Homo sapien
ttgtagctgacaaatctgcaatttg

SEQ ID NO: 3194586 - DNA, 25 bp, Homo sapien
ctacaaggagcaacacttgcaatgg

SEQ ID NO: 3194587 - DNA, 25 bp, Homo sapien
tacacatatcatatacgcgtctttg

SEQ ID NO: 3194588 - DNA, 25 bp, Homo sapien
caagggtgcatgttaccattaaagc

SEQ ID NO: 3194589 - DNA, 25 bp, Homo sapien
aaagggaaggcaaatcaagggtgca

SEQ ID NO: 3194590 - DNA, 25 bp, Homo sapien
gagtaaaattcctggcctactacag

SEQ ID NO: 3194591 - DNA, 25 bp, Homo sapien
cctactacaggattccaggaaaggg

SEQ ID NO: 3194592 - DNA, 25 bp, Homo sapien
tctgatgtactgagttcagcctcac

SEQ ID NO: 3194593 - DNA, 25 bp, Homo sapien
gagttgttctctttatactgcagcg

SEQ ID NO: 3194594 - DNA, 25 bp, Homo sapien
tgcagcgatgatggccctgaactgt

SEQ ID NO: 3194595 - DNA, 25 bp, Homo sapien
taggttcttccaatctccggataca

SEQ ID NO: 3194596 - DNA, 25 bp, Homo sapien
tgacatgcctcacccattggtagaa

SEQ ID NO: 3194597 - DNA, 25 bp, Homo sapien
actacttcccctattgatgagtggg

SEQ ID NO: 3194598 - DNA, 25 bp, Homo sapien
tacaggagaagtgccagacgctaat

SEQ ID NO: 3194599 - DNA, 25 bp, Homo sapien
taaagagcaaacacttggcgagttc

SEQ ID NO: 3194600 - DNA, 25 bp, Homo sapien
gtaacacactctagatgaatctcat

SEQ ID NO: 3194601 - DNA, 25 bp, Homo sapien
gaatcaaaaatatgtgactcatgtg

SEQ ID NO: 3194602 - DNA, 25 bp, Homo sapien
gtgtggtaggctctgacaatacaac

SEQ ID NO: 3194603 - DNA, 25 bp, Homo sapien
taagcaggatatcagaataagagac

SEQ ID NO: 3194604 - DNA, 25 bp, Homo sapien
tgtgtaacctagaatttgtattatt

SEQ ID NO: 3194605 - DNA, 25 bp, Homo sapien
tcttcattctttgtacgctccgtaa

SEQ ID NO: 3194606 - DNA, 25 bp, Homo sapien
ttatcctagtgagaaggactggtgg

SEQ ID NO: 3194607 - DNA, 25 bp, Homo sapien
ggtgggcagaagcagttagtacatc

SEQ ID NO: 3194608 - DNA, 25 bp, Homo sapien
catggctaaagtcatagaatgctcc

SEQ ID NO: 3194609 - DNA, 25 bp, Homo sapien
ctttcagaaaatgactggacattca

SEQ ID NO: 3194610 - DNA, 25 bp, Homo sapien
tttcagaaaatgactggacattcat

SEQ ID NO: 3194611 - DNA, 25 bp, Homo sapien
tatgtccgatgaacgaatgtatgca

SEQ ID NO: 3194612 - DNA, 25 bp, Homo sapien
gggtggtagtcattagtccatggaa

SEQ ID NO: 3194613 - DNA, 25 bp, Homo sapien
gaatcaaatccgagttcctctactg

SEQ ID NO: 3194614 - DNA, 25 bp, Homo sapien
tctactgcggattcggcagggacca

SEQ ID NO: 3194615 - DNA, 25 bp, Homo sapien
ttatagggttgtgcggatccatcta

SEQ ID NO: 3194616 - DNA, 25 bp, Homo sapien
agggttgtgcggatccatctagaca

SEQ ID NO: 3194617 - DNA, 25 bp, Homo sapien
tagggttgtgcggatccatctagac

SEQ ID NO: 3194618 - DNA, 25 bp, Homo sapien
tgtttatagggttgtgcggatccat

SEQ ID NO: 3194619 - DNA, 25 bp, Homo sapien
caagaggtggcaaggcggttgtatc

SEQ ID NO: 3194620 - DNA, 25 bp, Homo sapien
tcataggctgtaccttgacctaatg

SEQ ID NO: 3194621 - DNA, 25 bp, Homo sapien
gctgttgcttgtagtactctggcga

SEQ ID NO: 3194622 - DNA, 25 bp, Homo sapien
atggcagtatataggctgcgggcaa

SEQ ID NO: 3194623 - DNA, 25 bp, Homo sapien
aatcttccaggtgtaagccggatgc

SEQ ID NO: 3194624 - DNA, 25 bp, Homo sapien
aaagtgaacagatcatgatgaaatc

SEQ ID NO: 3194625 - DNA, 25 bp, Homo sapien
agtgaacagatcatgatgaaatctt

SEQ ID NO: 3194626 - DNA, 25 bp, Homo sapien
tcaaagtgaacagatcatgatgaaa

SEQ ID NO: 3194627 - DNA, 25 bp, Homo sapien
ttttctttgcatctgaaacttcctc

SEQ ID NO: 3194628 - DNA, 25 bp, Homo sapien
tttctttgcatctgaaacttcctct

SEQ ID NO: 3194629 - DNA, 25 bp, Homo sapien
agcctggtttggctacctgaccagt

SEQ ID NO: 3194630 - DNA, 25 bp, Homo sapien
tttggctacctgaccagtgggacct

SEQ ID NO: 3194631 - DNA, 25 bp, Homo sapien
cctggtgcaactgagcctggtttgg

SEQ ID NO: 3194632 - DNA, 25 bp, Homo sapien
ctgaccagtgggacctaaaacacct

SEQ ID NO: 3194633 - DNA, 25 bp, Homo sapien
agaagttgctgctgtaacatcagag

SEQ ID NO: 3194634 - DNA, 25 bp, Homo sapien
gcacaaagcgctcaatcttccacag

SEQ ID NO: 3194635 - DNA, 25 bp, Homo sapien
gaaatcaactgttcagccgggtgaa

SEQ ID NO: 3194636 - DNA, 25 bp, Homo sapien
gagtgaatacatcaagactttgagg

SEQ ID NO: 3194637 - DNA, 25 bp, Homo sapien
gatttaccagctacctaggcatccc

SEQ ID NO: 3194638 - DNA, 25 bp, Homo sapien
tatgtctagtccaagctgaaagcct

SEQ ID NO: 3194639 - DNA, 25 bp, Homo sapien
taactatcacacacgtaggttaatg

SEQ ID NO: 3194640 - DNA, 25 bp, Homo sapien
taatgcccactaacactggtgaggg

SEQ ID NO: 3194641 - DNA, 25 bp, Homo sapien
taaattggctagataagctagggag

SEQ ID NO: 3194642 - DNA, 25 bp, Homo sapien
acatcaatagatactgcacaacttg

SEQ ID NO: 3194643 - DNA, 25 bp, Homo sapien
ctcaaattgttgtagcattagatca

SEQ ID NO: 3194644 - DNA, 25 bp, Homo sapien
ttcctggaagtgttttacagtcaac

SEQ ID NO: 3194645 - DNA, 25 bp, Homo sapien
gctctctgctcttctacgtagcttt

SEQ ID NO: 3194646 - DNA, 25 bp, Homo sapien
ttcccttatagagtccaatgcacac

SEQ ID NO: 3194647 - DNA, 25 bp, Homo sapien
tggttcccttatagagtccaatgca

SEQ ID NO: 3194648 - DNA, 25 bp, Homo sapien
tctgctcttctacgtagctttaaca

SEQ ID NO: 3194649 - DNA, 25 bp, Homo sapien
ctggtgcaggctctgacgaagccat

SEQ ID NO: 3194650 - DNA, 25 bp, Homo sapien
gtgttacttgcaccagagccactca

SEQ ID NO: 3194651 - DNA, 25 bp, Homo sapien
ctctgacgaagccatgatgtgtgtt

SEQ ID NO: 3194652 - DNA, 25 bp, Homo sapien
gaagccatgatgtgtgttacttgca

SEQ ID NO: 3194653 - DNA, 25 bp, Homo sapien
tcaaactgattatggtagaggctaa

SEQ ID NO: 3194654 - DNA, 25 bp, Homo sapien
ggctgcatgcaaatacaagttctta

SEQ ID NO: 3194655 - DNA, 25 bp, Homo sapien
taaaacccattacagtggtatgatc

SEQ ID NO: 3194656 - DNA, 25 bp, Homo sapien
tgagtcctatcagtacaagcagcct

SEQ ID NO: 3194657 - DNA, 25 bp, Homo sapien
ctttgatagtaattctgtgagtgaa

SEQ ID NO: 3194658 - DNA, 25 bp, Homo sapien
ttctgtgagtgaagatctcttctaa

SEQ ID NO: 3194659 - DNA, 25 bp, Homo sapien
ttgttgaactttgatagtaattctg

SEQ ID NO: 3194660 - DNA, 25 bp, Homo sapien
gagtgaagatctcttctaaattttg

SEQ ID NO: 3194661 - DNA, 25 bp, Homo sapien
gctttgctggcaaaactacataact

SEQ ID NO: 3194662 - DNA, 25 bp, Homo sapien
caggccaagggacagccggagtggg

SEQ ID NO: 3194663 - DNA, 25 bp, Homo sapien
tcgttgggggctggtcgtattccca

SEQ ID NO: 3194664 - DNA, 25 bp, Homo sapien
gctggtcgtattcccaggaaatcaa

SEQ ID NO: 3194665 - DNA, 25 bp, Homo sapien
tgggggctggtcgtattcccaggaa

SEQ ID NO: 3194666 - DNA, 25 bp, Homo sapien
gctttgatgtccgacagcatggcag

SEQ ID NO: 3194667 - DNA, 25 bp, Homo sapien
gtgccgcagccaggtagctctcgaa

SEQ ID NO: 3194668 - DNA, 25 bp, Homo sapien
ctgctccacgcggtgctggtgtgcc

SEQ ID NO: 3194669 - DNA, 25 bp, Homo sapien
gcatggcagtcttgtagtcctggtg

SEQ ID NO: 3194670 - DNA, 25 bp, Homo sapien
aagggggccacgcgcttggcatact

SEQ ID NO: 3194671 - DNA, 25 bp, Homo sapien
ggcatactccaggtgcagatggtct

SEQ ID NO: 3194672 - DNA, 25 bp, Homo sapien
gggggccacgcgcttggcatactcc

SEQ ID NO: 3194673 - DNA, 25 bp, Homo sapien
gtgcagatggtctatggcctccagc

SEQ ID NO: 3194674 - DNA, 25 bp, Homo sapien
cagtgtcctcgatggtgtagatgat

SEQ ID NO: 3194675 - DNA, 25 bp, Homo sapien
gtgtcctcgatggtgtagatgatga

SEQ ID NO: 3194676 - DNA, 25 bp, Homo sapien
ctcagtgtcctcgatggtgtagatg

SEQ ID NO: 3194677 - DNA, 25 bp, Homo sapien
gtcctcgatggtgtagatgatgaac

SEQ ID NO: 3194678 - DNA, 25 bp, Homo sapien
tcgtgctccctgtcagcgtccggca

SEQ ID NO: 3194679 - DNA, 25 bp, Homo sapien
gcctcgtgctccctgtcagcgtccg

SEQ ID NO: 3194680 - DNA, 25 bp, Homo sapien
tgctccctgtcagcgtccggcaggg

SEQ ID NO: 3194681 - DNA, 25 bp, Homo sapien
gtgctccctgtcagcgtccggcagg

SEQ ID NO: 3194682 - DNA, 25 bp, Homo sapien
cagcgcaggtgcttgttggactgct

SEQ ID NO: 3194683 - DNA, 25 bp, Homo sapien
gagatgagcccgatctcctccatct

SEQ ID NO: 3194684 - DNA, 25 bp, Homo sapien
tggactgctggttgctctgctcctc

SEQ ID NO: 3194685 - DNA, 25 bp, Homo sapien
gggtcccgttcatctcagtggagat

SEQ ID NO: 3194686 - DNA, 25 bp, Homo sapien
cacgcggatgtgctccatggtgtgc

SEQ ID NO: 3194687 - DNA, 25 bp, Homo sapien
gtagtccacgatgctgttttcacac

SEQ ID NO: 3194688 - DNA, 25 bp, Homo sapien
tgttgtcgaagatgagggcctcctg

SEQ ID NO: 3194689 - DNA, 25 bp, Homo sapien
tccagcaggtccaggttaggcttgt

SEQ ID NO: 3194690 - DNA, 25 bp, Homo sapien
ttgtcgaagtggttgaaggacgccc

SEQ ID NO: 3194691 - DNA, 25 bp, Homo sapien
cttgtcgaagtggttgaaggacgcc

SEQ ID NO: 3194692 - DNA, 25 bp, Homo sapien
ggaaggtcacaaggccgctatggtt

SEQ ID NO: 3194693 - DNA, 25 bp, Homo sapien
ggtcgaccaggctcatgatgcggtt

SEQ ID NO: 3194694 - DNA, 25 bp, Homo sapien
ctatggttggggtcgaccaggctca

SEQ ID NO: 3194695 - DNA, 25 bp, Homo sapien
catgatgcggttgaactcggcctca

SEQ ID NO: 3194696 - DNA, 25 bp, Homo sapien
ggcgatgacctggtcggccatgtcc

SEQ ID NO: 3194697 - DNA, 25 bp, Homo sapien
aggcgatgacctggtcggccatgtc

SEQ ID NO: 3194698 - DNA, 25 bp, Homo sapien
ggaggcgatgacctggtcggccatg

SEQ ID NO: 3194699 - DNA, 25 bp, Homo sapien
gaggcgatgacctggtcggccatgt

SEQ ID NO: 3194700 - DNA, 25 bp, Homo sapien
ctgtgatgaagttcttgtcccttgc

SEQ ID NO: 3194701 - DNA, 25 bp, Homo sapien
tgaagttcttgtcccttgccaggac

SEQ ID NO: 3194702 - DNA, 25 bp, Homo sapien
ctcgcagctcctcagctgtgatgaa

SEQ ID NO: 3194703 - DNA, 25 bp, Homo sapien
cctcagctgtgatgaagttcttgtc

SEQ ID NO: 3194704 - DNA, 25 bp, Homo sapien
ctcgccatacagggctgtggaggaa

SEQ ID NO: 3194705 - DNA, 25 bp, Homo sapien
gcaccatgcgggcaatagagtactc

SEQ ID NO: 3194706 - DNA, 25 bp, Homo sapien
cgggcaatagagtactcggcctggt

SEQ ID NO: 3194707 - DNA, 25 bp, Homo sapien
gaagacttgtagtcgaggacaccgg

SEQ ID NO: 3194708 - DNA, 25 bp, Homo sapien
tttgcatagatacagagtggaggaa

SEQ ID NO: 3194709 - DNA, 25 bp, Homo sapien
gcagagagtgctttgcatagataca

SEQ ID NO: 3194710 - DNA, 25 bp, Homo sapien
tcctggccaactcccaaaaagagac

SEQ ID NO: 3194711 - DNA, 25 bp, Homo sapien
ctggcccctcgcatggcccaggcgg

SEQ ID NO: 3194712 - DNA, 25 bp, Homo sapien
ggcccctcgcatggcccaggcggtt

SEQ ID NO: 3194713 - DNA, 25 bp, Homo sapien
tctgctggcccctcgcatggcccag

SEQ ID NO: 3194714 - DNA, 25 bp, Homo sapien
tccccagccgtcgggtggtggtggc

SEQ ID NO: 3194715 - DNA, 25 bp, Homo sapien
catctcctggcaatggcaagtgagt

SEQ ID NO: 3194716 - DNA, 25 bp, Homo sapien
ccatctcctggcaatggcaagtgag

SEQ ID NO: 3194717 - DNA, 25 bp, Homo sapien
aaaatttcctgggacactacttgct

SEQ ID NO: 3194718 - DNA, 25 bp, Homo sapien
cacttccgcagcttgaccatctgag

SEQ ID NO: 3194719 - DNA, 25 bp, Homo sapien
ctttaatgcggagcctgttgggttt

SEQ ID NO: 3194720 - DNA, 25 bp, Homo sapien
ccatctgagttttgtacgtaaaatt

SEQ ID NO: 3194721 - DNA, 25 bp, Homo sapien
cctttggagacctagggaaatgtct

SEQ ID NO: 3194722 - DNA, 25 bp, Homo sapien
tgtcttgttcctttggagacctagg

SEQ ID NO: 3194723 - DNA, 25 bp, Homo sapien
tcctttggagacctagggaaatgtc

SEQ ID NO: 3194724 - DNA, 25 bp, Homo sapien
ctttggagacctagggaaatgtctt

SEQ ID NO: 3194725 - DNA, 25 bp, Homo sapien
gctctacagtgattgtctggtctct

SEQ ID NO: 3194726 - DNA, 25 bp, Homo sapien
ttcttcagactctgctctacagtga

SEQ ID NO: 3194727 - DNA, 25 bp, Homo sapien
tctctgcacagtggaaaatcatagt

SEQ ID NO: 3194728 - DNA, 25 bp, Homo sapien
ctctgggtctttgtgattctcctaa

SEQ ID NO: 3194729 - DNA, 25 bp, Homo sapien
tctatcagacagttctactaagggt

SEQ ID NO: 3194730 - DNA, 25 bp, Homo sapien
tctactaagggtggaccagacaatg

SEQ ID NO: 3194731 - DNA, 25 bp, Homo sapien
gaaaacgaaaatgatttttggctgc

SEQ ID NO: 3194732 - DNA, 25 bp, Homo sapien
tgtgtgtgccccttagatctaataa

SEQ ID NO: 3194733 - DNA, 25 bp, Homo sapien
ttagagagaatgatttggcattttg

SEQ ID NO: 3194734 - DNA, 25 bp, Homo sapien
tatttgaccagagaaatagtgtctg

SEQ ID NO: 3194735 - DNA, 25 bp, Homo sapien
gaactacgctcattatgtggatgca

SEQ ID NO: 3194736 - DNA, 25 bp, Homo sapien
gatataagctgtaacatacagcttg

SEQ ID NO: 3194737 - DNA, 25 bp, Homo sapien
cgtaagaatcacaatattgcattgg

SEQ ID NO: 3194738 - DNA, 25 bp, Homo sapien
gcagctcagcctcttttacgtaaga

SEQ ID NO: 3194739 - DNA, 25 bp, Homo sapien
gcaacaagcagatattgcagctcag

SEQ ID NO: 3194740 - DNA, 25 bp, Homo sapien
tctctgatagctccacatctctcat

SEQ ID NO: 3194741 - DNA, 25 bp, Homo sapien
ctagtgaaagcgtcttgtcttccat

SEQ ID NO: 3194742 - DNA, 25 bp, Homo sapien
tgtgatttgtcacagctgacttcct

SEQ ID NO: 3194743 - DNA, 25 bp, Homo sapien
tgaatatgttacattcagatactgc

SEQ ID NO: 3194744 - DNA, 25 bp, Homo sapien
gaatatgttacattcagatactgca

SEQ ID NO: 3194745 - DNA, 25 bp, Homo sapien
ctatttatactccagatcttgtgat

SEQ ID NO: 3194746 - DNA, 25 bp, Homo sapien
tgtttgcatatgagagttaagacca

SEQ ID NO: 3194747 - DNA, 25 bp, Homo sapien
cctgtttgcatatgagagttaagac

SEQ ID NO: 3194748 - DNA, 25 bp, Homo sapien
gctcctgtttgcatatgagagttaa

SEQ ID NO: 3194749 - DNA, 25 bp, Homo sapien
gctctgctcctgtttgcatatgaga

SEQ ID NO: 3194750 - DNA, 25 bp, Homo sapien
tactgtgattctatgggcaatgcac

SEQ ID NO: 3194751 - DNA, 25 bp, Homo sapien
gcatataggcagaacgtaaaatttg

SEQ ID NO: 3194752 - DNA, 25 bp, Homo sapien
caaagtcagtcacaattcatattac

SEQ ID NO: 3194753 - DNA, 25 bp, Homo sapien
gcttattggacttgtaatggcatat

SEQ ID NO: 3194754 - DNA, 25 bp, Homo sapien
cgttgttgaatataatttttcagga

SEQ ID NO: 3194755 - DNA, 25 bp, Homo sapien
aacgttgttgaatataatttttcag

SEQ ID NO: 3194756 - DNA, 25 bp, Homo sapien
acgttgttgaatataatttttcagg

SEQ ID NO: 3194757 - DNA, 25 bp, Homo sapien
ctgctccctgactgtgatgctacca

SEQ ID NO: 3194758 - DNA, 25 bp, Homo sapien
cctgctccctgactgtgatgctacc

SEQ ID NO: 3194759 - DNA, 25 bp, Homo sapien
tgctccctgactgtgatgctaccat

SEQ ID NO: 3194760 - DNA, 25 bp, Homo sapien
ggcttgacaaccatagagccatcct

SEQ ID NO: 3194761 - DNA, 25 bp, Homo sapien
tcaacactctctatgacttccacaa

SEQ ID NO: 3194762 - DNA, 25 bp, Homo sapien
gggtgtcggcattcttctcatcaac

SEQ ID NO: 3194763 - DNA, 25 bp, Homo sapien
ctttcacatggccagaaattgcata

SEQ ID NO: 3194764 - DNA, 25 bp, Homo sapien
agtgtggcagattcccactttgaag

SEQ ID NO: 3194765 - DNA, 25 bp, Homo sapien
atgagtgagtgtggcagattcccac

SEQ ID NO: 3194766 - DNA, 25 bp, Homo sapien
gtgagtgtggcagattcccactttg

SEQ ID NO: 3194767 - DNA, 25 bp, Homo sapien
tacagaagtcatgagtgagtgtggc

SEQ ID NO: 3194768 - DNA, 25 bp, Homo sapien
gaccgaaacttagcatcctgcaaca

SEQ ID NO: 3194769 - DNA, 25 bp, Homo sapien
tataagcttcagaccgaaacttagc

SEQ ID NO: 3194770 - DNA, 25 bp, Homo sapien
tctgcagccctagtataagcttcag

SEQ ID NO: 3194771 - DNA, 25 bp, Homo sapien
ctttatcatctgcagccctagtata

SEQ ID NO: 3194772 - DNA, 25 bp, Homo sapien
ggagggcggctgcttcaagagcttc

SEQ ID NO: 3194773 - DNA, 25 bp, Homo sapien
cgggataagccggagtcgagccatc

SEQ ID NO: 3194774 - DNA, 25 bp, Homo sapien
ataagccggagtcgagccatcggag

SEQ ID NO: 3194775 - DNA, 25 bp, Homo sapien
ggaggctgccgggataagccggagt

SEQ ID NO: 3194776 - DNA, 25 bp, Homo sapien
ctgccgggataagccggagtcgagc

SEQ ID NO: 3194777 - DNA, 25 bp, Homo sapien
tgcagctccaaagcgcccagacgtt

SEQ ID NO: 3194778 - DNA, 25 bp, Homo sapien
caaagcgcccagacgttcgttccgg

SEQ ID NO: 3194779 - DNA, 25 bp, Homo sapien
cgcccagacgttcgttccggtggca

SEQ ID NO: 3194780 - DNA, 25 bp, Homo sapien
aagcgcccagacgttcgttccggtg

SEQ ID NO: 3194781 - DNA, 25 bp, Homo sapien
aagtcacatgaccagtaagccgcca

SEQ ID NO: 3194782 - DNA, 25 bp, Homo sapien
taactgaatactgcgatgaataatg

SEQ ID NO: 3194783 - DNA, 25 bp, Homo sapien
gaaagtgtttctacatccataggaa

SEQ ID NO: 3194784 - DNA, 25 bp, Homo sapien
gcctcatgcctggatggtgaaaagt

SEQ ID NO: 3194785 - DNA, 25 bp, Homo sapien
tgacggtccgtgacagtccttgact

SEQ ID NO: 3194786 - DNA, 25 bp, Homo sapien
aaataatgacatcatgacggtccgt

SEQ ID NO: 3194787 - DNA, 25 bp, Homo sapien
cagtccttgactgtgaatgctgcta

SEQ ID NO: 3194788 - DNA, 25 bp, Homo sapien
catcatgacggtccgtgacagtcct

SEQ ID NO: 3194789 - DNA, 25 bp, Homo sapien
gttgttgagattcagttcgtatcca

SEQ ID NO: 3194790 - DNA, 25 bp, Homo sapien
ttgcatatcttttgatggttgatgc

SEQ ID NO: 3194791 - DNA, 25 bp, Homo sapien
cagttcgtatccattgtgccttgac

SEQ ID NO: 3194792 - DNA, 25 bp, Homo sapien
gtgccttgacaagtggtctctccag

SEQ ID NO: 3194793 - DNA, 25 bp, Homo sapien
gcaaaacagattggatgtctctgag

SEQ ID NO: 3194794 - DNA, 25 bp, Homo sapien
tctgagctgtcagaaaaatgtttca

SEQ ID NO: 3194795 - DNA, 25 bp, Homo sapien
ctatatgtatagtgaagtgttgaat

SEQ ID NO: 3194796 - DNA, 25 bp, Homo sapien
ctggcaaaacagattggatgtctct

SEQ ID NO: 3194797 - DNA, 25 bp, Homo sapien
caaaggtcagggaaacttagctctc

SEQ ID NO: 3194798 - DNA, 25 bp, Homo sapien
tatgtggacactctagcaactattg

SEQ ID NO: 3194799 - DNA, 25 bp, Homo sapien
caagagtggtatcgaaactagcagc

SEQ ID NO: 3194800 - DNA, 25 bp, Homo sapien
cagattcatcggtgaggctaaccaa

SEQ ID NO: 3194801 - DNA, 25 bp, Homo sapien
tcatcacggagcagagatgaggcta

SEQ ID NO: 3194802 - DNA, 25 bp, Homo sapien
tgagaatcatcacggagcagagatg

SEQ ID NO: 3194803 - DNA, 25 bp, Homo sapien
ggcagatgagaatcatcacggagca

SEQ ID NO: 3194804 - DNA, 25 bp, Homo sapien
catcacggagcagagatgaggctaa

SEQ ID NO: 3194805 - DNA, 25 bp, Homo sapien
agaaaaaagcgccataaatttatag

SEQ ID NO: 3194806 - DNA, 25 bp, Homo sapien
atgatgatatgatgtccttccattc

SEQ ID NO: 3194807 - DNA, 25 bp, Homo sapien
atttatagctgcattatgatgatat

SEQ ID NO: 3194808 - DNA, 25 bp, Homo sapien
aaagcgccataaatttatagctgca

SEQ ID NO: 3194809 - DNA, 25 bp, Homo sapien
gccaagttgaatctagatgtttagg

SEQ ID NO: 3194810 - DNA, 25 bp, Homo sapien
aatgacatgtgggagatcagcactc

SEQ ID NO: 3194811 - DNA, 25 bp, Homo sapien
taattgcccatatttgagaatgact

SEQ ID NO: 3194812 - DNA, 25 bp, Homo sapien
tatatcactgttgtaagtcgatcag

SEQ ID NO: 3194813 - DNA, 25 bp, Homo sapien
ctccaagctagtgaggaccatggca

SEQ ID NO: 3194814 - DNA, 25 bp, Homo sapien
gctagtgaggaccatggcaatgctg

SEQ ID NO: 3194815 - DNA, 25 bp, Homo sapien
ctagtgaggaccatggcaatgctgg

SEQ ID NO: 3194816 - DNA, 25 bp, Homo sapien
caagctagtgaggaccatggcaatg

SEQ ID NO: 3194817 - DNA, 25 bp, Homo sapien
tactggatttattctaaacttggat

SEQ ID NO: 3194818 - DNA, 25 bp, Homo sapien
tattctaaacttggatatagcaaat

SEQ ID NO: 3194819 - DNA, 25 bp, Homo sapien
gatttattctaaacttggatatagc

SEQ ID NO: 3194820 - DNA, 25 bp, Homo sapien
atacacttactggatttattctaaa

SEQ ID NO: 3194821 - DNA, 25 bp, Homo sapien
gatcgggtttgacctgcctcattgt

SEQ ID NO: 3194822 - DNA, 25 bp, Homo sapien
gacaacgtaccctgatcgggtttga

SEQ ID NO: 3194823 - DNA, 25 bp, Homo sapien
cagggacaacgtaccctgatcgggt

SEQ ID NO: 3194824 - DNA, 25 bp, Homo sapien
taccctgatcgggtttgacctgcct

SEQ ID NO: 3194825 - DNA, 25 bp, Homo sapien
cttcaagaatttgcgaggcatcctt

SEQ ID NO: 3194826 - DNA, 25 bp, Homo sapien
acttcaagaatttgcgaggcatcct

SEQ ID NO: 3194827 - DNA, 25 bp, Homo sapien
ttccatcaattactcttgagcccag

SEQ ID NO: 3194828 - DNA, 25 bp, Homo sapien
gctagtgttgcgtttggcttaatga

SEQ ID NO: 3194829 - DNA, 25 bp, Homo sapien
gaccgtttccgctttatcatgtaag

SEQ ID NO: 3194830 - DNA, 25 bp, Homo sapien
tgtttctgaccgtttccgctttatc

SEQ ID NO: 3194831 - DNA, 25 bp, Homo sapien
tagagcttgtttagtagttgcaagc

SEQ ID NO: 3194832 - DNA, 25 bp, Homo sapien
tgtttagtagttgcaagctgttggg

SEQ ID NO: 3194833 - DNA, 25 bp, Homo sapien
tctgtttctgacaataacattcacg

SEQ ID NO: 3194834 - DNA, 25 bp, Homo sapien
taacattcacgttaattagagcttg

SEQ ID NO: 3194835 - DNA, 25 bp, Homo sapien
attggcattcagaggcaaaggctgt

SEQ ID NO: 3194836 - DNA, 25 bp, Homo sapien
ggcattcagaggcaaaggctgttgt

SEQ ID NO: 3194837 - DNA, 25 bp, Homo sapien
gaggcaaaggctgttgtggtctcat

SEQ ID NO: 3194838 - DNA, 25 bp, Homo sapien
attcagaggcaaaggctgttgtggt

SEQ ID NO: 3194839 - DNA, 25 bp, Homo sapien
caaatattgataagctgtgttttca

SEQ ID NO: 3194840 - DNA, 25 bp, Homo sapien
tttaaaatttctcccgagatgctct

SEQ ID NO: 3194841 - DNA, 25 bp, Homo sapien
tcagccaatccaagtaatgtaggag

SEQ ID NO: 3194842 - DNA, 25 bp, Homo sapien
gatgctctctttgacctatgtgtta

SEQ ID NO: 3194843 - DNA, 25 bp, Homo sapien
tccagatttttagcataagtggaaa

SEQ ID NO: 3194844 - DNA, 25 bp, Homo sapien
cataagtggaaaggtgttggcaata

SEQ ID NO: 3194845 - DNA, 25 bp, Homo sapien
cagcaatgttgagtaaagtaatata

SEQ ID NO: 3194846 - DNA, 25 bp, Homo sapien
cacagcaatgttgagtaaagtaata

SEQ ID NO: 3194847 - DNA, 25 bp, Homo sapien
ggcggctcgactagacaagtttctg

SEQ ID NO: 3194848 - DNA, 25 bp, Homo sapien
tggcagcttgaaaagagggagtcct

SEQ ID NO: 3194849 - DNA, 25 bp, Homo sapien
aaacccgagccgtgagccttggaat

SEQ ID NO: 3194850 - DNA, 25 bp, Homo sapien
ttcgttagtcccaggacgagcgggc

SEQ ID NO: 3194851 - DNA, 25 bp, Homo sapien
tatccatgtgtttaaccagggcctc

SEQ ID NO: 3194852 - DNA, 25 bp, Homo sapien
gcctccatgacactagttacttctt

SEQ ID NO: 3194853 - DNA, 25 bp, Homo sapien
gtacattcagattgaccaacaaggc

SEQ ID NO: 3194854 - DNA, 25 bp, Homo sapien
tcacctttcggtatccatgtgttta

SEQ ID NO: 3194855 - DNA, 25 bp, Homo sapien
gccattgtgatagatcagagaccca

SEQ ID NO: 3194856 - DNA, 25 bp, Homo sapien
tgagcatgagaaaggagttaaccac

SEQ ID NO: 3194857 - DNA, 25 bp, Homo sapien
tccatcatgcaacacgtagtcccag

SEQ ID NO: 3194858 - DNA, 25 bp, Homo sapien
cagttctctcccctgtgaaagaggg

SEQ ID NO: 3194859 - DNA, 25 bp, Homo sapien
cacataacaggaagacactgattct

SEQ ID NO: 3194860 - DNA, 25 bp, Homo sapien
tactctgccaatcaatgctcttagc

SEQ ID NO: 3194861 - DNA, 25 bp, Homo sapien
tgctcttagcttcccataattttat

SEQ ID NO: 3194862 - DNA, 25 bp, Homo sapien
tgtgatgtcacaagaagatcctgat

SEQ ID NO: 3194863 - DNA, 25 bp, Homo sapien
cagctgctcttcaacttttggtata

SEQ ID NO: 3194864 - DNA, 25 bp, Homo sapien
ttggaattcagctgctcttcaactt

SEQ ID NO: 3194865 - DNA, 25 bp, Homo sapien
gaattcagctgctcttcaacttttg

SEQ ID NO: 3194866 - DNA, 25 bp, Homo sapien
ttcagctgctcttcaacttttggta

SEQ ID NO: 3194867 - DNA, 25 bp, Homo sapien
ctcatttgggcgaataaatactcac

SEQ ID NO: 3194868 - DNA, 25 bp, Homo sapien
aatcactcatttgggcgaataaata

SEQ ID NO: 3194869 - DNA, 25 bp, Homo sapien
ctaatcactcatttgggcgaataaa

SEQ ID NO: 3194870 - DNA, 25 bp, Homo sapien
cactcatttgggcgaataaatactc

SEQ ID NO: 3194871 - DNA, 25 bp, Homo sapien
tcagatatgaatcttcttgatccag

SEQ ID NO: 3194872 - DNA, 25 bp, Homo sapien
tcactaagggtttcaatagatgttc

SEQ ID NO: 3194873 - DNA, 25 bp, Homo sapien
ctgtgttattgaatcactaagggtt

SEQ ID NO: 3194874 - DNA, 25 bp, Homo sapien
acctcagaccactggtcgttttctg

SEQ ID NO: 3194875 - DNA, 25 bp, Homo sapien
agaccactggtcgttttctgtgtta

SEQ ID NO: 3194876 - DNA, 25 bp, Homo sapien
aactcagctatgagcaaattagcag

SEQ ID NO: 3194877 - DNA, 25 bp, Homo sapien
caactcagctatgagcaaattagca

SEQ ID NO: 3194878 - DNA, 25 bp, Homo sapien
cgacatggagaatggcgttacccat

SEQ ID NO: 3194879 - DNA, 25 bp, Homo sapien
ttactcgttatctttctgcgtgacg

SEQ ID NO: 3194880 - DNA, 25 bp, Homo sapien
tgacggtacttacgtgagtaaccaa

SEQ ID NO: 3194881 - DNA, 25 bp, Homo sapien
ttacgtgagtaaccaagcccttcaa

SEQ ID NO: 3194882 - DNA, 25 bp, Homo sapien
tatctttctgcgtgacggtacttac

SEQ ID NO: 3194883 - DNA, 25 bp, Homo sapien
tctatggatcatactttctcagaat

SEQ ID NO: 3194884 - DNA, 25 bp, Homo sapien
tgcacaatgtctatggatcatactt

SEQ ID NO: 3194885 - DNA, 25 bp, Homo sapien
cttgcacaatgtctatggatcatac

SEQ ID NO: 3194886 - DNA, 25 bp, Homo sapien
caatgtctatggatcatactttctc

SEQ ID NO: 3194887 - DNA, 25 bp, Homo sapien
gcaagtgttcaatgaggattctact

SEQ ID NO: 3194888 - DNA, 25 bp, Homo sapien
ttgggaaacttcaattcacaattcc

SEQ ID NO: 3194889 - DNA, 25 bp, Homo sapien
cttgtctgaatgttgcaagtgttca

SEQ ID NO: 3194890 - DNA, 25 bp, Homo sapien
gtcttgggaaacttcaattcacaat

SEQ ID NO: 3194891 - DNA, 25 bp, Homo sapien
gaggtgtcgactgggcatgctcttt

SEQ ID NO: 3194892 - DNA, 25 bp, Homo sapien
caatataaatctgttctcatactct

SEQ ID NO: 3194893 - DNA, 25 bp, Homo sapien
aatcgaggtgtcgactgggcatgct

SEQ ID NO: 3194894 - DNA, 25 bp, Homo sapien
tgaggctaaagtccaaatcgaggtg

SEQ ID NO: 3194895 - DNA, 25 bp, Homo sapien
cttctaattttcagggatgcttctg

SEQ ID NO: 3194896 - DNA, 25 bp, Homo sapien
aattttcagggatgcttctgttggc

SEQ ID NO: 3194897 - DNA, 25 bp, Homo sapien
tctaattttcagggatgcttctgtt

SEQ ID NO: 3194898 - DNA, 25 bp, Homo sapien
ttttcagggatgcttctgttggcat

SEQ ID NO: 3194899 - DNA, 25 bp, Homo sapien
ctttcttccatacctcatttgccat

SEQ ID NO: 3194900 - DNA, 25 bp, Homo sapien
gctccttctttcttccatacctcat

SEQ ID NO: 3194901 - DNA, 25 bp, Homo sapien
tattttctgaactttgctccttctt

SEQ ID NO: 3194902 - DNA, 25 bp, Homo sapien
cttctttcttccatacctcatttgc

SEQ ID NO: 3194903 - DNA, 25 bp, Homo sapien
ttatcagcttttggggatattaaac

SEQ ID NO: 3194904 - DNA, 25 bp, Homo sapien
ctcttttcagagatgttatcagctt

SEQ ID NO: 3194905 - DNA, 25 bp, Homo sapien
ttacactctcctcttttcagagatg

SEQ ID NO: 3194906 - DNA, 25 bp, Homo sapien
ttttcagagatgttatcagcttttg

SEQ ID NO: 3194907 - DNA, 25 bp, Homo sapien
tgagaaaatggcctctaagagaaaa

SEQ ID NO: 3194908 - DNA, 25 bp, Homo sapien
ggtttcagcaccatgatctatggct

SEQ ID NO: 3194909 - DNA, 25 bp, Homo sapien
agaaaatggcctctaagagaaaagg

SEQ ID NO: 3194910 - DNA, 25 bp, Homo sapien
aatgagatctagagttttggtttca

SEQ ID NO: 3194911 - DNA, 25 bp, Homo sapien
accacactactgttggtttctgtct

SEQ ID NO: 3194912 - DNA, 25 bp, Homo sapien
tccactgtgtttgataagtttgtca

SEQ ID NO: 3194913 - DNA, 25 bp, Homo sapien
cactgtgtttgataagtttgtcaga

SEQ ID NO: 3194914 - DNA, 25 bp, Homo sapien
ttaccacactactgttggtttctgt

SEQ ID NO: 3194915 - DNA, 25 bp, Homo sapien
gcatggctgcccttaatacatgaag

SEQ ID NO: 3194916 - DNA, 25 bp, Homo sapien
gtaaatatgcagcagttgtattgcg

SEQ ID NO: 3194917 - DNA, 25 bp, Homo sapien
gaggtgtctgcctataaccataaac

SEQ ID NO: 3194918 - DNA, 25 bp, Homo sapien
cagttgtattgcgaggtgtctgcct

SEQ ID NO: 3194919 - DNA, 25 bp, Homo sapien
cttcatcactctcagactcaaactg

SEQ ID NO: 3194920 - DNA, 25 bp, Homo sapien
ttcttcatcactctcagactcaaac

SEQ ID NO: 3194921 - DNA, 25 bp, Homo sapien
tctgcatttcttcatcactctcaga

SEQ ID NO: 3194922 - DNA, 25 bp, Homo sapien
catcactctcagactcaaactgact

SEQ ID NO: 3194923 - DNA, 25 bp, Homo sapien
tgtcctgtcttgtaggacaagtatc

SEQ ID NO: 3194924 - DNA, 25 bp, Homo sapien
taggacaagtatctgtttctatcac

SEQ ID NO: 3194925 - DNA, 25 bp, Homo sapien
tcagttttgtcctgtcttgtaggac

SEQ ID NO: 3194926 - DNA, 25 bp, Homo sapien
taacttcagttttgtcctgtcttgt

SEQ ID NO: 3194927 - DNA, 25 bp, Homo sapien
cagtaaatcatgtaactttaaaggt

SEQ ID NO: 3194928 - DNA, 25 bp, Homo sapien
atactctttcagtaaatcatgtaac

SEQ ID NO: 3194929 - DNA, 25 bp, Homo sapien
tgaatactctttcagtaaatcatgt

SEQ ID NO: 3194930 - DNA, 25 bp, Homo sapien
tcagtaaatcatgtaactttaaagg

SEQ ID NO: 3194931 - DNA, 25 bp, Homo sapien
ctttcctgtcaaccaaacaccctat

SEQ ID NO: 3194932 - DNA, 25 bp, Homo sapien
caggatgaagtcctccttggatgga

SEQ ID NO: 3194933 - DNA, 25 bp, Homo sapien
aggatgaagtcctccttggatggag

SEQ ID NO: 3194934 - DNA, 25 bp, Homo sapien
tcctgtcaaccaaacaccctattat

SEQ ID NO: 3194935 - DNA, 25 bp, Homo sapien
gatagagctgcctgtcataaggtct

SEQ ID NO: 3194936 - DNA, 25 bp, Homo sapien
ttccccttacccatagcatcaccag

SEQ ID NO: 3194937 - DNA, 25 bp, Homo sapien
gagctgcctgtcataaggtctcctt

SEQ ID NO: 3194938 - DNA, 25 bp, Homo sapien
taaaagatagagctgcctgtcataa

SEQ ID NO: 3194939 - DNA, 25 bp, Homo sapien
tatctggtttattgaactcaagtca

SEQ ID NO: 3194940 - DNA, 25 bp, Homo sapien
tctggtttattgaactcaagtcagc

SEQ ID NO: 3194941 - DNA, 25 bp, Homo sapien
ggtttattgaactcaagtcagccac

SEQ ID NO: 3194942 - DNA, 25 bp, Homo sapien
tttatctggtttattgaactcaagt

SEQ ID NO: 3194943 - DNA, 25 bp, Homo sapien
tataactcaggttcactgctaaggc

SEQ ID NO: 3194944 - DNA, 25 bp, Homo sapien
ggcttgtgacgcaatttcccaatca

SEQ ID NO: 3194945 - DNA, 25 bp, Homo sapien
caggttcactgctaaggcttgtgac

SEQ ID NO: 3194946 - DNA, 25 bp, Homo sapien
tcagtgagcatataactcaggttca

SEQ ID NO: 3194947 - DNA, 25 bp, Homo sapien
tcacagactgtcccgcgtattaatt

SEQ ID NO: 3194948 - DNA, 25 bp, Homo sapien
cagactgtcccgcgtattaatttca

SEQ ID NO: 3194949 - DNA, 25 bp, Homo sapien
cacagactgtcccgcgtattaattt

SEQ ID NO: 3194950 - DNA, 25 bp, Homo sapien
agactgtcccgcgtattaatttcaa

SEQ ID NO: 3194951 - DNA, 25 bp, Homo sapien
tagagtgacattacaattgctgaaa

SEQ ID NO: 3194952 - DNA, 25 bp, Homo sapien
agagtgacattacaattgctgaaat

SEQ ID NO: 3194953 - DNA, 25 bp, Homo sapien
caataaatagaaacacctgaagctg

SEQ ID NO: 3194954 - DNA, 25 bp, Homo sapien
gctggtgccagggaaagacagtctc

SEQ ID NO: 3194955 - DNA, 25 bp, Homo sapien
gtaatcattggttgcagctggtgcc

SEQ ID NO: 3194956 - DNA, 25 bp, Homo sapien
gggaatgtcagatgaccatcaggtg

SEQ ID NO: 3194957 - DNA, 25 bp, Homo sapien
gtccctgagggaagatttgatgttt

SEQ ID NO: 3194958 - DNA, 25 bp, Homo sapien
gagggaagatttgatgtttaattct

SEQ ID NO: 3194959 - DNA, 25 bp, Homo sapien
tccctgagggaagatttgatgttta

SEQ ID NO: 3194960 - DNA, 25 bp, Homo sapien
cctgagggaagatttgatgtttaat

SEQ ID NO: 3194961 - DNA, 25 bp, Homo sapien
gcttccagtgaaatcatcttgtctt

SEQ ID NO: 3194962 - DNA, 25 bp, Homo sapien
aaagctggcaaaactcagcttccag

SEQ ID NO: 3194963 - DNA, 25 bp, Homo sapien
aatcatcttgtcttgtaacatctcc

SEQ ID NO: 3194964 - DNA, 25 bp, Homo sapien
ttccccaaagctggcaaaactcagc

SEQ ID NO: 3194965 - DNA, 25 bp, Homo sapien
cttctatccatgagtatcagcctta

SEQ ID NO: 3194966 - DNA, 25 bp, Homo sapien
tgagtcatgacccaagcatatcttt

SEQ ID NO: 3194967 - DNA, 25 bp, Homo sapien
cagaatccgtatagaagggtgcata

SEQ ID NO: 3194968 - DNA, 25 bp, Homo sapien
agggtgcatatattcgcactttgac

SEQ ID NO: 3194969 - DNA, 25 bp, Homo sapien
tatatatggaacagccaagaatggg

SEQ ID NO: 3194970 - DNA, 25 bp, Homo sapien
tattctttactagcaaggccactcc

SEQ ID NO: 3194971 - DNA, 25 bp, Homo sapien
ccaagaatgggatgctttaccaaag

SEQ ID NO: 3194972 - DNA, 25 bp, Homo sapien
ggccactcccaaacttaccatatat

SEQ ID NO: 3194973 - DNA, 25 bp, Homo sapien
gtagctttcctgaactcaatttcct

SEQ ID NO: 3194974 - DNA, 25 bp, Homo sapien
agtaagagttttattcctggtagct

SEQ ID NO: 3194975 - DNA, 25 bp, Homo sapien
cagcaattagtcaccagcaactttg

SEQ ID NO: 3194976 - DNA, 25 bp, Homo sapien
caatttcctagagaaccaaagggag

SEQ ID NO: 3194977 - DNA, 25 bp, Homo sapien
agtaagtattcaagaaagtagagtt

SEQ ID NO: 3194978 - DNA, 25 bp, Homo sapien
atagtaagtattcaagaaagtagag

SEQ ID NO: 3194979 - DNA, 25 bp, Homo sapien
aaagtagagttgtacagtgaatgtt

SEQ ID NO: 3194980 - DNA, 25 bp, Homo sapien
agaaagtagagttgtacagtgaatg

SEQ ID NO: 3194981 - DNA, 25 bp, Homo sapien
tgctggatggatggcagtgtccaca

SEQ ID NO: 3194982 - DNA, 25 bp, Homo sapien
cagtgtccacataacacagaggagg

SEQ ID NO: 3194983 - DNA, 25 bp, Homo sapien
taacacagaggaggatctctgttac

SEQ ID NO: 3194984 - DNA, 25 bp, Homo sapien
ctccttattgctggatggatggcag

SEQ ID NO: 3194985 - DNA, 25 bp, Homo sapien
ccacctggccactatgtagcagagt

SEQ ID NO: 3194986 - DNA, 25 bp, Homo sapien
gaccacctggccactatgtagcaga

SEQ ID NO: 3194987 - DNA, 25 bp, Homo sapien
accacctggccactatgtagcagag

SEQ ID NO: 3194988 - DNA, 25 bp, Homo sapien
cacctggccactatgtagcagagtt

SEQ ID NO: 3194989 - DNA, 25 bp, Homo sapien
cagctttataccctgctgcgttcac

SEQ ID NO: 3194990 - DNA, 25 bp, Homo sapien
gctgcgttcactatcgtccaaagct

SEQ ID NO: 3194991 - DNA, 25 bp, Homo sapien
ttataccctgctgcgttcactatcg

SEQ ID NO: 3194992 - DNA, 25 bp, Homo sapien
cctgctgcgttcactatcgtccaaa

SEQ ID NO: 3194993 - DNA, 25 bp, Homo sapien
ggttagcataggtgctgctgttatt

SEQ ID NO: 3194994 - DNA, 25 bp, Homo sapien
cctgtatgggtacaagggttagcat

SEQ ID NO: 3194995 - DNA, 25 bp, Homo sapien
tacaagggttagcataggtgctgct

SEQ ID NO: 3194996 - DNA, 25 bp, Homo sapien
catggcatctgcctgtatgggtaca

SEQ ID NO: 3194997 - DNA, 25 bp, Homo sapien
gagttgttgccccaaactggcagcc

SEQ ID NO: 3194998 - DNA, 25 bp, Homo sapien
taagaactgtcaaagttttcataag

SEQ ID NO: 3194999 - DNA, 25 bp, Homo sapien
catggtccttttccacggcatagag

SEQ ID NO: 3195000 - DNA, 25 bp, Homo sapien
cagggacagctatctgtgcaataaa

SEQ ID NO: 3195001 - DNA, 25 bp, Homo sapien
aatctcagagcttgatggctgcctt

SEQ ID NO: 3195002 - DNA, 25 bp, Homo sapien
tattagtagcagaatagaccaagtg

SEQ ID NO: 3195003 - DNA, 25 bp, Homo sapien
attagtagcagaatagaccaagtgg

SEQ ID NO: 3195004 - DNA, 25 bp, Homo sapien
aagtattagtagcagaatagaccaa

SEQ ID NO: 3195005 - DNA, 25 bp, Homo sapien
tctccaacaggagttctgaactggg

SEQ ID NO: 3195006 - DNA, 25 bp, Homo sapien
tccaacaggagttctgaactgggct

SEQ ID NO: 3195007 - DNA, 25 bp, Homo sapien
acagctgaatcatctctccaacagg

SEQ ID NO: 3195008 - DNA, 25 bp, Homo sapien
gcaaacagctgaatcatctctccaa

SEQ ID NO: 3195009 - DNA, 25 bp, Homo sapien
tagttggtccaatgatacgggtatc

SEQ ID NO: 3195010 - DNA, 25 bp, Homo sapien
caagttgaagcgactcctagaagga

SEQ ID NO: 3195011 - DNA, 25 bp, Homo sapien
tctaaaagacggatgtgagcgatgt

SEQ ID NO: 3195012 - DNA, 25 bp, Homo sapien
ctaatgcggaataactagttggtcc

SEQ ID NO: 3195013 - DNA, 25 bp, Homo sapien
tttcactgatgccagttccataccc

SEQ ID NO: 3195014 - DNA, 25 bp, Homo sapien
tcactgatgccagttccatacccat

SEQ ID NO: 3195015 - DNA, 25 bp, Homo sapien
ttttcactgatgccagttccatacc

SEQ ID NO: 3195016 - DNA, 25 bp, Homo sapien
ttcactgatgccagttccataccca

SEQ ID NO: 3195017 - DNA, 25 bp, Homo sapien
ccagatcaatgacatagttttcaga

SEQ ID NO: 3195018 - DNA, 25 bp, Homo sapien
atttctaccagatcaatgacatagt

SEQ ID NO: 3195019 - DNA, 25 bp, Homo sapien
tctaccagatcaatgacatagtttt

SEQ ID NO: 3195020 - DNA, 25 bp, Homo sapien
taccagatcaatgacatagttttca

SEQ ID NO: 3195021 - DNA, 25 bp, Homo sapien
aaaaaagtgttgttctccaatattg

SEQ ID NO: 3195022 - DNA, 25 bp, Homo sapien
gtgaaaaaagtgttgttctccaata

SEQ ID NO: 3195023 - DNA, 25 bp, Homo sapien
aaaagtgttgttctccaatattgca

SEQ ID NO: 3195024 - DNA, 25 bp, Homo sapien
aaagtgttgttctccaatattgcat

SEQ ID NO: 3195025 - DNA, 25 bp, Homo sapien
tgcaactagatggtctcatcttggg

SEQ ID NO: 3195026 - DNA, 25 bp, Homo sapien
tagtgcagaatctgtgggatccctg

SEQ ID NO: 3195027 - DNA, 25 bp, Homo sapien
catagtgcagaatctgtgggatccc

SEQ ID NO: 3195028 - DNA, 25 bp, Homo sapien
tcctgcaactagatggtctcatctt

SEQ ID NO: 3195029 - DNA, 25 bp, Homo sapien
ggactgctctgaggcaatgactgat

SEQ ID NO: 3195030 - DNA, 25 bp, Homo sapien
tgggggttgaaaggctggtccactc

SEQ ID NO: 3195031 - DNA, 25 bp, Homo sapien
cctgtggactgctctgaggcaatga

SEQ ID NO: 3195032 - DNA, 25 bp, Homo sapien
tctgaggcaatgactgatgatggtg

SEQ ID NO: 3195033 - DNA, 25 bp, Homo sapien
tccttcctctaattgaacataacca

SEQ ID NO: 3195034 - DNA, 25 bp, Homo sapien
agtgcatattatggagattctcaaa

SEQ ID NO: 3195035 - DNA, 25 bp, Homo sapien
aacataaccatctagttctgtgacg

SEQ ID NO: 3195036 - DNA, 25 bp, Homo sapien
caaaattgaatctggcaagggtaaa

SEQ ID NO: 3195037 - DNA, 25 bp, Homo sapien
aattcacctggcttacaaaggtcca

SEQ ID NO: 3195038 - DNA, 25 bp, Homo sapien
catgttcaacatggtcttttcttgt

SEQ ID NO: 3195039 - DNA, 25 bp, Homo sapien
catctttttatgcttcgacactcca

SEQ ID NO: 3195040 - DNA, 25 bp, Homo sapien
tctctttgcagtctacatacttcca

SEQ ID NO: 3195041 - DNA, 25 bp, Homo sapien
aaatattgtacgtgaattgccacat

SEQ ID NO: 3195042 - DNA, 25 bp, Homo sapien
caaatattgtacgtgaattgccaca

SEQ ID NO: 3195043 - DNA, 25 bp, Homo sapien
acacaaatattgtacgtgaattgcc

SEQ ID NO: 3195044 - DNA, 25 bp, Homo sapien
acaaatattgtacgtgaattgccac

SEQ ID NO: 3195045 - DNA, 25 bp, Homo sapien
ccttagaggcagtttctgacctggc

SEQ ID NO: 3195046 - DNA, 25 bp, Homo sapien
ataaactctatccaaggctgcaagg

SEQ ID NO: 3195047 - DNA, 25 bp, Homo sapien
ccgagctggtaagtcctggaattcc

SEQ ID NO: 3195048 - DNA, 25 bp, Homo sapien
taacctcagtaagtgcataagacag

SEQ ID NO: 3195049 - DNA, 25 bp, Homo sapien
taataatgtccacaatatgtctaaa

SEQ ID NO: 3195050 - DNA, 25 bp, Homo sapien
tagctataataatgtccacaatatg

SEQ ID NO: 3195051 - DNA, 25 bp, Homo sapien
atgagccatggcaccgagcaacact

SEQ ID NO: 3195052 - DNA, 25 bp, Homo sapien
tggcaccgagcaacacttaataact

SEQ ID NO: 3195053 - DNA, 25 bp, Homo sapien
tcaaaatggtttctacgtgatatat

SEQ ID NO: 3195054 - DNA, 25 bp, Homo sapien
catatagttctacctacatttaggc

SEQ ID NO: 3195055 - DNA, 25 bp, Homo sapien
caacttagcaagttgtgtgctttaa

SEQ ID NO: 3195056 - DNA, 25 bp, Homo sapien
taggcttttcaggtagtgtaagatc

SEQ ID NO: 3195057 - DNA, 25 bp, Homo sapien
cttgggcatagattgtgtgatttcc

SEQ ID NO: 3195058 - DNA, 25 bp, Homo sapien
aattgcgatgatttcagttgtaggc

SEQ ID NO: 3195059 - DNA, 25 bp, Homo sapien
agcttagattcttgggaggcagcaa

SEQ ID NO: 3195060 - DNA, 25 bp, Homo sapien
cagtttattggccatgctagatgta

SEQ ID NO: 3195061 - DNA, 25 bp, Homo sapien
tctacactctgaatacctcttgcat

SEQ ID NO: 3195062 - DNA, 25 bp, Homo sapien
tacactctgaatacctcttgcattc

SEQ ID NO: 3195063 - DNA, 25 bp, Homo sapien
gattctacactctgaatacctcttg

SEQ ID NO: 3195064 - DNA, 25 bp, Homo sapien
cactctgaatacctcttgcattcat

SEQ ID NO: 3195065 - DNA, 25 bp, Homo sapien
atgaagcagaaaagggcatgtgcta

SEQ ID NO: 3195066 - DNA, 25 bp, Homo sapien
tgaagcagaaaagggcatgtgctag

SEQ ID NO: 3195067 - DNA, 25 bp, Homo sapien
gcagaaaagggcatgtgctagccat

SEQ ID NO: 3195068 - DNA, 25 bp, Homo sapien
aagcagaaaagggcatgtgctagcc

SEQ ID NO: 3195069 - DNA, 25 bp, Homo sapien
gcaatagtactccttttcaagacaa

SEQ ID NO: 3195070 - DNA, 25 bp, Homo sapien
aagcaatagtactccttttcaagac

SEQ ID NO: 3195071 - DNA, 25 bp, Homo sapien
tacaaagcaatagtactccttttca

SEQ ID NO: 3195072 - DNA, 25 bp, Homo sapien
caaagcaatagtactccttttcaag

SEQ ID NO: 3195073 - DNA, 25 bp, Homo sapien
tgagaagttgaacatctagtaatat

SEQ ID NO: 3195074 - DNA, 25 bp, Homo sapien
tctgggttcaatgtgagaagttgaa

SEQ ID NO: 3195075 - DNA, 25 bp, Homo sapien
aatgattctgggttcaatgtgagaa

SEQ ID NO: 3195076 - DNA, 25 bp, Homo sapien
gaagttgaacatctagtaatatcat

SEQ ID NO: 3195077 - DNA, 25 bp, Homo sapien
taatgcatgactttgatagaacaag

SEQ ID NO: 3195078 - DNA, 25 bp, Homo sapien
tgatagaacaagtggcagttgccag

SEQ ID NO: 3195079 - DNA, 25 bp, Homo sapien
caagtggcagttgccagaggacaat

SEQ ID NO: 3195080 - DNA, 25 bp, Homo sapien
ttaatgcatgactttgatagaacaa

SEQ ID NO: 3195081 - DNA, 25 bp, Homo sapien
cctgtgggtgcaattgaactgttca

SEQ ID NO: 3195082 - DNA, 25 bp, Homo sapien
caagacgaatcattagaagtagcca

SEQ ID NO: 3195083 - DNA, 25 bp, Homo sapien
tcccaaggagacttaagaatggcag

SEQ ID NO: 3195084 - DNA, 25 bp, Homo sapien
tggtgaatgcatcgactggaagctc

SEQ ID NO: 3195085 - DNA, 25 bp, Homo sapien
taacggactttgatatgacactcag

SEQ ID NO: 3195086 - DNA, 25 bp, Homo sapien
tcttactgtagaagagaagtaccct

SEQ ID NO: 3195087 - DNA, 25 bp, Homo sapien
tattacgctattgaagttgatcctg

SEQ ID NO: 3195088 - DNA, 25 bp, Homo sapien
tctgtggtcttatcaaaggaggagc

SEQ ID NO: 3195089 - DNA, 25 bp, Homo sapien
caatgattacgcttctctgaaagga

SEQ ID NO: 3195090 - DNA, 25 bp, Homo sapien
taagcagaaacatgtacataagctg

SEQ ID NO: 3195091 - DNA, 25 bp, Homo sapien
gatctttgattcatacgtaacattg

SEQ ID NO: 3195092 - DNA, 25 bp, Homo sapien
ggattctgagtaatctgatctttga

SEQ ID NO: 3195093 - DNA, 25 bp, Homo sapien
caaaatctccctacccaatgggtct

SEQ ID NO: 3195094 - DNA, 25 bp, Homo sapien
tgaaaacagccaaaatctccctacc

SEQ ID NO: 3195095 - DNA, 25 bp, Homo sapien
agccaaaatctccctacccaatggg

SEQ ID NO: 3195096 - DNA, 25 bp, Homo sapien
ctctttgaaaacagccaaaatctcc

SEQ ID NO: 3195097 - DNA, 25 bp, Homo sapien
ccaagcttcaggctgtggccctaga

SEQ ID NO: 3195098 - DNA, 25 bp, Homo sapien
cttttcagtcccaaactcgattcca

SEQ ID NO: 3195099 - DNA, 25 bp, Homo sapien
actcgattccaagcttcaggctgtg

SEQ ID NO: 3195100 - DNA, 25 bp, Homo sapien
gctgtggccctagaaagaaaaactc

SEQ ID NO: 3195101 - DNA, 25 bp, Homo sapien
caaatactgggctgaatgggacttc

SEQ ID NO: 3195102 - DNA, 25 bp, Homo sapien
taaagactgttgaatagcaagtggg

SEQ ID NO: 3195103 - DNA, 25 bp, Homo sapien
tttcaagagcagttaagagttcagg

SEQ ID NO: 3195104 - DNA, 25 bp, Homo sapien
gcaagtgggctacaggtaatcagtc

SEQ ID NO: 3195105 - DNA, 25 bp, Homo sapien
aatgtggaaggaggatactgcctct

SEQ ID NO: 3195106 - DNA, 25 bp, Homo sapien
cttagtgctgactggtagcttttcc

SEQ ID NO: 3195107 - DNA, 25 bp, Homo sapien
tgattttctatactgcggctgtcct

SEQ ID NO: 3195108 - DNA, 25 bp, Homo sapien
catgcctattccagaaaagggtccc

SEQ ID NO: 3195109 - DNA, 25 bp, Homo sapien
acttcgctgctttcaacaacccttc

SEQ ID NO: 3195110 - DNA, 25 bp, Homo sapien
cttcgctgctttcaacaacccttca

SEQ ID NO: 3195111 - DNA, 25 bp, Homo sapien
cttttcagaaatgatggcagttggg

SEQ ID NO: 3195112 - DNA, 25 bp, Homo sapien
acagagatgcctgtagcacttggag

SEQ ID NO: 3195113 - DNA, 25 bp, Homo sapien
ttgggaactttgctgatgtgcacag

SEQ ID NO: 3195114 - DNA, 25 bp, Homo sapien
ggaactttgctgatgtgcacagaat

SEQ ID NO: 3195115 - DNA, 25 bp, Homo sapien
actcaacctctgttgtcagcacctt

SEQ ID NO: 3195116 - DNA, 25 bp, Homo sapien
tcaacctctgttgtcagcacctttg

SEQ ID NO: 3195117 - DNA, 25 bp, Homo sapien
caacctctgttgtcagcacctttgt

SEQ ID NO: 3195118 - DNA, 25 bp, Homo sapien
tcactcaacctctgttgtcagcacc

SEQ ID NO: 3195119 - DNA, 25 bp, Homo sapien
tatgataatgatgtcttcttctgga

SEQ ID NO: 3195120 - DNA, 25 bp, Homo sapien
gataatgatgtcttcttctggaata

SEQ ID NO: 3195121 - DNA, 25 bp, Homo sapien
taatgatgtcttcttctggaatatc

SEQ ID NO: 3195122 - DNA, 25 bp, Homo sapien
tgataatgatgtcttcttctggaat

SEQ ID NO: 3195123 - DNA, 25 bp, Homo sapien
gagatgcggcacttttatgggactg

SEQ ID NO: 3195124 - DNA, 25 bp, Homo sapien
gaagaatgtcacgaggtccatcgat

SEQ ID NO: 3195125 - DNA, 25 bp, Homo sapien
tccatcagttaagaaaggagctggc

SEQ ID NO: 3195126 - DNA, 25 bp, Homo sapien
gaccgaaaaccctatgaatcactgg

SEQ ID NO: 3195127 - DNA, 25 bp, Homo sapien
tttgagctagctttactacttcatg

SEQ ID NO: 3195128 - DNA, 25 bp, Homo sapien
tagctttactacttcatggcccatg

SEQ ID NO: 3195129 - DNA, 25 bp, Homo sapien
ctctttggatgagggaactagcagc

SEQ ID NO: 3195130 - DNA, 25 bp, Homo sapien
tgagggaactagcagcccatctctt

SEQ ID NO: 3195131 - DNA, 25 bp, Homo sapien
tgtggaaccaatactgacttagctg

SEQ ID NO: 3195132 - DNA, 25 bp, Homo sapien
ggaaccaatactgacttagctgact

SEQ ID NO: 3195133 - DNA, 25 bp, Homo sapien
gacttaaggagcctctctacatatg

SEQ ID NO: 3195134 - DNA, 25 bp, Homo sapien
ctgtggaaccaatactgacttagct

SEQ ID NO: 3195135 - DNA, 25 bp, Homo sapien
tttttcaaagatgatctgagaactc

SEQ ID NO: 3195136 - DNA, 25 bp, Homo sapien
gatctgagaactcccagatccttgg

SEQ ID NO: 3195137 - DNA, 25 bp, Homo sapien
agatccttgggaactatcatcaagg

SEQ ID NO: 3195138 - DNA, 25 bp, Homo sapien
tcaaagatgatctgagaactcccag

SEQ ID NO: 3195139 - DNA, 25 bp, Homo sapien
tatttagctgggcaagttatattgg

SEQ ID NO: 3195140 - DNA, 25 bp, Homo sapien
tagctgggcaagttatattggccag

SEQ ID NO: 3195141 - DNA, 25 bp, Homo sapien
gtctgaggaattgccatagtattta

SEQ ID NO: 3195142 - DNA, 25 bp, Homo sapien
gaattgccatagtatttagctgggc

SEQ ID NO: 3195143 - DNA, 25 bp, Homo sapien
ggattagtgcaagtgggagatgctc

SEQ ID NO: 3195144 - DNA, 25 bp, Homo sapien
atgaaaaaaggcacgtggattagtg

SEQ ID NO: 3195145 - DNA, 25 bp, Homo sapien
aaaggcacgtggattagtgcaagtg

SEQ ID NO: 3195146 - DNA, 25 bp, Homo sapien
gaaaaaaggcacgtggattagtgca

SEQ ID NO: 3195147 - DNA, 25 bp, Homo sapien
ctgctggtggaaacttgaggcacct

SEQ ID NO: 3195148 - DNA, 25 bp, Homo sapien
tatccagccaaatcgctgctggtgg

SEQ ID NO: 3195149 - DNA, 25 bp, Homo sapien
gaggcaccttcttgtaacctcacag

SEQ ID NO: 3195150 - DNA, 25 bp, Homo sapien
ctcacagctcgttggagtacagttt

SEQ ID NO: 3195151 - DNA, 25 bp, Homo sapien
gacatcctggatctgcaacctggaa

SEQ ID NO: 3195152 - DNA, 25 bp, Homo sapien
ggcttgtgacatcctggatctgcaa

SEQ ID NO: 3195153 - DNA, 25 bp, Homo sapien
tgtgacatcctggatctgcaacctg

SEQ ID NO: 3195154 - DNA, 25 bp, Homo sapien
ttcatggcttgtgacatcctggatc

SEQ ID NO: 3195155 - DNA, 25 bp, Homo sapien
actggaaattgtaggaatttgtggt

SEQ ID NO: 3195156 - DNA, 25 bp, Homo sapien
ggaaattgtaggaatttgtggtcca

SEQ ID NO: 3195157 - DNA, 25 bp, Homo sapien
aattgtaggaatttgtggtccacat

SEQ ID NO: 3195158 - DNA, 25 bp, Homo sapien
gaaattgtaggaatttgtggtccac

SEQ ID NO: 3195159 - DNA, 25 bp, Homo sapien
ggcatgttctggaccagggccctct

SEQ ID NO: 3195160 - DNA, 25 bp, Homo sapien
tataaagaaatattctccgtgctta

SEQ ID NO: 3195161 - DNA, 25 bp, Homo sapien
tcttgttaaacgttccaggttggca

SEQ ID NO: 3195162 - DNA, 25 bp, Homo sapien
tattctccgtgcttaaaacactgag

SEQ ID NO: 3195163 - DNA, 25 bp, Homo sapien
ctgaaaataaaaactggaaagattg

SEQ ID NO: 3195164 - DNA, 25 bp, Homo sapien
aataaaaactggaaagattgaagag

SEQ ID NO: 3195165 - DNA, 25 bp, Homo sapien
ataaaaactggaaagattgaagagc

SEQ ID NO: 3195166 - DNA, 25 bp, Homo sapien
tgaaaataaaaactggaaagattga

SEQ ID NO: 3195167 - DNA, 25 bp, Homo sapien
ttaacaatcccactgccggcaaatc

SEQ ID NO: 3195168 - DNA, 25 bp, Homo sapien
cggcaaatcctataatgattccaca

SEQ ID NO: 3195169 - DNA, 25 bp, Homo sapien
ctgccggcaaatcctataatgattc

SEQ ID NO: 3195170 - DNA, 25 bp, Homo sapien
tcatacgatcttaacaatcccactg

SEQ ID NO: 3195171 - DNA, 25 bp, Homo sapien
ctcgagtgctgcctctgttactgat

SEQ ID NO: 3195172 - DNA, 25 bp, Homo sapien
ctgcctctgttactgattcattttg

SEQ ID NO: 3195173 - DNA, 25 bp, Homo sapien
gctccaggggcactgccttgcacat

SEQ ID NO: 3195174 - DNA, 25 bp, Homo sapien
gagtgctgcctctgttactgattca

SEQ ID NO: 3195175 - DNA, 25 bp, Homo sapien
agagagcctgctctgtcttccgagc

SEQ ID NO: 3195176 - DNA, 25 bp, Homo sapien
ccaagagagagcctgctctgtcttc

SEQ ID NO: 3195177 - DNA, 25 bp, Homo sapien
gagagagcctgctctgtcttccgag

SEQ ID NO: 3195178 - DNA, 25 bp, Homo sapien
aagagagagcctgctctgtcttccg

SEQ ID NO: 3195179 - DNA, 25 bp, Homo sapien
ctgaagacaagtggaaggccagcaa

SEQ ID NO: 3195180 - DNA, 25 bp, Homo sapien
cggctgcgaggctgcaagagtttcc

SEQ ID NO: 3195181 - DNA, 25 bp, Homo sapien
tgcgaggctgcaagagtttcctctg

SEQ ID NO: 3195182 - DNA, 25 bp, Homo sapien
agagtttcctctgttcgccagtttt

SEQ ID NO: 3195183 - DNA, 25 bp, Homo sapien
cctgtggtgctcctgccgttggcac

SEQ ID NO: 3195184 - DNA, 25 bp, Homo sapien
gggatctgcgcggacacagctggtg

SEQ ID NO: 3195185 - DNA, 25 bp, Homo sapien
acagctggtggcgacttcggccgct

SEQ ID NO: 3195186 - DNA, 25 bp, Homo sapien
cgacaagcgggcgacctctcccctc

SEQ ID NO: 3195187 - DNA, 25 bp, Homo sapien
tccgcgcccgggatctgcgcggaca

SEQ ID NO: 3195188 - DNA, 25 bp, Homo sapien
ccctcgtccgggtggcgcttgggtg

SEQ ID NO: 3195189 - DNA, 25 bp, Homo sapien
tctggtcgagatgccgcctctggag

SEQ ID NO: 3195190 - DNA, 25 bp, Homo sapien
ccaaggcgcccggatcgggtttctg

SEQ ID NO: 3195191 - DNA, 25 bp, Homo sapien
tccaagccgcgagaaacttgtctgg

SEQ ID NO: 3195192 - DNA, 25 bp, Homo sapien
tctggagtccgcattccaaggcgcc

SEQ ID NO: 3195193 - DNA, 25 bp, Homo sapien
gagtgtcacatgcaagacccgtcgc

SEQ ID NO: 3195194 - DNA, 25 bp, Homo sapien
taccaagctggtgaggcactagagg

SEQ ID NO: 3195195 - DNA, 25 bp, Homo sapien
caagtggtagcaacaccagtcctgg

SEQ ID NO: 3195196 - DNA, 25 bp, Homo sapien
taccatcggctcaggctttttgact

SEQ ID NO: 3195197 - DNA, 25 bp, Homo sapien
ggtatatatgtcatgcattcaaaca

SEQ ID NO: 3195198 - DNA, 25 bp, Homo sapien
gccttgaaggatgggagtaatttga

SEQ ID NO: 3195199 - DNA, 25 bp, Homo sapien
tagagacaatgactataacaggatg

SEQ ID NO: 3195200 - DNA, 25 bp, Homo sapien
catttgagatagagggaatgttaca

SEQ ID NO: 3195201 - DNA, 25 bp, Homo sapien
gagtttatgtcaccattgcagctca

SEQ ID NO: 3195202 - DNA, 25 bp, Homo sapien
gcagctcatttgtatcacttgatca

SEQ ID NO: 3195203 - DNA, 25 bp, Homo sapien
agatggtgttccagctacttttcca

SEQ ID NO: 3195204 - DNA, 25 bp, Homo sapien
tcacttgatcaggactcacagaaaa

SEQ ID NO: 3195205 - DNA, 25 bp, Homo sapien
taggtgttggaggtcgccacagtca

SEQ ID NO: 3195206 - DNA, 25 bp, Homo sapien
cattttgtctataagcactgggaga

SEQ ID NO: 3195207 - DNA, 25 bp, Homo sapien
tagaaggcttcgattccaggaatcc

SEQ ID NO: 3195208 - DNA, 25 bp, Homo sapien
tcttgaccaagagatgagtactggc

SEQ ID NO: 3195209 - DNA, 25 bp, Homo sapien
agttgtatccctgctggaagatgaa

SEQ ID NO: 3195210 - DNA, 25 bp, Homo sapien
cagttgtagtacaaactgggatagt

SEQ ID NO: 3195211 - DNA, 25 bp, Homo sapien
ggtgagcgataatcctagattgccc

SEQ ID NO: 3195212 - DNA, 25 bp, Homo sapien
cagactttcccagtaaatcccatgt

SEQ ID NO: 3195213 - DNA, 25 bp, Homo sapien
gtcagaagtgttcgctgaaatcaag

SEQ ID NO: 3195214 - DNA, 25 bp, Homo sapien
gaacttgctacaatgagatctgtaa

SEQ ID NO: 3195215 - DNA, 25 bp, Homo sapien
aaaccatttcaggatcctgccacac

SEQ ID NO: 3195216 - DNA, 25 bp, Homo sapien
tggcttcatatatgtgtcagaagtg

SEQ ID NO: 3195217 - DNA, 25 bp, Homo sapien
cgttgtaagaattgtagcatgatta

SEQ ID NO: 3195218 - DNA, 25 bp, Homo sapien
agtagtagagtagcagagtttcttg

SEQ ID NO: 3195219 - DNA, 25 bp, Homo sapien
tcttgcgggagttgagtcgttgtaa

SEQ ID NO: 3195220 - DNA, 25 bp, Homo sapien
gttgagtcgttgtaagaattgtagc

SEQ ID NO: 3195221 - DNA, 25 bp, Homo sapien
tcctgatcataaccttctctgctgg

SEQ ID NO: 3195222 - DNA, 25 bp, Homo sapien
ctttcttctgactgatctgatgcac

SEQ ID NO: 3195223 - DNA, 25 bp, Homo sapien
tctgactgatctgatgcacaggttc

SEQ ID NO: 3195224 - DNA, 25 bp, Homo sapien
gaatctttcttctgactgatctgat

SEQ ID NO: 3195225 - DNA, 25 bp, Homo sapien
ttgtgcacgcaaaagattctgagta

SEQ ID NO: 3195226 - DNA, 25 bp, Homo sapien
aaaatttgtgatttgtgcacgcaaa

SEQ ID NO: 3195227 - DNA, 25 bp, Homo sapien
aaagattctgagtatcaagcagggc

SEQ ID NO: 3195228 - DNA, 25 bp, Homo sapien
tgtgatttgtgcacgcaaaagattc

SEQ ID NO: 3195229 - DNA, 25 bp, Homo sapien
tgtgaggaaaccaccagaactcatc

SEQ ID NO: 3195230 - DNA, 25 bp, Homo sapien
catgtgaggaaaccaccagaactca

SEQ ID NO: 3195231 - DNA, 25 bp, Homo sapien
gaaaccaccagaactcatccacaga

SEQ ID NO: 3195232 - DNA, 25 bp, Homo sapien
tgaggaaaccaccagaactcatcca

SEQ ID NO: 3195233 - DNA, 25 bp, Homo sapien
taatccagtatgtctacttacatcc

SEQ ID NO: 3195234 - DNA, 25 bp, Homo sapien
gatcccgcttccactggtttagtta

SEQ ID NO: 3195235 - DNA, 25 bp, Homo sapien
tatcctcatgtaggtgaaatacaga

SEQ ID NO: 3195236 - DNA, 25 bp, Homo sapien
aagagatacacacagatagaaaagt

SEQ ID NO: 3195237 - DNA, 25 bp, Homo sapien
tacagggtagacgcccgaatggtga

SEQ ID NO: 3195238 - DNA, 25 bp, Homo sapien
ggtgattttaatattccagaccttc

SEQ ID NO: 3195239 - DNA, 25 bp, Homo sapien
catgatgtttttgtggataaaaccc

SEQ ID NO: 3195240 - DNA, 25 bp, Homo sapien
aacccctccggtatctagctggctt

SEQ ID NO: 3195241 - DNA, 25 bp, Homo sapien
ttatccagctctttaggaccccctg

SEQ ID NO: 3195242 - DNA, 25 bp, Homo sapien
ccttggatactcttatccagctctt

SEQ ID NO: 3195243 - DNA, 25 bp, Homo sapien
tcctccttggatactcttatccagc

SEQ ID NO: 3195244 - DNA, 25 bp, Homo sapien
cagctctttaggaccccctggatat

SEQ ID NO: 3195245 - DNA, 25 bp, Homo sapien
ctgaccgacaggctccaaaacctga

SEQ ID NO: 3195246 - DNA, 25 bp, Homo sapien
ccgacaggctccaaaacctgattca

SEQ ID NO: 3195247 - DNA, 25 bp, Homo sapien
tccaaaacctgattcagtacacttg

SEQ ID NO: 3195248 - DNA, 25 bp, Homo sapien
caaaacctgattcagtacacttgca

SEQ ID NO: 3195249 - DNA, 25 bp, Homo sapien
ttctctacaaccacaagcgtacagg

SEQ ID NO: 3195250 - DNA, 25 bp, Homo sapien
aagttctattgcagatttggagcca

SEQ ID NO: 3195251 - DNA, 25 bp, Homo sapien
gcgtacaggctaatacaacccacaa

SEQ ID NO: 3195252 - DNA, 25 bp, Homo sapien
gcatggtgagtatgtagagccccta

SEQ ID NO: 3195253 - DNA, 25 bp, Homo sapien
cagcttaatcatgtttgctattaaa

SEQ ID NO: 3195254 - DNA, 25 bp, Homo sapien
gaattctcgtcaggtaatttaatct

SEQ ID NO: 3195255 - DNA, 25 bp, Homo sapien
cgtcaggtaatttaatctctccatt

SEQ ID NO: 3195256 - DNA, 25 bp, Homo sapien
gctccctgggcaatttcaaatgacc

SEQ ID NO: 3195257 - DNA, 25 bp, Homo sapien
tcaaagagtcaaggagaagtaaaaa

SEQ ID NO: 3195258 - DNA, 25 bp, Homo sapien
ggctcaaagagtcaaggagaagtaa

SEQ ID NO: 3195259 - DNA, 25 bp, Homo sapien
gtggttgggagcacttagacacaaa

SEQ ID NO: 3195260 - DNA, 25 bp, Homo sapien
ttgggagcacttagacacaaaaatt

SEQ ID NO: 3195261 - DNA, 25 bp, Homo sapien
tcttgtgataaggtagggggagaaa

SEQ ID NO: 3195262 - DNA, 25 bp, Homo sapien
aaaagatactattccaaagtgttgt

SEQ ID NO: 3195263 - DNA, 25 bp, Homo sapien
ggagaaaagatactattccaaagtg

SEQ ID NO: 3195264 - DNA, 25 bp, Homo sapien
gaaaagatactattccaaagtgttg

SEQ ID NO: 3195265 - DNA, 25 bp, Homo sapien
tattcgaggagtacaaaaaattgcc

SEQ ID NO: 3195266 - DNA, 25 bp, Homo sapien
aaatgcctgttttagtgggcgtcaa

SEQ ID NO: 3195267 - DNA, 25 bp, Homo sapien
gcgtcaaactcttttccagcacagg

SEQ ID NO: 3195268 - DNA, 25 bp, Homo sapien
cagtcacctgaaatttggcacagag

SEQ ID NO: 3195269 - DNA, 25 bp, Homo sapien
ggagtggacattcgcccaaacagga

SEQ ID NO: 3195270 - DNA, 25 bp, Homo sapien
gaatgggacacagttggcgcctctt

SEQ ID NO: 3195271 - DNA, 25 bp, Homo sapien
ctcagagtatgctggtgccggtgcc

SEQ ID NO: 3195272 - DNA, 25 bp, Homo sapien
gtcatcgagagagggcacaggtaca

SEQ ID NO: 3195273 - DNA, 25 bp, Homo sapien
ttataacgtagtatttgcaagcttc

SEQ ID NO: 3195274 - DNA, 25 bp, Homo sapien
gttataacgtagtatttgcaagctt

SEQ ID NO: 3195275 - DNA, 25 bp, Homo sapien
attaccttcgcaaaaagaaagacat

SEQ ID NO: 3195276 - DNA, 25 bp, Homo sapien
aaacagtgttattatcagcttaaaa

SEQ ID NO: 3195277 - DNA, 25 bp, Homo sapien
catttttattctgggtgtgggtagg

SEQ ID NO: 3195278 - DNA, 25 bp, Homo sapien
agcaggcaatgacccctctgttctc

SEQ ID NO: 3195279 - DNA, 25 bp, Homo sapien
gaaacacctcttaagctctctgatg

SEQ ID NO: 3195280 - DNA, 25 bp, Homo sapien
tggtctcagtgaccctcaagccaga

SEQ ID NO: 3195281 - DNA, 25 bp, Homo sapien
tagttgtaaggcagacaacaaccta

SEQ ID NO: 3195282 - DNA, 25 bp, Homo sapien
agttgtaaggcagacaacaacctac

SEQ ID NO: 3195283 - DNA, 25 bp, Homo sapien
ttagttgtaaggcagacaacaacct

SEQ ID NO: 3195284 - DNA, 25 bp, Homo sapien
tagcagctcaccagccttatcagga

SEQ ID NO: 3195285 - DNA, 25 bp, Homo sapien
tctgcaaatatgagactttgggcca

SEQ ID NO: 3195286 - DNA, 25 bp, Homo sapien
aatggtttgaacttctctgctacga

SEQ ID NO: 3195287 - DNA, 25 bp, Homo sapien
tgatcacttcttctaccaggcaaga

SEQ ID NO: 3195288 - DNA, 25 bp, Homo sapien
tgtatagccagatggttatctgtga

SEQ ID NO: 3195289 - DNA, 25 bp, Homo sapien
aattctttctagtctgtgagatata

SEQ ID NO: 3195290 - DNA, 25 bp, Homo sapien
ctagtctgtgagatatagatgtgta

SEQ ID NO: 3195291 - DNA, 25 bp, Homo sapien
ccaaaggcataatgtttatatgatt

SEQ ID NO: 3195292 - DNA, 25 bp, Homo sapien
taatcccagtcggtcattcccatag

SEQ ID NO: 3195293 - DNA, 25 bp, Homo sapien
tctgaagtcgcaggttggtccagct

SEQ ID NO: 3195294 - DNA, 25 bp, Homo sapien
cagagtctgaagtcgcaggttggtc

SEQ ID NO: 3195295 - DNA, 25 bp, Homo sapien
tgtatataatcccagtcggtcattc

SEQ ID NO: 3195296 - DNA, 25 bp, Homo sapien
tgtggcgtttgtcatcgcaaggatt

SEQ ID NO: 3195297 - DNA, 25 bp, Homo sapien
ctattaccaagaattttggtaagcg

SEQ ID NO: 3195298 - DNA, 25 bp, Homo sapien
tggtaagcgatcacaagttttttct

SEQ ID NO: 3195299 - DNA, 25 bp, Homo sapien
ttagaccaaatgtctctgtggcgtt

SEQ ID NO: 3195300 - DNA, 25 bp, Homo sapien
tgaaagaacatgtacttgaagacat

SEQ ID NO: 3195301 - DNA, 25 bp, Homo sapien
attaagttcttccagaggcctatga

SEQ ID NO: 3195302 - DNA, 25 bp, Homo sapien
caaaatcaatacttgggttctcata

SEQ ID NO: 3195303 - DNA, 25 bp, Homo sapien
aatcacctgcctacttatttcatag

SEQ ID NO: 3195304 - DNA, 25 bp, Homo sapien
taaattgaatagataatcggcagtt

SEQ ID NO: 3195305 - DNA, 25 bp, Homo sapien
aaaagaggcctgttgcagggattga

SEQ ID NO: 3195306 - DNA, 25 bp, Homo sapien
aaatggagatagtgtggtgtgaaaa

SEQ ID NO: 3195307 - DNA, 25 bp, Homo sapien
tcggcagtttaatagaagcaggttc

SEQ ID NO: 3195308 - DNA, 25 bp, Homo sapien
ttctattaaagaactgtacctcctc

SEQ ID NO: 3195309 - DNA, 25 bp, Homo sapien
caatccccctgtggtagttatttct

SEQ ID NO: 3195310 - DNA, 25 bp, Homo sapien
caatcaatccccctgtggtagttat

SEQ ID NO: 3195311 - DNA, 25 bp, Homo sapien
gagttactaaggatggaaggatgca

SEQ ID NO: 3195312 - DNA, 25 bp, Homo sapien
cctggccactgtcgatggtttcttg

SEQ ID NO: 3195313 - DNA, 25 bp, Homo sapien
gcctggccactgtcgatggtttctt

SEQ ID NO: 3195314 - DNA, 25 bp, Homo sapien
ggccactgtcgatggtttcttgatt

SEQ ID NO: 3195315 - DNA, 25 bp, Homo sapien
ctggccactgtcgatggtttcttga

SEQ ID NO: 3195316 - DNA, 25 bp, Homo sapien
tctcaaacaaaaagtcggtagtgac

SEQ ID NO: 3195317 - DNA, 25 bp, Homo sapien
cagagaagcagctcttttaggggct

SEQ ID NO: 3195318 - DNA, 25 bp, Homo sapien
gagtatgctcggtctgaagggtcaa

SEQ ID NO: 3195319 - DNA, 25 bp, Homo sapien
cctctgagtggaagtaattggcact

SEQ ID NO: 3195320 - DNA, 25 bp, Homo sapien
taaacaagccatctctcgatgtggc

SEQ ID NO: 3195321 - DNA, 25 bp, Homo sapien
gggccctgctgagatcacttcgtag

SEQ ID NO: 3195322 - DNA, 25 bp, Homo sapien
tagaagctaaacttcagagctgcag

SEQ ID NO: 3195323 - DNA, 25 bp, Homo sapien
caaggctctgagctccgagggtgca

SEQ ID NO: 3195324 - DNA, 25 bp, Homo sapien
atgatgtaaatccttattactccat

SEQ ID NO: 3195325 - DNA, 25 bp, Homo sapien
gatgtaaatccttattactccatac

SEQ ID NO: 3195326 - DNA, 25 bp, Homo sapien
tgatgtaaatccttattactccata

SEQ ID NO: 3195327 - DNA, 25 bp, Homo sapien
ggcaagactcctagaaacttctgta

SEQ ID NO: 3195328 - DNA, 25 bp, Homo sapien
gtaattataatgaggcaagactcct

SEQ ID NO: 3195329 - DNA, 25 bp, Homo sapien
gtagcaggatcagttcttagttgtt

SEQ ID NO: 3195330 - DNA, 25 bp, Homo sapien
tcagttcttagttgttgcccatcaa

SEQ ID NO: 3195331 - DNA, 25 bp, Homo sapien
caccagaaacctttatgagaatcaa

SEQ ID NO: 3195332 - DNA, 25 bp, Homo sapien
ccagaaacctttatgagaatcaaac

SEQ ID NO: 3195333 - DNA, 25 bp, Homo sapien
ttccagtaactgacaccagaaacct

SEQ ID NO: 3195334 - DNA, 25 bp, Homo sapien
gtaactgacaccagaaacctttatg

SEQ ID NO: 3195335 - DNA, 25 bp, Homo sapien
atcagaatccattggagggtatttt

SEQ ID NO: 3195336 - DNA, 25 bp, Homo sapien
tttgctctttccaaggcattttgtt

SEQ ID NO: 3195337 - DNA, 25 bp, Homo sapien
cagaatccattggagggtattttct

SEQ ID NO: 3195338 - DNA, 25 bp, Homo sapien
ttcttcctttgctctttccaaggca

SEQ ID NO: 3195339 - DNA, 25 bp, Homo sapien
agttccacgttgtgatctcgatagt

SEQ ID NO: 3195340 - DNA, 25 bp, Homo sapien
tgtgatctcgatagtagcttgacag

SEQ ID NO: 3195341 - DNA, 25 bp, Homo sapien
gatagtagcttgacagaaatgtcct

SEQ ID NO: 3195342 - DNA, 25 bp, Homo sapien
tccacgttgtgatctcgatagtagc

SEQ ID NO: 3195343 - DNA, 25 bp, Homo sapien
gccttttggtagcttctggaagctt

SEQ ID NO: 3195344 - DNA, 25 bp, Homo sapien
gacgatgaagtctcaagttttctct

SEQ ID NO: 3195345 - DNA, 25 bp, Homo sapien
tctacatggacgatgaagtctcaag

SEQ ID NO: 3195346 - DNA, 25 bp, Homo sapien
gaaaaggtgtgttctacatggacga

SEQ ID NO: 3195347 - DNA, 25 bp, Homo sapien
cactgtatataactgctgaggccta

SEQ ID NO: 3195348 - DNA, 25 bp, Homo sapien
gatgacacatacctcagactctagg

SEQ ID NO: 3195349 - DNA, 25 bp, Homo sapien
gaaaacatcgtacaggcaaacagtg

SEQ ID NO: 3195350 - DNA, 25 bp, Homo sapien
tccacatgagtgcacagtagtctac

SEQ ID NO: 3195351 - DNA, 25 bp, Homo sapien
tggcctcatacccttatgtgtatgg

SEQ ID NO: 3195352 - DNA, 25 bp, Homo sapien
agagattggattctcctatctattt

SEQ ID NO: 3195353 - DNA, 25 bp, Homo sapien
tagagattggattctcctatctatt

SEQ ID NO: 3195354 - DNA, 25 bp, Homo sapien
ctggctccggatccagacgcatgcg

SEQ ID NO: 3195355 - DNA, 25 bp, Homo sapien
tggtccacgtctgagcgggtcacct

SEQ ID NO: 3195356 - DNA, 25 bp, Homo sapien
gcatgcgcacatacgagagccaaaa

SEQ ID NO: 3195357 - DNA, 25 bp, Homo sapien
ctgagcgggtcacctggctccggat

SEQ ID NO: 3195358 - DNA, 25 bp, Homo sapien
ttcacctaatcccgacgcttcccga

SEQ ID NO: 3195359 - DNA, 25 bp, Homo sapien
ctaatcccgacgcttcccgaatgtg

SEQ ID NO: 3195360 - DNA, 25 bp, Homo sapien
cacctaatcccgacgcttcccgaat

SEQ ID NO: 3195361 - DNA, 25 bp, Homo sapien
acctaatcccgacgcttcccgaatg

SEQ ID NO: 3195362 - DNA, 25 bp, Homo sapien
taccaatatcctgactgcgctgcct

SEQ ID NO: 3195363 - DNA, 25 bp, Homo sapien
tccgcgcatgcttgtaaacttaagg

SEQ ID NO: 3195364 - DNA, 25 bp, Homo sapien
taatgagcactcaagtccgcgcatg

SEQ ID NO: 3195365 - DNA, 25 bp, Homo sapien
aggcagtaagtttcggcccaattat

SEQ ID NO: 3195366 - DNA, 25 bp, Homo sapien
ggctgaacaggcttcaccggagtcc

SEQ ID NO: 3195367 - DNA, 25 bp, Homo sapien
actcaagatggccacatgacacaga

SEQ ID NO: 3195368 - DNA, 25 bp, Homo sapien
tagggcacaagagcgacagagtaga

SEQ ID NO: 3195369 - DNA, 25 bp, Homo sapien
cggagtccccgagtgcacggaacct

SEQ ID NO: 3195370 - DNA, 25 bp, Homo sapien
catctggctcaaactgacggttctc

SEQ ID NO: 3195371 - DNA, 25 bp, Homo sapien
tggctcaaactgacggttctcgggg

SEQ ID NO: 3195372 - DNA, 25 bp, Homo sapien
gctcaaactgacggttctcggggtg

SEQ ID NO: 3195373 - DNA, 25 bp, Homo sapien
tctggctcaaactgacggttctcgg

SEQ ID NO: 3195374 - DNA, 25 bp, Homo sapien
gaattaaccagcaaccaaactgcta

SEQ ID NO: 3195375 - DNA, 25 bp, Homo sapien
tccagaattaaccagcaaccaaact

SEQ ID NO: 3195376 - DNA, 25 bp, Homo sapien
taaccagcaaccaaactgctacagg

SEQ ID NO: 3195377 - DNA, 25 bp, Homo sapien
ttcacaatccagaattaaccagcaa

SEQ ID NO: 3195378 - DNA, 25 bp, Homo sapien
tggtgacagctttgccaataaacaa

SEQ ID NO: 3195379 - DNA, 25 bp, Homo sapien
tgcccaataacccggcaccctctag

SEQ ID NO: 3195380 - DNA, 25 bp, Homo sapien
ttgcccaataacccggcaccctcta

SEQ ID NO: 3195381 - DNA, 25 bp, Homo sapien
tgtttccatcatccatcgtaatgtg

SEQ ID NO: 3195382 - DNA, 25 bp, Homo sapien
catccatcgtaatgtgttcagctca

SEQ ID NO: 3195383 - DNA, 25 bp, Homo sapien
ccatcatccatcgtaatgtgttcag

SEQ ID NO: 3195384 - DNA, 25 bp, Homo sapien
cttatgtttccatcatccatcgtaa

SEQ ID NO: 3195385 - DNA, 25 bp, Homo sapien
ttccaacgtcctgccgctaaggcgt

SEQ ID NO: 3195386 - DNA, 25 bp, Homo sapien
tacaaaagccagcaaaacgggccaa

SEQ ID NO: 3195387 - DNA, 25 bp, Homo sapien
taaaactccgagctgtgtacttacc

SEQ ID NO: 3195388 - DNA, 25 bp, Homo sapien
taaggcgtttcagattaactcagaa

SEQ ID NO: 3195389 - DNA, 25 bp, Homo sapien
taaacttcgcccattaccacttgga

SEQ ID NO: 3195390 - DNA, 25 bp, Homo sapien
caactacgataagtccattgccgga

SEQ ID NO: 3195391 - DNA, 25 bp, Homo sapien
tatttaattatcacggaccacctta

SEQ ID NO: 3195392 - DNA, 25 bp, Homo sapien
tccaggatattattcggaacacccg

SEQ ID NO: 3195393 - DNA, 25 bp, Homo sapien
caaatgccgtttactgactgctaca

SEQ ID NO: 3195394 - DNA, 25 bp, Homo sapien
tggcagcacgtgtacaaaactcaaa

SEQ ID NO: 3195395 - DNA, 25 bp, Homo sapien
tggtgtctcttcgaatgccctgcag

SEQ ID NO: 3195396 - DNA, 25 bp, Homo sapien
gacttcatattagaggaccaacctg

SEQ ID NO: 3195397 - DNA, 25 bp, Homo sapien
taagtaggcaaaccacgttgtgatc

SEQ ID NO: 3195398 - DNA, 25 bp, Homo sapien
aatcagtcattggtggtaaaggcac

SEQ ID NO: 3195399 - DNA, 25 bp, Homo sapien
tatcgctcattgtacttccagagga

SEQ ID NO: 3195400 - DNA, 25 bp, Homo sapien
gacaaagccttcgagttacttgcag

SEQ ID NO: 3195401 - DNA, 25 bp, Homo sapien
ttgaaagggccctactaagctgagg

SEQ ID NO: 3195402 - DNA, 25 bp, Homo sapien
tatcaagctgaataaaacgtggtct

SEQ ID NO: 3195403 - DNA, 25 bp, Homo sapien
taagagagcctcactgaatcccaat

SEQ ID NO: 3195404 - DNA, 25 bp, Homo sapien
taagctgaggtcgagccaacagtga

SEQ ID NO: 3195405 - DNA, 25 bp, Homo sapien
aaatttctgctcctcgggactcagt

SEQ ID NO: 3195406 - DNA, 25 bp, Homo sapien
tagttcccttgtcagtttcatgcat

SEQ ID NO: 3195407 - DNA, 25 bp, Homo sapien
gaaatcctatagttcccttgtcagt

SEQ ID NO: 3195408 - DNA, 25 bp, Homo sapien
cagttcagagggtgcctgaaatcct

SEQ ID NO: 3195409 - DNA, 25 bp, Homo sapien
ttatatttcaaagagagcttgtgtt

SEQ ID NO: 3195410 - DNA, 25 bp, Homo sapien
aaagagagcttgtgttgttggaggc

SEQ ID NO: 3195411 - DNA, 25 bp, Homo sapien
tcaaagagagcttgtgttgttggag

SEQ ID NO: 3195412 - DNA, 25 bp, Homo sapien
tatttcaaagagagcttgtgttgtt

SEQ ID NO: 3195413 - DNA, 25 bp, Homo sapien
gggcacacgttgcacaaaggagtgt

SEQ ID NO: 3195414 - DNA, 25 bp, Homo sapien
aatactaccgttaatcagcatccag

SEQ ID NO: 3195415 - DNA, 25 bp, Homo sapien
gagccctcacaaggtagttcaatag

SEQ ID NO: 3195416 - DNA, 25 bp, Homo sapien
ggagtgtgctgactatgcttgaaca

SEQ ID NO: 3195417 - DNA, 25 bp, Homo sapien
tgaactctgtgacaagactaaaact

SEQ ID NO: 3195418 - DNA, 25 bp, Homo sapien
cagacaatctgtacaactgtgatgg

SEQ ID NO: 3195419 - DNA, 25 bp, Homo sapien
tcaaagccttattgcagacaatctg

SEQ ID NO: 3195420 - DNA, 25 bp, Homo sapien
ctaaggtcttcagagggtagaaact

SEQ ID NO: 3195421 - DNA, 25 bp, Homo sapien
aacaccaagcattcccccgattttg

SEQ ID NO: 3195422 - DNA, 25 bp, Homo sapien
aagcattcccccgattttgcatgcc

SEQ ID NO: 3195423 - DNA, 25 bp, Homo sapien
tcagagtcaagatccatgctcagct

SEQ ID NO: 3195424 - DNA, 25 bp, Homo sapien
tttgcatgccccagccaattcagag

SEQ ID NO: 3195425 - DNA, 25 bp, Homo sapien
tattaggcccatcagaatgtaagca

SEQ ID NO: 3195426 - DNA, 25 bp, Homo sapien
gcacaaatgcctagagaatgacaag

SEQ ID NO: 3195427 - DNA, 25 bp, Homo sapien
caggcagtgactaatcctaggagct

SEQ ID NO: 3195428 - DNA, 25 bp, Homo sapien
tagacatgacataagactggacagc

SEQ ID NO: 3195429 - DNA, 25 bp, Homo sapien
tctatccctggtccaatcgcctgtg

SEQ ID NO: 3195430 - DNA, 25 bp, Homo sapien
tgctattggtagaacagcttttcca

SEQ ID NO: 3195431 - DNA, 25 bp, Homo sapien
tgtgcccagggtagcgtatcaggta

SEQ ID NO: 3195432 - DNA, 25 bp, Homo sapien
tcttccctgctattggtagaacagc

SEQ ID NO: 3195433 - DNA, 25 bp, Homo sapien
agtcgtgtctgtagaaggtaagaag

SEQ ID NO: 3195434 - DNA, 25 bp, Homo sapien
gaaaagtcgtgtctgtagaaggtaa

SEQ ID NO: 3195435 - DNA, 25 bp, Homo sapien
gcccatgaaaagtcgtgtctgtaga

SEQ ID NO: 3195436 - DNA, 25 bp, Homo sapien
aggtaagaaggggcacaaccgccat

SEQ ID NO: 3195437 - DNA, 25 bp, Homo sapien
gcatgtgagtagagcaatggccacc

SEQ ID NO: 3195438 - DNA, 25 bp, Homo sapien
taccagggaaaacagcccattcttg

SEQ ID NO: 3195439 - DNA, 25 bp, Homo sapien
ggagaccagtttcacctgtacacag

SEQ ID NO: 3195440 - DNA, 25 bp, Homo sapien
caacagaggcacttggtatgcagct

SEQ ID NO: 3195441 - DNA, 25 bp, Homo sapien
tgttccggaatccttacatcattca

SEQ ID NO: 3195442 - DNA, 25 bp, Homo sapien
atcatatccaaatctcagcttatct

SEQ ID NO: 3195443 - DNA, 25 bp, Homo sapien
catttaaggatatcatatccaaatc

SEQ ID NO: 3195444 - DNA, 25 bp, Homo sapien
cttcaagtttcaaggtgatataagt

SEQ ID NO: 3195445 - DNA, 25 bp, Homo sapien
accagagtaaacatatttgaataaa

SEQ ID NO: 3195446 - DNA, 25 bp, Homo sapien
gagtaaacatatttgaataaattta

SEQ ID NO: 3195447 - DNA, 25 bp, Homo sapien
cagagtaaacatatttgaataaatt

SEQ ID NO: 3195448 - DNA, 25 bp, Homo sapien
ccagagtaaacatatttgaataaat

SEQ ID NO: 3195449 - DNA, 25 bp, Homo sapien
gtgaaaagatttgtatgtaaacagg

SEQ ID NO: 3195450 - DNA, 25 bp, Homo sapien
ctacagtgaaaagatttgtatgtaa

SEQ ID NO: 3195451 - DNA, 25 bp, Homo sapien
cagtgaaaagatttgtatgtaaaca

SEQ ID NO: 3195452 - DNA, 25 bp, Homo sapien
tgaaaagatttgtatgtaaacaggg

SEQ ID NO: 3195453 - DNA, 25 bp, Homo sapien
ttcttcagggaccctcatttctcct

SEQ ID NO: 3195454 - DNA, 25 bp, Homo sapien
cttcagggaccctcatttctccttg

SEQ ID NO: 3195455 - DNA, 25 bp, Homo sapien
cttaagagcttcttcagggaccctc

SEQ ID NO: 3195456 - DNA, 25 bp, Homo sapien
gcttcttcagggaccctcatttctc

SEQ ID NO: 3195457 - DNA, 25 bp, Homo sapien
ttcagtagttttgtgctgcacttca

SEQ ID NO: 3195458 - DNA, 25 bp, Homo sapien
tgggacaactgaagctgaatggtaa

SEQ ID NO: 3195459 - DNA, 25 bp, Homo sapien
gcagcgtctgctacctttgaatcta

SEQ ID NO: 3195460 - DNA, 25 bp, Homo sapien
gaagctgaatggtaaacttctcatg

SEQ ID NO: 3195461 - DNA, 25 bp, Homo sapien
atgacggctgcccatataatggagt

SEQ ID NO: 3195462 - DNA, 25 bp, Homo sapien
gacggctgcccatataatggagtac

SEQ ID NO: 3195463 - DNA, 25 bp, Homo sapien
tgcccatataatggagtaccacggg

SEQ ID NO: 3195464 - DNA, 25 bp, Homo sapien
gtaccacggggcatagcagaaatat

SEQ ID NO: 3195465 - DNA, 25 bp, Homo sapien
ggttgttttgtgctagccagtcagc

SEQ ID NO: 3195466 - DNA, 25 bp, Homo sapien
gtttgaatccccagcaagtcttgag

SEQ ID NO: 3195467 - DNA, 25 bp, Homo sapien
tcttggacttgtggcgctgatcaga

SEQ ID NO: 3195468 - DNA, 25 bp, Homo sapien
tggtaaatgaagcatgccctgcacc

SEQ ID NO: 3195469 - DNA, 25 bp, Homo sapien
ttctctgaatcactttgcgtaccat

SEQ ID NO: 3195470 - DNA, 25 bp, Homo sapien
gtcttaagtgttcctcaagagttgc

SEQ ID NO: 3195471 - DNA, 25 bp, Homo sapien
ttgctacagcgcctgtgagccccag

SEQ ID NO: 3195472 - DNA, 25 bp, Homo sapien
aatcactttgcgtaccatcatcatg

SEQ ID NO: 3195473 - DNA, 25 bp, Homo sapien
ctgacacaagattcccgcactttga

SEQ ID NO: 3195474 - DNA, 25 bp, Homo sapien
aagaatgcaatcataaaagcagttt

SEQ ID NO: 3195475 - DNA, 25 bp, Homo sapien
gaatgcaatcataaaagcagtttga

SEQ ID NO: 3195476 - DNA, 25 bp, Homo sapien
tgacacaagattcccgcactttgag

SEQ ID NO: 3195477 - DNA, 25 bp, Homo sapien
gtcactttggtcatcatcattatcc

SEQ ID NO: 3195478 - DNA, 25 bp, Homo sapien
ggaagggtattgacaccgatggctc

SEQ ID NO: 3195479 - DNA, 25 bp, Homo sapien
cactgttgggattctctaactcaat

SEQ ID NO: 3195480 - DNA, 25 bp, Homo sapien
tcaatggtataagtacccttgtcac

SEQ ID NO: 3195481 - DNA, 25 bp, Homo sapien
ttgcttatagaaccagcagtgacca

SEQ ID NO: 3195482 - DNA, 25 bp, Homo sapien
tgttgcttatagaaccagcagtgac

SEQ ID NO: 3195483 - DNA, 25 bp, Homo sapien
ttatagaaccagcagtgaccaggcc

SEQ ID NO: 3195484 - DNA, 25 bp, Homo sapien
gcttatagaaccagcagtgaccagg

SEQ ID NO: 3195485 - DNA, 25 bp, Homo sapien
aggcctattataatcctgattgtca

SEQ ID NO: 3195486 - DNA, 25 bp, Homo sapien
cagatgtagtcagtggttttctttc

SEQ ID NO: 3195487 - DNA, 25 bp, Homo sapien
gtgaaatccagatgtagtcagtggt

SEQ ID NO: 3195488 - DNA, 25 bp, Homo sapien
ttgataacaggcctattataatcct

SEQ ID NO: 3195489 - DNA, 25 bp, Homo sapien
ttctgagtagtgaaggtggtaccag

SEQ ID NO: 3195490 - DNA, 25 bp, Homo sapien
cccacatttctgagtagtgaaggtg

SEQ ID NO: 3195491 - DNA, 25 bp, Homo sapien
ctgcccacatttctgagtagtgaag

SEQ ID NO: 3195492 - DNA, 25 bp, Homo sapien
tggtaccagagccatgtggaccatg

SEQ ID NO: 3195493 - DNA, 25 bp, Homo sapien
tcatgccttgtatgattggcagcca

SEQ ID NO: 3195494 - DNA, 25 bp, Homo sapien
catgccttgtatgattggcagccaa

SEQ ID NO: 3195495 - DNA, 25 bp, Homo sapien
gccttgtatgattggcagccaaact

SEQ ID NO: 3195496 - DNA, 25 bp, Homo sapien
tgccttgtatgattggcagccaaac

SEQ ID NO: 3195497 - DNA, 25 bp, Homo sapien
tgtgttacaacctttgctctgtggc

SEQ ID NO: 3195498 - DNA, 25 bp, Homo sapien
tctccctggctagccaaggaagttg

SEQ ID NO: 3195499 - DNA, 25 bp, Homo sapien
cattttactcaagggtctgtcagca

SEQ ID NO: 3195500 - DNA, 25 bp, Homo sapien
gagcagagctgcctaagtgaagtag

SEQ ID NO: 3195501 - DNA, 25 bp, Homo sapien
cactaatgacttggaggattccttc

SEQ ID NO: 3195502 - DNA, 25 bp, Homo sapien
taagttctatgggtatgtttgggct

SEQ ID NO: 3195503 - DNA, 25 bp, Homo sapien
gctgggtttttctatagtgaagctc

SEQ ID NO: 3195504 - DNA, 25 bp, Homo sapien
tctatagtgaagctcccttgtcgca

SEQ ID NO: 3195505 - DNA, 25 bp, Homo sapien
tactagatgaaccagataccaccgg

SEQ ID NO: 3195506 - DNA, 25 bp, Homo sapien
tatctgatggtactagtctggctcc

SEQ ID NO: 3195507 - DNA, 25 bp, Homo sapien
tcagctgaggtaagtggagtccgtc

SEQ ID NO: 3195508 - DNA, 25 bp, Homo sapien
gagatgttacgccttcctgtgggag

SEQ ID NO: 3195509 - DNA, 25 bp, Homo sapien
agatgtctgcctactgaaaataatc

SEQ ID NO: 3195510 - DNA, 25 bp, Homo sapien
ttagatgtctgcctactgaaaataa

SEQ ID NO: 3195511 - DNA, 25 bp, Homo sapien
tgaaaataatcacacatcttcaagt

SEQ ID NO: 3195512 - DNA, 25 bp, Homo sapien
aataatcacacatcttcaagtctgt

SEQ ID NO: 3195513 - DNA, 25 bp, Homo sapien
tagagacatcatctaaaatatggaa

SEQ ID NO: 3195514 - DNA, 25 bp, Homo sapien
ttgggacaatatcacaagtgctagg

SEQ ID NO: 3195515 - DNA, 25 bp, Homo sapien
tttttacatatccaattgggacaat

SEQ ID NO: 3195516 - DNA, 25 bp, Homo sapien
ggaattggaaacattatggaattat

SEQ ID NO: 3195517 - DNA, 25 bp, Homo sapien
agtataagccaggtctatggactcc

SEQ ID NO: 3195518 - DNA, 25 bp, Homo sapien
tataagccaggtctatggactccca

SEQ ID NO: 3195519 - DNA, 25 bp, Homo sapien
tgatattccaagtgttgtatacatt

SEQ ID NO: 3195520 - DNA, 25 bp, Homo sapien
aaaacgaattctctgatattccaag

SEQ ID NO: 3195521 - DNA, 25 bp, Homo sapien
gaagcataaccagtaggaaagcgcc

SEQ ID NO: 3195522 - DNA, 25 bp, Homo sapien
cataaccagtaggaaagcgcctcca

SEQ ID NO: 3195523 - DNA, 25 bp, Homo sapien
gaggtggaagcataaccagtaggaa

SEQ ID NO: 3195524 - DNA, 25 bp, Homo sapien
gtggaagcataaccagtaggaaagc

SEQ ID NO: 3195525 - DNA, 25 bp, Homo sapien
ggaattatggtctgatccaaattca

SEQ ID NO: 3195526 - DNA, 25 bp, Homo sapien
ctggagaagtacatagacgggtatg

SEQ ID NO: 3195527 - DNA, 25 bp, Homo sapien
tatgtttaggggaattatggtctga

SEQ ID NO: 3195528 - DNA, 25 bp, Homo sapien
taggggaattatggtctgatccaaa

SEQ ID NO: 3195529 - DNA, 25 bp, Homo sapien
cgctctgcaagcgagtggttttcag

SEQ ID NO: 3195530 - DNA, 25 bp, Homo sapien
gctgatccagcgctctgcaagcgag

SEQ ID NO: 3195531 - DNA, 25 bp, Homo sapien
tccagcgctctgcaagcgagtggtt

SEQ ID NO: 3195532 - DNA, 25 bp, Homo sapien
ctctgcaagcgagtggttttcaggg

SEQ ID NO: 3195533 - DNA, 25 bp, Homo sapien
taatccggtgtttgaatgaagaact

SEQ ID NO: 3195534 - DNA, 25 bp, Homo sapien
tctcgatgagcagtccaatctcgga

SEQ ID NO: 3195535 - DNA, 25 bp, Homo sapien
caatctcggatgtagtcttcctgct

SEQ ID NO: 3195536 - DNA, 25 bp, Homo sapien
agtcttcctgctctttaatccggtg

SEQ ID NO: 3195537 - DNA, 25 bp, Homo sapien
gaatctatctctcctgctacatcgt

SEQ ID NO: 3195538 - DNA, 25 bp, Homo sapien
taggggcagtgcctgatgaagtcac

SEQ ID NO: 3195539 - DNA, 25 bp, Homo sapien
cctgctacatcgttgatctcccgag

SEQ ID NO: 3195540 - DNA, 25 bp, Homo sapien
acatcgttgatctcccgagcaatga

SEQ ID NO: 3195541 - DNA, 25 bp, Homo sapien
tctctagtgtctatggcagagccag

SEQ ID NO: 3195542 - DNA, 25 bp, Homo sapien
ctcttctctagtgtctatggcagag

SEQ ID NO: 3195543 - DNA, 25 bp, Homo sapien
tcttctctagtgtctatggcagagc

SEQ ID NO: 3195544 - DNA, 25 bp, Homo sapien
ttctctagtgtctatggcagagcca

SEQ ID NO: 3195545 - DNA, 25 bp, Homo sapien
gcatttctccatgaagatctcctac

SEQ ID NO: 3195546 - DNA, 25 bp, Homo sapien
tgcatttctccatgaagatctccta

SEQ ID NO: 3195547 - DNA, 25 bp, Homo sapien
tatgcatttctccatgaagatctcc

SEQ ID NO: 3195548 - DNA, 25 bp, Homo sapien
cttatgcatttctccatgaagatct

SEQ ID NO: 3195549 - DNA, 25 bp, Homo sapien
tcttggatcaccagatcgaccgttg

SEQ ID NO: 3195550 - DNA, 25 bp, Homo sapien
taattgttaagtgatcgggaggctc

SEQ ID NO: 3195551 - DNA, 25 bp, Homo sapien
tgctccaggttctccgccttgtaat

SEQ ID NO: 3195552 - DNA, 25 bp, Homo sapien
gttgaggctttcatcaaaaacacga

SEQ ID NO: 3195553 - DNA, 25 bp, Homo sapien
ccagctgtcttatctatagattgtc

SEQ ID NO: 3195554 - DNA, 25 bp, Homo sapien
gaaagacggatgacagcagcagatt

SEQ ID NO: 3195555 - DNA, 25 bp, Homo sapien
tagattgtcttatcttcttagagaa

SEQ ID NO: 3195556 - DNA, 25 bp, Homo sapien
actgaaagacggatgacagcagcag

SEQ ID NO: 3195557 - DNA, 25 bp, Homo sapien
gaggttttcacaatagggacttcac

SEQ ID NO: 3195558 - DNA, 25 bp, Homo sapien
tcccaattccgatctttgtctttaa

SEQ ID NO: 3195559 - DNA, 25 bp, Homo sapien
tttgctttctatgtcatcccaattc

SEQ ID NO: 3195560 - DNA, 25 bp, Homo sapien
cttcactttcggctcttaatttgct

SEQ ID NO: 3195561 - DNA, 25 bp, Homo sapien
ggaacacttaatattatctacatgg

SEQ ID NO: 3195562 - DNA, 25 bp, Homo sapien
catggtacttactacattaatagca

SEQ ID NO: 3195563 - DNA, 25 bp, Homo sapien
caatgagatgattgtagcagatgaa

SEQ ID NO: 3195564 - DNA, 25 bp, Homo sapien
tgttatcactttacaagcaatgaat

SEQ ID NO: 3195565 - DNA, 25 bp, Homo sapien
gtagctgcttttctactcttttcag

SEQ ID NO: 3195566 - DNA, 25 bp, Homo sapien
agctgcttttctactcttttcagtt

SEQ ID NO: 3195567 - DNA, 25 bp, Homo sapien
cttgtagctgcttttctactctttt

SEQ ID NO: 3195568 - DNA, 25 bp, Homo sapien
tgtagctgcttttctactcttttca

SEQ ID NO: 3195569 - DNA, 25 bp, Homo sapien
tccatcaggatcaatcatagcattg

SEQ ID NO: 3195570 - DNA, 25 bp, Homo sapien
ttcacagggctggacttctgtttcg

SEQ ID NO: 3195571 - DNA, 25 bp, Homo sapien
tttcggtggagatggcaacatagca

SEQ ID NO: 3195572 - DNA, 25 bp, Homo sapien
tggagatggcaacatagcactggga

SEQ ID NO: 3195573 - DNA, 25 bp, Homo sapien
cattctcaaattcagctgcggctga

SEQ ID NO: 3195574 - DNA, 25 bp, Homo sapien
agcaggatgaagagccctagcttct

SEQ ID NO: 3195575 - DNA, 25 bp, Homo sapien
cagcaggatgaagagccctagcttc

SEQ ID NO: 3195576 - DNA, 25 bp, Homo sapien
gcattctcaaattcagctgcggctg

SEQ ID NO: 3195577 - DNA, 25 bp, Homo sapien
caggtaatgatttttcaacaatcaa

SEQ ID NO: 3195578 - DNA, 25 bp, Homo sapien
caacactatgctgcttccaatattc

SEQ ID NO: 3195579 - DNA, 25 bp, Homo sapien
aggtaatgatttttcaacaatcaag

SEQ ID NO: 3195580 - DNA, 25 bp, Homo sapien
tcaacactatgctgcttccaatatt

SEQ ID NO: 3195581 - DNA, 25 bp, Homo sapien
cattgtgtccaatggtaatgagtac

SEQ ID NO: 3195582 - DNA, 25 bp, Homo sapien
cacaggaccaatatacatgttctga

SEQ ID NO: 3195583 - DNA, 25 bp, Homo sapien
aaaattttaggacacagagtgactg

SEQ ID NO: 3195584 - DNA, 25 bp, Homo sapien
cattgcttgggagtgaaactatcaa

SEQ ID NO: 3195585 - DNA, 25 bp, Homo sapien
tgtgtaagacagacaggatttacta

SEQ ID NO: 3195586 - DNA, 25 bp, Homo sapien
tgtttagtagcacaggacaaaggcc

SEQ ID NO: 3195587 - DNA, 25 bp, Homo sapien
gacaaaggcctttgtcgtcgtcttg

SEQ ID NO: 3195588 - DNA, 25 bp, Homo sapien
tcttgcagggtccttataaatgtgt

SEQ ID NO: 3195589 - DNA, 25 bp, Homo sapien
ccactttccacttcactatgtggcg

SEQ ID NO: 3195590 - DNA, 25 bp, Homo sapien
tgagacagacaaacctggaagtgag

SEQ ID NO: 3195591 - DNA, 25 bp, Homo sapien
ctttccacttcactatgtggcgcat

SEQ ID NO: 3195592 - DNA, 25 bp, Homo sapien
actttccacttcactatgtggcgca

SEQ ID NO: 3195593 - DNA, 25 bp, Homo sapien
tataactcctgtcttaaaatacttc

SEQ ID NO: 3195594 - DNA, 25 bp, Homo sapien
taactcctgtcttaaaatacttcat

SEQ ID NO: 3195595 - DNA, 25 bp, Homo sapien
ataactcctgtcttaaaatacttca

SEQ ID NO: 3195596 - DNA, 25 bp, Homo sapien
ctataactcctgtcttaaaatactt

SEQ ID NO: 3195597 - DNA, 25 bp, Homo sapien
ctgcggtcccacctgaggccaaagg

SEQ ID NO: 3195598 - DNA, 25 bp, Homo sapien
gtgctgcggtcccacctgaggccaa

SEQ ID NO: 3195599 - DNA, 25 bp, Homo sapien
tgctgcggtcccacctgaggccaaa

SEQ ID NO: 3195600 - DNA, 25 bp, Homo sapien
gcggtcccacctgaggccaaaggga

SEQ ID NO: 3195601 - DNA, 25 bp, Homo sapien
cattttgagatttaaatagtatagc

SEQ ID NO: 3195602 - DNA, 25 bp, Homo sapien
ctacattttgagatttaaatagtat

SEQ ID NO: 3195603 - DNA, 25 bp, Homo sapien
tttgagatttaaatagtatagccat

SEQ ID NO: 3195604 - DNA, 25 bp, Homo sapien
ttttgagatttaaatagtatagcca

SEQ ID NO: 3195605 - DNA, 25 bp, Homo sapien
tgccctgatctgtcccgaagttctg

SEQ ID NO: 3195606 - DNA, 25 bp, Homo sapien
tgactgctacagatctgagcaccgg

SEQ ID NO: 3195607 - DNA, 25 bp, Homo sapien
aatactcagggctgactttcttagc

SEQ ID NO: 3195608 - DNA, 25 bp, Homo sapien
ttcatgttcattgggatctacagcc

SEQ ID NO: 3195609 - DNA, 25 bp, Homo sapien
ccgcgcctctgacgccgccaaaggc

SEQ ID NO: 3195610 - DNA, 25 bp, Homo sapien
aggcgcgcccttgtgacgtcacgga

SEQ ID NO: 3195611 - DNA, 25 bp, Homo sapien
cacctctatggtgtcggcgaaggcg

SEQ ID NO: 3195612 - DNA, 25 bp, Homo sapien
gcgaaggcgcgcccttgtgacgtca

SEQ ID NO: 3195613 - DNA, 25 bp, Homo sapien
cttagaaggtggggaataatcatca

SEQ ID NO: 3195614 - DNA, 25 bp, Homo sapien
ttgtctcttagaaggtggggaataa

SEQ ID NO: 3195615 - DNA, 25 bp, Homo sapien
tagaaggtggggaataatcatcatc

SEQ ID NO: 3195616 - DNA, 25 bp, Homo sapien
ctttgtctcttagaaggtggggaat

SEQ ID NO: 3195617 - DNA, 25 bp, Homo sapien
cagagttgaactccctcattttcca

SEQ ID NO: 3195618 - DNA, 25 bp, Homo sapien
ttttccattccccagcattggcggg

SEQ ID NO: 3195619 - DNA, 25 bp, Homo sapien
gttgaactccctcattttccattcc

SEQ ID NO: 3195620 - DNA, 25 bp, Homo sapien
tcattttccattccccagcattggc

SEQ ID NO: 3195621 - DNA, 25 bp, Homo sapien
agatgcacctggcatgaggtgtgcc

SEQ ID NO: 3195622 - DNA, 25 bp, Homo sapien
atgcacctggcatgaggtgtgccca

SEQ ID NO: 3195623 - DNA, 25 bp, Homo sapien
cacctggcatgaggtgtgcccagag

SEQ ID NO: 3195624 - DNA, 25 bp, Homo sapien
cacagatgcacctggcatgaggtgt

SEQ ID NO: 3195625 - DNA, 25 bp, Homo sapien
tcaccgaggtgaccagtaggcattc

SEQ ID NO: 3195626 - DNA, 25 bp, Homo sapien
agtgaaggtcctcacaccaagatat

SEQ ID NO: 3195627 - DNA, 25 bp, Homo sapien
taggcattcccagatacagtgaagg

SEQ ID NO: 3195628 - DNA, 25 bp, Homo sapien
caccgaggtgaccagtaggcattcc

SEQ ID NO: 3195629 - DNA, 25 bp, Homo sapien
ggacagtacttgttctcaagggaat

SEQ ID NO: 3195630 - DNA, 25 bp, Homo sapien
gcagaagtgtcatctcagagctact

SEQ ID NO: 3195631 - DNA, 25 bp, Homo sapien
tgttcacttgaagatacggtcagga

SEQ ID NO: 3195632 - DNA, 25 bp, Homo sapien
tcaggattgtggcatatgaaaattc

SEQ ID NO: 3195633 - DNA, 25 bp, Homo sapien
taatccaattaatgctggaattggg

SEQ ID NO: 3195634 - DNA, 25 bp, Homo sapien
cagaggccgtgccaatctctctgtt

SEQ ID NO: 3195635 - DNA, 25 bp, Homo sapien
tctctgttgttccaacttaagtatg

SEQ ID NO: 3195636 - DNA, 25 bp, Homo sapien
cacagaggccgtgccaatctctctg

SEQ ID NO: 3195637 - DNA, 25 bp, Homo sapien
gttgttccaacttaagtatgtgtgc

SEQ ID NO: 3195638 - DNA, 25 bp, Homo sapien
gtcagtttctcttcctggattcaga

SEQ ID NO: 3195639 - DNA, 25 bp, Homo sapien
cagaagtctttcatggtaggtccag

SEQ ID NO: 3195640 - DNA, 25 bp, Homo sapien
tcagaagtctttcatggtaggtcca

SEQ ID NO: 3195641 - DNA, 25 bp, Homo sapien
tttctcttcctggattcagaagtct

SEQ ID NO: 3195642 - DNA, 25 bp, Homo sapien
catgatactatctgacaagggcagt

SEQ ID NO: 3195643 - DNA, 25 bp, Homo sapien
caagggcagtgatgcatgataacat

SEQ ID NO: 3195644 - DNA, 25 bp, Homo sapien
ccaagtcttcatcattttgtgcata

SEQ ID NO: 3195645 - DNA, 25 bp, Homo sapien
ggcaaatcgctcattaaccccaagt

SEQ ID NO: 3195646 - DNA, 25 bp, Homo sapien
ctgtcttttacagtcgtagataagg

SEQ ID NO: 3195647 - DNA, 25 bp, Homo sapien
tgtcttttacagtcgtagataaggg

SEQ ID NO: 3195648 - DNA, 25 bp, Homo sapien
gctgtcttttacagtcgtagataag

SEQ ID NO: 3195649 - DNA, 25 bp, Homo sapien
aacataagaggaccccatctataca

SEQ ID NO: 3195650 - DNA, 25 bp, Homo sapien
caacataagaggaccccatctatac

SEQ ID NO: 3195651 - DNA, 25 bp, Homo sapien
tcctgtgcatctctttcattggctg

SEQ ID NO: 3195652 - DNA, 25 bp, Homo sapien
gagccattacattgagccagtaata

SEQ ID NO: 3195653 - DNA, 25 bp, Homo sapien
tagaaaataaggtggccagatgcgc

SEQ ID NO: 3195654 - DNA, 25 bp, Homo sapien
ctttcattggctgttcctgagatgg

SEQ ID NO: 3195655 - DNA, 25 bp, Homo sapien
ggctaaagtgtaagggtgcgatctt

SEQ ID NO: 3195656 - DNA, 25 bp, Homo sapien
gctaaagtgtaagggtgcgatcttg

SEQ ID NO: 3195657 - DNA, 25 bp, Homo sapien
cccaggctaaagtgtaagggtgcga

SEQ ID NO: 3195658 - DNA, 25 bp, Homo sapien
caggctaaagtgtaagggtgcgatc

SEQ ID NO: 3195659 - DNA, 25 bp, Homo sapien
aatcttcccatagtctttctcaact

SEQ ID NO: 3195660 - DNA, 25 bp, Homo sapien
aaatcttcccatagtctttctcaac

SEQ ID NO: 3195661 - DNA, 25 bp, Homo sapien
ccaaatcttcccatagtctttctca

SEQ ID NO: 3195662 - DNA, 25 bp, Homo sapien
caaatcttcccatagtctttctcaa

SEQ ID NO: 3195663 - DNA, 25 bp, Homo sapien
tgaggctataatgagccatgatagg

SEQ ID NO: 3195664 - DNA, 25 bp, Homo sapien
gctataatgagccatgataggacca

SEQ ID NO: 3195665 - DNA, 25 bp, Homo sapien
taatgagccatgataggaccactga

SEQ ID NO: 3195666 - DNA, 25 bp, Homo sapien
tgggaaggctgacatggtaggattg

SEQ ID NO: 3195667 - DNA, 25 bp, Homo sapien
cattcgaaaggatccatcccatgcc

SEQ ID NO: 3195668 - DNA, 25 bp, Homo sapien
tcgaaaggatccatcccatgccatt

SEQ ID NO: 3195669 - DNA, 25 bp, Homo sapien
catttcacaatcaacagtatgtggt

SEQ ID NO: 3195670 - DNA, 25 bp, Homo sapien
gtgcattcgaaaggatccatcccat

SEQ ID NO: 3195671 - DNA, 25 bp, Homo sapien
cagaagtctttcatggtagatccag

SEQ ID NO: 3195672 - DNA, 25 bp, Homo sapien
gtctctcttcctggattcagaagtc

SEQ ID NO: 3195673 - DNA, 25 bp, Homo sapien
ggattcagaagtctttcatggtaga

SEQ ID NO: 3195674 - DNA, 25 bp, Homo sapien
taacatgttgcccagtcagtctctc

SEQ ID NO: 3195675 - DNA, 25 bp, Homo sapien
gggtgacagggtgagaccccatctc

SEQ ID NO: 3195676 - DNA, 25 bp, Homo sapien
agctgtgatagcactactgtactca

SEQ ID NO: 3195677 - DNA, 25 bp, Homo sapien
tgtgatagcactactgtactcaagc

SEQ ID NO: 3195678 - DNA, 25 bp, Homo sapien
ctgggtgacagggtgagaccccatc

SEQ ID NO: 3195679 - DNA, 25 bp, Homo sapien
caaaattccatataagcaaagtata

SEQ ID NO: 3195680 - DNA, 25 bp, Homo sapien
aattgtactgaggtctgttgggcaa

SEQ ID NO: 3195681 - DNA, 25 bp, Homo sapien
aattccatataagcaaagtataaat

SEQ ID NO: 3195682 - DNA, 25 bp, Homo sapien
gaaattgtactgaggtctgttgggc

SEQ ID NO: 3195683 - DNA, 25 bp, Homo sapien
tccacttatatgaaaattccaaata

SEQ ID NO: 3195684 - DNA, 25 bp, Homo sapien
tcacccctctggaatccacttatat

SEQ ID NO: 3195685 - DNA, 25 bp, Homo sapien
ggaatccacttatatgaaaattcca

SEQ ID NO: 3195686 - DNA, 25 bp, Homo sapien
cctctggaatccacttatatgaaaa

SEQ ID NO: 3195687 - DNA, 25 bp, Homo sapien
aatgtaaaatcagtgggcgtgttaa

SEQ ID NO: 3195688 - DNA, 25 bp, Homo sapien
tgtaaaatcagtgggcgtgttaagc

SEQ ID NO: 3195689 - DNA, 25 bp, Homo sapien
aaatcagtgggcgtgttaagcttgt

SEQ ID NO: 3195690 - DNA, 25 bp, Homo sapien
ataatgtaaaatcagtgggcgtgtt

SEQ ID NO: 3195691 - DNA, 25 bp, Homo sapien
gtagggtatgggcctaaataggcca

SEQ ID NO: 3195692 - DNA, 25 bp, Homo sapien
agggtatgggcctaaataggccatt

SEQ ID NO: 3195693 - DNA, 25 bp, Homo sapien
tagggtatgggcctaaataggccat

SEQ ID NO: 3195694 - DNA, 25 bp, Homo sapien
gggtatgggcctaaataggccattg

SEQ ID NO: 3195695 - DNA, 25 bp, Homo sapien
cagaagccactggtagctaagaggt

SEQ ID NO: 3195696 - DNA, 25 bp, Homo sapien
cactggtagctaagaggtggccctg

SEQ ID NO: 3195697 - DNA, 25 bp, Homo sapien
gccactggtagctaagaggtggccc

SEQ ID NO: 3195698 - DNA, 25 bp, Homo sapien
acaggagctgacacttgggcaggtt

SEQ ID NO: 3195699 - DNA, 25 bp, Homo sapien
gaggccgggccttgtcgaggcctgc

SEQ ID NO: 3195700 - DNA, 25 bp, Homo sapien
caggaggccgggccttgtcgaggcc

SEQ ID NO: 3195701 - DNA, 25 bp, Homo sapien
cgggccttgtcgaggcctgcagagg

SEQ ID NO: 3195702 - DNA, 25 bp, Homo sapien
gccgggccttgtcgaggcctgcaga

SEQ ID NO: 3195703 - DNA, 25 bp, Homo sapien
gggcccggagaggatgccgggaggc

SEQ ID NO: 3195704 - DNA, 25 bp, Homo sapien
cggagaggatgccgggaggctgcaa

SEQ ID NO: 3195705 - DNA, 25 bp, Homo sapien
gctgggcccggagaggatgccggga

SEQ ID NO: 3195706 - DNA, 25 bp, Homo sapien
cccggagaggatgccgggaggctgc

SEQ ID NO: 3195707 - DNA, 25 bp, Homo sapien
caaagacgttgttgggaggccaaag

SEQ ID NO: 3195708 - DNA, 25 bp, Homo sapien
agacgttgttgggaggccaaagtcg

SEQ ID NO: 3195709 - DNA, 25 bp, Homo sapien
gccatcagagggcaggagctggcct

SEQ ID NO: 3195710 - DNA, 25 bp, Homo sapien
cccaattccaggctgacttgaggat

SEQ ID NO: 3195711 - DNA, 25 bp, Homo sapien
cccggagaggccgccaagaggccgg

SEQ ID NO: 3195712 - DNA, 25 bp, Homo sapien
ttgctctcttccaggcccaattcca

SEQ ID NO: 3195713 - DNA, 25 bp, Homo sapien
ctggcatggtgcagaaactcactcc

SEQ ID NO: 3195714 - DNA, 25 bp, Homo sapien
aataaaaaattctggcatggtgcag

SEQ ID NO: 3195715 - DNA, 25 bp, Homo sapien
ataaaaaattctggcatggtgcaga

SEQ ID NO: 3195716 - DNA, 25 bp, Homo sapien
aattctggcatggtgcagaaactca

SEQ ID NO: 3195717 - DNA, 25 bp, Homo sapien
tccgagcccctgtatgtaccatgaa

SEQ ID NO: 3195718 - DNA, 25 bp, Homo sapien
tacacttcgacacaggcagcgggag

SEQ ID NO: 3195719 - DNA, 25 bp, Homo sapien
aaggcctgctcctcttatctatacc

SEQ ID NO: 3195720 - DNA, 25 bp, Homo sapien
tatgtaccatgaattgtgggacctt

SEQ ID NO: 3195721 - DNA, 25 bp, Homo sapien
caaagcccaacacccccaagtgtgc

SEQ ID NO: 3195722 - DNA, 25 bp, Homo sapien
ccaaagcccaacacccccaagtgtg

SEQ ID NO: 3195723 - DNA, 25 bp, Homo sapien
tgtctttctttgtatcagtgctcag

SEQ ID NO: 3195724 - DNA, 25 bp, Homo sapien
ctttgtatcagtgctcagctgagtc

SEQ ID NO: 3195725 - DNA, 25 bp, Homo sapien
ttgaatcattttaagatgctcgaac

SEQ ID NO: 3195726 - DNA, 25 bp, Homo sapien
tctatgatttctctttccagttgtt

SEQ ID NO: 3195727 - DNA, 25 bp, Homo sapien
gaagcctcagcaacttaacagaagg

SEQ ID NO: 3195728 - DNA, 25 bp, Homo sapien
ggcaaagtcacttacatcagaccca

SEQ ID NO: 3195729 - DNA, 25 bp, Homo sapien
gagtgtagcaaaggtcagaattctg

SEQ ID NO: 3195730 - DNA, 25 bp, Homo sapien
caaagcaaagtggagccgagtcatg

SEQ ID NO: 3195731 - DNA, 25 bp, Homo sapien
tctctagggactgtttacccttatg

SEQ ID NO: 3195732 - DNA, 25 bp, Homo sapien
ctctagggactgtttacccttatgg

SEQ ID NO: 3195733 - DNA, 25 bp, Homo sapien
acattttcatgggttcttccaagat

SEQ ID NO: 3195734 - DNA, 25 bp, Homo sapien
cattaacattttcatgggttcttcc

SEQ ID NO: 3195735 - DNA, 25 bp, Homo sapien
tcttccaagatccacattacccaac

SEQ ID NO: 3195736 - DNA, 25 bp, Homo sapien
gttcttccaagatccacattaccca

SEQ ID NO: 3195737 - DNA, 25 bp, Homo sapien
cactatcccgagtacttgtcaatct

SEQ ID NO: 3195738 - DNA, 25 bp, Homo sapien
tccagtgaactcttatccaaccttt

SEQ ID NO: 3195739 - DNA, 25 bp, Homo sapien
aattcaccgggagcttacgaacaga

SEQ ID NO: 3195740 - DNA, 25 bp, Homo sapien
tccaacctttcttccgagtctgtgg

SEQ ID NO: 3195741 - DNA, 25 bp, Homo sapien
ggagctgtcgccgtaacttctgccg

SEQ ID NO: 3195742 - DNA, 25 bp, Homo sapien
gcgaggagctgtcgccgtaacttct

SEQ ID NO: 3195743 - DNA, 25 bp, Homo sapien
ggatctcctgcaagcggctatccat

SEQ ID NO: 3195744 - DNA, 25 bp, Homo sapien
ctgcgcgaggagctgtcgccgtaac

SEQ ID NO: 3195745 - DNA, 25 bp, Homo sapien
cagaaaggccttaacagcggcaggt

SEQ ID NO: 3195746 - DNA, 25 bp, Homo sapien
ggaggcggccgcgcactcgcattct

SEQ ID NO: 3195747 - DNA, 25 bp, Homo sapien
gcactcgcattctcgatccctccca

SEQ ID NO: 3195748 - DNA, 25 bp, Homo sapien
ccttaacagcggcaggtagagaagg

SEQ ID NO: 3195749 - DNA, 25 bp, Homo sapien
taacacggcaccaatgctgtcggca

SEQ ID NO: 3195750 - DNA, 25 bp, Homo sapien
tcatctttgctatttaacacggcac

SEQ ID NO: 3195751 - DNA, 25 bp, Homo sapien
tgctatttaacacggcaccaatgct

SEQ ID NO: 3195752 - DNA, 25 bp, Homo sapien
aatgctgtcggcactttcagctccc

SEQ ID NO: 3195753 - DNA, 25 bp, Homo sapien
tttgcatttggagcagaggtatcat

SEQ ID NO: 3195754 - DNA, 25 bp, Homo sapien
gttttgcatttggagcagaggtatc

SEQ ID NO: 3195755 - DNA, 25 bp, Homo sapien
ttttgcatttggagcagaggtatca

SEQ ID NO: 3195756 - DNA, 25 bp, Homo sapien
ttcatctgtctctccttcatccaga

SEQ ID NO: 3195757 - DNA, 25 bp, Homo sapien
gtctctccttcatccagatacttac

SEQ ID NO: 3195758 - DNA, 25 bp, Homo sapien
atattcttccattttgtcttcatct

SEQ ID NO: 3195759 - DNA, 25 bp, Homo sapien
tatattcttccattttgtcttcatc

SEQ ID NO: 3195760 - DNA, 25 bp, Homo sapien
aaattttcttcatcctgttgcattt

SEQ ID NO: 3195761 - DNA, 25 bp, Homo sapien
tcttcttcatatggcaaattttctt

SEQ ID NO: 3195762 - DNA, 25 bp, Homo sapien
cttaagaaaagtactagaatctttg

SEQ ID NO: 3195763 - DNA, 25 bp, Homo sapien
gaatctttgtaaatctcttcttcat

SEQ ID NO: 3195764 - DNA, 25 bp, Homo sapien
gtccagtgtctacaaaatgttggca

SEQ ID NO: 3195765 - DNA, 25 bp, Homo sapien
aaatgttggcagtaatcattatggg

SEQ ID NO: 3195766 - DNA, 25 bp, Homo sapien
ctacatccctgatgaaattctgagg

SEQ ID NO: 3195767 - DNA, 25 bp, Homo sapien
tgaaattctgaggtctatgtccagt

SEQ ID NO: 3195768 - DNA, 25 bp, Homo sapien
atgggaggagtgttagatttagcta

SEQ ID NO: 3195769 - DNA, 25 bp, Homo sapien
ctttagcctgatgagctccctcagt

SEQ ID NO: 3195770 - DNA, 25 bp, Homo sapien
taactcatcctttagcctgatgagc

SEQ ID NO: 3195771 - DNA, 25 bp, Homo sapien
gttagatttagctattaactcatcc

SEQ ID NO: 3195772 - DNA, 25 bp, Homo sapien
tgttagttctctgatgtcaaaggct

SEQ ID NO: 3195773 - DNA, 25 bp, Homo sapien
aggcttctatatcggcttgtaagta

SEQ ID NO: 3195774 - DNA, 25 bp, Homo sapien
ggtgttagttctctgatgtcaaagg

SEQ ID NO: 3195775 - DNA, 25 bp, Homo sapien
atgtcaaaggcttctatatcggctt

SEQ ID NO: 3195776 - DNA, 25 bp, Homo sapien
tgtgttccaacaataccaacctaca

SEQ ID NO: 3195777 - DNA, 25 bp, Homo sapien
aattctttcccagactctagcccag

SEQ ID NO: 3195778 - DNA, 25 bp, Homo sapien
cctcaagatagtcccaatctgtgtt

SEQ ID NO: 3195779 - DNA, 25 bp, Homo sapien
tcttcagaataaaagtcccaactcc

SEQ ID NO: 3195780 - DNA, 25 bp, Homo sapien
ggtcctgattacactctccttgaaa

SEQ ID NO: 3195781 - DNA, 25 bp, Homo sapien
tctagaaatgcagaacggtcctgat

SEQ ID NO: 3195782 - DNA, 25 bp, Homo sapien
gaaaccagatctgcctgtccttaga

SEQ ID NO: 3195783 - DNA, 25 bp, Homo sapien
ttttatcctgagacacgatcccagg

SEQ ID NO: 3195784 - DNA, 25 bp, Homo sapien
tatgccagccagagttgaagtacag

SEQ ID NO: 3195785 - DNA, 25 bp, Homo sapien
caataaatgtttcgggaggactgtg

SEQ ID NO: 3195786 - DNA, 25 bp, Homo sapien
tgtgatatccagtgtctacagaaga

SEQ ID NO: 3195787 - DNA, 25 bp, Homo sapien
taactaagcccaatgttagggacaa

SEQ ID NO: 3195788 - DNA, 25 bp, Homo sapien
aataaatgatcgaggtgctgcaatc

SEQ ID NO: 3195789 - DNA, 25 bp, Homo sapien
atgatcgaggtgctgcaatctcatc

SEQ ID NO: 3195790 - DNA, 25 bp, Homo sapien
gaaaaataaatgatcgaggtgctgc

SEQ ID NO: 3195791 - DNA, 25 bp, Homo sapien
aatctcatcaatttctaacttcata

SEQ ID NO: 3195792 - DNA, 25 bp, Homo sapien
ggagccaatgctcctgaatactttt

SEQ ID NO: 3195793 - DNA, 25 bp, Homo sapien
tcatgtcttccatatgctgtgttac

SEQ ID NO: 3195794 - DNA, 25 bp, Homo sapien
ctacacattcctccctagtgctggt

SEQ ID NO: 3195795 - DNA, 25 bp, Homo sapien
tagctactcatagaacactttttag

SEQ ID NO: 3195796 - DNA, 25 bp, Homo sapien
tccaacaagcttcctttccaccaca

SEQ ID NO: 3195797 - DNA, 25 bp, Homo sapien
caccacaggaaatcctgttgggagt

SEQ ID NO: 3195798 - DNA, 25 bp, Homo sapien
cacaggaaatcctgttgggagttcc

SEQ ID NO: 3195799 - DNA, 25 bp, Homo sapien
cctttccaccacaggaaatcctgtt

SEQ ID NO: 3195800 - DNA, 25 bp, Homo sapien
ctaaagtcttagtcttcccaggatt

SEQ ID NO: 3195801 - DNA, 25 bp, Homo sapien
aaagacagcctttggatctaaagtc

SEQ ID NO: 3195802 - DNA, 25 bp, Homo sapien
taaagtcttagtcttcccaggattg

SEQ ID NO: 3195803 - DNA, 25 bp, Homo sapien
ttctctgaaagacagcctttggatc

SEQ ID NO: 3195804 - DNA, 25 bp, Homo sapien
gaaggcgtcttctaccaagacaaaa

SEQ ID NO: 3195805 - DNA, 25 bp, Homo sapien
tctcttccaaatagatgaaggcgtc

SEQ ID NO: 3195806 - DNA, 25 bp, Homo sapien
tgtgctacgcttcacagttcctttg

SEQ ID NO: 3195807 - DNA, 25 bp, Homo sapien
aatgaagtccccgtctgtgctacgc

SEQ ID NO: 3195808 - DNA, 25 bp, Homo sapien
taagcgttggtccaactgtgagcca

SEQ ID NO: 3195809 - DNA, 25 bp, Homo sapien
tcttctgtacaaccagtcaagtagg

SEQ ID NO: 3195810 - DNA, 25 bp, Homo sapien
ggcgattttggtcgaagtctctcaa

SEQ ID NO: 3195811 - DNA, 25 bp, Homo sapien
gatctatttctttctcgtccacggc

SEQ ID NO: 3195812 - DNA, 25 bp, Homo sapien
tgtgtgctcctccacggccccctct

SEQ ID NO: 3195813 - DNA, 25 bp, Homo sapien
tcctccacggccccctctaaagcca

SEQ ID NO: 3195814 - DNA, 25 bp, Homo sapien
gtggaaagccacctctgtgtgctcc

SEQ ID NO: 3195815 - DNA, 25 bp, Homo sapien
ttatcgaggtggaaagccacctctg

SEQ ID NO: 3195816 - DNA, 25 bp, Homo sapien
taaagcaaagtgcaagctggaagtg

SEQ ID NO: 3195817 - DNA, 25 bp, Homo sapien
gaggatgaataggttcaatgtcttc

SEQ ID NO: 3195818 - DNA, 25 bp, Homo sapien
acagtgtgtgtgacaactgcaagca

SEQ ID NO: 3195819 - DNA, 25 bp, Homo sapien
taagacattcttgcagctcagagaa

SEQ ID NO: 3195820 - DNA, 25 bp, Homo sapien
tgttcacgcacataacaaaaggcag

SEQ ID NO: 3195821 - DNA, 25 bp, Homo sapien
gatgaagctacttgagttgttccat

SEQ ID NO: 3195822 - DNA, 25 bp, Homo sapien
gttccattctgttcacgcacataac

SEQ ID NO: 3195823 - DNA, 25 bp, Homo sapien
tgtaattagctgaagtctatcagaa

SEQ ID NO: 3195824 - DNA, 25 bp, Homo sapien
tcttaggaagcgtgattaggagtca

SEQ ID NO: 3195825 - DNA, 25 bp, Homo sapien
taatgaggtatcttgtcgctgcctc

SEQ ID NO: 3195826 - DNA, 25 bp, Homo sapien
tctattctatcaaggccctgtcagc

SEQ ID NO: 3195827 - DNA, 25 bp, Homo sapien
tgtcagcactagcatgataccacag

SEQ ID NO: 3195828 - DNA, 25 bp, Homo sapien
gatacttctaaggacccatcacagg

SEQ ID NO: 3195829 - DNA, 25 bp, Homo sapien
cacaggtgcctatgccatgtaaaca

SEQ ID NO: 3195830 - DNA, 25 bp, Homo sapien
taaatatggtagatcatggctcccc

SEQ ID NO: 3195831 - DNA, 25 bp, Homo sapien
tatggaacgtaatagagagccctgt

SEQ ID NO: 3195832 - DNA, 25 bp, Homo sapien
tctgtgagttggttgccatgccaca

SEQ ID NO: 3195833 - DNA, 25 bp, Homo sapien
gctgcagtagtgatccctctcaact

SEQ ID NO: 3195834 - DNA, 25 bp, Homo sapien
ttcccaggttgacaccttgacctct

SEQ ID NO: 3195835 - DNA, 25 bp, Homo sapien
agttggttgccatgccacactcctg

SEQ ID NO: 3195836 - DNA, 25 bp, Homo sapien
tgacaccctgatgcacaatatagct

SEQ ID NO: 3195837 - DNA, 25 bp, Homo sapien
gcagaagcaatgtggtatttccaga

SEQ ID NO: 3195838 - DNA, 25 bp, Homo sapien
tcctagtagcagctgtgacaccctg

SEQ ID NO: 3195839 - DNA, 25 bp, Homo sapien
tttgagaagtcctagatttatggcc

SEQ ID NO: 3195840 - DNA, 25 bp, Homo sapien
ttgtgacaacacaagcctagacctc

SEQ ID NO: 3195841 - DNA, 25 bp, Homo sapien
tagtttcctgtctcaagcaagtaac

SEQ ID NO: 3195842 - DNA, 25 bp, Homo sapien
aattgtgctttgaggttttgtccac

SEQ ID NO: 3195843 - DNA, 25 bp, Homo sapien
taaatgtggtcacacagtatacagc

SEQ ID NO: 3195844 - DNA, 25 bp, Homo sapien
ctttggtgctcaggtataaagccaa

SEQ ID NO: 3195845 - DNA, 25 bp, Homo sapien
aagagatggcatttagaacttcagc

SEQ ID NO: 3195846 - DNA, 25 bp, Homo sapien
gtacaattgtaccataaagggaaca

SEQ ID NO: 3195847 - DNA, 25 bp, Homo sapien
tttcaacttaaggtctgcatagcag

SEQ ID NO: 3195848 - DNA, 25 bp, Homo sapien
tagtgtccctcatctcacgaatgta

SEQ ID NO: 3195849 - DNA, 25 bp, Homo sapien
agagcagcactctccagtaatgcaa

SEQ ID NO: 3195850 - DNA, 25 bp, Homo sapien
tcaaagtgttcatgacaaaactgcc

SEQ ID NO: 3195851 - DNA, 25 bp, Homo sapien
tccctgtgtgttaacctctctagca

SEQ ID NO: 3195852 - DNA, 25 bp, Homo sapien
tctctgtaaactgccaaattgctaa

SEQ ID NO: 3195853 - DNA, 25 bp, Homo sapien
ttgaacaccggcaatataccaaaca

SEQ ID NO: 3195854 - DNA, 25 bp, Homo sapien
catttacaaggttgactacttcctc

SEQ ID NO: 3195855 - DNA, 25 bp, Homo sapien
cacttaagagttggtattccccgag

SEQ ID NO: 3195856 - DNA, 25 bp, Homo sapien
cattaactatgtgccagtctctgta

SEQ ID NO: 3195857 - DNA, 25 bp, Homo sapien
taagtgtttggctacagactaaatc

SEQ ID NO: 3195858 - DNA, 25 bp, Homo sapien
tatgctctggactcatccctggtgc

SEQ ID NO: 3195859 - DNA, 25 bp, Homo sapien
tacagaggaatcagttgaggcttgg

SEQ ID NO: 3195860 - DNA, 25 bp, Homo sapien
ttttccaaattcaagcaagctcgac

SEQ ID NO: 3195861 - DNA, 25 bp, Homo sapien
gacttatatgaattactgctcccac

SEQ ID NO: 3195862 - DNA, 25 bp, Homo sapien
aaacctcattaccacttctgtcact

SEQ ID NO: 3195863 - DNA, 25 bp, Homo sapien
gtcaaatgaccttaactgcaaaata

SEQ ID NO: 3195864 - DNA, 25 bp, Homo sapien
cgtttttacagagataccaggccat

SEQ ID NO: 3195865 - DNA, 25 bp, Homo sapien
ggcagtggtttagtagccagcccta

SEQ ID NO: 3195866 - DNA, 25 bp, Homo sapien
cctattaatctcaaggcaacaggag

SEQ ID NO: 3195867 - DNA, 25 bp, Homo sapien
caaactccacatgggtgaagacatc

SEQ ID NO: 3195868 - DNA, 25 bp, Homo sapien
gccagatttagacatggtccaggat

SEQ ID NO: 3195869 - DNA, 25 bp, Homo sapien
tatgtctcctgcaagtggcctggaa

SEQ ID NO: 3195870 - DNA, 25 bp, Homo sapien
tattgtgctacaggagatactacag

SEQ ID NO: 3195871 - DNA, 25 bp, Homo sapien
tactacagtaaacaggctggacctg

SEQ ID NO: 3195872 - DNA, 25 bp, Homo sapien
tttatgtgaggcatttatatgaggg

SEQ ID NO: 3195873 - DNA, 25 bp, Homo sapien
ggcactgaatcataagtaggcattt

SEQ ID NO: 3195874 - DNA, 25 bp, Homo sapien
ccatatttaagttggtcagaaagaa

SEQ ID NO: 3195875 - DNA, 25 bp, Homo sapien
ctgatggttatatagtctctcattc

SEQ ID NO: 3195876 - DNA, 25 bp, Homo sapien
cagaggctaagctcaggtggcaaca

SEQ ID NO: 3195877 - DNA, 25 bp, Homo sapien
ccagtacgtcggcattgtgaggtcc

SEQ ID NO: 3195878 - DNA, 25 bp, Homo sapien
aagactgagactccggaccaagcct

SEQ ID NO: 3195879 - DNA, 25 bp, Homo sapien
catagaacataaaaccccagtacgt

SEQ ID NO: 3195880 - DNA, 25 bp, Homo sapien
aaaaagcagattcacataaaacata

SEQ ID NO: 3195881 - DNA, 25 bp, Homo sapien
cacaaatacatcaagcctctataaa

SEQ ID NO: 3195882 - DNA, 25 bp, Homo sapien
cctgtaaaaccaatctagataatga

SEQ ID NO: 3195883 - DNA, 25 bp, Homo sapien
acacctgtaaaaccaatctagataa

SEQ ID NO: 3195884 - DNA, 25 bp, Homo sapien
tctgtgtctttaggcctacatcctg

SEQ ID NO: 3195885 - DNA, 25 bp, Homo sapien
ctggctctgatttacccctgttgtt

SEQ ID NO: 3195886 - DNA, 25 bp, Homo sapien
tctgatttacccctgttgttctgtg

SEQ ID NO: 3195887 - DNA, 25 bp, Homo sapien
cctggagtggcaggccttcatagag

SEQ ID NO: 3195888 - DNA, 25 bp, Homo sapien
cagtgattcccagttttgtaaagcc

SEQ ID NO: 3195889 - DNA, 25 bp, Homo sapien
caccgttgagagaaataaggaggga

SEQ ID NO: 3195890 - DNA, 25 bp, Homo sapien
tctctaaagtagtgcagacctccat

SEQ ID NO: 3195891 - DNA, 25 bp, Homo sapien
cgagcaagtagccagacccttacaa

SEQ ID NO: 3195892 - DNA, 25 bp, Homo sapien
tgcggtagaggatgcgcactcagct

SEQ ID NO: 3195893 - DNA, 25 bp, Homo sapien
cagccgcctgctgcgaatttgtgcg

SEQ ID NO: 3195894 - DNA, 25 bp, Homo sapien
tgccgaggacgcaagactgggtaat

SEQ ID NO: 3195895 - DNA, 25 bp, Homo sapien
catgaagagcttgacgagacagacg

SEQ ID NO: 3195896 - DNA, 25 bp, Homo sapien
agggcgcccctccagtcatggaaat

SEQ ID NO: 3195897 - DNA, 25 bp, Homo sapien
tgcagataaaatcccctgtgcccat

SEQ ID NO: 3195898 - DNA, 25 bp, Homo sapien
ggaaatgcagataaaatcccctgtg

SEQ ID NO: 3195899 - DNA, 25 bp, Homo sapien
tccttgccaccttgcaatctgaacc

SEQ ID NO: 3195900 - DNA, 25 bp, Homo sapien
gaaacttctttcttcgcaaaggaca

SEQ ID NO: 3195901 - DNA, 25 bp, Homo sapien
tcaaagaaacttctttcttcgcaaa

SEQ ID NO: 3195902 - DNA, 25 bp, Homo sapien
caaagaaacttctttcttcgcaaag

SEQ ID NO: 3195903 - DNA, 25 bp, Homo sapien
taaaaaccttactgatggcactaag

SEQ ID NO: 3195904 - DNA, 25 bp, Homo sapien
gaaggattatacaatgtcacctcaa

SEQ ID NO: 3195905 - DNA, 25 bp, Homo sapien
gagcacactaacttctataagcatg

SEQ ID NO: 3195906 - DNA, 25 bp, Homo sapien
ccagttttcatatataggaaggagc

SEQ ID NO: 3195907 - DNA, 25 bp, Homo sapien
tcccacttatgaaggcactaggcag

SEQ ID NO: 3195908 - DNA, 25 bp, Homo sapien
tcagttagcctagagaagtgtttct

SEQ ID NO: 3195909 - DNA, 25 bp, Homo sapien
gccagttcccctgatctttacagta

SEQ ID NO: 3195910 - DNA, 25 bp, Homo sapien
tcagactttagtaacctgggatgct

SEQ ID NO: 3195911 - DNA, 25 bp, Homo sapien
ttgcttttataagaacctcactgca

SEQ ID NO: 3195912 - DNA, 25 bp, Homo sapien
tgcttttataagaacctcactgcat

SEQ ID NO: 3195913 - DNA, 25 bp, Homo sapien
ttttataagaacctcactgcattca

SEQ ID NO: 3195914 - DNA, 25 bp, Homo sapien
gcttttataagaacctcactgcatt

SEQ ID NO: 3195915 - DNA, 25 bp, Homo sapien
tacagtttgttgagactctggccat

SEQ ID NO: 3195916 - DNA, 25 bp, Homo sapien
cactaggtgcctaaagtaatccaaa

SEQ ID NO: 3195917 - DNA, 25 bp, Homo sapien
cactgcttcaaaatacaagaggaga

SEQ ID NO: 3195918 - DNA, 25 bp, Homo sapien
tagacgatttagaaacactaggtgc

SEQ ID NO: 3195919 - DNA, 25 bp, Homo sapien
tcttgccattcattgacatgccatg

SEQ ID NO: 3195920 - DNA, 25 bp, Homo sapien
catgatcttgcaagccttctgtgtc

SEQ ID NO: 3195921 - DNA, 25 bp, Homo sapien
gaagttctcggtccaattcagacat

SEQ ID NO: 3195922 - DNA, 25 bp, Homo sapien
aactgaaactataacaccagagctg

SEQ ID NO: 3195923 - DNA, 25 bp, Homo sapien
tacaaagaggtttcagctcaaagtc

SEQ ID NO: 3195924 - DNA, 25 bp, Homo sapien
tgagtgcaatgatcgactagcgctt

SEQ ID NO: 3195925 - DNA, 25 bp, Homo sapien
tacttcggtatgcaaaaagtagcca

SEQ ID NO: 3195926 - DNA, 25 bp, Homo sapien
aatattcatcctggcatccctagag

SEQ ID NO: 3195927 - DNA, 25 bp, Homo sapien
tagccatgcgtgttgatgcgcgctt

SEQ ID NO: 3195928 - DNA, 25 bp, Homo sapien
gaaatcaggtggatcttaataacaa

SEQ ID NO: 3195929 - DNA, 25 bp, Homo sapien
tcttgatttggccagtttgcccacc

SEQ ID NO: 3195930 - DNA, 25 bp, Homo sapien
ggagtctgacatcatagtgagctat

SEQ ID NO: 3195931 - DNA, 25 bp, Homo sapien
tcccacgttcaggaaaaatgggcaa

SEQ ID NO: 3195932 - DNA, 25 bp, Homo sapien
ttctgcagacatgtacagtcctgga

SEQ ID NO: 3195933 - DNA, 25 bp, Homo sapien
attgtagattcccacgttcaggaaa

SEQ ID NO: 3195934 - DNA, 25 bp, Homo sapien
catttgaccctttccggccaattgt

SEQ ID NO: 3195935 - DNA, 25 bp, Homo sapien
tcacagagctcacaaacttctatgg

SEQ ID NO: 3195936 - DNA, 25 bp, Homo sapien
caatttattacccaaggcttctgaa

SEQ ID NO: 3195937 - DNA, 25 bp, Homo sapien
gattgtggcttagttcatgaacaag

SEQ ID NO: 3195938 - DNA, 25 bp, Homo sapien
tcaagcaagtatgggacaaaaagta

SEQ ID NO: 3195939 - DNA, 25 bp, Homo sapien
tgacttaaaccagaccaatcgatct

SEQ ID NO: 3195940 - DNA, 25 bp, Homo sapien
gggcgggattccattgaagaataaa

SEQ ID NO: 3195941 - DNA, 25 bp, Homo sapien
aatgtatgcatccacgataaatccg

SEQ ID NO: 3195942 - DNA, 25 bp, Homo sapien
ccttgggagataattgagcgactct

SEQ ID NO: 3195943 - DNA, 25 bp, Homo sapien
gtaatctaatggaggcaatacaccc

SEQ ID NO: 3195944 - DNA, 25 bp, Homo sapien
caaataggaaaaaccctgtaccatg

SEQ ID NO: 3195945 - DNA, 25 bp, Homo sapien
tatacagaagtatgcaccacacagt

SEQ ID NO: 3195946 - DNA, 25 bp, Homo sapien
caaacattcgctgaattctgctaga

SEQ ID NO: 3195947 - DNA, 25 bp, Homo sapien
cttgtaattgcttcatggagaagtc

SEQ ID NO: 3195948 - DNA, 25 bp, Homo sapien
tgtaattgcttcatggagaagtctg

SEQ ID NO: 3195949 - DNA, 25 bp, Homo sapien
taattgcttcatggagaagtctggg

SEQ ID NO: 3195950 - DNA, 25 bp, Homo sapien
aattgcttcatggagaagtctgggg

SEQ ID NO: 3195951 - DNA, 25 bp, Homo sapien
tagtatgggaggtcacaaaacagcc

SEQ ID NO: 3195952 - DNA, 25 bp, Homo sapien
gtatgggaggtcacaaaacagccca

SEQ ID NO: 3195953 - DNA, 25 bp, Homo sapien
aatagtatgggaggtcacaaaacag

SEQ ID NO: 3195954 - DNA, 25 bp, Homo sapien
tgggaggtcacaaaacagcccatct

SEQ ID NO: 3195955 - DNA, 25 bp, Homo sapien
tgctgagttttaccctgtacttggt

SEQ ID NO: 3195956 - DNA, 25 bp, Homo sapien
tggattccccatgtagactcagaaa

SEQ ID NO: 3195957 - DNA, 25 bp, Homo sapien
tatgaaatcagacagagcgcaacac

SEQ ID NO: 3195958 - DNA, 25 bp, Homo sapien
gacattttagtcctactgctgagtt

SEQ ID NO: 3195959 - DNA, 25 bp, Homo sapien
gcaaatgcttcggatctgccgtata

SEQ ID NO: 3195960 - DNA, 25 bp, Homo sapien
tctagaggtccacgaaccattgtca

SEQ ID NO: 3195961 - DNA, 25 bp, Homo sapien
aagccatagcagcaatttcataggg

SEQ ID NO: 3195962 - DNA, 25 bp, Homo sapien
gaagttggactaccaaaagccatag

SEQ ID NO: 3195963 - DNA, 25 bp, Homo sapien
gataaatcaaccaaacaacgtgaag

SEQ ID NO: 3195964 - DNA, 25 bp, Homo sapien
caacgtgaagatgaccaacgtgttt

SEQ ID NO: 3195965 - DNA, 25 bp, Homo sapien
caacgtgtttaaactcatactgagc

SEQ ID NO: 3195966 - DNA, 25 bp, Homo sapien
tctctaagctctcaacatcgtttgg

SEQ ID NO: 3195967 - DNA, 25 bp, Homo sapien
agtttggaagcaggctctaggactt

SEQ ID NO: 3195968 - DNA, 25 bp, Homo sapien
cagtttggaagcaggctctaggact

SEQ ID NO: 3195969 - DNA, 25 bp, Homo sapien
gcagtttggaagcaggctctaggac

SEQ ID NO: 3195970 - DNA, 25 bp, Homo sapien
tatagtgactgctcgataagcattg

SEQ ID NO: 3195971 - DNA, 25 bp, Homo sapien
taagcattgctgattaattgcctgg

SEQ ID NO: 3195972 - DNA, 25 bp, Homo sapien
cttgcgttctgaatatagtgactgc

SEQ ID NO: 3195973 - DNA, 25 bp, Homo sapien
tcttcctcttgcgttctgaatatag

SEQ ID NO: 3195974 - DNA, 25 bp, Homo sapien
tccccaagcctgagacattaatgtc

SEQ ID NO: 3195975 - DNA, 25 bp, Homo sapien
aattagaaggcgactataacagccc

SEQ ID NO: 3195976 - DNA, 25 bp, Homo sapien
tagaacatcttaggcatggagggat

SEQ ID NO: 3195977 - DNA, 25 bp, Homo sapien
aaacttatgctagcttctgcggaga

SEQ ID NO: 3195978 - DNA, 25 bp, Homo sapien
gccagtatttgattagaaggttgat

SEQ ID NO: 3195979 - DNA, 25 bp, Homo sapien
gcatttcgaggacagactgtatcca

SEQ ID NO: 3195980 - DNA, 25 bp, Homo sapien
tcgaggacagactgtatccaggaca

SEQ ID NO: 3195981 - DNA, 25 bp, Homo sapien
ctggccagtatttgattagaaggtt

SEQ ID NO: 3195982 - DNA, 25 bp, Homo sapien
tggttcctccgcagacttttatttc

SEQ ID NO: 3195983 - DNA, 25 bp, Homo sapien
caggtggctcgacgaaaatcatatt

SEQ ID NO: 3195984 - DNA, 25 bp, Homo sapien
tgaagccaggattttcagaacgctg

SEQ ID NO: 3195985 - DNA, 25 bp, Homo sapien
gaacgctggctcttaagcataaccc

SEQ ID NO: 3195986 - DNA, 25 bp, Homo sapien
cagggaatgtcagagctaaaaggtc

SEQ ID NO: 3195987 - DNA, 25 bp, Homo sapien
aactatcagggattgtgctataccc

SEQ ID NO: 3195988 - DNA, 25 bp, Homo sapien
tgctatacccgtttccccaagtgag

SEQ ID NO: 3195989 - DNA, 25 bp, Homo sapien
tgaaatgtgctaccatccagcaagg

SEQ ID NO: 3195990 - DNA, 25 bp, Homo sapien
ggagatgactcataccaaagggaat

SEQ ID NO: 3195991 - DNA, 25 bp, Homo sapien
aatagtccggagaaggtctgaaggc

SEQ ID NO: 3195992 - DNA, 25 bp, Homo sapien
ggcacatcagcagactaacaaggct

SEQ ID NO: 3195993 - DNA, 25 bp, Homo sapien
tctaggagtgtggatagactctacc

SEQ ID NO: 3195994 - DNA, 25 bp, Homo sapien
ggatctaggtagaccttgccaagca

SEQ ID NO: 3195995 - DNA, 25 bp, Homo sapien
taccaagtaactggctacctgcatg

SEQ ID NO: 3195996 - DNA, 25 bp, Homo sapien
tcctctgaacgcaaactgggtttcc

SEQ ID NO: 3195997 - DNA, 25 bp, Homo sapien
caagaaggccccaaaagacatagga

SEQ ID NO: 3195998 - DNA, 25 bp, Homo sapien
tacctgcatgtgaccgggaggacta

SEQ ID NO: 3195999 - DNA, 25 bp, Homo sapien
ttgtattgtttactgctgacggtgt

SEQ ID NO: 3196000 - DNA, 25 bp, Homo sapien
gttcaggcttatctgtaagtagttg

SEQ ID NO: 3196001 - DNA, 25 bp, Homo sapien
catgttcaggcttatctgtaagtag

SEQ ID NO: 3196002 - DNA, 25 bp, Homo sapien
gtattgtttactgctgacggtgtca

SEQ ID NO: 3196003 - DNA, 25 bp, Homo sapien
attagtttccgcttttgatattgac

SEQ ID NO: 3196004 - DNA, 25 bp, Homo sapien
ttagtttccgcttttgatattgaca

SEQ ID NO: 3196005 - DNA, 25 bp, Homo sapien
ctttattagtttccgcttttgatat

SEQ ID NO: 3196006 - DNA, 25 bp, Homo sapien
ttattagtttccgcttttgatattg

SEQ ID NO: 3196007 - DNA, 25 bp, Homo sapien
gaagacaagaggttttcatttgttc

SEQ ID NO: 3196008 - DNA, 25 bp, Homo sapien
aaatttaacatgctgaagacaagag

SEQ ID NO: 3196009 - DNA, 25 bp, Homo sapien
tttaacatgctgaagacaagaggtt

SEQ ID NO: 3196010 - DNA, 25 bp, Homo sapien
gacaagaggttttcatttgttcctg

SEQ ID NO: 3196011 - DNA, 25 bp, Homo sapien
aaaagaagacatagtagaatgatat

SEQ ID NO: 3196012 - DNA, 25 bp, Homo sapien
gacatagtagaatgatataatttgt

SEQ ID NO: 3196013 - DNA, 25 bp, Homo sapien
taatttgtaaaaagcaagccaccat

SEQ ID NO: 3196014 - DNA, 25 bp, Homo sapien
tataatttgtaaaaagcaagccacc

SEQ ID NO: 3196015 - DNA, 25 bp, Homo sapien
catttggagagagtctgttatgctt

SEQ ID NO: 3196016 - DNA, 25 bp, Homo sapien
cagaggctttgctctgatttcgaat

SEQ ID NO: 3196017 - DNA, 25 bp, Homo sapien
gagtctgttatgctttccatgagct

SEQ ID NO: 3196018 - DNA, 25 bp, Homo sapien
taggtgagatctgcacaagggttgc

SEQ ID NO: 3196019 - DNA, 25 bp, Homo sapien
tgagggtaccaaaaggtcagagagt

SEQ ID NO: 3196020 - DNA, 25 bp, Homo sapien
ttatgtggtagtgcaatttccgacc

SEQ ID NO: 3196021 - DNA, 25 bp, Homo sapien
tcatgcaggcacgtcagctgaaggg

SEQ ID NO: 3196022 - DNA, 25 bp, Homo sapien
agggcgtgagcttctacttggattc

SEQ ID NO: 3196023 - DNA, 25 bp, Homo sapien
tatctcttataatgagtttgctaga

SEQ ID NO: 3196024 - DNA, 25 bp, Homo sapien
taacttacagataactcaactagtc

SEQ ID NO: 3196025 - DNA, 25 bp, Homo sapien
tattgactaagttttggtctagaca

SEQ ID NO: 3196026 - DNA, 25 bp, Homo sapien
gatcccgtttatctgtaagtacttg

SEQ ID NO: 3196027 - DNA, 25 bp, Homo sapien
tgcacagtcgggaccacttctttgg

SEQ ID NO: 3196028 - DNA, 25 bp, Homo sapien
tctttgtggccggtcgaatctgcag

SEQ ID NO: 3196029 - DNA, 25 bp, Homo sapien
ggacagttgcagctcaaccacaggc

SEQ ID NO: 3196030 - DNA, 25 bp, Homo sapien
tggattatcttgctggacctcagga

SEQ ID NO: 3196031 - DNA, 25 bp, Homo sapien
tccgagcgtggatcttctccctgct

SEQ ID NO: 3196032 - DNA, 25 bp, Homo sapien
tcagagcagtcgaggatcacttcca

SEQ ID NO: 3196033 - DNA, 25 bp, Homo sapien
gatgagacggcaaaggataccagag

SEQ ID NO: 3196034 - DNA, 25 bp, Homo sapien
tgcatgccgcgctcggtgcttgtga

SEQ ID NO: 3196035 - DNA, 25 bp, Homo sapien
aaaaattatattgagctgatgagtt

SEQ ID NO: 3196036 - DNA, 25 bp, Homo sapien
aaaattatattgagctgatgagttc

SEQ ID NO: 3196037 - DNA, 25 bp, Homo sapien
gaagagcttgcttcatggccagggc

SEQ ID NO: 3196038 - DNA, 25 bp, Homo sapien
ttcaaagtacttgcaggccgggcag

SEQ ID NO: 3196039 - DNA, 25 bp, Homo sapien
ttgatggaggagacaacggtgccct

SEQ ID NO: 3196040 - DNA, 25 bp, Homo sapien
tcggacttgaaacccctctggagaa

SEQ ID NO: 3196041 - DNA, 25 bp, Homo sapien
gggatgcactgactggtgaggaggc

SEQ ID NO: 3196042 - DNA, 25 bp, Homo sapien
gatgcactgactggtgaggaggcct

SEQ ID NO: 3196043 - DNA, 25 bp, Homo sapien
gctttggcgaggtgggaatgcccac

SEQ ID NO: 3196044 - DNA, 25 bp, Homo sapien
tgaggctgattcttgctttggcgag

SEQ ID NO: 3196045 - DNA, 25 bp, Homo sapien
actcttccacaacagatggtttcca

SEQ ID NO: 3196046 - DNA, 25 bp, Homo sapien
tcttccacaacagatggtttccaca

SEQ ID NO: 3196047 - DNA, 25 bp, Homo sapien
cttccacaacagatggtttccacac

SEQ ID NO: 3196048 - DNA, 25 bp, Homo sapien
ttactcttccacaacagatggtttc

SEQ ID NO: 3196049 - DNA, 25 bp, Homo sapien
ccttggacccagattaggaggtgac

SEQ ID NO: 3196050 - DNA, 25 bp, Homo sapien
tgtgtaccctcaaaccaggcaagtt

SEQ ID NO: 3196051 - DNA, 25 bp, Homo sapien
tgctaggcattctcagggactcaag

SEQ ID NO: 3196052 - DNA, 25 bp, Homo sapien
tgtagtcagtcagtaaaccttcagg

SEQ ID NO: 3196053 - DNA, 25 bp, Homo sapien
taagattgccacctgtccaacagga

SEQ ID NO: 3196054 - DNA, 25 bp, Homo sapien
gtggcacatatagcccctggtgggc

SEQ ID NO: 3196055 - DNA, 25 bp, Homo sapien
tgatctcaaaccgactacctgtgtg

SEQ ID NO: 3196056 - DNA, 25 bp, Homo sapien
tagtcctaggatgaccagaaggcat

SEQ ID NO: 3196057 - DNA, 25 bp, Homo sapien
aaatgattgtcgctcttgagctggc

SEQ ID NO: 3196058 - DNA, 25 bp, Homo sapien
tcttgagctggcaatgaaaaccgac

SEQ ID NO: 3196059 - DNA, 25 bp, Homo sapien
ctaacataacataggaactcgtaaa

SEQ ID NO: 3196060 - DNA, 25 bp, Homo sapien
gaaaaccgacttcgtggatgctctg

SEQ ID NO: 3196061 - DNA, 25 bp, Homo sapien
tgaaatgatacgcagccaagggcct

SEQ ID NO: 3196062 - DNA, 25 bp, Homo sapien
gagtgttcgacatgcctcttagcag

SEQ ID NO: 3196063 - DNA, 25 bp, Homo sapien
tgactaactcggcaacaccaaagtg

SEQ ID NO: 3196064 - DNA, 25 bp, Homo sapien
gacatgctctagagtgacaacccaa

SEQ ID NO: 3196065 - DNA, 25 bp, Homo sapien
gctggcaaacctttgataaaatcag

SEQ ID NO: 3196066 - DNA, 25 bp, Homo sapien
actttattggctggcaaacctttga

SEQ ID NO: 3196067 - DNA, 25 bp, Homo sapien
ccctgtatacttgggatgcacttta

SEQ ID NO: 3196068 - DNA, 25 bp, Homo sapien
gaccctgtaggagtctagctttctc

SEQ ID NO: 3196069 - DNA, 25 bp, Homo sapien
taaggagcccaagaaataggagatg

SEQ ID NO: 3196070 - DNA, 25 bp, Homo sapien
ctgggaagtaggtccttatgatatc

SEQ ID NO: 3196071 - DNA, 25 bp, Homo sapien
gaacaaaccatcagtagttattaag

SEQ ID NO: 3196072 - DNA, 25 bp, Homo sapien
tcaactcagggccaagtacaatctt

SEQ ID NO: 3196073 - DNA, 25 bp, Homo sapien
ccatgtggtactgtagggagagcac

SEQ ID NO: 3196074 - DNA, 25 bp, Homo sapien
catacctagctcacaaggactgctg

SEQ ID NO: 3196075 - DNA, 25 bp, Homo sapien
aattcacaattaagcagtctcaggg

SEQ ID NO: 3196076 - DNA, 25 bp, Homo sapien
gcatggccttgattattgcaccaaa

SEQ ID NO: 3196077 - DNA, 25 bp, Homo sapien
taaaatcggcaagatgagtgcttca

SEQ ID NO: 3196078 - DNA, 25 bp, Homo sapien
tgcaacgagctttagaatggctgcc

SEQ ID NO: 3196079 - DNA, 25 bp, Homo sapien
tagggcccaacagccaagggaagtc

SEQ ID NO: 3196080 - DNA, 25 bp, Homo sapien
gataaaaatcacgtctcaaggcccc

SEQ ID NO: 3196081 - DNA, 25 bp, Homo sapien
tcagccctcttaactgctatggata

SEQ ID NO: 3196082 - DNA, 25 bp, Homo sapien
gccctcatcaatacacatttgagag

SEQ ID NO: 3196083 - DNA, 25 bp, Homo sapien
gactaaaatggataggccctcatca

SEQ ID NO: 3196084 - DNA, 25 bp, Homo sapien
tagctaaaatactacatcagccctc

SEQ ID NO: 3196085 - DNA, 25 bp, Homo sapien
cgcctggccggcatagctttcttaa

SEQ ID NO: 3196086 - DNA, 25 bp, Homo sapien
tcaccctgccgggtacctgggatta

SEQ ID NO: 3196087 - DNA, 25 bp, Homo sapien
gactgcagcagtacgatatgggctc

SEQ ID NO: 3196088 - DNA, 25 bp, Homo sapien
tgccatgtagaccacacatttatta

SEQ ID NO: 3196089 - DNA, 25 bp, Homo sapien
ttgctggaggagaaacatgggttaa

SEQ ID NO: 3196090 - DNA, 25 bp, Homo sapien
agagaagtatacaatgatggtcacg

SEQ ID NO: 3196091 - DNA, 25 bp, Homo sapien
taatcactgaaaggatgtctcggga

SEQ ID NO: 3196092 - DNA, 25 bp, Homo sapien
gttgtagtctgtcattaatcactga

SEQ ID NO: 3196093 - DNA, 25 bp, Homo sapien
gtgcatcgcatttagatgcacttct

SEQ ID NO: 3196094 - DNA, 25 bp, Homo sapien
ccgggccgtagggaatacagtgcat

SEQ ID NO: 3196095 - DNA, 25 bp, Homo sapien
gctgcatgaagatgagatatccggg

SEQ ID NO: 3196096 - DNA, 25 bp, Homo sapien
tctgctgcatgaagatgagatatcc

SEQ ID NO: 3196097 - DNA, 25 bp, Homo sapien
cacacattccaatatgcatgaggct

SEQ ID NO: 3196098 - DNA, 25 bp, Homo sapien
ccggtgcctggctacagcaatataa

SEQ ID NO: 3196099 - DNA, 25 bp, Homo sapien
gctgatggctggctatccacattac

SEQ ID NO: 3196100 - DNA, 25 bp, Homo sapien
tggcaaaaacgcagaaagggtacac

SEQ ID NO: 3196101 - DNA, 25 bp, Homo sapien
gtgggctgccacttgatcttacctt

SEQ ID NO: 3196102 - DNA, 25 bp, Homo sapien
catctgtgaacgcatagccccagtt

SEQ ID NO: 3196103 - DNA, 25 bp, Homo sapien
taccttttgcacttggccctcctag

SEQ ID NO: 3196104 - DNA, 25 bp, Homo sapien
ctttgcaaaagtgggccaagtgcaa

SEQ ID NO: 3196105 - DNA, 25 bp, Homo sapien
ggtgggactgatcttccaggaagag

SEQ ID NO: 3196106 - DNA, 25 bp, Homo sapien
ggactgatcttccaggaagagaaag

SEQ ID NO: 3196107 - DNA, 25 bp, Homo sapien
tgggactgatcttccaggaagagaa

SEQ ID NO: 3196108 - DNA, 25 bp, Homo sapien
ggggggtgggactgatcttccagga

SEQ ID NO: 3196109 - DNA, 25 bp, Homo sapien
tccgagctgctgaaaccacatttgc

SEQ ID NO: 3196110 - DNA, 25 bp, Homo sapien
cacatttgccacaatggattcctgg

SEQ ID NO: 3196111 - DNA, 25 bp, Homo sapien
cactagaccgagaggagactttgct

SEQ ID NO: 3196112 - DNA, 25 bp, Homo sapien
gcaactgtgaaccatattgggaggt

SEQ ID NO: 3196113 - DNA, 25 bp, Homo sapien
ggcatgcccctatgagaaatttctg

SEQ ID NO: 3196114 - DNA, 25 bp, Homo sapien
tacttgagccctaataggttggccc

SEQ ID NO: 3196115 - DNA, 25 bp, Homo sapien
gactggcatgctctctttttaggga

SEQ ID NO: 3196116 - DNA, 25 bp, Homo sapien
atgaagtagaacgtggccctggcaa

SEQ ID NO: 3196117 - DNA, 25 bp, Homo sapien
acagagcccagagtggttgtaggca

SEQ ID NO: 3196118 - DNA, 25 bp, Homo sapien
cagtttaacacaggtcagtcttgga

SEQ ID NO: 3196119 - DNA, 25 bp, Homo sapien
gacaaacacggaagattagagacag

SEQ ID NO: 3196120 - DNA, 25 bp, Homo sapien
tggaaggactgggtagacaaacacg

SEQ ID NO: 3196121 - DNA, 25 bp, Homo sapien
cctgggttcaagtgatttttgtgcc

SEQ ID NO: 3196122 - DNA, 25 bp, Homo sapien
ccttggttcactgcaatctctacct

SEQ ID NO: 3196123 - DNA, 25 bp, Homo sapien
gtgcctcagcctcctgaatagctgg

SEQ ID NO: 3196124 - DNA, 25 bp, Homo sapien
ggagggcagtggtgcgaccttggtt

SEQ ID NO: 3196125 - DNA, 25 bp, Homo sapien
cccaaatctgatggatctagagtca

SEQ ID NO: 3196126 - DNA, 25 bp, Homo sapien
aggattcgctggtaactcagacttc

SEQ ID NO: 3196127 - DNA, 25 bp, Homo sapien
cattgttccagacaaacattccttg

SEQ ID NO: 3196128 - DNA, 25 bp, Homo sapien
tctgaaccattgttccagacaaaca

SEQ ID NO: 3196129 - DNA, 25 bp, Homo sapien
tctcttgactgactgaggattcgct

SEQ ID NO: 3196130 - DNA, 25 bp, Homo sapien
tctggcactcattgatggcctggag

SEQ ID NO: 3196131 - DNA, 25 bp, Homo sapien
cctggaggaaggtcgggtcatccca

SEQ ID NO: 3196132 - DNA, 25 bp, Homo sapien
tgctcactaagccatcactgtcttc

SEQ ID NO: 3196133 - DNA, 25 bp, Homo sapien
gactgtaactacatctctggcactc

SEQ ID NO: 3196134 - DNA, 25 bp, Homo sapien
gaaaaatctggatcaccctcgacca

SEQ ID NO: 3196135 - DNA, 25 bp, Homo sapien
tcaagtggtcatctgtgggatatgg

SEQ ID NO: 3196136 - DNA, 25 bp, Homo sapien
gaaaagcagatgttgggaagctcaa

SEQ ID NO: 3196137 - DNA, 25 bp, Homo sapien
taaatcgacatttcttggtaatatc

SEQ ID NO: 3196138 - DNA, 25 bp, Homo sapien
tattcaatctttgtcggttctcatt

SEQ ID NO: 3196139 - DNA, 25 bp, Homo sapien
ctttgtcggttctcattgtcctttc

SEQ ID NO: 3196140 - DNA, 25 bp, Homo sapien
ctcttattcaatctttgtcggttct

SEQ ID NO: 3196141 - DNA, 25 bp, Homo sapien
caatctttgtcggttctcattgtcc

SEQ ID NO: 3196142 - DNA, 25 bp, Homo sapien
ggcacggttagttctgactcacaca

SEQ ID NO: 3196143 - DNA, 25 bp, Homo sapien
ttacaaccattacccattcacttgg

SEQ ID NO: 3196144 - DNA, 25 bp, Homo sapien
cacaggtatcactgttgtctggaca

SEQ ID NO: 3196145 - DNA, 25 bp, Homo sapien
tagtatttcaggataggcacggtta

SEQ ID NO: 3196146 - DNA, 25 bp, Homo sapien
gaacttcctggatacaagtgtggtg

SEQ ID NO: 3196147 - DNA, 25 bp, Homo sapien
ggtttgcccttgagtgtgaccacca

SEQ ID NO: 3196148 - DNA, 25 bp, Homo sapien
tctgctccgagatacatcaacttga

SEQ ID NO: 3196149 - DNA, 25 bp, Homo sapien
tactcagccaaaaagagagcaagga

SEQ ID NO: 3196150 - DNA, 25 bp, Homo sapien
tgctaatacctgaaagtatggagcc

SEQ ID NO: 3196151 - DNA, 25 bp, Homo sapien
caaaaacaatgattggctttgctaa

SEQ ID NO: 3196152 - DNA, 25 bp, Homo sapien
aagtatggagcccaacatgctctac

SEQ ID NO: 3196153 - DNA, 25 bp, Homo sapien
gctctacttctgattgttactagca

SEQ ID NO: 3196154 - DNA, 25 bp, Homo sapien
ctagtttgaacaacgtgaagaagca

SEQ ID NO: 3196155 - DNA, 25 bp, Homo sapien
ccctgctagtttgaacaacgtgaag

SEQ ID NO: 3196156 - DNA, 25 bp, Homo sapien
tgctagtttgaacaacgtgaagaag

SEQ ID NO: 3196157 - DNA, 25 bp, Homo sapien
cctgctagtttgaacaacgtgaaga

SEQ ID NO: 3196158 - DNA, 25 bp, Homo sapien
gaactttgccaatgtgggagatttt

SEQ ID NO: 3196159 - DNA, 25 bp, Homo sapien
ttgcaccaaaacctggcctactcag

SEQ ID NO: 3196160 - DNA, 25 bp, Homo sapien
gggagattttgcaccaaaacctggc

SEQ ID NO: 3196161 - DNA, 25 bp, Homo sapien
tgcgcagcatatgcaggaactttgc

SEQ ID NO: 3196162 - DNA, 25 bp, Homo sapien
caaactgtgtcatgagctagaggag

SEQ ID NO: 3196163 - DNA, 25 bp, Homo sapien
agaactctgctcgacaatgtggaca

SEQ ID NO: 3196164 - DNA, 25 bp, Homo sapien
gaaacttctgtctcgtaggtattgc

SEQ ID NO: 3196165 - DNA, 25 bp, Homo sapien
tatttaggtaccaagctaggttgca

SEQ ID NO: 3196166 - DNA, 25 bp, Homo sapien
ttccactaatccattggttttccat

SEQ ID NO: 3196167 - DNA, 25 bp, Homo sapien
catccaaacttccactaatccattg

SEQ ID NO: 3196168 - DNA, 25 bp, Homo sapien
caaacttccactaatccattggttt

SEQ ID NO: 3196169 - DNA, 25 bp, Homo sapien
tccaaacttccactaatccattggt

SEQ ID NO: 3196170 - DNA, 25 bp, Homo sapien
ttccttctaagctcttaaatcgagc

SEQ ID NO: 3196171 - DNA, 25 bp, Homo sapien
gctcttaaatcgagccttaagataa

SEQ ID NO: 3196172 - DNA, 25 bp, Homo sapien
ccttctaagctcttaaatcgagcct

SEQ ID NO: 3196173 - DNA, 25 bp, Homo sapien
taagctcttaaatcgagccttaaga

SEQ ID NO: 3196174 - DNA, 25 bp, Homo sapien
aataatttgttcatatgaaagcccc

SEQ ID NO: 3196175 - DNA, 25 bp, Homo sapien
ccttcactgccaacaatgagaatta

SEQ ID NO: 3196176 - DNA, 25 bp, Homo sapien
taatttgttcatatgaaagccccat

SEQ ID NO: 3196177 - DNA, 25 bp, Homo sapien
caccttcactgccaacaatgagaat

SEQ ID NO: 3196178 - DNA, 25 bp, Homo sapien
tctggtctctgagttattatctgtt

SEQ ID NO: 3196179 - DNA, 25 bp, Homo sapien
tgttagattgtgctttttcagcggg

SEQ ID NO: 3196180 - DNA, 25 bp, Homo sapien
tctggagatggactatggatggcac

SEQ ID NO: 3196181 - DNA, 25 bp, Homo sapien
tttttcagcggggatgaatcccagt

SEQ ID NO: 3196182 - DNA, 25 bp, Homo sapien
ggcacttgggcctgatggtttttat

SEQ ID NO: 3196183 - DNA, 25 bp, Homo sapien
gcttcatcatagtattatgtgatag

SEQ ID NO: 3196184 - DNA, 25 bp, Homo sapien
cttcatcatagtattatgtgatagc

SEQ ID NO: 3196185 - DNA, 25 bp, Homo sapien
tcatcatagtattatgtgatagcat

SEQ ID NO: 3196186 - DNA, 25 bp, Homo sapien
ttcatcatagtattatgtgatagca

SEQ ID NO: 3196187 - DNA, 25 bp, Homo sapien
ataattgtagtacgacaaaagacct

SEQ ID NO: 3196188 - DNA, 25 bp, Homo sapien
tatttgtgctctagattgatactgg

SEQ ID NO: 3196189 - DNA, 25 bp, Homo sapien
ctttgacgcatcttaaatagcctgg

SEQ ID NO: 3196190 - DNA, 25 bp, Homo sapien
tatttgtcagatcttctttgacgca

SEQ ID NO: 3196191 - DNA, 25 bp, Homo sapien
caccacggttactgagatgggataa

SEQ ID NO: 3196192 - DNA, 25 bp, Homo sapien
ttgctgcgaaccaccttccaagtta

SEQ ID NO: 3196193 - DNA, 25 bp, Homo sapien
gggcttgctgcgaaccaccttccaa

SEQ ID NO: 3196194 - DNA, 25 bp, Homo sapien
gtcaagggggcttgctgcgaaccac

SEQ ID NO: 3196195 - DNA, 25 bp, Homo sapien
tccaagttacttccatccactttcc

SEQ ID NO: 3196196 - DNA, 25 bp, Homo sapien
ctgttaaagctcctgtaatcaggca

SEQ ID NO: 3196197 - DNA, 25 bp, Homo sapien
gctccggatcattgctaatggcttg

SEQ ID NO: 3196198 - DNA, 25 bp, Homo sapien
tgttcccagggagattgatagtact

SEQ ID NO: 3196199 - DNA, 25 bp, Homo sapien
tgatagtacttagggacagctgtgg

SEQ ID NO: 3196200 - DNA, 25 bp, Homo sapien
gcctaggcttagaagatatcctata

SEQ ID NO: 3196201 - DNA, 25 bp, Homo sapien
gttatctgtaccatgatgaaaaaat

SEQ ID NO: 3196202 - DNA, 25 bp, Homo sapien
ttggtattgcatgccaacagtgtca

SEQ ID NO: 3196203 - DNA, 25 bp, Homo sapien
tgctttctaccagggaattcagtta

SEQ ID NO: 3196204 - DNA, 25 bp, Homo sapien
gctttacaggtagagtcaacaggat

SEQ ID NO: 3196205 - DNA, 25 bp, Homo sapien
taatgcattgtaccataggacctgg

SEQ ID NO: 3196206 - DNA, 25 bp, Homo sapien
cagtggagaggtcaatcatgcaggt

SEQ ID NO: 3196207 - DNA, 25 bp, Homo sapien
cagaagtaagctttccactccgaag

SEQ ID NO: 3196208 - DNA, 25 bp, Homo sapien
caaaacctccaaatggtgtggcaac

SEQ ID NO: 3196209 - DNA, 25 bp, Homo sapien
gattgacaaaggacataaacctggg

SEQ ID NO: 3196210 - DNA, 25 bp, Homo sapien
tattaaaggaccgtctgccagaaag

SEQ ID NO: 3196211 - DNA, 25 bp, Homo sapien
catctgtaggttcggttgttatcac

SEQ ID NO: 3196212 - DNA, 25 bp, Homo sapien
tttgatctgagattgaaattgaatg

SEQ ID NO: 3196213 - DNA, 25 bp, Homo sapien
atcactaaattgctattgttgctac

SEQ ID NO: 3196214 - DNA, 25 bp, Homo sapien
aaatgcaagtggctttgccagtagt

SEQ ID NO: 3196215 - DNA, 25 bp, Homo sapien
tattagtatttgatctgagattgaa

SEQ ID NO: 3196216 - DNA, 25 bp, Homo sapien
cagaaaggacacacccaaccatttt

SEQ ID NO: 3196217 - DNA, 25 bp, Homo sapien
catgtactccccagttacttgagga

SEQ ID NO: 3196218 - DNA, 25 bp, Homo sapien
aaaaaatggcatgatgggagcctca

SEQ ID NO: 3196219 - DNA, 25 bp, Homo sapien
taaaactatggtactatgacgtccc

SEQ ID NO: 3196220 - DNA, 25 bp, Homo sapien
cggcagggcctttcatgatcacact

SEQ ID NO: 3196221 - DNA, 25 bp, Homo sapien
gatcacactgttaaactcatcgcca

SEQ ID NO: 3196222 - DNA, 25 bp, Homo sapien
catgatcacactgttaaactcatcg

SEQ ID NO: 3196223 - DNA, 25 bp, Homo sapien
tgttaaactcatcgccattcttcct

SEQ ID NO: 3196224 - DNA, 25 bp, Homo sapien
tcctttagatttccgtgagtcgtta

SEQ ID NO: 3196225 - DNA, 25 bp, Homo sapien
gagtcgttagacgatctatttgcag

SEQ ID NO: 3196226 - DNA, 25 bp, Homo sapien
cccatgcggacacgcagtttccttt

SEQ ID NO: 3196227 - DNA, 25 bp, Homo sapien
aatccgtagtttggcatcagaaccc

SEQ ID NO: 3196228 - DNA, 25 bp, Homo sapien
cacctgcgatcaacaggtccctgga

SEQ ID NO: 3196229 - DNA, 25 bp, Homo sapien
gcggagcatgcgcatacgccccaat

SEQ ID NO: 3196230 - DNA, 25 bp, Homo sapien
ccagtgacacctgcgatcaacaggt

SEQ ID NO: 3196231 - DNA, 25 bp, Homo sapien
atacgccccaatacccagggaccag

SEQ ID NO: 3196232 - DNA, 25 bp, Homo sapien
acagtaccgaggctcaccgggaact

SEQ ID NO: 3196233 - DNA, 25 bp, Homo sapien
ccgacacccgccagacacactgact

SEQ ID NO: 3196234 - DNA, 25 bp, Homo sapien
taccgaggctcaccgggaactggag

SEQ ID NO: 3196235 - DNA, 25 bp, Homo sapien
ctgactgctgccacagtaccgaggc

SEQ ID NO: 3196236 - DNA, 25 bp, Homo sapien
cacagagctacctcccgctggccca

SEQ ID NO: 3196237 - DNA, 25 bp, Homo sapien
ccaggtagagaaatacaggccttcc

SEQ ID NO: 3196238 - DNA, 25 bp, Homo sapien
gagctctaccctccttgcgcgagga

SEQ ID NO: 3196239 - DNA, 25 bp, Homo sapien
tagagaaatacaggccttccactcc

SEQ ID NO: 3196240 - DNA, 25 bp, Homo sapien
tagaatgagagtgtcccggtcaggc

SEQ ID NO: 3196241 - DNA, 25 bp, Homo sapien
tgaaccgcccagcaaagagagtgtg

SEQ ID NO: 3196242 - DNA, 25 bp, Homo sapien
ggctgcgtgacctctggcgtctgaa

SEQ ID NO: 3196243 - DNA, 25 bp, Homo sapien
ggtattactcacaatcccagcagga

SEQ ID NO: 3196244 - DNA, 25 bp, Homo sapien
cagattgcaggttttagaaaccctc

SEQ ID NO: 3196245 - DNA, 25 bp, Homo sapien
catcctcagattgcaggttttagaa

SEQ ID NO: 3196246 - DNA, 25 bp, Homo sapien
cctattacacctgtgcaagtacttc

SEQ ID NO: 3196247 - DNA, 25 bp, Homo sapien
agaaaccctccctattacacctgtg

SEQ ID NO: 3196248 - DNA, 25 bp, Homo sapien
tttggaattcttatgacaacagcag

SEQ ID NO: 3196249 - DNA, 25 bp, Homo sapien
taacaggacgaagggtctttgctta

SEQ ID NO: 3196250 - DNA, 25 bp, Homo sapien
caacagcaggtaaatcatatattac

SEQ ID NO: 3196251 - DNA, 25 bp, Homo sapien
tattacttttgcagagtaagttttg

SEQ ID NO: 3196252 - DNA, 25 bp, Homo sapien
tccaaatccacttagaatgtaaagc

SEQ ID NO: 3196253 - DNA, 25 bp, Homo sapien
aatatattatagaattgactgctta

SEQ ID NO: 3196254 - DNA, 25 bp, Homo sapien
ttcattcctccttggcacttttctc

SEQ ID NO: 3196255 - DNA, 25 bp, Homo sapien
cttctccaaatccacttagaatgta

SEQ ID NO: 3196256 - DNA, 25 bp, Homo sapien
aattctagtcttggccatcatcaca

SEQ ID NO: 3196257 - DNA, 25 bp, Homo sapien
caaggaaagattctattcagagccc

SEQ ID NO: 3196258 - DNA, 25 bp, Homo sapien
cattgtcactctagaaatggaggaa

SEQ ID NO: 3196259 - DNA, 25 bp, Homo sapien
tttatttgccttgacaaagccccag

SEQ ID NO: 3196260 - DNA, 25 bp, Homo sapien
ccataggcaaccaataccaatgtct

SEQ ID NO: 3196261 - DNA, 25 bp, Homo sapien
ttttaaaccatatagaagagcatac

SEQ ID NO: 3196262 - DNA, 25 bp, Homo sapien
accaatgtcttatgcgtcccttcag

SEQ ID NO: 3196263 - DNA, 25 bp, Homo sapien
tttgtgcagttataaacatatatcc

SEQ ID NO: 3196264 - DNA, 25 bp, Homo sapien
cttgtagtatatagagtagagccca

SEQ ID NO: 3196265 - DNA, 25 bp, Homo sapien
gcagtgctccctgtacctatctgta

SEQ ID NO: 3196266 - DNA, 25 bp, Homo sapien
gcaactgcattaccctacaacactg

SEQ ID NO: 3196267 - DNA, 25 bp, Homo sapien
actggcagaatcacttcaaaggatc

SEQ ID NO: 3196268 - DNA, 25 bp, Homo sapien
taagtgtcttaagtccgccaatgga

SEQ ID NO: 3196269 - DNA, 25 bp, Homo sapien
atcccatgtactcactcatatgtgg

SEQ ID NO: 3196270 - DNA, 25 bp, Homo sapien
cagtgactaaacagtaatgtattgt

SEQ ID NO: 3196271 - DNA, 25 bp, Homo sapien
tacaagggtagtattagaatgttac

SEQ ID NO: 3196272 - DNA, 25 bp, Homo sapien
gacaattcattattaacactgtgta

SEQ ID NO: 3196273 - DNA, 25 bp, Homo sapien
gatagttgtgatattcttttggcta

SEQ ID NO: 3196274 - DNA, 25 bp, Homo sapien
cagtaatttgcattctgacaattca

SEQ ID NO: 3196275 - DNA, 25 bp, Homo sapien
taaacctcatacatgctaagaaaca

SEQ ID NO: 3196276 - DNA, 25 bp, Homo sapien
tttcaagtgttaaatcaaccttgta

SEQ ID NO: 3196277 - DNA, 25 bp, Homo sapien
gatgattatatgattctgagtctta

SEQ ID NO: 3196278 - DNA, 25 bp, Homo sapien
tgagtcttaatgcagtatattacaa

SEQ ID NO: 3196279 - DNA, 25 bp, Homo sapien
ccttgtattcctgtcgatgatgcca

SEQ ID NO: 3196280 - DNA, 25 bp, Homo sapien
tgccagggttccaccccagttctga

SEQ ID NO: 3196281 - DNA, 25 bp, Homo sapien
gggtttagaaccattactgcagtgc

SEQ ID NO: 3196282 - DNA, 25 bp, Homo sapien
atatgctatcaaacagtgtcacatg

SEQ ID NO: 3196283 - DNA, 25 bp, Homo sapien
gggaattgcttcttacggctgagca

SEQ ID NO: 3196284 - DNA, 25 bp, Homo sapien
tcttattaggacataatgcagttgt

SEQ ID NO: 3196285 - DNA, 25 bp, Homo sapien
tctagggccttaaaaatcatgataa

SEQ ID NO: 3196286 - DNA, 25 bp, Homo sapien
tcatgataaatctagactgactgta

SEQ ID NO: 3196287 - DNA, 25 bp, Homo sapien
tattttaagctcacagttgaagacc

SEQ ID NO: 3196288 - DNA, 25 bp, Homo sapien
gagggggcggccacctttctggcca

SEQ ID NO: 3196289 - DNA, 25 bp, Homo sapien
ttccccacgaacatgcattgcgtga

SEQ ID NO: 3196290 - DNA, 25 bp, Homo sapien
gggggcggccacctttctggccaca

SEQ ID NO: 3196291 - DNA, 25 bp, Homo sapien
cgaacatgcattgcgtgacgggcga

SEQ ID NO: 3196292 - DNA, 25 bp, Homo sapien
gcgagggagccgctctgctacatac

SEQ ID NO: 3196293 - DNA, 25 bp, Homo sapien
gagccgctctgctacatacaaaacc

SEQ ID NO: 3196294 - DNA, 25 bp, Homo sapien
gggagccgctctgctacatacaaaa

SEQ ID NO: 3196295 - DNA, 25 bp, Homo sapien
agggagccgctctgctacatacaaa

SEQ ID NO: 3196296 - DNA, 25 bp, Homo sapien
tttccatggtatcaacaaacgcaca

SEQ ID NO: 3196297 - DNA, 25 bp, Homo sapien
taagctcaatgttcaaaagatggtt

SEQ ID NO: 3196298 - DNA, 25 bp, Homo sapien
agctggtatgctgtatctgtcaaca

SEQ ID NO: 3196299 - DNA, 25 bp, Homo sapien
caaacgcacactcctgattaaaagg

SEQ ID NO: 3196300 - DNA, 25 bp, Homo sapien
tcatatcaatgtgacctcaaagcaa

SEQ ID NO: 3196301 - DNA, 25 bp, Homo sapien
ctctgacaagtaacaatagggtgca

SEQ ID NO: 3196302 - DNA, 25 bp, Homo sapien
gaatcatcccctttaatgcataagc

SEQ ID NO: 3196303 - DNA, 25 bp, Homo sapien
tagggtgcataaacattgaagttct

SEQ ID NO: 3196304 - DNA, 25 bp, Homo sapien
attgccaccaggtttccgtaagaat

SEQ ID NO: 3196305 - DNA, 25 bp, Homo sapien
gtacagcgctattaagaaagcagct

SEQ ID NO: 3196306 - DNA, 25 bp, Homo sapien
tagtgatagcatacttccaggctga

SEQ ID NO: 3196307 - DNA, 25 bp, Homo sapien
cctggttcatttaacaagcctttgg

SEQ ID NO: 3196308 - DNA, 25 bp, Homo sapien
tttgctcccatttaaagttatatta

SEQ ID NO: 3196309 - DNA, 25 bp, Homo sapien
gtcattctagtctatagtaacttta

SEQ ID NO: 3196310 - DNA, 25 bp, Homo sapien
aaaaagtcattctagtctatagtaa

SEQ ID NO: 3196311 - DNA, 25 bp, Homo sapien
gaagcattaaacaaaggattttctg

SEQ ID NO: 3196312 - DNA, 25 bp, Homo sapien
caacaaggattgaggcaaaatggat

SEQ ID NO: 3196313 - DNA, 25 bp, Homo sapien
cagtggagcccaaatgatgattccg

SEQ ID NO: 3196314 - DNA, 25 bp, Homo sapien
gattccgcagaggtaatttaaacac

SEQ ID NO: 3196315 - DNA, 25 bp, Homo sapien
tatctacagggatccatatactgga

SEQ ID NO: 3196316 - DNA, 25 bp, Homo sapien
caagcttcgtcggaatatatccaat

SEQ ID NO: 3196317 - DNA, 25 bp, Homo sapien
agtcaaaacccgcaagcttcgtcgg

SEQ ID NO: 3196318 - DNA, 25 bp, Homo sapien
tctccctgacaaacatgtccagtca

SEQ ID NO: 3196319 - DNA, 25 bp, Homo sapien
aacatgtccagtcaaaacccgcaag

SEQ ID NO: 3196320 - DNA, 25 bp, Homo sapien
gaaatcgctgctcatctttgaaact

SEQ ID NO: 3196321 - DNA, 25 bp, Homo sapien
agagcatgccttatgttatctgagg

SEQ ID NO: 3196322 - DNA, 25 bp, Homo sapien
gggaagtgctttttctcgactgtgt

SEQ ID NO: 3196323 - DNA, 25 bp, Homo sapien
cagcatcatccataaggccaagttg

SEQ ID NO: 3196324 - DNA, 25 bp, Homo sapien
ggtatcaatagaatgtatctcaaca

SEQ ID NO: 3196325 - DNA, 25 bp, Homo sapien
aaactaggtatcaatagaatgtatc

SEQ ID NO: 3196326 - DNA, 25 bp, Homo sapien
atctcaacataataagagagattta

SEQ ID NO: 3196327 - DNA, 25 bp, Homo sapien
caacataataagagagatttatgac

SEQ ID NO: 3196328 - DNA, 25 bp, Homo sapien
ggcactatgtgaaaatgaatcctct

SEQ ID NO: 3196329 - DNA, 25 bp, Homo sapien
gatttagaggtacacatgtctgcat

SEQ ID NO: 3196330 - DNA, 25 bp, Homo sapien
cagagtcatagcaaacttctggtga

SEQ ID NO: 3196331 - DNA, 25 bp, Homo sapien
tgagtgatacaagatttagaggtac

SEQ ID NO: 3196332 - DNA, 25 bp, Homo sapien
tctgtaaaaggtagaggatctgacg

SEQ ID NO: 3196333 - DNA, 25 bp, Homo sapien
tgacgatgctccacagctacgacac

SEQ ID NO: 3196334 - DNA, 25 bp, Homo sapien
gctgttgtagaaatgtaccgcacaa

SEQ ID NO: 3196335 - DNA, 25 bp, Homo sapien
atgtaccgcacaaattctgtaaaag

SEQ ID NO: 3196336 - DNA, 25 bp, Homo sapien
gcatacttggtagcctcagacagag

SEQ ID NO: 3196337 - DNA, 25 bp, Homo sapien
aagggacatagtggagctgactgaa

SEQ ID NO: 3196338 - DNA, 25 bp, Homo sapien
gataacttttagatccttaacgagc

SEQ ID NO: 3196339 - DNA, 25 bp, Homo sapien
gcttttatcaccagaaagggacata

SEQ ID NO: 3196340 - DNA, 25 bp, Homo sapien
gcttgtagcaattctgcaaacattt

SEQ ID NO: 3196341 - DNA, 25 bp, Homo sapien
aacatttcaggtttaaagcgttcat

SEQ ID NO: 3196342 - DNA, 25 bp, Homo sapien
ggtttaaagcgttcatgcctttcca

SEQ ID NO: 3196343 - DNA, 25 bp, Homo sapien
tatttgctgcttgtagcaattctgc

SEQ ID NO: 3196344 - DNA, 25 bp, Homo sapien
gagtcccagactaaaccaattgtaa

SEQ ID NO: 3196345 - DNA, 25 bp, Homo sapien
tcaagtcagaatgctcggagtccca

SEQ ID NO: 3196346 - DNA, 25 bp, Homo sapien
tgtaacaatctctgggcaattcatt

SEQ ID NO: 3196347 - DNA, 25 bp, Homo sapien
gaacaacagcttcggtcaagtcaga

SEQ ID NO: 3196348 - DNA, 25 bp, Homo sapien
tagcctgatttgattaaacttgtcg

SEQ ID NO: 3196349 - DNA, 25 bp, Homo sapien
tctatgtagtaaaggcattccagtt

SEQ ID NO: 3196350 - DNA, 25 bp, Homo sapien
ttgtaattgaaagccattcctagtc

SEQ ID NO: 3196351 - DNA, 25 bp, Homo sapien
agagagatcagtgctttagatgaat

SEQ ID NO: 3196352 - DNA, 25 bp, Homo sapien
tatccaaaactttaattgtaacatg

SEQ ID NO: 3196353 - DNA, 25 bp, Homo sapien
aaagtaacaagcataacaagagatc

SEQ ID NO: 3196354 - DNA, 25 bp, Homo sapien
aagtaacaagcataacaagagatca

SEQ ID NO: 3196355 - DNA, 25 bp, Homo sapien
agtaacaagcataacaagagatcat

SEQ ID NO: 3196356 - DNA, 25 bp, Homo sapien
ttgcatcatcaaaaaatacccattt

SEQ ID NO: 3196357 - DNA, 25 bp, Homo sapien
ggtgtagcagatcataccaacaagg

SEQ ID NO: 3196358 - DNA, 25 bp, Homo sapien
tttggtgtgaaatgcaaaggcacaa

SEQ ID NO: 3196359 - DNA, 25 bp, Homo sapien
tacccatttggaacttttggtgtga

SEQ ID NO: 3196360 - DNA, 25 bp, Homo sapien
tatacaaaactactgtgaatcatcc

SEQ ID NO: 3196361 - DNA, 25 bp, Homo sapien
tggactggtttaaaagctggcttca

SEQ ID NO: 3196362 - DNA, 25 bp, Homo sapien
taaatatagcaagtatgcgtcaggc

SEQ ID NO: 3196363 - DNA, 25 bp, Homo sapien
cctgtcaatagtaggctgttggcag

SEQ ID NO: 3196364 - DNA, 25 bp, Homo sapien
gccaaagccagtaagccttgacaag

SEQ ID NO: 3196365 - DNA, 25 bp, Homo sapien
cactactaggctttgtttgggctcc

SEQ ID NO: 3196366 - DNA, 25 bp, Homo sapien
cagaaactacctctaggcagtaagc

SEQ ID NO: 3196367 - DNA, 25 bp, Homo sapien
gaactccagtttcagtctccagaac

SEQ ID NO: 3196368 - DNA, 25 bp, Homo sapien
catttatcaaaactccaactgtaca

SEQ ID NO: 3196369 - DNA, 25 bp, Homo sapien
agaagcctgacagaatttttctagc

SEQ ID NO: 3196370 - DNA, 25 bp, Homo sapien
tctgtgtactgattatggtagttac

SEQ ID NO: 3196371 - DNA, 25 bp, Homo sapien
tgtgcactatacctctataaaattg

SEQ ID NO: 3196372 - DNA, 25 bp, Homo sapien
cagaaatcccacttcaaggtattat

SEQ ID NO: 3196373 - DNA, 25 bp, Homo sapien
gctaataaaggactggtatgcagaa

SEQ ID NO: 3196374 - DNA, 25 bp, Homo sapien
taatccaatgcgaaatactggcaaa

SEQ ID NO: 3196375 - DNA, 25 bp, Homo sapien
gatatgcagctgctagtagttcaag

SEQ ID NO: 3196376 - DNA, 25 bp, Homo sapien
ggaagggcagatttcttagcatacc

SEQ ID NO: 3196377 - DNA, 25 bp, Homo sapien
aagtggcatcgaatgcatttggaga

SEQ ID NO: 3196378 - DNA, 25 bp, Homo sapien
ctgaaagtggcatcgaatgcatttg

SEQ ID NO: 3196379 - DNA, 25 bp, Homo sapien
gaaagtggcatcgaatgcatttgga

SEQ ID NO: 3196380 - DNA, 25 bp, Homo sapien
tgaaagtggcatcgaatgcatttgg

SEQ ID NO: 3196381 - DNA, 25 bp, Homo sapien
tgtgccatctgggtttgcataaaac

SEQ ID NO: 3196382 - DNA, 25 bp, Homo sapien
tgcaacagatttgtaatgtgaccag

SEQ ID NO: 3196383 - DNA, 25 bp, Homo sapien
gagtgcatcctcagtagaaactgct

SEQ ID NO: 3196384 - DNA, 25 bp, Homo sapien
tgtgaccagctgatgacctgcctga

SEQ ID NO: 3196385 - DNA, 25 bp, Homo sapien
gaagcctcttctgtgattgtgtgac

SEQ ID NO: 3196386 - DNA, 25 bp, Homo sapien
tctagaaagagctactaatgaagcc

SEQ ID NO: 3196387 - DNA, 25 bp, Homo sapien
tctgaggccaccgatgagaaaaggt

SEQ ID NO: 3196388 - DNA, 25 bp, Homo sapien
caaaaatgacctagctgtttcggac

SEQ ID NO: 3196389 - DNA, 25 bp, Homo sapien
tctgctttgcctgatcaccaaatcc

SEQ ID NO: 3196390 - DNA, 25 bp, Homo sapien
gtgtgactgtggctccgattagatg

SEQ ID NO: 3196391 - DNA, 25 bp, Homo sapien
gacttatgaattacaggcttttcac

SEQ ID NO: 3196392 - DNA, 25 bp, Homo sapien
ggctccgattagatgatgaaatatt

SEQ ID NO: 3196393 - DNA, 25 bp, Homo sapien
tccctttgatcaatgtgacttaact

SEQ ID NO: 3196394 - DNA, 25 bp, Homo sapien
taagtttttctgttcaatagctttc

SEQ ID NO: 3196395 - DNA, 25 bp, Homo sapien
gagcacattctctggaaatgtcttt

SEQ ID NO: 3196396 - DNA, 25 bp, Homo sapien
ctctatgtcgtcctaaatcttttct

SEQ ID NO: 3196397 - DNA, 25 bp, Homo sapien
tatttgtgcagaagctcgactctga

SEQ ID NO: 3196398 - DNA, 25 bp, Homo sapien
catttccatcgataacaggtgagtc

SEQ ID NO: 3196399 - DNA, 25 bp, Homo sapien
gactctgaggtacaactcggtcatg

SEQ ID NO: 3196400 - DNA, 25 bp, Homo sapien
ttctctcctggagcaagaatctggg

SEQ ID NO: 3196401 - DNA, 25 bp, Homo sapien
taacaaatgtggtcaaatatcagct

SEQ ID NO: 3196402 - DNA, 25 bp, Homo sapien
ttgaagaattaaacaacagcctggg

SEQ ID NO: 3196403 - DNA, 25 bp, Homo sapien
caccttaatgacttagatgatacca

SEQ ID NO: 3196404 - DNA, 25 bp, Homo sapien
gatgataccaattgaagtctgtgct

SEQ ID NO: 3196405 - DNA, 25 bp, Homo sapien
tatttaggttgcttgtcgtaatctg

SEQ ID NO: 3196406 - DNA, 25 bp, Homo sapien
tctttatttaggttgcttgtcgtaa

SEQ ID NO: 3196407 - DNA, 25 bp, Homo sapien
tttaggttgcttgtcgtaatctggt

SEQ ID NO: 3196408 - DNA, 25 bp, Homo sapien
taggttgcttgtcgtaatctggtca

SEQ ID NO: 3196409 - DNA, 25 bp, Homo sapien
tatcttaaatgaacaaacttggtag

SEQ ID NO: 3196410 - DNA, 25 bp, Homo sapien
gagaagagattatgtgttaccagtt

SEQ ID NO: 3196411 - DNA, 25 bp, Homo sapien
tcggctgacaaaagtacttctctaa

SEQ ID NO: 3196412 - DNA, 25 bp, Homo sapien
caacattaaggacagtatatttcac

SEQ ID NO: 3196413 - DNA, 25 bp, Homo sapien
gtgcccggctgcaaaccagtatttt

SEQ ID NO: 3196414 - DNA, 25 bp, Homo sapien
caatccagggttcactccaaagcta

SEQ ID NO: 3196415 - DNA, 25 bp, Homo sapien
catgctgatgcccatagaagatagc

SEQ ID NO: 3196416 - DNA, 25 bp, Homo sapien
ccttctgatgaaactaggccactag

SEQ ID NO: 3196417 - DNA, 25 bp, Homo sapien
gagaattcactggagagcctttaac

SEQ ID NO: 3196418 - DNA, 25 bp, Homo sapien
tccaagcctgctacatgagatttca

SEQ ID NO: 3196419 - DNA, 25 bp, Homo sapien
gaacctaaaggtcaatatggcacca

SEQ ID NO: 3196420 - DNA, 25 bp, Homo sapien
tccctctgaacaacgattctaggag

SEQ ID NO: 3196421 - DNA, 25 bp, Homo sapien
tttatagcctgcttccaaattcctg

SEQ ID NO: 3196422 - DNA, 25 bp, Homo sapien
gtaaatgtgattctgggtggaattc

SEQ ID NO: 3196423 - DNA, 25 bp, Homo sapien
ctgggtggaattcatgagatttata

SEQ ID NO: 3196424 - DNA, 25 bp, Homo sapien
tcatgagatttatagcctgcttcca

SEQ ID NO: 3196425 - DNA, 25 bp, Homo sapien
tatcacctacctcataagaatgctg

SEQ ID NO: 3196426 - DNA, 25 bp, Homo sapien
tgcccttctgataaacaacgtgcct

SEQ ID NO: 3196427 - DNA, 25 bp, Homo sapien
gaaaggcatctcaatactatagacc

SEQ ID NO: 3196428 - DNA, 25 bp, Homo sapien
tctcagctcgatagttttggtcaca

SEQ ID NO: 3196429 - DNA, 25 bp, Homo sapien
tcatctgactggtggatatgttctc

SEQ ID NO: 3196430 - DNA, 25 bp, Homo sapien
tattttgttgctggatgagaggagc

SEQ ID NO: 3196431 - DNA, 25 bp, Homo sapien
caacagttcttaggtgtgaagacca

SEQ ID NO: 3196432 - DNA, 25 bp, Homo sapien
tcccagaagcagagttatcaacgtg

SEQ ID NO: 3196433 - DNA, 25 bp, Homo sapien
tgtacttaaactgtgcttcggaaga

SEQ ID NO: 3196434 - DNA, 25 bp, Homo sapien
cattctgtggatagagagttctcaa

SEQ ID NO: 3196435 - DNA, 25 bp, Homo sapien
gattcgcttttctctgactgtggca

SEQ ID NO: 3196436 - DNA, 25 bp, Homo sapien
gactgtggcacactggttatagcat

SEQ ID NO: 3196437 - DNA, 25 bp, Homo sapien
tgaaaatcgttagttgaggagctgg

SEQ ID NO: 3196438 - DNA, 25 bp, Homo sapien
tatatgtatccgtcatgcagctatc

SEQ ID NO: 3196439 - DNA, 25 bp, Homo sapien
ctagttctggttggcaaaatgcatc

SEQ ID NO: 3196440 - DNA, 25 bp, Homo sapien
ctctggaaaagagagcttgggcctc

SEQ ID NO: 3196441 - DNA, 25 bp, Homo sapien
tcagaagggcagcttgaaccaagat

SEQ ID NO: 3196442 - DNA, 25 bp, Homo sapien
tcactaggtttggtcagtaggttcc

SEQ ID NO: 3196443 - DNA, 25 bp, Homo sapien
gcacgccaagactattcaaagggaa

SEQ ID NO: 3196444 - DNA, 25 bp, Homo sapien
taacactggtggttagcagcccaaa

SEQ ID NO: 3196445 - DNA, 25 bp, Homo sapien
tcagtgaaattccaagtacccgcga

SEQ ID NO: 3196446 - DNA, 25 bp, Homo sapien
tacatttggagacttcagcctgtga

SEQ ID NO: 3196447 - DNA, 25 bp, Homo sapien
caactggacagtacttaaaagaggc

SEQ ID NO: 3196448 - DNA, 25 bp, Homo sapien
gcaaatactcagtccgtaagtggca

SEQ ID NO: 3196449 - DNA, 25 bp, Homo sapien
tcaaaatcgttcttagggttagtca

SEQ ID NO: 3196450 - DNA, 25 bp, Homo sapien
ccctaaaggctttacatgaggaatg

SEQ ID NO: 3196451 - DNA, 25 bp, Homo sapien
tgagtttaccaaatcaactgtgtga

SEQ ID NO: 3196452 - DNA, 25 bp, Homo sapien
gggcataagatctggtaaactctct

SEQ ID NO: 3196453 - DNA, 25 bp, Homo sapien
ggatttcacccattcctagctaagt

SEQ ID NO: 3196454 - DNA, 25 bp, Homo sapien
gattgcgtagaagctgctaggttcc

SEQ ID NO: 3196455 - DNA, 25 bp, Homo sapien
tgggcgacaggttgatacagtctta

SEQ ID NO: 3196456 - DNA, 25 bp, Homo sapien
tattggaaagctagcatgcatgccc

SEQ ID NO: 3196457 - DNA, 25 bp, Homo sapien
tacaggtgttaatatagtgaaaagg

SEQ ID NO: 3196458 - DNA, 25 bp, Homo sapien
acaggtgttaatatagtgaaaagga

SEQ ID NO: 3196459 - DNA, 25 bp, Homo sapien
ctgggcagtgtttttcggtattatc

SEQ ID NO: 3196460 - DNA, 25 bp, Homo sapien
ggcagtgtttttcggtattatcatc

SEQ ID NO: 3196461 - DNA, 25 bp, Homo sapien
actgtcactgggcagtgtttttcgg

SEQ ID NO: 3196462 - DNA, 25 bp, Homo sapien
tttcggtattatcatcttttgaatc

SEQ ID NO: 3196463 - DNA, 25 bp, Homo sapien
ttcttaattcgttcatgactttgaa

SEQ ID NO: 3196464 - DNA, 25 bp, Homo sapien
cttcttaattcgttcatgactttga

SEQ ID NO: 3196465 - DNA, 25 bp, Homo sapien
tgtccatactgcttgcaaacttgtt

SEQ ID NO: 3196466 - DNA, 25 bp, Homo sapien
acctgtccatactgcttgcaaactt

SEQ ID NO: 3196467 - DNA, 25 bp, Homo sapien
tccatactgcttgcaaacttgttcc

SEQ ID NO: 3196468 - DNA, 25 bp, Homo sapien
catactgcttgcaaacttgttccca

SEQ ID NO: 3196469 - DNA, 25 bp, Homo sapien
atgaaaataaggactacaggcggcc

SEQ ID NO: 3196470 - DNA, 25 bp, Homo sapien
ctgccacaattgtgacatcgcacag

SEQ ID NO: 3196471 - DNA, 25 bp, Homo sapien
ggcatgaaaataaggactacaggcg

SEQ ID NO: 3196472 - DNA, 25 bp, Homo sapien
acatggcatgaaaataaggactaca

SEQ ID NO: 3196473 - DNA, 25 bp, Homo sapien
gtagccttatctgttggtggcccaa

SEQ ID NO: 3196474 - DNA, 25 bp, Homo sapien
taagctcactgagaacagggatgaa

SEQ ID NO: 3196475 - DNA, 25 bp, Homo sapien
cttaccctgatgctcttgttgaaca

SEQ ID NO: 3196476 - DNA, 25 bp, Homo sapien
gggtacctcatgcagatccactctg

SEQ ID NO: 3196477 - DNA, 25 bp, Homo sapien
ccagtactcagttaagcgtgactta

SEQ ID NO: 3196478 - DNA, 25 bp, Homo sapien
gccccaataatatgcaaagcccttc

SEQ ID NO: 3196479 - DNA, 25 bp, Homo sapien
gagcacaaagccaaacagccagtac

SEQ ID NO: 3196480 - DNA, 25 bp, Homo sapien
tacagagccccaataatatgcaaag

SEQ ID NO: 3196481 - DNA, 25 bp, Homo sapien
gagacaaaggccataactgattcac

SEQ ID NO: 3196482 - DNA, 25 bp, Homo sapien
tagttggggtataaactgatagtct

SEQ ID NO: 3196483 - DNA, 25 bp, Homo sapien
gacattctggtgattcccacttgga

SEQ ID NO: 3196484 - DNA, 25 bp, Homo sapien
ttgctggatcctgtgaatagttggg

SEQ ID NO: 3196485 - DNA, 25 bp, Homo sapien
cttttattctaactctctttgctcg

SEQ ID NO: 3196486 - DNA, 25 bp, Homo sapien
tattctaactctctttgctcggctc

SEQ ID NO: 3196487 - DNA, 25 bp, Homo sapien
tctaactctctttgctcggctctca

SEQ ID NO: 3196488 - DNA, 25 bp, Homo sapien
taactctctttgctcggctctcact

SEQ ID NO: 3196489 - DNA, 25 bp, Homo sapien
tgtaaaacaattgtgtgtacgtttg

SEQ ID NO: 3196490 - DNA, 25 bp, Homo sapien
agtttcagaacaagtatagtatttc

SEQ ID NO: 3196491 - DNA, 25 bp, Homo sapien
gcatggaaaatggtctgaagggatt

SEQ ID NO: 3196492 - DNA, 25 bp, Homo sapien
gaagggattcacagtacataacaga

SEQ ID NO: 3196493 - DNA, 25 bp, Homo sapien
tcaaattcttctagatgataacagt

SEQ ID NO: 3196494 - DNA, 25 bp, Homo sapien
caaattcttctagatgataacagtt

SEQ ID NO: 3196495 - DNA, 25 bp, Homo sapien
ctcaaattcttctagatgataacag

SEQ ID NO: 3196496 - DNA, 25 bp, Homo sapien
aatcatgcctcagataaacctcatt

SEQ ID NO: 3196497 - DNA, 25 bp, Homo sapien
atgatactgccactgtacaaagcta

SEQ ID NO: 3196498 - DNA, 25 bp, Homo sapien
aattagcaataatcatgcctcagat

SEQ ID NO: 3196499 - DNA, 25 bp, Homo sapien
caataatcatgcctcagataaacct

SEQ ID NO: 3196500 - DNA, 25 bp, Homo sapien
gagactaccaaagggtccgattgct

SEQ ID NO: 3196501 - DNA, 25 bp, Homo sapien
tgaaacgcttagtgacaagaaaggc

SEQ ID NO: 3196502 - DNA, 25 bp, Homo sapien
tagccatagctatcctgcaaggtgg

SEQ ID NO: 3196503 - DNA, 25 bp, Homo sapien
ctgttgtttttgactcggctagcca

SEQ ID NO: 3196504 - DNA, 25 bp, Homo sapien
gcaaccaggcccaagcaggctttga

SEQ ID NO: 3196505 - DNA, 25 bp, Homo sapien
tgaccacctttctgaagatgtatcg

SEQ ID NO: 3196506 - DNA, 25 bp, Homo sapien
gatgtatcgtaacagggcctcaccc

SEQ ID NO: 3196507 - DNA, 25 bp, Homo sapien
actgcggcaaccaggcccaagcagg

SEQ ID NO: 3196508 - DNA, 25 bp, Homo sapien
cagaaggtcggtacatgcatgcata

SEQ ID NO: 3196509 - DNA, 25 bp, Homo sapien
tgcataggtgttggccttgttcaga

SEQ ID NO: 3196510 - DNA, 25 bp, Homo sapien
tcctaagcagttgacagggtgaagc

SEQ ID NO: 3196511 - DNA, 25 bp, Homo sapien
gcatatcagcaaaagcccggattcc

SEQ ID NO: 3196512 - DNA, 25 bp, Homo sapien
tcccaaattcagctgaggtctactc

SEQ ID NO: 3196513 - DNA, 25 bp, Homo sapien
agtgtgaccattataagattttaaa

SEQ ID NO: 3196514 - DNA, 25 bp, Homo sapien
caaattcagctgaggtctactccac

SEQ ID NO: 3196515 - DNA, 25 bp, Homo sapien
gtgtgaccattataagattttaaat

SEQ ID NO: 3196516 - DNA, 25 bp, Homo sapien
tacatttgtgaactatgtgtgtgca

SEQ ID NO: 3196517 - DNA, 25 bp, Homo sapien
ggctgcttctattggtggtctactt

SEQ ID NO: 3196518 - DNA, 25 bp, Homo sapien
cctgaagggcctgaacagcagctaa

SEQ ID NO: 3196519 - DNA, 25 bp, Homo sapien
tgtgtgtgcattcaaagctataaca

SEQ ID NO: 3196520 - DNA, 25 bp, Homo sapien
tgagaagagtccacaaaccagcact

SEQ ID NO: 3196521 - DNA, 25 bp, Homo sapien
cagcatgcaggccatttaacctggg

SEQ ID NO: 3196522 - DNA, 25 bp, Homo sapien
atagtccagaacaccatgcctcagc

SEQ ID NO: 3196523 - DNA, 25 bp, Homo sapien
taacaaaggctgaccatagtccaga

SEQ ID NO: 3196524 - DNA, 25 bp, Homo sapien
gttctgtggtctgacttttcatcat

SEQ ID NO: 3196525 - DNA, 25 bp, Homo sapien
tgagttctgtggtctgacttttcat

SEQ ID NO: 3196526 - DNA, 25 bp, Homo sapien
cttggcctgttttgagttctgtggt

SEQ ID NO: 3196527 - DNA, 25 bp, Homo sapien
ttggcctgttttgagttctgtggtc

SEQ ID NO: 3196528 - DNA, 25 bp, Homo sapien
cagtgtcagtggtgctaaagccgtc

SEQ ID NO: 3196529 - DNA, 25 bp, Homo sapien
atgtgctcctcgtcattcgctatgt

SEQ ID NO: 3196530 - DNA, 25 bp, Homo sapien
cattcgctatgtcctcactggccat

SEQ ID NO: 3196531 - DNA, 25 bp, Homo sapien
accatgtgctcctcgtcattcgcta

SEQ ID NO: 3196532 - DNA, 25 bp, Homo sapien
aggaggaagcatccgagaatgtgta

SEQ ID NO: 3196533 - DNA, 25 bp, Homo sapien
cgagaatgtgtaggagaaggacggg

SEQ ID NO: 3196534 - DNA, 25 bp, Homo sapien
agcatccgagaatgtgtaggagaag

SEQ ID NO: 3196535 - DNA, 25 bp, Homo sapien
cggggtgggaccatagactttgcca

SEQ ID NO: 3196536 - DNA, 25 bp, Homo sapien
tggaaggcgtccctgggcccccatc

SEQ ID NO: 3196537 - DNA, 25 bp, Homo sapien
ccgtagggggcccgctctgctgccc

SEQ ID NO: 3196538 - DNA, 25 bp, Homo sapien
tagggggcccgctctgctgccctga

SEQ ID NO: 3196539 - DNA, 25 bp, Homo sapien
gggccgtagggggcccgctctgctg

SEQ ID NO: 3196540 - DNA, 25 bp, Homo sapien
tgggtgtggtggggtccgccagtgc

SEQ ID NO: 3196541 - DNA, 25 bp, Homo sapien
tgtacaggcaaaggggaagctgtcc

SEQ ID NO: 3196542 - DNA, 25 bp, Homo sapien
gcatttgggtgtggtggggtccgcc

SEQ ID NO: 3196543 - DNA, 25 bp, Homo sapien
atttgggtgtggtggggtccgccag

SEQ ID NO: 3196544 - DNA, 25 bp, Homo sapien
ccagggcgcgtgcagtgaagaggac

SEQ ID NO: 3196545 - DNA, 25 bp, Homo sapien
atcaaggccagcactggtccagggc

SEQ ID NO: 3196546 - DNA, 25 bp, Homo sapien
caaggccagcactggtccagggcgc

SEQ ID NO: 3196547 - DNA, 25 bp, Homo sapien
gacagcgccttctccgtctccggtt

SEQ ID NO: 3196548 - DNA, 25 bp, Homo sapien
gtgtgcatagtgggcctggagggca

SEQ ID NO: 3196549 - DNA, 25 bp, Homo sapien
tgtgcatagtgggcctggagggcag

SEQ ID NO: 3196550 - DNA, 25 bp, Homo sapien
gggaagatgtgtgcatagtgggcct

SEQ ID NO: 3196551 - DNA, 25 bp, Homo sapien
agatgtgtgcatagtgggcctggag

SEQ ID NO: 3196552 - DNA, 25 bp, Homo sapien
ccccaactggcaccactgctgcccc

SEQ ID NO: 3196553 - DNA, 25 bp, Homo sapien
gcttcagttggcacctgccccagtc

SEQ ID NO: 3196554 - DNA, 25 bp, Homo sapien
ggtttgtgtgcagaacatcctgccc

SEQ ID NO: 3196555 - DNA, 25 bp, Homo sapien
aggtttgtgtgcagaacatcctgcc

SEQ ID NO: 3196556 - DNA, 25 bp, Homo sapien
gcagcagcagtggacccgctatgca

SEQ ID NO: 3196557 - DNA, 25 bp, Homo sapien
ggcagcagcagtggacccgctatgc

SEQ ID NO: 3196558 - DNA, 25 bp, Homo sapien
gggatcttctttggggtcgcccatc

SEQ ID NO: 3196559 - DNA, 25 bp, Homo sapien
tatggagggacccaggtgttgaggc

SEQ ID NO: 3196560 - DNA, 25 bp, Homo sapien
cctgtggtagttatggagggaccca

SEQ ID NO: 3196561 - DNA, 25 bp, Homo sapien
tttggggtcgcccatctgcctgtgg

SEQ ID NO: 3196562 - DNA, 25 bp, Homo sapien
agcaggccttattccatcccaaact

SEQ ID NO: 3196563 - DNA, 25 bp, Homo sapien
aagcaggccttattccatcccaaac

SEQ ID NO: 3196564 - DNA, 25 bp, Homo sapien
atgaactccccatagtcgacaggca

SEQ ID NO: 3196565 - DNA, 25 bp, Homo sapien
atagtcgacaggcacctccctgtgg

SEQ ID NO: 3196566 - DNA, 25 bp, Homo sapien
ccccatagtcgacaggcacctccct

SEQ ID NO: 3196567 - DNA, 25 bp, Homo sapien
tgaactccccatagtcgacaggcac

SEQ ID NO: 3196568 - DNA, 25 bp, Homo sapien
acaactcaagttgggatagcagagg

SEQ ID NO: 3196569 - DNA, 25 bp, Homo sapien
agtacaactcaagttgggatagcag

SEQ ID NO: 3196570 - DNA, 25 bp, Homo sapien
tacaactcaagttgggatagcagag

SEQ ID NO: 3196571 - DNA, 25 bp, Homo sapien
aaaagtacaactcaagttgggatag

SEQ ID NO: 3196572 - DNA, 25 bp, Homo sapien
aatatccccgtgatcaacgtgttct

SEQ ID NO: 3196573 - DNA, 25 bp, Homo sapien
ataaaaaatatccccgtgatcaacg

SEQ ID NO: 3196574 - DNA, 25 bp, Homo sapien
aaatatccccgtgatcaacgtgttc

SEQ ID NO: 3196575 - DNA, 25 bp, Homo sapien
aaaaaatatccccgtgatcaacgtg

SEQ ID NO: 3196576 - DNA, 25 bp, Homo sapien
tcatggcagccaatgtaggcccaaa

SEQ ID NO: 3196577 - DNA, 25 bp, Homo sapien
gaactttctgaagtcgacctcacca

SEQ ID NO: 3196578 - DNA, 25 bp, Homo sapien
tcagcctctacagaccaagctcatg

SEQ ID NO: 3196579 - DNA, 25 bp, Homo sapien
caagctcatgactcacaatggccta

SEQ ID NO: 3196580 - DNA, 25 bp, Homo sapien
tctcataggagaatgcaccctgttg

SEQ ID NO: 3196581 - DNA, 25 bp, Homo sapien
tcccatcacgctcaggtgggaccat

SEQ ID NO: 3196582 - DNA, 25 bp, Homo sapien
tcataggagaatgcaccctgttgtg

SEQ ID NO: 3196583 - DNA, 25 bp, Homo sapien
ttctcccatcacgctcaggtgggac

SEQ ID NO: 3196584 - DNA, 25 bp, Homo sapien
ttatgccgttcacctgttataatga

SEQ ID NO: 3196585 - DNA, 25 bp, Homo sapien
tgtccagaccggtctctagctcctg

SEQ ID NO: 3196586 - DNA, 25 bp, Homo sapien
tgtgttgtccagaccggtctctagc

SEQ ID NO: 3196587 - DNA, 25 bp, Homo sapien
ctttgggttagccaatctctcatta

SEQ ID NO: 3196588 - DNA, 25 bp, Homo sapien
taagattactgtgagacatggtgaa

SEQ ID NO: 3196589 - DNA, 25 bp, Homo sapien
ttacccttgatgtaaattgacaggg

SEQ ID NO: 3196590 - DNA, 25 bp, Homo sapien
gacatggtgaatggacattctcatt

SEQ ID NO: 3196591 - DNA, 25 bp, Homo sapien
ttctcattacccttgatgtaaattg

SEQ ID NO: 3196592 - DNA, 25 bp, Homo sapien
aatattcccactttgctgacataag

SEQ ID NO: 3196593 - DNA, 25 bp, Homo sapien
attcccactttgctgacataagtta

SEQ ID NO: 3196594 - DNA, 25 bp, Homo sapien
aacacacactgtacaatattcccac

SEQ ID NO: 3196595 - DNA, 25 bp, Homo sapien
cacacactgtacaatattcccactt

SEQ ID NO: 3196596 - DNA, 25 bp, Homo sapien
gacactacctagagttagcgcagaa

SEQ ID NO: 3196597 - DNA, 25 bp, Homo sapien
gaccaaatgtgtgtgcagagtttct

SEQ ID NO: 3196598 - DNA, 25 bp, Homo sapien
taggcccaagaaattatagaagtat

SEQ ID NO: 3196599 - DNA, 25 bp, Homo sapien
caactctctggataccaaccgcgta

SEQ ID NO: 3196600 - DNA, 25 bp, Homo sapien
tgagctacacgttgcagtgcacacc

SEQ ID NO: 3196601 - DNA, 25 bp, Homo sapien
tgctaagagcaagactgcatttctt

SEQ ID NO: 3196602 - DNA, 25 bp, Homo sapien
ctttgctaagagcaagactgcattt

SEQ ID NO: 3196603 - DNA, 25 bp, Homo sapien
aaaaaatgagctacacgttgcagtg

SEQ ID NO: 3196604 - DNA, 25 bp, Homo sapien
cataatcttatctcaggaaataatt

SEQ ID NO: 3196605 - DNA, 25 bp, Homo sapien
ctcttgagacccataatcttatctc

SEQ ID NO: 3196606 - DNA, 25 bp, Homo sapien
aaatgtccttcactcttgagaccca

SEQ ID NO: 3196607 - DNA, 25 bp, Homo sapien
accatgcctggggtatctgtgtctt

SEQ ID NO: 3196608 - DNA, 25 bp, Homo sapien
gatttgtttcatctgcttcaatctc

SEQ ID NO: 3196609 - DNA, 25 bp, Homo sapien
ttccagatttgtttcatctgcttca

SEQ ID NO: 3196610 - DNA, 25 bp, Homo sapien
cagatttgtttcatctgcttcaatc

SEQ ID NO: 3196611 - DNA, 25 bp, Homo sapien
ctccatttttccagatttgtttcat

SEQ ID NO: 3196612 - DNA, 25 bp, Homo sapien
tcttttatagaagcatgaaatggac

SEQ ID NO: 3196613 - DNA, 25 bp, Homo sapien
tttatagaagcatgaaatggacaaa

SEQ ID NO: 3196614 - DNA, 25 bp, Homo sapien
cttttatagaagcatgaaatggaca

SEQ ID NO: 3196615 - DNA, 25 bp, Homo sapien
ttttatagaagcatgaaatggacaa

SEQ ID NO: 3196616 - DNA, 25 bp, Homo sapien
aaatacacagtaaatccttcctcct

SEQ ID NO: 3196617 - DNA, 25 bp, Homo sapien
gtgcttcacataataccagacatat

SEQ ID NO: 3196618 - DNA, 25 bp, Homo sapien
taacctagtggtaagaccataggcc

SEQ ID NO: 3196619 - DNA, 25 bp, Homo sapien
tcatgagaactgaagatctgtcccg

SEQ ID NO: 3196620 - DNA, 25 bp, Homo sapien
cggccaccggtaggcagcgtccgct

SEQ ID NO: 3196621 - DNA, 25 bp, Homo sapien
gcgcgacagtgcgatcggttgcacc

SEQ ID NO: 3196622 - DNA, 25 bp, Homo sapien
ggttggcgcgcagcgcctgctagcg

SEQ ID NO: 3196623 - DNA, 25 bp, Homo sapien
gcgatcggttgcaccttctgcgaca

SEQ ID NO: 3196624 - DNA, 25 bp, Homo sapien
agtgcgatcggttgcaccttctgcg

SEQ ID NO: 3196625 - DNA, 25 bp, Homo sapien
tgggcggccggggctgcagctggcg

SEQ ID NO: 3196626 - DNA, 25 bp, Homo sapien
tcaggtgaggcgagtgggcggccgg

SEQ ID NO: 3196627 - DNA, 25 bp, Homo sapien
agtgggcggccggggctgcagctgg

SEQ ID NO: 3196628 - DNA, 25 bp, Homo sapien
aggtgaggcgagtgggcggccgggg

SEQ ID NO: 3196629 - DNA, 25 bp, Homo sapien
tactctggagaatacaaatctggga

SEQ ID NO: 3196630 - DNA, 25 bp, Homo sapien
ctctgagaaggacccggatactctg

SEQ ID NO: 3196631 - DNA, 25 bp, Homo sapien
ttaattctctgagaaggacccggat

SEQ ID NO: 3196632 - DNA, 25 bp, Homo sapien
aattctctgagaaggacccggatac

SEQ ID NO: 3196633 - DNA, 25 bp, Homo sapien
gatacccaggattggaatgcatagc

SEQ ID NO: 3196634 - DNA, 25 bp, Homo sapien
taaagtgtgatctaccatccagcag

SEQ ID NO: 3196635 - DNA, 25 bp, Homo sapien
gttagaaatgtagaaaggcagccca

SEQ ID NO: 3196636 - DNA, 25 bp, Homo sapien
cacatatagcttgggagtcttacag

SEQ ID NO: 3196637 - DNA, 25 bp, Homo sapien
tatggctaggatccaatcctcttct

SEQ ID NO: 3196638 - DNA, 25 bp, Homo sapien
tttatgttatggctaggatccaatc

SEQ ID NO: 3196639 - DNA, 25 bp, Homo sapien
tggctaggatccaatcctcttctca

SEQ ID NO: 3196640 - DNA, 25 bp, Homo sapien
tgttatggctaggatccaatcctct

SEQ ID NO: 3196641 - DNA, 25 bp, Homo sapien
tcttggcaaattaatactgggttta

SEQ ID NO: 3196642 - DNA, 25 bp, Homo sapien
gggtttatgagtcatacttggtata

SEQ ID NO: 3196643 - DNA, 25 bp, Homo sapien
ccaatctcttggcaaattaatactg

SEQ ID NO: 3196644 - DNA, 25 bp, Homo sapien
tacaaatagtatgccaatctcttgg

SEQ ID NO: 3196645 - DNA, 25 bp, Homo sapien
ctttaggatcaatgattgtgggcat

SEQ ID NO: 3196646 - DNA, 25 bp, Homo sapien
ttggtgcagatgttaatatcataca

SEQ ID NO: 3196647 - DNA, 25 bp, Homo sapien
ttacaccagtgatttcctaccaggg

SEQ ID NO: 3196648 - DNA, 25 bp, Homo sapien
agtaattggtgcagatgttaatatc

SEQ ID NO: 3196649 - DNA, 25 bp, Homo sapien
gttaatatcatacattacaccagtg

SEQ ID NO: 3196650 - DNA, 25 bp, Homo sapien
ggggtatcaactattgtaagcagca

SEQ ID NO: 3196651 - DNA, 25 bp, Homo sapien
aaatcctggggtatcaactattgta

SEQ ID NO: 3196652 - DNA, 25 bp, Homo sapien
tgttatccactgcatctccaaatcc

SEQ ID NO: 3196653 - DNA, 25 bp, Homo sapien
taagcagcaactgaacaccaccttc

SEQ ID NO: 3196654 - DNA, 25 bp, Homo sapien
atatcaatgtaattgataacaggct

SEQ ID NO: 3196655 - DNA, 25 bp, Homo sapien
tctgacatctgttcactcgcgattc

SEQ ID NO: 3196656 - DNA, 25 bp, Homo sapien
catctgttcactcgcgattctgcat

SEQ ID NO: 3196657 - DNA, 25 bp, Homo sapien
taggtagtcctcaaatttaatatca

SEQ ID NO: 3196658 - DNA, 25 bp, Homo sapien
agcaatgaagtataaacaacactgc

SEQ ID NO: 3196659 - DNA, 25 bp, Homo sapien
aggagcaatgaagtataaacaacac

SEQ ID NO: 3196660 - DNA, 25 bp, Homo sapien
gaagtataaacaacactgcaccctg

SEQ ID NO: 3196661 - DNA, 25 bp, Homo sapien
tgaagtataaacaacactgcaccct

SEQ ID NO: 3196662 - DNA, 25 bp, Homo sapien
gaatcagaactatcaggttactgac

SEQ ID NO: 3196663 - DNA, 25 bp, Homo sapien
ccatctagagtgataatgggcattg

SEQ ID NO: 3196664 - DNA, 25 bp, Homo sapien
ttatccatctagagtgataatgggc

SEQ ID NO: 3196665 - DNA, 25 bp, Homo sapien
tagagtgataatgggcattgaccca

SEQ ID NO: 3196666 - DNA, 25 bp, Homo sapien
tctagagtgataatgggcattgacc

SEQ ID NO: 3196667 - DNA, 25 bp, Homo sapien
acaaaaggcaatgccaggtagttac

SEQ ID NO: 3196668 - DNA, 25 bp, Homo sapien
aggcaatgccaggtagttacaaaca

SEQ ID NO: 3196669 - DNA, 25 bp, Homo sapien
tacccaatcctgcctgaaggtggga

SEQ ID NO: 3196670 - DNA, 25 bp, Homo sapien
ctcaacaaaaggcaatgccaggtag

SEQ ID NO: 3196671 - DNA, 25 bp, Homo sapien
gcacattgtgaagatataccgtaga

SEQ ID NO: 3196672 - DNA, 25 bp, Homo sapien
tgtgaagatataccgtagaacttaa

SEQ ID NO: 3196673 - DNA, 25 bp, Homo sapien
cattgtgaagatataccgtagaact

SEQ ID NO: 3196674 - DNA, 25 bp, Homo sapien
tgaagatataccgtagaacttaaag

SEQ ID NO: 3196675 - DNA, 25 bp, Homo sapien
ggttaagatttcactctgctggctt

SEQ ID NO: 3196676 - DNA, 25 bp, Homo sapien
tactatagttggagagagtccagaa

SEQ ID NO: 3196677 - DNA, 25 bp, Homo sapien
cagaaacccaaacaccgcataggtg

SEQ ID NO: 3196678 - DNA, 25 bp, Homo sapien
tggcacaaagccactacatctcatt

SEQ ID NO: 3196679 - DNA, 25 bp, Homo sapien
ataaaactcactggatgacaccaat

SEQ ID NO: 3196680 - DNA, 25 bp, Homo sapien
taaaactcactggatgacaccaatt

SEQ ID NO: 3196681 - DNA, 25 bp, Homo sapien
tataaaactcactggatgacaccaa

SEQ ID NO: 3196682 - DNA, 25 bp, Homo sapien
taaattgtcactgccttattaagct

SEQ ID NO: 3196683 - DNA, 25 bp, Homo sapien
gctattatgtcagatacaagcctgc

SEQ ID NO: 3196684 - DNA, 25 bp, Homo sapien
aatgccatgaaatattcaatctccg

SEQ ID NO: 3196685 - DNA, 25 bp, Homo sapien
tccagtgacaaaaaagcagagttca

SEQ ID NO: 3196686 - DNA, 25 bp, Homo sapien
gcctagtctacggcctcaagcaatc

SEQ ID NO: 3196687 - DNA, 25 bp, Homo sapien
tgttgcctagtctacggcctcaagc

SEQ ID NO: 3196688 - DNA, 25 bp, Homo sapien
ttgcctagtctacggcctcaagcaa

SEQ ID NO: 3196689 - DNA, 25 bp, Homo sapien
gttgcctagtctacggcctcaagca

SEQ ID NO: 3196690 - DNA, 25 bp, Homo sapien
agttgtccctatatgtaacacttcc

SEQ ID NO: 3196691 - DNA, 25 bp, Homo sapien
gagtaggtggagtgatttcccagca

SEQ ID NO: 3196692 - DNA, 25 bp, Homo sapien
tttactaaacttactgaatgcctac

SEQ ID NO: 3196693 - DNA, 25 bp, Homo sapien
ccaaatgtacctcaaagttgtccct

SEQ ID NO: 3196694 - DNA, 25 bp, Homo sapien
tgcagtggcaaacaccataggaatg

SEQ ID NO: 3196695 - DNA, 25 bp, Homo sapien
gaaaaggctggagaatcctggcttg

SEQ ID NO: 3196696 - DNA, 25 bp, Homo sapien
cataggaatgcaacgatgagctgga

SEQ ID NO: 3196697 - DNA, 25 bp, Homo sapien
gcttgtggacaagggagagttttaa

SEQ ID NO: 3196698 - DNA, 25 bp, Homo sapien
gccctatagacatgtaagaacttgg

SEQ ID NO: 3196699 - DNA, 25 bp, Homo sapien
taacaaagcactgtcagagtgggat

SEQ ID NO: 3196700 - DNA, 25 bp, Homo sapien
ggaccacggtaaaagcatgtcttat

SEQ ID NO: 3196701 - DNA, 25 bp, Homo sapien
tctccccagagaactcggttgtgtg

SEQ ID NO: 3196702 - DNA, 25 bp, Homo sapien
tctgccaagttcacgtcagcagctg

SEQ ID NO: 3196703 - DNA, 25 bp, Homo sapien
tttctgccaagttcacgtcagcagc

SEQ ID NO: 3196704 - DNA, 25 bp, Homo sapien
ttctgccaagttcacgtcagcagct

SEQ ID NO: 3196705 - DNA, 25 bp, Homo sapien
tgccaagttcacgtcagcagctgtt

SEQ ID NO: 3196706 - DNA, 25 bp, Homo sapien
gaagagtcacacaagccctttttag

SEQ ID NO: 3196707 - DNA, 25 bp, Homo sapien
cagctgcaaagtttaacaggagatc

SEQ ID NO: 3196708 - DNA, 25 bp, Homo sapien
tcaaaagctgcaagactcccctgct

SEQ ID NO: 3196709 - DNA, 25 bp, Homo sapien
tcatgtagtatgtcctgccaccaac

SEQ ID NO: 3196710 - DNA, 25 bp, Homo sapien
ggtatcttgttcatcatggtttttt

SEQ ID NO: 3196711 - DNA, 25 bp, Homo sapien
taaggtatgtttatcttggccaggc

SEQ ID NO: 3196712 - DNA, 25 bp, Homo sapien
tcatcatggttttttatattaataa

SEQ ID NO: 3196713 - DNA, 25 bp, Homo sapien
ttcttaaggtatgtttatcttggcc

SEQ ID NO: 3196714 - DNA, 25 bp, Homo sapien
atgagggcataatagaagagttggt

SEQ ID NO: 3196715 - DNA, 25 bp, Homo sapien
ctatagaggtagagatgagggcata

SEQ ID NO: 3196716 - DNA, 25 bp, Homo sapien
aggtagagatgagggcataatagaa

SEQ ID NO: 3196717 - DNA, 25 bp, Homo sapien
taatagaagagttggtaacgtaaca

SEQ ID NO: 3196718 - DNA, 25 bp, Homo sapien
tgaaggtggatctctatttacattg

SEQ ID NO: 3196719 - DNA, 25 bp, Homo sapien
tttacattgtctaaaaattgaccag

SEQ ID NO: 3196720 - DNA, 25 bp, Homo sapien
cagaagctgtggaataagctgtttc

SEQ ID NO: 3196721 - DNA, 25 bp, Homo sapien
tgtttcagaatagctcacaaaggct

SEQ ID NO: 3196722 - DNA, 25 bp, Homo sapien
tcaattgaccaaggcaaacagagct

SEQ ID NO: 3196723 - DNA, 25 bp, Homo sapien
gagctgacaactggactatacttta

SEQ ID NO: 3196724 - DNA, 25 bp, Homo sapien
tgtacctggttacacaaatggccaa

SEQ ID NO: 3196725 - DNA, 25 bp, Homo sapien
taggctaagcttaaggaggaggatc

SEQ ID NO: 3196726 - DNA, 25 bp, Homo sapien
gtgtctctctataaaagttcccaag

SEQ ID NO: 3196727 - DNA, 25 bp, Homo sapien
caagaaggaaccttgaattggtcct

SEQ ID NO: 3196728 - DNA, 25 bp, Homo sapien
gtagctctttgcatgtaaactggca

SEQ ID NO: 3196729 - DNA, 25 bp, Homo sapien
ggcatggtagtattgtttctctcaa

SEQ ID NO: 3196730 - DNA, 25 bp, Homo sapien
tctcctttctctatactatcaccat

SEQ ID NO: 3196731 - DNA, 25 bp, Homo sapien
cagttaaacagaagtccagcatcag

SEQ ID NO: 3196732 - DNA, 25 bp, Homo sapien
ccagcatcagtgttcttccattatc

SEQ ID NO: 3196733 - DNA, 25 bp, Homo sapien
ctatcaccatacatcccagttaaac

SEQ ID NO: 3196734 - DNA, 25 bp, Homo sapien
ggagtaactatgtgccacccctttc

SEQ ID NO: 3196735 - DNA, 25 bp, Homo sapien
caaggcagagatggttagttactac

SEQ ID NO: 3196736 - DNA, 25 bp, Homo sapien
taagaggcatagctggaatacgaac

SEQ ID NO: 3196737 - DNA, 25 bp, Homo sapien
cattaggtaggtgattttacaccca

SEQ ID NO: 3196738 - DNA, 25 bp, Homo sapien
tttagtggtgctttcatcagaggcc

SEQ ID NO: 3196739 - DNA, 25 bp, Homo sapien
tcagaggccaatatccagggtaggg

SEQ ID NO: 3196740 - DNA, 25 bp, Homo sapien
cctaggatctgtaagtagagggcaa

SEQ ID NO: 3196741 - DNA, 25 bp, Homo sapien
taagacctctcacagttggaacgaa

SEQ ID NO: 3196742 - DNA, 25 bp, Homo sapien
ttaacactgggcaccagagtggtat

SEQ ID NO: 3196743 - DNA, 25 bp, Homo sapien
aaaaatgcatccaaggttcctctat

SEQ ID NO: 3196744 - DNA, 25 bp, Homo sapien
ccagagtgtcatatggtggaaatca

SEQ ID NO: 3196745 - DNA, 25 bp, Homo sapien
taatgaccatggatccaccaatatg

SEQ ID NO: 3196746 - DNA, 25 bp, Homo sapien
gccattattctatctaccacagtca

SEQ ID NO: 3196747 - DNA, 25 bp, Homo sapien
ggttccaaggactaggatgtggtca

SEQ ID NO: 3196748 - DNA, 25 bp, Homo sapien
tgccttgcttgacttaatagccact

SEQ ID NO: 3196749 - DNA, 25 bp, Homo sapien
tctgtagagccccttttaccaagta

SEQ ID NO: 3196750 - DNA, 25 bp, Homo sapien
cttttcaaggagtatcttattgggg

SEQ ID NO: 3196751 - DNA, 25 bp, Homo sapien
ctcctgaaggatatcctacagtgtg

SEQ ID NO: 3196752 - DNA, 25 bp, Homo sapien
aggatatcctacagtgtgttttcca

SEQ ID NO: 3196753 - DNA, 25 bp, Homo sapien
tgtcttggggtagatcttttcaagg

SEQ ID NO: 3196754 - DNA, 25 bp, Homo sapien
aaaaaacagctacgggatgcattga

SEQ ID NO: 3196755 - DNA, 25 bp, Homo sapien
tgtttatgagtgcaggaatttatcc

SEQ ID NO: 3196756 - DNA, 25 bp, Homo sapien
tctcgctggtggtctatttcattga

SEQ ID NO: 3196757 - DNA, 25 bp, Homo sapien
tctgtggcgtcagtagtggtatccc

SEQ ID NO: 3196758 - DNA, 25 bp, Homo sapien
tggcaatgtgaactgttttttggtt

SEQ ID NO: 3196759 - DNA, 25 bp, Homo sapien
cagtgcaagctggaaagcctaagtt

SEQ ID NO: 3196760 - DNA, 25 bp, Homo sapien
gcaagctggaaagcctaagtttgtc

SEQ ID NO: 3196761 - DNA, 25 bp, Homo sapien
cctaagtttgtctaggtatgtgggc

SEQ ID NO: 3196762 - DNA, 25 bp, Homo sapien
ggtatgtgggctgtcccaagatcta

SEQ ID NO: 3196763 - DNA, 25 bp, Homo sapien
cccagtctgtttgtaatgtgatagc

SEQ ID NO: 3196764 - DNA, 25 bp, Homo sapien
cactcctgtgtctccatatggagga

SEQ ID NO: 3196765 - DNA, 25 bp, Homo sapien
tagccgtcagtccacactccttaaa

SEQ ID NO: 3196766 - DNA, 25 bp, Homo sapien
catatggaggagcacccctaaagtg

SEQ ID NO: 3196767 - DNA, 25 bp, Homo sapien
taaactggaatctcagggacaagct

SEQ ID NO: 3196768 - DNA, 25 bp, Homo sapien
tagccacaggaactgagttggttct

SEQ ID NO: 3196769 - DNA, 25 bp, Homo sapien
tcagttatctaacggcaatcccaat

SEQ ID NO: 3196770 - DNA, 25 bp, Homo sapien
tagcattcttagcaaacagggattc

SEQ ID NO: 3196771 - DNA, 25 bp, Homo sapien
tgtacagtgatcacgtcctcaagat

SEQ ID NO: 3196772 - DNA, 25 bp, Homo sapien
cttttgtacagtgatcacgtcctca

SEQ ID NO: 3196773 - DNA, 25 bp, Homo sapien
caatattccatttgggtagacatct

SEQ ID NO: 3196774 - DNA, 25 bp, Homo sapien
gtctctgatactcaatattccattt

SEQ ID NO: 3196775 - DNA, 25 bp, Homo sapien
aattcttcacctgtcagtggtttcc

SEQ ID NO: 3196776 - DNA, 25 bp, Homo sapien
ctccgattcctgtataaagtcatga

SEQ ID NO: 3196777 - DNA, 25 bp, Homo sapien
agtcatgagatggtcaaggtggttt

SEQ ID NO: 3196778 - DNA, 25 bp, Homo sapien
aaattcttcacctgtcagtggtttc

SEQ ID NO: 3196779 - DNA, 25 bp, Homo sapien
gatttagaaatggaatggccttgga

SEQ ID NO: 3196780 - DNA, 25 bp, Homo sapien
ctgatgcaaagcaggtgaaacctta

SEQ ID NO: 3196781 - DNA, 25 bp, Homo sapien
aagcaggtgaaaccttaggagatga

SEQ ID NO: 3196782 - DNA, 25 bp, Homo sapien
tccagtcactgacttgattgaggga

SEQ ID NO: 3196783 - DNA, 25 bp, Homo sapien
taggttaggagcaaattatcataca

SEQ ID NO: 3196784 - DNA, 25 bp, Homo sapien
taaagcctttataggatagtgaaaa

SEQ ID NO: 3196785 - DNA, 25 bp, Homo sapien
tgtttgtgatatttcgtgtactgca

SEQ ID NO: 3196786 - DNA, 25 bp, Homo sapien
tgttagcacattgataaaagcattg

SEQ ID NO: 3196787 - DNA, 25 bp, Homo sapien
ttttctattataagcgcgggtgtgg

SEQ ID NO: 3196788 - DNA, 25 bp, Homo sapien
tttctattataagcgcgggtgtggt

SEQ ID NO: 3196789 - DNA, 25 bp, Homo sapien
tattttctattataagcgcgggtgt

SEQ ID NO: 3196790 - DNA, 25 bp, Homo sapien
ttctattataagcgcgggtgtggtg

SEQ ID NO: 3196791 - DNA, 25 bp, Homo sapien
attctatgtgatactgacaagtatt

SEQ ID NO: 3196792 - DNA, 25 bp, Homo sapien
attacagaaatagttatgttctcac

SEQ ID NO: 3196793 - DNA, 25 bp, Homo sapien
tatgtgccagtgttaccctcaagga

SEQ ID NO: 3196794 - DNA, 25 bp, Homo sapien
aacgagacagactatttgccccaaa

SEQ ID NO: 3196795 - DNA, 25 bp, Homo sapien
tggtactgcacacctgactagggag

SEQ ID NO: 3196796 - DNA, 25 bp, Homo sapien
gagaggtgcatctacagtccagttc

SEQ ID NO: 3196797 - DNA, 25 bp, Homo sapien
gaactcaacatagaacccactgtaa

SEQ ID NO: 3196798 - DNA, 25 bp, Homo sapien
caataaaaggcataataaagactct

SEQ ID NO: 3196799 - DNA, 25 bp, Homo sapien
gatctttccttaggaccacaatttc

SEQ ID NO: 3196800 - DNA, 25 bp, Homo sapien
taagtatgaaaccttgttggtagga

SEQ ID NO: 3196801 - DNA, 25 bp, Homo sapien
aatgttttgcagaggcaatacaggc

SEQ ID NO: 3196802 - DNA, 25 bp, Homo sapien
tatgctatttaggattgttgacagc

SEQ ID NO: 3196803 - DNA, 25 bp, Homo sapien
tgatggatgtccatgcagtgacata

SEQ ID NO: 3196804 - DNA, 25 bp, Homo sapien
aaatccttccctctaagtaactgct

SEQ ID NO: 3196805 - DNA, 25 bp, Homo sapien
ggtgaagaacaacctactgggtaca

SEQ ID NO: 3196806 - DNA, 25 bp, Homo sapien
tcatggaactaacctaactgtccat

SEQ ID NO: 3196807 - DNA, 25 bp, Homo sapien
ggtagcttctgaagtaagtatggaa

SEQ ID NO: 3196808 - DNA, 25 bp, Homo sapien
tatataccagacatgcacatatacc

SEQ ID NO: 3196809 - DNA, 25 bp, Homo sapien
aaatatagtcctgttactctgttca

SEQ ID NO: 3196810 - DNA, 25 bp, Homo sapien
gcaatcctgtttccagtaagttcat

SEQ ID NO: 3196811 - DNA, 25 bp, Homo sapien
agtacctgatccatagtccaactca

SEQ ID NO: 3196812 - DNA, 25 bp, Homo sapien
tagtcctgttactctgttcattgtc

SEQ ID NO: 3196813 - DNA, 25 bp, Homo sapien
catgccaggattaccatctgcattg

SEQ ID NO: 3196814 - DNA, 25 bp, Homo sapien
caaatctatatctccagcccagaac

SEQ ID NO: 3196815 - DNA, 25 bp, Homo sapien
tggtgcattccaaatctatatctcc

SEQ ID NO: 3196816 - DNA, 25 bp, Homo sapien
ctactcgcatgccaggattaccatc

SEQ ID NO: 3196817 - DNA, 25 bp, Homo sapien
ctcattataggccatctccctggat

SEQ ID NO: 3196818 - DNA, 25 bp, Homo sapien
tcattataggccatctccctggatg

SEQ ID NO: 3196819 - DNA, 25 bp, Homo sapien
taggctctcattataggccatctcc

SEQ ID NO: 3196820 - DNA, 25 bp, Homo sapien
gctctcattataggccatctccctg

SEQ ID NO: 3196821 - DNA, 25 bp, Homo sapien
gtttgcattcatctatctcaagcca

SEQ ID NO: 3196822 - DNA, 25 bp, Homo sapien
aaattcgagtcatttgtcactctgt

SEQ ID NO: 3196823 - DNA, 25 bp, Homo sapien
tatttttagaatgtaagtaaaggca

SEQ ID NO: 3196824 - DNA, 25 bp, Homo sapien
tctgttatggattcataaatctgta

SEQ ID NO: 3196825 - DNA, 25 bp, Homo sapien
ggcacagtgggaatagagggtcagc

SEQ ID NO: 3196826 - DNA, 25 bp, Homo sapien
gacttaaaagggcactacacacagc

SEQ ID NO: 3196827 - DNA, 25 bp, Homo sapien
gtgagagacttaaaagggcactaca

SEQ ID NO: 3196828 - DNA, 25 bp, Homo sapien
gtcatggtctggcacagtgggaata

SEQ ID NO: 3196829 - DNA, 25 bp, Homo sapien
gatgtaacaaccatgtcctctgctg

SEQ ID NO: 3196830 - DNA, 25 bp, Homo sapien
ggcagatctctcaaggaaattccag

SEQ ID NO: 3196831 - DNA, 25 bp, Homo sapien
cctctgctgacctttgatgggaaaa

SEQ ID NO: 3196832 - DNA, 25 bp, Homo sapien
gagtgagacactatccgttaggaca

SEQ ID NO: 3196833 - DNA, 25 bp, Homo sapien
gcaactgatagcagagagtgaacag

SEQ ID NO: 3196834 - DNA, 25 bp, Homo sapien
ccttaaggacacagcaactgatagc

SEQ ID NO: 3196835 - DNA, 25 bp, Homo sapien
ttttgcttgaattaacattgtctgc

SEQ ID NO: 3196836 - DNA, 25 bp, Homo sapien
tatttagcttgagagtatattatgt

SEQ ID NO: 3196837 - DNA, 25 bp, Homo sapien
taggcacacagaaatcctccgcttg

SEQ ID NO: 3196838 - DNA, 25 bp, Homo sapien
cctccgcttggaatatggcaactca

SEQ ID NO: 3196839 - DNA, 25 bp, Homo sapien
gcaactccagtgatacatgtaggga

SEQ ID NO: 3196840 - DNA, 25 bp, Homo sapien
gaaccctaggcttgacttcatgctg

SEQ ID NO: 3196841 - DNA, 25 bp, Homo sapien
ttgaattctcttgtgatggtcaaag

SEQ ID NO: 3196842 - DNA, 25 bp, Homo sapien
tcaaagaagcagagtacaagagctt

SEQ ID NO: 3196843 - DNA, 25 bp, Homo sapien
gaagcagagtacaagagcttgaaag

SEQ ID NO: 3196844 - DNA, 25 bp, Homo sapien
aaagttgaattctcttgtgatggtc

SEQ ID NO: 3196845 - DNA, 25 bp, Homo sapien
catttggttccagagtgaggaggca

SEQ ID NO: 3196846 - DNA, 25 bp, Homo sapien
aggaggcagtaagaggtgcttgagc

SEQ ID NO: 3196847 - DNA, 25 bp, Homo sapien
tgaggaggcagtaagaggtgcttga

SEQ ID NO: 3196848 - DNA, 25 bp, Homo sapien
agtaaggcatttggttccagagtga

SEQ ID NO: 3196849 - DNA, 25 bp, Homo sapien
atgtggcaagtctgtgatttcaacc

SEQ ID NO: 3196850 - DNA, 25 bp, Homo sapien
cagtactacaagaaataggctgttt

SEQ ID NO: 3196851 - DNA, 25 bp, Homo sapien
ttaactttcacataggagatgtggc

SEQ ID NO: 3196852 - DNA, 25 bp, Homo sapien
tcaccaacctgtaggataagactac

SEQ ID NO: 3196853 - DNA, 25 bp, Homo sapien
tggtcagagccaataagaagggctt

SEQ ID NO: 3196854 - DNA, 25 bp, Homo sapien
agaagggcttaaaacacctggcagg

SEQ ID NO: 3196855 - DNA, 25 bp, Homo sapien
ccctcttgggcatgcggaaagtgga

SEQ ID NO: 3196856 - DNA, 25 bp, Homo sapien
tatactagtccagtcccactgtgcc

SEQ ID NO: 3196857 - DNA, 25 bp, Homo sapien
cagggactgaccgaggaacactctt

SEQ ID NO: 3196858 - DNA, 25 bp, Homo sapien
taaaattcgtgaccgagtctggaag

SEQ ID NO: 3196859 - DNA, 25 bp, Homo sapien
taataagatggaggagaatactggc

SEQ ID NO: 3196860 - DNA, 25 bp, Homo sapien
tttctcacaaaggaccagccgactc

SEQ ID NO: 3196861 - DNA, 25 bp, Homo sapien
ttgggaaggaggtatagggatcaac

SEQ ID NO: 3196862 - DNA, 25 bp, Homo sapien
tatagggatcaactggtgaggcggg

SEQ ID NO: 3196863 - DNA, 25 bp, Homo sapien
atcaactggtgaggcgggagggaag

SEQ ID NO: 3196864 - DNA, 25 bp, Homo sapien
ctgtaagttagaggcctcctggagg

SEQ ID NO: 3196865 - DNA, 25 bp, Homo sapien
tcataagcctcgcagattgcctggt

SEQ ID NO: 3196866 - DNA, 25 bp, Homo sapien
catttaaaggacttgcgggcaattc

SEQ ID NO: 3196867 - DNA, 25 bp, Homo sapien
taagataatgaacgctgattgccat

SEQ ID NO: 3196868 - DNA, 25 bp, Homo sapien
gcttaatgtgcaaccgtcttccaga

SEQ ID NO: 3196869 - DNA, 25 bp, Homo sapien
gaattagctgaaagtacctgtctag

SEQ ID NO: 3196870 - DNA, 25 bp, Homo sapien
taaacttggccagaaatatatgtca

SEQ ID NO: 3196871 - DNA, 25 bp, Homo sapien
tattatccttgtgagacatgggtgg

SEQ ID NO: 3196872 - DNA, 25 bp, Homo sapien
tagtttacgagatatcaagtctccc

SEQ ID NO: 3196873 - DNA, 25 bp, Homo sapien
cttgatgacagagccaaaagtaggc

SEQ ID NO: 3196874 - DNA, 25 bp, Homo sapien
gaatccctatagagttacatgcaga

SEQ ID NO: 3196875 - DNA, 25 bp, Homo sapien
tgaatacatggagagataagctgct

SEQ ID NO: 3196876 - DNA, 25 bp, Homo sapien
tgcagaaagacagacggacacatgt

SEQ ID NO: 3196877 - DNA, 25 bp, Homo sapien
aaattcacattctgtgatcctgtca

SEQ ID NO: 3196878 - DNA, 25 bp, Homo sapien
aataacttttcagatctgttcaaaa

SEQ ID NO: 3196879 - DNA, 25 bp, Homo sapien
ttaataacttttcagatctgttcaa

SEQ ID NO: 3196880 - DNA, 25 bp, Homo sapien
aacttttcagatctgttcaaaattc

SEQ ID NO: 3196881 - DNA, 25 bp, Homo sapien
cccctgctgggctgttgagtcaact

SEQ ID NO: 3196882 - DNA, 25 bp, Homo sapien
tcaaatatactggttgccctgacag

SEQ ID NO: 3196883 - DNA, 25 bp, Homo sapien
tgaactggacttgaggcaatgggct

SEQ ID NO: 3196884 - DNA, 25 bp, Homo sapien
ggaagttacgcatcaggcccctttg

SEQ ID NO: 3196885 - DNA, 25 bp, Homo sapien
ggactgttaacattctcctaggaac

SEQ ID NO: 3196886 - DNA, 25 bp, Homo sapien
tattgcagttatgtaaaggttaagt

SEQ ID NO: 3196887 - DNA, 25 bp, Homo sapien
tttatatgccaatcatccgtggttg

SEQ ID NO: 3196888 - DNA, 25 bp, Homo sapien
tggttgatgtagtgaaaaaggtctg

SEQ ID NO: 3196889 - DNA, 25 bp, Homo sapien
agcagtgcattagaagtttgctttg

SEQ ID NO: 3196890 - DNA, 25 bp, Homo sapien
cagcagtgcattagaagtttgcttt

SEQ ID NO: 3196891 - DNA, 25 bp, Homo sapien
ccagcagtgcattagaagtttgctt

SEQ ID NO: 3196892 - DNA, 25 bp, Homo sapien
gaagtatcctagacagctgaacagt

SEQ ID NO: 3196893 - DNA, 25 bp, Homo sapien
gaccaacacgaaagtctgacccaga

SEQ ID NO: 3196894 - DNA, 25 bp, Homo sapien
ttctacaattggagctctgaggcac

SEQ ID NO: 3196895 - DNA, 25 bp, Homo sapien
tactgtgagaagaatactgggcctc

SEQ ID NO: 3196896 - DNA, 25 bp, Homo sapien
catcctgttgagttccccttctgct

SEQ ID NO: 3196897 - DNA, 25 bp, Homo sapien
ccatgatgaacttttcctgggcttt

SEQ ID NO: 3196898 - DNA, 25 bp, Homo sapien
tagccctatgcctgctacactagtg

SEQ ID NO: 3196899 - DNA, 25 bp, Homo sapien
gacttacaccacacgttacttgcca

SEQ ID NO: 3196900 - DNA, 25 bp, Homo sapien
tgaaatctctacattgcctccccat

SEQ ID NO: 3196901 - DNA, 25 bp, Homo sapien
tcagtgaaagccaacacaattagaa

SEQ ID NO: 3196902 - DNA, 25 bp, Homo sapien
tccccatccccgctttcagatgatg

SEQ ID NO: 3196903 - DNA, 25 bp, Homo sapien
tatttccacaagagaacttccccta

SEQ ID NO: 3196904 - DNA, 25 bp, Homo sapien
tgctgtagcaaacgtacttactata

SEQ ID NO: 3196905 - DNA, 25 bp, Homo sapien
gccatgatgtatttagtcagccttc

SEQ ID NO: 3196906 - DNA, 25 bp, Homo sapien
agtgttctcttgtataagtgtgcca

SEQ ID NO: 3196907 - DNA, 25 bp, Homo sapien
tttgaccgattacattctagatggg

SEQ ID NO: 3196908 - DNA, 25 bp, Homo sapien
gtgtgtggtccttttatgacctgga

SEQ ID NO: 3196909 - DNA, 25 bp, Homo sapien
ttatgacctggaggtaaaggatttc

SEQ ID NO: 3196910 - DNA, 25 bp, Homo sapien
catttgaacatgtgtcgtaagtcat

SEQ ID NO: 3196911 - DNA, 25 bp, Homo sapien
ttcatttgaacatgtgtcgtaagtc

SEQ ID NO: 3196912 - DNA, 25 bp, Homo sapien
cccctctgaggccatctgcacccac

SEQ ID NO: 3196913 - DNA, 25 bp, Homo sapien
acccactttcctttcactctgcgca

SEQ ID NO: 3196914 - DNA, 25 bp, Homo sapien
ctgcccctctgaggccatctgcacc

SEQ ID NO: 3196915 - DNA, 25 bp, Homo sapien
tctgaggccatctgcacccactttc

SEQ ID NO: 3196916 - DNA, 25 bp, Homo sapien
cttgccaaagtgagtgcggttgcct

SEQ ID NO: 3196917 - DNA, 25 bp, Homo sapien
ctgtccttttggaggcggctgcgca

SEQ ID NO: 3196918 - DNA, 25 bp, Homo sapien
ttgcggcgtgcacacaaagggcgca

SEQ ID NO: 3196919 - DNA, 25 bp, Homo sapien
ggctgtgccgccaaaagtagagctc

SEQ ID NO: 3196920 - DNA, 25 bp, Homo sapien
cctctctagccctctggttccccaa

SEQ ID NO: 3196921 - DNA, 25 bp, Homo sapien
gcaaaacccaaacagtttctgagcc

SEQ ID NO: 3196922 - DNA, 25 bp, Homo sapien
ggtcttgatggctccgctcctcccc

SEQ ID NO: 3196923 - DNA, 25 bp, Homo sapien
cggtcttgatggctccgctcctccc

SEQ ID NO: 3196924 - DNA, 25 bp, Homo sapien
gaagacccggggctgatttctctcc

SEQ ID NO: 3196925 - DNA, 25 bp, Homo sapien
tcatactttgttagaaaagccacca

SEQ ID NO: 3196926 - DNA, 25 bp, Homo sapien
gaattgtgcccttcgttcacccctg

SEQ ID NO: 3196927 - DNA, 25 bp, Homo sapien
caggtaagaagaggacccacggaag

SEQ ID NO: 3196928 - DNA, 25 bp, Homo sapien
ccgccgccacttggcttccggagag

SEQ ID NO: 3196929 - DNA, 25 bp, Homo sapien
gccgccgccacttggcttccggaga

SEQ ID NO: 3196930 - DNA, 25 bp, Homo sapien
cagccgccgccacttggcttccgga

SEQ ID NO: 3196931 - DNA, 25 bp, Homo sapien
agccgccgccacttggcttccggag

SEQ ID NO: 3196932 - DNA, 25 bp, Homo sapien
ctttaagtcactgagcgggctgggc

SEQ ID NO: 3196933 - DNA, 25 bp, Homo sapien
gctctgaaggaggtcggtcccgctc

SEQ ID NO: 3196934 - DNA, 25 bp, Homo sapien
tctgaaggaggtcggtcccgctcct

SEQ ID NO: 3196935 - DNA, 25 bp, Homo sapien
agtggtccgtggctggaccgcttta

SEQ ID NO: 3196936 - DNA, 25 bp, Homo sapien
tgccacttttcagtcaacgacagac

SEQ ID NO: 3196937 - DNA, 25 bp, Homo sapien
gtagtaggctgagccatctattttg

SEQ ID NO: 3196938 - DNA, 25 bp, Homo sapien
gcagagttttaaattacgattgatc

SEQ ID NO: 3196939 - DNA, 25 bp, Homo sapien
gatctcctgttaggaggaatgcatg

SEQ ID NO: 3196940 - DNA, 25 bp, Homo sapien
gcatctatcccagtgcaagagccaa

SEQ ID NO: 3196941 - DNA, 25 bp, Homo sapien
agtgcaagagccaacgtttttgtcc

SEQ ID NO: 3196942 - DNA, 25 bp, Homo sapien
aagagccaacgtttttgtccctcag

SEQ ID NO: 3196943 - DNA, 25 bp, Homo sapien
ctgcatctatcccagtgcaagagcc

SEQ ID NO: 3196944 - DNA, 25 bp, Homo sapien
tgatgtttatcttagctccgaggac

SEQ ID NO: 3196945 - DNA, 25 bp, Homo sapien
tcttagctccgaggactgcagacaa

SEQ ID NO: 3196946 - DNA, 25 bp, Homo sapien
gtttatcttagctccgaggactgca

SEQ ID NO: 3196947 - DNA, 25 bp, Homo sapien
atttttgatgtttatcttagctccg

SEQ ID NO: 3196948 - DNA, 25 bp, Homo sapien
gctctctgattctcaactctgaagg

SEQ ID NO: 3196949 - DNA, 25 bp, Homo sapien
gcagaagacagctgtgtacacagct

SEQ ID NO: 3196950 - DNA, 25 bp, Homo sapien
tgtgtacacagctctctgattctca

SEQ ID NO: 3196951 - DNA, 25 bp, Homo sapien
caactctgaaggctcagtggtatca

SEQ ID NO: 3196952 - DNA, 25 bp, Homo sapien
tttgcctcctttaggcttgctttgc

SEQ ID NO: 3196953 - DNA, 25 bp, Homo sapien
tgtgcaatttgtgcattaccctgct

SEQ ID NO: 3196954 - DNA, 25 bp, Homo sapien
aatttgtgcattaccctgcttcttg

SEQ ID NO: 3196955 - DNA, 25 bp, Homo sapien
gcctcctttaggcttgctttgccca

SEQ ID NO: 3196956 - DNA, 25 bp, Homo sapien
tctgctgctagctcatgagttgctg

SEQ ID NO: 3196957 - DNA, 25 bp, Homo sapien
ctcatgagttgctggtggattgttc

SEQ ID NO: 3196958 - DNA, 25 bp, Homo sapien
tcttttctgctgctagctcatgagt

SEQ ID NO: 3196959 - DNA, 25 bp, Homo sapien
tcatgagttgctggtggattgttcg

SEQ ID NO: 3196960 - DNA, 25 bp, Homo sapien
tttagcccctaagccacatgatagg

SEQ ID NO: 3196961 - DNA, 25 bp, Homo sapien
ttcagactgagaccatgagacccat

SEQ ID NO: 3196962 - DNA, 25 bp, Homo sapien
ccatgcctgggaaaacggaatcttc

SEQ ID NO: 3196963 - DNA, 25 bp, Homo sapien
gagagagcctcttgtccgttcatat

SEQ ID NO: 3196964 - DNA, 25 bp, Homo sapien
tctctttagacatgcaggctccttc

SEQ ID NO: 3196965 - DNA, 25 bp, Homo sapien
cttctgagaggtaatgtagaaagac

SEQ ID NO: 3196966 - DNA, 25 bp, Homo sapien
tccagtacttaaacttcacttctct

SEQ ID NO: 3196967 - DNA, 25 bp, Homo sapien
gaaagactgctgaattatggctctt

SEQ ID NO: 3196968 - DNA, 25 bp, Homo sapien
gtgcacgtttctgcccatggtatcc

SEQ ID NO: 3196969 - DNA, 25 bp, Homo sapien
caatgatgagctcctgtaatgactg

SEQ ID NO: 3196970 - DNA, 25 bp, Homo sapien
ccccatcttttcgtataataaccat

SEQ ID NO: 3196971 - DNA, 25 bp, Homo sapien
agtcagcggctctctgcccagaatc

SEQ ID NO: 3196972 - DNA, 25 bp, Homo sapien
ttttcttaggattgaagttcttctg

SEQ ID NO: 3196973 - DNA, 25 bp, Homo sapien
tttcttaggattgaagttcttctgg

SEQ ID NO: 3196974 - DNA, 25 bp, Homo sapien
tcagagtgtcactggcaggacaagt

SEQ ID NO: 3196975 - DNA, 25 bp, Homo sapien
agagtgtcactggcaggacaagtct

SEQ ID NO: 3196976 - DNA, 25 bp, Homo sapien
gtcagagtgtcactggcaggacaag

SEQ ID NO: 3196977 - DNA, 25 bp, Homo sapien
cagagtgtcactggcaggacaagtc

SEQ ID NO: 3196978 - DNA, 25 bp, Homo sapien
ctacagatgtacactgattagaacc

SEQ ID NO: 3196979 - DNA, 25 bp, Homo sapien
tgttgtcccccaatacaaaaatcaa

SEQ ID NO: 3196980 - DNA, 25 bp, Homo sapien
gaaaaatggcattactatctacaga

SEQ ID NO: 3196981 - DNA, 25 bp, Homo sapien
tagaaccatggccttgaaaaggcat

SEQ ID NO: 3196982 - DNA, 25 bp, Homo sapien
tctttgagcaactggcttacgatca

SEQ ID NO: 3196983 - DNA, 25 bp, Homo sapien
aagttcccagtgtcattttgtctcc

SEQ ID NO: 3196984 - DNA, 25 bp, Homo sapien
catacggtgtgcctgaacgttttcc

SEQ ID NO: 3196985 - DNA, 25 bp, Homo sapien
cacactggtctttgagcaactggct

SEQ ID NO: 3196986 - DNA, 25 bp, Homo sapien
ctgggagcatgcagccgatattaac

SEQ ID NO: 3196987 - DNA, 25 bp, Homo sapien
agtgtatagcgctcaatcaaaacat

SEQ ID NO: 3196988 - DNA, 25 bp, Homo sapien
cattcaaaaagtgtatagcgctcaa

SEQ ID NO: 3196989 - DNA, 25 bp, Homo sapien
tattaacagcatcttttacaggtaa

SEQ ID NO: 3196990 - DNA, 25 bp, Homo sapien
gaataaataaatctgtagctcgttg

SEQ ID NO: 3196991 - DNA, 25 bp, Homo sapien
aacaccactgcattcggactagcct

SEQ ID NO: 3196992 - DNA, 25 bp, Homo sapien
taaataaatctgtagctcgttgtga

SEQ ID NO: 3196993 - DNA, 25 bp, Homo sapien
aggaataaataaatctgtagctcgt

SEQ ID NO: 3196994 - DNA, 25 bp, Homo sapien
caaacacagatgcatgggattagga

SEQ ID NO: 3196995 - DNA, 25 bp, Homo sapien
tcagtgagcccagtgaagacggaga

SEQ ID NO: 3196996 - DNA, 25 bp, Homo sapien
gcagatgacctgtgagccaacctta

SEQ ID NO: 3196997 - DNA, 25 bp, Homo sapien
tacaacatggaagaaatcggaaaat

SEQ ID NO: 3196998 - DNA, 25 bp, Homo sapien
ccagtatcagaaagtcgaattgcct

SEQ ID NO: 3196999 - DNA, 25 bp, Homo sapien
gactcactctagattacactgttgg

SEQ ID NO: 3197000 - DNA, 25 bp, Homo sapien
catgcagactgattaacgattacac

SEQ ID NO: 3197001 - DNA, 25 bp, Homo sapien
gattacacagtcctactctcagctg

SEQ ID NO: 3197002 - DNA, 25 bp, Homo sapien
ccaaaaagtctgtatagcagaaagc

SEQ ID NO: 3197003 - DNA, 25 bp, Homo sapien
ccttccatgtggatgtatcgctgtc

SEQ ID NO: 3197004 - DNA, 25 bp, Homo sapien
tatcgctgtctgtgcaacaggcttg

SEQ ID NO: 3197005 - DNA, 25 bp, Homo sapien
tattgctgggcaatacttctgctgt

SEQ ID NO: 3197006 - DNA, 25 bp, Homo sapien
gaacacctggctagaaaccacatcc

SEQ ID NO: 3197007 - DNA, 25 bp, Homo sapien
caagggctcaatctcagtatgaaga

SEQ ID NO: 3197008 - DNA, 25 bp, Homo sapien
tgaagagtcctaaagcatacatttt

SEQ ID NO: 3197009 - DNA, 25 bp, Homo sapien
tcctgagaattcgatatctgatgcc

SEQ ID NO: 3197010 - DNA, 25 bp, Homo sapien
ttgcaccctcctagacactttagcg

SEQ ID NO: 3197011 - DNA, 25 bp, Homo sapien
caatccttagatctacaagcagcac

SEQ ID NO: 3197012 - DNA, 25 bp, Homo sapien
tgggttctgagacacttgttcacaa

SEQ ID NO: 3197013 - DNA, 25 bp, Homo sapien
cgtaagcagccctgatatccctgag

SEQ ID NO: 3197014 - DNA, 25 bp, Homo sapien
taagttttgatatctgaagttgtag

SEQ ID NO: 3197015 - DNA, 25 bp, Homo sapien
tgtaagttttgatatctgaagttgt

SEQ ID NO: 3197016 - DNA, 25 bp, Homo sapien
aagttttgatatctgaagttgtagt

SEQ ID NO: 3197017 - DNA, 25 bp, Homo sapien
gtgtaagttttgatatctgaagttg

SEQ ID NO: 3197018 - DNA, 25 bp, Homo sapien
gacatcgggttcaggttcacaggga

SEQ ID NO: 3197019 - DNA, 25 bp, Homo sapien
tggatatcctttcgttgacatcggg

SEQ ID NO: 3197020 - DNA, 25 bp, Homo sapien
tcctttcgttgacatcgggttcagg

SEQ ID NO: 3197021 - DNA, 25 bp, Homo sapien
caggttcacagggatcatgcaacat

SEQ ID NO: 3197022 - DNA, 25 bp, Homo sapien
tggtgaattttgtggccaccttccg

SEQ ID NO: 3197023 - DNA, 25 bp, Homo sapien
gcagacaaagttgggaaaggccaca

SEQ ID NO: 3197024 - DNA, 25 bp, Homo sapien
ataagctgtgtgcagctgactgtgc

SEQ ID NO: 3197025 - DNA, 25 bp, Homo sapien
agctactggtaagaccccagcttgg

SEQ ID NO: 3197026 - DNA, 25 bp, Homo sapien
gctttagtgtttccacaagtacttc

SEQ ID NO: 3197027 - DNA, 25 bp, Homo sapien
gatttccacatgagatgtctttgat

SEQ ID NO: 3197028 - DNA, 25 bp, Homo sapien
caagtacttctgactagtgggaagt

SEQ ID NO: 3197029 - DNA, 25 bp, Homo sapien
acagtgcctgtgaatccttcatcag

SEQ ID NO: 3197030 - DNA, 25 bp, Homo sapien
gctgtatagctccttttgaccttca

SEQ ID NO: 3197031 - DNA, 25 bp, Homo sapien
gtaacttgaacctatgaagcaatgg

SEQ ID NO: 3197032 - DNA, 25 bp, Homo sapien
ggtacctatttgacttaccatggag

SEQ ID NO: 3197033 - DNA, 25 bp, Homo sapien
taactgtagatggaaaaacttgtgc

SEQ ID NO: 3197034 - DNA, 25 bp, Homo sapien
tagtgtcacacccggcacagcgcga

SEQ ID NO: 3197035 - DNA, 25 bp, Homo sapien
acacccggcacagcgcgaccaggtc

SEQ ID NO: 3197036 - DNA, 25 bp, Homo sapien
gtcacacccggcacagcgcgaccag

SEQ ID NO: 3197037 - DNA, 25 bp, Homo sapien
cgtagtgtcacacccggcacagcgc

SEQ ID NO: 3197038 - DNA, 25 bp, Homo sapien
gaaaagctgcgttcccacacagaag

SEQ ID NO: 3197039 - DNA, 25 bp, Homo sapien
aactagtagaccacgaccagaagac

SEQ ID NO: 3197040 - DNA, 25 bp, Homo sapien
aaggcgaaccctgtaaagctgtggc

SEQ ID NO: 3197041 - DNA, 25 bp, Homo sapien
cgagcagctggcgaacagttccttt

SEQ ID NO: 3197042 - DNA, 25 bp, Homo sapien
ggcaggcagaaaccagataaggcca

SEQ ID NO: 3197043 - DNA, 25 bp, Homo sapien
tacaaactcctcaaaagacacagac

SEQ ID NO: 3197044 - DNA, 25 bp, Homo sapien
cattggagggccaagttactgaaag

SEQ ID NO: 3197045 - DNA, 25 bp, Homo sapien
gataaggccaaactcatgagcttcc

SEQ ID NO: 3197046 - DNA, 25 bp, Homo sapien
taagtgtggcctgaaccagttctgg

SEQ ID NO: 3197047 - DNA, 25 bp, Homo sapien
tctacatgatcaagtttgaggccac

SEQ ID NO: 3197048 - DNA, 25 bp, Homo sapien
gccatcatggatcttacaggtgtta

SEQ ID NO: 3197049 - DNA, 25 bp, Homo sapien
caatttggatcagcatacttcaggt

SEQ ID NO: 3197050 - DNA, 25 bp, Homo sapien
aagctgaagtgtgcaggtctactct

SEQ ID NO: 3197051 - DNA, 25 bp, Homo sapien
ggactaaaaatcatcagatatggaa

SEQ ID NO: 3197052 - DNA, 25 bp, Homo sapien
gtcaagaaaggaccggagctaaaga

SEQ ID NO: 3197053 - DNA, 25 bp, Homo sapien
ttaatgaatctatgataatgaggca

SEQ ID NO: 3197054 - DNA, 25 bp, Homo sapien
gatgactacataataggtacacaca

SEQ ID NO: 3197055 - DNA, 25 bp, Homo sapien
cagaattacaaatgttaggttggtg

SEQ ID NO: 3197056 - DNA, 25 bp, Homo sapien
gaaattagtgtgttatgagttacaa

SEQ ID NO: 3197057 - DNA, 25 bp, Homo sapien
caaattcattgagctcaccaggtct

SEQ ID NO: 3197058 - DNA, 25 bp, Homo sapien
ttcaacttggtgcttttgataatgt

SEQ ID NO: 3197059 - DNA, 25 bp, Homo sapien
cactgatacctgagttagaaagcta

SEQ ID NO: 3197060 - DNA, 25 bp, Homo sapien
tgttgctgagtaacagatctataca

SEQ ID NO: 3197061 - DNA, 25 bp, Homo sapien
tgctgaagccattctactgaccata

SEQ ID NO: 3197062 - DNA, 25 bp, Homo sapien
gaaagctatcataaaagcctaagtg

SEQ ID NO: 3197063 - DNA, 25 bp, Homo sapien
cacacataccaacagactctgctgg

SEQ ID NO: 3197064 - DNA, 25 bp, Homo sapien
gactactggagaaagatggtcacac

SEQ ID NO: 3197065 - DNA, 25 bp, Homo sapien
cacatcagcagaggatatatgtagg

SEQ ID NO: 3197066 - DNA, 25 bp, Homo sapien
cctgcagtcaatgtacatgtggtaa

SEQ ID NO: 3197067 - DNA, 25 bp, Homo sapien
aattgaaatcagcaacaccaagagt

SEQ ID NO: 3197068 - DNA, 25 bp, Homo sapien
attgaaatcagcaacaccaagagtt

SEQ ID NO: 3197069 - DNA, 25 bp, Homo sapien
taattgaaatcagcaacaccaagag

SEQ ID NO: 3197070 - DNA, 25 bp, Homo sapien
ttaattgaaatcagcaacaccaaga

SEQ ID NO: 3197071 - DNA, 25 bp, Homo sapien
ttagctccatccctgacaatttcac

SEQ ID NO: 3197072 - DNA, 25 bp, Homo sapien
ccagtttgctgcttcacaagaacac

SEQ ID NO: 3197073 - DNA, 25 bp, Homo sapien
tcaccagtttgctgcttcacaagaa

SEQ ID NO: 3197074 - DNA, 25 bp, Homo sapien
accagtttgctgcttcacaagaaca

SEQ ID NO: 3197075 - DNA, 25 bp, Homo sapien
gatacaaccaaatttcactgcctac

SEQ ID NO: 3197076 - DNA, 25 bp, Homo sapien
ttaggtatggactcaagtttccctc

SEQ ID NO: 3197077 - DNA, 25 bp, Homo sapien
caaaaggctcaggtccaacacattt

SEQ ID NO: 3197078 - DNA, 25 bp, Homo sapien
ttcttgaaatggagtgtaacagttg

SEQ ID NO: 3197079 - DNA, 25 bp, Homo sapien
tgaagagccttcctgcatgcatgat

SEQ ID NO: 3197080 - DNA, 25 bp, Homo sapien
tagactccagtgatagatgaagagc

SEQ ID NO: 3197081 - DNA, 25 bp, Homo sapien
gcatgattccagagtttgcacatag

SEQ ID NO: 3197082 - DNA, 25 bp, Homo sapien
caacaactaggatttacaatggata

SEQ ID NO: 3197083 - DNA, 25 bp, Homo sapien
aaagctgagcccaaggacgatttca

SEQ ID NO: 3197084 - DNA, 25 bp, Homo sapien
ttaaagctgagcccaaggacgattt

SEQ ID NO: 3197085 - DNA, 25 bp, Homo sapien
taaagctgagcccaaggacgatttc

SEQ ID NO: 3197086 - DNA, 25 bp, Homo sapien
aagctgagcccaaggacgatttcat

SEQ ID NO: 3197087 - DNA, 25 bp, Homo sapien
atacgggcactgcagtaagacacac

SEQ ID NO: 3197088 - DNA, 25 bp, Homo sapien
taccaatacgggcactgcagtaaga

SEQ ID NO: 3197089 - DNA, 25 bp, Homo sapien
catttgtgtctctatggttattgct

SEQ ID NO: 3197090 - DNA, 25 bp, Homo sapien
gctgtcattaccaatacgggcactg

SEQ ID NO: 3197091 - DNA, 25 bp, Homo sapien
cacagaggaggcatatctatttctt

SEQ ID NO: 3197092 - DNA, 25 bp, Homo sapien
tcacagaggaggcatatctatttct

SEQ ID NO: 3197093 - DNA, 25 bp, Homo sapien
aaataaattgaatcactaatcatca

SEQ ID NO: 3197094 - DNA, 25 bp, Homo sapien
agaggaggcatatctatttcttcta

SEQ ID NO: 3197095 - DNA, 25 bp, Homo sapien
ctttgtccccaatcctctaacttga

SEQ ID NO: 3197096 - DNA, 25 bp, Homo sapien
gtccccaatcctctaacttgacatt

SEQ ID NO: 3197097 - DNA, 25 bp, Homo sapien
tccccaatcctctaacttgacattt

SEQ ID NO: 3197098 - DNA, 25 bp, Homo sapien
ttgtccccaatcctctaacttgaca

SEQ ID NO: 3197099 - DNA, 25 bp, Homo sapien
ccttgagtgcttacttctagcaaca

SEQ ID NO: 3197100 - DNA, 25 bp, Homo sapien
ccccactgtcgtggatgtgctctga

SEQ ID NO: 3197101 - DNA, 25 bp, Homo sapien
tgtcactaccacttgttcctgttgc

SEQ ID NO: 3197102 - DNA, 25 bp, Homo sapien
gttttgttggtggaatctctgtctt

SEQ ID NO: 3197103 - DNA, 25 bp, Homo sapien
tcaacaaagacgtgttctcctgagt

SEQ ID NO: 3197104 - DNA, 25 bp, Homo sapien
tgtcaacaaagacgtgttctcctga

SEQ ID NO: 3197105 - DNA, 25 bp, Homo sapien
catcttgtcaacaaagacgtgttct

SEQ ID NO: 3197106 - DNA, 25 bp, Homo sapien
tcttgtcaacaaagacgtgttctcc

SEQ ID NO: 3197107 - DNA, 25 bp, Homo sapien
cattgccaataattgtgaaatgatg

SEQ ID NO: 3197108 - DNA, 25 bp, Homo sapien
gatgaaaccattgaaccattgccaa

SEQ ID NO: 3197109 - DNA, 25 bp, Homo sapien
gaaaccgttcaaagcagatgaaacc

SEQ ID NO: 3197110 - DNA, 25 bp, Homo sapien
cttaatgatagagaagaaaccgttc

SEQ ID NO: 3197111 - DNA, 25 bp, Homo sapien
ttcatcagtaacatagacatattct

SEQ ID NO: 3197112 - DNA, 25 bp, Homo sapien
gttctttataagggccatcttgtac

SEQ ID NO: 3197113 - DNA, 25 bp, Homo sapien
tttcatcagtaacatagacatattc

SEQ ID NO: 3197114 - DNA, 25 bp, Homo sapien
tcaaactactctgaggaagaaacag

SEQ ID NO: 3197115 - DNA, 25 bp, Homo sapien
gaaagggtgaacatatcaaatttaa

SEQ ID NO: 3197116 - DNA, 25 bp, Homo sapien
tagcctaattgcatataataagaaa

SEQ ID NO: 3197117 - DNA, 25 bp, Homo sapien
gagttgttaatttcaatcagctaat

SEQ ID NO: 3197118 - DNA, 25 bp, Homo sapien
tatgagattgtatggtaccttgtcc

SEQ ID NO: 3197119 - DNA, 25 bp, Homo sapien
tagggaagtcatgataggctcctcc

SEQ ID NO: 3197120 - DNA, 25 bp, Homo sapien
tcccacttttgagactagatggttc

SEQ ID NO: 3197121 - DNA, 25 bp, Homo sapien
tatttgctcaagatactgacaacag

SEQ ID NO: 3197122 - DNA, 25 bp, Homo sapien
attagccaagtcattacttaatatg

SEQ ID NO: 3197123 - DNA, 25 bp, Homo sapien
tcattagccaagtcattacttaata

SEQ ID NO: 3197124 - DNA, 25 bp, Homo sapien
cattagccaagtcattacttaatat

SEQ ID NO: 3197125 - DNA, 25 bp, Homo sapien
ctcattagccaagtcattacttaat

SEQ ID NO: 3197126 - DNA, 25 bp, Homo sapien
catgttcaggcttaaggctgctgat

SEQ ID NO: 3197127 - DNA, 25 bp, Homo sapien
gttcaggcttaaggctgctgatcag

SEQ ID NO: 3197128 - DNA, 25 bp, Homo sapien
taaggctgctgatcagcaacgcgac

SEQ ID NO: 3197129 - DNA, 25 bp, Homo sapien
tcagcaacgcgacccccgatatatt

SEQ ID NO: 3197130 - DNA, 25 bp, Homo sapien
ggccacaactgagtccttcgcttct

SEQ ID NO: 3197131 - DNA, 25 bp, Homo sapien
acaactgagtccttcgcttctccag

SEQ ID NO: 3197132 - DNA, 25 bp, Homo sapien
gtccttcgcttctccagaataccaa

SEQ ID NO: 3197133 - DNA, 25 bp, Homo sapien
ccagaataccaaagacacagcgtag

SEQ ID NO: 3197134 - DNA, 25 bp, Homo sapien
tgcagccactgcctgtggttggcat

SEQ ID NO: 3197135 - DNA, 25 bp, Homo sapien
ctctgcagccactgcctgtggttgg

SEQ ID NO: 3197136 - DNA, 25 bp, Homo sapien
cagccactgcctgtggttggcatac

SEQ ID NO: 3197137 - DNA, 25 bp, Homo sapien
tctgcagccactgcctgtggttggc

SEQ ID NO: 3197138 - DNA, 25 bp, Homo sapien
ttatataattagacagcataagcag

SEQ ID NO: 3197139 - DNA, 25 bp, Homo sapien
gcataagcagctgataatcttcaaa

SEQ ID NO: 3197140 - DNA, 25 bp, Homo sapien
aaagcaccgattgacaaagatgttg

SEQ ID NO: 3197141 - DNA, 25 bp, Homo sapien
taatcttcaaagcaccgattgacaa

SEQ ID NO: 3197142 - DNA, 25 bp, Homo sapien
gacccctcgtgatccctggagatgg

SEQ ID NO: 3197143 - DNA, 25 bp, Homo sapien
caagcttcagcataaagatggctgc

SEQ ID NO: 3197144 - DNA, 25 bp, Homo sapien
gagtgggcagcagatccctttccag

SEQ ID NO: 3197145 - DNA, 25 bp, Homo sapien
tgcaagactccacccactacagtgt

SEQ ID NO: 3197146 - DNA, 25 bp, Homo sapien
catgttcctggttgagccctttgct

SEQ ID NO: 3197147 - DNA, 25 bp, Homo sapien
caaatagaggaggtatgactctgga

SEQ ID NO: 3197148 - DNA, 25 bp, Homo sapien
gactctggattggttagtctgcata

SEQ ID NO: 3197149 - DNA, 25 bp, Homo sapien
ttaaagcagaggaatattgacttct

SEQ ID NO: 3197150 - DNA, 25 bp, Homo sapien
tagtagcctgaaacagtagccaagg

SEQ ID NO: 3197151 - DNA, 25 bp, Homo sapien
ttaaacacaagaggcgcaacatgag

SEQ ID NO: 3197152 - DNA, 25 bp, Homo sapien
gatagtgagacaatgcagggaaccc

SEQ ID NO: 3197153 - DNA, 25 bp, Homo sapien
tagccctgagaactaagtaagcaac

SEQ ID NO: 3197154 - DNA, 25 bp, Homo sapien
taggtaagctggcactctcattaaa

SEQ ID NO: 3197155 - DNA, 25 bp, Homo sapien
tgtgtaacaagaggtatctgcttta

SEQ ID NO: 3197156 - DNA, 25 bp, Homo sapien
aattggtccaactcttctggagtga

SEQ ID NO: 3197157 - DNA, 25 bp, Homo sapien
gaatgcctttcacttcacattggga

SEQ ID NO: 3197158 - DNA, 25 bp, Homo sapien
caactgtttattggctccaagctga

SEQ ID NO: 3197159 - DNA, 25 bp, Homo sapien
tattggctccaagctgatctccagc

SEQ ID NO: 3197160 - DNA, 25 bp, Homo sapien
cccttctgtgttacacaactgttta

SEQ ID NO: 3197161 - DNA, 25 bp, Homo sapien
tccaagctgatctccagcagccttt

SEQ ID NO: 3197162 - DNA, 25 bp, Homo sapien
tatgtggagatgttagtacagcagc

SEQ ID NO: 3197163 - DNA, 25 bp, Homo sapien
gtggagatgttagtacagcagcgtc

SEQ ID NO: 3197164 - DNA, 25 bp, Homo sapien
cattggcactatgtggagatgttag

SEQ ID NO: 3197165 - DNA, 25 bp, Homo sapien
ggcactatgtggagatgttagtaca

SEQ ID NO: 3197166 - DNA, 25 bp, Homo sapien
ctgggaatgggcagtctacacatat

SEQ ID NO: 3197167 - DNA, 25 bp, Homo sapien
cacatattaataggctttctttgca

SEQ ID NO: 3197168 - DNA, 25 bp, Homo sapien
ctctggaattatgtccaactaaact

SEQ ID NO: 3197169 - DNA, 25 bp, Homo sapien
tgtcatatctctggaattatgtcca

SEQ ID NO: 3197170 - DNA, 25 bp, Homo sapien
actctcttgggacaggttgattcag

SEQ ID NO: 3197171 - DNA, 25 bp, Homo sapien
caactctcttgggacaggttgattc

SEQ ID NO: 3197172 - DNA, 25 bp, Homo sapien
tctggactcagttcttgtagttccc

SEQ ID NO: 3197173 - DNA, 25 bp, Homo sapien
gctgaacaagtctggactcagttct

SEQ ID NO: 3197174 - DNA, 25 bp, Homo sapien
tgggcaccaactgggcctgactgac

SEQ ID NO: 3197175 - DNA, 25 bp, Homo sapien
tggaccgtagcaactgacctagtgc

SEQ ID NO: 3197176 - DNA, 25 bp, Homo sapien
tgtagagccatttccatgggcacca

SEQ ID NO: 3197177 - DNA, 25 bp, Homo sapien
gaggtgggcatgatatgcagctcca

SEQ ID NO: 3197178 - DNA, 25 bp, Homo sapien
tagcactgttaccacagctacccat

SEQ ID NO: 3197179 - DNA, 25 bp, Homo sapien
ggaaatatctggaaactagcactgt

SEQ ID NO: 3197180 - DNA, 25 bp, Homo sapien
accagagagtagcacatgcagcctg

SEQ ID NO: 3197181 - DNA, 25 bp, Homo sapien
ttccaccagagagtagcacatgcag

SEQ ID NO: 3197182 - DNA, 25 bp, Homo sapien
aacctaaaattcgttctctggaatg

SEQ ID NO: 3197183 - DNA, 25 bp, Homo sapien
acaaaatgctttcggtctagtgcca

SEQ ID NO: 3197184 - DNA, 25 bp, Homo sapien
agtagtaattgcctgctatgcggag

SEQ ID NO: 3197185 - DNA, 25 bp, Homo sapien
gaaggatcagtacccacaattgcaa

SEQ ID NO: 3197186 - DNA, 25 bp, Homo sapien
ggagaataccctctaagctggacca

SEQ ID NO: 3197187 - DNA, 25 bp, Homo sapien
ggatgcaatagatgacccagggaca

SEQ ID NO: 3197188 - DNA, 25 bp, Homo sapien
tccctaaaggaggtgacgtgaacac

SEQ ID NO: 3197189 - DNA, 25 bp, Homo sapien
catccttagcttcagaggagggcag

SEQ ID NO: 3197190 - DNA, 25 bp, Homo sapien
cggtgatattttagttattagacct

SEQ ID NO: 3197191 - DNA, 25 bp, Homo sapien
tagaccttgtgcaggttctttgttc

SEQ ID NO: 3197192 - DNA, 25 bp, Homo sapien
tgttctgtgctagaacttcaatcat

SEQ ID NO: 3197193 - DNA, 25 bp, Homo sapien
cttgtgcaggttctttgttctgtgc

SEQ ID NO: 3197194 - DNA, 25 bp, Homo sapien
cctgcacaccaagaagacttgaagg

SEQ ID NO: 3197195 - DNA, 25 bp, Homo sapien
ctggccagagtcctgcacaccaaga

SEQ ID NO: 3197196 - DNA, 25 bp, Homo sapien
ctaacaggcagtgatgagctcctgg

SEQ ID NO: 3197197 - DNA, 25 bp, Homo sapien
tgcacaccaagaagacttgaaggaa

SEQ ID NO: 3197198 - DNA, 25 bp, Homo sapien
aagttatttagtgtcttagtgctca

SEQ ID NO: 3197199 - DNA, 25 bp, Homo sapien
tttagtgtcttagtgctcagtttcc

SEQ ID NO: 3197200 - DNA, 25 bp, Homo sapien
tatttagtgtcttagtgctcagttt

SEQ ID NO: 3197201 - DNA, 25 bp, Homo sapien
gttatttagtgtcttagtgctcagt

SEQ ID NO: 3197202 - DNA, 25 bp, Homo sapien
tcagcctcttgacttcggaacaggg

SEQ ID NO: 3197203 - DNA, 25 bp, Homo sapien
gggtccggtctgtcaagaagtagca

SEQ ID NO: 3197204 - DNA, 25 bp, Homo sapien
agtagcaacccgagtcagcctcttg

SEQ ID NO: 3197205 - DNA, 25 bp, Homo sapien
ggtggagactgcctgatataaacct

SEQ ID NO: 3197206 - DNA, 25 bp, Homo sapien
taggaattggggcacactgctgaag

SEQ ID NO: 3197207 - DNA, 25 bp, Homo sapien
agccactgcagatccactcaaagat

SEQ ID NO: 3197208 - DNA, 25 bp, Homo sapien
gctgaagccactgcagatccactca

SEQ ID NO: 3197209 - DNA, 25 bp, Homo sapien
cactgcagatccactcaaagatgaa

SEQ ID NO: 3197210 - DNA, 25 bp, Homo sapien
agttttccagatttcttgttgagtc

SEQ ID NO: 3197211 - DNA, 25 bp, Homo sapien
aagttttccagatttcttgttgagt

SEQ ID NO: 3197212 - DNA, 25 bp, Homo sapien
aaagttttccagatttcttgttgag

SEQ ID NO: 3197213 - DNA, 25 bp, Homo sapien
gtgaagaagaatggttttgtctgta

SEQ ID NO: 3197214 - DNA, 25 bp, Homo sapien
aagaagaatggttttgtctgtattg

SEQ ID NO: 3197215 - DNA, 25 bp, Homo sapien
agaatggttttgtctgtattgttta

SEQ ID NO: 3197216 - DNA, 25 bp, Homo sapien
gaagaatggttttgtctgtattgtt

SEQ ID NO: 3197217 - DNA, 25 bp, Homo sapien
gagacaatttttccaaactcgacat

SEQ ID NO: 3197218 - DNA, 25 bp, Homo sapien
gctgaccaaggtcaaaagttgtaaa

SEQ ID NO: 3197219 - DNA, 25 bp, Homo sapien
atgctgaccaaggtcaaaagttgta

SEQ ID NO: 3197220 - DNA, 25 bp, Homo sapien
aaactcgacatgcttgttcatgctg

SEQ ID NO: 3197221 - DNA, 25 bp, Homo sapien
tgaacacttccgcggggcgaacatt

SEQ ID NO: 3197222 - DNA, 25 bp, Homo sapien
cgagtttttctgcactgattgtatc

SEQ ID NO: 3197223 - DNA, 25 bp, Homo sapien
gcggggcgaacattcagctgtttca

SEQ ID NO: 3197224 - DNA, 25 bp, Homo sapien
caccgagtttttctgcactgattgt

SEQ ID NO: 3197225 - DNA, 25 bp, Homo sapien
tgtaggtttgcctctggagcacact

SEQ ID NO: 3197226 - DNA, 25 bp, Homo sapien
tccctgtaggtttgcctctggagca

SEQ ID NO: 3197227 - DNA, 25 bp, Homo sapien
ccctgtaggtttgcctctggagcac

SEQ ID NO: 3197228 - DNA, 25 bp, Homo sapien
tcagaaaccctccctgtaggtttgc

SEQ ID NO: 3197229 - DNA, 25 bp, Homo sapien
tcctcctttgtcattagggctgaca

SEQ ID NO: 3197230 - DNA, 25 bp, Homo sapien
taactgtgccaaatgtgtgctgctt

SEQ ID NO: 3197231 - DNA, 25 bp, Homo sapien
catcatggaggagagttaactgtgc

SEQ ID NO: 3197232 - DNA, 25 bp, Homo sapien
ccatcgttggggatcctagaataaa

SEQ ID NO: 3197233 - DNA, 25 bp, Homo sapien
catgctgtagtctagccagtatgta

SEQ ID NO: 3197234 - DNA, 25 bp, Homo sapien
atatggccctgaataatcatgctgt

SEQ ID NO: 3197235 - DNA, 25 bp, Homo sapien
tcttatgaaccaaattcctgttgcc

SEQ ID NO: 3197236 - DNA, 25 bp, Homo sapien
attgttgagaggattcttatgaacc

SEQ ID NO: 3197237 - DNA, 25 bp, Homo sapien
ggcaaatacctgtttcttgtgctga

SEQ ID NO: 3197238 - DNA, 25 bp, Homo sapien
atacctgtttcttgtgctgagaatg

SEQ ID NO: 3197239 - DNA, 25 bp, Homo sapien
ccctgctaccattggctagattcat

SEQ ID NO: 3197240 - DNA, 25 bp, Homo sapien
tccctgctaccattggctagattca

SEQ ID NO: 3197241 - DNA, 25 bp, Homo sapien
cagctgtgctcagtgtcgggatgca

SEQ ID NO: 3197242 - DNA, 25 bp, Homo sapien
gaagtgtgtccaaatggtcttcggc

SEQ ID NO: 3197243 - DNA, 25 bp, Homo sapien
catacctgttagaaggagaccgcca

SEQ ID NO: 3197244 - DNA, 25 bp, Homo sapien
gagaccgccaggatttgatagaagt

SEQ ID NO: 3197245 - DNA, 25 bp, Homo sapien
tgttggtgtctttgtgataaacccg

SEQ ID NO: 3197246 - DNA, 25 bp, Homo sapien
catggagtatgttggtgtctttgtg

SEQ ID NO: 3197247 - DNA, 25 bp, Homo sapien
gagtatgttggtgtctttgtgataa

SEQ ID NO: 3197248 - DNA, 25 bp, Homo sapien
gtgtctttgtgataaacccgtgcat

SEQ ID NO: 3197249 - DNA, 25 bp, Homo sapien
ccagcagtaatcacacgatacaggt

SEQ ID NO: 3197250 - DNA, 25 bp, Homo sapien
tacaggtatgcctccactggctaaa

SEQ ID NO: 3197251 - DNA, 25 bp, Homo sapien
taatcacacgatacaggtatgcctc

SEQ ID NO: 3197252 - DNA, 25 bp, Homo sapien
tatgcctccactggctaaatcacag

SEQ ID NO: 3197253 - DNA, 25 bp, Homo sapien
aagtctccgaacaagaaagtagtct

SEQ ID NO: 3197254 - DNA, 25 bp, Homo sapien
gaaacataacttgcagacagagtct

SEQ ID NO: 3197255 - DNA, 25 bp, Homo sapien
tacaataggtacatgaaagtctccg

SEQ ID NO: 3197256 - DNA, 25 bp, Homo sapien
tgggaatctgaggagaccttataaa

SEQ ID NO: 3197257 - DNA, 25 bp, Homo sapien
tgtcccatcaaaacctagtttgttg

SEQ ID NO: 3197258 - DNA, 25 bp, Homo sapien
tgagggatagtggtctaaaattctg

SEQ ID NO: 3197259 - DNA, 25 bp, Homo sapien
ttgcatgtatgttcatgagggatag

SEQ ID NO: 3197260 - DNA, 25 bp, Homo sapien
atatgtcccatcaaaacctagtttg

SEQ ID NO: 3197261 - DNA, 25 bp, Homo sapien
accacactgttatttgcctccttgc

SEQ ID NO: 3197262 - DNA, 25 bp, Homo sapien
ctccttgctgacaaaagggcacagg

SEQ ID NO: 3197263 - DNA, 25 bp, Homo sapien
ttcaccacactgttatttgcctcct

SEQ ID NO: 3197264 - DNA, 25 bp, Homo sapien
ctgacaaaagggcacaggagctttt

SEQ ID NO: 3197265 - DNA, 25 bp, Homo sapien
catttacttcctctgaagatgtgat

SEQ ID NO: 3197266 - DNA, 25 bp, Homo sapien
tcatttacttcctctgaagatgtga

SEQ ID NO: 3197267 - DNA, 25 bp, Homo sapien
atttacttcctctgaagatgtgatt

SEQ ID NO: 3197268 - DNA, 25 bp, Homo sapien
cagtcatgcagtttgtgtaaccaac

SEQ ID NO: 3197269 - DNA, 25 bp, Homo sapien
gaagcctagatgctgcccacaaaaa

SEQ ID NO: 3197270 - DNA, 25 bp, Homo sapien
gatactgttgacaagttgtgcagtc

SEQ ID NO: 3197271 - DNA, 25 bp, Homo sapien
ccacacagctgttgcttaggaagcc

SEQ ID NO: 3197272 - DNA, 25 bp, Homo sapien
tgtagtcgaagagtgaatgagaaac

SEQ ID NO: 3197273 - DNA, 25 bp, Homo sapien
gactgtagtcgaagagtgaatgaga

SEQ ID NO: 3197274 - DNA, 25 bp, Homo sapien
ctgtagtcgaagagtgaatgagaaa

SEQ ID NO: 3197275 - DNA, 25 bp, Homo sapien
actgtagtcgaagagtgaatgagaa

SEQ ID NO: 3197276 - DNA, 25 bp, Homo sapien
ctgttcacaaaggtcacatgtgcag

SEQ ID NO: 3197277 - DNA, 25 bp, Homo sapien
agacaaactgtttcaacatcattac

SEQ ID NO: 3197278 - DNA, 25 bp, Homo sapien
accttaggattgtgtatgtgcacac

SEQ ID NO: 3197279 - DNA, 25 bp, Homo sapien
aagagtaaacatagaggacaaggct

SEQ ID NO: 3197280 - DNA, 25 bp, Homo sapien
aataaggcacttacaagacaaactg

SEQ ID NO: 3197281 - DNA, 25 bp, Homo sapien
cgcgaggactgaaaaccaaacactg

SEQ ID NO: 3197282 - DNA, 25 bp, Homo sapien
atgggaacacttggacataggggaa

SEQ ID NO: 3197283 - DNA, 25 bp, Homo sapien
tcagcaaactatcgcgaggactgaa

SEQ ID NO: 3197284 - DNA, 25 bp, Homo sapien
caatgggaacacttggacatagggg

SEQ ID NO: 3197285 - DNA, 25 bp, Homo sapien
gattactatgggcagtgtagtcatt

SEQ ID NO: 3197286 - DNA, 25 bp, Homo sapien
gtagattactatgggcagtgtagtc

SEQ ID NO: 3197287 - DNA, 25 bp, Homo sapien
ctatgggcagtgtagtcattttaat

SEQ ID NO: 3197288 - DNA, 25 bp, Homo sapien
tctgtagattactatgggcagtgta

SEQ ID NO: 3197289 - DNA, 25 bp, Homo sapien
attaccctaggccactgttcagaag

SEQ ID NO: 3197290 - DNA, 25 bp, Homo sapien
gcttatgaggtcttggtaataaatt

SEQ ID NO: 3197291 - DNA, 25 bp, Homo sapien
taagttgtctgtgtagaatgttgat

SEQ ID NO: 3197292 - DNA, 25 bp, Homo sapien
tgtgagtagcgagttttctcagcac

SEQ ID NO: 3197293 - DNA, 25 bp, Homo sapien
tgttagttttcggtcagtgtacgag

SEQ ID NO: 3197294 - DNA, 25 bp, Homo sapien
ttttcggtcagtgtacgagtcacca

SEQ ID NO: 3197295 - DNA, 25 bp, Homo sapien
cagtgtacgagtcaccagtctttag

SEQ ID NO: 3197296 - DNA, 25 bp, Homo sapien
gagtcaccagtctttagagtcatgt

SEQ ID NO: 3197297 - DNA, 25 bp, Homo sapien
gatggatcccattacacgtcacaga

SEQ ID NO: 3197298 - DNA, 25 bp, Homo sapien
tccatactgctcactctatttggga

SEQ ID NO: 3197299 - DNA, 25 bp, Homo sapien
tatggtgatagaaggagcagtcctc

SEQ ID NO: 3197300 - DNA, 25 bp, Homo sapien
gtttatctaaggtaagaggacagca

SEQ ID NO: 3197301 - DNA, 25 bp, Homo sapien
gtctaatgttgacagcttggctttt

SEQ ID NO: 3197302 - DNA, 25 bp, Homo sapien
taatgttgacagcttggctttttgt

SEQ ID NO: 3197303 - DNA, 25 bp, Homo sapien
tctaatgttgacagcttggcttttt

SEQ ID NO: 3197304 - DNA, 25 bp, Homo sapien
atgttgacagcttggctttttgtag

SEQ ID NO: 3197305 - DNA, 25 bp, Homo sapien
tgtagaaccctctcagatgatgttg

SEQ ID NO: 3197306 - DNA, 25 bp, Homo sapien
taaaccatagacagcaaccacagga

SEQ ID NO: 3197307 - DNA, 25 bp, Homo sapien
tccatccagggatccgaggttgacc

SEQ ID NO: 3197308 - DNA, 25 bp, Homo sapien
gaggttgacccatccttatccttgg

SEQ ID NO: 3197309 - DNA, 25 bp, Homo sapien
cagtctgcgtttttgtggctcacag

SEQ ID NO: 3197310 - DNA, 25 bp, Homo sapien
tcttcctgatatcaaaaatagttcc

SEQ ID NO: 3197311 - DNA, 25 bp, Homo sapien
tggagcgctgggttgtctcaaagca

SEQ ID NO: 3197312 - DNA, 25 bp, Homo sapien
aatgtttacatgatccatcttcctg

SEQ ID NO: 3197313 - DNA, 25 bp, Homo sapien
ggaggagcggatactggattcacaa

SEQ ID NO: 3197314 - DNA, 25 bp, Homo sapien
gaggagtgctaatagctatttctgt

SEQ ID NO: 3197315 - DNA, 25 bp, Homo sapien
aattatctgggttaagtgcctgagg

SEQ ID NO: 3197316 - DNA, 25 bp, Homo sapien
gagcggatactggattcacaattat

SEQ ID NO: 3197317 - DNA, 25 bp, Homo sapien
tcagggcactggcatttggagccat

SEQ ID NO: 3197318 - DNA, 25 bp, Homo sapien
ctcagggcactggcatttggagcca

SEQ ID NO: 3197319 - DNA, 25 bp, Homo sapien
cctcagggcactggcatttggagcc

SEQ ID NO: 3197320 - DNA, 25 bp, Homo sapien
tgcctggaacagaacacctgcgagt

SEQ ID NO: 3197321 - DNA, 25 bp, Homo sapien
cagaggccacgggtcattgcctgga

SEQ ID NO: 3197322 - DNA, 25 bp, Homo sapien
agaacacctgcgagtttcatgttcc

SEQ ID NO: 3197323 - DNA, 25 bp, Homo sapien
cccagcagctggtagcttttgcctc

SEQ ID NO: 3197324 - DNA, 25 bp, Homo sapien
tgcccctccccttggtgtcagtgca

SEQ ID NO: 3197325 - DNA, 25 bp, Homo sapien
cttggtgtcagtgcaggatacgtag

SEQ ID NO: 3197326 - DNA, 25 bp, Homo sapien
cactggggttcttgggcaagagcag

SEQ ID NO: 3197327 - DNA, 25 bp, Homo sapien
gggcaagagcaggttttctgcccct

SEQ ID NO: 3197328 - DNA, 25 bp, Homo sapien
agttggatcacattgtacatcagag

SEQ ID NO: 3197329 - DNA, 25 bp, Homo sapien
tattaaaacatagtcgttatttgaa

SEQ ID NO: 3197330 - DNA, 25 bp, Homo sapien
catagtcgttatttgaagttggatc

SEQ ID NO: 3197331 - DNA, 25 bp, Homo sapien
gatcacattgtacatcagagcccat

SEQ ID NO: 3197332 - DNA, 25 bp, Homo sapien
tctgcatctcgtattcttttttaaa

SEQ ID NO: 3197333 - DNA, 25 bp, Homo sapien
tttccgactgaaaagttcgtgagca

SEQ ID NO: 3197334 - DNA, 25 bp, Homo sapien
tgagcacgtggctgtcctgtttttt

SEQ ID NO: 3197335 - DNA, 25 bp, Homo sapien
tttgtttcaccctcagtaaatccac

SEQ ID NO: 3197336 - DNA, 25 bp, Homo sapien
catccttcttaaggatgctagattt

SEQ ID NO: 3197337 - DNA, 25 bp, Homo sapien
tcttaaggatgctagatttatctcc

SEQ ID NO: 3197338 - DNA, 25 bp, Homo sapien
tcatgcttcatccttcttaaggatg

SEQ ID NO: 3197339 - DNA, 25 bp, Homo sapien
gcttcatccttcttaaggatgctag

SEQ ID NO: 3197340 - DNA, 25 bp, Homo sapien
caatttcggtgctgctaaaatgagc

SEQ ID NO: 3197341 - DNA, 25 bp, Homo sapien
attccaatttcggtgctgctaaaat

SEQ ID NO: 3197342 - DNA, 25 bp, Homo sapien
tccaatttcggtgctgctaaaatga

SEQ ID NO: 3197343 - DNA, 25 bp, Homo sapien
aatttcggtgctgctaaaatgagca

SEQ ID NO: 3197344 - DNA, 25 bp, Homo sapien
cttctattgaagaccaatcctgctt

SEQ ID NO: 3197345 - DNA, 25 bp, Homo sapien
ttctattgaagaccaatcctgcttc

SEQ ID NO: 3197346 - DNA, 25 bp, Homo sapien
tgtttctgagagttcattgcaattg

SEQ ID NO: 3197347 - DNA, 25 bp, Homo sapien
agaaaacaactatcaacgtaggatg

SEQ ID NO: 3197348 - DNA, 25 bp, Homo sapien
tcaacgtaggatgtttctgagagtt

SEQ ID NO: 3197349 - DNA, 25 bp, Homo sapien
caactatcaacgtaggatgtttctg

SEQ ID NO: 3197350 - DNA, 25 bp, Homo sapien
tttcagatgatatgtcagcaaggcg

SEQ ID NO: 3197351 - DNA, 25 bp, Homo sapien
agactggtgcaatgaggaaatggcc

SEQ ID NO: 3197352 - DNA, 25 bp, Homo sapien
tgagataaaagtcgtgtgcacaggt

SEQ ID NO: 3197353 - DNA, 25 bp, Homo sapien
ccagctttggtggagtgttgaagac

SEQ ID NO: 3197354 - DNA, 25 bp, Homo sapien
tctcgagtagcccaccatcgtgcct

SEQ ID NO: 3197355 - DNA, 25 bp, Homo sapien
gcctctcgagtagcccaccatcgtg

SEQ ID NO: 3197356 - DNA, 25 bp, Homo sapien
gagtagcccaccatcgtgcctgggt

SEQ ID NO: 3197357 - DNA, 25 bp, Homo sapien
gtagcccaccatcgtgcctgggtaa

SEQ ID NO: 3197358 - DNA, 25 bp, Homo sapien
ctctcactcatgctgagtctgcatt

SEQ ID NO: 3197359 - DNA, 25 bp, Homo sapien
ctttacaactgctccaagatcacaa

SEQ ID NO: 3197360 - DNA, 25 bp, Homo sapien
tctctcactcatgctgagtctgcat

SEQ ID NO: 3197361 - DNA, 25 bp, Homo sapien
tcttgaactttacaactgctccaag

SEQ ID NO: 3197362 - DNA, 25 bp, Homo sapien
gaaactgccctgataagttctcaga

SEQ ID NO: 3197363 - DNA, 25 bp, Homo sapien
taaagtggctactggtgaatccagt

SEQ ID NO: 3197364 - DNA, 25 bp, Homo sapien
gtagcagctggaatcctccaaacag

SEQ ID NO: 3197365 - DNA, 25 bp, Homo sapien
gatgcttgcaacaggttttgtgtag

SEQ ID NO: 3197366 - DNA, 25 bp, Homo sapien
tgtatgggctgtatcccttggttga

SEQ ID NO: 3197367 - DNA, 25 bp, Homo sapien
ttgactcattggagctcaagactgt

SEQ ID NO: 3197368 - DNA, 25 bp, Homo sapien
tgaatagtcctctgtggcgtcagtc

SEQ ID NO: 3197369 - DNA, 25 bp, Homo sapien
gcagctctgctcctttgtatgggct

SEQ ID NO: 3197370 - DNA, 25 bp, Homo sapien
tttcctggtggccgatgataactaa

SEQ ID NO: 3197371 - DNA, 25 bp, Homo sapien
atttcctggtggccgatgataacta

SEQ ID NO: 3197372 - DNA, 25 bp, Homo sapien
ttcctggtggccgatgataactaat

SEQ ID NO: 3197373 - DNA, 25 bp, Homo sapien
caagtaaccttgtactaggcctaat

SEQ ID NO: 3197374 - DNA, 25 bp, Homo sapien
tccaagtaaccttgtactaggccta

SEQ ID NO: 3197375 - DNA, 25 bp, Homo sapien
ccaaaatattcagtcacaaggtcat

SEQ ID NO: 3197376 - DNA, 25 bp, Homo sapien
ttatcgatgtttagttatgatccca

SEQ ID NO: 3197377 - DNA, 25 bp, Homo sapien
tcgatgtttagttatgatcccaaaa

SEQ ID NO: 3197378 - DNA, 25 bp, Homo sapien
tattcagtcacaaggtcatggacag

SEQ ID NO: 3197379 - DNA, 25 bp, Homo sapien
cagggttcgttctcagtagtcggca

SEQ ID NO: 3197380 - DNA, 25 bp, Homo sapien
tagaatctcattcatacgcccagga

SEQ ID NO: 3197381 - DNA, 25 bp, Homo sapien
aagttgttttggaggatgccccagc

SEQ ID NO: 3197382 - DNA, 25 bp, Homo sapien
cacggaaatttcctagaccgcaggg

SEQ ID NO: 3197383 - DNA, 25 bp, Homo sapien
caactgtcctgttgctgtcaacacc

SEQ ID NO: 3197384 - DNA, 25 bp, Homo sapien
aacatgtggtttgcgttgagttcat

SEQ ID NO: 3197385 - DNA, 25 bp, Homo sapien
tcaaaatcagtagtgaacatgtggt

SEQ ID NO: 3197386 - DNA, 25 bp, Homo sapien
atttgttccaggccttatatcccca

SEQ ID NO: 3197387 - DNA, 25 bp, Homo sapien
cttagctctgatgattgagagttgc

SEQ ID NO: 3197388 - DNA, 25 bp, Homo sapien
tctgatgattgagagttgcttttca

SEQ ID NO: 3197389 - DNA, 25 bp, Homo sapien
tagctctgatgattgagagttgctt

SEQ ID NO: 3197390 - DNA, 25 bp, Homo sapien
tgatgattgagagttgcttttcagc

SEQ ID NO: 3197391 - DNA, 25 bp, Homo sapien
tgacctctgtgggagaattttctgg

SEQ ID NO: 3197392 - DNA, 25 bp, Homo sapien
cacccctggacaatcctgatttaat

SEQ ID NO: 3197393 - DNA, 25 bp, Homo sapien
tgtttgacctctgtgggagaatttt

SEQ ID NO: 3197394 - DNA, 25 bp, Homo sapien
acctctgtgggagaattttctggaa

SEQ ID NO: 3197395 - DNA, 25 bp, Homo sapien
atacgtgctgttgctgaatgctact

SEQ ID NO: 3197396 - DNA, 25 bp, Homo sapien
ctgaatgctactggcgcgctgccat

SEQ ID NO: 3197397 - DNA, 25 bp, Homo sapien
tgttgctgaatgctactggcgcgct

SEQ ID NO: 3197398 - DNA, 25 bp, Homo sapien
tgctgttgctgaatgctactggcgc

SEQ ID NO: 3197399 - DNA, 25 bp, Homo sapien
cactttccaggacgaaaatatgcct

SEQ ID NO: 3197400 - DNA, 25 bp, Homo sapien
ggacgaaaatatgcctttggacttc

SEQ ID NO: 3197401 - DNA, 25 bp, Homo sapien
catttaccataacaaccactttcca

SEQ ID NO: 3197402 - DNA, 25 bp, Homo sapien
cataacaaccactttccaggacgaa

SEQ ID NO: 3197403 - DNA, 25 bp, Homo sapien
gagtttgtaggaaggctcacaggtt

SEQ ID NO: 3197404 - DNA, 25 bp, Homo sapien
tagaattcctccagggatggtgctt

SEQ ID NO: 3197405 - DNA, 25 bp, Homo sapien
tttccaaataagtgcccagtagcat

SEQ ID NO: 3197406 - DNA, 25 bp, Homo sapien
gttcgctacattccggattattcca

SEQ ID NO: 3197407 - DNA, 25 bp, Homo sapien
gcagtcaattccctcctggtctttt

SEQ ID NO: 3197408 - DNA, 25 bp, Homo sapien
tctcagtgactgcagtcaattccct

SEQ ID NO: 3197409 - DNA, 25 bp, Homo sapien
gtgactgcagtcaattccctcctgg

SEQ ID NO: 3197410 - DNA, 25 bp, Homo sapien
ggttttctcaactgtctcagtgact

SEQ ID NO: 3197411 - DNA, 25 bp, Homo sapien
aagtctgtttgcttggctgtgtgta

SEQ ID NO: 3197412 - DNA, 25 bp, Homo sapien
gtgtatttcacgtatttcttgcctc

SEQ ID NO: 3197413 - DNA, 25 bp, Homo sapien
catttcagtgtaagtctgtttgctt

SEQ ID NO: 3197414 - DNA, 25 bp, Homo sapien
tttgctgtaccagtgcctaagccag

SEQ ID NO: 3197415 - DNA, 25 bp, Homo sapien
tgtccctccggccaagttgcggttc

SEQ ID NO: 3197416 - DNA, 25 bp, Homo sapien
cgggcacctctacgctgtctctgag

SEQ ID NO: 3197417 - DNA, 25 bp, Homo sapien
cagctcctcggagtttgccgcgggc

SEQ ID NO: 3197418 - DNA, 25 bp, Homo sapien
tctgagctgtccctccggccaagtt

SEQ ID NO: 3197419 - DNA, 25 bp, Homo sapien
ctttctaactgagcggagtcgccgc

SEQ ID NO: 3197420 - DNA, 25 bp, Homo sapien
gaacgagtgattgcaggtcccagct

SEQ ID NO: 3197421 - DNA, 25 bp, Homo sapien
ggaggcactttgcaaactgctgaat

SEQ ID NO: 3197422 - DNA, 25 bp, Homo sapien
gataacctaggagtccgaacgagtg

SEQ ID NO: 3197423 - DNA, 25 bp, Homo sapien
tccaggcagcgcacgagttcttggt

SEQ ID NO: 3197424 - DNA, 25 bp, Homo sapien
aaaagctagaggtccaggcagcgca

SEQ ID NO: 3197425 - DNA, 25 bp, Homo sapien
cgtctgcgtgtagggcgaaaagcta

SEQ ID NO: 3197426 - DNA, 25 bp, Homo sapien
tccgcccgccgctagggaaagtctg

SEQ ID NO: 3197427 - DNA, 25 bp, Homo sapien
cagggtggtgtgtgtgtgagagaaa

SEQ ID NO: 3197428 - DNA, 25 bp, Homo sapien
agcagggtggtgtgtgtgtgagaga

SEQ ID NO: 3197429 - DNA, 25 bp, Homo sapien
gggtggtgtgtgtgtgagagaaaga

SEQ ID NO: 3197430 - DNA, 25 bp, Homo sapien
ggtggtgtgtgtgtgagagaaagag

SEQ ID NO: 3197431 - DNA, 25 bp, Homo sapien
ggacagcagcgtgtccctcgcgatg

SEQ ID NO: 3197432 - DNA, 25 bp, Homo sapien
tctgcttgacagtgtgatggtcccg

SEQ ID NO: 3197433 - DNA, 25 bp, Homo sapien
ttcattctccccgagtggcgctaag

SEQ ID NO: 3197434 - DNA, 25 bp, Homo sapien
atgccgcccgcgagggtcctgtttg

SEQ ID NO: 3197435 - DNA, 25 bp, Homo sapien
cccagagtttccctctattgtgcac

SEQ ID NO: 3197436 - DNA, 25 bp, Homo sapien
aaccccagagtttccctctattgtg

SEQ ID NO: 3197437 - DNA, 25 bp, Homo sapien
tcaaccccagagtttccctctattg

SEQ ID NO: 3197438 - DNA, 25 bp, Homo sapien
accccagagtttccctctattgtgc

SEQ ID NO: 3197439 - DNA, 25 bp, Homo sapien
gaacctggaccacagaatagttgtt

SEQ ID NO: 3197440 - DNA, 25 bp, Homo sapien
cacaggctgagactcaacgttatca

SEQ ID NO: 3197441 - DNA, 25 bp, Homo sapien
tcattgctacatgattgatacagtg

SEQ ID NO: 3197442 - DNA, 25 bp, Homo sapien
gctgctttggtcaacgaacctggac

SEQ ID NO: 3197443 - DNA, 25 bp, Homo sapien
cattacttctagttttagtgcagag

SEQ ID NO: 3197444 - DNA, 25 bp, Homo sapien
cttcatctcttgcatgctctgcctc

SEQ ID NO: 3197445 - DNA, 25 bp, Homo sapien
ttagtgcagagtaacatattgtccc

SEQ ID NO: 3197446 - DNA, 25 bp, Homo sapien
tttctggcattacttctagttttag

SEQ ID NO: 3197447 - DNA, 25 bp, Homo sapien
ctttgctgaaagtactctcgtgcta

SEQ ID NO: 3197448 - DNA, 25 bp, Homo sapien
tatactatggcctacacctccaaat

SEQ ID NO: 3197449 - DNA, 25 bp, Homo sapien
tcctttgctgaaagtactctcgtgc

SEQ ID NO: 3197450 - DNA, 25 bp, Homo sapien
gtactctcgtgctatactatggcct

SEQ ID NO: 3197451 - DNA, 25 bp, Homo sapien
tcatgagcatagaatctgttcaccg

SEQ ID NO: 3197452 - DNA, 25 bp, Homo sapien
gctctttccatgacacgggcatttc

SEQ ID NO: 3197453 - DNA, 25 bp, Homo sapien
taatgcgtgatgcaaaatcatttcc

SEQ ID NO: 3197454 - DNA, 25 bp, Homo sapien
ctgttcaccgaaattaattttgcag

SEQ ID NO: 3197455 - DNA, 25 bp, Homo sapien
ctcgtttcttctgggcataccgagc

SEQ ID NO: 3197456 - DNA, 25 bp, Homo sapien
catcactcgtttcttctgggcatac

SEQ ID NO: 3197457 - DNA, 25 bp, Homo sapien
cactcgtttcttctgggcataccga

SEQ ID NO: 3197458 - DNA, 25 bp, Homo sapien
tcactcgtttcttctgggcataccg

SEQ ID NO: 3197459 - DNA, 25 bp, Homo sapien
ccggaattccgaatccattattgct

SEQ ID NO: 3197460 - DNA, 25 bp, Homo sapien
catcatcagtttgagcttattccac

SEQ ID NO: 3197461 - DNA, 25 bp, Homo sapien
gagcttattccaccggaattccgaa

SEQ ID NO: 3197462 - DNA, 25 bp, Homo sapien
tattgcttcatgagttgaaacctgt

SEQ ID NO: 3197463 - DNA, 25 bp, Homo sapien
cccattggctctgccacactttcaa

SEQ ID NO: 3197464 - DNA, 25 bp, Homo sapien
ggatccttatcctgcagctttttct

SEQ ID NO: 3197465 - DNA, 25 bp, Homo sapien
ccccaggatccttatcctgcagctt

SEQ ID NO: 3197466 - DNA, 25 bp, Homo sapien
tggtccccaggatccttatcctgca

SEQ ID NO: 3197467 - DNA, 25 bp, Homo sapien
cttcggcagcccagtaaagctggca

SEQ ID NO: 3197468 - DNA, 25 bp, Homo sapien
gaggcaggctattttgtcctccagc

SEQ ID NO: 3197469 - DNA, 25 bp, Homo sapien
caaatcaagaatcaggtcgtttatg

SEQ ID NO: 3197470 - DNA, 25 bp, Homo sapien
gtcgtttatgttccacccttcggca

SEQ ID NO: 3197471 - DNA, 25 bp, Homo sapien
agctgggtgccctgtcttgcaacct

SEQ ID NO: 3197472 - DNA, 25 bp, Homo sapien
agaagcactaggccccgaactgcgg

SEQ ID NO: 3197473 - DNA, 25 bp, Homo sapien
tgcaaccttgcgactctctccagga

SEQ ID NO: 3197474 - DNA, 25 bp, Homo sapien
caggagtggcttacagtgttccaga

SEQ ID NO: 3197475 - DNA, 25 bp, Homo sapien
tctggcttctacatctcttgaactg

SEQ ID NO: 3197476 - DNA, 25 bp, Homo sapien
attctggcttctacatctcttgaac

SEQ ID NO: 3197477 - DNA, 25 bp, Homo sapien
cttcaccctgggcatggtccacacc

SEQ ID NO: 3197478 - DNA, 25 bp, Homo sapien
cctctgccagaaggtgcccattctg

SEQ ID NO: 3197479 - DNA, 25 bp, Homo sapien
tatgcttcgatgaaactgacactcc

SEQ ID NO: 3197480 - DNA, 25 bp, Homo sapien
tctttgctgggtatgagtatgcttc

SEQ ID NO: 3197481 - DNA, 25 bp, Homo sapien
ccacatttgtaggaaagcctcttgg

SEQ ID NO: 3197482 - DNA, 25 bp, Homo sapien
tgttcctgagtctgctctttgctgg

SEQ ID NO: 3197483 - DNA, 25 bp, Homo sapien
tgtgaataccttttaacaatcatgc

SEQ ID NO: 3197484 - DNA, 25 bp, Homo sapien
tagaggaatgtttttacttcattcc

SEQ ID NO: 3197485 - DNA, 25 bp, Homo sapien
ctcaaatatttggagtgcctctcaa

SEQ ID NO: 3197486 - DNA, 25 bp, Homo sapien
tcaagaggtgttccactcaaatatt

SEQ ID NO: 3197487 - DNA, 25 bp, Homo sapien
tagggagtttcacgtagacatggtt

SEQ ID NO: 3197488 - DNA, 25 bp, Homo sapien
tgatcctgtggagaacatactgccc

SEQ ID NO: 3197489 - DNA, 25 bp, Homo sapien
ccaccatttagaacatagggaactg

SEQ ID NO: 3197490 - DNA, 25 bp, Homo sapien
tacagatcagctagttcagtcccac

SEQ ID NO: 3197491 - DNA, 25 bp, Homo sapien
tacccatgaaatctaatgtgacatc

SEQ ID NO: 3197492 - DNA, 25 bp, Homo sapien
gagctcaacacttcggttaaggttc

SEQ ID NO: 3197493 - DNA, 25 bp, Homo sapien
cttacccatgaaatctaatgtgaca

SEQ ID NO: 3197494 - DNA, 25 bp, Homo sapien
ttgttcggggagtattgagctcaac

SEQ ID NO: 3197495 - DNA, 25 bp, Homo sapien
gatgttccactctggaccctgctgc

SEQ ID NO: 3197496 - DNA, 25 bp, Homo sapien
catcttgcatagaacgtccttgtgg

SEQ ID NO: 3197497 - DNA, 25 bp, Homo sapien
ctagtaacaagatgttccactctgg

SEQ ID NO: 3197498 - DNA, 25 bp, Homo sapien
tgaccacacgccatcttgcatagaa

SEQ ID NO: 3197499 - DNA, 25 bp, Homo sapien
cagtgaggcaggggccgcggtccat

SEQ ID NO: 3197500 - DNA, 25 bp, Homo sapien
ggatgagggatgaggcagtgaggca

SEQ ID NO: 3197501 - DNA, 25 bp, Homo sapien
aaggatgagggatgaggcagtgagg

SEQ ID NO: 3197502 - DNA, 25 bp, Homo sapien
ccggaagtgcagaaggaaggatgag

SEQ ID NO: 3197503 - DNA, 25 bp, Homo sapien
tctttcggctaagtgaaacagaaag

SEQ ID NO: 3197504 - DNA, 25 bp, Homo sapien
cagaggacatctttcggctaagtga

SEQ ID NO: 3197505 - DNA, 25 bp, Homo sapien
gacatctttcggctaagtgaaacag

SEQ ID NO: 3197506 - DNA, 25 bp, Homo sapien
aagaacagaggacatctttcggcta

SEQ ID NO: 3197507 - DNA, 25 bp, Homo sapien
ctctctggcaagtcagacatcctgg

SEQ ID NO: 3197508 - DNA, 25 bp, Homo sapien
tgagtttctccggtaacttaatatc

SEQ ID NO: 3197509 - DNA, 25 bp, Homo sapien
gctgcccatagtctagcagttctgc

SEQ ID NO: 3197510 - DNA, 25 bp, Homo sapien
actctgctgcccatagtctagcagt

SEQ ID NO: 3197511 - DNA, 25 bp, Homo sapien
tgccacagctgagttgaccttcaca

SEQ ID NO: 3197512 - DNA, 25 bp, Homo sapien
tgtggccttctgtggacaccagtcc

SEQ ID NO: 3197513 - DNA, 25 bp, Homo sapien
ctggtgttccctagatggcttcagg

SEQ ID NO: 3197514 - DNA, 25 bp, Homo sapien
gattccagcagacttgcccgacagt

SEQ ID NO: 3197515 - DNA, 25 bp, Homo sapien
tacttcaccagtctcaacagcctgt

SEQ ID NO: 3197516 - DNA, 25 bp, Homo sapien
gaacccaagggaaccataccatata

SEQ ID NO: 3197517 - DNA, 25 bp, Homo sapien
gtttccctaaagagctctgatgatg

SEQ ID NO: 3197518 - DNA, 25 bp, Homo sapien
actcttttgctcctcatagtgtggg

SEQ ID NO: 3197519 - DNA, 25 bp, Homo sapien
cattcattacataaggctcctcaga

SEQ ID NO: 3197520 - DNA, 25 bp, Homo sapien
gctggaaatgcttcccccttggatc

SEQ ID NO: 3197521 - DNA, 25 bp, Homo sapien
gttaacactgatagagcatacttga

SEQ ID NO: 3197522 - DNA, 25 bp, Homo sapien
ggatcttctagagggacaattctga

SEQ ID NO: 3197523 - DNA, 25 bp, Homo sapien
ttaaagaccatttctgccaacacat

SEQ ID NO: 3197524 - DNA, 25 bp, Homo sapien
tttcttaaagaccatttctgccaac

SEQ ID NO: 3197525 - DNA, 25 bp, Homo sapien
tcttaaagaccatttctgccaacac

SEQ ID NO: 3197526 - DNA, 25 bp, Homo sapien
aagaccatttctgccaacacatttc

SEQ ID NO: 3197527 - DNA, 25 bp, Homo sapien
gttatatctagaagaattccctaaa

SEQ ID NO: 3197528 - DNA, 25 bp, Homo sapien
ctgttctctttagcggaatagttat

SEQ ID NO: 3197529 - DNA, 25 bp, Homo sapien
aaagagaaggatagaagccacaaat

SEQ ID NO: 3197530 - DNA, 25 bp, Homo sapien
gagaaggatagaagccacaaatcct

SEQ ID NO: 3197531 - DNA, 25 bp, Homo sapien
tctgtcacactggtaccttttgaaa

SEQ ID NO: 3197532 - DNA, 25 bp, Homo sapien
caaccgtcgcaagatttctgtcaca

SEQ ID NO: 3197533 - DNA, 25 bp, Homo sapien
gctcttcacatcaaccgtcgcaaga

SEQ ID NO: 3197534 - DNA, 25 bp, Homo sapien
ttttgtgaagtaagctcttcacatc

SEQ ID NO: 3197535 - DNA, 25 bp, Homo sapien
accatcatgtcttggatagagatct

SEQ ID NO: 3197536 - DNA, 25 bp, Homo sapien
gtagtgatgtagtagcagccaccag

SEQ ID NO: 3197537 - DNA, 25 bp, Homo sapien
gagttcgcaggacctgagtagccat

SEQ ID NO: 3197538 - DNA, 25 bp, Homo sapien
tcatgtcttggatagagatctgaga

SEQ ID NO: 3197539 - DNA, 25 bp, Homo sapien
gtttccatgatggagcccagctcac

SEQ ID NO: 3197540 - DNA, 25 bp, Homo sapien
gaaatatgtcttatggggccaagga

SEQ ID NO: 3197541 - DNA, 25 bp, Homo sapien
gaagactgaaggtatagagaatttt

SEQ ID NO: 3197542 - DNA, 25 bp, Homo sapien
agatgtttccatgatggagcccagc

SEQ ID NO: 3197543 - DNA, 25 bp, Homo sapien
gcataggtgatctacccagacagga

SEQ ID NO: 3197544 - DNA, 25 bp, Homo sapien
acctttgtcagacaggcccagccat

SEQ ID NO: 3197545 - DNA, 25 bp, Homo sapien
tggactttaacatgtcttgcatagg

SEQ ID NO: 3197546 - DNA, 25 bp, Homo sapien
ccagacaggagttttcaaagacggt

SEQ ID NO: 3197547 - DNA, 25 bp, Homo sapien
caatctgaaatagttgatcatagtg

SEQ ID NO: 3197548 - DNA, 25 bp, Homo sapien
tcaagtactaaacttgttcagaatg

SEQ ID NO: 3197549 - DNA, 25 bp, Homo sapien
agtgataacggggagagccttcaat

SEQ ID NO: 3197550 - DNA, 25 bp, Homo sapien
gtactaaacttgttcagaatgtcaa

SEQ ID NO: 3197551 - DNA, 25 bp, Homo sapien
gaagagtttgtatcctgacggttac

SEQ ID NO: 3197552 - DNA, 25 bp, Homo sapien
tgacggttacgggaatctacacttg

SEQ ID NO: 3197553 - DNA, 25 bp, Homo sapien
taaagggcattaggctgagcgaaga

SEQ ID NO: 3197554 - DNA, 25 bp, Homo sapien
ccaaaatgttctacaagaggtggat

SEQ ID NO: 3197555 - DNA, 25 bp, Homo sapien
ctgtgttgctggcattccttcctca

SEQ ID NO: 3197556 - DNA, 25 bp, Homo sapien
ccctgtgttgctggcattccttcct

SEQ ID NO: 3197557 - DNA, 25 bp, Homo sapien
tgtgttgctggcattccttcctcat

SEQ ID NO: 3197558 - DNA, 25 bp, Homo sapien
tccctgtgttgctggcattccttcc

SEQ ID NO: 3197559 - DNA, 25 bp, Homo sapien
aatgagattcatttaccaaagaggt

SEQ ID NO: 3197560 - DNA, 25 bp, Homo sapien
gacacagtagttaaattctccccac

SEQ ID NO: 3197561 - DNA, 25 bp, Homo sapien
tatttcccacagctccaagaacact

SEQ ID NO: 3197562 - DNA, 25 bp, Homo sapien
caagcctgggtctcctacatgagaa

SEQ ID NO: 3197563 - DNA, 25 bp, Homo sapien
tcaccagggtggactttgaacccaa

SEQ ID NO: 3197564 - DNA, 25 bp, Homo sapien
taaatgcagacttccagttgcagac

SEQ ID NO: 3197565 - DNA, 25 bp, Homo sapien
tccttccggtgaacttaaatgcaga

SEQ ID NO: 3197566 - DNA, 25 bp, Homo sapien
ttgaacccaatatcacctcctggct

SEQ ID NO: 3197567 - DNA, 25 bp, Homo sapien
gtatgacagtgagctgctccaagat

SEQ ID NO: 3197568 - DNA, 25 bp, Homo sapien
agggaggccttgcacctgcgtatga

SEQ ID NO: 3197569 - DNA, 25 bp, Homo sapien
cacctgcgtatgacagtgagctgct

SEQ ID NO: 3197570 - DNA, 25 bp, Homo sapien
tctcagcctcaatgtactcatccat

SEQ ID NO: 3197571 - DNA, 25 bp, Homo sapien
ttggccatggcatcctggtactgtt

SEQ ID NO: 3197572 - DNA, 25 bp, Homo sapien
tcaaactctgtcttccttggccatg

SEQ ID NO: 3197573 - DNA, 25 bp, Homo sapien
ccatggcatcctggtactgttggta

SEQ ID NO: 3197574 - DNA, 25 bp, Homo sapien
caaactctgtcttccttggccatgg

SEQ ID NO: 3197575 - DNA, 25 bp, Homo sapien
cacagaggattccagtcatctggaa

SEQ ID NO: 3197576 - DNA, 25 bp, Homo sapien
acagaggattccagtcatctggaaa

SEQ ID NO: 3197577 - DNA, 25 bp, Homo sapien
cagaggattccagtcatctggaaaa

SEQ ID NO: 3197578 - DNA, 25 bp, Homo sapien
cgaaccgtctctgtactagcctttt

SEQ ID NO: 3197579 - DNA, 25 bp, Homo sapien
ggaaggcacattcgaaccgtctctg

SEQ ID NO: 3197580 - DNA, 25 bp, Homo sapien
tcagagaaggaaggcacattcgaac

SEQ ID NO: 3197581 - DNA, 25 bp, Homo sapien
tttgaggatgcagctcagagaagga

SEQ ID NO: 3197582 - DNA, 25 bp, Homo sapien
agcaccattgcccaacacaaggctg

SEQ ID NO: 3197583 - DNA, 25 bp, Homo sapien
cattaacttccaaagcaccattgcc

SEQ ID NO: 3197584 - DNA, 25 bp, Homo sapien
tgtaggacaggaagggtgcaccacc

SEQ ID NO: 3197585 - DNA, 25 bp, Homo sapien
gccctggtggagacagtgtaggaca

SEQ ID NO: 3197586 - DNA, 25 bp, Homo sapien
gtgagttctcatctgataatttttt

SEQ ID NO: 3197587 - DNA, 25 bp, Homo sapien
ctgtgagttctcatctgataatttt

SEQ ID NO: 3197588 - DNA, 25 bp, Homo sapien
cttctgtgagttctcatctgataat

SEQ ID NO: 3197589 - DNA, 25 bp, Homo sapien
tctgtgagttctcatctgataattt

SEQ ID NO: 3197590 - DNA, 25 bp, Homo sapien
ctgtcaagattctgcccatattcct

SEQ ID NO: 3197591 - DNA, 25 bp, Homo sapien
ttccttagacgctctcacttcaatg

SEQ ID NO: 3197592 - DNA, 25 bp, Homo sapien
gctctcacttcaatgtggtccagat

SEQ ID NO: 3197593 - DNA, 25 bp, Homo sapien
cacttcaatgtggtccagataaatt

SEQ ID NO: 3197594 - DNA, 25 bp, Homo sapien
aatcctctgttgacaaacaccatta

SEQ ID NO: 3197595 - DNA, 25 bp, Homo sapien
ttatggctctttcccaatcctctgt

SEQ ID NO: 3197596 - DNA, 25 bp, Homo sapien
tggctctttcccaatcctctgttga

SEQ ID NO: 3197597 - DNA, 25 bp, Homo sapien
atcctctgttgacaaacaccattac

SEQ ID NO: 3197598 - DNA, 25 bp, Homo sapien
ttactccaggctctgtatctgttgt

SEQ ID NO: 3197599 - DNA, 25 bp, Homo sapien
tctgttgttatgtcgtattcctgtg

SEQ ID NO: 3197600 - DNA, 25 bp, Homo sapien
actccaggctctgtatctgttgtta

SEQ ID NO: 3197601 - DNA, 25 bp, Homo sapien
ccaggctctgtatctgttgttatgt

SEQ ID NO: 3197602 - DNA, 25 bp, Homo sapien
tgaaattcgtaggtaccaaagtaca

SEQ ID NO: 3197603 - DNA, 25 bp, Homo sapien
aattcgtaggtaccaaagtacaatg

SEQ ID NO: 3197604 - DNA, 25 bp, Homo sapien
cacccacggggtatgaaggacaagg

SEQ ID NO: 3197605 - DNA, 25 bp, Homo sapien
tcacacccacggggtatgaaggaca

SEQ ID NO: 3197606 - DNA, 25 bp, Homo sapien
gggaacatttatttacctagttgca

SEQ ID NO: 3197607 - DNA, 25 bp, Homo sapien
tataattctatactaaactctaaag

SEQ ID NO: 3197608 - DNA, 25 bp, Homo sapien
tagttgcagcgtggaaatagagtcc

SEQ ID NO: 3197609 - DNA, 25 bp, Homo sapien
taaaatgtcacatcagcaacccagg

SEQ ID NO: 3197610 - DNA, 25 bp, Homo sapien
gacattagctatgggtggctctgag

SEQ ID NO: 3197611 - DNA, 25 bp, Homo sapien
caaagacttcgagcacatgggacaa

SEQ ID NO: 3197612 - DNA, 25 bp, Homo sapien
gaggtcctttgaatcccaggcatat

SEQ ID NO: 3197613 - DNA, 25 bp, Homo sapien
gagcccgtgctaactttgttctgaa

SEQ ID NO: 3197614 - DNA, 25 bp, Homo sapien
tgaatagcaatttgttctcctcttg

SEQ ID NO: 3197615 - DNA, 25 bp, Homo sapien
atagcaatttgttctcctcttgcca

SEQ ID NO: 3197616 - DNA, 25 bp, Homo sapien
aatagcaatttgttctcctcttgcc

SEQ ID NO: 3197617 - DNA, 25 bp, Homo sapien
tttgaatagcaatttgttctcctct

SEQ ID NO: 3197618 - DNA, 25 bp, Homo sapien
tcaatgtgggtggccaaaatcagct

SEQ ID NO: 3197619 - DNA, 25 bp, Homo sapien
tgaggaggtatagtagacgaagagc

SEQ ID NO: 3197620 - DNA, 25 bp, Homo sapien
tatgggatactgaagcggcatctcg

SEQ ID NO: 3197621 - DNA, 25 bp, Homo sapien
tagacgaagagcagccaaaggtatg

SEQ ID NO: 3197622 - DNA, 25 bp, Homo sapien
tgaatcgaatgagtaggcacaaagg

SEQ ID NO: 3197623 - DNA, 25 bp, Homo sapien
agagacttaggacacagcctcggca

SEQ ID NO: 3197624 - DNA, 25 bp, Homo sapien
tcctgagcattgatggaacagagac

SEQ ID NO: 3197625 - DNA, 25 bp, Homo sapien
gcctcggcacaatgcattcaatgga

SEQ ID NO: 3197626 - DNA, 25 bp, Homo sapien
tggccttttctcctcgtatttaaca

SEQ ID NO: 3197627 - DNA, 25 bp, Homo sapien
tttcttgcagttttactgctttcat

SEQ ID NO: 3197628 - DNA, 25 bp, Homo sapien
aagcaccatcagcataataatttac

SEQ ID NO: 3197629 - DNA, 25 bp, Homo sapien
aatcaacgttgaccctggcatctgg

SEQ ID NO: 3197630 - DNA, 25 bp, Homo sapien
gcaagtgtagtgataccaatcccat

SEQ ID NO: 3197631 - DNA, 25 bp, Homo sapien
gctttcatgatcctacttgagggct

SEQ ID NO: 3197632 - DNA, 25 bp, Homo sapien
tcttggagaacgactgtggaatgtc

SEQ ID NO: 3197633 - DNA, 25 bp, Homo sapien
cctcttagcagcacgtggctccttt

SEQ ID NO: 3197634 - DNA, 25 bp, Homo sapien
cttagcagcacgtggctccttttcc

SEQ ID NO: 3197635 - DNA, 25 bp, Homo sapien
gactgtcagggaaagacataatttc

SEQ ID NO: 3197636 - DNA, 25 bp, Homo sapien
gcttctcactgactgtcagggaaag

SEQ ID NO: 3197637 - DNA, 25 bp, Homo sapien
tcagtgattggaactggtgctagaa

SEQ ID NO: 3197638 - DNA, 25 bp, Homo sapien
cttggtactgaatgcgagtccagct

SEQ ID NO: 3197639 - DNA, 25 bp, Homo sapien
catgataaggctggcttggtactga

SEQ ID NO: 3197640 - DNA, 25 bp, Homo sapien
gctagaaggtactaggctacatgat

SEQ ID NO: 3197641 - DNA, 25 bp, Homo sapien
ttaggtctgaagtactggcaaagca

SEQ ID NO: 3197642 - DNA, 25 bp, Homo sapien
taggtctgaagtactggcaaagcaa

SEQ ID NO: 3197643 - DNA, 25 bp, Homo sapien
aggtctgaagtactggcaaagcaag

SEQ ID NO: 3197644 - DNA, 25 bp, Homo sapien
gtttactgtattcaccttcctgatt

SEQ ID NO: 3197645 - DNA, 25 bp, Homo sapien
gaggtgtttactgtattcaccttcc

SEQ ID NO: 3197646 - DNA, 25 bp, Homo sapien
ttcctgattatctggtgaagaggaa

SEQ ID NO: 3197647 - DNA, 25 bp, Homo sapien
ctgattatctggtgaagaggaaggt

SEQ ID NO: 3197648 - DNA, 25 bp, Homo sapien
agtgatcaaggtttgtatcaaaacc

SEQ ID NO: 3197649 - DNA, 25 bp, Homo sapien
caagtagtgatcaaggtttgtatca

SEQ ID NO: 3197650 - DNA, 25 bp, Homo sapien
ctgaccaagtagtgatcaaggtttg

SEQ ID NO: 3197651 - DNA, 25 bp, Homo sapien
gaccaagtagtgatcaaggtttgta

SEQ ID NO: 3197652 - DNA, 25 bp, Homo sapien
gagctgctccttcaagtgaatcatc

SEQ ID NO: 3197653 - DNA, 25 bp, Homo sapien
tcactgatttgggcagtagggactg

SEQ ID NO: 3197654 - DNA, 25 bp, Homo sapien
ccttcaagtgaatcatctaaacttg

SEQ ID NO: 3197655 - DNA, 25 bp, Homo sapien
gcaaggtctttgatgtggtcactga

SEQ ID NO: 3197656 - DNA, 25 bp, Homo sapien
gggattggtttgtattccagtccca

SEQ ID NO: 3197657 - DNA, 25 bp, Homo sapien
taggtttgagccgtgagaagcgtct

SEQ ID NO: 3197658 - DNA, 25 bp, Homo sapien
tagagaaggtgaggtagagccctaa

SEQ ID NO: 3197659 - DNA, 25 bp, Homo sapien
tatgtagtattacccctgagcagga

SEQ ID NO: 3197660 - DNA, 25 bp, Homo sapien
cctcaccaggaaggaattaagatct

SEQ ID NO: 3197661 - DNA, 25 bp, Homo sapien
tgtattgctaggttctgtttttata

SEQ ID NO: 3197662 - DNA, 25 bp, Homo sapien
aatgtgtattgctaggttctgtttt

SEQ ID NO: 3197663 - DNA, 25 bp, Homo sapien
tcaatgtgtattgctaggttctgtt

SEQ ID NO: 3197664 - DNA, 25 bp, Homo sapien
ccttctgtctcggagggagagccat

SEQ ID NO: 3197665 - DNA, 25 bp, Homo sapien
gctggcccaaaggacactagagagt

SEQ ID NO: 3197666 - DNA, 25 bp, Homo sapien
gtcacagagattacccacttgggag

SEQ ID NO: 3197667 - DNA, 25 bp, Homo sapien
gcactgcccgtgttagctgatatat

SEQ ID NO: 3197668 - DNA, 25 bp, Homo sapien
gctcctggtgatttctcttggttcc

SEQ ID NO: 3197669 - DNA, 25 bp, Homo sapien
cttatctgtttaactcttaagttca

SEQ ID NO: 3197670 - DNA, 25 bp, Homo sapien
tcttggttccttatctgtttaactc

SEQ ID NO: 3197671 - DNA, 25 bp, Homo sapien
ctgtttacccgtggcctgtgctgct

SEQ ID NO: 3197672 - DNA, 25 bp, Homo sapien
cttttcatgagtgaatgtgtaaaag

SEQ ID NO: 3197673 - DNA, 25 bp, Homo sapien
tttcatgagtgaatgtgtaaaagtg

SEQ ID NO: 3197674 - DNA, 25 bp, Homo sapien
catgagtgaatgtgtaaaagtgggc

SEQ ID NO: 3197675 - DNA, 25 bp, Homo sapien
tcatgagtgaatgtgtaaaagtggg

SEQ ID NO: 3197676 - DNA, 25 bp, Homo sapien
acgtggccggatttgtgtgcgctcc

SEQ ID NO: 3197677 - DNA, 25 bp, Homo sapien
gttcttcccgctgagcgccctccgg

SEQ ID NO: 3197678 - DNA, 25 bp, Homo sapien
gggacatcgcttccacttttcttgt

SEQ ID NO: 3197679 - DNA, 25 bp, Homo sapien
tgccttcgcgcgcaacagctggtga

SEQ ID NO: 3197680 - DNA, 25 bp, Homo sapien
tatgctgcgacgagggacttttagg

SEQ ID NO: 3197681 - DNA, 25 bp, Homo sapien
aactttgtatgctgcgacgagggac

SEQ ID NO: 3197682 - DNA, 25 bp, Homo sapien
tttgtatgctgcgacgagggacttt

SEQ ID NO: 3197683 - DNA, 25 bp, Homo sapien
tgcgacgagggacttttaggatttg

SEQ ID NO: 3197684 - DNA, 25 bp, Homo sapien
agtctgggtgagtggtcgcagcccg

SEQ ID NO: 3197685 - DNA, 25 bp, Homo sapien
gcacttgggtcccacagtctgggtg

SEQ ID NO: 3197686 - DNA, 25 bp, Homo sapien
ttcagcgtctgcatctcggcgtcgc

SEQ ID NO: 3197687 - DNA, 25 bp, Homo sapien
tgcagctgccggatccttcagcgtc

SEQ ID NO: 3197688 - DNA, 25 bp, Homo sapien
agctaactatggctgtattcttgcc

SEQ ID NO: 3197689 - DNA, 25 bp, Homo sapien
gcttttgtggagctagtggaatgaa

SEQ ID NO: 3197690 - DNA, 25 bp, Homo sapien
ttgtggagctagtggaatgaaagac

SEQ ID NO: 3197691 - DNA, 25 bp, Homo sapien
aatgaaagactgagctaactatggc

SEQ ID NO: 3197692 - DNA, 25 bp, Homo sapien
aactggtctcaatcgcctaggcaca

SEQ ID NO: 3197693 - DNA, 25 bp, Homo sapien
gagggagaaactggtctcaatcgcc

SEQ ID NO: 3197694 - DNA, 25 bp, Homo sapien
gagaaactggtctcaatcgcctagg

SEQ ID NO: 3197695 - DNA, 25 bp, Homo sapien
ggtctcaatcgcctaggcacactaa

SEQ ID NO: 3197696 - DNA, 25 bp, Homo sapien
atcttatgctcagtgtcacctgtca

SEQ ID NO: 3197697 - DNA, 25 bp, Homo sapien
tagtgccaaggcatcagactgggga

SEQ ID NO: 3197698 - DNA, 25 bp, Homo sapien
actggggaaggatcttatgctcagt

SEQ ID NO: 3197699 - DNA, 25 bp, Homo sapien
gaaggatcttatgctcagtgtcacc

SEQ ID NO: 3197700 - DNA, 25 bp, Homo sapien
cttgcagccccctgaatttggacaa

SEQ ID NO: 3197701 - DNA, 25 bp, Homo sapien
gactactgggatagaatacatttca

SEQ ID NO: 3197702 - DNA, 25 bp, Homo sapien
ttgcaaggacagtctggtattctag

SEQ ID NO: 3197703 - DNA, 25 bp, Homo sapien
ggacaataaagttccagcttatcat

SEQ ID NO: 3197704 - DNA, 25 bp, Homo sapien
tcaccgcacatctgccttctccagc

SEQ ID NO: 3197705 - DNA, 25 bp, Homo sapien
caccgcacatctgccttctccagcg

SEQ ID NO: 3197706 - DNA, 25 bp, Homo sapien
aaattaattgggaacgcagcggagc

SEQ ID NO: 3197707 - DNA, 25 bp, Homo sapien
tctgatggcacgtgacttctgaagc

SEQ ID NO: 3197708 - DNA, 25 bp, Homo sapien
tacaaatgggcaatgatagctggct

SEQ ID NO: 3197709 - DNA, 25 bp, Homo sapien
agagaattcgccctttggagccgga

SEQ ID NO: 3197710 - DNA, 25 bp, Homo sapien
acggaacccgatctttccttgcgcg

SEQ ID NO: 3197711 - DNA, 25 bp, Homo sapien
cgatctttccttgcgcgccgctgct

SEQ ID NO: 3197712 - DNA, 25 bp, Homo sapien
gtgttgggtcaccggccccacaggc

SEQ ID NO: 3197713 - DNA, 25 bp, Homo sapien
tgttgggtcaccggccccacaggca

SEQ ID NO: 3197714 - DNA, 25 bp, Homo sapien
cttcttctcttcgatggcacggagt

SEQ ID NO: 3197715 - DNA, 25 bp, Homo sapien
tcttcgatggcacggagtaggaagc

SEQ ID NO: 3197716 - DNA, 25 bp, Homo sapien
cagtttgagagtggcgtttccttca

SEQ ID NO: 3197717 - DNA, 25 bp, Homo sapien
taggaagcggcgttcgcagtttgag

SEQ ID NO: 3197718 - DNA, 25 bp, Homo sapien
agcgcccacgcagcgcgcaattctg

SEQ ID NO: 3197719 - DNA, 25 bp, Homo sapien
caattctgcgggcaccaaaccatac

SEQ ID NO: 3197720 - DNA, 25 bp, Homo sapien
cttgagacccgagcgcccacgcagc

SEQ ID NO: 3197721 - DNA, 25 bp, Homo sapien
agcgcgcaattctgcgggcaccaaa

SEQ ID NO: 3197722 - DNA, 25 bp, Homo sapien
catggacaactgctgcggtgactgg

SEQ ID NO: 3197723 - DNA, 25 bp, Homo sapien
cagcccgcccatacaggaaagtgga

SEQ ID NO: 3197724 - DNA, 25 bp, Homo sapien
caactactttttgtctggccctggg

SEQ ID NO: 3197725 - DNA, 25 bp, Homo sapien
gctgcggtgactggagccttgaaaa

SEQ ID NO: 3197726 - DNA, 25 bp, Homo sapien
ttccacaatgcagcatccgtaatct

SEQ ID NO: 3197727 - DNA, 25 bp, Homo sapien
tttccaagttccacaatgcagcatc

SEQ ID NO: 3197728 - DNA, 25 bp, Homo sapien
cataggtttgtctgccatccagccg

SEQ ID NO: 3197729 - DNA, 25 bp, Homo sapien
aatctgttccaaatgagatcctgat

SEQ ID NO: 3197730 - DNA, 25 bp, Homo sapien
gttgcccgattgagttttggagaca

SEQ ID NO: 3197731 - DNA, 25 bp, Homo sapien
aaaagaataccttctgttgcccgat

SEQ ID NO: 3197732 - DNA, 25 bp, Homo sapien
gaataccttctgttgcccgattgag

SEQ ID NO: 3197733 - DNA, 25 bp, Homo sapien
cttctgttgcccgattgagttttgg

SEQ ID NO: 3197734 - DNA, 25 bp, Homo sapien
ccaggttcgaaagctggagcggcca

SEQ ID NO: 3197735 - DNA, 25 bp, Homo sapien
caggttcgaaagctggagcggccat

SEQ ID NO: 3197736 - DNA, 25 bp, Homo sapien
tgccaggttcgaaagctggagcggc

SEQ ID NO: 3197737 - DNA, 25 bp, Homo sapien
ctgccaggttcgaaagctggagcgg

SEQ ID NO: 3197738 - DNA, 25 bp, Homo sapien
tctttccatgagtcgattcaacttc

SEQ ID NO: 3197739 - DNA, 25 bp, Homo sapien
tagacatctttccatgagtcgattc

SEQ ID NO: 3197740 - DNA, 25 bp, Homo sapien
gagactcagtgtctatacacttcga

SEQ ID NO: 3197741 - DNA, 25 bp, Homo sapien
tacacttcgaatttcttagacatct

SEQ ID NO: 3197742 - DNA, 25 bp, Homo sapien
tatttatcaggaaaagtaacattgt

SEQ ID NO: 3197743 - DNA, 25 bp, Homo sapien
aatcctaactgattacaaccagtgg

SEQ ID NO: 3197744 - DNA, 25 bp, Homo sapien
caggaaaagtaacattgtgtacaaa

SEQ ID NO: 3197745 - DNA, 25 bp, Homo sapien
tgattacaaccagtggctatttatc

SEQ ID NO: 3197746 - DNA, 25 bp, Homo sapien
gagacatcaggtcttcggaaatgac

SEQ ID NO: 3197747 - DNA, 25 bp, Homo sapien
gtaggtctacacgtatttgccaaac

SEQ ID NO: 3197748 - DNA, 25 bp, Homo sapien
gatttaataaatgtaggtctacacg

SEQ ID NO: 3197749 - DNA, 25 bp, Homo sapien
gacataaggccacgattgcagcaat

SEQ ID NO: 3197750 - DNA, 25 bp, Homo sapien
caaatgggcatgtggtggatactta

SEQ ID NO: 3197751 - DNA, 25 bp, Homo sapien
tacaggatcacgctcttcaggtgta

SEQ ID NO: 3197752 - DNA, 25 bp, Homo sapien
ggtggatacttaatggtacaggatc

SEQ ID NO: 3197753 - DNA, 25 bp, Homo sapien
aaaggcaaaactgacacaaatgggc

SEQ ID NO: 3197754 - DNA, 25 bp, Homo sapien
ttttggcccataataaggcgaggct

SEQ ID NO: 3197755 - DNA, 25 bp, Homo sapien
gcaataaaattcctagctgcatttg

SEQ ID NO: 3197756 - DNA, 25 bp, Homo sapien
gagaaagttctttgccaactaatgc

SEQ ID NO: 3197757 - DNA, 25 bp, Homo sapien
aacatgacatacttgagtagagcaa

SEQ ID NO: 3197758 - DNA, 25 bp, Homo sapien
aaatctctcgatgtttgttcatggc

SEQ ID NO: 3197759 - DNA, 25 bp, Homo sapien
tggactggatagtacaaatctctcg

SEQ ID NO: 3197760 - DNA, 25 bp, Homo sapien
tggcaatcaccagcaagccatccat

SEQ ID NO: 3197761 - DNA, 25 bp, Homo sapien
cacacgttcttctcgttcattggga

SEQ ID NO: 3197762 - DNA, 25 bp, Homo sapien
ttgatcttttagtagcattatccca

SEQ ID NO: 3197763 - DNA, 25 bp, Homo sapien
tgatcttttagtagcattatcccac

SEQ ID NO: 3197764 - DNA, 25 bp, Homo sapien
caatattagctctgtaatttctgct

SEQ ID NO: 3197765 - DNA, 25 bp, Homo sapien
tggtcattctccaaagctttcaata

SEQ ID NO: 3197766 - DNA, 25 bp, Homo sapien
accagcgattttactgcatctcaga

SEQ ID NO: 3197767 - DNA, 25 bp, Homo sapien
tactttcacaccagcgattttactg

SEQ ID NO: 3197768 - DNA, 25 bp, Homo sapien
gatttgctatagactctgcaaaacc

SEQ ID NO: 3197769 - DNA, 25 bp, Homo sapien
ttctacatccgaggtatcaataggg

SEQ ID NO: 3197770 - DNA, 25 bp, Homo sapien
tgatcctttgatttgctatagactc

SEQ ID NO: 3197771 - DNA, 25 bp, Homo sapien
ctgctttttcttctacatccgaggt

SEQ ID NO: 3197772 - DNA, 25 bp, Homo sapien
tgtaagattgattcaagtgtgcccc

SEQ ID NO: 3197773 - DNA, 25 bp, Homo sapien
cttgtaagattgattcaagtgtgcc

SEQ ID NO: 3197774 - DNA, 25 bp, Homo sapien
taagattgattcaagtgtgccccaa

SEQ ID NO: 3197775 - DNA, 25 bp, Homo sapien
gtaagattgattcaagtgtgcccca

SEQ ID NO: 3197776 - DNA, 25 bp, Homo sapien
tcaagaatgatagcttgatcaccac

SEQ ID NO: 3197777 - DNA, 25 bp, Homo sapien
tccaggagtccatagcacaggtgta

SEQ ID NO: 3197778 - DNA, 25 bp, Homo sapien
aatttgggcagttccaggagtccat

SEQ ID NO: 3197779 - DNA, 25 bp, Homo sapien
tcagagtcttcaagatcaccccagg

SEQ ID NO: 3197780 - DNA, 25 bp, Homo sapien
gcaagaaacgtctaggactaccagt

SEQ ID NO: 3197781 - DNA, 25 bp, Homo sapien
gcgatgtctagcatggtagccacta

SEQ ID NO: 3197782 - DNA, 25 bp, Homo sapien
cctacaggtgcttgaatggtgtgac

SEQ ID NO: 3197783 - DNA, 25 bp, Homo sapien
gaaatttgagtaagggtcccaatca

SEQ ID NO: 3197784 - DNA, 25 bp, Homo sapien
caggaactcgagtccagtctggcca

SEQ ID NO: 3197785 - DNA, 25 bp, Homo sapien
ctgaggtcaggaactcgagtccagt

SEQ ID NO: 3197786 - DNA, 25 bp, Homo sapien
gtcaggaactcgagtccagtctggc

SEQ ID NO: 3197787 - DNA, 25 bp, Homo sapien
ggaactcgagtccagtctggccaac

SEQ ID NO: 3197788 - DNA, 25 bp, Homo sapien
ttaagcaatctcttgcaaaatttat

SEQ ID NO: 3197789 - DNA, 25 bp, Homo sapien
ctatcagacgttctaaactcttatt

SEQ ID NO: 3197790 - DNA, 25 bp, Homo sapien
tctatcagacgttctaaactcttat

SEQ ID NO: 3197791 - DNA, 25 bp, Homo sapien
tctttggattcttgtctggttccaa

SEQ ID NO: 3197792 - DNA, 25 bp, Homo sapien
tgtctggttccaaaatgatcatttc

SEQ ID NO: 3197793 - DNA, 25 bp, Homo sapien
ttcttgtctggttccaaaatgatca

SEQ ID NO: 3197794 - DNA, 25 bp, Homo sapien
ttttctttggattcttgtctggttc

SEQ ID NO: 3197795 - DNA, 25 bp, Homo sapien
gagtaagactggcatccaagaagtt

SEQ ID NO: 3197796 - DNA, 25 bp, Homo sapien
agagcaaacctctataagtgttgag

SEQ ID NO: 3197797 - DNA, 25 bp, Homo sapien
ttatagtcatgtggcaagatgagag

SEQ ID NO: 3197798 - DNA, 25 bp, Homo sapien
tttccagtaggatctaaaatgtgtc

SEQ ID NO: 3197799 - DNA, 25 bp, Homo sapien
tttttcttgttttgcactggtggtc

SEQ ID NO: 3197800 - DNA, 25 bp, Homo sapien
tttcactggctttttacttggtgct

SEQ ID NO: 3197801 - DNA, 25 bp, Homo sapien
tttcttgttttgcactggtggtctg

SEQ ID NO: 3197802 - DNA, 25 bp, Homo sapien
ttaattggcagctctcttctttttt

SEQ ID NO: 3197803 - DNA, 25 bp, Homo sapien
atatacagatatacaactgttagct

SEQ ID NO: 3197804 - DNA, 25 bp, Homo sapien
cccttttaatagttatatatacaga

SEQ ID NO: 3197805 - DNA, 25 bp, Homo sapien
tatcccttttaatagttatatatac

SEQ ID NO: 3197806 - DNA, 25 bp, Homo sapien
tatatacagatatacaactgttagc

SEQ ID NO: 3197807 - DNA, 25 bp, Homo sapien
tgctccagaaggtttattattttaa

SEQ ID NO: 3197808 - DNA, 25 bp, Homo sapien
aagagggtgggaagcttatatgcaa

SEQ ID NO: 3197809 - DNA, 25 bp, Homo sapien
gaggtaaactcaacagaggttggga

SEQ ID NO: 3197810 - DNA, 25 bp, Homo sapien
taggttttgcgaggtaaactcaaca

SEQ ID NO: 3197811 - DNA, 25 bp, Homo sapien
gcttatatgcaaattaacagacgag

SEQ ID NO: 3197812 - DNA, 25 bp, Homo sapien
ggtgaactctggcattgttcccatc

SEQ ID NO: 3197813 - DNA, 25 bp, Homo sapien
ttttcagctacttggtgaactctgg

SEQ ID NO: 3197814 - DNA, 25 bp, Homo sapien
tctggcattgttcccatctcgagaa

SEQ ID NO: 3197815 - DNA, 25 bp, Homo sapien
catgaaacatgttttcctaagactt

SEQ ID NO: 3197816 - DNA, 25 bp, Homo sapien
tcaagaagggcagactcacgaattt

SEQ ID NO: 3197817 - DNA, 25 bp, Homo sapien
aaatgctggacttggctcagtgcta

SEQ ID NO: 3197818 - DNA, 25 bp, Homo sapien
ttagacatgctgtaaccagtggagc

SEQ ID NO: 3197819 - DNA, 25 bp, Homo sapien
taagaagagcttacacagagtcggg

SEQ ID NO: 3197820 - DNA, 25 bp, Homo sapien
tgaaatcggtcagaatctagcaggc

SEQ ID NO: 3197821 - DNA, 25 bp, Homo sapien
tctctgtggaaaccgccctgtatgg

SEQ ID NO: 3197822 - DNA, 25 bp, Homo sapien
caataatggccatgaggcaggcgga

SEQ ID NO: 3197823 - DNA, 25 bp, Homo sapien
aaaatctcggaattcgccactcaag

SEQ ID NO: 3197824 - DNA, 25 bp, Homo sapien
tataccgtgtctggatgtcctgcaa

SEQ ID NO: 3197825 - DNA, 25 bp, Homo sapien
tggatgtcctgcaatactaggtgtg

SEQ ID NO: 3197826 - DNA, 25 bp, Homo sapien
ctgcaatactaggtgtgtggtggac

SEQ ID NO: 3197827 - DNA, 25 bp, Homo sapien
gagtataccgtgtctggatgtcctg

SEQ ID NO: 3197828 - DNA, 25 bp, Homo sapien
gacatgcctgtgcttcgcctcgtgt

SEQ ID NO: 3197829 - DNA, 25 bp, Homo sapien
aaatctggcaacttgccatccaggg

SEQ ID NO: 3197830 - DNA, 25 bp, Homo sapien
ccttgggccatgtagggttaccact

SEQ ID NO: 3197831 - DNA, 25 bp, Homo sapien
tgcacgtctactaccaaaatctggc

SEQ ID NO: 3197832 - DNA, 25 bp, Homo sapien
taccttctatgtggaactcaagctg

SEQ ID NO: 3197833 - DNA, 25 bp, Homo sapien
cttctatgtggaactcaagctgctt

SEQ ID NO: 3197834 - DNA, 25 bp, Homo sapien
ccttctatgtggaactcaagctgct

SEQ ID NO: 3197835 - DNA, 25 bp, Homo sapien
tactaccttctatgtggaactcaag

SEQ ID NO: 3197836 - DNA, 25 bp, Homo sapien
gcaattgctggtcacctcccctgtt

SEQ ID NO: 3197837 - DNA, 25 bp, Homo sapien
actttaatggcaattgctggtcacc

SEQ ID NO: 3197838 - DNA, 25 bp, Homo sapien
taatggcaattgctggtcacctccc

SEQ ID NO: 3197839 - DNA, 25 bp, Homo sapien
agaggcaaactttaatggcaattgc

SEQ ID NO: 3197840 - DNA, 25 bp, Homo sapien
aagggatggagagtaagtgagccac

SEQ ID NO: 3197841 - DNA, 25 bp, Homo sapien
tggagagtaagtgagccaccaacgc

SEQ ID NO: 3197842 - DNA, 25 bp, Homo sapien
ggatggagagtaagtgagccaccaa

SEQ ID NO: 3197843 - DNA, 25 bp, Homo sapien
gaaagggatggagagtaagtgagcc

SEQ ID NO: 3197844 - DNA, 25 bp, Homo sapien
gaatgcattggatatcagcactgac

SEQ ID NO: 3197845 - DNA, 25 bp, Homo sapien
gaaggcaggaatgcattggatatca

SEQ ID NO: 3197846 - DNA, 25 bp, Homo sapien
ttggatatcagcactgacacaggac

SEQ ID NO: 3197847 - DNA, 25 bp, Homo sapien
gcaggaatgcattggatatcagcac

SEQ ID NO: 3197848 - DNA, 25 bp, Homo sapien
ccgatattcttattgttcctaacct

SEQ ID NO: 3197849 - DNA, 25 bp, Homo sapien
ctacatgtttcacaccgtcgctggg

SEQ ID NO: 3197850 - DNA, 25 bp, Homo sapien
cctgcatttttctggcgggagttcc

SEQ ID NO: 3197851 - DNA, 25 bp, Homo sapien
tctcaagacaagtgaagcctacatg

SEQ ID NO: 3197852 - DNA, 25 bp, Homo sapien
agatattctcagtggtgtcccttcc

SEQ ID NO: 3197853 - DNA, 25 bp, Homo sapien
cttccattccaataacagatattct

SEQ ID NO: 3197854 - DNA, 25 bp, Homo sapien
attccaataacagatattctcagtg

SEQ ID NO: 3197855 - DNA, 25 bp, Homo sapien
gatattctcagtggtgtcccttcca

SEQ ID NO: 3197856 - DNA, 25 bp, Homo sapien
gcaatggccaaagacacgataatga

SEQ ID NO: 3197857 - DNA, 25 bp, Homo sapien
agttcagagctcttgttaaatgtgc

SEQ ID NO: 3197858 - DNA, 25 bp, Homo sapien
ttctgtttcataccagaagttcaga

SEQ ID NO: 3197859 - DNA, 25 bp, Homo sapien
tgtgcaatggccaaagacacgataa

SEQ ID NO: 3197860 - DNA, 25 bp, Homo sapien
cccctccacagcgtttcatgtgatt

SEQ ID NO: 3197861 - DNA, 25 bp, Homo sapien
gagcctgctgtgaggtattgtgcat

SEQ ID NO: 3197862 - DNA, 25 bp, Homo sapien
ctccacagcgtttcatgtgattaaa

SEQ ID NO: 3197863 - DNA, 25 bp, Homo sapien
cctgctgtgaggtattgtgcatgga

SEQ ID NO: 3197864 - DNA, 25 bp, Homo sapien
gattgcacaacagaagagcacatcc

SEQ ID NO: 3197865 - DNA, 25 bp, Homo sapien
gatcacacctttggattgcacaaca

SEQ ID NO: 3197866 - DNA, 25 bp, Homo sapien
aaggtggcaggtgcagccgatcaca

SEQ ID NO: 3197867 - DNA, 25 bp, Homo sapien
gcaatgtgtcaggtgccgcttcacc

SEQ ID NO: 3197868 - DNA, 25 bp, Homo sapien
acagcctctttagcagacgcgatgt

SEQ ID NO: 3197869 - DNA, 25 bp, Homo sapien
ctctttagcagacgcgatgttcatg

SEQ ID NO: 3197870 - DNA, 25 bp, Homo sapien
tgctctaagggaacagcctctttag

SEQ ID NO: 3197871 - DNA, 25 bp, Homo sapien
tctgctctaagggaacagcctcttt

SEQ ID NO: 3197872 - DNA, 25 bp, Homo sapien
ccttaaccagtcactaattttcact

SEQ ID NO: 3197873 - DNA, 25 bp, Homo sapien
tacagtggcacaccttaaccagtca

SEQ ID NO: 3197874 - DNA, 25 bp, Homo sapien
ccactcaccctctgccaggagctaa

SEQ ID NO: 3197875 - DNA, 25 bp, Homo sapien
caggagagctgacttgggactcctg

SEQ ID NO: 3197876 - DNA, 25 bp, Homo sapien
caccctctgccaggagctaagtaag

SEQ ID NO: 3197877 - DNA, 25 bp, Homo sapien
ttcccaccatccctcggcaagctca

SEQ ID NO: 3197878 - DNA, 25 bp, Homo sapien
actgctgtaaacaccctataacctc

SEQ ID NO: 3197879 - DNA, 25 bp, Homo sapien
ccactgctgtaaacaccctataacc

SEQ ID NO: 3197880 - DNA, 25 bp, Homo sapien
cactgctgtaaacaccctataacct

SEQ ID NO: 3197881 - DNA, 25 bp, Homo sapien
cctggtgatcatgttctggctcctg

SEQ ID NO: 3197882 - DNA, 25 bp, Homo sapien
tgcctacatccgtggcagggctctg

SEQ ID NO: 3197883 - DNA, 25 bp, Homo sapien
taatataaatgatgggcggcctcct

SEQ ID NO: 3197884 - DNA, 25 bp, Homo sapien
tgggacaccccagtatgtggacgag

SEQ ID NO: 3197885 - DNA, 25 bp, Homo sapien
ctccttcatctgagagaggggcact

SEQ ID NO: 3197886 - DNA, 25 bp, Homo sapien
atctgagagaggggcactggtgcaa

SEQ ID NO: 3197887 - DNA, 25 bp, Homo sapien
ctgagagaggggcactggtgcaacc

SEQ ID NO: 3197888 - DNA, 25 bp, Homo sapien
gagagaggggcactggtgcaaccat

SEQ ID NO: 3197889 - DNA, 25 bp, Homo sapien
acttacctactaatagcctgttgac

SEQ ID NO: 3197890 - DNA, 25 bp, Homo sapien
cactgcgccagcctagtaattatgt

SEQ ID NO: 3197891 - DNA, 25 bp, Homo sapien
gactgcatacagtcgaaaatccatg

SEQ ID NO: 3197892 - DNA, 25 bp, Homo sapien
actcctaaaatcaagcaattgccca

SEQ ID NO: 3197893 - DNA, 25 bp, Homo sapien
tcgtggcctccctgaagttatcctc

SEQ ID NO: 3197894 - DNA, 25 bp, Homo sapien
aaataaggctttcgtggcctccctg

SEQ ID NO: 3197895 - DNA, 25 bp, Homo sapien
cagattaaataaggctttcgtggcc

SEQ ID NO: 3197896 - DNA, 25 bp, Homo sapien
agcttctgagtcagattaaataagg

SEQ ID NO: 3197897 - DNA, 25 bp, Homo sapien
cagccaccgacacccaagggggcgg

SEQ ID NO: 3197898 - DNA, 25 bp, Homo sapien
gccgcagccaccgacacccaagggg

SEQ ID NO: 3197899 - DNA, 25 bp, Homo sapien
gcagccaccgacacccaagggggcg

SEQ ID NO: 3197900 - DNA, 25 bp, Homo sapien
cgcagccaccgacacccaagggggc

SEQ ID NO: 3197901 - DNA, 25 bp, Homo sapien
cgagtgccgaggcagcccgaaatcc

SEQ ID NO: 3197902 - DNA, 25 bp, Homo sapien
agcaccgagccggatgcagcctgcg

SEQ ID NO: 3197903 - DNA, 25 bp, Homo sapien
agtgccgaggcagcccgaaatccct

SEQ ID NO: 3197904 - DNA, 25 bp, Homo sapien
tgcagcctgcgaagctctgccggtg

SEQ ID NO: 3197905 - DNA, 25 bp, Homo sapien
ctgacgacctcaaccccgtctggcc

SEQ ID NO: 3197906 - DNA, 25 bp, Homo sapien
tgacgacctcaaccccgtctggccc

SEQ ID NO: 3197907 - DNA, 25 bp, Homo sapien
cagccatccgactgccatggccctt

SEQ ID NO: 3197908 - DNA, 25 bp, Homo sapien
tcctgtatcaaagtccccagccatc

SEQ ID NO: 3197909 - DNA, 25 bp, Homo sapien
ccgcaggaactgctcctgtatcaaa

SEQ ID NO: 3197910 - DNA, 25 bp, Homo sapien
atcacccgcaggaactgctcctgta

SEQ ID NO: 3197911 - DNA, 25 bp, Homo sapien
tgcgggtgcacggtccttcctgccg

SEQ ID NO: 3197912 - DNA, 25 bp, Homo sapien
ggtgcacggtccttcctgccgagtc

SEQ ID NO: 3197913 - DNA, 25 bp, Homo sapien
agcctgcgggtgcacggtccttcct

SEQ ID NO: 3197914 - DNA, 25 bp, Homo sapien
gcctgcgggtgcacggtccttcctg

SEQ ID NO: 3197915 - DNA, 25 bp, Homo sapien
cagagtttgcaacgttctgtttttc

SEQ ID NO: 3197916 - DNA, 25 bp, Homo sapien
ttctgcagtgtttcatcttaacaaa

SEQ ID NO: 3197917 - DNA, 25 bp, Homo sapien
tctgcagtgtttcatcttaacaaac

SEQ ID NO: 3197918 - DNA, 25 bp, Homo sapien
ttttccagagtttgcaacgttctgt

SEQ ID NO: 3197919 - DNA, 25 bp, Homo sapien
agtgatctcatccattgccgttgct

SEQ ID NO: 3197920 - DNA, 25 bp, Homo sapien
cacggatgcctcagatttaatggac

SEQ ID NO: 3197921 - DNA, 25 bp, Homo sapien
taaatggccccagaatctactcagt

SEQ ID NO: 3197922 - DNA, 25 bp, Homo sapien
gatggtggctagaaactaccctgac

SEQ ID NO: 3197923 - DNA, 25 bp, Homo sapien
gctaaactagtgagccatcatggaa

SEQ ID NO: 3197924 - DNA, 25 bp, Homo sapien
ggatccacataatagccaattcctg

SEQ ID NO: 3197925 - DNA, 25 bp, Homo sapien
ggtctccatccagcagctaaactag

SEQ ID NO: 3197926 - DNA, 25 bp, Homo sapien
tcttaagccacttggatcaggaacc

SEQ ID NO: 3197927 - DNA, 25 bp, Homo sapien
tgactgcaaggacacactcagcttg

SEQ ID NO: 3197928 - DNA, 25 bp, Homo sapien
acacctgtgataccctgctgagtgc

SEQ ID NO: 3197929 - DNA, 25 bp, Homo sapien
gctgctttctgactgcaaggacaca

SEQ ID NO: 3197930 - DNA, 25 bp, Homo sapien
cattatgaacacctgtgataccctg

SEQ ID NO: 3197931 - DNA, 25 bp, Homo sapien
ctaaagtttttccagaacaacatct

SEQ ID NO: 3197932 - DNA, 25 bp, Homo sapien
tttttccagaacaacatctaaaggc

SEQ ID NO: 3197933 - DNA, 25 bp, Homo sapien
taaagtttttccagaacaacatcta

SEQ ID NO: 3197934 - DNA, 25 bp, Homo sapien
agtttttccagaacaacatctaaag

SEQ ID NO: 3197935 - DNA, 25 bp, Homo sapien
tactaggaacaatactctcattctt

SEQ ID NO: 3197936 - DNA, 25 bp, Homo sapien
gagttatactaggaacaatactctc

SEQ ID NO: 3197937 - DNA, 25 bp, Homo sapien
aacattggaattgtgttctgtaaga

SEQ ID NO: 3197938 - DNA, 25 bp, Homo sapien
aatcttctaattgagttatactagg

SEQ ID NO: 3197939 - DNA, 25 bp, Homo sapien
gccatgcttgtataatctgttaaga

SEQ ID NO: 3197940 - DNA, 25 bp, Homo sapien
taatatgtgaggtaaataatccatc

SEQ ID NO: 3197941 - DNA, 25 bp, Homo sapien
cattccgggaattataatatgtgag

SEQ ID NO: 3197942 - DNA, 25 bp, Homo sapien
actagtgttaaaataagaccaacat

SEQ ID NO: 3197943 - DNA, 25 bp, Homo sapien
taaccaagcggatattatcatgaag

SEQ ID NO: 3197944 - DNA, 25 bp, Homo sapien
tatcatgaagtaatggagtgctgtg

SEQ ID NO: 3197945 - DNA, 25 bp, Homo sapien
ggtaaaggacataaccaagcggata

SEQ ID NO: 3197946 - DNA, 25 bp, Homo sapien
catgaagtaatggagtgctgtgtga

SEQ ID NO: 3197947 - DNA, 25 bp, Homo sapien
agatttcacgaaccatgacttttcc

SEQ ID NO: 3197948 - DNA, 25 bp, Homo sapien
tgtaatgtaatagatttcacgaacc

SEQ ID NO: 3197949 - DNA, 25 bp, Homo sapien
taatgtaatagatttcacgaaccat

SEQ ID NO: 3197950 - DNA, 25 bp, Homo sapien
aatagatttcacgaaccatgacttt

SEQ ID NO: 3197951 - DNA, 25 bp, Homo sapien
ccgaaaaatgatgaatccatcttga

SEQ ID NO: 3197952 - DNA, 25 bp, Homo sapien
tgggttatacattttccaccaccga

SEQ ID NO: 3197953 - DNA, 25 bp, Homo sapien
cattttccaccaccgaaaaatgatg

SEQ ID NO: 3197954 - DNA, 25 bp, Homo sapien
caccaccgaaaaatgatgaatccat

SEQ ID NO: 3197955 - DNA, 25 bp, Homo sapien
tcagtatttaggatatttgtgtgaa

SEQ ID NO: 3197956 - DNA, 25 bp, Homo sapien
gaagaaggtccatttgaactaatat

SEQ ID NO: 3197957 - DNA, 25 bp, Homo sapien
ctctttgtggatatttacactagat

SEQ ID NO: 3197958 - DNA, 25 bp, Homo sapien
aagtagagaagaaggtccatttgaa

SEQ ID NO: 3197959 - DNA, 25 bp, Homo sapien
cattgactgtgatgtataacctggt

SEQ ID NO: 3197960 - DNA, 25 bp, Homo sapien
tgaaggcgtccataaagatccgagc

SEQ ID NO: 3197961 - DNA, 25 bp, Homo sapien
gtggaattattgttggctccaaacc

SEQ ID NO: 3197962 - DNA, 25 bp, Homo sapien
agatccgagcgattatagacatgaa

SEQ ID NO: 3197963 - DNA, 25 bp, Homo sapien
tgctcacattgacctttatgactgg

SEQ ID NO: 3197964 - DNA, 25 bp, Homo sapien
tgacctttatgactggaataagtga

SEQ ID NO: 3197965 - DNA, 25 bp, Homo sapien
gactggaataagtgatctccatgaa

SEQ ID NO: 3197966 - DNA, 25 bp, Homo sapien
taagtgatctccatgaagatgtggg

SEQ ID NO: 3197967 - DNA, 25 bp, Homo sapien
gaagaccaacatatcttggactagg

SEQ ID NO: 3197968 - DNA, 25 bp, Homo sapien
aaagttgatgcacagagtttgcggc

SEQ ID NO: 3197969 - DNA, 25 bp, Homo sapien
agtttgcggctggtagtgatttcca

SEQ ID NO: 3197970 - DNA, 25 bp, Homo sapien
actaggaacaagcatgactcgaaca

SEQ ID NO: 3197971 - DNA, 25 bp, Homo sapien
caggccagccaagagttacaactaa

SEQ ID NO: 3197972 - DNA, 25 bp, Homo sapien
tccatgatcttgaagagtgaggcca

SEQ ID NO: 3197973 - DNA, 25 bp, Homo sapien
cagtcaccgcgatactcaaaaagga

SEQ ID NO: 3197974 - DNA, 25 bp, Homo sapien
gaaatgtcaagtgggtctcaaaact

SEQ ID NO: 3197975 - DNA, 25 bp, Homo sapien
tgactgcatcaccacaaaaccttct

SEQ ID NO: 3197976 - DNA, 25 bp, Homo sapien
atttgactgcatcaccacaaaacct

SEQ ID NO: 3197977 - DNA, 25 bp, Homo sapien
ttgactgcatcaccacaaaaccttc

SEQ ID NO: 3197978 - DNA, 25 bp, Homo sapien
actgcatcaccacaaaaccttctcc

SEQ ID NO: 3197979 - DNA, 25 bp, Homo sapien
aatctgttcctttaccacaaactat

SEQ ID NO: 3197980 - DNA, 25 bp, Homo sapien
atatccagtccccaacatggaggca

SEQ ID NO: 3197981 - DNA, 25 bp, Homo sapien
ttgtaatttgcaatcctcactgctc

SEQ ID NO: 3197982 - DNA, 25 bp, Homo sapien
gcctatcggcccatggtccataatt

SEQ ID NO: 3197983 - DNA, 25 bp, Homo sapien
tttcagaacttgatagtcaggtgga

SEQ ID NO: 3197984 - DNA, 25 bp, Homo sapien
ttcagaacttgatagtcaggtggaa

SEQ ID NO: 3197985 - DNA, 25 bp, Homo sapien
taatattcattcgtaattcaaaagc

SEQ ID NO: 3197986 - DNA, 25 bp, Homo sapien
aaaagcaaggatctgtcttggtctc

SEQ ID NO: 3197987 - DNA, 25 bp, Homo sapien
taattcaaaagcaaggatctgtctt

SEQ ID NO: 3197988 - DNA, 25 bp, Homo sapien
caataatattcattcgtaattcaaa

SEQ ID NO: 3197989 - DNA, 25 bp, Homo sapien
taatttctaaatatgagccagctcc

SEQ ID NO: 3197990 - DNA, 25 bp, Homo sapien
ttctaaatatgagccagctcctaca

SEQ ID NO: 3197991 - DNA, 25 bp, Homo sapien
tgagccagctcctacatttacatgt

SEQ ID NO: 3197992 - DNA, 25 bp, Homo sapien
aatatgagccagctcctacatttac

SEQ ID NO: 3197993 - DNA, 25 bp, Homo sapien
tccgatattgcatgctggtagtggc

SEQ ID NO: 3197994 - DNA, 25 bp, Homo sapien
tccacatgtaagagttgtcccttaa

SEQ ID NO: 3197995 - DNA, 25 bp, Homo sapien
gcttctaaaagggtccgatattgca

SEQ ID NO: 3197996 - DNA, 25 bp, Homo sapien
gttgtcccttaatagcaggagtgta

SEQ ID NO: 3197997 - DNA, 25 bp, Homo sapien
tttataaacctctaattcacactgc

SEQ ID NO: 3197998 - DNA, 25 bp, Homo sapien
gtctgcggcatgttccatattcggg

SEQ ID NO: 3197999 - DNA, 25 bp, Homo sapien
catattcgggggtagctggcattga

SEQ ID NO: 3198000 - DNA, 25 bp, Homo sapien
tgaagtggtaagtggctttataaac

SEQ ID NO: 3198001 - DNA, 25 bp, Homo sapien
tgttgtttagtagaacagtcgatcc

SEQ ID NO: 3198002 - DNA, 25 bp, Homo sapien
caattgtgttgattagcagcccaaa

SEQ ID NO: 3198003 - DNA, 25 bp, Homo sapien
aaaatgtctggaggactgtcactag

SEQ ID NO: 3198004 - DNA, 25 bp, Homo sapien
aattccacgtatatggaacaaatga

SEQ ID NO: 3198005 - DNA, 25 bp, Homo sapien
tacatgtagctggaacaaagtccgt

SEQ ID NO: 3198006 - DNA, 25 bp, Homo sapien
gctggaacaaagtccgtaaaaggca

SEQ ID NO: 3198007 - DNA, 25 bp, Homo sapien
gaacttggtattacatgtagctgga

SEQ ID NO: 3198008 - DNA, 25 bp, Homo sapien
tcttaaagagaacttggtattacat

SEQ ID NO: 3198009 - DNA, 25 bp, Homo sapien
gaatgtcttccatgggtatccacag

SEQ ID NO: 3198010 - DNA, 25 bp, Homo sapien
gcagattttgcattcgacagtcagg

SEQ ID NO: 3198011 - DNA, 25 bp, Homo sapien
tgaggttggagtgaagccttgaact

SEQ ID NO: 3198012 - DNA, 25 bp, Homo sapien
aacttttataagctcaggtggacta

SEQ ID NO: 3198013 - DNA, 25 bp, Homo sapien
acaaatgaagatcaacatcttctcc

SEQ ID NO: 3198014 - DNA, 25 bp, Homo sapien
tggtagaaacaaatgaagatcaaca

SEQ ID NO: 3198015 - DNA, 25 bp, Homo sapien
gaaacaaatgaagatcaacatcttc

SEQ ID NO: 3198016 - DNA, 25 bp, Homo sapien
agaaacaaatgaagatcaacatctt

SEQ ID NO: 3198017 - DNA, 25 bp, Homo sapien
ctgagtaacgttgcgccattttggt

SEQ ID NO: 3198018 - DNA, 25 bp, Homo sapien
gatggcaattttttaccagcataaa

SEQ ID NO: 3198019 - DNA, 25 bp, Homo sapien
ttttcctgagtaacgttgcgccatt

SEQ ID NO: 3198020 - DNA, 25 bp, Homo sapien
gaataccagtatcatgaatcatctt

SEQ ID NO: 3198021 - DNA, 25 bp, Homo sapien
agtccagcattcaacccaaccagac

SEQ ID NO: 3198022 - DNA, 25 bp, Homo sapien
gctttttgtggataaattggatgcc

SEQ ID NO: 3198023 - DNA, 25 bp, Homo sapien
taagcatgacacttgggacagtcca

SEQ ID NO: 3198024 - DNA, 25 bp, Homo sapien
gatgccatgtataatcaattgtaag

SEQ ID NO: 3198025 - DNA, 25 bp, Homo sapien
gtcttctgggatggccttaatacag

SEQ ID NO: 3198026 - DNA, 25 bp, Homo sapien
caataggtgggcgtgaagaagtaga

SEQ ID NO: 3198027 - DNA, 25 bp, Homo sapien
ctgatgtcttctgggatggccttaa

SEQ ID NO: 3198028 - DNA, 25 bp, Homo sapien
ctgagggatcaataggtgggcgtga

SEQ ID NO: 3198029 - DNA, 25 bp, Homo sapien
acatgaagtttatcaggtggaagtt

SEQ ID NO: 3198030 - DNA, 25 bp, Homo sapien
ggcatttagtagaggtccatagaga

SEQ ID NO: 3198031 - DNA, 25 bp, Homo sapien
gaggtccatagagagttatctgaga

SEQ ID NO: 3198032 - DNA, 25 bp, Homo sapien
caaaaaggcatttagtagaggtcca

SEQ ID NO: 3198033 - DNA, 25 bp, Homo sapien
ctatctatagcaactagcaccattc

SEQ ID NO: 3198034 - DNA, 25 bp, Homo sapien
tccctgagaacagatgctacatcat

SEQ ID NO: 3198035 - DNA, 25 bp, Homo sapien
gatgctacatcatctctatctatag

SEQ ID NO: 3198036 - DNA, 25 bp, Homo sapien
tcatctctatctatagcaactagca

SEQ ID NO: 3198037 - DNA, 25 bp, Homo sapien
gttgacagtgacaaaacaggacttg

SEQ ID NO: 3198038 - DNA, 25 bp, Homo sapien
taacaagtacagtaatatcccaagg

SEQ ID NO: 3198039 - DNA, 25 bp, Homo sapien
cgcaaggcaagtggatgaattgact

SEQ ID NO: 3198040 - DNA, 25 bp, Homo sapien
gaagacgcccatgaactttgtacaa

SEQ ID NO: 3198041 - DNA, 25 bp, Homo sapien
acaaacacattcaggggtgacagga

SEQ ID NO: 3198042 - DNA, 25 bp, Homo sapien
ccaagaaagctgtagggcattcagg

SEQ ID NO: 3198043 - DNA, 25 bp, Homo sapien
gcagcatggtctccctaaatccttt

SEQ ID NO: 3198044 - DNA, 25 bp, Homo sapien
gcattcaggaccatcagtagttcca

SEQ ID NO: 3198045 - DNA, 25 bp, Homo sapien
taattgggatcacagaaatagggag

SEQ ID NO: 3198046 - DNA, 25 bp, Homo sapien
gaaacaactctcatacacataaaca

SEQ ID NO: 3198047 - DNA, 25 bp, Homo sapien
taataaatctctatgtctccaccat

SEQ ID NO: 3198048 - DNA, 25 bp, Homo sapien
agagctacaaagtccatgcacagaa

SEQ ID NO: 3198049 - DNA, 25 bp, Homo sapien
ataaatcattgatcatgtagataca

SEQ ID NO: 3198050 - DNA, 25 bp, Homo sapien
tcattgatcatgtagatacacacgt

SEQ ID NO: 3198051 - DNA, 25 bp, Homo sapien
aagaataaatcattgatcatgtaga

SEQ ID NO: 3198052 - DNA, 25 bp, Homo sapien
aaatcattgatcatgtagatacaca

SEQ ID NO: 3198053 - DNA, 25 bp, Homo sapien
aatgtataagaaaatcacattataa

SEQ ID NO: 3198054 - DNA, 25 bp, Homo sapien
taaggaatcgcttcccaaaggaaga

SEQ ID NO: 3198055 - DNA, 25 bp, Homo sapien
gacaaattgatgtgaccttccctga

SEQ ID NO: 3198056 - DNA, 25 bp, Homo sapien
gaacatagcgtgtgctctcagctgg

SEQ ID NO: 3198057 - DNA, 25 bp, Homo sapien
aagaccttctgctgagaacatagcg

SEQ ID NO: 3198058 - DNA, 25 bp, Homo sapien
ggacagttacaagaccagtgagcaa

SEQ ID NO: 3198059 - DNA, 25 bp, Homo sapien
cgatttcttccaggtataaagggca

SEQ ID NO: 3198060 - DNA, 25 bp, Homo sapien
gatttttccaacaatggagggccaa

SEQ ID NO: 3198061 - DNA, 25 bp, Homo sapien
tacccagtcttgcaggatcagcatg

SEQ ID NO: 3198062 - DNA, 25 bp, Homo sapien
gatttcggtctttccagttcatact

SEQ ID NO: 3198063 - DNA, 25 bp, Homo sapien
aaaacaaatgtctgtccccactcca

SEQ ID NO: 3198064 - DNA, 25 bp, Homo sapien
gaaccgacgatcaattccatgctga

SEQ ID NO: 3198065 - DNA, 25 bp, Homo sapien
gttcatactcccgacataccacatg

SEQ ID NO: 3198066 - DNA, 25 bp, Homo sapien
gaaacctggcaaatgaccaaccttg

SEQ ID NO: 3198067 - DNA, 25 bp, Homo sapien
cattatgggagaaacggcatgtcca

SEQ ID NO: 3198068 - DNA, 25 bp, Homo sapien
aaaactgtagtttgctgcatggcta

SEQ ID NO: 3198069 - DNA, 25 bp, Homo sapien
gactcttaatgaaggtggcacaatg

SEQ ID NO: 3198070 - DNA, 25 bp, Homo sapien
gtagcacaaccatgctcaacaatgt

SEQ ID NO: 3198071 - DNA, 25 bp, Homo sapien
tgctaaacgaatcatagtatatttc

SEQ ID NO: 3198072 - DNA, 25 bp, Homo sapien
tatcggctccatctactgctaaacg

SEQ ID NO: 3198073 - DNA, 25 bp, Homo sapien
tcatctgaagttggacaaggcccag

SEQ ID NO: 3198074 - DNA, 25 bp, Homo sapien
gattccttccccaaccgattgattg

SEQ ID NO: 3198075 - DNA, 25 bp, Homo sapien
taagtcctaaattggctgacccagc

SEQ ID NO: 3198076 - DNA, 25 bp, Homo sapien
gcttcaagccaataggccctccgta

SEQ ID NO: 3198077 - DNA, 25 bp, Homo sapien
gatggtcagcagctaaagcaatatc

SEQ ID NO: 3198078 - DNA, 25 bp, Homo sapien
tccagagggattcgagttttatatg

SEQ ID NO: 3198079 - DNA, 25 bp, Homo sapien
tgattactagcaaaagaatggcttt

SEQ ID NO: 3198080 - DNA, 25 bp, Homo sapien
catgcaccccatataaaatccagag

SEQ ID NO: 3198081 - DNA, 25 bp, Homo sapien
aaaggtgatcatctataaagagctc

SEQ ID NO: 3198082 - DNA, 25 bp, Homo sapien
tacttggagcaactcgagtcacctg

SEQ ID NO: 3198083 - DNA, 25 bp, Homo sapien
ccctataggactcagggacagagtt

SEQ ID NO: 3198084 - DNA, 25 bp, Homo sapien
gacaggcatttggttcacactaagt

SEQ ID NO: 3198085 - DNA, 25 bp, Homo sapien
catgactggctaccgctttggctgt

SEQ ID NO: 3198086 - DNA, 25 bp, Homo sapien
gggcctatttcacattgcaaattta

SEQ ID NO: 3198087 - DNA, 25 bp, Homo sapien
cagggcctatttcacattgcaaatt

SEQ ID NO: 3198088 - DNA, 25 bp, Homo sapien
tctcagggcctatttcacattgcaa

SEQ ID NO: 3198089 - DNA, 25 bp, Homo sapien
ctcagggcctatttcacattgcaaa

SEQ ID NO: 3198090 - DNA, 25 bp, Homo sapien
ctgcagccaccgagacaaccacatt

SEQ ID NO: 3198091 - DNA, 25 bp, Homo sapien
tgcagccaccgagacaaccacattt

SEQ ID NO: 3198092 - DNA, 25 bp, Homo sapien
tacacctcttattcttcaggatatc

SEQ ID NO: 3198093 - DNA, 25 bp, Homo sapien
catttgtttctacacctcttattct

SEQ ID NO: 3198094 - DNA, 25 bp, Homo sapien
agaaatctaggccagttactgtgcc

SEQ ID NO: 3198095 - DNA, 25 bp, Homo sapien
ttgaaaatgcagagctactggaagg

SEQ ID NO: 3198096 - DNA, 25 bp, Homo sapien
tactggaaggtgtcaactcttcaag

SEQ ID NO: 3198097 - DNA, 25 bp, Homo sapien
ggctgtagcagagactgtccataat

SEQ ID NO: 3198098 - DNA, 25 bp, Homo sapien
cttcactgctcatagcaaactggtg

SEQ ID NO: 3198099 - DNA, 25 bp, Homo sapien
tgcactgaatcataggaacacagaa

SEQ ID NO: 3198100 - DNA, 25 bp, Homo sapien
catgggaaagcaatctgatcaactc

SEQ ID NO: 3198101 - DNA, 25 bp, Homo sapien
gaatttagtatatgtagtccagctg

SEQ ID NO: 3198102 - DNA, 25 bp, Homo sapien
tagatccttaattctacccatatgc

SEQ ID NO: 3198103 - DNA, 25 bp, Homo sapien
tatgccctccttgattttatcctga

SEQ ID NO: 3198104 - DNA, 25 bp, Homo sapien
actgcatctgtactccattcctgga

SEQ ID NO: 3198105 - DNA, 25 bp, Homo sapien
tatgtaggggttatttccaagcttc

SEQ ID NO: 3198106 - DNA, 25 bp, Homo sapien
tctttttgtcccatgcaagaactct

SEQ ID NO: 3198107 - DNA, 25 bp, Homo sapien
tgaactatgagatcgtaatggtact

SEQ ID NO: 3198108 - DNA, 25 bp, Homo sapien
taatggtacttgaagactaaggtgc

SEQ ID NO: 3198109 - DNA, 25 bp, Homo sapien
tgaaccaaatggtcatcagcaacag

SEQ ID NO: 3198110 - DNA, 25 bp, Homo sapien
tacactgtgatatatggaaccccta

SEQ ID NO: 3198111 - DNA, 25 bp, Homo sapien
catcacgggttgttgcggagtaatc

SEQ ID NO: 3198112 - DNA, 25 bp, Homo sapien
gattgacctactgacttatcctgag

SEQ ID NO: 3198113 - DNA, 25 bp, Homo sapien
cagaggcttgtcgtttcaagggaga

SEQ ID NO: 3198114 - DNA, 25 bp, Homo sapien
taatgcagtggcaactcataaacca

SEQ ID NO: 3198115 - DNA, 25 bp, Homo sapien
tgacctatcatacataaagctatgg

SEQ ID NO: 3198116 - DNA, 25 bp, Homo sapien
cctaatcttagagtataatgcagac

SEQ ID NO: 3198117 - DNA, 25 bp, Homo sapien
taagacacggaagatatgaattcag

SEQ ID NO: 3198118 - DNA, 25 bp, Homo sapien
agaattagctgtgagcccctgcttg

SEQ ID NO: 3198119 - DNA, 25 bp, Homo sapien
caaagaattagctgtgagcccctgc

SEQ ID NO: 3198120 - DNA, 25 bp, Homo sapien
tctagcaaagaattagctgtgagcc

SEQ ID NO: 3198121 - DNA, 25 bp, Homo sapien
gcctctgtctagcaaagaattagct

SEQ ID NO: 3198122 - DNA, 25 bp, Homo sapien
ttgaagttgatcctgaaagttgcat

SEQ ID NO: 3198123 - DNA, 25 bp, Homo sapien
tttgaagttgatcctgaaagttgca

SEQ ID NO: 3198124 - DNA, 25 bp, Homo sapien
ttccttttacttcaactatggctgt

SEQ ID NO: 3198125 - DNA, 25 bp, Homo sapien
gatccagggtccactcttctgttaa

SEQ ID NO: 3198126 - DNA, 25 bp, Homo sapien
cctggtctgggacactggttgatcc

SEQ ID NO: 3198127 - DNA, 25 bp, Homo sapien
ggagtcaaaacaatatcaacagttc

SEQ ID NO: 3198128 - DNA, 25 bp, Homo sapien
gaagatcatctacaattgcagctgg

SEQ ID NO: 3198129 - DNA, 25 bp, Homo sapien
ccctgaggactttagcatgaagatc

SEQ ID NO: 3198130 - DNA, 25 bp, Homo sapien
cgggtactagcacaatgaaccattg

SEQ ID NO: 3198131 - DNA, 25 bp, Homo sapien
ctgaaaaggtagtcttgctattttg

SEQ ID NO: 3198132 - DNA, 25 bp, Homo sapien
gtcgttcctattgtagactgctcag

SEQ ID NO: 3198133 - DNA, 25 bp, Homo sapien
tgctaacattagtctgaagaccttt

SEQ ID NO: 3198134 - DNA, 25 bp, Homo sapien
gcttgtccttggttagtcgttccta

SEQ ID NO: 3198135 - DNA, 25 bp, Homo sapien
cctctaatgtcttgtttggaagata

SEQ ID NO: 3198136 - DNA, 25 bp, Homo sapien
aaaactactgttaagaatggcatat

SEQ ID NO: 3198137 - DNA, 25 bp, Homo sapien
gaaaaactactgttaagaatggcat

SEQ ID NO: 3198138 - DNA, 25 bp, Homo sapien
aaactactgttaagaatggcatatc

SEQ ID NO: 3198139 - DNA, 25 bp, Homo sapien
atgaaaaactactgttaagaatggc

SEQ ID NO: 3198140 - DNA, 25 bp, Homo sapien
taggagccgtagttggagattcttc

SEQ ID NO: 3198141 - DNA, 25 bp, Homo sapien
catgagtcacactcctactaggagc

SEQ ID NO: 3198142 - DNA, 25 bp, Homo sapien
cacaatgccactagggaaacatgag

SEQ ID NO: 3198143 - DNA, 25 bp, Homo sapien
tgttcatgcgaacctgtgtagcaat

SEQ ID NO: 3198144 - DNA, 25 bp, Homo sapien
agaaaagatgatcaaggcttgcttt

SEQ ID NO: 3198145 - DNA, 25 bp, Homo sapien
ccagcaagataatcatggctcagat

SEQ ID NO: 3198146 - DNA, 25 bp, Homo sapien
accagttctgagttttaacattaca

SEQ ID NO: 3198147 - DNA, 25 bp, Homo sapien
gatactatgaatagaaacagtaaaa

SEQ ID NO: 3198148 - DNA, 25 bp, Homo sapien
gatccagatgactgaggctgcatct

SEQ ID NO: 3198149 - DNA, 25 bp, Homo sapien
caaaatttgatgttctaccaggttc

SEQ ID NO: 3198150 - DNA, 25 bp, Homo sapien
taccaggttctgcattgtttgaagt

SEQ ID NO: 3198151 - DNA, 25 bp, Homo sapien
tgttgtatcaagacccctaagttgc

SEQ ID NO: 3198152 - DNA, 25 bp, Homo sapien
tattcgagttacatctggaacagct

SEQ ID NO: 3198153 - DNA, 25 bp, Homo sapien
gaatagcagtgattgcacaggtccc

SEQ ID NO: 3198154 - DNA, 25 bp, Homo sapien
gctgatcagtttcatccacaaaagt

SEQ ID NO: 3198155 - DNA, 25 bp, Homo sapien
aagtaaattcatccaactcttcaag

SEQ ID NO: 3198156 - DNA, 25 bp, Homo sapien
acattcaaacattatccatccccat

SEQ ID NO: 3198157 - DNA, 25 bp, Homo sapien
caaacattatccatccccatttttc

SEQ ID NO: 3198158 - DNA, 25 bp, Homo sapien
aacattatccatccccatttttctt

SEQ ID NO: 3198159 - DNA, 25 bp, Homo sapien
ttcaaacattatccatccccatttt

SEQ ID NO: 3198160 - DNA, 25 bp, Homo sapien
gcagaattcaataaaaaatgcttgc

SEQ ID NO: 3198161 - DNA, 25 bp, Homo sapien
taagcagaattcaataaaaaatgct

SEQ ID NO: 3198162 - DNA, 25 bp, Homo sapien
ttaagcagaattcaataaaaaatgc

SEQ ID NO: 3198163 - DNA, 25 bp, Homo sapien
agcagaattcaataaaaaatgcttg

SEQ ID NO: 3198164 - DNA, 25 bp, Homo sapien
tattatagccactgccggttggaga

SEQ ID NO: 3198165 - DNA, 25 bp, Homo sapien
gcttgtccggtcacatggaagatta

SEQ ID NO: 3198166 - DNA, 25 bp, Homo sapien
cacatggaagattatcatcagagac

SEQ ID NO: 3198167 - DNA, 25 bp, Homo sapien
tttctgtgtcactagctttacccat

SEQ ID NO: 3198168 - DNA, 25 bp, Homo sapien
caaggcccatgatatgctacctggg

SEQ ID NO: 3198169 - DNA, 25 bp, Homo sapien
gaagagccaagaacagaacctgagg

SEQ ID NO: 3198170 - DNA, 25 bp, Homo sapien
cattaaattacggaactgacctagg

SEQ ID NO: 3198171 - DNA, 25 bp, Homo sapien
gctagggtctgcaatggaggcttca

SEQ ID NO: 3198172 - DNA, 25 bp, Homo sapien
taccaccagtggaactgtgtggggt

SEQ ID NO: 3198173 - DNA, 25 bp, Homo sapien
gacagaggctcttattatcttccct

SEQ ID NO: 3198174 - DNA, 25 bp, Homo sapien
tggcttctgcctacgtttgctcaca

SEQ ID NO: 3198175 - DNA, 25 bp, Homo sapien
tgctcacagacctagagctgtacaa

SEQ ID NO: 3198176 - DNA, 25 bp, Homo sapien
gtttttgatgtttgtggacgttcat

SEQ ID NO: 3198177 - DNA, 25 bp, Homo sapien
tttgtggacgttcatcaatgtctgg

SEQ ID NO: 3198178 - DNA, 25 bp, Homo sapien
tgaggtcgtagtttgctggctgttt

SEQ ID NO: 3198179 - DNA, 25 bp, Homo sapien
cttctctgggattagtctctggtgc

SEQ ID NO: 3198180 - DNA, 25 bp, Homo sapien
gaggaggcatcagaggtagatcttt

SEQ ID NO: 3198181 - DNA, 25 bp, Homo sapien
ttggtgggagctgcaaaactaaacc

SEQ ID NO: 3198182 - DNA, 25 bp, Homo sapien
aaatcatcagattcgactccttcat

SEQ ID NO: 3198183 - DNA, 25 bp, Homo sapien
acttcatgctacatgaatctggagg

SEQ ID NO: 3198184 - DNA, 25 bp, Homo sapien
ctagaaaatgcatgtgtgtgagatc

SEQ ID NO: 3198185 - DNA, 25 bp, Homo sapien
aaaatgcatgtgtgtgagatctcac

SEQ ID NO: 3198186 - DNA, 25 bp, Homo sapien
agaaaatgcatgtgtgtgagatctc

SEQ ID NO: 3198187 - DNA, 25 bp, Homo sapien
gaaaatgcatgtgtgtgagatctca

SEQ ID NO: 3198188 - DNA, 25 bp, Homo sapien
catgcaccaacagctggtgttgcag

SEQ ID NO: 3198189 - DNA, 25 bp, Homo sapien
gtgttgcagtgcttaaaaggttcag

SEQ ID NO: 3198190 - DNA, 25 bp, Homo sapien
tggtcaatgggaacaagccatgcac

SEQ ID NO: 3198191 - DNA, 25 bp, Homo sapien
tatgcatcccataacagcacaaatt

SEQ ID NO: 3198192 - DNA, 25 bp, Homo sapien
gagaaagcgagcaacttttgtaagc

SEQ ID NO: 3198193 - DNA, 25 bp, Homo sapien
attttcttggagaaagcgagcaact

SEQ ID NO: 3198194 - DNA, 25 bp, Homo sapien
tgcagatagtggtgtagtatattac

SEQ ID NO: 3198195 - DNA, 25 bp, Homo sapien
cttggagaaagcgagcaacttttgt

SEQ ID NO: 3198196 - DNA, 25 bp, Homo sapien
ttgtagcatcatcaatgatggagta

SEQ ID NO: 3198197 - DNA, 25 bp, Homo sapien
cattgtagcatcatcaatgatggag

SEQ ID NO: 3198198 - DNA, 25 bp, Homo sapien
catcatcaatgatggagtaatttgc

SEQ ID NO: 3198199 - DNA, 25 bp, Homo sapien
tagcatcatcaatgatggagtaatt

SEQ ID NO: 3198200 - DNA, 25 bp, Homo sapien
tgtaagctaactcctttaaaggctg

SEQ ID NO: 3198201 - DNA, 25 bp, Homo sapien
taaacttcatccactgccttgccag

SEQ ID NO: 3198202 - DNA, 25 bp, Homo sapien
gctggtgtcaccacaataaacttca

SEQ ID NO: 3198203 - DNA, 25 bp, Homo sapien
tcaaagttaccaaagcaggaagtcc

SEQ ID NO: 3198204 - DNA, 25 bp, Homo sapien
gaggccggttagctgttccttctaa

SEQ ID NO: 3198205 - DNA, 25 bp, Homo sapien
taatgcagagtcactatgggtatga

SEQ ID NO: 3198206 - DNA, 25 bp, Homo sapien
ccttctaatagcattgtgtgttcac

SEQ ID NO: 3198207 - DNA, 25 bp, Homo sapien
tatctcagctccagttacaggtcca

SEQ ID NO: 3198208 - DNA, 25 bp, Homo sapien
agcacgtccaacatgcactggagaa

SEQ ID NO: 3198209 - DNA, 25 bp, Homo sapien
gtctccactggtatagctcagagaa

SEQ ID NO: 3198210 - DNA, 25 bp, Homo sapien
tctctgaggagtaccttccaggagg

SEQ ID NO: 3198211 - DNA, 25 bp, Homo sapien
tcaggtagctgagtaggctctcctt

SEQ ID NO: 3198212 - DNA, 25 bp, Homo sapien
taacaggagattcttgtaacacact

SEQ ID NO: 3198213 - DNA, 25 bp, Homo sapien
cagatgatggctcagatagcaaggg

SEQ ID NO: 3198214 - DNA, 25 bp, Homo sapien
tcctcgattacccacagcatttgac

SEQ ID NO: 3198215 - DNA, 25 bp, Homo sapien
gacatccaattatagaaactcacag

SEQ ID NO: 3198216 - DNA, 25 bp, Homo sapien
attgttggaagattgggtgcaacac

SEQ ID NO: 3198217 - DNA, 25 bp, Homo sapien
tgtcccatccaaagtattttggtca

SEQ ID NO: 3198218 - DNA, 25 bp, Homo sapien
ggtcactagacaagacagtgttgaa

SEQ ID NO: 3198219 - DNA, 25 bp, Homo sapien
ctgaacagcaggaaacccttggttt

SEQ ID NO: 3198220 - DNA, 25 bp, Homo sapien
catcctgactggtgctatgctgaga

SEQ ID NO: 3198221 - DNA, 25 bp, Homo sapien
ggtgttctccaaagtacattcggta

SEQ ID NO: 3198222 - DNA, 25 bp, Homo sapien
tcggtagcagaatggcattgtatcc

SEQ ID NO: 3198223 - DNA, 25 bp, Homo sapien
gatccctgtatgactcagaagaggc

SEQ ID NO: 3198224 - DNA, 25 bp, Homo sapien
cctgtgactggatccctgtatgact

SEQ ID NO: 3198225 - DNA, 25 bp, Homo sapien
taaagtcagatgaacgaaagtcccg

SEQ ID NO: 3198226 - DNA, 25 bp, Homo sapien
catgctggcttattgactgacagga

SEQ ID NO: 3198227 - DNA, 25 bp, Homo sapien
gcactgatgctaaaggttcccaaca

SEQ ID NO: 3198228 - DNA, 25 bp, Homo sapien
tgatgaataagacgaaccaaagcca

SEQ ID NO: 3198229 - DNA, 25 bp, Homo sapien
aacatgatgaacagtcttctgcttc

SEQ ID NO: 3198230 - DNA, 25 bp, Homo sapien
atcctttaagaacataccacgtaag

SEQ ID NO: 3198231 - DNA, 25 bp, Homo sapien
tacaattttagatacgaagactgaa

SEQ ID NO: 3198232 - DNA, 25 bp, Homo sapien
tactgaaagtgaatagtagagccag

SEQ ID NO: 3198233 - DNA, 25 bp, Homo sapien
ggacattccaaacattgtcttacct

SEQ ID NO: 3198234 - DNA, 25 bp, Homo sapien
gtcttgttcattctcaaacacaact

SEQ ID NO: 3198235 - DNA, 25 bp, Homo sapien
gttaccaagctacgtttcctctgag

SEQ ID NO: 3198236 - DNA, 25 bp, Homo sapien
gttggctctgtagggctccgaactc

SEQ ID NO: 3198237 - DNA, 25 bp, Homo sapien
gagtcttagtcaaactgctgttgtc

SEQ ID NO: 3198238 - DNA, 25 bp, Homo sapien
tgttagtccaccaatatctgcctct

SEQ ID NO: 3198239 - DNA, 25 bp, Homo sapien
atatctgcctctaggtgtgtgcggt

SEQ ID NO: 3198240 - DNA, 25 bp, Homo sapien
tgccatggatcctcttcagttctga

SEQ ID NO: 3198241 - DNA, 25 bp, Homo sapien
tgtgcggttcaccatgccaatccca

SEQ ID NO: 3198242 - DNA, 25 bp, Homo sapien
tatatttggtgtaatcccttcaagc

SEQ ID NO: 3198243 - DNA, 25 bp, Homo sapien
gcagcacaatattaaccccaccaat

SEQ ID NO: 3198244 - DNA, 25 bp, Homo sapien
gcagtagcacaagtctcagtcatct

SEQ ID NO: 3198245 - DNA, 25 bp, Homo sapien
ggtgtaatcccttcaagcagcacaa

SEQ ID NO: 3198246 - DNA, 25 bp, Homo sapien
tgtttggctgtacttgtaggagatg

SEQ ID NO: 3198247 - DNA, 25 bp, Homo sapien
aaactcttgtttggctgtacttgta

SEQ ID NO: 3198248 - DNA, 25 bp, Homo sapien
ttgtttggctgtacttgtaggagat

SEQ ID NO: 3198249 - DNA, 25 bp, Homo sapien
tttggctgtacttgtaggagatgta

SEQ ID NO: 3198250 - DNA, 25 bp, Homo sapien
taaaagggcctatattacagctaca

SEQ ID NO: 3198251 - DNA, 25 bp, Homo sapien
taattcacagccatgaaaaaaattt

SEQ ID NO: 3198252 - DNA, 25 bp, Homo sapien
tttccttgattaccagtaagcttta

SEQ ID NO: 3198253 - DNA, 25 bp, Homo sapien
cagtaattacaaagccatgaaaaag

SEQ ID NO: 3198254 - DNA, 25 bp, Homo sapien
ctagtcagcatgaaggtaggctctg

SEQ ID NO: 3198255 - DNA, 25 bp, Homo sapien
tattaggataaacgcaaagcccaac

SEQ ID NO: 3198256 - DNA, 25 bp, Homo sapien
gcccaacagtagctctatcagaggt

SEQ ID NO: 3198257 - DNA, 25 bp, Homo sapien
gtttacggaattggcctagtcagca

SEQ ID NO: 3198258 - DNA, 25 bp, Homo sapien
tgtgatccttcaaatgggcaaatga

SEQ ID NO: 3198259 - DNA, 25 bp, Homo sapien
ccataatgaagtagtgtttgacaca

SEQ ID NO: 3198260 - DNA, 25 bp, Homo sapien
gaatgacttctaccactacaactgt

SEQ ID NO: 3198261 - DNA, 25 bp, Homo sapien
cctgggagattaaaatagacacttg

SEQ ID NO: 3198262 - DNA, 25 bp, Homo sapien
tcctactttgaacacagcagcattg

SEQ ID NO: 3198263 - DNA, 25 bp, Homo sapien
catcatgctatgtaaggtggcaggg

SEQ ID NO: 3198264 - DNA, 25 bp, Homo sapien
tagagggcttgggacttggcaatac

SEQ ID NO: 3198265 - DNA, 25 bp, Homo sapien
ggtgagaacttcgaaccatcatgct

SEQ ID NO: 3198266 - DNA, 25 bp, Homo sapien
tttttcagaaggtagtggggttgca

SEQ ID NO: 3198267 - DNA, 25 bp, Homo sapien
taccatctaacatggcactgaattt

SEQ ID NO: 3198268 - DNA, 25 bp, Homo sapien
ttcttttctaagccttctggtagct

SEQ ID NO: 3198269 - DNA, 25 bp, Homo sapien
gatggtaaaagtgctgctccaatgg

SEQ ID NO: 3198270 - DNA, 25 bp, Homo sapien
cttttgaagtaaaacgcaatctgtg

SEQ ID NO: 3198271 - DNA, 25 bp, Homo sapien
tatatttccctgacatggtaacagg

SEQ ID NO: 3198272 - DNA, 25 bp, Homo sapien
tcaaatgtaaatcttgtctgtgcac

SEQ ID NO: 3198273 - DNA, 25 bp, Homo sapien
gaatggttgacatatctgtggcaga

SEQ ID NO: 3198274 - DNA, 25 bp, Homo sapien
aatagtaaccttgtttagaaggcag

SEQ ID NO: 3198275 - DNA, 25 bp, Homo sapien
ccacacaacgcagataatttccctg

SEQ ID NO: 3198276 - DNA, 25 bp, Homo sapien
tctgccacacaacgcagataatttc

SEQ ID NO: 3198277 - DNA, 25 bp, Homo sapien
taaccttgtttagaaggcagttcat

SEQ ID NO: 3198278 - DNA, 25 bp, Homo sapien
tacaaataccaagtggtttagaaga

SEQ ID NO: 3198279 - DNA, 25 bp, Homo sapien
taagattatgttcaaaggaaccaac

SEQ ID NO: 3198280 - DNA, 25 bp, Homo sapien
tattacttcattaacttccttcatg

SEQ ID NO: 3198281 - DNA, 25 bp, Homo sapien
ttcatgaacactttctgtacaaata

SEQ ID NO: 3198282 - DNA, 25 bp, Homo sapien
tgtatgtttcccaagttaaggcttc

SEQ ID NO: 3198283 - DNA, 25 bp, Homo sapien
gatttctagtcaaccatttttggaa

SEQ ID NO: 3198284 - DNA, 25 bp, Homo sapien
tccttcatccaaggagcactgtcct

SEQ ID NO: 3198285 - DNA, 25 bp, Homo sapien
cagacccttatcaaatactggtaca

SEQ ID NO: 3198286 - DNA, 25 bp, Homo sapien
ctgaagataaaactgtttgatgggc

SEQ ID NO: 3198287 - DNA, 25 bp, Homo sapien
gaagataaaactgtttgatgggctg

SEQ ID NO: 3198288 - DNA, 25 bp, Homo sapien
tgaagataaaactgtttgatgggct

SEQ ID NO: 3198289 - DNA, 25 bp, Homo sapien
caatctggcatagtggagtcccact

SEQ ID NO: 3198290 - DNA, 25 bp, Homo sapien
taccgacctaatgctggaccgaaca

SEQ ID NO: 3198291 - DNA, 25 bp, Homo sapien
tctgtatgtataactctggttggag

SEQ ID NO: 3198292 - DNA, 25 bp, Homo sapien
ggtctcatccagttgggcagaatgg

SEQ ID NO: 3198293 - DNA, 25 bp, Homo sapien
gttcttttagctcagctaagtttat

SEQ ID NO: 3198294 - DNA, 25 bp, Homo sapien
gctcctgtatgttttgtcacgatcc

SEQ ID NO: 3198295 - DNA, 25 bp, Homo sapien
tgttttgtcacgatcctcagcttct

SEQ ID NO: 3198296 - DNA, 25 bp, Homo sapien
tgtatgttttgtcacgatcctcagc

SEQ ID NO: 3198297 - DNA, 25 bp, Homo sapien
atagaaatggtacaagctcttcttt

SEQ ID NO: 3198298 - DNA, 25 bp, Homo sapien
caatagaaatggtacaagctcttct

SEQ ID NO: 3198299 - DNA, 25 bp, Homo sapien
tcaatagaaatggtacaagctcttc

SEQ ID NO: 3198300 - DNA, 25 bp, Homo sapien
aatagaaatggtacaagctcttctt

SEQ ID NO: 3198301 - DNA, 25 bp, Homo sapien
tcctgaacgcaagtataaagcacct

SEQ ID NO: 3198302 - DNA, 25 bp, Homo sapien
tgcttggtgatccaactcttcatct

SEQ ID NO: 3198303 - DNA, 25 bp, Homo sapien
gcaagtataaagcacctgtgttgct

SEQ ID NO: 3198304 - DNA, 25 bp, Homo sapien
tgtgttgcttggtgatccaactctt

SEQ ID NO: 3198305 - DNA, 25 bp, Homo sapien
tttttactgaccactgatacagaga

SEQ ID NO: 3198306 - DNA, 25 bp, Homo sapien
gctaagttacatttaactgagacag

SEQ ID NO: 3198307 - DNA, 25 bp, Homo sapien
gggataattctgcatatgtagacat

SEQ ID NO: 3198308 - DNA, 25 bp, Homo sapien
gatacagagatctttagctaagtta

SEQ ID NO: 3198309 - DNA, 25 bp, Homo sapien
tgttcgttccagagaggaataggct

SEQ ID NO: 3198310 - DNA, 25 bp, Homo sapien
catcatgttcgttccagagaggaat

SEQ ID NO: 3198311 - DNA, 25 bp, Homo sapien
gttcgttccagagaggaataggctg

SEQ ID NO: 3198312 - DNA, 25 bp, Homo sapien
catgttcgttccagagaggaatagg

SEQ ID NO: 3198313 - DNA, 25 bp, Homo sapien
tcggttagaaagttccagttcaatc

SEQ ID NO: 3198314 - DNA, 25 bp, Homo sapien
gatttaaatccacctggcatttgcc

SEQ ID NO: 3198315 - DNA, 25 bp, Homo sapien
caatttgtcctaatgccagatttaa

SEQ ID NO: 3198316 - DNA, 25 bp, Homo sapien
tcattgatggagtagtggccgttac

SEQ ID NO: 3198317 - DNA, 25 bp, Homo sapien
cactgatttcttctcggagggcatt

SEQ ID NO: 3198318 - DNA, 25 bp, Homo sapien
gccacaggctgtgcataaacaattg

SEQ ID NO: 3198319 - DNA, 25 bp, Homo sapien
ccctatctgaagaaccactgatttc

SEQ ID NO: 3198320 - DNA, 25 bp, Homo sapien
taggcaacttgatgaaaatcagaac

SEQ ID NO: 3198321 - DNA, 25 bp, Homo sapien
aaagccattcgttgttcattccagt

SEQ ID NO: 3198322 - DNA, 25 bp, Homo sapien
tcataggcggccttataattcagcc

SEQ ID NO: 3198323 - DNA, 25 bp, Homo sapien
aattcccagatcattgacagtgagc

SEQ ID NO: 3198324 - DNA, 25 bp, Homo sapien
ttgtgataggtaggcaaattcccag

SEQ ID NO: 3198325 - DNA, 25 bp, Homo sapien
cctttgctaaccagagactctgaag

SEQ ID NO: 3198326 - DNA, 25 bp, Homo sapien
ggcattcatcactaaatccccatga

SEQ ID NO: 3198327 - DNA, 25 bp, Homo sapien
tccatcagcaaaacggatacaaaag

SEQ ID NO: 3198328 - DNA, 25 bp, Homo sapien
taataccaaagcagaaccagtgtca

SEQ ID NO: 3198329 - DNA, 25 bp, Homo sapien
ctaaactgtatatagaaataaaaga

SEQ ID NO: 3198330 - DNA, 25 bp, Homo sapien
aactgtatatagaaataaaagatac

SEQ ID NO: 3198331 - DNA, 25 bp, Homo sapien
taaactgtatatagaaataaaagat

SEQ ID NO: 3198332 - DNA, 25 bp, Homo sapien
ctgtatatagaaataaaagatactc

SEQ ID NO: 3198333 - DNA, 25 bp, Homo sapien
gaacatacttcataggtgccatctg

SEQ ID NO: 3198334 - DNA, 25 bp, Homo sapien
tgaacatacttcataggtgccatct

SEQ ID NO: 3198335 - DNA, 25 bp, Homo sapien
tctgacaggtcagctatgttcactg

SEQ ID NO: 3198336 - DNA, 25 bp, Homo sapien
caatacgttgagtgtccaggttcca

SEQ ID NO: 3198337 - DNA, 25 bp, Homo sapien
agagtattgcccagagcattaagcc

SEQ ID NO: 3198338 - DNA, 25 bp, Homo sapien
cctgtcagtgttgtaagagtattgc

SEQ ID NO: 3198339 - DNA, 25 bp, Homo sapien
caagtcgctgcccaaaggtgagttt

SEQ ID NO: 3198340 - DNA, 25 bp, Homo sapien
tcaggcctagtaggtgatttacaag

SEQ ID NO: 3198341 - DNA, 25 bp, Homo sapien
gctttcaaatgggactggctagact

SEQ ID NO: 3198342 - DNA, 25 bp, Homo sapien
tgagtgtgctctgcatgctttcaaa

SEQ ID NO: 3198343 - DNA, 25 bp, Homo sapien
tggctagcagatgctgcctgtcttc

SEQ ID NO: 3198344 - DNA, 25 bp, Homo sapien
gttctctgatatccactatacgctt

SEQ ID NO: 3198345 - DNA, 25 bp, Homo sapien
tactttggcctgttcattcagttct

SEQ ID NO: 3198346 - DNA, 25 bp, Homo sapien
cctgtcttcgataatctgtggcttc

SEQ ID NO: 3198347 - DNA, 25 bp, Homo sapien
tatggttccttcacttgcacctaat

SEQ ID NO: 3198348 - DNA, 25 bp, Homo sapien
cgcatactggacctccgtaattttt

SEQ ID NO: 3198349 - DNA, 25 bp, Homo sapien
ctgttggtaacgttgaatttcctgg

SEQ ID NO: 3198350 - DNA, 25 bp, Homo sapien
cagccacagattctaactgttggta

SEQ ID NO: 3198351 - DNA, 25 bp, Homo sapien
gcccaaactaagagaaatgcaagga

SEQ ID NO: 3198352 - DNA, 25 bp, Homo sapien
cagaaatggacatatctagcacaca

SEQ ID NO: 3198353 - DNA, 25 bp, Homo sapien
tgaatccactattacagtttgagac

SEQ ID NO: 3198354 - DNA, 25 bp, Homo sapien
tgtcaaactatgtgaggcccaaact

SEQ ID NO: 3198355 - DNA, 25 bp, Homo sapien
caagggcatcccgtttgtaggactc

SEQ ID NO: 3198356 - DNA, 25 bp, Homo sapien
taggaggcgcaatgaaaacaggagc

SEQ ID NO: 3198357 - DNA, 25 bp, Homo sapien
tcttctagaaactcgtgatggtgct

SEQ ID NO: 3198358 - DNA, 25 bp, Homo sapien
ggagccaccagctgacctgagaaaa

SEQ ID NO: 3198359 - DNA, 25 bp, Homo sapien
aaatgctttttgatcggctgtaact

SEQ ID NO: 3198360 - DNA, 25 bp, Homo sapien
cttgccctttccattcgcttaagag

SEQ ID NO: 3198361 - DNA, 25 bp, Homo sapien
cattcgcttaagaggtggtcttcca

SEQ ID NO: 3198362 - DNA, 25 bp, Homo sapien
ggctgtaacttggtttgtaactcaa

SEQ ID NO: 3198363 - DNA, 25 bp, Homo sapien
tgacaaatctagagcagtagctact

SEQ ID NO: 3198364 - DNA, 25 bp, Homo sapien
gcagcgtacttcattactaaaaagc

SEQ ID NO: 3198365 - DNA, 25 bp, Homo sapien
gaaacttgtctaaatagcagcgtac

SEQ ID NO: 3198366 - DNA, 25 bp, Homo sapien
taaaaagcacttaccgcattgtggt

SEQ ID NO: 3198367 - DNA, 25 bp, Homo sapien
gatattaaaagttactctaggtcca

SEQ ID NO: 3198368 - DNA, 25 bp, Homo sapien
agatgctgcatccacacggatttct

SEQ ID NO: 3198369 - DNA, 25 bp, Homo sapien
aagttactctaggtccaggagatgc

SEQ ID NO: 3198370 - DNA, 25 bp, Homo sapien
tgtatcctggatattaaaagttact

SEQ ID NO: 3198371 - DNA, 25 bp, Homo sapien
taatatgctatgaaattagaataca

SEQ ID NO: 3198372 - DNA, 25 bp, Homo sapien
atgctatgaaattagaatacaactt

SEQ ID NO: 3198373 - DNA, 25 bp, Homo sapien
ataatgtttaatatgctatgaaatt

SEQ ID NO: 3198374 - DNA, 25 bp, Homo sapien
atatgctatgaaattagaatacaac

SEQ ID NO: 3198375 - DNA, 25 bp, Homo sapien
gattgtggtgtacttccccatactg

SEQ ID NO: 3198376 - DNA, 25 bp, Homo sapien
tgtggtgtacttccccatactgtat

SEQ ID NO: 3198377 - DNA, 25 bp, Homo sapien
gctggattgtggtgtacttccccat

SEQ ID NO: 3198378 - DNA, 25 bp, Homo sapien
acagctggattgtggtgtacttccc

SEQ ID NO: 3198379 - DNA, 25 bp, Homo sapien
catgaatcagattcatatttcaatt

SEQ ID NO: 3198380 - DNA, 25 bp, Homo sapien
aaaagaaaaaacatgaatcagattc

SEQ ID NO: 3198381 - DNA, 25 bp, Homo sapien
aaacatgaatcagattcatatttca

SEQ ID NO: 3198382 - DNA, 25 bp, Homo sapien
gaaaaaacatgaatcagattcatat

SEQ ID NO: 3198383 - DNA, 25 bp, Homo sapien
aacatgatccttcactatttgatga

SEQ ID NO: 3198384 - DNA, 25 bp, Homo sapien
gaataatgggatggaccttcaatgg

SEQ ID NO: 3198385 - DNA, 25 bp, Homo sapien
tatttgatgaataatgggatggacc

SEQ ID NO: 3198386 - DNA, 25 bp, Homo sapien
gatggaccttcaatggttactgaca

SEQ ID NO: 3198387 - DNA, 25 bp, Homo sapien
atcccgtcggccctcttcagtttgg

SEQ ID NO: 3198388 - DNA, 25 bp, Homo sapien
gaagacaaactgtcatcccgtcggc

SEQ ID NO: 3198389 - DNA, 25 bp, Homo sapien
cttcactggtagaagacaaactgtc

SEQ ID NO: 3198390 - DNA, 25 bp, Homo sapien
ctttttcatccttctcggaatcttc

SEQ ID NO: 3198391 - DNA, 25 bp, Homo sapien
ggccagcgttctgtaaatagctgat

SEQ ID NO: 3198392 - DNA, 25 bp, Homo sapien
cccgtatatcaagttcaaagtcaat

SEQ ID NO: 3198393 - DNA, 25 bp, Homo sapien
gcctgttgcttttttacgagacgta

SEQ ID NO: 3198394 - DNA, 25 bp, Homo sapien
ggttgggtggagtacacattttcca

SEQ ID NO: 3198395 - DNA, 25 bp, Homo sapien
ggtgaatcttgatctaagctcctgg

SEQ ID NO: 3198396 - DNA, 25 bp, Homo sapien
tttcttgccggtcattaaatgggtg

SEQ ID NO: 3198397 - DNA, 25 bp, Homo sapien
tgtctgtagagatgatggcactttc

SEQ ID NO: 3198398 - DNA, 25 bp, Homo sapien
tcaactccgggaatgtaaaatactg

SEQ ID NO: 3198399 - DNA, 25 bp, Homo sapien
tgttcttggcaaggaagatcccctg

SEQ ID NO: 3198400 - DNA, 25 bp, Homo sapien
ggtgattcagtctttagcgtcttgg

SEQ ID NO: 3198401 - DNA, 25 bp, Homo sapien
ggactctttggacagtgttcttggc

SEQ ID NO: 3198402 - DNA, 25 bp, Homo sapien
cccctggaggcattaggtgattcag

SEQ ID NO: 3198403 - DNA, 25 bp, Homo sapien
aaggtgttagtcttgctctggacag

SEQ ID NO: 3198404 - DNA, 25 bp, Homo sapien
gaggaagtaaggtgttagtcttgct

SEQ ID NO: 3198405 - DNA, 25 bp, Homo sapien
agaaggaggagatgttgcactatct

SEQ ID NO: 3198406 - DNA, 25 bp, Homo sapien
ggagatgttgcactatctttcatac

SEQ ID NO: 3198407 - DNA, 25 bp, Homo sapien
ccttttaagggaagtcaactgccat

SEQ ID NO: 3198408 - DNA, 25 bp, Homo sapien
gaaatcctgccatgtatgtacggta

SEQ ID NO: 3198409 - DNA, 25 bp, Homo sapien
tgagaacactcaagaagcccagtag

SEQ ID NO: 3198410 - DNA, 25 bp, Homo sapien
tacttccgtactgacctgtgtgatg

SEQ ID NO: 3198411 - DNA, 25 bp, Homo sapien
taaacagaaatttgaattatattaa

SEQ ID NO: 3198412 - DNA, 25 bp, Homo sapien
cagaaatttgaattatattaaagtt

SEQ ID NO: 3198413 - DNA, 25 bp, Homo sapien
caattaaacagaaatttgaattata

SEQ ID NO: 3198414 - DNA, 25 bp, Homo sapien
tccaattaaacagaaatttgaatta

SEQ ID NO: 3198415 - DNA, 25 bp, Homo sapien
tgtaattgggatagtttccagagct

SEQ ID NO: 3198416 - DNA, 25 bp, Homo sapien
gctacccaggcatataacttggctg

SEQ ID NO: 3198417 - DNA, 25 bp, Homo sapien
ccagaaagtctaataggcagggact

SEQ ID NO: 3198418 - DNA, 25 bp, Homo sapien
ggcagggactaataaccatttcttc

SEQ ID NO: 3198419 - DNA, 25 bp, Homo sapien
cgacactagtgatgttgttgattct

SEQ ID NO: 3198420 - DNA, 25 bp, Homo sapien
tgttgttgattcttccataggatct

SEQ ID NO: 3198421 - DNA, 25 bp, Homo sapien
tgattcttccataggatctggtatt

SEQ ID NO: 3198422 - DNA, 25 bp, Homo sapien
gatgttgaagacgacactagtgatg

SEQ ID NO: 3198423 - DNA, 25 bp, Homo sapien
tgaactcgtacataaaccacaacat

SEQ ID NO: 3198424 - DNA, 25 bp, Homo sapien
ctgaactcgtacataaaccacaaca

SEQ ID NO: 3198425 - DNA, 25 bp, Homo sapien
tgttgaaatgttcaaataaacttaa

SEQ ID NO: 3198426 - DNA, 25 bp, Homo sapien
cagtaataatgttgaaatgttcaaa

SEQ ID NO: 3198427 - DNA, 25 bp, Homo sapien
taatgttgaaatgttcaaataaact

SEQ ID NO: 3198428 - DNA, 25 bp, Homo sapien
tttaaacagtaataatgttgaaatg

SEQ ID NO: 3198429 - DNA, 25 bp, Homo sapien
taaagtctctgcaggatatgtagtc

SEQ ID NO: 3198430 - DNA, 25 bp, Homo sapien
tctactcttgatactggtaaacagc

SEQ ID NO: 3198431 - DNA, 25 bp, Homo sapien
cactctgagtagcattacctccagg

SEQ ID NO: 3198432 - DNA, 25 bp, Homo sapien
ggtattccagttttgctagcagaag

SEQ ID NO: 3198433 - DNA, 25 bp, Homo sapien
tactgctggaactggtcaggtctga

SEQ ID NO: 3198434 - DNA, 25 bp, Homo sapien
caagagggctgcctaatcccgatga

SEQ ID NO: 3198435 - DNA, 25 bp, Homo sapien
taatcctcctgatccaggtgtgagg

SEQ ID NO: 3198436 - DNA, 25 bp, Homo sapien
tactatgtcgacttcggccaagagg

SEQ ID NO: 3198437 - DNA, 25 bp, Homo sapien
aagcagagggatctaatgagcatta

SEQ ID NO: 3198438 - DNA, 25 bp, Homo sapien
ttctaacaacaatttaagaggttca

SEQ ID NO: 3198439 - DNA, 25 bp, Homo sapien
tctaatatactgtaatatgccatga

SEQ ID NO: 3198440 - DNA, 25 bp, Homo sapien
tatacacacagctgtctagttaggt

SEQ ID NO: 3198441 - DNA, 25 bp, Homo sapien
tgagtgaatcttttcgaccagtgac

SEQ ID NO: 3198442 - DNA, 25 bp, Homo sapien
tttatactgagtgaatcttttcgac

SEQ ID NO: 3198443 - DNA, 25 bp, Homo sapien
gaatcttttcgaccagtgactgaag

SEQ ID NO: 3198444 - DNA, 25 bp, Homo sapien
cttttcgaccagtgactgaagtggg

SEQ ID NO: 3198445 - DNA, 25 bp, Homo sapien
cctgaacgcctgatccgtgacaaac

SEQ ID NO: 3198446 - DNA, 25 bp, Homo sapien
aacgcctgatccgtgacaaactcac

SEQ ID NO: 3198447 - DNA, 25 bp, Homo sapien
tgaacgcctgatccgtgacaaactc

SEQ ID NO: 3198448 - DNA, 25 bp, Homo sapien
ctcctgaacgcctgatccgtgacaa

SEQ ID NO: 3198449 - DNA, 25 bp, Homo sapien
tttattaacgtagtatccattttgc

SEQ ID NO: 3198450 - DNA, 25 bp, Homo sapien
tattaacgtagtatccattttgctt

SEQ ID NO: 3198451 - DNA, 25 bp, Homo sapien
gatatatttattaacgtagtatcca

SEQ ID NO: 3198452 - DNA, 25 bp, Homo sapien
taacgtagtatccattttgcttgca

SEQ ID NO: 3198453 - DNA, 25 bp, Homo sapien
cgcatatcatatttaaaggaggcag

SEQ ID NO: 3198454 - DNA, 25 bp, Homo sapien
gacgtcttgcaatacttcttctata

SEQ ID NO: 3198455 - DNA, 25 bp, Homo sapien
cagaatttcactgagtcggcgcata

SEQ ID NO: 3198456 - DNA, 25 bp, Homo sapien
ggtctccaaggaatagacgtcttgc

SEQ ID NO: 3198457 - DNA, 25 bp, Homo sapien
ctcccaggtcttgcagtaagctttt

SEQ ID NO: 3198458 - DNA, 25 bp, Homo sapien
ggcatgtgggtgaaggaggctgact

SEQ ID NO: 3198459 - DNA, 25 bp, Homo sapien
cttaccccttcaatggaatcaggtg

SEQ ID NO: 3198460 - DNA, 25 bp, Homo sapien
ttcttgatgattcaggggaaaggtg

SEQ ID NO: 3198461 - DNA, 25 bp, Homo sapien
aagctggggattttaggctctgtcc

SEQ ID NO: 3198462 - DNA, 25 bp, Homo sapien
tatgctcattgaacacattaggtga

SEQ ID NO: 3198463 - DNA, 25 bp, Homo sapien
actccttgatcttatggaagctggg

SEQ ID NO: 3198464 - DNA, 25 bp, Homo sapien
ctgaagaatcagatacactccttga

SEQ ID NO: 3198465 - DNA, 25 bp, Homo sapien
tatgaggaaattctggtgtgcatgg

SEQ ID NO: 3198466 - DNA, 25 bp, Homo sapien
taatggttatcctattgcctctaaa

SEQ ID NO: 3198467 - DNA, 25 bp, Homo sapien
taaatgccaagctagttacaaagca

SEQ ID NO: 3198468 - DNA, 25 bp, Homo sapien
tacctcttgaaagctcataaaatta

SEQ ID NO: 3198469 - DNA, 25 bp, Homo sapien
tgtttgatttgttaaaaggagttga

SEQ ID NO: 3198470 - DNA, 25 bp, Homo sapien
catttgaacgtttaattgcttcaag

SEQ ID NO: 3198471 - DNA, 25 bp, Homo sapien
gggtcccttgttggcttgctgcttt

SEQ ID NO: 3198472 - DNA, 25 bp, Homo sapien
aaacacgacaagtgtttcccatggg

SEQ ID NO: 3198473 - DNA, 25 bp, Homo sapien
tattgcagtatccttagaattaagc

SEQ ID NO: 3198474 - DNA, 25 bp, Homo sapien
cattgataatgaagctttactccta

SEQ ID NO: 3198475 - DNA, 25 bp, Homo sapien
ggtcaagtttgacaatgaaacaaca

SEQ ID NO: 3198476 - DNA, 25 bp, Homo sapien
agctagaaaattaccctgttctcct

SEQ ID NO: 3198477 - DNA, 25 bp, Homo sapien
cagacatgctgatctctcgatcacg

SEQ ID NO: 3198478 - DNA, 25 bp, Homo sapien
taattgtgatcttcccagaccaaca

SEQ ID NO: 3198479 - DNA, 25 bp, Homo sapien
gatcacgattacttcctactgacag

SEQ ID NO: 3198480 - DNA, 25 bp, Homo sapien
gcattgacatctatggtccctccaa

SEQ ID NO: 3198481 - DNA, 25 bp, Homo sapien
cattcatcctgaagcttaagatcag

SEQ ID NO: 3198482 - DNA, 25 bp, Homo sapien
cgagcttcagtagaacccatagtaa

SEQ ID NO: 3198483 - DNA, 25 bp, Homo sapien
gcttgaatccaatgtattatacaag

SEQ ID NO: 3198484 - DNA, 25 bp, Homo sapien
cccatagtaatctgaattttgtgac

SEQ ID NO: 3198485 - DNA, 25 bp, Homo sapien
agtcattgtctttggcggaaggtaa

SEQ ID NO: 3198486 - DNA, 25 bp, Homo sapien
caaattgttgtgtgaaaaattcctg

SEQ ID NO: 3198487 - DNA, 25 bp, Homo sapien
tatcagatctggtgtggttgacctt

SEQ ID NO: 3198488 - DNA, 25 bp, Homo sapien
ccccaggtagacagagctcgtttgc

SEQ ID NO: 3198489 - DNA, 25 bp, Homo sapien
tgttttccatacctctcacccataa

SEQ ID NO: 3198490 - DNA, 25 bp, Homo sapien
ggagcttgtgagaaatgccgactct

SEQ ID NO: 3198491 - DNA, 25 bp, Homo sapien
taagcccacctgtacctactatatc

SEQ ID NO: 3198492 - DNA, 25 bp, Homo sapien
taatccaaccaaagatcatgaattg

SEQ ID NO: 3198493 - DNA, 25 bp, Homo sapien
gaaaatttggaccatgaaaacatgc

SEQ ID NO: 3198494 - DNA, 25 bp, Homo sapien
gatatgtggcatcctgataccacct

SEQ ID NO: 3198495 - DNA, 25 bp, Homo sapien
tttccatgtaagctcattgatcctc

SEQ ID NO: 3198496 - DNA, 25 bp, Homo sapien
tccaggccagtgtcgatgatgtgct

SEQ ID NO: 3198497 - DNA, 25 bp, Homo sapien
caaagcaccacatggtttggtaacc

SEQ ID NO: 3198498 - DNA, 25 bp, Homo sapien
ggtggattttcatggcgacgccttg

SEQ ID NO: 3198499 - DNA, 25 bp, Homo sapien
tctttcacacttgctactccatggg

SEQ ID NO: 3198500 - DNA, 25 bp, Homo sapien
ggtaaccatagtattatgacccagg

SEQ ID NO: 3198501 - DNA, 25 bp, Homo sapien
tggaatttcactaagcccaaagggc

SEQ ID NO: 3198502 - DNA, 25 bp, Homo sapien
gagatggcctattccatggtaactg

SEQ ID NO: 3198503 - DNA, 25 bp, Homo sapien
taatagacgctttaggacactccag

SEQ ID NO: 3198504 - DNA, 25 bp, Homo sapien
gctcactgttgtcaagaccaaagct

SEQ ID NO: 3198505 - DNA, 25 bp, Homo sapien
ggttgtagctagaacctcctctgaa

SEQ ID NO: 3198506 - DNA, 25 bp, Homo sapien
ccttggtaatgcaaagatagtctct

SEQ ID NO: 3198507 - DNA, 25 bp, Homo sapien
aaactagaattcttcacagtagtgc

SEQ ID NO: 3198508 - DNA, 25 bp, Homo sapien
gttagcatcaacattacgaagcaga

SEQ ID NO: 3198509 - DNA, 25 bp, Homo sapien
gttcttgaacatgaatggatttaaa

SEQ ID NO: 3198510 - DNA, 25 bp, Homo sapien
tgtggttcttgaacatgaatggatt

SEQ ID NO: 3198511 - DNA, 25 bp, Homo sapien
tggttcttgaacatgaatggattta

SEQ ID NO: 3198512 - DNA, 25 bp, Homo sapien
atgaatggatttaaagtcaagctgc

SEQ ID NO: 3198513 - DNA, 25 bp, Homo sapien
caccacactacattctacttttggc

SEQ ID NO: 3198514 - DNA, 25 bp, Homo sapien
ctcagcatccatagtcacacaaatg

SEQ ID NO: 3198515 - DNA, 25 bp, Homo sapien
cagcatccatagtcacacaaatgtg

SEQ ID NO: 3198516 - DNA, 25 bp, Homo sapien
gtgaactctgtcaccacactacatt

SEQ ID NO: 3198517 - DNA, 25 bp, Homo sapien
gaatacagctttcctcttagggcat

SEQ ID NO: 3198518 - DNA, 25 bp, Homo sapien
aattaagccatagtaacgcactacg

SEQ ID NO: 3198519 - DNA, 25 bp, Homo sapien
tataacttgattgggaatgagcctc

SEQ ID NO: 3198520 - DNA, 25 bp, Homo sapien
gatgccctgttcagttaaggcctgc

SEQ ID NO: 3198521 - DNA, 25 bp, Homo sapien
gtattgcacataaaatctctccagt

SEQ ID NO: 3198522 - DNA, 25 bp, Homo sapien
tgtcctggtcgagtagataaaatcc

SEQ ID NO: 3198523 - DNA, 25 bp, Homo sapien
ggttctagatgccatgtattgcaca

SEQ ID NO: 3198524 - DNA, 25 bp, Homo sapien
cagtccacagtagtataagtgatgc

SEQ ID NO: 3198525 - DNA, 25 bp, Homo sapien
acccgaactttgtagaaagctattg

SEQ ID NO: 3198526 - DNA, 25 bp, Homo sapien
gaagttaagttctgcatcgatgccc

SEQ ID NO: 3198527 - DNA, 25 bp, Homo sapien
agagctgctgattgtacaactccag

SEQ ID NO: 3198528 - DNA, 25 bp, Homo sapien
ctgcaggtaggaccaaacccgaact

SEQ ID NO: 3198529 - DNA, 25 bp, Homo sapien
tgaagccatttaggaatagtagtcc

SEQ ID NO: 3198530 - DNA, 25 bp, Homo sapien
tagtcctagcatgatgaaagcccaa

SEQ ID NO: 3198531 - DNA, 25 bp, Homo sapien
tttcatcctgtagtgcagtaccgag

SEQ ID NO: 3198532 - DNA, 25 bp, Homo sapien
tgtccagtggatccatgactcctct

SEQ ID NO: 3198533 - DNA, 25 bp, Homo sapien
taatttgttcacagatcaaattact

SEQ ID NO: 3198534 - DNA, 25 bp, Homo sapien
cagacacaatcataatttgttcaca

SEQ ID NO: 3198535 - DNA, 25 bp, Homo sapien
ttaattatagccacaaatttagaat

SEQ ID NO: 3198536 - DNA, 25 bp, Homo sapien
atttgttcacagatcaaattacttt

SEQ ID NO: 3198537 - DNA, 25 bp, Homo sapien
cacagaatgatggaactagaacagg

SEQ ID NO: 3198538 - DNA, 25 bp, Homo sapien
ttactcaagctatatacaaacaggt

SEQ ID NO: 3198539 - DNA, 25 bp, Homo sapien
gatgcaggaattgtattgcacatta

SEQ ID NO: 3198540 - DNA, 25 bp, Homo sapien
gaaaaagcaattaatgacctcccca

SEQ ID NO: 3198541 - DNA, 25 bp, Homo sapien
ccagtacagtactgtgtacagaata

SEQ ID NO: 3198542 - DNA, 25 bp, Homo sapien
tatggtcatgtatccaccagtacag

SEQ ID NO: 3198543 - DNA, 25 bp, Homo sapien
cattatctagtcaaaacagtttccc

SEQ ID NO: 3198544 - DNA, 25 bp, Homo sapien
cattgcttctatgcctgcacagagg

SEQ ID NO: 3198545 - DNA, 25 bp, Homo sapien
acaatcgcaatctgagaaggtgccc

SEQ ID NO: 3198546 - DNA, 25 bp, Homo sapien
ctgcgtgagggttgtttcaagaaaa

SEQ ID NO: 3198547 - DNA, 25 bp, Homo sapien
catccacaatcgcaatctgagaagg

SEQ ID NO: 3198548 - DNA, 25 bp, Homo sapien
tcatttcatccacaatcgcaatctg

SEQ ID NO: 3198549 - DNA, 25 bp, Homo sapien
gtctcggaggccggcgctcttgccc

SEQ ID NO: 3198550 - DNA, 25 bp, Homo sapien
tgcgccagcgtcgtgcagccgagct

SEQ ID NO: 3198551 - DNA, 25 bp, Homo sapien
ccgcgcttgcgccagcgtcgtgcag

SEQ ID NO: 3198552 - DNA, 25 bp, Homo sapien
gcttgcgccagcgtcgtgcagccga

SEQ ID NO: 3198553 - DNA, 25 bp, Homo sapien
gggtcagggccgcatctttcaaaag

SEQ ID NO: 3198554 - DNA, 25 bp, Homo sapien
gctctgcgcgaggttcacagggtca

SEQ ID NO: 3198555 - DNA, 25 bp, Homo sapien
gcgccctgcttcgtccaatcactaa

SEQ ID NO: 3198556 - DNA, 25 bp, Homo sapien
tttcaaaagaggcctcgcgtcgccc

SEQ ID NO: 3198557 - DNA, 25 bp, Homo sapien
caaagttgtccttcctgccctctat

SEQ ID NO: 3198558 - DNA, 25 bp, Homo sapien
tatgtgggaagacgggcagctgctg

SEQ ID NO: 3198559 - DNA, 25 bp, Homo sapien
gtccttcctgccctctatgtgggaa

SEQ ID NO: 3198560 - DNA, 25 bp, Homo sapien
cctgccctctatgtgggaagacggg

SEQ ID NO: 3198561 - DNA, 25 bp, Homo sapien
cctgaatcccttccctaaacctctg

SEQ ID NO: 3198562 - DNA, 25 bp, Homo sapien
tttttgagttttcatagacacggac

SEQ ID NO: 3198563 - DNA, 25 bp, Homo sapien
gctttttgagttttcatagacacgg

SEQ ID NO: 3198564 - DNA, 25 bp, Homo sapien
ctgctttttgagttttcatagacac

SEQ ID NO: 3198565 - DNA, 25 bp, Homo sapien
gactgctttttgagttttcatagac

SEQ ID NO: 3198566 - DNA, 25 bp, Homo sapien
ctgaaaccaatgattgttgctagcc

SEQ ID NO: 3198567 - DNA, 25 bp, Homo sapien
gaaaccaatgattgttgctagccat

SEQ ID NO: 3198568 - DNA, 25 bp, Homo sapien
tgaaaccaatgattgttgctagcca

SEQ ID NO: 3198569 - DNA, 25 bp, Homo sapien
ccatcttggacaggccgtaactttc

SEQ ID NO: 3198570 - DNA, 25 bp, Homo sapien
gccgtaactttctgaggaccatcct

SEQ ID NO: 3198571 - DNA, 25 bp, Homo sapien
tagttatcgtctttgtcgctggttg

SEQ ID NO: 3198572 - DNA, 25 bp, Homo sapien
tgtcgctggttgaactggcaggttc

SEQ ID NO: 3198573 - DNA, 25 bp, Homo sapien
tcagaaaggcaagccacacttgaag

SEQ ID NO: 3198574 - DNA, 25 bp, Homo sapien
tgaacagtcaaggtggtaacagatg

SEQ ID NO: 3198575 - DNA, 25 bp, Homo sapien
gcacaggtaaagagctctacaggcc

SEQ ID NO: 3198576 - DNA, 25 bp, Homo sapien
taacagatggttaaacgagcggcac

SEQ ID NO: 3198577 - DNA, 25 bp, Homo sapien
aaggctgacacaggatttatctctc

SEQ ID NO: 3198578 - DNA, 25 bp, Homo sapien
tccttaaggtcaagctgaactcgct

SEQ ID NO: 3198579 - DNA, 25 bp, Homo sapien
agctgaactcgctgcatttgtgcaa

SEQ ID NO: 3198580 - DNA, 25 bp, Homo sapien
gaaagattcttggaaagcaacggct

SEQ ID NO: 3198581 - DNA, 25 bp, Homo sapien
tgtttttgagacaaatacaatttta

SEQ ID NO: 3198582 - DNA, 25 bp, Homo sapien
tcgttttgtttttgagacaaataca

SEQ ID NO: 3198583 - DNA, 25 bp, Homo sapien
tttgctgcattggatctagactcct

SEQ ID NO: 3198584 - DNA, 25 bp, Homo sapien
tgctgcattggatctagactccttt

SEQ ID NO: 3198585 - DNA, 25 bp, Homo sapien
cgtggttcaggttcatccagttgta

SEQ ID NO: 3198586 - DNA, 25 bp, Homo sapien
atgtttctaaaattcgtggttcagg

SEQ ID NO: 3198587 - DNA, 25 bp, Homo sapien
gataaaacaacaggttctgcaggga

SEQ ID NO: 3198588 - DNA, 25 bp, Homo sapien
agataaaacaacaggttctgcaggg

SEQ ID NO: 3198589 - DNA, 25 bp, Homo sapien
catatgctagttcagataaaacaac

SEQ ID NO: 3198590 - DNA, 25 bp, Homo sapien
tgtacttttgaaacatatgctagtt

SEQ ID NO: 3198591 - DNA, 25 bp, Homo sapien
gctatatttcaggtattctgaacga

SEQ ID NO: 3198592 - DNA, 25 bp, Homo sapien
agccaatgaactgctatatttcagg

SEQ ID NO: 3198593 - DNA, 25 bp, Homo sapien
tctttctttaacgatctgtgaaatc

SEQ ID NO: 3198594 - DNA, 25 bp, Homo sapien
ttctgaacgattagaaattagttga

SEQ ID NO: 3198595 - DNA, 25 bp, Homo sapien
tctggcttaatgtcctggctgtaat

SEQ ID NO: 3198596 - DNA, 25 bp, Homo sapien
gctgtaattgtattcacctgtgcct

SEQ ID NO: 3198597 - DNA, 25 bp, Homo sapien
gaagagaccttcttgctgtaacaac

SEQ ID NO: 3198598 - DNA, 25 bp, Homo sapien
tgtgcctatagctacaacctcatgt

SEQ ID NO: 3198599 - DNA, 25 bp, Homo sapien
aatctgggctgatcctttaggcaac

SEQ ID NO: 3198600 - DNA, 25 bp, Homo sapien
tttttccatcatagcaggatttttg

SEQ ID NO: 3198601 - DNA, 25 bp, Homo sapien
ggcaactggttcatgtaaaggcaaa

SEQ ID NO: 3198602 - DNA, 25 bp, Homo sapien
gattagaagttggttctgtacaaaa

SEQ ID NO: 3198603 - DNA, 25 bp, Homo sapien
tataaaatgactcagcaatgctccc

SEQ ID NO: 3198604 - DNA, 25 bp, Homo sapien
catctttaggacagtaaacagtcag

SEQ ID NO: 3198605 - DNA, 25 bp, Homo sapien
gtatactgctgatgtaaactggctg

SEQ ID NO: 3198606 - DNA, 25 bp, Homo sapien
taaattttgccttcaacagccacgt

SEQ ID NO: 3198607 - DNA, 25 bp, Homo sapien
tttctaagcctctggtatcactgca

SEQ ID NO: 3198608 - DNA, 25 bp, Homo sapien
cgttgctttatagcgatttctaagc

SEQ ID NO: 3198609 - DNA, 25 bp, Homo sapien
gtgagtgcatcatcaacacgttgct

SEQ ID NO: 3198610 - DNA, 25 bp, Homo sapien
ctaaactaatatgaggtctgttgac

SEQ ID NO: 3198611 - DNA, 25 bp, Homo sapien
taaaccgacttaacattgcagcctt

SEQ ID NO: 3198612 - DNA, 25 bp, Homo sapien
ctgcatgatatgtaccagcttcaag

SEQ ID NO: 3198613 - DNA, 25 bp, Homo sapien
cagccttacaaagccgacttgccat

SEQ ID NO: 3198614 - DNA, 25 bp, Homo sapien
ttggcaagcaggttaaaccgactta

SEQ ID NO: 3198615 - DNA, 25 bp, Homo sapien
cacatgttaaattgctctatgcagg

SEQ ID NO: 3198616 - DNA, 25 bp, Homo sapien
aatccaggatccatagccatgttgt

SEQ ID NO: 3198617 - DNA, 25 bp, Homo sapien
ttgctctatgcagggagatttcaca

SEQ ID NO: 3198618 - DNA, 25 bp, Homo sapien
cttcttgataggaggcagacataca

SEQ ID NO: 3198619 - DNA, 25 bp, Homo sapien
tttaatgtgataatggattgcctat

SEQ ID NO: 3198620 - DNA, 25 bp, Homo sapien
tttttaatgtgataatggattgcct

SEQ ID NO: 3198621 - DNA, 25 bp, Homo sapien
ttttaatgtgataatggattgccta

SEQ ID NO: 3198622 - DNA, 25 bp, Homo sapien
ttaatgtgataatggattgcctatt

SEQ ID NO: 3198623 - DNA, 25 bp, Homo sapien
tcacatttggtacagatagatcttg

SEQ ID NO: 3198624 - DNA, 25 bp, Homo sapien
aactgagtgagatgccaggatacaa

SEQ ID NO: 3198625 - DNA, 25 bp, Homo sapien
tatatctgtgattgtaaaccaagga

SEQ ID NO: 3198626 - DNA, 25 bp, Homo sapien
catggtgactggcaaatattaggca

SEQ ID NO: 3198627 - DNA, 25 bp, Homo sapien
tgctcagactatcttggagtggtgc

SEQ ID NO: 3198628 - DNA, 25 bp, Homo sapien
ggaactttcccctgatttgctcaga

SEQ ID NO: 3198629 - DNA, 25 bp, Homo sapien
tgcgaactgctgttttagacaccag

SEQ ID NO: 3198630 - DNA, 25 bp, Homo sapien
ggtgcttctcccgagcaaccaggtt

SEQ ID NO: 3198631 - DNA, 25 bp, Homo sapien
ttatgtgggttctacagggctgact

SEQ ID NO: 3198632 - DNA, 25 bp, Homo sapien
gggctgactgcaggatttgagattg

SEQ ID NO: 3198633 - DNA, 25 bp, Homo sapien
tggattctggtatatgcagaagtgg

SEQ ID NO: 3198634 - DNA, 25 bp, Homo sapien
aggatttgagattgtgtggattctg

SEQ ID NO: 3198635 - DNA, 25 bp, Homo sapien
tattccacttaagtgaattatgtag

SEQ ID NO: 3198636 - DNA, 25 bp, Homo sapien
ttcaatagactggaacgtccaaggg

SEQ ID NO: 3198637 - DNA, 25 bp, Homo sapien
cacttaagtgaattatgtagaacaa

SEQ ID NO: 3198638 - DNA, 25 bp, Homo sapien
tgtagaacaagcaaatccataaaac

SEQ ID NO: 3198639 - DNA, 25 bp, Homo sapien
cagattttcgtgaaccgcgaatgct

SEQ ID NO: 3198640 - DNA, 25 bp, Homo sapien
cagcagattttcgtgaaccgcgaat

SEQ ID NO: 3198641 - DNA, 25 bp, Homo sapien
aacagcagattttcgtgaaccgcga

SEQ ID NO: 3198642 - DNA, 25 bp, Homo sapien
gaacagcagattttcgtgaaccgcg

SEQ ID NO: 3198643 - DNA, 25 bp, Homo sapien
ttccattgctcatgaggaactgcgt

SEQ ID NO: 3198644 - DNA, 25 bp, Homo sapien
ctttgttccattgctcatgaggaac

SEQ ID NO: 3198645 - DNA, 25 bp, Homo sapien
tgttccattgctcatgaggaactgc

SEQ ID NO: 3198646 - DNA, 25 bp, Homo sapien
ccattgctcatgaggaactgcgttc

SEQ ID NO: 3198647 - DNA, 25 bp, Homo sapien
tgaattgccaagaaagtcaggtgac

SEQ ID NO: 3198648 - DNA, 25 bp, Homo sapien
caatcaccaggtagcagagactcgt

SEQ ID NO: 3198649 - DNA, 25 bp, Homo sapien
agtccatagcccgtatgaattgcca

SEQ ID NO: 3198650 - DNA, 25 bp, Homo sapien
caagttttcagcaagtccaatgact

SEQ ID NO: 3198651 - DNA, 25 bp, Homo sapien
tggcatggcagaaccgctaaagtag

SEQ ID NO: 3198652 - DNA, 25 bp, Homo sapien
aatgagtgcgcaacagagatctcag

SEQ ID NO: 3198653 - DNA, 25 bp, Homo sapien
tgtcacccacataatcagtgaacct

SEQ ID NO: 3198654 - DNA, 25 bp, Homo sapien
cataatcagtgaacctgagcaatga

SEQ ID NO: 3198655 - DNA, 25 bp, Homo sapien
caaatcaatgaatttccaatggtat

SEQ ID NO: 3198656 - DNA, 25 bp, Homo sapien
tgaatttccaatggtataacttagg

SEQ ID NO: 3198657 - DNA, 25 bp, Homo sapien
gaatgttcacattctgagatagaaa

SEQ ID NO: 3198658 - DNA, 25 bp, Homo sapien
tccaatggtataacttaggagccat

SEQ ID NO: 3198659 - DNA, 25 bp, Homo sapien
ttcctttatcattctattttcctta

SEQ ID NO: 3198660 - DNA, 25 bp, Homo sapien
tattttcctttatcattctattttc

SEQ ID NO: 3198661 - DNA, 25 bp, Homo sapien
cttttattttcctttatcattctat

SEQ ID NO: 3198662 - DNA, 25 bp, Homo sapien
tcctttatcattctattttccttac

SEQ ID NO: 3198663 - DNA, 25 bp, Homo sapien
tttggaccatcattccatagacagc

SEQ ID NO: 3198664 - DNA, 25 bp, Homo sapien
catgtgcatgctgtgtaggaacctg

SEQ ID NO: 3198665 - DNA, 25 bp, Homo sapien
cctgtgagatgtcactggcaatcat

SEQ ID NO: 3198666 - DNA, 25 bp, Homo sapien
tggcaatcatttggaccatcattcc

SEQ ID NO: 3198667 - DNA, 25 bp, Homo sapien
ccctttcttgtttgacccagtgaga

SEQ ID NO: 3198668 - DNA, 25 bp, Homo sapien
tattggaacatagggcagttgtcag

SEQ ID NO: 3198669 - DNA, 25 bp, Homo sapien
cagtgagaacaaaacattccttgga

SEQ ID NO: 3198670 - DNA, 25 bp, Homo sapien
tcaggttctaagcttctagtaagcc

SEQ ID NO: 3198671 - DNA, 25 bp, Homo sapien
taacctgagttggtccagtgggtac

SEQ ID NO: 3198672 - DNA, 25 bp, Homo sapien
gataatctgatcaagcaatgctggc

SEQ ID NO: 3198673 - DNA, 25 bp, Homo sapien
taagatctctaattggcctagccag

SEQ ID NO: 3198674 - DNA, 25 bp, Homo sapien
gctatactagtaggcaaactcagga

SEQ ID NO: 3198675 - DNA, 25 bp, Homo sapien
caattcatcccgtctcttaagccat

SEQ ID NO: 3198676 - DNA, 25 bp, Homo sapien
tccagtaacttctacgatctgatct

SEQ ID NO: 3198677 - DNA, 25 bp, Homo sapien
catgtagttcaagagtgctgtccgc

SEQ ID NO: 3198678 - DNA, 25 bp, Homo sapien
taaatccattagagttccaggaaga

SEQ ID NO: 3198679 - DNA, 25 bp, Homo sapien
ggtacttatgagatccagtcctggc

SEQ ID NO: 3198680 - DNA, 25 bp, Homo sapien
tcccaaggtcaagatcgccacatga

SEQ ID NO: 3198681 - DNA, 25 bp, Homo sapien
ggtccacaaatcaagctcccaaggt

SEQ ID NO: 3198682 - DNA, 25 bp, Homo sapien
tgaagtgaaaacgagaccaaggtct

SEQ ID NO: 3198683 - DNA, 25 bp, Homo sapien
cagatggggcacatttcgttgactc

SEQ ID NO: 3198684 - DNA, 25 bp, Homo sapien
gggcacatttcgttgactccatcaa

SEQ ID NO: 3198685 - DNA, 25 bp, Homo sapien
catgctgaaaattggaattcaccca

SEQ ID NO: 3198686 - DNA, 25 bp, Homo sapien
ttttcctgtcaaagatgcagatggg

SEQ ID NO: 3198687 - DNA, 25 bp, Homo sapien
tgagattaggagcacagcattcaaa

SEQ ID NO: 3198688 - DNA, 25 bp, Homo sapien
gaatgttagcaaagagacctgtcct

SEQ ID NO: 3198689 - DNA, 25 bp, Homo sapien
gacgaccttggctatattcctggaa

SEQ ID NO: 3198690 - DNA, 25 bp, Homo sapien
aaaaggagtattcaccacgcaggga

SEQ ID NO: 3198691 - DNA, 25 bp, Homo sapien
taagcagcatcggtgaatgaccctc

SEQ ID NO: 3198692 - DNA, 25 bp, Homo sapien
aagagtgcagatgttccacttcttt

SEQ ID NO: 3198693 - DNA, 25 bp, Homo sapien
gaagagtgcagatgttccacttctt

SEQ ID NO: 3198694 - DNA, 25 bp, Homo sapien
agttggagtggactcaggttgaaga

SEQ ID NO: 3198695 - DNA, 25 bp, Homo sapien
ctgatcatattagacaggaggctgg

SEQ ID NO: 3198696 - DNA, 25 bp, Homo sapien
caagacaaagggtgctatagccacc

SEQ ID NO: 3198697 - DNA, 25 bp, Homo sapien
tatagccacctgtcgccttagggaa

SEQ ID NO: 3198698 - DNA, 25 bp, Homo sapien
gaaacagggatgggtcttgagtcca

SEQ ID NO: 3198699 - DNA, 25 bp, Homo sapien
cctgtccctgacataggttgagtga

SEQ ID NO: 3198700 - DNA, 25 bp, Homo sapien
tgaatcctgtatggactcctgtccc

SEQ ID NO: 3198701 - DNA, 25 bp, Homo sapien
gagaggatactatttttgccccaat

SEQ ID NO: 3198702 - DNA, 25 bp, Homo sapien
tataaactggtatggcatgtcagag

SEQ ID NO: 3198703 - DNA, 25 bp, Homo sapien
tgctgtagagagaagtcgtcaggct

SEQ ID NO: 3198704 - DNA, 25 bp, Homo sapien
cacttcaatgtcttacttatcttct

SEQ ID NO: 3198705 - DNA, 25 bp, Homo sapien
gagagttcctccaatcacttcaatg

SEQ ID NO: 3198706 - DNA, 25 bp, Homo sapien
gcttcggtagtaaagaggcacactc

SEQ ID NO: 3198707 - DNA, 25 bp, Homo sapien
ggaatccatgaactaactgcacagg

SEQ ID NO: 3198708 - DNA, 25 bp, Homo sapien
caaacccatgtcaggaacgtcttca

SEQ ID NO: 3198709 - DNA, 25 bp, Homo sapien
gaacgtcttcattaaggtccagtcc

SEQ ID NO: 3198710 - DNA, 25 bp, Homo sapien
gcacaggctgttctgtttaatccaa

SEQ ID NO: 3198711 - DNA, 25 bp, Homo sapien
tatcaataataattttgcaaacaga

SEQ ID NO: 3198712 - DNA, 25 bp, Homo sapien
acatttaaattctagttattatcaa

SEQ ID NO: 3198713 - DNA, 25 bp, Homo sapien
ttaaccaagaaaagatatacattta

SEQ ID NO: 3198714 - DNA, 25 bp, Homo sapien
tttgcaaacagactctccttcttac

SEQ ID NO: 3198715 - DNA, 25 bp, Homo sapien
cacagagcccataggctcttttggg

SEQ ID NO: 3198716 - DNA, 25 bp, Homo sapien
tgcgtctaaagcattcacagagccc

SEQ ID NO: 3198717 - DNA, 25 bp, Homo sapien
tctgttctgcgtctaaagcattcac

SEQ ID NO: 3198718 - DNA, 25 bp, Homo sapien
cataggctcttttggggcaacctgt

SEQ ID NO: 3198719 - DNA, 25 bp, Homo sapien
accagttccaggaggcagcctggtt

SEQ ID NO: 3198720 - DNA, 25 bp, Homo sapien
cctggttcaggccagtccatttact

SEQ ID NO: 3198721 - DNA, 25 bp, Homo sapien
catttactctctgtgtgacactgag

SEQ ID NO: 3198722 - DNA, 25 bp, Homo sapien
tgacactgagggtgctggatgtcat

SEQ ID NO: 3198723 - DNA, 25 bp, Homo sapien
tgtatccacgagttctccatccatg

SEQ ID NO: 3198724 - DNA, 25 bp, Homo sapien
tagtcagcccttgtatccacgagtt

SEQ ID NO: 3198725 - DNA, 25 bp, Homo sapien
atcttctcattatagtcagcccttg

SEQ ID NO: 3198726 - DNA, 25 bp, Homo sapien
tcttctttggacatatgtaaatatg

SEQ ID NO: 3198727 - DNA, 25 bp, Homo sapien
attcaagaagctctatagggaggtc

SEQ ID NO: 3198728 - DNA, 25 bp, Homo sapien
agaagctctatagggaggtccacgt

SEQ ID NO: 3198729 - DNA, 25 bp, Homo sapien
catgttgtgaggccattcaagaagc

SEQ ID NO: 3198730 - DNA, 25 bp, Homo sapien
caagaagctctatagggaggtccac

SEQ ID NO: 3198731 - DNA, 25 bp, Homo sapien
tccaagaactggcttaaagctcttt

SEQ ID NO: 3198732 - DNA, 25 bp, Homo sapien
ttcccactattcaggaccatcattt

SEQ ID NO: 3198733 - DNA, 25 bp, Homo sapien
caagaactggcttaaagctctttct

SEQ ID NO: 3198734 - DNA, 25 bp, Homo sapien
tccatacctcattcccactattcag

SEQ ID NO: 3198735 - DNA, 25 bp, Homo sapien
tcaattgctgttgggctcttcttac

SEQ ID NO: 3198736 - DNA, 25 bp, Homo sapien
ggagttaggacccacaaacttctca

SEQ ID NO: 3198737 - DNA, 25 bp, Homo sapien
tctgactcaattgctgttgggctct

SEQ ID NO: 3198738 - DNA, 25 bp, Homo sapien
ccccagctctgactcaattgctgtt

SEQ ID NO: 3198739 - DNA, 25 bp, Homo sapien
gacaccagggtcataggcaacagct

SEQ ID NO: 3198740 - DNA, 25 bp, Homo sapien
cgtgcaatctggtcacaactgggaa

SEQ ID NO: 3198741 - DNA, 25 bp, Homo sapien
tacacgcactctttggagccatggc

SEQ ID NO: 3198742 - DNA, 25 bp, Homo sapien
gagccatggcttgggtatcgtgcaa

SEQ ID NO: 3198743 - DNA, 25 bp, Homo sapien
gctccttgcttaccccacatttgtg

SEQ ID NO: 3198744 - DNA, 25 bp, Homo sapien
ctgctccttgcttaccccacatttg

SEQ ID NO: 3198745 - DNA, 25 bp, Homo sapien
tcctgctccttgcttaccccacatt

SEQ ID NO: 3198746 - DNA, 25 bp, Homo sapien
ttcctgctccttgcttaccccacat

SEQ ID NO: 3198747 - DNA, 25 bp, Homo sapien
gcaaaagatcaccagccaaatgaga

SEQ ID NO: 3198748 - DNA, 25 bp, Homo sapien
gaatcatgggaaccataggctcagg

SEQ ID NO: 3198749 - DNA, 25 bp, Homo sapien
tgagatggagaattcgtcttaggcc

SEQ ID NO: 3198750 - DNA, 25 bp, Homo sapien
gaattctaaatgctggttacccctg

SEQ ID NO: 3198751 - DNA, 25 bp, Homo sapien
cataggagagctcatgaagtggcca

SEQ ID NO: 3198752 - DNA, 25 bp, Homo sapien
tccaaagcttaagagggtgggcatc

SEQ ID NO: 3198753 - DNA, 25 bp, Homo sapien
tagtgatcagggtcagacacatccc

SEQ ID NO: 3198754 - DNA, 25 bp, Homo sapien
ttcctggcctcctaacagctggtag

SEQ ID NO: 3198755 - DNA, 25 bp, Homo sapien
cagttgtgctatgcagattccctgc

SEQ ID NO: 3198756 - DNA, 25 bp, Homo sapien
ggataacctaccatcgcctttggca

SEQ ID NO: 3198757 - DNA, 25 bp, Homo sapien
taacagctaaaatgcgcaactggat

SEQ ID NO: 3198758 - DNA, 25 bp, Homo sapien
tttcctgagtaggagtcaacacggg

SEQ ID NO: 3198759 - DNA, 25 bp, Homo sapien
caatcatgttctatgctggatccca

SEQ ID NO: 3198760 - DNA, 25 bp, Homo sapien
tacgagatattgattcactgtagga

SEQ ID NO: 3198761 - DNA, 25 bp, Homo sapien
catgttctatgctggatcccacagt

SEQ ID NO: 3198762 - DNA, 25 bp, Homo sapien
gcaactgtctgaaggaccaaatacg

SEQ ID NO: 3198763 - DNA, 25 bp, Homo sapien
gattcctcctcatgcctacacagag

SEQ ID NO: 3198764 - DNA, 25 bp, Homo sapien
cctgaggtgcttgtatgtgaattga

SEQ ID NO: 3198765 - DNA, 25 bp, Homo sapien
gaagttttatttgcccctgaggtgc

SEQ ID NO: 3198766 - DNA, 25 bp, Homo sapien
ggaaactcttacttatcaggtacaa

SEQ ID NO: 3198767 - DNA, 25 bp, Homo sapien
tatgattggtaactgcgtgcaccca

SEQ ID NO: 3198768 - DNA, 25 bp, Homo sapien
tatgatggacaacctgcatgtttca

SEQ ID NO: 3198769 - DNA, 25 bp, Homo sapien
cattcgaaagactggttattgctca

SEQ ID NO: 3198770 - DNA, 25 bp, Homo sapien
taagtatgtgcagtccattcgaaag

SEQ ID NO: 3198771 - DNA, 25 bp, Homo sapien
caatcatttaaacaaggaatggtgg

SEQ ID NO: 3198772 - DNA, 25 bp, Homo sapien
cagtagatgaatgggagagactgct

SEQ ID NO: 3198773 - DNA, 25 bp, Homo sapien
gagactgctggctacaaggctaggt

SEQ ID NO: 3198774 - DNA, 25 bp, Homo sapien
gctaggtaggaggtgatcgcaatca

SEQ ID NO: 3198775 - DNA, 25 bp, Homo sapien
atatggcatctgaccaaccccactg

SEQ ID NO: 3198776 - DNA, 25 bp, Homo sapien
catatggcatctgaccaaccccact

SEQ ID NO: 3198777 - DNA, 25 bp, Homo sapien
tgtgtagtcctttgccctgcttaag

SEQ ID NO: 3198778 - DNA, 25 bp, Homo sapien
caccccgtatagtaatatcttcctc

SEQ ID NO: 3198779 - DNA, 25 bp, Homo sapien
tgtttcagagtcaatgtgtagtcct

SEQ ID NO: 3198780 - DNA, 25 bp, Homo sapien
cccgtatagtaatatcttcctctgt

SEQ ID NO: 3198781 - DNA, 25 bp, Homo sapien
gtgttaacctcagtaaacatattac

SEQ ID NO: 3198782 - DNA, 25 bp, Homo sapien
cgtgcctggccgagattttatgtgt

SEQ ID NO: 3198783 - DNA, 25 bp, Homo sapien
cagttgcccattgataagaaataaa

SEQ ID NO: 3198784 - DNA, 25 bp, Homo sapien
tggccgagattttatgtgttaacct

SEQ ID NO: 3198785 - DNA, 25 bp, Homo sapien
gggccgaagtttttccgccagagca

SEQ ID NO: 3198786 - DNA, 25 bp, Homo sapien
gcactccttccttactcctgttgag

SEQ ID NO: 3198787 - DNA, 25 bp, Homo sapien
tagcaaccgccagtgagctgtgaag

SEQ ID NO: 3198788 - DNA, 25 bp, Homo sapien
ctgcgggaggtgacgccgggaggtc

SEQ ID NO: 3198789 - DNA, 25 bp, Homo sapien
caccaaaaacgccagggctagggag

SEQ ID NO: 3198790 - DNA, 25 bp, Homo sapien
gttccccgtccgcagtttgcgcatg

SEQ ID NO: 3198791 - DNA, 25 bp, Homo sapien
ggctgggacagcaacaccaaaaacg

SEQ ID NO: 3198792 - DNA, 25 bp, Homo sapien
gccagacgcgattctggctgggaca

SEQ ID NO: 3198793 - DNA, 25 bp, Homo sapien
atgtttctactcaatgaagcatgaa

SEQ ID NO: 3198794 - DNA, 25 bp, Homo sapien
caatacttgcgtgtctgtctgggat

SEQ ID NO: 3198795 - DNA, 25 bp, Homo sapien
tttgacagagtgcttcaagaatgca

SEQ ID NO: 3198796 - DNA, 25 bp, Homo sapien
tattttccagaagcctaatgagatt

SEQ ID NO: 3198797 - DNA, 25 bp, Homo sapien
ttttgtttacgactctgcaagccat

SEQ ID NO: 3198798 - DNA, 25 bp, Homo sapien
cttcttttgtttacgactctgcaag

SEQ ID NO: 3198799 - DNA, 25 bp, Homo sapien
ttgtttacgactctgcaagccatca

SEQ ID NO: 3198800 - DNA, 25 bp, Homo sapien
tcttttgtttacgactctgcaagcc

SEQ ID NO: 3198801 - DNA, 25 bp, Homo sapien
gctgctgtgatctccatgactcaag

SEQ ID NO: 3198802 - DNA, 25 bp, Homo sapien
tcaggtaagcctggtagacagcaag

SEQ ID NO: 3198803 - DNA, 25 bp, Homo sapien
ttcatatgatttaagaggtctccca

SEQ ID NO: 3198804 - DNA, 25 bp, Homo sapien
tcaaatcagtatctgaagggacctg

SEQ ID NO: 3198805 - DNA, 25 bp, Homo sapien
gtgtaacaacgtcataaactctcgg

SEQ ID NO: 3198806 - DNA, 25 bp, Homo sapien
agtaactgggttagtgagcacggcc

SEQ ID NO: 3198807 - DNA, 25 bp, Homo sapien
cagacttattaaatcccaggtggcg

SEQ ID NO: 3198808 - DNA, 25 bp, Homo sapien
caatgagaactattcgcacaggctg

SEQ ID NO: 3198809 - DNA, 25 bp, Homo sapien
ttttccaaagacttagccagtaaca

SEQ ID NO: 3198810 - DNA, 25 bp, Homo sapien
ttagcatgacatattatgaaaaatt

SEQ ID NO: 3198811 - DNA, 25 bp, Homo sapien
ttattattagcatgacatattatga

SEQ ID NO: 3198812 - DNA, 25 bp, Homo sapien
tattagcatgacatattatgaaaaa

SEQ ID NO: 3198813 - DNA, 25 bp, Homo sapien
gagactatccactatgggctctgag

SEQ ID NO: 3198814 - DNA, 25 bp, Homo sapien
tgagtgtccctgcatacttactggg

SEQ ID NO: 3198815 - DNA, 25 bp, Homo sapien
tagcatcccacgaaacagtaacagg

SEQ ID NO: 3198816 - DNA, 25 bp, Homo sapien
tggtactgactaaacaacccgactg

SEQ ID NO: 3198817 - DNA, 25 bp, Homo sapien
agtgctacctcctactagctgtgag

SEQ ID NO: 3198818 - DNA, 25 bp, Homo sapien
taattaaggcttagggacacagact

SEQ ID NO: 3198819 - DNA, 25 bp, Homo sapien
gacacagacttcagagccaataaaa

SEQ ID NO: 3198820 - DNA, 25 bp, Homo sapien
taactgagatgactgcctgtgcaag

SEQ ID NO: 3198821 - DNA, 25 bp, Homo sapien
gattctgtatctctcccgttactgg

SEQ ID NO: 3198822 - DNA, 25 bp, Homo sapien
ggaaactgtagctcataatagcctg

SEQ ID NO: 3198823 - DNA, 25 bp, Homo sapien
catatttccattcaggtagagtcct

SEQ ID NO: 3198824 - DNA, 25 bp, Homo sapien
tgttagtaattttggaaactgtagc

SEQ ID NO: 3198825 - DNA, 25 bp, Homo sapien
tgcctctgtgtcactagtttggcat

SEQ ID NO: 3198826 - DNA, 25 bp, Homo sapien
ggatccctggtggagctagagtcat

SEQ ID NO: 3198827 - DNA, 25 bp, Homo sapien
ctgtgtcactagtttggcatccttg

SEQ ID NO: 3198828 - DNA, 25 bp, Homo sapien
ccctgggtactgaggggaaagcacg

SEQ ID NO: 3198829 - DNA, 25 bp, Homo sapien
ttgcacagtggccagattggtttgg

SEQ ID NO: 3198830 - DNA, 25 bp, Homo sapien
gtcccattcacagagttctcacagc

SEQ ID NO: 3198831 - DNA, 25 bp, Homo sapien
tcaggcttgcacagtggccagattg

SEQ ID NO: 3198832 - DNA, 25 bp, Homo sapien
agttgctgaagggaggtcccattca

SEQ ID NO: 3198833 - DNA, 25 bp, Homo sapien
gcgcgccgccccctactcgctcggg

SEQ ID NO: 3198834 - DNA, 25 bp, Homo sapien
ctgcgcgccgccccctactcgctcg

SEQ ID NO: 3198835 - DNA, 25 bp, Homo sapien
ccccagttctcctccctcctgcgcg

SEQ ID NO: 3198836 - DNA, 25 bp, Homo sapien
cgcgcccccagttctcctccctcct

SEQ ID NO: 3198837 - DNA, 25 bp, Homo sapien
ggccgcggcgtcacatcttctacat

SEQ ID NO: 3198838 - DNA, 25 bp, Homo sapien
cgggatcccgttgcaaccgcgggca

SEQ ID NO: 3198839 - DNA, 25 bp, Homo sapien
gcgggcaccgcgtccgctaatctgg

SEQ ID NO: 3198840 - DNA, 25 bp, Homo sapien
ttcacggatgggtgtctccgcggac

SEQ ID NO: 3198841 - DNA, 25 bp, Homo sapien
gccccccagcctcccgcccggcagc

SEQ ID NO: 3198842 - DNA, 25 bp, Homo sapien
ccagcctcccgcccggcagcgcgcg

SEQ ID NO: 3198843 - DNA, 25 bp, Homo sapien
gcagcgcgcggccgcgcccgcggtc

SEQ ID NO: 3198844 - DNA, 25 bp, Homo sapien
cagcgcgcggccgcgcccgcggtcc

SEQ ID NO: 3198845 - DNA, 25 bp, Homo sapien
ggccgggatccccgagccgctggag

SEQ ID NO: 3198846 - DNA, 25 bp, Homo sapien
gagccgctggagccgcgcggggagc

SEQ ID NO: 3198847 - DNA, 25 bp, Homo sapien
agccgctggagccgcgcggggagcc

SEQ ID NO: 3198848 - DNA, 25 bp, Homo sapien
cccggccgggatccccgagccgctg

SEQ ID NO: 3198849 - DNA, 25 bp, Homo sapien
cgtttttgcagtacagccgcttggg

SEQ ID NO: 3198850 - DNA, 25 bp, Homo sapien
agaagcccccgtttttgcagtacag

SEQ ID NO: 3198851 - DNA, 25 bp, Homo sapien
cgtcggggtggatgcgcaggaagaa

SEQ ID NO: 3198852 - DNA, 25 bp, Homo sapien
tgccgccatcctcgggcaaggcggg

SEQ ID NO: 3198853 - DNA, 25 bp, Homo sapien
ccacacggagcgctagggtcgcagt

SEQ ID NO: 3198854 - DNA, 25 bp, Homo sapien
gcgcggccagaaaccacacggagcg

SEQ ID NO: 3198855 - DNA, 25 bp, Homo sapien
ctagggtcgcagtgaagatccggga

SEQ ID NO: 3198856 - DNA, 25 bp, Homo sapien
tgagtggtgaacccgaaaccgccga

SEQ ID NO: 3198857 - DNA, 25 bp, Homo sapien
agaccgtttcgttctgctgcggtcc

SEQ ID NO: 3198858 - DNA, 25 bp, Homo sapien
ttcctgtctttgtccccgggacagc

SEQ ID NO: 3198859 - DNA, 25 bp, Homo sapien
agcacgcagcagatagaagcggcca

SEQ ID NO: 3198860 - DNA, 25 bp, Homo sapien
tttcgttctgctgcggtccttcctg

SEQ ID NO: 3198861 - DNA, 25 bp, Homo sapien
acagacgtgtgctacgggacatagg

SEQ ID NO: 3198862 - DNA, 25 bp, Homo sapien
catgccagccttcttacagacgtgt

SEQ ID NO: 3198863 - DNA, 25 bp, Homo sapien
gcttgtacaggcatctcgtggtttt

SEQ ID NO: 3198864 - DNA, 25 bp, Homo sapien
aaagatacagatttgccttgctccg

SEQ ID NO: 3198865 - DNA, 25 bp, Homo sapien
tgtgttccccgaactcatgttgaag

SEQ ID NO: 3198866 - DNA, 25 bp, Homo sapien
taatcccactatctctgcatgtgct

SEQ ID NO: 3198867 - DNA, 25 bp, Homo sapien
gtgagcccccatccaatctgactga

SEQ ID NO: 3198868 - DNA, 25 bp, Homo sapien
gggcctctaaagatgtgattacgtt

SEQ ID NO: 3198869 - DNA, 25 bp, Homo sapien
cacatacaacttgagaagcacggag

SEQ ID NO: 3198870 - DNA, 25 bp, Homo sapien
tatgaatggcacaactgacacagca

SEQ ID NO: 3198871 - DNA, 25 bp, Homo sapien
gaaacgtacctgatagctgcagcct

SEQ ID NO: 3198872 - DNA, 25 bp, Homo sapien
agacactcgctttggaaacgtacct

SEQ ID NO: 3198873 - DNA, 25 bp, Homo sapien
ggaacacctcctgaatatagccttt

SEQ ID NO: 3198874 - DNA, 25 bp, Homo sapien
gagataatgcaaccagcttgttggc

SEQ ID NO: 3198875 - DNA, 25 bp, Homo sapien
tcttgggtgatttgagagagcttga

SEQ ID NO: 3198876 - DNA, 25 bp, Homo sapien
ccttttcgaaatgcttcttgggtga

SEQ ID NO: 3198877 - DNA, 25 bp, Homo sapien
ttcatagccaggtaacggttagcac

SEQ ID NO: 3198878 - DNA, 25 bp, Homo sapien
tagcacacactcctttgatagacac

SEQ ID NO: 3198879 - DNA, 25 bp, Homo sapien
ttgatagacacaactcctctctctt

SEQ ID NO: 3198880 - DNA, 25 bp, Homo sapien
tctcttctgcttgaagttgtagctt

SEQ ID NO: 3198881 - DNA, 25 bp, Homo sapien
attgcttcctatatcataatacttc

SEQ ID NO: 3198882 - DNA, 25 bp, Homo sapien
tattgcttcctatatcataatactt

SEQ ID NO: 3198883 - DNA, 25 bp, Homo sapien
cattcctcaaaggagactaagaaat

SEQ ID NO: 3198884 - DNA, 25 bp, Homo sapien
cctcaaaggagactaagaaatcctg

SEQ ID NO: 3198885 - DNA, 25 bp, Homo sapien
ttcctcaaaggagactaagaaatcc

SEQ ID NO: 3198886 - DNA, 25 bp, Homo sapien
ccattcctcaaaggagactaagaaa

SEQ ID NO: 3198887 - DNA, 25 bp, Homo sapien
gagcttgctcaataggaatccaaaa

SEQ ID NO: 3198888 - DNA, 25 bp, Homo sapien
tggcttttgagggagcttgctcaat

SEQ ID NO: 3198889 - DNA, 25 bp, Homo sapien
caaaagtgcttttgcttataccact

SEQ ID NO: 3198890 - DNA, 25 bp, Homo sapien
catgctctgtttactgggttgttta

SEQ ID NO: 3198891 - DNA, 25 bp, Homo sapien
gaagaattacctgttattattatca

SEQ ID NO: 3198892 - DNA, 25 bp, Homo sapien
atcattattattattacacttttca

SEQ ID NO: 3198893 - DNA, 25 bp, Homo sapien
aggaagaattacctgttattattat

SEQ ID NO: 3198894 - DNA, 25 bp, Homo sapien
cattattattattacacttttcata

SEQ ID NO: 3198895 - DNA, 25 bp, Homo sapien
ttatactgcccagttcgtttcagtg

SEQ ID NO: 3198896 - DNA, 25 bp, Homo sapien
ctggtgtatttccttgaccggtaag

SEQ ID NO: 3198897 - DNA, 25 bp, Homo sapien
tttcagtgccacataccaactggtg

SEQ ID NO: 3198898 - DNA, 25 bp, Homo sapien
tcagctcttagcagacattggaaga

SEQ ID NO: 3198899 - DNA, 25 bp, Homo sapien
aaatgagattagatgtggccattaa

SEQ ID NO: 3198900 - DNA, 25 bp, Homo sapien
tatgtatatcatctgccgcctaaag

SEQ ID NO: 3198901 - DNA, 25 bp, Homo sapien
caggtccgtcctgagtattcggcaa

SEQ ID NO: 3198902 - DNA, 25 bp, Homo sapien
tagagaaagcccagttagagggacc

SEQ ID NO: 3198903 - DNA, 25 bp, Homo sapien
tctcaatgacctggcgaagactgaa

SEQ ID NO: 3198904 - DNA, 25 bp, Homo sapien
catcttgaggtggaagggtctcccg

SEQ ID NO: 3198905 - DNA, 25 bp, Homo sapien
tactaagagctaaataggatcccca

SEQ ID NO: 3198906 - DNA, 25 bp, Homo sapien
catgagctacatgccgaacttttga

SEQ ID NO: 3198907 - DNA, 25 bp, Homo sapien
cgcatactctggagacaaaagcact

SEQ ID NO: 3198908 - DNA, 25 bp, Homo sapien
aaaaatcgtattaccactggcagga

SEQ ID NO: 3198909 - DNA, 25 bp, Homo sapien
tccactggtgccacgtgagagcaga

SEQ ID NO: 3198910 - DNA, 25 bp, Homo sapien
gaagagtatctgctgcattagccag

SEQ ID NO: 3198911 - DNA, 25 bp, Homo sapien
tattggctcaaacagtaaaccctag

SEQ ID NO: 3198912 - DNA, 25 bp, Homo sapien
aagaagtcgatttagtggtgcagca

SEQ ID NO: 3198913 - DNA, 25 bp, Homo sapien
ccttgagcccaatgataagaaagct

SEQ ID NO: 3198914 - DNA, 25 bp, Homo sapien
gctagtaattgctgacaagcccgct

SEQ ID NO: 3198915 - DNA, 25 bp, Homo sapien
cagtttttcaaacggcctctgaggg

SEQ ID NO: 3198916 - DNA, 25 bp, Homo sapien
tgtgcgcgcttcaactgagagaaaa

SEQ ID NO: 3198917 - DNA, 25 bp, Homo sapien
tagccgaagcagtagaaaagccgac

SEQ ID NO: 3198918 - DNA, 25 bp, Homo sapien
ggtcacaaggtaccctagccgaagc

SEQ ID NO: 3198919 - DNA, 25 bp, Homo sapien
tagaaaagccgactcaatgtgcgcg

SEQ ID NO: 3198920 - DNA, 25 bp, Homo sapien
tggttcaaccgctttctattcttct

SEQ ID NO: 3198921 - DNA, 25 bp, Homo sapien
gctttggttcaaccgctttctattc

SEQ ID NO: 3198922 - DNA, 25 bp, Homo sapien
cattttccgcgctttggttcaaccg

SEQ ID NO: 3198923 - DNA, 25 bp, Homo sapien
tccgcgctttggttcaaccgctttc

SEQ ID NO: 3198924 - DNA, 25 bp, Homo sapien
gagcccgtgcctccgcacaagagga

SEQ ID NO: 3198925 - DNA, 25 bp, Homo sapien
agtcccggaggttgccgcgaagtct

SEQ ID NO: 3198926 - DNA, 25 bp, Homo sapien
gccgcgaagtctgatccagcagaag

SEQ ID NO: 3198927 - DNA, 25 bp, Homo sapien
tttctaataagttggtcaccgtcag

SEQ ID NO: 3198928 - DNA, 25 bp, Homo sapien
cttgctttccgttcaaactagtaag

SEQ ID NO: 3198929 - DNA, 25 bp, Homo sapien
gatgaataagggaattctggaatgt

SEQ ID NO: 3198930 - DNA, 25 bp, Homo sapien
actagtaagcaacactggtcgacct

SEQ ID NO: 3198931 - DNA, 25 bp, Homo sapien
cagacttcatagtgttgagtccaag

SEQ ID NO: 3198932 - DNA, 25 bp, Homo sapien
actcaggccgaccttgcctccagga

SEQ ID NO: 3198933 - DNA, 25 bp, Homo sapien
catttcactcaggccgaccttgcct

SEQ ID NO: 3198934 - DNA, 25 bp, Homo sapien
ggctggacctggatggcatcaccag

SEQ ID NO: 3198935 - DNA, 25 bp, Homo sapien
ctggacctggatggcatcaccaggc

SEQ ID NO: 3198936 - DNA, 25 bp, Homo sapien
tagttttctcaggatacaaccagtc

SEQ ID NO: 3198937 - DNA, 25 bp, Homo sapien
atacaaccagtcagttcttcttcat

SEQ ID NO: 3198938 - DNA, 25 bp, Homo sapien
gacctgtgacttcctctagcataag

SEQ ID NO: 3198939 - DNA, 25 bp, Homo sapien
caggctactggtttccatgctggac

SEQ ID NO: 3198940 - DNA, 25 bp, Homo sapien
tacttgcagcttgtacggtcgtcca

SEQ ID NO: 3198941 - DNA, 25 bp, Homo sapien
gcttagctgtaaggataactccagg

SEQ ID NO: 3198942 - DNA, 25 bp, Homo sapien
acatttttgggtgcaataaactgaa

SEQ ID NO: 3198943 - DNA, 25 bp, Homo sapien
aacatttttgggtgcaataaactga

SEQ ID NO: 3198944 - DNA, 25 bp, Homo sapien
taacatttttgggtgcaataaactg

SEQ ID NO: 3198945 - DNA, 25 bp, Homo sapien
cattaattacagaaacataggctcc

SEQ ID NO: 3198946 - DNA, 25 bp, Homo sapien
aaagtaacactcctctaggggcagg

SEQ ID NO: 3198947 - DNA, 25 bp, Homo sapien
tgcttataatttcaggaccattaat

SEQ ID NO: 3198948 - DNA, 25 bp, Homo sapien
ttagcaacagccctggcgatcattg

SEQ ID NO: 3198949 - DNA, 25 bp, Homo sapien
tcagcaaatatctgacgtaactttg

SEQ ID NO: 3198950 - DNA, 25 bp, Homo sapien
tggcttcagcaaatatctgacgtaa

SEQ ID NO: 3198951 - DNA, 25 bp, Homo sapien
caaatatctgacgtaactttgcttc

SEQ ID NO: 3198952 - DNA, 25 bp, Homo sapien
tatctgacgtaactttgcttcagtc

SEQ ID NO: 3198953 - DNA, 25 bp, Homo sapien
tgaaccaatgccatccatcagtgtt

SEQ ID NO: 3198954 - DNA, 25 bp, Homo sapien
ccatcagtgttaagagtgaagccac

SEQ ID NO: 3198955 - DNA, 25 bp, Homo sapien
tcggacaaagtgcatccagctcatc

SEQ ID NO: 3198956 - DNA, 25 bp, Homo sapien
gtgaagccacaactcttttttccac

SEQ ID NO: 3198957 - DNA, 25 bp, Homo sapien
ggtacccttcgaagcagtttctgga

SEQ ID NO: 3198958 - DNA, 25 bp, Homo sapien
catccaaggcatgagggcgatttgt

SEQ ID NO: 3198959 - DNA, 25 bp, Homo sapien
tcaagtctgctccaacgtatccatg

SEQ ID NO: 3198960 - DNA, 25 bp, Homo sapien
cggtcctgagcattgggaactccaa

SEQ ID NO: 3198961 - DNA, 25 bp, Homo sapien
taatggtggttatcctttagaggta

SEQ ID NO: 3198962 - DNA, 25 bp, Homo sapien
taagtaaactggagataagtgcatc

SEQ ID NO: 3198963 - DNA, 25 bp, Homo sapien
gttggttgactcctcagatgctgag

SEQ ID NO: 3198964 - DNA, 25 bp, Homo sapien
ggctgactgtatacactataatggt

SEQ ID NO: 3198965 - DNA, 25 bp, Homo sapien
tctttgctgactgggtgcagatggt

SEQ ID NO: 3198966 - DNA, 25 bp, Homo sapien
gactgggtgcagatggttatctctc

SEQ ID NO: 3198967 - DNA, 25 bp, Homo sapien
gatggtgtgccgcaaacctctttgc

SEQ ID NO: 3198968 - DNA, 25 bp, Homo sapien
aaacagactgctgggtctgcggaga

SEQ ID NO: 3198969 - DNA, 25 bp, Homo sapien
tgagcaggcatagccatccagccat

SEQ ID NO: 3198970 - DNA, 25 bp, Homo sapien
tgatacaggccaaggacatagcagc

SEQ ID NO: 3198971 - DNA, 25 bp, Homo sapien
caggatggtcctcctctataagcca

SEQ ID NO: 3198972 - DNA, 25 bp, Homo sapien
gccagacccagcagtcctgtgtact

SEQ ID NO: 3198973 - DNA, 25 bp, Homo sapien
cagccaccttgacatcagggaggtt

SEQ ID NO: 3198974 - DNA, 25 bp, Homo sapien
tttcaggattctccgcaaggcacag

SEQ ID NO: 3198975 - DNA, 25 bp, Homo sapien
tcattgcctgcaagaaatccttcag

SEQ ID NO: 3198976 - DNA, 25 bp, Homo sapien
gagtaatcttcaccagtccagccac

SEQ ID NO: 3198977 - DNA, 25 bp, Homo sapien
tcacattctgatgttctaggctcat

SEQ ID NO: 3198978 - DNA, 25 bp, Homo sapien
gtcacattctgatgttctaggctca

SEQ ID NO: 3198979 - DNA, 25 bp, Homo sapien
tgtcacattctgatgttctaggctc

SEQ ID NO: 3198980 - DNA, 25 bp, Homo sapien
gatctaaaatcagtaaccacacatc

SEQ ID NO: 3198981 - DNA, 25 bp, Homo sapien
gtgtgatgccgctaaagcagtgctt

SEQ ID NO: 3198982 - DNA, 25 bp, Homo sapien
tatggctttgaatgcctagattaga

SEQ ID NO: 3198983 - DNA, 25 bp, Homo sapien
gaaaatacactatatcaaatatgtg

SEQ ID NO: 3198984 - DNA, 25 bp, Homo sapien
catggcatagcagaactgggaaaga

SEQ ID NO: 3198985 - DNA, 25 bp, Homo sapien
ctgggaaagataaaggaatatggaa

SEQ ID NO: 3198986 - DNA, 25 bp, Homo sapien
ggcatagcagaactgggaaagataa

SEQ ID NO: 3198987 - DNA, 25 bp, Homo sapien
gcagaactgggaaagataaaggaat

SEQ ID NO: 3198988 - DNA, 25 bp, Homo sapien
ggcgcctgttcaagtcaaccagaag

SEQ ID NO: 3198989 - DNA, 25 bp, Homo sapien
gatctgtgacaactcggcgcctgtt

SEQ ID NO: 3198990 - DNA, 25 bp, Homo sapien
tgtgtggcccgagacgataattctt

SEQ ID NO: 3198991 - DNA, 25 bp, Homo sapien
gattggacaactctgagcaagactg

SEQ ID NO: 3198992 - DNA, 25 bp, Homo sapien
tgaatagttgtaatctgggttagtt

SEQ ID NO: 3198993 - DNA, 25 bp, Homo sapien
tcctctaacttaaatgcccacttca

SEQ ID NO: 3198994 - DNA, 25 bp, Homo sapien
cgcttttcgttctagatccaagacc

SEQ ID NO: 3198995 - DNA, 25 bp, Homo sapien
atagttgtaatctgggttagtttct

SEQ ID NO: 3198996 - DNA, 25 bp, Homo sapien
ctctgaaccagaatctgaactagaa

SEQ ID NO: 3198997 - DNA, 25 bp, Homo sapien
tctgaaccagaatctgaactagaag

SEQ ID NO: 3198998 - DNA, 25 bp, Homo sapien
ctgaaccagaatctgaactagaaga

SEQ ID NO: 3198999 - DNA, 25 bp, Homo sapien
actctgaaccagaatctgaactaga

SEQ ID NO: 3199000 - DNA, 25 bp, Homo sapien
caccatttaacccagaacgcttcca

SEQ ID NO: 3199001 - DNA, 25 bp, Homo sapien
accatttaacccagaacgcttccat

SEQ ID NO: 3199002 - DNA, 25 bp, Homo sapien
tttaacccagaacgcttccatccag

SEQ ID NO: 3199003 - DNA, 25 bp, Homo sapien
aacccagaacgcttccatccagtag

SEQ ID NO: 3199004 - DNA, 25 bp, Homo sapien
ttgtcctcgacctctcccccgcatt

SEQ ID NO: 3199005 - DNA, 25 bp, Homo sapien
aggaaacaggatgcccttgtcctcg

SEQ ID NO: 3199006 - DNA, 25 bp, Homo sapien
aggatgcccttgtcctcgacctctc

SEQ ID NO: 3199007 - DNA, 25 bp, Homo sapien
aaacaggatgcccttgtcctcgacc

SEQ ID NO: 3199008 - DNA, 25 bp, Homo sapien
ttgtcagtgcttctatttacaacac

SEQ ID NO: 3199009 - DNA, 25 bp, Homo sapien
acagtagatgaatttgttaccactt

SEQ ID NO: 3199010 - DNA, 25 bp, Homo sapien
taccactttatttaattgctgttgt

SEQ ID NO: 3199011 - DNA, 25 bp, Homo sapien
ctgttgtctctggttgtcagtgctt

SEQ ID NO: 3199012 - DNA, 25 bp, Homo sapien
caggttctctcaaggcaggtaagga

SEQ ID NO: 3199013 - DNA, 25 bp, Homo sapien
ctgtgtctctggattgtggcttaat

SEQ ID NO: 3199014 - DNA, 25 bp, Homo sapien
gaatttctgtatctacttgctgtgt

SEQ ID NO: 3199015 - DNA, 25 bp, Homo sapien
tccactacctcggttccattttcaa

SEQ ID NO: 3199016 - DNA, 25 bp, Homo sapien
tgatgtgttaatcggagattcaata

SEQ ID NO: 3199017 - DNA, 25 bp, Homo sapien
atcggagattcaataatcagtcttg

SEQ ID NO: 3199018 - DNA, 25 bp, Homo sapien
gtcttggatcaatcaactctcccca

SEQ ID NO: 3199019 - DNA, 25 bp, Homo sapien
cttgctctcctgcatcacagcatac

SEQ ID NO: 3199020 - DNA, 25 bp, Homo sapien
tactgaaaactcactggaaggatac

SEQ ID NO: 3199021 - DNA, 25 bp, Homo sapien
gatacttcagagctataattgtggg

SEQ ID NO: 3199022 - DNA, 25 bp, Homo sapien
tgagctagagtaaacacatgcagat

SEQ ID NO: 3199023 - DNA, 25 bp, Homo sapien
acacatgcagatactgaaaactcac

SEQ ID NO: 3199024 - DNA, 25 bp, Homo sapien
ttccaaatataagttttgccaggac

SEQ ID NO: 3199025 - DNA, 25 bp, Homo sapien
caaatataagttttgccaggacaaa

SEQ ID NO: 3199026 - DNA, 25 bp, Homo sapien
ccaaatataagttttgccaggacaa

SEQ ID NO: 3199027 - DNA, 25 bp, Homo sapien
tccaaatataagttttgccaggaca

SEQ ID NO: 3199028 - DNA, 25 bp, Homo sapien
tacccattcgaatgaaagactctgg

SEQ ID NO: 3199029 - DNA, 25 bp, Homo sapien
tagagaagaactcctttaggtggct

SEQ ID NO: 3199030 - DNA, 25 bp, Homo sapien
aagactctggatgttttaagggcca

SEQ ID NO: 3199031 - DNA, 25 bp, Homo sapien
cattgttttagagcacccaggtggc

SEQ ID NO: 3199032 - DNA, 25 bp, Homo sapien
cgttctcctaaaggtaggagtcaga

SEQ ID NO: 3199033 - DNA, 25 bp, Homo sapien
ccaagagagagtagcgattaaaaaa

SEQ ID NO: 3199034 - DNA, 25 bp, Homo sapien
agatgcctttattcgttctcctaaa

SEQ ID NO: 3199035 - DNA, 25 bp, Homo sapien
gccaagagagagtagcgattaaaaa

SEQ ID NO: 3199036 - DNA, 25 bp, Homo sapien
ctttcagattcaccaacatatttat

SEQ ID NO: 3199037 - DNA, 25 bp, Homo sapien
cagattcaccaacatatttattcat

SEQ ID NO: 3199038 - DNA, 25 bp, Homo sapien
gctctttcagattcaccaacatatt

SEQ ID NO: 3199039 - DNA, 25 bp, Homo sapien
tctctaactgctctttcagattcac

SEQ ID NO: 3199040 - DNA, 25 bp, Homo sapien
tgcccctttcaactgctaaggcatc

SEQ ID NO: 3199041 - DNA, 25 bp, Homo sapien
aagaaaataatggaaggcgccactg

SEQ ID NO: 3199042 - DNA, 25 bp, Homo sapien
gccactgctcttgcttttcggaagg

SEQ ID NO: 3199043 - DNA, 25 bp, Homo sapien
tgctaaggcatccagttcatcaaag

SEQ ID NO: 3199044 - DNA, 25 bp, Homo sapien
gccaaaacacgatcggctacattcc

SEQ ID NO: 3199045 - DNA, 25 bp, Homo sapien
agctgagccaaaacacgatcggcta

SEQ ID NO: 3199046 - DNA, 25 bp, Homo sapien
aacacgatcggctacattcccagca

SEQ ID NO: 3199047 - DNA, 25 bp, Homo sapien
gagccaaaacacgatcggctacatt

SEQ ID NO: 3199048 - DNA, 25 bp, Homo sapien
tcctttagctgttcaatcccatcca

SEQ ID NO: 3199049 - DNA, 25 bp, Homo sapien
gacggttagtagctgccaaaatggt

SEQ ID NO: 3199050 - DNA, 25 bp, Homo sapien
gctgccaaaatggtcacatccttta

SEQ ID NO: 3199051 - DNA, 25 bp, Homo sapien
cttgtctatcctatctggacggtta

SEQ ID NO: 3199052 - DNA, 25 bp, Homo sapien
gaataactgtagcatgtgcaggaaa

SEQ ID NO: 3199053 - DNA, 25 bp, Homo sapien
cagtgtataaaacctggaacagggt

SEQ ID NO: 3199054 - DNA, 25 bp, Homo sapien
gatcctttgtaggacagctctctgg

SEQ ID NO: 3199055 - DNA, 25 bp, Homo sapien
gggcatatgcagtcaagattccatt

SEQ ID NO: 3199056 - DNA, 25 bp, Homo sapien
cttcgtatagatgaaaatgttgaaa

SEQ ID NO: 3199057 - DNA, 25 bp, Homo sapien
ttcgtatagatgaaaatgttgaaaa

SEQ ID NO: 3199058 - DNA, 25 bp, Homo sapien
cgtatagatgaaaatgttgaaaact

SEQ ID NO: 3199059 - DNA, 25 bp, Homo sapien
tcgtatagatgaaaatgttgaaaac

SEQ ID NO: 3199060 - DNA, 25 bp, Homo sapien
ggagtctaactagtacttgctaaat

SEQ ID NO: 3199061 - DNA, 25 bp, Homo sapien
tcaaagttcttgtgttgatggcaac

SEQ ID NO: 3199062 - DNA, 25 bp, Homo sapien
taggacagtacttcttcaaagttct

SEQ ID NO: 3199063 - DNA, 25 bp, Homo sapien
caacaattaggacagtacttcttca

SEQ ID NO: 3199064 - DNA, 25 bp, Homo sapien
ttaatcttaatatggctcaccaaag

SEQ ID NO: 3199065 - DNA, 25 bp, Homo sapien
aacaaccgtacaggacgctttccag

SEQ ID NO: 3199066 - DNA, 25 bp, Homo sapien
gaaagattaataggcatccattcct

SEQ ID NO: 3199067 - DNA, 25 bp, Homo sapien
gagtcttgtgtaaagatggcaaagc

SEQ ID NO: 3199068 - DNA, 25 bp, Homo sapien
ataactgtcatagaagttaaaacac

SEQ ID NO: 3199069 - DNA, 25 bp, Homo sapien
gaataataactgtcatagaagttaa

SEQ ID NO: 3199070 - DNA, 25 bp, Homo sapien
aataataactgtcatagaagttaaa

SEQ ID NO: 3199071 - DNA, 25 bp, Homo sapien
taataactgtcatagaagttaaaac

SEQ ID NO: 3199072 - DNA, 25 bp, Homo sapien
caattctctatccccaaagccaaaa

SEQ ID NO: 3199073 - DNA, 25 bp, Homo sapien
tctatccccaaagccaaaacttgga

SEQ ID NO: 3199074 - DNA, 25 bp, Homo sapien
atctctcccaattctctatccccaa

SEQ ID NO: 3199075 - DNA, 25 bp, Homo sapien
tctcccaattctctatccccaaagc

SEQ ID NO: 3199076 - DNA, 25 bp, Homo sapien
gtttagggagacaaacagctgcttg

SEQ ID NO: 3199077 - DNA, 25 bp, Homo sapien
aagcaaggtattcagggtagaggca

SEQ ID NO: 3199078 - DNA, 25 bp, Homo sapien
tcacactctgtataaggcactctgg

SEQ ID NO: 3199079 - DNA, 25 bp, Homo sapien
ttaactgcacaagcccaaggcgtga

SEQ ID NO: 3199080 - DNA, 25 bp, Homo sapien
ttacagtaacaagaaagtctgggaa

SEQ ID NO: 3199081 - DNA, 25 bp, Homo sapien
tcacatggttaatcacttttgcaca

SEQ ID NO: 3199082 - DNA, 25 bp, Homo sapien
cacctggataatatctgcttgcttt

SEQ ID NO: 3199083 - DNA, 25 bp, Homo sapien
tggttaatcacttttgcacacctgg

SEQ ID NO: 3199084 - DNA, 25 bp, Homo sapien
taatcacttttgcacacctggataa

SEQ ID NO: 3199085 - DNA, 25 bp, Homo sapien
gggtaagtgagcaaaggctctgaca

SEQ ID NO: 3199086 - DNA, 25 bp, Homo sapien
taaacagtaaagcaagcagccctct

SEQ ID NO: 3199087 - DNA, 25 bp, Homo sapien
gatcccaagcaaagcttttggaaag

SEQ ID NO: 3199088 - DNA, 25 bp, Homo sapien
tcatcctcctagcaaagatcccaag

SEQ ID NO: 3199089 - DNA, 25 bp, Homo sapien
ccagaggtgccccccggcagggtct

SEQ ID NO: 3199090 - DNA, 25 bp, Homo sapien
caccccacgtcggagtgactgttca

SEQ ID NO: 3199091 - DNA, 25 bp, Homo sapien
cggagtgactgttcagcctggcgct

SEQ ID NO: 3199092 - DNA, 25 bp, Homo sapien
tggcgctcccgacaactgggtttgg

SEQ ID NO: 3199093 - DNA, 25 bp, Homo sapien
tggcggctccaagttcctgcacctc

SEQ ID NO: 3199094 - DNA, 25 bp, Homo sapien
caggtggactccaaggcgaacggta

SEQ ID NO: 3199095 - DNA, 25 bp, Homo sapien
cctcaggtggactccaaggcgaacg

SEQ ID NO: 3199096 - DNA, 25 bp, Homo sapien
ggatccactcaggtggggccgggct

SEQ ID NO: 3199097 - DNA, 25 bp, Homo sapien
ggcgaacggtacctggggcctgctg

SEQ ID NO: 3199098 - DNA, 25 bp, Homo sapien
gttaatgattcaccggagaaactca

SEQ ID NO: 3199099 - DNA, 25 bp, Homo sapien
tcctcaacatagatgattaatttcc

SEQ ID NO: 3199100 - DNA, 25 bp, Homo sapien
tgatgtcacaagtgcactgaagctc

SEQ ID NO: 3199101 - DNA, 25 bp, Homo sapien
tttctctgagaagttatttggaaag

SEQ ID NO: 3199102 - DNA, 25 bp, Homo sapien
atattagcctaggcccgtaggtcag

SEQ ID NO: 3199103 - DNA, 25 bp, Homo sapien
ccttatcctataggctttttcctat

SEQ ID NO: 3199104 - DNA, 25 bp, Homo sapien
tattagcctaggcccgtaggtcagg

SEQ ID NO: 3199105 - DNA, 25 bp, Homo sapien
acaacatgttatacagctgcacaaa

SEQ ID NO: 3199106 - DNA, 25 bp, Homo sapien
tgtaaatcggtgaggcagcaaaaca

SEQ ID NO: 3199107 - DNA, 25 bp, Homo sapien
caggaaggaactccattgtaagttg

SEQ ID NO: 3199108 - DNA, 25 bp, Homo sapien
cagggtttcaagacataaggtgata

SEQ ID NO: 3199109 - DNA, 25 bp, Homo sapien
tgagcacatataaggtaagctacgc

SEQ ID NO: 3199110 - DNA, 25 bp, Homo sapien
cagtattgagtatgctgttagctgc

SEQ ID NO: 3199111 - DNA, 25 bp, Homo sapien
aagatcatgtagtcagcaaacaaag

SEQ ID NO: 3199112 - DNA, 25 bp, Homo sapien
gaggtgtaactgtataagatcatgt

SEQ ID NO: 3199113 - DNA, 25 bp, Homo sapien
aagcctttagctcttcagtattgag

SEQ ID NO: 3199114 - DNA, 25 bp, Homo sapien
taaaacaaaatgctactggtttgtg

SEQ ID NO: 3199115 - DNA, 25 bp, Homo sapien
ttattgggtttatgaattctagcag

SEQ ID NO: 3199116 - DNA, 25 bp, Homo sapien
tatctatgagggattagttccaggc

SEQ ID NO: 3199117 - DNA, 25 bp, Homo sapien
aacaaaatgctactggtttgtgtag

SEQ ID NO: 3199118 - DNA, 25 bp, Homo sapien
tctgtttattattggtgtataggaa

SEQ ID NO: 3199119 - DNA, 25 bp, Homo sapien
tcctaggtattctctttttagcaat

SEQ ID NO: 3199120 - DNA, 25 bp, Homo sapien
ctgtttattattggtgtataggaat

SEQ ID NO: 3199121 - DNA, 25 bp, Homo sapien
attcctaggtattctctttttagca

SEQ ID NO: 3199122 - DNA, 25 bp, Homo sapien
gggcagtatcaccttagatgtgcag

SEQ ID NO: 3199123 - DNA, 25 bp, Homo sapien
tacacttttggtagcctgtataggg

SEQ ID NO: 3199124 - DNA, 25 bp, Homo sapien
tcaagttggctaacaagaaattctc

SEQ ID NO: 3199125 - DNA, 25 bp, Homo sapien
tcttgggagctagatgctgtactct

SEQ ID NO: 3199126 - DNA, 25 bp, Homo sapien
aaaactggagatactggcaattaga

SEQ ID NO: 3199127 - DNA, 25 bp, Homo sapien
gagatactggcaattagaaacttaa

SEQ ID NO: 3199128 - DNA, 25 bp, Homo sapien
tttaaaaactggagatactggcaat

SEQ ID NO: 3199129 - DNA, 25 bp, Homo sapien
catatgttgtaaacaataccagctg

SEQ ID NO: 3199130 - DNA, 25 bp, Homo sapien
ttattttcactttagaaatgatcat

SEQ ID NO: 3199131 - DNA, 25 bp, Homo sapien
taatggcttttcactgtttattttc

SEQ ID NO: 3199132 - DNA, 25 bp, Homo sapien
gtttattttcactttagaaatgatc

SEQ ID NO: 3199133 - DNA, 25 bp, Homo sapien
ctgtttattttcactttagaaatga

SEQ ID NO: 3199134 - DNA, 25 bp, Homo sapien
tactaccttttacctgaatgtggca

SEQ ID NO: 3199135 - DNA, 25 bp, Homo sapien
aattaccagcatttccaggttggga

SEQ ID NO: 3199136 - DNA, 25 bp, Homo sapien
gctgtcaccaccaatactgactgga

SEQ ID NO: 3199137 - DNA, 25 bp, Homo sapien
gtagatcactaccaaaagaaacctg

SEQ ID NO: 3199138 - DNA, 25 bp, Homo sapien
ccagcataaaccactaagacaagat

SEQ ID NO: 3199139 - DNA, 25 bp, Homo sapien
ctccagaatattaaccccagcataa

SEQ ID NO: 3199140 - DNA, 25 bp, Homo sapien
gaaaaagttcagagatcactgttct

SEQ ID NO: 3199141 - DNA, 25 bp, Homo sapien
gctaaaaagtactcaggtatatgca

SEQ ID NO: 3199142 - DNA, 25 bp, Homo sapien
gctttactgggctctgcagatattg

SEQ ID NO: 3199143 - DNA, 25 bp, Homo sapien
gatggtaaacttaactgacaaatgt

SEQ ID NO: 3199144 - DNA, 25 bp, Homo sapien
tattttgggtcaccacaaaccatgc

SEQ ID NO: 3199145 - DNA, 25 bp, Homo sapien
tgtattctgattgttccaccaactg

SEQ ID NO: 3199146 - DNA, 25 bp, Homo sapien
ctaggattgcaacctatgatttttc

SEQ ID NO: 3199147 - DNA, 25 bp, Homo sapien
gcttccgttagtgggtaatctgacc

SEQ ID NO: 3199148 - DNA, 25 bp, Homo sapien
tggcttgtatgatttctgcccgaga

SEQ ID NO: 3199149 - DNA, 25 bp, Homo sapien
tctgcccgagagagccgctgttagt

SEQ ID NO: 3199150 - DNA, 25 bp, Homo sapien
ttaaacttctgtcacgttgatctaa

SEQ ID NO: 3199151 - DNA, 25 bp, Homo sapien
taaacttctgtcacgttgatctaat

SEQ ID NO: 3199152 - DNA, 25 bp, Homo sapien
gttaaacttctgtcacgttgatcta

SEQ ID NO: 3199153 - DNA, 25 bp, Homo sapien
gatcagctcttacagaggcccagaa

SEQ ID NO: 3199154 - DNA, 25 bp, Homo sapien
taaccctttcctaatagatagaaga

SEQ ID NO: 3199155 - DNA, 25 bp, Homo sapien
gaaatgctcaattcataaccctttc

SEQ ID NO: 3199156 - DNA, 25 bp, Homo sapien
acctgatagagggatcagctcttac

SEQ ID NO: 3199157 - DNA, 25 bp, Homo sapien
tctgctcctgagtatgcgtcggttt

SEQ ID NO: 3199158 - DNA, 25 bp, Homo sapien
actgacaggcatggagtgaaactgc

SEQ ID NO: 3199159 - DNA, 25 bp, Homo sapien
gcatccggtaaaggcacatagatga

SEQ ID NO: 3199160 - DNA, 25 bp, Homo sapien
cttgttgctgcatccggtaaaggca

SEQ ID NO: 3199161 - DNA, 25 bp, Homo sapien
tataatagaagccacgtaaagtgca

SEQ ID NO: 3199162 - DNA, 25 bp, Homo sapien
cagaggtaagggcagatggtccctt

SEQ ID NO: 3199163 - DNA, 25 bp, Homo sapien
gaaactgctgtattaagaagcccag

SEQ ID NO: 3199164 - DNA, 25 bp, Homo sapien
caaaattagactgagataacttgcc

SEQ ID NO: 3199165 - DNA, 25 bp, Homo sapien
ctatttctgtgtcgaggtacatagt

SEQ ID NO: 3199166 - DNA, 25 bp, Homo sapien
tgtgtcgaggtacatagttggtcct

SEQ ID NO: 3199167 - DNA, 25 bp, Homo sapien
acatcattggtgtgacagatgctat

SEQ ID NO: 3199168 - DNA, 25 bp, Homo sapien
ctacatcattggtgtgacagatgct

SEQ ID NO: 3199169 - DNA, 25 bp, Homo sapien
ttgctgtttcctgcaaattgccata

SEQ ID NO: 3199170 - DNA, 25 bp, Homo sapien
ttcctgcaaattgccatatcatcat

SEQ ID NO: 3199171 - DNA, 25 bp, Homo sapien
agccctcgtctcaaatcaaaaactg

SEQ ID NO: 3199172 - DNA, 25 bp, Homo sapien
gatgccagccctcgtctcaaatcaa

SEQ ID NO: 3199173 - DNA, 25 bp, Homo sapien
ttcttcacttagcatgtagatcata

SEQ ID NO: 3199174 - DNA, 25 bp, Homo sapien
atttcttcacttagcatgtagatca

SEQ ID NO: 3199175 - DNA, 25 bp, Homo sapien
tttcttcacttagcatgtagatcat

SEQ ID NO: 3199176 - DNA, 25 bp, Homo sapien
tcttcacttagcatgtagatcataa

SEQ ID NO: 3199177 - DNA, 25 bp, Homo sapien
cagctgaacatcgttttgtcctttc

SEQ ID NO: 3199178 - DNA, 25 bp, Homo sapien
cagacagctgaacatcgttttgtcc

SEQ ID NO: 3199179 - DNA, 25 bp, Homo sapien
gcccagacagctgaacatcgttttg

SEQ ID NO: 3199180 - DNA, 25 bp, Homo sapien
ctaagcccagacagctgaacatcgt

SEQ ID NO: 3199181 - DNA, 25 bp, Homo sapien
ggatgccatcgggattccgtctcga

SEQ ID NO: 3199182 - DNA, 25 bp, Homo sapien
tctctgagcaaggtagactaaattc

SEQ ID NO: 3199183 - DNA, 25 bp, Homo sapien
ggcttcacatgaccaggaacagttg

SEQ ID NO: 3199184 - DNA, 25 bp, Homo sapien
gacatctgctgtatattagggctga

SEQ ID NO: 3199185 - DNA, 25 bp, Homo sapien
cataggtgcctgtactttcctgcca

SEQ ID NO: 3199186 - DNA, 25 bp, Homo sapien
tcaaggttcagtgcaaatgtttcca

SEQ ID NO: 3199187 - DNA, 25 bp, Homo sapien
tcagttttatagtcccataggtgcc

SEQ ID NO: 3199188 - DNA, 25 bp, Homo sapien
tagcacatggcttgacctaccgatc

SEQ ID NO: 3199189 - DNA, 25 bp, Homo sapien
cgatgattgtggtgcagccgctgga

SEQ ID NO: 3199190 - DNA, 25 bp, Homo sapien
tgacctgttgagcttaattgggctg

SEQ ID NO: 3199191 - DNA, 25 bp, Homo sapien
ctgtgacctgttgagcttaattggg

SEQ ID NO: 3199192 - DNA, 25 bp, Homo sapien
acctgttgagcttaattgggctgca

SEQ ID NO: 3199193 - DNA, 25 bp, Homo sapien
cacgtattggcagagatgctgtctc

SEQ ID NO: 3199194 - DNA, 25 bp, Homo sapien
gctgtctctgcgctcggtcacggca

SEQ ID NO: 3199195 - DNA, 25 bp, Homo sapien
tctgcgctcggtcacggcagcctgg

SEQ ID NO: 3199196 - DNA, 25 bp, Homo sapien
tgcacactgaatccacgtattggca

SEQ ID NO: 3199197 - DNA, 25 bp, Homo sapien
tatcgatatcctcaaagaaaggtgg

SEQ ID NO: 3199198 - DNA, 25 bp, Homo sapien
aacaactacctaatttctgcttgga

SEQ ID NO: 3199199 - DNA, 25 bp, Homo sapien
tgcttggatcctgtcatcccctccc

SEQ ID NO: 3199200 - DNA, 25 bp, Homo sapien
tctggcaggcacagggaacacttgg

SEQ ID NO: 3199201 - DNA, 25 bp, Homo sapien
caacctttgatgtattaccaacatg

SEQ ID NO: 3199202 - DNA, 25 bp, Homo sapien
attcctttcaacctttgatgtatta

SEQ ID NO: 3199203 - DNA, 25 bp, Homo sapien
cctttcaacctttgatgtattacca

SEQ ID NO: 3199204 - DNA, 25 bp, Homo sapien
ttcaacctttgatgtattaccaaca

SEQ ID NO: 3199205 - DNA, 25 bp, Homo sapien
aaacgtctcaatgactcaggaattc

SEQ ID NO: 3199206 - DNA, 25 bp, Homo sapien
gtcttttcatgatgagattggcttg

SEQ ID NO: 3199207 - DNA, 25 bp, Homo sapien
caatgactcaggaattctaggtgtc

SEQ ID NO: 3199208 - DNA, 25 bp, Homo sapien
aatgtcttttcatgatgagattggc

SEQ ID NO: 3199209 - DNA, 25 bp, Homo sapien
gatgaacagactaggtcgcaaatga

SEQ ID NO: 3199210 - DNA, 25 bp, Homo sapien
tgaaaatctgtaagaaccaaagccc

SEQ ID NO: 3199211 - DNA, 25 bp, Homo sapien
aaagaaatcgcttcatgggatgaac

SEQ ID NO: 3199212 - DNA, 25 bp, Homo sapien
gaaaacaaggccacataagcctggc

SEQ ID NO: 3199213 - DNA, 25 bp, Homo sapien
taggtagagattaagaaggctaaaa

SEQ ID NO: 3199214 - DNA, 25 bp, Homo sapien
cataggtagagattaagaaggctaa

SEQ ID NO: 3199215 - DNA, 25 bp, Homo sapien
ccataggtagagattaagaaggcta

SEQ ID NO: 3199216 - DNA, 25 bp, Homo sapien
ggccataggtagagattaagaaggc

SEQ ID NO: 3199217 - DNA, 25 bp, Homo sapien
tgttggttattatagagcttgagca

SEQ ID NO: 3199218 - DNA, 25 bp, Homo sapien
tgtctacccttgtgctgagagtgtt

SEQ ID NO: 3199219 - DNA, 25 bp, Homo sapien
agagcttgagcattatgtgcagagc

SEQ ID NO: 3199220 - DNA, 25 bp, Homo sapien
aaatcaaaagcacaggccaagtcag

SEQ ID NO: 3199221 - DNA, 25 bp, Homo sapien
gacttgctctgggatatgcacctag

SEQ ID NO: 3199222 - DNA, 25 bp, Homo sapien
catcctgtgagattacaagcccttg

SEQ ID NO: 3199223 - DNA, 25 bp, Homo sapien
gaggaaattcctcaccagtatttgg

SEQ ID NO: 3199224 - DNA, 25 bp, Homo sapien
tatccctgacatccgaaagaatctg

SEQ ID NO: 3199225 - DNA, 25 bp, Homo sapien
ctctaataacctcacattctggaac

SEQ ID NO: 3199226 - DNA, 25 bp, Homo sapien
gccaagactctaataacctcacatt

SEQ ID NO: 3199227 - DNA, 25 bp, Homo sapien
aagccaagactctaataacctcaca

SEQ ID NO: 3199228 - DNA, 25 bp, Homo sapien
aagactctaataacctcacattctg

SEQ ID NO: 3199229 - DNA, 25 bp, Homo sapien
actggattggttcatcctcatgatc

SEQ ID NO: 3199230 - DNA, 25 bp, Homo sapien
attggttcatcctcatgatcttctg

SEQ ID NO: 3199231 - DNA, 25 bp, Homo sapien
ctggattggttcatcctcatgatct

SEQ ID NO: 3199232 - DNA, 25 bp, Homo sapien
ggattggttcatcctcatgatcttc

SEQ ID NO: 3199233 - DNA, 25 bp, Homo sapien
gggttttaagcctgacatacatcaa

SEQ ID NO: 3199234 - DNA, 25 bp, Homo sapien
gccatatagttaatgtggcatgaca

SEQ ID NO: 3199235 - DNA, 25 bp, Homo sapien
ttctgatgccaaaatgtagcagcaa

SEQ ID NO: 3199236 - DNA, 25 bp, Homo sapien
tggcatgacattatttggcaagcct

SEQ ID NO: 3199237 - DNA, 25 bp, Homo sapien
tctctctagactgaacctcggaagt

SEQ ID NO: 3199238 - DNA, 25 bp, Homo sapien
tattgctaaaacgagagtgatgtgg

SEQ ID NO: 3199239 - DNA, 25 bp, Homo sapien
tgaacccgggaaacacaggacttga

SEQ ID NO: 3199240 - DNA, 25 bp, Homo sapien
tcggaagtcttagttggagcagctg

SEQ ID NO: 3199241 - DNA, 25 bp, Homo sapien
gctccattctctctgctttcagatg

SEQ ID NO: 3199242 - DNA, 25 bp, Homo sapien
tctctctgctttcagatgtctttct

SEQ ID NO: 3199243 - DNA, 25 bp, Homo sapien
cattctctctgctttcagatgtctt

SEQ ID NO: 3199244 - DNA, 25 bp, Homo sapien
ttcttagcaacttttgctccattct

SEQ ID NO: 3199245 - DNA, 25 bp, Homo sapien
cctgaagtgattgagcatctgtttt

SEQ ID NO: 3199246 - DNA, 25 bp, Homo sapien
caattaaatctctagtatgtgcaga

SEQ ID NO: 3199247 - DNA, 25 bp, Homo sapien
ttcttttaatccaggatgcaattaa

SEQ ID NO: 3199248 - DNA, 25 bp, Homo sapien
ccgttgggacctgaagtgattgagc

SEQ ID NO: 3199249 - DNA, 25 bp, Homo sapien
gcaaaaattagctgcggatgtgcgc

SEQ ID NO: 3199250 - DNA, 25 bp, Homo sapien
ttgaaatattgtacttaaggcccca

SEQ ID NO: 3199251 - DNA, 25 bp, Homo sapien
tcagaaagtttcaatcaggacacat

SEQ ID NO: 3199252 - DNA, 25 bp, Homo sapien
caatcttcttgtgaggcagatccca

SEQ ID NO: 3199253 - DNA, 25 bp, Homo sapien
tcttctgatttttcgtgtacacctg

SEQ ID NO: 3199254 - DNA, 25 bp, Homo sapien
tggttcttctgatttttcgtgtaca

SEQ ID NO: 3199255 - DNA, 25 bp, Homo sapien
tctgatttttcgtgtacacctgctt

SEQ ID NO: 3199256 - DNA, 25 bp, Homo sapien
gatttttcgtgtacacctgcttctt

SEQ ID NO: 3199257 - DNA, 25 bp, Homo sapien
tagttatacacaaagtggaactggg

SEQ ID NO: 3199258 - DNA, 25 bp, Homo sapien
tactgggtctcacctctgataccaa

SEQ ID NO: 3199259 - DNA, 25 bp, Homo sapien
tcgtcccgggattcttataaatgta

SEQ ID NO: 3199260 - DNA, 25 bp, Homo sapien
gggaatggcaaatctctcacatcaa

SEQ ID NO: 3199261 - DNA, 25 bp, Homo sapien
ctcagctgctaggaagccacggcag

SEQ ID NO: 3199262 - DNA, 25 bp, Homo sapien
tgctaggaagccacggcagtcatct

SEQ ID NO: 3199263 - DNA, 25 bp, Homo sapien
cacggcagtcatctgggcgagaaaa

SEQ ID NO: 3199264 - DNA, 25 bp, Homo sapien
aggaagccacggcagtcatctgggc

SEQ ID NO: 3199265 - DNA, 25 bp, Homo sapien
gggaagatttcttgtcaaaattgga

SEQ ID NO: 3199266 - DNA, 25 bp, Homo sapien
gagtggaagggaagatttcttgtca

SEQ ID NO: 3199267 - DNA, 25 bp, Homo sapien
atgagtggaagggaagatttcttgt

SEQ ID NO: 3199268 - DNA, 25 bp, Homo sapien
ttcttgtcaaaattggataagtaag

SEQ ID NO: 3199269 - DNA, 25 bp, Homo sapien
tcttcattttcataagcgtaattct

SEQ ID NO: 3199270 - DNA, 25 bp, Homo sapien
ttctgtaaattttccataaacattc

SEQ ID NO: 3199271 - DNA, 25 bp, Homo sapien
aattttccataaacattctcttcat

SEQ ID NO: 3199272 - DNA, 25 bp, Homo sapien
tcattttcataagcgtaattctcat

SEQ ID NO: 3199273 - DNA, 25 bp, Homo sapien
gatatcatgtgtcaatcactcgggc

SEQ ID NO: 3199274 - DNA, 25 bp, Homo sapien
tcactccggctacgcagaatttcag

SEQ ID NO: 3199275 - DNA, 25 bp, Homo sapien
ggaaatgttgccctacagactcgtg

SEQ ID NO: 3199276 - DNA, 25 bp, Homo sapien
gctgcccgaaaacctggaacaggat

SEQ ID NO: 3199277 - DNA, 25 bp, Homo sapien
taaccttagctggaaagcaagttca

SEQ ID NO: 3199278 - DNA, 25 bp, Homo sapien
tttagcagtgggaatgctaccggtg

SEQ ID NO: 3199279 - DNA, 25 bp, Homo sapien
gttcagttccttgcaaaagtcaaca

SEQ ID NO: 3199280 - DNA, 25 bp, Homo sapien
ttgaaatgcaaccagtaaccttagc

SEQ ID NO: 3199281 - DNA, 25 bp, Homo sapien
gcataaaggcattaacggctctgtg

SEQ ID NO: 3199282 - DNA, 25 bp, Homo sapien
ggattcggtcgccaacaatgcctaa

SEQ ID NO: 3199283 - DNA, 25 bp, Homo sapien
atttggtccacacaccgagtgctag

SEQ ID NO: 3199284 - DNA, 25 bp, Homo sapien
gtgctagcccctcttcgcataaagg

SEQ ID NO: 3199285 - DNA, 25 bp, Homo sapien
tctgcgcgttaggaatcaatacaca

SEQ ID NO: 3199286 - DNA, 25 bp, Homo sapien
tcagccgcgaaccaaagtaacatgc

SEQ ID NO: 3199287 - DNA, 25 bp, Homo sapien
ccctgttgctgctcccggtgattga

SEQ ID NO: 3199288 - DNA, 25 bp, Homo sapien
gcctaggagttcaaacaacgttcaa

SEQ ID NO: 3199289 - DNA, 25 bp, Homo sapien
gctcgtgaatgtccctttcttcgaa

SEQ ID NO: 3199290 - DNA, 25 bp, Homo sapien
aatgtccctttcttcgaagggctgg

SEQ ID NO: 3199291 - DNA, 25 bp, Homo sapien
tagagatagaagctcgtgaatgtcc

SEQ ID NO: 3199292 - DNA, 25 bp, Homo sapien
ctgcgacagagaattagagatagaa

SEQ ID NO: 3199293 - DNA, 25 bp, Homo sapien
cactccggtcccggcaggtcagcct

SEQ ID NO: 3199294 - DNA, 25 bp, Homo sapien
tcagcctctcccgggcagcgctcac

SEQ ID NO: 3199295 - DNA, 25 bp, Homo sapien
gtcagcctctcccgggcagcgctca

SEQ ID NO: 3199296 - DNA, 25 bp, Homo sapien
cgggcactccggtcccggcaggtca

SEQ ID NO: 3199297 - DNA, 25 bp, Homo sapien
tgaagagagtgaggtttggggatcc

SEQ ID NO: 3199298 - DNA, 25 bp, Homo sapien
tttggggatccttctcggagagaga

SEQ ID NO: 3199299 - DNA, 25 bp, Homo sapien
aggccgacgcgcttagccgattccg

SEQ ID NO: 3199300 - DNA, 25 bp, Homo sapien
agaaaggcgggcgtcgtcccttgtg

SEQ ID NO: 3199301 - DNA, 25 bp, Homo sapien
tgccaggcagaggctgccgcggccg

SEQ ID NO: 3199302 - DNA, 25 bp, Homo sapien
ggcagaggctgccgcggccgggagg

SEQ ID NO: 3199303 - DNA, 25 bp, Homo sapien
caggcagaggctgccgcggccggga

SEQ ID NO: 3199304 - DNA, 25 bp, Homo sapien
gccaggcagaggctgccgcggccgg

SEQ ID NO: 3199305 - DNA, 25 bp, Homo sapien
cccggcgaaacctcggagcacgcgc

SEQ ID NO: 3199306 - DNA, 25 bp, Homo sapien
ggtgggtcacggagccgcgcagtac

SEQ ID NO: 3199307 - DNA, 25 bp, Homo sapien
tgacgagcgaaaaatccacgtcacg

SEQ ID NO: 3199308 - DNA, 25 bp, Homo sapien
cgccgtcggcgggtgggtcacggag

SEQ ID NO: 3199309 - DNA, 25 bp, Homo sapien
gtcacgggcgttcgagactccgcag

SEQ ID NO: 3199310 - DNA, 25 bp, Homo sapien
gctcagagaactcgggttctagtcg

SEQ ID NO: 3199311 - DNA, 25 bp, Homo sapien
tcgctcctcgcaaggaacgaaggaa

SEQ ID NO: 3199312 - DNA, 25 bp, Homo sapien
acgggccagctgacggcacggtgtg

SEQ ID NO: 3199313 - DNA, 25 bp, Homo sapien
gagtggcggagtcgagtgcgtgacg

SEQ ID NO: 3199314 - DNA, 25 bp, Homo sapien
ctgtcacggctggtgctcgccgggc

SEQ ID NO: 3199315 - DNA, 25 bp, Homo sapien
acggctggtgctcgccgggcggctc

SEQ ID NO: 3199316 - DNA, 25 bp, Homo sapien
gtgctcgccgggcggctcagtaaca

SEQ ID NO: 3199317 - DNA, 25 bp, Homo sapien
tcgccgggcggctcagtaacatcca

SEQ ID NO: 3199318 - DNA, 25 bp, Homo sapien
ggcggcgtgcacgtgccgcatcaac

SEQ ID NO: 3199319 - DNA, 25 bp, Homo sapien
cggcatcgccggagttggagcgcct

SEQ ID NO: 3199320 - DNA, 25 bp, Homo sapien
tgcggagggcagttctcccgcggct

SEQ ID NO: 3199321 - DNA, 25 bp, Homo sapien
gttggagcgcctcggctcgcggcct

SEQ ID NO: 3199322 - DNA, 25 bp, Homo sapien
ctgaataaatagttgacggaagaag

SEQ ID NO: 3199323 - DNA, 25 bp, Homo sapien
gaataaatagttgacggaagaagga

SEQ ID NO: 3199324 - DNA, 25 bp, Homo sapien
tgaataaatagttgacggaagaagg

SEQ ID NO: 3199325 - DNA, 25 bp, Homo sapien
cacggtggagctgcgccctctgcaa

SEQ ID NO: 3199326 - DNA, 25 bp, Homo sapien
gtggagctgcgccctctgcaatccg

SEQ ID NO: 3199327 - DNA, 25 bp, Homo sapien
cggtggagctgcgccctctgcaatc

SEQ ID NO: 3199328 - DNA, 25 bp, Homo sapien
ggagctgcgccctctgcaatccgca

SEQ ID NO: 3199329 - DNA, 25 bp, Homo sapien
tgaagagccttcagcgtccacgcgg

SEQ ID NO: 3199330 - DNA, 25 bp, Homo sapien
tcaccatattaaggatcaccgtgga

SEQ ID NO: 3199331 - DNA, 25 bp, Homo sapien
gcgtccacgcgggagcccaaagcaa

SEQ ID NO: 3199332 - DNA, 25 bp, Homo sapien
cacggtctggctgaccctaagcaag

SEQ ID NO: 3199333 - DNA, 25 bp, Homo sapien
tagtgtaacccataacaccaggcac

SEQ ID NO: 3199334 - DNA, 25 bp, Homo sapien
ccgcagaggatttgaatagtgtaac

SEQ ID NO: 3199335 - DNA, 25 bp, Homo sapien
cctccgatccgaagaaaagcccatt

SEQ ID NO: 3199336 - DNA, 25 bp, Homo sapien
aagcagtgacagtcttggacaagcc

SEQ ID NO: 3199337 - DNA, 25 bp, Homo sapien
taacgcagtgtagggaaatcctggc

SEQ ID NO: 3199338 - DNA, 25 bp, Homo sapien
tataaacaagagaccccatgccatg

SEQ ID NO: 3199339 - DNA, 25 bp, Homo sapien
taaaatggagcatgccttcgcaggg

SEQ ID NO: 3199340 - DNA, 25 bp, Homo sapien
taagtgtgaggcctttaacgcagtg

SEQ ID NO: 3199341 - DNA, 25 bp, Homo sapien
tagtgatctcgagttctggcaatca

SEQ ID NO: 3199342 - DNA, 25 bp, Homo sapien
gtgtagtgatctcgagttctggcaa

SEQ ID NO: 3199343 - DNA, 25 bp, Homo sapien
tgtagtgatctcgagttctggcaat

SEQ ID NO: 3199344 - DNA, 25 bp, Homo sapien
gtagtgatctcgagttctggcaatc

SEQ ID NO: 3199345 - DNA, 25 bp, Homo sapien
taacgaactgccactgccatgttga

SEQ ID NO: 3199346 - DNA, 25 bp, Homo sapien
cactgccatgttgattttggggatc

SEQ ID NO: 3199347 - DNA, 25 bp, Homo sapien
aactgccactgccatgttgattttg

SEQ ID NO: 3199348 - DNA, 25 bp, Homo sapien
ctgccactgccatgttgattttggg

SEQ ID NO: 3199349 - DNA, 25 bp, Homo sapien
tctctgacggctatccaaagaaggc

SEQ ID NO: 3199350 - DNA, 25 bp, Homo sapien
ggagcaggtcttttcaccaccgaag

SEQ ID NO: 3199351 - DNA, 25 bp, Homo sapien
caatcagttgcttgggctgggtccg

SEQ ID NO: 3199352 - DNA, 25 bp, Homo sapien
catacacaggtatctagagcagcag

SEQ ID NO: 3199353 - DNA, 25 bp, Homo sapien
tgaccccgggaggggcagctctcca

SEQ ID NO: 3199354 - DNA, 25 bp, Homo sapien
cctgaccccgggaggggcagctctc

SEQ ID NO: 3199355 - DNA, 25 bp, Homo sapien
cgggaggggcagctctccagcttac

SEQ ID NO: 3199356 - DNA, 25 bp, Homo sapien
cccgggaggggcagctctccagctt

SEQ ID NO: 3199357 - DNA, 25 bp, Homo sapien
tcaggaggtacaacccacctccaaa

SEQ ID NO: 3199358 - DNA, 25 bp, Homo sapien
gttcaggaggtacaacccacctcca

SEQ ID NO: 3199359 - DNA, 25 bp, Homo sapien
ttcaggaggtacaacccacctccaa

SEQ ID NO: 3199360 - DNA, 25 bp, Homo sapien
caataccctcaagtggatggcagag

SEQ ID NO: 3199361 - DNA, 25 bp, Homo sapien
gaagatagccctaactggagacaga

SEQ ID NO: 3199362 - DNA, 25 bp, Homo sapien
gtatgttcatgtacacaactttaga

SEQ ID NO: 3199363 - DNA, 25 bp, Homo sapien
ctcttgttgaaagtgggagccaggt

SEQ ID NO: 3199364 - DNA, 25 bp, Homo sapien
ggtggctgagtccttcacaaatacg

SEQ ID NO: 3199365 - DNA, 25 bp, Homo sapien
ccaaaaggaccattaaggagccaag

SEQ ID NO: 3199366 - DNA, 25 bp, Homo sapien
tatccaagtgccctcaatgacaaca

SEQ ID NO: 3199367 - DNA, 25 bp, Homo sapien
tactcagctgttaactatccaaggg

SEQ ID NO: 3199368 - DNA, 25 bp, Homo sapien
ctctgtaaacaggaaactactcaat

SEQ ID NO: 3199369 - DNA, 25 bp, Homo sapien
cactttaggtcttcacacacaaaaa

SEQ ID NO: 3199370 - DNA, 25 bp, Homo sapien
cagtattaaataagtggcagcggca

SEQ ID NO: 3199371 - DNA, 25 bp, Homo sapien
taacaaaaacatccattctgtcaag

SEQ ID NO: 3199372 - DNA, 25 bp, Homo sapien
ggctttacccttgctaaaacatgga

SEQ ID NO: 3199373 - DNA, 25 bp, Homo sapien
gatcgagacctcatcccaaaaagca

SEQ ID NO: 3199374 - DNA, 25 bp, Homo sapien
tagtaagggctaattgcagcagaaa

SEQ ID NO: 3199375 - DNA, 25 bp, Homo sapien
tttgcttgtggtccccgctgcttca

SEQ ID NO: 3199376 - DNA, 25 bp, Homo sapien
aatctagatgccaagttactgttcc

SEQ ID NO: 3199377 - DNA, 25 bp, Homo sapien
tctaatcactgtaatcttactgcag

SEQ ID NO: 3199378 - DNA, 25 bp, Homo sapien
attattaccatataaacccagccag

SEQ ID NO: 3199379 - DNA, 25 bp, Homo sapien
gataagaaataccatcacatgagtt

SEQ ID NO: 3199380 - DNA, 25 bp, Homo sapien
tggtctgttgactgagccatgagca

SEQ ID NO: 3199381 - DNA, 25 bp, Homo sapien
tgttgactgagccatgagcagtccc

SEQ ID NO: 3199382 - DNA, 25 bp, Homo sapien
ctgctttggtctgttgactgagcca

SEQ ID NO: 3199383 - DNA, 25 bp, Homo sapien
ttgactgagccatgagcagtcccca

SEQ ID NO: 3199384 - DNA, 25 bp, Homo sapien
cagatctgttcagtaaggaccacag

SEQ ID NO: 3199385 - DNA, 25 bp, Homo sapien
tctgttcagtaaggaccacagaata

SEQ ID NO: 3199386 - DNA, 25 bp, Homo sapien
gatctgttcagtaaggaccacagaa

SEQ ID NO: 3199387 - DNA, 25 bp, Homo sapien
gttcagtaaggaccacagaataaat

SEQ ID NO: 3199388 - DNA, 25 bp, Homo sapien
ttgctaggatgtgacttcaaggcct

SEQ ID NO: 3199389 - DNA, 25 bp, Homo sapien
tctgattctacacatttgctaggat

SEQ ID NO: 3199390 - DNA, 25 bp, Homo sapien
ggcccttctgattctacacatttgc

SEQ ID NO: 3199391 - DNA, 25 bp, Homo sapien
tctacacatttgctaggatgtgact

SEQ ID NO: 3199392 - DNA, 25 bp, Homo sapien
tgagatccaactgttttctgcacgg

SEQ ID NO: 3199393 - DNA, 25 bp, Homo sapien
ctactgggtagtgcagtttgaggat

SEQ ID NO: 3199394 - DNA, 25 bp, Homo sapien
cctgctgttgatgagatccaactgt

SEQ ID NO: 3199395 - DNA, 25 bp, Homo sapien
tgcacgggctctcttaagaggtggg

SEQ ID NO: 3199396 - DNA, 25 bp, Homo sapien
tgttctcattccataagacaaggca

SEQ ID NO: 3199397 - DNA, 25 bp, Homo sapien
tctggtttacgttttatctgtttga

SEQ ID NO: 3199398 - DNA, 25 bp, Homo sapien
gaaagaagcatgattttggcatggc

SEQ ID NO: 3199399 - DNA, 25 bp, Homo sapien
taatgagtctagagaaagaagcatg

SEQ ID NO: 3199400 - DNA, 25 bp, Homo sapien
gtaatcccaacactttgggaggcca

SEQ ID NO: 3199401 - DNA, 25 bp, Homo sapien
ggcgcggtggctcacacctgtaatc

SEQ ID NO: 3199402 - DNA, 25 bp, Homo sapien
aggcaggcggatcacgaggtcagga

SEQ ID NO: 3199403 - DNA, 25 bp, Homo sapien
cagattaaagaagaaaactcgaccg

SEQ ID NO: 3199404 - DNA, 25 bp, Homo sapien
tggtggccatacacaggatatcaga

SEQ ID NO: 3199405 - DNA, 25 bp, Homo sapien
ccaggaagcggactcgaaaacggag

SEQ ID NO: 3199406 - DNA, 25 bp, Homo sapien
gctgctagcatcaagtcctgtttca

SEQ ID NO: 3199407 - DNA, 25 bp, Homo sapien
gactcgaaaacggaggtcagcatgg

SEQ ID NO: 3199408 - DNA, 25 bp, Homo sapien
tttcaggtgctagatgacatattta

SEQ ID NO: 3199409 - DNA, 25 bp, Homo sapien
ttttttcaggtgctagatgacatat

SEQ ID NO: 3199410 - DNA, 25 bp, Homo sapien
tttttcaggtgctagatgacatatt

SEQ ID NO: 3199411 - DNA, 25 bp, Homo sapien
ttcaggtgctagatgacatatttag

SEQ ID NO: 3199412 - DNA, 25 bp, Homo sapien
tttgccgtagttataattgccctaa

SEQ ID NO: 3199413 - DNA, 25 bp, Homo sapien
cctgatcagtgaccgaggaactgaa

SEQ ID NO: 3199414 - DNA, 25 bp, Homo sapien
tgaatggctcctttgacgcgcggtg

SEQ ID NO: 3199415 - DNA, 25 bp, Homo sapien
ggtgtacacagcctgaagcgcagaa

SEQ ID NO: 3199416 - DNA, 25 bp, Homo sapien
tattactatggctagaacagcccag

SEQ ID NO: 3199417 - DNA, 25 bp, Homo sapien
gtattactatggctagaacagccca

SEQ ID NO: 3199418 - DNA, 25 bp, Homo sapien
tactatggctagaacagcccagcag

SEQ ID NO: 3199419 - DNA, 25 bp, Homo sapien
tatggctagaacagcccagcaggac

SEQ ID NO: 3199420 - DNA, 25 bp, Homo sapien
tccccttgggctagatgaatgggca

SEQ ID NO: 3199421 - DNA, 25 bp, Homo sapien
cacactggtcttaggcactctagga

SEQ ID NO: 3199422 - DNA, 25 bp, Homo sapien
taatcgaggtcccacataacacact

SEQ ID NO: 3199423 - DNA, 25 bp, Homo sapien
tagaatgtgagcatccccaatctcg

SEQ ID NO: 3199424 - DNA, 25 bp, Homo sapien
gaagatagatgtttcccacttgatc

SEQ ID NO: 3199425 - DNA, 25 bp, Homo sapien
agctgcatttaagaagatagatgtt

SEQ ID NO: 3199426 - DNA, 25 bp, Homo sapien
gcaatggtaaggtacagctgcattt

SEQ ID NO: 3199427 - DNA, 25 bp, Homo sapien
aggagaattcggcaggcaatggtaa

SEQ ID NO: 3199428 - DNA, 25 bp, Homo sapien
acatagtggtgtaaagtgagccctc

SEQ ID NO: 3199429 - DNA, 25 bp, Homo sapien
agaagaccctatatgcccgcaaaag

SEQ ID NO: 3199430 - DNA, 25 bp, Homo sapien
caacaggttacaatgggattccact

SEQ ID NO: 3199431 - DNA, 25 bp, Homo sapien
tacactagaagtcctggttaagcac

SEQ ID NO: 3199432 - DNA, 25 bp, Homo sapien
ctcaaagcatctgctccatggttac

SEQ ID NO: 3199433 - DNA, 25 bp, Homo sapien
ggttacatcgtgaatcctagactgg

SEQ ID NO: 3199434 - DNA, 25 bp, Homo sapien
atccatcaacaatagaaggattaaa

SEQ ID NO: 3199435 - DNA, 25 bp, Homo sapien
tagactggctcaaaggccaaaagtt

SEQ ID NO: 3199436 - DNA, 25 bp, Homo sapien
gcacaacagttgccgtgaaggccat

SEQ ID NO: 3199437 - DNA, 25 bp, Homo sapien
agcacaacagttgccgtgaaggcca

SEQ ID NO: 3199438 - DNA, 25 bp, Homo sapien
agagcacaacagttgccgtgaaggc

SEQ ID NO: 3199439 - DNA, 25 bp, Homo sapien
gagcacaacagttgccgtgaaggcc

SEQ ID NO: 3199440 - DNA, 25 bp, Homo sapien
tgtatttccgtgtctatgctgtcct

SEQ ID NO: 3199441 - DNA, 25 bp, Homo sapien
cacccactggcacgccataaaatgt

SEQ ID NO: 3199442 - DNA, 25 bp, Homo sapien
tggcacgccataaaatgtatttccg

SEQ ID NO: 3199443 - DNA, 25 bp, Homo sapien
taaaatgtatttccgtgtctatgct

SEQ ID NO: 3199444 - DNA, 25 bp, Homo sapien
aaggctgccatgctcttcgagtgtt

SEQ ID NO: 3199445 - DNA, 25 bp, Homo sapien
tttctagacattgaggccgcttcca

SEQ ID NO: 3199446 - DNA, 25 bp, Homo sapien
tcaggaacagacagggagtctcacc

SEQ ID NO: 3199447 - DNA, 25 bp, Homo sapien
ggagtttactttaacagccacacag

SEQ ID NO: 3199448 - DNA, 25 bp, Homo sapien
aagttcattactgaacgcagatccc

SEQ ID NO: 3199449 - DNA, 25 bp, Homo sapien
cgtgtgacagacttttccatcaaaa

SEQ ID NO: 3199450 - DNA, 25 bp, Homo sapien
cgcagatcccgtgtgacagactttt

SEQ ID NO: 3199451 - DNA, 25 bp, Homo sapien
tactgaacgcagatcccgtgtgaca

SEQ ID NO: 3199452 - DNA, 25 bp, Homo sapien
tctggattccactccctttttcatc

SEQ ID NO: 3199453 - DNA, 25 bp, Homo sapien
tctgtcaccatgagctgcctctgct

SEQ ID NO: 3199454 - DNA, 25 bp, Homo sapien
tggggctttctggattccactccct

SEQ ID NO: 3199455 - DNA, 25 bp, Homo sapien
aggtctgtcaccatgagctgcctct

SEQ ID NO: 3199456 - DNA, 25 bp, Homo sapien
caggaacttctgagtacctccacta

SEQ ID NO: 3199457 - DNA, 25 bp, Homo sapien
gagtacctccactatggtactgata

SEQ ID NO: 3199458 - DNA, 25 bp, Homo sapien
tctgagtacctccactatggtactg

SEQ ID NO: 3199459 - DNA, 25 bp, Homo sapien
gaacttctgagtacctccactatgg

SEQ ID NO: 3199460 - DNA, 25 bp, Homo sapien
gaaggactgggtgcggggagtggag

SEQ ID NO: 3199461 - DNA, 25 bp, Homo sapien
ctttctagggcgcctgtgctgcagg

SEQ ID NO: 3199462 - DNA, 25 bp, Homo sapien
ctagaatgtcgggccacttctcaga

SEQ ID NO: 3199463 - DNA, 25 bp, Homo sapien
caggtttccctttctagggcgcctg

SEQ ID NO: 3199464 - DNA, 25 bp, Homo sapien
gtcgcgccttcgcagcagcaggccg

SEQ ID NO: 3199465 - DNA, 25 bp, Homo sapien
gtggtcgcgccttcgcagcagcagg

SEQ ID NO: 3199466 - DNA, 25 bp, Homo sapien
agcagcaggccgccgcctatcccgt

SEQ ID NO: 3199467 - DNA, 25 bp, Homo sapien
gcagcagcaggccgccgcctatccc

SEQ ID NO: 3199468 - DNA, 25 bp, Homo sapien
aacaaggtatgcatttccccggtgc

SEQ ID NO: 3199469 - DNA, 25 bp, Homo sapien
ttccccggtgcaggcaggaaaggtc

SEQ ID NO: 3199470 - DNA, 25 bp, Homo sapien
ctgtcccctagttttctgaacaagg

SEQ ID NO: 3199471 - DNA, 25 bp, Homo sapien
ccctagttttctgaacaaggtatgc

SEQ ID NO: 3199472 - DNA, 25 bp, Homo sapien
agcccgtgtgattccatctagtgcc

SEQ ID NO: 3199473 - DNA, 25 bp, Homo sapien
tgattccatctagtgccaggctgcc

SEQ ID NO: 3199474 - DNA, 25 bp, Homo sapien
tttgctctgagagggagcccgtgtg

SEQ ID NO: 3199475 - DNA, 25 bp, Homo sapien
cgtgtgattccatctagtgccaggc

SEQ ID NO: 3199476 - DNA, 25 bp, Homo sapien
tcacgagcacatacaggaactggca

SEQ ID NO: 3199477 - DNA, 25 bp, Homo sapien
tgtggaccatcagcggccaagtata

SEQ ID NO: 3199478 - DNA, 25 bp, Homo sapien
tagtcagatatacgttgggaaatcc

SEQ ID NO: 3199479 - DNA, 25 bp, Homo sapien
taaggccacgatcttttgcagatag

SEQ ID NO: 3199480 - DNA, 25 bp, Homo sapien
ccgggtggtgaacatagtagtcaat

SEQ ID NO: 3199481 - DNA, 25 bp, Homo sapien
atcacccgggtggtgaacatagtag

SEQ ID NO: 3199482 - DNA, 25 bp, Homo sapien
aatgatcccaaatagtaatgctgag

SEQ ID NO: 3199483 - DNA, 25 bp, Homo sapien
gatcccaaatagtaatgctgaggtt

SEQ ID NO: 3199484 - DNA, 25 bp, Homo sapien
ccatggataggcttctccggcatca

SEQ ID NO: 3199485 - DNA, 25 bp, Homo sapien
tcagagtatctctgaatccctttct

SEQ ID NO: 3199486 - DNA, 25 bp, Homo sapien
cttctccggcatcagagtatctctg

SEQ ID NO: 3199487 - DNA, 25 bp, Homo sapien
ctttgctccatggataggcttctcc

SEQ ID NO: 3199488 - DNA, 25 bp, Homo sapien
caaaatgccaattggcgtctttttc

SEQ ID NO: 3199489 - DNA, 25 bp, Homo sapien
tattagaaatgttggtaatccttca

SEQ ID NO: 3199490 - DNA, 25 bp, Homo sapien
ttctgtaacatcatctctatcatca

SEQ ID NO: 3199491 - DNA, 25 bp, Homo sapien
taagcagccagaaatctcttcagag

SEQ ID NO: 3199492 - DNA, 25 bp, Homo sapien
tgttaagttccaaaccggcagaaga

SEQ ID NO: 3199493 - DNA, 25 bp, Homo sapien
catgatggtcagatttgttaagttc

SEQ ID NO: 3199494 - DNA, 25 bp, Homo sapien
ctcagagctaataggagtggctttc

SEQ ID NO: 3199495 - DNA, 25 bp, Homo sapien
gagaagagctaacatcagcattgag

SEQ ID NO: 3199496 - DNA, 25 bp, Homo sapien
ttaaatgcatgaaaggtaaagggta

SEQ ID NO: 3199497 - DNA, 25 bp, Homo sapien
gattaaatgcatgaaaggtaaaggg

SEQ ID NO: 3199498 - DNA, 25 bp, Homo sapien
ctgattaaatgcatgaaaggtaaag

SEQ ID NO: 3199499 - DNA, 25 bp, Homo sapien
taaatgcatgaaaggtaaagggtac

SEQ ID NO: 3199500 - DNA, 25 bp, Homo sapien
agtcagatcaaagggaatgcccact

SEQ ID NO: 3199501 - DNA, 25 bp, Homo sapien
tagcgtcgtggagtcagatcaaagg

SEQ ID NO: 3199502 - DNA, 25 bp, Homo sapien
aagggaatgcccactggcgccctct

SEQ ID NO: 3199503 - DNA, 25 bp, Homo sapien
gccaagaggaggatagcgtcgtgga

SEQ ID NO: 3199504 - DNA, 25 bp, Homo sapien
caaaggtgtagccaaagaggcccag

SEQ ID NO: 3199505 - DNA, 25 bp, Homo sapien
agaagggcaaaggtgtagccaaaga

SEQ ID NO: 3199506 - DNA, 25 bp, Homo sapien
aaacaagtaggatttaagcatatag

SEQ ID NO: 3199507 - DNA, 25 bp, Homo sapien
tgtagccaaagaggcccagataata

SEQ ID NO: 3199508 - DNA, 25 bp, Homo sapien
tcctggggcccagtaacctatgctg

SEQ ID NO: 3199509 - DNA, 25 bp, Homo sapien
tgaaaggatacacactggttgccca

SEQ ID NO: 3199510 - DNA, 25 bp, Homo sapien
gcaggccagcgctggagcacttcct

SEQ ID NO: 3199511 - DNA, 25 bp, Homo sapien
gattgtattatgtaacggttctata

SEQ ID NO: 3199512 - DNA, 25 bp, Homo sapien
cagctgggtccggattcttgggaaa

SEQ ID NO: 3199513 - DNA, 25 bp, Homo sapien
tcacctcactccctgataatgacag

SEQ ID NO: 3199514 - DNA, 25 bp, Homo sapien
gtggttcacctcactccctgataat

SEQ ID NO: 3199515 - DNA, 25 bp, Homo sapien
aaagatgatgactctgacccactag

SEQ ID NO: 3199516 - DNA, 25 bp, Homo sapien
ctgccaaggcagctgatgttaccat

SEQ ID NO: 3199517 - DNA, 25 bp, Homo sapien
gccaaggcagctgatgttaccatct

SEQ ID NO: 3199518 - DNA, 25 bp, Homo sapien
ccatcttcatcacaatggtcttcat

SEQ ID NO: 3199519 - DNA, 25 bp, Homo sapien
aaggcagctgatgttaccatcttca

SEQ ID NO: 3199520 - DNA, 25 bp, Homo sapien
gagtatcgtacattagagtccttta

SEQ ID NO: 3199521 - DNA, 25 bp, Homo sapien
tacattagagtcctttattaggcct

SEQ ID NO: 3199522 - DNA, 25 bp, Homo sapien
gctgtgttgagtatcgtacattaga

SEQ ID NO: 3199523 - DNA, 25 bp, Homo sapien
ttaaagctgtgttgagtatcgtaca

SEQ ID NO: 3199524 - DNA, 25 bp, Homo sapien
aaagtcccaacgcatggaaccagag

SEQ ID NO: 3199525 - DNA, 25 bp, Homo sapien
cttttttgtcgttgcaagccacggg

SEQ ID NO: 3199526 - DNA, 25 bp, Homo sapien
gaaccagagttaatcattcacaggc

SEQ ID NO: 3199527 - DNA, 25 bp, Homo sapien
gcataactattgtctagaaggctga

SEQ ID NO: 3199528 - DNA, 25 bp, Homo sapien
cacagctaggacagaagaattctcc

SEQ ID NO: 3199529 - DNA, 25 bp, Homo sapien
ttcccaccctcatccacagatcaca

SEQ ID NO: 3199530 - DNA, 25 bp, Homo sapien
tgactgagtggtgctttcccaccct

SEQ ID NO: 3199531 - DNA, 25 bp, Homo sapien
ccattttgtacaccccaattgactg

SEQ ID NO: 3199532 - DNA, 25 bp, Homo sapien
tctgatgagtctttagttctcttcc

SEQ ID NO: 3199533 - DNA, 25 bp, Homo sapien
tgctctggaggtactgcagcccttc

SEQ ID NO: 3199534 - DNA, 25 bp, Homo sapien
cctgttttctgtttatagtccacac

SEQ ID NO: 3199535 - DNA, 25 bp, Homo sapien
tccaggcattaagttttatattgag

SEQ ID NO: 3199536 - DNA, 25 bp, Homo sapien
gaagtgatacaatgcttggactttg

SEQ ID NO: 3199537 - DNA, 25 bp, Homo sapien
gatgaagtgatacaatgcttggact

SEQ ID NO: 3199538 - DNA, 25 bp, Homo sapien
gtgatacaatgcttggactttgctt

SEQ ID NO: 3199539 - DNA, 25 bp, Homo sapien
tgcagatgaagtgatacaatgcttg

SEQ ID NO: 3199540 - DNA, 25 bp, Homo sapien
gcaacttggaaacaggtagatcacc

SEQ ID NO: 3199541 - DNA, 25 bp, Homo sapien
gacaggccatgtataagatgaccct

SEQ ID NO: 3199542 - DNA, 25 bp, Homo sapien
tagactactaactggaatcagggct

SEQ ID NO: 3199543 - DNA, 25 bp, Homo sapien
tgtcatccatgagaaggaccctaag

SEQ ID NO: 3199544 - DNA, 25 bp, Homo sapien
tgctcaacaggtgtcagaggcctct

SEQ ID NO: 3199545 - DNA, 25 bp, Homo sapien
tgtatgaaaacctgctgaaaccctc

SEQ ID NO: 3199546 - DNA, 25 bp, Homo sapien
cctacaggccatagttcaagggaga

SEQ ID NO: 3199547 - DNA, 25 bp, Homo sapien
gaaaacagcaggaggctattcccat

SEQ ID NO: 3199548 - DNA, 25 bp, Homo sapien
aagacagtccttgaaccctgatgga

SEQ ID NO: 3199549 - DNA, 25 bp, Homo sapien
tgtggtctgaaatctagagacctgg

SEQ ID NO: 3199550 - DNA, 25 bp, Homo sapien
tcctagcaactatggccaaatactc

SEQ ID NO: 3199551 - DNA, 25 bp, Homo sapien
tcaagatgactgcatgagatgtggc

SEQ ID NO: 3199552 - DNA, 25 bp, Homo sapien
gaataactgagcatccttggtatct

SEQ ID NO: 3199553 - DNA, 25 bp, Homo sapien
tgtatagatcctcccaatggctgtt

SEQ ID NO: 3199554 - DNA, 25 bp, Homo sapien
ggctgtttgcttctcgtcctcccaa

SEQ ID NO: 3199555 - DNA, 25 bp, Homo sapien
cacacagtaggcttcatataatgga

SEQ ID NO: 3199556 - DNA, 25 bp, Homo sapien
caagaactacgcagctcctttaagg

SEQ ID NO: 3199557 - DNA, 25 bp, Homo sapien
tcttgtctgctcaacctgggctagt

SEQ ID NO: 3199558 - DNA, 25 bp, Homo sapien
gggtctccaagctgagtgcctcact

SEQ ID NO: 3199559 - DNA, 25 bp, Homo sapien
ccagaattgggatgccatgtagaca

SEQ ID NO: 3199560 - DNA, 25 bp, Homo sapien
aactgctagtaaagttgtgcaaaac

SEQ ID NO: 3199561 - DNA, 25 bp, Homo sapien
tatgtatcacaggattagcagacaa

SEQ ID NO: 3199562 - DNA, 25 bp, Homo sapien
tgttgtaaagccagcaccttgaact

SEQ ID NO: 3199563 - DNA, 25 bp, Homo sapien
gaaaattatatctgggcttcaaaag

SEQ ID NO: 3199564 - DNA, 25 bp, Homo sapien
acgtggccccatggctcgccaggct

SEQ ID NO: 3199565 - DNA, 25 bp, Homo sapien
catgtaagaacgctgtcttcaaagt

SEQ ID NO: 3199566 - DNA, 25 bp, Homo sapien
gagccatgtaagaacgctgtcttca

SEQ ID NO: 3199567 - DNA, 25 bp, Homo sapien
ttctatagagccatgtaagaacgct

SEQ ID NO: 3199568 - DNA, 25 bp, Homo sapien
tgatttcaggccgaattgcactgga

SEQ ID NO: 3199569 - DNA, 25 bp, Homo sapien
gactactccactacattaacgcagc

SEQ ID NO: 3199570 - DNA, 25 bp, Homo sapien
ggagggtgacaacgctctctggttt

SEQ ID NO: 3199571 - DNA, 25 bp, Homo sapien
tcacatttatggaggttggactcaa

SEQ ID NO: 3199572 - DNA, 25 bp, Homo sapien
gccactcctgataagctgccatgta

SEQ ID NO: 3199573 - DNA, 25 bp, Homo sapien
catatgatgatgcattaccgggtcc

SEQ ID NO: 3199574 - DNA, 25 bp, Homo sapien
cacgtttctcttggctcgagtagcc

SEQ ID NO: 3199575 - DNA, 25 bp, Homo sapien
gaagattcagccactactctattgg

SEQ ID NO: 3199576 - DNA, 25 bp, Homo sapien
tgaccttagatgatccaccccctcg

SEQ ID NO: 3199577 - DNA, 25 bp, Homo sapien
accttagatgatccaccccctcggc

SEQ ID NO: 3199578 - DNA, 25 bp, Homo sapien
ggtcttgaacctctgaccttagatg

SEQ ID NO: 3199579 - DNA, 25 bp, Homo sapien
tgaacctctgaccttagatgatcca

SEQ ID NO: 3199580 - DNA, 25 bp, Homo sapien
gtggcagccaggaagaggcactcct

SEQ ID NO: 3199581 - DNA, 25 bp, Homo sapien
gacaggatgagggccgggaagaggc

SEQ ID NO: 3199582 - DNA, 25 bp, Homo sapien
ggtggcggccgggtagagatgctcc

SEQ ID NO: 3199583 - DNA, 25 bp, Homo sapien
cacttcctagacaggatgagggccg

SEQ ID NO: 3199584 - DNA, 25 bp, Homo sapien
taagcagaggaccctgtaagccttc

SEQ ID NO: 3199585 - DNA, 25 bp, Homo sapien
agaggaccctgtaagccttccacag

SEQ ID NO: 3199586 - DNA, 25 bp, Homo sapien
tcctataatgcccagagatgctctg

SEQ ID NO: 3199587 - DNA, 25 bp, Homo sapien
gaatataaggtaagaggtggcaacc

SEQ ID NO: 3199588 - DNA, 25 bp, Homo sapien
ggtggcaaccttgttctggaaatag

SEQ ID NO: 3199589 - DNA, 25 bp, Homo sapien
tgttttggattaacatctcaggcct

SEQ ID NO: 3199590 - DNA, 25 bp, Homo sapien
taaattcaaaatggctctcgggaaa

SEQ ID NO: 3199591 - DNA, 25 bp, Homo sapien
caaaggacctggcattaaatcacag

SEQ ID NO: 3199592 - DNA, 25 bp, Homo sapien
ggaaattcttgccaatcctgtggtc

SEQ ID NO: 3199593 - DNA, 25 bp, Homo sapien
ttaaagacccgaggatgtaagtatg

SEQ ID NO: 3199594 - DNA, 25 bp, Homo sapien
gatacaatcgatgggaataacctca

SEQ ID NO: 3199595 - DNA, 25 bp, Homo sapien
cctcggtggagtaaacctgaattca

SEQ ID NO: 3199596 - DNA, 25 bp, Homo sapien
tgtatccatcggctctagagagcag

SEQ ID NO: 3199597 - DNA, 25 bp, Homo sapien
aatacagggttggaaagagatgcac

SEQ ID NO: 3199598 - DNA, 25 bp, Homo sapien
taattacctcttgaacagtcctgcc

SEQ ID NO: 3199599 - DNA, 25 bp, Homo sapien
gaaaactggtactgcaaaaatcttg

SEQ ID NO: 3199600 - DNA, 25 bp, Homo sapien
cactgtgcacatacaaaggtagaga

SEQ ID NO: 3199601 - DNA, 25 bp, Homo sapien
caatttagtgcgtaacaatgacaga

SEQ ID NO: 3199602 - DNA, 25 bp, Homo sapien
tcttgctgtggttccaggcgccact

SEQ ID NO: 3199603 - DNA, 25 bp, Homo sapien
ggctccatggaagtaggatccactg

SEQ ID NO: 3199604 - DNA, 25 bp, Homo sapien
tccagggaagtgagcggttttgtct

SEQ ID NO: 3199605 - DNA, 25 bp, Homo sapien
taaccagtctcagtgtgatgagcca

SEQ ID NO: 3199606 - DNA, 25 bp, Homo sapien
ttggccccaactctattctagctta

SEQ ID NO: 3199607 - DNA, 25 bp, Homo sapien
tttctatacaccaaacctgagaacc

SEQ ID NO: 3199608 - DNA, 25 bp, Homo sapien
accaaatcaagaatacaatttcatt

SEQ ID NO: 3199609 - DNA, 25 bp, Homo sapien
cctgagaaccaaatcaagaatacaa

SEQ ID NO: 3199610 - DNA, 25 bp, Homo sapien
acctggccaatcaccagcatttcta

SEQ ID NO: 3199611 - DNA, 25 bp, Homo sapien
tactgtgtattctccctgtgcggcc

SEQ ID NO: 3199612 - DNA, 25 bp, Homo sapien
cacataggacaacagggaagttacc

SEQ ID NO: 3199613 - DNA, 25 bp, Homo sapien
ctgtgcggccccactggattgaaca

SEQ ID NO: 3199614 - DNA, 25 bp, Homo sapien
ggaggagccggaccagcctgttctt

SEQ ID NO: 3199615 - DNA, 25 bp, Homo sapien
gattgtacagggaaacttggaagcg

SEQ ID NO: 3199616 - DNA, 25 bp, Homo sapien
tcaaccagattggacagaaatgcca

SEQ ID NO: 3199617 - DNA, 25 bp, Homo sapien
tatgactgagcatccagagggtatg

SEQ ID NO: 3199618 - DNA, 25 bp, Homo sapien
tgagcagtctgctaacaatctgaaa

SEQ ID NO: 3199619 - DNA, 25 bp, Homo sapien
tgggcagaaactctaccatttgttc

SEQ ID NO: 3199620 - DNA, 25 bp, Homo sapien
tatctcaataggctgaaggttcaga

SEQ ID NO: 3199621 - DNA, 25 bp, Homo sapien
tgccacactagattgacagaagctg

SEQ ID NO: 3199622 - DNA, 25 bp, Homo sapien
tggcactccaaatcataaagacagt

SEQ ID NO: 3199623 - DNA, 25 bp, Homo sapien
ggtttctagagcttgccttatggag

SEQ ID NO: 3199624 - DNA, 25 bp, Homo sapien
tctagagcttgccttatggagtggg

SEQ ID NO: 3199625 - DNA, 25 bp, Homo sapien
ggatcgggcaacatcgactgtgtgc

SEQ ID NO: 3199626 - DNA, 25 bp, Homo sapien
gaatcaggaactgcgctgaccacag

SEQ ID NO: 3199627 - DNA, 25 bp, Homo sapien
ctttttacagagagggacctgaggt

SEQ ID NO: 3199628 - DNA, 25 bp, Homo sapien
tttacagagagggacctgaggttca

SEQ ID NO: 3199629 - DNA, 25 bp, Homo sapien
tctttttacagagagggacctgagg

SEQ ID NO: 3199630 - DNA, 25 bp, Homo sapien
cagagagggacctgaggttcaagaa

SEQ ID NO: 3199631 - DNA, 25 bp, Homo sapien
gatgtattcctaacttccttaagaa

SEQ ID NO: 3199632 - DNA, 25 bp, Homo sapien
tcaagttgctatggatgatgtgttt

SEQ ID NO: 3199633 - DNA, 25 bp, Homo sapien
cagaataggagtctacttcaagttg

SEQ ID NO: 3199634 - DNA, 25 bp, Homo sapien
taagaaacaagtgagaaattttagc

SEQ ID NO: 3199635 - DNA, 25 bp, Homo sapien
gctgtagggagcatccctggatttt

SEQ ID NO: 3199636 - DNA, 25 bp, Homo sapien
taggtaatgatctgctgctgaaaca

SEQ ID NO: 3199637 - DNA, 25 bp, Homo sapien
cctggattttgactctcaaaaggca

SEQ ID NO: 3199638 - DNA, 25 bp, Homo sapien
tgaaacagctcccatagcctggtgg

SEQ ID NO: 3199639 - DNA, 25 bp, Homo sapien
ccttaacatccggaattttctctca

SEQ ID NO: 3199640 - DNA, 25 bp, Homo sapien
ttttttcataggaatgataccacat

SEQ ID NO: 3199641 - DNA, 25 bp, Homo sapien
ggaatgataccacatcaacttttag

SEQ ID NO: 3199642 - DNA, 25 bp, Homo sapien
gataccacatcaacttttagtccct

SEQ ID NO: 3199643 - DNA, 25 bp, Homo sapien
tcccctgggccagatatgggaacat

SEQ ID NO: 3199644 - DNA, 25 bp, Homo sapien
ccagtgctgcaaggactaatcatca

SEQ ID NO: 3199645 - DNA, 25 bp, Homo sapien
gctcctcactaatgaccaggcagag

SEQ ID NO: 3199646 - DNA, 25 bp, Homo sapien
ctgtcacgctgaactctggaggcca

SEQ ID NO: 3199647 - DNA, 25 bp, Homo sapien
tgagagaatgaaagcgctgacgacc

SEQ ID NO: 3199648 - DNA, 25 bp, Homo sapien
gagagaatgaaagcgctgacgacca

SEQ ID NO: 3199649 - DNA, 25 bp, Homo sapien
aaagcgctgacgaccaaatgtctgg

SEQ ID NO: 3199650 - DNA, 25 bp, Homo sapien
gaatgaaagcgctgacgaccaaatg

SEQ ID NO: 3199651 - DNA, 25 bp, Homo sapien
cagtaaaggagccaatgtttgctgt

SEQ ID NO: 3199652 - DNA, 25 bp, Homo sapien
ccgagttgatccattgtaacaccct

SEQ ID NO: 3199653 - DNA, 25 bp, Homo sapien
tgtcataactatacaaaactgtgaa

SEQ ID NO: 3199654 - DNA, 25 bp, Homo sapien
cattacacccggatccatgaccagt

SEQ ID NO: 3199655 - DNA, 25 bp, Homo sapien
gttatctgcaccagaagttgagtca

SEQ ID NO: 3199656 - DNA, 25 bp, Homo sapien
tataacaatgttatctgcaccagaa

SEQ ID NO: 3199657 - DNA, 25 bp, Homo sapien
ccaaaagggcattataaatatgtgt

SEQ ID NO: 3199658 - DNA, 25 bp, Homo sapien
tgtatctgtgcctcatgccttattt

SEQ ID NO: 3199659 - DNA, 25 bp, Homo sapien
ttcaaagagccaagtgaactcctgc

SEQ ID NO: 3199660 - DNA, 25 bp, Homo sapien
tcaaagagccaagtgaactcctgca

SEQ ID NO: 3199661 - DNA, 25 bp, Homo sapien
catgtccgtaaaggacaaagaatgg

SEQ ID NO: 3199662 - DNA, 25 bp, Homo sapien
aactcagaaaactgaccaacatctg

SEQ ID NO: 3199663 - DNA, 25 bp, Homo sapien
agaatggaggctccaaatgttgtaa

SEQ ID NO: 3199664 - DNA, 25 bp, Homo sapien
gagaactaacttgatccagccaaat

SEQ ID NO: 3199665 - DNA, 25 bp, Homo sapien
gaaacaggccatcgggtagtgaaca

SEQ ID NO: 3199666 - DNA, 25 bp, Homo sapien
aggccatcgggtagtgaacactcca

SEQ ID NO: 3199667 - DNA, 25 bp, Homo sapien
ccatcgggtagtgaacactccactt

SEQ ID NO: 3199668 - DNA, 25 bp, Homo sapien
gtgaaacaggccatcgggtagtgaa

SEQ ID NO: 3199669 - DNA, 25 bp, Homo sapien
ccttgctaaaccagaagagatccac

SEQ ID NO: 3199670 - DNA, 25 bp, Homo sapien
tagggtactgcactggtctagaaag

SEQ ID NO: 3199671 - DNA, 25 bp, Homo sapien
caacttgcaagcaggtataaaccct

SEQ ID NO: 3199672 - DNA, 25 bp, Homo sapien
ggactaactactccaacctggctgc

SEQ ID NO: 3199673 - DNA, 25 bp, Homo sapien
aagtgaaattgcataccaactaatt

SEQ ID NO: 3199674 - DNA, 25 bp, Homo sapien
tttatctataggcacaatgatgtaa

SEQ ID NO: 3199675 - DNA, 25 bp, Homo sapien
tgatgtaaagtagattgctagaact

SEQ ID NO: 3199676 - DNA, 25 bp, Homo sapien
taccaactaattagtatcaccccat

SEQ ID NO: 3199677 - DNA, 25 bp, Homo sapien
tgcacgtgcacatacctgttcgtgt

SEQ ID NO: 3199678 - DNA, 25 bp, Homo sapien
cgtgcacatacctgttcgtgtgtgc

SEQ ID NO: 3199679 - DNA, 25 bp, Homo sapien
gcacatacctgttcgtgtgtgcatg

SEQ ID NO: 3199680 - DNA, 25 bp, Homo sapien
catacctgttcgtgtgtgcatgctg

SEQ ID NO: 3199681 - DNA, 25 bp, Homo sapien
ctccaaatttagctggtaaaagatc

SEQ ID NO: 3199682 - DNA, 25 bp, Homo sapien
tgatctggcttcatgggactcagtc

SEQ ID NO: 3199683 - DNA, 25 bp, Homo sapien
gaagtgatctggcttcatgggactc

SEQ ID NO: 3199684 - DNA, 25 bp, Homo sapien
tggtaaaagatccagatacttgctt

SEQ ID NO: 3199685 - DNA, 25 bp, Homo sapien
tgtcgttatactgaacccctgttgg

SEQ ID NO: 3199686 - DNA, 25 bp, Homo sapien
taaaccccagacatgttgtatgaat

SEQ ID NO: 3199687 - DNA, 25 bp, Homo sapien
tgactttgggcttccttaagactct

SEQ ID NO: 3199688 - DNA, 25 bp, Homo sapien
taggtgccacaggactcaaatttct

SEQ ID NO: 3199689 - DNA, 25 bp, Homo sapien
cttaggcaaacagcacgcagcagaa

SEQ ID NO: 3199690 - DNA, 25 bp, Homo sapien
aatggtatccgtgatcaaaggcccg

SEQ ID NO: 3199691 - DNA, 25 bp, Homo sapien
aaatggttgcccttgaacgaaagca

SEQ ID NO: 3199692 - DNA, 25 bp, Homo sapien
ggagccctggaggaacttaggcaaa

SEQ ID NO: 3199693 - DNA, 25 bp, Homo sapien
ccttgtacacgctgctctcatggca

SEQ ID NO: 3199694 - DNA, 25 bp, Homo sapien
gtttaagcaggtcccaaggccaagc

SEQ ID NO: 3199695 - DNA, 25 bp, Homo sapien
caaggaaaagaactgctcggatgtg

SEQ ID NO: 3199696 - DNA, 25 bp, Homo sapien
caggatccacgctaatggagcagca

SEQ ID NO: 3199697 - DNA, 25 bp, Homo sapien
gaaacgttagtatagctggaggcca

SEQ ID NO: 3199698 - DNA, 25 bp, Homo sapien
tattatacgcacaaagtcctgtggc

SEQ ID NO: 3199699 - DNA, 25 bp, Homo sapien
gggaggtctcccagccattgactat

SEQ ID NO: 3199700 - DNA, 25 bp, Homo sapien
tatagacatgaacaacctaggttgc

SEQ ID NO: 3199701 - DNA, 25 bp, Homo sapien
tcatcccattcctttggtatcaaag

SEQ ID NO: 3199702 - DNA, 25 bp, Homo sapien
cattcaaccttcaatggacacttgg

SEQ ID NO: 3199703 - DNA, 25 bp, Homo sapien
ttgatgtagagtatctccttaaatt

SEQ ID NO: 3199704 - DNA, 25 bp, Homo sapien
gtacaaaccacatttggtatatcca

SEQ ID NO: 3199705 - DNA, 25 bp, Homo sapien
ccaggactataacttcattagggat

SEQ ID NO: 3199706 - DNA, 25 bp, Homo sapien
caggactataacttcattagggatt

SEQ ID NO: 3199707 - DNA, 25 bp, Homo sapien
accaggactataacttcattaggga

SEQ ID NO: 3199708 - DNA, 25 bp, Homo sapien
aggactataacttcattagggattg

SEQ ID NO: 3199709 - DNA, 25 bp, Homo sapien
cattactttttaggtgctttctggg

SEQ ID NO: 3199710 - DNA, 25 bp, Homo sapien
tactgtttggatcaagactactcag

SEQ ID NO: 3199711 - DNA, 25 bp, Homo sapien
caaccaggaatgtttaggagtttgc

SEQ ID NO: 3199712 - DNA, 25 bp, Homo sapien
tatccatgagtgtgactaagaagaa

SEQ ID NO: 3199713 - DNA, 25 bp, Homo sapien
taacctttcagaaatgggctgcacc

SEQ ID NO: 3199714 - DNA, 25 bp, Homo sapien
ggctgcacctcacactaaccaaaga

SEQ ID NO: 3199715 - DNA, 25 bp, Homo sapien
gacaaagacatctacgagactcgaa

SEQ ID NO: 3199716 - DNA, 25 bp, Homo sapien
tgaacgagttaagtagacaacagcc

SEQ ID NO: 3199717 - DNA, 25 bp, Homo sapien
gttatccaggatggtcttctcattc

SEQ ID NO: 3199718 - DNA, 25 bp, Homo sapien
atacagggtctctctgtgttatcca

SEQ ID NO: 3199719 - DNA, 25 bp, Homo sapien
tgtgttatccaggatggtcttctca

SEQ ID NO: 3199720 - DNA, 25 bp, Homo sapien
tctctctgtgttatccaggatggtc

SEQ ID NO: 3199721 - DNA, 25 bp, Homo sapien
ttttgtaattgaagagaggctaaca

SEQ ID NO: 3199722 - DNA, 25 bp, Homo sapien
cataatattgacttctgcattagga

SEQ ID NO: 3199723 - DNA, 25 bp, Homo sapien
gaaaaatggtttattatatcagcca

SEQ ID NO: 3199724 - DNA, 25 bp, Homo sapien
gaaaactactaagtggagattgact

SEQ ID NO: 3199725 - DNA, 25 bp, Homo sapien
tctggctagccatttggacaattct

SEQ ID NO: 3199726 - DNA, 25 bp, Homo sapien
gagacgtatttatctggctagccat

SEQ ID NO: 3199727 - DNA, 25 bp, Homo sapien
taaaatatgagacgtatttatctgg

SEQ ID NO: 3199728 - DNA, 25 bp, Homo sapien
tctatacatatgacccttccctctt

SEQ ID NO: 3199729 - DNA, 25 bp, Homo sapien
gattaattcttccggagagttaaga

SEQ ID NO: 3199730 - DNA, 25 bp, Homo sapien
taattcttccggagagttaagaaga

SEQ ID NO: 3199731 - DNA, 25 bp, Homo sapien
ctgattaattcttccggagagttaa

SEQ ID NO: 3199732 - DNA, 25 bp, Homo sapien
tttctctatggatgcatgaagaata

SEQ ID NO: 3199733 - DNA, 25 bp, Homo sapien
tatatgtaacatagccactttccta

SEQ ID NO: 3199734 - DNA, 25 bp, Homo sapien
cactgtcccttattcagcagtcatc

SEQ ID NO: 3199735 - DNA, 25 bp, Homo sapien
tgctaaatatccttcgtgtccatct

SEQ ID NO: 3199736 - DNA, 25 bp, Homo sapien
caaattctatatactctacatgcta

SEQ ID NO: 3199737 - DNA, 25 bp, Homo sapien
tacttggttccccagaatcagtgaa

SEQ ID NO: 3199738 - DNA, 25 bp, Homo sapien
gactctattatgactgagacagtgg

SEQ ID NO: 3199739 - DNA, 25 bp, Homo sapien
ccataggcagtgaacaaggttggcc

SEQ ID NO: 3199740 - DNA, 25 bp, Homo sapien
gtgtgatggctgctcaggcaaacca

SEQ ID NO: 3199741 - DNA, 25 bp, Homo sapien
ttagaagcttgttattccctagggc

SEQ ID NO: 3199742 - DNA, 25 bp, Homo sapien
tcaaggaagaggtcatagggttaca

SEQ ID NO: 3199743 - DNA, 25 bp, Homo sapien
tcagcaaaacatctaccatggcaaa

SEQ ID NO: 3199744 - DNA, 25 bp, Homo sapien
tctaccaagtgaaatagcatctact

SEQ ID NO: 3199745 - DNA, 25 bp, Homo sapien
tctactagtgcaacctaaccctggg

SEQ ID NO: 3199746 - DNA, 25 bp, Homo sapien
cagccatcacgccagaaacagtagg

SEQ ID NO: 3199747 - DNA, 25 bp, Homo sapien
cctgggtaccccaatttgcagtgtt

SEQ ID NO: 3199748 - DNA, 25 bp, Homo sapien
taaagctatgcactctttcacagga

SEQ ID NO: 3199749 - DNA, 25 bp, Homo sapien
ttatagtcataacagtacatttcct

SEQ ID NO: 3199750 - DNA, 25 bp, Homo sapien
tattcagcaggatgtctttatagtc

SEQ ID NO: 3199751 - DNA, 25 bp, Homo sapien
tgtagatttgattagtgatgctttt

SEQ ID NO: 3199752 - DNA, 25 bp, Homo sapien
tactttcccaagcatcaggatattc

SEQ ID NO: 3199753 - DNA, 25 bp, Homo sapien
ttagataagggaaatatagtatata

SEQ ID NO: 3199754 - DNA, 25 bp, Homo sapien
attagataagggaaatatagtatat

SEQ ID NO: 3199755 - DNA, 25 bp, Homo sapien
gacgcactttgccaggttccagaag

SEQ ID NO: 3199756 - DNA, 25 bp, Homo sapien
ttaaattggaggacagcacacagag

SEQ ID NO: 3199757 - DNA, 25 bp, Homo sapien
gcacacagagatccaaatttgatca

SEQ ID NO: 3199758 - DNA, 25 bp, Homo sapien
cttgacgcactttgccaggttccag

SEQ ID NO: 3199759 - DNA, 25 bp, Homo sapien
ggcttctgagaaagcacctaatctt

SEQ ID NO: 3199760 - DNA, 25 bp, Homo sapien
agaaagcacctaatcttctcacctg

SEQ ID NO: 3199761 - DNA, 25 bp, Homo sapien
agcaaaatgaaccatgcagggatga

SEQ ID NO: 3199762 - DNA, 25 bp, Homo sapien
gctccgatttgggtcttgctcactc

SEQ ID NO: 3199763 - DNA, 25 bp, Homo sapien
caggtgctcgtgtattggatgcata

SEQ ID NO: 3199764 - DNA, 25 bp, Homo sapien
tccaacaggtagtgttttgatcctc

SEQ ID NO: 3199765 - DNA, 25 bp, Homo sapien
tatgcaggttggctctatagataaa

SEQ ID NO: 3199766 - DNA, 25 bp, Homo sapien
cctccacactcaagtctctttgtag

SEQ ID NO: 3199767 - DNA, 25 bp, Homo sapien
cagaagtattgcactttttcccaaa

SEQ ID NO: 3199768 - DNA, 25 bp, Homo sapien
actgccatgatattgtttgaccttt

SEQ ID NO: 3199769 - DNA, 25 bp, Homo sapien
gaaagtagcaactcagaaaattaag

SEQ ID NO: 3199770 - DNA, 25 bp, Homo sapien
gaaagcattctaaggtgcaagggaa

SEQ ID NO: 3199771 - DNA, 25 bp, Homo sapien
agccagacaccagataataagacgt

SEQ ID NO: 3199772 - DNA, 25 bp, Homo sapien
gagaaactgaggaagcttgagtaga

SEQ ID NO: 3199773 - DNA, 25 bp, Homo sapien
tgaaggactttagagtttgtgttct

SEQ ID NO: 3199774 - DNA, 25 bp, Homo sapien
ctaggttattaaatcagcaagccag

SEQ ID NO: 3199775 - DNA, 25 bp, Homo sapien
gcatgagatccatttccctagaagg

SEQ ID NO: 3199776 - DNA, 25 bp, Homo sapien
gaatgcgtacttcttactctgagga

SEQ ID NO: 3199777 - DNA, 25 bp, Homo sapien
ggtgtactggatttcctgaaggacg

SEQ ID NO: 3199778 - DNA, 25 bp, Homo sapien
ttcgttaggtaagactcaatggcag

SEQ ID NO: 3199779 - DNA, 25 bp, Homo sapien
agccctcctaaggtggttttgattg

SEQ ID NO: 3199780 - DNA, 25 bp, Homo sapien
gtatatgaaaaagaagccctcctaa

SEQ ID NO: 3199781 - DNA, 25 bp, Homo sapien
ctcctaaggtggttttgattgaaca

SEQ ID NO: 3199782 - DNA, 25 bp, Homo sapien
ttttgattgaacagaatggttgcag

SEQ ID NO: 3199783 - DNA, 25 bp, Homo sapien
ggttttctcactctggacattagag

SEQ ID NO: 3199784 - DNA, 25 bp, Homo sapien
ctctggacattagagctgctcctag

SEQ ID NO: 3199785 - DNA, 25 bp, Homo sapien
ctagcagaccctgcgcatgggcact

SEQ ID NO: 3199786 - DNA, 25 bp, Homo sapien
tctgcagcaggggtgtccgtaaagc

SEQ ID NO: 3199787 - DNA, 25 bp, Homo sapien
gagctgcagagagtagagccccagc

SEQ ID NO: 3199788 - DNA, 25 bp, Homo sapien
aagcattttccagaccattgaggtt

SEQ ID NO: 3199789 - DNA, 25 bp, Homo sapien
cagactttgcccagtagcaatgatg

SEQ ID NO: 3199790 - DNA, 25 bp, Homo sapien
ccaaagcacaggcataactcgacat

SEQ ID NO: 3199791 - DNA, 25 bp, Homo sapien
caaatttcaggtggctcttctccat

SEQ ID NO: 3199792 - DNA, 25 bp, Homo sapien
aaggaatgtagcatcctgccagcag

SEQ ID NO: 3199793 - DNA, 25 bp, Homo sapien
gaatgtagcatcctgccagcagttc

SEQ ID NO: 3199794 - DNA, 25 bp, Homo sapien
atgcaaatttcaggtggctcttctc

SEQ ID NO: 3199795 - DNA, 25 bp, Homo sapien
tatgatgcgaccttaatttctcaat

SEQ ID NO: 3199796 - DNA, 25 bp, Homo sapien
caacttcacttatatgatgcgacct

SEQ ID NO: 3199797 - DNA, 25 bp, Homo sapien
ctgatgtagggtattagaaaagtag

SEQ ID NO: 3199798 - DNA, 25 bp, Homo sapien
gtagtgttcaacttcacttatatga

SEQ ID NO: 3199799 - DNA, 25 bp, Homo sapien
gtatagcaggaaacagttgggcccc

SEQ ID NO: 3199800 - DNA, 25 bp, Homo sapien
tcaaaagagtataacctagaggcta

SEQ ID NO: 3199801 - DNA, 25 bp, Homo sapien
gacctacttaggaagcatctggaaa

SEQ ID NO: 3199802 - DNA, 25 bp, Homo sapien
caagttttaacacatgggacctact

SEQ ID NO: 3199803 - DNA, 25 bp, Homo sapien
aacctctgatggctggtaaagatgt

SEQ ID NO: 3199804 - DNA, 25 bp, Homo sapien
tctgatggctggtaaagatgttgct

SEQ ID NO: 3199805 - DNA, 25 bp, Homo sapien
gtcctccagaacctctgatggctgg

SEQ ID NO: 3199806 - DNA, 25 bp, Homo sapien
tccagaacctctgatggctggtaaa

SEQ ID NO: 3199807 - DNA, 25 bp, Homo sapien
atgactttgatgagttgacagaaga

SEQ ID NO: 3199808 - DNA, 25 bp, Homo sapien
ctttgatgagttgacagaagaaggc

SEQ ID NO: 3199809 - DNA, 25 bp, Homo sapien
ggagaatgactttgatgagttgaca

SEQ ID NO: 3199810 - DNA, 25 bp, Homo sapien
gactttgatgagttgacagaagaag

SEQ ID NO: 3199811 - DNA, 25 bp, Homo sapien
aagccaggacctgattgatttgccc

SEQ ID NO: 3199812 - DNA, 25 bp, Homo sapien
taagctgcttggatgccctatataa

SEQ ID NO: 3199813 - DNA, 25 bp, Homo sapien
ccagtaggccaaagagagtcgagtc

SEQ ID NO: 3199814 - DNA, 25 bp, Homo sapien
aattcctaaggagacaccatacagc

SEQ ID NO: 3199815 - DNA, 25 bp, Homo sapien
agctgctcccccgacagggtattca

SEQ ID NO: 3199816 - DNA, 25 bp, Homo sapien
cacttccagtcaggcacgttgtttt

SEQ ID NO: 3199817 - DNA, 25 bp, Homo sapien
ccccgacagggtattcaatcatgca

SEQ ID NO: 3199818 - DNA, 25 bp, Homo sapien
tattcaatcatgcaaatgtcttgtg

SEQ ID NO: 3199819 - DNA, 25 bp, Homo sapien
cttcttgctatagggcctatcttgc

SEQ ID NO: 3199820 - DNA, 25 bp, Homo sapien
ttgctatagggcctatcttgcaagg

SEQ ID NO: 3199821 - DNA, 25 bp, Homo sapien
gctatagggcctatcttgcaaggag

SEQ ID NO: 3199822 - DNA, 25 bp, Homo sapien
tatagggcctatcttgcaaggagaa

SEQ ID NO: 3199823 - DNA, 25 bp, Homo sapien
aatttgttgccggataggagcaatt

SEQ ID NO: 3199824 - DNA, 25 bp, Homo sapien
gccggataggagcaattttagaaaa

SEQ ID NO: 3199825 - DNA, 25 bp, Homo sapien
aatgaacaagccgatcacatgcaat

SEQ ID NO: 3199826 - DNA, 25 bp, Homo sapien
agccgatcacatgcaatttgttgcc

SEQ ID NO: 3199827 - DNA, 25 bp, Homo sapien
ctctcagaaacatagatttcaggct

SEQ ID NO: 3199828 - DNA, 25 bp, Homo sapien
aacatagatttcaggcttctgggat

SEQ ID NO: 3199829 - DNA, 25 bp, Homo sapien
cagaaacatagatttcaggcttctg

SEQ ID NO: 3199830 - DNA, 25 bp, Homo sapien
tcttcattcttttctaatatcatag

SEQ ID NO: 3199831 - DNA, 25 bp, Homo sapien
cagggatggcaatgtagaagaatac

SEQ ID NO: 3199832 - DNA, 25 bp, Homo sapien
agaagaatacggtggggttgaccat

SEQ ID NO: 3199833 - DNA, 25 bp, Homo sapien
ggatggcaatgtagaagaatacggt

SEQ ID NO: 3199834 - DNA, 25 bp, Homo sapien
tagaagaatacggtggggttgacca

SEQ ID NO: 3199835 - DNA, 25 bp, Homo sapien
tgctcagagcactacatatttctgc

SEQ ID NO: 3199836 - DNA, 25 bp, Homo sapien
cagcccgaaggagttggggcccaag

SEQ ID NO: 3199837 - DNA, 25 bp, Homo sapien
cagtgctcagagcactacatatttc

SEQ ID NO: 3199838 - DNA, 25 bp, Homo sapien
gtgctcagagcactacatatttctg

SEQ ID NO: 3199839 - DNA, 25 bp, Homo sapien
gtgctattatggcatgtgaactcac

SEQ ID NO: 3199840 - DNA, 25 bp, Homo sapien
ctgccaccagtgctattatggcatg

SEQ ID NO: 3199841 - DNA, 25 bp, Homo sapien
accagtgctattatggcatgtgaac

SEQ ID NO: 3199842 - DNA, 25 bp, Homo sapien
cagtgctattatggcatgtgaactc

SEQ ID NO: 3199843 - DNA, 25 bp, Homo sapien
ctgtatgcgtcaagttgaagtcctc

SEQ ID NO: 3199844 - DNA, 25 bp, Homo sapien
gttgaagtcctcatcaaatatctcc

SEQ ID NO: 3199845 - DNA, 25 bp, Homo sapien
gcgtcaagttgaagtcctcatcaaa

SEQ ID NO: 3199846 - DNA, 25 bp, Homo sapien
tgaagtcctcatcaaatatctcccc

SEQ ID NO: 3199847 - DNA, 25 bp, Homo sapien
aatcatttgtgttgggtacagaatt

SEQ ID NO: 3199848 - DNA, 25 bp, Homo sapien
gggaatcatttgtgttgggtacaga

SEQ ID NO: 3199849 - DNA, 25 bp, Homo sapien
ctgggaatcatttgtgttgggtaca

SEQ ID NO: 3199850 - DNA, 25 bp, Homo sapien
ggaatcatttgtgttgggtacagaa

SEQ ID NO: 3199851 - DNA, 25 bp, Homo sapien
attcctagactcagagcgctccatg

SEQ ID NO: 3199852 - DNA, 25 bp, Homo sapien
ccattcctagactcagagcgctcca

SEQ ID NO: 3199853 - DNA, 25 bp, Homo sapien
cattcctagactcagagcgctccat

SEQ ID NO: 3199854 - DNA, 25 bp, Homo sapien
aaacaatttcatgtcactggagaag

SEQ ID NO: 3199855 - DNA, 25 bp, Homo sapien
ttttgccatggctgaagaccacaaa

SEQ ID NO: 3199856 - DNA, 25 bp, Homo sapien
tctggtaataaaaagactgccctgt

SEQ ID NO: 3199857 - DNA, 25 bp, Homo sapien
tgccctgttactgtggagaaactgt

SEQ ID NO: 3199858 - DNA, 25 bp, Homo sapien
cgcatttgcttctcttatttttttc

SEQ ID NO: 3199859 - DNA, 25 bp, Homo sapien
catttgcttctcttatttttttcat

SEQ ID NO: 3199860 - DNA, 25 bp, Homo sapien
gcatttgcttctcttatttttttca

SEQ ID NO: 3199861 - DNA, 25 bp, Homo sapien
cctaaagtatgttctgtaatccgta

SEQ ID NO: 3199862 - DNA, 25 bp, Homo sapien
aaagtatgttctgtaatccgtattc

SEQ ID NO: 3199863 - DNA, 25 bp, Homo sapien
tcctaaagtatgttctgtaatccgt

SEQ ID NO: 3199864 - DNA, 25 bp, Homo sapien
gtatgttctgtaatccgtattccca

SEQ ID NO: 3199865 - DNA, 25 bp, Homo sapien
acactcggagctctccaaggatccg

SEQ ID NO: 3199866 - DNA, 25 bp, Homo sapien
ggtttctgtgtcattgttaccactg

SEQ ID NO: 3199867 - DNA, 25 bp, Homo sapien
tgttttgttgggctccacactcgga

SEQ ID NO: 3199868 - DNA, 25 bp, Homo sapien
cggtgcattggcataataccccatg

SEQ ID NO: 3199869 - DNA, 25 bp, Homo sapien
gggctgtagttgcagctctgagaca

SEQ ID NO: 3199870 - DNA, 25 bp, Homo sapien
gtagttgcagctctgagacatttct

SEQ ID NO: 3199871 - DNA, 25 bp, Homo sapien
tatttctgggctgtagttgcagctc

SEQ ID NO: 3199872 - DNA, 25 bp, Homo sapien
gctgtagttgcagctctgagacatt

SEQ ID NO: 3199873 - DNA, 25 bp, Homo sapien
ctaaatacatgccatactgataaca

SEQ ID NO: 3199874 - DNA, 25 bp, Homo sapien
aacattttgccggaaaagtccagtg

SEQ ID NO: 3199875 - DNA, 25 bp, Homo sapien
taaatacatgccatactgataacat

SEQ ID NO: 3199876 - DNA, 25 bp, Homo sapien
ttgccggaaaagtccagtgcctctg

SEQ ID NO: 3199877 - DNA, 25 bp, Homo sapien
acaggaaatgccagttcattaaagc

SEQ ID NO: 3199878 - DNA, 25 bp, Homo sapien
aaccaacacgaatgtctggatttcc

SEQ ID NO: 3199879 - DNA, 25 bp, Homo sapien
cttggcaagattctcaagatcacac

SEQ ID NO: 3199880 - DNA, 25 bp, Homo sapien
ggagaaacagtaggaaccaacacga

SEQ ID NO: 3199881 - DNA, 25 bp, Homo sapien
gctctctagactggttttatacatt

SEQ ID NO: 3199882 - DNA, 25 bp, Homo sapien
ctctctagactggttttatacattc

SEQ ID NO: 3199883 - DNA, 25 bp, Homo sapien
ctctagactggttttatacattctt

SEQ ID NO: 3199884 - DNA, 25 bp, Homo sapien
agctctctagactggttttatacat

SEQ ID NO: 3199885 - DNA, 25 bp, Homo sapien
gaaaccaggtgaatctcagattttg

SEQ ID NO: 3199886 - DNA, 25 bp, Homo sapien
tgtagtaaacgagtctgacaattcc

SEQ ID NO: 3199887 - DNA, 25 bp, Homo sapien
gatgaaagtttatgaaccttggcaa

SEQ ID NO: 3199888 - DNA, 25 bp, Homo sapien
catttacttgaaactgaaaccaggt

SEQ ID NO: 3199889 - DNA, 25 bp, Homo sapien
tcatttgcaaagaaatctagtccaa

SEQ ID NO: 3199890 - DNA, 25 bp, Homo sapien
ttgcaaagaaatctagtccaaacat

SEQ ID NO: 3199891 - DNA, 25 bp, Homo sapien
tttcatttgcaaagaaatctagtcc

SEQ ID NO: 3199892 - DNA, 25 bp, Homo sapien
catttgcaaagaaatctagtccaaa

SEQ ID NO: 3199893 - DNA, 25 bp, Homo sapien
aaagtgtaaagaaaatttgcaccag

SEQ ID NO: 3199894 - DNA, 25 bp, Homo sapien
tgcaccagatcgtatttataaaaag

SEQ ID NO: 3199895 - DNA, 25 bp, Homo sapien
tataaaaagtaagcataagattgtc

SEQ ID NO: 3199896 - DNA, 25 bp, Homo sapien
aagcataagattgtctgcattttac

SEQ ID NO: 3199897 - DNA, 25 bp, Homo sapien
gtggcatcacaggtaattttctgtt

SEQ ID NO: 3199898 - DNA, 25 bp, Homo sapien
tgaaaagtggcatcacaggtaattt

SEQ ID NO: 3199899 - DNA, 25 bp, Homo sapien
tattggtttttcatgaaaagtggca

SEQ ID NO: 3199900 - DNA, 25 bp, Homo sapien
aagtggcatcacaggtaattttctg

SEQ ID NO: 3199901 - DNA, 25 bp, Homo sapien
tgaccatggaacacctaacccgaaa

SEQ ID NO: 3199902 - DNA, 25 bp, Homo sapien
tcgcagagcaccactgatgaacaat

SEQ ID NO: 3199903 - DNA, 25 bp, Homo sapien
ttccccacagtctgaaattggctga

SEQ ID NO: 3199904 - DNA, 25 bp, Homo sapien
tagtcatcattctcgcagagcacca

SEQ ID NO: 3199905 - DNA, 25 bp, Homo sapien
cattttggaaggtggaggcaagagg

SEQ ID NO: 3199906 - DNA, 25 bp, Homo sapien
ccagcctgggaaacagagtgagacc

SEQ ID NO: 3199907 - DNA, 25 bp, Homo sapien
taaaaaattagctaagcatggcagc

SEQ ID NO: 3199908 - DNA, 25 bp, Homo sapien
attacttgaagccaggagtttgaga

SEQ ID NO: 3199909 - DNA, 25 bp, Homo sapien
agcaggctagcccaaacttgttttg

SEQ ID NO: 3199910 - DNA, 25 bp, Homo sapien
acttcctgactgtgtggtgcctgaa

SEQ ID NO: 3199911 - DNA, 25 bp, Homo sapien
gctgatctgaacttgtctcggctga

SEQ ID NO: 3199912 - DNA, 25 bp, Homo sapien
taggactaaagagcctgatcattgc

SEQ ID NO: 3199913 - DNA, 25 bp, Homo sapien
caggagatttatgggtgtgcacacc

SEQ ID NO: 3199914 - DNA, 25 bp, Homo sapien
gcagttgtaggcaccatggttagca

SEQ ID NO: 3199915 - DNA, 25 bp, Homo sapien
ccaggaaatatattaggtgcccatc

SEQ ID NO: 3199916 - DNA, 25 bp, Homo sapien
gcagtcccgtgtaaaggcagcagat

SEQ ID NO: 3199917 - DNA, 25 bp, Homo sapien
ctttctgagcttttggattcctcat

SEQ ID NO: 3199918 - DNA, 25 bp, Homo sapien
tcagcttctatagatgagccttctg

SEQ ID NO: 3199919 - DNA, 25 bp, Homo sapien
atttcaagggcatattgtgcaatgc

SEQ ID NO: 3199920 - DNA, 25 bp, Homo sapien
ttcagcttctatagatgagccttct

SEQ ID NO: 3199921 - DNA, 25 bp, Homo sapien
ggtcttataatttcaagggcatatt

SEQ ID NO: 3199922 - DNA, 25 bp, Homo sapien
gtgctcagtgccgtattcatactac

SEQ ID NO: 3199923 - DNA, 25 bp, Homo sapien
cagtgccgtattcatactactttca

SEQ ID NO: 3199924 - DNA, 25 bp, Homo sapien
tatctcttccgttccttgagtgctc

SEQ ID NO: 3199925 - DNA, 25 bp, Homo sapien
cgggcgatacggtatctcttccgtt

SEQ ID NO: 3199926 - DNA, 25 bp, Homo sapien
cagtccttgttgtactcagtctgtt

SEQ ID NO: 3199927 - DNA, 25 bp, Homo sapien
tcagtccttgttgtactcagtctgt

SEQ ID NO: 3199928 - DNA, 25 bp, Homo sapien
gaccatcagtattaactccccacat

SEQ ID NO: 3199929 - DNA, 25 bp, Homo sapien
cagcaacatccttaagtgtttgtct

SEQ ID NO: 3199930 - DNA, 25 bp, Homo sapien
gttgcactaaggtgaccatcagtat

SEQ ID NO: 3199931 - DNA, 25 bp, Homo sapien
tgtttgtctgaagcaaatcacaaat

SEQ ID NO: 3199932 - DNA, 25 bp, Homo sapien
tatcaggcttattgaatctgtcact

SEQ ID NO: 3199933 - DNA, 25 bp, Homo sapien
tgagtagcttgcaatactattatga

SEQ ID NO: 3199934 - DNA, 25 bp, Homo sapien
tgaagaatatctgctgcttaaaact

SEQ ID NO: 3199935 - DNA, 25 bp, Homo sapien
cactctcattctagatggatatttt

SEQ ID NO: 3199936 - DNA, 25 bp, Homo sapien
ctgtaggggaactattttcctatct

SEQ ID NO: 3199937 - DNA, 25 bp, Homo sapien
actattttcctatctgatattctgc

SEQ ID NO: 3199938 - DNA, 25 bp, Homo sapien
gggaactattttcctatctgatatt

SEQ ID NO: 3199939 - DNA, 25 bp, Homo sapien
gtaggggaactattttcctatctga

SEQ ID NO: 3199940 - DNA, 25 bp, Homo sapien
tttttctgtgccttcatgctaaaaa

SEQ ID NO: 3199941 - DNA, 25 bp, Homo sapien
ttctttttctgtgccttcatgctaa

SEQ ID NO: 3199942 - DNA, 25 bp, Homo sapien
gtttctttttctgtgccttcatgct

SEQ ID NO: 3199943 - DNA, 25 bp, Homo sapien
ctttttctgtgccttcatgctaaaa

SEQ ID NO: 3199944 - DNA, 25 bp, Homo sapien
catagatgcaatgtgatattgccat

SEQ ID NO: 3199945 - DNA, 25 bp, Homo sapien
tttttacatagatgcaatgtgatat

SEQ ID NO: 3199946 - DNA, 25 bp, Homo sapien
ttttttacatagatgcaatgtgata

SEQ ID NO: 3199947 - DNA, 25 bp, Homo sapien
ttacatagatgcaatgtgatattgc

SEQ ID NO: 3199948 - DNA, 25 bp, Homo sapien
acagctgaagccaatgtctgaatac

SEQ ID NO: 3199949 - DNA, 25 bp, Homo sapien
cagctgaagccaatgtctgaatact

SEQ ID NO: 3199950 - DNA, 25 bp, Homo sapien
ttctctccaggtttcttttatactg

SEQ ID NO: 3199951 - DNA, 25 bp, Homo sapien
ctctccaggtttcttttatactgca

SEQ ID NO: 3199952 - DNA, 25 bp, Homo sapien
tctccaggtttcttttatactgcat

SEQ ID NO: 3199953 - DNA, 25 bp, Homo sapien
tctctccaggtttcttttatactgc

SEQ ID NO: 3199954 - DNA, 25 bp, Homo sapien
atatacttctcaggcatcccctcaa

SEQ ID NO: 3199955 - DNA, 25 bp, Homo sapien
ccttgatgttatagtcaaaagtgtt

SEQ ID NO: 3199956 - DNA, 25 bp, Homo sapien
ttgtgctttcccttactcatatact

SEQ ID NO: 3199957 - DNA, 25 bp, Homo sapien
gcacactctgtcattgtagattata

SEQ ID NO: 3199958 - DNA, 25 bp, Homo sapien
tagagatggctgctttcaatgttac

SEQ ID NO: 3199959 - DNA, 25 bp, Homo sapien
ttagagatggctgctttcaatgtta

SEQ ID NO: 3199960 - DNA, 25 bp, Homo sapien
ataaacttgtcagttgcatgtggca

SEQ ID NO: 3199961 - DNA, 25 bp, Homo sapien
aggaataaacttgtcagttgcatgt

SEQ ID NO: 3199962 - DNA, 25 bp, Homo sapien
aaacttgtcagttgcatgtggcagt

SEQ ID NO: 3199963 - DNA, 25 bp, Homo sapien
gaataaacttgtcagttgcatgtgg

SEQ ID NO: 3199964 - DNA, 25 bp, Homo sapien
tttctggccgtcagatgcctcgaga

SEQ ID NO: 3199965 - DNA, 25 bp, Homo sapien
cagatgcctcgagagttcttcttgc

SEQ ID NO: 3199966 - DNA, 25 bp, Homo sapien
tggccgtcagatgcctcgagagttc

SEQ ID NO: 3199967 - DNA, 25 bp, Homo sapien
cactttctggccgtcagatgcctcg

SEQ ID NO: 3199968 - DNA, 25 bp, Homo sapien
accttcactgcaacaaccatcttac

SEQ ID NO: 3199969 - DNA, 25 bp, Homo sapien
actccctgtccagtcaccttcactg

SEQ ID NO: 3199970 - DNA, 25 bp, Homo sapien
ccctgtccagtcaccttcactgcaa

SEQ ID NO: 3199971 - DNA, 25 bp, Homo sapien
cagtcaccttcactgcaacaaccat

SEQ ID NO: 3199972 - DNA, 25 bp, Homo sapien
gatcacaactcatccggacttcatt

SEQ ID NO: 3199973 - DNA, 25 bp, Homo sapien
atcacaactcatccggacttcattt

SEQ ID NO: 3199974 - DNA, 25 bp, Homo sapien
ccgatcacaactcatccggacttca

SEQ ID NO: 3199975 - DNA, 25 bp, Homo sapien
ttaccgatcacaactcatccggact

SEQ ID NO: 3199976 - DNA, 25 bp, Homo sapien
aaaacattaggcaatcaagcaggga

SEQ ID NO: 3199977 - DNA, 25 bp, Homo sapien
catggatagtagaaataatgtgatc

SEQ ID NO: 3199978 - DNA, 25 bp, Homo sapien
aaatgtctggcacaccacgtgaatt

SEQ ID NO: 3199979 - DNA, 25 bp, Homo sapien
caagcatatgctgccaaatgtctgg

SEQ ID NO: 3199980 - DNA, 25 bp, Homo sapien
ctccgtgaatgaacttcgtggttat

SEQ ID NO: 3199981 - DNA, 25 bp, Homo sapien
tggttatgacttctctgatctgtgg

SEQ ID NO: 3199982 - DNA, 25 bp, Homo sapien
atctgtggcaatactgaagggcctt

SEQ ID NO: 3199983 - DNA, 25 bp, Homo sapien
tctgtggcaatactgaagggccttg

SEQ ID NO: 3199984 - DNA, 25 bp, Homo sapien
ttaagagcttctggtacaatttgtc

SEQ ID NO: 3199985 - DNA, 25 bp, Homo sapien
tttaagagcttctggtacaatttgt

SEQ ID NO: 3199986 - DNA, 25 bp, Homo sapien
agagcttctggtacaatttgtcttc

SEQ ID NO: 3199987 - DNA, 25 bp, Homo sapien
taagagcttctggtacaatttgtct

SEQ ID NO: 3199988 - DNA, 25 bp, Homo sapien
gagggaatggcaaacccaagcctat

SEQ ID NO: 3199989 - DNA, 25 bp, Homo sapien
catagcttagcgtgtttggatgcaa

SEQ ID NO: 3199990 - DNA, 25 bp, Homo sapien
gaactgtggtgacatcgtaaccgac

SEQ ID NO: 3199991 - DNA, 25 bp, Homo sapien
cattaagcagagtacgaaagtccag

SEQ ID NO: 3199992 - DNA, 25 bp, Homo sapien
catgaagaacgagaacagctggtgc

SEQ ID NO: 3199993 - DNA, 25 bp, Homo sapien
cagtaaacgtctttcactgacaagg

SEQ ID NO: 3199994 - DNA, 25 bp, Homo sapien
tctgggggctgtataaaaaggctag

SEQ ID NO: 3199995 - DNA, 25 bp, Homo sapien
acaaggaatctgacagtaatgttac

SEQ ID NO: 3199996 - DNA, 25 bp, Homo sapien
aaaattggggtcctcagcattatga

SEQ ID NO: 3199997 - DNA, 25 bp, Homo sapien
gaaatttgatagcagagagtacaca

SEQ ID NO: 3199998 - DNA, 25 bp, Homo sapien
ctgtactgacatgggaattagcctc

SEQ ID NO: 3199999 - DNA, 25 bp, Homo sapien
cacaataaatgtaggctgtactgac

SEQ ID NO: 3200000 - DNA, 25 bp, Homo sapien
taagatgctttcgttcagttccagg

SEQ ID NO: 3200001 - DNA, 25 bp, Homo sapien
ctgaaaatggcaccttctaaactgg

SEQ ID NO: 3200002 - DNA, 25 bp, Homo sapien
gaaaatggcaccttctaaactggag

SEQ ID NO: 3200003 - DNA, 25 bp, Homo sapien
ctctgaaaatggcaccttctaaact

SEQ ID NO: 3200004 - DNA, 25 bp, Homo sapien
aaaatggcaccttctaaactggagc

SEQ ID NO: 3200005 - DNA, 25 bp, Homo sapien
atagaggccctacaaaggaaagcaa

SEQ ID NO: 3200006 - DNA, 25 bp, Homo sapien
aatagaggccctacaaaggaaagca

SEQ ID NO: 3200007 - DNA, 25 bp, Homo sapien
aggaaagcaagataaagtgacaaaa

SEQ ID NO: 3200008 - DNA, 25 bp, Homo sapien
tataaatcagctgttgccactacac

SEQ ID NO: 3200009 - DNA, 25 bp, Homo sapien
ctggagatgccctgccttgcttatt

SEQ ID NO: 3200010 - DNA, 25 bp, Homo sapien
gaagcaattggtaggaagagaacct

SEQ ID NO: 3200011 - DNA, 25 bp, Homo sapien
ccaaagggcgaagatatgacattgc

SEQ ID NO: 3200012 - DNA, 25 bp, Homo sapien
gtttcagtcacattgcattgtagtg

SEQ ID NO: 3200013 - DNA, 25 bp, Homo sapien
tgtatctttaaagacgttgctcaat

SEQ ID NO: 3200014 - DNA, 25 bp, Homo sapien
cattgtagtgtatggcctgtttctt

SEQ ID NO: 3200015 - DNA, 25 bp, Homo sapien
tgttctatgttcactacaccttcag

SEQ ID NO: 3200016 - DNA, 25 bp, Homo sapien
caatccacacttaaagtccctgggt

SEQ ID NO: 3200017 - DNA, 25 bp, Homo sapien
caaaacaagctgaatacttggtgat

SEQ ID NO: 3200018 - DNA, 25 bp, Homo sapien
ggagatatataggtatacacacgta

SEQ ID NO: 3200019 - DNA, 25 bp, Homo sapien
actccatagatgacccttcttgtga

SEQ ID NO: 3200020 - DNA, 25 bp, Homo sapien
tcctctttgtatccagggcttataa

SEQ ID NO: 3200021 - DNA, 25 bp, Homo sapien
catgttccagccagcacatttttgt

SEQ ID NO: 3200022 - DNA, 25 bp, Homo sapien
tctacatggtctacccttgcctagc

SEQ ID NO: 3200023 - DNA, 25 bp, Homo sapien
ttagaagtcccctagccagtcattg

SEQ ID NO: 3200024 - DNA, 25 bp, Homo sapien
tgaagtgtgttccagttggttgcct

SEQ ID NO: 3200025 - DNA, 25 bp, Homo sapien
tctattatgctaacctaatctcgaa

SEQ ID NO: 3200026 - DNA, 25 bp, Homo sapien
tgttttactagtgtctttgaccgta

SEQ ID NO: 3200027 - DNA, 25 bp, Homo sapien
cagttggttgcctgtctttaccctc

SEQ ID NO: 3200028 - DNA, 25 bp, Homo sapien
tcttataagaacagtcatcccccat

SEQ ID NO: 3200029 - DNA, 25 bp, Homo sapien
cattcttataagaacagtcatcccc

SEQ ID NO: 3200030 - DNA, 25 bp, Homo sapien
tcattcttataagaacagtcatccc

SEQ ID NO: 3200031 - DNA, 25 bp, Homo sapien
tatcattcttataagaacagtcatc

SEQ ID NO: 3200032 - DNA, 25 bp, Homo sapien
ccgggtgggagcgggagcggggcat

SEQ ID NO: 3200033 - DNA, 25 bp, Homo sapien
cgtcggccgggtgggagcgggagcg

SEQ ID NO: 3200034 - DNA, 25 bp, Homo sapien
gccgggtgggagcgggagcggggca

SEQ ID NO: 3200035 - DNA, 25 bp, Homo sapien
cctctccggcctcgagccccagatt

SEQ ID NO: 3200036 - DNA, 25 bp, Homo sapien
tctccggcctcgagccccagatttg

SEQ ID NO: 3200037 - DNA, 25 bp, Homo sapien
accctctccggcctcgagccccaga

SEQ ID NO: 3200038 - DNA, 25 bp, Homo sapien
ctccggcctcgagccccagatttgc

SEQ ID NO: 3200039 - DNA, 25 bp, Homo sapien
gagcagatacggcaccaacagccgg

SEQ ID NO: 3200040 - DNA, 25 bp, Homo sapien
atacggcaccaacagccggcgagtc

SEQ ID NO: 3200041 - DNA, 25 bp, Homo sapien
caggagcagatacggcaccaacagc

SEQ ID NO: 3200042 - DNA, 25 bp, Homo sapien
agatacggcaccaacagccggcgag

SEQ ID NO: 3200043 - DNA, 25 bp, Homo sapien
gagaccggacgactgaggggtagaa

SEQ ID NO: 3200044 - DNA, 25 bp, Homo sapien
cccgaagtggctttggaagcaacgg

SEQ ID NO: 3200045 - DNA, 25 bp, Homo sapien
ctgaaaggagaccggacgactgagg

SEQ ID NO: 3200046 - DNA, 25 bp, Homo sapien
agagaggcaagaggcaatctccccc

SEQ ID NO: 3200047 - DNA, 25 bp, Homo sapien
tattttcgcaacattcttcccagtc

SEQ ID NO: 3200048 - DNA, 25 bp, Homo sapien
tcatgaggctggtaggaatgtcgct

SEQ ID NO: 3200049 - DNA, 25 bp, Homo sapien
tccatctgatggaggccacgtcctt

SEQ ID NO: 3200050 - DNA, 25 bp, Homo sapien
ccagccaaagtaaaagcatccctgg

SEQ ID NO: 3200051 - DNA, 25 bp, Homo sapien
cctgcttattgataatttctgtgtt

SEQ ID NO: 3200052 - DNA, 25 bp, Homo sapien
cataacttctgctttaacatgaccc

SEQ ID NO: 3200053 - DNA, 25 bp, Homo sapien
cttagctgtcctgcttattgataat

SEQ ID NO: 3200054 - DNA, 25 bp, Homo sapien
taacttctgctttaacatgacccat

SEQ ID NO: 3200055 - DNA, 25 bp, Homo sapien
ctactagtgttccaagagcttcgag

SEQ ID NO: 3200056 - DNA, 25 bp, Homo sapien
tcatgtgctggaattgcttgtgtcc

SEQ ID NO: 3200057 - DNA, 25 bp, Homo sapien
ttctacagcagataggctcatgtgc

SEQ ID NO: 3200058 - DNA, 25 bp, Homo sapien
tgatgcactacccacaattacctta

SEQ ID NO: 3200059 - DNA, 25 bp, Homo sapien
tctcttgccattcttactctctctg

SEQ ID NO: 3200060 - DNA, 25 bp, Homo sapien
tgagaccaatactctgatggttgag

SEQ ID NO: 3200061 - DNA, 25 bp, Homo sapien
gaaacttgacccacatagctcagcc

SEQ ID NO: 3200062 - DNA, 25 bp, Homo sapien
cagtgggaagccatgcatttccttt

SEQ ID NO: 3200063 - DNA, 25 bp, Homo sapien
tctcgtatccagttgtcaagtccat

SEQ ID NO: 3200064 - DNA, 25 bp, Homo sapien
gaaattgtgtcctctcgtatccagt

SEQ ID NO: 3200065 - DNA, 25 bp, Homo sapien
tgtgtcctctcgtatccagttgtca

SEQ ID NO: 3200066 - DNA, 25 bp, Homo sapien
gaagctgaaattgtgtcctctcgta

SEQ ID NO: 3200067 - DNA, 25 bp, Homo sapien
gcttttgtcaacaggtagccacgtg

SEQ ID NO: 3200068 - DNA, 25 bp, Homo sapien
gagcaactgggttcataactatgac

SEQ ID NO: 3200069 - DNA, 25 bp, Homo sapien
tatgacagcaggaacagtctcagag

SEQ ID NO: 3200070 - DNA, 25 bp, Homo sapien
tagtgtggcaaagttagggacctca

SEQ ID NO: 3200071 - DNA, 25 bp, Homo sapien
tagatgataagctaatttggtgacc

SEQ ID NO: 3200072 - DNA, 25 bp, Homo sapien
gcaagcctttgcttcaactccttga

SEQ ID NO: 3200073 - DNA, 25 bp, Homo sapien
gggtagcatccatgtttctgaggaa

SEQ ID NO: 3200074 - DNA, 25 bp, Homo sapien
caaaggatgtgatcatgcaagcctt

SEQ ID NO: 3200075 - DNA, 25 bp, Homo sapien
gattagtgacgttaacctttgagaa

SEQ ID NO: 3200076 - DNA, 25 bp, Homo sapien
gaataggtgctccactaatgcttta

SEQ ID NO: 3200077 - DNA, 25 bp, Homo sapien
gctctcatagcacaaaagcaaggga

SEQ ID NO: 3200078 - DNA, 25 bp, Homo sapien
taaacatctcatttccagggtcagt

SEQ ID NO: 3200079 - DNA, 25 bp, Homo sapien
cctcccaatcttgtagagcgtgaac

SEQ ID NO: 3200080 - DNA, 25 bp, Homo sapien
ccaatcttgtagagcgtgaacatca

SEQ ID NO: 3200081 - DNA, 25 bp, Homo sapien
tcttgtagagcgtgaacatcatcca

SEQ ID NO: 3200082 - DNA, 25 bp, Homo sapien
tgtagagcgtgaacatcatccactc

SEQ ID NO: 3200083 - DNA, 25 bp, Homo sapien
ttttagggcataaatttcttcagcg

SEQ ID NO: 3200084 - DNA, 25 bp, Homo sapien
tattctctatttgtgtggtcctcaa

SEQ ID NO: 3200085 - DNA, 25 bp, Homo sapien
cataaatttcttcagcgactgcttc

SEQ ID NO: 3200086 - DNA, 25 bp, Homo sapien
ctattctctatttgtgtggtcctca

SEQ ID NO: 3200087 - DNA, 25 bp, Homo sapien
tctctgtcacgtagtcaggaatcac

SEQ ID NO: 3200088 - DNA, 25 bp, Homo sapien
tggaaatatgtgtttcactgatcgg

SEQ ID NO: 3200089 - DNA, 25 bp, Homo sapien
gataagctctctgtcacgtagtcag

SEQ ID NO: 3200090 - DNA, 25 bp, Homo sapien
tcactgatcggagatgataagctct

SEQ ID NO: 3200091 - DNA, 25 bp, Homo sapien
actctttatgacccatttatcatac

SEQ ID NO: 3200092 - DNA, 25 bp, Homo sapien
tctttatgacccatttatcatacat

SEQ ID NO: 3200093 - DNA, 25 bp, Homo sapien
ctctttatgacccatttatcataca

SEQ ID NO: 3200094 - DNA, 25 bp, Homo sapien
aattctggtacatgtgcctctggca

SEQ ID NO: 3200095 - DNA, 25 bp, Homo sapien
gccagtgtgaaggtgctgactttct

SEQ ID NO: 3200096 - DNA, 25 bp, Homo sapien
tgaagatgtttctcccgttgcaatt

SEQ ID NO: 3200097 - DNA, 25 bp, Homo sapien
tgaaggtgctgactttctgctgaag

SEQ ID NO: 3200098 - DNA, 25 bp, Homo sapien
tgttctctgctaaaagtggttgcac

SEQ ID NO: 3200099 - DNA, 25 bp, Homo sapien
catctggatgaaggaacaccgcctt

SEQ ID NO: 3200100 - DNA, 25 bp, Homo sapien
ggttgcactcgggtagcattagaaa

SEQ ID NO: 3200101 - DNA, 25 bp, Homo sapien
ccataagatgggacttgttctctgc

SEQ ID NO: 3200102 - DNA, 25 bp, Homo sapien
ttgaaaccatttttcactgatacag

SEQ ID NO: 3200103 - DNA, 25 bp, Homo sapien
tactcgatttctcttctaggattcc

SEQ ID NO: 3200104 - DNA, 25 bp, Homo sapien
cataatctactcgatttctcttcta

SEQ ID NO: 3200105 - DNA, 25 bp, Homo sapien
tcttctaggattcccttatctacaa

SEQ ID NO: 3200106 - DNA, 25 bp, Homo sapien
gtttcgatttatcagtatagtttga

SEQ ID NO: 3200107 - DNA, 25 bp, Homo sapien
tgaaacagcactgctttgtaaccct

SEQ ID NO: 3200108 - DNA, 25 bp, Homo sapien
tcagattttgtagcgattgtttcga

SEQ ID NO: 3200109 - DNA, 25 bp, Homo sapien
tttgaaacagcactgctttgtaacc

SEQ ID NO: 3200110 - DNA, 25 bp, Homo sapien
gctgatccataatgggactgcctga

SEQ ID NO: 3200111 - DNA, 25 bp, Homo sapien
tccataatgggactgcctgaggagg

SEQ ID NO: 3200112 - DNA, 25 bp, Homo sapien
caagaggctgatccataatgggact

SEQ ID NO: 3200113 - DNA, 25 bp, Homo sapien
gcacagtcaagaggctgatccataa

SEQ ID NO: 3200114 - DNA, 25 bp, Homo sapien
agccatctcatatgcttcctgtatg

SEQ ID NO: 3200115 - DNA, 25 bp, Homo sapien
tggatgaagtggagcacagtataac

SEQ ID NO: 3200116 - DNA, 25 bp, Homo sapien
cacagtataacagccatctcatatg

SEQ ID NO: 3200117 - DNA, 25 bp, Homo sapien
tcatatgcttcctgtatgcttttct

SEQ ID NO: 3200118 - DNA, 25 bp, Homo sapien
ttagagacctgaaccttcacttgat

SEQ ID NO: 3200119 - DNA, 25 bp, Homo sapien
tgggtgacaaaggtattcagtcagt

SEQ ID NO: 3200120 - DNA, 25 bp, Homo sapien
tggaaatatgttacctcctcacatt

SEQ ID NO: 3200121 - DNA, 25 bp, Homo sapien
tcacttgatcttgggtgacaaaggt

SEQ ID NO: 3200122 - DNA, 25 bp, Homo sapien
tttttctctcacttttagagttgac

SEQ ID NO: 3200123 - DNA, 25 bp, Homo sapien
tttctctcacttttagagttgacaa

SEQ ID NO: 3200124 - DNA, 25 bp, Homo sapien
ctatgtctgactcttctcatcttct

SEQ ID NO: 3200125 - DNA, 25 bp, Homo sapien
tctttttctctcacttttagagttg

SEQ ID NO: 3200126 - DNA, 25 bp, Homo sapien
caattgaatgaattcggattccact

SEQ ID NO: 3200127 - DNA, 25 bp, Homo sapien
gcactgtgcaattgaatgaattcgg

SEQ ID NO: 3200128 - DNA, 25 bp, Homo sapien
gtgcaattgaatgaattcggattcc

SEQ ID NO: 3200129 - DNA, 25 bp, Homo sapien
gaatgaattcggattccactttcat

SEQ ID NO: 3200130 - DNA, 25 bp, Homo sapien
ctcatcttcagttgtttcctccact

SEQ ID NO: 3200131 - DNA, 25 bp, Homo sapien
cttcagttgtttcctccactgaagt

SEQ ID NO: 3200132 - DNA, 25 bp, Homo sapien
tcttcagttgtttcctccactgaag

SEQ ID NO: 3200133 - DNA, 25 bp, Homo sapien
catcttcagttgtttcctccactga

SEQ ID NO: 3200134 - DNA, 25 bp, Homo sapien
ggaaagaaatgtagctcactatttt

SEQ ID NO: 3200135 - DNA, 25 bp, Homo sapien
gagaaggaaagaaatgtagctcact

SEQ ID NO: 3200136 - DNA, 25 bp, Homo sapien
tgagaaggaaagaaatgtagctcac

SEQ ID NO: 3200137 - DNA, 25 bp, Homo sapien
gaaggaaagaaatgtagctcactat

SEQ ID NO: 3200138 - DNA, 25 bp, Homo sapien
caatagctagagtacccttcaggtc

SEQ ID NO: 3200139 - DNA, 25 bp, Homo sapien
gcaaactgaagagagtaaagactgt

SEQ ID NO: 3200140 - DNA, 25 bp, Homo sapien
caaactgaagagagtaaagactgtc

SEQ ID NO: 3200141 - DNA, 25 bp, Homo sapien
agactgtcaatagctagagtaccct

SEQ ID NO: 3200142 - DNA, 25 bp, Homo sapien
cagtggaggctcactgtctggatta

SEQ ID NO: 3200143 - DNA, 25 bp, Homo sapien
gtggaggctcactgtctggattact

SEQ ID NO: 3200144 - DNA, 25 bp, Homo sapien
aatatgcattactttctcagaataa

SEQ ID NO: 3200145 - DNA, 25 bp, Homo sapien
tggaggctcactgtctggattactt

SEQ ID NO: 3200146 - DNA, 25 bp, Homo sapien
gaatatagacgagcactggaagaga

SEQ ID NO: 3200147 - DNA, 25 bp, Homo sapien
catgttagggttatatgaatgcttg

SEQ ID NO: 3200148 - DNA, 25 bp, Homo sapien
ggtcacatctaaatgatgacaaaca

SEQ ID NO: 3200149 - DNA, 25 bp, Homo sapien
ttaaatacaattgaggtcacatcta

SEQ ID NO: 3200150 - DNA, 25 bp, Homo sapien
ctttatgacaactgcgagtaatgta

SEQ ID NO: 3200151 - DNA, 25 bp, Homo sapien
aagacttgcaggtgaaaactgacat

SEQ ID NO: 3200152 - DNA, 25 bp, Homo sapien
tgcgagtaatgtagtcttcacgttt

SEQ ID NO: 3200153 - DNA, 25 bp, Homo sapien
cacgttttcatctatgaagacttca

SEQ ID NO: 3200154 - DNA, 25 bp, Homo sapien
tggatgtcaatgaggaagcatttgg

SEQ ID NO: 3200155 - DNA, 25 bp, Homo sapien
cagagacctgatcttgacagagggg

SEQ ID NO: 3200156 - DNA, 25 bp, Homo sapien
tgatcttgacagaggggtgtatgct

SEQ ID NO: 3200157 - DNA, 25 bp, Homo sapien
ttctccttgtcttgtcgcctaactg

SEQ ID NO: 3200158 - DNA, 25 bp, Homo sapien
cttgtcgcctaactgcagagacctg

SEQ ID NO: 3200159 - DNA, 25 bp, Homo sapien
ctttaggcaagtagatgtctgactc

SEQ ID NO: 3200160 - DNA, 25 bp, Homo sapien
tcagagatggaaagtatagcagaag

SEQ ID NO: 3200161 - DNA, 25 bp, Homo sapien
ctcagagatggaaagtatagcagaa

SEQ ID NO: 3200162 - DNA, 25 bp, Homo sapien
ttaatttctcctgcaggtgctttgg

SEQ ID NO: 3200163 - DNA, 25 bp, Homo sapien
ttttaatttctcctgcaggtgcttt

SEQ ID NO: 3200164 - DNA, 25 bp, Homo sapien
ggcacatccttgaagctccttatag

SEQ ID NO: 3200165 - DNA, 25 bp, Homo sapien
tgacagacgacaacctagcagaagg

SEQ ID NO: 3200166 - DNA, 25 bp, Homo sapien
gctatagcttgatgcccttgtaaca

SEQ ID NO: 3200167 - DNA, 25 bp, Homo sapien
ggtattggcccaacacagctgctat

SEQ ID NO: 3200168 - DNA, 25 bp, Homo sapien
tttgttgttataataatgtaagtgc

SEQ ID NO: 3200169 - DNA, 25 bp, Homo sapien
ataataatgtaagtgctttctttac

SEQ ID NO: 3200170 - DNA, 25 bp, Homo sapien
gttataataatgtaagtgctttctt

SEQ ID NO: 3200171 - DNA, 25 bp, Homo sapien
ttgttgttataataatgtaagtgct

SEQ ID NO: 3200172 - DNA, 25 bp, Homo sapien
cgtctgagctgcttacttctttgcc

SEQ ID NO: 3200173 - DNA, 25 bp, Homo sapien
accttcattcctaaggcgtctgagc

SEQ ID NO: 3200174 - DNA, 25 bp, Homo sapien
ctacagcaacggacattcgtcttgt

SEQ ID NO: 3200175 - DNA, 25 bp, Homo sapien
cttctggaatgcttgcctaacggca

SEQ ID NO: 3200176 - DNA, 25 bp, Homo sapien
acgtgggcaggatcaatctgggtcc

SEQ ID NO: 3200177 - DNA, 25 bp, Homo sapien
gctttctctttgtgcataactataa

SEQ ID NO: 3200178 - DNA, 25 bp, Homo sapien
gagtggacttgtaagaggaatacat

SEQ ID NO: 3200179 - DNA, 25 bp, Homo sapien
ccctttgggcgctgcttttggagat

SEQ ID NO: 3200180 - DNA, 25 bp, Homo sapien
gactgggtcacaattcgtcagatgc

SEQ ID NO: 3200181 - DNA, 25 bp, Homo sapien
caagcattactatctccaaataatg

SEQ ID NO: 3200182 - DNA, 25 bp, Homo sapien
ggtcacaattcgtcagatgctccac

SEQ ID NO: 3200183 - DNA, 25 bp, Homo sapien
cgtcagatgctccacacaggaacct

SEQ ID NO: 3200184 - DNA, 25 bp, Homo sapien
ggttatattgatcctccactggtct

SEQ ID NO: 3200185 - DNA, 25 bp, Homo sapien
caaacccagaccttcatggttatat

SEQ ID NO: 3200186 - DNA, 25 bp, Homo sapien
ttgatcctccactggtctactgacc

SEQ ID NO: 3200187 - DNA, 25 bp, Homo sapien
gaccttcatggttatattgatcctc

SEQ ID NO: 3200188 - DNA, 25 bp, Homo sapien
gaggtagtgtgttggaaatgattct

SEQ ID NO: 3200189 - DNA, 25 bp, Homo sapien
tgtcttaatctgagttgggcttgga

SEQ ID NO: 3200190 - DNA, 25 bp, Homo sapien
gagtttgtcttaatctgagttgggc

SEQ ID NO: 3200191 - DNA, 25 bp, Homo sapien
gaagtatagtcagcagacaccagat

SEQ ID NO: 3200192 - DNA, 25 bp, Homo sapien
cacctgggccatggctacttttgca

SEQ ID NO: 3200193 - DNA, 25 bp, Homo sapien
tgaatccttttcaacactaccaagc

SEQ ID NO: 3200194 - DNA, 25 bp, Homo sapien
tgcagcacttacacttgaatccttt

SEQ ID NO: 3200195 - DNA, 25 bp, Homo sapien
tgaaaccttatagcccacctgggcc

SEQ ID NO: 3200196 - DNA, 25 bp, Homo sapien
tcgccttatgatagtaggtaggcag

SEQ ID NO: 3200197 - DNA, 25 bp, Homo sapien
acttcgccttatgatagtaggtagg

SEQ ID NO: 3200198 - DNA, 25 bp, Homo sapien
ttacttcgccttatgatagtaggta

SEQ ID NO: 3200199 - DNA, 25 bp, Homo sapien
ttcgccttatgatagtaggtaggca

SEQ ID NO: 3200200 - DNA, 25 bp, Homo sapien
tactgatagagtgtgcaacgggagc

SEQ ID NO: 3200201 - DNA, 25 bp, Homo sapien
tcctgcaggcgatagcggatgtccg

SEQ ID NO: 3200202 - DNA, 25 bp, Homo sapien
caccgtaagcgagtattggcgccga

SEQ ID NO: 3200203 - DNA, 25 bp, Homo sapien
ttggacaccagatgcaggaacgctc

SEQ ID NO: 3200204 - DNA, 25 bp, Homo sapien
gcacttcaaagtggcgctgctcatt

SEQ ID NO: 3200205 - DNA, 25 bp, Homo sapien
cttgattaggctcaggttcggcact

SEQ ID NO: 3200206 - DNA, 25 bp, Homo sapien
gagaatctgcgtccgtcacggtgag

SEQ ID NO: 3200207 - DNA, 25 bp, Homo sapien
ttgagcattctcatctaccgaggcg

SEQ ID NO: 3200208 - DNA, 25 bp, Homo sapien
cacgaggccgctatgttcactgata

SEQ ID NO: 3200209 - DNA, 25 bp, Homo sapien
tggtcccgggcacttatattcagaa

SEQ ID NO: 3200210 - DNA, 25 bp, Homo sapien
tcttgtaaggagaagcgcactgttc

SEQ ID NO: 3200211 - DNA, 25 bp, Homo sapien
gattagcattgagaccagagtcgcc

SEQ ID NO: 3200212 - DNA, 25 bp, Homo sapien
gatgttggaattgagatccatggtg

SEQ ID NO: 3200213 - DNA, 25 bp, Homo sapien
agtaatgagataactgatgttggaa

SEQ ID NO: 3200214 - DNA, 25 bp, Homo sapien
gaattgagatccatggtggatgcag

SEQ ID NO: 3200215 - DNA, 25 bp, Homo sapien
tttctgatccccagtagtaatgaga

SEQ ID NO: 3200216 - DNA, 25 bp, Homo sapien
tggccactaccttcagctgataaaa

SEQ ID NO: 3200217 - DNA, 25 bp, Homo sapien
ccagtgacctggttgatagcaaaca

SEQ ID NO: 3200218 - DNA, 25 bp, Homo sapien
tttgctgtggtaagctgcccagtga

SEQ ID NO: 3200219 - DNA, 25 bp, Homo sapien
ggattgctcttctctatcaatcaca

SEQ ID NO: 3200220 - DNA, 25 bp, Homo sapien
ggaaaatgctgtgacctgcctgcca

SEQ ID NO: 3200221 - DNA, 25 bp, Homo sapien
ttaagatgacactagaggagagctg

SEQ ID NO: 3200222 - DNA, 25 bp, Homo sapien
caagatctctatttggtaggagcca

SEQ ID NO: 3200223 - DNA, 25 bp, Homo sapien
gactatagagtaccatgccattgac

SEQ ID NO: 3200224 - DNA, 25 bp, Homo sapien
ccttcagcaatggtgtatgcaattt

SEQ ID NO: 3200225 - DNA, 25 bp, Homo sapien
gtaacattcacagtagcactaaggg

SEQ ID NO: 3200226 - DNA, 25 bp, Homo sapien
aacatatctgtcttgaagttcacgg

SEQ ID NO: 3200227 - DNA, 25 bp, Homo sapien
ggaatatgccaaaagcatcccctgt

SEQ ID NO: 3200228 - DNA, 25 bp, Homo sapien
gcccaaagtctttatctacagcact

SEQ ID NO: 3200229 - DNA, 25 bp, Homo sapien
ggcccaaagtctttatctacagcac

SEQ ID NO: 3200230 - DNA, 25 bp, Homo sapien
tggcccaaagtctttatctacagca

SEQ ID NO: 3200231 - DNA, 25 bp, Homo sapien
tgtaaagctaaacacagcagtccct

SEQ ID NO: 3200232 - DNA, 25 bp, Homo sapien
tgatggcatgcaactcaaaatctgg

SEQ ID NO: 3200233 - DNA, 25 bp, Homo sapien
tgggctaatgctaaaagttccgtgg

SEQ ID NO: 3200234 - DNA, 25 bp, Homo sapien
gattgtcattaaagtccctcacgtg

SEQ ID NO: 3200235 - DNA, 25 bp, Homo sapien
ccataattgttgtcagaacggaacc

SEQ ID NO: 3200236 - DNA, 25 bp, Homo sapien
gaacggaaccaatcacagctgatgg

SEQ ID NO: 3200237 - DNA, 25 bp, Homo sapien
taaaaacaggtccatcaaggccctg

SEQ ID NO: 3200238 - DNA, 25 bp, Homo sapien
gatcaactgtgaaggcaccaacgct

SEQ ID NO: 3200239 - DNA, 25 bp, Homo sapien
tccttgctcccggtccagaatggct

SEQ ID NO: 3200240 - DNA, 25 bp, Homo sapien
gaatggctgcggtctgaattatacc

SEQ ID NO: 3200241 - DNA, 25 bp, Homo sapien
taaacatccaccaggtaaagacatg

SEQ ID NO: 3200242 - DNA, 25 bp, Homo sapien
gaattataccagtatgtcgtccaat

SEQ ID NO: 3200243 - DNA, 25 bp, Homo sapien
gatagacataaccaactactatgaa

SEQ ID NO: 3200244 - DNA, 25 bp, Homo sapien
tgcatgttgtgtctgggtcactgcc

SEQ ID NO: 3200245 - DNA, 25 bp, Homo sapien
tcttccccatccatagatagacata

SEQ ID NO: 3200246 - DNA, 25 bp, Homo sapien
tggctgactgacactagaatgtctt

SEQ ID NO: 3200247 - DNA, 25 bp, Homo sapien
ttaaaggtaattgctgaaaagtcag

SEQ ID NO: 3200248 - DNA, 25 bp, Homo sapien
tcagtgaaggtattctaaagctaca

SEQ ID NO: 3200249 - DNA, 25 bp, Homo sapien
taaagctacataacaacacataaca

SEQ ID NO: 3200250 - DNA, 25 bp, Homo sapien
taataaacaggacagtgtacatttt

SEQ ID NO: 3200251 - DNA, 25 bp, Homo sapien
caaatggacattactatacccctca

SEQ ID NO: 3200252 - DNA, 25 bp, Homo sapien
gattggtgcaggtaaaaatattctt

SEQ ID NO: 3200253 - DNA, 25 bp, Homo sapien
gacattgcacaatacagtcagaact

SEQ ID NO: 3200254 - DNA, 25 bp, Homo sapien
gaaacacttgaggtctctatactaa

SEQ ID NO: 3200255 - DNA, 25 bp, Homo sapien
caggcaccactgtaagacatggagg

SEQ ID NO: 3200256 - DNA, 25 bp, Homo sapien
gcagcagctactgtgggaatttaaa

SEQ ID NO: 3200257 - DNA, 25 bp, Homo sapien
taactctacctggaaggcaaccaaa

SEQ ID NO: 3200258 - DNA, 25 bp, Homo sapien
gatgagtgagaaatacaccaggcac

SEQ ID NO: 3200259 - DNA, 25 bp, Homo sapien
gtttgtgtacaagcttcaatacagg

SEQ ID NO: 3200260 - DNA, 25 bp, Homo sapien
tctaccgtgaccatagaaacatcag

SEQ ID NO: 3200261 - DNA, 25 bp, Homo sapien
cactaatcagagttaaaagacacaa

SEQ ID NO: 3200262 - DNA, 25 bp, Homo sapien
taaagtgtcactaatcagagttaaa

SEQ ID NO: 3200263 - DNA, 25 bp, Homo sapien
cacagtatagcccttatttaaagga

SEQ ID NO: 3200264 - DNA, 25 bp, Homo sapien
acagtatagcccttatttaaaggag

SEQ ID NO: 3200265 - DNA, 25 bp, Homo sapien
tggatgaccgccagtaaccattttt

SEQ ID NO: 3200266 - DNA, 25 bp, Homo sapien
tctgttttcctatggatgaccgcca

SEQ ID NO: 3200267 - DNA, 25 bp, Homo sapien
ccaaagcttgttatagataggaaca

SEQ ID NO: 3200268 - DNA, 25 bp, Homo sapien
cttgtaaggatccaagccttcctgg

SEQ ID NO: 3200269 - DNA, 25 bp, Homo sapien
tatgatgaacctccctgtcttaagg

SEQ ID NO: 3200270 - DNA, 25 bp, Homo sapien
tgtcctttcattccaaactgtcaga

SEQ ID NO: 3200271 - DNA, 25 bp, Homo sapien
catcacgcggccactaagtgcagct

SEQ ID NO: 3200272 - DNA, 25 bp, Homo sapien
gagaaacctcagtcatcatacccat

SEQ ID NO: 3200273 - DNA, 25 bp, Homo sapien
taaaatgcttcaacaggtagcatca

SEQ ID NO: 3200274 - DNA, 25 bp, Homo sapien
acaggtagcatcaaccgttctggaa

SEQ ID NO: 3200275 - DNA, 25 bp, Homo sapien
tcaaagggcataatatatctactgt

SEQ ID NO: 3200276 - DNA, 25 bp, Homo sapien
caaccgttctggaattagctgaatt

SEQ ID NO: 3200277 - DNA, 25 bp, Homo sapien
aactgaggcttgatactaatttttc

SEQ ID NO: 3200278 - DNA, 25 bp, Homo sapien
ttgaactgaggcttgatactaattt

SEQ ID NO: 3200279 - DNA, 25 bp, Homo sapien
cttcaccattcgaccctctacactg

SEQ ID NO: 3200280 - DNA, 25 bp, Homo sapien
tcaccttcaccattcgaccctctac

SEQ ID NO: 3200281 - DNA, 25 bp, Homo sapien
ctgtttaggccactgaggaaaatac

SEQ ID NO: 3200282 - DNA, 25 bp, Homo sapien
tgttagactacaaagataaggccac

SEQ ID NO: 3200283 - DNA, 25 bp, Homo sapien
gcagacgaggttgcttttaccagcc

SEQ ID NO: 3200284 - DNA, 25 bp, Homo sapien
tcattcaaagtgatgcatgcagacg

SEQ ID NO: 3200285 - DNA, 25 bp, Homo sapien
gacaaagttctctattcaaagaaga

SEQ ID NO: 3200286 - DNA, 25 bp, Homo sapien
tccctcacatagcttttgaatactg

SEQ ID NO: 3200287 - DNA, 25 bp, Homo sapien
cttttgacataatcacactagctgg

SEQ ID NO: 3200288 - DNA, 25 bp, Homo sapien
tgtatatctctagaccagatcctaa

SEQ ID NO: 3200289 - DNA, 25 bp, Homo sapien
tcaagtgcagtagtcggggggtggg

SEQ ID NO: 3200290 - DNA, 25 bp, Homo sapien
aggagttctgtctgtaattggccat

SEQ ID NO: 3200291 - DNA, 25 bp, Homo sapien
tctgtctgtaattggccatgaccaa

SEQ ID NO: 3200292 - DNA, 25 bp, Homo sapien
tctgtaattggccatgaccaatcag

SEQ ID NO: 3200293 - DNA, 25 bp, Homo sapien
ctcgtaagaattcctcggcaggctt

SEQ ID NO: 3200294 - DNA, 25 bp, Homo sapien
gtaagaattcctcggcaggcttatg

SEQ ID NO: 3200295 - DNA, 25 bp, Homo sapien
ttccagaaattctcgtaagaattcc

SEQ ID NO: 3200296 - DNA, 25 bp, Homo sapien
agtttccagaaattctcgtaagaat

SEQ ID NO: 3200297 - DNA, 25 bp, Homo sapien
cagtttccttttacaacgagggatg

SEQ ID NO: 3200298 - DNA, 25 bp, Homo sapien
tacaacgagggatgtaggagaaata

SEQ ID NO: 3200299 - DNA, 25 bp, Homo sapien
cattctttccttacactcagtttcc

SEQ ID NO: 3200300 - DNA, 25 bp, Homo sapien
aaagatatccaaatgtgattacgga

SEQ ID NO: 3200301 - DNA, 25 bp, Homo sapien
cagggtatccaagtagtttgccaag

SEQ ID NO: 3200302 - DNA, 25 bp, Homo sapien
agggtatccaagtagtttgccaagg

SEQ ID NO: 3200303 - DNA, 25 bp, Homo sapien
gggtatccaagtagtttgccaaggc

SEQ ID NO: 3200304 - DNA, 25 bp, Homo sapien
tcagctgcagctaatggttgagcta

SEQ ID NO: 3200305 - DNA, 25 bp, Homo sapien
ctaatggttgagctaaggtatcacc

SEQ ID NO: 3200306 - DNA, 25 bp, Homo sapien
ccactgccactaccgttgttaccat

SEQ ID NO: 3200307 - DNA, 25 bp, Homo sapien
aaggtatcacccactgccactaccg

SEQ ID NO: 3200308 - DNA, 25 bp, Homo sapien
ccgttggaaatactggtggattgtc

SEQ ID NO: 3200309 - DNA, 25 bp, Homo sapien
tctaccgtgagatccagcatgtccg

SEQ ID NO: 3200310 - DNA, 25 bp, Homo sapien
caatgttctcctctaccgtgagatc

SEQ ID NO: 3200311 - DNA, 25 bp, Homo sapien
catggctgtcagctgcataatctta

SEQ ID NO: 3200312 - DNA, 25 bp, Homo sapien
tgtatgtgacgagagcatttgcacc

SEQ ID NO: 3200313 - DNA, 25 bp, Homo sapien
tgaatatttggagcggcgttccctg

SEQ ID NO: 3200314 - DNA, 25 bp, Homo sapien
gaatgtcaaaagagtacacgggtct

SEQ ID NO: 3200315 - DNA, 25 bp, Homo sapien
tccggattctgggtcgatgcgaaaa

SEQ ID NO: 3200316 - DNA, 25 bp, Homo sapien
tcgagtcaaattaaagaccccagta

SEQ ID NO: 3200317 - DNA, 25 bp, Homo sapien
gtcatcatccgtggctaaaatggct

SEQ ID NO: 3200318 - DNA, 25 bp, Homo sapien
catcttctgctcgaacagtgaggat

SEQ ID NO: 3200319 - DNA, 25 bp, Homo sapien
gtaataggattcaggaaaaagatgc

SEQ ID NO: 3200320 - DNA, 25 bp, Homo sapien
agtagatcccacaggtagattctcc

SEQ ID NO: 3200321 - DNA, 25 bp, Homo sapien
gattctccattaaagatgtgctgta

SEQ ID NO: 3200322 - DNA, 25 bp, Homo sapien
gatgtgctgtatgaattcaagctga

SEQ ID NO: 3200323 - DNA, 25 bp, Homo sapien
cattaaacacaagaacagtagatcc

SEQ ID NO: 3200324 - DNA, 25 bp, Homo sapien
gactttggccacatacactacatct

SEQ ID NO: 3200325 - DNA, 25 bp, Homo sapien
gctttaatggcccaccagatcttta

SEQ ID NO: 3200326 - DNA, 25 bp, Homo sapien
tgttctaagaagcacagcacataaa

SEQ ID NO: 3200327 - DNA, 25 bp, Homo sapien
tacatgcagacatagcaaaactcaa

SEQ ID NO: 3200328 - DNA, 25 bp, Homo sapien
ccttgagtaaacagctaaattgcag

SEQ ID NO: 3200329 - DNA, 25 bp, Homo sapien
caagtatctgatcatccttagtcca

SEQ ID NO: 3200330 - DNA, 25 bp, Homo sapien
tactgacattttacatggcctaaca

SEQ ID NO: 3200331 - DNA, 25 bp, Homo sapien
caacaggaatgggagcaattaaatc

SEQ ID NO: 3200332 - DNA, 25 bp, Homo sapien
tgacctttgtctgtagccaccactg

SEQ ID NO: 3200333 - DNA, 25 bp, Homo sapien
taacaatgccatagcgaacctgtcc

SEQ ID NO: 3200334 - DNA, 25 bp, Homo sapien
gaaggactgactttcccgatccaaa

SEQ ID NO: 3200335 - DNA, 25 bp, Homo sapien
caaaggtttagcgacagtgatggca

SEQ ID NO: 3200336 - DNA, 25 bp, Homo sapien
catatgagagtttgctgttagatcc

SEQ ID NO: 3200337 - DNA, 25 bp, Homo sapien
tgtaatcattaagacaaagcgctct

SEQ ID NO: 3200338 - DNA, 25 bp, Homo sapien
ttgtttcccgatccagactctgtgt

SEQ ID NO: 3200339 - DNA, 25 bp, Homo sapien
tgtgttactccaagttctccactgg

SEQ ID NO: 3200340 - DNA, 25 bp, Homo sapien
tacatcctatttgaagtgctgcata

SEQ ID NO: 3200341 - DNA, 25 bp, Homo sapien
cccaggacagaacccggtgtgtgat

SEQ ID NO: 3200342 - DNA, 25 bp, Homo sapien
ttttaactgtgtggagaggttctcc

SEQ ID NO: 3200343 - DNA, 25 bp, Homo sapien
tgcaagttactgaagagtctcaaca

SEQ ID NO: 3200344 - DNA, 25 bp, Homo sapien
tgttgactgatagcataacctccaa

SEQ ID NO: 3200345 - DNA, 25 bp, Homo sapien
gactgatagcataacctccaaatca

SEQ ID NO: 3200346 - DNA, 25 bp, Homo sapien
cttgcttgttgactgatagcataac

SEQ ID NO: 3200347 - DNA, 25 bp, Homo sapien
catcccactacaacatcttgcttgt

SEQ ID NO: 3200348 - DNA, 25 bp, Homo sapien
ggcaatgttaaaaactggactctca

SEQ ID NO: 3200349 - DNA, 25 bp, Homo sapien
gactctcagctgtgactatcattgt

SEQ ID NO: 3200350 - DNA, 25 bp, Homo sapien
tcattgttactatcacaaattccag

SEQ ID NO: 3200351 - DNA, 25 bp, Homo sapien
gagctggccaactaacaaggcaatg

SEQ ID NO: 3200352 - DNA, 25 bp, Homo sapien
aaatacgctttactggcaaatgtgg

SEQ ID NO: 3200353 - DNA, 25 bp, Homo sapien
catctactatgacgttgattgttcc

SEQ ID NO: 3200354 - DNA, 25 bp, Homo sapien
gattgttccagttccagtcaaggca

SEQ ID NO: 3200355 - DNA, 25 bp, Homo sapien
ggtgcatcctcaggaattgttgtga

SEQ ID NO: 3200356 - DNA, 25 bp, Homo sapien
gtttccctatctaacaatgcgctgg

SEQ ID NO: 3200357 - DNA, 25 bp, Homo sapien
gaactgagagtttccaccgatgatc

SEQ ID NO: 3200358 - DNA, 25 bp, Homo sapien
gatttgtcctgtcgatgggttgatc

SEQ ID NO: 3200359 - DNA, 25 bp, Homo sapien
catcactgcagaccactaccaaagt

SEQ ID NO: 3200360 - DNA, 25 bp, Homo sapien
cagtcacagtgacaagcacactggt

SEQ ID NO: 3200361 - DNA, 25 bp, Homo sapien
atgtgagtgacatatgggtgatgct

SEQ ID NO: 3200362 - DNA, 25 bp, Homo sapien
agagtaggagatgggatgtgagtga

SEQ ID NO: 3200363 - DNA, 25 bp, Homo sapien
gacatatgggtgatgctgaaatctt

SEQ ID NO: 3200364 - DNA, 25 bp, Homo sapien
cagcatctgtgactgtaaccgcaaa

SEQ ID NO: 3200365 - DNA, 25 bp, Homo sapien
tggctctcactttagggaaatcggc

SEQ ID NO: 3200366 - DNA, 25 bp, Homo sapien
ggttgactaatagacacctgccctg

SEQ ID NO: 3200367 - DNA, 25 bp, Homo sapien
tgaagctccgtttagtggtccggcg

SEQ ID NO: 3200368 - DNA, 25 bp, Homo sapien
tctaatttcaccagtagcatgattg

SEQ ID NO: 3200369 - DNA, 25 bp, Homo sapien
tctaactgtccattgggtccactgt

SEQ ID NO: 3200370 - DNA, 25 bp, Homo sapien
tgtccaaaggtctaacgcttctaat

SEQ ID NO: 3200371 - DNA, 25 bp, Homo sapien
tgtccattgccgaaacagtaagtat

SEQ ID NO: 3200372 - DNA, 25 bp, Homo sapien
gaaggtttacctcgatctgaagatg

SEQ ID NO: 3200373 - DNA, 25 bp, Homo sapien
ttatgacaatatcccctgtgctggg

SEQ ID NO: 3200374 - DNA, 25 bp, Homo sapien
catcagaagttgtgacacgggtaac

SEQ ID NO: 3200375 - DNA, 25 bp, Homo sapien
tgcggaaactcgaattctgtaacgg

SEQ ID NO: 3200376 - DNA, 25 bp, Homo sapien
tcaatcacatttacggtcacactgc

SEQ ID NO: 3200377 - DNA, 25 bp, Homo sapien
tggctctcagggatggttgcactca

SEQ ID NO: 3200378 - DNA, 25 bp, Homo sapien
caaaacagtagggaaatagtcatca

SEQ ID NO: 3200379 - DNA, 25 bp, Homo sapien
tgacaatggacccaatgctatggct

SEQ ID NO: 3200380 - DNA, 25 bp, Homo sapien
tattgggaccccttcactgatctgc

SEQ ID NO: 3200381 - DNA, 25 bp, Homo sapien
tattaacagtggcaaagctacacct

SEQ ID NO: 3200382 - DNA, 25 bp, Homo sapien
gggtcatttgcatcaagcacggtga

SEQ ID NO: 3200383 - DNA, 25 bp, Homo sapien
tcacggtcgctagcaaacacttctc

SEQ ID NO: 3200384 - DNA, 25 bp, Homo sapien
tacgccgagacgaagtaagatgctg

SEQ ID NO: 3200385 - DNA, 25 bp, Homo sapien
tgacagtcagcatgggcccgttatc

SEQ ID NO: 3200386 - DNA, 25 bp, Homo sapien
ggttgtgctcagaactccagcagtg

SEQ ID NO: 3200387 - DNA, 25 bp, Homo sapien
taaggacagtcagatcaaacgtgcc

SEQ ID NO: 3200388 - DNA, 25 bp, Homo sapien
tctgggcagctgcatgaaaatcctc

SEQ ID NO: 3200389 - DNA, 25 bp, Homo sapien
tgtgacaggttccaccactgtggca

SEQ ID NO: 3200390 - DNA, 25 bp, Homo sapien
tgcaaacacagttgaagcttcctgg

SEQ ID NO: 3200391 - DNA, 25 bp, Homo sapien
tggcagacacttgcataagaaaggc

SEQ ID NO: 3200392 - DNA, 25 bp, Homo sapien
cttagtgagaaaagtacaaacgttg

SEQ ID NO: 3200393 - DNA, 25 bp, Homo sapien
gagaaaagtacaaacgttgtcatac

SEQ ID NO: 3200394 - DNA, 25 bp, Homo sapien
agtcttagtgagaaaagtacaaacg

SEQ ID NO: 3200395 - DNA, 25 bp, Homo sapien
tagtgagaaaagtacaaacgttgtc

SEQ ID NO: 3200396 - DNA, 25 bp, Homo sapien
taagaatccacaccactttggcagg

SEQ ID NO: 3200397 - DNA, 25 bp, Homo sapien
tgacaataataagaatccacaccac

SEQ ID NO: 3200398 - DNA, 25 bp, Homo sapien
ggcaggaaccaccattaaagcaggg

SEQ ID NO: 3200399 - DNA, 25 bp, Homo sapien
cagtaattgactgaagattcacaca

SEQ ID NO: 3200400 - DNA, 25 bp, Homo sapien
gagaatcttagtctttcttcggcaa

SEQ ID NO: 3200401 - DNA, 25 bp, Homo sapien
tccataactgttcaactcgcagtgt

SEQ ID NO: 3200402 - DNA, 25 bp, Homo sapien
tcttcggcaatttcaagggccaaaa

SEQ ID NO: 3200403 - DNA, 25 bp, Homo sapien
cgcctgtctggttgtcatagttgta

SEQ ID NO: 3200404 - DNA, 25 bp, Homo sapien
atcacagtgtgaaaatgtccatctg

SEQ ID NO: 3200405 - DNA, 25 bp, Homo sapien
catggtggtgagcttatatgtacca

SEQ ID NO: 3200406 - DNA, 25 bp, Homo sapien
ttcttcatggtggtgagcttatatg

SEQ ID NO: 3200407 - DNA, 25 bp, Homo sapien
tcctgctctcctggcaatcacagtg

SEQ ID NO: 3200408 - DNA, 25 bp, Homo sapien
tcagaacaggagtccacagttaagg

SEQ ID NO: 3200409 - DNA, 25 bp, Homo sapien
gaacaggagtccacagttaaggagg

SEQ ID NO: 3200410 - DNA, 25 bp, Homo sapien
ttctcagaacaggagtccacagtta

SEQ ID NO: 3200411 - DNA, 25 bp, Homo sapien
aacaggagtccacagttaaggaggc

SEQ ID NO: 3200412 - DNA, 25 bp, Homo sapien
aactctatttggctgaacatcaaga

SEQ ID NO: 3200413 - DNA, 25 bp, Homo sapien
tccaactgtaactctatttggctga

SEQ ID NO: 3200414 - DNA, 25 bp, Homo sapien
ctccaactgtaactctatttggctg

SEQ ID NO: 3200415 - DNA, 25 bp, Homo sapien
tctatttggctgaacatcaagagtc

SEQ ID NO: 3200416 - DNA, 25 bp, Homo sapien
gccaaagcttggctgggttccagag

SEQ ID NO: 3200417 - DNA, 25 bp, Homo sapien
gactgcaaactccattatacaccca

SEQ ID NO: 3200418 - DNA, 25 bp, Homo sapien
tccacgtgtcctcttctctgaagga

SEQ ID NO: 3200419 - DNA, 25 bp, Homo sapien
tacacccaacaaaatcatggctttc

SEQ ID NO: 3200420 - DNA, 25 bp, Homo sapien
acagtaagaaataaaatcgccatac

SEQ ID NO: 3200421 - DNA, 25 bp, Homo sapien
tgaagcatacttttttgcatttttt

SEQ ID NO: 3200422 - DNA, 25 bp, Homo sapien
aacagtaagaaataaaatcgccata

SEQ ID NO: 3200423 - DNA, 25 bp, Homo sapien
aaacagtaagaaataaaatcgccat

SEQ ID NO: 3200424 - DNA, 25 bp, Homo sapien
acaagcgccttccagcctagggcat

SEQ ID NO: 3200425 - DNA, 25 bp, Homo sapien
atgggctgcgagtacaagcgccttc

SEQ ID NO: 3200426 - DNA, 25 bp, Homo sapien
gagtacaagcgccttccagcctagg

SEQ ID NO: 3200427 - DNA, 25 bp, Homo sapien
gctgcgagtacaagcgccttccagc

SEQ ID NO: 3200428 - DNA, 25 bp, Homo sapien
tgccatgaccagtaatccatacatg

SEQ ID NO: 3200429 - DNA, 25 bp, Homo sapien
tttgcaatgacactgctgccatgac

SEQ ID NO: 3200430 - DNA, 25 bp, Homo sapien
gctgccatgaccagtaatccataca

SEQ ID NO: 3200431 - DNA, 25 bp, Homo sapien
catgaccagtaatccatacatgtgc

SEQ ID NO: 3200432 - DNA, 25 bp, Homo sapien
ttccagactgttcacaccaaaaggc

SEQ ID NO: 3200433 - DNA, 25 bp, Homo sapien
tcatgtggtagtccaagcgcccttt

SEQ ID NO: 3200434 - DNA, 25 bp, Homo sapien
aaaaggctccaacatggcacctcgt

SEQ ID NO: 3200435 - DNA, 25 bp, Homo sapien
gattaaaacgccattctcgcttctg

SEQ ID NO: 3200436 - DNA, 25 bp, Homo sapien
aaggccaccgaagtcctgagtaggg

SEQ ID NO: 3200437 - DNA, 25 bp, Homo sapien
ccaattagaaaagtgtgccagtggc

SEQ ID NO: 3200438 - DNA, 25 bp, Homo sapien
tgcttgattgggtggaattcctcca

SEQ ID NO: 3200439 - DNA, 25 bp, Homo sapien
gtggccgtctgcaacatatacttca

SEQ ID NO: 3200440 - DNA, 25 bp, Homo sapien
ctttctgaagatagttatgacattc

SEQ ID NO: 3200441 - DNA, 25 bp, Homo sapien
catgttaaatgtgtagtcttgccac

SEQ ID NO: 3200442 - DNA, 25 bp, Homo sapien
taattgatattatcagacatcaaac

SEQ ID NO: 3200443 - DNA, 25 bp, Homo sapien
gactctacttaataaaggcatttac

SEQ ID NO: 3200444 - DNA, 25 bp, Homo sapien
tgatgttagcctccaatgtgttgtc

SEQ ID NO: 3200445 - DNA, 25 bp, Homo sapien
gctctgtaaataagaccaaaactgc

SEQ ID NO: 3200446 - DNA, 25 bp, Homo sapien
caacatggtcaggaagttgcttcat

SEQ ID NO: 3200447 - DNA, 25 bp, Homo sapien
gcatatctaacttgatcctactgtg

SEQ ID NO: 3200448 - DNA, 25 bp, Homo sapien
gaggccaagctatgcttcccgctga

SEQ ID NO: 3200449 - DNA, 25 bp, Homo sapien
taccacatagaagcaatgcagccat

SEQ ID NO: 3200450 - DNA, 25 bp, Homo sapien
ggcacaaatgttcgggccacggcag

SEQ ID NO: 3200451 - DNA, 25 bp, Homo sapien
gccaatcttcactgagggatctgtt

SEQ ID NO: 3200452 - DNA, 25 bp, Homo sapien
attctggcacgggtgggaggcacag

SEQ ID NO: 3200453 - DNA, 25 bp, Homo sapien
cagctgccaccattctggcacgggt

SEQ ID NO: 3200454 - DNA, 25 bp, Homo sapien
caccattctggcacgggtgggaggc

SEQ ID NO: 3200455 - DNA, 25 bp, Homo sapien
gctgccaccattctggcacgggtgg

SEQ ID NO: 3200456 - DNA, 25 bp, Homo sapien
gggtcatcaaaagcaacgttctcac

SEQ ID NO: 3200457 - DNA, 25 bp, Homo sapien
tacacaggatcaggctaaggaccag

SEQ ID NO: 3200458 - DNA, 25 bp, Homo sapien
catgtcatccccatagggagggata

SEQ ID NO: 3200459 - DNA, 25 bp, Homo sapien
tcacaggtccttcccgtgtgcgagt

SEQ ID NO: 3200460 - DNA, 25 bp, Homo sapien
tcttcaatagaaagtccgactggag

SEQ ID NO: 3200461 - DNA, 25 bp, Homo sapien
gaccgtggtaccttcgaggcttcag

SEQ ID NO: 3200462 - DNA, 25 bp, Homo sapien
tatgaaggctggtaagtcaaactgc

SEQ ID NO: 3200463 - DNA, 25 bp, Homo sapien
tgatgccatggcctgaggactcttg

SEQ ID NO: 3200464 - DNA, 25 bp, Homo sapien
cattcgcatagcaaggtggcagtgt

SEQ ID NO: 3200465 - DNA, 25 bp, Homo sapien
tttcattccacgataggagggttcc

SEQ ID NO: 3200466 - DNA, 25 bp, Homo sapien
tcaaatgtgacccaacctagtcagc

SEQ ID NO: 3200467 - DNA, 25 bp, Homo sapien
gaaacaatacacatacgccactggg

SEQ ID NO: 3200468 - DNA, 25 bp, Homo sapien
gacataactatgactcctgaaaaca

SEQ ID NO: 3200469 - DNA, 25 bp, Homo sapien
taaagacacatatgtagagtggagc

SEQ ID NO: 3200470 - DNA, 25 bp, Homo sapien
tggcatatgcctcaatctgtgggtg

SEQ ID NO: 3200471 - DNA, 25 bp, Homo sapien
tcttggctaagacagcatgtatagt

SEQ ID NO: 3200472 - DNA, 25 bp, Homo sapien
ccacacgtggatttgcatgggtgtg

SEQ ID NO: 3200473 - DNA, 25 bp, Homo sapien
cacacgtggatttgcatgggtgtgc

SEQ ID NO: 3200474 - DNA, 25 bp, Homo sapien
tggatccaagtactctcataagatc

SEQ ID NO: 3200475 - DNA, 25 bp, Homo sapien
tactctcataagatcatcttccctg

SEQ ID NO: 3200476 - DNA, 25 bp, Homo sapien
gctcatcttgagcacaatgcacacc

SEQ ID NO: 3200477 - DNA, 25 bp, Homo sapien
tgcacacctggtctatgcaacacag

SEQ ID NO: 3200478 - DNA, 25 bp, Homo sapien
tccaagtgccaacatccatagaaca

SEQ ID NO: 3200479 - DNA, 25 bp, Homo sapien
tgatttccaggatatcatcctccac

SEQ ID NO: 3200480 - DNA, 25 bp, Homo sapien
ggtgacaacaccagccacatgggcc

SEQ ID NO: 3200481 - DNA, 25 bp, Homo sapien
cagccacagagtcctgtcattgcca

SEQ ID NO: 3200482 - DNA, 25 bp, Homo sapien
ctcatccccaatgatgctggtgaca

SEQ ID NO: 3200483 - DNA, 25 bp, Homo sapien
tgctggtgacaacaccagccacatg

SEQ ID NO: 3200484 - DNA, 25 bp, Homo sapien
caaatatggtcctcttcctttcagc

SEQ ID NO: 3200485 - DNA, 25 bp, Homo sapien
tttcacttcaaatatggtcctcttc

SEQ ID NO: 3200486 - DNA, 25 bp, Homo sapien
tcacttcaaatatggtcctcttcct

SEQ ID NO: 3200487 - DNA, 25 bp, Homo sapien
cttcaaatatggtcctcttcctttc

SEQ ID NO: 3200488 - DNA, 25 bp, Homo sapien
tcatcttaggtttgaatcagttgct

SEQ ID NO: 3200489 - DNA, 25 bp, Homo sapien
tgctggccacaaggtacagttgggt

SEQ ID NO: 3200490 - DNA, 25 bp, Homo sapien
tttgaatcagttgctggccacaagg

SEQ ID NO: 3200491 - DNA, 25 bp, Homo sapien
cacaaggtacagttgggttcttggg

SEQ ID NO: 3200492 - DNA, 25 bp, Homo sapien
cactaacatgatttctagcagctca

SEQ ID NO: 3200493 - DNA, 25 bp, Homo sapien
ttcactgatagaaccagtaatcacc

SEQ ID NO: 3200494 - DNA, 25 bp, Homo sapien
tattggcattgaagggaaaatacaa

SEQ ID NO: 3200495 - DNA, 25 bp, Homo sapien
tcagcctcaatcttgacctataaag

SEQ ID NO: 3200496 - DNA, 25 bp, Homo sapien
gccttttttcagaccatttactgca

SEQ ID NO: 3200497 - DNA, 25 bp, Homo sapien
aggtgccacaccaggttctatgttc

SEQ ID NO: 3200498 - DNA, 25 bp, Homo sapien
caggtttcttcccagtacagcaggt

SEQ ID NO: 3200499 - DNA, 25 bp, Homo sapien
tcagcattctgatcacactggcctt

SEQ ID NO: 3200500 - DNA, 25 bp, Homo sapien
ccctggcagggcgtgtgatggcgtg

SEQ ID NO: 3200501 - DNA, 25 bp, Homo sapien
ggcttgcttctttggcgctctgctg

SEQ ID NO: 3200502 - DNA, 25 bp, Homo sapien
gctgcagcagctcaaacccctaggg

SEQ ID NO: 3200503 - DNA, 25 bp, Homo sapien
gcaggtcgttgggagcatgggctct

SEQ ID NO: 3200504 - DNA, 25 bp, Homo sapien
tgaaaaattcagacacaaactgtac

SEQ ID NO: 3200505 - DNA, 25 bp, Homo sapien
cattccatagcccaatacattttgc

SEQ ID NO: 3200506 - DNA, 25 bp, Homo sapien
ctgtactgaaggtgtatagaacttc

SEQ ID NO: 3200507 - DNA, 25 bp, Homo sapien
caccattccatagcccaatacattt

SEQ ID NO: 3200508 - DNA, 25 bp, Homo sapien
agtaggatcttcagaattcaggatg

SEQ ID NO: 3200509 - DNA, 25 bp, Homo sapien
taagtaggatcttcagaattcagga

SEQ ID NO: 3200510 - DNA, 25 bp, Homo sapien
ttaagtaggatcttcagaattcagg

SEQ ID NO: 3200511 - DNA, 25 bp, Homo sapien
taggatcttcagaattcaggatgtt

SEQ ID NO: 3200512 - DNA, 25 bp, Homo sapien
gcaagcacatgtagctatgagcttt

SEQ ID NO: 3200513 - DNA, 25 bp, Homo sapien
tgcaagcacatgtagctatgagctt

SEQ ID NO: 3200514 - DNA, 25 bp, Homo sapien
ctgcaagcacatgtagctatgagct

SEQ ID NO: 3200515 - DNA, 25 bp, Homo sapien
caagcacatgtagctatgagctttt

SEQ ID NO: 3200516 - DNA, 25 bp, Homo sapien
aacaaaatcctgcagcagacagaga

SEQ ID NO: 3200517 - DNA, 25 bp, Homo sapien
cagaacatcctgagaagggactagg

SEQ ID NO: 3200518 - DNA, 25 bp, Homo sapien
gaacatcctgagaagggactaggcc

SEQ ID NO: 3200519 - DNA, 25 bp, Homo sapien
atcctgagaagggactaggccaaac

SEQ ID NO: 3200520 - DNA, 25 bp, Homo sapien
catttggcttaccatgtcttggaca

SEQ ID NO: 3200521 - DNA, 25 bp, Homo sapien
tggacaatcctctcactatgactgc

SEQ ID NO: 3200522 - DNA, 25 bp, Homo sapien
tcatgcataacagagtggacaatcc

SEQ ID NO: 3200523 - DNA, 25 bp, Homo sapien
aaaacatgctgggacaaatgctgga

SEQ ID NO: 3200524 - DNA, 25 bp, Homo sapien
cctggcagccttgtagtctttcagc

SEQ ID NO: 3200525 - DNA, 25 bp, Homo sapien
tgtgtcttgtattgcaccaggctct

SEQ ID NO: 3200526 - DNA, 25 bp, Homo sapien
tctttcagcatctctgttacctcca

SEQ ID NO: 3200527 - DNA, 25 bp, Homo sapien
gttacctccatgtggaaagttcctg

SEQ ID NO: 3200528 - DNA, 25 bp, Homo sapien
gccattttgtcgttgcttccttcta

SEQ ID NO: 3200529 - DNA, 25 bp, Homo sapien
cagatgtcatcattagaacggcttc

SEQ ID NO: 3200530 - DNA, 25 bp, Homo sapien
gcaacttggctcagtacttggtcaa

SEQ ID NO: 3200531 - DNA, 25 bp, Homo sapien
tattgcagatccaatcacagagcca

SEQ ID NO: 3200532 - DNA, 25 bp, Homo sapien
taagtggtgattatgtggaccgaca

SEQ ID NO: 3200533 - DNA, 25 bp, Homo sapien
gaccgacaggattagaggcaaacag

SEQ ID NO: 3200534 - DNA, 25 bp, Homo sapien
tgattatgtggaccgacaggattag

SEQ ID NO: 3200535 - DNA, 25 bp, Homo sapien
tatgtggaccgacaggattagaggc

SEQ ID NO: 3200536 - DNA, 25 bp, Homo sapien
tttggcatccaacttgatcagcaaa

SEQ ID NO: 3200537 - DNA, 25 bp, Homo sapien
tccaacttgatcagcaaagccttag

SEQ ID NO: 3200538 - DNA, 25 bp, Homo sapien
gcatccaacttgatcagcaaagcct

SEQ ID NO: 3200539 - DNA, 25 bp, Homo sapien
aacttgatcagcaaagccttagtca

SEQ ID NO: 3200540 - DNA, 25 bp, Homo sapien
cacagaatatgttaggtaggagtcc

SEQ ID NO: 3200541 - DNA, 25 bp, Homo sapien
gttgaaggtttttgcatccagattt

SEQ ID NO: 3200542 - DNA, 25 bp, Homo sapien
cgcatccgaggaagaaagcctactt

SEQ ID NO: 3200543 - DNA, 25 bp, Homo sapien
gaggtgtgtaccttcagtgcctaat

SEQ ID NO: 3200544 - DNA, 25 bp, Homo sapien
tatccaagggacatgcataggaggg

SEQ ID NO: 3200545 - DNA, 25 bp, Homo sapien
gggacatgcataggagggccaaaca

SEQ ID NO: 3200546 - DNA, 25 bp, Homo sapien
ttacatatccaagggacatgcatag

SEQ ID NO: 3200547 - DNA, 25 bp, Homo sapien
gcataggagggccaaacaaggtcat

SEQ ID NO: 3200548 - DNA, 25 bp, Homo sapien
cttctcagccagcagagtatcattg

SEQ ID NO: 3200549 - DNA, 25 bp, Homo sapien
gcccagagaaattcagataatgaat

SEQ ID NO: 3200550 - DNA, 25 bp, Homo sapien
ccattcccaacttgatacacttgca

SEQ ID NO: 3200551 - DNA, 25 bp, Homo sapien
tgaatttccctaacgtctgtaccat

SEQ ID NO: 3200552 - DNA, 25 bp, Homo sapien
tcccaacttgatacacttgcaacca

SEQ ID NO: 3200553 - DNA, 25 bp, Homo sapien
gtgcattttacctgacctgagaggt

SEQ ID NO: 3200554 - DNA, 25 bp, Homo sapien
tgtgaccaccaacagtgtttcctcc

SEQ ID NO: 3200555 - DNA, 25 bp, Homo sapien
gtctgtgaccaccaacagtgtttcc

SEQ ID NO: 3200556 - DNA, 25 bp, Homo sapien
tggtgtgcattttacctgacctgag

SEQ ID NO: 3200557 - DNA, 25 bp, Homo sapien
tgactccagctgtatgtgctgcttc

SEQ ID NO: 3200558 - DNA, 25 bp, Homo sapien
catggcttgcaatgtaggcactgac

SEQ ID NO: 3200559 - DNA, 25 bp, Homo sapien
caatgtaggcactgactccagctgt

SEQ ID NO: 3200560 - DNA, 25 bp, Homo sapien
ccatagggtatttcatggcttgcaa

SEQ ID NO: 3200561 - DNA, 25 bp, Homo sapien
ttttattcaatacacagccacattc

SEQ ID NO: 3200562 - DNA, 25 bp, Homo sapien
tttattcaatacacagccacattca

SEQ ID NO: 3200563 - DNA, 25 bp, Homo sapien
cttttattcaatacacagccacatt

SEQ ID NO: 3200564 - DNA, 25 bp, Homo sapien
ctggaattaatcaggacagattcca

SEQ ID NO: 3200565 - DNA, 25 bp, Homo sapien
tggaattaatcaggacagattccag

SEQ ID NO: 3200566 - DNA, 25 bp, Homo sapien
tctctggatgtagtattgggttgtc

SEQ ID NO: 3200567 - DNA, 25 bp, Homo sapien
agccagagatattctctggatgtag

SEQ ID NO: 3200568 - DNA, 25 bp, Homo sapien
caccaccagattttattacaataac

SEQ ID NO: 3200569 - DNA, 25 bp, Homo sapien
caccagattttattacaataaccat

SEQ ID NO: 3200570 - DNA, 25 bp, Homo sapien
taaacaccaccagattttattacaa

SEQ ID NO: 3200571 - DNA, 25 bp, Homo sapien
acaccaccagattttattacaataa

SEQ ID NO: 3200572 - DNA, 25 bp, Homo sapien
gctgattagatgactctttcctaga

SEQ ID NO: 3200573 - DNA, 25 bp, Homo sapien
tgagtgaagtcgctgattagatgac

SEQ ID NO: 3200574 - DNA, 25 bp, Homo sapien
tatacttgtcgaatggactaagtga

SEQ ID NO: 3200575 - DNA, 25 bp, Homo sapien
ggctaagttgatctaatgcacctat

SEQ ID NO: 3200576 - DNA, 25 bp, Homo sapien
gttggaagtgtgaatttatattctg

SEQ ID NO: 3200577 - DNA, 25 bp, Homo sapien
ttaagttggaagtgtgaatttatat

SEQ ID NO: 3200578 - DNA, 25 bp, Homo sapien
attaaattaagttggaagtgtgaat

SEQ ID NO: 3200579 - DNA, 25 bp, Homo sapien
ttcatatctggaatatctgtagatc

SEQ ID NO: 3200580 - DNA, 25 bp, Homo sapien
ctggaatatctgtagatctgaagtc

SEQ ID NO: 3200581 - DNA, 25 bp, Homo sapien
ggaatatctgtagatctgaagtctt

SEQ ID NO: 3200582 - DNA, 25 bp, Homo sapien
tatctggaatatctgtagatctgaa

SEQ ID NO: 3200583 - DNA, 25 bp, Homo sapien
ttataggacatcgagtgacttgtaa

SEQ ID NO: 3200584 - DNA, 25 bp, Homo sapien
ctactgtactggataataagggtgt

SEQ ID NO: 3200585 - DNA, 25 bp, Homo sapien
aaagaaaggttgtgatgaagtaaca

SEQ ID NO: 3200586 - DNA, 25 bp, Homo sapien
taataattactactgtactggataa

SEQ ID NO: 3200587 - DNA, 25 bp, Homo sapien
caagcccaaacgcaccagaaatatg

SEQ ID NO: 3200588 - DNA, 25 bp, Homo sapien
cagaaatatgctgacctgagcaggt

SEQ ID NO: 3200589 - DNA, 25 bp, Homo sapien
gagccccagcaagatggaaataccc

SEQ ID NO: 3200590 - DNA, 25 bp, Homo sapien
ctgcttaacccaattgtcactattt

SEQ ID NO: 3200591 - DNA, 25 bp, Homo sapien
ttccatataaagagatgtccagtgg

SEQ ID NO: 3200592 - DNA, 25 bp, Homo sapien
tccagtggtatgaaacccttgacct

SEQ ID NO: 3200593 - DNA, 25 bp, Homo sapien
ttttgctgtccctcaccgtcagctt

SEQ ID NO: 3200594 - DNA, 25 bp, Homo sapien
gtatgaaacccttgaccttttgctg

SEQ ID NO: 3200595 - DNA, 25 bp, Homo sapien
tctgaataactgaatgtccatgtcc

SEQ ID NO: 3200596 - DNA, 25 bp, Homo sapien
tcccaattgtaagactgtgcttaga

SEQ ID NO: 3200597 - DNA, 25 bp, Homo sapien
gaaactggtgcaagctttgagcggt

SEQ ID NO: 3200598 - DNA, 25 bp, Homo sapien
gctttgagcggtagcgaataaacat

SEQ ID NO: 3200599 - DNA, 25 bp, Homo sapien
ttattaggaagtattatcttacact

SEQ ID NO: 3200600 - DNA, 25 bp, Homo sapien
ttctagccctatatctttattagga

SEQ ID NO: 3200601 - DNA, 25 bp, Homo sapien
ctggatgttagcagcattttctagc

SEQ ID NO: 3200602 - DNA, 25 bp, Homo sapien
gggaataagtgctggtttcagaaac

SEQ ID NO: 3200603 - DNA, 25 bp, Homo sapien
aatatgtcgttgtttcaccaacggc

SEQ ID NO: 3200604 - DNA, 25 bp, Homo sapien
gctgccaaaatatgtcgttgtttca

SEQ ID NO: 3200605 - DNA, 25 bp, Homo sapien
agatggatgtactttcaccatccat

SEQ ID NO: 3200606 - DNA, 25 bp, Homo sapien
ttgtttcaccaacggcaagatggat

SEQ ID NO: 3200607 - DNA, 25 bp, Homo sapien
taatacgagctttattcaaagcagc

SEQ ID NO: 3200608 - DNA, 25 bp, Homo sapien
tgtatgaggagctacatttctgtaa

SEQ ID NO: 3200609 - DNA, 25 bp, Homo sapien
tctaattcttcataggaacaatata

SEQ ID NO: 3200610 - DNA, 25 bp, Homo sapien
ctggtaatacgagctttattcaaag

SEQ ID NO: 3200611 - DNA, 25 bp, Homo sapien
aagtgcattgtattggccaagcctg

SEQ ID NO: 3200612 - DNA, 25 bp, Homo sapien
cagtcatctgtcttggagcatgctc

SEQ ID NO: 3200613 - DNA, 25 bp, Homo sapien
ctctggtgagagtgtttaacttgga

SEQ ID NO: 3200614 - DNA, 25 bp, Homo sapien
taaatagagaatagaagtgcattgt

SEQ ID NO: 3200615 - DNA, 25 bp, Homo sapien
cgctgggcagtaatcaggagtgtac

SEQ ID NO: 3200616 - DNA, 25 bp, Homo sapien
tacagatataaaatcgctgggcagt

SEQ ID NO: 3200617 - DNA, 25 bp, Homo sapien
tggcaggcatcaagtgggttactgc

SEQ ID NO: 3200618 - DNA, 25 bp, Homo sapien
agtgtactggtccttatggcaggca

SEQ ID NO: 3200619 - DNA, 25 bp, Homo sapien
catgccaactttaagagaagctgaa

SEQ ID NO: 3200620 - DNA, 25 bp, Homo sapien
cttattgcttgtttcctaaatgacc

SEQ ID NO: 3200621 - DNA, 25 bp, Homo sapien
gtaagttggcagtacatcatctgaa

SEQ ID NO: 3200622 - DNA, 25 bp, Homo sapien
ctagagtaaatagaaacagcctttt

SEQ ID NO: 3200623 - DNA, 25 bp, Homo sapien
tggaaatctctataccttatatctt

SEQ ID NO: 3200624 - DNA, 25 bp, Homo sapien
gaaatctctataccttatatcttct

SEQ ID NO: 3200625 - DNA, 25 bp, Homo sapien
gctggaaatctctataccttatatc

SEQ ID NO: 3200626 - DNA, 25 bp, Homo sapien
ggagctggaaatctctataccttat

SEQ ID NO: 3200627 - DNA, 25 bp, Homo sapien
catgaattcccgtgcattttcctct

SEQ ID NO: 3200628 - DNA, 25 bp, Homo sapien
tcatgaattcccgtgcattttcctc

SEQ ID NO: 3200629 - DNA, 25 bp, Homo sapien
attgggtttcatgaattcccgtgca

SEQ ID NO: 3200630 - DNA, 25 bp, Homo sapien
ggtttcatgaattcccgtgcatttt

SEQ ID NO: 3200631 - DNA, 25 bp, Homo sapien
cagttgtgtatctaaggttaaagaa

SEQ ID NO: 3200632 - DNA, 25 bp, Homo sapien
tgtatctaaggttaaagaaggctag

SEQ ID NO: 3200633 - DNA, 25 bp, Homo sapien
ttgggtcagttgtgtatctaaggtt

SEQ ID NO: 3200634 - DNA, 25 bp, Homo sapien
gaataaagaatgttagttgtgaata

SEQ ID NO: 3200635 - DNA, 25 bp, Homo sapien
gatcagccaggtaagtggagtgcat

SEQ ID NO: 3200636 - DNA, 25 bp, Homo sapien
cttgtgacttttcccggtaagatca

SEQ ID NO: 3200637 - DNA, 25 bp, Homo sapien
cccggtaagatcagccaggtaagtg

SEQ ID NO: 3200638 - DNA, 25 bp, Homo sapien
gacttttcccggtaagatcagccag

SEQ ID NO: 3200639 - DNA, 25 bp, Homo sapien
ctaagggatgattagcaagcggctg

SEQ ID NO: 3200640 - DNA, 25 bp, Homo sapien
agcaagcggctgtatttttcaaaag

SEQ ID NO: 3200641 - DNA, 25 bp, Homo sapien
attagcaagcggctgtatttttcaa

SEQ ID NO: 3200642 - DNA, 25 bp, Homo sapien
gatgattagcaagcggctgtatttt

SEQ ID NO: 3200643 - DNA, 25 bp, Homo sapien
cacataacgtactctagaaaccagg

SEQ ID NO: 3200644 - DNA, 25 bp, Homo sapien
gaatatattcatggcctaagtaccc

SEQ ID NO: 3200645 - DNA, 25 bp, Homo sapien
gatttgaacctactttatggccacc

SEQ ID NO: 3200646 - DNA, 25 bp, Homo sapien
aattactaaacatgggtgcttcagc

SEQ ID NO: 3200647 - DNA, 25 bp, Homo sapien
tggcaccaaggtcttttgctgatgg

SEQ ID NO: 3200648 - DNA, 25 bp, Homo sapien
caaaagttgtcttagctgtcctggc

SEQ ID NO: 3200649 - DNA, 25 bp, Homo sapien
ttgctgatggttcaagagcagatgg

SEQ ID NO: 3200650 - DNA, 25 bp, Homo sapien
tttgctgatggttcaagagcagatg

SEQ ID NO: 3200651 - DNA, 25 bp, Homo sapien
agatacaatgtgtctgcatgaccag

SEQ ID NO: 3200652 - DNA, 25 bp, Homo sapien
tacaatgtgtctgcatgaccagttc

SEQ ID NO: 3200653 - DNA, 25 bp, Homo sapien
gatacaatgtgtctgcatgaccagt

SEQ ID NO: 3200654 - DNA, 25 bp, Homo sapien
atacaatgtgtctgcatgaccagtt

SEQ ID NO: 3200655 - DNA, 25 bp, Homo sapien
ttatttttggtctgctggttctcat

SEQ ID NO: 3200656 - DNA, 25 bp, Homo sapien
tgtcatttgcctcgtttatttttgg

SEQ ID NO: 3200657 - DNA, 25 bp, Homo sapien
tactttgtcccttccaatatccatc

SEQ ID NO: 3200658 - DNA, 25 bp, Homo sapien
aatatccatccctttgataatgtca

SEQ ID NO: 3200659 - DNA, 25 bp, Homo sapien
tgcttttatttctccctgacacaaa

SEQ ID NO: 3200660 - DNA, 25 bp, Homo sapien
tttatttctccctgacacaaacaca

SEQ ID NO: 3200661 - DNA, 25 bp, Homo sapien
ttttctggacatacatgcttttatt

SEQ ID NO: 3200662 - DNA, 25 bp, Homo sapien
cttgatgcttattttctggacatac

SEQ ID NO: 3200663 - DNA, 25 bp, Homo sapien
tcctgtgaaaattttctctttctga

SEQ ID NO: 3200664 - DNA, 25 bp, Homo sapien
tgtgaaaattttctctttctgataa

SEQ ID NO: 3200665 - DNA, 25 bp, Homo sapien
gaaaattttctctttctgataatac

SEQ ID NO: 3200666 - DNA, 25 bp, Homo sapien
aaattttctctttctgataatacat

SEQ ID NO: 3200667 - DNA, 25 bp, Homo sapien
taaatccacattgaattgtgcgggc

SEQ ID NO: 3200668 - DNA, 25 bp, Homo sapien
aaacttgatattgttggtggcaaag

SEQ ID NO: 3200669 - DNA, 25 bp, Homo sapien
ccacattgaattgtgcgggctaaac

SEQ ID NO: 3200670 - DNA, 25 bp, Homo sapien
tgtgcgggctaaacttgatattgtt

SEQ ID NO: 3200671 - DNA, 25 bp, Homo sapien
tatctccaagtttgaattccttcat

SEQ ID NO: 3200672 - DNA, 25 bp, Homo sapien
attttatctccaagtttgaattcct

SEQ ID NO: 3200673 - DNA, 25 bp, Homo sapien
gccccagaagaaacttgagtttgaa

SEQ ID NO: 3200674 - DNA, 25 bp, Homo sapien
ttgccccagaagaaacttgagtttg

SEQ ID NO: 3200675 - DNA, 25 bp, Homo sapien
attgcttctctgactgcactaggat

SEQ ID NO: 3200676 - DNA, 25 bp, Homo sapien
caaaatcggaggagtattctgacaa

SEQ ID NO: 3200677 - DNA, 25 bp, Homo sapien
ctaggataaacaaaatcggaggagt

SEQ ID NO: 3200678 - DNA, 25 bp, Homo sapien
atacagcattgcttctctgactgca

SEQ ID NO: 3200679 - DNA, 25 bp, Homo sapien
ttcccgtcatgcaagatgtccttca

SEQ ID NO: 3200680 - DNA, 25 bp, Homo sapien
cattcttcccgtcatgcaagatgtc

SEQ ID NO: 3200681 - DNA, 25 bp, Homo sapien
tgcattcttcccgtcatgcaagatg

SEQ ID NO: 3200682 - DNA, 25 bp, Homo sapien
ttcttcccgtcatgcaagatgtcct

SEQ ID NO: 3200683 - DNA, 25 bp, Homo sapien
ggcatgtaacctatggtgcttaggg

SEQ ID NO: 3200684 - DNA, 25 bp, Homo sapien
ggatttttgcccatgggtcatcatc

SEQ ID NO: 3200685 - DNA, 25 bp, Homo sapien
ctttaaactcattgtgccctgcacc

SEQ ID NO: 3200686 - DNA, 25 bp, Homo sapien
tgtggctactagtggcagcaaaggc

SEQ ID NO: 3200687 - DNA, 25 bp, Homo sapien
tgctatctttgggaccagattccac

SEQ ID NO: 3200688 - DNA, 25 bp, Homo sapien
ggaagaaaccacagctatcaggcca

SEQ ID NO: 3200689 - DNA, 25 bp, Homo sapien
tcatgaggccttccagttgttccag

SEQ ID NO: 3200690 - DNA, 25 bp, Homo sapien
cagactgtgagactctctgtggaag

SEQ ID NO: 3200691 - DNA, 25 bp, Homo sapien
ctgcttgtatgtggtgtctcttggg

SEQ ID NO: 3200692 - DNA, 25 bp, Homo sapien
ggatgaggcctgcttgtatgtggtg

SEQ ID NO: 3200693 - DNA, 25 bp, Homo sapien
gcctgcttgtatgtggtgtctcttg

SEQ ID NO: 3200694 - DNA, 25 bp, Homo sapien
gaggcctgcttgtatgtggtgtctc

SEQ ID NO: 3200695 - DNA, 25 bp, Homo sapien
cgatgataccatatgccacactttc

SEQ ID NO: 3200696 - DNA, 25 bp, Homo sapien
cactgtgcgatgataccatatgcca

SEQ ID NO: 3200697 - DNA, 25 bp, Homo sapien
cttctttccactgtgcgatgatacc

SEQ ID NO: 3200698 - DNA, 25 bp, Homo sapien
tcagtaagcaaatctacattcttct

SEQ ID NO: 3200699 - DNA, 25 bp, Homo sapien
tttcttgtacgttttccatctggca

SEQ ID NO: 3200700 - DNA, 25 bp, Homo sapien
agtttcttgtacgttttccatctgg

SEQ ID NO: 3200701 - DNA, 25 bp, Homo sapien
gtttcttgtacgttttccatctggc

SEQ ID NO: 3200702 - DNA, 25 bp, Homo sapien
tagtttcttgtacgttttccatctg

SEQ ID NO: 3200703 - DNA, 25 bp, Homo sapien
aactcatctgataacgtcaggtcca

SEQ ID NO: 3200704 - DNA, 25 bp, Homo sapien
gataacgtcaggtccactaccagga

SEQ ID NO: 3200705 - DNA, 25 bp, Homo sapien
ggtccactaccaggaatgaccacat

SEQ ID NO: 3200706 - DNA, 25 bp, Homo sapien
ataaaaccatggcatctggagagga

SEQ ID NO: 3200707 - DNA, 25 bp, Homo sapien
gccattattttcaacctctaaccta

SEQ ID NO: 3200708 - DNA, 25 bp, Homo sapien
ggtactgctgatatctccatgaaat

SEQ ID NO: 3200709 - DNA, 25 bp, Homo sapien
tcacctgacactgtcataggtactg

SEQ ID NO: 3200710 - DNA, 25 bp, Homo sapien
agtagcgttttctcatataatttgc

SEQ ID NO: 3200711 - DNA, 25 bp, Homo sapien
tggctttgtgacaatcctgattttc

SEQ ID NO: 3200712 - DNA, 25 bp, Homo sapien
ctgctgattggcaattgctttgaaa

SEQ ID NO: 3200713 - DNA, 25 bp, Homo sapien
ctgctggggaatctgctgattggca

SEQ ID NO: 3200714 - DNA, 25 bp, Homo sapien
tcccaggtgcctttcaggctgctgg

SEQ ID NO: 3200715 - DNA, 25 bp, Homo sapien
atttttgacttgactgttagaagga

SEQ ID NO: 3200716 - DNA, 25 bp, Homo sapien
gtactgccaccatacttgttctgca

SEQ ID NO: 3200717 - DNA, 25 bp, Homo sapien
gtggtttctacagccgtactgccac

SEQ ID NO: 3200718 - DNA, 25 bp, Homo sapien
tctgcagactgccacagcaactgag

SEQ ID NO: 3200719 - DNA, 25 bp, Homo sapien
ctcgttttatcagcatactttgtgg

SEQ ID NO: 3200720 - DNA, 25 bp, Homo sapien
tccttcatggttcctacagcgggaa

SEQ ID NO: 3200721 - DNA, 25 bp, Homo sapien
tatttggcccacgtgttgcatactg

SEQ ID NO: 3200722 - DNA, 25 bp, Homo sapien
cagttgcaccatgcaaagcgaatcg

SEQ ID NO: 3200723 - DNA, 25 bp, Homo sapien
tatatatcttgacagcacgaggccg

SEQ ID NO: 3200724 - DNA, 25 bp, Homo sapien
acagcagctgtacaaaacccagaca

SEQ ID NO: 3200725 - DNA, 25 bp, Homo sapien
cagcagctgtacaaaacccagacat

SEQ ID NO: 3200726 - DNA, 25 bp, Homo sapien
tgcagaagggttcacagcagctgta

SEQ ID NO: 3200727 - DNA, 25 bp, Homo sapien
tgccccccggatgaacatatacatt

SEQ ID NO: 3200728 - DNA, 25 bp, Homo sapien
agagtctgatgctctgtctacatgc

SEQ ID NO: 3200729 - DNA, 25 bp, Homo sapien
gaagagtctgatgctctgtctacat

SEQ ID NO: 3200730 - DNA, 25 bp, Homo sapien
agtctgatgctctgtctacatgccc

SEQ ID NO: 3200731 - DNA, 25 bp, Homo sapien
cctctttggcgctcctgcagttttg

SEQ ID NO: 3200732 - DNA, 25 bp, Homo sapien
tgccggcttgtccccggaggctttg

SEQ ID NO: 3200733 - DNA, 25 bp, Homo sapien
ctctttggcgctcctgcagttttgt

SEQ ID NO: 3200734 - DNA, 25 bp, Homo sapien
gtccccggaggctttggcagatgaa

SEQ ID NO: 3200735 - DNA, 25 bp, Homo sapien
gttttaatggatgacttgtatgtac

SEQ ID NO: 3200736 - DNA, 25 bp, Homo sapien
tttgttttaatggatgacttgtatg

SEQ ID NO: 3200737 - DNA, 25 bp, Homo sapien
tgttttaatggatgacttgtatgta

SEQ ID NO: 3200738 - DNA, 25 bp, Homo sapien
tctttgttttaatggatgacttgta

SEQ ID NO: 3200739 - DNA, 25 bp, Homo sapien
ggtcataatggctactccttttttc

SEQ ID NO: 3200740 - DNA, 25 bp, Homo sapien
gaagttcctggacaagcgccgtgcc

SEQ ID NO: 3200741 - DNA, 25 bp, Homo sapien
tcatgtgtagcattggtcataatgg

SEQ ID NO: 3200742 - DNA, 25 bp, Homo sapien
gatggagtaaaaagtgaagttcctg

SEQ ID NO: 3200743 - DNA, 25 bp, Homo sapien
catacatgtttcttgcatagaaaaa

SEQ ID NO: 3200744 - DNA, 25 bp, Homo sapien
caggaagtgtttaataaattgatca

SEQ ID NO: 3200745 - DNA, 25 bp, Homo sapien
tacatgtttcttgcatagaaaaaga

SEQ ID NO: 3200746 - DNA, 25 bp, Homo sapien
ttttcatcaggaagtgtttaataaa

SEQ ID NO: 3200747 - DNA, 25 bp, Homo sapien
tcaggccatgggactccttgaggga

SEQ ID NO: 3200748 - DNA, 25 bp, Homo sapien
gtttgcactcagattgctaagctgt

SEQ ID NO: 3200749 - DNA, 25 bp, Homo sapien
gctaagtcttgttccgtttgcactc

SEQ ID NO: 3200750 - DNA, 25 bp, Homo sapien
tttaggtgtttcaggccatgggact

SEQ ID NO: 3200751 - DNA, 25 bp, Homo sapien
tagttaggcccttgttgtccattaa

SEQ ID NO: 3200752 - DNA, 25 bp, Homo sapien
taaagagtcctgacaagggatcagc

SEQ ID NO: 3200753 - DNA, 25 bp, Homo sapien
aatgatccatagtcttaaggttgag

SEQ ID NO: 3200754 - DNA, 25 bp, Homo sapien
caccagtactgggtcatattatttg

SEQ ID NO: 3200755 - DNA, 25 bp, Homo sapien
tgagcctcggtgctgaaaaccactg

SEQ ID NO: 3200756 - DNA, 25 bp, Homo sapien
ccagtgggtcctctagaagggagca

SEQ ID NO: 3200757 - DNA, 25 bp, Homo sapien
cgtgcaggtcattgtgaagcccatt

SEQ ID NO: 3200758 - DNA, 25 bp, Homo sapien
cattgttggtggtgtcccagcgtga

SEQ ID NO: 3200759 - DNA, 25 bp, Homo sapien
ggccaagcaggtgtcacatgccata

SEQ ID NO: 3200760 - DNA, 25 bp, Homo sapien
cacatgccatatgactatagctcat

SEQ ID NO: 3200761 - DNA, 25 bp, Homo sapien
ttcctgtgcctgtttgtaggtgagg

SEQ ID NO: 3200762 - DNA, 25 bp, Homo sapien
tgtgtccttgggcatgtgttcctgt

SEQ ID NO: 3200763 - DNA, 25 bp, Homo sapien
gatccaaacgctctcttccaagtct

SEQ ID NO: 3200764 - DNA, 25 bp, Homo sapien
tcatgatccaaacgctctcttccaa

SEQ ID NO: 3200765 - DNA, 25 bp, Homo sapien
gccttggtgaggatattcttctata

SEQ ID NO: 3200766 - DNA, 25 bp, Homo sapien
tgtaataggttttagtgccttggtg

SEQ ID NO: 3200767 - DNA, 25 bp, Homo sapien
tctcgggtacctgcatgggatctgg

SEQ ID NO: 3200768 - DNA, 25 bp, Homo sapien
gatctggtaagttgtgtgtactgca

SEQ ID NO: 3200769 - DNA, 25 bp, Homo sapien
ttgttgcattctcgggtacctgcat

SEQ ID NO: 3200770 - DNA, 25 bp, Homo sapien
ggtaagttgtgtgtactgcaagttc

SEQ ID NO: 3200771 - DNA, 25 bp, Homo sapien
gatttctggatgttacttttgtgat

SEQ ID NO: 3200772 - DNA, 25 bp, Homo sapien
ggatttctggatgttacttttgtga

SEQ ID NO: 3200773 - DNA, 25 bp, Homo sapien
atttctggatgttacttttgtgatt

SEQ ID NO: 3200774 - DNA, 25 bp, Homo sapien
caaataattgtaacggattgacact

SEQ ID NO: 3200775 - DNA, 25 bp, Homo sapien
ttattgaaccgccatcagctggccg

SEQ ID NO: 3200776 - DNA, 25 bp, Homo sapien
ttgaaccgccatcagctggccgtgg

SEQ ID NO: 3200777 - DNA, 25 bp, Homo sapien
acggattgacactgactcctccaca

SEQ ID NO: 3200778 - DNA, 25 bp, Homo sapien
cttctgccaggtcattagctcgtct

SEQ ID NO: 3200779 - DNA, 25 bp, Homo sapien
gccaggtcattagctcgtcttacac

SEQ ID NO: 3200780 - DNA, 25 bp, Homo sapien
ctgtagacatccagtcttctgccag

SEQ ID NO: 3200781 - DNA, 25 bp, Homo sapien
tcttacacctactatacttctggag

SEQ ID NO: 3200782 - DNA, 25 bp, Homo sapien
cctggtgtaattgacaagagttgaa

SEQ ID NO: 3200783 - DNA, 25 bp, Homo sapien
cactctccacataagactggttgaa

SEQ ID NO: 3200784 - DNA, 25 bp, Homo sapien
cacataagactggttgaacctggtg

SEQ ID NO: 3200785 - DNA, 25 bp, Homo sapien
gaccacactctccacataagactgg

SEQ ID NO: 3200786 - DNA, 25 bp, Homo sapien
ttgttcatcttcaatttgcctttct

SEQ ID NO: 3200787 - DNA, 25 bp, Homo sapien
ttatcggaagcattggttgacataa

SEQ ID NO: 3200788 - DNA, 25 bp, Homo sapien
tgggggctgcaagcagggtttcctg

SEQ ID NO: 3200789 - DNA, 25 bp, Homo sapien
tatcggaagcattggttgacataaa

SEQ ID NO: 3200790 - DNA, 25 bp, Homo sapien
gaagtaagtcatcgggtagatggtt

SEQ ID NO: 3200791 - DNA, 25 bp, Homo sapien
gcccacagtattctgaagtaagtca

SEQ ID NO: 3200792 - DNA, 25 bp, Homo sapien
gctgttgcccacagtattctgaagt

SEQ ID NO: 3200793 - DNA, 25 bp, Homo sapien
tattctgaagtaagtcatcgggtag

SEQ ID NO: 3200794 - DNA, 25 bp, Homo sapien
caggtcattagagctccacaaatca

SEQ ID NO: 3200795 - DNA, 25 bp, Homo sapien
aggtcattagagctccacaaatcaa

SEQ ID NO: 3200796 - DNA, 25 bp, Homo sapien
gtcattagagctccacaaatcaatg

SEQ ID NO: 3200797 - DNA, 25 bp, Homo sapien
ggtcattagagctccacaaatcaat

SEQ ID NO: 3200798 - DNA, 25 bp, Homo sapien
tcctacatgtgtttgcccgaactgc

SEQ ID NO: 3200799 - DNA, 25 bp, Homo sapien
tcgagtctctccaccccagaagggc

SEQ ID NO: 3200800 - DNA, 25 bp, Homo sapien
gagagccccatacccatcctcgagt

SEQ ID NO: 3200801 - DNA, 25 bp, Homo sapien
cagaagggcaatgcttgttcatcat

SEQ ID NO: 3200802 - DNA, 25 bp, Homo sapien
gagtccttcagcactcataggtgat

SEQ ID NO: 3200803 - DNA, 25 bp, Homo sapien
ttcagcactcataggtgatgccagc

SEQ ID NO: 3200804 - DNA, 25 bp, Homo sapien
agcactcataggtgatgccagcaga

SEQ ID NO: 3200805 - DNA, 25 bp, Homo sapien
ctcataggtgatgccagcagagacc

SEQ ID NO: 3200806 - DNA, 25 bp, Homo sapien
gagcctccttgaaaagacctcatgc

SEQ ID NO: 3200807 - DNA, 25 bp, Homo sapien
cctccttgaaaagacctcatgcttt

SEQ ID NO: 3200808 - DNA, 25 bp, Homo sapien
tccttgaaaagacctcatgcttttg

SEQ ID NO: 3200809 - DNA, 25 bp, Homo sapien
gcctccttgaaaagacctcatgctt

SEQ ID NO: 3200810 - DNA, 25 bp, Homo sapien
catttcattgccagtgctcaggtat

SEQ ID NO: 3200811 - DNA, 25 bp, Homo sapien
gctcaggtatatctgggcacatttg

SEQ ID NO: 3200812 - DNA, 25 bp, Homo sapien
cctttgtagaagttgagtccagtca

SEQ ID NO: 3200813 - DNA, 25 bp, Homo sapien
gggatcttaaaccatgtttgagcct

SEQ ID NO: 3200814 - DNA, 25 bp, Homo sapien
cttcatgagctttgggtttgatcat

SEQ ID NO: 3200815 - DNA, 25 bp, Homo sapien
agcttcatgagctttgggtttgatc

SEQ ID NO: 3200816 - DNA, 25 bp, Homo sapien
gcttcatgagctttgggtttgatca

SEQ ID NO: 3200817 - DNA, 25 bp, Homo sapien
cagcttcatgagctttgggtttgat

SEQ ID NO: 3200818 - DNA, 25 bp, Homo sapien
ctgcaacacctcagggtcatctttc

SEQ ID NO: 3200819 - DNA, 25 bp, Homo sapien
ctgcaggagtaattgaagcaggctc

SEQ ID NO: 3200820 - DNA, 25 bp, Homo sapien
caggagtaattgaagcaggctctgc

SEQ ID NO: 3200821 - DNA, 25 bp, Homo sapien
tgcaacacctcagggtcatctttct

SEQ ID NO: 3200822 - DNA, 25 bp, Homo sapien
atgctctgcttcccctgcctctgag

SEQ ID NO: 3200823 - DNA, 25 bp, Homo sapien
tctgcttcccctgcctctgagctgc

SEQ ID NO: 3200824 - DNA, 25 bp, Homo sapien
gctctgcttcccctgcctctgagct

SEQ ID NO: 3200825 - DNA, 25 bp, Homo sapien
ctctgcttcccctgcctctgagctg

SEQ ID NO: 3200826 - DNA, 25 bp, Homo sapien
tgtctcacaagttctgcgtgccttg

SEQ ID NO: 3200827 - DNA, 25 bp, Homo sapien
acaagttctgcgtgccttgtgcccc

SEQ ID NO: 3200828 - DNA, 25 bp, Homo sapien
tttcctgactcccacaggcctgttc

SEQ ID NO: 3200829 - DNA, 25 bp, Homo sapien
gctctgcctgtctcacaagttctgc

SEQ ID NO: 3200830 - DNA, 25 bp, Homo sapien
ctgcaccacttctttatctctgtcc

SEQ ID NO: 3200831 - DNA, 25 bp, Homo sapien
tgcaccacttctttatctctgtcct

SEQ ID NO: 3200832 - DNA, 25 bp, Homo sapien
cctgcaccacttctttatctctgtc

SEQ ID NO: 3200833 - DNA, 25 bp, Homo sapien
gctttttaagctgacattgcaaccc

SEQ ID NO: 3200834 - DNA, 25 bp, Homo sapien
taaaaactgagtatctatgtcctgg

SEQ ID NO: 3200835 - DNA, 25 bp, Homo sapien
ttgctcactgccttgaagttaggta

SEQ ID NO: 3200836 - DNA, 25 bp, Homo sapien
tgggatgtgttcatggaacctagaa

SEQ ID NO: 3200837 - DNA, 25 bp, Homo sapien
aattcttcgtataggacttcctgcc

SEQ ID NO: 3200838 - DNA, 25 bp, Homo sapien
tggccagatcaactatgcatgtata

SEQ ID NO: 3200839 - DNA, 25 bp, Homo sapien
ggacccagtgtttatgccggaataa

SEQ ID NO: 3200840 - DNA, 25 bp, Homo sapien
gcatgtataattcttcgtataggac

SEQ ID NO: 3200841 - DNA, 25 bp, Homo sapien
ccatacatacactttgcttgtgcat

SEQ ID NO: 3200842 - DNA, 25 bp, Homo sapien
ccgtgcatagtccatacatacactt

SEQ ID NO: 3200843 - DNA, 25 bp, Homo sapien
ctggtccgtgcatagtccatacata

SEQ ID NO: 3200844 - DNA, 25 bp, Homo sapien
ggtccgtgcatagtccatacataca

SEQ ID NO: 3200845 - DNA, 25 bp, Homo sapien
cttttgttgggtacagtgttcttca

SEQ ID NO: 3200846 - DNA, 25 bp, Homo sapien
cttcagtttccaaacttcagcacca

SEQ ID NO: 3200847 - DNA, 25 bp, Homo sapien
gggtacagtgttcttcagtttccaa

SEQ ID NO: 3200848 - DNA, 25 bp, Homo sapien
ttcagtttccaaacttcagcaccag

SEQ ID NO: 3200849 - DNA, 25 bp, Homo sapien
cctgaaccatgctccattttcctgg

SEQ ID NO: 3200850 - DNA, 25 bp, Homo sapien
tctgatacttgtctggggccgctct

SEQ ID NO: 3200851 - DNA, 25 bp, Homo sapien
cacttatctgtagcctgagtgagtt

SEQ ID NO: 3200852 - DNA, 25 bp, Homo sapien
cacttgtactcctatccttacaaca

SEQ ID NO: 3200853 - DNA, 25 bp, Homo sapien
gcacgtggatcttttcccttaaata

SEQ ID NO: 3200854 - DNA, 25 bp, Homo sapien
ttaaatacggtttgctcaattctcc

SEQ ID NO: 3200855 - DNA, 25 bp, Homo sapien
tcctgtgtccctgctcttgccttct

SEQ ID NO: 3200856 - DNA, 25 bp, Homo sapien
taccacattatctgcacgtggatct

SEQ ID NO: 3200857 - DNA, 25 bp, Homo sapien
ttctgaatcatggagtaatccgaga

SEQ ID NO: 3200858 - DNA, 25 bp, Homo sapien
tgaatcatggagtaatccgagaggc

SEQ ID NO: 3200859 - DNA, 25 bp, Homo sapien
tcatggagtaatccgagaggcccat

SEQ ID NO: 3200860 - DNA, 25 bp, Homo sapien
agtaatccgagaggcccattaggtc

SEQ ID NO: 3200861 - DNA, 25 bp, Homo sapien
gattctattctgtaatctctggctg

SEQ ID NO: 3200862 - DNA, 25 bp, Homo sapien
gttctcatggccaaatgaaagctct

SEQ ID NO: 3200863 - DNA, 25 bp, Homo sapien
cattagaaacttcactgcttaacag

SEQ ID NO: 3200864 - DNA, 25 bp, Homo sapien
ctttgttctcatggccaaatgaaag

SEQ ID NO: 3200865 - DNA, 25 bp, Homo sapien
tttttgattttgactgttccctata

SEQ ID NO: 3200866 - DNA, 25 bp, Homo sapien
gattttgactgttccctataactat

SEQ ID NO: 3200867 - DNA, 25 bp, Homo sapien
ttgactgttccctataactatcttg

SEQ ID NO: 3200868 - DNA, 25 bp, Homo sapien
tgttccctataactatcttgattgc

SEQ ID NO: 3200869 - DNA, 25 bp, Homo sapien
ctgctagatctagatggtaaaggtc

SEQ ID NO: 3200870 - DNA, 25 bp, Homo sapien
cgatcaactggactaaggtttattt

SEQ ID NO: 3200871 - DNA, 25 bp, Homo sapien
gtaaaggtctaggaggatgtatgaa

SEQ ID NO: 3200872 - DNA, 25 bp, Homo sapien
aatttactgctagatctagatggta

SEQ ID NO: 3200873 - DNA, 25 bp, Homo sapien
cctcgtctgtgaaggctggagcaaa

SEQ ID NO: 3200874 - DNA, 25 bp, Homo sapien
gagacatgccgaggctaagggacca

SEQ ID NO: 3200875 - DNA, 25 bp, Homo sapien
gaagactgacactagtcccgaagag

SEQ ID NO: 3200876 - DNA, 25 bp, Homo sapien
tggcagggccctgtatctgaagact

SEQ ID NO: 3200877 - DNA, 25 bp, Homo sapien
tctctgaacaggctatgctcattct

SEQ ID NO: 3200878 - DNA, 25 bp, Homo sapien
tgagtgtctctgaacaggctatgct

SEQ ID NO: 3200879 - DNA, 25 bp, Homo sapien
agcaggacaggtatcgcaggcatga

SEQ ID NO: 3200880 - DNA, 25 bp, Homo sapien
caggacaggtatcgcaggcatgagt

SEQ ID NO: 3200881 - DNA, 25 bp, Homo sapien
aactcatcatttccgtcagaaacat

SEQ ID NO: 3200882 - DNA, 25 bp, Homo sapien
catcatttccgtcagaaacattact

SEQ ID NO: 3200883 - DNA, 25 bp, Homo sapien
aaactcatcatttccgtcagaaaca

SEQ ID NO: 3200884 - DNA, 25 bp, Homo sapien
ctcatcatttccgtcagaaacatta

SEQ ID NO: 3200885 - DNA, 25 bp, Homo sapien
cgtcagttcaggtgactgacaagca

SEQ ID NO: 3200886 - DNA, 25 bp, Homo sapien
cgacattggctgtcctaaggacact

SEQ ID NO: 3200887 - DNA, 25 bp, Homo sapien
ggaagtgaatccaatgcttcaaaca

SEQ ID NO: 3200888 - DNA, 25 bp, Homo sapien
gctgcagtgtccagacgacattggc

SEQ ID NO: 3200889 - DNA, 25 bp, Homo sapien
ctgtgactgagtataaaggagggca

SEQ ID NO: 3200890 - DNA, 25 bp, Homo sapien
gacagtctgtgactgagtataaagg

SEQ ID NO: 3200891 - DNA, 25 bp, Homo sapien
gactgagtataaaggagggcatcta

SEQ ID NO: 3200892 - DNA, 25 bp, Homo sapien
tataaaggagggcatctacaagcat

SEQ ID NO: 3200893 - DNA, 25 bp, Homo sapien
cagtgtgatctgcaactccctctct

SEQ ID NO: 3200894 - DNA, 25 bp, Homo sapien
gcctttgtagaggtgacaatgtggt

SEQ ID NO: 3200895 - DNA, 25 bp, Homo sapien
tctttaaaaggcacatcacggcctt

SEQ ID NO: 3200896 - DNA, 25 bp, Homo sapien
gactggcattggaaaatgctcagtg

SEQ ID NO: 3200897 - DNA, 25 bp, Homo sapien
gatgccttctcaagtacacgttgcc

SEQ ID NO: 3200898 - DNA, 25 bp, Homo sapien
ttgttgatgccttctcaagtacacg

SEQ ID NO: 3200899 - DNA, 25 bp, Homo sapien
tcaagtacacgttgcctttcaaatt

SEQ ID NO: 3200900 - DNA, 25 bp, Homo sapien
gccttctcaagtacacgttgccttt

SEQ ID NO: 3200901 - DNA, 25 bp, Homo sapien
catccggaaatgttgggttggatct

SEQ ID NO: 3200902 - DNA, 25 bp, Homo sapien
tggatcttttattgtgctgtccatt

SEQ ID NO: 3200903 - DNA, 25 bp, Homo sapien
gagcagaaggtgcatttaagctggt

SEQ ID NO: 3200904 - DNA, 25 bp, Homo sapien
cacattcaatatttcctacatccgg

SEQ ID NO: 3200905 - DNA, 25 bp, Homo sapien
ggcctgtgacaatagaattcagttt

SEQ ID NO: 3200906 - DNA, 25 bp, Homo sapien
taggcctgtgacaatagaattcagt

SEQ ID NO: 3200907 - DNA, 25 bp, Homo sapien
tttataataggcctgtgacaataga

SEQ ID NO: 3200908 - DNA, 25 bp, Homo sapien
taataggcctgtgacaatagaattc

SEQ ID NO: 3200909 - DNA, 25 bp, Homo sapien
ctcagaacagagatactcttgaggt

SEQ ID NO: 3200910 - DNA, 25 bp, Homo sapien
aggacgttgacaatttactcagaac

SEQ ID NO: 3200911 - DNA, 25 bp, Homo sapien
cagagatactcttgaggtcagtgaa

SEQ ID NO: 3200912 - DNA, 25 bp, Homo sapien
cagtaaaaatggaggacgttgacaa

SEQ ID NO: 3200913 - DNA, 25 bp, Homo sapien
tgactgaagaactttaagcaggaac

SEQ ID NO: 3200914 - DNA, 25 bp, Homo sapien
tccccaggattgaattctttaggca

SEQ ID NO: 3200915 - DNA, 25 bp, Homo sapien
gaactcgaggcatatccgtttgatg

SEQ ID NO: 3200916 - DNA, 25 bp, Homo sapien
tccgtttgatggttgtatgtgtggc

SEQ ID NO: 3200917 - DNA, 25 bp, Homo sapien
agttctttgcctcagacctgattcc

SEQ ID NO: 3200918 - DNA, 25 bp, Homo sapien
aagttctttgcctcagacctgattc

SEQ ID NO: 3200919 - DNA, 25 bp, Homo sapien
gttctttgcctcagacctgattccc

SEQ ID NO: 3200920 - DNA, 25 bp, Homo sapien
ttctttgcctcagacctgattccca

SEQ ID NO: 3200921 - DNA, 25 bp, Homo sapien
ctttgccagaatctgctcaggggaa

SEQ ID NO: 3200922 - DNA, 25 bp, Homo sapien
gggagtgtatgcattgaccttcatg

SEQ ID NO: 3200923 - DNA, 25 bp, Homo sapien
cagggtggaggtgcctcttctttgc

SEQ ID NO: 3200924 - DNA, 25 bp, Homo sapien
ctggagggggagtgtatgcattgac

SEQ ID NO: 3200925 - DNA, 25 bp, Homo sapien
caactggaactttttacgagtgtga

SEQ ID NO: 3200926 - DNA, 25 bp, Homo sapien
tcaactggaactttttacgagtgtg

SEQ ID NO: 3200927 - DNA, 25 bp, Homo sapien
tagtctgagaagcagggactttggg

SEQ ID NO: 3200928 - DNA, 25 bp, Homo sapien
gactttgggctcagaggtaaggcct

SEQ ID NO: 3200929 - DNA, 25 bp, Homo sapien
atgtttgttttgattggcaatcagc

SEQ ID NO: 3200930 - DNA, 25 bp, Homo sapien
tttgattggcaatcagcatgtttag

SEQ ID NO: 3200931 - DNA, 25 bp, Homo sapien
taataggttcccatgactttcagga

SEQ ID NO: 3200932 - DNA, 25 bp, Homo sapien
aaccttgtaataggttcccatgact

SEQ ID NO: 3200933 - DNA, 25 bp, Homo sapien
tcaggataagcaccttagcagagaa

SEQ ID NO: 3200934 - DNA, 25 bp, Homo sapien
taagcaccttagcagagaatgcagt

SEQ ID NO: 3200935 - DNA, 25 bp, Homo sapien
ctgatgtgcttggagaataacttat

SEQ ID NO: 3200936 - DNA, 25 bp, Homo sapien
ttctgatgtgcttggagaataactt

SEQ ID NO: 3200937 - DNA, 25 bp, Homo sapien
cttctgatgtgcttggagaataact

SEQ ID NO: 3200938 - DNA, 25 bp, Homo sapien
tctgatgtgcttggagaataactta

SEQ ID NO: 3200939 - DNA, 25 bp, Homo sapien
gttggcaggtagtgaatgttcagaa

SEQ ID NO: 3200940 - DNA, 25 bp, Homo sapien
ctgttgtgtcccactagtatactga

SEQ ID NO: 3200941 - DNA, 25 bp, Homo sapien
atggaaacctagtgatgccagcagg

SEQ ID NO: 3200942 - DNA, 25 bp, Homo sapien
cccactagtatactgatggaaacct

SEQ ID NO: 3200943 - DNA, 25 bp, Homo sapien
tactgatggaaacctagtgatgcca

SEQ ID NO: 3200944 - DNA, 25 bp, Homo sapien
tctgtatctttacctgtaaccagtg

SEQ ID NO: 3200945 - DNA, 25 bp, Homo sapien
gttctgtatctttacctgtaaccag

SEQ ID NO: 3200946 - DNA, 25 bp, Homo sapien
tatctttacctgtaaccagtgatag

SEQ ID NO: 3200947 - DNA, 25 bp, Homo sapien
ctgttctgtatctttacctgtaacc

SEQ ID NO: 3200948 - DNA, 25 bp, Homo sapien
tctccagcaacagctgtatcaaatg

SEQ ID NO: 3200949 - DNA, 25 bp, Homo sapien
ttattctccagcaacagctgtatca

SEQ ID NO: 3200950 - DNA, 25 bp, Homo sapien
ccagcaacagctgtatcaaatgaaa

SEQ ID NO: 3200951 - DNA, 25 bp, Homo sapien
tattctccagcaacagctgtatcaa

SEQ ID NO: 3200952 - DNA, 25 bp, Homo sapien
gtggaaaccattcacacactttctt

SEQ ID NO: 3200953 - DNA, 25 bp, Homo sapien
ggtggaaaccattcacacactttct

SEQ ID NO: 3200954 - DNA, 25 bp, Homo sapien
tgtggtggaaaccattcacacactt

SEQ ID NO: 3200955 - DNA, 25 bp, Homo sapien
tggtggaaaccattcacacactttc

SEQ ID NO: 3200956 - DNA, 25 bp, Homo sapien
ttgataggttcagactcaatccagt

SEQ ID NO: 3200957 - DNA, 25 bp, Homo sapien
gagtttggttcccatctcccttgct

SEQ ID NO: 3200958 - DNA, 25 bp, Homo sapien
ttgctccattgataggttcagactc

SEQ ID NO: 3200959 - DNA, 25 bp, Homo sapien
taggttcagactcaatccagtcaac

SEQ ID NO: 3200960 - DNA, 25 bp, Homo sapien
cacccttcctaaatactgtaaatga

SEQ ID NO: 3200961 - DNA, 25 bp, Homo sapien
tcttagcaaggtctgctcaatttct

SEQ ID NO: 3200962 - DNA, 25 bp, Homo sapien
cctgcttggatttctaatagtctta

SEQ ID NO: 3200963 - DNA, 25 bp, Homo sapien
gactatttgggctgtgagttttaaa

SEQ ID NO: 3200964 - DNA, 25 bp, Homo sapien
atttttggtttaggacaggttgcag

SEQ ID NO: 3200965 - DNA, 25 bp, Homo sapien
gctgatgttccctagtgttggacat

SEQ ID NO: 3200966 - DNA, 25 bp, Homo sapien
caaagaggcctgtccttcagtctgc

SEQ ID NO: 3200967 - DNA, 25 bp, Homo sapien
tcagtctgctgatgttccctagtgt

SEQ ID NO: 3200968 - DNA, 25 bp, Homo sapien
aagaggcctgtccttcagtctgctg

SEQ ID NO: 3200969 - DNA, 25 bp, Homo sapien
tgggctcgtggtcttgctgggctca

SEQ ID NO: 3200970 - DNA, 25 bp, Homo sapien
gtgggctcgtggtcttgctgggctc

SEQ ID NO: 3200971 - DNA, 25 bp, Homo sapien
ggtgcgtctggagtctgtcccttct

SEQ ID NO: 3200972 - DNA, 25 bp, Homo sapien
taaggtggtgcgtctggagtctgtc

SEQ ID NO: 3200973 - DNA, 25 bp, Homo sapien
agtctccagtagctgtgcattacca

SEQ ID NO: 3200974 - DNA, 25 bp, Homo sapien
cctcatttagctcttcagtctccag

SEQ ID NO: 3200975 - DNA, 25 bp, Homo sapien
aactgctttctttacttggccacct

SEQ ID NO: 3200976 - DNA, 25 bp, Homo sapien
ctgctttctttacttggccaccttc

SEQ ID NO: 3200977 - DNA, 25 bp, Homo sapien
gctttctttacttggccaccttcta

SEQ ID NO: 3200978 - DNA, 25 bp, Homo sapien
tgctttctttacttggccaccttct

SEQ ID NO: 3200979 - DNA, 25 bp, Homo sapien
acatccatgggacataaagcaaatt

SEQ ID NO: 3200980 - DNA, 25 bp, Homo sapien
tattaaggaatacgtaatagtcctc

SEQ ID NO: 3200981 - DNA, 25 bp, Homo sapien
gaatacgtaatagtcctctcttctc

SEQ ID NO: 3200982 - DNA, 25 bp, Homo sapien
tttcttggcttgagatattaaggaa

SEQ ID NO: 3200983 - DNA, 25 bp, Homo sapien
gtgaggaggagccaaatcttttcca

SEQ ID NO: 3200984 - DNA, 25 bp, Homo sapien
gccaaatcttttccagtacagccaa

SEQ ID NO: 3200985 - DNA, 25 bp, Homo sapien
ccaagagtggtgtagatgtggcacc

SEQ ID NO: 3200986 - DNA, 25 bp, Homo sapien
tggtgtagatgtggcaccaaaggca

SEQ ID NO: 3200987 - DNA, 25 bp, Homo sapien
aaagtaggagccaagactattgagt

SEQ ID NO: 3200988 - DNA, 25 bp, Homo sapien
gaaacatgttctagtgtatctatac

SEQ ID NO: 3200989 - DNA, 25 bp, Homo sapien
tggatgcgaggtattgtaaaagtag

SEQ ID NO: 3200990 - DNA, 25 bp, Homo sapien
cctctctaaagttagcatgtatgta

SEQ ID NO: 3200991 - DNA, 25 bp, Homo sapien
aaatatgtgacttgaagctagacag

SEQ ID NO: 3200992 - DNA, 25 bp, Homo sapien
gaactcaaagcatcccagattccaa

SEQ ID NO: 3200993 - DNA, 25 bp, Homo sapien
agtctttgccccttctctgaaattg

SEQ ID NO: 3200994 - DNA, 25 bp, Homo sapien
tagagtggcaataacagtacagtgg

SEQ ID NO: 3200995 - DNA, 25 bp, Homo sapien
ttccttctctgtctgttactatttt

SEQ ID NO: 3200996 - DNA, 25 bp, Homo sapien
ttaacttctctttcaattgtctgca

SEQ ID NO: 3200997 - DNA, 25 bp, Homo sapien
tctctgtctgttactattttaactt

SEQ ID NO: 3200998 - DNA, 25 bp, Homo sapien
tttaacttctctttcaattgtctgc

SEQ ID NO: 3200999 - DNA, 25 bp, Homo sapien
taatcttgcagacatagtcaattct

SEQ ID NO: 3201000 - DNA, 25 bp, Homo sapien
tgctctgttaatcttgcagacatag

SEQ ID NO: 3201001 - DNA, 25 bp, Homo sapien
gcagacatagtcaattctgactttc

SEQ ID NO: 3201002 - DNA, 25 bp, Homo sapien
ctccttttgctctgttaatcttgca

SEQ ID NO: 3201003 - DNA, 25 bp, Homo sapien
catatcacattttcctccaacttct

SEQ ID NO: 3201004 - DNA, 25 bp, Homo sapien
aattgttttcctggtataatccata

SEQ ID NO: 3201005 - DNA, 25 bp, Homo sapien
gttttcctggtataatccatatcac

SEQ ID NO: 3201006 - DNA, 25 bp, Homo sapien
tcttcccaaatagtttcttcagcca

SEQ ID NO: 3201007 - DNA, 25 bp, Homo sapien
gctgtaagaacacgctctgctaaga

SEQ ID NO: 3201008 - DNA, 25 bp, Homo sapien
gaacacgctctgctaagaatctgtc

SEQ ID NO: 3201009 - DNA, 25 bp, Homo sapien
aaatgtccacagctgtaagaacacg

SEQ ID NO: 3201010 - DNA, 25 bp, Homo sapien
cacagctgtaagaacacgctctgct

SEQ ID NO: 3201011 - DNA, 25 bp, Homo sapien
atgtgaggtgtcagtctgcccttac

SEQ ID NO: 3201012 - DNA, 25 bp, Homo sapien
tgcctgggtatcagaagtagtggct

SEQ ID NO: 3201013 - DNA, 25 bp, Homo sapien
gaacagtggatatttgtgaacagcc

SEQ ID NO: 3201014 - DNA, 25 bp, Homo sapien
cagtggatatttgtgaacagccaat

SEQ ID NO: 3201015 - DNA, 25 bp, Homo sapien
aaattggctactgaggtttgtacat

SEQ ID NO: 3201016 - DNA, 25 bp, Homo sapien
gttgatcaaattggctactgaggtt

SEQ ID NO: 3201017 - DNA, 25 bp, Homo sapien
atcaaattggctactgaggtttgta

SEQ ID NO: 3201018 - DNA, 25 bp, Homo sapien
tgatcaaattggctactgaggtttg

SEQ ID NO: 3201019 - DNA, 25 bp, Homo sapien
tgatataatttccatcaaggctcat

SEQ ID NO: 3201020 - DNA, 25 bp, Homo sapien
ctgtgtaatattcttcctgttcact

SEQ ID NO: 3201021 - DNA, 25 bp, Homo sapien
tcaatgatgactctgacttatggtc

SEQ ID NO: 3201022 - DNA, 25 bp, Homo sapien
gaattcaatgatgactctgacttat

SEQ ID NO: 3201023 - DNA, 25 bp, Homo sapien
gtaagaattcaatgatgactctgac

SEQ ID NO: 3201024 - DNA, 25 bp, Homo sapien
cagctaaggagctaaactgacttat

SEQ ID NO: 3201025 - DNA, 25 bp, Homo sapien
tgcctgtggattggtagatgtgtaa

SEQ ID NO: 3201026 - DNA, 25 bp, Homo sapien
ggcagctaaggagctaaactgactt

SEQ ID NO: 3201027 - DNA, 25 bp, Homo sapien
ggcttaggtagtaaccagttactgc

SEQ ID NO: 3201028 - DNA, 25 bp, Homo sapien
ttttatataattaaaaatgcatcac

SEQ ID NO: 3201029 - DNA, 25 bp, Homo sapien
tatataattaaaaatgcatcaccat

SEQ ID NO: 3201030 - DNA, 25 bp, Homo sapien
ggatacaaaatgttctaattttata

SEQ ID NO: 3201031 - DNA, 25 bp, Homo sapien
ctggatacaaaatgttctaatttta

SEQ ID NO: 3201032 - DNA, 25 bp, Homo sapien
tggagggtcaggtgatatcacatct

SEQ ID NO: 3201033 - DNA, 25 bp, Homo sapien
acatctaggtcactcttttctactg

SEQ ID NO: 3201034 - DNA, 25 bp, Homo sapien
acagtgctagtaaacttcctgtgct

SEQ ID NO: 3201035 - DNA, 25 bp, Homo sapien
tcttttgtaggaggaaaatgcctac

SEQ ID NO: 3201036 - DNA, 25 bp, Homo sapien
ttactaattgggaatcataacaagc

SEQ ID NO: 3201037 - DNA, 25 bp, Homo sapien
gggcagtttactaattgggaatcat

SEQ ID NO: 3201038 - DNA, 25 bp, Homo sapien
ggcagtttactaattgggaatcata

SEQ ID NO: 3201039 - DNA, 25 bp, Homo sapien
ttgggaatcataacaagctttgact

SEQ ID NO: 3201040 - DNA, 25 bp, Homo sapien
cacctgtgtaatgtctgaccatggc

SEQ ID NO: 3201041 - DNA, 25 bp, Homo sapien
tgtctagagctttagccctgaaaac

SEQ ID NO: 3201042 - DNA, 25 bp, Homo sapien
taactaagcatgcttggcttggctc

SEQ ID NO: 3201043 - DNA, 25 bp, Homo sapien
catggcctggatccttgtatctcca

SEQ ID NO: 3201044 - DNA, 25 bp, Homo sapien
acagaaaaggtttagcgtagggctg

SEQ ID NO: 3201045 - DNA, 25 bp, Homo sapien
cagaaaaggtttagcgtagggctgg

SEQ ID NO: 3201046 - DNA, 25 bp, Homo sapien
cctgtgattcgaacatgccattcag

SEQ ID NO: 3201047 - DNA, 25 bp, Homo sapien
aagtcttgagggaagggcacggcat

SEQ ID NO: 3201048 - DNA, 25 bp, Homo sapien
tctgaaagccacacaacaaaggtag

SEQ ID NO: 3201049 - DNA, 25 bp, Homo sapien
ggcttgtattactctgggttgatct

SEQ ID NO: 3201050 - DNA, 25 bp, Homo sapien
ctgccagatgctgacctttcttcat

SEQ ID NO: 3201051 - DNA, 25 bp, Homo sapien
tgctggggaatccaaagggctccca

SEQ ID NO: 3201052 - DNA, 25 bp, Homo sapien
ctagggagttgagttccaggtgtgc

SEQ ID NO: 3201053 - DNA, 25 bp, Homo sapien
ccaaagggctcccaagctgccagaa

SEQ ID NO: 3201054 - DNA, 25 bp, Homo sapien
tcccaagctgccagaatgcactcag

SEQ ID NO: 3201055 - DNA, 25 bp, Homo sapien
ctgccaaaccaagggtggtagacct

SEQ ID NO: 3201056 - DNA, 25 bp, Homo sapien
cctgggggaataggacctactcttg

SEQ ID NO: 3201057 - DNA, 25 bp, Homo sapien
tagatctcggcttgacactgccaaa

SEQ ID NO: 3201058 - DNA, 25 bp, Homo sapien
tccagcgctgggcatagatctcggc

SEQ ID NO: 3201059 - DNA, 25 bp, Homo sapien
gccatgctggaaccatgatcttgaa

SEQ ID NO: 3201060 - DNA, 25 bp, Homo sapien
agccatgctggaaccatgatcttga

SEQ ID NO: 3201061 - DNA, 25 bp, Homo sapien
ccatgctggaaccatgatcttgaac

SEQ ID NO: 3201062 - DNA, 25 bp, Homo sapien
cacactggaaaattgcaggcttggc

SEQ ID NO: 3201063 - DNA, 25 bp, Homo sapien
tagaagctctgtgtatgcatgctca

SEQ ID NO: 3201064 - DNA, 25 bp, Homo sapien
taacaggatgacttgagcagaggca

SEQ ID NO: 3201065 - DNA, 25 bp, Homo sapien
caggcttggcgagtgtccaggtaaa

SEQ ID NO: 3201066 - DNA, 25 bp, Homo sapien
taatgtcagaggcttgagtaaggtt

SEQ ID NO: 3201067 - DNA, 25 bp, Homo sapien
gtcagaggcttgagtaaggttaaaa

SEQ ID NO: 3201068 - DNA, 25 bp, Homo sapien
ttataatgtcagaggcttgagtaag

SEQ ID NO: 3201069 - DNA, 25 bp, Homo sapien
agaggggttactgctctctggtatc

SEQ ID NO: 3201070 - DNA, 25 bp, Homo sapien
ggaggaaactctcaagggcctctga

SEQ ID NO: 3201071 - DNA, 25 bp, Homo sapien
ctagcgctgcaaacaagggaggagt

SEQ ID NO: 3201072 - DNA, 25 bp, Homo sapien
ggaaactctcaagggcctctgaggc

SEQ ID NO: 3201073 - DNA, 25 bp, Homo sapien
ctgcagcttctagcgctgcaaacaa

SEQ ID NO: 3201074 - DNA, 25 bp, Homo sapien
aggcgccgcccccagtgtaggaact

SEQ ID NO: 3201075 - DNA, 25 bp, Homo sapien
gtccaggcgccgcccccagtgtagg

SEQ ID NO: 3201076 - DNA, 25 bp, Homo sapien
ttggccagggacacccgcgtccagg

SEQ ID NO: 3201077 - DNA, 25 bp, Homo sapien
gcgtccaggcgccgcccccagtgta

SEQ ID NO: 3201078 - DNA, 25 bp, Homo sapien
ctagtgcgggatgcagctcttcacc

SEQ ID NO: 3201079 - DNA, 25 bp, Homo sapien
tgcgggatgcagctcttcaccctcc

SEQ ID NO: 3201080 - DNA, 25 bp, Homo sapien
tagtgcgggatgcagctcttcaccc

SEQ ID NO: 3201081 - DNA, 25 bp, Homo sapien
agtgcgggatgcagctcttcaccct

SEQ ID NO: 3201082 - DNA, 25 bp, Homo sapien
atgcccactggagactcgctacagg

SEQ ID NO: 3201083 - DNA, 25 bp, Homo sapien
ccacctgaaacatgcccactggaga

SEQ ID NO: 3201084 - DNA, 25 bp, Homo sapien
ctccgacgcgcggaagccaagggct

SEQ ID NO: 3201085 - DNA, 25 bp, Homo sapien
tccacgtctgggtttctccggtgtc

SEQ ID NO: 3201086 - DNA, 25 bp, Homo sapien
aggacacgctgcactgagtccaggt

SEQ ID NO: 3201087 - DNA, 25 bp, Homo sapien
gacacgctgcactgagtccaggtcc

SEQ ID NO: 3201088 - DNA, 25 bp, Homo sapien
ggacacgctgcactgagtccaggtc

SEQ ID NO: 3201089 - DNA, 25 bp, Homo sapien
tcgctggcacccgattctggaaagg

SEQ ID NO: 3201090 - DNA, 25 bp, Homo sapien
gcaagaggacggtctcgccccgcgt

SEQ ID NO: 3201091 - DNA, 25 bp, Homo sapien
tcgccaacatttccggggcaagagg

SEQ ID NO: 3201092 - DNA, 25 bp, Homo sapien
cgcactaaggcgaatcccaagtcag

SEQ ID NO: 3201093 - DNA, 25 bp, Homo sapien
cagctatagcttgctaaggccgcca

SEQ ID NO: 3201094 - DNA, 25 bp, Homo sapien
tctcgcagctatagcttgctaaggc

SEQ ID NO: 3201095 - DNA, 25 bp, Homo sapien
tcaaatctcgcagctatagcttgct

SEQ ID NO: 3201096 - DNA, 25 bp, Homo sapien
tatagcttgctaaggccgccatgtt

SEQ ID NO: 3201097 - DNA, 25 bp, Homo sapien
ggaatgcaatagctacgagtggagt

SEQ ID NO: 3201098 - DNA, 25 bp, Homo sapien
cgtcaggaatgcaatagctacgagt

SEQ ID NO: 3201099 - DNA, 25 bp, Homo sapien
tcaggaatgcaatagctacgagtgg

SEQ ID NO: 3201100 - DNA, 25 bp, Homo sapien
aatgcaatagctacgagtggagtaa

SEQ ID NO: 3201101 - DNA, 25 bp, Homo sapien
gacgcgaatcgcacgaagccacaga

SEQ ID NO: 3201102 - DNA, 25 bp, Homo sapien
gaatatgaacccgagtcgctgaccc

SEQ ID NO: 3201103 - DNA, 25 bp, Homo sapien
gctcgtctgagctcggacgcgaatc

SEQ ID NO: 3201104 - DNA, 25 bp, Homo sapien
tcataatcgctactcgctgaggaat

SEQ ID NO: 3201105 - DNA, 25 bp, Homo sapien
aatcttaatagcagcccaatatata

SEQ ID NO: 3201106 - DNA, 25 bp, Homo sapien
gaaaagataatcttaatagcagccc

SEQ ID NO: 3201107 - DNA, 25 bp, Homo sapien
agataatcttaatagcagcccaata

SEQ ID NO: 3201108 - DNA, 25 bp, Homo sapien
atagcagcccaatatataaaagaaa

SEQ ID NO: 3201109 - DNA, 25 bp, Homo sapien
ttattgcagcgcttgggtaaaagtc

SEQ ID NO: 3201110 - DNA, 25 bp, Homo sapien
cacatctttgtatcgctgttggaca

SEQ ID NO: 3201111 - DNA, 25 bp, Homo sapien
ttcacagttggtgtctcaggaagga

SEQ ID NO: 3201112 - DNA, 25 bp, Homo sapien
agtacctgaccgctcttcatagcag

SEQ ID NO: 3201113 - DNA, 25 bp, Homo sapien
gccttgtagtgcaccatgtgtaacc

SEQ ID NO: 3201114 - DNA, 25 bp, Homo sapien
catttcccgcaaggtgtcatcatta

SEQ ID NO: 3201115 - DNA, 25 bp, Homo sapien
taatcaagatctctgtaaacaggga

SEQ ID NO: 3201116 - DNA, 25 bp, Homo sapien
cagggatggatgtgtaccagcaaca

SEQ ID NO: 3201117 - DNA, 25 bp, Homo sapien
tgcataggtccaggaatgcaagaca

SEQ ID NO: 3201118 - DNA, 25 bp, Homo sapien
tctctcgatgttttcagtagtaaca

SEQ ID NO: 3201119 - DNA, 25 bp, Homo sapien
tgcaagacagaactctctcgatgtt

SEQ ID NO: 3201120 - DNA, 25 bp, Homo sapien
gtaacatcgacatcattcacagcaa

SEQ ID NO: 3201121 - DNA, 25 bp, Homo sapien
gatatgaggagtgtttaggccactc

SEQ ID NO: 3201122 - DNA, 25 bp, Homo sapien
ttgaggtttctgagtcgagctgtag

SEQ ID NO: 3201123 - DNA, 25 bp, Homo sapien
ccccagagaagcttgactaaatcac

SEQ ID NO: 3201124 - DNA, 25 bp, Homo sapien
ttctgtcttggatgggacgtctccc

SEQ ID NO: 3201125 - DNA, 25 bp, Homo sapien
gctgtcctgagggctgattcccacg

SEQ ID NO: 3201126 - DNA, 25 bp, Homo sapien
cacgacagcttccatcaggacactg

SEQ ID NO: 3201127 - DNA, 25 bp, Homo sapien
gctgggagtgttgagtggtgggcag

SEQ ID NO: 3201128 - DNA, 25 bp, Homo sapien
tctgctgggagtgttgagtggtggg

SEQ ID NO: 3201129 - DNA, 25 bp, Homo sapien
tctgttcaaagcattatgtttgact

SEQ ID NO: 3201130 - DNA, 25 bp, Homo sapien
ccttgcgctgtaaaaccagatccat

SEQ ID NO: 3201131 - DNA, 25 bp, Homo sapien
ctgagagacccttgcgctgtaaaac

SEQ ID NO: 3201132 - DNA, 25 bp, Homo sapien
caaagcattatgtttgactagatgc

SEQ ID NO: 3201133 - DNA, 25 bp, Homo sapien
ctagtaacttgtgtcccagttacgt

SEQ ID NO: 3201134 - DNA, 25 bp, Homo sapien
cccagttacgttttccagcatgtca

SEQ ID NO: 3201135 - DNA, 25 bp, Homo sapien
agatgcttcagacattggataatga

SEQ ID NO: 3201136 - DNA, 25 bp, Homo sapien
tttaagtttctgagatgcttcagac

SEQ ID NO: 3201137 - DNA, 25 bp, Homo sapien
gggttgcgcatatctgtgaatacac

SEQ ID NO: 3201138 - DNA, 25 bp, Homo sapien
gcaacaccgcacagagaaacttaaa

SEQ ID NO: 3201139 - DNA, 25 bp, Homo sapien
tcatatgtaatatccagaacaggga

SEQ ID NO: 3201140 - DNA, 25 bp, Homo sapien
ggaatgcacctccttatgctaaatg

SEQ ID NO: 3201141 - DNA, 25 bp, Homo sapien
caacttgtcagattctttccaataa

SEQ ID NO: 3201142 - DNA, 25 bp, Homo sapien
caacaacttgtcagattctttccaa

SEQ ID NO: 3201143 - DNA, 25 bp, Homo sapien
agcaacaacttgtcagattctttcc

SEQ ID NO: 3201144 - DNA, 25 bp, Homo sapien
acttgtcagattctttccaataagc

SEQ ID NO: 3201145 - DNA, 25 bp, Homo sapien
catcagggcaaaatacccttctgct

SEQ ID NO: 3201146 - DNA, 25 bp, Homo sapien
aaagtacctaatgcagtccctggag

SEQ ID NO: 3201147 - DNA, 25 bp, Homo sapien
gatgtaccattagagaagtcacttt

SEQ ID NO: 3201148 - DNA, 25 bp, Homo sapien
tctgctgacccttaattctccaaaa

SEQ ID NO: 3201149 - DNA, 25 bp, Homo sapien
ccataaaaggtcttgtagcatcccc

SEQ ID NO: 3201150 - DNA, 25 bp, Homo sapien
caaacagaatggtggaaattagaaa

SEQ ID NO: 3201151 - DNA, 25 bp, Homo sapien
aaattagaaatattgtggaaatggc

SEQ ID NO: 3201152 - DNA, 25 bp, Homo sapien
aatggcagtgtatcacttttaagac

SEQ ID NO: 3201153 - DNA, 25 bp, Homo sapien
ttaattcctctccccatgagtgtgg

SEQ ID NO: 3201154 - DNA, 25 bp, Homo sapien
gtgggctgagcttggtaactcaatt

SEQ ID NO: 3201155 - DNA, 25 bp, Homo sapien
tgtgggctgagcttggtaactcaat

SEQ ID NO: 3201156 - DNA, 25 bp, Homo sapien
agtgtgggctgagcttggtaactca

SEQ ID NO: 3201157 - DNA, 25 bp, Homo sapien
cctgtttgtgatggtaaaataggtc

SEQ ID NO: 3201158 - DNA, 25 bp, Homo sapien
gtttgtgatggtaaaataggtccac

SEQ ID NO: 3201159 - DNA, 25 bp, Homo sapien
tgatggtaaaataggtccacaaatt

SEQ ID NO: 3201160 - DNA, 25 bp, Homo sapien
aattcctgtttgtgatggtaaaata

SEQ ID NO: 3201161 - DNA, 25 bp, Homo sapien
gaaccccacatttatggtggattat

SEQ ID NO: 3201162 - DNA, 25 bp, Homo sapien
catctagtatatgtcacagcgccat

SEQ ID NO: 3201163 - DNA, 25 bp, Homo sapien
tggttaaagagtgccctcatctagt

SEQ ID NO: 3201164 - DNA, 25 bp, Homo sapien
acagcgccattatccctccatgtaa

SEQ ID NO: 3201165 - DNA, 25 bp, Homo sapien
agaattttataaggtagctcttatt

SEQ ID NO: 3201166 - DNA, 25 bp, Homo sapien
gaattttataaggtagctcttatta

SEQ ID NO: 3201167 - DNA, 25 bp, Homo sapien
aattttataaggtagctcttattat

SEQ ID NO: 3201168 - DNA, 25 bp, Homo sapien
ctatctaaagaaccatacataaatt

SEQ ID NO: 3201169 - DNA, 25 bp, Homo sapien
tgaaatctttcaggcaacgtggaat

SEQ ID NO: 3201170 - DNA, 25 bp, Homo sapien
taggtagctatcacaggcaaatcac

SEQ ID NO: 3201171 - DNA, 25 bp, Homo sapien
tgcaatacagtgcaaaggaggcacg

SEQ ID NO: 3201172 - DNA, 25 bp, Homo sapien
tcaggtttgacagggatgtgcctcc

SEQ ID NO: 3201173 - DNA, 25 bp, Homo sapien
aaaaatgatccaaacgaggaacatt

SEQ ID NO: 3201174 - DNA, 25 bp, Homo sapien
ctggaagcatcgtactgctgagcac

SEQ ID NO: 3201175 - DNA, 25 bp, Homo sapien
gactggcgctggaatgcagtttcgc

SEQ ID NO: 3201176 - DNA, 25 bp, Homo sapien
ggttgtctaaaagtactgcactgga

SEQ ID NO: 3201177 - DNA, 25 bp, Homo sapien
tttccagtggaagtgtgagccaccg

SEQ ID NO: 3201178 - DNA, 25 bp, Homo sapien
caacctgactgtgaacatctagagg

SEQ ID NO: 3201179 - DNA, 25 bp, Homo sapien
aacctgactgtgaacatctagaggt

SEQ ID NO: 3201180 - DNA, 25 bp, Homo sapien
actgtttcctgtgtattaatttcac

SEQ ID NO: 3201181 - DNA, 25 bp, Homo sapien
cactgtttcctgtgtattaatttca

SEQ ID NO: 3201182 - DNA, 25 bp, Homo sapien
tcactgtttcctgtgtattaatttc

SEQ ID NO: 3201183 - DNA, 25 bp, Homo sapien
tctgcaaaatctgcagcctccaagt

SEQ ID NO: 3201184 - DNA, 25 bp, Homo sapien
cagcctccaagtcacttaatgccat

SEQ ID NO: 3201185 - DNA, 25 bp, Homo sapien
ttctgcaaaatctgcagcctccaag

SEQ ID NO: 3201186 - DNA, 25 bp, Homo sapien
cagttctgcaaaatctgcagcctcc

SEQ ID NO: 3201187 - DNA, 25 bp, Homo sapien
gagccaattcttgaggagtcctggt

SEQ ID NO: 3201188 - DNA, 25 bp, Homo sapien
tatagatgttcaacagggagcctct

SEQ ID NO: 3201189 - DNA, 25 bp, Homo sapien
tgcgatggtcactattgctaggcct

SEQ ID NO: 3201190 - DNA, 25 bp, Homo sapien
cattggccatagctaggaaatacaa

SEQ ID NO: 3201191 - DNA, 25 bp, Homo sapien
catatagctatgtaagtgccaccaa

SEQ ID NO: 3201192 - DNA, 25 bp, Homo sapien
aattgagatgtagaacagttccctc

SEQ ID NO: 3201193 - DNA, 25 bp, Homo sapien
gagtagtagtccattcctggatata

SEQ ID NO: 3201194 - DNA, 25 bp, Homo sapien
taaagttgctttgtatacaggtctt

SEQ ID NO: 3201195 - DNA, 25 bp, Homo sapien
tacagccgcctcatgtcatagtaat

SEQ ID NO: 3201196 - DNA, 25 bp, Homo sapien
aaattgtatacagccgcctcatgtc

SEQ ID NO: 3201197 - DNA, 25 bp, Homo sapien
gagaagaccccaaaattgtatacag

SEQ ID NO: 3201198 - DNA, 25 bp, Homo sapien
gaccccaaaattgtatacagccgcc

SEQ ID NO: 3201199 - DNA, 25 bp, Homo sapien
cttgggcaaatgactgcatatcaaa

SEQ ID NO: 3201200 - DNA, 25 bp, Homo sapien
gggcaaatgactgcatatcaaataa

SEQ ID NO: 3201201 - DNA, 25 bp, Homo sapien
gcaaatgactgcatatcaaataacc

SEQ ID NO: 3201202 - DNA, 25 bp, Homo sapien
tgggcaaatgactgcatatcaaata

SEQ ID NO: 3201203 - DNA, 25 bp, Homo sapien
gaggtgatgctgaggaaacacttct

SEQ ID NO: 3201204 - DNA, 25 bp, Homo sapien
cagtgcttgagtctgccaaaggtcg

SEQ ID NO: 3201205 - DNA, 25 bp, Homo sapien
caggttccggaaagacttcagtgct

SEQ ID NO: 3201206 - DNA, 25 bp, Homo sapien
gcagcaggcaatagtggcgacagta

SEQ ID NO: 3201207 - DNA, 25 bp, Homo sapien
gagaatctactccatccagctggtg

SEQ ID NO: 3201208 - DNA, 25 bp, Homo sapien
caatagctttggatgcgcaacctcc

SEQ ID NO: 3201209 - DNA, 25 bp, Homo sapien
tccactactacaggaaggactaggc

SEQ ID NO: 3201210 - DNA, 25 bp, Homo sapien
tgatccagtaaggaaccagtcagca

SEQ ID NO: 3201211 - DNA, 25 bp, Homo sapien
gaagagtagacttctttttagtgac

SEQ ID NO: 3201212 - DNA, 25 bp, Homo sapien
atgaaatggatttggaagagtagac

SEQ ID NO: 3201213 - DNA, 25 bp, Homo sapien
tcactgtgttatatatttctaattc

SEQ ID NO: 3201214 - DNA, 25 bp, Homo sapien
aatggatttggaagagtagacttct

SEQ ID NO: 3201215 - DNA, 25 bp, Homo sapien
ccacctcttcaagggtaggagtaat

SEQ ID NO: 3201216 - DNA, 25 bp, Homo sapien
tggaaaactgcacgaatggaaagac

SEQ ID NO: 3201217 - DNA, 25 bp, Homo sapien
tggatagagccacttagctgtgcca

SEQ ID NO: 3201218 - DNA, 25 bp, Homo sapien
tctaaggcaacgtagtggaaaagtg

SEQ ID NO: 3201219 - DNA, 25 bp, Homo sapien
ccatgttctttaacagggttaagag

SEQ ID NO: 3201220 - DNA, 25 bp, Homo sapien
aacagggttaagagaagacactgac

SEQ ID NO: 3201221 - DNA, 25 bp, Homo sapien
caccatgttctttaacagggttaag

SEQ ID NO: 3201222 - DNA, 25 bp, Homo sapien
aaaacagacataaagttcttgaggt

SEQ ID NO: 3201223 - DNA, 25 bp, Homo sapien
aaacagacataaagttcttgaggtt

SEQ ID NO: 3201224 - DNA, 25 bp, Homo sapien
gtttctacgcatcaagaaagcacag

SEQ ID NO: 3201225 - DNA, 25 bp, Homo sapien
tgctcatggtcatagcactacttag

SEQ ID NO: 3201226 - DNA, 25 bp, Homo sapien
gaaaactctgagcttagagaggtac

SEQ ID NO: 3201227 - DNA, 25 bp, Homo sapien
gacagtgtttgatcctccatgcacg

SEQ ID NO: 3201228 - DNA, 25 bp, Homo sapien
aacaatgatctgatatccaggatct

SEQ ID NO: 3201229 - DNA, 25 bp, Homo sapien
taagacatgagcatgggcaaagatt

SEQ ID NO: 3201230 - DNA, 25 bp, Homo sapien
caatgatctgatatccaggatctac

SEQ ID NO: 3201231 - DNA, 25 bp, Homo sapien
ttaagacatgagcatgggcaaagat

SEQ ID NO: 3201232 - DNA, 25 bp, Homo sapien
gaatgcaaggatacggaaaactcag

SEQ ID NO: 3201233 - DNA, 25 bp, Homo sapien
tcaccaagctaagggaatatgttct

SEQ ID NO: 3201234 - DNA, 25 bp, Homo sapien
ccaagatgggaaataacgaacttca

SEQ ID NO: 3201235 - DNA, 25 bp, Homo sapien
tgttaaaagactgaacctacgactg

SEQ ID NO: 3201236 - DNA, 25 bp, Homo sapien
taaggcccactagtcactaatggga

SEQ ID NO: 3201237 - DNA, 25 bp, Homo sapien
tgtattcaaagcttaagacctggag

SEQ ID NO: 3201238 - DNA, 25 bp, Homo sapien
caaatgactcaaatggtacacccag

SEQ ID NO: 3201239 - DNA, 25 bp, Homo sapien
gctggacagctcatatttaagatgg

SEQ ID NO: 3201240 - DNA, 25 bp, Homo sapien
ttctctgacaccaggaaagcagttc

SEQ ID NO: 3201241 - DNA, 25 bp, Homo sapien
aaacctgaggtgatcaacagctacg

SEQ ID NO: 3201242 - DNA, 25 bp, Homo sapien
cctaagacagcagttgtgagtcaaa

SEQ ID NO: 3201243 - DNA, 25 bp, Homo sapien
aagtagttcatggtattttcaggga

SEQ ID NO: 3201244 - DNA, 25 bp, Homo sapien
gagagaaagtaagagtctaaaatgt

SEQ ID NO: 3201245 - DNA, 25 bp, Homo sapien
agaaagtaagagtctaaaatgtaat

SEQ ID NO: 3201246 - DNA, 25 bp, Homo sapien
agagaaagtaagagtctaaaatgta

SEQ ID NO: 3201247 - DNA, 25 bp, Homo sapien
gagaaagtaagagtctaaaatgtaa

SEQ ID NO: 3201248 - DNA, 25 bp, Homo sapien
cacttctttggcaagacacaaacaa

SEQ ID NO: 3201249 - DNA, 25 bp, Homo sapien
ttctttggcaagacacaaacaagag

SEQ ID NO: 3201250 - DNA, 25 bp, Homo sapien
taggtacacttctttggcaagacac

SEQ ID NO: 3201251 - DNA, 25 bp, Homo sapien
gtacacttctttggcaagacacaaa

SEQ ID NO: 3201252 - DNA, 25 bp, Homo sapien
cccctacattttgtacagtagcagg

SEQ ID NO: 3201253 - DNA, 25 bp, Homo sapien
gcatcatcaatagtcccttggcaca

SEQ ID NO: 3201254 - DNA, 25 bp, Homo sapien
gccaggcactgtttagagagaatta

SEQ ID NO: 3201255 - DNA, 25 bp, Homo sapien
ggtattacaaaatgctatcttgcca

SEQ ID NO: 3201256 - DNA, 25 bp, Homo sapien
caaacttttcgattgcaggacccct

SEQ ID NO: 3201257 - DNA, 25 bp, Homo sapien
tctaattctagggttgagggccaat

SEQ ID NO: 3201258 - DNA, 25 bp, Homo sapien
caaattgatgcttgggattaggccc

SEQ ID NO: 3201259 - DNA, 25 bp, Homo sapien
gaacgtctagaagtgaggcctggca

SEQ ID NO: 3201260 - DNA, 25 bp, Homo sapien
ccaacggcctccagccacgtgacgc

SEQ ID NO: 3201261 - DNA, 25 bp, Homo sapien
tcgtactggcgagaaagtggctctt

SEQ ID NO: 3201262 - DNA, 25 bp, Homo sapien
ggaaaaccggaaaaccgctgcagca

SEQ ID NO: 3201263 - DNA, 25 bp, Homo sapien
aatgagtacgggagctacgatgaag

SEQ ID NO: 3201264 - DNA, 25 bp, Homo sapien
ctaaaaatgagtacgggagctacga

SEQ ID NO: 3201265 - DNA, 25 bp, Homo sapien
gagaaggatataaaaaccggcagca

SEQ ID NO: 3201266 - DNA, 25 bp, Homo sapien
gatggagaaggatataaaaaccggc

SEQ ID NO: 3201267 - DNA, 25 bp, Homo sapien
aggatataaaaaccggcagcagtgg

SEQ ID NO: 3201268 - DNA, 25 bp, Homo sapien
gaaggatataaaaaccggcagcagt

SEQ ID NO: 3201269 - DNA, 25 bp, Homo sapien
cagaaggtccttcccgaaggatgag

SEQ ID NO: 3201270 - DNA, 25 bp, Homo sapien
ggatgaggcgtcaaacagccgcttt

SEQ ID NO: 3201271 - DNA, 25 bp, Homo sapien
ggctgatctgcttcgacgacgcctg

SEQ ID NO: 3201272 - DNA, 25 bp, Homo sapien
ttctttttcgcaggctcacgatgca

SEQ ID NO: 3201273 - DNA, 25 bp, Homo sapien
ccaggcattcaaagaacctgctcac

SEQ ID NO: 3201274 - DNA, 25 bp, Homo sapien
caggcattcaaagaacctgctcacc

SEQ ID NO: 3201275 - DNA, 25 bp, Homo sapien
taaaagcaaagtttagagcttgtgt

SEQ ID NO: 3201276 - DNA, 25 bp, Homo sapien
tttagagcttgtgttggaaaatacc

SEQ ID NO: 3201277 - DNA, 25 bp, Homo sapien
tgccaaattgccacgccaaaaactg

SEQ ID NO: 3201278 - DNA, 25 bp, Homo sapien
ggaaaataccgaataacatttgcca

SEQ ID NO: 3201279 - DNA, 25 bp, Homo sapien
tccttctatgcctaacttgctgagt

SEQ ID NO: 3201280 - DNA, 25 bp, Homo sapien
tataagatcatgctacctgacaaca

SEQ ID NO: 3201281 - DNA, 25 bp, Homo sapien
agctgtgggcttatcatatgtgatc

SEQ ID NO: 3201282 - DNA, 25 bp, Homo sapien
tcatttaccagtactaacagttttc

SEQ ID NO: 3201283 - DNA, 25 bp, Homo sapien
cgggttcgggcaaaatctagaggat

SEQ ID NO: 3201284 - DNA, 25 bp, Homo sapien
tactacacataaggatgttgcccca

SEQ ID NO: 3201285 - DNA, 25 bp, Homo sapien
tttccaatatcgacacctaatcggg

SEQ ID NO: 3201286 - DNA, 25 bp, Homo sapien
gctccaccagaagccaggtttgcca

SEQ ID NO: 3201287 - DNA, 25 bp, Homo sapien
acaatgatgccctgtactgaaacac

SEQ ID NO: 3201288 - DNA, 25 bp, Homo sapien
taatacagtcacctaaacccttgaa

SEQ ID NO: 3201289 - DNA, 25 bp, Homo sapien
aacccttgaattgtcgctcctcagg

SEQ ID NO: 3201290 - DNA, 25 bp, Homo sapien
taagaggctcggtacacaatgatgc

SEQ ID NO: 3201291 - DNA, 25 bp, Homo sapien
gagcatgtagtcacaacttgagcaa

SEQ ID NO: 3201292 - DNA, 25 bp, Homo sapien
gggataagaaagtattccagagcat

SEQ ID NO: 3201293 - DNA, 25 bp, Homo sapien
taactgtgtcaaagggataagaaag

SEQ ID NO: 3201294 - DNA, 25 bp, Homo sapien
tgcatcatcatacgtcttctaactg

SEQ ID NO: 3201295 - DNA, 25 bp, Homo sapien
gaggcttgcacagacttgctactga

SEQ ID NO: 3201296 - DNA, 25 bp, Homo sapien
gtcatactagagcaatacaagaagg

SEQ ID NO: 3201297 - DNA, 25 bp, Homo sapien
gaaaaagtgggatgactcctcaacg

SEQ ID NO: 3201298 - DNA, 25 bp, Homo sapien
ccaaaaggctttacatgtgagttct

SEQ ID NO: 3201299 - DNA, 25 bp, Homo sapien
gaagaacattggagaaggcgccacg

SEQ ID NO: 3201300 - DNA, 25 bp, Homo sapien
cttcacaaagcagtctaaggttcct

SEQ ID NO: 3201301 - DNA, 25 bp, Homo sapien
tatattgccgtttagcctcaccact

SEQ ID NO: 3201302 - DNA, 25 bp, Homo sapien
aggcgccacgaaaaaaggaactgat

SEQ ID NO: 3201303 - DNA, 25 bp, Homo sapien
tagcactttaacaaaatacagacaa

SEQ ID NO: 3201304 - DNA, 25 bp, Homo sapien
cagaactagcactttaacaaaatac

SEQ ID NO: 3201305 - DNA, 25 bp, Homo sapien
aaatgtatgcaaatggcagctatgt

SEQ ID NO: 3201306 - DNA, 25 bp, Homo sapien
gtatgtttaacaagttaaatccatg

SEQ ID NO: 3201307 - DNA, 25 bp, Homo sapien
gcttatttctgcctacacatatgat

SEQ ID NO: 3201308 - DNA, 25 bp, Homo sapien
taccatatgacttcaaaagatggga

SEQ ID NO: 3201309 - DNA, 25 bp, Homo sapien
caaactaattttcaagaggatacct

SEQ ID NO: 3201310 - DNA, 25 bp, Homo sapien
gatatattcacactagcaagatttt

SEQ ID NO: 3201311 - DNA, 25 bp, Homo sapien
tcttgttgcttttcgttcactttta

SEQ ID NO: 3201312 - DNA, 25 bp, Homo sapien
gaaatttggctgtcttgttgctttt

SEQ ID NO: 3201313 - DNA, 25 bp, Homo sapien
ccccgtcctcttcatctagtctctg

SEQ ID NO: 3201314 - DNA, 25 bp, Homo sapien
ttaagaaatttggctgtcttgttgc

SEQ ID NO: 3201315 - DNA, 25 bp, Homo sapien
ctgggtctttccctactgcggttcg

SEQ ID NO: 3201316 - DNA, 25 bp, Homo sapien
caaccggcggttactgggacctgcg

SEQ ID NO: 3201317 - DNA, 25 bp, Homo sapien
ttccgtcagcactcgggcaacggct

SEQ ID NO: 3201318 - DNA, 25 bp, Homo sapien
gggaccccaagtcgctaagcagaaa

SEQ ID NO: 3201319 - DNA, 25 bp, Homo sapien
tcctcttctgggctattgctgctgg

SEQ ID NO: 3201320 - DNA, 25 bp, Homo sapien
ttctgggctattgctgctgggattg

SEQ ID NO: 3201321 - DNA, 25 bp, Homo sapien
cccgccgcgtgatggtcgggctgct

SEQ ID NO: 3201322 - DNA, 25 bp, Homo sapien
gctgctggtactgaacccttcggta

SEQ ID NO: 3201323 - DNA, 25 bp, Homo sapien
tagcagttgagaaagccgaggtcaa

SEQ ID NO: 3201324 - DNA, 25 bp, Homo sapien
gatggtctcgatgccgccacttctc

SEQ ID NO: 3201325 - DNA, 25 bp, Homo sapien
tctcgcgacagcaatgtagcagttg

SEQ ID NO: 3201326 - DNA, 25 bp, Homo sapien
gccacttctcgcgacagcaatgtag

SEQ ID NO: 3201327 - DNA, 25 bp, Homo sapien
tttctcaatattccggacgccaggg

SEQ ID NO: 3201328 - DNA, 25 bp, Homo sapien
tacagaaaagagagctgcgcaaact

SEQ ID NO: 3201329 - DNA, 25 bp, Homo sapien
tgcgcaaactagtgcggtccctcgt

SEQ ID NO: 3201330 - DNA, 25 bp, Homo sapien
tcctcgcaagcaaaagaggcgttgg

SEQ ID NO: 3201331 - DNA, 25 bp, Homo sapien
cacagtcatgtttatacgggacagc

SEQ ID NO: 3201332 - DNA, 25 bp, Homo sapien
attgacctggccctgtaaaccggct

SEQ ID NO: 3201333 - DNA, 25 bp, Homo sapien
gtagttaccaatgcacaaggccagt

SEQ ID NO: 3201334 - DNA, 25 bp, Homo sapien
cgcattccagcaactgacgtagtta

SEQ ID NO: 3201335 - DNA, 25 bp, Homo sapien
gcaactaggactactggctgatttt

SEQ ID NO: 3201336 - DNA, 25 bp, Homo sapien
aactaggactactggctgattttta

SEQ ID NO: 3201337 - DNA, 25 bp, Homo sapien
caactaggactactggctgattttt

SEQ ID NO: 3201338 - DNA, 25 bp, Homo sapien
tcttgatcccaatgatatacaggcc

SEQ ID NO: 3201339 - DNA, 25 bp, Homo sapien
caatggctcgagttcttgatcccaa

SEQ ID NO: 3201340 - DNA, 25 bp, Homo sapien
ggctcgagttcttgatcccaatgat

SEQ ID NO: 3201341 - DNA, 25 bp, Homo sapien
gctgcatttccaatggctcgagttc

SEQ ID NO: 3201342 - DNA, 25 bp, Homo sapien
taactcctgcacttccattaggcat

SEQ ID NO: 3201343 - DNA, 25 bp, Homo sapien
aatgatcgcccatgaagctttttga

SEQ ID NO: 3201344 - DNA, 25 bp, Homo sapien
tcagtttgcacaatgggatcatcaa

SEQ ID NO: 3201345 - DNA, 25 bp, Homo sapien
cagttcatagggaagcctgatcctt

SEQ ID NO: 3201346 - DNA, 25 bp, Homo sapien
ggtctctcttcctctaagtaccgca

SEQ ID NO: 3201347 - DNA, 25 bp, Homo sapien
gcattccagtaacttgctcaattgc

SEQ ID NO: 3201348 - DNA, 25 bp, Homo sapien
ccagtaacttgctcaattgcaaaag

SEQ ID NO: 3201349 - DNA, 25 bp, Homo sapien
tgctcaattgcaaaaggtctctctt

SEQ ID NO: 3201350 - DNA, 25 bp, Homo sapien
acaaaatacttgtccctgtagagct

SEQ ID NO: 3201351 - DNA, 25 bp, Homo sapien
ggaaaacagtgcacaaaccagacaa

SEQ ID NO: 3201352 - DNA, 25 bp, Homo sapien
acaatgggtctactgcaccaaccac

SEQ ID NO: 3201353 - DNA, 25 bp, Homo sapien
ggtctactgcaccaaccacaaagtt

SEQ ID NO: 3201354 - DNA, 25 bp, Homo sapien
tctcggcatcagtaaaaaagctagg

SEQ ID NO: 3201355 - DNA, 25 bp, Homo sapien
ttctctcggcatcagtaaaaaagct

SEQ ID NO: 3201356 - DNA, 25 bp, Homo sapien
atcttctctcggcatcagtaaaaaa

SEQ ID NO: 3201357 - DNA, 25 bp, Homo sapien
tcatcaaccttaaacaatttaagcc

SEQ ID NO: 3201358 - DNA, 25 bp, Homo sapien
cctgtttataaattccatacgccag

SEQ ID NO: 3201359 - DNA, 25 bp, Homo sapien
catctaatgggggaagatcctgttt

SEQ ID NO: 3201360 - DNA, 25 bp, Homo sapien
ttataaattccatacgccagtgcaa

SEQ ID NO: 3201361 - DNA, 25 bp, Homo sapien
tttctcatctaatgggggaagatcc

SEQ ID NO: 3201362 - DNA, 25 bp, Homo sapien
tgatataaacgcaacaaggcccgag

SEQ ID NO: 3201363 - DNA, 25 bp, Homo sapien
catcaaggtcattcatgaaacactc

SEQ ID NO: 3201364 - DNA, 25 bp, Homo sapien
caaatatggatcaaaggtagtagcc

SEQ ID NO: 3201365 - DNA, 25 bp, Homo sapien
gtagtctactaaagcctcatcaaag

SEQ ID NO: 3201366 - DNA, 25 bp, Homo sapien
cattactgcttttaaaggtggttca

SEQ ID NO: 3201367 - DNA, 25 bp, Homo sapien
ggaattcgtgttgctcctcctacaa

SEQ ID NO: 3201368 - DNA, 25 bp, Homo sapien
taatgtggtacttatgtctttaaga

SEQ ID NO: 3201369 - DNA, 25 bp, Homo sapien
actactaatgtcttcacgttgtaag

SEQ ID NO: 3201370 - DNA, 25 bp, Homo sapien
tcctacaatttctatactactaatg

SEQ ID NO: 3201371 - DNA, 25 bp, Homo sapien
tcaaaagaggtcttccaccttaatg

SEQ ID NO: 3201372 - DNA, 25 bp, Homo sapien
ccttaatgtgattgaatagggaaca

SEQ ID NO: 3201373 - DNA, 25 bp, Homo sapien
ctgttatggaaaattcacgcacttt

SEQ ID NO: 3201374 - DNA, 25 bp, Homo sapien
tagggaacaaggtctgttatggaaa

SEQ ID NO: 3201375 - DNA, 25 bp, Homo sapien
agttcaaatggttccttcttgtgga

SEQ ID NO: 3201376 - DNA, 25 bp, Homo sapien
ttcttgcatcaggataaggcacttc

SEQ ID NO: 3201377 - DNA, 25 bp, Homo sapien
aatggggcaggatggttcttacaga

SEQ ID NO: 3201378 - DNA, 25 bp, Homo sapien
taaggcacttcatgtaaattagtat

SEQ ID NO: 3201379 - DNA, 25 bp, Homo sapien
tatactgcggctcagcgtgatccca

SEQ ID NO: 3201380 - DNA, 25 bp, Homo sapien
ctgggctgcaatatactgcggctca

SEQ ID NO: 3201381 - DNA, 25 bp, Homo sapien
atactgcggctcagcgtgatcccag

SEQ ID NO: 3201382 - DNA, 25 bp, Homo sapien
ttctgctgggctgcaatatactgcg

SEQ ID NO: 3201383 - DNA, 25 bp, Homo sapien
cccacactgtgcgtagtacctcaga

SEQ ID NO: 3201384 - DNA, 25 bp, Homo sapien
gctttacaaatcataaccatcttgg

SEQ ID NO: 3201385 - DNA, 25 bp, Homo sapien
aatcaggtagtaaaaaacttggatg

SEQ ID NO: 3201386 - DNA, 25 bp, Homo sapien
gtacctcagaacatgactatgtgtg

SEQ ID NO: 3201387 - DNA, 25 bp, Homo sapien
tctccattggagcatcactgtgatc

SEQ ID NO: 3201388 - DNA, 25 bp, Homo sapien
tggaactatcaccatcagactgtgg

SEQ ID NO: 3201389 - DNA, 25 bp, Homo sapien
gattccatggatgttaacacgaact

SEQ ID NO: 3201390 - DNA, 25 bp, Homo sapien
tactgatgcgctagccacactgaag

SEQ ID NO: 3201391 - DNA, 25 bp, Homo sapien
agaacattgagaaagaatttctaca

SEQ ID NO: 3201392 - DNA, 25 bp, Homo sapien
ttacaagaacattgagaaagaattt

SEQ ID NO: 3201393 - DNA, 25 bp, Homo sapien
tacaagaacattgagaaagaatttc

SEQ ID NO: 3201394 - DNA, 25 bp, Homo sapien
acattgagaaagaatttctacatac

SEQ ID NO: 3201395 - DNA, 25 bp, Homo sapien
attctgaagtggttttatctgtaag

SEQ ID NO: 3201396 - DNA, 25 bp, Homo sapien
tctgaagtggttttatctgtaagct

SEQ ID NO: 3201397 - DNA, 25 bp, Homo sapien
ctgaagtggttttatctgtaagcta

SEQ ID NO: 3201398 - DNA, 25 bp, Homo sapien
ttctgaagtggttttatctgtaagc

SEQ ID NO: 3201399 - DNA, 25 bp, Homo sapien
ataaaagaaaatcgcctttcggctg

SEQ ID NO: 3201400 - DNA, 25 bp, Homo sapien
gaatgtgctcaccaacaatgccaag

SEQ ID NO: 3201401 - DNA, 25 bp, Homo sapien
tgagtaaccaaagcagatgccataa

SEQ ID NO: 3201402 - DNA, 25 bp, Homo sapien
cctgcaaatgttctagcaagccaaa

SEQ ID NO: 3201403 - DNA, 25 bp, Homo sapien
cttgtatgggaacctcaactgcctg

SEQ ID NO: 3201404 - DNA, 25 bp, Homo sapien
gtcaccttcttaatcctgtcaccat

SEQ ID NO: 3201405 - DNA, 25 bp, Homo sapien
tttggtcaccttcttaatcctgtca

SEQ ID NO: 3201406 - DNA, 25 bp, Homo sapien
caatactatatctttaaattgtaaa

SEQ ID NO: 3201407 - DNA, 25 bp, Homo sapien
ttggtcaccttcttaatcctgtcac

SEQ ID NO: 3201408 - DNA, 25 bp, Homo sapien
tttcctcttctggagtgtgttcagc

SEQ ID NO: 3201409 - DNA, 25 bp, Homo sapien
agcatgacatttttgatgcccttct

SEQ ID NO: 3201410 - DNA, 25 bp, Homo sapien
ccttcttcttgatcaacctgcattt

SEQ ID NO: 3201411 - DNA, 25 bp, Homo sapien
tgttttggctcctgtatgatcaatt

SEQ ID NO: 3201412 - DNA, 25 bp, Homo sapien
atccgaaagagaagtataaatttct

SEQ ID NO: 3201413 - DNA, 25 bp, Homo sapien
tagttgtctacataggctactctgg

SEQ ID NO: 3201414 - DNA, 25 bp, Homo sapien
ggatcggtagatcaatacttttgac

SEQ ID NO: 3201415 - DNA, 25 bp, Homo sapien
tgtagctgttgagaagatcttggcc

SEQ ID NO: 3201416 - DNA, 25 bp, Homo sapien
taagtgtctgatttaatcggtcttg

SEQ ID NO: 3201417 - DNA, 25 bp, Homo sapien
tatttcagcatcaactcagatttac

SEQ ID NO: 3201418 - DNA, 25 bp, Homo sapien
ctatttcagcatcaactcagattta

SEQ ID NO: 3201419 - DNA, 25 bp, Homo sapien
tcagcatcaactcagatttacatac

SEQ ID NO: 3201420 - DNA, 25 bp, Homo sapien
tttcagcatcaactcagatttacat

SEQ ID NO: 3201421 - DNA, 25 bp, Homo sapien
cccatatgtggtctgctgggtgtca

SEQ ID NO: 3201422 - DNA, 25 bp, Homo sapien
ggagcagctaatatttccccatatg

SEQ ID NO: 3201423 - DNA, 25 bp, Homo sapien
tctctatagaggaggcaatacatgt

SEQ ID NO: 3201424 - DNA, 25 bp, Homo sapien
tacatatggcattaaaacagctcag

SEQ ID NO: 3201425 - DNA, 25 bp, Homo sapien
tacatattcttcaacggcattctta

SEQ ID NO: 3201426 - DNA, 25 bp, Homo sapien
tcttcaacggcattcttagcatcat

SEQ ID NO: 3201427 - DNA, 25 bp, Homo sapien
gaatttttcatagacagtgcccagc

SEQ ID NO: 3201428 - DNA, 25 bp, Homo sapien
tctctaacttatcttgcatgatcat

SEQ ID NO: 3201429 - DNA, 25 bp, Homo sapien
ttctgtgtcttccaatactgcagac

SEQ ID NO: 3201430 - DNA, 25 bp, Homo sapien
caatactgcagacagtttactcaag

SEQ ID NO: 3201431 - DNA, 25 bp, Homo sapien
gtcctctccgtcttcataaagccaa

SEQ ID NO: 3201432 - DNA, 25 bp, Homo sapien
gcttatccacataaacttgtttagg

SEQ ID NO: 3201433 - DNA, 25 bp, Homo sapien
ggcttttggtctctcttcatgctcc

SEQ ID NO: 3201434 - DNA, 25 bp, Homo sapien
cttcatttgaataggctggccgtat

SEQ ID NO: 3201435 - DNA, 25 bp, Homo sapien
aagcttctatcactttcatgacaag

SEQ ID NO: 3201436 - DNA, 25 bp, Homo sapien
cttgtttctataagcttctatcact

SEQ ID NO: 3201437 - DNA, 25 bp, Homo sapien
ttctgaaacttttaccacaggatct

SEQ ID NO: 3201438 - DNA, 25 bp, Homo sapien
atttcagtaggatccagatgatcat

SEQ ID NO: 3201439 - DNA, 25 bp, Homo sapien
tattcagccaactcatggcatcact

SEQ ID NO: 3201440 - DNA, 25 bp, Homo sapien
ttcagtaggatccagatgatcatat

SEQ ID NO: 3201441 - DNA, 25 bp, Homo sapien
gttcactattagcttttggtttgtc

SEQ ID NO: 3201442 - DNA, 25 bp, Homo sapien
tccattgggccattgtgttcactat

SEQ ID NO: 3201443 - DNA, 25 bp, Homo sapien
tgtcttcaggaacttctgcttttgg

SEQ ID NO: 3201444 - DNA, 25 bp, Homo sapien
tctccagaggatttagtatgctgtg

SEQ ID NO: 3201445 - DNA, 25 bp, Homo sapien
aactgagcgtctgttgtgtgtacca

SEQ ID NO: 3201446 - DNA, 25 bp, Homo sapien
gtaaatctaattcggctaacactgc

SEQ ID NO: 3201447 - DNA, 25 bp, Homo sapien
aagatggaccccgtggttacttgca

SEQ ID NO: 3201448 - DNA, 25 bp, Homo sapien
gaaaaaggtcagtgcctctgtagct

SEQ ID NO: 3201449 - DNA, 25 bp, Homo sapien
tatgtgatgacagcaaagctttgga

SEQ ID NO: 3201450 - DNA, 25 bp, Homo sapien
gagactcctgtatctttaggctagc

SEQ ID NO: 3201451 - DNA, 25 bp, Homo sapien
tatataatgcaatacactgtgccac

SEQ ID NO: 3201452 - DNA, 25 bp, Homo sapien
gcgaaaagacaacgagttactctga

SEQ ID NO: 3201453 - DNA, 25 bp, Homo sapien
ttcaaaaggtaatgttaacagcagg

SEQ ID NO: 3201454 - DNA, 25 bp, Homo sapien
catttaatttgtataagaagcacca

SEQ ID NO: 3201455 - DNA, 25 bp, Homo sapien
ggaactataatttaatcacacaaca

SEQ ID NO: 3201456 - DNA, 25 bp, Homo sapien
tgtaacattctatatttttgcctgt

SEQ ID NO: 3201457 - DNA, 25 bp, Homo sapien
gaggcatagctcctaaccaagtgag

SEQ ID NO: 3201458 - DNA, 25 bp, Homo sapien
gagattcttcccctcaaaagacgga

SEQ ID NO: 3201459 - DNA, 25 bp, Homo sapien
gactgtctacccaaagctgcattaa

SEQ ID NO: 3201460 - DNA, 25 bp, Homo sapien
ccaagtgagtggatgttttaaccca

SEQ ID NO: 3201461 - DNA, 25 bp, Homo sapien
aattttacattactgctaaggaatt

SEQ ID NO: 3201462 - DNA, 25 bp, Homo sapien
ggatttgtacttgcctgacagactg

SEQ ID NO: 3201463 - DNA, 25 bp, Homo sapien
catcctgtgacttagggcatgaccg

SEQ ID NO: 3201464 - DNA, 25 bp, Homo sapien
gaattaaagtattccaaggccagaa

SEQ ID NO: 3201465 - DNA, 25 bp, Homo sapien
taaaaatactcaagtccccagaagc

SEQ ID NO: 3201466 - DNA, 25 bp, Homo sapien
tgaggagctattatcagaatcactg

SEQ ID NO: 3201467 - DNA, 25 bp, Homo sapien
accaaatgctccagtctagaccggg

SEQ ID NO: 3201468 - DNA, 25 bp, Homo sapien
ttaaagtgcataggcgtataaacac

SEQ ID NO: 3201469 - DNA, 25 bp, Homo sapien
cagcaattctcaaaactgaggagct

SEQ ID NO: 3201470 - DNA, 25 bp, Homo sapien
caccattgcactcaagcttgggcaa

SEQ ID NO: 3201471 - DNA, 25 bp, Homo sapien
gaggttgaagttagtcgagatcgca

SEQ ID NO: 3201472 - DNA, 25 bp, Homo sapien
ctcaggagggggaggttgaagttag

SEQ ID NO: 3201473 - DNA, 25 bp, Homo sapien
accattgcactcaagcttgggcaag

SEQ ID NO: 3201474 - DNA, 25 bp, Homo sapien
cagggttctagacttcggggccaag

SEQ ID NO: 3201475 - DNA, 25 bp, Homo sapien
gcgctgcggagagtttagttcgggc

SEQ ID NO: 3201476 - DNA, 25 bp, Homo sapien
ctttgcggccggcccagggttctag

SEQ ID NO: 3201477 - DNA, 25 bp, Homo sapien
ctcgggcccactctcggaagaactt

SEQ ID NO: 3201478 - DNA, 25 bp, Homo sapien
tgacgtaacgagatggatcgctccg

SEQ ID NO: 3201479 - DNA, 25 bp, Homo sapien
aggcgacgacgctgaaaccacggaa

SEQ ID NO: 3201480 - DNA, 25 bp, Homo sapien
attttgaaaatctcccgccgcttgc

SEQ ID NO: 3201481 - DNA, 25 bp, Homo sapien
cgcttgccgtccgagctaggctggt

SEQ ID NO: 3201482 - DNA, 25 bp, Homo sapien
ggttctccggattagcttccttcac

SEQ ID NO: 3201483 - DNA, 25 bp, Homo sapien
ggcctgggttctccggattagcttc

SEQ ID NO: 3201484 - DNA, 25 bp, Homo sapien
tggcctgggttctccggattagctt

SEQ ID NO: 3201485 - DNA, 25 bp, Homo sapien
ctgggttctccggattagcttcctt

SEQ ID NO: 3201486 - DNA, 25 bp, Homo sapien
gatcttctccccgatgcaggtcgcc

SEQ ID NO: 3201487 - DNA, 25 bp, Homo sapien
ctcgatcttctccccgatgcaggtc

SEQ ID NO: 3201488 - DNA, 25 bp, Homo sapien
tcgatcttctccccgatgcaggtcg

SEQ ID NO: 3201489 - DNA, 25 bp, Homo sapien
tcttctccccgatgcaggtcgccat

SEQ ID NO: 3201490 - DNA, 25 bp, Homo sapien
gccctgctctaacgcggtagctcgg

SEQ ID NO: 3201491 - DNA, 25 bp, Homo sapien
atctccagccaatccccgggagcgg

SEQ ID NO: 3201492 - DNA, 25 bp, Homo sapien
catccccttggagaagtgggaggta

SEQ ID NO: 3201493 - DNA, 25 bp, Homo sapien
agggctcggtcagaatcccgccgca

SEQ ID NO: 3201494 - DNA, 25 bp, Homo sapien
tacctgcgcttccaggctggactgg

SEQ ID NO: 3201495 - DNA, 25 bp, Homo sapien
caccctagtgatctggttcctcaac

SEQ ID NO: 3201496 - DNA, 25 bp, Homo sapien
gatggtgcaccctagtgatctggtt

SEQ ID NO: 3201497 - DNA, 25 bp, Homo sapien
actccgtgcggggatacctgcgctt

SEQ ID NO: 3201498 - DNA, 25 bp, Homo sapien
ctcgatgcagcaggtgtctagggtg

SEQ ID NO: 3201499 - DNA, 25 bp, Homo sapien
gatgcagcaggtgtctagggtggaa

SEQ ID NO: 3201500 - DNA, 25 bp, Homo sapien
tgcagcaggtgtctagggtggaagg

SEQ ID NO: 3201501 - DNA, 25 bp, Homo sapien
cagcaggtgtctagggtggaaggca

SEQ ID NO: 3201502 - DNA, 25 bp, Homo sapien
aatggatcgagtggggaatttgaca

SEQ ID NO: 3201503 - DNA, 25 bp, Homo sapien
ttaaagattatgtgtgatgactcac

SEQ ID NO: 3201504 - DNA, 25 bp, Homo sapien
tatgtgtgatgactcacagtagaaa

SEQ ID NO: 3201505 - DNA, 25 bp, Homo sapien
gacaaaattcaagcgggtattacac

SEQ ID NO: 3201506 - DNA, 25 bp, Homo sapien
gatcctttaccaagcagatttccaa

SEQ ID NO: 3201507 - DNA, 25 bp, Homo sapien
atgatcctttaccaagcagatttcc

SEQ ID NO: 3201508 - DNA, 25 bp, Homo sapien
cctttaccaagcagatttccaactt

SEQ ID NO: 3201509 - DNA, 25 bp, Homo sapien
tgtagacaccagcaaatgatccttt

SEQ ID NO: 3201510 - DNA, 25 bp, Homo sapien
gcaacttccaaaccagtgtgaatgg

SEQ ID NO: 3201511 - DNA, 25 bp, Homo sapien
cttccaaaccagtgtgaatggactc

SEQ ID NO: 3201512 - DNA, 25 bp, Homo sapien
caaaccagtgtgaatggactcagct

SEQ ID NO: 3201513 - DNA, 25 bp, Homo sapien
ttgcaacttccaaaccagtgtgaat

SEQ ID NO: 3201514 - DNA, 25 bp, Homo sapien
ggctagtagacaaggagtttctgac

SEQ ID NO: 3201515 - DNA, 25 bp, Homo sapien
cctatgtaaagtgttccttacacta

SEQ ID NO: 3201516 - DNA, 25 bp, Homo sapien
cactattgtcttctgcctatgtaaa

SEQ ID NO: 3201517 - DNA, 25 bp, Homo sapien
cttgcaaagtacaggagagaagttg

SEQ ID NO: 3201518 - DNA, 25 bp, Homo sapien
acctcccaggcacaatctatcctcc

SEQ ID NO: 3201519 - DNA, 25 bp, Homo sapien
gagatgggaatttagctcttgttgc

SEQ ID NO: 3201520 - DNA, 25 bp, Homo sapien
ttttttgagatgggaatttagctct

SEQ ID NO: 3201521 - DNA, 25 bp, Homo sapien
ctcaacctcccaggcacaatctatc

SEQ ID NO: 3201522 - DNA, 25 bp, Homo sapien
tcacctcattttggactctctgtac

SEQ ID NO: 3201523 - DNA, 25 bp, Homo sapien
tctgtaccattcctgctttgtacat

SEQ ID NO: 3201524 - DNA, 25 bp, Homo sapien
cctcattttggactctctgtaccat

SEQ ID NO: 3201525 - DNA, 25 bp, Homo sapien
ctctctgtaccattcctgctttgta

SEQ ID NO: 3201526 - DNA, 25 bp, Homo sapien
cactctattctttagatacctgttc

SEQ ID NO: 3201527 - DNA, 25 bp, Homo sapien
ttcactctattctttagatacctgt

SEQ ID NO: 3201528 - DNA, 25 bp, Homo sapien
tctattctttagatacctgttcatt

SEQ ID NO: 3201529 - DNA, 25 bp, Homo sapien
tattctttagatacctgttcatttc

SEQ ID NO: 3201530 - DNA, 25 bp, Homo sapien
gggactcattatagcacactacctg

SEQ ID NO: 3201531 - DNA, 25 bp, Homo sapien
tgagtcactagttttggaagctgag

SEQ ID NO: 3201532 - DNA, 25 bp, Homo sapien
tgtgataatgactttgtggctacgt

SEQ ID NO: 3201533 - DNA, 25 bp, Homo sapien
tgttttaagaattagcagcttggga

SEQ ID NO: 3201534 - DNA, 25 bp, Homo sapien
gaggtcccggtgtagtataccatga

SEQ ID NO: 3201535 - DNA, 25 bp, Homo sapien
gattcaaggccatgtgcacttcgag

SEQ ID NO: 3201536 - DNA, 25 bp, Homo sapien
cattttatttgggagtggctgacca

SEQ ID NO: 3201537 - DNA, 25 bp, Homo sapien
taactggtgaataaggtccttggcc

SEQ ID NO: 3201538 - DNA, 25 bp, Homo sapien
ctgatcttttggacactgaaagcat

SEQ ID NO: 3201539 - DNA, 25 bp, Homo sapien
caaaagatccagaactactggatgt

SEQ ID NO: 3201540 - DNA, 25 bp, Homo sapien
gaactactggatgtcttttctttaa

SEQ ID NO: 3201541 - DNA, 25 bp, Homo sapien
gatccagaactactggatgtctttt

SEQ ID NO: 3201542 - DNA, 25 bp, Homo sapien
gcttgattgttatcaggtctttcaa

SEQ ID NO: 3201543 - DNA, 25 bp, Homo sapien
tgttgtacggtttcagtctgaggtg

SEQ ID NO: 3201544 - DNA, 25 bp, Homo sapien
cagtctgaggtgtcgggtctgcaaa

SEQ ID NO: 3201545 - DNA, 25 bp, Homo sapien
tatttgcagattcccaaaccactgt

SEQ ID NO: 3201546 - DNA, 25 bp, Homo sapien
tcgggtctgcaaatggaaaaggagt

SEQ ID NO: 3201547 - DNA, 25 bp, Homo sapien
atgctgtcatattcagtagtttttc

SEQ ID NO: 3201548 - DNA, 25 bp, Homo sapien
tgatgctgtcatattcagtagtttt

SEQ ID NO: 3201549 - DNA, 25 bp, Homo sapien
ctgatgctgtcatattcagtagttt

SEQ ID NO: 3201550 - DNA, 25 bp, Homo sapien
gatgctgtcatattcagtagttttt

SEQ ID NO: 3201551 - DNA, 25 bp, Homo sapien
tttaacctgtgagcaaccaacggag

SEQ ID NO: 3201552 - DNA, 25 bp, Homo sapien
tctgttcagaaagaggatctgagcc

SEQ ID NO: 3201553 - DNA, 25 bp, Homo sapien
ttctgataaccccatggtggctcca

SEQ ID NO: 3201554 - DNA, 25 bp, Homo sapien
gcaaatctggatggccctggaagtc

SEQ ID NO: 3201555 - DNA, 25 bp, Homo sapien
tgtttactagaacagctctgacata

SEQ ID NO: 3201556 - DNA, 25 bp, Homo sapien
ttttgtttactagaacagctctgac

SEQ ID NO: 3201557 - DNA, 25 bp, Homo sapien
tcttttgtttactagaacagctctg

SEQ ID NO: 3201558 - DNA, 25 bp, Homo sapien
cccaaaatcagtaataattcttttg

SEQ ID NO: 3201559 - DNA, 25 bp, Homo sapien
catcactagatatctgaagaacttc

SEQ ID NO: 3201560 - DNA, 25 bp, Homo sapien
agatgcatactcctttacaagctcc

SEQ ID NO: 3201561 - DNA, 25 bp, Homo sapien
cgtatttccatcactagatatctga

SEQ ID NO: 3201562 - DNA, 25 bp, Homo sapien
cttgagatgcatactcctttacaag

SEQ ID NO: 3201563 - DNA, 25 bp, Homo sapien
ctggtaaattgtcaaagctgtacct

SEQ ID NO: 3201564 - DNA, 25 bp, Homo sapien
caaagctgtacctactgatgttgtc

SEQ ID NO: 3201565 - DNA, 25 bp, Homo sapien
agaggaaaacctctaccaccatttg

SEQ ID NO: 3201566 - DNA, 25 bp, Homo sapien
agggtggtctatcagcaagaggaaa

SEQ ID NO: 3201567 - DNA, 25 bp, Homo sapien
tggaagcatattgatattttcgcca

SEQ ID NO: 3201568 - DNA, 25 bp, Homo sapien
gcatattgatattttcgccagtatt

SEQ ID NO: 3201569 - DNA, 25 bp, Homo sapien
aagcatattgatattttcgccagta

SEQ ID NO: 3201570 - DNA, 25 bp, Homo sapien
gaagcatattgatattttcgccagt

SEQ ID NO: 3201571 - DNA, 25 bp, Homo sapien
gattttgggagatttagatcttaca

SEQ ID NO: 3201572 - DNA, 25 bp, Homo sapien
agcaccaggagaattctccatcaaa

SEQ ID NO: 3201573 - DNA, 25 bp, Homo sapien
agtgattttgggagatttagatctt

SEQ ID NO: 3201574 - DNA, 25 bp, Homo sapien
ccaggagaattctccatcaaaatgc

SEQ ID NO: 3201575 - DNA, 25 bp, Homo sapien
tgacatgtatactccgctgtgcaat

SEQ ID NO: 3201576 - DNA, 25 bp, Homo sapien
cacatctttaaaactgactgtgttg

SEQ ID NO: 3201577 - DNA, 25 bp, Homo sapien
tacacatctttaaaactgactgtgt

SEQ ID NO: 3201578 - DNA, 25 bp, Homo sapien
tccgctgtgcaatttatatgtatag

SEQ ID NO: 3201579 - DNA, 25 bp, Homo sapien
agtgtaagacttccctgtcttttca

SEQ ID NO: 3201580 - DNA, 25 bp, Homo sapien
tgtcttttcaatcacctgaatgaaa

SEQ ID NO: 3201581 - DNA, 25 bp, Homo sapien
ctcattagcatggtccatatacatt

SEQ ID NO: 3201582 - DNA, 25 bp, Homo sapien
tatctcctctttcaagctattaact

SEQ ID NO: 3201583 - DNA, 25 bp, Homo sapien
ctgaaattatggattccagtgctaa

SEQ ID NO: 3201584 - DNA, 25 bp, Homo sapien
cttcctatgattattgggaaaaagg

SEQ ID NO: 3201585 - DNA, 25 bp, Homo sapien
ccagtgctaaacaaatacgatgacc

SEQ ID NO: 3201586 - DNA, 25 bp, Homo sapien
tcctatgattattgggaaaaaggga

SEQ ID NO: 3201587 - DNA, 25 bp, Homo sapien
gctctctctctcgttgggtaatttg

SEQ ID NO: 3201588 - DNA, 25 bp, Homo sapien
taaggccttaggtgaactagtacta

SEQ ID NO: 3201589 - DNA, 25 bp, Homo sapien
catgaccattctgttgaaagatgct

SEQ ID NO: 3201590 - DNA, 25 bp, Homo sapien
tggagaagcagcactatgcatgacc

SEQ ID NO: 3201591 - DNA, 25 bp, Homo sapien
tccagaagctgtagttgtaagacca

SEQ ID NO: 3201592 - DNA, 25 bp, Homo sapien
gaccaagtccttcatttgtaaccat

SEQ ID NO: 3201593 - DNA, 25 bp, Homo sapien
ggaagacaatcttttagactattag

SEQ ID NO: 3201594 - DNA, 25 bp, Homo sapien
tgtgtagcccaaccaacatttttca

SEQ ID NO: 3201595 - DNA, 25 bp, Homo sapien
ggtataactgatagaagacactcct

SEQ ID NO: 3201596 - DNA, 25 bp, Homo sapien
ctagttgtttgaccatttggtgagg

SEQ ID NO: 3201597 - DNA, 25 bp, Homo sapien
tgcacaaccaactgggacccatcat

SEQ ID NO: 3201598 - DNA, 25 bp, Homo sapien
tcattaaactgaacccacacagctc

SEQ ID NO: 3201599 - DNA, 25 bp, Homo sapien
ttgatgtagtctggtaatttttcat

SEQ ID NO: 3201600 - DNA, 25 bp, Homo sapien
aattaggagtcggattagaaaacat

SEQ ID NO: 3201601 - DNA, 25 bp, Homo sapien
tctgtttgatgtagtctggtaattt

SEQ ID NO: 3201602 - DNA, 25 bp, Homo sapien
ttaggagtcggattagaaaacatca

SEQ ID NO: 3201603 - DNA, 25 bp, Homo sapien
ttaaacttatatgtctgaaaggagt

SEQ ID NO: 3201604 - DNA, 25 bp, Homo sapien
cttatatgtctgaaaggagttttaa

SEQ ID NO: 3201605 - DNA, 25 bp, Homo sapien
taaacttatatgtctgaaaggagtt

SEQ ID NO: 3201606 - DNA, 25 bp, Homo sapien
ttattaaacttatatgtctgaaagg

SEQ ID NO: 3201607 - DNA, 25 bp, Homo sapien
ggtctaagagcaaagtcaggtgttc

SEQ ID NO: 3201608 - DNA, 25 bp, Homo sapien
cactatatttagtaagtgactcaag

SEQ ID NO: 3201609 - DNA, 25 bp, Homo sapien
gttctctcagaatacatcctttaca

SEQ ID NO: 3201610 - DNA, 25 bp, Homo sapien
aatatatgaacatagtaagttcggg

SEQ ID NO: 3201611 - DNA, 25 bp, Homo sapien
ttccagcaggttttgtccatgattc

SEQ ID NO: 3201612 - DNA, 25 bp, Homo sapien
cagcaggttttgtccatgattctca

SEQ ID NO: 3201613 - DNA, 25 bp, Homo sapien
caaaattccagcaggttttgtccat

SEQ ID NO: 3201614 - DNA, 25 bp, Homo sapien
aaattccagcaggttttgtccatga

SEQ ID NO: 3201615 - DNA, 25 bp, Homo sapien
gcaaaaatgtttcatcagacactgg

SEQ ID NO: 3201616 - DNA, 25 bp, Homo sapien
catatgttacttataacataaatac

SEQ ID NO: 3201617 - DNA, 25 bp, Homo sapien
tcagacactggtgttacaaaaataa

SEQ ID NO: 3201618 - DNA, 25 bp, Homo sapien
aaacaaatatacatgtttacatatg

SEQ ID NO: 3201619 - DNA, 25 bp, Homo sapien
taaaatttaattggctcctcaacag

SEQ ID NO: 3201620 - DNA, 25 bp, Homo sapien
aattggctcctcaacaggcaacaaa

SEQ ID NO: 3201621 - DNA, 25 bp, Homo sapien
tttaattggctcctcaacaggcaac

SEQ ID NO: 3201622 - DNA, 25 bp, Homo sapien
aaatttaattggctcctcaacaggc

SEQ ID NO: 3201623 - DNA, 25 bp, Homo sapien
acgtcttccataaggaatataaagg

SEQ ID NO: 3201624 - DNA, 25 bp, Homo sapien
taaaggttgtcagcctggcattttc

SEQ ID NO: 3201625 - DNA, 25 bp, Homo sapien
tgccaaaatccactggcgccatcca

SEQ ID NO: 3201626 - DNA, 25 bp, Homo sapien
ttctccagtgaaatctgccaaaatc

SEQ ID NO: 3201627 - DNA, 25 bp, Homo sapien
tcttacataaagtgaaatctgttaa

SEQ ID NO: 3201628 - DNA, 25 bp, Homo sapien
ttttgagaagaaattctgggcacca

SEQ ID NO: 3201629 - DNA, 25 bp, Homo sapien
gaagggatttataacttcacaaagc

SEQ ID NO: 3201630 - DNA, 25 bp, Homo sapien
actacttacctgcatctgtttaaga

SEQ ID NO: 3201631 - DNA, 25 bp, Homo sapien
ttgggccacgtctaatcttaaagag

SEQ ID NO: 3201632 - DNA, 25 bp, Homo sapien
gagtaaactctacccttggtttgca

SEQ ID NO: 3201633 - DNA, 25 bp, Homo sapien
tctgccgcccatagcaagactgctt

SEQ ID NO: 3201634 - DNA, 25 bp, Homo sapien
tagatttctcagaaccgtagccagt

SEQ ID NO: 3201635 - DNA, 25 bp, Homo sapien
cctggatctatgcttaatgtaactg

SEQ ID NO: 3201636 - DNA, 25 bp, Homo sapien
tattgttgttgctgtcaccatactc

SEQ ID NO: 3201637 - DNA, 25 bp, Homo sapien
cagactgttttcctcgcagactgtt

SEQ ID NO: 3201638 - DNA, 25 bp, Homo sapien
tttgttatagctttgataaccctgg

SEQ ID NO: 3201639 - DNA, 25 bp, Homo sapien
tctcagtccccgtcaggatgggagg

SEQ ID NO: 3201640 - DNA, 25 bp, Homo sapien
ctagatacagcggaaggagaaacgg

SEQ ID NO: 3201641 - DNA, 25 bp, Homo sapien
gcagtttggacacgccccgagctct

SEQ ID NO: 3201642 - DNA, 25 bp, Homo sapien
aagacaaacccggagcagggcggcg

SEQ ID NO: 3201643 - DNA, 25 bp, Homo sapien
caggtggaagcctgcgatcgagctg

SEQ ID NO: 3201644 - DNA, 25 bp, Homo sapien
tccaggactcaactttggtcccagc

SEQ ID NO: 3201645 - DNA, 25 bp, Homo sapien
cagccccaatcgcagctccggtaac

SEQ ID NO: 3201646 - DNA, 25 bp, Homo sapien
gcagctccggtaacctttccaggaa

SEQ ID NO: 3201647 - DNA, 25 bp, Homo sapien
tcttagcgcacctactacttaaccg

SEQ ID NO: 3201648 - DNA, 25 bp, Homo sapien
gagctcttagcgcacctactactta

SEQ ID NO: 3201649 - DNA, 25 bp, Homo sapien
gcggggagctcttagcgcacctact

SEQ ID NO: 3201650 - DNA, 25 bp, Homo sapien
tagcgcacctactacttaaccggac

SEQ ID NO: 3201651 - DNA, 25 bp, Homo sapien
ggctctgctgagtgacattttgcaa

SEQ ID NO: 3201652 - DNA, 25 bp, Homo sapien
tcaactcccacgtttcagcagcagg

SEQ ID NO: 3201653 - DNA, 25 bp, Homo sapien
ttgcaaggctgaggcccccgtaggc

SEQ ID NO: 3201654 - DNA, 25 bp, Homo sapien
ccccgtaggcgcaggcgccgttggg

SEQ ID NO: 3201655 - DNA, 25 bp, Homo sapien
tcatcttccttgtgacgaaaggagc

SEQ ID NO: 3201656 - DNA, 25 bp, Homo sapien
atcttccttgtgacgaaaggagctg

SEQ ID NO: 3201657 - DNA, 25 bp, Homo sapien
tggtcattgctaggcaggtgctgta

SEQ ID NO: 3201658 - DNA, 25 bp, Homo sapien
aaggagctggtcattgctaggcagg

SEQ ID NO: 3201659 - DNA, 25 bp, Homo sapien
cgtttcaagtttaggtgttcaccag

SEQ ID NO: 3201660 - DNA, 25 bp, Homo sapien
gactgtgtaactagtataggaccta

SEQ ID NO: 3201661 - DNA, 25 bp, Homo sapien
cctggctgatacacacaaggtcaca

SEQ ID NO: 3201662 - DNA, 25 bp, Homo sapien
tgttcaccagtgaactgcgcctggc

SEQ ID NO: 3201663 - DNA, 25 bp, Homo sapien
ttcccataagaagcctggtggtaaa

SEQ ID NO: 3201664 - DNA, 25 bp, Homo sapien
tctgaagtcatcacttggaggcacc

SEQ ID NO: 3201665 - DNA, 25 bp, Homo sapien
tatctgccctgatacatgatagcca

SEQ ID NO: 3201666 - DNA, 25 bp, Homo sapien
gagcacaggcttaggatcaggagtc

SEQ ID NO: 3201667 - DNA, 25 bp, Homo sapien
ggaagcaagaaaggacctaagaaca

SEQ ID NO: 3201668 - DNA, 25 bp, Homo sapien
aaattccaacacctatattttacag

SEQ ID NO: 3201669 - DNA, 25 bp, Homo sapien
agcaagaaaggacctaagaacaatg

SEQ ID NO: 3201670 - DNA, 25 bp, Homo sapien
tccaacacctatattttacagtaag

SEQ ID NO: 3201671 - DNA, 25 bp, Homo sapien
gccatatgcctggttagaaagcaaa

SEQ ID NO: 3201672 - DNA, 25 bp, Homo sapien
gaaagcaaatcatgggttctgccca

SEQ ID NO: 3201673 - DNA, 25 bp, Homo sapien
tgagtagagtatctgggctgacacc

SEQ ID NO: 3201674 - DNA, 25 bp, Homo sapien
tgagggccaccttagaaactgtctg

SEQ ID NO: 3201675 - DNA, 25 bp, Homo sapien
aataatacagttgggtgcagtggtc

SEQ ID NO: 3201676 - DNA, 25 bp, Homo sapien
tgcagtggtccatagtggtgtgcgc

SEQ ID NO: 3201677 - DNA, 25 bp, Homo sapien
atgatagtgctattgctctccagcg

SEQ ID NO: 3201678 - DNA, 25 bp, Homo sapien
tgatagtgctattgctctccagcgt

SEQ ID NO: 3201679 - DNA, 25 bp, Homo sapien
tagttatctaatcagccatgatttg

SEQ ID NO: 3201680 - DNA, 25 bp, Homo sapien
ggataagcaaagtatgtacatacaa

SEQ ID NO: 3201681 - DNA, 25 bp, Homo sapien
tatgccataaagtagacctaaaatt

SEQ ID NO: 3201682 - DNA, 25 bp, Homo sapien
tattctatctaaagtaaacactagt

SEQ ID NO: 3201683 - DNA, 25 bp, Homo sapien
tcttgggcgtttgcttaattgagat

SEQ ID NO: 3201684 - DNA, 25 bp, Homo sapien
attcaaagttagtaccccataatga

SEQ ID NO: 3201685 - DNA, 25 bp, Homo sapien
ggtacaaatgttcacctgtaaaatc

SEQ ID NO: 3201686 - DNA, 25 bp, Homo sapien
gaacaataggccatagcttcctgac

SEQ ID NO: 3201687 - DNA, 25 bp, Homo sapien
ttatactaagtatatccaatgactg

SEQ ID NO: 3201688 - DNA, 25 bp, Homo sapien
acagcgcctggctaaaggatatttt

SEQ ID NO: 3201689 - DNA, 25 bp, Homo sapien
tatccaatgactggtaggataccta

SEQ ID NO: 3201690 - DNA, 25 bp, Homo sapien
gatacctagtagaattcctcatgga

SEQ ID NO: 3201691 - DNA, 25 bp, Homo sapien
caactttacagtgggttcgttggag

SEQ ID NO: 3201692 - DNA, 25 bp, Homo sapien
gaacagactctagagccaaattggg

SEQ ID NO: 3201693 - DNA, 25 bp, Homo sapien
tgaggaacatttagacttacagtgg

SEQ ID NO: 3201694 - DNA, 25 bp, Homo sapien
tgctacacctagtacagaatcagga

SEQ ID NO: 3201695 - DNA, 25 bp, Homo sapien
taatattcctctgtttgcctacgtg

SEQ ID NO: 3201696 - DNA, 25 bp, Homo sapien
ccatagatgaaccatccctgggtgg

SEQ ID NO: 3201697 - DNA, 25 bp, Homo sapien
cagacaagacaacgtatggccagag

SEQ ID NO: 3201698 - DNA, 25 bp, Homo sapien
tacgtgtagaatgtaacccaccatc

SEQ ID NO: 3201699 - DNA, 25 bp, Homo sapien
tcacacccatcagtagcaaacaagc

SEQ ID NO: 3201700 - DNA, 25 bp, Homo sapien
gaagtctccggtatagaatatctaa

SEQ ID NO: 3201701 - DNA, 25 bp, Homo sapien
tttgttaggagaagtctccggtata

SEQ ID NO: 3201702 - DNA, 25 bp, Homo sapien
tagaatatctaacttgctcacaccc

SEQ ID NO: 3201703 - DNA, 25 bp, Homo sapien
aatgtgtactggataatcgcttgaa

SEQ ID NO: 3201704 - DNA, 25 bp, Homo sapien
caatgtgtactggataatcgcttga

SEQ ID NO: 3201705 - DNA, 25 bp, Homo sapien
ttctggcatctttcccgatttccaa

SEQ ID NO: 3201706 - DNA, 25 bp, Homo sapien
ggcatctttcccgatttccaatcat

SEQ ID NO: 3201707 - DNA, 25 bp, Homo sapien
aacaaagtgtccatctaagatctta

SEQ ID NO: 3201708 - DNA, 25 bp, Homo sapien
gggaaacaaagtgtccatctaagat

SEQ ID NO: 3201709 - DNA, 25 bp, Homo sapien
caaagtgtccatctaagatcttaca

SEQ ID NO: 3201710 - DNA, 25 bp, Homo sapien
gaaacaaagtgtccatctaagatct

SEQ ID NO: 3201711 - DNA, 25 bp, Homo sapien
taacagattcaattggcatgatatc

SEQ ID NO: 3201712 - DNA, 25 bp, Homo sapien
agattcaattggcatgatatcaggc

SEQ ID NO: 3201713 - DNA, 25 bp, Homo sapien
ttcaattggcatgatatcaggcaca

SEQ ID NO: 3201714 - DNA, 25 bp, Homo sapien
cttgcaataacagattcaattggca

SEQ ID NO: 3201715 - DNA, 25 bp, Homo sapien
aattgctgcacaagaatgacggggg

SEQ ID NO: 3201716 - DNA, 25 bp, Homo sapien
agaaccgttcctcaatttccaacag

SEQ ID NO: 3201717 - DNA, 25 bp, Homo sapien
tgcttcaaatttgactagaaattgt

SEQ ID NO: 3201718 - DNA, 25 bp, Homo sapien
tcatctgggaacttatagtatttca

SEQ ID NO: 3201719 - DNA, 25 bp, Homo sapien
tgcagaaagcgagtaggagaaatat

SEQ ID NO: 3201720 - DNA, 25 bp, Homo sapien
ttgcagaaagcgagtaggagaaata

SEQ ID NO: 3201721 - DNA, 25 bp, Homo sapien
ccagagagtacagtaagattgtgta

SEQ ID NO: 3201722 - DNA, 25 bp, Homo sapien
aatgtaagtctttaacactctttca

SEQ ID NO: 3201723 - DNA, 25 bp, Homo sapien
actgcctagtcttttgaaatgtaag

SEQ ID NO: 3201724 - DNA, 25 bp, Homo sapien
atttcctgatctccagagagtacag

SEQ ID NO: 3201725 - DNA, 25 bp, Homo sapien
gaagaatcaagttggtatcaagcat

SEQ ID NO: 3201726 - DNA, 25 bp, Homo sapien
ggtagaagaatcaagttggtatcaa

SEQ ID NO: 3201727 - DNA, 25 bp, Homo sapien
aaaggtagaagaatcaagttggtat

SEQ ID NO: 3201728 - DNA, 25 bp, Homo sapien
aatcaagttggtatcaagcatttca

SEQ ID NO: 3201729 - DNA, 25 bp, Homo sapien
tccagcaagatgaatgcatacaggt

SEQ ID NO: 3201730 - DNA, 25 bp, Homo sapien
tgaatgcatacaggtctatatttgc

SEQ ID NO: 3201731 - DNA, 25 bp, Homo sapien
catacaggtctatatttgctgttcc

SEQ ID NO: 3201732 - DNA, 25 bp, Homo sapien
caagatgaatgcatacaggtctata

SEQ ID NO: 3201733 - DNA, 25 bp, Homo sapien
ttagtgttcgtcgcctccagtaatg

SEQ ID NO: 3201734 - DNA, 25 bp, Homo sapien
acaataaagaagccattcgggcttc

SEQ ID NO: 3201735 - DNA, 25 bp, Homo sapien
caataaagaagccattcgggcttct

SEQ ID NO: 3201736 - DNA, 25 bp, Homo sapien
agccattcgggcttctttaatcata

SEQ ID NO: 3201737 - DNA, 25 bp, Homo sapien
agaagccattcgggcttctttaatc

SEQ ID NO: 3201738 - DNA, 25 bp, Homo sapien
tatatctgtgcaccagtttcatttc

SEQ ID NO: 3201739 - DNA, 25 bp, Homo sapien
ctttatatctgtgcaccagtttcat

SEQ ID NO: 3201740 - DNA, 25 bp, Homo sapien
atttctttatatctgtgcaccagtt

SEQ ID NO: 3201741 - DNA, 25 bp, Homo sapien
cagcaacgttgaacatttctttata

SEQ ID NO: 3201742 - DNA, 25 bp, Homo sapien
cctaagagattattcccatttatca

SEQ ID NO: 3201743 - DNA, 25 bp, Homo sapien
gcactgttctagacagtattaatca

SEQ ID NO: 3201744 - DNA, 25 bp, Homo sapien
tcacatcagaaatactggtcataca

SEQ ID NO: 3201745 - DNA, 25 bp, Homo sapien
acctggcctatatcctacattcaca

SEQ ID NO: 3201746 - DNA, 25 bp, Homo sapien
tattactctttatacaattgccctg

SEQ ID NO: 3201747 - DNA, 25 bp, Homo sapien
ccctcctgacgcttacattgggctt

SEQ ID NO: 3201748 - DNA, 25 bp, Homo sapien
gccagcccttgcctatctttctgac

SEQ ID NO: 3201749 - DNA, 25 bp, Homo sapien
aatactgttactacactgcatccca

SEQ ID NO: 3201750 - DNA, 25 bp, Homo sapien
ccacgcccggattttgttgtatctt

SEQ ID NO: 3201751 - DNA, 25 bp, Homo sapien
cacaccatccaattcatacacaagt

SEQ ID NO: 3201752 - DNA, 25 bp, Homo sapien
catacacaagtcctattatttaaac

SEQ ID NO: 3201753 - DNA, 25 bp, Homo sapien
cttaactatatcttgaactcaggaa

SEQ ID NO: 3201754 - DNA, 25 bp, Homo sapien
aattctgggcttggttccaaagtgg

SEQ ID NO: 3201755 - DNA, 25 bp, Homo sapien
tctgggcttggttccaaagtggaaa

SEQ ID NO: 3201756 - DNA, 25 bp, Homo sapien
ctgaattctgggcttggttccaaag

SEQ ID NO: 3201757 - DNA, 25 bp, Homo sapien
tgaattctgggcttggttccaaagt

SEQ ID NO: 3201758 - DNA, 25 bp, Homo sapien
aaggtcggacacattttttaagctg

SEQ ID NO: 3201759 - DNA, 25 bp, Homo sapien
gtcggacacattttttaagctggac

SEQ ID NO: 3201760 - DNA, 25 bp, Homo sapien
ggtcggacacattttttaagctgga

SEQ ID NO: 3201761 - DNA, 25 bp, Homo sapien
aggtcggacacattttttaagctgg

SEQ ID NO: 3201762 - DNA, 25 bp, Homo sapien
tccagtcattcctaaagggccgtaa

SEQ ID NO: 3201763 - DNA, 25 bp, Homo sapien
cctcccatggatattccagtcattc

SEQ ID NO: 3201764 - DNA, 25 bp, Homo sapien
ccctctctagccagtgcaagagagc

SEQ ID NO: 3201765 - DNA, 25 bp, Homo sapien
caagagagctgcagattctaaaaca

SEQ ID NO: 3201766 - DNA, 25 bp, Homo sapien
actctgttgctcacgctagagtgca

SEQ ID NO: 3201767 - DNA, 25 bp, Homo sapien
agagtgcagtggtgcgatctcagct

SEQ ID NO: 3201768 - DNA, 25 bp, Homo sapien
cactctgttgctcacgctagagtgc

SEQ ID NO: 3201769 - DNA, 25 bp, Homo sapien
agttggataccgctaaggaagccat

SEQ ID NO: 3201770 - DNA, 25 bp, Homo sapien
caagacaggcatggaatcaatggca

SEQ ID NO: 3201771 - DNA, 25 bp, Homo sapien
gatgctgtggaccaagacaggcatg

SEQ ID NO: 3201772 - DNA, 25 bp, Homo sapien
caatggcatgggcttaggccagttg

SEQ ID NO: 3201773 - DNA, 25 bp, Homo sapien
tcttcataaactgtctgggtataat

SEQ ID NO: 3201774 - DNA, 25 bp, Homo sapien
caattaattgatttactcaacacac

SEQ ID NO: 3201775 - DNA, 25 bp, Homo sapien
aattaattgatttactcaacacacc

SEQ ID NO: 3201776 - DNA, 25 bp, Homo sapien
tgtctgggtataatattgcttttcc

SEQ ID NO: 3201777 - DNA, 25 bp, Homo sapien
ccagattaaggttagttagcttgtc

SEQ ID NO: 3201778 - DNA, 25 bp, Homo sapien
gattaaggttagttagcttgtctgc

SEQ ID NO: 3201779 - DNA, 25 bp, Homo sapien
aaggttagttagcttgtctgcactg

SEQ ID NO: 3201780 - DNA, 25 bp, Homo sapien
aaccagattaaggttagttagcttg

SEQ ID NO: 3201781 - DNA, 25 bp, Homo sapien
tgagggttgcgacttgtataaccac

SEQ ID NO: 3201782 - DNA, 25 bp, Homo sapien
tgaagcgcttcatcttagaggtatc

SEQ ID NO: 3201783 - DNA, 25 bp, Homo sapien
cagtcagcaggtttttgggatacaa

SEQ ID NO: 3201784 - DNA, 25 bp, Homo sapien
tagaggtatcttgcaataagagtcc

SEQ ID NO: 3201785 - DNA, 25 bp, Homo sapien
aaacatattctggagccaacaaaaa

SEQ ID NO: 3201786 - DNA, 25 bp, Homo sapien
ggctgtccagtgtgtttcttaatga

SEQ ID NO: 3201787 - DNA, 25 bp, Homo sapien
tcacaaatacttacacatcagcaaa

SEQ ID NO: 3201788 - DNA, 25 bp, Homo sapien
catttaagtaaccaacttatctttg

SEQ ID NO: 3201789 - DNA, 25 bp, Homo sapien
gtgtccagctccagagtgtgtgaga

SEQ ID NO: 3201790 - DNA, 25 bp, Homo sapien
tgtgtccagctccagagtgtgtgag

SEQ ID NO: 3201791 - DNA, 25 bp, Homo sapien
taagtatcggatttcacaaccaggc

SEQ ID NO: 3201792 - DNA, 25 bp, Homo sapien
cctgttcgtggaatataggcatctt

SEQ ID NO: 3201793 - DNA, 25 bp, Homo sapien
atttcttgtaaacttcgaactcctg

SEQ ID NO: 3201794 - DNA, 25 bp, Homo sapien
ctttggcttgaaccactataatgag

SEQ ID NO: 3201795 - DNA, 25 bp, Homo sapien
tacctggccattaatatttgaagag

SEQ ID NO: 3201796 - DNA, 25 bp, Homo sapien
gaaagccacacgataaagcatgcct

SEQ ID NO: 3201797 - DNA, 25 bp, Homo sapien
gcatcatgcttagttctctagaaga

SEQ ID NO: 3201798 - DNA, 25 bp, Homo sapien
tgaaaaaactcttgatgcaccaaag

SEQ ID NO: 3201799 - DNA, 25 bp, Homo sapien
actcacatctactgttaaccttttc

SEQ ID NO: 3201800 - DNA, 25 bp, Homo sapien
cactcacatctactgttaacctttt

SEQ ID NO: 3201801 - DNA, 25 bp, Homo sapien
ctagttagcgtatttatggaggaag

SEQ ID NO: 3201802 - DNA, 25 bp, Homo sapien
ggtcaaatgcatcatagatggcttg

SEQ ID NO: 3201803 - DNA, 25 bp, Homo sapien
gcgtatttatggaggaagcggtcaa

SEQ ID NO: 3201804 - DNA, 25 bp, Homo sapien
aagcggtcaaatgcatcatagatgg

SEQ ID NO: 3201805 - DNA, 25 bp, Homo sapien
tgtttctcaaatcaagtcaagagtg

SEQ ID NO: 3201806 - DNA, 25 bp, Homo sapien
gtaagaaacatcatggccacactgg

SEQ ID NO: 3201807 - DNA, 25 bp, Homo sapien
tcacaggatgaagctcccttttgta

SEQ ID NO: 3201808 - DNA, 25 bp, Homo sapien
gatgtgtaacaatgaattccagacc

SEQ ID NO: 3201809 - DNA, 25 bp, Homo sapien
aaaagcacttacattcaagtagagg

SEQ ID NO: 3201810 - DNA, 25 bp, Homo sapien
taaagttttagtctagcaaagtcta

SEQ ID NO: 3201811 - DNA, 25 bp, Homo sapien
gcacttacattcaagtagaggtaca

SEQ ID NO: 3201812 - DNA, 25 bp, Homo sapien
tagtctagcaaagtctaatgcattt

SEQ ID NO: 3201813 - DNA, 25 bp, Homo sapien
ggtagttagatggttagcaatccaa

SEQ ID NO: 3201814 - DNA, 25 bp, Homo sapien
gaaagcaccaaatcgagccatataa

SEQ ID NO: 3201815 - DNA, 25 bp, Homo sapien
tgatagaggcatagaggtgacaaat

SEQ ID NO: 3201816 - DNA, 25 bp, Homo sapien
tcaaagagctgtacagtgttggctt

SEQ ID NO: 3201817 - DNA, 25 bp, Homo sapien
cacccggcctagggatatattctta

SEQ ID NO: 3201818 - DNA, 25 bp, Homo sapien
aaacatctggttaagagatgaaatt

SEQ ID NO: 3201819 - DNA, 25 bp, Homo sapien
aaaacatctggttaagagatgaaat

SEQ ID NO: 3201820 - DNA, 25 bp, Homo sapien
gcctagggatatattcttaaaacat

SEQ ID NO: 3201821 - DNA, 25 bp, Homo sapien
gtatttgagaacacttaagccacca

SEQ ID NO: 3201822 - DNA, 25 bp, Homo sapien
taactgtgggtcaaactggcctatg

SEQ ID NO: 3201823 - DNA, 25 bp, Homo sapien
tggcagataaatggcagaccgcact

SEQ ID NO: 3201824 - DNA, 25 bp, Homo sapien
aacttagaggtcttcagggctgagc

SEQ ID NO: 3201825 - DNA, 25 bp, Homo sapien
ctgaatggctcggtcctggctcacc

SEQ ID NO: 3201826 - DNA, 25 bp, Homo sapien
gaatggctcggtcctggctcaccac

SEQ ID NO: 3201827 - DNA, 25 bp, Homo sapien
aggctgaatggctcggtcctggctc

SEQ ID NO: 3201828 - DNA, 25 bp, Homo sapien
ggctgaatggctcggtcctggctca

SEQ ID NO: 3201829 - DNA, 25 bp, Homo sapien
ccttaggccctaaagctgggtcgca

SEQ ID NO: 3201830 - DNA, 25 bp, Homo sapien
tcccaagtgaagtgggctccgcggc

SEQ ID NO: 3201831 - DNA, 25 bp, Homo sapien
tcttgagccacgtcccagatgaagg

SEQ ID NO: 3201832 - DNA, 25 bp, Homo sapien
cgcgatcacctgtaatcttgagcca

SEQ ID NO: 3201833 - DNA, 25 bp, Homo sapien
aggccgaggagctttacccgagttg

SEQ ID NO: 3201834 - DNA, 25 bp, Homo sapien
gccgaggccgaggagctttacccga

SEQ ID NO: 3201835 - DNA, 25 bp, Homo sapien
ggaggcgcgagcagccaaagctggt

SEQ ID NO: 3201836 - DNA, 25 bp, Homo sapien
cgcgagcagccaaagctggtaactg

SEQ ID NO: 3201837 - DNA, 25 bp, Homo sapien
cagggaacccgactgcccgtctctc

SEQ ID NO: 3201838 - DNA, 25 bp, Homo sapien
ctccccgcaccgaacggagcgccaa

SEQ ID NO: 3201839 - DNA, 25 bp, Homo sapien
accggccggctccaactggggacag

SEQ ID NO: 3201840 - DNA, 25 bp, Homo sapien
gacagacaacccgagagcccggcgg

SEQ ID NO: 3201841 - DNA, 25 bp, Homo sapien
cgggcatcggggcgcgagtagacat

SEQ ID NO: 3201842 - DNA, 25 bp, Homo sapien
gcgggcatcggggcgcgagtagaca

SEQ ID NO: 3201843 - DNA, 25 bp, Homo sapien
ctcccgagaatgggcggcgggcatc

SEQ ID NO: 3201844 - DNA, 25 bp, Homo sapien
ccgagaatgggcggcgggcatcggg

SEQ ID NO: 3201845 - DNA, 25 bp, Homo sapien
acagcgactccctctcagcagtcac

SEQ ID NO: 3201846 - DNA, 25 bp, Homo sapien
ggccaacagcgactccctctcagca

SEQ ID NO: 3201847 - DNA, 25 bp, Homo sapien
ccaacagcgactccctctcagcagt

SEQ ID NO: 3201848 - DNA, 25 bp, Homo sapien
aacagcgactccctctcagcagtca

SEQ ID NO: 3201849 - DNA, 25 bp, Homo sapien
gcgccttgtgcgccaggtgcagcgc

SEQ ID NO: 3201850 - DNA, 25 bp, Homo sapien
cgccaggtgcagcgccaggggcctc

SEQ ID NO: 3201851 - DNA, 25 bp, Homo sapien
gccttgtgcgccaggtgcagcgcca

SEQ ID NO: 3201852 - DNA, 25 bp, Homo sapien
ccaggtgcagcgccaggggcctcac

SEQ ID NO: 3201853 - DNA, 25 bp, Homo sapien
ggcggatcccgcagcaacggcggca

SEQ ID NO: 3201854 - DNA, 25 bp, Homo sapien
gatcccgcagcaacggcggcaacgg

SEQ ID NO: 3201855 - DNA, 25 bp, Homo sapien
agcaacggcggcaacggcgacggcg

SEQ ID NO: 3201856 - DNA, 25 bp, Homo sapien
caacggcggcaacggcgacggcggc

SEQ ID NO: 3201857 - DNA, 25 bp, Homo sapien
ggcggctgccgcttttccgcagggc

SEQ ID NO: 3201858 - DNA, 25 bp, Homo sapien
gccgcttttccgcagggccagctgc

SEQ ID NO: 3201859 - DNA, 25 bp, Homo sapien
agcggcggctgccgcttttccgcag

SEQ ID NO: 3201860 - DNA, 25 bp, Homo sapien
ggctgccgcttttccgcagggccag

SEQ ID NO: 3201861 - DNA, 25 bp, Homo sapien
ggcggtggcggacctgtcgtgtctg

SEQ ID NO: 3201862 - DNA, 25 bp, Homo sapien
cggtggcggacctgtcgtgtctggg

SEQ ID NO: 3201863 - DNA, 25 bp, Homo sapien
ggggcggtggcggacctgtcgtgtc

SEQ ID NO: 3201864 - DNA, 25 bp, Homo sapien
cgggggcggtggcggacctgtcgtg

SEQ ID NO: 3201865 - DNA, 25 bp, Homo sapien
tggtgcccgctaccgccgccacgcg

SEQ ID NO: 3201866 - DNA, 25 bp, Homo sapien
acgcgccggcaagtcccgcaagtcg

SEQ ID NO: 3201867 - DNA, 25 bp, Homo sapien
cctgccagtgcccaacgcagagcaa

SEQ ID NO: 3201868 - DNA, 25 bp, Homo sapien
gtgcccaacgcagagcaaccacaga

SEQ ID NO: 3201869 - DNA, 25 bp, Homo sapien
actgacagggaggggaggcctgccg

SEQ ID NO: 3201870 - DNA, 25 bp, Homo sapien
ctccgactgacagggaggggaggcc

SEQ ID NO: 3201871 - DNA, 25 bp, Homo sapien
tccgactgacagggaggggaggcct

SEQ ID NO: 3201872 - DNA, 25 bp, Homo sapien
gacagggaggggaggcctgccgtta

SEQ ID NO: 3201873 - DNA, 25 bp, Homo sapien
ctcttgggtgggcagcaactttggc

SEQ ID NO: 3201874 - DNA, 25 bp, Homo sapien
tgaagagtgcctcatctggatttct

SEQ ID NO: 3201875 - DNA, 25 bp, Homo sapien
ctttggctgaagagtgcctcatctg

SEQ ID NO: 3201876 - DNA, 25 bp, Homo sapien
tggctgaagagtgcctcatctggat

SEQ ID NO: 3201877 - DNA, 25 bp, Homo sapien
gagagttggttgctggcagtaccac

SEQ ID NO: 3201878 - DNA, 25 bp, Homo sapien
tggcttgataaagcgcaccagctgg

SEQ ID NO: 3201879 - DNA, 25 bp, Homo sapien
ggctacaaggccaaccaagtttatg

SEQ ID NO: 3201880 - DNA, 25 bp, Homo sapien
catctggcttgataaagcgcaccag

SEQ ID NO: 3201881 - DNA, 25 bp, Homo sapien
ttctttgtcttgagctttcctgcct

SEQ ID NO: 3201882 - DNA, 25 bp, Homo sapien
tggatttctttgtcttgagctttcc

SEQ ID NO: 3201883 - DNA, 25 bp, Homo sapien
cttgagctttcctgcctttataatt

SEQ ID NO: 3201884 - DNA, 25 bp, Homo sapien
cttgttggatttctttgtcttgagc

SEQ ID NO: 3201885 - DNA, 25 bp, Homo sapien
agtgttcactaattcacttggtgtt

SEQ ID NO: 3201886 - DNA, 25 bp, Homo sapien
tgcgatacacgcatgacccattgca

SEQ ID NO: 3201887 - DNA, 25 bp, Homo sapien
aaactgcaatgggataccactcctc

SEQ ID NO: 3201888 - DNA, 25 bp, Homo sapien
gggcagattgatcacatacttcatc

SEQ ID NO: 3201889 - DNA, 25 bp, Homo sapien
ttatcggtgagtaaagatgggttcg

SEQ ID NO: 3201890 - DNA, 25 bp, Homo sapien
taatattttcactaacatacccaaa

SEQ ID NO: 3201891 - DNA, 25 bp, Homo sapien
ccattaatattttcactaacatacc

SEQ ID NO: 3201892 - DNA, 25 bp, Homo sapien
ccaaaaatttgtggcaatataccta

SEQ ID NO: 3201893 - DNA, 25 bp, Homo sapien
cactaacatacccaaaaatttgtgg

SEQ ID NO: 3201894 - DNA, 25 bp, Homo sapien
catcctcactgacgttttcaccagg

SEQ ID NO: 3201895 - DNA, 25 bp, Homo sapien
gttgattacttgactgagcctcatc

SEQ ID NO: 3201896 - DNA, 25 bp, Homo sapien
ttacttgactgagcctcatcctcac

SEQ ID NO: 3201897 - DNA, 25 bp, Homo sapien
ctcactgacgttttcaccaggacca

SEQ ID NO: 3201898 - DNA, 25 bp, Homo sapien
tcgtgtatcatttctcctattgtta

SEQ ID NO: 3201899 - DNA, 25 bp, Homo sapien
tacaacatctaagtggagtggtacc

SEQ ID NO: 3201900 - DNA, 25 bp, Homo sapien
tttatttgcttcaggttgacatctt

SEQ ID NO: 3201901 - DNA, 25 bp, Homo sapien
tcttgagctgttccgggatccaggt

SEQ ID NO: 3201902 - DNA, 25 bp, Homo sapien
tcccagatcaagccacctcccgctc

SEQ ID NO: 3201903 - DNA, 25 bp, Homo sapien
ctcccagatcaagccacctcccgct

SEQ ID NO: 3201904 - DNA, 25 bp, Homo sapien
ggaacctcggatattaccaccctca

SEQ ID NO: 3201905 - DNA, 25 bp, Homo sapien
cttctcacactggaaacgtcatctt

SEQ ID NO: 3201906 - DNA, 25 bp, Homo sapien
tctaaaggaacctcggatattacca

SEQ ID NO: 3201907 - DNA, 25 bp, Homo sapien
cactggaaacgtcatcttgatcatc

SEQ ID NO: 3201908 - DNA, 25 bp, Homo sapien
gataaccatatgaataatcaaagtt

SEQ ID NO: 3201909 - DNA, 25 bp, Homo sapien
gttcttgataaccatatgaataatc

SEQ ID NO: 3201910 - DNA, 25 bp, Homo sapien
tgaaatggttgatcagtcctttcac

SEQ ID NO: 3201911 - DNA, 25 bp, Homo sapien
tgatcagtcctttcaccatgttctt

SEQ ID NO: 3201912 - DNA, 25 bp, Homo sapien
caaaagaagcaagaacaatataaac

SEQ ID NO: 3201913 - DNA, 25 bp, Homo sapien
ctgtaacaaaagaagcaagaacaat

SEQ ID NO: 3201914 - DNA, 25 bp, Homo sapien
gaacaatataaacaagttgctccac

SEQ ID NO: 3201915 - DNA, 25 bp, Homo sapien
taacaaaagaagcaagaacaatata

SEQ ID NO: 3201916 - DNA, 25 bp, Homo sapien
ccgattatcctgacatggagttgca

SEQ ID NO: 3201917 - DNA, 25 bp, Homo sapien
tggagttgcatgtccactgtcaggt

SEQ ID NO: 3201918 - DNA, 25 bp, Homo sapien
tgtcaggtctcagaagggacttggc

SEQ ID NO: 3201919 - DNA, 25 bp, Homo sapien
ttgtatgagcacactggaggccgat

SEQ ID NO: 3201920 - DNA, 25 bp, Homo sapien
gctctggattctacactgcatgatc

SEQ ID NO: 3201921 - DNA, 25 bp, Homo sapien
tttgtcaacactgaagtagctctgc

SEQ ID NO: 3201922 - DNA, 25 bp, Homo sapien
aacactgaagtagctctgctcctcc

SEQ ID NO: 3201923 - DNA, 25 bp, Homo sapien
tctacactgcatgatcagaaatttt

SEQ ID NO: 3201924 - DNA, 25 bp, Homo sapien
catctttccccgaagaaagaagtct

SEQ ID NO: 3201925 - DNA, 25 bp, Homo sapien
tcatccatctttccccgaagaaaga

SEQ ID NO: 3201926 - DNA, 25 bp, Homo sapien
atccatctttccccgaagaaagaag

SEQ ID NO: 3201927 - DNA, 25 bp, Homo sapien
cgaagaaagaagtctcgttccaaat

SEQ ID NO: 3201928 - DNA, 25 bp, Homo sapien
ggcacactgcgtggaggagggcctg

SEQ ID NO: 3201929 - DNA, 25 bp, Homo sapien
gagaagtctgttggtggcacactgc

SEQ ID NO: 3201930 - DNA, 25 bp, Homo sapien
gagcaaaaggcttggcctggtacaa

SEQ ID NO: 3201931 - DNA, 25 bp, Homo sapien
aactctggacaatcaatcagttgag

SEQ ID NO: 3201932 - DNA, 25 bp, Homo sapien
taacccactgttacatcgtttgctc

SEQ ID NO: 3201933 - DNA, 25 bp, Homo sapien
gaccaaataacccactgttacatcg

SEQ ID NO: 3201934 - DNA, 25 bp, Homo sapien
ttggaccaaataacccactgttaca

SEQ ID NO: 3201935 - DNA, 25 bp, Homo sapien
tgttacatcgtttgctctagaagaa

SEQ ID NO: 3201936 - DNA, 25 bp, Homo sapien
caagattaaagcgtattggtaacaa

SEQ ID NO: 3201937 - DNA, 25 bp, Homo sapien
cattttttcccaagagggaatgtct

SEQ ID NO: 3201938 - DNA, 25 bp, Homo sapien
taatttgtaactctgtgagtgaggc

SEQ ID NO: 3201939 - DNA, 25 bp, Homo sapien
ggaagactaccccactcttgagtat

SEQ ID NO: 3201940 - DNA, 25 bp, Homo sapien
tgacatccaagagcttcagaagatc

SEQ ID NO: 3201941 - DNA, 25 bp, Homo sapien
caattacacagaaataggcagctcc

SEQ ID NO: 3201942 - DNA, 25 bp, Homo sapien
aaaggtggttatctccactgcagtg

SEQ ID NO: 3201943 - DNA, 25 bp, Homo sapien
tgtctctcattatcgcaaaggtggt

SEQ ID NO: 3201944 - DNA, 25 bp, Homo sapien
ctgctttattcatctggacacaagt

SEQ ID NO: 3201945 - DNA, 25 bp, Homo sapien
tctgctttattcatctggacacaag

SEQ ID NO: 3201946 - DNA, 25 bp, Homo sapien
gacctatcttacctaccctgcagag

SEQ ID NO: 3201947 - DNA, 25 bp, Homo sapien
gaacccaatgttcataagctagcta

SEQ ID NO: 3201948 - DNA, 25 bp, Homo sapien
tggacaggcattaccaacttgactg

SEQ ID NO: 3201949 - DNA, 25 bp, Homo sapien
gatgggacgtcctctcatactgatg

SEQ ID NO: 3201950 - DNA, 25 bp, Homo sapien
gggctcaatgggcttccaattcttg

SEQ ID NO: 3201951 - DNA, 25 bp, Homo sapien
tttaacttctatccaaggttctgag

SEQ ID NO: 3201952 - DNA, 25 bp, Homo sapien
caaacctctagacattgcttgaaga

SEQ ID NO: 3201953 - DNA, 25 bp, Homo sapien
ctgtttttctttgggctcaatgggc

SEQ ID NO: 3201954 - DNA, 25 bp, Homo sapien
aacagttatctctgaaatatctagg

SEQ ID NO: 3201955 - DNA, 25 bp, Homo sapien
gttatctctgaaatatctaggcccc

SEQ ID NO: 3201956 - DNA, 25 bp, Homo sapien
tctgaaatatctaggcccccagaac

SEQ ID NO: 3201957 - DNA, 25 bp, Homo sapien
cagttatctctgaaatatctaggcc

SEQ ID NO: 3201958 - DNA, 25 bp, Homo sapien
atagctgatttaatgacccttcagg

SEQ ID NO: 3201959 - DNA, 25 bp, Homo sapien
tgaagaacatagctgatttaatgac

SEQ ID NO: 3201960 - DNA, 25 bp, Homo sapien
gaacatagctgatttaatgaccctt

SEQ ID NO: 3201961 - DNA, 25 bp, Homo sapien
aagaacatagctgatttaatgaccc

SEQ ID NO: 3201962 - DNA, 25 bp, Homo sapien
gatcctgttcataatagtataagcc

SEQ ID NO: 3201963 - DNA, 25 bp, Homo sapien
tcagatgtgatttttgcccgagaca

SEQ ID NO: 3201964 - DNA, 25 bp, Homo sapien
aaggtggtgtctgagttacaatcaa

SEQ ID NO: 3201965 - DNA, 25 bp, Homo sapien
tgggtgcctgttcgatctcctccag

SEQ ID NO: 3201966 - DNA, 25 bp, Homo sapien
agtagaaagatgttggccagaaaca

SEQ ID NO: 3201967 - DNA, 25 bp, Homo sapien
aaacaaagcatcagtagaaagatgt

SEQ ID NO: 3201968 - DNA, 25 bp, Homo sapien
aaagatgttggccagaaacaattac

SEQ ID NO: 3201969 - DNA, 25 bp, Homo sapien
gcatcagtagaaagatgttggccag

SEQ ID NO: 3201970 - DNA, 25 bp, Homo sapien
aaatagagcctcaagtttgagaaaa

SEQ ID NO: 3201971 - DNA, 25 bp, Homo sapien
tagagcctcaagtttgagaaaatat

SEQ ID NO: 3201972 - DNA, 25 bp, Homo sapien
aatagagcctcaagtttgagaaaat

SEQ ID NO: 3201973 - DNA, 25 bp, Homo sapien
atagagcctcaagtttgagaaaata

SEQ ID NO: 3201974 - DNA, 25 bp, Homo sapien
cagtttagtcatttatagtttgtcc

SEQ ID NO: 3201975 - DNA, 25 bp, Homo sapien
cacagtaatgactagaccaagagag

SEQ ID NO: 3201976 - DNA, 25 bp, Homo sapien
gagataatcatccagtttagtcatt

SEQ ID NO: 3201977 - DNA, 25 bp, Homo sapien
tgtaaaaagtaaccctagcaccaca

SEQ ID NO: 3201978 - DNA, 25 bp, Homo sapien
cttaataactaggataggaaccagg

SEQ ID NO: 3201979 - DNA, 25 bp, Homo sapien
ttaataactaggataggaaccagga

SEQ ID NO: 3201980 - DNA, 25 bp, Homo sapien
gctaaggctctaagtcacgtaacaa

SEQ ID NO: 3201981 - DNA, 25 bp, Homo sapien
tgttgatgatatgaagccccaccga

SEQ ID NO: 3201982 - DNA, 25 bp, Homo sapien
tagcaatgcttacactaggaaagac

SEQ ID NO: 3201983 - DNA, 25 bp, Homo sapien
caagctatcatagcctgaggcaggt

SEQ ID NO: 3201984 - DNA, 25 bp, Homo sapien
cttttacattttggacgatggtccg

SEQ ID NO: 3201985 - DNA, 25 bp, Homo sapien
agatcatcttctaggacgtttatgg

SEQ ID NO: 3201986 - DNA, 25 bp, Homo sapien
tcatgataagcccaaggtcatctag

SEQ ID NO: 3201987 - DNA, 25 bp, Homo sapien
agtatctttcactgggcagaagttc

SEQ ID NO: 3201988 - DNA, 25 bp, Homo sapien
gcctgttaggaaccacggttgagtg

SEQ ID NO: 3201989 - DNA, 25 bp, Homo sapien
gagctccaccgtctgccagatcagt

SEQ ID NO: 3201990 - DNA, 25 bp, Homo sapien
gggaccgctgctctacaatatgtag

SEQ ID NO: 3201991 - DNA, 25 bp, Homo sapien
ttagtctctggtatcaaaaaggttg

SEQ ID NO: 3201992 - DNA, 25 bp, Homo sapien
tgattactgtaacaagcaggaagtc

SEQ ID NO: 3201993 - DNA, 25 bp, Homo sapien
tgtctattcaattggtccgtatgtc

SEQ ID NO: 3201994 - DNA, 25 bp, Homo sapien
aatcatttaaccatatacttaaggg

SEQ ID NO: 3201995 - DNA, 25 bp, Homo sapien
tctggactgtctattcaattggtcc

SEQ ID NO: 3201996 - DNA, 25 bp, Homo sapien
gctctgcaattcttaggcaaaacgt

SEQ ID NO: 3201997 - DNA, 25 bp, Homo sapien
tcccagactgaagtacgatggcgca

SEQ ID NO: 3201998 - DNA, 25 bp, Homo sapien
taccagtggaggtctaagtaccatg

SEQ ID NO: 3201999 - DNA, 25 bp, Homo sapien
gtggaaacatacttcgactgagtct

SEQ ID NO: 3202000 - DNA, 25 bp, Homo sapien
aatatgggaatttattacgttcact

SEQ ID NO: 3202001 - DNA, 25 bp, Homo sapien
aactttagttaccattcaattcata

SEQ ID NO: 3202002 - DNA, 25 bp, Homo sapien
tttaagcctattgccttagctgcac

SEQ ID NO: 3202003 - DNA, 25 bp, Homo sapien
tggtaattggactattaatttcaag

SEQ ID NO: 3202004 - DNA, 25 bp, Homo sapien
cctaacttcttgagatcaatgctat

SEQ ID NO: 3202005 - DNA, 25 bp, Homo sapien
caatcctcatattccccagaagaga

SEQ ID NO: 3202006 - DNA, 25 bp, Homo sapien
aatcctctattgtgcgttagatata

SEQ ID NO: 3202007 - DNA, 25 bp, Homo sapien
taagtcctgatatgattaatcctct

SEQ ID NO: 3202008 - DNA, 25 bp, Homo sapien
tatgtacaattaatccatgatcttg

SEQ ID NO: 3202009 - DNA, 25 bp, Homo sapien
ttcaatccgttaatgtgaatttcct

SEQ ID NO: 3202010 - DNA, 25 bp, Homo sapien
tttcttatgtacaattaatccatga

SEQ ID NO: 3202011 - DNA, 25 bp, Homo sapien
tgaacacaacttggttatctgtttt

SEQ ID NO: 3202012 - DNA, 25 bp, Homo sapien
aactctacttaccatctgatgtctt

SEQ ID NO: 3202013 - DNA, 25 bp, Homo sapien
aagtttgttcatgtcttataagcag

SEQ ID NO: 3202014 - DNA, 25 bp, Homo sapien
gtttgttcatgtcttataagcagta

SEQ ID NO: 3202015 - DNA, 25 bp, Homo sapien
gatgtcttaacattgctaatataag

SEQ ID NO: 3202016 - DNA, 25 bp, Homo sapien
ctcgttgtaacgtgtttctctctta

SEQ ID NO: 3202017 - DNA, 25 bp, Homo sapien
tttctacacaagcaacttgggcaga

SEQ ID NO: 3202018 - DNA, 25 bp, Homo sapien
gaatactgagcaactcgttgtaacg

SEQ ID NO: 3202019 - DNA, 25 bp, Homo sapien
atagaatactgagcaactcgttgta

SEQ ID NO: 3202020 - DNA, 25 bp, Homo sapien
gggtcacaaaaagtactcttcaatc

SEQ ID NO: 3202021 - DNA, 25 bp, Homo sapien
cagctaccttctctagctagactac

SEQ ID NO: 3202022 - DNA, 25 bp, Homo sapien
agaggcaatctacccacttagagca

SEQ ID NO: 3202023 - DNA, 25 bp, Homo sapien
ttagagcaccccatactactttctg

SEQ ID NO: 3202024 - DNA, 25 bp, Homo sapien
gctgttctcagcaatagggttcatc

SEQ ID NO: 3202025 - DNA, 25 bp, Homo sapien
tcccactcagagaaagcgtaactga

SEQ ID NO: 3202026 - DNA, 25 bp, Homo sapien
tctagagtcccacaaagacacaagg

SEQ ID NO: 3202027 - DNA, 25 bp, Homo sapien
tgataggacctagtgacaaactgca

SEQ ID NO: 3202028 - DNA, 25 bp, Homo sapien
gccactcatgttgctgatccttggc

SEQ ID NO: 3202029 - DNA, 25 bp, Homo sapien
taagggtaggtcagaggcctggggc

SEQ ID NO: 3202030 - DNA, 25 bp, Homo sapien
tggggcaactgctgggccccagaaa

SEQ ID NO: 3202031 - DNA, 25 bp, Homo sapien
ctaagggtaggtcagaggcctgggg

SEQ ID NO: 3202032 - DNA, 25 bp, Homo sapien
ctgctgggccccagaaaatgaagct

SEQ ID NO: 3202033 - DNA, 25 bp, Homo sapien
agttcctacacttggccgcagccag

SEQ ID NO: 3202034 - DNA, 25 bp, Homo sapien
cagtttatcagtctccgcctgcagg

SEQ ID NO: 3202035 - DNA, 25 bp, Homo sapien
tccgggctgatctgttcacaaggcc

SEQ ID NO: 3202036 - DNA, 25 bp, Homo sapien
gcttgttccgctcgggccttactcg

SEQ ID NO: 3202037 - DNA, 25 bp, Homo sapien
tttgcagatgggtcagtgggcttcc

SEQ ID NO: 3202038 - DNA, 25 bp, Homo sapien
tgtgtacccctccttggctccttcg

SEQ ID NO: 3202039 - DNA, 25 bp, Homo sapien
agatgggtcagtgggcttccagcac

SEQ ID NO: 3202040 - DNA, 25 bp, Homo sapien
ggctccttcggggattttgcagatg

SEQ ID NO: 3202041 - DNA, 25 bp, Homo sapien
aaagggagatacaaggtacagggcg

SEQ ID NO: 3202042 - DNA, 25 bp, Homo sapien
agggagatacaaggtacagggcggc

SEQ ID NO: 3202043 - DNA, 25 bp, Homo sapien
agatacaaggtacagggcggcaggg

SEQ ID NO: 3202044 - DNA, 25 bp, Homo sapien
ggagatacaaggtacagggcggcag

SEQ ID NO: 3202045 - DNA, 25 bp, Homo sapien
gggtcagaggatgggtctccgctgc

SEQ ID NO: 3202046 - DNA, 25 bp, Homo sapien
gtcagaggatgggtctccgctgctg

SEQ ID NO: 3202047 - DNA, 25 bp, Homo sapien
agaggatgggtctccgctgctgctg

SEQ ID NO: 3202048 - DNA, 25 bp, Homo sapien
aagggggtcagaggatgggtctccg

SEQ ID NO: 3202049 - DNA, 25 bp, Homo sapien
ctgcagggagtaaggctcgggtgcc

SEQ ID NO: 3202050 - DNA, 25 bp, Homo sapien
tgcagggagtaaggctcgggtgcct

SEQ ID NO: 3202051 - DNA, 25 bp, Homo sapien
cagggagtaaggctcgggtgcctca

SEQ ID NO: 3202052 - DNA, 25 bp, Homo sapien
agggagtaaggctcgggtgcctcac

SEQ ID NO: 3202053 - DNA, 25 bp, Homo sapien
gtcacgggggtagggttggatcaca

SEQ ID NO: 3202054 - DNA, 25 bp, Homo sapien
agaagccatgggcacctcccaagct

SEQ ID NO: 3202055 - DNA, 25 bp, Homo sapien
tccaggattcctccggcagaaatgg

SEQ ID NO: 3202056 - DNA, 25 bp, Homo sapien
gagcagacgttgcttagggtggcac

SEQ ID NO: 3202057 - DNA, 25 bp, Homo sapien
atttagcttcttaaagttctcaact

SEQ ID NO: 3202058 - DNA, 25 bp, Homo sapien
gactgtgaaggtgctacaggaactt

SEQ ID NO: 3202059 - DNA, 25 bp, Homo sapien
tcaaactgctctttactaatgagat

SEQ ID NO: 3202060 - DNA, 25 bp, Homo sapien
tgaaggtgctacaggaacttcttgg

SEQ ID NO: 3202061 - DNA, 25 bp, Homo sapien
gctgggttataatatggcgtattgc

SEQ ID NO: 3202062 - DNA, 25 bp, Homo sapien
aaatgaaactgctgggttataatat

SEQ ID NO: 3202063 - DNA, 25 bp, Homo sapien
aactgctgggttataatatggcgta

SEQ ID NO: 3202064 - DNA, 25 bp, Homo sapien
aatatggcgtattgctatggtttta

SEQ ID NO: 3202065 - DNA, 25 bp, Homo sapien
tgtatgatccaacagtgccctcaaa

SEQ ID NO: 3202066 - DNA, 25 bp, Homo sapien
gagatactactattagatgggcaaa

SEQ ID NO: 3202067 - DNA, 25 bp, Homo sapien
gagtaaagaactctcaaagctcagt

SEQ ID NO: 3202068 - DNA, 25 bp, Homo sapien
gatttgagcaggcactttaccaagc

SEQ ID NO: 3202069 - DNA, 25 bp, Homo sapien
tcccatagatgccaagagtaagtct

SEQ ID NO: 3202070 - DNA, 25 bp, Homo sapien
gagtaagtctcattgcttcccagaa

SEQ ID NO: 3202071 - DNA, 25 bp, Homo sapien
gaaaaaatgtatcctcatcaaagga

SEQ ID NO: 3202072 - DNA, 25 bp, Homo sapien
caactgcatcgaatactagtgccta

SEQ ID NO: 3202073 - DNA, 25 bp, Homo sapien
aatgtgaagcactccttgaacacct

SEQ ID NO: 3202074 - DNA, 25 bp, Homo sapien
atgtgaagcactccttgaacacctc

SEQ ID NO: 3202075 - DNA, 25 bp, Homo sapien
tcttgggaatgtgaagcactccttg

SEQ ID NO: 3202076 - DNA, 25 bp, Homo sapien
ctttcttgggaatgtgaagcactcc

SEQ ID NO: 3202077 - DNA, 25 bp, Homo sapien
catttgcctctagaataagcctagg

SEQ ID NO: 3202078 - DNA, 25 bp, Homo sapien
caatgcaaaggatatcatagcctcc

SEQ ID NO: 3202079 - DNA, 25 bp, Homo sapien
cctttaatacccaccacagatgtta

SEQ ID NO: 3202080 - DNA, 25 bp, Homo sapien
tctgaaagtccctttcctgcatctt

SEQ ID NO: 3202081 - DNA, 25 bp, Homo sapien
cttcactgttaccagaatgattatt

SEQ ID NO: 3202082 - DNA, 25 bp, Homo sapien
taagtgcccgctatttgccaagcac

SEQ ID NO: 3202083 - DNA, 25 bp, Homo sapien
tcaacaaatactaagtgcccgctat

SEQ ID NO: 3202084 - DNA, 25 bp, Homo sapien
tctaggcacgaatttgtaaagtcaa

SEQ ID NO: 3202085 - DNA, 25 bp, Homo sapien
tggtttttcttcagacttatcgact

SEQ ID NO: 3202086 - DNA, 25 bp, Homo sapien
acttctgagctaattcatcagtcaa

SEQ ID NO: 3202087 - DNA, 25 bp, Homo sapien
ttctgagctaattcatcagtcaaat

SEQ ID NO: 3202088 - DNA, 25 bp, Homo sapien
ataacttctgagctaattcatcagt

SEQ ID NO: 3202089 - DNA, 25 bp, Homo sapien
taacttctgagctaattcatcagtc

SEQ ID NO: 3202090 - DNA, 25 bp, Homo sapien
gatgaattctaggagattctggaac

SEQ ID NO: 3202091 - DNA, 25 bp, Homo sapien
gatcttgtaacctaggtgttcgagg

SEQ ID NO: 3202092 - DNA, 25 bp, Homo sapien
ctgctgtaggcaacgaatgaaccat

SEQ ID NO: 3202093 - DNA, 25 bp, Homo sapien
tgggtgttcttgtaggatgaattct

SEQ ID NO: 3202094 - DNA, 25 bp, Homo sapien
catactgtagataacacattgtgaa

SEQ ID NO: 3202095 - DNA, 25 bp, Homo sapien
aacattttcatactgtagataacac

SEQ ID NO: 3202096 - DNA, 25 bp, Homo sapien
aaccctctgactataaatgaactca

SEQ ID NO: 3202097 - DNA, 25 bp, Homo sapien
agtcaagcattgcaattagtttcaa

SEQ ID NO: 3202098 - DNA, 25 bp, Homo sapien
caacatgacactctagagggggatt

SEQ ID NO: 3202099 - DNA, 25 bp, Homo sapien
aacatgacactctagagggggattt

SEQ ID NO: 3202100 - DNA, 25 bp, Homo sapien
catgacactctagagggggatttgt

SEQ ID NO: 3202101 - DNA, 25 bp, Homo sapien
acatgacactctagagggggatttg

SEQ ID NO: 3202102 - DNA, 25 bp, Homo sapien
cagaggatgttcctggcccacggtc

SEQ ID NO: 3202103 - DNA, 25 bp, Homo sapien
ctgacagaggatgttcctggcccac

SEQ ID NO: 3202104 - DNA, 25 bp, Homo sapien
ctggcccacggtctctggaatccat

SEQ ID NO: 3202105 - DNA, 25 bp, Homo sapien
cctggcccacggtctctggaatcca

SEQ ID NO: 3202106 - DNA, 25 bp, Homo sapien
aatgactagctgtggcagctatagc

SEQ ID NO: 3202107 - DNA, 25 bp, Homo sapien
tggtgaatactctccagaatgtttt

SEQ ID NO: 3202108 - DNA, 25 bp, Homo sapien
catgtagaatggtgaatactctcca

SEQ ID NO: 3202109 - DNA, 25 bp, Homo sapien
tttgctcaggtccaacagaggaatg

SEQ ID NO: 3202110 - DNA, 25 bp, Homo sapien
ttatctctgtaaggtcaaccagtag

SEQ ID NO: 3202111 - DNA, 25 bp, Homo sapien
tataaagctaggttgccgatttcag

SEQ ID NO: 3202112 - DNA, 25 bp, Homo sapien
gactgcaaagtatgacaggtactga

SEQ ID NO: 3202113 - DNA, 25 bp, Homo sapien
gcatacttatcacagggagccagaa

SEQ ID NO: 3202114 - DNA, 25 bp, Homo sapien
taacttcctgctagtggtgcgcctt

SEQ ID NO: 3202115 - DNA, 25 bp, Homo sapien
ggtgcgccttctgaaggtgaagcat

SEQ ID NO: 3202116 - DNA, 25 bp, Homo sapien
gagtacatccataacttcctgctag

SEQ ID NO: 3202117 - DNA, 25 bp, Homo sapien
gggaatgaatgaggagtacatccat

SEQ ID NO: 3202118 - DNA, 25 bp, Homo sapien
aaagttcatgagaaggatgctggaa

SEQ ID NO: 3202119 - DNA, 25 bp, Homo sapien
cttcaaaagttcatgagaaggatgc

SEQ ID NO: 3202120 - DNA, 25 bp, Homo sapien
caaaagttcatgagaaggatgctgg

SEQ ID NO: 3202121 - DNA, 25 bp, Homo sapien
tcaaaagttcatgagaaggatgctg

SEQ ID NO: 3202122 - DNA, 25 bp, Homo sapien
tggtacacttgttgggtaaagccat

SEQ ID NO: 3202123 - DNA, 25 bp, Homo sapien
tcgacgatacttgtggtacacttgt

SEQ ID NO: 3202124 - DNA, 25 bp, Homo sapien
catcttcgacgatacttgtggtaca

SEQ ID NO: 3202125 - DNA, 25 bp, Homo sapien
cacttaggcatcttcgacgatactt

SEQ ID NO: 3202126 - DNA, 25 bp, Homo sapien
tgaccaattcccaagcgttttctct

SEQ ID NO: 3202127 - DNA, 25 bp, Homo sapien
gcaagttgtctaaattcctcataca

SEQ ID NO: 3202128 - DNA, 25 bp, Homo sapien
cgaaagagggtattcatttcttggg

SEQ ID NO: 3202129 - DNA, 25 bp, Homo sapien
gcatcttcccaagcaagttgtctaa

SEQ ID NO: 3202130 - DNA, 25 bp, Homo sapien
tagtaccctcctatactgtaccagg

SEQ ID NO: 3202131 - DNA, 25 bp, Homo sapien
ttctgccagcctctaagatggttcc

SEQ ID NO: 3202132 - DNA, 25 bp, Homo sapien
tggtatgccacttccaagtgcaggt

SEQ ID NO: 3202133 - DNA, 25 bp, Homo sapien
ccaggactggtctgtatggactata

SEQ ID NO: 3202134 - DNA, 25 bp, Homo sapien
aaggcagcccttggacagttcagta

SEQ ID NO: 3202135 - DNA, 25 bp, Homo sapien
gactcagccgtagcacatcatgaag

SEQ ID NO: 3202136 - DNA, 25 bp, Homo sapien
gaacctgctgcatgaaaggcagccc

SEQ ID NO: 3202137 - DNA, 25 bp, Homo sapien
ggtaattagtaatctacagctggct

SEQ ID NO: 3202138 - DNA, 25 bp, Homo sapien
ccataactataaaacctgaacagac

SEQ ID NO: 3202139 - DNA, 25 bp, Homo sapien
aaacctgaacagacattctaaccca

SEQ ID NO: 3202140 - DNA, 25 bp, Homo sapien
cctgaacagacattctaacccatac

SEQ ID NO: 3202141 - DNA, 25 bp, Homo sapien
tccataactataaaacctgaacaga

SEQ ID NO: 3202142 - DNA, 25 bp, Homo sapien
gagagtagttactttccaacacctc

SEQ ID NO: 3202143 - DNA, 25 bp, Homo sapien
aaagaaagacttgagagtagttact

SEQ ID NO: 3202144 - DNA, 25 bp, Homo sapien
cacgtttgtcaaagggataatgaca

SEQ ID NO: 3202145 - DNA, 25 bp, Homo sapien
tttcatgtaacggaacatcagtgag

SEQ ID NO: 3202146 - DNA, 25 bp, Homo sapien
ctgaagttttgggtcaatagactgt

SEQ ID NO: 3202147 - DNA, 25 bp, Homo sapien
tcttaaaactacagaggtattcctg

SEQ ID NO: 3202148 - DNA, 25 bp, Homo sapien
tagactgtgtcttagattgagaata

SEQ ID NO: 3202149 - DNA, 25 bp, Homo sapien
ctacagaggtattcctgaagttttg

SEQ ID NO: 3202150 - DNA, 25 bp, Homo sapien
ttactctcctcaccagaagtagagg

SEQ ID NO: 3202151 - DNA, 25 bp, Homo sapien
gaattaggtggaagtctatgacgat

SEQ ID NO: 3202152 - DNA, 25 bp, Homo sapien
gaagtctatgacgattactctcctc

SEQ ID NO: 3202153 - DNA, 25 bp, Homo sapien
tagcagcatttggtggctttgtaga

SEQ ID NO: 3202154 - DNA, 25 bp, Homo sapien
ttaatgtgaattgtcactggactcc

SEQ ID NO: 3202155 - DNA, 25 bp, Homo sapien
gaattgtcactggactccggtgaaa

SEQ ID NO: 3202156 - DNA, 25 bp, Homo sapien
cactggactccggtgaaatattcct

SEQ ID NO: 3202157 - DNA, 25 bp, Homo sapien
tgtgaattgtcactggactccggtg

SEQ ID NO: 3202158 - DNA, 25 bp, Homo sapien
tataaaaggtcaccaagactatcct

SEQ ID NO: 3202159 - DNA, 25 bp, Homo sapien
tattccaatcaatcccaatgcaggt

SEQ ID NO: 3202160 - DNA, 25 bp, Homo sapien
tttcaccatttcttgagaccacagg

SEQ ID NO: 3202161 - DNA, 25 bp, Homo sapien
tgtctcaaagggatactaaaggtat

SEQ ID NO: 3202162 - DNA, 25 bp, Homo sapien
gctggaactacataccccatttaag

SEQ ID NO: 3202163 - DNA, 25 bp, Homo sapien
tttacaaattaacagcccatccatc

SEQ ID NO: 3202164 - DNA, 25 bp, Homo sapien
catatggaaaccacttgcttttgcc

SEQ ID NO: 3202165 - DNA, 25 bp, Homo sapien
gatcatttcaagagaccatttaaag

SEQ ID NO: 3202166 - DNA, 25 bp, Homo sapien
ctgacattccgttttgccatctcat

SEQ ID NO: 3202167 - DNA, 25 bp, Homo sapien
tccgttttgccatctcatggtgata

SEQ ID NO: 3202168 - DNA, 25 bp, Homo sapien
tgccatctcatggtgatataattag

SEQ ID NO: 3202169 - DNA, 25 bp, Homo sapien
catctcatggtgatataattaggta

SEQ ID NO: 3202170 - DNA, 25 bp, Homo sapien
caattttgtagacttggaacactat

SEQ ID NO: 3202171 - DNA, 25 bp, Homo sapien
tcaattttgtagacttggaacacta

SEQ ID NO: 3202172 - DNA, 25 bp, Homo sapien
agatgtttatgatgagcagaagtaa

SEQ ID NO: 3202173 - DNA, 25 bp, Homo sapien
ttatgatgagcagaagtaatcgatc

SEQ ID NO: 3202174 - DNA, 25 bp, Homo sapien
tgagcagaagtaatcgatcatggtg

SEQ ID NO: 3202175 - DNA, 25 bp, Homo sapien
ctagatgtttatgatgagcagaagt

SEQ ID NO: 3202176 - DNA, 25 bp, Homo sapien
caacaataaagctggctgaagatca

SEQ ID NO: 3202177 - DNA, 25 bp, Homo sapien
tggagacaggtcttaacacaagtag

SEQ ID NO: 3202178 - DNA, 25 bp, Homo sapien
tctggtggtccgagaagttacctgc

SEQ ID NO: 3202179 - DNA, 25 bp, Homo sapien
tgcctgtggcctagataaaccagct

SEQ ID NO: 3202180 - DNA, 25 bp, Homo sapien
caacacccacaagtccagaaggata

SEQ ID NO: 3202181 - DNA, 25 bp, Homo sapien
tctgatttgttgcagcacactgaag

SEQ ID NO: 3202182 - DNA, 25 bp, Homo sapien
tatttgggctgttaagaccaggcaa

SEQ ID NO: 3202183 - DNA, 25 bp, Homo sapien
tctcagcctcgtgaagtttaggaac

SEQ ID NO: 3202184 - DNA, 25 bp, Homo sapien
aagccctcctggaagggcacacagg

SEQ ID NO: 3202185 - DNA, 25 bp, Homo sapien
tcccaatttggaaggcctaaatgct

SEQ ID NO: 3202186 - DNA, 25 bp, Homo sapien
taatagattcatagccgggtagaag

SEQ ID NO: 3202187 - DNA, 25 bp, Homo sapien
ggatgatccgatgggaaaactgtgc

SEQ ID NO: 3202188 - DNA, 25 bp, Homo sapien
tgtttactgaccatccttattgtga

SEQ ID NO: 3202189 - DNA, 25 bp, Homo sapien
gcacaaaggatctgtttactgacca

SEQ ID NO: 3202190 - DNA, 25 bp, Homo sapien
catccttattgtgaggcacacagtc

SEQ ID NO: 3202191 - DNA, 25 bp, Homo sapien
ctgtggcacaaaggatctgtttact

SEQ ID NO: 3202192 - DNA, 25 bp, Homo sapien
tcacattgatctagcccaaagagtt

SEQ ID NO: 3202193 - DNA, 25 bp, Homo sapien
cttgcagcgctcacattgatctagc

SEQ ID NO: 3202194 - DNA, 25 bp, Homo sapien
tagggatccaatctgtcccctacac

SEQ ID NO: 3202195 - DNA, 25 bp, Homo sapien
tgcagaaaggaggtcggcagcaaat

SEQ ID NO: 3202196 - DNA, 25 bp, Homo sapien
tctgagttgatgcaattgtgttcca

SEQ ID NO: 3202197 - DNA, 25 bp, Homo sapien
caattgtgttccagaggtcataaga

SEQ ID NO: 3202198 - DNA, 25 bp, Homo sapien
aaagctgctggcgaatgtatctgaa

SEQ ID NO: 3202199 - DNA, 25 bp, Homo sapien
ggtctttgagctggtatttctgccc

SEQ ID NO: 3202200 - DNA, 25 bp, Homo sapien
cggttcagtgtgttcaaggcattca

SEQ ID NO: 3202201 - DNA, 25 bp, Homo sapien
gtgttcaaggcattcatcagcttct

SEQ ID NO: 3202202 - DNA, 25 bp, Homo sapien
actgagtccctcctcgtgatggccc

SEQ ID NO: 3202203 - DNA, 25 bp, Homo sapien
tcccccggttcagtgtgttcaaggc

SEQ ID NO: 3202204 - DNA, 25 bp, Homo sapien
tgccactcccctgactgtcacctcc

SEQ ID NO: 3202205 - DNA, 25 bp, Homo sapien
ctgccactcccctgactgtcacctc

SEQ ID NO: 3202206 - DNA, 25 bp, Homo sapien
gccactcccctgactgtcacctcca

SEQ ID NO: 3202207 - DNA, 25 bp, Homo sapien
gaaaggattaggaaccgctgccact

SEQ ID NO: 3202208 - DNA, 25 bp, Homo sapien
tcttggcatccatgctgtacgggtc

SEQ ID NO: 3202209 - DNA, 25 bp, Homo sapien
catggtaaggtgacaggcacattgg

SEQ ID NO: 3202210 - DNA, 25 bp, Homo sapien
cacttcatctcgtgctcttggcatc

SEQ ID NO: 3202211 - DNA, 25 bp, Homo sapien
actcattctaagctgtcctatcctg

SEQ ID NO: 3202212 - DNA, 25 bp, Homo sapien
caaggcactcattctaagctgtcct

SEQ ID NO: 3202213 - DNA, 25 bp, Homo sapien
tattatctgacttaaacctattcag

SEQ ID NO: 3202214 - DNA, 25 bp, Homo sapien
ccctccacatcactgtgtgtcagca

SEQ ID NO: 3202215 - DNA, 25 bp, Homo sapien
tatataaagccacttccaacttggt

SEQ ID NO: 3202216 - DNA, 25 bp, Homo sapien
gaatataccctagctgcttactcca

SEQ ID NO: 3202217 - DNA, 25 bp, Homo sapien
ccttaaaggccttcagtaacggctg

SEQ ID NO: 3202218 - DNA, 25 bp, Homo sapien
tcagtctcagactcaatgtccccag

SEQ ID NO: 3202219 - DNA, 25 bp, Homo sapien
ggaaagcccctataatgaattcaga

SEQ ID NO: 3202220 - DNA, 25 bp, Homo sapien
tcaagtgtacagatctcctcaagaa

SEQ ID NO: 3202221 - DNA, 25 bp, Homo sapien
gggactctttctgcagatactgtaa

SEQ ID NO: 3202222 - DNA, 25 bp, Homo sapien
taagtcagagctagttccccaacag

SEQ ID NO: 3202223 - DNA, 25 bp, Homo sapien
tagtaacagatcaggcacttggcca

SEQ ID NO: 3202224 - DNA, 25 bp, Homo sapien
gaaaaccagattcgttaagcaccca

SEQ ID NO: 3202225 - DNA, 25 bp, Homo sapien
taagcacccacaatatcagatccat

SEQ ID NO: 3202226 - DNA, 25 bp, Homo sapien
tatttctagtaaactgcatcctgtg

SEQ ID NO: 3202227 - DNA, 25 bp, Homo sapien
gctgggatacagttacttccttggg

SEQ ID NO: 3202228 - DNA, 25 bp, Homo sapien
tccaatgctattctgtatccaaggc

SEQ ID NO: 3202229 - DNA, 25 bp, Homo sapien
gtcaattgtagtagtcgtgctccca

SEQ ID NO: 3202230 - DNA, 25 bp, Homo sapien
tagtaaactgtagagtctgtcccca

SEQ ID NO: 3202231 - DNA, 25 bp, Homo sapien
aggactcaaaggctgaagatggctc

SEQ ID NO: 3202232 - DNA, 25 bp, Homo sapien
ctcaaaaacgaaatggagcatgatg

SEQ ID NO: 3202233 - DNA, 25 bp, Homo sapien
aaggctgaagatggctcaaaaacga

SEQ ID NO: 3202234 - DNA, 25 bp, Homo sapien
ctcaaaggctgaagatggctcaaaa

SEQ ID NO: 3202235 - DNA, 25 bp, Homo sapien
ccacagctaagagcaggggggccat

SEQ ID NO: 3202236 - DNA, 25 bp, Homo sapien
taaatggagactacatctttcacac

SEQ ID NO: 3202237 - DNA, 25 bp, Homo sapien
catctttcacacttgttgcacaatg

SEQ ID NO: 3202238 - DNA, 25 bp, Homo sapien
ctctctcagcctatttcagtagccg

SEQ ID NO: 3202239 - DNA, 25 bp, Homo sapien
ttcagtagccgtaaatggagactac

SEQ ID NO: 3202240 - DNA, 25 bp, Homo sapien
caagacatttctgcaccctagtgct

SEQ ID NO: 3202241 - DNA, 25 bp, Homo sapien
cacacagacagttacatggatggtt

SEQ ID NO: 3202242 - DNA, 25 bp, Homo sapien
tcaatatccacagcagcgctgtacc

SEQ ID NO: 3202243 - DNA, 25 bp, Homo sapien
gtttctgattcactgcacacgcagg

SEQ ID NO: 3202244 - DNA, 25 bp, Homo sapien
cagggaccttagataacaattttca

SEQ ID NO: 3202245 - DNA, 25 bp, Homo sapien
caagagtccatcagatttctccaaa

SEQ ID NO: 3202246 - DNA, 25 bp, Homo sapien
tctctttcaggtggaggatgaccag

SEQ ID NO: 3202247 - DNA, 25 bp, Homo sapien
tataatttactttcccaagagtcca

SEQ ID NO: 3202248 - DNA, 25 bp, Homo sapien
gaaaagtcaagggccctgactctgg

SEQ ID NO: 3202249 - DNA, 25 bp, Homo sapien
tgctctggcagatgatccttttgct

SEQ ID NO: 3202250 - DNA, 25 bp, Homo sapien
ggccctgactctgggtttgcaccat

SEQ ID NO: 3202251 - DNA, 25 bp, Homo sapien
ccatgacaacccaccgtgcagagag

SEQ ID NO: 3202252 - DNA, 25 bp, Homo sapien
tggcgtatctggcaacagtggacct

SEQ ID NO: 3202253 - DNA, 25 bp, Homo sapien
ccacaagctgtatgccccatgagta

SEQ ID NO: 3202254 - DNA, 25 bp, Homo sapien
tagcaccagtgactagagtttcccc

SEQ ID NO: 3202255 - DNA, 25 bp, Homo sapien
gcccaagtatgacctgaggcagcca

SEQ ID NO: 3202256 - DNA, 25 bp, Homo sapien
tctgcaagaatctggctcaagtgcc

SEQ ID NO: 3202257 - DNA, 25 bp, Homo sapien
tccctatagggtcaaagaacagttc

SEQ ID NO: 3202258 - DNA, 25 bp, Homo sapien
gccagaccatggaagctagcttaac

SEQ ID NO: 3202259 - DNA, 25 bp, Homo sapien
cagggtactgggtggataatctaca

SEQ ID NO: 3202260 - DNA, 25 bp, Homo sapien
aggaaaatgtgatggcttagagaag

SEQ ID NO: 3202261 - DNA, 25 bp, Homo sapien
aatgtgatggcttagagaagaaagg

SEQ ID NO: 3202262 - DNA, 25 bp, Homo sapien
caaaaaaggagatatgtatctactc

SEQ ID NO: 3202263 - DNA, 25 bp, Homo sapien
atgtatctactcaattagaagttac

SEQ ID NO: 3202264 - DNA, 25 bp, Homo sapien
gacagtggtcaaggaatctagttct

SEQ ID NO: 3202265 - DNA, 25 bp, Homo sapien
gggagattgatttcctgacaaggac

SEQ ID NO: 3202266 - DNA, 25 bp, Homo sapien
tctggaaattccttgagctacctaa

SEQ ID NO: 3202267 - DNA, 25 bp, Homo sapien
cacagattatggcttcaggttcagg

SEQ ID NO: 3202268 - DNA, 25 bp, Homo sapien
gtctttatgaatttgacttcactag

SEQ ID NO: 3202269 - DNA, 25 bp, Homo sapien
ttcacccaggttgtagcaagcatca

SEQ ID NO: 3202270 - DNA, 25 bp, Homo sapien
tcttgtcaagctgaaattctgtacc

SEQ ID NO: 3202271 - DNA, 25 bp, Homo sapien
tagatatctcacacaagtggaatta

SEQ ID NO: 3202272 - DNA, 25 bp, Homo sapien
tatgccaccattggcagagttaatg

SEQ ID NO: 3202273 - DNA, 25 bp, Homo sapien
aatatgccaccattggcagagttaa

SEQ ID NO: 3202274 - DNA, 25 bp, Homo sapien
caccattggcagagttaatgtcttc

SEQ ID NO: 3202275 - DNA, 25 bp, Homo sapien
ccaccattggcagagttaatgtctt

SEQ ID NO: 3202276 - DNA, 25 bp, Homo sapien
ccaaaaatgctctctcgccagaaga

SEQ ID NO: 3202277 - DNA, 25 bp, Homo sapien
tcagcaagtcacaaagtgccaaaaa

SEQ ID NO: 3202278 - DNA, 25 bp, Homo sapien
tttcagcaagtcacaaagtgccaaa

SEQ ID NO: 3202279 - DNA, 25 bp, Homo sapien
aaaatgctctctcgccagaagacaa

SEQ ID NO: 3202280 - DNA, 25 bp, Homo sapien
tcccataatcgcctcgctgttgtcg

SEQ ID NO: 3202281 - DNA, 25 bp, Homo sapien
tccattccttcccataatcgcctcg

SEQ ID NO: 3202282 - DNA, 25 bp, Homo sapien
taatcgcctcgctgttgtcggataa

SEQ ID NO: 3202283 - DNA, 25 bp, Homo sapien
cgcctcgctgttgtcggataaagca

SEQ ID NO: 3202284 - DNA, 25 bp, Homo sapien
ttttatttataagtccacaaagcat

SEQ ID NO: 3202285 - DNA, 25 bp, Homo sapien
gttttatttataagtccacaaagca

SEQ ID NO: 3202286 - DNA, 25 bp, Homo sapien
cacagttcataaggatgcaaccatc

SEQ ID NO: 3202287 - DNA, 25 bp, Homo sapien
aaagttgccctgactcctacccact

SEQ ID NO: 3202288 - DNA, 25 bp, Homo sapien
tccacagttcataaggatgcaacca

SEQ ID NO: 3202289 - DNA, 25 bp, Homo sapien
ctgtccacagttcataaggatgcaa

SEQ ID NO: 3202290 - DNA, 25 bp, Homo sapien
tgaatgctgacacctcttgaagaac

SEQ ID NO: 3202291 - DNA, 25 bp, Homo sapien
tttgaagtatgtccatgggaagccc

SEQ ID NO: 3202292 - DNA, 25 bp, Homo sapien
tgaggaaatccgctcagtgcaggaa

SEQ ID NO: 3202293 - DNA, 25 bp, Homo sapien
tatactttgtgcttggagctaagcc

SEQ ID NO: 3202294 - DNA, 25 bp, Homo sapien
tatgaggagctgcatttcaaaaagg

SEQ ID NO: 3202295 - DNA, 25 bp, Homo sapien
gtatgaggagctgcatttcaaaaag

SEQ ID NO: 3202296 - DNA, 25 bp, Homo sapien
gctccgtcattatcccctaactttg

SEQ ID NO: 3202297 - DNA, 25 bp, Homo sapien
tcagccctattcagtacaaacgcat

SEQ ID NO: 3202298 - DNA, 25 bp, Homo sapien
tcgtgactccacttccaggttacct

SEQ ID NO: 3202299 - DNA, 25 bp, Homo sapien
gaagccaagagtaggatggatcatt

SEQ ID NO: 3202300 - DNA, 25 bp, Homo sapien
gcctctcgccacgacctttctttat

SEQ ID NO: 3202301 - DNA, 25 bp, Homo sapien
gacaggcaagaaactgcctcctgca

SEQ ID NO: 3202302 - DNA, 25 bp, Homo sapien
caaagagccacgtgaaaacaggcac

SEQ ID NO: 3202303 - DNA, 25 bp, Homo sapien
tctttatcccttcattagccataaa

SEQ ID NO: 3202304 - DNA, 25 bp, Homo sapien
tgtgtcccccacgttggagtggctt

SEQ ID NO: 3202305 - DNA, 25 bp, Homo sapien
ccttcggcccatgctgctactgtgt

SEQ ID NO: 3202306 - DNA, 25 bp, Homo sapien
tcctgagctcccatttgtgagactg

SEQ ID NO: 3202307 - DNA, 25 bp, Homo sapien
tgagactgtttgtcaaaaggccgcc

SEQ ID NO: 3202308 - DNA, 25 bp, Homo sapien
tccacagggtttgtaattagactcc

SEQ ID NO: 3202309 - DNA, 25 bp, Homo sapien
tgccagctgttgtcacgcattgcag

SEQ ID NO: 3202310 - DNA, 25 bp, Homo sapien
tatatgagccccacactatgtgacc

SEQ ID NO: 3202311 - DNA, 25 bp, Homo sapien
gaaaatgggagcaatagagttcctt

SEQ ID NO: 3202312 - DNA, 25 bp, Homo sapien
ctctgcttataacagtgactggact

SEQ ID NO: 3202313 - DNA, 25 bp, Homo sapien
cagtgactggactgcagtacagcaa

SEQ ID NO: 3202314 - DNA, 25 bp, Homo sapien
gctgctccaaggaaactgtctctgc

SEQ ID NO: 3202315 - DNA, 25 bp, Homo sapien
agctgctccaaggaaactgtctctg

SEQ ID NO: 3202316 - DNA, 25 bp, Homo sapien
gagacaacagctgggctctatcagt

SEQ ID NO: 3202317 - DNA, 25 bp, Homo sapien
ggttgcaaggcttccaggagacata

SEQ ID NO: 3202318 - DNA, 25 bp, Homo sapien
tgtgcagagttcctcacgaagtaag

SEQ ID NO: 3202319 - DNA, 25 bp, Homo sapien
tctatcagtagggtcagggttgcaa

SEQ ID NO: 3202320 - DNA, 25 bp, Homo sapien
gaacatcacctattctttgctgagt

SEQ ID NO: 3202321 - DNA, 25 bp, Homo sapien
tatgtccttcaagacgagaacatca

SEQ ID NO: 3202322 - DNA, 25 bp, Homo sapien
tcttccaagaagcatataaaagggt

SEQ ID NO: 3202323 - DNA, 25 bp, Homo sapien
gagacccgctatgaaggatatcagc

SEQ ID NO: 3202324 - DNA, 25 bp, Homo sapien
tttagggtgtcaggaaaggcgttca

SEQ ID NO: 3202325 - DNA, 25 bp, Homo sapien
gatatcgctgtggtgtcatactgac

SEQ ID NO: 3202326 - DNA, 25 bp, Homo sapien
aaggcgttcacagggagatgtcaca

SEQ ID NO: 3202327 - DNA, 25 bp, Homo sapien
aggtgaaagagtacgctgctggcca

SEQ ID NO: 3202328 - DNA, 25 bp, Homo sapien
atgagagtcctgtctctaaccccca

SEQ ID NO: 3202329 - DNA, 25 bp, Homo sapien
gagagtcctgtctctaacccccaac

SEQ ID NO: 3202330 - DNA, 25 bp, Homo sapien
aggctgcctcagtgtattccagctc

SEQ ID NO: 3202331 - DNA, 25 bp, Homo sapien
ccatgagagtcctgtctctaacccc

SEQ ID NO: 3202332 - DNA, 25 bp, Homo sapien
agtaccctgacagcaggatatccag

SEQ ID NO: 3202333 - DNA, 25 bp, Homo sapien
tgagccttcctttgtatggggaaag

SEQ ID NO: 3202334 - DNA, 25 bp, Homo sapien
cagggtagtaccctgacagcaggat

SEQ ID NO: 3202335 - DNA, 25 bp, Homo sapien
aggatatccagcatcgttgagcctt

SEQ ID NO: 3202336 - DNA, 25 bp, Homo sapien
agctatctggctttcataccccgtg

SEQ ID NO: 3202337 - DNA, 25 bp, Homo sapien
gcagctatctggctttcataccccg

SEQ ID NO: 3202338 - DNA, 25 bp, Homo sapien
tatctggctttcataccccgtgtgc

SEQ ID NO: 3202339 - DNA, 25 bp, Homo sapien
ctggcagctatctggctttcatacc

SEQ ID NO: 3202340 - DNA, 25 bp, Homo sapien
gttattcggaccctccaagcctcag

SEQ ID NO: 3202341 - DNA, 25 bp, Homo sapien
atattgggcaagttattcggaccct

SEQ ID NO: 3202342 - DNA, 25 bp, Homo sapien
gcaagttattcggaccctccaagcc

SEQ ID NO: 3202343 - DNA, 25 bp, Homo sapien
tgggcaagttattcggaccctccaa

SEQ ID NO: 3202344 - DNA, 25 bp, Homo sapien
aacattgaatatggtttgacttggt

SEQ ID NO: 3202345 - DNA, 25 bp, Homo sapien
aaaacattgaatatggtttgacttg

SEQ ID NO: 3202346 - DNA, 25 bp, Homo sapien
aaacattgaatatggtttgacttgg

SEQ ID NO: 3202347 - DNA, 25 bp, Homo sapien
atctgctttgcacggctgtcttggt

SEQ ID NO: 3202348 - DNA, 25 bp, Homo sapien
ctgctttgcacggctgtcttggtga

SEQ ID NO: 3202349 - DNA, 25 bp, Homo sapien
gcatctgctttgcacggctgtcttg

SEQ ID NO: 3202350 - DNA, 25 bp, Homo sapien
gctttgcacggctgtcttggtgaaa

SEQ ID NO: 3202351 - DNA, 25 bp, Homo sapien
agaagagctgacaaaccactttgca

SEQ ID NO: 3202352 - DNA, 25 bp, Homo sapien
cagaagagctgacaaaccactttgc

SEQ ID NO: 3202353 - DNA, 25 bp, Homo sapien
gaagagctgacaaaccactttgcac

SEQ ID NO: 3202354 - DNA, 25 bp, Homo sapien
tagagtaatgcctgtccaaactggc

SEQ ID NO: 3202355 - DNA, 25 bp, Homo sapien
gataccccacaaactgtcctagagg

SEQ ID NO: 3202356 - DNA, 25 bp, Homo sapien
tcagtcatgtgacaggccaagcgtt

SEQ ID NO: 3202357 - DNA, 25 bp, Homo sapien
cagttagaaaacgatggctcatgac

SEQ ID NO: 3202358 - DNA, 25 bp, Homo sapien
ctggtggtgatggaaagtctaggaa

SEQ ID NO: 3202359 - DNA, 25 bp, Homo sapien
ccacactattgtcactcagaattca

SEQ ID NO: 3202360 - DNA, 25 bp, Homo sapien
ctattgtcactcagaattcactggt

SEQ ID NO: 3202361 - DNA, 25 bp, Homo sapien
cttccaaattccacactattgtcac

SEQ ID NO: 3202362 - DNA, 25 bp, Homo sapien
tctttcaccatctctccacttcagt

SEQ ID NO: 3202363 - DNA, 25 bp, Homo sapien
catctcaggacccacagcagtattt

SEQ ID NO: 3202364 - DNA, 25 bp, Homo sapien
tcccagaatcctcatctcaggaccc

SEQ ID NO: 3202365 - DNA, 25 bp, Homo sapien
agcagtatttttgcaagcatctttc

SEQ ID NO: 3202366 - DNA, 25 bp, Homo sapien
tcgaggcccaggtaagcacagaatg

SEQ ID NO: 3202367 - DNA, 25 bp, Homo sapien
tgcatgacacaacagtcgctagcca

SEQ ID NO: 3202368 - DNA, 25 bp, Homo sapien
gctagccacactccttaactgactg

SEQ ID NO: 3202369 - DNA, 25 bp, Homo sapien
gaaaaccagtgcaatgcatgacaca

SEQ ID NO: 3202370 - DNA, 25 bp, Homo sapien
tctagaaagctggtgtacttcagat

SEQ ID NO: 3202371 - DNA, 25 bp, Homo sapien
ccgagtcctaagtgatttgaggtga

SEQ ID NO: 3202372 - DNA, 25 bp, Homo sapien
gaaagtgacagcatatctagaaagc

SEQ ID NO: 3202373 - DNA, 25 bp, Homo sapien
cccaaatctgtctggtggccgagtc

SEQ ID NO: 3202374 - DNA, 25 bp, Homo sapien
tgacccagactctactggaaatact

SEQ ID NO: 3202375 - DNA, 25 bp, Homo sapien
aggtgctgacccagactctactgga

SEQ ID NO: 3202376 - DNA, 25 bp, Homo sapien
tatgttgtggtcaaaatattaatac

SEQ ID NO: 3202377 - DNA, 25 bp, Homo sapien
tgctgacccagactctactggaaat

SEQ ID NO: 3202378 - DNA, 25 bp, Homo sapien
tgtaggaacagctttgtcagcatct

SEQ ID NO: 3202379 - DNA, 25 bp, Homo sapien
gaactgtgattcttaaggctcagcc

SEQ ID NO: 3202380 - DNA, 25 bp, Homo sapien
tacggactctacttccagaatgcct

SEQ ID NO: 3202381 - DNA, 25 bp, Homo sapien
cagaatgcctactttcccgactaaa

SEQ ID NO: 3202382 - DNA, 25 bp, Homo sapien
ctaaaaagggacattgacttcatcc

SEQ ID NO: 3202383 - DNA, 25 bp, Homo sapien
gggacattgacttcatccaatagaa

SEQ ID NO: 3202384 - DNA, 25 bp, Homo sapien
tgacttcatccaatagaacaactgg

SEQ ID NO: 3202385 - DNA, 25 bp, Homo sapien
cattgacttcatccaatagaacaac

SEQ ID NO: 3202386 - DNA, 25 bp, Homo sapien
tcctcctcctgcatggggtatggca

SEQ ID NO: 3202387 - DNA, 25 bp, Homo sapien
catggggtatggcagactggtcctt

SEQ ID NO: 3202388 - DNA, 25 bp, Homo sapien
cctgtggtgggagccaacacagtcc

SEQ ID NO: 3202389 - DNA, 25 bp, Homo sapien
cttagagtacataaagtggtagctc

SEQ ID NO: 3202390 - DNA, 25 bp, Homo sapien
gacacagtgtaagtgactcagcaca

SEQ ID NO: 3202391 - DNA, 25 bp, Homo sapien
ctagagaggtggtagataaatgttt

SEQ ID NO: 3202392 - DNA, 25 bp, Homo sapien
aaccatacactgtccttaaggaaga

SEQ ID NO: 3202393 - DNA, 25 bp, Homo sapien
aaaagaatgcctagctgatctagag

SEQ ID NO: 3202394 - DNA, 25 bp, Homo sapien
tgcaatatcccagaaaccaatgtga

SEQ ID NO: 3202395 - DNA, 25 bp, Homo sapien
cactgcaaccgggatagggtacgtt

SEQ ID NO: 3202396 - DNA, 25 bp, Homo sapien
aaagactgtcaggttcaaagcccca

SEQ ID NO: 3202397 - DNA, 25 bp, Homo sapien
taatgaagcccgtgtggcaagctcc

SEQ ID NO: 3202398 - DNA, 25 bp, Homo sapien
tcttgttcccatgaccctcagggat

SEQ ID NO: 3202399 - DNA, 25 bp, Homo sapien
tctggctgatgtgggcgtagaagtc

SEQ ID NO: 3202400 - DNA, 25 bp, Homo sapien
atgtgggcgtagaagtccagagcct

SEQ ID NO: 3202401 - DNA, 25 bp, Homo sapien
gcagagccccaaggtttgaaaagcc

SEQ ID NO: 3202402 - DNA, 25 bp, Homo sapien
tttacaaaataaggctgaagagttc

SEQ ID NO: 3202403 - DNA, 25 bp, Homo sapien
gcagcagctttggataaagttcact

SEQ ID NO: 3202404 - DNA, 25 bp, Homo sapien
tctgtggtctacaatttccttggga

SEQ ID NO: 3202405 - DNA, 25 bp, Homo sapien
tggtgaggtacttggtaaaatgctt

SEQ ID NO: 3202406 - DNA, 25 bp, Homo sapien
tatgattccgtaattcctcatcaca

SEQ ID NO: 3202407 - DNA, 25 bp, Homo sapien
ttatgattccgtaattcctcatcac

SEQ ID NO: 3202408 - DNA, 25 bp, Homo sapien
tttatgattccgtaattcctcatca

SEQ ID NO: 3202409 - DNA, 25 bp, Homo sapien
tctcatcgcagaaagctcctaattg

SEQ ID NO: 3202410 - DNA, 25 bp, Homo sapien
aagtcttaaggatcagtctgatccc

SEQ ID NO: 3202411 - DNA, 25 bp, Homo sapien
tctgatccctttctcatcgcagaaa

SEQ ID NO: 3202412 - DNA, 25 bp, Homo sapien
ataaagtcttaaggatcagtctgat

SEQ ID NO: 3202413 - DNA, 25 bp, Homo sapien
aggctgaagaccctcctataggcag

SEQ ID NO: 3202414 - DNA, 25 bp, Homo sapien
tcggcatgcaggtggctgcaatact

SEQ ID NO: 3202415 - DNA, 25 bp, Homo sapien
gaccctcctataggcagcagtgaga

SEQ ID NO: 3202416 - DNA, 25 bp, Homo sapien
gtgagaacactcttgacaccttcgg

SEQ ID NO: 3202417 - DNA, 25 bp, Homo sapien
caatatttgtccttatactgagcct

SEQ ID NO: 3202418 - DNA, 25 bp, Homo sapien
aaatctgcggttcttgaaaggtaag

SEQ ID NO: 3202419 - DNA, 25 bp, Homo sapien
aggaacaaatctgcggttcttgaaa

SEQ ID NO: 3202420 - DNA, 25 bp, Homo sapien
aacaaatctgcggttcttgaaaggt

SEQ ID NO: 3202421 - DNA, 25 bp, Homo sapien
tgaataaactattgaacaaccaaag

SEQ ID NO: 3202422 - DNA, 25 bp, Homo sapien
catacactaaaggaatagataatcc

SEQ ID NO: 3202423 - DNA, 25 bp, Homo sapien
gacatagttacaaatacggttgata

SEQ ID NO: 3202424 - DNA, 25 bp, Homo sapien
tttttaggagtgttctaccatacac

SEQ ID NO: 3202425 - DNA, 25 bp, Homo sapien
aaaaatgtgtgaggtgcagctatag

SEQ ID NO: 3202426 - DNA, 25 bp, Homo sapien
cattgtacgtttgcagaaattgacc

SEQ ID NO: 3202427 - DNA, 25 bp, Homo sapien
gacatatatggatttccgtacctaa

SEQ ID NO: 3202428 - DNA, 25 bp, Homo sapien
caacttatgctactgtgctgtacaa

SEQ ID NO: 3202429 - DNA, 25 bp, Homo sapien
gatttgaaacccaagagcaggcaag

SEQ ID NO: 3202430 - DNA, 25 bp, Homo sapien
gagccgacagataaagcaacacgtg

SEQ ID NO: 3202431 - DNA, 25 bp, Homo sapien
caagtggacacgttacaaagctacc

SEQ ID NO: 3202432 - DNA, 25 bp, Homo sapien
gagtagttaagacgattggcaccca

SEQ ID NO: 3202433 - DNA, 25 bp, Homo sapien
tagatggctggactaaccagggccc

SEQ ID NO: 3202434 - DNA, 25 bp, Homo sapien
tccctattcagttggccgaagcagt

SEQ ID NO: 3202435 - DNA, 25 bp, Homo sapien
gcatataaggtcaagtcttctccac

SEQ ID NO: 3202436 - DNA, 25 bp, Homo sapien
tctccagcaaggtagtcagattctt

SEQ ID NO: 3202437 - DNA, 25 bp, Homo sapien
ccaagggcttgtgatttcacgctca

SEQ ID NO: 3202438 - DNA, 25 bp, Homo sapien
tgcacccgaccagtgattactgatt

SEQ ID NO: 3202439 - DNA, 25 bp, Homo sapien
tagaagctaggttctacatgaaaag

SEQ ID NO: 3202440 - DNA, 25 bp, Homo sapien
ggtagtctacatattctacatgaaa

SEQ ID NO: 3202441 - DNA, 25 bp, Homo sapien
taggttttggatccattggccatca

SEQ ID NO: 3202442 - DNA, 25 bp, Homo sapien
gtgaacccaatcatcgctcttgctg

SEQ ID NO: 3202443 - DNA, 25 bp, Homo sapien
tgtcagatgtcagattaatgtggcc

SEQ ID NO: 3202444 - DNA, 25 bp, Homo sapien
tgtggccaccaacatgtagatatag

SEQ ID NO: 3202445 - DNA, 25 bp, Homo sapien
ctgaagctggccagatagcaaggct

SEQ ID NO: 3202446 - DNA, 25 bp, Homo sapien
tctaggctgggctaaaatgtgtaac

SEQ ID NO: 3202447 - DNA, 25 bp, Homo sapien
taagctatgtgtacccaggcagagc

SEQ ID NO: 3202448 - DNA, 25 bp, Homo sapien
tctcaacagtgtggctggtagcaat

SEQ ID NO: 3202449 - DNA, 25 bp, Homo sapien
agtgtattgtgagtgaattttgcaa

SEQ ID NO: 3202450 - DNA, 25 bp, Homo sapien
gagagaaatattccaccagttaata

SEQ ID NO: 3202451 - DNA, 25 bp, Homo sapien
tggaactaagtttacaagattgggc

SEQ ID NO: 3202452 - DNA, 25 bp, Homo sapien
tctagccagtgaaggcatcaatcca

SEQ ID NO: 3202453 - DNA, 25 bp, Homo sapien
cacagaaagtactggtggagcagaa

SEQ ID NO: 3202454 - DNA, 25 bp, Homo sapien
tcagtgggttcctgtctagggagca

SEQ ID NO: 3202455 - DNA, 25 bp, Homo sapien
gactgtatggcctgaaacacctaaa

SEQ ID NO: 3202456 - DNA, 25 bp, Homo sapien
gcagaagaagcccaacgtcagaaca

SEQ ID NO: 3202457 - DNA, 25 bp, Homo sapien
taacatataaaaattccatgaaatt

SEQ ID NO: 3202458 - DNA, 25 bp, Homo sapien
gcccttgttcagactgcactggaca

SEQ ID NO: 3202459 - DNA, 25 bp, Homo sapien
gggccctttataagccacaacatgt

SEQ ID NO: 3202460 - DNA, 25 bp, Homo sapien
gaattgaatcaatggtcatggcccc

SEQ ID NO: 3202461 - DNA, 25 bp, Homo sapien
tgatgctccatcaaccgagtgcagc

SEQ ID NO: 3202462 - DNA, 25 bp, Homo sapien
gatggaccacagagctcaatgagca

SEQ ID NO: 3202463 - DNA, 25 bp, Homo sapien
ccatcagatggaccacagagctcaa

SEQ ID NO: 3202464 - DNA, 25 bp, Homo sapien
agaggcaacatgatgtagaacaaag

SEQ ID NO: 3202465 - DNA, 25 bp, Homo sapien
gatgtccatcagatggaccacagag

SEQ ID NO: 3202466 - DNA, 25 bp, Homo sapien
caagtcgttcagacaaagcagaaag

SEQ ID NO: 3202467 - DNA, 25 bp, Homo sapien
ttgtgatgtgtatgcaatttacttc

SEQ ID NO: 3202468 - DNA, 25 bp, Homo sapien
gaatactctttgtgatgtgtatgca

SEQ ID NO: 3202469 - DNA, 25 bp, Homo sapien
ttaaggctgacgtgcaagtcgttca

SEQ ID NO: 3202470 - DNA, 25 bp, Homo sapien
gtatctgtggtttctatcaccctcc

SEQ ID NO: 3202471 - DNA, 25 bp, Homo sapien
gacagcatctcaggccaatctatct

SEQ ID NO: 3202472 - DNA, 25 bp, Homo sapien
tcttcgccctttgatttaagtctgg

SEQ ID NO: 3202473 - DNA, 25 bp, Homo sapien
tccatcagactggacattctcagac

SEQ ID NO: 3202474 - DNA, 25 bp, Homo sapien
gcaagatccttcgttaagactgggc

SEQ ID NO: 3202475 - DNA, 25 bp, Homo sapien
actcttgctaaactggccttacaga

SEQ ID NO: 3202476 - DNA, 25 bp, Homo sapien
gcccaaagtcaggatgagaccaagg

SEQ ID NO: 3202477 - DNA, 25 bp, Homo sapien
tcaagactgctgtagtagagatgat

SEQ ID NO: 3202478 - DNA, 25 bp, Homo sapien
tatcaaaacttctgtgaaccccttc

SEQ ID NO: 3202479 - DNA, 25 bp, Homo sapien
tcaaaacttctgtgaaccccttcca

SEQ ID NO: 3202480 - DNA, 25 bp, Homo sapien
tcttccacaggtattggacataccc

SEQ ID NO: 3202481 - DNA, 25 bp, Homo sapien
gagacggtggtcacgagtgtccatc

SEQ ID NO: 3202482 - DNA, 25 bp, Homo sapien
ggcactcagtacctttagctggccg

SEQ ID NO: 3202483 - DNA, 25 bp, Homo sapien
ggccgagcaggcttttggtcttctc

SEQ ID NO: 3202484 - DNA, 25 bp, Homo sapien
tcccattttataatagcgcagatcc

SEQ ID NO: 3202485 - DNA, 25 bp, Homo sapien
ggttaatgccacactctaccacagg

SEQ ID NO: 3202486 - DNA, 25 bp, Homo sapien
cacaggcaattgacaccagggctct

SEQ ID NO: 3202487 - DNA, 25 bp, Homo sapien
tataatagcgcagatccagtctcat

SEQ ID NO: 3202488 - DNA, 25 bp, Homo sapien
tcaccctgtttattaatgatacatt

SEQ ID NO: 3202489 - DNA, 25 bp, Homo sapien
tccctctgcccctcctatgtctttg

SEQ ID NO: 3202490 - DNA, 25 bp, Homo sapien
ctctgcccctcctatgtctttgaag

SEQ ID NO: 3202491 - DNA, 25 bp, Homo sapien
gcccctcctatgtctttgaagcttt

SEQ ID NO: 3202492 - DNA, 25 bp, Homo sapien
gacacagtctcacagctgctcgggc

SEQ ID NO: 3202493 - DNA, 25 bp, Homo sapien
gggcaatatctcagagccatctcca

SEQ ID NO: 3202494 - DNA, 25 bp, Homo sapien
acttctctcggtgaccaggacacag

SEQ ID NO: 3202495 - DNA, 25 bp, Homo sapien
tcaattagctttagggggcaatatc

SEQ ID NO: 3202496 - DNA, 25 bp, Homo sapien
tgccatttggccaacggggtgggtg

SEQ ID NO: 3202497 - DNA, 25 bp, Homo sapien
cacagtccagcccactcagtaagtg

SEQ ID NO: 3202498 - DNA, 25 bp, Homo sapien
tgttgccatttggccaacggggtgg

SEQ ID NO: 3202499 - DNA, 25 bp, Homo sapien
cagtccagcccactcagtaagtggt

SEQ ID NO: 3202500 - DNA, 25 bp, Homo sapien
agagccctgctaacactttgatgtc

SEQ ID NO: 3202501 - DNA, 25 bp, Homo sapien
tgatatttgttacggaagccatagg

SEQ ID NO: 3202502 - DNA, 25 bp, Homo sapien
aaacctctggcttctagaccagtga

SEQ ID NO: 3202503 - DNA, 25 bp, Homo sapien
ttgaaaccatgaggacacaaacctg

SEQ ID NO: 3202504 - DNA, 25 bp, Homo sapien
cagaatttctaatcacgtactggtc

SEQ ID NO: 3202505 - DNA, 25 bp, Homo sapien
taatcacgtactggtcaggttcact

SEQ ID NO: 3202506 - DNA, 25 bp, Homo sapien
tcgagtccagaatttctaatcacgt

SEQ ID NO: 3202507 - DNA, 25 bp, Homo sapien
caggttcactttcatggtcatctgt

SEQ ID NO: 3202508 - DNA, 25 bp, Homo sapien
ggaaaatcaggacaattgggtacac

SEQ ID NO: 3202509 - DNA, 25 bp, Homo sapien
tgcaagctattgacttattgaggaa

SEQ ID NO: 3202510 - DNA, 25 bp, Homo sapien
ctcgaaagcctatcactccacactg

SEQ ID NO: 3202511 - DNA, 25 bp, Homo sapien
acaattgggtacacagctttgactt

SEQ ID NO: 3202512 - DNA, 25 bp, Homo sapien
tagagacgcatcttctaggagtgcc

SEQ ID NO: 3202513 - DNA, 25 bp, Homo sapien
tactctctgggactgaactaactaa

SEQ ID NO: 3202514 - DNA, 25 bp, Homo sapien
tggctcaagaacatcccaagcagtg

SEQ ID NO: 3202515 - DNA, 25 bp, Homo sapien
ggtctagtgagccaagtccttgcag

SEQ ID NO: 3202516 - DNA, 25 bp, Homo sapien
atgggagccaacgtgacggcagcag

SEQ ID NO: 3202517 - DNA, 25 bp, Homo sapien
ccaacgtgacggcagcaggtgcgtc

SEQ ID NO: 3202518 - DNA, 25 bp, Homo sapien
caacgtgacggcagcaggtgcgtca

SEQ ID NO: 3202519 - DNA, 25 bp, Homo sapien
ggagccaacgtgacggcagcaggtg

SEQ ID NO: 3202520 - DNA, 25 bp, Homo sapien
tcagaccctggaaatgtactatttt

SEQ ID NO: 3202521 - DNA, 25 bp, Homo sapien
tcaagtaacttgcttgtaatctgtc

SEQ ID NO: 3202522 - DNA, 25 bp, Homo sapien
tgcatataaagtaccatcaagtaac

SEQ ID NO: 3202523 - DNA, 25 bp, Homo sapien
ttgtacaatacagccattgccactc

SEQ ID NO: 3202524 - DNA, 25 bp, Homo sapien
ctggaagcccaaattctggttcatt

SEQ ID NO: 3202525 - DNA, 25 bp, Homo sapien
cctggaagcccaaattctggttcat

SEQ ID NO: 3202526 - DNA, 25 bp, Homo sapien
gacactaaccaaacacagagctcta

SEQ ID NO: 3202527 - DNA, 25 bp, Homo sapien
tggaagcccaaattctggttcattt

SEQ ID NO: 3202528 - DNA, 25 bp, Homo sapien
tgtccagttccctgcatatctggag

SEQ ID NO: 3202529 - DNA, 25 bp, Homo sapien
tgtttccaggttcccttatcaggcc

SEQ ID NO: 3202530 - DNA, 25 bp, Homo sapien
atctgtcccagagggtttggacttt

SEQ ID NO: 3202531 - DNA, 25 bp, Homo sapien
ctgcctttccccatgtggttccaat

SEQ ID NO: 3202532 - DNA, 25 bp, Homo sapien
tgagttaaatttgggacctgttgga

SEQ ID NO: 3202533 - DNA, 25 bp, Homo sapien
ttcacactcttgagtatagtgagtt

SEQ ID NO: 3202534 - DNA, 25 bp, Homo sapien
gattgcttctgaacacggggcttga

SEQ ID NO: 3202535 - DNA, 25 bp, Homo sapien
caaactgtccttggaagagtcacac

SEQ ID NO: 3202536 - DNA, 25 bp, Homo sapien
ttacacattctcaccagctcctctc

SEQ ID NO: 3202537 - DNA, 25 bp, Homo sapien
tttacacattctcaccagctcctct

SEQ ID NO: 3202538 - DNA, 25 bp, Homo sapien
attctcaccagctcctctcctactc

SEQ ID NO: 3202539 - DNA, 25 bp, Homo sapien
cacattctcaccagctcctctccta

SEQ ID NO: 3202540 - DNA, 25 bp, Homo sapien
tatgcagaacgatgtcagttccctt

SEQ ID NO: 3202541 - DNA, 25 bp, Homo sapien
gatcttccactgcataagaaatggg

SEQ ID NO: 3202542 - DNA, 25 bp, Homo sapien
tttgtcctcagaccgtccctgagat

SEQ ID NO: 3202543 - DNA, 25 bp, Homo sapien
tgtcatttttatgcagaacgatgtc

SEQ ID NO: 3202544 - DNA, 25 bp, Homo sapien
gaagagggccatttgcccacatgag

SEQ ID NO: 3202545 - DNA, 25 bp, Homo sapien
cacccagcaggtgtagatctgatgg

SEQ ID NO: 3202546 - DNA, 25 bp, Homo sapien
caatgagagggtcctaaagcaagtc

SEQ ID NO: 3202547 - DNA, 25 bp, Homo sapien
taagtcatgttgctacaggtggtct

SEQ ID NO: 3202548 - DNA, 25 bp, Homo sapien
gtcccacaagaatcagcccccagat

SEQ ID NO: 3202549 - DNA, 25 bp, Homo sapien
tcccacaagaatcagcccccagatt

SEQ ID NO: 3202550 - DNA, 25 bp, Homo sapien
ttgtcccacaagaatcagcccccag

SEQ ID NO: 3202551 - DNA, 25 bp, Homo sapien
ccacaagaatcagcccccagatttc

SEQ ID NO: 3202552 - DNA, 25 bp, Homo sapien
tctggcattgttgcttcaggaacca

SEQ ID NO: 3202553 - DNA, 25 bp, Homo sapien
atggagcagggtgccttcagtctga

SEQ ID NO: 3202554 - DNA, 25 bp, Homo sapien
ttgccacgcattttagaagttgccg

SEQ ID NO: 3202555 - DNA, 25 bp, Homo sapien
gaagttgccgccgattttgtgccca

SEQ ID NO: 3202556 - DNA, 25 bp, Homo sapien
gtgaacacccaattaccacgcctat

SEQ ID NO: 3202557 - DNA, 25 bp, Homo sapien
aggctggagcgtgacacatctcaca

SEQ ID NO: 3202558 - DNA, 25 bp, Homo sapien
taacaaggctggagcgtgacacatc

SEQ ID NO: 3202559 - DNA, 25 bp, Homo sapien
gaacacccaattaccacgcctatga

SEQ ID NO: 3202560 - DNA, 25 bp, Homo sapien
taatcctttcatggacgttatatgc

SEQ ID NO: 3202561 - DNA, 25 bp, Homo sapien
ctgcataatcctttcatggacgtta

SEQ ID NO: 3202562 - DNA, 25 bp, Homo sapien
aatcctttcatggacgttatatgca

SEQ ID NO: 3202563 - DNA, 25 bp, Homo sapien
gcataatcctttcatggacgttata

SEQ ID NO: 3202564 - DNA, 25 bp, Homo sapien
tctgcagtattgagggagttctgcg

SEQ ID NO: 3202565 - DNA, 25 bp, Homo sapien
tgtacccccgtccaactgactgatg

SEQ ID NO: 3202566 - DNA, 25 bp, Homo sapien
tctgcgtttaaaggggcctgtcctg

SEQ ID NO: 3202567 - DNA, 25 bp, Homo sapien
tgactgatggggaacttcaatgccc

SEQ ID NO: 3202568 - DNA, 25 bp, Homo sapien
gaattgcaagagctatctctttacc

SEQ ID NO: 3202569 - DNA, 25 bp, Homo sapien
ttgcaagagctatctctttaccatt

SEQ ID NO: 3202570 - DNA, 25 bp, Homo sapien
gttgaattgcaagagctatctcttt

SEQ ID NO: 3202571 - DNA, 25 bp, Homo sapien
gaagttgaattgcaagagctatctc

SEQ ID NO: 3202572 - DNA, 25 bp, Homo sapien
ctggagaccgcagtactgtatcggg

SEQ ID NO: 3202573 - DNA, 25 bp, Homo sapien
tatcggggccctgaatgtcggagct

SEQ ID NO: 3202574 - DNA, 25 bp, Homo sapien
cctgaatgtcggagctgtgctttga

SEQ ID NO: 3202575 - DNA, 25 bp, Homo sapien
ctgtggctggagaccgcagtactgt

SEQ ID NO: 3202576 - DNA, 25 bp, Homo sapien
acctgagcctgctggctaccctggg

SEQ ID NO: 3202577 - DNA, 25 bp, Homo sapien
cctgagcctgctggctaccctgggt

SEQ ID NO: 3202578 - DNA, 25 bp, Homo sapien
agccttgatcggctagcgattcctg

SEQ ID NO: 3202579 - DNA, 25 bp, Homo sapien
atcggctagcgattcctggacttgt

SEQ ID NO: 3202580 - DNA, 25 bp, Homo sapien
tcactatcacggaggtaacaagcca

SEQ ID NO: 3202581 - DNA, 25 bp, Homo sapien
taacctacgtcactatcacggaggt

SEQ ID NO: 3202582 - DNA, 25 bp, Homo sapien
gtaacaagccaatgaacaagaatgc

SEQ ID NO: 3202583 - DNA, 25 bp, Homo sapien
cactggagcttctaacctacgtcac

SEQ ID NO: 3202584 - DNA, 25 bp, Homo sapien
ttatggaggaaggactatgtgaatc

SEQ ID NO: 3202585 - DNA, 25 bp, Homo sapien
cgctcgctcgctcggagctgcatga

SEQ ID NO: 3202586 - DNA, 25 bp, Homo sapien
actcgcgcacggaggcactctcggt

SEQ ID NO: 3202587 - DNA, 25 bp, Homo sapien
cactctcggtctggcgtttggcttg

SEQ ID NO: 3202588 - DNA, 25 bp, Homo sapien
ctgcggaggggttcggccgaggcgc

SEQ ID NO: 3202589 - DNA, 25 bp, Homo sapien
tgcggaggggttcggccgaggcgct

SEQ ID NO: 3202590 - DNA, 25 bp, Homo sapien
tgctgcggaggggttcggccgaggc

SEQ ID NO: 3202591 - DNA, 25 bp, Homo sapien
ctgctgcggaggggttcggccgagg

SEQ ID NO: 3202592 - DNA, 25 bp, Homo sapien
ccggcaatgcccaagttactggtgg

SEQ ID NO: 3202593 - DNA, 25 bp, Homo sapien
gatccaacatagatcaattctcagg

SEQ ID NO: 3202594 - DNA, 25 bp, Homo sapien
tactggtgggatagtaacgctgcgc

SEQ ID NO: 3202595 - DNA, 25 bp, Homo sapien
tcgctacagatcgagaacccaatct

SEQ ID NO: 3202596 - DNA, 25 bp, Homo sapien
ttgaggcacccccactggcgggtgc

SEQ ID NO: 3202597 - DNA, 25 bp, Homo sapien
ccactggcgggtgccgtgcacctgc

SEQ ID NO: 3202598 - DNA, 25 bp, Homo sapien
taaacgcccgcggaagttgaggcac

SEQ ID NO: 3202599 - DNA, 25 bp, Homo sapien
gagagaggctgctatttaaacgccc

SEQ ID NO: 3202600 - DNA, 25 bp, Homo sapien
aggagagcagagtaacttgcttcat

SEQ ID NO: 3202601 - DNA, 25 bp, Homo sapien
taggagagcagagtaacttgcttca

SEQ ID NO: 3202602 - DNA, 25 bp, Homo sapien
caagacaactgagcatctgtggcag

SEQ ID NO: 3202603 - DNA, 25 bp, Homo sapien
acgaagagatgcaccaagacaactg

SEQ ID NO: 3202604 - DNA, 25 bp, Homo sapien
tctgtggcagctgccggagaaccat

SEQ ID NO: 3202605 - DNA, 25 bp, Homo sapien
tgcacgaagagatgcaccaagacaa

SEQ ID NO: 3202606 - DNA, 25 bp, Homo sapien
ccacttgccacgagaaacataatag

SEQ ID NO: 3202607 - DNA, 25 bp, Homo sapien
caaaactgatgcaaagttatccagc

SEQ ID NO: 3202608 - DNA, 25 bp, Homo sapien
cggagcctggagtgtccacttgcca

SEQ ID NO: 3202609 - DNA, 25 bp, Homo sapien
caaagttatccagcttatcggagcc

SEQ ID NO: 3202610 - DNA, 25 bp, Homo sapien
gggtagcatcttcatacacatccat

SEQ ID NO: 3202611 - DNA, 25 bp, Homo sapien
taacacagcatattactctgggtag

SEQ ID NO: 3202612 - DNA, 25 bp, Homo sapien
gcatattactctgggtagcatcttc

SEQ ID NO: 3202613 - DNA, 25 bp, Homo sapien
tactctgggtagcatcttcatacac

SEQ ID NO: 3202614 - DNA, 25 bp, Homo sapien
agaagtcacatatcagtaggtctcc

SEQ ID NO: 3202615 - DNA, 25 bp, Homo sapien
tattcctgtgacattattactataa

SEQ ID NO: 3202616 - DNA, 25 bp, Homo sapien
cacatatcagtaggtctcccaaaga

SEQ ID NO: 3202617 - DNA, 25 bp, Homo sapien
tctatattcctgtgacattattact

SEQ ID NO: 3202618 - DNA, 25 bp, Homo sapien
gatctccccgggaaacagcaggcag

SEQ ID NO: 3202619 - DNA, 25 bp, Homo sapien
atctccccgggaaacagcaggcagc

SEQ ID NO: 3202620 - DNA, 25 bp, Homo sapien
tgccattgtcgtcagaatcctcact

SEQ ID NO: 3202621 - DNA, 25 bp, Homo sapien
tgctgctgggaaggcgacctcgttt

SEQ ID NO: 3202622 - DNA, 25 bp, Homo sapien
actgctgctgggaaggcgacctcgt

SEQ ID NO: 3202623 - DNA, 25 bp, Homo sapien
tgctgggaaggcgacctcgtttcat

SEQ ID NO: 3202624 - DNA, 25 bp, Homo sapien
cctggtaggctccaagaacaacaaa

SEQ ID NO: 3202625 - DNA, 25 bp, Homo sapien
ccctggtaggctccaagaacaacaa

SEQ ID NO: 3202626 - DNA, 25 bp, Homo sapien
accctggtaggctccaagaacaaca

SEQ ID NO: 3202627 - DNA, 25 bp, Homo sapien
caaaccctggtaggctccaagaaca

SEQ ID NO: 3202628 - DNA, 25 bp, Homo sapien
gcagtatcacactcaggtacgtttc

SEQ ID NO: 3202629 - DNA, 25 bp, Homo sapien
tcacactcaggtacgtttctccagg

SEQ ID NO: 3202630 - DNA, 25 bp, Homo sapien
gtatcacactcaggtacgtttctcc

SEQ ID NO: 3202631 - DNA, 25 bp, Homo sapien
ctgcagtatcacactcaggtacgtt

SEQ ID NO: 3202632 - DNA, 25 bp, Homo sapien
tggctttgattaagttcccctttca

SEQ ID NO: 3202633 - DNA, 25 bp, Homo sapien
ggccactgcatagaccctatctttc

SEQ ID NO: 3202634 - DNA, 25 bp, Homo sapien
actgcatagaccctatctttcttgt

SEQ ID NO: 3202635 - DNA, 25 bp, Homo sapien
catagaccctatctttcttgtaagc

SEQ ID NO: 3202636 - DNA, 25 bp, Homo sapien
gccactgcatagaccctatctttct

SEQ ID NO: 3202637 - DNA, 25 bp, Homo sapien
ggtattcctctggaccaggccagaa

SEQ ID NO: 3202638 - DNA, 25 bp, Homo sapien
ccatggctgtggctcgtgctgcagc

SEQ ID NO: 3202639 - DNA, 25 bp, Homo sapien
gaaaacaaggcaaagggctccagac

SEQ ID NO: 3202640 - DNA, 25 bp, Homo sapien
tgcagccccatgctgacgtctgcag

SEQ ID NO: 3202641 - DNA, 25 bp, Homo sapien
agaaaatgcctgtccgtccccaact

SEQ ID NO: 3202642 - DNA, 25 bp, Homo sapien
acagaaaatgcctgtccgtccccaa

SEQ ID NO: 3202643 - DNA, 25 bp, Homo sapien
gaaaatgcctgtccgtccccaactg

SEQ ID NO: 3202644 - DNA, 25 bp, Homo sapien
aaatgcctgtccgtccccaactgta

SEQ ID NO: 3202645 - DNA, 25 bp, Homo sapien
caactatgactgcagctgtataagg

SEQ ID NO: 3202646 - DNA, 25 bp, Homo sapien
actatgactgcagctgtataagggc

SEQ ID NO: 3202647 - DNA, 25 bp, Homo sapien
tcaactatgactgcagctgtataag

SEQ ID NO: 3202648 - DNA, 25 bp, Homo sapien
tatgactgcagctgtataagggctt

SEQ ID NO: 3202649 - DNA, 25 bp, Homo sapien
caccagcacaatcagcagaactgga

SEQ ID NO: 3202650 - DNA, 25 bp, Homo sapien
ctgactgctgttccaccagcacaat

SEQ ID NO: 3202651 - DNA, 25 bp, Homo sapien
ttccaccagcacaatcagcagaact

SEQ ID NO: 3202652 - DNA, 25 bp, Homo sapien
acaatcagcagaactggagctcctg

SEQ ID NO: 3202653 - DNA, 25 bp, Homo sapien
tgagcaccagttctgaggctcatta

SEQ ID NO: 3202654 - DNA, 25 bp, Homo sapien
gagcaccagttctgaggctcattac

SEQ ID NO: 3202655 - DNA, 25 bp, Homo sapien
cttgagcaccagttctgaggctcat

SEQ ID NO: 3202656 - DNA, 25 bp, Homo sapien
ccttgagcaccagttctgaggctca

SEQ ID NO: 3202657 - DNA, 25 bp, Homo sapien
gctcattctgtgcagggatgctgta

SEQ ID NO: 3202658 - DNA, 25 bp, Homo sapien
tcataagcaggcctaatgtgctcat

SEQ ID NO: 3202659 - DNA, 25 bp, Homo sapien
ggatgctgtatcaaggaccacaccc

SEQ ID NO: 3202660 - DNA, 25 bp, Homo sapien
tgcaggtgtagtcttcacccataag

SEQ ID NO: 3202661 - DNA, 25 bp, Homo sapien
aattctgggaccaagtagttgacag

SEQ ID NO: 3202662 - DNA, 25 bp, Homo sapien
cctatgctgggatcgggaattctgg

SEQ ID NO: 3202663 - DNA, 25 bp, Homo sapien
ctctgaaggctttcgatcttcatgt

SEQ ID NO: 3202664 - DNA, 25 bp, Homo sapien
gctttcgatcttcatgtctggagca

SEQ ID NO: 3202665 - DNA, 25 bp, Homo sapien
tggtctcaaaccattgaggtcagga

SEQ ID NO: 3202666 - DNA, 25 bp, Homo sapien
caccagggtttatggtatggtagct

SEQ ID NO: 3202667 - DNA, 25 bp, Homo sapien
tctcaaaccattgaggtcaggacct

SEQ ID NO: 3202668 - DNA, 25 bp, Homo sapien
ctcaaaccattgaggtcaggacctc

SEQ ID NO: 3202669 - DNA, 25 bp, Homo sapien
ctgagggatggtccccgggctcaca

SEQ ID NO: 3202670 - DNA, 25 bp, Homo sapien
ggctcacaggcacctggaccccttt

SEQ ID NO: 3202671 - DNA, 25 bp, Homo sapien
acacatagtactcatccggattcag

SEQ ID NO: 3202672 - DNA, 25 bp, Homo sapien
caggctgagggatggtccccgggct

SEQ ID NO: 3202673 - DNA, 25 bp, Homo sapien
gagggatttctcttcagacacaacc

SEQ ID NO: 3202674 - DNA, 25 bp, Homo sapien
tgatgaacatgagggatttctcttc

SEQ ID NO: 3202675 - DNA, 25 bp, Homo sapien
gaacatgagggatttctcttcagac

SEQ ID NO: 3202676 - DNA, 25 bp, Homo sapien
catgagggatttctcttcagacaca

SEQ ID NO: 3202677 - DNA, 25 bp, Homo sapien
tggtcagttccagccatgcagcatc

SEQ ID NO: 3202678 - DNA, 25 bp, Homo sapien
agccagcgtccggatgtccacatag

SEQ ID NO: 3202679 - DNA, 25 bp, Homo sapien
tagcgacacacgctgtcagccagcg

SEQ ID NO: 3202680 - DNA, 25 bp, Homo sapien
tgcagcatccatgtcattgaggtca

SEQ ID NO: 3202681 - DNA, 25 bp, Homo sapien
tgtgcttggaaatggggagcatgcc

SEQ ID NO: 3202682 - DNA, 25 bp, Homo sapien
ccaggacagagataaacggagggaa

SEQ ID NO: 3202683 - DNA, 25 bp, Homo sapien
tccaggtttgcagcatgacataagg

SEQ ID NO: 3202684 - DNA, 25 bp, Homo sapien
gttaaaacacacatgatgtgcttgg

SEQ ID NO: 3202685 - DNA, 25 bp, Homo sapien
tcatcatattcgatccccaggcctt

SEQ ID NO: 3202686 - DNA, 25 bp, Homo sapien
tcatattgtcgtagcatcgctgctc

SEQ ID NO: 3202687 - DNA, 25 bp, Homo sapien
tcattgccgtcctcaccatcaggag

SEQ ID NO: 3202688 - DNA, 25 bp, Homo sapien
tcgctgctcaaattcctctaggacc

SEQ ID NO: 3202689 - DNA, 25 bp, Homo sapien
cccagacagtgtgagatccagagca

SEQ ID NO: 3202690 - DNA, 25 bp, Homo sapien
gagtcgcaggtctccctatcaagga

SEQ ID NO: 3202691 - DNA, 25 bp, Homo sapien
tccagagcaacagacggcgatgact

SEQ ID NO: 3202692 - DNA, 25 bp, Homo sapien
taccgtaaggagacttcccagacag

SEQ ID NO: 3202693 - DNA, 25 bp, Homo sapien
gctacgggtgggcttcatagctcca

SEQ ID NO: 3202694 - DNA, 25 bp, Homo sapien
ggtaccttgaggattccataacagg

SEQ ID NO: 3202695 - DNA, 25 bp, Homo sapien
cacagagcacagctaacgtggaccc

SEQ ID NO: 3202696 - DNA, 25 bp, Homo sapien
cacttggttccgctacgggtgggct

SEQ ID NO: 3202697 - DNA, 25 bp, Homo sapien
ttgcagaggctgcacactagcgccc

SEQ ID NO: 3202698 - DNA, 25 bp, Homo sapien
ctgggaatgtgtgacaccttggtga

SEQ ID NO: 3202699 - DNA, 25 bp, Homo sapien
cccaaacttctcattgcagaggctg

SEQ ID NO: 3202700 - DNA, 25 bp, Homo sapien
tagcgcccaccggctgctgggaatg

SEQ ID NO: 3202701 - DNA, 25 bp, Homo sapien
taagactgctaggaggtgttggcct

SEQ ID NO: 3202702 - DNA, 25 bp, Homo sapien
cagggtctgcagctacactcagtga

SEQ ID NO: 3202703 - DNA, 25 bp, Homo sapien
gatgtgcgcacaccatggaaacctg

SEQ ID NO: 3202704 - DNA, 25 bp, Homo sapien
ggtggccaactctcaaatgccgtgt

SEQ ID NO: 3202705 - DNA, 25 bp, Homo sapien
aatgcattagcatgtccccttgatt

SEQ ID NO: 3202706 - DNA, 25 bp, Homo sapien
ttagcatgtccccttgattactaac

SEQ ID NO: 3202707 - DNA, 25 bp, Homo sapien
ggccgtgttcaaagagtctctgttt

SEQ ID NO: 3202708 - DNA, 25 bp, Homo sapien
acccaggccgtgttcaaagagtctc

SEQ ID NO: 3202709 - DNA, 25 bp, Homo sapien
cagaggcgtttgtcatgtattcaca

SEQ ID NO: 3202710 - DNA, 25 bp, Homo sapien
aaaaatgagaattagccgggcttgc

SEQ ID NO: 3202711 - DNA, 25 bp, Homo sapien
gacaggatgaccatgctctcggagc

SEQ ID NO: 3202712 - DNA, 25 bp, Homo sapien
ttctttaaaacccatggctgacagg

SEQ ID NO: 3202713 - DNA, 25 bp, Homo sapien
tagtgcctttgatccagacaacaag

SEQ ID NO: 3202714 - DNA, 25 bp, Homo sapien
aagatccttcccatgcgtcacaggg

SEQ ID NO: 3202715 - DNA, 25 bp, Homo sapien
gaaggtggttcctcatggtgactga

SEQ ID NO: 3202716 - DNA, 25 bp, Homo sapien
gaggtcaacgtagaggccaggtatc

SEQ ID NO: 3202717 - DNA, 25 bp, Homo sapien
gactctcctcgggtttcctatgtga

SEQ ID NO: 3202718 - DNA, 25 bp, Homo sapien
catccagcaggttgacgaaggtgta

SEQ ID NO: 3202719 - DNA, 25 bp, Homo sapien
ttctgcttacggacactcacccggt

SEQ ID NO: 3202720 - DNA, 25 bp, Homo sapien
gaaatccactacttcctcaggcagc

SEQ ID NO: 3202721 - DNA, 25 bp, Homo sapien
tataaggtgtcagtgtcaatcatta

SEQ ID NO: 3202722 - DNA, 25 bp, Homo sapien
ataaggtgtcagtgtcaatcattac

SEQ ID NO: 3202723 - DNA, 25 bp, Homo sapien
ctataaggtgtcagtgtcaatcatt

SEQ ID NO: 3202724 - DNA, 25 bp, Homo sapien
tcagccagaaactacctacagggag

SEQ ID NO: 3202725 - DNA, 25 bp, Homo sapien
gatgacttagcacctcactgccagg

SEQ ID NO: 3202726 - DNA, 25 bp, Homo sapien
gaatttaatcggtagccagcagcca

SEQ ID NO: 3202727 - DNA, 25 bp, Homo sapien
taaaggcttcttaccaggattccag

SEQ ID NO: 3202728 - DNA, 25 bp, Homo sapien
catcgttggcattgttctacttaaa

SEQ ID NO: 3202729 - DNA, 25 bp, Homo sapien
cagaaaagagttagtacaccacaag

SEQ ID NO: 3202730 - DNA, 25 bp, Homo sapien
tagaagtgcatgttaatctgagtaa

SEQ ID NO: 3202731 - DNA, 25 bp, Homo sapien
taaacagcgacagtgatgactccaa

SEQ ID NO: 3202732 - DNA, 25 bp, Homo sapien
gtaaatgtaagtaatgccacacaca

SEQ ID NO: 3202733 - DNA, 25 bp, Homo sapien
taaactgagtctaaggctgggtaca

SEQ ID NO: 3202734 - DNA, 25 bp, Homo sapien
tgggcaaggcaaagatttcaattgt

SEQ ID NO: 3202735 - DNA, 25 bp, Homo sapien
cacaggcatcatggcaaattttggg

SEQ ID NO: 3202736 - DNA, 25 bp, Homo sapien
tagtagtgaggactctaaacctgac

SEQ ID NO: 3202737 - DNA, 25 bp, Homo sapien
gacatcttaggagcagacaggttgc

SEQ ID NO: 3202738 - DNA, 25 bp, Homo sapien
tttcaatcggaacaaatcagccctg

SEQ ID NO: 3202739 - DNA, 25 bp, Homo sapien
tggtagctttgaccacaccatggct

SEQ ID NO: 3202740 - DNA, 25 bp, Homo sapien
tagaatgtagagaataaagattcta

SEQ ID NO: 3202741 - DNA, 25 bp, Homo sapien
gaatgtagagaataaagattctaag

SEQ ID NO: 3202742 - DNA, 25 bp, Homo sapien
ctagaatgtagagaataaagattct

SEQ ID NO: 3202743 - DNA, 25 bp, Homo sapien
tgtagagaataaagattctaagtaa

SEQ ID NO: 3202744 - DNA, 25 bp, Homo sapien
ccaaaagcttagtgtaaagattgaa

SEQ ID NO: 3202745 - DNA, 25 bp, Homo sapien
cagaccgtttaatcttttccctgcg

SEQ ID NO: 3202746 - DNA, 25 bp, Homo sapien
ttcttgctccaaaagcttagtgtaa

SEQ ID NO: 3202747 - DNA, 25 bp, Homo sapien
ttcctggactttgcacacagaccgt

SEQ ID NO: 3202748 - DNA, 25 bp, Homo sapien
aaacaaaagcatgttttccagtgag

SEQ ID NO: 3202749 - DNA, 25 bp, Homo sapien
ctgttaaacaaaagcatgttttcca

SEQ ID NO: 3202750 - DNA, 25 bp, Homo sapien
tgttaaacaaaagcatgttttccag

SEQ ID NO: 3202751 - DNA, 25 bp, Homo sapien
caaaagcatgttttccagtgaggag

SEQ ID NO: 3202752 - DNA, 25 bp, Homo sapien
tatagtttactttgattagggagcc

SEQ ID NO: 3202753 - DNA, 25 bp, Homo sapien
gaactcggcctaagcccaaatatgg

SEQ ID NO: 3202754 - DNA, 25 bp, Homo sapien
tatcttgggagcatcagggccaaca

SEQ ID NO: 3202755 - DNA, 25 bp, Homo sapien
caaaaagctctctgggaccaccatc

SEQ ID NO: 3202756 - DNA, 25 bp, Homo sapien
gagctctcctctagcaaacccaatg

SEQ ID NO: 3202757 - DNA, 25 bp, Homo sapien
ctcaggattaatgggtttctgcttc

SEQ ID NO: 3202758 - DNA, 25 bp, Homo sapien
tgttcagttcgggttctagtcttag

SEQ ID NO: 3202759 - DNA, 25 bp, Homo sapien
aacccaatgacgagcccaaagggct

SEQ ID NO: 3202760 - DNA, 25 bp, Homo sapien
gaatccattcatgttggaagcccag

SEQ ID NO: 3202761 - DNA, 25 bp, Homo sapien
gctgaatggacaccaagctaggcac

SEQ ID NO: 3202762 - DNA, 25 bp, Homo sapien
tgcaacaaaaatagccttgagggcc

SEQ ID NO: 3202763 - DNA, 25 bp, Homo sapien
tagccactgtactattggaagccag

SEQ ID NO: 3202764 - DNA, 25 bp, Homo sapien
taaaaggcggtttccataatgatac

SEQ ID NO: 3202765 - DNA, 25 bp, Homo sapien
gcactgaatggcagaacagacaaat

SEQ ID NO: 3202766 - DNA, 25 bp, Homo sapien
tgcttttaaccaaggagattcgtaa

SEQ ID NO: 3202767 - DNA, 25 bp, Homo sapien
gtagtagatataaacccagatgcct

SEQ ID NO: 3202768 - DNA, 25 bp, Homo sapien
ccccgaataggccccaatgtgtgat

SEQ ID NO: 3202769 - DNA, 25 bp, Homo sapien
tgttagtttgttaagaatggtggct

SEQ ID NO: 3202770 - DNA, 25 bp, Homo sapien
ccgaataggccccaatgtgtgatgt

SEQ ID NO: 3202771 - DNA, 25 bp, Homo sapien
ccacccccgaataggccccaatgtg

SEQ ID NO: 3202772 - DNA, 25 bp, Homo sapien
catttttgagtgcaatgaagttgta

SEQ ID NO: 3202773 - DNA, 25 bp, Homo sapien
tttttggtgagattatcttggctaa

SEQ ID NO: 3202774 - DNA, 25 bp, Homo sapien
cattaatgttatagtaccatgtttg

SEQ ID NO: 3202775 - DNA, 25 bp, Homo sapien
attctattggaacttcatttttgag

SEQ ID NO: 3202776 - DNA, 25 bp, Homo sapien
taaatgtttctccatatgccataga

SEQ ID NO: 3202777 - DNA, 25 bp, Homo sapien
aatgtttctccatatgccatagata

SEQ ID NO: 3202778 - DNA, 25 bp, Homo sapien
gtttaaatgtttctccatatgccat

SEQ ID NO: 3202779 - DNA, 25 bp, Homo sapien
tccatatgccatagatacaaaattt

SEQ ID NO: 3202780 - DNA, 25 bp, Homo sapien
gaaggaaccagaacaccaaccctga

SEQ ID NO: 3202781 - DNA, 25 bp, Homo sapien
acaccaaccctgataatatgacaaa

SEQ ID NO: 3202782 - DNA, 25 bp, Homo sapien
gaagccccgtgcaagaaaatccaaa

SEQ ID NO: 3202783 - DNA, 25 bp, Homo sapien
aggcgaagccccgtgcaagaaaatc

SEQ ID NO: 3202784 - DNA, 25 bp, Homo sapien
gaactgttcagtcatcccaagtagc

SEQ ID NO: 3202785 - DNA, 25 bp, Homo sapien
aaggaagcagattgcaggacccagg

SEQ ID NO: 3202786 - DNA, 25 bp, Homo sapien
gacagagtagcatgcagaggctcac

SEQ ID NO: 3202787 - DNA, 25 bp, Homo sapien
atttttgctccagaacgactacagg

SEQ ID NO: 3202788 - DNA, 25 bp, Homo sapien
tcttctagcttgggaattctttttc

SEQ ID NO: 3202789 - DNA, 25 bp, Homo sapien
ttctagcttgggaattctttttcta

SEQ ID NO: 3202790 - DNA, 25 bp, Homo sapien
cttctagcttgggaattctttttct

SEQ ID NO: 3202791 - DNA, 25 bp, Homo sapien
cacatatgcactcataactatgaat

SEQ ID NO: 3202792 - DNA, 25 bp, Homo sapien
ttaacttagacctccaatagagtgt

SEQ ID NO: 3202793 - DNA, 25 bp, Homo sapien
taggtcttttacttgctttactgca

SEQ ID NO: 3202794 - DNA, 25 bp, Homo sapien
tgaataatgacagttgtttcatctt

SEQ ID NO: 3202795 - DNA, 25 bp, Homo sapien
taggtggcccgacgagacccagagt

SEQ ID NO: 3202796 - DNA, 25 bp, Homo sapien
agccgtcttggcgttgtcctctcca

SEQ ID NO: 3202797 - DNA, 25 bp, Homo sapien
gtgacccgcgggacgcctgtatcga

SEQ ID NO: 3202798 - DNA, 25 bp, Homo sapien
gattcggttgaacgtggagtcccca

SEQ ID NO: 3202799 - DNA, 25 bp, Homo sapien
caccggtttcaaagtcgcagggcgg

SEQ ID NO: 3202800 - DNA, 25 bp, Homo sapien
cggggcaccggtttcaaagtcgcag

SEQ ID NO: 3202801 - DNA, 25 bp, Homo sapien
gatgacgcaagaggcgccaccgtct

SEQ ID NO: 3202802 - DNA, 25 bp, Homo sapien
caccgtctccaaggagtggtccggg

SEQ ID NO: 3202803 - DNA, 25 bp, Homo sapien
taggacgcgcgatggcgtaagctcc

SEQ ID NO: 3202804 - DNA, 25 bp, Homo sapien
tgacagccagccaatagcgtgctag

SEQ ID NO: 3202805 - DNA, 25 bp, Homo sapien
ggttgggcctcactacctggagaca

SEQ ID NO: 3202806 - DNA, 25 bp, Homo sapien
ttagtaacccaaagatagtgagggc

SEQ ID NO: 3202807 - DNA, 25 bp, Homo sapien
ttcttttcagccgaggtcacaggag

SEQ ID NO: 3202808 - DNA, 25 bp, Homo sapien
cagctgcctacacgttctgggggag

SEQ ID NO: 3202809 - DNA, 25 bp, Homo sapien
cacaggagagggctcggctttaggc

SEQ ID NO: 3202810 - DNA, 25 bp, Homo sapien
agggctcggctttaggctccaccca

SEQ ID NO: 3202811 - DNA, 25 bp, Homo sapien
ctggcgacgacgaaaggaatgtcag

SEQ ID NO: 3202812 - DNA, 25 bp, Homo sapien
acgacgaaaggaatgtcagagagaa

SEQ ID NO: 3202813 - DNA, 25 bp, Homo sapien
agagagaagagggaacaactagaga

SEQ ID NO: 3202814 - DNA, 25 bp, Homo sapien
agagaagagggaacaactagagaac

SEQ ID NO: 3202815 - DNA, 25 bp, Homo sapien
gttctggtagattcacttattcttc

SEQ ID NO: 3202816 - DNA, 25 bp, Homo sapien
gaagttctggtagattcacttattc

SEQ ID NO: 3202817 - DNA, 25 bp, Homo sapien
ctaggaagttctggtagattcactt

SEQ ID NO: 3202818 - DNA, 25 bp, Homo sapien
taggaagttctggtagattcactta

SEQ ID NO: 3202819 - DNA, 25 bp, Homo sapien
cagttactggatcctctgggaatca

SEQ ID NO: 3202820 - DNA, 25 bp, Homo sapien
gcaccatgggttcttatgtcatcct

SEQ ID NO: 3202821 - DNA, 25 bp, Homo sapien
tattgtaaagtgtgcaggtgtctca

SEQ ID NO: 3202822 - DNA, 25 bp, Homo sapien
cttaactgtaactataagcaccatg

SEQ ID NO: 3202823 - DNA, 25 bp, Homo sapien
tggattcagcctgataaatacgggc

SEQ ID NO: 3202824 - DNA, 25 bp, Homo sapien
tgtcacctggattcagcctgataaa

SEQ ID NO: 3202825 - DNA, 25 bp, Homo sapien
gataaatacgggctcatgcttcact

SEQ ID NO: 3202826 - DNA, 25 bp, Homo sapien
gggctcatgcttcactggaaaacca

SEQ ID NO: 3202827 - DNA, 25 bp, Homo sapien
cttcataatcccacagttcattgaa

SEQ ID NO: 3202828 - DNA, 25 bp, Homo sapien
tggaggatccctgaaaaatggagca

SEQ ID NO: 3202829 - DNA, 25 bp, Homo sapien
gggctggaggatccctgaaaaatgg

SEQ ID NO: 3202830 - DNA, 25 bp, Homo sapien
ggctggaggatccctgaaaaatgga

SEQ ID NO: 3202831 - DNA, 25 bp, Homo sapien
tatagacataattctgccagcaatt

SEQ ID NO: 3202832 - DNA, 25 bp, Homo sapien
caaattagaatgtctactgtgatag

SEQ ID NO: 3202833 - DNA, 25 bp, Homo sapien
tgtcaacttaactaggccatggtat

SEQ ID NO: 3202834 - DNA, 25 bp, Homo sapien
tcacttaatcctttatggatagaca

SEQ ID NO: 3202835 - DNA, 25 bp, Homo sapien
gctcagttatatcattcaagaaaaa

SEQ ID NO: 3202836 - DNA, 25 bp, Homo sapien
ttgctcagttatatcattcaagaaa

SEQ ID NO: 3202837 - DNA, 25 bp, Homo sapien
cagttatatcattcaagaaaaatgc

SEQ ID NO: 3202838 - DNA, 25 bp, Homo sapien
aacttctaaatattgctcagttata

SEQ ID NO: 3202839 - DNA, 25 bp, Homo sapien
ctagaaaataacacgttcaaattat

SEQ ID NO: 3202840 - DNA, 25 bp, Homo sapien
tagaaaataacacgttcaaattatg

SEQ ID NO: 3202841 - DNA, 25 bp, Homo sapien
aatgagcttttactatatcatttat

SEQ ID NO: 3202842 - DNA, 25 bp, Homo sapien
taatgagcttttactatatcattta

SEQ ID NO: 3202843 - DNA, 25 bp, Homo sapien
ttaatgagcttttactatatcattt

SEQ ID NO: 3202844 - DNA, 25 bp, Homo sapien
gtttttaaaccctggcactgaatgc

SEQ ID NO: 3202845 - DNA, 25 bp, Homo sapien
aatatgtgctctgtacttgaaacta

SEQ ID NO: 3202846 - DNA, 25 bp, Homo sapien
tctccttttatttccgaacagctat

SEQ ID NO: 3202847 - DNA, 25 bp, Homo sapien
gcatatcattcaagcaaattcagag

SEQ ID NO: 3202848 - DNA, 25 bp, Homo sapien
ttatgcagccttaggagtacatcct

SEQ ID NO: 3202849 - DNA, 25 bp, Homo sapien
cagtctacaactagtcaacaggcta

SEQ ID NO: 3202850 - DNA, 25 bp, Homo sapien
tgagagcttttcagggaggatttcc

SEQ ID NO: 3202851 - DNA, 25 bp, Homo sapien
taacagtgtacaattgggactagcc

SEQ ID NO: 3202852 - DNA, 25 bp, Homo sapien
gattcctcatgagtgtttgaaaaac

SEQ ID NO: 3202853 - DNA, 25 bp, Homo sapien
taagattcctcatgagtgtttgaaa

SEQ ID NO: 3202854 - DNA, 25 bp, Homo sapien
ttcctcatgagtgtttgaaaaacat

SEQ ID NO: 3202855 - DNA, 25 bp, Homo sapien
aattaagattcctcatgagtgtttg

SEQ ID NO: 3202856 - DNA, 25 bp, Homo sapien
taaaagcactaaatgctgtccgtgg

SEQ ID NO: 3202857 - DNA, 25 bp, Homo sapien
gtaaaagcactaaatgctgtccgtg

SEQ ID NO: 3202858 - DNA, 25 bp, Homo sapien
ttcttcttccagaaagtaaaagcac

SEQ ID NO: 3202859 - DNA, 25 bp, Homo sapien
tcttccagaaagtaaaagcactaaa

SEQ ID NO: 3202860 - DNA, 25 bp, Homo sapien
aattgggcttacactttaaacatag

SEQ ID NO: 3202861 - DNA, 25 bp, Homo sapien
ctgtgtacgtaatgattttgcctcc

SEQ ID NO: 3202862 - DNA, 25 bp, Homo sapien
gtgtattactgtgtacgtaatgatt

SEQ ID NO: 3202863 - DNA, 25 bp, Homo sapien
tgggcttacactttaaacatagaaa

SEQ ID NO: 3202864 - DNA, 25 bp, Homo sapien
cagggtaaagagcttcataacttcg

SEQ ID NO: 3202865 - DNA, 25 bp, Homo sapien
gcagttcatgctgaggtacagggta

SEQ ID NO: 3202866 - DNA, 25 bp, Homo sapien
tcttttgatccatgaattgcaaatg

SEQ ID NO: 3202867 - DNA, 25 bp, Homo sapien
aaaataactccaagggagataagct

SEQ ID NO: 3202868 - DNA, 25 bp, Homo sapien
tggaataactccatagccatagctt

SEQ ID NO: 3202869 - DNA, 25 bp, Homo sapien
tgagagcaatatctcttggaataac

SEQ ID NO: 3202870 - DNA, 25 bp, Homo sapien
cttggaataactccatagccatagc

SEQ ID NO: 3202871 - DNA, 25 bp, Homo sapien
tgctgccccatgagagcaatatctc

SEQ ID NO: 3202872 - DNA, 25 bp, Homo sapien
gactaccttggccatagtgagtata

SEQ ID NO: 3202873 - DNA, 25 bp, Homo sapien
actaccttggccatagtgagtatac

SEQ ID NO: 3202874 - DNA, 25 bp, Homo sapien
gagactaccttggccatagtgagta

SEQ ID NO: 3202875 - DNA, 25 bp, Homo sapien
agactaccttggccatagtgagtat

SEQ ID NO: 3202876 - DNA, 25 bp, Homo sapien
ggtctgattccggttgtttccactc

SEQ ID NO: 3202877 - DNA, 25 bp, Homo sapien
ctcttctccaagcagtgtgttaaaa

SEQ ID NO: 3202878 - DNA, 25 bp, Homo sapien
ccaagcagtgtgttaaaattgaaag

SEQ ID NO: 3202879 - DNA, 25 bp, Homo sapien
tcacatttctctattagccacaggt

SEQ ID NO: 3202880 - DNA, 25 bp, Homo sapien
catcctggactaagtgactctgaga

SEQ ID NO: 3202881 - DNA, 25 bp, Homo sapien
ggtggccttggacaacctcaattgt

SEQ ID NO: 3202882 - DNA, 25 bp, Homo sapien
gaatcacaaggtagtgcaagacagt

SEQ ID NO: 3202883 - DNA, 25 bp, Homo sapien
tcaagaataactgtactgtgtgctg

SEQ ID NO: 3202884 - DNA, 25 bp, Homo sapien
tgaagttaattccatttaatttaca

SEQ ID NO: 3202885 - DNA, 25 bp, Homo sapien
gaaatgagtaagtcgataagccaca

SEQ ID NO: 3202886 - DNA, 25 bp, Homo sapien
tatgccattcgtatctaaaacaggc

SEQ ID NO: 3202887 - DNA, 25 bp, Homo sapien
taagatgcctaacactgccaccatg

SEQ ID NO: 3202888 - DNA, 25 bp, Homo sapien
gattcacagtgttcgattcgcttct

SEQ ID NO: 3202889 - DNA, 25 bp, Homo sapien
gaaattacaggtgataggctgccaa

SEQ ID NO: 3202890 - DNA, 25 bp, Homo sapien
caaacatgggctttcagtgtactat

SEQ ID NO: 3202891 - DNA, 25 bp, Homo sapien
caggagccagtgatgtagctatata

SEQ ID NO: 3202892 - DNA, 25 bp, Homo sapien
tttactaaaccttgcattctctgcg

SEQ ID NO: 3202893 - DNA, 25 bp, Homo sapien
cccacaggcagtcagactttatggt

SEQ ID NO: 3202894 - DNA, 25 bp, Homo sapien
ggctctttttgcctgaccccacagg

SEQ ID NO: 3202895 - DNA, 25 bp, Homo sapien
gaccccacaggcagtcagactttat

SEQ ID NO: 3202896 - DNA, 25 bp, Homo sapien
cctaaaaattgctgttattctgttc

SEQ ID NO: 3202897 - DNA, 25 bp, Homo sapien
catgcatagagtaatgggggaacct

SEQ ID NO: 3202898 - DNA, 25 bp, Homo sapien
tgccgggggtgacattacatatagg

SEQ ID NO: 3202899 - DNA, 25 bp, Homo sapien
ttacatataggtaggatggtgatgc

SEQ ID NO: 3202900 - DNA, 25 bp, Homo sapien
agagcagagaattggtctgatcaca

SEQ ID NO: 3202901 - DNA, 25 bp, Homo sapien
tggggtgccttcagtcaaatggcca

SEQ ID NO: 3202902 - DNA, 25 bp, Homo sapien
agggatgagccttcatcgacatcat

SEQ ID NO: 3202903 - DNA, 25 bp, Homo sapien
gatgagccttcatcgacatcatcag

SEQ ID NO: 3202904 - DNA, 25 bp, Homo sapien
tcatcgacatcatcagaaaaggctc

SEQ ID NO: 3202905 - DNA, 25 bp, Homo sapien
cttaacagtgctggaagtacctgta

SEQ ID NO: 3202906 - DNA, 25 bp, Homo sapien
tggcttaacagtgctggaagtacct

SEQ ID NO: 3202907 - DNA, 25 bp, Homo sapien
gtccctgagggcgctcttcccctgg

SEQ ID NO: 3202908 - DNA, 25 bp, Homo sapien
actgtccctgagggcgctcttcccc

SEQ ID NO: 3202909 - DNA, 25 bp, Homo sapien
agtggctacagtaggtgccatgatg

SEQ ID NO: 3202910 - DNA, 25 bp, Homo sapien
gctacagtaggtgccatgatgtcag

SEQ ID NO: 3202911 - DNA, 25 bp, Homo sapien
tggctacagtaggtgccatgatgtc

SEQ ID NO: 3202912 - DNA, 25 bp, Homo sapien
gaggccagtggctacagtaggtgcc

SEQ ID NO: 3202913 - DNA, 25 bp, Homo sapien
gctggggccatgttggccaccccat

SEQ ID NO: 3202914 - DNA, 25 bp, Homo sapien
acctccatgactcccactgtgccca

SEQ ID NO: 3202915 - DNA, 25 bp, Homo sapien
ctccacctccatgactcccactgtg

SEQ ID NO: 3202916 - DNA, 25 bp, Homo sapien
tggctggggccatgttggccacccc

SEQ ID NO: 3202917 - DNA, 25 bp, Homo sapien
ctacaaagacaagaaaaagctgatg

SEQ ID NO: 3202918 - DNA, 25 bp, Homo sapien
gctgatgctgctggtgcgagagcgc

SEQ ID NO: 3202919 - DNA, 25 bp, Homo sapien
caaagacaagaaaaagctgatgctg

SEQ ID NO: 3202920 - DNA, 25 bp, Homo sapien
tgctgctggtgcgagagcgctttgc

SEQ ID NO: 3202921 - DNA, 25 bp, Homo sapien
aggatgaccacctgcaatttgccca

SEQ ID NO: 3202922 - DNA, 25 bp, Homo sapien
atttgcccagttcatcgacaacctc

SEQ ID NO: 3202923 - DNA, 25 bp, Homo sapien
tcattgaatttctgagcaaggctct

SEQ ID NO: 3202924 - DNA, 25 bp, Homo sapien
cagttcatcgacaacctcaaataaa

SEQ ID NO: 3202925 - DNA, 25 bp, Homo sapien
cattgacaaatctccattgtgccag

SEQ ID NO: 3202926 - DNA, 25 bp, Homo sapien
agacatcctgtgtgcgacactgcac

SEQ ID NO: 3202927 - DNA, 25 bp, Homo sapien
gacactgcacaatgactgcacctgg

SEQ ID NO: 3202928 - DNA, 25 bp, Homo sapien
ccctggtgataaagagtgtgcactg

SEQ ID NO: 3202929 - DNA, 25 bp, Homo sapien
caggctctccctgacatgtgtgcgg

SEQ ID NO: 3202930 - DNA, 25 bp, Homo sapien
tctatgcaggccaagttcaaactcc

SEQ ID NO: 3202931 - DNA, 25 bp, Homo sapien
tgtgcgggccctgttgatcatcttg

SEQ ID NO: 3202932 - DNA, 25 bp, Homo sapien
tgaatcaggacccagatagcacggc

SEQ ID NO: 3202933 - DNA, 25 bp, Homo sapien
tacagttgtcaagagattaggaata

SEQ ID NO: 3202934 - DNA, 25 bp, Homo sapien
tgtcaagagattaggaataatgtga

SEQ ID NO: 3202935 - DNA, 25 bp, Homo sapien
acactacagttgtcaagagattagg

SEQ ID NO: 3202936 - DNA, 25 bp, Homo sapien
cagttgtcaagagattaggaataat

SEQ ID NO: 3202937 - DNA, 25 bp, Homo sapien
agtagaaagtcaaatggtacagtta

SEQ ID NO: 3202938 - DNA, 25 bp, Homo sapien
tttctcactaacagtgtattctgca

SEQ ID NO: 3202939 - DNA, 25 bp, Homo sapien
tcatttctcactaacagtgtattct

SEQ ID NO: 3202940 - DNA, 25 bp, Homo sapien
ttctcactaacagtgtattctgcat

SEQ ID NO: 3202941 - DNA, 25 bp, Homo sapien
catttctcactaacagtgtattctg

SEQ ID NO: 3202942 - DNA, 25 bp, Homo sapien
tattcccacttggtcacgtggagcc

SEQ ID NO: 3202943 - DNA, 25 bp, Homo sapien
catgtacatgtcgtaccaggaccaa

SEQ ID NO: 3202944 - DNA, 25 bp, Homo sapien
gacaacgtctgtgtgatcttcctgc

SEQ ID NO: 3202945 - DNA, 25 bp, Homo sapien
ccaggaccaaacaacgatagctgtt

SEQ ID NO: 3202946 - DNA, 25 bp, Homo sapien
tcctcagtagcagccaagtgcctgg

SEQ ID NO: 3202947 - DNA, 25 bp, Homo sapien
gctggttgaagctgtaggaacccga

SEQ ID NO: 3202948 - DNA, 25 bp, Homo sapien
gaagctgtaggaacccgacatcaat

SEQ ID NO: 3202949 - DNA, 25 bp, Homo sapien
aagatgggctggttgaagctgtagg

SEQ ID NO: 3202950 - DNA, 25 bp, Homo sapien
taggaacccgacatcaatctgctcc

SEQ ID NO: 3202951 - DNA, 25 bp, Homo sapien
atgtctaatatgatgtcctttgcaa

SEQ ID NO: 3202952 - DNA, 25 bp, Homo sapien
aatgtctaatatgatgtcctttgca

SEQ ID NO: 3202953 - DNA, 25 bp, Homo sapien
tacaatgtctaatatgatgtccttt

SEQ ID NO: 3202954 - DNA, 25 bp, Homo sapien
caatgtctaatatgatgtcctttgc

SEQ ID NO: 3202955 - DNA, 25 bp, Homo sapien
gaggtttctggaacacaacaggcaa

SEQ ID NO: 3202956 - DNA, 25 bp, Homo sapien
tcctgcaaaagctcacagatgggtt

SEQ ID NO: 3202957 - DNA, 25 bp, Homo sapien
taaatgcatgtcatgaacatcctgc

SEQ ID NO: 3202958 - DNA, 25 bp, Homo sapien
tttttgcattgaacaggatgtggcc

SEQ ID NO: 3202959 - DNA, 25 bp, Homo sapien
tggcagcaaaggagccaagtccaaa

SEQ ID NO: 3202960 - DNA, 25 bp, Homo sapien
gagccaagtccaaagtgactcttaa

SEQ ID NO: 3202961 - DNA, 25 bp, Homo sapien
tccttccttgctgggatgagctgta

SEQ ID NO: 3202962 - DNA, 25 bp, Homo sapien
gctgtattacatctctgagggctga

SEQ ID NO: 3202963 - DNA, 25 bp, Homo sapien
gaaagaagcattacccatcagcaac

SEQ ID NO: 3202964 - DNA, 25 bp, Homo sapien
cagggttgctagagtaagtactcca

SEQ ID NO: 3202965 - DNA, 25 bp, Homo sapien
tatttctagttgtgtcattgctggg

SEQ ID NO: 3202966 - DNA, 25 bp, Homo sapien
ctgtgccaacagcacatcaagcagg

SEQ ID NO: 3202967 - DNA, 25 bp, Homo sapien
acaccaagcttctactttgattgac

SEQ ID NO: 3202968 - DNA, 25 bp, Homo sapien
tcagagtccacaccaagcttctact

SEQ ID NO: 3202969 - DNA, 25 bp, Homo sapien
agcttctactttgattgactgagtg

SEQ ID NO: 3202970 - DNA, 25 bp, Homo sapien
tctcattaaaattcagagtccacac

SEQ ID NO: 3202971 - DNA, 25 bp, Homo sapien
aagtgaatgtctggataaaggctgc

SEQ ID NO: 3202972 - DNA, 25 bp, Homo sapien
gatcttcagctccactaagtgaatg

SEQ ID NO: 3202973 - DNA, 25 bp, Homo sapien
tctgcacagacttgtaaccagtcag

SEQ ID NO: 3202974 - DNA, 25 bp, Homo sapien
tcagctctagtcgaggatcttcagc

SEQ ID NO: 3202975 - DNA, 25 bp, Homo sapien
cgagggtatccatccgcaccaaaat

SEQ ID NO: 3202976 - DNA, 25 bp, Homo sapien
ccatccgcaccaaaataaacatcat

SEQ ID NO: 3202977 - DNA, 25 bp, Homo sapien
gggtatccatccgcaccaaaataaa

SEQ ID NO: 3202978 - DNA, 25 bp, Homo sapien
gtatccatccgcaccaaaataaaca

SEQ ID NO: 3202979 - DNA, 25 bp, Homo sapien
ttcagagcctgaacaccagtttatg

SEQ ID NO: 3202980 - DNA, 25 bp, Homo sapien
gactctttccacataacaggatcta

SEQ ID NO: 3202981 - DNA, 25 bp, Homo sapien
tgaaattgacaatgctaaagaggtc

SEQ ID NO: 3202982 - DNA, 25 bp, Homo sapien
taaacacaggatggtgcatctcagt

SEQ ID NO: 3202983 - DNA, 25 bp, Homo sapien
actcttttaagtttttctctgtgca

SEQ ID NO: 3202984 - DNA, 25 bp, Homo sapien
ctcttttaagtttttctctgtgcat

SEQ ID NO: 3202985 - DNA, 25 bp, Homo sapien
tactcttttaagtttttctctgtgc

SEQ ID NO: 3202986 - DNA, 25 bp, Homo sapien
tgacccaggtgagaaagtcacagtt

SEQ ID NO: 3202987 - DNA, 25 bp, Homo sapien
aatgtcgtttctcccgacttctggg

SEQ ID NO: 3202988 - DNA, 25 bp, Homo sapien
gacttctgggtacaacatgcagatg

SEQ ID NO: 3202989 - DNA, 25 bp, Homo sapien
tgtgtgcatatcttcctgaatgtcg

SEQ ID NO: 3202990 - DNA, 25 bp, Homo sapien
ttcaggagaactaaagcacacaggg

SEQ ID NO: 3202991 - DNA, 25 bp, Homo sapien
aggagaactaaagcacacagggggc

SEQ ID NO: 3202992 - DNA, 25 bp, Homo sapien
gagaactaaagcacacagggggcat

SEQ ID NO: 3202993 - DNA, 25 bp, Homo sapien
ttttcaggagaactaaagcacacag

SEQ ID NO: 3202994 - DNA, 25 bp, Homo sapien
gatgttccatctcttgagcatctcc

SEQ ID NO: 3202995 - DNA, 25 bp, Homo sapien
tgttccatctcttgagcatctccct

SEQ ID NO: 3202996 - DNA, 25 bp, Homo sapien
cttctaatagaaggagtagctcata

SEQ ID NO: 3202997 - DNA, 25 bp, Homo sapien
gctcataattcccttgatgttccat

SEQ ID NO: 3202998 - DNA, 25 bp, Homo sapien
ggacttcaaccagctggctcataag

SEQ ID NO: 3202999 - DNA, 25 bp, Homo sapien
tcaaccagctggctcataagcaaac

SEQ ID NO: 3203000 - DNA, 25 bp, Homo sapien
gctggctcataagcaaaccctgcat

SEQ ID NO: 3203001 - DNA, 25 bp, Homo sapien
ctggacttcaaccagctggctcata

SEQ ID NO: 3203002 - DNA, 25 bp, Homo sapien
gggacaatgccacttctcaaggaat

SEQ ID NO: 3203003 - DNA, 25 bp, Homo sapien
caaggaatcaattgagaattggcac

SEQ ID NO: 3203004 - DNA, 25 bp, Homo sapien
ccttttcctgatgtaatagtgcatc

SEQ ID NO: 3203005 - DNA, 25 bp, Homo sapien
tgtttcatgcaaagctatgtccaag

SEQ ID NO: 3203006 - DNA, 25 bp, Homo sapien
gtgatctaatgatgagggagacttt

SEQ ID NO: 3203007 - DNA, 25 bp, Homo sapien
tatccagaggtctgtcaaataatct

SEQ ID NO: 3203008 - DNA, 25 bp, Homo sapien
gagaagttcttaactccttgccaga

SEQ ID NO: 3203009 - DNA, 25 bp, Homo sapien
ttcacatagcttctggcctctgaga

SEQ ID NO: 3203010 - DNA, 25 bp, Homo sapien
agcagcggcaattggctcatgtgca

SEQ ID NO: 3203011 - DNA, 25 bp, Homo sapien
gaagcagctgccacgaaactcaatt

SEQ ID NO: 3203012 - DNA, 25 bp, Homo sapien
tgttgcgggcatgcagcactgtctc

SEQ ID NO: 3203013 - DNA, 25 bp, Homo sapien
cacaggatgcgcaggcttctcatgg

SEQ ID NO: 3203014 - DNA, 25 bp, Homo sapien
atttaaatgctgcaaactggcaatc

SEQ ID NO: 3203015 - DNA, 25 bp, Homo sapien
ataatttaaatgctgcaaactggca

SEQ ID NO: 3203016 - DNA, 25 bp, Homo sapien
taatttaaatgctgcaaactggcaa

SEQ ID NO: 3203017 - DNA, 25 bp, Homo sapien
tttaaatgctgcaaactggcaatct

SEQ ID NO: 3203018 - DNA, 25 bp, Homo sapien
gaaacagcaattgggctaataaagc

SEQ ID NO: 3203019 - DNA, 25 bp, Homo sapien
gcaggcttctttacccattaacagg

SEQ ID NO: 3203020 - DNA, 25 bp, Homo sapien
cctttttgaagcaaagtgtacacca

SEQ ID NO: 3203021 - DNA, 25 bp, Homo sapien
tatagattgcggtgaagactggatt

SEQ ID NO: 3203022 - DNA, 25 bp, Homo sapien
ttgtgttcctaaccttaagaatatg

SEQ ID NO: 3203023 - DNA, 25 bp, Homo sapien
taaccttaagaatatgaattacagt

SEQ ID NO: 3203024 - DNA, 25 bp, Homo sapien
aaatccactaatgagctggttgcag

SEQ ID NO: 3203025 - DNA, 25 bp, Homo sapien
tgtataatttgagcataatgaccaa

SEQ ID NO: 3203026 - DNA, 25 bp, Homo sapien
aaaatgacctgaactacatcacaag

SEQ ID NO: 3203027 - DNA, 25 bp, Homo sapien
ttaaaatgacctgaactacatcaca

SEQ ID NO: 3203028 - DNA, 25 bp, Homo sapien
aatgacctgaactacatcacaagtt

SEQ ID NO: 3203029 - DNA, 25 bp, Homo sapien
tgacctgaactacatcacaagtttc

SEQ ID NO: 3203030 - DNA, 25 bp, Homo sapien
ctttgaacaactctatcacttgctt

SEQ ID NO: 3203031 - DNA, 25 bp, Homo sapien
gaacaactctatcacttgcttcctt

SEQ ID NO: 3203032 - DNA, 25 bp, Homo sapien
acaactctatcacttgcttccttgc

SEQ ID NO: 3203033 - DNA, 25 bp, Homo sapien
ttgaacaactctatcacttgcttcc

SEQ ID NO: 3203034 - DNA, 25 bp, Homo sapien
tgagataatcagaatctcagtcagt

SEQ ID NO: 3203035 - DNA, 25 bp, Homo sapien
gaatctcagtcagttctttggccat

SEQ ID NO: 3203036 - DNA, 25 bp, Homo sapien
cagattggcatccactgagataatc

SEQ ID NO: 3203037 - DNA, 25 bp, Homo sapien
ggcatccactgagataatcagaatc

SEQ ID NO: 3203038 - DNA, 25 bp, Homo sapien
cttttatctttactggtatgcagag

SEQ ID NO: 3203039 - DNA, 25 bp, Homo sapien
tataagttctccattacatgacaac

SEQ ID NO: 3203040 - DNA, 25 bp, Homo sapien
tcttaatgaagcttgggaacagctg

SEQ ID NO: 3203041 - DNA, 25 bp, Homo sapien
gtatgcagagatcatcaaaaaatat

SEQ ID NO: 3203042 - DNA, 25 bp, Homo sapien
tagaaggagacaaatcagtgtaatg

SEQ ID NO: 3203043 - DNA, 25 bp, Homo sapien
gaaggagacaaatcagtgtaatgac

SEQ ID NO: 3203044 - DNA, 25 bp, Homo sapien
ctagaaggagacaaatcagtgtaat

SEQ ID NO: 3203045 - DNA, 25 bp, Homo sapien
agaaggagacaaatcagtgtaatga

SEQ ID NO: 3203046 - DNA, 25 bp, Homo sapien
gtccacgtacagtcaaagtgtgcat

SEQ ID NO: 3203047 - DNA, 25 bp, Homo sapien
agcctggtccacgtacagtcaaagt

SEQ ID NO: 3203048 - DNA, 25 bp, Homo sapien
ttactgaagcccgcacagcctggtc

SEQ ID NO: 3203049 - DNA, 25 bp, Homo sapien
ctgcttactgaagcccgcacagcct

SEQ ID NO: 3203050 - DNA, 25 bp, Homo sapien
gaaagtaggaatttaataagcacat

SEQ ID NO: 3203051 - DNA, 25 bp, Homo sapien
agaaagtaggaatttaataagcaca

SEQ ID NO: 3203052 - DNA, 25 bp, Homo sapien
cagaaagtaggaatttaataagcac

SEQ ID NO: 3203053 - DNA, 25 bp, Homo sapien
cagacactgggtatgactgtgctta

SEQ ID NO: 3203054 - DNA, 25 bp, Homo sapien
gatttttgcaggttatatgatggtg

SEQ ID NO: 3203055 - DNA, 25 bp, Homo sapien
tatgatggtggtcttacacgaggta

SEQ ID NO: 3203056 - DNA, 25 bp, Homo sapien
aatcggggcttaatccagacactgg

SEQ ID NO: 3203057 - DNA, 25 bp, Homo sapien
cttgcatcatgactagttttctcca

SEQ ID NO: 3203058 - DNA, 25 bp, Homo sapien
gttatcctccttgcatcatgactag

SEQ ID NO: 3203059 - DNA, 25 bp, Homo sapien
cctccttgcatcatgactagttttc

SEQ ID NO: 3203060 - DNA, 25 bp, Homo sapien
tttcagttatcctccttgcatcatg

SEQ ID NO: 3203061 - DNA, 25 bp, Homo sapien
ggcatcttctactatactgggaata

SEQ ID NO: 3203062 - DNA, 25 bp, Homo sapien
aaggtggcatcttctactatactgg

SEQ ID NO: 3203063 - DNA, 25 bp, Homo sapien
actatactgggaatatctaaaagca

SEQ ID NO: 3203064 - DNA, 25 bp, Homo sapien
tcttctactatactgggaatatcta

SEQ ID NO: 3203065 - DNA, 25 bp, Homo sapien
atttgctgatggacctgatgataca

SEQ ID NO: 3203066 - DNA, 25 bp, Homo sapien
cagaggaacttaaggagtgaataat

SEQ ID NO: 3203067 - DNA, 25 bp, Homo sapien
cctgatgatacattgctgcagagga

SEQ ID NO: 3203068 - DNA, 25 bp, Homo sapien
gctgcagaggaacttaaggagtgaa

SEQ ID NO: 3203069 - DNA, 25 bp, Homo sapien
ggacaaacataaagggcattgttga

SEQ ID NO: 3203070 - DNA, 25 bp, Homo sapien
taattaggaaccagagtggaatacc

SEQ ID NO: 3203071 - DNA, 25 bp, Homo sapien
tgaagacaactgtgttaataagaca

SEQ ID NO: 3203072 - DNA, 25 bp, Homo sapien
tgttgaaatggtagatatcagtcag

SEQ ID NO: 3203073 - DNA, 25 bp, Homo sapien
gaactagaagtaccatttacccagc

SEQ ID NO: 3203074 - DNA, 25 bp, Homo sapien
tagaagtaccatttacccagccatc

SEQ ID NO: 3203075 - DNA, 25 bp, Homo sapien
actagaagtaccatttacccagcca

SEQ ID NO: 3203076 - DNA, 25 bp, Homo sapien
agaactagaagtaccatttacccag

SEQ ID NO: 3203077 - DNA, 25 bp, Homo sapien
tagaccagtgtacacgcctttcagg

SEQ ID NO: 3203078 - DNA, 25 bp, Homo sapien
ggtagtcttctcttaggagtgcatc

SEQ ID NO: 3203079 - DNA, 25 bp, Homo sapien
tcaactgctagaccagtgtacacgc

SEQ ID NO: 3203080 - DNA, 25 bp, Homo sapien
tacacgcctttcaggtagtcttctc

SEQ ID NO: 3203081 - DNA, 25 bp, Homo sapien
gttctggtctgacatctcctttgtg

SEQ ID NO: 3203082 - DNA, 25 bp, Homo sapien
cctttgtgtgccaggatttaagtta

SEQ ID NO: 3203083 - DNA, 25 bp, Homo sapien
tatacgctgtagtcaggcatttggt

SEQ ID NO: 3203084 - DNA, 25 bp, Homo sapien
gactgtacatatgctccaccttaac

SEQ ID NO: 3203085 - DNA, 25 bp, Homo sapien
caggcaattcacgtgtaatgtcaca

SEQ ID NO: 3203086 - DNA, 25 bp, Homo sapien
ctatgacagttgtaacaggcaattc

SEQ ID NO: 3203087 - DNA, 25 bp, Homo sapien
aattcacgtgtaatgtcacattgca

SEQ ID NO: 3203088 - DNA, 25 bp, Homo sapien
gttgtaacaggcaattcacgtgtaa

SEQ ID NO: 3203089 - DNA, 25 bp, Homo sapien
aacaagtgaccttgtttaatctcct

SEQ ID NO: 3203090 - DNA, 25 bp, Homo sapien
caagtgaccttgtttaatctccttg

SEQ ID NO: 3203091 - DNA, 25 bp, Homo sapien
acaagtgaccttgtttaatctcctt

SEQ ID NO: 3203092 - DNA, 25 bp, Homo sapien
aagtgaccttgtttaatctccttgt

SEQ ID NO: 3203093 - DNA, 25 bp, Homo sapien
tacagtttccacgagtgaccacata

SEQ ID NO: 3203094 - DNA, 25 bp, Homo sapien
tccacgagtgaccacataagagcaa

SEQ ID NO: 3203095 - DNA, 25 bp, Homo sapien
caactacagtttccacgagtgacca

SEQ ID NO: 3203096 - DNA, 25 bp, Homo sapien
ctgcaacaactacagtttccacgag

SEQ ID NO: 3203097 - DNA, 25 bp, Homo sapien
cgtaataatctggtgaaatcccgca

SEQ ID NO: 3203098 - DNA, 25 bp, Homo sapien
taataatctggtgaaatcccgcaag

SEQ ID NO: 3203099 - DNA, 25 bp, Homo sapien
ttttcgtaataatctggtgaaatcc

SEQ ID NO: 3203100 - DNA, 25 bp, Homo sapien
ctacttttcgtaataatctggtgaa

SEQ ID NO: 3203101 - DNA, 25 bp, Homo sapien
ccatttatatcccatgggtcgaaat

SEQ ID NO: 3203102 - DNA, 25 bp, Homo sapien
tcgaaattgtgtgatacggccactt

SEQ ID NO: 3203103 - DNA, 25 bp, Homo sapien
cccatgggtcgaaattgtgtgatac

SEQ ID NO: 3203104 - DNA, 25 bp, Homo sapien
tatatcccatgggtcgaaattgtgt

SEQ ID NO: 3203105 - DNA, 25 bp, Homo sapien
aataaaacagatctcattaacagaa

SEQ ID NO: 3203106 - DNA, 25 bp, Homo sapien
ataaaacagatctcattaacagaaa

SEQ ID NO: 3203107 - DNA, 25 bp, Homo sapien
tttaggcagccaaattgctgacctc

SEQ ID NO: 3203108 - DNA, 25 bp, Homo sapien
ccctgcagtaggatctcccttgttc

SEQ ID NO: 3203109 - DNA, 25 bp, Homo sapien
cctgcagtaggatctcccttgttca

SEQ ID NO: 3203110 - DNA, 25 bp, Homo sapien
agccaaattgctgacctcggatcca

SEQ ID NO: 3203111 - DNA, 25 bp, Homo sapien
tatgattgtgcccttgcattccaga

SEQ ID NO: 3203112 - DNA, 25 bp, Homo sapien
tgcccttgcattccagactaggtga

SEQ ID NO: 3203113 - DNA, 25 bp, Homo sapien
ttgtgcccttgcattccagactagg

SEQ ID NO: 3203114 - DNA, 25 bp, Homo sapien
atgattgtgcccttgcattccagac

SEQ ID NO: 3203115 - DNA, 25 bp, Homo sapien
ccagagggcctcttgggaatcaact

SEQ ID NO: 3203116 - DNA, 25 bp, Homo sapien
tgtggtgaaaaggtagtaccttcac

SEQ ID NO: 3203117 - DNA, 25 bp, Homo sapien
agagggcctcttgggaatcaactgg

SEQ ID NO: 3203118 - DNA, 25 bp, Homo sapien
tggtgaaaaggtagtaccttcacag

SEQ ID NO: 3203119 - DNA, 25 bp, Homo sapien
gagggcaaagtctgtgtcctaggat

SEQ ID NO: 3203120 - DNA, 25 bp, Homo sapien
caggccacccactatgcagtaaata

SEQ ID NO: 3203121 - DNA, 25 bp, Homo sapien
tttttggatccacaataaccagtat

SEQ ID NO: 3203122 - DNA, 25 bp, Homo sapien
cagtaaataatttgagggcaaagtc

SEQ ID NO: 3203123 - DNA, 25 bp, Homo sapien
tttggggtcagtcgatcaagacatc

SEQ ID NO: 3203124 - DNA, 25 bp, Homo sapien
ctttggggtcagtcgatcaagacat

SEQ ID NO: 3203125 - DNA, 25 bp, Homo sapien
gctttggggtcagtcgatcaagaca

SEQ ID NO: 3203126 - DNA, 25 bp, Homo sapien
tggctttggggtcagtcgatcaaga

SEQ ID NO: 3203127 - DNA, 25 bp, Homo sapien
cacagtgtaataggttttctataga

SEQ ID NO: 3203128 - DNA, 25 bp, Homo sapien
gttcatcttgatttataccacagtg

SEQ ID NO: 3203129 - DNA, 25 bp, Homo sapien
tttctatagaaactttgcttctctc

SEQ ID NO: 3203130 - DNA, 25 bp, Homo sapien
ctaaaatagatgtctgcaggttcat

SEQ ID NO: 3203131 - DNA, 25 bp, Homo sapien
tctcaccagctgcagatggccaatc

SEQ ID NO: 3203132 - DNA, 25 bp, Homo sapien
gctctcaccagctgcagatggccaa

SEQ ID NO: 3203133 - DNA, 25 bp, Homo sapien
ctctcaccagctgcagatggccaat

SEQ ID NO: 3203134 - DNA, 25 bp, Homo sapien
tccagatcctaactcctcagccatg

SEQ ID NO: 3203135 - DNA, 25 bp, Homo sapien
catgcacatagtgcaaaggctgcca

SEQ ID NO: 3203136 - DNA, 25 bp, Homo sapien
cctcagccatgcacatagtgcaaag

SEQ ID NO: 3203137 - DNA, 25 bp, Homo sapien
acatagtgcaaaggctgccaccctc

SEQ ID NO: 3203138 - DNA, 25 bp, Homo sapien
ccaggaacaatatttggcgaactct

SEQ ID NO: 3203139 - DNA, 25 bp, Homo sapien
ttgctagatgaaccaagagtaacca

SEQ ID NO: 3203140 - DNA, 25 bp, Homo sapien
ggcgaactctaacattcagatcatc

SEQ ID NO: 3203141 - DNA, 25 bp, Homo sapien
tggtagagcaaagactgcccaggaa

SEQ ID NO: 3203142 - DNA, 25 bp, Homo sapien
ggcttatgaccacttgtacaatatg

SEQ ID NO: 3203143 - DNA, 25 bp, Homo sapien
aaggcttatgaccacttgtacaata

SEQ ID NO: 3203144 - DNA, 25 bp, Homo sapien
ccaaggcttatgaccacttgtacaa

SEQ ID NO: 3203145 - DNA, 25 bp, Homo sapien
cttccaaggcttatgaccacttgta

SEQ ID NO: 3203146 - DNA, 25 bp, Homo sapien
gagaatgtggggtgacttctagctc

SEQ ID NO: 3203147 - DNA, 25 bp, Homo sapien
agctggccatggcggagaatgtggg

SEQ ID NO: 3203148 - DNA, 25 bp, Homo sapien
gaatgtggggtgacttctagctccc

SEQ ID NO: 3203149 - DNA, 25 bp, Homo sapien
ccatggcggagaatgtggggtgact

SEQ ID NO: 3203150 - DNA, 25 bp, Homo sapien
tctgtcttcttcagccacatgaaaa

SEQ ID NO: 3203151 - DNA, 25 bp, Homo sapien
cttcttcagccacatgaaaaatcct

SEQ ID NO: 3203152 - DNA, 25 bp, Homo sapien
ctggtttgcagtctctgtcttcttc

SEQ ID NO: 3203153 - DNA, 25 bp, Homo sapien
tcttcagccacatgaaaaatcctat

SEQ ID NO: 3203154 - DNA, 25 bp, Homo sapien
actcttttctcctacggacaggcca

SEQ ID NO: 3203155 - DNA, 25 bp, Homo sapien
ctcctacggacaggccaatatcttc

SEQ ID NO: 3203156 - DNA, 25 bp, Homo sapien
tgattagcaagggatagccctgtct

SEQ ID NO: 3203157 - DNA, 25 bp, Homo sapien
tagccctgtctatctcgattagtca

SEQ ID NO: 3203158 - DNA, 25 bp, Homo sapien
caagtcaatgggaaatctctgacca

SEQ ID NO: 3203159 - DNA, 25 bp, Homo sapien
gaccaaacctttgccactcactgaa

SEQ ID NO: 3203160 - DNA, 25 bp, Homo sapien
tcaatccactgaaccgtctgctatg

SEQ ID NO: 3203161 - DNA, 25 bp, Homo sapien
tctgtgatcttctcatagtttgtgg

SEQ ID NO: 3203162 - DNA, 25 bp, Homo sapien
gaaaaatagaaggaacggcatgtgg

SEQ ID NO: 3203163 - DNA, 25 bp, Homo sapien
aacggcatgtggagggtcagcaaga

SEQ ID NO: 3203164 - DNA, 25 bp, Homo sapien
tctgggctggaactacataaaggct

SEQ ID NO: 3203165 - DNA, 25 bp, Homo sapien
gagtggacagctggtcaatcctctg

SEQ ID NO: 3203166 - DNA, 25 bp, Homo sapien
tacggcaaatgtgggctggtttctt

SEQ ID NO: 3203167 - DNA, 25 bp, Homo sapien
ttggagatgcagtggcctggctact

SEQ ID NO: 3203168 - DNA, 25 bp, Homo sapien
cttttgcctgaaaagctgatacggc

SEQ ID NO: 3203169 - DNA, 25 bp, Homo sapien
taaaatacgctccttgcagtttgga

SEQ ID NO: 3203170 - DNA, 25 bp, Homo sapien
gaagaatatgttgggtagagccatt

SEQ ID NO: 3203171 - DNA, 25 bp, Homo sapien
acttgctttggttggcgggatgtta

SEQ ID NO: 3203172 - DNA, 25 bp, Homo sapien
cttgcagggccttgcagtagagtag

SEQ ID NO: 3203173 - DNA, 25 bp, Homo sapien
gaatgatctgtcttggctccttgtg

SEQ ID NO: 3203174 - DNA, 25 bp, Homo sapien
gttgcaagacgaaatgcaactaata

SEQ ID NO: 3203175 - DNA, 25 bp, Homo sapien
ttgcaagacgaaatgcaactaatat

SEQ ID NO: 3203176 - DNA, 25 bp, Homo sapien
tgcaagacgaaatgcaactaatata

SEQ ID NO: 3203177 - DNA, 25 bp, Homo sapien
gcaagacgaaatgcaactaatatat

SEQ ID NO: 3203178 - DNA, 25 bp, Homo sapien
gtttcaccagagtatagccctggcc

SEQ ID NO: 3203179 - DNA, 25 bp, Homo sapien
catagactgtcagttgtttccatct

SEQ ID NO: 3203180 - DNA, 25 bp, Homo sapien
tccatgcagacacctttcagtttca

SEQ ID NO: 3203181 - DNA, 25 bp, Homo sapien
ggatggtggtagtcagacacttcca

SEQ ID NO: 3203182 - DNA, 25 bp, Homo sapien
caagagagctcacccactgcaccac

SEQ ID NO: 3203183 - DNA, 25 bp, Homo sapien
ctatcaagagagctcacccactgca

SEQ ID NO: 3203184 - DNA, 25 bp, Homo sapien
tatcaagagagctcacccactgcac

SEQ ID NO: 3203185 - DNA, 25 bp, Homo sapien
atcaagagagctcacccactgcacc

SEQ ID NO: 3203186 - DNA, 25 bp, Homo sapien
tgcattctcagtagcctgtttgttg

SEQ ID NO: 3203187 - DNA, 25 bp, Homo sapien
gcatgatgcccaaggtgggaaacac

SEQ ID NO: 3203188 - DNA, 25 bp, Homo sapien
attctcagtagcctgtttgttgtgg

SEQ ID NO: 3203189 - DNA, 25 bp, Homo sapien
gtgggaaacactgagacactggctg

SEQ ID NO: 3203190 - DNA, 25 bp, Homo sapien
agggtgcagaaaactactatgtcag

SEQ ID NO: 3203191 - DNA, 25 bp, Homo sapien
tatgtcagccagacgaagagtcctc

SEQ ID NO: 3203192 - DNA, 25 bp, Homo sapien
cttccctaagacagcccggaattgg

SEQ ID NO: 3203193 - DNA, 25 bp, Homo sapien
gccagacgaagagtcctcgtcttca

SEQ ID NO: 3203194 - DNA, 25 bp, Homo sapien
tcaaaccgggtcatgttcacagaca

SEQ ID NO: 3203195 - DNA, 25 bp, Homo sapien
gcatcaaaccgggtcatgttcacag

SEQ ID NO: 3203196 - DNA, 25 bp, Homo sapien
ttagcatcaaaccgggtcatgttca

SEQ ID NO: 3203197 - DNA, 25 bp, Homo sapien
aaccgggtcatgttcacagacagtt

SEQ ID NO: 3203198 - DNA, 25 bp, Homo sapien
tctcgttggagtacttgcacttaaa

SEQ ID NO: 3203199 - DNA, 25 bp, Homo sapien
agcaccacagagagcgtgttctcgt

SEQ ID NO: 3203200 - DNA, 25 bp, Homo sapien
ggaaagcgatattgtgagtaccaca

SEQ ID NO: 3203201 - DNA, 25 bp, Homo sapien
caagtgagcgaagaggtctttgacc

SEQ ID NO: 3203202 - DNA, 25 bp, Homo sapien
aaatagagctactgttgttggttcc

SEQ ID NO: 3203203 - DNA, 25 bp, Homo sapien
gaggatgacactggcaaaggcatct

SEQ ID NO: 3203204 - DNA, 25 bp, Homo sapien
gatgacactggcaaaggcatcttcc

SEQ ID NO: 3203205 - DNA, 25 bp, Homo sapien
aatagagctactgttgttggttcca

SEQ ID NO: 3203206 - DNA, 25 bp, Homo sapien
ctattggtatatgtctggtatgtaa

SEQ ID NO: 3203207 - DNA, 25 bp, Homo sapien
tatgtctggtatgtaatctcctctc

SEQ ID NO: 3203208 - DNA, 25 bp, Homo sapien
tggtatatgtctggtatgtaatctc

SEQ ID NO: 3203209 - DNA, 25 bp, Homo sapien
ggtatgtaatctcctctcttctaat

SEQ ID NO: 3203210 - DNA, 25 bp, Homo sapien
tcttgggagtcaaagcgtgaaacca

SEQ ID NO: 3203211 - DNA, 25 bp, Homo sapien
tcaaactccctgattggtggattcg

SEQ ID NO: 3203212 - DNA, 25 bp, Homo sapien
taaagctaattcttcttgggagtca

SEQ ID NO: 3203213 - DNA, 25 bp, Homo sapien
tcgtatctattgcagagatcctcga

SEQ ID NO: 3203214 - DNA, 25 bp, Homo sapien
ttctttgaatgcttcaaaatagctg

SEQ ID NO: 3203215 - DNA, 25 bp, Homo sapien
ctttctttgaatgcttcaaaatagc

SEQ ID NO: 3203216 - DNA, 25 bp, Homo sapien
ctttgaatgcttcaaaatagctggc

SEQ ID NO: 3203217 - DNA, 25 bp, Homo sapien
ttgaatgcttcaaaatagctggcat

SEQ ID NO: 3203218 - DNA, 25 bp, Homo sapien
tatgctactagatgacgtaggtatt

SEQ ID NO: 3203219 - DNA, 25 bp, Homo sapien
ctgccttatgttatgctactagatg

SEQ ID NO: 3203220 - DNA, 25 bp, Homo sapien
ccttatgttatgctactagatgacg

SEQ ID NO: 3203221 - DNA, 25 bp, Homo sapien
tgacgtaggtattatgaagagaaaa

SEQ ID NO: 3203222 - DNA, 25 bp, Homo sapien
tctgcatgtgactgtctagagatgc

SEQ ID NO: 3203223 - DNA, 25 bp, Homo sapien
gcatgtgactgtctagagatgctca

SEQ ID NO: 3203224 - DNA, 25 bp, Homo sapien
tgactgtctagagatgctcaagaaa

SEQ ID NO: 3203225 - DNA, 25 bp, Homo sapien
tgtgactgtctagagatgctcaaga

SEQ ID NO: 3203226 - DNA, 25 bp, Homo sapien
tgaacttcaacatgtgtagagacaa

SEQ ID NO: 3203227 - DNA, 25 bp, Homo sapien
gaagcataagtaagagagtagagag

SEQ ID NO: 3203228 - DNA, 25 bp, Homo sapien
tagtggtggtgaacaggagtcctag

SEQ ID NO: 3203229 - DNA, 25 bp, Homo sapien
tttccatactaagaacttggtacac

SEQ ID NO: 3203230 - DNA, 25 bp, Homo sapien
acaaagaatttagcagagggaataa

SEQ ID NO: 3203231 - DNA, 25 bp, Homo sapien
agcagagggaataaaatagtctatt

SEQ ID NO: 3203232 - DNA, 25 bp, Homo sapien
gaataaaatagtctattcctccatg

SEQ ID NO: 3203233 - DNA, 25 bp, Homo sapien
aacaaagaatttagcagagggaata

SEQ ID NO: 3203234 - DNA, 25 bp, Homo sapien
tgtaatcattctgacttgtcttgga

SEQ ID NO: 3203235 - DNA, 25 bp, Homo sapien
tcttggatgcaagtgtcttacgtgg

SEQ ID NO: 3203236 - DNA, 25 bp, Homo sapien
ctgacttgtcttggatgcaagtgtc

SEQ ID NO: 3203237 - DNA, 25 bp, Homo sapien
gatgcaagtgtcttacgtggatctg

SEQ ID NO: 3203238 - DNA, 25 bp, Homo sapien
tacaaaggttccacacttggttctg

SEQ ID NO: 3203239 - DNA, 25 bp, Homo sapien
tcagaatggagcctcggaatagata

SEQ ID NO: 3203240 - DNA, 25 bp, Homo sapien
aagaataacaggtgcaacacatggc

SEQ ID NO: 3203241 - DNA, 25 bp, Homo sapien
ggagttccaaggtagtgtcttcagt

SEQ ID NO: 3203242 - DNA, 25 bp, Homo sapien
cttttttcattccagactcatgcat

SEQ ID NO: 3203243 - DNA, 25 bp, Homo sapien
gacataggacatctgaagaatctca

SEQ ID NO: 3203244 - DNA, 25 bp, Homo sapien
gagagtcctccataaccttgggaaa

SEQ ID NO: 3203245 - DNA, 25 bp, Homo sapien
tattggtaacataacgagagtcctc

SEQ ID NO: 3203246 - DNA, 25 bp, Homo sapien
acaagagaatttgggctggtaagcc

SEQ ID NO: 3203247 - DNA, 25 bp, Homo sapien
ctcttctcagtgtccactttaatat

SEQ ID NO: 3203248 - DNA, 25 bp, Homo sapien
tcagtgtccactttaatattgtcat

SEQ ID NO: 3203249 - DNA, 25 bp, Homo sapien
tctcagtgtccactttaatattgtc

SEQ ID NO: 3203250 - DNA, 25 bp, Homo sapien
cttctcagtgtccactttaatattg

SEQ ID NO: 3203251 - DNA, 25 bp, Homo sapien
actgacaagatttgttgcctgaagt

SEQ ID NO: 3203252 - DNA, 25 bp, Homo sapien
cactgacaagatttgttgcctgaag

SEQ ID NO: 3203253 - DNA, 25 bp, Homo sapien
ccactgacaagatttgttgcctgaa

SEQ ID NO: 3203254 - DNA, 25 bp, Homo sapien
ccattcttcatgtctactttacaag

SEQ ID NO: 3203255 - DNA, 25 bp, Homo sapien
atactgtgccaagttgggaaatgaa

SEQ ID NO: 3203256 - DNA, 25 bp, Homo sapien
ttctatttgttctagatactgtgcc

SEQ ID NO: 3203257 - DNA, 25 bp, Homo sapien
tttacaagcctttctatattctatt

SEQ ID NO: 3203258 - DNA, 25 bp, Homo sapien
tgaccattgtcagggatctctccct

SEQ ID NO: 3203259 - DNA, 25 bp, Homo sapien
aagaccattcatgaccattgtcagg

SEQ ID NO: 3203260 - DNA, 25 bp, Homo sapien
ctccttcatgttggaattccaagac

SEQ ID NO: 3203261 - DNA, 25 bp, Homo sapien
ggaattccaagaccattcatgacca

SEQ ID NO: 3203262 - DNA, 25 bp, Homo sapien
cttctgatagtttacatttgcaatt

SEQ ID NO: 3203263 - DNA, 25 bp, Homo sapien
tcacttctctatccttatagaagat

SEQ ID NO: 3203264 - DNA, 25 bp, Homo sapien
cagctacaaggttcacttctctatc

SEQ ID NO: 3203265 - DNA, 25 bp, Homo sapien
ttcacttctctatccttatagaaga

SEQ ID NO: 3203266 - DNA, 25 bp, Homo sapien
caccagatcgaagtcagagattatg

SEQ ID NO: 3203267 - DNA, 25 bp, Homo sapien
ccagatcgaagtcagagattatgtt

SEQ ID NO: 3203268 - DNA, 25 bp, Homo sapien
tgacaccagatcgaagtcagagatt

SEQ ID NO: 3203269 - DNA, 25 bp, Homo sapien
atctgacaccagatcgaagtcagag

SEQ ID NO: 3203270 - DNA, 25 bp, Homo sapien
gtcttccatatctccttttcctcat

SEQ ID NO: 3203271 - DNA, 25 bp, Homo sapien
ctctaaaggatttgaaaagctgact

SEQ ID NO: 3203272 - DNA, 25 bp, Homo sapien
agagttgagacagttggggctctaa

SEQ ID NO: 3203273 - DNA, 25 bp, Homo sapien
gacagttggggctctaaaggatttg

SEQ ID NO: 3203274 - DNA, 25 bp, Homo sapien
cagttggggctctaaaggatttgaa

SEQ ID NO: 3203275 - DNA, 25 bp, Homo sapien
cagaaattctgaagatgactgttta

SEQ ID NO: 3203276 - DNA, 25 bp, Homo sapien
gactgtttaacactgcctgtcctga

SEQ ID NO: 3203277 - DNA, 25 bp, Homo sapien
gccctgcagagtcaatgacaataac

SEQ ID NO: 3203278 - DNA, 25 bp, Homo sapien
gtatccaccacctgagagagtctta

SEQ ID NO: 3203279 - DNA, 25 bp, Homo sapien
aagttcacttgcataaggacagtac

SEQ ID NO: 3203280 - DNA, 25 bp, Homo sapien
caagttcacttgcataaggacagta

SEQ ID NO: 3203281 - DNA, 25 bp, Homo sapien
gttcacttgcataaggacagtacat

SEQ ID NO: 3203282 - DNA, 25 bp, Homo sapien
agttcacttgcataaggacagtaca

SEQ ID NO: 3203283 - DNA, 25 bp, Homo sapien
cacttacaaaagccagcacctgagg

SEQ ID NO: 3203284 - DNA, 25 bp, Homo sapien
tgtgccttcacttacaaaagccagc

SEQ ID NO: 3203285 - DNA, 25 bp, Homo sapien
cttcacttacaaaagccagcacctg

SEQ ID NO: 3203286 - DNA, 25 bp, Homo sapien
ttacaaaagccagcacctgaggacc

SEQ ID NO: 3203287 - DNA, 25 bp, Homo sapien
ggcatcagcttggagataatcatgt

SEQ ID NO: 3203288 - DNA, 25 bp, Homo sapien
tatcacatgtagcatcaccagaggc

SEQ ID NO: 3203289 - DNA, 25 bp, Homo sapien
taaacatcataggacctgtgacaat

SEQ ID NO: 3203290 - DNA, 25 bp, Homo sapien
taaaggtgtagctaaaggcatcagc

SEQ ID NO: 3203291 - DNA, 25 bp, Homo sapien
aaaactggcactcccatctgcctgc

SEQ ID NO: 3203292 - DNA, 25 bp, Homo sapien
cagatttgtacctgaaatcctccac

SEQ ID NO: 3203293 - DNA, 25 bp, Homo sapien
aaaaactggcactcccatctgcctg

SEQ ID NO: 3203294 - DNA, 25 bp, Homo sapien
ataaaaactggcactcccatctgcc

SEQ ID NO: 3203295 - DNA, 25 bp, Homo sapien
cttgcatatcaatgttgccgtggtt

SEQ ID NO: 3203296 - DNA, 25 bp, Homo sapien
gcaatgtgtcctgctaggctagaaa

SEQ ID NO: 3203297 - DNA, 25 bp, Homo sapien
cctacgttgacaagagacattggca

SEQ ID NO: 3203298 - DNA, 25 bp, Homo sapien
tcctttagttcaagtgctatcatca

SEQ ID NO: 3203299 - DNA, 25 bp, Homo sapien
tacagcactgaattcgtcctgctgc

SEQ ID NO: 3203300 - DNA, 25 bp, Homo sapien
tactcaaattcaacgatgccagaac

SEQ ID NO: 3203301 - DNA, 25 bp, Homo sapien
aatgccccccatagacccatggtta

SEQ ID NO: 3203302 - DNA, 25 bp, Homo sapien
ccatggttacagcactgaattcgtc

SEQ ID NO: 3203303 - DNA, 25 bp, Homo sapien
ttatcttgaagccattttcattcat

SEQ ID NO: 3203304 - DNA, 25 bp, Homo sapien
atctcagataccagagccatcgcca

SEQ ID NO: 3203305 - DNA, 25 bp, Homo sapien
tctcagataccagagccatcgccat

SEQ ID NO: 3203306 - DNA, 25 bp, Homo sapien
gtttacatggctaatcatgtgctca

SEQ ID NO: 3203307 - DNA, 25 bp, Homo sapien
aactttggaatgaccagttggattc

SEQ ID NO: 3203308 - DNA, 25 bp, Homo sapien
ccatcaatggcagtctgaagtttac

SEQ ID NO: 3203309 - DNA, 25 bp, Homo sapien
ttccaggcaagtgaagaggtgtggc

SEQ ID NO: 3203310 - DNA, 25 bp, Homo sapien
tacaccttcaatgtttgagctggca

SEQ ID NO: 3203311 - DNA, 25 bp, Homo sapien
tggtggaccttgtggcctacctggc

SEQ ID NO: 3203312 - DNA, 25 bp, Homo sapien
gaagcatgaattatagggcacccag

SEQ ID NO: 3203313 - DNA, 25 bp, Homo sapien
ctggcctccatgaaataagagcccc

SEQ ID NO: 3203314 - DNA, 25 bp, Homo sapien
ttcttatgtagtgccaactgcagcc

SEQ ID NO: 3203315 - DNA, 25 bp, Homo sapien
tgtgtaacagacagtggcaacttct

SEQ ID NO: 3203316 - DNA, 25 bp, Homo sapien
tttggccatatcaggtgcccggtca

SEQ ID NO: 3203317 - DNA, 25 bp, Homo sapien
gcagccctgagacacgatggtgaag

SEQ ID NO: 3203318 - DNA, 25 bp, Homo sapien
aagtttgttgctatagatgttgtca

SEQ ID NO: 3203319 - DNA, 25 bp, Homo sapien
taggatatttcttcgccaaaaagta

SEQ ID NO: 3203320 - DNA, 25 bp, Homo sapien
gttcctgggtccaagtttgttgcta

SEQ ID NO: 3203321 - DNA, 25 bp, Homo sapien
gggttggcaagtcttaggatatttc

SEQ ID NO: 3203322 - DNA, 25 bp, Homo sapien
tgtttgttgcccacgttctttgttc

SEQ ID NO: 3203323 - DNA, 25 bp, Homo sapien
ttgttgcccacgttctttgttctat

SEQ ID NO: 3203324 - DNA, 25 bp, Homo sapien
tgttgcccacgttctttgttctatt

SEQ ID NO: 3203325 - DNA, 25 bp, Homo sapien
tttgttgcccacgttctttgttcta

SEQ ID NO: 3203326 - DNA, 25 bp, Homo sapien
caagaggcgaataagttctgtgatc

SEQ ID NO: 3203327 - DNA, 25 bp, Homo sapien
tctttcaggttctgtgatgcttacc

SEQ ID NO: 3203328 - DNA, 25 bp, Homo sapien
gagcccccttcttgcttgtaccgtg

SEQ ID NO: 3203329 - DNA, 25 bp, Homo sapien
cttgtaccgtgtttcatcaaattct

SEQ ID NO: 3203330 - DNA, 25 bp, Homo sapien
gaataatgacttggatatctgatgt

SEQ ID NO: 3203331 - DNA, 25 bp, Homo sapien
ggatatctgatgtaaagtcaaattt

SEQ ID NO: 3203332 - DNA, 25 bp, Homo sapien
cctcaagaataatgacttggatatc

SEQ ID NO: 3203333 - DNA, 25 bp, Homo sapien
ctgcctcaagaataatgacttggat

SEQ ID NO: 3203334 - DNA, 25 bp, Homo sapien
gaagaggttatcttgacccatagcg

SEQ ID NO: 3203335 - DNA, 25 bp, Homo sapien
catagcgaaataacgcttgacattt

SEQ ID NO: 3203336 - DNA, 25 bp, Homo sapien
tcttacacttagactatgcctcagg

SEQ ID NO: 3203337 - DNA, 25 bp, Homo sapien
tacgtacaacataatgtgaagaggt

SEQ ID NO: 3203338 - DNA, 25 bp, Homo sapien
tcctgtggttagctggagggactta

SEQ ID NO: 3203339 - DNA, 25 bp, Homo sapien
ctccactgtctcctgtggttagctg

SEQ ID NO: 3203340 - DNA, 25 bp, Homo sapien
tctcctgtggttagctggagggact

SEQ ID NO: 3203341 - DNA, 25 bp, Homo sapien
cactgtctcctgtggttagctggag

SEQ ID NO: 3203342 - DNA, 25 bp, Homo sapien
tactctcatgcacttgatccaccag

SEQ ID NO: 3203343 - DNA, 25 bp, Homo sapien
gtcatagtgggacctgtattactct

SEQ ID NO: 3203344 - DNA, 25 bp, Homo sapien
tgggacctgtattactctcatgcac

SEQ ID NO: 3203345 - DNA, 25 bp, Homo sapien
tgcacttgatccaccagtgctctct

SEQ ID NO: 3203346 - DNA, 25 bp, Homo sapien
tcaaggccttctaggtagccaaggt

SEQ ID NO: 3203347 - DNA, 25 bp, Homo sapien
tatataccaggcaagtaccatgttc

SEQ ID NO: 3203348 - DNA, 25 bp, Homo sapien
tcaaatgccacttgtaatggcaatg

SEQ ID NO: 3203349 - DNA, 25 bp, Homo sapien
tgtgttcagtggcatagactctgtt

SEQ ID NO: 3203350 - DNA, 25 bp, Homo sapien
tctagaatgtagaaagcaaccaagt

SEQ ID NO: 3203351 - DNA, 25 bp, Homo sapien
taatccaaggatacagtggaatcga

SEQ ID NO: 3203352 - DNA, 25 bp, Homo sapien
ccaagtaaaccctatgtgatgagtc

SEQ ID NO: 3203353 - DNA, 25 bp, Homo sapien
tgcagctccagctaagcggagaagc

SEQ ID NO: 3203354 - DNA, 25 bp, Homo sapien
aatagaaaagtacatataagtttgg

SEQ ID NO: 3203355 - DNA, 25 bp, Homo sapien
cacaatgaggatgtgatcatagcat

SEQ ID NO: 3203356 - DNA, 25 bp, Homo sapien
ttagggaaagaagtttgatggacac

SEQ ID NO: 3203357 - DNA, 25 bp, Homo sapien
tttatcagcagcttaaagtgaatga

SEQ ID NO: 3203358 - DNA, 25 bp, Homo sapien
caaagatctatgatcttgttgttta

SEQ ID NO: 3203359 - DNA, 25 bp, Homo sapien
atttcaaagatctatgatcttgttg

SEQ ID NO: 3203360 - DNA, 25 bp, Homo sapien
tatgatcttgttgtttactgtgttc

SEQ ID NO: 3203361 - DNA, 25 bp, Homo sapien
gatctatgatcttgttgtttactgt

SEQ ID NO: 3203362 - DNA, 25 bp, Homo sapien
cagagtccttctgaatctgctatga

SEQ ID NO: 3203363 - DNA, 25 bp, Homo sapien
aatcttttggcagacctattcaatg

SEQ ID NO: 3203364 - DNA, 25 bp, Homo sapien
ggttctaccatttcacgtagctaaa

SEQ ID NO: 3203365 - DNA, 25 bp, Homo sapien
cacaaagatttatgattggcatcgt

SEQ ID NO: 3203366 - DNA, 25 bp, Homo sapien
aagtaagaccttttgatcagccaag

SEQ ID NO: 3203367 - DNA, 25 bp, Homo sapien
ggctgggaccaaagagaccttcttg

SEQ ID NO: 3203368 - DNA, 25 bp, Homo sapien
ccactagagggaacaaaagagattc

SEQ ID NO: 3203369 - DNA, 25 bp, Homo sapien
tagatgggatttagccactatgccc

SEQ ID NO: 3203370 - DNA, 25 bp, Homo sapien
atcatcagaagtggtgatatatcca

SEQ ID NO: 3203371 - DNA, 25 bp, Homo sapien
tatatccatatgcaacacgcagtaa

SEQ ID NO: 3203372 - DNA, 25 bp, Homo sapien
aacacgcagtaacctttcagtttct

SEQ ID NO: 3203373 - DNA, 25 bp, Homo sapien
cagaagtggtgatatatccatatgc

SEQ ID NO: 3203374 - DNA, 25 bp, Homo sapien
caggtttgggaagagcttttattct

SEQ ID NO: 3203375 - DNA, 25 bp, Homo sapien
ctcctggtttttactatcaggtttg

SEQ ID NO: 3203376 - DNA, 25 bp, Homo sapien
tttactatcaggtttgggaagagct

SEQ ID NO: 3203377 - DNA, 25 bp, Homo sapien
gtttgggaagagcttttattctcat

SEQ ID NO: 3203378 - DNA, 25 bp, Homo sapien
ctggaagaggcaggttcaaaatatt

SEQ ID NO: 3203379 - DNA, 25 bp, Homo sapien
tagagcaacagccagatccacggct

SEQ ID NO: 3203380 - DNA, 25 bp, Homo sapien
ctagagcaacagccagatccacggc

SEQ ID NO: 3203381 - DNA, 25 bp, Homo sapien
caatggttgggcaatagccagggca

SEQ ID NO: 3203382 - DNA, 25 bp, Homo sapien
gctggggcaatggttgggcaatagc

SEQ ID NO: 3203383 - DNA, 25 bp, Homo sapien
tcaaactctggcactggtttattct

SEQ ID NO: 3203384 - DNA, 25 bp, Homo sapien
ctttgacttggatgtttggccttgc

SEQ ID NO: 3203385 - DNA, 25 bp, Homo sapien
ctgaagcctaaattaactgctttga

SEQ ID NO: 3203386 - DNA, 25 bp, Homo sapien
ttgctttgctcttctacgttatttt

SEQ ID NO: 3203387 - DNA, 25 bp, Homo sapien
gtttgtgcgcatgtaagggagttca

SEQ ID NO: 3203388 - DNA, 25 bp, Homo sapien
tctgcaattctggagggctgctaaa

SEQ ID NO: 3203389 - DNA, 25 bp, Homo sapien
taagataagcatgcctagctagccc

SEQ ID NO: 3203390 - DNA, 25 bp, Homo sapien
gaagtattcccactaacaaatgaga

SEQ ID NO: 3203391 - DNA, 25 bp, Homo sapien
atttgcccttttggagcagagcaaa

SEQ ID NO: 3203392 - DNA, 25 bp, Homo sapien
caggatctccatctatatgtactta

SEQ ID NO: 3203393 - DNA, 25 bp, Homo sapien
cagagcaaagcaggatctccatcta

SEQ ID NO: 3203394 - DNA, 25 bp, Homo sapien
tgcccttttggagcagagcaaagca

SEQ ID NO: 3203395 - DNA, 25 bp, Homo sapien
taggagactggcaatagttagcccc

SEQ ID NO: 3203396 - DNA, 25 bp, Homo sapien
ttagcaagcaagaacataggccagg

SEQ ID NO: 3203397 - DNA, 25 bp, Homo sapien
cctgaagtcgtctccaatacatggc

SEQ ID NO: 3203398 - DNA, 25 bp, Homo sapien
tcactagtaatgcaccagaagctgt

SEQ ID NO: 3203399 - DNA, 25 bp, Homo sapien
tttcctactcttttgtccttatctg

SEQ ID NO: 3203400 - DNA, 25 bp, Homo sapien
ttcctactcttttgtccttatctga

SEQ ID NO: 3203401 - DNA, 25 bp, Homo sapien
caattggatttgtcatgtcttgccg

SEQ ID NO: 3203402 - DNA, 25 bp, Homo sapien
gacttcaagctagattgaccataga

SEQ ID NO: 3203403 - DNA, 25 bp, Homo sapien
gatgtaaagcctcttgacttcaagc

SEQ ID NO: 3203404 - DNA, 25 bp, Homo sapien
tcatgtcttgccgatgtaaagcctc

SEQ ID NO: 3203405 - DNA, 25 bp, Homo sapien
ttcaaacgagcttccagtttgaaca

SEQ ID NO: 3203406 - DNA, 25 bp, Homo sapien
tcaaacgagcttccagtttgaacat

SEQ ID NO: 3203407 - DNA, 25 bp, Homo sapien
ctgtaattcaaacgagcttccagtt

SEQ ID NO: 3203408 - DNA, 25 bp, Homo sapien
taattcaaacgagcttccagtttga

SEQ ID NO: 3203409 - DNA, 25 bp, Homo sapien
ctggatcagatgtaatattgacaga

SEQ ID NO: 3203410 - DNA, 25 bp, Homo sapien
tgtaatattgacagaagtaaatgat

SEQ ID NO: 3203411 - DNA, 25 bp, Homo sapien
aatattgacagaagtaaatgataca

SEQ ID NO: 3203412 - DNA, 25 bp, Homo sapien
tggatcagatgtaatattgacagaa

SEQ ID NO: 3203413 - DNA, 25 bp, Homo sapien
gacactcggcatgtccagtaactct

SEQ ID NO: 3203414 - DNA, 25 bp, Homo sapien
tcggcatgtccagtaactctactgt

SEQ ID NO: 3203415 - DNA, 25 bp, Homo sapien
aatggttcacacttagctggacact

SEQ ID NO: 3203416 - DNA, 25 bp, Homo sapien
cacttagctggacactcggcatgtc

SEQ ID NO: 3203417 - DNA, 25 bp, Homo sapien
tgatgacacaaaagtggaatctaca

SEQ ID NO: 3203418 - DNA, 25 bp, Homo sapien
acagtactgatcaaaatggtatggg

SEQ ID NO: 3203419 - DNA, 25 bp, Homo sapien
aacagtactgatcaaaatggtatgg

SEQ ID NO: 3203420 - DNA, 25 bp, Homo sapien
ctgatgtcaccaaaagtaatgcatg

SEQ ID NO: 3203421 - DNA, 25 bp, Homo sapien
tatctcttctacatctgatgtcacc

SEQ ID NO: 3203422 - DNA, 25 bp, Homo sapien
tcctatctcttctacatctgatgtc

SEQ ID NO: 3203423 - DNA, 25 bp, Homo sapien
cctatctcttctacatctgatgtca

SEQ ID NO: 3203424 - DNA, 25 bp, Homo sapien
gtctaagtagcataaaatactccct

SEQ ID NO: 3203425 - DNA, 25 bp, Homo sapien
tatcagtgtactgctcctgtaacac

SEQ ID NO: 3203426 - DNA, 25 bp, Homo sapien
gctataggaacaggataggacagct

SEQ ID NO: 3203427 - DNA, 25 bp, Homo sapien
taggacagctatctggagtctaagt

SEQ ID NO: 3203428 - DNA, 25 bp, Homo sapien
acacagccaggcttcagcaactttt

SEQ ID NO: 3203429 - DNA, 25 bp, Homo sapien
caacttttcctgagactcagatggg

SEQ ID NO: 3203430 - DNA, 25 bp, Homo sapien
gtcttcttggtgtctgggcagacac

SEQ ID NO: 3203431 - DNA, 25 bp, Homo sapien
tcaatgataacatgcatcacatgtc

SEQ ID NO: 3203432 - DNA, 25 bp, Homo sapien
tcattgtgttggaaaggtatggaat

SEQ ID NO: 3203433 - DNA, 25 bp, Homo sapien
gaatgatgtttgtgctgccaatgtg

SEQ ID NO: 3203434 - DNA, 25 bp, Homo sapien
tgttggaaaggtatggaatgatgtt

SEQ ID NO: 3203435 - DNA, 25 bp, Homo sapien
aggtatggaatgatgtttgtgctgc

SEQ ID NO: 3203436 - DNA, 25 bp, Homo sapien
tatgtacttgttctgtgcttcacag

SEQ ID NO: 3203437 - DNA, 25 bp, Homo sapien
ggtgccttagtgtaatcatctgcta

SEQ ID NO: 3203438 - DNA, 25 bp, Homo sapien
cagtgactttggtgccttagtgtaa

SEQ ID NO: 3203439 - DNA, 25 bp, Homo sapien
tctcagcgctgaagattatctcaca

SEQ ID NO: 3203440 - DNA, 25 bp, Homo sapien
acactgctacctgccacactgtgag

SEQ ID NO: 3203441 - DNA, 25 bp, Homo sapien
ttttgcccttgagtggcaatttagt

SEQ ID NO: 3203442 - DNA, 25 bp, Homo sapien
cactaagaggttgcgatacatgcat

SEQ ID NO: 3203443 - DNA, 25 bp, Homo sapien
tggctgtaattggcggcagctgtcc

SEQ ID NO: 3203444 - DNA, 25 bp, Homo sapien
gagctttggggatgttgcttctcat

SEQ ID NO: 3203445 - DNA, 25 bp, Homo sapien
agagctttggggatgttgcttctca

SEQ ID NO: 3203446 - DNA, 25 bp, Homo sapien
ttcagagctttggggatgttgcttc

SEQ ID NO: 3203447 - DNA, 25 bp, Homo sapien
cagagctttggggatgttgcttctc

SEQ ID NO: 3203448 - DNA, 25 bp, Homo sapien
ccatatggcatcttaaagtgagtga

SEQ ID NO: 3203449 - DNA, 25 bp, Homo sapien
taatggctgatgaaggtatagaaca

SEQ ID NO: 3203450 - DNA, 25 bp, Homo sapien
attccgttgcctgcctaatggctga

SEQ ID NO: 3203451 - DNA, 25 bp, Homo sapien
gaaggtatagaacagacaccggcat

SEQ ID NO: 3203452 - DNA, 25 bp, Homo sapien
tgccaaaaagtagcaagatttgtct

SEQ ID NO: 3203453 - DNA, 25 bp, Homo sapien
tatcatttcctgtaaaaggataact

SEQ ID NO: 3203454 - DNA, 25 bp, Homo sapien
gcaaagaaatgcagccttacagaat

SEQ ID NO: 3203455 - DNA, 25 bp, Homo sapien
attttgccaaaaagtagcaagattt

SEQ ID NO: 3203456 - DNA, 25 bp, Homo sapien
tagcaataagaaggctaataattca

SEQ ID NO: 3203457 - DNA, 25 bp, Homo sapien
caccttccatgtgtaatagcaataa

SEQ ID NO: 3203458 - DNA, 25 bp, Homo sapien
tatgttgtatactatatggataatc

SEQ ID NO: 3203459 - DNA, 25 bp, Homo sapien
cacaggctatgaccgcaatgccatc

SEQ ID NO: 3203460 - DNA, 25 bp, Homo sapien
ctctggattgaactctttggaagtg

SEQ ID NO: 3203461 - DNA, 25 bp, Homo sapien
tctggattgaactctttggaagtgt

SEQ ID NO: 3203462 - DNA, 25 bp, Homo sapien
cctctggattgaactctttggaagt

SEQ ID NO: 3203463 - DNA, 25 bp, Homo sapien
attgtgggctgctgtcagccaagcc

SEQ ID NO: 3203464 - DNA, 25 bp, Homo sapien
ttattgtgggctgctgtcagccaag

SEQ ID NO: 3203465 - DNA, 25 bp, Homo sapien
tattgtgggctgctgtcagccaagc

SEQ ID NO: 3203466 - DNA, 25 bp, Homo sapien
tcctgtgtggatcgcgtcacttccc

SEQ ID NO: 3203467 - DNA, 25 bp, Homo sapien
acacagcccatccacagtccatgaa

SEQ ID NO: 3203468 - DNA, 25 bp, Homo sapien
ctttctgtgcccctctggatgacta

SEQ ID NO: 3203469 - DNA, 25 bp, Homo sapien
tgaagaaaccatgtcctgtgtggat

SEQ ID NO: 3203470 - DNA, 25 bp, Homo sapien
ttctctgtattgttctaatattatt

SEQ ID NO: 3203471 - DNA, 25 bp, Homo sapien
ccttgtgcaggaaccatgctagtct

SEQ ID NO: 3203472 - DNA, 25 bp, Homo sapien
ttgtgcaggaaccatgctagtcttc

SEQ ID NO: 3203473 - DNA, 25 bp, Homo sapien
attgttctaatattattatatgtgc

SEQ ID NO: 3203474 - DNA, 25 bp, Homo sapien
ggccacaataattattgcagaaaaa

SEQ ID NO: 3203475 - DNA, 25 bp, Homo sapien
atggccacaataattattgcagaaa

SEQ ID NO: 3203476 - DNA, 25 bp, Homo sapien
tggccacaataattattgcagaaaa

SEQ ID NO: 3203477 - DNA, 25 bp, Homo sapien
aaaaagtactagaagagagaattag

SEQ ID NO: 3203478 - DNA, 25 bp, Homo sapien
gttatctgcatattgacttctttca

SEQ ID NO: 3203479 - DNA, 25 bp, Homo sapien
ttctcttcgttatctgcatattgac

SEQ ID NO: 3203480 - DNA, 25 bp, Homo sapien
tcgttatctgcatattgacttcttt

SEQ ID NO: 3203481 - DNA, 25 bp, Homo sapien
tcttcgttatctgcatattgacttc

SEQ ID NO: 3203482 - DNA, 25 bp, Homo sapien
ttttgctcttgcaagtatctgcaac

SEQ ID NO: 3203483 - DNA, 25 bp, Homo sapien
tgctcttgcaagtatctgcaacttc

SEQ ID NO: 3203484 - DNA, 25 bp, Homo sapien
gctcttgcaagtatctgcaacttct

SEQ ID NO: 3203485 - DNA, 25 bp, Homo sapien
cttgcaagtatctgcaacttctttc

SEQ ID NO: 3203486 - DNA, 25 bp, Homo sapien
ttctctccccgttgaagtaatcgag

SEQ ID NO: 3203487 - DNA, 25 bp, Homo sapien
gttctctccccgttgaagtaatcga

SEQ ID NO: 3203488 - DNA, 25 bp, Homo sapien
ttgtatttcccatttgcagcgactt

SEQ ID NO: 3203489 - DNA, 25 bp, Homo sapien
gtatttcccatttgcagcgacttac

SEQ ID NO: 3203490 - DNA, 25 bp, Homo sapien
tgtatttcccatttgcagcgactta

SEQ ID NO: 3203491 - DNA, 25 bp, Homo sapien
taacgggtgagaggtctcatcgact

SEQ ID NO: 3203492 - DNA, 25 bp, Homo sapien
tataacgggtgagaggtctcatcga

SEQ ID NO: 3203493 - DNA, 25 bp, Homo sapien
ttataacgggtgagaggtctcatcg

SEQ ID NO: 3203494 - DNA, 25 bp, Homo sapien
acgggtgagaggtctcatcgactat

SEQ ID NO: 3203495 - DNA, 25 bp, Homo sapien
aatgaacagtaagaacgtaaaccag

SEQ ID NO: 3203496 - DNA, 25 bp, Homo sapien
cagtaagaacgtaaaccagaagctg

SEQ ID NO: 3203497 - DNA, 25 bp, Homo sapien
gaacgtaaaccagaagctgtgttaa

SEQ ID NO: 3203498 - DNA, 25 bp, Homo sapien
tctctgttgctatctgcacccacta

SEQ ID NO: 3203499 - DNA, 25 bp, Homo sapien
tgcagacatccgtggtaagtgttac

SEQ ID NO: 3203500 - DNA, 25 bp, Homo sapien
agacatccgtggtaagtgttacagc

SEQ ID NO: 3203501 - DNA, 25 bp, Homo sapien
tgaagctgcagacatccgtggtaag

SEQ ID NO: 3203502 - DNA, 25 bp, Homo sapien
agctgcagacatccgtggtaagtgt

SEQ ID NO: 3203503 - DNA, 25 bp, Homo sapien
atacttttgattggacgtcagaggg

SEQ ID NO: 3203504 - DNA, 25 bp, Homo sapien
cagtagctgtcttgacattttctag

SEQ ID NO: 3203505 - DNA, 25 bp, Homo sapien
taattctgaatactgatctcattat

SEQ ID NO: 3203506 - DNA, 25 bp, Homo sapien
attattcattccctcagtagctgtc

SEQ ID NO: 3203507 - DNA, 25 bp, Homo sapien
ttaatatggtactggaaaaactggc

SEQ ID NO: 3203508 - DNA, 25 bp, Homo sapien
tagtaccattgaatatcttcacaga

SEQ ID NO: 3203509 - DNA, 25 bp, Homo sapien
tcatagtgttgtgggtcttcacaag

SEQ ID NO: 3203510 - DNA, 25 bp, Homo sapien
gcttagttttgctagtaccattgaa

SEQ ID NO: 3203511 - DNA, 25 bp, Homo sapien
cctatccataaccatgaaaattttt

SEQ ID NO: 3203512 - DNA, 25 bp, Homo sapien
tagttcgtcattctccacgaagagg

SEQ ID NO: 3203513 - DNA, 25 bp, Homo sapien
ccttgagcagtagttcgtcattctc

SEQ ID NO: 3203514 - DNA, 25 bp, Homo sapien
ctcacaatttggctatctgtctatt

SEQ ID NO: 3203515 - DNA, 25 bp, Homo sapien
tgtccaaactagtcactcttatttg

SEQ ID NO: 3203516 - DNA, 25 bp, Homo sapien
tattctaccaggattgtgaaaaaat

SEQ ID NO: 3203517 - DNA, 25 bp, Homo sapien
cagtcatatacttaaccatgaaaaa

SEQ ID NO: 3203518 - DNA, 25 bp, Homo sapien
tttattctaccaggattgtgaaaaa

SEQ ID NO: 3203519 - DNA, 25 bp, Homo sapien
agaattcgtggaaatgacaagtctc

SEQ ID NO: 3203520 - DNA, 25 bp, Homo sapien
cctgatcttggcagagttgagtgta

SEQ ID NO: 3203521 - DNA, 25 bp, Homo sapien
gaagcaccgtgggagccaagggctt

SEQ ID NO: 3203522 - DNA, 25 bp, Homo sapien
agccaagggctttagaaccctgatc

SEQ ID NO: 3203523 - DNA, 25 bp, Homo sapien
ttttactcaagatgtattcagaata

SEQ ID NO: 3203524 - DNA, 25 bp, Homo sapien
agaatagtgattcaaggtggctcac

SEQ ID NO: 3203525 - DNA, 25 bp, Homo sapien
tactcaagatgtattcagaatagtg

SEQ ID NO: 3203526 - DNA, 25 bp, Homo sapien
tcagaatagtgattcaaggtggctc

SEQ ID NO: 3203527 - DNA, 25 bp, Homo sapien
gctctcatggtccaataacatgatt

SEQ ID NO: 3203528 - DNA, 25 bp, Homo sapien
tggtccaataacatgattcagatag

SEQ ID NO: 3203529 - DNA, 25 bp, Homo sapien
gctgcttgctctcatggtccaataa

SEQ ID NO: 3203530 - DNA, 25 bp, Homo sapien
tgcttgctctcatggtccaataaca

SEQ ID NO: 3203531 - DNA, 25 bp, Homo sapien
aagacaattttgttagagctgctgt

SEQ ID NO: 3203532 - DNA, 25 bp, Homo sapien
ttgaagacaattttgttagagctgc

SEQ ID NO: 3203533 - DNA, 25 bp, Homo sapien
ttattgaagacaattttgttagagc

SEQ ID NO: 3203534 - DNA, 25 bp, Homo sapien
gaagacaattttgttagagctgctg

SEQ ID NO: 3203535 - DNA, 25 bp, Homo sapien
caaatggtccattactcagggtagt

SEQ ID NO: 3203536 - DNA, 25 bp, Homo sapien
tcagggtagtcaacggaaaacaaca

SEQ ID NO: 3203537 - DNA, 25 bp, Homo sapien
cacagggtgataggcctcaggcatc

SEQ ID NO: 3203538 - DNA, 25 bp, Homo sapien
tgccaactaggtcagcaaatggtcc

SEQ ID NO: 3203539 - DNA, 25 bp, Homo sapien
tctttgtagaccatgcacactatca

SEQ ID NO: 3203540 - DNA, 25 bp, Homo sapien
gattcatttaccttgatgtcgcacc

SEQ ID NO: 3203541 - DNA, 25 bp, Homo sapien
tcaagttatatgttggagccagcaa

SEQ ID NO: 3203542 - DNA, 25 bp, Homo sapien
gccagcaatgttcaccataagattc

SEQ ID NO: 3203543 - DNA, 25 bp, Homo sapien
tagaaattgtagatggaaagagtgt

SEQ ID NO: 3203544 - DNA, 25 bp, Homo sapien
ggaagcaaagaagtcgttatttgtc

SEQ ID NO: 3203545 - DNA, 25 bp, Homo sapien
gaagtcgttatttgtcttgtcttcc

SEQ ID NO: 3203546 - DNA, 25 bp, Homo sapien
caagtaagatctgtatagaaattgt

SEQ ID NO: 3203547 - DNA, 25 bp, Homo sapien
ttttgaatcttggaaattgtctaag

SEQ ID NO: 3203548 - DNA, 25 bp, Homo sapien
tgtctaagacagttggcaaagcagt

SEQ ID NO: 3203549 - DNA, 25 bp, Homo sapien
aaagcagtcagtccatcttccctgc

SEQ ID NO: 3203550 - DNA, 25 bp, Homo sapien
ggccagaacgtacaatggggcttgt

SEQ ID NO: 3203551 - DNA, 25 bp, Homo sapien
tcataacaacagagcctcagacatc

SEQ ID NO: 3203552 - DNA, 25 bp, Homo sapien
taagctgacttcaagcaggtctaga

SEQ ID NO: 3203553 - DNA, 25 bp, Homo sapien
cagtagtagatttgaaagggcggac

SEQ ID NO: 3203554 - DNA, 25 bp, Homo sapien
gcttaccaaaatggttcagtagtag

SEQ ID NO: 3203555 - DNA, 25 bp, Homo sapien
aagtcactctggatctgcattcaaa

SEQ ID NO: 3203556 - DNA, 25 bp, Homo sapien
ttctggacatctcagcagaattctt

SEQ ID NO: 3203557 - DNA, 25 bp, Homo sapien
gcagaattcttttgagaggcagaag

SEQ ID NO: 3203558 - DNA, 25 bp, Homo sapien
aatttcaccctacaacttatccgca

SEQ ID NO: 3203559 - DNA, 25 bp, Homo sapien
ttagactcatgaccaaattgaagtt

SEQ ID NO: 3203560 - DNA, 25 bp, Homo sapien
gccaatgtggggaacggtgggcttg

SEQ ID NO: 3203561 - DNA, 25 bp, Homo sapien
ccaatgtggggaacggtgggcttgc

SEQ ID NO: 3203562 - DNA, 25 bp, Homo sapien
atgtggggaacggtgggcttgcctc

SEQ ID NO: 3203563 - DNA, 25 bp, Homo sapien
caatgtggggaacggtgggcttgcc

SEQ ID NO: 3203564 - DNA, 25 bp, Homo sapien
gttgagccagactaagaagccgcca

SEQ ID NO: 3203565 - DNA, 25 bp, Homo sapien
tggagagggaaacgatcatgacacg

SEQ ID NO: 3203566 - DNA, 25 bp, Homo sapien
gacgttgagccagactaagaagccg

SEQ ID NO: 3203567 - DNA, 25 bp, Homo sapien
tcatgacacggacgcccacggggtt

SEQ ID NO: 3203568 - DNA, 25 bp, Homo sapien
agactaagccgccaggcttcgcaga

SEQ ID NO: 3203569 - DNA, 25 bp, Homo sapien
actaagccgccaggcttcgcagaga

SEQ ID NO: 3203570 - DNA, 25 bp, Homo sapien
gacgttgagccagactaagccgcca

SEQ ID NO: 3203571 - DNA, 25 bp, Homo sapien
tgagccagactaagccgccaggctt

SEQ ID NO: 3203572 - DNA, 25 bp, Homo sapien
tggagagggaaacgatcatgacacg

SEQ ID NO: 3203573 - DNA, 25 bp, Homo sapien
aaacgatcatgacacggacgcccac

SEQ ID NO: 3203574 - DNA, 25 bp, Homo sapien
gagggaaacgatcatgacacggacg

SEQ ID NO: 3203575 - DNA, 25 bp, Homo sapien
tgtggagagggaaacgatcatgaca

SEQ ID NO: 3203576 - DNA, 25 bp, Homo sapien
ggaaaccgactgctaaccggctaca

SEQ ID NO: 3203577 - DNA, 25 bp, Homo sapien
ctacacgaccgaggcagagacgcgg

SEQ ID NO: 3203578 - DNA, 25 bp, Homo sapien
tccgaaggagatgccggcattgccc

SEQ ID NO: 3203579 - DNA, 25 bp, Homo sapien
aacccctgcggttccgaaggagatg

SEQ ID NO: 3203580 - DNA, 25 bp, Homo sapien
gaaacgatcacgacacggacgccca

SEQ ID NO: 3203581 - DNA, 25 bp, Homo sapien
tgtggagagggaaacgatcacgaca

SEQ ID NO: 3203582 - DNA, 25 bp, Homo sapien
gtggagagggaaacgatcacgacac

SEQ ID NO: 3203583 - DNA, 25 bp, Homo sapien
agagggaaacgatcacgacacggac

SEQ ID NO: 3203584 - DNA, 25 bp, Homo sapien
tggtctgagccccgactctgacgca

SEQ ID NO: 3203585 - DNA, 25 bp, Homo sapien
ttcctcctggcggaccctccgcgaa

SEQ ID NO: 3203586 - DNA, 25 bp, Homo sapien
ggatcccgtgctgcgtccccggcga

SEQ ID NO: 3203587 - DNA, 25 bp, Homo sapien
tgctgcgtccccggcgatctgtctg

SEQ ID NO: 3203588 - DNA, 25 bp, Homo sapien
gttgagccagactaagaagccgcca

SEQ ID NO: 3203589 - DNA, 25 bp, Homo sapien
gacgttgagccagactaagaagccg

SEQ ID NO: 3203590 - DNA, 25 bp, Homo sapien
ttgaagacgttgagccagactaaga

SEQ ID NO: 3203591 - DNA, 25 bp, Homo sapien
tgaagacgttgagccagactaagaa

SEQ ID NO: 3203592 - DNA, 25 bp, Homo sapien
agggaaacgatcacgacacggacgc

SEQ ID NO: 3203593 - DNA, 25 bp, Homo sapien
gtggagagggaaacgatcacgacac

SEQ ID NO: 3203594 - DNA, 25 bp, Homo sapien
tgtggagagggaaacgatcacgaca

SEQ ID NO: 3203595 - DNA, 25 bp, Homo sapien
gaaacgatcacgacacggacgccca

SEQ ID NO: 3203596 - DNA, 25 bp, Homo sapien
ctcctacttcgccaattctcaggga

SEQ ID NO: 3203597 - DNA, 25 bp, Homo sapien
ttcctcctggcggaccctccgcgaa

SEQ ID NO: 3203598 - DNA, 25 bp, Homo sapien
tctgacgcacaatcacaaagggctc

SEQ ID NO: 3203599 - DNA, 25 bp, Homo sapien
caaagggctcctacttcgccaattc

SEQ ID NO: 3203600 - DNA, 25 bp, Homo sapien
gccaatgtggggaacggtgggcttg

SEQ ID NO: 3203601 - DNA, 25 bp, Homo sapien
ccaatgtggggaacggtgggcttgc

SEQ ID NO: 3203602 - DNA, 25 bp, Homo sapien
atgtggggaacggtgggcttgcctc

SEQ ID NO: 3203603 - DNA, 25 bp, Homo sapien
caatgtggggaacggtgggcttgcc

SEQ ID NO: 3203604 - DNA, 25 bp, Homo sapien
ctgtacactacctaggatgctgctg

SEQ ID NO: 3203605 - DNA, 25 bp, Homo sapien
cacaccaggccccatgagaaaaaga

SEQ ID NO: 3203606 - DNA, 25 bp, Homo sapien
ggctgctgtacactacctaggatgc

SEQ ID NO: 3203607 - DNA, 25 bp, Homo sapien
gaaaaagagctgtgtggcttaattg

SEQ ID NO: 3203608 - DNA, 25 bp, Homo sapien
gatgaacctcactttagtgtgacca

SEQ ID NO: 3203609 - DNA, 25 bp, Homo sapien
aatttctaggagacttagttcacca

SEQ ID NO: 3203610 - DNA, 25 bp, Homo sapien
tacttttggctaggttcatgtttaa

SEQ ID NO: 3203611 - DNA, 25 bp, Homo sapien
ttataataacaagctggaagctttc

SEQ ID NO: 3203612 - DNA, 25 bp, Homo sapien
taaatgtgtccttctgcatctaaga

SEQ ID NO: 3203613 - DNA, 25 bp, Homo sapien
taatataaattatgagtgacctcag

SEQ ID NO: 3203614 - DNA, 25 bp, Homo sapien
aagaatagtttatatctctgctacc

SEQ ID NO: 3203615 - DNA, 25 bp, Homo sapien
ccctatggttatttaggcctccatc

SEQ ID NO: 3203616 - DNA, 25 bp, Homo sapien
taatgggttgtggacttagccagtc

SEQ ID NO: 3203617 - DNA, 25 bp, Homo sapien
tttctaatgggttgtggacttagcc

SEQ ID NO: 3203618 - DNA, 25 bp, Homo sapien
ctgggtttctaatgggttgtggact

SEQ ID NO: 3203619 - DNA, 25 bp, Homo sapien
ggttgtggacttagccagtcaccct

SEQ ID NO: 3203620 - DNA, 25 bp, Homo sapien
tttattgtccctggactaatctctc

SEQ ID NO: 3203621 - DNA, 25 bp, Homo sapien
ctgctgagttaacacattcttccct

SEQ ID NO: 3203622 - DNA, 25 bp, Homo sapien
gaatgtgcagggttgaagaaaccct

SEQ ID NO: 3203623 - DNA, 25 bp, Homo sapien
tgaagaaaccctggcctgctgagtt

SEQ ID NO: 3203624 - DNA, 25 bp, Homo sapien
cccaaggcctcagatatacaaaaac

SEQ ID NO: 3203625 - DNA, 25 bp, Homo sapien
gtcattcaccataaacccaaggcct

SEQ ID NO: 3203626 - DNA, 25 bp, Homo sapien
ggttaaattgataccacatggttca

SEQ ID NO: 3203627 - DNA, 25 bp, Homo sapien
atatcttagaataaacgtatctggt

SEQ ID NO: 3203628 - DNA, 25 bp, Homo sapien
taatcacataggcatgcaatgccca

SEQ ID NO: 3203629 - DNA, 25 bp, Homo sapien
gtttttattggtggttaatcacata

SEQ ID NO: 3203630 - DNA, 25 bp, Homo sapien
ggttaatcacataggcatgcaatgc

SEQ ID NO: 3203631 - DNA, 25 bp, Homo sapien
tattggtggttaatcacataggcat

SEQ ID NO: 3203632 - DNA, 25 bp, Homo sapien
tacaaaattgaaatgtgtaaagatg

SEQ ID NO: 3203633 - DNA, 25 bp, Homo sapien
taaaaaactctcagaactcagagaa

SEQ ID NO: 3203634 - DNA, 25 bp, Homo sapien
aagatgttttggtgggggtctccat

SEQ ID NO: 3203635 - DNA, 25 bp, Homo sapien
gcttttcagctttgattatttattt

SEQ ID NO: 3203636 - DNA, 25 bp, Homo sapien
tgagagcattctctggtcctgataa

SEQ ID NO: 3203637 - DNA, 25 bp, Homo sapien
gagcattctctggtcctgataagga

SEQ ID NO: 3203638 - DNA, 25 bp, Homo sapien
cattctctggtcctgataaggatga

SEQ ID NO: 3203639 - DNA, 25 bp, Homo sapien
gagagcattctctggtcctgataag

SEQ ID NO: 3203640 - DNA, 25 bp, Homo sapien
tcaaatagctgagggctaggacagc

SEQ ID NO: 3203641 - DNA, 25 bp, Homo sapien
tcatggtctatcctcatggcttggg

SEQ ID NO: 3203642 - DNA, 25 bp, Homo sapien
gatttacatgtctggatgcaactca

SEQ ID NO: 3203643 - DNA, 25 bp, Homo sapien
ggattgtcaaccagaactcctattc

SEQ ID NO: 3203644 - DNA, 25 bp, Homo sapien
ttgcatttggtggtcagggtcttcg

SEQ ID NO: 3203645 - DNA, 25 bp, Homo sapien
atgaatctgatatcaaatcccagtt

SEQ ID NO: 3203646 - DNA, 25 bp, Homo sapien
catttggtggtcagggtcttcggaa

SEQ ID NO: 3203647 - DNA, 25 bp, Homo sapien
gaatctgatatcaaatcccagttgt

SEQ ID NO: 3203648 - DNA, 25 bp, Homo sapien
gccctcttatcctgtgagatggaaa

SEQ ID NO: 3203649 - DNA, 25 bp, Homo sapien
tcacaaaagcatctgaccaagagag

SEQ ID NO: 3203650 - DNA, 25 bp, Homo sapien
tttgccgtgtgctcaaggaaggtaa

SEQ ID NO: 3203651 - DNA, 25 bp, Homo sapien
gaatgggaagaccaaatacggactg

SEQ ID NO: 3203652 - DNA, 25 bp, Homo sapien
aaggcctggcctttcactatgtaaa

SEQ ID NO: 3203653 - DNA, 25 bp, Homo sapien
cataagcagcgtgaacaagatccaa

SEQ ID NO: 3203654 - DNA, 25 bp, Homo sapien
caaacacaggctctcttgatgtaaa

SEQ ID NO: 3203655 - DNA, 25 bp, Homo sapien
cttttagtccaagaaatcgcagaac

SEQ ID NO: 3203656 - DNA, 25 bp, Homo sapien
gacctccttggttggatgaattcct

SEQ ID NO: 3203657 - DNA, 25 bp, Homo sapien
gctgcaatgatttcggttcataaaa

SEQ ID NO: 3203658 - DNA, 25 bp, Homo sapien
tgttcttggtttggttattagctgc

SEQ ID NO: 3203659 - DNA, 25 bp, Homo sapien
tctccttgcagtggtctttgacctc

SEQ ID NO: 3203660 - DNA, 25 bp, Homo sapien
agtatcaagggcatgaaagacaaaa

SEQ ID NO: 3203661 - DNA, 25 bp, Homo sapien
agcaagtatcaagggcatgaaagac

SEQ ID NO: 3203662 - DNA, 25 bp, Homo sapien
tatcaagggcatgaaagacaaaaag

SEQ ID NO: 3203663 - DNA, 25 bp, Homo sapien
aaaagcaagtatcaagggcatgaaa

SEQ ID NO: 3203664 - DNA, 25 bp, Homo sapien
ttgttgctgccatcggaacaccaca

SEQ ID NO: 3203665 - DNA, 25 bp, Homo sapien
gttgttgctgccatcggaacaccac

SEQ ID NO: 3203666 - DNA, 25 bp, Homo sapien
cagtatctgctgtgatttgttactg

SEQ ID NO: 3203667 - DNA, 25 bp, Homo sapien
ttgcaggtaggatgagaccatttca

SEQ ID NO: 3203668 - DNA, 25 bp, Homo sapien
tcctcctttggaccatacggaaatg

SEQ ID NO: 3203669 - DNA, 25 bp, Homo sapien
tttcagcctcagttgcaggtaggat

SEQ ID NO: 3203670 - DNA, 25 bp, Homo sapien
cctttggaccatacggaaatgctgt

SEQ ID NO: 3203671 - DNA, 25 bp, Homo sapien
gatactcatgattggctgaagactt

SEQ ID NO: 3203672 - DNA, 25 bp, Homo sapien
taagctagggacagatactcatgat

SEQ ID NO: 3203673 - DNA, 25 bp, Homo sapien
ccttcttaagatgagtaagctaggg

SEQ ID NO: 3203674 - DNA, 25 bp, Homo sapien
taagatgagtaagctagggacagat

SEQ ID NO: 3203675 - DNA, 25 bp, Homo sapien
tattgaatgcccctgtactgacctt

SEQ ID NO: 3203676 - DNA, 25 bp, Homo sapien
tgaccacaagcaggagattaccttc

SEQ ID NO: 3203677 - DNA, 25 bp, Homo sapien
gagttcaagttgatgctacacacag

SEQ ID NO: 3203678 - DNA, 25 bp, Homo sapien
gatctgagcttacaagttagcctgc

SEQ ID NO: 3203679 - DNA, 25 bp, Homo sapien
ggataacagttatcccacttgatgg

SEQ ID NO: 3203680 - DNA, 25 bp, Homo sapien
ttatggataacagttatcccacttg

SEQ ID NO: 3203681 - DNA, 25 bp, Homo sapien
tggataacagttatcccacttgatg

SEQ ID NO: 3203682 - DNA, 25 bp, Homo sapien
tctttatggataacagttatcccac

SEQ ID NO: 3203683 - DNA, 25 bp, Homo sapien
gagtgagttgccgtgcccagccaca

SEQ ID NO: 3203684 - DNA, 25 bp, Homo sapien
aagcactgctttgttattccaaagt

SEQ ID NO: 3203685 - DNA, 25 bp, Homo sapien
aaagtgggcgtctgcgtcgcagccg

SEQ ID NO: 3203686 - DNA, 25 bp, Homo sapien
caaagtgggcgtctgcgtcgcagcc

SEQ ID NO: 3203687 - DNA, 25 bp, Homo sapien
gcaaagtgggcgtctgcgtcgcagc

SEQ ID NO: 3203688 - DNA, 25 bp, Homo sapien
cgtgtggccggttggcagtcgtttt

SEQ ID NO: 3203689 - DNA, 25 bp, Homo sapien
cctgggtcgtgtggccggttggcag

SEQ ID NO: 3203690 - DNA, 25 bp, Homo sapien
tgggtcgtgtggccggttggcagtc

SEQ ID NO: 3203691 - DNA, 25 bp, Homo sapien
ggtcgtgtggccggttggcagtcgt

SEQ ID NO: 3203692 - DNA, 25 bp, Homo sapien
gcgccggagggtgggtttcttgcac

SEQ ID NO: 3203693 - DNA, 25 bp, Homo sapien
ctgtgcgccggagggtgggtttctt

SEQ ID NO: 3203694 - DNA, 25 bp, Homo sapien
tgtgccctgtgcgccggagggtggg

SEQ ID NO: 3203695 - DNA, 25 bp, Homo sapien
tgccctgtgcgccggagggtgggtt

SEQ ID NO: 3203696 - DNA, 25 bp, Homo sapien
caagagtgtcttatatcagggcaag

SEQ ID NO: 3203697 - DNA, 25 bp, Homo sapien
cttggatgctcttgggagataattc

SEQ ID NO: 3203698 - DNA, 25 bp, Homo sapien
taaacagccttaggtccggacaatc

SEQ ID NO: 3203699 - DNA, 25 bp, Homo sapien
ccttttgatatattgatgagcagcc

SEQ ID NO: 3203700 - DNA, 25 bp, Homo sapien
tattcccagtgacaacatttctagg

SEQ ID NO: 3203701 - DNA, 25 bp, Homo sapien
aactacattgccagctgatctccag

SEQ ID NO: 3203702 - DNA, 25 bp, Homo sapien
ctttgctttggtagacagggcttca

SEQ ID NO: 3203703 - DNA, 25 bp, Homo sapien
tataggcgtacactaccttgccccg

SEQ ID NO: 3203704 - DNA, 25 bp, Homo sapien
gaaacagctataccatggaggaagt

SEQ ID NO: 3203705 - DNA, 25 bp, Homo sapien
aacagctataccatggaggaagtag

SEQ ID NO: 3203706 - DNA, 25 bp, Homo sapien
gaagaaacagctataccatggagga

SEQ ID NO: 3203707 - DNA, 25 bp, Homo sapien
agaaacagctataccatggaggaag

SEQ ID NO: 3203708 - DNA, 25 bp, Homo sapien
cctgcagggaatcaccgtcttcact

SEQ ID NO: 3203709 - DNA, 25 bp, Homo sapien
gcttgagttgcaacaccttgtgcag

SEQ ID NO: 3203710 - DNA, 25 bp, Homo sapien
tcaggtcagacttcccctgcaggga

SEQ ID NO: 3203711 - DNA, 25 bp, Homo sapien
ccatgtttctggtgtaagtcttcca

SEQ ID NO: 3203712 - DNA, 25 bp, Homo sapien
ccgtggaaagatggaggaatgagag

SEQ ID NO: 3203713 - DNA, 25 bp, Homo sapien
gggttctccaggtattatttcaatc

SEQ ID NO: 3203714 - DNA, 25 bp, Homo sapien
tcccgatatgtgagggggttctcca

SEQ ID NO: 3203715 - DNA, 25 bp, Homo sapien
ttgaacacattttcccgatatgtga

SEQ ID NO: 3203716 - DNA, 25 bp, Homo sapien
cattttcccgatatgtgagggggtt

SEQ ID NO: 3203717 - DNA, 25 bp, Homo sapien
cctttctctcatgattaacgtccat

SEQ ID NO: 3203718 - DNA, 25 bp, Homo sapien
taattttagcatatgctatgatttt

SEQ ID NO: 3203719 - DNA, 25 bp, Homo sapien
ttttagcatatgctatgattttcat

SEQ ID NO: 3203720 - DNA, 25 bp, Homo sapien
ttggttaattttagcatatgctatg

SEQ ID NO: 3203721 - DNA, 25 bp, Homo sapien
ggttaattttagcatatgctatgat

SEQ ID NO: 3203722 - DNA, 25 bp, Homo sapien
tttttccttttgcactggagtgatt

SEQ ID NO: 3203723 - DNA, 25 bp, Homo sapien
tcttattaagtctttgggagaagaa

SEQ ID NO: 3203724 - DNA, 25 bp, Homo sapien
tccttttgcactggagtgatttttc

SEQ ID NO: 3203725 - DNA, 25 bp, Homo sapien
tttctgctcttattaagtctttggg

SEQ ID NO: 3203726 - DNA, 25 bp, Homo sapien
gctgccattgcagaacctgaaatac

SEQ ID NO: 3203727 - DNA, 25 bp, Homo sapien
ctgccattgcagaacctgaaatacc

SEQ ID NO: 3203728 - DNA, 25 bp, Homo sapien
ctgatacacagctggatcagtctca

SEQ ID NO: 3203729 - DNA, 25 bp, Homo sapien
tgatacacagctggatcagtctcac

SEQ ID NO: 3203730 - DNA, 25 bp, Homo sapien
tacactcttacgctgtgccatgaaa

SEQ ID NO: 3203731 - DNA, 25 bp, Homo sapien
tctcttacactcttacgctgtgcca

SEQ ID NO: 3203732 - DNA, 25 bp, Homo sapien
gcataatttaactggttctcttaca

SEQ ID NO: 3203733 - DNA, 25 bp, Homo sapien
ctcttacgctgtgccatgaaaagtg

SEQ ID NO: 3203734 - DNA, 25 bp, Homo sapien
gtcactgatgaagaggtacttcagt

SEQ ID NO: 3203735 - DNA, 25 bp, Homo sapien
gatgaagaggtacttcagtacaaat

SEQ ID NO: 3203736 - DNA, 25 bp, Homo sapien
gagctataactgattttagcaggga

SEQ ID NO: 3203737 - DNA, 25 bp, Homo sapien
tacaaatgatttcaaccgatccaca

SEQ ID NO: 3203738 - DNA, 25 bp, Homo sapien
ttttatgttcaatgttccttctgtc

SEQ ID NO: 3203739 - DNA, 25 bp, Homo sapien
tttatgttcaatgttccttctgtct

SEQ ID NO: 3203740 - DNA, 25 bp, Homo sapien
attttatgttcaatgttccttctgt

SEQ ID NO: 3203741 - DNA, 25 bp, Homo sapien
ttatgttcaatgttccttctgtctc

SEQ ID NO: 3203742 - DNA, 25 bp, Homo sapien
cagactctataggaagcatgcctgg

SEQ ID NO: 3203743 - DNA, 25 bp, Homo sapien
gcagactctataggaagcatgcctg

SEQ ID NO: 3203744 - DNA, 25 bp, Homo sapien
ccagtctgttgcatggctttgagaa

SEQ ID NO: 3203745 - DNA, 25 bp, Homo sapien
cagactgttgaagtgcagactggtt

SEQ ID NO: 3203746 - DNA, 25 bp, Homo sapien
tcattttatgcctagtttagcaagg

SEQ ID NO: 3203747 - DNA, 25 bp, Homo sapien
gagaaggtttgcaaaaaagactgag

SEQ ID NO: 3203748 - DNA, 25 bp, Homo sapien
aaactgaacttttaacatgatcata

SEQ ID NO: 3203749 - DNA, 25 bp, Homo sapien
tgatcatattactttgtgtgatgaa

SEQ ID NO: 3203750 - DNA, 25 bp, Homo sapien
actgaacttttaacatgatcatatt

SEQ ID NO: 3203751 - DNA, 25 bp, Homo sapien
atcatattactttgtgtgatgaacc

SEQ ID NO: 3203752 - DNA, 25 bp, Homo sapien
ccatttctgaatgcgtgtatttgga

SEQ ID NO: 3203753 - DNA, 25 bp, Homo sapien
cagttgtactgtcatctttgccatt

SEQ ID NO: 3203754 - DNA, 25 bp, Homo sapien
tgtgtgcatagtcataatagtctca

SEQ ID NO: 3203755 - DNA, 25 bp, Homo sapien
gctgtgaatctgtctcatctgatgg

SEQ ID NO: 3203756 - DNA, 25 bp, Homo sapien
acatcacattgctgtaggtgtacag

SEQ ID NO: 3203757 - DNA, 25 bp, Homo sapien
tattagacctctgtcggatgcatgc

SEQ ID NO: 3203758 - DNA, 25 bp, Homo sapien
ctttcccacagctgatgtccagaat

SEQ ID NO: 3203759 - DNA, 25 bp, Homo sapien
ttaggtcccacttgtgaattgttgg

SEQ ID NO: 3203760 - DNA, 25 bp, Homo sapien
aagaatggatgtattctgaataaaa

SEQ ID NO: 3203761 - DNA, 25 bp, Homo sapien
tattgagtgatgcaaagctttggga

SEQ ID NO: 3203762 - DNA, 25 bp, Homo sapien
ttcagactaaaaggggtacatatgc

SEQ ID NO: 3203763 - DNA, 25 bp, Homo sapien
gagtgatgcaaagctttgggataca

SEQ ID NO: 3203764 - DNA, 25 bp, Homo sapien
tcttgttcatactagactttcgata

SEQ ID NO: 3203765 - DNA, 25 bp, Homo sapien
tatcttgttcatactagactttcga

SEQ ID NO: 3203766 - DNA, 25 bp, Homo sapien
tgttcatactagactttcgatacat

SEQ ID NO: 3203767 - DNA, 25 bp, Homo sapien
cttgttcatactagactttcgatac

SEQ ID NO: 3203768 - DNA, 25 bp, Homo sapien
tcaaaaagactttcagctgaagtaa

SEQ ID NO: 3203769 - DNA, 25 bp, Homo sapien
tgtgtattaaaagctataacgacct

SEQ ID NO: 3203770 - DNA, 25 bp, Homo sapien
gctggtactaaagcatagaatataa

SEQ ID NO: 3203771 - DNA, 25 bp, Homo sapien
ccttttggagagaattattaggcat

SEQ ID NO: 3203772 - DNA, 25 bp, Homo sapien
tcttgggcagcatgtccaagtattt

SEQ ID NO: 3203773 - DNA, 25 bp, Homo sapien
ctttatgactttcttcttgggcagc

SEQ ID NO: 3203774 - DNA, 25 bp, Homo sapien
tttatgactttcttcttgggcagca

SEQ ID NO: 3203775 - DNA, 25 bp, Homo sapien
gcagcatgtccaagtattttataaa

SEQ ID NO: 3203776 - DNA, 25 bp, Homo sapien
tttcagacaatttgaattgcatatt

SEQ ID NO: 3203777 - DNA, 25 bp, Homo sapien
ttcagacaatttgaattgcatattt

SEQ ID NO: 3203778 - DNA, 25 bp, Homo sapien
ctttcagacaatttgaattgcatat

SEQ ID NO: 3203779 - DNA, 25 bp, Homo sapien
ccaactggaaaagttgtataattgt

SEQ ID NO: 3203780 - DNA, 25 bp, Homo sapien
caattattcttctaaaaccaactgg

SEQ ID NO: 3203781 - DNA, 25 bp, Homo sapien
aagcttctctgagctaccataatag

SEQ ID NO: 3203782 - DNA, 25 bp, Homo sapien
tataattgttcagtgaaggtctgac

SEQ ID NO: 3203783 - DNA, 25 bp, Homo sapien
ggtttggatggcatggctttctcac

SEQ ID NO: 3203784 - DNA, 25 bp, Homo sapien
tatcctggactgacagaacactttc

SEQ ID NO: 3203785 - DNA, 25 bp, Homo sapien
tgaattgactctaatactctggact

SEQ ID NO: 3203786 - DNA, 25 bp, Homo sapien
ctggacttatcctggactgacagaa

SEQ ID NO: 3203787 - DNA, 25 bp, Homo sapien
cttcattgacctgaattgactctaa

SEQ ID NO: 3203788 - DNA, 25 bp, Homo sapien
gatcaaacatacgataggtgtacct

SEQ ID NO: 3203789 - DNA, 25 bp, Homo sapien
gaacaaaaccttagagaactatgag

SEQ ID NO: 3203790 - DNA, 25 bp, Homo sapien
gtaaaataccccatgagaagatcaa

SEQ ID NO: 3203791 - DNA, 25 bp, Homo sapien
aaagacacttaggatagcatccagg

SEQ ID NO: 3203792 - DNA, 25 bp, Homo sapien
cagaagtgaagagttacgttcagtc

SEQ ID NO: 3203793 - DNA, 25 bp, Homo sapien
ccagaagtgaagagttacgttcagt

SEQ ID NO: 3203794 - DNA, 25 bp, Homo sapien
cagttccgctagttcaaatgagagc

SEQ ID NO: 3203795 - DNA, 25 bp, Homo sapien
aacagttccgctagttcaaatgaga

SEQ ID NO: 3203796 - DNA, 25 bp, Homo sapien
ctgaacagttccgctagttcaaatg

SEQ ID NO: 3203797 - DNA, 25 bp, Homo sapien
gttcaaatgagagcacaggtctcat

SEQ ID NO: 3203798 - DNA, 25 bp, Homo sapien
ggcttactttgccaaactcaaactc

SEQ ID NO: 3203799 - DNA, 25 bp, Homo sapien
tcataagctgacaattggcttactt

SEQ ID NO: 3203800 - DNA, 25 bp, Homo sapien
tgctctccatctatttcataagctg

SEQ ID NO: 3203801 - DNA, 25 bp, Homo sapien
aattttgctctccatctatttcata

SEQ ID NO: 3203802 - DNA, 25 bp, Homo sapien
tctgaataagtgttgtattaaagca

SEQ ID NO: 3203803 - DNA, 25 bp, Homo sapien
ttccacagaaggtgcattagtcaca

SEQ ID NO: 3203804 - DNA, 25 bp, Homo sapien
gtcacagacctctgatgaatcagag

SEQ ID NO: 3203805 - DNA, 25 bp, Homo sapien
tattaaagcaagtttgaatgttctg

SEQ ID NO: 3203806 - DNA, 25 bp, Homo sapien
tggccaattcgatttggaaaatact

SEQ ID NO: 3203807 - DNA, 25 bp, Homo sapien
actgtatcttgcagcaagggctgaa

SEQ ID NO: 3203808 - DNA, 25 bp, Homo sapien
gcaagggctgaatttgtgatgaaca

SEQ ID NO: 3203809 - DNA, 25 bp, Homo sapien
ttgtgatgaacatttggccaattcg

SEQ ID NO: 3203810 - DNA, 25 bp, Homo sapien
tgcatatatgtttgtctgtattggg

SEQ ID NO: 3203811 - DNA, 25 bp, Homo sapien
gactctccactaaccaaatcctaaa

SEQ ID NO: 3203812 - DNA, 25 bp, Homo sapien
ttgccctgtggtgaagagccttgac

SEQ ID NO: 3203813 - DNA, 25 bp, Homo sapien
gagccttgacattcagcctggggat

SEQ ID NO: 3203814 - DNA, 25 bp, Homo sapien
tataatctttataatatttgtcttc

SEQ ID NO: 3203815 - DNA, 25 bp, Homo sapien
tatttgtcttcatgaaaatacttca

SEQ ID NO: 3203816 - DNA, 25 bp, Homo sapien
tctttataatatttgtcttcatgaa

SEQ ID NO: 3203817 - DNA, 25 bp, Homo sapien
atatttgtcttcatgaaaatacttc

SEQ ID NO: 3203818 - DNA, 25 bp, Homo sapien
tgcaccaactgagggggtccgcctc

SEQ ID NO: 3203819 - DNA, 25 bp, Homo sapien
caccaactgagggggtccgcctcat

SEQ ID NO: 3203820 - DNA, 25 bp, Homo sapien
gcaccaactgagggggtccgcctca

SEQ ID NO: 3203821 - DNA, 25 bp, Homo sapien
cacattgtatagctgccagcctcca

SEQ ID NO: 3203822 - DNA, 25 bp, Homo sapien
ggagataggaaactgggcaccttca

SEQ ID NO: 3203823 - DNA, 25 bp, Homo sapien
ccactgccactcctttgggagggaa

SEQ ID NO: 3203824 - DNA, 25 bp, Homo sapien
gaagtgcaagtggaccacacattgt

SEQ ID NO: 3203825 - DNA, 25 bp, Homo sapien
gacatgcctgttgattcctgcaata

SEQ ID NO: 3203826 - DNA, 25 bp, Homo sapien
gattcctgcaatagtcacagccacc

SEQ ID NO: 3203827 - DNA, 25 bp, Homo sapien
gctgggctgccccaacttgtccatt

SEQ ID NO: 3203828 - DNA, 25 bp, Homo sapien
ccccagagactgatgacatgcctgt

SEQ ID NO: 3203829 - DNA, 25 bp, Homo sapien
tggttcactctcatggcttttggga

SEQ ID NO: 3203830 - DNA, 25 bp, Homo sapien
aagacttcactagggctggacgagc

SEQ ID NO: 3203831 - DNA, 25 bp, Homo sapien
tttcagaagtctagtgatccagaag

SEQ ID NO: 3203832 - DNA, 25 bp, Homo sapien
gcttagggtctctcaacaacagtca

SEQ ID NO: 3203833 - DNA, 25 bp, Homo sapien
gactggttgcgattgctgccaatga

SEQ ID NO: 3203834 - DNA, 25 bp, Homo sapien
tccatctccatgatgaggagggact

SEQ ID NO: 3203835 - DNA, 25 bp, Homo sapien
catccctctcgttttggaagtatgc

SEQ ID NO: 3203836 - DNA, 25 bp, Homo sapien
ggaagtatgctttgctagccctatc

SEQ ID NO: 3203837 - DNA, 25 bp, Homo sapien
gaaaagcaagcttcaaggttccatt

SEQ ID NO: 3203838 - DNA, 25 bp, Homo sapien
aaaagcaagcttcaaggttccattc

SEQ ID NO: 3203839 - DNA, 25 bp, Homo sapien
ccattcatgtctttggccgaagcac

SEQ ID NO: 3203840 - DNA, 25 bp, Homo sapien
catttcggggtaattgacacaagca

SEQ ID NO: 3203841 - DNA, 25 bp, Homo sapien
taattgacacaagcatgtgatctct

SEQ ID NO: 3203842 - DNA, 25 bp, Homo sapien
gggtaattgacacaagcatgtgatc

SEQ ID NO: 3203843 - DNA, 25 bp, Homo sapien
tgacacaagcatgtgatctcttcag

SEQ ID NO: 3203844 - DNA, 25 bp, Homo sapien
tgcatcccctcgctggtttttaagt

SEQ ID NO: 3203845 - DNA, 25 bp, Homo sapien
gagcacgtctttgccaccacctttg

SEQ ID NO: 3203846 - DNA, 25 bp, Homo sapien
acacttgttgcatcccctcgctggt

SEQ ID NO: 3203847 - DNA, 25 bp, Homo sapien
ggtctttgaagcctgacacttgttg

SEQ ID NO: 3203848 - DNA, 25 bp, Homo sapien
tcagtgaccagtcgtagcacctcct

SEQ ID NO: 3203849 - DNA, 25 bp, Homo sapien
tgtgacaaacgaagaactcctggct

SEQ ID NO: 3203850 - DNA, 25 bp, Homo sapien
tgcactgacacatccgactgagggt

SEQ ID NO: 3203851 - DNA, 25 bp, Homo sapien
tcaaaggtcaaacgtccttgtgaca

SEQ ID NO: 3203852 - DNA, 25 bp, Homo sapien
ttctcatatcagattcagaacatcc

SEQ ID NO: 3203853 - DNA, 25 bp, Homo sapien
tcagaacatcctcagcttatttagt

SEQ ID NO: 3203854 - DNA, 25 bp, Homo sapien
cagagagggagctaggacatattga

SEQ ID NO: 3203855 - DNA, 25 bp, Homo sapien
tgatttaagcttggttgtggacaca

SEQ ID NO: 3203856 - DNA, 25 bp, Homo sapien
gcaatctgggcaccaaatggcagca

SEQ ID NO: 3203857 - DNA, 25 bp, Homo sapien
aaatggcagcaatcttctccaattc

SEQ ID NO: 3203858 - DNA, 25 bp, Homo sapien
caccaaatggcagcaatcttctcca

SEQ ID NO: 3203859 - DNA, 25 bp, Homo sapien
cagtctcctacaattttttgaagca

SEQ ID NO: 3203860 - DNA, 25 bp, Homo sapien
tcacaggcatcttgcttgtgcccct

SEQ ID NO: 3203861 - DNA, 25 bp, Homo sapien
ctgcaggctcacaggcatcttgctt

SEQ ID NO: 3203862 - DNA, 25 bp, Homo sapien
caggctcacaggcatcttgcttgtg

SEQ ID NO: 3203863 - DNA, 25 bp, Homo sapien
aggcatcttgcttgtgcccctccat

SEQ ID NO: 3203864 - DNA, 25 bp, Homo sapien
agatctatagactcaagtccatagc

SEQ ID NO: 3203865 - DNA, 25 bp, Homo sapien
gccaagatgaagatctatagactca

SEQ ID NO: 3203866 - DNA, 25 bp, Homo sapien
aaagccaagatgaagatctatagac

SEQ ID NO: 3203867 - DNA, 25 bp, Homo sapien
gatgaagatctatagactcaagtcc

SEQ ID NO: 3203868 - DNA, 25 bp, Homo sapien
tgttatcctgcttattaacgacccc

SEQ ID NO: 3203869 - DNA, 25 bp, Homo sapien
taacgtgtatttgttcggaggagac

SEQ ID NO: 3203870 - DNA, 25 bp, Homo sapien
cgaccccatccattatattcttcat

SEQ ID NO: 3203871 - DNA, 25 bp, Homo sapien
ggagaccagatgcaagttgaaactt

SEQ ID NO: 3203872 - DNA, 25 bp, Homo sapien
tgtcaacttccaatattacaaaagg

SEQ ID NO: 3203873 - DNA, 25 bp, Homo sapien
catttaatgcgcttggcttgtcaac

SEQ ID NO: 3203874 - DNA, 25 bp, Homo sapien
gcgcttggcttgtcaacttccaata

SEQ ID NO: 3203875 - DNA, 25 bp, Homo sapien
gttttcatttaatgcgcttggcttg

SEQ ID NO: 3203876 - DNA, 25 bp, Homo sapien
aatcagtcttcataccctgccagtt

SEQ ID NO: 3203877 - DNA, 25 bp, Homo sapien
tgagcagccaccagaatcagtcttc

SEQ ID NO: 3203878 - DNA, 25 bp, Homo sapien
cagaatcagtcttcataccctgcca

SEQ ID NO: 3203879 - DNA, 25 bp, Homo sapien
ctgagcagccaccagaatcagtctt

SEQ ID NO: 3203880 - DNA, 25 bp, Homo sapien
gtttcatgaagtatttcatttgctt

SEQ ID NO: 3203881 - DNA, 25 bp, Homo sapien
ttcatgaagtatttcatttgcttgt

SEQ ID NO: 3203882 - DNA, 25 bp, Homo sapien
tgaagtatttcatttgcttgtattt

SEQ ID NO: 3203883 - DNA, 25 bp, Homo sapien
aagtatttcatttgcttgtatttca

SEQ ID NO: 3203884 - DNA, 25 bp, Homo sapien
ctcattcttcagtgcgaggtgggag

SEQ ID NO: 3203885 - DNA, 25 bp, Homo sapien
ctgtcaggtatggctttcatctcat

SEQ ID NO: 3203886 - DNA, 25 bp, Homo sapien
tcattcttcagtgcgaggtgggagc

SEQ ID NO: 3203887 - DNA, 25 bp, Homo sapien
gtcaggtatggctttcatctcattc

SEQ ID NO: 3203888 - DNA, 25 bp, Homo sapien
cagaaaaactcttcctccaaaatgt

SEQ ID NO: 3203889 - DNA, 25 bp, Homo sapien
aaactcttcctccaaaatgtctgtc

SEQ ID NO: 3203890 - DNA, 25 bp, Homo sapien
aaaaactcttcctccaaaatgtctg

SEQ ID NO: 3203891 - DNA, 25 bp, Homo sapien
tcagaaaaactcttcctccaaaatg

SEQ ID NO: 3203892 - DNA, 25 bp, Homo sapien
gttttgggggtctacatgccttgct

SEQ ID NO: 3203893 - DNA, 25 bp, Homo sapien
tgaccctggtcatatctttcccagt

SEQ ID NO: 3203894 - DNA, 25 bp, Homo sapien
gccttgctatgtttgttcacccaga

SEQ ID NO: 3203895 - DNA, 25 bp, Homo sapien
gttcacccagacttttattcctgag

SEQ ID NO: 3203896 - DNA, 25 bp, Homo sapien
gccttatttcttccatgtattcagg

SEQ ID NO: 3203897 - DNA, 25 bp, Homo sapien
tcttccatgtattcaggaagggtgt

SEQ ID NO: 3203898 - DNA, 25 bp, Homo sapien
tcattgccttatttcttccatgtat

SEQ ID NO: 3203899 - DNA, 25 bp, Homo sapien
tgtattcaggaagggtgtccatgag

SEQ ID NO: 3203900 - DNA, 25 bp, Homo sapien
tctgtcacttttgagatgactgtgg

SEQ ID NO: 3203901 - DNA, 25 bp, Homo sapien
catatttcaccaagtacatcgactc

SEQ ID NO: 3203902 - DNA, 25 bp, Homo sapien
tacatcgactctgtcacttttgaga

SEQ ID NO: 3203903 - DNA, 25 bp, Homo sapien
caccaagtacatcgactctgtcact

SEQ ID NO: 3203904 - DNA, 25 bp, Homo sapien
gccatcgctgcttgagttcttcttc

SEQ ID NO: 3203905 - DNA, 25 bp, Homo sapien
gctgggtgccatcgctgcttgagtt

SEQ ID NO: 3203906 - DNA, 25 bp, Homo sapien
tcctggggtcatggaaccaagcttg

SEQ ID NO: 3203907 - DNA, 25 bp, Homo sapien
tgctcccttttgggaggagtaccat

SEQ ID NO: 3203908 - DNA, 25 bp, Homo sapien
gagccaaggcttggagattgtattg

SEQ ID NO: 3203909 - DNA, 25 bp, Homo sapien
taaggccctggccaaagagccaagg

SEQ ID NO: 3203910 - DNA, 25 bp, Homo sapien
aaggcttggagattgtattgcagag

SEQ ID NO: 3203911 - DNA, 25 bp, Homo sapien
agttctaaggccctggccaaagagc

SEQ ID NO: 3203912 - DNA, 25 bp, Homo sapien
tgatttattacgttgtcatagaccc

SEQ ID NO: 3203913 - DNA, 25 bp, Homo sapien
tttattacgttgtcatagacccagt

SEQ ID NO: 3203914 - DNA, 25 bp, Homo sapien
tcctgatttattacgttgtcataga

SEQ ID NO: 3203915 - DNA, 25 bp, Homo sapien
tcaattcactttcatcctgatttat

SEQ ID NO: 3203916 - DNA, 25 bp, Homo sapien
tctcagagactgaccatggtagttt

SEQ ID NO: 3203917 - DNA, 25 bp, Homo sapien
ctcagagactgaccatggtagtttt

SEQ ID NO: 3203918 - DNA, 25 bp, Homo sapien
tggctacctcataatcattttgttt

SEQ ID NO: 3203919 - DNA, 25 bp, Homo sapien
catcgctatgcttcttgataatggc

SEQ ID NO: 3203920 - DNA, 25 bp, Homo sapien
gtttctttagtgtctaaaaatctca

SEQ ID NO: 3203921 - DNA, 25 bp, Homo sapien
gattaagactatccacatcgctatg

SEQ ID NO: 3203922 - DNA, 25 bp, Homo sapien
tcctgatggcatctggcaacttaat

SEQ ID NO: 3203923 - DNA, 25 bp, Homo sapien
taataacatttctaaaccacatccc

SEQ ID NO: 3203924 - DNA, 25 bp, Homo sapien
ggcatctggcaacttaattgcttaa

SEQ ID NO: 3203925 - DNA, 25 bp, Homo sapien
tgcttaataacatttctaaaccaca

SEQ ID NO: 3203926 - DNA, 25 bp, Homo sapien
agaaggaaaccaggaggtagggatg

SEQ ID NO: 3203927 - DNA, 25 bp, Homo sapien
cacagttagcttgctgggtaagcca

SEQ ID NO: 3203928 - DNA, 25 bp, Homo sapien
ggaataagatatgtcgacaccagaa

SEQ ID NO: 3203929 - DNA, 25 bp, Homo sapien
tctgatacgtggctttttcgctcct

SEQ ID NO: 3203930 - DNA, 25 bp, Homo sapien
aactttttcgctctggcagttgggc

SEQ ID NO: 3203931 - DNA, 25 bp, Homo sapien
cctcaagggacacatgcagtatagt

SEQ ID NO: 3203932 - DNA, 25 bp, Homo sapien
cccagattggaagtaggatacatcc

SEQ ID NO: 3203933 - DNA, 25 bp, Homo sapien
cactgggactaagatgagacacttt

SEQ ID NO: 3203934 - DNA, 25 bp, Homo sapien
aaatggctacatctaacctcaaggg

SEQ ID NO: 3203935 - DNA, 25 bp, Homo sapien
taggctatacacaacttcaacttgg

SEQ ID NO: 3203936 - DNA, 25 bp, Homo sapien
tctgatgtgaccatatttgatgtcc

SEQ ID NO: 3203937 - DNA, 25 bp, Homo sapien
attctgctaggctatacacaacttc

SEQ ID NO: 3203938 - DNA, 25 bp, Homo sapien
tacacaacttcaacttggaactgga

SEQ ID NO: 3203939 - DNA, 25 bp, Homo sapien
ccagcggagtgtgtataattttggc

SEQ ID NO: 3203940 - DNA, 25 bp, Homo sapien
tataattttggcttgggtttctgga

SEQ ID NO: 3203941 - DNA, 25 bp, Homo sapien
gaagtctcttccagcggagtgtgta

SEQ ID NO: 3203942 - DNA, 25 bp, Homo sapien
aagaaattcatggaagtctcttcca

SEQ ID NO: 3203943 - DNA, 25 bp, Homo sapien
tttgagttcactattgatgctgctc

SEQ ID NO: 3203944 - DNA, 25 bp, Homo sapien
atttgagttcactattgatgctgct

SEQ ID NO: 3203945 - DNA, 25 bp, Homo sapien
cacctttactgcttccagtgctata

SEQ ID NO: 3203946 - DNA, 25 bp, Homo sapien
tagctggctttggtagcaaagggtc

SEQ ID NO: 3203947 - DNA, 25 bp, Homo sapien
tggtagcaaagggtcacatgtttca

SEQ ID NO: 3203948 - DNA, 25 bp, Homo sapien
cctttactgcttccagtgctatagt

SEQ ID NO: 3203949 - DNA, 25 bp, Homo sapien
atttccggggcacctagtgccatac

SEQ ID NO: 3203950 - DNA, 25 bp, Homo sapien
ctggttgcacatttccggggcacct

SEQ ID NO: 3203951 - DNA, 25 bp, Homo sapien
ggttgcacatttccggggcacctag

SEQ ID NO: 3203952 - DNA, 25 bp, Homo sapien
acatttccggggcacctagtgccat

SEQ ID NO: 3203953 - DNA, 25 bp, Homo sapien
ggaagggctgcactgcaatgaagct

SEQ ID NO: 3203954 - DNA, 25 bp, Homo sapien
gaattagaatactgtccaagaggac

SEQ ID NO: 3203955 - DNA, 25 bp, Homo sapien
tctgggaagaattgctgagtggaac

SEQ ID NO: 3203956 - DNA, 25 bp, Homo sapien
caatatttcgggttggaattagaat

SEQ ID NO: 3203957 - DNA, 25 bp, Homo sapien
ggtattcttgtttgcatttgctcac

SEQ ID NO: 3203958 - DNA, 25 bp, Homo sapien
taggtattcttgtttgcatttgctc

SEQ ID NO: 3203959 - DNA, 25 bp, Homo sapien
tttccagtaggtattcttgtttgca

SEQ ID NO: 3203960 - DNA, 25 bp, Homo sapien
tcttgtttgcatttgctcacattca

SEQ ID NO: 3203961 - DNA, 25 bp, Homo sapien
gacctagatggttgttcctggcact

SEQ ID NO: 3203962 - DNA, 25 bp, Homo sapien
caaaagacccaaagtgcattgcatc

SEQ ID NO: 3203963 - DNA, 25 bp, Homo sapien
tggcacttgtcattctcagcaagca

SEQ ID NO: 3203964 - DNA, 25 bp, Homo sapien
ggctccaccaggattgacctagatg

SEQ ID NO: 3203965 - DNA, 25 bp, Homo sapien
gtagagtcgttttccgacctggaga

SEQ ID NO: 3203966 - DNA, 25 bp, Homo sapien
gacctggagatacgttgccatttcc

SEQ ID NO: 3203967 - DNA, 25 bp, Homo sapien
tttatgcaaagagataggaaggtcc

SEQ ID NO: 3203968 - DNA, 25 bp, Homo sapien
caacctgcgggaaaagtagagtcgt

SEQ ID NO: 3203969 - DNA, 25 bp, Homo sapien
cctctcctaggagcgggatttccaa

SEQ ID NO: 3203970 - DNA, 25 bp, Homo sapien
gacaatgccgcggaaagttcccagt

SEQ ID NO: 3203971 - DNA, 25 bp, Homo sapien
gcaacagctgcgatatcctctccta

SEQ ID NO: 3203972 - DNA, 25 bp, Homo sapien
caccgagctgccgatgattggccaa

SEQ ID NO: 3203973 - DNA, 25 bp, Homo sapien
tattccgacagtcttggcgctggca

SEQ ID NO: 3203974 - DNA, 25 bp, Homo sapien
cattttagagcttcccgcaatccag

SEQ ID NO: 3203975 - DNA, 25 bp, Homo sapien
tgtgccggaaaagcacagaacggct

SEQ ID NO: 3203976 - DNA, 25 bp, Homo sapien
taatgtcaacggctggcaaatgcaa

SEQ ID NO: 3203977 - DNA, 25 bp, Homo sapien
aaaagtgcgctacgtgggggctcct

SEQ ID NO: 3203978 - DNA, 25 bp, Homo sapien
tacaaataaaagtgcgctacgtggg

SEQ ID NO: 3203979 - DNA, 25 bp, Homo sapien
atacaaataaaagtgcgctacgtgg

SEQ ID NO: 3203980 - DNA, 25 bp, Homo sapien
aataaaagtgcgctacgtgggggct

SEQ ID NO: 3203981 - DNA, 25 bp, Homo sapien
aaaggaagtagcttcccgcagccag

SEQ ID NO: 3203982 - DNA, 25 bp, Homo sapien
aggaagtagcttcccgcagccagtc

SEQ ID NO: 3203983 - DNA, 25 bp, Homo sapien
aggaaaggaagtagcttcccgcagc

SEQ ID NO: 3203984 - DNA, 25 bp, Homo sapien
gaaaggaagtagcttcccgcagcca

SEQ ID NO: 3203985 - DNA, 25 bp, Homo sapien
aatgtccagacccagatcttcagcg

SEQ ID NO: 3203986 - DNA, 25 bp, Homo sapien
tctcagagatttccaccgtcaggtc

SEQ ID NO: 3203987 - DNA, 25 bp, Homo sapien
gatattccccacgaaagtgccatgt

SEQ ID NO: 3203988 - DNA, 25 bp, Homo sapien
ttgagttgggcaccgtctgaaaccc

SEQ ID NO: 3203989 - DNA, 25 bp, Homo sapien
ggcaggcctgctcccccgccacctc

SEQ ID NO: 3203990 - DNA, 25 bp, Homo sapien
tgagtagggccgtgccggtgcgctg

SEQ ID NO: 3203991 - DNA, 25 bp, Homo sapien
tggtcgaaagcgggcacattgtcat

SEQ ID NO: 3203992 - DNA, 25 bp, Homo sapien
cagcactcggatggtgagtagggcc

SEQ ID NO: 3203993 - DNA, 25 bp, Homo sapien
acacagtgtagacgggttggtcgaa

SEQ ID NO: 3203994 - DNA, 25 bp, Homo sapien
tgcgcggcgagagtccgaaaagctc

SEQ ID NO: 3203995 - DNA, 25 bp, Homo sapien
ccttggcttgcacgtacacttggta

SEQ ID NO: 3203996 - DNA, 25 bp, Homo sapien
ggcgcgttgtcattagcatccagta

SEQ ID NO: 3203997 - DNA, 25 bp, Homo sapien
gctgctgaaggagtacacgacctca

SEQ ID NO: 3203998 - DNA, 25 bp, Homo sapien
gaggcggaaaggcacgtctcccagt

SEQ ID NO: 3203999 - DNA, 25 bp, Homo sapien
tcgcggtcagtcacgctgaaaaggg

SEQ ID NO: 3204000 - DNA, 25 bp, Homo sapien
ggaaaggcacgtctcccagtagctc

SEQ ID NO: 3204001 - DNA, 25 bp, Homo sapien
ctctgagtcgcggtcagtcacgctg

SEQ ID NO: 3204002 - DNA, 25 bp, Homo sapien
aaacgtaggtgaagacgctcatgcc

SEQ ID NO: 3204003 - DNA, 25 bp, Homo sapien
cacatacacgtcgtagaccggctgg

SEQ ID NO: 3204004 - DNA, 25 bp, Homo sapien
gctcaccgcgtagatgtaggcgcca

SEQ ID NO: 3204005 - DNA, 25 bp, Homo sapien
gatcgacttactggtggagagcgca

SEQ ID NO: 3204006 - DNA, 25 bp, Homo sapien
ctatgaggatgttgacagtggcgtt

SEQ ID NO: 3204007 - DNA, 25 bp, Homo sapien
atgaggatgttgacagtggcgttac

SEQ ID NO: 3204008 - DNA, 25 bp, Homo sapien
tatgaggatgttgacagtggcgtta

SEQ ID NO: 3204009 - DNA, 25 bp, Homo sapien
cacgcacgatgctgtaagtgagccg

SEQ ID NO: 3204010 - DNA, 25 bp, Homo sapien
gccagtccatgcgaaagaggttcat

SEQ ID NO: 3204011 - DNA, 25 bp, Homo sapien
tcgatcaccagctcataaggccgct

SEQ ID NO: 3204012 - DNA, 25 bp, Homo sapien
gaggttcatttcgttgccacgcacg

SEQ ID NO: 3204013 - DNA, 25 bp, Homo sapien
ggggcggctgcccatggtcgcgcac

SEQ ID NO: 3204014 - DNA, 25 bp, Homo sapien
gaaaggggcggctgcccatggtcgc

SEQ ID NO: 3204015 - DNA, 25 bp, Homo sapien
aaggggcggctgcccatggtcgcgc

SEQ ID NO: 3204016 - DNA, 25 bp, Homo sapien
aaaggggcggctgcccatggtcgcg

SEQ ID NO: 3204017 - DNA, 25 bp, Homo sapien
cctggggctccacggcgccatccac

SEQ ID NO: 3204018 - DNA, 25 bp, Homo sapien
cccgccctggggctccacggcgcca

SEQ ID NO: 3204019 - DNA, 25 bp, Homo sapien
cgccctggggctccacggcgccatc

SEQ ID NO: 3204020 - DNA, 25 bp, Homo sapien
gccctggggctccacggcgccatcc

SEQ ID NO: 3204021 - DNA, 25 bp, Homo sapien
gcagcaatcgctggccagacaagta

SEQ ID NO: 3204022 - DNA, 25 bp, Homo sapien
aggaagatgaaggacaccgagccca

SEQ ID NO: 3204023 - DNA, 25 bp, Homo sapien
tctttttggcaacgcacggccagca

SEQ ID NO: 3204024 - DNA, 25 bp, Homo sapien
tgaggtctagcgaggtttccccgcc

SEQ ID NO: 3204025 - DNA, 25 bp, Homo sapien
gggctgcagggcttaagaaacatca

SEQ ID NO: 3204026 - DNA, 25 bp, Homo sapien
tcggtgtaaccggtgacgatggccc

SEQ ID NO: 3204027 - DNA, 25 bp, Homo sapien
ttgtgctcagtgtccgtactccgcg

SEQ ID NO: 3204028 - DNA, 25 bp, Homo sapien
gaaacatcaggtcggtcttggcgga

SEQ ID NO: 3204029 - DNA, 25 bp, Homo sapien
tggtggtcctttcgcttcagcctta

SEQ ID NO: 3204030 - DNA, 25 bp, Homo sapien
gagatggtggtcctttcgcttcagc

SEQ ID NO: 3204031 - DNA, 25 bp, Homo sapien
gatggtggtcctttcgcttcagcct

SEQ ID NO: 3204032 - DNA, 25 bp, Homo sapien
atgagagatggtggtcctttcgctt

SEQ ID NO: 3204033 - DNA, 25 bp, Homo sapien
ctttattaatgcctgggacagacgc

SEQ ID NO: 3204034 - DNA, 25 bp, Homo sapien
cttgtacacgcgactaaaagcatcg

SEQ ID NO: 3204035 - DNA, 25 bp, Homo sapien
gaaaaaagacctttgccagtgctag

SEQ ID NO: 3204036 - DNA, 25 bp, Homo sapien
ccagtgctagaaagtaagtccctcc

SEQ ID NO: 3204037 - DNA, 25 bp, Homo sapien
gtggcaagaaggtgattattagcta

SEQ ID NO: 3204038 - DNA, 25 bp, Homo sapien
gccaacagcgtgatttatccaaaac

SEQ ID NO: 3204039 - DNA, 25 bp, Homo sapien
ttcacactgtgtgggcgctcggctt

SEQ ID NO: 3204040 - DNA, 25 bp, Homo sapien
gggtttgtgccaacgcagcttcatt

SEQ ID NO: 3204041 - DNA, 25 bp, Homo sapien
accctccgactttgtcacttctcca

SEQ ID NO: 3204042 - DNA, 25 bp, Homo sapien
ccctccgactttgtcacttctccat

SEQ ID NO: 3204043 - DNA, 25 bp, Homo sapien
cctccgactttgtcacttctccatc

SEQ ID NO: 3204044 - DNA, 25 bp, Homo sapien
caccctccgactttgtcacttctcc

SEQ ID NO: 3204045 - DNA, 25 bp, Homo sapien
aatgagctgtacaaatattcatgaa

SEQ ID NO: 3204046 - DNA, 25 bp, Homo sapien
taataatatctaagactcaaataaa

SEQ ID NO: 3204047 - DNA, 25 bp, Homo sapien
aggagttcataatcctgcccgcccc

SEQ ID NO: 3204048 - DNA, 25 bp, Homo sapien
aaaggccctctgcattcgcctcccc

SEQ ID NO: 3204049 - DNA, 25 bp, Homo sapien
tagatagctgagctctgctcgctgg

SEQ ID NO: 3204050 - DNA, 25 bp, Homo sapien
tcggcgaggtctgtcaactagatag

SEQ ID NO: 3204051 - DNA, 25 bp, Homo sapien
tgtcaactagatagctgagctctgc

SEQ ID NO: 3204052 - DNA, 25 bp, Homo sapien
tgttaactcggcgaggtctgtcaac

SEQ ID NO: 3204053 - DNA, 25 bp, Homo sapien
aattgtccattactgctagggaaaa

SEQ ID NO: 3204054 - DNA, 25 bp, Homo sapien
ttgtccattactgctagggaaaaaa

SEQ ID NO: 3204055 - DNA, 25 bp, Homo sapien
taaattgtccattactgctagggaa

SEQ ID NO: 3204056 - DNA, 25 bp, Homo sapien
gtaaattgtccattactgctaggga

SEQ ID NO: 3204057 - DNA, 25 bp, Homo sapien
ggtggcatcatgatcactatctccc

SEQ ID NO: 3204058 - DNA, 25 bp, Homo sapien
gaccactgtccttagagcttactat

SEQ ID NO: 3204059 - DNA, 25 bp, Homo sapien
cagctgactgggcacggttggtggc

SEQ ID NO: 3204060 - DNA, 25 bp, Homo sapien
catgaccactgtccttagagcttac

SEQ ID NO: 3204061 - DNA, 25 bp, Homo sapien
tgtgcccagtatgttgtggctgccg

SEQ ID NO: 3204062 - DNA, 25 bp, Homo sapien
gaaatagtctagctgcctgatgtga

SEQ ID NO: 3204063 - DNA, 25 bp, Homo sapien
tggctgccgtgtaactactaataag

SEQ ID NO: 3204064 - DNA, 25 bp, Homo sapien
gagattgaagtgctacaggaaaaac

SEQ ID NO: 3204065 - DNA, 25 bp, Homo sapien
ttctatgaacaacattggtgacggc

SEQ ID NO: 3204066 - DNA, 25 bp, Homo sapien
tgtgcagctgccttcgtgtttaaag

SEQ ID NO: 3204067 - DNA, 25 bp, Homo sapien
cacagagcagtggtcaaggcgaaga

SEQ ID NO: 3204068 - DNA, 25 bp, Homo sapien
aaacgggaagcaccttgacaaggct

SEQ ID NO: 3204069 - DNA, 25 bp, Homo sapien
tgtgctactttttcggtgactgtca

SEQ ID NO: 3204070 - DNA, 25 bp, Homo sapien
gcaagtaacttgtcctgtacactca

SEQ ID NO: 3204071 - DNA, 25 bp, Homo sapien
gatagctgatgtgatagactgcctg

SEQ ID NO: 3204072 - DNA, 25 bp, Homo sapien
tctgttctgcaagggatgatagctg

SEQ ID NO: 3204073 - DNA, 25 bp, Homo sapien
tgagtggcccagagctttacattcc

SEQ ID NO: 3204074 - DNA, 25 bp, Homo sapien
cgtattagtcagcagtccatccagc

SEQ ID NO: 3204075 - DNA, 25 bp, Homo sapien
gaaggcatccagcaccgatctgagt

SEQ ID NO: 3204076 - DNA, 25 bp, Homo sapien
tgcgataatcagcagcctggcgtcc

SEQ ID NO: 3204077 - DNA, 25 bp, Homo sapien
acagagccctttgtgtaatacttac

SEQ ID NO: 3204078 - DNA, 25 bp, Homo sapien
taacagagccctttgtgtaatactt

SEQ ID NO: 3204079 - DNA, 25 bp, Homo sapien
tttaacagagccctttgtgtaatac

SEQ ID NO: 3204080 - DNA, 25 bp, Homo sapien
aacagagccctttgtgtaatactta

SEQ ID NO: 3204081 - DNA, 25 bp, Homo sapien
tcttcagtatgatgaggcaggaaaa

SEQ ID NO: 3204082 - DNA, 25 bp, Homo sapien
tttgttaagctcatatgatggacaa

SEQ ID NO: 3204083 - DNA, 25 bp, Homo sapien
gactcataaatcttcagtatgatga

SEQ ID NO: 3204084 - DNA, 25 bp, Homo sapien
tatgatggacaaatgcttacacagt

SEQ ID NO: 3204085 - DNA, 25 bp, Homo sapien
tataaacatctaaagggctcagtga

SEQ ID NO: 3204086 - DNA, 25 bp, Homo sapien
gctgtaaacaggcacacactgatcg

SEQ ID NO: 3204087 - DNA, 25 bp, Homo sapien
caaatcatgctgcttcaggtaagtc

SEQ ID NO: 3204088 - DNA, 25 bp, Homo sapien
tagcttgcggaacacttgatcacac

SEQ ID NO: 3204089 - DNA, 25 bp, Homo sapien
aaaacacggttgagtaagatatgga

SEQ ID NO: 3204090 - DNA, 25 bp, Homo sapien
cagtgctctgtctgataacatcaat

SEQ ID NO: 3204091 - DNA, 25 bp, Homo sapien
gtatgatgtggactgtatgcatcca

SEQ ID NO: 3204092 - DNA, 25 bp, Homo sapien
ttgatagtacatagtcagtgctctg

SEQ ID NO: 3204093 - DNA, 25 bp, Homo sapien
tttcctctctcgaatgtgttctaac

SEQ ID NO: 3204094 - DNA, 25 bp, Homo sapien
cttgaaagattatcttatattctct

SEQ ID NO: 3204095 - DNA, 25 bp, Homo sapien
aaagattatcttatattctctgatt

SEQ ID NO: 3204096 - DNA, 25 bp, Homo sapien
tgaaagattatcttatattctctga

SEQ ID NO: 3204097 - DNA, 25 bp, Homo sapien
aaaatttgatgaagaacatttgtca

SEQ ID NO: 3204098 - DNA, 25 bp, Homo sapien
cagtgcagctcaaactgtcattgaa

SEQ ID NO: 3204099 - DNA, 25 bp, Homo sapien
gtcattgaatataagatcagttaaa

SEQ ID NO: 3204100 - DNA, 25 bp, Homo sapien
tattctttaataacacagtgcagct

SEQ ID NO: 3204101 - DNA, 25 bp, Homo sapien
tcacccatgattgcaaaatgatgcg

SEQ ID NO: 3204102 - DNA, 25 bp, Homo sapien
tgataacagtcaaatgagtgatacc

SEQ ID NO: 3204103 - DNA, 25 bp, Homo sapien
gaaaatgttactgctgcacttagtg

SEQ ID NO: 3204104 - DNA, 25 bp, Homo sapien
gatggatgtggatattcacccatga

SEQ ID NO: 3204105 - DNA, 25 bp, Homo sapien
tattgcctgcaatactctggcggca

SEQ ID NO: 3204106 - DNA, 25 bp, Homo sapien
tcccgcaaattaggaagaagttctg

SEQ ID NO: 3204107 - DNA, 25 bp, Homo sapien
caaataacagtgctatgatcagtca

SEQ ID NO: 3204108 - DNA, 25 bp, Homo sapien
gttttaaagactaactgagctccag

SEQ ID NO: 3204109 - DNA, 25 bp, Homo sapien
gaaccttggtccagatacgtgcagt

SEQ ID NO: 3204110 - DNA, 25 bp, Homo sapien
aaagcaagagaaacacctagccaca

SEQ ID NO: 3204111 - DNA, 25 bp, Homo sapien
tggaagatgatacccatacggattt

SEQ ID NO: 3204112 - DNA, 25 bp, Homo sapien
tacgtgcagtttgcactcaagaaaa

SEQ ID NO: 3204113 - DNA, 25 bp, Homo sapien
ttgaaatttgcactgcttagacaca

SEQ ID NO: 3204114 - DNA, 25 bp, Homo sapien
ggtcagataaatatgtcctagtgca

SEQ ID NO: 3204115 - DNA, 25 bp, Homo sapien
tgaactgagctgatgagtggatacc

SEQ ID NO: 3204116 - DNA, 25 bp, Homo sapien
gaagaaagcgaacccagccagattt

SEQ ID NO: 3204117 - DNA, 25 bp, Homo sapien
ttttagtgcagcttaactgggtgcc

SEQ ID NO: 3204118 - DNA, 25 bp, Homo sapien
taaaaggctatacgtcctacagagg

SEQ ID NO: 3204119 - DNA, 25 bp, Homo sapien
tcagtttaagctacagggaattcag

SEQ ID NO: 3204120 - DNA, 25 bp, Homo sapien
ggctaaggactctcaaaggttgcag

SEQ ID NO: 3204121 - DNA, 25 bp, Homo sapien
ttgtcactgggatcactatgtaggt

SEQ ID NO: 3204122 - DNA, 25 bp, Homo sapien
tctgtcactggctgaataatcgccc

SEQ ID NO: 3204123 - DNA, 25 bp, Homo sapien
caaaacatggtagaatttcctggct

SEQ ID NO: 3204124 - DNA, 25 bp, Homo sapien
tatgaatagctgatgcaagagaaca

SEQ ID NO: 3204125 - DNA, 25 bp, Homo sapien
gtagtcctggtaatatataccctgt

SEQ ID NO: 3204126 - DNA, 25 bp, Homo sapien
agtcatgtcacatcagtagtcctgg

SEQ ID NO: 3204127 - DNA, 25 bp, Homo sapien
gaatagtgatttgaaagagcaccaa

SEQ ID NO: 3204128 - DNA, 25 bp, Homo sapien
gagcaccaagttagtaatctaaaga

SEQ ID NO: 3204129 - DNA, 25 bp, Homo sapien
gattcctatagaacagtaagttgcc

SEQ ID NO: 3204130 - DNA, 25 bp, Homo sapien
gaaacccaatattgaatgggcaagg

SEQ ID NO: 3204131 - DNA, 25 bp, Homo sapien
gattcctttcatacagtgcatagag

SEQ ID NO: 3204132 - DNA, 25 bp, Homo sapien
catgatgattgctaggcagtagtta

SEQ ID NO: 3204133 - DNA, 25 bp, Homo sapien
tgtaggtatgttaagaatgctttcc

SEQ ID NO: 3204134 - DNA, 25 bp, Homo sapien
gatgagcatgtaggtatgttaagaa

SEQ ID NO: 3204135 - DNA, 25 bp, Homo sapien
tagttgcggccatactgaaaatgta

SEQ ID NO: 3204136 - DNA, 25 bp, Homo sapien
tgatgctttgaggaatagttgcggc

SEQ ID NO: 3204137 - DNA, 25 bp, Homo sapien
aaaagggtgtgagttggatgcccct

SEQ ID NO: 3204138 - DNA, 25 bp, Homo sapien
taaaaagggtgtgagttggatgccc

SEQ ID NO: 3204139 - DNA, 25 bp, Homo sapien
agggtgtgagttggatgccccttac

SEQ ID NO: 3204140 - DNA, 25 bp, Homo sapien
ataaaaagggtgtgagttggatgcc

SEQ ID NO: 3204141 - DNA, 25 bp, Homo sapien
tcttgcctgggatccctcgcagcac

SEQ ID NO: 3204142 - DNA, 25 bp, Homo sapien
gttatgacctgcactattcatcaag

SEQ ID NO: 3204143 - DNA, 25 bp, Homo sapien
cctgcactattcatcaagatcagca

SEQ ID NO: 3204144 - DNA, 25 bp, Homo sapien
tgagaacagttatgacctgcactat

SEQ ID NO: 3204145 - DNA, 25 bp, Homo sapien
cttctctctcaactgagaacagtta

SEQ ID NO: 3204146 - DNA, 25 bp, Homo sapien
aataaactcacccatatgtggccag

SEQ ID NO: 3204147 - DNA, 25 bp, Homo sapien
tgtgcatactacatgaagcagtcta

SEQ ID NO: 3204148 - DNA, 25 bp, Homo sapien
tgtggccagctaatattcaagtctt

SEQ ID NO: 3204149 - DNA, 25 bp, Homo sapien
cctaggaggtgaaaaatcggtgcac

SEQ ID NO: 3204150 - DNA, 25 bp, Homo sapien
gcttaatattctttcgtcttctctc

SEQ ID NO: 3204151 - DNA, 25 bp, Homo sapien
ctttcaacaaattagaggtaaccat

SEQ ID NO: 3204152 - DNA, 25 bp, Homo sapien
tctttcaacaaattagaggtaacca

SEQ ID NO: 3204153 - DNA, 25 bp, Homo sapien
ctgcttaatattctttcgtcttctc

SEQ ID NO: 3204154 - DNA, 25 bp, Homo sapien
gattgctttcctgaagtgccctttt

SEQ ID NO: 3204155 - DNA, 25 bp, Homo sapien
tgctttcctgaagtgcccttttctc

SEQ ID NO: 3204156 - DNA, 25 bp, Homo sapien
ttagattgctttcctgaagtgccct

SEQ ID NO: 3204157 - DNA, 25 bp, Homo sapien
tagattgctttcctgaagtgccctt

SEQ ID NO: 3204158 - DNA, 25 bp, Homo sapien
agtcacaacccaccaggtcatgctg

SEQ ID NO: 3204159 - DNA, 25 bp, Homo sapien
atccagtcacaacccaccaggtcat

SEQ ID NO: 3204160 - DNA, 25 bp, Homo sapien
taaatccagtcacaacccaccaggt

SEQ ID NO: 3204161 - DNA, 25 bp, Homo sapien
ttaaatccagtcacaacccaccagg

SEQ ID NO: 3204162 - DNA, 25 bp, Homo sapien
tgccataccgtgtaactacctgaat

SEQ ID NO: 3204163 - DNA, 25 bp, Homo sapien
gggatttgccataccgtgtaactac

SEQ ID NO: 3204164 - DNA, 25 bp, Homo sapien
taccgtgtaactacctgaatggtct

SEQ ID NO: 3204165 - DNA, 25 bp, Homo sapien
cattgctcctgggatttgccatacc

SEQ ID NO: 3204166 - DNA, 25 bp, Homo sapien
tctactgtttgagcatattgaactc

SEQ ID NO: 3204167 - DNA, 25 bp, Homo sapien
ccccgcattacatggcagtccataa

SEQ ID NO: 3204168 - DNA, 25 bp, Homo sapien
agttcccaactgtctgatgtctcac

SEQ ID NO: 3204169 - DNA, 25 bp, Homo sapien
aactctcatctttttccgctaatag

SEQ ID NO: 3204170 - DNA, 25 bp, Homo sapien
ccctttccaacttctgattgtgtcc

SEQ ID NO: 3204171 - DNA, 25 bp, Homo sapien
agggatgtagtttatgcctttgaaa

SEQ ID NO: 3204172 - DNA, 25 bp, Homo sapien
tgtccaactgagagacgagcttgct

SEQ ID NO: 3204173 - DNA, 25 bp, Homo sapien
actgagagacgagcttgctttaggc

SEQ ID NO: 3204174 - DNA, 25 bp, Homo sapien
ctgagaaagaataaggagcaagtaa

SEQ ID NO: 3204175 - DNA, 25 bp, Homo sapien
agaaagaataaggagcaagtaaatc

SEQ ID NO: 3204176 - DNA, 25 bp, Homo sapien
gagaaagaataaggagcaagtaaat

SEQ ID NO: 3204177 - DNA, 25 bp, Homo sapien
tgagaaagaataaggagcaagtaaa

SEQ ID NO: 3204178 - DNA, 25 bp, Homo sapien
ccaggtaatccagtgctctatgcaa

SEQ ID NO: 3204179 - DNA, 25 bp, Homo sapien
gaccagatgcttcaccataagatta

SEQ ID NO: 3204180 - DNA, 25 bp, Homo sapien
gatgcaattgtaggatccaggtaat

SEQ ID NO: 3204181 - DNA, 25 bp, Homo sapien
aaggccccagaatgttgagtccatc

SEQ ID NO: 3204182 - DNA, 25 bp, Homo sapien
taatgtggtgtaccaatttactaca

SEQ ID NO: 3204183 - DNA, 25 bp, Homo sapien
tatttcctaccccaaatattctgcc

SEQ ID NO: 3204184 - DNA, 25 bp, Homo sapien
tctgcctgaaatttagaggccttca

SEQ ID NO: 3204185 - DNA, 25 bp, Homo sapien
gaggccttcagctaaataatataga

SEQ ID NO: 3204186 - DNA, 25 bp, Homo sapien
tcgacatgaaaagtgtaatgtgaat

SEQ ID NO: 3204187 - DNA, 25 bp, Homo sapien
tttcgacatgaaaagtgtaatgtga

SEQ ID NO: 3204188 - DNA, 25 bp, Homo sapien
acatgaaaagtgtaatgtgaatgca

SEQ ID NO: 3204189 - DNA, 25 bp, Homo sapien
gacatgaaaagtgtaatgtgaatgc

SEQ ID NO: 3204190 - DNA, 25 bp, Homo sapien
gaaaagcctctaattcagcagtcag

SEQ ID NO: 3204191 - DNA, 25 bp, Homo sapien
aaagcctctaattcagcagtcagcc

SEQ ID NO: 3204192 - DNA, 25 bp, Homo sapien
ttgaaaagcctctaattcagcagtc

SEQ ID NO: 3204193 - DNA, 25 bp, Homo sapien
cttttgaaaagcctctaattcagca

SEQ ID NO: 3204194 - DNA, 25 bp, Homo sapien
taatgattcaaggacagactgtctc

SEQ ID NO: 3204195 - DNA, 25 bp, Homo sapien
caaggacagactgtctccctctctg

SEQ ID NO: 3204196 - DNA, 25 bp, Homo sapien
taatagtaatgattcaaggacagac

SEQ ID NO: 3204197 - DNA, 25 bp, Homo sapien
tctggagctgcctatatccagggac

SEQ ID NO: 3204198 - DNA, 25 bp, Homo sapien
gcactgagaggaaactcagtggaaa

SEQ ID NO: 3204199 - DNA, 25 bp, Homo sapien
ctagaaactagaagcactgagagga

SEQ ID NO: 3204200 - DNA, 25 bp, Homo sapien
tagaagcactgagaggaaactcagt

SEQ ID NO: 3204201 - DNA, 25 bp, Homo sapien
gaaactagaagcactgagaggaaac

SEQ ID NO: 3204202 - DNA, 25 bp, Homo sapien
gtgaatccagtctcagcaattccaa

SEQ ID NO: 3204203 - DNA, 25 bp, Homo sapien
atgctttgtgaatccagtctcagca

SEQ ID NO: 3204204 - DNA, 25 bp, Homo sapien
aatccagtctcagcaattccaatca

SEQ ID NO: 3204205 - DNA, 25 bp, Homo sapien
gctttgtgaatccagtctcagcaat

SEQ ID NO: 3204206 - DNA, 25 bp, Homo sapien
tttgtctctactgaatgaagacttg

SEQ ID NO: 3204207 - DNA, 25 bp, Homo sapien
ttgtctctactgaatgaagacttgt

SEQ ID NO: 3204208 - DNA, 25 bp, Homo sapien
acatttgtctctactgaatgaagac

SEQ ID NO: 3204209 - DNA, 25 bp, Homo sapien
catttgtctctactgaatgaagact

SEQ ID NO: 3204210 - DNA, 25 bp, Homo sapien
tgtctgcggcaaaataggtaataca

SEQ ID NO: 3204211 - DNA, 25 bp, Homo sapien
acattcatatccatgccctcttcta

SEQ ID NO: 3204212 - DNA, 25 bp, Homo sapien
taacattcatatccatgccctcttc

SEQ ID NO: 3204213 - DNA, 25 bp, Homo sapien
tcctgtctgcggcaaaataggtaat

SEQ ID NO: 3204214 - DNA, 25 bp, Homo sapien
cacgtgaactcaacggacttctcat

SEQ ID NO: 3204215 - DNA, 25 bp, Homo sapien
ttggcagaaaattcacgtgaactca

SEQ ID NO: 3204216 - DNA, 25 bp, Homo sapien
ggcacaggtagaagacccattttat

SEQ ID NO: 3204217 - DNA, 25 bp, Homo sapien
ccattttatcctccagcctgaatga

SEQ ID NO: 3204218 - DNA, 25 bp, Homo sapien
tcctccaggttatcagggaatatca

SEQ ID NO: 3204219 - DNA, 25 bp, Homo sapien
caagatagtcaacttcctccaggtt

SEQ ID NO: 3204220 - DNA, 25 bp, Homo sapien
gctgcagtccatgatcccaacaaga

SEQ ID NO: 3204221 - DNA, 25 bp, Homo sapien
gggaatatcatgtctggcagaaggt

SEQ ID NO: 3204222 - DNA, 25 bp, Homo sapien
tgagtcatttcaatactgaagctct

SEQ ID NO: 3204223 - DNA, 25 bp, Homo sapien
ttatgagtcatttcaatactgaagc

SEQ ID NO: 3204224 - DNA, 25 bp, Homo sapien
tttatgagtcatttcaatactgaag

SEQ ID NO: 3204225 - DNA, 25 bp, Homo sapien
tatgagtcatttcaatactgaagct

SEQ ID NO: 3204226 - DNA, 25 bp, Homo sapien
tttttagcacaatgaagagaccaat

SEQ ID NO: 3204227 - DNA, 25 bp, Homo sapien
gccaaaagtatccattggtaccatt

SEQ ID NO: 3204228 - DNA, 25 bp, Homo sapien
ttcttaagccaaaagtatccattgg

SEQ ID NO: 3204229 - DNA, 25 bp, Homo sapien
tttctgccatcggataagaagggct

SEQ ID NO: 3204230 - DNA, 25 bp, Homo sapien
ctgaagcaggcatattttggccgct

SEQ ID NO: 3204231 - DNA, 25 bp, Homo sapien
atattttggccgcttatccctctgg

SEQ ID NO: 3204232 - DNA, 25 bp, Homo sapien
ttggccgcttatccctctggcttgg

SEQ ID NO: 3204233 - DNA, 25 bp, Homo sapien
caggcatattttggccgcttatccc

SEQ ID NO: 3204234 - DNA, 25 bp, Homo sapien
gatagctttcatccagtaacttgag

SEQ ID NO: 3204235 - DNA, 25 bp, Homo sapien
gctttcatccagtaacttgagtaga

SEQ ID NO: 3204236 - DNA, 25 bp, Homo sapien
gtaacttgagtagatctgctgccat

SEQ ID NO: 3204237 - DNA, 25 bp, Homo sapien
gtgatagctttcatccagtaacttg

SEQ ID NO: 3204238 - DNA, 25 bp, Homo sapien
ccctgatctaggactggtgactgga

SEQ ID NO: 3204239 - DNA, 25 bp, Homo sapien
gaactggaactgcagacagcacctg

SEQ ID NO: 3204240 - DNA, 25 bp, Homo sapien
gagaaggtctctctaccagagatcc

SEQ ID NO: 3204241 - DNA, 25 bp, Homo sapien
aaggagaagtcgtgctgccagagcc

SEQ ID NO: 3204242 - DNA, 25 bp, Homo sapien
tttcccaactgcaggcttatgtaag

SEQ ID NO: 3204243 - DNA, 25 bp, Homo sapien
tcactttcatgcaagattcaataaa

SEQ ID NO: 3204244 - DNA, 25 bp, Homo sapien
tataaaatagcctctatgttagatg

SEQ ID NO: 3204245 - DNA, 25 bp, Homo sapien
actgctacagatggcccaagactta

SEQ ID NO: 3204246 - DNA, 25 bp, Homo sapien
atctgctgccccatgaaaccttgag

SEQ ID NO: 3204247 - DNA, 25 bp, Homo sapien
taccatttggaagataccatcccag

SEQ ID NO: 3204248 - DNA, 25 bp, Homo sapien
tgaacaatcccacccttagtgaagt

SEQ ID NO: 3204249 - DNA, 25 bp, Homo sapien
taatatctaaggaccaaacagtggc

SEQ ID NO: 3204250 - DNA, 25 bp, Homo sapien
tcctgcttaagatcccagtggtcag

SEQ ID NO: 3204251 - DNA, 25 bp, Homo sapien
gaatgcagttactatcaggaaattg

SEQ ID NO: 3204252 - DNA, 25 bp, Homo sapien
gtgtccttccagttttaagagcaag

SEQ ID NO: 3204253 - DNA, 25 bp, Homo sapien
gcagttactatcaggaaattgcttt

SEQ ID NO: 3204254 - DNA, 25 bp, Homo sapien
ttttcctcacaataaactgtgtcct

SEQ ID NO: 3204255 - DNA, 25 bp, Homo sapien
ttcatcaaggcagtttttatctgaa

SEQ ID NO: 3204256 - DNA, 25 bp, Homo sapien
tttttatctgaatgaaatggagatt

SEQ ID NO: 3204257 - DNA, 25 bp, Homo sapien
catccccttcatcaaggcagttttt

SEQ ID NO: 3204258 - DNA, 25 bp, Homo sapien
ccttcatcaaggcagtttttatctg

SEQ ID NO: 3204259 - DNA, 25 bp, Homo sapien
ctccagagttgagcctcattcccat

SEQ ID NO: 3204260 - DNA, 25 bp, Homo sapien
tcatctcaaccagttggtggtttct

SEQ ID NO: 3204261 - DNA, 25 bp, Homo sapien
taatctgagacagtcacctgaaaat

SEQ ID NO: 3204262 - DNA, 25 bp, Homo sapien
tctgaaaatcatgtcgaataatctg

SEQ ID NO: 3204263 - DNA, 25 bp, Homo sapien
taaattcctggagacttccctctga

SEQ ID NO: 3204264 - DNA, 25 bp, Homo sapien
gaacacatttgtacttcgtttagat

SEQ ID NO: 3204265 - DNA, 25 bp, Homo sapien
ctgagaacacatttgtacttcgttt

SEQ ID NO: 3204266 - DNA, 25 bp, Homo sapien
atttgtacttcgtttagatctctgg

SEQ ID NO: 3204267 - DNA, 25 bp, Homo sapien
tacttcgtttagatctctggtttcc

SEQ ID NO: 3204268 - DNA, 25 bp, Homo sapien
cttttcaggatctaaagctatactc

SEQ ID NO: 3204269 - DNA, 25 bp, Homo sapien
tttcaggatctaaagctatactcca

SEQ ID NO: 3204270 - DNA, 25 bp, Homo sapien
ttttcaggatctaaagctatactcc

SEQ ID NO: 3204271 - DNA, 25 bp, Homo sapien
ttcaggatctaaagctatactccat

SEQ ID NO: 3204272 - DNA, 25 bp, Homo sapien
aattcatggatagccgccattgaga

SEQ ID NO: 3204273 - DNA, 25 bp, Homo sapien
ttaaaattcatggatagccgccatt

SEQ ID NO: 3204274 - DNA, 25 bp, Homo sapien
taaaattcatggatagccgccattg

SEQ ID NO: 3204275 - DNA, 25 bp, Homo sapien
tcctttagcagttttactgtttatc

SEQ ID NO: 3204276 - DNA, 25 bp, Homo sapien
tttctatgtgccctggtagcggaag

SEQ ID NO: 3204277 - DNA, 25 bp, Homo sapien
cagtggccacagcaagctcaagaag

SEQ ID NO: 3204278 - DNA, 25 bp, Homo sapien
gaagacaaaggacacaatcccctgg

SEQ ID NO: 3204279 - DNA, 25 bp, Homo sapien
cctgtgtcatatagcagaggcagtc

SEQ ID NO: 3204280 - DNA, 25 bp, Homo sapien
taggctggactaacttgcaactccc

SEQ ID NO: 3204281 - DNA, 25 bp, Homo sapien
gacactttgaaggaagctacttacc

SEQ ID NO: 3204282 - DNA, 25 bp, Homo sapien
tacctctgcaggctttgtgagacag

SEQ ID NO: 3204283 - DNA, 25 bp, Homo sapien
gctgaacagagcaacatatggaggc

SEQ ID NO: 3204284 - DNA, 25 bp, Homo sapien
tgaacagatcaaatcttgctcccct

SEQ ID NO: 3204285 - DNA, 25 bp, Homo sapien
catattataccaagagtcagtcctc

SEQ ID NO: 3204286 - DNA, 25 bp, Homo sapien
ccctccactagcattacatttttct

SEQ ID NO: 3204287 - DNA, 25 bp, Homo sapien
tgcttctgctcctcccatattatac

SEQ ID NO: 3204288 - DNA, 25 bp, Homo sapien
gctagacctgatagtgggaccctct

SEQ ID NO: 3204289 - DNA, 25 bp, Homo sapien
gaagtcgtttccattcagttcgtgg

SEQ ID NO: 3204290 - DNA, 25 bp, Homo sapien
caggctgatagagagtttccgattt

SEQ ID NO: 3204291 - DNA, 25 bp, Homo sapien
tgtggttacctaacatttgcaaggg

SEQ ID NO: 3204292 - DNA, 25 bp, Homo sapien
gcctgtaacctagaaacagatttca

SEQ ID NO: 3204293 - DNA, 25 bp, Homo sapien
ctgtaacctagaaacagatttcatc

SEQ ID NO: 3204294 - DNA, 25 bp, Homo sapien
ctgcctgtaacctagaaacagattt

SEQ ID NO: 3204295 - DNA, 25 bp, Homo sapien
gtaacctagaaacagatttcatcat

SEQ ID NO: 3204296 - DNA, 25 bp, Homo sapien
tatatgaatgtttgctgctggttta

SEQ ID NO: 3204297 - DNA, 25 bp, Homo sapien
aattgtatttgtagatgtccagtaa

SEQ ID NO: 3204298 - DNA, 25 bp, Homo sapien
tgtagatgtccagtaatttcctgga

SEQ ID NO: 3204299 - DNA, 25 bp, Homo sapien
gacaaactgtcttgttaattgtatt

SEQ ID NO: 3204300 - DNA, 25 bp, Homo sapien
tatctgtgctctaattgtctggtgc

SEQ ID NO: 3204301 - DNA, 25 bp, Homo sapien
tctaattgtctggtgctcttgctca

SEQ ID NO: 3204302 - DNA, 25 bp, Homo sapien
gggtccagttcactagccttactag

SEQ ID NO: 3204303 - DNA, 25 bp, Homo sapien
agttcactagccttactagaatatc

SEQ ID NO: 3204304 - DNA, 25 bp, Homo sapien
tgtaggcacaagcataccaaagcaa

SEQ ID NO: 3204305 - DNA, 25 bp, Homo sapien
tgctgtaggcacaagcataccaaag

SEQ ID NO: 3204306 - DNA, 25 bp, Homo sapien
aagcatgttattggatgcatccttg

SEQ ID NO: 3204307 - DNA, 25 bp, Homo sapien
catccttgctgtaggcacaagcata

SEQ ID NO: 3204308 - DNA, 25 bp, Homo sapien
ctgggtttaattctaaacagcaagt

SEQ ID NO: 3204309 - DNA, 25 bp, Homo sapien
tcagctgggtttaattctaaacagc

SEQ ID NO: 3204310 - DNA, 25 bp, Homo sapien
ggtttaattctaaacagcaagtcat

SEQ ID NO: 3204311 - DNA, 25 bp, Homo sapien
gggtttaattctaaacagcaagtca

SEQ ID NO: 3204312 - DNA, 25 bp, Homo sapien
tgtctccctcaagaggatgcatggc

SEQ ID NO: 3204313 - DNA, 25 bp, Homo sapien
ctccctcaagaggatgcatggccat

SEQ ID NO: 3204314 - DNA, 25 bp, Homo sapien
tctccctcaagaggatgcatggcca

SEQ ID NO: 3204315 - DNA, 25 bp, Homo sapien
ttctgtctccctcaagaggatgcat

SEQ ID NO: 3204316 - DNA, 25 bp, Homo sapien
cattgaaccaaggactctagtagtg

SEQ ID NO: 3204317 - DNA, 25 bp, Homo sapien
gcttacattgaaccaaggactctag

SEQ ID NO: 3204318 - DNA, 25 bp, Homo sapien
gatgcttacattgaaccaaggactc

SEQ ID NO: 3204319 - DNA, 25 bp, Homo sapien
gaaccaaggactctagtagtgacca

SEQ ID NO: 3204320 - DNA, 25 bp, Homo sapien
aagggatccgttatatttcaaagct

SEQ ID NO: 3204321 - DNA, 25 bp, Homo sapien
gaagggatccgttatatttcaaagc

SEQ ID NO: 3204322 - DNA, 25 bp, Homo sapien
tgggaagggatccgttatatttcaa

SEQ ID NO: 3204323 - DNA, 25 bp, Homo sapien
tgtattatttgcactctctgttctt

SEQ ID NO: 3204324 - DNA, 25 bp, Homo sapien
ttgtattatttgcactctctgttct

SEQ ID NO: 3204325 - DNA, 25 bp, Homo sapien
cagcatccatattctattccgatga

SEQ ID NO: 3204326 - DNA, 25 bp, Homo sapien
ctattccgatgatgaatagaagcat

SEQ ID NO: 3204327 - DNA, 25 bp, Homo sapien
aagtgttgtcaattgtcagcatcca

SEQ ID NO: 3204328 - DNA, 25 bp, Homo sapien
gcagttggggtcgtaatgagcatca

SEQ ID NO: 3204329 - DNA, 25 bp, Homo sapien
aggtctgctcctggtgaactccaaa

SEQ ID NO: 3204330 - DNA, 25 bp, Homo sapien
gaggtctgctcctggtgaactccaa

SEQ ID NO: 3204331 - DNA, 25 bp, Homo sapien
tgttgaattctaacttgtgcaggag

SEQ ID NO: 3204332 - DNA, 25 bp, Homo sapien
gtaaagccagtatggctgacagcca

SEQ ID NO: 3204333 - DNA, 25 bp, Homo sapien
taaagccagtatggctgacagccat

SEQ ID NO: 3204334 - DNA, 25 bp, Homo sapien
aaacagtaaagccagtatggctgac

SEQ ID NO: 3204335 - DNA, 25 bp, Homo sapien
cagtaaagccagtatggctgacagc

SEQ ID NO: 3204336 - DNA, 25 bp, Homo sapien
gggagtagtttgcatcctctgtcca

SEQ ID NO: 3204337 - DNA, 25 bp, Homo sapien
agggagtagtttgcatcctctgtcc

SEQ ID NO: 3204338 - DNA, 25 bp, Homo sapien
accagatacatttcagaaaagccac

SEQ ID NO: 3204339 - DNA, 25 bp, Homo sapien
tctctcttttctaccagatacattt

SEQ ID NO: 3204340 - DNA, 25 bp, Homo sapien
cctgacatgcttgtttttcggatgg

SEQ ID NO: 3204341 - DNA, 25 bp, Homo sapien
ccaaaggtatctagcaagcaagtgc

SEQ ID NO: 3204342 - DNA, 25 bp, Homo sapien
caggtgatccaaagttggcctggtc

SEQ ID NO: 3204343 - DNA, 25 bp, Homo sapien
gttcattttacagaggcacattttc

SEQ ID NO: 3204344 - DNA, 25 bp, Homo sapien
tctggaaaaatcaccaaagggttgc

SEQ ID NO: 3204345 - DNA, 25 bp, Homo sapien
ctctggaaaaatcaccaaagggttg

SEQ ID NO: 3204346 - DNA, 25 bp, Homo sapien
gaaaaatcaccaaagggttgcctca

SEQ ID NO: 3204347 - DNA, 25 bp, Homo sapien
aaaaatcaccaaagggttgcctcat

SEQ ID NO: 3204348 - DNA, 25 bp, Homo sapien
caatcctggattgtaccccattcac

SEQ ID NO: 3204349 - DNA, 25 bp, Homo sapien
catgtaggcaatgatagagctaacg

SEQ ID NO: 3204350 - DNA, 25 bp, Homo sapien
cggaaggattccagtcaatcctgga

SEQ ID NO: 3204351 - DNA, 25 bp, Homo sapien
agacattccaatgtctcattcctgg

SEQ ID NO: 3204352 - DNA, 25 bp, Homo sapien
caaactttaagaggaagtgatggga

SEQ ID NO: 3204353 - DNA, 25 bp, Homo sapien
aagcaaactttaagaggaagtgatg

SEQ ID NO: 3204354 - DNA, 25 bp, Homo sapien
gcaaactttaagaggaagtgatggg

SEQ ID NO: 3204355 - DNA, 25 bp, Homo sapien
agcaaactttaagaggaagtgatgg

SEQ ID NO: 3204356 - DNA, 25 bp, Homo sapien
aggtagtgcattcattgacaaaagt

SEQ ID NO: 3204357 - DNA, 25 bp, Homo sapien
aaagttttattcagggctagagatg

SEQ ID NO: 3204358 - DNA, 25 bp, Homo sapien
tttattcagggctagagatggtgtc

SEQ ID NO: 3204359 - DNA, 25 bp, Homo sapien
tagtgcattcattgacaaaagtttt

SEQ ID NO: 3204360 - DNA, 25 bp, Homo sapien
ttaaggtcagaggattgcaatgttc

SEQ ID NO: 3204361 - DNA, 25 bp, Homo sapien
aaggtcagaggattgcaatgttcta

SEQ ID NO: 3204362 - DNA, 25 bp, Homo sapien
tcagaggattgcaatgttctatatt

SEQ ID NO: 3204363 - DNA, 25 bp, Homo sapien
ggtcagaggattgcaatgttctata

SEQ ID NO: 3204364 - DNA, 25 bp, Homo sapien
ctgtagcattggcagggataggttt

SEQ ID NO: 3204365 - DNA, 25 bp, Homo sapien
ttccaagtgtaaacaagataaaaga

SEQ ID NO: 3204366 - DNA, 25 bp, Homo sapien
cttccaagtgtaaacaagataaaag

SEQ ID NO: 3204367 - DNA, 25 bp, Homo sapien
cattggcagggataggttttatgaa

SEQ ID NO: 3204368 - DNA, 25 bp, Homo sapien
agtttgggccgcagtagcaccttta

SEQ ID NO: 3204369 - DNA, 25 bp, Homo sapien
tgtaatacgtgaactccgctgcgag

SEQ ID NO: 3204370 - DNA, 25 bp, Homo sapien
cctttagatgttccacggtgttccg

SEQ ID NO: 3204371 - DNA, 25 bp, Homo sapien
cagcggaacgatctgcacatggcac

SEQ ID NO: 3204372 - DNA, 25 bp, Homo sapien
ggtggtcgtgggagaaagcacaggg

SEQ ID NO: 3204373 - DNA, 25 bp, Homo sapien
ctgtccggtggtcgtgggagaaagc

SEQ ID NO: 3204374 - DNA, 25 bp, Homo sapien
tccggtggtcgtgggagaaagcaca

SEQ ID NO: 3204375 - DNA, 25 bp, Homo sapien
tgtccggtggtcgtgggagaaagca

SEQ ID NO: 3204376 - DNA, 25 bp, Homo sapien
accctcagcttgaggggatagtgaa

SEQ ID NO: 3204377 - DNA, 25 bp, Homo sapien
tcagcttgaggggatagtgaacgtt

SEQ ID NO: 3204378 - DNA, 25 bp, Homo sapien
gatagtgaacgttgagcgactggca

SEQ ID NO: 3204379 - DNA, 25 bp, Homo sapien
gggatagtgaacgttgagcgactgg

SEQ ID NO: 3204380 - DNA, 25 bp, Homo sapien
gcactgagggcctccagtttctcca

SEQ ID NO: 3204381 - DNA, 25 bp, Homo sapien
tctctgagtccagcgcgtaggtgcc

SEQ ID NO: 3204382 - DNA, 25 bp, Homo sapien
gtaggtgccctcactggctttcccc

SEQ ID NO: 3204383 - DNA, 25 bp, Homo sapien
gagggcctccagtttctccactggg

SEQ ID NO: 3204384 - DNA, 25 bp, Homo sapien
cggcctcttcctctgtgataggcac

SEQ ID NO: 3204385 - DNA, 25 bp, Homo sapien
tcggcctcttcctctgtgataggca

SEQ ID NO: 3204386 - DNA, 25 bp, Homo sapien
ctcggcctcttcctctgtgataggc

SEQ ID NO: 3204387 - DNA, 25 bp, Homo sapien
tccccattggcgggaaactcatcca

SEQ ID NO: 3204388 - DNA, 25 bp, Homo sapien
actccccattggcgggaaactcatc

SEQ ID NO: 3204389 - DNA, 25 bp, Homo sapien
caactccccattggcgggaaactca

SEQ ID NO: 3204390 - DNA, 25 bp, Homo sapien
ccccattggcgggaaactcatccac

SEQ ID NO: 3204391 - DNA, 25 bp, Homo sapien
agccctcaaaaagcttcttgtgctt

SEQ ID NO: 3204392 - DNA, 25 bp, Homo sapien
ttcaagccctcaaaaagcttcttgt

SEQ ID NO: 3204393 - DNA, 25 bp, Homo sapien
caagccctcaaaaagcttcttgtgc

SEQ ID NO: 3204394 - DNA, 25 bp, Homo sapien
ttgtgcttctcctgcgcctccagct

SEQ ID NO: 3204395 - DNA, 25 bp, Homo sapien
taggtgggacccatgcacaaaggct

SEQ ID NO: 3204396 - DNA, 25 bp, Homo sapien
gcataggtgggacccatgcacaaag

SEQ ID NO: 3204397 - DNA, 25 bp, Homo sapien
ggtgggacccatgcacaaaggcttt

SEQ ID NO: 3204398 - DNA, 25 bp, Homo sapien
ttcccaggatatgtccccccccgca

SEQ ID NO: 3204399 - DNA, 25 bp, Homo sapien
tagcgttcacggagtcaaacaacca

SEQ ID NO: 3204400 - DNA, 25 bp, Homo sapien
ccagggaagtgcagtctagcgttca

SEQ ID NO: 3204401 - DNA, 25 bp, Homo sapien
gggaagtactctgctccagggaagt

SEQ ID NO: 3204402 - DNA, 25 bp, Homo sapien
cacgtagtgtctgccaataactgag

SEQ ID NO: 3204403 - DNA, 25 bp, Homo sapien
gtcctctccccgctgcagagccaga

SEQ ID NO: 3204404 - DNA, 25 bp, Homo sapien
tcctctccccgctgcagagccagaa

SEQ ID NO: 3204405 - DNA, 25 bp, Homo sapien
gactcattcaagtttcctgggtcct

SEQ ID NO: 3204406 - DNA, 25 bp, Homo sapien
ctcctcttctgactcattcaagttt

SEQ ID NO: 3204407 - DNA, 25 bp, Homo sapien
gcttcttcccctccgttctctgctc

SEQ ID NO: 3204408 - DNA, 25 bp, Homo sapien
cgtgtcctgctatcaccctgggctt

SEQ ID NO: 3204409 - DNA, 25 bp, Homo sapien
tctccagcttctcgtgtcctgctat

SEQ ID NO: 3204410 - DNA, 25 bp, Homo sapien
tccggtgctgccagccaggcctttt

SEQ ID NO: 3204411 - DNA, 25 bp, Homo sapien
atgatcttctggtacaggtacttct

SEQ ID NO: 3204412 - DNA, 25 bp, Homo sapien
gatcttctggtacaggtacttctcc

SEQ ID NO: 3204413 - DNA, 25 bp, Homo sapien
tgatcttctggtacaggtacttctc

SEQ ID NO: 3204414 - DNA, 25 bp, Homo sapien
ctactctggtagctttttggcctct

SEQ ID NO: 3204415 - DNA, 25 bp, Homo sapien
tctggtagctttttggcctcttggc

SEQ ID NO: 3204416 - DNA, 25 bp, Homo sapien
actctggtagctttttggcctcttg

SEQ ID NO: 3204417 - DNA, 25 bp, Homo sapien
tcttggctttttcgccttttgtcaa

SEQ ID NO: 3204418 - DNA, 25 bp, Homo sapien
tcttacactgaagacagcacactat

SEQ ID NO: 3204419 - DNA, 25 bp, Homo sapien
ctgaagacagcacactatttttctt

SEQ ID NO: 3204420 - DNA, 25 bp, Homo sapien
acactgaagacagcacactattttt

SEQ ID NO: 3204421 - DNA, 25 bp, Homo sapien
cttcttacactgaagacagcacact

SEQ ID NO: 3204422 - DNA, 25 bp, Homo sapien
gttctttgtatggatgtcctgtctg

SEQ ID NO: 3204423 - DNA, 25 bp, Homo sapien
ccatttgttctttgtatggatgtcc

SEQ ID NO: 3204424 - DNA, 25 bp, Homo sapien
ggtgacccagttactttcttgcttc

SEQ ID NO: 3204425 - DNA, 25 bp, Homo sapien
gcagaagcggaagcttggtgaccca

SEQ ID NO: 3204426 - DNA, 25 bp, Homo sapien
agcactccaaaagccaggttcttac

SEQ ID NO: 3204427 - DNA, 25 bp, Homo sapien
tcatgataagcactccaaaagccag

SEQ ID NO: 3204428 - DNA, 25 bp, Homo sapien
tgataagcactccaaaagccaggtt

SEQ ID NO: 3204429 - DNA, 25 bp, Homo sapien
taagcactccaaaagccaggttctt

SEQ ID NO: 3204430 - DNA, 25 bp, Homo sapien
atctaatactgtgttacatagctct

SEQ ID NO: 3204431 - DNA, 25 bp, Homo sapien
tacatagctcttgaatctgactggg

SEQ ID NO: 3204432 - DNA, 25 bp, Homo sapien
tcttttgttcttaagcacatgttct

SEQ ID NO: 3204433 - DNA, 25 bp, Homo sapien
ctgggttgggcaaatcttttgttct

SEQ ID NO: 3204434 - DNA, 25 bp, Homo sapien
cagtaggcaattcttcatctcattg

SEQ ID NO: 3204435 - DNA, 25 bp, Homo sapien
cagggtgataaacagtaggcaattc

SEQ ID NO: 3204436 - DNA, 25 bp, Homo sapien
agaaagactgggtcagggtgataaa

SEQ ID NO: 3204437 - DNA, 25 bp, Homo sapien
ggtcagggtgataaacagtaggcaa

SEQ ID NO: 3204438 - DNA, 25 bp, Homo sapien
cctggtatccggatgagctgtcctg

SEQ ID NO: 3204439 - DNA, 25 bp, Homo sapien
caaacctggtatccggatgagctgt

SEQ ID NO: 3204440 - DNA, 25 bp, Homo sapien
catccccaaacctggtatccggatg

SEQ ID NO: 3204441 - DNA, 25 bp, Homo sapien
ggtatccggatgagctgtcctgctt

SEQ ID NO: 3204442 - DNA, 25 bp, Homo sapien
ggaggcatctgctcatcaggaagct

SEQ ID NO: 3204443 - DNA, 25 bp, Homo sapien
taccagacgttgatctgctgatgcc

SEQ ID NO: 3204444 - DNA, 25 bp, Homo sapien
caggaagctgactcttaccagacgt

SEQ ID NO: 3204445 - DNA, 25 bp, Homo sapien
tagcacccttataggaagtgacagg

SEQ ID NO: 3204446 - DNA, 25 bp, Homo sapien
taatattttcttggagtaggaccta

SEQ ID NO: 3204447 - DNA, 25 bp, Homo sapien
gagtaggacctagtacaaactgcca

SEQ ID NO: 3204448 - DNA, 25 bp, Homo sapien
caaacactgatggtcaacttcataa

SEQ ID NO: 3204449 - DNA, 25 bp, Homo sapien
ggctttgttgaactccagtcctcca

SEQ ID NO: 3204450 - DNA, 25 bp, Homo sapien
cttcttccaacactgctttcatgtt

SEQ ID NO: 3204451 - DNA, 25 bp, Homo sapien
ttccaacactgctttcatgttaatg

SEQ ID NO: 3204452 - DNA, 25 bp, Homo sapien
tttatgtcttattcttccacgttcc

SEQ ID NO: 3204453 - DNA, 25 bp, Homo sapien
tcttattcttccacgttcctgtctt

SEQ ID NO: 3204454 - DNA, 25 bp, Homo sapien
gatatcttaatggcagcaactgctg

SEQ ID NO: 3204455 - DNA, 25 bp, Homo sapien
tgatatcttaatggcagcaactgct

SEQ ID NO: 3204456 - DNA, 25 bp, Homo sapien
ctgatatcttaatggcagcaactgc

SEQ ID NO: 3204457 - DNA, 25 bp, Homo sapien
atgtctgtccctttttcatagtgag

SEQ ID NO: 3204458 - DNA, 25 bp, Homo sapien
tgatgtctgtccctttttcatagtg

SEQ ID NO: 3204459 - DNA, 25 bp, Homo sapien
gatgtctgtccctttttcatagtga

SEQ ID NO: 3204460 - DNA, 25 bp, Homo sapien
caacacaacagatcagctcttgcat

SEQ ID NO: 3204461 - DNA, 25 bp, Homo sapien
ggtctcaacacaacagatcagctct

SEQ ID NO: 3204462 - DNA, 25 bp, Homo sapien
tcttttcggtctcaacacaacagat

SEQ ID NO: 3204463 - DNA, 25 bp, Homo sapien
tcctgtgttcttttcggtctcaaca

SEQ ID NO: 3204464 - DNA, 25 bp, Homo sapien
cagacaagtagaagcgtctcttcaa

SEQ ID NO: 3204465 - DNA, 25 bp, Homo sapien
acaagtagaagcgtctcttcaaaag

SEQ ID NO: 3204466 - DNA, 25 bp, Homo sapien
aagtagaagcgtctcttcaaaaggt

SEQ ID NO: 3204467 - DNA, 25 bp, Homo sapien
agacaagtagaagcgtctcttcaaa

SEQ ID NO: 3204468 - DNA, 25 bp, Homo sapien
aaatctcctcaaagagcaacttttc

SEQ ID NO: 3204469 - DNA, 25 bp, Homo sapien
tcaaatctcctcaaagagcaacttt

SEQ ID NO: 3204470 - DNA, 25 bp, Homo sapien
caaatctcctcaaagagcaactttt

SEQ ID NO: 3204471 - DNA, 25 bp, Homo sapien
tccctgtagagttgggtaaaggcca

SEQ ID NO: 3204472 - DNA, 25 bp, Homo sapien
ttgaaggaatccctgtagagttggg

SEQ ID NO: 3204473 - DNA, 25 bp, Homo sapien
ccttgaaggaatccctgtagagttg

SEQ ID NO: 3204474 - DNA, 25 bp, Homo sapien
gaaggaatccctgtagagttgggta

SEQ ID NO: 3204475 - DNA, 25 bp, Homo sapien
ttattagtgagatatattaaatcca

SEQ ID NO: 3204476 - DNA, 25 bp, Homo sapien
cttcaaaatcagctgtgtacattat

SEQ ID NO: 3204477 - DNA, 25 bp, Homo sapien
tattcaatagtcacttgtggctggt

SEQ ID NO: 3204478 - DNA, 25 bp, Homo sapien
ttgagcatctcagctctataaaaca

SEQ ID NO: 3204479 - DNA, 25 bp, Homo sapien
aaagactactggtttgatgtgctta

SEQ ID NO: 3204480 - DNA, 25 bp, Homo sapien
tactggtttgatgtgcttaactagc

SEQ ID NO: 3204481 - DNA, 25 bp, Homo sapien
ccgcctctgcagcatgtgtaatgat

SEQ ID NO: 3204482 - DNA, 25 bp, Homo sapien
ctgcagcatgtgtaatgattaattc

SEQ ID NO: 3204483 - DNA, 25 bp, Homo sapien
gaatgatagatatgagcttgccaat

SEQ ID NO: 3204484 - DNA, 25 bp, Homo sapien
tgagcttgccaattggataagggaa

SEQ ID NO: 3204485 - DNA, 25 bp, Homo sapien
ttgaatgatagatatgagcttgcca

SEQ ID NO: 3204486 - DNA, 25 bp, Homo sapien
agcttgccaattggataagggaaga

SEQ ID NO: 3204487 - DNA, 25 bp, Homo sapien
ataggcagtaatggaatttaccaag

SEQ ID NO: 3204488 - DNA, 25 bp, Homo sapien
cataggcagtaatggaatttaccaa

SEQ ID NO: 3204489 - DNA, 25 bp, Homo sapien
gacacttaagtctgtctgttgccta

SEQ ID NO: 3204490 - DNA, 25 bp, Homo sapien
ggttgtcattgctataatggcacat

SEQ ID NO: 3204491 - DNA, 25 bp, Homo sapien
aagtgattgtaaacaccttccagcc

SEQ ID NO: 3204492 - DNA, 25 bp, Homo sapien
tacctgacacattcgagctgaccaa

SEQ ID NO: 3204493 - DNA, 25 bp, Homo sapien
gatgttggtcaacacccagcaaact

SEQ ID NO: 3204494 - DNA, 25 bp, Homo sapien
cagtttgatgttggtcaacacccag

SEQ ID NO: 3204495 - DNA, 25 bp, Homo sapien
agcagtttgatgttggtcaacaccc

SEQ ID NO: 3204496 - DNA, 25 bp, Homo sapien
gtttgatgttggtcaacacccagca

SEQ ID NO: 3204497 - DNA, 25 bp, Homo sapien
atggaatactcaagaagagattcac

SEQ ID NO: 3204498 - DNA, 25 bp, Homo sapien
gcaggggcagcagtatggaatactc

SEQ ID NO: 3204499 - DNA, 25 bp, Homo sapien
ccccaagtgaatagcaggggcagca

SEQ ID NO: 3204500 - DNA, 25 bp, Homo sapien
cagcagtatggaatactcaagaaga

SEQ ID NO: 3204501 - DNA, 25 bp, Homo sapien
cacgactctcacaatagatgacaaa

SEQ ID NO: 3204502 - DNA, 25 bp, Homo sapien
gcatctttggcagatttgttccttc

SEQ ID NO: 3204503 - DNA, 25 bp, Homo sapien
aaaggtaacaactaactgtgaagca

SEQ ID NO: 3204504 - DNA, 25 bp, Homo sapien
tgtggaaggtgatatcacgactctc

SEQ ID NO: 3204505 - DNA, 25 bp, Homo sapien
aagctggcatcacttaactgtttat

SEQ ID NO: 3204506 - DNA, 25 bp, Homo sapien
acattagagctaccccttacctctt

SEQ ID NO: 3204507 - DNA, 25 bp, Homo sapien
tctgatggcatcaacagaaagctgg

SEQ ID NO: 3204508 - DNA, 25 bp, Homo sapien
gagacagagtctttattacataggt

SEQ ID NO: 3204509 - DNA, 25 bp, Homo sapien
tatcatagtatactccttggcaggc

SEQ ID NO: 3204510 - DNA, 25 bp, Homo sapien
tatttaggccatagaaggttaccaa

SEQ ID NO: 3204511 - DNA, 25 bp, Homo sapien
tctatacaggtgttaaagggcttaa

SEQ ID NO: 3204512 - DNA, 25 bp, Homo sapien
gaaaatacctctagaacattacagt

SEQ ID NO: 3204513 - DNA, 25 bp, Homo sapien
tggaataacttctggacatgtgcag

SEQ ID NO: 3204514 - DNA, 25 bp, Homo sapien
gaataacttctggacatgtgcagtt

SEQ ID NO: 3204515 - DNA, 25 bp, Homo sapien
taataagccataactggcagcccca

SEQ ID NO: 3204516 - DNA, 25 bp, Homo sapien
cagccctccctataataagccataa

SEQ ID NO: 3204517 - DNA, 25 bp, Homo sapien
tttgggctcggtccaaagctggcat

SEQ ID NO: 3204518 - DNA, 25 bp, Homo sapien
aatgattgtccaagtagggtcggca

SEQ ID NO: 3204519 - DNA, 25 bp, Homo sapien
tagggtcggcacttctttgggctcg

SEQ ID NO: 3204520 - DNA, 25 bp, Homo sapien
cggcacttctttgggctcggtccaa

SEQ ID NO: 3204521 - DNA, 25 bp, Homo sapien
aaatctgaatagagactgggcaata

SEQ ID NO: 3204522 - DNA, 25 bp, Homo sapien
caatagcgactggaggttgtaaaga

SEQ ID NO: 3204523 - DNA, 25 bp, Homo sapien
tagagactgggcaatagcgactgga

SEQ ID NO: 3204524 - DNA, 25 bp, Homo sapien
ggcaatagcgactggaggttgtaaa

SEQ ID NO: 3204525 - DNA, 25 bp, Homo sapien
ataatcagaaagtcaatatactgaa

SEQ ID NO: 3204526 - DNA, 25 bp, Homo sapien
ttataatcagaaagtcaatatactg

SEQ ID NO: 3204527 - DNA, 25 bp, Homo sapien
tataatcagaaagtcaatatactga

SEQ ID NO: 3204528 - DNA, 25 bp, Homo sapien
cttcctcttcctttgactccatcat

SEQ ID NO: 3204529 - DNA, 25 bp, Homo sapien
tcataatgcttcatttgtaccatgc

SEQ ID NO: 3204530 - DNA, 25 bp, Homo sapien
tgtaccatgctgtaattggcactta

SEQ ID NO: 3204531 - DNA, 25 bp, Homo sapien
tcctttctctgagagcccattagaa

SEQ ID NO: 3204532 - DNA, 25 bp, Homo sapien
tacaattatgccaaaacacgatgat

SEQ ID NO: 3204533 - DNA, 25 bp, Homo sapien
tgttgctctgaagttgttggataag

SEQ ID NO: 3204534 - DNA, 25 bp, Homo sapien
ggacaggaacacaatgttgctctga

SEQ ID NO: 3204535 - DNA, 25 bp, Homo sapien
tctgaagttgttggataagtttatc

SEQ ID NO: 3204536 - DNA, 25 bp, Homo sapien
caatgttgctctgaagttgttggat

SEQ ID NO: 3204537 - DNA, 25 bp, Homo sapien
ccatcaatcgtcagactgaagaagc

SEQ ID NO: 3204538 - DNA, 25 bp, Homo sapien
attagctgaggatttcccaaaattg

SEQ ID NO: 3204539 - DNA, 25 bp, Homo sapien
tactatgtgtgttattagctgagga

SEQ ID NO: 3204540 - DNA, 25 bp, Homo sapien
attgttgtaagccatcaatcgtcag

SEQ ID NO: 3204541 - DNA, 25 bp, Homo sapien
gaagcgacctatgcagaagttttaa

SEQ ID NO: 3204542 - DNA, 25 bp, Homo sapien
tcttggaagcgacctatgcagaagt

SEQ ID NO: 3204543 - DNA, 25 bp, Homo sapien
tggaagcgacctatgcagaagtttt

SEQ ID NO: 3204544 - DNA, 25 bp, Homo sapien
catcttggaagcgacctatgcagaa

SEQ ID NO: 3204545 - DNA, 25 bp, Homo sapien
gacttaaatatagtttctattacca

SEQ ID NO: 3204546 - DNA, 25 bp, Homo sapien
tagacttaaatatagtttctattac

SEQ ID NO: 3204547 - DNA, 25 bp, Homo sapien
gctctccatatgtcttgaattctct

SEQ ID NO: 3204548 - DNA, 25 bp, Homo sapien
acattgttactggaagtgtaaatta

SEQ ID NO: 3204549 - DNA, 25 bp, Homo sapien
agatggtatggagattcttcagaga

SEQ ID NO: 3204550 - DNA, 25 bp, Homo sapien
gttcaacaattgtggaagatggtat

SEQ ID NO: 3204551 - DNA, 25 bp, Homo sapien
tgtggaagatggtatggagattctt

SEQ ID NO: 3204552 - DNA, 25 bp, Homo sapien
aagtcttcagtggttgtgcccaaat

SEQ ID NO: 3204553 - DNA, 25 bp, Homo sapien
cctactgtgtgaagcctgagacttg

SEQ ID NO: 3204554 - DNA, 25 bp, Homo sapien
tgcatctaatcaccaagacaaaggg

SEQ ID NO: 3204555 - DNA, 25 bp, Homo sapien
ctccaggttatgtcctaggcttctg

SEQ ID NO: 3204556 - DNA, 25 bp, Homo sapien
tctacaaagatggagcttttgatgt

SEQ ID NO: 3204557 - DNA, 25 bp, Homo sapien
ggaagttcaagactaagatacgagc

SEQ ID NO: 3204558 - DNA, 25 bp, Homo sapien
cgagcagattcagagtctagtgagg

SEQ ID NO: 3204559 - DNA, 25 bp, Homo sapien
gctaaccgttctgtaggctaggaag

SEQ ID NO: 3204560 - DNA, 25 bp, Homo sapien
gaacgcatgagacacagaaggcttc

SEQ ID NO: 3204561 - DNA, 25 bp, Homo sapien
gaaggcttcaatgtgacaaatgtca

SEQ ID NO: 3204562 - DNA, 25 bp, Homo sapien
aacgcatgagacacagaaggcttca

SEQ ID NO: 3204563 - DNA, 25 bp, Homo sapien
gacacagaaggcttcaatgtgacaa

SEQ ID NO: 3204564 - DNA, 25 bp, Homo sapien
atagatacagttcctacaaaattaa

SEQ ID NO: 3204565 - DNA, 25 bp, Homo sapien
catagatacagttcctacaaaatta

SEQ ID NO: 3204566 - DNA, 25 bp, Homo sapien
catttcccttcatactggtagtaca

SEQ ID NO: 3204567 - DNA, 25 bp, Homo sapien
acacatttcccttcatactggtagt

SEQ ID NO: 3204568 - DNA, 25 bp, Homo sapien
tttcagaacactctgaggatttcag

SEQ ID NO: 3204569 - DNA, 25 bp, Homo sapien
tttctttcagaacactctgaggatt

SEQ ID NO: 3204570 - DNA, 25 bp, Homo sapien
tctttcagaacactctgaggatttc

SEQ ID NO: 3204571 - DNA, 25 bp, Homo sapien
tcagaacactctgaggatttcaggg

SEQ ID NO: 3204572 - DNA, 25 bp, Homo sapien
gattcccaaactcgctgcccatcat

SEQ ID NO: 3204573 - DNA, 25 bp, Homo sapien
ccgattcccaaactcgctgcccatc

SEQ ID NO: 3204574 - DNA, 25 bp, Homo sapien
cgattcccaaactcgctgcccatca

SEQ ID NO: 3204575 - DNA, 25 bp, Homo sapien
tacgcgaaggaaagactgccgagtg

SEQ ID NO: 3204576 - DNA, 25 bp, Homo sapien
cagcacgttggggattcctttacgg

SEQ ID NO: 3204577 - DNA, 25 bp, Homo sapien
aaagactgccgagtgcggcgcagca

SEQ ID NO: 3204578 - DNA, 25 bp, Homo sapien
gcggcattacgcgaaggaaagactg

SEQ ID NO: 3204579 - DNA, 25 bp, Homo sapien
aaactcttgagtcccccatgtatag

SEQ ID NO: 3204580 - DNA, 25 bp, Homo sapien
caaactcttgagtcccccatgtata

SEQ ID NO: 3204581 - DNA, 25 bp, Homo sapien
tcaaactcttgagtcccccatgtat

SEQ ID NO: 3204582 - DNA, 25 bp, Homo sapien
ggacagggaaccatcatccggatgt

SEQ ID NO: 3204583 - DNA, 25 bp, Homo sapien
ttttgcagaacataggaagtttatt

SEQ ID NO: 3204584 - DNA, 25 bp, Homo sapien
attttgcagaacataggaagtttat

SEQ ID NO: 3204585 - DNA, 25 bp, Homo sapien
tattttgcagaacataggaagttta

SEQ ID NO: 3204586 - DNA, 25 bp, Homo sapien
tttcttgcaacagatttaaaggaat

SEQ ID NO: 3204587 - DNA, 25 bp, Homo sapien
tttctttcttgcaacagatttaaag

SEQ ID NO: 3204588 - DNA, 25 bp, Homo sapien
tctttcttgcaacagatttaaagga

SEQ ID NO: 3204589 - DNA, 25 bp, Homo sapien
cttgcaacagatttaaaggaattca

SEQ ID NO: 3204590 - DNA, 25 bp, Homo sapien
tacaacacagggtttttatacaaga

SEQ ID NO: 3204591 - DNA, 25 bp, Homo sapien
agagtctccgtgcagcggactcagg

SEQ ID NO: 3204592 - DNA, 25 bp, Homo sapien
ctccagctgtggctacaacacaggg

SEQ ID NO: 3204593 - DNA, 25 bp, Homo sapien
agtctccgtgcagcggactcaggct

SEQ ID NO: 3204594 - DNA, 25 bp, Homo sapien
cctcagcccggggctgcactgccac

SEQ ID NO: 3204595 - DNA, 25 bp, Homo sapien
tgatgactgctacacctcagcccgg

SEQ ID NO: 3204596 - DNA, 25 bp, Homo sapien
tactgatgactgctacacctcagcc

SEQ ID NO: 3204597 - DNA, 25 bp, Homo sapien
acacctcagcccggggctgcactgc

SEQ ID NO: 3204598 - DNA, 25 bp, Homo sapien
tctgtagcccacttgttgaaaatga

SEQ ID NO: 3204599 - DNA, 25 bp, Homo sapien
caatcaagatatgcgttctggccaa

SEQ ID NO: 3204600 - DNA, 25 bp, Homo sapien
cctgccccattaaggaatctgaaat

SEQ ID NO: 3204601 - DNA, 25 bp, Homo sapien
ggctctccaggacaattctctgtca

SEQ ID NO: 3204602 - DNA, 25 bp, Homo sapien
tattgtatccctgtccgcacaccta

SEQ ID NO: 3204603 - DNA, 25 bp, Homo sapien
taactctccacggtcactgaatttg

SEQ ID NO: 3204604 - DNA, 25 bp, Homo sapien
tctgccatggacttaaagtcgactc

SEQ ID NO: 3204605 - DNA, 25 bp, Homo sapien
tcactttgtgagactgggactagca

SEQ ID NO: 3204606 - DNA, 25 bp, Homo sapien
tcaacacataatgctgcagttcagc

SEQ ID NO: 3204607 - DNA, 25 bp, Homo sapien
tccttggatctttgggttcaacaca

SEQ ID NO: 3204608 - DNA, 25 bp, Homo sapien
ggatctttgggttcaacacataatg

SEQ ID NO: 3204609 - DNA, 25 bp, Homo sapien
tgggttcaacacataatgctgcagt

SEQ ID NO: 3204610 - DNA, 25 bp, Homo sapien
tctgaaacacatagaacaaggcaca

SEQ ID NO: 3204611 - DNA, 25 bp, Homo sapien
tttgctgtgaagctaaagctactat

SEQ ID NO: 3204612 - DNA, 25 bp, Homo sapien
gggactctctatacctcttgctcaa

SEQ ID NO: 3204613 - DNA, 25 bp, Homo sapien
gaaatctacctgaatgacttcagct

SEQ ID NO: 3204614 - DNA, 25 bp, Homo sapien
tattggcggtatttgcctgaaacaa

SEQ ID NO: 3204615 - DNA, 25 bp, Homo sapien
tacttatagtttcgcgccttttgga

SEQ ID NO: 3204616 - DNA, 25 bp, Homo sapien
acaaattatgtgctgacttcacact

SEQ ID NO: 3204617 - DNA, 25 bp, Homo sapien
gacttcacactcaggcactcttcta

SEQ ID NO: 3204618 - DNA, 25 bp, Homo sapien
tagtggtggacctgcctgaatcgac

SEQ ID NO: 3204619 - DNA, 25 bp, Homo sapien
tggtggacctgcctgaatcgacatg

SEQ ID NO: 3204620 - DNA, 25 bp, Homo sapien
tttgtcgatgccactacatttgtag

SEQ ID NO: 3204621 - DNA, 25 bp, Homo sapien
ggtggacctgcctgaatcgacatgt

SEQ ID NO: 3204622 - DNA, 25 bp, Homo sapien
tgtgtcgtggggtatcaatgatagc

SEQ ID NO: 3204623 - DNA, 25 bp, Homo sapien
tcgtggggtatcaatgatagccaag

SEQ ID NO: 3204624 - DNA, 25 bp, Homo sapien
gggtatcaatgatagccaagtagta

SEQ ID NO: 3204625 - DNA, 25 bp, Homo sapien
gtatcaatgatagccaagtagtact

SEQ ID NO: 3204626 - DNA, 25 bp, Homo sapien
aacacaaatgattagttgttcacac

SEQ ID NO: 3204627 - DNA, 25 bp, Homo sapien
tgttaacacaaatgattagttgttc

SEQ ID NO: 3204628 - DNA, 25 bp, Homo sapien
ttaacacaaatgattagttgttcac

SEQ ID NO: 3204629 - DNA, 25 bp, Homo sapien
taacacaaatgattagttgttcaca

SEQ ID NO: 3204630 - DNA, 25 bp, Homo sapien
gttgtcaacattccaaccagaaatt

SEQ ID NO: 3204631 - DNA, 25 bp, Homo sapien
ttccaaccagaaattggcacaaacg

SEQ ID NO: 3204632 - DNA, 25 bp, Homo sapien
ttgtcaacattccaaccagaaattg

SEQ ID NO: 3204633 - DNA, 25 bp, Homo sapien
caaccagaaattggcacaaacgcta

SEQ ID NO: 3204634 - DNA, 25 bp, Homo sapien
ggcatgttagcacttggctccagca

SEQ ID NO: 3204635 - DNA, 25 bp, Homo sapien
tgaaccaaggcatgttagcacttgg

SEQ ID NO: 3204636 - DNA, 25 bp, Homo sapien
aaggcatgttagcacttggctccag

SEQ ID NO: 3204637 - DNA, 25 bp, Homo sapien
ccaaggcatgttagcacttggctcc

SEQ ID NO: 3204638 - DNA, 25 bp, Homo sapien
gaaaacatcagtctccactcgacct

SEQ ID NO: 3204639 - DNA, 25 bp, Homo sapien
aagagtcaggcacatgggcttctca

SEQ ID NO: 3204640 - DNA, 25 bp, Homo sapien
tgggcttctcagttggacaaattag

SEQ ID NO: 3204641 - DNA, 25 bp, Homo sapien
gcaaaggtggccaccatagtaggtt

SEQ ID NO: 3204642 - DNA, 25 bp, Homo sapien
gcaacattgccatgatgaacctcct

SEQ ID NO: 3204643 - DNA, 25 bp, Homo sapien
aacattgccatgatgaacctccttg

SEQ ID NO: 3204644 - DNA, 25 bp, Homo sapien
ccagcaacattgccatgatgaacct

SEQ ID NO: 3204645 - DNA, 25 bp, Homo sapien
cagcaacattgccatgatgaacctc

SEQ ID NO: 3204646 - DNA, 25 bp, Homo sapien
gtacagaggcatagccagcgctgat

SEQ ID NO: 3204647 - DNA, 25 bp, Homo sapien
caaactggcaagcaatgtgagccat

SEQ ID NO: 3204648 - DNA, 25 bp, Homo sapien
gcaaactggcaagcaatgtgagcca

SEQ ID NO: 3204649 - DNA, 25 bp, Homo sapien
atccagtacagaggcatagccagcg

SEQ ID NO: 3204650 - DNA, 25 bp, Homo sapien
gaatttagggccatcttccagcttt

SEQ ID NO: 3204651 - DNA, 25 bp, Homo sapien
aatttagggccatcttccagctttt

SEQ ID NO: 3204652 - DNA, 25 bp, Homo sapien
ttagggccatcttccagctttttac

SEQ ID NO: 3204653 - DNA, 25 bp, Homo sapien
cttcaagaatttagggccatcttcc

SEQ ID NO: 3204654 - DNA, 25 bp, Homo sapien
gaacagcaaagcaatgcagaggtgg

SEQ ID NO: 3204655 - DNA, 25 bp, Homo sapien
caaagcaatgcagaggtggatagtc

SEQ ID NO: 3204656 - DNA, 25 bp, Homo sapien
acagcaaagcaatgcagaggtggat

SEQ ID NO: 3204657 - DNA, 25 bp, Homo sapien
gatgacacccaggacaactgtctgt

SEQ ID NO: 3204658 - DNA, 25 bp, Homo sapien
tacttttctgcagtcgtttgggata

SEQ ID NO: 3204659 - DNA, 25 bp, Homo sapien
taatttcatatcagcttacataggc

SEQ ID NO: 3204660 - DNA, 25 bp, Homo sapien
cctacacgaggattttggttgcctg

SEQ ID NO: 3204661 - DNA, 25 bp, Homo sapien
ttgggatatacttcgagcacaaaca

SEQ ID NO: 3204662 - DNA, 25 bp, Homo sapien
tgccagtctaacaatcaaaagtgct

SEQ ID NO: 3204663 - DNA, 25 bp, Homo sapien
atcaaaagtgcttcacagggaatgg

SEQ ID NO: 3204664 - DNA, 25 bp, Homo sapien
ccttcatagttctgctggttcctgg

SEQ ID NO: 3204665 - DNA, 25 bp, Homo sapien
ttatccggaaattccctgtagttgc

SEQ ID NO: 3204666 - DNA, 25 bp, Homo sapien
ggttcctggatctatgtctttctcc

SEQ ID NO: 3204667 - DNA, 25 bp, Homo sapien
ctgctggttcctggatctatgtctt

SEQ ID NO: 3204668 - DNA, 25 bp, Homo sapien
catttgctgccatatttatagcaga

SEQ ID NO: 3204669 - DNA, 25 bp, Homo sapien
tcagaacaagcatgtggctatttca

SEQ ID NO: 3204670 - DNA, 25 bp, Homo sapien
attttctcaacagtgtcatcattac

SEQ ID NO: 3204671 - DNA, 25 bp, Homo sapien
tttatagcagaaaatttcatcttca

SEQ ID NO: 3204672 - DNA, 25 bp, Homo sapien
ccaagacttcttgagaatttctaag

SEQ ID NO: 3204673 - DNA, 25 bp, Homo sapien
tctggaatcagtagccaagacttct

SEQ ID NO: 3204674 - DNA, 25 bp, Homo sapien
cttgacacggatatctggaatcagt

SEQ ID NO: 3204675 - DNA, 25 bp, Homo sapien
cacggatatctggaatcagtagcca

SEQ ID NO: 3204676 - DNA, 25 bp, Homo sapien
tgagccatttgagtgataaagcaga

SEQ ID NO: 3204677 - DNA, 25 bp, Homo sapien
atgagccatttgagtgataaagcag

SEQ ID NO: 3204678 - DNA, 25 bp, Homo sapien
gagccatttgagtgataaagcagat

SEQ ID NO: 3204679 - DNA, 25 bp, Homo sapien
gccatttgagtgataaagcagatgt

SEQ ID NO: 3204680 - DNA, 25 bp, Homo sapien
cagttggttgattacaatggcatca

SEQ ID NO: 3204681 - DNA, 25 bp, Homo sapien
tttaggcagtaaattatatttagcc

SEQ ID NO: 3204682 - DNA, 25 bp, Homo sapien
taaattatatttagcctcagataca

SEQ ID NO: 3204683 - DNA, 25 bp, Homo sapien
tttctgtgttccagtcaacaagagg

SEQ ID NO: 3204684 - DNA, 25 bp, Homo sapien
acctggcttggtaattgaaactgaa

SEQ ID NO: 3204685 - DNA, 25 bp, Homo sapien
taaattggttctagaatattctgcc

SEQ ID NO: 3204686 - DNA, 25 bp, Homo sapien
tgccatattagatcttagaaaccac

SEQ ID NO: 3204687 - DNA, 25 bp, Homo sapien
catagagggagacacataaattggt

SEQ ID NO: 3204688 - DNA, 25 bp, Homo sapien
tagaaatgtctctgcaattggacat

SEQ ID NO: 3204689 - DNA, 25 bp, Homo sapien
tgtagaaatgtctctgcaattggac

SEQ ID NO: 3204690 - DNA, 25 bp, Homo sapien
gtagaaatgtctctgcaattggaca

SEQ ID NO: 3204691 - DNA, 25 bp, Homo sapien
agccctgaatcaggtaacactggtt

SEQ ID NO: 3204692 - DNA, 25 bp, Homo sapien
tcatcaaaatttttcggatgttttc

SEQ ID NO: 3204693 - DNA, 25 bp, Homo sapien
gaatcaggtaacactggttcttcta

SEQ ID NO: 3204694 - DNA, 25 bp, Homo sapien
agatttatttgcagccctgaatcag

SEQ ID NO: 3204695 - DNA, 25 bp, Homo sapien
aaggtttccagaagatatcagaggg

SEQ ID NO: 3204696 - DNA, 25 bp, Homo sapien
ccagaagatatcagaggggccaaaa

SEQ ID NO: 3204697 - DNA, 25 bp, Homo sapien
tccagaagatatcagaggggccaaa

SEQ ID NO: 3204698 - DNA, 25 bp, Homo sapien
tttccagaagatatcagaggggcca

SEQ ID NO: 3204699 - DNA, 25 bp, Homo sapien
gacatagctaaacaatatgcccttg

SEQ ID NO: 3204700 - DNA, 25 bp, Homo sapien
tattcttacatgtttagctttgcct

SEQ ID NO: 3204701 - DNA, 25 bp, Homo sapien
catgttttgcgattattgccttaca

SEQ ID NO: 3204702 - DNA, 25 bp, Homo sapien
cattaacttgcatatcagccactga

SEQ ID NO: 3204703 - DNA, 25 bp, Homo sapien
ttgaaatagatggatatcgtcccta

SEQ ID NO: 3204704 - DNA, 25 bp, Homo sapien
tatcgtccctaatatttacatttgc

SEQ ID NO: 3204705 - DNA, 25 bp, Homo sapien
ctttttccctcggatgccaatgtct

SEQ ID NO: 3204706 - DNA, 25 bp, Homo sapien
tgccaatgtcttttagagtcctttg

SEQ ID NO: 3204707 - DNA, 25 bp, Homo sapien
tggctttctgaataccaccaaagga

SEQ ID NO: 3204708 - DNA, 25 bp, Homo sapien
tgctctcactggtaaagagacccat

SEQ ID NO: 3204709 - DNA, 25 bp, Homo sapien
gctttctgaataccaccaaaggaaa

SEQ ID NO: 3204710 - DNA, 25 bp, Homo sapien
tagtgctctcactggtaaagagacc

SEQ ID NO: 3204711 - DNA, 25 bp, Homo sapien
tcctgccttgctgaacttgaatgtt

SEQ ID NO: 3204712 - DNA, 25 bp, Homo sapien
tttttctacctcagtccatatagaa

SEQ ID NO: 3204713 - DNA, 25 bp, Homo sapien
cagtccatatagaaaatttagcttc

SEQ ID NO: 3204714 - DNA, 25 bp, Homo sapien
acctcagtccatatagaaaatttag

SEQ ID NO: 3204715 - DNA, 25 bp, Homo sapien
gcgctgccacttcttgtctgcactg

SEQ ID NO: 3204716 - DNA, 25 bp, Homo sapien
ggcggctttgcccttgcttaggcgc

SEQ ID NO: 3204717 - DNA, 25 bp, Homo sapien
ctttctgtgccgctttttctgtgtg

SEQ ID NO: 3204718 - DNA, 25 bp, Homo sapien
tgagcaggtgggtcccgtggcggcg

SEQ ID NO: 3204719 - DNA, 25 bp, Homo sapien
tgttgcttgtatgcaaggaacacac

SEQ ID NO: 3204720 - DNA, 25 bp, Homo sapien
tataatctgaggtgttgcttgtatg

SEQ ID NO: 3204721 - DNA, 25 bp, Homo sapien
tctgaggtgttgcttgtatgcaagg

SEQ ID NO: 3204722 - DNA, 25 bp, Homo sapien
gaggtgttgcttgtatgcaaggaac

SEQ ID NO: 3204723 - DNA, 25 bp, Homo sapien
attgtgcatgacatcccaaatgaca

SEQ ID NO: 3204724 - DNA, 25 bp, Homo sapien
tattgtgcatgacatcccaaatgac

SEQ ID NO: 3204725 - DNA, 25 bp, Homo sapien
ttattgtgcatgacatcccaaatga

SEQ ID NO: 3204726 - DNA, 25 bp, Homo sapien
cttattgtgcatgacatcccaaatg

SEQ ID NO: 3204727 - DNA, 25 bp, Homo sapien
gcagaagatgctgttatatgaagat

SEQ ID NO: 3204728 - DNA, 25 bp, Homo sapien
tgcagaagatgctgttatatgaaga

SEQ ID NO: 3204729 - DNA, 25 bp, Homo sapien
tatgtctatgttgtcctttgctgct

SEQ ID NO: 3204730 - DNA, 25 bp, Homo sapien
tcctccactatgtctatgttgtcct

SEQ ID NO: 3204731 - DNA, 25 bp, Homo sapien
gcttccaataggatgatggaagatc

SEQ ID NO: 3204732 - DNA, 25 bp, Homo sapien
tcagcaccagatcagtgggaagcag

SEQ ID NO: 3204733 - DNA, 25 bp, Homo sapien
aggttgcttccccgagtgaaaatca

SEQ ID NO: 3204734 - DNA, 25 bp, Homo sapien
gcttccccgagtgaaaatcaggtgg

SEQ ID NO: 3204735 - DNA, 25 bp, Homo sapien
cccgagtgaaaatcaggtggtttga

SEQ ID NO: 3204736 - DNA, 25 bp, Homo sapien
tggtttgatggtggagttattttta

SEQ ID NO: 3204737 - DNA, 25 bp, Homo sapien
ctaggattaggccagcttggattca

SEQ ID NO: 3204738 - DNA, 25 bp, Homo sapien
cattctgattgaatagtgctcacta

SEQ ID NO: 3204739 - DNA, 25 bp, Homo sapien
tcatgctctaggattaggccagctt

SEQ ID NO: 3204740 - DNA, 25 bp, Homo sapien
ctttggaataacatcattgattatg

SEQ ID NO: 3204741 - DNA, 25 bp, Homo sapien
cattttttcttggatctagagatac

SEQ ID NO: 3204742 - DNA, 25 bp, Homo sapien
tcttgcttgttatgcaattcaaggg

SEQ ID NO: 3204743 - DNA, 25 bp, Homo sapien
ctagagatactgaagaagaaagcct

SEQ ID NO: 3204744 - DNA, 25 bp, Homo sapien
catcctttgtcacagaaagatgtgt

SEQ ID NO: 3204745 - DNA, 25 bp, Homo sapien
tttctgaagtgtatgcgctctgtgt

SEQ ID NO: 3204746 - DNA, 25 bp, Homo sapien
aagacacaacgaagactaagtaaga

SEQ ID NO: 3204747 - DNA, 25 bp, Homo sapien
cacaacgaagactaagtaagaaagc

SEQ ID NO: 3204748 - DNA, 25 bp, Homo sapien
gcgctctgtgtgagccaaaccccat

SEQ ID NO: 3204749 - DNA, 25 bp, Homo sapien
taataaactgcagtttgccatacat

SEQ ID NO: 3204750 - DNA, 25 bp, Homo sapien
tccgtgtaaaccagactgacataat

SEQ ID NO: 3204751 - DNA, 25 bp, Homo sapien
gtacttgcatccgtgtaaaccagac

SEQ ID NO: 3204752 - DNA, 25 bp, Homo sapien
tgcatccgtgtaaaccagactgaca

SEQ ID NO: 3204753 - DNA, 25 bp, Homo sapien
aattttggattctctctgcatattc

SEQ ID NO: 3204754 - DNA, 25 bp, Homo sapien
tcaaaatgatgaaccagaagcataa

SEQ ID NO: 3204755 - DNA, 25 bp, Homo sapien
ccagaagcataacttggaattcatc

SEQ ID NO: 3204756 - DNA, 25 bp, Homo sapien
cttaattcccgttatgctttcctca

SEQ ID NO: 3204757 - DNA, 25 bp, Homo sapien
acataagtgtagacaagtgggatca

SEQ ID NO: 3204758 - DNA, 25 bp, Homo sapien
taggaaatcccctatgaaccctgtc

SEQ ID NO: 3204759 - DNA, 25 bp, Homo sapien
tacagaatttgacataagtgtagac

SEQ ID NO: 3204760 - DNA, 25 bp, Homo sapien
acttggcattcagtaatccttaggg

SEQ ID NO: 3204761 - DNA, 25 bp, Homo sapien
aaattgtgtggctgcttcacattag

SEQ ID NO: 3204762 - DNA, 25 bp, Homo sapien
cacattagtgtgaaaactcctctga

SEQ ID NO: 3204763 - DNA, 25 bp, Homo sapien
gtgtggctgcttcacattagtgtga

SEQ ID NO: 3204764 - DNA, 25 bp, Homo sapien
aaataaattgtgtggctgcttcaca

SEQ ID NO: 3204765 - DNA, 25 bp, Homo sapien
aatagctttggtgatgtcattacaa

SEQ ID NO: 3204766 - DNA, 25 bp, Homo sapien
ctggttaatagctttggtgatgtca

SEQ ID NO: 3204767 - DNA, 25 bp, Homo sapien
ctaattgctggttaatagctttggt

SEQ ID NO: 3204768 - DNA, 25 bp, Homo sapien
tggtgatgtcattacaattatccat

SEQ ID NO: 3204769 - DNA, 25 bp, Homo sapien
acatccaaatacataggcattaaga

SEQ ID NO: 3204770 - DNA, 25 bp, Homo sapien
gtagaacatccaaatacataggcat

SEQ ID NO: 3204771 - DNA, 25 bp, Homo sapien
tagaacatccaaatacataggcatt

SEQ ID NO: 3204772 - DNA, 25 bp, Homo sapien
gaacatccaaatacataggcattaa

SEQ ID NO: 3204773 - DNA, 25 bp, Homo sapien
cttctgtttttttgaagagaggaag

SEQ ID NO: 3204774 - DNA, 25 bp, Homo sapien
ctaataagcagattcctcctcctca

SEQ ID NO: 3204775 - DNA, 25 bp, Homo sapien
ctcatcctccttcttcttctgtttt

SEQ ID NO: 3204776 - DNA, 25 bp, Homo sapien
taataagcagattcctcctcctcat

SEQ ID NO: 3204777 - DNA, 25 bp, Homo sapien
gagaaacaaccattgaggtgctgca

SEQ ID NO: 3204778 - DNA, 25 bp, Homo sapien
tgctgcagacagtcgttgttatcat

SEQ ID NO: 3204779 - DNA, 25 bp, Homo sapien
cattgaggtgctgcagacagtcgtt

SEQ ID NO: 3204780 - DNA, 25 bp, Homo sapien
tgacacgtggttaatgtcacattgt

SEQ ID NO: 3204781 - DNA, 25 bp, Homo sapien
agattcacttccactaatggaacac

SEQ ID NO: 3204782 - DNA, 25 bp, Homo sapien
cacattttgtgagatgggaatggag

SEQ ID NO: 3204783 - DNA, 25 bp, Homo sapien
tggaacacattttgtgagatgggaa

SEQ ID NO: 3204784 - DNA, 25 bp, Homo sapien
tcacttccactaatggaacacattt

SEQ ID NO: 3204785 - DNA, 25 bp, Homo sapien
gagtcgttggcatcctcctttggtt

SEQ ID NO: 3204786 - DNA, 25 bp, Homo sapien
tgaaggtagaagtgagtcgttggca

SEQ ID NO: 3204787 - DNA, 25 bp, Homo sapien
catccgcaaatgttttgaaggtaga

SEQ ID NO: 3204788 - DNA, 25 bp, Homo sapien
caataagacacatccgcaaatgttt

SEQ ID NO: 3204789 - DNA, 25 bp, Homo sapien
ggccttctgattgaattcctctgct

SEQ ID NO: 3204790 - DNA, 25 bp, Homo sapien
tgtgtataatttggtttatccaaaa

SEQ ID NO: 3204791 - DNA, 25 bp, Homo sapien
tacttggcaccagtgtctgtgatgt

SEQ ID NO: 3204792 - DNA, 25 bp, Homo sapien
tctcatacttggcaccagtgtctgt

SEQ ID NO: 3204793 - DNA, 25 bp, Homo sapien
tattattgtcctgcattgaatcaaa

SEQ ID NO: 3204794 - DNA, 25 bp, Homo sapien
gttgtaatctattattgtcctgcat

SEQ ID NO: 3204795 - DNA, 25 bp, Homo sapien
gatatcgagatatgccatcatcttc

SEQ ID NO: 3204796 - DNA, 25 bp, Homo sapien
catgattcatgatatcgagatatgc

SEQ ID NO: 3204797 - DNA, 25 bp, Homo sapien
ttcacggctgtttttggagattcat

SEQ ID NO: 3204798 - DNA, 25 bp, Homo sapien
tgggccctgttgtggaccttgtcat

SEQ ID NO: 3204799 - DNA, 25 bp, Homo sapien
gaaaatgtccctaagccatggtaag

SEQ ID NO: 3204800 - DNA, 25 bp, Homo sapien
tggtaagtatgatcatacccacaac

SEQ ID NO: 3204801 - DNA, 25 bp, Homo sapien
cataatgcatgacgaaaattttcct

SEQ ID NO: 3204802 - DNA, 25 bp, Homo sapien
cctaacagacagttgtgggccctgc

SEQ ID NO: 3204803 - DNA, 25 bp, Homo sapien
aaaccatggctttctatcaggccat

SEQ ID NO: 3204804 - DNA, 25 bp, Homo sapien
agtcgttctgcacccagataactga

SEQ ID NO: 3204805 - DNA, 25 bp, Homo sapien
gcatggacagctgggtttgttccag

SEQ ID NO: 3204806 - DNA, 25 bp, Homo sapien
aagcaagtcctcagtgacctacaaa

SEQ ID NO: 3204807 - DNA, 25 bp, Homo sapien
aagtcctcagtgacctacaaagaga

SEQ ID NO: 3204808 - DNA, 25 bp, Homo sapien
cataaagcaagtcctcagtgaccta

SEQ ID NO: 3204809 - DNA, 25 bp, Homo sapien
agtcctcagtgacctacaaagagac

SEQ ID NO: 3204810 - DNA, 25 bp, Homo sapien
gattcatcactttttgcctggtaga

SEQ ID NO: 3204811 - DNA, 25 bp, Homo sapien
cactttttgcctggtagattgcaac

SEQ ID NO: 3204812 - DNA, 25 bp, Homo sapien
ccttgatctcaggtttgattcatca

SEQ ID NO: 3204813 - DNA, 25 bp, Homo sapien
ggtagattgcaacatactttaccat

SEQ ID NO: 3204814 - DNA, 25 bp, Homo sapien
gacttatgtatcgtcatgggttgaa

SEQ ID NO: 3204815 - DNA, 25 bp, Homo sapien
gatttgttcttagtaattatcagta

SEQ ID NO: 3204816 - DNA, 25 bp, Homo sapien
ggtcattaacatggacaccaattca

SEQ ID NO: 3204817 - DNA, 25 bp, Homo sapien
aaaagtcagctgagacttatgtatc

SEQ ID NO: 3204818 - DNA, 25 bp, Homo sapien
ttctcgagcttgtaaataccatcac

SEQ ID NO: 3204819 - DNA, 25 bp, Homo sapien
gtaaataccatcactggtttgatag

SEQ ID NO: 3204820 - DNA, 25 bp, Homo sapien
gtttgataggtggagtttgctagga

SEQ ID NO: 3204821 - DNA, 25 bp, Homo sapien
taattggttagtggtttctcgagct

SEQ ID NO: 3204822 - DNA, 25 bp, Homo sapien
gacaattctccagctcgaggaccct

SEQ ID NO: 3204823 - DNA, 25 bp, Homo sapien
gacctcctgtacgacaagatgtaaa

SEQ ID NO: 3204824 - DNA, 25 bp, Homo sapien
gatggtcatcctgctgcgattgaca

SEQ ID NO: 3204825 - DNA, 25 bp, Homo sapien
tgtaaatgatggtcatcctgctgcg

SEQ ID NO: 3204826 - DNA, 25 bp, Homo sapien
tgaggtttcgacatcttggaattcc

SEQ ID NO: 3204827 - DNA, 25 bp, Homo sapien
cacacttctagagaaaactctaagt

SEQ ID NO: 3204828 - DNA, 25 bp, Homo sapien
tcgactcttccgtttcctgatacaa

SEQ ID NO: 3204829 - DNA, 25 bp, Homo sapien
tgtcataaagtcctaagcacacttc

SEQ ID NO: 3204830 - DNA, 25 bp, Homo sapien
gttcatcctcagatccacacagtga

SEQ ID NO: 3204831 - DNA, 25 bp, Homo sapien
caattagttctaattcataggcaag

SEQ ID NO: 3204832 - DNA, 25 bp, Homo sapien
tcagatccacacagtgataaagcga

SEQ ID NO: 3204833 - DNA, 25 bp, Homo sapien
gataaagcgacattccaattagttc

SEQ ID NO: 3204834 - DNA, 25 bp, Homo sapien
tgtgggctgcacataactttctccc

SEQ ID NO: 3204835 - DNA, 25 bp, Homo sapien
tattacagccaagacaagcttcgag

SEQ ID NO: 3204836 - DNA, 25 bp, Homo sapien
taactttgtagtgcactaacctgac

SEQ ID NO: 3204837 - DNA, 25 bp, Homo sapien
taagttttactcctgagctgtgggc

SEQ ID NO: 3204838 - DNA, 25 bp, Homo sapien
taaataccagctaagaccacatgag

SEQ ID NO: 3204839 - DNA, 25 bp, Homo sapien
gatttagacagagctactcgtggcg

SEQ ID NO: 3204840 - DNA, 25 bp, Homo sapien
gattgttcctgaataccaagggcaa

SEQ ID NO: 3204841 - DNA, 25 bp, Homo sapien
tcgtggcgcagacccttcagaaatg

SEQ ID NO: 3204842 - DNA, 25 bp, Homo sapien
ttcagaacaatactctctttgcagc

SEQ ID NO: 3204843 - DNA, 25 bp, Homo sapien
tgaaggacaacatccgatttttcac

SEQ ID NO: 3204844 - DNA, 25 bp, Homo sapien
tattcactaccatatccccgttcag

SEQ ID NO: 3204845 - DNA, 25 bp, Homo sapien
ctaatgaaggacaacatccgatttt

SEQ ID NO: 3204846 - DNA, 25 bp, Homo sapien
ccagtaattaaggtaatctgtgtaa

SEQ ID NO: 3204847 - DNA, 25 bp, Homo sapien
aagttccagtaattaaggtaatctg

SEQ ID NO: 3204848 - DNA, 25 bp, Homo sapien
atttgtcacttagtggtgtcaaagc

SEQ ID NO: 3204849 - DNA, 25 bp, Homo sapien
gtcacttagtggtgtcaaagcaaac

SEQ ID NO: 3204850 - DNA, 25 bp, Homo sapien
tagagtcagcaattgaggactgtcc

SEQ ID NO: 3204851 - DNA, 25 bp, Homo sapien
aagtcaacattattcctcagcatag

SEQ ID NO: 3204852 - DNA, 25 bp, Homo sapien
caaagcctttacacaccaatctgga

SEQ ID NO: 3204853 - DNA, 25 bp, Homo sapien
catagtaagctttggatcttcaccc

SEQ ID NO: 3204854 - DNA, 25 bp, Homo sapien
tctgaataggacttaaattctctgc

SEQ ID NO: 3204855 - DNA, 25 bp, Homo sapien
aaattctctgcatatgcactcctca

SEQ ID NO: 3204856 - DNA, 25 bp, Homo sapien
aattctctgcatatgcactcctcat

SEQ ID NO: 3204857 - DNA, 25 bp, Homo sapien
ctctgaataggacttaaattctctg

SEQ ID NO: 3204858 - DNA, 25 bp, Homo sapien
aatttggctacatactacgactcag

SEQ ID NO: 3204859 - DNA, 25 bp, Homo sapien
gtaaaacataatctagggccagaca

SEQ ID NO: 3204860 - DNA, 25 bp, Homo sapien
gaatttaatgccacctattgagaag

SEQ ID NO: 3204861 - DNA, 25 bp, Homo sapien
gatcctagacttcagggtcaatcag

SEQ ID NO: 3204862 - DNA, 25 bp, Homo sapien
agacgcatgaatgaggatctgcagc

SEQ ID NO: 3204863 - DNA, 25 bp, Homo sapien
tatgtggctgtagaatgtacacgtg

SEQ ID NO: 3204864 - DNA, 25 bp, Homo sapien
cttcttgtcctgatttggttatgtg

SEQ ID NO: 3204865 - DNA, 25 bp, Homo sapien
gagcccatccggaccatctgtgtgg

SEQ ID NO: 3204866 - DNA, 25 bp, Homo sapien
ctttgggtgtacaccctggaccaca

SEQ ID NO: 3204867 - DNA, 25 bp, Homo sapien
tgggtgtacaccctggaccacacat

SEQ ID NO: 3204868 - DNA, 25 bp, Homo sapien
accctggaccacacatatagctctt

SEQ ID NO: 3204869 - DNA, 25 bp, Homo sapien
tgtacaccctggaccacacatatag

SEQ ID NO: 3204870 - DNA, 25 bp, Homo sapien
tcagtgatgtcagaaaataagctgt

SEQ ID NO: 3204871 - DNA, 25 bp, Homo sapien
atctttctgtaatggagaaggctgt

SEQ ID NO: 3204872 - DNA, 25 bp, Homo sapien
tctttctgtaatggagaaggctgtg

SEQ ID NO: 3204873 - DNA, 25 bp, Homo sapien
gcaatatactgtagtaataaacggt

SEQ ID NO: 3204874 - DNA, 25 bp, Homo sapien
caatatactgtagtaataaacggta

SEQ ID NO: 3204875 - DNA, 25 bp, Homo sapien
atatactgtagtaataaacggtagg

SEQ ID NO: 3204876 - DNA, 25 bp, Homo sapien
agcaatatactgtagtaataaacgg

SEQ ID NO: 3204877 - DNA, 25 bp, Homo sapien
caaaaaggcaacatctagggctgag

SEQ ID NO: 3204878 - DNA, 25 bp, Homo sapien
gacagaaacaagctagattcaatga

SEQ ID NO: 3204879 - DNA, 25 bp, Homo sapien
gagagtccatcaacaaccagaatga

SEQ ID NO: 3204880 - DNA, 25 bp, Homo sapien
aatgaagtaatctggttgaagacag

SEQ ID NO: 3204881 - DNA, 25 bp, Homo sapien
tgagatcagtattaaggaaggagat

SEQ ID NO: 3204882 - DNA, 25 bp, Homo sapien
tctgttgatctcaacttaaagacaa

SEQ ID NO: 3204883 - DNA, 25 bp, Homo sapien
aattagtgcatcagggttgaaaacc

SEQ ID NO: 3204884 - DNA, 25 bp, Homo sapien
accttgaaggattcatgagtcttga

SEQ ID NO: 3204885 - DNA, 25 bp, Homo sapien
gatcatcctatctctaaactctcct

SEQ ID NO: 3204886 - DNA, 25 bp, Homo sapien
ttcattctggaaaggccatgctgtg

SEQ ID NO: 3204887 - DNA, 25 bp, Homo sapien
catgctgtgcagtagttaagggcac

SEQ ID NO: 3204888 - DNA, 25 bp, Homo sapien
cagggaggatcatcctatctctaaa

SEQ ID NO: 3204889 - DNA, 25 bp, Homo sapien
tatatcagacttaaatctagatccg

SEQ ID NO: 3204890 - DNA, 25 bp, Homo sapien
ctagatccgtaacattttaactcag

SEQ ID NO: 3204891 - DNA, 25 bp, Homo sapien
gatccctttctgataactcccactg

SEQ ID NO: 3204892 - DNA, 25 bp, Homo sapien
agtacttctcacaaacattctcaga

SEQ ID NO: 3204893 - DNA, 25 bp, Homo sapien
cagcaatttttttggaaattgttat

SEQ ID NO: 3204894 - DNA, 25 bp, Homo sapien
caatttttttggaaattgttatcat

SEQ ID NO: 3204895 - DNA, 25 bp, Homo sapien
gcaatttttttggaaattgttatca

SEQ ID NO: 3204896 - DNA, 25 bp, Homo sapien
gttgtctgcaagaacatcagtgctt

SEQ ID NO: 3204897 - DNA, 25 bp, Homo sapien
agaacatcagtgcttgtaactgggt

SEQ ID NO: 3204898 - DNA, 25 bp, Homo sapien
tgtctgcaagaacatcagtgcttgt

SEQ ID NO: 3204899 - DNA, 25 bp, Homo sapien
tgcaagaacatcagtgcttgtaact

SEQ ID NO: 3204900 - DNA, 25 bp, Homo sapien
gactgtcccagtctactcctgagtt

SEQ ID NO: 3204901 - DNA, 25 bp, Homo sapien
aaactctgttacctcactgactgtc

SEQ ID NO: 3204902 - DNA, 25 bp, Homo sapien
tgagatttcgattcccaaactctgt

SEQ ID NO: 3204903 - DNA, 25 bp, Homo sapien
tgtgcacaggaaaagttaggtactt

SEQ ID NO: 3204904 - DNA, 25 bp, Homo sapien
agtatattcttggtgcatgatgatg

SEQ ID NO: 3204905 - DNA, 25 bp, Homo sapien
tatattcttggtgcatgatgatgct

SEQ ID NO: 3204906 - DNA, 25 bp, Homo sapien
tttgaagagggtatatgttacttgc

SEQ ID NO: 3204907 - DNA, 25 bp, Homo sapien
gagggtatatgttacttgctgccat

SEQ ID NO: 3204908 - DNA, 25 bp, Homo sapien
agtaggtaagatggtttctgtcctc

SEQ ID NO: 3204909 - DNA, 25 bp, Homo sapien
tcatgtcggagaacagttacttctt

SEQ ID NO: 3204910 - DNA, 25 bp, Homo sapien
caaagagtaggtaagatggtttctg

SEQ ID NO: 3204911 - DNA, 25 bp, Homo sapien
gaaggccttctcctcatgtcggaga

SEQ ID NO: 3204912 - DNA, 25 bp, Homo sapien
tattttccaaccatatggtgatcct

SEQ ID NO: 3204913 - DNA, 25 bp, Homo sapien
acaggattttagagcctggatcatc

SEQ ID NO: 3204914 - DNA, 25 bp, Homo sapien
tgaagatgacattctggggttcccg

SEQ ID NO: 3204915 - DNA, 25 bp, Homo sapien
ccaaccatatggtgatcctgacagg

SEQ ID NO: 3204916 - DNA, 25 bp, Homo sapien
tgaggtttagactgataacatgctc

SEQ ID NO: 3204917 - DNA, 25 bp, Homo sapien
gactgataacatgctccggtgtatg

SEQ ID NO: 3204918 - DNA, 25 bp, Homo sapien
tttagactgataacatgctccggtg

SEQ ID NO: 3204919 - DNA, 25 bp, Homo sapien
tgataacatgctccggtgtatgtct

SEQ ID NO: 3204920 - DNA, 25 bp, Homo sapien
ttctctagatacaaacacagcaatc

SEQ ID NO: 3204921 - DNA, 25 bp, Homo sapien
tctctagatacaaacacagcaatca

SEQ ID NO: 3204922 - DNA, 25 bp, Homo sapien
cttctctagatacaaacacagcaat

SEQ ID NO: 3204923 - DNA, 25 bp, Homo sapien
ggtacattatactaagactctgagc

SEQ ID NO: 3204924 - DNA, 25 bp, Homo sapien
tcctcaatgatttgtggccagcaag

SEQ ID NO: 3204925 - DNA, 25 bp, Homo sapien
taattcatcaaaagagcaggctttc

SEQ ID NO: 3204926 - DNA, 25 bp, Homo sapien
gcagagtttttaaccattggtccgc

SEQ ID NO: 3204927 - DNA, 25 bp, Homo sapien
tctagctgcatctgctgatttgcca

SEQ ID NO: 3204928 - DNA, 25 bp, Homo sapien
caaggcattaggactgtgttctctc

SEQ ID NO: 3204929 - DNA, 25 bp, Homo sapien
aacttcaacctcatatctagctgca

SEQ ID NO: 3204930 - DNA, 25 bp, Homo sapien
ccttaggcaataccctactgtatac

SEQ ID NO: 3204931 - DNA, 25 bp, Homo sapien
gcagaaggcaagctggcccaatcac

SEQ ID NO: 3204932 - DNA, 25 bp, Homo sapien
catctgtgtgttaggtggcagaagg

SEQ ID NO: 3204933 - DNA, 25 bp, Homo sapien
tctgtgtgttaggtggcagaaggca

SEQ ID NO: 3204934 - DNA, 25 bp, Homo sapien
agaaggcaagctggcccaatcacca

SEQ ID NO: 3204935 - DNA, 25 bp, Homo sapien
ttgagctccaattacttgccgtata

SEQ ID NO: 3204936 - DNA, 25 bp, Homo sapien
tacttgccgtatattagaagcagca

SEQ ID NO: 3204937 - DNA, 25 bp, Homo sapien
gaagcagcaccaaagatctggttat

SEQ ID NO: 3204938 - DNA, 25 bp, Homo sapien
ttaacccgatttgccaagttgagct

SEQ ID NO: 3204939 - DNA, 25 bp, Homo sapien
tgcagtgtatcatccacagcacctg

SEQ ID NO: 3204940 - DNA, 25 bp, Homo sapien
ctgcagtgtatcatccacagcacct

SEQ ID NO: 3204941 - DNA, 25 bp, Homo sapien
actgcagtgtatcatccacagcacc

SEQ ID NO: 3204942 - DNA, 25 bp, Homo sapien
gcagtgtatcatccacagcacctgt

SEQ ID NO: 3204943 - DNA, 25 bp, Homo sapien
taaagaaccattaatgaggcctccc

SEQ ID NO: 3204944 - DNA, 25 bp, Homo sapien
agtggtaataccctctacagcaggg

SEQ ID NO: 3204945 - DNA, 25 bp, Homo sapien
gggtcagctgtaaagaaccattaat

SEQ ID NO: 3204946 - DNA, 25 bp, Homo sapien
gacatatgcttttgacatacccaga

SEQ ID NO: 3204947 - DNA, 25 bp, Homo sapien
cttcagtccattgttgctgggtctg

SEQ ID NO: 3204948 - DNA, 25 bp, Homo sapien
ttcagtccattgttgctgggtctgg

SEQ ID NO: 3204949 - DNA, 25 bp, Homo sapien
tcagtccattgttgctgggtctgga

SEQ ID NO: 3204950 - DNA, 25 bp, Homo sapien
tttgtgtaacgatactttttcacca

SEQ ID NO: 3204951 - DNA, 25 bp, Homo sapien
ctggagaagggtattaatcacatgt

SEQ ID NO: 3204952 - DNA, 25 bp, Homo sapien
tggagaagggtattaatcacatgtc

SEQ ID NO: 3204953 - DNA, 25 bp, Homo sapien
ggtattaatcacatgtctcaggagg

SEQ ID NO: 3204954 - DNA, 25 bp, Homo sapien
gaagggtattaatcacatgtctcag

SEQ ID NO: 3204955 - DNA, 25 bp, Homo sapien
tagcaaggcccggtctttctgtgtg

SEQ ID NO: 3204956 - DNA, 25 bp, Homo sapien
gcaattgtgactttatccactgagg

SEQ ID NO: 3204957 - DNA, 25 bp, Homo sapien
ggtgtctattgccacagacttaaaa

SEQ ID NO: 3204958 - DNA, 25 bp, Homo sapien
ctgttcagaagacaacaaccctgcc

SEQ ID NO: 3204959 - DNA, 25 bp, Homo sapien
ctgcagtctgtccagacaaagctga

SEQ ID NO: 3204960 - DNA, 25 bp, Homo sapien
tccagacaaagctgaagtgtctgtt

SEQ ID NO: 3204961 - DNA, 25 bp, Homo sapien
tctgtccagacaaagctgaagtgtc

SEQ ID NO: 3204962 - DNA, 25 bp, Homo sapien
cagtctgtccagacaaagctgaagt

SEQ ID NO: 3204963 - DNA, 25 bp, Homo sapien
tttgagtccagcgttgggtaacata

SEQ ID NO: 3204964 - DNA, 25 bp, Homo sapien
taatatatcatcaaagcaactgctt

SEQ ID NO: 3204965 - DNA, 25 bp, Homo sapien
gatttggcagggaaatatccatatt

SEQ ID NO: 3204966 - DNA, 25 bp, Homo sapien
tattttccccatgcaaagtaatgat

SEQ ID NO: 3204967 - DNA, 25 bp, Homo sapien
tgtagatcctgaagggttgccagtt

SEQ ID NO: 3204968 - DNA, 25 bp, Homo sapien
ctgtagatcctgaagggttgccagt

SEQ ID NO: 3204969 - DNA, 25 bp, Homo sapien
ctgaagggttgccagttttagagca

SEQ ID NO: 3204970 - DNA, 25 bp, Homo sapien
ttgccagttttagagcagcagtcat

SEQ ID NO: 3204971 - DNA, 25 bp, Homo sapien
gcatttgcacggctctcagtttgga

SEQ ID NO: 3204972 - DNA, 25 bp, Homo sapien
tttgcacggctctcagtttggattt

SEQ ID NO: 3204973 - DNA, 25 bp, Homo sapien
ttcatggcatttgcacggctctcag

SEQ ID NO: 3204974 - DNA, 25 bp, Homo sapien
gcatcttcatggcatttgcacggct

SEQ ID NO: 3204975 - DNA, 25 bp, Homo sapien
gcagcccatgtctccaagagtagct

SEQ ID NO: 3204976 - DNA, 25 bp, Homo sapien
cagtctgcccctgtaacatggttaa

SEQ ID NO: 3204977 - DNA, 25 bp, Homo sapien
caggacccaggctatgtgggaatca

SEQ ID NO: 3204978 - DNA, 25 bp, Homo sapien
tcagagtttcattgcgcacagcaga

SEQ ID NO: 3204979 - DNA, 25 bp, Homo sapien
tgttagatcaacaatggccgagtct

SEQ ID NO: 3204980 - DNA, 25 bp, Homo sapien
gatgagtacccctttctgactaggg

SEQ ID NO: 3204981 - DNA, 25 bp, Homo sapien
cactgcccggatgcagaggacttca

SEQ ID NO: 3204982 - DNA, 25 bp, Homo sapien
taaggaccaggcaccaaaatcatag

SEQ ID NO: 3204983 - DNA, 25 bp, Homo sapien
tcacagctggtactagggaccgaca

SEQ ID NO: 3204984 - DNA, 25 bp, Homo sapien
tcaaatcccggaaccaagccaatgt

SEQ ID NO: 3204985 - DNA, 25 bp, Homo sapien
cagcctgccgcaagggagaaatcaa

SEQ ID NO: 3204986 - DNA, 25 bp, Homo sapien
ggtaaatcctcatagccaaaagtct

SEQ ID NO: 3204987 - DNA, 25 bp, Homo sapien
tactgagccccttattttagcaact

SEQ ID NO: 3204988 - DNA, 25 bp, Homo sapien
taagccaatacccagttagaatatt

SEQ ID NO: 3204989 - DNA, 25 bp, Homo sapien
gtatttctcaatcaaccagtcttcc

SEQ ID NO: 3204990 - DNA, 25 bp, Homo sapien
tgaccaagatatatgtgactcagac

SEQ ID NO: 3204991 - DNA, 25 bp, Homo sapien
gtgatatttacaacagctggaagcc

SEQ ID NO: 3204992 - DNA, 25 bp, Homo sapien
tgtttagggatctagatttctcctc

SEQ ID NO: 3204993 - DNA, 25 bp, Homo sapien
gagtaataacaaatcaacaccatgt

SEQ ID NO: 3204994 - DNA, 25 bp, Homo sapien
tcactgtcattacaagggagcaaaa

SEQ ID NO: 3204995 - DNA, 25 bp, Homo sapien
tgatcgtgggtcttaaggcctttcc

SEQ ID NO: 3204996 - DNA, 25 bp, Homo sapien
catgggagctccacaccgttttcta

SEQ ID NO: 3204997 - DNA, 25 bp, Homo sapien
tctaggcggaaagaatactgatgtc

SEQ ID NO: 3204998 - DNA, 25 bp, Homo sapien
gatggtcctgccctatattctaggc

SEQ ID NO: 3204999 - DNA, 25 bp, Homo sapien
ttgacggttctaatagggagcccta

SEQ ID NO: 3205000 - DNA, 25 bp, Homo sapien
gcgtgtgagattacacaggacccca

SEQ ID NO: 3205001 - DNA, 25 bp, Homo sapien
catcttctgtataagttggttgacg

SEQ ID NO: 3205002 - DNA, 25 bp, Homo sapien
ggaccccatattaagcaagctgttt

SEQ ID NO: 3205003 - DNA, 25 bp, Homo sapien
gatttcttatatggagattgttgaa

SEQ ID NO: 3205004 - DNA, 25 bp, Homo sapien
gccatgttgatttcttatatggaga

SEQ ID NO: 3205005 - DNA, 25 bp, Homo sapien
ttatatggagattgttgaatcttcc

SEQ ID NO: 3205006 - DNA, 25 bp, Homo sapien
aatgtcttcctctgatttcttactt

SEQ ID NO: 3205007 - DNA, 25 bp, Homo sapien
ccgtcaacctcctgtgtcttcactc

SEQ ID NO: 3205008 - DNA, 25 bp, Homo sapien
cgtcaacctcctgtgtcttcactct

SEQ ID NO: 3205009 - DNA, 25 bp, Homo sapien
gccgtcaacctcctgtgtcttcact

SEQ ID NO: 3205010 - DNA, 25 bp, Homo sapien
actgccagttgcctaaggtgtgcac

SEQ ID NO: 3205011 - DNA, 25 bp, Homo sapien
cgtatctgtgtcaagagactgccag

SEQ ID NO: 3205012 - DNA, 25 bp, Homo sapien
tctataagacatgttcgtatctgtg

SEQ ID NO: 3205013 - DNA, 25 bp, Homo sapien
cagttgcctaaggtgtgcaccaaca

SEQ ID NO: 3205014 - DNA, 25 bp, Homo sapien
gctttttaatgagatcttttcccat

SEQ ID NO: 3205015 - DNA, 25 bp, Homo sapien
aggagcagagaagctagccaaacag

SEQ ID NO: 3205016 - DNA, 25 bp, Homo sapien
agtaagtaccaagtttctggagaca

SEQ ID NO: 3205017 - DNA, 25 bp, Homo sapien
taagtaccaagtttctggagacaaa

SEQ ID NO: 3205018 - DNA, 25 bp, Homo sapien
gctagccaaacagtaagtaccaagt

SEQ ID NO: 3205019 - DNA, 25 bp, Homo sapien
acttgcccatcctgccagtgccaag

SEQ ID NO: 3205020 - DNA, 25 bp, Homo sapien
gaagtacacgacacttgcccatcct

SEQ ID NO: 3205021 - DNA, 25 bp, Homo sapien
tacgaagtacacgacacttgcccat

SEQ ID NO: 3205022 - DNA, 25 bp, Homo sapien
cttgcccatcctgccagtgccaagg

SEQ ID NO: 3205023 - DNA, 25 bp, Homo sapien
gctttcttggtgtttatcacgccac

SEQ ID NO: 3205024 - DNA, 25 bp, Homo sapien
tcttttcggtgactatggagcttcc

SEQ ID NO: 3205025 - DNA, 25 bp, Homo sapien
acgccacttctggtcttttcggtga

SEQ ID NO: 3205026 - DNA, 25 bp, Homo sapien
ctgtgcctaaatgggctttcttggt

SEQ ID NO: 3205027 - DNA, 25 bp, Homo sapien
actcttcctagtggtagaatttggc

SEQ ID NO: 3205028 - DNA, 25 bp, Homo sapien
ggaccctgacactcttcctagtggt

SEQ ID NO: 3205029 - DNA, 25 bp, Homo sapien
tccagcaaccggagcttcatcgttt

SEQ ID NO: 3205030 - DNA, 25 bp, Homo sapien
ttcctcaccatcattgggtacaaag

SEQ ID NO: 3205031 - DNA, 25 bp, Homo sapien
cttaaagcagactccaggaatgtca

SEQ ID NO: 3205032 - DNA, 25 bp, Homo sapien
ttaaagcagactccaggaatgtcac

SEQ ID NO: 3205033 - DNA, 25 bp, Homo sapien
cttgcctttgtatagggccaaaaga

SEQ ID NO: 3205034 - DNA, 25 bp, Homo sapien
caaaagagagacattggctactttg

SEQ ID NO: 3205035 - DNA, 25 bp, Homo sapien
ccttcttgcctttgtatagggccaa

SEQ ID NO: 3205036 - DNA, 25 bp, Homo sapien
aagagagacattggctactttgaca

SEQ ID NO: 3205037 - DNA, 25 bp, Homo sapien
gagggtgaaatgaaggattcgcttc

SEQ ID NO: 3205038 - DNA, 25 bp, Homo sapien
ttttgctatcactgaatcttgagat

SEQ ID NO: 3205039 - DNA, 25 bp, Homo sapien
atatttttgctatcactgaatcttg

SEQ ID NO: 3205040 - DNA, 25 bp, Homo sapien
ggtgaaatgaaggattcgcttctcc

SEQ ID NO: 3205041 - DNA, 25 bp, Homo sapien
ctatacagaagaataatcacaaaat

SEQ ID NO: 3205042 - DNA, 25 bp, Homo sapien
gccacttcttgctcctgagccatag

SEQ ID NO: 3205043 - DNA, 25 bp, Homo sapien
tctcacagtaggtggtgcaaacagc

SEQ ID NO: 3205044 - DNA, 25 bp, Homo sapien
cgtaagatgagattgctggtagtgc

SEQ ID NO: 3205045 - DNA, 25 bp, Homo sapien
cattgagcacttggcagcgtaagat

SEQ ID NO: 3205046 - DNA, 25 bp, Homo sapien
gtgcaaacagcgaggattccagagg

SEQ ID NO: 3205047 - DNA, 25 bp, Homo sapien
ctcgtttctgacagctcaaagttac

SEQ ID NO: 3205048 - DNA, 25 bp, Homo sapien
tcaaagttactttctctaccatcct

SEQ ID NO: 3205049 - DNA, 25 bp, Homo sapien
gttactttctctaccatcctcttca

SEQ ID NO: 3205050 - DNA, 25 bp, Homo sapien
aaagttactttctctaccatcctct

SEQ ID NO: 3205051 - DNA, 25 bp, Homo sapien
cagccgaaaaggcaggcaattgaat

SEQ ID NO: 3205052 - DNA, 25 bp, Homo sapien
tcagccgaaaaggcaggcaattgaa

SEQ ID NO: 3205053 - DNA, 25 bp, Homo sapien
tacagcctgtttctctaactgtgct

SEQ ID NO: 3205054 - DNA, 25 bp, Homo sapien
ttttagccatgagattgccacagag

SEQ ID NO: 3205055 - DNA, 25 bp, Homo sapien
aaaggctatcagaatggctgtttcc

SEQ ID NO: 3205056 - DNA, 25 bp, Homo sapien
cattttagatctctcattttagcca

SEQ ID NO: 3205057 - DNA, 25 bp, Homo sapien
tactgtttactaggtgcaactggtc

SEQ ID NO: 3205058 - DNA, 25 bp, Homo sapien
tacagaccaagaagtgccctgggca

SEQ ID NO: 3205059 - DNA, 25 bp, Homo sapien
tatctgactgtaggcgctgggaacc

SEQ ID NO: 3205060 - DNA, 25 bp, Homo sapien
gaaactcctccagctaaatagaagg

SEQ ID NO: 3205061 - DNA, 25 bp, Homo sapien
aacttgggtgttttagatgcaagga

SEQ ID NO: 3205062 - DNA, 25 bp, Homo sapien
caaggagagattgcggcatctgaaa

SEQ ID NO: 3205063 - DNA, 25 bp, Homo sapien
ggtaaacttgggtgttttagatgca

SEQ ID NO: 3205064 - DNA, 25 bp, Homo sapien
taagaaactctgtctggtaaacttg

SEQ ID NO: 3205065 - DNA, 25 bp, Homo sapien
acagcaatgggtgggagaatccttc

SEQ ID NO: 3205066 - DNA, 25 bp, Homo sapien
ggctcatagcctgcatctctaaaga

SEQ ID NO: 3205067 - DNA, 25 bp, Homo sapien
gactctagtgagcatccattttctg

SEQ ID NO: 3205068 - DNA, 25 bp, Homo sapien
gtcaagtgtgctgggataattcctc

SEQ ID NO: 3205069 - DNA, 25 bp, Homo sapien
aaacaccaatgttagttagagagtc

SEQ ID NO: 3205070 - DNA, 25 bp, Homo sapien
tgagctactgctttccacgaccctt

SEQ ID NO: 3205071 - DNA, 25 bp, Homo sapien
tcaatggaaacatgtgtatgaggga

SEQ ID NO: 3205072 - DNA, 25 bp, Homo sapien
tgcctatggtaaatttgaaacacca

SEQ ID NO: 3205073 - DNA, 25 bp, Homo sapien
gtgtttagtcttaaccactgccctg

SEQ ID NO: 3205074 - DNA, 25 bp, Homo sapien
tgggtgtttagtcttaaccactgcc

SEQ ID NO: 3205075 - DNA, 25 bp, Homo sapien
ttgggtgtttagtcttaaccactgc

SEQ ID NO: 3205076 - DNA, 25 bp, Homo sapien
tcttcaatatctaaagtactaaccc

SEQ ID NO: 3205077 - DNA, 25 bp, Homo sapien
aatgataccacattctggcgttgtg

SEQ ID NO: 3205078 - DNA, 25 bp, Homo sapien
ctggcgttgtgataaaacatgcttc

SEQ ID NO: 3205079 - DNA, 25 bp, Homo sapien
taacccatttgaaaggatcagacat

SEQ ID NO: 3205080 - DNA, 25 bp, Homo sapien
tagaaggcaatacacaggctttcag

SEQ ID NO: 3205081 - DNA, 25 bp, Homo sapien
ctagaaggcaatacacaggctttca

SEQ ID NO: 3205082 - DNA, 25 bp, Homo sapien
tctgaattaacgctcttctgaagag

SEQ ID NO: 3205083 - DNA, 25 bp, Homo sapien
cttttattaaggcctgcacaaagtc

SEQ ID NO: 3205084 - DNA, 25 bp, Homo sapien
tcattcaggcttgcacattctttaa

SEQ ID NO: 3205085 - DNA, 25 bp, Homo sapien
ttctgaagagggacgtggaagtcat

SEQ ID NO: 3205086 - DNA, 25 bp, Homo sapien
ctttgtgaaactcttgggcacttct

SEQ ID NO: 3205087 - DNA, 25 bp, Homo sapien
gctttgtgaaactcttgggcacttc

SEQ ID NO: 3205088 - DNA, 25 bp, Homo sapien
tgctccatttaagtcatgcagttcc

SEQ ID NO: 3205089 - DNA, 25 bp, Homo sapien
tttaagtcatgcagttccaaattgg

SEQ ID NO: 3205090 - DNA, 25 bp, Homo sapien
gctcacatgctccatttaagtcatg

SEQ ID NO: 3205091 - DNA, 25 bp, Homo sapien
agttccaaattggagcctgagcctt

SEQ ID NO: 3205092 - DNA, 25 bp, Homo sapien
ccccataccgactgaaactgtcatt

SEQ ID NO: 3205093 - DNA, 25 bp, Homo sapien
tccccataccgactgaaactgtcat

SEQ ID NO: 3205094 - DNA, 25 bp, Homo sapien
ctccccataccgactgaaactgtca

SEQ ID NO: 3205095 - DNA, 25 bp, Homo sapien
tgaaaacaagcctgaactacaaggt

SEQ ID NO: 3205096 - DNA, 25 bp, Homo sapien
tctaagctgaagacataagccactg

SEQ ID NO: 3205097 - DNA, 25 bp, Homo sapien
aagtagcaccattaaggaaacagga

SEQ ID NO: 3205098 - DNA, 25 bp, Homo sapien
tacaaggtatggtggattcagaact

SEQ ID NO: 3205099 - DNA, 25 bp, Homo sapien
gatggctgctgttatccaaacagga

SEQ ID NO: 3205100 - DNA, 25 bp, Homo sapien
tgctgttatccaaacaggatgccat

SEQ ID NO: 3205101 - DNA, 25 bp, Homo sapien
gtctcttgtcacacttgtgtattag

SEQ ID NO: 3205102 - DNA, 25 bp, Homo sapien
ttttgttctaataactggagctatg

SEQ ID NO: 3205103 - DNA, 25 bp, Homo sapien
aactaagcaccttatagaaggtctc

SEQ ID NO: 3205104 - DNA, 25 bp, Homo sapien
ctaactaagcaccttatagaaggtc

SEQ ID NO: 3205105 - DNA, 25 bp, Homo sapien
taactaagcaccttatagaaggtct

SEQ ID NO: 3205106 - DNA, 25 bp, Homo sapien
tcccactcttgattctcatagccat

SEQ ID NO: 3205107 - DNA, 25 bp, Homo sapien
ggtcccactcttgattctcatagcc

SEQ ID NO: 3205108 - DNA, 25 bp, Homo sapien
cggtcccactcttgattctcatagc

SEQ ID NO: 3205109 - DNA, 25 bp, Homo sapien
gtcccactcttgattctcatagcca

SEQ ID NO: 3205110 - DNA, 25 bp, Homo sapien
ttgaaccatgtgtattcatatttat

SEQ ID NO: 3205111 - DNA, 25 bp, Homo sapien
attcatatttatgcactaagtgttg

SEQ ID NO: 3205112 - DNA, 25 bp, Homo sapien
cttgaaccatgtgtattcatattta

SEQ ID NO: 3205113 - DNA, 25 bp, Homo sapien
gtattcatatttatgcactaagtgt

SEQ ID NO: 3205114 - DNA, 25 bp, Homo sapien
ccaagtgtacttccaacatgatgaa

SEQ ID NO: 3205115 - DNA, 25 bp, Homo sapien
tatttctcccatagttgttcaggta

SEQ ID NO: 3205116 - DNA, 25 bp, Homo sapien
tgttcaggtaaggacgactagaaag

SEQ ID NO: 3205117 - DNA, 25 bp, Homo sapien
tcttccagctactgaggttcttctt

SEQ ID NO: 3205118 - DNA, 25 bp, Homo sapien
tctactttcagattgtcctgtcttg

SEQ ID NO: 3205119 - DNA, 25 bp, Homo sapien
aatctgcccctgtgatcaccttggt

SEQ ID NO: 3205120 - DNA, 25 bp, Homo sapien
tgcctgttgtgacaatgaatctgcc

SEQ ID NO: 3205121 - DNA, 25 bp, Homo sapien
agagctcctgagattaatgccataa

SEQ ID NO: 3205122 - DNA, 25 bp, Homo sapien
gatttccatcataggactgtaaaga

SEQ ID NO: 3205123 - DNA, 25 bp, Homo sapien
atttccatcataggactgtaaagac

SEQ ID NO: 3205124 - DNA, 25 bp, Homo sapien
tccatcataggactgtaaagacagt

SEQ ID NO: 3205125 - DNA, 25 bp, Homo sapien
ccatcataggactgtaaagacagtt

SEQ ID NO: 3205126 - DNA, 25 bp, Homo sapien
tccattccccattcaacttcttggc

SEQ ID NO: 3205127 - DNA, 25 bp, Homo sapien
caactcttctcgctttttccatgtt

SEQ ID NO: 3205128 - DNA, 25 bp, Homo sapien
tttccatgttcatcacggaagtcca

SEQ ID NO: 3205129 - DNA, 25 bp, Homo sapien
tgttcatcacggaagtccattcccc

SEQ ID NO: 3205130 - DNA, 25 bp, Homo sapien
ctgtaaaaccttatcttgaatacct

SEQ ID NO: 3205131 - DNA, 25 bp, Homo sapien
tatcttgaatacctagaattatgca

SEQ ID NO: 3205132 - DNA, 25 bp, Homo sapien
atcttgaatacctagaattatgcaa

SEQ ID NO: 3205133 - DNA, 25 bp, Homo sapien
tttatatttaggatggcaacaggag

SEQ ID NO: 3205134 - DNA, 25 bp, Homo sapien
tgctacttggcccagttttatagct

SEQ ID NO: 3205135 - DNA, 25 bp, Homo sapien
tcttctgtgccaataatcacagctg

SEQ ID NO: 3205136 - DNA, 25 bp, Homo sapien
gttttatagctattctgctacatgc

SEQ ID NO: 3205137 - DNA, 25 bp, Homo sapien
gcataatacaataatctgaaatccg

SEQ ID NO: 3205138 - DNA, 25 bp, Homo sapien
tgtacatattgagcatgcataatac

SEQ ID NO: 3205139 - DNA, 25 bp, Homo sapien
atgtctccagatgtacagatttgac

SEQ ID NO: 3205140 - DNA, 25 bp, Homo sapien
tgtaggtatacttctgcgtgtttta

SEQ ID NO: 3205141 - DNA, 25 bp, Homo sapien
cattcattctcttttgcgacaaatt

SEQ ID NO: 3205142 - DNA, 25 bp, Homo sapien
cttttgcgacaaattgtggaaatga

SEQ ID NO: 3205143 - DNA, 25 bp, Homo sapien
tctcttttgcgacaaattgtggaaa

SEQ ID NO: 3205144 - DNA, 25 bp, Homo sapien
tggttcaaggaaacattcattctct

SEQ ID NO: 3205145 - DNA, 25 bp, Homo sapien
cctcggcagcatccaagataatcct

SEQ ID NO: 3205146 - DNA, 25 bp, Homo sapien
ttctttctttctcgacgcctgtgcg

SEQ ID NO: 3205147 - DNA, 25 bp, Homo sapien
tctttactccaggtggtcacctcgg

SEQ ID NO: 3205148 - DNA, 25 bp, Homo sapien
gcgtatggtgtcaacttcagcttct

SEQ ID NO: 3205149 - DNA, 25 bp, Homo sapien
ggttgcttgagcataagatacatca

SEQ ID NO: 3205150 - DNA, 25 bp, Homo sapien
ggcacttctctcatcaagaaagtaa

SEQ ID NO: 3205151 - DNA, 25 bp, Homo sapien
cataattttgtgcaccataagttaa

SEQ ID NO: 3205152 - DNA, 25 bp, Homo sapien
agggccttgttagagatgttacaaa

SEQ ID NO: 3205153 - DNA, 25 bp, Homo sapien
aggtttagtagaattcacaaccaca

SEQ ID NO: 3205154 - DNA, 25 bp, Homo sapien
tttctcatgattcatctctttctgt

SEQ ID NO: 3205155 - DNA, 25 bp, Homo sapien
aattttgtgaggatgtttatatttg

SEQ ID NO: 3205156 - DNA, 25 bp, Homo sapien
gtttagtagaattcacaaccacacc

SEQ ID NO: 3205157 - DNA, 25 bp, Homo sapien
ggacattatcctcacagccttatac

SEQ ID NO: 3205158 - DNA, 25 bp, Homo sapien
ggcagtagacaggattgaaccagac

SEQ ID NO: 3205159 - DNA, 25 bp, Homo sapien
taaatagaatcctgatcatggacca

SEQ ID NO: 3205160 - DNA, 25 bp, Homo sapien
gaaccagacaatcctgcaagatcac

SEQ ID NO: 3205161 - DNA, 25 bp, Homo sapien
accaggaaccatttacactggatct

SEQ ID NO: 3205162 - DNA, 25 bp, Homo sapien
tccacgtgcatcaggaagaagtctt

SEQ ID NO: 3205163 - DNA, 25 bp, Homo sapien
cagtgtccacgtgcatcaggaagaa

SEQ ID NO: 3205164 - DNA, 25 bp, Homo sapien
cactggatcttacatttgccctggg

SEQ ID NO: 3205165 - DNA, 25 bp, Homo sapien
ttacagatttctgaggtccccagat

SEQ ID NO: 3205166 - DNA, 25 bp, Homo sapien
tcggctgactcaacactggctattt

SEQ ID NO: 3205167 - DNA, 25 bp, Homo sapien
gggttgctggccttccatatatcag

SEQ ID NO: 3205168 - DNA, 25 bp, Homo sapien
tgggtcttctgaagttggctccaaa

SEQ ID NO: 3205169 - DNA, 25 bp, Homo sapien
tcagtttttatagcagaatggagaa

SEQ ID NO: 3205170 - DNA, 25 bp, Homo sapien
tcacttccaagatgatagtgtgacg

SEQ ID NO: 3205171 - DNA, 25 bp, Homo sapien
gatgatagtgtgacgacctctcagg

SEQ ID NO: 3205172 - DNA, 25 bp, Homo sapien
tagtgtgacgacctctcaggatgca

SEQ ID NO: 3205173 - DNA, 25 bp, Homo sapien
tccaagatgatagtgtgacgacctc

SEQ ID NO: 3205174 - DNA, 25 bp, Homo sapien
cctgcctgagaattaagccaacaca

SEQ ID NO: 3205175 - DNA, 25 bp, Homo sapien
gcagaacgaagagatggaacacaac

SEQ ID NO: 3205176 - DNA, 25 bp, Homo sapien
ttcagagacttagtgggcaaaaact

SEQ ID NO: 3205177 - DNA, 25 bp, Homo sapien
aaagagtctgactaacatgtggtgc

SEQ ID NO: 3205178 - DNA, 25 bp, Homo sapien
ttggtaccagttcctattgagaggt

SEQ ID NO: 3205179 - DNA, 25 bp, Homo sapien
tggtaccagttcctattgagaggtg

SEQ ID NO: 3205180 - DNA, 25 bp, Homo sapien
gttggtaccagttcctattgagagg

SEQ ID NO: 3205181 - DNA, 25 bp, Homo sapien
ggttggtaccagttcctattgagag

SEQ ID NO: 3205182 - DNA, 25 bp, Homo sapien
gcctccctgatagtaagtgctgctc

SEQ ID NO: 3205183 - DNA, 25 bp, Homo sapien
caatgctcgtgaggtgcctccctga

SEQ ID NO: 3205184 - DNA, 25 bp, Homo sapien
taatgacgatatagatagacgaaca

SEQ ID NO: 3205185 - DNA, 25 bp, Homo sapien
gacgaacagttcatgttgtttttcc

SEQ ID NO: 3205186 - DNA, 25 bp, Homo sapien
caagattcctgtagcagattgagct

SEQ ID NO: 3205187 - DNA, 25 bp, Homo sapien
caagctcctcttgtaatgaatgcag

SEQ ID NO: 3205188 - DNA, 25 bp, Homo sapien
tttcacaaaaggtagagcacaacag

SEQ ID NO: 3205189 - DNA, 25 bp, Homo sapien
gtcattataaaaacgcacctggaag

SEQ ID NO: 3205190 - DNA, 25 bp, Homo sapien
taccatcatgttgtgcagtcttgca

SEQ ID NO: 3205191 - DNA, 25 bp, Homo sapien
aaatacgtcgatgctgcctaactgc

SEQ ID NO: 3205192 - DNA, 25 bp, Homo sapien
aagtccctttatgtgtgtgcccagg

SEQ ID NO: 3205193 - DNA, 25 bp, Homo sapien
gatacctgggcattctataagctca

SEQ ID NO: 3205194 - DNA, 25 bp, Homo sapien
aagtttattagaccacagggctttg

SEQ ID NO: 3205195 - DNA, 25 bp, Homo sapien
agtttattagaccacagggctttgc

SEQ ID NO: 3205196 - DNA, 25 bp, Homo sapien
ctaacagtgagaccacctagaggag

SEQ ID NO: 3205197 - DNA, 25 bp, Homo sapien
accacctagaggagactcatgcagg

SEQ ID NO: 3205198 - DNA, 25 bp, Homo sapien
tccctaacagtgagaccacctagag

SEQ ID NO: 3205199 - DNA, 25 bp, Homo sapien
aatccctaacagtgagaccacctag

SEQ ID NO: 3205200 - DNA, 25 bp, Homo sapien
caactaaattagcctcctttgttct

SEQ ID NO: 3205201 - DNA, 25 bp, Homo sapien
tccttgtctattctgtacctccact

SEQ ID NO: 3205202 - DNA, 25 bp, Homo sapien
ccttgtctattctgtacctccactt

SEQ ID NO: 3205203 - DNA, 25 bp, Homo sapien
cacatttgtgctctccttgattcct

SEQ ID NO: 3205204 - DNA, 25 bp, Homo sapien
gtcacatttgtgctctccttgattc

SEQ ID NO: 3205205 - DNA, 25 bp, Homo sapien
tcacatttgtgctctccttgattcc

SEQ ID NO: 3205206 - DNA, 25 bp, Homo sapien
tgtcacatttgtgctctccttgatt

SEQ ID NO: 3205207 - DNA, 25 bp, Homo sapien
ctagggtgtggttattgaagaatga

SEQ ID NO: 3205208 - DNA, 25 bp, Homo sapien
gcatgatagtaatacctaatcctac

SEQ ID NO: 3205209 - DNA, 25 bp, Homo sapien
gagacccgtaaacagatataagaca

SEQ ID NO: 3205210 - DNA, 25 bp, Homo sapien
taagggcctgatagcggcatgaatg

SEQ ID NO: 3205211 - DNA, 25 bp, Homo sapien
taacagcctgatgaaagagacccgt

SEQ ID NO: 3205212 - DNA, 25 bp, Homo sapien
gactatgaataagacagatgacaag

SEQ ID NO: 3205213 - DNA, 25 bp, Homo sapien
ctgtgactatgaataagacagatga

SEQ ID NO: 3205214 - DNA, 25 bp, Homo sapien
ctatgaataagacagatgacaagcc

SEQ ID NO: 3205215 - DNA, 25 bp, Homo sapien
cagatgacaagccttacttccattt

SEQ ID NO: 3205216 - DNA, 25 bp, Homo sapien
tattaaatgtgttctcagtggttca

SEQ ID NO: 3205217 - DNA, 25 bp, Homo sapien
agctttccacattctcggcagccat

SEQ ID NO: 3205218 - DNA, 25 bp, Homo sapien
ctcggcagccatattaaatgtgttc

SEQ ID NO: 3205219 - DNA, 25 bp, Homo sapien
cacattctcggcagccatattaaat

SEQ ID NO: 3205220 - DNA, 25 bp, Homo sapien
tagggttcctagcactgatgcctgc

SEQ ID NO: 3205221 - DNA, 25 bp, Homo sapien
caatgccagatggtgtttatgggct

SEQ ID NO: 3205222 - DNA, 25 bp, Homo sapien
tatggaaactcttgatgcatgtgct

SEQ ID NO: 3205223 - DNA, 25 bp, Homo sapien
gagagttctggtactgcaatcacaa

SEQ ID NO: 3205224 - DNA, 25 bp, Homo sapien
ggagtccatttagcccagtgggaaa

SEQ ID NO: 3205225 - DNA, 25 bp, Homo sapien
ccttgaaggatatgctggcagccat

SEQ ID NO: 3205226 - DNA, 25 bp, Homo sapien
cagtgggaaagtcttggaactcagg

SEQ ID NO: 3205227 - DNA, 25 bp, Homo sapien
tgtctaaaaatttggcctaggaatg

SEQ ID NO: 3205228 - DNA, 25 bp, Homo sapien
gcatttagactgtagctcctcagcc

SEQ ID NO: 3205229 - DNA, 25 bp, Homo sapien
gacttcggttcccaacatgcgtatg

SEQ ID NO: 3205230 - DNA, 25 bp, Homo sapien
taaagatttgtcctagggaagatgg

SEQ ID NO: 3205231 - DNA, 25 bp, Homo sapien
gaagatggctgacttcggttcccaa

SEQ ID NO: 3205232 - DNA, 25 bp, Homo sapien
cttataaatggttagctgaaagtag

SEQ ID NO: 3205233 - DNA, 25 bp, Homo sapien
tataaatggttagctgaaagtagac

SEQ ID NO: 3205234 - DNA, 25 bp, Homo sapien
ttataaatggttagctgaaagtaga

SEQ ID NO: 3205235 - DNA, 25 bp, Homo sapien
ggatggattctcaaatacttgtgat

SEQ ID NO: 3205236 - DNA, 25 bp, Homo sapien
tccttataatactgttttgacccca

SEQ ID NO: 3205237 - DNA, 25 bp, Homo sapien
gaatgattctccttacacaattata

SEQ ID NO: 3205238 - DNA, 25 bp, Homo sapien
gattctaaagctaaaacacaacttg

SEQ ID NO: 3205239 - DNA, 25 bp, Homo sapien
catgttctgtacttgtactttgtac

SEQ ID NO: 3205240 - DNA, 25 bp, Homo sapien
tacatgttctgtacttgtactttgt

SEQ ID NO: 3205241 - DNA, 25 bp, Homo sapien
gttctgtacttgtactttgtaccat

SEQ ID NO: 3205242 - DNA, 25 bp, Homo sapien
tgttctgtacttgtactttgtacca

SEQ ID NO: 3205243 - DNA, 25 bp, Homo sapien
cactcaaaattgcagtatgtaaagc

SEQ ID NO: 3205244 - DNA, 25 bp, Homo sapien
atatttttatacgatatgcacacac

SEQ ID NO: 3205245 - DNA, 25 bp, Homo sapien
ctcatcatgagaagacacagttcct

SEQ ID NO: 3205246 - DNA, 25 bp, Homo sapien
ggcttatttttaggactcatcatga

SEQ ID NO: 3205247 - DNA, 25 bp, Homo sapien
tgttagcacggcaaagaaccttcaa

SEQ ID NO: 3205248 - DNA, 25 bp, Homo sapien
tggtcattctctacaacatatgtta

SEQ ID NO: 3205249 - DNA, 25 bp, Homo sapien
ggttttacacactatagatgtctat

SEQ ID NO: 3205250 - DNA, 25 bp, Homo sapien
gactagacaattactatgtggtcat

SEQ ID NO: 3205251 - DNA, 25 bp, Homo sapien
tctatgagtcgcacaattcttgagt

SEQ ID NO: 3205252 - DNA, 25 bp, Homo sapien
caaataatactggaagttgtaccag

SEQ ID NO: 3205253 - DNA, 25 bp, Homo sapien
tctgaaagtctagagaattacaact

SEQ ID NO: 3205254 - DNA, 25 bp, Homo sapien
ttgtaccagaagaagataagttatg

SEQ ID NO: 3205255 - DNA, 25 bp, Homo sapien
tcaacaggtactcatggtcaaaatc

SEQ ID NO: 3205256 - DNA, 25 bp, Homo sapien
gagaagttgctgtgacttcaacagg

SEQ ID NO: 3205257 - DNA, 25 bp, Homo sapien
tcaattactctgcagaagccttcat

SEQ ID NO: 3205258 - DNA, 25 bp, Homo sapien
cattacgatgaaagtcattcaaatc

SEQ ID NO: 3205259 - DNA, 25 bp, Homo sapien
gtctggtccactgctgtaagataat

SEQ ID NO: 3205260 - DNA, 25 bp, Homo sapien
ggcaagcaggaagcttccttaaaga

SEQ ID NO: 3205261 - DNA, 25 bp, Homo sapien
gcaggaagcttccttaaagacatac

SEQ ID NO: 3205262 - DNA, 25 bp, Homo sapien
gcagctttccccggcaagcaggaag

SEQ ID NO: 3205263 - DNA, 25 bp, Homo sapien
ccccggcaagcaggaagcttcctta

SEQ ID NO: 3205264 - DNA, 25 bp, Homo sapien
ttcaacatggatgtagacatgacag

SEQ ID NO: 3205265 - DNA, 25 bp, Homo sapien
tgattatccttaaagccgaaagact

SEQ ID NO: 3205266 - DNA, 25 bp, Homo sapien
gacatgacagttgaatgccacatac

SEQ ID NO: 3205267 - DNA, 25 bp, Homo sapien
gagtaccgcgggttgattatcctta

SEQ ID NO: 3205268 - DNA, 25 bp, Homo sapien
gaaacacaagcttctcacgcgagga

SEQ ID NO: 3205269 - DNA, 25 bp, Homo sapien
gaaaacatgctcttaagggaatggt

SEQ ID NO: 3205270 - DNA, 25 bp, Homo sapien
ggcggataccccaatgacatatgca

SEQ ID NO: 3205271 - DNA, 25 bp, Homo sapien
gatacacggaaagcttttttctgcc

SEQ ID NO: 3205272 - DNA, 25 bp, Homo sapien
tgagaggtaaccaaatagcactcgg

SEQ ID NO: 3205273 - DNA, 25 bp, Homo sapien
tgtcagttcatctcaacaagcggtt

SEQ ID NO: 3205274 - DNA, 25 bp, Homo sapien
tgaacttagagaccaagagcctttg

SEQ ID NO: 3205275 - DNA, 25 bp, Homo sapien
agtagcaaaaagcaacagtcctccg

SEQ ID NO: 3205276 - DNA, 25 bp, Homo sapien
caaagcttattgaagtcaggtcagt

SEQ ID NO: 3205277 - DNA, 25 bp, Homo sapien
tcagcagcatctacagggaataaat

SEQ ID NO: 3205278 - DNA, 25 bp, Homo sapien
tgaaaaagacttcgaccactgctct

SEQ ID NO: 3205279 - DNA, 25 bp, Homo sapien
catcttttgagacaaagggcagcac

SEQ ID NO: 3205280 - DNA, 25 bp, Homo sapien
gacaaacaagatcttgatctgagtg

SEQ ID NO: 3205281 - DNA, 25 bp, Homo sapien
agaaactcctttacgaaatctgaca

SEQ ID NO: 3205282 - DNA, 25 bp, Homo sapien
gaaatctgacaaacaagatcttgat

SEQ ID NO: 3205283 - DNA, 25 bp, Homo sapien
tcctttacgaaatctgacaaacaag

SEQ ID NO: 3205284 - DNA, 25 bp, Homo sapien
tagacaactaaaatctagtccaagg

SEQ ID NO: 3205285 - DNA, 25 bp, Homo sapien
gcctggtgctgtctgggcattcatg

SEQ ID NO: 3205286 - DNA, 25 bp, Homo sapien
tacttggtgaaaaacttcttagaca

SEQ ID NO: 3205287 - DNA, 25 bp, Homo sapien
gtgctgtctgggcattcatgcagat

SEQ ID NO: 3205288 - DNA, 25 bp, Homo sapien
catttgttacttcctgggcctttgg

SEQ ID NO: 3205289 - DNA, 25 bp, Homo sapien
gggcctttggaccacagagctccat

SEQ ID NO: 3205290 - DNA, 25 bp, Homo sapien
tgggcctttggaccacagagctcca

SEQ ID NO: 3205291 - DNA, 25 bp, Homo sapien
tacttcctgggcctttggaccacag

SEQ ID NO: 3205292 - DNA, 25 bp, Homo sapien
gaggttctcaggtctctacctttgc

SEQ ID NO: 3205293 - DNA, 25 bp, Homo sapien
tccagaggttctcaggtctctacct

SEQ ID NO: 3205294 - DNA, 25 bp, Homo sapien
aacttaatatctccagaggttctca

SEQ ID NO: 3205295 - DNA, 25 bp, Homo sapien
taagcttaaacttaatatctccaga

SEQ ID NO: 3205296 - DNA, 25 bp, Homo sapien
ctcaatcatcaagcccatcactttt

SEQ ID NO: 3205297 - DNA, 25 bp, Homo sapien
tcatcaagcccatcacttttttctt

SEQ ID NO: 3205298 - DNA, 25 bp, Homo sapien
tcctcaatcatcaagcccatcactt

SEQ ID NO: 3205299 - DNA, 25 bp, Homo sapien
ttcttcttacgtcttgtggatttgt

SEQ ID NO: 3205300 - DNA, 25 bp, Homo sapien
aattcaaaggataatcatctgggtc

SEQ ID NO: 3205301 - DNA, 25 bp, Homo sapien
tctaaacaagtttctagatgtatgg

SEQ ID NO: 3205302 - DNA, 25 bp, Homo sapien
gaatgtagttcttggagccatgaga

SEQ ID NO: 3205303 - DNA, 25 bp, Homo sapien
catgagaaatatgggcagaccctgg

SEQ ID NO: 3205304 - DNA, 25 bp, Homo sapien
tctttttctatgtctggtaaccacc

SEQ ID NO: 3205305 - DNA, 25 bp, Homo sapien
ctaaagaccgcttgctttctataca

SEQ ID NO: 3205306 - DNA, 25 bp, Homo sapien
aaatagccaccctaaagaccgcttg

SEQ ID NO: 3205307 - DNA, 25 bp, Homo sapien
tggtaaccaccaaatagccacccta

SEQ ID NO: 3205308 - DNA, 25 bp, Homo sapien
taacttgataagtataaggaccacc

SEQ ID NO: 3205309 - DNA, 25 bp, Homo sapien
taagtataaggaccaccttgatcca

SEQ ID NO: 3205310 - DNA, 25 bp, Homo sapien
ggactggctctaacttgataagtat

SEQ ID NO: 3205311 - DNA, 25 bp, Homo sapien
aggaccaccttgatccaagccacag

SEQ ID NO: 3205312 - DNA, 25 bp, Homo sapien
cagtggcgcagggaatataaagcgc

SEQ ID NO: 3205313 - DNA, 25 bp, Homo sapien
tctaggatcatttggcagtggcgca

SEQ ID NO: 3205314 - DNA, 25 bp, Homo sapien
aaagcgctcttccaattgcgaccca

SEQ ID NO: 3205315 - DNA, 25 bp, Homo sapien
gttaacctctaggatcatttggcag

SEQ ID NO: 3205316 - DNA, 25 bp, Homo sapien
catctgccatcctgctaacgtgcat

SEQ ID NO: 3205317 - DNA, 25 bp, Homo sapien
catcctgctaacgtgcattgatgtg

SEQ ID NO: 3205318 - DNA, 25 bp, Homo sapien
taacgtgcattgatgtgcatgtggc

SEQ ID NO: 3205319 - DNA, 25 bp, Homo sapien
gacatctgccatcctgctaacgtgc

SEQ ID NO: 3205320 - DNA, 25 bp, Homo sapien
gggcaaaggacagggaattaacgca

SEQ ID NO: 3205321 - DNA, 25 bp, Homo sapien
aattaacgcaggcaaagtgagatcc

SEQ ID NO: 3205322 - DNA, 25 bp, Homo sapien
gacagggaattaacgcaggcaaagt

SEQ ID NO: 3205323 - DNA, 25 bp, Homo sapien
gcaggcaaagtgagatcctacatct

SEQ ID NO: 3205324 - DNA, 25 bp, Homo sapien
gctttcaaatatgtttgctctttct

SEQ ID NO: 3205325 - DNA, 25 bp, Homo sapien
tttgtgggcatttttttgctatgaa

SEQ ID NO: 3205326 - DNA, 25 bp, Homo sapien
tagctttcaaatatgtttgctcttt

SEQ ID NO: 3205327 - DNA, 25 bp, Homo sapien
acactgctataaatatgtcccagaa

SEQ ID NO: 3205328 - DNA, 25 bp, Homo sapien
atgataagcagcagaggctcttcct

SEQ ID NO: 3205329 - DNA, 25 bp, Homo sapien
caattatcctacttgttgactggct

SEQ ID NO: 3205330 - DNA, 25 bp, Homo sapien
ggcagcaattatcctacttgttgac

SEQ ID NO: 3205331 - DNA, 25 bp, Homo sapien
gataagcagcagaggctcttcctaa

SEQ ID NO: 3205332 - DNA, 25 bp, Homo sapien
aaatttatggcagttgtgaagagga

SEQ ID NO: 3205333 - DNA, 25 bp, Homo sapien
ggaaaagccaaatgggccataatga

SEQ ID NO: 3205334 - DNA, 25 bp, Homo sapien
aatttatggcagttgtgaagaggaa

SEQ ID NO: 3205335 - DNA, 25 bp, Homo sapien
aaatgggccataatgatgacttggg

SEQ ID NO: 3205336 - DNA, 25 bp, Homo sapien
tatctcatcaaaacaaagatccagt

SEQ ID NO: 3205337 - DNA, 25 bp, Homo sapien
aacaaagatccagttcagaagctac

SEQ ID NO: 3205338 - DNA, 25 bp, Homo sapien
tcatcaaaacaaagatccagttcag

SEQ ID NO: 3205339 - DNA, 25 bp, Homo sapien
caaaacaaagatccagttcagaagc

SEQ ID NO: 3205340 - DNA, 25 bp, Homo sapien
atcacaggtatcctctgactgctgg

SEQ ID NO: 3205341 - DNA, 25 bp, Homo sapien
cacaggtatcctctgactgctggca

SEQ ID NO: 3205342 - DNA, 25 bp, Homo sapien
gtttttcacttgcaacaacaaagct

SEQ ID NO: 3205343 - DNA, 25 bp, Homo sapien
gcctgtgccttcctaacacagtttt

SEQ ID NO: 3205344 - DNA, 25 bp, Homo sapien
tcacagaaggtttttgtgattgatt

SEQ ID NO: 3205345 - DNA, 25 bp, Homo sapien
gattgattctttgtaacactaacag

SEQ ID NO: 3205346 - DNA, 25 bp, Homo sapien
taagtctgttgcacagtgccttgta

SEQ ID NO: 3205347 - DNA, 25 bp, Homo sapien
aacagggatacacttctttgcaaat

SEQ ID NO: 3205348 - DNA, 25 bp, Homo sapien
ttgatgcagaattggaatggaggaa

SEQ ID NO: 3205349 - DNA, 25 bp, Homo sapien
aatgatcaaggcaaatgcttcaaac

SEQ ID NO: 3205350 - DNA, 25 bp, Homo sapien
ccaaatgatcaaggcaaatgcttca

SEQ ID NO: 3205351 - DNA, 25 bp, Homo sapien
aaatgatcaaggcaaatgcttcaaa

SEQ ID NO: 3205352 - DNA, 25 bp, Homo sapien
tgatcaaggcaaatgcttcaaacat

SEQ ID NO: 3205353 - DNA, 25 bp, Homo sapien
cacatcggtccgacgaatccagtca

SEQ ID NO: 3205354 - DNA, 25 bp, Homo sapien
cagtatagtcgctcttcaatgtaag

SEQ ID NO: 3205355 - DNA, 25 bp, Homo sapien
aaatcatcgtccacttttgggactc

SEQ ID NO: 3205356 - DNA, 25 bp, Homo sapien
tggagcaatgctctgcacatcggtc

SEQ ID NO: 3205357 - DNA, 25 bp, Homo sapien
aaggccttattatagggtcaaagag

SEQ ID NO: 3205358 - DNA, 25 bp, Homo sapien
ggtcagaaggccttattatagggtc

SEQ ID NO: 3205359 - DNA, 25 bp, Homo sapien
tggaggtcagaaggccttattatag

SEQ ID NO: 3205360 - DNA, 25 bp, Homo sapien
tattatagggtcaaagagttctgga

SEQ ID NO: 3205361 - DNA, 25 bp, Homo sapien
cttgcgcacagaagcaatgtgtaga

SEQ ID NO: 3205362 - DNA, 25 bp, Homo sapien
tgcacgcacaaatgtagatgtttgc

SEQ ID NO: 3205363 - DNA, 25 bp, Homo sapien
gaattttacagtccacttgcgcaca

SEQ ID NO: 3205364 - DNA, 25 bp, Homo sapien
gagaggtaataagtttgcacgcaca

SEQ ID NO: 3205365 - DNA, 25 bp, Homo sapien
ctgtcttatatctagagaaacctgg

SEQ ID NO: 3205366 - DNA, 25 bp, Homo sapien
gatctattgagattgttctctaagg

SEQ ID NO: 3205367 - DNA, 25 bp, Homo sapien
gagattgttctctaaggtattaagg

SEQ ID NO: 3205368 - DNA, 25 bp, Homo sapien
gattgttctctaaggtattaaggat

SEQ ID NO: 3205369 - DNA, 25 bp, Homo sapien
tgctgtttggatctattgagattgt

SEQ ID NO: 3205370 - DNA, 25 bp, Homo sapien
tggcccttggaataggaacatgtct

SEQ ID NO: 3205371 - DNA, 25 bp, Homo sapien
catgcagcacacctaaatggttgta

SEQ ID NO: 3205372 - DNA, 25 bp, Homo sapien
atagaatgtgtgacacggccatcca

SEQ ID NO: 3205373 - DNA, 25 bp, Homo sapien
ccactattctagctccaattatgga

SEQ ID NO: 3205374 - DNA, 25 bp, Homo sapien
ctttctccatttggccactctaata

SEQ ID NO: 3205375 - DNA, 25 bp, Homo sapien
gtctttctccatttggccactctaa

SEQ ID NO: 3205376 - DNA, 25 bp, Homo sapien
ttctccatttggccactctaatagg

SEQ ID NO: 3205377 - DNA, 25 bp, Homo sapien
ctccatttggccactctaataggca

SEQ ID NO: 3205378 - DNA, 25 bp, Homo sapien
gaatgtgatagacctttcattttca

SEQ ID NO: 3205379 - DNA, 25 bp, Homo sapien
aaaagaagcgtggaatgtgatagac

SEQ ID NO: 3205380 - DNA, 25 bp, Homo sapien
gaagcgtggaatgtgatagaccttt

SEQ ID NO: 3205381 - DNA, 25 bp, Homo sapien
gcgtggaatgtgatagacctttcat

SEQ ID NO: 3205382 - DNA, 25 bp, Homo sapien
atttgtgcatcaattaccgaatatt

SEQ ID NO: 3205383 - DNA, 25 bp, Homo sapien
tttgtgcatcaattaccgaatattt

SEQ ID NO: 3205384 - DNA, 25 bp, Homo sapien
catcagcgagagcatcaaccaaggt

SEQ ID NO: 3205385 - DNA, 25 bp, Homo sapien
aaagctgaggctttcgcatcagcga

SEQ ID NO: 3205386 - DNA, 25 bp, Homo sapien
aagagatgctggtcccattccaaga

SEQ ID NO: 3205387 - DNA, 25 bp, Homo sapien
caaccaaggttatgaaagctccgta

SEQ ID NO: 3205388 - DNA, 25 bp, Homo sapien
gatactctatcggtagttaaccagt

SEQ ID NO: 3205389 - DNA, 25 bp, Homo sapien
tattcatgtgcatggcatagaagat

SEQ ID NO: 3205390 - DNA, 25 bp, Homo sapien
ctaaagctctggagcaaatttaaaa

SEQ ID NO: 3205391 - DNA, 25 bp, Homo sapien
tgtggcccgatggtgcagcaggctc

SEQ ID NO: 3205392 - DNA, 25 bp, Homo sapien
tacaaaatgattgccagcagatccg

SEQ ID NO: 3205393 - DNA, 25 bp, Homo sapien
ggtctgcttcattgttggtcccatt

SEQ ID NO: 3205394 - DNA, 25 bp, Homo sapien
cgggagtcacagacttccttgttca

SEQ ID NO: 3205395 - DNA, 25 bp, Homo sapien
gttacagtagaaggatctgacctct

SEQ ID NO: 3205396 - DNA, 25 bp, Homo sapien
aactgccagcacgagttgattgcaa

SEQ ID NO: 3205397 - DNA, 25 bp, Homo sapien
ggaaaatggagcatgccaggagcat

SEQ ID NO: 3205398 - DNA, 25 bp, Homo sapien
gaaccagccatcgaaaaacctcgga

SEQ ID NO: 3205399 - DNA, 25 bp, Homo sapien
aacctcggaggccaataacaactca

SEQ ID NO: 3205400 - DNA, 25 bp, Homo sapien
tggttaggctctgacacctcaatac

SEQ ID NO: 3205401 - DNA, 25 bp, Homo sapien
taggctctgacacctcaataccact

SEQ ID NO: 3205402 - DNA, 25 bp, Homo sapien
accctggttaggctctgacacctca

SEQ ID NO: 3205403 - DNA, 25 bp, Homo sapien
cttcaccctggttaggctctgacac

SEQ ID NO: 3205404 - DNA, 25 bp, Homo sapien
aagagcagccgcgacttggctgcgc

SEQ ID NO: 3205405 - DNA, 25 bp, Homo sapien
ctatatttggatctattaatcagca

SEQ ID NO: 3205406 - DNA, 25 bp, Homo sapien
ggcggccacgccagcactatatttg

SEQ ID NO: 3205407 - DNA, 25 bp, Homo sapien
tggctcctaagtgcaagtctgggcc

SEQ ID NO: 3205408 - DNA, 25 bp, Homo sapien
aaggaaagccccagcatccgccaca

SEQ ID NO: 3205409 - DNA, 25 bp, Homo sapien
acttgctccactggagccacgttgt

SEQ ID NO: 3205410 - DNA, 25 bp, Homo sapien
acaacttgctccactggagccacgt

SEQ ID NO: 3205411 - DNA, 25 bp, Homo sapien
tgcagagccgcatcccgaaggaaag

SEQ ID NO: 3205412 - DNA, 25 bp, Homo sapien
gcaggacagcgagccgcctgcatgt

SEQ ID NO: 3205413 - DNA, 25 bp, Homo sapien
catgtggccttgtcccgaaactcag

SEQ ID NO: 3205414 - DNA, 25 bp, Homo sapien
ccacctcccggatgatgtaaatgtt

SEQ ID NO: 3205415 - DNA, 25 bp, Homo sapien
tccttgaaccgcagctcatagggca

SEQ ID NO: 3205416 - DNA, 25 bp, Homo sapien
ctttgaaaactcagtcaccagctgc

SEQ ID NO: 3205417 - DNA, 25 bp, Homo sapien
ttgaaaactcagtcaccagctgcac

SEQ ID NO: 3205418 - DNA, 25 bp, Homo sapien
tttgaaaactcagtcaccagctgca

SEQ ID NO: 3205419 - DNA, 25 bp, Homo sapien
gcaagcacttggatgtccgtggcag

SEQ ID NO: 3205420 - DNA, 25 bp, Homo sapien
caaactctgcttccaactggtatgt

SEQ ID NO: 3205421 - DNA, 25 bp, Homo sapien
actctgcttccaactggtatgtgag

SEQ ID NO: 3205422 - DNA, 25 bp, Homo sapien
caagcacttggatgtccgtggcaga

SEQ ID NO: 3205423 - DNA, 25 bp, Homo sapien
gtggttcttgttttaggtgagacac

SEQ ID NO: 3205424 - DNA, 25 bp, Homo sapien
cttctgtggttcttgttttaggtga

SEQ ID NO: 3205425 - DNA, 25 bp, Homo sapien
tctgtggttcttgttttaggtgaga

SEQ ID NO: 3205426 - DNA, 25 bp, Homo sapien
ctgtggttcttgttttaggtgagac

SEQ ID NO: 3205427 - DNA, 25 bp, Homo sapien
ttctgggtgctgaatcgatgagctc

SEQ ID NO: 3205428 - DNA, 25 bp, Homo sapien
tctgggtgctgaatcgatgagctca

SEQ ID NO: 3205429 - DNA, 25 bp, Homo sapien
tttctgggtgctgaatcgatgagct

SEQ ID NO: 3205430 - DNA, 25 bp, Homo sapien
ctgcagttcatgatcgatgttgggc

SEQ ID NO: 3205431 - DNA, 25 bp, Homo sapien
tgcagttcatgatcgatgttgggca

SEQ ID NO: 3205432 - DNA, 25 bp, Homo sapien
atctgcttgatgttactgggggtta

SEQ ID NO: 3205433 - DNA, 25 bp, Homo sapien
gcttgatgttactgggggttatcca

SEQ ID NO: 3205434 - DNA, 25 bp, Homo sapien
gctggatctgcttgatgttactggg

SEQ ID NO: 3205435 - DNA, 25 bp, Homo sapien
tgctggatctgcttgatgttactgg

SEQ ID NO: 3205436 - DNA, 25 bp, Homo sapien
gcctggggaagtctgtggtcacgca

SEQ ID NO: 3205437 - DNA, 25 bp, Homo sapien
cagaacattctgcctggggaagtct

SEQ ID NO: 3205438 - DNA, 25 bp, Homo sapien
ctggggaagtctgtggtcacgcagc

SEQ ID NO: 3205439 - DNA, 25 bp, Homo sapien
gaacattctgcctggggaagtctgt

SEQ ID NO: 3205440 - DNA, 25 bp, Homo sapien
tgaaacagccgtggcagcccagacg

SEQ ID NO: 3205441 - DNA, 25 bp, Homo sapien
cttgaaacagccgtggcagcccaga

SEQ ID NO: 3205442 - DNA, 25 bp, Homo sapien
aaacagccgtggcagcccagacgta

SEQ ID NO: 3205443 - DNA, 25 bp, Homo sapien
acagccgtggcagcccagacgtagc

SEQ ID NO: 3205444 - DNA, 25 bp, Homo sapien
gaagcgctgatcctcggtgagatgg

SEQ ID NO: 3205445 - DNA, 25 bp, Homo sapien
tggagatgtcattctcgacaaaggg

SEQ ID NO: 3205446 - DNA, 25 bp, Homo sapien
ttctttctggaagcgttgggattta

SEQ ID NO: 3205447 - DNA, 25 bp, Homo sapien
gttgggatttaagcgtctccgccca

SEQ ID NO: 3205448 - DNA, 25 bp, Homo sapien
gttccgtgcagacccggcagggcat

SEQ ID NO: 3205449 - DNA, 25 bp, Homo sapien
agtccagttccgtgcagacccggca

SEQ ID NO: 3205450 - DNA, 25 bp, Homo sapien
gacccggcagggcatgggcgggcag

SEQ ID NO: 3205451 - DNA, 25 bp, Homo sapien
agataaatctgaactgggcacacag

SEQ ID NO: 3205452 - DNA, 25 bp, Homo sapien
tccaagactagtccgatgacagcca

SEQ ID NO: 3205453 - DNA, 25 bp, Homo sapien
aagctatactggcttccatatggca

SEQ ID NO: 3205454 - DNA, 25 bp, Homo sapien
cacatggcccctaaaagagacaact

SEQ ID NO: 3205455 - DNA, 25 bp, Homo sapien
tgtacactaggaagccacatcaagg

SEQ ID NO: 3205456 - DNA, 25 bp, Homo sapien
gattagagcagcctttccaaaatga

SEQ ID NO: 3205457 - DNA, 25 bp, Homo sapien
gtcagggaaacaattggctattatt

SEQ ID NO: 3205458 - DNA, 25 bp, Homo sapien
ggctattattgaacagaactgctga

SEQ ID NO: 3205459 - DNA, 25 bp, Homo sapien
tccaaaatgagggtcacaaatgcat

SEQ ID NO: 3205460 - DNA, 25 bp, Homo sapien
tgttgacatagttgttatagccctt

SEQ ID NO: 3205461 - DNA, 25 bp, Homo sapien
cttgttgacatagttgttatagccc

SEQ ID NO: 3205462 - DNA, 25 bp, Homo sapien
gttgacatagttgttatagcccttt

SEQ ID NO: 3205463 - DNA, 25 bp, Homo sapien
catcttgttgacatagttgttatag

SEQ ID NO: 3205464 - DNA, 25 bp, Homo sapien
cacaagggtgttcaggcagtgttgc

SEQ ID NO: 3205465 - DNA, 25 bp, Homo sapien
ggtccatgtctccagaacagcttct

SEQ ID NO: 3205466 - DNA, 25 bp, Homo sapien
taatgctcagtgatgcacaagggtg

SEQ ID NO: 3205467 - DNA, 25 bp, Homo sapien
cagaagaggcccatgtactcctttg

SEQ ID NO: 3205468 - DNA, 25 bp, Homo sapien
cactaagaacctcttgtgggcattg

SEQ ID NO: 3205469 - DNA, 25 bp, Homo sapien
tcctgttgaggtaataatggatctg

SEQ ID NO: 3205470 - DNA, 25 bp, Homo sapien
cagactcttcctgttgaggtaataa

SEQ ID NO: 3205471 - DNA, 25 bp, Homo sapien
tcatggtcatactggacttttctct

SEQ ID NO: 3205472 - DNA, 25 bp, Homo sapien
gaattgaggttgggtaccaagcatc

SEQ ID NO: 3205473 - DNA, 25 bp, Homo sapien
ttctcaaaatgcaagtatgaggaat

SEQ ID NO: 3205474 - DNA, 25 bp, Homo sapien
aagaattgaggttgggtaccaagca

SEQ ID NO: 3205475 - DNA, 25 bp, Homo sapien
tctcaaaatgcaagtatgaggaatg

SEQ ID NO: 3205476 - DNA, 25 bp, Homo sapien
tgtgacccacattcagcatgatctg

SEQ ID NO: 3205477 - DNA, 25 bp, Homo sapien
gcagtagacaacaccttgaagccca

SEQ ID NO: 3205478 - DNA, 25 bp, Homo sapien
gacaagaggtctgtgcagcagtaga

SEQ ID NO: 3205479 - DNA, 25 bp, Homo sapien
aagggttacaaaggatgcaggatct

SEQ ID NO: 3205480 - DNA, 25 bp, Homo sapien
catagtctttgaaccgaaagctagg

SEQ ID NO: 3205481 - DNA, 25 bp, Homo sapien
tcataaacagggaaatagcccttct

SEQ ID NO: 3205482 - DNA, 25 bp, Homo sapien
gtttgggtcttcttatgccacatcc

SEQ ID NO: 3205483 - DNA, 25 bp, Homo sapien
tcaagtattccagtcataaacaggg

SEQ ID NO: 3205484 - DNA, 25 bp, Homo sapien
tgcccaatgtgtgaatgaaggcagg

SEQ ID NO: 3205485 - DNA, 25 bp, Homo sapien
ctggtgcccaatgtgtgaatgaagg

SEQ ID NO: 3205486 - DNA, 25 bp, Homo sapien
gtacagacaggatctggtgcccaat

SEQ ID NO: 3205487 - DNA, 25 bp, Homo sapien
gctgtaaagctaaggctttgaggca

SEQ ID NO: 3205488 - DNA, 25 bp, Homo sapien
ttttgtgaacattccaccacactag

SEQ ID NO: 3205489 - DNA, 25 bp, Homo sapien
tcttataccagctatttcttaaacc

SEQ ID NO: 3205490 - DNA, 25 bp, Homo sapien
ctttttgtgaacattccaccacact

SEQ ID NO: 3205491 - DNA, 25 bp, Homo sapien
agactaaatcttataccagctattt

SEQ ID NO: 3205492 - DNA, 25 bp, Homo sapien
tgaagcgagcagaggcggcatcgag

SEQ ID NO: 3205493 - DNA, 25 bp, Homo sapien
caagcaatatgctgccactgtcagc

SEQ ID NO: 3205494 - DNA, 25 bp, Homo sapien
catcgagcgagtacagcagcagata

SEQ ID NO: 3205495 - DNA, 25 bp, Homo sapien
cagcaagcaatatgctgccactgtc

SEQ ID NO: 3205496 - DNA, 25 bp, Homo sapien
ttccctgtgggcttatgatctaatg

SEQ ID NO: 3205497 - DNA, 25 bp, Homo sapien
gggtaactctcctcggatacacata

SEQ ID NO: 3205498 - DNA, 25 bp, Homo sapien
gatacacatatctggcatctggctg

SEQ ID NO: 3205499 - DNA, 25 bp, Homo sapien
tgagacatataagcccataaaggca

SEQ ID NO: 3205500 - DNA, 25 bp, Homo sapien
tggtatgtggctgaacaccactggg

SEQ ID NO: 3205501 - DNA, 25 bp, Homo sapien
aggccaggctactccagctgtgctc

SEQ ID NO: 3205502 - DNA, 25 bp, Homo sapien
ctgaatgcagagagtgtcagactca

SEQ ID NO: 3205503 - DNA, 25 bp, Homo sapien
gcttgtttctgaaccctcaggccag

SEQ ID NO: 3205504 - DNA, 25 bp, Homo sapien
taggggatgcaagaggctgacattc

SEQ ID NO: 3205505 - DNA, 25 bp, Homo sapien
ctttcctaggatacaacaacctcat

SEQ ID NO: 3205506 - DNA, 25 bp, Homo sapien
ctgacattctttcctaggatacaac

SEQ ID NO: 3205507 - DNA, 25 bp, Homo sapien
gatgcaagaggctgacattctttcc

SEQ ID NO: 3205508 - DNA, 25 bp, Homo sapien
tgtaactgtccagaaattgtctcca

SEQ ID NO: 3205509 - DNA, 25 bp, Homo sapien
gtaactgtccagaaattgtctccat

SEQ ID NO: 3205510 - DNA, 25 bp, Homo sapien
atgtaactgtccagaaattgtctcc

SEQ ID NO: 3205511 - DNA, 25 bp, Homo sapien
aatgtaactgtccagaaattgtctc

SEQ ID NO: 3205512 - DNA, 25 bp, Homo sapien
tcttgcttcacagtggaggatggct

SEQ ID NO: 3205513 - DNA, 25 bp, Homo sapien
gaactgagggtgtgaatagcctgct

SEQ ID NO: 3205514 - DNA, 25 bp, Homo sapien
ggtaagatgcctatggtcagctgga

SEQ ID NO: 3205515 - DNA, 25 bp, Homo sapien
gatgatgtgaggttccacaacgcca

SEQ ID NO: 3205516 - DNA, 25 bp, Homo sapien
gaataaaaaatttgtcctgtgctca

SEQ ID NO: 3205517 - DNA, 25 bp, Homo sapien
ctgtgatttggaatactttcagttc

SEQ ID NO: 3205518 - DNA, 25 bp, Homo sapien
atactttcagttcctcgtattttat

SEQ ID NO: 3205519 - DNA, 25 bp, Homo sapien
gatttggaatactttcagttcctcg

SEQ ID NO: 3205520 - DNA, 25 bp, Homo sapien
gacaatacaattctgctgaatgaac

SEQ ID NO: 3205521 - DNA, 25 bp, Homo sapien
ggagacaggtaggtcattacactga

SEQ ID NO: 3205522 - DNA, 25 bp, Homo sapien
gccatttgcttggtacgcttattaa

SEQ ID NO: 3205523 - DNA, 25 bp, Homo sapien
caatgtgccattctgggatctttcc

SEQ ID NO: 3205524 - DNA, 25 bp, Homo sapien
tcggtgctctaatttaccctgaagc

SEQ ID NO: 3205525 - DNA, 25 bp, Homo sapien
agctctcggtgctctaatttaccct

SEQ ID NO: 3205526 - DNA, 25 bp, Homo sapien
cggtgctctaatttaccctgaagca

SEQ ID NO: 3205527 - DNA, 25 bp, Homo sapien
tctcggtgctctaatttaccctgaa

SEQ ID NO: 3205528 - DNA, 25 bp, Homo sapien
caagttgagaattcccctcggtgga

SEQ ID NO: 3205529 - DNA, 25 bp, Homo sapien
gcctgcgggcctgttcactggtaat

SEQ ID NO: 3205530 - DNA, 25 bp, Homo sapien
ttgcttgcttccattcgcatgcctg

SEQ ID NO: 3205531 - DNA, 25 bp, Homo sapien
cactggtaatgcagtcgcgtgtgcc

SEQ ID NO: 3205532 - DNA, 25 bp, Homo sapien
gagggagagtgtctacgatattgtt

SEQ ID NO: 3205533 - DNA, 25 bp, Homo sapien
agcaagagactcattcccctcaggg

SEQ ID NO: 3205534 - DNA, 25 bp, Homo sapien
aaagctgtatttgctcgaagtgtcc

SEQ ID NO: 3205535 - DNA, 25 bp, Homo sapien
ttgtaatgaatctggaaagctgtat

SEQ ID NO: 3205536 - DNA, 25 bp, Homo sapien
atgttttagtgtcatgacccgtgga

SEQ ID NO: 3205537 - DNA, 25 bp, Homo sapien
tcatgacccgtggacttctgcaagg

SEQ ID NO: 3205538 - DNA, 25 bp, Homo sapien
ccgtggacttctgcaagggtgctgc

SEQ ID NO: 3205539 - DNA, 25 bp, Homo sapien
tctgcaagggtgctgccacccactt

SEQ ID NO: 3205540 - DNA, 25 bp, Homo sapien
gtggggcttgaccgtcgcactgcca

SEQ ID NO: 3205541 - DNA, 25 bp, Homo sapien
tctggtggggcttgaccgtcgcact

SEQ ID NO: 3205542 - DNA, 25 bp, Homo sapien
gggcttgaccgtcgcactgccacac

SEQ ID NO: 3205543 - DNA, 25 bp, Homo sapien
gcttgaccgtcgcactgccacacag

SEQ ID NO: 3205544 - DNA, 25 bp, Homo sapien
tgatgatagagagaggcaggaatca

SEQ ID NO: 3205545 - DNA, 25 bp, Homo sapien
gatgatagagagaggcaggaatcat

SEQ ID NO: 3205546 - DNA, 25 bp, Homo sapien
ctataaaatgatgatagagagaggc

SEQ ID NO: 3205547 - DNA, 25 bp, Homo sapien
aaaatgatgatagagagaggcagga

SEQ ID NO: 3205548 - DNA, 25 bp, Homo sapien
acagcctggaacgggacccgatgac

SEQ ID NO: 3205549 - DNA, 25 bp, Homo sapien
cctggaacgggacccgatgacaagt

SEQ ID NO: 3205550 - DNA, 25 bp, Homo sapien
agcctggaacgggacccgatgacaa

SEQ ID NO: 3205551 - DNA, 25 bp, Homo sapien
cacagcctggaacgggacccgatga

SEQ ID NO: 3205552 - DNA, 25 bp, Homo sapien
ggttgtgaaaccttcgggatctgct

SEQ ID NO: 3205553 - DNA, 25 bp, Homo sapien
agaccctctttaagccgcatgccga

SEQ ID NO: 3205554 - DNA, 25 bp, Homo sapien
actgtaacctgattcccctgtggtg

SEQ ID NO: 3205555 - DNA, 25 bp, Homo sapien
tttcaaaggtgtctcgggagatccc

SEQ ID NO: 3205556 - DNA, 25 bp, Homo sapien
ctttgtaatgttcgatctctctccc

SEQ ID NO: 3205557 - DNA, 25 bp, Homo sapien
ttgtaatgttcgatctctctcccag

SEQ ID NO: 3205558 - DNA, 25 bp, Homo sapien
tgctttgtaatgttcgatctctctc

SEQ ID NO: 3205559 - DNA, 25 bp, Homo sapien
gtaatgttcgatctctctcccagaa

SEQ ID NO: 3205560 - DNA, 25 bp, Homo sapien
gctttggtgcatacagaaaaacttt

SEQ ID NO: 3205561 - DNA, 25 bp, Homo sapien
cttttttgccttgcagattggctga

SEQ ID NO: 3205562 - DNA, 25 bp, Homo sapien
aaaacttttaggctctgagtaagct

SEQ ID NO: 3205563 - DNA, 25 bp, Homo sapien
tctgtcatgagaggcaagctcaaat

SEQ ID NO: 3205564 - DNA, 25 bp, Homo sapien
tcctctggaatacttggggaagatg

SEQ ID NO: 3205565 - DNA, 25 bp, Homo sapien
tgtctcacttgtcttacatctgttt

SEQ ID NO: 3205566 - DNA, 25 bp, Homo sapien
cagcctgagtcacgcgcaactcttg

SEQ ID NO: 3205567 - DNA, 25 bp, Homo sapien
tttctgagtcgtcccgcttgcagcc

SEQ ID NO: 3205568 - DNA, 25 bp, Homo sapien
tttcaaagggtaataatctgtgtgg

SEQ ID NO: 3205569 - DNA, 25 bp, Homo sapien
caaagggtaataatctgtgtggtaa

SEQ ID NO: 3205570 - DNA, 25 bp, Homo sapien
ttcctgctggtttgtatagcagtgg

SEQ ID NO: 3205571 - DNA, 25 bp, Homo sapien
gctggtttgtatagcagtggatgtt

SEQ ID NO: 3205572 - DNA, 25 bp, Homo sapien
aagcttgcagcttcaatacatgtgg

SEQ ID NO: 3205573 - DNA, 25 bp, Homo sapien
ggcttaaattcacttgtatctggca

SEQ ID NO: 3205574 - DNA, 25 bp, Homo sapien
cagtctgtttctgtgattagtacaa

SEQ ID NO: 3205575 - DNA, 25 bp, Homo sapien
tataggacctgcactcgatccagat

SEQ ID NO: 3205576 - DNA, 25 bp, Homo sapien
tgtatctaatactccatatggcacc

SEQ ID NO: 3205577 - DNA, 25 bp, Homo sapien
gtcctgtatctaatactccatatgg

SEQ ID NO: 3205578 - DNA, 25 bp, Homo sapien
cacagtcctgtatctaatactccat

SEQ ID NO: 3205579 - DNA, 25 bp, Homo sapien
taatactccatatggcaccagagtg

SEQ ID NO: 3205580 - DNA, 25 bp, Homo sapien
taaattggatgtccaacagtgcaaa

SEQ ID NO: 3205581 - DNA, 25 bp, Homo sapien
attggatgtccaacagtgcaaaact

SEQ ID NO: 3205582 - DNA, 25 bp, Homo sapien
aattggatgtccaacagtgcaaaac

SEQ ID NO: 3205583 - DNA, 25 bp, Homo sapien
aaattggatgtccaacagtgcaaaa

SEQ ID NO: 3205584 - DNA, 25 bp, Homo sapien
catagtccacactgttgatcaagat

SEQ ID NO: 3205585 - DNA, 25 bp, Homo sapien
ctgttgatcaagatgatggagtttt

SEQ ID NO: 3205586 - DNA, 25 bp, Homo sapien
gcaggctgtagaaatcatagtccac

SEQ ID NO: 3205587 - DNA, 25 bp, Homo sapien
aaatcatagtccacactgttgatca

SEQ ID NO: 3205588 - DNA, 25 bp, Homo sapien
cacagagcaacacaggtgaacgcag

SEQ ID NO: 3205589 - DNA, 25 bp, Homo sapien
acaggtgaacgcagctgaacatccc

SEQ ID NO: 3205590 - DNA, 25 bp, Homo sapien
caacacaggtgaacgcagctgaaca

SEQ ID NO: 3205591 - DNA, 25 bp, Homo sapien
gagcaacacaggtgaacgcagctga

SEQ ID NO: 3205592 - DNA, 25 bp, Homo sapien
cctggacaccggtagaggcttctgc

SEQ ID NO: 3205593 - DNA, 25 bp, Homo sapien
tgagtgtttcgtgcacacatcaaat

SEQ ID NO: 3205594 - DNA, 25 bp, Homo sapien
gattcgccatttgagcttctatgag

SEQ ID NO: 3205595 - DNA, 25 bp, Homo sapien
tctgggtgaagattcgccatttgag

SEQ ID NO: 3205596 - DNA, 25 bp, Homo sapien
ttaaaaatgagagaaaaacgctgac

SEQ ID NO: 3205597 - DNA, 25 bp, Homo sapien
cagttaaaaatgagagaaaaacgct

SEQ ID NO: 3205598 - DNA, 25 bp, Homo sapien
gttaaaaatgagagaaaaacgctga

SEQ ID NO: 3205599 - DNA, 25 bp, Homo sapien
tcagttaaaaatgagagaaaaacgc

SEQ ID NO: 3205600 - DNA, 25 bp, Homo sapien
tgtgccgcagggattagagagatca

SEQ ID NO: 3205601 - DNA, 25 bp, Homo sapien
ttaaagtgtgccgcagggattagag

SEQ ID NO: 3205602 - DNA, 25 bp, Homo sapien
gagagatcagctgtattggagtaat

SEQ ID NO: 3205603 - DNA, 25 bp, Homo sapien
tagagagatcagctgtattggagta

SEQ ID NO: 3205604 - DNA, 25 bp, Homo sapien
cagaagtagggaaatccggcagaga

SEQ ID NO: 3205605 - DNA, 25 bp, Homo sapien
ggcttgcaggcgtctctactctttg

SEQ ID NO: 3205606 - DNA, 25 bp, Homo sapien
tgggatagcctgtggattaagcaga

SEQ ID NO: 3205607 - DNA, 25 bp, Homo sapien
acaatgatgctgtgaccttaggtct

SEQ ID NO: 3205608 - DNA, 25 bp, Homo sapien
ttcaggaatcgccttttggctgccc

SEQ ID NO: 3205609 - DNA, 25 bp, Homo sapien
agtggttcaggaatcgccttttggc

SEQ ID NO: 3205610 - DNA, 25 bp, Homo sapien
gctaaagtggttcaggaatcgcctt

SEQ ID NO: 3205611 - DNA, 25 bp, Homo sapien
cctgctaaagtggttcaggaatcgc

SEQ ID NO: 3205612 - DNA, 25 bp, Homo sapien
cacaactctgatcgttgcggtactg

SEQ ID NO: 3205613 - DNA, 25 bp, Homo sapien
tattcagaaagtattgtagtctccc

SEQ ID NO: 3205614 - DNA, 25 bp, Homo sapien
tgcggtactgagtgacattagcctc

SEQ ID NO: 3205615 - DNA, 25 bp, Homo sapien
ttattcagttcgctggtgctggaca

SEQ ID NO: 3205616 - DNA, 25 bp, Homo sapien
tttcagcaggaatgaagtttttctt

SEQ ID NO: 3205617 - DNA, 25 bp, Homo sapien
ctttcagcaggaatgaagtttttct

SEQ ID NO: 3205618 - DNA, 25 bp, Homo sapien
ttcagcaggaatgaagtttttcttc

SEQ ID NO: 3205619 - DNA, 25 bp, Homo sapien
tcctttcaaggtctgatattttggt

SEQ ID NO: 3205620 - DNA, 25 bp, Homo sapien
cctttcaaggtctgatattttggta

SEQ ID NO: 3205621 - DNA, 25 bp, Homo sapien
ttcctttcaaggtctgatattttgg

SEQ ID NO: 3205622 - DNA, 25 bp, Homo sapien
catccttgaaagcccgcgtacgtgg

SEQ ID NO: 3205623 - DNA, 25 bp, Homo sapien
agcccgcgtacgtggagagggtttg

SEQ ID NO: 3205624 - DNA, 25 bp, Homo sapien
cttctggacatctgaagcatccttg

SEQ ID NO: 3205625 - DNA, 25 bp, Homo sapien
ccatacttctggacatctgaagcat

SEQ ID NO: 3205626 - DNA, 25 bp, Homo sapien
tttgtcatcttgtttgcctgaatct

SEQ ID NO: 3205627 - DNA, 25 bp, Homo sapien
gtcatcttgtttgcctgaatctttg

SEQ ID NO: 3205628 - DNA, 25 bp, Homo sapien
ttcattaattcccattaaatcacag

SEQ ID NO: 3205629 - DNA, 25 bp, Homo sapien
ttcccattaaatcacagtctttgtc

SEQ ID NO: 3205630 - DNA, 25 bp, Homo sapien
tctggtccccagtaaggctactttg

SEQ ID NO: 3205631 - DNA, 25 bp, Homo sapien
cctccactgcattgaccatctcttt

SEQ ID NO: 3205632 - DNA, 25 bp, Homo sapien
gacataatctgtgcctgtagggttt

SEQ ID NO: 3205633 - DNA, 25 bp, Homo sapien
tctctttcatgtcctgtagacataa

SEQ ID NO: 3205634 - DNA, 25 bp, Homo sapien
gcttggcctccacgcatatcatagg

SEQ ID NO: 3205635 - DNA, 25 bp, Homo sapien
gaagcttctggcctaggctgcttgt

SEQ ID NO: 3205636 - DNA, 25 bp, Homo sapien
atatcataggcaagcctaacaaggg

SEQ ID NO: 3205637 - DNA, 25 bp, Homo sapien
aaatgcccaatttcagctctttgag

SEQ ID NO: 3205638 - DNA, 25 bp, Homo sapien
tccttgtttggcaactgctttctgg

SEQ ID NO: 3205639 - DNA, 25 bp, Homo sapien
atccttgtttggcaactgctttctg

SEQ ID NO: 3205640 - DNA, 25 bp, Homo sapien
ccttgtttggcaactgctttctggc

SEQ ID NO: 3205641 - DNA, 25 bp, Homo sapien
ctatccttgtttggcaactgctttc

SEQ ID NO: 3205642 - DNA, 25 bp, Homo sapien
cttcttcagaggtaagttgtagatg

SEQ ID NO: 3205643 - DNA, 25 bp, Homo sapien
gatgacagtttgtactgtttgaatg

SEQ ID NO: 3205644 - DNA, 25 bp, Homo sapien
tagatgacagtttgtactgtttgaa

SEQ ID NO: 3205645 - DNA, 25 bp, Homo sapien
tcagaggtaagttgtagatgacagt

SEQ ID NO: 3205646 - DNA, 25 bp, Homo sapien
cacatcccaagtttcaggcctgtct

SEQ ID NO: 3205647 - DNA, 25 bp, Homo sapien
caggcctgtctccaattgtcagttc

SEQ ID NO: 3205648 - DNA, 25 bp, Homo sapien
tctccaattgtcagttctgcccatc

SEQ ID NO: 3205649 - DNA, 25 bp, Homo sapien
tgtctccaattgtcagttctgccca

SEQ ID NO: 3205650 - DNA, 25 bp, Homo sapien
cagggccttccgctgactggtgaag

SEQ ID NO: 3205651 - DNA, 25 bp, Homo sapien
acagcagggccttccgctgactggt

SEQ ID NO: 3205652 - DNA, 25 bp, Homo sapien
tgaagtcagtgccatgtcataggct

SEQ ID NO: 3205653 - DNA, 25 bp, Homo sapien
atgtcataggctctgatgactgcca

SEQ ID NO: 3205654 - DNA, 25 bp, Homo sapien
ggatttatctccttgacaaagcctt

SEQ ID NO: 3205655 - DNA, 25 bp, Homo sapien
aagaggtgaagatgctctgagtgca

SEQ ID NO: 3205656 - DNA, 25 bp, Homo sapien
gcagtgtgctgcatgcaacttggat

SEQ ID NO: 3205657 - DNA, 25 bp, Homo sapien
aagtctatttgcagaggcaccgagg

SEQ ID NO: 3205658 - DNA, 25 bp, Homo sapien
aagcatggttctggcatgtccaaca

SEQ ID NO: 3205659 - DNA, 25 bp, Homo sapien
gacatttgtataagcccatggctgg

SEQ ID NO: 3205660 - DNA, 25 bp, Homo sapien
catggctgggatactggtttgcttc

SEQ ID NO: 3205661 - DNA, 25 bp, Homo sapien
tgcatacagggtcactcggtaagtg

SEQ ID NO: 3205662 - DNA, 25 bp, Homo sapien
aaacacccacactgtagtctaaatt

SEQ ID NO: 3205663 - DNA, 25 bp, Homo sapien
tctcctctggcttacgtgctgttcc

SEQ ID NO: 3205664 - DNA, 25 bp, Homo sapien
ctggcttacgtgctgttcctttttc

SEQ ID NO: 3205665 - DNA, 25 bp, Homo sapien
tcctttttctgaccatgtatctctg

SEQ ID NO: 3205666 - DNA, 25 bp, Homo sapien
ctctgataatttgccgccatgagtg

SEQ ID NO: 3205667 - DNA, 25 bp, Homo sapien
tctccagggctactgaactctttca

SEQ ID NO: 3205668 - DNA, 25 bp, Homo sapien
tcctctccagggctactgaactctt

SEQ ID NO: 3205669 - DNA, 25 bp, Homo sapien
cttggtttttgaagactccatcctc

SEQ ID NO: 3205670 - DNA, 25 bp, Homo sapien
ggtttttgaagactccatcctctcc

SEQ ID NO: 3205671 - DNA, 25 bp, Homo sapien
tcctttaggcttggctggtatcctg

SEQ ID NO: 3205672 - DNA, 25 bp, Homo sapien
gcttggctggtatcctggtgcctcc

SEQ ID NO: 3205673 - DNA, 25 bp, Homo sapien
gctttatcctttaggcttggctggt

SEQ ID NO: 3205674 - DNA, 25 bp, Homo sapien
aaaagccatgtccagggatttgctt

SEQ ID NO: 3205675 - DNA, 25 bp, Homo sapien
acatttgatcttccgttgtctggca

SEQ ID NO: 3205676 - DNA, 25 bp, Homo sapien
ttgatcttccgttgtctggcatccg

SEQ ID NO: 3205677 - DNA, 25 bp, Homo sapien
tccgttgtctggcatccgtgtctat

SEQ ID NO: 3205678 - DNA, 25 bp, Homo sapien
ggtgacatttgatcttccgttgtct

SEQ ID NO: 3205679 - DNA, 25 bp, Homo sapien
gcctggaatgaagaggccattctct

SEQ ID NO: 3205680 - DNA, 25 bp, Homo sapien
cacttggactttagaagtgcctgga

SEQ ID NO: 3205681 - DNA, 25 bp, Homo sapien
cagttgcagttgtatttggaagagc

SEQ ID NO: 3205682 - DNA, 25 bp, Homo sapien
gaggctggtatttgaccacttggac

SEQ ID NO: 3205683 - DNA, 25 bp, Homo sapien
gcttgtgaagcggtgatttatttcc

SEQ ID NO: 3205684 - DNA, 25 bp, Homo sapien
gaaaatggtctccacgaggaaatgt

SEQ ID NO: 3205685 - DNA, 25 bp, Homo sapien
gaatgctttcttccgactgactcat

SEQ ID NO: 3205686 - DNA, 25 bp, Homo sapien
cagttttggtgtcccgtaaatgcta

SEQ ID NO: 3205687 - DNA, 25 bp, Homo sapien
tcctgtatgtagtccctcaatatcc

SEQ ID NO: 3205688 - DNA, 25 bp, Homo sapien
tcaatatccaagatcggctttccat

SEQ ID NO: 3205689 - DNA, 25 bp, Homo sapien
acttgagctgtcaaatctgctttgt

SEQ ID NO: 3205690 - DNA, 25 bp, Homo sapien
gccaaaaagcaacttgagctgtcaa

SEQ ID NO: 3205691 - DNA, 25 bp, Homo sapien
gcctgccttgtgttcatcactgtca

SEQ ID NO: 3205692 - DNA, 25 bp, Homo sapien
ttttgggtaatgaatcggggtgtca

SEQ ID NO: 3205693 - DNA, 25 bp, Homo sapien
gggtgtcattagctgcctgccttgt

SEQ ID NO: 3205694 - DNA, 25 bp, Homo sapien
aatcggggtgtcattagctgcctgc

SEQ ID NO: 3205695 - DNA, 25 bp, Homo sapien
gtaggaggaagacggcactgacgtg

SEQ ID NO: 3205696 - DNA, 25 bp, Homo sapien
gacggcactgacgtgagacaagctt

SEQ ID NO: 3205697 - DNA, 25 bp, Homo sapien
aggaagacggcactgacgtgagaca

SEQ ID NO: 3205698 - DNA, 25 bp, Homo sapien
gcactgacgtgagacaagcttccac

SEQ ID NO: 3205699 - DNA, 25 bp, Homo sapien
gagacaaacagcgtccatcatttct

SEQ ID NO: 3205700 - DNA, 25 bp, Homo sapien
cttgtttgagacaaacagcgtccat

SEQ ID NO: 3205701 - DNA, 25 bp, Homo sapien
gacaaacagcgtccatcatttcttc

SEQ ID NO: 3205702 - DNA, 25 bp, Homo sapien
ttagagtccttgtttgagacaaaca

SEQ ID NO: 3205703 - DNA, 25 bp, Homo sapien
tatgggcaagctgtatagactggtg

SEQ ID NO: 3205704 - DNA, 25 bp, Homo sapien
tctcaagtaagagtggactggaaaa

SEQ ID NO: 3205705 - DNA, 25 bp, Homo sapien
ttcttagggatgaatcagataccac

SEQ ID NO: 3205706 - DNA, 25 bp, Homo sapien
tgaaggacttcaccacgaagaggcc

SEQ ID NO: 3205707 - DNA, 25 bp, Homo sapien
gagagtcccacacccggagatctgt

SEQ ID NO: 3205708 - DNA, 25 bp, Homo sapien
catttagaaatggtaaaggagccat

SEQ ID NO: 3205709 - DNA, 25 bp, Homo sapien
gtgtgcttcacatttagaaatggta

SEQ ID NO: 3205710 - DNA, 25 bp, Homo sapien
tcccacacccggagatctgtgtgct

SEQ ID NO: 3205711 - DNA, 25 bp, Homo sapien
caccgattgcgatgaaaggaatttg

SEQ ID NO: 3205712 - DNA, 25 bp, Homo sapien
ggatgttcttttgaccggccatcaa

SEQ ID NO: 3205713 - DNA, 25 bp, Homo sapien
tctgcagcttatcgcgctgtggatg

SEQ ID NO: 3205714 - DNA, 25 bp, Homo sapien
aggcaatcctgaaccggctcagcac

SEQ ID NO: 3205715 - DNA, 25 bp, Homo sapien
gattccaggctcctttgccttgtag

SEQ ID NO: 3205716 - DNA, 25 bp, Homo sapien
tcccgctggcagctaatccattgaa

SEQ ID NO: 3205717 - DNA, 25 bp, Homo sapien
gcaaatttatttctaccggcagctg

SEQ ID NO: 3205718 - DNA, 25 bp, Homo sapien
gactgtgtattgagcctgttgcgaa

SEQ ID NO: 3205719 - DNA, 25 bp, Homo sapien
tgggcccggagaggaataccgatta

SEQ ID NO: 3205720 - DNA, 25 bp, Homo sapien
tcataatggcatactgattatctcc

SEQ ID NO: 3205721 - DNA, 25 bp, Homo sapien
aaatatacagccaaaagatcgttcc

SEQ ID NO: 3205722 - DNA, 25 bp, Homo sapien
tcctgtcatactttcaatcaaacct

SEQ ID NO: 3205723 - DNA, 25 bp, Homo sapien
cccaaagatttgctggttaaaatat

SEQ ID NO: 3205724 - DNA, 25 bp, Homo sapien
gataagaaatgcctaccaagaagct

SEQ ID NO: 3205725 - DNA, 25 bp, Homo sapien
ctgtggataagaaatgcctaccaag

SEQ ID NO: 3205726 - DNA, 25 bp, Homo sapien
tggtgtcttgtctttaccacctttc

SEQ ID NO: 3205727 - DNA, 25 bp, Homo sapien
gaagataagaacactgtggtgtctt

SEQ ID NO: 3205728 - DNA, 25 bp, Homo sapien
tcagcacctaagagatttactgatg

SEQ ID NO: 3205729 - DNA, 25 bp, Homo sapien
gcacctaagagatttactgatgatt

SEQ ID NO: 3205730 - DNA, 25 bp, Homo sapien
ttgcttagatccaaatcacaggtgg

SEQ ID NO: 3205731 - DNA, 25 bp, Homo sapien
atcacaggtggtaacttgggaggcc

SEQ ID NO: 3205732 - DNA, 25 bp, Homo sapien
gatctacagcgcaagccctcatttt

SEQ ID NO: 3205733 - DNA, 25 bp, Homo sapien
catctgtatttcattgcaagtccaa

SEQ ID NO: 3205734 - DNA, 25 bp, Homo sapien
cagattgcgttcctcagtattgaca

SEQ ID NO: 3205735 - DNA, 25 bp, Homo sapien
tcatacagcttcagcattgctactt

SEQ ID NO: 3205736 - DNA, 25 bp, Homo sapien
gagcagtgattgagtcctcaacacc

SEQ ID NO: 3205737 - DNA, 25 bp, Homo sapien
cagagcagtgattgagtcctcaaca

SEQ ID NO: 3205738 - DNA, 25 bp, Homo sapien
gcagcctttagccctgaaagcattt

SEQ ID NO: 3205739 - DNA, 25 bp, Homo sapien
atcagagcagtgattgagtcctcaa

SEQ ID NO: 3205740 - DNA, 25 bp, Homo sapien
aactcttgtagcttcccaggggcaa

SEQ ID NO: 3205741 - DNA, 25 bp, Homo sapien
gatgaactcttgtagcttcccaggg

SEQ ID NO: 3205742 - DNA, 25 bp, Homo sapien
caggggcaattttccaccgtagaat

SEQ ID NO: 3205743 - DNA, 25 bp, Homo sapien
ttccaccgtagaatagctgctgcat

SEQ ID NO: 3205744 - DNA, 25 bp, Homo sapien
catgagccatgtgaagcagggaaag

SEQ ID NO: 3205745 - DNA, 25 bp, Homo sapien
tatcttctgaattacatgagccatg

SEQ ID NO: 3205746 - DNA, 25 bp, Homo sapien
gaagtctatcttctgaattacatga

SEQ ID NO: 3205747 - DNA, 25 bp, Homo sapien
gtctatcttctgaattacatgagcc

SEQ ID NO: 3205748 - DNA, 25 bp, Homo sapien
gatttccccttcacactgtatttgt

SEQ ID NO: 3205749 - DNA, 25 bp, Homo sapien
caacccatttaggttgagttagaca

SEQ ID NO: 3205750 - DNA, 25 bp, Homo sapien
agatttccccttcacactgtatttg

SEQ ID NO: 3205751 - DNA, 25 bp, Homo sapien
catttaggttgagttagacataaga

SEQ ID NO: 3205752 - DNA, 25 bp, Homo sapien
gtgaaggctgctgtctacttgagtt

SEQ ID NO: 3205753 - DNA, 25 bp, Homo sapien
gtatgactaaaagcgaagtgttcct

SEQ ID NO: 3205754 - DNA, 25 bp, Homo sapien
aaggctgctgtctacttgagttgct

SEQ ID NO: 3205755 - DNA, 25 bp, Homo sapien
tccttttctgctgttgtgaaggctg

SEQ ID NO: 3205756 - DNA, 25 bp, Homo sapien
cactccgtgctgtgtagcctgtgcc

SEQ ID NO: 3205757 - DNA, 25 bp, Homo sapien
tgaactggataatcgccgtatttct

SEQ ID NO: 3205758 - DNA, 25 bp, Homo sapien
gccgtatttctattccactccgtgc

SEQ ID NO: 3205759 - DNA, 25 bp, Homo sapien
tctggctgtgtactgcaagtaaatg

SEQ ID NO: 3205760 - DNA, 25 bp, Homo sapien
cgaaatgttttttatggcccgcact

SEQ ID NO: 3205761 - DNA, 25 bp, Homo sapien
tcgaaatgttttttatggcccgcac

SEQ ID NO: 3205762 - DNA, 25 bp, Homo sapien
gaaatgttttttatggcccgcacta

SEQ ID NO: 3205763 - DNA, 25 bp, Homo sapien
ctcgaaatgttttttatggcccgca

SEQ ID NO: 3205764 - DNA, 25 bp, Homo sapien
tgtgaaccaacgccggaaatccaaa

SEQ ID NO: 3205765 - DNA, 25 bp, Homo sapien
ctgtgaaccaacgccggaaatccaa

SEQ ID NO: 3205766 - DNA, 25 bp, Homo sapien
attggaaagcaatttctcttgactg

SEQ ID NO: 3205767 - DNA, 25 bp, Homo sapien
cataatattggaaagcaatttctct

SEQ ID NO: 3205768 - DNA, 25 bp, Homo sapien
taatattggaaagcaatttctcttg

SEQ ID NO: 3205769 - DNA, 25 bp, Homo sapien
atcataatattggaaagcaatttct

SEQ ID NO: 3205770 - DNA, 25 bp, Homo sapien
cagtctgcaacatgacgaacgctat

SEQ ID NO: 3205771 - DNA, 25 bp, Homo sapien
cgaacgctattagttgaatcacacg

SEQ ID NO: 3205772 - DNA, 25 bp, Homo sapien
catgacgaacgctattagttgaatc

SEQ ID NO: 3205773 - DNA, 25 bp, Homo sapien
agttgaatcacacgtttttcttcag

SEQ ID NO: 3205774 - DNA, 25 bp, Homo sapien
gcaccaaggaacttctaaacaaatg

SEQ ID NO: 3205775 - DNA, 25 bp, Homo sapien
ccattctaggcataaattagcattt

SEQ ID NO: 3205776 - DNA, 25 bp, Homo sapien
agaattttgatagggcaccaaggaa

SEQ ID NO: 3205777 - DNA, 25 bp, Homo sapien
ttccattctaggcataaattagcat

SEQ ID NO: 3205778 - DNA, 25 bp, Homo sapien
gtagaagtatgtttttattcatccg

SEQ ID NO: 3205779 - DNA, 25 bp, Homo sapien
agaagtatgtttttattcatccgtt

SEQ ID NO: 3205780 - DNA, 25 bp, Homo sapien
ctgtagaagtatgtttttattcatc

SEQ ID NO: 3205781 - DNA, 25 bp, Homo sapien
tagaagtatgtttttattcatccgt

SEQ ID NO: 3205782 - DNA, 25 bp, Homo sapien
ccaatagtcattgaacccttgataa

SEQ ID NO: 3205783 - DNA, 25 bp, Homo sapien
tcaggatgtgttttggtgagtgcaa

SEQ ID NO: 3205784 - DNA, 25 bp, Homo sapien
agcttcagctcgaagtctcaggatg

SEQ ID NO: 3205785 - DNA, 25 bp, Homo sapien
tgttttggtgagtgcaaaacccaat

SEQ ID NO: 3205786 - DNA, 25 bp, Homo sapien
aaccatatccattctcaatgtgaag

SEQ ID NO: 3205787 - DNA, 25 bp, Homo sapien
tctgattgatcggaaagacaaaaag

SEQ ID NO: 3205788 - DNA, 25 bp, Homo sapien
tttgggagtttcacatgttctgatt

SEQ ID NO: 3205789 - DNA, 25 bp, Homo sapien
caatgtgaagtttccttgtttggtg

SEQ ID NO: 3205790 - DNA, 25 bp, Homo sapien
gacacttcggcacattcgcttgaaa

SEQ ID NO: 3205791 - DNA, 25 bp, Homo sapien
tggcttgcacttgaataattctcca

SEQ ID NO: 3205792 - DNA, 25 bp, Homo sapien
cgcttgaaacatcgtcatgggagaa

SEQ ID NO: 3205793 - DNA, 25 bp, Homo sapien
cagcacgactgattgagttggcatc

SEQ ID NO: 3205794 - DNA, 25 bp, Homo sapien
taactctgagtggacacagcacatg

SEQ ID NO: 3205795 - DNA, 25 bp, Homo sapien
ttaactctgagtggacacagcacat

SEQ ID NO: 3205796 - DNA, 25 bp, Homo sapien
agaggactgtgcggccttccgcagc

SEQ ID NO: 3205797 - DNA, 25 bp, Homo sapien
gactgtgcggccttccgcagcgttt

SEQ ID NO: 3205798 - DNA, 25 bp, Homo sapien
cagcgcaaggctcgatttcaccctg

SEQ ID NO: 3205799 - DNA, 25 bp, Homo sapien
ccagcgcaaggctcgatttcaccct

SEQ ID NO: 3205800 - DNA, 25 bp, Homo sapien
ggcccagcgcaaggctcgatttcac

SEQ ID NO: 3205801 - DNA, 25 bp, Homo sapien
cccagcgcaaggctcgatttcaccc

SEQ ID NO: 3205802 - DNA, 25 bp, Homo sapien
aaggacaggatcatgaccaaacttc

SEQ ID NO: 3205803 - DNA, 25 bp, Homo sapien
gcaaggtttcccaagagctctggga

SEQ ID NO: 3205804 - DNA, 25 bp, Homo sapien
ttttaagggatgatgtacaagctgg

SEQ ID NO: 3205805 - DNA, 25 bp, Homo sapien
tacaagctggaatgtaggatgccat

SEQ ID NO: 3205806 - DNA, 25 bp, Homo sapien
agtttgccagaggttactgggggca

SEQ ID NO: 3205807 - DNA, 25 bp, Homo sapien
tccagatttgtgttcacaaggcttc

SEQ ID NO: 3205808 - DNA, 25 bp, Homo sapien
tggggcagagtttgccagaggttac

SEQ ID NO: 3205809 - DNA, 25 bp, Homo sapien
cagatttgtgttcacaaggcttcat

SEQ ID NO: 3205810 - DNA, 25 bp, Homo sapien
gaccgtccagacctagagaatgagt

SEQ ID NO: 3205811 - DNA, 25 bp, Homo sapien
tggtctggtggcaaattcgaatttc

SEQ ID NO: 3205812 - DNA, 25 bp, Homo sapien
tctctgaactgcaggaactctggtc

SEQ ID NO: 3205813 - DNA, 25 bp, Homo sapien
gagaatgagtagcaaagccaactgg

SEQ ID NO: 3205814 - DNA, 25 bp, Homo sapien
tgaaaacgtaggtgcaaaattcttg

SEQ ID NO: 3205815 - DNA, 25 bp, Homo sapien
tttcttgccgaatgtctcctacaca

SEQ ID NO: 3205816 - DNA, 25 bp, Homo sapien
tgcttactctttcttgccgaatgtc

SEQ ID NO: 3205817 - DNA, 25 bp, Homo sapien
taggtgcaaaattcttgctccctgc

SEQ ID NO: 3205818 - DNA, 25 bp, Homo sapien
tactgatagctcttctgtagctttg

SEQ ID NO: 3205819 - DNA, 25 bp, Homo sapien
cttctgtagctttgtcaaggataag

SEQ ID NO: 3205820 - DNA, 25 bp, Homo sapien
ttctgtagctttgtcaaggataaga

SEQ ID NO: 3205821 - DNA, 25 bp, Homo sapien
ttaactgtactgatagctcttctgt

SEQ ID NO: 3205822 - DNA, 25 bp, Homo sapien
aagctgttgaggacacagaggaccc

SEQ ID NO: 3205823 - DNA, 25 bp, Homo sapien
ggctatgccttttaagacccagata

SEQ ID NO: 3205824 - DNA, 25 bp, Homo sapien
tattggacaatctgcaaggagatgc

SEQ ID NO: 3205825 - DNA, 25 bp, Homo sapien
caaattgtgccacttctgatgacac

SEQ ID NO: 3205826 - DNA, 25 bp, Homo sapien
aatgtttatccgtcctctccgtgta

SEQ ID NO: 3205827 - DNA, 25 bp, Homo sapien
ttatctatcggatgctgatgctcag

SEQ ID NO: 3205828 - DNA, 25 bp, Homo sapien
tccgtgtactttgccagctagaaca

SEQ ID NO: 3205829 - DNA, 25 bp, Homo sapien
gatgctcagtcggttgtacccttag

SEQ ID NO: 3205830 - DNA, 25 bp, Homo sapien
tctagcggtctccagtgcaaggggt

SEQ ID NO: 3205831 - DNA, 25 bp, Homo sapien
tccaaatcagtgaccagcatgtcag

SEQ ID NO: 3205832 - DNA, 25 bp, Homo sapien
gagacccttctgtatccgtgcagca

SEQ ID NO: 3205833 - DNA, 25 bp, Homo sapien
gggcataacgttccaaatcagtgac

SEQ ID NO: 3205834 - DNA, 25 bp, Homo sapien
tgagtctccggtgctttccaccaca

SEQ ID NO: 3205835 - DNA, 25 bp, Homo sapien
gagcagcctgagtctccggtgcttt

SEQ ID NO: 3205836 - DNA, 25 bp, Homo sapien
tccctgccaggactcaggaggagtg

SEQ ID NO: 3205837 - DNA, 25 bp, Homo sapien
cagcctgagtctccggtgctttcca

SEQ ID NO: 3205838 - DNA, 25 bp, Homo sapien
tatttataataacacgcgaggcagc

SEQ ID NO: 3205839 - DNA, 25 bp, Homo sapien
tgcattaagtgacaaactggcttcg

SEQ ID NO: 3205840 - DNA, 25 bp, Homo sapien
tgtaatcaatcccagtgtgaggctg

SEQ ID NO: 3205841 - DNA, 25 bp, Homo sapien
gttgttgccgcacaatcagcctttg

SEQ ID NO: 3205842 - DNA, 25 bp, Homo sapien
gatgatggtggacacatacatttat

SEQ ID NO: 3205843 - DNA, 25 bp, Homo sapien
aatgaaaagtgcttgggtttatgat

SEQ ID NO: 3205844 - DNA, 25 bp, Homo sapien
ggtttatgatgatgggcctctgtaa

SEQ ID NO: 3205845 - DNA, 25 bp, Homo sapien
gatgatgggcctctgtaaattctga

SEQ ID NO: 3205846 - DNA, 25 bp, Homo sapien
gtaatagtaactgacattcatcaca

SEQ ID NO: 3205847 - DNA, 25 bp, Homo sapien
taaatgtaatagtaactgacattca

SEQ ID NO: 3205848 - DNA, 25 bp, Homo sapien
aatgtaatagtaactgacattcatc

SEQ ID NO: 3205849 - DNA, 25 bp, Homo sapien
tgtaatagtaactgacattcatcac

SEQ ID NO: 3205850 - DNA, 25 bp, Homo sapien
tcatagcttcaatgaagggtgtggg

SEQ ID NO: 3205851 - DNA, 25 bp, Homo sapien
tccatacccatagcccatctcttct

SEQ ID NO: 3205852 - DNA, 25 bp, Homo sapien
taaggatagtcctgagctccatacc

SEQ ID NO: 3205853 - DNA, 25 bp, Homo sapien
tagcttgctccccataaggatagtc

SEQ ID NO: 3205854 - DNA, 25 bp, Homo sapien
ctgcgtctgttaaatcggcagtgac

SEQ ID NO: 3205855 - DNA, 25 bp, Homo sapien
cgtctgttaaatcggcagtgactat

SEQ ID NO: 3205856 - DNA, 25 bp, Homo sapien
tgcgtctgttaaatcggcagtgact

SEQ ID NO: 3205857 - DNA, 25 bp, Homo sapien
ctgttaaatcggcagtgactatttc

SEQ ID NO: 3205858 - DNA, 25 bp, Homo sapien
tctcataggtgactgtacaccagca

SEQ ID NO: 3205859 - DNA, 25 bp, Homo sapien
gaccttgacagtgttctggctggcc

SEQ ID NO: 3205860 - DNA, 25 bp, Homo sapien
gcttggcttcatgctcccttggtgg

SEQ ID NO: 3205861 - DNA, 25 bp, Homo sapien
aatataggcatgaattcttgataac

SEQ ID NO: 3205862 - DNA, 25 bp, Homo sapien
aagatggtcatctcccctatgagga

SEQ ID NO: 3205863 - DNA, 25 bp, Homo sapien
catagctagaacaggtaaggtcaaa

SEQ ID NO: 3205864 - DNA, 25 bp, Homo sapien
caagttccttctgcagtcgaatagc

SEQ ID NO: 3205865 - DNA, 25 bp, Homo sapien
tatggcgtggtgattgatgtgtatc

SEQ ID NO: 3205866 - DNA, 25 bp, Homo sapien
tgggaggggcatacctgttgtctgg

SEQ ID NO: 3205867 - DNA, 25 bp, Homo sapien
gggcatacctgttgtctggggtctc

SEQ ID NO: 3205868 - DNA, 25 bp, Homo sapien
ggttgggaggggcatacctgttgtc

SEQ ID NO: 3205869 - DNA, 25 bp, Homo sapien
catacctgttgtctggggtctcctc

SEQ ID NO: 3205870 - DNA, 25 bp, Homo sapien
gatcgtgcaccgatctgactagcaa

SEQ ID NO: 3205871 - DNA, 25 bp, Homo sapien
gaacagcaataagatcgtgcaccga

SEQ ID NO: 3205872 - DNA, 25 bp, Homo sapien
taaccatgaacagcaataagatcgt

SEQ ID NO: 3205873 - DNA, 25 bp, Homo sapien
cgatctgactagcaacaccaggatg

SEQ ID NO: 3205874 - DNA, 25 bp, Homo sapien
tgaaaattgagagcacgtttctgaa

SEQ ID NO: 3205875 - DNA, 25 bp, Homo sapien
cactgtgctcaaatatgctaggttg

SEQ ID NO: 3205876 - DNA, 25 bp, Homo sapien
caaatatgctaggttgtagccagac

SEQ ID NO: 3205877 - DNA, 25 bp, Homo sapien
ggaatttgcccaatgaaaattgaga

SEQ ID NO: 3205878 - DNA, 25 bp, Homo sapien
tgacagtgcataggccatttccaga

SEQ ID NO: 3205879 - DNA, 25 bp, Homo sapien
gcaatggtccaaacttcagactgag

SEQ ID NO: 3205880 - DNA, 25 bp, Homo sapien
gatcaattgaacctagtccagtcct

SEQ ID NO: 3205881 - DNA, 25 bp, Homo sapien
caaattattaagtcctcgatgcctg

SEQ ID NO: 3205882 - DNA, 25 bp, Homo sapien
caaatttagtagtggaggggattgt

SEQ ID NO: 3205883 - DNA, 25 bp, Homo sapien
gtagtggaggggattgtataccaac

SEQ ID NO: 3205884 - DNA, 25 bp, Homo sapien
tagtagtggaggggattgtatacca

SEQ ID NO: 3205885 - DNA, 25 bp, Homo sapien
cagtcaaatttagtagtggagggga

SEQ ID NO: 3205886 - DNA, 25 bp, Homo sapien
gagctgggaaagcatttggtgacat

SEQ ID NO: 3205887 - DNA, 25 bp, Homo sapien
tggagctgggaaagcatttggtgac

SEQ ID NO: 3205888 - DNA, 25 bp, Homo sapien
agctggagctgggaaagcatttggt

SEQ ID NO: 3205889 - DNA, 25 bp, Homo sapien
agctgggaaagcatttggtgacatt

SEQ ID NO: 3205890 - DNA, 25 bp, Homo sapien
gcttccttggaaggagcttgtctag

SEQ ID NO: 3205891 - DNA, 25 bp, Homo sapien
gaagctaccgctggctgtagtgcct

SEQ ID NO: 3205892 - DNA, 25 bp, Homo sapien
aactggggagaagctaccgctggct

SEQ ID NO: 3205893 - DNA, 25 bp, Homo sapien
aaggagcttgtctagaacaactggg

SEQ ID NO: 3205894 - DNA, 25 bp, Homo sapien
tttgtgaagctctgctagccactgt

SEQ ID NO: 3205895 - DNA, 25 bp, Homo sapien
agttttcaagagtgccactaggtct

SEQ ID NO: 3205896 - DNA, 25 bp, Homo sapien
gaactcctggtttggcgctttgtga

SEQ ID NO: 3205897 - DNA, 25 bp, Homo sapien
ccttcttaggagtgttttgctgtct

SEQ ID NO: 3205898 - DNA, 25 bp, Homo sapien
tttgaaccatcgaagtcacctctgt

SEQ ID NO: 3205899 - DNA, 25 bp, Homo sapien
cacctctgtggagccatgtggggac

SEQ ID NO: 3205900 - DNA, 25 bp, Homo sapien
gagccatgtggggactagtccgtta

SEQ ID NO: 3205901 - DNA, 25 bp, Homo sapien
gtcatttgaaccatcgaagtcacct

SEQ ID NO: 3205902 - DNA, 25 bp, Homo sapien
tccatagggagtggccgcaggtgag

SEQ ID NO: 3205903 - DNA, 25 bp, Homo sapien
tgagtgcgggatgtccatagggagt

SEQ ID NO: 3205904 - DNA, 25 bp, Homo sapien
aggcgaggaaagaaggcgtgttcca

SEQ ID NO: 3205905 - DNA, 25 bp, Homo sapien
tgcaatctgataagggttgagtgcg

SEQ ID NO: 3205906 - DNA, 25 bp, Homo sapien
cagtgtgggcggatgctcccaggct

SEQ ID NO: 3205907 - DNA, 25 bp, Homo sapien
agagggaggtgcaacaccgctgcgt

SEQ ID NO: 3205908 - DNA, 25 bp, Homo sapien
ccgagtcgagccgactgtccgggca

SEQ ID NO: 3205909 - DNA, 25 bp, Homo sapien
ggctccttctcgcgcggcgcaggtt

SEQ ID NO: 3205910 - DNA, 25 bp, Homo sapien
gccgagcagagccgccgcggactat

SEQ ID NO: 3205911 - DNA, 25 bp, Homo sapien
agagccgccgcggactatgaaacat

SEQ ID NO: 3205912 - DNA, 25 bp, Homo sapien
agcagagccgccgcggactatgaaa

SEQ ID NO: 3205913 - DNA, 25 bp, Homo sapien
cgagcagagccgccgcggactatga

SEQ ID NO: 3205914 - DNA, 25 bp, Homo sapien
cgccagcagccggggggatgcgggc

SEQ ID NO: 3205915 - DNA, 25 bp, Homo sapien
gttcgggaacacgacctcgcggcgc

SEQ ID NO: 3205916 - DNA, 25 bp, Homo sapien
cagcagccggggggatgcgggcctg

SEQ ID NO: 3205917 - DNA, 25 bp, Homo sapien
ctgttcgggaacacgacctcgcggc

SEQ ID NO: 3205918 - DNA, 25 bp, Homo sapien
ctgcttttggcggggcgtgatggct

SEQ ID NO: 3205919 - DNA, 25 bp, Homo sapien
aaaagctgcttttggcggggcgtga

SEQ ID NO: 3205920 - DNA, 25 bp, Homo sapien
aacccgtctcgacaaaatatacaat

SEQ ID NO: 3205921 - DNA, 25 bp, Homo sapien
gcttttggcggggcgtgatggctca

SEQ ID NO: 3205922 - DNA, 25 bp, Homo sapien
caagaatgaaagtgaacggtggcac

SEQ ID NO: 3205923 - DNA, 25 bp, Homo sapien
aagagaagcagaccagatcaggagc

SEQ ID NO: 3205924 - DNA, 25 bp, Homo sapien
tctctcacagacaaagccgggaagg

SEQ ID NO: 3205925 - DNA, 25 bp, Homo sapien
ttgacaaaggcggtagttaccagcc

SEQ ID NO: 3205926 - DNA, 25 bp, Homo sapien
gaatgcatcaataacattggaaaac

SEQ ID NO: 3205927 - DNA, 25 bp, Homo sapien
caagtttgaattaacagagaaacca

SEQ ID NO: 3205928 - DNA, 25 bp, Homo sapien
aaacaagaagggatgcatgacatca

SEQ ID NO: 3205929 - DNA, 25 bp, Homo sapien
aatatttggaggaattccaagaaga

SEQ ID NO: 3205930 - DNA, 25 bp, Homo sapien
gctcaccactagtctatttgtatat

SEQ ID NO: 3205931 - DNA, 25 bp, Homo sapien
caccactagtctatttgtatatata

SEQ ID NO: 3205932 - DNA, 25 bp, Homo sapien
cactagtctatttgtatatatatca

SEQ ID NO: 3205933 - DNA, 25 bp, Homo sapien
ctatgctcaccactagtctatttgt

SEQ ID NO: 3205934 - DNA, 25 bp, Homo sapien
ttactctcttaaacagtgggaccat

SEQ ID NO: 3205935 - DNA, 25 bp, Homo sapien
ctttgcactttactctcttaaacag

SEQ ID NO: 3205936 - DNA, 25 bp, Homo sapien
tgcactttactctcttaaacagtgg

SEQ ID NO: 3205937 - DNA, 25 bp, Homo sapien
cactttactctcttaaacagtggga

SEQ ID NO: 3205938 - DNA, 25 bp, Homo sapien
agtcccagttctatgactatttagc

SEQ ID NO: 3205939 - DNA, 25 bp, Homo sapien
gactatttagctgtgccacaactct

SEQ ID NO: 3205940 - DNA, 25 bp, Homo sapien
ctgcagcgtgaccaaattctaaggc

SEQ ID NO: 3205941 - DNA, 25 bp, Homo sapien
taaggcctcaaaagagaattctagt

SEQ ID NO: 3205942 - DNA, 25 bp, Homo sapien
tcttggcgagagcactatagagtct

SEQ ID NO: 3205943 - DNA, 25 bp, Homo sapien
tcaggtgacaccaaatactctgggt

SEQ ID NO: 3205944 - DNA, 25 bp, Homo sapien
gaggatgttccattgcataaccctg

SEQ ID NO: 3205945 - DNA, 25 bp, Homo sapien
tgcttgtaccggttcccatggaaca

SEQ ID NO: 3205946 - DNA, 25 bp, Homo sapien
taaaacagtgcactgtggatgtgca

SEQ ID NO: 3205947 - DNA, 25 bp, Homo sapien
tgactgcagaggcacaaaagcatcc

SEQ ID NO: 3205948 - DNA, 25 bp, Homo sapien
gcagaaaggcagtcacagcaaactt

SEQ ID NO: 3205949 - DNA, 25 bp, Homo sapien
agcaaacttgactgcagaggcacaa

SEQ ID NO: 3205950 - DNA, 25 bp, Homo sapien
tggaggcacaatatatcaggctggt

SEQ ID NO: 3205951 - DNA, 25 bp, Homo sapien
cagtgagcagatcgagagctgacct

SEQ ID NO: 3205952 - DNA, 25 bp, Homo sapien
ggaaaaacgtgccttgatagcctag

SEQ ID NO: 3205953 - DNA, 25 bp, Homo sapien
tagatgggtaacagcgatgcagaac

SEQ ID NO: 3205954 - DNA, 25 bp, Homo sapien
aagtccatcagattcctcagtaaag

SEQ ID NO: 3205955 - DNA, 25 bp, Homo sapien
tatgaaagtccatcagattcctcag

SEQ ID NO: 3205956 - DNA, 25 bp, Homo sapien
gtccatcagattcctcagtaaagct

SEQ ID NO: 3205957 - DNA, 25 bp, Homo sapien
gaaagtccatcagattcctcagtaa

SEQ ID NO: 3205958 - DNA, 25 bp, Homo sapien
aaaatagactcctgtgattaaaaag

SEQ ID NO: 3205959 - DNA, 25 bp, Homo sapien
gagtgcaaacgcctttttcaccata

SEQ ID NO: 3205960 - DNA, 25 bp, Homo sapien
ccaagggcatgctggaaacgcagaa

SEQ ID NO: 3205961 - DNA, 25 bp, Homo sapien
gaaacattccctgttaagactcttg

SEQ ID NO: 3205962 - DNA, 25 bp, Homo sapien
tagagaaattgctcctacatactat

SEQ ID NO: 3205963 - DNA, 25 bp, Homo sapien
acatactattatggaagattcaagc

SEQ ID NO: 3205964 - DNA, 25 bp, Homo sapien
ttctctataacttctcttgcatggt

SEQ ID NO: 3205965 - DNA, 25 bp, Homo sapien
taatggaacatagaggcaggacaag

SEQ ID NO: 3205966 - DNA, 25 bp, Homo sapien
gccccaaaattctgtgcatactatg

SEQ ID NO: 3205967 - DNA, 25 bp, Homo sapien
gccatggtttctcttccggttgaag

SEQ ID NO: 3205968 - DNA, 25 bp, Homo sapien
catttggtagatgttcccgtgcttg

SEQ ID NO: 3205969 - DNA, 25 bp, Homo sapien
catttcagtggacgttgttgcagct

SEQ ID NO: 3205970 - DNA, 25 bp, Homo sapien
tattattgtgtgacttacaatatgt

SEQ ID NO: 3205971 - DNA, 25 bp, Homo sapien
gagagggcagatatactctatggat

SEQ ID NO: 3205972 - DNA, 25 bp, Homo sapien
tgtgtgacttacaatatgtatttta

SEQ ID NO: 3205973 - DNA, 25 bp, Homo sapien
tacagatctcacaaatctatgaggt

SEQ ID NO: 3205974 - DNA, 25 bp, Homo sapien
gcgccattgcactccagcctcggca

SEQ ID NO: 3205975 - DNA, 25 bp, Homo sapien
ttgcggtgagccggaattgcgccat

SEQ ID NO: 3205976 - DNA, 25 bp, Homo sapien
attgcgccattgcactccagcctcg

SEQ ID NO: 3205977 - DNA, 25 bp, Homo sapien
gttgcggtgagccggaattgcgcca

SEQ ID NO: 3205978 - DNA, 25 bp, Homo sapien
tcagatgtcagacatacatgttcct

SEQ ID NO: 3205979 - DNA, 25 bp, Homo sapien
gttccttatgtgcagtcttccacca

SEQ ID NO: 3205980 - DNA, 25 bp, Homo sapien
ggtttaccagtctgtggaaaccaga

SEQ ID NO: 3205981 - DNA, 25 bp, Homo sapien
gctgggtgttctctgcaggtttacc

SEQ ID NO: 3205982 - DNA, 25 bp, Homo sapien
ctgtgtatcgttccagtattaggat

SEQ ID NO: 3205983 - DNA, 25 bp, Homo sapien
ttaatctgtgtatcgttccagtatt

SEQ ID NO: 3205984 - DNA, 25 bp, Homo sapien
atctgtgtatcgttccagtattagg

SEQ ID NO: 3205985 - DNA, 25 bp, Homo sapien
tctgtgtatcgttccagtattagga

SEQ ID NO: 3205986 - DNA, 25 bp, Homo sapien
tggattcttaatcggttctaacagg

SEQ ID NO: 3205987 - DNA, 25 bp, Homo sapien
catctaaagtctagacttggagcca

SEQ ID NO: 3205988 - DNA, 25 bp, Homo sapien
gctacctctgctactctactggaaa

SEQ ID NO: 3205989 - DNA, 25 bp, Homo sapien
cagggttaaaccagggctatctagc

SEQ ID NO: 3205990 - DNA, 25 bp, Homo sapien
tctgctgtcacttggaagttcaggc

SEQ ID NO: 3205991 - DNA, 25 bp, Homo sapien
tgtgtcactcacttagccttggcat

SEQ ID NO: 3205992 - DNA, 25 bp, Homo sapien
ggcaggtagctctaatacctggagt

SEQ ID NO: 3205993 - DNA, 25 bp, Homo sapien
ggctctggccttttgctgtaacatg

SEQ ID NO: 3205994 - DNA, 25 bp, Homo sapien
gttttagatgtgttctgtctgccca

SEQ ID NO: 3205995 - DNA, 25 bp, Homo sapien
tattctgtccttatcaggtggtttg

SEQ ID NO: 3205996 - DNA, 25 bp, Homo sapien
aaaattgtctccagtaagcctacca

SEQ ID NO: 3205997 - DNA, 25 bp, Homo sapien
gtctgcccatctgataaccgaaaat

SEQ ID NO: 3205998 - DNA, 25 bp, Homo sapien
attggaatatgtagtctcaatcttg

SEQ ID NO: 3205999 - DNA, 25 bp, Homo sapien
ctataaattggaatatgtagtctca

SEQ ID NO: 3206000 - DNA, 25 bp, Homo sapien
caaggaatgacactagttttctttt

SEQ ID NO: 3206001 - DNA, 25 bp, Homo sapien
atcagaagttttggtcaacaatgca

SEQ ID NO: 3206002 - DNA, 25 bp, Homo sapien
gacaggcctctggttccaatctgct

SEQ ID NO: 3206003 - DNA, 25 bp, Homo sapien
cgggagtgaagctgacaatgtacgc

SEQ ID NO: 3206004 - DNA, 25 bp, Homo sapien
agaacggacgggattgacaggcctc

SEQ ID NO: 3206005 - DNA, 25 bp, Homo sapien
agtgtaaacacggaagtggccgcag

SEQ ID NO: 3206006 - DNA, 25 bp, Homo sapien
ggcggacgagttgtgcgcttcaccc

SEQ ID NO: 3206007 - DNA, 25 bp, Homo sapien
tgaggctgttgtctctcggctgcgc

SEQ ID NO: 3206008 - DNA, 25 bp, Homo sapien
tcaccccagttgctgaggaaccagg

SEQ ID NO: 3206009 - DNA, 25 bp, Homo sapien
gaatccggcgctgtcgcttcagggt

SEQ ID NO: 3206010 - DNA, 25 bp, Homo sapien
gtgatcaccttggagagtaacctgc

SEQ ID NO: 3206011 - DNA, 25 bp, Homo sapien
gcgacgaatcaggaagtgatcacct

SEQ ID NO: 3206012 - DNA, 25 bp, Homo sapien
aatgaagtaatggaggcgacgaatc

SEQ ID NO: 3206013 - DNA, 25 bp, Homo sapien
aacttttctcccgtgcatcggtgca

SEQ ID NO: 3206014 - DNA, 25 bp, Homo sapien
gggataaacatggcgacgtctctgc

SEQ ID NO: 3206015 - DNA, 25 bp, Homo sapien
taaacatggcgacgtctctgcatga

SEQ ID NO: 3206016 - DNA, 25 bp, Homo sapien
aaacatggcgacgtctctgcatgag

SEQ ID NO: 3206017 - DNA, 25 bp, Homo sapien
gataaacatggcgacgtctctgcat

SEQ ID NO: 3206018 - DNA, 25 bp, Homo sapien
ggcgtgtgtctccggccgcgggttc

SEQ ID NO: 3206019 - DNA, 25 bp, Homo sapien
gcgtgtgtctccggccgcgggttcc

SEQ ID NO: 3206020 - DNA, 25 bp, Homo sapien
cgtcggagtgtgtgcgagtgcgtga

SEQ ID NO: 3206021 - DNA, 25 bp, Homo sapien
ccggcctcggcttcctgtcggagga

SEQ ID NO: 3206022 - DNA, 25 bp, Homo sapien
acgcgcaaggatccgggcgtcggag

SEQ ID NO: 3206023 - DNA, 25 bp, Homo sapien
tcctgtcggaggacgcgcaaggatc

SEQ ID NO: 3206024 - DNA, 25 bp, Homo sapien
gcagagcgtgaaatgtgcctcttcc

SEQ ID NO: 3206025 - DNA, 25 bp, Homo sapien
ttgcagacttttcttccgcagagcg

SEQ ID NO: 3206026 - DNA, 25 bp, Homo sapien
ctctggagcaagcgtccgggacttc

SEQ ID NO: 3206027 - DNA, 25 bp, Homo sapien
agcctcaggtgtctctcgccgcagg

SEQ ID NO: 3206028 - DNA, 25 bp, Homo sapien
gcagaagatacttgcaagataaatc

SEQ ID NO: 3206029 - DNA, 25 bp, Homo sapien
ctatactcccgcatggatgacagag

SEQ ID NO: 3206030 - DNA, 25 bp, Homo sapien
cattgagccaagatgataccactat

SEQ ID NO: 3206031 - DNA, 25 bp, Homo sapien
caggctggcagaagatacttgcaag

SEQ ID NO: 3206032 - DNA, 25 bp, Homo sapien
atactataagaaggtcgggtgaggt

SEQ ID NO: 3206033 - DNA, 25 bp, Homo sapien
tccaagggttctttaacatatacta

SEQ ID NO: 3206034 - DNA, 25 bp, Homo sapien
gggttctttaacatatactataaga

SEQ ID NO: 3206035 - DNA, 25 bp, Homo sapien
caagggttctttaacatatactata

SEQ ID NO: 3206036 - DNA, 25 bp, Homo sapien
cagaagaatcgctcgaacccgagag

SEQ ID NO: 3206037 - DNA, 25 bp, Homo sapien
ggcagaagaatcgctcgaacccgag

SEQ ID NO: 3206038 - DNA, 25 bp, Homo sapien
gaggttgcagtgagcggagatcacg

SEQ ID NO: 3206039 - DNA, 25 bp, Homo sapien
aagaatcgctcgaacccgagaggcg

SEQ ID NO: 3206040 - DNA, 25 bp, Homo sapien
cagatacccaattgacttagtgcac

SEQ ID NO: 3206041 - DNA, 25 bp, Homo sapien
gatcacgggcatgtgctgctgcgcc

SEQ ID NO: 3206042 - DNA, 25 bp, Homo sapien
gagttatggtcttgttatgatgccc

SEQ ID NO: 3206043 - DNA, 25 bp, Homo sapien
cctcacgtttatgccgaacttagtg

SEQ ID NO: 3206044 - DNA, 25 bp, Homo sapien
gtttttatattgactccgtggcgcg

SEQ ID NO: 3206045 - DNA, 25 bp, Homo sapien
tattgactccgtggcgcgggccctt

SEQ ID NO: 3206046 - DNA, 25 bp, Homo sapien
ggagaacggtggttcccacaggaca

SEQ ID NO: 3206047 - DNA, 25 bp, Homo sapien
tgagcagggctcctcgtgcccctgg

SEQ ID NO: 3206048 - DNA, 25 bp, Homo sapien
taggtagtgaattaggattaggttc

SEQ ID NO: 3206049 - DNA, 25 bp, Homo sapien
aactcagattacagatacatgtagg

SEQ ID NO: 3206050 - DNA, 25 bp, Homo sapien
gatatctagggcatatacaaatgaa

SEQ ID NO: 3206051 - DNA, 25 bp, Homo sapien
taaagattggtatgcatatttcctt

SEQ ID NO: 3206052 - DNA, 25 bp, Homo sapien
cggtataatggcatgtttgagaaac

SEQ ID NO: 3206053 - DNA, 25 bp, Homo sapien
cagtataacggtataatggcatgtt

SEQ ID NO: 3206054 - DNA, 25 bp, Homo sapien
aacaagttaggacatcagtctgtgc

SEQ ID NO: 3206055 - DNA, 25 bp, Homo sapien
taatggcatgtttgagaaacaagtt

SEQ ID NO: 3206056 - DNA, 25 bp, Homo sapien
gtccagagacttagcaaaccctctt

SEQ ID NO: 3206057 - DNA, 25 bp, Homo sapien
ccgaattggttaggattgtcagtac

SEQ ID NO: 3206058 - DNA, 25 bp, Homo sapien
tactctgttgctggcctatagaaaa

SEQ ID NO: 3206059 - DNA, 25 bp, Homo sapien
gaagacatttgtaccgcatctacca

SEQ ID NO: 3206060 - DNA, 25 bp, Homo sapien
cctggtgaggtatctggccttttat

SEQ ID NO: 3206061 - DNA, 25 bp, Homo sapien
ggtcacattcctgtgagctcactaa

SEQ ID NO: 3206062 - DNA, 25 bp, Homo sapien
gaggaatcagtcaagtatgcctttg

SEQ ID NO: 3206063 - DNA, 25 bp, Homo sapien
cttgggcccagaaggcatttacctg

SEQ ID NO: 3206064 - DNA, 25 bp, Homo sapien
gggctgttctgaggcatgattccac

SEQ ID NO: 3206065 - DNA, 25 bp, Homo sapien
tcttcttaggcgacctggtgatccc

SEQ ID NO: 3206066 - DNA, 25 bp, Homo sapien
gattggcgtagtgaactacagctta

SEQ ID NO: 3206067 - DNA, 25 bp, Homo sapien
catactgatggtgaactttgtgttg

SEQ ID NO: 3206068 - DNA, 25 bp, Homo sapien
ctatccagagtatatttagaatctt

SEQ ID NO: 3206069 - DNA, 25 bp, Homo sapien
atccagagtatatttagaatcttct

SEQ ID NO: 3206070 - DNA, 25 bp, Homo sapien
agagtatatttagaatcttctgatc

SEQ ID NO: 3206071 - DNA, 25 bp, Homo sapien
ccagagtatatttagaatcttctga

SEQ ID NO: 3206072 - DNA, 25 bp, Homo sapien
ctataactttctgtaatcttcctca

SEQ ID NO: 3206073 - DNA, 25 bp, Homo sapien
aactttctgtaatcttcctcatcac

SEQ ID NO: 3206074 - DNA, 25 bp, Homo sapien
tgtctataactttctgtaatcttcc

SEQ ID NO: 3206075 - DNA, 25 bp, Homo sapien
cttgtctataactttctgtaatctt

SEQ ID NO: 3206076 - DNA, 25 bp, Homo sapien
gtgaccgccttctggatcctcgcga

SEQ ID NO: 3206077 - DNA, 25 bp, Homo sapien
cacgacaggttgtactcggcagttc

SEQ ID NO: 3206078 - DNA, 25 bp, Homo sapien
ggcgctgctagcttgcacgacaggt

SEQ ID NO: 3206079 - DNA, 25 bp, Homo sapien
caaaaacgggctcgtaacaggcacg

SEQ ID NO: 3206080 - DNA, 25 bp, Homo sapien
ccggacaagtgacgagcgtctttac

SEQ ID NO: 3206081 - DNA, 25 bp, Homo sapien
tggagagcgagatcggggagccctg

SEQ ID NO: 3206082 - DNA, 25 bp, Homo sapien
ccctgcaccaatccggggctggagt

SEQ ID NO: 3206083 - DNA, 25 bp, Homo sapien
ggcaaggagccggacaagtgacgag

SEQ ID NO: 3206084 - DNA, 25 bp, Homo sapien
tgagttggggatgcggtgacggcgg

SEQ ID NO: 3206085 - DNA, 25 bp, Homo sapien
ctgagttggggatgcggtgacggcg

SEQ ID NO: 3206086 - DNA, 25 bp, Homo sapien
aacctcgcccccctgtaactgtcag

SEQ ID NO: 3206087 - DNA, 25 bp, Homo sapien
gggccgtctccggagaagggcgaga

SEQ ID NO: 3206088 - DNA, 25 bp, Homo sapien
aactgtcagactgcccgactgtggg

SEQ ID NO: 3206089 - DNA, 25 bp, Homo sapien
ccgtctccggagaagggcgagagtc

SEQ ID NO: 3206090 - DNA, 25 bp, Homo sapien
tttcgaattcgcaggcacttgggcc

SEQ ID NO: 3206091 - DNA, 25 bp, Homo sapien
tgagttacttctccgttgcggaccg

SEQ ID NO: 3206092 - DNA, 25 bp, Homo sapien
acaatggctaggtgcgagtgcccgc

SEQ ID NO: 3206093 - DNA, 25 bp, Homo sapien
cattggcttttgtgcacttgaaggc

SEQ ID NO: 3206094 - DNA, 25 bp, Homo sapien
gaaatagactgaggcgtttgtatgc

SEQ ID NO: 3206095 - DNA, 25 bp, Homo sapien
aagcccattaaagagacgctcctac

SEQ ID NO: 3206096 - DNA, 25 bp, Homo sapien
tatgcattaactgtgcctacaaagc

SEQ ID NO: 3206097 - DNA, 25 bp, Homo sapien
caaatacagaaaacgccgcggcggg

SEQ ID NO: 3206098 - DNA, 25 bp, Homo sapien
cagactggttgtgaagccgtaaaaa

SEQ ID NO: 3206099 - DNA, 25 bp, Homo sapien
ttgctccagactggttgtgaagccg

SEQ ID NO: 3206100 - DNA, 25 bp, Homo sapien
ccaggtgccaggtccatcgcggcga

SEQ ID NO: 3206101 - DNA, 25 bp, Homo sapien
gctggtgaataccgcgccaggtgcc

SEQ ID NO: 3206102 - DNA, 25 bp, Homo sapien
cctcaggcaatccaccctccagggc

SEQ ID NO: 3206103 - DNA, 25 bp, Homo sapien
tcaggcaatccaccctccagggcct

SEQ ID NO: 3206104 - DNA, 25 bp, Homo sapien
acctcaggcaatccaccctccaggg

SEQ ID NO: 3206105 - DNA, 25 bp, Homo sapien
ctcaggcaatccaccctccagggcc

SEQ ID NO: 3206106 - DNA, 25 bp, Homo sapien
gccactactcagaattttgtcttct

SEQ ID NO: 3206107 - DNA, 25 bp, Homo sapien
cactactcagaattttgtcttctct

SEQ ID NO: 3206108 - DNA, 25 bp, Homo sapien
ttttgtcttctcttctgttcctcat

SEQ ID NO: 3206109 - DNA, 25 bp, Homo sapien
tggccactactcagaattttgtctt

SEQ ID NO: 3206110 - DNA, 25 bp, Homo sapien
gtagacacctcttgggcatagcaca

SEQ ID NO: 3206111 - DNA, 25 bp, Homo sapien
gggcataagcgatcctactcctcag

SEQ ID NO: 3206112 - DNA, 25 bp, Homo sapien
tgagcttacaggtgggcctccaccg

SEQ ID NO: 3206113 - DNA, 25 bp, Homo sapien
tggagagcactttagcactggtcat

SEQ ID NO: 3206114 - DNA, 25 bp, Homo sapien
tccttgtggcaaagccacagcagaa

SEQ ID NO: 3206115 - DNA, 25 bp, Homo sapien
caaaattccagagacattaagagac

SEQ ID NO: 3206116 - DNA, 25 bp, Homo sapien
gagactgtagatggcctgttggtcc

SEQ ID NO: 3206117 - DNA, 25 bp, Homo sapien
tctcagtttccatacggcagactgt

SEQ ID NO: 3206118 - DNA, 25 bp, Homo sapien
cgcccggccagttatgcaactttta

SEQ ID NO: 3206119 - DNA, 25 bp, Homo sapien
gccagttatgcaacttttaaaaggc

SEQ ID NO: 3206120 - DNA, 25 bp, Homo sapien
cggccagttatgcaacttttaaaag

SEQ ID NO: 3206121 - DNA, 25 bp, Homo sapien
ccgcgcccggccagttatgcaactt

SEQ ID NO: 3206122 - DNA, 25 bp, Homo sapien
ttcgatctataactgcctctgaaca

SEQ ID NO: 3206123 - DNA, 25 bp, Homo sapien
gatattaataactcaccagctttgg

SEQ ID NO: 3206124 - DNA, 25 bp, Homo sapien
tgagatattaataactcaccagctt

SEQ ID NO: 3206125 - DNA, 25 bp, Homo sapien
cagttgagatattaataactcacca

SEQ ID NO: 3206126 - DNA, 25 bp, Homo sapien
atcttattgtatactcacatggtgg

SEQ ID NO: 3206127 - DNA, 25 bp, Homo sapien
tgtgagccagcacctacccacagat

SEQ ID NO: 3206128 - DNA, 25 bp, Homo sapien
ccactcattagggttatgacctaat

SEQ ID NO: 3206129 - DNA, 25 bp, Homo sapien
gcataaaatcccagccaaggctgac

SEQ ID NO: 3206130 - DNA, 25 bp, Homo sapien
tggtccctaaaggagcagcaaagga

SEQ ID NO: 3206131 - DNA, 25 bp, Homo sapien
gctgagcacgctcaggttcttcctc

SEQ ID NO: 3206132 - DNA, 25 bp, Homo sapien
tgcctgtctgcagggtacacaatct

SEQ ID NO: 3206133 - DNA, 25 bp, Homo sapien
gggtacacaatctgctctgcttttc

SEQ ID NO: 3206134 - DNA, 25 bp, Homo sapien
ggatgtggcgtgacaaatcttaaag

SEQ ID NO: 3206135 - DNA, 25 bp, Homo sapien
acttgagtgtacctttggatgtggc

SEQ ID NO: 3206136 - DNA, 25 bp, Homo sapien
cttctaatggtgattacagggagac

SEQ ID NO: 3206137 - DNA, 25 bp, Homo sapien
gcacccggcctgattccagtttttg

SEQ ID NO: 3206138 - DNA, 25 bp, Homo sapien
caacttgttggatactagcaaaagc

SEQ ID NO: 3206139 - DNA, 25 bp, Homo sapien
agtggcgaaccaacaactggctcag

SEQ ID NO: 3206140 - DNA, 25 bp, Homo sapien
acaactgacaggttgctgagtggac

SEQ ID NO: 3206141 - DNA, 25 bp, Homo sapien
ttcatcaggacaagcttccaacgga

SEQ ID NO: 3206142 - DNA, 25 bp, Homo sapien
tacataccgaataggagtccttcca

SEQ ID NO: 3206143 - DNA, 25 bp, Homo sapien
taggcgaggtcagactacataccga

SEQ ID NO: 3206144 - DNA, 25 bp, Homo sapien
ccctgaaaggtgtgagttgagatac

SEQ ID NO: 3206145 - DNA, 25 bp, Homo sapien
tactagagggaactactcgagtagg

SEQ ID NO: 3206146 - DNA, 25 bp, Homo sapien
aacagaccgacagaggcagccaaaa

SEQ ID NO: 3206147 - DNA, 25 bp, Homo sapien
acagaccgacagaggcagccaaaat

SEQ ID NO: 3206148 - DNA, 25 bp, Homo sapien
tctccgtcggcggttcacgtggtaa

SEQ ID NO: 3206149 - DNA, 25 bp, Homo sapien
cgggtctccgtcggcggttcacgtg

SEQ ID NO: 3206150 - DNA, 25 bp, Homo sapien
gtctccgtcggcggttcacgtggta

SEQ ID NO: 3206151 - DNA, 25 bp, Homo sapien
ttcagccttgaatatctcgatccgc

SEQ ID NO: 3206152 - DNA, 25 bp, Homo sapien
cacccggctcggtcagtcagtttgt

SEQ ID NO: 3206153 - DNA, 25 bp, Homo sapien
aggcctcgggtgtcgccgcgttgcc

SEQ ID NO: 3206154 - DNA, 25 bp, Homo sapien
cgctgccgttccgtagctgcttcag

SEQ ID NO: 3206155 - DNA, 25 bp, Homo sapien
gatccgcttgaagagcgcattctcc

SEQ ID NO: 3206156 - DNA, 25 bp, Homo sapien
caagatccgcttgaagagcgcattc

SEQ ID NO: 3206157 - DNA, 25 bp, Homo sapien
agatccgcttgaagagcgcattctc

SEQ ID NO: 3206158 - DNA, 25 bp, Homo sapien
aagatccgcttgaagagcgcattct

SEQ ID NO: 3206159 - DNA, 25 bp, Homo sapien
atccgcaccacctgttccttccaag

SEQ ID NO: 3206160 - DNA, 25 bp, Homo sapien
gactcctgccggtgtcgcccacttg

SEQ ID NO: 3206161 - DNA, 25 bp, Homo sapien
cagcagggttcccacaccaaccggg

SEQ ID NO: 3206162 - DNA, 25 bp, Homo sapien
cttgcccgccaaaggccgggcctct

SEQ ID NO: 3206163 - DNA, 25 bp, Homo sapien
tgtggagtacaagcattagggcgtc

SEQ ID NO: 3206164 - DNA, 25 bp, Homo sapien
ggattacacacatgattgacagaca

SEQ ID NO: 3206165 - DNA, 25 bp, Homo sapien
cagattcctgcttgataagagtaga

SEQ ID NO: 3206166 - DNA, 25 bp, Homo sapien
taagtcccctataggttaatggcca

SEQ ID NO: 3206167 - DNA, 25 bp, Homo sapien
aaaacatggaatatttcatgaattt

SEQ ID NO: 3206168 - DNA, 25 bp, Homo sapien
gctaataatcttctttgtattgttc

SEQ ID NO: 3206169 - DNA, 25 bp, Homo sapien
tgctaataatcttctttgtattgtt

SEQ ID NO: 3206170 - DNA, 25 bp, Homo sapien
acatggaatatttcatgaatttaca

SEQ ID NO: 3206171 - DNA, 25 bp, Homo sapien
tttagaccactctatgaagttgata

SEQ ID NO: 3206172 - DNA, 25 bp, Homo sapien
tcctttgacattttagaccactcta

SEQ ID NO: 3206173 - DNA, 25 bp, Homo sapien
ttaagtttagcaaggaatacaaaca

SEQ ID NO: 3206174 - DNA, 25 bp, Homo sapien
tcaatccatttctatactgtttatg

SEQ ID NO: 3206175 - DNA, 25 bp, Homo sapien
caatccatttctatactgtttatgt

SEQ ID NO: 3206176 - DNA, 25 bp, Homo sapien
aatccatttctatactgtttatgtt

SEQ ID NO: 3206177 - DNA, 25 bp, Homo sapien
tttcaatccatttctatactgttta

SEQ ID NO: 3206178 - DNA, 25 bp, Homo sapien
tatgatagtttatgagcaaaggacc

SEQ ID NO: 3206179 - DNA, 25 bp, Homo sapien
ggccagacaggtatgtagtaaagct

SEQ ID NO: 3206180 - DNA, 25 bp, Homo sapien
tcaaagatgagagggtctgttctct

SEQ ID NO: 3206181 - DNA, 25 bp, Homo sapien
gaatacaatccagtaagagaggcca

SEQ ID NO: 3206182 - DNA, 25 bp, Homo sapien
ctctacgaaccaattcataagcttc

SEQ ID NO: 3206183 - DNA, 25 bp, Homo sapien
tctacgaaccaattcataagcttct

SEQ ID NO: 3206184 - DNA, 25 bp, Homo sapien
atgactcttcaagtcatttctcaaa

SEQ ID NO: 3206185 - DNA, 25 bp, Homo sapien
tgactcttcaagtcatttctcaaac

SEQ ID NO: 3206186 - DNA, 25 bp, Homo sapien
taaatattgcaacagccacacaact

SEQ ID NO: 3206187 - DNA, 25 bp, Homo sapien
ctctcttaaatattgcaacagccac

SEQ ID NO: 3206188 - DNA, 25 bp, Homo sapien
tcttaaatattgcaacagccacaca

SEQ ID NO: 3206189 - DNA, 25 bp, Homo sapien
tattgcaacagccacacaactgact

SEQ ID NO: 3206190 - DNA, 25 bp, Homo sapien
tgaagaaggccataaacgtgccaac

SEQ ID NO: 3206191 - DNA, 25 bp, Homo sapien
ctgaagaaggccataaacgtgccaa

SEQ ID NO: 3206192 - DNA, 25 bp, Homo sapien
acacttaatggcttcatcatacttc

SEQ ID NO: 3206193 - DNA, 25 bp, Homo sapien
tgtaaccctcaagatctcgcatttg

SEQ ID NO: 3206194 - DNA, 25 bp, Homo sapien
gctctctgcgcaggtcgaagctgaa

SEQ ID NO: 3206195 - DNA, 25 bp, Homo sapien
gctgaagtaactgatacctcgtttc

SEQ ID NO: 3206196 - DNA, 25 bp, Homo sapien
cttctaataaatggtaagcaatagc

SEQ ID NO: 3206197 - DNA, 25 bp, Homo sapien
tagcataaccaatccatgatgctct

SEQ ID NO: 3206198 - DNA, 25 bp, Homo sapien
taggatcagacttagtaaaatggct

SEQ ID NO: 3206199 - DNA, 25 bp, Homo sapien
tcagacttagtaaaatggcttctag

SEQ ID NO: 3206200 - DNA, 25 bp, Homo sapien
gacttagtaaaatggcttctagtta

SEQ ID NO: 3206201 - DNA, 25 bp, Homo sapien
ggatcagacttagtaaaatggcttc

SEQ ID NO: 3206202 - DNA, 25 bp, Homo sapien
aattcttaagtatctacagagcaac

SEQ ID NO: 3206203 - DNA, 25 bp, Homo sapien
aaacatgtaagaagtcaaaggataa

SEQ ID NO: 3206204 - DNA, 25 bp, Homo sapien
gataacatccggttgataaaactaa

SEQ ID NO: 3206205 - DNA, 25 bp, Homo sapien
cagagcaactgagtaaataatgaca

SEQ ID NO: 3206206 - DNA, 25 bp, Homo sapien
tatattcataatccaccttgtcagg

SEQ ID NO: 3206207 - DNA, 25 bp, Homo sapien
gacctgcttcccgaagaacttgatt

SEQ ID NO: 3206208 - DNA, 25 bp, Homo sapien
tcttctacagcaagtttatcacaaa

SEQ ID NO: 3206209 - DNA, 25 bp, Homo sapien
gatgttccaaagcttctctatagag

SEQ ID NO: 3206210 - DNA, 25 bp, Homo sapien
aaactgtcagcagcaactagatttt

SEQ ID NO: 3206211 - DNA, 25 bp, Homo sapien
ttcattcaactacttttcattgttc

SEQ ID NO: 3206212 - DNA, 25 bp, Homo sapien
taaaagtacacgagtaagaaataga

SEQ ID NO: 3206213 - DNA, 25 bp, Homo sapien
ctgtcagcagcaactagatttttca

SEQ ID NO: 3206214 - DNA, 25 bp, Homo sapien
ttccaaacgacatagttgcaacaga

SEQ ID NO: 3206215 - DNA, 25 bp, Homo sapien
tccaagcctttgtaataggcccagt

SEQ ID NO: 3206216 - DNA, 25 bp, Homo sapien
gcctttgtaataggcccagttttca

SEQ ID NO: 3206217 - DNA, 25 bp, Homo sapien
tctgcagcatcttccaaacgacata

SEQ ID NO: 3206218 - DNA, 25 bp, Homo sapien
caccagtcccctgggatatttagtc

SEQ ID NO: 3206219 - DNA, 25 bp, Homo sapien
cagataaaaagtttaacggcagcct

SEQ ID NO: 3206220 - DNA, 25 bp, Homo sapien
cataaatttttagccgttctaacat

SEQ ID NO: 3206221 - DNA, 25 bp, Homo sapien
gggatatttagtccaggcttcctca

SEQ ID NO: 3206222 - DNA, 25 bp, Homo sapien
tgtataatgatcttaaagtattgaa

SEQ ID NO: 3206223 - DNA, 25 bp, Homo sapien
tcatccttaggaacttatccaaaca

SEQ ID NO: 3206224 - DNA, 25 bp, Homo sapien
tgggcaacccttgctgaaattcatc

SEQ ID NO: 3206225 - DNA, 25 bp, Homo sapien
tattgaagactggtgggcaaccctt

SEQ ID NO: 3206226 - DNA, 25 bp, Homo sapien
aataaccggcagctttttagagagg

SEQ ID NO: 3206227 - DNA, 25 bp, Homo sapien
gagaggtttcataacctactactaa

SEQ ID NO: 3206228 - DNA, 25 bp, Homo sapien
cattggggttaaataaccggcagct

SEQ ID NO: 3206229 - DNA, 25 bp, Homo sapien
ctactaactcttctatgattgccac

SEQ ID NO: 3206230 - DNA, 25 bp, Homo sapien
tgctgcatattcttgggcaagtcat

SEQ ID NO: 3206231 - DNA, 25 bp, Homo sapien
cccatctgacagatctgcaacaaaa

SEQ ID NO: 3206232 - DNA, 25 bp, Homo sapien
caaaagtgctgcatattcttgggca

SEQ ID NO: 3206233 - DNA, 25 bp, Homo sapien
gacagatctgcaacaaaagtgctgc

SEQ ID NO: 3206234 - DNA, 25 bp, Homo sapien
tatgtactccaaagcaatagatggc

SEQ ID NO: 3206235 - DNA, 25 bp, Homo sapien
gtcataatgttgtgccaagtagtac

SEQ ID NO: 3206236 - DNA, 25 bp, Homo sapien
tagtactggacccaaagtaatgtgg

SEQ ID NO: 3206237 - DNA, 25 bp, Homo sapien
agtaatgtggttggtggttcctcct

SEQ ID NO: 3206238 - DNA, 25 bp, Homo sapien
gcttctttaatcaggttggctttta

SEQ ID NO: 3206239 - DNA, 25 bp, Homo sapien
ctttaatcaggttggcttttagcat

SEQ ID NO: 3206240 - DNA, 25 bp, Homo sapien
tcagcttctttaatcaggttggctt

SEQ ID NO: 3206241 - DNA, 25 bp, Homo sapien
cttcagcttctttaatcaggttggc

SEQ ID NO: 3206242 - DNA, 25 bp, Homo sapien
tcataattaagaacactagctgtac

SEQ ID NO: 3206243 - DNA, 25 bp, Homo sapien
taattaagaacactagctgtacaaa

SEQ ID NO: 3206244 - DNA, 25 bp, Homo sapien
cataattaagaacactagctgtaca

SEQ ID NO: 3206245 - DNA, 25 bp, Homo sapien
ataattaagaacactagctgtacaa

SEQ ID NO: 3206246 - DNA, 25 bp, Homo sapien
taagcctgggcacattctgtttgga

SEQ ID NO: 3206247 - DNA, 25 bp, Homo sapien
cattcaaattctctaccgctgatgt

SEQ ID NO: 3206248 - DNA, 25 bp, Homo sapien
aattctctaccgctgatgttccttc

SEQ ID NO: 3206249 - DNA, 25 bp, Homo sapien
tattcattgctttataagcctgggc

SEQ ID NO: 3206250 - DNA, 25 bp, Homo sapien
atgaacagggtcctaggagtacttt

SEQ ID NO: 3206251 - DNA, 25 bp, Homo sapien
taatcagctgtgtatgtactactaa

SEQ ID NO: 3206252 - DNA, 25 bp, Homo sapien
gagttcttaccacaagacaatagag

SEQ ID NO: 3206253 - DNA, 25 bp, Homo sapien
caatagagaccctggctgaaaatgc

SEQ ID NO: 3206254 - DNA, 25 bp, Homo sapien
aagggtatatggcatcatcaataaa

SEQ ID NO: 3206255 - DNA, 25 bp, Homo sapien
caagggtatatggcatcatcaataa

SEQ ID NO: 3206256 - DNA, 25 bp, Homo sapien
gggtatatggcatcatcaataaatt

SEQ ID NO: 3206257 - DNA, 25 bp, Homo sapien
agggtatatggcatcatcaataaat

SEQ ID NO: 3206258 - DNA, 25 bp, Homo sapien
gctggtatgtggaaaagaaatcaat

SEQ ID NO: 3206259 - DNA, 25 bp, Homo sapien
ttagcaagtaagtcaagcaatcagg

SEQ ID NO: 3206260 - DNA, 25 bp, Homo sapien
tcatggaaatgagtcagacgtgaag

SEQ ID NO: 3206261 - DNA, 25 bp, Homo sapien
gatgcatttcaactaagctttggta

SEQ ID NO: 3206262 - DNA, 25 bp, Homo sapien
gaaagtcaaactggtcatcagtgat

SEQ ID NO: 3206263 - DNA, 25 bp, Homo sapien
aaagtcaaactggtcatcagtgatt

SEQ ID NO: 3206264 - DNA, 25 bp, Homo sapien
gatctctatagcaattcttgctgcc

SEQ ID NO: 3206265 - DNA, 25 bp, Homo sapien
gatgctgtcgaagtacatcttctag

SEQ ID NO: 3206266 - DNA, 25 bp, Homo sapien
aataagtccacatatgatctaaggg

SEQ ID NO: 3206267 - DNA, 25 bp, Homo sapien
gctgccttgaagtaaaatggatgct

SEQ ID NO: 3206268 - DNA, 25 bp, Homo sapien
ttttcctagctttatcccaagctgg

SEQ ID NO: 3206269 - DNA, 25 bp, Homo sapien
tgttcaagcaatattcatttttagt

SEQ ID NO: 3206270 - DNA, 25 bp, Homo sapien
taagtcactgtgcaattttcctagc

SEQ ID NO: 3206271 - DNA, 25 bp, Homo sapien
aaaaagaggaataggctgggaatag

SEQ ID NO: 3206272 - DNA, 25 bp, Homo sapien
tcaaaagctgtttagcaggaagaag

SEQ ID NO: 3206273 - DNA, 25 bp, Homo sapien
catttttgccatgagtaaggcacaa

SEQ ID NO: 3206274 - DNA, 25 bp, Homo sapien
gagatcactcattctcaggttctgt

SEQ ID NO: 3206275 - DNA, 25 bp, Homo sapien
tatttttgtacgtatgagatcactc

SEQ ID NO: 3206276 - DNA, 25 bp, Homo sapien
tatgtaatagccacagagtagcaga

SEQ ID NO: 3206277 - DNA, 25 bp, Homo sapien
ctcagaatatggtggtgcctcacta

SEQ ID NO: 3206278 - DNA, 25 bp, Homo sapien
tgagctaactaactaactgaaggga

SEQ ID NO: 3206279 - DNA, 25 bp, Homo sapien
ccagaaatggcttgctgggcaaaga

SEQ ID NO: 3206280 - DNA, 25 bp, Homo sapien
tcttttggacctcctatctcctcat

SEQ ID NO: 3206281 - DNA, 25 bp, Homo sapien
tcttctttgtttattacgtagcttc

SEQ ID NO: 3206282 - DNA, 25 bp, Homo sapien
tttggacctcctatctcctcatcat

SEQ ID NO: 3206283 - DNA, 25 bp, Homo sapien
agctcttctttgtttattacgtagc

SEQ ID NO: 3206284 - DNA, 25 bp, Homo sapien
aagcagtcagaagcaccgtttgtag

SEQ ID NO: 3206285 - DNA, 25 bp, Homo sapien
gcagtcagaagcaccgtttgtagcc

SEQ ID NO: 3206286 - DNA, 25 bp, Homo sapien
caaagcagtcagaagcaccgtttgt

SEQ ID NO: 3206287 - DNA, 25 bp, Homo sapien
caaacaaagcagtcagaagcaccgt

SEQ ID NO: 3206288 - DNA, 25 bp, Homo sapien
ttcaccaagttcttcaacggtgtta

SEQ ID NO: 3206289 - DNA, 25 bp, Homo sapien
tcaccaagttcttcaacggtgttaa

SEQ ID NO: 3206290 - DNA, 25 bp, Homo sapien
cagtgatcagttttgtcagggccac

SEQ ID NO: 3206291 - DNA, 25 bp, Homo sapien
gatcagttttgtcagggccactgta

SEQ ID NO: 3206292 - DNA, 25 bp, Homo sapien
tcagttttgtcagggccactgtacc

SEQ ID NO: 3206293 - DNA, 25 bp, Homo sapien
aatacagtgatcagttttgtcaggg

SEQ ID NO: 3206294 - DNA, 25 bp, Homo sapien
ggcatttgctaaataatcgtacagt

SEQ ID NO: 3206295 - DNA, 25 bp, Homo sapien
ctgtgagaaagctgcgttggcattt

SEQ ID NO: 3206296 - DNA, 25 bp, Homo sapien
taaggctatcagagttgggtgacta

SEQ ID NO: 3206297 - DNA, 25 bp, Homo sapien
cgtacagtggtaaggctatcagagt

SEQ ID NO: 3206298 - DNA, 25 bp, Homo sapien
gatccaggctcaaaattttatcttc

SEQ ID NO: 3206299 - DNA, 25 bp, Homo sapien
tgacctgaatcctagttatgttatg

SEQ ID NO: 3206300 - DNA, 25 bp, Homo sapien
taccaggtactaggtctaagctctg

SEQ ID NO: 3206301 - DNA, 25 bp, Homo sapien
tacatggtaattacatctgacctga

SEQ ID NO: 3206302 - DNA, 25 bp, Homo sapien
ccgctgcgcctggccaaacatgact

SEQ ID NO: 3206303 - DNA, 25 bp, Homo sapien
aaacatgactttttaaatggatact

SEQ ID NO: 3206304 - DNA, 25 bp, Homo sapien
catgactttttaaatggatactcat

SEQ ID NO: 3206305 - DNA, 25 bp, Homo sapien
cgctgcgcctggccaaacatgactt

SEQ ID NO: 3206306 - DNA, 25 bp, Homo sapien
aaaagagaaagtaagatatattttg

SEQ ID NO: 3206307 - DNA, 25 bp, Homo sapien
agagaaagtaagatatattttgatc

SEQ ID NO: 3206308 - DNA, 25 bp, Homo sapien
ctataaaaagagaaagtaagatata

SEQ ID NO: 3206309 - DNA, 25 bp, Homo sapien
tataaaaagagaaagtaagatatat

SEQ ID NO: 3206310 - DNA, 25 bp, Homo sapien
cagtattaaagagacgaatcataca

SEQ ID NO: 3206311 - DNA, 25 bp, Homo sapien
catacactcatgaagccagggatga

SEQ ID NO: 3206312 - DNA, 25 bp, Homo sapien
caaatgccctctttactgattgtag

SEQ ID NO: 3206313 - DNA, 25 bp, Homo sapien
ccagggatgactagaatcaatagca

SEQ ID NO: 3206314 - DNA, 25 bp, Homo sapien
tatgataaacttgtacagaccactt

SEQ ID NO: 3206315 - DNA, 25 bp, Homo sapien
ttatgactcgaattgtgctaagaaa

SEQ ID NO: 3206316 - DNA, 25 bp, Homo sapien
tcaaaatcaggtaatacttgtatcc

SEQ ID NO: 3206317 - DNA, 25 bp, Homo sapien
ctcaaatatctggactgaataattc

SEQ ID NO: 3206318 - DNA, 25 bp, Homo sapien
aataaaatcttagcagttgaatact

SEQ ID NO: 3206319 - DNA, 25 bp, Homo sapien
ttaaaaataaaatcttagcagttga

SEQ ID NO: 3206320 - DNA, 25 bp, Homo sapien
aaataaaatcttagcagttgaatac

SEQ ID NO: 3206321 - DNA, 25 bp, Homo sapien
aaaaataaaatcttagcagttgaat

SEQ ID NO: 3206322 - DNA, 25 bp, Homo sapien
taatactgttctaactgtatcagat

SEQ ID NO: 3206323 - DNA, 25 bp, Homo sapien
cgttgctccaaaaagacgattcatt

SEQ ID NO: 3206324 - DNA, 25 bp, Homo sapien
tgttctaactgtatcagataaatct

SEQ ID NO: 3206325 - DNA, 25 bp, Homo sapien
aaaattctttggattcgttgctcca

SEQ ID NO: 3206326 - DNA, 25 bp, Homo sapien
gagattcatcaagtgttgttgccaa

SEQ ID NO: 3206327 - DNA, 25 bp, Homo sapien
actagaaggatctaagtaatatacc

SEQ ID NO: 3206328 - DNA, 25 bp, Homo sapien
ctggaggtttctgttagtgagagat

SEQ ID NO: 3206329 - DNA, 25 bp, Homo sapien
tatagctcgcttctgactagaagga

SEQ ID NO: 3206330 - DNA, 25 bp, Homo sapien
tcttcatatccaggaggcatgaaag

SEQ ID NO: 3206331 - DNA, 25 bp, Homo sapien
gcagaactatctccattaactgtga

SEQ ID NO: 3206332 - DNA, 25 bp, Homo sapien
aggctaccatcatacaaggcttcca

SEQ ID NO: 3206333 - DNA, 25 bp, Homo sapien
tctttacagtctcctaggctaccat

SEQ ID NO: 3206334 - DNA, 25 bp, Homo sapien
gcagcaggtgcgtgacaaaaatatt

SEQ ID NO: 3206335 - DNA, 25 bp, Homo sapien
tagttggtgccacatcacagtgcat

SEQ ID NO: 3206336 - DNA, 25 bp, Homo sapien
aaaatcagtcagatgctaaagcccc

SEQ ID NO: 3206337 - DNA, 25 bp, Homo sapien
tctgcatatcgtgaacaaggcctgc

SEQ ID NO: 3206338 - DNA, 25 bp, Homo sapien
catatttggtaccttatgtttgaca

SEQ ID NO: 3206339 - DNA, 25 bp, Homo sapien
gcctgaaacaactgagcaagaaata

SEQ ID NO: 3206340 - DNA, 25 bp, Homo sapien
gaaatgtagggcttcaagtattaca

SEQ ID NO: 3206341 - DNA, 25 bp, Homo sapien
caaagtcttgggcttgcctgaaaca

SEQ ID NO: 3206342 - DNA, 25 bp, Homo sapien
tgttcaatcagtaaaaggtcttcgg

SEQ ID NO: 3206343 - DNA, 25 bp, Homo sapien
cattaggaatttagctcctcacggg

SEQ ID NO: 3206344 - DNA, 25 bp, Homo sapien
cataacaaagcactggagttcggtt

SEQ ID NO: 3206345 - DNA, 25 bp, Homo sapien
tccaaacacctcattagtggcagag

SEQ ID NO: 3206346 - DNA, 25 bp, Homo sapien
tatgttaatacaggtcaagagaccc

SEQ ID NO: 3206347 - DNA, 25 bp, Homo sapien
tgaggcaaatatgagacgatccagt

SEQ ID NO: 3206348 - DNA, 25 bp, Homo sapien
gatccagttgatactactcagagca

SEQ ID NO: 3206349 - DNA, 25 bp, Homo sapien
tcaacgagaaatgacaagagtagct

SEQ ID NO: 3206350 - DNA, 25 bp, Homo sapien
tgtaacacagccatttcgtgggact

SEQ ID NO: 3206351 - DNA, 25 bp, Homo sapien
gctctaatagcaatacaccatggag

SEQ ID NO: 3206352 - DNA, 25 bp, Homo sapien
gaccgccttctatttgaaaggtcag

SEQ ID NO: 3206353 - DNA, 25 bp, Homo sapien
tagctagaatagaaagaccgccttc

SEQ ID NO: 3206354 - DNA, 25 bp, Homo sapien
ccatggtagattgggaagatagcca

SEQ ID NO: 3206355 - DNA, 25 bp, Homo sapien
tgacagcatgattacttgaaggcaa

SEQ ID NO: 3206356 - DNA, 25 bp, Homo sapien
tatcagatagctttggaagaccact

SEQ ID NO: 3206357 - DNA, 25 bp, Homo sapien
taatcactggacaatgaacctggta

SEQ ID NO: 3206358 - DNA, 25 bp, Homo sapien
gccacaatgaacaggcaactgagaa

SEQ ID NO: 3206359 - DNA, 25 bp, Homo sapien
ggatgagtagattcactgccaacca

SEQ ID NO: 3206360 - DNA, 25 bp, Homo sapien
aattagaggatggtccttccaggca

SEQ ID NO: 3206361 - DNA, 25 bp, Homo sapien
tggttgctcaagacataaaggatga

SEQ ID NO: 3206362 - DNA, 25 bp, Homo sapien
caaggcacctatgtgaagacagact

SEQ ID NO: 3206363 - DNA, 25 bp, Homo sapien
tcttatctaagggacctgagccagg

SEQ ID NO: 3206364 - DNA, 25 bp, Homo sapien
caagaatggcgatcaacagtatcaa

SEQ ID NO: 3206365 - DNA, 25 bp, Homo sapien
taaaaaatgtagacctcccagtatg

SEQ ID NO: 3206366 - DNA, 25 bp, Homo sapien
cttgggcaacatagcaagaccacat

SEQ ID NO: 3206367 - DNA, 25 bp, Homo sapien
gccaggagttgaagatcagcttggg

SEQ ID NO: 3206368 - DNA, 25 bp, Homo sapien
tgtaagcccaatgctttgggaggct

SEQ ID NO: 3206369 - DNA, 25 bp, Homo sapien
gaagcgggaggatcccttgaggcca

SEQ ID NO: 3206370 - DNA, 25 bp, Homo sapien
ccccagaaagatatgtgaaagtccc

SEQ ID NO: 3206371 - DNA, 25 bp, Homo sapien
gatttctctgtactaagctcatgac

SEQ ID NO: 3206372 - DNA, 25 bp, Homo sapien
cacagcgttctgatacaagttcttc

SEQ ID NO: 3206373 - DNA, 25 bp, Homo sapien
gatcttgagaggtgattatcccgga

SEQ ID NO: 3206374 - DNA, 25 bp, Homo sapien
gaagtccttaccaaatcctactaga

SEQ ID NO: 3206375 - DNA, 25 bp, Homo sapien
ctatcattcggacttcagacctctc

SEQ ID NO: 3206376 - DNA, 25 bp, Homo sapien
tagatctatgtgatttgaccccagc

SEQ ID NO: 3206377 - DNA, 25 bp, Homo sapien
gctttcagactagattcgtaactca

SEQ ID NO: 3206378 - DNA, 25 bp, Homo sapien
gaaggtgatcgccatatattgttat

SEQ ID NO: 3206379 - DNA, 25 bp, Homo sapien
gctcttaagcatgatgtagaactac

SEQ ID NO: 3206380 - DNA, 25 bp, Homo sapien
gtggaataccacagagctcttaagc

SEQ ID NO: 3206381 - DNA, 25 bp, Homo sapien
tgacaagtagaggatggttttaacc

SEQ ID NO: 3206382 - DNA, 25 bp, Homo sapien
gggaaagagcatagtgatataagta

SEQ ID NO: 3206383 - DNA, 25 bp, Homo sapien
gaaagagcatagtgatataagtaaa

SEQ ID NO: 3206384 - DNA, 25 bp, Homo sapien
aagagcatagtgatataagtaaata

SEQ ID NO: 3206385 - DNA, 25 bp, Homo sapien
ggaaagagcatagtgatataagtaa

SEQ ID NO: 3206386 - DNA, 25 bp, Homo sapien
tttggtgttgctgccactggacagg

SEQ ID NO: 3206387 - DNA, 25 bp, Homo sapien
tctttggtgttgctgccactggaca

SEQ ID NO: 3206388 - DNA, 25 bp, Homo sapien
gaggctttctttacagtctaagtct

SEQ ID NO: 3206389 - DNA, 25 bp, Homo sapien
ttagaggctttctttacagtctaag

SEQ ID NO: 3206390 - DNA, 25 bp, Homo sapien
taaaaataatgacagctggccggtc

SEQ ID NO: 3206391 - DNA, 25 bp, Homo sapien
caatcaagctggctaggttcctgcc

SEQ ID NO: 3206392 - DNA, 25 bp, Homo sapien
tttgtgcctctaaaatccagctgga

SEQ ID NO: 3206393 - DNA, 25 bp, Homo sapien
tagcaaatcttttatggcaccagcc

SEQ ID NO: 3206394 - DNA, 25 bp, Homo sapien
tagatgtagtattctgtgttgacac

SEQ ID NO: 3206395 - DNA, 25 bp, Homo sapien
ttattgtgccacttctggccgggcg

SEQ ID NO: 3206396 - DNA, 25 bp, Homo sapien
tagcaattattttagaacagctctg

SEQ ID NO: 3206397 - DNA, 25 bp, Homo sapien
ttttagaacagctctgctagaaatg

SEQ ID NO: 3206398 - DNA, 25 bp, Homo sapien
tggaagaacatttcatgctcatggg

SEQ ID NO: 3206399 - DNA, 25 bp, Homo sapien
aggaagaatcaatatcgtgaaaatg

SEQ ID NO: 3206400 - DNA, 25 bp, Homo sapien
ggaagaacatttcatgctcatgggt

SEQ ID NO: 3206401 - DNA, 25 bp, Homo sapien
aatatcgtgaaaatggccatactgc

SEQ ID NO: 3206402 - DNA, 25 bp, Homo sapien
gcttctatgtcagccagactgatga

SEQ ID NO: 3206403 - DNA, 25 bp, Homo sapien
gaaggtcatagccatgctggaggtt

SEQ ID NO: 3206404 - DNA, 25 bp, Homo sapien
cagggtgccagacgccatgtttgac

SEQ ID NO: 3206405 - DNA, 25 bp, Homo sapien
gcagaagggttcactggtgagaccc

SEQ ID NO: 3206406 - DNA, 25 bp, Homo sapien
ccacacgtgagaccgatgtcgccag

SEQ ID NO: 3206407 - DNA, 25 bp, Homo sapien
cctccgtctttcaaataaagctgtt

SEQ ID NO: 3206408 - DNA, 25 bp, Homo sapien
gggactcggctgtcctccgtctttc

SEQ ID NO: 3206409 - DNA, 25 bp, Homo sapien
tgagaccgatgtcgccaggaccacg

SEQ ID NO: 3206410 - DNA, 25 bp, Homo sapien
aaccatgattcaagactcctgtgcc

SEQ ID NO: 3206411 - DNA, 25 bp, Homo sapien
gatgtcaaatgtaatcccatgataa

SEQ ID NO: 3206412 - DNA, 25 bp, Homo sapien
tgcacataggatggtaatacaatgg

SEQ ID NO: 3206413 - DNA, 25 bp, Homo sapien
tgtaaatgggttaaacttcagtgaa

SEQ ID NO: 3206414 - DNA, 25 bp, Homo sapien
ggttttgtagagtctggtcaacatt

SEQ ID NO: 3206415 - DNA, 25 bp, Homo sapien
gcagttattttagcactggtatgca

SEQ ID NO: 3206416 - DNA, 25 bp, Homo sapien
cagttattttagcactggtatgcat

SEQ ID NO: 3206417 - DNA, 25 bp, Homo sapien
gttttgtagagtctggtcaacattc

SEQ ID NO: 3206418 - DNA, 25 bp, Homo sapien
tgtcctcaaaacgttagatctgtgc

SEQ ID NO: 3206419 - DNA, 25 bp, Homo sapien
gttcctagagtggtttgcacacagc

SEQ ID NO: 3206420 - DNA, 25 bp, Homo sapien
gaatctcatggcacgcagctgtgca

SEQ ID NO: 3206421 - DNA, 25 bp, Homo sapien
tgggagccagacataaacacaattg

SEQ ID NO: 3206422 - DNA, 25 bp, Homo sapien
taaactcgtgcacttacacattcac

SEQ ID NO: 3206423 - DNA, 25 bp, Homo sapien
taagctgaatgtttagaactcagaa

SEQ ID NO: 3206424 - DNA, 25 bp, Homo sapien
tacaaacactcatgttgcaaaaggg

SEQ ID NO: 3206425 - DNA, 25 bp, Homo sapien
aataatattatggtcgggcgctgtg

SEQ ID NO: 3206426 - DNA, 25 bp, Homo sapien
ctgggccgtggcgagttttgcagcc

SEQ ID NO: 3206427 - DNA, 25 bp, Homo sapien
ttttgcagcctaaggtcttggcagg

SEQ ID NO: 3206428 - DNA, 25 bp, Homo sapien
taaggtcttggcaggcgcattgctg

SEQ ID NO: 3206429 - DNA, 25 bp, Homo sapien
acttggaggcgagctctgggccgtg

SEQ ID NO: 3206430 - DNA, 25 bp, Homo sapien
gccgccgcctctgtgaactgcggga

SEQ ID NO: 3206431 - DNA, 25 bp, Homo sapien
tgcgggagttgggacagcggccagg

SEQ ID NO: 3206432 - DNA, 25 bp, Homo sapien
gggctagatgggtgggacgcgagtc

SEQ ID NO: 3206433 - DNA, 25 bp, Homo sapien
acgcgagtcctcgccgaaagcttgc

SEQ ID NO: 3206434 - DNA, 25 bp, Homo sapien
gtttcttcagcttgccgctgaggat

SEQ ID NO: 3206435 - DNA, 25 bp, Homo sapien
acgtatcgtttggtcgccccagaga

SEQ ID NO: 3206436 - DNA, 25 bp, Homo sapien
tcggttccggcatcgacgtatcgtt

SEQ ID NO: 3206437 - DNA, 25 bp, Homo sapien
tggagagcaacggtaaggacggagc

SEQ ID NO: 3206438 - DNA, 25 bp, Homo sapien
gcactctctcgcgagagggccgcag

SEQ ID NO: 3206439 - DNA, 25 bp, Homo sapien
gcagagccgcctttgacgggggcgt

SEQ ID NO: 3206440 - DNA, 25 bp, Homo sapien
cacgggcactctctcgcgagagggc

SEQ ID NO: 3206441 - DNA, 25 bp, Homo sapien
actctctcgcgagagggccgcagag

SEQ ID NO: 3206442 - DNA, 25 bp, Homo sapien
cacgtccaaggttcccgccctctgg

SEQ ID NO: 3206443 - DNA, 25 bp, Homo sapien
ccacgtccaaggttcccgccctctg

SEQ ID NO: 3206444 - DNA, 25 bp, Homo sapien
gttcggctgcgcaacttcccaggag

SEQ ID NO: 3206445 - DNA, 25 bp, Homo sapien
gaaaggctgagagattacgccaccg

SEQ ID NO: 3206446 - DNA, 25 bp, Homo sapien
tctacctaggcaggcgtgggacctg

SEQ ID NO: 3206447 - DNA, 25 bp, Homo sapien
acacgccaggcgtcactcgggctgg

SEQ ID NO: 3206448 - DNA, 25 bp, Homo sapien
tggacgaaaagcttgcctcgagcga

SEQ ID NO: 3206449 - DNA, 25 bp, Homo sapien
gacactgccccgctggacgaaaagc

SEQ ID NO: 3206450 - DNA, 25 bp, Homo sapien
ccgctggacgaaaagcttgcctcga

SEQ ID NO: 3206451 - DNA, 25 bp, Homo sapien
agcttgcctcgagcgacgactccat

SEQ ID NO: 3206452 - DNA, 25 bp, Homo sapien
taggtcaggcatgtcttgcccacat

SEQ ID NO: 3206453 - DNA, 25 bp, Homo sapien
ccacattggagtcgccgatcacgat

SEQ ID NO: 3206454 - DNA, 25 bp, Homo sapien
tctcggaaatccacccctatcgtgg

SEQ ID NO: 3206455 - DNA, 25 bp, Homo sapien
cggccagcgcagaagcggtaggtca

SEQ ID NO: 3206456 - DNA, 25 bp, Homo sapien
ttcctgggatccttcagatagtagg

SEQ ID NO: 3206457 - DNA, 25 bp, Homo sapien
cttcagatagtaggaaagcttgggt

SEQ ID NO: 3206458 - DNA, 25 bp, Homo sapien
tgctgccttcttcgtcttcgtaaga

SEQ ID NO: 3206459 - DNA, 25 bp, Homo sapien
ggcttctgaaatcaggctagaaaaa

SEQ ID NO: 3206460 - DNA, 25 bp, Homo sapien
caaaggcatactgtgtgtgtcagca

SEQ ID NO: 3206461 - DNA, 25 bp, Homo sapien
gccatgttggtcatatcatacacga

SEQ ID NO: 3206462 - DNA, 25 bp, Homo sapien
ttagcaccagcacgtcattgcaggc

SEQ ID NO: 3206463 - DNA, 25 bp, Homo sapien
gaatccgtggtatatcattggctag

SEQ ID NO: 3206464 - DNA, 25 bp, Homo sapien
tagtaagaaagcaactcggctgggt

SEQ ID NO: 3206465 - DNA, 25 bp, Homo sapien
tagtaaaggctaagaataggtctcc

SEQ ID NO: 3206466 - DNA, 25 bp, Homo sapien
tcattctttatggactgggaaccag

SEQ ID NO: 3206467 - DNA, 25 bp, Homo sapien
tactgaggagggataacttgtgacc

SEQ ID NO: 3206468 - DNA, 25 bp, Homo sapien
cagaaaccatcaagttcccacagag

SEQ ID NO: 3206469 - DNA, 25 bp, Homo sapien
ctccctcactatgtacatttattac

SEQ ID NO: 3206470 - DNA, 25 bp, Homo sapien
cagatttagggtcacagaaaaatgg

SEQ ID NO: 3206471 - DNA, 25 bp, Homo sapien
tgagacatcataattatccagtaca

SEQ ID NO: 3206472 - DNA, 25 bp, Homo sapien
caaaacaacccattaatttcttcat

SEQ ID NO: 3206473 - DNA, 25 bp, Homo sapien
tctcctgcactttcccagtttttat

SEQ ID NO: 3206474 - DNA, 25 bp, Homo sapien
aaatctcctgcactttcccagtttt

SEQ ID NO: 3206475 - DNA, 25 bp, Homo sapien
cgtaaatctcctgcactttcccagt

SEQ ID NO: 3206476 - DNA, 25 bp, Homo sapien
gaatttgaactaaaactatgagcct

SEQ ID NO: 3206477 - DNA, 25 bp, Homo sapien
tattgggaagctacagggactacgt

SEQ ID NO: 3206478 - DNA, 25 bp, Homo sapien
cacggttaacgagcatctttggtct

SEQ ID NO: 3206479 - DNA, 25 bp, Homo sapien
tagtagcaatacgaacacacatgcc

SEQ ID NO: 3206480 - DNA, 25 bp, Homo sapien
acttctgcctcgcagagaggaagga

SEQ ID NO: 3206481 - DNA, 25 bp, Homo sapien
cttctgacttctgcctcgcagagag

SEQ ID NO: 3206482 - DNA, 25 bp, Homo sapien
gaaggagaggggagcatctggcaag

SEQ ID NO: 3206483 - DNA, 25 bp, Homo sapien
tgacttctgcctcgcagagaggaag

SEQ ID NO: 3206484 - DNA, 25 bp, Homo sapien
ggcctgagagtgaatcagaggcatt

SEQ ID NO: 3206485 - DNA, 25 bp, Homo sapien
cagaggcattagagacaccggtgca

SEQ ID NO: 3206486 - DNA, 25 bp, Homo sapien
tgcagttatctggagcacaatttct

SEQ ID NO: 3206487 - DNA, 25 bp, Homo sapien
cttttagtgatatcactgcaggcct

SEQ ID NO: 3206488 - DNA, 25 bp, Homo sapien
ttggaatcggagtaaggcttgagat

SEQ ID NO: 3206489 - DNA, 25 bp, Homo sapien
ctgtggcaggttggaatcggagtaa

SEQ ID NO: 3206490 - DNA, 25 bp, Homo sapien
caaatgtaaggctctgtggcaggtt

SEQ ID NO: 3206491 - DNA, 25 bp, Homo sapien
acatactcccaaatgtaaggctctg

SEQ ID NO: 3206492 - DNA, 25 bp, Homo sapien
tatacactgtgacggatgggccagg

SEQ ID NO: 3206493 - DNA, 25 bp, Homo sapien
gaaagatggcttgcattaacctcga

SEQ ID NO: 3206494 - DNA, 25 bp, Homo sapien
cctgagagtgatagcattctggtcc

SEQ ID NO: 3206495 - DNA, 25 bp, Homo sapien
tttaaatgtgcccaaagggagtgac

SEQ ID NO: 3206496 - DNA, 25 bp, Homo sapien
cagtttggtctggaaagcgaaggcc

SEQ ID NO: 3206497 - DNA, 25 bp, Homo sapien
gctgatctgtagctgtcagctgtga

SEQ ID NO: 3206498 - DNA, 25 bp, Homo sapien
gtctcttttagacacctcgatgcag

SEQ ID NO: 3206499 - DNA, 25 bp, Homo sapien
gattcctgtcacctgagtcagtttg

SEQ ID NO: 3206500 - DNA, 25 bp, Homo sapien
gatctgtaacatcactgggattgct

SEQ ID NO: 3206501 - DNA, 25 bp, Homo sapien
tctgtaacatcactgggattgctct

SEQ ID NO: 3206502 - DNA, 25 bp, Homo sapien
tgtaacatcactgggattgctctga

SEQ ID NO: 3206503 - DNA, 25 bp, Homo sapien
ttagatctgtaacatcactgggatt

SEQ ID NO: 3206504 - DNA, 25 bp, Homo sapien
caagctcaaatgctggcgggctgca

SEQ ID NO: 3206505 - DNA, 25 bp, Homo sapien
tacagccacgtaatctgatgctgct

SEQ ID NO: 3206506 - DNA, 25 bp, Homo sapien
gggctgcactggatctgatttctca

SEQ ID NO: 3206507 - DNA, 25 bp, Homo sapien
caactccaaaagcactctggtgaag

SEQ ID NO: 3206508 - DNA, 25 bp, Homo sapien
ttcttggaaacctccattggtgtgg

SEQ ID NO: 3206509 - DNA, 25 bp, Homo sapien
attggtgtggagcttacattatcca

SEQ ID NO: 3206510 - DNA, 25 bp, Homo sapien
catctgctcattgaacctcttcttg

SEQ ID NO: 3206511 - DNA, 25 bp, Homo sapien
cctcttagagtttgagccttctctt

SEQ ID NO: 3206512 - DNA, 25 bp, Homo sapien
tgtgcgtgcactcttgtccagccat

SEQ ID NO: 3206513 - DNA, 25 bp, Homo sapien
ctgtgcgtgcactcttgtccagcca

SEQ ID NO: 3206514 - DNA, 25 bp, Homo sapien
catgccgttggctgtgggtgatatc

SEQ ID NO: 3206515 - DNA, 25 bp, Homo sapien
cgagtccgcaccgagattgctgggt

SEQ ID NO: 3206516 - DNA, 25 bp, Homo sapien
gatgaaatcattgtcgggcgacgga

SEQ ID NO: 3206517 - DNA, 25 bp, Homo sapien
ggttccactccatacagtacgtcgt

SEQ ID NO: 3206518 - DNA, 25 bp, Homo sapien
cgccgggagcgcgcactgcgcggcg

SEQ ID NO: 3206519 - DNA, 25 bp, Homo sapien
ggcgcaggccgagaatggggctccg

SEQ ID NO: 3206520 - DNA, 25 bp, Homo sapien
caggccgagaatggggctccgccag

SEQ ID NO: 3206521 - DNA, 25 bp, Homo sapien
cggcggggcgcaggccgagaatggg

SEQ ID NO: 3206522 - DNA, 25 bp, Homo sapien
cgaggggcaagtgggcgaagggagg

SEQ ID NO: 3206523 - DNA, 25 bp, Homo sapien
ggaggggggacgacggctgctgccg

SEQ ID NO: 3206524 - DNA, 25 bp, Homo sapien
ctccgaggcgaggggcaagtgggcg

SEQ ID NO: 3206525 - DNA, 25 bp, Homo sapien
gaggggggacgacggctgctgccgc

SEQ ID NO: 3206526 - DNA, 25 bp, Homo sapien
gggtattacaggagaaagttgcagc

SEQ ID NO: 3206527 - DNA, 25 bp, Homo sapien
caaagagagggtattacaggagaaa

SEQ ID NO: 3206528 - DNA, 25 bp, Homo sapien
cagctgctcgataacaaagagaggg

SEQ ID NO: 3206529 - DNA, 25 bp, Homo sapien
tgggtgatgtcagcggatcagctgc

SEQ ID NO: 3206530 - DNA, 25 bp, Homo sapien
gggaactgtcaatcagcgagggagg

SEQ ID NO: 3206531 - DNA, 25 bp, Homo sapien
gaactgtcaatcagcgagggaggga

SEQ ID NO: 3206532 - DNA, 25 bp, Homo sapien
ctgtcaatcagcgagggagggagcg

SEQ ID NO: 3206533 - DNA, 25 bp, Homo sapien
gtcaatcagcgagggagggagcgca

SEQ ID NO: 3206534 - DNA, 25 bp, Homo sapien
agcaaaagagaaacgctgacgggcc

SEQ ID NO: 3206535 - DNA, 25 bp, Homo sapien
ctgacgggccggaggcgggttggct

SEQ ID NO: 3206536 - DNA, 25 bp, Homo sapien
ccggaggcgggttggctgggacgcg

SEQ ID NO: 3206537 - DNA, 25 bp, Homo sapien
gctgggacgcggaatacgcgcggcc

SEQ ID NO: 3206538 - DNA, 25 bp, Homo sapien
ggcagcgccataacgacactaagtg

SEQ ID NO: 3206539 - DNA, 25 bp, Homo sapien
tgaggacgcctgaatctgtgaagtg

SEQ ID NO: 3206540 - DNA, 25 bp, Homo sapien
gtctcgagggaacacggacagtgca

SEQ ID NO: 3206541 - DNA, 25 bp, Homo sapien
gactttcaagttgctcccggcacaa

SEQ ID NO: 3206542 - DNA, 25 bp, Homo sapien
ttgccaaaacataggaggagaatcc

SEQ ID NO: 3206543 - DNA, 25 bp, Homo sapien
tattgattttctagcccatgaccac

SEQ ID NO: 3206544 - DNA, 25 bp, Homo sapien
cactgtgttgtgttctaggaccata

SEQ ID NO: 3206545 - DNA, 25 bp, Homo sapien
gaaggagactcgaaacatacacaac

SEQ ID NO: 3206546 - DNA, 25 bp, Homo sapien
cccaagctgggtatgaagagaagga

SEQ ID NO: 3206547 - DNA, 25 bp, Homo sapien
aaagcaagtctcacccagcctagat

SEQ ID NO: 3206548 - DNA, 25 bp, Homo sapien
ccttggaggcaatggaaactaagcc

SEQ ID NO: 3206549 - DNA, 25 bp, Homo sapien
gatgttggatgtcctgtgcggtccc

SEQ ID NO: 3206550 - DNA, 25 bp, Homo sapien
gctcaatatgtgtttgtcgaatgaa

SEQ ID NO: 3206551 - DNA, 25 bp, Homo sapien
tcatgcgttccaggtgctcaatatg

SEQ ID NO: 3206552 - DNA, 25 bp, Homo sapien
agaacccgagccttttctttgctgt

SEQ ID NO: 3206553 - DNA, 25 bp, Homo sapien
gcctcgccttgggagcactttcaga

SEQ ID NO: 3206554 - DNA, 25 bp, Homo sapien
tggagttccggcccatccttgctgg

SEQ ID NO: 3206555 - DNA, 25 bp, Homo sapien
gctggagttccggcccatccttgct

SEQ ID NO: 3206556 - DNA, 25 bp, Homo sapien
gagttccggcccatccttgctggag

SEQ ID NO: 3206557 - DNA, 25 bp, Homo sapien
cagctggagttccggcccatccttg

SEQ ID NO: 3206558 - DNA, 25 bp, Homo sapien
ggtttgtgaatacctcaggacaggg

SEQ ID NO: 3206559 - DNA, 25 bp, Homo sapien
tctcttggtttgtgaatacctcagg

SEQ ID NO: 3206560 - DNA, 25 bp, Homo sapien
tcttcagggacgtttgtatagcaaa

SEQ ID NO: 3206561 - DNA, 25 bp, Homo sapien
ggctgcctttcttgtggaccatctc

SEQ ID NO: 3206562 - DNA, 25 bp, Homo sapien
ggtcgcaccacactcaggctgagca

SEQ ID NO: 3206563 - DNA, 25 bp, Homo sapien
agtgagctagggtcgcaccacactc

SEQ ID NO: 3206564 - DNA, 25 bp, Homo sapien
gaaggaagtaattatccaactcaag

SEQ ID NO: 3206565 - DNA, 25 bp, Homo sapien
gtaggagtattactgaagcccagaa

SEQ ID NO: 3206566 - DNA, 25 bp, Homo sapien
gaccagtacaaagtggcagagtcag

SEQ ID NO: 3206567 - DNA, 25 bp, Homo sapien
gctttaatctaaaaacgtctgagga

SEQ ID NO: 3206568 - DNA, 25 bp, Homo sapien
tttaacacacaagtcacagagatcc

SEQ ID NO: 3206569 - DNA, 25 bp, Homo sapien
tttaaaacctttgactgctggccag

SEQ ID NO: 3206570 - DNA, 25 bp, Homo sapien
gcggcagggtaaccagccagtttaa

SEQ ID NO: 3206571 - DNA, 25 bp, Homo sapien
gatgtgttgattggtgtatgtgtct

SEQ ID NO: 3206572 - DNA, 25 bp, Homo sapien
ggcatccttctgatgtgttgattgg

SEQ ID NO: 3206573 - DNA, 25 bp, Homo sapien
tatgtgtctgtgcttgattgttctc

SEQ ID NO: 3206574 - DNA, 25 bp, Homo sapien
aatgcccagtagaaaggccgtgtgg

SEQ ID NO: 3206575 - DNA, 25 bp, Homo sapien
gcccagtagaaaggccgtgtggctc

SEQ ID NO: 3206576 - DNA, 25 bp, Homo sapien
caaatgcccagtagaaaggccgtgt

SEQ ID NO: 3206577 - DNA, 25 bp, Homo sapien
tacacaaatgcccagtagaaaggcc

SEQ ID NO: 3206578 - DNA, 25 bp, Homo sapien
tgcattgaggagaatgttagagctg

SEQ ID NO: 3206579 - DNA, 25 bp, Homo sapien
gagtgcataagcatgtgctcgcatg

SEQ ID NO: 3206580 - DNA, 25 bp, Homo sapien
tgtgtgctccacaggagtgcataag

SEQ ID NO: 3206581 - DNA, 25 bp, Homo sapien
cttgagttgcattgaggagaatgtt

SEQ ID NO: 3206582 - DNA, 25 bp, Homo sapien
cacaatcagggcttattgtctggct

SEQ ID NO: 3206583 - DNA, 25 bp, Homo sapien
tagtgtggatcacaaagattgcaca

SEQ ID NO: 3206584 - DNA, 25 bp, Homo sapien
gtcatttggcaaatctgtgagtgca

SEQ ID NO: 3206585 - DNA, 25 bp, Homo sapien
acattttctactgagctcagtttag

SEQ ID NO: 3206586 - DNA, 25 bp, Homo sapien
ctgccaaccttgtttctttgctcag

SEQ ID NO: 3206587 - DNA, 25 bp, Homo sapien
ccaaccttgtttctttgctcagagc

SEQ ID NO: 3206588 - DNA, 25 bp, Homo sapien
tttctttgctcagagctctccacag

SEQ ID NO: 3206589 - DNA, 25 bp, Homo sapien
ttctttgctcagagctctccacagc

SEQ ID NO: 3206590 - DNA, 25 bp, Homo sapien
caccagtgtccacttctttgtgaaa

SEQ ID NO: 3206591 - DNA, 25 bp, Homo sapien
tggaggtctctattgatgaccagaa

SEQ ID NO: 3206592 - DNA, 25 bp, Homo sapien
ctggatagatctggtttggaggtct

SEQ ID NO: 3206593 - DNA, 25 bp, Homo sapien
tgatgaccagaacatcaccagtgtc

SEQ ID NO: 3206594 - DNA, 25 bp, Homo sapien
gacactttacgtttggcatccctgt

SEQ ID NO: 3206595 - DNA, 25 bp, Homo sapien
gatttaaccgttagtcctgatccac

SEQ ID NO: 3206596 - DNA, 25 bp, Homo sapien
gagacgtacattccatggagaaggg

SEQ ID NO: 3206597 - DNA, 25 bp, Homo sapien
gagctagacggaagccaaacacaga

SEQ ID NO: 3206598 - DNA, 25 bp, Homo sapien
tcatccctaatttgtagtagaagga

SEQ ID NO: 3206599 - DNA, 25 bp, Homo sapien
tagagctaggagctgcagtttaagg

SEQ ID NO: 3206600 - DNA, 25 bp, Homo sapien
gtttaaggtgctctatcaaaataac

SEQ ID NO: 3206601 - DNA, 25 bp, Homo sapien
tagaaggattctaacagccacacat

SEQ ID NO: 3206602 - DNA, 25 bp, Homo sapien
cgcacgggaagataaatggcgcttc

SEQ ID NO: 3206603 - DNA, 25 bp, Homo sapien
gaactatttgtagagcgcacgggaa

SEQ ID NO: 3206604 - DNA, 25 bp, Homo sapien
gaatgctgaccttccttatcgggta

SEQ ID NO: 3206605 - DNA, 25 bp, Homo sapien
gaaaaggctgattcaagcggctgaa

SEQ ID NO: 3206606 - DNA, 25 bp, Homo sapien
acagcagccagcaggatcgagttcc

SEQ ID NO: 3206607 - DNA, 25 bp, Homo sapien
ctgacaggccgagagaatagagaca

SEQ ID NO: 3206608 - DNA, 25 bp, Homo sapien
tttgctgacaggccgagagaataga

SEQ ID NO: 3206609 - DNA, 25 bp, Homo sapien
gccagcaggatcgagttcccggcca

SEQ ID NO: 3206610 - DNA, 25 bp, Homo sapien
gatgatgcagaatcgctgagctctg

SEQ ID NO: 3206611 - DNA, 25 bp, Homo sapien
tgggagaactaatctctggaatgtt

SEQ ID NO: 3206612 - DNA, 25 bp, Homo sapien
tagcaggcggcatgggtgaccctga

SEQ ID NO: 3206613 - DNA, 25 bp, Homo sapien
tgaggcgactgtgctctgaggaccc

SEQ ID NO: 3206614 - DNA, 25 bp, Homo sapien
ccagcccgggcgacagagcagtagg

SEQ ID NO: 3206615 - DNA, 25 bp, Homo sapien
tccagcccgggcgacagagcagtag

SEQ ID NO: 3206616 - DNA, 25 bp, Homo sapien
cagcccgggcgacagagcagtaggt

SEQ ID NO: 3206617 - DNA, 25 bp, Homo sapien
tgcctttccaacttgcaaagcaaaa

SEQ ID NO: 3206618 - DNA, 25 bp, Homo sapien
ctgctgggggcgtaactttgtattt

SEQ ID NO: 3206619 - DNA, 25 bp, Homo sapien
tttccaacttgcaaagcaaaataac

SEQ ID NO: 3206620 - DNA, 25 bp, Homo sapien
aaactctggtgacccagtgactgct

SEQ ID NO: 3206621 - DNA, 25 bp, Homo sapien
caggcacagatccatgaagggtgga

SEQ ID NO: 3206622 - DNA, 25 bp, Homo sapien
tctggattctgagaacggtcttggc

SEQ ID NO: 3206623 - DNA, 25 bp, Homo sapien
caggaattgtgtctgtatggcaggc

SEQ ID NO: 3206624 - DNA, 25 bp, Homo sapien
tattgcacatgaacttagggtcttc

SEQ ID NO: 3206625 - DNA, 25 bp, Homo sapien
gggtgtatcctcagctaagggcttt

SEQ ID NO: 3206626 - DNA, 25 bp, Homo sapien
gccgtctatgacctctctgagttga

SEQ ID NO: 3206627 - DNA, 25 bp, Homo sapien
tcagcgggacctacacccatagctt

SEQ ID NO: 3206628 - DNA, 25 bp, Homo sapien
aacctcctgactaacccactgggtg

SEQ ID NO: 3206629 - DNA, 25 bp, Homo sapien
cacatggaggaacagtggctggact

SEQ ID NO: 3206630 - DNA, 25 bp, Homo sapien
tacagatactttgagggttctccag

SEQ ID NO: 3206631 - DNA, 25 bp, Homo sapien
gctgaaacctatgtgcctgctgaag

SEQ ID NO: 3206632 - DNA, 25 bp, Homo sapien
tcaggaattgggcaccccaggtacc

SEQ ID NO: 3206633 - DNA, 25 bp, Homo sapien
tctggcaaaagacggcaagactcta

SEQ ID NO: 3206634 - DNA, 25 bp, Homo sapien
tgaaccttgaagtgacgctgatgag

SEQ ID NO: 3206635 - DNA, 25 bp, Homo sapien
tcaaagtatggagtggagccatccc

SEQ ID NO: 3206636 - DNA, 25 bp, Homo sapien
ccaggagagccagaaaagacagtgc

SEQ ID NO: 3206637 - DNA, 25 bp, Homo sapien
ttggttgaaataccacccagccatc

SEQ ID NO: 3206638 - DNA, 25 bp, Homo sapien
cttggttgaaataccacccagccat

SEQ ID NO: 3206639 - DNA, 25 bp, Homo sapien
tttctaactgagttgtcctacatgc

SEQ ID NO: 3206640 - DNA, 25 bp, Homo sapien
cagtgaacaagtttcagcggttcaa

SEQ ID NO: 3206641 - DNA, 25 bp, Homo sapien
tcttattgatggcaactaaatggtg

SEQ ID NO: 3206642 - DNA, 25 bp, Homo sapien
aatataaatgcggagacgtaaagca

SEQ ID NO: 3206643 - DNA, 25 bp, Homo sapien
agactgcccgcaaatcgaccggtgg

SEQ ID NO: 3206644 - DNA, 25 bp, Homo sapien
gcaaatcgaccggtggtaaagcacc

SEQ ID NO: 3206645 - DNA, 25 bp, Homo sapien
tcgaccggtggtaaagcacccagga

SEQ ID NO: 3206646 - DNA, 25 bp, Homo sapien
ggctcgtacaaagcagactgcccgc

SEQ ID NO: 3206647 - DNA, 25 bp, Homo sapien
cagttttgagactccctgtctaggg

SEQ ID NO: 3206648 - DNA, 25 bp, Homo sapien
ccagggtctgaggaagccaaagagt

SEQ ID NO: 3206649 - DNA, 25 bp, Homo sapien
tcaagcaatcctttctgacaggcag

SEQ ID NO: 3206650 - DNA, 25 bp, Homo sapien
tcccagaaagccaatgagaacagtt

SEQ ID NO: 3206651 - DNA, 25 bp, Homo sapien
caccagacccagacaagtagcaaaa

SEQ ID NO: 3206652 - DNA, 25 bp, Homo sapien
accagacccagacaagtagcaaaaa

SEQ ID NO: 3206653 - DNA, 25 bp, Homo sapien
gcagcttctgaatatccccagaagt

SEQ ID NO: 3206654 - DNA, 25 bp, Homo sapien
taggagggtcaacaaggccaaaatc

SEQ ID NO: 3206655 - DNA, 25 bp, Homo sapien
cagactcagtcggaaaccggtgatc

SEQ ID NO: 3206656 - DNA, 25 bp, Homo sapien
ctaggagggtcaacaaggccaaaat

SEQ ID NO: 3206657 - DNA, 25 bp, Homo sapien
gccaaaatccccagactcagtcgga

SEQ ID NO: 3206658 - DNA, 25 bp, Homo sapien
aaagctgtttgcaattcccagggca

SEQ ID NO: 3206659 - DNA, 25 bp, Homo sapien
aagctgtttgcaattcccagggcac

SEQ ID NO: 3206660 - DNA, 25 bp, Homo sapien
gaaagctgtttgcaattcccagggc

SEQ ID NO: 3206661 - DNA, 25 bp, Homo sapien
tgccgcctcagtttcttggcaatat

SEQ ID NO: 3206662 - DNA, 25 bp, Homo sapien
tcttggcaatattgaggtccagata

SEQ ID NO: 3206663 - DNA, 25 bp, Homo sapien
atattgaggtccagatattcatcca

SEQ ID NO: 3206664 - DNA, 25 bp, Homo sapien
tagaattgccgcctcagtttcttgg

SEQ ID NO: 3206665 - DNA, 25 bp, Homo sapien
acagcttctgcaagtattaaaggga

SEQ ID NO: 3206666 - DNA, 25 bp, Homo sapien
gataccatattaccttcatggtggg

SEQ ID NO: 3206667 - DNA, 25 bp, Homo sapien
cttctgcaagtattaaagggaagag

SEQ ID NO: 3206668 - DNA, 25 bp, Homo sapien
taccttcatggtgggaacagcttct

SEQ ID NO: 3206669 - DNA, 25 bp, Homo sapien
ggcacaacacacttccactgatgat

SEQ ID NO: 3206670 - DNA, 25 bp, Homo sapien
acacacttccactgatgatatggat

SEQ ID NO: 3206671 - DNA, 25 bp, Homo sapien
ctagggcacaacacacttccactga

SEQ ID NO: 3206672 - DNA, 25 bp, Homo sapien
aacacacttccactgatgatatgga

SEQ ID NO: 3206673 - DNA, 25 bp, Homo sapien
gtgtccctacacaaccggtcatgac

SEQ ID NO: 3206674 - DNA, 25 bp, Homo sapien
tgtgtccctacacaaccggtcatga

SEQ ID NO: 3206675 - DNA, 25 bp, Homo sapien
gtccctacacaaccggtcatgactt

SEQ ID NO: 3206676 - DNA, 25 bp, Homo sapien
gctgtgtccctacacaaccggtcat

SEQ ID NO: 3206677 - DNA, 25 bp, Homo sapien
gcctggtgacaatgcaattagaaca

SEQ ID NO: 3206678 - DNA, 25 bp, Homo sapien
caaggccttgatagtctgctacacc

SEQ ID NO: 3206679 - DNA, 25 bp, Homo sapien
gcccagagccaatttaagtgcaaaa

SEQ ID NO: 3206680 - DNA, 25 bp, Homo sapien
tgtgtgtgttttaccctgcccagag

SEQ ID NO: 3206681 - DNA, 25 bp, Homo sapien
acaccaacatggcacatgtatacat

SEQ ID NO: 3206682 - DNA, 25 bp, Homo sapien
ggagatatacctaatgctaaatgac

SEQ ID NO: 3206683 - DNA, 25 bp, Homo sapien
gagttaatgggtgcagcacaccaac

SEQ ID NO: 3206684 - DNA, 25 bp, Homo sapien
gggagaggggggaggtatagcatta

SEQ ID NO: 3206685 - DNA, 25 bp, Homo sapien
caaaggaggtgtcacagactccgtt

SEQ ID NO: 3206686 - DNA, 25 bp, Homo sapien
tttgactccgcacacttggaacaga

SEQ ID NO: 3206687 - DNA, 25 bp, Homo sapien
ggtgtcacagactccgttttgggaa

SEQ ID NO: 3206688 - DNA, 25 bp, Homo sapien
gtagttatggagggatactttgact

SEQ ID NO: 3206689 - DNA, 25 bp, Homo sapien
gggagtcggttttttgtgagccaca

SEQ ID NO: 3206690 - DNA, 25 bp, Homo sapien
tgcaaaggcgacactggagtcttct

SEQ ID NO: 3206691 - DNA, 25 bp, Homo sapien
gaatgaatatctgcctggaaccaag

SEQ ID NO: 3206692 - DNA, 25 bp, Homo sapien
cctttgggcgaaatcctgggagtga

SEQ ID NO: 3206693 - DNA, 25 bp, Homo sapien
cataagctgggacttctgccccgtt

SEQ ID NO: 3206694 - DNA, 25 bp, Homo sapien
ggcttcccttcaaacagcagtgagt

SEQ ID NO: 3206695 - DNA, 25 bp, Homo sapien
cagttggacttccccgaaccacagg

SEQ ID NO: 3206696 - DNA, 25 bp, Homo sapien
ggtctcaggagccagtcccgcaggc

SEQ ID NO: 3206697 - DNA, 25 bp, Homo sapien
catcaacaactctggccaggaggat

SEQ ID NO: 3206698 - DNA, 25 bp, Homo sapien
tcattctactcaggtaaggtcgggt

SEQ ID NO: 3206699 - DNA, 25 bp, Homo sapien
ttccagactttaggtgagctcagcc

SEQ ID NO: 3206700 - DNA, 25 bp, Homo sapien
tatatgcaatagtcagtcccatccg

SEQ ID NO: 3206701 - DNA, 25 bp, Homo sapien
ttaacggtatctgcattggaaaggc

SEQ ID NO: 3206702 - DNA, 25 bp, Homo sapien
tactgcacgaacaaaccagagcttc

SEQ ID NO: 3206703 - DNA, 25 bp, Homo sapien
tagaaattgaatctgggccacacac

SEQ ID NO: 3206704 - DNA, 25 bp, Homo sapien
gaagcctgcatggttctacagcaca

SEQ ID NO: 3206705 - DNA, 25 bp, Homo sapien
tcttttgtgattccctgctctttgg

SEQ ID NO: 3206706 - DNA, 25 bp, Homo sapien
tgggcgtcctcaagcccgttatcca

SEQ ID NO: 3206707 - DNA, 25 bp, Homo sapien
gctcgccgccggccgtcttttgtga

SEQ ID NO: 3206708 - DNA, 25 bp, Homo sapien
tgctctttggttcgccgccagcaag

SEQ ID NO: 3206709 - DNA, 25 bp, Homo sapien
gattgtctcaggctgtcgtgtgtga

SEQ ID NO: 3206710 - DNA, 25 bp, Homo sapien
tgtctcaggctgtcgtgtgtgatgt

SEQ ID NO: 3206711 - DNA, 25 bp, Homo sapien
agggaattcctggattgtctcaggc

SEQ ID NO: 3206712 - DNA, 25 bp, Homo sapien
tcctggattgtctcaggctgtcgtg

SEQ ID NO: 3206713 - DNA, 25 bp, Homo sapien
gatgtctgatgctccccttagcaag

SEQ ID NO: 3206714 - DNA, 25 bp, Homo sapien
cagttgcaactggagtagtccgtcc

SEQ ID NO: 3206715 - DNA, 25 bp, Homo sapien
tatgggacatcgtaaccacctggag

SEQ ID NO: 3206716 - DNA, 25 bp, Homo sapien
tagtccgtcctggaagaattggctc

SEQ ID NO: 3206717 - DNA, 25 bp, Homo sapien
ctcacatttagcactggactgccaa

SEQ ID NO: 3206718 - DNA, 25 bp, Homo sapien
cacatttagcactggactgccaact

SEQ ID NO: 3206719 - DNA, 25 bp, Homo sapien
gcattctcacatttagcactggact

SEQ ID NO: 3206720 - DNA, 25 bp, Homo sapien
ttctcacatttagcactggactgcc

SEQ ID NO: 3206721 - DNA, 25 bp, Homo sapien
gcagttttcacccacctctcgagtt

SEQ ID NO: 3206722 - DNA, 25 bp, Homo sapien
gagttcttgaactccaaaggtctgg

SEQ ID NO: 3206723 - DNA, 25 bp, Homo sapien
cggcagaggctgtgctcgtctcagt

SEQ ID NO: 3206724 - DNA, 25 bp, Homo sapien
cggccacttgcatgccggcagaggc

SEQ ID NO: 3206725 - DNA, 25 bp, Homo sapien
acttcatcagaaagggtgggtacaa

SEQ ID NO: 3206726 - DNA, 25 bp, Homo sapien
cagagagctccatttggcagcgtgg

SEQ ID NO: 3206727 - DNA, 25 bp, Homo sapien
tcccagtataacacaagataggcct

SEQ ID NO: 3206728 - DNA, 25 bp, Homo sapien
gaaacattggcctgtctcccagtat

SEQ ID NO: 3206729 - DNA, 25 bp, Homo sapien
ttcctctaagaagctggtcgtcagc

SEQ ID NO: 3206730 - DNA, 25 bp, Homo sapien
tgataatggacttagagcagcccga

SEQ ID NO: 3206731 - DNA, 25 bp, Homo sapien
ggtatgagcccttctcctagacttg

SEQ ID NO: 3206732 - DNA, 25 bp, Homo sapien
caaggttcttgtggatgcaaggccc

SEQ ID NO: 3206733 - DNA, 25 bp, Homo sapien
ccagcaaacaccccaactttgggtg

SEQ ID NO: 3206734 - DNA, 25 bp, Homo sapien
cagcaaacaccccaactttgggtgg

SEQ ID NO: 3206735 - DNA, 25 bp, Homo sapien
tgtggctcctgatggacggtggtcg

SEQ ID NO: 3206736 - DNA, 25 bp, Homo sapien
gccagtcccaccctgtgaagctttc

SEQ ID NO: 3206737 - DNA, 25 bp, Homo sapien
gacggtggtcgagtcggctggatct

SEQ ID NO: 3206738 - DNA, 25 bp, Homo sapien
tctgcctgcatgcagatctgtccat

SEQ ID NO: 3206739 - DNA, 25 bp, Homo sapien
cacattacttttggtgggtgcacag

SEQ ID NO: 3206740 - DNA, 25 bp, Homo sapien
taattgggccaccatagaactttcg

SEQ ID NO: 3206741 - DNA, 25 bp, Homo sapien
aaaacaaattggctgcctgcggagg

SEQ ID NO: 3206742 - DNA, 25 bp, Homo sapien
tgcggaggtccagtgtcaaacgtct

SEQ ID NO: 3206743 - DNA, 25 bp, Homo sapien
ggttctcaatctgagctccacttct

SEQ ID NO: 3206744 - DNA, 25 bp, Homo sapien
cccttgttgtacgttttgatgttca

SEQ ID NO: 3206745 - DNA, 25 bp, Homo sapien
gaccagagatcctttctccagttgg

SEQ ID NO: 3206746 - DNA, 25 bp, Homo sapien
tccagttggttctcaatctgagctc

SEQ ID NO: 3206747 - DNA, 25 bp, Homo sapien
gggtctgttcttggcctcttctcag

SEQ ID NO: 3206748 - DNA, 25 bp, Homo sapien
catcctgatttgggggactgagccg

SEQ ID NO: 3206749 - DNA, 25 bp, Homo sapien
gtcctcccagccagggtctgttctt

SEQ ID NO: 3206750 - DNA, 25 bp, Homo sapien
ggactgagccggaagtgtcctccca

SEQ ID NO: 3206751 - DNA, 25 bp, Homo sapien
gaacttcaaggacgtgtgcagccac

SEQ ID NO: 3206752 - DNA, 25 bp, Homo sapien
tggaacttcaaggacgtgtgcagcc

SEQ ID NO: 3206753 - DNA, 25 bp, Homo sapien
cctctggaacttcaaggacgtgtgc

SEQ ID NO: 3206754 - DNA, 25 bp, Homo sapien
caaggacgtgtgcagccacaatcgt

SEQ ID NO: 3206755 - DNA, 25 bp, Homo sapien
cttttgctcattacacaattcttca

SEQ ID NO: 3206756 - DNA, 25 bp, Homo sapien
tccagacagagttaatcattccctt

SEQ ID NO: 3206757 - DNA, 25 bp, Homo sapien
cattcccttatctgtcttttgctca

SEQ ID NO: 3206758 - DNA, 25 bp, Homo sapien
ttgagggccagccatacccgtgcgt

SEQ ID NO: 3206759 - DNA, 25 bp, Homo sapien
cctctgtagagttaagttcttgtcc

SEQ ID NO: 3206760 - DNA, 25 bp, Homo sapien
aatctttccaggtgtaatcctgtgg

SEQ ID NO: 3206761 - DNA, 25 bp, Homo sapien
gagaataaactctaggattccctat

SEQ ID NO: 3206762 - DNA, 25 bp, Homo sapien
ggatgcagatctttcaatcagaccc

SEQ ID NO: 3206763 - DNA, 25 bp, Homo sapien
gcctctttagctccgtacttctcgt

SEQ ID NO: 3206764 - DNA, 25 bp, Homo sapien
tctcgttgcttaaacagatggcccc

SEQ ID NO: 3206765 - DNA, 25 bp, Homo sapien
tgtttgaataccgtgtgcctcttta

SEQ ID NO: 3206766 - DNA, 25 bp, Homo sapien
cgactccgagcagctgccttgttca

SEQ ID NO: 3206767 - DNA, 25 bp, Homo sapien
gccatgccaagctcattgaaagcaa

SEQ ID NO: 3206768 - DNA, 25 bp, Homo sapien
ccgcgatgccggcagtgagccatgc

SEQ ID NO: 3206769 - DNA, 25 bp, Homo sapien
aaagcaagcggacttcctgtggccc

SEQ ID NO: 3206770 - DNA, 25 bp, Homo sapien
cagtcactgaagcaggagtgtggcc

SEQ ID NO: 3206771 - DNA, 25 bp, Homo sapien
caccaggaggcgacctttggaaaag

SEQ ID NO: 3206772 - DNA, 25 bp, Homo sapien
ccatcctgaagggttctgcaagcta

SEQ ID NO: 3206773 - DNA, 25 bp, Homo sapien
tgtcaatgttgaccgaagccaggtg

SEQ ID NO: 3206774 - DNA, 25 bp, Homo sapien
taatggtaggacttctgcttctgct

SEQ ID NO: 3206775 - DNA, 25 bp, Homo sapien
gtgttttgactcttcttctactacc

SEQ ID NO: 3206776 - DNA, 25 bp, Homo sapien
tctactacctctggattcggggacc

SEQ ID NO: 3206777 - DNA, 25 bp, Homo sapien
tgttccatgcacctgagatgtgttc

SEQ ID NO: 3206778 - DNA, 25 bp, Homo sapien
ctaatcaaagcagcgtgtcttgtgt

SEQ ID NO: 3206779 - DNA, 25 bp, Homo sapien
aggcgtgagcaatactttattcttt

SEQ ID NO: 3206780 - DNA, 25 bp, Homo sapien
caggcgtgagcaatactttattctt

SEQ ID NO: 3206781 - DNA, 25 bp, Homo sapien
caggacaaccaaaaggggcaccagg

SEQ ID NO: 3206782 - DNA, 25 bp, Homo sapien
tggccagctcctcggcagtaaagaa

SEQ ID NO: 3206783 - DNA, 25 bp, Homo sapien
aagaagctcagtttgcagttgatcc

SEQ ID NO: 3206784 - DNA, 25 bp, Homo sapien
attgcaggttctgggtgcgcacacc

SEQ ID NO: 3206785 - DNA, 25 bp, Homo sapien
tttgcagttgatccttggctgaact

SEQ ID NO: 3206786 - DNA, 25 bp, Homo sapien
gcatccccagatttgcatggtcaga

SEQ ID NO: 3206787 - DNA, 25 bp, Homo sapien
gaagcgggtattgatcccaacagaa

SEQ ID NO: 3206788 - DNA, 25 bp, Homo sapien
gctttcagcacgttggagtccaggg

SEQ ID NO: 3206789 - DNA, 25 bp, Homo sapien
catggtcagaatgatgccgagagac

SEQ ID NO: 3206790 - DNA, 25 bp, Homo sapien
tttctgaattcaccaacattgccat

SEQ ID NO: 3206791 - DNA, 25 bp, Homo sapien
ggataagtaagaatggctctaccag

SEQ ID NO: 3206792 - DNA, 25 bp, Homo sapien
gaggtgtggctcaagagcatagcac

SEQ ID NO: 3206793 - DNA, 25 bp, Homo sapien
gcacagtaggtagctctactatgaa

SEQ ID NO: 3206794 - DNA, 25 bp, Homo sapien
taccagtgaggtaatgcccacccat

SEQ ID NO: 3206795 - DNA, 25 bp, Homo sapien
tgattggagaactaggcaccttgcc

SEQ ID NO: 3206796 - DNA, 25 bp, Homo sapien
gatttctccccaagaggactctgga

SEQ ID NO: 3206797 - DNA, 25 bp, Homo sapien
gagtgtccacttggccaatgggtca

SEQ ID NO: 3206798 - DNA, 25 bp, Homo sapien
gcaggttgggttgatgctctttcca

SEQ ID NO: 3206799 - DNA, 25 bp, Homo sapien
taactctgtggctgccctttctgat

SEQ ID NO: 3206800 - DNA, 25 bp, Homo sapien
aactctgtggctgccctttctgatc

SEQ ID NO: 3206801 - DNA, 25 bp, Homo sapien
ctaactctgtggctgccctttctga

SEQ ID NO: 3206802 - DNA, 25 bp, Homo sapien
actctgtggctgccctttctgatcc

SEQ ID NO: 3206803 - DNA, 25 bp, Homo sapien
gaatttcaggatgggttattgacat

SEQ ID NO: 3206804 - DNA, 25 bp, Homo sapien
ctgacagatatgatgtaaatcttcc

SEQ ID NO: 3206805 - DNA, 25 bp, Homo sapien
gatatgatgtaaatcttccatcgct

SEQ ID NO: 3206806 - DNA, 25 bp, Homo sapien
ttattgacatgctgacagatatgat

SEQ ID NO: 3206807 - DNA, 25 bp, Homo sapien
cacacttatagtggggtaaatggga

SEQ ID NO: 3206808 - DNA, 25 bp, Homo sapien
gaagatacagtcacacttatagtgg

SEQ ID NO: 3206809 - DNA, 25 bp, Homo sapien
cagtcacacttatagtggggtaaat

SEQ ID NO: 3206810 - DNA, 25 bp, Homo sapien
aagatacagtcacacttatagtggg

SEQ ID NO: 3206811 - DNA, 25 bp, Homo sapien
cttgccctcctcacttgatgtcaga

SEQ ID NO: 3206812 - DNA, 25 bp, Homo sapien
gaattgaaatcactgacagctgtgc

SEQ ID NO: 3206813 - DNA, 25 bp, Homo sapien
tccctgacttgttctgaaacttaag

SEQ ID NO: 3206814 - DNA, 25 bp, Homo sapien
aagtccagtcttgagtttccacaga

SEQ ID NO: 3206815 - DNA, 25 bp, Homo sapien
tagaagtagtctgttgccgatccga

SEQ ID NO: 3206816 - DNA, 25 bp, Homo sapien
taagaaccaacaagcgccattccag

SEQ ID NO: 3206817 - DNA, 25 bp, Homo sapien
cccagttataggatatcttcaggct

SEQ ID NO: 3206818 - DNA, 25 bp, Homo sapien
cattctgtaagaaactggaccccag

SEQ ID NO: 3206819 - DNA, 25 bp, Homo sapien
ttaaaaatcaactagcccaagccat

SEQ ID NO: 3206820 - DNA, 25 bp, Homo sapien
actgttctagacacactatcctcta

SEQ ID NO: 3206821 - DNA, 25 bp, Homo sapien
gttacaaatgtaaatagtgtcctac

SEQ ID NO: 3206822 - DNA, 25 bp, Homo sapien
agtgtcctactacttaagtgtatac

SEQ ID NO: 3206823 - DNA, 25 bp, Homo sapien
ccaagccagttgttaacaggccggc

SEQ ID NO: 3206824 - DNA, 25 bp, Homo sapien
cggcatgtgtaggtgtactgaacca

SEQ ID NO: 3206825 - DNA, 25 bp, Homo sapien
ggctaccaagccagttgttaacagg

SEQ ID NO: 3206826 - DNA, 25 bp, Homo sapien
cctctcttggctaccaagccagttg

SEQ ID NO: 3206827 - DNA, 25 bp, Homo sapien
cttggtttgatctttctcccatctg

SEQ ID NO: 3206828 - DNA, 25 bp, Homo sapien
ggtacgtgtatgctcccttgaggta

SEQ ID NO: 3206829 - DNA, 25 bp, Homo sapien
gccactgaggcacggactgttttag

SEQ ID NO: 3206830 - DNA, 25 bp, Homo sapien
ggtatcctatggagtctgagctcag

SEQ ID NO: 3206831 - DNA, 25 bp, Homo sapien
aggaccgaactctgaaaagccacaa

SEQ ID NO: 3206832 - DNA, 25 bp, Homo sapien
gtgagaactgagatgtggtcataaa

SEQ ID NO: 3206833 - DNA, 25 bp, Homo sapien
ggcttggcagttcactaaggaccga

SEQ ID NO: 3206834 - DNA, 25 bp, Homo sapien
ggtcataaaaatcccccatcctgtg

SEQ ID NO: 3206835 - DNA, 25 bp, Homo sapien
cagtttaatcccaagctccctgata

SEQ ID NO: 3206836 - DNA, 25 bp, Homo sapien
tggctgtctgtgtagaaaccaaatg

SEQ ID NO: 3206837 - DNA, 25 bp, Homo sapien
gagaagctctttcacagggaaaaca

SEQ ID NO: 3206838 - DNA, 25 bp, Homo sapien
gctccctgataacattccagcagag

SEQ ID NO: 3206839 - DNA, 25 bp, Homo sapien
ccccgtgactgacgtgtgccggtgc

SEQ ID NO: 3206840 - DNA, 25 bp, Homo sapien
tgactgacgtgtgccggtgcacaat

SEQ ID NO: 3206841 - DNA, 25 bp, Homo sapien
caggccccgtgactgacgtgtgccg

SEQ ID NO: 3206842 - DNA, 25 bp, Homo sapien
ccccaggccccgtgactgacgtgtg

SEQ ID NO: 3206843 - DNA, 25 bp, Homo sapien
agcagtgctgggagttttgaaatcg

SEQ ID NO: 3206844 - DNA, 25 bp, Homo sapien
ccgtgacaggaaaccctctcgggat

SEQ ID NO: 3206845 - DNA, 25 bp, Homo sapien
tgctgggagttttgaaatcgtcccc

SEQ ID NO: 3206846 - DNA, 25 bp, Homo sapien
caggaaaccctctcgggatggcttc

SEQ ID NO: 3206847 - DNA, 25 bp, Homo sapien
tcgtagctgtaccaaaaagtatctg

SEQ ID NO: 3206848 - DNA, 25 bp, Homo sapien
ctttcagctatcgtagctgtaccaa

SEQ ID NO: 3206849 - DNA, 25 bp, Homo sapien
gctatcgtagctgtaccaaaaagta

SEQ ID NO: 3206850 - DNA, 25 bp, Homo sapien
gttcattacagttcgttcatatcta

SEQ ID NO: 3206851 - DNA, 25 bp, Homo sapien
caataaggggactcttaagactcaa

SEQ ID NO: 3206852 - DNA, 25 bp, Homo sapien
cctggcataaaagccctgctggtat

SEQ ID NO: 3206853 - DNA, 25 bp, Homo sapien
ctggtatgtctagcgccaataaggg

SEQ ID NO: 3206854 - DNA, 25 bp, Homo sapien
gggtacagtgcggatttcaggaggc

SEQ ID NO: 3206855 - DNA, 25 bp, Homo sapien
gttctcttgcacactttcaagatca

SEQ ID NO: 3206856 - DNA, 25 bp, Homo sapien
gagacgctgagagatgcccagcttg

SEQ ID NO: 3206857 - DNA, 25 bp, Homo sapien
ctctcagcaactgggagacgctgag

SEQ ID NO: 3206858 - DNA, 25 bp, Homo sapien
tattctctgttctcttgcacacttt

SEQ ID NO: 3206859 - DNA, 25 bp, Homo sapien
caggctgttcgtatgcagatagttg

SEQ ID NO: 3206860 - DNA, 25 bp, Homo sapien
ctagcaggcaattatgttacactca

SEQ ID NO: 3206861 - DNA, 25 bp, Homo sapien
agcctctgcgcaggctgttcgtatg

SEQ ID NO: 3206862 - DNA, 25 bp, Homo sapien
gcaattatgttacactcagggagcc

SEQ ID NO: 3206863 - DNA, 25 bp, Homo sapien
aattactgttatgctctctggcctg

SEQ ID NO: 3206864 - DNA, 25 bp, Homo sapien
taaattactgttatgctctctggcc

SEQ ID NO: 3206865 - DNA, 25 bp, Homo sapien
caagttgcacttattagtggatgat

SEQ ID NO: 3206866 - DNA, 25 bp, Homo sapien
tagtggatgataatacaccagcaaa

SEQ ID NO: 3206867 - DNA, 25 bp, Homo sapien
gctgggtcagaaaagcagggagagt

SEQ ID NO: 3206868 - DNA, 25 bp, Homo sapien
gttgcttttggatagtaatccccac

SEQ ID NO: 3206869 - DNA, 25 bp, Homo sapien
cagggagagttgcttttggatagta

SEQ ID NO: 3206870 - DNA, 25 bp, Homo sapien
cttttggatagtaatccccactgct

SEQ ID NO: 3206871 - DNA, 25 bp, Homo sapien
tggctcttcgttgcccaaaaggtct

SEQ ID NO: 3206872 - DNA, 25 bp, Homo sapien
ttttgctgatgtgtggctcttcgtt

SEQ ID NO: 3206873 - DNA, 25 bp, Homo sapien
gagagggagttaaatgcatgtgttt

SEQ ID NO: 3206874 - DNA, 25 bp, Homo sapien
aatgttggggcctgctgtttgttgc

SEQ ID NO: 3206875 - DNA, 25 bp, Homo sapien
gcaaggcgcttgcatcttgaaatgg

SEQ ID NO: 3206876 - DNA, 25 bp, Homo sapien
tcagcgccgatagtgaagcagcatc

SEQ ID NO: 3206877 - DNA, 25 bp, Homo sapien
gattcattagaaagcgtcagcgccg

SEQ ID NO: 3206878 - DNA, 25 bp, Homo sapien
aagcagcatctggtgggattctctc

SEQ ID NO: 3206879 - DNA, 25 bp, Homo sapien
cttgggttggaagcagtaaggtaat

SEQ ID NO: 3206880 - DNA, 25 bp, Homo sapien
ctttcttcgcatgctgagctccata

SEQ ID NO: 3206881 - DNA, 25 bp, Homo sapien
aagcagtaaggtaattgccaaagcc

SEQ ID NO: 3206882 - DNA, 25 bp, Homo sapien
gctccatagtagattgaggacttgg

SEQ ID NO: 3206883 - DNA, 25 bp, Homo sapien
agtggggtttctctcgatggctaca

SEQ ID NO: 3206884 - DNA, 25 bp, Homo sapien
gaagttgcttcatcagacccaaaca

SEQ ID NO: 3206885 - DNA, 25 bp, Homo sapien
tctcgatggctacaatgccgtccat

SEQ ID NO: 3206886 - DNA, 25 bp, Homo sapien
caatgccgtccatgggaagttgctt

SEQ ID NO: 3206887 - DNA, 25 bp, Homo sapien
cagctgcagacttccactctacccg

SEQ ID NO: 3206888 - DNA, 25 bp, Homo sapien
ccgcacctcacatattagttgtgaa

SEQ ID NO: 3206889 - DNA, 25 bp, Homo sapien
agttgtgaatttgataaatgccatc

SEQ ID NO: 3206890 - DNA, 25 bp, Homo sapien
cactctacccgcacctcacatatta

SEQ ID NO: 3206891 - DNA, 25 bp, Homo sapien
gaaggtgtttcgcttacagccagag

SEQ ID NO: 3206892 - DNA, 25 bp, Homo sapien
cagagtgcaacagaggttttggaac

SEQ ID NO: 3206893 - DNA, 25 bp, Homo sapien
cataagatgttgtctctgatgatga

SEQ ID NO: 3206894 - DNA, 25 bp, Homo sapien
tatcccaatggactcaaatagtatg

SEQ ID NO: 3206895 - DNA, 25 bp, Homo sapien
agtggatttgcagagccaataggag

SEQ ID NO: 3206896 - DNA, 25 bp, Homo sapien
cactggcactgtaaagtggatttgc

SEQ ID NO: 3206897 - DNA, 25 bp, Homo sapien
cagagccaataggagctggccttcc

SEQ ID NO: 3206898 - DNA, 25 bp, Homo sapien
agccttgggcactggcactgtaaag

SEQ ID NO: 3206899 - DNA, 25 bp, Homo sapien
ttccaaatttctctccaagctccag

SEQ ID NO: 3206900 - DNA, 25 bp, Homo sapien
caatttggttgctgtttctcttgct

SEQ ID NO: 3206901 - DNA, 25 bp, Homo sapien
ctacattctaagacaatttggttgc

SEQ ID NO: 3206902 - DNA, 25 bp, Homo sapien
caaatttctctccaagctccagggc

SEQ ID NO: 3206903 - DNA, 25 bp, Homo sapien
tgaagacaaccatttgctttgtgat

SEQ ID NO: 3206904 - DNA, 25 bp, Homo sapien
tatctccatccagaaaactgcttta

SEQ ID NO: 3206905 - DNA, 25 bp, Homo sapien
tgagtacaacgtatcaggatgaaga

SEQ ID NO: 3206906 - DNA, 25 bp, Homo sapien
gactctctgagtgctacctgctcat

SEQ ID NO: 3206907 - DNA, 25 bp, Homo sapien
atagactggcacatgtgaataagag

SEQ ID NO: 3206908 - DNA, 25 bp, Homo sapien
tgtgttcgcagggttagtgacatgc

SEQ ID NO: 3206909 - DNA, 25 bp, Homo sapien
tgcggaaaccatagactggcacatg

SEQ ID NO: 3206910 - DNA, 25 bp, Homo sapien
gcattgtatcctggatgtgttcgca

SEQ ID NO: 3206911 - DNA, 25 bp, Homo sapien
tggtgaacgcaggatccgcatggaa

SEQ ID NO: 3206912 - DNA, 25 bp, Homo sapien
caggctgtgggttttcgagttgctt

SEQ ID NO: 3206913 - DNA, 25 bp, Homo sapien
ggactatctgcagaagaacgttctt

SEQ ID NO: 3206914 - DNA, 25 bp, Homo sapien
agcaggcctcctcttttgggcgctg

SEQ ID NO: 3206915 - DNA, 25 bp, Homo sapien
gttcatgtctgaaattgctacaata

SEQ ID NO: 3206916 - DNA, 25 bp, Homo sapien
tgtctgaaattgctacaatagtgat

SEQ ID NO: 3206917 - DNA, 25 bp, Homo sapien
tgaaattgctacaatagtgatgtca

SEQ ID NO: 3206918 - DNA, 25 bp, Homo sapien
ttcatgtctgaaattgctacaatag

SEQ ID NO: 3206919 - DNA, 25 bp, Homo sapien
aaaagaggggtgaaacaagacagtg

SEQ ID NO: 3206920 - DNA, 25 bp, Homo sapien
aaagaggggtgaaacaagacagtga

SEQ ID NO: 3206921 - DNA, 25 bp, Homo sapien
acccttcgtcttcgcttggctgact

SEQ ID NO: 3206922 - DNA, 25 bp, Homo sapien
tcaaactggaattgccgactgctcc

SEQ ID NO: 3206923 - DNA, 25 bp, Homo sapien
acacaaatcattagcgtcaaactgg

SEQ ID NO: 3206924 - DNA, 25 bp, Homo sapien
cttcgtcttcgcttggctgacttcc

SEQ ID NO: 3206925 - DNA, 25 bp, Homo sapien
taatcaagtactaaattgtgtatgc

SEQ ID NO: 3206926 - DNA, 25 bp, Homo sapien
tgtgggtgggcgcacaagcctcaca

SEQ ID NO: 3206927 - DNA, 25 bp, Homo sapien
gggcgcacaagcctcacatatcatt

SEQ ID NO: 3206928 - DNA, 25 bp, Homo sapien
agtactaaattgtgtatgcttgtgt

SEQ ID NO: 3206929 - DNA, 25 bp, Homo sapien
gtcttcagtaagttattagctatcc

SEQ ID NO: 3206930 - DNA, 25 bp, Homo sapien
ttattagctatccttgaatttcata

SEQ ID NO: 3206931 - DNA, 25 bp, Homo sapien
ctgcagggtcttcagtaagttatta

SEQ ID NO: 3206932 - DNA, 25 bp, Homo sapien
gcagggtcttcagtaagttattagc

SEQ ID NO: 3206933 - DNA, 25 bp, Homo sapien
tccgcagctcgatggatctaattgc

SEQ ID NO: 3206934 - DNA, 25 bp, Homo sapien
gtccttgagaacatagatccgcagc

SEQ ID NO: 3206935 - DNA, 25 bp, Homo sapien
gagaacatagatccgcagctcgatg

SEQ ID NO: 3206936 - DNA, 25 bp, Homo sapien
atggatctaattgcttgcttgtcaa

SEQ ID NO: 3206937 - DNA, 25 bp, Homo sapien
gcagcatcctaaagttacttcagcc

SEQ ID NO: 3206938 - DNA, 25 bp, Homo sapien
gggtggtatttggttggtcatgcac

SEQ ID NO: 3206939 - DNA, 25 bp, Homo sapien
gcatgccttttgatcatggagaaat

SEQ ID NO: 3206940 - DNA, 25 bp, Homo sapien
acataggtgctggtgtatttcttgt

SEQ ID NO: 3206941 - DNA, 25 bp, Homo sapien
tgctggtgtatttcttgtctgcatg

SEQ ID NO: 3206942 - DNA, 25 bp, Homo sapien
tctcgatcaaagtgattggcaggag

SEQ ID NO: 3206943 - DNA, 25 bp, Homo sapien
ggaaacagcatacctggaacaaaat

SEQ ID NO: 3206944 - DNA, 25 bp, Homo sapien
gatacaagaagcaatgggtagtcat

SEQ ID NO: 3206945 - DNA, 25 bp, Homo sapien
taattaggacctgactgcgtgtgac

SEQ ID NO: 3206946 - DNA, 25 bp, Homo sapien
catcccacggtcaggtaagtgtgaa

SEQ ID NO: 3206947 - DNA, 25 bp, Homo sapien
tacacatcctcaggtagtggccagg

SEQ ID NO: 3206948 - DNA, 25 bp, Homo sapien
tgacacactcttcgagcagttcttg

SEQ ID NO: 3206949 - DNA, 25 bp, Homo sapien
tgatgttctacaagcttccactgta

SEQ ID NO: 3206950 - DNA, 25 bp, Homo sapien
gcagcccatattgtcataggcattg

SEQ ID NO: 3206951 - DNA, 25 bp, Homo sapien
ccttcagagtaattgacacatgata

SEQ ID NO: 3206952 - DNA, 25 bp, Homo sapien
ttgtcataggcattggatgaacagc

SEQ ID NO: 3206953 - DNA, 25 bp, Homo sapien
gagtaattgacacatgatagcagcc

SEQ ID NO: 3206954 - DNA, 25 bp, Homo sapien
tagcagggttactctggcttggacc

SEQ ID NO: 3206955 - DNA, 25 bp, Homo sapien
aaatttggttcgtctgtgttagcag

SEQ ID NO: 3206956 - DNA, 25 bp, Homo sapien
tgattccggaggaattcctgtcccc

SEQ ID NO: 3206957 - DNA, 25 bp, Homo sapien
gctgataacgttgaggagtgcataa

SEQ ID NO: 3206958 - DNA, 25 bp, Homo sapien
tatcggcgcttcagtagtgatatcc

SEQ ID NO: 3206959 - DNA, 25 bp, Homo sapien
aaagtggtcaccagtaggattagcc

SEQ ID NO: 3206960 - DNA, 25 bp, Homo sapien
tcctgggaaatgtgtccttatatcg

SEQ ID NO: 3206961 - DNA, 25 bp, Homo sapien
caccagtaggattagccattaccat

SEQ ID NO: 3206962 - DNA, 25 bp, Homo sapien
ccacttggagtctggatgtgagttg

SEQ ID NO: 3206963 - DNA, 25 bp, Homo sapien
aaatcgtggaagttaagcacaagcc

SEQ ID NO: 3206964 - DNA, 25 bp, Homo sapien
tcagacctcgatttcccagagaatg

SEQ ID NO: 3206965 - DNA, 25 bp, Homo sapien
gggcagtagataggctagctccaga

SEQ ID NO: 3206966 - DNA, 25 bp, Homo sapien
gccgcagcaatgcaaacagctccag

SEQ ID NO: 3206967 - DNA, 25 bp, Homo sapien
gctccagtgtttaaacaagcatccg

SEQ ID NO: 3206968 - DNA, 25 bp, Homo sapien
aaacaagcatccgttaggccaggaa

SEQ ID NO: 3206969 - DNA, 25 bp, Homo sapien
ttaacatgcagtgagccgcagcaat

SEQ ID NO: 3206970 - DNA, 25 bp, Homo sapien
tggattggcatagggtttcagagga

SEQ ID NO: 3206971 - DNA, 25 bp, Homo sapien
ttattggattggcatagggtttcag

SEQ ID NO: 3206972 - DNA, 25 bp, Homo sapien
ctttattggattggcatagggtttc

SEQ ID NO: 3206973 - DNA, 25 bp, Homo sapien
attggattggcatagggtttcagag

SEQ ID NO: 3206974 - DNA, 25 bp, Homo sapien
gatgctgagccgaatcagattttcc

SEQ ID NO: 3206975 - DNA, 25 bp, Homo sapien
tgtcctccacgtgatgctgagccga

SEQ ID NO: 3206976 - DNA, 25 bp, Homo sapien
tggctgcagttaagccttgtgtcct

SEQ ID NO: 3206977 - DNA, 25 bp, Homo sapien
ttgggaccatatagtaattgcctcc

SEQ ID NO: 3206978 - DNA, 25 bp, Homo sapien
tctccatcgcctttgatatggtaat

SEQ ID NO: 3206979 - DNA, 25 bp, Homo sapien
gtctctctccatcgcctttgatatg

SEQ ID NO: 3206980 - DNA, 25 bp, Homo sapien
ctctctgcctgtatgttatccctct

SEQ ID NO: 3206981 - DNA, 25 bp, Homo sapien
gcctgtatgttatccctctatcatt

SEQ ID NO: 3206982 - DNA, 25 bp, Homo sapien
cagacacatacattgctgctttctc

SEQ ID NO: 3206983 - DNA, 25 bp, Homo sapien
acgtgagcattgtgggtagcatttc

SEQ ID NO: 3206984 - DNA, 25 bp, Homo sapien
ctgtgttgccagacacatacattgc

SEQ ID NO: 3206985 - DNA, 25 bp, Homo sapien
ctggtgaatggatggcaccacgtga

SEQ ID NO: 3206986 - DNA, 25 bp, Homo sapien
ctactgctggccaatgctgacagca

SEQ ID NO: 3206987 - DNA, 25 bp, Homo sapien
tactgctggccaatgctgacagcag

SEQ ID NO: 3206988 - DNA, 25 bp, Homo sapien
gaaggaacagctctatccttacacc

SEQ ID NO: 3206989 - DNA, 25 bp, Homo sapien
ggaacagctctatccttacacccat

SEQ ID NO: 3206990 - DNA, 25 bp, Homo sapien
tgaaggaacagctctatccttacac

SEQ ID NO: 3206991 - DNA, 25 bp, Homo sapien
tatccttacacccattagataggca

SEQ ID NO: 3206992 - DNA, 25 bp, Homo sapien
atggagctccgggacccagctgtcc

SEQ ID NO: 3206993 - DNA, 25 bp, Homo sapien
cagacaaggccacattccactgcag

SEQ ID NO: 3206994 - DNA, 25 bp, Homo sapien
aacttgcaggggctctcaacggccc

SEQ ID NO: 3206995 - DNA, 25 bp, Homo sapien
cactgcagccagcagttcatggagc

SEQ ID NO: 3206996 - DNA, 25 bp, Homo sapien
agacagatagtctccggcaagcaca

SEQ ID NO: 3206997 - DNA, 25 bp, Homo sapien
gcttcttgagcctgaaagacagata

SEQ ID NO: 3206998 - DNA, 25 bp, Homo sapien
aacattaatagagtagcggtgatgg

SEQ ID NO: 3206999 - DNA, 25 bp, Homo sapien
cagcctctgcccatacgttatgtac

SEQ ID NO: 3207000 - DNA, 25 bp, Homo sapien
acagagactgtggcacgacagcagc

SEQ ID NO: 3207001 - DNA, 25 bp, Homo sapien
agagactgtggcacgacagcagctg

SEQ ID NO: 3207002 - DNA, 25 bp, Homo sapien
cagagactgtggcacgacagcagct

SEQ ID NO: 3207003 - DNA, 25 bp, Homo sapien
ttagctctttcctttcataataaga

SEQ ID NO: 3207004 - DNA, 25 bp, Homo sapien
tatgacatggttaagttgtctatca

SEQ ID NO: 3207005 - DNA, 25 bp, Homo sapien
ctatgacatggttaagttgtctatc

SEQ ID NO: 3207006 - DNA, 25 bp, Homo sapien
tgacatggttaagttgtctatcatc

SEQ ID NO: 3207007 - DNA, 25 bp, Homo sapien
atgacatggttaagttgtctatcat

SEQ ID NO: 3207008 - DNA, 25 bp, Homo sapien
gggcattcacaccagacttccttat

SEQ ID NO: 3207009 - DNA, 25 bp, Homo sapien
gatgcaggagtactcagtgaggacc

SEQ ID NO: 3207010 - DNA, 25 bp, Homo sapien
cccaatcgaatagaagaaaagttgc

SEQ ID NO: 3207011 - DNA, 25 bp, Homo sapien
gctgacgggtctgcagttccaaact

SEQ ID NO: 3207012 - DNA, 25 bp, Homo sapien
gaaacgtattcaggccatgagcacc

SEQ ID NO: 3207013 - DNA, 25 bp, Homo sapien
cagcctgtctttgtactagtgaagc

SEQ ID NO: 3207014 - DNA, 25 bp, Homo sapien
ctagtgaagcccagcgaacggtctt

SEQ ID NO: 3207015 - DNA, 25 bp, Homo sapien
gaagaagaaatagttggcctccatc

SEQ ID NO: 3207016 - DNA, 25 bp, Homo sapien
cacactgggctcacaaattgtacag

SEQ ID NO: 3207017 - DNA, 25 bp, Homo sapien
gatgcagtccatcctaaactagtgt

SEQ ID NO: 3207018 - DNA, 25 bp, Homo sapien
tctcatcagtgaaggtttacggaag

SEQ ID NO: 3207019 - DNA, 25 bp, Homo sapien
gactgcacaggaggattgttgagcc

SEQ ID NO: 3207020 - DNA, 25 bp, Homo sapien
cagtcagctgtgaacaaaacttgtg

SEQ ID NO: 3207021 - DNA, 25 bp, Homo sapien
ttccttaaaatggagatacgagaga

SEQ ID NO: 3207022 - DNA, 25 bp, Homo sapien
tcagtcagctgtgaacaaaacttgt

SEQ ID NO: 3207023 - DNA, 25 bp, Homo sapien
taaaatggagatacgagagatcacc

SEQ ID NO: 3207024 - DNA, 25 bp, Homo sapien
tctaggaaaattgcatgtaggcagg

SEQ ID NO: 3207025 - DNA, 25 bp, Homo sapien
cagtgttagtctttttagcctcaga

SEQ ID NO: 3207026 - DNA, 25 bp, Homo sapien
ggacatcgagtggaagcctgtgcat

SEQ ID NO: 3207027 - DNA, 25 bp, Homo sapien
tagttctcctaaattcataagcaga

SEQ ID NO: 3207028 - DNA, 25 bp, Homo sapien
aatgacatgacgctgtaagtgggca

SEQ ID NO: 3207029 - DNA, 25 bp, Homo sapien
tagcaaggcgtctgtctaccctgtg

SEQ ID NO: 3207030 - DNA, 25 bp, Homo sapien
caggccacatgtttgtagcagggca

SEQ ID NO: 3207031 - DNA, 25 bp, Homo sapien
cagtggctctcagataagatgtgtc

SEQ ID NO: 3207032 - DNA, 25 bp, Homo sapien
caatatcttgttttacatctgtatg

SEQ ID NO: 3207033 - DNA, 25 bp, Homo sapien
tgttttacatctgtatgctgtaagg

SEQ ID NO: 3207034 - DNA, 25 bp, Homo sapien
ctgtaaggattatgaacttcatctc

SEQ ID NO: 3207035 - DNA, 25 bp, Homo sapien
catctgtatgctgtaaggattatga

SEQ ID NO: 3207036 - DNA, 25 bp, Homo sapien
acattttctcattagatgtctggtg

SEQ ID NO: 3207037 - DNA, 25 bp, Homo sapien
taacattttctcattagatgtctgg

SEQ ID NO: 3207038 - DNA, 25 bp, Homo sapien
aacttaacattttctcattagatgt

SEQ ID NO: 3207039 - DNA, 25 bp, Homo sapien
cataccatttggggaaacttaacat

SEQ ID NO: 3207040 - DNA, 25 bp, Homo sapien
attttggggcgatagcgttcacaag

SEQ ID NO: 3207041 - DNA, 25 bp, Homo sapien
tttggggcgatagcgttcacaaggt

SEQ ID NO: 3207042 - DNA, 25 bp, Homo sapien
tggggcgatagcgttcacaaggttt

SEQ ID NO: 3207043 - DNA, 25 bp, Homo sapien
gggcgatagcgttcacaaggtttgt

SEQ ID NO: 3207044 - DNA, 25 bp, Homo sapien
aaactgatgcatatattatctttat

SEQ ID NO: 3207045 - DNA, 25 bp, Homo sapien
ggcaatggtggatgttcttggtgtg

SEQ ID NO: 3207046 - DNA, 25 bp, Homo sapien
ctttgggcaatggtggatgttcttg

SEQ ID NO: 3207047 - DNA, 25 bp, Homo sapien
agctttgggcaatggtggatgttct

SEQ ID NO: 3207048 - DNA, 25 bp, Homo sapien
caatggtggatgttcttggtgtgac

SEQ ID NO: 3207049 - DNA, 25 bp, Homo sapien
tccttgctggtgtgcattgactctg

SEQ ID NO: 3207050 - DNA, 25 bp, Homo sapien
ttctccatgtcagcacattcaaaat

SEQ ID NO: 3207051 - DNA, 25 bp, Homo sapien
cattcaaaattgctgactgtcaaca

SEQ ID NO: 3207052 - DNA, 25 bp, Homo sapien
tctgtggtcactgttctccatgtca

SEQ ID NO: 3207053 - DNA, 25 bp, Homo sapien
ctccacggatcttggaatcttttgc

SEQ ID NO: 3207054 - DNA, 25 bp, Homo sapien
cattttttggacaggcagcgagctc

SEQ ID NO: 3207055 - DNA, 25 bp, Homo sapien
ggcattttttggacaggcagcgagc

SEQ ID NO: 3207056 - DNA, 25 bp, Homo sapien
aggcagcgagctccttccaccttgt

SEQ ID NO: 3207057 - DNA, 25 bp, Homo sapien
gcttactaatctcttgattgtctga

SEQ ID NO: 3207058 - DNA, 25 bp, Homo sapien
tgggcgtcctcctaatcaccttctg

SEQ ID NO: 3207059 - DNA, 25 bp, Homo sapien
taatcaccttctgcttactaatctc

SEQ ID NO: 3207060 - DNA, 25 bp, Homo sapien
aactgcttgggcgtcctcctaatca

SEQ ID NO: 3207061 - DNA, 25 bp, Homo sapien
aagagaatccaggtagtatattcat

SEQ ID NO: 3207062 - DNA, 25 bp, Homo sapien
aaagagaatccaggtagtatattca

SEQ ID NO: 3207063 - DNA, 25 bp, Homo sapien
gaaagagaatccaggtagtatattc

SEQ ID NO: 3207064 - DNA, 25 bp, Homo sapien
tgaaagagaatccaggtagtatatt

SEQ ID NO: 3207065 - DNA, 25 bp, Homo sapien
acagctgaatatcagtggtcacaaa

SEQ ID NO: 3207066 - DNA, 25 bp, Homo sapien
taaatggctcaatgaacttcatcag

SEQ ID NO: 3207067 - DNA, 25 bp, Homo sapien
tctaagtagtcatccaacagctgaa

SEQ ID NO: 3207068 - DNA, 25 bp, Homo sapien
gaatatcagtggtcacaaatccaag

SEQ ID NO: 3207069 - DNA, 25 bp, Homo sapien
gagggcagtggatagagacatttta

SEQ ID NO: 3207070 - DNA, 25 bp, Homo sapien
gatacggtgatagggaaggcttcac

SEQ ID NO: 3207071 - DNA, 25 bp, Homo sapien
gagcaattacatgaaggagtagcca

SEQ ID NO: 3207072 - DNA, 25 bp, Homo sapien
tgtgcatgcctgcacgcgtgttcat

SEQ ID NO: 3207073 - DNA, 25 bp, Homo sapien
ggaggatgtgtacttgtttcagtgc

SEQ ID NO: 3207074 - DNA, 25 bp, Homo sapien
ctttgaaagtagtcatagagctctt

SEQ ID NO: 3207075 - DNA, 25 bp, Homo sapien
aatccgtttcctgctatatagccag

SEQ ID NO: 3207076 - DNA, 25 bp, Homo sapien
ctggaaatggagaagtggcaaatcc

SEQ ID NO: 3207077 - DNA, 25 bp, Homo sapien
gattggtatcattactggtctctag

SEQ ID NO: 3207078 - DNA, 25 bp, Homo sapien
cagaagtgctaagtgcatttgattg

SEQ ID NO: 3207079 - DNA, 25 bp, Homo sapien
ctcaggttgatagtgcagaagtgct

SEQ ID NO: 3207080 - DNA, 25 bp, Homo sapien
ggtctctagtaattgattactgtcc

SEQ ID NO: 3207081 - DNA, 25 bp, Homo sapien
ggaggcttttcaccaatggcttggt

SEQ ID NO: 3207082 - DNA, 25 bp, Homo sapien
gcatgaatatattcacgtgttccct

SEQ ID NO: 3207083 - DNA, 25 bp, Homo sapien
tttcagtgaagaagggtagcctgac

SEQ ID NO: 3207084 - DNA, 25 bp, Homo sapien
gctgctatccaatcctttaaaggcc

SEQ ID NO: 3207085 - DNA, 25 bp, Homo sapien
cagaactgccagttagaagccacac

SEQ ID NO: 3207086 - DNA, 25 bp, Homo sapien
tttatcagaactgccagttagaagc

SEQ ID NO: 3207087 - DNA, 25 bp, Homo sapien
ctctttatcagaactgccagttaga

SEQ ID NO: 3207088 - DNA, 25 bp, Homo sapien
tatcagaactgccagttagaagcca

SEQ ID NO: 3207089 - DNA, 25 bp, Homo sapien
tgaccatttagctgggtcccgtggt

SEQ ID NO: 3207090 - DNA, 25 bp, Homo sapien
tctctagttgaattggtgttgctgc

SEQ ID NO: 3207091 - DNA, 25 bp, Homo sapien
gcaggtgtacctgggcagtctctga

SEQ ID NO: 3207092 - DNA, 25 bp, Homo sapien
gactgagaagatggtacctgtcccc

SEQ ID NO: 3207093 - DNA, 25 bp, Homo sapien
gtgcttgtatctccgcaagctggga

SEQ ID NO: 3207094 - DNA, 25 bp, Homo sapien
agtgtgtgcttgtatctccgcaagc

SEQ ID NO: 3207095 - DNA, 25 bp, Homo sapien
cttgtatctccgcaagctgggagac

SEQ ID NO: 3207096 - DNA, 25 bp, Homo sapien
tatctccgcaagctgggagactggg

SEQ ID NO: 3207097 - DNA, 25 bp, Homo sapien
ctggagaggtaataatgatgatgat

SEQ ID NO: 3207098 - DNA, 25 bp, Homo sapien
ggtaataatgatgatgatttttacc

SEQ ID NO: 3207099 - DNA, 25 bp, Homo sapien
ataatgatgatgatttttaccatcc

SEQ ID NO: 3207100 - DNA, 25 bp, Homo sapien
taataatgatgatgatttttaccat

SEQ ID NO: 3207101 - DNA, 25 bp, Homo sapien
gtttctcattatcaaaggtgggagc

SEQ ID NO: 3207102 - DNA, 25 bp, Homo sapien
ctgagtttctcattatcaaaggtgg

SEQ ID NO: 3207103 - DNA, 25 bp, Homo sapien
agcctcatctctgcttaacacagca

SEQ ID NO: 3207104 - DNA, 25 bp, Homo sapien
gcctcatctctgcttaacacagcag

SEQ ID NO: 3207105 - DNA, 25 bp, Homo sapien
gttgctgaaaaagttgcttccagta

SEQ ID NO: 3207106 - DNA, 25 bp, Homo sapien
tgctgaaaaagttgcttccagtaag

SEQ ID NO: 3207107 - DNA, 25 bp, Homo sapien
tgaaaaagttgcttccagtaagagt

SEQ ID NO: 3207108 - DNA, 25 bp, Homo sapien
aaagttgcttccagtaagagttggg

SEQ ID NO: 3207109 - DNA, 25 bp, Homo sapien
tctttagaaatgacgttgacagaat

SEQ ID NO: 3207110 - DNA, 25 bp, Homo sapien
gaatgaagagggttcaaatattaag

SEQ ID NO: 3207111 - DNA, 25 bp, Homo sapien
gaataaaaattgaccatattcctag

SEQ ID NO: 3207112 - DNA, 25 bp, Homo sapien
gatgtcgagtaagttttcctcagaa

SEQ ID NO: 3207113 - DNA, 25 bp, Homo sapien
gactgtcatccaaagcttcagcgat

SEQ ID NO: 3207114 - DNA, 25 bp, Homo sapien
ttcagcgatgcttcctgaaatttct

SEQ ID NO: 3207115 - DNA, 25 bp, Homo sapien
ttgggacatgataggactgtcatcc

SEQ ID NO: 3207116 - DNA, 25 bp, Homo sapien
cagacaggttgggacatgataggac

SEQ ID NO: 3207117 - DNA, 25 bp, Homo sapien
tagtgaaaaactggcatgtatttat

SEQ ID NO: 3207118 - DNA, 25 bp, Homo sapien
cattctggaagaacttgtaacactc

SEQ ID NO: 3207119 - DNA, 25 bp, Homo sapien
tttgggatgaaacggactcttgcga

SEQ ID NO: 3207120 - DNA, 25 bp, Homo sapien
gactcttgcgaaataagggcccatt

SEQ ID NO: 3207121 - DNA, 25 bp, Homo sapien
tttgaggccgctggtagcacattgg

SEQ ID NO: 3207122 - DNA, 25 bp, Homo sapien
ggcgttgtatagatcttccatggca

SEQ ID NO: 3207123 - DNA, 25 bp, Homo sapien
acatgacacaggcactttgaggccg

SEQ ID NO: 3207124 - DNA, 25 bp, Homo sapien
tgcaaatccactaagcagggacatg

SEQ ID NO: 3207125 - DNA, 25 bp, Homo sapien
ccaggtggcgttgcttcctgcctct

SEQ ID NO: 3207126 - DNA, 25 bp, Homo sapien
tgctgagccaggtggcgttgcttcc

SEQ ID NO: 3207127 - DNA, 25 bp, Homo sapien
tatcacacataaagctgaaccaata

SEQ ID NO: 3207128 - DNA, 25 bp, Homo sapien
atagcatcctgacccccataggctg

SEQ ID NO: 3207129 - DNA, 25 bp, Homo sapien
tcttgagtgagaagggactttagag

SEQ ID NO: 3207130 - DNA, 25 bp, Homo sapien
tagaggccgtgtggtctgacctaaa

SEQ ID NO: 3207131 - DNA, 25 bp, Homo sapien
ctgtgttgtgaacttgtcacccctg

SEQ ID NO: 3207132 - DNA, 25 bp, Homo sapien
ggaatagagttcatcagaataagag

SEQ ID NO: 3207133 - DNA, 25 bp, Homo sapien
cagcccttacttctaatgccacaca

SEQ ID NO: 3207134 - DNA, 25 bp, Homo sapien
ttctctcctatcatcagttctccat

SEQ ID NO: 3207135 - DNA, 25 bp, Homo sapien
tgttgctgcagctgattctcatctt

SEQ ID NO: 3207136 - DNA, 25 bp, Homo sapien
tactgcaagccagtcaatgtatttc

SEQ ID NO: 3207137 - DNA, 25 bp, Homo sapien
gctttccagtattggcctctgggaa

SEQ ID NO: 3207138 - DNA, 25 bp, Homo sapien
tgcatacacacatggagctggcgcc

SEQ ID NO: 3207139 - DNA, 25 bp, Homo sapien
cagtgctttccagtattggcctctg

SEQ ID NO: 3207140 - DNA, 25 bp, Homo sapien
gccatgccgcatggaggactgcata

SEQ ID NO: 3207141 - DNA, 25 bp, Homo sapien
tgttcagcatatgcagaagaacaga

SEQ ID NO: 3207142 - DNA, 25 bp, Homo sapien
ttgttcagcatatgcagaagaacag

SEQ ID NO: 3207143 - DNA, 25 bp, Homo sapien
gttcagcatatgcagaagaacagat

SEQ ID NO: 3207144 - DNA, 25 bp, Homo sapien
tgtaaaaagcgatgactgttcccag

SEQ ID NO: 3207145 - DNA, 25 bp, Homo sapien
tgaaaaatgaaatacggctctagga

SEQ ID NO: 3207146 - DNA, 25 bp, Homo sapien
aatgaaatacggctctaggatttgg

SEQ ID NO: 3207147 - DNA, 25 bp, Homo sapien
tttcttttgagtccgattcctgtaa

SEQ ID NO: 3207148 - DNA, 25 bp, Homo sapien
tgtcacataggtgccatttgtagta

SEQ ID NO: 3207149 - DNA, 25 bp, Homo sapien
gacttgggctttgctgaacaaattc

SEQ ID NO: 3207150 - DNA, 25 bp, Homo sapien
gccatttgtagtatttcgaggagtt

SEQ ID NO: 3207151 - DNA, 25 bp, Homo sapien
gaaggcatttgtccactgagtgttg

SEQ ID NO: 3207152 - DNA, 25 bp, Homo sapien
ttgtcctcccaacaatgacaaggtg

SEQ ID NO: 3207153 - DNA, 25 bp, Homo sapien
caaggtgcacagtatgcatccgata

SEQ ID NO: 3207154 - DNA, 25 bp, Homo sapien
ccgatagacaaaggaggcttcagaa

SEQ ID NO: 3207155 - DNA, 25 bp, Homo sapien
tatgcatccgatagacaaaggaggc

SEQ ID NO: 3207156 - DNA, 25 bp, Homo sapien
tgtcttctggagatccatttccttg

SEQ ID NO: 3207157 - DNA, 25 bp, Homo sapien
tgcctggatggtttcatggagctgc

SEQ ID NO: 3207158 - DNA, 25 bp, Homo sapien
tcacctcagtgtaaaagctgtaaaa

SEQ ID NO: 3207159 - DNA, 25 bp, Homo sapien
taaaaagctgggcaagtatctgtgc

SEQ ID NO: 3207160 - DNA, 25 bp, Homo sapien
tgggtgcctggcacaatacctcaca

SEQ ID NO: 3207161 - DNA, 25 bp, Homo sapien
ctcttgtatactgtgggtgcctggc

SEQ ID NO: 3207162 - DNA, 25 bp, Homo sapien
tggatatccccatatctcatgtctc

SEQ ID NO: 3207163 - DNA, 25 bp, Homo sapien
aaatggcaggcggagggtatggata

SEQ ID NO: 3207164 - DNA, 25 bp, Homo sapien
taaggcctggtggttggaaatgacc

SEQ ID NO: 3207165 - DNA, 25 bp, Homo sapien
tggtggttggaaatgacccctctgt

SEQ ID NO: 3207166 - DNA, 25 bp, Homo sapien
gacaatggtctctaaggcctggtgg

SEQ ID NO: 3207167 - DNA, 25 bp, Homo sapien
ttcctcctgtgacaatggtctctaa

SEQ ID NO: 3207168 - DNA, 25 bp, Homo sapien
ctgtataaaagaaggcactgagctc

SEQ ID NO: 3207169 - DNA, 25 bp, Homo sapien
tccttcttatcaactccagcatggg

SEQ ID NO: 3207170 - DNA, 25 bp, Homo sapien
tggtgggcactgtataaaagaaggc

SEQ ID NO: 3207171 - DNA, 25 bp, Homo sapien
tgagctcttgattcctgcttttgcc

SEQ ID NO: 3207172 - DNA, 25 bp, Homo sapien
cttcctttctggaaactgagtcaga

SEQ ID NO: 3207173 - DNA, 25 bp, Homo sapien
ctggaaactgagtcagaggtctcct

SEQ ID NO: 3207174 - DNA, 25 bp, Homo sapien
gaaactgagtcagaggtctccttac

SEQ ID NO: 3207175 - DNA, 25 bp, Homo sapien
ttctggaaactgagtcagaggtctc

SEQ ID NO: 3207176 - DNA, 25 bp, Homo sapien
tagagatggacttgcctgtgaggtc

SEQ ID NO: 3207177 - DNA, 25 bp, Homo sapien
taacgacactactgtgggcagagct

SEQ ID NO: 3207178 - DNA, 25 bp, Homo sapien
ggatgagcaggactttgtgcccgcc

SEQ ID NO: 3207179 - DNA, 25 bp, Homo sapien
ggctagtggccatagtaacgacact

SEQ ID NO: 3207180 - DNA, 25 bp, Homo sapien
tgcatcggggaaaagcaaggagtta

SEQ ID NO: 3207181 - DNA, 25 bp, Homo sapien
ctgcatcggggaaaagcaaggagtt

SEQ ID NO: 3207182 - DNA, 25 bp, Homo sapien
gcatcggggaaaagcaaggagttaa

SEQ ID NO: 3207183 - DNA, 25 bp, Homo sapien
ttccttgcaggaggaaggcacctgt

SEQ ID NO: 3207184 - DNA, 25 bp, Homo sapien
gatgctcagtcgcaaggtttcggtg

SEQ ID NO: 3207185 - DNA, 25 bp, Homo sapien
gaatgatagttggtttaccttgaag

SEQ ID NO: 3207186 - DNA, 25 bp, Homo sapien
tggaaaccggtgtccttgattctgg

SEQ ID NO: 3207187 - DNA, 25 bp, Homo sapien
ttggaggagggcttctcggttaaca

SEQ ID NO: 3207188 - DNA, 25 bp, Homo sapien
gggcttctcggttaacatgcctcac

SEQ ID NO: 3207189 - DNA, 25 bp, Homo sapien
gaggagggcttctcggttaacatgc

SEQ ID NO: 3207190 - DNA, 25 bp, Homo sapien
gagggcttctcggttaacatgcctc

SEQ ID NO: 3207191 - DNA, 25 bp, Homo sapien
ttggttgcctcagtgtacagccagg

SEQ ID NO: 3207192 - DNA, 25 bp, Homo sapien
tctggagctgttttgggagcctctg

SEQ ID NO: 3207193 - DNA, 25 bp, Homo sapien
tctgttctgctgtcgactgggcctg

SEQ ID NO: 3207194 - DNA, 25 bp, Homo sapien
gagcctctgcgataggagaatacct

SEQ ID NO: 3207195 - DNA, 25 bp, Homo sapien
gaaatcctgatgtaaatggaccttg

SEQ ID NO: 3207196 - DNA, 25 bp, Homo sapien
tgaaatcctgatgtaaatggacctt

SEQ ID NO: 3207197 - DNA, 25 bp, Homo sapien
ctggatgaaatcctgatgtaaatgg

SEQ ID NO: 3207198 - DNA, 25 bp, Homo sapien
gatgaaatcctgatgtaaatggacc

SEQ ID NO: 3207199 - DNA, 25 bp, Homo sapien
cagtcaggggcttggatccgtcctg

SEQ ID NO: 3207200 - DNA, 25 bp, Homo sapien
gtcctgctgattggcctgggttttg

SEQ ID NO: 3207201 - DNA, 25 bp, Homo sapien
aagcgtccagacctccactgggctg

SEQ ID NO: 3207202 - DNA, 25 bp, Homo sapien
cactcagtggcaagcgtccagacct

SEQ ID NO: 3207203 - DNA, 25 bp, Homo sapien
gccttctttaaataggtagcaccag

SEQ ID NO: 3207204 - DNA, 25 bp, Homo sapien
aaccgttggtgtctaggagtctgcc

SEQ ID NO: 3207205 - DNA, 25 bp, Homo sapien
caccagaatgggtctaaggcatact

SEQ ID NO: 3207206 - DNA, 25 bp, Homo sapien
tatgttccatagacacaaccgttgg

SEQ ID NO: 3207207 - DNA, 25 bp, Homo sapien
ggtactgcgtccagttggtttcatt

SEQ ID NO: 3207208 - DNA, 25 bp, Homo sapien
tgcagagcaccatgagatattgaaa

SEQ ID NO: 3207209 - DNA, 25 bp, Homo sapien
aaataatggtgtttggcattggtac

SEQ ID NO: 3207210 - DNA, 25 bp, Homo sapien
gaaaattcaatccttggtgcagagc

SEQ ID NO: 3207211 - DNA, 25 bp, Homo sapien
gggacacgtggactttctctgaatg

SEQ ID NO: 3207212 - DNA, 25 bp, Homo sapien
tgttatcaccataggaggatttgtg

SEQ ID NO: 3207213 - DNA, 25 bp, Homo sapien
gaaggagtagtagacaaaaggctga

SEQ ID NO: 3207214 - DNA, 25 bp, Homo sapien
tgtttgtaatagcaggtttgggatg

SEQ ID NO: 3207215 - DNA, 25 bp, Homo sapien
ggtccaagatacatccatcctgctg

SEQ ID NO: 3207216 - DNA, 25 bp, Homo sapien
taaggcttcaccagcttgcagtgcc

SEQ ID NO: 3207217 - DNA, 25 bp, Homo sapien
caggtcatgggcaacacggatgtca

SEQ ID NO: 3207218 - DNA, 25 bp, Homo sapien
cccaggaagctgacgtaataagcag

SEQ ID NO: 3207219 - DNA, 25 bp, Homo sapien
tatctcagatgaaggacagtgccac

SEQ ID NO: 3207220 - DNA, 25 bp, Homo sapien
tactgcttacataaacactctggat

SEQ ID NO: 3207221 - DNA, 25 bp, Homo sapien
taaggatgctgggacatatttctgt

SEQ ID NO: 3207222 - DNA, 25 bp, Homo sapien
cagggagtttcaggataaggatgct

SEQ ID NO: 3207223 - DNA, 25 bp, Homo sapien
tcctgaagtaaagacgacgagtgat

SEQ ID NO: 3207224 - DNA, 25 bp, Homo sapien
gcccctagtgtatagcataatgcag

SEQ ID NO: 3207225 - DNA, 25 bp, Homo sapien
tttggaaagctatagccacctcgca

SEQ ID NO: 3207226 - DNA, 25 bp, Homo sapien
taaacgtgggattaggagtcattga

SEQ ID NO: 3207227 - DNA, 25 bp, Homo sapien
ttagaataggccaaaaactaggaca

SEQ ID NO: 3207228 - DNA, 25 bp, Homo sapien
tgagatgatcatcgctgaactagag

SEQ ID NO: 3207229 - DNA, 25 bp, Homo sapien
gacattttaccgtctgatttcctta

SEQ ID NO: 3207230 - DNA, 25 bp, Homo sapien
catcgctgaactagagttgttcatg

SEQ ID NO: 3207231 - DNA, 25 bp, Homo sapien
caagcgttttgttggtagtaatgaa

SEQ ID NO: 3207232 - DNA, 25 bp, Homo sapien
ctgtgcaagcgttttgttggtagta

SEQ ID NO: 3207233 - DNA, 25 bp, Homo sapien
tgcaagcgttttgttggtagtaatg

SEQ ID NO: 3207234 - DNA, 25 bp, Homo sapien
cgttttgttggtagtaatgaaatgc

SEQ ID NO: 3207235 - DNA, 25 bp, Homo sapien
gaatgctggaaaaacgacgataggt

SEQ ID NO: 3207236 - DNA, 25 bp, Homo sapien
gcctgaaccgttgcactgtgcagtg

SEQ ID NO: 3207237 - DNA, 25 bp, Homo sapien
agtgttcgtgtggaaggcatctgcc

SEQ ID NO: 3207238 - DNA, 25 bp, Homo sapien
ttattagagcgtgaaggaaaggtgt

SEQ ID NO: 3207239 - DNA, 25 bp, Homo sapien
tgcaaatgccggacagtcaggtagc

SEQ ID NO: 3207240 - DNA, 25 bp, Homo sapien
accaggaatatgcagtactgaatgc

SEQ ID NO: 3207241 - DNA, 25 bp, Homo sapien
agtactgaatgcaaatgccggacag

SEQ ID NO: 3207242 - DNA, 25 bp, Homo sapien
ggacagtcaggtagccatcttatta

SEQ ID NO: 3207243 - DNA, 25 bp, Homo sapien
cagtttcaatgtgactgcaagtgag

SEQ ID NO: 3207244 - DNA, 25 bp, Homo sapien
gctggctactttctgcagattgacc

SEQ ID NO: 3207245 - DNA, 25 bp, Homo sapien
agaagcaaagccagtttcaatgtga

SEQ ID NO: 3207246 - DNA, 25 bp, Homo sapien
ttcaatgtgactgcaagtgagcaca

SEQ ID NO: 3207247 - DNA, 25 bp, Homo sapien
ttgtaagctgtcttaacaaaccttg

SEQ ID NO: 3207248 - DNA, 25 bp, Homo sapien
taaatatgaagtcacattgtagtag

SEQ ID NO: 3207249 - DNA, 25 bp, Homo sapien
caaaattgtcaatcccttataaata

SEQ ID NO: 3207250 - DNA, 25 bp, Homo sapien
tgggacaggataggactaaataaat

SEQ ID NO: 3207251 - DNA, 25 bp, Homo sapien
tattaataacaaggtgtaatccatg

SEQ ID NO: 3207252 - DNA, 25 bp, Homo sapien
tctagcagtttaccagctaaaggac

SEQ ID NO: 3207253 - DNA, 25 bp, Homo sapien
gcaaataggtctggtaaaccctgaa

SEQ ID NO: 3207254 - DNA, 25 bp, Homo sapien
gctaaaggactgcaaaggagggcca

SEQ ID NO: 3207255 - DNA, 25 bp, Homo sapien
ggctctgccacctgcaccagggctt

SEQ ID NO: 3207256 - DNA, 25 bp, Homo sapien
ctctgccacctgcaccagggctttt

SEQ ID NO: 3207257 - DNA, 25 bp, Homo sapien
gctctgccacctgcaccagggcttt

SEQ ID NO: 3207258 - DNA, 25 bp, Homo sapien
cgctgtagcatctgactcttggcat

SEQ ID NO: 3207259 - DNA, 25 bp, Homo sapien
ggaattgctctcgtcatgaccctaa

SEQ ID NO: 3207260 - DNA, 25 bp, Homo sapien
catctgggtatttgcctgtgaggct

SEQ ID NO: 3207261 - DNA, 25 bp, Homo sapien
tggcattggatatagggcctctatc

SEQ ID NO: 3207262 - DNA, 25 bp, Homo sapien
acattagaaaacaattaatttgtat

SEQ ID NO: 3207263 - DNA, 25 bp, Homo sapien
ttagaaaacaattaatttgtatgaa

SEQ ID NO: 3207264 - DNA, 25 bp, Homo sapien
aggacattagaaaacaattaatttg

SEQ ID NO: 3207265 - DNA, 25 bp, Homo sapien
tataattaaaggacattagaaaaca

SEQ ID NO: 3207266 - DNA, 25 bp, Homo sapien
agaggagctgcctgttctgtcactt

SEQ ID NO: 3207267 - DNA, 25 bp, Homo sapien
aagaggagctgcctgttctgtcact

SEQ ID NO: 3207268 - DNA, 25 bp, Homo sapien
catgtggcccactagcgatggttgt

SEQ ID NO: 3207269 - DNA, 25 bp, Homo sapien
gacttagttgatttttagccctgca

SEQ ID NO: 3207270 - DNA, 25 bp, Homo sapien
ccttggtgttagaaggatactcctg

SEQ ID NO: 3207271 - DNA, 25 bp, Homo sapien
tgagcacacatctagaggaccactg

SEQ ID NO: 3207272 - DNA, 25 bp, Homo sapien
gttattcctgcatatagcatctacg

SEQ ID NO: 3207273 - DNA, 25 bp, Homo sapien
ttcctgcatatagcatctacgtggg

SEQ ID NO: 3207274 - DNA, 25 bp, Homo sapien
ttgtagaattttggtttgaccttca

SEQ ID NO: 3207275 - DNA, 25 bp, Homo sapien
tatagcatctacgtggggtccacaa

SEQ ID NO: 3207276 - DNA, 25 bp, Homo sapien
tgcaaacaatagtctgtaagcgtag

SEQ ID NO: 3207277 - DNA, 25 bp, Homo sapien
ttcaattctaagggttcatgtctgt

SEQ ID NO: 3207278 - DNA, 25 bp, Homo sapien
gatgcacggataaactgcttgcccc

SEQ ID NO: 3207279 - DNA, 25 bp, Homo sapien
cctggggtttacatagtgattctgc

SEQ ID NO: 3207280 - DNA, 25 bp, Homo sapien
gagggcttgaccttcactgaaatga

SEQ ID NO: 3207281 - DNA, 25 bp, Homo sapien
caaggtttggatctgactcatagga

SEQ ID NO: 3207282 - DNA, 25 bp, Homo sapien
tagcaccttatacatgacgtggcag

SEQ ID NO: 3207283 - DNA, 25 bp, Homo sapien
cagcaagatgtgaagggatttttcc

SEQ ID NO: 3207284 - DNA, 25 bp, Homo sapien
cacaaattccaaggtaccttctgcc

SEQ ID NO: 3207285 - DNA, 25 bp, Homo sapien
ggttctgcacaaattccaaggtacc

SEQ ID NO: 3207286 - DNA, 25 bp, Homo sapien
taaagcatctttgtggttctgcaca

SEQ ID NO: 3207287 - DNA, 25 bp, Homo sapien
ttctaaagcatctttgtggttctgc

SEQ ID NO: 3207288 - DNA, 25 bp, Homo sapien
gatggcagaggtggatgagatgggc

SEQ ID NO: 3207289 - DNA, 25 bp, Homo sapien
gcactgctgccaacatcacatacca

SEQ ID NO: 3207290 - DNA, 25 bp, Homo sapien
tgggacagcagtagactgattgctg

SEQ ID NO: 3207291 - DNA, 25 bp, Homo sapien
ctgatgtttgggcactgctgccaac

SEQ ID NO: 3207292 - DNA, 25 bp, Homo sapien
gatgtctcaaatagagactggagac

SEQ ID NO: 3207293 - DNA, 25 bp, Homo sapien
gagaacaccctggtgtctcattttg

SEQ ID NO: 3207294 - DNA, 25 bp, Homo sapien
cagcaatcctgaatgtatgtgggtg

SEQ ID NO: 3207295 - DNA, 25 bp, Homo sapien
ggtcagatgacccaaagagccttca

SEQ ID NO: 3207296 - DNA, 25 bp, Homo sapien
gcatgtgtaccagtaagaggtccgt

SEQ ID NO: 3207297 - DNA, 25 bp, Homo sapien
taagaggtccgtacaagctgcagag

SEQ ID NO: 3207298 - DNA, 25 bp, Homo sapien
acttgccattgcaggagcatgtgta

SEQ ID NO: 3207299 - DNA, 25 bp, Homo sapien
caagggagcacgagcattcgtggac

SEQ ID NO: 3207300 - DNA, 25 bp, Homo sapien
cttttgatagaaatccatctctgtt

SEQ ID NO: 3207301 - DNA, 25 bp, Homo sapien
ccttttgatagaaatccatctctgt

SEQ ID NO: 3207302 - DNA, 25 bp, Homo sapien
gcatgtaacagcacatagtggctcc

SEQ ID NO: 3207303 - DNA, 25 bp, Homo sapien
tttgatagaaatccatctctgttct

SEQ ID NO: 3207304 - DNA, 25 bp, Homo sapien
tggaggttttaatacaactgtcaca

SEQ ID NO: 3207305 - DNA, 25 bp, Homo sapien
cagtcatagatagccagtcctggag

SEQ ID NO: 3207306 - DNA, 25 bp, Homo sapien
cactgtggagccagtcatagatagc

SEQ ID NO: 3207307 - DNA, 25 bp, Homo sapien
tcttcttgccctgagcactgtggag

SEQ ID NO: 3207308 - DNA, 25 bp, Homo sapien
gagaggttccttcaaacgcagcaga

SEQ ID NO: 3207309 - DNA, 25 bp, Homo sapien
tccaaagtgcaaaggatgatccagc

SEQ ID NO: 3207310 - DNA, 25 bp, Homo sapien
aacacctctgtagttatggacaccc

SEQ ID NO: 3207311 - DNA, 25 bp, Homo sapien
tcttgacttgcctcgcttgacttgg

SEQ ID NO: 3207312 - DNA, 25 bp, Homo sapien
aagaaacgtgactcattttgcacca

SEQ ID NO: 3207313 - DNA, 25 bp, Homo sapien
gatcctttgcaaagggaatgattaa

SEQ ID NO: 3207314 - DNA, 25 bp, Homo sapien
aagtgaccttcaagaaacgtgactc

SEQ ID NO: 3207315 - DNA, 25 bp, Homo sapien
tccctttggtggctcatacatttgg

SEQ ID NO: 3207316 - DNA, 25 bp, Homo sapien
gatagcagtggactcctttgccaag

SEQ ID NO: 3207317 - DNA, 25 bp, Homo sapien
tcctcacggtggtgtgtgcagatca

SEQ ID NO: 3207318 - DNA, 25 bp, Homo sapien
tgtgcctgtgagaatcatgccttcg

SEQ ID NO: 3207319 - DNA, 25 bp, Homo sapien
taagtgataatactgccagagtccc

SEQ ID NO: 3207320 - DNA, 25 bp, Homo sapien
ccccaagccggaggctagaatcctt

SEQ ID NO: 3207321 - DNA, 25 bp, Homo sapien
tgggccaggcgacgggaatcctgga

SEQ ID NO: 3207322 - DNA, 25 bp, Homo sapien
gaggctagaatcctttctcttatct

SEQ ID NO: 3207323 - DNA, 25 bp, Homo sapien
ctgggtgggccaggcgacgggaatc

SEQ ID NO: 3207324 - DNA, 25 bp, Homo sapien
tgcctcggcggagcagaggaaccac

SEQ ID NO: 3207325 - DNA, 25 bp, Homo sapien
aaaccccagcaagatgcggaggctg

SEQ ID NO: 3207326 - DNA, 25 bp, Homo sapien
gggccaagaaatcgggcgccggcac

SEQ ID NO: 3207327 - DNA, 25 bp, Homo sapien
gctgcctcggcggagcagaggaacc

SEQ ID NO: 3207328 - DNA, 25 bp, Homo sapien
gcgcgtgtccgcactggaggcatat

SEQ ID NO: 3207329 - DNA, 25 bp, Homo sapien
ttgccgttttccgatgcggtgtgga

SEQ ID NO: 3207330 - DNA, 25 bp, Homo sapien
gaaaatgcttgccaaccaccggaaa

SEQ ID NO: 3207331 - DNA, 25 bp, Homo sapien
gaaaatgcaataagcaagcttgccg

SEQ ID NO: 3207332 - DNA, 25 bp, Homo sapien
gatctacttttgcagtcgcctcgga

SEQ ID NO: 3207333 - DNA, 25 bp, Homo sapien
ggcgttttgcaaaggacttcaccga

SEQ ID NO: 3207334 - DNA, 25 bp, Homo sapien
tctaggttcctgtgaaatgcaactg

SEQ ID NO: 3207335 - DNA, 25 bp, Homo sapien
ccagcccgaggattcgatatctagg

SEQ ID NO: 3207336 - DNA, 25 bp, Homo sapien
gccgctgccgtgtttactgagctcg

SEQ ID NO: 3207337 - DNA, 25 bp, Homo sapien
gccgccgctgccgtgtttactgagc

SEQ ID NO: 3207338 - DNA, 25 bp, Homo sapien
tgagctcgcgcgtcctgatatcact

SEQ ID NO: 3207339 - DNA, 25 bp, Homo sapien
tgccgtgtttactgagctcgcgcgt

SEQ ID NO: 3207340 - DNA, 25 bp, Homo sapien
gacgattataccctgatttagttgg

SEQ ID NO: 3207341 - DNA, 25 bp, Homo sapien
atgtcaaatgctgctaagagactaa

SEQ ID NO: 3207342 - DNA, 25 bp, Homo sapien
aagggcatggagagtcacaaaaccc

SEQ ID NO: 3207343 - DNA, 25 bp, Homo sapien
attttatcccagtgtatttgtgtgt

SEQ ID NO: 3207344 - DNA, 25 bp, Homo sapien
taacccagggatctctatgtgctct

SEQ ID NO: 3207345 - DNA, 25 bp, Homo sapien
ctgcagtgcactataacccagggat

SEQ ID NO: 3207346 - DNA, 25 bp, Homo sapien
gcagtgcactataacccagggatct

SEQ ID NO: 3207347 - DNA, 25 bp, Homo sapien
tctctatgtgctctgtgacctggtg

SEQ ID NO: 3207348 - DNA, 25 bp, Homo sapien
tagcttcttaagcaggcaacagcca

SEQ ID NO: 3207349 - DNA, 25 bp, Homo sapien
tagatatctcttcacaaatcagccc

SEQ ID NO: 3207350 - DNA, 25 bp, Homo sapien
tcctgtcagctgatatcagcagcat

SEQ ID NO: 3207351 - DNA, 25 bp, Homo sapien
ccacataactagtaattagagtcct

SEQ ID NO: 3207352 - DNA, 25 bp, Homo sapien
aagtggtgttggctagggattctcc

SEQ ID NO: 3207353 - DNA, 25 bp, Homo sapien
ctcaaccccggaggcaagggaagtg

SEQ ID NO: 3207354 - DNA, 25 bp, Homo sapien
taagcgtctagcttctaggcagtcc

SEQ ID NO: 3207355 - DNA, 25 bp, Homo sapien
gactgccttaagttgtcccaggaga

SEQ ID NO: 3207356 - DNA, 25 bp, Homo sapien
ttaatattgtaatttggtccctcat

SEQ ID NO: 3207357 - DNA, 25 bp, Homo sapien
tattgtaatttggtccctcatgaag

SEQ ID NO: 3207358 - DNA, 25 bp, Homo sapien
attgtaatttggtccctcatgaagc

SEQ ID NO: 3207359 - DNA, 25 bp, Homo sapien
aatattgtaatttggtccctcatga

SEQ ID NO: 3207360 - DNA, 25 bp, Homo sapien
tctaggcttgctgcctgttcagcca

SEQ ID NO: 3207361 - DNA, 25 bp, Homo sapien
tgttcagccaccagtcgaatgcagt

SEQ ID NO: 3207362 - DNA, 25 bp, Homo sapien
ccagtcgaatgcagttgcagtgctc

SEQ ID NO: 3207363 - DNA, 25 bp, Homo sapien
aaattctaggcttgctgcctgttca

SEQ ID NO: 3207364 - DNA, 25 bp, Homo sapien
aagagagatatacttggcagagtcc

SEQ ID NO: 3207365 - DNA, 25 bp, Homo sapien
tattagggctaaaactgacagtggc

SEQ ID NO: 3207366 - DNA, 25 bp, Homo sapien
cagtggctctgatttgttgctttgc

SEQ ID NO: 3207367 - DNA, 25 bp, Homo sapien
tgggatctctggttccatcaaggaa

SEQ ID NO: 3207368 - DNA, 25 bp, Homo sapien
ccaaagattatcaggcccctctgct

SEQ ID NO: 3207369 - DNA, 25 bp, Homo sapien
attctgtaatgacatgttctaacca

SEQ ID NO: 3207370 - DNA, 25 bp, Homo sapien
gacatgttctaaccaaagattatca

SEQ ID NO: 3207371 - DNA, 25 bp, Homo sapien
tctaaccaaagattatcaggcccct

SEQ ID NO: 3207372 - DNA, 25 bp, Homo sapien
ggcaggtttcatcgtcactaaggct

SEQ ID NO: 3207373 - DNA, 25 bp, Homo sapien
tctgtttgtggctatctgttctctt

SEQ ID NO: 3207374 - DNA, 25 bp, Homo sapien
ctgtggcaggtgaaagccacagatc

SEQ ID NO: 3207375 - DNA, 25 bp, Homo sapien
ctcctgtggcaggtgaaagccacag

SEQ ID NO: 3207376 - DNA, 25 bp, Homo sapien
tgttgcctcccaggaactcgaggta

SEQ ID NO: 3207377 - DNA, 25 bp, Homo sapien
taattatgcgttgcagcttcagagg

SEQ ID NO: 3207378 - DNA, 25 bp, Homo sapien
tatcgggatgcttgtttgcagagct

SEQ ID NO: 3207379 - DNA, 25 bp, Homo sapien
cttcagaggaagttgctggctgcgg

SEQ ID NO: 3207380 - DNA, 25 bp, Homo sapien
aatagaaccagctctctctgactga

SEQ ID NO: 3207381 - DNA, 25 bp, Homo sapien
ctcttgcgagaggagaaaccggacc

SEQ ID NO: 3207382 - DNA, 25 bp, Homo sapien
tgaaagcaggcaccttcccattaac

SEQ ID NO: 3207383 - DNA, 25 bp, Homo sapien
cagtcagacaataggccagtcggat

SEQ ID NO: 3207384 - DNA, 25 bp, Homo sapien
tgggtgccctttccaagtgtattga

SEQ ID NO: 3207385 - DNA, 25 bp, Homo sapien
tctccagctttagattgacggggct

SEQ ID NO: 3207386 - DNA, 25 bp, Homo sapien
gctggtgattctagggttgggtgcc

SEQ ID NO: 3207387 - DNA, 25 bp, Homo sapien
tcctcttcccaaattgcgccatgca

SEQ ID NO: 3207388 - DNA, 25 bp, Homo sapien
cctggctggcgctcagtgggactat

SEQ ID NO: 3207389 - DNA, 25 bp, Homo sapien
ctcggaggctgctattgggcatgac

SEQ ID NO: 3207390 - DNA, 25 bp, Homo sapien
ctcagtgggactattaggagcctgg

SEQ ID NO: 3207391 - DNA, 25 bp, Homo sapien
tcggaggctgctattgggcatgaca

SEQ ID NO: 3207392 - DNA, 25 bp, Homo sapien
caacagcagactcccagctgcttcc

SEQ ID NO: 3207393 - DNA, 25 bp, Homo sapien
tcaacagcagactcccagctgcttc

SEQ ID NO: 3207394 - DNA, 25 bp, Homo sapien
acagcagactcccagctgcttccca

SEQ ID NO: 3207395 - DNA, 25 bp, Homo sapien
cagcagactcccagctgcttcccac

SEQ ID NO: 3207396 - DNA, 25 bp, Homo sapien
caaatgctcagcacgttgtgggtcc

SEQ ID NO: 3207397 - DNA, 25 bp, Homo sapien
cattcctgttcagcaccctgtgttc

SEQ ID NO: 3207398 - DNA, 25 bp, Homo sapien
gtggagagctcatttgcatacaaat

SEQ ID NO: 3207399 - DNA, 25 bp, Homo sapien
tgggtcctggttggcagcattcagc

SEQ ID NO: 3207400 - DNA, 25 bp, Homo sapien
caagggagcccatctggaaagagca

SEQ ID NO: 3207401 - DNA, 25 bp, Homo sapien
aggcatttgaggactggccccgcaa

SEQ ID NO: 3207402 - DNA, 25 bp, Homo sapien
ttgtgatgacttctagcagtaacag

SEQ ID NO: 3207403 - DNA, 25 bp, Homo sapien
gatgacttctagcagtaacagcttt

SEQ ID NO: 3207404 - DNA, 25 bp, Homo sapien
gggtaccgacatttgcagactggag

SEQ ID NO: 3207405 - DNA, 25 bp, Homo sapien
catgagttgtaagtcccaggcctgc

SEQ ID NO: 3207406 - DNA, 25 bp, Homo sapien
tctccaacgagagggaatgtactac

SEQ ID NO: 3207407 - DNA, 25 bp, Homo sapien
gtaatctaatctggccgtctgagca

SEQ ID NO: 3207408 - DNA, 25 bp, Homo sapien
gaggaaaatggtgaccgcgtgcaca

SEQ ID NO: 3207409 - DNA, 25 bp, Homo sapien
aggaggaaaatggtgaccgcgtgca

SEQ ID NO: 3207410 - DNA, 25 bp, Homo sapien
cgcctgacgcctgcccgagcctggg

SEQ ID NO: 3207411 - DNA, 25 bp, Homo sapien
gcggcgcctgacgcctgcccgagcc

SEQ ID NO: 3207412 - DNA, 25 bp, Homo sapien
tggaccggttatcctggcagggaca

SEQ ID NO: 3207413 - DNA, 25 bp, Homo sapien
caatctggaccggttatcctggcag

SEQ ID NO: 3207414 - DNA, 25 bp, Homo sapien
cagctggccaatctggaccggttat

SEQ ID NO: 3207415 - DNA, 25 bp, Homo sapien
ctcacagctggccaatctggaccgg

SEQ ID NO: 3207416 - DNA, 25 bp, Homo sapien
ctgggtctaagtgttccagtccatc

SEQ ID NO: 3207417 - DNA, 25 bp, Homo sapien
gggtctaagtgttccagtccatcac

SEQ ID NO: 3207418 - DNA, 25 bp, Homo sapien
tctgggtctaagtgttccagtccat

SEQ ID NO: 3207419 - DNA, 25 bp, Homo sapien
tgggtctaagtgttccagtccatca

SEQ ID NO: 3207420 - DNA, 25 bp, Homo sapien
aaatgtgttattggtctaagcacaa

SEQ ID NO: 3207421 - DNA, 25 bp, Homo sapien
gtcaccctgatgcagacgaagagaa

SEQ ID NO: 3207422 - DNA, 25 bp, Homo sapien
tctccgtagtgatgaaaagctctat

SEQ ID NO: 3207423 - DNA, 25 bp, Homo sapien
gatgtagccatcgttcctatcatag

SEQ ID NO: 3207424 - DNA, 25 bp, Homo sapien
tggaaacgggaggatagaaacagtc

SEQ ID NO: 3207425 - DNA, 25 bp, Homo sapien
aacgggaggatagaaacagtcatga

SEQ ID NO: 3207426 - DNA, 25 bp, Homo sapien
gccacatggaaacgggaggatagaa

SEQ ID NO: 3207427 - DNA, 25 bp, Homo sapien
ctgccacatggaaacgggaggatag

SEQ ID NO: 3207428 - DNA, 25 bp, Homo sapien
gcaagaactgtctgaggaccccact

SEQ ID NO: 3207429 - DNA, 25 bp, Homo sapien
tgtagccagaagtgcagcgacatct

SEQ ID NO: 3207430 - DNA, 25 bp, Homo sapien
tgaggaacagcagtcagcagtggaa

SEQ ID NO: 3207431 - DNA, 25 bp, Homo sapien
agcagccggacgacctatgtgagga

SEQ ID NO: 3207432 - DNA, 25 bp, Homo sapien
ggtctgggccctctagagctgtgtg

SEQ ID NO: 3207433 - DNA, 25 bp, Homo sapien
gcttggcggagggtggaaagagcac

SEQ ID NO: 3207434 - DNA, 25 bp, Homo sapien
caatggagctcaagtgcttggcgga

SEQ ID NO: 3207435 - DNA, 25 bp, Homo sapien
ggccctctagagctgtgtgggcaga

SEQ ID NO: 3207436 - DNA, 25 bp, Homo sapien
tggttggagtctctgtaacactgat

SEQ ID NO: 3207437 - DNA, 25 bp, Homo sapien
gtctctgtaacactgatggtcctaa

SEQ ID NO: 3207438 - DNA, 25 bp, Homo sapien
gtaacactgatggtcctaaattgct

SEQ ID NO: 3207439 - DNA, 25 bp, Homo sapien
gagtctctgtaacactgatggtcct

SEQ ID NO: 3207440 - DNA, 25 bp, Homo sapien
tatcggtcgggatctaaccaggaaa

SEQ ID NO: 3207441 - DNA, 25 bp, Homo sapien
tctcttctaggaatcagagctgacc

SEQ ID NO: 3207442 - DNA, 25 bp, Homo sapien
caggccggtccttagcagctctctt

SEQ ID NO: 3207443 - DNA, 25 bp, Homo sapien
ccagacaggactttgaggcagggat

SEQ ID NO: 3207444 - DNA, 25 bp, Homo sapien
tattggtcgtcaaaacactcacaag

SEQ ID NO: 3207445 - DNA, 25 bp, Homo sapien
tcaagagcaggagatatgaatccct

SEQ ID NO: 3207446 - DNA, 25 bp, Homo sapien
aacaagtaagcaaatgacctagggc

SEQ ID NO: 3207447 - DNA, 25 bp, Homo sapien
aatgtgtggttgcagccctgtgtct

SEQ ID NO: 3207448 - DNA, 25 bp, Homo sapien
ataccttgcagggatggcttgaagc

SEQ ID NO: 3207449 - DNA, 25 bp, Homo sapien
caatcttccgtttcatgaggcactg

SEQ ID NO: 3207450 - DNA, 25 bp, Homo sapien
tccgagactgtcagctggagctcct

SEQ ID NO: 3207451 - DNA, 25 bp, Homo sapien
tagtcagatgccttacacggcagct

SEQ ID NO: 3207452 - DNA, 25 bp, Homo sapien
gaatgttctttctccccagttttgc

SEQ ID NO: 3207453 - DNA, 25 bp, Homo sapien
ttctccccagttttgcccagaccca

SEQ ID NO: 3207454 - DNA, 25 bp, Homo sapien
ttctttctccccagttttgcccaga

SEQ ID NO: 3207455 - DNA, 25 bp, Homo sapien
cttttcagaatgttctttctcccca

SEQ ID NO: 3207456 - DNA, 25 bp, Homo sapien
atccatgcactgcttctgatgcatt

SEQ ID NO: 3207457 - DNA, 25 bp, Homo sapien
ggcagcctattaacacttggtgttt

SEQ ID NO: 3207458 - DNA, 25 bp, Homo sapien
taaaataggtggcatccagctgcat

SEQ ID NO: 3207459 - DNA, 25 bp, Homo sapien
tactgcctttgagccttgtgatcac

SEQ ID NO: 3207460 - DNA, 25 bp, Homo sapien
cttctacatagagaagcatggcagc

SEQ ID NO: 3207461 - DNA, 25 bp, Homo sapien
ctgccgagagagaaactggcacctc

SEQ ID NO: 3207462 - DNA, 25 bp, Homo sapien
gccgagagagaaactggcacctctt

SEQ ID NO: 3207463 - DNA, 25 bp, Homo sapien
ttctacatagagaagcatggcagcc

SEQ ID NO: 3207464 - DNA, 25 bp, Homo sapien
taactaagctgaccaactgtcccag

SEQ ID NO: 3207465 - DNA, 25 bp, Homo sapien
ggtggcctctacctgaaagttatat

SEQ ID NO: 3207466 - DNA, 25 bp, Homo sapien
tgatccttaaaagacctccatgagg

SEQ ID NO: 3207467 - DNA, 25 bp, Homo sapien
cccctcctgatatgtgtgtgagact

SEQ ID NO: 3207468 - DNA, 25 bp, Homo sapien
cagaggctgagatactagggtcccc

SEQ ID NO: 3207469 - DNA, 25 bp, Homo sapien
gctcttccgttgctgattggctgca

SEQ ID NO: 3207470 - DNA, 25 bp, Homo sapien
aacagggataactaaggtcagaggc

SEQ ID NO: 3207471 - DNA, 25 bp, Homo sapien
cctaagtaagctagtgaggtggcaa

SEQ ID NO: 3207472 - DNA, 25 bp, Homo sapien
cctgcttagcatcagaacattgcca

SEQ ID NO: 3207473 - DNA, 25 bp, Homo sapien
taagtcttaaccttgattaggcagc

SEQ ID NO: 3207474 - DNA, 25 bp, Homo sapien
tggaccacttaatctatgctgtagg

SEQ ID NO: 3207475 - DNA, 25 bp, Homo sapien
taggcagcatcgcatctgatctaag

SEQ ID NO: 3207476 - DNA, 25 bp, Homo sapien
ggctgcctccatgaatcctatacat

SEQ ID NO: 3207477 - DNA, 25 bp, Homo sapien
tggctctgctttactctccccttga

SEQ ID NO: 3207478 - DNA, 25 bp, Homo sapien
gatggctgcctccatgaatcctata

SEQ ID NO: 3207479 - DNA, 25 bp, Homo sapien
ggctctgctttactctccccttgat

SEQ ID NO: 3207480 - DNA, 25 bp, Homo sapien
tttgctgcctggacaacttcccctt

SEQ ID NO: 3207481 - DNA, 25 bp, Homo sapien
cctaagcttttgctgcctggacaac

SEQ ID NO: 3207482 - DNA, 25 bp, Homo sapien
gcttttgctgcctggacaacttccc

SEQ ID NO: 3207483 - DNA, 25 bp, Homo sapien
agcttttgctgcctggacaacttcc

SEQ ID NO: 3207484 - DNA, 25 bp, Homo sapien
catgcctcggtactttggatgccat

SEQ ID NO: 3207485 - DNA, 25 bp, Homo sapien
cagcatgcctcggtactttggatgc

SEQ ID NO: 3207486 - DNA, 25 bp, Homo sapien
ctctcagcatgcctcggtactttgg

SEQ ID NO: 3207487 - DNA, 25 bp, Homo sapien
ctgggatgtccctgaggctgccact

SEQ ID NO: 3207488 - DNA, 25 bp, Homo sapien
tttgcacggttcttattcagcacat

SEQ ID NO: 3207489 - DNA, 25 bp, Homo sapien
ggaaataaatcatgcacggcgcccc

SEQ ID NO: 3207490 - DNA, 25 bp, Homo sapien
ctggaaataaatcatgcacggcgcc

SEQ ID NO: 3207491 - DNA, 25 bp, Homo sapien
tgtatttgttttgcacggttcttat

SEQ ID NO: 3207492 - DNA, 25 bp, Homo sapien
ccaggcacgtggccattcattaaat

SEQ ID NO: 3207493 - DNA, 25 bp, Homo sapien
tgtggaaatgggtcagtgtccttca

SEQ ID NO: 3207494 - DNA, 25 bp, Homo sapien
agtgtccttcaatggcatcagcgag

SEQ ID NO: 3207495 - DNA, 25 bp, Homo sapien
ggcatcagcgagagaggcttttcca

SEQ ID NO: 3207496 - DNA, 25 bp, Homo sapien
gagtcagtctgtgggttattttcca

SEQ ID NO: 3207497 - DNA, 25 bp, Homo sapien
ttcacccgccatgtcacccggttta

SEQ ID NO: 3207498 - DNA, 25 bp, Homo sapien
cgttcacccgccatgtcacccggtt

SEQ ID NO: 3207499 - DNA, 25 bp, Homo sapien
ctcgttcacccgccatgtcacccgg

SEQ ID NO: 3207500 - DNA, 25 bp, Homo sapien
tcacccgccatgtcacccggtttac

SEQ ID NO: 3207501 - DNA, 25 bp, Homo sapien
gcaaattcatgaagcccaagagtac

SEQ ID NO: 3207502 - DNA, 25 bp, Homo sapien
caaattcatgaagcccaagagtaca

SEQ ID NO: 3207503 - DNA, 25 bp, Homo sapien
ttgcaaacggcagcaaattcatgaa

SEQ ID NO: 3207504 - DNA, 25 bp, Homo sapien
tctcctctccggcattttccctccg

SEQ ID NO: 3207505 - DNA, 25 bp, Homo sapien
tcctctccggcattttccctccgcg

SEQ ID NO: 3207506 - DNA, 25 bp, Homo sapien
ggcattttccctccgcgcctctcca

SEQ ID NO: 3207507 - DNA, 25 bp, Homo sapien
tctccggcattttccctccgcgcct

SEQ ID NO: 3207508 - DNA, 25 bp, Homo sapien
tcatctctaagtgctgcgtgggctc

SEQ ID NO: 3207509 - DNA, 25 bp, Homo sapien
gactcatctctaagtgctgcgtggg

SEQ ID NO: 3207510 - DNA, 25 bp, Homo sapien
ggaggtgcagtgctttgtgtgactc

SEQ ID NO: 3207511 - DNA, 25 bp, Homo sapien
ttgtgtgactcatctctaagtgctg

SEQ ID NO: 3207512 - DNA, 25 bp, Homo sapien
tagagccaactctgtgttatgaaaa

SEQ ID NO: 3207513 - DNA, 25 bp, Homo sapien
aattttgagtaggagtagccagaga

SEQ ID NO: 3207514 - DNA, 25 bp, Homo sapien
agtagccagagataaggatagagcc

SEQ ID NO: 3207515 - DNA, 25 bp, Homo sapien
ggatagagccaactctgtgttatga

SEQ ID NO: 3207516 - DNA, 25 bp, Homo sapien
ctgtgacgtgtgatccaagaaacgg

SEQ ID NO: 3207517 - DNA, 25 bp, Homo sapien
tgacgtgtgatccaagaaacggggg

SEQ ID NO: 3207518 - DNA, 25 bp, Homo sapien
gtgacgtgtgatccaagaaacgggg

SEQ ID NO: 3207519 - DNA, 25 bp, Homo sapien
tgtgacgtgtgatccaagaaacggg

SEQ ID NO: 3207520 - DNA, 25 bp, Homo sapien
tggatggcgaacgatcccgagaacc

SEQ ID NO: 3207521 - DNA, 25 bp, Homo sapien
gccagcatggatggcgaacgatccc

SEQ ID NO: 3207522 - DNA, 25 bp, Homo sapien
tggtgaaccaataactgaagaccag

SEQ ID NO: 3207523 - DNA, 25 bp, Homo sapien
gatcccgagaaccagatgtcccctt

SEQ ID NO: 3207524 - DNA, 25 bp, Homo sapien
taagaaaggcttttggacagtctct

SEQ ID NO: 3207525 - DNA, 25 bp, Homo sapien
actggtatgatcacacgagtggcaa

SEQ ID NO: 3207526 - DNA, 25 bp, Homo sapien
tctcttggagatttctgaggcccag

SEQ ID NO: 3207527 - DNA, 25 bp, Homo sapien
gataacacctttgtgcccaggagag

SEQ ID NO: 3207528 - DNA, 25 bp, Homo sapien
tgaatactgcaattaagagcctgac

SEQ ID NO: 3207529 - DNA, 25 bp, Homo sapien
gcaggtccagaacgttgctggtgac

SEQ ID NO: 3207530 - DNA, 25 bp, Homo sapien
atctggtaccactgccatctatggg

SEQ ID NO: 3207531 - DNA, 25 bp, Homo sapien
tcagcatgaatctctggagccagca

SEQ ID NO: 3207532 - DNA, 25 bp, Homo sapien
gatttgcacaggcgtttcccaaagg

SEQ ID NO: 3207533 - DNA, 25 bp, Homo sapien
atttgcacaggcgtttcccaaagga

SEQ ID NO: 3207534 - DNA, 25 bp, Homo sapien
ctggatttgcacaggcgtttcccaa

SEQ ID NO: 3207535 - DNA, 25 bp, Homo sapien
tggatttgcacaggcgtttcccaaa

SEQ ID NO: 3207536 - DNA, 25 bp, Homo sapien
ccttggagcattcacggaggtcatc

SEQ ID NO: 3207537 - DNA, 25 bp, Homo sapien
gtggctctcaacctccaagaatcga

SEQ ID NO: 3207538 - DNA, 25 bp, Homo sapien
tgagcgtgcgtgcacagacaagccg

SEQ ID NO: 3207539 - DNA, 25 bp, Homo sapien
tgaatgaaacaccagaaatcctccc

SEQ ID NO: 3207540 - DNA, 25 bp, Homo sapien
ctgcatctgctatgtctctacactg

SEQ ID NO: 3207541 - DNA, 25 bp, Homo sapien
cactggaacaaagtgagagctagga

SEQ ID NO: 3207542 - DNA, 25 bp, Homo sapien
gagctaggatttgagacctggccct

SEQ ID NO: 3207543 - DNA, 25 bp, Homo sapien
ctacactggaacaaagtgagagcta

SEQ ID NO: 3207544 - DNA, 25 bp, Homo sapien
ggcaaatgcattgaataacatcagg

SEQ ID NO: 3207545 - DNA, 25 bp, Homo sapien
aagtacctctcacatgggctttcca

SEQ ID NO: 3207546 - DNA, 25 bp, Homo sapien
gattccctggcatgaaaaggtggag

SEQ ID NO: 3207547 - DNA, 25 bp, Homo sapien
gactgacttagcgagagtttcccta

SEQ ID NO: 3207548 - DNA, 25 bp, Homo sapien
ttcacactgcagaatatgctgggca

SEQ ID NO: 3207549 - DNA, 25 bp, Homo sapien
aacagacgaaaacaacgagtctcca

SEQ ID NO: 3207550 - DNA, 25 bp, Homo sapien
tcacactgcagaatatgctgggcac

SEQ ID NO: 3207551 - DNA, 25 bp, Homo sapien
caacgagtctccatagacaccttca

SEQ ID NO: 3207552 - DNA, 25 bp, Homo sapien
gatcatggacaacggaagtgttcgt

SEQ ID NO: 3207553 - DNA, 25 bp, Homo sapien
catggacaacggaagtgttcgtgga

SEQ ID NO: 3207554 - DNA, 25 bp, Homo sapien
aaagcccttaagatcatggacaacg

SEQ ID NO: 3207555 - DNA, 25 bp, Homo sapien
cagcagtcctgaaaagcccttaaga

SEQ ID NO: 3207556 - DNA, 25 bp, Homo sapien
tgtcccatgtgaccgcccttgttaa

SEQ ID NO: 3207557 - DNA, 25 bp, Homo sapien
gcagttgtcccatgtgaccgccctt

SEQ ID NO: 3207558 - DNA, 25 bp, Homo sapien
gtgaccgcccttgttaaatcattaa

SEQ ID NO: 3207559 - DNA, 25 bp, Homo sapien
aagcagcagttgtcccatgtgaccg

SEQ ID NO: 3207560 - DNA, 25 bp, Homo sapien
tgcaagagaaatgttggtgaatgtg

SEQ ID NO: 3207561 - DNA, 25 bp, Homo sapien
ctgcaagagaaatgttggtgaatgt

SEQ ID NO: 3207562 - DNA, 25 bp, Homo sapien
ctggcatccagtagccgatgtcttt

SEQ ID NO: 3207563 - DNA, 25 bp, Homo sapien
gtatccagcagcttccaataccgca

SEQ ID NO: 3207564 - DNA, 25 bp, Homo sapien
accgcactcggctggcatccagtag

SEQ ID NO: 3207565 - DNA, 25 bp, Homo sapien
ttccaataccgcactcggctggcat

SEQ ID NO: 3207566 - DNA, 25 bp, Homo sapien
acttccttctcctttctctcgcctt

SEQ ID NO: 3207567 - DNA, 25 bp, Homo sapien
tccttctcctttctctcgccttcct

SEQ ID NO: 3207568 - DNA, 25 bp, Homo sapien
tcaagagttagtagaaacttccttc

SEQ ID NO: 3207569 - DNA, 25 bp, Homo sapien
caagagttagtagaaacttccttct

SEQ ID NO: 3207570 - DNA, 25 bp, Homo sapien
taagggttcttaagagccaaggatc

SEQ ID NO: 3207571 - DNA, 25 bp, Homo sapien
gggcaagtagaccacattgacagct

SEQ ID NO: 3207572 - DNA, 25 bp, Homo sapien
tccctatgggcaaggtaattcctga

SEQ ID NO: 3207573 - DNA, 25 bp, Homo sapien
tgtacagccattaagactggcagct

SEQ ID NO: 3207574 - DNA, 25 bp, Homo sapien
tttcacattgaacaagctgaggaga

SEQ ID NO: 3207575 - DNA, 25 bp, Homo sapien
ttcacattgaacaagctgaggagaa

SEQ ID NO: 3207576 - DNA, 25 bp, Homo sapien
tcaccccagtcgtccaatctcaaag

SEQ ID NO: 3207577 - DNA, 25 bp, Homo sapien
cagtcgtccaatctcaaagcaccgg

SEQ ID NO: 3207578 - DNA, 25 bp, Homo sapien
ctgcgcattagctgcccgcctcacc

SEQ ID NO: 3207579 - DNA, 25 bp, Homo sapien
ccgcctcaccccagtcgtccaatct

SEQ ID NO: 3207580 - DNA, 25 bp, Homo sapien
ctccgcccactccgcccacagaacg

SEQ ID NO: 3207581 - DNA, 25 bp, Homo sapien
gctccgcccactccgcccacagaac

SEQ ID NO: 3207582 - DNA, 25 bp, Homo sapien
ggccgggacacttggaccaactgac

SEQ ID NO: 3207583 - DNA, 25 bp, Homo sapien
agaaggagggatccggccgacacct

SEQ ID NO: 3207584 - DNA, 25 bp, Homo sapien
ttccgcttgaggcgccgggagaagg

SEQ ID NO: 3207585 - DNA, 25 bp, Homo sapien
gccgacacctcaggccgggacactt

SEQ ID NO: 3207586 - DNA, 25 bp, Homo sapien
acacagtaaattcgggtatctagcc

SEQ ID NO: 3207587 - DNA, 25 bp, Homo sapien
aaatggacatggttcgctgagattc

SEQ ID NO: 3207588 - DNA, 25 bp, Homo sapien
taagaccaagtctgctcaagcgtgg

SEQ ID NO: 3207589 - DNA, 25 bp, Homo sapien
tcagctctgatgtatggctaggtca

SEQ ID NO: 3207590 - DNA, 25 bp, Homo sapien
tcaagtgtgtgttggagttccaaca

SEQ ID NO: 3207591 - DNA, 25 bp, Homo sapien
ttcttccttaactgcatctactctt

SEQ ID NO: 3207592 - DNA, 25 bp, Homo sapien
tttcttccttaactgcatctactct

SEQ ID NO: 3207593 - DNA, 25 bp, Homo sapien
tcttccttaactgcatctactcttg

SEQ ID NO: 3207594 - DNA, 25 bp, Homo sapien
caagatggtggacagggtacataaa

SEQ ID NO: 3207595 - DNA, 25 bp, Homo sapien
tgacaagccctagctgagacagtat

SEQ ID NO: 3207596 - DNA, 25 bp, Homo sapien
ttgcagaagttgacccactgggtac

SEQ ID NO: 3207597 - DNA, 25 bp, Homo sapien
tggtcactttttcacaacacggtgg

SEQ ID NO: 3207598 - DNA, 25 bp, Homo sapien
gatttccttaccaaatggaatctag

SEQ ID NO: 3207599 - DNA, 25 bp, Homo sapien
tgttaaaggatgactaaaactcttc

SEQ ID NO: 3207600 - DNA, 25 bp, Homo sapien
ccttaagctacattagtggatctct

SEQ ID NO: 3207601 - DNA, 25 bp, Homo sapien
aaactcttcaaacccagtagcaggg

SEQ ID NO: 3207602 - DNA, 25 bp, Homo sapien
tacaaaagggactagatcacaggga

SEQ ID NO: 3207603 - DNA, 25 bp, Homo sapien
ggtgttgccccaaaccatattggtg

SEQ ID NO: 3207604 - DNA, 25 bp, Homo sapien
tcacctggtagctgagcctgacttc

SEQ ID NO: 3207605 - DNA, 25 bp, Homo sapien
gatgtgacattaactagttggaact

SEQ ID NO: 3207606 - DNA, 25 bp, Homo sapien
cattagcaaacagtgatagcttgac

SEQ ID NO: 3207607 - DNA, 25 bp, Homo sapien
cagtttggtcgttgttgctatgtag

SEQ ID NO: 3207608 - DNA, 25 bp, Homo sapien
gctaggacttccagataaagttgtt

SEQ ID NO: 3207609 - DNA, 25 bp, Homo sapien
caagtctagtagtctattggatgag

SEQ ID NO: 3207610 - DNA, 25 bp, Homo sapien
gaggccgttattccagcggttgcca

SEQ ID NO: 3207611 - DNA, 25 bp, Homo sapien
ttactttgccgccagagggctgaac

SEQ ID NO: 3207612 - DNA, 25 bp, Homo sapien
gctgcagcgagctagggtcttgact

SEQ ID NO: 3207613 - DNA, 25 bp, Homo sapien
gatcaaaataggctcggctgtctca

SEQ ID NO: 3207614 - DNA, 25 bp, Homo sapien
gcgcggttagtagtcgctgctgcgc

SEQ ID NO: 3207615 - DNA, 25 bp, Homo sapien
ggttagtagtcgctgctgcgcggcc

SEQ ID NO: 3207616 - DNA, 25 bp, Homo sapien
ttagtagtcgctgctgcgcggccgc

SEQ ID NO: 3207617 - DNA, 25 bp, Homo sapien
gcggttagtagtcgctgctgcgcgg

SEQ ID NO: 3207618 - DNA, 25 bp, Homo sapien
caagggaatgctgctgcggtgctca

SEQ ID NO: 3207619 - DNA, 25 bp, Homo sapien
ctcagaaagaggcatttgaaccctg

SEQ ID NO: 3207620 - DNA, 25 bp, Homo sapien
ctgactgagatacagcgagagtgaa

SEQ ID NO: 3207621 - DNA, 25 bp, Homo sapien
tgagatacagcgagagtgaaagatg

SEQ ID NO: 3207622 - DNA, 25 bp, Homo sapien
tcagcagctggaacctccgccaccg

SEQ ID NO: 3207623 - DNA, 25 bp, Homo sapien
caagggcgtcccgcaggacaggatg

SEQ ID NO: 3207624 - DNA, 25 bp, Homo sapien
aggctcttgtcacttactgcttccc

SEQ ID NO: 3207625 - DNA, 25 bp, Homo sapien
atccttggcttcgaccgccttccag

SEQ ID NO: 3207626 - DNA, 25 bp, Homo sapien
tggaccatccagtacatcaagctga

SEQ ID NO: 3207627 - DNA, 25 bp, Homo sapien
gggactctgggaaaacagctattaa

SEQ ID NO: 3207628 - DNA, 25 bp, Homo sapien
tctggttttcagtagagctcagcca

SEQ ID NO: 3207629 - DNA, 25 bp, Homo sapien
gctccacagcctagaagccaggttt

SEQ ID NO: 3207630 - DNA, 25 bp, Homo sapien
tcacaggagcggaagaactaggggg

SEQ ID NO: 3207631 - DNA, 25 bp, Homo sapien
aacgacggaacactcccttcaagca

SEQ ID NO: 3207632 - DNA, 25 bp, Homo sapien
caaacagccggcaacggaaacgacg

SEQ ID NO: 3207633 - DNA, 25 bp, Homo sapien
ttcaagcaccgcgacccggaagtca

SEQ ID NO: 3207634 - DNA, 25 bp, Homo sapien
tccattcaataggtcaagggcagaa

SEQ ID NO: 3207635 - DNA, 25 bp, Homo sapien
tgaaaatcaagccatctagtccgcg

SEQ ID NO: 3207636 - DNA, 25 bp, Homo sapien
tcattaggacaaaagcgcagaactg

SEQ ID NO: 3207637 - DNA, 25 bp, Homo sapien
tcgaagttcgaagtacccgcaggtc

SEQ ID NO: 3207638 - DNA, 25 bp, Homo sapien
aatattcgctgcaattcacacttcc

SEQ ID NO: 3207639 - DNA, 25 bp, Homo sapien
ttcccagtcatctgtcgtaatagcc

SEQ ID NO: 3207640 - DNA, 25 bp, Homo sapien
tgtcctttgtgcacctacataggta

SEQ ID NO: 3207641 - DNA, 25 bp, Homo sapien
aaatcgaaaaaagtgcccatagaag

SEQ ID NO: 3207642 - DNA, 25 bp, Homo sapien
ttattcttggagtatgtcaaggaat

SEQ ID NO: 3207643 - DNA, 25 bp, Homo sapien
ttcttggagtatgtcaaggaatttt

SEQ ID NO: 3207644 - DNA, 25 bp, Homo sapien
tattcttggagtatgtcaaggaatt

SEQ ID NO: 3207645 - DNA, 25 bp, Homo sapien
cttattcttggagtatgtcaaggaa

SEQ ID NO: 3207646 - DNA, 25 bp, Homo sapien
gggaaaatttcactcaatgctcact

SEQ ID NO: 3207647 - DNA, 25 bp, Homo sapien
tgaggacacagtctaaaagacgact

SEQ ID NO: 3207648 - DNA, 25 bp, Homo sapien
cagggttttctctatcctaagttgc

SEQ ID NO: 3207649 - DNA, 25 bp, Homo sapien
tatgtccacgttaagttttctagag

SEQ ID NO: 3207650 - DNA, 25 bp, Homo sapien
gacggatttgaccaaggcactggag

SEQ ID NO: 3207651 - DNA, 25 bp, Homo sapien
taagcttggcatgattttaccacac

SEQ ID NO: 3207652 - DNA, 25 bp, Homo sapien
cactggagttcttaaatgtagcatc

SEQ ID NO: 3207653 - DNA, 25 bp, Homo sapien
caaagaccctggttgaatactgaac

SEQ ID NO: 3207654 - DNA, 25 bp, Homo sapien
ggacttttgcacctatattcatgaa

SEQ ID NO: 3207655 - DNA, 25 bp, Homo sapien
tcatgaaggacattgaactgtaatt

SEQ ID NO: 3207656 - DNA, 25 bp, Homo sapien
caatttgctagcattctgttaagga

SEQ ID NO: 3207657 - DNA, 25 bp, Homo sapien
tgatactggccccataaagtgtgtt

SEQ ID NO: 3207658 - DNA, 25 bp, Homo sapien
cattgaatccatagatcgatttggg

SEQ ID NO: 3207659 - DNA, 25 bp, Homo sapien
gtcctccaatggatgaatacagtgt

SEQ ID NO: 3207660 - DNA, 25 bp, Homo sapien
ccatacatacccagttgttccagca

SEQ ID NO: 3207661 - DNA, 25 bp, Homo sapien
tacgtgggctattctaggttccttc

SEQ ID NO: 3207662 - DNA, 25 bp, Homo sapien
caacataacgtttctaggattcatc

SEQ ID NO: 3207663 - DNA, 25 bp, Homo sapien
tcatcccagaaagttcgtttatgcc

SEQ ID NO: 3207664 - DNA, 25 bp, Homo sapien
gcttagctgtatgcccataaatgga

SEQ ID NO: 3207665 - DNA, 25 bp, Homo sapien
tagggcagagtcaagacgagaaacc

SEQ ID NO: 3207666 - DNA, 25 bp, Homo sapien
gagtcaacaggttctcagctgatga

SEQ ID NO: 3207667 - DNA, 25 bp, Homo sapien
tctctagggctaaattcacatatat

SEQ ID NO: 3207668 - DNA, 25 bp, Homo sapien
catgatgtaccagaggaaggcttcc

SEQ ID NO: 3207669 - DNA, 25 bp, Homo sapien
gagctgccaccatagtgtttacgaa

SEQ ID NO: 3207670 - DNA, 25 bp, Homo sapien
gtccacttcactctgaacaacatgt

SEQ ID NO: 3207671 - DNA, 25 bp, Homo sapien
tgtccacttcactctgaacaacatg

SEQ ID NO: 3207672 - DNA, 25 bp, Homo sapien
aatgcataataaaaaagaataatgt

SEQ ID NO: 3207673 - DNA, 25 bp, Homo sapien
taaatgcataataaaaaagaataat

SEQ ID NO: 3207674 - DNA, 25 bp, Homo sapien
gcataataaaaaagaataatgtaaa

SEQ ID NO: 3207675 - DNA, 25 bp, Homo sapien
tataaatgcataataaaaaagaata

SEQ ID NO: 3207676 - DNA, 25 bp, Homo sapien
tcttgtgaagtgagagcgctgaatc

SEQ ID NO: 3207677 - DNA, 25 bp, Homo sapien
gcaatgcacctaactcagaatggag

SEQ ID NO: 3207678 - DNA, 25 bp, Homo sapien
caagagatacaggttctagtcccga

SEQ ID NO: 3207679 - DNA, 25 bp, Homo sapien
ctatgtcaacataccagcgctggga

SEQ ID NO: 3207680 - DNA, 25 bp, Homo sapien
ccaaatacagctgtttataaccagt

SEQ ID NO: 3207681 - DNA, 25 bp, Homo sapien
catgagtagctcttcatgctgtagg

SEQ ID NO: 3207682 - DNA, 25 bp, Homo sapien
tgtttataaccagttatctgcagta

SEQ ID NO: 3207683 - DNA, 25 bp, Homo sapien
ttttcctcacactttctacatccaa

SEQ ID NO: 3207684 - DNA, 25 bp, Homo sapien
tgattaacccaagtatgcccatgcc

SEQ ID NO: 3207685 - DNA, 25 bp, Homo sapien
ctagcgtttaacttcttcgtgggca

SEQ ID NO: 3207686 - DNA, 25 bp, Homo sapien
tctgtcttgggatcatcaccctgaa

SEQ ID NO: 3207687 - DNA, 25 bp, Homo sapien
tcagcccactgcttggagattctag

SEQ ID NO: 3207688 - DNA, 25 bp, Homo sapien
tcttcatattgttgccaacacatta

SEQ ID NO: 3207689 - DNA, 25 bp, Homo sapien
cttcatattgttgccaacacattag

SEQ ID NO: 3207690 - DNA, 25 bp, Homo sapien
tcatattgttgccaacacattagca

SEQ ID NO: 3207691 - DNA, 25 bp, Homo sapien
atattgttgccaacacattagcaaa

SEQ ID NO: 3207692 - DNA, 25 bp, Homo sapien
attttggatgatttgaacgggaaag

SEQ ID NO: 3207693 - DNA, 25 bp, Homo sapien
tgaacgggaaagaatctgatgagct

SEQ ID NO: 3207694 - DNA, 25 bp, Homo sapien
gaatctgatgagcttcactagtgta

SEQ ID NO: 3207695 - DNA, 25 bp, Homo sapien
gatgagcttcactagtgtaattttc

SEQ ID NO: 3207696 - DNA, 25 bp, Homo sapien
aggaacaaggttatagagatgaaac

SEQ ID NO: 3207697 - DNA, 25 bp, Homo sapien
ttccattgttggtataccaggaaca

SEQ ID NO: 3207698 - DNA, 25 bp, Homo sapien
gattccaactattgcataagaatac

SEQ ID NO: 3207699 - DNA, 25 bp, Homo sapien
tgtaagattgattccaactattgca

SEQ ID NO: 3207700 - DNA, 25 bp, Homo sapien
tggaatactcttggggacccatctt

SEQ ID NO: 3207701 - DNA, 25 bp, Homo sapien
agatgtgtctacatgtgaaatattg

SEQ ID NO: 3207702 - DNA, 25 bp, Homo sapien
gtatggaatactcttggggacccat

SEQ ID NO: 3207703 - DNA, 25 bp, Homo sapien
gaaatattgccttttataatcagca

SEQ ID NO: 3207704 - DNA, 25 bp, Homo sapien
tttcaagcaagggaccagatggtac

SEQ ID NO: 3207705 - DNA, 25 bp, Homo sapien
taaacttcccagagaagagcacgtc

SEQ ID NO: 3207706 - DNA, 25 bp, Homo sapien
tgaggtgctccctatatctagtaag

SEQ ID NO: 3207707 - DNA, 25 bp, Homo sapien
aacatggcgattgtattaggcggca

SEQ ID NO: 3207708 - DNA, 25 bp, Homo sapien
tcttatttgtagctaattctcttct

SEQ ID NO: 3207709 - DNA, 25 bp, Homo sapien
gttttcttatttgtagctaattctc

SEQ ID NO: 3207710 - DNA, 25 bp, Homo sapien
tttgtagctaattctcttcttaaaa

SEQ ID NO: 3207711 - DNA, 25 bp, Homo sapien
tattttttacattagtctctttaca

SEQ ID NO: 3207712 - DNA, 25 bp, Homo sapien
caagaggcatggattaccaaggagt

SEQ ID NO: 3207713 - DNA, 25 bp, Homo sapien
tatattcaccatttggatcatggag

SEQ ID NO: 3207714 - DNA, 25 bp, Homo sapien
ctttcagaggtggtgactatattca

SEQ ID NO: 3207715 - DNA, 25 bp, Homo sapien
aaccaccccagtcctactttgtatg

SEQ ID NO: 3207716 - DNA, 25 bp, Homo sapien
gctacattacaatccagtaaaagtc

SEQ ID NO: 3207717 - DNA, 25 bp, Homo sapien
aagtaagtgctacattacaatccag

SEQ ID NO: 3207718 - DNA, 25 bp, Homo sapien
caatccagtaaaagtcctttaatct

SEQ ID NO: 3207719 - DNA, 25 bp, Homo sapien
cattacaatccagtaaaagtccttt

SEQ ID NO: 3207720 - DNA, 25 bp, Homo sapien
taaattctgttgaatgtgcaaaatg

SEQ ID NO: 3207721 - DNA, 25 bp, Homo sapien
ctttggagaacagtgtataaacaat

SEQ ID NO: 3207722 - DNA, 25 bp, Homo sapien
gtagttcgcatgactctacagaggg

SEQ ID NO: 3207723 - DNA, 25 bp, Homo sapien
cactgattgtccactagctttctta

SEQ ID NO: 3207724 - DNA, 25 bp, Homo sapien
tatgaaaatggaaagtaagcctccc

SEQ ID NO: 3207725 - DNA, 25 bp, Homo sapien
tataatcgttgacagcacttgctgc

SEQ ID NO: 3207726 - DNA, 25 bp, Homo sapien
taatcacagaaacccaaaaggaggc

SEQ ID NO: 3207727 - DNA, 25 bp, Homo sapien
tcccaaagttgagatgtcccctaca

SEQ ID NO: 3207728 - DNA, 25 bp, Homo sapien
caacactgtaaataggtaatcagca

SEQ ID NO: 3207729 - DNA, 25 bp, Homo sapien
tcagcagttaacaagtcaagaaaat

SEQ ID NO: 3207730 - DNA, 25 bp, Homo sapien
cagcaacacgataagaaaaataaga

SEQ ID NO: 3207731 - DNA, 25 bp, Homo sapien
tgtatattctgatttacctacagca

SEQ ID NO: 3207732 - DNA, 25 bp, Homo sapien
cacacagaaatgctatgcagctgta

SEQ ID NO: 3207733 - DNA, 25 bp, Homo sapien
ttatttcaaagtaagatatacacac

SEQ ID NO: 3207734 - DNA, 25 bp, Homo sapien
gatgtattaacatgtaaatagatcc

SEQ ID NO: 3207735 - DNA, 25 bp, Homo sapien
tgcagctgtaaaaaaatgatgtatt

SEQ ID NO: 3207736 - DNA, 25 bp, Homo sapien
tgaagcagtaacacgaaggcacaca

SEQ ID NO: 3207737 - DNA, 25 bp, Homo sapien
tgatgcatgcatgttacaccttggg

SEQ ID NO: 3207738 - DNA, 25 bp, Homo sapien
caaggtggtcattctgcaggctaga

SEQ ID NO: 3207739 - DNA, 25 bp, Homo sapien
gctggagtcagtcaacacttggtga

SEQ ID NO: 3207740 - DNA, 25 bp, Homo sapien
catggaatctttcagcaaagccaaa

SEQ ID NO: 3207741 - DNA, 25 bp, Homo sapien
gatgaaaacgaatcttcatggaatc

SEQ ID NO: 3207742 - DNA, 25 bp, Homo sapien
tagcacctgtagtaaccttttcaat

SEQ ID NO: 3207743 - DNA, 25 bp, Homo sapien
tcaaattcatcattagcacctgtag

SEQ ID NO: 3207744 - DNA, 25 bp, Homo sapien
tcgtcaagattgagacagcactgat

SEQ ID NO: 3207745 - DNA, 25 bp, Homo sapien
tgaagtaatataggacatctagagg

SEQ ID NO: 3207746 - DNA, 25 bp, Homo sapien
ttctctaaggacaagaatcgtcaag

SEQ ID NO: 3207747 - DNA, 25 bp, Homo sapien
tgtatagatgtgatcatcagggctg

SEQ ID NO: 3207748 - DNA, 25 bp, Homo sapien
ctctactgattagcagggcagtttt

SEQ ID NO: 3207749 - DNA, 25 bp, Homo sapien
tactgattagcagggcagtttttac

SEQ ID NO: 3207750 - DNA, 25 bp, Homo sapien
ctcccaggagttcactatttggtgc

SEQ ID NO: 3207751 - DNA, 25 bp, Homo sapien
tttggtgcctaacttattgcagaca

SEQ ID NO: 3207752 - DNA, 25 bp, Homo sapien
tcttctcaacttgtctgcatcttat

SEQ ID NO: 3207753 - DNA, 25 bp, Homo sapien
ttgtctgcatcttatcttgattttc

SEQ ID NO: 3207754 - DNA, 25 bp, Homo sapien
tcttgtctctccagatcccttttct

SEQ ID NO: 3207755 - DNA, 25 bp, Homo sapien
caacttgtctgcatcttatcttgat

SEQ ID NO: 3207756 - DNA, 25 bp, Homo sapien
ctctgctgctttcatgccacatgta

SEQ ID NO: 3207757 - DNA, 25 bp, Homo sapien
atcttgcacagtgccaagggtggga

SEQ ID NO: 3207758 - DNA, 25 bp, Homo sapien
catgtagggccggagaaactgctct

SEQ ID NO: 3207759 - DNA, 25 bp, Homo sapien
gggtcgtgccatgcatcttgcacag

SEQ ID NO: 3207760 - DNA, 25 bp, Homo sapien
gatctgccacaatgtgtcgtcggca

SEQ ID NO: 3207761 - DNA, 25 bp, Homo sapien
cttttgttaggttgtcagtgtcaaa

SEQ ID NO: 3207762 - DNA, 25 bp, Homo sapien
tgtgtcgtcggcattgtctggcccc

SEQ ID NO: 3207763 - DNA, 25 bp, Homo sapien
agctggtccggcgtgcaggcaccat

SEQ ID NO: 3207764 - DNA, 25 bp, Homo sapien
ttttggtagtctcttgatgttagag

SEQ ID NO: 3207765 - DNA, 25 bp, Homo sapien
gaagccaagcaaaatggctctcaaa

SEQ ID NO: 3207766 - DNA, 25 bp, Homo sapien
taaaagtagtggtttgagaatgaaa

SEQ ID NO: 3207767 - DNA, 25 bp, Homo sapien
tctcaaagaggcgaagatgctgaac

SEQ ID NO: 3207768 - DNA, 25 bp, Homo sapien
aaaagcaccttctaggatcaccctt

SEQ ID NO: 3207769 - DNA, 25 bp, Homo sapien
aaagcaccttctaggatcacccttc

SEQ ID NO: 3207770 - DNA, 25 bp, Homo sapien
cttctaggatcacccttcaaacttc

SEQ ID NO: 3207771 - DNA, 25 bp, Homo sapien
gcaccttctaggatcacccttcaaa

SEQ ID NO: 3207772 - DNA, 25 bp, Homo sapien
tcatattcctgcagtgccagtgtct

SEQ ID NO: 3207773 - DNA, 25 bp, Homo sapien
taagctggcaaaatcccctcctaaa

SEQ ID NO: 3207774 - DNA, 25 bp, Homo sapien
tcctaaaacactgccaacgtcatat

SEQ ID NO: 3207775 - DNA, 25 bp, Homo sapien
catggcctgcctaactggcactctt

SEQ ID NO: 3207776 - DNA, 25 bp, Homo sapien
tccacttccagttaagggctcctct

SEQ ID NO: 3207777 - DNA, 25 bp, Homo sapien
ttacccatcctgtgaaaaggctctt

SEQ ID NO: 3207778 - DNA, 25 bp, Homo sapien
aaggctcttttgttacagattcaac

SEQ ID NO: 3207779 - DNA, 25 bp, Homo sapien
tccagttaagggctcctctggttgt

SEQ ID NO: 3207780 - DNA, 25 bp, Homo sapien
caagactgttcttaaatggaaggca

SEQ ID NO: 3207781 - DNA, 25 bp, Homo sapien
tagacagataccagaccaattttgc

SEQ ID NO: 3207782 - DNA, 25 bp, Homo sapien
tgaaaagccacaaatgcaagactgt

SEQ ID NO: 3207783 - DNA, 25 bp, Homo sapien
aaggcatagtcagcgagggtaaatc

SEQ ID NO: 3207784 - DNA, 25 bp, Homo sapien
gctgtgctcctaaaggcctgaaccc

SEQ ID NO: 3207785 - DNA, 25 bp, Homo sapien
ccagtgctggcaggctccggttgct

SEQ ID NO: 3207786 - DNA, 25 bp, Homo sapien
cctggttgtcccgctcgggcagcat

SEQ ID NO: 3207787 - DNA, 25 bp, Homo sapien
ctgtggaccccgcaacccatctggc

SEQ ID NO: 3207788 - DNA, 25 bp, Homo sapien
tacctcattgctttatctgagctac

SEQ ID NO: 3207789 - DNA, 25 bp, Homo sapien
gctttatctgagctacttgttcctt

SEQ ID NO: 3207790 - DNA, 25 bp, Homo sapien
ttgctttatctgagctacttgttcc

SEQ ID NO: 3207791 - DNA, 25 bp, Homo sapien
tcattgctttatctgagctacttgt

SEQ ID NO: 3207792 - DNA, 25 bp, Homo sapien
gatgcaggtgactgtctaattcatt

SEQ ID NO: 3207793 - DNA, 25 bp, Homo sapien
ccgtatggatatctagttgtcccag

SEQ ID NO: 3207794 - DNA, 25 bp, Homo sapien
cttttccgtatggatatctagttgt

SEQ ID NO: 3207795 - DNA, 25 bp, Homo sapien
tgcaggtgactgtctaattcattct

SEQ ID NO: 3207796 - DNA, 25 bp, Homo sapien
agtgccgaacggtgccttgatttgg

SEQ ID NO: 3207797 - DNA, 25 bp, Homo sapien
cagtgccgaacggtgccttgatttg

SEQ ID NO: 3207798 - DNA, 25 bp, Homo sapien
tgacaacagtgccgaacggtgcctt

SEQ ID NO: 3207799 - DNA, 25 bp, Homo sapien
caacagtgccgaacggtgccttgat

SEQ ID NO: 3207800 - DNA, 25 bp, Homo sapien
tggccttcagttggcacaggtagaa

SEQ ID NO: 3207801 - DNA, 25 bp, Homo sapien
ccttggccttcagttggcacaggta

SEQ ID NO: 3207802 - DNA, 25 bp, Homo sapien
ggccttcagttggcacaggtagaaa

SEQ ID NO: 3207803 - DNA, 25 bp, Homo sapien
ttggccttcagttggcacaggtaga

SEQ ID NO: 3207804 - DNA, 25 bp, Homo sapien
ttttggatatggtgttccagaggca

SEQ ID NO: 3207805 - DNA, 25 bp, Homo sapien
ttggatatggtgttccagaggcagc

SEQ ID NO: 3207806 - DNA, 25 bp, Homo sapien
tggatatggtgttccagaggcagca

SEQ ID NO: 3207807 - DNA, 25 bp, Homo sapien
tgttttggatatggtgttccagagg

SEQ ID NO: 3207808 - DNA, 25 bp, Homo sapien
gtaaaaataggtacagatatgctac

SEQ ID NO: 3207809 - DNA, 25 bp, Homo sapien
agtaaaaataggtacagatatgcta

SEQ ID NO: 3207810 - DNA, 25 bp, Homo sapien
cacagaaggaagtgacaggcgttgt

SEQ ID NO: 3207811 - DNA, 25 bp, Homo sapien
ttccttatggaagactgcacagaag

SEQ ID NO: 3207812 - DNA, 25 bp, Homo sapien
tattgattacccatagagatagctc

SEQ ID NO: 3207813 - DNA, 25 bp, Homo sapien
gccaaggctaaggaacactacgctg

SEQ ID NO: 3207814 - DNA, 25 bp, Homo sapien
catttagttggcaaacaatctagaa

SEQ ID NO: 3207815 - DNA, 25 bp, Homo sapien
tctagaatcgtttcatagtcagcag

SEQ ID NO: 3207816 - DNA, 25 bp, Homo sapien
caaacaatctagaatcgtttcatag

SEQ ID NO: 3207817 - DNA, 25 bp, Homo sapien
agcatcacatttagttggcaaacaa

SEQ ID NO: 3207818 - DNA, 25 bp, Homo sapien
gggagcccgtagaagtgaaagtgcc

SEQ ID NO: 3207819 - DNA, 25 bp, Homo sapien
cagagggagcccgtagaagtgaaag

SEQ ID NO: 3207820 - DNA, 25 bp, Homo sapien
cacagagggagcccgtagaagtgaa

SEQ ID NO: 3207821 - DNA, 25 bp, Homo sapien
gagcccgtagaagtgaaagtgccat

SEQ ID NO: 3207822 - DNA, 25 bp, Homo sapien
gtgtaacctaggctcctggaagaca

SEQ ID NO: 3207823 - DNA, 25 bp, Homo sapien
gttccagtcttctctgcacgtttac

SEQ ID NO: 3207824 - DNA, 25 bp, Homo sapien
cagtgtaacctaggctcctggaaga

SEQ ID NO: 3207825 - DNA, 25 bp, Homo sapien
agtgtaacctaggctcctggaagac

SEQ ID NO: 3207826 - DNA, 25 bp, Homo sapien
tcaaggtttagagctgcgggaaaac

SEQ ID NO: 3207827 - DNA, 25 bp, Homo sapien
gaatcttgtaccagactccagactc

SEQ ID NO: 3207828 - DNA, 25 bp, Homo sapien
tgttgtgttggactccagcgcccgg

SEQ ID NO: 3207829 - DNA, 25 bp, Homo sapien
gggtcgctccttaccgaatcttgta

SEQ ID NO: 3207830 - DNA, 25 bp, Homo sapien
aggcctgctggtgggtacccttgat

SEQ ID NO: 3207831 - DNA, 25 bp, Homo sapien
caggtggcctacagaaacctaccat

SEQ ID NO: 3207832 - DNA, 25 bp, Homo sapien
ggcagcaggtggcctacagaaacct

SEQ ID NO: 3207833 - DNA, 25 bp, Homo sapien
cagcaggtggcctacagaaacctac

SEQ ID NO: 3207834 - DNA, 25 bp, Homo sapien
gcaggtggcctacagaaacctacca

SEQ ID NO: 3207835 - DNA, 25 bp, Homo sapien
gcagttgaattacgtaagaggatac

SEQ ID NO: 3207836 - DNA, 25 bp, Homo sapien
tatcgatgctctcaattattggcag

SEQ ID NO: 3207837 - DNA, 25 bp, Homo sapien
tttcgttgccaagttgttcttcagc

SEQ ID NO: 3207838 - DNA, 25 bp, Homo sapien
tacatgaattagaagaagggttgac

SEQ ID NO: 3207839 - DNA, 25 bp, Homo sapien
ttgatgaactccgtataccagaggg

SEQ ID NO: 3207840 - DNA, 25 bp, Homo sapien
gcattgatgaactccgtataccaga

SEQ ID NO: 3207841 - DNA, 25 bp, Homo sapien
ttgtagcattgatgaactccgtata

SEQ ID NO: 3207842 - DNA, 25 bp, Homo sapien
tgaactccgtataccagagggaaaa

SEQ ID NO: 3207843 - DNA, 25 bp, Homo sapien
gctgaagattgctcccacgttatcc

SEQ ID NO: 3207844 - DNA, 25 bp, Homo sapien
cgtacccatggttttgcacagtcaa

SEQ ID NO: 3207845 - DNA, 25 bp, Homo sapien
gaggtccctcagtcttatccaggtg

SEQ ID NO: 3207846 - DNA, 25 bp, Homo sapien
tattttcaggtcttccgagctcaat

SEQ ID NO: 3207847 - DNA, 25 bp, Homo sapien
ccacacactgttgttagagtggttt

SEQ ID NO: 3207848 - DNA, 25 bp, Homo sapien
cagccaccgcaatcggtactattta

SEQ ID NO: 3207849 - DNA, 25 bp, Homo sapien
acaacacatgtgactcctgagccca

SEQ ID NO: 3207850 - DNA, 25 bp, Homo sapien
cagtttatcttgaggctgcccacca

SEQ ID NO: 3207851 - DNA, 25 bp, Homo sapien
accagctcttcaaaggttactcctc

SEQ ID NO: 3207852 - DNA, 25 bp, Homo sapien
cagctcttcaaaggttactcctcca

SEQ ID NO: 3207853 - DNA, 25 bp, Homo sapien
agctcttcaaaggttactcctccag

SEQ ID NO: 3207854 - DNA, 25 bp, Homo sapien
ccagctcttcaaaggttactcctcc

SEQ ID NO: 3207855 - DNA, 25 bp, Homo sapien
tctgacctcggtgaaagagcacttt

SEQ ID NO: 3207856 - DNA, 25 bp, Homo sapien
ggaaccttcttcaaagactggctga

SEQ ID NO: 3207857 - DNA, 25 bp, Homo sapien
tgcggtgcaagtccgggaaccttct

SEQ ID NO: 3207858 - DNA, 25 bp, Homo sapien
tgtggtctcacctacaagggtcatg

SEQ ID NO: 3207859 - DNA, 25 bp, Homo sapien
tagaacctgcttgttttagctttag

SEQ ID NO: 3207860 - DNA, 25 bp, Homo sapien
ttgggccagtagaacctgcttgttt

SEQ ID NO: 3207861 - DNA, 25 bp, Homo sapien
gccagtagaacctgcttgttttagc

SEQ ID NO: 3207862 - DNA, 25 bp, Homo sapien
aacctgcttgttttagctttagcca

SEQ ID NO: 3207863 - DNA, 25 bp, Homo sapien
gcattgcatttggtggaacagtgtt

SEQ ID NO: 3207864 - DNA, 25 bp, Homo sapien
cattgcatttggtggaacagtgttt

SEQ ID NO: 3207865 - DNA, 25 bp, Homo sapien
tgcattgcatttggtggaacagtgt

SEQ ID NO: 3207866 - DNA, 25 bp, Homo sapien
ttgcatttggtggaacagtgtttac

SEQ ID NO: 3207867 - DNA, 25 bp, Homo sapien
agagtggcccgttgacaaacaccag

SEQ ID NO: 3207868 - DNA, 25 bp, Homo sapien
ttagacaacatctgatatcccctgg

SEQ ID NO: 3207869 - DNA, 25 bp, Homo sapien
gacagtgccgtcagatccattattt

SEQ ID NO: 3207870 - DNA, 25 bp, Homo sapien
ccattatttgtcagggtatctttga

SEQ ID NO: 3207871 - DNA, 25 bp, Homo sapien
ccttcttgcacaaatagtcctctct

SEQ ID NO: 3207872 - DNA, 25 bp, Homo sapien
aacagctgtggtaggtaccaccttg

SEQ ID NO: 3207873 - DNA, 25 bp, Homo sapien
cttgagttctgagtcttggaggtgg

SEQ ID NO: 3207874 - DNA, 25 bp, Homo sapien
tgtggtaggtaccaccttgagttct

SEQ ID NO: 3207875 - DNA, 25 bp, Homo sapien
gtaggtaccaccttgagttctgagt

SEQ ID NO: 3207876 - DNA, 25 bp, Homo sapien
attgtccataccaatttctcttgag

SEQ ID NO: 3207877 - DNA, 25 bp, Homo sapien
tcacagaattccattgtccatacca

SEQ ID NO: 3207878 - DNA, 25 bp, Homo sapien
ttcacagaattccattgtccatacc

SEQ ID NO: 3207879 - DNA, 25 bp, Homo sapien
cacagaattccattgtccataccaa

SEQ ID NO: 3207880 - DNA, 25 bp, Homo sapien
ctggcgggtaaggaccgtggccgat

SEQ ID NO: 3207881 - DNA, 25 bp, Homo sapien
gaggaagggccacgccggcgatgga

SEQ ID NO: 3207882 - DNA, 25 bp, Homo sapien
ggatcaccgagagggccaacccata

SEQ ID NO: 3207883 - DNA, 25 bp, Homo sapien
tgttgctggccaacgcgctgtggat

SEQ ID NO: 3207884 - DNA, 25 bp, Homo sapien
cctgtcgcggtggtgggtgcaggac

SEQ ID NO: 3207885 - DNA, 25 bp, Homo sapien
aggatgctgcttgccgcgcccgcgt

SEQ ID NO: 3207886 - DNA, 25 bp, Homo sapien
gtgtgcccaggagtgcgcgcctgtc

SEQ ID NO: 3207887 - DNA, 25 bp, Homo sapien
ggactggacccacgggcccattgtg

SEQ ID NO: 3207888 - DNA, 25 bp, Homo sapien
tgcggccccgacacggcgcgttaag

SEQ ID NO: 3207889 - DNA, 25 bp, Homo sapien
gccgaatccgctcgggtggccctta

SEQ ID NO: 3207890 - DNA, 25 bp, Homo sapien
ttcgggagctcgagcaggtagagac

SEQ ID NO: 3207891 - DNA, 25 bp, Homo sapien
ttaaggcgcggcgacttcgggagct

SEQ ID NO: 3207892 - DNA, 25 bp, Homo sapien
gggagctgggcttccctagtggcgc

SEQ ID NO: 3207893 - DNA, 25 bp, Homo sapien
cggggagctgggcttccctagtggc

SEQ ID NO: 3207894 - DNA, 25 bp, Homo sapien
cttccagcggggagctgggcttccc

SEQ ID NO: 3207895 - DNA, 25 bp, Homo sapien
agcggggagctgggcttccctagtg

SEQ ID NO: 3207896 - DNA, 25 bp, Homo sapien
ggacccgctccaagtgagccgcgtt

SEQ ID NO: 3207897 - DNA, 25 bp, Homo sapien
cgttgtcgtcattcattcgcagtgt

SEQ ID NO: 3207898 - DNA, 25 bp, Homo sapien
gagccgcgttgtcgtcattcattcg

SEQ ID NO: 3207899 - DNA, 25 bp, Homo sapien
caagtgagccgcgttgtcgtcattc

SEQ ID NO: 3207900 - DNA, 25 bp, Homo sapien
tcacaagcggtgacaagtttagcgc

SEQ ID NO: 3207901 - DNA, 25 bp, Homo sapien
aaaacatcgacgaccattggctgcg

SEQ ID NO: 3207902 - DNA, 25 bp, Homo sapien
gggtctctaaccgagctccaggtct

SEQ ID NO: 3207903 - DNA, 25 bp, Homo sapien
agtttagcgcatgacttgccctggg

SEQ ID NO: 3207904 - DNA, 25 bp, Homo sapien
aatgcacttagctaggccactttaa

SEQ ID NO: 3207905 - DNA, 25 bp, Homo sapien
ttctctattgctcacgccctacagg

SEQ ID NO: 3207906 - DNA, 25 bp, Homo sapien
tcacgccctacaggtcaaggaaaga

SEQ ID NO: 3207907 - DNA, 25 bp, Homo sapien
aaggaaagaagtgatgtaatgcact

SEQ ID NO: 3207908 - DNA, 25 bp, Homo sapien
tagatgtggttggacaaaagggtaa

SEQ ID NO: 3207909 - DNA, 25 bp, Homo sapien
agccatgtagatgtggttggacaaa

SEQ ID NO: 3207910 - DNA, 25 bp, Homo sapien
gatggggtctctctggtttaataca

SEQ ID NO: 3207911 - DNA, 25 bp, Homo sapien
agggtaagatccaatggtaatagac

SEQ ID NO: 3207912 - DNA, 25 bp, Homo sapien
tgccatacgttaggcacactgtgcc

SEQ ID NO: 3207913 - DNA, 25 bp, Homo sapien
ctgtgcctttaattgtgcaatgaca

SEQ ID NO: 3207914 - DNA, 25 bp, Homo sapien
tgacatttgctataagcatgaacat

SEQ ID NO: 3207915 - DNA, 25 bp, Homo sapien
cgctgacaatgccatacgttaggca

SEQ ID NO: 3207916 - DNA, 25 bp, Homo sapien
caaggcattaagctctgtccaggtc

SEQ ID NO: 3207917 - DNA, 25 bp, Homo sapien
tgacagagcagatagtgaagcttct

SEQ ID NO: 3207918 - DNA, 25 bp, Homo sapien
cagttgcctcaatgccaaaagtgac

SEQ ID NO: 3207919 - DNA, 25 bp, Homo sapien
ttttgccttttccaagaacagatgg

SEQ ID NO: 3207920 - DNA, 25 bp, Homo sapien
ctctccacctgactcacagggctgc

SEQ ID NO: 3207921 - DNA, 25 bp, Homo sapien
ctggacactctccacctgactcaca

SEQ ID NO: 3207922 - DNA, 25 bp, Homo sapien
gacactctccacctgactcacaggg

SEQ ID NO: 3207923 - DNA, 25 bp, Homo sapien
cactctccacctgactcacagggct

SEQ ID NO: 3207924 - DNA, 25 bp, Homo sapien
ctagaccagggatccccaaatgagg

SEQ ID NO: 3207925 - DNA, 25 bp, Homo sapien
tgtgggtatgaagctattacctagg

SEQ ID NO: 3207926 - DNA, 25 bp, Homo sapien
tattgcaatgtttatctgcccagac

SEQ ID NO: 3207927 - DNA, 25 bp, Homo sapien
tattacctaggacctggaaaccatc

SEQ ID NO: 3207928 - DNA, 25 bp, Homo sapien
aagtctacttagcttccccacaagg

SEQ ID NO: 3207929 - DNA, 25 bp, Homo sapien
gatggttccatctcggcattgtcta

SEQ ID NO: 3207930 - DNA, 25 bp, Homo sapien
tcctctccatattcagactgtgtga

SEQ ID NO: 3207931 - DNA, 25 bp, Homo sapien
acaaggtctttctggctagtctgca

SEQ ID NO: 3207932 - DNA, 25 bp, Homo sapien
gcacttacaggatgcctcatagacg

SEQ ID NO: 3207933 - DNA, 25 bp, Homo sapien
tcaaatcctagctctcactgtggga

SEQ ID NO: 3207934 - DNA, 25 bp, Homo sapien
gattgcatatgcaagccctggccac

SEQ ID NO: 3207935 - DNA, 25 bp, Homo sapien
ttcacagtcagcataggcttgcgcc

SEQ ID NO: 3207936 - DNA, 25 bp, Homo sapien
agctttcattacacctccaagtggg

SEQ ID NO: 3207937 - DNA, 25 bp, Homo sapien
tatgagctctttggttgacttccag

SEQ ID NO: 3207938 - DNA, 25 bp, Homo sapien
caacaactggaaaggactctaatgc

SEQ ID NO: 3207939 - DNA, 25 bp, Homo sapien
gaacccactatgtaggaggccctgt

SEQ ID NO: 3207940 - DNA, 25 bp, Homo sapien
ttaagcttcacaagcccccgccaga

SEQ ID NO: 3207941 - DNA, 25 bp, Homo sapien
caagcccccgccagaacaactggct

SEQ ID NO: 3207942 - DNA, 25 bp, Homo sapien
caggtggcccctcttcttagggagg

SEQ ID NO: 3207943 - DNA, 25 bp, Homo sapien
agaacaactggcttattcacacccc

SEQ ID NO: 3207944 - DNA, 25 bp, Homo sapien
tggagtgcagatccataggcccctc

SEQ ID NO: 3207945 - DNA, 25 bp, Homo sapien
tagttggagtgcagatccataggcc

SEQ ID NO: 3207946 - DNA, 25 bp, Homo sapien
gctgtagttggagtgcagatccata

SEQ ID NO: 3207947 - DNA, 25 bp, Homo sapien
ctgggctgtagttggagtgcagatc

SEQ ID NO: 3207948 - DNA, 25 bp, Homo sapien
tggtcctcactgcaagtttttcccc

SEQ ID NO: 3207949 - DNA, 25 bp, Homo sapien
gcttcttctgtggtggtcctcactg

SEQ ID NO: 3207950 - DNA, 25 bp, Homo sapien
ggtggtcctcactgcaagtttttcc

SEQ ID NO: 3207951 - DNA, 25 bp, Homo sapien
accagcttcttctgtggtggtcctc

SEQ ID NO: 3207952 - DNA, 25 bp, Homo sapien
ggcctcctctcaaggttgcaggcag

SEQ ID NO: 3207953 - DNA, 25 bp, Homo sapien
ctctcaaggttgcaggcaggaagga

SEQ ID NO: 3207954 - DNA, 25 bp, Homo sapien
ggacagtagcagtctccagcctttg

SEQ ID NO: 3207955 - DNA, 25 bp, Homo sapien
ctcctctcaaggttgcaggcaggaa

SEQ ID NO: 3207956 - DNA, 25 bp, Homo sapien
gattgttgggtttgcttccacaggg

SEQ ID NO: 3207957 - DNA, 25 bp, Homo sapien
ggaaaacacagcgaaacagacagcc

SEQ ID NO: 3207958 - DNA, 25 bp, Homo sapien
ttaacttctcaagctcaggatgcag

SEQ ID NO: 3207959 - DNA, 25 bp, Homo sapien
tgtatgaatgcccacacgttactca

SEQ ID NO: 3207960 - DNA, 25 bp, Homo sapien
atgtcttattaacagcatcttgagt

SEQ ID NO: 3207961 - DNA, 25 bp, Homo sapien
gaaacgcccctggtagttcatagcc

SEQ ID NO: 3207962 - DNA, 25 bp, Homo sapien
tatcctcattggacggaaacgcccc

SEQ ID NO: 3207963 - DNA, 25 bp, Homo sapien
tttgttcgttaggtcccacagagct

SEQ ID NO: 3207964 - DNA, 25 bp, Homo sapien
tgaagattatttagagccctatgcg

SEQ ID NO: 3207965 - DNA, 25 bp, Homo sapien
gacaaatgcagtatgtgaactacag

SEQ ID NO: 3207966 - DNA, 25 bp, Homo sapien
tatgaggattcgctatgtaagttct

SEQ ID NO: 3207967 - DNA, 25 bp, Homo sapien
tgtagacacctatatctaagacgaa

SEQ ID NO: 3207968 - DNA, 25 bp, Homo sapien
tagaactattgaggagaagaatctc

SEQ ID NO: 3207969 - DNA, 25 bp, Homo sapien
tcctccagttgaccatagtggctca

SEQ ID NO: 3207970 - DNA, 25 bp, Homo sapien
taaatccgatattctgacagctgtg

SEQ ID NO: 3207971 - DNA, 25 bp, Homo sapien
caactcaattgttagggaagggaat

SEQ ID NO: 3207972 - DNA, 25 bp, Homo sapien
tgtttgcaggctgctttccggcagt

SEQ ID NO: 3207973 - DNA, 25 bp, Homo sapien
ccttgggagctttcataagctcttt

SEQ ID NO: 3207974 - DNA, 25 bp, Homo sapien
ggccctgtgttatgatgtgaattgt

SEQ ID NO: 3207975 - DNA, 25 bp, Homo sapien
gctgctttccggcagttctccaaga

SEQ ID NO: 3207976 - DNA, 25 bp, Homo sapien
gacggacgcagtaaaaagaaatgga

SEQ ID NO: 3207977 - DNA, 25 bp, Homo sapien
caacgttaagggctgagtaaacagc

SEQ ID NO: 3207978 - DNA, 25 bp, Homo sapien
ggctgagtaaacagcaggtattgtc

SEQ ID NO: 3207979 - DNA, 25 bp, Homo sapien
gtattgtcagggacggacgcagtaa

SEQ ID NO: 3207980 - DNA, 25 bp, Homo sapien
ggcattgacagtggagaggatttcc

SEQ ID NO: 3207981 - DNA, 25 bp, Homo sapien
cagaccccctaatgtaattaatggg

SEQ ID NO: 3207982 - DNA, 25 bp, Homo sapien
aactgggccgaaagaagaatctgga

SEQ ID NO: 3207983 - DNA, 25 bp, Homo sapien
tttcaggcagaagtagattgtcagc

SEQ ID NO: 3207984 - DNA, 25 bp, Homo sapien
tagagtgtggagttgcatcacattt

SEQ ID NO: 3207985 - DNA, 25 bp, Homo sapien
ccttagcttagagtgtggagttgca

SEQ ID NO: 3207986 - DNA, 25 bp, Homo sapien
gccttagcttagagtgtggagttgc

SEQ ID NO: 3207987 - DNA, 25 bp, Homo sapien
tgccttagcttagagtgtggagttg

SEQ ID NO: 3207988 - DNA, 25 bp, Homo sapien
gagtattgaggcttcagggacagag

SEQ ID NO: 3207989 - DNA, 25 bp, Homo sapien
tgattcccacatgttgggcttctac

SEQ ID NO: 3207990 - DNA, 25 bp, Homo sapien
atgtgtggagtattgaggcttcagg

SEQ ID NO: 3207991 - DNA, 25 bp, Homo sapien
tggcatggggcatgaccaatagcct

SEQ ID NO: 3207992 - DNA, 25 bp, Homo sapien
tgcacatttgctgggcctccaattg

SEQ ID NO: 3207993 - DNA, 25 bp, Homo sapien
aattgctacgaccacagcaactgct

SEQ ID NO: 3207994 - DNA, 25 bp, Homo sapien
catctgctccgatgaggcacagagc

SEQ ID NO: 3207995 - DNA, 25 bp, Homo sapien
cttaaattggcaccaatgtctttgc

SEQ ID NO: 3207996 - DNA, 25 bp, Homo sapien
gcaagaaggttccagaatcagagac

SEQ ID NO: 3207997 - DNA, 25 bp, Homo sapien
cttttgaagcaagaaggttccagaa

SEQ ID NO: 3207998 - DNA, 25 bp, Homo sapien
ctattccttttgaagcaagaaggtt

SEQ ID NO: 3207999 - DNA, 25 bp, Homo sapien
tggattcactgcattccggggacgt

SEQ ID NO: 3208000 - DNA, 25 bp, Homo sapien
aaaaagctggctaagtgactgaaca

SEQ ID NO: 3208001 - DNA, 25 bp, Homo sapien
gagcactgcctataacgattatggc

SEQ ID NO: 3208002 - DNA, 25 bp, Homo sapien
gaatgccaaatgtgaacccatcaac

SEQ ID NO: 3208003 - DNA, 25 bp, Homo sapien
ttgtctaagaggcataaagctggaa

SEQ ID NO: 3208004 - DNA, 25 bp, Homo sapien
aatgggtacaaggacatagccttca

SEQ ID NO: 3208005 - DNA, 25 bp, Homo sapien
gggttattaatgaaggccactgcct

SEQ ID NO: 3208006 - DNA, 25 bp, Homo sapien
gggcataggatcgcatcgcatacat

SEQ ID NO: 3208007 - DNA, 25 bp, Homo sapien
actgccttgttatctcgtgttctga

SEQ ID NO: 3208008 - DNA, 25 bp, Homo sapien
ttacacacgaccagattcttgatct

SEQ ID NO: 3208009 - DNA, 25 bp, Homo sapien
atacagttctaatccacccttgatg

SEQ ID NO: 3208010 - DNA, 25 bp, Homo sapien
ccttgatggctgcatgccaagatgg

SEQ ID NO: 3208011 - DNA, 25 bp, Homo sapien
cacccttgatggctgcatgccaaga

SEQ ID NO: 3208012 - DNA, 25 bp, Homo sapien
catgccaagatggatcttcttgtgg

SEQ ID NO: 3208013 - DNA, 25 bp, Homo sapien
ggcctgtagattcactatcacagct

SEQ ID NO: 3208014 - DNA, 25 bp, Homo sapien
tttctcagtattggataattcttgt

SEQ ID NO: 3208015 - DNA, 25 bp, Homo sapien
attagatttataggcctgtagattc

SEQ ID NO: 3208016 - DNA, 25 bp, Homo sapien
ttcactatcacagctctcttgggca

SEQ ID NO: 3208017 - DNA, 25 bp, Homo sapien
tgcctgttgggtacggtgctcattg

SEQ ID NO: 3208018 - DNA, 25 bp, Homo sapien
gctaagcactgggtgcacatgacca

SEQ ID NO: 3208019 - DNA, 25 bp, Homo sapien
aacaagatcaactggctagatgtca

SEQ ID NO: 3208020 - DNA, 25 bp, Homo sapien
tgttgttcaaagatgctgctcagcc

SEQ ID NO: 3208021 - DNA, 25 bp, Homo sapien
tgtgcctatctctgggatagtcact

SEQ ID NO: 3208022 - DNA, 25 bp, Homo sapien
tgaaagactggctgtagccatgaag

SEQ ID NO: 3208023 - DNA, 25 bp, Homo sapien
ttgacccttcgcagaaaactgatga

SEQ ID NO: 3208024 - DNA, 25 bp, Homo sapien
ccttgtgtgcctatctctgggatag

SEQ ID NO: 3208025 - DNA, 25 bp, Homo sapien
catgtaaatcaaacctgtagatagt

SEQ ID NO: 3208026 - DNA, 25 bp, Homo sapien
caaacaaggtaaagccagcattcct

SEQ ID NO: 3208027 - DNA, 25 bp, Homo sapien
gcattccttactaaaaccaacacca

SEQ ID NO: 3208028 - DNA, 25 bp, Homo sapien
atgtaaatcaaacctgtagatagtt

SEQ ID NO: 3208029 - DNA, 25 bp, Homo sapien
gatttgaaccacgtagctttgtgca

SEQ ID NO: 3208030 - DNA, 25 bp, Homo sapien
tgaccagtgggctttacaaccaacg

SEQ ID NO: 3208031 - DNA, 25 bp, Homo sapien
aaccaacgttgtggccattctcaga

SEQ ID NO: 3208032 - DNA, 25 bp, Homo sapien
tagtttccatagatgcccagaaagg

SEQ ID NO: 3208033 - DNA, 25 bp, Homo sapien
ggaattagaagactctgcattacca

SEQ ID NO: 3208034 - DNA, 25 bp, Homo sapien
tgatgctaaggataaacattacagg

SEQ ID NO: 3208035 - DNA, 25 bp, Homo sapien
tctagtataggaatggataagccaa

SEQ ID NO: 3208036 - DNA, 25 bp, Homo sapien
cactttatatcctctgggacccaat

SEQ ID NO: 3208037 - DNA, 25 bp, Homo sapien
gccatatatgacagcctcagtccca

SEQ ID NO: 3208038 - DNA, 25 bp, Homo sapien
ggccagtttggtaaccaccatattg

SEQ ID NO: 3208039 - DNA, 25 bp, Homo sapien
cattcatcatttttgaggaaaggta

SEQ ID NO: 3208040 - DNA, 25 bp, Homo sapien
tcatgcaggtaggctgattgggcct

SEQ ID NO: 3208041 - DNA, 25 bp, Homo sapien
gcagcatatggttgagatagcagtc

SEQ ID NO: 3208042 - DNA, 25 bp, Homo sapien
tgagatagcagtctgaagtcattct

SEQ ID NO: 3208043 - DNA, 25 bp, Homo sapien
gttctgagccctgatacagtcactt

SEQ ID NO: 3208044 - DNA, 25 bp, Homo sapien
tctgagccctgatacagtcacttgt

SEQ ID NO: 3208045 - DNA, 25 bp, Homo sapien
agaaaagacatctgttggatattgg

SEQ ID NO: 3208046 - DNA, 25 bp, Homo sapien
gggtcctgtcacagctttttagcat

SEQ ID NO: 3208047 - DNA, 25 bp, Homo sapien
agacatctgttggatattggcggtg

SEQ ID NO: 3208048 - DNA, 25 bp, Homo sapien
tgtggggtcctgtcacagcttttta

SEQ ID NO: 3208049 - DNA, 25 bp, Homo sapien
cacacaggcacgctaaggaaggaca

SEQ ID NO: 3208050 - DNA, 25 bp, Homo sapien
gatctggctacttacgtgggaagaa

SEQ ID NO: 3208051 - DNA, 25 bp, Homo sapien
ctctgtgggcagtcttaaaatgatg

SEQ ID NO: 3208052 - DNA, 25 bp, Homo sapien
tgtcaactattacagcagagctcct

SEQ ID NO: 3208053 - DNA, 25 bp, Homo sapien
tagtttgtcgtatacaatatgtgtg

SEQ ID NO: 3208054 - DNA, 25 bp, Homo sapien
gccattggaaatgtatagtttgtcg

SEQ ID NO: 3208055 - DNA, 25 bp, Homo sapien
gatgattccagttaactttctgtgg

SEQ ID NO: 3208056 - DNA, 25 bp, Homo sapien
ctttctgtgggtatttgccattgga

SEQ ID NO: 3208057 - DNA, 25 bp, Homo sapien
ttcttggggtttcttcaccataggc

SEQ ID NO: 3208058 - DNA, 25 bp, Homo sapien
caggagattttggatcagctggcca

SEQ ID NO: 3208059 - DNA, 25 bp, Homo sapien
tgatcaggagattttggatcagctg

SEQ ID NO: 3208060 - DNA, 25 bp, Homo sapien
ggagattttggatcagctggccacc

SEQ ID NO: 3208061 - DNA, 25 bp, Homo sapien
agattttggatcagctggccacctt

SEQ ID NO: 3208062 - DNA, 25 bp, Homo sapien
ttggaagtctgggtaggctttctct

SEQ ID NO: 3208063 - DNA, 25 bp, Homo sapien
tgagaaaaggctaccccaagtatgt

SEQ ID NO: 3208064 - DNA, 25 bp, Homo sapien
ttatctcacagcttccgtaggttgg

SEQ ID NO: 3208065 - DNA, 25 bp, Homo sapien
tccatattttgtgaggcagttttcc

SEQ ID NO: 3208066 - DNA, 25 bp, Homo sapien
cagtggcttccggacattctgctga

SEQ ID NO: 3208067 - DNA, 25 bp, Homo sapien
tgatgatcacttattgtgatgccac

SEQ ID NO: 3208068 - DNA, 25 bp, Homo sapien
cattctgctgatgatcacttattgt

SEQ ID NO: 3208069 - DNA, 25 bp, Homo sapien
tggcttccggacattctgctgatga

SEQ ID NO: 3208070 - DNA, 25 bp, Homo sapien
tgggtgtcgggaaacgcaatttgcc

SEQ ID NO: 3208071 - DNA, 25 bp, Homo sapien
tagaggaatatgctagcccctcggg

SEQ ID NO: 3208072 - DNA, 25 bp, Homo sapien
cattattcttcttcccgcagggcaa

SEQ ID NO: 3208073 - DNA, 25 bp, Homo sapien
ggatctgagttagcttccaccagtg

SEQ ID NO: 3208074 - DNA, 25 bp, Homo sapien
ggtagcacctggaactctggaagca

SEQ ID NO: 3208075 - DNA, 25 bp, Homo sapien
gtgagatattgtcttggtagcacct

SEQ ID NO: 3208076 - DNA, 25 bp, Homo sapien
tggtagcacctggaactctggaagc

SEQ ID NO: 3208077 - DNA, 25 bp, Homo sapien
tgagatattgtcttggtagcacctg

SEQ ID NO: 3208078 - DNA, 25 bp, Homo sapien
ccttcagttgcctgatgaacttccg

SEQ ID NO: 3208079 - DNA, 25 bp, Homo sapien
gcctgatgaacttccgtaccagcct

SEQ ID NO: 3208080 - DNA, 25 bp, Homo sapien
tggttgctgcgcaaactgtgccttc

SEQ ID NO: 3208081 - DNA, 25 bp, Homo sapien
ttggttgctgcgcaaactgtgcctt

SEQ ID NO: 3208082 - DNA, 25 bp, Homo sapien
cctgcgggggccaatgccccattcc

SEQ ID NO: 3208083 - DNA, 25 bp, Homo sapien
cccacctctgttcgctccgcccctt

SEQ ID NO: 3208084 - DNA, 25 bp, Homo sapien
aggacgggagccgcccacctctgtt

SEQ ID NO: 3208085 - DNA, 25 bp, Homo sapien
gagccgcccacctctgttcgctccg

SEQ ID NO: 3208086 - DNA, 25 bp, Homo sapien
ggctgacagccgattccggacacta

SEQ ID NO: 3208087 - DNA, 25 bp, Homo sapien
cagcagcgccttacggctgacgtca

SEQ ID NO: 3208088 - DNA, 25 bp, Homo sapien
gaccggacgtccttttacgacagca

SEQ ID NO: 3208089 - DNA, 25 bp, Homo sapien
taaatccaactcgtggaccaggact

SEQ ID NO: 3208090 - DNA, 25 bp, Homo sapien
ccgagggacagggaatggcgtgagg

SEQ ID NO: 3208091 - DNA, 25 bp, Homo sapien
gagggacagggaatggcgtgaggcc

SEQ ID NO: 3208092 - DNA, 25 bp, Homo sapien
ggccgagggacagggaatggcgtga

SEQ ID NO: 3208093 - DNA, 25 bp, Homo sapien
gggacagggaatggcgtgaggccca

SEQ ID NO: 3208094 - DNA, 25 bp, Homo sapien
ctcgtgcgcgctccgggcaaacctc

SEQ ID NO: 3208095 - DNA, 25 bp, Homo sapien
gcgcgctccgggcaaacctcgctca

SEQ ID NO: 3208096 - DNA, 25 bp, Homo sapien
gtgcgcgctccgggcaaacctcgct

SEQ ID NO: 3208097 - DNA, 25 bp, Homo sapien
cgcgctccgggcaaacctcgctcac

SEQ ID NO: 3208098 - DNA, 25 bp, Homo sapien
ctgcgtgtgtcaccaaatgaggaaa

SEQ ID NO: 3208099 - DNA, 25 bp, Homo sapien
cgtgtgtcaccaaatgaggaaacag

SEQ ID NO: 3208100 - DNA, 25 bp, Homo sapien
acaggcacggggcactgcggcttta

SEQ ID NO: 3208101 - DNA, 25 bp, Homo sapien
actgcggctttaggagtccagcctg

SEQ ID NO: 3208102 - DNA, 25 bp, Homo sapien
ttctcagccttatacgggttcaagc

SEQ ID NO: 3208103 - DNA, 25 bp, Homo sapien
cttcttctcagccttatacgggttc

SEQ ID NO: 3208104 - DNA, 25 bp, Homo sapien
gcacgctcaaaagagtgaatcttct

SEQ ID NO: 3208105 - DNA, 25 bp, Homo sapien
ttgttctgcacgctcaaaagagtga

SEQ ID NO: 3208106 - DNA, 25 bp, Homo sapien
ctcgcaccagtcttttttttaggca

SEQ ID NO: 3208107 - DNA, 25 bp, Homo sapien
cgttctcggcggttctcagccttct

SEQ ID NO: 3208108 - DNA, 25 bp, Homo sapien
gctcttagttgtttttcacgttctc

SEQ ID NO: 3208109 - DNA, 25 bp, Homo sapien
cattacatggatgtttagctaaatc

SEQ ID NO: 3208110 - DNA, 25 bp, Homo sapien
attcaggtatacgtcagataaaata

SEQ ID NO: 3208111 - DNA, 25 bp, Homo sapien
tttattcaggtatacgtcagataaa

SEQ ID NO: 3208112 - DNA, 25 bp, Homo sapien
tattcaggtatacgtcagataaaat

SEQ ID NO: 3208113 - DNA, 25 bp, Homo sapien
ttattcaggtatacgtcagataaaa

SEQ ID NO: 3208114 - DNA, 25 bp, Homo sapien
acccaataagactaaggcattaaag

SEQ ID NO: 3208115 - DNA, 25 bp, Homo sapien
cagatgttaagtaggaagttcagaa

SEQ ID NO: 3208116 - DNA, 25 bp, Homo sapien
gacgtgccagagatactaaattcag

SEQ ID NO: 3208117 - DNA, 25 bp, Homo sapien
tcagtgaaatcaacagacgtgccag

SEQ ID NO: 3208118 - DNA, 25 bp, Homo sapien
taaacgtttgctaaactaagctaca

SEQ ID NO: 3208119 - DNA, 25 bp, Homo sapien
gagaaccggaataactctacagtca

SEQ ID NO: 3208120 - DNA, 25 bp, Homo sapien
gaaaggagtggaaatagagagaacc

SEQ ID NO: 3208121 - DNA, 25 bp, Homo sapien
tctatgtatcactacccacagtgtc

SEQ ID NO: 3208122 - DNA, 25 bp, Homo sapien
caataaatgttagccctgggacagg

SEQ ID NO: 3208123 - DNA, 25 bp, Homo sapien
gcatttatctaaggcaccgttccaa

SEQ ID NO: 3208124 - DNA, 25 bp, Homo sapien
ttaggcatgccagtcattcagaacc

SEQ ID NO: 3208125 - DNA, 25 bp, Homo sapien
gatgtgagacatgcaagctacctgt

SEQ ID NO: 3208126 - DNA, 25 bp, Homo sapien
ttttaaattatggtcaatgtcagat

SEQ ID NO: 3208127 - DNA, 25 bp, Homo sapien
aattttaaattatggtcaatgtcag

SEQ ID NO: 3208128 - DNA, 25 bp, Homo sapien
tttaaattatggtcaatgtcagata

SEQ ID NO: 3208129 - DNA, 25 bp, Homo sapien
aaattttaaattatggtcaatgtca

SEQ ID NO: 3208130 - DNA, 25 bp, Homo sapien
caaaagtagcaaaatgctctattct

SEQ ID NO: 3208131 - DNA, 25 bp, Homo sapien
gtagcaaaatgctctattcttctgc

SEQ ID NO: 3208132 - DNA, 25 bp, Homo sapien
cagaattacaaaagtagcaaaatgc

SEQ ID NO: 3208133 - DNA, 25 bp, Homo sapien
gcaaaatgctctattcttctgccgc

SEQ ID NO: 3208134 - DNA, 25 bp, Homo sapien
cacactgtgcacaaattggtaactt

SEQ ID NO: 3208135 - DNA, 25 bp, Homo sapien
tgaactaccagttgataaaaagcat

SEQ ID NO: 3208136 - DNA, 25 bp, Homo sapien
gttgaactaccagttgataaaaagc

SEQ ID NO: 3208137 - DNA, 25 bp, Homo sapien
tgttgaactaccagttgataaaaag

SEQ ID NO: 3208138 - DNA, 25 bp, Homo sapien
aactaccagttgataaaaagcatat

SEQ ID NO: 3208139 - DNA, 25 bp, Homo sapien
tgtggaagactatttgggaaacacc

SEQ ID NO: 3208140 - DNA, 25 bp, Homo sapien
ctacaaaatttaagcccagagacac

SEQ ID NO: 3208141 - DNA, 25 bp, Homo sapien
taaatgagcataccccaaattgttc

SEQ ID NO: 3208142 - DNA, 25 bp, Homo sapien
gagtgttccatataggccagttttc

SEQ ID NO: 3208143 - DNA, 25 bp, Homo sapien
tcattactcgaatcagacttttcag

SEQ ID NO: 3208144 - DNA, 25 bp, Homo sapien
gcaggttatgctttgtaatctaatg

SEQ ID NO: 3208145 - DNA, 25 bp, Homo sapien
aaggaatacataccagtactcacga

SEQ ID NO: 3208146 - DNA, 25 bp, Homo sapien
cactgttagtcttgcaaaggaatac

SEQ ID NO: 3208147 - DNA, 25 bp, Homo sapien
gcaaggccagtactgtatacaccag

SEQ ID NO: 3208148 - DNA, 25 bp, Homo sapien
cagtactgtatacaccagcatgctt

SEQ ID NO: 3208149 - DNA, 25 bp, Homo sapien
tatgacacagtctgaagacttcatc

SEQ ID NO: 3208150 - DNA, 25 bp, Homo sapien
accagcatgctttatgacacagtct

SEQ ID NO: 3208151 - DNA, 25 bp, Homo sapien
gcaaccattctttaaccacggcaac

SEQ ID NO: 3208152 - DNA, 25 bp, Homo sapien
ggtaaactgtacacttatcctaata

SEQ ID NO: 3208153 - DNA, 25 bp, Homo sapien
tcaaccctcaatgatagtaggccgc

SEQ ID NO: 3208154 - DNA, 25 bp, Homo sapien
tactgagaaatacgaaacttctgcc

SEQ ID NO: 3208155 - DNA, 25 bp, Homo sapien
actgagacatttcctaccatggcaa

SEQ ID NO: 3208156 - DNA, 25 bp, Homo sapien
ggtcccacacgcctcgttcacattc

SEQ ID NO: 3208157 - DNA, 25 bp, Homo sapien
catttcctaccatggcaaacccaag

SEQ ID NO: 3208158 - DNA, 25 bp, Homo sapien
cacactcagcatcggtaagagggca

SEQ ID NO: 3208159 - DNA, 25 bp, Homo sapien
caacattcacctataacaaagctca

SEQ ID NO: 3208160 - DNA, 25 bp, Homo sapien
caaagctcattacttgtgtctaatg

SEQ ID NO: 3208161 - DNA, 25 bp, Homo sapien
ataacaaagctcattacttgtgtct

SEQ ID NO: 3208162 - DNA, 25 bp, Homo sapien
tcattacttgtgtctaatgactcac

SEQ ID NO: 3208163 - DNA, 25 bp, Homo sapien
ttcacagagaaagttatggcaaaaa

SEQ ID NO: 3208164 - DNA, 25 bp, Homo sapien
aaagaacaactgaatattctgcctc

SEQ ID NO: 3208165 - DNA, 25 bp, Homo sapien
cacagagaaagttatggcaaaaaga

SEQ ID NO: 3208166 - DNA, 25 bp, Homo sapien
caaaaagaacaactgaatattctgc

SEQ ID NO: 3208167 - DNA, 25 bp, Homo sapien
aaatgtttctgcctctaaaacctgg

SEQ ID NO: 3208168 - DNA, 25 bp, Homo sapien
aaacctggcagctggcttgatgctc

SEQ ID NO: 3208169 - DNA, 25 bp, Homo sapien
tgtttctgcctctaaaacctggcag

SEQ ID NO: 3208170 - DNA, 25 bp, Homo sapien
gcagctggcttgatgctcaaattga

SEQ ID NO: 3208171 - DNA, 25 bp, Homo sapien
tggtactctgaaccacgaaaggtgt

SEQ ID NO: 3208172 - DNA, 25 bp, Homo sapien
tctcttacgggagggcatttggaaa

SEQ ID NO: 3208173 - DNA, 25 bp, Homo sapien
tggcatccctgctgaaaaatttaca

SEQ ID NO: 3208174 - DNA, 25 bp, Homo sapien
cgaaaggtgtaagtcctgcaatgcc

SEQ ID NO: 3208175 - DNA, 25 bp, Homo sapien
tggaatatagccttatagacagctg

SEQ ID NO: 3208176 - DNA, 25 bp, Homo sapien
ttatagacagctgcctgtcttttgg

SEQ ID NO: 3208177 - DNA, 25 bp, Homo sapien
taaaagcttgcaatggaatatagcc

SEQ ID NO: 3208178 - DNA, 25 bp, Homo sapien
ttttgggttcaaatgctataaaaca

SEQ ID NO: 3208179 - DNA, 25 bp, Homo sapien
cttacaacggagacatgagtgctga

SEQ ID NO: 3208180 - DNA, 25 bp, Homo sapien
tgaccaagccgattgcatgaaacac

SEQ ID NO: 3208181 - DNA, 25 bp, Homo sapien
tacaacggagacatgagtgctgacc

SEQ ID NO: 3208182 - DNA, 25 bp, Homo sapien
tgagtgctgaccaagccgattgcat

SEQ ID NO: 3208183 - DNA, 25 bp, Homo sapien
gattccagagaaatgtgcactagcc

SEQ ID NO: 3208184 - DNA, 25 bp, Homo sapien
tgacgaacgaatgctagagactagg

SEQ ID NO: 3208185 - DNA, 25 bp, Homo sapien
caattttgttgggagcagtcacact

SEQ ID NO: 3208186 - DNA, 25 bp, Homo sapien
tacaagacactaagcactgaacggg

SEQ ID NO: 3208187 - DNA, 25 bp, Homo sapien
cttagtctcctgagtttcatgccca

SEQ ID NO: 3208188 - DNA, 25 bp, Homo sapien
tccttgtatgatcatcacagaaaca

SEQ ID NO: 3208189 - DNA, 25 bp, Homo sapien
tgcccacatttaggacaaggaggct

SEQ ID NO: 3208190 - DNA, 25 bp, Homo sapien
tgacatgctaaggtccttagtctcc

SEQ ID NO: 3208191 - DNA, 25 bp, Homo sapien
taatagtgacacaaagttcagtgca

SEQ ID NO: 3208192 - DNA, 25 bp, Homo sapien
agcagtcagtcacttagaattatgg

SEQ ID NO: 3208193 - DNA, 25 bp, Homo sapien
tcagtgcagaagatcagcaaaatca

SEQ ID NO: 3208194 - DNA, 25 bp, Homo sapien
ctctttaacaaaattgcgagctgca

SEQ ID NO: 3208195 - DNA, 25 bp, Homo sapien
tgcctgccaaatttcagggagcgtg

SEQ ID NO: 3208196 - DNA, 25 bp, Homo sapien
agtctgcctgccaaatttcagggag

SEQ ID NO: 3208197 - DNA, 25 bp, Homo sapien
tctgcctgccaaatttcagggagcg

SEQ ID NO: 3208198 - DNA, 25 bp, Homo sapien
ccagtctgcctgccaaatttcaggg

SEQ ID NO: 3208199 - DNA, 25 bp, Homo sapien
aaggttcttccaataagcatcatac

SEQ ID NO: 3208200 - DNA, 25 bp, Homo sapien
tcagatgaaaggttcttccaataag

SEQ ID NO: 3208201 - DNA, 25 bp, Homo sapien
gatgaaaggttcttccaataagcat

SEQ ID NO: 3208202 - DNA, 25 bp, Homo sapien
ttatcagatgaaaggttcttccaat

SEQ ID NO: 3208203 - DNA, 25 bp, Homo sapien
ctcctcatcgtggtagctggtatca

SEQ ID NO: 3208204 - DNA, 25 bp, Homo sapien
gactcagtatctgaatcctttctgc

SEQ ID NO: 3208205 - DNA, 25 bp, Homo sapien
cctcctcatcgtggtagctggtatc

SEQ ID NO: 3208206 - DNA, 25 bp, Homo sapien
tcctcatcgtggtagctggtatcac

SEQ ID NO: 3208207 - DNA, 25 bp, Homo sapien
ttgttcctcatagtgagcatagcca

SEQ ID NO: 3208208 - DNA, 25 bp, Homo sapien
tctcttgttcctcatagtgagcata

SEQ ID NO: 3208209 - DNA, 25 bp, Homo sapien
tcttgttcctcatagtgagcatagc

SEQ ID NO: 3208210 - DNA, 25 bp, Homo sapien
tgttcctcatagtgagcatagccac

SEQ ID NO: 3208211 - DNA, 25 bp, Homo sapien
aaaaacgctacaccctattgcttgg

SEQ ID NO: 3208212 - DNA, 25 bp, Homo sapien
tgcttggcccattaagtgtaactag

SEQ ID NO: 3208213 - DNA, 25 bp, Homo sapien
tcaataataggtaccactgaggaca

SEQ ID NO: 3208214 - DNA, 25 bp, Homo sapien
tcttctgcacaaggctaagtggcta

SEQ ID NO: 3208215 - DNA, 25 bp, Homo sapien
ccagagatgcggtcaggttgtaccc

SEQ ID NO: 3208216 - DNA, 25 bp, Homo sapien
tccactggtgcagcggatcctttag

SEQ ID NO: 3208217 - DNA, 25 bp, Homo sapien
tttagtttgtagtgacagcaacagc

SEQ ID NO: 3208218 - DNA, 25 bp, Homo sapien
caacagcagcaacagtgctctggtt

SEQ ID NO: 3208219 - DNA, 25 bp, Homo sapien
tcacaggatgccttcagagagaaca

SEQ ID NO: 3208220 - DNA, 25 bp, Homo sapien
ccttcagagagaacattagaagtta

SEQ ID NO: 3208221 - DNA, 25 bp, Homo sapien
atgccttcagagagaacattagaag

SEQ ID NO: 3208222 - DNA, 25 bp, Homo sapien
cacaggatgccttcagagagaacat

SEQ ID NO: 3208223 - DNA, 25 bp, Homo sapien
tacaatccgaactggctaaaacaca

SEQ ID NO: 3208224 - DNA, 25 bp, Homo sapien
cagaaaaccgctaagagatgatgag

SEQ ID NO: 3208225 - DNA, 25 bp, Homo sapien
gagaggctttatgctgctagataca

SEQ ID NO: 3208226 - DNA, 25 bp, Homo sapien
caaaaactttggtaccagagaggct

SEQ ID NO: 3208227 - DNA, 25 bp, Homo sapien
cttttataaagatactgagaggtga

SEQ ID NO: 3208228 - DNA, 25 bp, Homo sapien
ggtgacagcgtgcaggcagtcctca

SEQ ID NO: 3208229 - DNA, 25 bp, Homo sapien
tcacagccctcgctcgctctgggcg

SEQ ID NO: 3208230 - DNA, 25 bp, Homo sapien
ctcgctcgctctgggcgcctcctct

SEQ ID NO: 3208231 - DNA, 25 bp, Homo sapien
gaatccaggaataagtaaacatgtt

SEQ ID NO: 3208232 - DNA, 25 bp, Homo sapien
cagaggccacaatcattttttaatc

SEQ ID NO: 3208233 - DNA, 25 bp, Homo sapien
tgccattaatccttgttcgctaaca

SEQ ID NO: 3208234 - DNA, 25 bp, Homo sapien
ttcgctaacatgacctgaatccagg

SEQ ID NO: 3208235 - DNA, 25 bp, Homo sapien
gttgataaacatttgcgttacttcc

SEQ ID NO: 3208236 - DNA, 25 bp, Homo sapien
catctgttgataaacatttgcgtta

SEQ ID NO: 3208237 - DNA, 25 bp, Homo sapien
atttgcgttacttccatctcttggc

SEQ ID NO: 3208238 - DNA, 25 bp, Homo sapien
taaacatttgcgttacttccatctc

SEQ ID NO: 3208239 - DNA, 25 bp, Homo sapien
tcactccaaccttgatatcctggcc

SEQ ID NO: 3208240 - DNA, 25 bp, Homo sapien
ccaagtgcctaggacaagcacatgc

SEQ ID NO: 3208241 - DNA, 25 bp, Homo sapien
aaccctatatccacttaacactaat

SEQ ID NO: 3208242 - DNA, 25 bp, Homo sapien
cttcagtaatattaagtgtattccc

SEQ ID NO: 3208243 - DNA, 25 bp, Homo sapien
gagatgggatattaaaccaaatgca

SEQ ID NO: 3208244 - DNA, 25 bp, Homo sapien
gagccattgagatgggatattaaac

SEQ ID NO: 3208245 - DNA, 25 bp, Homo sapien
ctgcccctcttccacgggaagcagc

SEQ ID NO: 3208246 - DNA, 25 bp, Homo sapien
gtccacttcaggtgagccattgaga

SEQ ID NO: 3208247 - DNA, 25 bp, Homo sapien
aaatttcaatcacattttcaagtcc

SEQ ID NO: 3208248 - DNA, 25 bp, Homo sapien
ttaaatttcaatcacattttcaagt

SEQ ID NO: 3208249 - DNA, 25 bp, Homo sapien
taaatttcaatcacattttcaagtc

SEQ ID NO: 3208250 - DNA, 25 bp, Homo sapien
gatgtcaagcagtactaaaccacag

SEQ ID NO: 3208251 - DNA, 25 bp, Homo sapien
gaagcagactataagcctgacagtg

SEQ ID NO: 3208252 - DNA, 25 bp, Homo sapien
cctgacagtggttccaaagtttgca

SEQ ID NO: 3208253 - DNA, 25 bp, Homo sapien
catctgagggcaaactaaatttcca

SEQ ID NO: 3208254 - DNA, 25 bp, Homo sapien
taagccagctcatgtgtaaatgcaa

SEQ ID NO: 3208255 - DNA, 25 bp, Homo sapien
gcaactggctagatattgtacaaga

SEQ ID NO: 3208256 - DNA, 25 bp, Homo sapien
ctctaagaataggatactgctggga

SEQ ID NO: 3208257 - DNA, 25 bp, Homo sapien
ttttccattgctaagggccatggca

SEQ ID NO: 3208258 - DNA, 25 bp, Homo sapien
cgatttcaacagtaatgagtttgca

SEQ ID NO: 3208259 - DNA, 25 bp, Homo sapien
gggtgtttgcgtatttgtttgcaca

SEQ ID NO: 3208260 - DNA, 25 bp, Homo sapien
ctgctatgcatgcatcgatttcaac

SEQ ID NO: 3208261 - DNA, 25 bp, Homo sapien
gccagataattaataccacccttgt

SEQ ID NO: 3208262 - DNA, 25 bp, Homo sapien
tgtaattaagtatgttgacttcagt

SEQ ID NO: 3208263 - DNA, 25 bp, Homo sapien
gacattcgacttcatgcctactctc

SEQ ID NO: 3208264 - DNA, 25 bp, Homo sapien
aaattaatgtttaggctcaagagac

SEQ ID NO: 3208265 - DNA, 25 bp, Homo sapien
ttattactccaaatgtaattaagta

SEQ ID NO: 3208266 - DNA, 25 bp, Homo sapien
ggatggggcaggtgaaaaataagtc

SEQ ID NO: 3208267 - DNA, 25 bp, Homo sapien
gtgaaaaataagtcctgctgaaggt

SEQ ID NO: 3208268 - DNA, 25 bp, Homo sapien
caggtgaaaaataagtcctgctgaa

SEQ ID NO: 3208269 - DNA, 25 bp, Homo sapien
gatggggcaggtgaaaaataagtcc

SEQ ID NO: 3208270 - DNA, 25 bp, Homo sapien
cactgcgatggatttgaaaggcctc

SEQ ID NO: 3208271 - DNA, 25 bp, Homo sapien
tagttgaaccctgccccttctgatg

SEQ ID NO: 3208272 - DNA, 25 bp, Homo sapien
tctaccacaatagcaagggaggctg

SEQ ID NO: 3208273 - DNA, 25 bp, Homo sapien
tatgcaaagtgtccggtacagtgcc

SEQ ID NO: 3208274 - DNA, 25 bp, Homo sapien
aaggtaatgaggagcaatgcttacg

SEQ ID NO: 3208275 - DNA, 25 bp, Homo sapien
gatggccactatgtcgtactgatgc

SEQ ID NO: 3208276 - DNA, 25 bp, Homo sapien
gactgtgcagttattgttgatggcc

SEQ ID NO: 3208277 - DNA, 25 bp, Homo sapien
gcaatgcttacgaggactgtgcagt

SEQ ID NO: 3208278 - DNA, 25 bp, Homo sapien
ctttcagactcactgataggggtcc

SEQ ID NO: 3208279 - DNA, 25 bp, Homo sapien
ttccacctttaacaggatgtctctc

SEQ ID NO: 3208280 - DNA, 25 bp, Homo sapien
cactgataggggtccttccaccttt

SEQ ID NO: 3208281 - DNA, 25 bp, Homo sapien
ccttccacctttaacaggatgtctc

SEQ ID NO: 3208282 - DNA, 25 bp, Homo sapien
gagcaaaatcctgtgatgtgtccaa

SEQ ID NO: 3208283 - DNA, 25 bp, Homo sapien
ccagaccttgtgcaccgttgcacag

SEQ ID NO: 3208284 - DNA, 25 bp, Homo sapien
tattttcgtctcatagagaaggaga

SEQ ID NO: 3208285 - DNA, 25 bp, Homo sapien
gagcaataatgaagcagggcccctt

SEQ ID NO: 3208286 - DNA, 25 bp, Homo sapien
tttgtggccgtatggaggaagcaaa

SEQ ID NO: 3208287 - DNA, 25 bp, Homo sapien
aatgcttgtttgtggccgtatggag

SEQ ID NO: 3208288 - DNA, 25 bp, Homo sapien
cttgtttgtggccgtatggaggaag

SEQ ID NO: 3208289 - DNA, 25 bp, Homo sapien
tgtttgtggccgtatggaggaagca

SEQ ID NO: 3208290 - DNA, 25 bp, Homo sapien
caaactgccctatactgagagtaac

SEQ ID NO: 3208291 - DNA, 25 bp, Homo sapien
gactacagcacttactgacctactg

SEQ ID NO: 3208292 - DNA, 25 bp, Homo sapien
gaaagttatgtgaatgcagtctctc

SEQ ID NO: 3208293 - DNA, 25 bp, Homo sapien
tgttagcggccattgagaatcattg

SEQ ID NO: 3208294 - DNA, 25 bp, Homo sapien
gatgttccatcatccattgtactgg

SEQ ID NO: 3208295 - DNA, 25 bp, Homo sapien
tgtactgaagcaatatagttctcct

SEQ ID NO: 3208296 - DNA, 25 bp, Homo sapien
tactacactcattacctgggcgatg

SEQ ID NO: 3208297 - DNA, 25 bp, Homo sapien
tctcctgaaataagaagaagtcagg

SEQ ID NO: 3208298 - DNA, 25 bp, Homo sapien
ggctgttcttcatttaaccgaggga

SEQ ID NO: 3208299 - DNA, 25 bp, Homo sapien
gctgaggctacaagcaagacagttg

SEQ ID NO: 3208300 - DNA, 25 bp, Homo sapien
catagtaccattgggtccgaatttg

SEQ ID NO: 3208301 - DNA, 25 bp, Homo sapien
cgcgcatccggagctggttgttcct

SEQ ID NO: 3208302 - DNA, 25 bp, Homo sapien
tattccagtgccagatgaaggtttc

SEQ ID NO: 3208303 - DNA, 25 bp, Homo sapien
taccaatacacaagtgacagtgcag

SEQ ID NO: 3208304 - DNA, 25 bp, Homo sapien
cagaaattgagctagggttgtgcac

SEQ ID NO: 3208305 - DNA, 25 bp, Homo sapien
tatctctgctgtggtaaagaactga

SEQ ID NO: 3208306 - DNA, 25 bp, Homo sapien
gttcctgcagtagttactggtgcaa

SEQ ID NO: 3208307 - DNA, 25 bp, Homo sapien
ctggtgcaaaagttcatgatgtgag

SEQ ID NO: 3208308 - DNA, 25 bp, Homo sapien
tgagctgtagctgcaagctagtcct

SEQ ID NO: 3208309 - DNA, 25 bp, Homo sapien
tcacatgctgctctatccatctgag

SEQ ID NO: 3208310 - DNA, 25 bp, Homo sapien
atttatgccactccctccgacgtga

SEQ ID NO: 3208311 - DNA, 25 bp, Homo sapien
acatttatgccactccctccgacgt

SEQ ID NO: 3208312 - DNA, 25 bp, Homo sapien
ttctccttcacatttatgccactcc

SEQ ID NO: 3208313 - DNA, 25 bp, Homo sapien
cttcacatttatgccactccctccg

SEQ ID NO: 3208314 - DNA, 25 bp, Homo sapien
aaggatagccgcatcccaagcgacg

SEQ ID NO: 3208315 - DNA, 25 bp, Homo sapien
tgggctggcgcgcatccaagtcttc

SEQ ID NO: 3208316 - DNA, 25 bp, Homo sapien
gatgctgggcggctactctagaccg

SEQ ID NO: 3208317 - DNA, 25 bp, Homo sapien
ccatgtgggaagcttccgcagctga

SEQ ID NO: 3208318 - DNA, 25 bp, Homo sapien
gggcgccggacttcgaaggcagtga

SEQ ID NO: 3208319 - DNA, 25 bp, Homo sapien
ggtggggggcgacagccaccgcagc

SEQ ID NO: 3208320 - DNA, 25 bp, Homo sapien
gccggacttcgaaggcagtgagcga

SEQ ID NO: 3208321 - DNA, 25 bp, Homo sapien
gcgccggacttcgaaggcagtgagc

SEQ ID NO: 3208322 - DNA, 25 bp, Homo sapien
aaggcaaagaagccgagctctgtac

SEQ ID NO: 3208323 - DNA, 25 bp, Homo sapien
aattccatcgccctttcaaccacca

SEQ ID NO: 3208324 - DNA, 25 bp, Homo sapien
ccaaggcaaagaagccgagctctgt

SEQ ID NO: 3208325 - DNA, 25 bp, Homo sapien
caaggcaaagaagccgagctctgta

SEQ ID NO: 3208326 - DNA, 25 bp, Homo sapien
ttgcggctaagttttccccatgaga

SEQ ID NO: 3208327 - DNA, 25 bp, Homo sapien
cagctcggccagtaggatagaccgg

SEQ ID NO: 3208328 - DNA, 25 bp, Homo sapien
gctaggagagcctcagaagtgtcat

SEQ ID NO: 3208329 - DNA, 25 bp, Homo sapien
ggcaaagggacctgcgatctgcgct

SEQ ID NO: 3208330 - DNA, 25 bp, Homo sapien
gtccctcaccctcccagcggagcgc

SEQ ID NO: 3208331 - DNA, 25 bp, Homo sapien
ctcagaaacccgcagcttggctggg

SEQ ID NO: 3208332 - DNA, 25 bp, Homo sapien
agcgtcttctcagaaacccgcagct

SEQ ID NO: 3208333 - DNA, 25 bp, Homo sapien
ttgactgggtgcagaactcagccct

SEQ ID NO: 3208334 - DNA, 25 bp, Homo sapien
ccttacaaccatcatattttcctgt

SEQ ID NO: 3208335 - DNA, 25 bp, Homo sapien
caccaccgccatcaaccttacaacc

SEQ ID NO: 3208336 - DNA, 25 bp, Homo sapien
gccacatggccatatattggaatgg

SEQ ID NO: 3208337 - DNA, 25 bp, Homo sapien
acgatcttgtatgggctggctatct

SEQ ID NO: 3208338 - DNA, 25 bp, Homo sapien
tgatggaacattgctccaaagagcc

SEQ ID NO: 3208339 - DNA, 25 bp, Homo sapien
catgtgacgtcagcagcatggaaca

SEQ ID NO: 3208340 - DNA, 25 bp, Homo sapien
agtcatcaacacctgctatcactct

SEQ ID NO: 3208341 - DNA, 25 bp, Homo sapien
cactcatctaagcttcttctctgga

SEQ ID NO: 3208342 - DNA, 25 bp, Homo sapien
agggagcatggaagatagctgagga

SEQ ID NO: 3208343 - DNA, 25 bp, Homo sapien
cttcttctctggaaggaatccagaa

SEQ ID NO: 3208344 - DNA, 25 bp, Homo sapien
tcttctctggaaggaatccagaagt

SEQ ID NO: 3208345 - DNA, 25 bp, Homo sapien
aatgagcccaaacaagaccagggag

SEQ ID NO: 3208346 - DNA, 25 bp, Homo sapien
cagctggactacctaatgaagaaac

SEQ ID NO: 3208347 - DNA, 25 bp, Homo sapien
tgatgaaagcggctcacacaacagc

SEQ ID NO: 3208348 - DNA, 25 bp, Homo sapien
gagtgaggagatatcgaatgagccc

SEQ ID NO: 3208349 - DNA, 25 bp, Homo sapien
ggcctgtctgagaccatgccaagtg

SEQ ID NO: 3208350 - DNA, 25 bp, Homo sapien
tgtctgagaccatgccaagtgagac

SEQ ID NO: 3208351 - DNA, 25 bp, Homo sapien
atgccaagtgagacccaaaacctga

SEQ ID NO: 3208352 - DNA, 25 bp, Homo sapien
tgagaccatgccaagtgagacccaa

SEQ ID NO: 3208353 - DNA, 25 bp, Homo sapien
gacacagtggggccactagttgaaa

SEQ ID NO: 3208354 - DNA, 25 bp, Homo sapien
ggacacagtggggccactagttgaa

SEQ ID NO: 3208355 - DNA, 25 bp, Homo sapien
aattccggacacagtggggccacta

SEQ ID NO: 3208356 - DNA, 25 bp, Homo sapien
tccggacacagtggggccactagtt

SEQ ID NO: 3208357 - DNA, 25 bp, Homo sapien
aaggaacaaactccagatgcgccac

SEQ ID NO: 3208358 - DNA, 25 bp, Homo sapien
ggaacaaactccagatgcgccacct

SEQ ID NO: 3208359 - DNA, 25 bp, Homo sapien
aacaaactccagatgcgccacctta

SEQ ID NO: 3208360 - DNA, 25 bp, Homo sapien
gaaggaacaaactccagatgcgcca

SEQ ID NO: 3208361 - DNA, 25 bp, Homo sapien
gcagtggcgctcaggtagtaccttt

SEQ ID NO: 3208362 - DNA, 25 bp, Homo sapien
gcgctcaggtagtacctttgtagaa

SEQ ID NO: 3208363 - DNA, 25 bp, Homo sapien
cagatgggggtactgctacaaagat

SEQ ID NO: 3208364 - DNA, 25 bp, Homo sapien
ctaatacagataattggcagatggg

SEQ ID NO: 3208365 - DNA, 25 bp, Homo sapien
tgagataccaaaagagcagggctgc

SEQ ID NO: 3208366 - DNA, 25 bp, Homo sapien
ggtgaaaccatggaagtaccaggtc

SEQ ID NO: 3208367 - DNA, 25 bp, Homo sapien
gacggtctaagaattgagccctggg

SEQ ID NO: 3208368 - DNA, 25 bp, Homo sapien
cctattgatgatttgcagggcctca

SEQ ID NO: 3208369 - DNA, 25 bp, Homo sapien
ggataacttttctgttggcctggca

SEQ ID NO: 3208370 - DNA, 25 bp, Homo sapien
tattggactgaagcctgaatcatca

SEQ ID NO: 3208371 - DNA, 25 bp, Homo sapien
gctacaaccagtgactaccaagggc

SEQ ID NO: 3208372 - DNA, 25 bp, Homo sapien
gggaactgaggtagctcacaccctt

SEQ ID NO: 3208373 - DNA, 25 bp, Homo sapien
tcacaggagccctcaagaaagttag

SEQ ID NO: 3208374 - DNA, 25 bp, Homo sapien
ttgaaagaagtgataggctgcagcc

SEQ ID NO: 3208375 - DNA, 25 bp, Homo sapien
tagaagcagtcgcaggaagtgcctt

SEQ ID NO: 3208376 - DNA, 25 bp, Homo sapien
ctggaacaaatttagggagcctcgt

SEQ ID NO: 3208377 - DNA, 25 bp, Homo sapien
cactctctgatcatagttttctgta

SEQ ID NO: 3208378 - DNA, 25 bp, Homo sapien
tagttttctgtagcactatgttcat

SEQ ID NO: 3208379 - DNA, 25 bp, Homo sapien
tctgatcatagttttctgtagcact

SEQ ID NO: 3208380 - DNA, 25 bp, Homo sapien
gatcatagttttctgtagcactatg

SEQ ID NO: 3208381 - DNA, 25 bp, Homo sapien
gagtcatctactgtcacgggaagga

SEQ ID NO: 3208382 - DNA, 25 bp, Homo sapien
tttgcatgctgatgggactgactta

SEQ ID NO: 3208383 - DNA, 25 bp, Homo sapien
cattagggtggtatgtgttttctcc

SEQ ID NO: 3208384 - DNA, 25 bp, Homo sapien
gagagcctgaccttttgaaggatca

SEQ ID NO: 3208385 - DNA, 25 bp, Homo sapien
gcaacccggaggtcatgtcagatga

SEQ ID NO: 3208386 - DNA, 25 bp, Homo sapien
tactgcccagggaaaatacatagtg

SEQ ID NO: 3208387 - DNA, 25 bp, Homo sapien
tattcttcacccagatactgtcggg

SEQ ID NO: 3208388 - DNA, 25 bp, Homo sapien
agccccggtggtatctcagtgaaga

SEQ ID NO: 3208389 - DNA, 25 bp, Homo sapien
ttgtttggaatcttgtgattggatc

SEQ ID NO: 3208390 - DNA, 25 bp, Homo sapien
gaattgtttggaatcttgtgattgg

SEQ ID NO: 3208391 - DNA, 25 bp, Homo sapien
aattgtttggaatcttgtgattgga

SEQ ID NO: 3208392 - DNA, 25 bp, Homo sapien
attgtttggaatcttgtgattggat

SEQ ID NO: 3208393 - DNA, 25 bp, Homo sapien
aatgttctgcaaccacgagcctgtg

SEQ ID NO: 3208394 - DNA, 25 bp, Homo sapien
gactgctgcaccaaaatgtagggag

SEQ ID NO: 3208395 - DNA, 25 bp, Homo sapien
tgagggccctgtctaatgaaagtgc

SEQ ID NO: 3208396 - DNA, 25 bp, Homo sapien
tacaagggacacaagctcatttggc

SEQ ID NO: 3208397 - DNA, 25 bp, Homo sapien
ctagggtaaagtatgatccattaaa

SEQ ID NO: 3208398 - DNA, 25 bp, Homo sapien
tagggtaaagtatgatccattaaaa

SEQ ID NO: 3208399 - DNA, 25 bp, Homo sapien
ctggctatggcaaggggtttccagc

SEQ ID NO: 3208400 - DNA, 25 bp, Homo sapien
ctcaaagccacggtaaatccttaag

SEQ ID NO: 3208401 - DNA, 25 bp, Homo sapien
tggctatggcaaggggtttccagca

SEQ ID NO: 3208402 - DNA, 25 bp, Homo sapien
tactcaaagccacggtaaatcctta

SEQ ID NO: 3208403 - DNA, 25 bp, Homo sapien
cttcagttagaaaatgactgtttag

SEQ ID NO: 3208404 - DNA, 25 bp, Homo sapien
gacatgaatgccagcttcagttaga

SEQ ID NO: 3208405 - DNA, 25 bp, Homo sapien
gaagacatgaatgccagcttcagtt

SEQ ID NO: 3208406 - DNA, 25 bp, Homo sapien
aaatgactgtttagaagtaaacaca

SEQ ID NO: 3208407 - DNA, 25 bp, Homo sapien
tgctcagttaggtgtttaccaaacc

SEQ ID NO: 3208408 - DNA, 25 bp, Homo sapien
ataagcaaactgaacgtaaactaat

SEQ ID NO: 3208409 - DNA, 25 bp, Homo sapien
tactgagtacctagagatataagca

SEQ ID NO: 3208410 - DNA, 25 bp, Homo sapien
catcatgaccatgaacataatgtta

SEQ ID NO: 3208411 - DNA, 25 bp, Homo sapien
gaactgagagtcagattatataact

SEQ ID NO: 3208412 - DNA, 25 bp, Homo sapien
taggttaggtgctttgggccaactg

SEQ ID NO: 3208413 - DNA, 25 bp, Homo sapien
tagtagagtaaaactgaactgagag

SEQ ID NO: 3208414 - DNA, 25 bp, Homo sapien
ggccaactgggtatattagctgcat

SEQ ID NO: 3208415 - DNA, 25 bp, Homo sapien
acaaatctatggttcccaataccat

SEQ ID NO: 3208416 - DNA, 25 bp, Homo sapien
ctgcacaaatctatggttcccaata

SEQ ID NO: 3208417 - DNA, 25 bp, Homo sapien
gcacaaatctatggttcccaatacc

SEQ ID NO: 3208418 - DNA, 25 bp, Homo sapien
tgcacaaatctatggttcccaatac

SEQ ID NO: 3208419 - DNA, 25 bp, Homo sapien
caagtaacattggaatgatgcttag

SEQ ID NO: 3208420 - DNA, 25 bp, Homo sapien
agcttgaggaaaaataatcactcac

SEQ ID NO: 3208421 - DNA, 25 bp, Homo sapien
tggaatgatgcttagagcttgagga

SEQ ID NO: 3208422 - DNA, 25 bp, Homo sapien
tcctgatggatcttacacagaagca

SEQ ID NO: 3208423 - DNA, 25 bp, Homo sapien
aagcattttgaaggagcctattcat

SEQ ID NO: 3208424 - DNA, 25 bp, Homo sapien
aaaccatagagcaaagcattttgaa

SEQ ID NO: 3208425 - DNA, 25 bp, Homo sapien
aaaaaccatagagcaaagcattttg

SEQ ID NO: 3208426 - DNA, 25 bp, Homo sapien
tttaggaagccctgcactgaaacag

SEQ ID NO: 3208427 - DNA, 25 bp, Homo sapien
ctgttttaggaagccctgcactgaa

SEQ ID NO: 3208428 - DNA, 25 bp, Homo sapien
ttctgttttaggaagccctgcactg

SEQ ID NO: 3208429 - DNA, 25 bp, Homo sapien
tggcttctgttttaggaagccctgc

SEQ ID NO: 3208430 - DNA, 25 bp, Homo sapien
atggattagagtatcaatgtgttat

SEQ ID NO: 3208431 - DNA, 25 bp, Homo sapien
ttggatcacaatggctctgccctca

SEQ ID NO: 3208432 - DNA, 25 bp, Homo sapien
tatagctgcatgtaataatatgtca

SEQ ID NO: 3208433 - DNA, 25 bp, Homo sapien
ttctgtatacgcttatagctgcatg

SEQ ID NO: 3208434 - DNA, 25 bp, Homo sapien
cgtatataaagtagcatcaatatgc

SEQ ID NO: 3208435 - DNA, 25 bp, Homo sapien
catcactttccgtatataaagtagc

SEQ ID NO: 3208436 - DNA, 25 bp, Homo sapien
cactttccgtatataaagtagcatc

SEQ ID NO: 3208437 - DNA, 25 bp, Homo sapien
ttccgtatataaagtagcatcaata

SEQ ID NO: 3208438 - DNA, 25 bp, Homo sapien
tgaatacttgcatctccggactcaa

SEQ ID NO: 3208439 - DNA, 25 bp, Homo sapien
gagaaagcacttcattgctgttact

SEQ ID NO: 3208440 - DNA, 25 bp, Homo sapien
gtgaaataacttgtaactccaagag

SEQ ID NO: 3208441 - DNA, 25 bp, Homo sapien
ctgttgtttgctaggatgatcagat

SEQ ID NO: 3208442 - DNA, 25 bp, Homo sapien
tcctcacattctttgcatccagatt

SEQ ID NO: 3208443 - DNA, 25 bp, Homo sapien
catttggacaatatgtacaaaactc

SEQ ID NO: 3208444 - DNA, 25 bp, Homo sapien
tgtacaaaactctgcaaaaattctt

SEQ ID NO: 3208445 - DNA, 25 bp, Homo sapien
tgatgaacatttggacaatatgtac

SEQ ID NO: 3208446 - DNA, 25 bp, Homo sapien
gactatcacccttaaacaaatgcta

SEQ ID NO: 3208447 - DNA, 25 bp, Homo sapien
tggcaggagcctaccagcatagctg

SEQ ID NO: 3208448 - DNA, 25 bp, Homo sapien
cagtagtcagtggttccacactggc

SEQ ID NO: 3208449 - DNA, 25 bp, Homo sapien
gaagtcaatgagagccagtagtcag

SEQ ID NO: 3208450 - DNA, 25 bp, Homo sapien
tatgaacactgtcactattagtttt

SEQ ID NO: 3208451 - DNA, 25 bp, Homo sapien
tggctccaacaaatcaacagggttt

SEQ ID NO: 3208452 - DNA, 25 bp, Homo sapien
tagttttctataccaggggcatcca

SEQ ID NO: 3208453 - DNA, 25 bp, Homo sapien
ttccattagaagagagcttgctaat

SEQ ID NO: 3208454 - DNA, 25 bp, Homo sapien
tatatttaatgcacccttggatagc

SEQ ID NO: 3208455 - DNA, 25 bp, Homo sapien
gcaaagattcccatatgtttccgtg

SEQ ID NO: 3208456 - DNA, 25 bp, Homo sapien
tatatgccagtacaagagcacagaa

SEQ ID NO: 3208457 - DNA, 25 bp, Homo sapien
gcacagaaattgactgtgacaccgt

SEQ ID NO: 3208458 - DNA, 25 bp, Homo sapien
caggcctatggagataaactcaagc

SEQ ID NO: 3208459 - DNA, 25 bp, Homo sapien
aggcctatggagataaactcaagct

SEQ ID NO: 3208460 - DNA, 25 bp, Homo sapien
tatccctccagcaataaatacttgc

SEQ ID NO: 3208461 - DNA, 25 bp, Homo sapien
ttgctaagagcaaatttatgccctg

SEQ ID NO: 3208462 - DNA, 25 bp, Homo sapien
tctattcctttttgcttacacacca

SEQ ID NO: 3208463 - DNA, 25 bp, Homo sapien
caccaacttttcattcaatagctaa

SEQ ID NO: 3208464 - DNA, 25 bp, Homo sapien
tatctgctgggctactgaagcaggc

SEQ ID NO: 3208465 - DNA, 25 bp, Homo sapien
caagaatgcctagctctgacgtagc

SEQ ID NO: 3208466 - DNA, 25 bp, Homo sapien
ttttcaaagaaagccaatggtacac

SEQ ID NO: 3208467 - DNA, 25 bp, Homo sapien
gaggcccagagtcatttatcacatc

SEQ ID NO: 3208468 - DNA, 25 bp, Homo sapien
tcatacttcaccagacaaggagaca

SEQ ID NO: 3208469 - DNA, 25 bp, Homo sapien
cagacctgtaagctgtagagttgct

SEQ ID NO: 3208470 - DNA, 25 bp, Homo sapien
agacattgaatttctccctcggaga

SEQ ID NO: 3208471 - DNA, 25 bp, Homo sapien
gaggtggtccgctgatccgtgatac

SEQ ID NO: 3208472 - DNA, 25 bp, Homo sapien
agctctgatggccttaggaactgct

SEQ ID NO: 3208473 - DNA, 25 bp, Homo sapien
caataaacttctcatgtgattgatg

SEQ ID NO: 3208474 - DNA, 25 bp, Homo sapien
tgccaataaacttctcatgtgattg

SEQ ID NO: 3208475 - DNA, 25 bp, Homo sapien
aggaactgctactgccaaggcccat

SEQ ID NO: 3208476 - DNA, 25 bp, Homo sapien
ttttggtccatagctgaagttgctt

SEQ ID NO: 3208477 - DNA, 25 bp, Homo sapien
tttggtccatagctgaagttgcttg

SEQ ID NO: 3208478 - DNA, 25 bp, Homo sapien
ggtccatagctgaagttgcttgtct

SEQ ID NO: 3208479 - DNA, 25 bp, Homo sapien
tggtccatagctgaagttgcttgtc

SEQ ID NO: 3208480 - DNA, 25 bp, Homo sapien
caactgctagagtcgcagctctgac

SEQ ID NO: 3208481 - DNA, 25 bp, Homo sapien
tcttaaatacttgagccgtgagtga

SEQ ID NO: 3208482 - DNA, 25 bp, Homo sapien
tatgggaagaagaagttgtgttctc

SEQ ID NO: 3208483 - DNA, 25 bp, Homo sapien
tgaggaaattaaaggtctgagttac

SEQ ID NO: 3208484 - DNA, 25 bp, Homo sapien
acaagggttcaaaataatgcctctc

SEQ ID NO: 3208485 - DNA, 25 bp, Homo sapien
tgcacaagggttcaaaataatgcct

SEQ ID NO: 3208486 - DNA, 25 bp, Homo sapien
ccctgcacaagggttcaaaataatg

SEQ ID NO: 3208487 - DNA, 25 bp, Homo sapien
cctgcacaagggttcaaaataatgc

SEQ ID NO: 3208488 - DNA, 25 bp, Homo sapien
ctggctatttccttcttcagggaaa

SEQ ID NO: 3208489 - DNA, 25 bp, Homo sapien
tttccttcttcagggaaaagctgca

SEQ ID NO: 3208490 - DNA, 25 bp, Homo sapien
ctatttccttcttcagggaaaagct

SEQ ID NO: 3208491 - DNA, 25 bp, Homo sapien
ttccttcttcagggaaaagctgcat

SEQ ID NO: 3208492 - DNA, 25 bp, Homo sapien
tcatcttcatagctataagacttct

SEQ ID NO: 3208493 - DNA, 25 bp, Homo sapien
ctagagctttgagtagcagccagtg

SEQ ID NO: 3208494 - DNA, 25 bp, Homo sapien
gacttcttatcaggcatgaatttac

SEQ ID NO: 3208495 - DNA, 25 bp, Homo sapien
gaatttacttctgacggtaactgga

SEQ ID NO: 3208496 - DNA, 25 bp, Homo sapien
cacacacatggtttaacttaggagt

SEQ ID NO: 3208497 - DNA, 25 bp, Homo sapien
caagacttacttgtatacacatgca

SEQ ID NO: 3208498 - DNA, 25 bp, Homo sapien
gatgtgtagagagactgtggatcca

SEQ ID NO: 3208499 - DNA, 25 bp, Homo sapien
gggtgtactagtttcctctggctgc

SEQ ID NO: 3208500 - DNA, 25 bp, Homo sapien
gggccagatttgcttgtggctggat

SEQ ID NO: 3208501 - DNA, 25 bp, Homo sapien
acattttctattggagcttgatctc

SEQ ID NO: 3208502 - DNA, 25 bp, Homo sapien
cagatttgcttgtggctggatggat

SEQ ID NO: 3208503 - DNA, 25 bp, Homo sapien
ctccaggggcagtacattttctatt

SEQ ID NO: 3208504 - DNA, 25 bp, Homo sapien
cctggtaaagtctgctgccactaca

SEQ ID NO: 3208505 - DNA, 25 bp, Homo sapien
cccctggtaaagtctgctgccacta

SEQ ID NO: 3208506 - DNA, 25 bp, Homo sapien
taacccctggtaaagtctgctgcca

SEQ ID NO: 3208507 - DNA, 25 bp, Homo sapien
ttataacccctggtaaagtctgctg

SEQ ID NO: 3208508 - DNA, 25 bp, Homo sapien
catgacagaaagtgtatagctttgg

SEQ ID NO: 3208509 - DNA, 25 bp, Homo sapien
tgtgacatgacagaaagtgtatagc

SEQ ID NO: 3208510 - DNA, 25 bp, Homo sapien
gaaagtgtatagctttggagttagc

SEQ ID NO: 3208511 - DNA, 25 bp, Homo sapien
gctttggagttagccggatgtgatt

SEQ ID NO: 3208512 - DNA, 25 bp, Homo sapien
ctgagtgggtaagttcgtccaaatc

SEQ ID NO: 3208513 - DNA, 25 bp, Homo sapien
taacacaaatttactggcaaaggct

SEQ ID NO: 3208514 - DNA, 25 bp, Homo sapien
tctactcatcttgacctcaggattt

SEQ ID NO: 3208515 - DNA, 25 bp, Homo sapien
tttccatctgtagaaaacgtggtct

SEQ ID NO: 3208516 - DNA, 25 bp, Homo sapien
aattggtgaagtcttacattcctct

SEQ ID NO: 3208517 - DNA, 25 bp, Homo sapien
agactgagcagaatgagaaattggt

SEQ ID NO: 3208518 - DNA, 25 bp, Homo sapien
gaatgagaaattggtgaagtcttac

SEQ ID NO: 3208519 - DNA, 25 bp, Homo sapien
agcagaatgagaaattggtgaagtc

SEQ ID NO: 3208520 - DNA, 25 bp, Homo sapien
gagctaatagagaatatcccacccc

SEQ ID NO: 3208521 - DNA, 25 bp, Homo sapien
tgcgaaggactagaaatcagccatg

SEQ ID NO: 3208522 - DNA, 25 bp, Homo sapien
ccatggctaaggagcttcgttagaa

SEQ ID NO: 3208523 - DNA, 25 bp, Homo sapien
ccatgaggatataacagagcacagc

SEQ ID NO: 3208524 - DNA, 25 bp, Homo sapien
atgaactgaccccaaccaggcattg

SEQ ID NO: 3208525 - DNA, 25 bp, Homo sapien
actacagcaactccttccaaccctg

SEQ ID NO: 3208526 - DNA, 25 bp, Homo sapien
tgtcacaacactcactacagcaact

SEQ ID NO: 3208527 - DNA, 25 bp, Homo sapien
accccaaccaggcattggcttgctg

SEQ ID NO: 3208528 - DNA, 25 bp, Homo sapien
actgctaaaattcccttgggcacac

SEQ ID NO: 3208529 - DNA, 25 bp, Homo sapien
ctgctaaaattcccttgggcacaca

SEQ ID NO: 3208530 - DNA, 25 bp, Homo sapien
ggcagctattgcttccagtactgct

SEQ ID NO: 3208531 - DNA, 25 bp, Homo sapien
tactgctaaaattcccttgggcaca

SEQ ID NO: 3208532 - DNA, 25 bp, Homo sapien
gccatacctggttgaggccctttaa

SEQ ID NO: 3208533 - DNA, 25 bp, Homo sapien
gactaggcctctcatatgatgtaga

SEQ ID NO: 3208534 - DNA, 25 bp, Homo sapien
ctagggaggtaacaatgatgaggcc

SEQ ID NO: 3208535 - DNA, 25 bp, Homo sapien
ccagaaagctaaccagaagtcgtaa

SEQ ID NO: 3208536 - DNA, 25 bp, Homo sapien
attgcatgggtagattagaataacc

SEQ ID NO: 3208537 - DNA, 25 bp, Homo sapien
tgaagggtgtttctcactgattccc

SEQ ID NO: 3208538 - DNA, 25 bp, Homo sapien
tggaagttaattcaaaccataggcc

SEQ ID NO: 3208539 - DNA, 25 bp, Homo sapien
ccccagaacaggttggtatggctgg

SEQ ID NO: 3208540 - DNA, 25 bp, Homo sapien
gaatgtactagtgcttcctgcctca

SEQ ID NO: 3208541 - DNA, 25 bp, Homo sapien
tgatgatgggacacaaagggactct

SEQ ID NO: 3208542 - DNA, 25 bp, Homo sapien
tagagctgcccattgagaacttggt

SEQ ID NO: 3208543 - DNA, 25 bp, Homo sapien
gatttaccccactgtatggcataga

SEQ ID NO: 3208544 - DNA, 25 bp, Homo sapien
aaatgtttgaggaacgtatacattc

SEQ ID NO: 3208545 - DNA, 25 bp, Homo sapien
gaggaacgtatacattccattgtta

SEQ ID NO: 3208546 - DNA, 25 bp, Homo sapien
tgtttgaggaacgtatacattccat

SEQ ID NO: 3208547 - DNA, 25 bp, Homo sapien
aagtgacctcagtgtacatgattct

SEQ ID NO: 3208548 - DNA, 25 bp, Homo sapien
tgtagcgtactccagctcaggaatt

SEQ ID NO: 3208549 - DNA, 25 bp, Homo sapien
tctttccatcatcagaagcttaggg

SEQ ID NO: 3208550 - DNA, 25 bp, Homo sapien
cagtgagaaggtctagtcaccatcc

SEQ ID NO: 3208551 - DNA, 25 bp, Homo sapien
accttagattgctccccgtgcgtgt

SEQ ID NO: 3208552 - DNA, 25 bp, Homo sapien
tgctttttgcatggtgacaggaagt

SEQ ID NO: 3208553 - DNA, 25 bp, Homo sapien
ctttttgcatggtgacaggaagttc

SEQ ID NO: 3208554 - DNA, 25 bp, Homo sapien
tgtgctttttgcatggtgacaggaa

SEQ ID NO: 3208555 - DNA, 25 bp, Homo sapien
ttttgcatggtgacaggaagttcct

SEQ ID NO: 3208556 - DNA, 25 bp, Homo sapien
gtgagcagtctggatatctgtgact

SEQ ID NO: 3208557 - DNA, 25 bp, Homo sapien
tatctgtgacttgctcggagtggct

SEQ ID NO: 3208558 - DNA, 25 bp, Homo sapien
tctctgacccccttaaaggtgactg

SEQ ID NO: 3208559 - DNA, 25 bp, Homo sapien
aggggctggtgggttacactattca

SEQ ID NO: 3208560 - DNA, 25 bp, Homo sapien
caagatttctggaccaacaggaggt

SEQ ID NO: 3208561 - DNA, 25 bp, Homo sapien
gatctctaccgcttcaggaaggagg

SEQ ID NO: 3208562 - DNA, 25 bp, Homo sapien
gatgtgatctctaccgcttcaggaa

SEQ ID NO: 3208563 - DNA, 25 bp, Homo sapien
gaaccagccctaggattgtggtatt

SEQ ID NO: 3208564 - DNA, 25 bp, Homo sapien
ttttggtagtttgttgatggtccac

SEQ ID NO: 3208565 - DNA, 25 bp, Homo sapien
tttgttgatggtccacataatctgc

SEQ ID NO: 3208566 - DNA, 25 bp, Homo sapien
tgttgatggtccacataatctgcca

SEQ ID NO: 3208567 - DNA, 25 bp, Homo sapien
ggtagtttgttgatggtccacataa

SEQ ID NO: 3208568 - DNA, 25 bp, Homo sapien
ccaggtgtgacagttttctaggaag

SEQ ID NO: 3208569 - DNA, 25 bp, Homo sapien
tatccctgccgagaggtgttcctcc

SEQ ID NO: 3208570 - DNA, 25 bp, Homo sapien
gttttctaggaagagcatctgggct

SEQ ID NO: 3208571 - DNA, 25 bp, Homo sapien
gccagctgaaactgtccagagggag

SEQ ID NO: 3208572 - DNA, 25 bp, Homo sapien
ccagatgtagatgctccctaataga

SEQ ID NO: 3208573 - DNA, 25 bp, Homo sapien
tagcagacagagcattaagcagcct

SEQ ID NO: 3208574 - DNA, 25 bp, Homo sapien
gcctagcttcactgacaacagggaa

SEQ ID NO: 3208575 - DNA, 25 bp, Homo sapien
taggaggtcttagaaggccagaatt

SEQ ID NO: 3208576 - DNA, 25 bp, Homo sapien
ggagacaggctcttcaatgaccttg

SEQ ID NO: 3208577 - DNA, 25 bp, Homo sapien
cagggttagggtagggatctaccat

SEQ ID NO: 3208578 - DNA, 25 bp, Homo sapien
gccaagccaatcaataatgaaagga

SEQ ID NO: 3208579 - DNA, 25 bp, Homo sapien
ccttgttgtagtagcagggttaggg

SEQ ID NO: 3208580 - DNA, 25 bp, Homo sapien
gaatttttaggtgtaagagtcagca

SEQ ID NO: 3208581 - DNA, 25 bp, Homo sapien
taaatgcccaagatagataaaaggt

SEQ ID NO: 3208582 - DNA, 25 bp, Homo sapien
gaaggttcgtggcacaagataccca

SEQ ID NO: 3208583 - DNA, 25 bp, Homo sapien
aatgagccgtactcatccaaacctg

SEQ ID NO: 3208584 - DNA, 25 bp, Homo sapien
ggctacaaatcagagattcccgcca

SEQ ID NO: 3208585 - DNA, 25 bp, Homo sapien
tctggcaagatcctgtgtgcaagag

SEQ ID NO: 3208586 - DNA, 25 bp, Homo sapien
acatagttgtattcaccagcctgga

SEQ ID NO: 3208587 - DNA, 25 bp, Homo sapien
tgctaatcacaagtagtgggtccct

SEQ ID NO: 3208588 - DNA, 25 bp, Homo sapien
gctcctgggaagattctaatatgca

SEQ ID NO: 3208589 - DNA, 25 bp, Homo sapien
tagcctaggcgtagcagttttttaa

SEQ ID NO: 3208590 - DNA, 25 bp, Homo sapien
cagacatggctggtcctctttcaca

SEQ ID NO: 3208591 - DNA, 25 bp, Homo sapien
gatttgaatcttctcagcccttggg

SEQ ID NO: 3208592 - DNA, 25 bp, Homo sapien
ccccaagggcttgttcttcctagat

SEQ ID NO: 3208593 - DNA, 25 bp, Homo sapien
gcttaactcggcaaatgtctccttt

SEQ ID NO: 3208594 - DNA, 25 bp, Homo sapien
gcttgttcttcctagatgattgggc

SEQ ID NO: 3208595 - DNA, 25 bp, Homo sapien
caaaacactagtctcttcttgaagt

SEQ ID NO: 3208596 - DNA, 25 bp, Homo sapien
tttctcaggaacagtattaaggtac

SEQ ID NO: 3208597 - DNA, 25 bp, Homo sapien
gagttttccaccatgaatccactga

SEQ ID NO: 3208598 - DNA, 25 bp, Homo sapien
gctaagagcggccttttaaagttga

SEQ ID NO: 3208599 - DNA, 25 bp, Homo sapien
ccactgaactataggaagtttctca

SEQ ID NO: 3208600 - DNA, 25 bp, Homo sapien
ctatgggagggaccgttttgagcaa

SEQ ID NO: 3208601 - DNA, 25 bp, Homo sapien
aatattaccaaggtgggtcggagca

SEQ ID NO: 3208602 - DNA, 25 bp, Homo sapien
taaagggaatgcgaagatctgcaac

SEQ ID NO: 3208603 - DNA, 25 bp, Homo sapien
cagggctgtcagtgcctagggataa

SEQ ID NO: 3208604 - DNA, 25 bp, Homo sapien
cagtcttcttgttgagcagatggca

SEQ ID NO: 3208605 - DNA, 25 bp, Homo sapien
gaggtcccctgatgttgctgtctgt

SEQ ID NO: 3208606 - DNA, 25 bp, Homo sapien
ttggtcactgaagcaagtccctctg

SEQ ID NO: 3208607 - DNA, 25 bp, Homo sapien
taattactgagagcattggtcactg

SEQ ID NO: 3208608 - DNA, 25 bp, Homo sapien
ggaggtacttagtcaattgagcagc

SEQ ID NO: 3208609 - DNA, 25 bp, Homo sapien
gataagcatgtactgaaaaactgag

SEQ ID NO: 3208610 - DNA, 25 bp, Homo sapien
gctaattggctaaaagtgtcttgag

SEQ ID NO: 3208611 - DNA, 25 bp, Homo sapien
ggaaaacagccacaccaatcaattt

SEQ ID NO: 3208612 - DNA, 25 bp, Homo sapien
aaattttggaatttgaccatccagg

SEQ ID NO: 3208613 - DNA, 25 bp, Homo sapien
ttggaatttgaccatccaggtacat

SEQ ID NO: 3208614 - DNA, 25 bp, Homo sapien
aattttggaatttgaccatccaggt

SEQ ID NO: 3208615 - DNA, 25 bp, Homo sapien
ttttggaatttgaccatccaggtac

SEQ ID NO: 3208616 - DNA, 25 bp, Homo sapien
ttagccccagaggtactttggtctg

SEQ ID NO: 3208617 - DNA, 25 bp, Homo sapien
ccagaggtactttggtctgtccttg

SEQ ID NO: 3208618 - DNA, 25 bp, Homo sapien
gccccagaggtactttggtctgtcc

SEQ ID NO: 3208619 - DNA, 25 bp, Homo sapien
tgagtggggtgccaagagttgggca

SEQ ID NO: 3208620 - DNA, 25 bp, Homo sapien
tatgtagtagcatatctggatatag

SEQ ID NO: 3208621 - DNA, 25 bp, Homo sapien
cacattgactggtatgtagtagcat

SEQ ID NO: 3208622 - DNA, 25 bp, Homo sapien
tgacacattgactggtatgtagtag

SEQ ID NO: 3208623 - DNA, 25 bp, Homo sapien
actggtatgtagtagcatatctgga

SEQ ID NO: 3208624 - DNA, 25 bp, Homo sapien
caacttctctctcaccaacatccac

SEQ ID NO: 3208625 - DNA, 25 bp, Homo sapien
acatccaccaggacccatgcagcca

SEQ ID NO: 3208626 - DNA, 25 bp, Homo sapien
accaacatccaccaggacccatgca

SEQ ID NO: 3208627 - DNA, 25 bp, Homo sapien
ccaacatccaccaggacccatgcag

SEQ ID NO: 3208628 - DNA, 25 bp, Homo sapien
ttccaagttagcaaagtcataccat

SEQ ID NO: 3208629 - DNA, 25 bp, Homo sapien
caagttagcaaagtcataccatttt

SEQ ID NO: 3208630 - DNA, 25 bp, Homo sapien
ttagcaaagtcataccattttaacc

SEQ ID NO: 3208631 - DNA, 25 bp, Homo sapien
gcaaagtcataccattttaacctgg

SEQ ID NO: 3208632 - DNA, 25 bp, Homo sapien
cagaagtaatgagacaatgtctccc

SEQ ID NO: 3208633 - DNA, 25 bp, Homo sapien
tgctcttgtaagtcggtacggtgcc

SEQ ID NO: 3208634 - DNA, 25 bp, Homo sapien
ggattttctataacaggctgctgct

SEQ ID NO: 3208635 - DNA, 25 bp, Homo sapien
tactccaggatggaactaggaaaca

SEQ ID NO: 3208636 - DNA, 25 bp, Homo sapien
ctagctcggttctgacacaagaatt

SEQ ID NO: 3208637 - DNA, 25 bp, Homo sapien
gttctgacacaagaattcccctgac

SEQ ID NO: 3208638 - DNA, 25 bp, Homo sapien
gctcggttctgacacaagaattccc

SEQ ID NO: 3208639 - DNA, 25 bp, Homo sapien
tcggttctgacacaagaattcccct

SEQ ID NO: 3208640 - DNA, 25 bp, Homo sapien
cattggcttctaagtggctttcaaa

SEQ ID NO: 3208641 - DNA, 25 bp, Homo sapien
aggataaattaaagtcgagatggac

SEQ ID NO: 3208642 - DNA, 25 bp, Homo sapien
ggtgaatgatgtaacaaaggcattg

SEQ ID NO: 3208643 - DNA, 25 bp, Homo sapien
tttggtcatagcagttctcattgtg

SEQ ID NO: 3208644 - DNA, 25 bp, Homo sapien
gcccatgctcttaactacagcgcta

SEQ ID NO: 3208645 - DNA, 25 bp, Homo sapien
actacagcgctaaatgcattataca

SEQ ID NO: 3208646 - DNA, 25 bp, Homo sapien
tagcatccattcatagcccatgctc

SEQ ID NO: 3208647 - DNA, 25 bp, Homo sapien
cattagcatccattcatagcccatg

SEQ ID NO: 3208648 - DNA, 25 bp, Homo sapien
gaaggctaccttatgagtctctgaa

SEQ ID NO: 3208649 - DNA, 25 bp, Homo sapien
tgacaagaagtctgtgaccaagagt

SEQ ID NO: 3208650 - DNA, 25 bp, Homo sapien
tgagtgaaagttgacgaatagccct

SEQ ID NO: 3208651 - DNA, 25 bp, Homo sapien
tagaaggcctgcattcacatcactg

SEQ ID NO: 3208652 - DNA, 25 bp, Homo sapien
gaaggtctgctaccaagcttgctta

SEQ ID NO: 3208653 - DNA, 25 bp, Homo sapien
taattatgtgatgggcagttgacgc

SEQ ID NO: 3208654 - DNA, 25 bp, Homo sapien
gcagctctcatagggttacagtgga

SEQ ID NO: 3208655 - DNA, 25 bp, Homo sapien
gcttgaccggagcaagaaggtctgc

SEQ ID NO: 3208656 - DNA, 25 bp, Homo sapien
ggtctctgacaggttattgaaggga

SEQ ID NO: 3208657 - DNA, 25 bp, Homo sapien
tctgacaggttattgaagggagagc

SEQ ID NO: 3208658 - DNA, 25 bp, Homo sapien
caggttattgaagggagagctctca

SEQ ID NO: 3208659 - DNA, 25 bp, Homo sapien
tctggtctctgacaggttattgaag

SEQ ID NO: 3208660 - DNA, 25 bp, Homo sapien
cattagtggcatctgaatctctctc

SEQ ID NO: 3208661 - DNA, 25 bp, Homo sapien
atgcattagtggcatctgaatctct

SEQ ID NO: 3208662 - DNA, 25 bp, Homo sapien
gatttacaagtgctaacataaagca

SEQ ID NO: 3208663 - DNA, 25 bp, Homo sapien
taattcttggcgttgtgatttacaa

SEQ ID NO: 3208664 - DNA, 25 bp, Homo sapien
tttaggtggataattagcaatcaaa

SEQ ID NO: 3208665 - DNA, 25 bp, Homo sapien
gaggatttaggtggataattagcaa

SEQ ID NO: 3208666 - DNA, 25 bp, Homo sapien
gatttaggtggataattagcaatca

SEQ ID NO: 3208667 - DNA, 25 bp, Homo sapien
atgaggatttaggtggataattagc

SEQ ID NO: 3208668 - DNA, 25 bp, Homo sapien
gccacactccagattgttggctgcc

SEQ ID NO: 3208669 - DNA, 25 bp, Homo sapien
tttgccacactccagattgttggct

SEQ ID NO: 3208670 - DNA, 25 bp, Homo sapien
tgccacactccagattgttggctgc

SEQ ID NO: 3208671 - DNA, 25 bp, Homo sapien
ccacactccagattgttggctgccc

SEQ ID NO: 3208672 - DNA, 25 bp, Homo sapien
taattgggaatgctggacaagctct

SEQ ID NO: 3208673 - DNA, 25 bp, Homo sapien
tctagaggcaatagagcgtacccat

SEQ ID NO: 3208674 - DNA, 25 bp, Homo sapien
caagagcactcgaattagctagcct

SEQ ID NO: 3208675 - DNA, 25 bp, Homo sapien
ctgaggtgtttaccagtaccagaaa

SEQ ID NO: 3208676 - DNA, 25 bp, Homo sapien
cacacagttggtgacagtgggaaca

SEQ ID NO: 3208677 - DNA, 25 bp, Homo sapien
gcaccaaagaagtttcttggtcttg

SEQ ID NO: 3208678 - DNA, 25 bp, Homo sapien
gggaacacagtgtacttgcaccaaa

SEQ ID NO: 3208679 - DNA, 25 bp, Homo sapien
tcccacacagttggtgacagtggga

SEQ ID NO: 3208680 - DNA, 25 bp, Homo sapien
ccaaggctggactaatggtcttttt

SEQ ID NO: 3208681 - DNA, 25 bp, Homo sapien
taacatccaaggctggactaatggt

SEQ ID NO: 3208682 - DNA, 25 bp, Homo sapien
tcaaggttaacatccaaggctggac

SEQ ID NO: 3208683 - DNA, 25 bp, Homo sapien
tcttctcaaggttaacatccaaggc

SEQ ID NO: 3208684 - DNA, 25 bp, Homo sapien
ataggtgaatgagcccatagataga

SEQ ID NO: 3208685 - DNA, 25 bp, Homo sapien
tgagcccatagatagaactagaaac

SEQ ID NO: 3208686 - DNA, 25 bp, Homo sapien
aacagttcgttttgtggcagcctta

SEQ ID NO: 3208687 - DNA, 25 bp, Homo sapien
caggattgactttgtcgttgaacag

SEQ ID NO: 3208688 - DNA, 25 bp, Homo sapien
ccttagatatagaactaggagtgag

SEQ ID NO: 3208689 - DNA, 25 bp, Homo sapien
aactaggagtgaggtcaaaacagag

SEQ ID NO: 3208690 - DNA, 25 bp, Homo sapien
caaaggaagtaaagccttagatata

SEQ ID NO: 3208691 - DNA, 25 bp, Homo sapien
gtaaagccttagatatagaactagg

SEQ ID NO: 3208692 - DNA, 25 bp, Homo sapien
gatggaaattggcaaataggattac

SEQ ID NO: 3208693 - DNA, 25 bp, Homo sapien
taggatggaaattggcaaataggat

SEQ ID NO: 3208694 - DNA, 25 bp, Homo sapien
ttaggatggaaattggcaaatagga

SEQ ID NO: 3208695 - DNA, 25 bp, Homo sapien
aggatggaaattggcaaataggatt

SEQ ID NO: 3208696 - DNA, 25 bp, Homo sapien
cagtttaatctcctcgaggcacagt

SEQ ID NO: 3208697 - DNA, 25 bp, Homo sapien
tgaaagtgcctctaacacatatgag

SEQ ID NO: 3208698 - DNA, 25 bp, Homo sapien
tctttaaatggatctctttgtgaac

SEQ ID NO: 3208699 - DNA, 25 bp, Homo sapien
cacatatgagtgtacgtacgttgta

SEQ ID NO: 3208700 - DNA, 25 bp, Homo sapien
cagcaagccgatatctgggtgattc

SEQ ID NO: 3208701 - DNA, 25 bp, Homo sapien
agaagagttccatgccagcaagccg

SEQ ID NO: 3208702 - DNA, 25 bp, Homo sapien
tctgtggcagactttggaccttggt

SEQ ID NO: 3208703 - DNA, 25 bp, Homo sapien
aagccttcaggtagttctgtggcag

SEQ ID NO: 3208704 - DNA, 25 bp, Homo sapien
ggtgcaccttgttctcaggttcttt

SEQ ID NO: 3208705 - DNA, 25 bp, Homo sapien
gaagcattcaggaatgtagataccc

SEQ ID NO: 3208706 - DNA, 25 bp, Homo sapien
ctggagaagcattcaggaatgtaga

SEQ ID NO: 3208707 - DNA, 25 bp, Homo sapien
ggaatgtagataccccacagctctc

SEQ ID NO: 3208708 - DNA, 25 bp, Homo sapien
cagtcatcaccagtgtttgtttgca

SEQ ID NO: 3208709 - DNA, 25 bp, Homo sapien
gactggagaagccaaatggttggaa

SEQ ID NO: 3208710 - DNA, 25 bp, Homo sapien
aaaaccttgatgaggtttgcttgag

SEQ ID NO: 3208711 - DNA, 25 bp, Homo sapien
ctggaaatcggaaaaccttgatgag

SEQ ID NO: 3208712 - DNA, 25 bp, Homo sapien
ctgagcagcaagcaatggttgctgc

SEQ ID NO: 3208713 - DNA, 25 bp, Homo sapien
tgtgaagattgtgctagaggtgtct

SEQ ID NO: 3208714 - DNA, 25 bp, Homo sapien
ctccagccgtgagcttttgcctctg

SEQ ID NO: 3208715 - DNA, 25 bp, Homo sapien
gcagcaagcaatggttgctgccctt

SEQ ID NO: 3208716 - DNA, 25 bp, Homo sapien
tttgccattgagttgaaggatctat

SEQ ID NO: 3208717 - DNA, 25 bp, Homo sapien
tgtaaggtgacatctcaatgtggtg

SEQ ID NO: 3208718 - DNA, 25 bp, Homo sapien
caggatggcacaaataatcagtttc

SEQ ID NO: 3208719 - DNA, 25 bp, Homo sapien
ttgatttgcgtttacctggtgatga

SEQ ID NO: 3208720 - DNA, 25 bp, Homo sapien
tcagtttaccctggccacaggatac

SEQ ID NO: 3208721 - DNA, 25 bp, Homo sapien
cacaggatactactgatcaggtttc

SEQ ID NO: 3208722 - DNA, 25 bp, Homo sapien
tagaatcactaactgcatatttggg

SEQ ID NO: 3208723 - DNA, 25 bp, Homo sapien
aacaaaatatagcaagggtccatca

SEQ ID NO: 3208724 - DNA, 25 bp, Homo sapien
tcctagttagccttccatataacct

SEQ ID NO: 3208725 - DNA, 25 bp, Homo sapien
tgtttatcctagttagccttccata

SEQ ID NO: 3208726 - DNA, 25 bp, Homo sapien
cctagttagccttccatataacctt

SEQ ID NO: 3208727 - DNA, 25 bp, Homo sapien
acactgtttatcctagttagccttc

SEQ ID NO: 3208728 - DNA, 25 bp, Homo sapien
agaactccctcagaggctgatctaa

SEQ ID NO: 3208729 - DNA, 25 bp, Homo sapien
gaactccctcagaggctgatctaag

SEQ ID NO: 3208730 - DNA, 25 bp, Homo sapien
tctctgatggcccttggaagccacc

SEQ ID NO: 3208731 - DNA, 25 bp, Homo sapien
tagtcctgctagcttccaagcggta

SEQ ID NO: 3208732 - DNA, 25 bp, Homo sapien
cagtgacctcccattgcctgatggg

SEQ ID NO: 3208733 - DNA, 25 bp, Homo sapien
ccaagcggtagatagcatttttctc

SEQ ID NO: 3208734 - DNA, 25 bp, Homo sapien
cctgtgaagaccaagtatgattctg

SEQ ID NO: 3208735 - DNA, 25 bp, Homo sapien
cctgaacatggtcagtggcagactc

SEQ ID NO: 3208736 - DNA, 25 bp, Homo sapien
taatctgatttgtgccatctgcggc

SEQ ID NO: 3208737 - DNA, 25 bp, Homo sapien
gactcagaagtggaactcaagcctt

SEQ ID NO: 3208738 - DNA, 25 bp, Homo sapien
tgggagcaaggttgatggcattggt

SEQ ID NO: 3208739 - DNA, 25 bp, Homo sapien
aatgatatagaggttgttcatccca

SEQ ID NO: 3208740 - DNA, 25 bp, Homo sapien
acagtattaaaagggagaatgatat

SEQ ID NO: 3208741 - DNA, 25 bp, Homo sapien
tcccatgttcagttaccgatgtgtt

SEQ ID NO: 3208742 - DNA, 25 bp, Homo sapien
ggcctcgaagttcatgctttaaatc

SEQ ID NO: 3208743 - DNA, 25 bp, Homo sapien
taagtaattaggctttctggaatat

SEQ ID NO: 3208744 - DNA, 25 bp, Homo sapien
tcatcaacaagaattctgtgaacca

SEQ ID NO: 3208745 - DNA, 25 bp, Homo sapien
gaatatgctaaagactggaataaag

SEQ ID NO: 3208746 - DNA, 25 bp, Homo sapien
gtttggtaccaatgcattctgccct

SEQ ID NO: 3208747 - DNA, 25 bp, Homo sapien
cagagtttggtaccaatgcattctg

SEQ ID NO: 3208748 - DNA, 25 bp, Homo sapien
tggtaccaatgcattctgccctcag

SEQ ID NO: 3208749 - DNA, 25 bp, Homo sapien
accaatgcattctgccctcagagag

SEQ ID NO: 3208750 - DNA, 25 bp, Homo sapien
tctcattggttttggggaggtacca

SEQ ID NO: 3208751 - DNA, 25 bp, Homo sapien
cactctcattggttttggggaggta

SEQ ID NO: 3208752 - DNA, 25 bp, Homo sapien
cgacacactctcattggttttgggg

SEQ ID NO: 3208753 - DNA, 25 bp, Homo sapien
cacactctcattggttttggggagg

SEQ ID NO: 3208754 - DNA, 25 bp, Homo sapien
tttcttgtaacaactgagcttgcaa

SEQ ID NO: 3208755 - DNA, 25 bp, Homo sapien
ccagaggcatcaggatccaaggttc

SEQ ID NO: 3208756 - DNA, 25 bp, Homo sapien
agaggcatcaggatccaaggttcac

SEQ ID NO: 3208757 - DNA, 25 bp, Homo sapien
tattccagaggcatcaggatccaag

SEQ ID NO: 3208758 - DNA, 25 bp, Homo sapien
gctatattccagaggcatcaggatc

SEQ ID NO: 3208759 - DNA, 25 bp, Homo sapien
cactttctggagaagttgtcattaa

SEQ ID NO: 3208760 - DNA, 25 bp, Homo sapien
cattaaagctttgacagggcagtac

SEQ ID NO: 3208761 - DNA, 25 bp, Homo sapien
acagggcagtacatttggaaggtgc

SEQ ID NO: 3208762 - DNA, 25 bp, Homo sapien
catttggaaggtgctgagaagtaag

SEQ ID NO: 3208763 - DNA, 25 bp, Homo sapien
tatttctgttgtttatgttctccat

SEQ ID NO: 3208764 - DNA, 25 bp, Homo sapien
atgttctccatcaaaattgttgaat

SEQ ID NO: 3208765 - DNA, 25 bp, Homo sapien
tgttctccatcaaaattgttgaatc

SEQ ID NO: 3208766 - DNA, 25 bp, Homo sapien
tctgttgtttatgttctccatcaaa

SEQ ID NO: 3208767 - DNA, 25 bp, Homo sapien
tgctttccacattgcaaaatttgtt

SEQ ID NO: 3208768 - DNA, 25 bp, Homo sapien
gcttatgtgctttccacattgcaaa

SEQ ID NO: 3208769 - DNA, 25 bp, Homo sapien
tttgggttttctgtgcttatgtgct

SEQ ID NO: 3208770 - DNA, 25 bp, Homo sapien
ttttctgtgcttatgtgctttccac

SEQ ID NO: 3208771 - DNA, 25 bp, Homo sapien
tctccactcacaaagtatgactcat

SEQ ID NO: 3208772 - DNA, 25 bp, Homo sapien
catgaactccaatatccactgtcac

SEQ ID NO: 3208773 - DNA, 25 bp, Homo sapien
ccactgtcactgcttgacctctaat

SEQ ID NO: 3208774 - DNA, 25 bp, Homo sapien
tgactcataaagcagccaatttctc

SEQ ID NO: 3208775 - DNA, 25 bp, Homo sapien
gccctctcctctgtcaacaacatct

SEQ ID NO: 3208776 - DNA, 25 bp, Homo sapien
catctgcactaatgctgccttcctt

SEQ ID NO: 3208777 - DNA, 25 bp, Homo sapien
tgtcaacaacatctgcactaatgct

SEQ ID NO: 3208778 - DNA, 25 bp, Homo sapien
gctgccttccttgccatcagcagtg

SEQ ID NO: 3208779 - DNA, 25 bp, Homo sapien
ggctgaagccaatgctattgattct

SEQ ID NO: 3208780 - DNA, 25 bp, Homo sapien
caagggcaaatctaaaggacatgta

SEQ ID NO: 3208781 - DNA, 25 bp, Homo sapien
gactcagatttgaggacaccaggca

SEQ ID NO: 3208782 - DNA, 25 bp, Homo sapien
tgtacttcttaggtaataggctgaa

SEQ ID NO: 3208783 - DNA, 25 bp, Homo sapien
caagcgaacgcaggaaagtcaggct

SEQ ID NO: 3208784 - DNA, 25 bp, Homo sapien
gagaggtaattacccgcctgggatc

SEQ ID NO: 3208785 - DNA, 25 bp, Homo sapien
aatcctgatgatcgcaagctgccgc

SEQ ID NO: 3208786 - DNA, 25 bp, Homo sapien
tactcggtcgctggtgacattggga

SEQ ID NO: 3208787 - DNA, 25 bp, Homo sapien
cgagggctgctctaagctggtctcc

SEQ ID NO: 3208788 - DNA, 25 bp, Homo sapien
tccagcaggcgtgaatggatgccta

SEQ ID NO: 3208789 - DNA, 25 bp, Homo sapien
aaaccctcggtctagggactgcgct

SEQ ID NO: 3208790 - DNA, 25 bp, Homo sapien
tggatgcctagacgcaggcagtgac

SEQ ID NO: 3208791 - DNA, 25 bp, Homo sapien
tacgctagttgggagcatctcggcc

SEQ ID NO: 3208792 - DNA, 25 bp, Homo sapien
tgtgattttaaagcgccctcaggga

SEQ ID NO: 3208793 - DNA, 25 bp, Homo sapien
cgcacccgggatatcaaaggcatgt

SEQ ID NO: 3208794 - DNA, 25 bp, Homo sapien
catcaaaacctttccgagagagccg

SEQ ID NO: 3208795 - DNA, 25 bp, Homo sapien
cagagggaagtatctggacaggtat

SEQ ID NO: 3208796 - DNA, 25 bp, Homo sapien
gcagagatgcaaggttcctgatgac

SEQ ID NO: 3208797 - DNA, 25 bp, Homo sapien
ggtgtaacatgctagagagcattgg

SEQ ID NO: 3208798 - DNA, 25 bp, Homo sapien
acatgctagagagcattggcagagg

SEQ ID NO: 3208799 - DNA, 25 bp, Homo sapien
agtgggagagagtagatataacaag

SEQ ID NO: 3208800 - DNA, 25 bp, Homo sapien
tttgaagaactccaaacacaatgtg

SEQ ID NO: 3208801 - DNA, 25 bp, Homo sapien
caagatacaatttgaagaactccaa

SEQ ID NO: 3208802 - DNA, 25 bp, Homo sapien
gaactccaaacacaatgtgtctcag

SEQ ID NO: 3208803 - DNA, 25 bp, Homo sapien
cattatggtcccaagaaagggaagc

SEQ ID NO: 3208804 - DNA, 25 bp, Homo sapien
gaatctactctctcattatggtccc

SEQ ID NO: 3208805 - DNA, 25 bp, Homo sapien
gaagcacaagcgacaccagatgatg

SEQ ID NO: 3208806 - DNA, 25 bp, Homo sapien
gtaacactggatactacttttgaag

SEQ ID NO: 3208807 - DNA, 25 bp, Homo sapien
caatttagtgtagggattggcaaac

SEQ ID NO: 3208808 - DNA, 25 bp, Homo sapien
catcaactctctggctctatatgac

SEQ ID NO: 3208809 - DNA, 25 bp, Homo sapien
tgacccctagcctagctcacatgga

SEQ ID NO: 3208810 - DNA, 25 bp, Homo sapien
tcaccagtccacaaaacatcacact

SEQ ID NO: 3208811 - DNA, 25 bp, Homo sapien
taacttgataagtatcagaatggct

SEQ ID NO: 3208812 - DNA, 25 bp, Homo sapien
cttcttcattgaggcactactttca

SEQ ID NO: 3208813 - DNA, 25 bp, Homo sapien
ttgaggcactactttcatcaagaaa

SEQ ID NO: 3208814 - DNA, 25 bp, Homo sapien
gataagtatcagaatggctgtcctc

SEQ ID NO: 3208815 - DNA, 25 bp, Homo sapien
ctctggtggccatgatgatgagcat

SEQ ID NO: 3208816 - DNA, 25 bp, Homo sapien
tctctggtggccatgatgatgagca

SEQ ID NO: 3208817 - DNA, 25 bp, Homo sapien
ttgcatttctctggtggccatgatg

SEQ ID NO: 3208818 - DNA, 25 bp, Homo sapien
catttctctggtggccatgatgatg

SEQ ID NO: 3208819 - DNA, 25 bp, Homo sapien
gctgcaatattccatcgatcatgaa

SEQ ID NO: 3208820 - DNA, 25 bp, Homo sapien
tgcagagaaccaaagccattgattt

SEQ ID NO: 3208821 - DNA, 25 bp, Homo sapien
tctgctgtgtcgtgctttgctaacc

SEQ ID NO: 3208822 - DNA, 25 bp, Homo sapien
atgaagacaagctgcagagaaccaa

SEQ ID NO: 3208823 - DNA, 25 bp, Homo sapien
cagaatcatattctctagtaaagcc

SEQ ID NO: 3208824 - DNA, 25 bp, Homo sapien
ctctagtaaagcctgacgacctgaa

SEQ ID NO: 3208825 - DNA, 25 bp, Homo sapien
gcctgacgacctgaagtttcctaaa

SEQ ID NO: 3208826 - DNA, 25 bp, Homo sapien
taaagcctgacgacctgaagtttcc

SEQ ID NO: 3208827 - DNA, 25 bp, Homo sapien
agctgtcctcttctgtcgctcaggg

SEQ ID NO: 3208828 - DNA, 25 bp, Homo sapien
tcagcagctacattcctgattgcca

SEQ ID NO: 3208829 - DNA, 25 bp, Homo sapien
tcctcatgagttgacatttgctctc

SEQ ID NO: 3208830 - DNA, 25 bp, Homo sapien
aaaggtggtatgtctctctcgctcc

SEQ ID NO: 3208831 - DNA, 25 bp, Homo sapien
gagccatctgtgctgcgctgcagac

SEQ ID NO: 3208832 - DNA, 25 bp, Homo sapien
cttgtaaacaggtagtgatgcggac

SEQ ID NO: 3208833 - DNA, 25 bp, Homo sapien
gcccgaggcgagtccactgaatgtg

SEQ ID NO: 3208834 - DNA, 25 bp, Homo sapien
cacacagaggtctactggaagggag

SEQ ID NO: 3208835 - DNA, 25 bp, Homo sapien
cagaggcattcaccgagaagcccat

SEQ ID NO: 3208836 - DNA, 25 bp, Homo sapien
gatggatgctcaggactctggagca

SEQ ID NO: 3208837 - DNA, 25 bp, Homo sapien
agctgcttggtgataagatgggtga

SEQ ID NO: 3208838 - DNA, 25 bp, Homo sapien
tttgcctggttgcacactggctgag

SEQ ID NO: 3208839 - DNA, 25 bp, Homo sapien
cttgtccaaagcgttctctgtccat

SEQ ID NO: 3208840 - DNA, 25 bp, Homo sapien
aaacttgtccaaagcgttctctgtc

SEQ ID NO: 3208841 - DNA, 25 bp, Homo sapien
gtccaaagcgttctctgtccatatt

SEQ ID NO: 3208842 - DNA, 25 bp, Homo sapien
gcctgaccaggtaaacttgtccaaa

SEQ ID NO: 3208843 - DNA, 25 bp, Homo sapien
tatttttcaaattgacactggtttg

SEQ ID NO: 3208844 - DNA, 25 bp, Homo sapien
tttcaaattgacactggtttggtta

SEQ ID NO: 3208845 - DNA, 25 bp, Homo sapien
aattgacactggtttggttattcat

SEQ ID NO: 3208846 - DNA, 25 bp, Homo sapien
caaattgacactggtttggttattc

SEQ ID NO: 3208847 - DNA, 25 bp, Homo sapien
cacggatgcagttcttctttcctag

SEQ ID NO: 3208848 - DNA, 25 bp, Homo sapien
tctttcctagggtactggtatggtc

SEQ ID NO: 3208849 - DNA, 25 bp, Homo sapien
aaattctaagtgaaccgccttctag

SEQ ID NO: 3208850 - DNA, 25 bp, Homo sapien
gtttcaggctccaagaggtccagct

SEQ ID NO: 3208851 - DNA, 25 bp, Homo sapien
ccttgaagaagtccttcaagtcctt

SEQ ID NO: 3208852 - DNA, 25 bp, Homo sapien
gaagaagtccttcaagtcctttgta

SEQ ID NO: 3208853 - DNA, 25 bp, Homo sapien
ttgaagaagtccttcaagtcctttg

SEQ ID NO: 3208854 - DNA, 25 bp, Homo sapien
ctccttgaagaagtccttcaagtcc

SEQ ID NO: 3208855 - DNA, 25 bp, Homo sapien
gtgcttgatcttggacatgatgcat

SEQ ID NO: 3208856 - DNA, 25 bp, Homo sapien
tcttgtgcttgatcttggacatgat

SEQ ID NO: 3208857 - DNA, 25 bp, Homo sapien
aactcttggcttcacatcctgtttc

SEQ ID NO: 3208858 - DNA, 25 bp, Homo sapien
gaactcttggcttcacatcctgttt

SEQ ID NO: 3208859 - DNA, 25 bp, Homo sapien
gaaaggtcaacaactctcatgaagt

SEQ ID NO: 3208860 - DNA, 25 bp, Homo sapien
tggcaggtctatggtcacttcggtc

SEQ ID NO: 3208861 - DNA, 25 bp, Homo sapien
tctgcggctgctgtctggatttggc

SEQ ID NO: 3208862 - DNA, 25 bp, Homo sapien
tggtaggcactgctcttcaggactc

SEQ ID NO: 3208863 - DNA, 25 bp, Homo sapien
tagaggtatcttatgtggaaatgca

SEQ ID NO: 3208864 - DNA, 25 bp, Homo sapien
ctcttggtagaggtatcttatgtgg

SEQ ID NO: 3208865 - DNA, 25 bp, Homo sapien
cttggtagaggtatcttatgtggaa

SEQ ID NO: 3208866 - DNA, 25 bp, Homo sapien
tttcctcttggtagaggtatcttat

SEQ ID NO: 3208867 - DNA, 25 bp, Homo sapien
ctgtgagttggaatgcaggcaaggt

SEQ ID NO: 3208868 - DNA, 25 bp, Homo sapien
gttggaatgcaggcaaggtgatgac

SEQ ID NO: 3208869 - DNA, 25 bp, Homo sapien
gtgagttggaatgcaggcaaggtga

SEQ ID NO: 3208870 - DNA, 25 bp, Homo sapien
tggaatgcaggcaaggtgatgacca

SEQ ID NO: 3208871 - DNA, 25 bp, Homo sapien
gaagatgcgacgttcaacttccatc

SEQ ID NO: 3208872 - DNA, 25 bp, Homo sapien
actgctttccttggatgtactccat

SEQ ID NO: 3208873 - DNA, 25 bp, Homo sapien
aagagtgggaagatgcgacgttcaa

SEQ ID NO: 3208874 - DNA, 25 bp, Homo sapien
gctttccttggatgtactccatttc

SEQ ID NO: 3208875 - DNA, 25 bp, Homo sapien
tagctttgcccctgctatggcagat

SEQ ID NO: 3208876 - DNA, 25 bp, Homo sapien
cctctctgccgggtaaacttatgca

SEQ ID NO: 3208877 - DNA, 25 bp, Homo sapien
tatggcagatcccacaattggccca

SEQ ID NO: 3208878 - DNA, 25 bp, Homo sapien
tggccaagaatgttcaccctgcaac

SEQ ID NO: 3208879 - DNA, 25 bp, Homo sapien
ttatatcttgatgggattctgcatt

SEQ ID NO: 3208880 - DNA, 25 bp, Homo sapien
ggcacaggtaacttcttttatatct

SEQ ID NO: 3208881 - DNA, 25 bp, Homo sapien
caagggcacaggtaacttcttttat

SEQ ID NO: 3208882 - DNA, 25 bp, Homo sapien
tttatatcttgatgggattctgcat

SEQ ID NO: 3208883 - DNA, 25 bp, Homo sapien
tccagcaggtcgtgagaagaagccg

SEQ ID NO: 3208884 - DNA, 25 bp, Homo sapien
tcaggtgtgggcgtccagtctccag

SEQ ID NO: 3208885 - DNA, 25 bp, Homo sapien
agaagagaccgaagcgacacccttt

SEQ ID NO: 3208886 - DNA, 25 bp, Homo sapien
tgtcacggagagtgctgggatcagc

SEQ ID NO: 3208887 - DNA, 25 bp, Homo sapien
gcgggtggaggaagcacgcctccga

SEQ ID NO: 3208888 - DNA, 25 bp, Homo sapien
gtggaggaagcacgcctccgagttc

SEQ ID NO: 3208889 - DNA, 25 bp, Homo sapien
gctgctagccggcgggtggaggaag

SEQ ID NO: 3208890 - DNA, 25 bp, Homo sapien
cgggccctcgatcccactcagcatc

SEQ ID NO: 3208891 - DNA, 25 bp, Homo sapien
ctggagagcctaagaaccgacacct

SEQ ID NO: 3208892 - DNA, 25 bp, Homo sapien
gccagaggcccgtactccgccgccg

SEQ ID NO: 3208893 - DNA, 25 bp, Homo sapien
cctgcggctggcctaaggcgccaga

SEQ ID NO: 3208894 - DNA, 25 bp, Homo sapien
agcctaagaaccgacacctgcggct

SEQ ID NO: 3208895 - DNA, 25 bp, Homo sapien
gagatgaacttggagcgccgcagca

SEQ ID NO: 3208896 - DNA, 25 bp, Homo sapien
gcagccacatttatggcgcagggag

SEQ ID NO: 3208897 - DNA, 25 bp, Homo sapien
caggggataaggagcgggtggcggc

SEQ ID NO: 3208898 - DNA, 25 bp, Homo sapien
catttatggcgcagggagacccatc

SEQ ID NO: 3208899 - DNA, 25 bp, Homo sapien
ggatgcgaggaactcacaaggccct

SEQ ID NO: 3208900 - DNA, 25 bp, Homo sapien
tgagccgggtcgtcaggtcaaacat

SEQ ID NO: 3208901 - DNA, 25 bp, Homo sapien
cacaaagtcggtcagaaggtcgctc

SEQ ID NO: 3208902 - DNA, 25 bp, Homo sapien
tgaagaaggactcgaactctggccg

SEQ ID NO: 3208903 - DNA, 25 bp, Homo sapien
ctgaagaggaatatgctgcacaagg

SEQ ID NO: 3208904 - DNA, 25 bp, Homo sapien
gctgcacaaggcttgccaatgctac

SEQ ID NO: 3208905 - DNA, 25 bp, Homo sapien
gctacagaaggttcaaatgatgcat

SEQ ID NO: 3208906 - DNA, 25 bp, Homo sapien
atgctacagaaggttcaaatgatgc

SEQ ID NO: 3208907 - DNA, 25 bp, Homo sapien
tttacatttggatccgtagtaaggc

SEQ ID NO: 3208908 - DNA, 25 bp, Homo sapien
cttgggtcatacttgcatcttttac

SEQ ID NO: 3208909 - DNA, 25 bp, Homo sapien
ggctcctgatgagaactgtaatcat

SEQ ID NO: 3208910 - DNA, 25 bp, Homo sapien
gatccgtagtaaggctcctgatgag

SEQ ID NO: 3208911 - DNA, 25 bp, Homo sapien
taccattaatagtgtcatgaagaag

SEQ ID NO: 3208912 - DNA, 25 bp, Homo sapien
ctacaattaccattaatagtgtcat

SEQ ID NO: 3208913 - DNA, 25 bp, Homo sapien
aattaccattaatagtgtcatgaag

SEQ ID NO: 3208914 - DNA, 25 bp, Homo sapien
tacaattaccattaatagtgtcatg

SEQ ID NO: 3208915 - DNA, 25 bp, Homo sapien
cagtcctttcaggagtgcaattacc

SEQ ID NO: 3208916 - DNA, 25 bp, Homo sapien
acttctggacagctgccagtccttt

SEQ ID NO: 3208917 - DNA, 25 bp, Homo sapien
tccacatgctgagccaatggccagg

SEQ ID NO: 3208918 - DNA, 25 bp, Homo sapien
tcaaaatagtaaacttctggacagc

SEQ ID NO: 3208919 - DNA, 25 bp, Homo sapien
cacaagaggaaaccaaagtcgatta

SEQ ID NO: 3208920 - DNA, 25 bp, Homo sapien
gtctcacaagaggaaaccaaagtcg

SEQ ID NO: 3208921 - DNA, 25 bp, Homo sapien
aaatggaacgcctctggagaatgct

SEQ ID NO: 3208922 - DNA, 25 bp, Homo sapien
caaatggaacgcctctggagaatgc

SEQ ID NO: 3208923 - DNA, 25 bp, Homo sapien
tgccctagagtggtaaatggacagc

SEQ ID NO: 3208924 - DNA, 25 bp, Homo sapien
tacttactacaaagcctgtggactt

SEQ ID NO: 3208925 - DNA, 25 bp, Homo sapien
cagctggcttaacgtggtaggattc

SEQ ID NO: 3208926 - DNA, 25 bp, Homo sapien
tgagacactgagcaacctatgtgaa

SEQ ID NO: 3208927 - DNA, 25 bp, Homo sapien
ggttcatagagatctggaaatccag

SEQ ID NO: 3208928 - DNA, 25 bp, Homo sapien
tctgttaattgtactaagaaggctg

SEQ ID NO: 3208929 - DNA, 25 bp, Homo sapien
tattgcctccagaataggttcatag

SEQ ID NO: 3208930 - DNA, 25 bp, Homo sapien
tgtacttgaaggcagaccatcattt

SEQ ID NO: 3208931 - DNA, 25 bp, Homo sapien
ggtcacttgagctcaagatgtagag

SEQ ID NO: 3208932 - DNA, 25 bp, Homo sapien
acttgagctcaagatgtagaggctg

SEQ ID NO: 3208933 - DNA, 25 bp, Homo sapien
gggtcacttgagctcaagatgtaga

SEQ ID NO: 3208934 - DNA, 25 bp, Homo sapien
tcacttgagctcaagatgtagaggc

SEQ ID NO: 3208935 - DNA, 25 bp, Homo sapien
ccaggcactttgattgagaattaac

SEQ ID NO: 3208936 - DNA, 25 bp, Homo sapien
tgtatttcctaggttaataagacca

SEQ ID NO: 3208937 - DNA, 25 bp, Homo sapien
gaaagtctagacaagcaagacgcca

SEQ ID NO: 3208938 - DNA, 25 bp, Homo sapien
aaacaaggcttgtataacactgttc

SEQ ID NO: 3208939 - DNA, 25 bp, Homo sapien
tcagcatgcatcaacttctacagtt

SEQ ID NO: 3208940 - DNA, 25 bp, Homo sapien
caacaatgaagtactctagcacact

SEQ ID NO: 3208941 - DNA, 25 bp, Homo sapien
tttctgagcactaaaagcagtttca

SEQ ID NO: 3208942 - DNA, 25 bp, Homo sapien
tacagtctcacaggataacaacaat

SEQ ID NO: 3208943 - DNA, 25 bp, Homo sapien
atttagatttaaagataatacttgt

SEQ ID NO: 3208944 - DNA, 25 bp, Homo sapien
ctgtgtatgggccagaaaggcaaaa

SEQ ID NO: 3208945 - DNA, 25 bp, Homo sapien
tgtgtatgggccagaaaggcaaaaa

SEQ ID NO: 3208946 - DNA, 25 bp, Homo sapien
tattaccacgcagttaacataaacg

SEQ ID NO: 3208947 - DNA, 25 bp, Homo sapien
tataaaaacttagggcatatcctga

SEQ ID NO: 3208948 - DNA, 25 bp, Homo sapien
tattcagctacaataatgggaagca

SEQ ID NO: 3208949 - DNA, 25 bp, Homo sapien
caatgggtcagcgtaatattcagct

SEQ ID NO: 3208950 - DNA, 25 bp, Homo sapien
tgtcaaggagaaatctgaggtattc

SEQ ID NO: 3208951 - DNA, 25 bp, Homo sapien
taaaccatggaggtctggaagcctc

SEQ ID NO: 3208952 - DNA, 25 bp, Homo sapien
aatatccgaggtgcgtatgcttccc

SEQ ID NO: 3208953 - DNA, 25 bp, Homo sapien
tggaagcctcaaagaatatccgagg

SEQ ID NO: 3208954 - DNA, 25 bp, Homo sapien
ctttactagtcattccacagagcag

SEQ ID NO: 3208955 - DNA, 25 bp, Homo sapien
cacagttacgctgttggaaaagaga

SEQ ID NO: 3208956 - DNA, 25 bp, Homo sapien
ggaaggaaggctgcacataccaagc

SEQ ID NO: 3208957 - DNA, 25 bp, Homo sapien
tattaattaagtggtcaggcgacaa

SEQ ID NO: 3208958 - DNA, 25 bp, Homo sapien
ttagtggcttctataaactattcta

SEQ ID NO: 3208959 - DNA, 25 bp, Homo sapien
tagtggcttctataaactattctaa

SEQ ID NO: 3208960 - DNA, 25 bp, Homo sapien
atatagctacttaaattaacttcaa

SEQ ID NO: 3208961 - DNA, 25 bp, Homo sapien
tattagtggcttctataaactattc

SEQ ID NO: 3208962 - DNA, 25 bp, Homo sapien
gtaaagaagtttcactgcattccag

SEQ ID NO: 3208963 - DNA, 25 bp, Homo sapien
cgaaagatctgtaaaggcttccact

SEQ ID NO: 3208964 - DNA, 25 bp, Homo sapien
tagaccaccatcttgtatactgggt

SEQ ID NO: 3208965 - DNA, 25 bp, Homo sapien
tgtgaggtactcctgcagttcaaac

SEQ ID NO: 3208966 - DNA, 25 bp, Homo sapien
ccagtggcagtgatacattgtctaa

SEQ ID NO: 3208967 - DNA, 25 bp, Homo sapien
gtaaaactcattaggaggactgcct

SEQ ID NO: 3208968 - DNA, 25 bp, Homo sapien
tgtgcaggaagcttcatcagtccct

SEQ ID NO: 3208969 - DNA, 25 bp, Homo sapien
caggttcctccgtgatttgcatagt

SEQ ID NO: 3208970 - DNA, 25 bp, Homo sapien
gtacttgtgatattcctggcataag

SEQ ID NO: 3208971 - DNA, 25 bp, Homo sapien
taagaatagtaatgcccactttcag

SEQ ID NO: 3208972 - DNA, 25 bp, Homo sapien
gagtgaaccacaacggaacttaata

SEQ ID NO: 3208973 - DNA, 25 bp, Homo sapien
aggatataccagagtgaaccacaac

SEQ ID NO: 3208974 - DNA, 25 bp, Homo sapien
cagagtccactggttgggttattac

SEQ ID NO: 3208975 - DNA, 25 bp, Homo sapien
ccctagtaaatgactctgggaggat

SEQ ID NO: 3208976 - DNA, 25 bp, Homo sapien
ggaaacctgctcgtaattttctgga

SEQ ID NO: 3208977 - DNA, 25 bp, Homo sapien
taatgccagagcctcagactggtgg

SEQ ID NO: 3208978 - DNA, 25 bp, Homo sapien
ccattccttggcttcgatttacaat

SEQ ID NO: 3208979 - DNA, 25 bp, Homo sapien
aatgagccatcttttgtaaggaaca

SEQ ID NO: 3208980 - DNA, 25 bp, Homo sapien
aagtcttgagggcataaataccaca

SEQ ID NO: 3208981 - DNA, 25 bp, Homo sapien
gaagagggaggatatgtccactttt

SEQ ID NO: 3208982 - DNA, 25 bp, Homo sapien
ggatcttgccaatactcaaaagagc

SEQ ID NO: 3208983 - DNA, 25 bp, Homo sapien
gcagctaccctgatatgtactaaaa

SEQ ID NO: 3208984 - DNA, 25 bp, Homo sapien
tactcctaatggaagctggactgaa

SEQ ID NO: 3208985 - DNA, 25 bp, Homo sapien
tcccaaatgtcaggctatgatacac

SEQ ID NO: 3208986 - DNA, 25 bp, Homo sapien
gcttcctggtgggtcgttgtcatca

SEQ ID NO: 3208987 - DNA, 25 bp, Homo sapien
tgaacatgaagcagatgcagcttgg

SEQ ID NO: 3208988 - DNA, 25 bp, Homo sapien
ccgggctcgagcattcaactcttgt

SEQ ID NO: 3208989 - DNA, 25 bp, Homo sapien
tcaaaatacgagtctgccaactgta

SEQ ID NO: 3208990 - DNA, 25 bp, Homo sapien
gaattacagtactgcaaggcacata

SEQ ID NO: 3208991 - DNA, 25 bp, Homo sapien
aaatgttgctcctacaggatcatgc

SEQ ID NO: 3208992 - DNA, 25 bp, Homo sapien
tattagacgtttcgtgaccagtgca

SEQ ID NO: 3208993 - DNA, 25 bp, Homo sapien
taacgcagcttaattagggaccagg

SEQ ID NO: 3208994 - DNA, 25 bp, Homo sapien
caaatcatcgaagaacattgtttcc

SEQ ID NO: 3208995 - DNA, 25 bp, Homo sapien
gataactgggataactcttgagtac

SEQ ID NO: 3208996 - DNA, 25 bp, Homo sapien
gcacaactgtggataagttaaaacc

SEQ ID NO: 3208997 - DNA, 25 bp, Homo sapien
tatgagaccaatcttcagaacaatg

SEQ ID NO: 3208998 - DNA, 25 bp, Homo sapien
cactattgggataggaaaaccacag

SEQ ID NO: 3208999 - DNA, 25 bp, Homo sapien
cgtaagttgctatcaagtaagtgga

SEQ ID NO: 3209000 - DNA, 25 bp, Homo sapien
ctgatataatctggtcgtaagttgc

SEQ ID NO: 3209001 - DNA, 25 bp, Homo sapien
tgaaagttcctagaagcatcttagc

SEQ ID NO: 3209002 - DNA, 25 bp, Homo sapien
cactgcagataccaaggaaagactc

SEQ ID NO: 3209003 - DNA, 25 bp, Homo sapien
catttttgctagcagtgaagcctaa

SEQ ID NO: 3209004 - DNA, 25 bp, Homo sapien
tacataaaatccttgagagacctga

SEQ ID NO: 3209005 - DNA, 25 bp, Homo sapien
ttagtcagctttccatatcctcagg

SEQ ID NO: 3209006 - DNA, 25 bp, Homo sapien
tgtgctgggcacacaataagcatcc

SEQ ID NO: 3209007 - DNA, 25 bp, Homo sapien
taaaagtcagggatctccagggata

SEQ ID NO: 3209008 - DNA, 25 bp, Homo sapien
tgtttgaacctttcgcatggacccc

SEQ ID NO: 3209009 - DNA, 25 bp, Homo sapien
cataaatcagagttgcacaggcacc

SEQ ID NO: 3209010 - DNA, 25 bp, Homo sapien
taataatccccttgaatgaaagacc

SEQ ID NO: 3209011 - DNA, 25 bp, Homo sapien
gatttttactagctgcacgatgttg

SEQ ID NO: 3209012 - DNA, 25 bp, Homo sapien
gtgtccagcacacggtagactcttg

SEQ ID NO: 3209013 - DNA, 25 bp, Homo sapien
ggtatgagcccacttacagggctgg

SEQ ID NO: 3209014 - DNA, 25 bp, Homo sapien
acctggtatgctctcttcagcctga

SEQ ID NO: 3209015 - DNA, 25 bp, Homo sapien
aattgagtcaatggtgccaaatcca

SEQ ID NO: 3209016 - DNA, 25 bp, Homo sapien
tagatccaaatctccacctggtatg

SEQ ID NO: 3209017 - DNA, 25 bp, Homo sapien
gcagtgtgtcttgagcttcccaaaa

SEQ ID NO: 3209018 - DNA, 25 bp, Homo sapien
tgattacccactgtaccactaaaat

SEQ ID NO: 3209019 - DNA, 25 bp, Homo sapien
tatatatagtgtgcggtaagggttt

SEQ ID NO: 3209020 - DNA, 25 bp, Homo sapien
gatgttctaagtaatctctttgatg

SEQ ID NO: 3209021 - DNA, 25 bp, Homo sapien
taagaaatcttaaccatacacctag

SEQ ID NO: 3209022 - DNA, 25 bp, Homo sapien
ttcagaagtcacagacggtccattc

SEQ ID NO: 3209023 - DNA, 25 bp, Homo sapien
gtttccaggaagataggtgcccaga

SEQ ID NO: 3209024 - DNA, 25 bp, Homo sapien
ggtacccaaataatggacaggatgg

SEQ ID NO: 3209025 - DNA, 25 bp, Homo sapien
gagttgtgctgttcattatggcggc

SEQ ID NO: 3209026 - DNA, 25 bp, Homo sapien
gcatttcaagttggcgtagccacct

SEQ ID NO: 3209027 - DNA, 25 bp, Homo sapien
ggcagaccatatgacccggaccttt

SEQ ID NO: 3209028 - DNA, 25 bp, Homo sapien
gaaaaagtcgggctccttgatgacc

SEQ ID NO: 3209029 - DNA, 25 bp, Homo sapien
taaatggaggcaacaacaagccatg

SEQ ID NO: 3209030 - DNA, 25 bp, Homo sapien
tcaagtgaagcagggggcatggaga

SEQ ID NO: 3209031 - DNA, 25 bp, Homo sapien
aggaacaaagaaatctgtacctggt

SEQ ID NO: 3209032 - DNA, 25 bp, Homo sapien
acaaagaaatctgtacctggtgtga

SEQ ID NO: 3209033 - DNA, 25 bp, Homo sapien
atctgtacctggtgtgatcaattag

SEQ ID NO: 3209034 - DNA, 25 bp, Homo sapien
tagaagatttgtacagacaacaaca

SEQ ID NO: 3209035 - DNA, 25 bp, Homo sapien
gaagatttgtacagacaacaacaaa

SEQ ID NO: 3209036 - DNA, 25 bp, Homo sapien
agaagatttgtacagacaacaacaa

SEQ ID NO: 3209037 - DNA, 25 bp, Homo sapien
aacaacatagcaacaaacaatccaa

SEQ ID NO: 3209038 - DNA, 25 bp, Homo sapien
cagtgagaaggtatttgcaaatcac

SEQ ID NO: 3209039 - DNA, 25 bp, Homo sapien
cttcccacgttcaggcccggctccg

SEQ ID NO: 3209040 - DNA, 25 bp, Homo sapien
gagccgcagggttggcagcgaagcg

SEQ ID NO: 3209041 - DNA, 25 bp, Homo sapien
gctcctgggagggatcccgctgtcc

SEQ ID NO: 3209042 - DNA, 25 bp, Homo sapien
tcaagccggagggtgggtccgctct

SEQ ID NO: 3209043 - DNA, 25 bp, Homo sapien
gaacgaggcgcttggcggcttggct

SEQ ID NO: 3209044 - DNA, 25 bp, Homo sapien
cgcccacccgccctcggtttcgatg

SEQ ID NO: 3209045 - DNA, 25 bp, Homo sapien
ctcggtttcgatgcgcccggagcga

SEQ ID NO: 3209046 - DNA, 25 bp, Homo sapien
acacacacacaatgccccgcgcggt

SEQ ID NO: 3209047 - DNA, 25 bp, Homo sapien
gcgcccggagcgatcctccttccct

SEQ ID NO: 3209048 - DNA, 25 bp, Homo sapien
ccccgactcggtgccggagcttctg

SEQ ID NO: 3209049 - DNA, 25 bp, Homo sapien
gagcttctgtcctttgcgctccgcc

SEQ ID NO: 3209050 - DNA, 25 bp, Homo sapien
agcgctcggactcagcgggactctg

SEQ ID NO: 3209051 - DNA, 25 bp, Homo sapien
agagcgctttccgaaacagacacag

SEQ ID NO: 3209052 - DNA, 25 bp, Homo sapien
ctcgcctccagacgtgccgtctcgc

SEQ ID NO: 3209053 - DNA, 25 bp, Homo sapien
gcctcgcctccagacgtgccgtctc

SEQ ID NO: 3209054 - DNA, 25 bp, Homo sapien
gcctcctttcagtgcgcccgcctcg

SEQ ID NO: 3209055 - DNA, 25 bp, Homo sapien
gcgcgccggcctcctttcagtgcgc

SEQ ID NO: 3209056 - DNA, 25 bp, Homo sapien
gcgggttccacgagttcgagtctct

SEQ ID NO: 3209057 - DNA, 25 bp, Homo sapien
tgcaggcccacgaacctgaacagaa

SEQ ID NO: 3209058 - DNA, 25 bp, Homo sapien
gagaacctagctctcctggtcgcgc

SEQ ID NO: 3209059 - DNA, 25 bp, Homo sapien
acagactccacggtgcgcgggttcc

SEQ ID NO: 3209060 - DNA, 25 bp, Homo sapien
gagccatccggagcagaccacttca

SEQ ID NO: 3209061 - DNA, 25 bp, Homo sapien
ttgcggagccatccggagcagacca

SEQ ID NO: 3209062 - DNA, 25 bp, Homo sapien
gggacttgcggagccatccggagca

SEQ ID NO: 3209063 - DNA, 25 bp, Homo sapien
acttgcggagccatccggagcagac

SEQ ID NO: 3209064 - DNA, 25 bp, Homo sapien
gagtggtgcccgcagctctacttac

SEQ ID NO: 3209065 - DNA, 25 bp, Homo sapien
cggagtggtgcccgcagctctactt

SEQ ID NO: 3209066 - DNA, 25 bp, Homo sapien
aggcccgcggagtggtgcccgcagc

SEQ ID NO: 3209067 - DNA, 25 bp, Homo sapien
ccgcggagtggtgcccgcagctcta

SEQ ID NO: 3209068 - DNA, 25 bp, Homo sapien
tgagggagtgcaaggcaccctgtcc

SEQ ID NO: 3209069 - DNA, 25 bp, Homo sapien
gaagaaagttgtccggccaagtgga

SEQ ID NO: 3209070 - DNA, 25 bp, Homo sapien
gagaccggcattcgtttaagaacca

SEQ ID NO: 3209071 - DNA, 25 bp, Homo sapien
caggagtttagctggacgtctaggt

SEQ ID NO: 3209072 - DNA, 25 bp, Homo sapien
tcagatgcaggaataaagcaggaag

SEQ ID NO: 3209073 - DNA, 25 bp, Homo sapien
ctctctccatcgcaccccatccttc

SEQ ID NO: 3209074 - DNA, 25 bp, Homo sapien
aaggctcctctctccatcgcacccc

SEQ ID NO: 3209075 - DNA, 25 bp, Homo sapien
taaagcaggaagaaggctcctctct

SEQ ID NO: 3209076 - DNA, 25 bp, Homo sapien
gcgcgttcgatatgcttgtctctac

SEQ ID NO: 3209077 - DNA, 25 bp, Homo sapien
ttcccggtgcgggagctttagcaca

SEQ ID NO: 3209078 - DNA, 25 bp, Homo sapien
cggcagggcgcgtaataacttttct

SEQ ID NO: 3209079 - DNA, 25 bp, Homo sapien
tagtgagccctaaaacctcggcagt

SEQ ID NO: 3209080 - DNA, 25 bp, Homo sapien
ctcaattcaaaaccgcgaaaatgtg

SEQ ID NO: 3209081 - DNA, 25 bp, Homo sapien
cctcctgccgagtttgacagcacat

SEQ ID NO: 3209082 - DNA, 25 bp, Homo sapien
ctcctctcgcagcaaaccgccaagg

SEQ ID NO: 3209083 - DNA, 25 bp, Homo sapien
atccaaggcgcccaaacaccagcca

SEQ ID NO: 3209084 - DNA, 25 bp, Homo sapien
tagatattcctcaacgacaaacggg

SEQ ID NO: 3209085 - DNA, 25 bp, Homo sapien
ttccctgggaaaggaccgcaactga

SEQ ID NO: 3209086 - DNA, 25 bp, Homo sapien
gaggcattacacatctctggagagc

SEQ ID NO: 3209087 - DNA, 25 bp, Homo sapien
caggtttccactaaagcaaggttga

SEQ ID NO: 3209088 - DNA, 25 bp, Homo sapien
tgttattctttaattcctccaagaa

SEQ ID NO: 3209089 - DNA, 25 bp, Homo sapien
caaatatatttatctccctacccct

SEQ ID NO: 3209090 - DNA, 25 bp, Homo sapien
tcctaaattgggccttctcaaaaca

SEQ ID NO: 3209091 - DNA, 25 bp, Homo sapien
ttcctccaagaatctgtttttccta

SEQ ID NO: 3209092 - DNA, 25 bp, Homo sapien
caatatgtcgtctttggaggacagt

SEQ ID NO: 3209093 - DNA, 25 bp, Homo sapien
tcttggcgacagttaggtactttct

SEQ ID NO: 3209094 - DNA, 25 bp, Homo sapien
gatttctccaagaataacctaagga

SEQ ID NO: 3209095 - DNA, 25 bp, Homo sapien
tctttttaagcagcacagcatactc

SEQ ID NO: 3209096 - DNA, 25 bp, Homo sapien
tatgctttcagatccaataaccaga

SEQ ID NO: 3209097 - DNA, 25 bp, Homo sapien
gagcttcttcagtcaagtagaccca

SEQ ID NO: 3209098 - DNA, 25 bp, Homo sapien
tagcagagtgcattcagtaggtagc

SEQ ID NO: 3209099 - DNA, 25 bp, Homo sapien
caattttctaaagtggagtcagtct

SEQ ID NO: 3209100 - DNA, 25 bp, Homo sapien
gaacctagcaggatctcacaactca

SEQ ID NO: 3209101 - DNA, 25 bp, Homo sapien
tcaaactacagaggcgagcataact

SEQ ID NO: 3209102 - DNA, 25 bp, Homo sapien
cccaggagctcttaaggtcttatga

SEQ ID NO: 3209103 - DNA, 25 bp, Homo sapien
gcactgccatatgcactgtgtgatt

SEQ ID NO: 3209104 - DNA, 25 bp, Homo sapien
ggaaaaagccgttctgctgaaggcc

SEQ ID NO: 3209105 - DNA, 25 bp, Homo sapien
gatgaggctgcacctatgtcaggaa

SEQ ID NO: 3209106 - DNA, 25 bp, Homo sapien
aatggtcaggagatttcacaagccc

SEQ ID NO: 3209107 - DNA, 25 bp, Homo sapien
tcacaagcccatgcacgtaggaagg

SEQ ID NO: 3209108 - DNA, 25 bp, Homo sapien
tttgccaggtagttaggaatgcttg

SEQ ID NO: 3209109 - DNA, 25 bp, Homo sapien
catgatttgaacttaaggaccctgg

SEQ ID NO: 3209110 - DNA, 25 bp, Homo sapien
tcaaaggcctgtggatgtgactaaa

SEQ ID NO: 3209111 - DNA, 25 bp, Homo sapien
aaatactagtccacgatcaaagtcc

SEQ ID NO: 3209112 - DNA, 25 bp, Homo sapien
gcaagataagtcagcaatgatccct

SEQ ID NO: 3209113 - DNA, 25 bp, Homo sapien
gaatggtctccttaccaccaggtgg

SEQ ID NO: 3209114 - DNA, 25 bp, Homo sapien
caagtgctcagatacggcaagaagc

SEQ ID NO: 3209115 - DNA, 25 bp, Homo sapien
tactgcatgatcaatgttgggaggc

SEQ ID NO: 3209116 - DNA, 25 bp, Homo sapien
tagttctgcaggtataaagcataag

SEQ ID NO: 3209117 - DNA, 25 bp, Homo sapien
ccaggatacaacattccagatgatt

SEQ ID NO: 3209118 - DNA, 25 bp, Homo sapien
catttgtcccagacaggagctccta

SEQ ID NO: 3209119 - DNA, 25 bp, Homo sapien
gcagcggttctcaatctcaattagg

SEQ ID NO: 3209120 - DNA, 25 bp, Homo sapien
tctgaattgtagtccccagcaaccc

SEQ ID NO: 3209121 - DNA, 25 bp, Homo sapien
aaatcactgctaaccgtacctggag

SEQ ID NO: 3209122 - DNA, 25 bp, Homo sapien
tgcaaatcagttaacctatccggct

SEQ ID NO: 3209123 - DNA, 25 bp, Homo sapien
gagaacagagcatcgcaaaacccag

SEQ ID NO: 3209124 - DNA, 25 bp, Homo sapien
gagcggcctaaaaaggcagcttctc

SEQ ID NO: 3209125 - DNA, 25 bp, Homo sapien
tttcatgtgagcggcctaaaaaggc

SEQ ID NO: 3209126 - DNA, 25 bp, Homo sapien
tccaacatcctgttcatgactagag

SEQ ID NO: 3209127 - DNA, 25 bp, Homo sapien
tctgacttccaacatcctgttcatg

SEQ ID NO: 3209128 - DNA, 25 bp, Homo sapien
cacaagttattctgtgtccaaatca

SEQ ID NO: 3209129 - DNA, 25 bp, Homo sapien
gaagtgcatgcatgtcacaatttag

SEQ ID NO: 3209130 - DNA, 25 bp, Homo sapien
gagtcattacaacacacagctatta

SEQ ID NO: 3209131 - DNA, 25 bp, Homo sapien
taaactgcatgtcaagtctcaatga

SEQ ID NO: 3209132 - DNA, 25 bp, Homo sapien
tatattgttatgttaaaaaagccag

SEQ ID NO: 3209133 - DNA, 25 bp, Homo sapien
ctatgggagtgttaccacgcccggg

SEQ ID NO: 3209134 - DNA, 25 bp, Homo sapien
tgtggaaatagctcttgctaggttg

SEQ ID NO: 3209135 - DNA, 25 bp, Homo sapien
gagccattgtgccaagactatttgg

SEQ ID NO: 3209136 - DNA, 25 bp, Homo sapien
ggagcttggcatcgatcatgaggac

SEQ ID NO: 3209137 - DNA, 25 bp, Homo sapien
gctgttgcccctagtctgtcgggtg

SEQ ID NO: 3209138 - DNA, 25 bp, Homo sapien
cgggtgtagcatttgtctctgttgg

SEQ ID NO: 3209139 - DNA, 25 bp, Homo sapien
gcatcgatcatgaggaccatctggc

SEQ ID NO: 3209140 - DNA, 25 bp, Homo sapien
ggatgagattggtactccataagct

SEQ ID NO: 3209141 - DNA, 25 bp, Homo sapien
actgggcagttttcctgcaggtggc

SEQ ID NO: 3209142 - DNA, 25 bp, Homo sapien
cctggcaggctggtgtagaaaatgc

SEQ ID NO: 3209143 - DNA, 25 bp, Homo sapien
tacatttgattaccaactgcggaaa

SEQ ID NO: 3209144 - DNA, 25 bp, Homo sapien
tgccaggtcagagaaggggttaaat

SEQ ID NO: 3209145 - DNA, 25 bp, Homo sapien
tttatctaactgtagtaagcctttc

SEQ ID NO: 3209146 - DNA, 25 bp, Homo sapien
ttgccaggtcagagaaggggttaaa

SEQ ID NO: 3209147 - DNA, 25 bp, Homo sapien
ttaaatttatctaactgtagtaagc

SEQ ID NO: 3209148 - DNA, 25 bp, Homo sapien
aagaaaaagtttcttcagaagccag

SEQ ID NO: 3209149 - DNA, 25 bp, Homo sapien
aaagtttcttcagaagccagtgtac

SEQ ID NO: 3209150 - DNA, 25 bp, Homo sapien
tcttcagaagccagtgtactttgtc

SEQ ID NO: 3209151 - DNA, 25 bp, Homo sapien
gtttcttcagaagccagtgtacttt

SEQ ID NO: 3209152 - DNA, 25 bp, Homo sapien
gtgcaactgcccccgcttctctgtg

SEQ ID NO: 3209153 - DNA, 25 bp, Homo sapien
tgtgcaactgcccccgcttctctgt

SEQ ID NO: 3209154 - DNA, 25 bp, Homo sapien
tcttaaacagtatcaggcccacagg

SEQ ID NO: 3209155 - DNA, 25 bp, Homo sapien
aggccatagtttgctaccctggtct

SEQ ID NO: 3209156 - DNA, 25 bp, Homo sapien
catttcatatgagccagtctagtat

SEQ ID NO: 3209157 - DNA, 25 bp, Homo sapien
aagcagcttacagcccatagtccac

SEQ ID NO: 3209158 - DNA, 25 bp, Homo sapien
gagtcccctggcatcatcaaatacc

SEQ ID NO: 3209159 - DNA, 25 bp, Homo sapien
aatacccatcctagaacactcatca

SEQ ID NO: 3209160 - DNA, 25 bp, Homo sapien
tgagtcccctggcatcatcaaatac

SEQ ID NO: 3209161 - DNA, 25 bp, Homo sapien
catcatcaaatacccatcctagaac

SEQ ID NO: 3209162 - DNA, 25 bp, Homo sapien
gacatagggaactgttataacactc

SEQ ID NO: 3209163 - DNA, 25 bp, Homo sapien
cacagtccctatgggcaatgacaat

SEQ ID NO: 3209164 - DNA, 25 bp, Homo sapien
ggatcaaatcctggtagctgtacag

SEQ ID NO: 3209165 - DNA, 25 bp, Homo sapien
tccactgttctagccgctggaggga

SEQ ID NO: 3209166 - DNA, 25 bp, Homo sapien
aacaggaatgggtgctgacaagact

SEQ ID NO: 3209167 - DNA, 25 bp, Homo sapien
gggcggtccatcaatctcgacaagc

SEQ ID NO: 3209168 - DNA, 25 bp, Homo sapien
tttcatcctgcaatttcctacgctg

SEQ ID NO: 3209169 - DNA, 25 bp, Homo sapien
tcacttactcctcattttgttaccc

SEQ ID NO: 3209170 - DNA, 25 bp, Homo sapien
caagtagtggatatagtttctggcc

SEQ ID NO: 3209171 - DNA, 25 bp, Homo sapien
catatattttcaagacagccggcca

SEQ ID NO: 3209172 - DNA, 25 bp, Homo sapien
tatgtaaacaaccaatcagatgacc

SEQ ID NO: 3209173 - DNA, 25 bp, Homo sapien
gccggccagggttatacaaatgaca

SEQ ID NO: 3209174 - DNA, 25 bp, Homo sapien
tagatagaccatgtgcagttgacac

SEQ ID NO: 3209175 - DNA, 25 bp, Homo sapien
gaaaataactagctacttctgccag

SEQ ID NO: 3209176 - DNA, 25 bp, Homo sapien
cttctgccagagaaataacagtgcc

SEQ ID NO: 3209177 - DNA, 25 bp, Homo sapien
cccagtgagacaaccagagtcattc

SEQ ID NO: 3209178 - DNA, 25 bp, Homo sapien
tctttccccatgagggctacgggtg

SEQ ID NO: 3209179 - DNA, 25 bp, Homo sapien
tctctgatgcaaacgtggaaggctc

SEQ ID NO: 3209180 - DNA, 25 bp, Homo sapien
gaaaacgattcttcatgcatgcacc

SEQ ID NO: 3209181 - DNA, 25 bp, Homo sapien
taaattatgccttctggagctactg

SEQ ID NO: 3209182 - DNA, 25 bp, Homo sapien
ccacactctaactctggtggttttg

SEQ ID NO: 3209183 - DNA, 25 bp, Homo sapien
ttcccaattgttggggctgtgccca

SEQ ID NO: 3209184 - DNA, 25 bp, Homo sapien
acactctaactctggtggttttgca

SEQ ID NO: 3209185 - DNA, 25 bp, Homo sapien
cactctaactctggtggttttgcaa

SEQ ID NO: 3209186 - DNA, 25 bp, Homo sapien
gcaagtagtccattaacaagcccat

SEQ ID NO: 3209187 - DNA, 25 bp, Homo sapien
tcaagacctagctcaagacctgttc

SEQ ID NO: 3209188 - DNA, 25 bp, Homo sapien
cttgaaaaagaactctgctgactgc

SEQ ID NO: 3209189 - DNA, 25 bp, Homo sapien
ccttgtccagatagctgaagagcaa

SEQ ID NO: 3209190 - DNA, 25 bp, Homo sapien
caaagccttggtgagatgttgtcca

SEQ ID NO: 3209191 - DNA, 25 bp, Homo sapien
gacagccactgagactaaatgaaaa

SEQ ID NO: 3209192 - DNA, 25 bp, Homo sapien
ttcagtaagatagcatacaaggttc

SEQ ID NO: 3209193 - DNA, 25 bp, Homo sapien
tcatgcattgtaagtgctcaaagcc

SEQ ID NO: 3209194 - DNA, 25 bp, Homo sapien
caagtagaaaatccggtcaatagtg

SEQ ID NO: 3209195 - DNA, 25 bp, Homo sapien
cctcgctgtctgctaccaagtagaa

SEQ ID NO: 3209196 - DNA, 25 bp, Homo sapien
taaacggccactgcgtaacacgaac

SEQ ID NO: 3209197 - DNA, 25 bp, Homo sapien
tacgaataggcttcttggcatgatc

SEQ ID NO: 3209198 - DNA, 25 bp, Homo sapien
agttgaatagtaatatcttgaactt

SEQ ID NO: 3209199 - DNA, 25 bp, Homo sapien
aatatcaacagtgttatatggttaa

SEQ ID NO: 3209200 - DNA, 25 bp, Homo sapien
tatcaacagtgttatatggttaaac

SEQ ID NO: 3209201 - DNA, 25 bp, Homo sapien
caacagtgttatatggttaaactga

SEQ ID NO: 3209202 - DNA, 25 bp, Homo sapien
cagtgttatatggttaaactgaata

SEQ ID NO: 3209203 - DNA, 25 bp, Homo sapien
tactccagcctagacgacaaagtga

SEQ ID NO: 3209204 - DNA, 25 bp, Homo sapien
ctccagcctagacgacaaagtgaga

SEQ ID NO: 3209205 - DNA, 25 bp, Homo sapien
ccagcctagacgacaaagtgagatc

SEQ ID NO: 3209206 - DNA, 25 bp, Homo sapien
tccagcctagacgacaaagtgagat

SEQ ID NO: 3209207 - DNA, 25 bp, Homo sapien
tagtaacttcacgaaaacaactgaa

SEQ ID NO: 3209208 - DNA, 25 bp, Homo sapien
tgaccacgtttagtaacttcacgaa

SEQ ID NO: 3209209 - DNA, 25 bp, Homo sapien
ttagtaacttcacgaaaacaactga

SEQ ID NO: 3209210 - DNA, 25 bp, Homo sapien
actgtgaccacgtttagtaacttca

SEQ ID NO: 3209211 - DNA, 25 bp, Homo sapien
tattttcttagactgtgataaccag

SEQ ID NO: 3209212 - DNA, 25 bp, Homo sapien
aaaattagttattctcacagggact

SEQ ID NO: 3209213 - DNA, 25 bp, Homo sapien
ttattttcttagactgtgataacca

SEQ ID NO: 3209214 - DNA, 25 bp, Homo sapien
attagttattctcacagggactggg

SEQ ID NO: 3209215 - DNA, 25 bp, Homo sapien
taacatggtaacgatattttgagag

SEQ ID NO: 3209216 - DNA, 25 bp, Homo sapien
cagcggaaataacatggtaacgata

SEQ ID NO: 3209217 - DNA, 25 bp, Homo sapien
catggtaacgatattttgagaggtt

SEQ ID NO: 3209218 - DNA, 25 bp, Homo sapien
ctggggcagcggaaataacatggta

SEQ ID NO: 3209219 - DNA, 25 bp, Homo sapien
cagatctaacagcttccaccttgtg

SEQ ID NO: 3209220 - DNA, 25 bp, Homo sapien
tcagaggcaactttctaatcctgca

SEQ ID NO: 3209221 - DNA, 25 bp, Homo sapien
aagcattcataggaaccacacacag

SEQ ID NO: 3209222 - DNA, 25 bp, Homo sapien
cacacacagtttaatgagctaggac

SEQ ID NO: 3209223 - DNA, 25 bp, Homo sapien
cacacgctgctggtaggtaggcaac

SEQ ID NO: 3209224 - DNA, 25 bp, Homo sapien
ctctggttgaattggttctcaggaa

SEQ ID NO: 3209225 - DNA, 25 bp, Homo sapien
taggcaactggtacactaactttgg

SEQ ID NO: 3209226 - DNA, 25 bp, Homo sapien
catgggtgtatacacaaaagaacta

SEQ ID NO: 3209227 - DNA, 25 bp, Homo sapien
tttagaaatctaggtgacagggccc

SEQ ID NO: 3209228 - DNA, 25 bp, Homo sapien
aaatgccataattcttatccagagg

SEQ ID NO: 3209229 - DNA, 25 bp, Homo sapien
tatccagaggtttgaaggcctaaga

SEQ ID NO: 3209230 - DNA, 25 bp, Homo sapien
taaattaaacctttaggcaatgctg

SEQ ID NO: 3209231 - DNA, 25 bp, Homo sapien
gctcataagtacctcttgtggtatc

SEQ ID NO: 3209232 - DNA, 25 bp, Homo sapien
taagtacctcttgtggtatctaaaa

SEQ ID NO: 3209233 - DNA, 25 bp, Homo sapien
tggatgctcataagtacctcttgtg

SEQ ID NO: 3209234 - DNA, 25 bp, Homo sapien
cagtggatgctcataagtacctctt

SEQ ID NO: 3209235 - DNA, 25 bp, Homo sapien
ccctctgtgggtagcacagaaaggc

SEQ ID NO: 3209236 - DNA, 25 bp, Homo sapien
ctctgtgggtagcacagaaaggcct

SEQ ID NO: 3209237 - DNA, 25 bp, Homo sapien
tgtgggtagcacagaaaggcctttt

SEQ ID NO: 3209238 - DNA, 25 bp, Homo sapien
tctgtgggtagcacagaaaggcctt

SEQ ID NO: 3209239 - DNA, 25 bp, Homo sapien
tcttcagatttataatgtagatgcc

SEQ ID NO: 3209240 - DNA, 25 bp, Homo sapien
cagatttataatgtagatgccatca

SEQ ID NO: 3209241 - DNA, 25 bp, Homo sapien
cctcttcagatttataatgtagatg

SEQ ID NO: 3209242 - DNA, 25 bp, Homo sapien
ttcagatttataatgtagatgccat

SEQ ID NO: 3209243 - DNA, 25 bp, Homo sapien
gggttttcaacggcaacaatggcat

SEQ ID NO: 3209244 - DNA, 25 bp, Homo sapien
ttttcaacggcaacaatggcatgag

SEQ ID NO: 3209245 - DNA, 25 bp, Homo sapien
ctgcagggttttcaacggcaacaat

SEQ ID NO: 3209246 - DNA, 25 bp, Homo sapien
tgcagggttttcaacggcaacaatg

SEQ ID NO: 3209247 - DNA, 25 bp, Homo sapien
ttcagcatggctctctggccagtat

SEQ ID NO: 3209248 - DNA, 25 bp, Homo sapien
agtattcctggaggatataacactg

SEQ ID NO: 3209249 - DNA, 25 bp, Homo sapien
cagcatggctctctggccagtattc

SEQ ID NO: 3209250 - DNA, 25 bp, Homo sapien
ttcctggaggatataacactgacat

SEQ ID NO: 3209251 - DNA, 25 bp, Homo sapien
cagcaattggattggctccagtggc

SEQ ID NO: 3209252 - DNA, 25 bp, Homo sapien
gattggctccagtggcagcagcaaa

SEQ ID NO: 3209253 - DNA, 25 bp, Homo sapien
ttggattggctccagtggcagcagc

SEQ ID NO: 3209254 - DNA, 25 bp, Homo sapien
attggctccagtggcagcagcaaac

SEQ ID NO: 3209255 - DNA, 25 bp, Homo sapien
ctctatgagaggctggtcttcagcc

SEQ ID NO: 3209256 - DNA, 25 bp, Homo sapien
aaggctgtctgcatctgaaggttcc

SEQ ID NO: 3209257 - DNA, 25 bp, Homo sapien
tctatgagaggctggtcttcagccc

SEQ ID NO: 3209258 - DNA, 25 bp, Homo sapien
tgtctgcatctgaaggttccaggag

SEQ ID NO: 3209259 - DNA, 25 bp, Homo sapien
atccacatcaaacccacggagtgag

SEQ ID NO: 3209260 - DNA, 25 bp, Homo sapien
catccacatcaaacccacggagtga

SEQ ID NO: 3209261 - DNA, 25 bp, Homo sapien
ttcttttttaatcacttcaggatct

SEQ ID NO: 3209262 - DNA, 25 bp, Homo sapien
tccttggtcactgccttttcagtag

SEQ ID NO: 3209263 - DNA, 25 bp, Homo sapien
ggtcactgccttttcagtagcagcc

SEQ ID NO: 3209264 - DNA, 25 bp, Homo sapien
actgccttttcagtagcagcctgct

SEQ ID NO: 3209265 - DNA, 25 bp, Homo sapien
tgagtgctccagtcttcagaaggga

SEQ ID NO: 3209266 - DNA, 25 bp, Homo sapien
tcttctatggcaggctgagtgctcc

SEQ ID NO: 3209267 - DNA, 25 bp, Homo sapien
agtgctccagtcttcagaagggaac

SEQ ID NO: 3209268 - DNA, 25 bp, Homo sapien
agtcttctatggcaggctgagtgct

SEQ ID NO: 3209269 - DNA, 25 bp, Homo sapien
aagaccttccagtggttgctcctac

SEQ ID NO: 3209270 - DNA, 25 bp, Homo sapien
ttaagaccttccagtggttgctcct

SEQ ID NO: 3209271 - DNA, 25 bp, Homo sapien
taagaccttccagtggttgctccta

SEQ ID NO: 3209272 - DNA, 25 bp, Homo sapien
tccatgttgcttaagaacccgtgca

SEQ ID NO: 3209273 - DNA, 25 bp, Homo sapien
tttccatgttgcttaagaacccgtg

SEQ ID NO: 3209274 - DNA, 25 bp, Homo sapien
gttgcttaagaacccgtgcaagaac

SEQ ID NO: 3209275 - DNA, 25 bp, Homo sapien
catgttgcttaagaacccgtgcaag

SEQ ID NO: 3209276 - DNA, 25 bp, Homo sapien
tatctgctctattttctctagataa

SEQ ID NO: 3209277 - DNA, 25 bp, Homo sapien
catagagaggtgaaatatctgctct

SEQ ID NO: 3209278 - DNA, 25 bp, Homo sapien
aatatctgctctattttctctagat

SEQ ID NO: 3209279 - DNA, 25 bp, Homo sapien
tagagaggtgaaatatctgctctat

SEQ ID NO: 3209280 - DNA, 25 bp, Homo sapien
ctccctgtgcaaaccgataaaagac

SEQ ID NO: 3209281 - DNA, 25 bp, Homo sapien
gaagcctgacatgccggaaaaaggg

SEQ ID NO: 3209282 - DNA, 25 bp, Homo sapien
tgcaaaccgataaaagaccttggga

SEQ ID NO: 3209283 - DNA, 25 bp, Homo sapien
cctgtgcaaaccgataaaagacctt

SEQ ID NO: 3209284 - DNA, 25 bp, Homo sapien
tctagttctaagcaaatatcctgca

SEQ ID NO: 3209285 - DNA, 25 bp, Homo sapien
tgtcattatattctagacccattag

SEQ ID NO: 3209286 - DNA, 25 bp, Homo sapien
ctaaggggatggataaatctggatc

SEQ ID NO: 3209287 - DNA, 25 bp, Homo sapien
caattcttgtcaagtgatgggaata

SEQ ID NO: 3209288 - DNA, 25 bp, Homo sapien
taatctttgagacatagaaaaagcc

SEQ ID NO: 3209289 - DNA, 25 bp, Homo sapien
cttaaggcactaatctctatggcaa

SEQ ID NO: 3209290 - DNA, 25 bp, Homo sapien
gcacaataaggtactcttaaggcac

SEQ ID NO: 3209291 - DNA, 25 bp, Homo sapien
tattgaaagggtagataaaagctgt

SEQ ID NO: 3209292 - DNA, 25 bp, Homo sapien
agaaacactgaccacttcgcgcagc

SEQ ID NO: 3209293 - DNA, 25 bp, Homo sapien
cacccttaattcttgcatgagaggg

SEQ ID NO: 3209294 - DNA, 25 bp, Homo sapien
tctctttatgggctcaacccggagg

SEQ ID NO: 3209295 - DNA, 25 bp, Homo sapien
tcgcgcagctaaagtcggataacaa

SEQ ID NO: 3209296 - DNA, 25 bp, Homo sapien
tagctaaaggtaaatcagctggtgc

SEQ ID NO: 3209297 - DNA, 25 bp, Homo sapien
cagctggtgcttgtaaagagctgcc

SEQ ID NO: 3209298 - DNA, 25 bp, Homo sapien
tggatggtggtgctgtatttatagc

SEQ ID NO: 3209299 - DNA, 25 bp, Homo sapien
ctgatatggaggaggtagagtagca

SEQ ID NO: 3209300 - DNA, 25 bp, Homo sapien
tgggttcgggcttcttgctttgaca

SEQ ID NO: 3209301 - DNA, 25 bp, Homo sapien
ggatcctcctgaatgccaagagttt

SEQ ID NO: 3209302 - DNA, 25 bp, Homo sapien
tgctttgacagttgatgagcaacag

SEQ ID NO: 3209303 - DNA, 25 bp, Homo sapien
acaggtagtcttgaggatcctcctg

SEQ ID NO: 3209304 - DNA, 25 bp, Homo sapien
cttctagtagaaggtattcctctcc

SEQ ID NO: 3209305 - DNA, 25 bp, Homo sapien
caaaatcttctagtagaaggtattc

SEQ ID NO: 3209306 - DNA, 25 bp, Homo sapien
aatcttctagtagaaggtattcctc

SEQ ID NO: 3209307 - DNA, 25 bp, Homo sapien
tcaaaatcttctagtagaaggtatt

SEQ ID NO: 3209308 - DNA, 25 bp, Homo sapien
tttgggtatacgacaagatgaagct

SEQ ID NO: 3209309 - DNA, 25 bp, Homo sapien
gcatgttgtccaaagtcctgtagga

SEQ ID NO: 3209310 - DNA, 25 bp, Homo sapien
tccttaatgctaaacaagatacctg

SEQ ID NO: 3209311 - DNA, 25 bp, Homo sapien
cgaaatacgtgatacagagttaacc

SEQ ID NO: 3209312 - DNA, 25 bp, Homo sapien
tttccacaggagatcggtcatgagc

SEQ ID NO: 3209313 - DNA, 25 bp, Homo sapien
tattactacgtgaaggcgacatccc

SEQ ID NO: 3209314 - DNA, 25 bp, Homo sapien
taactactgtcagtgtctgaggcgg

SEQ ID NO: 3209315 - DNA, 25 bp, Homo sapien
gagtctctacactcgatgtcccaga

SEQ ID NO: 3209316 - DNA, 25 bp, Homo sapien
tgggatgacctattatctttctctc

SEQ ID NO: 3209317 - DNA, 25 bp, Homo sapien
tttctctcattatacatatgcatac

SEQ ID NO: 3209318 - DNA, 25 bp, Homo sapien
gaacaaactatcaacatttattccc

SEQ ID NO: 3209319 - DNA, 25 bp, Homo sapien
cagggtcattgggatgacctattat

SEQ ID NO: 3209320 - DNA, 25 bp, Homo sapien
aaagtggttatggaagccttcaagt

SEQ ID NO: 3209321 - DNA, 25 bp, Homo sapien
cgtggaatatcatagcagtcttgag

SEQ ID NO: 3209322 - DNA, 25 bp, Homo sapien
cacttggaaatgctcgtggaatatc

SEQ ID NO: 3209323 - DNA, 25 bp, Homo sapien
gtgaactagatctatcacttggaaa

SEQ ID NO: 3209324 - DNA, 25 bp, Homo sapien
cattgggacgtaattttcatccagt

SEQ ID NO: 3209325 - DNA, 25 bp, Homo sapien
taaaactgctggaatgttgtcgtgg

SEQ ID NO: 3209326 - DNA, 25 bp, Homo sapien
cctggagtcattggcacataatttg

SEQ ID NO: 3209327 - DNA, 25 bp, Homo sapien
gctggacctgaagcccatatgagca

SEQ ID NO: 3209328 - DNA, 25 bp, Homo sapien
ttctaagggtatttcaagtcggtca

SEQ ID NO: 3209329 - DNA, 25 bp, Homo sapien
cggtcatctcaaatacagtcaaggc

SEQ ID NO: 3209330 - DNA, 25 bp, Homo sapien
atgtgaggtcacatttcaattaaat

SEQ ID NO: 3209331 - DNA, 25 bp, Homo sapien
catttttgcttgtcatttaaatgga

SEQ ID NO: 3209332 - DNA, 25 bp, Homo sapien
atatcctgtaactgataggtgctta

SEQ ID NO: 3209333 - DNA, 25 bp, Homo sapien
tatcctgtaactgataggtgcttaa

SEQ ID NO: 3209334 - DNA, 25 bp, Homo sapien
atcctgtaactgataggtgcttaaa

SEQ ID NO: 3209335 - DNA, 25 bp, Homo sapien
tcctgtaactgataggtgcttaaat

SEQ ID NO: 3209336 - DNA, 25 bp, Homo sapien
tgacttgccatgactctaaaactgg

SEQ ID NO: 3209337 - DNA, 25 bp, Homo sapien
caagtacaacatagtatccagctac

SEQ ID NO: 3209338 - DNA, 25 bp, Homo sapien
tcagacataacaaagaccacttggt

SEQ ID NO: 3209339 - DNA, 25 bp, Homo sapien
gaaatgccataagaatacggatgtg

SEQ ID NO: 3209340 - DNA, 25 bp, Homo sapien
gcggctggagatcttgcagcactct

SEQ ID NO: 3209341 - DNA, 25 bp, Homo sapien
gagatcttgcagcactctgtgccac

SEQ ID NO: 3209342 - DNA, 25 bp, Homo sapien
ttgcagcactctgtgccacacagtc

SEQ ID NO: 3209343 - DNA, 25 bp, Homo sapien
tgcggctggagatcttgcagcactc

SEQ ID NO: 3209344 - DNA, 25 bp, Homo sapien
atttagctggatactatgttggagc

SEQ ID NO: 3209345 - DNA, 25 bp, Homo sapien
gagaatcttaggaaatttagctgga

SEQ ID NO: 3209346 - DNA, 25 bp, Homo sapien
gcttggagttcagttttgaactctc

SEQ ID NO: 3209347 - DNA, 25 bp, Homo sapien
agacctttagggatatagagaatct

SEQ ID NO: 3209348 - DNA, 25 bp, Homo sapien
ttttgggcaagatccactccctacc

SEQ ID NO: 3209349 - DNA, 25 bp, Homo sapien
aatgaggcagcctgagtttaaaagg

SEQ ID NO: 3209350 - DNA, 25 bp, Homo sapien
gatatctagcaccttacctatcgaa

SEQ ID NO: 3209351 - DNA, 25 bp, Homo sapien
tacatctattaggtggcagaatcag

SEQ ID NO: 3209352 - DNA, 25 bp, Homo sapien
gaatcagttcgctctaaaccatggg

SEQ ID NO: 3209353 - DNA, 25 bp, Homo sapien
ttgtgaatcagttcgctctaaacca

SEQ ID NO: 3209354 - DNA, 25 bp, Homo sapien
caaagtcacctatggtttgtgaatc

SEQ ID NO: 3209355 - DNA, 25 bp, Homo sapien
tatggtttgtgaatcagttcgctct

SEQ ID NO: 3209356 - DNA, 25 bp, Homo sapien
tctcgagcaaaactcctagtgatgg

SEQ ID NO: 3209357 - DNA, 25 bp, Homo sapien
cctagtgatgggagatctaactggg

SEQ ID NO: 3209358 - DNA, 25 bp, Homo sapien
taactggggcttgtaattcttccca

SEQ ID NO: 3209359 - DNA, 25 bp, Homo sapien
attcttcccattctggcaaaggttt

SEQ ID NO: 3209360 - DNA, 25 bp, Homo sapien
tgtgagtcactgcttgaagttgtgc

SEQ ID NO: 3209361 - DNA, 25 bp, Homo sapien
tgtgctatgcactgaatctggtcgg

SEQ ID NO: 3209362 - DNA, 25 bp, Homo sapien
tgggttcatgggaacataattctct

SEQ ID NO: 3209363 - DNA, 25 bp, Homo sapien
tcactggacaggtttgggttcatgg

SEQ ID NO: 3209364 - DNA, 25 bp, Homo sapien
gtgacaatatctactctgaccgaga

SEQ ID NO: 3209365 - DNA, 25 bp, Homo sapien
tttacgataagaaaacagttcactc

SEQ ID NO: 3209366 - DNA, 25 bp, Homo sapien
gagtcaacttactatactgaggaaa

SEQ ID NO: 3209367 - DNA, 25 bp, Homo sapien
tggctatttactattttgggcaaaa

SEQ ID NO: 3209368 - DNA, 25 bp, Homo sapien
tactgttgaacatctacggaagcct

SEQ ID NO: 3209369 - DNA, 25 bp, Homo sapien
ttcaccagacataccactcgtactg

SEQ ID NO: 3209370 - DNA, 25 bp, Homo sapien
caaaatcaacggtcagacattcacc

SEQ ID NO: 3209371 - DNA, 25 bp, Homo sapien
ctgaaagtattagacaacaaaatca

SEQ ID NO: 3209372 - DNA, 25 bp, Homo sapien
cgagatctaagtattccacctgttt

SEQ ID NO: 3209373 - DNA, 25 bp, Homo sapien
tttcccagaatctaagtcgagatct

SEQ ID NO: 3209374 - DNA, 25 bp, Homo sapien
ttcctccatcaagactgttactgcc

SEQ ID NO: 3209375 - DNA, 25 bp, Homo sapien
tcaagactgttactgccaaagagat

SEQ ID NO: 3209376 - DNA, 25 bp, Homo sapien
ggtcaacaacaacataatccactct

SEQ ID NO: 3209377 - DNA, 25 bp, Homo sapien
gcttcccgggtactctttagagcca

SEQ ID NO: 3209378 - DNA, 25 bp, Homo sapien
gagccaaggtcttctgttggtcaac

SEQ ID NO: 3209379 - DNA, 25 bp, Homo sapien
tcatctgctacactgctgcctgagc

SEQ ID NO: 3209380 - DNA, 25 bp, Homo sapien
tattagcacatcactgcctggtacg

SEQ ID NO: 3209381 - DNA, 25 bp, Homo sapien
cattaaccagagaactaggtcctga

SEQ ID NO: 3209382 - DNA, 25 bp, Homo sapien
gatctacctagagtggaagtgtcaa

SEQ ID NO: 3209383 - DNA, 25 bp, Homo sapien
ttcaaaggtgcaagatcccacccgg

SEQ ID NO: 3209384 - DNA, 25 bp, Homo sapien
tcagaaatctggttggaaggagtcc

SEQ ID NO: 3209385 - DNA, 25 bp, Homo sapien
caacaggtgctacatacgagaatca

SEQ ID NO: 3209386 - DNA, 25 bp, Homo sapien
gcacagtactatggccaatgggcca

SEQ ID NO: 3209387 - DNA, 25 bp, Homo sapien
tactcaggcaacagttagaggtctg

SEQ ID NO: 3209388 - DNA, 25 bp, Homo sapien
taagtgctttagacccttgataggc

SEQ ID NO: 3209389 - DNA, 25 bp, Homo sapien
taataccaacactttcaacgggcca

SEQ ID NO: 3209390 - DNA, 25 bp, Homo sapien
gacctaccagaatgacccgaagaca

SEQ ID NO: 3209391 - DNA, 25 bp, Homo sapien
tcagcattattagagggccaaaggc

SEQ ID NO: 3209392 - DNA, 25 bp, Homo sapien
tgtttgaccaaacacatgggcgcca

SEQ ID NO: 3209393 - DNA, 25 bp, Homo sapien
gggcgccatagcctcaccaagttga

SEQ ID NO: 3209394 - DNA, 25 bp, Homo sapien
aagataaaggttgcatgcaggccct

SEQ ID NO: 3209395 - DNA, 25 bp, Homo sapien
tatatcagagatggtggtaacttcc

SEQ ID NO: 3209396 - DNA, 25 bp, Homo sapien
gataaagatgaggtagatttctttc

SEQ ID NO: 3209397 - DNA, 25 bp, Homo sapien
ttgtaaagataaagatgaggtagat

SEQ ID NO: 3209398 - DNA, 25 bp, Homo sapien
tattttttcacacatatttgtaaag

SEQ ID NO: 3209399 - DNA, 25 bp, Homo sapien
tcacacatatttgtaaagataaaga

SEQ ID NO: 3209400 - DNA, 25 bp, Homo sapien
atcctccattgtccagctcaatctc

SEQ ID NO: 3209401 - DNA, 25 bp, Homo sapien
ttcttgcaaatcctccattgtccag

SEQ ID NO: 3209402 - DNA, 25 bp, Homo sapien
ctccattgtccagctcaatctccat

SEQ ID NO: 3209403 - DNA, 25 bp, Homo sapien
cttcttgcaaatcctccattgtcca

SEQ ID NO: 3209404 - DNA, 25 bp, Homo sapien
gcttataatatgagtcacaggtcaa

SEQ ID NO: 3209405 - DNA, 25 bp, Homo sapien
ttagcaatgcttcgtattggcagtc

SEQ ID NO: 3209406 - DNA, 25 bp, Homo sapien
ttgacccctactagcactgcatgag

SEQ ID NO: 3209407 - DNA, 25 bp, Homo sapien
gacacttaagaatcagcttctcagg

SEQ ID NO: 3209408 - DNA, 25 bp, Homo sapien
catcgctgctggcaatgtgcatatg

SEQ ID NO: 3209409 - DNA, 25 bp, Homo sapien
aacaacttgttcatcgctgctggca

SEQ ID NO: 3209410 - DNA, 25 bp, Homo sapien
ttgttcatcgctgctggcaatgtgc

SEQ ID NO: 3209411 - DNA, 25 bp, Homo sapien
cgctgctggcaatgtgcatatgtaa

SEQ ID NO: 3209412 - DNA, 25 bp, Homo sapien
gtcagatttcccttgaaaattcagt

SEQ ID NO: 3209413 - DNA, 25 bp, Homo sapien
tactttttgtcagatttcccttgaa

SEQ ID NO: 3209414 - DNA, 25 bp, Homo sapien
ctactttttgtcagatttcccttga

SEQ ID NO: 3209415 - DNA, 25 bp, Homo sapien
tttgtcagatttcccttgaaaattc

SEQ ID NO: 3209416 - DNA, 25 bp, Homo sapien
ttccctctgggatcaggagccaggc

SEQ ID NO: 3209417 - DNA, 25 bp, Homo sapien
tccctctgggatcaggagccaggct

SEQ ID NO: 3209418 - DNA, 25 bp, Homo sapien
ctgaattgactaagacaagtatttt

SEQ ID NO: 3209419 - DNA, 25 bp, Homo sapien
attgactaagacaagtattttctgt

SEQ ID NO: 3209420 - DNA, 25 bp, Homo sapien
aattgactaagacaagtattttctg

SEQ ID NO: 3209421 - DNA, 25 bp, Homo sapien
gaattgactaagacaagtattttct

SEQ ID NO: 3209422 - DNA, 25 bp, Homo sapien
actaagcagcgttccaaaaatagac

SEQ ID NO: 3209423 - DNA, 25 bp, Homo sapien
gactcaccaaatttgttctacttaa

SEQ ID NO: 3209424 - DNA, 25 bp, Homo sapien
ttaaattgcaactgaaatatcccat

SEQ ID NO: 3209425 - DNA, 25 bp, Homo sapien
gcgtgcacctttagtaccagctttt

SEQ ID NO: 3209426 - DNA, 25 bp, Homo sapien
gattggagctccaagcatgctgtag

SEQ ID NO: 3209427 - DNA, 25 bp, Homo sapien
ttggagctccaagcatgctgtaggg

SEQ ID NO: 3209428 - DNA, 25 bp, Homo sapien
gctccaagcatgctgtagggttcct

SEQ ID NO: 3209429 - DNA, 25 bp, Homo sapien
tatggattggagctccaagcatgct

SEQ ID NO: 3209430 - DNA, 25 bp, Homo sapien
cagaacgcatgtaaggaggaagccc

SEQ ID NO: 3209431 - DNA, 25 bp, Homo sapien
tgaatggtaagtgctccagaacgca

SEQ ID NO: 3209432 - DNA, 25 bp, Homo sapien
gaaggcccactgagttgtgttctga

SEQ ID NO: 3209433 - DNA, 25 bp, Homo sapien
tgtaactctgtcactggtcagaagg

SEQ ID NO: 3209434 - DNA, 25 bp, Homo sapien
ggaagtaatgctagtttatttgatc

SEQ ID NO: 3209435 - DNA, 25 bp, Homo sapien
gaatcctctccctctaagatctgaa

SEQ ID NO: 3209436 - DNA, 25 bp, Homo sapien
ggaaggttttctgcttataacattc

SEQ ID NO: 3209437 - DNA, 25 bp, Homo sapien
cataatctttaaccataaagtggaa

SEQ ID NO: 3209438 - DNA, 25 bp, Homo sapien
taacggctcacggttctcgctgtgt

SEQ ID NO: 3209439 - DNA, 25 bp, Homo sapien
ttccagatctctagccggctcggga

SEQ ID NO: 3209440 - DNA, 25 bp, Homo sapien
gcggcactaccggaaaacttgtctg

SEQ ID NO: 3209441 - DNA, 25 bp, Homo sapien
ggcaggacgcgagctcagtgtttta

SEQ ID NO: 3209442 - DNA, 25 bp, Homo sapien
agcatccaggacgacgacctacgcc

SEQ ID NO: 3209443 - DNA, 25 bp, Homo sapien
tctggaagataacatctatctcgcc

SEQ ID NO: 3209444 - DNA, 25 bp, Homo sapien
tacgccaccgactttcaacactcgc

SEQ ID NO: 3209445 - DNA, 25 bp, Homo sapien
ctgaggctgggaaaacgcttcgccg

SEQ ID NO: 3209446 - DNA, 25 bp, Homo sapien
gccagacgggtcactgaggtcaagg

SEQ ID NO: 3209447 - DNA, 25 bp, Homo sapien
aatcacgtcgacgagggtgggcggg

SEQ ID NO: 3209448 - DNA, 25 bp, Homo sapien
ctcacggcgggaatcacgtcgacga

SEQ ID NO: 3209449 - DNA, 25 bp, Homo sapien
gggccagacgggtcactgaggtcaa

SEQ ID NO: 3209450 - DNA, 25 bp, Homo sapien
gggctctaggttccaccggcgctta

SEQ ID NO: 3209451 - DNA, 25 bp, Homo sapien
gagctgcacactcccaaacgttctg

SEQ ID NO: 3209452 - DNA, 25 bp, Homo sapien
gatgttccgtctgcgtcacccgctg

SEQ ID NO: 3209453 - DNA, 25 bp, Homo sapien
gctacgtcgcaataaactggtggag

SEQ ID NO: 3209454 - DNA, 25 bp, Homo sapien
cgggggtggcggaggctcggccgcg

SEQ ID NO: 3209455 - DNA, 25 bp, Homo sapien
gcgggggtggcggaggctcggccgc

SEQ ID NO: 3209456 - DNA, 25 bp, Homo sapien
gggtggcggaggctcggccgcggac

SEQ ID NO: 3209457 - DNA, 25 bp, Homo sapien
gtggcggaggctcggccgcggacga

SEQ ID NO: 3209458 - DNA, 25 bp, Homo sapien
tggccgcagacgcaaccgcctgcgc

SEQ ID NO: 3209459 - DNA, 25 bp, Homo sapien
ttgctcccgccgctggcgatcgagg

SEQ ID NO: 3209460 - DNA, 25 bp, Homo sapien
tccatctcggcgtctgcgggaccag

SEQ ID NO: 3209461 - DNA, 25 bp, Homo sapien
gcgatcgaggctgcgggcttggaag

SEQ ID NO: 3209462 - DNA, 25 bp, Homo sapien
gctccccatgccgcaagtcgccctc

SEQ ID NO: 3209463 - DNA, 25 bp, Homo sapien
ctccccatgccgcaagtcgccctca

SEQ ID NO: 3209464 - DNA, 25 bp, Homo sapien
cgctccccatgccgcaagtcgccct

SEQ ID NO: 3209465 - DNA, 25 bp, Homo sapien
tccccatgccgcaagtcgccctcac

SEQ ID NO: 3209466 - DNA, 25 bp, Homo sapien
gacgcgctgcttttaaatgcctcct

SEQ ID NO: 3209467 - DNA, 25 bp, Homo sapien
caagtcctcggacgcgctgctttta

SEQ ID NO: 3209468 - DNA, 25 bp, Homo sapien
ctgcaaggaccgggaagaagaaaag

SEQ ID NO: 3209469 - DNA, 25 bp, Homo sapien
gctgcttttaaatgcctccttcacc

SEQ ID NO: 3209470 - DNA, 25 bp, Homo sapien
gcgcactcggccatccagctctcgc

SEQ ID NO: 3209471 - DNA, 25 bp, Homo sapien
gcactcggccatccagctctcgcca

SEQ ID NO: 3209472 - DNA, 25 bp, Homo sapien
tgcgcactcggccatccagctctcg

SEQ ID NO: 3209473 - DNA, 25 bp, Homo sapien
cactcggccatccagctctcgccat

SEQ ID NO: 3209474 - DNA, 25 bp, Homo sapien
aattagacgggggatccgagacagc

SEQ ID NO: 3209475 - DNA, 25 bp, Homo sapien
ttgcttcccttccagtggaatagtg

SEQ ID NO: 3209476 - DNA, 25 bp, Homo sapien
acagaagcagctgcgccccgcttat

SEQ ID NO: 3209477 - DNA, 25 bp, Homo sapien
cacttattcatcccccctaaattag

SEQ ID NO: 3209478 - DNA, 25 bp, Homo sapien
ctttccaggtgacgcatcatcaaat

SEQ ID NO: 3209479 - DNA, 25 bp, Homo sapien
ttgctttccaggtgacgcatcatca

SEQ ID NO: 3209480 - DNA, 25 bp, Homo sapien
cataggtaggatctggttcttggat

SEQ ID NO: 3209481 - DNA, 25 bp, Homo sapien
gctttccaggtgacgcatcatcaaa

SEQ ID NO: 3209482 - DNA, 25 bp, Homo sapien
cttccatttggcttacatagacaca

SEQ ID NO: 3209483 - DNA, 25 bp, Homo sapien
catacactgagtaactattctggtc

SEQ ID NO: 3209484 - DNA, 25 bp, Homo sapien
tatctcaggaggaggttatcaccag

SEQ ID NO: 3209485 - DNA, 25 bp, Homo sapien
gtcttcacctcgcttccaaggttaa

SEQ ID NO: 3209486 - DNA, 25 bp, Homo sapien
gaggtgggagcaagaactgattaga

SEQ ID NO: 3209487 - DNA, 25 bp, Homo sapien
tgctaaaactcattgaattacaaac

SEQ ID NO: 3209488 - DNA, 25 bp, Homo sapien
gggatgatggaactactctgcatca

SEQ ID NO: 3209489 - DNA, 25 bp, Homo sapien
gaactactctgcatcatgattgtga

SEQ ID NO: 3209490 - DNA, 25 bp, Homo sapien
tcatctttttttattcgtgggcgcc

SEQ ID NO: 3209491 - DNA, 25 bp, Homo sapien
ctgctttaataaatactcgaatcta

SEQ ID NO: 3209492 - DNA, 25 bp, Homo sapien
tcgccaacggatagtaagttctgct

SEQ ID NO: 3209493 - DNA, 25 bp, Homo sapien
tcgaatctatttgcccggtcagttt

SEQ ID NO: 3209494 - DNA, 25 bp, Homo sapien
acgatggagagtcttcaaatcgagt

SEQ ID NO: 3209495 - DNA, 25 bp, Homo sapien
tcttcaaatcgagtgcaaacattgg

SEQ ID NO: 3209496 - DNA, 25 bp, Homo sapien
gagagtcttcaaatcgagtgcaaac

SEQ ID NO: 3209497 - DNA, 25 bp, Homo sapien
caaatcgagtgcaaacattggttgc

SEQ ID NO: 3209498 - DNA, 25 bp, Homo sapien
ttgcttcacaaatagtagccaacac

SEQ ID NO: 3209499 - DNA, 25 bp, Homo sapien
tagatttacatatacttcagggcaa

SEQ ID NO: 3209500 - DNA, 25 bp, Homo sapien
ttaaccaaaggagatctcaaagggc

SEQ ID NO: 3209501 - DNA, 25 bp, Homo sapien
tgctctcatctccatcaaaatctga

SEQ ID NO: 3209502 - DNA, 25 bp, Homo sapien
gaaatgagccagtttaatcctcgga

SEQ ID NO: 3209503 - DNA, 25 bp, Homo sapien
tctgcaaggataccattgatgccat

SEQ ID NO: 3209504 - DNA, 25 bp, Homo sapien
aatcctcggacctgataatctctca

SEQ ID NO: 3209505 - DNA, 25 bp, Homo sapien
taatctctcagtttaccccatttta

SEQ ID NO: 3209506 - DNA, 25 bp, Homo sapien
tcaaacaaacagatctaagtgttgg

SEQ ID NO: 3209507 - DNA, 25 bp, Homo sapien
taagtgttggtacccatctcttgaa

SEQ ID NO: 3209508 - DNA, 25 bp, Homo sapien
tgtagacttaggaaccaaaaccata

SEQ ID NO: 3209509 - DNA, 25 bp, Homo sapien
gagaaattgtttgaagagtctttcc

SEQ ID NO: 3209510 - DNA, 25 bp, Homo sapien
tcataagatgttacacatacatccc

SEQ ID NO: 3209511 - DNA, 25 bp, Homo sapien
tacatcccattctcccggtaataaa

SEQ ID NO: 3209512 - DNA, 25 bp, Homo sapien
gagcttcatctattactaagtatct

SEQ ID NO: 3209513 - DNA, 25 bp, Homo sapien
atttttgatcctgtgagcttcatct

SEQ ID NO: 3209514 - DNA, 25 bp, Homo sapien
aagttaagaagtgaccacagctcat

SEQ ID NO: 3209515 - DNA, 25 bp, Homo sapien
ctgaattaaacacatctggcaacag

SEQ ID NO: 3209516 - DNA, 25 bp, Homo sapien
gtcttgaattccctcactatttctg

SEQ ID NO: 3209517 - DNA, 25 bp, Homo sapien
tctgaagaggtgttccagttaataa

SEQ ID NO: 3209518 - DNA, 25 bp, Homo sapien
aaggcagttgtttgtatcaaaccag

SEQ ID NO: 3209519 - DNA, 25 bp, Homo sapien
gttgtttgtatcaaaccaggaatca

SEQ ID NO: 3209520 - DNA, 25 bp, Homo sapien
caactagtttttgatccccaaggca

SEQ ID NO: 3209521 - DNA, 25 bp, Homo sapien
ctagtttttgatccccaaggcagtt

SEQ ID NO: 3209522 - DNA, 25 bp, Homo sapien
cagccttaattcgacgaaggaggaa

SEQ ID NO: 3209523 - DNA, 25 bp, Homo sapien
gacgaaggaggaatggacgcaaaac

SEQ ID NO: 3209524 - DNA, 25 bp, Homo sapien
aattcgacgaaggaggaatggacgc

SEQ ID NO: 3209525 - DNA, 25 bp, Homo sapien
ttcaacatcagccttaattcgacga

SEQ ID NO: 3209526 - DNA, 25 bp, Homo sapien
tcaatagtgctatcaagtacatctg

SEQ ID NO: 3209527 - DNA, 25 bp, Homo sapien
tgctatcaagtacatctgagaatac

SEQ ID NO: 3209528 - DNA, 25 bp, Homo sapien
tagtgctatcaagtacatctgagaa

SEQ ID NO: 3209529 - DNA, 25 bp, Homo sapien
aatcaatagtgctatcaagtacatc

SEQ ID NO: 3209530 - DNA, 25 bp, Homo sapien
ttttaacttagggagcagcttgtct

SEQ ID NO: 3209531 - DNA, 25 bp, Homo sapien
catatctgttgtataaggtggacca

SEQ ID NO: 3209532 - DNA, 25 bp, Homo sapien
tgtctaaaaccaccattttgccact

SEQ ID NO: 3209533 - DNA, 25 bp, Homo sapien
gccactgttggttactagatgcata

SEQ ID NO: 3209534 - DNA, 25 bp, Homo sapien
cctactggtccaaatgtcattctta

SEQ ID NO: 3209535 - DNA, 25 bp, Homo sapien
ccctgcagagtttaatatacctttc

SEQ ID NO: 3209536 - DNA, 25 bp, Homo sapien
catagaggagattcacctactggtc

SEQ ID NO: 3209537 - DNA, 25 bp, Homo sapien
ctgggacatgagactacttaatagt

SEQ ID NO: 3209538 - DNA, 25 bp, Homo sapien
tgactgaagattagtactcgtgaac

SEQ ID NO: 3209539 - DNA, 25 bp, Homo sapien
gtgtctgaccatccaacctgcagta

SEQ ID NO: 3209540 - DNA, 25 bp, Homo sapien
aaatgtccaatacccttgtcatttg

SEQ ID NO: 3209541 - DNA, 25 bp, Homo sapien
gggtgtctgaccatccaacctgcag

SEQ ID NO: 3209542 - DNA, 25 bp, Homo sapien
caaaattactacatcagcagtcgca

SEQ ID NO: 3209543 - DNA, 25 bp, Homo sapien
caagattgatgccaagaccaccagc

SEQ ID NO: 3209544 - DNA, 25 bp, Homo sapien
cagcacgcgtgcttaacatgaaaac

SEQ ID NO: 3209545 - DNA, 25 bp, Homo sapien
aaactttgtgctgtttggttcattg

SEQ ID NO: 3209546 - DNA, 25 bp, Homo sapien
tataaagcggaacactctgactgtc

SEQ ID NO: 3209547 - DNA, 25 bp, Homo sapien
cgttctactattctttcttctacag

SEQ ID NO: 3209548 - DNA, 25 bp, Homo sapien
gaatccagtctgagtttcatctcag

SEQ ID NO: 3209549 - DNA, 25 bp, Homo sapien
tctgactgtcttagtctgcccaatt

SEQ ID NO: 3209550 - DNA, 25 bp, Homo sapien
tctgatgctaacatctcaagttggc

SEQ ID NO: 3209551 - DNA, 25 bp, Homo sapien
tagcattagggataccaaagacatg

SEQ ID NO: 3209552 - DNA, 25 bp, Homo sapien
caggtatgcagacatatggctaaca

SEQ ID NO: 3209553 - DNA, 25 bp, Homo sapien
caatgtaacagtatgcctttcagct

SEQ ID NO: 3209554 - DNA, 25 bp, Homo sapien
gttcagattctgatccacaagcctc

SEQ ID NO: 3209555 - DNA, 25 bp, Homo sapien
aataccatcgatatcttcatcagtg

SEQ ID NO: 3209556 - DNA, 25 bp, Homo sapien
ccaaaataccatcgatatcttcatc

SEQ ID NO: 3209557 - DNA, 25 bp, Homo sapien
tcccaattttgttcagattctgatc

SEQ ID NO: 3209558 - DNA, 25 bp, Homo sapien
cttctccttcgaagttataaacact

SEQ ID NO: 3209559 - DNA, 25 bp, Homo sapien
tgaactttcgcccatcttggagagc

SEQ ID NO: 3209560 - DNA, 25 bp, Homo sapien
tctaagtgaactttcgcccatcttg

SEQ ID NO: 3209561 - DNA, 25 bp, Homo sapien
taaacacttgactctgtatccattg

SEQ ID NO: 3209562 - DNA, 25 bp, Homo sapien
tccctttattaccagccaattctgc

SEQ ID NO: 3209563 - DNA, 25 bp, Homo sapien
ccaagtattacttatgaagttaaga

SEQ ID NO: 3209564 - DNA, 25 bp, Homo sapien
taaaatgaatcaggttaccatccca

SEQ ID NO: 3209565 - DNA, 25 bp, Homo sapien
aattactattcatcccatacaagaa

SEQ ID NO: 3209566 - DNA, 25 bp, Homo sapien
ggttcactaacacgaagagcttccc

SEQ ID NO: 3209567 - DNA, 25 bp, Homo sapien
ggttcaatccactctgtgaatgcaa

SEQ ID NO: 3209568 - DNA, 25 bp, Homo sapien
ccctgaaatatgcatcaacggcata

SEQ ID NO: 3209569 - DNA, 25 bp, Homo sapien
catcaacggcatagttggcttttct

SEQ ID NO: 3209570 - DNA, 25 bp, Homo sapien
tgggttgttttggaggtcgaggagc

SEQ ID NO: 3209571 - DNA, 25 bp, Homo sapien
caaataaacgtggaggaaagaactg

SEQ ID NO: 3209572 - DNA, 25 bp, Homo sapien
tgcattaggcagctcaggatttcga

SEQ ID NO: 3209573 - DNA, 25 bp, Homo sapien
taactcttcatcattaagggattca

SEQ ID NO: 3209574 - DNA, 25 bp, Homo sapien
gtgctgcattaggcagctcaggatt

SEQ ID NO: 3209575 - DNA, 25 bp, Homo sapien
gctgcattaggcagctcaggatttc

SEQ ID NO: 3209576 - DNA, 25 bp, Homo sapien
ttttcaatatcatcacgaccccact

SEQ ID NO: 3209577 - DNA, 25 bp, Homo sapien
tcaatatcatcacgaccccacttct

SEQ ID NO: 3209578 - DNA, 25 bp, Homo sapien
tttcaatatcatcacgaccccactt

SEQ ID NO: 3209579 - DNA, 25 bp, Homo sapien
atatcatcacgaccccacttctcat

SEQ ID NO: 3209580 - DNA, 25 bp, Homo sapien
tatgtcctggagctcgttgcacctt

SEQ ID NO: 3209581 - DNA, 25 bp, Homo sapien
aattctcgcctctcccctttcaatc

SEQ ID NO: 3209582 - DNA, 25 bp, Homo sapien
gtcctggagctcgttgcacctttcc

SEQ ID NO: 3209583 - DNA, 25 bp, Homo sapien
ctttgtgtcaagtgctttcttgatg

SEQ ID NO: 3209584 - DNA, 25 bp, Homo sapien
caaatccaagtttgtgaagcataca

SEQ ID NO: 3209585 - DNA, 25 bp, Homo sapien
gcgaatacactgtcgcaattcatca

SEQ ID NO: 3209586 - DNA, 25 bp, Homo sapien
acaaatcagaaaacgatcttcttct

SEQ ID NO: 3209587 - DNA, 25 bp, Homo sapien
gttagtaccatatgatattctcagc

SEQ ID NO: 3209588 - DNA, 25 bp, Homo sapien
aattaaggtattacatctcctctgg

SEQ ID NO: 3209589 - DNA, 25 bp, Homo sapien
taaggtattacatctcctctggagc

SEQ ID NO: 3209590 - DNA, 25 bp, Homo sapien
ttaaggtattacatctcctctggag

SEQ ID NO: 3209591 - DNA, 25 bp, Homo sapien
aggtattacatctcctctggagctc

SEQ ID NO: 3209592 - DNA, 25 bp, Homo sapien
tatttacatattcatgaatacttac

SEQ ID NO: 3209593 - DNA, 25 bp, Homo sapien
ccacatatttacatattcatgaata

SEQ ID NO: 3209594 - DNA, 25 bp, Homo sapien
acatatttacatattcatgaatact

SEQ ID NO: 3209595 - DNA, 25 bp, Homo sapien
taatccacatatttacatattcatg

SEQ ID NO: 3209596 - DNA, 25 bp, Homo sapien
gaataataccccacaggcaaccaaa

SEQ ID NO: 3209597 - DNA, 25 bp, Homo sapien
gaatgaaacttgacctgtatcccta

SEQ ID NO: 3209598 - DNA, 25 bp, Homo sapien
cagagaacccagagataagtccgta

SEQ ID NO: 3209599 - DNA, 25 bp, Homo sapien
tgcaaactacccatttgtcaaagga

SEQ ID NO: 3209600 - DNA, 25 bp, Homo sapien
cattataacactttagtaataacaa

SEQ ID NO: 3209601 - DNA, 25 bp, Homo sapien
tacttttcacaagactaatataaac

SEQ ID NO: 3209602 - DNA, 25 bp, Homo sapien
tttcacaagactaatataaacatga

SEQ ID NO: 3209603 - DNA, 25 bp, Homo sapien
aatatagttgcagacacattataac

SEQ ID NO: 3209604 - DNA, 25 bp, Homo sapien
cgaccatcaggtgcgccatccattt

SEQ ID NO: 3209605 - DNA, 25 bp, Homo sapien
cgccatccattttacgtttctgtgt

SEQ ID NO: 3209606 - DNA, 25 bp, Homo sapien
tcttttttcttcctcgaccatcagg

SEQ ID NO: 3209607 - DNA, 25 bp, Homo sapien
tttcttcctcgaccatcaggtgcgc

SEQ ID NO: 3209608 - DNA, 25 bp, Homo sapien
taacaattgagcattgtacagtaca

SEQ ID NO: 3209609 - DNA, 25 bp, Homo sapien
catcttatgaagacccgtaaattaa

SEQ ID NO: 3209610 - DNA, 25 bp, Homo sapien
tacatcttatgaagacccgtaaatt

SEQ ID NO: 3209611 - DNA, 25 bp, Homo sapien
agtacatcttatgaagacccgtaaa

SEQ ID NO: 3209612 - DNA, 25 bp, Homo sapien
tacacaactaggtgaagactgaaag

SEQ ID NO: 3209613 - DNA, 25 bp, Homo sapien
tctttggctatacaactaaaaggcc

SEQ ID NO: 3209614 - DNA, 25 bp, Homo sapien
acataaaggcctctggtacagctaa

SEQ ID NO: 3209615 - DNA, 25 bp, Homo sapien
aattcacacctcattttggctgggc

SEQ ID NO: 3209616 - DNA, 25 bp, Homo sapien
tacatgtgggcagatgaaaacaact

SEQ ID NO: 3209617 - DNA, 25 bp, Homo sapien
tcctcatgcatgtattagaccttta

SEQ ID NO: 3209618 - DNA, 25 bp, Homo sapien
tccaattaagggaaatgtgtcctaa

SEQ ID NO: 3209619 - DNA, 25 bp, Homo sapien
gccataaatactgcgttttgcttga

SEQ ID NO: 3209620 - DNA, 25 bp, Homo sapien
tagcagtagtggttaaggcagttcc

SEQ ID NO: 3209621 - DNA, 25 bp, Homo sapien
tagcagtagtagctgtggcactgac

SEQ ID NO: 3209622 - DNA, 25 bp, Homo sapien
tctgggccctatggtggtagaggcc

SEQ ID NO: 3209623 - DNA, 25 bp, Homo sapien
ccacgataccaaggtggctaaggca

SEQ ID NO: 3209624 - DNA, 25 bp, Homo sapien
aaatacagtcatcaagttctgtgat

SEQ ID NO: 3209625 - DNA, 25 bp, Homo sapien
gggattgctataatagatttggtaa

SEQ ID NO: 3209626 - DNA, 25 bp, Homo sapien
cagtcatcaagttctgtgatcgtgg

SEQ ID NO: 3209627 - DNA, 25 bp, Homo sapien
caagttctgtgatcgtggtggcttt

SEQ ID NO: 3209628 - DNA, 25 bp, Homo sapien
tactcaaagggcagatggagcaatc

SEQ ID NO: 3209629 - DNA, 25 bp, Homo sapien
tatattttggtaacagctactccgt

SEQ ID NO: 3209630 - DNA, 25 bp, Homo sapien
tatgagttcatcaatccaccttgtg

SEQ ID NO: 3209631 - DNA, 25 bp, Homo sapien
ggtgtaggctcacaactatgatccc

SEQ ID NO: 3209632 - DNA, 25 bp, Homo sapien
tgaggtgccagtccacttctgaaac

SEQ ID NO: 3209633 - DNA, 25 bp, Homo sapien
tcttgagtatctcaggtgaggtgcc

SEQ ID NO: 3209634 - DNA, 25 bp, Homo sapien
caaagaatgtagacccatgttgcca

SEQ ID NO: 3209635 - DNA, 25 bp, Homo sapien
cttatgcctgtggagaaactattcc

SEQ ID NO: 3209636 - DNA, 25 bp, Homo sapien
tactggagatacatgatatgcaaca

SEQ ID NO: 3209637 - DNA, 25 bp, Homo sapien
tattggtgtcctagagataagagcc

SEQ ID NO: 3209638 - DNA, 25 bp, Homo sapien
gttaaaggcaagtacctagatcctc

SEQ ID NO: 3209639 - DNA, 25 bp, Homo sapien
tagggaatctctccggacacaaggg

SEQ ID NO: 3209640 - DNA, 25 bp, Homo sapien
ggcccgagcgcctaccaggcgtccg

SEQ ID NO: 3209641 - DNA, 25 bp, Homo sapien
agtttgtcgaagaagtcggcgcgga

SEQ ID NO: 3209642 - DNA, 25 bp, Homo sapien
ccgctcccgcgacggcctctctctt

SEQ ID NO: 3209643 - DNA, 25 bp, Homo sapien
gcttcttccgctcccgcgacggcct

SEQ ID NO: 3209644 - DNA, 25 bp, Homo sapien
tctcgcagcagacgccgataccact

SEQ ID NO: 3209645 - DNA, 25 bp, Homo sapien
acgccgataccactactcctagaag

SEQ ID NO: 3209646 - DNA, 25 bp, Homo sapien
gataccactactcctagaagccaag

SEQ ID NO: 3209647 - DNA, 25 bp, Homo sapien
agacgccgataccactactcctaga

SEQ ID NO: 3209648 - DNA, 25 bp, Homo sapien
aggtcacctcccgttcgtaccacat

SEQ ID NO: 3209649 - DNA, 25 bp, Homo sapien
ccagtcctggccaacgtcgttgaag

SEQ ID NO: 3209650 - DNA, 25 bp, Homo sapien
cgtaccacatctggtctacaaaatg

SEQ ID NO: 3209651 - DNA, 25 bp, Homo sapien
ctgggtccattgctccaggaaggtc

SEQ ID NO: 3209652 - DNA, 25 bp, Homo sapien
caggctactgatgtcggtgtcaaag

SEQ ID NO: 3209653 - DNA, 25 bp, Homo sapien
aacaggctactgatgtcggtgtcaa

SEQ ID NO: 3209654 - DNA, 25 bp, Homo sapien
tggaacaggctactgatgtcggtgt

SEQ ID NO: 3209655 - DNA, 25 bp, Homo sapien
aggctactgatgtcggtgtcaaagg

SEQ ID NO: 3209656 - DNA, 25 bp, Homo sapien
ggtgatagtgatgcggaggcgggag

SEQ ID NO: 3209657 - DNA, 25 bp, Homo sapien
tggtgatagtgatgcggaggcggga

SEQ ID NO: 3209658 - DNA, 25 bp, Homo sapien
gtgatagtgatgcggaggcgggagg

SEQ ID NO: 3209659 - DNA, 25 bp, Homo sapien
tgatagtgatgcggaggcgggaggg

SEQ ID NO: 3209660 - DNA, 25 bp, Homo sapien
gtgtcggccatgtcgaggatgctcc

SEQ ID NO: 3209661 - DNA, 25 bp, Homo sapien
ctaatgtaatgccccacggggtggg

SEQ ID NO: 3209662 - DNA, 25 bp, Homo sapien
atgtaatgccccacggggtgggaca

SEQ ID NO: 3209663 - DNA, 25 bp, Homo sapien
gggtgtctgcggtggaagcaggatg

SEQ ID NO: 3209664 - DNA, 25 bp, Homo sapien
aaggtgggtgtctgcggtggaagca

SEQ ID NO: 3209665 - DNA, 25 bp, Homo sapien
tttgaacactaccatgccactgaag

SEQ ID NO: 3209666 - DNA, 25 bp, Homo sapien
ggccaactgccattctgagacctaa

SEQ ID NO: 3209667 - DNA, 25 bp, Homo sapien
tgtattatacacattgggtggccaa

SEQ ID NO: 3209668 - DNA, 25 bp, Homo sapien
cctgttgcctgagccagtagctgac

SEQ ID NO: 3209669 - DNA, 25 bp, Homo sapien
attcactactccctgatttcagagg

SEQ ID NO: 3209670 - DNA, 25 bp, Homo sapien
tatgggctgatacctggaaccctag

SEQ ID NO: 3209671 - DNA, 25 bp, Homo sapien
taccagaaggtagaaatactagttg

SEQ ID NO: 3209672 - DNA, 25 bp, Homo sapien
taggccccagaccttaacaataagc

SEQ ID NO: 3209673 - DNA, 25 bp, Homo sapien
cccctatgactctgctgggtgcagc

SEQ ID NO: 3209674 - DNA, 25 bp, Homo sapien
caaggctgaaggtataagctggctc

SEQ ID NO: 3209675 - DNA, 25 bp, Homo sapien
tcttggacagtcagacccctatgac

SEQ ID NO: 3209676 - DNA, 25 bp, Homo sapien
ccctcatgggttggagtcgaatgcc

SEQ ID NO: 3209677 - DNA, 25 bp, Homo sapien
tattctgtatgttacattctatttt

SEQ ID NO: 3209678 - DNA, 25 bp, Homo sapien
aaactcaaatgtgttaactctcttg

SEQ ID NO: 3209679 - DNA, 25 bp, Homo sapien
aactctcttgaagtcatgtgctatc

SEQ ID NO: 3209680 - DNA, 25 bp, Homo sapien
acattctattttttacttacaagca

SEQ ID NO: 3209681 - DNA, 25 bp, Homo sapien
agggttcatacatccagctgtatct

SEQ ID NO: 3209682 - DNA, 25 bp, Homo sapien
cacttcttgacgtgaagttcatgct

SEQ ID NO: 3209683 - DNA, 25 bp, Homo sapien
tctcagtattatggcatatcttgac

SEQ ID NO: 3209684 - DNA, 25 bp, Homo sapien
tctgtcttcacttattcaccaatct

SEQ ID NO: 3209685 - DNA, 25 bp, Homo sapien
aacgtgtgtgtctctatagatatcc

SEQ ID NO: 3209686 - DNA, 25 bp, Homo sapien
cgtgtgtgtctctatagatatcccc

SEQ ID NO: 3209687 - DNA, 25 bp, Homo sapien
tatccccctctatatattcctctat

SEQ ID NO: 3209688 - DNA, 25 bp, Homo sapien
cctctatatattcctctataaatca

SEQ ID NO: 3209689 - DNA, 25 bp, Homo sapien
gggccaggctcagtgtcttacacct

SEQ ID NO: 3209690 - DNA, 25 bp, Homo sapien
taatagatagaaatgaacagccaga

SEQ ID NO: 3209691 - DNA, 25 bp, Homo sapien
aacagccagatgggccaggctcagt

SEQ ID NO: 3209692 - DNA, 25 bp, Homo sapien
tataatagatagaaatgaacagcca

SEQ ID NO: 3209693 - DNA, 25 bp, Homo sapien
cctctcagcactctaacagtgtggg

SEQ ID NO: 3209694 - DNA, 25 bp, Homo sapien
ctagtagatggcgtgtaagtgtaac

SEQ ID NO: 3209695 - DNA, 25 bp, Homo sapien
tggacgttttcagagggccaaggct

SEQ ID NO: 3209696 - DNA, 25 bp, Homo sapien
gaggctgtgatgagccatacattcc

SEQ ID NO: 3209697 - DNA, 25 bp, Homo sapien
cccgttcacaattgcttcaaagaca

SEQ ID NO: 3209698 - DNA, 25 bp, Homo sapien
atccccatcaagacaccaatgactt

SEQ ID NO: 3209699 - DNA, 25 bp, Homo sapien
caaggaaataaaagaggatacaaag

SEQ ID NO: 3209700 - DNA, 25 bp, Homo sapien
gttcacaattgcttcaaagacaata

SEQ ID NO: 3209701 - DNA, 25 bp, Homo sapien
gcgtctccgaatatgaacactgaac

SEQ ID NO: 3209702 - DNA, 25 bp, Homo sapien
aaaacctggcattaagcgtctccga

SEQ ID NO: 3209703 - DNA, 25 bp, Homo sapien
cagaaccaatactgaccaatgggca

SEQ ID NO: 3209704 - DNA, 25 bp, Homo sapien
taagcctacccgtctgtttctagaa

SEQ ID NO: 3209705 - DNA, 25 bp, Homo sapien
tgaagactcagcatccaaggtcaga

SEQ ID NO: 3209706 - DNA, 25 bp, Homo sapien
taagatagctagaaacaggcaaccc

SEQ ID NO: 3209707 - DNA, 25 bp, Homo sapien
ggcaaaataactgctgacggtcctg

SEQ ID NO: 3209708 - DNA, 25 bp, Homo sapien
gaaatcccatcaagccaataacagc

SEQ ID NO: 3209709 - DNA, 25 bp, Homo sapien
tgccactgtgggtagagcagtagca

SEQ ID NO: 3209710 - DNA, 25 bp, Homo sapien
tatgaaataattgagctaagccagc

SEQ ID NO: 3209711 - DNA, 25 bp, Homo sapien
taagccagccctagcatcctgtgat

SEQ ID NO: 3209712 - DNA, 25 bp, Homo sapien
gattacatagatgctgctcacagct

SEQ ID NO: 3209713 - DNA, 25 bp, Homo sapien
tcaaggctcaggtgtcaagcagtct

SEQ ID NO: 3209714 - DNA, 25 bp, Homo sapien
gcagcatagctctttccaagggatg

SEQ ID NO: 3209715 - DNA, 25 bp, Homo sapien
tattgcaagacccaaactagagccc

SEQ ID NO: 3209716 - DNA, 25 bp, Homo sapien
caagcagtctgagttgtgcaccagc

SEQ ID NO: 3209717 - DNA, 25 bp, Homo sapien
caactcctccagctgccctgtttgg

SEQ ID NO: 3209718 - DNA, 25 bp, Homo sapien
aactcctccagctgccctgtttggg

SEQ ID NO: 3209719 - DNA, 25 bp, Homo sapien
tccagctgccctgtttgggctctgt

SEQ ID NO: 3209720 - DNA, 25 bp, Homo sapien
gccctgtttgggctctgtgagtcat

SEQ ID NO: 3209721 - DNA, 25 bp, Homo sapien
tctccagcaagtgattatgcacagc

SEQ ID NO: 3209722 - DNA, 25 bp, Homo sapien
tgtgtcatgaagacgaagccctttc

SEQ ID NO: 3209723 - DNA, 25 bp, Homo sapien
gggactctcagtcggagccacacat

SEQ ID NO: 3209724 - DNA, 25 bp, Homo sapien
cacatgaggaggcaggatgtgtcat

SEQ ID NO: 3209725 - DNA, 25 bp, Homo sapien
ctaatatttcatttccttcccctca

SEQ ID NO: 3209726 - DNA, 25 bp, Homo sapien
taatatttcatttccttcccctcac

SEQ ID NO: 3209727 - DNA, 25 bp, Homo sapien
aatttccagggatctacaaggtttg

SEQ ID NO: 3209728 - DNA, 25 bp, Homo sapien
gattttatcacaaatttccagggat

SEQ ID NO: 3209729 - DNA, 25 bp, Homo sapien
agggatctacaaggtttgactccag

SEQ ID NO: 3209730 - DNA, 25 bp, Homo sapien
tccagggatctacaaggtttgactc

SEQ ID NO: 3209731 - DNA, 25 bp, Homo sapien
agttcctcttctgttgaggtgggcc

SEQ ID NO: 3209732 - DNA, 25 bp, Homo sapien
atcctcacggagcacacagttcctc

SEQ ID NO: 3209733 - DNA, 25 bp, Homo sapien
ctcttctgttgaggtgggccacagt

SEQ ID NO: 3209734 - DNA, 25 bp, Homo sapien
gtcctgctggactctcgtgtacaag

SEQ ID NO: 3209735 - DNA, 25 bp, Homo sapien
ggtgttttcaggatttccatactgg

SEQ ID NO: 3209736 - DNA, 25 bp, Homo sapien
tgttttcaggatttccatactggta

SEQ ID NO: 3209737 - DNA, 25 bp, Homo sapien
tggtgttttcaggatttccatactg

SEQ ID NO: 3209738 - DNA, 25 bp, Homo sapien
tttcaggatttccatactggtaagg

SEQ ID NO: 3209739 - DNA, 25 bp, Homo sapien
tttctctgagtagtgacagcctgaa

SEQ ID NO: 3209740 - DNA, 25 bp, Homo sapien
cctcttctgaatgccttgctgtcca

SEQ ID NO: 3209741 - DNA, 25 bp, Homo sapien
tgaatgccttgctgtccatcgtttt

SEQ ID NO: 3209742 - DNA, 25 bp, Homo sapien
tctgagtagtgacagcctgaacagg

SEQ ID NO: 3209743 - DNA, 25 bp, Homo sapien
catgtgaccatcctgctactattag

SEQ ID NO: 3209744 - DNA, 25 bp, Homo sapien
gtactacctgccgtgactccaagaa

SEQ ID NO: 3209745 - DNA, 25 bp, Homo sapien
tagtctgcctttaccaattagaagc

SEQ ID NO: 3209746 - DNA, 25 bp, Homo sapien
aagtgctcacacctatcttttaggg

SEQ ID NO: 3209747 - DNA, 25 bp, Homo sapien
ctttagctccaatgaaaacagaaat

SEQ ID NO: 3209748 - DNA, 25 bp, Homo sapien
tcttctccattgttatcagtgacat

SEQ ID NO: 3209749 - DNA, 25 bp, Homo sapien
aactgaggcaaagacagcattatct

SEQ ID NO: 3209750 - DNA, 25 bp, Homo sapien
tgcactaaaatcctttagctccaat

SEQ ID NO: 3209751 - DNA, 25 bp, Homo sapien
tatttaagcgaggtacatttccagc

SEQ ID NO: 3209752 - DNA, 25 bp, Homo sapien
catgatgctgtattttgtaatctgc

SEQ ID NO: 3209753 - DNA, 25 bp, Homo sapien
aatctgcattttggctctatttaag

SEQ ID NO: 3209754 - DNA, 25 bp, Homo sapien
ggttcttctattttactggtcatga

SEQ ID NO: 3209755 - DNA, 25 bp, Homo sapien
gggtgatataaaggaggatgtagac

SEQ ID NO: 3209756 - DNA, 25 bp, Homo sapien
tgggtgatataaaggaggatgtaga

SEQ ID NO: 3209757 - DNA, 25 bp, Homo sapien
aaggaatcacaaataaacttattgg

SEQ ID NO: 3209758 - DNA, 25 bp, Homo sapien
gaaggaatcacaaataaacttattg

SEQ ID NO: 3209759 - DNA, 25 bp, Homo sapien
cttgatagaaggaatcacaaataaa

SEQ ID NO: 3209760 - DNA, 25 bp, Homo sapien
ggaatcacaaataaacttattggcc

SEQ ID NO: 3209761 - DNA, 25 bp, Homo sapien
ctgagccttctacaacacctgtggc

SEQ ID NO: 3209762 - DNA, 25 bp, Homo sapien
gcaatattgggaccttccaggaagt

SEQ ID NO: 3209763 - DNA, 25 bp, Homo sapien
cctgagccttctacaacacctgtgg

SEQ ID NO: 3209764 - DNA, 25 bp, Homo sapien
gccctgagccttctacaacacctgt

SEQ ID NO: 3209765 - DNA, 25 bp, Homo sapien
agtagatgcctcctaaactttcagg

SEQ ID NO: 3209766 - DNA, 25 bp, Homo sapien
tctccatctacatccatgcaagtag

SEQ ID NO: 3209767 - DNA, 25 bp, Homo sapien
tccatgcaagtagatgcctcctaaa

SEQ ID NO: 3209768 - DNA, 25 bp, Homo sapien
tctacatccatgcaagtagatgcct

SEQ ID NO: 3209769 - DNA, 25 bp, Homo sapien
tggagaggggttattagcaggtggg

SEQ ID NO: 3209770 - DNA, 25 bp, Homo sapien
gttaggtggagaggggttattagca

SEQ ID NO: 3209771 - DNA, 25 bp, Homo sapien
taggtggagaggggttattagcagg

SEQ ID NO: 3209772 - DNA, 25 bp, Homo sapien
ggtggagaggggttattagcaggtg

SEQ ID NO: 3209773 - DNA, 25 bp, Homo sapien
tttaaacaatattgtcctgactctg

SEQ ID NO: 3209774 - DNA, 25 bp, Homo sapien
atttcagaagtaacttatagcttca

SEQ ID NO: 3209775 - DNA, 25 bp, Homo sapien
caggcatgtttggatttaggagttt

SEQ ID NO: 3209776 - DNA, 25 bp, Homo sapien
cttccccggctttctctcacaggtc

SEQ ID NO: 3209777 - DNA, 25 bp, Homo sapien
tcccagtcatgtcttatcactacct

SEQ ID NO: 3209778 - DNA, 25 bp, Homo sapien
gcttgtctctggtaactgcttccca

SEQ ID NO: 3209779 - DNA, 25 bp, Homo sapien
tcttatcactaccttgtactcggtg

SEQ ID NO: 3209780 - DNA, 25 bp, Homo sapien
cactgacacaagtgtattacagggc

SEQ ID NO: 3209781 - DNA, 25 bp, Homo sapien
tcagctccatcaaacgtataccttt

SEQ ID NO: 3209782 - DNA, 25 bp, Homo sapien
gatcttctaccttatggtattcggg

SEQ ID NO: 3209783 - DNA, 25 bp, Homo sapien
tattatatctgcctgaaggaactag

SEQ ID NO: 3209784 - DNA, 25 bp, Homo sapien
gagtacattacaccaatagatttgc

SEQ ID NO: 3209785 - DNA, 25 bp, Homo sapien
ggatgtatcttctagtgctgctgag

SEQ ID NO: 3209786 - DNA, 25 bp, Homo sapien
gatgtatcttctagtgctgctgaga

SEQ ID NO: 3209787 - DNA, 25 bp, Homo sapien
ttggatgtatcttctagtgctgctg

SEQ ID NO: 3209788 - DNA, 25 bp, Homo sapien
actttggatgtatcttctagtgctg

SEQ ID NO: 3209789 - DNA, 25 bp, Homo sapien
ggcctgtcttagtcttactgggctg

SEQ ID NO: 3209790 - DNA, 25 bp, Homo sapien
tcttgtgatggcctgtcttagtctt

SEQ ID NO: 3209791 - DNA, 25 bp, Homo sapien
ttactagggcccaagagaaggtcca

SEQ ID NO: 3209792 - DNA, 25 bp, Homo sapien
tgatttctgtttactagggcccaag

SEQ ID NO: 3209793 - DNA, 25 bp, Homo sapien
caataactgttcagaacgtggatta

SEQ ID NO: 3209794 - DNA, 25 bp, Homo sapien
caagatccaagaatcgtcttttgtg

SEQ ID NO: 3209795 - DNA, 25 bp, Homo sapien
cgtcttttgtggtctggatcgggac

SEQ ID NO: 3209796 - DNA, 25 bp, Homo sapien
agcaataactgttcagaacgtggat

SEQ ID NO: 3209797 - DNA, 25 bp, Homo sapien
tacatgtcagataggtaaagaggct

SEQ ID NO: 3209798 - DNA, 25 bp, Homo sapien
tgtttggccaccatgagctcaaacc

SEQ ID NO: 3209799 - DNA, 25 bp, Homo sapien
ccaacttgcaggacgtgcaacaggg

SEQ ID NO: 3209800 - DNA, 25 bp, Homo sapien
ccaaaacgaagatggtgatctgacc

SEQ ID NO: 3209801 - DNA, 25 bp, Homo sapien
tgtatattatatgccacccgtaacc

SEQ ID NO: 3209802 - DNA, 25 bp, Homo sapien
gtatattatatgccacccgtaacca

SEQ ID NO: 3209803 - DNA, 25 bp, Homo sapien
tatattatatgccacccgtaaccat

SEQ ID NO: 3209804 - DNA, 25 bp, Homo sapien
ctgtatattatatgccacccgtaac

SEQ ID NO: 3209805 - DNA, 25 bp, Homo sapien
agaatgaagtgcatccttctccttt

SEQ ID NO: 3209806 - DNA, 25 bp, Homo sapien
tctaagaatgaagtgcatccttctc

SEQ ID NO: 3209807 - DNA, 25 bp, Homo sapien
cttcttgaaggcatttacagtcttt

SEQ ID NO: 3209808 - DNA, 25 bp, Homo sapien
tgaaggcatttacagtctttgtaag

SEQ ID NO: 3209809 - DNA, 25 bp, Homo sapien
cacaccagatacattctgactgcct

SEQ ID NO: 3209810 - DNA, 25 bp, Homo sapien
gggtcccaatgtgcagcacgtttcc

SEQ ID NO: 3209811 - DNA, 25 bp, Homo sapien
aggacaggttgaactaaaggacctg

SEQ ID NO: 3209812 - DNA, 25 bp, Homo sapien
tcctcttcgagtacacaccagatac

SEQ ID NO: 3209813 - DNA, 25 bp, Homo sapien
gagatggctgggtcagaaatctctg

SEQ ID NO: 3209814 - DNA, 25 bp, Homo sapien
gatggctgggtcagaaatctctgag

SEQ ID NO: 3209815 - DNA, 25 bp, Homo sapien
ctgagggactccaggatgcccacac

SEQ ID NO: 3209816 - DNA, 25 bp, Homo sapien
tgggtcagaaatctctgagggactc

SEQ ID NO: 3209817 - DNA, 25 bp, Homo sapien
aggagaaaggggacaacttgtccat

SEQ ID NO: 3209818 - DNA, 25 bp, Homo sapien
tataggagaaaggggacaacttgtc

SEQ ID NO: 3209819 - DNA, 25 bp, Homo sapien
attgaaatttcgctttataggagaa

SEQ ID NO: 3209820 - DNA, 25 bp, Homo sapien
tgaaatttcgctttataggagaaag

SEQ ID NO: 3209821 - DNA, 25 bp, Homo sapien
atggcaaaagacgaagggaaagtag

SEQ ID NO: 3209822 - DNA, 25 bp, Homo sapien
gcaaaagacgaagggaaagtaggca

SEQ ID NO: 3209823 - DNA, 25 bp, Homo sapien
tatgttcccattcagatgcaatctg

SEQ ID NO: 3209824 - DNA, 25 bp, Homo sapien
aaattattatgttcccattcagatg

SEQ ID NO: 3209825 - DNA, 25 bp, Homo sapien
tatttttccagatgcttgcattcat

SEQ ID NO: 3209826 - DNA, 25 bp, Homo sapien
tatttcattggtcttaaaatgatgc

SEQ ID NO: 3209827 - DNA, 25 bp, Homo sapien
tgtgctattttgtcatttggtttaa

SEQ ID NO: 3209828 - DNA, 25 bp, Homo sapien
tgcatgtgctattttgtcatttggt

SEQ ID NO: 3209829 - DNA, 25 bp, Homo sapien
caccaagtgctcttttactgtgagc

SEQ ID NO: 3209830 - DNA, 25 bp, Homo sapien
gaggcattatggtctaagttaggac

SEQ ID NO: 3209831 - DNA, 25 bp, Homo sapien
gggtctgagtccagctttgtatact

SEQ ID NO: 3209832 - DNA, 25 bp, Homo sapien
ggaaagagaggcattatggtctaag

SEQ ID NO: 3209833 - DNA, 25 bp, Homo sapien
caagttctgacaatagttcagagcc

SEQ ID NO: 3209834 - DNA, 25 bp, Homo sapien
aagttctgacaatagttcagagcct

SEQ ID NO: 3209835 - DNA, 25 bp, Homo sapien
ttctgacaatagttcagagccttgt

SEQ ID NO: 3209836 - DNA, 25 bp, Homo sapien
gttctgacaatagttcagagccttg

SEQ ID NO: 3209837 - DNA, 25 bp, Homo sapien
agtctcaaatcaatttggccaccaa

SEQ ID NO: 3209838 - DNA, 25 bp, Homo sapien
tcagtctcaaatcaatttggccacc

SEQ ID NO: 3209839 - DNA, 25 bp, Homo sapien
caatttggccaccaatcagtttttg

SEQ ID NO: 3209840 - DNA, 25 bp, Homo sapien
atcaatttggccaccaatcagtttt

SEQ ID NO: 3209841 - DNA, 25 bp, Homo sapien
aactgcaccagttaataggccacgc

SEQ ID NO: 3209842 - DNA, 25 bp, Homo sapien
caccagttaataggccacgcttttc

SEQ ID NO: 3209843 - DNA, 25 bp, Homo sapien
actgcaccagttaataggccacgct

SEQ ID NO: 3209844 - DNA, 25 bp, Homo sapien
tgcaccagttaataggccacgcttt

SEQ ID NO: 3209845 - DNA, 25 bp, Homo sapien
gataaacatgaatgccgaaaactgc

SEQ ID NO: 3209846 - DNA, 25 bp, Homo sapien
tcccatggaggatacacggaggttg

SEQ ID NO: 3209847 - DNA, 25 bp, Homo sapien
cattacatgtcagattgtgaaccag

SEQ ID NO: 3209848 - DNA, 25 bp, Homo sapien
tgggagggaacgcagataataaatg

SEQ ID NO: 3209849 - DNA, 25 bp, Homo sapien
tccagcatggtccaaaaattccagg

SEQ ID NO: 3209850 - DNA, 25 bp, Homo sapien
ggagatggagtagtttcaagaaacc

SEQ ID NO: 3209851 - DNA, 25 bp, Homo sapien
tcttatcttgccagaagtctagcag

SEQ ID NO: 3209852 - DNA, 25 bp, Homo sapien
caggacgaactgatatctgtcttcc

SEQ ID NO: 3209853 - DNA, 25 bp, Homo sapien
gcgaccccaggctccggacaggcag

SEQ ID NO: 3209854 - DNA, 25 bp, Homo sapien
cgggcgaccccaggctccggacagg

SEQ ID NO: 3209855 - DNA, 25 bp, Homo sapien
tgcgggcgaccccaggctccggaca

SEQ ID NO: 3209856 - DNA, 25 bp, Homo sapien
ctgcgggcgaccccaggctccggac

SEQ ID NO: 3209857 - DNA, 25 bp, Homo sapien
tccccgagcagcgtcgcagagcggg

SEQ ID NO: 3209858 - DNA, 25 bp, Homo sapien
ttagcgccctgaacatgcggcagtc

SEQ ID NO: 3209859 - DNA, 25 bp, Homo sapien
cagagcgggccgacttccgggaagg

SEQ ID NO: 3209860 - DNA, 25 bp, Homo sapien
tgaccagcgactgagcggcggccgg

SEQ ID NO: 3209861 - DNA, 25 bp, Homo sapien
ataaaataagaatgcgctggcccgg

SEQ ID NO: 3209862 - DNA, 25 bp, Homo sapien
aagtaataactcataatctcttttc

SEQ ID NO: 3209863 - DNA, 25 bp, Homo sapien
aacacttagggcaaatcaaatcaag

SEQ ID NO: 3209864 - DNA, 25 bp, Homo sapien
ttccattccatagtttgctcataca

SEQ ID NO: 3209865 - DNA, 25 bp, Homo sapien
cagtccttagctctcatgaattgtc

SEQ ID NO: 3209866 - DNA, 25 bp, Homo sapien
tgcacgctaactcttgccagatctt

SEQ ID NO: 3209867 - DNA, 25 bp, Homo sapien
cacaatgtagaactgcacgctaact

SEQ ID NO: 3209868 - DNA, 25 bp, Homo sapien
gctctcatgaattgtcacaatgtag

SEQ ID NO: 3209869 - DNA, 25 bp, Homo sapien
aagtccaagatcaggtggctgtatc

SEQ ID NO: 3209870 - DNA, 25 bp, Homo sapien
ccaagatcaggtggctgtatctggt

SEQ ID NO: 3209871 - DNA, 25 bp, Homo sapien
aagatcaggtggctgtatctggtga

SEQ ID NO: 3209872 - DNA, 25 bp, Homo sapien
gtccaagatcaggtggctgtatctg

SEQ ID NO: 3209873 - DNA, 25 bp, Homo sapien
gacttgatcatagatttggcaggca

SEQ ID NO: 3209874 - DNA, 25 bp, Homo sapien
gactgtggagccgacttgatcatag

SEQ ID NO: 3209875 - DNA, 25 bp, Homo sapien
tccaatgagagttgaaacaacttct

SEQ ID NO: 3209876 - DNA, 25 bp, Homo sapien
agatttggcaggcaaccagcccttc

SEQ ID NO: 3209877 - DNA, 25 bp, Homo sapien
ggaatgaaatgtcttctgcagcaac

SEQ ID NO: 3209878 - DNA, 25 bp, Homo sapien
aaggaatgaaatgtcttctgcagca

SEQ ID NO: 3209879 - DNA, 25 bp, Homo sapien
ttctcacttagaagtggaagcaaag

SEQ ID NO: 3209880 - DNA, 25 bp, Homo sapien
gctggaggccattgttctaggtgaa

SEQ ID NO: 3209881 - DNA, 25 bp, Homo sapien
caaaagaatagtccatagagaggta

SEQ ID NO: 3209882 - DNA, 25 bp, Homo sapien
attctaatgggtctgctactcttcc

SEQ ID NO: 3209883 - DNA, 25 bp, Homo sapien
tcagctcaactgtaagtattagaag

SEQ ID NO: 3209884 - DNA, 25 bp, Homo sapien
gtagcaacaaaacctcacttgcaag

SEQ ID NO: 3209885 - DNA, 25 bp, Homo sapien
atttgtcactgacacaagtgtattc

SEQ ID NO: 3209886 - DNA, 25 bp, Homo sapien
ctgacacaagtgtattccagggcat

SEQ ID NO: 3209887 - DNA, 25 bp, Homo sapien
tgtcactgacacaagtgtattccag

SEQ ID NO: 3209888 - DNA, 25 bp, Homo sapien
cactgacacaagtgtattccagggc

SEQ ID NO: 3209889 - DNA, 25 bp, Homo sapien
caccgtggtgtggtgtgtcaaactt

SEQ ID NO: 3209890 - DNA, 25 bp, Homo sapien
gtggtgtgtcaaacttgaatcactg

SEQ ID NO: 3209891 - DNA, 25 bp, Homo sapien
tgacaaggcacatccaccgtggtgt

SEQ ID NO: 3209892 - DNA, 25 bp, Homo sapien
gagaagatgtgtcatgacaaggcac

SEQ ID NO: 3209893 - DNA, 25 bp, Homo sapien
gacatatagcattctcacaaagaca

SEQ ID NO: 3209894 - DNA, 25 bp, Homo sapien
taaacagataccacagacctgtgtg

SEQ ID NO: 3209895 - DNA, 25 bp, Homo sapien
tctcatttggacatctagaaatcga

SEQ ID NO: 3209896 - DNA, 25 bp, Homo sapien
accccttttgcgtacctgatttctg

SEQ ID NO: 3209897 - DNA, 25 bp, Homo sapien
cttagctcatggtcaagcagaggct

SEQ ID NO: 3209898 - DNA, 25 bp, Homo sapien
cctgcatgctgcctgatcttgccta

SEQ ID NO: 3209899 - DNA, 25 bp, Homo sapien
tccaattggctacagcctgtgaagg

SEQ ID NO: 3209900 - DNA, 25 bp, Homo sapien
ctgcatgctgcctgatcttgcctag

SEQ ID NO: 3209901 - DNA, 25 bp, Homo sapien
tatagtatttaacctattagtgtaa

SEQ ID NO: 3209902 - DNA, 25 bp, Homo sapien
tcttatagtatttaacctattagtg

SEQ ID NO: 3209903 - DNA, 25 bp, Homo sapien
attcttcttatagtatttaacctat

SEQ ID NO: 3209904 - DNA, 25 bp, Homo sapien
cttcttatagtatttaacctattag

SEQ ID NO: 3209905 - DNA, 25 bp, Homo sapien
tgaaattttgctttataggagaaac

SEQ ID NO: 3209906 - DNA, 25 bp, Homo sapien
tttgctttataggagaaacgggaca

SEQ ID NO: 3209907 - DNA, 25 bp, Homo sapien
tgctttataggagaaacgggacaac

SEQ ID NO: 3209908 - DNA, 25 bp, Homo sapien
aggagaaacgggacaacttgtccat

SEQ ID NO: 3209909 - DNA, 25 bp, Homo sapien
ctcttcccttgagtagactaatgag

SEQ ID NO: 3209910 - DNA, 25 bp, Homo sapien
cttcccttgagtagactaatgagag

SEQ ID NO: 3209911 - DNA, 25 bp, Homo sapien
aactcttcccttgagtagactaatg

SEQ ID NO: 3209912 - DNA, 25 bp, Homo sapien
gaactcttcccttgagtagactaat

SEQ ID NO: 3209913 - DNA, 25 bp, Homo sapien
ctcttaccactaagcaagcatgggt

SEQ ID NO: 3209914 - DNA, 25 bp, Homo sapien
agttgtatcagagcaactgattctg

SEQ ID NO: 3209915 - DNA, 25 bp, Homo sapien
gctaccattatgagattgttgagga

SEQ ID NO: 3209916 - DNA, 25 bp, Homo sapien
tcattttataggtcagctaccatta

SEQ ID NO: 3209917 - DNA, 25 bp, Homo sapien
actgcaccagttaataggccacgct

SEQ ID NO: 3209918 - DNA, 25 bp, Homo sapien
caccagttaataggccacgcttttc

SEQ ID NO: 3209919 - DNA, 25 bp, Homo sapien
tgcaccagttaataggccacgcttt

SEQ ID NO: 3209920 - DNA, 25 bp, Homo sapien
aactgcaccagttaataggccacgc

SEQ ID NO: 3209921 - DNA, 25 bp, Homo sapien
cctgcactcatttgatgattcagtc

SEQ ID NO: 3209922 - DNA, 25 bp, Homo sapien
gaattcctgcactcatttgatgatt

SEQ ID NO: 3209923 - DNA, 25 bp, Homo sapien
tgcactcatttgatgattcagtcat

SEQ ID NO: 3209924 - DNA, 25 bp, Homo sapien
ttcctgcactcatttgatgattcag

SEQ ID NO: 3209925 - DNA, 25 bp, Homo sapien
gagatcttcttccaaatggagaacc

SEQ ID NO: 3209926 - DNA, 25 bp, Homo sapien
cagagatcttcttccaaatggagaa

SEQ ID NO: 3209927 - DNA, 25 bp, Homo sapien
gatcttcttccaaatggagaaccca

SEQ ID NO: 3209928 - DNA, 25 bp, Homo sapien
atcttcttccaaatggagaacccat

SEQ ID NO: 3209929 - DNA, 25 bp, Homo sapien
cattagaggagcctcaatctcaggc

SEQ ID NO: 3209930 - DNA, 25 bp, Homo sapien
tcttccgtctctcccaagtctgcat

SEQ ID NO: 3209931 - DNA, 25 bp, Homo sapien
gggatgctctgctgatacttatctc

SEQ ID NO: 3209932 - DNA, 25 bp, Homo sapien
ccatcttttatccagtaaatacttt

SEQ ID NO: 3209933 - DNA, 25 bp, Homo sapien
aagggcgcgcgatgcacttcatcac

SEQ ID NO: 3209934 - DNA, 25 bp, Homo sapien
tatcctggtagagcaacttggttga

SEQ ID NO: 3209935 - DNA, 25 bp, Homo sapien
caagtccagcctgtaactgccagct

SEQ ID NO: 3209936 - DNA, 25 bp, Homo sapien
gccatttggttcacacaagctggaa

SEQ ID NO: 3209937 - DNA, 25 bp, Homo sapien
tgcaccaggtccaacttctcagatc

SEQ ID NO: 3209938 - DNA, 25 bp, Homo sapien
cctcctgcctggttagtcggtgact

SEQ ID NO: 3209939 - DNA, 25 bp, Homo sapien
tctcttatcgcctttcagctgccat

SEQ ID NO: 3209940 - DNA, 25 bp, Homo sapien
ccaccatggagatacctgtttttcc

SEQ ID NO: 3209941 - DNA, 25 bp, Homo sapien
gttcaccagggaagaccgggattca

SEQ ID NO: 3209942 - DNA, 25 bp, Homo sapien
actggcacatgtaagggtacaccat

SEQ ID NO: 3209943 - DNA, 25 bp, Homo sapien
tgtagtgttcccgttcaccagggaa

SEQ ID NO: 3209944 - DNA, 25 bp, Homo sapien
caccagggaagaccgggattcatgt

SEQ ID NO: 3209945 - DNA, 25 bp, Homo sapien
tcaatcatgcatttcttgcctcttg

SEQ ID NO: 3209946 - DNA, 25 bp, Homo sapien
aatcatgcatttcttgcctcttgcc

SEQ ID NO: 3209947 - DNA, 25 bp, Homo sapien
ttgcctcttgcttctgagtagtaac

SEQ ID NO: 3209948 - DNA, 25 bp, Homo sapien
tcatgcatttcttgcctcttgcctc

SEQ ID NO: 3209949 - DNA, 25 bp, Homo sapien
ttgttcctcttgaccgcattaggta

SEQ ID NO: 3209950 - DNA, 25 bp, Homo sapien
tgttcctcttgaccgcattaggtat

SEQ ID NO: 3209951 - DNA, 25 bp, Homo sapien
gttcctcttgaccgcattaggtatc

SEQ ID NO: 3209952 - DNA, 25 bp, Homo sapien
ccttgttcctcttgaccgcattagg

SEQ ID NO: 3209953 - DNA, 25 bp, Homo sapien
aagggatatggaattagctctttct

SEQ ID NO: 3209954 - DNA, 25 bp, Homo sapien
agggatatggaattagctctttctt

SEQ ID NO: 3209955 - DNA, 25 bp, Homo sapien
aaagggatatggaattagctctttc

SEQ ID NO: 3209956 - DNA, 25 bp, Homo sapien
aaaagggatatggaattagctcttt

SEQ ID NO: 3209957 - DNA, 25 bp, Homo sapien
ctcggtgtagcacagcaaagcagca

SEQ ID NO: 3209958 - DNA, 25 bp, Homo sapien
ctgacacaagtgtattccagggcat

SEQ ID NO: 3209959 - DNA, 25 bp, Homo sapien
tgtactcggtgtagcacagcaaagc

SEQ ID NO: 3209960 - DNA, 25 bp, Homo sapien
tttgtcactgacacaagtgtattcc

SEQ ID NO: 3209961 - DNA, 25 bp, Homo sapien
gtatattatatgccacccataacca

SEQ ID NO: 3209962 - DNA, 25 bp, Homo sapien
ctgtatattatatgccacccataac

SEQ ID NO: 3209963 - DNA, 25 bp, Homo sapien
tgtatattatatgccacccataacc

SEQ ID NO: 3209964 - DNA, 25 bp, Homo sapien
ccagcagtgagcacaaactcagtaa

SEQ ID NO: 3209965 - DNA, 25 bp, Homo sapien
aatcagtgcctcttggtttcagccg

SEQ ID NO: 3209966 - DNA, 25 bp, Homo sapien
ttctctttagagtgaggcggtaatc

SEQ ID NO: 3209967 - DNA, 25 bp, Homo sapien
ttggtttcagccgtggtcctagtgg

SEQ ID NO: 3209968 - DNA, 25 bp, Homo sapien
caccaggtcactgacgagagactcc

SEQ ID NO: 3209969 - DNA, 25 bp, Homo sapien
tgacgagagactccagtgaatctct

SEQ ID NO: 3209970 - DNA, 25 bp, Homo sapien
tctccttgtacagactagagggtca

SEQ ID NO: 3209971 - DNA, 25 bp, Homo sapien
acattgtgtaaagccaaacatagcc

SEQ ID NO: 3209972 - DNA, 25 bp, Homo sapien
tatctcctacagttttaggactaga

SEQ ID NO: 3209973 - DNA, 25 bp, Homo sapien
tcagttaatgacaagcattgatatg

SEQ ID NO: 3209974 - DNA, 25 bp, Homo sapien
agccaataccttcctgaactcattt

SEQ ID NO: 3209975 - DNA, 25 bp, Homo sapien
taggactagatgtatttggcttttc

SEQ ID NO: 3209976 - DNA, 25 bp, Homo sapien
ttgggtgccattcccctcagttgaa

SEQ ID NO: 3209977 - DNA, 25 bp, Homo sapien
gaacttcaaaatccctatcaccagg

SEQ ID NO: 3209978 - DNA, 25 bp, Homo sapien
cacatgaatgcacagaataggagat

SEQ ID NO: 3209979 - DNA, 25 bp, Homo sapien
taaaagccattatacctgagtgctg

SEQ ID NO: 3209980 - DNA, 25 bp, Homo sapien
gctgcattttccagttgtattccca

SEQ ID NO: 3209981 - DNA, 25 bp, Homo sapien
tgagtgaaggatgagagctccagct

SEQ ID NO: 3209982 - DNA, 25 bp, Homo sapien
ctgagtgaaggatgagagctccagc

SEQ ID NO: 3209983 - DNA, 25 bp, Homo sapien
gctccagctgcattttccagttgta

SEQ ID NO: 3209984 - DNA, 25 bp, Homo sapien
gggtctgagtccagctttgtaaact

SEQ ID NO: 3209985 - DNA, 25 bp, Homo sapien
gtctgagtccagctttgtaaacttg

SEQ ID NO: 3209986 - DNA, 25 bp, Homo sapien
ggaaagagaggcattatggtctaac

SEQ ID NO: 3209987 - DNA, 25 bp, Homo sapien
gaggcattatggtctaacttaggac

SEQ ID NO: 3209988 - DNA, 25 bp, Homo sapien
ttctaagaacataagtggcaacttt

SEQ ID NO: 3209989 - DNA, 25 bp, Homo sapien
actgcatccgttaataggccatgct

SEQ ID NO: 3209990 - DNA, 25 bp, Homo sapien
tgcatccgttaataggccatgcttt

SEQ ID NO: 3209991 - DNA, 25 bp, Homo sapien
catccgttaataggccatgcttttc

SEQ ID NO: 3209992 - DNA, 25 bp, Homo sapien
aactgcatccgttaataggccatgc

SEQ ID NO: 3209993 - DNA, 25 bp, Homo sapien
ttcctgcactcatttgatgattcag

SEQ ID NO: 3209994 - DNA, 25 bp, Homo sapien
cctgcactcatttgatgattcagtc

SEQ ID NO: 3209995 - DNA, 25 bp, Homo sapien
gaattcctgcactcatttgatgatt

SEQ ID NO: 3209996 - DNA, 25 bp, Homo sapien
tgcactcatttgatgattcagtcat

SEQ ID NO: 3209997 - DNA, 25 bp, Homo sapien
gatctccttccaaatggagaatcca

SEQ ID NO: 3209998 - DNA, 25 bp, Homo sapien
gagatctccttccaaatggagaatc

SEQ ID NO: 3209999 - DNA, 25 bp, Homo sapien
cagagatctccttccaaatggagaa

SEQ ID NO: 3210000 - DNA, 25 bp, Homo sapien
atctccttccaaatggagaatccat

SEQ ID NO: 3210001 - DNA, 25 bp, Homo sapien
tagggccaggtactctatagggcat

SEQ ID NO: 3210002 - DNA, 25 bp, Homo sapien
aatagggccaggtactctatagggc

SEQ ID NO: 3210003 - DNA, 25 bp, Homo sapien
tttaatagggccaggtactctatag

SEQ ID NO: 3210004 - DNA, 25 bp, Homo sapien
taatagggccaggtactctataggg

SEQ ID NO: 3210005 - DNA, 25 bp, Homo sapien
caaaaatatccagtatctgcacaga

SEQ ID NO: 3210006 - DNA, 25 bp, Homo sapien
ggtgaaagtgcatctctacatcccg

SEQ ID NO: 3210007 - DNA, 25 bp, Homo sapien
aagtaatacgtgaagttagcagggc

SEQ ID NO: 3210008 - DNA, 25 bp, Homo sapien
aagtgcatccattcagccttgtaga

SEQ ID NO: 3210009 - DNA, 25 bp, Homo sapien
attggaaaatgcaatactgttaagg

SEQ ID NO: 3210010 - DNA, 25 bp, Homo sapien
gagataatagggagttccacagtca

SEQ ID NO: 3210011 - DNA, 25 bp, Homo sapien
ctggcatcataatcacattcaggca

SEQ ID NO: 3210012 - DNA, 25 bp, Homo sapien
gctcattgattatttgaaacaagca

SEQ ID NO: 3210013 - DNA, 25 bp, Homo sapien
caatacaactgctcctctaactggg

SEQ ID NO: 3210014 - DNA, 25 bp, Homo sapien
tgctccagcaagccaccgagtttct

SEQ ID NO: 3210015 - DNA, 25 bp, Homo sapien
ttgctccagcaagccaccgagtttc

SEQ ID NO: 3210016 - DNA, 25 bp, Homo sapien
ccccacagatttcatagtagatgtg

SEQ ID NO: 3210017 - DNA, 25 bp, Homo sapien
tgcaggactgaaagcaaactcagac

SEQ ID NO: 3210018 - DNA, 25 bp, Homo sapien
ttctaccaggaaaccccatacctgc

SEQ ID NO: 3210019 - DNA, 25 bp, Homo sapien
catagtagatgtggtacaggctgca

SEQ ID NO: 3210020 - DNA, 25 bp, Homo sapien
gagagctggtcttgcttcacaatga

SEQ ID NO: 3210021 - DNA, 25 bp, Homo sapien
tatagtgtcacgtaggaatacaggc

SEQ ID NO: 3210022 - DNA, 25 bp, Homo sapien
gaaagtttgacctttccaaggagca

SEQ ID NO: 3210023 - DNA, 25 bp, Homo sapien
tacctaggtgaaaagcaaggccctc

SEQ ID NO: 3210024 - DNA, 25 bp, Homo sapien
ccaaatagctaagtccaatgtcaca

SEQ ID NO: 3210025 - DNA, 25 bp, Homo sapien
gcaattgtgcagaacatctactact

SEQ ID NO: 3210026 - DNA, 25 bp, Homo sapien
catatgtccttaatccctggaggca

SEQ ID NO: 3210027 - DNA, 25 bp, Homo sapien
tccttgaccaggagtagaaaccttc

SEQ ID NO: 3210028 - DNA, 25 bp, Homo sapien
ctgtgaaatgggaacgtatgtaaac

SEQ ID NO: 3210029 - DNA, 25 bp, Homo sapien
taaacagactgtaaggtatagtctc

SEQ ID NO: 3210030 - DNA, 25 bp, Homo sapien
ggtatagtctctgaacaccaagcat

SEQ ID NO: 3210031 - DNA, 25 bp, Homo sapien
aatgggaacgtatgtaaacagactg

SEQ ID NO: 3210032 - DNA, 25 bp, Homo sapien
gatgttgtatagaacccaatcagca

SEQ ID NO: 3210033 - DNA, 25 bp, Homo sapien
cttgatgttgtatagaacccaatca

SEQ ID NO: 3210034 - DNA, 25 bp, Homo sapien
tgttgtatagaacccaatcagcaga

SEQ ID NO: 3210035 - DNA, 25 bp, Homo sapien
tgatgttgtatagaacccaatcagc

SEQ ID NO: 3210036 - DNA, 25 bp, Homo sapien
atttactgccacgttctgcaaagca

SEQ ID NO: 3210037 - DNA, 25 bp, Homo sapien
gccctttcattagacacagctagat

SEQ ID NO: 3210038 - DNA, 25 bp, Homo sapien
ttagacacagctagatttactgcca

SEQ ID NO: 3210039 - DNA, 25 bp, Homo sapien
agcagaagccctttcattagacaca

SEQ ID NO: 3210040 - DNA, 25 bp, Homo sapien
ttacgtttttgtcgccatctgtaaa

SEQ ID NO: 3210041 - DNA, 25 bp, Homo sapien
tatctttacgtttttgtcgccatct

SEQ ID NO: 3210042 - DNA, 25 bp, Homo sapien
cagggtactgtatatgaacaatgaa

SEQ ID NO: 3210043 - DNA, 25 bp, Homo sapien
ttaatcatattcagggtactgtata

SEQ ID NO: 3210044 - DNA, 25 bp, Homo sapien
cttcttgagtctcacaggacagcca

SEQ ID NO: 3210045 - DNA, 25 bp, Homo sapien
taaacagccaaacagcaactcaagg

SEQ ID NO: 3210046 - DNA, 25 bp, Homo sapien
cttgagtctcacaggacagccacta

SEQ ID NO: 3210047 - DNA, 25 bp, Homo sapien
aaacagccaaacagcaactcaaggg

SEQ ID NO: 3210048 - DNA, 25 bp, Homo sapien
ggagataggaacacccacgattgtt

SEQ ID NO: 3210049 - DNA, 25 bp, Homo sapien
ggaagttttccagatgcacactgca

SEQ ID NO: 3210050 - DNA, 25 bp, Homo sapien
accagacctgtgttgggacatgtca

SEQ ID NO: 3210051 - DNA, 25 bp, Homo sapien
cattgtgcggaaatagcatgccatc

SEQ ID NO: 3210052 - DNA, 25 bp, Homo sapien
gaaaacaagtctctgattaggaaac

SEQ ID NO: 3210053 - DNA, 25 bp, Homo sapien
aaagccttgtagttatatagtgtgc

SEQ ID NO: 3210054 - DNA, 25 bp, Homo sapien
tatagtgtgctgttaaataagaaag

SEQ ID NO: 3210055 - DNA, 25 bp, Homo sapien
gccccaaatggtgttaacagcatca

SEQ ID NO: 3210056 - DNA, 25 bp, Homo sapien
gcctaagacatctactacatgggag

SEQ ID NO: 3210057 - DNA, 25 bp, Homo sapien
tagaacattcggaaccaccagagag

SEQ ID NO: 3210058 - DNA, 25 bp, Homo sapien
tttacatgggaggttcagtgcaccc

SEQ ID NO: 3210059 - DNA, 25 bp, Homo sapien
cataaagacaggtttgtgcaagcag

SEQ ID NO: 3210060 - DNA, 25 bp, Homo sapien
ccccatccagtcagcactgtgggaa

SEQ ID NO: 3210061 - DNA, 25 bp, Homo sapien
aattggtgctcttgactgctgactg

SEQ ID NO: 3210062 - DNA, 25 bp, Homo sapien
caattggtgctcttgactgctgact

SEQ ID NO: 3210063 - DNA, 25 bp, Homo sapien
cttctgaaggaactaaacttgtatt

SEQ ID NO: 3210064 - DNA, 25 bp, Homo sapien
gccaagtcgaagctgcatccaagtt

SEQ ID NO: 3210065 - DNA, 25 bp, Homo sapien
gaagctgcatccaagttataccagc

SEQ ID NO: 3210066 - DNA, 25 bp, Homo sapien
gtcgaagctgcatccaagttatacc

SEQ ID NO: 3210067 - DNA, 25 bp, Homo sapien
taagttcagccaagtcgaagctgca

SEQ ID NO: 3210068 - DNA, 25 bp, Homo sapien
gtggggccccttccgcatcatgttc

SEQ ID NO: 3210069 - DNA, 25 bp, Homo sapien
tccgtggggccccttccgcatcatg

SEQ ID NO: 3210070 - DNA, 25 bp, Homo sapien
cgtggggccccttccgcatcatgtt

SEQ ID NO: 3210071 - DNA, 25 bp, Homo sapien
tggggccccttccgcatcatgttct

SEQ ID NO: 3210072 - DNA, 25 bp, Homo sapien
taaggactaagaatcaaagttgaga

SEQ ID NO: 3210073 - DNA, 25 bp, Homo sapien
ggatatccggagacatgaccttgtt

SEQ ID NO: 3210074 - DNA, 25 bp, Homo sapien
tgaggcaccatgagttttatgaggg

SEQ ID NO: 3210075 - DNA, 25 bp, Homo sapien
caggcttagatccaattgtctgagg

SEQ ID NO: 3210076 - DNA, 25 bp, Homo sapien
caaaagttgcaaactatgaatgggc

SEQ ID NO: 3210077 - DNA, 25 bp, Homo sapien
atggaggttcaaaagttgcaaacta

SEQ ID NO: 3210078 - DNA, 25 bp, Homo sapien
tatgaatgggctcaatataacctct

SEQ ID NO: 3210079 - DNA, 25 bp, Homo sapien
tgcaaactatgaatgggctcaatat

SEQ ID NO: 3210080 - DNA, 25 bp, Homo sapien
tcactataacatgtgcctgagttaa

SEQ ID NO: 3210081 - DNA, 25 bp, Homo sapien
gaagtcatcactataacatgtgcct

SEQ ID NO: 3210082 - DNA, 25 bp, Homo sapien
gaacagaagtcatcactataacatg

SEQ ID NO: 3210083 - DNA, 25 bp, Homo sapien
gtcatcactataacatgtgcctgag

SEQ ID NO: 3210084 - DNA, 25 bp, Homo sapien
gctggatgctgattgccctgtttgc

SEQ ID NO: 3210085 - DNA, 25 bp, Homo sapien
gctgattgccctgtttgcgtatgaa

SEQ ID NO: 3210086 - DNA, 25 bp, Homo sapien
ccctgtttgcgtatgaactgtcttc

SEQ ID NO: 3210087 - DNA, 25 bp, Homo sapien
tgctgtcagcaatcataactgattt

SEQ ID NO: 3210088 - DNA, 25 bp, Homo sapien
gacgaatcccatacattgtcagtat

SEQ ID NO: 3210089 - DNA, 25 bp, Homo sapien
gctctcatttaacactggcctttgt

SEQ ID NO: 3210090 - DNA, 25 bp, Homo sapien
aagcctctataaaggctctcattta

SEQ ID NO: 3210091 - DNA, 25 bp, Homo sapien
tgaaaattgttcataccatgacgaa

SEQ ID NO: 3210092 - DNA, 25 bp, Homo sapien
tcagcctgaatgaaaggccgttggt

SEQ ID NO: 3210093 - DNA, 25 bp, Homo sapien
cagcctgaatgaaaggccgttggtt

SEQ ID NO: 3210094 - DNA, 25 bp, Homo sapien
tgcttcttctgtaaggtatctagtg

SEQ ID NO: 3210095 - DNA, 25 bp, Homo sapien
cttctgtaaggtatctagtgtgtgc

SEQ ID NO: 3210096 - DNA, 25 bp, Homo sapien
taacatggtgctcccttgaaaggct

SEQ ID NO: 3210097 - DNA, 25 bp, Homo sapien
tgagaaaaccagagtcgctactgtg

SEQ ID NO: 3210098 - DNA, 25 bp, Homo sapien
gacaaaatcttaggtcagaggccaa

SEQ ID NO: 3210099 - DNA, 25 bp, Homo sapien
ggaacacagtctttgatggagcagt

SEQ ID NO: 3210100 - DNA, 25 bp, Homo sapien
catcagagccttgaacgttgtgggc

SEQ ID NO: 3210101 - DNA, 25 bp, Homo sapien
cttggactcttggaagctcatcaga

SEQ ID NO: 3210102 - DNA, 25 bp, Homo sapien
aagaacagtggaggacttggactct

SEQ ID NO: 3210103 - DNA, 25 bp, Homo sapien
gctatgtggacgtcacccagtgaca

SEQ ID NO: 3210104 - DNA, 25 bp, Homo sapien
tgcatatttgatccctcagaaggta

SEQ ID NO: 3210105 - DNA, 25 bp, Homo sapien
gccaagaatggtgtttaattctgag

SEQ ID NO: 3210106 - DNA, 25 bp, Homo sapien
tatgatgaggctatcacttctgtgc

SEQ ID NO: 3210107 - DNA, 25 bp, Homo sapien
ctaatggccaagaatggtgtttaat

SEQ ID NO: 3210108 - DNA, 25 bp, Homo sapien
gaatcccagaaaaacactagtgtat

SEQ ID NO: 3210109 - DNA, 25 bp, Homo sapien
tcttttgaaacatcctcaggcttgg

SEQ ID NO: 3210110 - DNA, 25 bp, Homo sapien
ctttggcagtgaggcttctaagacc

SEQ ID NO: 3210111 - DNA, 25 bp, Homo sapien
ggcttggcccataaggtaggactga

SEQ ID NO: 3210112 - DNA, 25 bp, Homo sapien
catgttggctgcttgaatccagacc

SEQ ID NO: 3210113 - DNA, 25 bp, Homo sapien
aacagacttaggtagacacataggc

SEQ ID NO: 3210114 - DNA, 25 bp, Homo sapien
ccttactgagtggtgtgggtctgct

SEQ ID NO: 3210115 - DNA, 25 bp, Homo sapien
caaggctaatatcttagtgggacac

SEQ ID NO: 3210116 - DNA, 25 bp, Homo sapien
cagattaaggatctggcctgaactc

SEQ ID NO: 3210117 - DNA, 25 bp, Homo sapien
gattaaggatctggcctgaactcgg

SEQ ID NO: 3210118 - DNA, 25 bp, Homo sapien
tttacagattaaggatctggcctga

SEQ ID NO: 3210119 - DNA, 25 bp, Homo sapien
tacagattaaggatctggcctgaac

SEQ ID NO: 3210120 - DNA, 25 bp, Homo sapien
gaaaatgatgggcttgggtctatag

SEQ ID NO: 3210121 - DNA, 25 bp, Homo sapien
acttgatgattttgtactctatggc

SEQ ID NO: 3210122 - DNA, 25 bp, Homo sapien
acacagattttgttaaacttgatga

SEQ ID NO: 3210123 - DNA, 25 bp, Homo sapien
tagaataagtgtgggcaaagcaaac

SEQ ID NO: 3210124 - DNA, 25 bp, Homo sapien
catttggaatttatgagtgagatac

SEQ ID NO: 3210125 - DNA, 25 bp, Homo sapien
tcacttatagggaaacatttggaat

SEQ ID NO: 3210126 - DNA, 25 bp, Homo sapien
aaacatttggaatttatgagtgaga

SEQ ID NO: 3210127 - DNA, 25 bp, Homo sapien
cacttatagggaaacatttggaatt

SEQ ID NO: 3210128 - DNA, 25 bp, Homo sapien
ggaaacactaaatcttgaaatggca

SEQ ID NO: 3210129 - DNA, 25 bp, Homo sapien
actgccttaagaggagtggcttcaa

SEQ ID NO: 3210130 - DNA, 25 bp, Homo sapien
caatggtgccatcaatgtagagccc

SEQ ID NO: 3210131 - DNA, 25 bp, Homo sapien
gatgtagttaatgcatgccttccgt

SEQ ID NO: 3210132 - DNA, 25 bp, Homo sapien
tcttcagacataacaaactcggtac

SEQ ID NO: 3210133 - DNA, 25 bp, Homo sapien
gacataacaaactcggtacaaggct

SEQ ID NO: 3210134 - DNA, 25 bp, Homo sapien
cccgcacagcttgggcaactaaatc

SEQ ID NO: 3210135 - DNA, 25 bp, Homo sapien
actaacaatgtgggcccgcacagct

SEQ ID NO: 3210136 - DNA, 25 bp, Homo sapien
ctgcctgcgagacaataggtgagca

SEQ ID NO: 3210137 - DNA, 25 bp, Homo sapien
gagacaataggtgagcaccgggaac

SEQ ID NO: 3210138 - DNA, 25 bp, Homo sapien
caataggtgagcaccgggaacagcg

SEQ ID NO: 3210139 - DNA, 25 bp, Homo sapien
gagcaccgggaacagcgctttccag

SEQ ID NO: 3210140 - DNA, 25 bp, Homo sapien
gcagatttcctccatcctttcagaa

SEQ ID NO: 3210141 - DNA, 25 bp, Homo sapien
tgcagatttcctccatcctttcaga

SEQ ID NO: 3210142 - DNA, 25 bp, Homo sapien
ctgcagatttcctccatcctttcag

SEQ ID NO: 3210143 - DNA, 25 bp, Homo sapien
agatttcctccatcctttcagaaac

SEQ ID NO: 3210144 - DNA, 25 bp, Homo sapien
agttattctgctgtagatcccagtg

SEQ ID NO: 3210145 - DNA, 25 bp, Homo sapien
tttggtcctaaagcagttattctgc

SEQ ID NO: 3210146 - DNA, 25 bp, Homo sapien
cagttattctgctgtagatcccagt

SEQ ID NO: 3210147 - DNA, 25 bp, Homo sapien
acgcctttggtcctaaagcagttat

SEQ ID NO: 3210148 - DNA, 25 bp, Homo sapien
tgaattgtgttcagaaattccgact

SEQ ID NO: 3210149 - DNA, 25 bp, Homo sapien
tcagaaattccgacttgagttccat

SEQ ID NO: 3210150 - DNA, 25 bp, Homo sapien
aattgtgttcagaaattccgacttg

SEQ ID NO: 3210151 - DNA, 25 bp, Homo sapien
tgtgttcagaaattccgacttgagt

SEQ ID NO: 3210152 - DNA, 25 bp, Homo sapien
catgcttacagatgtctcttctaca

SEQ ID NO: 3210153 - DNA, 25 bp, Homo sapien
atagcatgcttacagatgtctcttc

SEQ ID NO: 3210154 - DNA, 25 bp, Homo sapien
gcatgcttacagatgtctcttctac

SEQ ID NO: 3210155 - DNA, 25 bp, Homo sapien
aacatatcacaggttctgggtacta

SEQ ID NO: 3210156 - DNA, 25 bp, Homo sapien
tgcttttaaacacccacatgattat

SEQ ID NO: 3210157 - DNA, 25 bp, Homo sapien
gcaatggtaggttgagttcttctca

SEQ ID NO: 3210158 - DNA, 25 bp, Homo sapien
tagaggctacccacattttttggct

SEQ ID NO: 3210159 - DNA, 25 bp, Homo sapien
tttagcaggccacataagtatataa

SEQ ID NO: 3210160 - DNA, 25 bp, Homo sapien
tctgcaaatttagcaggccacataa

SEQ ID NO: 3210161 - DNA, 25 bp, Homo sapien
agtatataaccaacatatttgtcag

SEQ ID NO: 3210162 - DNA, 25 bp, Homo sapien
tctgtctctgcaaatttagcaggcc

SEQ ID NO: 3210163 - DNA, 25 bp, Homo sapien
ctgacagccaaaagctggcaggaat

SEQ ID NO: 3210164 - DNA, 25 bp, Homo sapien
gccaaaagctggcaggaattaagca

SEQ ID NO: 3210165 - DNA, 25 bp, Homo sapien
gcaggaattaagcagaaacatgtgc

SEQ ID NO: 3210166 - DNA, 25 bp, Homo sapien
ggaattaagcagaaacatgtgcttc

SEQ ID NO: 3210167 - DNA, 25 bp, Homo sapien
gatacctttacatgtccggaatact

SEQ ID NO: 3210168 - DNA, 25 bp, Homo sapien
tgacttggcacctgatacctttaca

SEQ ID NO: 3210169 - DNA, 25 bp, Homo sapien
tacatgtccggaatactttctgagc

SEQ ID NO: 3210170 - DNA, 25 bp, Homo sapien
tcagttctttgtatgacttggcacc

SEQ ID NO: 3210171 - DNA, 25 bp, Homo sapien
tccccactggtttaagtatagctca

SEQ ID NO: 3210172 - DNA, 25 bp, Homo sapien
aaacaaaggtatgaggcttctcctc

SEQ ID NO: 3210173 - DNA, 25 bp, Homo sapien
gccctgaacaggctagtggctgaag

SEQ ID NO: 3210174 - DNA, 25 bp, Homo sapien
tgcagggttatcaaaccagggccct

SEQ ID NO: 3210175 - DNA, 25 bp, Homo sapien
gtagaagcagaaattactctgtggc

SEQ ID NO: 3210176 - DNA, 25 bp, Homo sapien
gaagcagaaattactctgtggccca

SEQ ID NO: 3210177 - DNA, 25 bp, Homo sapien
cctgtgggttgtgaaagtagaagca

SEQ ID NO: 3210178 - DNA, 25 bp, Homo sapien
aagcagaaattactctgtggcccac

SEQ ID NO: 3210179 - DNA, 25 bp, Homo sapien
ctccttgagagcctcaatctctgcc

SEQ ID NO: 3210180 - DNA, 25 bp, Homo sapien
gggtcaaaccagagctggcactctg

SEQ ID NO: 3210181 - DNA, 25 bp, Homo sapien
tccagggtcaaaccagagctggcac

SEQ ID NO: 3210182 - DNA, 25 bp, Homo sapien
cagggtcaaaccagagctggcactc

SEQ ID NO: 3210183 - DNA, 25 bp, Homo sapien
ctgagaccaatacttgtccagctcc

SEQ ID NO: 3210184 - DNA, 25 bp, Homo sapien
gagaccaatacttgtccagctcctt

SEQ ID NO: 3210185 - DNA, 25 bp, Homo sapien
tgagaccaatacttgtccagctcct

SEQ ID NO: 3210186 - DNA, 25 bp, Homo sapien
ccaaccttggcaggctgcgtggtga

SEQ ID NO: 3210187 - DNA, 25 bp, Homo sapien
aaccttggcaggctgcgtggtgacc

SEQ ID NO: 3210188 - DNA, 25 bp, Homo sapien
ctccaaccttggcaggctgcgtggt

SEQ ID NO: 3210189 - DNA, 25 bp, Homo sapien
ccttggcaggctgcgtggtgaccac

SEQ ID NO: 3210190 - DNA, 25 bp, Homo sapien
tgcagggtatagcgggcctccacct

SEQ ID NO: 3210191 - DNA, 25 bp, Homo sapien
cagggtatagcgggcctccacctca

SEQ ID NO: 3210192 - DNA, 25 bp, Homo sapien
ctgcagggtatagcgggcctccacc

SEQ ID NO: 3210193 - DNA, 25 bp, Homo sapien
agggtatagcgggcctccacctcac

SEQ ID NO: 3210194 - DNA, 25 bp, Homo sapien
ggtggtctttttgatggtttcatgg

SEQ ID NO: 3210195 - DNA, 25 bp, Homo sapien
ggtctttttgatggtttcatggagt

SEQ ID NO: 3210196 - DNA, 25 bp, Homo sapien
tggtctttttgatggtttcatggag

SEQ ID NO: 3210197 - DNA, 25 bp, Homo sapien
ctttttgatggtttcatggagttgc

SEQ ID NO: 3210198 - DNA, 25 bp, Homo sapien
tattactgccataaatgccactcag

SEQ ID NO: 3210199 - DNA, 25 bp, Homo sapien
ttcataatgactgggagggaaagcc

SEQ ID NO: 3210200 - DNA, 25 bp, Homo sapien
gccactaggtcatgctcatgggcaa

SEQ ID NO: 3210201 - DNA, 25 bp, Homo sapien
ttggcagctggtaaacccaaaacca

SEQ ID NO: 3210202 - DNA, 25 bp, Homo sapien
caagtgcttttgatgggtccaggtc

SEQ ID NO: 3210203 - DNA, 25 bp, Homo sapien
aagaatcagtaagaacattctgttt

SEQ ID NO: 3210204 - DNA, 25 bp, Homo sapien
tgatttgggagccagtatgaggcaa

SEQ ID NO: 3210205 - DNA, 25 bp, Homo sapien
tctgcaaacaagtgcttttgatggg

SEQ ID NO: 3210206 - DNA, 25 bp, Homo sapien
cacacttgtacacaaggcacttcac

SEQ ID NO: 3210207 - DNA, 25 bp, Homo sapien
cacttgtacacaaggcacttcacaa

SEQ ID NO: 3210208 - DNA, 25 bp, Homo sapien
acttgtacacaaggcacttcacaat

SEQ ID NO: 3210209 - DNA, 25 bp, Homo sapien
ccccacacttgtacacaaggcactt

SEQ ID NO: 3210210 - DNA, 25 bp, Homo sapien
aagtgtaagaggagaagccatttgc

SEQ ID NO: 3210211 - DNA, 25 bp, Homo sapien
actcaagtcctttgatgtgtcaggc

SEQ ID NO: 3210212 - DNA, 25 bp, Homo sapien
tcaaagttaccctcatctgctggta

SEQ ID NO: 3210213 - DNA, 25 bp, Homo sapien
tatccaatgaacaacactcaagtcc

SEQ ID NO: 3210214 - DNA, 25 bp, Homo sapien
tgcaaagggaagaaatccaaaagga

SEQ ID NO: 3210215 - DNA, 25 bp, Homo sapien
ctgcaaagggaagaaatccaaaagg

SEQ ID NO: 3210216 - DNA, 25 bp, Homo sapien
aattgcaacgactgaaacctttttg

SEQ ID NO: 3210217 - DNA, 25 bp, Homo sapien
gacctatttactgctcttagagccc

SEQ ID NO: 3210218 - DNA, 25 bp, Homo sapien
tgaaacctttttgtcacaatcgacc

SEQ ID NO: 3210219 - DNA, 25 bp, Homo sapien
tgcagcaagaagcaattgcaacgac

SEQ ID NO: 3210220 - DNA, 25 bp, Homo sapien
gtccacagatgccttcgctgcagag

SEQ ID NO: 3210221 - DNA, 25 bp, Homo sapien
atactctagtgtagatttggctggg

SEQ ID NO: 3210222 - DNA, 25 bp, Homo sapien
gaagaattgatatcaagtccaaaac

SEQ ID NO: 3210223 - DNA, 25 bp, Homo sapien
cttatactctagtgtagatttggct

SEQ ID NO: 3210224 - DNA, 25 bp, Homo sapien
ttgatatcaagtccaaaacttaaat

SEQ ID NO: 3210225 - DNA, 25 bp, Homo sapien
aaatccggttctaatattgacctcg

SEQ ID NO: 3210226 - DNA, 25 bp, Homo sapien
tattgacctcgtttccactcaaaga

SEQ ID NO: 3210227 - DNA, 25 bp, Homo sapien
tcgtttccactcaaagattttcgga

SEQ ID NO: 3210228 - DNA, 25 bp, Homo sapien
cactcaaagattttcggatatctcc

SEQ ID NO: 3210229 - DNA, 25 bp, Homo sapien
atccctccacgcatgctgtcaggcc

SEQ ID NO: 3210230 - DNA, 25 bp, Homo sapien
cctccacgcatgctgtcaggccttg

SEQ ID NO: 3210231 - DNA, 25 bp, Homo sapien
aacatccctccacgcatgctgtcag

SEQ ID NO: 3210232 - DNA, 25 bp, Homo sapien
tgtacaacatccctccacgcatgct

SEQ ID NO: 3210233 - DNA, 25 bp, Homo sapien
taggaggaggatgcttgtcaaggac

SEQ ID NO: 3210234 - DNA, 25 bp, Homo sapien
cgaatattatgtcattagtttcccc

SEQ ID NO: 3210235 - DNA, 25 bp, Homo sapien
gtcctgatttttcaccgaatattat

SEQ ID NO: 3210236 - DNA, 25 bp, Homo sapien
tactttgttcgggatagatggtggc

SEQ ID NO: 3210237 - DNA, 25 bp, Homo sapien
ctctgaattctagcagtattttcaa

SEQ ID NO: 3210238 - DNA, 25 bp, Homo sapien
taagctctggtgttcttcgcctctg

SEQ ID NO: 3210239 - DNA, 25 bp, Homo sapien
gggttccttggagctacatcagggt

SEQ ID NO: 3210240 - DNA, 25 bp, Homo sapien
tactaggaccagtgggataagctct

SEQ ID NO: 3210241 - DNA, 25 bp, Homo sapien
ccagagtgtttgccacggtttgggc

SEQ ID NO: 3210242 - DNA, 25 bp, Homo sapien
cccacatgtgttcgggaataagccg

SEQ ID NO: 3210243 - DNA, 25 bp, Homo sapien
ataagccgggccccgctggtaccat

SEQ ID NO: 3210244 - DNA, 25 bp, Homo sapien
tgaagtggcacagacgcgtgtgcgc

SEQ ID NO: 3210245 - DNA, 25 bp, Homo sapien
tgacttagaggcagggggacatccc

SEQ ID NO: 3210246 - DNA, 25 bp, Homo sapien
tcccagatgccgttgagtaggctga

SEQ ID NO: 3210247 - DNA, 25 bp, Homo sapien
ttttcaacgtgaagctcaagtcctc

SEQ ID NO: 3210248 - DNA, 25 bp, Homo sapien
tcatcctcgccggaggtcctgcaag

SEQ ID NO: 3210249 - DNA, 25 bp, Homo sapien
ttgacgtcaccgcttctcgcgcgcc

SEQ ID NO: 3210250 - DNA, 25 bp, Homo sapien
gcctctcatgtttcgttccctcttt

SEQ ID NO: 3210251 - DNA, 25 bp, Homo sapien
ttttaactagcgcgcggggaggtgc

SEQ ID NO: 3210252 - DNA, 25 bp, Homo sapien
aggtgctgccacagcgcgccccttg

SEQ ID NO: 3210253 - DNA, 25 bp, Homo sapien
tagcaggaacagaaacggcgacggc

SEQ ID NO: 3210254 - DNA, 25 bp, Homo sapien
ctctagatgatgctgaggtctcctc

SEQ ID NO: 3210255 - DNA, 25 bp, Homo sapien
ctgggctctagatgatgctgaggtc

SEQ ID NO: 3210256 - DNA, 25 bp, Homo sapien
agtagcaggaacagaaacggcgacg

SEQ ID NO: 3210257 - DNA, 25 bp, Homo sapien
tgacaccgtttgcagttgtgccagt

SEQ ID NO: 3210258 - DNA, 25 bp, Homo sapien
gctgtagggcactccagagacagag

SEQ ID NO: 3210259 - DNA, 25 bp, Homo sapien
cccgaggagcgagataaagttgtgc

SEQ ID NO: 3210260 - DNA, 25 bp, Homo sapien
aaaagacgcggcgatgggtccaatg

SEQ ID NO: 3210261 - DNA, 25 bp, Homo sapien
caggacagccgagggtagaagccac

SEQ ID NO: 3210262 - DNA, 25 bp, Homo sapien
tagccccgggctgtcactccgcagg

SEQ ID NO: 3210263 - DNA, 25 bp, Homo sapien
tctttccccaaacttagcatctcct

SEQ ID NO: 3210264 - DNA, 25 bp, Homo sapien
gtctctccttttcaggcgcttcggg

SEQ ID NO: 3210265 - DNA, 25 bp, Homo sapien
catagtacgtattgcaccaagggag

SEQ ID NO: 3210266 - DNA, 25 bp, Homo sapien
tagaaggagttggacaaatgctccc

SEQ ID NO: 3210267 - DNA, 25 bp, Homo sapien
tttgccataagcaacaggactctgt

SEQ ID NO: 3210268 - DNA, 25 bp, Homo sapien
taattcagttgcaacacaggagctt

SEQ ID NO: 3210269 - DNA, 25 bp, Homo sapien
ggaatatggcctcggcaagtgtaaa

SEQ ID NO: 3210270 - DNA, 25 bp, Homo sapien
gaagtactaggtctctttccaagac

SEQ ID NO: 3210271 - DNA, 25 bp, Homo sapien
tctttgcaatagtctttgcagagca

SEQ ID NO: 3210272 - DNA, 25 bp, Homo sapien
tctgtgttgttggtaacagaaaata

SEQ ID NO: 3210273 - DNA, 25 bp, Homo sapien
ctttcagtggatattacttttattt

SEQ ID NO: 3210274 - DNA, 25 bp, Homo sapien
cacatatgttgatctggggagcgag

SEQ ID NO: 3210275 - DNA, 25 bp, Homo sapien
tggggagcgaggtgcttgcagttct

SEQ ID NO: 3210276 - DNA, 25 bp, Homo sapien
tcaccacatatgttgatctggggag

SEQ ID NO: 3210277 - DNA, 25 bp, Homo sapien
ttagcaaaatacatccctcggggta

SEQ ID NO: 3210278 - DNA, 25 bp, Homo sapien
tagcaaaatacatccctcggggtac

SEQ ID NO: 3210279 - DNA, 25 bp, Homo sapien
tggtccaagtagttagatgctggtc

SEQ ID NO: 3210280 - DNA, 25 bp, Homo sapien
aagcaaaactcatccgcagttgttt

SEQ ID NO: 3210281 - DNA, 25 bp, Homo sapien
ctcatccgcagttgtttgaaggaaa

SEQ ID NO: 3210282 - DNA, 25 bp, Homo sapien
ctggtccaagtagttagatgctggt

SEQ ID NO: 3210283 - DNA, 25 bp, Homo sapien
ataaggctccttgaaaatttctcct

SEQ ID NO: 3210284 - DNA, 25 bp, Homo sapien
gggtaagtatcttcacataaccttc

SEQ ID NO: 3210285 - DNA, 25 bp, Homo sapien
aatgaagagacgttgcgagccatcc

SEQ ID NO: 3210286 - DNA, 25 bp, Homo sapien
actatgcagggcaccaacgggctgc

SEQ ID NO: 3210287 - DNA, 25 bp, Homo sapien
tcagtgaggaaggtaacactaaaat

SEQ ID NO: 3210288 - DNA, 25 bp, Homo sapien
cttcagtgaggaaggtaacactaaa

SEQ ID NO: 3210289 - DNA, 25 bp, Homo sapien
ttaacgtagccagcacaaaaataaa

SEQ ID NO: 3210290 - DNA, 25 bp, Homo sapien
taaaataaaattaacgtagccagca

SEQ ID NO: 3210291 - DNA, 25 bp, Homo sapien
atactttataaagccaaagattcct

SEQ ID NO: 3210292 - DNA, 25 bp, Homo sapien
actagcaaatgctgatgtacagtcc

SEQ ID NO: 3210293 - DNA, 25 bp, Homo sapien
gcatgtcaaatatcaattcgattgc

SEQ ID NO: 3210294 - DNA, 25 bp, Homo sapien
tgcagcgcacaatagtcaacaaata

SEQ ID NO: 3210295 - DNA, 25 bp, Homo sapien
cagggtgtattgctagcagtggtca

SEQ ID NO: 3210296 - DNA, 25 bp, Homo sapien
cactggagcttgtgagtcatgcata

SEQ ID NO: 3210297 - DNA, 25 bp, Homo sapien
tatccatgactctagatgctgggct

SEQ ID NO: 3210298 - DNA, 25 bp, Homo sapien
aagacttggtaggaacagtggtcag

SEQ ID NO: 3210299 - DNA, 25 bp, Homo sapien
aggctgattgagcactcgttacttc

SEQ ID NO: 3210300 - DNA, 25 bp, Homo sapien
attactgcgggggaccaattcagct

SEQ ID NO: 3210301 - DNA, 25 bp, Homo sapien
cgactgcgggggaccaattactgcg

SEQ ID NO: 3210302 - DNA, 25 bp, Homo sapien
agcactcgttacttcaggtgatccg

SEQ ID NO: 3210303 - DNA, 25 bp, Homo sapien
gcaaggcttcctggacatatttcat

SEQ ID NO: 3210304 - DNA, 25 bp, Homo sapien
tccagcaaggcttcctggacatatt

SEQ ID NO: 3210305 - DNA, 25 bp, Homo sapien
ttgcttctggcgttccagcaaggct

SEQ ID NO: 3210306 - DNA, 25 bp, Homo sapien
cccattgcttctggcgttccagcaa

SEQ ID NO: 3210307 - DNA, 25 bp, Homo sapien
tagaggagccgccttccttcttcta

SEQ ID NO: 3210308 - DNA, 25 bp, Homo sapien
gaggagccgccttccttcttctatt

SEQ ID NO: 3210309 - DNA, 25 bp, Homo sapien
tttgttgtctatagtgacagccacg

SEQ ID NO: 3210310 - DNA, 25 bp, Homo sapien
tattggtagttgtttgttgtctata

SEQ ID NO: 3210311 - DNA, 25 bp, Homo sapien
taatgctgagatgacctataggcca

SEQ ID NO: 3210312 - DNA, 25 bp, Homo sapien
tatggcatggatggctgacacctag

SEQ ID NO: 3210313 - DNA, 25 bp, Homo sapien
tctttaaatgcgttcacaggctggg

SEQ ID NO: 3210314 - DNA, 25 bp, Homo sapien
ttctatagaagcaccagcaccgctg

SEQ ID NO: 3210315 - DNA, 25 bp, Homo sapien
aatgatatcttcctactggtatggc

SEQ ID NO: 3210316 - DNA, 25 bp, Homo sapien
gtgtctagaacacgctgtaaatgat

SEQ ID NO: 3210317 - DNA, 25 bp, Homo sapien
gacatttataacacaccaagcttga

SEQ ID NO: 3210318 - DNA, 25 bp, Homo sapien
ggtatggcatcgtccctagatgaca

SEQ ID NO: 3210319 - DNA, 25 bp, Homo sapien
tctttccagctatggtcaactctga

SEQ ID NO: 3210320 - DNA, 25 bp, Homo sapien
tccgctctgtcattccatctcatgt

SEQ ID NO: 3210321 - DNA, 25 bp, Homo sapien
tgctttgaagatcgttcccatctag

SEQ ID NO: 3210322 - DNA, 25 bp, Homo sapien
gcacttctgcaaagtcctccttgac

SEQ ID NO: 3210323 - DNA, 25 bp, Homo sapien
gacaagtgactttagagtgagggct

SEQ ID NO: 3210324 - DNA, 25 bp, Homo sapien
taaagttactagtacccagatggca

SEQ ID NO: 3210325 - DNA, 25 bp, Homo sapien
tattgttcctgtacatgatggtgcc

SEQ ID NO: 3210326 - DNA, 25 bp, Homo sapien
tgaaatgcataaggtcaactctagc

SEQ ID NO: 3210327 - DNA, 25 bp, Homo sapien
tattccaaaatatcattagctacaa

SEQ ID NO: 3210328 - DNA, 25 bp, Homo sapien
caaataaacatttgctatggctcag

SEQ ID NO: 3210329 - DNA, 25 bp, Homo sapien
caaatgcagaattctaacaacacag

SEQ ID NO: 3210330 - DNA, 25 bp, Homo sapien
catttgctatggctcagatatctaa

SEQ ID NO: 3210331 - DNA, 25 bp, Homo sapien
tgagctttctccactctaaaacttg

SEQ ID NO: 3210332 - DNA, 25 bp, Homo sapien
ctgagctttctccactctaaaactt

SEQ ID NO: 3210333 - DNA, 25 bp, Homo sapien
cctggaggcatctacatcagttgtc

SEQ ID NO: 3210334 - DNA, 25 bp, Homo sapien
catcatagctaggtaataggcagcc

SEQ ID NO: 3210335 - DNA, 25 bp, Homo sapien
tcagttgtcacaacgatggtggtct

SEQ ID NO: 3210336 - DNA, 25 bp, Homo sapien
tggtggtctgttcatcatagctagg

SEQ ID NO: 3210337 - DNA, 25 bp, Homo sapien
taagggttagaacaagacaattgtc

SEQ ID NO: 3210338 - DNA, 25 bp, Homo sapien
gtacaagagtcttacaccacttttg

SEQ ID NO: 3210339 - DNA, 25 bp, Homo sapien
tgggccgctaggaggacaagtttaa

SEQ ID NO: 3210340 - DNA, 25 bp, Homo sapien
ttccttgcctactgcacaaaaaagg

SEQ ID NO: 3210341 - DNA, 25 bp, Homo sapien
ccctaagaatgtggtcatgaggccc

SEQ ID NO: 3210342 - DNA, 25 bp, Homo sapien
gatggaatgcgaggcttagcagtcc

SEQ ID NO: 3210343 - DNA, 25 bp, Homo sapien
cgatagcccaccgttcttggttggt

SEQ ID NO: 3210344 - DNA, 25 bp, Homo sapien
ggtataggacacatacaactttcca

SEQ ID NO: 3210345 - DNA, 25 bp, Homo sapien
aaaaacttatgaaaagatgatgaga

SEQ ID NO: 3210346 - DNA, 25 bp, Homo sapien
gagaaatttctatgcttcgatgcct

SEQ ID NO: 3210347 - DNA, 25 bp, Homo sapien
caccttatggttacttatttgcaac

SEQ ID NO: 3210348 - DNA, 25 bp, Homo sapien
cagcaagatggaggtaatgatttaa

SEQ ID NO: 3210349 - DNA, 25 bp, Homo sapien
catatcatccagtgtaatcatccca

SEQ ID NO: 3210350 - DNA, 25 bp, Homo sapien
cagttgtcctcccagatgctttctg

SEQ ID NO: 3210351 - DNA, 25 bp, Homo sapien
tgatgtacaaaaagccgtcagggcc

SEQ ID NO: 3210352 - DNA, 25 bp, Homo sapien
gaaagactctggctgttctcaaatc

SEQ ID NO: 3210353 - DNA, 25 bp, Homo sapien
cgctgggcggtgttagcctattaca

SEQ ID NO: 3210354 - DNA, 25 bp, Homo sapien
tggaacagagaactacacaacagta

SEQ ID NO: 3210355 - DNA, 25 bp, Homo sapien
tatatctcccaggaaggttcgctgg

SEQ ID NO: 3210356 - DNA, 25 bp, Homo sapien
gaggaacccatctgtgatcagcctt

SEQ ID NO: 3210357 - DNA, 25 bp, Homo sapien
tggagcccatgagcaaacacttcgg

SEQ ID NO: 3210358 - DNA, 25 bp, Homo sapien
gggttgctccttggtatggaataag

SEQ ID NO: 3210359 - DNA, 25 bp, Homo sapien
tctgtgtccacatccagccgtagca

SEQ ID NO: 3210360 - DNA, 25 bp, Homo sapien
gaataaggcacgttgcacatgtctg

SEQ ID NO: 3210361 - DNA, 25 bp, Homo sapien
tcctgacataggaaggagccctttg

SEQ ID NO: 3210362 - DNA, 25 bp, Homo sapien
gcaaggatcctatggcaatttagtt

SEQ ID NO: 3210363 - DNA, 25 bp, Homo sapien
tccaagctcagactggagattcctg

SEQ ID NO: 3210364 - DNA, 25 bp, Homo sapien
gaaggagccctttgtggactggcaa

SEQ ID NO: 3210365 - DNA, 25 bp, Homo sapien
cagtgggatgtctatccacagcaca

SEQ ID NO: 3210366 - DNA, 25 bp, Homo sapien
tttttccattggagtctgaacacag

SEQ ID NO: 3210367 - DNA, 25 bp, Homo sapien
gatgtttatatcagtgggatgtcta

SEQ ID NO: 3210368 - DNA, 25 bp, Homo sapien
tgaacacagtatcgttaaattgatg

SEQ ID NO: 3210369 - DNA, 25 bp, Homo sapien
ttactgaatggcttgaattctaaaa

SEQ ID NO: 3210370 - DNA, 25 bp, Homo sapien
tccaaacacgtagcttccatacaat

SEQ ID NO: 3210371 - DNA, 25 bp, Homo sapien
tccaccaaccaaaggaccattactg

SEQ ID NO: 3210372 - DNA, 25 bp, Homo sapien
tggcagccccggtatacaaatccac

SEQ ID NO: 3210373 - DNA, 25 bp, Homo sapien
tagtgccgagacagagtggtttttc

SEQ ID NO: 3210374 - DNA, 25 bp, Homo sapien
tccaaatcccaagatgtgaccggaa

SEQ ID NO: 3210375 - DNA, 25 bp, Homo sapien
gtagcctctacaggacccactagtg

SEQ ID NO: 3210376 - DNA, 25 bp, Homo sapien
gatgtgaccggaaaagtagcctcta

SEQ ID NO: 3210377 - DNA, 25 bp, Homo sapien
tccaagagacatggatacatggaaa

SEQ ID NO: 3210378 - DNA, 25 bp, Homo sapien
tccaacaagtagaggataagattgc

SEQ ID NO: 3210379 - DNA, 25 bp, Homo sapien
tctctggagtaggtcatctttgctg

SEQ ID NO: 3210380 - DNA, 25 bp, Homo sapien
aactggactatcttaatctctggag

SEQ ID NO: 3210381 - DNA, 25 bp, Homo sapien
ccattgtgagtctgggtcatacttt

SEQ ID NO: 3210382 - DNA, 25 bp, Homo sapien
tttccattgtgagtctgggtcatac

SEQ ID NO: 3210383 - DNA, 25 bp, Homo sapien
gagtctgggtcatacttttactgct

SEQ ID NO: 3210384 - DNA, 25 bp, Homo sapien
gagttttccattgtgagtctgggtc

SEQ ID NO: 3210385 - DNA, 25 bp, Homo sapien
tggcaattcagtcaagttttcatag

SEQ ID NO: 3210386 - DNA, 25 bp, Homo sapien
caagttttcatagcaatctatccaa

SEQ ID NO: 3210387 - DNA, 25 bp, Homo sapien
ccagtttgaagtggcaattcagtca

SEQ ID NO: 3210388 - DNA, 25 bp, Homo sapien
agatgaatgccagtttgaagtggca

SEQ ID NO: 3210389 - DNA, 25 bp, Homo sapien
ttaactttattctcatgagagaggg

SEQ ID NO: 3210390 - DNA, 25 bp, Homo sapien
catttttaagccaatactcatcact

SEQ ID NO: 3210391 - DNA, 25 bp, Homo sapien
acagtgattatccttgaccactcat

SEQ ID NO: 3210392 - DNA, 25 bp, Homo sapien
catcatttttaagccaatactcatc

SEQ ID NO: 3210393 - DNA, 25 bp, Homo sapien
ccttgaccactcatcatttttaagc

SEQ ID NO: 3210394 - DNA, 25 bp, Homo sapien
cgtttcgacagagcctggagcactc

SEQ ID NO: 3210395 - DNA, 25 bp, Homo sapien
ttgtaccgtggctctgcattcctca

SEQ ID NO: 3210396 - DNA, 25 bp, Homo sapien
ggtgcagtagccgtttcgacagagc

SEQ ID NO: 3210397 - DNA, 25 bp, Homo sapien
tcagtgtctgtgcaggttgtaccgt

SEQ ID NO: 3210398 - DNA, 25 bp, Homo sapien
tgttcacattgaggaccaagatatc

SEQ ID NO: 3210399 - DNA, 25 bp, Homo sapien
tgttcggtctaacacagacacctcc

SEQ ID NO: 3210400 - DNA, 25 bp, Homo sapien
ggatgtttctgtccacttgttcaca

SEQ ID NO: 3210401 - DNA, 25 bp, Homo sapien
aagatatccttttttacagaggcac

SEQ ID NO: 3210402 - DNA, 25 bp, Homo sapien
aatgtaacttgttagatccagcaag

SEQ ID NO: 3210403 - DNA, 25 bp, Homo sapien
caagtaagatgtcatgtcaatgatc

SEQ ID NO: 3210404 - DNA, 25 bp, Homo sapien
ctatacaatgtaacttgttagatcc

SEQ ID NO: 3210405 - DNA, 25 bp, Homo sapien
agcaagtaagatgtcatgtcaatga

SEQ ID NO: 3210406 - DNA, 25 bp, Homo sapien
gatccatcggattgcacagtactgt

SEQ ID NO: 3210407 - DNA, 25 bp, Homo sapien
cacaggagtgtgtagcaggataaca

SEQ ID NO: 3210408 - DNA, 25 bp, Homo sapien
taaatatgtaacacaaacccagtgc

SEQ ID NO: 3210409 - DNA, 25 bp, Homo sapien
aaacatgctgacatacacacagagg

SEQ ID NO: 3210410 - DNA, 25 bp, Homo sapien
caagatttgtcacactgttgggcca

SEQ ID NO: 3210411 - DNA, 25 bp, Homo sapien
tacatgttggcacaaggataccttg

SEQ ID NO: 3210412 - DNA, 25 bp, Homo sapien
tacaggtgacagcttacatagccaa

SEQ ID NO: 3210413 - DNA, 25 bp, Homo sapien
taaaatccaaacgtggagagctggc

SEQ ID NO: 3210414 - DNA, 25 bp, Homo sapien
gcttggcttaatatccgtggatctt

SEQ ID NO: 3210415 - DNA, 25 bp, Homo sapien
tagaactaatggcaatagaacacct

SEQ ID NO: 3210416 - DNA, 25 bp, Homo sapien
aatatgttgccatcaattagccagt

SEQ ID NO: 3210417 - DNA, 25 bp, Homo sapien
gaacttggcctttcattctaatgac

SEQ ID NO: 3210418 - DNA, 25 bp, Homo sapien
atttcgtctttatcttatgcatcag

SEQ ID NO: 3210419 - DNA, 25 bp, Homo sapien
gacaaccgcagcttaaacttgagaa

SEQ ID NO: 3210420 - DNA, 25 bp, Homo sapien
aacttgagaatggacaagggaataa

SEQ ID NO: 3210421 - DNA, 25 bp, Homo sapien
ctgacaaccgcagcttaaacttgag

SEQ ID NO: 3210422 - DNA, 25 bp, Homo sapien
gcagaaacagtagtagaaaggttat

SEQ ID NO: 3210423 - DNA, 25 bp, Homo sapien
cagaaacagtagtagaaaggttatt

SEQ ID NO: 3210424 - DNA, 25 bp, Homo sapien
atgaaccaggacaacagtgtggcag

SEQ ID NO: 3210425 - DNA, 25 bp, Homo sapien
ctatgaaccaggacaacagtgtggc

SEQ ID NO: 3210426 - DNA, 25 bp, Homo sapien
aatagggaagaagtaacttctctgg

SEQ ID NO: 3210427 - DNA, 25 bp, Homo sapien
ccttccgagtattcttcatgataaa

SEQ ID NO: 3210428 - DNA, 25 bp, Homo sapien
tacttttagccatcactcaatttct

SEQ ID NO: 3210429 - DNA, 25 bp, Homo sapien
cattaatctgagaaaccttccgagt

SEQ ID NO: 3210430 - DNA, 25 bp, Homo sapien
gatgtagcatctaaccttatacctg

SEQ ID NO: 3210431 - DNA, 25 bp, Homo sapien
tgccaatagtataccttagccttcc

SEQ ID NO: 3210432 - DNA, 25 bp, Homo sapien
tatcttgaatgctcctagatgtagc

SEQ ID NO: 3210433 - DNA, 25 bp, Homo sapien
cactgacagtataggtaacatttta

SEQ ID NO: 3210434 - DNA, 25 bp, Homo sapien
tgcaacttcaaatctcatcccaggg

SEQ ID NO: 3210435 - DNA, 25 bp, Homo sapien
gcttatgatgccgattgggcccaca

SEQ ID NO: 3210436 - DNA, 25 bp, Homo sapien
tgtctcctgcgagtaaggctctgga

SEQ ID NO: 3210437 - DNA, 25 bp, Homo sapien
tactacatggttcttggtgaaacgc

SEQ ID NO: 3210438 - DNA, 25 bp, Homo sapien
aaagaattttaaaatagcacatgta

SEQ ID NO: 3210439 - DNA, 25 bp, Homo sapien
aaaaagaattttaaaatagcacatg

SEQ ID NO: 3210440 - DNA, 25 bp, Homo sapien
agaattttaaaatagcacatgtaca

SEQ ID NO: 3210441 - DNA, 25 bp, Homo sapien
taatcagtctgtatatttagaaaaa

SEQ ID NO: 3210442 - DNA, 25 bp, Homo sapien
ttgccctgagtttgaaggtgttatt

SEQ ID NO: 3210443 - DNA, 25 bp, Homo sapien
cggatgggacatctgcagcaaggat

SEQ ID NO: 3210444 - DNA, 25 bp, Homo sapien
gcagcaaggattggaaatgagaatt

SEQ ID NO: 3210445 - DNA, 25 bp, Homo sapien
ggaaatgagaattttgccctgagtt

SEQ ID NO: 3210446 - DNA, 25 bp, Homo sapien
gtgttctgagtcttgttccaagagc

SEQ ID NO: 3210447 - DNA, 25 bp, Homo sapien
ctgtgttctgagtcttgttccaaga

SEQ ID NO: 3210448 - DNA, 25 bp, Homo sapien
tgtgttctgagtcttgttccaagag

SEQ ID NO: 3210449 - DNA, 25 bp, Homo sapien
cagggcgtgcgcttggtgaggcagg

SEQ ID NO: 3210450 - DNA, 25 bp, Homo sapien
ggacactggtcttatctggcaaaag

SEQ ID NO: 3210451 - DNA, 25 bp, Homo sapien
gcaaaagactgtgggtaaacaaagc

SEQ ID NO: 3210452 - DNA, 25 bp, Homo sapien
gcagcagggcgtgcgcttggtgagg

SEQ ID NO: 3210453 - DNA, 25 bp, Homo sapien
aggcatctgcaccaaaattatcttt

SEQ ID NO: 3210454 - DNA, 25 bp, Homo sapien
ggctcaggcatctgcaccaaaatta

SEQ ID NO: 3210455 - DNA, 25 bp, Homo sapien
caccaaaattatctttggcataagc

SEQ ID NO: 3210456 - DNA, 25 bp, Homo sapien
tcaggcatctgcaccaaaattatct

SEQ ID NO: 3210457 - DNA, 25 bp, Homo sapien
ttgcaacagtcacactatcttttgt

SEQ ID NO: 3210458 - DNA, 25 bp, Homo sapien
cactatcttttgttactttaggact

SEQ ID NO: 3210459 - DNA, 25 bp, Homo sapien
ctttgcaacagtcacactatctttt

SEQ ID NO: 3210460 - DNA, 25 bp, Homo sapien
gcaacagtcacactatcttttgtta

SEQ ID NO: 3210461 - DNA, 25 bp, Homo sapien
tggttcagcgattatagcatcaaca

SEQ ID NO: 3210462 - DNA, 25 bp, Homo sapien
tcttgaacaagttttgctccagtat

SEQ ID NO: 3210463 - DNA, 25 bp, Homo sapien
tttggttcagcgattatagcatcaa

SEQ ID NO: 3210464 - DNA, 25 bp, Homo sapien
cttgaacaagttttgctccagtatt

SEQ ID NO: 3210465 - DNA, 25 bp, Homo sapien
tttcttttcactcagcagaacatag

SEQ ID NO: 3210466 - DNA, 25 bp, Homo sapien
cttacagtaagcattggcaatttca

SEQ ID NO: 3210467 - DNA, 25 bp, Homo sapien
gcagaacataggcatcctggaattc

SEQ ID NO: 3210468 - DNA, 25 bp, Homo sapien
aatttcaagagcaggtgcaatggac

SEQ ID NO: 3210469 - DNA, 25 bp, Homo sapien
ttaaaagcatggcatcgtctttggt

SEQ ID NO: 3210470 - DNA, 25 bp, Homo sapien
aaagcatggcatcgtctttggtcac

SEQ ID NO: 3210471 - DNA, 25 bp, Homo sapien
agatttagggtcaacccctcttctg

SEQ ID NO: 3210472 - DNA, 25 bp, Homo sapien
gatttagggtcaacccctcttctgc

SEQ ID NO: 3210473 - DNA, 25 bp, Homo sapien
acacatttttcaatttgagccttgt

SEQ ID NO: 3210474 - DNA, 25 bp, Homo sapien
actgctcaatgatttcttgaacaca

SEQ ID NO: 3210475 - DNA, 25 bp, Homo sapien
ttgaacacatttttcaatttgagcc

SEQ ID NO: 3210476 - DNA, 25 bp, Homo sapien
gctcaatgatttcttgaacacattt

SEQ ID NO: 3210477 - DNA, 25 bp, Homo sapien
ttcagtttttccttttcatattcac

SEQ ID NO: 3210478 - DNA, 25 bp, Homo sapien
ctgaaagttttgccagtgttcattc

SEQ ID NO: 3210479 - DNA, 25 bp, Homo sapien
gaaagttttgccagtgttcattcag

SEQ ID NO: 3210480 - DNA, 25 bp, Homo sapien
gttttgccagtgttcattcagtttt

SEQ ID NO: 3210481 - DNA, 25 bp, Homo sapien
aaactttgttgtgtcgataattcct

SEQ ID NO: 3210482 - DNA, 25 bp, Homo sapien
aactttgttgtgtcgataattcctt

SEQ ID NO: 3210483 - DNA, 25 bp, Homo sapien
actttgttgtgtcgataattccttt

SEQ ID NO: 3210484 - DNA, 25 bp, Homo sapien
cattccaggatccttctcttcttta

SEQ ID NO: 3210485 - DNA, 25 bp, Homo sapien
ggaatttctgtgactaaaacttctg

SEQ ID NO: 3210486 - DNA, 25 bp, Homo sapien
cttctttaggaatttctgtgactaa

SEQ ID NO: 3210487 - DNA, 25 bp, Homo sapien
ccattccaggatccttctcttcttt

SEQ ID NO: 3210488 - DNA, 25 bp, Homo sapien
ataccacctcccattccatccattg

SEQ ID NO: 3210489 - DNA, 25 bp, Homo sapien
cataccacctcccattccatccatt

SEQ ID NO: 3210490 - DNA, 25 bp, Homo sapien
ttagaacataccacctcccatacca

SEQ ID NO: 3210491 - DNA, 25 bp, Homo sapien
gaacataccacctcccataccacct

SEQ ID NO: 3210492 - DNA, 25 bp, Homo sapien
cttctctgaagttattggtaaggaa

SEQ ID NO: 3210493 - DNA, 25 bp, Homo sapien
tctccaactgacttctctgaagtta

SEQ ID NO: 3210494 - DNA, 25 bp, Homo sapien
tggtaaggaacactgccttgggctt

SEQ ID NO: 3210495 - DNA, 25 bp, Homo sapien
tattggtaaggaacactgccttggg

SEQ ID NO: 3210496 - DNA, 25 bp, Homo sapien
tatcagcaggcatatatgtcagtgg

SEQ ID NO: 3210497 - DNA, 25 bp, Homo sapien
ccacgggacttagtgggatatcagc

SEQ ID NO: 3210498 - DNA, 25 bp, Homo sapien
tcactccagattcagccacgggact

SEQ ID NO: 3210499 - DNA, 25 bp, Homo sapien
ggatgtgccgacctttgtaccttca

SEQ ID NO: 3210500 - DNA, 25 bp, Homo sapien
gtctggtcttctgaggagaaatcgc

SEQ ID NO: 3210501 - DNA, 25 bp, Homo sapien
gagaaatcgctccagtcaataaatc

SEQ ID NO: 3210502 - DNA, 25 bp, Homo sapien
aattttcatgattccgtgcttttgc

SEQ ID NO: 3210503 - DNA, 25 bp, Homo sapien
atcgctccagtcaataaatcccatg

SEQ ID NO: 3210504 - DNA, 25 bp, Homo sapien
caccagtgcagaagagagtggcagt

SEQ ID NO: 3210505 - DNA, 25 bp, Homo sapien
tgctggtaacctcccgcgtagagag

SEQ ID NO: 3210506 - DNA, 25 bp, Homo sapien
tggacaacgtgattcagcccagatc

SEQ ID NO: 3210507 - DNA, 25 bp, Homo sapien
tttaaaatgagcaggcccggctgaa

SEQ ID NO: 3210508 - DNA, 25 bp, Homo sapien
gtctggtcccataaaaagcctccta

SEQ ID NO: 3210509 - DNA, 25 bp, Homo sapien
tgagactaagtcatggccaatggag

SEQ ID NO: 3210510 - DNA, 25 bp, Homo sapien
tatgctaaccataagccgaagttgg

SEQ ID NO: 3210511 - DNA, 25 bp, Homo sapien
tcaccagaatggcaccctaagcaag

SEQ ID NO: 3210512 - DNA, 25 bp, Homo sapien
ttgctctctgttttcatgtttataa

SEQ ID NO: 3210513 - DNA, 25 bp, Homo sapien
tgtttataaaatgtgttcccaagcc

SEQ ID NO: 3210514 - DNA, 25 bp, Homo sapien
ttcatgtttataaaatgtgttccca

SEQ ID NO: 3210515 - DNA, 25 bp, Homo sapien
catgtttataaaatgtgttcccaag

SEQ ID NO: 3210516 - DNA, 25 bp, Homo sapien
ggtagataagtctctgaacatactg

SEQ ID NO: 3210517 - DNA, 25 bp, Homo sapien
gaacatactgtacttgtccaaatga

SEQ ID NO: 3210518 - DNA, 25 bp, Homo sapien
ggagcagggcaaattgagctgaatt

SEQ ID NO: 3210519 - DNA, 25 bp, Homo sapien
gaaaaggcttttcgaggaaatgaga

SEQ ID NO: 3210520 - DNA, 25 bp, Homo sapien
caatggatgtgagtcagacctctga

SEQ ID NO: 3210521 - DNA, 25 bp, Homo sapien
caggaagccagtgtccaatggatgt

SEQ ID NO: 3210522 - DNA, 25 bp, Homo sapien
tcggtcttccacttggcccaaacat

SEQ ID NO: 3210523 - DNA, 25 bp, Homo sapien
gttcacatgtggcagatagatttct

SEQ ID NO: 3210524 - DNA, 25 bp, Homo sapien
tggtctgctattggtgtatgatact

SEQ ID NO: 3210525 - DNA, 25 bp, Homo sapien
attaagggtctccacataggctccc

SEQ ID NO: 3210526 - DNA, 25 bp, Homo sapien
caaggatgggtctgtttgaggcttc

SEQ ID NO: 3210527 - DNA, 25 bp, Homo sapien
cttaggtctgtaaggtgttaaggtg

SEQ ID NO: 3210528 - DNA, 25 bp, Homo sapien
taaaaccatgtgtcataataccacc

SEQ ID NO: 3210529 - DNA, 25 bp, Homo sapien
gaataactcacgaattaagctccat

SEQ ID NO: 3210530 - DNA, 25 bp, Homo sapien
gatgtcctaacactgtgaaaatgta

SEQ ID NO: 3210531 - DNA, 25 bp, Homo sapien
tagggcagtgtcctaatttggcgtc

SEQ ID NO: 3210532 - DNA, 25 bp, Homo sapien
gaactcttgtgtctcacctaaccag

SEQ ID NO: 3210533 - DNA, 25 bp, Homo sapien
gaaatgtactttagactagcttgag

SEQ ID NO: 3210534 - DNA, 25 bp, Homo sapien
caaacagtaactgactgatggctcc

SEQ ID NO: 3210535 - DNA, 25 bp, Homo sapien
tgacacattacaaagtcgccacagg

SEQ ID NO: 3210536 - DNA, 25 bp, Homo sapien
agagtggtcctcctctattagggag

SEQ ID NO: 3210537 - DNA, 25 bp, Homo sapien
gttaataccaatctagccagctaga

SEQ ID NO: 3210538 - DNA, 25 bp, Homo sapien
cgtatattcttgaccaaagagtggt

SEQ ID NO: 3210539 - DNA, 25 bp, Homo sapien
gccagctagatcagctgaaatcaac

SEQ ID NO: 3210540 - DNA, 25 bp, Homo sapien
gatggcatatgcttatagtaccagc

SEQ ID NO: 3210541 - DNA, 25 bp, Homo sapien
tttgcagtagcacttgcaacaatca

SEQ ID NO: 3210542 - DNA, 25 bp, Homo sapien
caatcctgttagctatgttagccaa

SEQ ID NO: 3210543 - DNA, 25 bp, Homo sapien
taggttaaaagcgtgaaagagctgg

SEQ ID NO: 3210544 - DNA, 25 bp, Homo sapien
gaaagtgatgtctcgtcatcagaag

SEQ ID NO: 3210545 - DNA, 25 bp, Homo sapien
aaatgttgagaaatacaatgccact

SEQ ID NO: 3210546 - DNA, 25 bp, Homo sapien
gaatttgttgcctgcttcttatagg

SEQ ID NO: 3210547 - DNA, 25 bp, Homo sapien
tctcgtcatcagaagtatctgttga

SEQ ID NO: 3210548 - DNA, 25 bp, Homo sapien
tctgtagtaagaactttgttcccat

SEQ ID NO: 3210549 - DNA, 25 bp, Homo sapien
ctctgcgtagatctgtagtaagaac

SEQ ID NO: 3210550 - DNA, 25 bp, Homo sapien
cgtagatctgtagtaagaactttgt

SEQ ID NO: 3210551 - DNA, 25 bp, Homo sapien
tgtagtaagaactttgttcccattg

SEQ ID NO: 3210552 - DNA, 25 bp, Homo sapien
ttttctaagggcctacgatgtctga

SEQ ID NO: 3210553 - DNA, 25 bp, Homo sapien
gccatttccacactgggctgttcgt

SEQ ID NO: 3210554 - DNA, 25 bp, Homo sapien
ttccacactgggctgttcgttggta

SEQ ID NO: 3210555 - DNA, 25 bp, Homo sapien
ggcctacgatgtctgagtttcttga

SEQ ID NO: 3210556 - DNA, 25 bp, Homo sapien
agaatcaatgaatcttcaagtctca

SEQ ID NO: 3210557 - DNA, 25 bp, Homo sapien
taaaagacaatgcatacttttctgt

SEQ ID NO: 3210558 - DNA, 25 bp, Homo sapien
aaagacaatgcatacttttctgtgt

SEQ ID NO: 3210559 - DNA, 25 bp, Homo sapien
tgaagaatcaatgaatcttcaagtc

SEQ ID NO: 3210560 - DNA, 25 bp, Homo sapien
taaaaaatagtagattgggtgcagt

SEQ ID NO: 3210561 - DNA, 25 bp, Homo sapien
tgaacaacaggacctattgcctggt

SEQ ID NO: 3210562 - DNA, 25 bp, Homo sapien
gcctggtagcactacagtttcagca

SEQ ID NO: 3210563 - DNA, 25 bp, Homo sapien
cagcagcttaggtatctttgtaaaa

SEQ ID NO: 3210564 - DNA, 25 bp, Homo sapien
ctgatttcaatcttctgcgtatggc

SEQ ID NO: 3210565 - DNA, 25 bp, Homo sapien
tggctactgttgttttgaagtttag

SEQ ID NO: 3210566 - DNA, 25 bp, Homo sapien
tcccctttgcttgttattgccaact

SEQ ID NO: 3210567 - DNA, 25 bp, Homo sapien
cagttatccctgtacaatttattga

SEQ ID NO: 3210568 - DNA, 25 bp, Homo sapien
cagtgattagtgaggttgaccatct

SEQ ID NO: 3210569 - DNA, 25 bp, Homo sapien
tctccagtgattagtgaggttgacc

SEQ ID NO: 3210570 - DNA, 25 bp, Homo sapien
gttggctgtatgtctacttttgagg

SEQ ID NO: 3210571 - DNA, 25 bp, Homo sapien
tccagtgattagtgaggttgaccat

SEQ ID NO: 3210572 - DNA, 25 bp, Homo sapien
gaatctgagtttcggcaagcagcca

SEQ ID NO: 3210573 - DNA, 25 bp, Homo sapien
gatgcattcgcctctccggtttcaa

SEQ ID NO: 3210574 - DNA, 25 bp, Homo sapien
cgtggtcctagcgtaaacagatgca

SEQ ID NO: 3210575 - DNA, 25 bp, Homo sapien
tgacgtcattgagctgcgacccttg

SEQ ID NO: 3210576 - DNA, 25 bp, Homo sapien
gcaattctcgttaacttgtctgcca

SEQ ID NO: 3210577 - DNA, 25 bp, Homo sapien
caattctcgttaacttgtctgccat

SEQ ID NO: 3210578 - DNA, 25 bp, Homo sapien
agcaattctcgttaacttgtctgcc

SEQ ID NO: 3210579 - DNA, 25 bp, Homo sapien
cttaatacagataccacaaccaata

SEQ ID NO: 3210580 - DNA, 25 bp, Homo sapien
tacagataccacaaccaatacaaag

SEQ ID NO: 3210581 - DNA, 25 bp, Homo sapien
catgctattttgctctggggtgtaa

SEQ ID NO: 3210582 - DNA, 25 bp, Homo sapien
tccatgctattttgctctggggtgt

SEQ ID NO: 3210583 - DNA, 25 bp, Homo sapien
tggtagattgacaattgataaggcg

SEQ ID NO: 3210584 - DNA, 25 bp, Homo sapien
gaagtttgaaggcattggcacaata

SEQ ID NO: 3210585 - DNA, 25 bp, Homo sapien
gattgacaattgataaggcgccaaa

SEQ ID NO: 3210586 - DNA, 25 bp, Homo sapien
aggcattggcacaatatcgatgtgt

SEQ ID NO: 3210587 - DNA, 25 bp, Homo sapien
taccattagttccaactaatcccaa

SEQ ID NO: 3210588 - DNA, 25 bp, Homo sapien
aaagcagttgactttccaataccat

SEQ ID NO: 3210589 - DNA, 25 bp, Homo sapien
gcagttgactttccaataccattag

SEQ ID NO: 3210590 - DNA, 25 bp, Homo sapien
gactttccaataccattagttccaa

SEQ ID NO: 3210591 - DNA, 25 bp, Homo sapien
cttaggaatctggtctacatattga

SEQ ID NO: 3210592 - DNA, 25 bp, Homo sapien
tcggtccaaaatagatcccactgtc

SEQ ID NO: 3210593 - DNA, 25 bp, Homo sapien
caagctgctgacatacaattgcctg

SEQ ID NO: 3210594 - DNA, 25 bp, Homo sapien
tcatcttttcggtccaaaatagatc

SEQ ID NO: 3210595 - DNA, 25 bp, Homo sapien
tctttgtttcatcttttcggtccaa

SEQ ID NO: 3210596 - DNA, 25 bp, Homo sapien
catagaggcattgtgctcaatgtat

SEQ ID NO: 3210597 - DNA, 25 bp, Homo sapien
aacatagaggcattgtgctcaatgt

SEQ ID NO: 3210598 - DNA, 25 bp, Homo sapien
atagaggcattgtgctcaatgtatt

SEQ ID NO: 3210599 - DNA, 25 bp, Homo sapien
gaacatagaggcattgtgctcaatg

SEQ ID NO: 3210600 - DNA, 25 bp, Homo sapien
tgcaaacgacagcacaagcaaatct

SEQ ID NO: 3210601 - DNA, 25 bp, Homo sapien
gatcttcaacatttcgttcttttag

SEQ ID NO: 3210602 - DNA, 25 bp, Homo sapien
acaagcaaatctctgcaactctcct

SEQ ID NO: 3210603 - DNA, 25 bp, Homo sapien
tatcagctttctgtatgcaaacgac

SEQ ID NO: 3210604 - DNA, 25 bp, Homo sapien
catctaggtaactagaaggctcatc

SEQ ID NO: 3210605 - DNA, 25 bp, Homo sapien
ttagagatcgtatagtaatagcagc

SEQ ID NO: 3210606 - DNA, 25 bp, Homo sapien
ctaggtaactagaaggctcatcaaa

SEQ ID NO: 3210607 - DNA, 25 bp, Homo sapien
agcagcctttaaacgctgcttgaca

SEQ ID NO: 3210608 - DNA, 25 bp, Homo sapien
cctgcctagatctttacctgctgaa

SEQ ID NO: 3210609 - DNA, 25 bp, Homo sapien
tcataaacatcttaagggagactct

SEQ ID NO: 3210610 - DNA, 25 bp, Homo sapien
taaattctagttcaggccctcgtat

SEQ ID NO: 3210611 - DNA, 25 bp, Homo sapien
ccctgatgtgggtctcaattccaaa

SEQ ID NO: 3210612 - DNA, 25 bp, Homo sapien
taatacacttagatcatgttccacc

SEQ ID NO: 3210613 - DNA, 25 bp, Homo sapien
atacacttagatcatgttccaccac

SEQ ID NO: 3210614 - DNA, 25 bp, Homo sapien
aatacacttagatcatgttccacca

SEQ ID NO: 3210615 - DNA, 25 bp, Homo sapien
tggaacatagccatccaaaaaaatg

SEQ ID NO: 3210616 - DNA, 25 bp, Homo sapien
tgttggaacatagccatccaaaaaa

SEQ ID NO: 3210617 - DNA, 25 bp, Homo sapien
gaacatagccatccaaaaaaatgtt

SEQ ID NO: 3210618 - DNA, 25 bp, Homo sapien
ctgttggaacatagccatccaaaaa

SEQ ID NO: 3210619 - DNA, 25 bp, Homo sapien
ccccagcatcaccataatttcagaa

SEQ ID NO: 3210620 - DNA, 25 bp, Homo sapien
caaaggtagattgctctgaatttaa

SEQ ID NO: 3210621 - DNA, 25 bp, Homo sapien
taaataaaactctgcttctagccct

SEQ ID NO: 3210622 - DNA, 25 bp, Homo sapien
taagaaaagttccacattgaagtgt

SEQ ID NO: 3210623 - DNA, 25 bp, Homo sapien
tctagccctataacatatgattcaa

SEQ ID NO: 3210624 - DNA, 25 bp, Homo sapien
tgcttgacgtttaaagtaaatcact

SEQ ID NO: 3210625 - DNA, 25 bp, Homo sapien
tggcaacacaacatatgacagtttg

SEQ ID NO: 3210626 - DNA, 25 bp, Homo sapien
ttaaagatatacactgacattattg

SEQ ID NO: 3210627 - DNA, 25 bp, Homo sapien
gacattattgaattctgaagtttat

SEQ ID NO: 3210628 - DNA, 25 bp, Homo sapien
gcattctgataaatgtcgttttacc

SEQ ID NO: 3210629 - DNA, 25 bp, Homo sapien
agcattctgataaatgtcgttttac

SEQ ID NO: 3210630 - DNA, 25 bp, Homo sapien
ctgacatttagaactggtacttctc

SEQ ID NO: 3210631 - DNA, 25 bp, Homo sapien
caaaggtcaaagtgggtatcaagca

SEQ ID NO: 3210632 - DNA, 25 bp, Homo sapien
cacccgcagaaatcaaaggaggtta

SEQ ID NO: 3210633 - DNA, 25 bp, Homo sapien
gaggagttcattacaacacccgcag

SEQ ID NO: 3210634 - DNA, 25 bp, Homo sapien
tatggtaagctaagccaagtagaca

SEQ ID NO: 3210635 - DNA, 25 bp, Homo sapien
ggtcacaaattgtgggtgagtataa

SEQ ID NO: 3210636 - DNA, 25 bp, Homo sapien
attacatcggtcacaaattgtgggt

SEQ ID NO: 3210637 - DNA, 25 bp, Homo sapien
catcggtcacaaattgtgggtgagt

SEQ ID NO: 3210638 - DNA, 25 bp, Homo sapien
tacatcggtcacaaattgtgggtga

SEQ ID NO: 3210639 - DNA, 25 bp, Homo sapien
ctaattggaggagtttagcaaacca

SEQ ID NO: 3210640 - DNA, 25 bp, Homo sapien
tttagcaaaccatgtaaaggcatcc

SEQ ID NO: 3210641 - DNA, 25 bp, Homo sapien
gcaaaccatgtaaaggcatccaaaa

SEQ ID NO: 3210642 - DNA, 25 bp, Homo sapien
ccatgtaaaggcatccaaaattcaa

SEQ ID NO: 3210643 - DNA, 25 bp, Homo sapien
tgacaactcgagctgccatcagtct

SEQ ID NO: 3210644 - DNA, 25 bp, Homo sapien
tgcagatggttcatcaattaaatag

SEQ ID NO: 3210645 - DNA, 25 bp, Homo sapien
tttgacaactcgagctgccatcagt

SEQ ID NO: 3210646 - DNA, 25 bp, Homo sapien
ttaaatagacatcagcaggtttgcc

SEQ ID NO: 3210647 - DNA, 25 bp, Homo sapien
gaaatcttatagctttctatcataa

SEQ ID NO: 3210648 - DNA, 25 bp, Homo sapien
gtaggacagtatacataatcaaaat

SEQ ID NO: 3210649 - DNA, 25 bp, Homo sapien
cattcgactgttatattaagcacac

SEQ ID NO: 3210650 - DNA, 25 bp, Homo sapien
tctatcataaaacattcgactgtta

SEQ ID NO: 3210651 - DNA, 25 bp, Homo sapien
caccatcaaaaacgatgacgcgatc

SEQ ID NO: 3210652 - DNA, 25 bp, Homo sapien
ggaacaccatcaaaaacgatgacgc

SEQ ID NO: 3210653 - DNA, 25 bp, Homo sapien
acgatgacgcgatccgctagatagg

SEQ ID NO: 3210654 - DNA, 25 bp, Homo sapien
caaaaacgatgacgcgatccgctag

SEQ ID NO: 3210655 - DNA, 25 bp, Homo sapien
ggcctacagctttttatcttcctgg

SEQ ID NO: 3210656 - DNA, 25 bp, Homo sapien
gaagcctaaacactactcttccaca

SEQ ID NO: 3210657 - DNA, 25 bp, Homo sapien
agtccccaataccaatgatctcagg

SEQ ID NO: 3210658 - DNA, 25 bp, Homo sapien
ggtgagggattccacactgaagcct

SEQ ID NO: 3210659 - DNA, 25 bp, Homo sapien
ttcgtggcctatagttgtttggatc

SEQ ID NO: 3210660 - DNA, 25 bp, Homo sapien
ttgtttattcgtggcctatagttgt

SEQ ID NO: 3210661 - DNA, 25 bp, Homo sapien
tttattcgtggcctatagttgtttg

SEQ ID NO: 3210662 - DNA, 25 bp, Homo sapien
tattcgtggcctatagttgtttgga

SEQ ID NO: 3210663 - DNA, 25 bp, Homo sapien
tatactgagatcagtaatccatgat

SEQ ID NO: 3210664 - DNA, 25 bp, Homo sapien
aaatagcctttcaagtgtttatact

SEQ ID NO: 3210665 - DNA, 25 bp, Homo sapien
gtgtttatactgagatcagtaatcc

SEQ ID NO: 3210666 - DNA, 25 bp, Homo sapien
taatccatgatttaagacaactttt

SEQ ID NO: 3210667 - DNA, 25 bp, Homo sapien
ggtgcttaagaatacaatgacgtgc

SEQ ID NO: 3210668 - DNA, 25 bp, Homo sapien
gcattaaggatgatggatacagagt

SEQ ID NO: 3210669 - DNA, 25 bp, Homo sapien
ccagacatactgttaggtgcttaag

SEQ ID NO: 3210670 - DNA, 25 bp, Homo sapien
tttagcagcaaagctaggactacaa

SEQ ID NO: 3210671 - DNA, 25 bp, Homo sapien
ttttatgtgagaacttaaccatttc

SEQ ID NO: 3210672 - DNA, 25 bp, Homo sapien
tcaattttatgtgagaacttaacca

SEQ ID NO: 3210673 - DNA, 25 bp, Homo sapien
aaactcttcaattttatgtgagaac

SEQ ID NO: 3210674 - DNA, 25 bp, Homo sapien
aactgagaaaactcttcaattttat

SEQ ID NO: 3210675 - DNA, 25 bp, Homo sapien
ttccactcttcttttgttctacatc

SEQ ID NO: 3210676 - DNA, 25 bp, Homo sapien
taatcatccaagaaaaagtagtttc

SEQ ID NO: 3210677 - DNA, 25 bp, Homo sapien
catccaagaaaaagtagtttccact

SEQ ID NO: 3210678 - DNA, 25 bp, Homo sapien
tagtttccactcttcttttgttcta

SEQ ID NO: 3210679 - DNA, 25 bp, Homo sapien
ccttttaataaatggcttatcaata

SEQ ID NO: 3210680 - DNA, 25 bp, Homo sapien
ctccttttaataaatggcttatcaa

SEQ ID NO: 3210681 - DNA, 25 bp, Homo sapien
aaatggcttatcaatattctcagag

SEQ ID NO: 3210682 - DNA, 25 bp, Homo sapien
aataaatggcttatcaatattctca

SEQ ID NO: 3210683 - DNA, 25 bp, Homo sapien
tcagcatttggtaccgtgaatataa

SEQ ID NO: 3210684 - DNA, 25 bp, Homo sapien
aaaaatggagcaacactggtcagca

SEQ ID NO: 3210685 - DNA, 25 bp, Homo sapien
ctacaatttagaacccaactggctt

SEQ ID NO: 3210686 - DNA, 25 bp, Homo sapien
tatcaaatgtcaatcagtggaatct

SEQ ID NO: 3210687 - DNA, 25 bp, Homo sapien
caaatgaatatatgtggtaccaggg

SEQ ID NO: 3210688 - DNA, 25 bp, Homo sapien
gcataatagggtccagttaaaccat

SEQ ID NO: 3210689 - DNA, 25 bp, Homo sapien
tcttcctcggaaaccatatactggt

SEQ ID NO: 3210690 - DNA, 25 bp, Homo sapien
tcgagtctgtagttctaagggaagc

SEQ ID NO: 3210691 - DNA, 25 bp, Homo sapien
aggtaagtgcacagaaaaaagcatg

SEQ ID NO: 3210692 - DNA, 25 bp, Homo sapien
tattcacacttaggtaagtgcacag

SEQ ID NO: 3210693 - DNA, 25 bp, Homo sapien
aaaccctttacatattcacacttag

SEQ ID NO: 3210694 - DNA, 25 bp, Homo sapien
cattcacaaatttaacctatcctta

SEQ ID NO: 3210695 - DNA, 25 bp, Homo sapien
gaaaatacgtttaatacatattctg

SEQ ID NO: 3210696 - DNA, 25 bp, Homo sapien
tcattagcagtaagtagaactgtgc

SEQ ID NO: 3210697 - DNA, 25 bp, Homo sapien
gtgttagcaattgtaggcctttctg

SEQ ID NO: 3210698 - DNA, 25 bp, Homo sapien
caattaggacatatgaagtagtctc

SEQ ID NO: 3210699 - DNA, 25 bp, Homo sapien
taatgctgggaagcggcaactttgg

SEQ ID NO: 3210700 - DNA, 25 bp, Homo sapien
caaggtccactctagtgtagctgaa

SEQ ID NO: 3210701 - DNA, 25 bp, Homo sapien
taaatgccctacatggtgtgatgct

SEQ ID NO: 3210702 - DNA, 25 bp, Homo sapien
cgataatagccttacactgagtaca

SEQ ID NO: 3210703 - DNA, 25 bp, Homo sapien
cccagaccacaatgctgatatatct

SEQ ID NO: 3210704 - DNA, 25 bp, Homo sapien
cttgcagcgtgttgtttcctttgtg

SEQ ID NO: 3210705 - DNA, 25 bp, Homo sapien
tttgtgactcaaggttgaattaaaa

SEQ ID NO: 3210706 - DNA, 25 bp, Homo sapien
ggcagacctaagctcagaccctgcc

SEQ ID NO: 3210707 - DNA, 25 bp, Homo sapien
ggtgctttggctgaacttgattcca

SEQ ID NO: 3210708 - DNA, 25 bp, Homo sapien
tggtgttgtgtatgtctcttcattt

SEQ ID NO: 3210709 - DNA, 25 bp, Homo sapien
gtgttaggtgctttggctgaacttg

SEQ ID NO: 3210710 - DNA, 25 bp, Homo sapien
tttggctgaacttgattccagcccc

SEQ ID NO: 3210711 - DNA, 25 bp, Homo sapien
ttctttataagagaatagaggcaaa

SEQ ID NO: 3210712 - DNA, 25 bp, Homo sapien
tattttgaagaacagactgaccaaa

SEQ ID NO: 3210713 - DNA, 25 bp, Homo sapien
gaagaacagactgaccaaagctcac

SEQ ID NO: 3210714 - DNA, 25 bp, Homo sapien
gaaacttcaccatattatgatcata

SEQ ID NO: 3210715 - DNA, 25 bp, Homo sapien
ttagcagatggtacttttctcagtg

SEQ ID NO: 3210716 - DNA, 25 bp, Homo sapien
taacctatgggaatgtttggatgcc

SEQ ID NO: 3210717 - DNA, 25 bp, Homo sapien
tgggctagtgaatcgccactgtact

SEQ ID NO: 3210718 - DNA, 25 bp, Homo sapien
aatgagaagatagagggtcctccac

SEQ ID NO: 3210719 - DNA, 25 bp, Homo sapien
catcggtggctcagttaaggaatga

SEQ ID NO: 3210720 - DNA, 25 bp, Homo sapien
gatcaagtgactgtccccgtaaaaa

SEQ ID NO: 3210721 - DNA, 25 bp, Homo sapien
tagattccaaacataacgttgcacc

SEQ ID NO: 3210722 - DNA, 25 bp, Homo sapien
ggctgtttccaccaagaattcttag

SEQ ID NO: 3210723 - DNA, 25 bp, Homo sapien
tatcatggtgcctactcgaaagaaa

SEQ ID NO: 3210724 - DNA, 25 bp, Homo sapien
tatgggtacccttttcagggattca

SEQ ID NO: 3210725 - DNA, 25 bp, Homo sapien
gaatattgtcctgccctctgatgaa

SEQ ID NO: 3210726 - DNA, 25 bp, Homo sapien
cagtagatgagtttccagaagccag

SEQ ID NO: 3210727 - DNA, 25 bp, Homo sapien
ctgtctctggaaaatctggatctgt

SEQ ID NO: 3210728 - DNA, 25 bp, Homo sapien
tagatccccattataaccagcagca

SEQ ID NO: 3210729 - DNA, 25 bp, Homo sapien
catctttgtttcagttgccgctggg

SEQ ID NO: 3210730 - DNA, 25 bp, Homo sapien
ttttagcaactaacagcgtttggca

SEQ ID NO: 3210731 - DNA, 25 bp, Homo sapien
ttgactagatcgtaatatgggaact

SEQ ID NO: 3210732 - DNA, 25 bp, Homo sapien
ggagagcgcggaccgctgcctcggg

SEQ ID NO: 3210733 - DNA, 25 bp, Homo sapien
ttaggcagggcttccctatgcgccc

SEQ ID NO: 3210734 - DNA, 25 bp, Homo sapien
agggcttccctatgcgcccggagag

SEQ ID NO: 3210735 - DNA, 25 bp, Homo sapien
cattaggcagggcttccctatgcgc

SEQ ID NO: 3210736 - DNA, 25 bp, Homo sapien
tatggacagagtgtgtcgtcccgca

SEQ ID NO: 3210737 - DNA, 25 bp, Homo sapien
gaaatacacaaagggccgacactgc

SEQ ID NO: 3210738 - DNA, 25 bp, Homo sapien
taatagcaatcagcagtccacggtt

SEQ ID NO: 3210739 - DNA, 25 bp, Homo sapien
gccgttaaagccacctccatggaaa

SEQ ID NO: 3210740 - DNA, 25 bp, Homo sapien
ctggtacaaccacggatactaaact

SEQ ID NO: 3210741 - DNA, 25 bp, Homo sapien
tagtgattattttcacgaattgtca

SEQ ID NO: 3210742 - DNA, 25 bp, Homo sapien
ccacggatactaaactagtgattat

SEQ ID NO: 3210743 - DNA, 25 bp, Homo sapien
attttcacgaattgtcaaaatgcat

SEQ ID NO: 3210744 - DNA, 25 bp, Homo sapien
ctccttcaatgacagggtatcccat

SEQ ID NO: 3210745 - DNA, 25 bp, Homo sapien
tgtgaatattcgaggtaagcaactg

SEQ ID NO: 3210746 - DNA, 25 bp, Homo sapien
gaggaagtacctctctgtatgtgaa

SEQ ID NO: 3210747 - DNA, 25 bp, Homo sapien
gtggccatctctctgcgggaagaaa

SEQ ID NO: 3210748 - DNA, 25 bp, Homo sapien
cagctagagtctgtagtggccatct

SEQ ID NO: 3210749 - DNA, 25 bp, Homo sapien
tcttcatcgtgaaagtattgacatc

SEQ ID NO: 3210750 - DNA, 25 bp, Homo sapien
ctatttctcttcatcgtgaaagtat

SEQ ID NO: 3210751 - DNA, 25 bp, Homo sapien
cgtgaaagtattgacatctgttggc

SEQ ID NO: 3210752 - DNA, 25 bp, Homo sapien
ttgacatctgttggcagagccaggt

SEQ ID NO: 3210753 - DNA, 25 bp, Homo sapien
tttgaagcagatcatgaaggaatcg

SEQ ID NO: 3210754 - DNA, 25 bp, Homo sapien
ttttgaagcagatcatgaaggaatc

SEQ ID NO: 3210755 - DNA, 25 bp, Homo sapien
gctttcaagaataaggccctctcct

SEQ ID NO: 3210756 - DNA, 25 bp, Homo sapien
cagcacaatatctttaaaggctagc

SEQ ID NO: 3210757 - DNA, 25 bp, Homo sapien
gcataggttttcagaagcagcacaa

SEQ ID NO: 3210758 - DNA, 25 bp, Homo sapien
taaaggctagctttttcaccaagtc

SEQ ID NO: 3210759 - DNA, 25 bp, Homo sapien
tttgctttaaatctatcagtccaca

SEQ ID NO: 3210760 - DNA, 25 bp, Homo sapien
catgtccctgaagcctgggacattg

SEQ ID NO: 3210761 - DNA, 25 bp, Homo sapien
tatcagtccacatgccatgtccctg

SEQ ID NO: 3210762 - DNA, 25 bp, Homo sapien
tgaagcctgggacattgatggtcat

SEQ ID NO: 3210763 - DNA, 25 bp, Homo sapien
caataacaaatcttcttctgatata

SEQ ID NO: 3210764 - DNA, 25 bp, Homo sapien
taagtgtctttcaacctatagaaat

SEQ ID NO: 3210765 - DNA, 25 bp, Homo sapien
tgttatacaccaggcagatagtttc

SEQ ID NO: 3210766 - DNA, 25 bp, Homo sapien
ttatttccctaaaagctcacaagct

SEQ ID NO: 3210767 - DNA, 25 bp, Homo sapien
gtgacattcccggatttcgctttaa

SEQ ID NO: 3210768 - DNA, 25 bp, Homo sapien
gctgttggtgacattcccggatttc

SEQ ID NO: 3210769 - DNA, 25 bp, Homo sapien
tgacattcccggatttcgctttaag

SEQ ID NO: 3210770 - DNA, 25 bp, Homo sapien
gttggtgacattcccggatttcgct

SEQ ID NO: 3210771 - DNA, 25 bp, Homo sapien
attaggcccaccagagcccttgagg

SEQ ID NO: 3210772 - DNA, 25 bp, Homo sapien
gaaaagactcgctgaccagaagaaa

SEQ ID NO: 3210773 - DNA, 25 bp, Homo sapien
gattcacctcagtgttcaagccacg

SEQ ID NO: 3210774 - DNA, 25 bp, Homo sapien
gaagaaagaaggtgactacccggca

SEQ ID NO: 3210775 - DNA, 25 bp, Homo sapien
ttgcactgaataccgatccctaggg

SEQ ID NO: 3210776 - DNA, 25 bp, Homo sapien
cactgaataccgatccctagggtca

SEQ ID NO: 3210777 - DNA, 25 bp, Homo sapien
gatccctagggtcatgatcttcttc

SEQ ID NO: 3210778 - DNA, 25 bp, Homo sapien
gaataccgatccctagggtcatgat

SEQ ID NO: 3210779 - DNA, 25 bp, Homo sapien
aatagggactatcctggcagttgtc

SEQ ID NO: 3210780 - DNA, 25 bp, Homo sapien
cagagtttaactgtgggtttctctc

SEQ ID NO: 3210781 - DNA, 25 bp, Homo sapien
tccaactttagagttgggttactca

SEQ ID NO: 3210782 - DNA, 25 bp, Homo sapien
tcccataatagggactatcctggca

SEQ ID NO: 3210783 - DNA, 25 bp, Homo sapien
tatagtggtattctaatgtcctcag

SEQ ID NO: 3210784 - DNA, 25 bp, Homo sapien
cttttgatatagtggtattctaatg

SEQ ID NO: 3210785 - DNA, 25 bp, Homo sapien
gggcagtttgttcccagcgtccaag

SEQ ID NO: 3210786 - DNA, 25 bp, Homo sapien
actgcgtggctgcccttagctgaga

SEQ ID NO: 3210787 - DNA, 25 bp, Homo sapien
agttggctaactccccactgcgtgg

SEQ ID NO: 3210788 - DNA, 25 bp, Homo sapien
caactgcctcttgttccattgagct

SEQ ID NO: 3210789 - DNA, 25 bp, Homo sapien
aaaagcagatcgtgaaccgcacagg

SEQ ID NO: 3210790 - DNA, 25 bp, Homo sapien
tccagaaaagcagatcgtgaaccgc

SEQ ID NO: 3210791 - DNA, 25 bp, Homo sapien
atgcggacgtctcggctccggagga

SEQ ID NO: 3210792 - DNA, 25 bp, Homo sapien
gctgccgccggatgcggacgtctcg

SEQ ID NO: 3210793 - DNA, 25 bp, Homo sapien
aggctttgattggatggccttcttc

SEQ ID NO: 3210794 - DNA, 25 bp, Homo sapien
gtaggctttgattggatggccttct

SEQ ID NO: 3210795 - DNA, 25 bp, Homo sapien
taggctttgattggatggccttctt

SEQ ID NO: 3210796 - DNA, 25 bp, Homo sapien
actgagtatgttcgttcacagtaca

SEQ ID NO: 3210797 - DNA, 25 bp, Homo sapien
ttcacagtacaagcaacgacgttat

SEQ ID NO: 3210798 - DNA, 25 bp, Homo sapien
gacactgagtatgttcgttcacagt

SEQ ID NO: 3210799 - DNA, 25 bp, Homo sapien
gagtatgttcgttcacagtacaagc

SEQ ID NO: 3210800 - DNA, 25 bp, Homo sapien
aatgttcccccccagactgagatag

SEQ ID NO: 3210801 - DNA, 25 bp, Homo sapien
tgaggagcccacatgcaggttattt

SEQ ID NO: 3210802 - DNA, 25 bp, Homo sapien
atttcacctcttgagaatgttcccc

SEQ ID NO: 3210803 - DNA, 25 bp, Homo sapien
aactcaataactgaggagcccacat

SEQ ID NO: 3210804 - DNA, 25 bp, Homo sapien
taaactcgccagtgcatattccctc

SEQ ID NO: 3210805 - DNA, 25 bp, Homo sapien
ttccctctgaaggatcatgactatg

SEQ ID NO: 3210806 - DNA, 25 bp, Homo sapien
ttccactactttttgcagctgccgt

SEQ ID NO: 3210807 - DNA, 25 bp, Homo sapien
cagctgccgtactttgggaccatca

SEQ ID NO: 3210808 - DNA, 25 bp, Homo sapien
ttccagcagacctcttagagatgcc

SEQ ID NO: 3210809 - DNA, 25 bp, Homo sapien
ctgctgtaggagagcaaaagggttc

SEQ ID NO: 3210810 - DNA, 25 bp, Homo sapien
gagagcaaaagggttctcaggttaa

SEQ ID NO: 3210811 - DNA, 25 bp, Homo sapien
ccttttacttccagcagacctctta

SEQ ID NO: 3210812 - DNA, 25 bp, Homo sapien
cttcctttacctggagatccaccca

SEQ ID NO: 3210813 - DNA, 25 bp, Homo sapien
ttggccagctcaaacaaccttaggt

SEQ ID NO: 3210814 - DNA, 25 bp, Homo sapien
gtccttggccagctcaaacaacctt

SEQ ID NO: 3210815 - DNA, 25 bp, Homo sapien
ccttggccagctcaaacaaccttag

SEQ ID NO: 3210816 - DNA, 25 bp, Homo sapien
ggccagctcaaacaaccttaggtgc

SEQ ID NO: 3210817 - DNA, 25 bp, Homo sapien
gaaagatcatgtgtttgacaactct

SEQ ID NO: 3210818 - DNA, 25 bp, Homo sapien
caggaaagatcatgtgtttgacaac

SEQ ID NO: 3210819 - DNA, 25 bp, Homo sapien
caacaggaaagatcatgtgtttgac

SEQ ID NO: 3210820 - DNA, 25 bp, Homo sapien
agatcatgtgtttgacaactctata

SEQ ID NO: 3210821 - DNA, 25 bp, Homo sapien
tggaattcttggtggcaagttcggc

SEQ ID NO: 3210822 - DNA, 25 bp, Homo sapien
tggtggcaagttcggctatgatgac

SEQ ID NO: 3210823 - DNA, 25 bp, Homo sapien
tcttggtggcaagttcggctatgat

SEQ ID NO: 3210824 - DNA, 25 bp, Homo sapien
aattcttggtggcaagttcggctat

SEQ ID NO: 3210825 - DNA, 25 bp, Homo sapien
ctttgatgcaccttttggttttggc

SEQ ID NO: 3210826 - DNA, 25 bp, Homo sapien
tttgatgcaccttttggttttggct

SEQ ID NO: 3210827 - DNA, 25 bp, Homo sapien
gcatcatttgcagcccaagtaatac

SEQ ID NO: 3210828 - DNA, 25 bp, Homo sapien
tagcaagtagtgaacgctctggccc

SEQ ID NO: 3210829 - DNA, 25 bp, Homo sapien
caaattaggaacaccaaagcactcc

SEQ ID NO: 3210830 - DNA, 25 bp, Homo sapien
taatacataagagcccatagtcagc

SEQ ID NO: 3210831 - DNA, 25 bp, Homo sapien
accagtgaggtcctgaggtcagcag

SEQ ID NO: 3210832 - DNA, 25 bp, Homo sapien
tcagcagagtcacagctgagcaggc

SEQ ID NO: 3210833 - DNA, 25 bp, Homo sapien
cttgaccagtgaggtcctgaggtca

SEQ ID NO: 3210834 - DNA, 25 bp, Homo sapien
acagctgagcaggccacgggtactt

SEQ ID NO: 3210835 - DNA, 25 bp, Homo sapien
gctccatagataatgtaacgatagg

SEQ ID NO: 3210836 - DNA, 25 bp, Homo sapien
gtaacgataggatcatttcaccatt

SEQ ID NO: 3210837 - DNA, 25 bp, Homo sapien
tctgtacaaagttgttgctccatag

SEQ ID NO: 3210838 - DNA, 25 bp, Homo sapien
aagtctcctgcaagggtccctacat

SEQ ID NO: 3210839 - DNA, 25 bp, Homo sapien
aatgttcattaacgcttccaccgcg

SEQ ID NO: 3210840 - DNA, 25 bp, Homo sapien
caagtgaatttcgatgttccatatg

SEQ ID NO: 3210841 - DNA, 25 bp, Homo sapien
tagtccattatctgcaagtgaattt

SEQ ID NO: 3210842 - DNA, 25 bp, Homo sapien
cccggtggagcggacttagtccatt

SEQ ID NO: 3210843 - DNA, 25 bp, Homo sapien
cgccgctgccgcgcgaccagggatc

SEQ ID NO: 3210844 - DNA, 25 bp, Homo sapien
ccgctgccgcgcgaccagggatcct

SEQ ID NO: 3210845 - DNA, 25 bp, Homo sapien
gccgctgccgcgcgaccagggatcc

SEQ ID NO: 3210846 - DNA, 25 bp, Homo sapien
gggttgagccgctcggcctctcctt

SEQ ID NO: 3210847 - DNA, 25 bp, Homo sapien
ctggagcctggattgatctggtcgc

SEQ ID NO: 3210848 - DNA, 25 bp, Homo sapien
gcgctggcgtcagggagtcggagct

SEQ ID NO: 3210849 - DNA, 25 bp, Homo sapien
cgcccgtccgtgtgggagcacgagt

SEQ ID NO: 3210850 - DNA, 25 bp, Homo sapien
tgacctcgaccccaaagaggcttgc

SEQ ID NO: 3210851 - DNA, 25 bp, Homo sapien
tccaccaggcgccttggagagcagc

SEQ ID NO: 3210852 - DNA, 25 bp, Homo sapien
agcgccagcggtcgtcctccagctc

SEQ ID NO: 3210853 - DNA, 25 bp, Homo sapien
aagaaaacccgtgcgggatgtggag

SEQ ID NO: 3210854 - DNA, 25 bp, Homo sapien
tagaggggatctcggtgcgaacttt

SEQ ID NO: 3210855 - DNA, 25 bp, Homo sapien
gcgccgccgccaaacctttgaataa

SEQ ID NO: 3210856 - DNA, 25 bp, Homo sapien
aattagaggggatctcggtgcgaac

SEQ ID NO: 3210857 - DNA, 25 bp, Homo sapien
taaattagaggggatctcggtgcga

SEQ ID NO: 3210858 - DNA, 25 bp, Homo sapien
gaggcaatcgactccggtaaaggga

SEQ ID NO: 3210859 - DNA, 25 bp, Homo sapien
agggaaaggaacgagacaccaggag

SEQ ID NO: 3210860 - DNA, 25 bp, Homo sapien
gaatacacatgcagtgaggcaatcg

SEQ ID NO: 3210861 - DNA, 25 bp, Homo sapien
caccaggagacgcagcgggtgtagg

SEQ ID NO: 3210862 - DNA, 25 bp, Homo sapien
gaacagttgttcaaccgcgaactca

SEQ ID NO: 3210863 - DNA, 25 bp, Homo sapien
aacagttgttcaaccgcgaactcac

SEQ ID NO: 3210864 - DNA, 25 bp, Homo sapien
aggaacagttgttcaaccgcgaact

SEQ ID NO: 3210865 - DNA, 25 bp, Homo sapien
taaaggaacagttgttcaaccgcga

SEQ ID NO: 3210866 - DNA, 25 bp, Homo sapien
tcagctactgtagctgtgagatctg

SEQ ID NO: 3210867 - DNA, 25 bp, Homo sapien
ttcagaaggaacgcgcctttactgg

SEQ ID NO: 3210868 - DNA, 25 bp, Homo sapien
tggttctgagaccggcctcaatttt

SEQ ID NO: 3210869 - DNA, 25 bp, Homo sapien
ggttatcttgcaccgtgtatttaaa

SEQ ID NO: 3210870 - DNA, 25 bp, Homo sapien
aacgcgcctttactggttatcttgc

SEQ ID NO: 3210871 - DNA, 25 bp, Homo sapien
cgtttaaagcgcagacactgacagc

SEQ ID NO: 3210872 - DNA, 25 bp, Homo sapien
cacaagaaagccatacggagaccca

SEQ ID NO: 3210873 - DNA, 25 bp, Homo sapien
gatgcaatttggtccctcaacagtg

SEQ ID NO: 3210874 - DNA, 25 bp, Homo sapien
taagtgacatgccagcaagagatgc

SEQ ID NO: 3210875 - DNA, 25 bp, Homo sapien
cgtcaactctatttgggaggccaca

SEQ ID NO: 3210876 - DNA, 25 bp, Homo sapien
tggctaagtttgcatcaaaataact

SEQ ID NO: 3210877 - DNA, 25 bp, Homo sapien
gaaagccaaatacggagcgtcaact

SEQ ID NO: 3210878 - DNA, 25 bp, Homo sapien
cacttggtcagagtgtacctattga

SEQ ID NO: 3210879 - DNA, 25 bp, Homo sapien
tagttatactccttggatatggtga

SEQ ID NO: 3210880 - DNA, 25 bp, Homo sapien
aatgacagcactagttatactcctt

SEQ ID NO: 3210881 - DNA, 25 bp, Homo sapien
tagaaattaccattcctagtgttta

SEQ ID NO: 3210882 - DNA, 25 bp, Homo sapien
cttcttagtttgaagtccagaagag

SEQ ID NO: 3210883 - DNA, 25 bp, Homo sapien
cagtggttttagttcatggtggctc

SEQ ID NO: 3210884 - DNA, 25 bp, Homo sapien
cacagttactcggttgccctgggca

SEQ ID NO: 3210885 - DNA, 25 bp, Homo sapien
tagggattgatgcagacctccttct

SEQ ID NO: 3210886 - DNA, 25 bp, Homo sapien
cacacggcagtaaatgacatgaggc

SEQ ID NO: 3210887 - DNA, 25 bp, Homo sapien
aattggtcccaatcgacaatgagac

SEQ ID NO: 3210888 - DNA, 25 bp, Homo sapien
gattaccaggctatcccaggatcag

SEQ ID NO: 3210889 - DNA, 25 bp, Homo sapien
taatatacagccttagtaacccagg

SEQ ID NO: 3210890 - DNA, 25 bp, Homo sapien
tatgccacagcaaaattccgccaga

SEQ ID NO: 3210891 - DNA, 25 bp, Homo sapien
ttgctatgggaaatgagacctaacc

SEQ ID NO: 3210892 - DNA, 25 bp, Homo sapien
caaacgataaataagagtgggctag

SEQ ID NO: 3210893 - DNA, 25 bp, Homo sapien
tatttactatcttgcagagaagacc

SEQ ID NO: 3210894 - DNA, 25 bp, Homo sapien
tgaccatgtgctagacacaaacgat

SEQ ID NO: 3210895 - DNA, 25 bp, Homo sapien
ggtggattttaaatgtactcaccaa

SEQ ID NO: 3210896 - DNA, 25 bp, Homo sapien
gggtggattttaaatgtactcacca

SEQ ID NO: 3210897 - DNA, 25 bp, Homo sapien
tgttgcttaggctaggggtggattt

SEQ ID NO: 3210898 - DNA, 25 bp, Homo sapien
tgcttaggctaggggtggattttaa

SEQ ID NO: 3210899 - DNA, 25 bp, Homo sapien
gacacgaattacacagtgactgagg

SEQ ID NO: 3210900 - DNA, 25 bp, Homo sapien
gtcaccccaaggatctctcactttg

SEQ ID NO: 3210901 - DNA, 25 bp, Homo sapien
catgcagttttaaggataacagaga

SEQ ID NO: 3210902 - DNA, 25 bp, Homo sapien
atgcattcagtcaacaggtgaagag

SEQ ID NO: 3210903 - DNA, 25 bp, Homo sapien
ctttaaatgaatctgaaagatctga

SEQ ID NO: 3210904 - DNA, 25 bp, Homo sapien
tttctgctctatgaaccagcaatgg

SEQ ID NO: 3210905 - DNA, 25 bp, Homo sapien
aaaatatcttctcttgcccacctaa

SEQ ID NO: 3210906 - DNA, 25 bp, Homo sapien
tatgaaccagcaatggagggtggaa

SEQ ID NO: 3210907 - DNA, 25 bp, Homo sapien
ctagttacatagttttatgtggagc

SEQ ID NO: 3210908 - DNA, 25 bp, Homo sapien
gagtattatggtcaggcttcagtgc

SEQ ID NO: 3210909 - DNA, 25 bp, Homo sapien
tatgtggagcagacctgcaattgag

SEQ ID NO: 3210910 - DNA, 25 bp, Homo sapien
gcagacctgcaattgagtattatgg

SEQ ID NO: 3210911 - DNA, 25 bp, Homo sapien
cttttcttttagctgctgtgacttg

SEQ ID NO: 3210912 - DNA, 25 bp, Homo sapien
attcccttttcttttagctgctgtg

SEQ ID NO: 3210913 - DNA, 25 bp, Homo sapien
ttgcaatgacaaacattcccttttc

SEQ ID NO: 3210914 - DNA, 25 bp, Homo sapien
tagctgctgtgacttgaattaccat

SEQ ID NO: 3210915 - DNA, 25 bp, Homo sapien
taaaggtctttgcaatccctccagc

SEQ ID NO: 3210916 - DNA, 25 bp, Homo sapien
taacagtcagttacagagccctagc

SEQ ID NO: 3210917 - DNA, 25 bp, Homo sapien
caaaggcggcccaataggtaggcac

SEQ ID NO: 3210918 - DNA, 25 bp, Homo sapien
tgaaaactcaaggtacaaaggcggc

SEQ ID NO: 3210919 - DNA, 25 bp, Homo sapien
actgctattgggagagtgaggaaac

SEQ ID NO: 3210920 - DNA, 25 bp, Homo sapien
catgtgaggctcattttgtcctaag

SEQ ID NO: 3210921 - DNA, 25 bp, Homo sapien
tatattcgctgtgtcttggaaccag

SEQ ID NO: 3210922 - DNA, 25 bp, Homo sapien
aagttacggaactgagctaagaggc

SEQ ID NO: 3210923 - DNA, 25 bp, Homo sapien
tatgactacagaacatcactgaaca

SEQ ID NO: 3210924 - DNA, 25 bp, Homo sapien
ttccgtgacactgtgataacactgt

SEQ ID NO: 3210925 - DNA, 25 bp, Homo sapien
tgtcatataccagggctgaaaacct

SEQ ID NO: 3210926 - DNA, 25 bp, Homo sapien
aggttgacccagcttttccgtgaca

SEQ ID NO: 3210927 - DNA, 25 bp, Homo sapien
gttgtatcctaaaagtgcgagagca

SEQ ID NO: 3210928 - DNA, 25 bp, Homo sapien
taagttgaacaagcagatggtttcc

SEQ ID NO: 3210929 - DNA, 25 bp, Homo sapien
gactatgaggtctcctttcaccaaa

SEQ ID NO: 3210930 - DNA, 25 bp, Homo sapien
tcaatttttgaaggcctagcactga

SEQ ID NO: 3210931 - DNA, 25 bp, Homo sapien
aggcaggtaagcaggtgggggcgta

SEQ ID NO: 3210932 - DNA, 25 bp, Homo sapien
aggtaagcaggtgggggcgtatcag

SEQ ID NO: 3210933 - DNA, 25 bp, Homo sapien
caggtaagcaggtgggggcgtatca

SEQ ID NO: 3210934 - DNA, 25 bp, Homo sapien
ggcaggtaagcaggtgggggcgtat

SEQ ID NO: 3210935 - DNA, 25 bp, Homo sapien
tgtgtccatcggctgagagccatcc

SEQ ID NO: 3210936 - DNA, 25 bp, Homo sapien
gtttgtgtccatcggctgagagcca

SEQ ID NO: 3210937 - DNA, 25 bp, Homo sapien
ggcgccatcatgtttgtgtccatcg

SEQ ID NO: 3210938 - DNA, 25 bp, Homo sapien
gggaggcgccatcatgtttgtgtcc

SEQ ID NO: 3210939 - DNA, 25 bp, Homo sapien
gaaaccgtgttgttgaattggctca

SEQ ID NO: 3210940 - DNA, 25 bp, Homo sapien
ttacccaactttactgacaggatgc

SEQ ID NO: 3210941 - DNA, 25 bp, Homo sapien
tcaaccaaggttagtgcctcaggct

SEQ ID NO: 3210942 - DNA, 25 bp, Homo sapien
aagaaagtccacatcagaagcccag

SEQ ID NO: 3210943 - DNA, 25 bp, Homo sapien
aacgcttcacccacacgattgttga

SEQ ID NO: 3210944 - DNA, 25 bp, Homo sapien
tgttggaaggatcagtgaaaccatc

SEQ ID NO: 3210945 - DNA, 25 bp, Homo sapien
gccgcctggtgttttcaatagtgga

SEQ ID NO: 3210946 - DNA, 25 bp, Homo sapien
gcagcccaaggcagaaacggttctt

SEQ ID NO: 3210947 - DNA, 25 bp, Homo sapien
cctcaggattagattcggatttgca

SEQ ID NO: 3210948 - DNA, 25 bp, Homo sapien
cattctcagctggaatcctgcgtag

SEQ ID NO: 3210949 - DNA, 25 bp, Homo sapien
tatggccttctcagggtatgacatc

SEQ ID NO: 3210950 - DNA, 25 bp, Homo sapien
tgacatctggaggtatatgataccc

SEQ ID NO: 3210951 - DNA, 25 bp, Homo sapien
atactggcatggatgaagggagaaa

SEQ ID NO: 3210952 - DNA, 25 bp, Homo sapien
ttaaggaacacagactgcctattta

SEQ ID NO: 3210953 - DNA, 25 bp, Homo sapien
catgtaattctcacatattgcaggt

SEQ ID NO: 3210954 - DNA, 25 bp, Homo sapien
caaattcaagtgataactttgcctc

SEQ ID NO: 3210955 - DNA, 25 bp, Homo sapien
tactgtcactaaggcattcggcata

SEQ ID NO: 3210956 - DNA, 25 bp, Homo sapien
ttttcagactacacccactagggat

SEQ ID NO: 3210957 - DNA, 25 bp, Homo sapien
catgatggtagttgcagttccgact

SEQ ID NO: 3210958 - DNA, 25 bp, Homo sapien
aaatccatggttcacagactgtgcc

SEQ ID NO: 3210959 - DNA, 25 bp, Homo sapien
caggtttaacaacaagtttggtgag

SEQ ID NO: 3210960 - DNA, 25 bp, Homo sapien
tttcgcaggcaatttcaagggatgg

SEQ ID NO: 3210961 - DNA, 25 bp, Homo sapien
tattattgacacctagccattgcca

SEQ ID NO: 3210962 - DNA, 25 bp, Homo sapien
caaacgcacgcataatttcgcaggc

SEQ ID NO: 3210963 - DNA, 25 bp, Homo sapien
tcaatctctgagcaaaacgggcagg

SEQ ID NO: 3210964 - DNA, 25 bp, Homo sapien
aacatcctggcggtggtattctgct

SEQ ID NO: 3210965 - DNA, 25 bp, Homo sapien
gctagtaacatcctggcggtggtat

SEQ ID NO: 3210966 - DNA, 25 bp, Homo sapien
cgtgcagatgtatctcaatccagca

SEQ ID NO: 3210967 - DNA, 25 bp, Homo sapien
gaggtgaacccatttgagtaagaac

SEQ ID NO: 3210968 - DNA, 25 bp, Homo sapien
tgaaaagaagactcaacatgggctc

SEQ ID NO: 3210969 - DNA, 25 bp, Homo sapien
tccaacagttggtcacagaggtcaa

SEQ ID NO: 3210970 - DNA, 25 bp, Homo sapien
gcctagcattattctgacagcaagt

SEQ ID NO: 3210971 - DNA, 25 bp, Homo sapien
tctgcccaacgatgaccttaaagtg

SEQ ID NO: 3210972 - DNA, 25 bp, Homo sapien
ggctgtgaagcctcctcgaagatca

SEQ ID NO: 3210973 - DNA, 25 bp, Homo sapien
ctccactagttttcctctgtgtttg

SEQ ID NO: 3210974 - DNA, 25 bp, Homo sapien
gggctgtgaagcctcctcgaagatc

SEQ ID NO: 3210975 - DNA, 25 bp, Homo sapien
cctgggctgtgaagcctcctcgaag

SEQ ID NO: 3210976 - DNA, 25 bp, Homo sapien
catcaacttgactgctgtgtaaggg

SEQ ID NO: 3210977 - DNA, 25 bp, Homo sapien
cagtcagtgcaaatggagcatcaac

SEQ ID NO: 3210978 - DNA, 25 bp, Homo sapien
ggaccattttgccagtgaccccaat

SEQ ID NO: 3210979 - DNA, 25 bp, Homo sapien
gcccacttcacccacagtcagtgca

SEQ ID NO: 3210980 - DNA, 25 bp, Homo sapien
attttgcacttttactcattcggta

SEQ ID NO: 3210981 - DNA, 25 bp, Homo sapien
gatagttctgtacttattttgcact

SEQ ID NO: 3210982 - DNA, 25 bp, Homo sapien
gaaagcatttggctgtagaatccct

SEQ ID NO: 3210983 - DNA, 25 bp, Homo sapien
tactcattcggtatgttaaaaagaa

SEQ ID NO: 3210984 - DNA, 25 bp, Homo sapien
agaagccaaaaagaaatgtaatgta

SEQ ID NO: 3210985 - DNA, 25 bp, Homo sapien
ctgcagagacagaagccaaaaagaa

SEQ ID NO: 3210986 - DNA, 25 bp, Homo sapien
agccaaaaagaaatgtaatgtaggg

SEQ ID NO: 3210987 - DNA, 25 bp, Homo sapien
gcagagacagaagccaaaaagaaat

SEQ ID NO: 3210988 - DNA, 25 bp, Homo sapien
ggagcaggactgcattcatcatcaa

SEQ ID NO: 3210989 - DNA, 25 bp, Homo sapien
tttttcaagtggcatatctcaatgg

SEQ ID NO: 3210990 - DNA, 25 bp, Homo sapien
cattttaaatatcgtgtctgtcaga

SEQ ID NO: 3210991 - DNA, 25 bp, Homo sapien
cagatggaatcaaagtggagcagga

SEQ ID NO: 3210992 - DNA, 25 bp, Homo sapien
aaacactcaccataaccattaattg

SEQ ID NO: 3210993 - DNA, 25 bp, Homo sapien
acactcaccataaccattaattggc

SEQ ID NO: 3210994 - DNA, 25 bp, Homo sapien
aacactcaccataaccattaattgg

SEQ ID NO: 3210995 - DNA, 25 bp, Homo sapien
cactcaccataaccattaattggct

SEQ ID NO: 3210996 - DNA, 25 bp, Homo sapien
cattgctcatctcacacagaaccaa

SEQ ID NO: 3210997 - DNA, 25 bp, Homo sapien
aaaagtctgtttgtaagctcttttg

SEQ ID NO: 3210998 - DNA, 25 bp, Homo sapien
caaaagtctgtttgtaagctctttt

SEQ ID NO: 3210999 - DNA, 25 bp, Homo sapien
ttcgcgacaccctcgagtcggacgg

SEQ ID NO: 3211000 - DNA, 25 bp, Homo sapien
cctttttaagatccacatgaaatct

SEQ ID NO: 3211001 - DNA, 25 bp, Homo sapien
aatctttcgcctccgaagttcgagg

SEQ ID NO: 3211002 - DNA, 25 bp, Homo sapien
ggacggaggccgagtcgtgtcctca

SEQ ID NO: 3211003 - DNA, 25 bp, Homo sapien
gagcgagtgagcgtgaaggtctccc

SEQ ID NO: 3211004 - DNA, 25 bp, Homo sapien
tggccgcgcagttccggcgtgtggc

SEQ ID NO: 3211005 - DNA, 25 bp, Homo sapien
cgaagccacggaagtgccacctgac

SEQ ID NO: 3211006 - DNA, 25 bp, Homo sapien
cggaagctctgcgccgggaagttct

SEQ ID NO: 3211007 - DNA, 25 bp, Homo sapien
aaagctgccttgctgtggctcagag

SEQ ID NO: 3211008 - DNA, 25 bp, Homo sapien
cactgtttacgtacagggcctttct

SEQ ID NO: 3211009 - DNA, 25 bp, Homo sapien
tccgcaccccgaacatcaatattag

SEQ ID NO: 3211010 - DNA, 25 bp, Homo sapien
ggaagagccaccttaacaaagctgc

SEQ ID NO: 3211011 - DNA, 25 bp, Homo sapien
ttggctcaatgtgattgtgacctcc

SEQ ID NO: 3211012 - DNA, 25 bp, Homo sapien
gagaaaacactggatgcgttttggc

SEQ ID NO: 3211013 - DNA, 25 bp, Homo sapien
tttggctcaatgtgattgtgacctc

SEQ ID NO: 3211014 - DNA, 25 bp, Homo sapien
agaaaacactggatgcgttttggct

SEQ ID NO: 3211015 - DNA, 25 bp, Homo sapien
gtggtaacatcggaaaggtgctctt

SEQ ID NO: 3211016 - DNA, 25 bp, Homo sapien
ctttgtacaatggagtccaagagaa

SEQ ID NO: 3211017 - DNA, 25 bp, Homo sapien
taaacggctgagcacatgggattcc

SEQ ID NO: 3211018 - DNA, 25 bp, Homo sapien
ccgagatgagtacttgagtgaaaga

SEQ ID NO: 3211019 - DNA, 25 bp, Homo sapien
tttctctttaagccatctgacagca

SEQ ID NO: 3211020 - DNA, 25 bp, Homo sapien
tctttaagccatctgacagcagcat

SEQ ID NO: 3211021 - DNA, 25 bp, Homo sapien
tctctttaagccatctgacagcagc

SEQ ID NO: 3211022 - DNA, 25 bp, Homo sapien
ctctttaagccatctgacagcagca

SEQ ID NO: 3211023 - DNA, 25 bp, Homo sapien
ctactcgaaatgctagtggttttcc

SEQ ID NO: 3211024 - DNA, 25 bp, Homo sapien
tgctgtgagttgattctacaagagt

SEQ ID NO: 3211025 - DNA, 25 bp, Homo sapien
cttgttctctgtggtaaagtaatac

SEQ ID NO: 3211026 - DNA, 25 bp, Homo sapien
ctgggctaactcctttttcctgctg

SEQ ID NO: 3211027 - DNA, 25 bp, Homo sapien
tgagaaaacacacaaaaaagactga

SEQ ID NO: 3211028 - DNA, 25 bp, Homo sapien
gagaaaacacacaaaaaagactgac

SEQ ID NO: 3211029 - DNA, 25 bp, Homo sapien
ctgagaaaacacacaaaaaagactg

SEQ ID NO: 3211030 - DNA, 25 bp, Homo sapien
tactgagaaaacacacaaaaaagac

SEQ ID NO: 3211031 - DNA, 25 bp, Homo sapien
tagcacgagggttggttcaaatcac

SEQ ID NO: 3211032 - DNA, 25 bp, Homo sapien
tgttggaggcatgatattggagcca

SEQ ID NO: 3211033 - DNA, 25 bp, Homo sapien
tcaccaccgtgggacattctcattc

SEQ ID NO: 3211034 - DNA, 25 bp, Homo sapien
tcctgctggtcaaacatatctaaat

SEQ ID NO: 3211035 - DNA, 25 bp, Homo sapien
acagataatttgtgccctctctcag

SEQ ID NO: 3211036 - DNA, 25 bp, Homo sapien
cagctagcacagataatttgtgccc

SEQ ID NO: 3211037 - DNA, 25 bp, Homo sapien
caagaagaagggtccacagctagca

SEQ ID NO: 3211038 - DNA, 25 bp, Homo sapien
caccactagtacaagaagaagggtc

SEQ ID NO: 3211039 - DNA, 25 bp, Homo sapien
tggtccttgtcacgcctcctaaagt

SEQ ID NO: 3211040 - DNA, 25 bp, Homo sapien
taaagttcctctagtaggagatggc

SEQ ID NO: 3211041 - DNA, 25 bp, Homo sapien
cagtcattcgggttttatcacctaa

SEQ ID NO: 3211042 - DNA, 25 bp, Homo sapien
cagaatagcttcatttgtggtcctt

SEQ ID NO: 3211043 - DNA, 25 bp, Homo sapien
cttaaaataggtgttgtgccaaagc

SEQ ID NO: 3211044 - DNA, 25 bp, Homo sapien
gcattttcaaaaggcacccaactac

SEQ ID NO: 3211045 - DNA, 25 bp, Homo sapien
tctcctctggcatgtataatatacc

SEQ ID NO: 3211046 - DNA, 25 bp, Homo sapien
tataacagttatccagatagatggc

SEQ ID NO: 3211047 - DNA, 25 bp, Homo sapien
cattgaccatttccattctacttca

SEQ ID NO: 3211048 - DNA, 25 bp, Homo sapien
tttgactttctcaactacattgacc

SEQ ID NO: 3211049 - DNA, 25 bp, Homo sapien
taaaatactcaccattatttgactt

SEQ ID NO: 3211050 - DNA, 25 bp, Homo sapien
acttcatttactcatactcatggtc

SEQ ID NO: 3211051 - DNA, 25 bp, Homo sapien
cctgctggtggcagtagtaaaacaa

SEQ ID NO: 3211052 - DNA, 25 bp, Homo sapien
gtagtaaaacaaacatgtcaaccat

SEQ ID NO: 3211053 - DNA, 25 bp, Homo sapien
tgtcagcaacagcaaactccgactg

SEQ ID NO: 3211054 - DNA, 25 bp, Homo sapien
ctggtggcagtagtaaaacaaacat

SEQ ID NO: 3211055 - DNA, 25 bp, Homo sapien
cagacttgtgaacgtttgcggagta

SEQ ID NO: 3211056 - DNA, 25 bp, Homo sapien
gcggagtaatttcagtgcactcaca

SEQ ID NO: 3211057 - DNA, 25 bp, Homo sapien
cgcttgtatccttcgagctggcaca

SEQ ID NO: 3211058 - DNA, 25 bp, Homo sapien
tttagttacagctaccagatctgcc

SEQ ID NO: 3211059 - DNA, 25 bp, Homo sapien
gggtgggtcctgaaatgctctaaca

SEQ ID NO: 3211060 - DNA, 25 bp, Homo sapien
ttaacaagaagtctgctgctagtcc

SEQ ID NO: 3211061 - DNA, 25 bp, Homo sapien
cagggccccaatgagaaccttttgt

SEQ ID NO: 3211062 - DNA, 25 bp, Homo sapien
ccagaagtggaatctgttcccggac

SEQ ID NO: 3211063 - DNA, 25 bp, Homo sapien
taagaagaaactaccctacaggcca

SEQ ID NO: 3211064 - DNA, 25 bp, Homo sapien
tcggctcttagcaacccactgtgtg

SEQ ID NO: 3211065 - DNA, 25 bp, Homo sapien
catagtccaactacagagcccaagc

SEQ ID NO: 3211066 - DNA, 25 bp, Homo sapien
gtggcggaagggtacctgcaaatcc

SEQ ID NO: 3211067 - DNA, 25 bp, Homo sapien
cagtagggtgactatggttcgcaac

SEQ ID NO: 3211068 - DNA, 25 bp, Homo sapien
gaacatctaccgttggtgccagcca

SEQ ID NO: 3211069 - DNA, 25 bp, Homo sapien
gaagcatttgcattaacgaagccac

SEQ ID NO: 3211070 - DNA, 25 bp, Homo sapien
taaatgaccagatctagacctcgtg

SEQ ID NO: 3211071 - DNA, 25 bp, Homo sapien
catgctttaaccagtcctcttgaag

SEQ ID NO: 3211072 - DNA, 25 bp, Homo sapien
tctagagttggcttgagtaggtcaa

SEQ ID NO: 3211073 - DNA, 25 bp, Homo sapien
gtctaaaacttattgcctgccatgc

SEQ ID NO: 3211074 - DNA, 25 bp, Homo sapien
gtaggtcaaccacacaatcaaaaga

SEQ ID NO: 3211075 - DNA, 25 bp, Homo sapien
acaacttgtcaagtcctctgcataa

SEQ ID NO: 3211076 - DNA, 25 bp, Homo sapien
tcaagtcctctgcataatgaagaat

SEQ ID NO: 3211077 - DNA, 25 bp, Homo sapien
tccttctagtagcaggaagcaattg

SEQ ID NO: 3211078 - DNA, 25 bp, Homo sapien
caattgactgggctcaccaaacttt

SEQ ID NO: 3211079 - DNA, 25 bp, Homo sapien
tttgtggagtcaagtagaagtagtg

SEQ ID NO: 3211080 - DNA, 25 bp, Homo sapien
agaatttgtggagtcaagtagaagt

SEQ ID NO: 3211081 - DNA, 25 bp, Homo sapien
aatttgtggagtcaagtagaagtag

SEQ ID NO: 3211082 - DNA, 25 bp, Homo sapien
gaatttgtggagtcaagtagaagta

SEQ ID NO: 3211083 - DNA, 25 bp, Homo sapien
tatgttgtcacggaagaatctgacc

SEQ ID NO: 3211084 - DNA, 25 bp, Homo sapien
tccagccttgcgtctgatcagatca

SEQ ID NO: 3211085 - DNA, 25 bp, Homo sapien
tttttccggtaactgcctgtgtatg

SEQ ID NO: 3211086 - DNA, 25 bp, Homo sapien
gaagaatctgaccatcgtgtttcat

SEQ ID NO: 3211087 - DNA, 25 bp, Homo sapien
tgctgaaaagagaaccccaaatacc

SEQ ID NO: 3211088 - DNA, 25 bp, Homo sapien
ccatatcctttcaggactaggtagt

SEQ ID NO: 3211089 - DNA, 25 bp, Homo sapien
gaaaatgcaataaccacaggtaggg

SEQ ID NO: 3211090 - DNA, 25 bp, Homo sapien
aggatcataatttcagctggtcact

SEQ ID NO: 3211091 - DNA, 25 bp, Homo sapien
tagtctcttgggtaccagcccagca

SEQ ID NO: 3211092 - DNA, 25 bp, Homo sapien
tctgtagtctcttgggtaccagccc

SEQ ID NO: 3211093 - DNA, 25 bp, Homo sapien
ggcagaactgtttgtcaatgacatc

SEQ ID NO: 3211094 - DNA, 25 bp, Homo sapien
ctttgatatctgtagtctcttgggt

SEQ ID NO: 3211095 - DNA, 25 bp, Homo sapien
tggaattaaaccgtaagctggacca

SEQ ID NO: 3211096 - DNA, 25 bp, Homo sapien
gtcatggaattaaaccgtaagctgg

SEQ ID NO: 3211097 - DNA, 25 bp, Homo sapien
catggaattaaaccgtaagctggac

SEQ ID NO: 3211098 - DNA, 25 bp, Homo sapien
tcatggaattaaaccgtaagctgga

SEQ ID NO: 3211099 - DNA, 25 bp, Homo sapien
ctccatgcttgacatcaaatgactt

SEQ ID NO: 3211100 - DNA, 25 bp, Homo sapien
tccatgcttgacatcaaatgacttt

SEQ ID NO: 3211101 - DNA, 25 bp, Homo sapien
actccatgcttgacatcaaatgact

SEQ ID NO: 3211102 - DNA, 25 bp, Homo sapien
ttggaggtgtcggaaaacaatcacc

SEQ ID NO: 3211103 - DNA, 25 bp, Homo sapien
atttggaggtgtcggaaaacaatca

SEQ ID NO: 3211104 - DNA, 25 bp, Homo sapien
tggaggtgtcggaaaacaatcacca

SEQ ID NO: 3211105 - DNA, 25 bp, Homo sapien
tttggaggtgtcggaaaacaatcac

SEQ ID NO: 3211106 - DNA, 25 bp, Homo sapien
gcatgagtgacaaatgcctcttgca

SEQ ID NO: 3211107 - DNA, 25 bp, Homo sapien
cagcatgagtgacaaatgcctcttg

SEQ ID NO: 3211108 - DNA, 25 bp, Homo sapien
agcatgagtgacaaatgcctcttgc

SEQ ID NO: 3211109 - DNA, 25 bp, Homo sapien
catgagtgacaaatgcctcttgcat

SEQ ID NO: 3211110 - DNA, 25 bp, Homo sapien
agagatagccaatgtgtgagtgttt

SEQ ID NO: 3211111 - DNA, 25 bp, Homo sapien
gtttgcgataaagagagtctaccat

SEQ ID NO: 3211112 - DNA, 25 bp, Homo sapien
gagatagccaatgtgtgagtgtttg

SEQ ID NO: 3211113 - DNA, 25 bp, Homo sapien
aagagatagccaatgtgtgagtgtt

SEQ ID NO: 3211114 - DNA, 25 bp, Homo sapien
atgctttaggacacctttccctcgt

SEQ ID NO: 3211115 - DNA, 25 bp, Homo sapien
ccctcgtcgactgtagtttatcagg

SEQ ID NO: 3211116 - DNA, 25 bp, Homo sapien
gacacctttccctcgtcgactgtag

SEQ ID NO: 3211117 - DNA, 25 bp, Homo sapien
taggacacctttccctcgtcgactg

SEQ ID NO: 3211118 - DNA, 25 bp, Homo sapien
aattccaactgctgtaaacctctta

SEQ ID NO: 3211119 - DNA, 25 bp, Homo sapien
ctgctgtaaacctcttaggggcttg

SEQ ID NO: 3211120 - DNA, 25 bp, Homo sapien
tccaactgctgtaaacctcttaggg

SEQ ID NO: 3211121 - DNA, 25 bp, Homo sapien
actgctgtaaacctcttaggggctt

SEQ ID NO: 3211122 - DNA, 25 bp, Homo sapien
aatggaattgcttggcaccagtaca

SEQ ID NO: 3211123 - DNA, 25 bp, Homo sapien
gacactgactggcaatggaattgct

SEQ ID NO: 3211124 - DNA, 25 bp, Homo sapien
agacactgactggcaatggaattgc

SEQ ID NO: 3211125 - DNA, 25 bp, Homo sapien
gcaatggaattgcttggcaccagta

SEQ ID NO: 3211126 - DNA, 25 bp, Homo sapien
gttaaatggcgatgagggtcctccc

SEQ ID NO: 3211127 - DNA, 25 bp, Homo sapien
tgctttcagaatcgcaccgtccatg

SEQ ID NO: 3211128 - DNA, 25 bp, Homo sapien
gggtcctccccagccataatcggag

SEQ ID NO: 3211129 - DNA, 25 bp, Homo sapien
taatcggagtatcgatcagcttctg

SEQ ID NO: 3211130 - DNA, 25 bp, Homo sapien
cagggtccagacgttcctgggcggg

SEQ ID NO: 3211131 - DNA, 25 bp, Homo sapien
agaaagccaacctgccagggtccag

SEQ ID NO: 3211132 - DNA, 25 bp, Homo sapien
ttataaaaacttttgtctctctcca

SEQ ID NO: 3211133 - DNA, 25 bp, Homo sapien
tctctctccaccaattaaaaaggga

SEQ ID NO: 3211134 - DNA, 25 bp, Homo sapien
tgggtgaccgctctgaatacaaaga

SEQ ID NO: 3211135 - DNA, 25 bp, Homo sapien
gactgtcggagccaattcgcttccc

SEQ ID NO: 3211136 - DNA, 25 bp, Homo sapien
acaaagagcatttctcacgcccctg

SEQ ID NO: 3211137 - DNA, 25 bp, Homo sapien
cgccttgcgcggaggaaaacctggc

SEQ ID NO: 3211138 - DNA, 25 bp, Homo sapien
tttctgagtgtcctcaatcaatgga

SEQ ID NO: 3211139 - DNA, 25 bp, Homo sapien
ctgtactcatcagccacgtgacctt

SEQ ID NO: 3211140 - DNA, 25 bp, Homo sapien
agtactgtactcatcagccacgtga

SEQ ID NO: 3211141 - DNA, 25 bp, Homo sapien
tcaatggatatacatctcggatgaa

SEQ ID NO: 3211142 - DNA, 25 bp, Homo sapien
tccgggaagtcttgctccacaaaga

SEQ ID NO: 3211143 - DNA, 25 bp, Homo sapien
atcatcctgctctagcctccgggaa

SEQ ID NO: 3211144 - DNA, 25 bp, Homo sapien
ggagaaaagttgacgatcatcctgc

SEQ ID NO: 3211145 - DNA, 25 bp, Homo sapien
tatcagactgaaccggctctaagga

SEQ ID NO: 3211146 - DNA, 25 bp, Homo sapien
gcatccccacatactcaggcagaga

SEQ ID NO: 3211147 - DNA, 25 bp, Homo sapien
gcttccaatgtcagcggactctgaa

SEQ ID NO: 3211148 - DNA, 25 bp, Homo sapien
gatagagccctagttacatacaaag

SEQ ID NO: 3211149 - DNA, 25 bp, Homo sapien
tgaataccagttccacgttgagcct

SEQ ID NO: 3211150 - DNA, 25 bp, Homo sapien
tctttatgaagtagtagagtttctg

SEQ ID NO: 3211151 - DNA, 25 bp, Homo sapien
cttctttatgaagtagtagagtttc

SEQ ID NO: 3211152 - DNA, 25 bp, Homo sapien
ctttatgaagtagtagagtttctgt

SEQ ID NO: 3211153 - DNA, 25 bp, Homo sapien
cttcttctttatgaagtagtagagt

SEQ ID NO: 3211154 - DNA, 25 bp, Homo sapien
gccacttgtgcaataggaggtctag

SEQ ID NO: 3211155 - DNA, 25 bp, Homo sapien
cagactataggttttacagcatgcc

SEQ ID NO: 3211156 - DNA, 25 bp, Homo sapien
gctggtagaaaaggcgaatcacact

SEQ ID NO: 3211157 - DNA, 25 bp, Homo sapien
gacgtttactgctcaaatgccatgc

SEQ ID NO: 3211158 - DNA, 25 bp, Homo sapien
cttttttatggaatgagtagactgt

SEQ ID NO: 3211159 - DNA, 25 bp, Homo sapien
agtttatgcccctgacaagtttcca

SEQ ID NO: 3211160 - DNA, 25 bp, Homo sapien
tataatgacgcaacaaaaaggtgct

SEQ ID NO: 3211161 - DNA, 25 bp, Homo sapien
ctgtatgtttgaagatttagccaca

SEQ ID NO: 3211162 - DNA, 25 bp, Homo sapien
aaattctgggtataaatgctcagac

SEQ ID NO: 3211163 - DNA, 25 bp, Homo sapien
ttggataaattctgggtataaatgc

SEQ ID NO: 3211164 - DNA, 25 bp, Homo sapien
gggtataaatgctcagactaaaaaa

SEQ ID NO: 3211165 - DNA, 25 bp, Homo sapien
aatttatggttgataaatccagcca

SEQ ID NO: 3211166 - DNA, 25 bp, Homo sapien
gagatttccgccagagcgctggaga

SEQ ID NO: 3211167 - DNA, 25 bp, Homo sapien
gaaagccgtgtgtcgtgtgccatga

SEQ ID NO: 3211168 - DNA, 25 bp, Homo sapien
tggaagaaatatctcgcagcactgc

SEQ ID NO: 3211169 - DNA, 25 bp, Homo sapien
tagggcctggtgcttagtcgatgaa

SEQ ID NO: 3211170 - DNA, 25 bp, Homo sapien
cctggcctatctcggactgagagaa

SEQ ID NO: 3211171 - DNA, 25 bp, Homo sapien
gagagtgtccttaatagcaatcagc

SEQ ID NO: 3211172 - DNA, 25 bp, Homo sapien
gttgctgcaaaacctacagaccccg

SEQ ID NO: 3211173 - DNA, 25 bp, Homo sapien
ccccgatgggtctggaacatgtgta

SEQ ID NO: 3211174 - DNA, 25 bp, Homo sapien
tctcttcagctggttgtcctaatgt

SEQ ID NO: 3211175 - DNA, 25 bp, Homo sapien
cagctggttgtcctaatgtgtgaag

SEQ ID NO: 3211176 - DNA, 25 bp, Homo sapien
taatgtgtgaagttgcatcacctgt

SEQ ID NO: 3211177 - DNA, 25 bp, Homo sapien
tgtgctgtttaaaattgtgcaatat

SEQ ID NO: 3211178 - DNA, 25 bp, Homo sapien
ctaaaactcgaggcttatattccac

SEQ ID NO: 3211179 - DNA, 25 bp, Homo sapien
gaccctgtaccctcttgacctctcc

SEQ ID NO: 3211180 - DNA, 25 bp, Homo sapien
gcactgttttgattatacacttaaa

SEQ ID NO: 3211181 - DNA, 25 bp, Homo sapien
cactgttttgattatacacttaaaa

SEQ ID NO: 3211182 - DNA, 25 bp, Homo sapien
gaatgtattaacagaccctgtaccc

SEQ ID NO: 3211183 - DNA, 25 bp, Homo sapien
tgcgactccggggattcttcccact

SEQ ID NO: 3211184 - DNA, 25 bp, Homo sapien
gctgcagcacagcctcggtagcttt

SEQ ID NO: 3211185 - DNA, 25 bp, Homo sapien
gcagcacagcctcggtagctttcat

SEQ ID NO: 3211186 - DNA, 25 bp, Homo sapien
tcagctgcagcacagcctcggtagc

SEQ ID NO: 3211187 - DNA, 25 bp, Homo sapien
tcttgtggcttgatgctattgggaa

SEQ ID NO: 3211188 - DNA, 25 bp, Homo sapien
ctgccagagttcatcataaagagaa

SEQ ID NO: 3211189 - DNA, 25 bp, Homo sapien
gcctttaggagtatggctcaggact

SEQ ID NO: 3211190 - DNA, 25 bp, Homo sapien
tgttgggttaactgaaaatagcaac

SEQ ID NO: 3211191 - DNA, 25 bp, Homo sapien
catagggagcctagtaagtctgtta

SEQ ID NO: 3211192 - DNA, 25 bp, Homo sapien
tctgccaagacctgcagagaggtgg

SEQ ID NO: 3211193 - DNA, 25 bp, Homo sapien
gcaaggtagatcctctgagctggaa

SEQ ID NO: 3211194 - DNA, 25 bp, Homo sapien
gactggcatgagcaacacttctggc

SEQ ID NO: 3211195 - DNA, 25 bp, Homo sapien
gacaactggacaactgtgacatgca

SEQ ID NO: 3211196 - DNA, 25 bp, Homo sapien
acaactggacaactgtgacatgcaa

SEQ ID NO: 3211197 - DNA, 25 bp, Homo sapien
agacaactggacaactgtgacatgc

SEQ ID NO: 3211198 - DNA, 25 bp, Homo sapien
tgaacaggctggtttgtgccaaaca

SEQ ID NO: 3211199 - DNA, 25 bp, Homo sapien
gaactagacctttgaagttgtgccc

SEQ ID NO: 3211200 - DNA, 25 bp, Homo sapien
gattggattgttcctgaactagacc

SEQ ID NO: 3211201 - DNA, 25 bp, Homo sapien
gccaaacaccttgtggatccaaact

SEQ ID NO: 3211202 - DNA, 25 bp, Homo sapien
aggaagacctgagaactccctcatg

SEQ ID NO: 3211203 - DNA, 25 bp, Homo sapien
ctgagaactccctcatgcacccctg

SEQ ID NO: 3211204 - DNA, 25 bp, Homo sapien
aagacctgagaactccctcatgcac

SEQ ID NO: 3211205 - DNA, 25 bp, Homo sapien
tcaggaagacctgagaactccctca

SEQ ID NO: 3211206 - DNA, 25 bp, Homo sapien
tggcattttaagtattactgatgca

SEQ ID NO: 3211207 - DNA, 25 bp, Homo sapien
gtattactgatgcaccgtcttcttt

SEQ ID NO: 3211208 - DNA, 25 bp, Homo sapien
agtgttgcccacatttaccgcagct

SEQ ID NO: 3211209 - DNA, 25 bp, Homo sapien
tgttgcccacatttaccgcagctgt

SEQ ID NO: 3211210 - DNA, 25 bp, Homo sapien
gatccatggtagcttcagtgtgttg

SEQ ID NO: 3211211 - DNA, 25 bp, Homo sapien
gggatccatggtagcttcagtgtgt

SEQ ID NO: 3211212 - DNA, 25 bp, Homo sapien
ccatggtagcttcagtgtgttgtgc

SEQ ID NO: 3211213 - DNA, 25 bp, Homo sapien
gtagcttcagtgtgttgtgcttgtg

SEQ ID NO: 3211214 - DNA, 25 bp, Homo sapien
cttctgccagttgctaccttccctc

SEQ ID NO: 3211215 - DNA, 25 bp, Homo sapien
ggatctcagcagcactcggtagcct

SEQ ID NO: 3211216 - DNA, 25 bp, Homo sapien
cgcccaccaccaatctagcagccag

SEQ ID NO: 3211217 - DNA, 25 bp, Homo sapien
tgccagttgctaccttccctcccag

SEQ ID NO: 3211218 - DNA, 25 bp, Homo sapien
ctggccacacgccttgtcttctgca

SEQ ID NO: 3211219 - DNA, 25 bp, Homo sapien
tgcactggccacacgccttgtcttc

SEQ ID NO: 3211220 - DNA, 25 bp, Homo sapien
gccacacgccttgtcttctgcaagt

SEQ ID NO: 3211221 - DNA, 25 bp, Homo sapien
gcactggccacacgccttgtcttct

SEQ ID NO: 3211222 - DNA, 25 bp, Homo sapien
tcttcttcgacctgcaagtgtcgct

SEQ ID NO: 3211223 - DNA, 25 bp, Homo sapien
ttcttcgacctgcaagtgtcgctgc

SEQ ID NO: 3211224 - DNA, 25 bp, Homo sapien
cctttaaactcttcttcgacctgca

SEQ ID NO: 3211225 - DNA, 25 bp, Homo sapien
taaactcttcttcgacctgcaagtg

SEQ ID NO: 3211226 - DNA, 25 bp, Homo sapien
gatgcagcccgcttcatcctgtgtc

SEQ ID NO: 3211227 - DNA, 25 bp, Homo sapien
gtaaccagttggaggacagtacaaa

SEQ ID NO: 3211228 - DNA, 25 bp, Homo sapien
gggcacgtcgtaaagtccagtgcat

SEQ ID NO: 3211229 - DNA, 25 bp, Homo sapien
tgtccggtacctcctggaacttgcc

SEQ ID NO: 3211230 - DNA, 25 bp, Homo sapien
cctagctcggcctggcgaagagcag

SEQ ID NO: 3211231 - DNA, 25 bp, Homo sapien
gaggtgataaaaagattatataggg

SEQ ID NO: 3211232 - DNA, 25 bp, Homo sapien
cggcacgtgtagcaagctcctgtgg

SEQ ID NO: 3211233 - DNA, 25 bp, Homo sapien
taaaaagattatatagggtggagga

SEQ ID NO: 3211234 - DNA, 25 bp, Homo sapien
gggatgactcaggatatctgattag

SEQ ID NO: 3211235 - DNA, 25 bp, Homo sapien
aagaattgggatgactcaggatatc

SEQ ID NO: 3211236 - DNA, 25 bp, Homo sapien
gtctaagaattgggatgactcagga

SEQ ID NO: 3211237 - DNA, 25 bp, Homo sapien
aattgggatgactcaggatatctga

SEQ ID NO: 3211238 - DNA, 25 bp, Homo sapien
gaaaactcagtgttaggttgtacat

SEQ ID NO: 3211239 - DNA, 25 bp, Homo sapien
ttgaaaactcagtgttaggttgtac

SEQ ID NO: 3211240 - DNA, 25 bp, Homo sapien
tccttgaaaactcagtgttaggttg

SEQ ID NO: 3211241 - DNA, 25 bp, Homo sapien
ccttgaaaactcagtgttaggttgt

SEQ ID NO: 3211242 - DNA, 25 bp, Homo sapien
gaagtttccgggctccacagtgcat

SEQ ID NO: 3211243 - DNA, 25 bp, Homo sapien
ccttggtctgcggttggctctggca

SEQ ID NO: 3211244 - DNA, 25 bp, Homo sapien
ggcattgtgctccttgtcccgagaa

SEQ ID NO: 3211245 - DNA, 25 bp, Homo sapien
agcggccctcgacaaggcctggcat

SEQ ID NO: 3211246 - DNA, 25 bp, Homo sapien
ttgtgtataaagtcagattcctgcg

SEQ ID NO: 3211247 - DNA, 25 bp, Homo sapien
caagtatccggatgtgcagggttca

SEQ ID NO: 3211248 - DNA, 25 bp, Homo sapien
caagctgacatttcaagtatccgga

SEQ ID NO: 3211249 - DNA, 25 bp, Homo sapien
gattcctgcgggagatcctccacaa

SEQ ID NO: 3211250 - DNA, 25 bp, Homo sapien
caagagaacacgaagtccacggatg

SEQ ID NO: 3211251 - DNA, 25 bp, Homo sapien
gctgttaactctccatcccgtatgg

SEQ ID NO: 3211252 - DNA, 25 bp, Homo sapien
gctcatttcaaccacaagactaagg

SEQ ID NO: 3211253 - DNA, 25 bp, Homo sapien
ccaatatgtgcttgccagtgagtca

SEQ ID NO: 3211254 - DNA, 25 bp, Homo sapien
tccatctgccgttgtgagaagagga

SEQ ID NO: 3211255 - DNA, 25 bp, Homo sapien
tctgagttagcccaagatatgagct

SEQ ID NO: 3211256 - DNA, 25 bp, Homo sapien
ggaaatgcattctccacctttgaag

SEQ ID NO: 3211257 - DNA, 25 bp, Homo sapien
acctgaaacgttgtaggtgagagcc

SEQ ID NO: 3211258 - DNA, 25 bp, Homo sapien
ggaacccatggaggttgacatccag

SEQ ID NO: 3211259 - DNA, 25 bp, Homo sapien
cagatggtgaagattaaagaggaac

SEQ ID NO: 3211260 - DNA, 25 bp, Homo sapien
aagattaaagaggaacccatggagg

SEQ ID NO: 3211261 - DNA, 25 bp, Homo sapien
gaacccatggaggttgacatccagg

SEQ ID NO: 3211262 - DNA, 25 bp, Homo sapien
cctgggagcaggcttgcatcgcctc

SEQ ID NO: 3211263 - DNA, 25 bp, Homo sapien
tctgttgaaagctaccattcttgaa

SEQ ID NO: 3211264 - DNA, 25 bp, Homo sapien
aacagatggccagtttgtcgaggag

SEQ ID NO: 3211265 - DNA, 25 bp, Homo sapien
tggcttggtctcgtggtttgctcag

SEQ ID NO: 3211266 - DNA, 25 bp, Homo sapien
gcctgacgttcagctctcctggaga

SEQ ID NO: 3211267 - DNA, 25 bp, Homo sapien
ggtatcagtcctgtgtgtaactgtg

SEQ ID NO: 3211268 - DNA, 25 bp, Homo sapien
cagtgtaagggttgcgtcctcttcc

SEQ ID NO: 3211269 - DNA, 25 bp, Homo sapien
tagggtctcgctatccagtgtaagg

SEQ ID NO: 3211270 - DNA, 25 bp, Homo sapien
gactccaggcctgtatgttccagca

SEQ ID NO: 3211271 - DNA, 25 bp, Homo sapien
tgcaaatcattgcatgtcagggcag

SEQ ID NO: 3211272 - DNA, 25 bp, Homo sapien
gaagccagaaagcatatgcaaatca

SEQ ID NO: 3211273 - DNA, 25 bp, Homo sapien
gaaaaggtgttcacccgactgcgga

SEQ ID NO: 3211274 - DNA, 25 bp, Homo sapien
gaatctttgtgccagccagatcact

SEQ ID NO: 3211275 - DNA, 25 bp, Homo sapien
tgtcccttggcgttataacggcgcc

SEQ ID NO: 3211276 - DNA, 25 bp, Homo sapien
gctctgtccgtgcacctgctggtac

SEQ ID NO: 3211277 - DNA, 25 bp, Homo sapien
cctgctggtactgtagggtgcagct

SEQ ID NO: 3211278 - DNA, 25 bp, Homo sapien
ttgtagaacccgccccctggcttca

SEQ ID NO: 3211279 - DNA, 25 bp, Homo sapien
tgtgacccacattgagcccattgta

SEQ ID NO: 3211280 - DNA, 25 bp, Homo sapien
tctgtgacccacattgagcccattg

SEQ ID NO: 3211281 - DNA, 25 bp, Homo sapien
tgacccacattgagcccattgtaga

SEQ ID NO: 3211282 - DNA, 25 bp, Homo sapien
cgtgcatttacctcagactgtggac

SEQ ID NO: 3211283 - DNA, 25 bp, Homo sapien
gccgtgcatttacctcagactgtgg

SEQ ID NO: 3211284 - DNA, 25 bp, Homo sapien
gcatttacctcagactgtggacttg

SEQ ID NO: 3211285 - DNA, 25 bp, Homo sapien
tgccggccgtgcatttacctcagac

SEQ ID NO: 3211286 - DNA, 25 bp, Homo sapien
cgagtctctgtcctgtgaagcccat

SEQ ID NO: 3211287 - DNA, 25 bp, Homo sapien
gtgtcctggacatccgtgtttcgat

SEQ ID NO: 3211288 - DNA, 25 bp, Homo sapien
gtgtttcgataactgtaatctccga

SEQ ID NO: 3211289 - DNA, 25 bp, Homo sapien
ttcttcctgggcacgctgacagcgg

SEQ ID NO: 3211290 - DNA, 25 bp, Homo sapien
ttctgtcctcaaactgtgccaagac

SEQ ID NO: 3211291 - DNA, 25 bp, Homo sapien
tggtcataacaaccagaagtttcct

SEQ ID NO: 3211292 - DNA, 25 bp, Homo sapien
gccaagaccgtcagattttcctgat

SEQ ID NO: 3211293 - DNA, 25 bp, Homo sapien
gattccatggtcataacaaccagaa

SEQ ID NO: 3211294 - DNA, 25 bp, Homo sapien
ggatatgtgttgcctgtgctaagtg

SEQ ID NO: 3211295 - DNA, 25 bp, Homo sapien
tgtggatatgtgttgcctgtgctaa

SEQ ID NO: 3211296 - DNA, 25 bp, Homo sapien
tggatatgtgttgcctgtgctaagt

SEQ ID NO: 3211297 - DNA, 25 bp, Homo sapien
ttgtggatatgtgttgcctgtgcta

SEQ ID NO: 3211298 - DNA, 25 bp, Homo sapien
gggaggtctgccgtgcttggacaaa

SEQ ID NO: 3211299 - DNA, 25 bp, Homo sapien
tgcgaacttgcccttagatggcaac

SEQ ID NO: 3211300 - DNA, 25 bp, Homo sapien
atgagcttgtgtgcgaaaacagggc

SEQ ID NO: 3211301 - DNA, 25 bp, Homo sapien
tcacagaaaactcgcagcagttggt

SEQ ID NO: 3211302 - DNA, 25 bp, Homo sapien
tctggaatttgaccaatctaaatat

SEQ ID NO: 3211303 - DNA, 25 bp, Homo sapien
gaggtgaagaactattgggacgata

SEQ ID NO: 3211304 - DNA, 25 bp, Homo sapien
ctattgggacgatatttagggaagg

SEQ ID NO: 3211305 - DNA, 25 bp, Homo sapien
gaaacattcacatcaggtgttggag

SEQ ID NO: 3211306 - DNA, 25 bp, Homo sapien
gatctggtctaaatggcattcttcc

SEQ ID NO: 3211307 - DNA, 25 bp, Homo sapien
ggactttcagaacacgtcattgaca

SEQ ID NO: 3211308 - DNA, 25 bp, Homo sapien
ggtgagcaagattcgatggactttc

SEQ ID NO: 3211309 - DNA, 25 bp, Homo sapien
ttccctagagcaggcagagaggtga

SEQ ID NO: 3211310 - DNA, 25 bp, Homo sapien
tgtttgccatctctgttgtacagga

SEQ ID NO: 3211311 - DNA, 25 bp, Homo sapien
cattcttaaggagaaccacatgtgt

SEQ ID NO: 3211312 - DNA, 25 bp, Homo sapien
gaggactgtcagaagcacggagaac

SEQ ID NO: 3211313 - DNA, 25 bp, Homo sapien
catgtgtccggcatctgtttgccat

SEQ ID NO: 3211314 - DNA, 25 bp, Homo sapien
ccagtgccagaagctttcttttcca

SEQ ID NO: 3211315 - DNA, 25 bp, Homo sapien
cagaaaagtcaaggaaagcaggctc

SEQ ID NO: 3211316 - DNA, 25 bp, Homo sapien
tccagggacagggcggaagttcctc

SEQ ID NO: 3211317 - DNA, 25 bp, Homo sapien
cagggacagggcggaagttcctctt

SEQ ID NO: 3211318 - DNA, 25 bp, Homo sapien
tctcatagtgcatgcaggcaagcaa

SEQ ID NO: 3211319 - DNA, 25 bp, Homo sapien
cacgttggctctgccctatcttcag

SEQ ID NO: 3211320 - DNA, 25 bp, Homo sapien
ccagtttctcatagtgcatgcaggc

SEQ ID NO: 3211321 - DNA, 25 bp, Homo sapien
tgcaggcaagcaagtcacgttggct

SEQ ID NO: 3211322 - DNA, 25 bp, Homo sapien
caggattctgaagtggagctccaca

SEQ ID NO: 3211323 - DNA, 25 bp, Homo sapien
ctccacaaggaagaagagctttctt

SEQ ID NO: 3211324 - DNA, 25 bp, Homo sapien
tggaagcagccatgtaactccaccc

SEQ ID NO: 3211325 - DNA, 25 bp, Homo sapien
tgttaatgatgatgtctggaagcag

SEQ ID NO: 3211326 - DNA, 25 bp, Homo sapien
actccaagttgcctttattcattta

SEQ ID NO: 3211327 - DNA, 25 bp, Homo sapien
tactccaagttgcctttattcattt

SEQ ID NO: 3211328 - DNA, 25 bp, Homo sapien
tggggttgctttcacaaagctccat

SEQ ID NO: 3211329 - DNA, 25 bp, Homo sapien
gacagctctggggttgctttcacaa

SEQ ID NO: 3211330 - DNA, 25 bp, Homo sapien
agctctggggttgctttcacaaagc

SEQ ID NO: 3211331 - DNA, 25 bp, Homo sapien
tctggggttgctttcacaaagctcc

SEQ ID NO: 3211332 - DNA, 25 bp, Homo sapien
caggaagagcctttcgatgatgccc

SEQ ID NO: 3211333 - DNA, 25 bp, Homo sapien
tgggctttcaactccgtagctccac

SEQ ID NO: 3211334 - DNA, 25 bp, Homo sapien
tcctggcattgtgattgttgaacag

SEQ ID NO: 3211335 - DNA, 25 bp, Homo sapien
tgctggcaatggtgtgtctgtgcac

SEQ ID NO: 3211336 - DNA, 25 bp, Homo sapien
gggacaggacactaccattgagcta

SEQ ID NO: 3211337 - DNA, 25 bp, Homo sapien
tataactacggaattggcataccag

SEQ ID NO: 3211338 - DNA, 25 bp, Homo sapien
tcatcacggctgatagagcaggtat

SEQ ID NO: 3211339 - DNA, 25 bp, Homo sapien
gagctagacctctgttggcagccat

SEQ ID NO: 3211340 - DNA, 25 bp, Homo sapien
ccagctaggtgacctgttgtcagct

SEQ ID NO: 3211341 - DNA, 25 bp, Homo sapien
aatctgccgctctccagctaggtga

SEQ ID NO: 3211342 - DNA, 25 bp, Homo sapien
gggtggcaaatctgccgctctccag

SEQ ID NO: 3211343 - DNA, 25 bp, Homo sapien
tgtggggtggcaaatctgccgctct

SEQ ID NO: 3211344 - DNA, 25 bp, Homo sapien
tggtcagcacatggatgaatgcagg

SEQ ID NO: 3211345 - DNA, 25 bp, Homo sapien
gattggttctgtatcctggtctgaa

SEQ ID NO: 3211346 - DNA, 25 bp, Homo sapien
tctggactgacaggcctctgattgg

SEQ ID NO: 3211347 - DNA, 25 bp, Homo sapien
tgcaagagtcttttcagggtacatt

SEQ ID NO: 3211348 - DNA, 25 bp, Homo sapien
tggtgatgaaaccagctgttgaaat

SEQ ID NO: 3211349 - DNA, 25 bp, Homo sapien
tgttgaaatacttcaattgggttgc

SEQ ID NO: 3211350 - DNA, 25 bp, Homo sapien
tgaactccacaaaagagtcagcttt

SEQ ID NO: 3211351 - DNA, 25 bp, Homo sapien
ttcaattgggttgcagttgcttctc

SEQ ID NO: 3211352 - DNA, 25 bp, Homo sapien
tgggttcataaggatttgagctctg

SEQ ID NO: 3211353 - DNA, 25 bp, Homo sapien
gttcataaggatttgagctctgcta

SEQ ID NO: 3211354 - DNA, 25 bp, Homo sapien
tttgggttcataaggatttgagctc

SEQ ID NO: 3211355 - DNA, 25 bp, Homo sapien
gagtttgggttcataaggatttgag

SEQ ID NO: 3211356 - DNA, 25 bp, Homo sapien
tcatgctgaccctgctgagttccag

SEQ ID NO: 3211357 - DNA, 25 bp, Homo sapien
tcagcagtcctcgcggtgttcctca

SEQ ID NO: 3211358 - DNA, 25 bp, Homo sapien
tgttcctcatgctgaccctgctgag

SEQ ID NO: 3211359 - DNA, 25 bp, Homo sapien
agcagtcctcgcggtgttcctcatg

SEQ ID NO: 3211360 - DNA, 25 bp, Homo sapien
ccgtgttgccacagcactcctactt

SEQ ID NO: 3211361 - DNA, 25 bp, Homo sapien
tgagcatcacgcctgaagagaactc

SEQ ID NO: 3211362 - DNA, 25 bp, Homo sapien
ccaaattggcattcttccttccatc

SEQ ID NO: 3211363 - DNA, 25 bp, Homo sapien
tatttccacaccgtgttgccacagc

SEQ ID NO: 3211364 - DNA, 25 bp, Homo sapien
aagcctctgtatcctttttctccac

SEQ ID NO: 3211365 - DNA, 25 bp, Homo sapien
tcgtggggttagaagcctctgtatc

SEQ ID NO: 3211366 - DNA, 25 bp, Homo sapien
gtggggttagaagcctctgtatcct

SEQ ID NO: 3211367 - DNA, 25 bp, Homo sapien
tagaagcctctgtatcctttttctc

SEQ ID NO: 3211368 - DNA, 25 bp, Homo sapien
tcacacaacctttaatggttactgc

SEQ ID NO: 3211369 - DNA, 25 bp, Homo sapien
cgcagtagcttcagacaaccacgaa

SEQ ID NO: 3211370 - DNA, 25 bp, Homo sapien
aagaggctccccgtcgcagtagctt

SEQ ID NO: 3211371 - DNA, 25 bp, Homo sapien
tgcctatttgcataccctgagccca

SEQ ID NO: 3211372 - DNA, 25 bp, Homo sapien
aagccataccgtgagggccctggtt

SEQ ID NO: 3211373 - DNA, 25 bp, Homo sapien
cctggttggcgaggtcccaccagct

SEQ ID NO: 3211374 - DNA, 25 bp, Homo sapien
catctgaaaatgtgaagtctgggct

SEQ ID NO: 3211375 - DNA, 25 bp, Homo sapien
tccctggtcaccagcccgaagccat

SEQ ID NO: 3211376 - DNA, 25 bp, Homo sapien
ccgggattggactggcacattgcct

SEQ ID NO: 3211377 - DNA, 25 bp, Homo sapien
gcttcagtccctatctgagccggga

SEQ ID NO: 3211378 - DNA, 25 bp, Homo sapien
cttgttgaaattggctccgcacctt

SEQ ID NO: 3211379 - DNA, 25 bp, Homo sapien
taattgatgggtatgagtgcagaca

SEQ ID NO: 3211380 - DNA, 25 bp, Homo sapien
ccagtacacaaagagtaatttgctg

SEQ ID NO: 3211381 - DNA, 25 bp, Homo sapien
ctgtctgcaatgacgcttctctggc

SEQ ID NO: 3211382 - DNA, 25 bp, Homo sapien
acacaaagagtaatttgctgtctgt

SEQ ID NO: 3211383 - DNA, 25 bp, Homo sapien
tgtctgcaatgacgcttctctggct

SEQ ID NO: 3211384 - DNA, 25 bp, Homo sapien
ttccacagcacctacagccgtggct

SEQ ID NO: 3211385 - DNA, 25 bp, Homo sapien
cacagcacctacagccgtggctgtg

SEQ ID NO: 3211386 - DNA, 25 bp, Homo sapien
cctggtgcttccacagcacctacag

SEQ ID NO: 3211387 - DNA, 25 bp, Homo sapien
ggctgtgacaagcctcaatgcacaa

SEQ ID NO: 3211388 - DNA, 25 bp, Homo sapien
tcagcttgtgcccgagtcctcggga

SEQ ID NO: 3211389 - DNA, 25 bp, Homo sapien
agcttgtgcccgagtcctcgggaga

SEQ ID NO: 3211390 - DNA, 25 bp, Homo sapien
tgtgcccgagtcctcgggagagaca

SEQ ID NO: 3211391 - DNA, 25 bp, Homo sapien
cttgtgcccgagtcctcgggagaga

SEQ ID NO: 3211392 - DNA, 25 bp, Homo sapien
tcattcccccacactacagcccact

SEQ ID NO: 3211393 - DNA, 25 bp, Homo sapien
ttcccccacactacagcccactcca

SEQ ID NO: 3211394 - DNA, 25 bp, Homo sapien
cattcccccacactacagcccactc

SEQ ID NO: 3211395 - DNA, 25 bp, Homo sapien
ccccacactacagcccactccagct

SEQ ID NO: 3211396 - DNA, 25 bp, Homo sapien
gatgaaaattttactattcttatac

SEQ ID NO: 3211397 - DNA, 25 bp, Homo sapien
ttctatcctgatgaaaattttacta

SEQ ID NO: 3211398 - DNA, 25 bp, Homo sapien
ttttctatcctgatgaaaattttac

SEQ ID NO: 3211399 - DNA, 25 bp, Homo sapien
gaaaattttactattcttatactgc

SEQ ID NO: 3211400 - DNA, 25 bp, Homo sapien
gatatgatgtctttaatgtacagtg

SEQ ID NO: 3211401 - DNA, 25 bp, Homo sapien
tgatgtctttaatgtacagtgatgt

SEQ ID NO: 3211402 - DNA, 25 bp, Homo sapien
ggagatatgatgtctttaatgtaca

SEQ ID NO: 3211403 - DNA, 25 bp, Homo sapien
aaggagatatgatgtctttaatgta

SEQ ID NO: 3211404 - DNA, 25 bp, Homo sapien
gagaaatgtctgagcttcagtttcc

SEQ ID NO: 3211405 - DNA, 25 bp, Homo sapien
tgcagagaaatgtctgagcttcagt

SEQ ID NO: 3211406 - DNA, 25 bp, Homo sapien
gaaatgtctgagcttcagtttcctc

SEQ ID NO: 3211407 - DNA, 25 bp, Homo sapien
cagagaaatgtctgagcttcagttt

SEQ ID NO: 3211408 - DNA, 25 bp, Homo sapien
tgacatagcgcagagcacctagcat

SEQ ID NO: 3211409 - DNA, 25 bp, Homo sapien
agtaaggctggagtcatgacatagc

SEQ ID NO: 3211410 - DNA, 25 bp, Homo sapien
cgagagaacaggttccagagagtaa

SEQ ID NO: 3211411 - DNA, 25 bp, Homo sapien
gagaacaggttccagagagtaaggc

SEQ ID NO: 3211412 - DNA, 25 bp, Homo sapien
tcttgcatacatgaattgattcgac

SEQ ID NO: 3211413 - DNA, 25 bp, Homo sapien
gggtcactgatatctggtcaagtgt

SEQ ID NO: 3211414 - DNA, 25 bp, Homo sapien
gattcgacattgctgactgcagatt

SEQ ID NO: 3211415 - DNA, 25 bp, Homo sapien
tgatatctggtcaagtgtttgcctc

SEQ ID NO: 3211416 - DNA, 25 bp, Homo sapien
atttcccaggtttttgctttcagca

SEQ ID NO: 3211417 - DNA, 25 bp, Homo sapien
tatttcccaggtttttgctttcagc

SEQ ID NO: 3211418 - DNA, 25 bp, Homo sapien
tttcccaggtttttgctttcagcat

SEQ ID NO: 3211419 - DNA, 25 bp, Homo sapien
tagcaaaattggtgcagtggagttc

SEQ ID NO: 3211420 - DNA, 25 bp, Homo sapien
gcagtggagttcctctaacagaaat

SEQ ID NO: 3211421 - DNA, 25 bp, Homo sapien
ctagtagcaaaattggtgcagtgga

SEQ ID NO: 3211422 - DNA, 25 bp, Homo sapien
aaattggtgcagtggagttcctcta

SEQ ID NO: 3211423 - DNA, 25 bp, Homo sapien
gcggatgatcccagccaaaaccgaa

SEQ ID NO: 3211424 - DNA, 25 bp, Homo sapien
gccaaaaccgaaagcgccgaggcag

SEQ ID NO: 3211425 - DNA, 25 bp, Homo sapien
ttctctgctacggcagcccgctggg

SEQ ID NO: 3211426 - DNA, 25 bp, Homo sapien
aagcgcgcaaatccaagattcctgg

SEQ ID NO: 3211427 - DNA, 25 bp, Homo sapien
ccgtcgtcggcccgcgcagcggtgc

SEQ ID NO: 3211428 - DNA, 25 bp, Homo sapien
tcgtcggcccgcgcagcggtgcggc

SEQ ID NO: 3211429 - DNA, 25 bp, Homo sapien
gtcgtcggcccgcgcagcggtgcgg

SEQ ID NO: 3211430 - DNA, 25 bp, Homo sapien
ccccgtcgtcggcccgcgcagcggt

SEQ ID NO: 3211431 - DNA, 25 bp, Homo sapien
ttccatgcgcggagagcttggacgc

SEQ ID NO: 3211432 - DNA, 25 bp, Homo sapien
cacagcgcgactgaacactggggca

SEQ ID NO: 3211433 - DNA, 25 bp, Homo sapien
tcggacgccaactcggtaggagccg

SEQ ID NO: 3211434 - DNA, 25 bp, Homo sapien
ctgaattgatctcggacgccaactc

SEQ ID NO: 3211435 - DNA, 25 bp, Homo sapien
gagggttcgcaattccctgaagccc

SEQ ID NO: 3211436 - DNA, 25 bp, Homo sapien
tgtggtcaggcgcagccaccccgat

SEQ ID NO: 3211437 - DNA, 25 bp, Homo sapien
gctttcccgccgaatcttgggatta

SEQ ID NO: 3211438 - DNA, 25 bp, Homo sapien
ctaggcctgggttcgggatccgctt

SEQ ID NO: 3211439 - DNA, 25 bp, Homo sapien
ctgacaacttggtaagacaggcgag

SEQ ID NO: 3211440 - DNA, 25 bp, Homo sapien
gacaggcgagtccagcctttaattc

SEQ ID NO: 3211441 - DNA, 25 bp, Homo sapien
agaccatacaatcgggttcctcgac

SEQ ID NO: 3211442 - DNA, 25 bp, Homo sapien
ttaagaccatacaatcgggttcctc

SEQ ID NO: 3211443 - DNA, 25 bp, Homo sapien
aagaccatacaatcgggttcctcga

SEQ ID NO: 3211444 - DNA, 25 bp, Homo sapien
taagaccatacaatcgggttcctcg

SEQ ID NO: 3211445 - DNA, 25 bp, Homo sapien
tgcggacacgcatacgcacagaaaa

SEQ ID NO: 3211446 - DNA, 25 bp, Homo sapien
cacagaaaaccttgggcgataggac

SEQ ID NO: 3211447 - DNA, 25 bp, Homo sapien
acgcacagaaaaccttgggcgatag

SEQ ID NO: 3211448 - DNA, 25 bp, Homo sapien
gcaggtgtgcggacacgcatacgca

SEQ ID NO: 3211449 - DNA, 25 bp, Homo sapien
tcataatttcacttctcatggcccc

SEQ ID NO: 3211450 - DNA, 25 bp, Homo sapien
taactcataatttcacttctcatgg

SEQ ID NO: 3211451 - DNA, 25 bp, Homo sapien
tttcacttctcatggccccaggttc

SEQ ID NO: 3211452 - DNA, 25 bp, Homo sapien
tggataactcataatttcacttctc

SEQ ID NO: 3211453 - DNA, 25 bp, Homo sapien
tgcccataaatccattttgtatgag

SEQ ID NO: 3211454 - DNA, 25 bp, Homo sapien
ggtcttgacaccacaatttttccca

SEQ ID NO: 3211455 - DNA, 25 bp, Homo sapien
ccattttgtatgagtaaattggtct

SEQ ID NO: 3211456 - DNA, 25 bp, Homo sapien
cacttggctcaagtaattttaagtt

SEQ ID NO: 3211457 - DNA, 25 bp, Homo sapien
gccaagaaaagtcaacatcctaagt

SEQ ID NO: 3211458 - DNA, 25 bp, Homo sapien
tattagctccacaatctcaacagat

SEQ ID NO: 3211459 - DNA, 25 bp, Homo sapien
gaattttgggctatcatttggacaa

SEQ ID NO: 3211460 - DNA, 25 bp, Homo sapien
tacaactactattcaggacaaccac

SEQ ID NO: 3211461 - DNA, 25 bp, Homo sapien
cacaactggtcgtccgatgatttgc

SEQ ID NO: 3211462 - DNA, 25 bp, Homo sapien
ctggtcgtccgatgatttgctttaa

SEQ ID NO: 3211463 - DNA, 25 bp, Homo sapien
attttaccacaactggtcgtccgat

SEQ ID NO: 3211464 - DNA, 25 bp, Homo sapien
gatttgctttaagaagtcactaggg

SEQ ID NO: 3211465 - DNA, 25 bp, Homo sapien
caacagctgcttgccaatcttgaat

SEQ ID NO: 3211466 - DNA, 25 bp, Homo sapien
tgttcatacctgagttcactaggaa

SEQ ID NO: 3211467 - DNA, 25 bp, Homo sapien
acactgaaaggcagaagcacatgct

SEQ ID NO: 3211468 - DNA, 25 bp, Homo sapien
taggcacatatgatctcaaagcaga

SEQ ID NO: 3211469 - DNA, 25 bp, Homo sapien
ggataaacccaagttccctgatgca

SEQ ID NO: 3211470 - DNA, 25 bp, Homo sapien
ggttactatccatgtgaaagactcc

SEQ ID NO: 3211471 - DNA, 25 bp, Homo sapien
taaaagcaaaaccatggtacagcca

SEQ ID NO: 3211472 - DNA, 25 bp, Homo sapien
gaaagactcctgaatctcactagta

SEQ ID NO: 3211473 - DNA, 25 bp, Homo sapien
cttagagcagacaatctctttattc

SEQ ID NO: 3211474 - DNA, 25 bp, Homo sapien
cattagttcttagatgcttaatata

SEQ ID NO: 3211475 - DNA, 25 bp, Homo sapien
aaattacagggtataccttagagca

SEQ ID NO: 3211476 - DNA, 25 bp, Homo sapien
attcacaccataaatgaaactcaac

SEQ ID NO: 3211477 - DNA, 25 bp, Homo sapien
attgtttcctcggataaatgcatcc

SEQ ID NO: 3211478 - DNA, 25 bp, Homo sapien
cctcggataaatgcatccccatact

SEQ ID NO: 3211479 - DNA, 25 bp, Homo sapien
tcggataaatgcatccccatactta

SEQ ID NO: 3211480 - DNA, 25 bp, Homo sapien
tttcctcggataaatgcatccccat

SEQ ID NO: 3211481 - DNA, 25 bp, Homo sapien
tgaatgctgtactgtagggcgaaga

SEQ ID NO: 3211482 - DNA, 25 bp, Homo sapien
caggtaaggagaacaatgtccctca

SEQ ID NO: 3211483 - DNA, 25 bp, Homo sapien
tattcgagaaagcagggttccaggt

SEQ ID NO: 3211484 - DNA, 25 bp, Homo sapien
tacaaaataactggtcaaactgaag

SEQ ID NO: 3211485 - DNA, 25 bp, Homo sapien
cactttggccaaactagaggtggtt

SEQ ID NO: 3211486 - DNA, 25 bp, Homo sapien
tgctcaaagcgaacagtaaggtgtc

SEQ ID NO: 3211487 - DNA, 25 bp, Homo sapien
agtgtgcacgttaaaggatctaccc

SEQ ID NO: 3211488 - DNA, 25 bp, Homo sapien
catgaactcgtaggatgtgtggtcc

SEQ ID NO: 3211489 - DNA, 25 bp, Homo sapien
acatccgtctcttctgtgtactgat

SEQ ID NO: 3211490 - DNA, 25 bp, Homo sapien
ctcttctgtgtactgatgtacaaca

SEQ ID NO: 3211491 - DNA, 25 bp, Homo sapien
tcacatccgtctcttctgtgtactg

SEQ ID NO: 3211492 - DNA, 25 bp, Homo sapien
gtctcttctgtgtactgatgtacaa

SEQ ID NO: 3211493 - DNA, 25 bp, Homo sapien
caccaactattataaaaagaggaca

SEQ ID NO: 3211494 - DNA, 25 bp, Homo sapien
aaaatatatccaactatgaaaagcg

SEQ ID NO: 3211495 - DNA, 25 bp, Homo sapien
ggacaaattgtatcacaaaagaagc

SEQ ID NO: 3211496 - DNA, 25 bp, Homo sapien
tatgaaaagcgttgctctcttggtg

SEQ ID NO: 3211497 - DNA, 25 bp, Homo sapien
tgtacactgacaacgaggtaaaaga

SEQ ID NO: 3211498 - DNA, 25 bp, Homo sapien
tattttagcattctgtacactgaca

SEQ ID NO: 3211499 - DNA, 25 bp, Homo sapien
acaacgaggtaaaagaaaatgactg

SEQ ID NO: 3211500 - DNA, 25 bp, Homo sapien
cacaattaaatccacaattgtatac

SEQ ID NO: 3211501 - DNA, 25 bp, Homo sapien
gctggataagaaaagcaagtcaaat

SEQ ID NO: 3211502 - DNA, 25 bp, Homo sapien
aaatgttttaattatatgtccatac

SEQ ID NO: 3211503 - DNA, 25 bp, Homo sapien
aaatatatgcatcattttagctgga

SEQ ID NO: 3211504 - DNA, 25 bp, Homo sapien
gaaatgacacttctcgaaacttaag

SEQ ID NO: 3211505 - DNA, 25 bp, Homo sapien
gtatgaacagaaaaggatgcaataa

SEQ ID NO: 3211506 - DNA, 25 bp, Homo sapien
atgaacagaaaaggatgcaataaag

SEQ ID NO: 3211507 - DNA, 25 bp, Homo sapien
tgtatgaacagaaaaggatgcaata

SEQ ID NO: 3211508 - DNA, 25 bp, Homo sapien
ctgtatgaacagaaaaggatgcaat

SEQ ID NO: 3211509 - DNA, 25 bp, Homo sapien
tcagcaggagtcacataaccagagg

SEQ ID NO: 3211510 - DNA, 25 bp, Homo sapien
gaataacgttgatgccaatgctcct

SEQ ID NO: 3211511 - DNA, 25 bp, Homo sapien
tgtgccaagcaacataaagcctggt

SEQ ID NO: 3211512 - DNA, 25 bp, Homo sapien
gtattcattcaaccacagtgcccag

SEQ ID NO: 3211513 - DNA, 25 bp, Homo sapien
tccaagcccctgtcaagaagtgata

SEQ ID NO: 3211514 - DNA, 25 bp, Homo sapien
tgaagggacacaataacctgcagcc

SEQ ID NO: 3211515 - DNA, 25 bp, Homo sapien
ttatatatcaaaggcgaggtcaggg

SEQ ID NO: 3211516 - DNA, 25 bp, Homo sapien
gagaacatgtatgctccacttggag

SEQ ID NO: 3211517 - DNA, 25 bp, Homo sapien
ggaggatcatctgctcggaggacaa

SEQ ID NO: 3211518 - DNA, 25 bp, Homo sapien
gaggacaaaggtcagtgcaatcata

SEQ ID NO: 3211519 - DNA, 25 bp, Homo sapien
agtgcaatcataggcgtgtctgccc

SEQ ID NO: 3211520 - DNA, 25 bp, Homo sapien
tctgaatctaagagctagccagtac

SEQ ID NO: 3211521 - DNA, 25 bp, Homo sapien
tccacaatggtcaggggcaagctta

SEQ ID NO: 3211522 - DNA, 25 bp, Homo sapien
caagcttagcgaagacaggcagaga

SEQ ID NO: 3211523 - DNA, 25 bp, Homo sapien
aatggtcaggggcaagcttagcgaa

SEQ ID NO: 3211524 - DNA, 25 bp, Homo sapien
tcaggggcaagcttagcgaagacag

SEQ ID NO: 3211525 - DNA, 25 bp, Homo sapien
cctgccactcttaggtggcatctac

SEQ ID NO: 3211526 - DNA, 25 bp, Homo sapien
tcagaccccagaggtcaggactaac

SEQ ID NO: 3211527 - DNA, 25 bp, Homo sapien
tcagttaaaccacacaaaagctggc

SEQ ID NO: 3211528 - DNA, 25 bp, Homo sapien
agttaaaccacacaaaagctggctt

SEQ ID NO: 3211529 - DNA, 25 bp, Homo sapien
cagttaaaccacacaaaagctggct

SEQ ID NO: 3211530 - DNA, 25 bp, Homo sapien
cactacactcaagtctgggcgatgg

SEQ ID NO: 3211531 - DNA, 25 bp, Homo sapien
ctacactcaagtctgggcgatggga

SEQ ID NO: 3211532 - DNA, 25 bp, Homo sapien
acactcaagtctgggcgatgggagt

SEQ ID NO: 3211533 - DNA, 25 bp, Homo sapien
ctgggcgatgggagtgagactctgt

SEQ ID NO: 3211534 - DNA, 25 bp, Homo sapien
agtaatcatcaataagctccttcgc

SEQ ID NO: 3211535 - DNA, 25 bp, Homo sapien
tggactccaaaattatgcatctgtg

SEQ ID NO: 3211536 - DNA, 25 bp, Homo sapien
cctgaacaagggatataattgtccc

SEQ ID NO: 3211537 - DNA, 25 bp, Homo sapien
gaacaccctactttatttctatgga

SEQ ID NO: 3211538 - DNA, 25 bp, Homo sapien
tacaatagtcacaacaaggtcgctg

SEQ ID NO: 3211539 - DNA, 25 bp, Homo sapien
catgctgttggaaaactgtcactca

SEQ ID NO: 3211540 - DNA, 25 bp, Homo sapien
catggtgcaccaagagaattacaat

SEQ ID NO: 3211541 - DNA, 25 bp, Homo sapien
gacacacagttgctacaaaccatca

SEQ ID NO: 3211542 - DNA, 25 bp, Homo sapien
caacagaaaccagatagctagctaa

SEQ ID NO: 3211543 - DNA, 25 bp, Homo sapien
gctgagtagatttccctccccagtg

SEQ ID NO: 3211544 - DNA, 25 bp, Homo sapien
cattatctctacgtgtgtctgtgag

SEQ ID NO: 3211545 - DNA, 25 bp, Homo sapien
ggtattgagtccagtactcagtagt

SEQ ID NO: 3211546 - DNA, 25 bp, Homo sapien
ccaggcagagggtggtacaagccca

SEQ ID NO: 3211547 - DNA, 25 bp, Homo sapien
acaggccaccgtgctggcaccatgg

SEQ ID NO: 3211548 - DNA, 25 bp, Homo sapien
catgtcatcacaggccaccgtgctg

SEQ ID NO: 3211549 - DNA, 25 bp, Homo sapien
ctggaatcttgtcacctggtgcata

SEQ ID NO: 3211550 - DNA, 25 bp, Homo sapien
caaactggaaggtccatgggggctc

SEQ ID NO: 3211551 - DNA, 25 bp, Homo sapien
tctctctaagcctctctggtacata

SEQ ID NO: 3211552 - DNA, 25 bp, Homo sapien
gggctcctcggagtctctctaagcc

SEQ ID NO: 3211553 - DNA, 25 bp, Homo sapien
gcttctgactgggacaaacacaaac

SEQ ID NO: 3211554 - DNA, 25 bp, Homo sapien
atggaggtagaaacacccctggtgg

SEQ ID NO: 3211555 - DNA, 25 bp, Homo sapien
gcggggcatggaggtagaaacaccc

SEQ ID NO: 3211556 - DNA, 25 bp, Homo sapien
gggcatggaggtagaaacacccctg

SEQ ID NO: 3211557 - DNA, 25 bp, Homo sapien
gcatggaggtagaaacacccctggt

SEQ ID NO: 3211558 - DNA, 25 bp, Homo sapien
tctgcctacacttcgtggcatctga

SEQ ID NO: 3211559 - DNA, 25 bp, Homo sapien
caagcttggtccaaggtaagctgtg

SEQ ID NO: 3211560 - DNA, 25 bp, Homo sapien
atagttctctgcctacacttcgtgg

SEQ ID NO: 3211561 - DNA, 25 bp, Homo sapien
actgccacttccaagcttggtccaa

SEQ ID NO: 3211562 - DNA, 25 bp, Homo sapien
gatcggacactcttcgagcctgaag

SEQ ID NO: 3211563 - DNA, 25 bp, Homo sapien
gaaatcccatgaaatcacgactgct

SEQ ID NO: 3211564 - DNA, 25 bp, Homo sapien
gaatgagaacgaaagtgccagcgat

SEQ ID NO: 3211565 - DNA, 25 bp, Homo sapien
tcagagtgggtgactgcatcagcct

SEQ ID NO: 3211566 - DNA, 25 bp, Homo sapien
cggtcgtcagaatgggcgctgctat

SEQ ID NO: 3211567 - DNA, 25 bp, Homo sapien
gatgattcaatccttgcccagtaaa

SEQ ID NO: 3211568 - DNA, 25 bp, Homo sapien
aatctgggctccatgcggtcgtcag

SEQ ID NO: 3211569 - DNA, 25 bp, Homo sapien
gaaggtttggcatcagcaatctggg

SEQ ID NO: 3211570 - DNA, 25 bp, Homo sapien
caaagacagcgcagagtgagtgaga

SEQ ID NO: 3211571 - DNA, 25 bp, Homo sapien
agtgagtgagagcattttccccgca

SEQ ID NO: 3211572 - DNA, 25 bp, Homo sapien
tccccgcatcgattgttacaaacag

SEQ ID NO: 3211573 - DNA, 25 bp, Homo sapien
ggtccaaagacagcgcagagtgagt

SEQ ID NO: 3211574 - DNA, 25 bp, Homo sapien
tgcatccccaggaaactttgtcacc

SEQ ID NO: 3211575 - DNA, 25 bp, Homo sapien
cacccaaatactggcaggaacagga

SEQ ID NO: 3211576 - DNA, 25 bp, Homo sapien
ggaacaggatctaggttgtcctcct

SEQ ID NO: 3211577 - DNA, 25 bp, Homo sapien
gctgtggaagagtgatgggggtcct

SEQ ID NO: 3211578 - DNA, 25 bp, Homo sapien
tccagggacggctctagggtgggat

SEQ ID NO: 3211579 - DNA, 25 bp, Homo sapien
tctctgaggagactctcttgagggc

SEQ ID NO: 3211580 - DNA, 25 bp, Homo sapien
tcttgagggccacgagcctctccag

SEQ ID NO: 3211581 - DNA, 25 bp, Homo sapien
gttgctggttgatgctgccttcagt

SEQ ID NO: 3211582 - DNA, 25 bp, Homo sapien
gacaggcaagtttccagtgaatcaa

SEQ ID NO: 3211583 - DNA, 25 bp, Homo sapien
tgaggacaggcaagtttccagtgaa

SEQ ID NO: 3211584 - DNA, 25 bp, Homo sapien
ccatctgaggacaggcaagtttcca

SEQ ID NO: 3211585 - DNA, 25 bp, Homo sapien
aagtttccagtgaatcaaagctggg

SEQ ID NO: 3211586 - DNA, 25 bp, Homo sapien
gaaagtttcagaggaccagaggcac

SEQ ID NO: 3211587 - DNA, 25 bp, Homo sapien
tcacggtcctgttagaggccttcgt

SEQ ID NO: 3211588 - DNA, 25 bp, Homo sapien
ggatgcctctgactggtcaccagca

SEQ ID NO: 3211589 - DNA, 25 bp, Homo sapien
ggtagcccagaagtgccagaggtct

SEQ ID NO: 3211590 - DNA, 25 bp, Homo sapien
ggttggtctgccgagggtatcccac

SEQ ID NO: 3211591 - DNA, 25 bp, Homo sapien
tactgggtgtgcaggtagcgaaggc

SEQ ID NO: 3211592 - DNA, 25 bp, Homo sapien
aagacacttctgtctgctggtggca

SEQ ID NO: 3211593 - DNA, 25 bp, Homo sapien
tggctgacaggcaaagcagaattcc

SEQ ID NO: 3211594 - DNA, 25 bp, Homo sapien
ctggcaacagcatccgaagcgggct

SEQ ID NO: 3211595 - DNA, 25 bp, Homo sapien
ggcaacagcatccgaagcgggctca

SEQ ID NO: 3211596 - DNA, 25 bp, Homo sapien
gcaacagcatccgaagcgggctcac

SEQ ID NO: 3211597 - DNA, 25 bp, Homo sapien
tggcaacagcatccgaagcgggctc

SEQ ID NO: 3211598 - DNA, 25 bp, Homo sapien
ggagtgatccagttgtactctgctt

SEQ ID NO: 3211599 - DNA, 25 bp, Homo sapien
ggactgttttcttgctacccacaga

SEQ ID NO: 3211600 - DNA, 25 bp, Homo sapien
ttcttgctacccacagaaggagtga

SEQ ID NO: 3211601 - DNA, 25 bp, Homo sapien
tacccacagaaggagtgatccagtt

SEQ ID NO: 3211602 - DNA, 25 bp, Homo sapien
ccacaacagaggaagcttagtggcc

SEQ ID NO: 3211603 - DNA, 25 bp, Homo sapien
tccactaactgcacattgacagagg

SEQ ID NO: 3211604 - DNA, 25 bp, Homo sapien
cagaggcacaatgagtccctgtctt

SEQ ID NO: 3211605 - DNA, 25 bp, Homo sapien
ggaagcccaattacagatgttaaga

SEQ ID NO: 3211606 - DNA, 25 bp, Homo sapien
tgaccaatgagctaaagcgaggtgt

SEQ ID NO: 3211607 - DNA, 25 bp, Homo sapien
cagatgaaagctctccactaatggg

SEQ ID NO: 3211608 - DNA, 25 bp, Homo sapien
agctacctagcccagaatccaggag

SEQ ID NO: 3211609 - DNA, 25 bp, Homo sapien
gcatacatggtgcatctggctctga

SEQ ID NO: 3211610 - DNA, 25 bp, Homo sapien
gtagagattgcatttcatgaagctc

SEQ ID NO: 3211611 - DNA, 25 bp, Homo sapien
gcctctggggtagagattgcatttc

SEQ ID NO: 3211612 - DNA, 25 bp, Homo sapien
gagagagaaggcaccctgtcactaa

SEQ ID NO: 3211613 - DNA, 25 bp, Homo sapien
ggcaccctgtcactaagcctctggg

SEQ ID NO: 3211614 - DNA, 25 bp, Homo sapien
cactccccgatccatcctttctcct

SEQ ID NO: 3211615 - DNA, 25 bp, Homo sapien
tatgcttcctctagatgcatctgcc

SEQ ID NO: 3211616 - DNA, 25 bp, Homo sapien
gcttcctctagatgcatctgccact

SEQ ID NO: 3211617 - DNA, 25 bp, Homo sapien
tctttatgcttcctctagatgcatc

SEQ ID NO: 3211618 - DNA, 25 bp, Homo sapien
gtacgctgctccactggtctctcag

SEQ ID NO: 3211619 - DNA, 25 bp, Homo sapien
gggttaatggtacgctgctccactg

SEQ ID NO: 3211620 - DNA, 25 bp, Homo sapien
taatggtacgctgctccactggtct

SEQ ID NO: 3211621 - DNA, 25 bp, Homo sapien
atgggttaatggtacgctgctccac

SEQ ID NO: 3211622 - DNA, 25 bp, Homo sapien
ggatgtgggacaatgagtcatttgt

SEQ ID NO: 3211623 - DNA, 25 bp, Homo sapien
tggaggatgtgggacaatgagtcat

SEQ ID NO: 3211624 - DNA, 25 bp, Homo sapien
tgtgggacaatgagtcatttgtgcc

SEQ ID NO: 3211625 - DNA, 25 bp, Homo sapien
gggacaatgagtcatttgtgcctct

SEQ ID NO: 3211626 - DNA, 25 bp, Homo sapien
caatggaagagagccgttggttgta

SEQ ID NO: 3211627 - DNA, 25 bp, Homo sapien
ggctgccatacgtctttaaaaagaa

SEQ ID NO: 3211628 - DNA, 25 bp, Homo sapien
taaaatgtcgcatgccttgactgga

SEQ ID NO: 3211629 - DNA, 25 bp, Homo sapien
tgcagggaagtgtgtcgaatagaac

SEQ ID NO: 3211630 - DNA, 25 bp, Homo sapien
agcatatcgcatttcttccacagga

SEQ ID NO: 3211631 - DNA, 25 bp, Homo sapien
cagtgagacctccttcacacgtgat

SEQ ID NO: 3211632 - DNA, 25 bp, Homo sapien
tctgaaagcatatcgcatttcttcc

SEQ ID NO: 3211633 - DNA, 25 bp, Homo sapien
ccttcacacgtgatctgaaagcata

SEQ ID NO: 3211634 - DNA, 25 bp, Homo sapien
catttacagagcctgtttccgagga

SEQ ID NO: 3211635 - DNA, 25 bp, Homo sapien
tgatgacacctacacagggctgttt

SEQ ID NO: 3211636 - DNA, 25 bp, Homo sapien
gagaggtgaactgattgtagcccca

SEQ ID NO: 3211637 - DNA, 25 bp, Homo sapien
agtccagcgcacagcagatgctcag

SEQ ID NO: 3211638 - DNA, 25 bp, Homo sapien
aacccagaacggagtccagtaagag

SEQ ID NO: 3211639 - DNA, 25 bp, Homo sapien
ttccgctgacaggtcgagcaggagc

SEQ ID NO: 3211640 - DNA, 25 bp, Homo sapien
actggtccagcatatggcgccactt

SEQ ID NO: 3211641 - DNA, 25 bp, Homo sapien
tgtcccacgttctctgctgccttag

SEQ ID NO: 3211642 - DNA, 25 bp, Homo sapien
ggccgcacagaagggctcccaggag

SEQ ID NO: 3211643 - DNA, 25 bp, Homo sapien
caatctggcaaaagaagtccgcaaa

SEQ ID NO: 3211644 - DNA, 25 bp, Homo sapien
cctgtatagatgaactgagcacggg

SEQ ID NO: 3211645 - DNA, 25 bp, Homo sapien
caaattccccggatgcatcttttct

SEQ ID NO: 3211646 - DNA, 25 bp, Homo sapien
ctggcggaggtgtgtggtggaaact

SEQ ID NO: 3211647 - DNA, 25 bp, Homo sapien
tgtggtggaaacttctaagcaatcc

SEQ ID NO: 3211648 - DNA, 25 bp, Homo sapien
aggtgtgtggtggaaacttctaagc

SEQ ID NO: 3211649 - DNA, 25 bp, Homo sapien
gcggaggtgtgtggtggaaacttct

SEQ ID NO: 3211650 - DNA, 25 bp, Homo sapien
atcagcacgggaccgcctgcatctt

SEQ ID NO: 3211651 - DNA, 25 bp, Homo sapien
tctgggtctagacagccaagcccac

SEQ ID NO: 3211652 - DNA, 25 bp, Homo sapien
tccagggattcccttgatcagcacg

SEQ ID NO: 3211653 - DNA, 25 bp, Homo sapien
cctgagggtgtagtggtggttccca

SEQ ID NO: 3211654 - DNA, 25 bp, Homo sapien
catcacacttggcactaagcagatc

SEQ ID NO: 3211655 - DNA, 25 bp, Homo sapien
tcaggctgcttgacagatgggaaat

SEQ ID NO: 3211656 - DNA, 25 bp, Homo sapien
acacttggcactaagcagatctcga

SEQ ID NO: 3211657 - DNA, 25 bp, Homo sapien
tccagcaggcaagtgtccacatcac

SEQ ID NO: 3211658 - DNA, 25 bp, Homo sapien
tccaaatcacctgaaacgggctctc

SEQ ID NO: 3211659 - DNA, 25 bp, Homo sapien
cggtgtggttgtcaacacgagtgca

SEQ ID NO: 3211660 - DNA, 25 bp, Homo sapien
acttctgaactctccggcatctcaa

SEQ ID NO: 3211661 - DNA, 25 bp, Homo sapien
ggatcatagggtcctcatccaaatc

SEQ ID NO: 3211662 - DNA, 25 bp, Homo sapien
gaagggagagatcatttgtccacct

SEQ ID NO: 3211663 - DNA, 25 bp, Homo sapien
aagtgttttgcatgccaggccctct

SEQ ID NO: 3211664 - DNA, 25 bp, Homo sapien
tatttgaaatcacagggacgtcctg

SEQ ID NO: 3211665 - DNA, 25 bp, Homo sapien
agtttgacaccatactgcccctgga

SEQ ID NO: 3211666 - DNA, 25 bp, Homo sapien
ttctcaactctccaagttcagtcct

SEQ ID NO: 3211667 - DNA, 25 bp, Homo sapien
tccaaagacggtccttctcaccagt

SEQ ID NO: 3211668 - DNA, 25 bp, Homo sapien
tcagtccctctcaccactctaaact

SEQ ID NO: 3211669 - DNA, 25 bp, Homo sapien
tcaactctccaagttcagtccttct

SEQ ID NO: 3211670 - DNA, 25 bp, Homo sapien
tcaaatatcctgtgacctttttctt

SEQ ID NO: 3211671 - DNA, 25 bp, Homo sapien
tcttccctttgccagatttcttgaa

SEQ ID NO: 3211672 - DNA, 25 bp, Homo sapien
gccagatttcttgaaaacacagtcc

SEQ ID NO: 3211673 - DNA, 25 bp, Homo sapien
ccctttgccagatttcttgaaaaca

SEQ ID NO: 3211674 - DNA, 25 bp, Homo sapien
ctttttgtcgataagactgtagagc

SEQ ID NO: 3211675 - DNA, 25 bp, Homo sapien
actcatggactttttgtcgataaga

SEQ ID NO: 3211676 - DNA, 25 bp, Homo sapien
taagactgtagagcagtgttactga

SEQ ID NO: 3211677 - DNA, 25 bp, Homo sapien
cagtgttactgagagcaatgagcca

SEQ ID NO: 3211678 - DNA, 25 bp, Homo sapien
tatcagcagcagtgtactcctcatg

SEQ ID NO: 3211679 - DNA, 25 bp, Homo sapien
tctgaaaagaggcaacctgttgatc

SEQ ID NO: 3211680 - DNA, 25 bp, Homo sapien
tccgaagatacatcaaggattggct

SEQ ID NO: 3211681 - DNA, 25 bp, Homo sapien
gaagcctccttttggtgctatcagc

SEQ ID NO: 3211682 - DNA, 25 bp, Homo sapien
tctcttgaggcctcccaatggtgtg

SEQ ID NO: 3211683 - DNA, 25 bp, Homo sapien
gaccctcagatgatgtgcacatgtg

SEQ ID NO: 3211684 - DNA, 25 bp, Homo sapien
agcgccggtcgcagcagttatatca

SEQ ID NO: 3211685 - DNA, 25 bp, Homo sapien
aatggtgcacatgggcgctagatgc

SEQ ID NO: 3211686 - DNA, 25 bp, Homo sapien
tgaaagtgtggtaatctcagaccct

SEQ ID NO: 3211687 - DNA, 25 bp, Homo sapien
gcaggccgacttgtcatcttgaaag

SEQ ID NO: 3211688 - DNA, 25 bp, Homo sapien
tctttcccaatagtcgtaacacagg

SEQ ID NO: 3211689 - DNA, 25 bp, Homo sapien
ccaggatccaggactcttgagcctt

SEQ ID NO: 3211690 - DNA, 25 bp, Homo sapien
tctgcacattcaccttgccagtctg

SEQ ID NO: 3211691 - DNA, 25 bp, Homo sapien
gcacattcaccttgccagtctggtg

SEQ ID NO: 3211692 - DNA, 25 bp, Homo sapien
tgtcagtatttgaattagtagctct

SEQ ID NO: 3211693 - DNA, 25 bp, Homo sapien
gcccaatctgcacattcaccttgcc

SEQ ID NO: 3211694 - DNA, 25 bp, Homo sapien
tattgcttcaaagtagataacggac

SEQ ID NO: 3211695 - DNA, 25 bp, Homo sapien
agacgatgagtagttcctgcctaga

SEQ ID NO: 3211696 - DNA, 25 bp, Homo sapien
cctgcctagaaagggaagtaatcat

SEQ ID NO: 3211697 - DNA, 25 bp, Homo sapien
taacggacttatggtagagcatggt

SEQ ID NO: 3211698 - DNA, 25 bp, Homo sapien
ggtcaataccctgaaaggctctgtt

SEQ ID NO: 3211699 - DNA, 25 bp, Homo sapien
agccttttaattgtgagcctccatg

SEQ ID NO: 3211700 - DNA, 25 bp, Homo sapien
ctgggcttgggtcaataccctgaaa

SEQ ID NO: 3211701 - DNA, 25 bp, Homo sapien
ttttaattgtgagcctccatgatgc

SEQ ID NO: 3211702 - DNA, 25 bp, Homo sapien
gaagtggacattgaggtcagaagtt

SEQ ID NO: 3211703 - DNA, 25 bp, Homo sapien
ttaggctagttcagacactctccac

SEQ ID NO: 3211704 - DNA, 25 bp, Homo sapien
cacaggaagtggacattgaggtcag

SEQ ID NO: 3211705 - DNA, 25 bp, Homo sapien
taggctagttcagacactctccaca

SEQ ID NO: 3211706 - DNA, 25 bp, Homo sapien
cgtagtatccaagcccttagccaaa

SEQ ID NO: 3211707 - DNA, 25 bp, Homo sapien
tctcacttatcttctttcccgtagt

SEQ ID NO: 3211708 - DNA, 25 bp, Homo sapien
tgacaaatgtttgtccttaagggaa

SEQ ID NO: 3211709 - DNA, 25 bp, Homo sapien
ggaacactagaggttaaatcaccaa

SEQ ID NO: 3211710 - DNA, 25 bp, Homo sapien
gctcataagacttgtgccactgaca

SEQ ID NO: 3211711 - DNA, 25 bp, Homo sapien
cataagacttgtgccactgacagca

SEQ ID NO: 3211712 - DNA, 25 bp, Homo sapien
tgtagctcataagacttgtgccact

SEQ ID NO: 3211713 - DNA, 25 bp, Homo sapien
attgtagctcataagacttgtgcca

SEQ ID NO: 3211714 - DNA, 25 bp, Homo sapien
gagctgtagttggaacaatatgtaa

SEQ ID NO: 3211715 - DNA, 25 bp, Homo sapien
ctgagagctgtagttggaacaatat

SEQ ID NO: 3211716 - DNA, 25 bp, Homo sapien
gagagctgtagttggaacaatatgt

SEQ ID NO: 3211717 - DNA, 25 bp, Homo sapien
tgagagctgtagttggaacaatatg

SEQ ID NO: 3211718 - DNA, 25 bp, Homo sapien
tttgaattagtcacaccatgagtat

SEQ ID NO: 3211719 - DNA, 25 bp, Homo sapien
tgaattagtcacaccatgagtatga

SEQ ID NO: 3211720 - DNA, 25 bp, Homo sapien
aattagtcacaccatgagtatgatg

SEQ ID NO: 3211721 - DNA, 25 bp, Homo sapien
ttagtcacaccatgagtatgatgtg

SEQ ID NO: 3211722 - DNA, 25 bp, Homo sapien
tcacagtaaattatgtcataagaat

SEQ ID NO: 3211723 - DNA, 25 bp, Homo sapien
tgtcataagaattaaacactgtatt

SEQ ID NO: 3211724 - DNA, 25 bp, Homo sapien
tttaaaagccttgctggccaggcgc

SEQ ID NO: 3211725 - DNA, 25 bp, Homo sapien
ttaaaatcacagtaaattatgtcat

SEQ ID NO: 3211726 - DNA, 25 bp, Homo sapien
ggtctgcacaggaggcctacctaat

SEQ ID NO: 3211727 - DNA, 25 bp, Homo sapien
ctaatatgctgtctgccctaagggc

SEQ ID NO: 3211728 - DNA, 25 bp, Homo sapien
gctagctctagctgccacaggttga

SEQ ID NO: 3211729 - DNA, 25 bp, Homo sapien
tgggcaccactgcttggcaggagct

SEQ ID NO: 3211730 - DNA, 25 bp, Homo sapien
tccaaactatgtgaccctgttttgc

SEQ ID NO: 3211731 - DNA, 25 bp, Homo sapien
caaactatgtgaccctgttttgctg

SEQ ID NO: 3211732 - DNA, 25 bp, Homo sapien
cctgttttgctgtgaccacaaggtc

SEQ ID NO: 3211733 - DNA, 25 bp, Homo sapien
ctgttttgctgtgaccacaaggtcc

SEQ ID NO: 3211734 - DNA, 25 bp, Homo sapien
catgctagactctttagaaggaccc

SEQ ID NO: 3211735 - DNA, 25 bp, Homo sapien
aaggaccctgcatggtcctctggcc

SEQ ID NO: 3211736 - DNA, 25 bp, Homo sapien
catccttatgactgtcatcatcata

SEQ ID NO: 3211737 - DNA, 25 bp, Homo sapien
tcatcatccttatgactgtcatcat

SEQ ID NO: 3211738 - DNA, 25 bp, Homo sapien
tgtgtggttaaggtactcaaactgg

SEQ ID NO: 3211739 - DNA, 25 bp, Homo sapien
ttgaaaagcctctcctgtgtggtta

SEQ ID NO: 3211740 - DNA, 25 bp, Homo sapien
gttggaaagttggctcttggaagta

SEQ ID NO: 3211741 - DNA, 25 bp, Homo sapien
ggctcttggaagtaataggttttca

SEQ ID NO: 3211742 - DNA, 25 bp, Homo sapien
ccacagatggcttagtgcctgaact

SEQ ID NO: 3211743 - DNA, 25 bp, Homo sapien
acagatggcttagtgcctgaactac

SEQ ID NO: 3211744 - DNA, 25 bp, Homo sapien
cacagatggcttagtgcctgaacta

SEQ ID NO: 3211745 - DNA, 25 bp, Homo sapien
taggcctttttaagtgtccagattg

SEQ ID NO: 3211746 - DNA, 25 bp, Homo sapien
gtgaggtagagggaacattgaatag

SEQ ID NO: 3211747 - DNA, 25 bp, Homo sapien
aggcctttttaagtgtccagattgg

SEQ ID NO: 3211748 - DNA, 25 bp, Homo sapien
acagagtgaggtagagggaacattg

SEQ ID NO: 3211749 - DNA, 25 bp, Homo sapien
gatatctaaagtaccatttgttgtc

SEQ ID NO: 3211750 - DNA, 25 bp, Homo sapien
gggtgacactgatatctaaagtacc

SEQ ID NO: 3211751 - DNA, 25 bp, Homo sapien
cactgatatctaaagtaccatttgt

SEQ ID NO: 3211752 - DNA, 25 bp, Homo sapien
ccaggggtgacactgatatctaaag

SEQ ID NO: 3211753 - DNA, 25 bp, Homo sapien
gagctaaactggagccgtccatagg

SEQ ID NO: 3211754 - DNA, 25 bp, Homo sapien
ggtaagtgctgcacctctgccggct

SEQ ID NO: 3211755 - DNA, 25 bp, Homo sapien
catggtcggaatagtgctggcgatc

SEQ ID NO: 3211756 - DNA, 25 bp, Homo sapien
gagaatgaggaaagactggttcatg

SEQ ID NO: 3211757 - DNA, 25 bp, Homo sapien
ctgcccgcggagtcatggcacagca

SEQ ID NO: 3211758 - DNA, 25 bp, Homo sapien
catggagatatgctccagaagggtg

SEQ ID NO: 3211759 - DNA, 25 bp, Homo sapien
tggcacagcaaaagagaggctctcc

SEQ ID NO: 3211760 - DNA, 25 bp, Homo sapien
tccatggagatatgctccagaaggg

SEQ ID NO: 3211761 - DNA, 25 bp, Homo sapien
cttccttgggttgtagcggacgccg

SEQ ID NO: 3211762 - DNA, 25 bp, Homo sapien
gaagcgccgtaatgtcccgaagaag

SEQ ID NO: 3211763 - DNA, 25 bp, Homo sapien
catacgtcagcgctagcgtcgtgga

SEQ ID NO: 3211764 - DNA, 25 bp, Homo sapien
gaagaagcgcgtctccaaacttgca

SEQ ID NO: 3211765 - DNA, 25 bp, Homo sapien
aaatctacaatagtgtaatgtccta

SEQ ID NO: 3211766 - DNA, 25 bp, Homo sapien
agctccattcatacaccactcactc

SEQ ID NO: 3211767 - DNA, 25 bp, Homo sapien
taaaatctacaatagtgtaatgtcc

SEQ ID NO: 3211768 - DNA, 25 bp, Homo sapien
gctccattcatacaccactcactca

SEQ ID NO: 3211769 - DNA, 25 bp, Homo sapien
gggtaattagtatactatccccaca

SEQ ID NO: 3211770 - DNA, 25 bp, Homo sapien
gagtgatatttggtatacgtataca

SEQ ID NO: 3211771 - DNA, 25 bp, Homo sapien
ttatagttaaccctattcgccctgc

SEQ ID NO: 3211772 - DNA, 25 bp, Homo sapien
ctattcgccctgcaatgcacagaac

SEQ ID NO: 3211773 - DNA, 25 bp, Homo sapien
catgaacgcagtccctcactgcaca

SEQ ID NO: 3211774 - DNA, 25 bp, Homo sapien
gaaaaccaacttcatgaatatggta

SEQ ID NO: 3211775 - DNA, 25 bp, Homo sapien
tgaacgcagtccctcactgcacaaa

SEQ ID NO: 3211776 - DNA, 25 bp, Homo sapien
ccttggaaaaccaacttcatgaata

SEQ ID NO: 3211777 - DNA, 25 bp, Homo sapien
tttgcatcccctaatggtttagttg

SEQ ID NO: 3211778 - DNA, 25 bp, Homo sapien
catttgcatcccctaatggtttagt

SEQ ID NO: 3211779 - DNA, 25 bp, Homo sapien
tccatttgcatcccctaatggttta

SEQ ID NO: 3211780 - DNA, 25 bp, Homo sapien
gcatcccctaatggtttagttgcag

SEQ ID NO: 3211781 - DNA, 25 bp, Homo sapien
ctagaagtcaaactttcctccatgc

SEQ ID NO: 3211782 - DNA, 25 bp, Homo sapien
gaagtcaaactttcctccatgctta

SEQ ID NO: 3211783 - DNA, 25 bp, Homo sapien
tagaagtcaaactttcctccatgct

SEQ ID NO: 3211784 - DNA, 25 bp, Homo sapien
aagtcaaactttcctccatgcttac

SEQ ID NO: 3211785 - DNA, 25 bp, Homo sapien
gtgactgtatgtatgaagtcatctc

SEQ ID NO: 3211786 - DNA, 25 bp, Homo sapien
agatgcttaatgcaggtctatcctc

SEQ ID NO: 3211787 - DNA, 25 bp, Homo sapien
actgtatgtatgaagtcatctcttc

SEQ ID NO: 3211788 - DNA, 25 bp, Homo sapien
aggtctatcctctgcacacattctc

SEQ ID NO: 3211789 - DNA, 25 bp, Homo sapien
gatggctggtttgtgcagccctttc

SEQ ID NO: 3211790 - DNA, 25 bp, Homo sapien
ttgaatttaacaattgtctgttgtc

SEQ ID NO: 3211791 - DNA, 25 bp, Homo sapien
tggctggtttgtgcagccctttccc

SEQ ID NO: 3211792 - DNA, 25 bp, Homo sapien
gctggtttgtgcagccctttcccca

SEQ ID NO: 3211793 - DNA, 25 bp, Homo sapien
caatgtcctgcaaaccagcttcctg

SEQ ID NO: 3211794 - DNA, 25 bp, Homo sapien
aatgtcctgcaaaccagcttcctgg

SEQ ID NO: 3211795 - DNA, 25 bp, Homo sapien
ggccctcctgctgcaatgtcctgca

SEQ ID NO: 3211796 - DNA, 25 bp, Homo sapien
tgcaatgtcctgcaaaccagcttcc

SEQ ID NO: 3211797 - DNA, 25 bp, Homo sapien
ttcttcatttgtctggcaaccgtag

SEQ ID NO: 3211798 - DNA, 25 bp, Homo sapien
tcttgccaaataacggtccctatca

SEQ ID NO: 3211799 - DNA, 25 bp, Homo sapien
caaccgtagtctcttgccaaataac

SEQ ID NO: 3211800 - DNA, 25 bp, Homo sapien
tttgtctggcaaccgtagtctcttg

SEQ ID NO: 3211801 - DNA, 25 bp, Homo sapien
ggaccacatagttagtcatttctat

SEQ ID NO: 3211802 - DNA, 25 bp, Homo sapien
gtcatttctatagtgaccctatgag

SEQ ID NO: 3211803 - DNA, 25 bp, Homo sapien
ctagtctggaccacatagttagtca

SEQ ID NO: 3211804 - DNA, 25 bp, Homo sapien
tagttagtcatttctatagtgaccc

SEQ ID NO: 3211805 - DNA, 25 bp, Homo sapien
ggagtgtccagaataccaacatcgt

SEQ ID NO: 3211806 - DNA, 25 bp, Homo sapien
cccatttcggttttgcccacaggca

SEQ ID NO: 3211807 - DNA, 25 bp, Homo sapien
tgtggaagcctctctccaaggaaga

SEQ ID NO: 3211808 - DNA, 25 bp, Homo sapien
gtgatatcaacaaaacccatttcgg

SEQ ID NO: 3211809 - DNA, 25 bp, Homo sapien
acgagcgcgcgacgggctctgtcca

SEQ ID NO: 3211810 - DNA, 25 bp, Homo sapien
ctcagccgggcggaatagcggtttc

SEQ ID NO: 3211811 - DNA, 25 bp, Homo sapien
gaaggcggcagcaacgagcgcgcga

SEQ ID NO: 3211812 - DNA, 25 bp, Homo sapien
cggaatagcggtttcaagatgggac

SEQ ID NO: 3211813 - DNA, 25 bp, Homo sapien
cgggggttgaccgggagcaggtgca

SEQ ID NO: 3211814 - DNA, 25 bp, Homo sapien
gcaggaacccgcgggtggcccaatc

SEQ ID NO: 3211815 - DNA, 25 bp, Homo sapien
gctgtcagtctgaacggatgcctga

SEQ ID NO: 3211816 - DNA, 25 bp, Homo sapien
gctgtgcgaagttgagctcacccgc

SEQ ID NO: 3211817 - DNA, 25 bp, Homo sapien
tgtacgcctgatctcggctacgcgc

SEQ ID NO: 3211818 - DNA, 25 bp, Homo sapien
gctggtccgtagaggcactcactgg

SEQ ID NO: 3211819 - DNA, 25 bp, Homo sapien
tgcggcatgctaaacgcctgcttgc

SEQ ID NO: 3211820 - DNA, 25 bp, Homo sapien
cgcctgcttgctgttcagggacatc

SEQ ID NO: 3211821 - DNA, 25 bp, Homo sapien
tgctaaacgcctgcttgctgttcag

SEQ ID NO: 3211822 - DNA, 25 bp, Homo sapien
cgccgtgcggcatgctaaacgcctg

SEQ ID NO: 3211823 - DNA, 25 bp, Homo sapien
ttggaagacaggctctccgcatagc

SEQ ID NO: 3211824 - DNA, 25 bp, Homo sapien
ggccgagggcgcgatgggagccgag

SEQ ID NO: 3211825 - DNA, 25 bp, Homo sapien
gaagacaggctctccgcatagcctc

SEQ ID NO: 3211826 - DNA, 25 bp, Homo sapien
gagccgaggagcccggcgaggtgct

SEQ ID NO: 3211827 - DNA, 25 bp, Homo sapien
aattgtacgccctctctccggaagc

SEQ ID NO: 3211828 - DNA, 25 bp, Homo sapien
ggcccagggctcgacaccgtcgccg

SEQ ID NO: 3211829 - DNA, 25 bp, Homo sapien
ggaattgtacgccctctctccggaa

SEQ ID NO: 3211830 - DNA, 25 bp, Homo sapien
cagcagggaattgtacgccctctct

SEQ ID NO: 3211831 - DNA, 25 bp, Homo sapien
ctgcaattgtaagtagaaggcacac

SEQ ID NO: 3211832 - DNA, 25 bp, Homo sapien
tgcaattgtaagtagaaggcacaca

SEQ ID NO: 3211833 - DNA, 25 bp, Homo sapien
gcaattgtaagtagaaggcacacat

SEQ ID NO: 3211834 - DNA, 25 bp, Homo sapien
tcatccagcccgccgaatatattgc

SEQ ID NO: 3211835 - DNA, 25 bp, Homo sapien
cgacgtgcacgggatggtattcata

SEQ ID NO: 3211836 - DNA, 25 bp, Homo sapien
ggagacgatgtccacggctgccaga

SEQ ID NO: 3211837 - DNA, 25 bp, Homo sapien
ctcttgctctgggagacgatgtcca

SEQ ID NO: 3211838 - DNA, 25 bp, Homo sapien
gtggtgcgtgcccgccaacgcggaa

SEQ ID NO: 3211839 - DNA, 25 bp, Homo sapien
cgtgcccgccaacgcggaagggtgc

SEQ ID NO: 3211840 - DNA, 25 bp, Homo sapien
gtgcgtgcccgccaacgcggaaggg

SEQ ID NO: 3211841 - DNA, 25 bp, Homo sapien
tgcgtgcccgccaacgcggaagggt

SEQ ID NO: 3211842 - DNA, 25 bp, Homo sapien
gggccagcccgggactcaggtgctc

SEQ ID NO: 3211843 - DNA, 25 bp, Homo sapien
agcccgggactcaggtgctccagca

SEQ ID NO: 3211844 - DNA, 25 bp, Homo sapien
cgggactcaggtgctccagcagctc

SEQ ID NO: 3211845 - DNA, 25 bp, Homo sapien
ctcaggtgctccagcagctcgccct

SEQ ID NO: 3211846 - DNA, 25 bp, Homo sapien
gaatggcaaagtaggcttcgagcga

SEQ ID NO: 3211847 - DNA, 25 bp, Homo sapien
gagcttctcgcggtgggacttctcg

SEQ ID NO: 3211848 - DNA, 25 bp, Homo sapien
atcttttcagaggagggccgaggct

SEQ ID NO: 3211849 - DNA, 25 bp, Homo sapien
cagtgtgagggactcgaacctgcag

SEQ ID NO: 3211850 - DNA, 25 bp, Homo sapien
taaatgccggcggaatatttcattc

SEQ ID NO: 3211851 - DNA, 25 bp, Homo sapien
ctaaatgccggcggaatatttcatt

SEQ ID NO: 3211852 - DNA, 25 bp, Homo sapien
aatgccggcggaatatttcattctt

SEQ ID NO: 3211853 - DNA, 25 bp, Homo sapien
aaatgccggcggaatatttcattct

SEQ ID NO: 3211854 - DNA, 25 bp, Homo sapien
cctcttcagtcctcgatttgtcgag

SEQ ID NO: 3211855 - DNA, 25 bp, Homo sapien
tagtcgccaaaagtgaaaagaggca

SEQ ID NO: 3211856 - DNA, 25 bp, Homo sapien
gcttgggctcagttgttcgctcgtt

SEQ ID NO: 3211857 - DNA, 25 bp, Homo sapien
tactggaattgtttctagtcgccaa

SEQ ID NO: 3211858 - DNA, 25 bp, Homo sapien
tatacaaatgggtcaaaaggaacac

SEQ ID NO: 3211859 - DNA, 25 bp, Homo sapien
gaaaccaggccatatacagaactca

SEQ ID NO: 3211860 - DNA, 25 bp, Homo sapien
gtgaacacagcaggcgcaactcttt

SEQ ID NO: 3211861 - DNA, 25 bp, Homo sapien
tctaaaatctgaagggcaaacacca

SEQ ID NO: 3211862 - DNA, 25 bp, Homo sapien
tagtatctctgcaactctcattagt

SEQ ID NO: 3211863 - DNA, 25 bp, Homo sapien
tgagcttgctctaagaatgaaaata

SEQ ID NO: 3211864 - DNA, 25 bp, Homo sapien
atctctagtatctctgcaactctca

SEQ ID NO: 3211865 - DNA, 25 bp, Homo sapien
ttcagcttttcccatacaacacaca

SEQ ID NO: 3211866 - DNA, 25 bp, Homo sapien
cagtcgactgtagatatgtgtgcat

SEQ ID NO: 3211867 - DNA, 25 bp, Homo sapien
gtgcatgtgtgttcggggagcccat

SEQ ID NO: 3211868 - DNA, 25 bp, Homo sapien
aatggggctgtgcattcttataaca

SEQ ID NO: 3211869 - DNA, 25 bp, Homo sapien
ctgaaaatggggctgtgcattctta

SEQ ID NO: 3211870 - DNA, 25 bp, Homo sapien
gaaaatggggctgtgcattcttata

SEQ ID NO: 3211871 - DNA, 25 bp, Homo sapien
aaatggggctgtgcattcttataac

SEQ ID NO: 3211872 - DNA, 25 bp, Homo sapien
ctctccgcaaagaagtgacctagat

SEQ ID NO: 3211873 - DNA, 25 bp, Homo sapien
caaagaagtgacctagattgggaaa

SEQ ID NO: 3211874 - DNA, 25 bp, Homo sapien
tccgcaaagaagtgacctagattgg

SEQ ID NO: 3211875 - DNA, 25 bp, Homo sapien
gaagtgacctagattgggaaaagcc

SEQ ID NO: 3211876 - DNA, 25 bp, Homo sapien
tagccaccaaaagcgaggaaagctt

SEQ ID NO: 3211877 - DNA, 25 bp, Homo sapien
aggaaagcttctgggagatcgctgt

SEQ ID NO: 3211878 - DNA, 25 bp, Homo sapien
tgggagatcgctgtccccgcgtcct

SEQ ID NO: 3211879 - DNA, 25 bp, Homo sapien
tgtccccgcgtcctgcttctcagtc

SEQ ID NO: 3211880 - DNA, 25 bp, Homo sapien
ggatcttgattcctcggtgccgcct

SEQ ID NO: 3211881 - DNA, 25 bp, Homo sapien
agctccgcaggcaggcgcgtagcat

SEQ ID NO: 3211882 - DNA, 25 bp, Homo sapien
tgtgcaaagcattaggtggtgagtc

SEQ ID NO: 3211883 - DNA, 25 bp, Homo sapien
caaggccagcttgtgcaaagcatta

SEQ ID NO: 3211884 - DNA, 25 bp, Homo sapien
gaaccctgaaaatgcgcacaagtct

SEQ ID NO: 3211885 - DNA, 25 bp, Homo sapien
atagcagctccggaagcggatgccc

SEQ ID NO: 3211886 - DNA, 25 bp, Homo sapien
tcgtccacaaaagctcgaaccctga

SEQ ID NO: 3211887 - DNA, 25 bp, Homo sapien
ggaaggccgagtagagaccgctccc

SEQ ID NO: 3211888 - DNA, 25 bp, Homo sapien
tgagcgcctggattgctgctcggcc

SEQ ID NO: 3211889 - DNA, 25 bp, Homo sapien
tagggcgaacgcgttctttttgcgc

SEQ ID NO: 3211890 - DNA, 25 bp, Homo sapien
ttctgagctagactctccccgaagg

SEQ ID NO: 3211891 - DNA, 25 bp, Homo sapien
ttttgcgcgtccagctgagcgcctg

SEQ ID NO: 3211892 - DNA, 25 bp, Homo sapien
aacacagattgcttccaccgtcgga

SEQ ID NO: 3211893 - DNA, 25 bp, Homo sapien
ggtgctgctgccagaaagacaccgt

SEQ ID NO: 3211894 - DNA, 25 bp, Homo sapien
gctctgtgtaaagggaggacccaca

SEQ ID NO: 3211895 - DNA, 25 bp, Homo sapien
gaaagacaccgtgttgggctctgtg

SEQ ID NO: 3211896 - DNA, 25 bp, Homo sapien
atgggacttaaaaccagttagccag

SEQ ID NO: 3211897 - DNA, 25 bp, Homo sapien
taacactgggattgcttggagctgc

SEQ ID NO: 3211898 - DNA, 25 bp, Homo sapien
acatctacttgccatcagccagcgg

SEQ ID NO: 3211899 - DNA, 25 bp, Homo sapien
gcagtttcagggatagcatcccttc

SEQ ID NO: 3211900 - DNA, 25 bp, Homo sapien
agccagcggggggaaatatcatatg

SEQ ID NO: 3211901 - DNA, 25 bp, Homo sapien
aaggcagcgaggtcgatgggaaagg

SEQ ID NO: 3211902 - DNA, 25 bp, Homo sapien
gaaggcagcgaggtcgatgggaaag

SEQ ID NO: 3211903 - DNA, 25 bp, Homo sapien
gcgcccggtcactgcgtgcgctgtc

SEQ ID NO: 3211904 - DNA, 25 bp, Homo sapien
ctgccgcgcccggtcactgcgtgcg

SEQ ID NO: 3211905 - DNA, 25 bp, Homo sapien
ctacctcggccaaatgggcggcgaa

SEQ ID NO: 3211906 - DNA, 25 bp, Homo sapien
ctggattccgtaggatggccccgga

SEQ ID NO: 3211907 - DNA, 25 bp, Homo sapien
ttccgctgagtattcgggtcctccg

SEQ ID NO: 3211908 - DNA, 25 bp, Homo sapien
agaacccggccagggtgacattccg

SEQ ID NO: 3211909 - DNA, 25 bp, Homo sapien
tctagcacagagaacagtaatgtga

SEQ ID NO: 3211910 - DNA, 25 bp, Homo sapien
caattttacataaggtcaccaggga

SEQ ID NO: 3211911 - DNA, 25 bp, Homo sapien
taaggaaacaggcaggtaccgattg

SEQ ID NO: 3211912 - DNA, 25 bp, Homo sapien
tccctggagccaaaattcaagatac

SEQ ID NO: 3211913 - DNA, 25 bp, Homo sapien
gagagagatattattacacacctac

SEQ ID NO: 3211914 - DNA, 25 bp, Homo sapien
taaatacacacaatatgatagagga

SEQ ID NO: 3211915 - DNA, 25 bp, Homo sapien
aaaatctgacagtaccaagggctga

SEQ ID NO: 3211916 - DNA, 25 bp, Homo sapien
tgctttagaaactgtttagcagttc

SEQ ID NO: 3211917 - DNA, 25 bp, Homo sapien
gtgctcgatagaaactggtggtagt

SEQ ID NO: 3211918 - DNA, 25 bp, Homo sapien
aaactggtggtagtctaatgcccat

SEQ ID NO: 3211919 - DNA, 25 bp, Homo sapien
ggctcttgctcgactcctactttac

SEQ ID NO: 3211920 - DNA, 25 bp, Homo sapien
ggagccctctcaaatctgccactgt

SEQ ID NO: 3211921 - DNA, 25 bp, Homo sapien
ttactcatcagtccaccaacttctg

SEQ ID NO: 3211922 - DNA, 25 bp, Homo sapien
tcaattgtctgagccaaaggccctg

SEQ ID NO: 3211923 - DNA, 25 bp, Homo sapien
gagtggcaccactaagtcaagcttc

SEQ ID NO: 3211924 - DNA, 25 bp, Homo sapien
gctatgtgagtcaatggagcctctg

SEQ ID NO: 3211925 - DNA, 25 bp, Homo sapien
gagctagtcaagttccaggtaggtg

SEQ ID NO: 3211926 - DNA, 25 bp, Homo sapien
gacgtggcagtagcctaggctctgt

SEQ ID NO: 3211927 - DNA, 25 bp, Homo sapien
tttaaatgcaaacacccatacaatg

SEQ ID NO: 3211928 - DNA, 25 bp, Homo sapien
tgctcctctgcttggggttccataa

SEQ ID NO: 3211929 - DNA, 25 bp, Homo sapien
atgcaaacacccatacaatggtcat

SEQ ID NO: 3211930 - DNA, 25 bp, Homo sapien
tgcttggggttccataattaggtac

SEQ ID NO: 3211931 - DNA, 25 bp, Homo sapien
catgcaggtccacaagttccaattc

SEQ ID NO: 3211932 - DNA, 25 bp, Homo sapien
atgcaggtccacaagttccaattcc

SEQ ID NO: 3211933 - DNA, 25 bp, Homo sapien
tcatgcaggtccacaagttccaatt

SEQ ID NO: 3211934 - DNA, 25 bp, Homo sapien
cagcatgatgaaaaggttgagataa

SEQ ID NO: 3211935 - DNA, 25 bp, Homo sapien
cagttgctactcatcgtaggcagca

SEQ ID NO: 3211936 - DNA, 25 bp, Homo sapien
tgaatcctcaggtctctcaggtggt

SEQ ID NO: 3211937 - DNA, 25 bp, Homo sapien
tttcagtcgatcagtttcagcagca

SEQ ID NO: 3211938 - DNA, 25 bp, Homo sapien
gaggttcaaaatatatgtcgacaag

SEQ ID NO: 3211939 - DNA, 25 bp, Homo sapien
tgtcgacaagattcctctggaactg

SEQ ID NO: 3211940 - DNA, 25 bp, Homo sapien
cctctggaactgaccatgatttctc

SEQ ID NO: 3211941 - DNA, 25 bp, Homo sapien
gaccatgatttctcagtaagagcat

SEQ ID NO: 3211942 - DNA, 25 bp, Homo sapien
ttctgtaatcgccttaactgcctga

SEQ ID NO: 3211943 - DNA, 25 bp, Homo sapien
tattctgcatcctaccacggccatt

SEQ ID NO: 3211944 - DNA, 25 bp, Homo sapien
aaagtctcttgaaaacaggcccttg

SEQ ID NO: 3211945 - DNA, 25 bp, Homo sapien
aaatcttgcccgttttgctaggtca

SEQ ID NO: 3211946 - DNA, 25 bp, Homo sapien
ccactttggtgttggagttatccag

SEQ ID NO: 3211947 - DNA, 25 bp, Homo sapien
ggctgcacagtttgacagcaggtat

SEQ ID NO: 3211948 - DNA, 25 bp, Homo sapien
cagcaggtatgcgagtgaagacacg

SEQ ID NO: 3211949 - DNA, 25 bp, Homo sapien
gtgggaggatttaggcaccaaagca

SEQ ID NO: 3211950 - DNA, 25 bp, Homo sapien
ttccgtatccctctatgtactccat

SEQ ID NO: 3211951 - DNA, 25 bp, Homo sapien
aagtttgactaataaacttctgagc

SEQ ID NO: 3211952 - DNA, 25 bp, Homo sapien
ttcccttccgtatccctctatgtac

SEQ ID NO: 3211953 - DNA, 25 bp, Homo sapien
tgagccccttcatcatcattgctgt

SEQ ID NO: 3211954 - DNA, 25 bp, Homo sapien
caagctgcatcccttatctcgttgc

SEQ ID NO: 3211955 - DNA, 25 bp, Homo sapien
tctccattgaatgaataatgccctt

SEQ ID NO: 3211956 - DNA, 25 bp, Homo sapien
taaaacccatatgaaatgcttgact

SEQ ID NO: 3211957 - DNA, 25 bp, Homo sapien
tgtgaattcaaaacaattaacaaca

SEQ ID NO: 3211958 - DNA, 25 bp, Homo sapien
aattggagatgttgtaataaccagc

SEQ ID NO: 3211959 - DNA, 25 bp, Homo sapien
ggagatgttgtaataaccagcatca

SEQ ID NO: 3211960 - DNA, 25 bp, Homo sapien
gaaattggagatgttgtaataacca

SEQ ID NO: 3211961 - DNA, 25 bp, Homo sapien
agatgttgtaataaccagcatcacc

SEQ ID NO: 3211962 - DNA, 25 bp, Homo sapien
gcaggcaagaatcagctcctgaaat

SEQ ID NO: 3211963 - DNA, 25 bp, Homo sapien
caggcaagaatcagctcctgaaatg

SEQ ID NO: 3211964 - DNA, 25 bp, Homo sapien
gatgctggggcttgaaaatgcatca

SEQ ID NO: 3211965 - DNA, 25 bp, Homo sapien
ggcaggcaagaatcagctcctgaaa

SEQ ID NO: 3211966 - DNA, 25 bp, Homo sapien
cataactagtggtgatatgctccat

SEQ ID NO: 3211967 - DNA, 25 bp, Homo sapien
ctaaggaggtgccataactagtggt

SEQ ID NO: 3211968 - DNA, 25 bp, Homo sapien
ggaggtgccataactagtggtgata

SEQ ID NO: 3211969 - DNA, 25 bp, Homo sapien
ggtgccataactagtggtgatatgc

SEQ ID NO: 3211970 - DNA, 25 bp, Homo sapien
gtgtgttttcccctgagatgttgat

SEQ ID NO: 3211971 - DNA, 25 bp, Homo sapien
cctgagatgttgatctgggagaacc

SEQ ID NO: 3211972 - DNA, 25 bp, Homo sapien
cctgcagccacaccatcttgtgtgt

SEQ ID NO: 3211973 - DNA, 25 bp, Homo sapien
ctgaacctgagcaatttcccttcct

SEQ ID NO: 3211974 - DNA, 25 bp, Homo sapien
ggttgggaccggacttcctcagctc

SEQ ID NO: 3211975 - DNA, 25 bp, Homo sapien
cgaggttgggaccggacttcctcag

SEQ ID NO: 3211976 - DNA, 25 bp, Homo sapien
ctgggccagtgcaccgaggttcgtg

SEQ ID NO: 3211977 - DNA, 25 bp, Homo sapien
cagtgcaccgaggttcgtgacggca

SEQ ID NO: 3211978 - DNA, 25 bp, Homo sapien
cggccgtcatgcctcgcctctctgt

SEQ ID NO: 3211979 - DNA, 25 bp, Homo sapien
tccgtggagacgctctcggcgtccc

SEQ ID NO: 3211980 - DNA, 25 bp, Homo sapien
gccaggcttcggaatcactgagaga

SEQ ID NO: 3211981 - DNA, 25 bp, Homo sapien
ctgacttcggcggaacggaaaactg

SEQ ID NO: 3211982 - DNA, 25 bp, Homo sapien
taaaagcgagctaacttctgaaagc

SEQ ID NO: 3211983 - DNA, 25 bp, Homo sapien
ttacgtgaaaatgcctaaaagcgag

SEQ ID NO: 3211984 - DNA, 25 bp, Homo sapien
aagcctcagctatctgggggccccg

SEQ ID NO: 3211985 - DNA, 25 bp, Homo sapien
gaaaatgcctaaaagcgagctaact

SEQ ID NO: 3211986 - DNA, 25 bp, Homo sapien
aacttccagccagtcgtgggaagct

SEQ ID NO: 3211987 - DNA, 25 bp, Homo sapien
ttggggcagcaattgagatgtcatc

SEQ ID NO: 3211988 - DNA, 25 bp, Homo sapien
agagcttatcacatggaactgtggc

SEQ ID NO: 3211989 - DNA, 25 bp, Homo sapien
aactgtggctatgggaccgggctga

SEQ ID NO: 3211990 - DNA, 25 bp, Homo sapien
ctgcagtacagagtggtgatcaatg

SEQ ID NO: 3211991 - DNA, 25 bp, Homo sapien
cagagtggtgatcaatggtagtaaa

SEQ ID NO: 3211992 - DNA, 25 bp, Homo sapien
gatcaatggtagtaaaggctttaac

SEQ ID NO: 3211993 - DNA, 25 bp, Homo sapien
tggtgatcaatggtagtaaaggctt

SEQ ID NO: 3211994 - DNA, 25 bp, Homo sapien
gaagccagtggttactaaattggcc

SEQ ID NO: 3211995 - DNA, 25 bp, Homo sapien
tctttttctggatgggccactctag

SEQ ID NO: 3211996 - DNA, 25 bp, Homo sapien
ctaaattggccctcagaagatggtc

SEQ ID NO: 3211997 - DNA, 25 bp, Homo sapien
ctctagccaatctgtttcccctttt

SEQ ID NO: 3211998 - DNA, 25 bp, Homo sapien
tgcgtgcaaaatgggttctcagcaa

SEQ ID NO: 3211999 - DNA, 25 bp, Homo sapien
gcgtgcaaaatgggttctcagcaat

SEQ ID NO: 3212000 - DNA, 25 bp, Homo sapien
cattgcgtgcaaaatgggttctcag

SEQ ID NO: 3212001 - DNA, 25 bp, Homo sapien
attgcgtgcaaaatgggttctcagc

SEQ ID NO: 3212002 - DNA, 25 bp, Homo sapien
gaacacctgaataaatcccagctgt

SEQ ID NO: 3212003 - DNA, 25 bp, Homo sapien
tcaaagtcggtagcgcatggtgatc

SEQ ID NO: 3212004 - DNA, 25 bp, Homo sapien
agctgtgtcatttattatccgggaa

SEQ ID NO: 3212005 - DNA, 25 bp, Homo sapien
tgtgagacatcactgctcaaagtcg

SEQ ID NO: 3212006 - DNA, 25 bp, Homo sapien
cttgttttatttgatgcatagcctt

SEQ ID NO: 3212007 - DNA, 25 bp, Homo sapien
gttttatttgatgcatagccttgaa

SEQ ID NO: 3212008 - DNA, 25 bp, Homo sapien
tatttgatgcatagccttgaaatca

SEQ ID NO: 3212009 - DNA, 25 bp, Homo sapien
tttatttgatgcatagccttgaaat

SEQ ID NO: 3212010 - DNA, 25 bp, Homo sapien
atatcacttcacatggtggcattct

SEQ ID NO: 3212011 - DNA, 25 bp, Homo sapien
acagctctgtacctgacttctccat

SEQ ID NO: 3212012 - DNA, 25 bp, Homo sapien
cattcactcaggttccagctcaaat

SEQ ID NO: 3212013 - DNA, 25 bp, Homo sapien
tgatgctatccccacagctctgtac

SEQ ID NO: 3212014 - DNA, 25 bp, Homo sapien
gccacaggaggctctctaacatccc

SEQ ID NO: 3212015 - DNA, 25 bp, Homo sapien
gaggctctctaacatcccggggatg

SEQ ID NO: 3212016 - DNA, 25 bp, Homo sapien
acaggaggctctctaacatcccggg

SEQ ID NO: 3212017 - DNA, 25 bp, Homo sapien
ggaggctctctaacatcccggggat

SEQ ID NO: 3212018 - DNA, 25 bp, Homo sapien
ttctttgtaaaggcttcgttgtcat

SEQ ID NO: 3212019 - DNA, 25 bp, Homo sapien
aactccccttgagtatacatattca

SEQ ID NO: 3212020 - DNA, 25 bp, Homo sapien
tcgttgtcattcaaactggtcaata

SEQ ID NO: 3212021 - DNA, 25 bp, Homo sapien
tacatattcaagaatagcaaacaaa

SEQ ID NO: 3212022 - DNA, 25 bp, Homo sapien
taaacactcaaaagtgcaagccact

SEQ ID NO: 3212023 - DNA, 25 bp, Homo sapien
catatccaaattaaagtctgtgtct

SEQ ID NO: 3212024 - DNA, 25 bp, Homo sapien
agtctgtgtcttaagtaaacactca

SEQ ID NO: 3212025 - DNA, 25 bp, Homo sapien
cactcaaaagtgcaagccactcttt

SEQ ID NO: 3212026 - DNA, 25 bp, Homo sapien
tcttgaagtaactgttacaggccag

SEQ ID NO: 3212027 - DNA, 25 bp, Homo sapien
tgcttcttgaagtaactgttacagg

SEQ ID NO: 3212028 - DNA, 25 bp, Homo sapien
agtaactgttacaggccaggtccag

SEQ ID NO: 3212029 - DNA, 25 bp, Homo sapien
ctgggtagtaaacagtagaaacatt

SEQ ID NO: 3212030 - DNA, 25 bp, Homo sapien
taattgcagcagttctttaagtgga

SEQ ID NO: 3212031 - DNA, 25 bp, Homo sapien
tcagtaacacgctcagaaggcttct

SEQ ID NO: 3212032 - DNA, 25 bp, Homo sapien
ggtggttgcacagctacttctgttc

SEQ ID NO: 3212033 - DNA, 25 bp, Homo sapien
taactctcgccatcataaaaggaaa

SEQ ID NO: 3212034 - DNA, 25 bp, Homo sapien
cggtaggaaataatgtcagccagag

SEQ ID NO: 3212035 - DNA, 25 bp, Homo sapien
tctgtagaagtagcaaacatgattt

SEQ ID NO: 3212036 - DNA, 25 bp, Homo sapien
tttcattcctgccatattcagcgcg

SEQ ID NO: 3212037 - DNA, 25 bp, Homo sapien
tccttccctgataaaccttctgtag

SEQ ID NO: 3212038 - DNA, 25 bp, Homo sapien
tggtaagcccacgtgctcagaaagc

SEQ ID NO: 3212039 - DNA, 25 bp, Homo sapien
tgttcccatttgagaccatagagcg

SEQ ID NO: 3212040 - DNA, 25 bp, Homo sapien
gagaagccttttttgaccaccctgc

SEQ ID NO: 3212041 - DNA, 25 bp, Homo sapien
agaaagaactcttgcaccctgggct

SEQ ID NO: 3212042 - DNA, 25 bp, Homo sapien
cagtttcccaatttacgactctgac

SEQ ID NO: 3212043 - DNA, 25 bp, Homo sapien
tcatcattagttatatacagtacac

SEQ ID NO: 3212044 - DNA, 25 bp, Homo sapien
taccacaccaataagtttcaatgga

SEQ ID NO: 3212045 - DNA, 25 bp, Homo sapien
attggacaggcacctttccataaac

SEQ ID NO: 3212046 - DNA, 25 bp, Homo sapien
ccagaagcctacagcctcccagcag

SEQ ID NO: 3212047 - DNA, 25 bp, Homo sapien
aagagagatagacagggtctgccct

SEQ ID NO: 3212048 - DNA, 25 bp, Homo sapien
aaagagagatagacagggtctgccc

SEQ ID NO: 3212049 - DNA, 25 bp, Homo sapien
gccagaagcctacagcctcccagca

SEQ ID NO: 3212050 - DNA, 25 bp, Homo sapien
catctggcagtgtataggtggctcc

SEQ ID NO: 3212051 - DNA, 25 bp, Homo sapien
tgaagccttgttactgaaagacatt

SEQ ID NO: 3212052 - DNA, 25 bp, Homo sapien
ggttagcaggactttacataaccca

SEQ ID NO: 3212053 - DNA, 25 bp, Homo sapien
gcccctgttggtcatagaacttaga

SEQ ID NO: 3212054 - DNA, 25 bp, Homo sapien
tcccataagtcacggaaaaaggatg

SEQ ID NO: 3212055 - DNA, 25 bp, Homo sapien
tcatgaactttagcagccaaatccc

SEQ ID NO: 3212056 - DNA, 25 bp, Homo sapien
gaagtgccttccttaaggtcacatg

SEQ ID NO: 3212057 - DNA, 25 bp, Homo sapien
aatgtcaggcgaaaaggtcatcaga

SEQ ID NO: 3212058 - DNA, 25 bp, Homo sapien
gatcttatggcaatgaaattgagga

SEQ ID NO: 3212059 - DNA, 25 bp, Homo sapien
caatgaaattgaggacaggttcacg

SEQ ID NO: 3212060 - DNA, 25 bp, Homo sapien
tcacctactaagaggagatcttatg

SEQ ID NO: 3212061 - DNA, 25 bp, Homo sapien
ggttcacgttcatgagatgaagaga

SEQ ID NO: 3212062 - DNA, 25 bp, Homo sapien
gaaaagcggctaagagactactgta

SEQ ID NO: 3212063 - DNA, 25 bp, Homo sapien
tcttacccaggtaactgacaatggc

SEQ ID NO: 3212064 - DNA, 25 bp, Homo sapien
tctctgttgtctggtggaatcctct

SEQ ID NO: 3212065 - DNA, 25 bp, Homo sapien
caggaagattctaacagtgtaaggc

SEQ ID NO: 3212066 - DNA, 25 bp, Homo sapien
aaagtccttgagatagccatgctgg

SEQ ID NO: 3212067 - DNA, 25 bp, Homo sapien
taaactttatggagagcacacacct

SEQ ID NO: 3212068 - DNA, 25 bp, Homo sapien
taagtgtttaatgccaccagtggcc

SEQ ID NO: 3212069 - DNA, 25 bp, Homo sapien
caaaatggtaacacgtgggagaagc

SEQ ID NO: 3212070 - DNA, 25 bp, Homo sapien
ccggacctaatcctttgagttctct

SEQ ID NO: 3212071 - DNA, 25 bp, Homo sapien
cggacctaatcctttgagttctctt

SEQ ID NO: 3212072 - DNA, 25 bp, Homo sapien
aacctgttgcccttcgacactagtg

SEQ ID NO: 3212073 - DNA, 25 bp, Homo sapien
cattttcatcgaccctgatcaagtg

SEQ ID NO: 3212074 - DNA, 25 bp, Homo sapien
ctagtgccattttcatcgaccctga

SEQ ID NO: 3212075 - DNA, 25 bp, Homo sapien
agcactttcctaaactattgtattt

SEQ ID NO: 3212076 - DNA, 25 bp, Homo sapien
tgtggggagaattgaacatattcat

SEQ ID NO: 3212077 - DNA, 25 bp, Homo sapien
tggttgtggggagaattgaacatat

SEQ ID NO: 3212078 - DNA, 25 bp, Homo sapien
ttgtggggagaattgaacatattca

SEQ ID NO: 3212079 - DNA, 25 bp, Homo sapien
gttgtggggagaattgaacatattc

SEQ ID NO: 3212080 - DNA, 25 bp, Homo sapien
ttttctcaagcttaagggagtagga

SEQ ID NO: 3212081 - DNA, 25 bp, Homo sapien
aggaaaccaaagactgtgggtatca

SEQ ID NO: 3212082 - DNA, 25 bp, Homo sapien
ctgtgggtatcaataagaaatgaac

SEQ ID NO: 3212083 - DNA, 25 bp, Homo sapien
gtcttctgagcaatagagtttgcaa

SEQ ID NO: 3212084 - DNA, 25 bp, Homo sapien
gccccttgagtaggatcagagatga

SEQ ID NO: 3212085 - DNA, 25 bp, Homo sapien
gaggtgccccttgagtaggatcaga

SEQ ID NO: 3212086 - DNA, 25 bp, Homo sapien
gagtaggatcagagatgagcacttt

SEQ ID NO: 3212087 - DNA, 25 bp, Homo sapien
cttggtgagaggtgccccttgagta

SEQ ID NO: 3212088 - DNA, 25 bp, Homo sapien
tgacaatgctgatcgagaggcttct

SEQ ID NO: 3212089 - DNA, 25 bp, Homo sapien
aaatcaggtagcatgctccgtccag

SEQ ID NO: 3212090 - DNA, 25 bp, Homo sapien
ctttcaggaatgaatgagtgctcac

SEQ ID NO: 3212091 - DNA, 25 bp, Homo sapien
taagcagggtcactcttgtaacagc

SEQ ID NO: 3212092 - DNA, 25 bp, Homo sapien
cccagttcatacttcatcggggcaa

SEQ ID NO: 3212093 - DNA, 25 bp, Homo sapien
aactgagcgggtccacagcatccag

SEQ ID NO: 3212094 - DNA, 25 bp, Homo sapien
ttcatacttcatcggggcaactgag

SEQ ID NO: 3212095 - DNA, 25 bp, Homo sapien
ttcatcggggcaactgagcgggtcc

SEQ ID NO: 3212096 - DNA, 25 bp, Homo sapien
ttattaaggattaaagcaggcgaca

SEQ ID NO: 3212097 - DNA, 25 bp, Homo sapien
tcctagaggtctgcttgctagagct

SEQ ID NO: 3212098 - DNA, 25 bp, Homo sapien
taaagcaggcgacaattctggaatg

SEQ ID NO: 3212099 - DNA, 25 bp, Homo sapien
tgctcccgaatacgggctgcccatt

SEQ ID NO: 3212100 - DNA, 25 bp, Homo sapien
caggatggtcgcagctgagcactga

SEQ ID NO: 3212101 - DNA, 25 bp, Homo sapien
tgagaaaaatttgcccagtttggaa

SEQ ID NO: 3212102 - DNA, 25 bp, Homo sapien
tagagtgaccacctcaacatgggat

SEQ ID NO: 3212103 - DNA, 25 bp, Homo sapien
ccctgtaaggagcttctgtatagag

SEQ ID NO: 3212104 - DNA, 25 bp, Homo sapien
agcatgacgagaacaatattgcatt

SEQ ID NO: 3212105 - DNA, 25 bp, Homo sapien
ttgctgagcatgacgagaacaatat

SEQ ID NO: 3212106 - DNA, 25 bp, Homo sapien
atgacgagaacaatattgcattttc

SEQ ID NO: 3212107 - DNA, 25 bp, Homo sapien
tttgctgagcatgacgagaacaata

SEQ ID NO: 3212108 - DNA, 25 bp, Homo sapien
taccagaaagtgagatgatggcaat

SEQ ID NO: 3212109 - DNA, 25 bp, Homo sapien
gacacaagttggtctctgagagcaa

SEQ ID NO: 3212110 - DNA, 25 bp, Homo sapien
catgactgacacctggatgagacag

SEQ ID NO: 3212111 - DNA, 25 bp, Homo sapien
tgagagcaaagcgtacttgtcaggg

SEQ ID NO: 3212112 - DNA, 25 bp, Homo sapien
cacctgccacacttgttctggccat

SEQ ID NO: 3212113 - DNA, 25 bp, Homo sapien
agccctgggtggcaggaattccaca

SEQ ID NO: 3212114 - DNA, 25 bp, Homo sapien
gaattccacagtggtggtcttcacc

SEQ ID NO: 3212115 - DNA, 25 bp, Homo sapien
agagccctgggtggcaggaattcca

SEQ ID NO: 3212116 - DNA, 25 bp, Homo sapien
caacagcattcaacaaggaccaact

SEQ ID NO: 3212117 - DNA, 25 bp, Homo sapien
aacaaggaccaacttctgtgatttc

SEQ ID NO: 3212118 - DNA, 25 bp, Homo sapien
tcaggaccaacagcattcaacaagg

SEQ ID NO: 3212119 - DNA, 25 bp, Homo sapien
accagtggccactgcgatcaggacc

SEQ ID NO: 3212120 - DNA, 25 bp, Homo sapien
tgttccacttcagggtaaggcacaa

SEQ ID NO: 3212121 - DNA, 25 bp, Homo sapien
cagggtaaggcacaaaaggtacctg

SEQ ID NO: 3212122 - DNA, 25 bp, Homo sapien
tccacttcagggtaaggcacaaaag

SEQ ID NO: 3212123 - DNA, 25 bp, Homo sapien
cacttcagggtaaggcacaaaaggt

SEQ ID NO: 3212124 - DNA, 25 bp, Homo sapien
ggtgggtgtcctctgaataatcaaa

SEQ ID NO: 3212125 - DNA, 25 bp, Homo sapien
actgcttcaggccaatttggcatca

SEQ ID NO: 3212126 - DNA, 25 bp, Homo sapien
tttggcatcaagcatccttccagga

SEQ ID NO: 3212127 - DNA, 25 bp, Homo sapien
tccaggatcccatagttcaagctca

SEQ ID NO: 3212128 - DNA, 25 bp, Homo sapien
cattggactgactgtaaatgatgat

SEQ ID NO: 3212129 - DNA, 25 bp, Homo sapien
gactgactgtaaatgatgatatgtt

SEQ ID NO: 3212130 - DNA, 25 bp, Homo sapien
catttaagctgatctctggcagtgc

SEQ ID NO: 3212131 - DNA, 25 bp, Homo sapien
tagagtcctcttgcccggtgactcc

SEQ ID NO: 3212132 - DNA, 25 bp, Homo sapien
gagcaattcctagacccaaactgtg

SEQ ID NO: 3212133 - DNA, 25 bp, Homo sapien
gataagaaggccacaagtcatctct

SEQ ID NO: 3212134 - DNA, 25 bp, Homo sapien
ctagacccaaactgtgtcaagtcac

SEQ ID NO: 3212135 - DNA, 25 bp, Homo sapien
aagtcatctctagagcaattcctag

SEQ ID NO: 3212136 - DNA, 25 bp, Homo sapien
ggtggactggtgaggagattgagcc

SEQ ID NO: 3212137 - DNA, 25 bp, Homo sapien
gttaggaagacgtccatgcagaggg

SEQ ID NO: 3212138 - DNA, 25 bp, Homo sapien
ggtgaggagtgagtccacgtggagg

SEQ ID NO: 3212139 - DNA, 25 bp, Homo sapien
gattgagcctgatcagagttaggaa

SEQ ID NO: 3212140 - DNA, 25 bp, Homo sapien
cagtgccagagtggcggatgaggca

SEQ ID NO: 3212141 - DNA, 25 bp, Homo sapien
atgatactaggaatgcagctgctgc

SEQ ID NO: 3212142 - DNA, 25 bp, Homo sapien
tcctgacagccagacgccaggcaca

SEQ ID NO: 3212143 - DNA, 25 bp, Homo sapien
aacgcggcgcttcacggggctcagt

SEQ ID NO: 3212144 - DNA, 25 bp, Homo sapien
ttctgggttcttgggtgtaggtcga

SEQ ID NO: 3212145 - DNA, 25 bp, Homo sapien
cgtatccattaagggagtgtttctc

SEQ ID NO: 3212146 - DNA, 25 bp, Homo sapien
tgcttgaaccatccgtatccattaa

SEQ ID NO: 3212147 - DNA, 25 bp, Homo sapien
cttgggtgtaggtcgatattgatcc

SEQ ID NO: 3212148 - DNA, 25 bp, Homo sapien
tgaatgtcttttcgttaaggctttg

SEQ ID NO: 3212149 - DNA, 25 bp, Homo sapien
cctgtaactgatactcctctcctat

SEQ ID NO: 3212150 - DNA, 25 bp, Homo sapien
atatatttcagtttggatgccttcc

SEQ ID NO: 3212151 - DNA, 25 bp, Homo sapien
ccattttggtggtaattctggtgaa

SEQ ID NO: 3212152 - DNA, 25 bp, Homo sapien
aaaagtgtggacagggccgggcgcg

SEQ ID NO: 3212153 - DNA, 25 bp, Homo sapien
gtggctcacgcctgtaatcccagca

SEQ ID NO: 3212154 - DNA, 25 bp, Homo sapien
catgaggtcaggagatcgagaccat

SEQ ID NO: 3212155 - DNA, 25 bp, Homo sapien
ctttgggaggccgaggcgggtggat

SEQ ID NO: 3212156 - DNA, 25 bp, Homo sapien
gatgatgtgcaatgtaactatgtct

SEQ ID NO: 3212157 - DNA, 25 bp, Homo sapien
tctgatccatatatagtggactggg

SEQ ID NO: 3212158 - DNA, 25 bp, Homo sapien
tggggacatgacatagtcttcattc

SEQ ID NO: 3212159 - DNA, 25 bp, Homo sapien
ctgcaaacttatcagatgatgtgca

SEQ ID NO: 3212160 - DNA, 25 bp, Homo sapien
ctctaagtgccatatcttctgctga

SEQ ID NO: 3212161 - DNA, 25 bp, Homo sapien
caaatacaccctattttgtctgtag

SEQ ID NO: 3212162 - DNA, 25 bp, Homo sapien
atttcaagtgaaatatgcaaataca

SEQ ID NO: 3212163 - DNA, 25 bp, Homo sapien
tccaatgtgctgcaacatagcctaa

SEQ ID NO: 3212164 - DNA, 25 bp, Homo sapien
tatttggtaagacaagcaccaatgt

SEQ ID NO: 3212165 - DNA, 25 bp, Homo sapien
ttggtaagacaagcaccaatgtcac

SEQ ID NO: 3212166 - DNA, 25 bp, Homo sapien
tttggtaagacaagcaccaatgtca

SEQ ID NO: 3212167 - DNA, 25 bp, Homo sapien
atttggtaagacaagcaccaatgtc

SEQ ID NO: 3212168 - DNA, 25 bp, Homo sapien
tgaaaggatgtgctggagtttgcct

SEQ ID NO: 3212169 - DNA, 25 bp, Homo sapien
tcatatatatgcatggcacactgct

SEQ ID NO: 3212170 - DNA, 25 bp, Homo sapien
ggcaaagttgagagctatcacctgc

SEQ ID NO: 3212171 - DNA, 25 bp, Homo sapien
tgacttttaatgactccgaccacct

SEQ ID NO: 3212172 - DNA, 25 bp, Homo sapien
gatttagggaatgactctgagatgt

SEQ ID NO: 3212173 - DNA, 25 bp, Homo sapien
aatctgtgattcatccggttagctt

SEQ ID NO: 3212174 - DNA, 25 bp, Homo sapien
ttcagaggtactgaagagtccttgt

SEQ ID NO: 3212175 - DNA, 25 bp, Homo sapien
gattcatccggttagctttgtgatt

SEQ ID NO: 3212176 - DNA, 25 bp, Homo sapien
gtgatgccatctgctactagtgaac

SEQ ID NO: 3212177 - DNA, 25 bp, Homo sapien
tgccatctgctactagtgaactcca

SEQ ID NO: 3212178 - DNA, 25 bp, Homo sapien
gccatctgctactagtgaactccat

SEQ ID NO: 3212179 - DNA, 25 bp, Homo sapien
gatgccatctgctactagtgaactc

SEQ ID NO: 3212180 - DNA, 25 bp, Homo sapien
tcaaggtgcagatgatccgagtgac

SEQ ID NO: 3212181 - DNA, 25 bp, Homo sapien
aagcacactaaatggggtctggggc

SEQ ID NO: 3212182 - DNA, 25 bp, Homo sapien
caagtgttcgtggaagcacactaaa

SEQ ID NO: 3212183 - DNA, 25 bp, Homo sapien
cagtggtggcaccagtgttcaaggt

SEQ ID NO: 3212184 - DNA, 25 bp, Homo sapien
ttgtattcctcagagaggccaaata

SEQ ID NO: 3212185 - DNA, 25 bp, Homo sapien
gttgtattcctcagagaggccaaat

SEQ ID NO: 3212186 - DNA, 25 bp, Homo sapien
aaattcatcttgttatcctctttct

SEQ ID NO: 3212187 - DNA, 25 bp, Homo sapien
caaattcatcttgttatcctctttc

SEQ ID NO: 3212188 - DNA, 25 bp, Homo sapien
gcaaattcatcttgttatcctcttt

SEQ ID NO: 3212189 - DNA, 25 bp, Homo sapien
gttatcctctttctccataaaagtc

SEQ ID NO: 3212190 - DNA, 25 bp, Homo sapien
tcaaatcgcaaccttgagagcctcc

SEQ ID NO: 3212191 - DNA, 25 bp, Homo sapien
tctggtaagcagatggcaatacact

SEQ ID NO: 3212192 - DNA, 25 bp, Homo sapien
gaggtaacagttccttgctacaggt

SEQ ID NO: 3212193 - DNA, 25 bp, Homo sapien
ccagctgccctatatttgaggaaga

SEQ ID NO: 3212194 - DNA, 25 bp, Homo sapien
taagtttccataccactaagacctg

SEQ ID NO: 3212195 - DNA, 25 bp, Homo sapien
tggatggttgaagggtaagtttcca

SEQ ID NO: 3212196 - DNA, 25 bp, Homo sapien
gacctggaattcgttgtaaatactg

SEQ ID NO: 3212197 - DNA, 25 bp, Homo sapien
ctgctggttttgtctcagctcatga

SEQ ID NO: 3212198 - DNA, 25 bp, Homo sapien
ttctgtttctctccaagatttattc

SEQ ID NO: 3212199 - DNA, 25 bp, Homo sapien
cttctacttctcatctccctctgct

SEQ ID NO: 3212200 - DNA, 25 bp, Homo sapien
ctgtttctctccaagatttattcat

SEQ ID NO: 3212201 - DNA, 25 bp, Homo sapien
cctctgctcctgtttccctcctctt

SEQ ID NO: 3212202 - DNA, 25 bp, Homo sapien
tacttgttgttaacgctgaacacca

SEQ ID NO: 3212203 - DNA, 25 bp, Homo sapien
gttggatcccataacctccaggaag

SEQ ID NO: 3212204 - DNA, 25 bp, Homo sapien
cacctttctagcacccagtggtaga

SEQ ID NO: 3212205 - DNA, 25 bp, Homo sapien
tctggaatactttttgcccttatag

SEQ ID NO: 3212206 - DNA, 25 bp, Homo sapien
cggtgttggagggtataaaagagca

SEQ ID NO: 3212207 - DNA, 25 bp, Homo sapien
gacacaatgactaacttttgagttg

SEQ ID NO: 3212208 - DNA, 25 bp, Homo sapien
gagcatcccatggagaggcaatcat

SEQ ID NO: 3212209 - DNA, 25 bp, Homo sapien
agttggtgacttgggcggtgttgga

SEQ ID NO: 3212210 - DNA, 25 bp, Homo sapien
tggttgtagacaatgaccatgcgca

SEQ ID NO: 3212211 - DNA, 25 bp, Homo sapien
agacaatgaccatgcgcagtttgca

SEQ ID NO: 3212212 - DNA, 25 bp, Homo sapien
acaggaacagcatggttgtagacaa

SEQ ID NO: 3212213 - DNA, 25 bp, Homo sapien
aacagcatggttgtagacaatgacc

SEQ ID NO: 3212214 - DNA, 25 bp, Homo sapien
gagtgtcccagtgttgagcctgtaa

SEQ ID NO: 3212215 - DNA, 25 bp, Homo sapien
aacagaacttgctttgagtgtccca

SEQ ID NO: 3212216 - DNA, 25 bp, Homo sapien
ttggattattcaggcttgacccacc

SEQ ID NO: 3212217 - DNA, 25 bp, Homo sapien
tactctttagattgcaggaccatga

SEQ ID NO: 3212218 - DNA, 25 bp, Homo sapien
gttagaagattaataagcgcatgtg

SEQ ID NO: 3212219 - DNA, 25 bp, Homo sapien
ttctggttagaagattaataagcgc

SEQ ID NO: 3212220 - DNA, 25 bp, Homo sapien
gattaataagcgcatgtggattcat

SEQ ID NO: 3212221 - DNA, 25 bp, Homo sapien
gaagattaataagcgcatgtggatt

SEQ ID NO: 3212222 - DNA, 25 bp, Homo sapien
tatttggagttctctgcgtggcagt

SEQ ID NO: 3212223 - DNA, 25 bp, Homo sapien
gcgtggcagtgttaagaccctcctt

SEQ ID NO: 3212224 - DNA, 25 bp, Homo sapien
gagttctctgcgtggcagtgttaag

SEQ ID NO: 3212225 - DNA, 25 bp, Homo sapien
catctttatttggagttctctgcgt

SEQ ID NO: 3212226 - DNA, 25 bp, Homo sapien
gctgcaggcttatgtcactgtgtgt

SEQ ID NO: 3212227 - DNA, 25 bp, Homo sapien
tatgcaggaggcgagcaatcctttc

SEQ ID NO: 3212228 - DNA, 25 bp, Homo sapien
tttgatcatggttctcaccccagtg

SEQ ID NO: 3212229 - DNA, 25 bp, Homo sapien
tctattctgctagtctgagccccat

SEQ ID NO: 3212230 - DNA, 25 bp, Homo sapien
gagcaaagtatctctcagactccat

SEQ ID NO: 3212231 - DNA, 25 bp, Homo sapien
agagaactgtccctgcgggctgtga

SEQ ID NO: 3212232 - DNA, 25 bp, Homo sapien
ctctgcctgcatccttgggtctggg

SEQ ID NO: 3212233 - DNA, 25 bp, Homo sapien
cctcagctttaaatacataaagctg

SEQ ID NO: 3212234 - DNA, 25 bp, Homo sapien
agaataaaatctggtgatctaaagc

SEQ ID NO: 3212235 - DNA, 25 bp, Homo sapien
aagaataaaatctggtgatctaaag

SEQ ID NO: 3212236 - DNA, 25 bp, Homo sapien
taaatcttccttaaggccaatgaca

SEQ ID NO: 3212237 - DNA, 25 bp, Homo sapien
ggccaatgacattgttgcattcttt

SEQ ID NO: 3212238 - DNA, 25 bp, Homo sapien
cttccttaaggccaatgacattgtt

SEQ ID NO: 3212239 - DNA, 25 bp, Homo sapien
ccttaaggccaatgacattgttgca

SEQ ID NO: 3212240 - DNA, 25 bp, Homo sapien
tagatgtggagattggctaaaattt

SEQ ID NO: 3212241 - DNA, 25 bp, Homo sapien
gggtagatgtggagattggctaaaa

SEQ ID NO: 3212242 - DNA, 25 bp, Homo sapien
agattatttcaataactctgtagct

SEQ ID NO: 3212243 - DNA, 25 bp, Homo sapien
tattgttattcccaatgcctgcttc

SEQ ID NO: 3212244 - DNA, 25 bp, Homo sapien
agctgcttttattaatgggtatcat

SEQ ID NO: 3212245 - DNA, 25 bp, Homo sapien
aagaaggaatgtaagctgcttttat

SEQ ID NO: 3212246 - DNA, 25 bp, Homo sapien
taagctgcttttattaatgggtatc

SEQ ID NO: 3212247 - DNA, 25 bp, Homo sapien
tgtaagctgcttttattaatgggta

SEQ ID NO: 3212248 - DNA, 25 bp, Homo sapien
tacatcaggtcaacagactgactga

SEQ ID NO: 3212249 - DNA, 25 bp, Homo sapien
aaatggctttggcttgaagtgtgca

SEQ ID NO: 3212250 - DNA, 25 bp, Homo sapien
tttagcccattaatgtcacgttcca

SEQ ID NO: 3212251 - DNA, 25 bp, Homo sapien
cagagcacggtgctgggtctgttta

SEQ ID NO: 3212252 - DNA, 25 bp, Homo sapien
ttgcttcatactttttgccaccaat

SEQ ID NO: 3212253 - DNA, 25 bp, Homo sapien
catactttttgccaccaatctcctt

SEQ ID NO: 3212254 - DNA, 25 bp, Homo sapien
ttgccaccaatctcctttgcattta

SEQ ID NO: 3212255 - DNA, 25 bp, Homo sapien
tttttgccaccaatctcctttgcat

SEQ ID NO: 3212256 - DNA, 25 bp, Homo sapien
tcatgtatgactcttaggttctaac

SEQ ID NO: 3212257 - DNA, 25 bp, Homo sapien
aagctgtggaaacagaatactcggc

SEQ ID NO: 3212258 - DNA, 25 bp, Homo sapien
tgtggaaacagaatactcggcagaa

SEQ ID NO: 3212259 - DNA, 25 bp, Homo sapien
gctgtggaaacagaatactcggcag

SEQ ID NO: 3212260 - DNA, 25 bp, Homo sapien
gaaacagaatactcggcagaacaaa

SEQ ID NO: 3212261 - DNA, 25 bp, Homo sapien
ctgctactggaccttggagtttccc

SEQ ID NO: 3212262 - DNA, 25 bp, Homo sapien
ttgacaacaactgctactggacctt

SEQ ID NO: 3212263 - DNA, 25 bp, Homo sapien
catcccaacacagatcctacgattg

SEQ ID NO: 3212264 - DNA, 25 bp, Homo sapien
ggagtttcccgtggaggtgaataca

SEQ ID NO: 3212265 - DNA, 25 bp, Homo sapien
tgccttatgtggtacgactgcacaa

SEQ ID NO: 3212266 - DNA, 25 bp, Homo sapien
gcctagtttgagatgccttatgtgg

SEQ ID NO: 3212267 - DNA, 25 bp, Homo sapien
tgtggtacgactgcacaacctccac

SEQ ID NO: 3212268 - DNA, 25 bp, Homo sapien
tttgagatgccttatgtggtacgac

SEQ ID NO: 3212269 - DNA, 25 bp, Homo sapien
tctcctcctccaagctgtacaatga

SEQ ID NO: 3212270 - DNA, 25 bp, Homo sapien
cctccaagctgtacaatgaggtctg

SEQ ID NO: 3212271 - DNA, 25 bp, Homo sapien
tcctcctccaagctgtacaatgagg

SEQ ID NO: 3212272 - DNA, 25 bp, Homo sapien
ctcctccaagctgtacaatgaggtc

SEQ ID NO: 3212273 - DNA, 25 bp, Homo sapien
aaacatgaaggcgtgcgcatccccg

SEQ ID NO: 3212274 - DNA, 25 bp, Homo sapien
acatgaaggcgtgcgcatccccggg

SEQ ID NO: 3212275 - DNA, 25 bp, Homo sapien
ctaaaacatgaaggcgtgcgcatcc

SEQ ID NO: 3212276 - DNA, 25 bp, Homo sapien
aaggcgtgcgcatccccggggaata

SEQ ID NO: 3212277 - DNA, 25 bp, Homo sapien
gaaggcctgccttggagtccttcag

SEQ ID NO: 3212278 - DNA, 25 bp, Homo sapien
gggaaggcctgccttggagtccttc

SEQ ID NO: 3212279 - DNA, 25 bp, Homo sapien
aggcctgccttggagtccttcagtg

SEQ ID NO: 3212280 - DNA, 25 bp, Homo sapien
cagggaaggcctgccttggagtcct

SEQ ID NO: 3212281 - DNA, 25 bp, Homo sapien
cacaatcgtcagaccagcgggatga

SEQ ID NO: 3212282 - DNA, 25 bp, Homo sapien
gatctgtgacggaacaactggacac

SEQ ID NO: 3212283 - DNA, 25 bp, Homo sapien
gcgtggctccgtgaaacctcaagaa

SEQ ID NO: 3212284 - DNA, 25 bp, Homo sapien
tatggaaggttccagcgcgtggctc

SEQ ID NO: 3212285 - DNA, 25 bp, Homo sapien
tgcgcagacagctgccgggtccgcg

SEQ ID NO: 3212286 - DNA, 25 bp, Homo sapien
gtggagctcggcgtgcgcagacagc

SEQ ID NO: 3212287 - DNA, 25 bp, Homo sapien
ggcgtgcgcagacagctgccgggtc

SEQ ID NO: 3212288 - DNA, 25 bp, Homo sapien
agctcggcgtgcgcagacagctgcc

SEQ ID NO: 3212289 - DNA, 25 bp, Homo sapien
cccgataagaaagacttgcaccgac

SEQ ID NO: 3212290 - DNA, 25 bp, Homo sapien
gggccagaacgttcccagctctcgt

SEQ ID NO: 3212291 - DNA, 25 bp, Homo sapien
ctgctgcgacgggtcgcccaagctg

SEQ ID NO: 3212292 - DNA, 25 bp, Homo sapien
tgaagttccccgaactctacacgtg

SEQ ID NO: 3212293 - DNA, 25 bp, Homo sapien
ggctgtggagccaacttcacaagaa

SEQ ID NO: 3212294 - DNA, 25 bp, Homo sapien
caacttcacaagaaggcgctggagc

SEQ ID NO: 3212295 - DNA, 25 bp, Homo sapien
ttggcatacccagacccagatgtgg

SEQ ID NO: 3212296 - DNA, 25 bp, Homo sapien
cagagcttggcgttcctcaaagttc

SEQ ID NO: 3212297 - DNA, 25 bp, Homo sapien
tgctgcttttacaccttcacttttt

SEQ ID NO: 3212298 - DNA, 25 bp, Homo sapien
cttgtgctgcttttacaccttcact

SEQ ID NO: 3212299 - DNA, 25 bp, Homo sapien
tatctcttattgcacttgtgctgct

SEQ ID NO: 3212300 - DNA, 25 bp, Homo sapien
atatctcttattgcacttgtgctgc

SEQ ID NO: 3212301 - DNA, 25 bp, Homo sapien
gtgctgtatctctcaggattatcac

SEQ ID NO: 3212302 - DNA, 25 bp, Homo sapien
cttagatttgtgctgtatctctcag

SEQ ID NO: 3212303 - DNA, 25 bp, Homo sapien
attacacatccaaccagtgccagcc

SEQ ID NO: 3212304 - DNA, 25 bp, Homo sapien
gatttgtgctgtatctctcaggatt

SEQ ID NO: 3212305 - DNA, 25 bp, Homo sapien
gccattgctgggtaggaccaaatta

SEQ ID NO: 3212306 - DNA, 25 bp, Homo sapien
catagataaggtctccaagggcaag

SEQ ID NO: 3212307 - DNA, 25 bp, Homo sapien
tctgctgtgggcaatagttgtgcat

SEQ ID NO: 3212308 - DNA, 25 bp, Homo sapien
caagggcaagactggctatcagcgc

SEQ ID NO: 3212309 - DNA, 25 bp, Homo sapien
gagcatgggtttaaatttgcaaata

SEQ ID NO: 3212310 - DNA, 25 bp, Homo sapien
tcagagcatgggtttaaatttgcaa

SEQ ID NO: 3212311 - DNA, 25 bp, Homo sapien
agcatgggtttaaatttgcaaatac

SEQ ID NO: 3212312 - DNA, 25 bp, Homo sapien
cagagcatgggtttaaatttgcaaa

SEQ ID NO: 3212313 - DNA, 25 bp, Homo sapien
aaggagaccacagtaaagcaggcaa

SEQ ID NO: 3212314 - DNA, 25 bp, Homo sapien
tattagttagtaatgctgctcagca

SEQ ID NO: 3212315 - DNA, 25 bp, Homo sapien
gagtgattctcgagacatctggtgg

SEQ ID NO: 3212316 - DNA, 25 bp, Homo sapien
caaggtcaacagtggcctgctatca

SEQ ID NO: 3212317 - DNA, 25 bp, Homo sapien
gaaagagatggtaattttttgattg

SEQ ID NO: 3212318 - DNA, 25 bp, Homo sapien
cagtgtactggtgtaattttgggaa

SEQ ID NO: 3212319 - DNA, 25 bp, Homo sapien
tcatctatattatcagaccactgat

SEQ ID NO: 3212320 - DNA, 25 bp, Homo sapien
ttgcaatgtcaaaattgtaaccatt

SEQ ID NO: 3212321 - DNA, 25 bp, Homo sapien
taaagtgagatggacagctgctacc

SEQ ID NO: 3212322 - DNA, 25 bp, Homo sapien
ttaatgacatccgaaacagcccagc

SEQ ID NO: 3212323 - DNA, 25 bp, Homo sapien
cagcagcagcaattcggtgactaca

SEQ ID NO: 3212324 - DNA, 25 bp, Homo sapien
cgtcaaaagcgtctatggcaagcca

SEQ ID NO: 3212325 - DNA, 25 bp, Homo sapien
taccggcttctatcactgttgttct

SEQ ID NO: 3212326 - DNA, 25 bp, Homo sapien
tattatccacggcatcaactccctg

SEQ ID NO: 3212327 - DNA, 25 bp, Homo sapien
gatctgctttgtgccacatgctaag

SEQ ID NO: 3212328 - DNA, 25 bp, Homo sapien
catgctaagtggagacgtgatttac

SEQ ID NO: 3212329 - DNA, 25 bp, Homo sapien
ggagcggcactaacccagtttggat

SEQ ID NO: 3212330 - DNA, 25 bp, Homo sapien
tgatggcagcatgcctgaaggaact

SEQ ID NO: 3212331 - DNA, 25 bp, Homo sapien
ggatggatcccagttgcacaagatg

SEQ ID NO: 3212332 - DNA, 25 bp, Homo sapien
gcatcagagctaccctatgggaaaa

SEQ ID NO: 3212333 - DNA, 25 bp, Homo sapien
tattgatcagaatgctggaaccaga

SEQ ID NO: 3212334 - DNA, 25 bp, Homo sapien
cgggaataactgtgctgtgagccaa

SEQ ID NO: 3212335 - DNA, 25 bp, Homo sapien
cagccatgggaacagtcttgcagtg

SEQ ID NO: 3212336 - DNA, 25 bp, Homo sapien
tgtgagccaaatgccgagggttagc

SEQ ID NO: 3212337 - DNA, 25 bp, Homo sapien
tctgagcagaggtgtcgaggcaatc

SEQ ID NO: 3212338 - DNA, 25 bp, Homo sapien
ccagctgaaactatgggctagccat

SEQ ID NO: 3212339 - DNA, 25 bp, Homo sapien
gacaaattgcctagcctttcaagtg

SEQ ID NO: 3212340 - DNA, 25 bp, Homo sapien
tagtgactaggagacttcagggtgc

SEQ ID NO: 3212341 - DNA, 25 bp, Homo sapien
ctcaaatagaacgtcagcaacttga

SEQ ID NO: 3212342 - DNA, 25 bp, Homo sapien
tcagcaacttgaaggcacggctagc

SEQ ID NO: 3212343 - DNA, 25 bp, Homo sapien
ggtatccaggctaactttattggct

SEQ ID NO: 3212344 - DNA, 25 bp, Homo sapien
tacttgagtataaaactccgctggt

SEQ ID NO: 3212345 - DNA, 25 bp, Homo sapien
tgattttctgactgagtaacttcaa

SEQ ID NO: 3212346 - DNA, 25 bp, Homo sapien
gcacctgactgctaacagtttggaa

SEQ ID NO: 3212347 - DNA, 25 bp, Homo sapien
tgatttttacagcatagaggtaaga

SEQ ID NO: 3212348 - DNA, 25 bp, Homo sapien
tcttgtaattcaattggtccttcca

SEQ ID NO: 3212349 - DNA, 25 bp, Homo sapien
gggagcaatcatggctcagaagcct

SEQ ID NO: 3212350 - DNA, 25 bp, Homo sapien
cagtgggagcaatcatggctcagaa

SEQ ID NO: 3212351 - DNA, 25 bp, Homo sapien
tggctcagaagcctcgacctgggct

SEQ ID NO: 3212352 - DNA, 25 bp, Homo sapien
gtgggagcaatcatggctcagaagc

SEQ ID NO: 3212353 - DNA, 25 bp, Homo sapien
tggaaactggatggaacttagctac

SEQ ID NO: 3212354 - DNA, 25 bp, Homo sapien
tactgcctgaacagtggaaaggtct

SEQ ID NO: 3212355 - DNA, 25 bp, Homo sapien
cagttgtcaccgtaaagttgtcatt

SEQ ID NO: 3212356 - DNA, 25 bp, Homo sapien
tcagaacgtctgtctcagtcctcaa

SEQ ID NO: 3212357 - DNA, 25 bp, Homo sapien
caagctgacgagtcgtattggttca

SEQ ID NO: 3212358 - DNA, 25 bp, Homo sapien
cctagaccatggcaaagaactcact

SEQ ID NO: 3212359 - DNA, 25 bp, Homo sapien
ggttaatcaggcacctcagatcagt

SEQ ID NO: 3212360 - DNA, 25 bp, Homo sapien
cccaaaagagtctgacaagctgacg

SEQ ID NO: 3212361 - DNA, 25 bp, Homo sapien
aaatggtagagctggcacggagcat

SEQ ID NO: 3212362 - DNA, 25 bp, Homo sapien
tggtaagaaatggtagagctggcac

SEQ ID NO: 3212363 - DNA, 25 bp, Homo sapien
gacacagtggtaagaaatggtagag

SEQ ID NO: 3212364 - DNA, 25 bp, Homo sapien
taagaaatggtagagctggcacgga

SEQ ID NO: 3212365 - DNA, 25 bp, Homo sapien
gaaatacgccaaagtcattgtgatc

SEQ ID NO: 3212366 - DNA, 25 bp, Homo sapien
tgtcaacactaagagcgcagaggtt

SEQ ID NO: 3212367 - DNA, 25 bp, Homo sapien
cagcttgcaaagaaatacgccaaag

SEQ ID NO: 3212368 - DNA, 25 bp, Homo sapien
gtgatccccaccgaggacttctgca

SEQ ID NO: 3212369 - DNA, 25 bp, Homo sapien
cattctctcgtgtgaaagcttttga

SEQ ID NO: 3212370 - DNA, 25 bp, Homo sapien
catacaagtcctgaagcttagggtc

SEQ ID NO: 3212371 - DNA, 25 bp, Homo sapien
tagtaaagtgtgtgtctagggaaca

SEQ ID NO: 3212372 - DNA, 25 bp, Homo sapien
gcaaatggaatcttatcttcaggaa

SEQ ID NO: 3212373 - DNA, 25 bp, Homo sapien
tcagtacgatagtgaacagactccc

SEQ ID NO: 3212374 - DNA, 25 bp, Homo sapien
ccagttgcctgatcttgacaataga

SEQ ID NO: 3212375 - DNA, 25 bp, Homo sapien
tgggttcaagaactgacatcagctt

SEQ ID NO: 3212376 - DNA, 25 bp, Homo sapien
taaaacaaagctgcctcattaatgg

SEQ ID NO: 3212377 - DNA, 25 bp, Homo sapien
taccaagtgcctgttaatgaatgct

SEQ ID NO: 3212378 - DNA, 25 bp, Homo sapien
cgggcgtggcccttatcaatttaat

SEQ ID NO: 3212379 - DNA, 25 bp, Homo sapien
tcctatgtttctacacgggcgtggc

SEQ ID NO: 3212380 - DNA, 25 bp, Homo sapien
ttccataaggtacagtgccgcccct

SEQ ID NO: 3212381 - DNA, 25 bp, Homo sapien
agagctggcatcttgtcgcatcctc

SEQ ID NO: 3212382 - DNA, 25 bp, Homo sapien
tctgcctggtctccagtgaacctgg

SEQ ID NO: 3212383 - DNA, 25 bp, Homo sapien
tcttgtcgcatcctctgcctggtct

SEQ ID NO: 3212384 - DNA, 25 bp, Homo sapien
tccagtgaacctggggcgtctggac

SEQ ID NO: 3212385 - DNA, 25 bp, Homo sapien
ttcaaagggtaccatgacgaagcca

SEQ ID NO: 3212386 - DNA, 25 bp, Homo sapien
caatcgcttcaggaatggccaggat

SEQ ID NO: 3212387 - DNA, 25 bp, Homo sapien
caggatccagatggagacaatttca

SEQ ID NO: 3212388 - DNA, 25 bp, Homo sapien
aattccctgaacacgactccaggag

SEQ ID NO: 3212389 - DNA, 25 bp, Homo sapien
gatcgcagtgcacaccaagggcata

SEQ ID NO: 3212390 - DNA, 25 bp, Homo sapien
actgagggcaattctcaagctgcca

SEQ ID NO: 3212391 - DNA, 25 bp, Homo sapien
tcaacatctcacaagtcatgagggt

SEQ ID NO: 3212392 - DNA, 25 bp, Homo sapien
tcatgagggtgtagaagatcgcagt

SEQ ID NO: 3212393 - DNA, 25 bp, Homo sapien
agagcaaaaattacaaccaagcaga

SEQ ID NO: 3212394 - DNA, 25 bp, Homo sapien
gtccatctcgttatacacagttttc

SEQ ID NO: 3212395 - DNA, 25 bp, Homo sapien
gcaaagagcaaaaattacaaccaag

SEQ ID NO: 3212396 - DNA, 25 bp, Homo sapien
agtaattcacatcggttcttgtcca

SEQ ID NO: 3212397 - DNA, 25 bp, Homo sapien
taaaatctgctcactagcatttctt

SEQ ID NO: 3212398 - DNA, 25 bp, Homo sapien
aagaaaatggtgtagaataattaga

SEQ ID NO: 3212399 - DNA, 25 bp, Homo sapien
tttaaaatctgctcactagcatttc

SEQ ID NO: 3212400 - DNA, 25 bp, Homo sapien
aaatctgctcactagcatttcttcc

SEQ ID NO: 3212401 - DNA, 25 bp, Homo sapien
taataccgatgtaatccatgagcag

SEQ ID NO: 3212402 - DNA, 25 bp, Homo sapien
caagttaataccgatgtaatccatg

SEQ ID NO: 3212403 - DNA, 25 bp, Homo sapien
taccgatgtaatccatgagcagtaa

SEQ ID NO: 3212404 - DNA, 25 bp, Homo sapien
ggttgccaagttaataccgatgtaa

SEQ ID NO: 3212405 - DNA, 25 bp, Homo sapien
aaaatacagagctatggggtttata

SEQ ID NO: 3212406 - DNA, 25 bp, Homo sapien
aatacagagctatggggtttataca

SEQ ID NO: 3212407 - DNA, 25 bp, Homo sapien
aaatacagagctatggggtttatac

SEQ ID NO: 3212408 - DNA, 25 bp, Homo sapien
gtctgttgactgtttaatatactca

SEQ ID NO: 3212409 - DNA, 25 bp, Homo sapien
aagtaatattacaactggaattggc

SEQ ID NO: 3212410 - DNA, 25 bp, Homo sapien
aattggctgtgtctgttgactgttt

SEQ ID NO: 3212411 - DNA, 25 bp, Homo sapien
aaaagtagtatagctgatcaaagta

SEQ ID NO: 3212412 - DNA, 25 bp, Homo sapien
tgtccattcgcattcgagggaagtg

SEQ ID NO: 3212413 - DNA, 25 bp, Homo sapien
gggcaaatgtccattcgcattcgag

SEQ ID NO: 3212414 - DNA, 25 bp, Homo sapien
cattcgcattcgagggaagtgaacc

SEQ ID NO: 3212415 - DNA, 25 bp, Homo sapien
cccattcccggccaaacacagcggc

SEQ ID NO: 3212416 - DNA, 25 bp, Homo sapien
ggaacagactcgaagtaaggcgagc

SEQ ID NO: 3212417 - DNA, 25 bp, Homo sapien
ggaaggaacagactcgaagtaaggc

SEQ ID NO: 3212418 - DNA, 25 bp, Homo sapien
cagactcgaagtaaggcgagcctac

SEQ ID NO: 3212419 - DNA, 25 bp, Homo sapien
gaaggaacagactcgaagtaaggcg

SEQ ID NO: 3212420 - DNA, 25 bp, Homo sapien
ttatggctgctccggtctgtgttgt

SEQ ID NO: 3212421 - DNA, 25 bp, Homo sapien
catggggaccgaggtcatcagactt

SEQ ID NO: 3212422 - DNA, 25 bp, Homo sapien
tggttgttttgatcgtggttcttcc

SEQ ID NO: 3212423 - DNA, 25 bp, Homo sapien
actggatgcttgttccgttcatggg

SEQ ID NO: 3212424 - DNA, 25 bp, Homo sapien
tcatcagactgtgctttaagggcct

SEQ ID NO: 3212425 - DNA, 25 bp, Homo sapien
ttatgggccactgccaactcagggc

SEQ ID NO: 3212426 - DNA, 25 bp, Homo sapien
tcagagaagagattcccggactcac

SEQ ID NO: 3212427 - DNA, 25 bp, Homo sapien
taaaatgcacgttgacgccttcaga

SEQ ID NO: 3212428 - DNA, 25 bp, Homo sapien
tccctaacggtgtatgctcctccat

SEQ ID NO: 3212429 - DNA, 25 bp, Homo sapien
gtccctaacggtgtatgctcctcca

SEQ ID NO: 3212430 - DNA, 25 bp, Homo sapien
gtgtccctaacggtgtatgctcctc

SEQ ID NO: 3212431 - DNA, 25 bp, Homo sapien
tgtccctaacggtgtatgctcctcc

SEQ ID NO: 3212432 - DNA, 25 bp, Homo sapien
cctttcccttcctctgcatcagatg

SEQ ID NO: 3212433 - DNA, 25 bp, Homo sapien
ttcccttcctctgcatcagatgatc

SEQ ID NO: 3212434 - DNA, 25 bp, Homo sapien
ctcctttcccttcctctgcatcaga

SEQ ID NO: 3212435 - DNA, 25 bp, Homo sapien
tttcccttcctctgcatcagatgat

SEQ ID NO: 3212436 - DNA, 25 bp, Homo sapien
ctaagtgaaaattcctttgctcctt

SEQ ID NO: 3212437 - DNA, 25 bp, Homo sapien
ggatttccagtcgtattctgtgaag

SEQ ID NO: 3212438 - DNA, 25 bp, Homo sapien
gtattctgtgaagctccttactgca

SEQ ID NO: 3212439 - DNA, 25 bp, Homo sapien
gaagctccttactgcataatctgac

SEQ ID NO: 3212440 - DNA, 25 bp, Homo sapien
aaagtgggtatgtggatttccagtc

SEQ ID NO: 3212441 - DNA, 25 bp, Homo sapien
tggaggtaggtatgaataactttta

SEQ ID NO: 3212442 - DNA, 25 bp, Homo sapien
ctcttccgggttgcgggctgctatc

SEQ ID NO: 3212443 - DNA, 25 bp, Homo sapien
ccgggttgcgggctgctatcttctt

SEQ ID NO: 3212444 - DNA, 25 bp, Homo sapien
gccctcttccgggttgcgggctgct

SEQ ID NO: 3212445 - DNA, 25 bp, Homo sapien
ggttgcgggctgctatcttcttcct

SEQ ID NO: 3212446 - DNA, 25 bp, Homo sapien
ggtgcatgcctgtagggtgaggagg

SEQ ID NO: 3212447 - DNA, 25 bp, Homo sapien
gcagtgaactgtgaccaggccactg

SEQ ID NO: 3212448 - DNA, 25 bp, Homo sapien
tgcatgcctgtagggtgaggaggga

SEQ ID NO: 3212449 - DNA, 25 bp, Homo sapien
acttgagccagggaagtcgaagctg

SEQ ID NO: 3212450 - DNA, 25 bp, Homo sapien
cctttcagatgacccatattgtgga

SEQ ID NO: 3212451 - DNA, 25 bp, Homo sapien
tattgtggaaaccagtatctgaaca

SEQ ID NO: 3212452 - DNA, 25 bp, Homo sapien
gacccatattgtggaaaccagtatc

SEQ ID NO: 3212453 - DNA, 25 bp, Homo sapien
tcagatgacccatattgtggaaacc

SEQ ID NO: 3212454 - DNA, 25 bp, Homo sapien
acttcagcagacttgtagtctctga

SEQ ID NO: 3212455 - DNA, 25 bp, Homo sapien
gagcttttctggcatgccagtctca

SEQ ID NO: 3212456 - DNA, 25 bp, Homo sapien
cagacttgtagtctctgaccatcca

SEQ ID NO: 3212457 - DNA, 25 bp, Homo sapien
ctggagcttttctggcatgccagtc

SEQ ID NO: 3212458 - DNA, 25 bp, Homo sapien
tctgctgcgttcagttacaggctcc

SEQ ID NO: 3212459 - DNA, 25 bp, Homo sapien
gctgcgttcagttacaggctccaga

SEQ ID NO: 3212460 - DNA, 25 bp, Homo sapien
agagtctgctgcgttcagttacagg

SEQ ID NO: 3212461 - DNA, 25 bp, Homo sapien
cgttcagttacaggctccagaaact

SEQ ID NO: 3212462 - DNA, 25 bp, Homo sapien
ctagagctacaagggccggagattg

SEQ ID NO: 3212463 - DNA, 25 bp, Homo sapien
cagtatgccctttgaagtgaaagac

SEQ ID NO: 3212464 - DNA, 25 bp, Homo sapien
catgagtgccagagggcaatgtttg

SEQ ID NO: 3212465 - DNA, 25 bp, Homo sapien
tgtactcagctctacttcataggaa

SEQ ID NO: 3212466 - DNA, 25 bp, Homo sapien
tccctatcgttgagttcctgcagca

SEQ ID NO: 3212467 - DNA, 25 bp, Homo sapien
tccgctgtggatcgtcggctgctca

SEQ ID NO: 3212468 - DNA, 25 bp, Homo sapien
caacctactgggaccatctgaaaga

SEQ ID NO: 3212469 - DNA, 25 bp, Homo sapien
cacaggatacgttaatgggcaggtt

SEQ ID NO: 3212470 - DNA, 25 bp, Homo sapien
tctgtaagaatgcaaggtgtcaggg

SEQ ID NO: 3212471 - DNA, 25 bp, Homo sapien
cctgcccctcttaatgcttctgtaa

SEQ ID NO: 3212472 - DNA, 25 bp, Homo sapien
aattgtttgagtggtccctgcccct

SEQ ID NO: 3212473 - DNA, 25 bp, Homo sapien
tcccaaattgtttgagtggtccctg

SEQ ID NO: 3212474 - DNA, 25 bp, Homo sapien
tatcttggatatgccgtatgcgtag

SEQ ID NO: 3212475 - DNA, 25 bp, Homo sapien
gtttggtacacagtagaggctatct

SEQ ID NO: 3212476 - DNA, 25 bp, Homo sapien
gctacagcgtttttgctgcctataa

SEQ ID NO: 3212477 - DNA, 25 bp, Homo sapien
gtctctgtgctttcagctacagcgt

SEQ ID NO: 3212478 - DNA, 25 bp, Homo sapien
gtggaattgccgcagatggtccagc

SEQ ID NO: 3212479 - DNA, 25 bp, Homo sapien
tgccgcagatggtccagcgggctat

SEQ ID NO: 3212480 - DNA, 25 bp, Homo sapien
caggattgcgtactggggttagaaa

SEQ ID NO: 3212481 - DNA, 25 bp, Homo sapien
gaagtgggtggaattgccgcagatg

SEQ ID NO: 3212482 - DNA, 25 bp, Homo sapien
tacagcggaacccaaggccaaacca

SEQ ID NO: 3212483 - DNA, 25 bp, Homo sapien
tctttggggatcgagcttcctacct

SEQ ID NO: 3212484 - DNA, 25 bp, Homo sapien
tcgattccgctagtaggtaaggccc

SEQ ID NO: 3212485 - DNA, 25 bp, Homo sapien
acagaccaggaaccggcctctaggg

SEQ ID NO: 3212486 - DNA, 25 bp, Homo sapien
tccggttctgtctcgcagctgcctg

SEQ ID NO: 3212487 - DNA, 25 bp, Homo sapien
tgttttgtcaactcgcatactacgg

SEQ ID NO: 3212488 - DNA, 25 bp, Homo sapien
tagcctctcagggtgctattggcga

SEQ ID NO: 3212489 - DNA, 25 bp, Homo sapien
cggagaaaaagctgtcgggcgactt

SEQ ID NO: 3212490 - DNA, 25 bp, Homo sapien
actttacgaacagctcgagccgcct

SEQ ID NO: 3212491 - DNA, 25 bp, Homo sapien
cagatccggttagcaagggaaaaga

SEQ ID NO: 3212492 - DNA, 25 bp, Homo sapien
gttttcgcacaaatcagatccggtt

SEQ ID NO: 3212493 - DNA, 25 bp, Homo sapien
cacaaatcagatccggttagcaagg

SEQ ID NO: 3212494 - DNA, 25 bp, Homo sapien
tttcgcacaaatcagatccggttag

SEQ ID NO: 3212495 - DNA, 25 bp, Homo sapien
ggtagatgaccgctactaaaggtcg

SEQ ID NO: 3212496 - DNA, 25 bp, Homo sapien
tcccacacgcataggggaaccgcaa

SEQ ID NO: 3212497 - DNA, 25 bp, Homo sapien
caaccactattgacaccaggtagat

SEQ ID NO: 3212498 - DNA, 25 bp, Homo sapien
taaaggtcgaatccactgtctccag

SEQ ID NO: 3212499 - DNA, 25 bp, Homo sapien
tggtttttgtagttcaggttgtgta

SEQ ID NO: 3212500 - DNA, 25 bp, Homo sapien
aaccaagccttggtgtgtattccaa

SEQ ID NO: 3212501 - DNA, 25 bp, Homo sapien
agtgttgcaatatcacccacagtga

SEQ ID NO: 3212502 - DNA, 25 bp, Homo sapien
tcaggttgtgtataatgcactaagt

SEQ ID NO: 3212503 - DNA, 25 bp, Homo sapien
taaactgtaaataggtaccatccaa

SEQ ID NO: 3212504 - DNA, 25 bp, Homo sapien
tctaaactgtaaataggtaccatcc

SEQ ID NO: 3212505 - DNA, 25 bp, Homo sapien
ctaaactgtaaataggtaccatcca

SEQ ID NO: 3212506 - DNA, 25 bp, Homo sapien
atctaaactgtaaataggtaccatc

SEQ ID NO: 3212507 - DNA, 25 bp, Homo sapien
tatattgcaattccgggatatttca

SEQ ID NO: 3212508 - DNA, 25 bp, Homo sapien
ggcttcaaggattaataccagattt

SEQ ID NO: 3212509 - DNA, 25 bp, Homo sapien
ccagatttggataccggttagttag

SEQ ID NO: 3212510 - DNA, 25 bp, Homo sapien
tctctgcaggtatccacatatattg

SEQ ID NO: 3212511 - DNA, 25 bp, Homo sapien
ggtgaaaggtctgacaactgtgtac

SEQ ID NO: 3212512 - DNA, 25 bp, Homo sapien
aaagcaacgatggtggtgaaaggtc

SEQ ID NO: 3212513 - DNA, 25 bp, Homo sapien
actgtaatacacctagtttgcacct

SEQ ID NO: 3212514 - DNA, 25 bp, Homo sapien
tacacctagtttgcacctaaacagc

SEQ ID NO: 3212515 - DNA, 25 bp, Homo sapien
caaaatacagcaatagcaatactta

SEQ ID NO: 3212516 - DNA, 25 bp, Homo sapien
atcaaaatcgtacttcaaaatacag

SEQ ID NO: 3212517 - DNA, 25 bp, Homo sapien
taaaaatgagatatctctgattaaa

SEQ ID NO: 3212518 - DNA, 25 bp, Homo sapien
tctgattaaatcaaaatcgtacttc

SEQ ID NO: 3212519 - DNA, 25 bp, Homo sapien
taaagttcccttcgtcatatatacc

SEQ ID NO: 3212520 - DNA, 25 bp, Homo sapien
tattataaccaaataagtccaagca

SEQ ID NO: 3212521 - DNA, 25 bp, Homo sapien
caactgtgacatgttgtttattata

SEQ ID NO: 3212522 - DNA, 25 bp, Homo sapien
catatataccaagcagctcacagat

SEQ ID NO: 3212523 - DNA, 25 bp, Homo sapien
agctatgcaatgagcaacagaaata

SEQ ID NO: 3212524 - DNA, 25 bp, Homo sapien
atggtcaacatgtgagggtataagt

SEQ ID NO: 3212525 - DNA, 25 bp, Homo sapien
aaagaagcaagccttatcctaagaa

SEQ ID NO: 3212526 - DNA, 25 bp, Homo sapien
agttatagatacgaatttagtacag

SEQ ID NO: 3212527 - DNA, 25 bp, Homo sapien
cattacatcataggtctttggaaca

SEQ ID NO: 3212528 - DNA, 25 bp, Homo sapien
cattcaactagtccctaacattggg

SEQ ID NO: 3212529 - DNA, 25 bp, Homo sapien
gggaaaactttagctacatggacat

SEQ ID NO: 3212530 - DNA, 25 bp, Homo sapien
aacagaattactggttccaaagagg

SEQ ID NO: 3212531 - DNA, 25 bp, Homo sapien
ccaccagctttacacaaagaaattt

SEQ ID NO: 3212532 - DNA, 25 bp, Homo sapien
ttacacaaagaaatttgccaacagg

SEQ ID NO: 3212533 - DNA, 25 bp, Homo sapien
ccagctttacacaaagaaatttgcc

SEQ ID NO: 3212534 - DNA, 25 bp, Homo sapien
agagcaggagacaatacatggcaaa

SEQ ID NO: 3212535 - DNA, 25 bp, Homo sapien
gtggccacagcttctacagtttgcc

SEQ ID NO: 3212536 - DNA, 25 bp, Homo sapien
cagtttgccattcccacgtatgctt

SEQ ID NO: 3212537 - DNA, 25 bp, Homo sapien
ccattcccacgtatgcttttcagaa

SEQ ID NO: 3212538 - DNA, 25 bp, Homo sapien
tcagaaataacgccaacttttacca

SEQ ID NO: 3212539 - DNA, 25 bp, Homo sapien
taatagccccataccctgtgtgttg

SEQ ID NO: 3212540 - DNA, 25 bp, Homo sapien
agtaattatggccaatttctctagg

SEQ ID NO: 3212541 - DNA, 25 bp, Homo sapien
ctacaaggagaaatgtggaaagaga

SEQ ID NO: 3212542 - DNA, 25 bp, Homo sapien
tattcatggatctgctacaaattag

SEQ ID NO: 3212543 - DNA, 25 bp, Homo sapien
tgtgtaatgatgagcaatggcagcg

SEQ ID NO: 3212544 - DNA, 25 bp, Homo sapien
gcagcgaggaacatctcaatacaga

SEQ ID NO: 3212545 - DNA, 25 bp, Homo sapien
tatatgagaatgtgtaatgatgagc

SEQ ID NO: 3212546 - DNA, 25 bp, Homo sapien
cttcttggacatatggtttatatga

SEQ ID NO: 3212547 - DNA, 25 bp, Homo sapien
aaaggaatcaaagcatgagccctct

SEQ ID NO: 3212548 - DNA, 25 bp, Homo sapien
caacatgccttacttgttcagaaat

SEQ ID NO: 3212549 - DNA, 25 bp, Homo sapien
aaggaatcaaagcatgagccctctt

SEQ ID NO: 3212550 - DNA, 25 bp, Homo sapien
tacttgttcagaaatatcatctcta

SEQ ID NO: 3212551 - DNA, 25 bp, Homo sapien
taaacttgtatgttcattttgatct

SEQ ID NO: 3212552 - DNA, 25 bp, Homo sapien
tttgatcttgatcctcgggaaacaa

SEQ ID NO: 3212553 - DNA, 25 bp, Homo sapien
tttttcctgggatgtcccctgactg

SEQ ID NO: 3212554 - DNA, 25 bp, Homo sapien
gatcttgatcctcgggaaacaattt

SEQ ID NO: 3212555 - DNA, 25 bp, Homo sapien
gtagtgacccatgggtgaaggtggc

SEQ ID NO: 3212556 - DNA, 25 bp, Homo sapien
cacagtgtgtccaaacccttggtag

SEQ ID NO: 3212557 - DNA, 25 bp, Homo sapien
tgtccaaacccttggtagtgaccca

SEQ ID NO: 3212558 - DNA, 25 bp, Homo sapien
ccaaacccttggtagtgacccatgg

SEQ ID NO: 3212559 - DNA, 25 bp, Homo sapien
ttttctctcctatagtatcactaag

SEQ ID NO: 3212560 - DNA, 25 bp, Homo sapien
tcctatagtatcactaaggatttca

SEQ ID NO: 3212561 - DNA, 25 bp, Homo sapien
gaatccacggatttatctgaaggtt

SEQ ID NO: 3212562 - DNA, 25 bp, Homo sapien
caggaatccacggatttatctgaag

SEQ ID NO: 3212563 - DNA, 25 bp, Homo sapien
gcagtagttgtacctggctttcagc

SEQ ID NO: 3212564 - DNA, 25 bp, Homo sapien
gagtatgcgataccctaatgttaag

SEQ ID NO: 3212565 - DNA, 25 bp, Homo sapien
taaagcagtgtaacatcaggaagat

SEQ ID NO: 3212566 - DNA, 25 bp, Homo sapien
ctcatgcagcagtggtaggaagtac

SEQ ID NO: 3212567 - DNA, 25 bp, Homo sapien
tcagtattcttttgcctattcaggg

SEQ ID NO: 3212568 - DNA, 25 bp, Homo sapien
gcaattagagaaaccccatcctagg

SEQ ID NO: 3212569 - DNA, 25 bp, Homo sapien
catgagcacgggatacctttccatt

SEQ ID NO: 3212570 - DNA, 25 bp, Homo sapien
cagctagcctaactggtgagaggta

SEQ ID NO: 3212571 - DNA, 25 bp, Homo sapien
tttgttacctaaaatcctcatgttg

SEQ ID NO: 3212572 - DNA, 25 bp, Homo sapien
gcagctgacatctactcatttacca

SEQ ID NO: 3212573 - DNA, 25 bp, Homo sapien
tatccccctataaccagttttgctc

SEQ ID NO: 3212574 - DNA, 25 bp, Homo sapien
tagcaaatggcaagatatcgttggt

SEQ ID NO: 3212575 - DNA, 25 bp, Homo sapien
tgagctgttacaagagcagactgtt

SEQ ID NO: 3212576 - DNA, 25 bp, Homo sapien
ccggttagcttgtctttaggagaga

SEQ ID NO: 3212577 - DNA, 25 bp, Homo sapien
catttgatagttgattgctggcatc

SEQ ID NO: 3212578 - DNA, 25 bp, Homo sapien
ctgtgctcctcacatcacggctggg

SEQ ID NO: 3212579 - DNA, 25 bp, Homo sapien
tttcttgttgtgtctttacacggcc

SEQ ID NO: 3212580 - DNA, 25 bp, Homo sapien
ctgctttcttgttgtgtctttacac

SEQ ID NO: 3212581 - DNA, 25 bp, Homo sapien
tgttgtgtctttacacggcctttcc

SEQ ID NO: 3212582 - DNA, 25 bp, Homo sapien
tgtgtctttacacggcctttccttc

SEQ ID NO: 3212583 - DNA, 25 bp, Homo sapien
acttttccaggagaattataatcat

SEQ ID NO: 3212584 - DNA, 25 bp, Homo sapien
tttcctccttctacacacttttcca

SEQ ID NO: 3212585 - DNA, 25 bp, Homo sapien
tcctccttctacacacttttccagg

SEQ ID NO: 3212586 - DNA, 25 bp, Homo sapien
ctccttctacacacttttccaggag

SEQ ID NO: 3212587 - DNA, 25 bp, Homo sapien
tttcttctattagcaatttcagagg

SEQ ID NO: 3212588 - DNA, 25 bp, Homo sapien
ggctttgccactctttcctcattct

SEQ ID NO: 3212589 - DNA, 25 bp, Homo sapien
agaggaggctttgccactctttcct

SEQ ID NO: 3212590 - DNA, 25 bp, Homo sapien
tcttctattagcaatttcagaggag

SEQ ID NO: 3212591 - DNA, 25 bp, Homo sapien
aggaggtatgtttaggtgttctgtc

SEQ ID NO: 3212592 - DNA, 25 bp, Homo sapien
ctgtcctttaacttcaggttcctct

SEQ ID NO: 3212593 - DNA, 25 bp, Homo sapien
ggttcctcttgtatcctaaatccat

SEQ ID NO: 3212594 - DNA, 25 bp, Homo sapien
tatgtttaggtgttctgtcctttaa

SEQ ID NO: 3212595 - DNA, 25 bp, Homo sapien
ctggtggttgggagagaaactgtaa

SEQ ID NO: 3212596 - DNA, 25 bp, Homo sapien
tggtggttgggagagaaactgtaaa

SEQ ID NO: 3212597 - DNA, 25 bp, Homo sapien
attgctttgatttagtgggtgaaga

SEQ ID NO: 3212598 - DNA, 25 bp, Homo sapien
caattgctttgatttagtgggtgaa

SEQ ID NO: 3212599 - DNA, 25 bp, Homo sapien
tcctgaagcaaccaattgctttgat

SEQ ID NO: 3212600 - DNA, 25 bp, Homo sapien
cctgaagcaaccaattgctttgatt

SEQ ID NO: 3212601 - DNA, 25 bp, Homo sapien
attccattcagaaacgcagttgtca

SEQ ID NO: 3212602 - DNA, 25 bp, Homo sapien
tccattcagaaacgcagttgtcatc

SEQ ID NO: 3212603 - DNA, 25 bp, Homo sapien
gaaacgcagttgtcatcttcgttct

SEQ ID NO: 3212604 - DNA, 25 bp, Homo sapien
cagaaacgcagttgtcatcttcgtt

SEQ ID NO: 3212605 - DNA, 25 bp, Homo sapien
gcaaggcgaagaccctctctgctct

SEQ ID NO: 3212606 - DNA, 25 bp, Homo sapien
tctctgctctaaagtcttcactatc

SEQ ID NO: 3212607 - DNA, 25 bp, Homo sapien
tttgagacaccttcctccgtgtgtg

SEQ ID NO: 3212608 - DNA, 25 bp, Homo sapien
tgctggaagcaaggcgaagaccctc

SEQ ID NO: 3212609 - DNA, 25 bp, Homo sapien
cccacttctgtattgctttggtggg

SEQ ID NO: 3212610 - DNA, 25 bp, Homo sapien
gggaggcttctgaaactgtgggatg

SEQ ID NO: 3212611 - DNA, 25 bp, Homo sapien
tacccacttctgtattgctttggtg

SEQ ID NO: 3212612 - DNA, 25 bp, Homo sapien
aggcttctgaaactgtgggatgttc

SEQ ID NO: 3212613 - DNA, 25 bp, Homo sapien
tgtctgctagcctcactcccaccac

SEQ ID NO: 3212614 - DNA, 25 bp, Homo sapien
tagcctttggcggtcagcccctttc

SEQ ID NO: 3212615 - DNA, 25 bp, Homo sapien
ctagcctttggcggtcagccccttt

SEQ ID NO: 3212616 - DNA, 25 bp, Homo sapien
gccgcgcgttcagggagcacagagg

SEQ ID NO: 3212617 - DNA, 25 bp, Homo sapien
agcacagaggagctagcaggcccgg

SEQ ID NO: 3212618 - DNA, 25 bp, Homo sapien
tcccgtagagccgagtcctgcggcg

SEQ ID NO: 3212619 - DNA, 25 bp, Homo sapien
gagcgcggcacggacatgtcccgta

SEQ ID NO: 3212620 - DNA, 25 bp, Homo sapien
aaccacgggctgtcgaggtagcagt

SEQ ID NO: 3212621 - DNA, 25 bp, Homo sapien
tcgtcgcagcgatgaggttcttccc

SEQ ID NO: 3212622 - DNA, 25 bp, Homo sapien
tctcgagttccgcttcgtgagcgcg

SEQ ID NO: 3212623 - DNA, 25 bp, Homo sapien
gtgagcgcggatcctctcccggaac

SEQ ID NO: 3212624 - DNA, 25 bp, Homo sapien
gcagcataaagccaggtggactttc

SEQ ID NO: 3212625 - DNA, 25 bp, Homo sapien
cataaagccaggtggactttctggt

SEQ ID NO: 3212626 - DNA, 25 bp, Homo sapien
ttgaaccctcctcagcacggcaggg

SEQ ID NO: 3212627 - DNA, 25 bp, Homo sapien
tttctggtttggcacgtgaaggacc

SEQ ID NO: 3212628 - DNA, 25 bp, Homo sapien
tatggaagacttcaaagcatcaagc

SEQ ID NO: 3212629 - DNA, 25 bp, Homo sapien
tacaggacagtaaactcaagggcaa

SEQ ID NO: 3212630 - DNA, 25 bp, Homo sapien
ggtcgcataggcctcaaaactctaa

SEQ ID NO: 3212631 - DNA, 25 bp, Homo sapien
aattcagcagtaagccttcaggtcg

SEQ ID NO: 3212632 - DNA, 25 bp, Homo sapien
gcccaagatagtgggtagcagtccc

SEQ ID NO: 3212633 - DNA, 25 bp, Homo sapien
gatagtgggtagcagtcccaggcat

SEQ ID NO: 3212634 - DNA, 25 bp, Homo sapien
ctcaggcccaagatagtgggtagca

SEQ ID NO: 3212635 - DNA, 25 bp, Homo sapien
caagatagtgggtagcagtcccagg

SEQ ID NO: 3212636 - DNA, 25 bp, Homo sapien
atcaaaatttggaagcctttccagg

SEQ ID NO: 3212637 - DNA, 25 bp, Homo sapien
gcatcccgaactacaatcaaaattt

SEQ ID NO: 3212638 - DNA, 25 bp, Homo sapien
gaactacaatcaaaatttggaagcc

SEQ ID NO: 3212639 - DNA, 25 bp, Homo sapien
attttccagcatcccgaactacaat

SEQ ID NO: 3212640 - DNA, 25 bp, Homo sapien
cagcggcctttctgggtatcatgag

SEQ ID NO: 3212641 - DNA, 25 bp, Homo sapien
tttaagtgcaacagaacaaagtgtg

SEQ ID NO: 3212642 - DNA, 25 bp, Homo sapien
tatcatgagggttgtttacccaaac

SEQ ID NO: 3212643 - DNA, 25 bp, Homo sapien
gagaatcagcatgactccggtgaga

SEQ ID NO: 3212644 - DNA, 25 bp, Homo sapien
gacacttggaagtcctacaatcttc

SEQ ID NO: 3212645 - DNA, 25 bp, Homo sapien
cagacacttggaagtcctacaatct

SEQ ID NO: 3212646 - DNA, 25 bp, Homo sapien
ggcagacacttggaagtcctacaat

SEQ ID NO: 3212647 - DNA, 25 bp, Homo sapien
acttggaagtcctacaatcttccca

SEQ ID NO: 3212648 - DNA, 25 bp, Homo sapien
tgtttcttcaactaggttgaaccta

SEQ ID NO: 3212649 - DNA, 25 bp, Homo sapien
tatctgcataccacccactgatggg

SEQ ID NO: 3212650 - DNA, 25 bp, Homo sapien
gtagttagctagaaaagagcaagag

SEQ ID NO: 3212651 - DNA, 25 bp, Homo sapien
actgatgggtatcttttgtaagcat

SEQ ID NO: 3212652 - DNA, 25 bp, Homo sapien
ggttttagtctgattcctctcactg

SEQ ID NO: 3212653 - DNA, 25 bp, Homo sapien
aacaggacaccaactctagctctag

SEQ ID NO: 3212654 - DNA, 25 bp, Homo sapien
tgaagcatctgaaggtctccacact

SEQ ID NO: 3212655 - DNA, 25 bp, Homo sapien
caaagaacttctccactcatatcct

SEQ ID NO: 3212656 - DNA, 25 bp, Homo sapien
taatttcccgaaagtaagctttgca

SEQ ID NO: 3212657 - DNA, 25 bp, Homo sapien
gattaaacctgtgtaccctctatta

SEQ ID NO: 3212658 - DNA, 25 bp, Homo sapien
gctttgcagacattacaaccccacg

SEQ ID NO: 3212659 - DNA, 25 bp, Homo sapien
tagcacagccactattccagattat

SEQ ID NO: 3212660 - DNA, 25 bp, Homo sapien
gactaggccatcttgcaaccatgag

SEQ ID NO: 3212661 - DNA, 25 bp, Homo sapien
cagttgataactggctattctgtta

SEQ ID NO: 3212662 - DNA, 25 bp, Homo sapien
caacagggtcaaggtctaaaagcca

SEQ ID NO: 3212663 - DNA, 25 bp, Homo sapien
cacagaggctgactcataatgcact

SEQ ID NO: 3212664 - DNA, 25 bp, Homo sapien
ggtgagccttttccattataccagg

SEQ ID NO: 3212665 - DNA, 25 bp, Homo sapien
tgtattcccataaccagactgtaaa

SEQ ID NO: 3212666 - DNA, 25 bp, Homo sapien
aagaagccactatagcccaggttcc

SEQ ID NO: 3212667 - DNA, 25 bp, Homo sapien
ggttctgatatccaatgtttgcctc

SEQ ID NO: 3212668 - DNA, 25 bp, Homo sapien
tgacactcagctgtggcaatagtag

SEQ ID NO: 3212669 - DNA, 25 bp, Homo sapien
taggacatgggccaaccagatacag

SEQ ID NO: 3212670 - DNA, 25 bp, Homo sapien
gaaatctaagcttctcaaggtcagg

SEQ ID NO: 3212671 - DNA, 25 bp, Homo sapien
gtaatgtaagtactgccatcctcag

SEQ ID NO: 3212672 - DNA, 25 bp, Homo sapien
attaggatcatgatggataccttca

SEQ ID NO: 3212673 - DNA, 25 bp, Homo sapien
ttaggatcatgatggataccttcat

SEQ ID NO: 3212674 - DNA, 25 bp, Homo sapien
aattaggatcatgatggataccttc

SEQ ID NO: 3212675 - DNA, 25 bp, Homo sapien
ctcccagtaatgtgaccgcatgcaa

SEQ ID NO: 3212676 - DNA, 25 bp, Homo sapien
tgcaaagttggggtgtagctagata

SEQ ID NO: 3212677 - DNA, 25 bp, Homo sapien
tgtttcacccttagcggggctactg

SEQ ID NO: 3212678 - DNA, 25 bp, Homo sapien
taatgtgaccgcatgcaaagttggg

SEQ ID NO: 3212679 - DNA, 25 bp, Homo sapien
taaacactgccctctttccttcaag

SEQ ID NO: 3212680 - DNA, 25 bp, Homo sapien
gccctctttccttcaagcctgctga

SEQ ID NO: 3212681 - DNA, 25 bp, Homo sapien
ccctctttccttcaagcctgctgac

SEQ ID NO: 3212682 - DNA, 25 bp, Homo sapien
ctataaacactgccctctttccttc

SEQ ID NO: 3212683 - DNA, 25 bp, Homo sapien
ctttctgttcattacgaacacacct

SEQ ID NO: 3212684 - DNA, 25 bp, Homo sapien
tttctgttcattacgaacacacctt

SEQ ID NO: 3212685 - DNA, 25 bp, Homo sapien
ttcatcattgattctctcttcccct

SEQ ID NO: 3212686 - DNA, 25 bp, Homo sapien
gaggacgaggaccttcatgaacttt

SEQ ID NO: 3212687 - DNA, 25 bp, Homo sapien
ccttcatgaactttttctggaccat

SEQ ID NO: 3212688 - DNA, 25 bp, Homo sapien
cctatacacccatacaaccaaagga

SEQ ID NO: 3212689 - DNA, 25 bp, Homo sapien
ttaacatcgcacactacactacagc

SEQ ID NO: 3212690 - DNA, 25 bp, Homo sapien
gcatgatgctatactgatcagcaca

SEQ ID NO: 3212691 - DNA, 25 bp, Homo sapien
acaggcatgatgctatactgatcag

SEQ ID NO: 3212692 - DNA, 25 bp, Homo sapien
tgcagacacctgattaacatcgcac

SEQ ID NO: 3212693 - DNA, 25 bp, Homo sapien
ccaactgtctttggccacagattcc

SEQ ID NO: 3212694 - DNA, 25 bp, Homo sapien
caactgtctttggccacagattcct

SEQ ID NO: 3212695 - DNA, 25 bp, Homo sapien
aggacgagaatgctggcgaccacct

SEQ ID NO: 3212696 - DNA, 25 bp, Homo sapien
agataggacgagaatgctggcgacc

SEQ ID NO: 3212697 - DNA, 25 bp, Homo sapien
tgggagataggacgagaatgctggc

SEQ ID NO: 3212698 - DNA, 25 bp, Homo sapien
aggatgggagataggacgagaatgc

SEQ ID NO: 3212699 - DNA, 25 bp, Homo sapien
actccggaacctcatttccctgaag

SEQ ID NO: 3212700 - DNA, 25 bp, Homo sapien
tccctgaagcgacggctgtcagtct

SEQ ID NO: 3212701 - DNA, 25 bp, Homo sapien
catttccctgaagcgacggctgtca

SEQ ID NO: 3212702 - DNA, 25 bp, Homo sapien
aagcgacggctgtcagtcttatgct

SEQ ID NO: 3212703 - DNA, 25 bp, Homo sapien
agtggcttgatgcaatctggctgcc

SEQ ID NO: 3212704 - DNA, 25 bp, Homo sapien
gtggcttgatgcaatctggctgcct

SEQ ID NO: 3212705 - DNA, 25 bp, Homo sapien
tagtggcttgatgcaatctggctgc

SEQ ID NO: 3212706 - DNA, 25 bp, Homo sapien
gatagtggcttgatgcaatctggct

SEQ ID NO: 3212707 - DNA, 25 bp, Homo sapien
tcactccagtcaggacttgcccaat

SEQ ID NO: 3212708 - DNA, 25 bp, Homo sapien
actccagtcaggacttgcccaattc

SEQ ID NO: 3212709 - DNA, 25 bp, Homo sapien
tccagtcaggacttgcccaattctg

SEQ ID NO: 3212710 - DNA, 25 bp, Homo sapien
tgctcactccagtcaggacttgccc

SEQ ID NO: 3212711 - DNA, 25 bp, Homo sapien
tgtcacagcatcaccgataaactca

SEQ ID NO: 3212712 - DNA, 25 bp, Homo sapien
cttaaagtctctgagtgaatgagca

SEQ ID NO: 3212713 - DNA, 25 bp, Homo sapien
tgaatgagcaaacttccgctgggcc

SEQ ID NO: 3212714 - DNA, 25 bp, Homo sapien
ctatgcatcgttcatcatctgtcac

SEQ ID NO: 3212715 - DNA, 25 bp, Homo sapien
tttgaaaattcacgtaaggaagcat

SEQ ID NO: 3212716 - DNA, 25 bp, Homo sapien
tcttgaggcaagtatctattcttcc

SEQ ID NO: 3212717 - DNA, 25 bp, Homo sapien
tggaaatttcttgaggcaagtatct

SEQ ID NO: 3212718 - DNA, 25 bp, Homo sapien
tctccagtatcacactggaaatttc

SEQ ID NO: 3212719 - DNA, 25 bp, Homo sapien
tcctcaaaagtttcaggcgagtgtt

SEQ ID NO: 3212720 - DNA, 25 bp, Homo sapien
tcaaaagcctgaagagtctgcatag

SEQ ID NO: 3212721 - DNA, 25 bp, Homo sapien
gactgaataacaggcttacgggaaa

SEQ ID NO: 3212722 - DNA, 25 bp, Homo sapien
gcaatgctgtccaattgtaaaggtc

SEQ ID NO: 3212723 - DNA, 25 bp, Homo sapien
tgtaaaggtcagttccaaggaggaa

SEQ ID NO: 3212724 - DNA, 25 bp, Homo sapien
taaactctcaaacggtacattcctg

SEQ ID NO: 3212725 - DNA, 25 bp, Homo sapien
taggtaccttggctcatcccgaaat

SEQ ID NO: 3212726 - DNA, 25 bp, Homo sapien
gataatgagtcaccaacagagagga

SEQ ID NO: 3212727 - DNA, 25 bp, Homo sapien
catgacatggtctaaaggctgatcc

SEQ ID NO: 3212728 - DNA, 25 bp, Homo sapien
cagagttggccgattcctcagaagc

SEQ ID NO: 3212729 - DNA, 25 bp, Homo sapien
ccacgcacaaagctctaactgggac

SEQ ID NO: 3212730 - DNA, 25 bp, Homo sapien
cttagatttaaggaacccacgcaca

SEQ ID NO: 3212731 - DNA, 25 bp, Homo sapien
gatggcaatagctcacactcattag

SEQ ID NO: 3212732 - DNA, 25 bp, Homo sapien
tcaggagccgattaataggaaatgg

SEQ ID NO: 3212733 - DNA, 25 bp, Homo sapien
taatcagggtttcagttacacttaa

SEQ ID NO: 3212734 - DNA, 25 bp, Homo sapien
atcagggtttcagttacacttaatg

SEQ ID NO: 3212735 - DNA, 25 bp, Homo sapien
aatcagggtttcagttacacttaat

SEQ ID NO: 3212736 - DNA, 25 bp, Homo sapien
ttaatcagggtttcagttacactta

SEQ ID NO: 3212737 - DNA, 25 bp, Homo sapien
aaacatttcttaggtactgtctaga

SEQ ID NO: 3212738 - DNA, 25 bp, Homo sapien
gtctagaattaggacatacttgcat

SEQ ID NO: 3212739 - DNA, 25 bp, Homo sapien
tcttaggtactgtctagaattagga

SEQ ID NO: 3212740 - DNA, 25 bp, Homo sapien
ggtactgtctagaattaggacatac

SEQ ID NO: 3212741 - DNA, 25 bp, Homo sapien
aattagactataattcttttctgtc

SEQ ID NO: 3212742 - DNA, 25 bp, Homo sapien
ctcttgtaaatgtgagtctttcttt

SEQ ID NO: 3212743 - DNA, 25 bp, Homo sapien
ttttttgctgataaattcaaatgtt

SEQ ID NO: 3212744 - DNA, 25 bp, Homo sapien
aattcaaatgtttatcaattagact

SEQ ID NO: 3212745 - DNA, 25 bp, Homo sapien
gctgccttcacataaacgcataatg

SEQ ID NO: 3212746 - DNA, 25 bp, Homo sapien
aaagttgaacctcctgaatcctcag

SEQ ID NO: 3212747 - DNA, 25 bp, Homo sapien
gagtttccatccaagtgtgtgagtg

SEQ ID NO: 3212748 - DNA, 25 bp, Homo sapien
taatacaagtaaaacagatgctctc

SEQ ID NO: 3212749 - DNA, 25 bp, Homo sapien
gacatgttgacagctgcgggagaca

SEQ ID NO: 3212750 - DNA, 25 bp, Homo sapien
tctacagagttatcagggcaggagc

SEQ ID NO: 3212751 - DNA, 25 bp, Homo sapien
caatggaagcgacctgcagtatgcc

SEQ ID NO: 3212752 - DNA, 25 bp, Homo sapien
tcttggcacaaataccttgggcgcc

SEQ ID NO: 3212753 - DNA, 25 bp, Homo sapien
tctgcggccctcagaacgtctgatc

SEQ ID NO: 3212754 - DNA, 25 bp, Homo sapien
caagaacccggctctcaaaggcggg

SEQ ID NO: 3212755 - DNA, 25 bp, Homo sapien
tcagcgctcagggagtgatggcggc

SEQ ID NO: 3212756 - DNA, 25 bp, Homo sapien
agccatggcagcatctcaagaaccc

SEQ ID NO: 3212757 - DNA, 25 bp, Homo sapien
gaaaaagcttgtgactcctactctg

SEQ ID NO: 3212758 - DNA, 25 bp, Homo sapien
gcaacaggaactttatggtccacag

SEQ ID NO: 3212759 - DNA, 25 bp, Homo sapien
tggtccatgggccaaaatacggtgt

SEQ ID NO: 3212760 - DNA, 25 bp, Homo sapien
tactctgtttgttgaagttgacccc

SEQ ID NO: 3212761 - DNA, 25 bp, Homo sapien
catactcgagagacagttcatagaa

SEQ ID NO: 3212762 - DNA, 25 bp, Homo sapien
cagttcatagaagtgttgccggttc

SEQ ID NO: 3212763 - DNA, 25 bp, Homo sapien
gccggttctgctctacttggatatc

SEQ ID NO: 3212764 - DNA, 25 bp, Homo sapien
ggatttcctgcagcttacacacata

SEQ ID NO: 3212765 - DNA, 25 bp, Homo sapien
tgcaaaaatccaccagcaaacaact

SEQ ID NO: 3212766 - DNA, 25 bp, Homo sapien
aaaaatccaccagcaaacaacttgg

SEQ ID NO: 3212767 - DNA, 25 bp, Homo sapien
gcaaaaatccaccagcaaacaactt

SEQ ID NO: 3212768 - DNA, 25 bp, Homo sapien
attgcaaaaatccaccagcaaacaa

SEQ ID NO: 3212769 - DNA, 25 bp, Homo sapien
cacatggttgccttccttgagatca

SEQ ID NO: 3212770 - DNA, 25 bp, Homo sapien
gctataggctaaggtggcagaaatt

SEQ ID NO: 3212771 - DNA, 25 bp, Homo sapien
catgacctgttatgggaccttaggc

SEQ ID NO: 3212772 - DNA, 25 bp, Homo sapien
cacaccgtgggtggttaggaatctg

SEQ ID NO: 3212773 - DNA, 25 bp, Homo sapien
tgtctctgaattagagggctgttgc

SEQ ID NO: 3212774 - DNA, 25 bp, Homo sapien
gtctctgaattagagggctgttgcc

SEQ ID NO: 3212775 - DNA, 25 bp, Homo sapien
ctgtctctgaattagagggctgttg

SEQ ID NO: 3212776 - DNA, 25 bp, Homo sapien
tctctgaattagagggctgttgcct

SEQ ID NO: 3212777 - DNA, 25 bp, Homo sapien
ttaaatatcacagccattagacagc

SEQ ID NO: 3212778 - DNA, 25 bp, Homo sapien
aaagatattccatgacttgccaggg

SEQ ID NO: 3212779 - DNA, 25 bp, Homo sapien
taaactgattaaagggaagtcacta

SEQ ID NO: 3212780 - DNA, 25 bp, Homo sapien
tcctctttagtcaggagaatcccaa

SEQ ID NO: 3212781 - DNA, 25 bp, Homo sapien
agtgattgaagtctttggcaagttc

SEQ ID NO: 3212782 - DNA, 25 bp, Homo sapien
attgaagtctttggcaagttcatgg

SEQ ID NO: 3212783 - DNA, 25 bp, Homo sapien
gtagtgattgaagtctttggcaagt

SEQ ID NO: 3212784 - DNA, 25 bp, Homo sapien
ccctgatgatagaaggtaaacatcc

SEQ ID NO: 3212785 - DNA, 25 bp, Homo sapien
cagtttctcagtacaaacagatcag

SEQ ID NO: 3212786 - DNA, 25 bp, Homo sapien
ctcagtttctcagtacaaacagatc

SEQ ID NO: 3212787 - DNA, 25 bp, Homo sapien
ggcagcataccctcagtttctcagt

SEQ ID NO: 3212788 - DNA, 25 bp, Homo sapien
agcaggtggcagcataccctcagtt

SEQ ID NO: 3212789 - DNA, 25 bp, Homo sapien
ccgagtacagggactactcacatgt

SEQ ID NO: 3212790 - DNA, 25 bp, Homo sapien
gagtacagggactactcacatgtgc

SEQ ID NO: 3212791 - DNA, 25 bp, Homo sapien
gtacagggactactcacatgtgcca

SEQ ID NO: 3212792 - DNA, 25 bp, Homo sapien
tcccgagtacagggactactcacat

SEQ ID NO: 3212793 - DNA, 25 bp, Homo sapien
cacgcagacatccaatagcgcaggg

SEQ ID NO: 3212794 - DNA, 25 bp, Homo sapien
tcaactgtatacacagagcacacgt

SEQ ID NO: 3212795 - DNA, 25 bp, Homo sapien
caacagtaggcgattagtagtcaaa

SEQ ID NO: 3212796 - DNA, 25 bp, Homo sapien
tcccagacagtaagaagcctggttc

SEQ ID NO: 3212797 - DNA, 25 bp, Homo sapien
ttgtgacgagtcagcaccaccgtgt

SEQ ID NO: 3212798 - DNA, 25 bp, Homo sapien
caagggtcctaagcgtggcaaaatg

SEQ ID NO: 3212799 - DNA, 25 bp, Homo sapien
tggtgtgccaatatctgtcaaacgg

SEQ ID NO: 3212800 - DNA, 25 bp, Homo sapien
caaactaagagctgcgagaaatatc

SEQ ID NO: 3212801 - DNA, 25 bp, Homo sapien
tgctcgtttgtggtccttgggattc

SEQ ID NO: 3212802 - DNA, 25 bp, Homo sapien
ggtagccttcggctgtaaactgact

SEQ ID NO: 3212803 - DNA, 25 bp, Homo sapien
ttgttccttcaaatcgattccgtgt

SEQ ID NO: 3212804 - DNA, 25 bp, Homo sapien
tctgattttgttcatgagctcttcc

SEQ ID NO: 3212805 - DNA, 25 bp, Homo sapien
agcagccacgcagccactgctggag

SEQ ID NO: 3212806 - DNA, 25 bp, Homo sapien
taagcagccacgcagccactgctgg

SEQ ID NO: 3212807 - DNA, 25 bp, Homo sapien
ttaagcagccacgcagccactgctg

SEQ ID NO: 3212808 - DNA, 25 bp, Homo sapien
cagccacgcagccactgctggaggg

SEQ ID NO: 3212809 - DNA, 25 bp, Homo sapien
ctgagtcatgtctaccactaaattt

SEQ ID NO: 3212810 - DNA, 25 bp, Homo sapien
cctgtaaccgttccctgagtcatgt

SEQ ID NO: 3212811 - DNA, 25 bp, Homo sapien
ccctgagtcatgtctaccactaaat

SEQ ID NO: 3212812 - DNA, 25 bp, Homo sapien
ctgtaaccgttccctgagtcatgtc

SEQ ID NO: 3212813 - DNA, 25 bp, Homo sapien
ttctttgctgcttttcgatacatgc

SEQ ID NO: 3212814 - DNA, 25 bp, Homo sapien
tctgtgctcaaatgggatcatgttg

SEQ ID NO: 3212815 - DNA, 25 bp, Homo sapien
tgggatcatgttgaacttctttgct

SEQ ID NO: 3212816 - DNA, 25 bp, Homo sapien
gatacatgcaatagtgtttgaccca

SEQ ID NO: 3212817 - DNA, 25 bp, Homo sapien
agagcaggggagcaaggttcaagat

SEQ ID NO: 3212818 - DNA, 25 bp, Homo sapien
ttcaaactggcttatttaaatgcta

SEQ ID NO: 3212819 - DNA, 25 bp, Homo sapien
tcctctttcaaactggcttatttaa

SEQ ID NO: 3212820 - DNA, 25 bp, Homo sapien
caagatcttaagtccttctctttac

SEQ ID NO: 3212821 - DNA, 25 bp, Homo sapien
ctacaggataagtatatacacactc

SEQ ID NO: 3212822 - DNA, 25 bp, Homo sapien
acaggataagtatatacacactcag

SEQ ID NO: 3212823 - DNA, 25 bp, Homo sapien
tacaggataagtatatacacactca

SEQ ID NO: 3212824 - DNA, 25 bp, Homo sapien
aataatcattttgaacattctcaaa

SEQ ID NO: 3212825 - DNA, 25 bp, Homo sapien
gcaaataatcattttgaacattctc

SEQ ID NO: 3212826 - DNA, 25 bp, Homo sapien
caaataatcattttgaacattctca

SEQ ID NO: 3212827 - DNA, 25 bp, Homo sapien
ctgcaaataatcattttgaacattc

SEQ ID NO: 3212828 - DNA, 25 bp, Homo sapien
agcagcttctatgtcaaaacaaaac

SEQ ID NO: 3212829 - DNA, 25 bp, Homo sapien
tctgtcaatggagtcagtatgcctc

SEQ ID NO: 3212830 - DNA, 25 bp, Homo sapien
gtcagtatgcctcttggtacattct

SEQ ID NO: 3212831 - DNA, 25 bp, Homo sapien
caaaaccttctgtcaatggagtcag

SEQ ID NO: 3212832 - DNA, 25 bp, Homo sapien
gacaaccctggttagaatgactcct

SEQ ID NO: 3212833 - DNA, 25 bp, Homo sapien
ttaaaacgactctttcaccatgtcc

SEQ ID NO: 3212834 - DNA, 25 bp, Homo sapien
aacccggtgatcaagactaaacagc

SEQ ID NO: 3212835 - DNA, 25 bp, Homo sapien
tatcaccccatagctaaacccggtg

SEQ ID NO: 3212836 - DNA, 25 bp, Homo sapien
ggccctaaggctgtttttgtcacat

SEQ ID NO: 3212837 - DNA, 25 bp, Homo sapien
tggccctaaggctgtttttgtcaca

SEQ ID NO: 3212838 - DNA, 25 bp, Homo sapien
catataaaatcactgtgtacattta

SEQ ID NO: 3212839 - DNA, 25 bp, Homo sapien
tttgtcacatataaaatcactgtgt

SEQ ID NO: 3212840 - DNA, 25 bp, Homo sapien
gcctgcatggtcaaggaaacgccag

SEQ ID NO: 3212841 - DNA, 25 bp, Homo sapien
cctgcatggtcaaggaaacgccagg

SEQ ID NO: 3212842 - DNA, 25 bp, Homo sapien
ctgcatggtcaaggaaacgccaggc

SEQ ID NO: 3212843 - DNA, 25 bp, Homo sapien
ttccttctggtcttgggatgatggc

SEQ ID NO: 3212844 - DNA, 25 bp, Homo sapien
ggtcttgggatgatggctgtattaa

SEQ ID NO: 3212845 - DNA, 25 bp, Homo sapien
gggatgatggctgtattaaaactat

SEQ ID NO: 3212846 - DNA, 25 bp, Homo sapien
tctggtcttgggatgatggctgtat

SEQ ID NO: 3212847 - DNA, 25 bp, Homo sapien
tttctgataattgtgaaccccatct

SEQ ID NO: 3212848 - DNA, 25 bp, Homo sapien
ctcgtgtttcaacggcactgatgca

SEQ ID NO: 3212849 - DNA, 25 bp, Homo sapien
tgtttcaacggcactgatgcatttt

SEQ ID NO: 3212850 - DNA, 25 bp, Homo sapien
aattgtgaaccccatcttatccaac

SEQ ID NO: 3212851 - DNA, 25 bp, Homo sapien
atgatgttcaggcttcctgagtatt

SEQ ID NO: 3212852 - DNA, 25 bp, Homo sapien
ttaatgatgttcaggcttcctgagt

SEQ ID NO: 3212853 - DNA, 25 bp, Homo sapien
taatgatgttcaggcttcctgagta

SEQ ID NO: 3212854 - DNA, 25 bp, Homo sapien
attaatgatgttcaggcttcctgag

SEQ ID NO: 3212855 - DNA, 25 bp, Homo sapien
tctttaccattcactgaagtttctg

SEQ ID NO: 3212856 - DNA, 25 bp, Homo sapien
ccccgcagctataccatgtagaaat

SEQ ID NO: 3212857 - DNA, 25 bp, Homo sapien
tttataacatcagcgatggaccccg

SEQ ID NO: 3212858 - DNA, 25 bp, Homo sapien
ctgctacagagccacagaaattgct

SEQ ID NO: 3212859 - DNA, 25 bp, Homo sapien
taggtttgcgaaaagagctcctctc

SEQ ID NO: 3212860 - DNA, 25 bp, Homo sapien
tcctctcaggcagtacactgtgcct

SEQ ID NO: 3212861 - DNA, 25 bp, Homo sapien
cttccaggctctaggtttgcgaaaa

SEQ ID NO: 3212862 - DNA, 25 bp, Homo sapien
ctctcaggcagtacactgtgccttt

SEQ ID NO: 3212863 - DNA, 25 bp, Homo sapien
gctaacaatctgttaattatactaa

SEQ ID NO: 3212864 - DNA, 25 bp, Homo sapien
ctgggagtttgctaacaatctgtta

SEQ ID NO: 3212865 - DNA, 25 bp, Homo sapien
ctctggccaccattactgggaggca

SEQ ID NO: 3212866 - DNA, 25 bp, Homo sapien
cagatgtaggggcaagcaaagaatg

SEQ ID NO: 3212867 - DNA, 25 bp, Homo sapien
agaatgccatcaggcccaattacca

SEQ ID NO: 3212868 - DNA, 25 bp, Homo sapien
gctctgtggtcactctgaagaatgc

SEQ ID NO: 3212869 - DNA, 25 bp, Homo sapien
tctgaagaatgccatcaggcccaat

SEQ ID NO: 3212870 - DNA, 25 bp, Homo sapien
gtggtcactctgaagaatgccatca

SEQ ID NO: 3212871 - DNA, 25 bp, Homo sapien
tcagctcaagagtgagagatgtcgg

SEQ ID NO: 3212872 - DNA, 25 bp, Homo sapien
caaggcaacccttcagcagagtaat

SEQ ID NO: 3212873 - DNA, 25 bp, Homo sapien
gatggccctcgggtcccaaatgtat

SEQ ID NO: 3212874 - DNA, 25 bp, Homo sapien
gcaccactttggaacttaaccctga

SEQ ID NO: 3212875 - DNA, 25 bp, Homo sapien
caggggcaaaaggtcattaatgttc

SEQ ID NO: 3212876 - DNA, 25 bp, Homo sapien
aacaggggcaaaaggtcattaatgt

SEQ ID NO: 3212877 - DNA, 25 bp, Homo sapien
acaggggcaaaaggtcattaatgtt

SEQ ID NO: 3212878 - DNA, 25 bp, Homo sapien
gttaccagagccagagaccacacag

SEQ ID NO: 3212879 - DNA, 25 bp, Homo sapien
catctctgctcagctgtttccctct

SEQ ID NO: 3212880 - DNA, 25 bp, Homo sapien
gcatggaactactgagcactagcag

SEQ ID NO: 3212881 - DNA, 25 bp, Homo sapien
ggcatccactgtccctgtaggtggg

SEQ ID NO: 3212882 - DNA, 25 bp, Homo sapien
tggttgcccaagattcgacagtgag

SEQ ID NO: 3212883 - DNA, 25 bp, Homo sapien
taatcacaacagacagctcgaccat

SEQ ID NO: 3212884 - DNA, 25 bp, Homo sapien
tcctctgcggctacattcaggctga

SEQ ID NO: 3212885 - DNA, 25 bp, Homo sapien
ttaagagccagccttcagatccagc

SEQ ID NO: 3212886 - DNA, 25 bp, Homo sapien
cctttgaactcacccccacaactct

SEQ ID NO: 3212887 - DNA, 25 bp, Homo sapien
ccatcaacatactcagaagtctctg

SEQ ID NO: 3212888 - DNA, 25 bp, Homo sapien
tcaacatactcagaagtctctggac

SEQ ID NO: 3212889 - DNA, 25 bp, Homo sapien
cccacaactctgtacaatccttggt

SEQ ID NO: 3212890 - DNA, 25 bp, Homo sapien
tcgaggagaataactgcctctctat

SEQ ID NO: 3212891 - DNA, 25 bp, Homo sapien
ggcctcgaggagaataactgcctct

SEQ ID NO: 3212892 - DNA, 25 bp, Homo sapien
cctcgaggagaataactgcctctct

SEQ ID NO: 3212893 - DNA, 25 bp, Homo sapien
ctggcctcgaggagaataactgcct

SEQ ID NO: 3212894 - DNA, 25 bp, Homo sapien
tagccttggcttatagcaagcggca

SEQ ID NO: 3212895 - DNA, 25 bp, Homo sapien
gactagacacttctggcacttcgta

SEQ ID NO: 3212896 - DNA, 25 bp, Homo sapien
caaaggtcctcttgtctagctcaca

SEQ ID NO: 3212897 - DNA, 25 bp, Homo sapien
taacagtatcactcagtagccttgg

SEQ ID NO: 3212898 - DNA, 25 bp, Homo sapien
tagtgagcaagcaaacaagaaaaaa

SEQ ID NO: 3212899 - DNA, 25 bp, Homo sapien
agcaagcaaacaagaaaaaaataat

SEQ ID NO: 3212900 - DNA, 25 bp, Homo sapien
ctagtgagcaagcaaacaagaaaaa

SEQ ID NO: 3212901 - DNA, 25 bp, Homo sapien
ttgtcttcacttcccaatctgcaga

SEQ ID NO: 3212902 - DNA, 25 bp, Homo sapien
ggtccacctcattgcatgtttttac

SEQ ID NO: 3212903 - DNA, 25 bp, Homo sapien
tgcagaattctccaggtccacctca

SEQ ID NO: 3212904 - DNA, 25 bp, Homo sapien
aaatactgtttcaaggcacttgtta

SEQ ID NO: 3212905 - DNA, 25 bp, Homo sapien
ttctttttcaaagagctttgcattg

SEQ ID NO: 3212906 - DNA, 25 bp, Homo sapien
ttttcaaagagctttgcattgacat

SEQ ID NO: 3212907 - DNA, 25 bp, Homo sapien
ctcataggtcatgagaggctctgga

SEQ ID NO: 3212908 - DNA, 25 bp, Homo sapien
catgtaactcataggtcatgagagg

SEQ ID NO: 3212909 - DNA, 25 bp, Homo sapien
tgaaatctccatgtaactcataggt

SEQ ID NO: 3212910 - DNA, 25 bp, Homo sapien
ggaacaatgaaatctccatgtaact

SEQ ID NO: 3212911 - DNA, 25 bp, Homo sapien
caaaatatccaacatctctttattc

SEQ ID NO: 3212912 - DNA, 25 bp, Homo sapien
cttctctggcagtttgtgtaccaag

SEQ ID NO: 3212913 - DNA, 25 bp, Homo sapien
ccaagaaatggatcgcattaacacg

SEQ ID NO: 3212914 - DNA, 25 bp, Homo sapien
gatcgcattaacacgagattctggg

SEQ ID NO: 3212915 - DNA, 25 bp, Homo sapien
agtccatgagggcagcgacagtttc

SEQ ID NO: 3212916 - DNA, 25 bp, Homo sapien
gtccaaacaccactcctaagtttgc

SEQ ID NO: 3212917 - DNA, 25 bp, Homo sapien
accactcctaagtttgccacagtca

SEQ ID NO: 3212918 - DNA, 25 bp, Homo sapien
tgagggcagcgacagtttcttcctg

SEQ ID NO: 3212919 - DNA, 25 bp, Homo sapien
tgtaactattgtaacaggcttgccg

SEQ ID NO: 3212920 - DNA, 25 bp, Homo sapien
gaggccactttcgtctgctgtaact

SEQ ID NO: 3212921 - DNA, 25 bp, Homo sapien
ggcttgccgacgctactggaaaatt

SEQ ID NO: 3212922 - DNA, 25 bp, Homo sapien
tgaaagcgaggccactttcgtctgc

SEQ ID NO: 3212923 - DNA, 25 bp, Homo sapien
gaaacccgtggctaacatagatcca

SEQ ID NO: 3212924 - DNA, 25 bp, Homo sapien
agggaaacccgtggctaacatagat

SEQ ID NO: 3212925 - DNA, 25 bp, Homo sapien
gtggctaacatagatccacgcatcc

SEQ ID NO: 3212926 - DNA, 25 bp, Homo sapien
atagatccacgcatccatatgaagt

SEQ ID NO: 3212927 - DNA, 25 bp, Homo sapien
actgggcctaagaagcagccagcct

SEQ ID NO: 3212928 - DNA, 25 bp, Homo sapien
gccataaaattttgggagtcaacca

SEQ ID NO: 3212929 - DNA, 25 bp, Homo sapien
ccaataggctcaggtttgaatggct

SEQ ID NO: 3212930 - DNA, 25 bp, Homo sapien
tacttctggtttaaactgtgggctg

SEQ ID NO: 3212931 - DNA, 25 bp, Homo sapien
tccagtgacataagactgcatggct

SEQ ID NO: 3212932 - DNA, 25 bp, Homo sapien
ggctccacactgaagttaatcctgc

SEQ ID NO: 3212933 - DNA, 25 bp, Homo sapien
aaacaaggagcgcttttgagggact

SEQ ID NO: 3212934 - DNA, 25 bp, Homo sapien
tttgaatgtggctgacaattcgcac

SEQ ID NO: 3212935 - DNA, 25 bp, Homo sapien
tttgagtttctgatgtcaactgttt

SEQ ID NO: 3212936 - DNA, 25 bp, Homo sapien
taaggtttctacttcaatccatgaa

SEQ ID NO: 3212937 - DNA, 25 bp, Homo sapien
tactcaagacttatcaacctcagaa

SEQ ID NO: 3212938 - DNA, 25 bp, Homo sapien
gactcagctatacagttacttaagg

SEQ ID NO: 3212939 - DNA, 25 bp, Homo sapien
cagaatgtaagttttgccctgccat

SEQ ID NO: 3212940 - DNA, 25 bp, Homo sapien
tacacgtttacaggaatgacttaca

SEQ ID NO: 3212941 - DNA, 25 bp, Homo sapien
aaaaaaccagacagatacccaccat

SEQ ID NO: 3212942 - DNA, 25 bp, Homo sapien
caatggtggcactttaggacaggct

SEQ ID NO: 3212943 - DNA, 25 bp, Homo sapien
ggcagattagtatcagccttcatac

SEQ ID NO: 3212944 - DNA, 25 bp, Homo sapien
cagctagaaatcaacgcaggctctc

SEQ ID NO: 3212945 - DNA, 25 bp, Homo sapien
tgtttgactaggttcactcccaggc

SEQ ID NO: 3212946 - DNA, 25 bp, Homo sapien
tcagagtagctaccacgtgaacagt

SEQ ID NO: 3212947 - DNA, 25 bp, Homo sapien
tttaagcaaaccctgatcaccttgg

SEQ ID NO: 3212948 - DNA, 25 bp, Homo sapien
tccctcactccactgtacatgtctt

SEQ ID NO: 3212949 - DNA, 25 bp, Homo sapien
ccctcactccactgtacatgtcttg

SEQ ID NO: 3212950 - DNA, 25 bp, Homo sapien
aaacagaagtctggcaccgctgttc

SEQ ID NO: 3212951 - DNA, 25 bp, Homo sapien
agagtgacagattcctcagacacaa

SEQ ID NO: 3212952 - DNA, 25 bp, Homo sapien
tcctaagagtgccagcacaaacaga

SEQ ID NO: 3212953 - DNA, 25 bp, Homo sapien
tcgggtctcctaagagtgccagcac

SEQ ID NO: 3212954 - DNA, 25 bp, Homo sapien
aaaatggtagagttggcatctgaag

SEQ ID NO: 3212955 - DNA, 25 bp, Homo sapien
aaacaattagcacaagtctccacgg

SEQ ID NO: 3212956 - DNA, 25 bp, Homo sapien
caagtctccacggtttcaaaatggt

SEQ ID NO: 3212957 - DNA, 25 bp, Homo sapien
gaggtaagtactgttccacacattt

SEQ ID NO: 3212958 - DNA, 25 bp, Homo sapien
ctcagggaatgtagtatcgggcggc

SEQ ID NO: 3212959 - DNA, 25 bp, Homo sapien
tgtagtatcgggcggcgtccgaaaa

SEQ ID NO: 3212960 - DNA, 25 bp, Homo sapien
tgggctcagggaatgtagtatcggg

SEQ ID NO: 3212961 - DNA, 25 bp, Homo sapien
ggaatgtagtatcgggcggcgtccg

SEQ ID NO: 3212962 - DNA, 25 bp, Homo sapien
tcgactgccttggtggcgcatttgg

SEQ ID NO: 3212963 - DNA, 25 bp, Homo sapien
acaaagattgtagacggccacgggc

SEQ ID NO: 3212964 - DNA, 25 bp, Homo sapien
gctccagacaaagattgtagacggc

SEQ ID NO: 3212965 - DNA, 25 bp, Homo sapien
tctggccttgtctcttcgactgcct

SEQ ID NO: 3212966 - DNA, 25 bp, Homo sapien
ctatggatgaacgtggatatatgtg

SEQ ID NO: 3212967 - DNA, 25 bp, Homo sapien
tatggatgaacgtggatatatgtgc

SEQ ID NO: 3212968 - DNA, 25 bp, Homo sapien
ggtgaccctgtactgcttcttaata

SEQ ID NO: 3212969 - DNA, 25 bp, Homo sapien
tcttaatacagcctaggagggcaca

SEQ ID NO: 3212970 - DNA, 25 bp, Homo sapien
ggagtgttctctggcattgcctcag

SEQ ID NO: 3212971 - DNA, 25 bp, Homo sapien
tttcagagcaacagaagtcacttgg

SEQ ID NO: 3212972 - DNA, 25 bp, Homo sapien
gacaacgtaaccatgagaaagcagc

SEQ ID NO: 3212973 - DNA, 25 bp, Homo sapien
tatttccagtaatagggatccccaa

SEQ ID NO: 3212974 - DNA, 25 bp, Homo sapien
caataaaactctttgctgcctaagt

SEQ ID NO: 3212975 - DNA, 25 bp, Homo sapien
aacgccgggacaacgtaaccatgag

SEQ ID NO: 3212976 - DNA, 25 bp, Homo sapien
ccctccatctgccagaaggtggttt

SEQ ID NO: 3212977 - DNA, 25 bp, Homo sapien
tccatctgccagaaggtggtttttg

SEQ ID NO: 3212978 - DNA, 25 bp, Homo sapien
tctgccagaaggtggtttttgtctg

SEQ ID NO: 3212979 - DNA, 25 bp, Homo sapien
agctccctccatctgccagaaggtg

SEQ ID NO: 3212980 - DNA, 25 bp, Homo sapien
ggttaccagtgagtgcacacaaagt

SEQ ID NO: 3212981 - DNA, 25 bp, Homo sapien
gattaagataccaacttctagggtg

SEQ ID NO: 3212982 - DNA, 25 bp, Homo sapien
tgtaatttctcagtaggcaccagac

SEQ ID NO: 3212983 - DNA, 25 bp, Homo sapien
tctcagtggcacaacgacagcttga

SEQ ID NO: 3212984 - DNA, 25 bp, Homo sapien
gcattcgaggtctgaaggttactgt

SEQ ID NO: 3212985 - DNA, 25 bp, Homo sapien
aggaatgtttcgaccagctgccacc

SEQ ID NO: 3212986 - DNA, 25 bp, Homo sapien
agtcactgacaggaatgtttcgacc

SEQ ID NO: 3212987 - DNA, 25 bp, Homo sapien
aacatcttcaacagggccaagcaca

SEQ ID NO: 3212988 - DNA, 25 bp, Homo sapien
cctgccggagaactagcaccgtgtt

SEQ ID NO: 3212989 - DNA, 25 bp, Homo sapien
gataccccgtcttctgctaaaccag

SEQ ID NO: 3212990 - DNA, 25 bp, Homo sapien
agtttccacgagcagtttcccgagg

SEQ ID NO: 3212991 - DNA, 25 bp, Homo sapien
gcaccgtgttcttcagtaccagcat

SEQ ID NO: 3212992 - DNA, 25 bp, Homo sapien
tcaggtggcttgtccgctacagtag

SEQ ID NO: 3212993 - DNA, 25 bp, Homo sapien
tgggttaagccactggaccatagac

SEQ ID NO: 3212994 - DNA, 25 bp, Homo sapien
gaccatagacgatcgggtctggcct

SEQ ID NO: 3212995 - DNA, 25 bp, Homo sapien
cgacccgggtgaaagaggtgtcaca

SEQ ID NO: 3212996 - DNA, 25 bp, Homo sapien
tggaagtgaacatcaggctaagaac

SEQ ID NO: 3212997 - DNA, 25 bp, Homo sapien
gatgggtttccaattcaagcctttc

SEQ ID NO: 3212998 - DNA, 25 bp, Homo sapien
ttcagcactgttagaaccacaggac

SEQ ID NO: 3212999 - DNA, 25 bp, Homo sapien
tagggcaactcctcccaaaagagaa

SEQ ID NO: 3213000 - DNA, 25 bp, Homo sapien
aagataattccgagctgtgttctgc

SEQ ID NO: 3213001 - DNA, 25 bp, Homo sapien
tgttctgcttcacacggatacacgg

SEQ ID NO: 3213002 - DNA, 25 bp, Homo sapien
ggctcgagccttccgactgcggatg

SEQ ID NO: 3213003 - DNA, 25 bp, Homo sapien
tatttcaaaagataattccgagctg

SEQ ID NO: 3213004 - DNA, 25 bp, Homo sapien
tgcggacaggattaacagacgaagc

SEQ ID NO: 3213005 - DNA, 25 bp, Homo sapien
tatggtgtgccaacatgagacaggc

SEQ ID NO: 3213006 - DNA, 25 bp, Homo sapien
cagacttattaatcctgcggacagg

SEQ ID NO: 3213007 - DNA, 25 bp, Homo sapien
gaagcaagcatagtggcattccagc

SEQ ID NO: 3213008 - DNA, 25 bp, Homo sapien
ccttctaccaaggtaactatctcac

SEQ ID NO: 3213009 - DNA, 25 bp, Homo sapien
ggtatcctagtagatacaccttcta

SEQ ID NO: 3213010 - DNA, 25 bp, Homo sapien
tcaaatgagtgcgtttcaatactac

SEQ ID NO: 3213011 - DNA, 25 bp, Homo sapien
aatttttgttacctgcagcctaagg

SEQ ID NO: 3213012 - DNA, 25 bp, Homo sapien
ctgcttcagccacggtgtcctcaca

SEQ ID NO: 3213013 - DNA, 25 bp, Homo sapien
cctgcttcagccacggtgtcctcac

SEQ ID NO: 3213014 - DNA, 25 bp, Homo sapien
gcttcagccacggtgtcctcacagc

SEQ ID NO: 3213015 - DNA, 25 bp, Homo sapien
tgcttcagccacggtgtcctcacag

SEQ ID NO: 3213016 - DNA, 25 bp, Homo sapien
tcaggtgcaggcgtggcagccgtgg

SEQ ID NO: 3213017 - DNA, 25 bp, Homo sapien
aggtgcaggcgtggcagccgtggca

SEQ ID NO: 3213018 - DNA, 25 bp, Homo sapien
ggtcaggtgcaggcgtggcagccgt

SEQ ID NO: 3213019 - DNA, 25 bp, Homo sapien
ggtgcaggcgtggcagccgtggcat

SEQ ID NO: 3213020 - DNA, 25 bp, Homo sapien
gaagcatttcataacccccagctgt

SEQ ID NO: 3213021 - DNA, 25 bp, Homo sapien
aatacagaagcatttcataaccccc

SEQ ID NO: 3213022 - DNA, 25 bp, Homo sapien
agcatttcataacccccagctgtga

SEQ ID NO: 3213023 - DNA, 25 bp, Homo sapien
tacagaagcatttcataacccccag

SEQ ID NO: 3213024 - DNA, 25 bp, Homo sapien
cctcttgccgttcagagtcccttct

SEQ ID NO: 3213025 - DNA, 25 bp, Homo sapien
gacgtagttctgtggaatcagcccc

SEQ ID NO: 3213026 - DNA, 25 bp, Homo sapien
cagccaggttccctggaggtttgta

SEQ ID NO: 3213027 - DNA, 25 bp, Homo sapien
gagtcccttctagccagccaggttc

SEQ ID NO: 3213028 - DNA, 25 bp, Homo sapien
aggtccctgggtgccagggtcagca

SEQ ID NO: 3213029 - DNA, 25 bp, Homo sapien
gggtgcagcccagagcctcggagga

SEQ ID NO: 3213030 - DNA, 25 bp, Homo sapien
cccagagcctcggaggaggaagaca

SEQ ID NO: 3213031 - DNA, 25 bp, Homo sapien
gaggaggaagacagctctctgcccc

SEQ ID NO: 3213032 - DNA, 25 bp, Homo sapien
taaaaatcacaagtcccaatacttg

SEQ ID NO: 3213033 - DNA, 25 bp, Homo sapien
tgccagtggaggcgacacaggtggc

SEQ ID NO: 3213034 - DNA, 25 bp, Homo sapien
ctgtgtggtgcgtcccatccctgcc

SEQ ID NO: 3213035 - DNA, 25 bp, Homo sapien
aaaagtccattttgcgaatcctgac

SEQ ID NO: 3213036 - DNA, 25 bp, Homo sapien
cctttaaaatcgcagcagcaggtgc

SEQ ID NO: 3213037 - DNA, 25 bp, Homo sapien
tatcactgcgagtagtacagttccc

SEQ ID NO: 3213038 - DNA, 25 bp, Homo sapien
tacagttccctttaaaatcgcagca

SEQ ID NO: 3213039 - DNA, 25 bp, Homo sapien
tctgcaaacctatcactgcgagtag

SEQ ID NO: 3213040 - DNA, 25 bp, Homo sapien
catttacagagaccttgaggcaaaa

SEQ ID NO: 3213041 - DNA, 25 bp, Homo sapien
agcctgttacaaatacgccagtgca

SEQ ID NO: 3213042 - DNA, 25 bp, Homo sapien
gaaaacagcacacgggtgaggagca

SEQ ID NO: 3213043 - DNA, 25 bp, Homo sapien
tgaggagcaccgagaagcctgttac

SEQ ID NO: 3213044 - DNA, 25 bp, Homo sapien
cagagagagacgagtccccatcgta

SEQ ID NO: 3213045 - DNA, 25 bp, Homo sapien
caattcataaatcaagacggggcaa

SEQ ID NO: 3213046 - DNA, 25 bp, Homo sapien
cccacattaggacagacaaatcaaa

SEQ ID NO: 3213047 - DNA, 25 bp, Homo sapien
gggcaatgacttccacgaccgcttc

SEQ ID NO: 3213048 - DNA, 25 bp, Homo sapien
tctcctccctccacgtcgaaattaa

SEQ ID NO: 3213049 - DNA, 25 bp, Homo sapien
cgtcgaaattaatccagatggagag

SEQ ID NO: 3213050 - DNA, 25 bp, Homo sapien
gcagggtcaagggtgaaggctcctc

SEQ ID NO: 3213051 - DNA, 25 bp, Homo sapien
ctccacgtcgaaattaatccagatg

SEQ ID NO: 3213052 - DNA, 25 bp, Homo sapien
agccgcacccatccaactaaaacag

SEQ ID NO: 3213053 - DNA, 25 bp, Homo sapien
caggcgcagttggtgctgcagtcgc

SEQ ID NO: 3213054 - DNA, 25 bp, Homo sapien
cagcaaaacatactccgctcctctt

SEQ ID NO: 3213055 - DNA, 25 bp, Homo sapien
tgcagtcgctgagcaaggtagggct

SEQ ID NO: 3213056 - DNA, 25 bp, Homo sapien
ctgaatgaacacaggctatggacct

SEQ ID NO: 3213057 - DNA, 25 bp, Homo sapien
ggccctgtgggtggcaccatcagat

SEQ ID NO: 3213058 - DNA, 25 bp, Homo sapien
ggcatctcctttacaggtgcaggga

SEQ ID NO: 3213059 - DNA, 25 bp, Homo sapien
ctggcatctcctttacaggtgcagg

SEQ ID NO: 3213060 - DNA, 25 bp, Homo sapien
gcaccatcagatgcaagccctgcag

SEQ ID NO: 3213061 - DNA, 25 bp, Homo sapien
tggaaccggtcacaggaacgcacag

SEQ ID NO: 3213062 - DNA, 25 bp, Homo sapien
cccatcttggcaaggttcagtctga

SEQ ID NO: 3213063 - DNA, 25 bp, Homo sapien
gatcttggaaagaggttctgcactc

SEQ ID NO: 3213064 - DNA, 25 bp, Homo sapien
aggatgcgctgggacggcccatctt

SEQ ID NO: 3213065 - DNA, 25 bp, Homo sapien
cccattttagaaaatcagattttct

SEQ ID NO: 3213066 - DNA, 25 bp, Homo sapien
cctcccattttagaaaatcagattt

SEQ ID NO: 3213067 - DNA, 25 bp, Homo sapien
tcctcccattttagaaaatcagatt

SEQ ID NO: 3213068 - DNA, 25 bp, Homo sapien
tttcctcccattttagaaaatcaga

SEQ ID NO: 3213069 - DNA, 25 bp, Homo sapien
agtgagactgggaacttgatggctc

SEQ ID NO: 3213070 - DNA, 25 bp, Homo sapien
gactgggaacttgatggctcagaga

SEQ ID NO: 3213071 - DNA, 25 bp, Homo sapien
accagctctacgagagtgagactgg

SEQ ID NO: 3213072 - DNA, 25 bp, Homo sapien
tctacgagagtgagactgggaactt

SEQ ID NO: 3213073 - DNA, 25 bp, Homo sapien
gagaggaggtccttggagtgctgca

SEQ ID NO: 3213074 - DNA, 25 bp, Homo sapien
actgaaacctcttcggttgtcttga

SEQ ID NO: 3213075 - DNA, 25 bp, Homo sapien
tgacacactgcggtgtctgcagctc

SEQ ID NO: 3213076 - DNA, 25 bp, Homo sapien
ggcatttgtgggactccagcacgtt

SEQ ID NO: 3213077 - DNA, 25 bp, Homo sapien
agcttccttgcattgctcctttagc

SEQ ID NO: 3213078 - DNA, 25 bp, Homo sapien
ttattcctttgagttgatcttaaat

SEQ ID NO: 3213079 - DNA, 25 bp, Homo sapien
ttccttgcattgctcctttagctca

SEQ ID NO: 3213080 - DNA, 25 bp, Homo sapien
tcctttgagttgatcttaaatctct

SEQ ID NO: 3213081 - DNA, 25 bp, Homo sapien
ccagtgtagctgtagctttgacagc

SEQ ID NO: 3213082 - DNA, 25 bp, Homo sapien
agtgtagctgtagctttgacagcca

SEQ ID NO: 3213083 - DNA, 25 bp, Homo sapien
cagtgtagctgtagctttgacagcc

SEQ ID NO: 3213084 - DNA, 25 bp, Homo sapien
gtgtagctgtagctttgacagccat

SEQ ID NO: 3213085 - DNA, 25 bp, Homo sapien
agcagttggcactgctgactcatgg

SEQ ID NO: 3213086 - DNA, 25 bp, Homo sapien
gttggcactgctgactcatggtggc

SEQ ID NO: 3213087 - DNA, 25 bp, Homo sapien
cactgctgactcatggtggcacatc

SEQ ID NO: 3213088 - DNA, 25 bp, Homo sapien
ctgctgactcatggtggcacatctg

SEQ ID NO: 3213089 - DNA, 25 bp, Homo sapien
tctgctagcctgatggaagcatccc

SEQ ID NO: 3213090 - DNA, 25 bp, Homo sapien
ggtcccgagcgctgcggtgggtgtg

SEQ ID NO: 3213091 - DNA, 25 bp, Homo sapien
ggactccagggcatcgaggtcccga

SEQ ID NO: 3213092 - DNA, 25 bp, Homo sapien
gtgcaggactctgctagcctgatgg

SEQ ID NO: 3213093 - DNA, 25 bp, Homo sapien
tgtgaaaggtgtggccaccagacac

SEQ ID NO: 3213094 - DNA, 25 bp, Homo sapien
gaacacagacgccttgagagatctg

SEQ ID NO: 3213095 - DNA, 25 bp, Homo sapien
tgagaacagggaacctttatcccca

SEQ ID NO: 3213096 - DNA, 25 bp, Homo sapien
tcgtccttgtggtggttgatactgc

SEQ ID NO: 3213097 - DNA, 25 bp, Homo sapien
aatgccaggcccaggttatgcacga

SEQ ID NO: 3213098 - DNA, 25 bp, Homo sapien
ccagatgggcttctgtggccgccag

SEQ ID NO: 3213099 - DNA, 25 bp, Homo sapien
ctggtgacatcatgcttacagagtc

SEQ ID NO: 3213100 - DNA, 25 bp, Homo sapien
tgaccgaggcataaacagaagccct

SEQ ID NO: 3213101 - DNA, 25 bp, Homo sapien
tcaagaaggttaatgttttcccagc

SEQ ID NO: 3213102 - DNA, 25 bp, Homo sapien
caagaaggttaatgttttcccagcg

SEQ ID NO: 3213103 - DNA, 25 bp, Homo sapien
aggttaatgttttcccagcggctgg

SEQ ID NO: 3213104 - DNA, 25 bp, Homo sapien
aaggttaatgttttcccagcggctg

SEQ ID NO: 3213105 - DNA, 25 bp, Homo sapien
tgtgatacggagtgtcaggaccacg

SEQ ID NO: 3213106 - DNA, 25 bp, Homo sapien
ctaaactggattgaaaacccggcat

SEQ ID NO: 3213107 - DNA, 25 bp, Homo sapien
tgaaaacccggcatgaaaggtggtg

SEQ ID NO: 3213108 - DNA, 25 bp, Homo sapien
cccggcatgaaaggtggtgtgatac

SEQ ID NO: 3213109 - DNA, 25 bp, Homo sapien
gaaagggctactgagtggccctgct

SEQ ID NO: 3213110 - DNA, 25 bp, Homo sapien
gaggcacacgtggtagcctctacca

SEQ ID NO: 3213111 - DNA, 25 bp, Homo sapien
taaacagcctctacgggtacgtgca

SEQ ID NO: 3213112 - DNA, 25 bp, Homo sapien
gcttttgggccgtgagtctactggc

SEQ ID NO: 3213113 - DNA, 25 bp, Homo sapien
aaggccatgactaagaaggctctaa

SEQ ID NO: 3213114 - DNA, 25 bp, Homo sapien
cttctcttccaagacaccaagggag

SEQ ID NO: 3213115 - DNA, 25 bp, Homo sapien
taattgttagcggtgttatgctgct

SEQ ID NO: 3213116 - DNA, 25 bp, Homo sapien
catagtcagctaactggtagcaaag

SEQ ID NO: 3213117 - DNA, 25 bp, Homo sapien
aaacattattagtggttcagggcca

SEQ ID NO: 3213118 - DNA, 25 bp, Homo sapien
gttaatctaataacccaatctttca

SEQ ID NO: 3213119 - DNA, 25 bp, Homo sapien
gtttgctttaacattgcataaatag

SEQ ID NO: 3213120 - DNA, 25 bp, Homo sapien
tcacatttttgcttgcaatttagga

SEQ ID NO: 3213121 - DNA, 25 bp, Homo sapien
gggatgggtctctgcaatccagagt

SEQ ID NO: 3213122 - DNA, 25 bp, Homo sapien
agagttgaagctgtcaaaccacagg

SEQ ID NO: 3213123 - DNA, 25 bp, Homo sapien
tctgcaatccagagttgaagctgtc

SEQ ID NO: 3213124 - DNA, 25 bp, Homo sapien
caatccagagttgaagctgtcaaac

SEQ ID NO: 3213125 - DNA, 25 bp, Homo sapien
tatttaatagggtcatgtggggaag

SEQ ID NO: 3213126 - DNA, 25 bp, Homo sapien
ttccctgggttctggcagctgacac

SEQ ID NO: 3213127 - DNA, 25 bp, Homo sapien
ttatttaatagggtcatgtggggaa

SEQ ID NO: 3213128 - DNA, 25 bp, Homo sapien
ttaattttccctgggttctggcagc

SEQ ID NO: 3213129 - DNA, 25 bp, Homo sapien
aatgaggtccctctgtaccgaacgt

SEQ ID NO: 3213130 - DNA, 25 bp, Homo sapien
tcagaggattctaatggaggccagg

SEQ ID NO: 3213131 - DNA, 25 bp, Homo sapien
taccgaacgttctgaagctccagga

SEQ ID NO: 3213132 - DNA, 25 bp, Homo sapien
ggtggatcttcctgagccactggag

SEQ ID NO: 3213133 - DNA, 25 bp, Homo sapien
tgtgtccccagtcgctgggtcagtg

SEQ ID NO: 3213134 - DNA, 25 bp, Homo sapien
tcagtgagagttctccccgggccat

SEQ ID NO: 3213135 - DNA, 25 bp, Homo sapien
agtgtgctggcgctgtccagttgtc

SEQ ID NO: 3213136 - DNA, 25 bp, Homo sapien
tccagttgtcctcagtgagagttct

SEQ ID NO: 3213137 - DNA, 25 bp, Homo sapien
agttgccatcggctacttcttatca

SEQ ID NO: 3213138 - DNA, 25 bp, Homo sapien
ctcagttgccatcggctacttctta

SEQ ID NO: 3213139 - DNA, 25 bp, Homo sapien
cacaactcagttgccatcggctact

SEQ ID NO: 3213140 - DNA, 25 bp, Homo sapien
ttagacgagtacacaactcagttgc

SEQ ID NO: 3213141 - DNA, 25 bp, Homo sapien
gctgagccattacccgtgctttcct

SEQ ID NO: 3213142 - DNA, 25 bp, Homo sapien
acattgcctgccaatgccttacaca

SEQ ID NO: 3213143 - DNA, 25 bp, Homo sapien
tgttctatatgctttcgctgagcca

SEQ ID NO: 3213144 - DNA, 25 bp, Homo sapien
tcacacattgcctgccaatgcctta

SEQ ID NO: 3213145 - DNA, 25 bp, Homo sapien
acaacagtgacagggcccaagtagg

SEQ ID NO: 3213146 - DNA, 25 bp, Homo sapien
aggcgtaatcaatccactgtccacc

SEQ ID NO: 3213147 - DNA, 25 bp, Homo sapien
cccaagtaggagttgtcaggcgtaa

SEQ ID NO: 3213148 - DNA, 25 bp, Homo sapien
tcaaggtctatatcagcacaacagt

SEQ ID NO: 3213149 - DNA, 25 bp, Homo sapien
cccaggagcggcttgtccttacact

SEQ ID NO: 3213150 - DNA, 25 bp, Homo sapien
gaatcctagtcaagagcttcactgg

SEQ ID NO: 3213151 - DNA, 25 bp, Homo sapien
gttgaagatccatcattgtttggac

SEQ ID NO: 3213152 - DNA, 25 bp, Homo sapien
cttcactggagtgacagccatgggc

SEQ ID NO: 3213153 - DNA, 25 bp, Homo sapien
cacctcagaccctggacgcatgtag

SEQ ID NO: 3213154 - DNA, 25 bp, Homo sapien
ggaaatgctaccctaagtgctactt

SEQ ID NO: 3213155 - DNA, 25 bp, Homo sapien
ggacgcatgtagacatttatacccc

SEQ ID NO: 3213156 - DNA, 25 bp, Homo sapien
taccctaagtgctacttcacttcca

SEQ ID NO: 3213157 - DNA, 25 bp, Homo sapien
gtgctggtatccccacctgagagac

SEQ ID NO: 3213158 - DNA, 25 bp, Homo sapien
gatgctttctggaaattgccacttc

SEQ ID NO: 3213159 - DNA, 25 bp, Homo sapien
caccacctccactggaataagtgct

SEQ ID NO: 3213160 - DNA, 25 bp, Homo sapien
cctcagcacactactacaactgatg

SEQ ID NO: 3213161 - DNA, 25 bp, Homo sapien
tattttctcagttgggaccaggcca

SEQ ID NO: 3213162 - DNA, 25 bp, Homo sapien
ttgactcaggtaggattgagaccca

SEQ ID NO: 3213163 - DNA, 25 bp, Homo sapien
tattgacgcttagagacctgcatgt

SEQ ID NO: 3213164 - DNA, 25 bp, Homo sapien
tgctagaaacattgagccacttggc

SEQ ID NO: 3213165 - DNA, 25 bp, Homo sapien
tagtgaagacgtacttgcagccagt

SEQ ID NO: 3213166 - DNA, 25 bp, Homo sapien
agccagtttggtgctctacgaaaca

SEQ ID NO: 3213167 - DNA, 25 bp, Homo sapien
tggttattctagagtatcgaccggg

SEQ ID NO: 3213168 - DNA, 25 bp, Homo sapien
tcccatgtttgaatgaacagcaaca

SEQ ID NO: 3213169 - DNA, 25 bp, Homo sapien
cccagtgtcagagtggttagtgatg

SEQ ID NO: 3213170 - DNA, 25 bp, Homo sapien
tataggtgcgaccaaattcatatgg

SEQ ID NO: 3213171 - DNA, 25 bp, Homo sapien
taaacatgtcttgcattccagaggt

SEQ ID NO: 3213172 - DNA, 25 bp, Homo sapien
tttaaggtggcctaaacatgtcttg

SEQ ID NO: 3213173 - DNA, 25 bp, Homo sapien
gacccactgaactgtgttgaaacct

SEQ ID NO: 3213174 - DNA, 25 bp, Homo sapien
actgaactgtgttgaaaccttcaaa

SEQ ID NO: 3213175 - DNA, 25 bp, Homo sapien
ataaggacccactgaactgtgttga

SEQ ID NO: 3213176 - DNA, 25 bp, Homo sapien
cccactgaactgtgttgaaaccttc

SEQ ID NO: 3213177 - DNA, 25 bp, Homo sapien
catttcggtctagagttatattgtt

SEQ ID NO: 3213178 - DNA, 25 bp, Homo sapien
tgggtttcatttcggtctagagtta

SEQ ID NO: 3213179 - DNA, 25 bp, Homo sapien
cctttgttaccaatatctgctctca

SEQ ID NO: 3213180 - DNA, 25 bp, Homo sapien
tagattgttggtagaagtttatgat

SEQ ID NO: 3213181 - DNA, 25 bp, Homo sapien
cccggaacagtgctctgccattgca

SEQ ID NO: 3213182 - DNA, 25 bp, Homo sapien
cagtagttccccgtttgtcagtggt

SEQ ID NO: 3213183 - DNA, 25 bp, Homo sapien
tagaaagtttgttgagcgccagttg

SEQ ID NO: 3213184 - DNA, 25 bp, Homo sapien
gtgttccacacatggttctaggcat

SEQ ID NO: 3213185 - DNA, 25 bp, Homo sapien
tgtcagagccccagtcttgggactg

SEQ ID NO: 3213186 - DNA, 25 bp, Homo sapien
aatgggacaaactggaaaggcctag

SEQ ID NO: 3213187 - DNA, 25 bp, Homo sapien
tacaggtgtcacaaggaagtccagc

SEQ ID NO: 3213188 - DNA, 25 bp, Homo sapien
ttagaaatctcagcaggtaggctct

SEQ ID NO: 3213189 - DNA, 25 bp, Homo sapien
ggctggatgggatctggagatggca

SEQ ID NO: 3213190 - DNA, 25 bp, Homo sapien
gctggatgggatctggagatggcag

SEQ ID NO: 3213191 - DNA, 25 bp, Homo sapien
aaggctggatgggatctggagatgg

SEQ ID NO: 3213192 - DNA, 25 bp, Homo sapien
ttaaggctggatgggatctggagat

SEQ ID NO: 3213193 - DNA, 25 bp, Homo sapien
tatagtttagtgcaaaacattgtga

SEQ ID NO: 3213194 - DNA, 25 bp, Homo sapien
tcatgtttagcagttgtttctagtt

SEQ ID NO: 3213195 - DNA, 25 bp, Homo sapien
gtttagtgcaaaacattgtgaaaat

SEQ ID NO: 3213196 - DNA, 25 bp, Homo sapien
catgtttagcagttgtttctagttt

SEQ ID NO: 3213197 - DNA, 25 bp, Homo sapien
tgtcagactggacatgtgccacata

SEQ ID NO: 3213198 - DNA, 25 bp, Homo sapien
aatttttatgtcagattccaacact

SEQ ID NO: 3213199 - DNA, 25 bp, Homo sapien
ttatgtcagattccaacactacccg

SEQ ID NO: 3213200 - DNA, 25 bp, Homo sapien
cggctcctccaagcactaaacataa

SEQ ID NO: 3213201 - DNA, 25 bp, Homo sapien
ttgagggaagtcatttaaagctaaa

SEQ ID NO: 3213202 - DNA, 25 bp, Homo sapien
tttgagggaagtcatttaaagctaa

SEQ ID NO: 3213203 - DNA, 25 bp, Homo sapien
tgagggaagtcatttaaagctaaaa

SEQ ID NO: 3213204 - DNA, 25 bp, Homo sapien
tgtttgtagaatctgccccttctct

SEQ ID NO: 3213205 - DNA, 25 bp, Homo sapien
ctgtagatccaccttcatgtcagaa

SEQ ID NO: 3213206 - DNA, 25 bp, Homo sapien
aaggtttctagaagttcttgcttag

SEQ ID NO: 3213207 - DNA, 25 bp, Homo sapien
agatccaccttcatgtcagaaccca

SEQ ID NO: 3213208 - DNA, 25 bp, Homo sapien
tcactatgcacagttaggctagctt

SEQ ID NO: 3213209 - DNA, 25 bp, Homo sapien
aaaacctgactgagattcactatgc

SEQ ID NO: 3213210 - DNA, 25 bp, Homo sapien
tatgcacagttaggctagcttttgc

SEQ ID NO: 3213211 - DNA, 25 bp, Homo sapien
tgagattcactatgcacagttaggc

SEQ ID NO: 3213212 - DNA, 25 bp, Homo sapien
ttctgacccctaaacaatatcatgt

SEQ ID NO: 3213213 - DNA, 25 bp, Homo sapien
tctgacccctaaacaatatcatgtt

SEQ ID NO: 3213214 - DNA, 25 bp, Homo sapien
tttgctttgatatgtatcccatttg

SEQ ID NO: 3213215 - DNA, 25 bp, Homo sapien
gctttgatatgtatcccatttgcct

SEQ ID NO: 3213216 - DNA, 25 bp, Homo sapien
tttgggtgctgatgactagtatggc

SEQ ID NO: 3213217 - DNA, 25 bp, Homo sapien
ttgggtgctgatgactagtatggcc

SEQ ID NO: 3213218 - DNA, 25 bp, Homo sapien
ctttgggtgctgatgactagtatgg

SEQ ID NO: 3213219 - DNA, 25 bp, Homo sapien
ttttcctgaggccctataggtgaag

SEQ ID NO: 3213220 - DNA, 25 bp, Homo sapien
ctgaggccctataggtgaagagctg

SEQ ID NO: 3213221 - DNA, 25 bp, Homo sapien
tcctgaggccctataggtgaagagc

SEQ ID NO: 3213222 - DNA, 25 bp, Homo sapien
ttcctgaggccctataggtgaagag

SEQ ID NO: 3213223 - DNA, 25 bp, Homo sapien
aagaaaaagcagagaggggtccttg

SEQ ID NO: 3213224 - DNA, 25 bp, Homo sapien
gaggggtccttgtgaacttagagaa

SEQ ID NO: 3213225 - DNA, 25 bp, Homo sapien
ctagaacagggataaagaaaaagca

SEQ ID NO: 3213226 - DNA, 25 bp, Homo sapien
gcagagaggggtccttgtgaactta

SEQ ID NO: 3213227 - DNA, 25 bp, Homo sapien
tttccccaagtctgctgctcttagt

SEQ ID NO: 3213228 - DNA, 25 bp, Homo sapien
tagttcctagaaccatagcgctcaa

SEQ ID NO: 3213229 - DNA, 25 bp, Homo sapien
tgctcttagtaccacagtctgctcc

SEQ ID NO: 3213230 - DNA, 25 bp, Homo sapien
tgcagatactggtttcgtggaggaa

SEQ ID NO: 3213231 - DNA, 25 bp, Homo sapien
agtcctttagcttgtattcttcccg

SEQ ID NO: 3213232 - DNA, 25 bp, Homo sapien
tcctttagcttgtattcttcccgcc

SEQ ID NO: 3213233 - DNA, 25 bp, Homo sapien
ctttagcttgtattcttcccgccat

SEQ ID NO: 3213234 - DNA, 25 bp, Homo sapien
cagtcctttagcttgtattcttccc

SEQ ID NO: 3213235 - DNA, 25 bp, Homo sapien
tagttgggagatagtcaaggacctt

SEQ ID NO: 3213236 - DNA, 25 bp, Homo sapien
cagaccataatctgagagaaacctc

SEQ ID NO: 3213237 - DNA, 25 bp, Homo sapien
tctgagtagtccaaagatctttgac

SEQ ID NO: 3213238 - DNA, 25 bp, Homo sapien
gatctttgacaggtatagttgggag

SEQ ID NO: 3213239 - DNA, 25 bp, Homo sapien
ccgtagatgttaccctcaagcctga

SEQ ID NO: 3213240 - DNA, 25 bp, Homo sapien
gagacacccagacttggaacttcac

SEQ ID NO: 3213241 - DNA, 25 bp, Homo sapien
gatccgtagatgttaccctcaagcc

SEQ ID NO: 3213242 - DNA, 25 bp, Homo sapien
ctccacagatccgtagatgttaccc

SEQ ID NO: 3213243 - DNA, 25 bp, Homo sapien
tacgtaatggcacagatcttaatac

SEQ ID NO: 3213244 - DNA, 25 bp, Homo sapien
tcttaatacggacgctgctgttgtg

SEQ ID NO: 3213245 - DNA, 25 bp, Homo sapien
tagaaattttcctccataatacgta

SEQ ID NO: 3213246 - DNA, 25 bp, Homo sapien
ctagaattcaaaatgtttgaaggtt

SEQ ID NO: 3213247 - DNA, 25 bp, Homo sapien
tgtggcttctcggaaagtaaataat

SEQ ID NO: 3213248 - DNA, 25 bp, Homo sapien
ggcttctcggaaagtaaataatcta

SEQ ID NO: 3213249 - DNA, 25 bp, Homo sapien
tgggttgtggcttctcggaaagtaa

SEQ ID NO: 3213250 - DNA, 25 bp, Homo sapien
gttgtggcttctcggaaagtaaata

SEQ ID NO: 3213251 - DNA, 25 bp, Homo sapien
ttagatttgttcttggtggaaacac

SEQ ID NO: 3213252 - DNA, 25 bp, Homo sapien
tttagatttgttcttggtggaaaca

SEQ ID NO: 3213253 - DNA, 25 bp, Homo sapien
ggatttagatttgttcttggtggaa

SEQ ID NO: 3213254 - DNA, 25 bp, Homo sapien
caggatttagatttgttcttggtgg

SEQ ID NO: 3213255 - DNA, 25 bp, Homo sapien
gagcatataggaagataatgtgatg

SEQ ID NO: 3213256 - DNA, 25 bp, Homo sapien
gcatataggaagataatgtgatggt

SEQ ID NO: 3213257 - DNA, 25 bp, Homo sapien
tggagcatataggaagataatgtga

SEQ ID NO: 3213258 - DNA, 25 bp, Homo sapien
tataggaagataatgtgatggtggt

SEQ ID NO: 3213259 - DNA, 25 bp, Homo sapien
tctacgatacttgttaaggcaggca

SEQ ID NO: 3213260 - DNA, 25 bp, Homo sapien
ttttgcagatgaggatacaaggcca

SEQ ID NO: 3213261 - DNA, 25 bp, Homo sapien
cagtaacgcacttggtagatgataa

SEQ ID NO: 3213262 - DNA, 25 bp, Homo sapien
tgtagtccccatgctgtatattagg

SEQ ID NO: 3213263 - DNA, 25 bp, Homo sapien
tgctaccggctgtgtacccaacagt

SEQ ID NO: 3213264 - DNA, 25 bp, Homo sapien
atttgctaccggctgtgtacccaac

SEQ ID NO: 3213265 - DNA, 25 bp, Homo sapien
tgtgtacccaacagtaaaagtagaa

SEQ ID NO: 3213266 - DNA, 25 bp, Homo sapien
cggctgtgtacccaacagtaaaagt

SEQ ID NO: 3213267 - DNA, 25 bp, Homo sapien
tctcaccttggaacactaacatggg

SEQ ID NO: 3213268 - DNA, 25 bp, Homo sapien
gcatccaaactagcacacgtctgtg

SEQ ID NO: 3213269 - DNA, 25 bp, Homo sapien
tagtctggaccacctctagctatgt

SEQ ID NO: 3213270 - DNA, 25 bp, Homo sapien
caatggaatacctaagccctgtggc

SEQ ID NO: 3213271 - DNA, 25 bp, Homo sapien
actgtactatgtgggtttatgctgc

SEQ ID NO: 3213272 - DNA, 25 bp, Homo sapien
attggtttagcaaatggagccttgg

SEQ ID NO: 3213273 - DNA, 25 bp, Homo sapien
aaatggagccttggctacaaatggc

SEQ ID NO: 3213274 - DNA, 25 bp, Homo sapien
tgctacaggcaaagagggcagtaga

SEQ ID NO: 3213275 - DNA, 25 bp, Homo sapien
tcctctgcattgggaaatagaatct

SEQ ID NO: 3213276 - DNA, 25 bp, Homo sapien
tctcctctgcattgggaaatagaat

SEQ ID NO: 3213277 - DNA, 25 bp, Homo sapien
ctcctctgcattgggaaatagaatc

SEQ ID NO: 3213278 - DNA, 25 bp, Homo sapien
ttgccacccgtaggaacacttgttc

SEQ ID NO: 3213279 - DNA, 25 bp, Homo sapien
aacacagatagctttagtgctgcca

SEQ ID NO: 3213280 - DNA, 25 bp, Homo sapien
tgttctgatcccttctaggagcaca

SEQ ID NO: 3213281 - DNA, 25 bp, Homo sapien
gctgccagaagatgtcgggaaatca

SEQ ID NO: 3213282 - DNA, 25 bp, Homo sapien
tcttttgtatcattaactctgttgt

SEQ ID NO: 3213283 - DNA, 25 bp, Homo sapien
ctctgttgttatcagtgggactgtc

SEQ ID NO: 3213284 - DNA, 25 bp, Homo sapien
tatcagtgggactgtcttcagcaac

SEQ ID NO: 3213285 - DNA, 25 bp, Homo sapien
cttttgtatcattaactctgttgtt

SEQ ID NO: 3213286 - DNA, 25 bp, Homo sapien
gtctcaggctctgacgtttgactcc

SEQ ID NO: 3213287 - DNA, 25 bp, Homo sapien
atcaaaggtctcaggctctgacgtt

SEQ ID NO: 3213288 - DNA, 25 bp, Homo sapien
ccactgagctctggcgatgtgaccc

SEQ ID NO: 3213289 - DNA, 25 bp, Homo sapien
gctctggcgatgtgacccttcatca

SEQ ID NO: 3213290 - DNA, 25 bp, Homo sapien
caaccgagagtgtccattcctcttc

SEQ ID NO: 3213291 - DNA, 25 bp, Homo sapien
gagacaccaaccgagagtgtccatt

SEQ ID NO: 3213292 - DNA, 25 bp, Homo sapien
ttgagaccgggctgctctgagatga

SEQ ID NO: 3213293 - DNA, 25 bp, Homo sapien
gtgtgacttgagaccgggctgctct

SEQ ID NO: 3213294 - DNA, 25 bp, Homo sapien
tgtactggaattttcaacaagaggt

SEQ ID NO: 3213295 - DNA, 25 bp, Homo sapien
gaggtgacagagtatgtgaaaccat

SEQ ID NO: 3213296 - DNA, 25 bp, Homo sapien
tcattttgcgtcgtttgtactggaa

SEQ ID NO: 3213297 - DNA, 25 bp, Homo sapien
ggttaatggtaaggaaggatctgct

SEQ ID NO: 3213298 - DNA, 25 bp, Homo sapien
ctttctccttctacaccaaagagtt

SEQ ID NO: 3213299 - DNA, 25 bp, Homo sapien
ttactttctccttctacaccaaaga

SEQ ID NO: 3213300 - DNA, 25 bp, Homo sapien
tctccttctacaccaaagagtttca

SEQ ID NO: 3213301 - DNA, 25 bp, Homo sapien
tactttctccttctacaccaaagag

SEQ ID NO: 3213302 - DNA, 25 bp, Homo sapien
catgttgccgttctgctttgcagtt

SEQ ID NO: 3213303 - DNA, 25 bp, Homo sapien
atgttgccgttctgctttgcagttc

SEQ ID NO: 3213304 - DNA, 25 bp, Homo sapien
tgttgccgttctgctttgcagttct

SEQ ID NO: 3213305 - DNA, 25 bp, Homo sapien
ttcagaatcaagcttcttttacgta

SEQ ID NO: 3213306 - DNA, 25 bp, Homo sapien
gtaccggtgaatttaattgcctaca

SEQ ID NO: 3213307 - DNA, 25 bp, Homo sapien
tcaagcttcttttacgtaccggtga

SEQ ID NO: 3213308 - DNA, 25 bp, Homo sapien
agggtcgggcttgattcttcagaat

SEQ ID NO: 3213309 - DNA, 25 bp, Homo sapien
gtgaagttaaactgtgtccttggat

SEQ ID NO: 3213310 - DNA, 25 bp, Homo sapien
taaactgtgtccttggattatagtg

SEQ ID NO: 3213311 - DNA, 25 bp, Homo sapien
cctgtgaagttaaactgtgtccttg

SEQ ID NO: 3213312 - DNA, 25 bp, Homo sapien
actgcgcccgtccaaaaggtgctta

SEQ ID NO: 3213313 - DNA, 25 bp, Homo sapien
aatagcattcctctgtttgtgttgg

SEQ ID NO: 3213314 - DNA, 25 bp, Homo sapien
ggtcctccccttatccctgtctgtg

SEQ ID NO: 3213315 - DNA, 25 bp, Homo sapien
agcagagagcacctctggcacaccc

SEQ ID NO: 3213316 - DNA, 25 bp, Homo sapien
ttccagtacaggaccaccttgggtc

SEQ ID NO: 3213317 - DNA, 25 bp, Homo sapien
gaaagctgaggtatgctcgttttca

SEQ ID NO: 3213318 - DNA, 25 bp, Homo sapien
tcaggaatgttacccttttgagatt

SEQ ID NO: 3213319 - DNA, 25 bp, Homo sapien
tgccttagttgtttgtatggaaagc

SEQ ID NO: 3213320 - DNA, 25 bp, Homo sapien
tatgctcgttttcaggaatgttacc

SEQ ID NO: 3213321 - DNA, 25 bp, Homo sapien
tacccgtgtcctatagcattctggc

SEQ ID NO: 3213322 - DNA, 25 bp, Homo sapien
gtgtcctatagcattctggcaaagc

SEQ ID NO: 3213323 - DNA, 25 bp, Homo sapien
ctggtgaatcctgagctgaacacct

SEQ ID NO: 3213324 - DNA, 25 bp, Homo sapien
gagctgaacaccttttacccgtgtc

SEQ ID NO: 3213325 - DNA, 25 bp, Homo sapien
tgtgtagtacccagttccaaaactg

SEQ ID NO: 3213326 - DNA, 25 bp, Homo sapien
tgtccctgaggtcgaagtgcagtga

SEQ ID NO: 3213327 - DNA, 25 bp, Homo sapien
tggcagcaggagtattcaaagagca

SEQ ID NO: 3213328 - DNA, 25 bp, Homo sapien
tttagtaacctagcccaagctcctg

SEQ ID NO: 3213329 - DNA, 25 bp, Homo sapien
tcccaggcagaggccttggtgtcag

SEQ ID NO: 3213330 - DNA, 25 bp, Homo sapien
tggtgtcaggagtgaggccaccctc

SEQ ID NO: 3213331 - DNA, 25 bp, Homo sapien
cttggtgtcaggagtgaggccaccc

SEQ ID NO: 3213332 - DNA, 25 bp, Homo sapien
ggagtgaggccaccctccccctcag

SEQ ID NO: 3213333 - DNA, 25 bp, Homo sapien
cagattaagaactctttctcttggt

SEQ ID NO: 3213334 - DNA, 25 bp, Homo sapien
ttcatgaacccatgagccccagatt

SEQ ID NO: 3213335 - DNA, 25 bp, Homo sapien
atgaacccatgagccccagattaag

SEQ ID NO: 3213336 - DNA, 25 bp, Homo sapien
ttctcttggttgttgttaaaatata

SEQ ID NO: 3213337 - DNA, 25 bp, Homo sapien
gattcgtgggcccttccttcgccaa

SEQ ID NO: 3213338 - DNA, 25 bp, Homo sapien
gcttcagaagattcgtgggcccttc

SEQ ID NO: 3213339 - DNA, 25 bp, Homo sapien
tgtaattttgcttatagcttcagaa

SEQ ID NO: 3213340 - DNA, 25 bp, Homo sapien
tgcttatagcttcagaagattcgtg

SEQ ID NO: 3213341 - DNA, 25 bp, Homo sapien
accgaggcacagactcccgtgctgg

SEQ ID NO: 3213342 - DNA, 25 bp, Homo sapien
acagactcccgtgctgggctgtcct

SEQ ID NO: 3213343 - DNA, 25 bp, Homo sapien
cagtctaatgccacattctgggtca

SEQ ID NO: 3213344 - DNA, 25 bp, Homo sapien
tctatggctgccctccttatcccac

SEQ ID NO: 3213345 - DNA, 25 bp, Homo sapien
cagcaggggtttcgtggcggtggca

SEQ ID NO: 3213346 - DNA, 25 bp, Homo sapien
caagagcgttgctgcctcgggctct

SEQ ID NO: 3213347 - DNA, 25 bp, Homo sapien
tggttggatttaggggggctccgca

SEQ ID NO: 3213348 - DNA, 25 bp, Homo sapien
agcggcactcgctggcctggatgtg

SEQ ID NO: 3213349 - DNA, 25 bp, Homo sapien
tttgtatcagtcatgtcgcccgcct

SEQ ID NO: 3213350 - DNA, 25 bp, Homo sapien
gattgtccaataagaagcccgcctg

SEQ ID NO: 3213351 - DNA, 25 bp, Homo sapien
tcttcgggccaataggaagggttca

SEQ ID NO: 3213352 - DNA, 25 bp, Homo sapien
gctgtgtcgcagcaactttgtatca

SEQ ID NO: 3213353 - DNA, 25 bp, Homo sapien
tggggtcggtcagaaggagagcagg

SEQ ID NO: 3213354 - DNA, 25 bp, Homo sapien
cgacactttgctcgcggaaaaaccg

SEQ ID NO: 3213355 - DNA, 25 bp, Homo sapien
cgtgaggggacgacactttgctcgc

SEQ ID NO: 3213356 - DNA, 25 bp, Homo sapien
ttcttccgcgtcagcacacttttca

SEQ ID NO: 3213357 - DNA, 25 bp, Homo sapien
aaaaccgacttcttccgcgtcagca

SEQ ID NO: 3213358 - DNA, 25 bp, Homo sapien
ctgttgggcggcgccagggtctggg

SEQ ID NO: 3213359 - DNA, 25 bp, Homo sapien
cccgcgcgcggacgctgttgggcgg

SEQ ID NO: 3213360 - DNA, 25 bp, Homo sapien
acccagagtcctccccgcgcgcgga

SEQ ID NO: 3213361 - DNA, 25 bp, Homo sapien
gagaggaacctcgagggtcgggtga

SEQ ID NO: 3213362 - DNA, 25 bp, Homo sapien
gagtgaacgtgatcgtcttgctcgc

SEQ ID NO: 3213363 - DNA, 25 bp, Homo sapien
gatcgtcttgctcgctggcagcgaa

SEQ ID NO: 3213364 - DNA, 25 bp, Homo sapien
ttcaaatcgagtgaacgtgatcgtc

SEQ ID NO: 3213365 - DNA, 25 bp, Homo sapien
caactaaattcaaatcgagtgaacg

SEQ ID NO: 3213366 - DNA, 25 bp, Homo sapien
ctaagggatgggaggaaagctgtgt

SEQ ID NO: 3213367 - DNA, 25 bp, Homo sapien
tctgccgacgtgagatcgatgccca

SEQ ID NO: 3213368 - DNA, 25 bp, Homo sapien
cggaatcccggagcttaactaactg

SEQ ID NO: 3213369 - DNA, 25 bp, Homo sapien
tatacgtcactgatgctgactccgg

SEQ ID NO: 3213370 - DNA, 25 bp, Homo sapien
aataattcggcaacgcttgcggagc

SEQ ID NO: 3213371 - DNA, 25 bp, Homo sapien
gccactgccgggattatcatcctct

SEQ ID NO: 3213372 - DNA, 25 bp, Homo sapien
ccgatcagccaatattggacttgct

SEQ ID NO: 3213373 - DNA, 25 bp, Homo sapien
ctcaccgccgatcagccaatattgg

SEQ ID NO: 3213374 - DNA, 25 bp, Homo sapien
cgactgccactgccgggattatcat

SEQ ID NO: 3213375 - DNA, 25 bp, Homo sapien
gtgtctgcccgagcgggcacgaggg

SEQ ID NO: 3213376 - DNA, 25 bp, Homo sapien
cgcgtctgcgtaggtgtctgcccga

SEQ ID NO: 3213377 - DNA, 25 bp, Homo sapien
tttcgcgtctgcgtaggtgtctgcc

SEQ ID NO: 3213378 - DNA, 25 bp, Homo sapien
cgtctgcgtaggtgtctgcccgagc

SEQ ID NO: 3213379 - DNA, 25 bp, Homo sapien
gattaggtcttcgaaatgagcagat

SEQ ID NO: 3213380 - DNA, 25 bp, Homo sapien
tggattaggtcttcgaaatgagcag

SEQ ID NO: 3213381 - DNA, 25 bp, Homo sapien
aagttggattaggtcttcgaaatga

SEQ ID NO: 3213382 - DNA, 25 bp, Homo sapien
ctcaaaagttggattaggtcttcga

SEQ ID NO: 3213383 - DNA, 25 bp, Homo sapien
atagtgcccagtcttgctccaactc

SEQ ID NO: 3213384 - DNA, 25 bp, Homo sapien
ctaacatagtgcccagtcttgctcc

SEQ ID NO: 3213385 - DNA, 25 bp, Homo sapien
taacatagtgcccagtcttgctcca

SEQ ID NO: 3213386 - DNA, 25 bp, Homo sapien
acatagtgcccagtcttgctccaac

SEQ ID NO: 3213387 - DNA, 25 bp, Homo sapien
taatggaccacataataagtaaagc

SEQ ID NO: 3213388 - DNA, 25 bp, Homo sapien
cctggttgaaccaagtgcccattcc

SEQ ID NO: 3213389 - DNA, 25 bp, Homo sapien
tgcccattcctaaaagcatcatggt

SEQ ID NO: 3213390 - DNA, 25 bp, Homo sapien
tattcaggaaggtaagttcatggag

SEQ ID NO: 3213391 - DNA, 25 bp, Homo sapien
gctggagtgattcagcagatttctg

SEQ ID NO: 3213392 - DNA, 25 bp, Homo sapien
tggagtgattcagcagatttctggc

SEQ ID NO: 3213393 - DNA, 25 bp, Homo sapien
atgtgctttctttacccaggggctg

SEQ ID NO: 3213394 - DNA, 25 bp, Homo sapien
gggctggagtgattcagcagatttc

SEQ ID NO: 3213395 - DNA, 25 bp, Homo sapien
agcaggccacgtttactgatactag

SEQ ID NO: 3213396 - DNA, 25 bp, Homo sapien
tggtaggaaaacgtataagctgagc

SEQ ID NO: 3213397 - DNA, 25 bp, Homo sapien
taagctgagccataggcaaggcaat

SEQ ID NO: 3213398 - DNA, 25 bp, Homo sapien
tactagataggatggtaggaaaacg

SEQ ID NO: 3213399 - DNA, 25 bp, Homo sapien
taatttctggaataacgtggatctt

SEQ ID NO: 3213400 - DNA, 25 bp, Homo sapien
gatgtacacgattgacttcgctggc

SEQ ID NO: 3213401 - DNA, 25 bp, Homo sapien
aaattgtgctaacttgatgtacacg

SEQ ID NO: 3213402 - DNA, 25 bp, Homo sapien
tcaggaccatcagaaagaaattgtg

SEQ ID NO: 3213403 - DNA, 25 bp, Homo sapien
tgctgttttaacttccagtagtggg

SEQ ID NO: 3213404 - DNA, 25 bp, Homo sapien
tggtatcagggaaaggtacttgctg

SEQ ID NO: 3213405 - DNA, 25 bp, Homo sapien
tatcagggaaaggtacttgctgttt

SEQ ID NO: 3213406 - DNA, 25 bp, Homo sapien
catggtatcagggaaaggtacttgc

SEQ ID NO: 3213407 - DNA, 25 bp, Homo sapien
aagtacagtccactgtggttcctac

SEQ ID NO: 3213408 - DNA, 25 bp, Homo sapien
cactgtggttcctacagtaaccttc

SEQ ID NO: 3213409 - DNA, 25 bp, Homo sapien
tcagcttctatacttcatagctaga

SEQ ID NO: 3213410 - DNA, 25 bp, Homo sapien
ctgaccttgacgctctttgtgaaac

SEQ ID NO: 3213411 - DNA, 25 bp, Homo sapien
gaaactctacccacgaacattaaga

SEQ ID NO: 3213412 - DNA, 25 bp, Homo sapien
cttaaccaagtgtaattgaacctga

SEQ ID NO: 3213413 - DNA, 25 bp, Homo sapien
tatgcaaaacttctaaccaggaaat

SEQ ID NO: 3213414 - DNA, 25 bp, Homo sapien
tacatcacagatagagtcaccattt

SEQ ID NO: 3213415 - DNA, 25 bp, Homo sapien
gttcagggtggtatggctgtagaca

SEQ ID NO: 3213416 - DNA, 25 bp, Homo sapien
catgttcagggtggtatggctgtag

SEQ ID NO: 3213417 - DNA, 25 bp, Homo sapien
tcagatgagatcgggcatgttcagg

SEQ ID NO: 3213418 - DNA, 25 bp, Homo sapien
gatcagatgagatcgggcatgttca

SEQ ID NO: 3213419 - DNA, 25 bp, Homo sapien
catccatgctccactctaggctctt

SEQ ID NO: 3213420 - DNA, 25 bp, Homo sapien
tctgctttaaaataggcaacacccc

SEQ ID NO: 3213421 - DNA, 25 bp, Homo sapien
ctgctgtggcttttgtgtcacatcc

SEQ ID NO: 3213422 - DNA, 25 bp, Homo sapien
taggcaacacccctgttcttacatc

SEQ ID NO: 3213423 - DNA, 25 bp, Homo sapien
acaaatggtgcacagcagccagtgt

SEQ ID NO: 3213424 - DNA, 25 bp, Homo sapien
ggaggttctaaccagatcgagaacg

SEQ ID NO: 3213425 - DNA, 25 bp, Homo sapien
ccacaatagtgtacgtattgtcttc

SEQ ID NO: 3213426 - DNA, 25 bp, Homo sapien
tcgagaacgcttgctcacagtggca

SEQ ID NO: 3213427 - DNA, 25 bp, Homo sapien
catttcgagcatgcgcctctgacct

SEQ ID NO: 3213428 - DNA, 25 bp, Homo sapien
ctgacagcatcccatttcgagcatg

SEQ ID NO: 3213429 - DNA, 25 bp, Homo sapien
tacgtctcagactcagatgcactga

SEQ ID NO: 3213430 - DNA, 25 bp, Homo sapien
tctaccacagatggagtggaccaga

SEQ ID NO: 3213431 - DNA, 25 bp, Homo sapien
tagtatgctgagtcacatctgcttg

SEQ ID NO: 3213432 - DNA, 25 bp, Homo sapien
ctagtatgctgagtcacatctgctt

SEQ ID NO: 3213433 - DNA, 25 bp, Homo sapien
atgctgagtcacatctgcttggccc

SEQ ID NO: 3213434 - DNA, 25 bp, Homo sapien
gtatgctgagtcacatctgcttggc

SEQ ID NO: 3213435 - DNA, 25 bp, Homo sapien
gactggtctgatgtcctgcctggac

SEQ ID NO: 3213436 - DNA, 25 bp, Homo sapien
cagcaataggctgtggaaggctaaa

SEQ ID NO: 3213437 - DNA, 25 bp, Homo sapien
cctggacaggtttgatactctgcca

SEQ ID NO: 3213438 - DNA, 25 bp, Homo sapien
ctagtttaatctggactggtctgat

SEQ ID NO: 3213439 - DNA, 25 bp, Homo sapien
cacgtggaaccagtaagcacctcct

SEQ ID NO: 3213440 - DNA, 25 bp, Homo sapien
gaatgttgtcacatccacgtggaac

SEQ ID NO: 3213441 - DNA, 25 bp, Homo sapien
gtcagactagtctgaaatacatttc

SEQ ID NO: 3213442 - DNA, 25 bp, Homo sapien
tcacagcatgtagaaatagctccag

SEQ ID NO: 3213443 - DNA, 25 bp, Homo sapien
taacgttgctgtacaagcatagaaa

SEQ ID NO: 3213444 - DNA, 25 bp, Homo sapien
aacgttgctgtacaagcatagaaat

SEQ ID NO: 3213445 - DNA, 25 bp, Homo sapien
ctaacgttgctgtacaagcatagaa

SEQ ID NO: 3213446 - DNA, 25 bp, Homo sapien
tcagttatttgttacagccacagcc

SEQ ID NO: 3213447 - DNA, 25 bp, Homo sapien
tgagccctcatcagaatcactctta

SEQ ID NO: 3213448 - DNA, 25 bp, Homo sapien
cagaattccacagactgagtacttc

SEQ ID NO: 3213449 - DNA, 25 bp, Homo sapien
gagccctcaggattgaatcaccatt

SEQ ID NO: 3213450 - DNA, 25 bp, Homo sapien
tttgataaagcatattctgtttttc

SEQ ID NO: 3213451 - DNA, 25 bp, Homo sapien
tgttttgataaagcatattctgttt

SEQ ID NO: 3213452 - DNA, 25 bp, Homo sapien
ttgttttgctaaagcatattctgat

SEQ ID NO: 3213453 - DNA, 25 bp, Homo sapien
tggatttgttttgctaaagcatatt

SEQ ID NO: 3213454 - DNA, 25 bp, Homo sapien
gttctgaagctattgtcttctgtcc

SEQ ID NO: 3213455 - DNA, 25 bp, Homo sapien
ttctgaagctattgtcttctgtcct

SEQ ID NO: 3213456 - DNA, 25 bp, Homo sapien
tctttgctgcaaaatccattaatac

SEQ ID NO: 3213457 - DNA, 25 bp, Homo sapien
gctgcaaaatccattaatactattg

SEQ ID NO: 3213458 - DNA, 25 bp, Homo sapien
tccattaatactattgagattttct

SEQ ID NO: 3213459 - DNA, 25 bp, Homo sapien
tgtgagatctttgctgcaaaatcca

SEQ ID NO: 3213460 - DNA, 25 bp, Homo sapien
gatgaataagacaaaaggcttccct

SEQ ID NO: 3213461 - DNA, 25 bp, Homo sapien
tgaataagacaaaaggcttcccttc

SEQ ID NO: 3213462 - DNA, 25 bp, Homo sapien
ctgatgaataagacaaaaggcttcc

SEQ ID NO: 3213463 - DNA, 25 bp, Homo sapien
tcctgatgaataagacaaaaggctt

SEQ ID NO: 3213464 - DNA, 25 bp, Homo sapien
tgccctgcagaagctaacagagaaa

SEQ ID NO: 3213465 - DNA, 25 bp, Homo sapien
ccctttaatgaggtctgcatcttgg

SEQ ID NO: 3213466 - DNA, 25 bp, Homo sapien
caaaaatatgctgtgtgaactatcc

SEQ ID NO: 3213467 - DNA, 25 bp, Homo sapien
aactatccattgagatgttgtttcc

SEQ ID NO: 3213468 - DNA, 25 bp, Homo sapien
tccccagagtcatgctcgctgtttg

SEQ ID NO: 3213469 - DNA, 25 bp, Homo sapien
cagagtcatgctcgctgtttgcaca

SEQ ID NO: 3213470 - DNA, 25 bp, Homo sapien
tcaacagtaactactgaaacctgaa

SEQ ID NO: 3213471 - DNA, 25 bp, Homo sapien
tcatacagaaatggccctgtcccca

SEQ ID NO: 3213472 - DNA, 25 bp, Homo sapien
ttccaaagaagctggcctgctgatc

SEQ ID NO: 3213473 - DNA, 25 bp, Homo sapien
tccaaagaagctggcctgctgatca

SEQ ID NO: 3213474 - DNA, 25 bp, Homo sapien
gatctccataactttgccttccaaa

SEQ ID NO: 3213475 - DNA, 25 bp, Homo sapien
gtgtagatctccataactttgcctt

SEQ ID NO: 3213476 - DNA, 25 bp, Homo sapien
agtggagcttccttgggcagtgtcc

SEQ ID NO: 3213477 - DNA, 25 bp, Homo sapien
gctccatgcttctacctgcatcttg

SEQ ID NO: 3213478 - DNA, 25 bp, Homo sapien
catagcacacttgcactcttagaga

SEQ ID NO: 3213479 - DNA, 25 bp, Homo sapien
gttccatttaagtggagcttccttg

SEQ ID NO: 3213480 - DNA, 25 bp, Homo sapien
aaacatagatcctgcagtatatctg

SEQ ID NO: 3213481 - DNA, 25 bp, Homo sapien
tgctaaagaaacatagatcctgcag

SEQ ID NO: 3213482 - DNA, 25 bp, Homo sapien
tatctgtcgatattcaccaatgatt

SEQ ID NO: 3213483 - DNA, 25 bp, Homo sapien
gatcctgcagtatatctgtcgatat

SEQ ID NO: 3213484 - DNA, 25 bp, Homo sapien
acaagggtgcaatatttactggatg

SEQ ID NO: 3213485 - DNA, 25 bp, Homo sapien
tataaatcacagtagcgtactggtt

SEQ ID NO: 3213486 - DNA, 25 bp, Homo sapien
ctggttgtatgtagacaagggtgca

SEQ ID NO: 3213487 - DNA, 25 bp, Homo sapien
cacttctttcctcatgggaaagaaa

SEQ ID NO: 3213488 - DNA, 25 bp, Homo sapien
atctctaccttcagagctgactgga

SEQ ID NO: 3213489 - DNA, 25 bp, Homo sapien
tgtttccgatgctttcatctctacc

SEQ ID NO: 3213490 - DNA, 25 bp, Homo sapien
aggtgaagcatgcaaaaatccagac

SEQ ID NO: 3213491 - DNA, 25 bp, Homo sapien
agctgactggagctccaaactggaa

SEQ ID NO: 3213492 - DNA, 25 bp, Homo sapien
ttctagtcctcgatccttgcatctc

SEQ ID NO: 3213493 - DNA, 25 bp, Homo sapien
aaccatattgcctcccgtgggtcac

SEQ ID NO: 3213494 - DNA, 25 bp, Homo sapien
tagtcctcgatccttgcatctcctg

SEQ ID NO: 3213495 - DNA, 25 bp, Homo sapien
caagttctagtcctcgatccttgca

SEQ ID NO: 3213496 - DNA, 25 bp, Homo sapien
tcactcatctgcttccacattccaa

SEQ ID NO: 3213497 - DNA, 25 bp, Homo sapien
actcatctgcttccacattccaaga

SEQ ID NO: 3213498 - DNA, 25 bp, Homo sapien
ctcatctgcttccacattccaagag

SEQ ID NO: 3213499 - DNA, 25 bp, Homo sapien
tcatctgcttccacattccaagaga

SEQ ID NO: 3213500 - DNA, 25 bp, Homo sapien
atggtgataggctgtaaggtcttga

SEQ ID NO: 3213501 - DNA, 25 bp, Homo sapien
taaggtcttgaggacccagtccctc

SEQ ID NO: 3213502 - DNA, 25 bp, Homo sapien
tgaagtgctattgctggccaggatg

SEQ ID NO: 3213503 - DNA, 25 bp, Homo sapien
tcttgaatcctggtgaagtgctatt

SEQ ID NO: 3213504 - DNA, 25 bp, Homo sapien
tcactcagaggttagggaatagttg

SEQ ID NO: 3213505 - DNA, 25 bp, Homo sapien
tcagaggttagggaatagttggaaa

SEQ ID NO: 3213506 - DNA, 25 bp, Homo sapien
cagaggttagggaatagttggaaat

SEQ ID NO: 3213507 - DNA, 25 bp, Homo sapien
actcagaggttagggaatagttgga

SEQ ID NO: 3213508 - DNA, 25 bp, Homo sapien
ccacagattgagagatcggtgagca

SEQ ID NO: 3213509 - DNA, 25 bp, Homo sapien
gtctttaggtttacatcactctgag

SEQ ID NO: 3213510 - DNA, 25 bp, Homo sapien
tcggtgagcataaactcattcattc

SEQ ID NO: 3213511 - DNA, 25 bp, Homo sapien
aaccaaaagatttgcaccatgttgg

SEQ ID NO: 3213512 - DNA, 25 bp, Homo sapien
gatgccgtaatctgaaaactccctt

SEQ ID NO: 3213513 - DNA, 25 bp, Homo sapien
gctctggccttggaacgtcactaaa

SEQ ID NO: 3213514 - DNA, 25 bp, Homo sapien
aagagttctagggtactgcagatga

SEQ ID NO: 3213515 - DNA, 25 bp, Homo sapien
tattctgggctacaagatgtggctt

SEQ ID NO: 3213516 - DNA, 25 bp, Homo sapien
tttgccatcctatagaatgagttga

SEQ ID NO: 3213517 - DNA, 25 bp, Homo sapien
gaaccacacttgcaaacctaaaaga

SEQ ID NO: 3213518 - DNA, 25 bp, Homo sapien
tacctgtctataagtgaaaattgcc

SEQ ID NO: 3213519 - DNA, 25 bp, Homo sapien
gatgacttatatactgccatttcaa

SEQ ID NO: 3213520 - DNA, 25 bp, Homo sapien
gatttttcagtatctattgagttat

SEQ ID NO: 3213521 - DNA, 25 bp, Homo sapien
tatctattgagttatcatcccctca

SEQ ID NO: 3213522 - DNA, 25 bp, Homo sapien
ttgagttatcatcccctcacccttt

SEQ ID NO: 3213523 - DNA, 25 bp, Homo sapien
tttttcagtatctattgagttatca

SEQ ID NO: 3213524 - DNA, 25 bp, Homo sapien
ttctgcttgctaagctttcactttc

SEQ ID NO: 3213525 - DNA, 25 bp, Homo sapien
aaaattactagacgtgtgtttctgc

SEQ ID NO: 3213526 - DNA, 25 bp, Homo sapien
ttaatcgacttccttctaacagcat

SEQ ID NO: 3213527 - DNA, 25 bp, Homo sapien
ttgttgaggcttttccttaatcgac

SEQ ID NO: 3213528 - DNA, 25 bp, Homo sapien
gcccatcatgtttccgttcttagag

SEQ ID NO: 3213529 - DNA, 25 bp, Homo sapien
ttgagtgccccgtttgagaaggtgc

SEQ ID NO: 3213530 - DNA, 25 bp, Homo sapien
cctgcttgagtgccccgtttgagaa

SEQ ID NO: 3213531 - DNA, 25 bp, Homo sapien
gagactccctcgttgacctgcttga

SEQ ID NO: 3213532 - DNA, 25 bp, Homo sapien
taccaatagatgagcgagtagtgca

SEQ ID NO: 3213533 - DNA, 25 bp, Homo sapien
gcaccagacagttgttaccaataga

SEQ ID NO: 3213534 - DNA, 25 bp, Homo sapien
ttaggtcctctcatcgcaagcgtgc

SEQ ID NO: 3213535 - DNA, 25 bp, Homo sapien
gagtagtgcaagtgaaatctatcga

SEQ ID NO: 3213536 - DNA, 25 bp, Homo sapien
tgtgtctacaattgggttgcacgca

SEQ ID NO: 3213537 - DNA, 25 bp, Homo sapien
gaaagggtgataatgcaaagtccag

SEQ ID NO: 3213538 - DNA, 25 bp, Homo sapien
tataactctcagactataggaggtg

SEQ ID NO: 3213539 - DNA, 25 bp, Homo sapien
tgcacgcaggtacagatataactct

SEQ ID NO: 3213540 - DNA, 25 bp, Homo sapien
gtgtcatgcttatttcgaataacag

SEQ ID NO: 3213541 - DNA, 25 bp, Homo sapien
cttatttcgaataacagatcctggc

SEQ ID NO: 3213542 - DNA, 25 bp, Homo sapien
catgcttatttcgaataacagatcc

SEQ ID NO: 3213543 - DNA, 25 bp, Homo sapien
tcaagtgtcatgcttatttcgaata

SEQ ID NO: 3213544 - DNA, 25 bp, Homo sapien
taggagattatagttcagcagagct

SEQ ID NO: 3213545 - DNA, 25 bp, Homo sapien
gaattaccacaatccaaaatcaggc

SEQ ID NO: 3213546 - DNA, 25 bp, Homo sapien
caaacattgggcttgaatcaatctc

SEQ ID NO: 3213547 - DNA, 25 bp, Homo sapien
gcattgttgcgcacctatggtccta

SEQ ID NO: 3213548 - DNA, 25 bp, Homo sapien
gtgaattctgagtgttgcgatgtga

SEQ ID NO: 3213549 - DNA, 25 bp, Homo sapien
tgttgcgatgtgagtagttgcccaa

SEQ ID NO: 3213550 - DNA, 25 bp, Homo sapien
acttgatatcaaaacctttcattgg

SEQ ID NO: 3213551 - DNA, 25 bp, Homo sapien
ccaaacctgcttacacttgatatca

SEQ ID NO: 3213552 - DNA, 25 bp, Homo sapien
tgtgactcgactccaattttgaact

SEQ ID NO: 3213553 - DNA, 25 bp, Homo sapien
taaaatgactcccactacaataaga

SEQ ID NO: 3213554 - DNA, 25 bp, Homo sapien
ccatatagaactggcaatgtttccc

SEQ ID NO: 3213555 - DNA, 25 bp, Homo sapien
ggacaatttgctgttccatatagaa

SEQ ID NO: 3213556 - DNA, 25 bp, Homo sapien
agccaggccccagcactgccagggc

SEQ ID NO: 3213557 - DNA, 25 bp, Homo sapien
caggccccagcactgccagggccat

SEQ ID NO: 3213558 - DNA, 25 bp, Homo sapien
ccagccaggccccagcactgccagg

SEQ ID NO: 3213559 - DNA, 25 bp, Homo sapien
ccaggccccagcactgccagggcca

SEQ ID NO: 3213560 - DNA, 25 bp, Homo sapien
taagtctgctaaagcttataaacaa

SEQ ID NO: 3213561 - DNA, 25 bp, Homo sapien
gatgatccacccagataagtctgct

SEQ ID NO: 3213562 - DNA, 25 bp, Homo sapien
taaattagaccttattggtgccatc

SEQ ID NO: 3213563 - DNA, 25 bp, Homo sapien
cttctggaaggcaccataaacataa

SEQ ID NO: 3213564 - DNA, 25 bp, Homo sapien
gaagccagcaatctattacttcaca

SEQ ID NO: 3213565 - DNA, 25 bp, Homo sapien
agcaaacgtttcatgaaaacctgct

SEQ ID NO: 3213566 - DNA, 25 bp, Homo sapien
tagaacatcctgtcccaagaagcca

SEQ ID NO: 3213567 - DNA, 25 bp, Homo sapien
ggcacctttgccaatttcctctaat

SEQ ID NO: 3213568 - DNA, 25 bp, Homo sapien
cttggttcatgctaaagatatgtcc

SEQ ID NO: 3213569 - DNA, 25 bp, Homo sapien
tttgccatccgaaaactctagaggt

SEQ ID NO: 3213570 - DNA, 25 bp, Homo sapien
ggttccaagactcacatacagagaa

SEQ ID NO: 3213571 - DNA, 25 bp, Homo sapien
tattaaagcatacccacaaaggaaa

SEQ ID NO: 3213572 - DNA, 25 bp, Homo sapien
ggcaacgaattactgctcctttatg

SEQ ID NO: 3213573 - DNA, 25 bp, Homo sapien
tggtgttcactctgaatccttggcc

SEQ ID NO: 3213574 - DNA, 25 bp, Homo sapien
ttggagctttctcaccgaacaaccg

SEQ ID NO: 3213575 - DNA, 25 bp, Homo sapien
gcagcgtgctctggcaacgaattac

SEQ ID NO: 3213576 - DNA, 25 bp, Homo sapien
gctcaggaatgcagccgcctacttt

SEQ ID NO: 3213577 - DNA, 25 bp, Homo sapien
cctactttcctgttatcagcaggca

SEQ ID NO: 3213578 - DNA, 25 bp, Homo sapien
gaatgcagccgcctactttcctgtt

SEQ ID NO: 3213579 - DNA, 25 bp, Homo sapien
gcatcagccatggctcaggaatgca

SEQ ID NO: 3213580 - DNA, 25 bp, Homo sapien
tcaaagtggcccaggccatctctca

SEQ ID NO: 3213581 - DNA, 25 bp, Homo sapien
gccagttccacctgttgtctttgtg

SEQ ID NO: 3213582 - DNA, 25 bp, Homo sapien
ccatctctcagaccaagggtaaatg

SEQ ID NO: 3213583 - DNA, 25 bp, Homo sapien
gcttctagctctactcctttctcaa

SEQ ID NO: 3213584 - DNA, 25 bp, Homo sapien
caagtatgaattgtttccagtgcgg

SEQ ID NO: 3213585 - DNA, 25 bp, Homo sapien
gccacaagtatgaattgtttccagt

SEQ ID NO: 3213586 - DNA, 25 bp, Homo sapien
atgaattgtttccagtgcggcagtc

SEQ ID NO: 3213587 - DNA, 25 bp, Homo sapien
agtatgaattgtttccagtgcggca

SEQ ID NO: 3213588 - DNA, 25 bp, Homo sapien
gaacctcgacgtagcctgttcccaa

SEQ ID NO: 3213589 - DNA, 25 bp, Homo sapien
aggcatcccacggtggcttctccag

SEQ ID NO: 3213590 - DNA, 25 bp, Homo sapien
atctgttctaggcatcccacggtgg

SEQ ID NO: 3213591 - DNA, 25 bp, Homo sapien
tctcaagccgccttccatctgttct

SEQ ID NO: 3213592 - DNA, 25 bp, Homo sapien
tgagcctaaggcatattcaagccct

SEQ ID NO: 3213593 - DNA, 25 bp, Homo sapien
tatatgtaatatgctagaggaccct

SEQ ID NO: 3213594 - DNA, 25 bp, Homo sapien
taaatatatcaagagggacaatccc

SEQ ID NO: 3213595 - DNA, 25 bp, Homo sapien
gcacaggaccttctggtgtaaccag

SEQ ID NO: 3213596 - DNA, 25 bp, Homo sapien
tacagttatctctagtctccagaac

SEQ ID NO: 3213597 - DNA, 25 bp, Homo sapien
ggatgacaggaaacaactgcattgc

SEQ ID NO: 3213598 - DNA, 25 bp, Homo sapien
gacaacatcgaaaatagctttctcc

SEQ ID NO: 3213599 - DNA, 25 bp, Homo sapien
tgctgctgcagaagaggtagaatgt

SEQ ID NO: 3213600 - DNA, 25 bp, Homo sapien
cagtcactatctactactggactag

SEQ ID NO: 3213601 - DNA, 25 bp, Homo sapien
ttaattcccctccaactcatcccag

SEQ ID NO: 3213602 - DNA, 25 bp, Homo sapien
aactcatcccagtcactatctacta

SEQ ID NO: 3213603 - DNA, 25 bp, Homo sapien
ctactggactagtatttccaataac

SEQ ID NO: 3213604 - DNA, 25 bp, Homo sapien
tagaactttgtgaacagagatgtgg

SEQ ID NO: 3213605 - DNA, 25 bp, Homo sapien
gctagaactttgtgaacagagatgt

SEQ ID NO: 3213606 - DNA, 25 bp, Homo sapien
ccaggctagaactttgtgaacagag

SEQ ID NO: 3213607 - DNA, 25 bp, Homo sapien
caggctagaactttgtgaacagaga

SEQ ID NO: 3213608 - DNA, 25 bp, Homo sapien
ctaaaagtgtgcttagttcttttgg

SEQ ID NO: 3213609 - DNA, 25 bp, Homo sapien
tcacttgagttggtagctttaaata

SEQ ID NO: 3213610 - DNA, 25 bp, Homo sapien
catttcaaatgtagttctgtgttca

SEQ ID NO: 3213611 - DNA, 25 bp, Homo sapien
tattggcttatattgtcaaaatcac

SEQ ID NO: 3213612 - DNA, 25 bp, Homo sapien
ggagcagcaacagacaaacaaggat

SEQ ID NO: 3213613 - DNA, 25 bp, Homo sapien
gactcaatttccctgtcgtggccag

SEQ ID NO: 3213614 - DNA, 25 bp, Homo sapien
caaggatgaaagcacatgaggacca

SEQ ID NO: 3213615 - DNA, 25 bp, Homo sapien
cattgagtatcatgctagaggcagc

SEQ ID NO: 3213616 - DNA, 25 bp, Homo sapien
gataacaaatagttgtaaaagacat

SEQ ID NO: 3213617 - DNA, 25 bp, Homo sapien
tgaccttgaagataacaaatagttg

SEQ ID NO: 3213618 - DNA, 25 bp, Homo sapien
tccttgctgaccttgaagataacaa

SEQ ID NO: 3213619 - DNA, 25 bp, Homo sapien
aaaagacatttaggcccttccactg

SEQ ID NO: 3213620 - DNA, 25 bp, Homo sapien
cctcagagactaagccaagtggcag

SEQ ID NO: 3213621 - DNA, 25 bp, Homo sapien
gaagtccagcaaactacacaatagg

SEQ ID NO: 3213622 - DNA, 25 bp, Homo sapien
taggtcaaggatgcaacgggaagtc

SEQ ID NO: 3213623 - DNA, 25 bp, Homo sapien
tttaacaggtagagagcacttggtc

SEQ ID NO: 3213624 - DNA, 25 bp, Homo sapien
ctatgaattgagatgcaaagagcat

SEQ ID NO: 3213625 - DNA, 25 bp, Homo sapien
tgcaaagagcataagtacgtaaaag

SEQ ID NO: 3213626 - DNA, 25 bp, Homo sapien
ttgagatgcaaagagcataagtacg

SEQ ID NO: 3213627 - DNA, 25 bp, Homo sapien
aagagcataagtacgtaaaagtggg

SEQ ID NO: 3213628 - DNA, 25 bp, Homo sapien
gtggcgatcacagttcacatcttca

SEQ ID NO: 3213629 - DNA, 25 bp, Homo sapien
cattgattggataaggctcgcagat

SEQ ID NO: 3213630 - DNA, 25 bp, Homo sapien
ttaacaaatttgtggcgatcacagt

SEQ ID NO: 3213631 - DNA, 25 bp, Homo sapien
taatgtgactgacaaattaacaaat

SEQ ID NO: 3213632 - DNA, 25 bp, Homo sapien
gtacagggtagggactgtcagtcat

SEQ ID NO: 3213633 - DNA, 25 bp, Homo sapien
ggtacagggtagggactgtcagtca

SEQ ID NO: 3213634 - DNA, 25 bp, Homo sapien
gaccacctgtgtcgtctggcttcga

SEQ ID NO: 3213635 - DNA, 25 bp, Homo sapien
cctaataacggaagtgctggtgttc

SEQ ID NO: 3213636 - DNA, 25 bp, Homo sapien
gatgccttcagatgtattccaccct

SEQ ID NO: 3213637 - DNA, 25 bp, Homo sapien
tccatccttgtgtgggcgagctgtg

SEQ ID NO: 3213638 - DNA, 25 bp, Homo sapien
tgaaaacagaggtcccatacaacag

SEQ ID NO: 3213639 - DNA, 25 bp, Homo sapien
gctctcaggagacagatgatttgat

SEQ ID NO: 3213640 - DNA, 25 bp, Homo sapien
aacagaggtcccatacaacaggagg

SEQ ID NO: 3213641 - DNA, 25 bp, Homo sapien
cccctgcccgctcgaattcctgggt

SEQ ID NO: 3213642 - DNA, 25 bp, Homo sapien
aatggcctcttctcatatgagagtc

SEQ ID NO: 3213643 - DNA, 25 bp, Homo sapien
tggcctcttctcatatgagagtctg

SEQ ID NO: 3213644 - DNA, 25 bp, Homo sapien
tctgagtgtggccaaggaaacccat

SEQ ID NO: 3213645 - DNA, 25 bp, Homo sapien
ggagagttctgagtgtggccaagga

SEQ ID NO: 3213646 - DNA, 25 bp, Homo sapien
gcagtgatgtcagagaagtctatag

SEQ ID NO: 3213647 - DNA, 25 bp, Homo sapien
tgctcctccctcatggcagtgtgct

SEQ ID NO: 3213648 - DNA, 25 bp, Homo sapien
tgcagtgatgtcagagaagtctata

SEQ ID NO: 3213649 - DNA, 25 bp, Homo sapien
ctccctcatggcagtgtgctgcagt

SEQ ID NO: 3213650 - DNA, 25 bp, Homo sapien
aaaataatttggctgcttctgccca

SEQ ID NO: 3213651 - DNA, 25 bp, Homo sapien
agtaaagccgctgtttcttggcaaa

SEQ ID NO: 3213652 - DNA, 25 bp, Homo sapien
caggtaagttggaattggcagagtc

SEQ ID NO: 3213653 - DNA, 25 bp, Homo sapien
caggtcttgagacatggagctgtgc

SEQ ID NO: 3213654 - DNA, 25 bp, Homo sapien
cagatatagacaccaggtattgtaa

SEQ ID NO: 3213655 - DNA, 25 bp, Homo sapien
ccaggtattgtaattattggtggtt

SEQ ID NO: 3213656 - DNA, 25 bp, Homo sapien
ctgcttctgcctacacagatataga

SEQ ID NO: 3213657 - DNA, 25 bp, Homo sapien
gagaaataacagaaacccagctagc

SEQ ID NO: 3213658 - DNA, 25 bp, Homo sapien
ccattatgtagccaattcttacggt

SEQ ID NO: 3213659 - DNA, 25 bp, Homo sapien
gtttggatctcagtaggtatctgga

SEQ ID NO: 3213660 - DNA, 25 bp, Homo sapien
ggttctattgctaccagttccacta

SEQ ID NO: 3213661 - DNA, 25 bp, Homo sapien
tagtattgttcactgggtgtttgga

SEQ ID NO: 3213662 - DNA, 25 bp, Homo sapien
gaaccatcagttgagaggctcctgg

SEQ ID NO: 3213663 - DNA, 25 bp, Homo sapien
tcttctggcagcgtttctatttcag

SEQ ID NO: 3213664 - DNA, 25 bp, Homo sapien
tctatttcagtgatacctggaacca

SEQ ID NO: 3213665 - DNA, 25 bp, Homo sapien
gccaagatcttgcttttagcctgta

SEQ ID NO: 3213666 - DNA, 25 bp, Homo sapien
taatggtaatgccacagctatggat

SEQ ID NO: 3213667 - DNA, 25 bp, Homo sapien
gcttggagcagtaatggtaatgcca

SEQ ID NO: 3213668 - DNA, 25 bp, Homo sapien
tctcaatcagtaggattttgtcctg

SEQ ID NO: 3213669 - DNA, 25 bp, Homo sapien
gctatggattatctcaatcagtagg

SEQ ID NO: 3213670 - DNA, 25 bp, Homo sapien
ctctgggatagtttagagagtgtct

SEQ ID NO: 3213671 - DNA, 25 bp, Homo sapien
cataagcatctttatcatcgaagag

SEQ ID NO: 3213672 - DNA, 25 bp, Homo sapien
gagggacatctttgtcataagcatc

SEQ ID NO: 3213673 - DNA, 25 bp, Homo sapien
tttatcatcgaagagctgagccttt

SEQ ID NO: 3213674 - DNA, 25 bp, Homo sapien
tgtaagaagcacacccaaatgagat

SEQ ID NO: 3213675 - DNA, 25 bp, Homo sapien
cctagggcccaagtggtacagcagc

SEQ ID NO: 3213676 - DNA, 25 bp, Homo sapien
tcatgttgggtacctcaggtggcac

SEQ ID NO: 3213677 - DNA, 25 bp, Homo sapien
taagatctgctaggtcctagggccc

SEQ ID NO: 3213678 - DNA, 25 bp, Homo sapien
ggtaaactaagagcagctgatctca

SEQ ID NO: 3213679 - DNA, 25 bp, Homo sapien
tcaacgatgatcaaagggaactctc

SEQ ID NO: 3213680 - DNA, 25 bp, Homo sapien
gccaacatgtagctggctgacccct

SEQ ID NO: 3213681 - DNA, 25 bp, Homo sapien
aatgctgccccttccacgatggaaa

SEQ ID NO: 3213682 - DNA, 25 bp, Homo sapien
ttcatgttgacatacctctgtgcaa

SEQ ID NO: 3213683 - DNA, 25 bp, Homo sapien
tctgtgcaacacagataatctgatt

SEQ ID NO: 3213684 - DNA, 25 bp, Homo sapien
caaaagcctagtgagaataatggta

SEQ ID NO: 3213685 - DNA, 25 bp, Homo sapien
gcagaactctttcatgactaattga

SEQ ID NO: 3213686 - DNA, 25 bp, Homo sapien
tttgcttgtggttgttgacaagctc

SEQ ID NO: 3213687 - DNA, 25 bp, Homo sapien
cagcaggtgggtagctagtttgctt

SEQ ID NO: 3213688 - DNA, 25 bp, Homo sapien
accacagcaggtgggtagctagttt

SEQ ID NO: 3213689 - DNA, 25 bp, Homo sapien
tgtggttgttgacaagctcggtcat

SEQ ID NO: 3213690 - DNA, 25 bp, Homo sapien
ggcaatatttagtgtaacagctggt

SEQ ID NO: 3213691 - DNA, 25 bp, Homo sapien
ctgtagggcaatatttagtgtaaca

SEQ ID NO: 3213692 - DNA, 25 bp, Homo sapien
gggcaatatttagtgtaacagctgg

SEQ ID NO: 3213693 - DNA, 25 bp, Homo sapien
tagggcaatatttagtgtaacagct

SEQ ID NO: 3213694 - DNA, 25 bp, Homo sapien
aattgtcagctggactttactttta

SEQ ID NO: 3213695 - DNA, 25 bp, Homo sapien
caatatgtccaattgtcagctggac

SEQ ID NO: 3213696 - DNA, 25 bp, Homo sapien
tgctaccatcaaaaatactttgcat

SEQ ID NO: 3213697 - DNA, 25 bp, Homo sapien
tgtccaattgtcagctggactttac

SEQ ID NO: 3213698 - DNA, 25 bp, Homo sapien
tcaaaagcaagttccaccaagagca

SEQ ID NO: 3213699 - DNA, 25 bp, Homo sapien
tgggtccctgttcgcctcaatgaag

SEQ ID NO: 3213700 - DNA, 25 bp, Homo sapien
gatgtgtcatgactaagcctgtctc

SEQ ID NO: 3213701 - DNA, 25 bp, Homo sapien
tctggaactattaagctggttcccc

SEQ ID NO: 3213702 - DNA, 25 bp, Homo sapien
tggagaagaggccttcacaaaaggg

SEQ ID NO: 3213703 - DNA, 25 bp, Homo sapien
gagatggagaagaggccttcacaaa

SEQ ID NO: 3213704 - DNA, 25 bp, Homo sapien
gatggagaagaggccttcacaaaag

SEQ ID NO: 3213705 - DNA, 25 bp, Homo sapien
gaggagatggagaagaggccttcac

SEQ ID NO: 3213706 - DNA, 25 bp, Homo sapien
catgcactgccaacaattggtgaga

SEQ ID NO: 3213707 - DNA, 25 bp, Homo sapien
gggcctggtggcatcacatgcactg

SEQ ID NO: 3213708 - DNA, 25 bp, Homo sapien
cctatagccatcatgggctgacacc

SEQ ID NO: 3213709 - DNA, 25 bp, Homo sapien
ccatcatgggctgacaccagggcct

SEQ ID NO: 3213710 - DNA, 25 bp, Homo sapien
ttacaggcaggaactatgtaaccca

SEQ ID NO: 3213711 - DNA, 25 bp, Homo sapien
tacaggcaggaactatgtaacccac

SEQ ID NO: 3213712 - DNA, 25 bp, Homo sapien
atctcctaatgccacactgggatgt

SEQ ID NO: 3213713 - DNA, 25 bp, Homo sapien
tcctaatgccacactgggatgtctg

SEQ ID NO: 3213714 - DNA, 25 bp, Homo sapien
tgttaaccgtagaatcatctcctaa

SEQ ID NO: 3213715 - DNA, 25 bp, Homo sapien
gtatttctgtgaatgttctcctgtg

SEQ ID NO: 3213716 - DNA, 25 bp, Homo sapien
ttattttggtagttgccaagctgag

SEQ ID NO: 3213717 - DNA, 25 bp, Homo sapien
tttggtagttgccaagctgagcact

SEQ ID NO: 3213718 - DNA, 25 bp, Homo sapien
ttggtagttgccaagctgagcactg

SEQ ID NO: 3213719 - DNA, 25 bp, Homo sapien
attttggtagttgccaagctgagca

SEQ ID NO: 3213720 - DNA, 25 bp, Homo sapien
caaatatcttgaccgaggaggacca

SEQ ID NO: 3213721 - DNA, 25 bp, Homo sapien
ttctgtgcggtggtttataagtagc

SEQ ID NO: 3213722 - DNA, 25 bp, Homo sapien
tttgcacctttctgtgcggtggttt

SEQ ID NO: 3213723 - DNA, 25 bp, Homo sapien
accattatacagctccatttgcacc

SEQ ID NO: 3213724 - DNA, 25 bp, Homo sapien
ttgatctcttgtagccacatttcct

SEQ ID NO: 3213725 - DNA, 25 bp, Homo sapien
aatcaagagttgatctcttgtagcc

SEQ ID NO: 3213726 - DNA, 25 bp, Homo sapien
gagttgatctcttgtagccacattt

SEQ ID NO: 3213727 - DNA, 25 bp, Homo sapien
gttgatctcttgtagccacatttcc

SEQ ID NO: 3213728 - DNA, 25 bp, Homo sapien
aagaaggaggccagtctgtgatcta

SEQ ID NO: 3213729 - DNA, 25 bp, Homo sapien
ccaagaaggaggccagtctgtgatc

SEQ ID NO: 3213730 - DNA, 25 bp, Homo sapien
gaaggaggccagtctgtgatctaag

SEQ ID NO: 3213731 - DNA, 25 bp, Homo sapien
gttgctgacaccaagaaggaggcca

SEQ ID NO: 3213732 - DNA, 25 bp, Homo sapien
cctgtgtcgcaggaagatagggatt

SEQ ID NO: 3213733 - DNA, 25 bp, Homo sapien
ggaaatggtttccatactcctgtgt

SEQ ID NO: 3213734 - DNA, 25 bp, Homo sapien
tcttctggatattgtctgtctggat

SEQ ID NO: 3213735 - DNA, 25 bp, Homo sapien
caaagataggtctggaaatggtttc

SEQ ID NO: 3213736 - DNA, 25 bp, Homo sapien
gattccttaactaattccacaaatg

SEQ ID NO: 3213737 - DNA, 25 bp, Homo sapien
gcttctgtggttgtacctggctccc

SEQ ID NO: 3213738 - DNA, 25 bp, Homo sapien
ggctcccctgaggtggacatgtcct

SEQ ID NO: 3213739 - DNA, 25 bp, Homo sapien
tgaaccctttgttacataagctgct

SEQ ID NO: 3213740 - DNA, 25 bp, Homo sapien
tcccaggcaatgtgaatctttaaat

SEQ ID NO: 3213741 - DNA, 25 bp, Homo sapien
aagtcccaggcaatgtgaatcttta

SEQ ID NO: 3213742 - DNA, 25 bp, Homo sapien
gaaagtcccaggcaatgtgaatctt

SEQ ID NO: 3213743 - DNA, 25 bp, Homo sapien
aaaatgatactggaaagtcccaggc

SEQ ID NO: 3213744 - DNA, 25 bp, Homo sapien
gtctacgtatacttcccaaacttca

SEQ ID NO: 3213745 - DNA, 25 bp, Homo sapien
aacttcagagacacagttcttcttc

SEQ ID NO: 3213746 - DNA, 25 bp, Homo sapien
cttcagagacacagttcttcttcct

SEQ ID NO: 3213747 - DNA, 25 bp, Homo sapien
ccaaacttcagagacacagttcttc

SEQ ID NO: 3213748 - DNA, 25 bp, Homo sapien
gctgacatgggcctttctactacag

SEQ ID NO: 3213749 - DNA, 25 bp, Homo sapien
tgctgacatgggcctttctactaca

SEQ ID NO: 3213750 - DNA, 25 bp, Homo sapien
tgacatgggcctttctactacagaa

SEQ ID NO: 3213751 - DNA, 25 bp, Homo sapien
ctgacatgggcctttctactacaga

SEQ ID NO: 3213752 - DNA, 25 bp, Homo sapien
ctgtggtgtatcacggaaaattggg

SEQ ID NO: 3213753 - DNA, 25 bp, Homo sapien
gagtatggttactaccatctttccc

SEQ ID NO: 3213754 - DNA, 25 bp, Homo sapien
attgggaggagtatggttactacca

SEQ ID NO: 3213755 - DNA, 25 bp, Homo sapien
tatcacggaaaattgggaggagtat

SEQ ID NO: 3213756 - DNA, 25 bp, Homo sapien
gcagctccatggctcatcttcttct

SEQ ID NO: 3213757 - DNA, 25 bp, Homo sapien
tgaattttctgtgtagccgtggaaa

SEQ ID NO: 3213758 - DNA, 25 bp, Homo sapien
tgtgtagccgtggaaaccactgggg

SEQ ID NO: 3213759 - DNA, 25 bp, Homo sapien
tctgtgtagccgtggaaaccactgg

SEQ ID NO: 3213760 - DNA, 25 bp, Homo sapien
cagctttagtctcctcttgtgggca

SEQ ID NO: 3213761 - DNA, 25 bp, Homo sapien
tgggtgattccctcccatcatggca

SEQ ID NO: 3213762 - DNA, 25 bp, Homo sapien
tcatggcacagtcacatggctggtg

SEQ ID NO: 3213763 - DNA, 25 bp, Homo sapien
gcatcagatcatttggacactgggt

SEQ ID NO: 3213764 - DNA, 25 bp, Homo sapien
tcttcatcaacagggctggcatctt

SEQ ID NO: 3213765 - DNA, 25 bp, Homo sapien
ccaggtcttcatcaacagggctggc

SEQ ID NO: 3213766 - DNA, 25 bp, Homo sapien
ggcattccaggtcttcatcaacagg

SEQ ID NO: 3213767 - DNA, 25 bp, Homo sapien
cttgctttggcattccaggtcttca

SEQ ID NO: 3213768 - DNA, 25 bp, Homo sapien
tcacataagcgctatgattccatag

SEQ ID NO: 3213769 - DNA, 25 bp, Homo sapien
acataagcgctatgattccataggt

SEQ ID NO: 3213770 - DNA, 25 bp, Homo sapien
cacataagcgctatgattccatagg

SEQ ID NO: 3213771 - DNA, 25 bp, Homo sapien
gagaactcacaaaaggactttcttc

SEQ ID NO: 3213772 - DNA, 25 bp, Homo sapien
ttgaacagcttttcactgaaacaac

SEQ ID NO: 3213773 - DNA, 25 bp, Homo sapien
gagttttggagaactcacaaaagga

SEQ ID NO: 3213774 - DNA, 25 bp, Homo sapien
tccttcatttagtatgtctcagcat

SEQ ID NO: 3213775 - DNA, 25 bp, Homo sapien
gatacaggtggtgcctcgtgttcct

SEQ ID NO: 3213776 - DNA, 25 bp, Homo sapien
tctctcctttatgcagtggtaacca

SEQ ID NO: 3213777 - DNA, 25 bp, Homo sapien
acttccatcactcctcattcattgg

SEQ ID NO: 3213778 - DNA, 25 bp, Homo sapien
aagcctcttacggcccagggtctct

SEQ ID NO: 3213779 - DNA, 25 bp, Homo sapien
gacagggacatccagaaagtatctt

SEQ ID NO: 3213780 - DNA, 25 bp, Homo sapien
atgtttctgtccagtggcaatgccc

SEQ ID NO: 3213781 - DNA, 25 bp, Homo sapien
cactattaagcccttcttcctgaag

SEQ ID NO: 3213782 - DNA, 25 bp, Homo sapien
gaggaacttccttagaaatgagttg

SEQ ID NO: 3213783 - DNA, 25 bp, Homo sapien
tgaaaagcaatggtgtaacttctct

SEQ ID NO: 3213784 - DNA, 25 bp, Homo sapien
gacccaaagttcatcatgccagcat

SEQ ID NO: 3213785 - DNA, 25 bp, Homo sapien
ccagcattctgtgaacagtggtttt

SEQ ID NO: 3213786 - DNA, 25 bp, Homo sapien
gagttttcgtcttgagtcagaccca

SEQ ID NO: 3213787 - DNA, 25 bp, Homo sapien
atgccaaaagagtaaatccaagcat

SEQ ID NO: 3213788 - DNA, 25 bp, Homo sapien
taagattcttatatacagtacctag

SEQ ID NO: 3213789 - DNA, 25 bp, Homo sapien
gtaacatctgaagcatttttcacac

SEQ ID NO: 3213790 - DNA, 25 bp, Homo sapien
cagtacctagaaatgggatctttcc

SEQ ID NO: 3213791 - DNA, 25 bp, Homo sapien
ttcactggtattattttgttttcta

SEQ ID NO: 3213792 - DNA, 25 bp, Homo sapien
gttttctattctgtttatgctctcc

SEQ ID NO: 3213793 - DNA, 25 bp, Homo sapien
ttgttttctattctgtttatgctct

SEQ ID NO: 3213794 - DNA, 25 bp, Homo sapien
tttctattctgtttatgctctccat

SEQ ID NO: 3213795 - DNA, 25 bp, Homo sapien
aatgaatcagtctgccagaggccta

SEQ ID NO: 3213796 - DNA, 25 bp, Homo sapien
tgcggcttatcaacaatgacttgct

SEQ ID NO: 3213797 - DNA, 25 bp, Homo sapien
gcttctatacattgcggcttatcaa

SEQ ID NO: 3213798 - DNA, 25 bp, Homo sapien
ctaaaaaagagtacttgtggcttct

SEQ ID NO: 3213799 - DNA, 25 bp, Homo sapien
gtcattctgtagaggaacaaggcca

SEQ ID NO: 3213800 - DNA, 25 bp, Homo sapien
ggtcattctgtagaggaacaaggcc

SEQ ID NO: 3213801 - DNA, 25 bp, Homo sapien
ttcatgagccaacaatgaggtcatt

SEQ ID NO: 3213802 - DNA, 25 bp, Homo sapien
atataatagtttgtggaatgttctg

SEQ ID NO: 3213803 - DNA, 25 bp, Homo sapien
ttaaactgtgatatagactttttaa

SEQ ID NO: 3213804 - DNA, 25 bp, Homo sapien
tttgaagtacttctcgtgtgtaatc

SEQ ID NO: 3213805 - DNA, 25 bp, Homo sapien
tagataaaagaagtagatctctatg

SEQ ID NO: 3213806 - DNA, 25 bp, Homo sapien
caatactgctcctcaaatggctggc

SEQ ID NO: 3213807 - DNA, 25 bp, Homo sapien
gctggcaaattagtgttgtctgttg

SEQ ID NO: 3213808 - DNA, 25 bp, Homo sapien
tcacagaatggctcctgtattccat

SEQ ID NO: 3213809 - DNA, 25 bp, Homo sapien
ccattgaacgagaataaaagctgcc

SEQ ID NO: 3213810 - DNA, 25 bp, Homo sapien
aatgtggttcctcagtcacagctcc

SEQ ID NO: 3213811 - DNA, 25 bp, Homo sapien
caaatgtggttcctcagtcacagct

SEQ ID NO: 3213812 - DNA, 25 bp, Homo sapien
tgtggttcctcagtcacagctcctc

SEQ ID NO: 3213813 - DNA, 25 bp, Homo sapien
gtgcaaatgtggttcctcagtcaca

SEQ ID NO: 3213814 - DNA, 25 bp, Homo sapien
cctgaattatgtctgcttgttcatc

SEQ ID NO: 3213815 - DNA, 25 bp, Homo sapien
cttccctgaattatgtctgcttgtt

SEQ ID NO: 3213816 - DNA, 25 bp, Homo sapien
tgaattatgtctgcttgttcatcct

SEQ ID NO: 3213817 - DNA, 25 bp, Homo sapien
tccctgaattatgtctgcttgttca

SEQ ID NO: 3213818 - DNA, 25 bp, Homo sapien
gaactcggtcaacataggaatgaag

SEQ ID NO: 3213819 - DNA, 25 bp, Homo sapien
aatgaagtgatgtaggacagagcac

SEQ ID NO: 3213820 - DNA, 25 bp, Homo sapien
gagcacacctggactagtgacagca

SEQ ID NO: 3213821 - DNA, 25 bp, Homo sapien
gtgacagcagaactagagaggccct

SEQ ID NO: 3213822 - DNA, 25 bp, Homo sapien
cctctgtcttctcagtaaatgtaca

SEQ ID NO: 3213823 - DNA, 25 bp, Homo sapien
tcagatcgtttatgtgacagaattc

SEQ ID NO: 3213824 - DNA, 25 bp, Homo sapien
tgtttcccatcagatcgtttatgtg

SEQ ID NO: 3213825 - DNA, 25 bp, Homo sapien
gtcttctcagtaaatgtacacacag

SEQ ID NO: 3213826 - DNA, 25 bp, Homo sapien
agcacgcatacagaaccagcaatcc

SEQ ID NO: 3213827 - DNA, 25 bp, Homo sapien
ttgtttcccagcacgcatacagaac

SEQ ID NO: 3213828 - DNA, 25 bp, Homo sapien
tcagcatgttgctttgggtgctccc

SEQ ID NO: 3213829 - DNA, 25 bp, Homo sapien
tcagaagacctaggcagctacagtt

SEQ ID NO: 3213830 - DNA, 25 bp, Homo sapien
acaagatgttatgtcaaacattgca

SEQ ID NO: 3213831 - DNA, 25 bp, Homo sapien
gacaagatgttatgtcaaacattgc

SEQ ID NO: 3213832 - DNA, 25 bp, Homo sapien
ggtgttctgggatcttgttcactgt

SEQ ID NO: 3213833 - DNA, 25 bp, Homo sapien
tgttctgggatcttgttcactgtgc

SEQ ID NO: 3213834 - DNA, 25 bp, Homo sapien
ttctgggatcttgttcactgtgctg

SEQ ID NO: 3213835 - DNA, 25 bp, Homo sapien
ctgggatcttgttcactgtgctgag

SEQ ID NO: 3213836 - DNA, 25 bp, Homo sapien
tggcctttatgaaggtcacataaag

SEQ ID NO: 3213837 - DNA, 25 bp, Homo sapien
cttgtcttagattcaaacctgattt

SEQ ID NO: 3213838 - DNA, 25 bp, Homo sapien
gattcaaacctgattttgccgttga

SEQ ID NO: 3213839 - DNA, 25 bp, Homo sapien
tttgccgttgaaaagctgagtcagg

SEQ ID NO: 3213840 - DNA, 25 bp, Homo sapien
gtagcaagggcaactcggattgtga

SEQ ID NO: 3213841 - DNA, 25 bp, Homo sapien
ggcaactcggattgtgagatgagct

SEQ ID NO: 3213842 - DNA, 25 bp, Homo sapien
ctgtgaccattctgggtagcaaggg

SEQ ID NO: 3213843 - DNA, 25 bp, Homo sapien
gcaagggcaactcggattgtgagat

SEQ ID NO: 3213844 - DNA, 25 bp, Homo sapien
gaagccctgagcaatttctacccaa

SEQ ID NO: 3213845 - DNA, 25 bp, Homo sapien
agaagccctgagcaatttctaccca

SEQ ID NO: 3213846 - DNA, 25 bp, Homo sapien
aagccctgagcaatttctacccaag

SEQ ID NO: 3213847 - DNA, 25 bp, Homo sapien
gccctgagcaatttctacccaagtt

SEQ ID NO: 3213848 - DNA, 25 bp, Homo sapien
ggaagggctaatacatcatccccaa

SEQ ID NO: 3213849 - DNA, 25 bp, Homo sapien
actattgggaagacgatgttacgca

SEQ ID NO: 3213850 - DNA, 25 bp, Homo sapien
tgaaaggaggctctggaaatggcac

SEQ ID NO: 3213851 - DNA, 25 bp, Homo sapien
tgtttatcgactgtggcccttaccc

SEQ ID NO: 3213852 - DNA, 25 bp, Homo sapien
gtgcagtggcaatcaaggtagcctg

SEQ ID NO: 3213853 - DNA, 25 bp, Homo sapien
tgcaataaagtttgtatgtaatccc

SEQ ID NO: 3213854 - DNA, 25 bp, Homo sapien
ttctacagtaatttaccatttctct

SEQ ID NO: 3213855 - DNA, 25 bp, Homo sapien
tatcgatatgacctgtgcaataaag

SEQ ID NO: 3213856 - DNA, 25 bp, Homo sapien
tcccagagttatccttgccaacagg

SEQ ID NO: 3213857 - DNA, 25 bp, Homo sapien
cctattgcaattggcctggagacca

SEQ ID NO: 3213858 - DNA, 25 bp, Homo sapien
gatatggtaaaagtcctcaggcaga

SEQ ID NO: 3213859 - DNA, 25 bp, Homo sapien
tggacattgactgtgtcgcaccaac

SEQ ID NO: 3213860 - DNA, 25 bp, Homo sapien
cacaagaacttcgtggagcatatac

SEQ ID NO: 3213861 - DNA, 25 bp, Homo sapien
aaagcaagaaggcaagattagggaa

SEQ ID NO: 3213862 - DNA, 25 bp, Homo sapien
acctgacggagctgaaaaacagcac

SEQ ID NO: 3213863 - DNA, 25 bp, Homo sapien
aaaacttctccaagctaaaggatca

SEQ ID NO: 3213864 - DNA, 25 bp, Homo sapien
ttttcggctgtctcctcatatttga

SEQ ID NO: 3213865 - DNA, 25 bp, Homo sapien
gtactcgtttttcggctgtctcctc

SEQ ID NO: 3213866 - DNA, 25 bp, Homo sapien
cttccttgtactcgtttttcggctg

SEQ ID NO: 3213867 - DNA, 25 bp, Homo sapien
cgtttttcggctgtctcctcatatt

SEQ ID NO: 3213868 - DNA, 25 bp, Homo sapien
gttttgcctgaaagccatattcagc

SEQ ID NO: 3213869 - DNA, 25 bp, Homo sapien
ccggtgttttgcctgaaagccatat

SEQ ID NO: 3213870 - DNA, 25 bp, Homo sapien
cataccggtgttttgcctgaaagcc

SEQ ID NO: 3213871 - DNA, 25 bp, Homo sapien
ttaatccacataccggtgttttgcc

SEQ ID NO: 3213872 - DNA, 25 bp, Homo sapien
ttgccttctgaatcctcgaagctgt

SEQ ID NO: 3213873 - DNA, 25 bp, Homo sapien
ttctgaatcctcgaagctgttcctt

SEQ ID NO: 3213874 - DNA, 25 bp, Homo sapien
tgccttctgaatcctcgaagctgtt

SEQ ID NO: 3213875 - DNA, 25 bp, Homo sapien
ctgaatcctcgaagctgttcctttt

SEQ ID NO: 3213876 - DNA, 25 bp, Homo sapien
ctgagtgaatctgaacaatgttgca

SEQ ID NO: 3213877 - DNA, 25 bp, Homo sapien
tgttgcaaggtgtatcgaagaacat

SEQ ID NO: 3213878 - DNA, 25 bp, Homo sapien
caatgttgcaaggtgtatcgaagaa

SEQ ID NO: 3213879 - DNA, 25 bp, Homo sapien
tctgaacaatgttgcaaggtgtatc

SEQ ID NO: 3213880 - DNA, 25 bp, Homo sapien
agctgctagacttctggtgaacctg

SEQ ID NO: 3213881 - DNA, 25 bp, Homo sapien
gctagacttctggtgaacctgagag

SEQ ID NO: 3213882 - DNA, 25 bp, Homo sapien
acttctggtgaacctgagagcatca

SEQ ID NO: 3213883 - DNA, 25 bp, Homo sapien
tagacttctggtgaacctgagagca

SEQ ID NO: 3213884 - DNA, 25 bp, Homo sapien
ctcccaagcccaacttcaccaagca

SEQ ID NO: 3213885 - DNA, 25 bp, Homo sapien
tcccaagcccaacttcaccaagcat

SEQ ID NO: 3213886 - DNA, 25 bp, Homo sapien
ctctggactgtcacaaatatgctca

SEQ ID NO: 3213887 - DNA, 25 bp, Homo sapien
tctctccttcgttaagcttttgtga

SEQ ID NO: 3213888 - DNA, 25 bp, Homo sapien
ttatgcactgtctgtcctcaagctc

SEQ ID NO: 3213889 - DNA, 25 bp, Homo sapien
ttatcttccgttgtctttccttatg

SEQ ID NO: 3213890 - DNA, 25 bp, Homo sapien
ctggggcaaactctgtagggtgatg

SEQ ID NO: 3213891 - DNA, 25 bp, Homo sapien
cgttcataggaaggtgctgcactgg

SEQ ID NO: 3213892 - DNA, 25 bp, Homo sapien
gccgttcataggaaggtgctgcact

SEQ ID NO: 3213893 - DNA, 25 bp, Homo sapien
gaagccgttcataggaaggtgctgc

SEQ ID NO: 3213894 - DNA, 25 bp, Homo sapien
aaggccctgagagatcatagcctcc

SEQ ID NO: 3213895 - DNA, 25 bp, Homo sapien
cctcccagttcatcagaaaaggcct

SEQ ID NO: 3213896 - DNA, 25 bp, Homo sapien
atcagaaaaggcctgagcgtcagtc

SEQ ID NO: 3213897 - DNA, 25 bp, Homo sapien
atcagctgttgtttacaaggccctg

SEQ ID NO: 3213898 - DNA, 25 bp, Homo sapien
cagaggggaatttctgctttacagg

SEQ ID NO: 3213899 - DNA, 25 bp, Homo sapien
gggaatttctgctttacaggctccc

SEQ ID NO: 3213900 - DNA, 25 bp, Homo sapien
atttctgctttacaggctcccttac

SEQ ID NO: 3213901 - DNA, 25 bp, Homo sapien
agaggggaatttctgctttacaggc

SEQ ID NO: 3213902 - DNA, 25 bp, Homo sapien
catttacagtgacctatcctttgtt

SEQ ID NO: 3213903 - DNA, 25 bp, Homo sapien
tgacctatcctttgttccgctttag

SEQ ID NO: 3213904 - DNA, 25 bp, Homo sapien
tcatccttgccattacacatacctg

SEQ ID NO: 3213905 - DNA, 25 bp, Homo sapien
tccgctttagctacccattctgaaa

SEQ ID NO: 3213906 - DNA, 25 bp, Homo sapien
gttagtgacccatgcatcatcatgc

SEQ ID NO: 3213907 - DNA, 25 bp, Homo sapien
taaactgtcgagttagtgacccatg

SEQ ID NO: 3213908 - DNA, 25 bp, Homo sapien
catcatgccctttgctatttagaag

SEQ ID NO: 3213909 - DNA, 25 bp, Homo sapien
agaagtccaacaacccttgttccag

SEQ ID NO: 3213910 - DNA, 25 bp, Homo sapien
atccccttgctcagaaggcagtttt

SEQ ID NO: 3213911 - DNA, 25 bp, Homo sapien
ctccttggtattgctcagagcctgc

SEQ ID NO: 3213912 - DNA, 25 bp, Homo sapien
cctgctgtaccagggttgctgggat

SEQ ID NO: 3213913 - DNA, 25 bp, Homo sapien
ccttggtattgctcagagcctgctg

SEQ ID NO: 3213914 - DNA, 25 bp, Homo sapien
tctgcttctcttgaaggtggaccat

SEQ ID NO: 3213915 - DNA, 25 bp, Homo sapien
tgggttatcaagcatccatccagaa

SEQ ID NO: 3213916 - DNA, 25 bp, Homo sapien
gaaaataactgtggcagaatctcct

SEQ ID NO: 3213917 - DNA, 25 bp, Homo sapien
gaatctccttatgcacatacccctg

SEQ ID NO: 3213918 - DNA, 25 bp, Homo sapien
catccactccactagtagaaagagg

SEQ ID NO: 3213919 - DNA, 25 bp, Homo sapien
cctcacactcttgctgcttctgaca

SEQ ID NO: 3213920 - DNA, 25 bp, Homo sapien
ctttcccctcacactcttgctgctt

SEQ ID NO: 3213921 - DNA, 25 bp, Homo sapien
ccctcacactcttgctgcttctgac

SEQ ID NO: 3213922 - DNA, 25 bp, Homo sapien
tcccctcacactcttgctgcttctg

SEQ ID NO: 3213923 - DNA, 25 bp, Homo sapien
tgtgattatacttcaacctagttct

SEQ ID NO: 3213924 - DNA, 25 bp, Homo sapien
atacttcaacctagttctcagagcc

SEQ ID NO: 3213925 - DNA, 25 bp, Homo sapien
gattatacttcaacctagttctcag

SEQ ID NO: 3213926 - DNA, 25 bp, Homo sapien
attgtgattatacttcaacctagtt

SEQ ID NO: 3213927 - DNA, 25 bp, Homo sapien
tgataggagccatctgttttgggtg

SEQ ID NO: 3213928 - DNA, 25 bp, Homo sapien
tattttcctttgcatacttatggtc

SEQ ID NO: 3213929 - DNA, 25 bp, Homo sapien
actcttgggttcctggagcatagca

SEQ ID NO: 3213930 - DNA, 25 bp, Homo sapien
tcttcttctacttgactcttgggtt

SEQ ID NO: 3213931 - DNA, 25 bp, Homo sapien
tctgttgtctttggatggctgagct

SEQ ID NO: 3213932 - DNA, 25 bp, Homo sapien
taaaccaatgaggatctctgttgtc

SEQ ID NO: 3213933 - DNA, 25 bp, Homo sapien
ctttggatggctgagctttgaagga

SEQ ID NO: 3213934 - DNA, 25 bp, Homo sapien
tttaaaccaatgaggatctctgttg

SEQ ID NO: 3213935 - DNA, 25 bp, Homo sapien
tgccccaccacggattgctcagtat

SEQ ID NO: 3213936 - DNA, 25 bp, Homo sapien
tcccggtcttctgatactttgtgaa

SEQ ID NO: 3213937 - DNA, 25 bp, Homo sapien
agcaaaggccatgttgtttttcccg

SEQ ID NO: 3213938 - DNA, 25 bp, Homo sapien
tcaaggcttgtaagagaattccgcc

SEQ ID NO: 3213939 - DNA, 25 bp, Homo sapien
taacccaggtgccagaattccttgc

SEQ ID NO: 3213940 - DNA, 25 bp, Homo sapien
cttgctcacaaagctctgactctac

SEQ ID NO: 3213941 - DNA, 25 bp, Homo sapien
ggtgccagaattccttgctcacaaa

SEQ ID NO: 3213942 - DNA, 25 bp, Homo sapien
tctgactctacagatatgtgaaaat

SEQ ID NO: 3213943 - DNA, 25 bp, Homo sapien
gaaacataactagcaggctcttctc

SEQ ID NO: 3213944 - DNA, 25 bp, Homo sapien
aaacataactagcaggctcttctcc

SEQ ID NO: 3213945 - DNA, 25 bp, Homo sapien
atgaaacataactagcaggctcttc

SEQ ID NO: 3213946 - DNA, 25 bp, Homo sapien
aggcagctcgcaaatgcagaataca

SEQ ID NO: 3213947 - DNA, 25 bp, Homo sapien
gaaaaagcagctgatctatgaccga

SEQ ID NO: 3213948 - DNA, 25 bp, Homo sapien
cagctgatctatgaccgagggagga

SEQ ID NO: 3213949 - DNA, 25 bp, Homo sapien
agcagctgatctatgaccgagggag

SEQ ID NO: 3213950 - DNA, 25 bp, Homo sapien
aaagcagctgatctatgaccgaggg

SEQ ID NO: 3213951 - DNA, 25 bp, Homo sapien
tgggagtggggcagaggagacagga

SEQ ID NO: 3213952 - DNA, 25 bp, Homo sapien
gggagtggggcagaggagacaggag

SEQ ID NO: 3213953 - DNA, 25 bp, Homo sapien
ctgggagtggggcagaggagacagg

SEQ ID NO: 3213954 - DNA, 25 bp, Homo sapien
cagtataaggcaagcctgagctgag

SEQ ID NO: 3213955 - DNA, 25 bp, Homo sapien
aaggcagaatgaggaccctggatac

SEQ ID NO: 3213956 - DNA, 25 bp, Homo sapien
tagtcctcgggattgttcagtataa

SEQ ID NO: 3213957 - DNA, 25 bp, Homo sapien
cactgaagtgggttcactattgtca

SEQ ID NO: 3213958 - DNA, 25 bp, Homo sapien
tatttgaatagcttggaagcatata

SEQ ID NO: 3213959 - DNA, 25 bp, Homo sapien
tagccttgcgatggacaaggttgcg

SEQ ID NO: 3213960 - DNA, 25 bp, Homo sapien
catataaatttgaggcacagcttag

SEQ ID NO: 3213961 - DNA, 25 bp, Homo sapien
caaggttgcgcatttgttagtgctt

SEQ ID NO: 3213962 - DNA, 25 bp, Homo sapien
gtcagaaaagctcgacaatggtcac

SEQ ID NO: 3213963 - DNA, 25 bp, Homo sapien
cagtcagaaaagctcgacaatggtc

SEQ ID NO: 3213964 - DNA, 25 bp, Homo sapien
cagcagtcagaaaagctcgacaatg

SEQ ID NO: 3213965 - DNA, 25 bp, Homo sapien
gcagtcagaaaagctcgacaatggt

SEQ ID NO: 3213966 - DNA, 25 bp, Homo sapien
ggtagctgaggagtcggcagtgggc

SEQ ID NO: 3213967 - DNA, 25 bp, Homo sapien
gtagctgaggagtcggcagtgggcg

SEQ ID NO: 3213968 - DNA, 25 bp, Homo sapien
caggtagctgaggagtcggcagtgg

SEQ ID NO: 3213969 - DNA, 25 bp, Homo sapien
ccaggtagctgaggagtcggcagtg

SEQ ID NO: 3213970 - DNA, 25 bp, Homo sapien
taagtctgaggctatgtgacggcca

SEQ ID NO: 3213971 - DNA, 25 bp, Homo sapien
ggcactgtgagaaacactcgtttgt

SEQ ID NO: 3213972 - DNA, 25 bp, Homo sapien
tacaaaggccttagagctaaccagt

SEQ ID NO: 3213973 - DNA, 25 bp, Homo sapien
tcttgagcctgcaggaggtttgcta

SEQ ID NO: 3213974 - DNA, 25 bp, Homo sapien
gagggagctgctgcactacgtagaa

SEQ ID NO: 3213975 - DNA, 25 bp, Homo sapien
tacgtagaaaacacccatgcagaag

SEQ ID NO: 3213976 - DNA, 25 bp, Homo sapien
ggtttagaaccagcatccccatgaa

SEQ ID NO: 3213977 - DNA, 25 bp, Homo sapien
gttctggtgcacagcaggacatgcc

SEQ ID NO: 3213978 - DNA, 25 bp, Homo sapien
aatgaagctcttaccatgggcaagt

SEQ ID NO: 3213979 - DNA, 25 bp, Homo sapien
ccatgggcaagtcattgtgtaggtc

SEQ ID NO: 3213980 - DNA, 25 bp, Homo sapien
tgacttgttccacaaccatgaatga

SEQ ID NO: 3213981 - DNA, 25 bp, Homo sapien
tgttccacaaccatgaatgaagctc

SEQ ID NO: 3213982 - DNA, 25 bp, Homo sapien
tgaggagtttataggccagcaggaa

SEQ ID NO: 3213983 - DNA, 25 bp, Homo sapien
caacgtggtgttggataatccgata

SEQ ID NO: 3213984 - DNA, 25 bp, Homo sapien
aagctagaaattgatcaacgtggtg

SEQ ID NO: 3213985 - DNA, 25 bp, Homo sapien
tgctaataactatgaaacaagctag

SEQ ID NO: 3213986 - DNA, 25 bp, Homo sapien
cccagctctgcttagctactgagat

SEQ ID NO: 3213987 - DNA, 25 bp, Homo sapien
ttagctactgagatcagatgggatt

SEQ ID NO: 3213988 - DNA, 25 bp, Homo sapien
tagctactgagatcagatgggattg

SEQ ID NO: 3213989 - DNA, 25 bp, Homo sapien
aggcccagctctgcttagctactga

SEQ ID NO: 3213990 - DNA, 25 bp, Homo sapien
gctgctagaagctgaggtacagttc

SEQ ID NO: 3213991 - DNA, 25 bp, Homo sapien
aggtaggtagtctatacaggtttca

SEQ ID NO: 3213992 - DNA, 25 bp, Homo sapien
ggtagtctatacaggtttcactcca

SEQ ID NO: 3213993 - DNA, 25 bp, Homo sapien
gctagaagctgaggtacagttcttc

SEQ ID NO: 3213994 - DNA, 25 bp, Homo sapien
aagagtgttggtggaataaaggcaa

SEQ ID NO: 3213995 - DNA, 25 bp, Homo sapien
ggaatttcagtctgggacagtagca

SEQ ID NO: 3213996 - DNA, 25 bp, Homo sapien
agagtgttggtggaataaaggcaat

SEQ ID NO: 3213997 - DNA, 25 bp, Homo sapien
gtgaagagtgttggtggaataaagg

SEQ ID NO: 3213998 - DNA, 25 bp, Homo sapien
cacgaattttcatgtcatctatgcg

SEQ ID NO: 3213999 - DNA, 25 bp, Homo sapien
ccgtgctaattcttctctgtactgt

SEQ ID NO: 3214000 - DNA, 25 bp, Homo sapien
tttcatgtcatctatgcgcaggggc

SEQ ID NO: 3214001 - DNA, 25 bp, Homo sapien
gccgtgctaattcttctctgtactg

SEQ ID NO: 3214002 - DNA, 25 bp, Homo sapien
tgtcactgacttgactggattagat

SEQ ID NO: 3214003 - DNA, 25 bp, Homo sapien
gattagattcccatagcagatgcat

SEQ ID NO: 3214004 - DNA, 25 bp, Homo sapien
tgacttgactggattagattcccat

SEQ ID NO: 3214005 - DNA, 25 bp, Homo sapien
cactgacttgactggattagattcc

SEQ ID NO: 3214006 - DNA, 25 bp, Homo sapien
ccaccacggcttttgcctctggttt

SEQ ID NO: 3214007 - DNA, 25 bp, Homo sapien
ctccaccacggcttttgcctctggt

SEQ ID NO: 3214008 - DNA, 25 bp, Homo sapien
ttccttcttagcaatggctcctgtg

SEQ ID NO: 3214009 - DNA, 25 bp, Homo sapien
ttgctccatgtcaccctgattctcc

SEQ ID NO: 3214010 - DNA, 25 bp, Homo sapien
gaggagatgcttgcaaagagattct

SEQ ID NO: 3214011 - DNA, 25 bp, Homo sapien
gggcctgtgggtcattccaagttgt

SEQ ID NO: 3214012 - DNA, 25 bp, Homo sapien
aatagttggaatattgatgggggcc

SEQ ID NO: 3214013 - DNA, 25 bp, Homo sapien
ctgtgggtcattccaagttgttgtc

SEQ ID NO: 3214014 - DNA, 25 bp, Homo sapien
catgtgtcagcctaagcaagtatga

SEQ ID NO: 3214015 - DNA, 25 bp, Homo sapien
tcagccattaccaaagacagattcg

SEQ ID NO: 3214016 - DNA, 25 bp, Homo sapien
tacagtcgtttggagcatgtgtcag

SEQ ID NO: 3214017 - DNA, 25 bp, Homo sapien
cagcaggtaaccagcctttttccag

SEQ ID NO: 3214018 - DNA, 25 bp, Homo sapien
taaatgggtcatcgggagtaaagac

SEQ ID NO: 3214019 - DNA, 25 bp, Homo sapien
tcaagccttaaatgggtcatcggga

SEQ ID NO: 3214020 - DNA, 25 bp, Homo sapien
caagccttaaatgggtcatcgggag

SEQ ID NO: 3214021 - DNA, 25 bp, Homo sapien
gccttaaatgggtcatcgggagtaa

SEQ ID NO: 3214022 - DNA, 25 bp, Homo sapien
ttctgttgaagatatcagttacttg

SEQ ID NO: 3214023 - DNA, 25 bp, Homo sapien
tctgttgaagatatcagttacttgg

SEQ ID NO: 3214024 - DNA, 25 bp, Homo sapien
aacaaaccacgactgctgagccctg

SEQ ID NO: 3214025 - DNA, 25 bp, Homo sapien
gctccacatgttgagaacctcttct

SEQ ID NO: 3214026 - DNA, 25 bp, Homo sapien
gcaaaaacaaaccacgactgctgag

SEQ ID NO: 3214027 - DNA, 25 bp, Homo sapien
gatgctgctccacatgttgagaacc

SEQ ID NO: 3214028 - DNA, 25 bp, Homo sapien
gagtccataccagataacagaaata

SEQ ID NO: 3214029 - DNA, 25 bp, Homo sapien
tcacagccatctcaattcttttact

SEQ ID NO: 3214030 - DNA, 25 bp, Homo sapien
cttttactgcagctgcataaatatg

SEQ ID NO: 3214031 - DNA, 25 bp, Homo sapien
tatccacggtaactcctggcatctt

SEQ ID NO: 3214032 - DNA, 25 bp, Homo sapien
tgtctcctggagtcatgtgttttac

SEQ ID NO: 3214033 - DNA, 25 bp, Homo sapien
ggagtcatgtgttttacttcacctg

SEQ ID NO: 3214034 - DNA, 25 bp, Homo sapien
aatagtaggcagttttgtctcctgg

SEQ ID NO: 3214035 - DNA, 25 bp, Homo sapien
gtaatagtaggcagttttgtctcct

SEQ ID NO: 3214036 - DNA, 25 bp, Homo sapien
ggcagcaaatctgagctgaatcttt

SEQ ID NO: 3214037 - DNA, 25 bp, Homo sapien
cagcaaatctgagctgaatctttca

SEQ ID NO: 3214038 - DNA, 25 bp, Homo sapien
gcagcaaatctgagctgaatctttc

SEQ ID NO: 3214039 - DNA, 25 bp, Homo sapien
ctggtatttctcagcaggtttaaag

SEQ ID NO: 3214040 - DNA, 25 bp, Homo sapien
tttcctgtatccacaaggaaaatcc

SEQ ID NO: 3214041 - DNA, 25 bp, Homo sapien
gaaaagagctttagcaaactggaaa

SEQ ID NO: 3214042 - DNA, 25 bp, Homo sapien
ctggctggtatttctcagcaggttt

SEQ ID NO: 3214043 - DNA, 25 bp, Homo sapien
taacatcctttatgccccatgttgt

SEQ ID NO: 3214044 - DNA, 25 bp, Homo sapien
gaggcagctgattttgtttacgttg

SEQ ID NO: 3214045 - DNA, 25 bp, Homo sapien
ttaacatcctttatgccccatgttg

SEQ ID NO: 3214046 - DNA, 25 bp, Homo sapien
gcagctgattttgtttacgttgaat

SEQ ID NO: 3214047 - DNA, 25 bp, Homo sapien
ttgcccttcagtgaccctcaaagca

SEQ ID NO: 3214048 - DNA, 25 bp, Homo sapien
caaagcaccctgtggctccatgtgt

SEQ ID NO: 3214049 - DNA, 25 bp, Homo sapien
tttgaccaagtttatagccttccat

SEQ ID NO: 3214050 - DNA, 25 bp, Homo sapien
gaccctcaaagcaccctgtggctcc

SEQ ID NO: 3214051 - DNA, 25 bp, Homo sapien
ggcgttggctggttcatcaccgtca

SEQ ID NO: 3214052 - DNA, 25 bp, Homo sapien
aaaaacactcagtctctcagggaag

SEQ ID NO: 3214053 - DNA, 25 bp, Homo sapien
gtccgggactggcccttctatcaca

SEQ ID NO: 3214054 - DNA, 25 bp, Homo sapien
cccagatgcgtcagtaggagaggct

SEQ ID NO: 3214055 - DNA, 25 bp, Homo sapien
gggaatgtgtaaaaccttgcttaca

SEQ ID NO: 3214056 - DNA, 25 bp, Homo sapien
tggggaatgtgtaaaaccttgctta

SEQ ID NO: 3214057 - DNA, 25 bp, Homo sapien
acttggataccgcactgggcagcct

SEQ ID NO: 3214058 - DNA, 25 bp, Homo sapien
cccctggtacttggataccgcactg

SEQ ID NO: 3214059 - DNA, 25 bp, Homo sapien
gaccctgacaccccaggttgggctg

SEQ ID NO: 3214060 - DNA, 25 bp, Homo sapien
ggatgctgtccgcatccccctggta

SEQ ID NO: 3214061 - DNA, 25 bp, Homo sapien
agtgccccacactgtctgacaccct

SEQ ID NO: 3214062 - DNA, 25 bp, Homo sapien
tctaaaatgagtcagtcctccaggg

SEQ ID NO: 3214063 - DNA, 25 bp, Homo sapien
tcttctgaccaatgcaagtgctgga

SEQ ID NO: 3214064 - DNA, 25 bp, Homo sapien
ctcccattgctgtgtcagtgcccca

SEQ ID NO: 3214065 - DNA, 25 bp, Homo sapien
tctcctgctcggtgcacaatactac

SEQ ID NO: 3214066 - DNA, 25 bp, Homo sapien
tcggtgcacaatactactcctaagg

SEQ ID NO: 3214067 - DNA, 25 bp, Homo sapien
gaaaggtctcctgctcggtgcacaa

SEQ ID NO: 3214068 - DNA, 25 bp, Homo sapien
tactactcctaaggcagttctgggc

SEQ ID NO: 3214069 - DNA, 25 bp, Homo sapien
gaaggtagaagcacatgcaacggtc

SEQ ID NO: 3214070 - DNA, 25 bp, Homo sapien
gcatctgtgaagttggtgcgcccca

SEQ ID NO: 3214071 - DNA, 25 bp, Homo sapien
tgtgaagttggtgcgccccaccaaa

SEQ ID NO: 3214072 - DNA, 25 bp, Homo sapien
gaagcacatgcaacggtctagcatc

SEQ ID NO: 3214073 - DNA, 25 bp, Homo sapien
tcaggaagaaaggcatagttgcttt

SEQ ID NO: 3214074 - DNA, 25 bp, Homo sapien
gcatagttgctttttttcgggttga

SEQ ID NO: 3214075 - DNA, 25 bp, Homo sapien
ctttcaggaagaaaggcatagttgc

SEQ ID NO: 3214076 - DNA, 25 bp, Homo sapien
aggaagaaaggcatagttgcttttt

SEQ ID NO: 3214077 - DNA, 25 bp, Homo sapien
tcaggcccggcccactggcaagcat

SEQ ID NO: 3214078 - DNA, 25 bp, Homo sapien
ccgccgacaggctgtcagcgctgga

SEQ ID NO: 3214079 - DNA, 25 bp, Homo sapien
actggcaagcatccgcgctctggcc

SEQ ID NO: 3214080 - DNA, 25 bp, Homo sapien
gagcgcggccctagcgggaaataat

SEQ ID NO: 3214081 - DNA, 25 bp, Homo sapien
tgcccaggtcattgtccagtgcgac

SEQ ID NO: 3214082 - DNA, 25 bp, Homo sapien
tcacaagtcccgctcgggagccgac

SEQ ID NO: 3214083 - DNA, 25 bp, Homo sapien
agctaaaagtgtccgcagcgccgag

SEQ ID NO: 3214084 - DNA, 25 bp, Homo sapien
agccgaccgggagaggcaaagttgg

SEQ ID NO: 3214085 - DNA, 25 bp, Homo sapien
cttaacgcgccgggacacctggctc

SEQ ID NO: 3214086 - DNA, 25 bp, Homo sapien
aacgcgccgggacacctggctctgg

SEQ ID NO: 3214087 - DNA, 25 bp, Homo sapien
ccgccctctccgcgcaggtggggcc

SEQ ID NO: 3214088 - DNA, 25 bp, Homo sapien
ccctctccgcgcaggtggggccgag

SEQ ID NO: 3214089 - DNA, 25 bp, Homo sapien
gcagggacgtctgactgcgagggcc

SEQ ID NO: 3214090 - DNA, 25 bp, Homo sapien
ttccgggccgactaagggtgcgagc

SEQ ID NO: 3214091 - DNA, 25 bp, Homo sapien
ctccgagggcgtccgcaaaaagacg

SEQ ID NO: 3214092 - DNA, 25 bp, Homo sapien
agcgccggtgcagggacgtctgact

SEQ ID NO: 3214093 - DNA, 25 bp, Homo sapien
aaagtgctccagctcgatactcctg

SEQ ID NO: 3214094 - DNA, 25 bp, Homo sapien
cttttgtcccgttcctcaaagtgct

SEQ ID NO: 3214095 - DNA, 25 bp, Homo sapien
tgcagtgggcactgtgcgccggact

SEQ ID NO: 3214096 - DNA, 25 bp, Homo sapien
tgcagggtccgcgtgcggtagaagc

SEQ ID NO: 3214097 - DNA, 25 bp, Homo sapien
aaacaccaggcccttgaagtagcgg

SEQ ID NO: 3214098 - DNA, 25 bp, Homo sapien
tccggctgccgtcgatggtgtagat

SEQ ID NO: 3214099 - DNA, 25 bp, Homo sapien
gcaggttcacgttgtccgacaggga

SEQ ID NO: 3214100 - DNA, 25 bp, Homo sapien
ctatgaggagcgcatcgaaggaccg

SEQ ID NO: 3214101 - DNA, 25 bp, Homo sapien
cttccagcagctcgtccaggctggt

SEQ ID NO: 3214102 - DNA, 25 bp, Homo sapien
ttccagcagctcgtccaggctggtg

SEQ ID NO: 3214103 - DNA, 25 bp, Homo sapien
tccagcagctcgtccaggctggtga

SEQ ID NO: 3214104 - DNA, 25 bp, Homo sapien
ccagcagctcgtccaggctggtgac

SEQ ID NO: 3214105 - DNA, 25 bp, Homo sapien
gaatactggaacatgacaggagcct

SEQ ID NO: 3214106 - DNA, 25 bp, Homo sapien
ggtccacaccgagggtccaacagag

SEQ ID NO: 3214107 - DNA, 25 bp, Homo sapien
tagagcatttcacaaccacagcttc

SEQ ID NO: 3214108 - DNA, 25 bp, Homo sapien
caggaccccgaatactggaacatga

SEQ ID NO: 3214109 - DNA, 25 bp, Homo sapien
ttaaccactgataatgccttttcta

SEQ ID NO: 3214110 - DNA, 25 bp, Homo sapien
taaccactgataatgccttttctac

SEQ ID NO: 3214111 - DNA, 25 bp, Homo sapien
cctccttagactttctctgggcagc

SEQ ID NO: 3214112 - DNA, 25 bp, Homo sapien
tcctccttagactttctctgggcag

SEQ ID NO: 3214113 - DNA, 25 bp, Homo sapien
atcctccttagactttctctgggca

SEQ ID NO: 3214114 - DNA, 25 bp, Homo sapien
catagaagcatttggtctaaagaac

SEQ ID NO: 3214115 - DNA, 25 bp, Homo sapien
catttggtctaaagaacagatgctg

SEQ ID NO: 3214116 - DNA, 25 bp, Homo sapien
tttgagagaataacaaggattacag

SEQ ID NO: 3214117 - DNA, 25 bp, Homo sapien
tatctctatcatagaagcatttggt

SEQ ID NO: 3214118 - DNA, 25 bp, Homo sapien
tgctttccatccagggtgcagagcc

SEQ ID NO: 3214119 - DNA, 25 bp, Homo sapien
ttttattcagaaggatccgcacggc

SEQ ID NO: 3214120 - DNA, 25 bp, Homo sapien
aaatggttcattggatgcacacacg

SEQ ID NO: 3214121 - DNA, 25 bp, Homo sapien
gcagagcctcttgacgactcctgag

SEQ ID NO: 3214122 - DNA, 25 bp, Homo sapien
cagtgactgttcatggtgaattgcc

SEQ ID NO: 3214123 - DNA, 25 bp, Homo sapien
ttcaaactcaaaggataaccagccc

SEQ ID NO: 3214124 - DNA, 25 bp, Homo sapien
tctcttcatctaaggaaaggtgtcc

SEQ ID NO: 3214125 - DNA, 25 bp, Homo sapien
caaccaatctgggtaggaagcaacc

SEQ ID NO: 3214126 - DNA, 25 bp, Homo sapien
ccagaaactgcgctcatgtaagaca

SEQ ID NO: 3214127 - DNA, 25 bp, Homo sapien
tactgtaatcattttggtgcgccag

SEQ ID NO: 3214128 - DNA, 25 bp, Homo sapien
cccaaacagttgagttatgaaggca

SEQ ID NO: 3214129 - DNA, 25 bp, Homo sapien
cctgtatgaggcaagttcgctggca

SEQ ID NO: 3214130 - DNA, 25 bp, Homo sapien
caaacacgctgaaagagacaaagag

SEQ ID NO: 3214131 - DNA, 25 bp, Homo sapien
tggaaacctggagatgtgtgcaaag

SEQ ID NO: 3214132 - DNA, 25 bp, Homo sapien
gagacaaagagtggcatggaaacct

SEQ ID NO: 3214133 - DNA, 25 bp, Homo sapien
ttaatgccaaacacgctgaaagaga

SEQ ID NO: 3214134 - DNA, 25 bp, Homo sapien
attattctcatttcccttagtactg

SEQ ID NO: 3214135 - DNA, 25 bp, Homo sapien
ttagtactgtcaaccatctttgtac

SEQ ID NO: 3214136 - DNA, 25 bp, Homo sapien
catttcccttagtactgtcaaccat

SEQ ID NO: 3214137 - DNA, 25 bp, Homo sapien
gctgctactgctgtacgtgcatgca

SEQ ID NO: 3214138 - DNA, 25 bp, Homo sapien
gtgatctccagtttcggtggtccaa

SEQ ID NO: 3214139 - DNA, 25 bp, Homo sapien
ccaaggttagagatcttgctttcag

SEQ ID NO: 3214140 - DNA, 25 bp, Homo sapien
tttcagtctggattctctgctccgt

SEQ ID NO: 3214141 - DNA, 25 bp, Homo sapien
ggattctctgctccgtatcctctgc

SEQ ID NO: 3214142 - DNA, 25 bp, Homo sapien
attaggtaagtcagcaaacaatttt

SEQ ID NO: 3214143 - DNA, 25 bp, Homo sapien
tcatggataccgcaaaggcttttgt

SEQ ID NO: 3214144 - DNA, 25 bp, Homo sapien
ccaagcagtgtgttttgtgagcaac

SEQ ID NO: 3214145 - DNA, 25 bp, Homo sapien
tcaaccctgtggacccctttgctgg

SEQ ID NO: 3214146 - DNA, 25 bp, Homo sapien
gtcactgctcccctaggtcctagag

SEQ ID NO: 3214147 - DNA, 25 bp, Homo sapien
ttattcttctgtttcagcactccct

SEQ ID NO: 3214148 - DNA, 25 bp, Homo sapien
tctgtttcagcactcccttttaacc

SEQ ID NO: 3214149 - DNA, 25 bp, Homo sapien
tattcttctgtttcagcactccctt

SEQ ID NO: 3214150 - DNA, 25 bp, Homo sapien
tcttctgtttcagcactccctttta

SEQ ID NO: 3214151 - DNA, 25 bp, Homo sapien
ggagagctggcgacaagcagggcag

SEQ ID NO: 3214152 - DNA, 25 bp, Homo sapien
ggaggactgtgtagccacagtcaca

SEQ ID NO: 3214153 - DNA, 25 bp, Homo sapien
gcaagagcaggtgccagctattgga

SEQ ID NO: 3214154 - DNA, 25 bp, Homo sapien
gggcagtaggtgctgaggcactgcc

SEQ ID NO: 3214155 - DNA, 25 bp, Homo sapien
caccggttgacaacaagccctggca

SEQ ID NO: 3214156 - DNA, 25 bp, Homo sapien
ccacctccaccggttgacaacaagc

SEQ ID NO: 3214157 - DNA, 25 bp, Homo sapien
cctccaccggttgacaacaagccct

SEQ ID NO: 3214158 - DNA, 25 bp, Homo sapien
tccaccggttgacaacaagccctgg

SEQ ID NO: 3214159 - DNA, 25 bp, Homo sapien
aacggctctagctacagtgtccagg

SEQ ID NO: 3214160 - DNA, 25 bp, Homo sapien
gttggtgttagcacacaccccttca

SEQ ID NO: 3214161 - DNA, 25 bp, Homo sapien
ttctcttctatctccgttggtgtta

SEQ ID NO: 3214162 - DNA, 25 bp, Homo sapien
tgaaacggctctagctacagtgtcc

SEQ ID NO: 3214163 - DNA, 25 bp, Homo sapien
catcttgggcataacgaaatttttc

SEQ ID NO: 3214164 - DNA, 25 bp, Homo sapien
tgggcataacgaaatttttctggtc

SEQ ID NO: 3214165 - DNA, 25 bp, Homo sapien
tcttgggcataacgaaatttttctg

SEQ ID NO: 3214166 - DNA, 25 bp, Homo sapien
cataacgaaatttttctggtccaca

SEQ ID NO: 3214167 - DNA, 25 bp, Homo sapien
taacagctgaggatcgagaataaga

SEQ ID NO: 3214168 - DNA, 25 bp, Homo sapien
tgatttgctgcgtcgagagggccca

SEQ ID NO: 3214169 - DNA, 25 bp, Homo sapien
taagatgacttcaggacacgacatt

SEQ ID NO: 3214170 - DNA, 25 bp, Homo sapien
ccagaatacttaacagctgaggatc

SEQ ID NO: 3214171 - DNA, 25 bp, Homo sapien
gtacacatgcagtatacacagagta

SEQ ID NO: 3214172 - DNA, 25 bp, Homo sapien
acagtaaggagagtggttattcagc

SEQ ID NO: 3214173 - DNA, 25 bp, Homo sapien
catgcagtatacacagagtagaaga

SEQ ID NO: 3214174 - DNA, 25 bp, Homo sapien
ctctaaatgtgcgttcaaaagggta

SEQ ID NO: 3214175 - DNA, 25 bp, Homo sapien
tagaataggcactggagtagtggcc

SEQ ID NO: 3214176 - DNA, 25 bp, Homo sapien
tggctgtagaataggcactggagta

SEQ ID NO: 3214177 - DNA, 25 bp, Homo sapien
gggatttggctgtagaataggcact

SEQ ID NO: 3214178 - DNA, 25 bp, Homo sapien
cactggagtagtggccaccccgctt

SEQ ID NO: 3214179 - DNA, 25 bp, Homo sapien
ggatttcgtagatttaggagtagaa

SEQ ID NO: 3214180 - DNA, 25 bp, Homo sapien
cctctgaaacttcctggactagttg

SEQ ID NO: 3214181 - DNA, 25 bp, Homo sapien
tttaggagtagaaagttggctgctg

SEQ ID NO: 3214182 - DNA, 25 bp, Homo sapien
ctggactagttggagaggaactgga

SEQ ID NO: 3214183 - DNA, 25 bp, Homo sapien
gaaaacaatcggaatcagcacccag

SEQ ID NO: 3214184 - DNA, 25 bp, Homo sapien
aaagaagcaaacgaggtccacaggg

SEQ ID NO: 3214185 - DNA, 25 bp, Homo sapien
gctgctggagtatgaaaacggccat

SEQ ID NO: 3214186 - DNA, 25 bp, Homo sapien
cacaggtgactacatggcttgccaa

SEQ ID NO: 3214187 - DNA, 25 bp, Homo sapien
gctaatttgggtaagcactggttta

SEQ ID NO: 3214188 - DNA, 25 bp, Homo sapien
gaagcaggtaatggtcctacaacaa

SEQ ID NO: 3214189 - DNA, 25 bp, Homo sapien
gctctccatgaagcctgcttgttca

SEQ ID NO: 3214190 - DNA, 25 bp, Homo sapien
cactggtttactgcaagctgatgtg

SEQ ID NO: 3214191 - DNA, 25 bp, Homo sapien
cttcaggacttatgcaacggtcaag

SEQ ID NO: 3214192 - DNA, 25 bp, Homo sapien
tcaggtccaccgtttacattggaag

SEQ ID NO: 3214193 - DNA, 25 bp, Homo sapien
cgtttacattggaagaagatctgcc

SEQ ID NO: 3214194 - DNA, 25 bp, Homo sapien
tatgcaacggtcaagctcaggtcca

SEQ ID NO: 3214195 - DNA, 25 bp, Homo sapien
gactactgcaaaattgccatcacca

SEQ ID NO: 3214196 - DNA, 25 bp, Homo sapien
tttgactactgcaaaattgccatca

SEQ ID NO: 3214197 - DNA, 25 bp, Homo sapien
tgactactgcaaaattgccatcacc

SEQ ID NO: 3214198 - DNA, 25 bp, Homo sapien
ttgactactgcaaaattgccatcac

SEQ ID NO: 3214199 - DNA, 25 bp, Homo sapien
attcctgttgtattctacagcacag

SEQ ID NO: 3214200 - DNA, 25 bp, Homo sapien
gcccattcctgttgtattctacagc

SEQ ID NO: 3214201 - DNA, 25 bp, Homo sapien
aagaaaatatctagtggagtcaggg

SEQ ID NO: 3214202 - DNA, 25 bp, Homo sapien
taaagaaaatatctagtggagtcag

SEQ ID NO: 3214203 - DNA, 25 bp, Homo sapien
gtctataatctttagggcaaactcc

SEQ ID NO: 3214204 - DNA, 25 bp, Homo sapien
ttgtctataatctttagggcaaact

SEQ ID NO: 3214205 - DNA, 25 bp, Homo sapien
tgtctataatctttagggcaaactc

SEQ ID NO: 3214206 - DNA, 25 bp, Homo sapien
gtctttgtcattgctgcaacggaat

SEQ ID NO: 3214207 - DNA, 25 bp, Homo sapien
ctggtgttgaacgatgtagctctac

SEQ ID NO: 3214208 - DNA, 25 bp, Homo sapien
tccagactcgctacattcaagtgct

SEQ ID NO: 3214209 - DNA, 25 bp, Homo sapien
gctttgtagctgtacgtgactggta

SEQ ID NO: 3214210 - DNA, 25 bp, Homo sapien
tacaggctgtgtaaccaaacagccc

SEQ ID NO: 3214211 - DNA, 25 bp, Homo sapien
ggaacacagtagatcagccaatgta

SEQ ID NO: 3214212 - DNA, 25 bp, Homo sapien
cttagagagggaacacagtagatca

SEQ ID NO: 3214213 - DNA, 25 bp, Homo sapien
cagccaatgtacaggctgtgtaacc

SEQ ID NO: 3214214 - DNA, 25 bp, Homo sapien
gaagggcccaacgtgctttctgtcc

SEQ ID NO: 3214215 - DNA, 25 bp, Homo sapien
tggtagaccgctctttgattgctgc

SEQ ID NO: 3214216 - DNA, 25 bp, Homo sapien
gaagcatggatttcggactctcagc

SEQ ID NO: 3214217 - DNA, 25 bp, Homo sapien
ggccccaacgcagctcttgtaataa

SEQ ID NO: 3214218 - DNA, 25 bp, Homo sapien
cccacaatggcttcacagctggtgt

SEQ ID NO: 3214219 - DNA, 25 bp, Homo sapien
acagctgggtcaggtagtcctctca

SEQ ID NO: 3214220 - DNA, 25 bp, Homo sapien
tctcgggaccagattagatctctcc

SEQ ID NO: 3214221 - DNA, 25 bp, Homo sapien
ggcaaactcctatatacttctcggg

SEQ ID NO: 3214222 - DNA, 25 bp, Homo sapien
agatctctcctcttctaagtcacct

SEQ ID NO: 3214223 - DNA, 25 bp, Homo sapien
tcaccagaaagagctcagttgctgt

SEQ ID NO: 3214224 - DNA, 25 bp, Homo sapien
cctcgaccagcataatgatattggg

SEQ ID NO: 3214225 - DNA, 25 bp, Homo sapien
gatattgggatgtttcactcggcgc

SEQ ID NO: 3214226 - DNA, 25 bp, Homo sapien
tcggcgcagtattgacacttcattc

SEQ ID NO: 3214227 - DNA, 25 bp, Homo sapien
ctctgtgcacgatgctgaggccatg

SEQ ID NO: 3214228 - DNA, 25 bp, Homo sapien
taagttgtacaccatggcactgcca

SEQ ID NO: 3214229 - DNA, 25 bp, Homo sapien
ggagatacctgagggcattggctaa

SEQ ID NO: 3214230 - DNA, 25 bp, Homo sapien
ggtcgacgaagtaattgcatcaaag

SEQ ID NO: 3214231 - DNA, 25 bp, Homo sapien
tgtatctggtgacatgctttggctc

SEQ ID NO: 3214232 - DNA, 25 bp, Homo sapien
tgatggtcattgacataagtcttgc

SEQ ID NO: 3214233 - DNA, 25 bp, Homo sapien
cttgattatggaagcagatttcccc

SEQ ID NO: 3214234 - DNA, 25 bp, Homo sapien
tgagttctcataacatacgatggtt

SEQ ID NO: 3214235 - DNA, 25 bp, Homo sapien
aagggccttctaccacagtcgcaag

SEQ ID NO: 3214236 - DNA, 25 bp, Homo sapien
ctggagccacataagtgggtgtgcc

SEQ ID NO: 3214237 - DNA, 25 bp, Homo sapien
tttcaaagacttggttccatcagga

SEQ ID NO: 3214238 - DNA, 25 bp, Homo sapien
cacagactgtgtataaagggccttc

SEQ ID NO: 3214239 - DNA, 25 bp, Homo sapien
acagagaagtatgtatgtgatcaca

SEQ ID NO: 3214240 - DNA, 25 bp, Homo sapien
cttcggaatggtgggaatccacaga

SEQ ID NO: 3214241 - DNA, 25 bp, Homo sapien
tcggaatggtgggaatccacagaga

SEQ ID NO: 3214242 - DNA, 25 bp, Homo sapien
tatgtatgtgatcacaccagctgcc

SEQ ID NO: 3214243 - DNA, 25 bp, Homo sapien
tttgcaattcaaatacgtcgcccaa

SEQ ID NO: 3214244 - DNA, 25 bp, Homo sapien
ccaaacagtcccgacttccaggagc

SEQ ID NO: 3214245 - DNA, 25 bp, Homo sapien
caattcaaatacgtcgcccaaaagg

SEQ ID NO: 3214246 - DNA, 25 bp, Homo sapien
gaccaaacagtcccgacttccagga

SEQ ID NO: 3214247 - DNA, 25 bp, Homo sapien
cattgatactccacaatctggctga

SEQ ID NO: 3214248 - DNA, 25 bp, Homo sapien
aatatagcctttggaccaaggtgcc

SEQ ID NO: 3214249 - DNA, 25 bp, Homo sapien
tctggctgagatccttcatggcatt

SEQ ID NO: 3214250 - DNA, 25 bp, Homo sapien
tggatccggtatcgcattgatactc

SEQ ID NO: 3214251 - DNA, 25 bp, Homo sapien
aaaagctgttctgattaaatccaca

SEQ ID NO: 3214252 - DNA, 25 bp, Homo sapien
agaaaagctgttctgattaaatcca

SEQ ID NO: 3214253 - DNA, 25 bp, Homo sapien
gtaagaaaagctgttctgattaaat

SEQ ID NO: 3214254 - DNA, 25 bp, Homo sapien
aaagctgttctgattaaatccacac

SEQ ID NO: 3214255 - DNA, 25 bp, Homo sapien
gacttgggcattccgtatctcaatt

SEQ ID NO: 3214256 - DNA, 25 bp, Homo sapien
ctttgacttgggcattccgtatctc

SEQ ID NO: 3214257 - DNA, 25 bp, Homo sapien
ggctttgacttgggcattccgtatc

SEQ ID NO: 3214258 - DNA, 25 bp, Homo sapien
gggcattccgtatctcaattatgta

SEQ ID NO: 3214259 - DNA, 25 bp, Homo sapien
gcttcccagccaagatctggtcgaa

SEQ ID NO: 3214260 - DNA, 25 bp, Homo sapien
tctggtcgaagagatcttcctggag

SEQ ID NO: 3214261 - DNA, 25 bp, Homo sapien
ggcagagtccgtgatgttatcccag

SEQ ID NO: 3214262 - DNA, 25 bp, Homo sapien
ttggcagagtccgtgatgttatccc

SEQ ID NO: 3214263 - DNA, 25 bp, Homo sapien
actcaggatttgtcccgcggtacac

SEQ ID NO: 3214264 - DNA, 25 bp, Homo sapien
gcggtacaccgagcttcaacattta

SEQ ID NO: 3214265 - DNA, 25 bp, Homo sapien
ttgtcccgcggtacaccgagcttca

SEQ ID NO: 3214266 - DNA, 25 bp, Homo sapien
atttgtcccgcggtacaccgagctt

SEQ ID NO: 3214267 - DNA, 25 bp, Homo sapien
cttgcatgttattctcctgggaggc

SEQ ID NO: 3214268 - DNA, 25 bp, Homo sapien
tttggggagcgcattattaaagtgc

SEQ ID NO: 3214269 - DNA, 25 bp, Homo sapien
gaccccggtggtagtgctgttctgt

SEQ ID NO: 3214270 - DNA, 25 bp, Homo sapien
tgttttagtttacctgtcacctcag

SEQ ID NO: 3214271 - DNA, 25 bp, Homo sapien
ccaaagcctgggagttgccgaatga

SEQ ID NO: 3214272 - DNA, 25 bp, Homo sapien
gaaataggactacggaaggcaccaa

SEQ ID NO: 3214273 - DNA, 25 bp, Homo sapien
gcagggagttaattcctaacacaac

SEQ ID NO: 3214274 - DNA, 25 bp, Homo sapien
aataaggccatcgttgtcactgaca

SEQ ID NO: 3214275 - DNA, 25 bp, Homo sapien
tgcagaaaaccaggttggccccaca

SEQ ID NO: 3214276 - DNA, 25 bp, Homo sapien
ctccagacggttgacactatttcca

SEQ ID NO: 3214277 - DNA, 25 bp, Homo sapien
actatcatttgtatctgcagaaaac

SEQ ID NO: 3214278 - DNA, 25 bp, Homo sapien
aggttggccccacagtctcagttat

SEQ ID NO: 3214279 - DNA, 25 bp, Homo sapien
tctgtaagttatctgatgattcaac

SEQ ID NO: 3214280 - DNA, 25 bp, Homo sapien
gggaaggtcctgtctgtaagttatc

SEQ ID NO: 3214281 - DNA, 25 bp, Homo sapien
gatgggaaggtcctgtctgtaagtt

SEQ ID NO: 3214282 - DNA, 25 bp, Homo sapien
cagcagatgggaaggtcctgtctgt

SEQ ID NO: 3214283 - DNA, 25 bp, Homo sapien
ctcccactgtctcagcggggtaaag

SEQ ID NO: 3214284 - DNA, 25 bp, Homo sapien
ctctcccactgtctcagcggggtaa

SEQ ID NO: 3214285 - DNA, 25 bp, Homo sapien
tctcccactgtctcagcggggtaaa

SEQ ID NO: 3214286 - DNA, 25 bp, Homo sapien
aggcagtgtggtaagctgagaagtt

SEQ ID NO: 3214287 - DNA, 25 bp, Homo sapien
ggtaagctgagaagtttgaaaataa

SEQ ID NO: 3214288 - DNA, 25 bp, Homo sapien
gaaaggcaggcagtgtggtaagctg

SEQ ID NO: 3214289 - DNA, 25 bp, Homo sapien
ataaagttttccaggggcctgcttg

SEQ ID NO: 3214290 - DNA, 25 bp, Homo sapien
taagctgctctttccgaaaagccac

SEQ ID NO: 3214291 - DNA, 25 bp, Homo sapien
ttcacgaaggcaccatcttaagctg

SEQ ID NO: 3214292 - DNA, 25 bp, Homo sapien
cctaagtgggaaacagcatcggtag

SEQ ID NO: 3214293 - DNA, 25 bp, Homo sapien
catcggtaggagaactatgggactc

SEQ ID NO: 3214294 - DNA, 25 bp, Homo sapien
tacgcatgctaaggacaagtccaag

SEQ ID NO: 3214295 - DNA, 25 bp, Homo sapien
ctttcttacgcatgctaaggacaag

SEQ ID NO: 3214296 - DNA, 25 bp, Homo sapien
tctcttatcccaaaggctggctgag

SEQ ID NO: 3214297 - DNA, 25 bp, Homo sapien
tgaaaccaaggcctcacccattaaa

SEQ ID NO: 3214298 - DNA, 25 bp, Homo sapien
gaggaactggagagatgggctccat

SEQ ID NO: 3214299 - DNA, 25 bp, Homo sapien
gatctcctccactgagggaggaact

SEQ ID NO: 3214300 - DNA, 25 bp, Homo sapien
aaatctgcccctccttatctagagc

SEQ ID NO: 3214301 - DNA, 25 bp, Homo sapien
gcccctccttatctagagccgtgtt

SEQ ID NO: 3214302 - DNA, 25 bp, Homo sapien
cggcgccaggttcctgcccgctcac

SEQ ID NO: 3214303 - DNA, 25 bp, Homo sapien
ggtggcggcgccaggttcctgcccg

SEQ ID NO: 3214304 - DNA, 25 bp, Homo sapien
cagtctcggtggcggcgccaggttc

SEQ ID NO: 3214305 - DNA, 25 bp, Homo sapien
tcagtctcggtggcggcgccaggtt

SEQ ID NO: 3214306 - DNA, 25 bp, Homo sapien
caggcgcaggcggtgaagagaggga

SEQ ID NO: 3214307 - DNA, 25 bp, Homo sapien
agcaggcggcttcgcccgtctgcag

SEQ ID NO: 3214308 - DNA, 25 bp, Homo sapien
cggcgaggccgagcagagggctggc

SEQ ID NO: 3214309 - DNA, 25 bp, Homo sapien
cggaggacccgcgaactcaggcgca

SEQ ID NO: 3214310 - DNA, 25 bp, Homo sapien
tgaaaatgacgggatgatctggaac

SEQ ID NO: 3214311 - DNA, 25 bp, Homo sapien
acggatgcagcctttgatgcctcca

SEQ ID NO: 3214312 - DNA, 25 bp, Homo sapien
tctggaacgagtctctccgaacagc

SEQ ID NO: 3214313 - DNA, 25 bp, Homo sapien
cagctgttggcagaacggatgcagc

SEQ ID NO: 3214314 - DNA, 25 bp, Homo sapien
tcacagagtatatccagggagcacc

SEQ ID NO: 3214315 - DNA, 25 bp, Homo sapien
tgaccaaattgtcctctcaggcgct

SEQ ID NO: 3214316 - DNA, 25 bp, Homo sapien
aaagcctgcaatccgtgtccaatga

SEQ ID NO: 3214317 - DNA, 25 bp, Homo sapien
taacaatgagaacgaactatagggc

SEQ ID NO: 3214318 - DNA, 25 bp, Homo sapien
tgaactgccttcctcgggtgatccg

SEQ ID NO: 3214319 - DNA, 25 bp, Homo sapien
gaactgccttcctcgggtgatccgc

SEQ ID NO: 3214320 - DNA, 25 bp, Homo sapien
gagcagccgagccagagggtcaggg

SEQ ID NO: 3214321 - DNA, 25 bp, Homo sapien
aagagcagccgagccagagggtcag

SEQ ID NO: 3214322 - DNA, 25 bp, Homo sapien
ctaagagcagccgagccagagggtc

SEQ ID NO: 3214323 - DNA, 25 bp, Homo sapien
taagagcagccgagccagagggtca

SEQ ID NO: 3214324 - DNA, 25 bp, Homo sapien
catgaggtcaggaactgacaacccg

SEQ ID NO: 3214325 - DNA, 25 bp, Homo sapien
tgaggtcaggaactgacaacccggg

SEQ ID NO: 3214326 - DNA, 25 bp, Homo sapien
ttacgagtagccgtgagcagggcat

SEQ ID NO: 3214327 - DNA, 25 bp, Homo sapien
cagggcatgaggtcaggaactgaca

SEQ ID NO: 3214328 - DNA, 25 bp, Homo sapien
cttctgcttagcatacacaacagga

SEQ ID NO: 3214329 - DNA, 25 bp, Homo sapien
tcacttctgcttagcatacacaaca

SEQ ID NO: 3214330 - DNA, 25 bp, Homo sapien
acttctgcttagcatacacaacagg

SEQ ID NO: 3214331 - DNA, 25 bp, Homo sapien
tacacaacaggaagattccaagtgt

SEQ ID NO: 3214332 - DNA, 25 bp, Homo sapien
tgaggcggagccactgttgttttgt

SEQ ID NO: 3214333 - DNA, 25 bp, Homo sapien
caagtaccaaagctcactactgcgg

SEQ ID NO: 3214334 - DNA, 25 bp, Homo sapien
gaggctaccgggtgctgtattcagc

SEQ ID NO: 3214335 - DNA, 25 bp, Homo sapien
tccccgggtttgcaaatagaggcta

SEQ ID NO: 3214336 - DNA, 25 bp, Homo sapien
cttatgagtgagaagatgaggtatt

SEQ ID NO: 3214337 - DNA, 25 bp, Homo sapien
ggcccccgtatgtgatgttcctctg

SEQ ID NO: 3214338 - DNA, 25 bp, Homo sapien
ccccgtatgtgatgttcctctgtgt

SEQ ID NO: 3214339 - DNA, 25 bp, Homo sapien
acttatgagtgagaagatgaggtat

SEQ ID NO: 3214340 - DNA, 25 bp, Homo sapien
taagtgtagcaaataattgtttgtc

SEQ ID NO: 3214341 - DNA, 25 bp, Homo sapien
tgtttgtcctagtctccactgcagt

SEQ ID NO: 3214342 - DNA, 25 bp, Homo sapien
tcatcagctgaattttataagtgta

SEQ ID NO: 3214343 - DNA, 25 bp, Homo sapien
agttcccagacacccctagagattg

SEQ ID NO: 3214344 - DNA, 25 bp, Homo sapien
ccagtaaaaagcttcaagtatcaaa

SEQ ID NO: 3214345 - DNA, 25 bp, Homo sapien
gtaaaaagcttcaagtatcaaattc

SEQ ID NO: 3214346 - DNA, 25 bp, Homo sapien
agtaaaaagcttcaagtatcaaatt

SEQ ID NO: 3214347 - DNA, 25 bp, Homo sapien
cagtaaaaagcttcaagtatcaaat

SEQ ID NO: 3214348 - DNA, 25 bp, Homo sapien
tgcctctgtaaaacctgatgtgccc

SEQ ID NO: 3214349 - DNA, 25 bp, Homo sapien
tccataaagatgcactgggtatcct

SEQ ID NO: 3214350 - DNA, 25 bp, Homo sapien
tgatgtgccctggtatttgcagcag

SEQ ID NO: 3214351 - DNA, 25 bp, Homo sapien
cctgggtattaactatgtgggctga

SEQ ID NO: 3214352 - DNA, 25 bp, Homo sapien
gtaaggagatgacgccaaaacacca

SEQ ID NO: 3214353 - DNA, 25 bp, Homo sapien
tatacttaatgttgcgagggcacca

SEQ ID NO: 3214354 - DNA, 25 bp, Homo sapien
tatttgtacctggattgtcacctgt

SEQ ID NO: 3214355 - DNA, 25 bp, Homo sapien
aaacgtttgctattctgccaagtgg

SEQ ID NO: 3214356 - DNA, 25 bp, Homo sapien
aggaaaatgtttaatcccgcttcat

SEQ ID NO: 3214357 - DNA, 25 bp, Homo sapien
aagtgggatatgtgattttctggcc

SEQ ID NO: 3214358 - DNA, 25 bp, Homo sapien
ctaaactaagtatcaattggaagaa

SEQ ID NO: 3214359 - DNA, 25 bp, Homo sapien
ggagtcatctaaactaagtatcaat

SEQ ID NO: 3214360 - DNA, 25 bp, Homo sapien
catttagcagctagagacacttgct

SEQ ID NO: 3214361 - DNA, 25 bp, Homo sapien
gaagtaggctatatgcaagactgcc

SEQ ID NO: 3214362 - DNA, 25 bp, Homo sapien
tgatccccgccagtttaccactgaa

SEQ ID NO: 3214363 - DNA, 25 bp, Homo sapien
taaggcctgcgtgtaatctgatccc

SEQ ID NO: 3214364 - DNA, 25 bp, Homo sapien
tatgtcgtctacctcaagtacctgg

SEQ ID NO: 3214365 - DNA, 25 bp, Homo sapien
ggtaagaaggcctaatgcttggcac

SEQ ID NO: 3214366 - DNA, 25 bp, Homo sapien
acaagactgtaaaggctatgagggc

SEQ ID NO: 3214367 - DNA, 25 bp, Homo sapien
tgtgactcttgtaaaactctgcccc

SEQ ID NO: 3214368 - DNA, 25 bp, Homo sapien
ggagtgaacctcaaccttatagcaa

SEQ ID NO: 3214369 - DNA, 25 bp, Homo sapien
cataaatcatgttttcgggccacaa

SEQ ID NO: 3214370 - DNA, 25 bp, Homo sapien
ttttagattcagtggtgcagagtcc

SEQ ID NO: 3214371 - DNA, 25 bp, Homo sapien
taagtttagcacagaatcaagggaa

SEQ ID NO: 3214372 - DNA, 25 bp, Homo sapien
tgcagaatgaactcctattattaac

SEQ ID NO: 3214373 - DNA, 25 bp, Homo sapien
tcatggacgtttagaaatttgcaga

SEQ ID NO: 3214374 - DNA, 25 bp, Homo sapien
ggacttagcaactaatatattggta

SEQ ID NO: 3214375 - DNA, 25 bp, Homo sapien
taagagtctttggacttagcaacta

SEQ ID NO: 3214376 - DNA, 25 bp, Homo sapien
gcttcctttttctactggaggacca

SEQ ID NO: 3214377 - DNA, 25 bp, Homo sapien
tggaggaccatcagctaaatagctc

SEQ ID NO: 3214378 - DNA, 25 bp, Homo sapien
gagttgagttctaactgaacaccca

SEQ ID NO: 3214379 - DNA, 25 bp, Homo sapien
tctcttttccaatcaggtggtttca

SEQ ID NO: 3214380 - DNA, 25 bp, Homo sapien
tcaaaaacagatgtaccccatttat

SEQ ID NO: 3214381 - DNA, 25 bp, Homo sapien
aaaacagatgtaccccatttatgtt

SEQ ID NO: 3214382 - DNA, 25 bp, Homo sapien
aaaaacagatgtaccccatttatgt

SEQ ID NO: 3214383 - DNA, 25 bp, Homo sapien
caaaaacagatgtaccccatttatg

SEQ ID NO: 3214384 - DNA, 25 bp, Homo sapien
tttgccctctggctcatgggatagc

SEQ ID NO: 3214385 - DNA, 25 bp, Homo sapien
ctattgccacatttgccctctggct

SEQ ID NO: 3214386 - DNA, 25 bp, Homo sapien
tgctattgccacatttgccctctgg

SEQ ID NO: 3214387 - DNA, 25 bp, Homo sapien
tgccctctggctcatgggatagcat

SEQ ID NO: 3214388 - DNA, 25 bp, Homo sapien
atgtttgaaattcttttaggagtag

SEQ ID NO: 3214389 - DNA, 25 bp, Homo sapien
agtgttttactgcatttcccttcgg

SEQ ID NO: 3214390 - DNA, 25 bp, Homo sapien
tatgagctcgtgaaatctacctctg

SEQ ID NO: 3214391 - DNA, 25 bp, Homo sapien
taaggaccactttttgtccagcagc

SEQ ID NO: 3214392 - DNA, 25 bp, Homo sapien
cattgagagcaaaagtaaggaccac

SEQ ID NO: 3214393 - DNA, 25 bp, Homo sapien
aagtctcaagggaatcggttttctg

SEQ ID NO: 3214394 - DNA, 25 bp, Homo sapien
agagccaggtctatttgggacaggt

SEQ ID NO: 3214395 - DNA, 25 bp, Homo sapien
ttacataagttaaggcaagccgctc

SEQ ID NO: 3214396 - DNA, 25 bp, Homo sapien
cactttaaaggagctctaaaaggca

SEQ ID NO: 3214397 - DNA, 25 bp, Homo sapien
tattggcagccaataggagctctga

SEQ ID NO: 3214398 - DNA, 25 bp, Homo sapien
cgctgagcgttatgaatcatgggaa

SEQ ID NO: 3214399 - DNA, 25 bp, Homo sapien
cagtaggatatcatcagaagagagg

SEQ ID NO: 3214400 - DNA, 25 bp, Homo sapien
aagagcagcattcttcgctgagcgt

SEQ ID NO: 3214401 - DNA, 25 bp, Homo sapien
tcatctccctcagtaattggaagag

SEQ ID NO: 3214402 - DNA, 25 bp, Homo sapien
tgagctgatacatcatttgctgtgg

SEQ ID NO: 3214403 - DNA, 25 bp, Homo sapien
cccaaagcgataagataaaatgagc

SEQ ID NO: 3214404 - DNA, 25 bp, Homo sapien
gtgtgtttgtaggctcccctcttgc

SEQ ID NO: 3214405 - DNA, 25 bp, Homo sapien
gatgtaggtatctcggattcgatgt

SEQ ID NO: 3214406 - DNA, 25 bp, Homo sapien
cagagatgtaggtatctcggattcg

SEQ ID NO: 3214407 - DNA, 25 bp, Homo sapien
taggtatctcggattcgatgtttaa

SEQ ID NO: 3214408 - DNA, 25 bp, Homo sapien
tatctcggattcgatgtttaaataa

SEQ ID NO: 3214409 - DNA, 25 bp, Homo sapien
gctgaagtttggctgtctcttcaat

SEQ ID NO: 3214410 - DNA, 25 bp, Homo sapien
ttgctgaagtttggctgtctcttca

SEQ ID NO: 3214411 - DNA, 25 bp, Homo sapien
tgctgaagtttggctgtctcttcaa

SEQ ID NO: 3214412 - DNA, 25 bp, Homo sapien
tttgtgtcctggagttgatgaattt

SEQ ID NO: 3214413 - DNA, 25 bp, Homo sapien
ttgatgaatttaggagagccacatt

SEQ ID NO: 3214414 - DNA, 25 bp, Homo sapien
tgtgtcctggagttgatgaatttag

SEQ ID NO: 3214415 - DNA, 25 bp, Homo sapien
ctggagttgatgaatttaggagagc

SEQ ID NO: 3214416 - DNA, 25 bp, Homo sapien
caaagatgtacgatgagataaaact

SEQ ID NO: 3214417 - DNA, 25 bp, Homo sapien
tagttatgactaatgaaccgtccag

SEQ ID NO: 3214418 - DNA, 25 bp, Homo sapien
gcagtctctgctgtacagttatagt

SEQ ID NO: 3214419 - DNA, 25 bp, Homo sapien
gcttgatcaaagatgtacgatgaga

SEQ ID NO: 3214420 - DNA, 25 bp, Homo sapien
gcctgcatgtaactgtcgattatga

SEQ ID NO: 3214421 - DNA, 25 bp, Homo sapien
gtaactgtcgattatgattgttcat

SEQ ID NO: 3214422 - DNA, 25 bp, Homo sapien
agtgcctgcatgtaactgtcgatta

SEQ ID NO: 3214423 - DNA, 25 bp, Homo sapien
tgcatgtaactgtcgattatgattg

SEQ ID NO: 3214424 - DNA, 25 bp, Homo sapien
cagtgtaagagaaagatgattgcca

SEQ ID NO: 3214425 - DNA, 25 bp, Homo sapien
gaggcacttagatttggtgtcagtg

SEQ ID NO: 3214426 - DNA, 25 bp, Homo sapien
tgtctttcttggagcaagtgcatgc

SEQ ID NO: 3214427 - DNA, 25 bp, Homo sapien
cacttggtcattgtggagaggcact

SEQ ID NO: 3214428 - DNA, 25 bp, Homo sapien
gaaacggtatccgaggaggctgtaa

SEQ ID NO: 3214429 - DNA, 25 bp, Homo sapien
gatggtgtattaaaacgaactggca

SEQ ID NO: 3214430 - DNA, 25 bp, Homo sapien
tagtatagaagtccatcagcagctc

SEQ ID NO: 3214431 - DNA, 25 bp, Homo sapien
gaggctgtaattgaagagcccctgt

SEQ ID NO: 3214432 - DNA, 25 bp, Homo sapien
gtcccaggccgagcggaccttcgcg

SEQ ID NO: 3214433 - DNA, 25 bp, Homo sapien
tcaagctcggctaagttttctcgca

SEQ ID NO: 3214434 - DNA, 25 bp, Homo sapien
tccactggcggctctgtcaagctcg

SEQ ID NO: 3214435 - DNA, 25 bp, Homo sapien
taagttttctcgcatccttgcccct

SEQ ID NO: 3214436 - DNA, 25 bp, Homo sapien
ttgcgtctggttcgcgaatggcccg

SEQ ID NO: 3214437 - DNA, 25 bp, Homo sapien
tcccgagagtgagtgtttgcaaaca

SEQ ID NO: 3214438 - DNA, 25 bp, Homo sapien
atagagggtgcggagctttcccgcc

SEQ ID NO: 3214439 - DNA, 25 bp, Homo sapien
cactctcgaggtggtcgcttcgtcg

SEQ ID NO: 3214440 - DNA, 25 bp, Homo sapien
acgcctcgccgcctaaggatctagg

SEQ ID NO: 3214441 - DNA, 25 bp, Homo sapien
tcagaattaagtgtccgcgcgactc

SEQ ID NO: 3214442 - DNA, 25 bp, Homo sapien
tggcagagacttgggctgcttgacc

SEQ ID NO: 3214443 - DNA, 25 bp, Homo sapien
tcccgcgattaggaagaagagtcag

SEQ ID NO: 3214444 - DNA, 25 bp, Homo sapien
gttgccataagtccctttctaagga

SEQ ID NO: 3214445 - DNA, 25 bp, Homo sapien
gttctttcttacatacctggtgcgg

SEQ ID NO: 3214446 - DNA, 25 bp, Homo sapien
gaccacaggcagtttgtcacccttc

SEQ ID NO: 3214447 - DNA, 25 bp, Homo sapien
tggtatcagacaattgggcctcttg

SEQ ID NO: 3214448 - DNA, 25 bp, Homo sapien
taaacgagttgtacccactgtagcc

SEQ ID NO: 3214449 - DNA, 25 bp, Homo sapien
tccagccctgggttatgcgataaaa

SEQ ID NO: 3214450 - DNA, 25 bp, Homo sapien
tgttgccaagaatcagagcagttgc

SEQ ID NO: 3214451 - DNA, 25 bp, Homo sapien
gggcagggcaaaaactagtccaagc

SEQ ID NO: 3214452 - DNA, 25 bp, Homo sapien
gattccactttctgagtcgtctctc

SEQ ID NO: 3214453 - DNA, 25 bp, Homo sapien
cccccttcctcgtgctcgctctctc

SEQ ID NO: 3214454 - DNA, 25 bp, Homo sapien
tggggtgtagttataacgattcagg

SEQ ID NO: 3214455 - DNA, 25 bp, Homo sapien
tccgacctctttctcgccccgctct

SEQ ID NO: 3214456 - DNA, 25 bp, Homo sapien
atacttttggccctcacaaaatccg

SEQ ID NO: 3214457 - DNA, 25 bp, Homo sapien
gacgaagtcgttgcttgcgttgcat

SEQ ID NO: 3214458 - DNA, 25 bp, Homo sapien
caaaatccgttttagtgtgacgaag

SEQ ID NO: 3214459 - DNA, 25 bp, Homo sapien
tcatttctgcttcgtaatttatact

SEQ ID NO: 3214460 - DNA, 25 bp, Homo sapien
gatatgtaaagatgaccgtgtgcga

SEQ ID NO: 3214461 - DNA, 25 bp, Homo sapien
cacttggaggtttgctgacgcccca

SEQ ID NO: 3214462 - DNA, 25 bp, Homo sapien
gataggacttcttcgctcagtgtag

SEQ ID NO: 3214463 - DNA, 25 bp, Homo sapien
gctttcgaaagaggcggtgcgctcc

SEQ ID NO: 3214464 - DNA, 25 bp, Homo sapien
ctcgcaatacgttgagggatccaag

SEQ ID NO: 3214465 - DNA, 25 bp, Homo sapien
ggcacaggtccgggctatacaccgg

SEQ ID NO: 3214466 - DNA, 25 bp, Homo sapien
acaggtccgggctatacaccggcgt

SEQ ID NO: 3214467 - DNA, 25 bp, Homo sapien
gcacaggtccgggctatacaccggc

SEQ ID NO: 3214468 - DNA, 25 bp, Homo sapien
cacaggtccgggctatacaccggcg

SEQ ID NO: 3214469 - DNA, 25 bp, Homo sapien
tgaacgccggagtgatttgcaccac

SEQ ID NO: 3214470 - DNA, 25 bp, Homo sapien
tcttacgcgctgagagatagcccga

SEQ ID NO: 3214471 - DNA, 25 bp, Homo sapien
tggtaaaccagcttggcctgagcgg

SEQ ID NO: 3214472 - DNA, 25 bp, Homo sapien
tccacgaagttgaagacgcccatct

SEQ ID NO: 3214473 - DNA, 25 bp, Homo sapien
gacattggcactgagaacgtttaac

SEQ ID NO: 3214474 - DNA, 25 bp, Homo sapien
tctgagagagcacgcccgtttgtgt

SEQ ID NO: 3214475 - DNA, 25 bp, Homo sapien
ggaggagcacagtctgacattggca

SEQ ID NO: 3214476 - DNA, 25 bp, Homo sapien
gtttcattttgtggtggcggagccc

SEQ ID NO: 3214477 - DNA, 25 bp, Homo sapien
gatctcacctgccttcacttaagaa

SEQ ID NO: 3214478 - DNA, 25 bp, Homo sapien
gcaaatcagttcaagtggaagcttc

SEQ ID NO: 3214479 - DNA, 25 bp, Homo sapien
gatttgggtcggaacttatacagtc

SEQ ID NO: 3214480 - DNA, 25 bp, Homo sapien
gaagcttcttgcatttgattcctcg

SEQ ID NO: 3214481 - DNA, 25 bp, Homo sapien
ctttgtatatcggattcagattgga

SEQ ID NO: 3214482 - DNA, 25 bp, Homo sapien
actgactttgttaactattcagaaa

SEQ ID NO: 3214483 - DNA, 25 bp, Homo sapien
agcttgaagaggacaaacggttgaa

SEQ ID NO: 3214484 - DNA, 25 bp, Homo sapien
tgaagaggacaaacggttgaaggaa

SEQ ID NO: 3214485 - DNA, 25 bp, Homo sapien
catggatgccttatgactgccagca

SEQ ID NO: 3214486 - DNA, 25 bp, Homo sapien
tgtccccggatgtataaactatttc

SEQ ID NO: 3214487 - DNA, 25 bp, Homo sapien
tatttccaatctggcttctctcatg

SEQ ID NO: 3214488 - DNA, 25 bp, Homo sapien
gaaatcttgcaccaagtgaacttcc

SEQ ID NO: 3214489 - DNA, 25 bp, Homo sapien
taggaggagagctaggataagccca

SEQ ID NO: 3214490 - DNA, 25 bp, Homo sapien
ataggaggagagctaggataagccc

SEQ ID NO: 3214491 - DNA, 25 bp, Homo sapien
gcccatgggatggaaagtagttcat

SEQ ID NO: 3214492 - DNA, 25 bp, Homo sapien
ggataagcccatgggatggaaagta

SEQ ID NO: 3214493 - DNA, 25 bp, Homo sapien
tgttggatgataattggtagcaggc

SEQ ID NO: 3214494 - DNA, 25 bp, Homo sapien
gtagcaggcagatagggtgaaacat

SEQ ID NO: 3214495 - DNA, 25 bp, Homo sapien
gctgagacttagttgttggatgata

SEQ ID NO: 3214496 - DNA, 25 bp, Homo sapien
ctgtaggagctgacatctaagctga

SEQ ID NO: 3214497 - DNA, 25 bp, Homo sapien
tattaacctttattcatgagaggca

SEQ ID NO: 3214498 - DNA, 25 bp, Homo sapien
taaattgacactaatgtttgccaca

SEQ ID NO: 3214499 - DNA, 25 bp, Homo sapien
gcataatgactgtaaccaactccta

SEQ ID NO: 3214500 - DNA, 25 bp, Homo sapien
tcttgcccttgtgcatataaagaag

SEQ ID NO: 3214501 - DNA, 25 bp, Homo sapien
tgctctgacaacactggactgcttg

SEQ ID NO: 3214502 - DNA, 25 bp, Homo sapien
tactggtgtctccttagtgcttggc

SEQ ID NO: 3214503 - DNA, 25 bp, Homo sapien
catgctcctgtattagaacttctgc

SEQ ID NO: 3214504 - DNA, 25 bp, Homo sapien
gcacatgttcttcatgcatgcagca

SEQ ID NO: 3214505 - DNA, 25 bp, Homo sapien
agataaatatctcgattatggaggg

SEQ ID NO: 3214506 - DNA, 25 bp, Homo sapien
gcatcacatctttaaggaactttga

SEQ ID NO: 3214507 - DNA, 25 bp, Homo sapien
gagttgttcagtgtaaagcataaag

SEQ ID NO: 3214508 - DNA, 25 bp, Homo sapien
ggaaggatacttacaatagatgaga

SEQ ID NO: 3214509 - DNA, 25 bp, Homo sapien
aggtttcttagatcttgaactttct

SEQ ID NO: 3214510 - DNA, 25 bp, Homo sapien
tcatccgtcagcctcttgctgtctg

SEQ ID NO: 3214511 - DNA, 25 bp, Homo sapien
ctgttcatccgtcagcctcttgctg

SEQ ID NO: 3214512 - DNA, 25 bp, Homo sapien
tttctgcggcctcaacctgttcatc

SEQ ID NO: 3214513 - DNA, 25 bp, Homo sapien
ccttagcgtggtgtcatcctccttc

SEQ ID NO: 3214514 - DNA, 25 bp, Homo sapien
ttagcgtggtgtcatcctccttcat

SEQ ID NO: 3214515 - DNA, 25 bp, Homo sapien
cttagcgtggtgtcatcctccttca

SEQ ID NO: 3214516 - DNA, 25 bp, Homo sapien
cccttagcgtggtgtcatcctcctt

SEQ ID NO: 3214517 - DNA, 25 bp, Homo sapien
caagtagtctaccagtgggtttcct

SEQ ID NO: 3214518 - DNA, 25 bp, Homo sapien
gatcatcggttttggcctcatacag

SEQ ID NO: 3214519 - DNA, 25 bp, Homo sapien
tctgagatcagaacagctttccatt

SEQ ID NO: 3214520 - DNA, 25 bp, Homo sapien
tcctgtgaaccggtggcatgaaatc

SEQ ID NO: 3214521 - DNA, 25 bp, Homo sapien
caggcttgccggtaaaatctttgtg

SEQ ID NO: 3214522 - DNA, 25 bp, Homo sapien
tgccctcaagctagaggcgtctctt

SEQ ID NO: 3214523 - DNA, 25 bp, Homo sapien
gtgtcacaggcttgccggtaaaatc

SEQ ID NO: 3214524 - DNA, 25 bp, Homo sapien
gattgcttgagtgtgttctaatgga

SEQ ID NO: 3214525 - DNA, 25 bp, Homo sapien
tagatgacacctggtaaagtggctg

SEQ ID NO: 3214526 - DNA, 25 bp, Homo sapien
taataggctgactaatgtaccatgg

SEQ ID NO: 3214527 - DNA, 25 bp, Homo sapien
cactcttggtattagtctgggaaag

SEQ ID NO: 3214528 - DNA, 25 bp, Homo sapien
ttttttccggtgcatggagcaggca

SEQ ID NO: 3214529 - DNA, 25 bp, Homo sapien
tacattcagtataggagcctcagca

SEQ ID NO: 3214530 - DNA, 25 bp, Homo sapien
gaaggtcaggtgctacattcagtat

SEQ ID NO: 3214531 - DNA, 25 bp, Homo sapien
tcaattatagagaaggtcaggtgct

SEQ ID NO: 3214532 - DNA, 25 bp, Homo sapien
cagtataggagcctcagcatgtggc

SEQ ID NO: 3214533 - DNA, 25 bp, Homo sapien
tgtttggtggaattcaccgatataa

SEQ ID NO: 3214534 - DNA, 25 bp, Homo sapien
ctttatggtaaagtagttgagttca

SEQ ID NO: 3214535 - DNA, 25 bp, Homo sapien
accgatataaacatgtgggcctgag

SEQ ID NO: 3214536 - DNA, 25 bp, Homo sapien
gggcctgagatttctttatggtaaa

SEQ ID NO: 3214537 - DNA, 25 bp, Homo sapien
cactttgtctaaaacttaaattcat

SEQ ID NO: 3214538 - DNA, 25 bp, Homo sapien
tcactttgtctaaaacttaaattca

SEQ ID NO: 3214539 - DNA, 25 bp, Homo sapien
tatattcactttgtctaaaacttaa

SEQ ID NO: 3214540 - DNA, 25 bp, Homo sapien
ttatattcactttgtctaaaactta

SEQ ID NO: 3214541 - DNA, 25 bp, Homo sapien
agtgtcatagtttggcttctctcct

SEQ ID NO: 3214542 - DNA, 25 bp, Homo sapien
tccactgttcagtgtcatagtttgg

SEQ ID NO: 3214543 - DNA, 25 bp, Homo sapien
actgttcagtgtcatagtttggctt

SEQ ID NO: 3214544 - DNA, 25 bp, Homo sapien
ccccttccactgttcagtgtcatag

SEQ ID NO: 3214545 - DNA, 25 bp, Homo sapien
tgtcaggtgacaagttaaggaattt

SEQ ID NO: 3214546 - DNA, 25 bp, Homo sapien
gtccagtagaattgtaatcgtagcg

SEQ ID NO: 3214547 - DNA, 25 bp, Homo sapien
ggtgcttcgttcttgccagtaaatg

SEQ ID NO: 3214548 - DNA, 25 bp, Homo sapien
attcaggaacttttttggtgcttcg

SEQ ID NO: 3214549 - DNA, 25 bp, Homo sapien
tgtgaatatacaagtttcctggcaa

SEQ ID NO: 3214550 - DNA, 25 bp, Homo sapien
tgaatatacaagtttcctggcaatc

SEQ ID NO: 3214551 - DNA, 25 bp, Homo sapien
aatatacaagtttcctggcaatcat

SEQ ID NO: 3214552 - DNA, 25 bp, Homo sapien
gtgtgaatatacaagtttcctggca

SEQ ID NO: 3214553 - DNA, 25 bp, Homo sapien
ttctattgtttggagaggctccaca

SEQ ID NO: 3214554 - DNA, 25 bp, Homo sapien
tctattgtttggagaggctccacag

SEQ ID NO: 3214555 - DNA, 25 bp, Homo sapien
taactggaggatagttggccttgat

SEQ ID NO: 3214556 - DNA, 25 bp, Homo sapien
tcctattaactggaggatagttggc

SEQ ID NO: 3214557 - DNA, 25 bp, Homo sapien
tttcacttcccagggtatgaagaat

SEQ ID NO: 3214558 - DNA, 25 bp, Homo sapien
ttcatcagcattggacttataaagc

SEQ ID NO: 3214559 - DNA, 25 bp, Homo sapien
catcagcattggacttataaagcca

SEQ ID NO: 3214560 - DNA, 25 bp, Homo sapien
agaattcatcagcattggacttata

SEQ ID NO: 3214561 - DNA, 25 bp, Homo sapien
ccacccaattgattgtaattggaaa

SEQ ID NO: 3214562 - DNA, 25 bp, Homo sapien
ctccacccaattgattgtaattgga

SEQ ID NO: 3214563 - DNA, 25 bp, Homo sapien
tccacccaattgattgtaattggaa

SEQ ID NO: 3214564 - DNA, 25 bp, Homo sapien
acccaattgattgtaattggaaatg

SEQ ID NO: 3214565 - DNA, 25 bp, Homo sapien
tataactttgacttcggttccctga

SEQ ID NO: 3214566 - DNA, 25 bp, Homo sapien
ataactttgacttcggttccctgag

SEQ ID NO: 3214567 - DNA, 25 bp, Homo sapien
tgcctggcccttgaacactttttct

SEQ ID NO: 3214568 - DNA, 25 bp, Homo sapien
tcaggggattctcatggctcagcca

SEQ ID NO: 3214569 - DNA, 25 bp, Homo sapien
cagtgcctggcccttgaacactttt

SEQ ID NO: 3214570 - DNA, 25 bp, Homo sapien
taaaggcctgtgccatcatgcctag

SEQ ID NO: 3214571 - DNA, 25 bp, Homo sapien
taggtataagagctgaggaatgaac

SEQ ID NO: 3214572 - DNA, 25 bp, Homo sapien
tgatcacttgctgcctatccacaga

SEQ ID NO: 3214573 - DNA, 25 bp, Homo sapien
ggctgtggcatctcttgaagtatcg

SEQ ID NO: 3214574 - DNA, 25 bp, Homo sapien
tatcgtacttcttgctgatcacttg

SEQ ID NO: 3214575 - DNA, 25 bp, Homo sapien
gttctattgcccagacaagccttga

SEQ ID NO: 3214576 - DNA, 25 bp, Homo sapien
tctattgcccagacaagccttgaag

SEQ ID NO: 3214577 - DNA, 25 bp, Homo sapien
tattgcccagacaagccttgaagtc

SEQ ID NO: 3214578 - DNA, 25 bp, Homo sapien
ttgttctattgcccagacaagcctt

SEQ ID NO: 3214579 - DNA, 25 bp, Homo sapien
tctaactcttatgaagggtacaata

SEQ ID NO: 3214580 - DNA, 25 bp, Homo sapien
tgtagtcttggctatgaatggacac

SEQ ID NO: 3214581 - DNA, 25 bp, Homo sapien
gagaggagatttcgactattttgta

SEQ ID NO: 3214582 - DNA, 25 bp, Homo sapien
gactaatctgtatgacttacagggt

SEQ ID NO: 3214583 - DNA, 25 bp, Homo sapien
gggcagtaagcatgttcattgttat

SEQ ID NO: 3214584 - DNA, 25 bp, Homo sapien
tatttcaagaccacaatctgggcag

SEQ ID NO: 3214585 - DNA, 25 bp, Homo sapien
gctcacttgcctgcaaagacatgtc

SEQ ID NO: 3214586 - DNA, 25 bp, Homo sapien
taatacaagctactccttcaagaag

SEQ ID NO: 3214587 - DNA, 25 bp, Homo sapien
gcttgtctacttgcttctcttctat

SEQ ID NO: 3214588 - DNA, 25 bp, Homo sapien
cagcttgtctacttgcttctcttct

SEQ ID NO: 3214589 - DNA, 25 bp, Homo sapien
cttgtctacttgcttctcttctatc

SEQ ID NO: 3214590 - DNA, 25 bp, Homo sapien
agcttgtctacttgcttctcttcta

SEQ ID NO: 3214591 - DNA, 25 bp, Homo sapien
tgggtttgtcctgtgtatatgccac

SEQ ID NO: 3214592 - DNA, 25 bp, Homo sapien
gaccacaagttttggcctgctttct

SEQ ID NO: 3214593 - DNA, 25 bp, Homo sapien
tgtcatatgctttgcacagggatga

SEQ ID NO: 3214594 - DNA, 25 bp, Homo sapien
tagcaggcaatcaacctttattagg

SEQ ID NO: 3214595 - DNA, 25 bp, Homo sapien
cacctatcgcacgagtatcattttc

SEQ ID NO: 3214596 - DNA, 25 bp, Homo sapien
tcgcacgagtatcattttctttact

SEQ ID NO: 3214597 - DNA, 25 bp, Homo sapien
tctcctttcacctatcgcacgagta

SEQ ID NO: 3214598 - DNA, 25 bp, Homo sapien
ttccttgccccttgggctgttgctt

SEQ ID NO: 3214599 - DNA, 25 bp, Homo sapien
catgtagcaagtagcctttcgtgac

SEQ ID NO: 3214600 - DNA, 25 bp, Homo sapien
caagtagcctttcgtgactagcttc

SEQ ID NO: 3214601 - DNA, 25 bp, Homo sapien
tcctctatgtcgttgcataattaag

SEQ ID NO: 3214602 - DNA, 25 bp, Homo sapien
tggaatcatgtagcaagtagccttt

SEQ ID NO: 3214603 - DNA, 25 bp, Homo sapien
gagccatataactttccagagtttt

SEQ ID NO: 3214604 - DNA, 25 bp, Homo sapien
agaggtgtccaaatagtacatggta

SEQ ID NO: 3214605 - DNA, 25 bp, Homo sapien
catggtagagccatataactttcca

SEQ ID NO: 3214606 - DNA, 25 bp, Homo sapien
gaggtgtccaaatagtacatggtag

SEQ ID NO: 3214607 - DNA, 25 bp, Homo sapien
aaagttgtgtctcttctgcaggcac

SEQ ID NO: 3214608 - DNA, 25 bp, Homo sapien
gggaagccactgatgtcgcctttta

SEQ ID NO: 3214609 - DNA, 25 bp, Homo sapien
tgtgttggcaattcggatcatcaga

SEQ ID NO: 3214610 - DNA, 25 bp, Homo sapien
gaggagacaaactccgatgagaggc

SEQ ID NO: 3214611 - DNA, 25 bp, Homo sapien
tggtgctgcacctatcgggtattag

SEQ ID NO: 3214612 - DNA, 25 bp, Homo sapien
gttggtgctgcacctatcgggtatt

SEQ ID NO: 3214613 - DNA, 25 bp, Homo sapien
ggtgctgcacctatcgggtattagc

SEQ ID NO: 3214614 - DNA, 25 bp, Homo sapien
tgctgcacctatcgggtattagcat

SEQ ID NO: 3214615 - DNA, 25 bp, Homo sapien
cttggtaaatgattccaagacttcc

SEQ ID NO: 3214616 - DNA, 25 bp, Homo sapien
tggtaaatgattccaagacttccat

SEQ ID NO: 3214617 - DNA, 25 bp, Homo sapien
ttggtaaatgattccaagacttcca

SEQ ID NO: 3214618 - DNA, 25 bp, Homo sapien
tcttggtaaatgattccaagacttc

SEQ ID NO: 3214619 - DNA, 25 bp, Homo sapien
agtacatcaataccatgaacatgag

SEQ ID NO: 3214620 - DNA, 25 bp, Homo sapien
caccagtacatcaataccatgaaca

SEQ ID NO: 3214621 - DNA, 25 bp, Homo sapien
aatggttcaccagtacatcaatacc

SEQ ID NO: 3214622 - DNA, 25 bp, Homo sapien
tggactaatggttcaccagtacatc

SEQ ID NO: 3214623 - DNA, 25 bp, Homo sapien
gagataaagggtacaattagagtaa

SEQ ID NO: 3214624 - DNA, 25 bp, Homo sapien
gttctctgcattgaaataacaaggt

SEQ ID NO: 3214625 - DNA, 25 bp, Homo sapien
tatccctggagatctctctaaatgt

SEQ ID NO: 3214626 - DNA, 25 bp, Homo sapien
tctaaatgttctagaggagataaag

SEQ ID NO: 3214627 - DNA, 25 bp, Homo sapien
catccttggaaagtgcaattgtcgt

SEQ ID NO: 3214628 - DNA, 25 bp, Homo sapien
tagctcatactacaagcacgcatca

SEQ ID NO: 3214629 - DNA, 25 bp, Homo sapien
tgctacaggtatatatcgaatgaaa

SEQ ID NO: 3214630 - DNA, 25 bp, Homo sapien
gaaatcaattagctaaagtcacact

SEQ ID NO: 3214631 - DNA, 25 bp, Homo sapien
cggaagtgggagtcgcgcgagaact

SEQ ID NO: 3214632 - DNA, 25 bp, Homo sapien
ggcggaagtgggagtcgcgcgagaa

SEQ ID NO: 3214633 - DNA, 25 bp, Homo sapien
gcggaagtgggagtcgcgcgagaac

SEQ ID NO: 3214634 - DNA, 25 bp, Homo sapien
gccgcctttcgtaaggcgcttgttc

SEQ ID NO: 3214635 - DNA, 25 bp, Homo sapien
cgcctttcgtaaggcgcttgttctt

SEQ ID NO: 3214636 - DNA, 25 bp, Homo sapien
tttgccgcctttcgtaaggcgcttg

SEQ ID NO: 3214637 - DNA, 25 bp, Homo sapien
ttgccgcctttcgtaaggcgcttgt

SEQ ID NO: 3214638 - DNA, 25 bp, Homo sapien
aagcaagacgccacgacagtcgcga

SEQ ID NO: 3214639 - DNA, 25 bp, Homo sapien
gcgatctaggaccagcccgccgatt

SEQ ID NO: 3214640 - DNA, 25 bp, Homo sapien
atccggcctacgccgcgatctagga

SEQ ID NO: 3214641 - DNA, 25 bp, Homo sapien
cccaaaaagcaagacgccacgacag

SEQ ID NO: 3214642 - DNA, 25 bp, Homo sapien
ccacggcccgcacaatccgactgga

SEQ ID NO: 3214643 - DNA, 25 bp, Homo sapien
ggcccgcacaatccgactggaatcc

SEQ ID NO: 3214644 - DNA, 25 bp, Homo sapien
cgccacggcccgcacaatccgactg

SEQ ID NO: 3214645 - DNA, 25 bp, Homo sapien
acggcccgcacaatccgactggaat

SEQ ID NO: 3214646 - DNA, 25 bp, Homo sapien
tccaggccgcgttcctgggtgcacc

SEQ ID NO: 3214647 - DNA, 25 bp, Homo sapien
cgacctgccgctactcaacaccgac

SEQ ID NO: 3214648 - DNA, 25 bp, Homo sapien
gtcctggtgacgagcgtctttccaa

SEQ ID NO: 3214649 - DNA, 25 bp, Homo sapien
ttgggtcctggtgacgagcgtcttt

SEQ ID NO: 3214650 - DNA, 25 bp, Homo sapien
ttccttgggtcctggtgacgagcgt

SEQ ID NO: 3214651 - DNA, 25 bp, Homo sapien
tcctggtgacgagcgtctttccaat

SEQ ID NO: 3214652 - DNA, 25 bp, Homo sapien
gcaaagtcaagcctgtaaactgagg

SEQ ID NO: 3214653 - DNA, 25 bp, Homo sapien
tatcaaatctatccagacaccagtg

SEQ ID NO: 3214654 - DNA, 25 bp, Homo sapien
tacttatttgaagctcagaactacc

SEQ ID NO: 3214655 - DNA, 25 bp, Homo sapien
ccagtgacttatcaacagtacttat

SEQ ID NO: 3214656 - DNA, 25 bp, Homo sapien
agttagtcaggcagtttttaccctg

SEQ ID NO: 3214657 - DNA, 25 bp, Homo sapien
acacattttgtcacgggtaagatcc

SEQ ID NO: 3214658 - DNA, 25 bp, Homo sapien
gaccatggaacacattttgtcacgg

SEQ ID NO: 3214659 - DNA, 25 bp, Homo sapien
aaacacacgacccttgagaccatca

SEQ ID NO: 3214660 - DNA, 25 bp, Homo sapien
gtatgtatcatttgggactgaaaca

SEQ ID NO: 3214661 - DNA, 25 bp, Homo sapien
tataatggtataatcagtatgtatc

SEQ ID NO: 3214662 - DNA, 25 bp, Homo sapien
catttgggactgaaacattttgtca

SEQ ID NO: 3214663 - DNA, 25 bp, Homo sapien
taaatataatggtataatcagtatg

SEQ ID NO: 3214664 - DNA, 25 bp, Homo sapien
agaacagacgaagcaagtaaccatc

SEQ ID NO: 3214665 - DNA, 25 bp, Homo sapien
ccaacacagaacagacgaagcaagt

SEQ ID NO: 3214666 - DNA, 25 bp, Homo sapien
cagacgaagcaagtaaccatcggta

SEQ ID NO: 3214667 - DNA, 25 bp, Homo sapien
aacagacgaagcaagtaaccatcgg

SEQ ID NO: 3214668 - DNA, 25 bp, Homo sapien
cttctttcaagtcatttgtctgcac

SEQ ID NO: 3214669 - DNA, 25 bp, Homo sapien
ttgaccacttctttcaagtcatttg

SEQ ID NO: 3214670 - DNA, 25 bp, Homo sapien
cacttctttcaagtcatttgtctgc

SEQ ID NO: 3214671 - DNA, 25 bp, Homo sapien
ttattgaccacttctttcaagtcat

SEQ ID NO: 3214672 - DNA, 25 bp, Homo sapien
tcatatgcgttctctcatctcagga

SEQ ID NO: 3214673 - DNA, 25 bp, Homo sapien
caggaataatccaatactcaaggtt

SEQ ID NO: 3214674 - DNA, 25 bp, Homo sapien
ggatcacaatactgcactcgagcct

SEQ ID NO: 3214675 - DNA, 25 bp, Homo sapien
taaagagatatagctagaaggattc

SEQ ID NO: 3214676 - DNA, 25 bp, Homo sapien
ataaacacgaaaaaactgttatcat

SEQ ID NO: 3214677 - DNA, 25 bp, Homo sapien
tcaactccatctactgtgagacagc

SEQ ID NO: 3214678 - DNA, 25 bp, Homo sapien
catttagagtactggcagatcacct

SEQ ID NO: 3214679 - DNA, 25 bp, Homo sapien
caccccactcaacttattcagtgta

SEQ ID NO: 3214680 - DNA, 25 bp, Homo sapien
cgtgcatcattaatcatgaaaggtt

SEQ ID NO: 3214681 - DNA, 25 bp, Homo sapien
gtgcatcattaatcatgaaaggttt

SEQ ID NO: 3214682 - DNA, 25 bp, Homo sapien
tctgggaccgaaacttttttcatca

SEQ ID NO: 3214683 - DNA, 25 bp, Homo sapien
tcatctgggaccgaaacttttttca

SEQ ID NO: 3214684 - DNA, 25 bp, Homo sapien
catcatctgggaccgaaactttttt

SEQ ID NO: 3214685 - DNA, 25 bp, Homo sapien
ggccatcatctgggaccgaaacttt

SEQ ID NO: 3214686 - DNA, 25 bp, Homo sapien
tacaccctcttagctaactgtatat

SEQ ID NO: 3214687 - DNA, 25 bp, Homo sapien
ccattacaccctcttagctaactgt

SEQ ID NO: 3214688 - DNA, 25 bp, Homo sapien
caccctcttagctaactgtatattg

SEQ ID NO: 3214689 - DNA, 25 bp, Homo sapien
ccctcttagctaactgtatattgca

SEQ ID NO: 3214690 - DNA, 25 bp, Homo sapien
gctagtggcaaagttagtagagtct

SEQ ID NO: 3214691 - DNA, 25 bp, Homo sapien
taaatcctcctgttaagataagcca

SEQ ID NO: 3214692 - DNA, 25 bp, Homo sapien
cacatgtaaaggatagatgatctga

SEQ ID NO: 3214693 - DNA, 25 bp, Homo sapien
agtcctagttctcagatataagcca

SEQ ID NO: 3214694 - DNA, 25 bp, Homo sapien
tctaacgaagacatcatggagagga

SEQ ID NO: 3214695 - DNA, 25 bp, Homo sapien
tttctaacgaagacatcatggagag

SEQ ID NO: 3214696 - DNA, 25 bp, Homo sapien
acttttctaacgaagacatcatgga

SEQ ID NO: 3214697 - DNA, 25 bp, Homo sapien
agccttttctatgtcttttccaatg

SEQ ID NO: 3214698 - DNA, 25 bp, Homo sapien
aggaatcatgtgatttctcacttac

SEQ ID NO: 3214699 - DNA, 25 bp, Homo sapien
tcaccatgaagctccatgagctttc

SEQ ID NO: 3214700 - DNA, 25 bp, Homo sapien
gaactactgccttcaccatgaagct

SEQ ID NO: 3214701 - DNA, 25 bp, Homo sapien
gcacctgtctcgtccccagtggctt

SEQ ID NO: 3214702 - DNA, 25 bp, Homo sapien
tcgttcaactttagcacctgtctcg

SEQ ID NO: 3214703 - DNA, 25 bp, Homo sapien
gacaaggtaggcaggaacaatccaa

SEQ ID NO: 3214704 - DNA, 25 bp, Homo sapien
ccttggagccttgggaatatagcaa

SEQ ID NO: 3214705 - DNA, 25 bp, Homo sapien
gggcaccaccagattctacggagga

SEQ ID NO: 3214706 - DNA, 25 bp, Homo sapien
cacagaggattttggcctaagcaac

SEQ ID NO: 3214707 - DNA, 25 bp, Homo sapien
cctggcctgtggtaccttatttatc

SEQ ID NO: 3214708 - DNA, 25 bp, Homo sapien
tggcctgtggtaccttatttatctt

SEQ ID NO: 3214709 - DNA, 25 bp, Homo sapien
ctggcctgtggtaccttatttatct

SEQ ID NO: 3214710 - DNA, 25 bp, Homo sapien
acctggcctgtggtaccttatttat

SEQ ID NO: 3214711 - DNA, 25 bp, Homo sapien
cagcaggaaggatatggaatggaac

SEQ ID NO: 3214712 - DNA, 25 bp, Homo sapien
tacaacctggagttctgcaaagaag

SEQ ID NO: 3214713 - DNA, 25 bp, Homo sapien
agttaagcaacaagtggccacactt

SEQ ID NO: 3214714 - DNA, 25 bp, Homo sapien
ttgcagcaaactgtacaacagcagg

SEQ ID NO: 3214715 - DNA, 25 bp, Homo sapien
tctacatgctgtaactatcaggaca

SEQ ID NO: 3214716 - DNA, 25 bp, Homo sapien
gcatatcagccttattaccagagca

SEQ ID NO: 3214717 - DNA, 25 bp, Homo sapien
tatcaggacatggttagcaatctca

SEQ ID NO: 3214718 - DNA, 25 bp, Homo sapien
gactagttggagcatttgtaagcac

SEQ ID NO: 3214719 - DNA, 25 bp, Homo sapien
aatgaagagatctcaggccctgatt

SEQ ID NO: 3214720 - DNA, 25 bp, Homo sapien
gatgaactttccttcaaggtcagaa

SEQ ID NO: 3214721 - DNA, 25 bp, Homo sapien
cagctgaggcaaaaagtatgttggc

SEQ ID NO: 3214722 - DNA, 25 bp, Homo sapien
gtatgttggccatagtaccgaaggg

SEQ ID NO: 3214723 - DNA, 25 bp, Homo sapien
gagattttcatcctcccttagcaag

SEQ ID NO: 3214724 - DNA, 25 bp, Homo sapien
caatctcggcatttggctagatgga

SEQ ID NO: 3214725 - DNA, 25 bp, Homo sapien
tatttatttcacaggcttgccagtg

SEQ ID NO: 3214726 - DNA, 25 bp, Homo sapien
ccaggcatgggaggtagcattgctt

SEQ ID NO: 3214727 - DNA, 25 bp, Homo sapien
ttcacagtgcgctgcaatcagcctg

SEQ ID NO: 3214728 - DNA, 25 bp, Homo sapien
aagatctcagcaaaggtgctgcagg

SEQ ID NO: 3214729 - DNA, 25 bp, Homo sapien
taagctacattagccattagagtct

SEQ ID NO: 3214730 - DNA, 25 bp, Homo sapien
ggtatagatgtgtcaggacgtctct

SEQ ID NO: 3214731 - DNA, 25 bp, Homo sapien
aagccatgtcagacctaaaatatct

SEQ ID NO: 3214732 - DNA, 25 bp, Homo sapien
gaaaaaaaagccatgtcagacctaa

SEQ ID NO: 3214733 - DNA, 25 bp, Homo sapien
aaagccatgtcagacctaaaatatc

SEQ ID NO: 3214734 - DNA, 25 bp, Homo sapien
aaaaagccatgtcagacctaaaata

SEQ ID NO: 3214735 - DNA, 25 bp, Homo sapien
acatgcacatgtataacacattata

SEQ ID NO: 3214736 - DNA, 25 bp, Homo sapien
cactcagtcatccaagtcagagtat

SEQ ID NO: 3214737 - DNA, 25 bp, Homo sapien
actcagtcatccaagtcagagtata

SEQ ID NO: 3214738 - DNA, 25 bp, Homo sapien
atgcacatgtataacacattatata

SEQ ID NO: 3214739 - DNA, 25 bp, Homo sapien
tatggaccacttgttggcaaccctg

SEQ ID NO: 3214740 - DNA, 25 bp, Homo sapien
taccccagtggtatggtctgaattg

SEQ ID NO: 3214741 - DNA, 25 bp, Homo sapien
cagcattgccagtgatatccataca

SEQ ID NO: 3214742 - DNA, 25 bp, Homo sapien
cacctgctaggctgggttgatgagc

SEQ ID NO: 3214743 - DNA, 25 bp, Homo sapien
cccgcaggcaagatacatagaacag

SEQ ID NO: 3214744 - DNA, 25 bp, Homo sapien
tcatcacaggagctatggagtgcat

SEQ ID NO: 3214745 - DNA, 25 bp, Homo sapien
tatagagagtatctccccgcaggca

SEQ ID NO: 3214746 - DNA, 25 bp, Homo sapien
gatggtgagatcgactgagaactga

SEQ ID NO: 3214747 - DNA, 25 bp, Homo sapien
ccagtaatgaagaccatgcggatat

SEQ ID NO: 3214748 - DNA, 25 bp, Homo sapien
ccaggttaatgtaatggagcccaga

SEQ ID NO: 3214749 - DNA, 25 bp, Homo sapien
tgagaatctgacatagcctgagagt

SEQ ID NO: 3214750 - DNA, 25 bp, Homo sapien
tagagacaggtaatgggcggaaaac

SEQ ID NO: 3214751 - DNA, 25 bp, Homo sapien
tagaccagacacttttgataagatg

SEQ ID NO: 3214752 - DNA, 25 bp, Homo sapien
aacctggctagttttccattagaag

SEQ ID NO: 3214753 - DNA, 25 bp, Homo sapien
tgtgcatacagtgagatgtaactgg

SEQ ID NO: 3214754 - DNA, 25 bp, Homo sapien
tgccatgttgaagtctaccgtacca

SEQ ID NO: 3214755 - DNA, 25 bp, Homo sapien
ccagcatactggagtattcagtata

SEQ ID NO: 3214756 - DNA, 25 bp, Homo sapien
tagcagatttttctaggtagtgata

SEQ ID NO: 3214757 - DNA, 25 bp, Homo sapien
tgagaaccagcatactggagtattc

SEQ ID NO: 3214758 - DNA, 25 bp, Homo sapien
gtagtgataagctaatatcttttcc

SEQ ID NO: 3214759 - DNA, 25 bp, Homo sapien
ttgtatttcattgaaattggcattc

SEQ ID NO: 3214760 - DNA, 25 bp, Homo sapien
gtatttcattgaaattggcattcat

SEQ ID NO: 3214761 - DNA, 25 bp, Homo sapien
cctctcctttagttgtatttcattg

SEQ ID NO: 3214762 - DNA, 25 bp, Homo sapien
ttagttgtatttcattgaaattggc

SEQ ID NO: 3214763 - DNA, 25 bp, Homo sapien
gcactggactagctaggagtttgag

SEQ ID NO: 3214764 - DNA, 25 bp, Homo sapien
caagaagggccatgacgcaagaaac

SEQ ID NO: 3214765 - DNA, 25 bp, Homo sapien
tagtactggactgtagtgccacacc

SEQ ID NO: 3214766 - DNA, 25 bp, Homo sapien
gaaacagttggcatatcttacagac

SEQ ID NO: 3214767 - DNA, 25 bp, Homo sapien
ttgttccgtgtcagctgactcttcc

SEQ ID NO: 3214768 - DNA, 25 bp, Homo sapien
gggtcctgtcatgggaattccacct

SEQ ID NO: 3214769 - DNA, 25 bp, Homo sapien
tccccactgccaaggattgttccgt

SEQ ID NO: 3214770 - DNA, 25 bp, Homo sapien
tcagtggcaccgatgctgcgattgc

SEQ ID NO: 3214771 - DNA, 25 bp, Homo sapien
cagggtatctgctgacattggcggt

SEQ ID NO: 3214772 - DNA, 25 bp, Homo sapien
gaaaggacatcgttttctgtccagg

SEQ ID NO: 3214773 - DNA, 25 bp, Homo sapien
aagctcgcccacgactattattgga

SEQ ID NO: 3214774 - DNA, 25 bp, Homo sapien
tacaacagcaaggagtgatgcccta

SEQ ID NO: 3214775 - DNA, 25 bp, Homo sapien
cagaacatcgttcttcaaggtatga

SEQ ID NO: 3214776 - DNA, 25 bp, Homo sapien
ctttctctacagatcgcaacgaacg

SEQ ID NO: 3214777 - DNA, 25 bp, Homo sapien
cctctttagagttactgtctattgg

SEQ ID NO: 3214778 - DNA, 25 bp, Homo sapien
agaaccttttgacacgtaaccatct

SEQ ID NO: 3214779 - DNA, 25 bp, Homo sapien
tcagtaggatctgcgtagccgtacc

SEQ ID NO: 3214780 - DNA, 25 bp, Homo sapien
tgcgtagccgtacccaaaaactgtc

SEQ ID NO: 3214781 - DNA, 25 bp, Homo sapien
tctgtgccagaacaggggcccattt

SEQ ID NO: 3214782 - DNA, 25 bp, Homo sapien
ggcccatttctacgtaagtggcgta

SEQ ID NO: 3214783 - DNA, 25 bp, Homo sapien
tggaagcatgggcagcagcagccat

SEQ ID NO: 3214784 - DNA, 25 bp, Homo sapien
ccatggaagcatgggcagcagcagc

SEQ ID NO: 3214785 - DNA, 25 bp, Homo sapien
atggaagcatgggcagcagcagcca

SEQ ID NO: 3214786 - DNA, 25 bp, Homo sapien
catggaagcatgggcagcagcagcc

SEQ ID NO: 3214787 - DNA, 25 bp, Homo sapien
gcttccagctgtgctttggcaaggc

SEQ ID NO: 3214788 - DNA, 25 bp, Homo sapien
ttccagctgtgctttggcaaggccc

SEQ ID NO: 3214789 - DNA, 25 bp, Homo sapien
ccagctgtgctttggcaaggcccat

SEQ ID NO: 3214790 - DNA, 25 bp, Homo sapien
ctgcttccagctgtgctttggcaag

SEQ ID NO: 3214791 - DNA, 25 bp, Homo sapien
atagaagatgtctctttcctctttc

SEQ ID NO: 3214792 - DNA, 25 bp, Homo sapien
agaagatgtctctttcctctttcaa

SEQ ID NO: 3214793 - DNA, 25 bp, Homo sapien
taatagaagatgtctctttcctctt

SEQ ID NO: 3214794 - DNA, 25 bp, Homo sapien
ctaatagaagatgtctctttcctct

SEQ ID NO: 3214795 - DNA, 25 bp, Homo sapien
tcaccccctgccagatcctgaaggg

SEQ ID NO: 3214796 - DNA, 25 bp, Homo sapien
tcctgaagggaccagacttcagaag

SEQ ID NO: 3214797 - DNA, 25 bp, Homo sapien
gaagggaccagacttcagaagtgca

SEQ ID NO: 3214798 - DNA, 25 bp, Homo sapien
ccagatcctgaagggaccagacttc

SEQ ID NO: 3214799 - DNA, 25 bp, Homo sapien
gcatagccagcagtgcccgtgtctc

SEQ ID NO: 3214800 - DNA, 25 bp, Homo sapien
cattctgggggctcacccgaaatcc

SEQ ID NO: 3214801 - DNA, 25 bp, Homo sapien
gcagcgtgaatgcatagccagcagt

SEQ ID NO: 3214802 - DNA, 25 bp, Homo sapien
cgtgaatgcatagccagcagtgccc

SEQ ID NO: 3214803 - DNA, 25 bp, Homo sapien
ctgaggcaataccagatgagactgt

SEQ ID NO: 3214804 - DNA, 25 bp, Homo sapien
gaggcaataccagatgagactgtgg

SEQ ID NO: 3214805 - DNA, 25 bp, Homo sapien
accagatgagactgtgggccgccca

SEQ ID NO: 3214806 - DNA, 25 bp, Homo sapien
agatgagactgtgggccgcccacag

SEQ ID NO: 3214807 - DNA, 25 bp, Homo sapien
gggaagcagatcgccactgtcagca

SEQ ID NO: 3214808 - DNA, 25 bp, Homo sapien
atgagggtatctgagcagacgtgaa

SEQ ID NO: 3214809 - DNA, 25 bp, Homo sapien
gggtatctgagcagacgtgaatcaa

SEQ ID NO: 3214810 - DNA, 25 bp, Homo sapien
gagcagacgtgaatcaagccctggc

SEQ ID NO: 3214811 - DNA, 25 bp, Homo sapien
gatggcactagatgtgtttgcttgg

SEQ ID NO: 3214812 - DNA, 25 bp, Homo sapien
aatattccagtatagccccatccag

SEQ ID NO: 3214813 - DNA, 25 bp, Homo sapien
gggagggcagttctaccacagcgat

SEQ ID NO: 3214814 - DNA, 25 bp, Homo sapien
attggaatattccagtatagcccca

SEQ ID NO: 3214815 - DNA, 25 bp, Homo sapien
tcagctccttcagtgtataagaacg

SEQ ID NO: 3214816 - DNA, 25 bp, Homo sapien
ctccgtgcagcaagatttcattttg

SEQ ID NO: 3214817 - DNA, 25 bp, Homo sapien
tgatgatgagctcaactccgtgcag

SEQ ID NO: 3214818 - DNA, 25 bp, Homo sapien
tagtggtcaccgcatgtctggagat

SEQ ID NO: 3214819 - DNA, 25 bp, Homo sapien
cagggtctctgaagatatgagaagt

SEQ ID NO: 3214820 - DNA, 25 bp, Homo sapien
ggaaggcaaggcctgtgaaaggtgc

SEQ ID NO: 3214821 - DNA, 25 bp, Homo sapien
tctgaagatatgagaagtggaggaa

SEQ ID NO: 3214822 - DNA, 25 bp, Homo sapien
tcacccagggtctctgaagatatga

SEQ ID NO: 3214823 - DNA, 25 bp, Homo sapien
gaaaagttgataagagagctgaggc

SEQ ID NO: 3214824 - DNA, 25 bp, Homo sapien
tgcctggctggacttttattaatac

SEQ ID NO: 3214825 - DNA, 25 bp, Homo sapien
ctcttagcatcactaaaagtgggac

SEQ ID NO: 3214826 - DNA, 25 bp, Homo sapien
ttaatacatcactggacaaatcgga

SEQ ID NO: 3214827 - DNA, 25 bp, Homo sapien
agaaggagcagcgtgaaggcacagc

SEQ ID NO: 3214828 - DNA, 25 bp, Homo sapien
gcagaaggagcagcgtgaaggcaca

SEQ ID NO: 3214829 - DNA, 25 bp, Homo sapien
cagcagaaggagcagcgtgaaggca

SEQ ID NO: 3214830 - DNA, 25 bp, Homo sapien
gaaggagcagcgtgaaggcacagcc

SEQ ID NO: 3214831 - DNA, 25 bp, Homo sapien
ctgattgtagctctttctttttggg

SEQ ID NO: 3214832 - DNA, 25 bp, Homo sapien
ttttgggaaaagagtgtaagcaaga

SEQ ID NO: 3214833 - DNA, 25 bp, Homo sapien
gattgtagctctttctttttgggaa

SEQ ID NO: 3214834 - DNA, 25 bp, Homo sapien
ttgggaaaagagtgtaagcaagaac

SEQ ID NO: 3214835 - DNA, 25 bp, Homo sapien
gaaagagaagaaagggaaatgtgga

SEQ ID NO: 3214836 - DNA, 25 bp, Homo sapien
tagagaaagagaagaaagggaaatg

SEQ ID NO: 3214837 - DNA, 25 bp, Homo sapien
ctagagaaagagaagaaagggaaat

SEQ ID NO: 3214838 - DNA, 25 bp, Homo sapien
gagaaagagaagaaagggaaatgtg

SEQ ID NO: 3214839 - DNA, 25 bp, Homo sapien
acgcggctggagtatacaggttgcc

SEQ ID NO: 3214840 - DNA, 25 bp, Homo sapien
ctggccacctacaacgcggctggag

SEQ ID NO: 3214841 - DNA, 25 bp, Homo sapien
ggctggagtatacaggttgcccaca

SEQ ID NO: 3214842 - DNA, 25 bp, Homo sapien
cctacaacgcggctggagtatacag

SEQ ID NO: 3214843 - DNA, 25 bp, Homo sapien
gacgagggaacctccacagataaag

SEQ ID NO: 3214844 - DNA, 25 bp, Homo sapien
tgtatgcagtgtgctgctgtcagta

SEQ ID NO: 3214845 - DNA, 25 bp, Homo sapien
tatcaacctctcactgacgagggaa

SEQ ID NO: 3214846 - DNA, 25 bp, Homo sapien
agttgtggtcaaagtgtaggctgac

SEQ ID NO: 3214847 - DNA, 25 bp, Homo sapien
gatcctagccacacagtatatgaaa

SEQ ID NO: 3214848 - DNA, 25 bp, Homo sapien
cttgagtcacctactgtaatcgatc

SEQ ID NO: 3214849 - DNA, 25 bp, Homo sapien
tgtaatcgatcctagccacacagta

SEQ ID NO: 3214850 - DNA, 25 bp, Homo sapien
cacctactgtaatcgatcctagcca

SEQ ID NO: 3214851 - DNA, 25 bp, Homo sapien
cgattttggacacgtagtacttcac

SEQ ID NO: 3214852 - DNA, 25 bp, Homo sapien
gacgtctgccgttgtatcttggtac

SEQ ID NO: 3214853 - DNA, 25 bp, Homo sapien
caacaaaagggtggaattgccaact

SEQ ID NO: 3214854 - DNA, 25 bp, Homo sapien
cagtttcaacaaggcgacgtctgcc

SEQ ID NO: 3214855 - DNA, 25 bp, Homo sapien
cctggcggtcaataatgggtacttc

SEQ ID NO: 3214856 - DNA, 25 bp, Homo sapien
tgcttcctgaagggcagaatggtaa

SEQ ID NO: 3214857 - DNA, 25 bp, Homo sapien
cagcacaaatcttgtcttccttgat

SEQ ID NO: 3214858 - DNA, 25 bp, Homo sapien
agtgctggcaagaagataccgatgg

SEQ ID NO: 3214859 - DNA, 25 bp, Homo sapien
actatccttcatgttttgagtatca

SEQ ID NO: 3214860 - DNA, 25 bp, Homo sapien
gcaactatccttcatgttttgagta

SEQ ID NO: 3214861 - DNA, 25 bp, Homo sapien
cttgcaactatccttcatgttttga

SEQ ID NO: 3214862 - DNA, 25 bp, Homo sapien
ctatccttcatgttttgagtatcac

SEQ ID NO: 3214863 - DNA, 25 bp, Homo sapien
tcaaaagaacttgtgtagaattggt

SEQ ID NO: 3214864 - DNA, 25 bp, Homo sapien
atagagacaaggatttaccatgtag

SEQ ID NO: 3214865 - DNA, 25 bp, Homo sapien
caaaagaacttgtgtagaattggta

SEQ ID NO: 3214866 - DNA, 25 bp, Homo sapien
aatagagacaaggatttaccatgta

SEQ ID NO: 3214867 - DNA, 25 bp, Homo sapien
tgtgacacgacagaggccctccaga

SEQ ID NO: 3214868 - DNA, 25 bp, Homo sapien
tactcctgtctggatccatacacca

SEQ ID NO: 3214869 - DNA, 25 bp, Homo sapien
tacaccatcaatgtgacacgacaga

SEQ ID NO: 3214870 - DNA, 25 bp, Homo sapien
ggatccatacaccatcaatgtgaca

SEQ ID NO: 3214871 - DNA, 25 bp, Homo sapien
ttggtagtagattacattggtgtag

SEQ ID NO: 3214872 - DNA, 25 bp, Homo sapien
tttttggtagtagattacattggtg

SEQ ID NO: 3214873 - DNA, 25 bp, Homo sapien
tagtagattacattggtgtagactc

SEQ ID NO: 3214874 - DNA, 25 bp, Homo sapien
gtagattacattggtgtagactcca

SEQ ID NO: 3214875 - DNA, 25 bp, Homo sapien
gtaggacaatagggaacaagaagtc

SEQ ID NO: 3214876 - DNA, 25 bp, Homo sapien
tgtatagtgttaggtccaaaggcac

SEQ ID NO: 3214877 - DNA, 25 bp, Homo sapien
gagccagagagagtaggacaatagg

SEQ ID NO: 3214878 - DNA, 25 bp, Homo sapien
gaagtctagattgttggctcttgaa

SEQ ID NO: 3214879 - DNA, 25 bp, Homo sapien
ttatctgcccctgggactaaatctc

SEQ ID NO: 3214880 - DNA, 25 bp, Homo sapien
tcccagccctgtatgcaagcaacag

SEQ ID NO: 3214881 - DNA, 25 bp, Homo sapien
cccctgggactaaatctccatgcat

SEQ ID NO: 3214882 - DNA, 25 bp, Homo sapien
ttcccagccctgtatgcaagcaaca

SEQ ID NO: 3214883 - DNA, 25 bp, Homo sapien
tacaggctcatgccatcatgcctgg

SEQ ID NO: 3214884 - DNA, 25 bp, Homo sapien
gactacaggctcatgccatcatgcc

SEQ ID NO: 3214885 - DNA, 25 bp, Homo sapien
ctacaggctcatgccatcatgcctg

SEQ ID NO: 3214886 - DNA, 25 bp, Homo sapien
gggactacaggctcatgccatcatg

SEQ ID NO: 3214887 - DNA, 25 bp, Homo sapien
gtggccgcctgccaactccgagtgg

SEQ ID NO: 3214888 - DNA, 25 bp, Homo sapien
gcagaaatgctgtattgagccccat

SEQ ID NO: 3214889 - DNA, 25 bp, Homo sapien
cttaagtgtacactgggtggccgcc

SEQ ID NO: 3214890 - DNA, 25 bp, Homo sapien
cctccagtaatgtgttaccaggtgc

SEQ ID NO: 3214891 - DNA, 25 bp, Homo sapien
tttttgggctcacgagggctgcgcc

SEQ ID NO: 3214892 - DNA, 25 bp, Homo sapien
tgacgggtctagcaccaggaactct

SEQ ID NO: 3214893 - DNA, 25 bp, Homo sapien
gatatttggccaaagaaggctcatg

SEQ ID NO: 3214894 - DNA, 25 bp, Homo sapien
ttggcgcccagacgcgagtggcttt

SEQ ID NO: 3214895 - DNA, 25 bp, Homo sapien
aactcctgaacgtgatgccctttgt

SEQ ID NO: 3214896 - DNA, 25 bp, Homo sapien
aaggccttcccaactatcctcagag

SEQ ID NO: 3214897 - DNA, 25 bp, Homo sapien
ggtgtcaatacaactgacccaggct

SEQ ID NO: 3214898 - DNA, 25 bp, Homo sapien
tcctgagcgctttagatgtttgccg

SEQ ID NO: 3214899 - DNA, 25 bp, Homo sapien
cttggaggtgtatggcaaacccata

SEQ ID NO: 3214900 - DNA, 25 bp, Homo sapien
ttatactggatgatagttaactgct

SEQ ID NO: 3214901 - DNA, 25 bp, Homo sapien
tgagagctggccaagaacaaagggc

SEQ ID NO: 3214902 - DNA, 25 bp, Homo sapien
aaaatgtttgtacaagatgtggaga

SEQ ID NO: 3214903 - DNA, 25 bp, Homo sapien
gtttccagaagatacgttaatcaag

SEQ ID NO: 3214904 - DNA, 25 bp, Homo sapien
gttttaacttgtggatttgacctca

SEQ ID NO: 3214905 - DNA, 25 bp, Homo sapien
taatcgcttatgcagtaataaagtt

SEQ ID NO: 3214906 - DNA, 25 bp, Homo sapien
cagaatcgattgtggttcttatctg

SEQ ID NO: 3214907 - DNA, 25 bp, Homo sapien
ggatttgacctcaattccacagaat

SEQ ID NO: 3214908 - DNA, 25 bp, Homo sapien
tggctactgtctgatacctgcgtac

SEQ ID NO: 3214909 - DNA, 25 bp, Homo sapien
tattatttcccagtacagcgctttt

SEQ ID NO: 3214910 - DNA, 25 bp, Homo sapien
tgcattggccccaagaacctttttg

SEQ ID NO: 3214911 - DNA, 25 bp, Homo sapien
gtgtggtgtccagttcaggcatctc

SEQ ID NO: 3214912 - DNA, 25 bp, Homo sapien
catttcaattatgtcctcttttgga

SEQ ID NO: 3214913 - DNA, 25 bp, Homo sapien
ttttggaactatggagatggcatcc

SEQ ID NO: 3214914 - DNA, 25 bp, Homo sapien
ctgatgagtagtggattgaaatgga

SEQ ID NO: 3214915 - DNA, 25 bp, Homo sapien
gcatcctcagggttgagctgatgag

SEQ ID NO: 3214916 - DNA, 25 bp, Homo sapien
catgctgctaggtgtatacggttta

SEQ ID NO: 3214917 - DNA, 25 bp, Homo sapien
gccatgctgctaggtgtatacggtt

SEQ ID NO: 3214918 - DNA, 25 bp, Homo sapien
tgggccatgctgctaggtgtatacg

SEQ ID NO: 3214919 - DNA, 25 bp, Homo sapien
ctgggccatgctgctaggtgtatac

SEQ ID NO: 3214920 - DNA, 25 bp, Homo sapien
tagctgtagtgagggcatcctctcc

SEQ ID NO: 3214921 - DNA, 25 bp, Homo sapien
tccaactcaaatgcttctctgtcag

SEQ ID NO: 3214922 - DNA, 25 bp, Homo sapien
ttattgatccttgaacctccacggc

SEQ ID NO: 3214923 - DNA, 25 bp, Homo sapien
acggccccttagttgtgcctctctg

SEQ ID NO: 3214924 - DNA, 25 bp, Homo sapien
gtcacgatgcaggaaggacgtgaat

SEQ ID NO: 3214925 - DNA, 25 bp, Homo sapien
gaaggacgtgaatctggggctgcca

SEQ ID NO: 3214926 - DNA, 25 bp, Homo sapien
ttaggtcacgatgcaggaaggacgt

SEQ ID NO: 3214927 - DNA, 25 bp, Homo sapien
gatgcaggaaggacgtgaatctggg

SEQ ID NO: 3214928 - DNA, 25 bp, Homo sapien
tcccaagacctctacattagcccag

SEQ ID NO: 3214929 - DNA, 25 bp, Homo sapien
tctcccaagacctctacattagccc

SEQ ID NO: 3214930 - DNA, 25 bp, Homo sapien
cccaagacctctacattagcccagg

SEQ ID NO: 3214931 - DNA, 25 bp, Homo sapien
tgctctcccaagacctctacattag

SEQ ID NO: 3214932 - DNA, 25 bp, Homo sapien
ttcttatcttgtcgacagtaagtcc

SEQ ID NO: 3214933 - DNA, 25 bp, Homo sapien
tgagcacatgactcctcctcacttt

SEQ ID NO: 3214934 - DNA, 25 bp, Homo sapien
tggagggtccttgagcacatgactc

SEQ ID NO: 3214935 - DNA, 25 bp, Homo sapien
tgtcgacagtaagtcccaaaccgga

SEQ ID NO: 3214936 - DNA, 25 bp, Homo sapien
ctgtctgctgagctgcactgctacc

SEQ ID NO: 3214937 - DNA, 25 bp, Homo sapien
tttccgcttcccactgtctgctgag

SEQ ID NO: 3214938 - DNA, 25 bp, Homo sapien
actgtctgctgagctgcactgctac

SEQ ID NO: 3214939 - DNA, 25 bp, Homo sapien
tcaactattctgctttccgcttccc

SEQ ID NO: 3214940 - DNA, 25 bp, Homo sapien
tcagaggcacatcagcatgaacaca

SEQ ID NO: 3214941 - DNA, 25 bp, Homo sapien
cagaggcacatcagcatgaacacaa

SEQ ID NO: 3214942 - DNA, 25 bp, Homo sapien
ggcacatcagcatgaacacaagaga

SEQ ID NO: 3214943 - DNA, 25 bp, Homo sapien
gaggcacatcagcatgaacacaaga

SEQ ID NO: 3214944 - DNA, 25 bp, Homo sapien
agaaatagtgcccttattcctagtg

SEQ ID NO: 3214945 - DNA, 25 bp, Homo sapien
attcaagaatgtgagggcactgaga

SEQ ID NO: 3214946 - DNA, 25 bp, Homo sapien
ttcaagaatgtgagggcactgagaa

SEQ ID NO: 3214947 - DNA, 25 bp, Homo sapien
tagtgcccttattcctagtgacatt

SEQ ID NO: 3214948 - DNA, 25 bp, Homo sapien
ctggaactacaggtggatgccatca

SEQ ID NO: 3214949 - DNA, 25 bp, Homo sapien
tggaactacaggtggatgccatcac

SEQ ID NO: 3214950 - DNA, 25 bp, Homo sapien
tgaaacctgcgttgagcctcagtcc

SEQ ID NO: 3214951 - DNA, 25 bp, Homo sapien
agttctgcacaacaggtccccttgg

SEQ ID NO: 3214952 - DNA, 25 bp, Homo sapien
gaacaccgggtacttgccacaagta

SEQ ID NO: 3214953 - DNA, 25 bp, Homo sapien
ggccacaccagtttgcaaaagcgga

SEQ ID NO: 3214954 - DNA, 25 bp, Homo sapien
gggctcgctggacaagtgtcctcag

SEQ ID NO: 3214955 - DNA, 25 bp, Homo sapien
acaagtgtcctcagatagtccagaa

SEQ ID NO: 3214956 - DNA, 25 bp, Homo sapien
cagtggggctcgctggacaagtgtc

SEQ ID NO: 3214957 - DNA, 25 bp, Homo sapien
cgagcagtggggctcgctggacaag

SEQ ID NO: 3214958 - DNA, 25 bp, Homo sapien
gaaacctttctagcacaggagtgag

SEQ ID NO: 3214959 - DNA, 25 bp, Homo sapien
gaagtgctctctgtatgccaagttg

SEQ ID NO: 3214960 - DNA, 25 bp, Homo sapien
gccaagttgcagctcattaggacat

SEQ ID NO: 3214961 - DNA, 25 bp, Homo sapien
aatattaccaccagcctatgccagg

SEQ ID NO: 3214962 - DNA, 25 bp, Homo sapien
agtaactgtagccacaaggtagaat

SEQ ID NO: 3214963 - DNA, 25 bp, Homo sapien
tagatgttcagcttagagggactct

SEQ ID NO: 3214964 - DNA, 25 bp, Homo sapien
gaagagaagtgttgtagatgttcag

SEQ ID NO: 3214965 - DNA, 25 bp, Homo sapien
gtaactgtagccacaaggtagaatg

SEQ ID NO: 3214966 - DNA, 25 bp, Homo sapien
catagtcaaacattgagttctcatg

SEQ ID NO: 3214967 - DNA, 25 bp, Homo sapien
caacttctttgacgctaaccttcca

SEQ ID NO: 3214968 - DNA, 25 bp, Homo sapien
tgtccttcaacacccaagtgtatca

SEQ ID NO: 3214969 - DNA, 25 bp, Homo sapien
agttataacgaaacattcatagtca

SEQ ID NO: 3214970 - DNA, 25 bp, Homo sapien
cagaggagcggaaagatttttctaa

SEQ ID NO: 3214971 - DNA, 25 bp, Homo sapien
ctactgctgggttgtatttgctcac

SEQ ID NO: 3214972 - DNA, 25 bp, Homo sapien
ttcagaggagcggaaagatttttct

SEQ ID NO: 3214973 - DNA, 25 bp, Homo sapien
ggctgctgtcttcaataacctactg

SEQ ID NO: 3214974 - DNA, 25 bp, Homo sapien
gatcacattctgtcatattaccaga

SEQ ID NO: 3214975 - DNA, 25 bp, Homo sapien
tgctgggtagcttgtgatcttttgg

SEQ ID NO: 3214976 - DNA, 25 bp, Homo sapien
gggatcacattctgtcatattacca

SEQ ID NO: 3214977 - DNA, 25 bp, Homo sapien
tggattcattgctgggtagcttgtg

SEQ ID NO: 3214978 - DNA, 25 bp, Homo sapien
attgcaacctatgccgcccagattc

SEQ ID NO: 3214979 - DNA, 25 bp, Homo sapien
tcaccatattgatcaggctgttatc

SEQ ID NO: 3214980 - DNA, 25 bp, Homo sapien
cattgcaacctatgccgcccagatt

SEQ ID NO: 3214981 - DNA, 25 bp, Homo sapien
atattgatcaggctgttatcgaact

SEQ ID NO: 3214982 - DNA, 25 bp, Homo sapien
cacattgctaaatatcctctggagg

SEQ ID NO: 3214983 - DNA, 25 bp, Homo sapien
gattctcaccaaaccgatttagcag

SEQ ID NO: 3214984 - DNA, 25 bp, Homo sapien
tatcaacagttggaggattctcacc

SEQ ID NO: 3214985 - DNA, 25 bp, Homo sapien
cacaagtcatggctgagtcgagaag

SEQ ID NO: 3214986 - DNA, 25 bp, Homo sapien
gagtagagtgagggccaaacacagc

SEQ ID NO: 3214987 - DNA, 25 bp, Homo sapien
gttccctattacatgtttgtgttgg

SEQ ID NO: 3214988 - DNA, 25 bp, Homo sapien
ttccaaggccttaagacaactgttc

SEQ ID NO: 3214989 - DNA, 25 bp, Homo sapien
aatatctttacaactcgcctcttcc

SEQ ID NO: 3214990 - DNA, 25 bp, Homo sapien
tccccacagtagatatacaaatgac

SEQ ID NO: 3214991 - DNA, 25 bp, Homo sapien
gtctagtaagtctaatatttggact

SEQ ID NO: 3214992 - DNA, 25 bp, Homo sapien
cctatgaatggccatacttttgtgt

SEQ ID NO: 3214993 - DNA, 25 bp, Homo sapien
tgttgagaaccaggttttctaataa

SEQ ID NO: 3214994 - DNA, 25 bp, Homo sapien
taatcatgtttgtctatagcctccc

SEQ ID NO: 3214995 - DNA, 25 bp, Homo sapien
cacgaaagtaggcaatgtgacccag

SEQ ID NO: 3214996 - DNA, 25 bp, Homo sapien
gccatttggtaatagcagccccttc

SEQ ID NO: 3214997 - DNA, 25 bp, Homo sapien
tctgagtggcagattgctgtcccct

SEQ ID NO: 3214998 - DNA, 25 bp, Homo sapien
cagtgggttccaagtccaagtcacc

SEQ ID NO: 3214999 - DNA, 25 bp, Homo sapien
tccaagtcacctatttttggtaagc

SEQ ID NO: 3215000 - DNA, 25 bp, Homo sapien
tccaagtccaagtcacctatttttg

SEQ ID NO: 3215001 - DNA, 25 bp, Homo sapien
ccaggactcagtgggttccaagtcc

SEQ ID NO: 3215002 - DNA, 25 bp, Homo sapien
gggaattcacagtaggcagcagcca

SEQ ID NO: 3215003 - DNA, 25 bp, Homo sapien
actgactttccacagggagattcct

SEQ ID NO: 3215004 - DNA, 25 bp, Homo sapien
aattggatactgaagggaattcaca

SEQ ID NO: 3215005 - DNA, 25 bp, Homo sapien
cagggagattcctgaacagagaaca

SEQ ID NO: 3215006 - DNA, 25 bp, Homo sapien
caaaagagatggagctgacgcacca

SEQ ID NO: 3215007 - DNA, 25 bp, Homo sapien
cccactttaagttgagagcacagca

SEQ ID NO: 3215008 - DNA, 25 bp, Homo sapien
gaagcctacaatggtttccaactgc

SEQ ID NO: 3215009 - DNA, 25 bp, Homo sapien
caagtttctacatgtcgaacaggca

SEQ ID NO: 3215010 - DNA, 25 bp, Homo sapien
cccagctgagcctgagttccataac

SEQ ID NO: 3215011 - DNA, 25 bp, Homo sapien
ccagctgagcctgagttccataacc

SEQ ID NO: 3215012 - DNA, 25 bp, Homo sapien
tgcagcctggtttagccatgtggag

SEQ ID NO: 3215013 - DNA, 25 bp, Homo sapien
gcctggtttagccatgtggagtgaa

SEQ ID NO: 3215014 - DNA, 25 bp, Homo sapien
tttagccatgtggagtgaaagccag

SEQ ID NO: 3215015 - DNA, 25 bp, Homo sapien
tagtgcagcctggtttagccatgtg

SEQ ID NO: 3215016 - DNA, 25 bp, Homo sapien
tgtaattcctcattatgccacaatg

SEQ ID NO: 3215017 - DNA, 25 bp, Homo sapien
gaataaatgtaattcctcattatgc

SEQ ID NO: 3215018 - DNA, 25 bp, Homo sapien
gcaaacacctctttagaaatctggg

SEQ ID NO: 3215019 - DNA, 25 bp, Homo sapien
ggcactgccattttggcatcagatg

SEQ ID NO: 3215020 - DNA, 25 bp, Homo sapien
caataccttcctggcattgagtggc

SEQ ID NO: 3215021 - DNA, 25 bp, Homo sapien
aaatacctgagataacgcttgggct

SEQ ID NO: 3215022 - DNA, 25 bp, Homo sapien
tatatttcgacagaacggacaatgg

SEQ ID NO: 3215023 - DNA, 25 bp, Homo sapien
gggtactctaacaggccaaggcata

SEQ ID NO: 3215024 - DNA, 25 bp, Homo sapien
cctgatccaatgaaagtgtggtcac

SEQ ID NO: 3215025 - DNA, 25 bp, Homo sapien
cagtcctgattgcttaatgaaagtg

SEQ ID NO: 3215026 - DNA, 25 bp, Homo sapien
ttatgcctgaacgttccaaatgtcc

SEQ ID NO: 3215027 - DNA, 25 bp, Homo sapien
tcaacaattggaacctgatccaatg

SEQ ID NO: 3215028 - DNA, 25 bp, Homo sapien
caaaaacatcaataaggttgatatg

SEQ ID NO: 3215029 - DNA, 25 bp, Homo sapien
aaaacatcaataaggttgatatggt

SEQ ID NO: 3215030 - DNA, 25 bp, Homo sapien
tgcaaaaacatcaataaggttgata

SEQ ID NO: 3215031 - DNA, 25 bp, Homo sapien
ctgcaaaaacatcaataaggttgat

SEQ ID NO: 3215032 - DNA, 25 bp, Homo sapien
gattaacttgttcttggattctcta

SEQ ID NO: 3215033 - DNA, 25 bp, Homo sapien
tgaggattaacttgttcttggattc

SEQ ID NO: 3215034 - DNA, 25 bp, Homo sapien
taacttgttcttggattctctagaa

SEQ ID NO: 3215035 - DNA, 25 bp, Homo sapien
gaggattaacttgttcttggattct

SEQ ID NO: 3215036 - DNA, 25 bp, Homo sapien
ttgggtcagtgtaacatccatcatg

SEQ ID NO: 3215037 - DNA, 25 bp, Homo sapien
cagtctaaggtacgtgatgtcaaaa

SEQ ID NO: 3215038 - DNA, 25 bp, Homo sapien
gtccaatgctaaaactcccaagaga

SEQ ID NO: 3215039 - DNA, 25 bp, Homo sapien
catgcccagcacaagttagttttga

SEQ ID NO: 3215040 - DNA, 25 bp, Homo sapien
tatggcatcatcagacgtttctcct

SEQ ID NO: 3215041 - DNA, 25 bp, Homo sapien
tgtcgaaaccgatgacatcataagc

SEQ ID NO: 3215042 - DNA, 25 bp, Homo sapien
tggtaagccgtcactaactttcaag

SEQ ID NO: 3215043 - DNA, 25 bp, Homo sapien
gccttcataaatcaatgcttctaag

SEQ ID NO: 3215044 - DNA, 25 bp, Homo sapien
ttgagaaatgtaacttcttcacatt

SEQ ID NO: 3215045 - DNA, 25 bp, Homo sapien
actccctgtaggctcacagcctgct

SEQ ID NO: 3215046 - DNA, 25 bp, Homo sapien
ctcacagcctgctggagtttgcttt

SEQ ID NO: 3215047 - DNA, 25 bp, Homo sapien
tgtaggctcacagcctgctggagtt

SEQ ID NO: 3215048 - DNA, 25 bp, Homo sapien
cctgtaggctcacagcctgctggag

SEQ ID NO: 3215049 - DNA, 25 bp, Homo sapien
atacaatcatgcatgtttctgggtc

SEQ ID NO: 3215050 - DNA, 25 bp, Homo sapien
aaatacaatcatgcatgtttctggg

SEQ ID NO: 3215051 - DNA, 25 bp, Homo sapien
aatacaatcatgcatgtttctgggt

SEQ ID NO: 3215052 - DNA, 25 bp, Homo sapien
catatgcccttgacagaacaatatc

SEQ ID NO: 3215053 - DNA, 25 bp, Homo sapien
ccttccctacttggatggatgccct

SEQ ID NO: 3215054 - DNA, 25 bp, Homo sapien
ggaaaccatactacccatgttctcc

SEQ ID NO: 3215055 - DNA, 25 bp, Homo sapien
aatagaattgctttggagatctcag

SEQ ID NO: 3215056 - DNA, 25 bp, Homo sapien
ctgtaaccaagtcaagcatttgtca

SEQ ID NO: 3215057 - DNA, 25 bp, Homo sapien
gtaaccaagtcaagcatttgtcatc

SEQ ID NO: 3215058 - DNA, 25 bp, Homo sapien
accaagtcaagcatttgtcatccat

SEQ ID NO: 3215059 - DNA, 25 bp, Homo sapien
taaccaagtcaagcatttgtcatcc

SEQ ID NO: 3215060 - DNA, 25 bp, Homo sapien
gaatcggccccattgcagcatcttt

SEQ ID NO: 3215061 - DNA, 25 bp, Homo sapien
tgaagagcaatgcatcccgagcttg

SEQ ID NO: 3215062 - DNA, 25 bp, Homo sapien
tacgtaattctgcacggcactggcc

SEQ ID NO: 3215063 - DNA, 25 bp, Homo sapien
tgttctccacgatgtgatgggccac

SEQ ID NO: 3215064 - DNA, 25 bp, Homo sapien
ggcagggaagagtagagaccactga

SEQ ID NO: 3215065 - DNA, 25 bp, Homo sapien
agaaggcagtgccattcctcgcctt

SEQ ID NO: 3215066 - DNA, 25 bp, Homo sapien
tcagaaggcagtgccattcctcgcc

SEQ ID NO: 3215067 - DNA, 25 bp, Homo sapien
gaaggcagtgccattcctcgccttt

SEQ ID NO: 3215068 - DNA, 25 bp, Homo sapien
aggcagtgccattcctcgcctttct

SEQ ID NO: 3215069 - DNA, 25 bp, Homo sapien
gaaggaagtagaagccagtcatctt

SEQ ID NO: 3215070 - DNA, 25 bp, Homo sapien
gagaaggaagtagaagccagtcatc

SEQ ID NO: 3215071 - DNA, 25 bp, Homo sapien
agaaggaagtagaagccagtcatct

SEQ ID NO: 3215072 - DNA, 25 bp, Homo sapien
tgacaagctgatttcgaatcaaggg

SEQ ID NO: 3215073 - DNA, 25 bp, Homo sapien
cattgtaaatgtaattgacaagctg

SEQ ID NO: 3215074 - DNA, 25 bp, Homo sapien
caagactggtaccaaaaatccattg

SEQ ID NO: 3215075 - DNA, 25 bp, Homo sapien
cttatggagagcaggagccaagact

SEQ ID NO: 3215076 - DNA, 25 bp, Homo sapien
tatgacaccagatagaaccatcagt

SEQ ID NO: 3215077 - DNA, 25 bp, Homo sapien
ccagatagaaccatcagtttaagct

SEQ ID NO: 3215078 - DNA, 25 bp, Homo sapien
attctatgacaccagatagaaccat

SEQ ID NO: 3215079 - DNA, 25 bp, Homo sapien
tgacaccagatagaaccatcagttt

SEQ ID NO: 3215080 - DNA, 25 bp, Homo sapien
agaaacctcatcagcttggatggca

SEQ ID NO: 3215081 - DNA, 25 bp, Homo sapien
aaccacatcaaagatgacctcttga

SEQ ID NO: 3215082 - DNA, 25 bp, Homo sapien
ttaaaccacatcaaagatgacctct

SEQ ID NO: 3215083 - DNA, 25 bp, Homo sapien
aaaccacatcaaagatgacctcttg

SEQ ID NO: 3215084 - DNA, 25 bp, Homo sapien
ccacatcaaagatgacctcttgaac

SEQ ID NO: 3215085 - DNA, 25 bp, Homo sapien
tggtgttgcagtctgaaagctctcc

SEQ ID NO: 3215086 - DNA, 25 bp, Homo sapien
tcctacaggttgttcccagccagtg

SEQ ID NO: 3215087 - DNA, 25 bp, Homo sapien
ttgcagacttccaactacagggagc

SEQ ID NO: 3215088 - DNA, 25 bp, Homo sapien
tagtaagcatactaaggcaggcctg

SEQ ID NO: 3215089 - DNA, 25 bp, Homo sapien
gtgcatttattagcctggtgaggaa

SEQ ID NO: 3215090 - DNA, 25 bp, Homo sapien
caaatgctaagtgcatttattagcc

SEQ ID NO: 3215091 - DNA, 25 bp, Homo sapien
tatttttaagcaaatgctaagtgca

SEQ ID NO: 3215092 - DNA, 25 bp, Homo sapien
aagctgggtatagtccttaagggag

SEQ ID NO: 3215093 - DNA, 25 bp, Homo sapien
ggcttatatgaacccagcacacatg

SEQ ID NO: 3215094 - DNA, 25 bp, Homo sapien
gcagatcatgaatacgtatgtgcat

SEQ ID NO: 3215095 - DNA, 25 bp, Homo sapien
taagccatgaattattgagcttgca

SEQ ID NO: 3215096 - DNA, 25 bp, Homo sapien
gctccacggcggcttatatgaaccc

SEQ ID NO: 3215097 - DNA, 25 bp, Homo sapien
cttggttacaactggatctcggaca

SEQ ID NO: 3215098 - DNA, 25 bp, Homo sapien
tctcggacagcatctgataagggtg

SEQ ID NO: 3215099 - DNA, 25 bp, Homo sapien
cagaatgattgcttgggctccacca

SEQ ID NO: 3215100 - DNA, 25 bp, Homo sapien
taaatggaatacctgtctgtcccgg

SEQ ID NO: 3215101 - DNA, 25 bp, Homo sapien
tgccggctcatgtgcaaattcctgg

SEQ ID NO: 3215102 - DNA, 25 bp, Homo sapien
cagtaactagctgcacattcaagtt

SEQ ID NO: 3215103 - DNA, 25 bp, Homo sapien
ttaaagcagaatctccggaacccag

SEQ ID NO: 3215104 - DNA, 25 bp, Homo sapien
gagtttgcaatgaagaagttcccca

SEQ ID NO: 3215105 - DNA, 25 bp, Homo sapien
catatttgtatatagatctaaatgt

SEQ ID NO: 3215106 - DNA, 25 bp, Homo sapien
cacagtatagctctgggataaataa

SEQ ID NO: 3215107 - DNA, 25 bp, Homo sapien
taatggattcttgtaggtttttcta

SEQ ID NO: 3215108 - DNA, 25 bp, Homo sapien
gatctaaatgtctgggtacatcatc

SEQ ID NO: 3215109 - DNA, 25 bp, Homo sapien
ctatacctcctcgcaatgggaacat

SEQ ID NO: 3215110 - DNA, 25 bp, Homo sapien
cttgtcatgaatattgtcaaatgct

SEQ ID NO: 3215111 - DNA, 25 bp, Homo sapien
ttgtcatgaatattgtcaaatgcta

SEQ ID NO: 3215112 - DNA, 25 bp, Homo sapien
ttcctatacctcctcgcaatgggaa

SEQ ID NO: 3215113 - DNA, 25 bp, Homo sapien
cgaagtacaaactttagtatctggg

SEQ ID NO: 3215114 - DNA, 25 bp, Homo sapien
tgaataaacactgactacccgtccc

SEQ ID NO: 3215115 - DNA, 25 bp, Homo sapien
gctgctctcaatgcatttaactggc

SEQ ID NO: 3215116 - DNA, 25 bp, Homo sapien
aactggcccaaatttgaggtacctg

SEQ ID NO: 3215117 - DNA, 25 bp, Homo sapien
cagcagctggaaaggctccttgcag

SEQ ID NO: 3215118 - DNA, 25 bp, Homo sapien
ggcagcagctggaaaggctccttgc

SEQ ID NO: 3215119 - DNA, 25 bp, Homo sapien
agggcagcagctggaaaggctcctt

SEQ ID NO: 3215120 - DNA, 25 bp, Homo sapien
caagggcagcagctggaaaggctcc

SEQ ID NO: 3215121 - DNA, 25 bp, Homo sapien
cagagagagccaagccaacggacag

SEQ ID NO: 3215122 - DNA, 25 bp, Homo sapien
ccaagccaacggacaggtgggaggc

SEQ ID NO: 3215123 - DNA, 25 bp, Homo sapien
gagccaagccaacggacaggtggga

SEQ ID NO: 3215124 - DNA, 25 bp, Homo sapien
agagagccaagccaacggacaggtg

SEQ ID NO: 3215125 - DNA, 25 bp, Homo sapien
tcagcagaggggaaaagaatgacaa

SEQ ID NO: 3215126 - DNA, 25 bp, Homo sapien
aatcagcagaggggaaaagaatgac

SEQ ID NO: 3215127 - DNA, 25 bp, Homo sapien
ctgaaatcagcagaggggaaaagaa

SEQ ID NO: 3215128 - DNA, 25 bp, Homo sapien
agcagaggggaaaagaatgacaagg

SEQ ID NO: 3215129 - DNA, 25 bp, Homo sapien
gggttatcagtgagtcatcagcccc

SEQ ID NO: 3215130 - DNA, 25 bp, Homo sapien
ctgggttatcagtgagtcatcagcc

SEQ ID NO: 3215131 - DNA, 25 bp, Homo sapien
gttatcagtgagtcatcagccccag

SEQ ID NO: 3215132 - DNA, 25 bp, Homo sapien
tatcagtgagtcatcagccccagtg

SEQ ID NO: 3215133 - DNA, 25 bp, Homo sapien
gaaaaggtccagatatgcagttgtg

SEQ ID NO: 3215134 - DNA, 25 bp, Homo sapien
gctggtgcaataggataaaacggag

SEQ ID NO: 3215135 - DNA, 25 bp, Homo sapien
tcggagatgctacgcaggaaaaggt

SEQ ID NO: 3215136 - DNA, 25 bp, Homo sapien
tcaagtagtgctggctcggagatgc

SEQ ID NO: 3215137 - DNA, 25 bp, Homo sapien
gacttgatgcactctggttccttgg

SEQ ID NO: 3215138 - DNA, 25 bp, Homo sapien
cctaggaaaggcagtaagtgtcacc

SEQ ID NO: 3215139 - DNA, 25 bp, Homo sapien
gaagtgcactctgctagttctacag

SEQ ID NO: 3215140 - DNA, 25 bp, Homo sapien
tgatctctaacacccagacttgatg

SEQ ID NO: 3215141 - DNA, 25 bp, Homo sapien
tttcactgtgtctcataagtctgga

SEQ ID NO: 3215142 - DNA, 25 bp, Homo sapien
tgtgaatcttgtcaaagaaccaact

SEQ ID NO: 3215143 - DNA, 25 bp, Homo sapien
ccagtgtgttaaagtagaagcttag

SEQ ID NO: 3215144 - DNA, 25 bp, Homo sapien
tggctttgtgctacaacctcttaac

SEQ ID NO: 3215145 - DNA, 25 bp, Homo sapien
gagagttctgaataatgccagagac

SEQ ID NO: 3215146 - DNA, 25 bp, Homo sapien
tgtaaaccaatgagagttctgaata

SEQ ID NO: 3215147 - DNA, 25 bp, Homo sapien
cttagaactagctgtaacatcacat

SEQ ID NO: 3215148 - DNA, 25 bp, Homo sapien
atcttcacaatgtaaaccaatgaga

SEQ ID NO: 3215149 - DNA, 25 bp, Homo sapien
ctctgggtccgcttcttgcagtgct

SEQ ID NO: 3215150 - DNA, 25 bp, Homo sapien
tagcccttcgctcctctctcagctt

SEQ ID NO: 3215151 - DNA, 25 bp, Homo sapien
ctgggtccgcttcttgcagtgctgg

SEQ ID NO: 3215152 - DNA, 25 bp, Homo sapien
gagtagtcaactccaagattcagga

SEQ ID NO: 3215153 - DNA, 25 bp, Homo sapien
atcacctagactaaatctgacttgg

SEQ ID NO: 3215154 - DNA, 25 bp, Homo sapien
tccatcacctagactaaatctgact

SEQ ID NO: 3215155 - DNA, 25 bp, Homo sapien
gagcttccatcacctagactaaatc

SEQ ID NO: 3215156 - DNA, 25 bp, Homo sapien
gcaagagcttccatcacctagacta

SEQ ID NO: 3215157 - DNA, 25 bp, Homo sapien
aaagcatagctggaccccagtgggc

SEQ ID NO: 3215158 - DNA, 25 bp, Homo sapien
gctgtgaacaaagcatagctggacc

SEQ ID NO: 3215159 - DNA, 25 bp, Homo sapien
gctgctctagcaccacaggagggcg

SEQ ID NO: 3215160 - DNA, 25 bp, Homo sapien
gcagcaacaaaagggatcagagcag

SEQ ID NO: 3215161 - DNA, 25 bp, Homo sapien
cttggttccccagcgtcagagtgat

SEQ ID NO: 3215162 - DNA, 25 bp, Homo sapien
tggccgcagaaacagagtaacagtc

SEQ ID NO: 3215163 - DNA, 25 bp, Homo sapien
gagtgatcccgctggagcagcagac

SEQ ID NO: 3215164 - DNA, 25 bp, Homo sapien
tcaaggcgagaagcttggccgcaga

SEQ ID NO: 3215165 - DNA, 25 bp, Homo sapien
taaagatcatcactagcgagttcct

SEQ ID NO: 3215166 - DNA, 25 bp, Homo sapien
tatcccaaggcgagatggaactggc

SEQ ID NO: 3215167 - DNA, 25 bp, Homo sapien
cgagatggaactggcatccttttgt

SEQ ID NO: 3215168 - DNA, 25 bp, Homo sapien
aagggacacatatcccaaggcgaga

SEQ ID NO: 3215169 - DNA, 25 bp, Homo sapien
ctggttagaacaagggaggtgtggg

SEQ ID NO: 3215170 - DNA, 25 bp, Homo sapien
ggcagaggctggttagaacaaggga

SEQ ID NO: 3215171 - DNA, 25 bp, Homo sapien
caaaggtagtggatggggttgtgac

SEQ ID NO: 3215172 - DNA, 25 bp, Homo sapien
gggttgtgacccattcgggctaaga

SEQ ID NO: 3215173 - DNA, 25 bp, Homo sapien
gcctcccacaggtactgcaggtagc

SEQ ID NO: 3215174 - DNA, 25 bp, Homo sapien
ggcagtccctcatgcagcggaggat

SEQ ID NO: 3215175 - DNA, 25 bp, Homo sapien
tgggagccagctgaggtcctgtctt

SEQ ID NO: 3215176 - DNA, 25 bp, Homo sapien
tcgccatcatacagggcggaccaga

SEQ ID NO: 3215177 - DNA, 25 bp, Homo sapien
ctatgtaggaccctttgaagagcag

SEQ ID NO: 3215178 - DNA, 25 bp, Homo sapien
atcatcctgaaagtccgactcttct

SEQ ID NO: 3215179 - DNA, 25 bp, Homo sapien
gactcttctatgtaggaccctttga

SEQ ID NO: 3215180 - DNA, 25 bp, Homo sapien
tgaaagtccgactcttctatgtagg

SEQ ID NO: 3215181 - DNA, 25 bp, Homo sapien
tggggacactctgaacttcagcctg

SEQ ID NO: 3215182 - DNA, 25 bp, Homo sapien
ggtctgaattgtccctattccactc

SEQ ID NO: 3215183 - DNA, 25 bp, Homo sapien
tccttcatgtcctcggagtccttct

SEQ ID NO: 3215184 - DNA, 25 bp, Homo sapien
agaatccttcatgtcctcggagtcc

SEQ ID NO: 3215185 - DNA, 25 bp, Homo sapien
gcttcaggttccctctcttgctttg

SEQ ID NO: 3215186 - DNA, 25 bp, Homo sapien
atgagctcctcgctctccgggtggg

SEQ ID NO: 3215187 - DNA, 25 bp, Homo sapien
caggggatgctaactctgagttgga

SEQ ID NO: 3215188 - DNA, 25 bp, Homo sapien
ggctgtcaggttagagctgtgctct

SEQ ID NO: 3215189 - DNA, 25 bp, Homo sapien
tgagaagcaagggatcaggtgtggg

SEQ ID NO: 3215190 - DNA, 25 bp, Homo sapien
aatccagctctttaatgatttggtc

SEQ ID NO: 3215191 - DNA, 25 bp, Homo sapien
cagctctttaatgatttggtcatac

SEQ ID NO: 3215192 - DNA, 25 bp, Homo sapien
tctgttccatcaagccctcggcgcc

SEQ ID NO: 3215193 - DNA, 25 bp, Homo sapien
ctctcttccttcccttcttcctcct

SEQ ID NO: 3215194 - DNA, 25 bp, Homo sapien
tactctcttccttcccttcttcctc

SEQ ID NO: 3215195 - DNA, 25 bp, Homo sapien
gagtcaaagtcatcctcctcatctt

SEQ ID NO: 3215196 - DNA, 25 bp, Homo sapien
ctataaaagagtcaaagtcatcctc

SEQ ID NO: 3215197 - DNA, 25 bp, Homo sapien
caaagtcatcctcctcatcttctag

SEQ ID NO: 3215198 - DNA, 25 bp, Homo sapien
gtcaaagtcatcctcctcatcttct

SEQ ID NO: 3215199 - DNA, 25 bp, Homo sapien
gtgaatggggtgctttgagtcctca

SEQ ID NO: 3215200 - DNA, 25 bp, Homo sapien
gtcctcacgggatggcgactggcaa

SEQ ID NO: 3215201 - DNA, 25 bp, Homo sapien
atggcgactggcaaaggcagcctca

SEQ ID NO: 3215202 - DNA, 25 bp, Homo sapien
aaggcacagtctctacagcaggcat

SEQ ID NO: 3215203 - DNA, 25 bp, Homo sapien
tacaagtactttcgaaagcagaaac

SEQ ID NO: 3215204 - DNA, 25 bp, Homo sapien
tatatacaagtactttcgaaagcag

SEQ ID NO: 3215205 - DNA, 25 bp, Homo sapien
aatatatacaagtactttcgaaagc

SEQ ID NO: 3215206 - DNA, 25 bp, Homo sapien
tccaatatatacaagtactttcgaa

SEQ ID NO: 3215207 - DNA, 25 bp, Homo sapien
gaatggagcggccattgattccgtg

SEQ ID NO: 3215208 - DNA, 25 bp, Homo sapien
ctaaggtcagtctcatttccggtct

SEQ ID NO: 3215209 - DNA, 25 bp, Homo sapien
gcacttcccctgtccaagaatggag

SEQ ID NO: 3215210 - DNA, 25 bp, Homo sapien
tgattccgtgcctccctcggcaaat

SEQ ID NO: 3215211 - DNA, 25 bp, Homo sapien
ggagaggaagatcatgtcatcactg

SEQ ID NO: 3215212 - DNA, 25 bp, Homo sapien
ggggggcacatgagcttgaatccca

SEQ ID NO: 3215213 - DNA, 25 bp, Homo sapien
catcactactataaggggtgaggtg

SEQ ID NO: 3215214 - DNA, 25 bp, Homo sapien
gaccatccacaggacatcactacta

SEQ ID NO: 3215215 - DNA, 25 bp, Homo sapien
ggcctacaaactctaaactgctgac

SEQ ID NO: 3215216 - DNA, 25 bp, Homo sapien
ttggcctacaaactctaaactgctg

SEQ ID NO: 3215217 - DNA, 25 bp, Homo sapien
cccagtcccagactgtgccttcccc

SEQ ID NO: 3215218 - DNA, 25 bp, Homo sapien
tgcttggcctacaaactctaaactg

SEQ ID NO: 3215219 - DNA, 25 bp, Homo sapien
cctgacaattgcagaaccatcggtg

SEQ ID NO: 3215220 - DNA, 25 bp, Homo sapien
caaatatggccacgttttctcctgc

SEQ ID NO: 3215221 - DNA, 25 bp, Homo sapien
ttgcagaaccatcggtgccacatct

SEQ ID NO: 3215222 - DNA, 25 bp, Homo sapien
agcaaatatggccacgttttctcct

SEQ ID NO: 3215223 - DNA, 25 bp, Homo sapien
caggaagaacacaaggcttcagggc

SEQ ID NO: 3215224 - DNA, 25 bp, Homo sapien
tgcaggaagaacacaaggcttcagg

SEQ ID NO: 3215225 - DNA, 25 bp, Homo sapien
gaagaacacaaggcttcagggctgg

SEQ ID NO: 3215226 - DNA, 25 bp, Homo sapien
ctgcaggaagaacacaaggcttcag

SEQ ID NO: 3215227 - DNA, 25 bp, Homo sapien
tagctggctagctgagtaatgatcc

SEQ ID NO: 3215228 - DNA, 25 bp, Homo sapien
taatgatcccgataagcagcaaatt

SEQ ID NO: 3215229 - DNA, 25 bp, Homo sapien
gagagcggacgcttggctggaagac

SEQ ID NO: 3215230 - DNA, 25 bp, Homo sapien
gacaggactacgctgatgaatgggc

SEQ ID NO: 3215231 - DNA, 25 bp, Homo sapien
tcccagttatcaatatatcttgcag

SEQ ID NO: 3215232 - DNA, 25 bp, Homo sapien
gaactattatgatgttagacatttg

SEQ ID NO: 3215233 - DNA, 25 bp, Homo sapien
tatatcttgcaggtagcaccctcat

SEQ ID NO: 3215234 - DNA, 25 bp, Homo sapien
tcttgcaggtagcaccctcattatg

SEQ ID NO: 3215235 - DNA, 25 bp, Homo sapien
tgctgagcttgaatgaggagccctg

SEQ ID NO: 3215236 - DNA, 25 bp, Homo sapien
tctctccacagaagcaaactgttca

SEQ ID NO: 3215237 - DNA, 25 bp, Homo sapien
tcagacatgtccacacggaagagca

SEQ ID NO: 3215238 - DNA, 25 bp, Homo sapien
gagcaggtactgctgagcttgaatg

SEQ ID NO: 3215239 - DNA, 25 bp, Homo sapien
tagaacagaggccaaaatgcaggag

SEQ ID NO: 3215240 - DNA, 25 bp, Homo sapien
tatataacataaggtggaaaggccc

SEQ ID NO: 3215241 - DNA, 25 bp, Homo sapien
aacaggaccattcgcacagttgcag

SEQ ID NO: 3215242 - DNA, 25 bp, Homo sapien
gaaccccaatatctgcttgacgtga

SEQ ID NO: 3215243 - DNA, 25 bp, Homo sapien
tataataaattacagccgaacttcc

SEQ ID NO: 3215244 - DNA, 25 bp, Homo sapien
catttacagatgtggcgttggcatt

SEQ ID NO: 3215245 - DNA, 25 bp, Homo sapien
gggaccatggtattctacaatgcag

SEQ ID NO: 3215246 - DNA, 25 bp, Homo sapien
aacagtaagaggcacaaaatcaatc

SEQ ID NO: 3215247 - DNA, 25 bp, Homo sapien
tctcccgtggatagactcagttctc

SEQ ID NO: 3215248 - DNA, 25 bp, Homo sapien
agtaagtctacttcaggctggaccc

SEQ ID NO: 3215249 - DNA, 25 bp, Homo sapien
gtgttatcgtgtgagtttgctgcca

SEQ ID NO: 3215250 - DNA, 25 bp, Homo sapien
cccagcatgggaagttacattctcc

SEQ ID NO: 3215251 - DNA, 25 bp, Homo sapien
tgttgtgttatttatagactgatgg

SEQ ID NO: 3215252 - DNA, 25 bp, Homo sapien
taaggatattttagctgagctcccc

SEQ ID NO: 3215253 - DNA, 25 bp, Homo sapien
ggacacagcttatggccatgacccg

SEQ ID NO: 3215254 - DNA, 25 bp, Homo sapien
gagactatgtgaccttacccgggaa

SEQ ID NO: 3215255 - DNA, 25 bp, Homo sapien
aaagcatggctctgactgaaacccg

SEQ ID NO: 3215256 - DNA, 25 bp, Homo sapien
cttcaaagattgtgcagctgacaac

SEQ ID NO: 3215257 - DNA, 25 bp, Homo sapien
aagattgtgcagctgacaactcccc

SEQ ID NO: 3215258 - DNA, 25 bp, Homo sapien
aaattaacttacacttcaaagattg

SEQ ID NO: 3215259 - DNA, 25 bp, Homo sapien
gttgtaacatgaaattgacttgttt

SEQ ID NO: 3215260 - DNA, 25 bp, Homo sapien
tgtcccaagccacagctatggcatt

SEQ ID NO: 3215261 - DNA, 25 bp, Homo sapien
catccacatcaggagggtccggtga

SEQ ID NO: 3215262 - DNA, 25 bp, Homo sapien
gtgttctcaccctctaggccctgtg

SEQ ID NO: 3215263 - DNA, 25 bp, Homo sapien
ctgcctctcaatccctgtcccaagc

SEQ ID NO: 3215264 - DNA, 25 bp, Homo sapien
catttattaacacagaggaccagca

SEQ ID NO: 3215265 - DNA, 25 bp, Homo sapien
gaatgatgtttctctagcggcactg

SEQ ID NO: 3215266 - DNA, 25 bp, Homo sapien
ttgagcaaaggatgggacaaccggc

SEQ ID NO: 3215267 - DNA, 25 bp, Homo sapien
taccacaggcgctgagaaatcgctc

SEQ ID NO: 3215268 - DNA, 25 bp, Homo sapien
tgaagtcgtatcagggaggatttga

SEQ ID NO: 3215269 - DNA, 25 bp, Homo sapien
tctttttgattctatagccgtccta

SEQ ID NO: 3215270 - DNA, 25 bp, Homo sapien
agtgggtgtgaagtcgtatcaggga

SEQ ID NO: 3215271 - DNA, 25 bp, Homo sapien
gattctatagccgtcctagtgggtg

SEQ ID NO: 3215272 - DNA, 25 bp, Homo sapien
gactgtattctaaaatggccgcacc

SEQ ID NO: 3215273 - DNA, 25 bp, Homo sapien
tataatgaggaagtgccagactgta

SEQ ID NO: 3215274 - DNA, 25 bp, Homo sapien
atggccgcaccatcttacagtctca

SEQ ID NO: 3215275 - DNA, 25 bp, Homo sapien
attcatataatgaggaagtgccaga

SEQ ID NO: 3215276 - DNA, 25 bp, Homo sapien
aagccccttcaccattgtacggaca

SEQ ID NO: 3215277 - DNA, 25 bp, Homo sapien
gtacaagtttttgcacacaggctgg

SEQ ID NO: 3215278 - DNA, 25 bp, Homo sapien
aaagtacatctgtgttgcggcacgc

SEQ ID NO: 3215279 - DNA, 25 bp, Homo sapien
cttcacgcctttttagggctaaatg

SEQ ID NO: 3215280 - DNA, 25 bp, Homo sapien
cagtgagtcttcgtggctccaggct

SEQ ID NO: 3215281 - DNA, 25 bp, Homo sapien
catccattggtctctcagccgtgaa

SEQ ID NO: 3215282 - DNA, 25 bp, Homo sapien
agagggtgcagtggactccgtggga

SEQ ID NO: 3215283 - DNA, 25 bp, Homo sapien
gccgtgaataccagcgcctgttctg

SEQ ID NO: 3215284 - DNA, 25 bp, Homo sapien
caagaaacctatatctattgtgtcc

SEQ ID NO: 3215285 - DNA, 25 bp, Homo sapien
cactgcctcctgacgaaagaataaa

SEQ ID NO: 3215286 - DNA, 25 bp, Homo sapien
gaaaaagtatcgctcatttcacaca

SEQ ID NO: 3215287 - DNA, 25 bp, Homo sapien
taagcctgttatcttttctccccaa

SEQ ID NO: 3215288 - DNA, 25 bp, Homo sapien
tgtccttcccctaagccctatggag

SEQ ID NO: 3215289 - DNA, 25 bp, Homo sapien
gatacttgaaactctttctgcgcag

SEQ ID NO: 3215290 - DNA, 25 bp, Homo sapien
tgtacgtgagcaacattatacccaa

SEQ ID NO: 3215291 - DNA, 25 bp, Homo sapien
gagaatatgtttgtgcttccgagga

SEQ ID NO: 3215292 - DNA, 25 bp, Homo sapien
tgtttcttgacaattgaaaatgagt

SEQ ID NO: 3215293 - DNA, 25 bp, Homo sapien
gtttcttgacaattgaaaatgagta

SEQ ID NO: 3215294 - DNA, 25 bp, Homo sapien
tttctgtgctcgctgtttcttgaca

SEQ ID NO: 3215295 - DNA, 25 bp, Homo sapien
tctgtgctcgctgtttcttgacaat

SEQ ID NO: 3215296 - DNA, 25 bp, Homo sapien
taaacctatcagttaaaagcctgtg

SEQ ID NO: 3215297 - DNA, 25 bp, Homo sapien
tgctgtgaaccttctgtaaacctat

SEQ ID NO: 3215298 - DNA, 25 bp, Homo sapien
aattacagggcacagatttgctgtg

SEQ ID NO: 3215299 - DNA, 25 bp, Homo sapien
tctgtaaacctatcagttaaaagcc

SEQ ID NO: 3215300 - DNA, 25 bp, Homo sapien
acatgtgaatgttatgactgacaag

SEQ ID NO: 3215301 - DNA, 25 bp, Homo sapien
ccagtaagcaggagaacttggtcta

SEQ ID NO: 3215302 - DNA, 25 bp, Homo sapien
actgacaagccagaggataatgtgg

SEQ ID NO: 3215303 - DNA, 25 bp, Homo sapien
tgaccccaatttttcctagtagata

SEQ ID NO: 3215304 - DNA, 25 bp, Homo sapien
actgctgagctttagtgggaacgcc

SEQ ID NO: 3215305 - DNA, 25 bp, Homo sapien
gatggtggaggaataatgaatgcaa

SEQ ID NO: 3215306 - DNA, 25 bp, Homo sapien
taaacacgaagcagttcaggcttgg

SEQ ID NO: 3215307 - DNA, 25 bp, Homo sapien
aaagagacatctaagatgatggtgg

SEQ ID NO: 3215308 - DNA, 25 bp, Homo sapien
atggcatcttcatctgcgaggttca

SEQ ID NO: 3215309 - DNA, 25 bp, Homo sapien
agtgcagtcgagaaatagccatgct

SEQ ID NO: 3215310 - DNA, 25 bp, Homo sapien
aatagccatgctatggcatcttcat

SEQ ID NO: 3215311 - DNA, 25 bp, Homo sapien
tctgcgaggttcatatgtcagcagc

SEQ ID NO: 3215312 - DNA, 25 bp, Homo sapien
ggaataacatactggaaatgataac

SEQ ID NO: 3215313 - DNA, 25 bp, Homo sapien
tgagtatttgagtttgaccctgtta

SEQ ID NO: 3215314 - DNA, 25 bp, Homo sapien
gatggtatagcatattggctctcaa

SEQ ID NO: 3215315 - DNA, 25 bp, Homo sapien
gacaaagaaattgctacgaaaaagc

SEQ ID NO: 3215316 - DNA, 25 bp, Homo sapien
tctccgagtcactgcccaaaagcag

SEQ ID NO: 3215317 - DNA, 25 bp, Homo sapien
tccctctccgagtcactgcccaaaa

SEQ ID NO: 3215318 - DNA, 25 bp, Homo sapien
ttttctccctctccgagtcactgcc

SEQ ID NO: 3215319 - DNA, 25 bp, Homo sapien
cctctccgagtcactgcccaaaagc

SEQ ID NO: 3215320 - DNA, 25 bp, Homo sapien
tcataagtcttactcagcatctggg

SEQ ID NO: 3215321 - DNA, 25 bp, Homo sapien
gccgcatcccgaacaacaagaattt

SEQ ID NO: 3215322 - DNA, 25 bp, Homo sapien
taagaccttcgctgggatgctctcc

SEQ ID NO: 3215323 - DNA, 25 bp, Homo sapien
tgtgctgtgcaattaggccttgtgg

SEQ ID NO: 3215324 - DNA, 25 bp, Homo sapien
accatcttcactttgccagagccca

SEQ ID NO: 3215325 - DNA, 25 bp, Homo sapien
ttaacctcctcgagcagttttactg

SEQ ID NO: 3215326 - DNA, 25 bp, Homo sapien
aacctcctcgagcagttttactggc

SEQ ID NO: 3215327 - DNA, 25 bp, Homo sapien
gagcccatggataaagctgtcttta

SEQ ID NO: 3215328 - DNA, 25 bp, Homo sapien
gctgctgtggggatgctgcacagga

SEQ ID NO: 3215329 - DNA, 25 bp, Homo sapien
ggagagggagtgacacaggctgctg

SEQ ID NO: 3215330 - DNA, 25 bp, Homo sapien
ggggagagggagtgacacaggctgc

SEQ ID NO: 3215331 - DNA, 25 bp, Homo sapien
tgctgtggggatgctgcacaggagg

SEQ ID NO: 3215332 - DNA, 25 bp, Homo sapien
tggccactgcaaacctggctccttg

SEQ ID NO: 3215333 - DNA, 25 bp, Homo sapien
agaggagtgtaggagtatgtttgcc

SEQ ID NO: 3215334 - DNA, 25 bp, Homo sapien
gtgtaggagtatgtttgccttctgc

SEQ ID NO: 3215335 - DNA, 25 bp, Homo sapien
gagtgtaggagtatgtttgccttct

SEQ ID NO: 3215336 - DNA, 25 bp, Homo sapien
acataagcctgtactggttgatctg

SEQ ID NO: 3215337 - DNA, 25 bp, Homo sapien
tggagctgccatatcttaaatcaaa

SEQ ID NO: 3215338 - DNA, 25 bp, Homo sapien
agatcctccttctctacacataagc

SEQ ID NO: 3215339 - DNA, 25 bp, Homo sapien
atcaaaccacagagacagatcctcc

SEQ ID NO: 3215340 - DNA, 25 bp, Homo sapien
tacccatgaaggtcagggattgagt

SEQ ID NO: 3215341 - DNA, 25 bp, Homo sapien
tcagggattgagtggatttgagaaa

SEQ ID NO: 3215342 - DNA, 25 bp, Homo sapien
ctagaattacccatgaaggtcaggg

SEQ ID NO: 3215343 - DNA, 25 bp, Homo sapien
gaattacccatgaaggtcagggatt

SEQ ID NO: 3215344 - DNA, 25 bp, Homo sapien
ctgatttcccaggtagttggacagc

SEQ ID NO: 3215345 - DNA, 25 bp, Homo sapien
tttcccaggtagttggacagcactg

SEQ ID NO: 3215346 - DNA, 25 bp, Homo sapien
cccaggtagttggacagcactgctg

SEQ ID NO: 3215347 - DNA, 25 bp, Homo sapien
tctttcccacgttctgatttcccag

SEQ ID NO: 3215348 - DNA, 25 bp, Homo sapien
tgggcgtgctttggggagtgagaac

SEQ ID NO: 3215349 - DNA, 25 bp, Homo sapien
cgtgctttggggagtgagaacctac

SEQ ID NO: 3215350 - DNA, 25 bp, Homo sapien
ggcgtgctttggggagtgagaacct

SEQ ID NO: 3215351 - DNA, 25 bp, Homo sapien
ctgggcgtgctttggggagtgagaa

SEQ ID NO: 3215352 - DNA, 25 bp, Homo sapien
tggagagcattggtgagagtcatcc

SEQ ID NO: 3215353 - DNA, 25 bp, Homo sapien
ggtttccattaattggccatccttc

SEQ ID NO: 3215354 - DNA, 25 bp, Homo sapien
ttctcttgaagctggagagcattgg

SEQ ID NO: 3215355 - DNA, 25 bp, Homo sapien
gagtcatccggtttccattaattgg

SEQ ID NO: 3215356 - DNA, 25 bp, Homo sapien
gaattttcccagaattgtttactca

SEQ ID NO: 3215357 - DNA, 25 bp, Homo sapien
tctggaattttcccagaattgttta

SEQ ID NO: 3215358 - DNA, 25 bp, Homo sapien
tgacctgaattaaggcatcctggat

SEQ ID NO: 3215359 - DNA, 25 bp, Homo sapien
tactgcacagacaattgaaggagag

SEQ ID NO: 3215360 - DNA, 25 bp, Homo sapien
gaatagagggcttgcagtgctcaaa

SEQ ID NO: 3215361 - DNA, 25 bp, Homo sapien
aaaatgctggcccacctcaactggt

SEQ ID NO: 3215362 - DNA, 25 bp, Homo sapien
cgaggactgtgtgcattcctatttc

SEQ ID NO: 3215363 - DNA, 25 bp, Homo sapien
atgcacagaaaaggtgcgatagcac

SEQ ID NO: 3215364 - DNA, 25 bp, Homo sapien
cacagaaaaggtgcgatagcactga

SEQ ID NO: 3215365 - DNA, 25 bp, Homo sapien
gcacagaaaaggtgcgatagcactg

SEQ ID NO: 3215366 - DNA, 25 bp, Homo sapien
cagaaaaggtgcgatagcactgagg

SEQ ID NO: 3215367 - DNA, 25 bp, Homo sapien
aagtaccgctgtttgcagggccgga

SEQ ID NO: 3215368 - DNA, 25 bp, Homo sapien
gcacaggcctgccaatcatgccttg

SEQ ID NO: 3215369 - DNA, 25 bp, Homo sapien
cggcacttgagaagtaccgctgttt

SEQ ID NO: 3215370 - DNA, 25 bp, Homo sapien
tcatgccttgttcagccaaacctct

SEQ ID NO: 3215371 - DNA, 25 bp, Homo sapien
aactaaggagatttgcaggaaactc

SEQ ID NO: 3215372 - DNA, 25 bp, Homo sapien
aactccagatgcattcaaacacttg

SEQ ID NO: 3215373 - DNA, 25 bp, Homo sapien
tggtcacagattacacgagcaattg

SEQ ID NO: 3215374 - DNA, 25 bp, Homo sapien
taatcgtcctgtaatgtcttcccag

SEQ ID NO: 3215375 - DNA, 25 bp, Homo sapien
ataggttatggtcagcctccgggcc

SEQ ID NO: 3215376 - DNA, 25 bp, Homo sapien
tgccaccataggttatggtcagcct

SEQ ID NO: 3215377 - DNA, 25 bp, Homo sapien
agactctgccaccataggttatggt

SEQ ID NO: 3215378 - DNA, 25 bp, Homo sapien
tcagacaccctccaggctagactct

SEQ ID NO: 3215379 - DNA, 25 bp, Homo sapien
ccctgccaagagggacctgtctgta

SEQ ID NO: 3215380 - DNA, 25 bp, Homo sapien
tctcatctctagttgggcaccttga

SEQ ID NO: 3215381 - DNA, 25 bp, Homo sapien
tgtctggcccttattaattcccttc

SEQ ID NO: 3215382 - DNA, 25 bp, Homo sapien
gcaccttgacaatctgtctggccct

SEQ ID NO: 3215383 - DNA, 25 bp, Homo sapien
catccaacacgttcacagagctggg

SEQ ID NO: 3215384 - DNA, 25 bp, Homo sapien
gcccatgaccatcagaaggtagatt

SEQ ID NO: 3215385 - DNA, 25 bp, Homo sapien
tgtactcgggatagacgcacccatc

SEQ ID NO: 3215386 - DNA, 25 bp, Homo sapien
gattctggagtacatcacactgccc

SEQ ID NO: 3215387 - DNA, 25 bp, Homo sapien
ggccctccaacaggtcacagctgcc

SEQ ID NO: 3215388 - DNA, 25 bp, Homo sapien
gtggtcatggccctccaacaggtca

SEQ ID NO: 3215389 - DNA, 25 bp, Homo sapien
atcaggcctatctggtggtcatggc

SEQ ID NO: 3215390 - DNA, 25 bp, Homo sapien
tcaggcctatctggtggtcatggcc

SEQ ID NO: 3215391 - DNA, 25 bp, Homo sapien
ttcctcggggttcagtggtctcact

SEQ ID NO: 3215392 - DNA, 25 bp, Homo sapien
ccccatcataaatacatgtgatggg

SEQ ID NO: 3215393 - DNA, 25 bp, Homo sapien
ccttgcctttaaagcatatggccag

SEQ ID NO: 3215394 - DNA, 25 bp, Homo sapien
ggttgaggagctcattgcacaggct

SEQ ID NO: 3215395 - DNA, 25 bp, Homo sapien
tggtcaatctgcagcagccacgctt

SEQ ID NO: 3215396 - DNA, 25 bp, Homo sapien
ttggtcaatctgcagcagccacgct

SEQ ID NO: 3215397 - DNA, 25 bp, Homo sapien
gcagcagccacgcttggggtacgtt

SEQ ID NO: 3215398 - DNA, 25 bp, Homo sapien
gcagccacgcttggggtacgttccc

SEQ ID NO: 3215399 - DNA, 25 bp, Homo sapien
tgaagcaactggcctcatcacagcc

SEQ ID NO: 3215400 - DNA, 25 bp, Homo sapien
aagcaactggcctcatcacagccct

SEQ ID NO: 3215401 - DNA, 25 bp, Homo sapien
ctgaagcaactggcctcatcacagc

SEQ ID NO: 3215402 - DNA, 25 bp, Homo sapien
gaagcaactggcctcatcacagccc

SEQ ID NO: 3215403 - DNA, 25 bp, Homo sapien
agtgatagatagcatccccgtgctg

SEQ ID NO: 3215404 - DNA, 25 bp, Homo sapien
ctgtgctggatttgcacttggctgc

SEQ ID NO: 3215405 - DNA, 25 bp, Homo sapien
agccctgagtgatagatagcatccc

SEQ ID NO: 3215406 - DNA, 25 bp, Homo sapien
tcttacagatgccacagggccccag

SEQ ID NO: 3215407 - DNA, 25 bp, Homo sapien
ggagctgagtaataccctcattact

SEQ ID NO: 3215408 - DNA, 25 bp, Homo sapien
tggagctgagtaataccctcattac

SEQ ID NO: 3215409 - DNA, 25 bp, Homo sapien
agaatcttacagaaattgtggagct

SEQ ID NO: 3215410 - DNA, 25 bp, Homo sapien
tcttacagaaattgtggagctgagt

SEQ ID NO: 3215411 - DNA, 25 bp, Homo sapien
gggccagtcactagctgctcatctg

SEQ ID NO: 3215412 - DNA, 25 bp, Homo sapien
catggagcagtcgttgggtggcagg

SEQ ID NO: 3215413 - DNA, 25 bp, Homo sapien
cacgggccggatttaagtctcttga

SEQ ID NO: 3215414 - DNA, 25 bp, Homo sapien
ggggtgtctgtactcacactctccc

SEQ ID NO: 3215415 - DNA, 25 bp, Homo sapien
catagtttgatgaccggatatgagg

SEQ ID NO: 3215416 - DNA, 25 bp, Homo sapien
atagtttgatgaccggatatgaggt

SEQ ID NO: 3215417 - DNA, 25 bp, Homo sapien
tcatagtttgatgaccggatatgag

SEQ ID NO: 3215418 - DNA, 25 bp, Homo sapien
ggccctgagacaccagatgccatcc

SEQ ID NO: 3215419 - DNA, 25 bp, Homo sapien
ctgtgagctttctttgagtgcctct

SEQ ID NO: 3215420 - DNA, 25 bp, Homo sapien
ctttgagtgcctctccaagggtaga

SEQ ID NO: 3215421 - DNA, 25 bp, Homo sapien
gagctttctttgagtgcctctccaa

SEQ ID NO: 3215422 - DNA, 25 bp, Homo sapien
tctttgagtgcctctccaagggtag

SEQ ID NO: 3215423 - DNA, 25 bp, Homo sapien
aaccagggtgctcccggacaatcag

SEQ ID NO: 3215424 - DNA, 25 bp, Homo sapien
tcattgcaggtacaaccagggtgct

SEQ ID NO: 3215425 - DNA, 25 bp, Homo sapien
caggtacaaccagggtgctcccgga

SEQ ID NO: 3215426 - DNA, 25 bp, Homo sapien
gggtgctcccggacaatcagtgcta

SEQ ID NO: 3215427 - DNA, 25 bp, Homo sapien
tgtgatgtgggaggcctgttttgtg

SEQ ID NO: 3215428 - DNA, 25 bp, Homo sapien
ttaactacaaggtgtagcacaaccg

SEQ ID NO: 3215429 - DNA, 25 bp, Homo sapien
tttctgaaagtaatagcggatggat

SEQ ID NO: 3215430 - DNA, 25 bp, Homo sapien
cacaaccgttgagtgtgatgtggga

SEQ ID NO: 3215431 - DNA, 25 bp, Homo sapien
ggtgaacaaatcctgagtgacatct

SEQ ID NO: 3215432 - DNA, 25 bp, Homo sapien
ctgctggtgaacaaatcctgagtga

SEQ ID NO: 3215433 - DNA, 25 bp, Homo sapien
aggattctcccctgctaaacttaga

SEQ ID NO: 3215434 - DNA, 25 bp, Homo sapien
cctgctaaacttagaaggattcgaa

SEQ ID NO: 3215435 - DNA, 25 bp, Homo sapien
attaatattggccttgtctagaagg

SEQ ID NO: 3215436 - DNA, 25 bp, Homo sapien
atgtcatcattaatattggccttgt

SEQ ID NO: 3215437 - DNA, 25 bp, Homo sapien
taatattggccttgtctagaaggac

SEQ ID NO: 3215438 - DNA, 25 bp, Homo sapien
tattggccttgtctagaaggacaca

SEQ ID NO: 3215439 - DNA, 25 bp, Homo sapien
tgttactccattctgccatacagca

SEQ ID NO: 3215440 - DNA, 25 bp, Homo sapien
agtggtaaccagagctttgtgcttc

SEQ ID NO: 3215441 - DNA, 25 bp, Homo sapien
gtttatgggggcaagacggcttcca

SEQ ID NO: 3215442 - DNA, 25 bp, Homo sapien
agtggcatcctaaggctggtttatg

SEQ ID NO: 3215443 - DNA, 25 bp, Homo sapien
agatgatgcagccaagccttccctt

SEQ ID NO: 3215444 - DNA, 25 bp, Homo sapien
ctcaggcaagcgtagaaggaagcat

SEQ ID NO: 3215445 - DNA, 25 bp, Homo sapien
tcccttaatgctgacctggtgactg

SEQ ID NO: 3215446 - DNA, 25 bp, Homo sapien
gcaagcgtagaaggaagcatgtgct

SEQ ID NO: 3215447 - DNA, 25 bp, Homo sapien
aacttgaggtgacttgaggcaaaat

SEQ ID NO: 3215448 - DNA, 25 bp, Homo sapien
gacatcctgatttgcatccccagaa

SEQ ID NO: 3215449 - DNA, 25 bp, Homo sapien
tctcatgcaagacagagggcctggc

SEQ ID NO: 3215450 - DNA, 25 bp, Homo sapien
aaggccattctgctaatatgtccca

SEQ ID NO: 3215451 - DNA, 25 bp, Homo sapien
tctgtccagagtctgcttccactgt

SEQ ID NO: 3215452 - DNA, 25 bp, Homo sapien
ccagagtctgcttccactgtcaact

SEQ ID NO: 3215453 - DNA, 25 bp, Homo sapien
tgcttccactgtcaactctggttac

SEQ ID NO: 3215454 - DNA, 25 bp, Homo sapien
ttccactgtcaactctggttaccat

SEQ ID NO: 3215455 - DNA, 25 bp, Homo sapien
gagttttgccaatgcagaagatgtg

SEQ ID NO: 3215456 - DNA, 25 bp, Homo sapien
tgagagttttgccaatgcagaagat

SEQ ID NO: 3215457 - DNA, 25 bp, Homo sapien
ctgagagttttgccaatgcagaaga

SEQ ID NO: 3215458 - DNA, 25 bp, Homo sapien
gagagttttgccaatgcagaagatg

SEQ ID NO: 3215459 - DNA, 25 bp, Homo sapien
gcgttgtggccaaagagagctccgt

SEQ ID NO: 3215460 - DNA, 25 bp, Homo sapien
caagcccacgttcattattcattgg

SEQ ID NO: 3215461 - DNA, 25 bp, Homo sapien
gagctccgtgctgctttcaagccca

SEQ ID NO: 3215462 - DNA, 25 bp, Homo sapien
tgctttcaagcccacgttcattatt

SEQ ID NO: 3215463 - DNA, 25 bp, Homo sapien
gtcagtgtcatctgccggttctcag

SEQ ID NO: 3215464 - DNA, 25 bp, Homo sapien
cctgcaccaacgctgacaccctgtg

SEQ ID NO: 3215465 - DNA, 25 bp, Homo sapien
ccaacgctgacaccctgtgtcagtg

SEQ ID NO: 3215466 - DNA, 25 bp, Homo sapien
gcaccaacgctgacaccctgtgtca

SEQ ID NO: 3215467 - DNA, 25 bp, Homo sapien
aggcttgccacactcctggtaaggg

SEQ ID NO: 3215468 - DNA, 25 bp, Homo sapien
ggcttagtctctcataagattgcag

SEQ ID NO: 3215469 - DNA, 25 bp, Homo sapien
tgcagcaaagtcattgcccacggct

SEQ ID NO: 3215470 - DNA, 25 bp, Homo sapien
tcatgaatgtgggagccacttagct

SEQ ID NO: 3215471 - DNA, 25 bp, Homo sapien
caagcccgcagctctagactagaca

SEQ ID NO: 3215472 - DNA, 25 bp, Homo sapien
caagaattggtggaatgtgatagga

SEQ ID NO: 3215473 - DNA, 25 bp, Homo sapien
cacagcctgtgcattccattgtctc

SEQ ID NO: 3215474 - DNA, 25 bp, Homo sapien
tcacacaaccagttaggcgcctgga

SEQ ID NO: 3215475 - DNA, 25 bp, Homo sapien
ttgtgtaaagcaaggttcacctggg

SEQ ID NO: 3215476 - DNA, 25 bp, Homo sapien
ttcaacatgcgactttcagggccct

SEQ ID NO: 3215477 - DNA, 25 bp, Homo sapien
gagtgacatcctcgtagaaggtaag

SEQ ID NO: 3215478 - DNA, 25 bp, Homo sapien
cctaggtgaggcagtaaaatcttgt

SEQ ID NO: 3215479 - DNA, 25 bp, Homo sapien
gatggtgccctctaaagattcctga

SEQ ID NO: 3215480 - DNA, 25 bp, Homo sapien
taaaacagactcaggtcaccgtggg

SEQ ID NO: 3215481 - DNA, 25 bp, Homo sapien
taatgcggacttctcaaggtcaggg

SEQ ID NO: 3215482 - DNA, 25 bp, Homo sapien
tcaggttggtaactccagcgcgtca

SEQ ID NO: 3215483 - DNA, 25 bp, Homo sapien
cagatcacctcaatagtatctgtgt

SEQ ID NO: 3215484 - DNA, 25 bp, Homo sapien
acctcaatagtatctgtgtcatcct

SEQ ID NO: 3215485 - DNA, 25 bp, Homo sapien
tcacctcaatagtatctgtgtcatc

SEQ ID NO: 3215486 - DNA, 25 bp, Homo sapien
gatcacctcaatagtatctgtgtca

SEQ ID NO: 3215487 - DNA, 25 bp, Homo sapien
tacaacaagtacctcgaatgggcat

SEQ ID NO: 3215488 - DNA, 25 bp, Homo sapien
ctgtgtggtaagtggtatccatggc

SEQ ID NO: 3215489 - DNA, 25 bp, Homo sapien
gctgaacctttgaatagagaaaatc

SEQ ID NO: 3215490 - DNA, 25 bp, Homo sapien
cacgtttaccactgagaaaaagatg

SEQ ID NO: 3215491 - DNA, 25 bp, Homo sapien
tcttcatagtctccggaagaaggtg

SEQ ID NO: 3215492 - DNA, 25 bp, Homo sapien
gctttcttcatagtctccggaagaa

SEQ ID NO: 3215493 - DNA, 25 bp, Homo sapien
ccaggccacggctgctttcttcata

SEQ ID NO: 3215494 - DNA, 25 bp, Homo sapien
tagtctccggaagaaggtggccacg

SEQ ID NO: 3215495 - DNA, 25 bp, Homo sapien
tgccccaactggcatttttggggaa

SEQ ID NO: 3215496 - DNA, 25 bp, Homo sapien
tccctgccccaactggcatttttgg

SEQ ID NO: 3215497 - DNA, 25 bp, Homo sapien
ctaaaaataacaaccatggccacac

SEQ ID NO: 3215498 - DNA, 25 bp, Homo sapien
cactaaaaataacaaccatggccac

SEQ ID NO: 3215499 - DNA, 25 bp, Homo sapien
ccttcttccccgctttgcctgatga

SEQ ID NO: 3215500 - DNA, 25 bp, Homo sapien
gcctgccttcttccccgctttgcct

SEQ ID NO: 3215501 - DNA, 25 bp, Homo sapien
tgccttcttccccgctttgcctgat

SEQ ID NO: 3215502 - DNA, 25 bp, Homo sapien
ttcttccccgctttgcctgatgagc

SEQ ID NO: 3215503 - DNA, 25 bp, Homo sapien
ttcaatttgggagcccttcacacaa

SEQ ID NO: 3215504 - DNA, 25 bp, Homo sapien
agaggctccgtttaatagtatccat

SEQ ID NO: 3215505 - DNA, 25 bp, Homo sapien
gggtgtcactatcacttcaatttgg

SEQ ID NO: 3215506 - DNA, 25 bp, Homo sapien
ggtgcagtagttactcccctatgct

SEQ ID NO: 3215507 - DNA, 25 bp, Homo sapien
gagatgtcaagatggtgcctgatga

SEQ ID NO: 3215508 - DNA, 25 bp, Homo sapien
cagagatgtcaagatggtgcctgat

SEQ ID NO: 3215509 - DNA, 25 bp, Homo sapien
tgtcaagatggtgcctgatgatgtc

SEQ ID NO: 3215510 - DNA, 25 bp, Homo sapien
agcagagatgtcaagatggtgcctg

SEQ ID NO: 3215511 - DNA, 25 bp, Homo sapien
gaatgctggtctgtgccctaaccta

SEQ ID NO: 3215512 - DNA, 25 bp, Homo sapien
tttcacacagaggagagtgcatgtg

SEQ ID NO: 3215513 - DNA, 25 bp, Homo sapien
aggaatgctggtctgtgccctaacc

SEQ ID NO: 3215514 - DNA, 25 bp, Homo sapien
catgtgaagccggttgccatgactg

SEQ ID NO: 3215515 - DNA, 25 bp, Homo sapien
gctgcttgtctcttcgtttttcagt

SEQ ID NO: 3215516 - DNA, 25 bp, Homo sapien
ctgcttgtctcttcgtttttcagtt

SEQ ID NO: 3215517 - DNA, 25 bp, Homo sapien
ccttttccttcagactgacctcctc

SEQ ID NO: 3215518 - DNA, 25 bp, Homo sapien
cagcaaacaggcctgcaagctgttg

SEQ ID NO: 3215519 - DNA, 25 bp, Homo sapien
tgatgggcatggccccaaaggcttg

SEQ ID NO: 3215520 - DNA, 25 bp, Homo sapien
gctgttggcagctgaatgtcgggct

SEQ ID NO: 3215521 - DNA, 25 bp, Homo sapien
gctgaatgtcgggctgccagagcca

SEQ ID NO: 3215522 - DNA, 25 bp, Homo sapien
cagtttcattgttcagaggggtcac

SEQ ID NO: 3215523 - DNA, 25 bp, Homo sapien
aagaagatggtaaggcctgcaaaca

SEQ ID NO: 3215524 - DNA, 25 bp, Homo sapien
catagagtccagacttaaggaggtg

SEQ ID NO: 3215525 - DNA, 25 bp, Homo sapien
aggaggtggtagagggacgatgaaa

SEQ ID NO: 3215526 - DNA, 25 bp, Homo sapien
ctccagctaaccgagcctgcagctt

SEQ ID NO: 3215527 - DNA, 25 bp, Homo sapien
tcctccagctaaccgagcctgcagc

SEQ ID NO: 3215528 - DNA, 25 bp, Homo sapien
tgtcctccagctaaccgagcctgca

SEQ ID NO: 3215529 - DNA, 25 bp, Homo sapien
ccagctaaccgagcctgcagcttgg

SEQ ID NO: 3215530 - DNA, 25 bp, Homo sapien
tcctgtctaatgtgcccactggaga

SEQ ID NO: 3215531 - DNA, 25 bp, Homo sapien
tggatgggaaagctgacgccactga

SEQ ID NO: 3215532 - DNA, 25 bp, Homo sapien
tgggaaagctgacgccactgaaatt

SEQ ID NO: 3215533 - DNA, 25 bp, Homo sapien
tctccatcctaatgtttcctgtcta

SEQ ID NO: 3215534 - DNA, 25 bp, Homo sapien
taggagtgggatagggcatgcaggg

SEQ ID NO: 3215535 - DNA, 25 bp, Homo sapien
gaggtaggagtgggatagggcatgc

SEQ ID NO: 3215536 - DNA, 25 bp, Homo sapien
ggtaggagtgggatagggcatgcag

SEQ ID NO: 3215537 - DNA, 25 bp, Homo sapien
aggagtgggatagggcatgcaggga

SEQ ID NO: 3215538 - DNA, 25 bp, Homo sapien
gtctttccaaggtcgtaatgagcaa

SEQ ID NO: 3215539 - DNA, 25 bp, Homo sapien
tctctggaacctcgagagttctgga

SEQ ID NO: 3215540 - DNA, 25 bp, Homo sapien
tgcaaacctcgaggaatagagaagc

SEQ ID NO: 3215541 - DNA, 25 bp, Homo sapien
taatgagcaatatgccaggccagtc

SEQ ID NO: 3215542 - DNA, 25 bp, Homo sapien
ggctgaagatggattctgcggatga

SEQ ID NO: 3215543 - DNA, 25 bp, Homo sapien
ctgcggatgacggatgacagggcaa

SEQ ID NO: 3215544 - DNA, 25 bp, Homo sapien
cggatgacggatgacagggcaaccc

SEQ ID NO: 3215545 - DNA, 25 bp, Homo sapien
ctgaagatggattctgcggatgacg

SEQ ID NO: 3215546 - DNA, 25 bp, Homo sapien
acagccaccttgttctttgcagcga

SEQ ID NO: 3215547 - DNA, 25 bp, Homo sapien
caggtttttgaatgcagcacattcc

SEQ ID NO: 3215548 - DNA, 25 bp, Homo sapien
cctgggagttctagtgtgggattct

SEQ ID NO: 3215549 - DNA, 25 bp, Homo sapien
ttgcagcgagggaggattttctgct

SEQ ID NO: 3215550 - DNA, 25 bp, Homo sapien
actgcgcaggccacaaatcactctg

SEQ ID NO: 3215551 - DNA, 25 bp, Homo sapien
aatgatcctgccccaactgcgcagg

SEQ ID NO: 3215552 - DNA, 25 bp, Homo sapien
tcactctgcggagacgctgtctgaa

SEQ ID NO: 3215553 - DNA, 25 bp, Homo sapien
tctgaaaggctgcccaaggtgtctg

SEQ ID NO: 3215554 - DNA, 25 bp, Homo sapien
caggctgaacccagcatctcgctgg

SEQ ID NO: 3215555 - DNA, 25 bp, Homo sapien
ggctctccttgtgtcccagaacggg

SEQ ID NO: 3215556 - DNA, 25 bp, Homo sapien
cttctcttccaagtataactgggac

SEQ ID NO: 3215557 - DNA, 25 bp, Homo sapien
catgtggattcagccagtcggtctc

SEQ ID NO: 3215558 - DNA, 25 bp, Homo sapien
gggctttgacgctggcccactcctt

SEQ ID NO: 3215559 - DNA, 25 bp, Homo sapien
gacgctggcccactccttccacaga

SEQ ID NO: 3215560 - DNA, 25 bp, Homo sapien
tggggctttgacgctggcccactcc

SEQ ID NO: 3215561 - DNA, 25 bp, Homo sapien
gctggcccactccttccacagacct

SEQ ID NO: 3215562 - DNA, 25 bp, Homo sapien
cccgggaggcaggaacatgcatgaa

SEQ ID NO: 3215563 - DNA, 25 bp, Homo sapien
gaggcaggaacatgcatgaaggaca

SEQ ID NO: 3215564 - DNA, 25 bp, Homo sapien
ggcccgggaggcaggaacatgcatg

SEQ ID NO: 3215565 - DNA, 25 bp, Homo sapien
aggaacatgcatgaaggacacagag

SEQ ID NO: 3215566 - DNA, 25 bp, Homo sapien
caaaggcaaggttacccagagcgga

SEQ ID NO: 3215567 - DNA, 25 bp, Homo sapien
tcctcttcggtagcacaaaggcaag

SEQ ID NO: 3215568 - DNA, 25 bp, Homo sapien
cactctctgaggagactggtctcgg

SEQ ID NO: 3215569 - DNA, 25 bp, Homo sapien
tttgagacagtctggacacatccac

SEQ ID NO: 3215570 - DNA, 25 bp, Homo sapien
cattagatacttcgcatctgcggta

SEQ ID NO: 3215571 - DNA, 25 bp, Homo sapien
tctgcggtagactgaaccagcacca

SEQ ID NO: 3215572 - DNA, 25 bp, Homo sapien
gaggcagtccattagatacttcgca

SEQ ID NO: 3215573 - DNA, 25 bp, Homo sapien
ccctagacaagaggcagtccattag

SEQ ID NO: 3215574 - DNA, 25 bp, Homo sapien
aggaaagcaagattcatagccaggt

SEQ ID NO: 3215575 - DNA, 25 bp, Homo sapien
catagccaggttccatcactagcaa

SEQ ID NO: 3215576 - DNA, 25 bp, Homo sapien
ggctctttagcttgttcgactgcga

SEQ ID NO: 3215577 - DNA, 25 bp, Homo sapien
gactgcgacaatgagcgccacactc

SEQ ID NO: 3215578 - DNA, 25 bp, Homo sapien
cactggacttattgttggttctcaa

SEQ ID NO: 3215579 - DNA, 25 bp, Homo sapien
tgtctccttgactcctgtggctcca

SEQ ID NO: 3215580 - DNA, 25 bp, Homo sapien
tgcccttgactttgaatggctcact

SEQ ID NO: 3215581 - DNA, 25 bp, Homo sapien
tctggtttcctggtagcccattggc

SEQ ID NO: 3215582 - DNA, 25 bp, Homo sapien
tattactgcttcctatacttccctg

SEQ ID NO: 3215583 - DNA, 25 bp, Homo sapien
tacttccctggatcggaatgcagtt

SEQ ID NO: 3215584 - DNA, 25 bp, Homo sapien
ctggatgactgcaacgaacttataa

SEQ ID NO: 3215585 - DNA, 25 bp, Homo sapien
gcaacgaacttataataggtcttcc

SEQ ID NO: 3215586 - DNA, 25 bp, Homo sapien
gggaaatccctggattggaatgcag

SEQ ID NO: 3215587 - DNA, 25 bp, Homo sapien
gaaatccctggattggaatgcagtt

SEQ ID NO: 3215588 - DNA, 25 bp, Homo sapien
tgggaaatccctggattggaatgca

SEQ ID NO: 3215589 - DNA, 25 bp, Homo sapien
ggaaatccctggattggaatgcagt

SEQ ID NO: 3215590 - DNA, 25 bp, Homo sapien
ggtgatgggtgtccgcacattagta

SEQ ID NO: 3215591 - DNA, 25 bp, Homo sapien
tgtccgcacattagtaggctctggg

SEQ ID NO: 3215592 - DNA, 25 bp, Homo sapien
tcagaatggatgcagcgtcacagac

SEQ ID NO: 3215593 - DNA, 25 bp, Homo sapien
agaaatgagaccgaggaggatcgtc

SEQ ID NO: 3215594 - DNA, 25 bp, Homo sapien
gaaacacagtcagcgcttggtggct

SEQ ID NO: 3215595 - DNA, 25 bp, Homo sapien
tgagccctcgagagaaaatcagcag

SEQ ID NO: 3215596 - DNA, 25 bp, Homo sapien
taactcgtgcgatgaggctggcatg

SEQ ID NO: 3215597 - DNA, 25 bp, Homo sapien
ggaactgccctttggtggaaacaca

SEQ ID NO: 3215598 - DNA, 25 bp, Homo sapien
aactttggtgcctcgatgtgcctga

SEQ ID NO: 3215599 - DNA, 25 bp, Homo sapien
ggagtttaccttgcactgtaccata

SEQ ID NO: 3215600 - DNA, 25 bp, Homo sapien
ctgtaccataactttggtgcctcga

SEQ ID NO: 3215601 - DNA, 25 bp, Homo sapien
cttgctgggagtttaccttgcactg

SEQ ID NO: 3215602 - DNA, 25 bp, Homo sapien
tgaaggtgggcaataaatcttgaca

SEQ ID NO: 3215603 - DNA, 25 bp, Homo sapien
gctcctgaaggtgggcaataaatct

SEQ ID NO: 3215604 - DNA, 25 bp, Homo sapien
cctgaaggtgggcaataaatcttga

SEQ ID NO: 3215605 - DNA, 25 bp, Homo sapien
ttccattgagcaaaagccttgagct

SEQ ID NO: 3215606 - DNA, 25 bp, Homo sapien
tttggcagatgaaggtcctgaggaa

SEQ ID NO: 3215607 - DNA, 25 bp, Homo sapien
ttgatcccacagaaccgcctgtact

SEQ ID NO: 3215608 - DNA, 25 bp, Homo sapien
tactttcgaaggatacagaggtctc

SEQ ID NO: 3215609 - DNA, 25 bp, Homo sapien
tcctgaggtggccttcagcactctc

SEQ ID NO: 3215610 - DNA, 25 bp, Homo sapien
gacgtagaacgtgacctttggcacc

SEQ ID NO: 3215611 - DNA, 25 bp, Homo sapien
cctgtcaagacgtagaacgtgacct

SEQ ID NO: 3215612 - DNA, 25 bp, Homo sapien
ggtttgatgcaggttttagacttac

SEQ ID NO: 3215613 - DNA, 25 bp, Homo sapien
tcaagacgtagaacgtgacctttgg

SEQ ID NO: 3215614 - DNA, 25 bp, Homo sapien
tgcaggcgaaggcacggaacaataa

SEQ ID NO: 3215615 - DNA, 25 bp, Homo sapien
gaacaataatcctctgtgcaaacag

SEQ ID NO: 3215616 - DNA, 25 bp, Homo sapien
gaaggcacggaacaataatcctctg

SEQ ID NO: 3215617 - DNA, 25 bp, Homo sapien
taatcctctgtgcaaacagctgctt

SEQ ID NO: 3215618 - DNA, 25 bp, Homo sapien
cccattggctctgtaagcggcatca

SEQ ID NO: 3215619 - DNA, 25 bp, Homo sapien
ctgtaagcggcatcaaaggctgaat

SEQ ID NO: 3215620 - DNA, 25 bp, Homo sapien
ctctgtaagcggcatcaaaggctga

SEQ ID NO: 3215621 - DNA, 25 bp, Homo sapien
ttggctctgtaagcggcatcaaagg

SEQ ID NO: 3215622 - DNA, 25 bp, Homo sapien
ggcaggagaagcaccactatcaaca

SEQ ID NO: 3215623 - DNA, 25 bp, Homo sapien
tgtgtcctggtaggaatatccatcc

SEQ ID NO: 3215624 - DNA, 25 bp, Homo sapien
cagagaagcacctttttaacattct

SEQ ID NO: 3215625 - DNA, 25 bp, Homo sapien
tcttttgtgagaagttggctatagc

SEQ ID NO: 3215626 - DNA, 25 bp, Homo sapien
gatgggccttacttctaggacacaa

SEQ ID NO: 3215627 - DNA, 25 bp, Homo sapien
tcaggactggtgaatggagaacccg

SEQ ID NO: 3215628 - DNA, 25 bp, Homo sapien
tctgggtctcggcacagtcaggact

SEQ ID NO: 3215629 - DNA, 25 bp, Homo sapien
tgagcccatacgcatgttcacatgt

SEQ ID NO: 3215630 - DNA, 25 bp, Homo sapien
caggccctgctggtagcaaaggtga

SEQ ID NO: 3215631 - DNA, 25 bp, Homo sapien
tgctggtagcaaaggtgaacctgaa

SEQ ID NO: 3215632 - DNA, 25 bp, Homo sapien
ttaccctttatgatcaggattgatc

SEQ ID NO: 3215633 - DNA, 25 bp, Homo sapien
gcagtgtgcatttaccctttatgat

SEQ ID NO: 3215634 - DNA, 25 bp, Homo sapien
gcagctgccagcgagtctcatgagt

SEQ ID NO: 3215635 - DNA, 25 bp, Homo sapien
tgattagcctgaaccaatcatccag

SEQ ID NO: 3215636 - DNA, 25 bp, Homo sapien
gaacttcaatgaattcacagaattg

SEQ ID NO: 3215637 - DNA, 25 bp, Homo sapien
tcacagaattgagctcctgaaccct

SEQ ID NO: 3215638 - DNA, 25 bp, Homo sapien
ttctgccaaggtggaaagtggccat

SEQ ID NO: 3215639 - DNA, 25 bp, Homo sapien
catcccaactgtacctttgcaggac

SEQ ID NO: 3215640 - DNA, 25 bp, Homo sapien
tgcaggacccaacgctgaccattga

SEQ ID NO: 3215641 - DNA, 25 bp, Homo sapien
acgctgaccattgagagactctggg

SEQ ID NO: 3215642 - DNA, 25 bp, Homo sapien
tgcacccgcagatgttgctgctact

SEQ ID NO: 3215643 - DNA, 25 bp, Homo sapien
gcattgcacccgcagatgttgctgc

SEQ ID NO: 3215644 - DNA, 25 bp, Homo sapien
cattcctgcattgcacccgcagatg

SEQ ID NO: 3215645 - DNA, 25 bp, Homo sapien
gggggccattcctgcattgcacccg

SEQ ID NO: 3215646 - DNA, 25 bp, Homo sapien
ccaggtgtgttatgaattacagaaa

SEQ ID NO: 3215647 - DNA, 25 bp, Homo sapien
tctgaacctcacgtggtctcttcct

SEQ ID NO: 3215648 - DNA, 25 bp, Homo sapien
tgtctctgaacctcacgtggtctct

SEQ ID NO: 3215649 - DNA, 25 bp, Homo sapien
ctggtatccaggtgtgttatgaatt

SEQ ID NO: 3215650 - DNA, 25 bp, Homo sapien
ttaatgatggtcatttcctcttgta

SEQ ID NO: 3215651 - DNA, 25 bp, Homo sapien
tttcagttcccttaatgatggtcat

SEQ ID NO: 3215652 - DNA, 25 bp, Homo sapien
tggtcatttcctcttgtagccccaa

SEQ ID NO: 3215653 - DNA, 25 bp, Homo sapien
gctttcagttcccttaatgatggtc

SEQ ID NO: 3215654 - DNA, 25 bp, Homo sapien
gacacagtcgtgttactgtttgcac

SEQ ID NO: 3215655 - DNA, 25 bp, Homo sapien
ccatgacagccacggaagagagagg

SEQ ID NO: 3215656 - DNA, 25 bp, Homo sapien
acagaatggacacagtcgtgttact

SEQ ID NO: 3215657 - DNA, 25 bp, Homo sapien
agagagaggccaacccgcagagtta

SEQ ID NO: 3215658 - DNA, 25 bp, Homo sapien
gctctctgcagctctaatgattagg

SEQ ID NO: 3215659 - DNA, 25 bp, Homo sapien
taagccataattaaggaatttcagg

SEQ ID NO: 3215660 - DNA, 25 bp, Homo sapien
taaggaatttcaggacctggaggtc

SEQ ID NO: 3215661 - DNA, 25 bp, Homo sapien
tgagtcaggtctagtagttggtttt

SEQ ID NO: 3215662 - DNA, 25 bp, Homo sapien
cactcaaaccctgcacacagaatgc

SEQ ID NO: 3215663 - DNA, 25 bp, Homo sapien
ctcaaaccctgcacacagaatgcct

SEQ ID NO: 3215664 - DNA, 25 bp, Homo sapien
caaaccctgcacacagaatgcctgg

SEQ ID NO: 3215665 - DNA, 25 bp, Homo sapien
gtcactcaaaccctgcacacagaat

SEQ ID NO: 3215666 - DNA, 25 bp, Homo sapien
gcttctctcgttgtgcaccttttgt

SEQ ID NO: 3215667 - DNA, 25 bp, Homo sapien
tctctcgttgtgcaccttttgtgtg

SEQ ID NO: 3215668 - DNA, 25 bp, Homo sapien
cttctctcgttgtgcaccttttgtg

SEQ ID NO: 3215669 - DNA, 25 bp, Homo sapien
ttctctcgttgtgcaccttttgtgt

SEQ ID NO: 3215670 - DNA, 25 bp, Homo sapien
gctcaattggaagcattaacctgca

SEQ ID NO: 3215671 - DNA, 25 bp, Homo sapien
tccattcggttcgtctcggtgccta

SEQ ID NO: 3215672 - DNA, 25 bp, Homo sapien
tcggtgcctacggaacagtccgagg

SEQ ID NO: 3215673 - DNA, 25 bp, Homo sapien
tatgcaatcgctccggttccattcg

SEQ ID NO: 3215674 - DNA, 25 bp, Homo sapien
aaggaagaccgggatgctgctcctc

SEQ ID NO: 3215675 - DNA, 25 bp, Homo sapien
cagcaaaaggaagaccgggatgctg

SEQ ID NO: 3215676 - DNA, 25 bp, Homo sapien
ggaagaccgggatgctgctcctcag

SEQ ID NO: 3215677 - DNA, 25 bp, Homo sapien
gcaaaaggaagaccgggatgctgct

SEQ ID NO: 3215678 - DNA, 25 bp, Homo sapien
tgtctcttgtgatcaatggctgtga

SEQ ID NO: 3215679 - DNA, 25 bp, Homo sapien
tttggccgccgagtctccaagtgag

SEQ ID NO: 3215680 - DNA, 25 bp, Homo sapien
tcactcctcggatctgaatgtgtgt

SEQ ID NO: 3215681 - DNA, 25 bp, Homo sapien
tatgcaattcttgggatcatgcaga

SEQ ID NO: 3215682 - DNA, 25 bp, Homo sapien
gctcttgacggtgtggatgtgccat

SEQ ID NO: 3215683 - DNA, 25 bp, Homo sapien
ccatgctgtttgtcagcagggagct

SEQ ID NO: 3215684 - DNA, 25 bp, Homo sapien
gcagggagctcttgacggtgtggat

SEQ ID NO: 3215685 - DNA, 25 bp, Homo sapien
atgctgtttgtcagcagggagctct

SEQ ID NO: 3215686 - DNA, 25 bp, Homo sapien
gaccagctttatatttagacccaag

SEQ ID NO: 3215687 - DNA, 25 bp, Homo sapien
gacaggatattagtatggaccagct

SEQ ID NO: 3215688 - DNA, 25 bp, Homo sapien
atatttagacccaagccccgaactg

SEQ ID NO: 3215689 - DNA, 25 bp, Homo sapien
tagtatggaccagctttatatttag

SEQ ID NO: 3215690 - DNA, 25 bp, Homo sapien
tgaggtccaacttcttgtgggatga

SEQ ID NO: 3215691 - DNA, 25 bp, Homo sapien
aagagttgactctgagcacagtgag

SEQ ID NO: 3215692 - DNA, 25 bp, Homo sapien
gggtaagccatgctcccctggatga

SEQ ID NO: 3215693 - DNA, 25 bp, Homo sapien
cagttctccccaagatgtactgcca

SEQ ID NO: 3215694 - DNA, 25 bp, Homo sapien
ggatccaaacgcagatgaagcagct

SEQ ID NO: 3215695 - DNA, 25 bp, Homo sapien
caacacaaagtgctgtcagctacac

SEQ ID NO: 3215696 - DNA, 25 bp, Homo sapien
gcagctcaggaagtggcgatacctt

SEQ ID NO: 3215697 - DNA, 25 bp, Homo sapien
gacaccagtttgtttgtgttgtgac

SEQ ID NO: 3215698 - DNA, 25 bp, Homo sapien
catcagatatagtcatgtatctttg

SEQ ID NO: 3215699 - DNA, 25 bp, Homo sapien
tcctcctaactctgtaaatttgtga

SEQ ID NO: 3215700 - DNA, 25 bp, Homo sapien
gtcatgtatctttgaatgtctcctc

SEQ ID NO: 3215701 - DNA, 25 bp, Homo sapien
tctgtaaatttgtgaatgacgtggg

SEQ ID NO: 3215702 - DNA, 25 bp, Homo sapien
caaatcagcaggaagtttagacttc

SEQ ID NO: 3215703 - DNA, 25 bp, Homo sapien
aatcagcaggaagtttagacttctc

SEQ ID NO: 3215704 - DNA, 25 bp, Homo sapien
cagcaggaagtttagacttctcttg

SEQ ID NO: 3215705 - DNA, 25 bp, Homo sapien
tgtcaaatcagcaggaagtttagac

SEQ ID NO: 3215706 - DNA, 25 bp, Homo sapien
tcagtagcccaaagccttgccgtca

SEQ ID NO: 3215707 - DNA, 25 bp, Homo sapien
ttgccgtcagcaatctgtatctcca

SEQ ID NO: 3215708 - DNA, 25 bp, Homo sapien
tccaatataagataacaattcctct

SEQ ID NO: 3215709 - DNA, 25 bp, Homo sapien
taaatacccaaatcacaaaagtcca

SEQ ID NO: 3215710 - DNA, 25 bp, Homo sapien
taatatggacaaagtgtgttctggc

SEQ ID NO: 3215711 - DNA, 25 bp, Homo sapien
tatccagcagtgcagaaggtttggc

SEQ ID NO: 3215712 - DNA, 25 bp, Homo sapien
tagcaaattgaagcaagatatcatc

SEQ ID NO: 3215713 - DNA, 25 bp, Homo sapien
gaggaagtggaatctgatatccagc

SEQ ID NO: 3215714 - DNA, 25 bp, Homo sapien
ttctggccacaccaacactgactgg

SEQ ID NO: 3215715 - DNA, 25 bp, Homo sapien
gcctgctccaggagatcaggaggca

SEQ ID NO: 3215716 - DNA, 25 bp, Homo sapien
gccatagcccttctggattcccagt

SEQ ID NO: 3215717 - DNA, 25 bp, Homo sapien
caggaggcagtacaggaaccaggtt

SEQ ID NO: 3215718 - DNA, 25 bp, Homo sapien
aaagttcactcgctttccaaagcag

SEQ ID NO: 3215719 - DNA, 25 bp, Homo sapien
atttccagaaaaagttcactcgctt

SEQ ID NO: 3215720 - DNA, 25 bp, Homo sapien
cagaaaaagttcactcgctttccaa

SEQ ID NO: 3215721 - DNA, 25 bp, Homo sapien
ttcactcgctttccaaagcagtttc

SEQ ID NO: 3215722 - DNA, 25 bp, Homo sapien
gctcattcacgagaaaatgccctga

SEQ ID NO: 3215723 - DNA, 25 bp, Homo sapien
gatcctaggctagcaacttcctgag

SEQ ID NO: 3215724 - DNA, 25 bp, Homo sapien
tctgaaatggcaagcactagccagc

SEQ ID NO: 3215725 - DNA, 25 bp, Homo sapien
tgttttcttaactagcctccagcag

SEQ ID NO: 3215726 - DNA, 25 bp, Homo sapien
gatccggtgccagagcatcagactg

SEQ ID NO: 3215727 - DNA, 25 bp, Homo sapien
cggtgccagagcatcagactggatc

SEQ ID NO: 3215728 - DNA, 25 bp, Homo sapien
gccagagcatcagactggatcaggg

SEQ ID NO: 3215729 - DNA, 25 bp, Homo sapien
tggggctggcatcagatccggtgcc

SEQ ID NO: 3215730 - DNA, 25 bp, Homo sapien
ccctgaggctctgacgttcagagga

SEQ ID NO: 3215731 - DNA, 25 bp, Homo sapien
ggctctgacgttcagaggaggaggg

SEQ ID NO: 3215732 - DNA, 25 bp, Homo sapien
gaggctctgacgttcagaggaggag

SEQ ID NO: 3215733 - DNA, 25 bp, Homo sapien
ctccctgaggctctgacgttcagag

SEQ ID NO: 3215734 - DNA, 25 bp, Homo sapien
aagggctgcttgatgaaccaaagag

SEQ ID NO: 3215735 - DNA, 25 bp, Homo sapien
ggctgcttgatgaaccaaagaggag

SEQ ID NO: 3215736 - DNA, 25 bp, Homo sapien
gggctgcttgatgaaccaaagagga

SEQ ID NO: 3215737 - DNA, 25 bp, Homo sapien
gctgcttgatgaaccaaagaggagg

SEQ ID NO: 3215738 - DNA, 25 bp, Homo sapien
cctgagcttgggaggcgctgtcttt

SEQ ID NO: 3215739 - DNA, 25 bp, Homo sapien
ggctggcagatgaatgacttgttcc

SEQ ID NO: 3215740 - DNA, 25 bp, Homo sapien
gtaatttctactgacaagctcgctg

SEQ ID NO: 3215741 - DNA, 25 bp, Homo sapien
tggattccagactgcgtctgctgcg

SEQ ID NO: 3215742 - DNA, 25 bp, Homo sapien
tctgaacgctgatgcttggtgtgga

SEQ ID NO: 3215743 - DNA, 25 bp, Homo sapien
tggtgtctctgaacgctgatgcttg

SEQ ID NO: 3215744 - DNA, 25 bp, Homo sapien
aacgctgatgcttggtgtggatttt

SEQ ID NO: 3215745 - DNA, 25 bp, Homo sapien
ccacttggtgtctctgaacgctgat

SEQ ID NO: 3215746 - DNA, 25 bp, Homo sapien
actttgcaggttcctgaactttgac

SEQ ID NO: 3215747 - DNA, 25 bp, Homo sapien
ggtgaaaagctcatagctcctgacc

SEQ ID NO: 3215748 - DNA, 25 bp, Homo sapien
gggcatcacactgggcaccaaaggt

SEQ ID NO: 3215749 - DNA, 25 bp, Homo sapien
ctttgactgtctgttgcaaaatggc

SEQ ID NO: 3215750 - DNA, 25 bp, Homo sapien
ctgctccgatcaggcagagctgaag

SEQ ID NO: 3215751 - DNA, 25 bp, Homo sapien
cacagctagccagctgaggggccat

SEQ ID NO: 3215752 - DNA, 25 bp, Homo sapien
ctgtgcatgaacacagctagccagc

SEQ ID NO: 3215753 - DNA, 25 bp, Homo sapien
cagagctgaagctgtgcatgaacac

SEQ ID NO: 3215754 - DNA, 25 bp, Homo sapien
ggttcctcaagaggactgtcaggct

SEQ ID NO: 3215755 - DNA, 25 bp, Homo sapien
gcaacccaagggttcctcaagagga

SEQ ID NO: 3215756 - DNA, 25 bp, Homo sapien
ggagctgcaacccaagggttcctca

SEQ ID NO: 3215757 - DNA, 25 bp, Homo sapien
cctccctgtggaccacgaggaggtg

SEQ ID NO: 3215758 - DNA, 25 bp, Homo sapien
cacggcagatgagggagctcaattt

SEQ ID NO: 3215759 - DNA, 25 bp, Homo sapien
gaaaggcccttcttgcacggcagat

SEQ ID NO: 3215760 - DNA, 25 bp, Homo sapien
gagctcaatttgctgtcctgaggac

SEQ ID NO: 3215761 - DNA, 25 bp, Homo sapien
gacgggcagggagctgactcataac

SEQ ID NO: 3215762 - DNA, 25 bp, Homo sapien
gaattgattagaggctacaaaagac

SEQ ID NO: 3215763 - DNA, 25 bp, Homo sapien
ggttttctgtacacttctccctgag

SEQ ID NO: 3215764 - DNA, 25 bp, Homo sapien
gaggctacaaaagacctctttgctt

SEQ ID NO: 3215765 - DNA, 25 bp, Homo sapien
tccctaaagtgaaatggggatcaag

SEQ ID NO: 3215766 - DNA, 25 bp, Homo sapien
cctgtactgtactcccagtggccaa

SEQ ID NO: 3215767 - DNA, 25 bp, Homo sapien
gatgaacgtacatcgtaaaactgac

SEQ ID NO: 3215768 - DNA, 25 bp, Homo sapien
gagcatctgcaacaaaaagtcattt

SEQ ID NO: 3215769 - DNA, 25 bp, Homo sapien
tgtagtaaaggcgtcacatgcaaac

SEQ ID NO: 3215770 - DNA, 25 bp, Homo sapien
taaactgtttgattgagaaaagagg

SEQ ID NO: 3215771 - DNA, 25 bp, Homo sapien
gagaagaggtagtatgtagtttgct

SEQ ID NO: 3215772 - DNA, 25 bp, Homo sapien
ctgatatgttcagaagcttaatgaa

SEQ ID NO: 3215773 - DNA, 25 bp, Homo sapien
tttgctaaattagaaaaggtgatga

SEQ ID NO: 3215774 - DNA, 25 bp, Homo sapien
ctttttctgggaatatacaatttca

SEQ ID NO: 3215775 - DNA, 25 bp, Homo sapien
caccatgcctgtcaaaagttagttt

SEQ ID NO: 3215776 - DNA, 25 bp, Homo sapien
tcaaacatttggaggtctcaagtgt

SEQ ID NO: 3215777 - DNA, 25 bp, Homo sapien
tctcctaaacaggtagggaatcatg

SEQ ID NO: 3215778 - DNA, 25 bp, Homo sapien
cagagtcttttggaatctcctaaac

SEQ ID NO: 3215779 - DNA, 25 bp, Homo sapien
tcagtcactagctttttctgtgcta

SEQ ID NO: 3215780 - DNA, 25 bp, Homo sapien
cagtcactagctttttctgtgctac

SEQ ID NO: 3215781 - DNA, 25 bp, Homo sapien
ttcactgggttagccaggatgtctc

SEQ ID NO: 3215782 - DNA, 25 bp, Homo sapien
tcactgggttagccaggatgtctca

SEQ ID NO: 3215783 - DNA, 25 bp, Homo sapien
cactgggttagccaggatgtctcaa

SEQ ID NO: 3215784 - DNA, 25 bp, Homo sapien
ctgccaccacacctggctaattttt

SEQ ID NO: 3215785 - DNA, 25 bp, Homo sapien
ttctatgccttgcagcttttccttt

SEQ ID NO: 3215786 - DNA, 25 bp, Homo sapien
cttgtttctatgccttgcagctttt

SEQ ID NO: 3215787 - DNA, 25 bp, Homo sapien
ctatgccttgcagcttttcctttaa

SEQ ID NO: 3215788 - DNA, 25 bp, Homo sapien
tgtttctatgccttgcagcttttcc

SEQ ID NO: 3215789 - DNA, 25 bp, Homo sapien
tctaatggatgttgtgatttcagcc

SEQ ID NO: 3215790 - DNA, 25 bp, Homo sapien
gattatccatcgaatgtcccaggca

SEQ ID NO: 3215791 - DNA, 25 bp, Homo sapien
tgagctgtggagcactctaatggat

SEQ ID NO: 3215792 - DNA, 25 bp, Homo sapien
tgaagaggttgagccgttcgacctg

SEQ ID NO: 3215793 - DNA, 25 bp, Homo sapien
gaatccatccagtaatttgctccct

SEQ ID NO: 3215794 - DNA, 25 bp, Homo sapien
gattggtaagttaaagaatccatcc

SEQ ID NO: 3215795 - DNA, 25 bp, Homo sapien
ggtggagctcattcctgttggttgt

SEQ ID NO: 3215796 - DNA, 25 bp, Homo sapien
acggttcttgaacagtgtgtgtgga

SEQ ID NO: 3215797 - DNA, 25 bp, Homo sapien
aatacccagttcaattgcatctgca

SEQ ID NO: 3215798 - DNA, 25 bp, Homo sapien
tacataatgtgctctttcgatgaat

SEQ ID NO: 3215799 - DNA, 25 bp, Homo sapien
aacttaaacttcagatttgatagta

SEQ ID NO: 3215800 - DNA, 25 bp, Homo sapien
cttcagatttgatagtacttcagat

SEQ ID NO: 3215801 - DNA, 25 bp, Homo sapien
taagaaacttaaacttcagatttga

SEQ ID NO: 3215802 - DNA, 25 bp, Homo sapien
aacttcagatttgatagtacttcag

SEQ ID NO: 3215803 - DNA, 25 bp, Homo sapien
taaattccacagtatcagtgtaaca

SEQ ID NO: 3215804 - DNA, 25 bp, Homo sapien
gactgtttgttaggattctactaga

SEQ ID NO: 3215805 - DNA, 25 bp, Homo sapien
agaaatgaattggaaactgagtacc

SEQ ID NO: 3215806 - DNA, 25 bp, Homo sapien
tgtctttgagattctttactttgtc

SEQ ID NO: 3215807 - DNA, 25 bp, Homo sapien
tgtgctcaaatgaacagtcctatcc

SEQ ID NO: 3215808 - DNA, 25 bp, Homo sapien
tatttggaaccattctactgtgctc

SEQ ID NO: 3215809 - DNA, 25 bp, Homo sapien
aacattagctggacggatctggccg

SEQ ID NO: 3215810 - DNA, 25 bp, Homo sapien
tcttcatgtgctgcctagcgttgct

SEQ ID NO: 3215811 - DNA, 25 bp, Homo sapien
ccagcatacagtcgctgaattcatt

SEQ ID NO: 3215812 - DNA, 25 bp, Homo sapien
cagcatacagtcgctgaattcattg

SEQ ID NO: 3215813 - DNA, 25 bp, Homo sapien
accagcatacagtcgctgaattcat

SEQ ID NO: 3215814 - DNA, 25 bp, Homo sapien
gaccagcatacagtcgctgaattca

SEQ ID NO: 3215815 - DNA, 25 bp, Homo sapien
tgttaactagaattcatgttttctt

SEQ ID NO: 3215816 - DNA, 25 bp, Homo sapien
ggtcttagctcttatagtttcccag

SEQ ID NO: 3215817 - DNA, 25 bp, Homo sapien
tctagatatttagaatgttggtctt

SEQ ID NO: 3215818 - DNA, 25 bp, Homo sapien
gaatgttggtcttagctcttatagt

SEQ ID NO: 3215819 - DNA, 25 bp, Homo sapien
gacctaggctttattgatcagatgc

SEQ ID NO: 3215820 - DNA, 25 bp, Homo sapien
gattctgatattggagctgtgtgca

SEQ ID NO: 3215821 - DNA, 25 bp, Homo sapien
tgtgcaataactgataagtctctgg

SEQ ID NO: 3215822 - DNA, 25 bp, Homo sapien
tagggcacaagcatatgacctaggc

SEQ ID NO: 3215823 - DNA, 25 bp, Homo sapien
ctctactaagaggtctggaagacac

SEQ ID NO: 3215824 - DNA, 25 bp, Homo sapien
agggcagtgccagcatatatgaaaa

SEQ ID NO: 3215825 - DNA, 25 bp, Homo sapien
ttctcgttcaagtagccaggagtgg

SEQ ID NO: 3215826 - DNA, 25 bp, Homo sapien
aattgtttgctcctttggtctcagc

SEQ ID NO: 3215827 - DNA, 25 bp, Homo sapien
tgtggtactgtttcatatgtaccgc

SEQ ID NO: 3215828 - DNA, 25 bp, Homo sapien
gagatctgtggtactgtttcatatg

SEQ ID NO: 3215829 - DNA, 25 bp, Homo sapien
ggagagatctgtggtactgtttcat

SEQ ID NO: 3215830 - DNA, 25 bp, Homo sapien
tgtttcatatgtaccgccctcctct

SEQ ID NO: 3215831 - DNA, 25 bp, Homo sapien
ttaatatcgtcctccattcttatca

SEQ ID NO: 3215832 - DNA, 25 bp, Homo sapien
tatcgtcctccattcttatcaaagc

SEQ ID NO: 3215833 - DNA, 25 bp, Homo sapien
aaagctttcagtggtttcctgttgt

SEQ ID NO: 3215834 - DNA, 25 bp, Homo sapien
tccattcttatcaaagctttcagtg

SEQ ID NO: 3215835 - DNA, 25 bp, Homo sapien
ggtgagagagcaagaccctgtttca

SEQ ID NO: 3215836 - DNA, 25 bp, Homo sapien
agtggctcatggctgtaatcccagc

SEQ ID NO: 3215837 - DNA, 25 bp, Homo sapien
gatcctgccactatactttagcctg

SEQ ID NO: 3215838 - DNA, 25 bp, Homo sapien
ataaataaaatagtaggctgggtgc

SEQ ID NO: 3215839 - DNA, 25 bp, Homo sapien
gctaaacttagatgttggcctttaa

SEQ ID NO: 3215840 - DNA, 25 bp, Homo sapien
aaagagctaaacttagatgttggcc

SEQ ID NO: 3215841 - DNA, 25 bp, Homo sapien
tatagagtgctgaagctgagcgtga

SEQ ID NO: 3215842 - DNA, 25 bp, Homo sapien
aatactaagtatagagtgctgaagc

SEQ ID NO: 3215843 - DNA, 25 bp, Homo sapien
ggactggtcccctttgcacatttgg

SEQ ID NO: 3215844 - DNA, 25 bp, Homo sapien
aagtgcttagtgttgtgcttgccca

SEQ ID NO: 3215845 - DNA, 25 bp, Homo sapien
tattgatctcctaggaagtgtgtcc

SEQ ID NO: 3215846 - DNA, 25 bp, Homo sapien
ttttcacaacataggtccgttctgg

SEQ ID NO: 3215847 - DNA, 25 bp, Homo sapien
aggaagccagagcatatgtgcgcac

SEQ ID NO: 3215848 - DNA, 25 bp, Homo sapien
tctaaaagtgtgagtggccccggga

SEQ ID NO: 3215849 - DNA, 25 bp, Homo sapien
cggcgccgcggctcttttctaaaag

SEQ ID NO: 3215850 - DNA, 25 bp, Homo sapien
ctgatgttctccagtagtgttggga

SEQ ID NO: 3215851 - DNA, 25 bp, Homo sapien
gctgccgcttcagtccgaaggagga

SEQ ID NO: 3215852 - DNA, 25 bp, Homo sapien
gccctggacgggcagaagccgcagc

SEQ ID NO: 3215853 - DNA, 25 bp, Homo sapien
ggccctggacgggcagaagccgcag

SEQ ID NO: 3215854 - DNA, 25 bp, Homo sapien
tggccctggacgggcagaagccgca

SEQ ID NO: 3215855 - DNA, 25 bp, Homo sapien
tcttgccccggagtgtatgaaccgg

SEQ ID NO: 3215856 - DNA, 25 bp, Homo sapien
gggccgtagcatcttgccccggagt

SEQ ID NO: 3215857 - DNA, 25 bp, Homo sapien
ccagccgcagcgacacatgcgggag

SEQ ID NO: 3215858 - DNA, 25 bp, Homo sapien
gggaccccgatgtgaagcggcggct

SEQ ID NO: 3215859 - DNA, 25 bp, Homo sapien
ctgctccgcggtgagagaacgctga

SEQ ID NO: 3215860 - DNA, 25 bp, Homo sapien
acgctgaggaggcgccagagcttct

SEQ ID NO: 3215861 - DNA, 25 bp, Homo sapien
cagagcttctgcctcgtcccgtggg

SEQ ID NO: 3215862 - DNA, 25 bp, Homo sapien
gcagggaggcggctaccacgggccg

SEQ ID NO: 3215863 - DNA, 25 bp, Homo sapien
ctcttcccttggagcgtcatcagag

SEQ ID NO: 3215864 - DNA, 25 bp, Homo sapien
cttggagcgtcatcagagcgcgcca

SEQ ID NO: 3215865 - DNA, 25 bp, Homo sapien
tcccttggagcgtcatcagagcgcg

SEQ ID NO: 3215866 - DNA, 25 bp, Homo sapien
tggagcgtcatcagagcgcgccaga

SEQ ID NO: 3215867 - DNA, 25 bp, Homo sapien
cggcagcttaggctcgactcggctc

SEQ ID NO: 3215868 - DNA, 25 bp, Homo sapien
taagatcgggcggcagcttaggctc

SEQ ID NO: 3215869 - DNA, 25 bp, Homo sapien
tctcttcagttctgacgcggccgta

SEQ ID NO: 3215870 - DNA, 25 bp, Homo sapien
tgacgcggccgtagaggcggcagcg

SEQ ID NO: 3215871 - DNA, 25 bp, Homo sapien
acttcaggtcaagggcagtagggtc

SEQ ID NO: 3215872 - DNA, 25 bp, Homo sapien
tagggatgcatgcttgcgacaaagc

SEQ ID NO: 3215873 - DNA, 25 bp, Homo sapien
tagggtaactcctcgatcagtccgg

SEQ ID NO: 3215874 - DNA, 25 bp, Homo sapien
caatctgcgcgaggatgggtccctt

SEQ ID NO: 3215875 - DNA, 25 bp, Homo sapien
ttcctatctgccttcacgtggcctc

SEQ ID NO: 3215876 - DNA, 25 bp, Homo sapien
tttcagggtctccaacccatgtcat

SEQ ID NO: 3215877 - DNA, 25 bp, Homo sapien
atctgccttcacgtggcctctttca

SEQ ID NO: 3215878 - DNA, 25 bp, Homo sapien
ctttcagggtctccaacccatgtca

SEQ ID NO: 3215879 - DNA, 25 bp, Homo sapien
tgactaaggtcagcagtattggccg

SEQ ID NO: 3215880 - DNA, 25 bp, Homo sapien
ggtcagcagtattggccgtctcctg

SEQ ID NO: 3215881 - DNA, 25 bp, Homo sapien
tgagtgttagttcctgtttgcacca

SEQ ID NO: 3215882 - DNA, 25 bp, Homo sapien
tgagtgccttgtgcattgaaacctg

SEQ ID NO: 3215883 - DNA, 25 bp, Homo sapien
tctgcagttgcccaaagcactccct

SEQ ID NO: 3215884 - DNA, 25 bp, Homo sapien
aacagaaactttgtcaactgtgttt

SEQ ID NO: 3215885 - DNA, 25 bp, Homo sapien
gcatgaaggctcttcgttaattttc

SEQ ID NO: 3215886 - DNA, 25 bp, Homo sapien
agcactccctttaagaacagaaact

SEQ ID NO: 3215887 - DNA, 25 bp, Homo sapien
caaaggcagactgacggcatgagca

SEQ ID NO: 3215888 - DNA, 25 bp, Homo sapien
ctgctcccgagctggtttatgatga

SEQ ID NO: 3215889 - DNA, 25 bp, Homo sapien
cctttatgggagagcttggcaggaa

SEQ ID NO: 3215890 - DNA, 25 bp, Homo sapien
ttctttaaggccattcctgggtggc

SEQ ID NO: 3215891 - DNA, 25 bp, Homo sapien
gaactcaatgcgatgagcacatttg

SEQ ID NO: 3215892 - DNA, 25 bp, Homo sapien
taactgacgtgcagaggcagcacgc

SEQ ID NO: 3215893 - DNA, 25 bp, Homo sapien
cttgggaactcctcgggtaactcat

SEQ ID NO: 3215894 - DNA, 25 bp, Homo sapien
tcattaagtgcggtgttgcaggcgc

SEQ ID NO: 3215895 - DNA, 25 bp, Homo sapien
gaagttggagatttatactccagaa

SEQ ID NO: 3215896 - DNA, 25 bp, Homo sapien
caaagtgatccatacagaagaagtt

SEQ ID NO: 3215897 - DNA, 25 bp, Homo sapien
gatattaccaacttgcatgagccct

SEQ ID NO: 3215898 - DNA, 25 bp, Homo sapien
aacaatgacgctttgtgggctctct

SEQ ID NO: 3215899 - DNA, 25 bp, Homo sapien
tcagaaaaggtcttggtagcgcctg

SEQ ID NO: 3215900 - DNA, 25 bp, Homo sapien
tactccatctgtctggtttgagccc

SEQ ID NO: 3215901 - DNA, 25 bp, Homo sapien
aaaaatacagagcagtaattgtaag

SEQ ID NO: 3215902 - DNA, 25 bp, Homo sapien
tggccgcttactccatctgtctggt

SEQ ID NO: 3215903 - DNA, 25 bp, Homo sapien
taagttagtattacttcatggccgc

SEQ ID NO: 3215904 - DNA, 25 bp, Homo sapien
gcaaggtggtgctcatcacctttca

SEQ ID NO: 3215905 - DNA, 25 bp, Homo sapien
caaggtggtgctcatcacctttcat

SEQ ID NO: 3215906 - DNA, 25 bp, Homo sapien
tcagcaaggtggtgctcatcacctt

SEQ ID NO: 3215907 - DNA, 25 bp, Homo sapien
tcatcagcaaggtggtgctcatcac

SEQ ID NO: 3215908 - DNA, 25 bp, Homo sapien
ggttccgagaacaatccgcagcaaa

SEQ ID NO: 3215909 - DNA, 25 bp, Homo sapien
tggcagcactaatcaggagggatga

SEQ ID NO: 3215910 - DNA, 25 bp, Homo sapien
cactgacaggaagggccattatggt

SEQ ID NO: 3215911 - DNA, 25 bp, Homo sapien
gatgaagccgttgctaagtgctgct

SEQ ID NO: 3215912 - DNA, 25 bp, Homo sapien
ctgacactctgggaaagcgaatagc

SEQ ID NO: 3215913 - DNA, 25 bp, Homo sapien
tgttccacaggacgactatgcggag

SEQ ID NO: 3215914 - DNA, 25 bp, Homo sapien
ccttttccggtgttcccattggcat

SEQ ID NO: 3215915 - DNA, 25 bp, Homo sapien
tgctggtaaacactgacactctggg

SEQ ID NO: 3215916 - DNA, 25 bp, Homo sapien
tatctcctttaaagtgtgagtcttc

SEQ ID NO: 3215917 - DNA, 25 bp, Homo sapien
ttagcagtccctcaacagtgccagc

SEQ ID NO: 3215918 - DNA, 25 bp, Homo sapien
agtgtgagtcttccagccgcaggac

SEQ ID NO: 3215919 - DNA, 25 bp, Homo sapien
gacctgctttgacctatcgggcatt

SEQ ID NO: 3215920 - DNA, 25 bp, Homo sapien
actgccatgtcggctgcccaggagg

SEQ ID NO: 3215921 - DNA, 25 bp, Homo sapien
cactgccatgtcggctgcccaggag

SEQ ID NO: 3215922 - DNA, 25 bp, Homo sapien
ggcaagggaactacctgccatgtgg

SEQ ID NO: 3215923 - DNA, 25 bp, Homo sapien
tggcaagggaactacctgccatgtg

SEQ ID NO: 3215924 - DNA, 25 bp, Homo sapien
ttctggcaagggaactacctgccat

SEQ ID NO: 3215925 - DNA, 25 bp, Homo sapien
tctggcaagggaactacctgccatg

SEQ ID NO: 3215926 - DNA, 25 bp, Homo sapien
agaaatggtccttccaagaggaaga

SEQ ID NO: 3215927 - DNA, 25 bp, Homo sapien
gaaatggtccttccaagaggaagaa

SEQ ID NO: 3215928 - DNA, 25 bp, Homo sapien
ggagacagtgcacagaaatggtcct

SEQ ID NO: 3215929 - DNA, 25 bp, Homo sapien
aaatggaccacagcgtggagttaca

SEQ ID NO: 3215930 - DNA, 25 bp, Homo sapien
tggaaatggaccacagcgtggagtt

SEQ ID NO: 3215931 - DNA, 25 bp, Homo sapien
agtgagaagggtctggaaatggacc

SEQ ID NO: 3215932 - DNA, 25 bp, Homo sapien
gaccacagcgtggagttacacagga

SEQ ID NO: 3215933 - DNA, 25 bp, Homo sapien
cagactggcatgttgcctcttcaca

SEQ ID NO: 3215934 - DNA, 25 bp, Homo sapien
tcgtgctggcttgcaggatactcca

SEQ ID NO: 3215935 - DNA, 25 bp, Homo sapien
cacagccatagtcgtgctggcttgc

SEQ ID NO: 3215936 - DNA, 25 bp, Homo sapien
caagcagactggcatgttgcctctt

SEQ ID NO: 3215937 - DNA, 25 bp, Homo sapien
aggttcaagcaattctcttgcctca

SEQ ID NO: 3215938 - DNA, 25 bp, Homo sapien
tggggttttcaccatgttggtcagg

SEQ ID NO: 3215939 - DNA, 25 bp, Homo sapien
gcctcccaagcaactgagattacag

SEQ ID NO: 3215940 - DNA, 25 bp, Homo sapien
gagattacaggcctgtgtcactatg

SEQ ID NO: 3215941 - DNA, 25 bp, Homo sapien
cagcacatctgaatgaggctttgtg

SEQ ID NO: 3215942 - DNA, 25 bp, Homo sapien
ttgtgttttccttgctctcttgcat

SEQ ID NO: 3215943 - DNA, 25 bp, Homo sapien
gctttgtgttttccttgctctcttg

SEQ ID NO: 3215944 - DNA, 25 bp, Homo sapien
gcacatctgaatgaggctttgtgtt

SEQ ID NO: 3215945 - DNA, 25 bp, Homo sapien
tccacagtcctgatgaggtggcgtt

SEQ ID NO: 3215946 - DNA, 25 bp, Homo sapien
aacttgtagaccctagcatggccag

SEQ ID NO: 3215947 - DNA, 25 bp, Homo sapien
gaactaatgttctcctcagctgaaa

SEQ ID NO: 3215948 - DNA, 25 bp, Homo sapien
tcagagaaactaggaatcttcagtg

SEQ ID NO: 3215949 - DNA, 25 bp, Homo sapien
gatggtttgtgatctcttcagtcac

SEQ ID NO: 3215950 - DNA, 25 bp, Homo sapien
agaaattgtaagctggacaccattg

SEQ ID NO: 3215951 - DNA, 25 bp, Homo sapien
ttggcttcctgatggtttgtgatct

SEQ ID NO: 3215952 - DNA, 25 bp, Homo sapien
gtaagctggacaccattggcttcct

SEQ ID NO: 3215953 - DNA, 25 bp, Homo sapien
gtcccacaggcgaggcaactagtag

SEQ ID NO: 3215954 - DNA, 25 bp, Homo sapien
tgtccgttgctcacggtccacagag

SEQ ID NO: 3215955 - DNA, 25 bp, Homo sapien
taagagctgctacactctgggagtg

SEQ ID NO: 3215956 - DNA, 25 bp, Homo sapien
tggcagtgggcaccatagcttgagc

SEQ ID NO: 3215957 - DNA, 25 bp, Homo sapien
cacagcattgcttgaatagtggccc

SEQ ID NO: 3215958 - DNA, 25 bp, Homo sapien
aaaccacagcattgcttgaatagtg

SEQ ID NO: 3215959 - DNA, 25 bp, Homo sapien
agcattgcttgaatagtggcccaga

SEQ ID NO: 3215960 - DNA, 25 bp, Homo sapien
accacagcattgcttgaatagtggc

SEQ ID NO: 3215961 - DNA, 25 bp, Homo sapien
catttacgcggctggatatgtgcat

SEQ ID NO: 3215962 - DNA, 25 bp, Homo sapien
tatgagatcatttacgcggctggat

SEQ ID NO: 3215963 - DNA, 25 bp, Homo sapien
taattcgtatgagatcatttacgcg

SEQ ID NO: 3215964 - DNA, 25 bp, Homo sapien
tcctccgtgcctataattcgtatga

SEQ ID NO: 3215965 - DNA, 25 bp, Homo sapien
tcattctgcagacacgttggaacct

SEQ ID NO: 3215966 - DNA, 25 bp, Homo sapien
cagattctagcttttggagcactgg

SEQ ID NO: 3215967 - DNA, 25 bp, Homo sapien
cactgtctatcctgagacatgcaga

SEQ ID NO: 3215968 - DNA, 25 bp, Homo sapien
ggaacctcaggcgaagccatcttat

SEQ ID NO: 3215969 - DNA, 25 bp, Homo sapien
tgagggcggtgaatttctgaaagca

SEQ ID NO: 3215970 - DNA, 25 bp, Homo sapien
ctttgagcttctgcaagtgagggcg

SEQ ID NO: 3215971 - DNA, 25 bp, Homo sapien
aaagcaactgctccatttctccaag

SEQ ID NO: 3215972 - DNA, 25 bp, Homo sapien
gactctgtcccctgactgtgcactt

SEQ ID NO: 3215973 - DNA, 25 bp, Homo sapien
cggatgaacatctggtctgaagtga

SEQ ID NO: 3215974 - DNA, 25 bp, Homo sapien
ctgaagtgagcgttctcagcagacc

SEQ ID NO: 3215975 - DNA, 25 bp, Homo sapien
aaataaagacggatgaacatctggt

SEQ ID NO: 3215976 - DNA, 25 bp, Homo sapien
catctggtctgaagtgagcgttctc

SEQ ID NO: 3215977 - DNA, 25 bp, Homo sapien
caggaactcagttccaggtgtctgc

SEQ ID NO: 3215978 - DNA, 25 bp, Homo sapien
ggaagctttagatgcctactggagg

SEQ ID NO: 3215979 - DNA, 25 bp, Homo sapien
caggaagctttagatgcctactgga

SEQ ID NO: 3215980 - DNA, 25 bp, Homo sapien
gctttagatgcctactggagggcag

SEQ ID NO: 3215981 - DNA, 25 bp, Homo sapien
gaagctttagatgcctactggaggg

SEQ ID NO: 3215982 - DNA, 25 bp, Homo sapien
cccactatcgaatgcacagaggaga

SEQ ID NO: 3215983 - DNA, 25 bp, Homo sapien
agacaaccccactatcgaatgcaca

SEQ ID NO: 3215984 - DNA, 25 bp, Homo sapien
atctgagaggagagtactgtcaggc

SEQ ID NO: 3215985 - DNA, 25 bp, Homo sapien
tgagaggagagtactgtcaggctaa

SEQ ID NO: 3215986 - DNA, 25 bp, Homo sapien
gatgtgtgaggtctctctgaaagag

SEQ ID NO: 3215987 - DNA, 25 bp, Homo sapien
tagtaacgtgatgttctgctctcat

SEQ ID NO: 3215988 - DNA, 25 bp, Homo sapien
tagacctcctggtatgaaatttgca

SEQ ID NO: 3215989 - DNA, 25 bp, Homo sapien
cagggaaagggaaacatgatgtagt

SEQ ID NO: 3215990 - DNA, 25 bp, Homo sapien
ttaagagtggctgttaacccatagg

SEQ ID NO: 3215991 - DNA, 25 bp, Homo sapien
ccactgcattaagagtggctgttaa

SEQ ID NO: 3215992 - DNA, 25 bp, Homo sapien
cattaagagtggctgttaacccata

SEQ ID NO: 3215993 - DNA, 25 bp, Homo sapien
ctgcattaagagtggctgttaaccc

SEQ ID NO: 3215994 - DNA, 25 bp, Homo sapien
aatctccatggacgattatgggcct

SEQ ID NO: 3215995 - DNA, 25 bp, Homo sapien
attatgggccttagtcagtgtttct

SEQ ID NO: 3215996 - DNA, 25 bp, Homo sapien
aggtcactttcacccaagaagccca

SEQ ID NO: 3215997 - DNA, 25 bp, Homo sapien
catggacgattatgggccttagtca

SEQ ID NO: 3215998 - DNA, 25 bp, Homo sapien
taatgactgtcttcacgaacaatgg

SEQ ID NO: 3215999 - DNA, 25 bp, Homo sapien
taaactgtttaatggtgcatactcc

SEQ ID NO: 3216000 - DNA, 25 bp, Homo sapien
catagccaggttgtgtcctgaagag

SEQ ID NO: 3216001 - DNA, 25 bp, Homo sapien
gaagagtctggcatggttattctca

SEQ ID NO: 3216002 - DNA, 25 bp, Homo sapien
tgtggtccatgagcaacagtgtccc

SEQ ID NO: 3216003 - DNA, 25 bp, Homo sapien
tggtccatgagcaacagtgtcccag

SEQ ID NO: 3216004 - DNA, 25 bp, Homo sapien
ggtccatgagcaacagtgtcccagt

SEQ ID NO: 3216005 - DNA, 25 bp, Homo sapien
ctgtggtccatgagcaacagtgtcc

SEQ ID NO: 3216006 - DNA, 25 bp, Homo sapien
tcaccaccatctatagtctgagcat

SEQ ID NO: 3216007 - DNA, 25 bp, Homo sapien
gcactgtctgcagtccatgagcaat

SEQ ID NO: 3216008 - DNA, 25 bp, Homo sapien
ccatctatagtctgagcattggtgt

SEQ ID NO: 3216009 - DNA, 25 bp, Homo sapien
tgtagtccatgagcatcggtgtcct

SEQ ID NO: 3216010 - DNA, 25 bp, Homo sapien
actagagaaaagtaaagtgcagagc

SEQ ID NO: 3216011 - DNA, 25 bp, Homo sapien
tttggaaatgaactagagaaaagta

SEQ ID NO: 3216012 - DNA, 25 bp, Homo sapien
cgtttggaaatgaactagagaaaag

SEQ ID NO: 3216013 - DNA, 25 bp, Homo sapien
agagaaaagtaaagtgcagagcact

SEQ ID NO: 3216014 - DNA, 25 bp, Homo sapien
caagcacccacctaccagttgttgt

SEQ ID NO: 3216015 - DNA, 25 bp, Homo sapien
tccttcactcttggtggcgaccaag

SEQ ID NO: 3216016 - DNA, 25 bp, Homo sapien
catgaaagagctcttcacctatgga

SEQ ID NO: 3216017 - DNA, 25 bp, Homo sapien
caaggagtgggatgcgcatgtaccc

SEQ ID NO: 3216018 - DNA, 25 bp, Homo sapien
ggatacttaacttcaagccagtaag

SEQ ID NO: 3216019 - DNA, 25 bp, Homo sapien
aatggttgccaaggtttgctgacat

SEQ ID NO: 3216020 - DNA, 25 bp, Homo sapien
cagaaacgggattccaatggttgcc

SEQ ID NO: 3216021 - DNA, 25 bp, Homo sapien
gaaaatctactccagttgttgagga

SEQ ID NO: 3216022 - DNA, 25 bp, Homo sapien
tatatattgcttagggacatagaca

SEQ ID NO: 3216023 - DNA, 25 bp, Homo sapien
caaaaagatggtagtccagggctca

SEQ ID NO: 3216024 - DNA, 25 bp, Homo sapien
caataattacctttgacgagtgagg

SEQ ID NO: 3216025 - DNA, 25 bp, Homo sapien
catagacatgtttgaaaagtgggaa

SEQ ID NO: 3216026 - DNA, 25 bp, Homo sapien
tctctcgttgacctgtccttctagc

SEQ ID NO: 3216027 - DNA, 25 bp, Homo sapien
caggtgttctctctcgttgacctgt

SEQ ID NO: 3216028 - DNA, 25 bp, Homo sapien
tgttctctctcgttgacctgtcctt

SEQ ID NO: 3216029 - DNA, 25 bp, Homo sapien
cgttgacctgtccttctagctccat

SEQ ID NO: 3216030 - DNA, 25 bp, Homo sapien
gatccagatggagtaatttgagggt

SEQ ID NO: 3216031 - DNA, 25 bp, Homo sapien
gcaggtatacgtagacctgctggag

SEQ ID NO: 3216032 - DNA, 25 bp, Homo sapien
atgttggtatgcagggcaggtatac

SEQ ID NO: 3216033 - DNA, 25 bp, Homo sapien
gaaaagatgtgagctgcgtgcatac

SEQ ID NO: 3216034 - DNA, 25 bp, Homo sapien
caccgaagacaaatgccaatgctgg

SEQ ID NO: 3216035 - DNA, 25 bp, Homo sapien
ctaagcagccatagcaatttcctcc

SEQ ID NO: 3216036 - DNA, 25 bp, Homo sapien
gatacggcatcacaggaatttacac

SEQ ID NO: 3216037 - DNA, 25 bp, Homo sapien
gacaagccccactgaagaagactga

SEQ ID NO: 3216038 - DNA, 25 bp, Homo sapien
cccagagagagcctaaagctagcta

SEQ ID NO: 3216039 - DNA, 25 bp, Homo sapien
gctagctatttagtgcaaataaaat

SEQ ID NO: 3216040 - DNA, 25 bp, Homo sapien
taaaatagttgtttgctagctgtgg

SEQ ID NO: 3216041 - DNA, 25 bp, Homo sapien
gtgatttccacgtaaagtctcttga

SEQ ID NO: 3216042 - DNA, 25 bp, Homo sapien
gggaatcgcctccatatttgacata

SEQ ID NO: 3216043 - DNA, 25 bp, Homo sapien
tctgtaggcttggtgtgcctagtct

SEQ ID NO: 3216044 - DNA, 25 bp, Homo sapien
ctcttaagattgcttacctgtgtca

SEQ ID NO: 3216045 - DNA, 25 bp, Homo sapien
tttgccaaatggctagactgatgtt

SEQ ID NO: 3216046 - DNA, 25 bp, Homo sapien
tctctccttgtttatgctacttgcc

SEQ ID NO: 3216047 - DNA, 25 bp, Homo sapien
cctggaattgttcaagtgtgatcct

SEQ ID NO: 3216048 - DNA, 25 bp, Homo sapien
gaactctcttcaggtccattacatc

SEQ ID NO: 3216049 - DNA, 25 bp, Homo sapien
agggaagtgacctggaattgttcaa

SEQ ID NO: 3216050 - DNA, 25 bp, Homo sapien
tgaaggtttcacaggggagaggccc

SEQ ID NO: 3216051 - DNA, 25 bp, Homo sapien
aaggtttcacaggggagaggcccat

SEQ ID NO: 3216052 - DNA, 25 bp, Homo sapien
gaaggtttcacaggggagaggccca

SEQ ID NO: 3216053 - DNA, 25 bp, Homo sapien
ctgaaggtttcacaggggagaggcc

SEQ ID NO: 3216054 - DNA, 25 bp, Homo sapien
ggctgagtgcaatcatcaccgagca

SEQ ID NO: 3216055 - DNA, 25 bp, Homo sapien
gagcctgccaaagggctgagtgcaa

SEQ ID NO: 3216056 - DNA, 25 bp, Homo sapien
ccaaagggctgagtgcaatcatcac

SEQ ID NO: 3216057 - DNA, 25 bp, Homo sapien
gtgcaatcatcaccgagcagggacc

SEQ ID NO: 3216058 - DNA, 25 bp, Homo sapien
tgggctaccctctgttcccaagcac

SEQ ID NO: 3216059 - DNA, 25 bp, Homo sapien
tcctgggctaccctctgttcccaag

SEQ ID NO: 3216060 - DNA, 25 bp, Homo sapien
ctctgttcccaagcacctgacctac

SEQ ID NO: 3216061 - DNA, 25 bp, Homo sapien
gctcctgtcctgggctaccctctgt

SEQ ID NO: 3216062 - DNA, 25 bp, Homo sapien
tttttccggatgaccgagctctgct

SEQ ID NO: 3216063 - DNA, 25 bp, Homo sapien
gcttgccccattacttcttaaatag

SEQ ID NO: 3216064 - DNA, 25 bp, Homo sapien
tctggatttgtgatcgctttttgct

SEQ ID NO: 3216065 - DNA, 25 bp, Homo sapien
tttgctcgctctctcacagtagatt

SEQ ID NO: 3216066 - DNA, 25 bp, Homo sapien
ggtagggagaatgcgaagataaggc

SEQ ID NO: 3216067 - DNA, 25 bp, Homo sapien
tccacgctaccacagaagagcgaaa

SEQ ID NO: 3216068 - DNA, 25 bp, Homo sapien
cacgaagaaggttattccagtcccg

SEQ ID NO: 3216069 - DNA, 25 bp, Homo sapien
aggcagcagacggaatgcgggcgct

SEQ ID NO: 3216070 - DNA, 25 bp, Homo sapien
tgaccaaccgccgaggacagtcgga

SEQ ID NO: 3216071 - DNA, 25 bp, Homo sapien
agaaccagaaccaagagcagcgaag

SEQ ID NO: 3216072 - DNA, 25 bp, Homo sapien
gaggacagtcggaccggcgacctct

SEQ ID NO: 3216073 - DNA, 25 bp, Homo sapien
cggaagtgaggagaccggaagtagc

SEQ ID NO: 3216074 - DNA, 25 bp, Homo sapien
tgctcgggggcggggagcaactgca

SEQ ID NO: 3216075 - DNA, 25 bp, Homo sapien
ctcggctgctcgggggcggggagca

SEQ ID NO: 3216076 - DNA, 25 bp, Homo sapien
tcgggggcggggagcaactgcagct

SEQ ID NO: 3216077 - DNA, 25 bp, Homo sapien
ggggcggggagcaactgcagctgtc

SEQ ID NO: 3216078 - DNA, 25 bp, Homo sapien
tttccgccgctctctggaatcgcct

SEQ ID NO: 3216079 - DNA, 25 bp, Homo sapien
aagtcgaggcttatcctttccgccg

SEQ ID NO: 3216080 - DNA, 25 bp, Homo sapien
tcaaccctggcaaaaactgagcgga

SEQ ID NO: 3216081 - DNA, 25 bp, Homo sapien
tcttagggtaactcggtagcttcta

SEQ ID NO: 3216082 - DNA, 25 bp, Homo sapien
ttttcccacccaatgtatgcaaagc

SEQ ID NO: 3216083 - DNA, 25 bp, Homo sapien
acagcaagcctgaaggtggcccact

SEQ ID NO: 3216084 - DNA, 25 bp, Homo sapien
gacactttgtcaagaaaggtccgga

SEQ ID NO: 3216085 - DNA, 25 bp, Homo sapien
tatgcaaagccaagagagtgcctcc

SEQ ID NO: 3216086 - DNA, 25 bp, Homo sapien
ttatgcgaagttctggatctcttcc

SEQ ID NO: 3216087 - DNA, 25 bp, Homo sapien
tatgcgaagttctggatctcttccg

SEQ ID NO: 3216088 - DNA, 25 bp, Homo sapien
aagccgagactgtgacactacactc

SEQ ID NO: 3216089 - DNA, 25 bp, Homo sapien
gcagtaagccgagactgtgacacta

SEQ ID NO: 3216090 - DNA, 25 bp, Homo sapien
agtaagccgagactgtgacactaca

SEQ ID NO: 3216091 - DNA, 25 bp, Homo sapien
ctggggtcccagtgactcaggaagc

SEQ ID NO: 3216092 - DNA, 25 bp, Homo sapien
caaaccagttatattggaggccaaa

SEQ ID NO: 3216093 - DNA, 25 bp, Homo sapien
gatgttcagccctcacaaaccagtt

SEQ ID NO: 3216094 - DNA, 25 bp, Homo sapien
ggttctactgtaaatcagccagagg

SEQ ID NO: 3216095 - DNA, 25 bp, Homo sapien
tacatgggagtaacaagacttaaga

SEQ ID NO: 3216096 - DNA, 25 bp, Homo sapien
aagaatgttccccatgaatgctgca

SEQ ID NO: 3216097 - DNA, 25 bp, Homo sapien
gaatgttccccatgaatgctgcata

SEQ ID NO: 3216098 - DNA, 25 bp, Homo sapien
aaatttaataagaatgttccccatg

SEQ ID NO: 3216099 - DNA, 25 bp, Homo sapien
ttaataagaatgttccccatgaatg

SEQ ID NO: 3216100 - DNA, 25 bp, Homo sapien
tgtagacatgtactcctagcagctt

SEQ ID NO: 3216101 - DNA, 25 bp, Homo sapien
tactcctagcagctttccttataag

SEQ ID NO: 3216102 - DNA, 25 bp, Homo sapien
tcctagcagctttccttataagaac

SEQ ID NO: 3216103 - DNA, 25 bp, Homo sapien
gacatgtactcctagcagctttcct

SEQ ID NO: 3216104 - DNA, 25 bp, Homo sapien
taatgttcagcaaatgagaccagaa

SEQ ID NO: 3216105 - DNA, 25 bp, Homo sapien
tacggagtcatgaccgtgggtaagc

SEQ ID NO: 3216106 - DNA, 25 bp, Homo sapien
ccagtaagtgttgatgatataggca

SEQ ID NO: 3216107 - DNA, 25 bp, Homo sapien
tacaggaatggcgagtaagtacatt

SEQ ID NO: 3216108 - DNA, 25 bp, Homo sapien
aaagtgaaggctgggaactagcttc

SEQ ID NO: 3216109 - DNA, 25 bp, Homo sapien
tagagagctagtatattgtacaacc

SEQ ID NO: 3216110 - DNA, 25 bp, Homo sapien
gagctagtatattgtacaaccaaaa

SEQ ID NO: 3216111 - DNA, 25 bp, Homo sapien
aggctgggaactagcttcttgaatc

SEQ ID NO: 3216112 - DNA, 25 bp, Homo sapien
tattaggcacacactctgtacagct

SEQ ID NO: 3216113 - DNA, 25 bp, Homo sapien
aatttaccaatcagcttttgcaggc

SEQ ID NO: 3216114 - DNA, 25 bp, Homo sapien
gatctaaaggcatcgtcatgtacca

SEQ ID NO: 3216115 - DNA, 25 bp, Homo sapien
tacaagccagctttagccaccactg

SEQ ID NO: 3216116 - DNA, 25 bp, Homo sapien
tccctatttccggatgactttgttc

SEQ ID NO: 3216117 - DNA, 25 bp, Homo sapien
gccactgcatgttgtagttccctaa

SEQ ID NO: 3216118 - DNA, 25 bp, Homo sapien
gtctttcgcttccagaagttctggt

SEQ ID NO: 3216119 - DNA, 25 bp, Homo sapien
gccattttgtataattccctatttc

SEQ ID NO: 3216120 - DNA, 25 bp, Homo sapien
tctggcaaccactaccctacttgtt

SEQ ID NO: 3216121 - DNA, 25 bp, Homo sapien
acagaatctggcaaccactacccta

SEQ ID NO: 3216122 - DNA, 25 bp, Homo sapien
aattgaaacagtataacccattaag

SEQ ID NO: 3216123 - DNA, 25 bp, Homo sapien
ccatcttaacctatgtgtatagttc

SEQ ID NO: 3216124 - DNA, 25 bp, Homo sapien
caacttctccattactagtcactgg

SEQ ID NO: 3216125 - DNA, 25 bp, Homo sapien
cctattaaagctatgttcacgagag

SEQ ID NO: 3216126 - DNA, 25 bp, Homo sapien
tgttcacgagagtcatcaacttctc

SEQ ID NO: 3216127 - DNA, 25 bp, Homo sapien
gaatttttgggagattcttgagcca

SEQ ID NO: 3216128 - DNA, 25 bp, Homo sapien
ttgcattaagagaaagaaaagtgtt

SEQ ID NO: 3216129 - DNA, 25 bp, Homo sapien
tgcattaagagaaagaaaagtgttc

SEQ ID NO: 3216130 - DNA, 25 bp, Homo sapien
ctttgcattaagagaaagaaaagtg

SEQ ID NO: 3216131 - DNA, 25 bp, Homo sapien
attctttgcattaagagaaagaaaa

SEQ ID NO: 3216132 - DNA, 25 bp, Homo sapien
ggagcttaatcttgacaaactacta

SEQ ID NO: 3216133 - DNA, 25 bp, Homo sapien
cctaatagtttactggcctggagct

SEQ ID NO: 3216134 - DNA, 25 bp, Homo sapien
taacattagattcctgactgaagcc

SEQ ID NO: 3216135 - DNA, 25 bp, Homo sapien
gataccaaaatcatcagacatactt

SEQ ID NO: 3216136 - DNA, 25 bp, Homo sapien
tggagacattcagcaatatctggac

SEQ ID NO: 3216137 - DNA, 25 bp, Homo sapien
taaaataaacctcgagcttgaagac

SEQ ID NO: 3216138 - DNA, 25 bp, Homo sapien
gcttgtcataactgcagggtactac

SEQ ID NO: 3216139 - DNA, 25 bp, Homo sapien
ggaatgtgccaaccatcctacaatg

SEQ ID NO: 3216140 - DNA, 25 bp, Homo sapien
tcaagatgaatcacagaccatagtg

SEQ ID NO: 3216141 - DNA, 25 bp, Homo sapien
tcaggtcttacagttaggcttttaa

SEQ ID NO: 3216142 - DNA, 25 bp, Homo sapien
caaagtgtcttcaagatactgaagt

SEQ ID NO: 3216143 - DNA, 25 bp, Homo sapien
gaaaaatcttggtccctacttcaca

SEQ ID NO: 3216144 - DNA, 25 bp, Homo sapien
tacagagccacagaatggataagaa

SEQ ID NO: 3216145 - DNA, 25 bp, Homo sapien
atacagagccacagaatggataaga

SEQ ID NO: 3216146 - DNA, 25 bp, Homo sapien
aagatacagagccacagaatggata

SEQ ID NO: 3216147 - DNA, 25 bp, Homo sapien
aaagatacagagccacagaatggat

SEQ ID NO: 3216148 - DNA, 25 bp, Homo sapien
acaatgaatgcaaccgtacctcaca

SEQ ID NO: 3216149 - DNA, 25 bp, Homo sapien
gaatacaaatggtctaaatgctcta

SEQ ID NO: 3216150 - DNA, 25 bp, Homo sapien
gaatcttaacagttgtgagacagaa

SEQ ID NO: 3216151 - DNA, 25 bp, Homo sapien
gagagaatcagccattaccaaacca

SEQ ID NO: 3216152 - DNA, 25 bp, Homo sapien
acacaaagagggtagccattgctgg

SEQ ID NO: 3216153 - DNA, 25 bp, Homo sapien
ggacacaaagagggtagccattgct

SEQ ID NO: 3216154 - DNA, 25 bp, Homo sapien
ccattgctggctcgaatgcttgggt

SEQ ID NO: 3216155 - DNA, 25 bp, Homo sapien
attgctggctcgaatgcttgggttt

SEQ ID NO: 3216156 - DNA, 25 bp, Homo sapien
gagaaatacagtggtacacgaagca

SEQ ID NO: 3216157 - DNA, 25 bp, Homo sapien
ccaggagacacctcaagtactgtga

SEQ ID NO: 3216158 - DNA, 25 bp, Homo sapien
gagagaccaccaagacaacctatgt

SEQ ID NO: 3216159 - DNA, 25 bp, Homo sapien
aacaaatcagcaatcccgagaggac

SEQ ID NO: 3216160 - DNA, 25 bp, Homo sapien
tattttccctccgtatacttgcaga

SEQ ID NO: 3216161 - DNA, 25 bp, Homo sapien
taatgatatgtaaaggtatgtgatt

SEQ ID NO: 3216162 - DNA, 25 bp, Homo sapien
gaaatgcgtaaaattggtaatctgg

SEQ ID NO: 3216163 - DNA, 25 bp, Homo sapien
tacttgcagaaatgcgtaaaattgg

SEQ ID NO: 3216164 - DNA, 25 bp, Homo sapien
acttggttcatcatctctatacttc

SEQ ID NO: 3216165 - DNA, 25 bp, Homo sapien
aacttggttcatcatctctatactt

SEQ ID NO: 3216166 - DNA, 25 bp, Homo sapien
ttcactgttttcaatgaggaactta

SEQ ID NO: 3216167 - DNA, 25 bp, Homo sapien
tcactgttttcaatgaggaacttac

SEQ ID NO: 3216168 - DNA, 25 bp, Homo sapien
cagatggtaatgaatgcttcaaatc

SEQ ID NO: 3216169 - DNA, 25 bp, Homo sapien
ctgagagaccaagtccagatggtaa

SEQ ID NO: 3216170 - DNA, 25 bp, Homo sapien
tccagatggtaatgaatgcttcaaa

SEQ ID NO: 3216171 - DNA, 25 bp, Homo sapien
agtccagatggtaatgaatgcttca

SEQ ID NO: 3216172 - DNA, 25 bp, Homo sapien
gaaatgctcctgcttcaataacacc

SEQ ID NO: 3216173 - DNA, 25 bp, Homo sapien
tgaaatgctcctgcttcaataacac

SEQ ID NO: 3216174 - DNA, 25 bp, Homo sapien
aatgctcctgcttcaataacaccct

SEQ ID NO: 3216175 - DNA, 25 bp, Homo sapien
cttgaaatgctcctgcttcaataac

SEQ ID NO: 3216176 - DNA, 25 bp, Homo sapien
caaccctgctaggagacataacaga

SEQ ID NO: 3216177 - DNA, 25 bp, Homo sapien
gctaggagacataacagatggcagt

SEQ ID NO: 3216178 - DNA, 25 bp, Homo sapien
cttgctgagccagtcgactagctgc

SEQ ID NO: 3216179 - DNA, 25 bp, Homo sapien
gagccagtcgactagctgcaaccct

SEQ ID NO: 3216180 - DNA, 25 bp, Homo sapien
taatttcatctgctagaataactgg

SEQ ID NO: 3216181 - DNA, 25 bp, Homo sapien
caagttctaacttttccattgcagg

SEQ ID NO: 3216182 - DNA, 25 bp, Homo sapien
tcatctgctagaataactggtccac

SEQ ID NO: 3216183 - DNA, 25 bp, Homo sapien
ttataggtgtttagactccattttc

SEQ ID NO: 3216184 - DNA, 25 bp, Homo sapien
ttgagccacggcctagcttctcaga

SEQ ID NO: 3216185 - DNA, 25 bp, Homo sapien
gccacggcctagcttctcagagata

SEQ ID NO: 3216186 - DNA, 25 bp, Homo sapien
agttcttgagccacggcctagcttc

SEQ ID NO: 3216187 - DNA, 25 bp, Homo sapien
tctcagagataatctgtcgagtaca

SEQ ID NO: 3216188 - DNA, 25 bp, Homo sapien
caatgtttgagccagttttaaaata

SEQ ID NO: 3216189 - DNA, 25 bp, Homo sapien
ctgggtcgacaatgtttgagccagt

SEQ ID NO: 3216190 - DNA, 25 bp, Homo sapien
gggtcgacaatgtttgagccagttt

SEQ ID NO: 3216191 - DNA, 25 bp, Homo sapien
cgacaatgtttgagccagttttaaa

SEQ ID NO: 3216192 - DNA, 25 bp, Homo sapien
cagcaaatgcatctccaagttgcct

SEQ ID NO: 3216193 - DNA, 25 bp, Homo sapien
gttctagtgacttcaaactcaggtc

SEQ ID NO: 3216194 - DNA, 25 bp, Homo sapien
atgaagttctagtgacttcaaactc

SEQ ID NO: 3216195 - DNA, 25 bp, Homo sapien
aatgcatctccaagttgcctttggg

SEQ ID NO: 3216196 - DNA, 25 bp, Homo sapien
tgtatcttcaatggttttattcacc

SEQ ID NO: 3216197 - DNA, 25 bp, Homo sapien
ttaatggccccaagaagagtctctc

SEQ ID NO: 3216198 - DNA, 25 bp, Homo sapien
tctgggtatcggcattatagccaaa

SEQ ID NO: 3216199 - DNA, 25 bp, Homo sapien
cagtttctgggtatcggcattatag

SEQ ID NO: 3216200 - DNA, 25 bp, Homo sapien
gagtgtttgcgtcacgtggtccaag

SEQ ID NO: 3216201 - DNA, 25 bp, Homo sapien
agaaacatcattgcgcattttatca

SEQ ID NO: 3216202 - DNA, 25 bp, Homo sapien
gcttggaagagatgctgtgactgct

SEQ ID NO: 3216203 - DNA, 25 bp, Homo sapien
ccaaatcagtgcgatatgcatcata

SEQ ID NO: 3216204 - DNA, 25 bp, Homo sapien
tggataatacccaaggctggcaaaa

SEQ ID NO: 3216205 - DNA, 25 bp, Homo sapien
aatcaagttggataatacccaaggc

SEQ ID NO: 3216206 - DNA, 25 bp, Homo sapien
cacaaacctggcaaatcaagttgga

SEQ ID NO: 3216207 - DNA, 25 bp, Homo sapien
atacccaaggctggcaaaataagtg

SEQ ID NO: 3216208 - DNA, 25 bp, Homo sapien
caggcaatttgaccttgtaaaagtc

SEQ ID NO: 3216209 - DNA, 25 bp, Homo sapien
ttggtttatcaggttcactttacca

SEQ ID NO: 3216210 - DNA, 25 bp, Homo sapien
agattctggtttctcaaataccgct

SEQ ID NO: 3216211 - DNA, 25 bp, Homo sapien
tggtttctcaaataccgctcgctgg

SEQ ID NO: 3216212 - DNA, 25 bp, Homo sapien
caccaagcccggacatctgaggtct

SEQ ID NO: 3216213 - DNA, 25 bp, Homo sapien
tacttaacgctcatatgactctcaa

SEQ ID NO: 3216214 - DNA, 25 bp, Homo sapien
taagctttatgtaagccaagtaggc

SEQ ID NO: 3216215 - DNA, 25 bp, Homo sapien
tctgaggtcttatttacaactgcaa

SEQ ID NO: 3216216 - DNA, 25 bp, Homo sapien
gcttctgattcccagcaaagtaagc

SEQ ID NO: 3216217 - DNA, 25 bp, Homo sapien
ttcaagccaagatggggcatccact

SEQ ID NO: 3216218 - DNA, 25 bp, Homo sapien
tcaatttgatatggaactgtttaag

SEQ ID NO: 3216219 - DNA, 25 bp, Homo sapien
ccagcaaagtaagcggcaatggcat

SEQ ID NO: 3216220 - DNA, 25 bp, Homo sapien
ttggaaaagttacaatcggccctca

SEQ ID NO: 3216221 - DNA, 25 bp, Homo sapien
gaaatgaacaggtgagggatgcctc

SEQ ID NO: 3216222 - DNA, 25 bp, Homo sapien
catagtgctccattccatggaagga

SEQ ID NO: 3216223 - DNA, 25 bp, Homo sapien
gaaccatgtagtggacagggcaacc

SEQ ID NO: 3216224 - DNA, 25 bp, Homo sapien
agctccttagctacagtaactgtta

SEQ ID NO: 3216225 - DNA, 25 bp, Homo sapien
cagctctcaaaagagattcacattg

SEQ ID NO: 3216226 - DNA, 25 bp, Homo sapien
tcttttggtcatgtgcccactatca

SEQ ID NO: 3216227 - DNA, 25 bp, Homo sapien
tattcacttgggaaggtacttatct

SEQ ID NO: 3216228 - DNA, 25 bp, Homo sapien
gaactatacaaggaagcctggcaca

SEQ ID NO: 3216229 - DNA, 25 bp, Homo sapien
tacatggctcctttgaattaagaac

SEQ ID NO: 3216230 - DNA, 25 bp, Homo sapien
cgtatattgaaggagtctgaggcca

SEQ ID NO: 3216231 - DNA, 25 bp, Homo sapien
gccgatgcgggaggaattacgtata

SEQ ID NO: 3216232 - DNA, 25 bp, Homo sapien
cctcagacacaaacctctttttgat

SEQ ID NO: 3216233 - DNA, 25 bp, Homo sapien
gggtcataaacctcctctggacatt

SEQ ID NO: 3216234 - DNA, 25 bp, Homo sapien
ctttcatatagagatcgagggtcat

SEQ ID NO: 3216235 - DNA, 25 bp, Homo sapien
tatagagatcgagggtcataaacct

SEQ ID NO: 3216236 - DNA, 25 bp, Homo sapien
gagctcttacgcttcacagctcctg

SEQ ID NO: 3216237 - DNA, 25 bp, Homo sapien
actaggggcctcaaggaaggtattg

SEQ ID NO: 3216238 - DNA, 25 bp, Homo sapien
cactgtctgcgctggactcagagtt

SEQ ID NO: 3216239 - DNA, 25 bp, Homo sapien
ttcactgtctgcgctggactcagag

SEQ ID NO: 3216240 - DNA, 25 bp, Homo sapien
gccttcactgtctgcgctggactca

SEQ ID NO: 3216241 - DNA, 25 bp, Homo sapien
ctgtaaggcagcgtgaatggtccga

SEQ ID NO: 3216242 - DNA, 25 bp, Homo sapien
tgtaaggcagcgtgaatggtccgat

SEQ ID NO: 3216243 - DNA, 25 bp, Homo sapien
gcctgtaaggcagcgtgaatggtcc

SEQ ID NO: 3216244 - DNA, 25 bp, Homo sapien
cctgtaaggcagcgtgaatggtccg

SEQ ID NO: 3216245 - DNA, 25 bp, Homo sapien
actgcacgggaactcataaaaaggg

SEQ ID NO: 3216246 - DNA, 25 bp, Homo sapien
gaggatccctgtcaaacacttagca

SEQ ID NO: 3216247 - DNA, 25 bp, Homo sapien
tccccttggaaatcgagtgtgtgct

SEQ ID NO: 3216248 - DNA, 25 bp, Homo sapien
caagggtggctacttgcctgcagag

SEQ ID NO: 3216249 - DNA, 25 bp, Homo sapien
ttgactctttgatcctagataaccg

SEQ ID NO: 3216250 - DNA, 25 bp, Homo sapien
gatcctagataaccgaccaagacgt

SEQ ID NO: 3216251 - DNA, 25 bp, Homo sapien
accaagacgtttccagcctaatgcc

SEQ ID NO: 3216252 - DNA, 25 bp, Homo sapien
aatgcctgacgccttttgcttcctc

SEQ ID NO: 3216253 - DNA, 25 bp, Homo sapien
gccgcgcttctcggcgcctcagcct

SEQ ID NO: 3216254 - DNA, 25 bp, Homo sapien
cgcgcttctcggcgcctcagcctcg

SEQ ID NO: 3216255 - DNA, 25 bp, Homo sapien
tcagcctcgggtcccggacaacacc

SEQ ID NO: 3216256 - DNA, 25 bp, Homo sapien
gcgcttctcggcgcctcagcctcgg

SEQ ID NO: 3216257 - DNA, 25 bp, Homo sapien
gatcgctgttctccgtggccgggta

SEQ ID NO: 3216258 - DNA, 25 bp, Homo sapien
ccagctttcccggtgaggctcggag

SEQ ID NO: 3216259 - DNA, 25 bp, Homo sapien
tcggaggaagccgagacccggcacc

SEQ ID NO: 3216260 - DNA, 25 bp, Homo sapien
tcgcctccagggaccgatcgctgtt

SEQ ID NO: 3216261 - DNA, 25 bp, Homo sapien
gggcgcaacttgcaatccgaacttc

SEQ ID NO: 3216262 - DNA, 25 bp, Homo sapien
cgctgtctcccaagggtcgggataa

SEQ ID NO: 3216263 - DNA, 25 bp, Homo sapien
gcggctgcgcattccgtgcgggacg

SEQ ID NO: 3216264 - DNA, 25 bp, Homo sapien
gcgagaagcgcctggtcctcggtcc

SEQ ID NO: 3216265 - DNA, 25 bp, Homo sapien
ttgaaaccggtcagaacccgctctc

SEQ ID NO: 3216266 - DNA, 25 bp, Homo sapien
tcctggcgtttgaaaccggtcagaa

SEQ ID NO: 3216267 - DNA, 25 bp, Homo sapien
gggacaccccttgtttggaggctga

SEQ ID NO: 3216268 - DNA, 25 bp, Homo sapien
cccttgtttggaggctgatccccag

SEQ ID NO: 3216269 - DNA, 25 bp, Homo sapien
ctgccaaaagggagccgggtcgagc

SEQ ID NO: 3216270 - DNA, 25 bp, Homo sapien
tgccaaaagggagccgggtcgagcc

SEQ ID NO: 3216271 - DNA, 25 bp, Homo sapien
tcccccatccaggtcgcaggcgcgg

SEQ ID NO: 3216272 - DNA, 25 bp, Homo sapien
caggcgcgggggaaaagcctcacgg

SEQ ID NO: 3216273 - DNA, 25 bp, Homo sapien
ggaaaagcctcacggccgcactgcg

SEQ ID NO: 3216274 - DNA, 25 bp, Homo sapien
tccgccgcgacatcttcccacgtcc

SEQ ID NO: 3216275 - DNA, 25 bp, Homo sapien
ggcggggagagaagccgcggcctgc

SEQ ID NO: 3216276 - DNA, 25 bp, Homo sapien
cgcccagcgcgggcgttgcacgacc

SEQ ID NO: 3216277 - DNA, 25 bp, Homo sapien
gcccacacgcgccgcgccagctctg

SEQ ID NO: 3216278 - DNA, 25 bp, Homo sapien
gggagagaagccgcggcctgcgggg

SEQ ID NO: 3216279 - DNA, 25 bp, Homo sapien
caaactgaacgcgagtgggcggccc

SEQ ID NO: 3216280 - DNA, 25 bp, Homo sapien
tggggtcagcaaactgaacgcgagt

SEQ ID NO: 3216281 - DNA, 25 bp, Homo sapien
aactgaacgcgagtgggcggcccac

SEQ ID NO: 3216282 - DNA, 25 bp, Homo sapien
tcagcaaactgaacgcgagtgggcg

SEQ ID NO: 3216283 - DNA, 25 bp, Homo sapien
tgctcagaatgagtggttctgcacc

SEQ ID NO: 3216284 - DNA, 25 bp, Homo sapien
gtgctcagaatgagtggttctgcac

SEQ ID NO: 3216285 - DNA, 25 bp, Homo sapien
gctcagaatgagtggttctgcacca

SEQ ID NO: 3216286 - DNA, 25 bp, Homo sapien
gctgctatctgccgccagaataaag

SEQ ID NO: 3216287 - DNA, 25 bp, Homo sapien
gctatctgccgccagaataaagggc

SEQ ID NO: 3216288 - DNA, 25 bp, Homo sapien
ccagaataaagggcaactgtcctct

SEQ ID NO: 3216289 - DNA, 25 bp, Homo sapien
ctgctgctatctgccgccagaataa

SEQ ID NO: 3216290 - DNA, 25 bp, Homo sapien
cacaaacatcaaacttgtgtagcac

SEQ ID NO: 3216291 - DNA, 25 bp, Homo sapien
gaggtgtctgcccaatcatgaatcc

SEQ ID NO: 3216292 - DNA, 25 bp, Homo sapien
caattcataacatgcatagtactgt

SEQ ID NO: 3216293 - DNA, 25 bp, Homo sapien
agacacaattcataacatgcatagt

SEQ ID NO: 3216294 - DNA, 25 bp, Homo sapien
gtgtctgcccaatcatgaatccagg

SEQ ID NO: 3216295 - DNA, 25 bp, Homo sapien
aggtgggatgggaggctccccagga

SEQ ID NO: 3216296 - DNA, 25 bp, Homo sapien
gaggaggggaggaaggacactcttc

SEQ ID NO: 3216297 - DNA, 25 bp, Homo sapien
gggaggtgggatgggaggctcccca

SEQ ID NO: 3216298 - DNA, 25 bp, Homo sapien
tggaggaggggaggaaggacactct

SEQ ID NO: 3216299 - DNA, 25 bp, Homo sapien
gctttttcttaccaaggtggctgta

SEQ ID NO: 3216300 - DNA, 25 bp, Homo sapien
tggttttgcctcgaacttgctcctc

SEQ ID NO: 3216301 - DNA, 25 bp, Homo sapien
tggctgtagccgttcatgtgagtag

SEQ ID NO: 3216302 - DNA, 25 bp, Homo sapien
ctgccaaggtccagatgttggtttt

SEQ ID NO: 3216303 - DNA, 25 bp, Homo sapien
atgcaggcaggaccgccacagaagt

SEQ ID NO: 3216304 - DNA, 25 bp, Homo sapien
tcagcatactgcagagttcgttacc

SEQ ID NO: 3216305 - DNA, 25 bp, Homo sapien
ccaaaattcctaccaaagagtggca

SEQ ID NO: 3216306 - DNA, 25 bp, Homo sapien
ggtgccacgggtacagtcagcatac

SEQ ID NO: 3216307 - DNA, 25 bp, Homo sapien
agaaatatcccaatgttcatgctcc

SEQ ID NO: 3216308 - DNA, 25 bp, Homo sapien
tccgttttgcatccaaaatagtaat

SEQ ID NO: 3216309 - DNA, 25 bp, Homo sapien
tgctccgttttgcatccaaaatagt

SEQ ID NO: 3216310 - DNA, 25 bp, Homo sapien
tgcttaagaaatatcccaatgttca

SEQ ID NO: 3216311 - DNA, 25 bp, Homo sapien
ctggcagttttgtgtgagtgctcat

SEQ ID NO: 3216312 - DNA, 25 bp, Homo sapien
gactggctggcagttttgtgtgagt

SEQ ID NO: 3216313 - DNA, 25 bp, Homo sapien
ctggctggcagttttgtgtgagtgc

SEQ ID NO: 3216314 - DNA, 25 bp, Homo sapien
ggctggcagttttgtgtgagtgctc

SEQ ID NO: 3216315 - DNA, 25 bp, Homo sapien
aacttaagaaattctcgcaaggtct

SEQ ID NO: 3216316 - DNA, 25 bp, Homo sapien
cttaagaaattctcgcaaggtctct

SEQ ID NO: 3216317 - DNA, 25 bp, Homo sapien
ttaagaaattctcgcaaggtctctg

SEQ ID NO: 3216318 - DNA, 25 bp, Homo sapien
acttaagaaattctcgcaaggtctc

SEQ ID NO: 3216319 - DNA, 25 bp, Homo sapien
cacaggagttaagaaccttgcccca

SEQ ID NO: 3216320 - DNA, 25 bp, Homo sapien
gccaagtgccatgttagatgcatta

SEQ ID NO: 3216321 - DNA, 25 bp, Homo sapien
taagggaatagctcaaatctgaatc

SEQ ID NO: 3216322 - DNA, 25 bp, Homo sapien
catcttgacaatccaatgaggtcag

SEQ ID NO: 3216323 - DNA, 25 bp, Homo sapien
aggcgggtgaataacttgatgtcaa

SEQ ID NO: 3216324 - DNA, 25 bp, Homo sapien
ggcgggtgaataacttgatgtcaag

SEQ ID NO: 3216325 - DNA, 25 bp, Homo sapien
tggcacctgaattaagccatacaga

SEQ ID NO: 3216326 - DNA, 25 bp, Homo sapien
gacacgtcgccactaaacgctttta

SEQ ID NO: 3216327 - DNA, 25 bp, Homo sapien
taagccatacagaaaggaatctgcc

SEQ ID NO: 3216328 - DNA, 25 bp, Homo sapien
tgccagagacagcttcgacacgtcg

SEQ ID NO: 3216329 - DNA, 25 bp, Homo sapien
ttagcaccatggcttcaatccgaag

SEQ ID NO: 3216330 - DNA, 25 bp, Homo sapien
tatagcagttcttaaaactgttata

SEQ ID NO: 3216331 - DNA, 25 bp, Homo sapien
catggcttcaatccgaagtgaatag

SEQ ID NO: 3216332 - DNA, 25 bp, Homo sapien
gcaccatggcttcaatccgaagtga

SEQ ID NO: 3216333 - DNA, 25 bp, Homo sapien
agagcaagccgtaaccagcaaggtt

SEQ ID NO: 3216334 - DNA, 25 bp, Homo sapien
gagaaacaagagcaagccgtaacca

SEQ ID NO: 3216335 - DNA, 25 bp, Homo sapien
cagagaaagctcatccaggagagaa

SEQ ID NO: 3216336 - DNA, 25 bp, Homo sapien
gagaaagctcatccaggagagaaac

SEQ ID NO: 3216337 - DNA, 25 bp, Homo sapien
tgtagctcttcacatgacatcagtt

SEQ ID NO: 3216338 - DNA, 25 bp, Homo sapien
cattcatgatattcccagcctggag

SEQ ID NO: 3216339 - DNA, 25 bp, Homo sapien
cctggagcaccaagtgtaatattga

SEQ ID NO: 3216340 - DNA, 25 bp, Homo sapien
tgcattcatgatattcccagcctgg

SEQ ID NO: 3216341 - DNA, 25 bp, Homo sapien
ttttgtgtctgccaatttgagcaaa

SEQ ID NO: 3216342 - DNA, 25 bp, Homo sapien
ttgtgtctgccaatttgagcaaaga

SEQ ID NO: 3216343 - DNA, 25 bp, Homo sapien
gacagtttaaatcctactgcattgc

SEQ ID NO: 3216344 - DNA, 25 bp, Homo sapien
ctactgcattgccggcataccctcc

SEQ ID NO: 3216345 - DNA, 25 bp, Homo sapien
tagcagtcttctgaacatgatgcaa

SEQ ID NO: 3216346 - DNA, 25 bp, Homo sapien
tcttctgaacatgatgcaatttttc

SEQ ID NO: 3216347 - DNA, 25 bp, Homo sapien
ctagcagtcttctgaacatgatgca

SEQ ID NO: 3216348 - DNA, 25 bp, Homo sapien
cagtcttctgaacatgatgcaattt

SEQ ID NO: 3216349 - DNA, 25 bp, Homo sapien
gttctgcctccgtgttctccagaga

SEQ ID NO: 3216350 - DNA, 25 bp, Homo sapien
gacaaagttcaccatcccgctggat

SEQ ID NO: 3216351 - DNA, 25 bp, Homo sapien
tcaccatcccgctggatgttttctt

SEQ ID NO: 3216352 - DNA, 25 bp, Homo sapien
tctgctgacaaagttcaccatcccg

SEQ ID NO: 3216353 - DNA, 25 bp, Homo sapien
taaactgcaatcgtgcaaactgagc

SEQ ID NO: 3216354 - DNA, 25 bp, Homo sapien
tgttgacgggcacagctctcatgtg

SEQ ID NO: 3216355 - DNA, 25 bp, Homo sapien
gtatagcccaagtgcaactccatgg

SEQ ID NO: 3216356 - DNA, 25 bp, Homo sapien
gaaatgacagcccaagttctaaggc

SEQ ID NO: 3216357 - DNA, 25 bp, Homo sapien
taaatatctgaaagcattcatccag

SEQ ID NO: 3216358 - DNA, 25 bp, Homo sapien
catcctggagctcttgtttccagca

SEQ ID NO: 3216359 - DNA, 25 bp, Homo sapien
tctataagggtgtaggcctcatcct

SEQ ID NO: 3216360 - DNA, 25 bp, Homo sapien
ttggtacagaaatctctaaatatct

SEQ ID NO: 3216361 - DNA, 25 bp, Homo sapien
ctgggagcgggagagaaagacattc

SEQ ID NO: 3216362 - DNA, 25 bp, Homo sapien
ggagagaaagacattcaggatcttc

SEQ ID NO: 3216363 - DNA, 25 bp, Homo sapien
agaaagacattcaggatcttcaaga

SEQ ID NO: 3216364 - DNA, 25 bp, Homo sapien
gcgggagagaaagacattcaggatc

SEQ ID NO: 3216365 - DNA, 25 bp, Homo sapien
aagggagggccgttccatcatccca

SEQ ID NO: 3216366 - DNA, 25 bp, Homo sapien
cacatggttgccctggtgccaatcc

SEQ ID NO: 3216367 - DNA, 25 bp, Homo sapien
ttgggaatctggaagaccgctctgg

SEQ ID NO: 3216368 - DNA, 25 bp, Homo sapien
gaaaggtagctgtcttgctcagtat

SEQ ID NO: 3216369 - DNA, 25 bp, Homo sapien
tggcccaacaatctgtctacagttt

SEQ ID NO: 3216370 - DNA, 25 bp, Homo sapien
gcatgcgacctcaactccaaggaaa

SEQ ID NO: 3216371 - DNA, 25 bp, Homo sapien
ttatccgatccttgggcccaacttc

SEQ ID NO: 3216372 - DNA, 25 bp, Homo sapien
gccattccacataagcatgcgacct

SEQ ID NO: 3216373 - DNA, 25 bp, Homo sapien
agttgcccaggagcgctgcttctgc

SEQ ID NO: 3216374 - DNA, 25 bp, Homo sapien
ccagttgcccaggagcgctgcttct

SEQ ID NO: 3216375 - DNA, 25 bp, Homo sapien
ccccagttgcccaggagcgctgctt

SEQ ID NO: 3216376 - DNA, 25 bp, Homo sapien
cagttgcccaggagcgctgcttctg

SEQ ID NO: 3216377 - DNA, 25 bp, Homo sapien
caggctgtggaacttattgggctcc

SEQ ID NO: 3216378 - DNA, 25 bp, Homo sapien
ctctttcggaggacactgacgccct

SEQ ID NO: 3216379 - DNA, 25 bp, Homo sapien
cagactctagctccatcgggctgaa

SEQ ID NO: 3216380 - DNA, 25 bp, Homo sapien
ctgcaagctggtgcgcctgtgctga

SEQ ID NO: 3216381 - DNA, 25 bp, Homo sapien
ggagttctggcgtgaccacacagta

SEQ ID NO: 3216382 - DNA, 25 bp, Homo sapien
ggatctttgttctcagggtcgctgc

SEQ ID NO: 3216383 - DNA, 25 bp, Homo sapien
aaagctgcacttccaggctcatcgg

SEQ ID NO: 3216384 - DNA, 25 bp, Homo sapien
tgggctcactatccacagagacggg

SEQ ID NO: 3216385 - DNA, 25 bp, Homo sapien
tcttcggcgcctgtggaggccctcc

SEQ ID NO: 3216386 - DNA, 25 bp, Homo sapien
cggcgcctgtggaggccctccgcac

SEQ ID NO: 3216387 - DNA, 25 bp, Homo sapien
ttcggcgcctgtggaggccctccgc

SEQ ID NO: 3216388 - DNA, 25 bp, Homo sapien
ctcttcggcgcctgtggaggccctc

SEQ ID NO: 3216389 - DNA, 25 bp, Homo sapien
tgggcgcggcaggtcttattttcct

SEQ ID NO: 3216390 - DNA, 25 bp, Homo sapien
cagcgtggtccgactggagtccttc

SEQ ID NO: 3216391 - DNA, 25 bp, Homo sapien
cctgagtggtttggcactgggcttc

SEQ ID NO: 3216392 - DNA, 25 bp, Homo sapien
tctcatgcttcgagaggaggaggcc

SEQ ID NO: 3216393 - DNA, 25 bp, Homo sapien
caatgcgcgccctgaatacatggaa

SEQ ID NO: 3216394 - DNA, 25 bp, Homo sapien
tcatgcacggagaagtgggcaagcc

SEQ ID NO: 3216395 - DNA, 25 bp, Homo sapien
tcatactgaggatatactggccaag

SEQ ID NO: 3216396 - DNA, 25 bp, Homo sapien
caagccagacaatcttcagggagac

SEQ ID NO: 3216397 - DNA, 25 bp, Homo sapien
caatttcatgcttttagtctgcttt

SEQ ID NO: 3216398 - DNA, 25 bp, Homo sapien
tgaaagcaatttcatgcttttagtc

SEQ ID NO: 3216399 - DNA, 25 bp, Homo sapien
tttcccgatgatatacattcttctg

SEQ ID NO: 3216400 - DNA, 25 bp, Homo sapien
tgcccccgaacttttcccgatgata

SEQ ID NO: 3216401 - DNA, 25 bp, Homo sapien
gaggttctaacgtcaaccacgtgga

SEQ ID NO: 3216402 - DNA, 25 bp, Homo sapien
caattcgcttagatgacaggcaaca

SEQ ID NO: 3216403 - DNA, 25 bp, Homo sapien
tgtggagaccatcatcgaggccatg

SEQ ID NO: 3216404 - DNA, 25 bp, Homo sapien
catagagaagttgtccacagggcta

SEQ ID NO: 3216405 - DNA, 25 bp, Homo sapien
aggaagccaaaagccccattgcaga

SEQ ID NO: 3216406 - DNA, 25 bp, Homo sapien
accacgttactcttgtcttcactta

SEQ ID NO: 3216407 - DNA, 25 bp, Homo sapien
aactaccacgttactcttgtcttca

SEQ ID NO: 3216408 - DNA, 25 bp, Homo sapien
ttcttcaactaccacgttactcttg

SEQ ID NO: 3216409 - DNA, 25 bp, Homo sapien
ctgcttggtcactaggacagcagga

SEQ ID NO: 3216410 - DNA, 25 bp, Homo sapien
tgtgcaaagccacgagcttcttgga

SEQ ID NO: 3216411 - DNA, 25 bp, Homo sapien
acagcaggaatgtggtgagtaactg

SEQ ID NO: 3216412 - DNA, 25 bp, Homo sapien
cagccagagttcaacccattgtgag

SEQ ID NO: 3216413 - DNA, 25 bp, Homo sapien
ggctttattgaccttaagggagagc

SEQ ID NO: 3216414 - DNA, 25 bp, Homo sapien
ctgctgggctttattgaccttaagg

SEQ ID NO: 3216415 - DNA, 25 bp, Homo sapien
gctgggctttattgaccttaaggga

SEQ ID NO: 3216416 - DNA, 25 bp, Homo sapien
ttattgaccttaagggagagctctg

SEQ ID NO: 3216417 - DNA, 25 bp, Homo sapien
gctgcacctgcgttcaacttggcca

SEQ ID NO: 3216418 - DNA, 25 bp, Homo sapien
ggactgccgaggctgcacctgcgtt

SEQ ID NO: 3216419 - DNA, 25 bp, Homo sapien
tgtgctgaggacagattccagggcc

SEQ ID NO: 3216420 - DNA, 25 bp, Homo sapien
gaggctgcacctgcgttcaacttgg

SEQ ID NO: 3216421 - DNA, 25 bp, Homo sapien
ggatgcaccgcttgagagtgggtgt

SEQ ID NO: 3216422 - DNA, 25 bp, Homo sapien
agggatgcaccgcttgagagtgggt

SEQ ID NO: 3216423 - DNA, 25 bp, Homo sapien
cctcagggatgcaccgcttgagagt

SEQ ID NO: 3216424 - DNA, 25 bp, Homo sapien
ctcagggatgcaccgcttgagagtg

SEQ ID NO: 3216425 - DNA, 25 bp, Homo sapien
cgtggagcgtgaccccactgcaaaa

SEQ ID NO: 3216426 - DNA, 25 bp, Homo sapien
tgtcgagaaaccaaaggcagtggca

SEQ ID NO: 3216427 - DNA, 25 bp, Homo sapien
gcagtggcagaacaacacgtggagc

SEQ ID NO: 3216428 - DNA, 25 bp, Homo sapien
tctccctgcgtgtccacgaggcagt

SEQ ID NO: 3216429 - DNA, 25 bp, Homo sapien
aagtccccaggcactgaacccactt

SEQ ID NO: 3216430 - DNA, 25 bp, Homo sapien
cgctgttggagtccataatgctcag

SEQ ID NO: 3216431 - DNA, 25 bp, Homo sapien
cccaggcactgaacccactttctaa

SEQ ID NO: 3216432 - DNA, 25 bp, Homo sapien
ggagtccataatgctcagggtcaag

SEQ ID NO: 3216433 - DNA, 25 bp, Homo sapien
cctttctacgattccaagggagtgt

SEQ ID NO: 3216434 - DNA, 25 bp, Homo sapien
acgattccaagggagtgtttccttg

SEQ ID NO: 3216435 - DNA, 25 bp, Homo sapien
atattgcttaatgtctgttggttgt

SEQ ID NO: 3216436 - DNA, 25 bp, Homo sapien
aatggagaaatctttagtcctttct

SEQ ID NO: 3216437 - DNA, 25 bp, Homo sapien
cctgggggtggccatcgtagcagac

SEQ ID NO: 3216438 - DNA, 25 bp, Homo sapien
gggtggccatcgtagcagactctgc

SEQ ID NO: 3216439 - DNA, 25 bp, Homo sapien
ggccatcgtagcagactctgccaca

SEQ ID NO: 3216440 - DNA, 25 bp, Homo sapien
tttgccagcagacaattctctttgt

SEQ ID NO: 3216441 - DNA, 25 bp, Homo sapien
ttttcctgaggagtcccctaggcag

SEQ ID NO: 3216442 - DNA, 25 bp, Homo sapien
tttcctgaggagtcccctaggcagc

SEQ ID NO: 3216443 - DNA, 25 bp, Homo sapien
gccatggggtcctagcccctctcac

SEQ ID NO: 3216444 - DNA, 25 bp, Homo sapien
cagccatggggtcctagcccctctc

SEQ ID NO: 3216445 - DNA, 25 bp, Homo sapien
tcctgaaaacaacactagaaggtgt

SEQ ID NO: 3216446 - DNA, 25 bp, Homo sapien
taagcagactgattagggaagcttt

SEQ ID NO: 3216447 - DNA, 25 bp, Homo sapien
tgttccccaggcatctgcaaagtac

SEQ ID NO: 3216448 - DNA, 25 bp, Homo sapien
caaccctggcatcatttatggtacc

SEQ ID NO: 3216449 - DNA, 25 bp, Homo sapien
ccacagtttctgtctggaaaccatg

SEQ ID NO: 3216450 - DNA, 25 bp, Homo sapien
ggagagtgcagctcacagagccctg

SEQ ID NO: 3216451 - DNA, 25 bp, Homo sapien
tctgtctggaaaccatggagagtgc

SEQ ID NO: 3216452 - DNA, 25 bp, Homo sapien
ccctgggtgaagcatgagctgcctg

SEQ ID NO: 3216453 - DNA, 25 bp, Homo sapien
tgcctcggccccttcctagagctca

SEQ ID NO: 3216454 - DNA, 25 bp, Homo sapien
agccaccagtttccatgctgcctgc

SEQ ID NO: 3216455 - DNA, 25 bp, Homo sapien
gcctgcctcggccccttcctagagc

SEQ ID NO: 3216456 - DNA, 25 bp, Homo sapien
ctgcctgcctcggccccttcctaga

SEQ ID NO: 3216457 - DNA, 25 bp, Homo sapien
tggactttcaagaccccatggtccg

SEQ ID NO: 3216458 - DNA, 25 bp, Homo sapien
tagtcctcagaataagacctgaaat

SEQ ID NO: 3216459 - DNA, 25 bp, Homo sapien
agattcctgtcttggtcactttctg

SEQ ID NO: 3216460 - DNA, 25 bp, Homo sapien
tttgcttctccggagtcccctctca

SEQ ID NO: 3216461 - DNA, 25 bp, Homo sapien
aaggtgaactgtatacaaccagcag

SEQ ID NO: 3216462 - DNA, 25 bp, Homo sapien
caaggtgaactgtatacaaccagca

SEQ ID NO: 3216463 - DNA, 25 bp, Homo sapien
accaaggtgaactgtatacaaccag

SEQ ID NO: 3216464 - DNA, 25 bp, Homo sapien
aggtgaactgtatacaaccagcagt

SEQ ID NO: 3216465 - DNA, 25 bp, Homo sapien
gcacatactcgcgaggattgggcac

SEQ ID NO: 3216466 - DNA, 25 bp, Homo sapien
gattgggcacatactcgcgaggatt

SEQ ID NO: 3216467 - DNA, 25 bp, Homo sapien
ctcgcgaggattgggcacatactca

SEQ ID NO: 3216468 - DNA, 25 bp, Homo sapien
tcagcgaggattgggcacatactcg

SEQ ID NO: 3216469 - DNA, 25 bp, Homo sapien
tgcctcttagtcacaccagtcgatg

SEQ ID NO: 3216470 - DNA, 25 bp, Homo sapien
tcgatgataggaacaacaggctttg

SEQ ID NO: 3216471 - DNA, 25 bp, Homo sapien
ttgtcgacacctcagaatccagcag

SEQ ID NO: 3216472 - DNA, 25 bp, Homo sapien
tgtgatataacatagaagctgcctc

SEQ ID NO: 3216473 - DNA, 25 bp, Homo sapien
cacagcctggtgaaacaccaggaat

SEQ ID NO: 3216474 - DNA, 25 bp, Homo sapien
catgtgctggagtgaggtccactga

SEQ ID NO: 3216475 - DNA, 25 bp, Homo sapien
gcccatgcgtgtgggtggagcatgt

SEQ ID NO: 3216476 - DNA, 25 bp, Homo sapien
tggtccccagcaattgagagttcac

SEQ ID NO: 3216477 - DNA, 25 bp, Homo sapien
gggtgaggacagcttccatcccttc

SEQ ID NO: 3216478 - DNA, 25 bp, Homo sapien
ggtgaggacagcttccatcccttcc

SEQ ID NO: 3216479 - DNA, 25 bp, Homo sapien
ggaggaataaaccatttccatccta

SEQ ID NO: 3216480 - DNA, 25 bp, Homo sapien
ccatcctacttgatccggaagctag

SEQ ID NO: 3216481 - DNA, 25 bp, Homo sapien
ggagcctctttctattctgcagcag

SEQ ID NO: 3216482 - DNA, 25 bp, Homo sapien
ggctggtggtgcactttgacccgca

SEQ ID NO: 3216483 - DNA, 25 bp, Homo sapien
catcacttgaaatcctctccatcta

SEQ ID NO: 3216484 - DNA, 25 bp, Homo sapien
tgtgggatgaccctgatgaaatgag

SEQ ID NO: 3216485 - DNA, 25 bp, Homo sapien
tctccatctatggtggcagacggtg

SEQ ID NO: 3216486 - DNA, 25 bp, Homo sapien
tctaatttctgagacctgacagcct

SEQ ID NO: 3216487 - DNA, 25 bp, Homo sapien
agcgtcaagggctctgactggcact

SEQ ID NO: 3216488 - DNA, 25 bp, Homo sapien
cagcgtcaagggctctgactggcac

SEQ ID NO: 3216489 - DNA, 25 bp, Homo sapien
aaagaggaatggcataactctgacg

SEQ ID NO: 3216490 - DNA, 25 bp, Homo sapien
gaatggcataactctgacgagttaa

SEQ ID NO: 3216491 - DNA, 25 bp, Homo sapien
gaggaatggcataactctgacgagt

SEQ ID NO: 3216492 - DNA, 25 bp, Homo sapien
ggcataactctgacgagttaatggg

SEQ ID NO: 3216493 - DNA, 25 bp, Homo sapien
agctgcaaaggaccattcatggctc

SEQ ID NO: 3216494 - DNA, 25 bp, Homo sapien
gcgaagtttaagctggtaacagcag

SEQ ID NO: 3216495 - DNA, 25 bp, Homo sapien
tattctcttgttgagagaagcgaag

SEQ ID NO: 3216496 - DNA, 25 bp, Homo sapien
ctgcaaaggaccattcatggctctg

SEQ ID NO: 3216497 - DNA, 25 bp, Homo sapien
ctagccttgtgcctgaagtaaggtc

SEQ ID NO: 3216498 - DNA, 25 bp, Homo sapien
caagatgggcctcagattgtagcag

SEQ ID NO: 3216499 - DNA, 25 bp, Homo sapien
cacagcaagatgggcctcagattgt

SEQ ID NO: 3216500 - DNA, 25 bp, Homo sapien
gattttgatcccaaattcaaattgg

SEQ ID NO: 3216501 - DNA, 25 bp, Homo sapien
ggcctcagattgtagcagatgactg

SEQ ID NO: 3216502 - DNA, 25 bp, Homo sapien
aaggatggaaattcagcatgattgc

SEQ ID NO: 3216503 - DNA, 25 bp, Homo sapien
ggccttccgcaaggatggaaattca

SEQ ID NO: 3216504 - DNA, 25 bp, Homo sapien
tccgcaaggatggaaattcagcatg

SEQ ID NO: 3216505 - DNA, 25 bp, Homo sapien
tcaaggtccagttccatcccacctc

SEQ ID NO: 3216506 - DNA, 25 bp, Homo sapien
gagttaacaccagaacaatgtccta

SEQ ID NO: 3216507 - DNA, 25 bp, Homo sapien
ccatgtgcaggagttggtccagccc

SEQ ID NO: 3216508 - DNA, 25 bp, Homo sapien
tgcgcaaggccaatacagagagtta

SEQ ID NO: 3216509 - DNA, 25 bp, Homo sapien
tgtctacaatcctgaccacttaagg

SEQ ID NO: 3216510 - DNA, 25 bp, Homo sapien
cttgtggatcttctgagggaaagaa

SEQ ID NO: 3216511 - DNA, 25 bp, Homo sapien
gtggatcttctgagggaaagaacat

SEQ ID NO: 3216512 - DNA, 25 bp, Homo sapien
tgtggatcttctgagggaaagaaca

SEQ ID NO: 3216513 - DNA, 25 bp, Homo sapien
ttgtggatcttctgagggaaagaac

SEQ ID NO: 3216514 - DNA, 25 bp, Homo sapien
gcagtgtgcctagaacgtaatgaga

SEQ ID NO: 3216515 - DNA, 25 bp, Homo sapien
catagcaaatggaagcagacagcag

SEQ ID NO: 3216516 - DNA, 25 bp, Homo sapien
tccctgaaggtatctgccagtggcc

SEQ ID NO: 3216517 - DNA, 25 bp, Homo sapien
taacttgcttttgcaagcccctggc

SEQ ID NO: 3216518 - DNA, 25 bp, Homo sapien
tccatctgtccaaggcactccttgg

SEQ ID NO: 3216519 - DNA, 25 bp, Homo sapien
ggccagagcaaattactcctctcca

SEQ ID NO: 3216520 - DNA, 25 bp, Homo sapien
cttggccagagcaaattactcctct

SEQ ID NO: 3216521 - DNA, 25 bp, Homo sapien
actccttggccagagcaaattactc

SEQ ID NO: 3216522 - DNA, 25 bp, Homo sapien
cagcttagcaccctgcactagcaga

SEQ ID NO: 3216523 - DNA, 25 bp, Homo sapien
ttagcaccctgcactagcagaccat

SEQ ID NO: 3216524 - DNA, 25 bp, Homo sapien
cctgcactagcagaccatcaccaaa

SEQ ID NO: 3216525 - DNA, 25 bp, Homo sapien
tgcactagcagaccatcaccaaatg

SEQ ID NO: 3216526 - DNA, 25 bp, Homo sapien
tccagaaagctccacggagagccac

SEQ ID NO: 3216527 - DNA, 25 bp, Homo sapien
ttccccgtgagagaccgggcgactg

SEQ ID NO: 3216528 - DNA, 25 bp, Homo sapien
ccaggaaaggaaatgtgcgcttccc

SEQ ID NO: 3216529 - DNA, 25 bp, Homo sapien
agcttctggccctgtgccgctgtat

SEQ ID NO: 3216530 - DNA, 25 bp, Homo sapien
tgacggacatgtccctgttgggcct

SEQ ID NO: 3216531 - DNA, 25 bp, Homo sapien
gagaaatgatgaaacgagaacctgt

SEQ ID NO: 3216532 - DNA, 25 bp, Homo sapien
caccgtgacggacatgtccctgttg

SEQ ID NO: 3216533 - DNA, 25 bp, Homo sapien
gctgggccaccggagaaatgatgaa

SEQ ID NO: 3216534 - DNA, 25 bp, Homo sapien
aatgaacgcgcttcttcctggtgcc

SEQ ID NO: 3216535 - DNA, 25 bp, Homo sapien
tcttgcttgctaggatgaaatgctc

SEQ ID NO: 3216536 - DNA, 25 bp, Homo sapien
gaggatttccacattaccagggagg

SEQ ID NO: 3216537 - DNA, 25 bp, Homo sapien
tctgtaaaacctgtatgagccaaag

SEQ ID NO: 3216538 - DNA, 25 bp, Homo sapien
tccccagccccgctattgacccatc

SEQ ID NO: 3216539 - DNA, 25 bp, Homo sapien
agccccgctattgacccatcctgac

SEQ ID NO: 3216540 - DNA, 25 bp, Homo sapien
tctccccagccccgctattgaccca

SEQ ID NO: 3216541 - DNA, 25 bp, Homo sapien
cccagccccgctattgacccatcct

SEQ ID NO: 3216542 - DNA, 25 bp, Homo sapien
ctctccccatactgcactgcaaact

SEQ ID NO: 3216543 - DNA, 25 bp, Homo sapien
tctgactgtggcgtgggaatggagt

SEQ ID NO: 3216544 - DNA, 25 bp, Homo sapien
ggcgaagacctattatccccctcaa

SEQ ID NO: 3216545 - DNA, 25 bp, Homo sapien
acttgttcccagtagtaattggtgt

SEQ ID NO: 3216546 - DNA, 25 bp, Homo sapien
gcagccagccgtgcaaacgggttgc

SEQ ID NO: 3216547 - DNA, 25 bp, Homo sapien
aaatatctttcacgctttcttcagt

SEQ ID NO: 3216548 - DNA, 25 bp, Homo sapien
ctttcacgctttcttcagtggtctt

SEQ ID NO: 3216549 - DNA, 25 bp, Homo sapien
aatatctttcacgctttcttcagtg

SEQ ID NO: 3216550 - DNA, 25 bp, Homo sapien
atctttcacgctttcttcagtggtc

SEQ ID NO: 3216551 - DNA, 25 bp, Homo sapien
gcacctggaggcttccggtgggttc

SEQ ID NO: 3216552 - DNA, 25 bp, Homo sapien
acctggaggcttccggtgggttctg

SEQ ID NO: 3216553 - DNA, 25 bp, Homo sapien
tgcagcacctggaggcttccggtgg

SEQ ID NO: 3216554 - DNA, 25 bp, Homo sapien
agcagcgcgagctggcacctggagg

SEQ ID NO: 3216555 - DNA, 25 bp, Homo sapien
ccccagtctgtacaggcctggtggg

SEQ ID NO: 3216556 - DNA, 25 bp, Homo sapien
tgattccctggatggtccacgtcct

SEQ ID NO: 3216557 - DNA, 25 bp, Homo sapien
ctgtacaggcctggtgggcttcaga

SEQ ID NO: 3216558 - DNA, 25 bp, Homo sapien
agctgcaggtgattccctggatggt

SEQ ID NO: 3216559 - DNA, 25 bp, Homo sapien
tttccccaacaatagacccattcat

SEQ ID NO: 3216560 - DNA, 25 bp, Homo sapien
ctttccccaacaatagacccattca

SEQ ID NO: 3216561 - DNA, 25 bp, Homo sapien
tgccctttccccaacaatagaccca

SEQ ID NO: 3216562 - DNA, 25 bp, Homo sapien
gaaagagagaccgcagggcagaacc

SEQ ID NO: 3216563 - DNA, 25 bp, Homo sapien
ccaagaaagagagaccgcagggcag

SEQ ID NO: 3216564 - DNA, 25 bp, Homo sapien
aagagagaccgcagggcagaaccag

SEQ ID NO: 3216565 - DNA, 25 bp, Homo sapien
aagaaagagagaccgcagggcagaa

SEQ ID NO: 3216566 - DNA, 25 bp, Homo sapien
ggtctgatgaggacgggaacaggac

SEQ ID NO: 3216567 - DNA, 25 bp, Homo sapien
aaaagcatagtgggtgtaggtctga

SEQ ID NO: 3216568 - DNA, 25 bp, Homo sapien
aaagcatagtgggtgtaggtctgat

SEQ ID NO: 3216569 - DNA, 25 bp, Homo sapien
gtgtaggtctgatgaggacgggaac

SEQ ID NO: 3216570 - DNA, 25 bp, Homo sapien
gatttcttcatcattgcatatgtct

SEQ ID NO: 3216571 - DNA, 25 bp, Homo sapien
tctgtctttctcagtgaattgccaa

SEQ ID NO: 3216572 - DNA, 25 bp, Homo sapien
ttgcatatgtctgaccctcttctgt

SEQ ID NO: 3216573 - DNA, 25 bp, Homo sapien
gttggccgcctctgggatttcttca

SEQ ID NO: 3216574 - DNA, 25 bp, Homo sapien
tgggacactccgatggcacctgtgc

SEQ ID NO: 3216575 - DNA, 25 bp, Homo sapien
atctgggacactccgatggcacctg

SEQ ID NO: 3216576 - DNA, 25 bp, Homo sapien
actcctaccccgaggagagccacca

SEQ ID NO: 3216577 - DNA, 25 bp, Homo sapien
tcatctgggacactccgatggcacc

SEQ ID NO: 3216578 - DNA, 25 bp, Homo sapien
tcatccgaagttccctgagatgtga

SEQ ID NO: 3216579 - DNA, 25 bp, Homo sapien
atccgaagttccctgagatgtgaat

SEQ ID NO: 3216580 - DNA, 25 bp, Homo sapien
ccgaagttccctgagatgtgaatca

SEQ ID NO: 3216581 - DNA, 25 bp, Homo sapien
tccgaagttccctgagatgtgaatc

SEQ ID NO: 3216582 - DNA, 25 bp, Homo sapien
ttctgtgaacctgtctgcccactgc

SEQ ID NO: 3216583 - DNA, 25 bp, Homo sapien
ctctgtgaccctgttagtactgtgt

SEQ ID NO: 3216584 - DNA, 25 bp, Homo sapien
tttaaaaccgtagcatatctgaacc

SEQ ID NO: 3216585 - DNA, 25 bp, Homo sapien
aagactgtgactctgtaagggcgca

SEQ ID NO: 3216586 - DNA, 25 bp, Homo sapien
ccaggagggtctccacgagcaaaat

SEQ ID NO: 3216587 - DNA, 25 bp, Homo sapien
aaatcaggggacaggcaaatgagag

SEQ ID NO: 3216588 - DNA, 25 bp, Homo sapien
aggagggtctccacgagcaaaatca

SEQ ID NO: 3216589 - DNA, 25 bp, Homo sapien
agggtctccacgagcaaaatcaggg

SEQ ID NO: 3216590 - DNA, 25 bp, Homo sapien
cgggaaactccggagagcctgttct

SEQ ID NO: 3216591 - DNA, 25 bp, Homo sapien
agcactaggccttctaagaagaatg

SEQ ID NO: 3216592 - DNA, 25 bp, Homo sapien
tccagacacgcggttcccttgacaa

SEQ ID NO: 3216593 - DNA, 25 bp, Homo sapien
tgacaactgcgacttagcactaggc

SEQ ID NO: 3216594 - DNA, 25 bp, Homo sapien
aaaagactgatcccgagcgcacggc

SEQ ID NO: 3216595 - DNA, 25 bp, Homo sapien
ataaaaagactgatcccgagcgcac

SEQ ID NO: 3216596 - DNA, 25 bp, Homo sapien
taaaaagactgatcccgagcgcacg

SEQ ID NO: 3216597 - DNA, 25 bp, Homo sapien
aagactgatcccgagcgcacggcag

SEQ ID NO: 3216598 - DNA, 25 bp, Homo sapien
cttgtcaagcaggaaggaatcagtg

SEQ ID NO: 3216599 - DNA, 25 bp, Homo sapien
gtcaagcaggaaggaatcagtggtt

SEQ ID NO: 3216600 - DNA, 25 bp, Homo sapien
ttgtcaagcaggaaggaatcagtgg

SEQ ID NO: 3216601 - DNA, 25 bp, Homo sapien
tgtcaagcaggaaggaatcagtggt

SEQ ID NO: 3216602 - DNA, 25 bp, Homo sapien
gggcagctccttgatagcgactcaa

SEQ ID NO: 3216603 - DNA, 25 bp, Homo sapien
gatttggaccatttccaaagcacgg

SEQ ID NO: 3216604 - DNA, 25 bp, Homo sapien
gaccatttccaaagcacgggcagct

SEQ ID NO: 3216605 - DNA, 25 bp, Homo sapien
tccttggcagttcctcgtcgatttg

SEQ ID NO: 3216606 - DNA, 25 bp, Homo sapien
gaagctcattcaactgctctgctcc

SEQ ID NO: 3216607 - DNA, 25 bp, Homo sapien
cgcgcgcaccaacactcgtgtctgt

SEQ ID NO: 3216608 - DNA, 25 bp, Homo sapien
catgcaaagcgtaagaagctcattc

SEQ ID NO: 3216609 - DNA, 25 bp, Homo sapien
gctctgctcccgtttcagtcgcgcg

SEQ ID NO: 3216610 - DNA, 25 bp, Homo sapien
ggtatcggtgggatattctgcgcac

SEQ ID NO: 3216611 - DNA, 25 bp, Homo sapien
gaactaaatccgcatgcctagccgc

SEQ ID NO: 3216612 - DNA, 25 bp, Homo sapien
tgactgtgcagggaaagaccatgaa

SEQ ID NO: 3216613 - DNA, 25 bp, Homo sapien
tgcaaaaggctctttcgcagcaaca

SEQ ID NO: 3216614 - DNA, 25 bp, Homo sapien
aattgcgtcccgaagcgcgcactgc

SEQ ID NO: 3216615 - DNA, 25 bp, Homo sapien
ccaattgcgtcccgaagcgcgcact

SEQ ID NO: 3216616 - DNA, 25 bp, Homo sapien
gtttccaattgcgtcccgaagcgcg

SEQ ID NO: 3216617 - DNA, 25 bp, Homo sapien
ttccaattgcgtcccgaagcgcgca

SEQ ID NO: 3216618 - DNA, 25 bp, Homo sapien
ccgccaccggtctggaagctttaag

SEQ ID NO: 3216619 - DNA, 25 bp, Homo sapien
aagcatagggcggttccaagcccgg

SEQ ID NO: 3216620 - DNA, 25 bp, Homo sapien
tggaagctttaagcgcctagccgcc

SEQ ID NO: 3216621 - DNA, 25 bp, Homo sapien
ttgtgtgtggatccccaaagcatag

SEQ ID NO: 3216622 - DNA, 25 bp, Homo sapien
gcacaaaggtccccacgggctggaa

SEQ ID NO: 3216623 - DNA, 25 bp, Homo sapien
aggtccccacgggctggaacactgg

SEQ ID NO: 3216624 - DNA, 25 bp, Homo sapien
actggcctcatctcgtttcgagcca

SEQ ID NO: 3216625 - DNA, 25 bp, Homo sapien
catctcgtttcgagccaaccgtaaa

SEQ ID NO: 3216626 - DNA, 25 bp, Homo sapien
tcccaaaggcgctgagatctcaaag

SEQ ID NO: 3216627 - DNA, 25 bp, Homo sapien
tgtctgccctcttaaaccccttgtg

SEQ ID NO: 3216628 - DNA, 25 bp, Homo sapien
tgaaaccacgtgactctgtgaaacg

SEQ ID NO: 3216629 - DNA, 25 bp, Homo sapien
tgtgaaacgctcctcggaaccttta

SEQ ID NO: 3216630 - DNA, 25 bp, Homo sapien
ggaagacacgcagaaatcgtagcct

SEQ ID NO: 3216631 - DNA, 25 bp, Homo sapien
gagactgcagtagttagacttcagg

SEQ ID NO: 3216632 - DNA, 25 bp, Homo sapien
tatcctgttacacccattatatgga

SEQ ID NO: 3216633 - DNA, 25 bp, Homo sapien
cagacaccacatcaagaaacctgag

SEQ ID NO: 3216634 - DNA, 25 bp, Homo sapien
tttaagcaccaaatgtcaagcatta

SEQ ID NO: 3216635 - DNA, 25 bp, Homo sapien
gcaaatttaagcaccaaatgtcaag

SEQ ID NO: 3216636 - DNA, 25 bp, Homo sapien
ttggggcaaatttaagcaccaaatg

SEQ ID NO: 3216637 - DNA, 25 bp, Homo sapien
taagcaccaaatgtcaagcattatt

SEQ ID NO: 3216638 - DNA, 25 bp, Homo sapien
acacttctacttaatcatcatctgg

SEQ ID NO: 3216639 - DNA, 25 bp, Homo sapien
cacttctacttaatcatcatctggt

SEQ ID NO: 3216640 - DNA, 25 bp, Homo sapien
acttctacttaatcatcatctggtt

SEQ ID NO: 3216641 - DNA, 25 bp, Homo sapien
aacacttctacttaatcatcatctg

SEQ ID NO: 3216642 - DNA, 25 bp, Homo sapien
atactccgtggcttgtgtggcttag

SEQ ID NO: 3216643 - DNA, 25 bp, Homo sapien
tggtgatggagacatactatactcc

SEQ ID NO: 3216644 - DNA, 25 bp, Homo sapien
ggtgtcgattgctcctctttggtga

SEQ ID NO: 3216645 - DNA, 25 bp, Homo sapien
tcttgtctatgcagagaggtgtcga

SEQ ID NO: 3216646 - DNA, 25 bp, Homo sapien
cacacaggtctctctgccaccctgg

SEQ ID NO: 3216647 - DNA, 25 bp, Homo sapien
aatttatatacagtgcaaccttgct

SEQ ID NO: 3216648 - DNA, 25 bp, Homo sapien
ttctgcgccacatctctgccacctt

SEQ ID NO: 3216649 - DNA, 25 bp, Homo sapien
gcaaccttgctaaacaacactgttt

SEQ ID NO: 3216650 - DNA, 25 bp, Homo sapien
attgatagtgaaatctttggaccac

SEQ ID NO: 3216651 - DNA, 25 bp, Homo sapien
ctttggagaaccaagaggctggcaa

SEQ ID NO: 3216652 - DNA, 25 bp, Homo sapien
tttggaccacaagccaaagatttga

SEQ ID NO: 3216653 - DNA, 25 bp, Homo sapien
tttggaggggaacctgacacctgct

SEQ ID NO: 3216654 - DNA, 25 bp, Homo sapien
tgcaaagcagtggatggtatttaac

SEQ ID NO: 3216655 - DNA, 25 bp, Homo sapien
gccaaaattctccatagggaacctg

SEQ ID NO: 3216656 - DNA, 25 bp, Homo sapien
gtgcaaagcagtggatggtatttaa

SEQ ID NO: 3216657 - DNA, 25 bp, Homo sapien
tctccatagggaacctgtcattatc

SEQ ID NO: 3216658 - DNA, 25 bp, Homo sapien
tccagttctagatcaccgctcaaag

SEQ ID NO: 3216659 - DNA, 25 bp, Homo sapien
tcaaagccctagagccagcactcat

SEQ ID NO: 3216660 - DNA, 25 bp, Homo sapien
cagcactcataacctgattgtgtcc

SEQ ID NO: 3216661 - DNA, 25 bp, Homo sapien
gtgtccaagaatatcagtttcccct

SEQ ID NO: 3216662 - DNA, 25 bp, Homo sapien
tctgttctttagatgcggatgaagt

SEQ ID NO: 3216663 - DNA, 25 bp, Homo sapien
tgtgcctgattgtgtagacggccat

SEQ ID NO: 3216664 - DNA, 25 bp, Homo sapien
gatgcggatgaagttagaatgtgcc

SEQ ID NO: 3216665 - DNA, 25 bp, Homo sapien
tggatggccacacaagtgcacatct

SEQ ID NO: 3216666 - DNA, 25 bp, Homo sapien
ccacatcccagctgcaggcgccatg

SEQ ID NO: 3216667 - DNA, 25 bp, Homo sapien
acatcccagctgcaggcgccatgaa

SEQ ID NO: 3216668 - DNA, 25 bp, Homo sapien
catccacatcccagctgcaggcgcc

SEQ ID NO: 3216669 - DNA, 25 bp, Homo sapien
atcccagctgcaggcgccatgaata

SEQ ID NO: 3216670 - DNA, 25 bp, Homo sapien
ttcctcaacccctaagccttgagtg

SEQ ID NO: 3216671 - DNA, 25 bp, Homo sapien
ttgagtgtgcgatggcacaagtgca

SEQ ID NO: 3216672 - DNA, 25 bp, Homo sapien
tttgaacctgatagtgcagacacca

SEQ ID NO: 3216673 - DNA, 25 bp, Homo sapien
tgaacctgatagtgcagacaccagt

SEQ ID NO: 3216674 - DNA, 25 bp, Homo sapien
cccacactaacagcgggtactggga

SEQ ID NO: 3216675 - DNA, 25 bp, Homo sapien
tgttcaccctgagtctcaggactga

SEQ ID NO: 3216676 - DNA, 25 bp, Homo sapien
gcctgggaggtgcttatgtccttct

SEQ ID NO: 3216677 - DNA, 25 bp, Homo sapien
ccctgagtctcaggactgattcctg

SEQ ID NO: 3216678 - DNA, 25 bp, Homo sapien
aagtgggcctaggaatacccagaat

SEQ ID NO: 3216679 - DNA, 25 bp, Homo sapien
cagagaacctcgtcttatgacaaga

SEQ ID NO: 3216680 - DNA, 25 bp, Homo sapien
ggtgtacgtgaaaatactgagtgac

SEQ ID NO: 3216681 - DNA, 25 bp, Homo sapien
gctgtgcagctatctgtggtcatga

SEQ ID NO: 3216682 - DNA, 25 bp, Homo sapien
agaactgtcttcgtttcctgcctgc

SEQ ID NO: 3216683 - DNA, 25 bp, Homo sapien
gtccacacgagacaagaagggccct

SEQ ID NO: 3216684 - DNA, 25 bp, Homo sapien
catacatctcatccctggcgcatga

SEQ ID NO: 3216685 - DNA, 25 bp, Homo sapien
tgtgctctgagcgtgtctagcccta

SEQ ID NO: 3216686 - DNA, 25 bp, Homo sapien
aaggttgaacgccagagctgtcttc

SEQ ID NO: 3216687 - DNA, 25 bp, Homo sapien
tctctagttaaagttagcttcacca

SEQ ID NO: 3216688 - DNA, 25 bp, Homo sapien
taaagcacgatattctaaagacatt

SEQ ID NO: 3216689 - DNA, 25 bp, Homo sapien
gaggttaagcgctatttcctagaaa

SEQ ID NO: 3216690 - DNA, 25 bp, Homo sapien
agggctgaatgtaacctaagagatc

SEQ ID NO: 3216691 - DNA, 25 bp, Homo sapien
tgtaactcgaggagaagattctgct

SEQ ID NO: 3216692 - DNA, 25 bp, Homo sapien
ggctgtcccttgagcgccaacaaaa

SEQ ID NO: 3216693 - DNA, 25 bp, Homo sapien
gacaaagcactagaacgaggccctt

SEQ ID NO: 3216694 - DNA, 25 bp, Homo sapien
aattccttccttagagacaaagcac

SEQ ID NO: 3216695 - DNA, 25 bp, Homo sapien
ccagatataataggacgttgtgcac

SEQ ID NO: 3216696 - DNA, 25 bp, Homo sapien
cgttgtgcactcaggacttggcgga

SEQ ID NO: 3216697 - DNA, 25 bp, Homo sapien
aaacacctatgatgcggccgccatt

SEQ ID NO: 3216698 - DNA, 25 bp, Homo sapien
ctgaacctcagtgccggatcatcca

SEQ ID NO: 3216699 - DNA, 25 bp, Homo sapien
tatgggaaagcttggctgcttcttt

SEQ ID NO: 3216700 - DNA, 25 bp, Homo sapien
tctgtgctttcgtcctaggaacctg

SEQ ID NO: 3216701 - DNA, 25 bp, Homo sapien
tttcgtcctaggaacctgaagggca

SEQ ID NO: 3216702 - DNA, 25 bp, Homo sapien
gagcttctgtgctttcgtcctagga

SEQ ID NO: 3216703 - DNA, 25 bp, Homo sapien
tcagagaaccattctaactgcaaaa

SEQ ID NO: 3216704 - DNA, 25 bp, Homo sapien
tccaaggatgctcagagaaccattc

SEQ ID NO: 3216705 - DNA, 25 bp, Homo sapien
caaggctaatagactgactgaggag

SEQ ID NO: 3216706 - DNA, 25 bp, Homo sapien
catgggtttatatccctcagggaac

SEQ ID NO: 3216707 - DNA, 25 bp, Homo sapien
cgcagcccgcagacaactgggccca

SEQ ID NO: 3216708 - DNA, 25 bp, Homo sapien
cctcctccaatctggggacttagct

SEQ ID NO: 3216709 - DNA, 25 bp, Homo sapien
cccgcagcccgcagacaactgggcc

SEQ ID NO: 3216710 - DNA, 25 bp, Homo sapien
gcagcccgcagacaactgggcccat

SEQ ID NO: 3216711 - DNA, 25 bp, Homo sapien
gagctcactgtgagctttgtcagca

SEQ ID NO: 3216712 - DNA, 25 bp, Homo sapien
ctggattaacagagctcactgtgag

SEQ ID NO: 3216713 - DNA, 25 bp, Homo sapien
actgtgagctttgtcagcaaatccc

SEQ ID NO: 3216714 - DNA, 25 bp, Homo sapien
gtcagcaaatcccagtcttttcctt

SEQ ID NO: 3216715 - DNA, 25 bp, Homo sapien
attcatgttgctttggtgtcaaatc

SEQ ID NO: 3216716 - DNA, 25 bp, Homo sapien
tctctccctcgattttttgcttcct

SEQ ID NO: 3216717 - DNA, 25 bp, Homo sapien
cattcatgttgctttggtgtcaaat

SEQ ID NO: 3216718 - DNA, 25 bp, Homo sapien
ttcatgttgctttggtgtcaaatcc

SEQ ID NO: 3216719 - DNA, 25 bp, Homo sapien
ggctctgctgacttctcacttgggt

SEQ ID NO: 3216720 - DNA, 25 bp, Homo sapien
tccaggatccgcaaacagcatggtg

SEQ ID NO: 3216721 - DNA, 25 bp, Homo sapien
ggagaacctggcctcacttagagac

SEQ ID NO: 3216722 - DNA, 25 bp, Homo sapien
gttcactggcagagtcagaatttcc

SEQ ID NO: 3216723 - DNA, 25 bp, Homo sapien
catggtggctttaaacaaggtgtac

SEQ ID NO: 3216724 - DNA, 25 bp, Homo sapien
catcgggatggatgcagtgttccat

SEQ ID NO: 3216725 - DNA, 25 bp, Homo sapien
atctagaaacctccatcgggatgga

SEQ ID NO: 3216726 - DNA, 25 bp, Homo sapien
tagaaacctccatcgggatggatgc

SEQ ID NO: 3216727 - DNA, 25 bp, Homo sapien
aacctccatcgggatggatgcagtg

SEQ ID NO: 3216728 - DNA, 25 bp, Homo sapien
gcctcatattggaagcctgtgtttc

SEQ ID NO: 3216729 - DNA, 25 bp, Homo sapien
agcctcatattggaagcctgtgttt

SEQ ID NO: 3216730 - DNA, 25 bp, Homo sapien
ccaccaggtcggtgtgcagatggcc

SEQ ID NO: 3216731 - DNA, 25 bp, Homo sapien
tggaagcttgagacaccaccaggtc

SEQ ID NO: 3216732 - DNA, 25 bp, Homo sapien
cctggaagcttgagacaccaccagg

SEQ ID NO: 3216733 - DNA, 25 bp, Homo sapien
cgctatggattcctagtgagcatgg

SEQ ID NO: 3216734 - DNA, 25 bp, Homo sapien
aggagcaggtttacaaccagccttg

SEQ ID NO: 3216735 - DNA, 25 bp, Homo sapien
caggtttacaaccagccttggaagc

SEQ ID NO: 3216736 - DNA, 25 bp, Homo sapien
agcctggaaggtattgagatgtttc

SEQ ID NO: 3216737 - DNA, 25 bp, Homo sapien
gccttggaagcctggaaggtattga

SEQ ID NO: 3216738 - DNA, 25 bp, Homo sapien
gaaaatgatgtggaacgctgagagg

SEQ ID NO: 3216739 - DNA, 25 bp, Homo sapien
gatgtggaacgctgagaggctgctt

SEQ ID NO: 3216740 - DNA, 25 bp, Homo sapien
aatgatgtggaacgctgagaggctg

SEQ ID NO: 3216741 - DNA, 25 bp, Homo sapien
aaaatgatgtggaacgctgagaggc

SEQ ID NO: 3216742 - DNA, 25 bp, Homo sapien
tgcactttcttgcctttgaagtgtc

SEQ ID NO: 3216743 - DNA, 25 bp, Homo sapien
ttcctgctgagtctggggtggcctt

SEQ ID NO: 3216744 - DNA, 25 bp, Homo sapien
ttgaagtgtctgttcctgctgagtc

SEQ ID NO: 3216745 - DNA, 25 bp, Homo sapien
gctgagtctggggtggccttttctt

SEQ ID NO: 3216746 - DNA, 25 bp, Homo sapien
atcctggattagatgtcgcccggcg

SEQ ID NO: 3216747 - DNA, 25 bp, Homo sapien
tgttttccatcaaccgcgaggcaga

SEQ ID NO: 3216748 - DNA, 25 bp, Homo sapien
gcgagcggctcaagtagtaaaaaca

SEQ ID NO: 3216749 - DNA, 25 bp, Homo sapien
tctgaatggctttcaccgggtgtcc

SEQ ID NO: 3216750 - DNA, 25 bp, Homo sapien
gggcaggcttcccgcacgctccggc

SEQ ID NO: 3216751 - DNA, 25 bp, Homo sapien
agggcacagcccgagccacgactta

SEQ ID NO: 3216752 - DNA, 25 bp, Homo sapien
gcacgctccggccaccggaccttgc

SEQ ID NO: 3216753 - DNA, 25 bp, Homo sapien
ccagggcacagcccgagccacgact

SEQ ID NO: 3216754 - DNA, 25 bp, Homo sapien
tttcttggagctgaagggcaggtac

SEQ ID NO: 3216755 - DNA, 25 bp, Homo sapien
ttcttggagctgaagggcaggtacc

SEQ ID NO: 3216756 - DNA, 25 bp, Homo sapien
tttgtttcttggagctgaagggcag

SEQ ID NO: 3216757 - DNA, 25 bp, Homo sapien
tgtttcttggagctgaagggcaggt

SEQ ID NO: 3216758 - DNA, 25 bp, Homo sapien
ccaactcagccctaagggaatccat

SEQ ID NO: 3216759 - DNA, 25 bp, Homo sapien
gtgtagatggccctgcccaactcag

SEQ ID NO: 3216760 - DNA, 25 bp, Homo sapien
cagccctaagggaatccatatttac

SEQ ID NO: 3216761 - DNA, 25 bp, Homo sapien
cttttcattagtgtagatggccctg

SEQ ID NO: 3216762 - DNA, 25 bp, Homo sapien
tttctttggctttggaagtagagaa

SEQ ID NO: 3216763 - DNA, 25 bp, Homo sapien
tggctttggaagtagagaactttac

SEQ ID NO: 3216764 - DNA, 25 bp, Homo sapien
gctttggaagtagagaactttacca

SEQ ID NO: 3216765 - DNA, 25 bp, Homo sapien
ctttggctttggaagtagagaactt

SEQ ID NO: 3216766 - DNA, 25 bp, Homo sapien
tttctgacttcaaatacacattggt

SEQ ID NO: 3216767 - DNA, 25 bp, Homo sapien
atctcctcctttcccatgggtttct

SEQ ID NO: 3216768 - DNA, 25 bp, Homo sapien
tcctttctgacttcaaatacacatt

SEQ ID NO: 3216769 - DNA, 25 bp, Homo sapien
tttcctctttaacaccatcatctcc

SEQ ID NO: 3216770 - DNA, 25 bp, Homo sapien
tcacatggagccctcaggagactta

SEQ ID NO: 3216771 - DNA, 25 bp, Homo sapien
cacatggagccctcaggagacttag

SEQ ID NO: 3216772 - DNA, 25 bp, Homo sapien
catggagccctcaggagacttagaa

SEQ ID NO: 3216773 - DNA, 25 bp, Homo sapien
atggagccctcaggagacttagaat

SEQ ID NO: 3216774 - DNA, 25 bp, Homo sapien
tgtcaacaaggcctcagccacctct

SEQ ID NO: 3216775 - DNA, 25 bp, Homo sapien
tcatgatcttatctaaccctaatca

SEQ ID NO: 3216776 - DNA, 25 bp, Homo sapien
ggagactgagcactaatcctgtcaa

SEQ ID NO: 3216777 - DNA, 25 bp, Homo sapien
tcaccttccaaaggctccgtctcca

SEQ ID NO: 3216778 - DNA, 25 bp, Homo sapien
tatgcacagtttggcagcgataatc

SEQ ID NO: 3216779 - DNA, 25 bp, Homo sapien
tagtctaccaattcttatgcacagt

SEQ ID NO: 3216780 - DNA, 25 bp, Homo sapien
gggatcctacttactgctgcagaaa

SEQ ID NO: 3216781 - DNA, 25 bp, Homo sapien
tgcagaaagttaggatgctggccag

SEQ ID NO: 3216782 - DNA, 25 bp, Homo sapien
aaacacttttatcacaccaggctgg

SEQ ID NO: 3216783 - DNA, 25 bp, Homo sapien
cgcgcctggtgcctaaacactttta

SEQ ID NO: 3216784 - DNA, 25 bp, Homo sapien
gagtgaccgcgcctggtgcctaaac

SEQ ID NO: 3216785 - DNA, 25 bp, Homo sapien
cccacttagcactggtgtctccctg

SEQ ID NO: 3216786 - DNA, 25 bp, Homo sapien
tctgggtcattaacaagtggaagac

SEQ ID NO: 3216787 - DNA, 25 bp, Homo sapien
gctggaagtcggcaggaatgtttct

SEQ ID NO: 3216788 - DNA, 25 bp, Homo sapien
caatcggtcttgatcttacaggaca

SEQ ID NO: 3216789 - DNA, 25 bp, Homo sapien
tctgctctaagtagtgatgtgccag

SEQ ID NO: 3216790 - DNA, 25 bp, Homo sapien
ggggagggtcgcacgttctcctcta

SEQ ID NO: 3216791 - DNA, 25 bp, Homo sapien
ttctcctctaccctggggcagcgag

SEQ ID NO: 3216792 - DNA, 25 bp, Homo sapien
tctaccctggggcagcgaggaagga

SEQ ID NO: 3216793 - DNA, 25 bp, Homo sapien
ggagggtcgcacgttctcctctacc

SEQ ID NO: 3216794 - DNA, 25 bp, Homo sapien
gccatggaactcaaccccaggattc

SEQ ID NO: 3216795 - DNA, 25 bp, Homo sapien
tggcattcagaattcggagggtcga

SEQ ID NO: 3216796 - DNA, 25 bp, Homo sapien
gaatgggtttccaatggtaactgcc

SEQ ID NO: 3216797 - DNA, 25 bp, Homo sapien
tacatgtttgtttgctggccctcaa

SEQ ID NO: 3216798 - DNA, 25 bp, Homo sapien
gaatctgacataggtgactccatct

SEQ ID NO: 3216799 - DNA, 25 bp, Homo sapien
gctgtctttgtttattcctagatgt

SEQ ID NO: 3216800 - DNA, 25 bp, Homo sapien
gaaagcgccttcacaaaaattatga

SEQ ID NO: 3216801 - DNA, 25 bp, Homo sapien
tagatgtaggccgaactaactttgg

SEQ ID NO: 3216802 - DNA, 25 bp, Homo sapien
tgctatacaagagtgtcacattcag

SEQ ID NO: 3216803 - DNA, 25 bp, Homo sapien
taggtatgacgtctgatcagccacc

SEQ ID NO: 3216804 - DNA, 25 bp, Homo sapien
ctctaaagtagctcatctctcaggg

SEQ ID NO: 3216805 - DNA, 25 bp, Homo sapien
gaactcactgcatagttaaacggta

SEQ ID NO: 3216806 - DNA, 25 bp, Homo sapien
ggccggctgtctttgaccctgcacg

SEQ ID NO: 3216807 - DNA, 25 bp, Homo sapien
cctagaccactgacatggggggccg

SEQ ID NO: 3216808 - DNA, 25 bp, Homo sapien
cggctgtctttgaccctgcacgctg

SEQ ID NO: 3216809 - DNA, 25 bp, Homo sapien
gggggccggctgtctttgaccctgc

SEQ ID NO: 3216810 - DNA, 25 bp, Homo sapien
cagaaactgcttgtcaatctggcgc

SEQ ID NO: 3216811 - DNA, 25 bp, Homo sapien
tgggattcttgtaccgttccaggca

SEQ ID NO: 3216812 - DNA, 25 bp, Homo sapien
gcaccacaggacttgggatgttggt

SEQ ID NO: 3216813 - DNA, 25 bp, Homo sapien
gttccaggcatatactgcaaatcag

SEQ ID NO: 3216814 - DNA, 25 bp, Homo sapien
aggtcagcctgcgaaactcccttct

SEQ ID NO: 3216815 - DNA, 25 bp, Homo sapien
tatttgcaactcatgattctgtttt

SEQ ID NO: 3216816 - DNA, 25 bp, Homo sapien
aagaatcctgcagtaggttgtagga

SEQ ID NO: 3216817 - DNA, 25 bp, Homo sapien
gttgtaggaggtcagcctgcgaaac

SEQ ID NO: 3216818 - DNA, 25 bp, Homo sapien
acaggtgtggctacaagcatcaggc

SEQ ID NO: 3216819 - DNA, 25 bp, Homo sapien
tgagacacgtgatgcaacagacaga

SEQ ID NO: 3216820 - DNA, 25 bp, Homo sapien
gacaggccagcgtacttgtccaaga

SEQ ID NO: 3216821 - DNA, 25 bp, Homo sapien
caagatacttagctggtcaggagca

SEQ ID NO: 3216822 - DNA, 25 bp, Homo sapien
tagtgccttggcacacaaagtgtgg

SEQ ID NO: 3216823 - DNA, 25 bp, Homo sapien
cagtgactacacaaggtatttggca

SEQ ID NO: 3216824 - DNA, 25 bp, Homo sapien
taagctgtactcacactaatgaggc

SEQ ID NO: 3216825 - DNA, 25 bp, Homo sapien
tcagaaaccaacaggtaagctgtac

SEQ ID NO: 3216826 - DNA, 25 bp, Homo sapien
gagagggttaaactgtgggcaggaa

SEQ ID NO: 3216827 - DNA, 25 bp, Homo sapien
ggcaggagagggttaaactgtgggc

SEQ ID NO: 3216828 - DNA, 25 bp, Homo sapien
caggagagggttaaactgtgggcag

SEQ ID NO: 3216829 - DNA, 25 bp, Homo sapien
gggttaaactgtgggcaggaatgta

SEQ ID NO: 3216830 - DNA, 25 bp, Homo sapien
tcccatcgtggtttgggcaagagag

SEQ ID NO: 3216831 - DNA, 25 bp, Homo sapien
aagaaattgttctggagcgcggcca

SEQ ID NO: 3216832 - DNA, 25 bp, Homo sapien
gagttcgctgcagcacgtccatcag

SEQ ID NO: 3216833 - DNA, 25 bp, Homo sapien
gaagactcctcagcgttgctgcctg

SEQ ID NO: 3216834 - DNA, 25 bp, Homo sapien
agtagtcatgctcccgggcagtatc

SEQ ID NO: 3216835 - DNA, 25 bp, Homo sapien
cacagtagtcatgctcccgggcagt

SEQ ID NO: 3216836 - DNA, 25 bp, Homo sapien
catgctcccgggcagtatctgccat

SEQ ID NO: 3216837 - DNA, 25 bp, Homo sapien
cgggcagtatctgccatcccagcca

SEQ ID NO: 3216838 - DNA, 25 bp, Homo sapien
actgatttttccacatggagttctg

SEQ ID NO: 3216839 - DNA, 25 bp, Homo sapien
tttttccacatggagttctgtttca

SEQ ID NO: 3216840 - DNA, 25 bp, Homo sapien
ttccacatggagttctgtttcaatc

SEQ ID NO: 3216841 - DNA, 25 bp, Homo sapien
attactgatttttccacatggagtt

SEQ ID NO: 3216842 - DNA, 25 bp, Homo sapien
gaggaaacaaagagcaacccaggca

SEQ ID NO: 3216843 - DNA, 25 bp, Homo sapien
tgtccttagacgctacacaatgctg

SEQ ID NO: 3216844 - DNA, 25 bp, Homo sapien
tcagttacttgatggtacccacagg

SEQ ID NO: 3216845 - DNA, 25 bp, Homo sapien
gagggtaaccagctgtaagaggcaa

SEQ ID NO: 3216846 - DNA, 25 bp, Homo sapien
taggagacctactatagacactggt

SEQ ID NO: 3216847 - DNA, 25 bp, Homo sapien
agcctcaatgtctggacccacagga

SEQ ID NO: 3216848 - DNA, 25 bp, Homo sapien
tgtctggcccttagaaacattagga

SEQ ID NO: 3216849 - DNA, 25 bp, Homo sapien
gacactggtgtaaatttgggatatg

SEQ ID NO: 3216850 - DNA, 25 bp, Homo sapien
ttggagcgcagaggcgcaatcatgg

SEQ ID NO: 3216851 - DNA, 25 bp, Homo sapien
tcacctgggttggagcgcagaggcg

SEQ ID NO: 3216852 - DNA, 25 bp, Homo sapien
gggttggagcgcagaggcgcaatca

SEQ ID NO: 3216853 - DNA, 25 bp, Homo sapien
acctgggttggagcgcagaggcgca

SEQ ID NO: 3216854 - DNA, 25 bp, Homo sapien
caatatcttaagtgtgtcttgggaa

SEQ ID NO: 3216855 - DNA, 25 bp, Homo sapien
cattttcaaaggctcgtgcttcggt

SEQ ID NO: 3216856 - DNA, 25 bp, Homo sapien
gatctcagctttgaagagacagcag

SEQ ID NO: 3216857 - DNA, 25 bp, Homo sapien
gcagacctggcttattattcctagt

SEQ ID NO: 3216858 - DNA, 25 bp, Homo sapien
ttttgaatcaaaggacactaataag

SEQ ID NO: 3216859 - DNA, 25 bp, Homo sapien
tgcatactcactagaatcaaaagtc

SEQ ID NO: 3216860 - DNA, 25 bp, Homo sapien
aaaaccgcaacaagatatcactgca

SEQ ID NO: 3216861 - DNA, 25 bp, Homo sapien
taataagggttggtaaagatgctga

SEQ ID NO: 3216862 - DNA, 25 bp, Homo sapien
acaggatggcccagatatggtggct

SEQ ID NO: 3216863 - DNA, 25 bp, Homo sapien
actggcagattggattgaaaacata

SEQ ID NO: 3216864 - DNA, 25 bp, Homo sapien
ttttagattcagagactcaaatagg

SEQ ID NO: 3216865 - DNA, 25 bp, Homo sapien
aattgaacccaagattatgaggctg

SEQ ID NO: 3216866 - DNA, 25 bp, Homo sapien
caagtctgatacaatccagcagaaa

SEQ ID NO: 3216867 - DNA, 25 bp, Homo sapien
gcaccttattttggtacaagtctga

SEQ ID NO: 3216868 - DNA, 25 bp, Homo sapien
tacttccaagggatttccccagtga

SEQ ID NO: 3216869 - DNA, 25 bp, Homo sapien
agggaagactatactttgggttgca

SEQ ID NO: 3216870 - DNA, 25 bp, Homo sapien
ccttgagtggaactgtggggtgctc

SEQ ID NO: 3216871 - DNA, 25 bp, Homo sapien
acatggcagtctcacaggactggca

SEQ ID NO: 3216872 - DNA, 25 bp, Homo sapien
gaggccttgtgctgttccaccacat

SEQ ID NO: 3216873 - DNA, 25 bp, Homo sapien
cccgacacatggcagtctcacagga

SEQ ID NO: 3216874 - DNA, 25 bp, Homo sapien
tccataagcagcacactcttgcgca

SEQ ID NO: 3216875 - DNA, 25 bp, Homo sapien
gtttgaggccatagttgacctccaa

SEQ ID NO: 3216876 - DNA, 25 bp, Homo sapien
actcttgcgcacatttaaagtcttc

SEQ ID NO: 3216877 - DNA, 25 bp, Homo sapien
aaggtggaatgaatgtcatccacga

SEQ ID NO: 3216878 - DNA, 25 bp, Homo sapien
gagcaagcggtgtttgtcaacccag

SEQ ID NO: 3216879 - DNA, 25 bp, Homo sapien
tacaatgatgacacttaaggacccc

SEQ ID NO: 3216880 - DNA, 25 bp, Homo sapien
ggaaacaataagctagtgcccttgg

SEQ ID NO: 3216881 - DNA, 25 bp, Homo sapien
gaaaggtcactaccaagagcatagc

SEQ ID NO: 3216882 - DNA, 25 bp, Homo sapien
ctgcgggaaaaccggaggcctggtg

SEQ ID NO: 3216883 - DNA, 25 bp, Homo sapien
tgcttcttcaccagtaggacctcgg

SEQ ID NO: 3216884 - DNA, 25 bp, Homo sapien
catgggctgcccgatgatggtctgc

SEQ ID NO: 3216885 - DNA, 25 bp, Homo sapien
tgggagacacatcagcggatcggat

SEQ ID NO: 3216886 - DNA, 25 bp, Homo sapien
tctccgtgccatggttgagggcctg

SEQ ID NO: 3216887 - DNA, 25 bp, Homo sapien
gagagaccataaatcagaggaggga

SEQ ID NO: 3216888 - DNA, 25 bp, Homo sapien
tggaggagactgcataagctcgact

SEQ ID NO: 3216889 - DNA, 25 bp, Homo sapien
tctcttggctcatcgggtaccttct

SEQ ID NO: 3216890 - DNA, 25 bp, Homo sapien
tacacacagctggaggtggttgcaa

SEQ ID NO: 3216891 - DNA, 25 bp, Homo sapien
gataccaattctgcctgccaacctg

SEQ ID NO: 3216892 - DNA, 25 bp, Homo sapien
gacccaggcataagtaacaataatc

SEQ ID NO: 3216893 - DNA, 25 bp, Homo sapien
cacagagggagttcaagtagcctcc

SEQ ID NO: 3216894 - DNA, 25 bp, Homo sapien
cacactatatgggatgtgtctccaa

SEQ ID NO: 3216895 - DNA, 25 bp, Homo sapien
cacaggttcagagaacaaagtccca

SEQ ID NO: 3216896 - DNA, 25 bp, Homo sapien
taaattataccaggcacctcaaggc

SEQ ID NO: 3216897 - DNA, 25 bp, Homo sapien
cctcaaggcattctcgtgcatgtgg

SEQ ID NO: 3216898 - DNA, 25 bp, Homo sapien
tgcagaatgcagatccttggtccat

SEQ ID NO: 3216899 - DNA, 25 bp, Homo sapien
gcaagtctagcctatgaagcacaaa

SEQ ID NO: 3216900 - DNA, 25 bp, Homo sapien
aggtgaacccttagactgaaatagg

SEQ ID NO: 3216901 - DNA, 25 bp, Homo sapien
caggaagattacataaggtgaaccc

SEQ ID NO: 3216902 - DNA, 25 bp, Homo sapien
aatatgaaattaatgctggccgggc

SEQ ID NO: 3216903 - DNA, 25 bp, Homo sapien
taatactaggtcacaagagcaatgg

SEQ ID NO: 3216904 - DNA, 25 bp, Homo sapien
agagcaatggactgtgttgcaaaag

SEQ ID NO: 3216905 - DNA, 25 bp, Homo sapien
ctgctaatactaggtcacaagagca

SEQ ID NO: 3216906 - DNA, 25 bp, Homo sapien
gctaatactaggtcacaagagcaat

SEQ ID NO: 3216907 - DNA, 25 bp, Homo sapien
ttgggatggttcagactcagtttgg

SEQ ID NO: 3216908 - DNA, 25 bp, Homo sapien
catttgggatggttcagactcagtt

SEQ ID NO: 3216909 - DNA, 25 bp, Homo sapien
gatggttcagactcagtttgggtcc

SEQ ID NO: 3216910 - DNA, 25 bp, Homo sapien
ggttcagactcagtttgggtcctgc

SEQ ID NO: 3216911 - DNA, 25 bp, Homo sapien
acattggttgttactgtctgcaatt

SEQ ID NO: 3216912 - DNA, 25 bp, Homo sapien
tgcagctaccccctgaagatttgta

SEQ ID NO: 3216913 - DNA, 25 bp, Homo sapien
ctttccatttgtagatgcagctacc

SEQ ID NO: 3216914 - DNA, 25 bp, Homo sapien
ctgcacacattggttgttactgtct

SEQ ID NO: 3216915 - DNA, 25 bp, Homo sapien
tatgccaaaacgacttttgaactgg

SEQ ID NO: 3216916 - DNA, 25 bp, Homo sapien
gctgccccggagagcgtccccgtat

SEQ ID NO: 3216917 - DNA, 25 bp, Homo sapien
agagcgtccccgtatgccaaaacga

SEQ ID NO: 3216918 - DNA, 25 bp, Homo sapien
gccaaaacgacttttgaactggcca

SEQ ID NO: 3216919 - DNA, 25 bp, Homo sapien
aatgctgacccatttattatcataa

SEQ ID NO: 3216920 - DNA, 25 bp, Homo sapien
tatcataatcggcaatgattatgtc

SEQ ID NO: 3216921 - DNA, 25 bp, Homo sapien
aatttcccatcggaggagaaaatgc

SEQ ID NO: 3216922 - DNA, 25 bp, Homo sapien
ataatcggcaatgattatgtcccca

SEQ ID NO: 3216923 - DNA, 25 bp, Homo sapien
cattgcggtccacagaaactccttt

SEQ ID NO: 3216924 - DNA, 25 bp, Homo sapien
cccgtttggctggaagataaacacg

SEQ ID NO: 3216925 - DNA, 25 bp, Homo sapien
gataaacacgcagcacgccttgttg

SEQ ID NO: 3216926 - DNA, 25 bp, Homo sapien
atttcctcggctaccaaacctggtg

SEQ ID NO: 3216927 - DNA, 25 bp, Homo sapien
gaggagcagtaagcatcagaattca

SEQ ID NO: 3216928 - DNA, 25 bp, Homo sapien
aactcagcattggaaaagagactcc

SEQ ID NO: 3216929 - DNA, 25 bp, Homo sapien
ttctagcagccctaatgaagtggga

SEQ ID NO: 3216930 - DNA, 25 bp, Homo sapien
ccaaggaaagacgtggcaactcagc

SEQ ID NO: 3216931 - DNA, 25 bp, Homo sapien
cttgacagaatgattatggaaatct

SEQ ID NO: 3216932 - DNA, 25 bp, Homo sapien
gaatgattatggaaatctgtaataa

SEQ ID NO: 3216933 - DNA, 25 bp, Homo sapien
gacagaatgattatggaaatctgta

SEQ ID NO: 3216934 - DNA, 25 bp, Homo sapien
cagaatgattatggaaatctgtaat

SEQ ID NO: 3216935 - DNA, 25 bp, Homo sapien
taaaaccggcatctttgagcagaac

SEQ ID NO: 3216936 - DNA, 25 bp, Homo sapien
tccaaggtctgtaagtccaagttaa

SEQ ID NO: 3216937 - DNA, 25 bp, Homo sapien
gaaagttctgcctctaagttcaacg

SEQ ID NO: 3216938 - DNA, 25 bp, Homo sapien
ggttaactccctttggtgccatatg

SEQ ID NO: 3216939 - DNA, 25 bp, Homo sapien
cagttgcgcttagtagaaaagagcc

SEQ ID NO: 3216940 - DNA, 25 bp, Homo sapien
gagtgggcagaacctatgcaagcat

SEQ ID NO: 3216941 - DNA, 25 bp, Homo sapien
aaaggctctgagatcacagttgcgc

SEQ ID NO: 3216942 - DNA, 25 bp, Homo sapien
tggtaaataggagccgtcccacata

SEQ ID NO: 3216943 - DNA, 25 bp, Homo sapien
tgaaatctacaagacagactgcata

SEQ ID NO: 3216944 - DNA, 25 bp, Homo sapien
ggctggactccatacttagaatggg

SEQ ID NO: 3216945 - DNA, 25 bp, Homo sapien
gttttttgttatgccagatgctcag

SEQ ID NO: 3216946 - DNA, 25 bp, Homo sapien
taactagaaagagtaggctggactc

SEQ ID NO: 3216947 - DNA, 25 bp, Homo sapien
tgctgtttccccagtcggccacaat

SEQ ID NO: 3216948 - DNA, 25 bp, Homo sapien
caaacttcaacatgaattctccttc

SEQ ID NO: 3216949 - DNA, 25 bp, Homo sapien
ctacacctgttggagcattaaactg

SEQ ID NO: 3216950 - DNA, 25 bp, Homo sapien
ccatttgaatccactgctacacctg

SEQ ID NO: 3216951 - DNA, 25 bp, Homo sapien
cagcagatgtgttaatgtaggacaa

SEQ ID NO: 3216952 - DNA, 25 bp, Homo sapien
ccatagagtgggtcagcagatgtgt

SEQ ID NO: 3216953 - DNA, 25 bp, Homo sapien
ttccagagtctgcaaccacaacatg

SEQ ID NO: 3216954 - DNA, 25 bp, Homo sapien
aacatgaccatctgaagttagggcc

SEQ ID NO: 3216955 - DNA, 25 bp, Homo sapien
tactgtaagtatcgatagactttga

SEQ ID NO: 3216956 - DNA, 25 bp, Homo sapien
actgtaagtatcgatagactttgaa

SEQ ID NO: 3216957 - DNA, 25 bp, Homo sapien
ttactgtaagtatcgatagactttg

SEQ ID NO: 3216958 - DNA, 25 bp, Homo sapien
aatattttgccttacgtgcccaggg

SEQ ID NO: 3216959 - DNA, 25 bp, Homo sapien
tatagtgcaagaccatggaagcggg

SEQ ID NO: 3216960 - DNA, 25 bp, Homo sapien
tactgggaggaaatgcgtcgtcact

SEQ ID NO: 3216961 - DNA, 25 bp, Homo sapien
tatagctttatcacggacaggctca

SEQ ID NO: 3216962 - DNA, 25 bp, Homo sapien
ggtaaagagatacacatgaatcctg

SEQ ID NO: 3216963 - DNA, 25 bp, Homo sapien
tactgtggtacgtatgtagctacga

SEQ ID NO: 3216964 - DNA, 25 bp, Homo sapien
tgtttctcctatgtttcaagacaga

SEQ ID NO: 3216965 - DNA, 25 bp, Homo sapien
catacaaacactttgatgcacagcg

SEQ ID NO: 3216966 - DNA, 25 bp, Homo sapien
aggccaggacgcgtttgattttggc

SEQ ID NO: 3216967 - DNA, 25 bp, Homo sapien
gacgcgtttgattttggcgccgact

SEQ ID NO: 3216968 - DNA, 25 bp, Homo sapien
ccaggacgcgtttgattttggcgcc

SEQ ID NO: 3216969 - DNA, 25 bp, Homo sapien
ggcgggacaggccaggacgcgtttg

SEQ ID NO: 3216970 - DNA, 25 bp, Homo sapien
ccggaatggcggtcaacgccaggcc

SEQ ID NO: 3216971 - DNA, 25 bp, Homo sapien
gagagccgggcgaccgctcccgcgg

SEQ ID NO: 3216972 - DNA, 25 bp, Homo sapien
tcccgcggcccggaatggcggtcaa

SEQ ID NO: 3216973 - DNA, 25 bp, Homo sapien
aggccgggatccacatgcagccgag

SEQ ID NO: 3216974 - DNA, 25 bp, Homo sapien
tttccatcatgcgagttctcttttc

SEQ ID NO: 3216975 - DNA, 25 bp, Homo sapien
tccatcatgcgagttctcttttctt

SEQ ID NO: 3216976 - DNA, 25 bp, Homo sapien
atttccatcatgcgagttctctttt

SEQ ID NO: 3216977 - DNA, 25 bp, Homo sapien
ttccatcatgcgagttctcttttct

SEQ ID NO: 3216978 - DNA, 25 bp, Homo sapien
caactaggctttgtaggtcctgcca

SEQ ID NO: 3216979 - DNA, 25 bp, Homo sapien
cagtaacagtgtaaagccatgagac

SEQ ID NO: 3216980 - DNA, 25 bp, Homo sapien
ttctggtgccagtatgcaggactgc

SEQ ID NO: 3216981 - DNA, 25 bp, Homo sapien
catgagacagtaggctgtagagcca

SEQ ID NO: 3216982 - DNA, 25 bp, Homo sapien
ttgggagcaatcttctccaagtctt

SEQ ID NO: 3216983 - DNA, 25 bp, Homo sapien
tctttgggagcaatcttctccaagt

SEQ ID NO: 3216984 - DNA, 25 bp, Homo sapien
tttgggagcaatcttctccaagtct

SEQ ID NO: 3216985 - DNA, 25 bp, Homo sapien
tctctttgggagcaatcttctccaa

SEQ ID NO: 3216986 - DNA, 25 bp, Homo sapien
tagaagttccgatcctctcacagtc

SEQ ID NO: 3216987 - DNA, 25 bp, Homo sapien
tttgaaggacttcttttactgacat

SEQ ID NO: 3216988 - DNA, 25 bp, Homo sapien
catcatcaactaagctttgaaggac

SEQ ID NO: 3216989 - DNA, 25 bp, Homo sapien
tccagaacctccaacttatgtttcc

SEQ ID NO: 3216990 - DNA, 25 bp, Homo sapien
gatgaacaagtaggaaacagcggat

SEQ ID NO: 3216991 - DNA, 25 bp, Homo sapien
taattgtggatacacgtcatcatgc

SEQ ID NO: 3216992 - DNA, 25 bp, Homo sapien
aagggcacgtttgggaactctctgt

SEQ ID NO: 3216993 - DNA, 25 bp, Homo sapien
ccctaatgtaagctacggaatttag

SEQ ID NO: 3216994 - DNA, 25 bp, Homo sapien
tctataataggagactttaattatt

SEQ ID NO: 3216995 - DNA, 25 bp, Homo sapien
aataggagactttaattatttcatg

SEQ ID NO: 3216996 - DNA, 25 bp, Homo sapien
tataataggagactttaattatttc

SEQ ID NO: 3216997 - DNA, 25 bp, Homo sapien
tttctataataggagactttaatta

SEQ ID NO: 3216998 - DNA, 25 bp, Homo sapien
ctccatcttgcacttcatgtggggg

SEQ ID NO: 3216999 - DNA, 25 bp, Homo sapien
ttcatgtgggggtgggggaaagtca

SEQ ID NO: 3217000 - DNA, 25 bp, Homo sapien
tcatgtgggggtgggggaaagtcac

SEQ ID NO: 3217001 - DNA, 25 bp, Homo sapien
catcttgcacttcatgtgggggtgg

SEQ ID NO: 3217002 - DNA, 25 bp, Homo sapien
gagtgatgaatatgcacgttgtttc

SEQ ID NO: 3217003 - DNA, 25 bp, Homo sapien
gctgagtgatgaatatgcacgttgt

SEQ ID NO: 3217004 - DNA, 25 bp, Homo sapien
aaatttgctgagtgatgaatatgca

SEQ ID NO: 3217005 - DNA, 25 bp, Homo sapien
tttgctgagtgatgaatatgcacgt

SEQ ID NO: 3217006 - DNA, 25 bp, Homo sapien
agatcaaggcaataccctccacctg

SEQ ID NO: 3217007 - DNA, 25 bp, Homo sapien
acaactcacagaaggctcagatgct

SEQ ID NO: 3217008 - DNA, 25 bp, Homo sapien
gactatagccatctacccttcagca

SEQ ID NO: 3217009 - DNA, 25 bp, Homo sapien
aatggagcaaacttcacggttgtct

SEQ ID NO: 3217010 - DNA, 25 bp, Homo sapien
tactggacccagtacacaatagctg

SEQ ID NO: 3217011 - DNA, 25 bp, Homo sapien
tatgtgtagactgggagtcaaagaa

SEQ ID NO: 3217012 - DNA, 25 bp, Homo sapien
cagaattactttgggtaatgctgag

SEQ ID NO: 3217013 - DNA, 25 bp, Homo sapien
tatgggccagggagtaagactactg

SEQ ID NO: 3217014 - DNA, 25 bp, Homo sapien
cgtttcacatcggccaattttagct

SEQ ID NO: 3217015 - DNA, 25 bp, Homo sapien
ttcacatcggccaattttagctttc

SEQ ID NO: 3217016 - DNA, 25 bp, Homo sapien
gtttcacatcggccaattttagctt

SEQ ID NO: 3217017 - DNA, 25 bp, Homo sapien
tttcacatcggccaattttagcttt

SEQ ID NO: 3217018 - DNA, 25 bp, Homo sapien
tagactggctgacaacttctgggca

SEQ ID NO: 3217019 - DNA, 25 bp, Homo sapien
tgcaggcggcaactatgtttgctag

SEQ ID NO: 3217020 - DNA, 25 bp, Homo sapien
cgcaagatgcacttgttccagtgga

SEQ ID NO: 3217021 - DNA, 25 bp, Homo sapien
tccagtggattaacagtagactggc

SEQ ID NO: 3217022 - DNA, 25 bp, Homo sapien
ttctgaaccactaaactcttctgat

SEQ ID NO: 3217023 - DNA, 25 bp, Homo sapien
ctgaaccactaaactcttctgatat

SEQ ID NO: 3217024 - DNA, 25 bp, Homo sapien
tctgaaccactaaactcttctgata

SEQ ID NO: 3217025 - DNA, 25 bp, Homo sapien
tttctgaaccactaaactcttctga

SEQ ID NO: 3217026 - DNA, 25 bp, Homo sapien
cagataggggctaggtagctctgaa

SEQ ID NO: 3217027 - DNA, 25 bp, Homo sapien
catcaagaataattagcagataggg

SEQ ID NO: 3217028 - DNA, 25 bp, Homo sapien
gggctaggtagctctgaaaagtcct

SEQ ID NO: 3217029 - DNA, 25 bp, Homo sapien
gatcaggatgagcacaagacttcat

SEQ ID NO: 3217030 - DNA, 25 bp, Homo sapien
cttttgctagcctggttcgctcttc

SEQ ID NO: 3217031 - DNA, 25 bp, Homo sapien
gttccctttggtctcgaagtgaaga

SEQ ID NO: 3217032 - DNA, 25 bp, Homo sapien
aagaaagctcttttgctagcctggt

SEQ ID NO: 3217033 - DNA, 25 bp, Homo sapien
cacaacttgcggatcacagtctttg

SEQ ID NO: 3217034 - DNA, 25 bp, Homo sapien
gccaaaagtgctactcgaatcagac

SEQ ID NO: 3217035 - DNA, 25 bp, Homo sapien
gtttgccaaaagtgctactcgaatc

SEQ ID NO: 3217036 - DNA, 25 bp, Homo sapien
ctaagaggtgatgtgtttgccaaaa

SEQ ID NO: 3217037 - DNA, 25 bp, Homo sapien
tgtgtttgccaaaagtgctactcga

SEQ ID NO: 3217038 - DNA, 25 bp, Homo sapien
aaatgatctttagctatgtatacat

SEQ ID NO: 3217039 - DNA, 25 bp, Homo sapien
gatctttagctatgtatacatttgt

SEQ ID NO: 3217040 - DNA, 25 bp, Homo sapien
tgatctttagctatgtatacatttg

SEQ ID NO: 3217041 - DNA, 25 bp, Homo sapien
aatgatctttagctatgtatacatt

SEQ ID NO: 3217042 - DNA, 25 bp, Homo sapien
tctttggctactttatttgcttggc

SEQ ID NO: 3217043 - DNA, 25 bp, Homo sapien
aagttaagtgattagcccaggtgac

SEQ ID NO: 3217044 - DNA, 25 bp, Homo sapien
tctgctgtctgacacatgtgtggcc

SEQ ID NO: 3217045 - DNA, 25 bp, Homo sapien
cagtaactggcaaatagtcctcaac

SEQ ID NO: 3217046 - DNA, 25 bp, Homo sapien
tcttgcagtgactaatcgcctttga

SEQ ID NO: 3217047 - DNA, 25 bp, Homo sapien
gtgagggaggcaggaccgtgacagt

SEQ ID NO: 3217048 - DNA, 25 bp, Homo sapien
aggaccgtgacagtgtgctcacagt

SEQ ID NO: 3217049 - DNA, 25 bp, Homo sapien
tactcatcaggaagctagtgaggga

SEQ ID NO: 3217050 - DNA, 25 bp, Homo sapien
gcaatctaaatgtctactcatcagg

SEQ ID NO: 3217051 - DNA, 25 bp, Homo sapien
gtaatggcttccagacaatcaggcc

SEQ ID NO: 3217052 - DNA, 25 bp, Homo sapien
cagtaatggcttccagacaatcagg

SEQ ID NO: 3217053 - DNA, 25 bp, Homo sapien
ctacagacagtaatggcttccagac

SEQ ID NO: 3217054 - DNA, 25 bp, Homo sapien
agacagtaatggcttccagacaatc

SEQ ID NO: 3217055 - DNA, 25 bp, Homo sapien
cctattcccaaagggaacacattct

SEQ ID NO: 3217056 - DNA, 25 bp, Homo sapien
aggactgttgcctcaggaattaaag

SEQ ID NO: 3217057 - DNA, 25 bp, Homo sapien
attaaagttgctcctattcccaaag

SEQ ID NO: 3217058 - DNA, 25 bp, Homo sapien
tcaggaattaaagttgctcctattc

SEQ ID NO: 3217059 - DNA, 25 bp, Homo sapien
cttgctgctaaataccagacttaag

SEQ ID NO: 3217060 - DNA, 25 bp, Homo sapien
agagtaatggcaactaattaaaaag

SEQ ID NO: 3217061 - DNA, 25 bp, Homo sapien
tctattaactttcagatatatcaaa

SEQ ID NO: 3217062 - DNA, 25 bp, Homo sapien
tgaacaagttaatagatctcatatt

SEQ ID NO: 3217063 - DNA, 25 bp, Homo sapien
ggcccaagattttattgcgaatatg

SEQ ID NO: 3217064 - DNA, 25 bp, Homo sapien
caagattttattgcgaatatgttat

SEQ ID NO: 3217065 - DNA, 25 bp, Homo sapien
cccaagattttattgcgaatatgtt

SEQ ID NO: 3217066 - DNA, 25 bp, Homo sapien
gcccaagattttattgcgaatatgt

SEQ ID NO: 3217067 - DNA, 25 bp, Homo sapien
aaatgataaacacagttacaggcaa

SEQ ID NO: 3217068 - DNA, 25 bp, Homo sapien
ggcaaacgacaattcagtacactta

SEQ ID NO: 3217069 - DNA, 25 bp, Homo sapien
tcagtacacttagttagataatagt

SEQ ID NO: 3217070 - DNA, 25 bp, Homo sapien
tcacaagcttgtacatccttcacca

SEQ ID NO: 3217071 - DNA, 25 bp, Homo sapien
gggatatggttatcatcctgctttt

SEQ ID NO: 3217072 - DNA, 25 bp, Homo sapien
atcctgcttttgttctaccaaaagg

SEQ ID NO: 3217073 - DNA, 25 bp, Homo sapien
actttgatgagcactggggggatat

SEQ ID NO: 3217074 - DNA, 25 bp, Homo sapien
gatggatggatttttattgtcctac

SEQ ID NO: 3217075 - DNA, 25 bp, Homo sapien
gcctccataaagctttaggtctcgg

SEQ ID NO: 3217076 - DNA, 25 bp, Homo sapien
tgaaggatgcgtctaattctccgga

SEQ ID NO: 3217077 - DNA, 25 bp, Homo sapien
tggcagttcctacaagccttgaagg

SEQ ID NO: 3217078 - DNA, 25 bp, Homo sapien
ttaaactctgttctagcaccctgct

SEQ ID NO: 3217079 - DNA, 25 bp, Homo sapien
ttcttgttgaggattcggatgatac

SEQ ID NO: 3217080 - DNA, 25 bp, Homo sapien
tgacaggcatgcaaagatgtgggta

SEQ ID NO: 3217081 - DNA, 25 bp, Homo sapien
taacttgccgaacttgcccctgctt

SEQ ID NO: 3217082 - DNA, 25 bp, Homo sapien
tcacagccagcacgatatgatcaaa

SEQ ID NO: 3217083 - DNA, 25 bp, Homo sapien
ttagccctgacctgaatttccgcac

SEQ ID NO: 3217084 - DNA, 25 bp, Homo sapien
tcctctgaattctatggtgcgtgct

SEQ ID NO: 3217085 - DNA, 25 bp, Homo sapien
ccatctctgttagttcacacggttg

SEQ ID NO: 3217086 - DNA, 25 bp, Homo sapien
tacagcctgcagtaccttaagtcaa

SEQ ID NO: 3217087 - DNA, 25 bp, Homo sapien
tcctctccgttgctcgccgcgctcg

SEQ ID NO: 3217088 - DNA, 25 bp, Homo sapien
gcgctcctctccgttgctcgccgcg

SEQ ID NO: 3217089 - DNA, 25 bp, Homo sapien
gctcctctccgttgctcgccgcgct

SEQ ID NO: 3217090 - DNA, 25 bp, Homo sapien
ctctccgttgctcgccgcgctcgcc

SEQ ID NO: 3217091 - DNA, 25 bp, Homo sapien
ggctgcgggcgtcggagccccgcca

SEQ ID NO: 3217092 - DNA, 25 bp, Homo sapien
cgcccagcaggaggttcacggccgc

SEQ ID NO: 3217093 - DNA, 25 bp, Homo sapien
ggccgccgcggtgcggcagtagcag

SEQ ID NO: 3217094 - DNA, 25 bp, Homo sapien
gcaggaggttcacggccgccgcggt

SEQ ID NO: 3217095 - DNA, 25 bp, Homo sapien
gcccctcccgggcgacagcagggca

SEQ ID NO: 3217096 - DNA, 25 bp, Homo sapien
cccctcccgggcgacagcagggcag

SEQ ID NO: 3217097 - DNA, 25 bp, Homo sapien
agcccctcccgggcgacagcagggc

SEQ ID NO: 3217098 - DNA, 25 bp, Homo sapien
gagcccctcccgggcgacagcaggg

SEQ ID NO: 3217099 - DNA, 25 bp, Homo sapien
tgttatcagcggagaatcgcaacag

SEQ ID NO: 3217100 - DNA, 25 bp, Homo sapien
gaaaatgttatcagcggagaatcgc

SEQ ID NO: 3217101 - DNA, 25 bp, Homo sapien
gcggagaatcgcaacagctttcctt

SEQ ID NO: 3217102 - DNA, 25 bp, Homo sapien
tcgccctcttatagatttcagcagt

SEQ ID NO: 3217103 - DNA, 25 bp, Homo sapien
cacaaaggctccagggcgcgagcgg

SEQ ID NO: 3217104 - DNA, 25 bp, Homo sapien
gggcccgcgcacaaaggctccaggg

SEQ ID NO: 3217105 - DNA, 25 bp, Homo sapien
caaagcgggggctgcgcccggggcg

SEQ ID NO: 3217106 - DNA, 25 bp, Homo sapien
gcgcaggggcccgcgcacaaaggct

SEQ ID NO: 3217107 - DNA, 25 bp, Homo sapien
accacgttcggcaacggctcaatcg

SEQ ID NO: 3217108 - DNA, 25 bp, Homo sapien
acagctccaccacgttcggcaacgg

SEQ ID NO: 3217109 - DNA, 25 bp, Homo sapien
ctccaccacgttcggcaacggctca

SEQ ID NO: 3217110 - DNA, 25 bp, Homo sapien
agctccaccacgttcggcaacggct

SEQ ID NO: 3217111 - DNA, 25 bp, Homo sapien
ctgggttcccaccttctgaacttgg

SEQ ID NO: 3217112 - DNA, 25 bp, Homo sapien
cggccgaacagaccgctggccgctt

SEQ ID NO: 3217113 - DNA, 25 bp, Homo sapien
tgtgcacccaggacacccacggccg

SEQ ID NO: 3217114 - DNA, 25 bp, Homo sapien
tggcctgggttcccaccttctgaac

SEQ ID NO: 3217115 - DNA, 25 bp, Homo sapien
catctgcagagctgagtacaagcca

SEQ ID NO: 3217116 - DNA, 25 bp, Homo sapien
catacgtaatggctaaaaacttggg

SEQ ID NO: 3217117 - DNA, 25 bp, Homo sapien
tatccctgacacctaaagcactgct

SEQ ID NO: 3217118 - DNA, 25 bp, Homo sapien
aagtaatttcgctgttctgtgcctc

SEQ ID NO: 3217119 - DNA, 25 bp, Homo sapien
tcctccagaccctcttcagaatcac

SEQ ID NO: 3217120 - DNA, 25 bp, Homo sapien
cctccagaccctcttcagaatcacc

SEQ ID NO: 3217121 - DNA, 25 bp, Homo sapien
tattagtacagtcgaatccctgaga

SEQ ID NO: 3217122 - DNA, 25 bp, Homo sapien
gagggccgactgcatacaattgatc

SEQ ID NO: 3217123 - DNA, 25 bp, Homo sapien
gattggttccaggacgtctcaagaa

SEQ ID NO: 3217124 - DNA, 25 bp, Homo sapien
gaatccacgaatgcagaagtcacag

SEQ ID NO: 3217125 - DNA, 25 bp, Homo sapien
tccgagctccagagtggtatcaact

SEQ ID NO: 3217126 - DNA, 25 bp, Homo sapien
tacaaaggcacgtgcaacacagctc

SEQ ID NO: 3217127 - DNA, 25 bp, Homo sapien
gccatctccctgtagacgtgtcata

SEQ ID NO: 3217128 - DNA, 25 bp, Homo sapien
tatcaagtctgagattcccaggagg

SEQ ID NO: 3217129 - DNA, 25 bp, Homo sapien
tcaccctggtgcttgtaaaaacatg

SEQ ID NO: 3217130 - DNA, 25 bp, Homo sapien
tttttagggactggacacgatggct

SEQ ID NO: 3217131 - DNA, 25 bp, Homo sapien
catgttatctaggaggaaccaaaag

SEQ ID NO: 3217132 - DNA, 25 bp, Homo sapien
aatgaatacgaacctaatcaccctg

SEQ ID NO: 3217133 - DNA, 25 bp, Homo sapien
aattctgttgttctaaagccgcgca

SEQ ID NO: 3217134 - DNA, 25 bp, Homo sapien
tgccggcttgacagaggacttccag

SEQ ID NO: 3217135 - DNA, 25 bp, Homo sapien
ctgtgcgacaagagactggagtgcc

SEQ ID NO: 3217136 - DNA, 25 bp, Homo sapien
tatacgacagccacgtgaaagcacg

SEQ ID NO: 3217137 - DNA, 25 bp, Homo sapien
taaatgcataagacgtacaacttgg

SEQ ID NO: 3217138 - DNA, 25 bp, Homo sapien
aagactgggctaccgaactccagcc

SEQ ID NO: 3217139 - DNA, 25 bp, Homo sapien
gcaagtgtgtggacaaaaaatgcct

SEQ ID NO: 3217140 - DNA, 25 bp, Homo sapien
tatgactgacacctctaattaccgt

SEQ ID NO: 3217141 - DNA, 25 bp, Homo sapien
ttttcgatgcaatggagcagccccg

SEQ ID NO: 3217142 - DNA, 25 bp, Homo sapien
taggaccagcctgtgaagtaatgct

SEQ ID NO: 3217143 - DNA, 25 bp, Homo sapien
tttgcaaaactaggttaggaccagc

SEQ ID NO: 3217144 - DNA, 25 bp, Homo sapien
ggtcctggaaaagcaactatccctg

SEQ ID NO: 3217145 - DNA, 25 bp, Homo sapien
taatctcatgtctgtgcgttcggca

SEQ ID NO: 3217146 - DNA, 25 bp, Homo sapien
tccagaacagggtaaagcagcagca

SEQ ID NO: 3217147 - DNA, 25 bp, Homo sapien
caatagatacgtgaacctcgtggga

SEQ ID NO: 3217148 - DNA, 25 bp, Homo sapien
cctggtacacaattctatggagagc

SEQ ID NO: 3217149 - DNA, 25 bp, Homo sapien
caatgacaacctgaataccaggaac

SEQ ID NO: 3217150 - DNA, 25 bp, Homo sapien
tgacaacctgaataccaggaaccat

SEQ ID NO: 3217151 - DNA, 25 bp, Homo sapien
taaacacaatgacaacctgaatacc

SEQ ID NO: 3217152 - DNA, 25 bp, Homo sapien
ctctaaacacaatgacaacctgaat

SEQ ID NO: 3217153 - DNA, 25 bp, Homo sapien
ggcattttctcaggacggtcagtgt

SEQ ID NO: 3217154 - DNA, 25 bp, Homo sapien
tcaccagcatggacagaccttgagt

SEQ ID NO: 3217155 - DNA, 25 bp, Homo sapien
tagagtcactcactttcccagcagc

SEQ ID NO: 3217156 - DNA, 25 bp, Homo sapien
tcttcaagtgcctccaagtgtgcat

SEQ ID NO: 3217157 - DNA, 25 bp, Homo sapien
cctagcttgaccctcaagcctgtgg

SEQ ID NO: 3217158 - DNA, 25 bp, Homo sapien
ctagaaatgcagagtgaatttctgt

SEQ ID NO: 3217159 - DNA, 25 bp, Homo sapien
tcttgcacataactgacacttgata

SEQ ID NO: 3217160 - DNA, 25 bp, Homo sapien
tcatccacagtatctaatcccgttt

SEQ ID NO: 3217161 - DNA, 25 bp, Homo sapien
taatcccgtttcttgcacataactg

SEQ ID NO: 3217162 - DNA, 25 bp, Homo sapien
aactgacacttgatatagcaggttc

SEQ ID NO: 3217163 - DNA, 25 bp, Homo sapien
gatgtactgggctttaccctggcag

SEQ ID NO: 3217164 - DNA, 25 bp, Homo sapien
gagcaactggctattgtgtatatca

SEQ ID NO: 3217165 - DNA, 25 bp, Homo sapien
caaatttctggttcttccactgagc

SEQ ID NO: 3217166 - DNA, 25 bp, Homo sapien
cctgtggtcaaggactagtaaactt

SEQ ID NO: 3217167 - DNA, 25 bp, Homo sapien
tctgctagcttaaggcaaactgcct

SEQ ID NO: 3217168 - DNA, 25 bp, Homo sapien
taaaatgaatagctagtcccctctg

SEQ ID NO: 3217169 - DNA, 25 bp, Homo sapien
cattcaacacacagcagcctagagg

SEQ ID NO: 3217170 - DNA, 25 bp, Homo sapien
taactaccatgtatcagagtggact

SEQ ID NO: 3217171 - DNA, 25 bp, Homo sapien
aaggaatgtggaatcgcaggcccca

SEQ ID NO: 3217172 - DNA, 25 bp, Homo sapien
ctcgatgattcctgtgcgccttaat

SEQ ID NO: 3217173 - DNA, 25 bp, Homo sapien
tcagcatctccaagctaacaagatc

SEQ ID NO: 3217174 - DNA, 25 bp, Homo sapien
caagctaacaagatccctcgatgat

SEQ ID NO: 3217175 - DNA, 25 bp, Homo sapien
gctatttacaagtgctactggcctc

SEQ ID NO: 3217176 - DNA, 25 bp, Homo sapien
caacacgacaggagctatttacaag

SEQ ID NO: 3217177 - DNA, 25 bp, Homo sapien
cacatttcacaacacgacaggagct

SEQ ID NO: 3217178 - DNA, 25 bp, Homo sapien
tactggcctcatataagacagcaag

SEQ ID NO: 3217179 - DNA, 25 bp, Homo sapien
tacaaggagtttgtattctccagga

SEQ ID NO: 3217180 - DNA, 25 bp, Homo sapien
acacagaccctgactacaaggagtt

SEQ ID NO: 3217181 - DNA, 25 bp, Homo sapien
cacagcattaggtgtagtgaatgga

SEQ ID NO: 3217182 - DNA, 25 bp, Homo sapien
cttatatccaacacagcattaggtg

SEQ ID NO: 3217183 - DNA, 25 bp, Homo sapien
gaagaccctcaacttcaaactacgc

SEQ ID NO: 3217184 - DNA, 25 bp, Homo sapien
tacgcctatgcagcattctcttttc

SEQ ID NO: 3217185 - DNA, 25 bp, Homo sapien
tcgaacttgcatgagtgaaatgtgc

SEQ ID NO: 3217186 - DNA, 25 bp, Homo sapien
cttttaaaggtacttgccagcacca

SEQ ID NO: 3217187 - DNA, 25 bp, Homo sapien
atagcgtattatactgtaaaatgcc

SEQ ID NO: 3217188 - DNA, 25 bp, Homo sapien
tatactaacagcactttatacaata

SEQ ID NO: 3217189 - DNA, 25 bp, Homo sapien
gggaaatcctgtagagttcacattc

SEQ ID NO: 3217190 - DNA, 25 bp, Homo sapien
gtaaaatgccacgtttatataataa

SEQ ID NO: 3217191 - DNA, 25 bp, Homo sapien
gagccagcggctgcatatctgcaga

SEQ ID NO: 3217192 - DNA, 25 bp, Homo sapien
agctgctcagcggaactaatactac

SEQ ID NO: 3217193 - DNA, 25 bp, Homo sapien
tttaattctaactggaacagcttcc

SEQ ID NO: 3217194 - DNA, 25 bp, Homo sapien
gcggaactaatactacatggcctca

SEQ ID NO: 3217195 - DNA, 25 bp, Homo sapien
ttgtcccacgagtaggagatcccag

SEQ ID NO: 3217196 - DNA, 25 bp, Homo sapien
tgtcccacgagtaggagatcccagt

SEQ ID NO: 3217197 - DNA, 25 bp, Homo sapien
tcccacgagtaggagatcccagtac

SEQ ID NO: 3217198 - DNA, 25 bp, Homo sapien
cttgtcccacgagtaggagatccca

SEQ ID NO: 3217199 - DNA, 25 bp, Homo sapien
gtcccaatatgagcaaatatctcaa

SEQ ID NO: 3217200 - DNA, 25 bp, Homo sapien
taaagtcccaatatgagcaaatatc

SEQ ID NO: 3217201 - DNA, 25 bp, Homo sapien
tacaaagaatgttaacaagattgcc

SEQ ID NO: 3217202 - DNA, 25 bp, Homo sapien
tgttaacaagattgccagaaaaatc

SEQ ID NO: 3217203 - DNA, 25 bp, Homo sapien
ccacattccatgaggaccaaaaggc

SEQ ID NO: 3217204 - DNA, 25 bp, Homo sapien
cacattccatgaggaccaaaaggca

SEQ ID NO: 3217205 - DNA, 25 bp, Homo sapien
ccccacattccatgaggaccaaaag

SEQ ID NO: 3217206 - DNA, 25 bp, Homo sapien
acattccatgaggaccaaaaggcat

SEQ ID NO: 3217207 - DNA, 25 bp, Homo sapien
cctcaatgagcagctaccacggagg

SEQ ID NO: 3217208 - DNA, 25 bp, Homo sapien
gagcagctaccacggagggacactg

SEQ ID NO: 3217209 - DNA, 25 bp, Homo sapien
tggcaggagtgaagatagcatggac

SEQ ID NO: 3217210 - DNA, 25 bp, Homo sapien
gaatggggctatctgagtgggcctc

SEQ ID NO: 3217211 - DNA, 25 bp, Homo sapien
caggctttgtgacctttcagcaact

SEQ ID NO: 3217212 - DNA, 25 bp, Homo sapien
cgagcagccatcaaccaagctggtt

SEQ ID NO: 3217213 - DNA, 25 bp, Homo sapien
gctggtccaggaatggaaatttgac

SEQ ID NO: 3217214 - DNA, 25 bp, Homo sapien
ccaagctggttcaaaggctggtcca

SEQ ID NO: 3217215 - DNA, 25 bp, Homo sapien
ttccactaaatagtttgtccgagaa

SEQ ID NO: 3217216 - DNA, 25 bp, Homo sapien
tttccactaaatagtttgtccgaga

SEQ ID NO: 3217217 - DNA, 25 bp, Homo sapien
tccactaaatagtttgtccgagaag

SEQ ID NO: 3217218 - DNA, 25 bp, Homo sapien
agcccagatgctctcctacggccat

SEQ ID NO: 3217219 - DNA, 25 bp, Homo sapien
accctaacccagcccagatgctctc

SEQ ID NO: 3217220 - DNA, 25 bp, Homo sapien
cccagcccagatgctctcctacggc

SEQ ID NO: 3217221 - DNA, 25 bp, Homo sapien
caggagcccaccctaacccagccca

SEQ ID NO: 3217222 - DNA, 25 bp, Homo sapien
acaacctcgctgtccctactagggt

SEQ ID NO: 3217223 - DNA, 25 bp, Homo sapien
tgcaaacactgaattcaccacaacc

SEQ ID NO: 3217224 - DNA, 25 bp, Homo sapien
aactggcggtacatggaaatgtcca

SEQ ID NO: 3217225 - DNA, 25 bp, Homo sapien
ggttgtaagcatggagaatctttgc

SEQ ID NO: 3217226 - DNA, 25 bp, Homo sapien
atgataggaaaggactccatacgaa

SEQ ID NO: 3217227 - DNA, 25 bp, Homo sapien
taggaaaggactccatacgaagagg

SEQ ID NO: 3217228 - DNA, 25 bp, Homo sapien
gaaaggactccatacgaagaggtat

SEQ ID NO: 3217229 - DNA, 25 bp, Homo sapien
gactccatacgaagaggtattaata

SEQ ID NO: 3217230 - DNA, 25 bp, Homo sapien
agccaactgtggcatgtcaggcaga

SEQ ID NO: 3217231 - DNA, 25 bp, Homo sapien
ttttaacgacataaaccaggtgaca

SEQ ID NO: 3217232 - DNA, 25 bp, Homo sapien
gacccacagtaggactatagctccg

SEQ ID NO: 3217233 - DNA, 25 bp, Homo sapien
tatagctccgtcatcagtaggaaag

SEQ ID NO: 3217234 - DNA, 25 bp, Homo sapien
gctttgcagacccttctgtagagat

SEQ ID NO: 3217235 - DNA, 25 bp, Homo sapien
ctgcatttgagacagctgaatgctc

SEQ ID NO: 3217236 - DNA, 25 bp, Homo sapien
gaaaataagcatttggtagctgctt

SEQ ID NO: 3217237 - DNA, 25 bp, Homo sapien
gcatttgagacagctgaatgctctg

SEQ ID NO: 3217238 - DNA, 25 bp, Homo sapien
actttaagtgggcagattttgtggt

SEQ ID NO: 3217239 - DNA, 25 bp, Homo sapien
tcgtgagggctgcacaactttggat

SEQ ID NO: 3217240 - DNA, 25 bp, Homo sapien
taaaattagacagtgatcgtgaggg

SEQ ID NO: 3217241 - DNA, 25 bp, Homo sapien
aaagtaagagactgaggcaatgaaa

SEQ ID NO: 3217242 - DNA, 25 bp, Homo sapien
gactaatgggagagaactatgggca

SEQ ID NO: 3217243 - DNA, 25 bp, Homo sapien
tggaactaccagacatctacatgca

SEQ ID NO: 3217244 - DNA, 25 bp, Homo sapien
taactaaactcacagatccttggat

SEQ ID NO: 3217245 - DNA, 25 bp, Homo sapien
tataccgtaacaccacaagagtagg

SEQ ID NO: 3217246 - DNA, 25 bp, Homo sapien
tgagcctaacacaacataaacctcg

SEQ ID NO: 3217247 - DNA, 25 bp, Homo sapien
aaaatttcttgccttctcatgagcc

SEQ ID NO: 3217248 - DNA, 25 bp, Homo sapien
gccagattctgagacaatgccaatt

SEQ ID NO: 3217249 - DNA, 25 bp, Homo sapien
tggcttgaatccaatacattactgg

SEQ ID NO: 3217250 - DNA, 25 bp, Homo sapien
gccagtgaactgtacgcatacaaat

SEQ ID NO: 3217251 - DNA, 25 bp, Homo sapien
gaactgtacgcatacaaatggtgaa

SEQ ID NO: 3217252 - DNA, 25 bp, Homo sapien
gctgagggaaggtgtttaatgggta

SEQ ID NO: 3217253 - DNA, 25 bp, Homo sapien
aatcccacttctatgagggacctag

SEQ ID NO: 3217254 - DNA, 25 bp, Homo sapien
gttccccaactgtccccaactgagc

SEQ ID NO: 3217255 - DNA, 25 bp, Homo sapien
ctgtgtgacaacaggacacgccctc

SEQ ID NO: 3217256 - DNA, 25 bp, Homo sapien
gtgtgacaacaggacacgccctcat

SEQ ID NO: 3217257 - DNA, 25 bp, Homo sapien
tgtgtgacaacaggacacgccctca

SEQ ID NO: 3217258 - DNA, 25 bp, Homo sapien
agaggctagtattagtggtttctgc

SEQ ID NO: 3217259 - DNA, 25 bp, Homo sapien
tgcattccagttgcacctgcaagag

SEQ ID NO: 3217260 - DNA, 25 bp, Homo sapien
tgcacctgcaagaggctagtattag

SEQ ID NO: 3217261 - DNA, 25 bp, Homo sapien
ttaattgctgacacactttattatg

SEQ ID NO: 3217262 - DNA, 25 bp, Homo sapien
agcagagagaaaacactacacattt

SEQ ID NO: 3217263 - DNA, 25 bp, Homo sapien
agagaaaacactacacattttattt

SEQ ID NO: 3217264 - DNA, 25 bp, Homo sapien
cagagagaaaacactacacatttta

SEQ ID NO: 3217265 - DNA, 25 bp, Homo sapien
gagagaaaacactacacattttatt

SEQ ID NO: 3217266 - DNA, 25 bp, Homo sapien
accattatgctcatttgtagacgca

SEQ ID NO: 3217267 - DNA, 25 bp, Homo sapien
aagttttccattgttaccattatgc

SEQ ID NO: 3217268 - DNA, 25 bp, Homo sapien
gattcatctgtagctacgtaaacaa

SEQ ID NO: 3217269 - DNA, 25 bp, Homo sapien
gagagatgatctaacaaatgttgtg

SEQ ID NO: 3217270 - DNA, 25 bp, Homo sapien
aaggctgtttcctgaatgtaatata

SEQ ID NO: 3217271 - DNA, 25 bp, Homo sapien
tataaggctgtttcctgaatgtaat

SEQ ID NO: 3217272 - DNA, 25 bp, Homo sapien
atataaggctgtttcctgaatgtaa

SEQ ID NO: 3217273 - DNA, 25 bp, Homo sapien
taaggctgtttcctgaatgtaatat

SEQ ID NO: 3217274 - DNA, 25 bp, Homo sapien
aggtagtagtactggttcaaactgc

SEQ ID NO: 3217275 - DNA, 25 bp, Homo sapien
gtactggttcaaactgcagagacag

SEQ ID NO: 3217276 - DNA, 25 bp, Homo sapien
agtttgttgtagaagtaggtagtag

SEQ ID NO: 3217277 - DNA, 25 bp, Homo sapien
gaagtaggtagtagtactggttcaa

SEQ ID NO: 3217278 - DNA, 25 bp, Homo sapien
ttcttcaccctgactcccaattatc

SEQ ID NO: 3217279 - DNA, 25 bp, Homo sapien
actcccaattatcttggaggaggca

SEQ ID NO: 3217280 - DNA, 25 bp, Homo sapien
tttcttcaccctgactcccaattat

SEQ ID NO: 3217281 - DNA, 25 bp, Homo sapien
ctttcttcaccctgactcccaatta

SEQ ID NO: 3217282 - DNA, 25 bp, Homo sapien
aattccactgtcacatgatgtagct

SEQ ID NO: 3217283 - DNA, 25 bp, Homo sapien
attccactgtcacatgatgtagctg

SEQ ID NO: 3217284 - DNA, 25 bp, Homo sapien
ctgtgaacagacgacatgcatgcta

SEQ ID NO: 3217285 - DNA, 25 bp, Homo sapien
tgaacagacgacatgcatgctatca

SEQ ID NO: 3217286 - DNA, 25 bp, Homo sapien
tgtgaacagacgacatgcatgctat

SEQ ID NO: 3217287 - DNA, 25 bp, Homo sapien
acagacgacatgcatgctatcaggc

SEQ ID NO: 3217288 - DNA, 25 bp, Homo sapien
aacactacggtcaaaatggttgcgg

SEQ ID NO: 3217289 - DNA, 25 bp, Homo sapien
tctctatgtgaaactgggttgcaga

SEQ ID NO: 3217290 - DNA, 25 bp, Homo sapien
taccatattgaccaaagtcctgatg

SEQ ID NO: 3217291 - DNA, 25 bp, Homo sapien
gatgtgttctcatgagtctctatgt

SEQ ID NO: 3217292 - DNA, 25 bp, Homo sapien
aaatatattccaacagcctggaggt

SEQ ID NO: 3217293 - DNA, 25 bp, Homo sapien
ggttggtgctgaataaatctgtaga

SEQ ID NO: 3217294 - DNA, 25 bp, Homo sapien
gatttatggcaatgtctttaacagc

SEQ ID NO: 3217295 - DNA, 25 bp, Homo sapien
aggtattgcaaaaatggcacctatg

SEQ ID NO: 3217296 - DNA, 25 bp, Homo sapien
ttggcccactaagcaaattcaagga

SEQ ID NO: 3217297 - DNA, 25 bp, Homo sapien
ttaattgaactctaatcctctggga

SEQ ID NO: 3217298 - DNA, 25 bp, Homo sapien
caaggattacgagcaactaagagtc

SEQ ID NO: 3217299 - DNA, 25 bp, Homo sapien
cagctagttaagcatgaggcatttc

SEQ ID NO: 3217300 - DNA, 25 bp, Homo sapien
aataatgcatgccacaatgtgctat

SEQ ID NO: 3217301 - DNA, 25 bp, Homo sapien
aatgtgctatcacttcaaaacccag

SEQ ID NO: 3217302 - DNA, 25 bp, Homo sapien
cacaatgtgctatcacttcaaaacc

SEQ ID NO: 3217303 - DNA, 25 bp, Homo sapien
gcatgccacaatgtgctatcacttc

SEQ ID NO: 3217304 - DNA, 25 bp, Homo sapien
taaaagtccctctaactcaatggca

SEQ ID NO: 3217305 - DNA, 25 bp, Homo sapien
taaacttcttaaactgagaggactg

SEQ ID NO: 3217306 - DNA, 25 bp, Homo sapien
gaggactgtagagttaataaatgcc

SEQ ID NO: 3217307 - DNA, 25 bp, Homo sapien
ctaaaagttagatcagattccatat

SEQ ID NO: 3217308 - DNA, 25 bp, Homo sapien
caatttatttgcaagttcagaatcc

SEQ ID NO: 3217309 - DNA, 25 bp, Homo sapien
agaatccacattccaggtagattga

SEQ ID NO: 3217310 - DNA, 25 bp, Homo sapien
gaaaggctcccattccaattaggat

SEQ ID NO: 3217311 - DNA, 25 bp, Homo sapien
gtagattgatccagagaaaggctcc

SEQ ID NO: 3217312 - DNA, 25 bp, Homo sapien
ttcaagtgagcaaatcgagttgttc

SEQ ID NO: 3217313 - DNA, 25 bp, Homo sapien
cttcaagtgagcaaatcgagttgtt

SEQ ID NO: 3217314 - DNA, 25 bp, Homo sapien
tcttcaagtgagcaaatcgagttgt

SEQ ID NO: 3217315 - DNA, 25 bp, Homo sapien
taacatgaggccaggctctgcgatc

SEQ ID NO: 3217316 - DNA, 25 bp, Homo sapien
tgcgctgaagtttaacatgaggcca

SEQ ID NO: 3217317 - DNA, 25 bp, Homo sapien
ggctctgcgatcaaacgaggcaaaa

SEQ ID NO: 3217318 - DNA, 25 bp, Homo sapien
gctcctaagggcagttgcgctgaag

SEQ ID NO: 3217319 - DNA, 25 bp, Homo sapien
agaggacgggttctgcaccacaaag

SEQ ID NO: 3217320 - DNA, 25 bp, Homo sapien
caggtgcactagggcttcgggttta

SEQ ID NO: 3217321 - DNA, 25 bp, Homo sapien
tgtggagcaggtgcactagggcttc

SEQ ID NO: 3217322 - DNA, 25 bp, Homo sapien
ctgcaaggagaccggccaagaggac

SEQ ID NO: 3217323 - DNA, 25 bp, Homo sapien
caagcttcggtgagctggaattcac

SEQ ID NO: 3217324 - DNA, 25 bp, Homo sapien
aatcatctgcatatcagtgccaaac

SEQ ID NO: 3217325 - DNA, 25 bp, Homo sapien
ttaatcatctgcatatcagtgccaa

SEQ ID NO: 3217326 - DNA, 25 bp, Homo sapien
gaattcaccagttgtgaaattaatc

SEQ ID NO: 3217327 - DNA, 25 bp, Homo sapien
cgtatgctcatgtgtctagtttgtc

SEQ ID NO: 3217328 - DNA, 25 bp, Homo sapien
tttctgttttaggataacatcctac

SEQ ID NO: 3217329 - DNA, 25 bp, Homo sapien
ggcccgtatgctcatgtgtctagtt

SEQ ID NO: 3217330 - DNA, 25 bp, Homo sapien
catgtgtctagtttgtcggcattct

SEQ ID NO: 3217331 - DNA, 25 bp, Homo sapien
tgtttcagttattgctagtgttacc

SEQ ID NO: 3217332 - DNA, 25 bp, Homo sapien
gcaatgtatcacttcttagagctaa

SEQ ID NO: 3217333 - DNA, 25 bp, Homo sapien
ttgctagtgttacccatgccatctg

SEQ ID NO: 3217334 - DNA, 25 bp, Homo sapien
cagttattgctagtgttacccatgc

SEQ ID NO: 3217335 - DNA, 25 bp, Homo sapien
tgtaagtggaggatgccaaacctgg

SEQ ID NO: 3217336 - DNA, 25 bp, Homo sapien
caggtgtgaaaactacgccaaccct

SEQ ID NO: 3217337 - DNA, 25 bp, Homo sapien
tttccatagtcagcaggtgtgaaaa

SEQ ID NO: 3217338 - DNA, 25 bp, Homo sapien
tatgagtgaggtaacttttccatag

SEQ ID NO: 3217339 - DNA, 25 bp, Homo sapien
ttaaaagactctcaagactacctaa

SEQ ID NO: 3217340 - DNA, 25 bp, Homo sapien
gcaaaagaacaaacttatatattaa

SEQ ID NO: 3217341 - DNA, 25 bp, Homo sapien
ttctcactgatgaggagagcttcaa

SEQ ID NO: 3217342 - DNA, 25 bp, Homo sapien
gactctcaagactacctaaagatga

SEQ ID NO: 3217343 - DNA, 25 bp, Homo sapien
tcagcgtggactcgggcaccttaaa

SEQ ID NO: 3217344 - DNA, 25 bp, Homo sapien
gtctacggcagtccatcagcgtgga

SEQ ID NO: 3217345 - DNA, 25 bp, Homo sapien
ttaaatcggagtgagcctcctgcac

SEQ ID NO: 3217346 - DNA, 25 bp, Homo sapien
aaatccttccacgccaatcatgtca

SEQ ID NO: 3217347 - DNA, 25 bp, Homo sapien
ccctgtcagagtgccacacatatga

SEQ ID NO: 3217348 - DNA, 25 bp, Homo sapien
tgtcagagtgccacacatatgaact

SEQ ID NO: 3217349 - DNA, 25 bp, Homo sapien
acctcccctgtcagagtgccacaca

SEQ ID NO: 3217350 - DNA, 25 bp, Homo sapien
tcagagtgccacacatatgaactca

SEQ ID NO: 3217351 - DNA, 25 bp, Homo sapien
aaaagacttcttaaccacatgtggc

SEQ ID NO: 3217352 - DNA, 25 bp, Homo sapien
tcaatggatcatggcggtggtctct

SEQ ID NO: 3217353 - DNA, 25 bp, Homo sapien
ggcctgcaccactatctaacttatg

SEQ ID NO: 3217354 - DNA, 25 bp, Homo sapien
gggtaccagcctatatatgcacaaa

SEQ ID NO: 3217355 - DNA, 25 bp, Homo sapien
taaaggcatttcgtttaaatacatg

SEQ ID NO: 3217356 - DNA, 25 bp, Homo sapien
gaagttgctgaaactaacataagta

SEQ ID NO: 3217357 - DNA, 25 bp, Homo sapien
gcactgtctgttacagtagccatta

SEQ ID NO: 3217358 - DNA, 25 bp, Homo sapien
ttttccagtgcaacatgttaatgta

SEQ ID NO: 3217359 - DNA, 25 bp, Homo sapien
aacaaaaatctgctcagccattaaa

SEQ ID NO: 3217360 - DNA, 25 bp, Homo sapien
cagtgcccatttagtatagttttct

SEQ ID NO: 3217361 - DNA, 25 bp, Homo sapien
aaacaaaaatctgctcagccattaa

SEQ ID NO: 3217362 - DNA, 25 bp, Homo sapien
actcagtgcccatttagtatagttt

SEQ ID NO: 3217363 - DNA, 25 bp, Homo sapien
tattgtaaagaagaattcggaatgt

SEQ ID NO: 3217364 - DNA, 25 bp, Homo sapien
tcaaagtcaattctaaataactgaa

SEQ ID NO: 3217365 - DNA, 25 bp, Homo sapien
gcgacaggtctggttctatagtttt

SEQ ID NO: 3217366 - DNA, 25 bp, Homo sapien
atctggttctacaggtgtttgtttg

SEQ ID NO: 3217367 - DNA, 25 bp, Homo sapien
gaaaactgatgacaatccagcacct

SEQ ID NO: 3217368 - DNA, 25 bp, Homo sapien
caatgctgatatcgcgggatgtgtt

SEQ ID NO: 3217369 - DNA, 25 bp, Homo sapien
cgaaacagttataggaagaggtcca

SEQ ID NO: 3217370 - DNA, 25 bp, Homo sapien
cagcacctcgaatccataaccttgg

SEQ ID NO: 3217371 - DNA, 25 bp, Homo sapien
gattttagccacaaggcaaaataat

SEQ ID NO: 3217372 - DNA, 25 bp, Homo sapien
tagccacaaggcaaaataatgacaa

SEQ ID NO: 3217373 - DNA, 25 bp, Homo sapien
ttttagccacaaggcaaaataatga

SEQ ID NO: 3217374 - DNA, 25 bp, Homo sapien
ttagccacaaggcaaaataatgaca

SEQ ID NO: 3217375 - DNA, 25 bp, Homo sapien
gctgcggttacaagacttaggtccc

SEQ ID NO: 3217376 - DNA, 25 bp, Homo sapien
cgaaattctaggtccgctgcggtta

SEQ ID NO: 3217377 - DNA, 25 bp, Homo sapien
ctgacaaagaagaccgtgagcctcc

SEQ ID NO: 3217378 - DNA, 25 bp, Homo sapien
caacaggtgatgagggagagtcaca

SEQ ID NO: 3217379 - DNA, 25 bp, Homo sapien
tgagaatgtactgtgcttgttggaa

SEQ ID NO: 3217380 - DNA, 25 bp, Homo sapien
gaagaggagctagcattttgcctct

SEQ ID NO: 3217381 - DNA, 25 bp, Homo sapien
gattacatccataggaccattgttt

SEQ ID NO: 3217382 - DNA, 25 bp, Homo sapien
tattaaaatcacacccaacagggac

SEQ ID NO: 3217383 - DNA, 25 bp, Homo sapien
tcttctgagaatgaccataggtggc

SEQ ID NO: 3217384 - DNA, 25 bp, Homo sapien
ctctttagcagcaggcagtgagctg

SEQ ID NO: 3217385 - DNA, 25 bp, Homo sapien
gaggctgatccagttctcacgcatg

SEQ ID NO: 3217386 - DNA, 25 bp, Homo sapien
agtggacagagctcccgttccttga

SEQ ID NO: 3217387 - DNA, 25 bp, Homo sapien
ttttcctggaaatttctggcaagtc

SEQ ID NO: 3217388 - DNA, 25 bp, Homo sapien
tttctggcaagtctggctggtggta

SEQ ID NO: 3217389 - DNA, 25 bp, Homo sapien
ggcaagtctggctggtggtactgag

SEQ ID NO: 3217390 - DNA, 25 bp, Homo sapien
atttttcctggaaatttctggcaag

SEQ ID NO: 3217391 - DNA, 25 bp, Homo sapien
cacaattaaaactaacggtcacagg

SEQ ID NO: 3217392 - DNA, 25 bp, Homo sapien
caattaaaactaacggtcacaggtg

SEQ ID NO: 3217393 - DNA, 25 bp, Homo sapien
ccacaattaaaactaacggtcacag

SEQ ID NO: 3217394 - DNA, 25 bp, Homo sapien
ttaaaactaacggtcacaggtgaga

SEQ ID NO: 3217395 - DNA, 25 bp, Homo sapien
aagtccacttcaggcgtgtgcacca

SEQ ID NO: 3217396 - DNA, 25 bp, Homo sapien
ttgagtccagctcaaagaccaagct

SEQ ID NO: 3217397 - DNA, 25 bp, Homo sapien
gctggaatcctaactgccagtcaca

SEQ ID NO: 3217398 - DNA, 25 bp, Homo sapien
gagttcccattctgctggaatccta

SEQ ID NO: 3217399 - DNA, 25 bp, Homo sapien
acgtgactggcacttaggattctca

SEQ ID NO: 3217400 - DNA, 25 bp, Homo sapien
ctctacgaaaggtatgtcctgtttc

SEQ ID NO: 3217401 - DNA, 25 bp, Homo sapien
tgaagaaggctttgtgtccaccttc

SEQ ID NO: 3217402 - DNA, 25 bp, Homo sapien
tctctagatgttttgtgaatcttct

SEQ ID NO: 3217403 - DNA, 25 bp, Homo sapien
tctgaagaaggctttgtgtccacct

SEQ ID NO: 3217404 - DNA, 25 bp, Homo sapien
cagccagtctgcaaattcaacactg

SEQ ID NO: 3217405 - DNA, 25 bp, Homo sapien
agtttgaactcaaggccctcgcctt

SEQ ID NO: 3217406 - DNA, 25 bp, Homo sapien
cagtctgcaaattcaacactgcctc

SEQ ID NO: 3217407 - DNA, 25 bp, Homo sapien
aagtttgaactcaaggccctcgcct

SEQ ID NO: 3217408 - DNA, 25 bp, Homo sapien
tctagggacagaggtaaacggcaag

SEQ ID NO: 3217409 - DNA, 25 bp, Homo sapien
tgccaccattagatgcagacgtctg

SEQ ID NO: 3217410 - DNA, 25 bp, Homo sapien
caacgctatgtatctgctggagtca

SEQ ID NO: 3217411 - DNA, 25 bp, Homo sapien
tatataaccactgagaccgacagca

SEQ ID NO: 3217412 - DNA, 25 bp, Homo sapien
tctttcagaaggttggcccagcaat

SEQ ID NO: 3217413 - DNA, 25 bp, Homo sapien
ctaacacgaataacttggaaggaga

SEQ ID NO: 3217414 - DNA, 25 bp, Homo sapien
aatacctacaagttctatgtctgag

SEQ ID NO: 3217415 - DNA, 25 bp, Homo sapien
tatgtctgagatattagaaccctta

SEQ ID NO: 3217416 - DNA, 25 bp, Homo sapien
gttctttctacatgttcgactttta

SEQ ID NO: 3217417 - DNA, 25 bp, Homo sapien
gctttttcttcctataaggatcttc

SEQ ID NO: 3217418 - DNA, 25 bp, Homo sapien
cttgagactggagcaacaccccttt

SEQ ID NO: 3217419 - DNA, 25 bp, Homo sapien
tctacatgttcgacttttactccaa

SEQ ID NO: 3217420 - DNA, 25 bp, Homo sapien
ctttagatcactctgttcaggaggc

SEQ ID NO: 3217421 - DNA, 25 bp, Homo sapien
caagctttagatcactctgttcagg

SEQ ID NO: 3217422 - DNA, 25 bp, Homo sapien
tgcacacaagctttagatcactctg

SEQ ID NO: 3217423 - DNA, 25 bp, Homo sapien
aagtcactgcacacaagctttagat

SEQ ID NO: 3217424 - DNA, 25 bp, Homo sapien
tgctttacaaacctccctagtgctt

SEQ ID NO: 3217425 - DNA, 25 bp, Homo sapien
gggcagcaggtaaactgcttgcaat

SEQ ID NO: 3217426 - DNA, 25 bp, Homo sapien
actgcttgcaatttcggcatctgct

SEQ ID NO: 3217427 - DNA, 25 bp, Homo sapien
tgcaatttcggcatctgctttacaa

SEQ ID NO: 3217428 - DNA, 25 bp, Homo sapien
tggactcagcactgggtgtccctct

SEQ ID NO: 3217429 - DNA, 25 bp, Homo sapien
gaagactgaggctactctattgcac

SEQ ID NO: 3217430 - DNA, 25 bp, Homo sapien
tagaaaccagctaagtgtgctggcc

SEQ ID NO: 3217431 - DNA, 25 bp, Homo sapien
gcaacacacacgtgtcaagggaatg

SEQ ID NO: 3217432 - DNA, 25 bp, Homo sapien
gctggaatcggagcagaacttgtcc

SEQ ID NO: 3217433 - DNA, 25 bp, Homo sapien
gtgctgggcgtccaccatgggcttc

SEQ ID NO: 3217434 - DNA, 25 bp, Homo sapien
catgggcttcttatccccgtcggag

SEQ ID NO: 3217435 - DNA, 25 bp, Homo sapien
ggctggcacgcacgctgccagagga

SEQ ID NO: 3217436 - DNA, 25 bp, Homo sapien
ggctacactgaagtatgatttcatt

SEQ ID NO: 3217437 - DNA, 25 bp, Homo sapien
aggctacactgaagtatgatttcat

SEQ ID NO: 3217438 - DNA, 25 bp, Homo sapien
gctacactgaagtatgatttcattt

SEQ ID NO: 3217439 - DNA, 25 bp, Homo sapien
aaggctacactgaagtatgatttca

SEQ ID NO: 3217440 - DNA, 25 bp, Homo sapien
gggacatttccctactattatataa

SEQ ID NO: 3217441 - DNA, 25 bp, Homo sapien
tgtacagcaacaccattaataattt

SEQ ID NO: 3217442 - DNA, 25 bp, Homo sapien
tgaagactgcatactatgctactgt

SEQ ID NO: 3217443 - DNA, 25 bp, Homo sapien
actaatgttagcctttccctcaagc

SEQ ID NO: 3217444 - DNA, 25 bp, Homo sapien
aaaatgcataggttattaatatcat

SEQ ID NO: 3217445 - DNA, 25 bp, Homo sapien
ttcactttaaactgatattctcaca

SEQ ID NO: 3217446 - DNA, 25 bp, Homo sapien
acttcaactgtatattcggtattaa

SEQ ID NO: 3217447 - DNA, 25 bp, Homo sapien
tattaatatcattaatgcatgactg

SEQ ID NO: 3217448 - DNA, 25 bp, Homo sapien
gatgttatgagaaagattcaaggag

SEQ ID NO: 3217449 - DNA, 25 bp, Homo sapien
cagatgttatgagaaagattcaagg

SEQ ID NO: 3217450 - DNA, 25 bp, Homo sapien
tatgagaaagattcaaggagatggg

SEQ ID NO: 3217451 - DNA, 25 bp, Homo sapien
attgcagatgttatgagaaagattc

SEQ ID NO: 3217452 - DNA, 25 bp, Homo sapien
aaacatactgtaaaagctggaaaat

SEQ ID NO: 3217453 - DNA, 25 bp, Homo sapien
caaaacatactgtaaaagctggaaa

SEQ ID NO: 3217454 - DNA, 25 bp, Homo sapien
acatactgtaaaagctggaaaataa

SEQ ID NO: 3217455 - DNA, 25 bp, Homo sapien
acacaaaacatactgtaaaagctgg

SEQ ID NO: 3217456 - DNA, 25 bp, Homo sapien
acaggtagccacctgtctgtatttc

SEQ ID NO: 3217457 - DNA, 25 bp, Homo sapien
tagattttcagacaggtagccacct

SEQ ID NO: 3217458 - DNA, 25 bp, Homo sapien
gattttcagacaggtagccacctgt

SEQ ID NO: 3217459 - DNA, 25 bp, Homo sapien
cagacaggtagccacctgtctgtat

SEQ ID NO: 3217460 - DNA, 25 bp, Homo sapien
cttcaacacctgtgggcccggcagg

SEQ ID NO: 3217461 - DNA, 25 bp, Homo sapien
aggctctgcgtattgtgggagacta

SEQ ID NO: 3217462 - DNA, 25 bp, Homo sapien
tcttcaacacctgtgggcccggcag

SEQ ID NO: 3217463 - DNA, 25 bp, Homo sapien
ggacaggaaggctctgcgtattgtg

SEQ ID NO: 3217464 - DNA, 25 bp, Homo sapien
tacagccagtcaagatagaggtcct

SEQ ID NO: 3217465 - DNA, 25 bp, Homo sapien
taccagccagaatagaacgtccagt

SEQ ID NO: 3217466 - DNA, 25 bp, Homo sapien
taagggtatgttctccactgcggcc

SEQ ID NO: 3217467 - DNA, 25 bp, Homo sapien
gatcaagtaaacgaggcacgaggct

SEQ ID NO: 3217468 - DNA, 25 bp, Homo sapien
caaacaaagtgtagcatgccagata

SEQ ID NO: 3217469 - DNA, 25 bp, Homo sapien
ccgattgtctcttgacctggatgac

SEQ ID NO: 3217470 - DNA, 25 bp, Homo sapien
cagataatgtgcgtgccatgatggc

SEQ ID NO: 3217471 - DNA, 25 bp, Homo sapien
cacatgctgactaactcctttcgga

SEQ ID NO: 3217472 - DNA, 25 bp, Homo sapien
cacacactggcggagtgggccacag

SEQ ID NO: 3217473 - DNA, 25 bp, Homo sapien
gggccgactcctgaatcacacaagg

SEQ ID NO: 3217474 - DNA, 25 bp, Homo sapien
tgcagtttaagctgcttgtcacaca

SEQ ID NO: 3217475 - DNA, 25 bp, Homo sapien
tgaatcacacaaggcacgccgttct

SEQ ID NO: 3217476 - DNA, 25 bp, Homo sapien
gcctgggcgacagagcaagactctg

SEQ ID NO: 3217477 - DNA, 25 bp, Homo sapien
tgggcgacagagcaagactctgtct

SEQ ID NO: 3217478 - DNA, 25 bp, Homo sapien
gagctataattgcaccactgcgctc

SEQ ID NO: 3217479 - DNA, 25 bp, Homo sapien
cagcctgggcgacagagcaagactc

SEQ ID NO: 3217480 - DNA, 25 bp, Homo sapien
aactggccttcgcatgttgcactcc

SEQ ID NO: 3217481 - DNA, 25 bp, Homo sapien
gccttcgcatgttgcactccaatca

SEQ ID NO: 3217482 - DNA, 25 bp, Homo sapien
ggaaaggcattgtaatcgttcaatt

SEQ ID NO: 3217483 - DNA, 25 bp, Homo sapien
caattccaatggacagtatgcgctg

SEQ ID NO: 3217484 - DNA, 25 bp, Homo sapien
ttgggattgtctgaagagcccttac

SEQ ID NO: 3217485 - DNA, 25 bp, Homo sapien
gttgggattgtctgaagagccctta

SEQ ID NO: 3217486 - DNA, 25 bp, Homo sapien
aactttttatcagacacacaacctg

SEQ ID NO: 3217487 - DNA, 25 bp, Homo sapien
tgtggaccaggagagtcgttgcaac

SEQ ID NO: 3217488 - DNA, 25 bp, Homo sapien
tctatttgatcacttgatgggaatc

SEQ ID NO: 3217489 - DNA, 25 bp, Homo sapien
cataaatacttggtccgtgtggacc

SEQ ID NO: 3217490 - DNA, 25 bp, Homo sapien
agagctgatgaaactggcatgtccc

SEQ ID NO: 3217491 - DNA, 25 bp, Homo sapien
gatgaaactggcatgtccccaggca

SEQ ID NO: 3217492 - DNA, 25 bp, Homo sapien
tgtgatcaataaagtctgtctgaac

SEQ ID NO: 3217493 - DNA, 25 bp, Homo sapien
gttccaggtagactgagagttgtga

SEQ ID NO: 3217494 - DNA, 25 bp, Homo sapien
gtagtattccttgcacacgaccgct

SEQ ID NO: 3217495 - DNA, 25 bp, Homo sapien
cattcctattcgctgtggtagtcca

SEQ ID NO: 3217496 - DNA, 25 bp, Homo sapien
aattttcatacacatcgctttgcgg

SEQ ID NO: 3217497 - DNA, 25 bp, Homo sapien
catataggcgcgaaacgggttgaac

SEQ ID NO: 3217498 - DNA, 25 bp, Homo sapien
aacacaagcctctttattcacattg

SEQ ID NO: 3217499 - DNA, 25 bp, Homo sapien
aaaacacaagcctctttattcacat

SEQ ID NO: 3217500 - DNA, 25 bp, Homo sapien
acacaagcctctttattcacattgt

SEQ ID NO: 3217501 - DNA, 25 bp, Homo sapien
aaacacaagcctctttattcacatt

SEQ ID NO: 3217502 - DNA, 25 bp, Homo sapien
tgtcataatctatctcaataaccag

SEQ ID NO: 3217503 - DNA, 25 bp, Homo sapien
taatctatctcaataaccagtttac

SEQ ID NO: 3217504 - DNA, 25 bp, Homo sapien
tccaccaatgtcataatctatctca

SEQ ID NO: 3217505 - DNA, 25 bp, Homo sapien
ctcaataaccagtttacactagtaa

SEQ ID NO: 3217506 - DNA, 25 bp, Homo sapien
gatttaaaacattcggcatgcctga

SEQ ID NO: 3217507 - DNA, 25 bp, Homo sapien
tgcctgacacacttcttgacttttg

SEQ ID NO: 3217508 - DNA, 25 bp, Homo sapien
gacgtctcccgtgttcagatttaaa

SEQ ID NO: 3217509 - DNA, 25 bp, Homo sapien
ttgaaagttctgacatatggatgct

SEQ ID NO: 3217510 - DNA, 25 bp, Homo sapien
actgaaaatctctattaactggacg

SEQ ID NO: 3217511 - DNA, 25 bp, Homo sapien
tgaaaatctctattaactggacgtg

SEQ ID NO: 3217512 - DNA, 25 bp, Homo sapien
ctactgaaaatctctattaactgga

SEQ ID NO: 3217513 - DNA, 25 bp, Homo sapien
tctctactgaaaatctctattaact

SEQ ID NO: 3217514 - DNA, 25 bp, Homo sapien
taagttcctatactcagggttagcc

SEQ ID NO: 3217515 - DNA, 25 bp, Homo sapien
ggaacagcccttgccgtaagtggga

SEQ ID NO: 3217516 - DNA, 25 bp, Homo sapien
tacaaaccggtctggaaaacatgca

SEQ ID NO: 3217517 - DNA, 25 bp, Homo sapien
tcaatgacaagcagatacaaaccgg

SEQ ID NO: 3217518 - DNA, 25 bp, Homo sapien
tgtggcaccgacacatgtgacctct

SEQ ID NO: 3217519 - DNA, 25 bp, Homo sapien
ccgccgacaccaccccagcatgcac

SEQ ID NO: 3217520 - DNA, 25 bp, Homo sapien
tgggctggctgcaaggacgccagcc

SEQ ID NO: 3217521 - DNA, 25 bp, Homo sapien
ccagcatgcacacccgctccttgtc

SEQ ID NO: 3217522 - DNA, 25 bp, Homo sapien
cacacacattccaaagggcgaagcg

SEQ ID NO: 3217523 - DNA, 25 bp, Homo sapien
gcttagacctaagcttgagccttgg

SEQ ID NO: 3217524 - DNA, 25 bp, Homo sapien
gcgttcctgctccagttcatgctta

SEQ ID NO: 3217525 - DNA, 25 bp, Homo sapien
tgagccttggttcctggcgcctagc

SEQ ID NO: 3217526 - DNA, 25 bp, Homo sapien
tctaacctggagcaggggtcggcaa

SEQ ID NO: 3217527 - DNA, 25 bp, Homo sapien
ttgctcttctctaacctggagcagg

SEQ ID NO: 3217528 - DNA, 25 bp, Homo sapien
cttgttgctcttctctaacctggag

SEQ ID NO: 3217529 - DNA, 25 bp, Homo sapien
ctcttctctaacctggagcaggggt

SEQ ID NO: 3217530 - DNA, 25 bp, Homo sapien
gtactccagcagaagtattaaattg

SEQ ID NO: 3217531 - DNA, 25 bp, Homo sapien
tgtactccagcagaagtattaaatt

SEQ ID NO: 3217532 - DNA, 25 bp, Homo sapien
tactccagcagaagtattaaattgc

SEQ ID NO: 3217533 - DNA, 25 bp, Homo sapien
ctgtactccagcagaagtattaaat

SEQ ID NO: 3217534 - DNA, 25 bp, Homo sapien
gctgtagttgaaaacagggagacct

SEQ ID NO: 3217535 - DNA, 25 bp, Homo sapien
gaaaacagggagacctcttgtctcc

SEQ ID NO: 3217536 - DNA, 25 bp, Homo sapien
cagtcacaagagtcaagtgacctga

SEQ ID NO: 3217537 - DNA, 25 bp, Homo sapien
tgacctgaattgctgattcacacca

SEQ ID NO: 3217538 - DNA, 25 bp, Homo sapien
gcgttgttcattgtccagtcattca

SEQ ID NO: 3217539 - DNA, 25 bp, Homo sapien
gtcattcatccgctgaatttccatg

SEQ ID NO: 3217540 - DNA, 25 bp, Homo sapien
cattgtccagtcattcatccgctga

SEQ ID NO: 3217541 - DNA, 25 bp, Homo sapien
acacattgctgtgcgttgttcattg

SEQ ID NO: 3217542 - DNA, 25 bp, Homo sapien
ttggttgaaacgcaggctggtcact

SEQ ID NO: 3217543 - DNA, 25 bp, Homo sapien
ttgaaacgcaggctggtcactcctc

SEQ ID NO: 3217544 - DNA, 25 bp, Homo sapien
ggttgaaacgcaggctggtcactcc

SEQ ID NO: 3217545 - DNA, 25 bp, Homo sapien
tggttgaaacgcaggctggtcactc

SEQ ID NO: 3217546 - DNA, 25 bp, Homo sapien
ttgtagatgcgcacacctgtctcca

SEQ ID NO: 3217547 - DNA, 25 bp, Homo sapien
gttgtagatgcgcacacctgtctcc

SEQ ID NO: 3217548 - DNA, 25 bp, Homo sapien
tgtagatgcgcacacctgtctccat

SEQ ID NO: 3217549 - DNA, 25 bp, Homo sapien
ctgccacctgcttgtggtccagatg

SEQ ID NO: 3217550 - DNA, 25 bp, Homo sapien
cagatgccccttctccatcaagggc

SEQ ID NO: 3217551 - DNA, 25 bp, Homo sapien
cctgcttgtggtccagatgcccctt

SEQ ID NO: 3217552 - DNA, 25 bp, Homo sapien
agatgccccttctccatcaagggct

SEQ ID NO: 3217553 - DNA, 25 bp, Homo sapien
ggcatcgtcccagatcagcactgag

SEQ ID NO: 3217554 - DNA, 25 bp, Homo sapien
accaaggccagaaggttgcagcggt

SEQ ID NO: 3217555 - DNA, 25 bp, Homo sapien
gcttggtgaagatgaactccagcac

SEQ ID NO: 3217556 - DNA, 25 bp, Homo sapien
gatctctgagaacttggggctacta

SEQ ID NO: 3217557 - DNA, 25 bp, Homo sapien
cggtcacgatcttgccatggagcat

SEQ ID NO: 3217558 - DNA, 25 bp, Homo sapien
tcacgatcttgccatggagcatgca

SEQ ID NO: 3217559 - DNA, 25 bp, Homo sapien
acgatcttgccatggagcatgcaca

SEQ ID NO: 3217560 - DNA, 25 bp, Homo sapien
cacagagcctgttggggttgacccg

SEQ ID NO: 3217561 - DNA, 25 bp, Homo sapien
ggtgaatggagcagacatggtgcca

SEQ ID NO: 3217562 - DNA, 25 bp, Homo sapien
gatggtgaatggagcagacatggtg

SEQ ID NO: 3217563 - DNA, 25 bp, Homo sapien
cattgatggtgaatggagcagacat

SEQ ID NO: 3217564 - DNA, 25 bp, Homo sapien
attgatggtgaatggagcagacatg

SEQ ID NO: 3217565 - DNA, 25 bp, Homo sapien
tggtgcccttatcgctggaagcgca

SEQ ID NO: 3217566 - DNA, 25 bp, Homo sapien
cagcgcggagcagcggttaaggtgg

SEQ ID NO: 3217567 - DNA, 25 bp, Homo sapien
gagcaaagatatggatggtgccctt

SEQ ID NO: 3217568 - DNA, 25 bp, Homo sapien
agcagcggttaaggtgggtatcctt

SEQ ID NO: 3217569 - DNA, 25 bp, Homo sapien
ttcttggaagtattgcgaccgaagg

SEQ ID NO: 3217570 - DNA, 25 bp, Homo sapien
ggctccactgagagtccacgtactg

SEQ ID NO: 3217571 - DNA, 25 bp, Homo sapien
caggctccactgagagtccacgtac

SEQ ID NO: 3217572 - DNA, 25 bp, Homo sapien
gctccactgagagtccacgtactgc

SEQ ID NO: 3217573 - DNA, 25 bp, Homo sapien
tcaggagtgaagacatatttgtgga

SEQ ID NO: 3217574 - DNA, 25 bp, Homo sapien
agacatagctctgctgagtggaaag

SEQ ID NO: 3217575 - DNA, 25 bp, Homo sapien
ttatttagacatagctctgctgagt

SEQ ID NO: 3217576 - DNA, 25 bp, Homo sapien
aagacatatttgtggaaggtcccat

SEQ ID NO: 3217577 - DNA, 25 bp, Homo sapien
gcctggcccttggggcacacagtca

SEQ ID NO: 3217578 - DNA, 25 bp, Homo sapien
cctggcaatttcctccaggttaggg

SEQ ID NO: 3217579 - DNA, 25 bp, Homo sapien
tattcatcacatcggagatcatctc

SEQ ID NO: 3217580 - DNA, 25 bp, Homo sapien
acatcggagatcatctcttcctagg

SEQ ID NO: 3217581 - DNA, 25 bp, Homo sapien
ctttccggtggtgttggtgaacgca

SEQ ID NO: 3217582 - DNA, 25 bp, Homo sapien
ggcttttggaagagctcccagactt

SEQ ID NO: 3217583 - DNA, 25 bp, Homo sapien
gaatctccatatcacccttgccaaa

SEQ ID NO: 3217584 - DNA, 25 bp, Homo sapien
gcaggagagggctttacatcattct

SEQ ID NO: 3217585 - DNA, 25 bp, Homo sapien
taccaagactgaactgtgcatacat

SEQ ID NO: 3217586 - DNA, 25 bp, Homo sapien
caattgacaaggagggaattcttcc

SEQ ID NO: 3217587 - DNA, 25 bp, Homo sapien
tagtcaaactcctcgaaaacaattg

SEQ ID NO: 3217588 - DNA, 25 bp, Homo sapien
caaagaaaaccccatgacccgatgg

SEQ ID NO: 3217589 - DNA, 25 bp, Homo sapien
gaaccaagtatatgctgaccaagat

SEQ ID NO: 3217590 - DNA, 25 bp, Homo sapien
tggtcttttcgtgggatctcagcca

SEQ ID NO: 3217591 - DNA, 25 bp, Homo sapien
tcaaggtgtatagggagcttcaggc

SEQ ID NO: 3217592 - DNA, 25 bp, Homo sapien
cacaatgagcctgactataaggtcc

SEQ ID NO: 3217593 - DNA, 25 bp, Homo sapien
atctggtagggtcttcaacacatat

SEQ ID NO: 3217594 - DNA, 25 bp, Homo sapien
aaagcatctggtagggtcttcaaca

SEQ ID NO: 3217595 - DNA, 25 bp, Homo sapien
ttctcaaaggggaagaaagcatctg

SEQ ID NO: 3217596 - DNA, 25 bp, Homo sapien
gaagaaagcatctggtagggtcttc

SEQ ID NO: 3217597 - DNA, 25 bp, Homo sapien
agacgtcctgaacctgttggccaca

SEQ ID NO: 3217598 - DNA, 25 bp, Homo sapien
taccacgggctgtggaaacagtggc

SEQ ID NO: 3217599 - DNA, 25 bp, Homo sapien
tgctggccaaccgataagaactttg

SEQ ID NO: 3217600 - DNA, 25 bp, Homo sapien
tggcactccgacaccaaaaggcaga

SEQ ID NO: 3217601 - DNA, 25 bp, Homo sapien
gcaagctttcctgtgcttccttttg

SEQ ID NO: 3217602 - DNA, 25 bp, Homo sapien
ctgctgcaagctttcctgtgcttcc

SEQ ID NO: 3217603 - DNA, 25 bp, Homo sapien
gctgcaagctttcctgtgcttcctt

SEQ ID NO: 3217604 - DNA, 25 bp, Homo sapien
tgcaagctttcctgtgcttcctttt

SEQ ID NO: 3217605 - DNA, 25 bp, Homo sapien
ataagaaacaaatgcgtcatagcag

SEQ ID NO: 3217606 - DNA, 25 bp, Homo sapien
taagaaacaaatgcgtcatagcaga

SEQ ID NO: 3217607 - DNA, 25 bp, Homo sapien
gaaacaaatgcgtcatagcagatgt

SEQ ID NO: 3217608 - DNA, 25 bp, Homo sapien
aacaaatgcgtcatagcagatgtcc

SEQ ID NO: 3217609 - DNA, 25 bp, Homo sapien
agcacaaagacagttttgtgtctct

SEQ ID NO: 3217610 - DNA, 25 bp, Homo sapien
cacaaagacagttttgtgtctcttt

SEQ ID NO: 3217611 - DNA, 25 bp, Homo sapien
gaaagcacaaagacagttttgtgtc

SEQ ID NO: 3217612 - DNA, 25 bp, Homo sapien
gccaggaatgaagtcccacttatga

SEQ ID NO: 3217613 - DNA, 25 bp, Homo sapien
ggaatgatcctagccatagactgaa

SEQ ID NO: 3217614 - DNA, 25 bp, Homo sapien
tcccgctgagcttcattagtggcca

SEQ ID NO: 3217615 - DNA, 25 bp, Homo sapien
tagcagcccagattgactaaggcaa

SEQ ID NO: 3217616 - DNA, 25 bp, Homo sapien
caggcaggtctaggtgttaattatc

SEQ ID NO: 3217617 - DNA, 25 bp, Homo sapien
taatcctctctgatggttggaacat

SEQ ID NO: 3217618 - DNA, 25 bp, Homo sapien
ctgtttctcctaccctgttccacat

SEQ ID NO: 3217619 - DNA, 25 bp, Homo sapien
cctaatcctctctgatggttggaac

SEQ ID NO: 3217620 - DNA, 25 bp, Homo sapien
ggctgtttctcctaccctgttccac

SEQ ID NO: 3217621 - DNA, 25 bp, Homo sapien
ttcaccctccagactaacacagaac

SEQ ID NO: 3217622 - DNA, 25 bp, Homo sapien
tcaccctccagactaacacagaacg

SEQ ID NO: 3217623 - DNA, 25 bp, Homo sapien
gttcaccctccagactaacacagaa

SEQ ID NO: 3217624 - DNA, 25 bp, Homo sapien
ggttcaccctccagactaacacaga

SEQ ID NO: 3217625 - DNA, 25 bp, Homo sapien
cgcttccacccaaaagtctatgccc

SEQ ID NO: 3217626 - DNA, 25 bp, Homo sapien
gcttccacccaaaagtctatgccct

SEQ ID NO: 3217627 - DNA, 25 bp, Homo sapien
tccacccaaaagtctatgccctcct

SEQ ID NO: 3217628 - DNA, 25 bp, Homo sapien
ttccacccaaaagtctatgccctcc

SEQ ID NO: 3217629 - DNA, 25 bp, Homo sapien
cccgaactcaggctcatgaatcgtg

SEQ ID NO: 3217630 - DNA, 25 bp, Homo sapien
aactcaggctcatgaatcgtgcttc

SEQ ID NO: 3217631 - DNA, 25 bp, Homo sapien
gctcatgaatcgtgcttctcctttc

SEQ ID NO: 3217632 - DNA, 25 bp, Homo sapien
ggaagcccgaactcaggctcatgaa

SEQ ID NO: 3217633 - DNA, 25 bp, Homo sapien
ctttaaattccactcctgatgcttt

SEQ ID NO: 3217634 - DNA, 25 bp, Homo sapien
ttaaattccactcctgatgcttttc

SEQ ID NO: 3217635 - DNA, 25 bp, Homo sapien
cgtctttaaattccactcctgatgc

SEQ ID NO: 3217636 - DNA, 25 bp, Homo sapien
aaattccactcctgatgcttttcca

SEQ ID NO: 3217637 - DNA, 25 bp, Homo sapien
gggaactctggacctcgcgctgagt

SEQ ID NO: 3217638 - DNA, 25 bp, Homo sapien
cctcgcgctgagttccaggcaggtg

SEQ ID NO: 3217639 - DNA, 25 bp, Homo sapien
cgcagccggagggaactctggacct

SEQ ID NO: 3217640 - DNA, 25 bp, Homo sapien
tgcgccgctgcgcagccggagggaa

SEQ ID NO: 3217641 - DNA, 25 bp, Homo sapien
gcctggctgcgctttctcgctgcct

SEQ ID NO: 3217642 - DNA, 25 bp, Homo sapien
agagaacgccgagcagccgcctggc

SEQ ID NO: 3217643 - DNA, 25 bp, Homo sapien
tccgagcagtcacctgagagaacgc

SEQ ID NO: 3217644 - DNA, 25 bp, Homo sapien
tgggagaactccgagcagtcacctg

SEQ ID NO: 3217645 - DNA, 25 bp, Homo sapien
gtgcaaagaagcaccggcgtcccgg

SEQ ID NO: 3217646 - DNA, 25 bp, Homo sapien
tatccccgcccggacaggagctagg

SEQ ID NO: 3217647 - DNA, 25 bp, Homo sapien
gccggcttcgctggtgtccacattc

SEQ ID NO: 3217648 - DNA, 25 bp, Homo sapien
acattcccgcgctgggccgtgcaaa

SEQ ID NO: 3217649 - DNA, 25 bp, Homo sapien
gacgctagctcgttgaaagccttta

SEQ ID NO: 3217650 - DNA, 25 bp, Homo sapien
tgaaagcctttacccaatctttgtc

SEQ ID NO: 3217651 - DNA, 25 bp, Homo sapien
aatctttgtcatccgagccaagagg

SEQ ID NO: 3217652 - DNA, 25 bp, Homo sapien
ccctgccagacgctagctcgttgaa

SEQ ID NO: 3217653 - DNA, 25 bp, Homo sapien
caaaatccaagctccgtcctagcag

SEQ ID NO: 3217654 - DNA, 25 bp, Homo sapien
ctctgagccacggtgaccaaaatcc

SEQ ID NO: 3217655 - DNA, 25 bp, Homo sapien
tagcagtaaccagtgagcgaggaca

SEQ ID NO: 3217656 - DNA, 25 bp, Homo sapien
gacagacccagagcacggaaccttt

SEQ ID NO: 3217657 - DNA, 25 bp, Homo sapien
agagacctaactcacacatcctaag

SEQ ID NO: 3217658 - DNA, 25 bp, Homo sapien
tttctaatcagagacctaactcaca

SEQ ID NO: 3217659 - DNA, 25 bp, Homo sapien
cacacatcctaagaatgaaggaacg

SEQ ID NO: 3217660 - DNA, 25 bp, Homo sapien
ctaagaatgaaggaacgcagaggtg

SEQ ID NO: 3217661 - DNA, 25 bp, Homo sapien
tcctgggagtcactataggtctcct

SEQ ID NO: 3217662 - DNA, 25 bp, Homo sapien
gggagtcactataggtctcctttgg

SEQ ID NO: 3217663 - DNA, 25 bp, Homo sapien
cttcacttggtcactaagagctcct

SEQ ID NO: 3217664 - DNA, 25 bp, Homo sapien
cctgggagtcactataggtctcctt

SEQ ID NO: 3217665 - DNA, 25 bp, Homo sapien
atgggcacaatgagccccacaggta

SEQ ID NO: 3217666 - DNA, 25 bp, Homo sapien
aatgggcacaatgagccccacaggt

SEQ ID NO: 3217667 - DNA, 25 bp, Homo sapien
tcctagagcaccagtccagtttcag

SEQ ID NO: 3217668 - DNA, 25 bp, Homo sapien
ttatctacttgaggcctcctagagc

SEQ ID NO: 3217669 - DNA, 25 bp, Homo sapien
cagataagcccaggattccctgtct

SEQ ID NO: 3217670 - DNA, 25 bp, Homo sapien
gagttgtagactccttaaatccaga

SEQ ID NO: 3217671 - DNA, 25 bp, Homo sapien
cagtgttttgtggtgataggaattc

SEQ ID NO: 3217672 - DNA, 25 bp, Homo sapien
ttttgtggtgataggaattccaact

SEQ ID NO: 3217673 - DNA, 25 bp, Homo sapien
gcatgtgttaagcatcaccttttgc

SEQ ID NO: 3217674 - DNA, 25 bp, Homo sapien
tgccaatcaggagactgcatgtgtt

SEQ ID NO: 3217675 - DNA, 25 bp, Homo sapien
tcaggtctctgaggcagtcaaagat

SEQ ID NO: 3217676 - DNA, 25 bp, Homo sapien
ttaagagcagaccaatactccaaga

SEQ ID NO: 3217677 - DNA, 25 bp, Homo sapien
cacaggtccctatgaaacaatattt

SEQ ID NO: 3217678 - DNA, 25 bp, Homo sapien
tcttttaataaggtgaactcaggtc

SEQ ID NO: 3217679 - DNA, 25 bp, Homo sapien
ctcacatgggagaacgcaagagggc

SEQ ID NO: 3217680 - DNA, 25 bp, Homo sapien
catggtatcatcaccgcaatccagg

SEQ ID NO: 3217681 - DNA, 25 bp, Homo sapien
gatgctaatcccatacctgaggaaa

SEQ ID NO: 3217682 - DNA, 25 bp, Homo sapien
ggaaagacccctcatgacttagtca

SEQ ID NO: 3217683 - DNA, 25 bp, Homo sapien
caaccatccggaattacagagcaag

SEQ ID NO: 3217684 - DNA, 25 bp, Homo sapien
caggagtagcatgctttgggaccaa

SEQ ID NO: 3217685 - DNA, 25 bp, Homo sapien
gaaactcgaggcagaccaaggtggt

SEQ ID NO: 3217686 - DNA, 25 bp, Homo sapien
cagtggccgccttgattcatagaga

SEQ ID NO: 3217687 - DNA, 25 bp, Homo sapien
gctgcccttgcagataccattgcgg

SEQ ID NO: 3217688 - DNA, 25 bp, Homo sapien
tctaaatgttcaagactgcccaggg

SEQ ID NO: 3217689 - DNA, 25 bp, Homo sapien
tacagcttctgtgagccctgaggga

SEQ ID NO: 3217690 - DNA, 25 bp, Homo sapien
cattgcggtcacaagacagagaagc

SEQ ID NO: 3217691 - DNA, 25 bp, Homo sapien
tctaattctaacaatccagaaatct

SEQ ID NO: 3217692 - DNA, 25 bp, Homo sapien
ctaattctaacaatccagaaatctg

SEQ ID NO: 3217693 - DNA, 25 bp, Homo sapien
ctaacaatccagaaatctgattcaa

SEQ ID NO: 3217694 - DNA, 25 bp, Homo sapien
tatcttccgcagcttgcagaagcgc

SEQ ID NO: 3217695 - DNA, 25 bp, Homo sapien
gaatatgcagcctccggattgttaa

SEQ ID NO: 3217696 - DNA, 25 bp, Homo sapien
tgacattccgacaccgagaggcgga

SEQ ID NO: 3217697 - DNA, 25 bp, Homo sapien
tcagagtgagcaaagtctctccggt

SEQ ID NO: 3217698 - DNA, 25 bp, Homo sapien
tcaagtaactatggctggagaaacc

SEQ ID NO: 3217699 - DNA, 25 bp, Homo sapien
cagttgctacagattacagttggcc

SEQ ID NO: 3217700 - DNA, 25 bp, Homo sapien
tagtaagcaagtcctcaaatgacgg

SEQ ID NO: 3217701 - DNA, 25 bp, Homo sapien
acagctaggtaggacagagaatgcc

SEQ ID NO: 3217702 - DNA, 25 bp, Homo sapien
caccacgtccgtcctaaagattatt

SEQ ID NO: 3217703 - DNA, 25 bp, Homo sapien
tgttaaatctaccttgttctcataa

SEQ ID NO: 3217704 - DNA, 25 bp, Homo sapien
tgaaattaaacatagatcgagtcaa

SEQ ID NO: 3217705 - DNA, 25 bp, Homo sapien
gaataggcaccacaacacctcaggt

SEQ ID NO: 3217706 - DNA, 25 bp, Homo sapien
tattattgaaataggtcagggtcca

SEQ ID NO: 3217707 - DNA, 25 bp, Homo sapien
attgtctcattgtctaaggtgttat

SEQ ID NO: 3217708 - DNA, 25 bp, Homo sapien
gaacttattgtgtcatgactgagaa

SEQ ID NO: 3217709 - DNA, 25 bp, Homo sapien
caaactgcccaatgcttcagtatta

SEQ ID NO: 3217710 - DNA, 25 bp, Homo sapien
actgagatttagctgggagcgcaca

SEQ ID NO: 3217711 - DNA, 25 bp, Homo sapien
gcctggcaacctgtggtgataggaa

SEQ ID NO: 3217712 - DNA, 25 bp, Homo sapien
gcattatctattcactagggctgga

SEQ ID NO: 3217713 - DNA, 25 bp, Homo sapien
ggagcgcacacattttctgtatgga

SEQ ID NO: 3217714 - DNA, 25 bp, Homo sapien
cctacaattttccatgcacacatgt

SEQ ID NO: 3217715 - DNA, 25 bp, Homo sapien
tagtagatatccacacgtagtcttc

SEQ ID NO: 3217716 - DNA, 25 bp, Homo sapien
tccagaagcatctggccctacaatt

SEQ ID NO: 3217717 - DNA, 25 bp, Homo sapien
tagatatccacacgtagtcttctct

SEQ ID NO: 3217718 - DNA, 25 bp, Homo sapien
agggctgggcccactactggtgata

SEQ ID NO: 3217719 - DNA, 25 bp, Homo sapien
cactactggtgatatctgcactggg

SEQ ID NO: 3217720 - DNA, 25 bp, Homo sapien
tgctggggtacacgcaggacccttc

SEQ ID NO: 3217721 - DNA, 25 bp, Homo sapien
cacacagcagaaggaaatagcctgg

SEQ ID NO: 3217722 - DNA, 25 bp, Homo sapien
aagatttgtataactccgttgtatc

SEQ ID NO: 3217723 - DNA, 25 bp, Homo sapien
gatggtttaatattccaatggtcac

SEQ ID NO: 3217724 - DNA, 25 bp, Homo sapien
ggtcactttaattaccattgtcagc

SEQ ID NO: 3217725 - DNA, 25 bp, Homo sapien
aaagtgcttatcatcacatactgtg

SEQ ID NO: 3217726 - DNA, 25 bp, Homo sapien
tatcctagaagccagagtagcatgg

SEQ ID NO: 3217727 - DNA, 25 bp, Homo sapien
gctcaatttgtaagggcacaagccc

SEQ ID NO: 3217728 - DNA, 25 bp, Homo sapien
caagcctcaggtagtcaaggtgcat

SEQ ID NO: 3217729 - DNA, 25 bp, Homo sapien
taatctagaaaaggtagtccatggg

SEQ ID NO: 3217730 - DNA, 25 bp, Homo sapien
gaactggctgttacacgaaccttaa

SEQ ID NO: 3217731 - DNA, 25 bp, Homo sapien
cacgaaccttaaaccacatgtcatt

SEQ ID NO: 3217732 - DNA, 25 bp, Homo sapien
tatttaaatgaactggctgttacac

SEQ ID NO: 3217733 - DNA, 25 bp, Homo sapien
taaatgaactggctgttacacgaac

SEQ ID NO: 3217734 - DNA, 25 bp, Homo sapien
ggctgaccatttctgctccgggatc

SEQ ID NO: 3217735 - DNA, 25 bp, Homo sapien
tgctagtcccggcatcctgatggct

SEQ ID NO: 3217736 - DNA, 25 bp, Homo sapien
catccgcaagctgcagtgctagtcc

SEQ ID NO: 3217737 - DNA, 25 bp, Homo sapien
caaaccctgttgagataaagctggc

SEQ ID NO: 3217738 - DNA, 25 bp, Homo sapien
tcgagactgagggaaatcactccag

SEQ ID NO: 3217739 - DNA, 25 bp, Homo sapien
ggaacttcacccagaggcattcttg

SEQ ID NO: 3217740 - DNA, 25 bp, Homo sapien
tgagaagacacctaacatggaacac

SEQ ID NO: 3217741 - DNA, 25 bp, Homo sapien
ggaagtgtaaatattagccccagcc

SEQ ID NO: 3217742 - DNA, 25 bp, Homo sapien
gacatgcttgagtgcgaccgtttcc

SEQ ID NO: 3217743 - DNA, 25 bp, Homo sapien
tacaagcgcagcaattgcaagccca

SEQ ID NO: 3217744 - DNA, 25 bp, Homo sapien
tgtgccacggcatcgaataccagaa

SEQ ID NO: 3217745 - DNA, 25 bp, Homo sapien
ttggatcccgctggtcatgaagcag

SEQ ID NO: 3217746 - DNA, 25 bp, Homo sapien
agaaaaatccctcaaaggcgtagat

SEQ ID NO: 3217747 - DNA, 25 bp, Homo sapien
aaatccctcaaaggcgtagatcttt

SEQ ID NO: 3217748 - DNA, 25 bp, Homo sapien
cctcaaaggcgtagatcttttttat

SEQ ID NO: 3217749 - DNA, 25 bp, Homo sapien
aaaaatccctcaaaggcgtagatct

SEQ ID NO: 3217750 - DNA, 25 bp, Homo sapien
gatgcataattcagccactgtgcaa

SEQ ID NO: 3217751 - DNA, 25 bp, Homo sapien
cagaaatctggacagtaagatgctc

SEQ ID NO: 3217752 - DNA, 25 bp, Homo sapien
aaatctggacagtaagatgctcacc

SEQ ID NO: 3217753 - DNA, 25 bp, Homo sapien
gagccatcctgatcacgatgcataa

SEQ ID NO: 3217754 - DNA, 25 bp, Homo sapien
tcctcgaagaaatagggattacacc

SEQ ID NO: 3217755 - DNA, 25 bp, Homo sapien
tgtcttcatctgtacgcttgaggag

SEQ ID NO: 3217756 - DNA, 25 bp, Homo sapien
tgaaatcctgcacaaactggcacat

SEQ ID NO: 3217757 - DNA, 25 bp, Homo sapien
caggccacttaacgttcctcgaaga

SEQ ID NO: 3217758 - DNA, 25 bp, Homo sapien
cagaccttcacaatgagcgttacat

SEQ ID NO: 3217759 - DNA, 25 bp, Homo sapien
ttccaccagtagaagaaactcctag

SEQ ID NO: 3217760 - DNA, 25 bp, Homo sapien
gcatctgaagttgctcgttccttcc

SEQ ID NO: 3217761 - DNA, 25 bp, Homo sapien
tgtgtccagactttgcaggttcttg

SEQ ID NO: 3217762 - DNA, 25 bp, Homo sapien
tttcttacaaggctcaatgggtggc

SEQ ID NO: 3217763 - DNA, 25 bp, Homo sapien
ccacagggggcaccacaagtttctt

SEQ ID NO: 3217764 - DNA, 25 bp, Homo sapien
tacaaggctcaatgggtggcagtgt

SEQ ID NO: 3217765 - DNA, 25 bp, Homo sapien
ctcaatgggtggcagtgttgttgca

SEQ ID NO: 3217766 - DNA, 25 bp, Homo sapien
tttttgatgtgggtactcggtgcta

SEQ ID NO: 3217767 - DNA, 25 bp, Homo sapien
gctccagagggagtaaatgccatgt

SEQ ID NO: 3217768 - DNA, 25 bp, Homo sapien
gggatagaaggtaatgaacccactc

SEQ ID NO: 3217769 - DNA, 25 bp, Homo sapien
gtaagagccttaattccttccatga

SEQ ID NO: 3217770 - DNA, 25 bp, Homo sapien
tcagcttaagaaggctttggcctga

SEQ ID NO: 3217771 - DNA, 25 bp, Homo sapien
tatcagcttaagaaggctttggcct

SEQ ID NO: 3217772 - DNA, 25 bp, Homo sapien
catttacttcccttgatagctgtat

SEQ ID NO: 3217773 - DNA, 25 bp, Homo sapien
aaggtcatttacttcccttgatagc

SEQ ID NO: 3217774 - DNA, 25 bp, Homo sapien
atcttctctaagcaacggaaagaaa

SEQ ID NO: 3217775 - DNA, 25 bp, Homo sapien
tcttctctaagcaacggaaagaaag

SEQ ID NO: 3217776 - DNA, 25 bp, Homo sapien
cttctctaagcaacggaaagaaagg

SEQ ID NO: 3217777 - DNA, 25 bp, Homo sapien
aatcttctctaagcaacggaaagaa

SEQ ID NO: 3217778 - DNA, 25 bp, Homo sapien
gccattcttcccagtgggaatacag

SEQ ID NO: 3217779 - DNA, 25 bp, Homo sapien
tgccattcttcccagtgggaataca

SEQ ID NO: 3217780 - DNA, 25 bp, Homo sapien
ccttgccattcttcccagtgggaat

SEQ ID NO: 3217781 - DNA, 25 bp, Homo sapien
cttgccattcttcccagtgggaata

SEQ ID NO: 3217782 - DNA, 25 bp, Homo sapien
ttggaataactgaccacagagctat

SEQ ID NO: 3217783 - DNA, 25 bp, Homo sapien
cacctgtagcctagctttggaataa

SEQ ID NO: 3217784 - DNA, 25 bp, Homo sapien
ggtatttgtgcaggcccatggaacg

SEQ ID NO: 3217785 - DNA, 25 bp, Homo sapien
cgcataattccaggtaagttcatct

SEQ ID NO: 3217786 - DNA, 25 bp, Homo sapien
catatggtgtaggttctgggtttgt

SEQ ID NO: 3217787 - DNA, 25 bp, Homo sapien
tttaaaagctccaacattgtagagt

SEQ ID NO: 3217788 - DNA, 25 bp, Homo sapien
ccaacattgtagagtaaaagcccat

SEQ ID NO: 3217789 - DNA, 25 bp, Homo sapien
gagtaaaagcccatatggtgtaggt

SEQ ID NO: 3217790 - DNA, 25 bp, Homo sapien
ctgatctgagaaccctgaatttttg

SEQ ID NO: 3217791 - DNA, 25 bp, Homo sapien
gatctgagaaccctgaatttttgtc

SEQ ID NO: 3217792 - DNA, 25 bp, Homo sapien
cccccagaacatccatttggaagca

SEQ ID NO: 3217793 - DNA, 25 bp, Homo sapien
tgtcctaattttcttagcccccaga

SEQ ID NO: 3217794 - DNA, 25 bp, Homo sapien
ttcagagcatcttcacgacacggca

SEQ ID NO: 3217795 - DNA, 25 bp, Homo sapien
tgaggagaccccgtcaacgtctttc

SEQ ID NO: 3217796 - DNA, 25 bp, Homo sapien
gacagtcactagtcagaagggccca

SEQ ID NO: 3217797 - DNA, 25 bp, Homo sapien
cacatggtgtggcagtgtttactca

SEQ ID NO: 3217798 - DNA, 25 bp, Homo sapien
acactcccgcaaagcctgtctggca

SEQ ID NO: 3217799 - DNA, 25 bp, Homo sapien
tgcacactcccgcaaagcctgtctg

SEQ ID NO: 3217800 - DNA, 25 bp, Homo sapien
gctagggccatagaagagagctgta

SEQ ID NO: 3217801 - DNA, 25 bp, Homo sapien
tacagtgctagggccatagaagaga

SEQ ID NO: 3217802 - DNA, 25 bp, Homo sapien
tcagttttagggttgccatcattcc

SEQ ID NO: 3217803 - DNA, 25 bp, Homo sapien
tgaccatagcctcgacctcagagag

SEQ ID NO: 3217804 - DNA, 25 bp, Homo sapien
ggtgctcttagtgccagcaaactct

SEQ ID NO: 3217805 - DNA, 25 bp, Homo sapien
ttcccctagctgatgcgccttggct

SEQ ID NO: 3217806 - DNA, 25 bp, Homo sapien
atcacttcagcagacggccagccct

SEQ ID NO: 3217807 - DNA, 25 bp, Homo sapien
tgccgcttgtgctggttcagaaact

SEQ ID NO: 3217808 - DNA, 25 bp, Homo sapien
gccgcttgtgctggttcagaaactg

SEQ ID NO: 3217809 - DNA, 25 bp, Homo sapien
gccatcacttcagcagacggccagc

SEQ ID NO: 3217810 - DNA, 25 bp, Homo sapien
taactgaaatgaaggcctctttggc

SEQ ID NO: 3217811 - DNA, 25 bp, Homo sapien
tatggcactaatttgacaccttgtc

SEQ ID NO: 3217812 - DNA, 25 bp, Homo sapien
tcttagtctcctccttatctacacg

SEQ ID NO: 3217813 - DNA, 25 bp, Homo sapien
ctctttggcacaggaatcagtgtcc

SEQ ID NO: 3217814 - DNA, 25 bp, Homo sapien
ttgagtgatctctcctgtgaaactc

SEQ ID NO: 3217815 - DNA, 25 bp, Homo sapien
cttgagtgatctctcctgtgaaact

SEQ ID NO: 3217816 - DNA, 25 bp, Homo sapien
tctctcctgtgaaactccacaagtc

SEQ ID NO: 3217817 - DNA, 25 bp, Homo sapien
tcctgtgaaactccacaagtcttac

SEQ ID NO: 3217818 - DNA, 25 bp, Homo sapien
tctgcttggctcctactgttcgcat

SEQ ID NO: 3217819 - DNA, 25 bp, Homo sapien
ggctcctactgttcgcattttatca

SEQ ID NO: 3217820 - DNA, 25 bp, Homo sapien
ttagttctgcttggctcctactgtt

SEQ ID NO: 3217821 - DNA, 25 bp, Homo sapien
gcttggctcctactgttcgcatttt

SEQ ID NO: 3217822 - DNA, 25 bp, Homo sapien
tggcatctcttaagcttctcctcca

SEQ ID NO: 3217823 - DNA, 25 bp, Homo sapien
gcagtttcactttgggaaatatcct

SEQ ID NO: 3217824 - DNA, 25 bp, Homo sapien
aagttcctttacacccagcttcagg

SEQ ID NO: 3217825 - DNA, 25 bp, Homo sapien
cagcttcaggaatatgtgcatggca

SEQ ID NO: 3217826 - DNA, 25 bp, Homo sapien
acaaccctgcatgccaagagcaaat

SEQ ID NO: 3217827 - DNA, 25 bp, Homo sapien
gacagcgccgagagaattatggtaa

SEQ ID NO: 3217828 - DNA, 25 bp, Homo sapien
ttatggtaagaaggattctaaggcc

SEQ ID NO: 3217829 - DNA, 25 bp, Homo sapien
tggaaaggaaatgcattgagacagc

SEQ ID NO: 3217830 - DNA, 25 bp, Homo sapien
acattttctgtagcgtgtaattgcc

SEQ ID NO: 3217831 - DNA, 25 bp, Homo sapien
attttctgtagcgtgtaattgccaa

SEQ ID NO: 3217832 - DNA, 25 bp, Homo sapien
tacattttctgtagcgtgtaattgc

SEQ ID NO: 3217833 - DNA, 25 bp, Homo sapien
gtacattttctgtagcgtgtaattg

SEQ ID NO: 3217834 - DNA, 25 bp, Homo sapien
gctccagggtgctagtgaggcaact

SEQ ID NO: 3217835 - DNA, 25 bp, Homo sapien
tgctagtgaggcaactctctgggaa

SEQ ID NO: 3217836 - DNA, 25 bp, Homo sapien
tctctgggaaccgatgagggacatc

SEQ ID NO: 3217837 - DNA, 25 bp, Homo sapien
agagaatcagccaccagccgtagct

SEQ ID NO: 3217838 - DNA, 25 bp, Homo sapien
tcatgaggaacggtgatccaggcag

SEQ ID NO: 3217839 - DNA, 25 bp, Homo sapien
caatgcagccgtgagcattcaagtt

SEQ ID NO: 3217840 - DNA, 25 bp, Homo sapien
caagcaccacaggtatgcttgtggt

SEQ ID NO: 3217841 - DNA, 25 bp, Homo sapien
tggtttcttcgtctgtcaagcaaga

SEQ ID NO: 3217842 - DNA, 25 bp, Homo sapien
aacaggccctgtcctaacgtggtgc

SEQ ID NO: 3217843 - DNA, 25 bp, Homo sapien
catttgcaagaggaacttagagccc

SEQ ID NO: 3217844 - DNA, 25 bp, Homo sapien
gatttatgaaccagcagcacggcga

SEQ ID NO: 3217845 - DNA, 25 bp, Homo sapien
ccagggcttacagggtcttcacaag

SEQ ID NO: 3217846 - DNA, 25 bp, Homo sapien
catctgcacagcactactctcatct

SEQ ID NO: 3217847 - DNA, 25 bp, Homo sapien
atatcattctggacatcgactttgg

SEQ ID NO: 3217848 - DNA, 25 bp, Homo sapien
gtatctaattaaactacaaggctct

SEQ ID NO: 3217849 - DNA, 25 bp, Homo sapien
tcattctggacatcgactttggcaa

SEQ ID NO: 3217850 - DNA, 25 bp, Homo sapien
gactaacagtatctaattaaactac

SEQ ID NO: 3217851 - DNA, 25 bp, Homo sapien
gaactgagtggtgcttcgggccatc

SEQ ID NO: 3217852 - DNA, 25 bp, Homo sapien
acagccagaaaagagcacttgagaa

SEQ ID NO: 3217853 - DNA, 25 bp, Homo sapien
ttgagaaattcttgggaactgagtg

SEQ ID NO: 3217854 - DNA, 25 bp, Homo sapien
tcgggccatcttccttggttaacaa

SEQ ID NO: 3217855 - DNA, 25 bp, Homo sapien
tctcctttacgctgtctgttttcct

SEQ ID NO: 3217856 - DNA, 25 bp, Homo sapien
tcctccccgacaggctttattcttc

SEQ ID NO: 3217857 - DNA, 25 bp, Homo sapien
cttgtctcctttacgctgtctgttt

SEQ ID NO: 3217858 - DNA, 25 bp, Homo sapien
cctcctccccgacaggctttattct

SEQ ID NO: 3217859 - DNA, 25 bp, Homo sapien
gcattggatagtgagttttaactct

SEQ ID NO: 3217860 - DNA, 25 bp, Homo sapien
gatgggaatgtggggcagcagcttc

SEQ ID NO: 3217861 - DNA, 25 bp, Homo sapien
tcagcattggatagtgagttttaac

SEQ ID NO: 3217862 - DNA, 25 bp, Homo sapien
ttttaactcttctctactgccctgc

SEQ ID NO: 3217863 - DNA, 25 bp, Homo sapien
aagcactttccctaactccggcaga

SEQ ID NO: 3217864 - DNA, 25 bp, Homo sapien
tatatctcaggctggttagactccc

SEQ ID NO: 3217865 - DNA, 25 bp, Homo sapien
tgggaatccactggaaaaagagggc

SEQ ID NO: 3217866 - DNA, 25 bp, Homo sapien
cagagacctcccatctttggttgga

SEQ ID NO: 3217867 - DNA, 25 bp, Homo sapien
tgatcaagttgggtttagtacaagg

SEQ ID NO: 3217868 - DNA, 25 bp, Homo sapien
tgatcttttacacaacattaacaga

SEQ ID NO: 3217869 - DNA, 25 bp, Homo sapien
gattaaaattcttggtaagctaggc

SEQ ID NO: 3217870 - DNA, 25 bp, Homo sapien
aatgtttgtctaactgatgcacaat

SEQ ID NO: 3217871 - DNA, 25 bp, Homo sapien
gttgccttttggcacagcacaaccc

SEQ ID NO: 3217872 - DNA, 25 bp, Homo sapien
cctgtctgaggggtaatgtcttaaa

SEQ ID NO: 3217873 - DNA, 25 bp, Homo sapien
aagcaagtgcaaaggacccaagatg

SEQ ID NO: 3217874 - DNA, 25 bp, Homo sapien
cagtgaacgtgaccttttagagaag

SEQ ID NO: 3217875 - DNA, 25 bp, Homo sapien
agttgtaattggcagagtttctagc

SEQ ID NO: 3217876 - DNA, 25 bp, Homo sapien
cagagtttctagctgccttctgaat

SEQ ID NO: 3217877 - DNA, 25 bp, Homo sapien
taattggcagagtttctagctgcct

SEQ ID NO: 3217878 - DNA, 25 bp, Homo sapien
tggcagagtttctagctgccttctg

SEQ ID NO: 3217879 - DNA, 25 bp, Homo sapien
gaatgagattctgctccggagttta

SEQ ID NO: 3217880 - DNA, 25 bp, Homo sapien
aggacccaaacattcgcccacaagt

SEQ ID NO: 3217881 - DNA, 25 bp, Homo sapien
tctgctccggagtttaggacccaaa

SEQ ID NO: 3217882 - DNA, 25 bp, Homo sapien
tcgcccacaagtccccatcattatt

SEQ ID NO: 3217883 - DNA, 25 bp, Homo sapien
cctgtagtggcaacacacgtgaagc

SEQ ID NO: 3217884 - DNA, 25 bp, Homo sapien
tcctgtagtggcaacacacgtgaag

SEQ ID NO: 3217885 - DNA, 25 bp, Homo sapien
ttcctgtagtggcaacacacgtgaa

SEQ ID NO: 3217886 - DNA, 25 bp, Homo sapien
tgttgactctcacagtgtcatctga

SEQ ID NO: 3217887 - DNA, 25 bp, Homo sapien
ttgttgactctcacagtgtcatctg

SEQ ID NO: 3217888 - DNA, 25 bp, Homo sapien
gttgactctcacagtgtcatctgaa

SEQ ID NO: 3217889 - DNA, 25 bp, Homo sapien
cccaagggcaagcaccatgcataac

SEQ ID NO: 3217890 - DNA, 25 bp, Homo sapien
gatgatggtggtgattttaaagctt

SEQ ID NO: 3217891 - DNA, 25 bp, Homo sapien
gcaccatgcataactaactttccac

SEQ ID NO: 3217892 - DNA, 25 bp, Homo sapien
gatggtggtgattttaaagcttcct

SEQ ID NO: 3217893 - DNA, 25 bp, Homo sapien
agcaatagtccccacactgttgaag

SEQ ID NO: 3217894 - DNA, 25 bp, Homo sapien
tgacgccgacctataaaatgtgtta

SEQ ID NO: 3217895 - DNA, 25 bp, Homo sapien
cagttgtgtgttctggcatgacttc

SEQ ID NO: 3217896 - DNA, 25 bp, Homo sapien
aagccttgctgtttgacgccgacct

SEQ ID NO: 3217897 - DNA, 25 bp, Homo sapien
tgagcttccacactatcaccaagac

SEQ ID NO: 3217898 - DNA, 25 bp, Homo sapien
actatcaccaagacatgtgtagaga

SEQ ID NO: 3217899 - DNA, 25 bp, Homo sapien
gctgagcttccacactatcaccaag

SEQ ID NO: 3217900 - DNA, 25 bp, Homo sapien
atcaccaagacatgtgtagagaaac

SEQ ID NO: 3217901 - DNA, 25 bp, Homo sapien
gctgtggatgccagcggacaacttc

SEQ ID NO: 3217902 - DNA, 25 bp, Homo sapien
gatgccagcggacaacttcatccac

SEQ ID NO: 3217903 - DNA, 25 bp, Homo sapien
cagcggacaacttcatccactggag

SEQ ID NO: 3217904 - DNA, 25 bp, Homo sapien
gcggacaacttcatccactggagaa

SEQ ID NO: 3217905 - DNA, 25 bp, Homo sapien
cccagaacataaattttctgcaagc

SEQ ID NO: 3217906 - DNA, 25 bp, Homo sapien
agcagacacctccaccaaaagaaag

SEQ ID NO: 3217907 - DNA, 25 bp, Homo sapien
aagcagaagcccagtctgtctccag

SEQ ID NO: 3217908 - DNA, 25 bp, Homo sapien
cataaattttctgcaagcagacacc

SEQ ID NO: 3217909 - DNA, 25 bp, Homo sapien
gattgtccaatcataactctagagg

SEQ ID NO: 3217910 - DNA, 25 bp, Homo sapien
ggaacctgctagtcctgaaaacgaa

SEQ ID NO: 3217911 - DNA, 25 bp, Homo sapien
tctattaagcaggaatcataggagg

SEQ ID NO: 3217912 - DNA, 25 bp, Homo sapien
tagaaaaaggtcatcatcacacaca

SEQ ID NO: 3217913 - DNA, 25 bp, Homo sapien
tgcagacagtcagaaaatggtcctc

SEQ ID NO: 3217914 - DNA, 25 bp, Homo sapien
agaaaatggtcctctcaatcaatga

SEQ ID NO: 3217915 - DNA, 25 bp, Homo sapien
tcctttgtctccctgaagttgtaaa

SEQ ID NO: 3217916 - DNA, 25 bp, Homo sapien
gacagtcagaaaatggtcctctcaa

SEQ ID NO: 3217917 - DNA, 25 bp, Homo sapien
ggatgataacgaccatgcacctcag

SEQ ID NO: 3217918 - DNA, 25 bp, Homo sapien
gaccatgactggacccgtgaaaaca

SEQ ID NO: 3217919 - DNA, 25 bp, Homo sapien
tctcagcaaatgaccgtgacacagg

SEQ ID NO: 3217920 - DNA, 25 bp, Homo sapien
tgtcaaggaaagcacccctctaggg

SEQ ID NO: 3217921 - DNA, 25 bp, Homo sapien
cgttttagctgaaagtagtgggcat

SEQ ID NO: 3217922 - DNA, 25 bp, Homo sapien
tgaaagccaactctacaatgctcat

SEQ ID NO: 3217923 - DNA, 25 bp, Homo sapien
gcctattgcaaagtagcagtcttga

SEQ ID NO: 3217924 - DNA, 25 bp, Homo sapien
caatgctcatgtcatacaggtaaca

SEQ ID NO: 3217925 - DNA, 25 bp, Homo sapien
taacagaacatgatagccaggcaag

SEQ ID NO: 3217926 - DNA, 25 bp, Homo sapien
tctccagctgcccaaagttagagct

SEQ ID NO: 3217927 - DNA, 25 bp, Homo sapien
tctactcagtgacacgggcaattta

SEQ ID NO: 3217928 - DNA, 25 bp, Homo sapien
ccaggcaagtgctctttttggtgga

SEQ ID NO: 3217929 - DNA, 25 bp, Homo sapien
gaatcatgctacgtactcttctatg

SEQ ID NO: 3217930 - DNA, 25 bp, Homo sapien
cggtgctggtgtatgtatttgaaac

SEQ ID NO: 3217931 - DNA, 25 bp, Homo sapien
gacttacagtgcataaaccattaca

SEQ ID NO: 3217932 - DNA, 25 bp, Homo sapien
aaatgcttttcctgacggtgctggt

SEQ ID NO: 3217933 - DNA, 25 bp, Homo sapien
catccagggtggtgttatgactttt

SEQ ID NO: 3217934 - DNA, 25 bp, Homo sapien
caacctttctgaggtagcctgctag

SEQ ID NO: 3217935 - DNA, 25 bp, Homo sapien
tgagagcgggtaattccttaggtaa

SEQ ID NO: 3217936 - DNA, 25 bp, Homo sapien
ttggtccatacagcctttggtcagc

SEQ ID NO: 3217937 - DNA, 25 bp, Homo sapien
tctgtagtagatacacatctactgc

SEQ ID NO: 3217938 - DNA, 25 bp, Homo sapien
ccttatttaatctatactacatgca

SEQ ID NO: 3217939 - DNA, 25 bp, Homo sapien
tgttgccatacaaccaccttattta

SEQ ID NO: 3217940 - DNA, 25 bp, Homo sapien
cagcatgtattaaacttagcttcag

SEQ ID NO: 3217941 - DNA, 25 bp, Homo sapien
atcagtgaaaacatgggtccacaca

SEQ ID NO: 3217942 - DNA, 25 bp, Homo sapien
cacacttgtgtatgaatgttcatag

SEQ ID NO: 3217943 - DNA, 25 bp, Homo sapien
tcagtgaaaacatgggtccacacac

SEQ ID NO: 3217944 - DNA, 25 bp, Homo sapien
gatcagtgaaaacatgggtccacac

SEQ ID NO: 3217945 - DNA, 25 bp, Homo sapien
tatgtcaggcacattgaaaaccagc

SEQ ID NO: 3217946 - DNA, 25 bp, Homo sapien
cactcgtgctttggaccgggagcaa

SEQ ID NO: 3217947 - DNA, 25 bp, Homo sapien
tctgacctgggagatccacctagga

SEQ ID NO: 3217948 - DNA, 25 bp, Homo sapien
tagcatccagggttcacgaagcacc

SEQ ID NO: 3217949 - DNA, 25 bp, Homo sapien
gaaatcggctaaaaaggtgacacag

SEQ ID NO: 3217950 - DNA, 25 bp, Homo sapien
ctaaaataaggcaaagcagctgggt

SEQ ID NO: 3217951 - DNA, 25 bp, Homo sapien
cagagagcataccttggattggcaa

SEQ ID NO: 3217952 - DNA, 25 bp, Homo sapien
tggaaactgggagctccgtagccct

SEQ ID NO: 3217953 - DNA, 25 bp, Homo sapien
cacacaaagggaataaggaattctg

SEQ ID NO: 3217954 - DNA, 25 bp, Homo sapien
cagaaaaggtgtatttgcaagacaa

SEQ ID NO: 3217955 - DNA, 25 bp, Homo sapien
aaatgggttcaaggagaattccaag

SEQ ID NO: 3217956 - DNA, 25 bp, Homo sapien
gaacattctgatggcaaagacacac

SEQ ID NO: 3217957 - DNA, 25 bp, Homo sapien
gaagatgtgcctgaagatagtccca

SEQ ID NO: 3217958 - DNA, 25 bp, Homo sapien
tgctcaagacggtggtgggctcaca

SEQ ID NO: 3217959 - DNA, 25 bp, Homo sapien
gtctttgccatcgacagagccctgg

SEQ ID NO: 3217960 - DNA, 25 bp, Homo sapien
gatttcttctggtgatctcggcgga

SEQ ID NO: 3217961 - DNA, 25 bp, Homo sapien
tgtcagcaaaccagaacaagaactt

SEQ ID NO: 3217962 - DNA, 25 bp, Homo sapien
ttcttgaaggcatggccaatgggtg

SEQ ID NO: 3217963 - DNA, 25 bp, Homo sapien
gacaaatccgtcacaaatgccattg

SEQ ID NO: 3217964 - DNA, 25 bp, Homo sapien
aggcagtttccttgacatagctttc

SEQ ID NO: 3217965 - DNA, 25 bp, Homo sapien
ccagttgcccatcgccttgtctttt

SEQ ID NO: 3217966 - DNA, 25 bp, Homo sapien
atgaggttggctggcccagttgccc

SEQ ID NO: 3217967 - DNA, 25 bp, Homo sapien
caatccaacccataaggtgtcgaga

SEQ ID NO: 3217968 - DNA, 25 bp, Homo sapien
tcgagagggtgttgagatgtcagat

SEQ ID NO: 3217969 - DNA, 25 bp, Homo sapien
aaggaattgagctttagctttcagc

SEQ ID NO: 3217970 - DNA, 25 bp, Homo sapien
cttgagttagaatattggtcaaaag

SEQ ID NO: 3217971 - DNA, 25 bp, Homo sapien
cattgatggagtacaggtgattgca

SEQ ID NO: 3217972 - DNA, 25 bp, Homo sapien
tttatgtaactctgcacaatggtct

SEQ ID NO: 3217973 - DNA, 25 bp, Homo sapien
cacggagggctcgtgctgatcgtac

SEQ ID NO: 3217974 - DNA, 25 bp, Homo sapien
tccaaatctcctcttaagatgatgt

SEQ ID NO: 3217975 - DNA, 25 bp, Homo sapien
gaaattgttcatgaaactccaaatc

SEQ ID NO: 3217976 - DNA, 25 bp, Homo sapien
ttctcccagaagacagatatcatga

SEQ ID NO: 3217977 - DNA, 25 bp, Homo sapien
cgcggcatcaccttcttagcagctg

SEQ ID NO: 3217978 - DNA, 25 bp, Homo sapien
aaggcaagtacttccactgttgaat

SEQ ID NO: 3217979 - DNA, 25 bp, Homo sapien
atgagctcatctgggagctgtagcc

SEQ ID NO: 3217980 - DNA, 25 bp, Homo sapien
ctgtagccgcggcatcaccttctta

SEQ ID NO: 3217981 - DNA, 25 bp, Homo sapien
ttaataacagaaggaagacgtattc

SEQ ID NO: 3217982 - DNA, 25 bp, Homo sapien
taacagaaggaagacgtattcctcg

SEQ ID NO: 3217983 - DNA, 25 bp, Homo sapien
aggaagacgtattcctcgtcgggtg

SEQ ID NO: 3217984 - DNA, 25 bp, Homo sapien
tcgtcgggtggggaataacaccaga

SEQ ID NO: 3217985 - DNA, 25 bp, Homo sapien
gggtagacccctctagatcctgttg

SEQ ID NO: 3217986 - DNA, 25 bp, Homo sapien
agctgtgactttgggatgacttcca

SEQ ID NO: 3217987 - DNA, 25 bp, Homo sapien
cattgtcaatctctgtactgaaggg

SEQ ID NO: 3217988 - DNA, 25 bp, Homo sapien
gagccttgaaaagaagttcatcctt

SEQ ID NO: 3217989 - DNA, 25 bp, Homo sapien
tcaaacctttcaaccacaagagctt

SEQ ID NO: 3217990 - DNA, 25 bp, Homo sapien
ctggatgcaatcgactgtggccccg

SEQ ID NO: 3217991 - DNA, 25 bp, Homo sapien
gcaatcgactgtggccccggtttat

SEQ ID NO: 3217992 - DNA, 25 bp, Homo sapien
tcaaccacaagagcttattggtcat

SEQ ID NO: 3217993 - DNA, 25 bp, Homo sapien
cttggagggaacattttgtggactc

SEQ ID NO: 3217994 - DNA, 25 bp, Homo sapien
actctggggagcctcgtttatagcc

SEQ ID NO: 3217995 - DNA, 25 bp, Homo sapien
ccttgaagtagtactgggatggaga

SEQ ID NO: 3217996 - DNA, 25 bp, Homo sapien
tggagggaacattttgtggactctg

SEQ ID NO: 3217997 - DNA, 25 bp, Homo sapien
atgagctggtatcacttgttaatac

SEQ ID NO: 3217998 - DNA, 25 bp, Homo sapien
tatgagctggtatcacttgttaata

SEQ ID NO: 3217999 - DNA, 25 bp, Homo sapien
ctatgagctggtatcacttgttaat

SEQ ID NO: 3218000 - DNA, 25 bp, Homo sapien
tgagctggtatcacttgttaatact

SEQ ID NO: 3218001 - DNA, 25 bp, Homo sapien
gcctaggattggaaagggctgtgcc

SEQ ID NO: 3218002 - DNA, 25 bp, Homo sapien
aagcttgtgattcatatgttattcc

SEQ ID NO: 3218003 - DNA, 25 bp, Homo sapien
tgaggacctgatgtttgtcagaagc

SEQ ID NO: 3218004 - DNA, 25 bp, Homo sapien
ttcctctgctcactggattgcttct

SEQ ID NO: 3218005 - DNA, 25 bp, Homo sapien
catggtttgatcacaagtgggaagc

SEQ ID NO: 3218006 - DNA, 25 bp, Homo sapien
ggaagcctttcacaccagttgccct

SEQ ID NO: 3218007 - DNA, 25 bp, Homo sapien
tttgatcacaagtgggaagcctttc

SEQ ID NO: 3218008 - DNA, 25 bp, Homo sapien
aaagggaagcatggtttgatcacaa

SEQ ID NO: 3218009 - DNA, 25 bp, Homo sapien
agagatgatagagcccacccgattg

SEQ ID NO: 3218010 - DNA, 25 bp, Homo sapien
gatgatagagcccacccgattggct

SEQ ID NO: 3218011 - DNA, 25 bp, Homo sapien
gaagagatgatagagcccacccgat

SEQ ID NO: 3218012 - DNA, 25 bp, Homo sapien
tgatagagcccacccgattggcttt

SEQ ID NO: 3218013 - DNA, 25 bp, Homo sapien
gatagcatagtaacttctttccttg

SEQ ID NO: 3218014 - DNA, 25 bp, Homo sapien
gcggcctctgcttagtttaacggaa

SEQ ID NO: 3218015 - DNA, 25 bp, Homo sapien
cagctggtcactcggcacaagaaga

SEQ ID NO: 3218016 - DNA, 25 bp, Homo sapien
caagaagaccgaatgaccaaccaga

SEQ ID NO: 3218017 - DNA, 25 bp, Homo sapien
gatggactcagtactctgttttggt

SEQ ID NO: 3218018 - DNA, 25 bp, Homo sapien
acctgtgctgctatctttttcaatg

SEQ ID NO: 3218019 - DNA, 25 bp, Homo sapien
gttcttgagcaaaagtggccttctt

SEQ ID NO: 3218020 - DNA, 25 bp, Homo sapien
caatgtctgatatctcttgacgatg

SEQ ID NO: 3218021 - DNA, 25 bp, Homo sapien
gacacgctggtaggtgacatccgcg

SEQ ID NO: 3218022 - DNA, 25 bp, Homo sapien
gagcggcttctttctgtcggaggac

SEQ ID NO: 3218023 - DNA, 25 bp, Homo sapien
caggcccgttcttccagttgcgcta

SEQ ID NO: 3218024 - DNA, 25 bp, Homo sapien
tgcaggtggagattcgcgtcaacga

SEQ ID NO: 3218025 - DNA, 25 bp, Homo sapien
gcagaggacgctttcaccagttgca

SEQ ID NO: 3218026 - DNA, 25 bp, Homo sapien
caaccagccgagtagaacaaggaac

SEQ ID NO: 3218027 - DNA, 25 bp, Homo sapien
ggagaacacaagtttggcaccccaa

SEQ ID NO: 3218028 - DNA, 25 bp, Homo sapien
gatttttctgcgatcctgccacaag

SEQ ID NO: 3218029 - DNA, 25 bp, Homo sapien
gaagggaaatctgcgactatggcta

SEQ ID NO: 3218030 - DNA, 25 bp, Homo sapien
aagtggtatccgtagagttatcccg

SEQ ID NO: 3218031 - DNA, 25 bp, Homo sapien
tggcatttgcgttcggctcagacag

SEQ ID NO: 3218032 - DNA, 25 bp, Homo sapien
gctcagacagaagctagttttgaaa

SEQ ID NO: 3218033 - DNA, 25 bp, Homo sapien
cactatgcagggcttttggtcctcc

SEQ ID NO: 3218034 - DNA, 25 bp, Homo sapien
tatttggtcacaggtagagataacg

SEQ ID NO: 3218035 - DNA, 25 bp, Homo sapien
tgttgctgcaagaaaccactatgca

SEQ ID NO: 3218036 - DNA, 25 bp, Homo sapien
gattagcaattacatacacctccgt

SEQ ID NO: 3218037 - DNA, 25 bp, Homo sapien
cactgagggtagacacagtgtctcc

SEQ ID NO: 3218038 - DNA, 25 bp, Homo sapien
aacttgctgacggtaagtggctcgt

SEQ ID NO: 3218039 - DNA, 25 bp, Homo sapien
gctgacagccgagaacactgagggt

SEQ ID NO: 3218040 - DNA, 25 bp, Homo sapien
gcacttgaatcagaagccgctgtga

SEQ ID NO: 3218041 - DNA, 25 bp, Homo sapien
ggtcagagagtatcccagaataaaa

SEQ ID NO: 3218042 - DNA, 25 bp, Homo sapien
cccacctgtgacgtcggcttggtca

SEQ ID NO: 3218043 - DNA, 25 bp, Homo sapien
cacctgtgacgtcggcttggtcaga

SEQ ID NO: 3218044 - DNA, 25 bp, Homo sapien
acgtcggcttggtcagagagtatcc

SEQ ID NO: 3218045 - DNA, 25 bp, Homo sapien
gaatgtctggattattagggcaaga

SEQ ID NO: 3218046 - DNA, 25 bp, Homo sapien
taacagtggctttgttaggaagcag

SEQ ID NO: 3218047 - DNA, 25 bp, Homo sapien
ctaagtattcgttaagagagtgagg

SEQ ID NO: 3218048 - DNA, 25 bp, Homo sapien
gaagaactttcatgggtggctttac

SEQ ID NO: 3218049 - DNA, 25 bp, Homo sapien
aagcttggcgttcatgaggatatcc

SEQ ID NO: 3218050 - DNA, 25 bp, Homo sapien
caatttgtgatactaggaagatgca

SEQ ID NO: 3218051 - DNA, 25 bp, Homo sapien
tctgctactgtcgaataatgggact

SEQ ID NO: 3218052 - DNA, 25 bp, Homo sapien
gaaaccaggcacaagaaagtgtgcg

SEQ ID NO: 3218053 - DNA, 25 bp, Homo sapien
gaagtgaataccgacatcctggggc

SEQ ID NO: 3218054 - DNA, 25 bp, Homo sapien
gaataccgacatcctggggcttctg

SEQ ID NO: 3218055 - DNA, 25 bp, Homo sapien
tgaataccgacatcctggggcttct

SEQ ID NO: 3218056 - DNA, 25 bp, Homo sapien
agtgaataccgacatcctggggctt

SEQ ID NO: 3218057 - DNA, 25 bp, Homo sapien
ttttgcagaatacatgactggaggc

SEQ ID NO: 3218058 - DNA, 25 bp, Homo sapien
tgcacagtccttagcggtggcatta

SEQ ID NO: 3218059 - DNA, 25 bp, Homo sapien
taagatccagagaatgccaagtgaa

SEQ ID NO: 3218060 - DNA, 25 bp, Homo sapien
ggtggcattacctttgcagaccaag

SEQ ID NO: 3218061 - DNA, 25 bp, Homo sapien
ggtcgttgaagaggacccatgacat

SEQ ID NO: 3218062 - DNA, 25 bp, Homo sapien
aggtcgttgaagaggacccatgaca

SEQ ID NO: 3218063 - DNA, 25 bp, Homo sapien
caattccggaaggtgctgcacagct

SEQ ID NO: 3218064 - DNA, 25 bp, Homo sapien
tcttgggagctggaaagtgtcctcg

SEQ ID NO: 3218065 - DNA, 25 bp, Homo sapien
ggatacacggtagcatcatggtcga

SEQ ID NO: 3218066 - DNA, 25 bp, Homo sapien
gataattcgtccagtcctcgtttga

SEQ ID NO: 3218067 - DNA, 25 bp, Homo sapien
tacaaagagcagtggtgacacctgc

SEQ ID NO: 3218068 - DNA, 25 bp, Homo sapien
aaataaggcagcttcgggtgtcagc

SEQ ID NO: 3218069 - DNA, 25 bp, Homo sapien
cctgagggcccgtacaaagagcagt

SEQ ID NO: 3218070 - DNA, 25 bp, Homo sapien
ataaggcagcttcgggtgtcagcca

SEQ ID NO: 3218071 - DNA, 25 bp, Homo sapien
cttcagtgtgtatagctgcacagga

SEQ ID NO: 3218072 - DNA, 25 bp, Homo sapien
cttaggcttcagtgtgtatagctgc

SEQ ID NO: 3218073 - DNA, 25 bp, Homo sapien
caggagtctgatgagggatcattct

SEQ ID NO: 3218074 - DNA, 25 bp, Homo sapien
acaggagtctgatgagggatcattc

SEQ ID NO: 3218075 - DNA, 25 bp, Homo sapien
cagatagaatgcctaatgcctcttt

SEQ ID NO: 3218076 - DNA, 25 bp, Homo sapien
gggcagcagatagaatgcctaatgc

SEQ ID NO: 3218077 - DNA, 25 bp, Homo sapien
gcattcaaagcatcacaaaagtttt

SEQ ID NO: 3218078 - DNA, 25 bp, Homo sapien
gtttgaaaagggcagcagatagaat

SEQ ID NO: 3218079 - DNA, 25 bp, Homo sapien
aactttgcttatgatatatgcagac

SEQ ID NO: 3218080 - DNA, 25 bp, Homo sapien
ataagggataataggacattttctc

SEQ ID NO: 3218081 - DNA, 25 bp, Homo sapien
aataagggataataggacattttct

SEQ ID NO: 3218082 - DNA, 25 bp, Homo sapien
taataagggataataggacattttc

SEQ ID NO: 3218083 - DNA, 25 bp, Homo sapien
gaaataggagatgacgccatctctt

SEQ ID NO: 3218084 - DNA, 25 bp, Homo sapien
tcttatgggagctgacatagagcat

SEQ ID NO: 3218085 - DNA, 25 bp, Homo sapien
gccatctcttgtggaatgtctccct

SEQ ID NO: 3218086 - DNA, 25 bp, Homo sapien
ctactggcttagatgtcagtttcca

SEQ ID NO: 3218087 - DNA, 25 bp, Homo sapien
cataatgtatcaggctgacacactc

SEQ ID NO: 3218088 - DNA, 25 bp, Homo sapien
atcttgggaccataatgtatcaggc

SEQ ID NO: 3218089 - DNA, 25 bp, Homo sapien
gggaccataatgtatcaggctgaca

SEQ ID NO: 3218090 - DNA, 25 bp, Homo sapien
gaccataatgtatcaggctgacaca

SEQ ID NO: 3218091 - DNA, 25 bp, Homo sapien
ctcctcattgtcgttgacaccttgg

SEQ ID NO: 3218092 - DNA, 25 bp, Homo sapien
tgacaccttgggacttaactagaaa

SEQ ID NO: 3218093 - DNA, 25 bp, Homo sapien
gtggaagctccaagaaaccatcctt

SEQ ID NO: 3218094 - DNA, 25 bp, Homo sapien
ttgtggaagctccaagaaaccatcc

SEQ ID NO: 3218095 - DNA, 25 bp, Homo sapien
tcagagtgccactagagaggtagca

SEQ ID NO: 3218096 - DNA, 25 bp, Homo sapien
gataagtacaacactcaagttccct

SEQ ID NO: 3218097 - DNA, 25 bp, Homo sapien
cgacatgatttggaacaactgagca

SEQ ID NO: 3218098 - DNA, 25 bp, Homo sapien
tgaagtcatggtcctagtcagagct

SEQ ID NO: 3218099 - DNA, 25 bp, Homo sapien
cctaaaacatacattggaacttacg

SEQ ID NO: 3218100 - DNA, 25 bp, Homo sapien
tgcttaagatccatcaactggctgg

SEQ ID NO: 3218101 - DNA, 25 bp, Homo sapien
cagtaacagtagaaagaccaactgc

SEQ ID NO: 3218102 - DNA, 25 bp, Homo sapien
gaggccttaggataaagctgtatca

SEQ ID NO: 3218103 - DNA, 25 bp, Homo sapien
ctacaaggaatgaggcagaaatata

SEQ ID NO: 3218104 - DNA, 25 bp, Homo sapien
gatgaccacgggcactgaagaaacc

SEQ ID NO: 3218105 - DNA, 25 bp, Homo sapien
tcaaggggtcgatgaccacgggcac

SEQ ID NO: 3218106 - DNA, 25 bp, Homo sapien
tcttgtcaaggggtcgatgaccacg

SEQ ID NO: 3218107 - DNA, 25 bp, Homo sapien
ctctcttcttgtcaaggggtcgatg

SEQ ID NO: 3218108 - DNA, 25 bp, Homo sapien
ctgggtcagcgtgaagacagcctcc

SEQ ID NO: 3218109 - DNA, 25 bp, Homo sapien
ttggctggacgagcccgatagccac

SEQ ID NO: 3218110 - DNA, 25 bp, Homo sapien
cagctgctttggctggacgagcccg

SEQ ID NO: 3218111 - DNA, 25 bp, Homo sapien
cagcatcaggggcttttctttctac

SEQ ID NO: 3218112 - DNA, 25 bp, Homo sapien
ctcttgcaactgacatcctgtagga

SEQ ID NO: 3218113 - DNA, 25 bp, Homo sapien
ttgcaactgacatcctgtaggacac

SEQ ID NO: 3218114 - DNA, 25 bp, Homo sapien
tgacatcctgtaggacacaacaccc

SEQ ID NO: 3218115 - DNA, 25 bp, Homo sapien
aactgacatcctgtaggacacaaca

SEQ ID NO: 3218116 - DNA, 25 bp, Homo sapien
tttgccacaggtctttcagcaaata

SEQ ID NO: 3218117 - DNA, 25 bp, Homo sapien
tacatgtactgaaaggaagaagagg

SEQ ID NO: 3218118 - DNA, 25 bp, Homo sapien
tttaactcatcaacactatttctga

SEQ ID NO: 3218119 - DNA, 25 bp, Homo sapien
ttggcctttcctgttgtagcaaagc

SEQ ID NO: 3218120 - DNA, 25 bp, Homo sapien
catgcattctcgtggcagtctaacg

SEQ ID NO: 3218121 - DNA, 25 bp, Homo sapien
tagctgaaaatcgaatggaaagcac

SEQ ID NO: 3218122 - DNA, 25 bp, Homo sapien
tctaacggttccaattttatagctg

SEQ ID NO: 3218123 - DNA, 25 bp, Homo sapien
atcttctcacaaccatgcattctcg

SEQ ID NO: 3218124 - DNA, 25 bp, Homo sapien
ttccaactgtgggtatgctactcac

SEQ ID NO: 3218125 - DNA, 25 bp, Homo sapien
aatgatttggcgcatgacatataca

SEQ ID NO: 3218126 - DNA, 25 bp, Homo sapien
gagaagttcaatcttacagagtgga

SEQ ID NO: 3218127 - DNA, 25 bp, Homo sapien
taggtatacgctaaagattgtgtcc

SEQ ID NO: 3218128 - DNA, 25 bp, Homo sapien
gacaatattccatttgagctgagac

SEQ ID NO: 3218129 - DNA, 25 bp, Homo sapien
tttccaggattgaacgaagcacacg

SEQ ID NO: 3218130 - DNA, 25 bp, Homo sapien
gacaccacaggaatattgcaactga

SEQ ID NO: 3218131 - DNA, 25 bp, Homo sapien
tgggatattgctattcacagtctca

SEQ ID NO: 3218132 - DNA, 25 bp, Homo sapien
tgaggacgtttatctgctaagagga

SEQ ID NO: 3218133 - DNA, 25 bp, Homo sapien
gtcctggaatatccatgagctccca

SEQ ID NO: 3218134 - DNA, 25 bp, Homo sapien
gccagtacgcagatgcacacatcag

SEQ ID NO: 3218135 - DNA, 25 bp, Homo sapien
tacatctatctgtggttctgccatc

SEQ ID NO: 3218136 - DNA, 25 bp, Homo sapien
gacagaactgtcaggttgaatgaga

SEQ ID NO: 3218137 - DNA, 25 bp, Homo sapien
tactctatacggtttgacagaactg

SEQ ID NO: 3218138 - DNA, 25 bp, Homo sapien
tttctgtattcatgtcacagtatac

SEQ ID NO: 3218139 - DNA, 25 bp, Homo sapien
gaactgtcaggttgaatgagataca

SEQ ID NO: 3218140 - DNA, 25 bp, Homo sapien
aggtcaacaactgtcgaaagcttac

SEQ ID NO: 3218141 - DNA, 25 bp, Homo sapien
tgtttcctggcattttacggtatcc

SEQ ID NO: 3218142 - DNA, 25 bp, Homo sapien
gcattttacggtatccaaataatta

SEQ ID NO: 3218143 - DNA, 25 bp, Homo sapien
caacaggtcaacaactgtcgaaagc

SEQ ID NO: 3218144 - DNA, 25 bp, Homo sapien
tgccaaagtcaacactaccgtcttg

SEQ ID NO: 3218145 - DNA, 25 bp, Homo sapien
tggtaggccacagtaattcttccca

SEQ ID NO: 3218146 - DNA, 25 bp, Homo sapien
tcttgacggttctgaatcactgtcc

SEQ ID NO: 3218147 - DNA, 25 bp, Homo sapien
caaatccctgtttatatggatccca

SEQ ID NO: 3218148 - DNA, 25 bp, Homo sapien
ggtcccatcctggtaagctggctaa

SEQ ID NO: 3218149 - DNA, 25 bp, Homo sapien
agctgagatgctccatccatgaggg

SEQ ID NO: 3218150 - DNA, 25 bp, Homo sapien
tgtcatacgtgctgaagaacatgcc

SEQ ID NO: 3218151 - DNA, 25 bp, Homo sapien
tccatgagggcattaccggctgttc

SEQ ID NO: 3218152 - DNA, 25 bp, Homo sapien
ccccagtagtatctgccgtttggat

SEQ ID NO: 3218153 - DNA, 25 bp, Homo sapien
ggtgtactgtccaccccagtagtat

SEQ ID NO: 3218154 - DNA, 25 bp, Homo sapien
cgtttggattggctgcatgacatct

SEQ ID NO: 3218155 - DNA, 25 bp, Homo sapien
tgcatgacatctattataccaccat

SEQ ID NO: 3218156 - DNA, 25 bp, Homo sapien
cattgagtaccatgaccccttccaa

SEQ ID NO: 3218157 - DNA, 25 bp, Homo sapien
gggaagaagggcctgatcttcatac

SEQ ID NO: 3218158 - DNA, 25 bp, Homo sapien
tgagtaccatgaccccttccaattc

SEQ ID NO: 3218159 - DNA, 25 bp, Homo sapien
cctcattgagtaccatgaccccttc

SEQ ID NO: 3218160 - DNA, 25 bp, Homo sapien
agagcaaaaatctacgtattgggga

SEQ ID NO: 3218161 - DNA, 25 bp, Homo sapien
aaaatgttgtcacatacagaagagc

SEQ ID NO: 3218162 - DNA, 25 bp, Homo sapien
gtcacactcacgtctgcttgagagt

SEQ ID NO: 3218163 - DNA, 25 bp, Homo sapien
tgcttgagagttttagaggaatata

SEQ ID NO: 3218164 - DNA, 25 bp, Homo sapien
tgaaaattctcgcaatcaactagaa

SEQ ID NO: 3218165 - DNA, 25 bp, Homo sapien
tgaacaccaactctgtcaaaactat

SEQ ID NO: 3218166 - DNA, 25 bp, Homo sapien
tctttgacagatcctacataaataa

SEQ ID NO: 3218167 - DNA, 25 bp, Homo sapien
tccgtcatggttttcctacgacaag

SEQ ID NO: 3218168 - DNA, 25 bp, Homo sapien
gaactcaggatgtgcaaggaaccaa

SEQ ID NO: 3218169 - DNA, 25 bp, Homo sapien
taagctaaggaatccgggaatggcc

SEQ ID NO: 3218170 - DNA, 25 bp, Homo sapien
caaatagtagcggtcctgtccagcc

SEQ ID NO: 3218171 - DNA, 25 bp, Homo sapien
tttaaagggcctgacctgtcctgga

SEQ ID NO: 3218172 - DNA, 25 bp, Homo sapien
tgcttctgtgaacccttccccagtg

SEQ ID NO: 3218173 - DNA, 25 bp, Homo sapien
gaactcctttgggacagagctcatt

SEQ ID NO: 3218174 - DNA, 25 bp, Homo sapien
gctcatttatatggtgcatcctgtc

SEQ ID NO: 3218175 - DNA, 25 bp, Homo sapien
tatcttcttgtgaatgggtagccag

SEQ ID NO: 3218176 - DNA, 25 bp, Homo sapien
tattcactcagaagcccatttcaac

SEQ ID NO: 3218177 - DNA, 25 bp, Homo sapien
agctccctgactcttattcactcag

SEQ ID NO: 3218178 - DNA, 25 bp, Homo sapien
acttggttttcatgcaattaccaca

SEQ ID NO: 3218179 - DNA, 25 bp, Homo sapien
ttttcatgcaattaccacactcttg

SEQ ID NO: 3218180 - DNA, 25 bp, Homo sapien
cactcacacgtattgccttgacaga

SEQ ID NO: 3218181 - DNA, 25 bp, Homo sapien
tgcatcacagatgaaccccagagtt

SEQ ID NO: 3218182 - DNA, 25 bp, Homo sapien
ggtagccaatattagcaggatcatg

SEQ ID NO: 3218183 - DNA, 25 bp, Homo sapien
gattatgaacgggaagggccattca

SEQ ID NO: 3218184 - DNA, 25 bp, Homo sapien
tatcacttccgggtaggctctgagg

SEQ ID NO: 3218185 - DNA, 25 bp, Homo sapien
tcagtacatcaggaaagtggcagac

SEQ ID NO: 3218186 - DNA, 25 bp, Homo sapien
tcctcctatgaaggcactgcgggtg

SEQ ID NO: 3218187 - DNA, 25 bp, Homo sapien
gaattctggctaggcaatgactacc

SEQ ID NO: 3218188 - DNA, 25 bp, Homo sapien
gtaagtgcatcctttccctatggag

SEQ ID NO: 3218189 - DNA, 25 bp, Homo sapien
caagactacaagagaggtttcggca

SEQ ID NO: 3218190 - DNA, 25 bp, Homo sapien
cactgaattttaaccggacctggca

SEQ ID NO: 3218191 - DNA, 25 bp, Homo sapien
tcaatatcaagctaccgggatccag

SEQ ID NO: 3218192 - DNA, 25 bp, Homo sapien
gaagttttaggccagatagcccagg

SEQ ID NO: 3218193 - DNA, 25 bp, Homo sapien
gatggttctgactgtcccgaggcaa

SEQ ID NO: 3218194 - DNA, 25 bp, Homo sapien
taggtactctggatgggttccgcca

SEQ ID NO: 3218195 - DNA, 25 bp, Homo sapien
ctctgaacgcggaagtgctgggcac

SEQ ID NO: 3218196 - DNA, 25 bp, Homo sapien
gctctgggactggagggactgcaac

SEQ ID NO: 3218197 - DNA, 25 bp, Homo sapien
accggatcagagacggaaagcccca

SEQ ID NO: 3218198 - DNA, 25 bp, Homo sapien
agccccaggaaccctagcagtgctg

SEQ ID NO: 3218199 - DNA, 25 bp, Homo sapien
gccccaggaaccctagcagtgctgg

SEQ ID NO: 3218200 - DNA, 25 bp, Homo sapien
tagagataggcaacacttaccactg

SEQ ID NO: 3218201 - DNA, 25 bp, Homo sapien
gactatgaagatcagcagaagcaac

SEQ ID NO: 3218202 - DNA, 25 bp, Homo sapien
cagaagcaacttgaacaggtcattg

SEQ ID NO: 3218203 - DNA, 25 bp, Homo sapien
taagagccagcttcagaaggtaccc

SEQ ID NO: 3218204 - DNA, 25 bp, Homo sapien
cctgcctgaagaaagatggtccaca

SEQ ID NO: 3218205 - DNA, 25 bp, Homo sapien
tggcaatgcacttcgtaatagacag

SEQ ID NO: 3218206 - DNA, 25 bp, Homo sapien
taggtggcacttactcaaaagcatc

SEQ ID NO: 3218207 - DNA, 25 bp, Homo sapien
gataagcttagggacagaggccaat

SEQ ID NO: 3218208 - DNA, 25 bp, Homo sapien
aaatgcttgatctgtgtgacccggg

SEQ ID NO: 3218209 - DNA, 25 bp, Homo sapien
gagaaggcaaatcaacagaggctgc

SEQ ID NO: 3218210 - DNA, 25 bp, Homo sapien
gccagagctgtagttcatgccagtg

SEQ ID NO: 3218211 - DNA, 25 bp, Homo sapien
gatgagcaaccttacctcctgatgt

SEQ ID NO: 3218212 - DNA, 25 bp, Homo sapien
aaagtggctacccattaagtctaag

SEQ ID NO: 3218213 - DNA, 25 bp, Homo sapien
tatattgggattaggttcatcaaag

SEQ ID NO: 3218214 - DNA, 25 bp, Homo sapien
tgtctagacctttcttgaatagcta

SEQ ID NO: 3218215 - DNA, 25 bp, Homo sapien
ggcacagtcttacctgcatttcaaa

SEQ ID NO: 3218216 - DNA, 25 bp, Homo sapien
ccggacccgcgtcttggcaggctca

SEQ ID NO: 3218217 - DNA, 25 bp, Homo sapien
gagtcccggacccgcgtcttggcag

SEQ ID NO: 3218218 - DNA, 25 bp, Homo sapien
cccgcgtcttggcaggctcacctac

SEQ ID NO: 3218219 - DNA, 25 bp, Homo sapien
agccgagtcccggacccgcgtcttg

SEQ ID NO: 3218220 - DNA, 25 bp, Homo sapien
tggtgtctgtccaatctccgggact

SEQ ID NO: 3218221 - DNA, 25 bp, Homo sapien
gagcacgagcctcacgctcaacgtt

SEQ ID NO: 3218222 - DNA, 25 bp, Homo sapien
aatctccgggactcgacgcccgagg

SEQ ID NO: 3218223 - DNA, 25 bp, Homo sapien
aacgttaggcactgctcaaggccgc

SEQ ID NO: 3218224 - DNA, 25 bp, Homo sapien
aaggtcccagggctcgggtgggcat

SEQ ID NO: 3218225 - DNA, 25 bp, Homo sapien
ctccagggctgcaactaactcctcg

SEQ ID NO: 3218226 - DNA, 25 bp, Homo sapien
gggctgcaactaactcctcgcgcct

SEQ ID NO: 3218227 - DNA, 25 bp, Homo sapien
tgcctccagggctgcaactaactcc

SEQ ID NO: 3218228 - DNA, 25 bp, Homo sapien
ctcgcgcctcccttgccgcctttcc

SEQ ID NO: 3218229 - DNA, 25 bp, Homo sapien
tgcggactaggaagtgaagatttcc

SEQ ID NO: 3218230 - DNA, 25 bp, Homo sapien
ctaagagggctatgattccaagagc

SEQ ID NO: 3218231 - DNA, 25 bp, Homo sapien
tccaagagccgactctgttgcaaac

SEQ ID NO: 3218232 - DNA, 25 bp, Homo sapien
tccgctggacggttttgcggactag

SEQ ID NO: 3218233 - DNA, 25 bp, Homo sapien
actgctgccctctaatccacaacca

SEQ ID NO: 3218234 - DNA, 25 bp, Homo sapien
tgccctctaatccacaaccaccacc

SEQ ID NO: 3218235 - DNA, 25 bp, Homo sapien
ctactgctgccctctaatccacaac

SEQ ID NO: 3218236 - DNA, 25 bp, Homo sapien
tgctgccctctaatccacaaccacc

SEQ ID NO: 3218237 - DNA, 25 bp, Homo sapien
ttggtcttttatatctggagccatg

SEQ ID NO: 3218238 - DNA, 25 bp, Homo sapien
ccatggcagtctgtataaaatcagg

SEQ ID NO: 3218239 - DNA, 25 bp, Homo sapien
tcttttatatctggagccatggcag

SEQ ID NO: 3218240 - DNA, 25 bp, Homo sapien
tataaaatcaggagcatagcccagg

SEQ ID NO: 3218241 - DNA, 25 bp, Homo sapien
ctttgcagacttgttaacgtagttg

SEQ ID NO: 3218242 - DNA, 25 bp, Homo sapien
ctggttactttgcagacttgttaac

SEQ ID NO: 3218243 - DNA, 25 bp, Homo sapien
agttctgctgttagtcggatgggtt

SEQ ID NO: 3218244 - DNA, 25 bp, Homo sapien
tgctgttagtcggatgggttcccct

SEQ ID NO: 3218245 - DNA, 25 bp, Homo sapien
gaatattccaccagtaccctgagta

SEQ ID NO: 3218246 - DNA, 25 bp, Homo sapien
gtctggcaccaaatgataatcggtg

SEQ ID NO: 3218247 - DNA, 25 bp, Homo sapien
ccacattcagtgagattgcctgcaa

SEQ ID NO: 3218248 - DNA, 25 bp, Homo sapien
cctgagtaccacattcagtgagatt

SEQ ID NO: 3218249 - DNA, 25 bp, Homo sapien
gtatatgcattcacatccgtatatg

SEQ ID NO: 3218250 - DNA, 25 bp, Homo sapien
ccgtatatgattatctgagggtaaa

SEQ ID NO: 3218251 - DNA, 25 bp, Homo sapien
catgtttggtctatagcatgattac

SEQ ID NO: 3218252 - DNA, 25 bp, Homo sapien
taggcagaagcgatgccaataagca

SEQ ID NO: 3218253 - DNA, 25 bp, Homo sapien
ttacaaagtgagtagccgctggtcc

SEQ ID NO: 3218254 - DNA, 25 bp, Homo sapien
gcaaatgaagactcggcaggcaacc

SEQ ID NO: 3218255 - DNA, 25 bp, Homo sapien
tcacgtacatgaagcggtagctagc

SEQ ID NO: 3218256 - DNA, 25 bp, Homo sapien
caagcatctgattggttgcgccaag

SEQ ID NO: 3218257 - DNA, 25 bp, Homo sapien
gagattatcacagtcattcaagcca

SEQ ID NO: 3218258 - DNA, 25 bp, Homo sapien
aaggaatgatatcacctggcttaca

SEQ ID NO: 3218259 - DNA, 25 bp, Homo sapien
gatggcagctagaaccagagtagca

SEQ ID NO: 3218260 - DNA, 25 bp, Homo sapien
tagaaacagggataccagttaagag

SEQ ID NO: 3218261 - DNA, 25 bp, Homo sapien
tctcctccacaattgtgaagcccca

SEQ ID NO: 3218262 - DNA, 25 bp, Homo sapien
tcctccacaattgtgaagccccatc

SEQ ID NO: 3218263 - DNA, 25 bp, Homo sapien
tccacaattgtgaagccccatccct

SEQ ID NO: 3218264 - DNA, 25 bp, Homo sapien
cacaattgtgaagccccatccctct

SEQ ID NO: 3218265 - DNA, 25 bp, Homo sapien
ctgaggaactggcatgtcagtgtct

SEQ ID NO: 3218266 - DNA, 25 bp, Homo sapien
tgagccaagcaatatagacctcttc

SEQ ID NO: 3218267 - DNA, 25 bp, Homo sapien
taacaacgtttgagccttaatcgta

SEQ ID NO: 3218268 - DNA, 25 bp, Homo sapien
taaacagaagttaatatgagccaag

SEQ ID NO: 3218269 - DNA, 25 bp, Homo sapien
caagtggcctgattgagactctaca

SEQ ID NO: 3218270 - DNA, 25 bp, Homo sapien
cgtaatttcgattaaaccgtccatg

SEQ ID NO: 3218271 - DNA, 25 bp, Homo sapien
tcacaaagcgtggagtggtactaga

SEQ ID NO: 3218272 - DNA, 25 bp, Homo sapien
tagtagcccgaggagaaagacttgc

SEQ ID NO: 3218273 - DNA, 25 bp, Homo sapien
aatgtcgacaagtgttcttttccca

SEQ ID NO: 3218274 - DNA, 25 bp, Homo sapien
tctatgctcagaagaaggactgctt

SEQ ID NO: 3218275 - DNA, 25 bp, Homo sapien
catgggagtgtggatgtctttacga

SEQ ID NO: 3218276 - DNA, 25 bp, Homo sapien
accaagaatgtaccagggctccctg

SEQ ID NO: 3218277 - DNA, 25 bp, Homo sapien
cctccaggttcactatgtgtggcaa

SEQ ID NO: 3218278 - DNA, 25 bp, Homo sapien
taaaatctactcagcaggtttccca

SEQ ID NO: 3218279 - DNA, 25 bp, Homo sapien
tctgtggcaagagtaactaaaatct

SEQ ID NO: 3218280 - DNA, 25 bp, Homo sapien
gatctctagtcttattcagcccaca

SEQ ID NO: 3218281 - DNA, 25 bp, Homo sapien
ggaagaatcagagaagattgaggtt

SEQ ID NO: 3218282 - DNA, 25 bp, Homo sapien
cagagaagattgaggtttgtgacat

SEQ ID NO: 3218283 - DNA, 25 bp, Homo sapien
ttactctggatttagggaccaggga

SEQ ID NO: 3218284 - DNA, 25 bp, Homo sapien
tctggatttagggaccagggaagaa

SEQ ID NO: 3218285 - DNA, 25 bp, Homo sapien
tattcctatgatatgggaacaagtg

SEQ ID NO: 3218286 - DNA, 25 bp, Homo sapien
tcttgagcaccttttgcaccttgag

SEQ ID NO: 3218287 - DNA, 25 bp, Homo sapien
agtgagcggctcagtttcaggagtc

SEQ ID NO: 3218288 - DNA, 25 bp, Homo sapien
ccttgagagcatggctgtcagctaa

SEQ ID NO: 3218289 - DNA, 25 bp, Homo sapien
atccgacacactgtgccacctccag

SEQ ID NO: 3218290 - DNA, 25 bp, Homo sapien
gtgcagccgcgtccccacaatgtca

SEQ ID NO: 3218291 - DNA, 25 bp, Homo sapien
gccacctgtgcagcaaccttggaag

SEQ ID NO: 3218292 - DNA, 25 bp, Homo sapien
caacaccaagaaaaggccagctggg

SEQ ID NO: 3218293 - DNA, 25 bp, Homo sapien
ctgggatctggtcagttggggaaac

SEQ ID NO: 3218294 - DNA, 25 bp, Homo sapien
tcagttggggaaactggatatgcac

SEQ ID NO: 3218295 - DNA, 25 bp, Homo sapien
tgggatctggtcagttggggaaact

SEQ ID NO: 3218296 - DNA, 25 bp, Homo sapien
gatctggtcagttggggaaactgga

SEQ ID NO: 3218297 - DNA, 25 bp, Homo sapien
tcttcatcattaggaaggatgccta

SEQ ID NO: 3218298 - DNA, 25 bp, Homo sapien
aattctacatctgtccactgggaag

SEQ ID NO: 3218299 - DNA, 25 bp, Homo sapien
ggaaggatgcctaattctacatctg

SEQ ID NO: 3218300 - DNA, 25 bp, Homo sapien
tcagtcttcatcattaggaaggatg

SEQ ID NO: 3218301 - DNA, 25 bp, Homo sapien
gtttagtgcatatgttgccagcaat

SEQ ID NO: 3218302 - DNA, 25 bp, Homo sapien
gaagtttagtgcatatgttgccagc

SEQ ID NO: 3218303 - DNA, 25 bp, Homo sapien
caaaacgaagtttagtgcatatgtt

SEQ ID NO: 3218304 - DNA, 25 bp, Homo sapien
ttttcaaaacgaagtttagtgcata

SEQ ID NO: 3218305 - DNA, 25 bp, Homo sapien
atttgagctcaaagtattaggtcac

SEQ ID NO: 3218306 - DNA, 25 bp, Homo sapien
ttagtacaagaatcttatgaaagca

SEQ ID NO: 3218307 - DNA, 25 bp, Homo sapien
tatgaaagcattaaaattgtgtaag

SEQ ID NO: 3218308 - DNA, 25 bp, Homo sapien
aattgaaagtggttaaatgtcctct

SEQ ID NO: 3218309 - DNA, 25 bp, Homo sapien
gagactcaatggagaagaaaaacac

SEQ ID NO: 3218310 - DNA, 25 bp, Homo sapien
tgatggaaatcagtccagaggaggt

SEQ ID NO: 3218311 - DNA, 25 bp, Homo sapien
ggaagttagaactgatgaggaggaa

SEQ ID NO: 3218312 - DNA, 25 bp, Homo sapien
tatttgtacataaaaggagactcaa

SEQ ID NO: 3218313 - DNA, 25 bp, Homo sapien
gtaaaatggacacagtcagtatgca

SEQ ID NO: 3218314 - DNA, 25 bp, Homo sapien
cactcaggagatttgggagctttct

SEQ ID NO: 3218315 - DNA, 25 bp, Homo sapien
aaatggacacagtcagtatgcagcc

SEQ ID NO: 3218316 - DNA, 25 bp, Homo sapien
agactcacactcaggagatttggga

SEQ ID NO: 3218317 - DNA, 25 bp, Homo sapien
gacagctacagtgtccccgcagggt

SEQ ID NO: 3218318 - DNA, 25 bp, Homo sapien
cagctacagtgtccccgcagggtgg

SEQ ID NO: 3218319 - DNA, 25 bp, Homo sapien
cagtgtccccgcagggtggtcggcc

SEQ ID NO: 3218320 - DNA, 25 bp, Homo sapien
atgacagctacagtgtccccgcagg

SEQ ID NO: 3218321 - DNA, 25 bp, Homo sapien
ctggagagacctctggtttcccgga

SEQ ID NO: 3218322 - DNA, 25 bp, Homo sapien
tggagagacctctggtttcccggac

SEQ ID NO: 3218323 - DNA, 25 bp, Homo sapien
cgcgttttggaagacgcaagcagtg

SEQ ID NO: 3218324 - DNA, 25 bp, Homo sapien
gacgcaagcagtgccaagctgattt

SEQ ID NO: 3218325 - DNA, 25 bp, Homo sapien
tggaagacgcaagcagtgccaagct

SEQ ID NO: 3218326 - DNA, 25 bp, Homo sapien
cagtgccaagctgatttgcgtttca

SEQ ID NO: 3218327 - DNA, 25 bp, Homo sapien
ttccgtccctggtggtcactaaggc

SEQ ID NO: 3218328 - DNA, 25 bp, Homo sapien
aacttgagggagacaaaagcatgga

SEQ ID NO: 3218329 - DNA, 25 bp, Homo sapien
gcggcttataatgcttatgactgcc

SEQ ID NO: 3218330 - DNA, 25 bp, Homo sapien
agacaaaagcatggagaattgcttc

SEQ ID NO: 3218331 - DNA, 25 bp, Homo sapien
agcgccaataccgaagcctcttgtg

SEQ ID NO: 3218332 - DNA, 25 bp, Homo sapien
ccagttctgggaaagcgccaatacc

SEQ ID NO: 3218333 - DNA, 25 bp, Homo sapien
cctcttgtgtcacgggccaaagggc

SEQ ID NO: 3218334 - DNA, 25 bp, Homo sapien
taccgaagcctcttgtgtcacgggc

SEQ ID NO: 3218335 - DNA, 25 bp, Homo sapien
tgtacgttcaatgcagacccgacct

SEQ ID NO: 3218336 - DNA, 25 bp, Homo sapien
cttcgctaaaatcgggggagtctga

SEQ ID NO: 3218337 - DNA, 25 bp, Homo sapien
gacctcggtgtgtacgttcaatgca

SEQ ID NO: 3218338 - DNA, 25 bp, Homo sapien
gagtctgatagacctcggtgtgtac

SEQ ID NO: 3218339 - DNA, 25 bp, Homo sapien
tcacattatagtcccagcaaagagg

SEQ ID NO: 3218340 - DNA, 25 bp, Homo sapien
cagattctacgcacgcctgagggta

SEQ ID NO: 3218341 - DNA, 25 bp, Homo sapien
cattatccttggaggccgggccttt

SEQ ID NO: 3218342 - DNA, 25 bp, Homo sapien
aaactcatcagctgcgcacagggag

SEQ ID NO: 3218343 - DNA, 25 bp, Homo sapien
caatgcctcctcgagggtggtccta

SEQ ID NO: 3218344 - DNA, 25 bp, Homo sapien
gctaagttctttgcccgtgcgcctg

SEQ ID NO: 3218345 - DNA, 25 bp, Homo sapien
gcgatgtccccaccgggtgctgagt

SEQ ID NO: 3218346 - DNA, 25 bp, Homo sapien
aaggcgaagtacttggatgagatgc

SEQ ID NO: 3218347 - DNA, 25 bp, Homo sapien
ggatagatatgagggacttcggctt

SEQ ID NO: 3218348 - DNA, 25 bp, Homo sapien
tgcaaagtgcgagcgcctcgaatgc

SEQ ID NO: 3218349 - DNA, 25 bp, Homo sapien
tttactttgcaaagtgcgagcgcct

SEQ ID NO: 3218350 - DNA, 25 bp, Homo sapien
acttcggcttaataaagagattgca

SEQ ID NO: 3218351 - DNA, 25 bp, Homo sapien
tcttcggtggaaagtcctcttggga

SEQ ID NO: 3218352 - DNA, 25 bp, Homo sapien
cctcttgggagagatttctgagttg

SEQ ID NO: 3218353 - DNA, 25 bp, Homo sapien
gagatttctgagttggaccaccttc

SEQ ID NO: 3218354 - DNA, 25 bp, Homo sapien
cgagttcctggcacttcgcggtagt

SEQ ID NO: 3218355 - DNA, 25 bp, Homo sapien
gacggataaggaaccggtggctgac

SEQ ID NO: 3218356 - DNA, 25 bp, Homo sapien
ccaggtgaggtacggcgcaaagtac

SEQ ID NO: 3218357 - DNA, 25 bp, Homo sapien
acagcgaggcctggcgaccggctca

SEQ ID NO: 3218358 - DNA, 25 bp, Homo sapien
gggacagtgagaccagtgctacaag

SEQ ID NO: 3218359 - DNA, 25 bp, Homo sapien
aagttaagctcgccgggcaggggtg

SEQ ID NO: 3218360 - DNA, 25 bp, Homo sapien
agttaagctcgccgggcaggggtgc

SEQ ID NO: 3218361 - DNA, 25 bp, Homo sapien
ctgggcaagttaagctcgccgggca

SEQ ID NO: 3218362 - DNA, 25 bp, Homo sapien
ggcaagttaagctcgccgggcaggg

SEQ ID NO: 3218363 - DNA, 25 bp, Homo sapien
tggagaggtgccggtgccactccgg

SEQ ID NO: 3218364 - DNA, 25 bp, Homo sapien
tcttggagaggtgccggtgccactc

SEQ ID NO: 3218365 - DNA, 25 bp, Homo sapien
agaggtgccggtgccactccggcag

SEQ ID NO: 3218366 - DNA, 25 bp, Homo sapien
cttggagaggtgccggtgccactcc

SEQ ID NO: 3218367 - DNA, 25 bp, Homo sapien
gatgttagctccgtaggcgaagtcc

SEQ ID NO: 3218368 - DNA, 25 bp, Homo sapien
gactcgtccaggtgattgaccagga

SEQ ID NO: 3218369 - DNA, 25 bp, Homo sapien
gatgagacgcttgttggagaccacc

SEQ ID NO: 3218370 - DNA, 25 bp, Homo sapien
tctgcagtaggtcacgaagtgctcg

SEQ ID NO: 3218371 - DNA, 25 bp, Homo sapien
catttcgagatatcctgcaaggcac

SEQ ID NO: 3218372 - DNA, 25 bp, Homo sapien
ctaagcatttcgagatatcctgcaa

SEQ ID NO: 3218373 - DNA, 25 bp, Homo sapien
tcgagatatcctgcaaggcacgttg

SEQ ID NO: 3218374 - DNA, 25 bp, Homo sapien
tcctgcaaggcacgttgccatttgc

SEQ ID NO: 3218375 - DNA, 25 bp, Homo sapien
gatgacttctgcagcaatactgggc

SEQ ID NO: 3218376 - DNA, 25 bp, Homo sapien
tggaatctctggaagcggtcctgca

SEQ ID NO: 3218377 - DNA, 25 bp, Homo sapien
gaatctctggaagcggtcctgcatt

SEQ ID NO: 3218378 - DNA, 25 bp, Homo sapien
atgacttctgcagcaatactgggca

SEQ ID NO: 3218379 - DNA, 25 bp, Homo sapien
cctttgtcgtttgaactacactgtg

SEQ ID NO: 3218380 - DNA, 25 bp, Homo sapien
aattcttggttaaagttgcaagcag

SEQ ID NO: 3218381 - DNA, 25 bp, Homo sapien
taaagttgcaagcagcggtgactga

SEQ ID NO: 3218382 - DNA, 25 bp, Homo sapien
tgcaagcagcggtgactgattcctt

SEQ ID NO: 3218383 - DNA, 25 bp, Homo sapien
tggttaaagttgcaagcagcggtga

SEQ ID NO: 3218384 - DNA, 25 bp, Homo sapien
tatggattaaatataaactctggac

SEQ ID NO: 3218385 - DNA, 25 bp, Homo sapien
ttatggattaaatataaactctgga

SEQ ID NO: 3218386 - DNA, 25 bp, Homo sapien
gaaatgatggcctatgtctgagtcc

SEQ ID NO: 3218387 - DNA, 25 bp, Homo sapien
cctggctccagctcttattggctat

SEQ ID NO: 3218388 - DNA, 25 bp, Homo sapien
aactgagatgtttgatgcacaagtc

SEQ ID NO: 3218389 - DNA, 25 bp, Homo sapien
cacctcaagtagtcaaatgggaaca

SEQ ID NO: 3218390 - DNA, 25 bp, Homo sapien
cacttctctgatcacgaataattat

SEQ ID NO: 3218391 - DNA, 25 bp, Homo sapien
gtacagactatagacgccaatccca

SEQ ID NO: 3218392 - DNA, 25 bp, Homo sapien
ccaagactgctgaagcaagaacact

SEQ ID NO: 3218393 - DNA, 25 bp, Homo sapien
tgtatgataccaagcccgtacagac

SEQ ID NO: 3218394 - DNA, 25 bp, Homo sapien
cagaacacagtgttacgggtcacat

SEQ ID NO: 3218395 - DNA, 25 bp, Homo sapien
tgatttaaagtagccacagtggcac

SEQ ID NO: 3218396 - DNA, 25 bp, Homo sapien
tcaaattcagccgaacagtacaagg

SEQ ID NO: 3218397 - DNA, 25 bp, Homo sapien
tgctgaattctaccacaccctgtcg

SEQ ID NO: 3218398 - DNA, 25 bp, Homo sapien
tctataatgaacacactagtatgat

SEQ ID NO: 3218399 - DNA, 25 bp, Homo sapien
gctttaaaagacaacccatccaata

SEQ ID NO: 3218400 - DNA, 25 bp, Homo sapien
ttgggttttacatactactgtggca

SEQ ID NO: 3218401 - DNA, 25 bp, Homo sapien
tttcagagtacattagtaaatgctt

SEQ ID NO: 3218402 - DNA, 25 bp, Homo sapien
tatttgcttgggttctacttgtttg

SEQ ID NO: 3218403 - DNA, 25 bp, Homo sapien
cctgaaatgcaagtctagctgtggc

SEQ ID NO: 3218404 - DNA, 25 bp, Homo sapien
gaatcaatttacatgactggcagta

SEQ ID NO: 3218405 - DNA, 25 bp, Homo sapien
ttatcattgactgattggccccgcc

SEQ ID NO: 3218406 - DNA, 25 bp, Homo sapien
tataagaccctcagcagaatcaatt

SEQ ID NO: 3218407 - DNA, 25 bp, Homo sapien
aaattgcaactggtcaatgcctggc

SEQ ID NO: 3218408 - DNA, 25 bp, Homo sapien
tctactgggccataaactctgagga

SEQ ID NO: 3218409 - DNA, 25 bp, Homo sapien
tacaagacttgtaccagaccattgc

SEQ ID NO: 3218410 - DNA, 25 bp, Homo sapien
cagtgcatggaatgtcctgcccaaa

SEQ ID NO: 3218411 - DNA, 25 bp, Homo sapien
ggtaccagacctaaaggccatcagg

SEQ ID NO: 3218412 - DNA, 25 bp, Homo sapien
attttaaatgaaagacggcgaccag

SEQ ID NO: 3218413 - DNA, 25 bp, Homo sapien
caaatattgcatagtgactggtcag

SEQ ID NO: 3218414 - DNA, 25 bp, Homo sapien
tggtccattcagtagcctggctaga

SEQ ID NO: 3218415 - DNA, 25 bp, Homo sapien
aaaaacacacgaaacctagatactg

SEQ ID NO: 3218416 - DNA, 25 bp, Homo sapien
gcatgtgtgagttgattatgtaccg

SEQ ID NO: 3218417 - DNA, 25 bp, Homo sapien
tgtctgaacacaacctcctatgata

SEQ ID NO: 3218418 - DNA, 25 bp, Homo sapien
taggctgagaactagaatgaccaca

SEQ ID NO: 3218419 - DNA, 25 bp, Homo sapien
cttcaaatgttggtcctaaatcccg

SEQ ID NO: 3218420 - DNA, 25 bp, Homo sapien
gtggcctaagcagccccacgaggag

SEQ ID NO: 3218421 - DNA, 25 bp, Homo sapien
gctggtcctcgtgtctccactcgtt

SEQ ID NO: 3218422 - DNA, 25 bp, Homo sapien
agccccacgaggagtggtgcctcat

SEQ ID NO: 3218423 - DNA, 25 bp, Homo sapien
gaaggacgagggtgaaccccgcagc

SEQ ID NO: 3218424 - DNA, 25 bp, Homo sapien
acgagggtgaaccccgcagccaccg

SEQ ID NO: 3218425 - DNA, 25 bp, Homo sapien
aggacgagggtgaaccccgcagcca

SEQ ID NO: 3218426 - DNA, 25 bp, Homo sapien
ggacgagggtgaaccccgcagccac

SEQ ID NO: 3218427 - DNA, 25 bp, Homo sapien
acttgccctcccactgctcgacggg

SEQ ID NO: 3218428 - DNA, 25 bp, Homo sapien
cggacacttgccctcccactgctcg

SEQ ID NO: 3218429 - DNA, 25 bp, Homo sapien
gaagcagcgtctcggacacttgccc

SEQ ID NO: 3218430 - DNA, 25 bp, Homo sapien
gacacttgccctcccactgctcgac

SEQ ID NO: 3218431 - DNA, 25 bp, Homo sapien
cctgggtgacggcgagggcgccttc

SEQ ID NO: 3218432 - DNA, 25 bp, Homo sapien
gcgcctgggtgacggcgagggcgcc

SEQ ID NO: 3218433 - DNA, 25 bp, Homo sapien
gcagcgcctgggtgacggcgagggc

SEQ ID NO: 3218434 - DNA, 25 bp, Homo sapien
tgggtgacggcgagggcgccttctg

SEQ ID NO: 3218435 - DNA, 25 bp, Homo sapien
gccccaaagagactggccgctgggc

SEQ ID NO: 3218436 - DNA, 25 bp, Homo sapien
aatgcagcacaggtgggaagcggcc

SEQ ID NO: 3218437 - DNA, 25 bp, Homo sapien
tcgtcggcgtaagcgtgtcaggaaa

SEQ ID NO: 3218438 - DNA, 25 bp, Homo sapien
tgcagcggtcgttggtcgtcggcgt

SEQ ID NO: 3218439 - DNA, 25 bp, Homo sapien
cgactaggagcccgctaaagctcac

SEQ ID NO: 3218440 - DNA, 25 bp, Homo sapien
ctagaactccacgcaaacgactagg

SEQ ID NO: 3218441 - DNA, 25 bp, Homo sapien
aactccacgcaaacgactaggagcc

SEQ ID NO: 3218442 - DNA, 25 bp, Homo sapien
cgctaaagctcacccagcctgaatt

SEQ ID NO: 3218443 - DNA, 25 bp, Homo sapien
gacccaagtaatccaagtaagagaa

SEQ ID NO: 3218444 - DNA, 25 bp, Homo sapien
tgctgacccaagtaatccaagtaag

SEQ ID NO: 3218445 - DNA, 25 bp, Homo sapien
cctgctgacccaagtaatccaagta

SEQ ID NO: 3218446 - DNA, 25 bp, Homo sapien
caagtaatccaagtaagagaaggag

SEQ ID NO: 3218447 - DNA, 25 bp, Homo sapien
ttcaatggcctcgacatcccacagg

SEQ ID NO: 3218448 - DNA, 25 bp, Homo sapien
caggacatcatactggcccactaca

SEQ ID NO: 3218449 - DNA, 25 bp, Homo sapien
acatcccacaggacatcatactggc

SEQ ID NO: 3218450 - DNA, 25 bp, Homo sapien
ttagtccagagagtcttcaatggcc

SEQ ID NO: 3218451 - DNA, 25 bp, Homo sapien
aatttgtcctcagatagaagacata

SEQ ID NO: 3218452 - DNA, 25 bp, Homo sapien
aaatttgtcctcagatagaagacat

SEQ ID NO: 3218453 - DNA, 25 bp, Homo sapien
caaaaatccatttaagatctgttct

SEQ ID NO: 3218454 - DNA, 25 bp, Homo sapien
gcaatatcaagtcagtgagtggagc

SEQ ID NO: 3218455 - DNA, 25 bp, Homo sapien
caagctcctattccctctcctggct

SEQ ID NO: 3218456 - DNA, 25 bp, Homo sapien
gagtggagcagatggagcaagctcc

SEQ ID NO: 3218457 - DNA, 25 bp, Homo sapien
gaactttactgcatccatttgttcc

SEQ ID NO: 3218458 - DNA, 25 bp, Homo sapien
gaataccagttcgaactttactgca

SEQ ID NO: 3218459 - DNA, 25 bp, Homo sapien
tgaataccagttcgaactttactgc

SEQ ID NO: 3218460 - DNA, 25 bp, Homo sapien
ttctgaataccagttcgaactttac

SEQ ID NO: 3218461 - DNA, 25 bp, Homo sapien
tttggtcttatcagttgcacttgga

SEQ ID NO: 3218462 - DNA, 25 bp, Homo sapien
aaaaacttcacagcctctaggtgga

SEQ ID NO: 3218463 - DNA, 25 bp, Homo sapien
gcataacctcgattttcaccactaa

SEQ ID NO: 3218464 - DNA, 25 bp, Homo sapien
gcagctctgtgagattcatattcca

SEQ ID NO: 3218465 - DNA, 25 bp, Homo sapien
tctttcaacttcaggcggacttggg

SEQ ID NO: 3218466 - DNA, 25 bp, Homo sapien
gaagtaatgtaaactgggctgccag

SEQ ID NO: 3218467 - DNA, 25 bp, Homo sapien
tgaccattgagacgagcaggaagag

SEQ ID NO: 3218468 - DNA, 25 bp, Homo sapien
tataaataatattctggtggtgccc

SEQ ID NO: 3218469 - DNA, 25 bp, Homo sapien
tcaggctttgcgtactccaccgaaa

SEQ ID NO: 3218470 - DNA, 25 bp, Homo sapien
tttgcgtactccaccgaaataggac

SEQ ID NO: 3218471 - DNA, 25 bp, Homo sapien
taggtagtcaagcaccataaggatt

SEQ ID NO: 3218472 - DNA, 25 bp, Homo sapien
tttctgtgttactgtccatagacaa

SEQ ID NO: 3218473 - DNA, 25 bp, Homo sapien
ctagtactcatgtaggtgcctgtta

SEQ ID NO: 3218474 - DNA, 25 bp, Homo sapien
gacttctagtactcatgtaggtgcc

SEQ ID NO: 3218475 - DNA, 25 bp, Homo sapien
gtactcatgtaggtgcctgttatcc

SEQ ID NO: 3218476 - DNA, 25 bp, Homo sapien
aactccatgacttctagtactcatg

SEQ ID NO: 3218477 - DNA, 25 bp, Homo sapien
tactttcataaattcgtaactacag

SEQ ID NO: 3218478 - DNA, 25 bp, Homo sapien
accttataacttctgtgccccaaat

SEQ ID NO: 3218479 - DNA, 25 bp, Homo sapien
tctgtgccccaaattatccaatact

SEQ ID NO: 3218480 - DNA, 25 bp, Homo sapien
ttcgtaactacagatttggtcaccc

SEQ ID NO: 3218481 - DNA, 25 bp, Homo sapien
aaattcttctacacaggtccaggct

SEQ ID NO: 3218482 - DNA, 25 bp, Homo sapien
gtccaggctgaagagattgtgttcc

SEQ ID NO: 3218483 - DNA, 25 bp, Homo sapien
aggctgaagagattgtgttccctgt

SEQ ID NO: 3218484 - DNA, 25 bp, Homo sapien
tccaaattcttctacacaggtccag

SEQ ID NO: 3218485 - DNA, 25 bp, Homo sapien
tgtttagccaacaggaatgagatca

SEQ ID NO: 3218486 - DNA, 25 bp, Homo sapien
aacatttggtataaactagctggcc

SEQ ID NO: 3218487 - DNA, 25 bp, Homo sapien
taaatgatgcctacaccataggtgc

SEQ ID NO: 3218488 - DNA, 25 bp, Homo sapien
aataagccaagggtgtgacaatgac

SEQ ID NO: 3218489 - DNA, 25 bp, Homo sapien
gatacatagccgctgtccaacatgg

SEQ ID NO: 3218490 - DNA, 25 bp, Homo sapien
tataaggaagcacgctgggagtccc

SEQ ID NO: 3218491 - DNA, 25 bp, Homo sapien
tgttggtgacaaaggatagcctgga

SEQ ID NO: 3218492 - DNA, 25 bp, Homo sapien
ggaggcctgattggagatacatagc

SEQ ID NO: 3218493 - DNA, 25 bp, Homo sapien
tagtttgctgtacctttatcaagag

SEQ ID NO: 3218494 - DNA, 25 bp, Homo sapien
gttattttcaaggaccacaatggta

SEQ ID NO: 3218495 - DNA, 25 bp, Homo sapien
taaatgactaggttctattgcccac

SEQ ID NO: 3218496 - DNA, 25 bp, Homo sapien
tctccagtacagatagtgatccttg

SEQ ID NO: 3218497 - DNA, 25 bp, Homo sapien
tgaggactggatattgatgcagaca

SEQ ID NO: 3218498 - DNA, 25 bp, Homo sapien
tgctctataggatttcatgcaatcc

SEQ ID NO: 3218499 - DNA, 25 bp, Homo sapien
gactggatattgatgcagacacttg

SEQ ID NO: 3218500 - DNA, 25 bp, Homo sapien
ctgaacatttgtgctctataggatt

SEQ ID NO: 3218501 - DNA, 25 bp, Homo sapien
tggcttggctacttgccaccacttt

SEQ ID NO: 3218502 - DNA, 25 bp, Homo sapien
ggcttggctacttgccaccactttt

SEQ ID NO: 3218503 - DNA, 25 bp, Homo sapien
agcttgtacatcagcgccctggcac

SEQ ID NO: 3218504 - DNA, 25 bp, Homo sapien
tttcagcttgtacatcagcgccctg

SEQ ID NO: 3218505 - DNA, 25 bp, Homo sapien
ttcatgaacttctttcccatccata

SEQ ID NO: 3218506 - DNA, 25 bp, Homo sapien
ttctctcccattcatgaacttcttt

SEQ ID NO: 3218507 - DNA, 25 bp, Homo sapien
tctctcccattcatgaacttctttc

SEQ ID NO: 3218508 - DNA, 25 bp, Homo sapien
atgaacttctttcccatccatagct

SEQ ID NO: 3218509 - DNA, 25 bp, Homo sapien
ctgtttcatgaggtcaagtcccagc

SEQ ID NO: 3218510 - DNA, 25 bp, Homo sapien
gggtcaatagagataaaagtgatca

SEQ ID NO: 3218511 - DNA, 25 bp, Homo sapien
ccataactggcaagagagggtcaat

SEQ ID NO: 3218512 - DNA, 25 bp, Homo sapien
taaatttttagttgtcctgaccata

SEQ ID NO: 3218513 - DNA, 25 bp, Homo sapien
gcattatcaagttctgcatgtccac

SEQ ID NO: 3218514 - DNA, 25 bp, Homo sapien
ttgctgtgaggtctgttactatgaa

SEQ ID NO: 3218515 - DNA, 25 bp, Homo sapien
ctgtgaggtctgttactatgaattc

SEQ ID NO: 3218516 - DNA, 25 bp, Homo sapien
tgcatgtccacacgagttgctgtga

SEQ ID NO: 3218517 - DNA, 25 bp, Homo sapien
gtccggaagttctatagctcgctca

SEQ ID NO: 3218518 - DNA, 25 bp, Homo sapien
caagataggcctgattgaccccaag

SEQ ID NO: 3218519 - DNA, 25 bp, Homo sapien
tctctttccaatagacagtaggtgt

SEQ ID NO: 3218520 - DNA, 25 bp, Homo sapien
cagtaggtgttacagtcattctttc

SEQ ID NO: 3218521 - DNA, 25 bp, Homo sapien
tatacatgggccatggtgtttcgct

SEQ ID NO: 3218522 - DNA, 25 bp, Homo sapien
tgggccatggtgtttcgctgcaccc

SEQ ID NO: 3218523 - DNA, 25 bp, Homo sapien
catgggccatggtgtttcgctgcac

SEQ ID NO: 3218524 - DNA, 25 bp, Homo sapien
ggccatggtgtttcgctgcacccat

SEQ ID NO: 3218525 - DNA, 25 bp, Homo sapien
aatagtatgggctgctagcttgcca

SEQ ID NO: 3218526 - DNA, 25 bp, Homo sapien
tgaagcaacaatctggtccaagagg

SEQ ID NO: 3218527 - DNA, 25 bp, Homo sapien
gaaatggagtccctcaatctgccct

SEQ ID NO: 3218528 - DNA, 25 bp, Homo sapien
tagcttgccaatacactcagtgagc

SEQ ID NO: 3218529 - DNA, 25 bp, Homo sapien
gcaacccatatctgatcaagtacat

SEQ ID NO: 3218530 - DNA, 25 bp, Homo sapien
cagaacaatgaaggagcctgcagaa

SEQ ID NO: 3218531 - DNA, 25 bp, Homo sapien
gtcttcggagaagtgcccattttcc

SEQ ID NO: 3218532 - DNA, 25 bp, Homo sapien
gaggtgtcagtccatctttagaggc

SEQ ID NO: 3218533 - DNA, 25 bp, Homo sapien
ccaggactagctctattaagggcca

SEQ ID NO: 3218534 - DNA, 25 bp, Homo sapien
tcagcacccgcccagtgatattatg

SEQ ID NO: 3218535 - DNA, 25 bp, Homo sapien
ttcccaaagggacggtagatcagag

SEQ ID NO: 3218536 - DNA, 25 bp, Homo sapien
tgcaaatctcgatctccaggactag

SEQ ID NO: 3218537 - DNA, 25 bp, Homo sapien
tcatcctgttgcgtgcaactagtgg

SEQ ID NO: 3218538 - DNA, 25 bp, Homo sapien
tgcgtgcaactagtggtaaaagatg

SEQ ID NO: 3218539 - DNA, 25 bp, Homo sapien
caggatgcgtaagtcagctttattt

SEQ ID NO: 3218540 - DNA, 25 bp, Homo sapien
caactagtggtaaaagatggagcct

SEQ ID NO: 3218541 - DNA, 25 bp, Homo sapien
cctctgagctcctacactcctgagt

SEQ ID NO: 3218542 - DNA, 25 bp, Homo sapien
tagtccaacttagctattgctgccg

SEQ ID NO: 3218543 - DNA, 25 bp, Homo sapien
tattgctgccgacttctgccttagg

SEQ ID NO: 3218544 - DNA, 25 bp, Homo sapien
tacactcctgagtactttctcctgg

SEQ ID NO: 3218545 - DNA, 25 bp, Homo sapien
aagaagtaacttgtgagtcaaaagc

SEQ ID NO: 3218546 - DNA, 25 bp, Homo sapien
tctcctctgttcgtgaagaagtaac

SEQ ID NO: 3218547 - DNA, 25 bp, Homo sapien
gctggcttgggtgacaagatgataa

SEQ ID NO: 3218548 - DNA, 25 bp, Homo sapien
tggcttgggtgacaagatgataacc

SEQ ID NO: 3218549 - DNA, 25 bp, Homo sapien
acagtagcacgatgggtacaaggca

SEQ ID NO: 3218550 - DNA, 25 bp, Homo sapien
gcacagtagcacgatgggtacaagg

SEQ ID NO: 3218551 - DNA, 25 bp, Homo sapien
cagtagcacgatgggtacaaggcat

SEQ ID NO: 3218552 - DNA, 25 bp, Homo sapien
cacagtagcacgatgggtacaaggc

SEQ ID NO: 3218553 - DNA, 25 bp, Homo sapien
acagacacccatttttcagaatgca

SEQ ID NO: 3218554 - DNA, 25 bp, Homo sapien
aaggtctgggttattcacggccatc

SEQ ID NO: 3218555 - DNA, 25 bp, Homo sapien
tcttgactagaatttctgtggccct

SEQ ID NO: 3218556 - DNA, 25 bp, Homo sapien
taccatttctattccgaaacgcagg

SEQ ID NO: 3218557 - DNA, 25 bp, Homo sapien
tcctggtagtacttgctctgaaggg

SEQ ID NO: 3218558 - DNA, 25 bp, Homo sapien
cctggtagtacttgctctgaagggc

SEQ ID NO: 3218559 - DNA, 25 bp, Homo sapien
ccctgagcaggcgagtactgtccag

SEQ ID NO: 3218560 - DNA, 25 bp, Homo sapien
ttaaggagcactccccttgggattc

SEQ ID NO: 3218561 - DNA, 25 bp, Homo sapien
tggtagaaggagtgccagctcagtc

SEQ ID NO: 3218562 - DNA, 25 bp, Homo sapien
ttgagaagtgcaggaagtgccccgc

SEQ ID NO: 3218563 - DNA, 25 bp, Homo sapien
tagtggagtaatacatagcatgggc

SEQ ID NO: 3218564 - DNA, 25 bp, Homo sapien
aagcaagaatggatgtctgacactg

SEQ ID NO: 3218565 - DNA, 25 bp, Homo sapien
tccaccgggacccacggaagcaaga

SEQ ID NO: 3218566 - DNA, 25 bp, Homo sapien
gtctgacactgtggctttcctttcc

SEQ ID NO: 3218567 - DNA, 25 bp, Homo sapien
tttgatcaggcctattggacagggc

SEQ ID NO: 3218568 - DNA, 25 bp, Homo sapien
agcatcataaactcatcaggattag

SEQ ID NO: 3218569 - DNA, 25 bp, Homo sapien
tgcacgatgcctccgcctttgatca

SEQ ID NO: 3218570 - DNA, 25 bp, Homo sapien
tcaggattagatctccaggactgca

SEQ ID NO: 3218571 - DNA, 25 bp, Homo sapien
taaacatctcagatctacacctttc

SEQ ID NO: 3218572 - DNA, 25 bp, Homo sapien
gggctgatcaccagggaggggcttc

SEQ ID NO: 3218573 - DNA, 25 bp, Homo sapien
acacctttcttcaagactcattcct

SEQ ID NO: 3218574 - DNA, 25 bp, Homo sapien
tttctaaacatctcagatctacacc

SEQ ID NO: 3218575 - DNA, 25 bp, Homo sapien
ctcctgtacatgactttcaaactgg

SEQ ID NO: 3218576 - DNA, 25 bp, Homo sapien
gaagtaggagcgtctcctgtacatg

SEQ ID NO: 3218577 - DNA, 25 bp, Homo sapien
gagcgtctcctgtacatgactttca

SEQ ID NO: 3218578 - DNA, 25 bp, Homo sapien
cagatgaagtaggagcgtctcctgt

SEQ ID NO: 3218579 - DNA, 25 bp, Homo sapien
aaagaagtccacaacgtgacagtcc

SEQ ID NO: 3218580 - DNA, 25 bp, Homo sapien
cagaagcttcttgcccaaaggacaa

SEQ ID NO: 3218581 - DNA, 25 bp, Homo sapien
gaagtccacaacgtgacagtcctga

SEQ ID NO: 3218582 - DNA, 25 bp, Homo sapien
tccacaacgtgacagtcctgatggc

SEQ ID NO: 3218583 - DNA, 25 bp, Homo sapien
tacatctggtactgcagattccact

SEQ ID NO: 3218584 - DNA, 25 bp, Homo sapien
cgtagctcattgacattacatctgg

SEQ ID NO: 3218585 - DNA, 25 bp, Homo sapien
tgcctgtgaacgtagctcattgaca

SEQ ID NO: 3218586 - DNA, 25 bp, Homo sapien
ggctctcctgcctgtgaacgtagct

SEQ ID NO: 3218587 - DNA, 25 bp, Homo sapien
taggaaagggtgaaggtactgctga

SEQ ID NO: 3218588 - DNA, 25 bp, Homo sapien
ctaggaaagggtgaaggtactgctg

SEQ ID NO: 3218589 - DNA, 25 bp, Homo sapien
aggaaagggtgaaggtactgctgac

SEQ ID NO: 3218590 - DNA, 25 bp, Homo sapien
aggaagcttctgaccaaacttccgc

SEQ ID NO: 3218591 - DNA, 25 bp, Homo sapien
caggagaagtacttccctggggctt

SEQ ID NO: 3218592 - DNA, 25 bp, Homo sapien
acttccgcctccaggagaagtactt

SEQ ID NO: 3218593 - DNA, 25 bp, Homo sapien
gaagcttctgaccaaacttccgcct

SEQ ID NO: 3218594 - DNA, 25 bp, Homo sapien
agaaggggttagcctcctgcatgaa

SEQ ID NO: 3218595 - DNA, 25 bp, Homo sapien
gagaaggggttagcctcctgcatga

SEQ ID NO: 3218596 - DNA, 25 bp, Homo sapien
accctgtagtgctcctccggcctca

SEQ ID NO: 3218597 - DNA, 25 bp, Homo sapien
caccctgtagtgctcctccggcctc

SEQ ID NO: 3218598 - DNA, 25 bp, Homo sapien
ccaccctgtagtgctcctccggcct

SEQ ID NO: 3218599 - DNA, 25 bp, Homo sapien
ggatatttcagggaccctgcaaata

SEQ ID NO: 3218600 - DNA, 25 bp, Homo sapien
aggaggtgggttctgcagaaccagc

SEQ ID NO: 3218601 - DNA, 25 bp, Homo sapien
gccaattccacatgacaggaggagg

SEQ ID NO: 3218602 - DNA, 25 bp, Homo sapien
gaaggaagaggccaattccacatga

SEQ ID NO: 3218603 - DNA, 25 bp, Homo sapien
tgggcctgccaagacctaaaatctt

SEQ ID NO: 3218604 - DNA, 25 bp, Homo sapien
aagaggaacaatattgggcctgcca

SEQ ID NO: 3218605 - DNA, 25 bp, Homo sapien
ggttgtgtgtgaaccagctaaatag

SEQ ID NO: 3218606 - DNA, 25 bp, Homo sapien
tctcctgcactacaaggtagctgct

SEQ ID NO: 3218607 - DNA, 25 bp, Homo sapien
ccactttctccactaaaatgctcat

SEQ ID NO: 3218608 - DNA, 25 bp, Homo sapien
catttctcccactttctccactaaa

SEQ ID NO: 3218609 - DNA, 25 bp, Homo sapien
ttctcccactttctccactaaaatg

SEQ ID NO: 3218610 - DNA, 25 bp, Homo sapien
ctccccattgtcagccatttctccc

SEQ ID NO: 3218611 - DNA, 25 bp, Homo sapien
ttttacagatgctgacggctctaac

SEQ ID NO: 3218612 - DNA, 25 bp, Homo sapien
ggttgtagctaatgtactcattctg

SEQ ID NO: 3218613 - DNA, 25 bp, Homo sapien
cgatataggtatggaggttgtagct

SEQ ID NO: 3218614 - DNA, 25 bp, Homo sapien
cattctgagatactgaattgtgtat

SEQ ID NO: 3218615 - DNA, 25 bp, Homo sapien
tgagacctccactcctgacacagtg

SEQ ID NO: 3218616 - DNA, 25 bp, Homo sapien
ggattctgttcttctgagacctcca

SEQ ID NO: 3218617 - DNA, 25 bp, Homo sapien
cctggattctgttcttctgagacct

SEQ ID NO: 3218618 - DNA, 25 bp, Homo sapien
ccattctgtgcctggattctgttct

SEQ ID NO: 3218619 - DNA, 25 bp, Homo sapien
gcagtagcacacgtggcttcatttc

SEQ ID NO: 3218620 - DNA, 25 bp, Homo sapien
tcttggcagtagcacacgtggcttc

SEQ ID NO: 3218621 - DNA, 25 bp, Homo sapien
ctccttatgactcttggcagtagca

SEQ ID NO: 3218622 - DNA, 25 bp, Homo sapien
tggcagtagcacacgtggcttcatt

SEQ ID NO: 3218623 - DNA, 25 bp, Homo sapien
acagcgcaattcttcagggcgaagc

SEQ ID NO: 3218624 - DNA, 25 bp, Homo sapien
caaaagttgtaactcttttcaggat

SEQ ID NO: 3218625 - DNA, 25 bp, Homo sapien
tcctgcagaacagcgcaattcttca

SEQ ID NO: 3218626 - DNA, 25 bp, Homo sapien
tcaggataatggcatcttcctgcag

SEQ ID NO: 3218627 - DNA, 25 bp, Homo sapien
ttgttcccactatattttcctcatg

SEQ ID NO: 3218628 - DNA, 25 bp, Homo sapien
actcaggaccccaattatctatgcc

SEQ ID NO: 3218629 - DNA, 25 bp, Homo sapien
tcctcatgggacatgagactccaca

SEQ ID NO: 3218630 - DNA, 25 bp, Homo sapien
ggaataaacaatcccaaccatgagt

SEQ ID NO: 3218631 - DNA, 25 bp, Homo sapien
gagtttgtcataaccaatccttgct

SEQ ID NO: 3218632 - DNA, 25 bp, Homo sapien
gaattcccaagatgcttgttgttgg

SEQ ID NO: 3218633 - DNA, 25 bp, Homo sapien
ccctctgagtattcccaatgccttt

SEQ ID NO: 3218634 - DNA, 25 bp, Homo sapien
gttgggagcagagtttgtcataacc

SEQ ID NO: 3218635 - DNA, 25 bp, Homo sapien
tattggaagtacatacatggacagt

SEQ ID NO: 3218636 - DNA, 25 bp, Homo sapien
gaaatctgtatcaaccccagcactt

SEQ ID NO: 3218637 - DNA, 25 bp, Homo sapien
catggacagttggtaagtataaggc

SEQ ID NO: 3218638 - DNA, 25 bp, Homo sapien
ggtcccaaccctggtcatacaaatg

SEQ ID NO: 3218639 - DNA, 25 bp, Homo sapien
cggtccctgagagattattgagtaa

SEQ ID NO: 3218640 - DNA, 25 bp, Homo sapien
gtccctgagagattattgagtaact

SEQ ID NO: 3218641 - DNA, 25 bp, Homo sapien
ccctgagagattattgagtaacttg

SEQ ID NO: 3218642 - DNA, 25 bp, Homo sapien
agcggtccctgagagattattgagt

SEQ ID NO: 3218643 - DNA, 25 bp, Homo sapien
tgatcagcaatttccctaacaggtg

SEQ ID NO: 3218644 - DNA, 25 bp, Homo sapien
gcgcagtgcgctggtgctcctctag

SEQ ID NO: 3218645 - DNA, 25 bp, Homo sapien
ccctgtgctccaaacgagaaggtaa

SEQ ID NO: 3218646 - DNA, 25 bp, Homo sapien
taaagcgagttcagatcctgctgcc

SEQ ID NO: 3218647 - DNA, 25 bp, Homo sapien
ttgcaccgagaacaaatcctccgca

SEQ ID NO: 3218648 - DNA, 25 bp, Homo sapien
aaaagcgccagcaggattgcaccga

SEQ ID NO: 3218649 - DNA, 25 bp, Homo sapien
cagcaggattgcaccgagaacaaat

SEQ ID NO: 3218650 - DNA, 25 bp, Homo sapien
gattgcaccgagaacaaatcctccg

SEQ ID NO: 3218651 - DNA, 25 bp, Homo sapien
gcggacagacccagctgcggctgag

SEQ ID NO: 3218652 - DNA, 25 bp, Homo sapien
ctcctggacttgaggccgacttcac

SEQ ID NO: 3218653 - DNA, 25 bp, Homo sapien
ttgaggccgacttcaccaaatccgc

SEQ ID NO: 3218654 - DNA, 25 bp, Homo sapien
gcccggcgaagacagacctcctgga

SEQ ID NO: 3218655 - DNA, 25 bp, Homo sapien
gggcagccggagcagtcagagcggc

SEQ ID NO: 3218656 - DNA, 25 bp, Homo sapien
gagaagttttggtggcgagggagca

SEQ ID NO: 3218657 - DNA, 25 bp, Homo sapien
gaggctgcgggcgatggtcctgcag

SEQ ID NO: 3218658 - DNA, 25 bp, Homo sapien
cagtgtccagggtctctcagccgcc

SEQ ID NO: 3218659 - DNA, 25 bp, Homo sapien
tggacctcgcgtttttgcggagacg

SEQ ID NO: 3218660 - DNA, 25 bp, Homo sapien
caagatgtgtgcagtccgtctgtcc

SEQ ID NO: 3218661 - DNA, 25 bp, Homo sapien
tttttgcggagacgcggaaacaaga

SEQ ID NO: 3218662 - DNA, 25 bp, Homo sapien
attagccagccgacctggagagggc

SEQ ID NO: 3218663 - DNA, 25 bp, Homo sapien
agccctgcatttgcctacactaatt

SEQ ID NO: 3218664 - DNA, 25 bp, Homo sapien
aaaagccctgcatttgcctacacta

SEQ ID NO: 3218665 - DNA, 25 bp, Homo sapien
cctgcatttgcctacactaattagt

SEQ ID NO: 3218666 - DNA, 25 bp, Homo sapien
aaagccctgcatttgcctacactaa

SEQ ID NO: 3218667 - DNA, 25 bp, Homo sapien
tactctctaaaattgtgcatagcaa

SEQ ID NO: 3218668 - DNA, 25 bp, Homo sapien
ccaatggaacgaggaaaacacaaag

SEQ ID NO: 3218669 - DNA, 25 bp, Homo sapien
gaaatttcacaaatggactggttta

SEQ ID NO: 3218670 - DNA, 25 bp, Homo sapien
tctgaaatatatgctatgacggtaa

SEQ ID NO: 3218671 - DNA, 25 bp, Homo sapien
tgcaaccagcacaagagtctacaac

SEQ ID NO: 3218672 - DNA, 25 bp, Homo sapien
ctgcaaccagcacaagagtctacaa

SEQ ID NO: 3218673 - DNA, 25 bp, Homo sapien
acctctaggagttgtttgtggcccg

SEQ ID NO: 3218674 - DNA, 25 bp, Homo sapien
tacaggccacaatctcaaagtccgg

SEQ ID NO: 3218675 - DNA, 25 bp, Homo sapien
ctgtcaatgtcaacggcaagctgga

SEQ ID NO: 3218676 - DNA, 25 bp, Homo sapien
gaatgtcacggacacctcagagtga

SEQ ID NO: 3218677 - DNA, 25 bp, Homo sapien
catgagagctatgtacctgtgcaaa

SEQ ID NO: 3218678 - DNA, 25 bp, Homo sapien
tgtgagccgccatcaaccagattca

SEQ ID NO: 3218679 - DNA, 25 bp, Homo sapien
cactgagtgttgaggagttccccta

SEQ ID NO: 3218680 - DNA, 25 bp, Homo sapien
tcaaaatgcgatgaaggagagcctg

SEQ ID NO: 3218681 - DNA, 25 bp, Homo sapien
cttttctagctatctgaatcatgac

SEQ ID NO: 3218682 - DNA, 25 bp, Homo sapien
ctatctgaatcatgactgcctcctc

SEQ ID NO: 3218683 - DNA, 25 bp, Homo sapien
tctagctatctgaatcatgactgcc

SEQ ID NO: 3218684 - DNA, 25 bp, Homo sapien
gcaatggcttttctagctatctgaa

SEQ ID NO: 3218685 - DNA, 25 bp, Homo sapien
tccacccacagcccagtggtagtta

SEQ ID NO: 3218686 - DNA, 25 bp, Homo sapien
actccacccacagcccagtggtagt

SEQ ID NO: 3218687 - DNA, 25 bp, Homo sapien
cacccacagcccagtggtagttact

SEQ ID NO: 3218688 - DNA, 25 bp, Homo sapien
acccacagcccagtggtagttactc

SEQ ID NO: 3218689 - DNA, 25 bp, Homo sapien
ggctttgcttcacgttctggaagag

SEQ ID NO: 3218690 - DNA, 25 bp, Homo sapien
tgcttcacgttctggaagagctatc

SEQ ID NO: 3218691 - DNA, 25 bp, Homo sapien
gcttcacgttctggaagagctatca

SEQ ID NO: 3218692 - DNA, 25 bp, Homo sapien
tttgcttcacgttctggaagagcta

SEQ ID NO: 3218693 - DNA, 25 bp, Homo sapien
tccttctgctctcaaataagaatgt

SEQ ID NO: 3218694 - DNA, 25 bp, Homo sapien
gcataagtaatgagacagcaagcaa

SEQ ID NO: 3218695 - DNA, 25 bp, Homo sapien
ttttggcataagtaatgagacagca

SEQ ID NO: 3218696 - DNA, 25 bp, Homo sapien
cataagtaatgagacagcaagcaaa

SEQ ID NO: 3218697 - DNA, 25 bp, Homo sapien
tggcataagtaatgagacagcaagc

SEQ ID NO: 3218698 - DNA, 25 bp, Homo sapien
agttctctagaccaggaataatcat

SEQ ID NO: 3218699 - DNA, 25 bp, Homo sapien
tagttctctagaccaggaataatca

SEQ ID NO: 3218700 - DNA, 25 bp, Homo sapien
tctgcaagcatatatcgcaacctga

SEQ ID NO: 3218701 - DNA, 25 bp, Homo sapien
aagcatatatcgcaacctgataggg

SEQ ID NO: 3218702 - DNA, 25 bp, Homo sapien
aacctgataggggagctcagtattc

SEQ ID NO: 3218703 - DNA, 25 bp, Homo sapien
ctgccgttatctgcaagcatatatc

SEQ ID NO: 3218704 - DNA, 25 bp, Homo sapien
gtgtcccccgggaccaagctagatc

SEQ ID NO: 3218705 - DNA, 25 bp, Homo sapien
tttgtccatgtgtcccccgggacca

SEQ ID NO: 3218706 - DNA, 25 bp, Homo sapien
gaccaagctagatctgataaatcat

SEQ ID NO: 3218707 - DNA, 25 bp, Homo sapien
gaatgggcaggaggtttttgtccat

SEQ ID NO: 3218708 - DNA, 25 bp, Homo sapien
tcttcaaccacactcatccctgttc

SEQ ID NO: 3218709 - DNA, 25 bp, Homo sapien
agctctaagtatgcagctgtcagca

SEQ ID NO: 3218710 - DNA, 25 bp, Homo sapien
aaaaagctctaagtatgcagctgtc

SEQ ID NO: 3218711 - DNA, 25 bp, Homo sapien
tcacaagtgtttgacagcaagtgaa

SEQ ID NO: 3218712 - DNA, 25 bp, Homo sapien
aattccttaaggaaactcagtagag

SEQ ID NO: 3218713 - DNA, 25 bp, Homo sapien
tatcagataggcagcagaaacttga

SEQ ID NO: 3218714 - DNA, 25 bp, Homo sapien
gagaactttcaaaggagtccttcat

SEQ ID NO: 3218715 - DNA, 25 bp, Homo sapien
ggcagcagaaacttgaactgggacc

SEQ ID NO: 3218716 - DNA, 25 bp, Homo sapien
gattccacagcttgcaattgatgcc

SEQ ID NO: 3218717 - DNA, 25 bp, Homo sapien
cagccaaagttgtcttgattccaca

SEQ ID NO: 3218718 - DNA, 25 bp, Homo sapien
tattgcctttgaggactgcactctc

SEQ ID NO: 3218719 - DNA, 25 bp, Homo sapien
aatagattaaatgtcaggccctctc

SEQ ID NO: 3218720 - DNA, 25 bp, Homo sapien
tttactgtagcatactgaggcttag

SEQ ID NO: 3218721 - DNA, 25 bp, Homo sapien
ttttactgtagcatactgaggctta

SEQ ID NO: 3218722 - DNA, 25 bp, Homo sapien
ttactgtagcatactgaggcttagt

SEQ ID NO: 3218723 - DNA, 25 bp, Homo sapien
gatctagaagcagcacacattcatg

SEQ ID NO: 3218724 - DNA, 25 bp, Homo sapien
gaaggttttcacctgccagatctag

SEQ ID NO: 3218725 - DNA, 25 bp, Homo sapien
tattgcatgcagtaaagtctaggct

SEQ ID NO: 3218726 - DNA, 25 bp, Homo sapien
aatgactcccaacattgagctggca

SEQ ID NO: 3218727 - DNA, 25 bp, Homo sapien
tcttttgtttggtctgactggacca

SEQ ID NO: 3218728 - DNA, 25 bp, Homo sapien
gaaggacttaaacctggactgaata

SEQ ID NO: 3218729 - DNA, 25 bp, Homo sapien
cagttgccaggagaatgtcagatgc

SEQ ID NO: 3218730 - DNA, 25 bp, Homo sapien
gactggaccaacttgctcatctcag

SEQ ID NO: 3218731 - DNA, 25 bp, Homo sapien
catgtattgttatccaaagatgatc

SEQ ID NO: 3218732 - DNA, 25 bp, Homo sapien
gtacgtctgactgaatctgcctcct

SEQ ID NO: 3218733 - DNA, 25 bp, Homo sapien
cctgagttgagatcaaacgggattc

SEQ ID NO: 3218734 - DNA, 25 bp, Homo sapien
tgcctccttctgaaatctctatgct

SEQ ID NO: 3218735 - DNA, 25 bp, Homo sapien
gtaatacgctcagttatttcttatc

SEQ ID NO: 3218736 - DNA, 25 bp, Homo sapien
aactcttgatctgtatcctttccca

SEQ ID NO: 3218737 - DNA, 25 bp, Homo sapien
gcttgtaatacgctcagttatttct

SEQ ID NO: 3218738 - DNA, 25 bp, Homo sapien
ctgaactcttgatctgtatcctttc

SEQ ID NO: 3218739 - DNA, 25 bp, Homo sapien
ctttgctctccaggatcgtcctagg

SEQ ID NO: 3218740 - DNA, 25 bp, Homo sapien
gattagggattctttgtgctccaga

SEQ ID NO: 3218741 - DNA, 25 bp, Homo sapien
tctttcttaatgtcagtgattaggg

SEQ ID NO: 3218742 - DNA, 25 bp, Homo sapien
ctccaggatcgtcctaggaatattt

SEQ ID NO: 3218743 - DNA, 25 bp, Homo sapien
gaccatgtgactactgcagttgaga

SEQ ID NO: 3218744 - DNA, 25 bp, Homo sapien
ccataattccttgaaatcagatgaa

SEQ ID NO: 3218745 - DNA, 25 bp, Homo sapien
gttgagaaatccaaggaaagtcaag

SEQ ID NO: 3218746 - DNA, 25 bp, Homo sapien
ttcattttcagcagaccatgtgact

SEQ ID NO: 3218747 - DNA, 25 bp, Homo sapien
tacttattggctgatctgatggtcc

SEQ ID NO: 3218748 - DNA, 25 bp, Homo sapien
tacttgagctgcatagactggagaa

SEQ ID NO: 3218749 - DNA, 25 bp, Homo sapien
caagtggatatcatggctggacaca

SEQ ID NO: 3218750 - DNA, 25 bp, Homo sapien
gaggtctcccttatgccacaaatag

SEQ ID NO: 3218751 - DNA, 25 bp, Homo sapien
tacagcaatttgactgcatggtgcc

SEQ ID NO: 3218752 - DNA, 25 bp, Homo sapien
caaaagggtatgtcgtgagagttcc

SEQ ID NO: 3218753 - DNA, 25 bp, Homo sapien
cctataagctgatactgtctgtgaa

SEQ ID NO: 3218754 - DNA, 25 bp, Homo sapien
gcaaagtatgtgtgttttccaggtg

SEQ ID NO: 3218755 - DNA, 25 bp, Homo sapien
tgtgacaatgacagagctccacagt

SEQ ID NO: 3218756 - DNA, 25 bp, Homo sapien
tctgcgaggtgaactgtgacaatga

SEQ ID NO: 3218757 - DNA, 25 bp, Homo sapien
tgcgaggtgaactgtgacaatgaca

SEQ ID NO: 3218758 - DNA, 25 bp, Homo sapien
cttctgcgaggtgaactgtgacaat

SEQ ID NO: 3218759 - DNA, 25 bp, Homo sapien
acattgggcagtgaagatgtcatcc

SEQ ID NO: 3218760 - DNA, 25 bp, Homo sapien
tctggggcttcgagtcctccccatg

SEQ ID NO: 3218761 - DNA, 25 bp, Homo sapien
aaatccaaggcttatgctcctggga

SEQ ID NO: 3218762 - DNA, 25 bp, Homo sapien
gcaaaaatccaaggcttatgctcct

SEQ ID NO: 3218763 - DNA, 25 bp, Homo sapien
tcctcttcaatatcatctcttcctg

SEQ ID NO: 3218764 - DNA, 25 bp, Homo sapien
gccacctgcctgccgccttcctctt

SEQ ID NO: 3218765 - DNA, 25 bp, Homo sapien
cctgcctgccgccttcctcttcaat

SEQ ID NO: 3218766 - DNA, 25 bp, Homo sapien
tgggccacctgcctgccgccttcct

SEQ ID NO: 3218767 - DNA, 25 bp, Homo sapien
cttctgagccatttgtcttcctcca

SEQ ID NO: 3218768 - DNA, 25 bp, Homo sapien
ctgagccatttgtcttcctccactt

SEQ ID NO: 3218769 - DNA, 25 bp, Homo sapien
catttgtcttcctccactttcaaaa

SEQ ID NO: 3218770 - DNA, 25 bp, Homo sapien
tgtcttcctccactttcaaaaccca

SEQ ID NO: 3218771 - DNA, 25 bp, Homo sapien
caattaaatcggtcaagaaatgcac

SEQ ID NO: 3218772 - DNA, 25 bp, Homo sapien
tggatttcaccttcaattaaatcgg

SEQ ID NO: 3218773 - DNA, 25 bp, Homo sapien
cggtcaagaaatgcacgaagttgcc

SEQ ID NO: 3218774 - DNA, 25 bp, Homo sapien
tctattagagcctgaagccgtgcag

SEQ ID NO: 3218775 - DNA, 25 bp, Homo sapien
cttgtgacctgcttgtaaccagcac

SEQ ID NO: 3218776 - DNA, 25 bp, Homo sapien
tcttctagaatcttatccttgaatt

SEQ ID NO: 3218777 - DNA, 25 bp, Homo sapien
atcttctagaatcttatccttgaat

SEQ ID NO: 3218778 - DNA, 25 bp, Homo sapien
ggcttgtgacctgcttgtaaccagc

SEQ ID NO: 3218779 - DNA, 25 bp, Homo sapien
tgtctcttccagctaaaaaatcaga

SEQ ID NO: 3218780 - DNA, 25 bp, Homo sapien
ccttgatgtgtccagattttagtca

SEQ ID NO: 3218781 - DNA, 25 bp, Homo sapien
cttatattaccatgtcaattttgag

SEQ ID NO: 3218782 - DNA, 25 bp, Homo sapien
ttgtaagcttacatagttatagcat

SEQ ID NO: 3218783 - DNA, 25 bp, Homo sapien
ttaattgtaggtcataacaccctct

SEQ ID NO: 3218784 - DNA, 25 bp, Homo sapien
ccaatcgtatttgtacatggctgtc

SEQ ID NO: 3218785 - DNA, 25 bp, Homo sapien
tgtcgaccctaagcattaaaatgta

SEQ ID NO: 3218786 - DNA, 25 bp, Homo sapien
accaaggaggaacgaatgctgcgca

SEQ ID NO: 3218787 - DNA, 25 bp, Homo sapien
tgtcttactagtcttctcaagactg

SEQ ID NO: 3218788 - DNA, 25 bp, Homo sapien
tattgttttgtcagtgtccattggt

SEQ ID NO: 3218789 - DNA, 25 bp, Homo sapien
aaggaagggtgagtgccttgtcaca

SEQ ID NO: 3218790 - DNA, 25 bp, Homo sapien
tacttccaggttgacagctgcttta

SEQ ID NO: 3218791 - DNA, 25 bp, Homo sapien
taatcatgactaacgacatgaaaaa

SEQ ID NO: 3218792 - DNA, 25 bp, Homo sapien
actataatcatgactaacgacatga

SEQ ID NO: 3218793 - DNA, 25 bp, Homo sapien
ggactataatcatgactaacgacat

SEQ ID NO: 3218794 - DNA, 25 bp, Homo sapien
tgaaaaatcattgtagtatttcaac

SEQ ID NO: 3218795 - DNA, 25 bp, Homo sapien
tctcactagcaatggagcttaatct

SEQ ID NO: 3218796 - DNA, 25 bp, Homo sapien
tcactagcaatggagcttaatcttg

SEQ ID NO: 3218797 - DNA, 25 bp, Homo sapien
ttctcactagcaatggagcttaatc

SEQ ID NO: 3218798 - DNA, 25 bp, Homo sapien
ctcactagcaatggagcttaatctt

SEQ ID NO: 3218799 - DNA, 25 bp, Homo sapien
taacagttggcagcatattcgccgg

SEQ ID NO: 3218800 - DNA, 25 bp, Homo sapien
ggcctcatcattgaaactgcaaaca

SEQ ID NO: 3218801 - DNA, 25 bp, Homo sapien
ggacaaccttgcttcatgactctgg

SEQ ID NO: 3218802 - DNA, 25 bp, Homo sapien
gacagctgtccgtgatacccatatt

SEQ ID NO: 3218803 - DNA, 25 bp, Homo sapien
aagccagtcagataaccccacgact

SEQ ID NO: 3218804 - DNA, 25 bp, Homo sapien
tcaagccagtcagataaccccacga

SEQ ID NO: 3218805 - DNA, 25 bp, Homo sapien
tggtttcaagccagtcagataaccc

SEQ ID NO: 3218806 - DNA, 25 bp, Homo sapien
tttcaagccagtcagataaccccac

SEQ ID NO: 3218807 - DNA, 25 bp, Homo sapien
gatgatctcccgcaatattctgagc

SEQ ID NO: 3218808 - DNA, 25 bp, Homo sapien
tgtggtaacatcagatgatctcccg

SEQ ID NO: 3218809 - DNA, 25 bp, Homo sapien
agctgattagctaccctgcactgtg

SEQ ID NO: 3218810 - DNA, 25 bp, Homo sapien
ctcccgcaatattctgagccctagg

SEQ ID NO: 3218811 - DNA, 25 bp, Homo sapien
ttcacctccgctgccataataattg

SEQ ID NO: 3218812 - DNA, 25 bp, Homo sapien
cctccgctgccataataattgccat

SEQ ID NO: 3218813 - DNA, 25 bp, Homo sapien
tcacctccgctgccataataattgc

SEQ ID NO: 3218814 - DNA, 25 bp, Homo sapien
acctccgctgccataataattgcca

SEQ ID NO: 3218815 - DNA, 25 bp, Homo sapien
cagtaggaacagacatagacacact

SEQ ID NO: 3218816 - DNA, 25 bp, Homo sapien
tatttacagtaggaacagacataga

SEQ ID NO: 3218817 - DNA, 25 bp, Homo sapien
tttacagtaggaacagacatagaca

SEQ ID NO: 3218818 - DNA, 25 bp, Homo sapien
tacagtaggaacagacatagacaca

SEQ ID NO: 3218819 - DNA, 25 bp, Homo sapien
tatggtaacaccgatcatgataggg

SEQ ID NO: 3218820 - DNA, 25 bp, Homo sapien
cgacatggcattcccctgaataaat

SEQ ID NO: 3218821 - DNA, 25 bp, Homo sapien
ttcaatagtagaagccagtgctgga

SEQ ID NO: 3218822 - DNA, 25 bp, Homo sapien
gactattggttgactcgacatggca

SEQ ID NO: 3218823 - DNA, 25 bp, Homo sapien
tttacagtctaatgcttattcagcc

SEQ ID NO: 3218824 - DNA, 25 bp, Homo sapien
ctaaaaagaggccttgacctctgtc

SEQ ID NO: 3218825 - DNA, 25 bp, Homo sapien
cagtctaatgcttattcagccactt

SEQ ID NO: 3218826 - DNA, 25 bp, Homo sapien
tacagtctaatgcttattcagccac

SEQ ID NO: 3218827 - DNA, 25 bp, Homo sapien
ctttgaattttcagttcaacatgag

SEQ ID NO: 3218828 - DNA, 25 bp, Homo sapien
tcagttcaacatgagaaatcacctc

SEQ ID NO: 3218829 - DNA, 25 bp, Homo sapien
ttttcagttcaacatgagaaatcac

SEQ ID NO: 3218830 - DNA, 25 bp, Homo sapien
gaattttcagttcaacatgagaaat

SEQ ID NO: 3218831 - DNA, 25 bp, Homo sapien
gttaacagctaaacaccctaatcaa

SEQ ID NO: 3218832 - DNA, 25 bp, Homo sapien
cacgaataaaatttagttaacagct

SEQ ID NO: 3218833 - DNA, 25 bp, Homo sapien
cagctaaacaccctaatcaactggc

SEQ ID NO: 3218834 - DNA, 25 bp, Homo sapien
aacaccctaatcaactggcttcaat

SEQ ID NO: 3218835 - DNA, 25 bp, Homo sapien
aaacactgcaagactctatactgca

SEQ ID NO: 3218836 - DNA, 25 bp, Homo sapien
aacactgcaagactctatactgcat

SEQ ID NO: 3218837 - DNA, 25 bp, Homo sapien
taaacactgcaagactctatactgc

SEQ ID NO: 3218838 - DNA, 25 bp, Homo sapien
catactagcccttaccccaatctta

SEQ ID NO: 3218839 - DNA, 25 bp, Homo sapien
aatgctaggctcacactgatttctc

SEQ ID NO: 3218840 - DNA, 25 bp, Homo sapien
aacatactagcccttaccccaatct

SEQ ID NO: 3218841 - DNA, 25 bp, Homo sapien
acaatgctaggctcacactgatttc

SEQ ID NO: 3218842 - DNA, 25 bp, Homo sapien
tctgtgctacctatcacaccacgtc

SEQ ID NO: 3218843 - DNA, 25 bp, Homo sapien
ctgtgctacctatcacaccacgtcc

SEQ ID NO: 3218844 - DNA, 25 bp, Homo sapien
attctctgtgctacctatcacacca

SEQ ID NO: 3218845 - DNA, 25 bp, Homo sapien
tctctgtgctacctatcacaccacg

SEQ ID NO: 3218846 - DNA, 25 bp, Homo sapien
ctagcagaaggagagtcagagttag

SEQ ID NO: 3218847 - DNA, 25 bp, Homo sapien
agaaggagagtcagagttagtctca

SEQ ID NO: 3218848 - DNA, 25 bp, Homo sapien
agcagaaggagagtcagagttagtc

SEQ ID NO: 3218849 - DNA, 25 bp, Homo sapien
aaggagagtcagagttagtctcagc

SEQ ID NO: 3218850 - DNA, 25 bp, Homo sapien
tcagttctactgataagcagctcat

SEQ ID NO: 3218851 - DNA, 25 bp, Homo sapien
tatcagttctactgataagcagctc

SEQ ID NO: 3218852 - DNA, 25 bp, Homo sapien
gctatcagttctactgataagcagc

SEQ ID NO: 3218853 - DNA, 25 bp, Homo sapien
cagttctactgataagcagctcatt

SEQ ID NO: 3218854 - DNA, 25 bp, Homo sapien
gctgtctactctatgatcagaatga

SEQ ID NO: 3218855 - DNA, 25 bp, Homo sapien
gtctactctatgatcagaatgagca

SEQ ID NO: 3218856 - DNA, 25 bp, Homo sapien
ccaggctgtctactctatgatcaga

SEQ ID NO: 3218857 - DNA, 25 bp, Homo sapien
aaatatgcactgatcagtgcattac

SEQ ID NO: 3218858 - DNA, 25 bp, Homo sapien
tctaaaggagcttgttctataatca

SEQ ID NO: 3218859 - DNA, 25 bp, Homo sapien
cagagtaccacaagcaacagcttaa

SEQ ID NO: 3218860 - DNA, 25 bp, Homo sapien
tataatcaataaaccctggtgctcc

SEQ ID NO: 3218861 - DNA, 25 bp, Homo sapien
gctttatatccctctaaaggagctt

SEQ ID NO: 3218862 - DNA, 25 bp, Homo sapien
ctaccctcaataaaactaagctcca

SEQ ID NO: 3218863 - DNA, 25 bp, Homo sapien
taactcgagctaatagaacttggcg

SEQ ID NO: 3218864 - DNA, 25 bp, Homo sapien
gtgccagccactgcggccataagat

SEQ ID NO: 3218865 - DNA, 25 bp, Homo sapien
tagggttggttaattttgtgccagc

SEQ ID NO: 3218866 - DNA, 25 bp, Homo sapien
ttttcttcaatatcatcaacgtcca

SEQ ID NO: 3218867 - DNA, 25 bp, Homo sapien
gttttcttcaatatcatcaacgtcc

SEQ ID NO: 3218868 - DNA, 25 bp, Homo sapien
cgttttcttcaatatcatcaacgtc

SEQ ID NO: 3218869 - DNA, 25 bp, Homo sapien
tttcttcaatatcatcaacgtccat

SEQ ID NO: 3218870 - DNA, 25 bp, Homo sapien
tcacttggtacaggtgagagtgaag

SEQ ID NO: 3218871 - DNA, 25 bp, Homo sapien
tcctgaagcctctctttttcacttg

SEQ ID NO: 3218872 - DNA, 25 bp, Homo sapien
gtgagagtgaagctctccaccatct

SEQ ID NO: 3218873 - DNA, 25 bp, Homo sapien
taaggaatgttcctgaagcctctct

SEQ ID NO: 3218874 - DNA, 25 bp, Homo sapien
tttccaatagatcttgatatctcta

SEQ ID NO: 3218875 - DNA, 25 bp, Homo sapien
attttggtcaccagaatcttgattg

SEQ ID NO: 3218876 - DNA, 25 bp, Homo sapien
gatatctctatgtaaccatagaaaa

SEQ ID NO: 3218877 - DNA, 25 bp, Homo sapien
ttgtccattttggtcaccagaatct

SEQ ID NO: 3218878 - DNA, 25 bp, Homo sapien
gcttgagtcacgattttctctactc

SEQ ID NO: 3218879 - DNA, 25 bp, Homo sapien
gggatgtttccctctgcttgagtca

SEQ ID NO: 3218880 - DNA, 25 bp, Homo sapien
acctgggatgtttccctctgcttga

SEQ ID NO: 3218881 - DNA, 25 bp, Homo sapien
tccctctgcttgagtcacgattttc

SEQ ID NO: 3218882 - DNA, 25 bp, Homo sapien
cctactgaaaagaccattcctgtga

SEQ ID NO: 3218883 - DNA, 25 bp, Homo sapien
tcatccgtggcaactccattaaaag

SEQ ID NO: 3218884 - DNA, 25 bp, Homo sapien
tatctcacttggcaagtcacagtgc

SEQ ID NO: 3218885 - DNA, 25 bp, Homo sapien
tatgtctcggacttcagaaatcctc

SEQ ID NO: 3218886 - DNA, 25 bp, Homo sapien
taaaaatgatcctgagtgggccggg

SEQ ID NO: 3218887 - DNA, 25 bp, Homo sapien
tgccaagtcatcacaaattatcacc

SEQ ID NO: 3218888 - DNA, 25 bp, Homo sapien
tcagtgttcatgaaagctcaggtcc

SEQ ID NO: 3218889 - DNA, 25 bp, Homo sapien
ccttttcgcatgtgagccttataga

SEQ ID NO: 3218890 - DNA, 25 bp, Homo sapien
tcttaccacaataaagctcagattt

SEQ ID NO: 3218891 - DNA, 25 bp, Homo sapien
cagatttgattttatggaaatgtca

SEQ ID NO: 3218892 - DNA, 25 bp, Homo sapien
aagctcagatttgattttatggaaa

SEQ ID NO: 3218893 - DNA, 25 bp, Homo sapien
cttaccacaataaagctcagatttg

SEQ ID NO: 3218894 - DNA, 25 bp, Homo sapien
cagaggaaagaggacatcctgacag

SEQ ID NO: 3218895 - DNA, 25 bp, Homo sapien
ggacatcctgacagttcatctgacc

SEQ ID NO: 3218896 - DNA, 25 bp, Homo sapien
tctgacccgtgaatactgagaatat

SEQ ID NO: 3218897 - DNA, 25 bp, Homo sapien
gacagttcatctgacccgtgaatac

SEQ ID NO: 3218898 - DNA, 25 bp, Homo sapien
gacattgttgtgtgctgtactattt

SEQ ID NO: 3218899 - DNA, 25 bp, Homo sapien
cattgttgtgtgctgtactatttat

SEQ ID NO: 3218900 - DNA, 25 bp, Homo sapien
ttgacattgttgtgtgctgtactat

SEQ ID NO: 3218901 - DNA, 25 bp, Homo sapien
aattgacattgttgtgtgctgtact

SEQ ID NO: 3218902 - DNA, 25 bp, Homo sapien
aaaataagagctgaatcatgaggag

SEQ ID NO: 3218903 - DNA, 25 bp, Homo sapien
ccactcctagctttgttaacatctg

SEQ ID NO: 3218904 - DNA, 25 bp, Homo sapien
agaaaataagagctgaatcatgagg

SEQ ID NO: 3218905 - DNA, 25 bp, Homo sapien
aataagagctgaatcatgaggagtg

SEQ ID NO: 3218906 - DNA, 25 bp, Homo sapien
tgcctcactcttcgccttacttctg

SEQ ID NO: 3218907 - DNA, 25 bp, Homo sapien
ctcactcttcgccttacttctggcc

SEQ ID NO: 3218908 - DNA, 25 bp, Homo sapien
tgctgcctcactcttcgccttactt

SEQ ID NO: 3218909 - DNA, 25 bp, Homo sapien
gctgcctcactcttcgccttacttc

SEQ ID NO: 3218910 - DNA, 25 bp, Homo sapien
tcatttcttcttgatcaccaaagtt

SEQ ID NO: 3218911 - DNA, 25 bp, Homo sapien
taagcaggtttaaagtctgcccaag

SEQ ID NO: 3218912 - DNA, 25 bp, Homo sapien
tcagatgtgcttgaagtcagtttgt

SEQ ID NO: 3218913 - DNA, 25 bp, Homo sapien
caatggccatgttaatcagatgtgc

SEQ ID NO: 3218914 - DNA, 25 bp, Homo sapien
catctgggtgagctttatttgatca

SEQ ID NO: 3218915 - DNA, 25 bp, Homo sapien
ataggcttgagccaccgtgcacggc

SEQ ID NO: 3218916 - DNA, 25 bp, Homo sapien
ggctgctcgctgctctagcgcagga

SEQ ID NO: 3218917 - DNA, 25 bp, Homo sapien
ccacaggtgtcctccgcctgggtct

SEQ ID NO: 3218918 - DNA, 25 bp, Homo sapien
ccactaggctcagactagggcaggg

SEQ ID NO: 3218919 - DNA, 25 bp, Homo sapien
gctgctctagcgcaggaaaagtgta

SEQ ID NO: 3218920 - DNA, 25 bp, Homo sapien
gttcaacaggctaggcgggacgcgg

SEQ ID NO: 3218921 - DNA, 25 bp, Homo sapien
tctccgcaccgaaagactgaaaaag

SEQ ID NO: 3218922 - DNA, 25 bp, Homo sapien
acgcggcgtgcctcggaaactgtat

SEQ ID NO: 3218923 - DNA, 25 bp, Homo sapien
gattttttcagacctctgcccgcct

SEQ ID NO: 3218924 - DNA, 25 bp, Homo sapien
gggcactcgcggcagcggcacttac

SEQ ID NO: 3218925 - DNA, 25 bp, Homo sapien
ccgcgcgagtgcaccctgggcactc

SEQ ID NO: 3218926 - DNA, 25 bp, Homo sapien
gtccccgcgcgagtgcaccctgggc

SEQ ID NO: 3218927 - DNA, 25 bp, Homo sapien
accctgggcactcgcggcagcggca

SEQ ID NO: 3218928 - DNA, 25 bp, Homo sapien
gggctgtgcttccggatctctagca

SEQ ID NO: 3218929 - DNA, 25 bp, Homo sapien
tccagggcgcgcctcgcaaatccgc

SEQ ID NO: 3218930 - DNA, 25 bp, Homo sapien
gtggcttcgcacacctcggggctgt

SEQ ID NO: 3218931 - DNA, 25 bp, Homo sapien
ctgtgcttccggatctctagcagct

SEQ ID NO: 3218932 - DNA, 25 bp, Homo sapien
acccgcgtggggatgcagcgaccac

SEQ ID NO: 3218933 - DNA, 25 bp, Homo sapien
ggaccgcctgtctgaagaaccccga

SEQ ID NO: 3218934 - DNA, 25 bp, Homo sapien
gcgtggggatgcagcgaccacttac

SEQ ID NO: 3218935 - DNA, 25 bp, Homo sapien
tgtctgaagaaccccgacccgcgtg

SEQ ID NO: 3218936 - DNA, 25 bp, Homo sapien
ccggccccgcgagctcagcagccgg

SEQ ID NO: 3218937 - DNA, 25 bp, Homo sapien
gcagccggccgggtgaagttgccct

SEQ ID NO: 3218938 - DNA, 25 bp, Homo sapien
aagttgccctgaagcccgccaccgc

SEQ ID NO: 3218939 - DNA, 25 bp, Homo sapien
cgctgcacgcggctgatgggctctg

SEQ ID NO: 3218940 - DNA, 25 bp, Homo sapien
cggagaccgcggtggccccctgctc

SEQ ID NO: 3218941 - DNA, 25 bp, Homo sapien
tcaggcagctcaggcgacagggtgc

SEQ ID NO: 3218942 - DNA, 25 bp, Homo sapien
gtcaggcagctcaggcgacagggtg

SEQ ID NO: 3218943 - DNA, 25 bp, Homo sapien
ggccccctgctcacgctttctccaa

SEQ ID NO: 3218944 - DNA, 25 bp, Homo sapien
gacgcacgaaatccatagcctgaaa

SEQ ID NO: 3218945 - DNA, 25 bp, Homo sapien
caaaatgaaagaataaccatgtgaa

SEQ ID NO: 3218946 - DNA, 25 bp, Homo sapien
tcacatgaccacattgcaacgcagc

SEQ ID NO: 3218947 - DNA, 25 bp, Homo sapien
tgtaaactgtttatcgagtgcaaaa

SEQ ID NO: 3218948 - DNA, 25 bp, Homo sapien
tagggtacctgaaatgatcactctt

SEQ ID NO: 3218949 - DNA, 25 bp, Homo sapien
ggttacatcgtcgttgctatcataa

SEQ ID NO: 3218950 - DNA, 25 bp, Homo sapien
caaagacagttctagtaagtggtag

SEQ ID NO: 3218951 - DNA, 25 bp, Homo sapien
tatcaagtgcttctatgcttaccca

SEQ ID NO: 3218952 - DNA, 25 bp, Homo sapien
cctgaatatctagaagcaagacctt

SEQ ID NO: 3218953 - DNA, 25 bp, Homo sapien
tataccaagcataagtactttatat

SEQ ID NO: 3218954 - DNA, 25 bp, Homo sapien
tacactatgagacactataccaagc

SEQ ID NO: 3218955 - DNA, 25 bp, Homo sapien
cattctccgaatgacagaaaacgat

SEQ ID NO: 3218956 - DNA, 25 bp, Homo sapien
gcaacttcttagtgaatctgacaga

SEQ ID NO: 3218957 - DNA, 25 bp, Homo sapien
aaaagtcattctcagtaacagcttc

SEQ ID NO: 3218958 - DNA, 25 bp, Homo sapien
gggtgcagatcgtgttattttaaac

SEQ ID NO: 3218959 - DNA, 25 bp, Homo sapien
ttccatttccccttacttgtagaga

SEQ ID NO: 3218960 - DNA, 25 bp, Homo sapien
gtttaatggccagaaagcataccag

SEQ ID NO: 3218961 - DNA, 25 bp, Homo sapien
caaactatatgacggaagagcacac

SEQ ID NO: 3218962 - DNA, 25 bp, Homo sapien
ccaacattggataccgtgaaggaga

SEQ ID NO: 3218963 - DNA, 25 bp, Homo sapien
tacaagcaattctgaagaggccaca

SEQ ID NO: 3218964 - DNA, 25 bp, Homo sapien
tgttgacagagtccaaccattgcct

SEQ ID NO: 3218965 - DNA, 25 bp, Homo sapien
caaaatgtgaagtgctgttatctac

SEQ ID NO: 3218966 - DNA, 25 bp, Homo sapien
taattgcaggtactattccaaagag

SEQ ID NO: 3218967 - DNA, 25 bp, Homo sapien
ttagagagctggacattaattgcag

SEQ ID NO: 3218968 - DNA, 25 bp, Homo sapien
tgggccccacaaagattgaacaagg

SEQ ID NO: 3218969 - DNA, 25 bp, Homo sapien
gtttgccacatttaaatcctacagg

SEQ ID NO: 3218970 - DNA, 25 bp, Homo sapien
gcttatgagccattgagcacttgta

SEQ ID NO: 3218971 - DNA, 25 bp, Homo sapien
gaaatggtacctctctccacaagta

SEQ ID NO: 3218972 - DNA, 25 bp, Homo sapien
taggaaatagcgaggcagagacagc

SEQ ID NO: 3218973 - DNA, 25 bp, Homo sapien
gagttttaacacacgctctgcagca

SEQ ID NO: 3218974 - DNA, 25 bp, Homo sapien
caaagtaaggcattgcaggagcaga

SEQ ID NO: 3218975 - DNA, 25 bp, Homo sapien
tggtaaacatgtccctgaaaacgtg

SEQ ID NO: 3218976 - DNA, 25 bp, Homo sapien
acttgccttacgaaagctgtgatgc

SEQ ID NO: 3218977 - DNA, 25 bp, Homo sapien
tcacaaatgctactcggtggtagtg

SEQ ID NO: 3218978 - DNA, 25 bp, Homo sapien
gaaaagcactgctacccagtatggg

SEQ ID NO: 3218979 - DNA, 25 bp, Homo sapien
tataaagtgcctggtcttgcctagc

SEQ ID NO: 3218980 - DNA, 25 bp, Homo sapien
aattctcccacaattcacaacccat

SEQ ID NO: 3218981 - DNA, 25 bp, Homo sapien
ttgtaaattctcccacaattcacaa

SEQ ID NO: 3218982 - DNA, 25 bp, Homo sapien
taaattctcccacaattcacaaccc

SEQ ID NO: 3218983 - DNA, 25 bp, Homo sapien
tgtaaattctcccacaattcacaac

SEQ ID NO: 3218984 - DNA, 25 bp, Homo sapien
tccagcatatttcccccagtacttt

SEQ ID NO: 3218985 - DNA, 25 bp, Homo sapien
ccagcatatttcccccagtactttt

SEQ ID NO: 3218986 - DNA, 25 bp, Homo sapien
ggtgagtcaaagactaccccacttc

SEQ ID NO: 3218987 - DNA, 25 bp, Homo sapien
caaatctagactgcggtgagtcaaa

SEQ ID NO: 3218988 - DNA, 25 bp, Homo sapien
aacaaatctagactgcggtgagtca

SEQ ID NO: 3218989 - DNA, 25 bp, Homo sapien
tagactgcggtgagtcaaagactac

SEQ ID NO: 3218990 - DNA, 25 bp, Homo sapien
ctatcaattcaaggacactggtaac

SEQ ID NO: 3218991 - DNA, 25 bp, Homo sapien
tctcctcctgatgagctgtagttct

SEQ ID NO: 3218992 - DNA, 25 bp, Homo sapien
atctcctcctgatgagctgtagttc

SEQ ID NO: 3218993 - DNA, 25 bp, Homo sapien
atcttgagatccttgagcttcgtgc

SEQ ID NO: 3218994 - DNA, 25 bp, Homo sapien
gatccttgagcttcgtgcagaacat

SEQ ID NO: 3218995 - DNA, 25 bp, Homo sapien
ctggtgccagtaaggagaaaggaca

SEQ ID NO: 3218996 - DNA, 25 bp, Homo sapien
ggagaaaggacactctcctgtgatc

SEQ ID NO: 3218997 - DNA, 25 bp, Homo sapien
cagatgggcacggttgctttgcagc

SEQ ID NO: 3218998 - DNA, 25 bp, Homo sapien
tctgaagactcgttaggaacttgac

SEQ ID NO: 3218999 - DNA, 25 bp, Homo sapien
aatactctctgccaaagtgtgaaga

SEQ ID NO: 3219000 - DNA, 25 bp, Homo sapien
gatagactcggctccgactggtttt

SEQ ID NO: 3219001 - DNA, 25 bp, Homo sapien
tatcctttatcctagccaatgctgg

SEQ ID NO: 3219002 - DNA, 25 bp, Homo sapien
tcctgggagtgaaacaagattatct

SEQ ID NO: 3219003 - DNA, 25 bp, Homo sapien
gagcaccgattgtttcccagactgt

SEQ ID NO: 3219004 - DNA, 25 bp, Homo sapien
taaaactatgaagactgacagaggg

SEQ ID NO: 3219005 - DNA, 25 bp, Homo sapien
ctagctgagccaattggtgaatgtc

SEQ ID NO: 3219006 - DNA, 25 bp, Homo sapien
ttcaggatcaggagaaggcacacca

SEQ ID NO: 3219007 - DNA, 25 bp, Homo sapien
cagcctgtatggctcttcaggatca

SEQ ID NO: 3219008 - DNA, 25 bp, Homo sapien
gaggctctcaaaatctctagctgag

SEQ ID NO: 3219009 - DNA, 25 bp, Homo sapien
cagattctgagtcgggcttggtgag

SEQ ID NO: 3219010 - DNA, 25 bp, Homo sapien
ggcagattctgagtcgggcttggtg

SEQ ID NO: 3219011 - DNA, 25 bp, Homo sapien
gggcagattctgagtcgggcttggt

SEQ ID NO: 3219012 - DNA, 25 bp, Homo sapien
gcagattctgagtcgggcttggtga

SEQ ID NO: 3219013 - DNA, 25 bp, Homo sapien
tatctgccacaggatgaaagaaaag

SEQ ID NO: 3219014 - DNA, 25 bp, Homo sapien
atgaaagaaaagctggtggaagacg

SEQ ID NO: 3219015 - DNA, 25 bp, Homo sapien
aaagaaaagctggtggaagacgcac

SEQ ID NO: 3219016 - DNA, 25 bp, Homo sapien
ctatctgccacaggatgaaagaaaa

SEQ ID NO: 3219017 - DNA, 25 bp, Homo sapien
ctgaagtgcaacattcagccgttca

SEQ ID NO: 3219018 - DNA, 25 bp, Homo sapien
tgaagtgcaacattcagccgttcaa

SEQ ID NO: 3219019 - DNA, 25 bp, Homo sapien
ggagactctgtactcaggagaacct

SEQ ID NO: 3219020 - DNA, 25 bp, Homo sapien
tccactgtaggtcaaggagactctg

SEQ ID NO: 3219021 - DNA, 25 bp, Homo sapien
cctggctagcaacctcaaatgtgaa

SEQ ID NO: 3219022 - DNA, 25 bp, Homo sapien
tacaggtatggagtacaatgctctc

SEQ ID NO: 3219023 - DNA, 25 bp, Homo sapien
ctgctgcaactgcttgctctgcaat

SEQ ID NO: 3219024 - DNA, 25 bp, Homo sapien
gcaactgcttgctctgcaattgttt

SEQ ID NO: 3219025 - DNA, 25 bp, Homo sapien
gctgcaactgcttgctctgcaattg

SEQ ID NO: 3219026 - DNA, 25 bp, Homo sapien
tgcaactgcttgctctgcaattgtt

SEQ ID NO: 3219027 - DNA, 25 bp, Homo sapien
ccggttgagtataatacacaacttt

SEQ ID NO: 3219028 - DNA, 25 bp, Homo sapien
gaatgaccggttgagtataatacac

SEQ ID NO: 3219029 - DNA, 25 bp, Homo sapien
tgaccggttgagtataatacacaac

SEQ ID NO: 3219030 - DNA, 25 bp, Homo sapien
aaagaatgaccggttgagtataata

SEQ ID NO: 3219031 - DNA, 25 bp, Homo sapien
tgtttcagaagggtactgaagctgt

SEQ ID NO: 3219032 - DNA, 25 bp, Homo sapien
taaaaacctcttcaccaagagattc

SEQ ID NO: 3219033 - DNA, 25 bp, Homo sapien
tgttttcatcttcctcgtaacatat

SEQ ID NO: 3219034 - DNA, 25 bp, Homo sapien
catcttcctcgtaacatattttaaa

SEQ ID NO: 3219035 - DNA, 25 bp, Homo sapien
ctgcccctttttcctgcttcttggc

SEQ ID NO: 3219036 - DNA, 25 bp, Homo sapien
cctttttcctgcttcttggcaatgg

SEQ ID NO: 3219037 - DNA, 25 bp, Homo sapien
tttcctgcttcttggcaatggctgc

SEQ ID NO: 3219038 - DNA, 25 bp, Homo sapien
ttttcctgcttcttggcaatggctg

SEQ ID NO: 3219039 - DNA, 25 bp, Homo sapien
gcagggaggcattaacgacacttcc

SEQ ID NO: 3219040 - DNA, 25 bp, Homo sapien
tcatataatacgtgagcagctgcct

SEQ ID NO: 3219041 - DNA, 25 bp, Homo sapien
tgaacggagtacaacaagtagggct

SEQ ID NO: 3219042 - DNA, 25 bp, Homo sapien
gtcatgatcccgctaaacgtctggt

SEQ ID NO: 3219043 - DNA, 25 bp, Homo sapien
cagtttattacagctttacaattct

SEQ ID NO: 3219044 - DNA, 25 bp, Homo sapien
gaagtgatgcatatatttttaccct

SEQ ID NO: 3219045 - DNA, 25 bp, Homo sapien
ttcaagatagtattatgttttcctt

SEQ ID NO: 3219046 - DNA, 25 bp, Homo sapien
aaatagctttcatattcaagatagt

SEQ ID NO: 3219047 - DNA, 25 bp, Homo sapien
ccacattcggtaacaattaatcaaa

SEQ ID NO: 3219048 - DNA, 25 bp, Homo sapien
gggaacaaatggtgcttctgttaaa

SEQ ID NO: 3219049 - DNA, 25 bp, Homo sapien
gttgcctcctacaagaaacaagtga

SEQ ID NO: 3219050 - DNA, 25 bp, Homo sapien
gctctctaccatgagatgacagaat

SEQ ID NO: 3219051 - DNA, 25 bp, Homo sapien
tccacactgctggtcgaagcgagtg

SEQ ID NO: 3219052 - DNA, 25 bp, Homo sapien
caacctcacagggaaatatggagca

SEQ ID NO: 3219053 - DNA, 25 bp, Homo sapien
gaacccaacgatgtctgagaagagc

SEQ ID NO: 3219054 - DNA, 25 bp, Homo sapien
ggtagagccctcgtcctgtaaaatc

SEQ ID NO: 3219055 - DNA, 25 bp, Homo sapien
gcttgttccccagtgagtttgctgg

SEQ ID NO: 3219056 - DNA, 25 bp, Homo sapien
attcaggtcctaggcacagtgcttg

SEQ ID NO: 3219057 - DNA, 25 bp, Homo sapien
caggtcctaggcacagtgcttgttc

SEQ ID NO: 3219058 - DNA, 25 bp, Homo sapien
ttgttccccagtgagtttgctggta

SEQ ID NO: 3219059 - DNA, 25 bp, Homo sapien
cccaggactgggcttgcaagaccct

SEQ ID NO: 3219060 - DNA, 25 bp, Homo sapien
gctcccaggactgggcttgcaagac

SEQ ID NO: 3219061 - DNA, 25 bp, Homo sapien
ctcccaggactgggcttgcaagacc

SEQ ID NO: 3219062 - DNA, 25 bp, Homo sapien
ccaggactgggcttgcaagacccta

SEQ ID NO: 3219063 - DNA, 25 bp, Homo sapien
agtgtggcagtcctcccagaacaat

SEQ ID NO: 3219064 - DNA, 25 bp, Homo sapien
tgtggcagtcctcccagaacaatta

SEQ ID NO: 3219065 - DNA, 25 bp, Homo sapien
cagtcctcccagaacaattatctct

SEQ ID NO: 3219066 - DNA, 25 bp, Homo sapien
tccattctttgagcaccctatcctc

SEQ ID NO: 3219067 - DNA, 25 bp, Homo sapien
catatgtgaactttcctcacaggga

SEQ ID NO: 3219068 - DNA, 25 bp, Homo sapien
tgcatactgcatcccttcgtcacgt

SEQ ID NO: 3219069 - DNA, 25 bp, Homo sapien
tgcgcacccatgctggcaaatgctg

SEQ ID NO: 3219070 - DNA, 25 bp, Homo sapien
cgtcacgtcatatggaaatctggca

SEQ ID NO: 3219071 - DNA, 25 bp, Homo sapien
tattgttgtcgttacaggcaatttt

SEQ ID NO: 3219072 - DNA, 25 bp, Homo sapien
atcattattgttgtcgttacaggca

SEQ ID NO: 3219073 - DNA, 25 bp, Homo sapien
ttattgttgtcgttacaggcaattt

SEQ ID NO: 3219074 - DNA, 25 bp, Homo sapien
cattattgttgtcgttacaggcaat

SEQ ID NO: 3219075 - DNA, 25 bp, Homo sapien
tcactctctttgtgtaatcccccag

SEQ ID NO: 3219076 - DNA, 25 bp, Homo sapien
cacaataggcatcgccaatggtctc

SEQ ID NO: 3219077 - DNA, 25 bp, Homo sapien
gctacacaataggcatcgccaatgg

SEQ ID NO: 3219078 - DNA, 25 bp, Homo sapien
actctctttgtgtaatcccccagct

SEQ ID NO: 3219079 - DNA, 25 bp, Homo sapien
gccatcagcgctatctgaacagcat

SEQ ID NO: 3219080 - DNA, 25 bp, Homo sapien
ctccatggggagacataacttcatc

SEQ ID NO: 3219081 - DNA, 25 bp, Homo sapien
gggagacataacttcatcagagagc

SEQ ID NO: 3219082 - DNA, 25 bp, Homo sapien
cagcgctatctgaacagcatgagta

SEQ ID NO: 3219083 - DNA, 25 bp, Homo sapien
agccattttactttgacaatagaaa

SEQ ID NO: 3219084 - DNA, 25 bp, Homo sapien
gctttggtaggatagttttggaatc

SEQ ID NO: 3219085 - DNA, 25 bp, Homo sapien
gtagatgtggttttgaagaggcagc

SEQ ID NO: 3219086 - DNA, 25 bp, Homo sapien
tgcaggattgccatcttgctgatta

SEQ ID NO: 3219087 - DNA, 25 bp, Homo sapien
aaatatattctgctcgtaaaaaccg

SEQ ID NO: 3219088 - DNA, 25 bp, Homo sapien
tctgctcgtaaaaaccgaaacgatg

SEQ ID NO: 3219089 - DNA, 25 bp, Homo sapien
caaggcaagtgtccctcctagtcct

SEQ ID NO: 3219090 - DNA, 25 bp, Homo sapien
ccgaaacgatgcagacaaggcaagt

SEQ ID NO: 3219091 - DNA, 25 bp, Homo sapien
gagtccaatgacgatgacaatgtct

SEQ ID NO: 3219092 - DNA, 25 bp, Homo sapien
tccatactgatgaaagatcagattt

SEQ ID NO: 3219093 - DNA, 25 bp, Homo sapien
ggaaggtacttgagtccaatgacga

SEQ ID NO: 3219094 - DNA, 25 bp, Homo sapien
aagcagaaagtggaaggtacttgag

SEQ ID NO: 3219095 - DNA, 25 bp, Homo sapien
caagggggatatgagctgtttatgt

SEQ ID NO: 3219096 - DNA, 25 bp, Homo sapien
catttaggtttattacacaaaccat

SEQ ID NO: 3219097 - DNA, 25 bp, Homo sapien
cacctctcattcaagtgagatagac

SEQ ID NO: 3219098 - DNA, 25 bp, Homo sapien
tctcattcaagtgagatagacataa

SEQ ID NO: 3219099 - DNA, 25 bp, Homo sapien
tcaaatttgttagccagagtgacat

SEQ ID NO: 3219100 - DNA, 25 bp, Homo sapien
cattgatttttcgtggtacactgca

SEQ ID NO: 3219101 - DNA, 25 bp, Homo sapien
gggcattttaactccaacgacgcca

SEQ ID NO: 3219102 - DNA, 25 bp, Homo sapien
gatccagagtgcagtccaattcgca

SEQ ID NO: 3219103 - DNA, 25 bp, Homo sapien
gagggagcttctaaaactcttggat

SEQ ID NO: 3219104 - DNA, 25 bp, Homo sapien
agggagggagcttctaaaactcttg

SEQ ID NO: 3219105 - DNA, 25 bp, Homo sapien
tggctgttgtccttgattgcaggga

SEQ ID NO: 3219106 - DNA, 25 bp, Homo sapien
ctgtatgatagggaatttgactggc

SEQ ID NO: 3219107 - DNA, 25 bp, Homo sapien
tctttgaaaagtgctcgatgaccag

SEQ ID NO: 3219108 - DNA, 25 bp, Homo sapien
cgtggctcctctgaccgtgttaaca

SEQ ID NO: 3219109 - DNA, 25 bp, Homo sapien
tgttaacacttgctgccagtccata

SEQ ID NO: 3219110 - DNA, 25 bp, Homo sapien
tatactacatgttgtcaaggcgaca

SEQ ID NO: 3219111 - DNA, 25 bp, Homo sapien
gcagccgcttcttgtactatagttt

SEQ ID NO: 3219112 - DNA, 25 bp, Homo sapien
ccttaggcaaggcataaatatctca

SEQ ID NO: 3219113 - DNA, 25 bp, Homo sapien
gtatcatcaataaagctctccaaag

SEQ ID NO: 3219114 - DNA, 25 bp, Homo sapien
taagttttcccagcatatggaagaa

SEQ ID NO: 3219115 - DNA, 25 bp, Homo sapien
tgggcataaaacgtaatcatgggca

SEQ ID NO: 3219116 - DNA, 25 bp, Homo sapien
ctgagttgaaagaggtaagatgtcc

SEQ ID NO: 3219117 - DNA, 25 bp, Homo sapien
tatatttacccaaacagaccatggt

SEQ ID NO: 3219118 - DNA, 25 bp, Homo sapien
gcttccctagctttccatcaaatga

SEQ ID NO: 3219119 - DNA, 25 bp, Homo sapien
gaaaatattaaaatataatactgac

SEQ ID NO: 3219120 - DNA, 25 bp, Homo sapien
ctgaaaatattaaaatataatactg

SEQ ID NO: 3219121 - DNA, 25 bp, Homo sapien
cacgaaaccaggacagtctttgagt

SEQ ID NO: 3219122 - DNA, 25 bp, Homo sapien
gatttcactagggaagtttggtgga

SEQ ID NO: 3219123 - DNA, 25 bp, Homo sapien
ccttgttggtaagcatccagaaaat

SEQ ID NO: 3219124 - DNA, 25 bp, Homo sapien
ggtggaagttcctcccttgatcgag

SEQ ID NO: 3219125 - DNA, 25 bp, Homo sapien
ctattcctgatgctttgcctaaaaa

SEQ ID NO: 3219126 - DNA, 25 bp, Homo sapien
tattcctgatgctttgcctaaaaaa

SEQ ID NO: 3219127 - DNA, 25 bp, Homo sapien
tctattcctgatgctttgcctaaaa

SEQ ID NO: 3219128 - DNA, 25 bp, Homo sapien
gaagatgtctgctgaagtgggtcca

SEQ ID NO: 3219129 - DNA, 25 bp, Homo sapien
caatgtcctttatggtgggtcccct

SEQ ID NO: 3219130 - DNA, 25 bp, Homo sapien
catattgttccaagtgtgcctgcac

SEQ ID NO: 3219131 - DNA, 25 bp, Homo sapien
ttccaccaggatatgagattgcagg

SEQ ID NO: 3219132 - DNA, 25 bp, Homo sapien
tagtacccttggaatactagaggcc

SEQ ID NO: 3219133 - DNA, 25 bp, Homo sapien
caccatgggctagcctgggtactaa

SEQ ID NO: 3219134 - DNA, 25 bp, Homo sapien
cccataataagagttcggttccaga

SEQ ID NO: 3219135 - DNA, 25 bp, Homo sapien
caaagtcagtcctgtaagatacggg

SEQ ID NO: 3219136 - DNA, 25 bp, Homo sapien
gctgaaatgtttgatcaagactaca

SEQ ID NO: 3219137 - DNA, 25 bp, Homo sapien
tgcaggaatcgtacaaaaaactccc

SEQ ID NO: 3219138 - DNA, 25 bp, Homo sapien
ttcaccaagattatatacattcccc

SEQ ID NO: 3219139 - DNA, 25 bp, Homo sapien
tgtaagcaaattgaggtctgctgaa

SEQ ID NO: 3219140 - DNA, 25 bp, Homo sapien
attttttatttagatataatgccac

SEQ ID NO: 3219141 - DNA, 25 bp, Homo sapien
tttttatttagatataatgccacgt

SEQ ID NO: 3219142 - DNA, 25 bp, Homo sapien
taattttttatttagatataatgcc

SEQ ID NO: 3219143 - DNA, 25 bp, Homo sapien
ttttatttagatataatgccacgtt

SEQ ID NO: 3219144 - DNA, 25 bp, Homo sapien
ctttgaagatccacaaattattctg

SEQ ID NO: 3219145 - DNA, 25 bp, Homo sapien
tctgaaaagtttctcgctaatcgct

SEQ ID NO: 3219146 - DNA, 25 bp, Homo sapien
gaatttcgtatggactctgtcatgg

SEQ ID NO: 3219147 - DNA, 25 bp, Homo sapien
tatttaatgggcctttgtaggctgg

SEQ ID NO: 3219148 - DNA, 25 bp, Homo sapien
tgtactcgacacaaaaaacaacagg

SEQ ID NO: 3219149 - DNA, 25 bp, Homo sapien
cagaatgtactatgcaccctcaaga

SEQ ID NO: 3219150 - DNA, 25 bp, Homo sapien
tgatgaactctaagaccaaaagact

SEQ ID NO: 3219151 - DNA, 25 bp, Homo sapien
cctttcttgatagattgggccatat

SEQ ID NO: 3219152 - DNA, 25 bp, Homo sapien
tccagctgggtaatctcagaggact

SEQ ID NO: 3219153 - DNA, 25 bp, Homo sapien
ccttggcgtggctggaaatatcagg

SEQ ID NO: 3219154 - DNA, 25 bp, Homo sapien
caatgccagacatcccagctttatg

SEQ ID NO: 3219155 - DNA, 25 bp, Homo sapien
gactaattagccttgagagtgacat

SEQ ID NO: 3219156 - DNA, 25 bp, Homo sapien
ctcatatatgctgtgttctccatcc

SEQ ID NO: 3219157 - DNA, 25 bp, Homo sapien
aggagacggtaagtccctcctcaca

SEQ ID NO: 3219158 - DNA, 25 bp, Homo sapien
ctcccacctctcatatatgctgtgt

SEQ ID NO: 3219159 - DNA, 25 bp, Homo sapien
acaggaatcgcaaggcgtctctgcc

SEQ ID NO: 3219160 - DNA, 25 bp, Homo sapien
cttaataagttaagcagtcactgct

SEQ ID NO: 3219161 - DNA, 25 bp, Homo sapien
tactagctgacgtgctaagaacaga

SEQ ID NO: 3219162 - DNA, 25 bp, Homo sapien
gattaattggctccgttactgtaag

SEQ ID NO: 3219163 - DNA, 25 bp, Homo sapien
tttaacaagagaactgcactttgct

SEQ ID NO: 3219164 - DNA, 25 bp, Homo sapien
caggtgtggctgtaataagcaaagc

SEQ ID NO: 3219165 - DNA, 25 bp, Homo sapien
ggtaatgggatagctttggatgaaa

SEQ ID NO: 3219166 - DNA, 25 bp, Homo sapien
aaagctgcttcaagggaagtacaga

SEQ ID NO: 3219167 - DNA, 25 bp, Homo sapien
tatgtgggctagtcaaaacagatgc

SEQ ID NO: 3219168 - DNA, 25 bp, Homo sapien
gacaggcagccacaaccttatctaa

SEQ ID NO: 3219169 - DNA, 25 bp, Homo sapien
gagcagatacttcaagatttgggca

SEQ ID NO: 3219170 - DNA, 25 bp, Homo sapien
cctcaatacagatggatttggcagc

SEQ ID NO: 3219171 - DNA, 25 bp, Homo sapien
tggcagcatttcagatggaacaaac

SEQ ID NO: 3219172 - DNA, 25 bp, Homo sapien
gatgctgcacatccctgtatcactg

SEQ ID NO: 3219173 - DNA, 25 bp, Homo sapien
gttccaggtgtataatacttaacac

SEQ ID NO: 3219174 - DNA, 25 bp, Homo sapien
gttataagatacaacttattcaggg

SEQ ID NO: 3219175 - DNA, 25 bp, Homo sapien
ttattcagggaagacggcagctcac

SEQ ID NO: 3219176 - DNA, 25 bp, Homo sapien
tgctctagggcagtgaacatcaagt

SEQ ID NO: 3219177 - DNA, 25 bp, Homo sapien
cagtctatagagttgttgtcctaca

SEQ ID NO: 3219178 - DNA, 25 bp, Homo sapien
gagagcagcatgtatcagtctatag

SEQ ID NO: 3219179 - DNA, 25 bp, Homo sapien
taatttacatgtgcaaggaggtgaa

SEQ ID NO: 3219180 - DNA, 25 bp, Homo sapien
catagactttgcaactcagccagaa

SEQ ID NO: 3219181 - DNA, 25 bp, Homo sapien
tctatggtacttcactagggtggtc

SEQ ID NO: 3219182 - DNA, 25 bp, Homo sapien
gaaggttttcaatgcagggtccaat

SEQ ID NO: 3219183 - DNA, 25 bp, Homo sapien
ccaagctctggcagtacatgtgtct

SEQ ID NO: 3219184 - DNA, 25 bp, Homo sapien
cgtataacttgggacaatggtgttt

SEQ ID NO: 3219185 - DNA, 25 bp, Homo sapien
gcaagacctacatcaaagcaaatat

SEQ ID NO: 3219186 - DNA, 25 bp, Homo sapien
cacactgttacgttggaagttttct

SEQ ID NO: 3219187 - DNA, 25 bp, Homo sapien
tctctttagtagcaagacctacatc

SEQ ID NO: 3219188 - DNA, 25 bp, Homo sapien
tgaactgctgactgaaagactctct

SEQ ID NO: 3219189 - DNA, 25 bp, Homo sapien
tacatacagctatcgcatatcagca

SEQ ID NO: 3219190 - DNA, 25 bp, Homo sapien
actgggccagctcagatgcaaaccc

SEQ ID NO: 3219191 - DNA, 25 bp, Homo sapien
tgcaaacccaccactactgtgtcat

SEQ ID NO: 3219192 - DNA, 25 bp, Homo sapien
ctcagtgtcctgaatcatgcatact

SEQ ID NO: 3219193 - DNA, 25 bp, Homo sapien
gaatcatgcatactcgtcgctctaa

SEQ ID NO: 3219194 - DNA, 25 bp, Homo sapien
tactcgtcgctctaacctattgagc

SEQ ID NO: 3219195 - DNA, 25 bp, Homo sapien
tgtcctgaatcatgcatactcgtcg

SEQ ID NO: 3219196 - DNA, 25 bp, Homo sapien
cttctactaccatcaaagtccttga

SEQ ID NO: 3219197 - DNA, 25 bp, Homo sapien
ttctactaccatcaaagtccttgat

SEQ ID NO: 3219198 - DNA, 25 bp, Homo sapien
tctactaccatcaaagtccttgatc

SEQ ID NO: 3219199 - DNA, 25 bp, Homo sapien
ctactaccatcaaagtccttgatct

SEQ ID NO: 3219200 - DNA, 25 bp, Homo sapien
tatttcttccttgcaatctgttact

SEQ ID NO: 3219201 - DNA, 25 bp, Homo sapien
ttattgaactgctcttatttcttcc

SEQ ID NO: 3219202 - DNA, 25 bp, Homo sapien
tcttccttgcaatctgttactttca

SEQ ID NO: 3219203 - DNA, 25 bp, Homo sapien
attgaactgctcttatttcttcctt

SEQ ID NO: 3219204 - DNA, 25 bp, Homo sapien
cagacaggaaccaaagccagcagaa

SEQ ID NO: 3219205 - DNA, 25 bp, Homo sapien
tcctggcatcatagataatttaagc

SEQ ID NO: 3219206 - DNA, 25 bp, Homo sapien
cagccccagatgtgttctactctat

SEQ ID NO: 3219207 - DNA, 25 bp, Homo sapien
tcttttgtgactccagtcccacaga

SEQ ID NO: 3219208 - DNA, 25 bp, Homo sapien
ctaaatgacacattcggtgatgtga

SEQ ID NO: 3219209 - DNA, 25 bp, Homo sapien
cggtgatgtgattctagatcaatag

SEQ ID NO: 3219210 - DNA, 25 bp, Homo sapien
ttgttaacttgccaatgaactgtaa

SEQ ID NO: 3219211 - DNA, 25 bp, Homo sapien
gaattcagattcctaaagaagtgac

SEQ ID NO: 3219212 - DNA, 25 bp, Homo sapien
cttggttagtcgcacaataatcaca

SEQ ID NO: 3219213 - DNA, 25 bp, Homo sapien
ctaagagccgaatattgattctttg

SEQ ID NO: 3219214 - DNA, 25 bp, Homo sapien
cacaataatcacatctgttgtcatt

SEQ ID NO: 3219215 - DNA, 25 bp, Homo sapien
gctggtcttggttagtcgcacaata

SEQ ID NO: 3219216 - DNA, 25 bp, Homo sapien
tctgaatctaaaagaagttctagac

SEQ ID NO: 3219217 - DNA, 25 bp, Homo sapien
tatattcattctgaatctaaaagaa

SEQ ID NO: 3219218 - DNA, 25 bp, Homo sapien
aagaagttctagacactaaacattt

SEQ ID NO: 3219219 - DNA, 25 bp, Homo sapien
gaagttctagacactaaacatttac

SEQ ID NO: 3219220 - DNA, 25 bp, Homo sapien
aaagataaggagattgaattgttct

SEQ ID NO: 3219221 - DNA, 25 bp, Homo sapien
cagcaatggacccatgctctctggt

SEQ ID NO: 3219222 - DNA, 25 bp, Homo sapien
caatggacccatgctctctggttta

SEQ ID NO: 3219223 - DNA, 25 bp, Homo sapien
ctctctggtttacggtgtgttgtgg

SEQ ID NO: 3219224 - DNA, 25 bp, Homo sapien
gacccatgctctctggtttacggtg

SEQ ID NO: 3219225 - DNA, 25 bp, Homo sapien
cacaggcacatacatgttgctgtaa

SEQ ID NO: 3219226 - DNA, 25 bp, Homo sapien
gcagaaaagtattgtcaggtttaca

SEQ ID NO: 3219227 - DNA, 25 bp, Homo sapien
cagtaaggtgctatgtgggtaataa

SEQ ID NO: 3219228 - DNA, 25 bp, Homo sapien
ccattttttagagttagtatacagt

SEQ ID NO: 3219229 - DNA, 25 bp, Homo sapien
ctcttcccagccaatggcgagtcga

SEQ ID NO: 3219230 - DNA, 25 bp, Homo sapien
ggagggaattcggatgctctcaatg

SEQ ID NO: 3219231 - DNA, 25 bp, Homo sapien
ttcccagccaatggcgagtcgagcc

SEQ ID NO: 3219232 - DNA, 25 bp, Homo sapien
acagaggagggaattcggatgctct

SEQ ID NO: 3219233 - DNA, 25 bp, Homo sapien
tacagcgcaaccgggccggggaggc

SEQ ID NO: 3219234 - DNA, 25 bp, Homo sapien
cacgcagaggtacggccgaagggac

SEQ ID NO: 3219235 - DNA, 25 bp, Homo sapien
tacggccgaagggacccaggcagag

SEQ ID NO: 3219236 - DNA, 25 bp, Homo sapien
cggccgaagggacccaggcagaggc

SEQ ID NO: 3219237 - DNA, 25 bp, Homo sapien
gcagcccccacgcagaggtacggcc

SEQ ID NO: 3219238 - DNA, 25 bp, Homo sapien
gaggaggggtgaggttcgggccgca

SEQ ID NO: 3219239 - DNA, 25 bp, Homo sapien
ctcccgtggccggcagtgagcgccc

SEQ ID NO: 3219240 - DNA, 25 bp, Homo sapien
ccgtggccggcagtgagcgcccagg

SEQ ID NO: 3219241 - DNA, 25 bp, Homo sapien
ccgagccaagctccggctgcgcggc

SEQ ID NO: 3219242 - DNA, 25 bp, Homo sapien
gtggccggcagtgagcgcccagggc

SEQ ID NO: 3219243 - DNA, 25 bp, Homo sapien
aaaggcaccgatcgcccccgccacg

SEQ ID NO: 3219244 - DNA, 25 bp, Homo sapien
cccgccacgactcgcggcgttccca

SEQ ID NO: 3219245 - DNA, 25 bp, Homo sapien
gatcgcccccgccacgactcgcggc

SEQ ID NO: 3219246 - DNA, 25 bp, Homo sapien
aagcaaaggcaccgatcgcccccgc

SEQ ID NO: 3219247 - DNA, 25 bp, Homo sapien
ctccgccgcacctccccttcccgag

SEQ ID NO: 3219248 - DNA, 25 bp, Homo sapien
ccacgcctccgccgcacctcccctt

SEQ ID NO: 3219249 - DNA, 25 bp, Homo sapien
agaccccacgcctccgccgcacctc

SEQ ID NO: 3219250 - DNA, 25 bp, Homo sapien
gggaagaccccacgcctccgccgca

SEQ ID NO: 3219251 - DNA, 25 bp, Homo sapien
acttgagcgtcagggacccgctgta

SEQ ID NO: 3219252 - DNA, 25 bp, Homo sapien
gggagagacttgagcgtcagggacc

SEQ ID NO: 3219253 - DNA, 25 bp, Homo sapien
agagacttgagcgtcagggacccgc

SEQ ID NO: 3219254 - DNA, 25 bp, Homo sapien
agacttgagcgtcagggacccgctg

SEQ ID NO: 3219255 - DNA, 25 bp, Homo sapien
tccagggcgtgattcacaaatccgt

SEQ ID NO: 3219256 - DNA, 25 bp, Homo sapien
ctccagggcgtgattcacaaatccg

SEQ ID NO: 3219257 - DNA, 25 bp, Homo sapien
ccagggcgtgattcacaaatccgta

SEQ ID NO: 3219258 - DNA, 25 bp, Homo sapien
cacacctcggggccgtaattgcgga

SEQ ID NO: 3219259 - DNA, 25 bp, Homo sapien
tcggggccgtaattgcggatcacca

SEQ ID NO: 3219260 - DNA, 25 bp, Homo sapien
ggccgtaattgcggatcaccagcaa

SEQ ID NO: 3219261 - DNA, 25 bp, Homo sapien
cctcggggccgtaattgcggatcac

SEQ ID NO: 3219262 - DNA, 25 bp, Homo sapien
ctccaaggatgcgcgcccgcgaccc

SEQ ID NO: 3219263 - DNA, 25 bp, Homo sapien
aggatgcgcgcccgcgacccggcca

SEQ ID NO: 3219264 - DNA, 25 bp, Homo sapien
gaggcgcggggggcctcccacactg

SEQ ID NO: 3219265 - DNA, 25 bp, Homo sapien
cccgcgacccggccagcaggctgag

SEQ ID NO: 3219266 - DNA, 25 bp, Homo sapien
tcataaaggagccaaagtcttccgt

SEQ ID NO: 3219267 - DNA, 25 bp, Homo sapien
tgctcaagaaataatctcccgcgtg

SEQ ID NO: 3219268 - DNA, 25 bp, Homo sapien
aaaggcctaacttacgccaggtgtg

SEQ ID NO: 3219269 - DNA, 25 bp, Homo sapien
cgtgtttcagcataccaaaaaggcc

SEQ ID NO: 3219270 - DNA, 25 bp, Homo sapien
tgggtgtggtatttccgttcacatc

SEQ ID NO: 3219271 - DNA, 25 bp, Homo sapien
ggtgtggtatttccgttcacatccc

SEQ ID NO: 3219272 - DNA, 25 bp, Homo sapien
caggtgggtgtggtatttccgttca

SEQ ID NO: 3219273 - DNA, 25 bp, Homo sapien
tggtatttccgttcacatccccagt

SEQ ID NO: 3219274 - DNA, 25 bp, Homo sapien
tccataaatagggttttggagtagc

SEQ ID NO: 3219275 - DNA, 25 bp, Homo sapien
gttacaatgtgatagtctgactgtt

SEQ ID NO: 3219276 - DNA, 25 bp, Homo sapien
taacagtgtattcccatctgcccac

SEQ ID NO: 3219277 - DNA, 25 bp, Homo sapien
tagtctgactgttgctctaatatga

SEQ ID NO: 3219278 - DNA, 25 bp, Homo sapien
cctaaagtaacttttggtgcctatg

SEQ ID NO: 3219279 - DNA, 25 bp, Homo sapien
gccaaatctcggcttctgtttataa

SEQ ID NO: 3219280 - DNA, 25 bp, Homo sapien
tatgccctgtggataatacaaatgg

SEQ ID NO: 3219281 - DNA, 25 bp, Homo sapien
ggtgcctatgttctcattggattca

SEQ ID NO: 3219282 - DNA, 25 bp, Homo sapien
tcggatctagccagttagatttctt

SEQ ID NO: 3219283 - DNA, 25 bp, Homo sapien
ctgtcaccctcggatctagccagtt

SEQ ID NO: 3219284 - DNA, 25 bp, Homo sapien
ccctcggatctagccagttagattt

SEQ ID NO: 3219285 - DNA, 25 bp, Homo sapien
gtcaccctcggatctagccagttag

SEQ ID NO: 3219286 - DNA, 25 bp, Homo sapien
ccaatctagtaattgtcttttgaca

SEQ ID NO: 3219287 - DNA, 25 bp, Homo sapien
tgaatccaatctagtaattgtcttt

SEQ ID NO: 3219288 - DNA, 25 bp, Homo sapien
ttgctaaaggattcaatcatgtcct

SEQ ID NO: 3219289 - DNA, 25 bp, Homo sapien
taaaggattcaatcatgtcctgaat

SEQ ID NO: 3219290 - DNA, 25 bp, Homo sapien
aagcagcaggcagtactaatacaca

SEQ ID NO: 3219291 - DNA, 25 bp, Homo sapien
atggcacatgtccttgctaaattgg

SEQ ID NO: 3219292 - DNA, 25 bp, Homo sapien
catgtccttgctaaattggttgtct

SEQ ID NO: 3219293 - DNA, 25 bp, Homo sapien
gcagcaggcagtactaatacacata

SEQ ID NO: 3219294 - DNA, 25 bp, Homo sapien
gctgaattggtaccataatgttgca

SEQ ID NO: 3219295 - DNA, 25 bp, Homo sapien
tgacagctccaagatactattgatc

SEQ ID NO: 3219296 - DNA, 25 bp, Homo sapien
cagtacgtaggtgtcgttttgataa

SEQ ID NO: 3219297 - DNA, 25 bp, Homo sapien
tagaatggtccattgtagtgagctg

SEQ ID NO: 3219298 - DNA, 25 bp, Homo sapien
gagctcctgctactgtacattttta

SEQ ID NO: 3219299 - DNA, 25 bp, Homo sapien
gttaagaatatgacaagactgctat

SEQ ID NO: 3219300 - DNA, 25 bp, Homo sapien
taacttcacatacaaggagatattc

SEQ ID NO: 3219301 - DNA, 25 bp, Homo sapien
ggagatattccttaactacaatatg

SEQ ID NO: 3219302 - DNA, 25 bp, Homo sapien
cctcctagtttgtattacagtctgt

SEQ ID NO: 3219303 - DNA, 25 bp, Homo sapien
agtctgttgctgcttactactatta

SEQ ID NO: 3219304 - DNA, 25 bp, Homo sapien
tctgttgctgcttactactattatt

SEQ ID NO: 3219305 - DNA, 25 bp, Homo sapien
tgcctcctagtttgtattacagtct

SEQ ID NO: 3219306 - DNA, 25 bp, Homo sapien
cactaaactgagatggagaatatac

SEQ ID NO: 3219307 - DNA, 25 bp, Homo sapien
caaaagttaattggaggtatcgcaa

SEQ ID NO: 3219308 - DNA, 25 bp, Homo sapien
tctttagtatgaagcagtttaatac

SEQ ID NO: 3219309 - DNA, 25 bp, Homo sapien
gggaaaagctaattggaaatactgc

SEQ ID NO: 3219310 - DNA, 25 bp, Homo sapien
acagtgacgccggagcaaggacttg

SEQ ID NO: 3219311 - DNA, 25 bp, Homo sapien
gaggtagctctggataaagacatga

SEQ ID NO: 3219312 - DNA, 25 bp, Homo sapien
caaaagaggtaaagatccctgtcct

SEQ ID NO: 3219313 - DNA, 25 bp, Homo sapien
tagatactacaggaagaggtagctc

SEQ ID NO: 3219314 - DNA, 25 bp, Homo sapien
taattaggcgaacttgcaacacagc

SEQ ID NO: 3219315 - DNA, 25 bp, Homo sapien
tcaaacaagcattcaaaggagaggt

SEQ ID NO: 3219316 - DNA, 25 bp, Homo sapien
taagttccagatatcattgccaatg

SEQ ID NO: 3219317 - DNA, 25 bp, Homo sapien
ggaaagtagccactctaattaggcg

SEQ ID NO: 3219318 - DNA, 25 bp, Homo sapien
cagcagcaaccaaatcataagtttt

SEQ ID NO: 3219319 - DNA, 25 bp, Homo sapien
attctgacaagaaactgtccttctt

SEQ ID NO: 3219320 - DNA, 25 bp, Homo sapien
caaccaaatcataagttttggagtc

SEQ ID NO: 3219321 - DNA, 25 bp, Homo sapien
agaaactgtccttcttcatctaact

SEQ ID NO: 3219322 - DNA, 25 bp, Homo sapien
tgtatcataaccagattcttggcaa

SEQ ID NO: 3219323 - DNA, 25 bp, Homo sapien
tctgacattagagcccaggacacgc

SEQ ID NO: 3219324 - DNA, 25 bp, Homo sapien
tcccaaacatttggaggatttctcc

SEQ ID NO: 3219325 - DNA, 25 bp, Homo sapien
aaaacatcttcccaaacatttggag

SEQ ID NO: 3219326 - DNA, 25 bp, Homo sapien
cttttaactataggacctcaaattg

SEQ ID NO: 3219327 - DNA, 25 bp, Homo sapien
tttaactataggacctcaaattgct

SEQ ID NO: 3219328 - DNA, 25 bp, Homo sapien
aactataggacctcaaattgcttac

SEQ ID NO: 3219329 - DNA, 25 bp, Homo sapien
cagaacttttaactataggacctca

SEQ ID NO: 3219330 - DNA, 25 bp, Homo sapien
tgtcagaacgaccattttaaaagtg

SEQ ID NO: 3219331 - DNA, 25 bp, Homo sapien
ttctgcttgctatgatgagtgagtc

SEQ ID NO: 3219332 - DNA, 25 bp, Homo sapien
tatctaactgagaggctgtggacag

SEQ ID NO: 3219333 - DNA, 25 bp, Homo sapien
tgtggacaggcaacttccaaggaaa

SEQ ID NO: 3219334 - DNA, 25 bp, Homo sapien
ccaggaaacaatgatgtaaatctga

SEQ ID NO: 3219335 - DNA, 25 bp, Homo sapien
tgcagcacaagtagattcccaggaa

SEQ ID NO: 3219336 - DNA, 25 bp, Homo sapien
agattcccaggaaacaatgatgtaa

SEQ ID NO: 3219337 - DNA, 25 bp, Homo sapien
attgcagcacaagtagattcccagg

SEQ ID NO: 3219338 - DNA, 25 bp, Homo sapien
caagtcagtacttcctgagtcacta

SEQ ID NO: 3219339 - DNA, 25 bp, Homo sapien
tcactaaagataggcactgcaccct

SEQ ID NO: 3219340 - DNA, 25 bp, Homo sapien
tttgcagtaaccaactctccagaga

SEQ ID NO: 3219341 - DNA, 25 bp, Homo sapien
agtggacacaatcatccaagtcagt

SEQ ID NO: 3219342 - DNA, 25 bp, Homo sapien
tcaacaacagggaatggccaaagga

SEQ ID NO: 3219343 - DNA, 25 bp, Homo sapien
cagctgtttctacgtgttgtgatca

SEQ ID NO: 3219344 - DNA, 25 bp, Homo sapien
tacgtgttgtgatcaacaacaggga

SEQ ID NO: 3219345 - DNA, 25 bp, Homo sapien
gggcagctgtttctacgtgttgtga

SEQ ID NO: 3219346 - DNA, 25 bp, Homo sapien
gtaaagcaagtgccacagagaaaat

SEQ ID NO: 3219347 - DNA, 25 bp, Homo sapien
ctgtaaagcaagtgccacagagaaa

SEQ ID NO: 3219348 - DNA, 25 bp, Homo sapien
aaagcaagtgccacagagaaaatga

SEQ ID NO: 3219349 - DNA, 25 bp, Homo sapien
agcaagtgccacagagaaaatgaaa

SEQ ID NO: 3219350 - DNA, 25 bp, Homo sapien
aacgagtcaaatcggagtctagtgg

SEQ ID NO: 3219351 - DNA, 25 bp, Homo sapien
tatgaaaacgagtcaaatcggagtc

SEQ ID NO: 3219352 - DNA, 25 bp, Homo sapien
gcagcacatgtagcacatccttcac

SEQ ID NO: 3219353 - DNA, 25 bp, Homo sapien
agtctagtgggcagatcagcgaagc

SEQ ID NO: 3219354 - DNA, 25 bp, Homo sapien
agaaagggagaccaataaacaatgc

SEQ ID NO: 3219355 - DNA, 25 bp, Homo sapien
aataaacaatgctttcgcaatgaca

SEQ ID NO: 3219356 - DNA, 25 bp, Homo sapien
aaacaatgctttcgcaatgacagca

SEQ ID NO: 3219357 - DNA, 25 bp, Homo sapien
gaaagggagaccaataaacaatgct

SEQ ID NO: 3219358 - DNA, 25 bp, Homo sapien
ccttctctctctgagtagtagtgca

SEQ ID NO: 3219359 - DNA, 25 bp, Homo sapien
tagcaaggtggtcgtgcagagcatc

SEQ ID NO: 3219360 - DNA, 25 bp, Homo sapien
gaaggtgcacgcattcctgggtaga

SEQ ID NO: 3219361 - DNA, 25 bp, Homo sapien
tgcatcagtgcacctaaaggaaggt

SEQ ID NO: 3219362 - DNA, 25 bp, Homo sapien
tgactgggagaaaccgtaagggcca

SEQ ID NO: 3219363 - DNA, 25 bp, Homo sapien
gactcttgggtatgaacatgctgaa

SEQ ID NO: 3219364 - DNA, 25 bp, Homo sapien
ttctctttgttgtacggttgcccta

SEQ ID NO: 3219365 - DNA, 25 bp, Homo sapien
tttggcctcaagtttaaagctactg

SEQ ID NO: 3219366 - DNA, 25 bp, Homo sapien
tatctatgatctataagaaagaact

SEQ ID NO: 3219367 - DNA, 25 bp, Homo sapien
tgtgttacaatatatctatgatcta

SEQ ID NO: 3219368 - DNA, 25 bp, Homo sapien
tctatgatctataagaaagaactgt

SEQ ID NO: 3219369 - DNA, 25 bp, Homo sapien
caagtgtgttacaatatatctatga

SEQ ID NO: 3219370 - DNA, 25 bp, Homo sapien
caaagggggaaatggcatgaattgt

SEQ ID NO: 3219371 - DNA, 25 bp, Homo sapien
gggaaatggcatgaattgtcttcat

SEQ ID NO: 3219372 - DNA, 25 bp, Homo sapien
tcaaagggggaaatggcatgaattg

SEQ ID NO: 3219373 - DNA, 25 bp, Homo sapien
aagggggaaatggcatgaattgtct

SEQ ID NO: 3219374 - DNA, 25 bp, Homo sapien
gtatatagcattgccacactgagtg

SEQ ID NO: 3219375 - DNA, 25 bp, Homo sapien
cactaggtcccggtcaaatattata

SEQ ID NO: 3219376 - DNA, 25 bp, Homo sapien
tatatgggctgatgcgtgattcctg

SEQ ID NO: 3219377 - DNA, 25 bp, Homo sapien
tgattcctgggtaccattttcttca

SEQ ID NO: 3219378 - DNA, 25 bp, Homo sapien
caatggatctgtcatagaagtcaac

SEQ ID NO: 3219379 - DNA, 25 bp, Homo sapien
tggatctgtcatagaagtcaacagc

SEQ ID NO: 3219380 - DNA, 25 bp, Homo sapien
tctgtcatagaagtcaacagcagtt

SEQ ID NO: 3219381 - DNA, 25 bp, Homo sapien
catctctatcattttgtgttttagt

SEQ ID NO: 3219382 - DNA, 25 bp, Homo sapien
aatatgaggacgaaccagcgagaag

SEQ ID NO: 3219383 - DNA, 25 bp, Homo sapien
tatgaggacgaaccagcgagaagac

SEQ ID NO: 3219384 - DNA, 25 bp, Homo sapien
ttgatgtgagaaaggatcccatgga

SEQ ID NO: 3219385 - DNA, 25 bp, Homo sapien
ggatcccatggaaactaatatcaat

SEQ ID NO: 3219386 - DNA, 25 bp, Homo sapien
cagctgatctcagtcccagtcagtt

SEQ ID NO: 3219387 - DNA, 25 bp, Homo sapien
catttgacccttgagacgtaagcag

SEQ ID NO: 3219388 - DNA, 25 bp, Homo sapien
gaaaaagtatgctatctgcttcagg

SEQ ID NO: 3219389 - DNA, 25 bp, Homo sapien
cttcaggtaagtagatcatttgacc

SEQ ID NO: 3219390 - DNA, 25 bp, Homo sapien
taatgagaagctgacattctcctaa

SEQ ID NO: 3219391 - DNA, 25 bp, Homo sapien
gcccctaatgagaagctgacattct

SEQ ID NO: 3219392 - DNA, 25 bp, Homo sapien
taaatagaaattgcccctaatgaga

SEQ ID NO: 3219393 - DNA, 25 bp, Homo sapien
aattgcccctaatgagaagctgaca

SEQ ID NO: 3219394 - DNA, 25 bp, Homo sapien
cttgtcaaatcgtccaggttcatga

SEQ ID NO: 3219395 - DNA, 25 bp, Homo sapien
gggatgtcacttagatacagccctc

SEQ ID NO: 3219396 - DNA, 25 bp, Homo sapien
aagatcgcgcgtggcatcatgcaga

SEQ ID NO: 3219397 - DNA, 25 bp, Homo sapien
taacgtgagctgtagcctgtcagtg

SEQ ID NO: 3219398 - DNA, 25 bp, Homo sapien
tctaatcctaaattcaaggtcccag

SEQ ID NO: 3219399 - DNA, 25 bp, Homo sapien
cagctctctgcacgcggcagccccc

SEQ ID NO: 3219400 - DNA, 25 bp, Homo sapien
taaacatgtaatggccagtggttaa

SEQ ID NO: 3219401 - DNA, 25 bp, Homo sapien
taatcctaaattcaaggtcccagaa

SEQ ID NO: 3219402 - DNA, 25 bp, Homo sapien
gaagcacagtaactcgaaatggtgc

SEQ ID NO: 3219403 - DNA, 25 bp, Homo sapien
aatataaggatttttgaagcacagt

SEQ ID NO: 3219404 - DNA, 25 bp, Homo sapien
ctcgaaatggtgcaaatagttcctg

SEQ ID NO: 3219405 - DNA, 25 bp, Homo sapien
ggtgcaaatagttcctgaatgtgaa

SEQ ID NO: 3219406 - DNA, 25 bp, Homo sapien
tgtactttaaaggcctggattctag

SEQ ID NO: 3219407 - DNA, 25 bp, Homo sapien
tactttaaaggcctggattctagca

SEQ ID NO: 3219408 - DNA, 25 bp, Homo sapien
ttgtactttaaaggcctggattcta

SEQ ID NO: 3219409 - DNA, 25 bp, Homo sapien
actttaaaggcctggattctagcag

SEQ ID NO: 3219410 - DNA, 25 bp, Homo sapien
ttgtgccgcagctcattggcaacag

SEQ ID NO: 3219411 - DNA, 25 bp, Homo sapien
ttttggcaggcactggacgcttgtg

SEQ ID NO: 3219412 - DNA, 25 bp, Homo sapien
ctcattggcaacagacggaggaagg

SEQ ID NO: 3219413 - DNA, 25 bp, Homo sapien
ggcactggacgcttgtgccgcagct

SEQ ID NO: 3219414 - DNA, 25 bp, Homo sapien
tttccgggaatcagtcagtgtgtca

SEQ ID NO: 3219415 - DNA, 25 bp, Homo sapien
caaatctggtgtagaggtcgttgag

SEQ ID NO: 3219416 - DNA, 25 bp, Homo sapien
ggctccttctccagatgcatgcttg

SEQ ID NO: 3219417 - DNA, 25 bp, Homo sapien
gaggttgacgatcttcatggctcct

SEQ ID NO: 3219418 - DNA, 25 bp, Homo sapien
tcagagagctgtgatgacatggcct

SEQ ID NO: 3219419 - DNA, 25 bp, Homo sapien
tgtactcaaggctgcagtgctggag

SEQ ID NO: 3219420 - DNA, 25 bp, Homo sapien
ggagtcagagagctgtgatgacatg

SEQ ID NO: 3219421 - DNA, 25 bp, Homo sapien
aaggctgcagtgctggagtcagaga

SEQ ID NO: 3219422 - DNA, 25 bp, Homo sapien
taaaacagtgatggcttgacggcat

SEQ ID NO: 3219423 - DNA, 25 bp, Homo sapien
gttatctaaacgcaaatctgagtcc

SEQ ID NO: 3219424 - DNA, 25 bp, Homo sapien
gctagagtgtacctcagaaaatgac

SEQ ID NO: 3219425 - DNA, 25 bp, Homo sapien
tatattaccccagatatctagagat

SEQ ID NO: 3219426 - DNA, 25 bp, Homo sapien
ccttgcaattacttataatttacac

SEQ ID NO: 3219427 - DNA, 25 bp, Homo sapien
tgaaaccttgcaattacttataatt

SEQ ID NO: 3219428 - DNA, 25 bp, Homo sapien
caactccaacaaaatgaaaccttgc

SEQ ID NO: 3219429 - DNA, 25 bp, Homo sapien
acaaaatgaaaccttgcaattactt

SEQ ID NO: 3219430 - DNA, 25 bp, Homo sapien
tgtcatatacttgtcaccaacagtc

SEQ ID NO: 3219431 - DNA, 25 bp, Homo sapien
tggtgaatgcatggctctggtaaac

SEQ ID NO: 3219432 - DNA, 25 bp, Homo sapien
cagatggatcgtgcatggtgaatgc

SEQ ID NO: 3219433 - DNA, 25 bp, Homo sapien
accactcactgtcatatacttgtca

SEQ ID NO: 3219434 - DNA, 25 bp, Homo sapien
gaacagattcaccatctacttgaac

SEQ ID NO: 3219435 - DNA, 25 bp, Homo sapien
ctgaacagattcaccatctacttga

SEQ ID NO: 3219436 - DNA, 25 bp, Homo sapien
tcaccatctacttgaacctggccag

SEQ ID NO: 3219437 - DNA, 25 bp, Homo sapien
gattcaccatctacttgaacctggc

SEQ ID NO: 3219438 - DNA, 25 bp, Homo sapien
tttcaaacaggtagataaatctcca

SEQ ID NO: 3219439 - DNA, 25 bp, Homo sapien
tgaaagaatgtagtacagtgggctg

SEQ ID NO: 3219440 - DNA, 25 bp, Homo sapien
tgggctggatgaaatgctatagtct

SEQ ID NO: 3219441 - DNA, 25 bp, Homo sapien
tcagtacatgaaacggactagataa

SEQ ID NO: 3219442 - DNA, 25 bp, Homo sapien
caaaaaagaaagctttgcttcaatc

SEQ ID NO: 3219443 - DNA, 25 bp, Homo sapien
gcaaaaaagaaagctttgcttcaat

SEQ ID NO: 3219444 - DNA, 25 bp, Homo sapien
ctgcaaaaaagaaagctttgcttca

SEQ ID NO: 3219445 - DNA, 25 bp, Homo sapien
aaaaagaaagctttgcttcaatcat

SEQ ID NO: 3219446 - DNA, 25 bp, Homo sapien
caaaaagacagtatcgaggcatccg

SEQ ID NO: 3219447 - DNA, 25 bp, Homo sapien
tatgacacctgtaactacctctcca

SEQ ID NO: 3219448 - DNA, 25 bp, Homo sapien
tttctgttcggcttgtgaggttgac

SEQ ID NO: 3219449 - DNA, 25 bp, Homo sapien
gcttgtgaggttgacagtattccca

SEQ ID NO: 3219450 - DNA, 25 bp, Homo sapien
ctgaagttgtactgaaaggtaactc

SEQ ID NO: 3219451 - DNA, 25 bp, Homo sapien
tatacacaagttttatagagaaggt

SEQ ID NO: 3219452 - DNA, 25 bp, Homo sapien
gtagagagagaagtatacacaagtt

SEQ ID NO: 3219453 - DNA, 25 bp, Homo sapien
agttgtactgaaaggtaactcaaag

SEQ ID NO: 3219454 - DNA, 25 bp, Homo sapien
cctctgtgctccaagtggaattgtg

SEQ ID NO: 3219455 - DNA, 25 bp, Homo sapien
tttctggatagaaaccaaacttgca

SEQ ID NO: 3219456 - DNA, 25 bp, Homo sapien
ttctggatagaaaccaaacttgcat

SEQ ID NO: 3219457 - DNA, 25 bp, Homo sapien
agtggaattgtggatctgaattttc

SEQ ID NO: 3219458 - DNA, 25 bp, Homo sapien
ccttctcaatccagtctgttggttt

SEQ ID NO: 3219459 - DNA, 25 bp, Homo sapien
ttgagccagactacagaggaagagc

SEQ ID NO: 3219460 - DNA, 25 bp, Homo sapien
aagtacttatgattgtaattggctc

SEQ ID NO: 3219461 - DNA, 25 bp, Homo sapien
tcatttcattagaggacaaaaatca

SEQ ID NO: 3219462 - DNA, 25 bp, Homo sapien
catgatcttagtgtgtgcaaggcct

SEQ ID NO: 3219463 - DNA, 25 bp, Homo sapien
tctgcctggagtataaccatagtag

SEQ ID NO: 3219464 - DNA, 25 bp, Homo sapien
cactttggatgtgccactgttctga

SEQ ID NO: 3219465 - DNA, 25 bp, Homo sapien
cattctagcacatgggctctgcctg

SEQ ID NO: 3219466 - DNA, 25 bp, Homo sapien
gcttggcacgtgttaggagaaaact

SEQ ID NO: 3219467 - DNA, 25 bp, Homo sapien
gcagagctaaggttgaataacggat

SEQ ID NO: 3219468 - DNA, 25 bp, Homo sapien
gagaaaactggaacctagtctgtac

SEQ ID NO: 3219469 - DNA, 25 bp, Homo sapien
tgtatccatagggaagaactgctcc

SEQ ID NO: 3219470 - DNA, 25 bp, Homo sapien
ttggagctcccaacatttagcctga

SEQ ID NO: 3219471 - DNA, 25 bp, Homo sapien
tacacatggccaaacactgttcagt

SEQ ID NO: 3219472 - DNA, 25 bp, Homo sapien
ggaatacaaggccaagaagggctct

SEQ ID NO: 3219473 - DNA, 25 bp, Homo sapien
gcctactacttgcagatcaccatgt

SEQ ID NO: 3219474 - DNA, 25 bp, Homo sapien
cagactcttttacacattaacatgg

SEQ ID NO: 3219475 - DNA, 25 bp, Homo sapien
tccaacagtaatgcattctatgctg

SEQ ID NO: 3219476 - DNA, 25 bp, Homo sapien
ggatataatcacattcttctaagct

SEQ ID NO: 3219477 - DNA, 25 bp, Homo sapien
cagagacatttaagagctagaggcc

SEQ ID NO: 3219478 - DNA, 25 bp, Homo sapien
gcaggcctatgcatgaagtacagta

SEQ ID NO: 3219479 - DNA, 25 bp, Homo sapien
catgctttgctaaggtgtacagaca

SEQ ID NO: 3219480 - DNA, 25 bp, Homo sapien
aaattagcccctgcaccaatgtcag

SEQ ID NO: 3219481 - DNA, 25 bp, Homo sapien
caacaagaggatattgagctgagtc

SEQ ID NO: 3219482 - DNA, 25 bp, Homo sapien
aaaattgttcctgtgtattcaaggg

SEQ ID NO: 3219483 - DNA, 25 bp, Homo sapien
tcatgaatcaggaagaacttttggt

SEQ ID NO: 3219484 - DNA, 25 bp, Homo sapien
tcctcctgaggtctgaagggttctg

SEQ ID NO: 3219485 - DNA, 25 bp, Homo sapien
gaactttctgatacactttactgag

SEQ ID NO: 3219486 - DNA, 25 bp, Homo sapien
tcttctcttgcaatctgatatagaa

SEQ ID NO: 3219487 - DNA, 25 bp, Homo sapien
caaatcagattcatatgaatcactg

SEQ ID NO: 3219488 - DNA, 25 bp, Homo sapien
atttggcagcctaaataacttatgc

SEQ ID NO: 3219489 - DNA, 25 bp, Homo sapien
taacttatgcttggcaaaacggtac

SEQ ID NO: 3219490 - DNA, 25 bp, Homo sapien
tatgaactgtctcaacttccctggg

SEQ ID NO: 3219491 - DNA, 25 bp, Homo sapien
taaaaggcttgattgctcctggtac

SEQ ID NO: 3219492 - DNA, 25 bp, Homo sapien
ccttattacattggattgacggata

SEQ ID NO: 3219493 - DNA, 25 bp, Homo sapien
gagtgagaataacaatgcatgcagg

SEQ ID NO: 3219494 - DNA, 25 bp, Homo sapien
cattctgaaagcctagtagagcttc

SEQ ID NO: 3219495 - DNA, 25 bp, Homo sapien
ctgccttcatctgaaggcagagtga

SEQ ID NO: 3219496 - DNA, 25 bp, Homo sapien
gcctagtagagcttcactgccttca

SEQ ID NO: 3219497 - DNA, 25 bp, Homo sapien
gagtcattccattactaacattctg

SEQ ID NO: 3219498 - DNA, 25 bp, Homo sapien
tgttgtggtgtgaaaagataatcgc

SEQ ID NO: 3219499 - DNA, 25 bp, Homo sapien
tatgactttcaggtaggtattggcc

SEQ ID NO: 3219500 - DNA, 25 bp, Homo sapien
tattggccaatctacctaatataga

SEQ ID NO: 3219501 - DNA, 25 bp, Homo sapien
aatgtcatagttactagggaaagag

SEQ ID NO: 3219502 - DNA, 25 bp, Homo sapien
taagagctcagtaggcattgaaggg

SEQ ID NO: 3219503 - DNA, 25 bp, Homo sapien
acaggaaatcatggaaaagtaggaa

SEQ ID NO: 3219504 - DNA, 25 bp, Homo sapien
aatttgtgagcattgattttttgct

SEQ ID NO: 3219505 - DNA, 25 bp, Homo sapien
gatgactgggtatctgtgtaatttt

SEQ ID NO: 3219506 - DNA, 25 bp, Homo sapien
taaataccttatctgaatatgaggg

SEQ ID NO: 3219507 - DNA, 25 bp, Homo sapien
tctctgactttctcgcctcaaaaac

SEQ ID NO: 3219508 - DNA, 25 bp, Homo sapien
tgctagaggcatgaagagctgagct

SEQ ID NO: 3219509 - DNA, 25 bp, Homo sapien
tatgagggatagtggagcaggaaca

SEQ ID NO: 3219510 - DNA, 25 bp, Homo sapien
gaaagactccacaaattttgttgtg

SEQ ID NO: 3219511 - DNA, 25 bp, Homo sapien
aaagactccacaaattttgttgtgt

SEQ ID NO: 3219512 - DNA, 25 bp, Homo sapien
agaaagactccacaaattttgttgt

SEQ ID NO: 3219513 - DNA, 25 bp, Homo sapien
gttaggcttgttgtcacctgtggga

SEQ ID NO: 3219514 - DNA, 25 bp, Homo sapien
aagaaggtgccacagtttgatgggt

SEQ ID NO: 3219515 - DNA, 25 bp, Homo sapien
tgtcacctgtgggaatgcacgcaag

SEQ ID NO: 3219516 - DNA, 25 bp, Homo sapien
aagggtaaccatccgccaagtgaag

SEQ ID NO: 3219517 - DNA, 25 bp, Homo sapien
gcattcacctcccaatccaagtgaa

SEQ ID NO: 3219518 - DNA, 25 bp, Homo sapien
ccagtaatgtactcttcatagcttc

SEQ ID NO: 3219519 - DNA, 25 bp, Homo sapien
aagtaaaattgatgttcctgcattc

SEQ ID NO: 3219520 - DNA, 25 bp, Homo sapien
ctcccaatccaagtgaatcatgcca

SEQ ID NO: 3219521 - DNA, 25 bp, Homo sapien
ggtcctggctgctgcccgatactag

SEQ ID NO: 3219522 - DNA, 25 bp, Homo sapien
acccagtatttgaagaagctgaagg

SEQ ID NO: 3219523 - DNA, 25 bp, Homo sapien
aacccagtatttgaagaagctgaag

SEQ ID NO: 3219524 - DNA, 25 bp, Homo sapien
ctaacactcactatattccaggcag

SEQ ID NO: 3219525 - DNA, 25 bp, Homo sapien
aacactcactatattccaggcaggt

SEQ ID NO: 3219526 - DNA, 25 bp, Homo sapien
cactcactatattccaggcaggtgt

SEQ ID NO: 3219527 - DNA, 25 bp, Homo sapien
taacactcactatattccaggcagg

SEQ ID NO: 3219528 - DNA, 25 bp, Homo sapien
gtatgccctaccttgactgagaaag

SEQ ID NO: 3219529 - DNA, 25 bp, Homo sapien
gtatgtaatgttggcttgaggttgt

SEQ ID NO: 3219530 - DNA, 25 bp, Homo sapien
tattagttattgactgtgaaaacag

SEQ ID NO: 3219531 - DNA, 25 bp, Homo sapien
ctcttaaagagtatgtaatgttggc

SEQ ID NO: 3219532 - DNA, 25 bp, Homo sapien
tgtagttagacagaataccaccatg

SEQ ID NO: 3219533 - DNA, 25 bp, Homo sapien
caggaagtccgaggaggatatttac

SEQ ID NO: 3219534 - DNA, 25 bp, Homo sapien
ccatgacagatgaccaatagtgcct

SEQ ID NO: 3219535 - DNA, 25 bp, Homo sapien
gacctgggctagctttgcaagtatc

SEQ ID NO: 3219536 - DNA, 25 bp, Homo sapien
gggtttacactgtacttctgccaaa

SEQ ID NO: 3219537 - DNA, 25 bp, Homo sapien
aagtagcttggaggtccatctctca

SEQ ID NO: 3219538 - DNA, 25 bp, Homo sapien
actgggagttggaaacctgaagtag

SEQ ID NO: 3219539 - DNA, 25 bp, Homo sapien
gaatactggctctgactgtgcagga

SEQ ID NO: 3219540 - DNA, 25 bp, Homo sapien
aggcaaatgcgtatttgacttcttc

SEQ ID NO: 3219541 - DNA, 25 bp, Homo sapien
ttcctctggtctatgtttactttat

SEQ ID NO: 3219542 - DNA, 25 bp, Homo sapien
tcctctggtctatgtttactttatc

SEQ ID NO: 3219543 - DNA, 25 bp, Homo sapien
tgaggcaaatgcgtatttgacttct

SEQ ID NO: 3219544 - DNA, 25 bp, Homo sapien
catctcccactgagcgaaagaagtt

SEQ ID NO: 3219545 - DNA, 25 bp, Homo sapien
cggagcaaaattcgcagggtgctct

SEQ ID NO: 3219546 - DNA, 25 bp, Homo sapien
cacaatattgttcagaaccggagca

SEQ ID NO: 3219547 - DNA, 25 bp, Homo sapien
agtttgaccatgactttgccatctc

SEQ ID NO: 3219548 - DNA, 25 bp, Homo sapien
tattattgattgattcctgatagac

SEQ ID NO: 3219549 - DNA, 25 bp, Homo sapien
gattgattcctgatagacttgaaat

SEQ ID NO: 3219550 - DNA, 25 bp, Homo sapien
attattgattgattcctgatagact

SEQ ID NO: 3219551 - DNA, 25 bp, Homo sapien
attgattcctgatagacttgaaatg

SEQ ID NO: 3219552 - DNA, 25 bp, Homo sapien
gccagttacttgatacatgttcatt

SEQ ID NO: 3219553 - DNA, 25 bp, Homo sapien
gattatgccagttacttgatacatg

SEQ ID NO: 3219554 - DNA, 25 bp, Homo sapien
ctgggattatgccagttacttgata

SEQ ID NO: 3219555 - DNA, 25 bp, Homo sapien
tctctgggattatgccagttacttg

SEQ ID NO: 3219556 - DNA, 25 bp, Homo sapien
ttttcactcatgaaatcactctggg

SEQ ID NO: 3219557 - DNA, 25 bp, Homo sapien
ggaagtgtccctttaactgtgagaa

SEQ ID NO: 3219558 - DNA, 25 bp, Homo sapien
tcactctgggttagcttctcatcag

SEQ ID NO: 3219559 - DNA, 25 bp, Homo sapien
tcagtccataaatgcccatacctgg

SEQ ID NO: 3219560 - DNA, 25 bp, Homo sapien
agtaataaggtagaagtgagaatga

SEQ ID NO: 3219561 - DNA, 25 bp, Homo sapien
taataaggtagaagtgagaatgaag

SEQ ID NO: 3219562 - DNA, 25 bp, Homo sapien
ggtagaagtgagaatgaagtacttt

SEQ ID NO: 3219563 - DNA, 25 bp, Homo sapien
taaggtagaagtgagaatgaagtac

SEQ ID NO: 3219564 - DNA, 25 bp, Homo sapien
tatttatggcaaaccatggagttgt

SEQ ID NO: 3219565 - DNA, 25 bp, Homo sapien
tgacaaacagaaacctcccacaaac

SEQ ID NO: 3219566 - DNA, 25 bp, Homo sapien
taaactgaagctgtcccactaatgg

SEQ ID NO: 3219567 - DNA, 25 bp, Homo sapien
aactggagaactgaaataagaaact

SEQ ID NO: 3219568 - DNA, 25 bp, Homo sapien
gaagcacggaggtttgactctaggc

SEQ ID NO: 3219569 - DNA, 25 bp, Homo sapien
gcacggaggtttgactctaggcaga

SEQ ID NO: 3219570 - DNA, 25 bp, Homo sapien
gagaagcacggaggtttgactctag

SEQ ID NO: 3219571 - DNA, 25 bp, Homo sapien
cacggaggtttgactctaggcagat

SEQ ID NO: 3219572 - DNA, 25 bp, Homo sapien
ttcctaaaaatgggcacccactcat

SEQ ID NO: 3219573 - DNA, 25 bp, Homo sapien
tttcctaaaaatgggcacccactca

SEQ ID NO: 3219574 - DNA, 25 bp, Homo sapien
ttctttagagtagattgttagacaa

SEQ ID NO: 3219575 - DNA, 25 bp, Homo sapien
aaaacacagttaactaatgatatgg

SEQ ID NO: 3219576 - DNA, 25 bp, Homo sapien
tagagtagattgttagacaaaggaa

SEQ ID NO: 3219577 - DNA, 25 bp, Homo sapien
cacagttaactaatgatatgggtga

SEQ ID NO: 3219578 - DNA, 25 bp, Homo sapien
ggctctattcacaccagtttgtgat

SEQ ID NO: 3219579 - DNA, 25 bp, Homo sapien
tttgctggctctattcacaccagtt

SEQ ID NO: 3219580 - DNA, 25 bp, Homo sapien
tgcaggtagttcccatagataagac

SEQ ID NO: 3219581 - DNA, 25 bp, Homo sapien
gcaggtagttcccatagataagacc

SEQ ID NO: 3219582 - DNA, 25 bp, Homo sapien
tgtttcactttgcagttcttgtgca

SEQ ID NO: 3219583 - DNA, 25 bp, Homo sapien
ttgtttcactttgcagttcttgtgc

SEQ ID NO: 3219584 - DNA, 25 bp, Homo sapien
gtttcactttgcagttcttgtgcat

SEQ ID NO: 3219585 - DNA, 25 bp, Homo sapien
gatattgcctcggtataagccaccc

SEQ ID NO: 3219586 - DNA, 25 bp, Homo sapien
tattatgtgctatacctcgggctaa

SEQ ID NO: 3219587 - DNA, 25 bp, Homo sapien
cttagcacatatgggaaagcggcca

SEQ ID NO: 3219588 - DNA, 25 bp, Homo sapien
caatctatctgaagtgacgggctgt

SEQ ID NO: 3219589 - DNA, 25 bp, Homo sapien
gatctctcgaacagaatccaactcc

SEQ ID NO: 3219590 - DNA, 25 bp, Homo sapien
cccagaggatttgcttaaaccagag

SEQ ID NO: 3219591 - DNA, 25 bp, Homo sapien
atggccattctgaaagatctctcga

SEQ ID NO: 3219592 - DNA, 25 bp, Homo sapien
ggatttgcttaaaccagagttcata

SEQ ID NO: 3219593 - DNA, 25 bp, Homo sapien
gatcactgacactcggtgcatccga

SEQ ID NO: 3219594 - DNA, 25 bp, Homo sapien
gtgcatccgagaaacaaccttaagc

SEQ ID NO: 3219595 - DNA, 25 bp, Homo sapien
tgctgcaccagcagtttcaggatca

SEQ ID NO: 3219596 - DNA, 25 bp, Homo sapien
tgaagtccaaggctgtcatcgtctc

SEQ ID NO: 3219597 - DNA, 25 bp, Homo sapien
aatgagaaagtaaattccatcacat

SEQ ID NO: 3219598 - DNA, 25 bp, Homo sapien
caaaatgagaaagtaaattccatca

SEQ ID NO: 3219599 - DNA, 25 bp, Homo sapien
caccaaaatgagaaagtaaattcca

SEQ ID NO: 3219600 - DNA, 25 bp, Homo sapien
ccaaaatgagaaagtaaattccatc

SEQ ID NO: 3219601 - DNA, 25 bp, Homo sapien
gctcagatttaagtagcagttcatt

SEQ ID NO: 3219602 - DNA, 25 bp, Homo sapien
tcttctgttataagggactctcatg

SEQ ID NO: 3219603 - DNA, 25 bp, Homo sapien
gaattgcaaactctggaagcctgat

SEQ ID NO: 3219604 - DNA, 25 bp, Homo sapien
tgttttctaatagtcggaattgcaa

SEQ ID NO: 3219605 - DNA, 25 bp, Homo sapien
ccactaattccagaagtgtcttttc

SEQ ID NO: 3219606 - DNA, 25 bp, Homo sapien
tccactaattccagaagtgtctttt

SEQ ID NO: 3219607 - DNA, 25 bp, Homo sapien
ctccactaattccagaagtgtcttt

SEQ ID NO: 3219608 - DNA, 25 bp, Homo sapien
agttaaatccatgtggctctaaacc

SEQ ID NO: 3219609 - DNA, 25 bp, Homo sapien
gctttccccagaagttaaatccatg

SEQ ID NO: 3219610 - DNA, 25 bp, Homo sapien
tgtggctctaaacctggagttcttt

SEQ ID NO: 3219611 - DNA, 25 bp, Homo sapien
ttccaggcctctggtgatatttttt

SEQ ID NO: 3219612 - DNA, 25 bp, Homo sapien
cacatactcagtggttctatccttt

SEQ ID NO: 3219613 - DNA, 25 bp, Homo sapien
tcctagtcagaagaactattaaacc

SEQ ID NO: 3219614 - DNA, 25 bp, Homo sapien
tatgagaaggaatcttccacatact

SEQ ID NO: 3219615 - DNA, 25 bp, Homo sapien
caaaattggagataactaccagcag

SEQ ID NO: 3219616 - DNA, 25 bp, Homo sapien
taggaaaaatatggcattaatagtc

SEQ ID NO: 3219617 - DNA, 25 bp, Homo sapien
aggagatgttcatgacgtttctcat

SEQ ID NO: 3219618 - DNA, 25 bp, Homo sapien
taaggacagtagcacctctttttgc

SEQ ID NO: 3219619 - DNA, 25 bp, Homo sapien
gagatgttcatgacgtttctcatca

SEQ ID NO: 3219620 - DNA, 25 bp, Homo sapien
ctcatcaaataaggacagtagcacc

SEQ ID NO: 3219621 - DNA, 25 bp, Homo sapien
cctgaagtgctctgtatgacagccg

SEQ ID NO: 3219622 - DNA, 25 bp, Homo sapien
agtgctctgtatgacagccgtcttt

SEQ ID NO: 3219623 - DNA, 25 bp, Homo sapien
gctctgtatgacagccgtctttcac

SEQ ID NO: 3219624 - DNA, 25 bp, Homo sapien
gaagtgctctgtatgacagccgtct

SEQ ID NO: 3219625 - DNA, 25 bp, Homo sapien
catacaatagagtaggagtgagtca

SEQ ID NO: 3219626 - DNA, 25 bp, Homo sapien
cacagaagcatgacggcctgtaaat

SEQ ID NO: 3219627 - DNA, 25 bp, Homo sapien
gaaccctgaggatgggaccttcata

SEQ ID NO: 3219628 - DNA, 25 bp, Homo sapien
ttttctagttaggacacatatgcct

SEQ ID NO: 3219629 - DNA, 25 bp, Homo sapien
gtcagcaactgaaaaggcacctgga

SEQ ID NO: 3219630 - DNA, 25 bp, Homo sapien
ggtcatcagtgaatctatgtccata

SEQ ID NO: 3219631 - DNA, 25 bp, Homo sapien
gagaagtcagcaactgaaaaggcac

SEQ ID NO: 3219632 - DNA, 25 bp, Homo sapien
aggcacctggaacctaggctcttcc

SEQ ID NO: 3219633 - DNA, 25 bp, Homo sapien
gttgatcgcaggtagtgatagcctg

SEQ ID NO: 3219634 - DNA, 25 bp, Homo sapien
gtgatagcctgaggaaccaccggtg

SEQ ID NO: 3219635 - DNA, 25 bp, Homo sapien
caggtagtgatagcctgaggaacca

SEQ ID NO: 3219636 - DNA, 25 bp, Homo sapien
cctgaggaaccaccggtgccagctt

SEQ ID NO: 3219637 - DNA, 25 bp, Homo sapien
cagtttcccgatgtatccatttgtc

SEQ ID NO: 3219638 - DNA, 25 bp, Homo sapien
gtttcccgatgtatccatttgtcca

SEQ ID NO: 3219639 - DNA, 25 bp, Homo sapien
ttcccgatgtatccatttgtccatt

SEQ ID NO: 3219640 - DNA, 25 bp, Homo sapien
ttcagtttcccgatgtatccatttg

SEQ ID NO: 3219641 - DNA, 25 bp, Homo sapien
ttcatcttcggtatccagtgtcggg

SEQ ID NO: 3219642 - DNA, 25 bp, Homo sapien
aaatttgtgaatggttgggttcatc

SEQ ID NO: 3219643 - DNA, 25 bp, Homo sapien
gattcatcactgctgaagtaggagc

SEQ ID NO: 3219644 - DNA, 25 bp, Homo sapien
taggagctatcacagtattctgctg

SEQ ID NO: 3219645 - DNA, 25 bp, Homo sapien
taggaaaacaccctatgtacaatgt

SEQ ID NO: 3219646 - DNA, 25 bp, Homo sapien
aaaataggctgtgaaaccagtattc

SEQ ID NO: 3219647 - DNA, 25 bp, Homo sapien
gaattaaatcagagcatcgtggtgc

SEQ ID NO: 3219648 - DNA, 25 bp, Homo sapien
tagtcttgtcacaaacaagaggtaa

SEQ ID NO: 3219649 - DNA, 25 bp, Homo sapien
tacccctatacacaagaatggccaa

SEQ ID NO: 3219650 - DNA, 25 bp, Homo sapien
tctatcggaaggatttcaaacacca

SEQ ID NO: 3219651 - DNA, 25 bp, Homo sapien
tctagtagcattgcctgagagacaa

SEQ ID NO: 3219652 - DNA, 25 bp, Homo sapien
tattagcagccctctgagatggcgt

SEQ ID NO: 3219653 - DNA, 25 bp, Homo sapien
agtaagacatggacaagtagacttg

SEQ ID NO: 3219654 - DNA, 25 bp, Homo sapien
agtagacttggaggtgtagagttcc

SEQ ID NO: 3219655 - DNA, 25 bp, Homo sapien
taagacatggacaagtagacttgga

SEQ ID NO: 3219656 - DNA, 25 bp, Homo sapien
tagacttggaggtgtagagttccag

SEQ ID NO: 3219657 - DNA, 25 bp, Homo sapien
attattttctggtcagtgagagcag

SEQ ID NO: 3219658 - DNA, 25 bp, Homo sapien
cacttccagtgggatcatgggccgt

SEQ ID NO: 3219659 - DNA, 25 bp, Homo sapien
catgggccgtagtaaggatgttgct

SEQ ID NO: 3219660 - DNA, 25 bp, Homo sapien
tgagagcagctcttcgcagaatgaa

SEQ ID NO: 3219661 - DNA, 25 bp, Homo sapien
gaagatcatcttagtgtctccagaa

SEQ ID NO: 3219662 - DNA, 25 bp, Homo sapien
gaatggtgggaaaatatctagatgc

SEQ ID NO: 3219663 - DNA, 25 bp, Homo sapien
tagatgcctgtcagtctgcaagaag

SEQ ID NO: 3219664 - DNA, 25 bp, Homo sapien
ctttagcagaatggctagagacttc

SEQ ID NO: 3219665 - DNA, 25 bp, Homo sapien
gtttcactcaaggaagcaaatgcct

SEQ ID NO: 3219666 - DNA, 25 bp, Homo sapien
ccaagtttcactcaaggaagcaaat

SEQ ID NO: 3219667 - DNA, 25 bp, Homo sapien
tgtccaagtttcactcaaggaagca

SEQ ID NO: 3219668 - DNA, 25 bp, Homo sapien
tgtgttgtccaagtttcactcaagg

SEQ ID NO: 3219669 - DNA, 25 bp, Homo sapien
tgtcatagagaagattaggcctaaa

SEQ ID NO: 3219670 - DNA, 25 bp, Homo sapien
gtcatagagaagattaggcctaaag

SEQ ID NO: 3219671 - DNA, 25 bp, Homo sapien
tcaaaatgagctgctttttttctgt

SEQ ID NO: 3219672 - DNA, 25 bp, Homo sapien
tttttctgtgtgaaaatatttgcta

SEQ ID NO: 3219673 - DNA, 25 bp, Homo sapien
ttctgtgtgaaaatatttgctatat

SEQ ID NO: 3219674 - DNA, 25 bp, Homo sapien
caaaatgagctgctttttttctgtg

SEQ ID NO: 3219675 - DNA, 25 bp, Homo sapien
agtccataatacaggaggatctgga

SEQ ID NO: 3219676 - DNA, 25 bp, Homo sapien
tcctcaagtccataatacaggagga

SEQ ID NO: 3219677 - DNA, 25 bp, Homo sapien
tccataatacaggaggatctggaat

SEQ ID NO: 3219678 - DNA, 25 bp, Homo sapien
tcaagtccataatacaggaggatct

SEQ ID NO: 3219679 - DNA, 25 bp, Homo sapien
ctgctgaacactctttgacattttc

SEQ ID NO: 3219680 - DNA, 25 bp, Homo sapien
tgctgaacactctttgacattttcc

SEQ ID NO: 3219681 - DNA, 25 bp, Homo sapien
tctgctgaacactctttgacatttt

SEQ ID NO: 3219682 - DNA, 25 bp, Homo sapien
ttgctgtctccgttacaaggaatgc

SEQ ID NO: 3219683 - DNA, 25 bp, Homo sapien
ttttgctggcacatttagatagttt

SEQ ID NO: 3219684 - DNA, 25 bp, Homo sapien
attctcctctgctgatgagttgctg

SEQ ID NO: 3219685 - DNA, 25 bp, Homo sapien
tgatgagttgctgtctccgttacaa

SEQ ID NO: 3219686 - DNA, 25 bp, Homo sapien
agacatagtcatgggtttctcagag

SEQ ID NO: 3219687 - DNA, 25 bp, Homo sapien
cccagcaccattcagtgtgcaatgt

SEQ ID NO: 3219688 - DNA, 25 bp, Homo sapien
catatttagggtacaaatccggact

SEQ ID NO: 3219689 - DNA, 25 bp, Homo sapien
ttctgacagccactctttttcatca

SEQ ID NO: 3219690 - DNA, 25 bp, Homo sapien
cagtgttcttttgtaactttaacat

SEQ ID NO: 3219691 - DNA, 25 bp, Homo sapien
ttgtgacagtcctcactgattggtg

SEQ ID NO: 3219692 - DNA, 25 bp, Homo sapien
tgacagtcctcactgattggtgaca

SEQ ID NO: 3219693 - DNA, 25 bp, Homo sapien
gacagtcctcactgattggtgacat

SEQ ID NO: 3219694 - DNA, 25 bp, Homo sapien
tgtgacagtcctcactgattggtga

SEQ ID NO: 3219695 - DNA, 25 bp, Homo sapien
caagtatgcaggtcaagttgaagag

SEQ ID NO: 3219696 - DNA, 25 bp, Homo sapien
gagcccaagtatgcaggtcaagttg

SEQ ID NO: 3219697 - DNA, 25 bp, Homo sapien
tatgcaggtcaagttgaagagtcat

SEQ ID NO: 3219698 - DNA, 25 bp, Homo sapien
aagagagcccaagtatgcaggtcaa

SEQ ID NO: 3219699 - DNA, 25 bp, Homo sapien
gggaaatacaccaaatgctgtagtt

SEQ ID NO: 3219700 - DNA, 25 bp, Homo sapien
caaatgctgtagtttgagcatcaga

SEQ ID NO: 3219701 - DNA, 25 bp, Homo sapien
ttccacagatggaaacggatgagac

SEQ ID NO: 3219702 - DNA, 25 bp, Homo sapien
gacactgcttaatgtgggaaataca

SEQ ID NO: 3219703 - DNA, 25 bp, Homo sapien
tcaagtggttaccactggaccaatc

SEQ ID NO: 3219704 - DNA, 25 bp, Homo sapien
aagtggttaccactggaccaatcag

SEQ ID NO: 3219705 - DNA, 25 bp, Homo sapien
caagtggttaccactggaccaatca

SEQ ID NO: 3219706 - DNA, 25 bp, Homo sapien
cagggagtatatctgttgccaagac

SEQ ID NO: 3219707 - DNA, 25 bp, Homo sapien
tcagggagtatatctgttgccaaga

SEQ ID NO: 3219708 - DNA, 25 bp, Homo sapien
gtaatagcaccctctgatagctgac

SEQ ID NO: 3219709 - DNA, 25 bp, Homo sapien
agacttccatgaaagggtatgtaat

SEQ ID NO: 3219710 - DNA, 25 bp, Homo sapien
gaattacaagcaactccagaaaagc

SEQ ID NO: 3219711 - DNA, 25 bp, Homo sapien
cagaaaagcttgtgtcaacatgggt

SEQ ID NO: 3219712 - DNA, 25 bp, Homo sapien
tctgagaggttttgccatgagagca

SEQ ID NO: 3219713 - DNA, 25 bp, Homo sapien
gatggccactggtgtgttggcaaaa

SEQ ID NO: 3219714 - DNA, 25 bp, Homo sapien
gaggtaatagtgaataaaagtgctt

SEQ ID NO: 3219715 - DNA, 25 bp, Homo sapien
caattcctaagaagaaagtttcctg

SEQ ID NO: 3219716 - DNA, 25 bp, Homo sapien
tttataccttgggagaggcgcagtg

SEQ ID NO: 3219717 - DNA, 25 bp, Homo sapien
gaggcgcagtgtggccttcagaaaa

SEQ ID NO: 3219718 - DNA, 25 bp, Homo sapien
caaatgttctcaaatgcgattttta

SEQ ID NO: 3219719 - DNA, 25 bp, Homo sapien
tgtagctgtatgtcttcttcaccca

SEQ ID NO: 3219720 - DNA, 25 bp, Homo sapien
cattgcatgaaaaatccatgacttc

SEQ ID NO: 3219721 - DNA, 25 bp, Homo sapien
cccagtcagtactgtgtatgtagct

SEQ ID NO: 3219722 - DNA, 25 bp, Homo sapien
caccttttcccatggactttagcct

SEQ ID NO: 3219723 - DNA, 25 bp, Homo sapien
ccttttgatcttgaatctgccacct

SEQ ID NO: 3219724 - DNA, 25 bp, Homo sapien
gactggtgccctgaatttcatgtcc

SEQ ID NO: 3219725 - DNA, 25 bp, Homo sapien
agttttgattctacccagctgctca

SEQ ID NO: 3219726 - DNA, 25 bp, Homo sapien
ctggtgactggtgccctgaatttca

SEQ ID NO: 3219727 - DNA, 25 bp, Homo sapien
tcattgatattgataagagtcagtg

SEQ ID NO: 3219728 - DNA, 25 bp, Homo sapien
ttcctccatatcattgatattgata

SEQ ID NO: 3219729 - DNA, 25 bp, Homo sapien
tgatattgataagagtcagtgtcat

SEQ ID NO: 3219730 - DNA, 25 bp, Homo sapien
catatcattgatattgataagagtc

SEQ ID NO: 3219731 - DNA, 25 bp, Homo sapien
attgtggaagactttgttctttgtg

SEQ ID NO: 3219732 - DNA, 25 bp, Homo sapien
gccaggaactctgacagctgctgcc

SEQ ID NO: 3219733 - DNA, 25 bp, Homo sapien
tgttattcttaagagccaggaactc

SEQ ID NO: 3219734 - DNA, 25 bp, Homo sapien
ttgtggaagactttgttctttgtgt

SEQ ID NO: 3219735 - DNA, 25 bp, Homo sapien
gtgtttctcgactctcaaattgcaa

SEQ ID NO: 3219736 - DNA, 25 bp, Homo sapien
ttggctcatcagaatactcattcta

SEQ ID NO: 3219737 - DNA, 25 bp, Homo sapien
tggtgctgatacagttgactgaact

SEQ ID NO: 3219738 - DNA, 25 bp, Homo sapien
taaggtttatactgttgtcactgat

SEQ ID NO: 3219739 - DNA, 25 bp, Homo sapien
taactgaagtcagtgctcaacctcc

SEQ ID NO: 3219740 - DNA, 25 bp, Homo sapien
ctaactgaagtcagtgctcaacctc

SEQ ID NO: 3219741 - DNA, 25 bp, Homo sapien
gaagaagcattcaacacaactgtag

SEQ ID NO: 3219742 - DNA, 25 bp, Homo sapien
caaagtacatgcatccgtctggtcc

SEQ ID NO: 3219743 - DNA, 25 bp, Homo sapien
taatactgcaatgagaggctacctc

SEQ ID NO: 3219744 - DNA, 25 bp, Homo sapien
taaaggaaagatatcgcctgttctg

SEQ ID NO: 3219745 - DNA, 25 bp, Homo sapien
gaaataatgaactgtggcctgcagg

SEQ ID NO: 3219746 - DNA, 25 bp, Homo sapien
tcctaagaaataatgaactgtggcc

SEQ ID NO: 3219747 - DNA, 25 bp, Homo sapien
acaccactgtagacaacgcggccat

SEQ ID NO: 3219748 - DNA, 25 bp, Homo sapien
caggagtgattctttccgacaccac

SEQ ID NO: 3219749 - DNA, 25 bp, Homo sapien
gcgtttttggttggcccatgtcagc

SEQ ID NO: 3219750 - DNA, 25 bp, Homo sapien
gaagaggctctgaacgaaagaccat

SEQ ID NO: 3219751 - DNA, 25 bp, Homo sapien
tgaacgaaagaccatcctcagcgtt

SEQ ID NO: 3219752 - DNA, 25 bp, Homo sapien
ccatgtcagctctgtcagtagctat

SEQ ID NO: 3219753 - DNA, 25 bp, Homo sapien
cacagggctgtggagatgtcataag

SEQ ID NO: 3219754 - DNA, 25 bp, Homo sapien
agggctgtggagatgtcataagcag

SEQ ID NO: 3219755 - DNA, 25 bp, Homo sapien
gctgtggagatgtcataagcaggaa

SEQ ID NO: 3219756 - DNA, 25 bp, Homo sapien
ctgtggagatgtcataagcaggaac

SEQ ID NO: 3219757 - DNA, 25 bp, Homo sapien
cttcataaagtagttcttggcccct

SEQ ID NO: 3219758 - DNA, 25 bp, Homo sapien
tcttcataaagtagttcttggcccc

SEQ ID NO: 3219759 - DNA, 25 bp, Homo sapien
atcttcctcttcataaagtagttct

SEQ ID NO: 3219760 - DNA, 25 bp, Homo sapien
tcctcttcataaagtagttcttggc

SEQ ID NO: 3219761 - DNA, 25 bp, Homo sapien
gccttttccaccacattgtcttcac

SEQ ID NO: 3219762 - DNA, 25 bp, Homo sapien
ttttccaccacattgtcttcaccat

SEQ ID NO: 3219763 - DNA, 25 bp, Homo sapien
ttcagccttttccaccacattgtct

SEQ ID NO: 3219764 - DNA, 25 bp, Homo sapien
agccttttccaccacattgtcttca

SEQ ID NO: 3219765 - DNA, 25 bp, Homo sapien
tgcaccttagaatattcaacacttt

SEQ ID NO: 3219766 - DNA, 25 bp, Homo sapien
gccgccaacttctagcttgtaactg

SEQ ID NO: 3219767 - DNA, 25 bp, Homo sapien
gaccgaaatccttgacatgacttat

SEQ ID NO: 3219768 - DNA, 25 bp, Homo sapien
tctcttgcttggaaacattcatcgg

SEQ ID NO: 3219769 - DNA, 25 bp, Homo sapien
agtaatgattgcttccaaggcactg

SEQ ID NO: 3219770 - DNA, 25 bp, Homo sapien
caaggcactgttggtccttgtattt

SEQ ID NO: 3219771 - DNA, 25 bp, Homo sapien
ccaaggcactgttggtccttgtatt

SEQ ID NO: 3219772 - DNA, 25 bp, Homo sapien
aagtaatgattgcttccaaggcact

SEQ ID NO: 3219773 - DNA, 25 bp, Homo sapien
gaattggaattggacttggctgccc

SEQ ID NO: 3219774 - DNA, 25 bp, Homo sapien
ggaattggaattggacttggctgcc

SEQ ID NO: 3219775 - DNA, 25 bp, Homo sapien
tttcttgcttattggtctgcagatg

SEQ ID NO: 3219776 - DNA, 25 bp, Homo sapien
tgcagatgagcttggatagctctct

SEQ ID NO: 3219777 - DNA, 25 bp, Homo sapien
tcttgcttattggtctgcagatgag

SEQ ID NO: 3219778 - DNA, 25 bp, Homo sapien
cttggatagctctcttacatttaca

SEQ ID NO: 3219779 - DNA, 25 bp, Homo sapien
gcaatcatggctcaaagtaacccca

SEQ ID NO: 3219780 - DNA, 25 bp, Homo sapien
tatcatgccagtcactacactagag

SEQ ID NO: 3219781 - DNA, 25 bp, Homo sapien
tacccacatattgttagctgctgcc

SEQ ID NO: 3219782 - DNA, 25 bp, Homo sapien
cattaatttgtaagtcaaacctcct

SEQ ID NO: 3219783 - DNA, 25 bp, Homo sapien
tacagggtgaaaatcatggagatgt

SEQ ID NO: 3219784 - DNA, 25 bp, Homo sapien
catgacaactcataccatagggtag

SEQ ID NO: 3219785 - DNA, 25 bp, Homo sapien
aaatagaagattactggcaccacag

SEQ ID NO: 3219786 - DNA, 25 bp, Homo sapien
ttaaataccacttccagaaagagct

SEQ ID NO: 3219787 - DNA, 25 bp, Homo sapien
gttttaatacaatgggtctttcata

SEQ ID NO: 3219788 - DNA, 25 bp, Homo sapien
gaacttgatcacactaacaggcttt

SEQ ID NO: 3219789 - DNA, 25 bp, Homo sapien
tgtggaaatcgtaaagagttattgc

SEQ ID NO: 3219790 - DNA, 25 bp, Homo sapien
caggctttaaatatcctgtttatcc

SEQ ID NO: 3219791 - DNA, 25 bp, Homo sapien
atgccagaagaaagtttcttctcct

SEQ ID NO: 3219792 - DNA, 25 bp, Homo sapien
aatgccagaagaaagtttcttctcc

SEQ ID NO: 3219793 - DNA, 25 bp, Homo sapien
gaggtaatccacatacaaaacggta

SEQ ID NO: 3219794 - DNA, 25 bp, Homo sapien
aaggcaaaatggagccagcgtgtgc

SEQ ID NO: 3219795 - DNA, 25 bp, Homo sapien
caagataggaaatgtggtgaaggcc

SEQ ID NO: 3219796 - DNA, 25 bp, Homo sapien
tcagtctctgcttccgagttcaact

SEQ ID NO: 3219797 - DNA, 25 bp, Homo sapien
cagagctaaatctctcacatgactt

SEQ ID NO: 3219798 - DNA, 25 bp, Homo sapien
agagctaaatctctcacatgacttt

SEQ ID NO: 3219799 - DNA, 25 bp, Homo sapien
attgccgggctccacttgcggtccg

SEQ ID NO: 3219800 - DNA, 25 bp, Homo sapien
caaaacgtagcatccaggcatttgc

SEQ ID NO: 3219801 - DNA, 25 bp, Homo sapien
tttgcaactttccaattgccgggct

SEQ ID NO: 3219802 - DNA, 25 bp, Homo sapien
aagaagatgcaaaacgtagcatcca

SEQ ID NO: 3219803 - DNA, 25 bp, Homo sapien
aagtttccacgaatagaagtcctca

SEQ ID NO: 3219804 - DNA, 25 bp, Homo sapien
tgtgaagaaagtttccacgaataga

SEQ ID NO: 3219805 - DNA, 25 bp, Homo sapien
gaatagaagtcctcaacacttagaa

SEQ ID NO: 3219806 - DNA, 25 bp, Homo sapien
acatcatcacaatcattaatttgtg

SEQ ID NO: 3219807 - DNA, 25 bp, Homo sapien
gctggtggggaggtatcagtaaaag

SEQ ID NO: 3219808 - DNA, 25 bp, Homo sapien
tgctggtggggaggtatcagtaaaa

SEQ ID NO: 3219809 - DNA, 25 bp, Homo sapien
tcctcgatggtagcaaggtgaactc

SEQ ID NO: 3219810 - DNA, 25 bp, Homo sapien
ggtgaactcatgaggtgctggtcca

SEQ ID NO: 3219811 - DNA, 25 bp, Homo sapien
gaacacgagtgactatgcccattgt

SEQ ID NO: 3219812 - DNA, 25 bp, Homo sapien
tgctggtccagaaaagaacacgagt

SEQ ID NO: 3219813 - DNA, 25 bp, Homo sapien
tacaaaagctgtgttacaggctcag

SEQ ID NO: 3219814 - DNA, 25 bp, Homo sapien
tagaccctaacgaagctgacacagt

SEQ ID NO: 3219815 - DNA, 25 bp, Homo sapien
ggaagagttgacatgcatctcagta

SEQ ID NO: 3219816 - DNA, 25 bp, Homo sapien
tcatcaggcccataaacaatggaag

SEQ ID NO: 3219817 - DNA, 25 bp, Homo sapien
taattgtggaaagcttcatacagag

SEQ ID NO: 3219818 - DNA, 25 bp, Homo sapien
tcagtacttggacggcaatgcagag

SEQ ID NO: 3219819 - DNA, 25 bp, Homo sapien
aaagtctgtcttaagtctcacatgg

SEQ ID NO: 3219820 - DNA, 25 bp, Homo sapien
gaaccgatgtctatgaaccaatgtg

SEQ ID NO: 3219821 - DNA, 25 bp, Homo sapien
gaaattccagggctgaacactgcca

SEQ ID NO: 3219822 - DNA, 25 bp, Homo sapien
ttaatggaaattccagggctgaaca

SEQ ID NO: 3219823 - DNA, 25 bp, Homo sapien
gaacactgccatggcattcttttac

SEQ ID NO: 3219824 - DNA, 25 bp, Homo sapien
aattccagggctgaacactgccatg

SEQ ID NO: 3219825 - DNA, 25 bp, Homo sapien
gcaaagtttcagtgtgacatctgca

SEQ ID NO: 3219826 - DNA, 25 bp, Homo sapien
aaagtttcagtgtgacatctgcagg

SEQ ID NO: 3219827 - DNA, 25 bp, Homo sapien
ccttgggatgccaagtcttcagaaa

SEQ ID NO: 3219828 - DNA, 25 bp, Homo sapien
tccttgggatgccaagtcttcagaa

SEQ ID NO: 3219829 - DNA, 25 bp, Homo sapien
tttaacacgcagaacaaccatctgg

SEQ ID NO: 3219830 - DNA, 25 bp, Homo sapien
aagcaagggcttggatctcagacaa

SEQ ID NO: 3219831 - DNA, 25 bp, Homo sapien
gacaacgattacaaagcagactcgc

SEQ ID NO: 3219832 - DNA, 25 bp, Homo sapien
tcttgttgactcctttaccatggca

SEQ ID NO: 3219833 - DNA, 25 bp, Homo sapien
tattcagaatgtcttcacccccgag

SEQ ID NO: 3219834 - DNA, 25 bp, Homo sapien
aataaagtttggattcagacagaac

SEQ ID NO: 3219835 - DNA, 25 bp, Homo sapien
tgaccttcgggattagttgtcctaa

SEQ ID NO: 3219836 - DNA, 25 bp, Homo sapien
acagcgtatctgtataataacttac

SEQ ID NO: 3219837 - DNA, 25 bp, Homo sapien
tgatgcaaacccactgcatgcttgg

SEQ ID NO: 3219838 - DNA, 25 bp, Homo sapien
caagcatcagttgggcaaggcaatc

SEQ ID NO: 3219839 - DNA, 25 bp, Homo sapien
caggcttgctttgtgcttactcaaa

SEQ ID NO: 3219840 - DNA, 25 bp, Homo sapien
gatttcccaagctcccatttgtcag

SEQ ID NO: 3219841 - DNA, 25 bp, Homo sapien
cagataactattaaggagcaagctc

SEQ ID NO: 3219842 - DNA, 25 bp, Homo sapien
tctgggcaccatagtattcttgtcc

SEQ ID NO: 3219843 - DNA, 25 bp, Homo sapien
cagttataagacctgttctctaggt

SEQ ID NO: 3219844 - DNA, 25 bp, Homo sapien
tgcttagagtagcattaggcttcca

SEQ ID NO: 3219845 - DNA, 25 bp, Homo sapien
agtgataccaatcacagatccaatg

SEQ ID NO: 3219846 - DNA, 25 bp, Homo sapien
tgacagccactgctggttctatttc

SEQ ID NO: 3219847 - DNA, 25 bp, Homo sapien
aatgacagccactgctggttctatt

SEQ ID NO: 3219848 - DNA, 25 bp, Homo sapien
gtgataccaatcacagatccaatga

SEQ ID NO: 3219849 - DNA, 25 bp, Homo sapien
aggctggcgcttgccaaatttagag

SEQ ID NO: 3219850 - DNA, 25 bp, Homo sapien
taaaggctggcgcttgccaaattta

SEQ ID NO: 3219851 - DNA, 25 bp, Homo sapien
aaggctggcgcttgccaaatttaga

SEQ ID NO: 3219852 - DNA, 25 bp, Homo sapien
tgctaaaggctggcgcttgccaaat

SEQ ID NO: 3219853 - DNA, 25 bp, Homo sapien
tatgggttttagtacctagagcaag

SEQ ID NO: 3219854 - DNA, 25 bp, Homo sapien
gactgaggccaatggttgtgcttga

SEQ ID NO: 3219855 - DNA, 25 bp, Homo sapien
gagcaagtgctcttagactgaggcc

SEQ ID NO: 3219856 - DNA, 25 bp, Homo sapien
acttcagaatgtggtacgtagccat

SEQ ID NO: 3219857 - DNA, 25 bp, Homo sapien
ttggtccctcggtgcatccctgtct

SEQ ID NO: 3219858 - DNA, 25 bp, Homo sapien
ccctgtctccaggtgcattgaccat

SEQ ID NO: 3219859 - DNA, 25 bp, Homo sapien
cattgaccgtggtttggtccctcgg

SEQ ID NO: 3219860 - DNA, 25 bp, Homo sapien
ccctgtctccaggtgcattgaccgt

SEQ ID NO: 3219861 - DNA, 25 bp, Homo sapien
ggcgcattgaacgtggtttggttac

SEQ ID NO: 3219862 - DNA, 25 bp, Homo sapien
tccaggcgcattgaacgtggtttgg

SEQ ID NO: 3219863 - DNA, 25 bp, Homo sapien
tctccaggcgcattgaacgtggttt

SEQ ID NO: 3219864 - DNA, 25 bp, Homo sapien
tgtctccaggcgcattgaacgtggt

SEQ ID NO: 3219865 - DNA, 25 bp, Homo sapien
ccctgtctccaggtgcattgaccat

SEQ ID NO: 3219866 - DNA, 25 bp, Homo sapien
ccctgtctccaggtgcattgaccgt

SEQ ID NO: 3219867 - DNA, 25 bp, Homo sapien
ttggtccctcggtgcatccctgtct

SEQ ID NO: 3219868 - DNA, 25 bp, Homo sapien
tttggttaccctcggtgcatccctg

SEQ ID NO: 3219869 - DNA, 25 bp, Homo sapien
tccaggtgcattgaccgtggtttgg

SEQ ID NO: 3219870 - DNA, 25 bp, Homo sapien
ccaggtgcattgaccgtggtttggt

SEQ ID NO: 3219871 - DNA, 25 bp, Homo sapien
ccctgtctccaggtgcattgaccgt

SEQ ID NO: 3219872 - DNA, 25 bp, Homo sapien
gatatctgtttcaagcctttgtcct

SEQ ID NO: 3219873 - DNA, 25 bp, Homo sapien
tgtccttgagacatgggctgttttg

SEQ ID NO: 3219874 - DNA, 25 bp, Homo sapien
tgagacatgggctgttttgcccagt

SEQ ID NO: 3219875 - DNA, 25 bp, Homo sapien
cgttttgtgtatgatatctgtttca

SEQ ID NO: 3219876 - DNA, 25 bp, Homo sapien
cagagatgtctagtgtccagggcct

SEQ ID NO: 3219877 - DNA, 25 bp, Homo sapien
gagatgtctagtgtccagggccttc

SEQ ID NO: 3219878 - DNA, 25 bp, Homo sapien
caggcaagcacccttttcctgtgct

SEQ ID NO: 3219879 - DNA, 25 bp, Homo sapien
cctgtgctttgacacctgcagttct

SEQ ID NO: 3219880 - DNA, 25 bp, Homo sapien
gacattcagatccagccattactaa

SEQ ID NO: 3219881 - DNA, 25 bp, Homo sapien
taaacttgtgtcgtgctgataggac

SEQ ID NO: 3219882 - DNA, 25 bp, Homo sapien
gcttcctgataaagcgtgctgtgct

SEQ ID NO: 3219883 - DNA, 25 bp, Homo sapien
cacaattgttatagccagaggaaca

SEQ ID NO: 3219884 - DNA, 25 bp, Homo sapien
cacctgattccgttgccttgcttaa

SEQ ID NO: 3219885 - DNA, 25 bp, Homo sapien
catgtacgtattccactagctgggt

SEQ ID NO: 3219886 - DNA, 25 bp, Homo sapien
tcagttctttcgatacggcttaggg

SEQ ID NO: 3219887 - DNA, 25 bp, Homo sapien
gatcaccagctagtttcagagttac

SEQ ID NO: 3219888 - DNA, 25 bp, Homo sapien
ttagagaacgtatgcgttatctcca

SEQ ID NO: 3219889 - DNA, 25 bp, Homo sapien
gcttcaaggacctttcatcttcagg

SEQ ID NO: 3219890 - DNA, 25 bp, Homo sapien
gaacgtatgcgttatctccatcctt

SEQ ID NO: 3219891 - DNA, 25 bp, Homo sapien
ccatccttaatctcagttgtttgct

SEQ ID NO: 3219892 - DNA, 25 bp, Homo sapien
aaagccagtcatagacattcgttga

SEQ ID NO: 3219893 - DNA, 25 bp, Homo sapien
agcaccatgaggagtgtgactgtgt

SEQ ID NO: 3219894 - DNA, 25 bp, Homo sapien
ttgagaccaaagaccggtgtcaggg

SEQ ID NO: 3219895 - DNA, 25 bp, Homo sapien
aaatcactcaccgacgtggccctgg

SEQ ID NO: 3219896 - DNA, 25 bp, Homo sapien
ggtatcacaactaagttcacttggg

SEQ ID NO: 3219897 - DNA, 25 bp, Homo sapien
tatgcgtttgaagccttagcagtag

SEQ ID NO: 3219898 - DNA, 25 bp, Homo sapien
tagcagtaggcagcataaatttcaa

SEQ ID NO: 3219899 - DNA, 25 bp, Homo sapien
gaaaactgtggactgcataaatgct

SEQ ID NO: 3219900 - DNA, 25 bp, Homo sapien
gctagcctgcattcaaaagcatcgg

SEQ ID NO: 3219901 - DNA, 25 bp, Homo sapien
tatgcctgaaaatgtacgcctggtg

SEQ ID NO: 3219902 - DNA, 25 bp, Homo sapien
cttagaaagaccaccctcagattac

SEQ ID NO: 3219903 - DNA, 25 bp, Homo sapien
aaagcatcggaagctgaacagatct

SEQ ID NO: 3219904 - DNA, 25 bp, Homo sapien
agtatacttggcttctcacaaaggc

SEQ ID NO: 3219905 - DNA, 25 bp, Homo sapien
cagattctcgttttggcaagagaaa

SEQ ID NO: 3219906 - DNA, 25 bp, Homo sapien
tcttctatgatgcagtatacttggc

SEQ ID NO: 3219907 - DNA, 25 bp, Homo sapien
tgtgattcataatagcagattctcg

SEQ ID NO: 3219908 - DNA, 25 bp, Homo sapien
ggtttgagccttaaaatgtattgct

SEQ ID NO: 3219909 - DNA, 25 bp, Homo sapien
ggctcatacgcttttcatactggac

SEQ ID NO: 3219910 - DNA, 25 bp, Homo sapien
caggaagacttctgctctccggggt

SEQ ID NO: 3219911 - DNA, 25 bp, Homo sapien
agttgcaggtttgagccttaaaatg

SEQ ID NO: 3219912 - DNA, 25 bp, Homo sapien
gagtgccttctgacaggataaaatg

SEQ ID NO: 3219913 - DNA, 25 bp, Homo sapien
tgcattgtcagcagtaggagagtta

SEQ ID NO: 3219914 - DNA, 25 bp, Homo sapien
cattgtcagcagtaggagagttagt

SEQ ID NO: 3219915 - DNA, 25 bp, Homo sapien
gtgagtgccttctgacaggataaaa

SEQ ID NO: 3219916 - DNA, 25 bp, Homo sapien
tcagaattttccttgtagggttgga

SEQ ID NO: 3219917 - DNA, 25 bp, Homo sapien
cacagaggtattcgtagccataaag

SEQ ID NO: 3219918 - DNA, 25 bp, Homo sapien
tttgctgatgtgtaatgcccatttc

SEQ ID NO: 3219919 - DNA, 25 bp, Homo sapien
tccctccagaacaactactgaatat

SEQ ID NO: 3219920 - DNA, 25 bp, Homo sapien
aatgtccattctgttatagaagaga

SEQ ID NO: 3219921 - DNA, 25 bp, Homo sapien
tgtccattctgttatagaagagatg

SEQ ID NO: 3219922 - DNA, 25 bp, Homo sapien
gttaaatgtccattctgttatagaa

SEQ ID NO: 3219923 - DNA, 25 bp, Homo sapien
taaatgtccattctgttatagaaga

SEQ ID NO: 3219924 - DNA, 25 bp, Homo sapien
atcaatctatgcctgtggtttggac

SEQ ID NO: 3219925 - DNA, 25 bp, Homo sapien
tactgtttactgttgccagagaagg

SEQ ID NO: 3219926 - DNA, 25 bp, Homo sapien
tatgcctgtggtttggaccttcctc

SEQ ID NO: 3219927 - DNA, 25 bp, Homo sapien
agggtactgtttactgttgccagag

SEQ ID NO: 3219928 - DNA, 25 bp, Homo sapien
ctgcactgcaggcttaacagctgcc

SEQ ID NO: 3219929 - DNA, 25 bp, Homo sapien
gcactgcaggcttaacagctgccat

SEQ ID NO: 3219930 - DNA, 25 bp, Homo sapien
tcctgcactgcaggcttaacagctg

SEQ ID NO: 3219931 - DNA, 25 bp, Homo sapien
ctcctgcactgcaggcttaacagct

SEQ ID NO: 3219932 - DNA, 25 bp, Homo sapien
tctaatggctcaacttccacatgag

SEQ ID NO: 3219933 - DNA, 25 bp, Homo sapien
tactggcagataagatgtgtggact

SEQ ID NO: 3219934 - DNA, 25 bp, Homo sapien
tgtggactttcttctaatggctcaa

SEQ ID NO: 3219935 - DNA, 25 bp, Homo sapien
acatctggtgagactaggtttttac

SEQ ID NO: 3219936 - DNA, 25 bp, Homo sapien
gaaactttatatgcacactcaggtc

SEQ ID NO: 3219937 - DNA, 25 bp, Homo sapien
gctgtcattcttaggtagaatctcc

SEQ ID NO: 3219938 - DNA, 25 bp, Homo sapien
catctcagagtaattgattcctcag

SEQ ID NO: 3219939 - DNA, 25 bp, Homo sapien
ctttgtgtactctattaacttctct

SEQ ID NO: 3219940 - DNA, 25 bp, Homo sapien
taaggagaaatccaagtaaccaaga

SEQ ID NO: 3219941 - DNA, 25 bp, Homo sapien
tacctgtttcagagtgtattggaag

SEQ ID NO: 3219942 - DNA, 25 bp, Homo sapien
gataacacttatctcaccaggtaat

SEQ ID NO: 3219943 - DNA, 25 bp, Homo sapien
gatatataaaccctgcccctgcagt

SEQ ID NO: 3219944 - DNA, 25 bp, Homo sapien
gcttgatttggaatggagtcggtaa

SEQ ID NO: 3219945 - DNA, 25 bp, Homo sapien
taccacagtgcctcgaataatcctt

SEQ ID NO: 3219946 - DNA, 25 bp, Homo sapien
tcctgattgcacattcctagaatat

SEQ ID NO: 3219947 - DNA, 25 bp, Homo sapien
ttttctagcaccatagtgtctgcac

SEQ ID NO: 3219948 - DNA, 25 bp, Homo sapien
cctacatcgacgatccgttgtttag

SEQ ID NO: 3219949 - DNA, 25 bp, Homo sapien
ccaatggttctttgaagctagcctt

SEQ ID NO: 3219950 - DNA, 25 bp, Homo sapien
caagagagtctacttgtccaatggt

SEQ ID NO: 3219951 - DNA, 25 bp, Homo sapien
tcaccaatggtgttagtccctaaca

SEQ ID NO: 3219952 - DNA, 25 bp, Homo sapien
aattttgcagcaattcacttacgtc

SEQ ID NO: 3219953 - DNA, 25 bp, Homo sapien
tctaagcctttagcaagtagtaacc

SEQ ID NO: 3219954 - DNA, 25 bp, Homo sapien
tgtggcagtttcctaaacgaagaca

SEQ ID NO: 3219955 - DNA, 25 bp, Homo sapien
tctctgtagcatgtcatgccatttt

SEQ ID NO: 3219956 - DNA, 25 bp, Homo sapien
ctccattattggtcacagtcagatc

SEQ ID NO: 3219957 - DNA, 25 bp, Homo sapien
gattctgtttagaacagtcactagc

SEQ ID NO: 3219958 - DNA, 25 bp, Homo sapien
cctgtgaacttcagacagtaggcct

SEQ ID NO: 3219959 - DNA, 25 bp, Homo sapien
gaaatgggaagcttctccacaacca

SEQ ID NO: 3219960 - DNA, 25 bp, Homo sapien
cagtcaaatgaaagtggcttaagta

SEQ ID NO: 3219961 - DNA, 25 bp, Homo sapien
ttgattcagtcaaatgaaagtggct

SEQ ID NO: 3219962 - DNA, 25 bp, Homo sapien
tattttttagcaccattaatgttaa

SEQ ID NO: 3219963 - DNA, 25 bp, Homo sapien
gtggcttaagtattttttagcacca

SEQ ID NO: 3219964 - DNA, 25 bp, Homo sapien
ttattcattagcgagtatcttccgt

SEQ ID NO: 3219965 - DNA, 25 bp, Homo sapien
gagtatcttccgtttgtcgattgag

SEQ ID NO: 3219966 - DNA, 25 bp, Homo sapien
tcgattgagttgctcataggaatct

SEQ ID NO: 3219967 - DNA, 25 bp, Homo sapien
tccgtttgtcgattgagttgctcat

SEQ ID NO: 3219968 - DNA, 25 bp, Homo sapien
ggagaggcacttcatatcccacttc

SEQ ID NO: 3219969 - DNA, 25 bp, Homo sapien
gccattagagaggtggaacatgagg

SEQ ID NO: 3219970 - DNA, 25 bp, Homo sapien
tagctgtgtaatgcagaggagaggc

SEQ ID NO: 3219971 - DNA, 25 bp, Homo sapien
gggccattagagaggtggaacatga

SEQ ID NO: 3219972 - DNA, 25 bp, Homo sapien
tctctggatgtctggaatcgcattc

SEQ ID NO: 3219973 - DNA, 25 bp, Homo sapien
gttctctggatgtctggaatcgcat

SEQ ID NO: 3219974 - DNA, 25 bp, Homo sapien
tctggatgtctggaatcgcattctc

SEQ ID NO: 3219975 - DNA, 25 bp, Homo sapien
tggatgtctggaatcgcattctctt

SEQ ID NO: 3219976 - DNA, 25 bp, Homo sapien
gtttaagaggatagttaacatagca

SEQ ID NO: 3219977 - DNA, 25 bp, Homo sapien
ccaaagtttcatgaagcttgaacat

SEQ ID NO: 3219978 - DNA, 25 bp, Homo sapien
tccacttcagtttaagaggatagtt

SEQ ID NO: 3219979 - DNA, 25 bp, Homo sapien
catagcaaatgtctgggtggtccaa

SEQ ID NO: 3219980 - DNA, 25 bp, Homo sapien
tctagtgtttcttctatcctacact

SEQ ID NO: 3219981 - DNA, 25 bp, Homo sapien
tagtgtttcttctatcctacactct

SEQ ID NO: 3219982 - DNA, 25 bp, Homo sapien
tctctagtgtttcttctatcctaca

SEQ ID NO: 3219983 - DNA, 25 bp, Homo sapien
cttctctagtgtttcttctatccta

SEQ ID NO: 3219984 - DNA, 25 bp, Homo sapien
tgtaggaatgtgtggtgtttcaaaa

SEQ ID NO: 3219985 - DNA, 25 bp, Homo sapien
tccccggtagtggtgaattatatga

SEQ ID NO: 3219986 - DNA, 25 bp, Homo sapien
tatgagaccacgtccatctaaggaa

SEQ ID NO: 3219987 - DNA, 25 bp, Homo sapien
gcttgtttaactagcctgtggttct

SEQ ID NO: 3219988 - DNA, 25 bp, Homo sapien
aatccaacctgagtagtaaattcca

SEQ ID NO: 3219989 - DNA, 25 bp, Homo sapien
caacaaggaacagaacggtgagtct

SEQ ID NO: 3219990 - DNA, 25 bp, Homo sapien
aggcggaatccaacctgagtagtaa

SEQ ID NO: 3219991 - DNA, 25 bp, Homo sapien
cagccaaatgagcctcttcgggctt

SEQ ID NO: 3219992 - DNA, 25 bp, Homo sapien
aaagagactcgggagtcgctgcttc

SEQ ID NO: 3219993 - DNA, 25 bp, Homo sapien
agactcgggagtcgctgcttccaaa

SEQ ID NO: 3219994 - DNA, 25 bp, Homo sapien
tgcttccaaagtgcccgccgtgagt

SEQ ID NO: 3219995 - DNA, 25 bp, Homo sapien
ggagtcgctgcttccaaagtgcccg

SEQ ID NO: 3219996 - DNA, 25 bp, Homo sapien
tgccagagcaggctcggcgcttcca

SEQ ID NO: 3219997 - DNA, 25 bp, Homo sapien
ctgctgccagagcaggctcggcgct

SEQ ID NO: 3219998 - DNA, 25 bp, Homo sapien
gctgccagagcaggctcggcgcttc

SEQ ID NO: 3219999 - DNA, 25 bp, Homo sapien
cctgcgattctctgctgccagagca

SEQ ID NO: 3220000 - DNA, 25 bp, Homo sapien
agcggccgaattgccccaggctttg

SEQ ID NO: 3220001 - DNA, 25 bp, Homo sapien
gtgaactttggtcgcggaaaactca

SEQ ID NO: 3220002 - DNA, 25 bp, Homo sapien
gaaaactcaagccaggtgccggaat

SEQ ID NO: 3220003 - DNA, 25 bp, Homo sapien
tgccggaatccgtgctgcggcgctc

SEQ ID NO: 3220004 - DNA, 25 bp, Homo sapien
tgggccaccggggtcttgcccacag

SEQ ID NO: 3220005 - DNA, 25 bp, Homo sapien
cttggccgcgttcctctcctgggcc

SEQ ID NO: 3220006 - DNA, 25 bp, Homo sapien
gaggtgttccgtggaagggaaagca

SEQ ID NO: 3220007 - DNA, 25 bp, Homo sapien
caccggggtcttgcccacagcgagt

SEQ ID NO: 3220008 - DNA, 25 bp, Homo sapien
gacatatttagcagacatggaacca

SEQ ID NO: 3220009 - DNA, 25 bp, Homo sapien
cacagacatatttagcagacatgga

SEQ ID NO: 3220010 - DNA, 25 bp, Homo sapien
cacaaagaaagcacgttggatcctg

SEQ ID NO: 3220011 - DNA, 25 bp, Homo sapien
aagcacgttggatcctgtcacagac

SEQ ID NO: 3220012 - DNA, 25 bp, Homo sapien
ttaattagttgcaaatactactgca

SEQ ID NO: 3220013 - DNA, 25 bp, Homo sapien
aattaattagttgcaaatactactg

SEQ ID NO: 3220014 - DNA, 25 bp, Homo sapien
tgtaattaattagttgcaaatacta

SEQ ID NO: 3220015 - DNA, 25 bp, Homo sapien
taattagttgcaaatactactgcac

SEQ ID NO: 3220016 - DNA, 25 bp, Homo sapien
tgcccacaatcgccgggcgagatcg

SEQ ID NO: 3220017 - DNA, 25 bp, Homo sapien
ctgctaagggtgcagcgggcgccga

SEQ ID NO: 3220018 - DNA, 25 bp, Homo sapien
gggcgagatcgtggaggctccgggc

SEQ ID NO: 3220019 - DNA, 25 bp, Homo sapien
gccaccgccgagctcggctgacgcg

SEQ ID NO: 3220020 - DNA, 25 bp, Homo sapien
tgcatctctccacccggagcgtctc

SEQ ID NO: 3220021 - DNA, 25 bp, Homo sapien
cctctcccgcgcagggcagcgcgcg

SEQ ID NO: 3220022 - DNA, 25 bp, Homo sapien
ctctccacccggagcgtctccgcgg

SEQ ID NO: 3220023 - DNA, 25 bp, Homo sapien
cccgcgcagggcagcgcgcgtcctc

SEQ ID NO: 3220024 - DNA, 25 bp, Homo sapien
ccaatctttcaagggggacagctgc

SEQ ID NO: 3220025 - DNA, 25 bp, Homo sapien
ctgcattgactggaggatcctcata

SEQ ID NO: 3220026 - DNA, 25 bp, Homo sapien
tcctggccaaccttgcgtttcctaa

SEQ ID NO: 3220027 - DNA, 25 bp, Homo sapien
cataaacaaaacaacgcaaggagcc

SEQ ID NO: 3220028 - DNA, 25 bp, Homo sapien
gaaaacttgaatttcagaagatcga

SEQ ID NO: 3220029 - DNA, 25 bp, Homo sapien
cttgaaaacttgaatttcagaagat

SEQ ID NO: 3220030 - DNA, 25 bp, Homo sapien
tgaaaacttgaatttcagaagatcg

SEQ ID NO: 3220031 - DNA, 25 bp, Homo sapien
aaaacttgaatttcagaagatcgat

SEQ ID NO: 3220032 - DNA, 25 bp, Homo sapien
ttttccttagaataggcttcttcca

SEQ ID NO: 3220033 - DNA, 25 bp, Homo sapien
aaggcagttgtcaataaaaacttca

SEQ ID NO: 3220034 - DNA, 25 bp, Homo sapien
ctgtctctgtaacagatggatatac

SEQ ID NO: 3220035 - DNA, 25 bp, Homo sapien
tggatatacattccgatatgaaaag

SEQ ID NO: 3220036 - DNA, 25 bp, Homo sapien
taaaacacgcaataacatttctcca

SEQ ID NO: 3220037 - DNA, 25 bp, Homo sapien
tctccatataagaatataagacatg

SEQ ID NO: 3220038 - DNA, 25 bp, Homo sapien
tgtcattcaatggtacaatctctct

SEQ ID NO: 3220039 - DNA, 25 bp, Homo sapien
aatgctgtcattcaatggtacaatc

SEQ ID NO: 3220040 - DNA, 25 bp, Homo sapien
tgctgtcattcaatggtacaatctc

SEQ ID NO: 3220041 - DNA, 25 bp, Homo sapien
tgaaaatgctgtcattcaatggtac

SEQ ID NO: 3220042 - DNA, 25 bp, Homo sapien
cataactgaccaataacctgttcaa

SEQ ID NO: 3220043 - DNA, 25 bp, Homo sapien
gaagtttggtcttatcctgggatca

SEQ ID NO: 3220044 - DNA, 25 bp, Homo sapien
ttggcaggtactcgggcaaggtcct

SEQ ID NO: 3220045 - DNA, 25 bp, Homo sapien
caagatattgctagtggagttggca

SEQ ID NO: 3220046 - DNA, 25 bp, Homo sapien
gaatggatccaaaactgttaataaa

SEQ ID NO: 3220047 - DNA, 25 bp, Homo sapien
ttgactactacatcaacaggaatgc

SEQ ID NO: 3220048 - DNA, 25 bp, Homo sapien
cttgaatggatccaaaactgttaat

SEQ ID NO: 3220049 - DNA, 25 bp, Homo sapien
aaaatgttgactactacatcaacag

SEQ ID NO: 3220050 - DNA, 25 bp, Homo sapien
tccaacatcaaccaagatcacaaca

SEQ ID NO: 3220051 - DNA, 25 bp, Homo sapien
ctgtgtcactaaaggagagctccat

SEQ ID NO: 3220052 - DNA, 25 bp, Homo sapien
cacaacaactgtgtcactaaaggag

SEQ ID NO: 3220053 - DNA, 25 bp, Homo sapien
aagggttacaatgattagtggcaca

SEQ ID NO: 3220054 - DNA, 25 bp, Homo sapien
ttccatttttgtctcaggaagatgt

SEQ ID NO: 3220055 - DNA, 25 bp, Homo sapien
gggtcattccatttttgtctcagga

SEQ ID NO: 3220056 - DNA, 25 bp, Homo sapien
gggagcttcagcctggggtcattcc

SEQ ID NO: 3220057 - DNA, 25 bp, Homo sapien
catttttgtctcaggaagatgttaa

SEQ ID NO: 3220058 - DNA, 25 bp, Homo sapien
caaggacatctccatcacgaaaaat

SEQ ID NO: 3220059 - DNA, 25 bp, Homo sapien
tgtcagtgcatctgaacccctaaaa

SEQ ID NO: 3220060 - DNA, 25 bp, Homo sapien
taaatcaggtttccataaacacttg

SEQ ID NO: 3220061 - DNA, 25 bp, Homo sapien
ccataaacacttgtacattgttgga

SEQ ID NO: 3220062 - DNA, 25 bp, Homo sapien
cttgcaacgttgtgtatccatggga

SEQ ID NO: 3220063 - DNA, 25 bp, Homo sapien
tccatgggaaacaatgtcaagtcca

SEQ ID NO: 3220064 - DNA, 25 bp, Homo sapien
agggcatgaaagagtaatagataac

SEQ ID NO: 3220065 - DNA, 25 bp, Homo sapien
aatgtcaagtccaaagggcatgaaa

SEQ ID NO: 3220066 - DNA, 25 bp, Homo sapien
ttttctaattgcacaggatctcctg

SEQ ID NO: 3220067 - DNA, 25 bp, Homo sapien
ttgtacagttaccatattcaatatc

SEQ ID NO: 3220068 - DNA, 25 bp, Homo sapien
ccagataaatcgtaaatcatcagtt

SEQ ID NO: 3220069 - DNA, 25 bp, Homo sapien
cctttttgatatcaaattgaggcaa

SEQ ID NO: 3220070 - DNA, 25 bp, Homo sapien
cagggtgaagatgacttccacgcat

SEQ ID NO: 3220071 - DNA, 25 bp, Homo sapien
gtaaaagccgacctgcctcctcagg

SEQ ID NO: 3220072 - DNA, 25 bp, Homo sapien
ggcgtagacccccatcatgtaaaag

SEQ ID NO: 3220073 - DNA, 25 bp, Homo sapien
gcgtccgggttgatccagaaggaaa

SEQ ID NO: 3220074 - DNA, 25 bp, Homo sapien
acttgtcacagctagtaaatccaga

SEQ ID NO: 3220075 - DNA, 25 bp, Homo sapien
tccagaactggctttcaaacccaag

SEQ ID NO: 3220076 - DNA, 25 bp, Homo sapien
tcatccctattgacatttcagcaga

SEQ ID NO: 3220077 - DNA, 25 bp, Homo sapien
aaatatgtagaactgctttgcaaac

SEQ ID NO: 3220078 - DNA, 25 bp, Homo sapien
tcagcggcaagggttgtgcactcag

SEQ ID NO: 3220079 - DNA, 25 bp, Homo sapien
aagtgctaatatgaacaggagtccc

SEQ ID NO: 3220080 - DNA, 25 bp, Homo sapien
gcaataagccaaacatcaagagcct

SEQ ID NO: 3220081 - DNA, 25 bp, Homo sapien
ggacaactgcatactccaccaggga

SEQ ID NO: 3220082 - DNA, 25 bp, Homo sapien
taaagatcaattcgctttgctgctg

SEQ ID NO: 3220083 - DNA, 25 bp, Homo sapien
tgttggaataacaggtttcgcaggg

SEQ ID NO: 3220084 - DNA, 25 bp, Homo sapien
gatagttcaaaatctcttggtaagc

SEQ ID NO: 3220085 - DNA, 25 bp, Homo sapien
tgagatttcccaagtccgttgttaa

SEQ ID NO: 3220086 - DNA, 25 bp, Homo sapien
tagcaggattcagcgtgcatatcat

SEQ ID NO: 3220087 - DNA, 25 bp, Homo sapien
tcaaaagttctcacagattggcatt

SEQ ID NO: 3220088 - DNA, 25 bp, Homo sapien
tatatacatcgttattagagcacag

SEQ ID NO: 3220089 - DNA, 25 bp, Homo sapien
cactaactgaagagaattgtatgga

SEQ ID NO: 3220090 - DNA, 25 bp, Homo sapien
tgtcagaattcagtatacagttaca

SEQ ID NO: 3220091 - DNA, 25 bp, Homo sapien
gctcactgtgtattactatctgata

SEQ ID NO: 3220092 - DNA, 25 bp, Homo sapien
tgtgtaatatgtaccaacaaatgaa

SEQ ID NO: 3220093 - DNA, 25 bp, Homo sapien
cacaagcacactttaaaacgagctg

SEQ ID NO: 3220094 - DNA, 25 bp, Homo sapien
tagtgcttacttttggattggaaca

SEQ ID NO: 3220095 - DNA, 25 bp, Homo sapien
aaagacaaaggtgcactggatgtga

SEQ ID NO: 3220096 - DNA, 25 bp, Homo sapien
tgaatttgccatacaaactcgtagc

SEQ ID NO: 3220097 - DNA, 25 bp, Homo sapien
tgtgatattaagaaatggtggtctc

SEQ ID NO: 3220098 - DNA, 25 bp, Homo sapien
cggatatcacctttacaactagagg

SEQ ID NO: 3220099 - DNA, 25 bp, Homo sapien
catcaacagggttaactgtagcact

SEQ ID NO: 3220100 - DNA, 25 bp, Homo sapien
ctgtagcactgtaaaattatccgga

SEQ ID NO: 3220101 - DNA, 25 bp, Homo sapien
tccattaaaatgctcttgccctggg

SEQ ID NO: 3220102 - DNA, 25 bp, Homo sapien
agcaggaacagtgccagcatatgtg

SEQ ID NO: 3220103 - DNA, 25 bp, Homo sapien
ggagaacatcgtagagaactctgaa

SEQ ID NO: 3220104 - DNA, 25 bp, Homo sapien
taaggatgatctgtaacttttggag

SEQ ID NO: 3220105 - DNA, 25 bp, Homo sapien
cagtgccagcatatgtgcaatgcac

SEQ ID NO: 3220106 - DNA, 25 bp, Homo sapien
cctctttgacaggtccgctctacag

SEQ ID NO: 3220107 - DNA, 25 bp, Homo sapien
gctcagacaccaagaaagcagcgga

SEQ ID NO: 3220108 - DNA, 25 bp, Homo sapien
acaggtccgctctacagctcagaca

SEQ ID NO: 3220109 - DNA, 25 bp, Homo sapien
tcagacaccaagaaagcagcggata

SEQ ID NO: 3220110 - DNA, 25 bp, Homo sapien
gcagacttccagtgcatggtattct

SEQ ID NO: 3220111 - DNA, 25 bp, Homo sapien
ggacaagattgaggtcctcatgtac

SEQ ID NO: 3220112 - DNA, 25 bp, Homo sapien
ctgccgccaagtaaacacaacgctg

SEQ ID NO: 3220113 - DNA, 25 bp, Homo sapien
acgctgcgcccctttagtgtcttca

SEQ ID NO: 3220114 - DNA, 25 bp, Homo sapien
ggcaaagaaaagcgccggcagcagc

SEQ ID NO: 3220115 - DNA, 25 bp, Homo sapien
aagagcttcccgaggtgtccagcgt

SEQ ID NO: 3220116 - DNA, 25 bp, Homo sapien
ccacttcctggtgcgaccgtcagtg

SEQ ID NO: 3220117 - DNA, 25 bp, Homo sapien
ctcgcatccgggtcatcatgaagag

SEQ ID NO: 3220118 - DNA, 25 bp, Homo sapien
aagcaccgtggaggaaatattccaa

SEQ ID NO: 3220119 - DNA, 25 bp, Homo sapien
caagcaagcaaagcaccgtggagga

SEQ ID NO: 3220120 - DNA, 25 bp, Homo sapien
gcaagcaaagcaccgtggaggaaat

SEQ ID NO: 3220121 - DNA, 25 bp, Homo sapien
gcaaagcaccgtggaggaaatattc

SEQ ID NO: 3220122 - DNA, 25 bp, Homo sapien
tgtgtagaagccgaattgctaattg

SEQ ID NO: 3220123 - DNA, 25 bp, Homo sapien
aagccgaattgctaattgttggcgg

SEQ ID NO: 3220124 - DNA, 25 bp, Homo sapien
ttgttggcggcgaagcgtcctctca

SEQ ID NO: 3220125 - DNA, 25 bp, Homo sapien
ttgctaattgttggcggcgaagcgt

SEQ ID NO: 3220126 - DNA, 25 bp, Homo sapien
gctgcggagatgctccaacctggac

SEQ ID NO: 3220127 - DNA, 25 bp, Homo sapien
gctgctgcggagatgctccaacctg

SEQ ID NO: 3220128 - DNA, 25 bp, Homo sapien
gcagctgctgcggagatgctccaac

SEQ ID NO: 3220129 - DNA, 25 bp, Homo sapien
tgttgcagctgctgcggagatgctc

SEQ ID NO: 3220130 - DNA, 25 bp, Homo sapien
ctctctcactcacgcgcgcgcgcac

SEQ ID NO: 3220131 - DNA, 25 bp, Homo sapien
acacacacaggcaagtcacagagag

SEQ ID NO: 3220132 - DNA, 25 bp, Homo sapien
acacacaggcaagtcacagagaggg

SEQ ID NO: 3220133 - DNA, 25 bp, Homo sapien
gaggggcaggcagtcccgggcgcgc

SEQ ID NO: 3220134 - DNA, 25 bp, Homo sapien
gtagagcatccacaatatacccctt

SEQ ID NO: 3220135 - DNA, 25 bp, Homo sapien
cagcaatttagcaccaagctgctaa

SEQ ID NO: 3220136 - DNA, 25 bp, Homo sapien
ggtcccagtgtctcggaatattcag

SEQ ID NO: 3220137 - DNA, 25 bp, Homo sapien
cagaagtccggaggactggctgaat

SEQ ID NO: 3220138 - DNA, 25 bp, Homo sapien
cagaaatatgcataatcttttgcat

SEQ ID NO: 3220139 - DNA, 25 bp, Homo sapien
ctacggactcggacagcgggggtgg

SEQ ID NO: 3220140 - DNA, 25 bp, Homo sapien
acagcgggggtggaatatccaaaag

SEQ ID NO: 3220141 - DNA, 25 bp, Homo sapien
cggacagcgggggtggaatatccaa

SEQ ID NO: 3220142 - DNA, 25 bp, Homo sapien
tacggactcggacagcgggggtgga

SEQ ID NO: 3220143 - DNA, 25 bp, Homo sapien
tgtcagtctgaactccgaagtggaa

SEQ ID NO: 3220144 - DNA, 25 bp, Homo sapien
tagtgactgcgaagctgtttgccac

SEQ ID NO: 3220145 - DNA, 25 bp, Homo sapien
aatgcactgtattcttgatcggcgc

SEQ ID NO: 3220146 - DNA, 25 bp, Homo sapien
tgatcggcgcccctaggaaatagcc

SEQ ID NO: 3220147 - DNA, 25 bp, Homo sapien
ggccagatcccacggcttcccagtc

SEQ ID NO: 3220148 - DNA, 25 bp, Homo sapien
tcaaactcggccagatcccacggct

SEQ ID NO: 3220149 - DNA, 25 bp, Homo sapien
aaactcggccagatcccacggcttc

SEQ ID NO: 3220150 - DNA, 25 bp, Homo sapien
agatcccacggcttcccagtccttt

SEQ ID NO: 3220151 - DNA, 25 bp, Homo sapien
agatccctaattgtttggtttctag

SEQ ID NO: 3220152 - DNA, 25 bp, Homo sapien
tctagtactttatctgaacccatca

SEQ ID NO: 3220153 - DNA, 25 bp, Homo sapien
tagatccctaattgtttggtttcta

SEQ ID NO: 3220154 - DNA, 25 bp, Homo sapien
actttatctgaacccatcacagagc

SEQ ID NO: 3220155 - DNA, 25 bp, Homo sapien
gccagacttgcaatgatgagagatg

SEQ ID NO: 3220156 - DNA, 25 bp, Homo sapien
gagagatgcttcactcccatgctgt

SEQ ID NO: 3220157 - DNA, 25 bp, Homo sapien
aatgtgggagctatttctgtgctac

SEQ ID NO: 3220158 - DNA, 25 bp, Homo sapien
ttctctgccagacttgcaatgatga

SEQ ID NO: 3220159 - DNA, 25 bp, Homo sapien
tatcagatagcaacaataagtagca

SEQ ID NO: 3220160 - DNA, 25 bp, Homo sapien
cactatgaagtgagatgcattatct

SEQ ID NO: 3220161 - DNA, 25 bp, Homo sapien
taagtagcagagttagaattcctaa

SEQ ID NO: 3220162 - DNA, 25 bp, Homo sapien
aactagcctgtccaatatcagatag

SEQ ID NO: 3220163 - DNA, 25 bp, Homo sapien
gccacttgaaacaaatctcacagct

SEQ ID NO: 3220164 - DNA, 25 bp, Homo sapien
ttgaatgctgaactatccttgccac

SEQ ID NO: 3220165 - DNA, 25 bp, Homo sapien
ttttgaatgctgaactatccttgcc

SEQ ID NO: 3220166 - DNA, 25 bp, Homo sapien
tatccttgccacttgaaacaaatct

SEQ ID NO: 3220167 - DNA, 25 bp, Homo sapien
tgtgttggcaattctaggtattctt

SEQ ID NO: 3220168 - DNA, 25 bp, Homo sapien
gctgaggttctgattgaggttgcat

SEQ ID NO: 3220169 - DNA, 25 bp, Homo sapien
tgaatattccgttgttcctgcacca

SEQ ID NO: 3220170 - DNA, 25 bp, Homo sapien
catttagtcctatgctcccttttga

SEQ ID NO: 3220171 - DNA, 25 bp, Homo sapien
tctgcattggctctgggttcggcca

SEQ ID NO: 3220172 - DNA, 25 bp, Homo sapien
tttgggaccgcacaatggacagagg

SEQ ID NO: 3220173 - DNA, 25 bp, Homo sapien
ggtagattgttccactcatgtcccg

SEQ ID NO: 3220174 - DNA, 25 bp, Homo sapien
gattggctgttctaaccatgtggta

SEQ ID NO: 3220175 - DNA, 25 bp, Homo sapien
catttgtaaccaaattctcgatcct

SEQ ID NO: 3220176 - DNA, 25 bp, Homo sapien
aggatttcccattctaagattttca

SEQ ID NO: 3220177 - DNA, 25 bp, Homo sapien
tatgtcttgtgtaacaaggatttcc

SEQ ID NO: 3220178 - DNA, 25 bp, Homo sapien
ctttttccgtgtttatgatgacatt

SEQ ID NO: 3220179 - DNA, 25 bp, Homo sapien
gcaacccttgttaacaataatgtgg

SEQ ID NO: 3220180 - DNA, 25 bp, Homo sapien
taacaataatgtgggatgtacctct

SEQ ID NO: 3220181 - DNA, 25 bp, Homo sapien
caataatgtgggatgtacctctagc

SEQ ID NO: 3220182 - DNA, 25 bp, Homo sapien
cagaagcaacccttgttaacaataa

SEQ ID NO: 3220183 - DNA, 25 bp, Homo sapien
ctttccacaaggtcaaattcaattt

SEQ ID NO: 3220184 - DNA, 25 bp, Homo sapien
ccctggagtgagttgtcaagggacc

SEQ ID NO: 3220185 - DNA, 25 bp, Homo sapien
agggacctcctggttattgcggcca

SEQ ID NO: 3220186 - DNA, 25 bp, Homo sapien
gagttgtcaagggacctcctggtta

SEQ ID NO: 3220187 - DNA, 25 bp, Homo sapien
tcaagggacctcctggttattgcgg

SEQ ID NO: 3220188 - DNA, 25 bp, Homo sapien
tccccgataaatacagacgcatgtc

SEQ ID NO: 3220189 - DNA, 25 bp, Homo sapien
acagacgcatgtccccacaaagcta

SEQ ID NO: 3220190 - DNA, 25 bp, Homo sapien
cgataaatacagacgcatgtcccca

SEQ ID NO: 3220191 - DNA, 25 bp, Homo sapien
cagactccccgataaatacagacgc

SEQ ID NO: 3220192 - DNA, 25 bp, Homo sapien
tatttacagacttcttgtcataaaa

SEQ ID NO: 3220193 - DNA, 25 bp, Homo sapien
aaggagacgtggagtgttccgcaaa

SEQ ID NO: 3220194 - DNA, 25 bp, Homo sapien
gagtgttccgcaaaatgatgtgatg

SEQ ID NO: 3220195 - DNA, 25 bp, Homo sapien
catagactcctctcgaaaactggga

SEQ ID NO: 3220196 - DNA, 25 bp, Homo sapien
caaatggatgtgtgccatctgttgg

SEQ ID NO: 3220197 - DNA, 25 bp, Homo sapien
tgacaaatggatgtgtgccatctgt

SEQ ID NO: 3220198 - DNA, 25 bp, Homo sapien
atggatgtgtgccatctgttgggaa

SEQ ID NO: 3220199 - DNA, 25 bp, Homo sapien
ctgaatgacaaatggatgtgtgcca

SEQ ID NO: 3220200 - DNA, 25 bp, Homo sapien
gtatgcaaacttgtcccattgatag

SEQ ID NO: 3220201 - DNA, 25 bp, Homo sapien
cattgatagtattcaatcaagctaa

SEQ ID NO: 3220202 - DNA, 25 bp, Homo sapien
ctgtcactgtcatagaggtatgcaa

SEQ ID NO: 3220203 - DNA, 25 bp, Homo sapien
agtattcaatcaagctaaggagagc

SEQ ID NO: 3220204 - DNA, 25 bp, Homo sapien
tcacagtccagaattacacgccgtt

SEQ ID NO: 3220205 - DNA, 25 bp, Homo sapien
tcttgaaaaagtgatcggtacatct

SEQ ID NO: 3220206 - DNA, 25 bp, Homo sapien
tgtttcccacattgatagcagtcac

SEQ ID NO: 3220207 - DNA, 25 bp, Homo sapien
tctacaatgtcgtttactttatccc

SEQ ID NO: 3220208 - DNA, 25 bp, Homo sapien
caatgatgtagtggtaccctttaac

SEQ ID NO: 3220209 - DNA, 25 bp, Homo sapien
tttgcaatgatgtagtggtaccctt

SEQ ID NO: 3220210 - DNA, 25 bp, Homo sapien
gatgtagtggtaccctttaacatgt

SEQ ID NO: 3220211 - DNA, 25 bp, Homo sapien
cagatttgcaatgatgtagtggtac

SEQ ID NO: 3220212 - DNA, 25 bp, Homo sapien
cacctggctaattacaatcaaactg

SEQ ID NO: 3220213 - DNA, 25 bp, Homo sapien
cagagacaagggaatatgtggacaa

SEQ ID NO: 3220214 - DNA, 25 bp, Homo sapien
tacagcatctaagacaatttatgaa

SEQ ID NO: 3220215 - DNA, 25 bp, Homo sapien
aattaaaggaatatgcagagggcag

SEQ ID NO: 3220216 - DNA, 25 bp, Homo sapien
gaacacattgatatcacgctttttg

SEQ ID NO: 3220217 - DNA, 25 bp, Homo sapien
tgatatcacgctttttgtttgagaa

SEQ ID NO: 3220218 - DNA, 25 bp, Homo sapien
acattgatatcacgctttttgtttg

SEQ ID NO: 3220219 - DNA, 25 bp, Homo sapien
atagaacacattgatatcacgcttt

SEQ ID NO: 3220220 - DNA, 25 bp, Homo sapien
taattgttgttgtgtgagctccagg

SEQ ID NO: 3220221 - DNA, 25 bp, Homo sapien
gaatcatcatagtccactatctgaa

SEQ ID NO: 3220222 - DNA, 25 bp, Homo sapien
taaatttagataccaacgaatcatc

SEQ ID NO: 3220223 - DNA, 25 bp, Homo sapien
ggatttttaataggtctccatcagt

SEQ ID NO: 3220224 - DNA, 25 bp, Homo sapien
ttttgaaacgtgctctctactccct

SEQ ID NO: 3220225 - DNA, 25 bp, Homo sapien
tcctccttatttgccaagactcttc

SEQ ID NO: 3220226 - DNA, 25 bp, Homo sapien
cataggtgtacggaagtagaaaaca

SEQ ID NO: 3220227 - DNA, 25 bp, Homo sapien
cacaagagtaatacagtaaagctct

SEQ ID NO: 3220228 - DNA, 25 bp, Homo sapien
cagagtgagccagtgtacagagatg

SEQ ID NO: 3220229 - DNA, 25 bp, Homo sapien
tgacagggcctcataagacaacagg

SEQ ID NO: 3220230 - DNA, 25 bp, Homo sapien
cctagggatttaggttggctgaaga

SEQ ID NO: 3220231 - DNA, 25 bp, Homo sapien
taatcctatggtggtagctacctag

SEQ ID NO: 3220232 - DNA, 25 bp, Homo sapien
gaaattcatttgtcaatgcagaagg

SEQ ID NO: 3220233 - DNA, 25 bp, Homo sapien
tcaaccctggtcatgttcacactga

SEQ ID NO: 3220234 - DNA, 25 bp, Homo sapien
taggctcccctaggcgattctggta

SEQ ID NO: 3220235 - DNA, 25 bp, Homo sapien
gaaggaatatggattactttcagga

SEQ ID NO: 3220236 - DNA, 25 bp, Homo sapien
catcataggtcagagcagaagtata

SEQ ID NO: 3220237 - DNA, 25 bp, Homo sapien
tttgcttccttaggttgcggaaggc

SEQ ID NO: 3220238 - DNA, 25 bp, Homo sapien
tcacttgaacggcatcataggtcag

SEQ ID NO: 3220239 - DNA, 25 bp, Homo sapien
tgcggaaggcttcagtcatcacttg

SEQ ID NO: 3220240 - DNA, 25 bp, Homo sapien
ccatgatgttaattgtatagtttat

SEQ ID NO: 3220241 - DNA, 25 bp, Homo sapien
tccattctggtcaaactttatattt

SEQ ID NO: 3220242 - DNA, 25 bp, Homo sapien
ccattctggtcaaactttatatttc

SEQ ID NO: 3220243 - DNA, 25 bp, Homo sapien
ttttccattctggtcaaactttata

SEQ ID NO: 3220244 - DNA, 25 bp, Homo sapien
tggtgacaacaacagtcttattctc

SEQ ID NO: 3220245 - DNA, 25 bp, Homo sapien
ggagctcagtaagggtaacaaccat

SEQ ID NO: 3220246 - DNA, 25 bp, Homo sapien
aagcccagaggtgtcatttccagaa

SEQ ID NO: 3220247 - DNA, 25 bp, Homo sapien
aacagtcttattctcaagcccagag

SEQ ID NO: 3220248 - DNA, 25 bp, Homo sapien
tgtcactgctgtcccaaagataagg

SEQ ID NO: 3220249 - DNA, 25 bp, Homo sapien
ttgttcaccgatgtaagcaccaggg

SEQ ID NO: 3220250 - DNA, 25 bp, Homo sapien
gaaagcctcggaatgtctatcacta

SEQ ID NO: 3220251 - DNA, 25 bp, Homo sapien
ccaaagcctgggtgttgaagatcca

SEQ ID NO: 3220252 - DNA, 25 bp, Homo sapien
tgtacttgaacccacaatgtttggc

SEQ ID NO: 3220253 - DNA, 25 bp, Homo sapien
catagcgctcattgccttcaagcat

SEQ ID NO: 3220254 - DNA, 25 bp, Homo sapien
aaattttcgtgtctgcatccctggc

SEQ ID NO: 3220255 - DNA, 25 bp, Homo sapien
tttggcgatttctgcagccaggtca

SEQ ID NO: 3220256 - DNA, 25 bp, Homo sapien
tatgatcattacacatctgcactgc

SEQ ID NO: 3220257 - DNA, 25 bp, Homo sapien
tatctatgagaagagctatacttac

SEQ ID NO: 3220258 - DNA, 25 bp, Homo sapien
gtaatgtgggaaatcaacaacctca

SEQ ID NO: 3220259 - DNA, 25 bp, Homo sapien
ggaagcagtctgtcaacaacaattc

SEQ ID NO: 3220260 - DNA, 25 bp, Homo sapien
tccttggtatagtcccagtaaagga

SEQ ID NO: 3220261 - DNA, 25 bp, Homo sapien
aatcgtggttatgtcactggatcaa

SEQ ID NO: 3220262 - DNA, 25 bp, Homo sapien
aaaggaatcgtggttatgtcactgg

SEQ ID NO: 3220263 - DNA, 25 bp, Homo sapien
tatagtcccagtaaaggataaacaa

SEQ ID NO: 3220264 - DNA, 25 bp, Homo sapien
aaactcctcagtgtgccactcgtag

SEQ ID NO: 3220265 - DNA, 25 bp, Homo sapien
gaataaaactacactgaccccaatg

SEQ ID NO: 3220266 - DNA, 25 bp, Homo sapien
gatatcccgaggctcatgaagggct

SEQ ID NO: 3220267 - DNA, 25 bp, Homo sapien
gaagggctttgagaagtcaatcacc

SEQ ID NO: 3220268 - DNA, 25 bp, Homo sapien
aatgcacaaagttgaagcaggtgag

SEQ ID NO: 3220269 - DNA, 25 bp, Homo sapien
gaaatgcacaaagttgaagcaggtg

SEQ ID NO: 3220270 - DNA, 25 bp, Homo sapien
aaatgcacaaagttgaagcaggtga

SEQ ID NO: 3220271 - DNA, 25 bp, Homo sapien
ttatgccgaagctaagaggatgtcc

SEQ ID NO: 3220272 - DNA, 25 bp, Homo sapien
acaggaagtcggcagctggtaactt

SEQ ID NO: 3220273 - DNA, 25 bp, Homo sapien
ccttcaagagtcttaaactgcttgg

SEQ ID NO: 3220274 - DNA, 25 bp, Homo sapien
ttagggtgaatccataaacaccatg

SEQ ID NO: 3220275 - DNA, 25 bp, Homo sapien
cattttcccatatacaggtctgtgg

SEQ ID NO: 3220276 - DNA, 25 bp, Homo sapien
ttgtatcatgaaaggcacccgctcc

SEQ ID NO: 3220277 - DNA, 25 bp, Homo sapien
taatgaatgattagtcccttccagg

SEQ ID NO: 3220278 - DNA, 25 bp, Homo sapien
taaaagagatgagatgtgtgccaac

SEQ ID NO: 3220279 - DNA, 25 bp, Homo sapien
ctgtatatctttaacttagatcaaa

SEQ ID NO: 3220280 - DNA, 25 bp, Homo sapien
tctttaacttagatcaaataaacta

SEQ ID NO: 3220281 - DNA, 25 bp, Homo sapien
atgttctccgagaccccaatttggt

SEQ ID NO: 3220282 - DNA, 25 bp, Homo sapien
aaatacagagatgataaaactatga

SEQ ID NO: 3220283 - DNA, 25 bp, Homo sapien
catcctacttcataatgaacccaca

SEQ ID NO: 3220284 - DNA, 25 bp, Homo sapien
tacacttctccctactatccaaaag

SEQ ID NO: 3220285 - DNA, 25 bp, Homo sapien
taatgaacccacatacacttctccc

SEQ ID NO: 3220286 - DNA, 25 bp, Homo sapien
gggctgacacatcctacttcataat

SEQ ID NO: 3220287 - DNA, 25 bp, Homo sapien
aaattgtagtgtcatgactcatgaa

SEQ ID NO: 3220288 - DNA, 25 bp, Homo sapien
cagccttgatgaaaaggagaagtca

SEQ ID NO: 3220289 - DNA, 25 bp, Homo sapien
tcttctcaactagggtaaccatcat

SEQ ID NO: 3220290 - DNA, 25 bp, Homo sapien
tctagattacaacttaaatgtgtcc

SEQ ID NO: 3220291 - DNA, 25 bp, Homo sapien
catgaatcccataagaaagcaattt

SEQ ID NO: 3220292 - DNA, 25 bp, Homo sapien
gcaaggagtacagagtagctaaatt

SEQ ID NO: 3220293 - DNA, 25 bp, Homo sapien
ccaaatagtttatgacatgaatccc

SEQ ID NO: 3220294 - DNA, 25 bp, Homo sapien
cacaggtcaaaacttctgatttctg

SEQ ID NO: 3220295 - DNA, 25 bp, Homo sapien
taataacaagtatgaaatggatttg

SEQ ID NO: 3220296 - DNA, 25 bp, Homo sapien
aatggatttgtaaagtgaaatgaat

SEQ ID NO: 3220297 - DNA, 25 bp, Homo sapien
ctaataacaagtatgaaatggattt

SEQ ID NO: 3220298 - DNA, 25 bp, Homo sapien
ggatttgtaaagtgaaatgaatgac

SEQ ID NO: 3220299 - DNA, 25 bp, Homo sapien
gaggagattatgatcagggtaaaga

SEQ ID NO: 3220300 - DNA, 25 bp, Homo sapien
aggcagctaagttagccgtgtagga

SEQ ID NO: 3220301 - DNA, 25 bp, Homo sapien
taggaggagattatgatcagggtaa

SEQ ID NO: 3220302 - DNA, 25 bp, Homo sapien
aggaaggcagctaagttagccgtgt

SEQ ID NO: 3220303 - DNA, 25 bp, Homo sapien
tctaatgttccataagcaatttctg

SEQ ID NO: 3220304 - DNA, 25 bp, Homo sapien
gaaagatcctcagcactttcgatgg

SEQ ID NO: 3220305 - DNA, 25 bp, Homo sapien
tgaaaaactctttagtggagccaga

SEQ ID NO: 3220306 - DNA, 25 bp, Homo sapien
ctcagcactttcgatgggagacacc

SEQ ID NO: 3220307 - DNA, 25 bp, Homo sapien
ttatgccaacatcaggtccttgggc

SEQ ID NO: 3220308 - DNA, 25 bp, Homo sapien
tgccaacatcaggtccttgggctta

SEQ ID NO: 3220309 - DNA, 25 bp, Homo sapien
ccaacatcaggtccttgggcttatc

SEQ ID NO: 3220310 - DNA, 25 bp, Homo sapien
tatgccaacatcaggtccttgggct

SEQ ID NO: 3220311 - DNA, 25 bp, Homo sapien
ggcttcagacctaagttaatcagct

SEQ ID NO: 3220312 - DNA, 25 bp, Homo sapien
tcagaggtaatgtagcatgagatag

SEQ ID NO: 3220313 - DNA, 25 bp, Homo sapien
tatgtcacatatattggcttcagac

SEQ ID NO: 3220314 - DNA, 25 bp, Homo sapien
tccggaataagctggactagatttc

SEQ ID NO: 3220315 - DNA, 25 bp, Homo sapien
ggtttcaaccgtgtctctagcatta

SEQ ID NO: 3220316 - DNA, 25 bp, Homo sapien
tgtggatgtaaccaagaacagagca

SEQ ID NO: 3220317 - DNA, 25 bp, Homo sapien
tatatgcactgagacctagccaatg

SEQ ID NO: 3220318 - DNA, 25 bp, Homo sapien
aaatagtgtatggaaagaaccctgg

SEQ ID NO: 3220319 - DNA, 25 bp, Homo sapien
gaaagagatgatagttctctccata

SEQ ID NO: 3220320 - DNA, 25 bp, Homo sapien
gataccgcactgtaagactaacatg

SEQ ID NO: 3220321 - DNA, 25 bp, Homo sapien
gtagatcaaatcagaccccagatct

SEQ ID NO: 3220322 - DNA, 25 bp, Homo sapien
gaactttctaaagaccataacaatg

SEQ ID NO: 3220323 - DNA, 25 bp, Homo sapien
ttatcaaacactgcaattttagatc

SEQ ID NO: 3220324 - DNA, 25 bp, Homo sapien
tttatcaaacactgcaattttagat

SEQ ID NO: 3220325 - DNA, 25 bp, Homo sapien
tatcaaacactgcaattttagatct

SEQ ID NO: 3220326 - DNA, 25 bp, Homo sapien
ccaactttcatggtgtcgcaaggct

SEQ ID NO: 3220327 - DNA, 25 bp, Homo sapien
tcacaaacacagagggctccgcact

SEQ ID NO: 3220328 - DNA, 25 bp, Homo sapien
cctttaggtgttgcgatgccatagc

SEQ ID NO: 3220329 - DNA, 25 bp, Homo sapien
tcatcgtggactccaacaagtaggc

SEQ ID NO: 3220330 - DNA, 25 bp, Homo sapien
aacagtgtcttgaatgtgactccac

SEQ ID NO: 3220331 - DNA, 25 bp, Homo sapien
cagggtaggtgggatactataacaa

SEQ ID NO: 3220332 - DNA, 25 bp, Homo sapien
taagcaggctggtagactgacaagg

SEQ ID NO: 3220333 - DNA, 25 bp, Homo sapien
tccgtatacaaaccgtaagagagtc

SEQ ID NO: 3220334 - DNA, 25 bp, Homo sapien
tttagtactgcgaggttaaccgcat

SEQ ID NO: 3220335 - DNA, 25 bp, Homo sapien
ttagtactgcgaggttaaccgcatt

SEQ ID NO: 3220336 - DNA, 25 bp, Homo sapien
tagtactgcgaggttaaccgcattt

SEQ ID NO: 3220337 - DNA, 25 bp, Homo sapien
ttttagtactgcgaggttaaccgca

SEQ ID NO: 3220338 - DNA, 25 bp, Homo sapien
ccgctgccgcactctcctttgtcgt

SEQ ID NO: 3220339 - DNA, 25 bp, Homo sapien
cttggaatcacctcccccgctgccg

SEQ ID NO: 3220340 - DNA, 25 bp, Homo sapien
ccccgctgccgcactctcctttgtc

SEQ ID NO: 3220341 - DNA, 25 bp, Homo sapien
gctgccgcactctcctttgtcgtac

SEQ ID NO: 3220342 - DNA, 25 bp, Homo sapien
aagtgtcctggtcatccaattgcac

SEQ ID NO: 3220343 - DNA, 25 bp, Homo sapien
aaacttggtggcacggagtgcccac

SEQ ID NO: 3220344 - DNA, 25 bp, Homo sapien
tcagcttagcgttggaaacttggtg

SEQ ID NO: 3220345 - DNA, 25 bp, Homo sapien
attgcactcttcagcttagcgttgg

SEQ ID NO: 3220346 - DNA, 25 bp, Homo sapien
gacgccttgctcactgagtttcaat

SEQ ID NO: 3220347 - DNA, 25 bp, Homo sapien
acttccagagtccttggctccacat

SEQ ID NO: 3220348 - DNA, 25 bp, Homo sapien
tggctccacattcacctttatcgta

SEQ ID NO: 3220349 - DNA, 25 bp, Homo sapien
tcagcttgtctaagacgccttgctc

SEQ ID NO: 3220350 - DNA, 25 bp, Homo sapien
gcacacgaatagtcttgccaatcag

SEQ ID NO: 3220351 - DNA, 25 bp, Homo sapien
tctgcaggcattaccaaaacatctt

SEQ ID NO: 3220352 - DNA, 25 bp, Homo sapien
tgagttagacatgaacacagactga

SEQ ID NO: 3220353 - DNA, 25 bp, Homo sapien
tactatagatgctgcaactgtgcca

SEQ ID NO: 3220354 - DNA, 25 bp, Homo sapien
ccctcaaagtactaagatggctaag

SEQ ID NO: 3220355 - DNA, 25 bp, Homo sapien
gagtcataaatggaggactgaccac

SEQ ID NO: 3220356 - DNA, 25 bp, Homo sapien
taatctggtaaagctgacagcgaac

SEQ ID NO: 3220357 - DNA, 25 bp, Homo sapien
agtacattctcactctccaagtagg

SEQ ID NO: 3220358 - DNA, 25 bp, Homo sapien
gtggactcaatcgactacctgcagg

SEQ ID NO: 3220359 - DNA, 25 bp, Homo sapien
cacatagcattatcacgggaacaac

SEQ ID NO: 3220360 - DNA, 25 bp, Homo sapien
catttccctggctatgtcagttgca

SEQ ID NO: 3220361 - DNA, 25 bp, Homo sapien
gggaacaacctagtcacacagaatg

SEQ ID NO: 3220362 - DNA, 25 bp, Homo sapien
gcctcggcccttgacttgtaacaga

SEQ ID NO: 3220363 - DNA, 25 bp, Homo sapien
tgaattctgcgaggaagatgggtta

SEQ ID NO: 3220364 - DNA, 25 bp, Homo sapien
ccttataagttgcaaaattctgtga

SEQ ID NO: 3220365 - DNA, 25 bp, Homo sapien
gaatactccagcaacgttgctcaga

SEQ ID NO: 3220366 - DNA, 25 bp, Homo sapien
aattttaacactttcgatgccatat

SEQ ID NO: 3220367 - DNA, 25 bp, Homo sapien
attttaacactttcgatgccatata

SEQ ID NO: 3220368 - DNA, 25 bp, Homo sapien
ttttaacactttcgatgccatatac

SEQ ID NO: 3220369 - DNA, 25 bp, Homo sapien
tgagagaggagggaaagaaagaaaa

SEQ ID NO: 3220370 - DNA, 25 bp, Homo sapien
aatgagagaggagggaaagaaagaa

SEQ ID NO: 3220371 - DNA, 25 bp, Homo sapien
cttgttcctcatggcatcattcaag

SEQ ID NO: 3220372 - DNA, 25 bp, Homo sapien
ttgttcctcatggcatcattcaagg

SEQ ID NO: 3220373 - DNA, 25 bp, Homo sapien
ctccagtacttcctgtaattgacag

SEQ ID NO: 3220374 - DNA, 25 bp, Homo sapien
ccagtacttcctgtaattgacagcc

SEQ ID NO: 3220375 - DNA, 25 bp, Homo sapien
tcacgagagatcagtcacactgaca

SEQ ID NO: 3220376 - DNA, 25 bp, Homo sapien
tcagtcacactgacattcattccca

SEQ ID NO: 3220377 - DNA, 25 bp, Homo sapien
agagatcagtcacactgacattcat

SEQ ID NO: 3220378 - DNA, 25 bp, Homo sapien
gatcagtcacactgacattcattcc

SEQ ID NO: 3220379 - DNA, 25 bp, Homo sapien
tatggaatcgatacctaaagccttt

SEQ ID NO: 3220380 - DNA, 25 bp, Homo sapien
cacgctttgtctgtaactcgagtag

SEQ ID NO: 3220381 - DNA, 25 bp, Homo sapien
gactaacaatagtggctgcagaaac

SEQ ID NO: 3220382 - DNA, 25 bp, Homo sapien
gaaaaccattgtgtaaggcactcaa

SEQ ID NO: 3220383 - DNA, 25 bp, Homo sapien
taaaatagccattccacctgaggaa

SEQ ID NO: 3220384 - DNA, 25 bp, Homo sapien
tttctctgggcacctaacaacttgg

SEQ ID NO: 3220385 - DNA, 25 bp, Homo sapien
tccacactgggcatattaaaatagc

SEQ ID NO: 3220386 - DNA, 25 bp, Homo sapien
aatttttagaagagtaggcccagag

SEQ ID NO: 3220387 - DNA, 25 bp, Homo sapien
tacaacactccggaaaagccatccg

SEQ ID NO: 3220388 - DNA, 25 bp, Homo sapien
tcttggagtttgacacccacttaac

SEQ ID NO: 3220389 - DNA, 25 bp, Homo sapien
gcattttctgacatagtacacatga

SEQ ID NO: 3220390 - DNA, 25 bp, Homo sapien
agccatccgatgttagatttaaaaa

SEQ ID NO: 3220391 - DNA, 25 bp, Homo sapien
cagcagctgaatggataacatacaa

SEQ ID NO: 3220392 - DNA, 25 bp, Homo sapien
cctgatcttgtagtagcagggtata

SEQ ID NO: 3220393 - DNA, 25 bp, Homo sapien
aatggttggtgatggtattgcctga

SEQ ID NO: 3220394 - DNA, 25 bp, Homo sapien
ttctgctgtttaatgtgactatcac

SEQ ID NO: 3220395 - DNA, 25 bp, Homo sapien
agtaaaatgaaattggcacattaac

SEQ ID NO: 3220396 - DNA, 25 bp, Homo sapien
tcccccacattccaatttacagtaa

SEQ ID NO: 3220397 - DNA, 25 bp, Homo sapien
ttacagtaaaatgaaattggcacat

SEQ ID NO: 3220398 - DNA, 25 bp, Homo sapien
tacagtaaaatgaaattggcacatt

SEQ ID NO: 3220399 - DNA, 25 bp, Homo sapien
tcatatatccaacctaagagtggct

SEQ ID NO: 3220400 - DNA, 25 bp, Homo sapien
gtgatcgcaacccatgacttagact

SEQ ID NO: 3220401 - DNA, 25 bp, Homo sapien
tcagagtaaatgctacagaggatgt

SEQ ID NO: 3220402 - DNA, 25 bp, Homo sapien
tgtaattgataaccagtcaaacggg

SEQ ID NO: 3220403 - DNA, 25 bp, Homo sapien
tcagtgaccatgacgctatgtaagc

SEQ ID NO: 3220404 - DNA, 25 bp, Homo sapien
gctgttctggtatcttagggacata

SEQ ID NO: 3220405 - DNA, 25 bp, Homo sapien
tcagaaccagtgtcattccatacag

SEQ ID NO: 3220406 - DNA, 25 bp, Homo sapien
cacggtagtatgaagtgaacaaagc

SEQ ID NO: 3220407 - DNA, 25 bp, Homo sapien
cacttagaatttcttttgtttctag

SEQ ID NO: 3220408 - DNA, 25 bp, Homo sapien
tttctagtcctgtttctttagttgc

SEQ ID NO: 3220409 - DNA, 25 bp, Homo sapien
gtcctgtttctttagttgctaatat

SEQ ID NO: 3220410 - DNA, 25 bp, Homo sapien
agaatttcttttgtttctagtcctg

SEQ ID NO: 3220411 - DNA, 25 bp, Homo sapien
cttgttaactatggctgcagctgtc

SEQ ID NO: 3220412 - DNA, 25 bp, Homo sapien
gtctgagccagctgtccagtggtag

SEQ ID NO: 3220413 - DNA, 25 bp, Homo sapien
tggtagcctgattcccagcgtgcat

SEQ ID NO: 3220414 - DNA, 25 bp, Homo sapien
ctacttgttaactatggctgcagct

SEQ ID NO: 3220415 - DNA, 25 bp, Homo sapien
tactttttcaagctctgatggcaaa

SEQ ID NO: 3220416 - DNA, 25 bp, Homo sapien
tgcccggccccgaacattttcataa

SEQ ID NO: 3220417 - DNA, 25 bp, Homo sapien
tcacaacatggtgtgagggtgccca

SEQ ID NO: 3220418 - DNA, 25 bp, Homo sapien
tgggccacgggcattagcatagtcc

SEQ ID NO: 3220419 - DNA, 25 bp, Homo sapien
gcccagagagaaaacttatctctcc

SEQ ID NO: 3220420 - DNA, 25 bp, Homo sapien
tatcctcagaagataaatcttacaa

SEQ ID NO: 3220421 - DNA, 25 bp, Homo sapien
cagagagaaaacttatctctccttt

SEQ ID NO: 3220422 - DNA, 25 bp, Homo sapien
ttaaagttatcctcagaagataaat

SEQ ID NO: 3220423 - DNA, 25 bp, Homo sapien
tattctcacaaggagtctttcataa

SEQ ID NO: 3220424 - DNA, 25 bp, Homo sapien
tgtatatgataccagcatgagccaa

SEQ ID NO: 3220425 - DNA, 25 bp, Homo sapien
gaattgatatcttcatgtactctgg

SEQ ID NO: 3220426 - DNA, 25 bp, Homo sapien
tattctcaggatccagattgtatga

SEQ ID NO: 3220427 - DNA, 25 bp, Homo sapien
ctgcagcaactaacagctccttcaa

SEQ ID NO: 3220428 - DNA, 25 bp, Homo sapien
gcagcaactaacagctccttcaaga

SEQ ID NO: 3220429 - DNA, 25 bp, Homo sapien
tttgtgtgtgggtgattgtttccat

SEQ ID NO: 3220430 - DNA, 25 bp, Homo sapien
tgggtgattgtttccatggatctgc

SEQ ID NO: 3220431 - DNA, 25 bp, Homo sapien
agaaattgttaggattttcaccagg

SEQ ID NO: 3220432 - DNA, 25 bp, Homo sapien
tccatttatccggacagaaattgtt

SEQ ID NO: 3220433 - DNA, 25 bp, Homo sapien
tgaacggtttttgcaagtatatagt

SEQ ID NO: 3220434 - DNA, 25 bp, Homo sapien
tagtgaacggtttttgcaagtatat

SEQ ID NO: 3220435 - DNA, 25 bp, Homo sapien
cttgaacactgtaccaagatttgtc

SEQ ID NO: 3220436 - DNA, 25 bp, Homo sapien
taacttgaacactgtaccaagattt

SEQ ID NO: 3220437 - DNA, 25 bp, Homo sapien
agatttgtcactcatggctggtgtt

SEQ ID NO: 3220438 - DNA, 25 bp, Homo sapien
acactgtaccaagatttgtcactca

SEQ ID NO: 3220439 - DNA, 25 bp, Homo sapien
tccccagaggcatgaatttagaaag

SEQ ID NO: 3220440 - DNA, 25 bp, Homo sapien
gatggaatccgaaaccgtgatttcc

SEQ ID NO: 3220441 - DNA, 25 bp, Homo sapien
tagaaagggagatttgcacatcgtt

SEQ ID NO: 3220442 - DNA, 25 bp, Homo sapien
ctgaatctcatgttgtccccagagg

SEQ ID NO: 3220443 - DNA, 25 bp, Homo sapien
tatcactgtcttcatagacaccggc

SEQ ID NO: 3220444 - DNA, 25 bp, Homo sapien
caatgacatctccaagacaagatgc

SEQ ID NO: 3220445 - DNA, 25 bp, Homo sapien
caccggcattccagtcatgggcaat

SEQ ID NO: 3220446 - DNA, 25 bp, Homo sapien
tgacatctccaagacaagatgcaca

SEQ ID NO: 3220447 - DNA, 25 bp, Homo sapien
gctaaagggtacttctgttcctcta

SEQ ID NO: 3220448 - DNA, 25 bp, Homo sapien
taaagggtacttctgttcctctagc

SEQ ID NO: 3220449 - DNA, 25 bp, Homo sapien
cagctaaagggtacttctgttcctc

SEQ ID NO: 3220450 - DNA, 25 bp, Homo sapien
aagggtacttctgttcctctagcat

SEQ ID NO: 3220451 - DNA, 25 bp, Homo sapien
tctcatcccattcgcagcaagaaca

SEQ ID NO: 3220452 - DNA, 25 bp, Homo sapien
tcatcccattcgcagcaagaacact

SEQ ID NO: 3220453 - DNA, 25 bp, Homo sapien
tcccattcgcagcaagaacacttat

SEQ ID NO: 3220454 - DNA, 25 bp, Homo sapien
cattcgcagcaagaacacttatggc

SEQ ID NO: 3220455 - DNA, 25 bp, Homo sapien
gattgtctgcaaccacacatacaac

SEQ ID NO: 3220456 - DNA, 25 bp, Homo sapien
gcctgtagattgtctgcaaccacac

SEQ ID NO: 3220457 - DNA, 25 bp, Homo sapien
tgtagattgtctgcaaccacacata

SEQ ID NO: 3220458 - DNA, 25 bp, Homo sapien
tgtctgcaaccacacatacaaccaa

SEQ ID NO: 3220459 - DNA, 25 bp, Homo sapien
ttctacccagaaagcctcagttgcc

SEQ ID NO: 3220460 - DNA, 25 bp, Homo sapien
ttctcatgacacttcttcctcacct

SEQ ID NO: 3220461 - DNA, 25 bp, Homo sapien
ctcagttgcccaagacttctcatga

SEQ ID NO: 3220462 - DNA, 25 bp, Homo sapien
ttcctcacctgagcctttatttcat

SEQ ID NO: 3220463 - DNA, 25 bp, Homo sapien
agcagcatctgcatccaagtgcaca

SEQ ID NO: 3220464 - DNA, 25 bp, Homo sapien
aatgtcctctggtgctaattgaaga

SEQ ID NO: 3220465 - DNA, 25 bp, Homo sapien
tgcaattgcgcctttctttggtagc

SEQ ID NO: 3220466 - DNA, 25 bp, Homo sapien
ttgctgtctgtgtaggctggcatgc

SEQ ID NO: 3220467 - DNA, 25 bp, Homo sapien
tttcctaattcccaaattgcctgtg

SEQ ID NO: 3220468 - DNA, 25 bp, Homo sapien
tgttattgatttgtgtcctacgaga

SEQ ID NO: 3220469 - DNA, 25 bp, Homo sapien
tacgagattaagcagaggcaaacag

SEQ ID NO: 3220470 - DNA, 25 bp, Homo sapien
gagtaagatcagatccagaccatgg

SEQ ID NO: 3220471 - DNA, 25 bp, Homo sapien
gctgtcaatctcttggcatcagaag

SEQ ID NO: 3220472 - DNA, 25 bp, Homo sapien
tttaatatcagctgtcaatctcttg

SEQ ID NO: 3220473 - DNA, 25 bp, Homo sapien
taatatcagctgtcaatctcttggc

SEQ ID NO: 3220474 - DNA, 25 bp, Homo sapien
tatcagctgtcaatctcttggcatc

SEQ ID NO: 3220475 - DNA, 25 bp, Homo sapien
tcctttggtctccatttgagcgacc

SEQ ID NO: 3220476 - DNA, 25 bp, Homo sapien
gacccatgcccatcaagtgtaaaac

SEQ ID NO: 3220477 - DNA, 25 bp, Homo sapien
tggtctccatttgagcgacccatgc

SEQ ID NO: 3220478 - DNA, 25 bp, Homo sapien
ccatgcccatcaagtgtaaaacctg

SEQ ID NO: 3220479 - DNA, 25 bp, Homo sapien
gattccttacgacagctccatgagg

SEQ ID NO: 3220480 - DNA, 25 bp, Homo sapien
aggcacatgttattctcaggtttca

SEQ ID NO: 3220481 - DNA, 25 bp, Homo sapien
catgaggcacatgttattctcaggt

SEQ ID NO: 3220482 - DNA, 25 bp, Homo sapien
taatcaactgattccttacgacagc

SEQ ID NO: 3220483 - DNA, 25 bp, Homo sapien
tgtgtcatctatctctgctattgct

SEQ ID NO: 3220484 - DNA, 25 bp, Homo sapien
gctattgctggagcgtagaattctc

SEQ ID NO: 3220485 - DNA, 25 bp, Homo sapien
ttgtgtcatctatctctgctattgc

SEQ ID NO: 3220486 - DNA, 25 bp, Homo sapien
tctctgctattgctggagcgtagaa

SEQ ID NO: 3220487 - DNA, 25 bp, Homo sapien
tcacctacaatatggcgagcaaggg

SEQ ID NO: 3220488 - DNA, 25 bp, Homo sapien
tgttacagcccttttgcaggtcccg

SEQ ID NO: 3220489 - DNA, 25 bp, Homo sapien
tcattatgcctcaccgttcaagggt

SEQ ID NO: 3220490 - DNA, 25 bp, Homo sapien
catgagtgagcatgaggtctggcca

SEQ ID NO: 3220491 - DNA, 25 bp, Homo sapien
ccaaagcttgtctaaagcaatgaac

SEQ ID NO: 3220492 - DNA, 25 bp, Homo sapien
gcttgtctaaagcaatgaactgcag

SEQ ID NO: 3220493 - DNA, 25 bp, Homo sapien
ctcaaacatatatttgtccaaagct

SEQ ID NO: 3220494 - DNA, 25 bp, Homo sapien
tatttgtccaaagcttgtctaaagc

SEQ ID NO: 3220495 - DNA, 25 bp, Homo sapien
ttaggtatagtcatagggatttccc

SEQ ID NO: 3220496 - DNA, 25 bp, Homo sapien
taagtgactaagtgactccggaaga

SEQ ID NO: 3220497 - DNA, 25 bp, Homo sapien
taagtgtaagtaatctctatctgcc

SEQ ID NO: 3220498 - DNA, 25 bp, Homo sapien
taagtacctcatacaaacgcgaaag

SEQ ID NO: 3220499 - DNA, 25 bp, Homo sapien
tcctgaatataatgggctgttgtgt

SEQ ID NO: 3220500 - DNA, 25 bp, Homo sapien
atgggctgttgtgttccgtatgggc

SEQ ID NO: 3220501 - DNA, 25 bp, Homo sapien
ctgttgtgttccgtatgggctggaa

SEQ ID NO: 3220502 - DNA, 25 bp, Homo sapien
ggctgttgtgttccgtatgggctgg

SEQ ID NO: 3220503 - DNA, 25 bp, Homo sapien
atttagggctagtctcacgctggca

SEQ ID NO: 3220504 - DNA, 25 bp, Homo sapien
gggctagtctcacgctggcatctgt

SEQ ID NO: 3220505 - DNA, 25 bp, Homo sapien
tagtctcacgctggcatctgtcctc

SEQ ID NO: 3220506 - DNA, 25 bp, Homo sapien
ttagggctagtctcacgctggcatc

SEQ ID NO: 3220507 - DNA, 25 bp, Homo sapien
caataggatgatgatggtaaaatct

SEQ ID NO: 3220508 - DNA, 25 bp, Homo sapien
tcaataggatgatgatggtaaaatc

SEQ ID NO: 3220509 - DNA, 25 bp, Homo sapien
cggggcccgagggcaaggagcagcc

SEQ ID NO: 3220510 - DNA, 25 bp, Homo sapien
gcccgagggcaaggagcagccgcct

SEQ ID NO: 3220511 - DNA, 25 bp, Homo sapien
ccgcggggcccgagggcaaggagca

SEQ ID NO: 3220512 - DNA, 25 bp, Homo sapien
ctggaggagcggacggccccgcggg

SEQ ID NO: 3220513 - DNA, 25 bp, Homo sapien
agccccagctgcagatatgaagcgg

SEQ ID NO: 3220514 - DNA, 25 bp, Homo sapien
gagccccagctgcagatatgaagcg

SEQ ID NO: 3220515 - DNA, 25 bp, Homo sapien
cccgcgagccccagctgcagatatg

SEQ ID NO: 3220516 - DNA, 25 bp, Homo sapien
gcgagccccagctgcagatatgaag

SEQ ID NO: 3220517 - DNA, 25 bp, Homo sapien
tcttgaaaagttgggcttagggagc

SEQ ID NO: 3220518 - DNA, 25 bp, Homo sapien
cagtcctcagtagtagaaagagtaa

SEQ ID NO: 3220519 - DNA, 25 bp, Homo sapien
gaaagagtaatcagtattaagccct

SEQ ID NO: 3220520 - DNA, 25 bp, Homo sapien
gtagaaataatgagatgaacagtcc

SEQ ID NO: 3220521 - DNA, 25 bp, Homo sapien
gagtaatcagtattaagccctccat

SEQ ID NO: 3220522 - DNA, 25 bp, Homo sapien
tcagtccatgtcatgacatcatttc

SEQ ID NO: 3220523 - DNA, 25 bp, Homo sapien
ttctcagtccatgtcatgacatcat

SEQ ID NO: 3220524 - DNA, 25 bp, Homo sapien
aatacagtcagagcagccacaattc

SEQ ID NO: 3220525 - DNA, 25 bp, Homo sapien
acagtcagagcagccacaattcctg

SEQ ID NO: 3220526 - DNA, 25 bp, Homo sapien
tctcaatagtagtaataacagcaac

SEQ ID NO: 3220527 - DNA, 25 bp, Homo sapien
ccaatgctcagggacagttatgatt

SEQ ID NO: 3220528 - DNA, 25 bp, Homo sapien
agtgcaatgggataacatatttcca

SEQ ID NO: 3220529 - DNA, 25 bp, Homo sapien
tctaggcactaaagtagagatgatc

SEQ ID NO: 3220530 - DNA, 25 bp, Homo sapien
ggctagaggattatttgagaccagg

SEQ ID NO: 3220531 - DNA, 25 bp, Homo sapien
gagtcgatacattgcatgagaatac

SEQ ID NO: 3220532 - DNA, 25 bp, Homo sapien
caggagtgtgttttagtggaagtaa

SEQ ID NO: 3220533 - DNA, 25 bp, Homo sapien
ggtgcagtgaccattgcctgtaatt

SEQ ID NO: 3220534 - DNA, 25 bp, Homo sapien
aaaatcttatccctggctcaagagg

SEQ ID NO: 3220535 - DNA, 25 bp, Homo sapien
accagtacaagggaggctattatca

SEQ ID NO: 3220536 - DNA, 25 bp, Homo sapien
tctaatgctcccaacaagatgtatg

SEQ ID NO: 3220537 - DNA, 25 bp, Homo sapien
gatatagttacacagacaatttggc

SEQ ID NO: 3220538 - DNA, 25 bp, Homo sapien
cagaatatcagctctatgaatgaga

SEQ ID NO: 3220539 - DNA, 25 bp, Homo sapien
ggatttgtgaatgcaggtggaacct

SEQ ID NO: 3220540 - DNA, 25 bp, Homo sapien
cctactcattgttccgtgaattgag

SEQ ID NO: 3220541 - DNA, 25 bp, Homo sapien
tgaattgagcttgcccattcagtca

SEQ ID NO: 3220542 - DNA, 25 bp, Homo sapien
aaggagagagcgtatttctgtggtc

SEQ ID NO: 3220543 - DNA, 25 bp, Homo sapien
gaaggagagagcgtatttctgtggt

SEQ ID NO: 3220544 - DNA, 25 bp, Homo sapien
tgtcttaatttcgttgaaagccaat

SEQ ID NO: 3220545 - DNA, 25 bp, Homo sapien
aggagagagcgtatttctgtggtca

SEQ ID NO: 3220546 - DNA, 25 bp, Homo sapien
tggttctacttcgacctttaggcat

SEQ ID NO: 3220547 - DNA, 25 bp, Homo sapien
tatcgacaaatgtaatggttctact

SEQ ID NO: 3220548 - DNA, 25 bp, Homo sapien
acccttttatcgacaaatgtaatgg

SEQ ID NO: 3220549 - DNA, 25 bp, Homo sapien
caaatgtaatggttctacttcgacc

SEQ ID NO: 3220550 - DNA, 25 bp, Homo sapien
catggagtccaattttcttgcacat

SEQ ID NO: 3220551 - DNA, 25 bp, Homo sapien
tccagtcagggggataactgacagc

SEQ ID NO: 3220552 - DNA, 25 bp, Homo sapien
tgaagccacacttctagcttccagt

SEQ ID NO: 3220553 - DNA, 25 bp, Homo sapien
ttcttgcacattcccagagactcag

SEQ ID NO: 3220554 - DNA, 25 bp, Homo sapien
taaaacctggctgttgtctccgtag

SEQ ID NO: 3220555 - DNA, 25 bp, Homo sapien
aaacctggctgttgtctccgtaggc

SEQ ID NO: 3220556 - DNA, 25 bp, Homo sapien
gataaaacctggctgttgtctccgt

SEQ ID NO: 3220557 - DNA, 25 bp, Homo sapien
aatttcatcctgtgataaaacctgg

SEQ ID NO: 3220558 - DNA, 25 bp, Homo sapien
caggagctgttgatgcatgccgtgc

SEQ ID NO: 3220559 - DNA, 25 bp, Homo sapien
ggagctgttgatgcatgccgtgctc

SEQ ID NO: 3220560 - DNA, 25 bp, Homo sapien
taccaggagctgttgatgcatgccg

SEQ ID NO: 3220561 - DNA, 25 bp, Homo sapien
tgtaccaggagctgttgatgcatgc

SEQ ID NO: 3220562 - DNA, 25 bp, Homo sapien
ggccgccagtcgtattgtccctctg

SEQ ID NO: 3220563 - DNA, 25 bp, Homo sapien
tcgtattgtccctctgtgaacttct

SEQ ID NO: 3220564 - DNA, 25 bp, Homo sapien
tcttctggccgccagtcgtattgtc

SEQ ID NO: 3220565 - DNA, 25 bp, Homo sapien
cctggtcttctggccgccagtcgta

SEQ ID NO: 3220566 - DNA, 25 bp, Homo sapien
aacaccaactgcagagggctgagct

SEQ ID NO: 3220567 - DNA, 25 bp, Homo sapien
gaacaccaactgcagagggctgagc

SEQ ID NO: 3220568 - DNA, 25 bp, Homo sapien
ttgtactcactgtttgctgttgaac

SEQ ID NO: 3220569 - DNA, 25 bp, Homo sapien
gtggcaaatggtattcttttagaat

SEQ ID NO: 3220570 - DNA, 25 bp, Homo sapien
cacgatacccttgacaagtaatttc

SEQ ID NO: 3220571 - DNA, 25 bp, Homo sapien
ctccacgatacccttgacaagtaat

SEQ ID NO: 3220572 - DNA, 25 bp, Homo sapien
gatacccttgacaagtaatttcttc

SEQ ID NO: 3220573 - DNA, 25 bp, Homo sapien
ccttgacaagtaatttcttcatgca

SEQ ID NO: 3220574 - DNA, 25 bp, Homo sapien
gggaattcgcaggtattcctgatct

SEQ ID NO: 3220575 - DNA, 25 bp, Homo sapien
cgcaggtattcctgatctgctatgt

SEQ ID NO: 3220576 - DNA, 25 bp, Homo sapien
ttttcaggggaattcgcaggtattc

SEQ ID NO: 3220577 - DNA, 25 bp, Homo sapien
ctttttcaggggaattcgcaggtat

SEQ ID NO: 3220578 - DNA, 25 bp, Homo sapien
ttactcatagtaaatcttctggcgc

SEQ ID NO: 3220579 - DNA, 25 bp, Homo sapien
tcatagtaaatcttctggcgcttca

SEQ ID NO: 3220580 - DNA, 25 bp, Homo sapien
ctcatagtaaatcttctggcgcttc

SEQ ID NO: 3220581 - DNA, 25 bp, Homo sapien
tactcatagtaaatcttctggcgct

SEQ ID NO: 3220582 - DNA, 25 bp, Homo sapien
cacagtcgtgaaatcttttacttcc

SEQ ID NO: 3220583 - DNA, 25 bp, Homo sapien
taaaactctagctagcattcaagat

SEQ ID NO: 3220584 - DNA, 25 bp, Homo sapien
ggtcatcaagaagtctcacagtcgt

SEQ ID NO: 3220585 - DNA, 25 bp, Homo sapien
gaggaaatgggcctcaaagtcttat

SEQ ID NO: 3220586 - DNA, 25 bp, Homo sapien
tagtagttatgatgtgtgtgctgca

SEQ ID NO: 3220587 - DNA, 25 bp, Homo sapien
gacttgtagtagttatgatgtgtgt

SEQ ID NO: 3220588 - DNA, 25 bp, Homo sapien
cttgtagtagttatgatgtgtgtgc

SEQ ID NO: 3220589 - DNA, 25 bp, Homo sapien
gggagacttgtagtagttatgatgt

SEQ ID NO: 3220590 - DNA, 25 bp, Homo sapien
tgcatttggcagatgtaggccattc

SEQ ID NO: 3220591 - DNA, 25 bp, Homo sapien
tctgagtttctgtttagcaatgatc

SEQ ID NO: 3220592 - DNA, 25 bp, Homo sapien
attgcatttggcagatgtaggccat

SEQ ID NO: 3220593 - DNA, 25 bp, Homo sapien
cagatgtaggccattctgagtttct

SEQ ID NO: 3220594 - DNA, 25 bp, Homo sapien
tcgattttgtgaaagatggtcagat

SEQ ID NO: 3220595 - DNA, 25 bp, Homo sapien
tctttgttcgtgtttaagattcaca

SEQ ID NO: 3220596 - DNA, 25 bp, Homo sapien
taattgaatcagaattatggatttg

SEQ ID NO: 3220597 - DNA, 25 bp, Homo sapien
atggtcagatactgtgttagatagg

SEQ ID NO: 3220598 - DNA, 25 bp, Homo sapien
caactgatatcgactgagaggcata

SEQ ID NO: 3220599 - DNA, 25 bp, Homo sapien
ctacaacaactgatatcgactgaga

SEQ ID NO: 3220600 - DNA, 25 bp, Homo sapien
tcgactgagaggcatatcaggcagg

SEQ ID NO: 3220601 - DNA, 25 bp, Homo sapien
atatcgactgagaggcatatcaggc

SEQ ID NO: 3220602 - DNA, 25 bp, Homo sapien
tagaatctggagaacaactacccaa

SEQ ID NO: 3220603 - DNA, 25 bp, Homo sapien
tatttcttaggagtgggctgtcttc

SEQ ID NO: 3220604 - DNA, 25 bp, Homo sapien
ccattttaaaggacagatcagagac

SEQ ID NO: 3220605 - DNA, 25 bp, Homo sapien
cccagtggcactttctagagatctt

SEQ ID NO: 3220606 - DNA, 25 bp, Homo sapien
tgggaatgatgaatcagcagaatca

SEQ ID NO: 3220607 - DNA, 25 bp, Homo sapien
aatgatgaatcagcagaatcagatc

SEQ ID NO: 3220608 - DNA, 25 bp, Homo sapien
atgacaatgggaatgatgaatcagc

SEQ ID NO: 3220609 - DNA, 25 bp, Homo sapien
accatctgtgtaatgacaatgggaa

SEQ ID NO: 3220610 - DNA, 25 bp, Homo sapien
gctgttacaatcgtttgcttctgat

SEQ ID NO: 3220611 - DNA, 25 bp, Homo sapien
ttattgagggaagctgttacaatcg

SEQ ID NO: 3220612 - DNA, 25 bp, Homo sapien
tatcagacaaaccagtaattacttt

SEQ ID NO: 3220613 - DNA, 25 bp, Homo sapien
aattatcagacaaaccagtaattac

SEQ ID NO: 3220614 - DNA, 25 bp, Homo sapien
accttgagaaagagtttgaaccttg

SEQ ID NO: 3220615 - DNA, 25 bp, Homo sapien
tcaggtttggtagaaaaccttgaga

SEQ ID NO: 3220616 - DNA, 25 bp, Homo sapien
tagaaaaccttgagaaagagtttga

SEQ ID NO: 3220617 - DNA, 25 bp, Homo sapien
ttgaaccttggattttcaggaataa

SEQ ID NO: 3220618 - DNA, 25 bp, Homo sapien
gtccgatttagactctgttgatgac

SEQ ID NO: 3220619 - DNA, 25 bp, Homo sapien
cttatagtccgatttagactctgtt

SEQ ID NO: 3220620 - DNA, 25 bp, Homo sapien
actctgttgatgacaagctgtgatg

SEQ ID NO: 3220621 - DNA, 25 bp, Homo sapien
ttgatgacaagctgtgatgcaccag

SEQ ID NO: 3220622 - DNA, 25 bp, Homo sapien
caggattgagaacagttccatcagc

SEQ ID NO: 3220623 - DNA, 25 bp, Homo sapien
cacacaggattgagaacagttccat

SEQ ID NO: 3220624 - DNA, 25 bp, Homo sapien
gattgagaacagttccatcagccag

SEQ ID NO: 3220625 - DNA, 25 bp, Homo sapien
actcacacaggattgagaacagttc

SEQ ID NO: 3220626 - DNA, 25 bp, Homo sapien
gtgccctccccacttccctccactg

SEQ ID NO: 3220627 - DNA, 25 bp, Homo sapien
ccctccccacttccctccactgcat

SEQ ID NO: 3220628 - DNA, 25 bp, Homo sapien
ttagtgccctccccacttccctcca

SEQ ID NO: 3220629 - DNA, 25 bp, Homo sapien
agtgccctccccacttccctccact

SEQ ID NO: 3220630 - DNA, 25 bp, Homo sapien
tattctttaagaagataacctggac

SEQ ID NO: 3220631 - DNA, 25 bp, Homo sapien
ctgtattctttaagaagataacctg

SEQ ID NO: 3220632 - DNA, 25 bp, Homo sapien
ctttaagaagataacctggactgta

SEQ ID NO: 3220633 - DNA, 25 bp, Homo sapien
ttctttaagaagataacctggactg

SEQ ID NO: 3220634 - DNA, 25 bp, Homo sapien
agggttgctggcagactgttttgca

SEQ ID NO: 3220635 - DNA, 25 bp, Homo sapien
gatttttaagctctgtagtcctccg

SEQ ID NO: 3220636 - DNA, 25 bp, Homo sapien
tatgacatcttcaccgatttttaag

SEQ ID NO: 3220637 - DNA, 25 bp, Homo sapien
tgtaagaaaggtctgactaagaagg

SEQ ID NO: 3220638 - DNA, 25 bp, Homo sapien
gatcatttgaaaatctaattgtagc

SEQ ID NO: 3220639 - DNA, 25 bp, Homo sapien
tctaattgatacaattgtagaacaa

SEQ ID NO: 3220640 - DNA, 25 bp, Homo sapien
tgtagcttttctaggctcacattca

SEQ ID NO: 3220641 - DNA, 25 bp, Homo sapien
taagtataagagaagatggaccaag

SEQ ID NO: 3220642 - DNA, 25 bp, Homo sapien
gaagacatcatatctggttagtcct

SEQ ID NO: 3220643 - DNA, 25 bp, Homo sapien
gaagataaaacacataagcacattg

SEQ ID NO: 3220644 - DNA, 25 bp, Homo sapien
tccctatagattggtgctgaattga

SEQ ID NO: 3220645 - DNA, 25 bp, Homo sapien
gcgcttcctttgtctatgttcccta

SEQ ID NO: 3220646 - DNA, 25 bp, Homo sapien
gatggtcaagggtcttgccgccagc

SEQ ID NO: 3220647 - DNA, 25 bp, Homo sapien
tgccgccagctttcagaggcgagtg

SEQ ID NO: 3220648 - DNA, 25 bp, Homo sapien
agagaaagattccaactatggcccc

SEQ ID NO: 3220649 - DNA, 25 bp, Homo sapien
gtttctgcaggaacattctatgtgc

SEQ ID NO: 3220650 - DNA, 25 bp, Homo sapien
caaacctggttaagattggagagcg

SEQ ID NO: 3220651 - DNA, 25 bp, Homo sapien
gagcaaacctggttaagattggaga

SEQ ID NO: 3220652 - DNA, 25 bp, Homo sapien
ttaagattggagagcgaccctggag

SEQ ID NO: 3220653 - DNA, 25 bp, Homo sapien
cctggttaagattggagagcgaccc

SEQ ID NO: 3220654 - DNA, 25 bp, Homo sapien
agcatgcagtggcatcggctgcccc

SEQ ID NO: 3220655 - DNA, 25 bp, Homo sapien
cgcaggaagcggcaagggaagctga

SEQ ID NO: 3220656 - DNA, 25 bp, Homo sapien
gcaggaggctttggtcggaccatcc

SEQ ID NO: 3220657 - DNA, 25 bp, Homo sapien
cgtgaagcccaagcgcaggaaaaag

SEQ ID NO: 3220658 - DNA, 25 bp, Homo sapien
cgccgagccatccttccctgagata

SEQ ID NO: 3220659 - DNA, 25 bp, Homo sapien
gagatacccctggatggtaccctgg

SEQ ID NO: 3220660 - DNA, 25 bp, Homo sapien
gcaagccggccaatatccgtggcac

SEQ ID NO: 3220661 - DNA, 25 bp, Homo sapien
tgtggtgtacattaccctacgctcc

SEQ ID NO: 3220662 - DNA, 25 bp, Homo sapien
tccagcatggacaggcggctgagaa

SEQ ID NO: 3220663 - DNA, 25 bp, Homo sapien
caaggacccggagaaaccttctgct

SEQ ID NO: 3220664 - DNA, 25 bp, Homo sapien
tgggcactgcgtgtgccatctactt

SEQ ID NO: 3220665 - DNA, 25 bp, Homo sapien
gcgtgtgccatctacttgggcttcc

SEQ ID NO: 3220666 - DNA, 25 bp, Homo sapien
cagagaaatgacctgtccagacaag

SEQ ID NO: 3220667 - DNA, 25 bp, Homo sapien
cgttcaacatgtggatgcggcagag

SEQ ID NO: 3220668 - DNA, 25 bp, Homo sapien
cataaactggttcatctgctccctg

SEQ ID NO: 3220669 - DNA, 25 bp, Homo sapien
gcatcacattagcaggagccaactg

SEQ ID NO: 3220670 - DNA, 25 bp, Homo sapien
tcttcctggagccaagcatggggcc

SEQ ID NO: 3220671 - DNA, 25 bp, Homo sapien
aacagaactagagatgcttttattt

SEQ ID NO: 3220672 - DNA, 25 bp, Homo sapien
ttagagtcaaggattacattcttcc

SEQ ID NO: 3220673 - DNA, 25 bp, Homo sapien
ccagctgtgtaagtaaggttgctta

SEQ ID NO: 3220674 - DNA, 25 bp, Homo sapien
gatagcaaacattctcgatcttttg

SEQ ID NO: 3220675 - DNA, 25 bp, Homo sapien
tacaagttacttgcttggctgcggc

SEQ ID NO: 3220676 - DNA, 25 bp, Homo sapien
ttgcgaacaggacactagagggctc

SEQ ID NO: 3220677 - DNA, 25 bp, Homo sapien
tcttttgaacttcatgagactgaca

SEQ ID NO: 3220678 - DNA, 25 bp, Homo sapien
gaagacaaatgaaacggccaagatg

SEQ ID NO: 3220679 - DNA, 25 bp, Homo sapien
taaccccaagttatgtgggatggac

SEQ ID NO: 3220680 - DNA, 25 bp, Homo sapien
ccaagatggtaaggtgagtagttcc

SEQ ID NO: 3220681 - DNA, 25 bp, Homo sapien
ggaacgcttgtgctctaaccccaag

SEQ ID NO: 3220682 - DNA, 25 bp, Homo sapien
caagaacaaggtatccatctccagg

SEQ ID NO: 3220683 - DNA, 25 bp, Homo sapien
gtttaggtcaacaggaatgatgtcc

SEQ ID NO: 3220684 - DNA, 25 bp, Homo sapien
tcaggactatgaggagcaagggata

SEQ ID NO: 3220685 - DNA, 25 bp, Homo sapien
aacaaacctgggtcagcagtggcaa

SEQ ID NO: 3220686 - DNA, 25 bp, Homo sapien
ttcacagacttgtaagaccagttct

SEQ ID NO: 3220687 - DNA, 25 bp, Homo sapien
tatgcttatttggtgttctcttgag

SEQ ID NO: 3220688 - DNA, 25 bp, Homo sapien
catatatgagtgattaggctggcac

SEQ ID NO: 3220689 - DNA, 25 bp, Homo sapien
ggcacatagtgttacttcacagact

SEQ ID NO: 3220690 - DNA, 25 bp, Homo sapien
cagtgccttcctgtagttcttcttt

SEQ ID NO: 3220691 - DNA, 25 bp, Homo sapien
tgtgctccagaagttgcaataccgg

SEQ ID NO: 3220692 - DNA, 25 bp, Homo sapien
gtgctccagaagttgcaataccgga

SEQ ID NO: 3220693 - DNA, 25 bp, Homo sapien
ctgtgctccagaagttgcaataccg

SEQ ID NO: 3220694 - DNA, 25 bp, Homo sapien
gttgcaataccggagaggtgatgga

SEQ ID NO: 3220695 - DNA, 25 bp, Homo sapien
taaccatgaagtacacaccatggga

SEQ ID NO: 3220696 - DNA, 25 bp, Homo sapien
ctgttgctgctttctatggtaacca

SEQ ID NO: 3220697 - DNA, 25 bp, Homo sapien
agtacacaccatgggagctacccac

SEQ ID NO: 3220698 - DNA, 25 bp, Homo sapien
tctatggtaaccatgaagtacacac

SEQ ID NO: 3220699 - DNA, 25 bp, Homo sapien
tagacattgcatactccccacagaa

SEQ ID NO: 3220700 - DNA, 25 bp, Homo sapien
tctcctgtgtagaacaagaactcca

SEQ ID NO: 3220701 - DNA, 25 bp, Homo sapien
cacttattgtgtcttagggatgcct

SEQ ID NO: 3220702 - DNA, 25 bp, Homo sapien
attcagttaatgtccaggcagtgcc

SEQ ID NO: 3220703 - DNA, 25 bp, Homo sapien
ttgagaaggggcttgaatctataga

SEQ ID NO: 3220704 - DNA, 25 bp, Homo sapien
ctttgagaaggggcttgaatctata

SEQ ID NO: 3220705 - DNA, 25 bp, Homo sapien
tttgagaaggggcttgaatctatag

SEQ ID NO: 3220706 - DNA, 25 bp, Homo sapien
tgagaaggggcttgaatctatagag

SEQ ID NO: 3220707 - DNA, 25 bp, Homo sapien
ccggtttctacatgctgtgaacttg

SEQ ID NO: 3220708 - DNA, 25 bp, Homo sapien
tgtttttccttaggcagtccctcca

SEQ ID NO: 3220709 - DNA, 25 bp, Homo sapien
gtgagctgtagtctctctcaaattc

SEQ ID NO: 3220710 - DNA, 25 bp, Homo sapien
catgggaacccgatgactgcctttt

SEQ ID NO: 3220711 - DNA, 25 bp, Homo sapien
caaagaactgcagtataatgtgcat

SEQ ID NO: 3220712 - DNA, 25 bp, Homo sapien
taatgtgcattcttaaccaaagcac

SEQ ID NO: 3220713 - DNA, 25 bp, Homo sapien
tcagtcaagggtggcttcattcccc

SEQ ID NO: 3220714 - DNA, 25 bp, Homo sapien
ctcagtcaagggtggcttcattccc

SEQ ID NO: 3220715 - DNA, 25 bp, Homo sapien
tagagagtgcctagccattagtatc

SEQ ID NO: 3220716 - DNA, 25 bp, Homo sapien
tccaaagtagcatgcagactacagt

SEQ ID NO: 3220717 - DNA, 25 bp, Homo sapien
tcaaggagtcttaccaacagtgtct

SEQ ID NO: 3220718 - DNA, 25 bp, Homo sapien
tatcttgccaaaagcacctacctga

SEQ ID NO: 3220719 - DNA, 25 bp, Homo sapien
tagagatcacaacccaccaaatttc

SEQ ID NO: 3220720 - DNA, 25 bp, Homo sapien
ctccatatgttctagagatcacaac

SEQ ID NO: 3220721 - DNA, 25 bp, Homo sapien
gagttgcgttttcgtgtttttctca

SEQ ID NO: 3220722 - DNA, 25 bp, Homo sapien
tggaagcttgagttgcgttttcgtg

SEQ ID NO: 3220723 - DNA, 25 bp, Homo sapien
aatctcttcagattccatcatagtc

SEQ ID NO: 3220724 - DNA, 25 bp, Homo sapien
ttaaaatctcttcagattccatcat

SEQ ID NO: 3220725 - DNA, 25 bp, Homo sapien
atctcttcagattccatcatagtca

SEQ ID NO: 3220726 - DNA, 25 bp, Homo sapien
aaaatctcttcagattccatcatag

SEQ ID NO: 3220727 - DNA, 25 bp, Homo sapien
ctgagacttcttctgattggctgac

SEQ ID NO: 3220728 - DNA, 25 bp, Homo sapien
tctgagacttcttctgattggctga

SEQ ID NO: 3220729 - DNA, 25 bp, Homo sapien
ttctgagacttcttctgattggctg

SEQ ID NO: 3220730 - DNA, 25 bp, Homo sapien
tagtttccaggacaacgacccatct

SEQ ID NO: 3220731 - DNA, 25 bp, Homo sapien
tccacttggacgtctgagagacaac

SEQ ID NO: 3220732 - DNA, 25 bp, Homo sapien
tctaatttctgccttgtcggctggc

SEQ ID NO: 3220733 - DNA, 25 bp, Homo sapien
gctgctagaacaccacattaccttg

SEQ ID NO: 3220734 - DNA, 25 bp, Homo sapien
gctggtgagagtatcattgatgaga

SEQ ID NO: 3220735 - DNA, 25 bp, Homo sapien
gtgctggtgagagtatcattgatga

SEQ ID NO: 3220736 - DNA, 25 bp, Homo sapien
aaggtgctggtgagagtatcattga

SEQ ID NO: 3220737 - DNA, 25 bp, Homo sapien
gagattcttcaagggccctaagagg

SEQ ID NO: 3220738 - DNA, 25 bp, Homo sapien
caatgttccccagtcagtggattca

SEQ ID NO: 3220739 - DNA, 25 bp, Homo sapien
cacagggtgagagttggcataatac

SEQ ID NO: 3220740 - DNA, 25 bp, Homo sapien
cagtcagtggattcacagggtgaga

SEQ ID NO: 3220741 - DNA, 25 bp, Homo sapien
ttcttaaacaatgttccccagtcag

SEQ ID NO: 3220742 - DNA, 25 bp, Homo sapien
tgaagtcgttctactcatgctctgt

SEQ ID NO: 3220743 - DNA, 25 bp, Homo sapien
ttgttggattctctaagaagctcag

SEQ ID NO: 3220744 - DNA, 25 bp, Homo sapien
tcactgtggtgccatatgggatttg

SEQ ID NO: 3220745 - DNA, 25 bp, Homo sapien
ggacattgttggattctctaagaag

SEQ ID NO: 3220746 - DNA, 25 bp, Homo sapien
cacagttaggtttgccagtttccaa

SEQ ID NO: 3220747 - DNA, 25 bp, Homo sapien
tgctgtgactgacgggactcttggt

SEQ ID NO: 3220748 - DNA, 25 bp, Homo sapien
gactcttggtggaagccctattccc

SEQ ID NO: 3220749 - DNA, 25 bp, Homo sapien
gaggaagacctcctgttgctgtgac

SEQ ID NO: 3220750 - DNA, 25 bp, Homo sapien
gcaatagtccctctaagaactgggt

SEQ ID NO: 3220751 - DNA, 25 bp, Homo sapien
tacaaggtggttggaagaagtcttc

SEQ ID NO: 3220752 - DNA, 25 bp, Homo sapien
gaggctgcgcaatctctaaggaaaa

SEQ ID NO: 3220753 - DNA, 25 bp, Homo sapien
gttgctctagaggaacatctgaggc

SEQ ID NO: 3220754 - DNA, 25 bp, Homo sapien
cacagagtgagaaatccaagaaggt

SEQ ID NO: 3220755 - DNA, 25 bp, Homo sapien
catcatggcgcggataccaggaggt

SEQ ID NO: 3220756 - DNA, 25 bp, Homo sapien
gcttgtctcatggaatgtcactgcc

SEQ ID NO: 3220757 - DNA, 25 bp, Homo sapien
gagatctcaggccttcttgacatgg

SEQ ID NO: 3220758 - DNA, 25 bp, Homo sapien
gagagagtgtccagtacagaggccc

SEQ ID NO: 3220759 - DNA, 25 bp, Homo sapien
taagtcgagaggattcacgtcccag

SEQ ID NO: 3220760 - DNA, 25 bp, Homo sapien
caaacagtgggttaggatagcttcc

SEQ ID NO: 3220761 - DNA, 25 bp, Homo sapien
tactcagggtttctcatcaggttgc

SEQ ID NO: 3220762 - DNA, 25 bp, Homo sapien
gctaaatgatcctacagactgagtg

SEQ ID NO: 3220763 - DNA, 25 bp, Homo sapien
gatcctacagactgagtgtatctgc

SEQ ID NO: 3220764 - DNA, 25 bp, Homo sapien
gttgctaaatgatcctacagactga

SEQ ID NO: 3220765 - DNA, 25 bp, Homo sapien
ccccgagttgctaaatgatcctaca

SEQ ID NO: 3220766 - DNA, 25 bp, Homo sapien
acagtcatggcacactgcagtcgtg

SEQ ID NO: 3220767 - DNA, 25 bp, Homo sapien
ggcacactgcagtcgtgaactcctg

SEQ ID NO: 3220768 - DNA, 25 bp, Homo sapien
agtcatggcacactgcagtcgtgaa

SEQ ID NO: 3220769 - DNA, 25 bp, Homo sapien
catggcacactgcagtcgtgaactc

SEQ ID NO: 3220770 - DNA, 25 bp, Homo sapien
aactgaagcttgtgtcagcatttgc

SEQ ID NO: 3220771 - DNA, 25 bp, Homo sapien
actgaagcttgtgtcagcatttgct

SEQ ID NO: 3220772 - DNA, 25 bp, Homo sapien
tagaggccttcataggacagcaggt

SEQ ID NO: 3220773 - DNA, 25 bp, Homo sapien
tttagcaccggtgacctagaggcct

SEQ ID NO: 3220774 - DNA, 25 bp, Homo sapien
tcaaaaggagtcgtcaagccctggg

SEQ ID NO: 3220775 - DNA, 25 bp, Homo sapien
gaattgtcaggtggctcaaaaggag

SEQ ID NO: 3220776 - DNA, 25 bp, Homo sapien
tgaaaaatcatgagacgctcccctg

SEQ ID NO: 3220777 - DNA, 25 bp, Homo sapien
aaggccctacacctctgaaacggag

SEQ ID NO: 3220778 - DNA, 25 bp, Homo sapien
gagaatgtctaaccttcaagagtgg

SEQ ID NO: 3220779 - DNA, 25 bp, Homo sapien
gaaaagcagtatcactccatccagc

SEQ ID NO: 3220780 - DNA, 25 bp, Homo sapien
taacagaggtgccaagataacagag

SEQ ID NO: 3220781 - DNA, 25 bp, Homo sapien
cagaggtgcaacaggtcagagatgc

SEQ ID NO: 3220782 - DNA, 25 bp, Homo sapien
gctaagataacagaggtgccaagat

SEQ ID NO: 3220783 - DNA, 25 bp, Homo sapien
gatgcaggaagtgtcttgaaaagct

SEQ ID NO: 3220784 - DNA, 25 bp, Homo sapien
tatttaaaggtccatgtattgttcc

SEQ ID NO: 3220785 - DNA, 25 bp, Homo sapien
aacaaggatcacttcaaaactggtc

SEQ ID NO: 3220786 - DNA, 25 bp, Homo sapien
gaataaagtacacctgaaatcacct

SEQ ID NO: 3220787 - DNA, 25 bp, Homo sapien
tgttccttatgtgttcttgcagaga

SEQ ID NO: 3220788 - DNA, 25 bp, Homo sapien
caaagtaattttatcacaggaggta

SEQ ID NO: 3220789 - DNA, 25 bp, Homo sapien
caattcagatttttagtttcccgag

SEQ ID NO: 3220790 - DNA, 25 bp, Homo sapien
cacaggaggtacagcgtctttccac

SEQ ID NO: 3220791 - DNA, 25 bp, Homo sapien
ttttagtttcccgagatacatgaga

SEQ ID NO: 3220792 - DNA, 25 bp, Homo sapien
cagtcttaatgagttagctggttca

SEQ ID NO: 3220793 - DNA, 25 bp, Homo sapien
gagttagctggttcactttagactt

SEQ ID NO: 3220794 - DNA, 25 bp, Homo sapien
taatgagttagctggttcactttag

SEQ ID NO: 3220795 - DNA, 25 bp, Homo sapien
tcttaatgagttagctggttcactt

SEQ ID NO: 3220796 - DNA, 25 bp, Homo sapien
caaaacaggagatgtaaccaaaggt

SEQ ID NO: 3220797 - DNA, 25 bp, Homo sapien
gttaggtctgctccattgttgctca

SEQ ID NO: 3220798 - DNA, 25 bp, Homo sapien
aatttgagccaaacaaaaggatagc

SEQ ID NO: 3220799 - DNA, 25 bp, Homo sapien
caccagtatcaaattttttaagtgg

SEQ ID NO: 3220800 - DNA, 25 bp, Homo sapien
ccacatgtgatgaactaagggagct

SEQ ID NO: 3220801 - DNA, 25 bp, Homo sapien
cagcagagctggtaatatttgccca

SEQ ID NO: 3220802 - DNA, 25 bp, Homo sapien
taatggcccaagagatttcctgact

SEQ ID NO: 3220803 - DNA, 25 bp, Homo sapien
catccaaagggttgcagcttacgag

SEQ ID NO: 3220804 - DNA, 25 bp, Homo sapien
gacaatgtaatatcagattgacaac

SEQ ID NO: 3220805 - DNA, 25 bp, Homo sapien
ttgcaaaaggccaaaactttggaca

SEQ ID NO: 3220806 - DNA, 25 bp, Homo sapien
ggccaaaactttggacaatgtaata

SEQ ID NO: 3220807 - DNA, 25 bp, Homo sapien
gattgacaaccaaggcaaccaacca

SEQ ID NO: 3220808 - DNA, 25 bp, Homo sapien
caaggcctaaaccaatggttttgat

SEQ ID NO: 3220809 - DNA, 25 bp, Homo sapien
aatgatccccagattaagattccaa

SEQ ID NO: 3220810 - DNA, 25 bp, Homo sapien
gcccagccagttaaggcattaaatg

SEQ ID NO: 3220811 - DNA, 25 bp, Homo sapien
tggttttgataattgggacaacagc

SEQ ID NO: 3220812 - DNA, 25 bp, Homo sapien
tagcagcggatttgatacttcttct

SEQ ID NO: 3220813 - DNA, 25 bp, Homo sapien
ccaatgtaatttagcagcggatttg

SEQ ID NO: 3220814 - DNA, 25 bp, Homo sapien
ggatttgatacttcttctgcatcca

SEQ ID NO: 3220815 - DNA, 25 bp, Homo sapien
tactgatagcccagctccaatgtaa

SEQ ID NO: 3220816 - DNA, 25 bp, Homo sapien
gatagactgggtaaactggccttca

SEQ ID NO: 3220817 - DNA, 25 bp, Homo sapien
tgggcaacaaatacccaacagggaa

SEQ ID NO: 3220818 - DNA, 25 bp, Homo sapien
tacagggttcctcaggtgcactgcc

SEQ ID NO: 3220819 - DNA, 25 bp, Homo sapien
cctagatgcactacgggaagagttc

SEQ ID NO: 3220820 - DNA, 25 bp, Homo sapien
aatgactgtggccttctatggagag

SEQ ID NO: 3220821 - DNA, 25 bp, Homo sapien
gatgtagggcagatatcaactatcc

SEQ ID NO: 3220822 - DNA, 25 bp, Homo sapien
gaaccagtttgcagggaagggtcca

SEQ ID NO: 3220823 - DNA, 25 bp, Homo sapien
ggacaatgacatgccctgatgtagg

SEQ ID NO: 3220824 - DNA, 25 bp, Homo sapien
cagataagctgaccctactaggaaa

SEQ ID NO: 3220825 - DNA, 25 bp, Homo sapien
catgggtcaggcacagataagctga

SEQ ID NO: 3220826 - DNA, 25 bp, Homo sapien
gttttgcctcgaagaagcatgggtc

SEQ ID NO: 3220827 - DNA, 25 bp, Homo sapien
tggtgtgagcatggtgttttgcctc

SEQ ID NO: 3220828 - DNA, 25 bp, Homo sapien
gacctaccttgtctagatcataaga

SEQ ID NO: 3220829 - DNA, 25 bp, Homo sapien
cccatgtcatgcagaactttgatta

SEQ ID NO: 3220830 - DNA, 25 bp, Homo sapien
cacgttctgtgtaggagctggctat

SEQ ID NO: 3220831 - DNA, 25 bp, Homo sapien
gaccaagaagaatccgaacaggcgg

SEQ ID NO: 3220832 - DNA, 25 bp, Homo sapien
tcataatactggtttatatcaagct

SEQ ID NO: 3220833 - DNA, 25 bp, Homo sapien
tggtcctgccgttttgccagaactc

SEQ ID NO: 3220834 - DNA, 25 bp, Homo sapien
ttcaaattgccccttcagtggtcct

SEQ ID NO: 3220835 - DNA, 25 bp, Homo sapien
cacacaccttaaataatcggatcct

SEQ ID NO: 3220836 - DNA, 25 bp, Homo sapien
gaacacgtgttatttggtatttcac

SEQ ID NO: 3220837 - DNA, 25 bp, Homo sapien
ttaatggagtggtatccatggaaca

SEQ ID NO: 3220838 - DNA, 25 bp, Homo sapien
tatccatggaacacgtgttatttgg

SEQ ID NO: 3220839 - DNA, 25 bp, Homo sapien
atgctctgttattaatggagtggta

SEQ ID NO: 3220840 - DNA, 25 bp, Homo sapien
gaacgtgaatgatccctatgtccag

SEQ ID NO: 3220841 - DNA, 25 bp, Homo sapien
tcacttcgggtagaatgggatacca

SEQ ID NO: 3220842 - DNA, 25 bp, Homo sapien
taaataaacccgtgtgcttgctgag

SEQ ID NO: 3220843 - DNA, 25 bp, Homo sapien
catagccaggagtgatgagcaaaca

SEQ ID NO: 3220844 - DNA, 25 bp, Homo sapien
tagaaagtttatccacccaggaaca

SEQ ID NO: 3220845 - DNA, 25 bp, Homo sapien
actatgcggtggtgtactgtagaaa

SEQ ID NO: 3220846 - DNA, 25 bp, Homo sapien
ggtgtactgtagaaagtttatccac

SEQ ID NO: 3220847 - DNA, 25 bp, Homo sapien
tactgtagaaagtttatccacccag

SEQ ID NO: 3220848 - DNA, 25 bp, Homo sapien
tcttgaactcagatgaacattactt

SEQ ID NO: 3220849 - DNA, 25 bp, Homo sapien
catgctggtaatccctgctttaacc

SEQ ID NO: 3220850 - DNA, 25 bp, Homo sapien
gaaacagagtaatagagcaaagaag

SEQ ID NO: 3220851 - DNA, 25 bp, Homo sapien
aaaacctcgccgcatggagatagaa

SEQ ID NO: 3220852 - DNA, 25 bp, Homo sapien
tattggcttgcccctgcatatatac

SEQ ID NO: 3220853 - DNA, 25 bp, Homo sapien
catagagtactccagatatcactgc

SEQ ID NO: 3220854 - DNA, 25 bp, Homo sapien
tactccagatatcactgcaagactg

SEQ ID NO: 3220855 - DNA, 25 bp, Homo sapien
cttgatgtagatgattggcacaaat

SEQ ID NO: 3220856 - DNA, 25 bp, Homo sapien
cagtacttgtaagaaagatgccact

SEQ ID NO: 3220857 - DNA, 25 bp, Homo sapien
gaagtgcgcaaacacatagtctaaa

SEQ ID NO: 3220858 - DNA, 25 bp, Homo sapien
gccagaaagtagacagtacttgtaa

SEQ ID NO: 3220859 - DNA, 25 bp, Homo sapien
aaagatgccactgaagtgcgcaaac

SEQ ID NO: 3220860 - DNA, 25 bp, Homo sapien
gactgcttcaggatatagtttagga

SEQ ID NO: 3220861 - DNA, 25 bp, Homo sapien
tggtaggactgcttcaggatatagt

SEQ ID NO: 3220862 - DNA, 25 bp, Homo sapien
gcttcaggatatagtttaggactat

SEQ ID NO: 3220863 - DNA, 25 bp, Homo sapien
taggactgcttcaggatatagttta

SEQ ID NO: 3220864 - DNA, 25 bp, Homo sapien
caacagcaggtagctatagcccaaa

SEQ ID NO: 3220865 - DNA, 25 bp, Homo sapien
tagcccaaagtactcctgacaggaa

SEQ ID NO: 3220866 - DNA, 25 bp, Homo sapien
tgaccacagcactcagagagtgatt

SEQ ID NO: 3220867 - DNA, 25 bp, Homo sapien
atttgctatgaaccaacagcaggta

SEQ ID NO: 3220868 - DNA, 25 bp, Homo sapien
gataccccacattgcagctataaat

SEQ ID NO: 3220869 - DNA, 25 bp, Homo sapien
cccacattgcagctataaatcctgg

SEQ ID NO: 3220870 - DNA, 25 bp, Homo sapien
tgaagataccccacattgcagctat

SEQ ID NO: 3220871 - DNA, 25 bp, Homo sapien
acattgcagctataaatcctggacc

SEQ ID NO: 3220872 - DNA, 25 bp, Homo sapien
tttgctatcgacagtttgggctagg

SEQ ID NO: 3220873 - DNA, 25 bp, Homo sapien
gagaactacctaattataacagcga

SEQ ID NO: 3220874 - DNA, 25 bp, Homo sapien
tagtatggagaaatccttgacttcc

SEQ ID NO: 3220875 - DNA, 25 bp, Homo sapien
taaggcttcagcatcttacatgaga

SEQ ID NO: 3220876 - DNA, 25 bp, Homo sapien
tgcaagtatcattaataggtagttt

SEQ ID NO: 3220877 - DNA, 25 bp, Homo sapien
cagtgcataaggctccagtcaagat

SEQ ID NO: 3220878 - DNA, 25 bp, Homo sapien
agtgcataaggctccagtcaagatg

SEQ ID NO: 3220879 - DNA, 25 bp, Homo sapien
tgatgcaaaatgcaagtatcattaa

SEQ ID NO: 3220880 - DNA, 25 bp, Homo sapien
ggattatagtagtgcgccaccctgc

SEQ ID NO: 3220881 - DNA, 25 bp, Homo sapien
cacagagggcttaggaacttgtcca

SEQ ID NO: 3220882 - DNA, 25 bp, Homo sapien
tccattagaaggtaaggctctccct

SEQ ID NO: 3220883 - DNA, 25 bp, Homo sapien
ggtatttctgcctcacttcactggg

SEQ ID NO: 3220884 - DNA, 25 bp, Homo sapien
ttattcaaagtttatcagcataatt

SEQ ID NO: 3220885 - DNA, 25 bp, Homo sapien
cataatttaatgacatttcaggtta

SEQ ID NO: 3220886 - DNA, 25 bp, Homo sapien
taatgacatttcaggttaaaattaa

SEQ ID NO: 3220887 - DNA, 25 bp, Homo sapien
caaagtttatcagcataatttaatg

SEQ ID NO: 3220888 - DNA, 25 bp, Homo sapien
gaataattaaaagttatccaatata

SEQ ID NO: 3220889 - DNA, 25 bp, Homo sapien
tttacttcacatttaaaattttgca

SEQ ID NO: 3220890 - DNA, 25 bp, Homo sapien
gcatataaattggaaatcccaacta

SEQ ID NO: 3220891 - DNA, 25 bp, Homo sapien
tttgcatataaattggaaatcccaa

SEQ ID NO: 3220892 - DNA, 25 bp, Homo sapien
tcaaactgcttctttcagtgtgaaa

SEQ ID NO: 3220893 - DNA, 25 bp, Homo sapien
caaactgcttctttcagtgtgaaac

SEQ ID NO: 3220894 - DNA, 25 bp, Homo sapien
caagtaatagcctagaataacctga

SEQ ID NO: 3220895 - DNA, 25 bp, Homo sapien
ctcagaacgctgaggtgattgcttg

SEQ ID NO: 3220896 - DNA, 25 bp, Homo sapien
agtattaagacacagtaggagccga

SEQ ID NO: 3220897 - DNA, 25 bp, Homo sapien
aaaccaacagatgttcagttgctct

SEQ ID NO: 3220898 - DNA, 25 bp, Homo sapien
cagttgttgtgcctctttattggac

SEQ ID NO: 3220899 - DNA, 25 bp, Homo sapien
tcacatctgctaaaaaagacagctg

SEQ ID NO: 3220900 - DNA, 25 bp, Homo sapien
cacacttgcattgatccgtgaaaga

SEQ ID NO: 3220901 - DNA, 25 bp, Homo sapien
aatgtgtcaaatgaaagttgctccc

SEQ ID NO: 3220902 - DNA, 25 bp, Homo sapien
tgtagaaatgcgactgaacacaggg

SEQ ID NO: 3220903 - DNA, 25 bp, Homo sapien
tcacggcgaacacctctgtaacaaa

SEQ ID NO: 3220904 - DNA, 25 bp, Homo sapien
tcttcattgtaacggtcacggcgaa

SEQ ID NO: 3220905 - DNA, 25 bp, Homo sapien
tatagctttgcattgacacaggagc

SEQ ID NO: 3220906 - DNA, 25 bp, Homo sapien
gggaaagtgcgttactctgctctca

SEQ ID NO: 3220907 - DNA, 25 bp, Homo sapien
gcttttactgatggccaaaggcgaa

SEQ ID NO: 3220908 - DNA, 25 bp, Homo sapien
gctacaatgctgatgaccgtgcagt

SEQ ID NO: 3220909 - DNA, 25 bp, Homo sapien
tgtatgtagtaccaagcagggatgg

SEQ ID NO: 3220910 - DNA, 25 bp, Homo sapien
ccaactttgtataaggttctgacag

SEQ ID NO: 3220911 - DNA, 25 bp, Homo sapien
tcacgtgtggctagggactaccata

SEQ ID NO: 3220912 - DNA, 25 bp, Homo sapien
cagcagatttggtactaggcttctc

SEQ ID NO: 3220913 - DNA, 25 bp, Homo sapien
cagtggccacaatttcagtgctcaa

SEQ ID NO: 3220914 - DNA, 25 bp, Homo sapien
ctcttgcttatggatttagtaggcc

SEQ ID NO: 3220915 - DNA, 25 bp, Homo sapien
tgtagtttgtcccttgattgtgttg

SEQ ID NO: 3220916 - DNA, 25 bp, Homo sapien
ctgagctggcctcacacgatgtagt

SEQ ID NO: 3220917 - DNA, 25 bp, Homo sapien
tatggatttagtaggccaggaatga

SEQ ID NO: 3220918 - DNA, 25 bp, Homo sapien
tcttaggatgacagagtagtagcag

SEQ ID NO: 3220919 - DNA, 25 bp, Homo sapien
caaagcattacacatatactatgaa

SEQ ID NO: 3220920 - DNA, 25 bp, Homo sapien
ttaatagaagtaatgaaggagcagg

SEQ ID NO: 3220921 - DNA, 25 bp, Homo sapien
tccacatgctgtcaaaatttcagag

SEQ ID NO: 3220922 - DNA, 25 bp, Homo sapien
ttcctttggtgccttagtcatttcc

SEQ ID NO: 3220923 - DNA, 25 bp, Homo sapien
tcctttggtgccttagtcatttcca

SEQ ID NO: 3220924 - DNA, 25 bp, Homo sapien
ctttcctttggtgccttagtcattt

SEQ ID NO: 3220925 - DNA, 25 bp, Homo sapien
cctttggtgccttagtcatttccat

SEQ ID NO: 3220926 - DNA, 25 bp, Homo sapien
tacagcttggaagaatgtttccaca

SEQ ID NO: 3220927 - DNA, 25 bp, Homo sapien
aaaggcatggtttgattgtcggagc

SEQ ID NO: 3220928 - DNA, 25 bp, Homo sapien
gagaccattattagttacagcttgg

SEQ ID NO: 3220929 - DNA, 25 bp, Homo sapien
gccctggattcttaattaatacaac

SEQ ID NO: 3220930 - DNA, 25 bp, Homo sapien
gagtttcttgactctatgccagcca

SEQ ID NO: 3220931 - DNA, 25 bp, Homo sapien
gcctattcagttgggagctctccca

SEQ ID NO: 3220932 - DNA, 25 bp, Homo sapien
gcttactctgctgctgctaagtcag

SEQ ID NO: 3220933 - DNA, 25 bp, Homo sapien
ttgaaccttaagtactgacagtggg

SEQ ID NO: 3220934 - DNA, 25 bp, Homo sapien
gaatattctttaggattggttctag

SEQ ID NO: 3220935 - DNA, 25 bp, Homo sapien
cttcaggtcctccagtttaaattct

SEQ ID NO: 3220936 - DNA, 25 bp, Homo sapien
cttaatgggacaggctgaatatcaa

SEQ ID NO: 3220937 - DNA, 25 bp, Homo sapien
aattcttcttgagactgtgtggact

SEQ ID NO: 3220938 - DNA, 25 bp, Homo sapien
ttctcttctttaccaggtgccaaaa

SEQ ID NO: 3220939 - DNA, 25 bp, Homo sapien
aattctcttctttaccaggtgccaa

SEQ ID NO: 3220940 - DNA, 25 bp, Homo sapien
caaattctcttctttaccaggtgcc

SEQ ID NO: 3220941 - DNA, 25 bp, Homo sapien
tctcttctttaccaggtgccaaaat

SEQ ID NO: 3220942 - DNA, 25 bp, Homo sapien
ctaaagcatcgggaactctagcagg

SEQ ID NO: 3220943 - DNA, 25 bp, Homo sapien
ctagcaggaaaagaatcaggagatc

SEQ ID NO: 3220944 - DNA, 25 bp, Homo sapien
gaatcaggagatcctgctccagcac

SEQ ID NO: 3220945 - DNA, 25 bp, Homo sapien
aaagcatcgggaactctagcaggaa

SEQ ID NO: 3220946 - DNA, 25 bp, Homo sapien
ctggttccaatggcaaccctggtat

SEQ ID NO: 3220947 - DNA, 25 bp, Homo sapien
tcaattctgatagtgagtaatgtca

SEQ ID NO: 3220948 - DNA, 25 bp, Homo sapien
caattctgatagtgagtaatgtcat

SEQ ID NO: 3220949 - DNA, 25 bp, Homo sapien
gcccagcatctttcaaaccaatttt

SEQ ID NO: 3220950 - DNA, 25 bp, Homo sapien
tagggatcgatgcactgcccagcat

SEQ ID NO: 3220951 - DNA, 25 bp, Homo sapien
taatatagggatcgatgcactgccc

SEQ ID NO: 3220952 - DNA, 25 bp, Homo sapien
ctgtaatatagggatcgatgcactg

SEQ ID NO: 3220953 - DNA, 25 bp, Homo sapien
taatttttcaacatgcttctggagc

SEQ ID NO: 3220954 - DNA, 25 bp, Homo sapien
catctccatgaaagcaaaacacttg

SEQ ID NO: 3220955 - DNA, 25 bp, Homo sapien
tatcttgcacaggagttaagtctat

SEQ ID NO: 3220956 - DNA, 25 bp, Homo sapien
tttcaacatgcttctggagctcaat

SEQ ID NO: 3220957 - DNA, 25 bp, Homo sapien
tccggcctactggtctgggtacggc

SEQ ID NO: 3220958 - DNA, 25 bp, Homo sapien
gcctactggtctgggtacggcttgc

SEQ ID NO: 3220959 - DNA, 25 bp, Homo sapien
gtacggcttgcttcctgcctgttga

SEQ ID NO: 3220960 - DNA, 25 bp, Homo sapien
ctggtctgggtacggcttgcttcct

SEQ ID NO: 3220961 - DNA, 25 bp, Homo sapien
gaaggactaaatctcttgaagtgca

SEQ ID NO: 3220962 - DNA, 25 bp, Homo sapien
taaatttggccgagaatacgttcag

SEQ ID NO: 3220963 - DNA, 25 bp, Homo sapien
cagtcttaggaactgagcgaacaac

SEQ ID NO: 3220964 - DNA, 25 bp, Homo sapien
ctgagcgaacaacaaagtaaggcaa

SEQ ID NO: 3220965 - DNA, 25 bp, Homo sapien
tacttgggcgaaggtcatcacttag

SEQ ID NO: 3220966 - DNA, 25 bp, Homo sapien
tccctgagatgcacagcaggatagg

SEQ ID NO: 3220967 - DNA, 25 bp, Homo sapien
tggagtgggtagtcaacactggttc

SEQ ID NO: 3220968 - DNA, 25 bp, Homo sapien
tgtattccatgacagctagcacggt

SEQ ID NO: 3220969 - DNA, 25 bp, Homo sapien
ccttaagtgaaggaccaagccaggc

SEQ ID NO: 3220970 - DNA, 25 bp, Homo sapien
tcagggtgactgtgatcaggactga

SEQ ID NO: 3220971 - DNA, 25 bp, Homo sapien
atccttaagtgaaggaccaagccag

SEQ ID NO: 3220972 - DNA, 25 bp, Homo sapien
tccttaagtgaaggaccaagccagg

SEQ ID NO: 3220973 - DNA, 25 bp, Homo sapien
ctctcttctccgctgttcccacacc

SEQ ID NO: 3220974 - DNA, 25 bp, Homo sapien
gctgttcccacaccagctcctgccc

SEQ ID NO: 3220975 - DNA, 25 bp, Homo sapien
ctgctctcttctccgctgttcccac

SEQ ID NO: 3220976 - DNA, 25 bp, Homo sapien
cgctgttcccacaccagctcctgcc

SEQ ID NO: 3220977 - DNA, 25 bp, Homo sapien
ctccatggggactgtcaccctggcc

SEQ ID NO: 3220978 - DNA, 25 bp, Homo sapien
tccatggggactgtcaccctggccc

SEQ ID NO: 3220979 - DNA, 25 bp, Homo sapien
ttctgtggcgatgaagcaactttgc

SEQ ID NO: 3220980 - DNA, 25 bp, Homo sapien
ttgcatggggccacttttgtgttga

SEQ ID NO: 3220981 - DNA, 25 bp, Homo sapien
ggttgcctgctttgtcttgatcagc

SEQ ID NO: 3220982 - DNA, 25 bp, Homo sapien
tgagaagacaaggttctgtggcgat

SEQ ID NO: 3220983 - DNA, 25 bp, Homo sapien
tgtctgtccagtctcgattccctac

SEQ ID NO: 3220984 - DNA, 25 bp, Homo sapien
tctattcctccatagtttaagcttg

SEQ ID NO: 3220985 - DNA, 25 bp, Homo sapien
caacacgtacaaggttctcaatggt

SEQ ID NO: 3220986 - DNA, 25 bp, Homo sapien
acaccctactcacattgtcttcttt

SEQ ID NO: 3220987 - DNA, 25 bp, Homo sapien
ggttatgagactgccacggtacaaa

SEQ ID NO: 3220988 - DNA, 25 bp, Homo sapien
ttatgagactgccacggtacaaagc

SEQ ID NO: 3220989 - DNA, 25 bp, Homo sapien
ctcattggttatgagactgccacgg

SEQ ID NO: 3220990 - DNA, 25 bp, Homo sapien
cattggttatgagactgccacggta

SEQ ID NO: 3220991 - DNA, 25 bp, Homo sapien
ctgagttttcagtagggtctgaatt

SEQ ID NO: 3220992 - DNA, 25 bp, Homo sapien
ttcagtagggtctgaattaaatggt

SEQ ID NO: 3220993 - DNA, 25 bp, Homo sapien
gagttttcagtagggtctgaattaa

SEQ ID NO: 3220994 - DNA, 25 bp, Homo sapien
ttgtaaagggcctactgagttttca

SEQ ID NO: 3220995 - DNA, 25 bp, Homo sapien
tttaggtcccaaggcatcctcccca

SEQ ID NO: 3220996 - DNA, 25 bp, Homo sapien
tgattttaggtcccaaggcatcctc

SEQ ID NO: 3220997 - DNA, 25 bp, Homo sapien
gattttaggtcccaaggcatcctcc

SEQ ID NO: 3220998 - DNA, 25 bp, Homo sapien
ttaggtcccaaggcatcctccccag

SEQ ID NO: 3220999 - DNA, 25 bp, Homo sapien
cacttctacatgctgtcctggttct

SEQ ID NO: 3221000 - DNA, 25 bp, Homo sapien
accgcttctagagctgggtcactgg

SEQ ID NO: 3221001 - DNA, 25 bp, Homo sapien
gagttttatagtgagagagtaccgc

SEQ ID NO: 3221002 - DNA, 25 bp, Homo sapien
tggttccttagtgagagttttatag

SEQ ID NO: 3221003 - DNA, 25 bp, Homo sapien
tggaacatgcactccttcagcagct

SEQ ID NO: 3221004 - DNA, 25 bp, Homo sapien
tatgaatagcaattcatgctgcaga

SEQ ID NO: 3221005 - DNA, 25 bp, Homo sapien
gaacatgcactccttcagcagctct

SEQ ID NO: 3221006 - DNA, 25 bp, Homo sapien
catctggaacatgcactccttcagc

SEQ ID NO: 3221007 - DNA, 25 bp, Homo sapien
aacggcactgctatagagttctcgc

SEQ ID NO: 3221008 - DNA, 25 bp, Homo sapien
ttcccatacaccagtacaaggcttg

SEQ ID NO: 3221009 - DNA, 25 bp, Homo sapien
gggatgaatatctcagcatacctga

SEQ ID NO: 3221010 - DNA, 25 bp, Homo sapien
ctttgacacaggagttgaacggcac

SEQ ID NO: 3221011 - DNA, 25 bp, Homo sapien
gctctgactgcgaccatgctgtcct

SEQ ID NO: 3221012 - DNA, 25 bp, Homo sapien
aactggtctacgagctctgactgcg

SEQ ID NO: 3221013 - DNA, 25 bp, Homo sapien
tcaaggcaactggtctacgagctct

SEQ ID NO: 3221014 - DNA, 25 bp, Homo sapien
ctctgactgcgaccatgctgtcctg

SEQ ID NO: 3221015 - DNA, 25 bp, Homo sapien
tcagccctggaaagaaaggttcatt

SEQ ID NO: 3221016 - DNA, 25 bp, Homo sapien
cttcagccctggaaagaaaggttca

SEQ ID NO: 3221017 - DNA, 25 bp, Homo sapien
tgccttcagccctggaaagaaaggt

SEQ ID NO: 3221018 - DNA, 25 bp, Homo sapien
agccctggaaagaaaggttcattgg

SEQ ID NO: 3221019 - DNA, 25 bp, Homo sapien
aaagatgactccttctagatatgtc

SEQ ID NO: 3221020 - DNA, 25 bp, Homo sapien
ttggtatctggagagggctttctct

SEQ ID NO: 3221021 - DNA, 25 bp, Homo sapien
gatttggtatctggagagggctttc

SEQ ID NO: 3221022 - DNA, 25 bp, Homo sapien
ctgcttcaaagatgactccttctag

SEQ ID NO: 3221023 - DNA, 25 bp, Homo sapien
gagagtccaggagtggtctattctt

SEQ ID NO: 3221024 - DNA, 25 bp, Homo sapien
tccaaatgcacaattttcctgctgt

SEQ ID NO: 3221025 - DNA, 25 bp, Homo sapien
gcccagcaagtttggatttggcacc

SEQ ID NO: 3221026 - DNA, 25 bp, Homo sapien
tgtactattcactgtggcccagcaa

SEQ ID NO: 3221027 - DNA, 25 bp, Homo sapien
gtaacataagatctttcacgtcagt

SEQ ID NO: 3221028 - DNA, 25 bp, Homo sapien
cataagatctttcacgtcagtttct

SEQ ID NO: 3221029 - DNA, 25 bp, Homo sapien
catgtaacataagatctttcacgtc

SEQ ID NO: 3221030 - DNA, 25 bp, Homo sapien
cttgttcatgtaacataagatcttt

SEQ ID NO: 3221031 - DNA, 25 bp, Homo sapien
tttctatcccgatgacctgaggttc

SEQ ID NO: 3221032 - DNA, 25 bp, Homo sapien
gagttgtttatttctatcccgatga

SEQ ID NO: 3221033 - DNA, 25 bp, Homo sapien
gtttatttctatcccgatgacctga

SEQ ID NO: 3221034 - DNA, 25 bp, Homo sapien
tcctgaggtgggagttgtttatttc

SEQ ID NO: 3221035 - DNA, 25 bp, Homo sapien
tcaggcaggtaatcttgataccatc

SEQ ID NO: 3221036 - DNA, 25 bp, Homo sapien
tgataccatctttgacctccacttt

SEQ ID NO: 3221037 - DNA, 25 bp, Homo sapien
tctccatgtctgagtagtataagcg

SEQ ID NO: 3221038 - DNA, 25 bp, Homo sapien
catttactcagacaatcaggcaggt

SEQ ID NO: 3221039 - DNA, 25 bp, Homo sapien
gttgggcagcaggagaaacttctga

SEQ ID NO: 3221040 - DNA, 25 bp, Homo sapien
tcagtcacccacagggttgggcagc

SEQ ID NO: 3221041 - DNA, 25 bp, Homo sapien
gggcagcaggagaaacttctgacta

SEQ ID NO: 3221042 - DNA, 25 bp, Homo sapien
ttctgactaagcaactgctcatgcc

SEQ ID NO: 3221043 - DNA, 25 bp, Homo sapien
taagaacaggaacttctaccatggt

SEQ ID NO: 3221044 - DNA, 25 bp, Homo sapien
cagggatgttgttttgatgtagacc

SEQ ID NO: 3221045 - DNA, 25 bp, Homo sapien
gcctcaaatggcttgcaatcgctct

SEQ ID NO: 3221046 - DNA, 25 bp, Homo sapien
cattaagacatccaacaccagaatc

SEQ ID NO: 3221047 - DNA, 25 bp, Homo sapien
attaagatagcttgtgtaagaggcc

SEQ ID NO: 3221048 - DNA, 25 bp, Homo sapien
ccattaagatagcttgtgtaagagg

SEQ ID NO: 3221049 - DNA, 25 bp, Homo sapien
cattaagatagcttgtgtaagaggc

SEQ ID NO: 3221050 - DNA, 25 bp, Homo sapien
catggtacccacaggagtttgtgga

SEQ ID NO: 3221051 - DNA, 25 bp, Homo sapien
tcaaccatacctgtgacattggcca

SEQ ID NO: 3221052 - DNA, 25 bp, Homo sapien
ctgaagatcactcatggtacccaca

SEQ ID NO: 3221053 - DNA, 25 bp, Homo sapien
tggatcccaagttgagcacctctct

SEQ ID NO: 3221054 - DNA, 25 bp, Homo sapien
cagcaattttctcatgtttgttcat

SEQ ID NO: 3221055 - DNA, 25 bp, Homo sapien
tccagcaattttctcatgtttgttc

SEQ ID NO: 3221056 - DNA, 25 bp, Homo sapien
ctccagcaattttctcatgtttgtt

SEQ ID NO: 3221057 - DNA, 25 bp, Homo sapien
ccagcaattttctcatgtttgttca

SEQ ID NO: 3221058 - DNA, 25 bp, Homo sapien
cagatctgctttaagggtacataag

SEQ ID NO: 3221059 - DNA, 25 bp, Homo sapien
ctgggtgaaatattgtaagatgtgt

SEQ ID NO: 3221060 - DNA, 25 bp, Homo sapien
gatgtgtgtaagtgttggaaccaaa

SEQ ID NO: 3221061 - DNA, 25 bp, Homo sapien
gtgaggaggacatagcagcttcagt

SEQ ID NO: 3221062 - DNA, 25 bp, Homo sapien
ggcttatcagtcagtataggttaga

SEQ ID NO: 3221063 - DNA, 25 bp, Homo sapien
tgcagaagaggcctcgattaacaaa

SEQ ID NO: 3221064 - DNA, 25 bp, Homo sapien
gcttttagaaggcttatcagtcagt

SEQ ID NO: 3221065 - DNA, 25 bp, Homo sapien
agaggcctcgattaacaaagctgtt

SEQ ID NO: 3221066 - DNA, 25 bp, Homo sapien
cagggattgacacttgaggaacagg

SEQ ID NO: 3221067 - DNA, 25 bp, Homo sapien
ccacattccagggattgacacttga

SEQ ID NO: 3221068 - DNA, 25 bp, Homo sapien
ggaacaggggcttgttacctctata

SEQ ID NO: 3221069 - DNA, 25 bp, Homo sapien
ttacctctataattccaaggttgcc

SEQ ID NO: 3221070 - DNA, 25 bp, Homo sapien
tgaatcgcatacagctcacagtggt

SEQ ID NO: 3221071 - DNA, 25 bp, Homo sapien
tagcagttacaaagcagtcctccct

SEQ ID NO: 3221072 - DNA, 25 bp, Homo sapien
tccttctatctgagcaactgattaa

SEQ ID NO: 3221073 - DNA, 25 bp, Homo sapien
tcacagtggttgtgtgctatttctg

SEQ ID NO: 3221074 - DNA, 25 bp, Homo sapien
attaagatgtagaagaagacagaac

SEQ ID NO: 3221075 - DNA, 25 bp, Homo sapien
agaagaagacagaaccagatgtcat

SEQ ID NO: 3221076 - DNA, 25 bp, Homo sapien
gtagaagaagacagaaccagatgtc

SEQ ID NO: 3221077 - DNA, 25 bp, Homo sapien
aaaattaagatgtagaagaagacag

SEQ ID NO: 3221078 - DNA, 25 bp, Homo sapien
tctgtaacgggctttatagttttca

SEQ ID NO: 3221079 - DNA, 25 bp, Homo sapien
gaaaggatgactaatagttgcttac

SEQ ID NO: 3221080 - DNA, 25 bp, Homo sapien
ttgaaaggatgactaatagttgctt

SEQ ID NO: 3221081 - DNA, 25 bp, Homo sapien
catggtcactgctctggcatgcata

SEQ ID NO: 3221082 - DNA, 25 bp, Homo sapien
ggtgaataaagcatggtcactgctc

SEQ ID NO: 3221083 - DNA, 25 bp, Homo sapien
ctggggaataggataggagcatgga

SEQ ID NO: 3221084 - DNA, 25 bp, Homo sapien
ccagattcatgatttgcatggcatg

SEQ ID NO: 3221085 - DNA, 25 bp, Homo sapien
ttgcatggcatgtgatgaaaagggc

SEQ ID NO: 3221086 - DNA, 25 bp, Homo sapien
gaccccaagggccagattcatgatt

SEQ ID NO: 3221087 - DNA, 25 bp, Homo sapien
ggggtgaccccaagggccagattca

SEQ ID NO: 3221088 - DNA, 25 bp, Homo sapien
cctgaagccctccacaaccctgtgc

SEQ ID NO: 3221089 - DNA, 25 bp, Homo sapien
ctttgtcaacattccctgaagccct

SEQ ID NO: 3221090 - DNA, 25 bp, Homo sapien
tttgtcaacattccctgaagccctc

SEQ ID NO: 3221091 - DNA, 25 bp, Homo sapien
gaagccctccacaaccctgtgcttt

SEQ ID NO: 3221092 - DNA, 25 bp, Homo sapien
gatggcataagatttaaagtgtgtg

SEQ ID NO: 3221093 - DNA, 25 bp, Homo sapien
atgatggcataagatttaaagtgtg

SEQ ID NO: 3221094 - DNA, 25 bp, Homo sapien
tgcttaatgttaatgatggcataag

SEQ ID NO: 3221095 - DNA, 25 bp, Homo sapien
ttcatgtcagagaatgctggcatta

SEQ ID NO: 3221096 - DNA, 25 bp, Homo sapien
tgcaaaactgtcaccgaaatcacat

SEQ ID NO: 3221097 - DNA, 25 bp, Homo sapien
gcaaaactgtcaccgaaatcacatg

SEQ ID NO: 3221098 - DNA, 25 bp, Homo sapien
tgtgagaaggaagcaccctgtccct

SEQ ID NO: 3221099 - DNA, 25 bp, Homo sapien
atgtgagaaggaagcaccctgtccc

SEQ ID NO: 3221100 - DNA, 25 bp, Homo sapien
tgtgtgatgccctcgaagcagtttt

SEQ ID NO: 3221101 - DNA, 25 bp, Homo sapien
gatgccctcgaagcagttttcctga

SEQ ID NO: 3221102 - DNA, 25 bp, Homo sapien
tgtgggctttgtacagctttcttga

SEQ ID NO: 3221103 - DNA, 25 bp, Homo sapien
tgcgctgtgggctttgtacagcttt

SEQ ID NO: 3221104 - DNA, 25 bp, Homo sapien
cattcccagatgtgcgctgtgggct

SEQ ID NO: 3221105 - DNA, 25 bp, Homo sapien
ttagacattcccagatgtgcgctgt

SEQ ID NO: 3221106 - DNA, 25 bp, Homo sapien
agcacaggctaaggtgtggctgctg

SEQ ID NO: 3221107 - DNA, 25 bp, Homo sapien
tacagcacaggctaaggtgtggctg

SEQ ID NO: 3221108 - DNA, 25 bp, Homo sapien
tgtacggcatgtttacagcacaggc

SEQ ID NO: 3221109 - DNA, 25 bp, Homo sapien
gtttacagcacaggctaaggtgtgg

SEQ ID NO: 3221110 - DNA, 25 bp, Homo sapien
gccagaggaaagctttccatccttt

SEQ ID NO: 3221111 - DNA, 25 bp, Homo sapien
aagccagaggaaagctttccatcct

SEQ ID NO: 3221112 - DNA, 25 bp, Homo sapien
aaaagccagaggaaagctttccatc

SEQ ID NO: 3221113 - DNA, 25 bp, Homo sapien
tcttcctgcagacattatgtaaact

SEQ ID NO: 3221114 - DNA, 25 bp, Homo sapien
cactttgtgatgttcccacagggga

SEQ ID NO: 3221115 - DNA, 25 bp, Homo sapien
gggaaatagccaagggagcacttga

SEQ ID NO: 3221116 - DNA, 25 bp, Homo sapien
agttgtcctcatcggcctgattccc

SEQ ID NO: 3221117 - DNA, 25 bp, Homo sapien
cacaccgttacagtgcaggagctga

SEQ ID NO: 3221118 - DNA, 25 bp, Homo sapien
gatggaaattaggtgaagtgacagc

SEQ ID NO: 3221119 - DNA, 25 bp, Homo sapien
cagggcctcgcttcactctgtgcac

SEQ ID NO: 3221120 - DNA, 25 bp, Homo sapien
caccacgttcatgttcctgttactg

SEQ ID NO: 3221121 - DNA, 25 bp, Homo sapien
caggatcagtgatggaaattaggtg

SEQ ID NO: 3221122 - DNA, 25 bp, Homo sapien
gtctccgttgtcagtcgcagccatg

SEQ ID NO: 3221123 - DNA, 25 bp, Homo sapien
cagctgtctccgttgtcagtcgcag

SEQ ID NO: 3221124 - DNA, 25 bp, Homo sapien
agcagcagctgtctccgttgtcagt

SEQ ID NO: 3221125 - DNA, 25 bp, Homo sapien
gttgtcagtcgcagccatgatggat

SEQ ID NO: 3221126 - DNA, 25 bp, Homo sapien
cctcaaaaggatattgggaagtcat

SEQ ID NO: 3221127 - DNA, 25 bp, Homo sapien
aatatttgtcaaattgcagagacca

SEQ ID NO: 3221128 - DNA, 25 bp, Homo sapien
ttctgcctcaaaaggatattgggaa

SEQ ID NO: 3221129 - DNA, 25 bp, Homo sapien
gaagtcattttgtagtaactggcaa

SEQ ID NO: 3221130 - DNA, 25 bp, Homo sapien
gaagaaaccgatggaacagctcgta

SEQ ID NO: 3221131 - DNA, 25 bp, Homo sapien
acatttgaagaaaccgatggaacag

SEQ ID NO: 3221132 - DNA, 25 bp, Homo sapien
tccagaccttggcaaagacattgca

SEQ ID NO: 3221133 - DNA, 25 bp, Homo sapien
ggaacagctcgtaaattggtttcat

SEQ ID NO: 3221134 - DNA, 25 bp, Homo sapien
agcttctgaagatcatgataattct

SEQ ID NO: 3221135 - DNA, 25 bp, Homo sapien
ctgaagatcatgataattcttgaag

SEQ ID NO: 3221136 - DNA, 25 bp, Homo sapien
agctttcttattaagttccactgaa

SEQ ID NO: 3221137 - DNA, 25 bp, Homo sapien
ataattcttgaagcaatcaggagga

SEQ ID NO: 3221138 - DNA, 25 bp, Homo sapien
gatggagatggatgtaatcttattg

SEQ ID NO: 3221139 - DNA, 25 bp, Homo sapien
agtttagtaaggctattcagtcctc

SEQ ID NO: 3221140 - DNA, 25 bp, Homo sapien
ggatgtaatcttattgttttgcagg

SEQ ID NO: 3221141 - DNA, 25 bp, Homo sapien
tcagtcctctgaaagcatagatgga

SEQ ID NO: 3221142 - DNA, 25 bp, Homo sapien
aatcggaactcttgtgcaacactag

SEQ ID NO: 3221143 - DNA, 25 bp, Homo sapien
ggaaaatagtatggcagtcccttaa

SEQ ID NO: 3221144 - DNA, 25 bp, Homo sapien
agaacacaaacgttggtgaggatgt

SEQ ID NO: 3221145 - DNA, 25 bp, Homo sapien
aatcaaatcaaatgacagtccctca

SEQ ID NO: 3221146 - DNA, 25 bp, Homo sapien
ctgttttgcccagtcctcttcattt

SEQ ID NO: 3221147 - DNA, 25 bp, Homo sapien
ttttgcccagtcctcttcatttttc

SEQ ID NO: 3221148 - DNA, 25 bp, Homo sapien
ttgcccagtcctcttcatttttcag

SEQ ID NO: 3221149 - DNA, 25 bp, Homo sapien
tgcccagtcctcttcatttttcaga

SEQ ID NO: 3221150 - DNA, 25 bp, Homo sapien
agccattctagtctgtgaagatctt

SEQ ID NO: 3221151 - DNA, 25 bp, Homo sapien
cattctagtctgtgaagatcttcaa

SEQ ID NO: 3221152 - DNA, 25 bp, Homo sapien
gaaggttattctgttatgactgaga

SEQ ID NO: 3221153 - DNA, 25 bp, Homo sapien
gatcttcaaaaacacccggcttcag

SEQ ID NO: 3221154 - DNA, 25 bp, Homo sapien
gggaaattcgactgaggtgattatc

SEQ ID NO: 3221155 - DNA, 25 bp, Homo sapien
aatgttggtggggaaattcgactga

SEQ ID NO: 3221156 - DNA, 25 bp, Homo sapien
aatttagtccataaaatgttggtgg

SEQ ID NO: 3221157 - DNA, 25 bp, Homo sapien
gagaatttagtccataaaatgttgg

SEQ ID NO: 3221158 - DNA, 25 bp, Homo sapien
tcttggcatgtgttgacagagaggt

SEQ ID NO: 3221159 - DNA, 25 bp, Homo sapien
gttgacagagaggtttatcaggtaa

SEQ ID NO: 3221160 - DNA, 25 bp, Homo sapien
tgtagtcttggcatgtgttgacaga

SEQ ID NO: 3221161 - DNA, 25 bp, Homo sapien
ttgacagagaggtttatcaggtaaa

SEQ ID NO: 3221162 - DNA, 25 bp, Homo sapien
acagttaaattactgcaggaaataa

SEQ ID NO: 3221163 - DNA, 25 bp, Homo sapien
cagttaaattactgcaggaaataaa

SEQ ID NO: 3221164 - DNA, 25 bp, Homo sapien
aacagttaaattactgcaggaaata

SEQ ID NO: 3221165 - DNA, 25 bp, Homo sapien
tttctggagaggtgcaaaagtattt

SEQ ID NO: 3221166 - DNA, 25 bp, Homo sapien
tctggagaggtgcaaaagtattttc

SEQ ID NO: 3221167 - DNA, 25 bp, Homo sapien
tccagtttctggagaggtgcaaaag

SEQ ID NO: 3221168 - DNA, 25 bp, Homo sapien
ttcatccagtttctggagaggtgca

SEQ ID NO: 3221169 - DNA, 25 bp, Homo sapien
ccttgaatataagcggtggaagatt

SEQ ID NO: 3221170 - DNA, 25 bp, Homo sapien
tccttcaggtccttgaatataagcg

SEQ ID NO: 3221171 - DNA, 25 bp, Homo sapien
tcaggtccttgaatataagcggtgg

SEQ ID NO: 3221172 - DNA, 25 bp, Homo sapien
tataagcggtggaagattttcaatc

SEQ ID NO: 3221173 - DNA, 25 bp, Homo sapien
gagacttgagtttgacaagataatc

SEQ ID NO: 3221174 - DNA, 25 bp, Homo sapien
agacttgagtttgacaagataatca

SEQ ID NO: 3221175 - DNA, 25 bp, Homo sapien
tgtgagagagattcataagaggtct

SEQ ID NO: 3221176 - DNA, 25 bp, Homo sapien
gatatttgaaatttcaatcccttct

SEQ ID NO: 3221177 - DNA, 25 bp, Homo sapien
aaacatcctttgttggatatttgaa

SEQ ID NO: 3221178 - DNA, 25 bp, Homo sapien
tgaaatttcaatcccttctaggctg

SEQ ID NO: 3221179 - DNA, 25 bp, Homo sapien
ggtgcatacccacagtactggaatt

SEQ ID NO: 3221180 - DNA, 25 bp, Homo sapien
gacatggcatacagcttgttctcag

SEQ ID NO: 3221181 - DNA, 25 bp, Homo sapien
tttacagctgcgaacatgtggtgca

SEQ ID NO: 3221182 - DNA, 25 bp, Homo sapien
tactctctgaataatgcttgccaag

SEQ ID NO: 3221183 - DNA, 25 bp, Homo sapien
ttctcctttaaccaggaaatactca

SEQ ID NO: 3221184 - DNA, 25 bp, Homo sapien
tctcctttaaccaggaaatactcac

SEQ ID NO: 3221185 - DNA, 25 bp, Homo sapien
tacagtctaggcttcaccacggaaa

SEQ ID NO: 3221186 - DNA, 25 bp, Homo sapien
tcggagccactgtatgagagagaac

SEQ ID NO: 3221187 - DNA, 25 bp, Homo sapien
tgacctagactacaaacatcctgag

SEQ ID NO: 3221188 - DNA, 25 bp, Homo sapien
acaaaatattgtgccttcggagcca

SEQ ID NO: 3221189 - DNA, 25 bp, Homo sapien
gcaacaagctcaaggtgtcatataa

SEQ ID NO: 3221190 - DNA, 25 bp, Homo sapien
cacgtagagcattcagttagggact

SEQ ID NO: 3221191 - DNA, 25 bp, Homo sapien
catagactctctttggtaaccactc

SEQ ID NO: 3221192 - DNA, 25 bp, Homo sapien
tgaaattctcccaacgcaacaagct

SEQ ID NO: 3221193 - DNA, 25 bp, Homo sapien
tatattcccattaagcagtcggcac

SEQ ID NO: 3221194 - DNA, 25 bp, Homo sapien
gcatgcttattgtattctccacgaa

SEQ ID NO: 3221195 - DNA, 25 bp, Homo sapien
tacaagctgacaatgagtactctcc

SEQ ID NO: 3221196 - DNA, 25 bp, Homo sapien
gaatggccaaagatcctacaagctg

SEQ ID NO: 3221197 - DNA, 25 bp, Homo sapien
tgaagagggaagcatactccattgg

SEQ ID NO: 3221198 - DNA, 25 bp, Homo sapien
aatctgggctccaatactttctgta

SEQ ID NO: 3221199 - DNA, 25 bp, Homo sapien
catactccattggtgccatagtagt

SEQ ID NO: 3221200 - DNA, 25 bp, Homo sapien
aaattgccactgaataaatctgggc

SEQ ID NO: 3221201 - DNA, 25 bp, Homo sapien
ttcactacaaaaatgggtatccagc

SEQ ID NO: 3221202 - DNA, 25 bp, Homo sapien
cagttgctgttatggcactttgatg

SEQ ID NO: 3221203 - DNA, 25 bp, Homo sapien
aactatgatgataaatgcggccaaa

SEQ ID NO: 3221204 - DNA, 25 bp, Homo sapien
ccagcataatgcatcagtaaatact

SEQ ID NO: 3221205 - DNA, 25 bp, Homo sapien
tctttgtctgtagttataccaaaac

SEQ ID NO: 3221206 - DNA, 25 bp, Homo sapien
caaagcactgttaatgggcagaata

SEQ ID NO: 3221207 - DNA, 25 bp, Homo sapien
tataccaaaaccgatgaatcatttc

SEQ ID NO: 3221208 - DNA, 25 bp, Homo sapien
cagagtatagagaattgggttcaaa

SEQ ID NO: 3221209 - DNA, 25 bp, Homo sapien
tcatgaataggaattgagtctcgtt

SEQ ID NO: 3221210 - DNA, 25 bp, Homo sapien
tcattaactcaggtggcatctcctg

SEQ ID NO: 3221211 - DNA, 25 bp, Homo sapien
catttccacccagatgaatgatgga

SEQ ID NO: 3221212 - DNA, 25 bp, Homo sapien
gggtatgtgaaaaggtccggcttca

SEQ ID NO: 3221213 - DNA, 25 bp, Homo sapien
ctgcgaagaaatgaatttcagagtc

SEQ ID NO: 3221214 - DNA, 25 bp, Homo sapien
gcgaagaaatgaatttcagagtcag

SEQ ID NO: 3221215 - DNA, 25 bp, Homo sapien
tgcgaagaaatgaatttcagagtca

SEQ ID NO: 3221216 - DNA, 25 bp, Homo sapien
tcatgaagcacccccacagtattct

SEQ ID NO: 3221217 - DNA, 25 bp, Homo sapien
atccctcatgaagcacccccacagt

SEQ ID NO: 3221218 - DNA, 25 bp, Homo sapien
taaatccctcatgaagcacccccac

SEQ ID NO: 3221219 - DNA, 25 bp, Homo sapien
cctcatgaagcacccccacagtatt

SEQ ID NO: 3221220 - DNA, 25 bp, Homo sapien
tgcctatgattcttgctgatgcaca

SEQ ID NO: 3221221 - DNA, 25 bp, Homo sapien
ggttctgcactgtctacttccagga

SEQ ID NO: 3221222 - DNA, 25 bp, Homo sapien
gatgcacatgacaggtaaagctcta

SEQ ID NO: 3221223 - DNA, 25 bp, Homo sapien
tactttaaactaggaactgcagatg

SEQ ID NO: 3221224 - DNA, 25 bp, Homo sapien
gcaaagagaaaactgggcaggaagt

SEQ ID NO: 3221225 - DNA, 25 bp, Homo sapien
taggtctgttcttaaaacagcacgg

SEQ ID NO: 3221226 - DNA, 25 bp, Homo sapien
tgttggctctcaagtgtatggaaac

SEQ ID NO: 3221227 - DNA, 25 bp, Homo sapien
aaagttagtatctcacgtgctggca

SEQ ID NO: 3221228 - DNA, 25 bp, Homo sapien
gagagatgatgtgttagtatgatga

SEQ ID NO: 3221229 - DNA, 25 bp, Homo sapien
cttctactttatccacatctaaatt

SEQ ID NO: 3221230 - DNA, 25 bp, Homo sapien
aaattgccaaggtttacccagtcat

SEQ ID NO: 3221231 - DNA, 25 bp, Homo sapien
tgccaaggtttacccagtcatttag

SEQ ID NO: 3221232 - DNA, 25 bp, Homo sapien
catattttgaatactaatgatctgt

SEQ ID NO: 3221233 - DNA, 25 bp, Homo sapien
gaatactaatgatctgttatgtatg

SEQ ID NO: 3221234 - DNA, 25 bp, Homo sapien
tctgttatgtatgttccaattatct

SEQ ID NO: 3221235 - DNA, 25 bp, Homo sapien
gtttttgtataggaaatgtcataaa

SEQ ID NO: 3221236 - DNA, 25 bp, Homo sapien
cgtgtatttctaccatgcagatgta

SEQ ID NO: 3221237 - DNA, 25 bp, Homo sapien
gcatgtaattgcaaatgttagatac

SEQ ID NO: 3221238 - DNA, 25 bp, Homo sapien
tgttacctgtttgatcctgtcccgt

SEQ ID NO: 3221239 - DNA, 25 bp, Homo sapien
gatttcaagaaaatccgtgtatttc

SEQ ID NO: 3221240 - DNA, 25 bp, Homo sapien
tggtttctttttgtctcgccttctg

SEQ ID NO: 3221241 - DNA, 25 bp, Homo sapien
ctttttgtctcgccttctggtttca

SEQ ID NO: 3221242 - DNA, 25 bp, Homo sapien
ccctcactggtttctttttgtctcg

SEQ ID NO: 3221243 - DNA, 25 bp, Homo sapien
ctcgccttctggtttcaatcatccg

SEQ ID NO: 3221244 - DNA, 25 bp, Homo sapien
ccagcagctaaagtgccacccctct

SEQ ID NO: 3221245 - DNA, 25 bp, Homo sapien
ggggatgccagcagctaaagtgcca

SEQ ID NO: 3221246 - DNA, 25 bp, Homo sapien
cagcagctaaagtgccacccctctc

SEQ ID NO: 3221247 - DNA, 25 bp, Homo sapien
gatgccagcagctaaagtgccaccc

SEQ ID NO: 3221248 - DNA, 25 bp, Homo sapien
tacgagtgcccttcgagatcgattg

SEQ ID NO: 3221249 - DNA, 25 bp, Homo sapien
cgaggcttccgggtcatgtaccaaa

SEQ ID NO: 3221250 - DNA, 25 bp, Homo sapien
tctcggtcggacacaacaggaggac

SEQ ID NO: 3221251 - DNA, 25 bp, Homo sapien
gactcatatgattggctgtcccgaa

SEQ ID NO: 3221252 - DNA, 25 bp, Homo sapien
acagcttggctagcggcaccagcat

SEQ ID NO: 3221253 - DNA, 25 bp, Homo sapien
gacagcttggctagcggcaccagca

SEQ ID NO: 3221254 - DNA, 25 bp, Homo sapien
ggacagcttggctagcggcaccagc

SEQ ID NO: 3221255 - DNA, 25 bp, Homo sapien
tggctccgaagacgaaagtcaggtc

SEQ ID NO: 3221256 - DNA, 25 bp, Homo sapien
gacctttgccctagatagcctgaga

SEQ ID NO: 3221257 - DNA, 25 bp, Homo sapien
gaagcctcagttcaggagtccaccg

SEQ ID NO: 3221258 - DNA, 25 bp, Homo sapien
tagactgaactagaatggctccgaa

SEQ ID NO: 3221259 - DNA, 25 bp, Homo sapien
gatattctagaactcagttcaagag

SEQ ID NO: 3221260 - DNA, 25 bp, Homo sapien
tgaaaactgatgactgacatatgac

SEQ ID NO: 3221261 - DNA, 25 bp, Homo sapien
actattcacctatcctcaattttgg

SEQ ID NO: 3221262 - DNA, 25 bp, Homo sapien
ggcaacactttttaagccttagata

SEQ ID NO: 3221263 - DNA, 25 bp, Homo sapien
tgaacttacttacgcatactaaaaa

SEQ ID NO: 3221264 - DNA, 25 bp, Homo sapien
aagaaatgaacttacttacgcatac

SEQ ID NO: 3221265 - DNA, 25 bp, Homo sapien
tacgcatactaaaaactatagcact

SEQ ID NO: 3221266 - DNA, 25 bp, Homo sapien
tacttacgcatactaaaaactatag

SEQ ID NO: 3221267 - DNA, 25 bp, Homo sapien
cacacctgaccaacagctgaattat

SEQ ID NO: 3221268 - DNA, 25 bp, Homo sapien
tgtagacaagcagtctcactgggtt

SEQ ID NO: 3221269 - DNA, 25 bp, Homo sapien
agattaactgttgtctaaggctgga

SEQ ID NO: 3221270 - DNA, 25 bp, Homo sapien
cactgggttgtgtaagctgatctcg

SEQ ID NO: 3221271 - DNA, 25 bp, Homo sapien
tttatccagggcaggtaccctagca

SEQ ID NO: 3221272 - DNA, 25 bp, Homo sapien
aatctttctagctggatgagaaggc

SEQ ID NO: 3221273 - DNA, 25 bp, Homo sapien
aaggcttatctctcccgttgtctag

SEQ ID NO: 3221274 - DNA, 25 bp, Homo sapien
gcatcaaacctcataaagacagaag

SEQ ID NO: 3221275 - DNA, 25 bp, Homo sapien
cctaggtgaacactttgaatagctt

SEQ ID NO: 3221276 - DNA, 25 bp, Homo sapien
ctgcacaaaaattacgaaaattatt

SEQ ID NO: 3221277 - DNA, 25 bp, Homo sapien
atctttcctaggtgaacactttgaa

SEQ ID NO: 3221278 - DNA, 25 bp, Homo sapien
taagtgaatgactatactcaatgag

SEQ ID NO: 3221279 - DNA, 25 bp, Homo sapien
aattcgaggcacagtagaagttgaa

SEQ ID NO: 3221280 - DNA, 25 bp, Homo sapien
catcttgtagcacatagaggtagat

SEQ ID NO: 3221281 - DNA, 25 bp, Homo sapien
tatcccggggataaatagtataatg

SEQ ID NO: 3221282 - DNA, 25 bp, Homo sapien
agtataatgggtagtaattcgaggc

SEQ ID NO: 3221283 - DNA, 25 bp, Homo sapien
tgtgttgagctacgatggtctggaa

SEQ ID NO: 3221284 - DNA, 25 bp, Homo sapien
gaaggtcatcaaagacaataacacg

SEQ ID NO: 3221285 - DNA, 25 bp, Homo sapien
ccattataatgtcaagggattacca

SEQ ID NO: 3221286 - DNA, 25 bp, Homo sapien
tcctatgcaaatggtagcttcttcc

SEQ ID NO: 3221287 - DNA, 25 bp, Homo sapien
aactattacaacatctgcttcttct

SEQ ID NO: 3221288 - DNA, 25 bp, Homo sapien
caactattacaacatctgcttcttc

SEQ ID NO: 3221289 - DNA, 25 bp, Homo sapien
acggatgtccttttcatgtgccaca

SEQ ID NO: 3221290 - DNA, 25 bp, Homo sapien
acacggatgtccttttcatgtgcca

SEQ ID NO: 3221291 - DNA, 25 bp, Homo sapien
ggatgtccttttcatgtgccacagc

SEQ ID NO: 3221292 - DNA, 25 bp, Homo sapien
cacacggatgtccttttcatgtgcc

SEQ ID NO: 3221293 - DNA, 25 bp, Homo sapien
agagtatgagctcctatctgggcag

SEQ ID NO: 3221294 - DNA, 25 bp, Homo sapien
tggatcaaggcaagcccctgagaga

SEQ ID NO: 3221295 - DNA, 25 bp, Homo sapien
caagcccctgagagagtatgagctc

SEQ ID NO: 3221296 - DNA, 25 bp, Homo sapien
tgagagagtatgagctcctatctgg

SEQ ID NO: 3221297 - DNA, 25 bp, Homo sapien
cccttctctttccagtctgggaaga

SEQ ID NO: 3221298 - DNA, 25 bp, Homo sapien
ccttctctttccagtctgggaagag

SEQ ID NO: 3221299 - DNA, 25 bp, Homo sapien
tctctttccagtctgggaagagttc

SEQ ID NO: 3221300 - DNA, 25 bp, Homo sapien
tctttccagtctgggaagagttctt

SEQ ID NO: 3221301 - DNA, 25 bp, Homo sapien
tctgcttaggttatgggaagccata

SEQ ID NO: 3221302 - DNA, 25 bp, Homo sapien
ggtcctctgtatatcacacctgtgg

SEQ ID NO: 3221303 - DNA, 25 bp, Homo sapien
gaaatattcaaaggtcttctcaagt

SEQ ID NO: 3221304 - DNA, 25 bp, Homo sapien
gctttagatattgcattgtcccagg

SEQ ID NO: 3221305 - DNA, 25 bp, Homo sapien
ctgttacaggagtgttaagtggagc

SEQ ID NO: 3221306 - DNA, 25 bp, Homo sapien
tggcacaggaattctgtatttctct

SEQ ID NO: 3221307 - DNA, 25 bp, Homo sapien
tctctgttaaaattccaaatctgtc

SEQ ID NO: 3221308 - DNA, 25 bp, Homo sapien
gaattggcacaggaattctgtattt

SEQ ID NO: 3221309 - DNA, 25 bp, Homo sapien
ccaagcgtacaatgtaattgccatg

SEQ ID NO: 3221310 - DNA, 25 bp, Homo sapien
tcccaagcgtacaatgtaattgcca

SEQ ID NO: 3221311 - DNA, 25 bp, Homo sapien
ctaaatgtcccaagcgtacaatgta

SEQ ID NO: 3221312 - DNA, 25 bp, Homo sapien
atgtcccaagcgtacaatgtaattg

SEQ ID NO: 3221313 - DNA, 25 bp, Homo sapien
gtatacttcaacaccaagggcttct

SEQ ID NO: 3221314 - DNA, 25 bp, Homo sapien
gctgcataaccagggtatacttcaa

SEQ ID NO: 3221315 - DNA, 25 bp, Homo sapien
cagggtatacttcaacaccaagggc

SEQ ID NO: 3221316 - DNA, 25 bp, Homo sapien
caagggcttctgcttgttcgcccat

SEQ ID NO: 3221317 - DNA, 25 bp, Homo sapien
tctgggtcctcaggcgattttattt

SEQ ID NO: 3221318 - DNA, 25 bp, Homo sapien
gagaatttttctgggtcctcaggcg

SEQ ID NO: 3221319 - DNA, 25 bp, Homo sapien
gaatttttctgggtcctcaggcgat

SEQ ID NO: 3221320 - DNA, 25 bp, Homo sapien
ttttctgggtcctcaggcgatttta

SEQ ID NO: 3221321 - DNA, 25 bp, Homo sapien
ttttgtatccctacatcgttagtgg

SEQ ID NO: 3221322 - DNA, 25 bp, Homo sapien
cctacatcgttagtggcaattcctt

SEQ ID NO: 3221323 - DNA, 25 bp, Homo sapien
ccttttacactaccatcatcatgaa

SEQ ID NO: 3221324 - DNA, 25 bp, Homo sapien
catcgttagtggcaattccttttac

SEQ ID NO: 3221325 - DNA, 25 bp, Homo sapien
ggaggataaactatcagttgacaca

SEQ ID NO: 3221326 - DNA, 25 bp, Homo sapien
taattctattccaagagtggcagag

SEQ ID NO: 3221327 - DNA, 25 bp, Homo sapien
ggatctccatccttagggagcttat

SEQ ID NO: 3221328 - DNA, 25 bp, Homo sapien
gcgacgggccgctatttgcttttaa

SEQ ID NO: 3221329 - DNA, 25 bp, Homo sapien
ttggctagatgtccatggcaacctt

SEQ ID NO: 3221330 - DNA, 25 bp, Homo sapien
tttagcatgtagttccagtcctctc

SEQ ID NO: 3221331 - DNA, 25 bp, Homo sapien
tatatagttgcttggctagatgtcc

SEQ ID NO: 3221332 - DNA, 25 bp, Homo sapien
caatcccgtaggtttgaggttcaca

SEQ ID NO: 3221333 - DNA, 25 bp, Homo sapien
gccaaccaacagtgtgatctactct

SEQ ID NO: 3221334 - DNA, 25 bp, Homo sapien
gaccaagagctactaggggttcacc

SEQ ID NO: 3221335 - DNA, 25 bp, Homo sapien
cataggtatgtctgtccaagggcca

SEQ ID NO: 3221336 - DNA, 25 bp, Homo sapien
cattcaaatgatagaggaaagatcc

SEQ ID NO: 3221337 - DNA, 25 bp, Homo sapien
caccagttgcaaggtacagaaacta

SEQ ID NO: 3221338 - DNA, 25 bp, Homo sapien
agaaatccttgtgctctggaactca

SEQ ID NO: 3221339 - DNA, 25 bp, Homo sapien
catatggaggtctaatcatgacact

SEQ ID NO: 3221340 - DNA, 25 bp, Homo sapien
cagtggtagcatgccacagtggaaa

SEQ ID NO: 3221341 - DNA, 25 bp, Homo sapien
tgagagctctggctccgtatgcaat

SEQ ID NO: 3221342 - DNA, 25 bp, Homo sapien
ttggaactctctaaatggactcagg

SEQ ID NO: 3221343 - DNA, 25 bp, Homo sapien
gctaggatggtgtttccacctttgg

SEQ ID NO: 3221344 - DNA, 25 bp, Homo sapien
ccaaggttggccgaatgctaggatg

SEQ ID NO: 3221345 - DNA, 25 bp, Homo sapien
gtttctggtgcttgctacaccttca

SEQ ID NO: 3221346 - DNA, 25 bp, Homo sapien
aggaaggataaaacaatcatcaatg

SEQ ID NO: 3221347 - DNA, 25 bp, Homo sapien
aagcaacatcaagagacgggcggca

SEQ ID NO: 3221348 - DNA, 25 bp, Homo sapien
tcatcaatgccgaatggcagctgag

SEQ ID NO: 3221349 - DNA, 25 bp, Homo sapien
gccaagcagcgttgttctttccaca

SEQ ID NO: 3221350 - DNA, 25 bp, Homo sapien
tcagggcccaggtcctttcacagta

SEQ ID NO: 3221351 - DNA, 25 bp, Homo sapien
acatggtgagcactctgtcgccaca

SEQ ID NO: 3221352 - DNA, 25 bp, Homo sapien
gcttttctcaaataaggctgtggct

SEQ ID NO: 3221353 - DNA, 25 bp, Homo sapien
cagatttatgactgaagcatcaata

SEQ ID NO: 3221354 - DNA, 25 bp, Homo sapien
cctgaatgctgttatctaaattgtg

SEQ ID NO: 3221355 - DNA, 25 bp, Homo sapien
taattgccaagatacggaatcaaac

SEQ ID NO: 3221356 - DNA, 25 bp, Homo sapien
taaaatattctctaaacctgaatgc

SEQ ID NO: 3221357 - DNA, 25 bp, Homo sapien
ctacaaccaattagtaaaccaccag

SEQ ID NO: 3221358 - DNA, 25 bp, Homo sapien
cacttttcattgctgtgtgagtacc

SEQ ID NO: 3221359 - DNA, 25 bp, Homo sapien
tgggaacattcataaaaccaggact

SEQ ID NO: 3221360 - DNA, 25 bp, Homo sapien
tgtgagtacctttgatcttgggaac

SEQ ID NO: 3221361 - DNA, 25 bp, Homo sapien
taaaacatggtccacagtgaaggct

SEQ ID NO: 3221362 - DNA, 25 bp, Homo sapien
tattaacaggcagtaaggcatttga

SEQ ID NO: 3221363 - DNA, 25 bp, Homo sapien
aaagttcatgctacctgtaagagtg

SEQ ID NO: 3221364 - DNA, 25 bp, Homo sapien
tagtgaaaccgagaaagaagcttta

SEQ ID NO: 3221365 - DNA, 25 bp, Homo sapien
caatatccagtaaaagattccagtg

SEQ ID NO: 3221366 - DNA, 25 bp, Homo sapien
tccatatacacccagtactccgtgg

SEQ ID NO: 3221367 - DNA, 25 bp, Homo sapien
ttatgtttcagagtccacggctcca

SEQ ID NO: 3221368 - DNA, 25 bp, Homo sapien
tactccgtggcaggacggtcttata

SEQ ID NO: 3221369 - DNA, 25 bp, Homo sapien
tcaaaactgatctgtccatcgggtt

SEQ ID NO: 3221370 - DNA, 25 bp, Homo sapien
aataggtgtgcaatccttggctggc

SEQ ID NO: 3221371 - DNA, 25 bp, Homo sapien
taaggttaagtgtgccggctggtca

SEQ ID NO: 3221372 - DNA, 25 bp, Homo sapien
gctgctcgggcccatcatatatcga

SEQ ID NO: 3221373 - DNA, 25 bp, Homo sapien
ctgagcatttatctgtaaccgaaat

SEQ ID NO: 3221374 - DNA, 25 bp, Homo sapien
tacaatgtacacagttctgagcatt

SEQ ID NO: 3221375 - DNA, 25 bp, Homo sapien
taatatcacatgttttacaatgtac

SEQ ID NO: 3221376 - DNA, 25 bp, Homo sapien
taaccgaaatccatcaccttgttcc

SEQ ID NO: 3221377 - DNA, 25 bp, Homo sapien
tgctcttggtactgaatctctgaag

SEQ ID NO: 3221378 - DNA, 25 bp, Homo sapien
tgtagaccatgtaatgtcacaccca

SEQ ID NO: 3221379 - DNA, 25 bp, Homo sapien
taacgttagcttgccatacttgaaa

SEQ ID NO: 3221380 - DNA, 25 bp, Homo sapien
gcatacttcttctgcaagggccaga

SEQ ID NO: 3221381 - DNA, 25 bp, Homo sapien
tgggccaggcattatcatatagcaa

SEQ ID NO: 3221382 - DNA, 25 bp, Homo sapien
actacagaatgcctgctgttgggcc

SEQ ID NO: 3221383 - DNA, 25 bp, Homo sapien
gagagctcagcattgtaagacacag

SEQ ID NO: 3221384 - DNA, 25 bp, Homo sapien
tctggttagtctagtcgagagctca

SEQ ID NO: 3221385 - DNA, 25 bp, Homo sapien
tattagtctgcgagcacttgcttgc

SEQ ID NO: 3221386 - DNA, 25 bp, Homo sapien
gcagggactagaggatatcttatgg

SEQ ID NO: 3221387 - DNA, 25 bp, Homo sapien
tcacatctgatatggcagtttctcc

SEQ ID NO: 3221388 - DNA, 25 bp, Homo sapien
tcaattccgtttgttagtacgctat

SEQ ID NO: 3221389 - DNA, 25 bp, Homo sapien
cacatttcgctttggcctgtttgag

SEQ ID NO: 3221390 - DNA, 25 bp, Homo sapien
cacaagcatttgttagtctgaggtg

SEQ ID NO: 3221391 - DNA, 25 bp, Homo sapien
tatcacatcctgaagacacatttcg

SEQ ID NO: 3221392 - DNA, 25 bp, Homo sapien
catggttaaagtagtgtcagccaca

SEQ ID NO: 3221393 - DNA, 25 bp, Homo sapien
catgtggtgtttggccaagtaatta

SEQ ID NO: 3221394 - DNA, 25 bp, Homo sapien
aaggatcaggtgattattagctgga

SEQ ID NO: 3221395 - DNA, 25 bp, Homo sapien
ggcaaggatattggaaaatgtggaa

SEQ ID NO: 3221396 - DNA, 25 bp, Homo sapien
taataattttgggtataggagccag

SEQ ID NO: 3221397 - DNA, 25 bp, Homo sapien
ggagggtttactgagcatggcaaat

SEQ ID NO: 3221398 - DNA, 25 bp, Homo sapien
gggtttactgagcatggcaaatgca

SEQ ID NO: 3221399 - DNA, 25 bp, Homo sapien
aatgcaggccgcaacacaaacggtt

SEQ ID NO: 3221400 - DNA, 25 bp, Homo sapien
gcatggcaaatgcaggccgcaacac

SEQ ID NO: 3221401 - DNA, 25 bp, Homo sapien
ttttaaatgcgaccagcatctggca

SEQ ID NO: 3221402 - DNA, 25 bp, Homo sapien
gggatttgcacactagcagatatag

SEQ ID NO: 3221403 - DNA, 25 bp, Homo sapien
gacttcagtggtgcctgtgccttct

SEQ ID NO: 3221404 - DNA, 25 bp, Homo sapien
gtttcaagtgtgcttagattctcca

SEQ ID NO: 3221405 - DNA, 25 bp, Homo sapien
gtctgggaacttgacacttgtacca

SEQ ID NO: 3221406 - DNA, 25 bp, Homo sapien
ggtctgcctgcaagagtagcacttg

SEQ ID NO: 3221407 - DNA, 25 bp, Homo sapien
catagcaagtgtgagactgctatct

SEQ ID NO: 3221408 - DNA, 25 bp, Homo sapien
tagcacttgtttggagtctgggaac

SEQ ID NO: 3221409 - DNA, 25 bp, Homo sapien
ttgtcatctcccaacacagaaagtg

SEQ ID NO: 3221410 - DNA, 25 bp, Homo sapien
gaatcaaggaacacgtccctctgct

SEQ ID NO: 3221411 - DNA, 25 bp, Homo sapien
aacccatctatggaggtttggtggc

SEQ ID NO: 3221412 - DNA, 25 bp, Homo sapien
gggaccatggtaagactccctgtct

SEQ ID NO: 3221413 - DNA, 25 bp, Homo sapien
tgttctttgaacgtaactgactact

SEQ ID NO: 3221414 - DNA, 25 bp, Homo sapien
tatttaccctaaatggacagtgttc

SEQ ID NO: 3221415 - DNA, 25 bp, Homo sapien
gaaaatacttgtcaccaatggtcct

SEQ ID NO: 3221416 - DNA, 25 bp, Homo sapien
tgtgagacacataatgccaatctgt

SEQ ID NO: 3221417 - DNA, 25 bp, Homo sapien
cgcggccgcccagccttgcgggagc

SEQ ID NO: 3221418 - DNA, 25 bp, Homo sapien
ggcgcggccgcccagccttgcggga

SEQ ID NO: 3221419 - DNA, 25 bp, Homo sapien
ggcggccgcggtggcggggccatcg

SEQ ID NO: 3221420 - DNA, 25 bp, Homo sapien
ccgcccagccttgcgggagcgcggg

SEQ ID NO: 3221421 - DNA, 25 bp, Homo sapien
ccgcagctccggccgtggcgctcgg

SEQ ID NO: 3221422 - DNA, 25 bp, Homo sapien
gcagctccggccgtggcgctcgggg

SEQ ID NO: 3221423 - DNA, 25 bp, Homo sapien
agctccggccgtggcgctcgggggg

SEQ ID NO: 3221424 - DNA, 25 bp, Homo sapien
gctccggccgtggcgctcggggggc

SEQ ID NO: 3221425 - DNA, 25 bp, Homo sapien
cctgccctgggcagacgccgccgcg

SEQ ID NO: 3221426 - DNA, 25 bp, Homo sapien
ctgccctgggcagacgccgccgcgg

SEQ ID NO: 3221427 - DNA, 25 bp, Homo sapien
gccgctgctgccccttttgttgaag

SEQ ID NO: 3221428 - DNA, 25 bp, Homo sapien
ccgctgctgccccttttgttgaaga

SEQ ID NO: 3221429 - DNA, 25 bp, Homo sapien
taacagtaagctccctagaaatagt

SEQ ID NO: 3221430 - DNA, 25 bp, Homo sapien
taaagcctccctaactagcccagat

SEQ ID NO: 3221431 - DNA, 25 bp, Homo sapien
tagcccagattaaagagccctccct

SEQ ID NO: 3221432 - DNA, 25 bp, Homo sapien
tgtaaatctgtaacaaaggccctac

SEQ ID NO: 3221433 - DNA, 25 bp, Homo sapien
aatcatttcactccctatacagtat

SEQ ID NO: 3221434 - DNA, 25 bp, Homo sapien
taaacaatcatttcactccctatac

SEQ ID NO: 3221435 - DNA, 25 bp, Homo sapien
caatcatttcactccctatacagta

SEQ ID NO: 3221436 - DNA, 25 bp, Homo sapien
aacaatcatttcactccctatacag

SEQ ID NO: 3221437 - DNA, 25 bp, Homo sapien
tttgtggtgttcgctgtgccgccgc

SEQ ID NO: 3221438 - DNA, 25 bp, Homo sapien
gtggtgttcgctgtgccgccgcaca

SEQ ID NO: 3221439 - DNA, 25 bp, Homo sapien
ggtgttcgctgtgccgccgcacatc

SEQ ID NO: 3221440 - DNA, 25 bp, Homo sapien
ctgaacggtttaatgttcttctggt

SEQ ID NO: 3221441 - DNA, 25 bp, Homo sapien
ttgtcgagttccgtgtggtcagtgc

SEQ ID NO: 3221442 - DNA, 25 bp, Homo sapien
aaaagcgccctgtaaatcctcccag

SEQ ID NO: 3221443 - DNA, 25 bp, Homo sapien
tggtcagtgctcctgtctactccgg

SEQ ID NO: 3221444 - DNA, 25 bp, Homo sapien
tttaatctttgtgcataaaagcgcc

SEQ ID NO: 3221445 - DNA, 25 bp, Homo sapien
ctatgaagtgaaaacgcccaggcct

SEQ ID NO: 3221446 - DNA, 25 bp, Homo sapien
tgctacttcaggacggcaccttttt

SEQ ID NO: 3221447 - DNA, 25 bp, Homo sapien
gcctgagccccatctactaactgtg

SEQ ID NO: 3221448 - DNA, 25 bp, Homo sapien
tggctgccacgcagactatgaagtg

SEQ ID NO: 3221449 - DNA, 25 bp, Homo sapien
agttcagccagcattccgcttcagc

SEQ ID NO: 3221450 - DNA, 25 bp, Homo sapien
cacaggagtcataacaggagaacca

SEQ ID NO: 3221451 - DNA, 25 bp, Homo sapien
tcagccagcattccgcttcagcaca

SEQ ID NO: 3221452 - DNA, 25 bp, Homo sapien
caggagtcataacaggagaaccagg

SEQ ID NO: 3221453 - DNA, 25 bp, Homo sapien
tgtagtttggcctagacaatggcat

SEQ ID NO: 3221454 - DNA, 25 bp, Homo sapien
tctagtggtgtatcagatggattcc

SEQ ID NO: 3221455 - DNA, 25 bp, Homo sapien
tccaggcattcagattcagttttca

SEQ ID NO: 3221456 - DNA, 25 bp, Homo sapien
gaggactacaacaggaacaccctat

SEQ ID NO: 3221457 - DNA, 25 bp, Homo sapien
ggtggtaaggtgtaagactgctgca

SEQ ID NO: 3221458 - DNA, 25 bp, Homo sapien
cacctcctcaatcttttgaacagct

SEQ ID NO: 3221459 - DNA, 25 bp, Homo sapien
gctttagagtcaaacaagacttgtc

SEQ ID NO: 3221460 - DNA, 25 bp, Homo sapien
cctgtcacagtcctggtaaactatc

SEQ ID NO: 3221461 - DNA, 25 bp, Homo sapien
aactatcaggcgaatctcattcagg

SEQ ID NO: 3221462 - DNA, 25 bp, Homo sapien
tgcttcagactgctagaccctttgg

SEQ ID NO: 3221463 - DNA, 25 bp, Homo sapien
tcagagggcctaagtgacacgaggt

SEQ ID NO: 3221464 - DNA, 25 bp, Homo sapien
cacactggtggtctaatgcaaatgc

SEQ ID NO: 3221465 - DNA, 25 bp, Homo sapien
tcatgacgttttgtgcttgccaagg

SEQ ID NO: 3221466 - DNA, 25 bp, Homo sapien
gcatgatgtgaagatcccccagaag

SEQ ID NO: 3221467 - DNA, 25 bp, Homo sapien
tccttagcatgatgtgaagatcccc

SEQ ID NO: 3221468 - DNA, 25 bp, Homo sapien
gaagctgttccttagcatgatgtga

SEQ ID NO: 3221469 - DNA, 25 bp, Homo sapien
gctgttccttagcatgatgtgaaga

SEQ ID NO: 3221470 - DNA, 25 bp, Homo sapien
catttcccctaacatgttgacatcg

SEQ ID NO: 3221471 - DNA, 25 bp, Homo sapien
tagtgtatctttaaggtggagcctt

SEQ ID NO: 3221472 - DNA, 25 bp, Homo sapien
tgacatcggaagctggtcttgtgta

SEQ ID NO: 3221473 - DNA, 25 bp, Homo sapien
taactcatggcaactgagccaaaca

SEQ ID NO: 3221474 - DNA, 25 bp, Homo sapien
ccattctagcagagaagactttact

SEQ ID NO: 3221475 - DNA, 25 bp, Homo sapien
tttactaatcatcagttgtggagga

SEQ ID NO: 3221476 - DNA, 25 bp, Homo sapien
tactaatcatcagttgtggaggaga

SEQ ID NO: 3221477 - DNA, 25 bp, Homo sapien
gctgcccattctagcagagaagact

SEQ ID NO: 3221478 - DNA, 25 bp, Homo sapien
tgcaataaacgttcaggtaatccca

SEQ ID NO: 3221479 - DNA, 25 bp, Homo sapien
tacttaaatctgcacgtaagggaat

SEQ ID NO: 3221480 - DNA, 25 bp, Homo sapien
tgtgtagagctgacaaaaacgacga

SEQ ID NO: 3221481 - DNA, 25 bp, Homo sapien
aaaacgacgacagaaagactttgag

SEQ ID NO: 3221482 - DNA, 25 bp, Homo sapien
ggttgatgtactcaaagctgtcttg

SEQ ID NO: 3221483 - DNA, 25 bp, Homo sapien
tttcccaaattaggatcttggttga

SEQ ID NO: 3221484 - DNA, 25 bp, Homo sapien
cagtacgacaaggacccaaactatt

SEQ ID NO: 3221485 - DNA, 25 bp, Homo sapien
ctaggttacttccagtacgacaagg

SEQ ID NO: 3221486 - DNA, 25 bp, Homo sapien
acccacgacaaactcaaataaagca

SEQ ID NO: 3221487 - DNA, 25 bp, Homo sapien
cacaatagtgtattcagaaagaaag

SEQ ID NO: 3221488 - DNA, 25 bp, Homo sapien
cacacacccacaatagtgtattcag

SEQ ID NO: 3221489 - DNA, 25 bp, Homo sapien
ctagagatggaaacacatagaagag

SEQ ID NO: 3221490 - DNA, 25 bp, Homo sapien
ttgctgctgcatgcttgcagcagac

SEQ ID NO: 3221491 - DNA, 25 bp, Homo sapien
gcagcagtttgctgctgcatgcttg

SEQ ID NO: 3221492 - DNA, 25 bp, Homo sapien
tgcagcagtttgctgctgcatgctt

SEQ ID NO: 3221493 - DNA, 25 bp, Homo sapien
aaagaagcactccgggtgagccgga

SEQ ID NO: 3221494 - DNA, 25 bp, Homo sapien
gaagcactccgggtgagccggagag

SEQ ID NO: 3221495 - DNA, 25 bp, Homo sapien
aagaagcactccgggtgagccggag

SEQ ID NO: 3221496 - DNA, 25 bp, Homo sapien
gaaagaagcactccgggtgagccgg

SEQ ID NO: 3221497 - DNA, 25 bp, Homo sapien
taatgaaactccgtgcaggtaagga

SEQ ID NO: 3221498 - DNA, 25 bp, Homo sapien
taggctactgctactgatgattggc

SEQ ID NO: 3221499 - DNA, 25 bp, Homo sapien
ttcgaaacaccatggatttggccgc

SEQ ID NO: 3221500 - DNA, 25 bp, Homo sapien
cactctaagtaggtaggagcgtgtc

SEQ ID NO: 3221501 - DNA, 25 bp, Homo sapien
tgcttggcatatcaactggtgtgct

SEQ ID NO: 3221502 - DNA, 25 bp, Homo sapien
ttggcatatcaactggtgtgctgtg

SEQ ID NO: 3221503 - DNA, 25 bp, Homo sapien
cctctgcttggcatatcaactggtg

SEQ ID NO: 3221504 - DNA, 25 bp, Homo sapien
ggcatatcaactggtgtgctgtgtg

SEQ ID NO: 3221505 - DNA, 25 bp, Homo sapien
ttcactctgttagttaaaccaataa

SEQ ID NO: 3221506 - DNA, 25 bp, Homo sapien
gtagatagttcactctgttagttaa

SEQ ID NO: 3221507 - DNA, 25 bp, Homo sapien
actgtagatagttcactctgttagt

SEQ ID NO: 3221508 - DNA, 25 bp, Homo sapien
cactgtagatagttcactctgttag

SEQ ID NO: 3221509 - DNA, 25 bp, Homo sapien
gagagtttctgaccaaaggttccca

SEQ ID NO: 3221510 - DNA, 25 bp, Homo sapien
gaacatcatgtgaggcctgcatcca

SEQ ID NO: 3221511 - DNA, 25 bp, Homo sapien
gtatcacaggagaaaccagcagggt

SEQ ID NO: 3221512 - DNA, 25 bp, Homo sapien
tatgtattcatcaagcagagcacca

SEQ ID NO: 3221513 - DNA, 25 bp, Homo sapien
gttgccccggctggtgtatcactaa

SEQ ID NO: 3221514 - DNA, 25 bp, Homo sapien
tggtaccgttttctcaagcataagg

SEQ ID NO: 3221515 - DNA, 25 bp, Homo sapien
gctaggtcatgtcacgtctcagagt

SEQ ID NO: 3221516 - DNA, 25 bp, Homo sapien
tggagctacgaactacactgcctgg

SEQ ID NO: 3221517 - DNA, 25 bp, Homo sapien
tgtcacagtattagggctcagaaaa

SEQ ID NO: 3221518 - DNA, 25 bp, Homo sapien
taaagtcccctacagaatccagaag

SEQ ID NO: 3221519 - DNA, 25 bp, Homo sapien
tatgctgagcaaatcaacttctggc

SEQ ID NO: 3221520 - DNA, 25 bp, Homo sapien
gaaggcctcagaagtcaagtctgtc

SEQ ID NO: 3221521 - DNA, 25 bp, Homo sapien
gatgggaaaggtgtgatcaaaagac

SEQ ID NO: 3221522 - DNA, 25 bp, Homo sapien
gcttggagatgggaaaggtgtgatc

SEQ ID NO: 3221523 - DNA, 25 bp, Homo sapien
gggaaaggtgtgatcaaaagactgc

SEQ ID NO: 3221524 - DNA, 25 bp, Homo sapien
aggtgtgatcaaaagactgcttagt

SEQ ID NO: 3221525 - DNA, 25 bp, Homo sapien
aacttgttgtctgacttcgaagcca

SEQ ID NO: 3221526 - DNA, 25 bp, Homo sapien
tgacttcgaagccagcggcgctggt

SEQ ID NO: 3221527 - DNA, 25 bp, Homo sapien
ttgtctgacttcgaagccagcggcg

SEQ ID NO: 3221528 - DNA, 25 bp, Homo sapien
ttccaaacttgttgtctgacttcga

SEQ ID NO: 3221529 - DNA, 25 bp, Homo sapien
taggtgggcactgaacaatgtcccc

SEQ ID NO: 3221530 - DNA, 25 bp, Homo sapien
gtaagatctccacaagttacaggaa

SEQ ID NO: 3221531 - DNA, 25 bp, Homo sapien
caaattattaaagaggaaggccatt

SEQ ID NO: 3221532 - DNA, 25 bp, Homo sapien
cagtgatagaatgcataaacaggct

SEQ ID NO: 3221533 - DNA, 25 bp, Homo sapien
tgatggcacatggtgctgttataaa

SEQ ID NO: 3221534 - DNA, 25 bp, Homo sapien
aaggttttcactccagatgttactg

SEQ ID NO: 3221535 - DNA, 25 bp, Homo sapien
gaaattcccggattctaatcatcag

SEQ ID NO: 3221536 - DNA, 25 bp, Homo sapien
catcagagaaaattcttgaggtttc

SEQ ID NO: 3221537 - DNA, 25 bp, Homo sapien
tgatgcttatggcaattttcttcct

SEQ ID NO: 3221538 - DNA, 25 bp, Homo sapien
ttcagcctgttcatgtgagattcaa

SEQ ID NO: 3221539 - DNA, 25 bp, Homo sapien
tctcacatagggaaaagatgatgct

SEQ ID NO: 3221540 - DNA, 25 bp, Homo sapien
ccatagctggattagagctacaggt

SEQ ID NO: 3221541 - DNA, 25 bp, Homo sapien
ggactcggagacttgattctgctat

SEQ ID NO: 3221542 - DNA, 25 bp, Homo sapien
gattctgctattttcctacaggaga

SEQ ID NO: 3221543 - DNA, 25 bp, Homo sapien
tgacataaaactggactcggagact

SEQ ID NO: 3221544 - DNA, 25 bp, Homo sapien
gagcttccatcaaacggctgacata

SEQ ID NO: 3221545 - DNA, 25 bp, Homo sapien
cttgaatctatgtagtccttaaaag

SEQ ID NO: 3221546 - DNA, 25 bp, Homo sapien
ttggataatcttggtgtaaaagaat

SEQ ID NO: 3221547 - DNA, 25 bp, Homo sapien
agattcaagctccacacataacagg

SEQ ID NO: 3221548 - DNA, 25 bp, Homo sapien
ataacaggggttgcacactatggcc

SEQ ID NO: 3221549 - DNA, 25 bp, Homo sapien
catacaggttcagctatccttggaa

SEQ ID NO: 3221550 - DNA, 25 bp, Homo sapien
actccttgagaaagcgctggcagag

SEQ ID NO: 3221551 - DNA, 25 bp, Homo sapien
gctatccttggaacagaatataagt

SEQ ID NO: 3221552 - DNA, 25 bp, Homo sapien
ttttttccaaagtgccggacatcat

SEQ ID NO: 3221553 - DNA, 25 bp, Homo sapien
ccacaggcatgacagttgggaccca

SEQ ID NO: 3221554 - DNA, 25 bp, Homo sapien
ttatacggatgtgttttggccagca

SEQ ID NO: 3221555 - DNA, 25 bp, Homo sapien
ggtaggttaacaccgcagtcagtaa

SEQ ID NO: 3221556 - DNA, 25 bp, Homo sapien
gactgggaggtacgtttctctgaga

SEQ ID NO: 3221557 - DNA, 25 bp, Homo sapien
tacggtgcgagtcagtctcactgga

SEQ ID NO: 3221558 - DNA, 25 bp, Homo sapien
gagcctatggctccgtaaagatcac

SEQ ID NO: 3221559 - DNA, 25 bp, Homo sapien
tcagagcaacggagaaagtaggtca

SEQ ID NO: 3221560 - DNA, 25 bp, Homo sapien
gagcgggctcgttcctcaccgtaat

SEQ ID NO: 3221561 - DNA, 25 bp, Homo sapien
tccaggaagcgtctgatgctggccc

SEQ ID NO: 3221562 - DNA, 25 bp, Homo sapien
ttgtcaggtttaagacccaggtctc

SEQ ID NO: 3221563 - DNA, 25 bp, Homo sapien
tgaagagccatcttgcggtgcctct

SEQ ID NO: 3221564 - DNA, 25 bp, Homo sapien
gacccaggtctctactgtcagtgcc

SEQ ID NO: 3221565 - DNA, 25 bp, Homo sapien
tttttcatgcggctttcaaagtcag

SEQ ID NO: 3221566 - DNA, 25 bp, Homo sapien
ggagatgcaaagcttccaatctgga

SEQ ID NO: 3221567 - DNA, 25 bp, Homo sapien
tcccggagatgtctgtcagggcaag

SEQ ID NO: 3221568 - DNA, 25 bp, Homo sapien
ccaatctggaaagtgaccttttcta

SEQ ID NO: 3221569 - DNA, 25 bp, Homo sapien
tatctgctgccatgtcgtttctgct

SEQ ID NO: 3221570 - DNA, 25 bp, Homo sapien
tgcaaaacccttgtcagactcgcct

SEQ ID NO: 3221571 - DNA, 25 bp, Homo sapien
catacaaacctctagtggcctccag

SEQ ID NO: 3221572 - DNA, 25 bp, Homo sapien
ctctgaaagccgattctgaggacag

SEQ ID NO: 3221573 - DNA, 25 bp, Homo sapien
ggctgaagcgcaggcttcgtcgtca

SEQ ID NO: 3221574 - DNA, 25 bp, Homo sapien
ccaccgtgacccagatctagcatgg

SEQ ID NO: 3221575 - DNA, 25 bp, Homo sapien
ggcttcgtcgtcactgtctcccagg

SEQ ID NO: 3221576 - DNA, 25 bp, Homo sapien
tcccagggcgctatctgagctttca

SEQ ID NO: 3221577 - DNA, 25 bp, Homo sapien
tattggacatccaccaggcagtctg

SEQ ID NO: 3221578 - DNA, 25 bp, Homo sapien
aaatgtttcaggaagggctcttgcc

SEQ ID NO: 3221579 - DNA, 25 bp, Homo sapien
aatagattcagggtggtccatgtca

SEQ ID NO: 3221580 - DNA, 25 bp, Homo sapien
tatctgcacagagtggtgcccacga

SEQ ID NO: 3221581 - DNA, 25 bp, Homo sapien
ctaaaacaacatgtggcccattaaa

SEQ ID NO: 3221582 - DNA, 25 bp, Homo sapien
taaaacaacatgtggcccattaaaa

SEQ ID NO: 3221583 - DNA, 25 bp, Homo sapien
aaaacaacatgtggcccattaaaat

SEQ ID NO: 3221584 - DNA, 25 bp, Homo sapien
tcccatgaagcacaagatcaggcat

SEQ ID NO: 3221585 - DNA, 25 bp, Homo sapien
cagtagcccgccagaagtgagcggc

SEQ ID NO: 3221586 - DNA, 25 bp, Homo sapien
cggccaaagttccttacattctggg

SEQ ID NO: 3221587 - DNA, 25 bp, Homo sapien
tcatcactgccggtcccatgaagca

SEQ ID NO: 3221588 - DNA, 25 bp, Homo sapien
tatacagtcatcctcatgcagccat

SEQ ID NO: 3221589 - DNA, 25 bp, Homo sapien
gaaaagcacttaatagcagccacga

SEQ ID NO: 3221590 - DNA, 25 bp, Homo sapien
gacctctatgcaccacaaggctgtg

SEQ ID NO: 3221591 - DNA, 25 bp, Homo sapien
gcagccacgaggcaattttttcagt

SEQ ID NO: 3221592 - DNA, 25 bp, Homo sapien
taataactttcgatctctcagggtg

SEQ ID NO: 3221593 - DNA, 25 bp, Homo sapien
ttcttaatgcgatgaggactttccc

SEQ ID NO: 3221594 - DNA, 25 bp, Homo sapien
cacgtgtacactgggctggctttcc

SEQ ID NO: 3221595 - DNA, 25 bp, Homo sapien
caataggagcggacagaaaaggtgc

SEQ ID NO: 3221596 - DNA, 25 bp, Homo sapien
aattcttaacattggaagcattaca

SEQ ID NO: 3221597 - DNA, 25 bp, Homo sapien
tattaaatccaaattgtgcacaggt

SEQ ID NO: 3221598 - DNA, 25 bp, Homo sapien
tctctcaatgagagaaaaactccaa

SEQ ID NO: 3221599 - DNA, 25 bp, Homo sapien
aaagtgtacatttagagccaggtac

SEQ ID NO: 3221600 - DNA, 25 bp, Homo sapien
gctgtattcacaggccagacacaag

SEQ ID NO: 3221601 - DNA, 25 bp, Homo sapien
tagaatgctgctggcgcatacgcct

SEQ ID NO: 3221602 - DNA, 25 bp, Homo sapien
gaaaaggctactcaggagtcacagg

SEQ ID NO: 3221603 - DNA, 25 bp, Homo sapien
tcaacaaacgagtggtaataccagg

SEQ ID NO: 3221604 - DNA, 25 bp, Homo sapien
ggcacccgctgccacacctggcaac

SEQ ID NO: 3221605 - DNA, 25 bp, Homo sapien
gctgccacacctggcaacttttttt

SEQ ID NO: 3221606 - DNA, 25 bp, Homo sapien
cacccgctgccacacctggcaactt

SEQ ID NO: 3221607 - DNA, 25 bp, Homo sapien
cccgctgccacacctggcaactttt

SEQ ID NO: 3221608 - DNA, 25 bp, Homo sapien
tgggtagggattcgcaaatcactcg

SEQ ID NO: 3221609 - DNA, 25 bp, Homo sapien
tagaataaatctggacctgaaaccc

SEQ ID NO: 3221610 - DNA, 25 bp, Homo sapien
gaaacccacaaatagcacagacagg

SEQ ID NO: 3221611 - DNA, 25 bp, Homo sapien
ttacatgcacacaagaccacagtct

SEQ ID NO: 3221612 - DNA, 25 bp, Homo sapien
ggagtcagtgtgcttacttaacctg

SEQ ID NO: 3221613 - DNA, 25 bp, Homo sapien
ttcctgttagatcgcaaactccctg

SEQ ID NO: 3221614 - DNA, 25 bp, Homo sapien
tattctccctacttgggagtcagtg

SEQ ID NO: 3221615 - DNA, 25 bp, Homo sapien
tcttctctctagctacttctaagag

SEQ ID NO: 3221616 - DNA, 25 bp, Homo sapien
gatcccatgttgagtagacattcct

SEQ ID NO: 3221617 - DNA, 25 bp, Homo sapien
gttgagtagacattcctgacagcag

SEQ ID NO: 3221618 - DNA, 25 bp, Homo sapien
taattagatcccatgttgagtagac

SEQ ID NO: 3221619 - DNA, 25 bp, Homo sapien
gtagacattcctgacagcagtttta

SEQ ID NO: 3221620 - DNA, 25 bp, Homo sapien
tcagctagaattttttttattatta

SEQ ID NO: 3221621 - DNA, 25 bp, Homo sapien
cccactccccccactccaccacagg

SEQ ID NO: 3221622 - DNA, 25 bp, Homo sapien
agtcagctagaattttttttattat

SEQ ID NO: 3221623 - DNA, 25 bp, Homo sapien
cactccccccactccaccacaggtc

SEQ ID NO: 3221624 - DNA, 25 bp, Homo sapien
taaatgagtaatatataaatttttc

SEQ ID NO: 3221625 - DNA, 25 bp, Homo sapien
tctctatcttttctccgcatttccc

SEQ ID NO: 3221626 - DNA, 25 bp, Homo sapien
tctatcttttctccgcatttccccc

SEQ ID NO: 3221627 - DNA, 25 bp, Homo sapien
tttctctatcttttctccgcatttc

SEQ ID NO: 3221628 - DNA, 25 bp, Homo sapien
tttgacctctgagaatacttgctgt

SEQ ID NO: 3221629 - DNA, 25 bp, Homo sapien
tgcactgctcttcctttgacctctg

SEQ ID NO: 3221630 - DNA, 25 bp, Homo sapien
gaatacttgctgtccacaccattca

SEQ ID NO: 3221631 - DNA, 25 bp, Homo sapien
tctgagaatacttgctgtccacacc

SEQ ID NO: 3221632 - DNA, 25 bp, Homo sapien
ctttacagttgtgtgaaagtgggac

SEQ ID NO: 3221633 - DNA, 25 bp, Homo sapien
gctggccgagagctgacggttttaa

SEQ ID NO: 3221634 - DNA, 25 bp, Homo sapien
aagtgtggtacttcctcgcatacgc

SEQ ID NO: 3221635 - DNA, 25 bp, Homo sapien
tgaaagtgggactagtacagcctcc

SEQ ID NO: 3221636 - DNA, 25 bp, Homo sapien
ttgaattcataaagcccagtttccc

SEQ ID NO: 3221637 - DNA, 25 bp, Homo sapien
gatacaaggcttcagtgacttctct

SEQ ID NO: 3221638 - DNA, 25 bp, Homo sapien
gacgacttgccatcaatgagtctgg

SEQ ID NO: 3221639 - DNA, 25 bp, Homo sapien
tctctttacaagctcctccaaggtc

SEQ ID NO: 3221640 - DNA, 25 bp, Homo sapien
cagctattggctcatccaggactgg

SEQ ID NO: 3221641 - DNA, 25 bp, Homo sapien
ggcctagtttcatgttgtccgtcac

SEQ ID NO: 3221642 - DNA, 25 bp, Homo sapien
caaactggacacctgactagagacc

SEQ ID NO: 3221643 - DNA, 25 bp, Homo sapien
ttatccgtgtctgcgataatacaga

SEQ ID NO: 3221644 - DNA, 25 bp, Homo sapien
tggtgatataagaaccagtacttac

SEQ ID NO: 3221645 - DNA, 25 bp, Homo sapien
gatttctttggtgatataagaacca

SEQ ID NO: 3221646 - DNA, 25 bp, Homo sapien
ctagatttctttggtgatataagaa

SEQ ID NO: 3221647 - DNA, 25 bp, Homo sapien
ctttggtgatataagaaccagtact

SEQ ID NO: 3221648 - DNA, 25 bp, Homo sapien
tagtctatcttcaagatgcatgatg

SEQ ID NO: 3221649 - DNA, 25 bp, Homo sapien
taaggtacatctcctgtagtctatc

SEQ ID NO: 3221650 - DNA, 25 bp, Homo sapien
tttcacatggactcgtgtgtgtccc

SEQ ID NO: 3221651 - DNA, 25 bp, Homo sapien
gactcgtgtgtgtccccggagatat

SEQ ID NO: 3221652 - DNA, 25 bp, Homo sapien
ctagtaatataacttacaagagatg

SEQ ID NO: 3221653 - DNA, 25 bp, Homo sapien
tggaaaaccccaacatttcagccca

SEQ ID NO: 3221654 - DNA, 25 bp, Homo sapien
atacctagtaatataacttacaaga

SEQ ID NO: 3221655 - DNA, 25 bp, Homo sapien
tacctagtaatataacttacaagag

SEQ ID NO: 3221656 - DNA, 25 bp, Homo sapien
gatgcacacctgtaagggtcaagga

SEQ ID NO: 3221657 - DNA, 25 bp, Homo sapien
tactggccctgactacgggaggaag

SEQ ID NO: 3221658 - DNA, 25 bp, Homo sapien
aaaatctaataaggcaagacggccg

SEQ ID NO: 3221659 - DNA, 25 bp, Homo sapien
cactaataatgcactaagaggacct

SEQ ID NO: 3221660 - DNA, 25 bp, Homo sapien
tctaggtactaagtttgatagatta

SEQ ID NO: 3221661 - DNA, 25 bp, Homo sapien
tttctaggtactaagtttgatagat

SEQ ID NO: 3221662 - DNA, 25 bp, Homo sapien
taggtactaagtttgatagattatc

SEQ ID NO: 3221663 - DNA, 25 bp, Homo sapien
aggtactaagtttgatagattatca

SEQ ID NO: 3221664 - DNA, 25 bp, Homo sapien
aatgagtactggcaatagcagtcaa

SEQ ID NO: 3221665 - DNA, 25 bp, Homo sapien
agtcaacagaggcaggtcgttggat

SEQ ID NO: 3221666 - DNA, 25 bp, Homo sapien
gagtatttgagccacataaggagaa

SEQ ID NO: 3221667 - DNA, 25 bp, Homo sapien
cagaggcaggtcgttggattcaatc

SEQ ID NO: 3221668 - DNA, 25 bp, Homo sapien
catcttgatgggattaagaggctac

SEQ ID NO: 3221669 - DNA, 25 bp, Homo sapien
aacagtcactgctaaagccactgga

SEQ ID NO: 3221670 - DNA, 25 bp, Homo sapien
caaactgtgacctggaatccaaagt

SEQ ID NO: 3221671 - DNA, 25 bp, Homo sapien
ggcctaaagtgttcacgacaatcac

SEQ ID NO: 3221672 - DNA, 25 bp, Homo sapien
ggacagctgtgccttttaaagtaaa

SEQ ID NO: 3221673 - DNA, 25 bp, Homo sapien
tgctgcaggtttcatttcccaccag

SEQ ID NO: 3221674 - DNA, 25 bp, Homo sapien
cctgaactgctgcaggtttcatttc

SEQ ID NO: 3221675 - DNA, 25 bp, Homo sapien
tcatcctgaactgctgcaggtttca

SEQ ID NO: 3221676 - DNA, 25 bp, Homo sapien
taaaggtggaatcctgtcaactgag

SEQ ID NO: 3221677 - DNA, 25 bp, Homo sapien
tgctagaaagaggtccatcacaggg

SEQ ID NO: 3221678 - DNA, 25 bp, Homo sapien
gaatcctgagtgtcacggagacagc

SEQ ID NO: 3221679 - DNA, 25 bp, Homo sapien
taaagctcagtgtcccctatatggg

SEQ ID NO: 3221680 - DNA, 25 bp, Homo sapien
caatttaacgtggaagtatgcatga

SEQ ID NO: 3221681 - DNA, 25 bp, Homo sapien
caatgacattggtatctattcagac

SEQ ID NO: 3221682 - DNA, 25 bp, Homo sapien
tacatattagcggaaaaatccagac

SEQ ID NO: 3221683 - DNA, 25 bp, Homo sapien
agttttattgcaccaaatgccacag

SEQ ID NO: 3221684 - DNA, 25 bp, Homo sapien
tcccacagcacaatgaactttgcag

SEQ ID NO: 3221685 - DNA, 25 bp, Homo sapien
tgaggtctgtgtacaaaccatacgc

SEQ ID NO: 3221686 - DNA, 25 bp, Homo sapien
tgcaggcgtccagtttttcaataga

SEQ ID NO: 3221687 - DNA, 25 bp, Homo sapien
aaccatacgccaataatagctttct

SEQ ID NO: 3221688 - DNA, 25 bp, Homo sapien
agcccagctgttctgcactgcacat

SEQ ID NO: 3221689 - DNA, 25 bp, Homo sapien
cttggcttgattcccctgacaagcc

SEQ ID NO: 3221690 - DNA, 25 bp, Homo sapien
ggcttgattcccctgacaagcccag

SEQ ID NO: 3221691 - DNA, 25 bp, Homo sapien
gattcccctgacaagcccagctgtt

SEQ ID NO: 3221692 - DNA, 25 bp, Homo sapien
gcgagtctctaatagggacgaaaaa

SEQ ID NO: 3221693 - DNA, 25 bp, Homo sapien
caaacgagacgtcgtgcgagtctct

SEQ ID NO: 3221694 - DNA, 25 bp, Homo sapien
gacgtcgtgcgagtctctaataggg

SEQ ID NO: 3221695 - DNA, 25 bp, Homo sapien
gttccaaagcaaacgagacgtcgtg

SEQ ID NO: 3221696 - DNA, 25 bp, Homo sapien
ttggaaatggttgtctggaaagctt

SEQ ID NO: 3221697 - DNA, 25 bp, Homo sapien
aatggttgtctggaaagcttccact

SEQ ID NO: 3221698 - DNA, 25 bp, Homo sapien
gaaatggttgtctggaaagcttcca

SEQ ID NO: 3221699 - DNA, 25 bp, Homo sapien
tggttgtctggaaagcttccacttt

SEQ ID NO: 3221700 - DNA, 25 bp, Homo sapien
gccttggccacagcatcccgacgtt

SEQ ID NO: 3221701 - DNA, 25 bp, Homo sapien
atgagtctccttggaggccttggcc

SEQ ID NO: 3221702 - DNA, 25 bp, Homo sapien
ggccttggccacagcatcccgacgt

SEQ ID NO: 3221703 - DNA, 25 bp, Homo sapien
agtctccttggaggccttggccaca

SEQ ID NO: 3221704 - DNA, 25 bp, Homo sapien
tctcgctggtgcaccaagacccagt

SEQ ID NO: 3221705 - DNA, 25 bp, Homo sapien
taaacctcagcgtagaaggccccga

SEQ ID NO: 3221706 - DNA, 25 bp, Homo sapien
ctcagcgtagaaggccccgaagtcc

SEQ ID NO: 3221707 - DNA, 25 bp, Homo sapien
acctcagcgtagaaggccccgaagt

SEQ ID NO: 3221708 - DNA, 25 bp, Homo sapien
tcagtgcatagatggcttctcttca

SEQ ID NO: 3221709 - DNA, 25 bp, Homo sapien
cagtgcatagatggcttctcttcac

SEQ ID NO: 3221710 - DNA, 25 bp, Homo sapien
cgggttgacaattttctccaggttg

SEQ ID NO: 3221711 - DNA, 25 bp, Homo sapien
ttctcttcacccttcgggttgacaa

SEQ ID NO: 3221712 - DNA, 25 bp, Homo sapien
tcaaacccacattggcttgactcct

SEQ ID NO: 3221713 - DNA, 25 bp, Homo sapien
caaacccacattggcttgactcctt

SEQ ID NO: 3221714 - DNA, 25 bp, Homo sapien
tctcaaacccacattggcttgactc

SEQ ID NO: 3221715 - DNA, 25 bp, Homo sapien
attctcaaacccacattggcttgac

SEQ ID NO: 3221716 - DNA, 25 bp, Homo sapien
tgtcagggtactgggcaaagttccc

SEQ ID NO: 3221717 - DNA, 25 bp, Homo sapien
tgcaaagagaattcagataagcacc

SEQ ID NO: 3221718 - DNA, 25 bp, Homo sapien
gacatccacttccacgtgcaaagag

SEQ ID NO: 3221719 - DNA, 25 bp, Homo sapien
caaagttcccgcatctataagccat

SEQ ID NO: 3221720 - DNA, 25 bp, Homo sapien
ctggaggagcggagacctgagggca

SEQ ID NO: 3221721 - DNA, 25 bp, Homo sapien
cagcagcttctaagtttattaaaca

SEQ ID NO: 3221722 - DNA, 25 bp, Homo sapien
tattaaacaatgatcaaaactcaca

SEQ ID NO: 3221723 - DNA, 25 bp, Homo sapien
ggaatttgaggtggctagaacaagt

SEQ ID NO: 3221724 - DNA, 25 bp, Homo sapien
ctaagctttattcttggcagtcagg

SEQ ID NO: 3221725 - DNA, 25 bp, Homo sapien
gctttattcttggcagtcaggtgac

SEQ ID NO: 3221726 - DNA, 25 bp, Homo sapien
taagctttattcttggcagtcaggt

SEQ ID NO: 3221727 - DNA, 25 bp, Homo sapien
agctttattcttggcagtcaggtga

SEQ ID NO: 3221728 - DNA, 25 bp, Homo sapien
cttgagtccgtttcccttgagtccg

SEQ ID NO: 3221729 - DNA, 25 bp, Homo sapien
gagagtctgagtttttttgctatga

SEQ ID NO: 3221730 - DNA, 25 bp, Homo sapien
agagagtctgagtttttttgctatg

SEQ ID NO: 3221731 - DNA, 25 bp, Homo sapien
gttcatgacacagtctaccatgaat

SEQ ID NO: 3221732 - DNA, 25 bp, Homo sapien
ttttatagatctgagaacaggtgac

SEQ ID NO: 3221733 - DNA, 25 bp, Homo sapien
gtctaccatgaatttcccatctttc

SEQ ID NO: 3221734 - DNA, 25 bp, Homo sapien
tttttatagatctgagaacaggtga

SEQ ID NO: 3221735 - DNA, 25 bp, Homo sapien
ttctaacctattggagcttggagct

SEQ ID NO: 3221736 - DNA, 25 bp, Homo sapien
cctttctaacctattggagcttgga

SEQ ID NO: 3221737 - DNA, 25 bp, Homo sapien
tttctaacctattggagcttggagc

SEQ ID NO: 3221738 - DNA, 25 bp, Homo sapien
tctaacctattggagcttggagctc

SEQ ID NO: 3221739 - DNA, 25 bp, Homo sapien
tggagattggaatgcagaactctgc

SEQ ID NO: 3221740 - DNA, 25 bp, Homo sapien
tctgggaagactatagcagtatctg

SEQ ID NO: 3221741 - DNA, 25 bp, Homo sapien
tattactggatgcaagttctgggaa

SEQ ID NO: 3221742 - DNA, 25 bp, Homo sapien
gtcataaagagtcattagcaaccac

SEQ ID NO: 3221743 - DNA, 25 bp, Homo sapien
gccagattatctgggacataagctg

SEQ ID NO: 3221744 - DNA, 25 bp, Homo sapien
cataagctggaactggatctagtac

SEQ ID NO: 3221745 - DNA, 25 bp, Homo sapien
tatctgggacataagctggaactgg

SEQ ID NO: 3221746 - DNA, 25 bp, Homo sapien
aaagacagtggtgactgagcctgcc

SEQ ID NO: 3221747 - DNA, 25 bp, Homo sapien
aagagggaagcgtgggcatctggga

SEQ ID NO: 3221748 - DNA, 25 bp, Homo sapien
cagcagcctcgaagagagcaaagag

SEQ ID NO: 3221749 - DNA, 25 bp, Homo sapien
agggaagcgtgggcatctgggacct

SEQ ID NO: 3221750 - DNA, 25 bp, Homo sapien
gcagcagcctcgaagagagcaaaga

SEQ ID NO: 3221751 - DNA, 25 bp, Homo sapien
tgcactccaatacccctccaaggaa

SEQ ID NO: 3221752 - DNA, 25 bp, Homo sapien
tggagaggcacacagtgcactccaa

SEQ ID NO: 3221753 - DNA, 25 bp, Homo sapien
gctgccatgttttgaactgctctat

SEQ ID NO: 3221754 - DNA, 25 bp, Homo sapien
catgttttgaactgctctatggaga

SEQ ID NO: 3221755 - DNA, 25 bp, Homo sapien
tacaaccctctcaaggcaagatttc

SEQ ID NO: 3221756 - DNA, 25 bp, Homo sapien
tctccagtggttacaaccctctcaa

SEQ ID NO: 3221757 - DNA, 25 bp, Homo sapien
gggtaaggataatagaaaggatcca

SEQ ID NO: 3221758 - DNA, 25 bp, Homo sapien
cagtggttacaaccctctcaaggca

SEQ ID NO: 3221759 - DNA, 25 bp, Homo sapien
cgctctcggcaactttgttcctcgt

SEQ ID NO: 3221760 - DNA, 25 bp, Homo sapien
ccagtcgctctcggcaactttgttc

SEQ ID NO: 3221761 - DNA, 25 bp, Homo sapien
agtcgctctcggcaactttgttcct

SEQ ID NO: 3221762 - DNA, 25 bp, Homo sapien
cagccctccggcccagtcgctctcg

SEQ ID NO: 3221763 - DNA, 25 bp, Homo sapien
tgcgaagcccgatcgcctcggccgc

SEQ ID NO: 3221764 - DNA, 25 bp, Homo sapien
ctgtctactgggctcggccgtccct

SEQ ID NO: 3221765 - DNA, 25 bp, Homo sapien
caggtccgggcgctgcgaagcccga

SEQ ID NO: 3221766 - DNA, 25 bp, Homo sapien
gctcggccgtccctcccgactgctg

SEQ ID NO: 3221767 - DNA, 25 bp, Homo sapien
ctccgcaccctggccggcctcctcc

SEQ ID NO: 3221768 - DNA, 25 bp, Homo sapien
gggccgctccgcaccctggccggcc

SEQ ID NO: 3221769 - DNA, 25 bp, Homo sapien
cgctccgcaccctggccggcctcct

SEQ ID NO: 3221770 - DNA, 25 bp, Homo sapien
gccggggccgctccgcaccctggcc

SEQ ID NO: 3221771 - DNA, 25 bp, Homo sapien
cttcatcaccgcctggcggaagctg

SEQ ID NO: 3221772 - DNA, 25 bp, Homo sapien
aagctgttatctacgtaggacgcca

SEQ ID NO: 3221773 - DNA, 25 bp, Homo sapien
gcctggcggaagctgttatctacgt

SEQ ID NO: 3221774 - DNA, 25 bp, Homo sapien
tcctttcggggggattcttcatcac

SEQ ID NO: 3221775 - DNA, 25 bp, Homo sapien
tgcccgaggggagatgagactccat

SEQ ID NO: 3221776 - DNA, 25 bp, Homo sapien
ccctgagattcagaggccacggagg

SEQ ID NO: 3221777 - DNA, 25 bp, Homo sapien
agactccatcccctgagattcagag

SEQ ID NO: 3221778 - DNA, 25 bp, Homo sapien
cagagggagcaagagtcgctgcccg

SEQ ID NO: 3221779 - DNA, 25 bp, Homo sapien
cacttgcaaggggaggaacggatct

SEQ ID NO: 3221780 - DNA, 25 bp, Homo sapien
cactgaactccaagggtcacttgca

SEQ ID NO: 3221781 - DNA, 25 bp, Homo sapien
caccactgaactccaagggtcactt

SEQ ID NO: 3221782 - DNA, 25 bp, Homo sapien
gaactccaagggtcacttgcaaggg

SEQ ID NO: 3221783 - DNA, 25 bp, Homo sapien
taggttctaatattctcagcatgcg

SEQ ID NO: 3221784 - DNA, 25 bp, Homo sapien
gaaaggcagcgtgtgcaacaccaag

SEQ ID NO: 3221785 - DNA, 25 bp, Homo sapien
tactctattctacacaactggcagg

SEQ ID NO: 3221786 - DNA, 25 bp, Homo sapien
tctagtcttgtttggtgacccgccc

SEQ ID NO: 3221787 - DNA, 25 bp, Homo sapien
ataagccttaatgatgctgcgcagg

SEQ ID NO: 3221788 - DNA, 25 bp, Homo sapien
ggaggggagtcaatctccaaaggcc

SEQ ID NO: 3221789 - DNA, 25 bp, Homo sapien
gggaggggagtcaatctccaaaggc

SEQ ID NO: 3221790 - DNA, 25 bp, Homo sapien
cttaatgatgctgcgcagggggagg

SEQ ID NO: 3221791 - DNA, 25 bp, Homo sapien
tgagtctatctgatatttgctccac

SEQ ID NO: 3221792 - DNA, 25 bp, Homo sapien
tactatggtgtttacctgctggtga

SEQ ID NO: 3221793 - DNA, 25 bp, Homo sapien
gatgattcctgcctgtaacaattgc

SEQ ID NO: 3221794 - DNA, 25 bp, Homo sapien
tcctgatgatactgatctatgatga

SEQ ID NO: 3221795 - DNA, 25 bp, Homo sapien
gaatgcatgaagtagcttagaggaa

SEQ ID NO: 3221796 - DNA, 25 bp, Homo sapien
aaaatcagaaacttattgctttgca

SEQ ID NO: 3221797 - DNA, 25 bp, Homo sapien
gaagaatgtcaaataggtttagtcc

SEQ ID NO: 3221798 - DNA, 25 bp, Homo sapien
tgaactcaggtagcagagaaatact

SEQ ID NO: 3221799 - DNA, 25 bp, Homo sapien
agaaacgcaagctaaaaacagtgac

SEQ ID NO: 3221800 - DNA, 25 bp, Homo sapien
gaaaaattcaacctctagactaagc

SEQ ID NO: 3221801 - DNA, 25 bp, Homo sapien
aaatcaattcaaacgtaggagcagt

SEQ ID NO: 3221802 - DNA, 25 bp, Homo sapien
cagtttacccagaagatagtgtgag

SEQ ID NO: 3221803 - DNA, 25 bp, Homo sapien
acttctagcatgtcaagcagtgtgc

SEQ ID NO: 3221804 - DNA, 25 bp, Homo sapien
gcttcagggaacagtagccagttca

SEQ ID NO: 3221805 - DNA, 25 bp, Homo sapien
ccagttcaggtgcaggctctatttt

SEQ ID NO: 3221806 - DNA, 25 bp, Homo sapien
taaggacaggaagcctaggatcaag

SEQ ID NO: 3221807 - DNA, 25 bp, Homo sapien
ttcttatacaagaggagagacacag

SEQ ID NO: 3221808 - DNA, 25 bp, Homo sapien
cctctgggaggtaatcaaggttgga

SEQ ID NO: 3221809 - DNA, 25 bp, Homo sapien
tgatagtacttggagatggaggcct

SEQ ID NO: 3221810 - DNA, 25 bp, Homo sapien
tcccctcctatgagctgaggaaagg

SEQ ID NO: 3221811 - DNA, 25 bp, Homo sapien
gcaacatgctatcttggtcaagaca

SEQ ID NO: 3221812 - DNA, 25 bp, Homo sapien
gaaaaagaccatttagcactccatt

SEQ ID NO: 3221813 - DNA, 25 bp, Homo sapien
tgtatctcttagcacacaattcctg

SEQ ID NO: 3221814 - DNA, 25 bp, Homo sapien
tcaaattctaagcatgagcctccat

SEQ ID NO: 3221815 - DNA, 25 bp, Homo sapien
ccacttctctattttcgcagcccat

SEQ ID NO: 3221816 - DNA, 25 bp, Homo sapien
ggttatccacttctctattttcgca

SEQ ID NO: 3221817 - DNA, 25 bp, Homo sapien
ttggttatccacttctctattttcg

SEQ ID NO: 3221818 - DNA, 25 bp, Homo sapien
tatccacttctctattttcgcagcc

SEQ ID NO: 3221819 - DNA, 25 bp, Homo sapien
cggtaattagaacagtcttctacat

SEQ ID NO: 3221820 - DNA, 25 bp, Homo sapien
tgcttatacgatctttcatgaaaca

SEQ ID NO: 3221821 - DNA, 25 bp, Homo sapien
tgtctactagagagttgtcactgag

SEQ ID NO: 3221822 - DNA, 25 bp, Homo sapien
tctgctaaataacaggctggtcttg

SEQ ID NO: 3221823 - DNA, 25 bp, Homo sapien
ccagagccttaagtgtatatccctg

SEQ ID NO: 3221824 - DNA, 25 bp, Homo sapien
cagagccttaagtgtatatccctgc

SEQ ID NO: 3221825 - DNA, 25 bp, Homo sapien
agagccttaagtgtatatccctgca

SEQ ID NO: 3221826 - DNA, 25 bp, Homo sapien
gagccttaagtgtatatccctgcag

SEQ ID NO: 3221827 - DNA, 25 bp, Homo sapien
tgagttcctacacgcaataccacag

SEQ ID NO: 3221828 - DNA, 25 bp, Homo sapien
tcctacacgcaataccacagaaagg

SEQ ID NO: 3221829 - DNA, 25 bp, Homo sapien
tactgagttcctacacgcaatacca

SEQ ID NO: 3221830 - DNA, 25 bp, Homo sapien
agttcctacacgcaataccacagaa

SEQ ID NO: 3221831 - DNA, 25 bp, Homo sapien
tgagaatcacaggaaacatactagc

SEQ ID NO: 3221832 - DNA, 25 bp, Homo sapien
gaatatttgtcttcgcccacttggc

SEQ ID NO: 3221833 - DNA, 25 bp, Homo sapien
aacacgggaagggatctgactgaga

SEQ ID NO: 3221834 - DNA, 25 bp, Homo sapien
tatacaactgattggctctctaagc

SEQ ID NO: 3221835 - DNA, 25 bp, Homo sapien
aaaccctgatgtgggtaagtacact

SEQ ID NO: 3221836 - DNA, 25 bp, Homo sapien
tccactttaagatgatttcctacat

SEQ ID NO: 3221837 - DNA, 25 bp, Homo sapien
ccctgatgtgggtaagtacactcca

SEQ ID NO: 3221838 - DNA, 25 bp, Homo sapien
cctacatcgtactcaaaaaatttca

SEQ ID NO: 3221839 - DNA, 25 bp, Homo sapien
tattgctcaggcgagtattaaactc

SEQ ID NO: 3221840 - DNA, 25 bp, Homo sapien
ctcaggcgagtattaaactcttggc

SEQ ID NO: 3221841 - DNA, 25 bp, Homo sapien
tcttggctttaagcaatcatcccac

SEQ ID NO: 3221842 - DNA, 25 bp, Homo sapien
tatattgctcaggcgagtattaaac

SEQ ID NO: 3221843 - DNA, 25 bp, Homo sapien
tcatcatagttgatcctaattttta

SEQ ID NO: 3221844 - DNA, 25 bp, Homo sapien
tcatttcatcatagttgatcctaat

SEQ ID NO: 3221845 - DNA, 25 bp, Homo sapien
tttcatttcatcatagttgatccta

SEQ ID NO: 3221846 - DNA, 25 bp, Homo sapien
tttcatcatagttgatcctaatttt

SEQ ID NO: 3221847 - DNA, 25 bp, Homo sapien
ctaagttgatgctccctcaagtttg

SEQ ID NO: 3221848 - DNA, 25 bp, Homo sapien
gatgctccctcaagtttgataaggc

SEQ ID NO: 3221849 - DNA, 25 bp, Homo sapien
caagtttgataaggcttccatacca

SEQ ID NO: 3221850 - DNA, 25 bp, Homo sapien
tccataccatgtaaataggaatata

SEQ ID NO: 3221851 - DNA, 25 bp, Homo sapien
tggcatcaaaaatagctagacctgg

SEQ ID NO: 3221852 - DNA, 25 bp, Homo sapien
taaatatggaattgacatgctcaca

SEQ ID NO: 3221853 - DNA, 25 bp, Homo sapien
gttctttaatatgaagcccagataa

SEQ ID NO: 3221854 - DNA, 25 bp, Homo sapien
tcataattaaaacccgctggcatca

SEQ ID NO: 3221855 - DNA, 25 bp, Homo sapien
ggattataagcgtttgccaacacgc

SEQ ID NO: 3221856 - DNA, 25 bp, Homo sapien
gggattataagcgtttgccaacacg

SEQ ID NO: 3221857 - DNA, 25 bp, Homo sapien
gattataagcgtttgccaacacgcc

SEQ ID NO: 3221858 - DNA, 25 bp, Homo sapien
tcgggtatggccttatagtgagaac

SEQ ID NO: 3221859 - DNA, 25 bp, Homo sapien
tagcatgagctatcattatcccacc

SEQ ID NO: 3221860 - DNA, 25 bp, Homo sapien
gagatctttccaaccactaagtcag

SEQ ID NO: 3221861 - DNA, 25 bp, Homo sapien
tgcctattgtccattccccacaagg

SEQ ID NO: 3221862 - DNA, 25 bp, Homo sapien
catttgcttcgtgtctctcatatct

SEQ ID NO: 3221863 - DNA, 25 bp, Homo sapien
aaacttcatttgcttcgtgtctctc

SEQ ID NO: 3221864 - DNA, 25 bp, Homo sapien
tctcatatctcacagtttcacacat

SEQ ID NO: 3221865 - DNA, 25 bp, Homo sapien
gcttcgtgtctctcatatctcacag

SEQ ID NO: 3221866 - DNA, 25 bp, Homo sapien
tccagacactcaatctatctaactc

SEQ ID NO: 3221867 - DNA, 25 bp, Homo sapien
tcaatctatctaactcacccttcat

SEQ ID NO: 3221868 - DNA, 25 bp, Homo sapien
ttgtccagacactcaatctatctaa

SEQ ID NO: 3221869 - DNA, 25 bp, Homo sapien
agacactcaatctatctaactcacc

SEQ ID NO: 3221870 - DNA, 25 bp, Homo sapien
tcactttatactatccaggatgtaa

SEQ ID NO: 3221871 - DNA, 25 bp, Homo sapien
caggatgtaataccgcacagtatca

SEQ ID NO: 3221872 - DNA, 25 bp, Homo sapien
tatactatccaggatgtaataccgc

SEQ ID NO: 3221873 - DNA, 25 bp, Homo sapien
gtaataccgcacagtatcacattca

SEQ ID NO: 3221874 - DNA, 25 bp, Homo sapien
caggatctaagagcctcctcggcaa

SEQ ID NO: 3221875 - DNA, 25 bp, Homo sapien
cactacataatgcttgattggcact

SEQ ID NO: 3221876 - DNA, 25 bp, Homo sapien
gtgccgctccacattctcatttaag

SEQ ID NO: 3221877 - DNA, 25 bp, Homo sapien
tggccagtaaatgcaagcgatcaag

SEQ ID NO: 3221878 - DNA, 25 bp, Homo sapien
gcctcaggcaggcagagtttccgtg

SEQ ID NO: 3221879 - DNA, 25 bp, Homo sapien
gtacaacgtgcttcccttcaaggtc

SEQ ID NO: 3221880 - DNA, 25 bp, Homo sapien
tttcacttacaatcatgcctcaggc

SEQ ID NO: 3221881 - DNA, 25 bp, Homo sapien
ggcatttgcagagaatgaccattca

SEQ ID NO: 3221882 - DNA, 25 bp, Homo sapien
gaaccagaaagaaggatataccagc

SEQ ID NO: 3221883 - DNA, 25 bp, Homo sapien
tgatgaacacggaaccagaaagaag

SEQ ID NO: 3221884 - DNA, 25 bp, Homo sapien
gatataccagcaggtcccaatatca

SEQ ID NO: 3221885 - DNA, 25 bp, Homo sapien
ttccttgatgaacacggaaccagaa

SEQ ID NO: 3221886 - DNA, 25 bp, Homo sapien
ttgtcctcgctgaatcctatctctg

SEQ ID NO: 3221887 - DNA, 25 bp, Homo sapien
gtcctcgctgaatcctatctctgtg

SEQ ID NO: 3221888 - DNA, 25 bp, Homo sapien
gaattgtcctcgctgaatcctatct

SEQ ID NO: 3221889 - DNA, 25 bp, Homo sapien
gtttgaattgtcctcgctgaatcct

SEQ ID NO: 3221890 - DNA, 25 bp, Homo sapien
cactttggtagtgtctatgtcctcg

SEQ ID NO: 3221891 - DNA, 25 bp, Homo sapien
agtggtgtgatgactacactttggt

SEQ ID NO: 3221892 - DNA, 25 bp, Homo sapien
tagtgtctatgtcctcgtgaccaaa

SEQ ID NO: 3221893 - DNA, 25 bp, Homo sapien
gatgactacactttggtagtgtcta

SEQ ID NO: 3221894 - DNA, 25 bp, Homo sapien
gtgaagagagcaagcagtttttctc

SEQ ID NO: 3221895 - DNA, 25 bp, Homo sapien
gggtgaagagagcaagcagtttttc

SEQ ID NO: 3221896 - DNA, 25 bp, Homo sapien
ggtgaagagagcaagcagtttttct

SEQ ID NO: 3221897 - DNA, 25 bp, Homo sapien
tgtttcgcatgttgtatgggcactc

SEQ ID NO: 3221898 - DNA, 25 bp, Homo sapien
tgggcactcttttcgcataccagcc

SEQ ID NO: 3221899 - DNA, 25 bp, Homo sapien
atgttgtatgggcactcttttcgca

SEQ ID NO: 3221900 - DNA, 25 bp, Homo sapien
ctgcagctatgtgtttcgcatgttg

SEQ ID NO: 3221901 - DNA, 25 bp, Homo sapien
cagtgctgtcaccttctataggagc

SEQ ID NO: 3221902 - DNA, 25 bp, Homo sapien
tctataggagctcttttctctgcag

SEQ ID NO: 3221903 - DNA, 25 bp, Homo sapien
tctttgaagaaccactaacaccaac

SEQ ID NO: 3221904 - DNA, 25 bp, Homo sapien
agtatctttgaagaaccactaacac

SEQ ID NO: 3221905 - DNA, 25 bp, Homo sapien
ccccgcaaagatctgaatgtcaaac

SEQ ID NO: 3221906 - DNA, 25 bp, Homo sapien
attcagaaggcaattcaaattcagc

SEQ ID NO: 3221907 - DNA, 25 bp, Homo sapien
tacaaatgaccataaagagctttag

SEQ ID NO: 3221908 - DNA, 25 bp, Homo sapien
tagctagttgagtgaaaaacacaaa

SEQ ID NO: 3221909 - DNA, 25 bp, Homo sapien
taggccatcacttaagtccttttcc

SEQ ID NO: 3221910 - DNA, 25 bp, Homo sapien
caggttagactaggccatcacttaa

SEQ ID NO: 3221911 - DNA, 25 bp, Homo sapien
ttgtttacaggttatcaggttagac

SEQ ID NO: 3221912 - DNA, 25 bp, Homo sapien
caggttatcaggttagactaggcca

SEQ ID NO: 3221913 - DNA, 25 bp, Homo sapien
acgcctaaaacttcctgcagaacgc

SEQ ID NO: 3221914 - DNA, 25 bp, Homo sapien
tgcattcacagccacgcctaaaact

SEQ ID NO: 3221915 - DNA, 25 bp, Homo sapien
tttcagaaggctctaaaacaatgca

SEQ ID NO: 3221916 - DNA, 25 bp, Homo sapien
aaaacaatgcattcacagccacgcc

SEQ ID NO: 3221917 - DNA, 25 bp, Homo sapien
cgagactgtctatgggaagcttgcc

SEQ ID NO: 3221918 - DNA, 25 bp, Homo sapien
cgtgtgatagcctctaggcaaagga

SEQ ID NO: 3221919 - DNA, 25 bp, Homo sapien
catgggataaggatccacagtgtca

SEQ ID NO: 3221920 - DNA, 25 bp, Homo sapien
caaaggaggtttgcccatgggataa

SEQ ID NO: 3221921 - DNA, 25 bp, Homo sapien
gctatatgtataatgcttcccatgt

SEQ ID NO: 3221922 - DNA, 25 bp, Homo sapien
tcttgcaatgactttaaatcacctg

SEQ ID NO: 3221923 - DNA, 25 bp, Homo sapien
aaaggatgcaatccttatgaccatg

SEQ ID NO: 3221924 - DNA, 25 bp, Homo sapien
ccatgttatttagccatgcacttga

SEQ ID NO: 3221925 - DNA, 25 bp, Homo sapien
aagatgaacattatcagacatgcta

SEQ ID NO: 3221926 - DNA, 25 bp, Homo sapien
aaaagatgaacattatcagacatgc

SEQ ID NO: 3221927 - DNA, 25 bp, Homo sapien
gaaaagatgaacattatcagacatg

SEQ ID NO: 3221928 - DNA, 25 bp, Homo sapien
gatgaacattatcagacatgctata

SEQ ID NO: 3221929 - DNA, 25 bp, Homo sapien
cagtgcaaattcacacgtaaactta

SEQ ID NO: 3221930 - DNA, 25 bp, Homo sapien
cttaggttagtgtcagaagaccaca

SEQ ID NO: 3221931 - DNA, 25 bp, Homo sapien
cagaaggacaagacgaagcaaaaca

SEQ ID NO: 3221932 - DNA, 25 bp, Homo sapien
aatacagaaggacaagacgaagcaa

SEQ ID NO: 3221933 - DNA, 25 bp, Homo sapien
gtgcaatttcccaatccgtataaat

SEQ ID NO: 3221934 - DNA, 25 bp, Homo sapien
tcccaatccgtataaattaaatcaa

SEQ ID NO: 3221935 - DNA, 25 bp, Homo sapien
gcaatttcccaatccgtataaatta

SEQ ID NO: 3221936 - DNA, 25 bp, Homo sapien
ttcccaatccgtataaattaaatca

SEQ ID NO: 3221937 - DNA, 25 bp, Homo sapien
taggttaagcaagtctcagagggat

SEQ ID NO: 3221938 - DNA, 25 bp, Homo sapien
tacatgatgaaccatagtgatcctg

SEQ ID NO: 3221939 - DNA, 25 bp, Homo sapien
tagtctgtctcttaacctgcaaggc

SEQ ID NO: 3221940 - DNA, 25 bp, Homo sapien
tcttaggaaacaaacggcattgctg

SEQ ID NO: 3221941 - DNA, 25 bp, Homo sapien
gcagttggcatagcaacgcacaagg

SEQ ID NO: 3221942 - DNA, 25 bp, Homo sapien
tagcaacgcacaaggaaagccattt

SEQ ID NO: 3221943 - DNA, 25 bp, Homo sapien
ttggcatagcaacgcacaaggaaag

SEQ ID NO: 3221944 - DNA, 25 bp, Homo sapien
ggctgcaggcagttggcatagcaac

SEQ ID NO: 3221945 - DNA, 25 bp, Homo sapien
cagagcgtgtgaatcgggaactcct

SEQ ID NO: 3221946 - DNA, 25 bp, Homo sapien
ggaactcctccctagctgctaatga

SEQ ID NO: 3221947 - DNA, 25 bp, Homo sapien
cacttgtagaccagaaaaggaatcc

SEQ ID NO: 3221948 - DNA, 25 bp, Homo sapien
taatgatgctgacagagtggtgacc

SEQ ID NO: 3221949 - DNA, 25 bp, Homo sapien
ttagctgggattgctagtggtttca

SEQ ID NO: 3221950 - DNA, 25 bp, Homo sapien
ataactccatggttagctgggattg

SEQ ID NO: 3221951 - DNA, 25 bp, Homo sapien
tcctgctggcccataactccatggt

SEQ ID NO: 3221952 - DNA, 25 bp, Homo sapien
ccatggttagctgggattgctagtg

SEQ ID NO: 3221953 - DNA, 25 bp, Homo sapien
tacaacattggaagaacaagccagc

SEQ ID NO: 3221954 - DNA, 25 bp, Homo sapien
tactaagtcgaagctgaactgtcaa

SEQ ID NO: 3221955 - DNA, 25 bp, Homo sapien
gcagttctctatgacgtgctatcaa

SEQ ID NO: 3221956 - DNA, 25 bp, Homo sapien
cagatgagtcccactgatcgcttta

SEQ ID NO: 3221957 - DNA, 25 bp, Homo sapien
ggtgttaggcatagaaaagtctttc

SEQ ID NO: 3221958 - DNA, 25 bp, Homo sapien
tctttctcggtagctgcccatggga

SEQ ID NO: 3221959 - DNA, 25 bp, Homo sapien
ggctctgacttggtgttaggcatag

SEQ ID NO: 3221960 - DNA, 25 bp, Homo sapien
catgggatttcagcatgacaaacac

SEQ ID NO: 3221961 - DNA, 25 bp, Homo sapien
tgagacagtgcgcaaagaatcactt

SEQ ID NO: 3221962 - DNA, 25 bp, Homo sapien
accaaattgtactcatgaacctcag

SEQ ID NO: 3221963 - DNA, 25 bp, Homo sapien
catgtgaatttgtgtgatgccagaa

SEQ ID NO: 3221964 - DNA, 25 bp, Homo sapien
tacctagactactatacaggctgtc

SEQ ID NO: 3221965 - DNA, 25 bp, Homo sapien
atggtaacgggctgggctctcggtg

SEQ ID NO: 3221966 - DNA, 25 bp, Homo sapien
ttaagcgcagctcgcatggctcatt

SEQ ID NO: 3221967 - DNA, 25 bp, Homo sapien
tgccttaagcgcagctcgcatggct

SEQ ID NO: 3221968 - DNA, 25 bp, Homo sapien
gcgtcataacatgcttccaacacag

SEQ ID NO: 3221969 - DNA, 25 bp, Homo sapien
taaggttcctcaagcatagctgaac

SEQ ID NO: 3221970 - DNA, 25 bp, Homo sapien
tttacctggaaaatcatgactacag

SEQ ID NO: 3221971 - DNA, 25 bp, Homo sapien
tctggatctgatccaaagagagtta

SEQ ID NO: 3221972 - DNA, 25 bp, Homo sapien
taattagtgaagtaccacgaggacc

SEQ ID NO: 3221973 - DNA, 25 bp, Homo sapien
tcctggatagtgtggataaaaactt

SEQ ID NO: 3221974 - DNA, 25 bp, Homo sapien
ctcctggatagtgtggataaaaact

SEQ ID NO: 3221975 - DNA, 25 bp, Homo sapien
cctggatagtgtggataaaaacttc

SEQ ID NO: 3221976 - DNA, 25 bp, Homo sapien
aaggtgtttcatgcagcttccccaa

SEQ ID NO: 3221977 - DNA, 25 bp, Homo sapien
tagaattataatccacaggacacac

SEQ ID NO: 3221978 - DNA, 25 bp, Homo sapien
gaataaactgttcgaggactttctg

SEQ ID NO: 3221979 - DNA, 25 bp, Homo sapien
ccaaatagacctgtgcgtgcgcatg

SEQ ID NO: 3221980 - DNA, 25 bp, Homo sapien
taaacaaacttgacgacaatatctt

SEQ ID NO: 3221981 - DNA, 25 bp, Homo sapien
aacttgacgacaatatctttttcca

SEQ ID NO: 3221982 - DNA, 25 bp, Homo sapien
ttattataaacaaacttgacgacaa

SEQ ID NO: 3221983 - DNA, 25 bp, Homo sapien
tataaacaaacttgacgacaatatc

SEQ ID NO: 3221984 - DNA, 25 bp, Homo sapien
tctctttcgttagaaaaggcaagaa

SEQ ID NO: 3221985 - DNA, 25 bp, Homo sapien
tgaactgatgtctcctctaaagacg

SEQ ID NO: 3221986 - DNA, 25 bp, Homo sapien
taaagacgtcagattgctgttcagc

SEQ ID NO: 3221987 - DNA, 25 bp, Homo sapien
tggtgtataaaagccgaaagcatag

SEQ ID NO: 3221988 - DNA, 25 bp, Homo sapien
cacccagaatggaacatggctcatt

SEQ ID NO: 3221989 - DNA, 25 bp, Homo sapien
gaaaatacttggcttacacgagagt

SEQ ID NO: 3221990 - DNA, 25 bp, Homo sapien
tactgtgttactacgttaggcgaag

SEQ ID NO: 3221991 - DNA, 25 bp, Homo sapien
ccgcacccaggtagaagagtaagtt

SEQ ID NO: 3221992 - DNA, 25 bp, Homo sapien
cacagctgtaggaaccgatatcaag

SEQ ID NO: 3221993 - DNA, 25 bp, Homo sapien
caagagaggtgaattagctatgcca

SEQ ID NO: 3221994 - DNA, 25 bp, Homo sapien
gagacatccaagtagctttacgtga

SEQ ID NO: 3221995 - DNA, 25 bp, Homo sapien
taaagcacaatcatagacctggaag

SEQ ID NO: 3221996 - DNA, 25 bp, Homo sapien
tgacatcgtcaagcacacattacct

SEQ ID NO: 3221997 - DNA, 25 bp, Homo sapien
gattgatttacatcaccagttgagt

SEQ ID NO: 3221998 - DNA, 25 bp, Homo sapien
tagtctgaatgactatgacatcgtc

SEQ ID NO: 3221999 - DNA, 25 bp, Homo sapien
tgcatactgatgtatcatcctaggt

SEQ ID NO: 3222000 - DNA, 25 bp, Homo sapien
tatatttgactgcaaaagcctcgaa

SEQ ID NO: 3222001 - DNA, 25 bp, Homo sapien
tttatatggagaggaactcactgct

SEQ ID NO: 3222002 - DNA, 25 bp, Homo sapien
tggtaaaaccacaaagctttgctcc

SEQ ID NO: 3222003 - DNA, 25 bp, Homo sapien
atacggagcacactgcctctcagag

SEQ ID NO: 3222004 - DNA, 25 bp, Homo sapien
taagtcaagtgaacctgggcaagtt

SEQ ID NO: 3222005 - DNA, 25 bp, Homo sapien
tctacatgcagcttgatgaggcagg

SEQ ID NO: 3222006 - DNA, 25 bp, Homo sapien
gaagcctcatgttagccatatacgg

SEQ ID NO: 3222007 - DNA, 25 bp, Homo sapien
tgttcaactacctcctaagtcaagt

SEQ ID NO: 3222008 - DNA, 25 bp, Homo sapien
tctaagcctagatgccaatggatta

SEQ ID NO: 3222009 - DNA, 25 bp, Homo sapien
tcacccagctatagacacgatcttt

SEQ ID NO: 3222010 - DNA, 25 bp, Homo sapien
gattattgagctattcccagaaagg

SEQ ID NO: 3222011 - DNA, 25 bp, Homo sapien
cagaaagggctttcgtggccaaact

SEQ ID NO: 3222012 - DNA, 25 bp, Homo sapien
ctctgcaaggcgcaggtcccttcca

SEQ ID NO: 3222013 - DNA, 25 bp, Homo sapien
actctgcaaggcgcaggtcccttcc

SEQ ID NO: 3222014 - DNA, 25 bp, Homo sapien
ctgcaaggcgcaggtcccttccagc

SEQ ID NO: 3222015 - DNA, 25 bp, Homo sapien
tctgcaaggcgcaggtcccttccag

SEQ ID NO: 3222016 - DNA, 25 bp, Homo sapien
gggtgatgatcactggaatctagtc

SEQ ID NO: 3222017 - DNA, 25 bp, Homo sapien
ctacaaggtggagtaagtatattcc

SEQ ID NO: 3222018 - DNA, 25 bp, Homo sapien
catcttaggactgctgagaaatcca

SEQ ID NO: 3222019 - DNA, 25 bp, Homo sapien
gaatctagtcaattttcccaggcat

SEQ ID NO: 3222020 - DNA, 25 bp, Homo sapien
cactgattaatctaatggttggcat

SEQ ID NO: 3222021 - DNA, 25 bp, Homo sapien
tatgtaggacaaacagatgctacca

SEQ ID NO: 3222022 - DNA, 25 bp, Homo sapien
gatgctaccataattagctttgtaa

SEQ ID NO: 3222023 - DNA, 25 bp, Homo sapien
taggaatttgataatcactgattaa

SEQ ID NO: 3222024 - DNA, 25 bp, Homo sapien
aaatcagattcttaaatcagactta

SEQ ID NO: 3222025 - DNA, 25 bp, Homo sapien
ggttgaatcatagtttaaccacaaa

SEQ ID NO: 3222026 - DNA, 25 bp, Homo sapien
cttaggcaaatggttgaatcatagt

SEQ ID NO: 3222027 - DNA, 25 bp, Homo sapien
taaaaaacaccacctgtgaatgaca

SEQ ID NO: 3222028 - DNA, 25 bp, Homo sapien
tttttctaagcttgacccagtccca

SEQ ID NO: 3222029 - DNA, 25 bp, Homo sapien
tctaatgaaatagaggcctgagccc

SEQ ID NO: 3222030 - DNA, 25 bp, Homo sapien
tctaggaggcaaacaaaccatgtag

SEQ ID NO: 3222031 - DNA, 25 bp, Homo sapien
tacaaggcacaacgtgacagcaagc

SEQ ID NO: 3222032 - DNA, 25 bp, Homo sapien
ggaaaaactaggattacaatctgaa

SEQ ID NO: 3222033 - DNA, 25 bp, Homo sapien
tacaatctgaatcaagaactccaag

SEQ ID NO: 3222034 - DNA, 25 bp, Homo sapien
accattgaactaaaaatggtattca

SEQ ID NO: 3222035 - DNA, 25 bp, Homo sapien
ttctataccattgaactaaaaatgg

SEQ ID NO: 3222036 - DNA, 25 bp, Homo sapien
tggagactgtcagtaagatgcagtt

SEQ ID NO: 3222037 - DNA, 25 bp, Homo sapien
gggtggagactgtcagtaagatgca

SEQ ID NO: 3222038 - DNA, 25 bp, Homo sapien
ggagactgtcagtaagatgcagttt

SEQ ID NO: 3222039 - DNA, 25 bp, Homo sapien
gtggagactgtcagtaagatgcagt

SEQ ID NO: 3222040 - DNA, 25 bp, Homo sapien
tacatcctgaatggctagaagaaac

SEQ ID NO: 3222041 - DNA, 25 bp, Homo sapien
ctcccagaatcactagtgatactac

SEQ ID NO: 3222042 - DNA, 25 bp, Homo sapien
aatggctagaagaaacgtgggtcac

SEQ ID NO: 3222043 - DNA, 25 bp, Homo sapien
tagtgatactacatcctgaatggct

SEQ ID NO: 3222044 - DNA, 25 bp, Homo sapien
caagcatgtgttaacaatgagtttt

SEQ ID NO: 3222045 - DNA, 25 bp, Homo sapien
gctctttaggtacaatttcctgaac

SEQ ID NO: 3222046 - DNA, 25 bp, Homo sapien
taaagtcccggttcatatcacagaa

SEQ ID NO: 3222047 - DNA, 25 bp, Homo sapien
ctaatgtttatgaaagttcaatggc

SEQ ID NO: 3222048 - DNA, 25 bp, Homo sapien
catcgtcgtcgtcttcggaatccac

SEQ ID NO: 3222049 - DNA, 25 bp, Homo sapien
aggtccatatcaccagcctcgcttt

SEQ ID NO: 3222050 - DNA, 25 bp, Homo sapien
gaggatctgatgctctctcaatgtc

SEQ ID NO: 3222051 - DNA, 25 bp, Homo sapien
cggtcaattgggtccttctctaggc

SEQ ID NO: 3222052 - DNA, 25 bp, Homo sapien
tataaagagttagcaattcccataa

SEQ ID NO: 3222053 - DNA, 25 bp, Homo sapien
ccactccacaccatcctttatcaat

SEQ ID NO: 3222054 - DNA, 25 bp, Homo sapien
ttcctagaatatgtatatagctgaa

SEQ ID NO: 3222055 - DNA, 25 bp, Homo sapien
tcatctataaagagttagcaattcc

SEQ ID NO: 3222056 - DNA, 25 bp, Homo sapien
tatttgtaggaatcattatggctgc

SEQ ID NO: 3222057 - DNA, 25 bp, Homo sapien
gctgctgctttctagagattctggg

SEQ ID NO: 3222058 - DNA, 25 bp, Homo sapien
gaaatggtaaactgaacacacttcc

SEQ ID NO: 3222059 - DNA, 25 bp, Homo sapien
gaaagagggtttctcagctatcaac

SEQ ID NO: 3222060 - DNA, 25 bp, Homo sapien
tgtaactccagttctaataccacta

SEQ ID NO: 3222061 - DNA, 25 bp, Homo sapien
aactccagttctaataccactaaag

SEQ ID NO: 3222062 - DNA, 25 bp, Homo sapien
tttattgtaactccagttctaatac

SEQ ID NO: 3222063 - DNA, 25 bp, Homo sapien
ttgaattagaggcaacagtttttat

SEQ ID NO: 3222064 - DNA, 25 bp, Homo sapien
caggcaactggtgcataaattccaa

SEQ ID NO: 3222065 - DNA, 25 bp, Homo sapien
aggcaactggtgcataaattccaag

SEQ ID NO: 3222066 - DNA, 25 bp, Homo sapien
acagcacagagttctcgcctcactg

SEQ ID NO: 3222067 - DNA, 25 bp, Homo sapien
catcatttaacactatggtccctgc

SEQ ID NO: 3222068 - DNA, 25 bp, Homo sapien
tctttccaccactgcgaacaccatc

SEQ ID NO: 3222069 - DNA, 25 bp, Homo sapien
agttctcgcctcactgacattgtca

SEQ ID NO: 3222070 - DNA, 25 bp, Homo sapien
caaagcagaaagtaacatcatgatc

SEQ ID NO: 3222071 - DNA, 25 bp, Homo sapien
tcatgatcatacagctgtaagtgcc

SEQ ID NO: 3222072 - DNA, 25 bp, Homo sapien
agtgccagtatggtccctaaaaatg

SEQ ID NO: 3222073 - DNA, 25 bp, Homo sapien
aaaatgaattagcagatcttccatt

SEQ ID NO: 3222074 - DNA, 25 bp, Homo sapien
tttcccatgcacagtatttctgctt

SEQ ID NO: 3222075 - DNA, 25 bp, Homo sapien
ggataagtcacttccacagatccat

SEQ ID NO: 3222076 - DNA, 25 bp, Homo sapien
tgttctcatcactcctttcatgtat

SEQ ID NO: 3222077 - DNA, 25 bp, Homo sapien
gtaggagagacaccaaaactatttc

SEQ ID NO: 3222078 - DNA, 25 bp, Homo sapien
tataagtgttctttattaagaataa

SEQ ID NO: 3222079 - DNA, 25 bp, Homo sapien
catataagtgttctttattaagaat

SEQ ID NO: 3222080 - DNA, 25 bp, Homo sapien
tggcatataagtgttctttattaag

SEQ ID NO: 3222081 - DNA, 25 bp, Homo sapien
ggcatataagtgttctttattaaga

SEQ ID NO: 3222082 - DNA, 25 bp, Homo sapien
tacagacactcaaagatacctatgg

SEQ ID NO: 3222083 - DNA, 25 bp, Homo sapien
tggaaaaccattaccaattgcctgg

SEQ ID NO: 3222084 - DNA, 25 bp, Homo sapien
cctaattgtgcacatgggtatccaa

SEQ ID NO: 3222085 - DNA, 25 bp, Homo sapien
tttcagagcttagggcaaaccactt

SEQ ID NO: 3222086 - DNA, 25 bp, Homo sapien
ttcttgttccagttcgatcaagttc

SEQ ID NO: 3222087 - DNA, 25 bp, Homo sapien
ccagttcgatcaagttctcggtgtt

SEQ ID NO: 3222088 - DNA, 25 bp, Homo sapien
tgattgagaatacggcagtaatctt

SEQ ID NO: 3222089 - DNA, 25 bp, Homo sapien
ttttctacttgattgagaatacggc

SEQ ID NO: 3222090 - DNA, 25 bp, Homo sapien
gaatgttggatctactactgaatgc

SEQ ID NO: 3222091 - DNA, 25 bp, Homo sapien
ggctcgggtcattaaaccactccaa

SEQ ID NO: 3222092 - DNA, 25 bp, Homo sapien
aagaaaagtcctataggtcaacaga

SEQ ID NO: 3222093 - DNA, 25 bp, Homo sapien
aaatgcattgttaacctttctgagg

SEQ ID NO: 3222094 - DNA, 25 bp, Homo sapien
cattaaagtatctttaggtttacat

SEQ ID NO: 3222095 - DNA, 25 bp, Homo sapien
cattaatctggacataattgctgtg

SEQ ID NO: 3222096 - DNA, 25 bp, Homo sapien
ttttttgcttcagaattacattctc

SEQ ID NO: 3222097 - DNA, 25 bp, Homo sapien
tcattacattaatctggacataatt

SEQ ID NO: 3222098 - DNA, 25 bp, Homo sapien
atcgagtcattgcaggatctccttc

SEQ ID NO: 3222099 - DNA, 25 bp, Homo sapien
caaagtcattgaagtgattatttac

SEQ ID NO: 3222100 - DNA, 25 bp, Homo sapien
taaaaatcgagtcattgcaggatct

SEQ ID NO: 3222101 - DNA, 25 bp, Homo sapien
tcattgaagtgattatttacccaca

SEQ ID NO: 3222102 - DNA, 25 bp, Homo sapien
tttagcagcacacgcgatattcaac

SEQ ID NO: 3222103 - DNA, 25 bp, Homo sapien
tattcaacagccttaggtgtccacc

SEQ ID NO: 3222104 - DNA, 25 bp, Homo sapien
gcaaaggagcttctcgggatggttt

SEQ ID NO: 3222105 - DNA, 25 bp, Homo sapien
tcagagcctccaagtaagataaaag

SEQ ID NO: 3222106 - DNA, 25 bp, Homo sapien
ttccatagcttttgacagctgaatg

SEQ ID NO: 3222107 - DNA, 25 bp, Homo sapien
tttccatagcttttgacagctgaat

SEQ ID NO: 3222108 - DNA, 25 bp, Homo sapien
ggttttcacagtgatagataaatgt

SEQ ID NO: 3222109 - DNA, 25 bp, Homo sapien
tgtggcaagatactgatccgagtct

SEQ ID NO: 3222110 - DNA, 25 bp, Homo sapien
gagtcttgtcgagtatctttttcag

SEQ ID NO: 3222111 - DNA, 25 bp, Homo sapien
caagatctggaatggagtagcgact

SEQ ID NO: 3222112 - DNA, 25 bp, Homo sapien
tagcgactggcctttttaatgtcac

SEQ ID NO: 3222113 - DNA, 25 bp, Homo sapien
cagttttcagactcatgcaaacatt

SEQ ID NO: 3222114 - DNA, 25 bp, Homo sapien
attacatcactatctttgcatatca

SEQ ID NO: 3222115 - DNA, 25 bp, Homo sapien
gttttcagactcatgcaaacattaa

SEQ ID NO: 3222116 - DNA, 25 bp, Homo sapien
tgcaaacattaattacatcactatc

SEQ ID NO: 3222117 - DNA, 25 bp, Homo sapien
aaaagtccaaacctgcggctgggtg

SEQ ID NO: 3222118 - DNA, 25 bp, Homo sapien
tgcttggctgttgatgccttgacag

SEQ ID NO: 3222119 - DNA, 25 bp, Homo sapien
tggcaactggataaagcaatgattt

SEQ ID NO: 3222120 - DNA, 25 bp, Homo sapien
tttgactggtaaagagcacatgctg

SEQ ID NO: 3222121 - DNA, 25 bp, Homo sapien
agcagatcacagcaattgcactcca

SEQ ID NO: 3222122 - DNA, 25 bp, Homo sapien
gtgagcagatcacagcaattgcact

SEQ ID NO: 3222123 - DNA, 25 bp, Homo sapien
cagtgagcagatcacagcaattgca

SEQ ID NO: 3222124 - DNA, 25 bp, Homo sapien
tgagcagatcacagcaattgcactc

SEQ ID NO: 3222125 - DNA, 25 bp, Homo sapien
tgaattctgggagctcatgccccat

SEQ ID NO: 3222126 - DNA, 25 bp, Homo sapien
cagtattgctgatggattatctccc

SEQ ID NO: 3222127 - DNA, 25 bp, Homo sapien
tatgatagatcctacagctttgtga

SEQ ID NO: 3222128 - DNA, 25 bp, Homo sapien
tctctatgcacatcacccgattgtg

SEQ ID NO: 3222129 - DNA, 25 bp, Homo sapien
tattagtagtttctcagcacagaaa

SEQ ID NO: 3222130 - DNA, 25 bp, Homo sapien
caaatgtaaggagactgacacagac

SEQ ID NO: 3222131 - DNA, 25 bp, Homo sapien
tataatctgaccttcaatagttgaa

SEQ ID NO: 3222132 - DNA, 25 bp, Homo sapien
taactcactcaactgatagttctgc

SEQ ID NO: 3222133 - DNA, 25 bp, Homo sapien
gattactggatgataaggttccact

SEQ ID NO: 3222134 - DNA, 25 bp, Homo sapien
tctaaaatgcgatgatgtgactgca

SEQ ID NO: 3222135 - DNA, 25 bp, Homo sapien
tgtctgccttaatcctactatgctg

SEQ ID NO: 3222136 - DNA, 25 bp, Homo sapien
ggttccactgacaggcaatgcagtt

SEQ ID NO: 3222137 - DNA, 25 bp, Homo sapien
aacccttagcacttgatctggcaag

SEQ ID NO: 3222138 - DNA, 25 bp, Homo sapien
caagtttggaaagctgatctggaag

SEQ ID NO: 3222139 - DNA, 25 bp, Homo sapien
tccctcaggtgtgacagagacctca

SEQ ID NO: 3222140 - DNA, 25 bp, Homo sapien
tccttactgatcatgatgtagcggc

SEQ ID NO: 3222141 - DNA, 25 bp, Homo sapien
cttgaacaagttcctaagagatcct

SEQ ID NO: 3222142 - DNA, 25 bp, Homo sapien
cagtagtcgactgtgtgcatttgct

SEQ ID NO: 3222143 - DNA, 25 bp, Homo sapien
tacagtaattcttggtgaaaggaaa

SEQ ID NO: 3222144 - DNA, 25 bp, Homo sapien
caaccttcaggtcacagtggccttg

SEQ ID NO: 3222145 - DNA, 25 bp, Homo sapien
gagagctgtgttgcaacttccacag

SEQ ID NO: 3222146 - DNA, 25 bp, Homo sapien
tcaaaatttcgcatagagagctgtg

SEQ ID NO: 3222147 - DNA, 25 bp, Homo sapien
taggttcaatgttgcgaaagagttc

SEQ ID NO: 3222148 - DNA, 25 bp, Homo sapien
taaaattcttgcattccctacagtg

SEQ ID NO: 3222149 - DNA, 25 bp, Homo sapien
ggaagtttctcccaggtcgttcgca

SEQ ID NO: 3222150 - DNA, 25 bp, Homo sapien
ctttttgataactgggaatagaggg

SEQ ID NO: 3222151 - DNA, 25 bp, Homo sapien
gattttgactattgagaacattacg

SEQ ID NO: 3222152 - DNA, 25 bp, Homo sapien
ttatgggaggttgtagattttgact

SEQ ID NO: 3222153 - DNA, 25 bp, Homo sapien
tagcttctcaaaattgaccagcccg

SEQ ID NO: 3222154 - DNA, 25 bp, Homo sapien
gcagggtccatgttcactgaagcca

SEQ ID NO: 3222155 - DNA, 25 bp, Homo sapien
ccaacgtgacgaatttcttttgcaa

SEQ ID NO: 3222156 - DNA, 25 bp, Homo sapien
actgaagccattcggccaacgtgac

SEQ ID NO: 3222157 - DNA, 25 bp, Homo sapien
cttcacttttcgagccatttgggca

SEQ ID NO: 3222158 - DNA, 25 bp, Homo sapien
ccaaattggaaaggtactgcttcac

SEQ ID NO: 3222159 - DNA, 25 bp, Homo sapien
ttggcattgagaaaggaactacgac

SEQ ID NO: 3222160 - DNA, 25 bp, Homo sapien
gcatttgtactaccctggctgagag

SEQ ID NO: 3222161 - DNA, 25 bp, Homo sapien
tgataattgtttgggtttgaaaata

SEQ ID NO: 3222162 - DNA, 25 bp, Homo sapien
ctgataattgtttgggtttgaaaat

SEQ ID NO: 3222163 - DNA, 25 bp, Homo sapien
aaaatagaacaaagaattttagatg

SEQ ID NO: 3222164 - DNA, 25 bp, Homo sapien
tgaaaatagaacaaagaattttaga

SEQ ID NO: 3222165 - DNA, 25 bp, Homo sapien
tgggagatcctttacgggcactttc

SEQ ID NO: 3222166 - DNA, 25 bp, Homo sapien
ctttttgtcaccaggattcttaggc

SEQ ID NO: 3222167 - DNA, 25 bp, Homo sapien
tcttccgtgaaggataaagggacac

SEQ ID NO: 3222168 - DNA, 25 bp, Homo sapien
tgttgtgaccctgcccttggagcta

SEQ ID NO: 3222169 - DNA, 25 bp, Homo sapien
agcctgtttcttgtgacgttccaaa

SEQ ID NO: 3222170 - DNA, 25 bp, Homo sapien
ggagaagaaagctgcgaagatgcat

SEQ ID NO: 3222171 - DNA, 25 bp, Homo sapien
gcatttgatattgtatcttcagcct

SEQ ID NO: 3222172 - DNA, 25 bp, Homo sapien
tttaaagcttgtggagagtttatgc

SEQ ID NO: 3222173 - DNA, 25 bp, Homo sapien
ggaggaactggttaagtccaactgc

SEQ ID NO: 3222174 - DNA, 25 bp, Homo sapien
caactgcccggagccaaaagatctc

SEQ ID NO: 3222175 - DNA, 25 bp, Homo sapien
ggttaagtccaactgcccggagcca

SEQ ID NO: 3222176 - DNA, 25 bp, Homo sapien
gcccggagccaaaagatctcagctg

SEQ ID NO: 3222177 - DNA, 25 bp, Homo sapien
ggtccgtggtgcattgttattcttg

SEQ ID NO: 3222178 - DNA, 25 bp, Homo sapien
ctatcccataggtccgtggtgcatt

SEQ ID NO: 3222179 - DNA, 25 bp, Homo sapien
cccataggtccgtggtgcattgtta

SEQ ID NO: 3222180 - DNA, 25 bp, Homo sapien
cgtggtgcattgttattcttgttac

SEQ ID NO: 3222181 - DNA, 25 bp, Homo sapien
taaaggctgcacaggtcttgataag

SEQ ID NO: 3222182 - DNA, 25 bp, Homo sapien
taaaaccacactgcaagttctgaca

SEQ ID NO: 3222183 - DNA, 25 bp, Homo sapien
tctagagcatctaaatgttgccagt

SEQ ID NO: 3222184 - DNA, 25 bp, Homo sapien
tcttgtctacattactagggatctc

SEQ ID NO: 3222185 - DNA, 25 bp, Homo sapien
tccctaggtttgtttccacgatgct

SEQ ID NO: 3222186 - DNA, 25 bp, Homo sapien
tctggcgcctctcatcgtgcagtga

SEQ ID NO: 3222187 - DNA, 25 bp, Homo sapien
gatcaggttcaatcatggtccgcct

SEQ ID NO: 3222188 - DNA, 25 bp, Homo sapien
gaattgctaacaatactggatcgtg

SEQ ID NO: 3222189 - DNA, 25 bp, Homo sapien
ggccctcggacattggtgcatagga

SEQ ID NO: 3222190 - DNA, 25 bp, Homo sapien
ctcggccctcggacattggtgcata

SEQ ID NO: 3222191 - DNA, 25 bp, Homo sapien
tcggccctcggacattggtgcatag

SEQ ID NO: 3222192 - DNA, 25 bp, Homo sapien
gccctcggacattggtgcataggac

SEQ ID NO: 3222193 - DNA, 25 bp, Homo sapien
ccagtaacctgtggaagacgcccag

SEQ ID NO: 3222194 - DNA, 25 bp, Homo sapien
tcagcagcatcaagtgacgcgcgat

SEQ ID NO: 3222195 - DNA, 25 bp, Homo sapien
gagccacttgagcatgacgtccagc

SEQ ID NO: 3222196 - DNA, 25 bp, Homo sapien
tatgcccgaatggaagagtctccca

SEQ ID NO: 3222197 - DNA, 25 bp, Homo sapien
gacatgacaaagtcccccaatttta

SEQ ID NO: 3222198 - DNA, 25 bp, Homo sapien
gatccagacatgacaaagtccccca

SEQ ID NO: 3222199 - DNA, 25 bp, Homo sapien
cagacatgacaaagtcccccaattt

SEQ ID NO: 3222200 - DNA, 25 bp, Homo sapien
tccagacatgacaaagtcccccaat

SEQ ID NO: 3222201 - DNA, 25 bp, Homo sapien
ctggaaagtcagtaatgggaattcc

SEQ ID NO: 3222202 - DNA, 25 bp, Homo sapien
gctctcgatacctgccctcctttcg

SEQ ID NO: 3222203 - DNA, 25 bp, Homo sapien
atgggaattccaatgtagccgggag

SEQ ID NO: 3222204 - DNA, 25 bp, Homo sapien
ggcgggggctctcgatacctgccct

SEQ ID NO: 3222205 - DNA, 25 bp, Homo sapien
ttgtagtccggcggtttcctggctg

SEQ ID NO: 3222206 - DNA, 25 bp, Homo sapien
cacgttgtagtccggcggtttcctg

SEQ ID NO: 3222207 - DNA, 25 bp, Homo sapien
gtagtccggcggtttcctggctgga

SEQ ID NO: 3222208 - DNA, 25 bp, Homo sapien
tgtagtccggcggtttcctggctgg

SEQ ID NO: 3222209 - DNA, 25 bp, Homo sapien
aaggcccagctgtgtcggaggatcg

SEQ ID NO: 3222210 - DNA, 25 bp, Homo sapien
gctgctgtacggatgaaggcccagc

SEQ ID NO: 3222211 - DNA, 25 bp, Homo sapien
cccatgtggctgctgtacggatgaa

SEQ ID NO: 3222212 - DNA, 25 bp, Homo sapien
gaggatcgtgcgaccatccgcgatc

SEQ ID NO: 3222213 - DNA, 25 bp, Homo sapien
gggcgaggcgcgggtcagactcgtt

SEQ ID NO: 3222214 - DNA, 25 bp, Homo sapien
ttgggactgatagggggcgaggcgc

SEQ ID NO: 3222215 - DNA, 25 bp, Homo sapien
gcgaggcgcgggtcagactcgttcg

SEQ ID NO: 3222216 - DNA, 25 bp, Homo sapien
gaggcgcgggtcagactcgttcggt

SEQ ID NO: 3222217 - DNA, 25 bp, Homo sapien
ttttagtatagctcacttagaatcc

SEQ ID NO: 3222218 - DNA, 25 bp, Homo sapien
gcaagtaatttcttgtgctatagag

SEQ ID NO: 3222219 - DNA, 25 bp, Homo sapien
gaaatcaatgagcaagcaagtaatt

SEQ ID NO: 3222220 - DNA, 25 bp, Homo sapien
gagaatatattcactgatgtgctaa

SEQ ID NO: 3222221 - DNA, 25 bp, Homo sapien
caaacagcagaaacttgttcatctt

SEQ ID NO: 3222222 - DNA, 25 bp, Homo sapien
tcaaacagcagaaacttgttcatct

SEQ ID NO: 3222223 - DNA, 25 bp, Homo sapien
caacagtgggagctcgaagattgct

SEQ ID NO: 3222224 - DNA, 25 bp, Homo sapien
gagtactactcagattggcagcctt

SEQ ID NO: 3222225 - DNA, 25 bp, Homo sapien
ttccaggcattgagaagtgcagcca

SEQ ID NO: 3222226 - DNA, 25 bp, Homo sapien
taaaggccccaagtagttcaatggc

SEQ ID NO: 3222227 - DNA, 25 bp, Homo sapien
ctggatgtagaagcataaacatagt

SEQ ID NO: 3222228 - DNA, 25 bp, Homo sapien
ttttccagcttgtacaaactggatg

SEQ ID NO: 3222229 - DNA, 25 bp, Homo sapien
taccatcttcaacaaaaatataacc

SEQ ID NO: 3222230 - DNA, 25 bp, Homo sapien
catagtacatttctaccatcttcaa

SEQ ID NO: 3222231 - DNA, 25 bp, Homo sapien
ctgagacttctcagtggctgatggc

SEQ ID NO: 3222232 - DNA, 25 bp, Homo sapien
ccagttgcttccactctgacttctg

SEQ ID NO: 3222233 - DNA, 25 bp, Homo sapien
tccagtgtttggtgcctctgcttcc

SEQ ID NO: 3222234 - DNA, 25 bp, Homo sapien
ttcaggctccctcacatgttccagt

SEQ ID NO: 3222235 - DNA, 25 bp, Homo sapien
tcaagatggtgggatcactccgtag

SEQ ID NO: 3222236 - DNA, 25 bp, Homo sapien
cacattggcaactcttggatcagac

SEQ ID NO: 3222237 - DNA, 25 bp, Homo sapien
tccatgtagggcctgagacacttct

SEQ ID NO: 3222238 - DNA, 25 bp, Homo sapien
gactgctggtgagcccacattggca

SEQ ID NO: 3222239 - DNA, 25 bp, Homo sapien
cagctgctaagcagaccatgccagt

SEQ ID NO: 3222240 - DNA, 25 bp, Homo sapien
gctaagcagaccatgccagttctct

SEQ ID NO: 3222241 - DNA, 25 bp, Homo sapien
gctgctaagcagaccatgccagttc

SEQ ID NO: 3222242 - DNA, 25 bp, Homo sapien
tgctaagcagaccatgccagttctc

SEQ ID NO: 3222243 - DNA, 25 bp, Homo sapien
tgcctggtgcctatgaattcttgaa

SEQ ID NO: 3222244 - DNA, 25 bp, Homo sapien
gagtgttgtgcaggttatattgtcc

SEQ ID NO: 3222245 - DNA, 25 bp, Homo sapien
cactggaaagcatggtagagtattc

SEQ ID NO: 3222246 - DNA, 25 bp, Homo sapien
ctaaggatgccggatctgcctggtg

SEQ ID NO: 3222247 - DNA, 25 bp, Homo sapien
tatcaaatgtaaacacaaaagtgag

SEQ ID NO: 3222248 - DNA, 25 bp, Homo sapien
caatatttgtagctggagtgagaca

SEQ ID NO: 3222249 - DNA, 25 bp, Homo sapien
tacattaagacatcattgtaccaca

SEQ ID NO: 3222250 - DNA, 25 bp, Homo sapien
gctatcctagttgattgtcagctcc

SEQ ID NO: 3222251 - DNA, 25 bp, Homo sapien
aatactggatagttctaaaacctgg

SEQ ID NO: 3222252 - DNA, 25 bp, Homo sapien
gattgacacaagcaaggaccagctg

SEQ ID NO: 3222253 - DNA, 25 bp, Homo sapien
agggtcgtgattagcaaagccagtc

SEQ ID NO: 3222254 - DNA, 25 bp, Homo sapien
ttactcaagaaagccgccccaggct

SEQ ID NO: 3222255 - DNA, 25 bp, Homo sapien
caggctcttcttcgcacagggatga

SEQ ID NO: 3222256 - DNA, 25 bp, Homo sapien
tatttgaatcatcaacacctattcc

SEQ ID NO: 3222257 - DNA, 25 bp, Homo sapien
cacctattcctaaagatgattcatt

SEQ ID NO: 3222258 - DNA, 25 bp, Homo sapien
ttatggttgctgattgtcatttcca

SEQ ID NO: 3222259 - DNA, 25 bp, Homo sapien
aaagatgattcattatggttgctga

SEQ ID NO: 3222260 - DNA, 25 bp, Homo sapien
tttcagggaatgtattcaggaatcc

SEQ ID NO: 3222261 - DNA, 25 bp, Homo sapien
agacaaagaatcgatagggcacacg

SEQ ID NO: 3222262 - DNA, 25 bp, Homo sapien
ggcacacgtttctttatagcagaca

SEQ ID NO: 3222263 - DNA, 25 bp, Homo sapien
tctgaaggtcctttcagggaatgta

SEQ ID NO: 3222264 - DNA, 25 bp, Homo sapien
taagtgagactatgtacaacaggtc

SEQ ID NO: 3222265 - DNA, 25 bp, Homo sapien
tttctaagagcctgtcaatgaccct

SEQ ID NO: 3222266 - DNA, 25 bp, Homo sapien
gaagtacgcaattctgtgagcactg

SEQ ID NO: 3222267 - DNA, 25 bp, Homo sapien
actaaaggtatggaccactgtgcct

SEQ ID NO: 3222268 - DNA, 25 bp, Homo sapien
aattcattccacagaaggtgtggaa

SEQ ID NO: 3222269 - DNA, 25 bp, Homo sapien
gaggagtcagtaattcattccacag

SEQ ID NO: 3222270 - DNA, 25 bp, Homo sapien
tctagaggagtcagtaattcattcc

SEQ ID NO: 3222271 - DNA, 25 bp, Homo sapien
cagaaggtgtggaatgaaaattgtc

SEQ ID NO: 3222272 - DNA, 25 bp, Homo sapien
tgtaatcgagctgccaacgagtggt

SEQ ID NO: 3222273 - DNA, 25 bp, Homo sapien
gatcagttgtctcttacatgttgga

SEQ ID NO: 3222274 - DNA, 25 bp, Homo sapien
catgtgtcatctcataagttccagt

SEQ ID NO: 3222275 - DNA, 25 bp, Homo sapien
tgttctcctaaagagaggtggctgg

SEQ ID NO: 3222276 - DNA, 25 bp, Homo sapien
taagggcgcaacactcaacaaggaa

SEQ ID NO: 3222277 - DNA, 25 bp, Homo sapien
acccgttgcgttcctcctctatgaa

SEQ ID NO: 3222278 - DNA, 25 bp, Homo sapien
ggcagaagttccataagtaataccg

SEQ ID NO: 3222279 - DNA, 25 bp, Homo sapien
agtaataccgtaatgacctgaaata

SEQ ID NO: 3222280 - DNA, 25 bp, Homo sapien
ctttctcctagaataaatttctgcc

SEQ ID NO: 3222281 - DNA, 25 bp, Homo sapien
tttctcctagaataaatttctgcca

SEQ ID NO: 3222282 - DNA, 25 bp, Homo sapien
cctggctttctcctagaataaattt

SEQ ID NO: 3222283 - DNA, 25 bp, Homo sapien
ttccctggctttctcctagaataaa

SEQ ID NO: 3222284 - DNA, 25 bp, Homo sapien
taagttctccatggcaggatttaaa

SEQ ID NO: 3222285 - DNA, 25 bp, Homo sapien
tgaaagctgtaagttctccatggca

SEQ ID NO: 3222286 - DNA, 25 bp, Homo sapien
ttccgaacataatgtgaaagctgta

SEQ ID NO: 3222287 - DNA, 25 bp, Homo sapien
tatcttcatctgtagctgcatataa

SEQ ID NO: 3222288 - DNA, 25 bp, Homo sapien
tggaggtcaacccacatttcagtga

SEQ ID NO: 3222289 - DNA, 25 bp, Homo sapien
tttcagtgacagctaccagttcagc

SEQ ID NO: 3222290 - DNA, 25 bp, Homo sapien
agttcagctgtgtcaattccacctg

SEQ ID NO: 3222291 - DNA, 25 bp, Homo sapien
ttccacctgactctgcttgcttgca

SEQ ID NO: 3222292 - DNA, 25 bp, Homo sapien
gagtcctgtgcagtcttagcggtat

SEQ ID NO: 3222293 - DNA, 25 bp, Homo sapien
tgagtcacaatgctttcatggaagc

SEQ ID NO: 3222294 - DNA, 25 bp, Homo sapien
aaatgagtcacaatgctttcatgga

SEQ ID NO: 3222295 - DNA, 25 bp, Homo sapien
aatgttaaaatgagtcacaatgctt

SEQ ID NO: 3222296 - DNA, 25 bp, Homo sapien
caatgctttcatggaagctaggttc

SEQ ID NO: 3222297 - DNA, 25 bp, Homo sapien
gctgggacagaatttgggaagcagt

SEQ ID NO: 3222298 - DNA, 25 bp, Homo sapien
gggctgggacagaatttgggaagca

SEQ ID NO: 3222299 - DNA, 25 bp, Homo sapien
caccaggggcatcagagcatggccc

SEQ ID NO: 3222300 - DNA, 25 bp, Homo sapien
cttggggctgggacagaatttggga

SEQ ID NO: 3222301 - DNA, 25 bp, Homo sapien
tgcacttattaataactccaaaagg

SEQ ID NO: 3222302 - DNA, 25 bp, Homo sapien
aaatccattgcacttattaataact

SEQ ID NO: 3222303 - DNA, 25 bp, Homo sapien
cttctatacatctccaagtggaact

SEQ ID NO: 3222304 - DNA, 25 bp, Homo sapien
tatacatctccaagtggaacttggg

SEQ ID NO: 3222305 - DNA, 25 bp, Homo sapien
agagtttacaatggacaagctcctt

SEQ ID NO: 3222306 - DNA, 25 bp, Homo sapien
aagagtttacaatggacaagctcct

SEQ ID NO: 3222307 - DNA, 25 bp, Homo sapien
ataacatatagccctctgcctttaa

SEQ ID NO: 3222308 - DNA, 25 bp, Homo sapien
ctcataacatatagccctctgcctt

SEQ ID NO: 3222309 - DNA, 25 bp, Homo sapien
gtttctatcttagcccccgatcgtc

SEQ ID NO: 3222310 - DNA, 25 bp, Homo sapien
caaagtttctatcttagcccccgat

SEQ ID NO: 3222311 - DNA, 25 bp, Homo sapien
ccccgatcgtctctcatctgatctt

SEQ ID NO: 3222312 - DNA, 25 bp, Homo sapien
cccgatcgtctctcatctgatcttc

SEQ ID NO: 3222313 - DNA, 25 bp, Homo sapien
cagcactgtaactgggaaatcatcc

SEQ ID NO: 3222314 - DNA, 25 bp, Homo sapien
gaggcaggaaatatcatcatcagac

SEQ ID NO: 3222315 - DNA, 25 bp, Homo sapien
gcatgacagcactacccttttgtta

SEQ ID NO: 3222316 - DNA, 25 bp, Homo sapien
ttgttataaactctctgttggcagc

SEQ ID NO: 3222317 - DNA, 25 bp, Homo sapien
gaggcttaataactccaattttata

SEQ ID NO: 3222318 - DNA, 25 bp, Homo sapien
ttccccagactcgactggaagcatt

SEQ ID NO: 3222319 - DNA, 25 bp, Homo sapien
tcgactggaagcattaactaaactg

SEQ ID NO: 3222320 - DNA, 25 bp, Homo sapien
aaactgtgaggcttaataactccaa

SEQ ID NO: 3222321 - DNA, 25 bp, Homo sapien
caaatccctctaaacccactgccat

SEQ ID NO: 3222322 - DNA, 25 bp, Homo sapien
acaaatccctctaaacccactgcca

SEQ ID NO: 3222323 - DNA, 25 bp, Homo sapien
ggtagtttgtcatgagaaatgctca

SEQ ID NO: 3222324 - DNA, 25 bp, Homo sapien
taatcgagaccatagtctgacttcc

SEQ ID NO: 3222325 - DNA, 25 bp, Homo sapien
tctgacttccaatatcacaatgagg

SEQ ID NO: 3222326 - DNA, 25 bp, Homo sapien
ggtactccaaaagacgccaactcca

SEQ ID NO: 3222327 - DNA, 25 bp, Homo sapien
gtgtgatactcaattgcacagcatc

SEQ ID NO: 3222328 - DNA, 25 bp, Homo sapien
tgctggcggcctattcttgactttc

SEQ ID NO: 3222329 - DNA, 25 bp, Homo sapien
tatccggtttgttgtctggtgctgg

SEQ ID NO: 3222330 - DNA, 25 bp, Homo sapien
tgtggccactagtatacttatccgg

SEQ ID NO: 3222331 - DNA, 25 bp, Homo sapien
tggcactaccagcaagagagtaaag

SEQ ID NO: 3222332 - DNA, 25 bp, Homo sapien
tcatgtatttactggcactaccagc

SEQ ID NO: 3222333 - DNA, 25 bp, Homo sapien
tatttactggcactaccagcaagag

SEQ ID NO: 3222334 - DNA, 25 bp, Homo sapien
cactaccagcaagagagtaaagcat

SEQ ID NO: 3222335 - DNA, 25 bp, Homo sapien
cagattgaatagtccgtaggcattt

SEQ ID NO: 3222336 - DNA, 25 bp, Homo sapien
tctacaacagattgaatagtccgta

SEQ ID NO: 3222337 - DNA, 25 bp, Homo sapien
gtccgtaggcatttttatagaatca

SEQ ID NO: 3222338 - DNA, 25 bp, Homo sapien
agattccatcaactgtctacaacag

SEQ ID NO: 3222339 - DNA, 25 bp, Homo sapien
gctttaacatcaatgaaacaagcat

SEQ ID NO: 3222340 - DNA, 25 bp, Homo sapien
cagctttaacatcaatgaaacaagc

SEQ ID NO: 3222341 - DNA, 25 bp, Homo sapien
tcatccagctttaacatcaatgaaa

SEQ ID NO: 3222342 - DNA, 25 bp, Homo sapien
tccagctttaacatcaatgaaacaa

SEQ ID NO: 3222343 - DNA, 25 bp, Homo sapien
ggacaatattgaattagcaaatctc

SEQ ID NO: 3222344 - DNA, 25 bp, Homo sapien
aattagcaaatctcttctcagcacc

SEQ ID NO: 3222345 - DNA, 25 bp, Homo sapien
aaataaaaacagtcgagtcaggact

SEQ ID NO: 3222346 - DNA, 25 bp, Homo sapien
cctttctgtagtaaaattctattca

SEQ ID NO: 3222347 - DNA, 25 bp, Homo sapien
caggatctatatatacgatcatgtc

SEQ ID NO: 3222348 - DNA, 25 bp, Homo sapien
tctagtctattgagagttttcaaca

SEQ ID NO: 3222349 - DNA, 25 bp, Homo sapien
gatacaggatctatatatacgatca

SEQ ID NO: 3222350 - DNA, 25 bp, Homo sapien
gcctacttgattgtcatgaataagc

SEQ ID NO: 3222351 - DNA, 25 bp, Homo sapien
tgctggttcatacccacagggacgc

SEQ ID NO: 3222352 - DNA, 25 bp, Homo sapien
taatgatctgccttgtataaaaacg

SEQ ID NO: 3222353 - DNA, 25 bp, Homo sapien
gggacgcagaccacacttctttgta

SEQ ID NO: 3222354 - DNA, 25 bp, Homo sapien
cgtatttgaatatccacggctggtt

SEQ ID NO: 3222355 - DNA, 25 bp, Homo sapien
aagtcgagagcatggcattcaaagc

SEQ ID NO: 3222356 - DNA, 25 bp, Homo sapien
ctgaaagtcgagagcatggcattca

SEQ ID NO: 3222357 - DNA, 25 bp, Homo sapien
gaaagtcgagagcatggcattcaaa

SEQ ID NO: 3222358 - DNA, 25 bp, Homo sapien
aaagtcgagagcatggcattcaaag

SEQ ID NO: 3222359 - DNA, 25 bp, Homo sapien
caaggctgcggtatggtgggagatg

SEQ ID NO: 3222360 - DNA, 25 bp, Homo sapien
cacaaggctgcggtatggtgggaga

SEQ ID NO: 3222361 - DNA, 25 bp, Homo sapien
cttccacaaggctgcggtatggtgg

SEQ ID NO: 3222362 - DNA, 25 bp, Homo sapien
ttccacaaggctgcggtatggtggg

SEQ ID NO: 3222363 - DNA, 25 bp, Homo sapien
ccactttcacagttccgatccccat

SEQ ID NO: 3222364 - DNA, 25 bp, Homo sapien
taacgtaattatggcgttcagggtg

SEQ ID NO: 3222365 - DNA, 25 bp, Homo sapien
caaatgtcttttagtaaatgagtgt

SEQ ID NO: 3222366 - DNA, 25 bp, Homo sapien
atgagacatcaacccgaaatggagt

SEQ ID NO: 3222367 - DNA, 25 bp, Homo sapien
gagtcatcgaagaaataaggtagca

SEQ ID NO: 3222368 - DNA, 25 bp, Homo sapien
cttgagttattcaatgtaggtgccc

SEQ ID NO: 3222369 - DNA, 25 bp, Homo sapien
gacacaaaggatttgtccatgtgga

SEQ ID NO: 3222370 - DNA, 25 bp, Homo sapien
cagcacaggttcaagtccacgtgtc

SEQ ID NO: 3222371 - DNA, 25 bp, Homo sapien
aaacaaagcatggtctgaaccttca

SEQ ID NO: 3222372 - DNA, 25 bp, Homo sapien
ttgatgatgggttcatgtggactga

SEQ ID NO: 3222373 - DNA, 25 bp, Homo sapien
ggttcatgtggactgagcagctgta

SEQ ID NO: 3222374 - DNA, 25 bp, Homo sapien
ttataggagggcactttggcattta

SEQ ID NO: 3222375 - DNA, 25 bp, Homo sapien
gcactttggcatttatggttgatga

SEQ ID NO: 3222376 - DNA, 25 bp, Homo sapien
atctgtttccttgtttcatggccat

SEQ ID NO: 3222377 - DNA, 25 bp, Homo sapien
tgatctgtttccttgtttcatggcc

SEQ ID NO: 3222378 - DNA, 25 bp, Homo sapien
gatctgtttccttgtttcatggcca

SEQ ID NO: 3222379 - DNA, 25 bp, Homo sapien
ttgatctgtttccttgtttcatggc

SEQ ID NO: 3222380 - DNA, 25 bp, Homo sapien
ggcacagtggtgtcttgatatcaga

SEQ ID NO: 3222381 - DNA, 25 bp, Homo sapien
cattgatggtaggtcatagctgcga

SEQ ID NO: 3222382 - DNA, 25 bp, Homo sapien
ccgcagagatggtgtcacagctgca

SEQ ID NO: 3222383 - DNA, 25 bp, Homo sapien
agctctggtcccatacacagtgagg

SEQ ID NO: 3222384 - DNA, 25 bp, Homo sapien
tcacagcagtggtataggcactcag

SEQ ID NO: 3222385 - DNA, 25 bp, Homo sapien
caggatctggatccctatggcatgc

SEQ ID NO: 3222386 - DNA, 25 bp, Homo sapien
tcagggtcatgcaggaactatcaca

SEQ ID NO: 3222387 - DNA, 25 bp, Homo sapien
tatggcatgctatggttactctggc

SEQ ID NO: 3222388 - DNA, 25 bp, Homo sapien
cagctccagcttataaggtccacag

SEQ ID NO: 3222389 - DNA, 25 bp, Homo sapien
tctaaggagaccagcttcaactctg

SEQ ID NO: 3222390 - DNA, 25 bp, Homo sapien
ccattcaattgatgatctgtcagca

SEQ ID NO: 3222391 - DNA, 25 bp, Homo sapien
ttgaaaatgagcagacacgcttctg

SEQ ID NO: 3222392 - DNA, 25 bp, Homo sapien
ttcccatccttgacattgaaccgag

SEQ ID NO: 3222393 - DNA, 25 bp, Homo sapien
cttcccatccttgacattgaaccga

SEQ ID NO: 3222394 - DNA, 25 bp, Homo sapien
tcaagcattctaagtgggaagtgaa

SEQ ID NO: 3222395 - DNA, 25 bp, Homo sapien
gaataagaagcagctatattaatat

SEQ ID NO: 3222396 - DNA, 25 bp, Homo sapien
atatttcctagctcatcaagcattc

SEQ ID NO: 3222397 - DNA, 25 bp, Homo sapien
aagaagcagctatattaatatttcc

SEQ ID NO: 3222398 - DNA, 25 bp, Homo sapien
gagttacttagctcatgggagccca

SEQ ID NO: 3222399 - DNA, 25 bp, Homo sapien
agagttacttagctcatgggagccc

SEQ ID NO: 3222400 - DNA, 25 bp, Homo sapien
ctcatgggagcccactgaccttctc

SEQ ID NO: 3222401 - DNA, 25 bp, Homo sapien
ttgctgcactgtagggtgttcatca

SEQ ID NO: 3222402 - DNA, 25 bp, Homo sapien
ttggtctaagaggagcccgggctct

SEQ ID NO: 3222403 - DNA, 25 bp, Homo sapien
aggagcccgggctctcctagaaagg

SEQ ID NO: 3222404 - DNA, 25 bp, Homo sapien
gtgttatcctggcagcgaccgctgt

SEQ ID NO: 3222405 - DNA, 25 bp, Homo sapien
tggctaatgcttgtactgtgttatc

SEQ ID NO: 3222406 - DNA, 25 bp, Homo sapien
aagatgaaggctggatgagaaccca

SEQ ID NO: 3222407 - DNA, 25 bp, Homo sapien
aagtgaactatccaagatctcagag

SEQ ID NO: 3222408 - DNA, 25 bp, Homo sapien
caatagaccccagattgaatggtaa

SEQ ID NO: 3222409 - DNA, 25 bp, Homo sapien
gaatggtaataagtctgcctctcaa

SEQ ID NO: 3222410 - DNA, 25 bp, Homo sapien
tactgtctattatgtcctgtaaata

SEQ ID NO: 3222411 - DNA, 25 bp, Homo sapien
gttactgtctattatgtcctgtaaa

SEQ ID NO: 3222412 - DNA, 25 bp, Homo sapien
tgtctattatgtcctgtaaataagc

SEQ ID NO: 3222413 - DNA, 25 bp, Homo sapien
ccagtagacattcacaatgtcttcc

SEQ ID NO: 3222414 - DNA, 25 bp, Homo sapien
catgtaatggtttgacaagatcacc

SEQ ID NO: 3222415 - DNA, 25 bp, Homo sapien
catcatcaataaaccataatcagca

SEQ ID NO: 3222416 - DNA, 25 bp, Homo sapien
cttaagcagtttcacaggcatcatc

SEQ ID NO: 3222417 - DNA, 25 bp, Homo sapien
gatgctacatctggcctcttaagca

SEQ ID NO: 3222418 - DNA, 25 bp, Homo sapien
tcaggatacacgatgcgtggctggt

SEQ ID NO: 3222419 - DNA, 25 bp, Homo sapien
cgtggctggttactgcaggacagat

SEQ ID NO: 3222420 - DNA, 25 bp, Homo sapien
cgctctcagcgtttgtcaggataca

SEQ ID NO: 3222421 - DNA, 25 bp, Homo sapien
aagacaagtcgttcagtcagaagac

SEQ ID NO: 3222422 - DNA, 25 bp, Homo sapien
accaatatgtcccccgacacctcaa

SEQ ID NO: 3222423 - DNA, 25 bp, Homo sapien
aaccaatatgtcccccgacacctca

SEQ ID NO: 3222424 - DNA, 25 bp, Homo sapien
ccaatatgtcccccgacacctcaac

SEQ ID NO: 3222425 - DNA, 25 bp, Homo sapien
caatatgtcccccgacacctcaacc

SEQ ID NO: 3222426 - DNA, 25 bp, Homo sapien
gctggaaatgggagccaccttgtct

SEQ ID NO: 3222427 - DNA, 25 bp, Homo sapien
tctctgagagttactagctggagaa

SEQ ID NO: 3222428 - DNA, 25 bp, Homo sapien
tctgtctagagtcaatggagatcac

SEQ ID NO: 3222429 - DNA, 25 bp, Homo sapien
gttgatgctttgagtgactttctgt

SEQ ID NO: 3222430 - DNA, 25 bp, Homo sapien
tttgcccactcaggggcatatttat

SEQ ID NO: 3222431 - DNA, 25 bp, Homo sapien
ggtttgcccactcaggggcatattt

SEQ ID NO: 3222432 - DNA, 25 bp, Homo sapien
tgcccactcaggggcatatttattc

SEQ ID NO: 3222433 - DNA, 25 bp, Homo sapien
ctggtttgcccactcaggggcatat

SEQ ID NO: 3222434 - DNA, 25 bp, Homo sapien
cacaggaccagctgtcaagccagta

SEQ ID NO: 3222435 - DNA, 25 bp, Homo sapien
ccacaggaccagctgtcaagccagt

SEQ ID NO: 3222436 - DNA, 25 bp, Homo sapien
acaggaccagctgtcaagccagtaa

SEQ ID NO: 3222437 - DNA, 25 bp, Homo sapien
caggaccagctgtcaagccagtaag

SEQ ID NO: 3222438 - DNA, 25 bp, Homo sapien
caattaataggtgtccgaacttgga

SEQ ID NO: 3222439 - DNA, 25 bp, Homo sapien
ttggacaggcatggttttgcccagt

SEQ ID NO: 3222440 - DNA, 25 bp, Homo sapien
aaccgggttggcactataaggctgc

SEQ ID NO: 3222441 - DNA, 25 bp, Homo sapien
ttttgcccagtagccctgcagaggc

SEQ ID NO: 3222442 - DNA, 25 bp, Homo sapien
ggaccttcacagagctatatctcag

SEQ ID NO: 3222443 - DNA, 25 bp, Homo sapien
tacttactgacagtccttggccaag

SEQ ID NO: 3222444 - DNA, 25 bp, Homo sapien
gatgtaaaaacagacccagtggacc

SEQ ID NO: 3222445 - DNA, 25 bp, Homo sapien
gttacaaatcaagcccagcagaatt

SEQ ID NO: 3222446 - DNA, 25 bp, Homo sapien
caacaacgaagagataactcacaag

SEQ ID NO: 3222447 - DNA, 25 bp, Homo sapien
caatgagaccgctctttacacaagt

SEQ ID NO: 3222448 - DNA, 25 bp, Homo sapien
tgtgtagcaatgagaccgctcttta

SEQ ID NO: 3222449 - DNA, 25 bp, Homo sapien
gtagcaatgagaccgctctttacac

SEQ ID NO: 3222450 - DNA, 25 bp, Homo sapien
actgtgtagcaatgagaccgctctt

SEQ ID NO: 3222451 - DNA, 25 bp, Homo sapien
tagactaccacttctaaataaacag

SEQ ID NO: 3222452 - DNA, 25 bp, Homo sapien
gttgacgcaggcagacaacttgagc

SEQ ID NO: 3222453 - DNA, 25 bp, Homo sapien
gacgcaggcagacaacttgagccca

SEQ ID NO: 3222454 - DNA, 25 bp, Homo sapien
agtggttagactaccacttctaaat

SEQ ID NO: 3222455 - DNA, 25 bp, Homo sapien
gctgaaatgcagtttccaaatgcat

SEQ ID NO: 3222456 - DNA, 25 bp, Homo sapien
tccaggttctgaccttcttttttca

SEQ ID NO: 3222457 - DNA, 25 bp, Homo sapien
tcttttttcagctgaaatgcagttt

SEQ ID NO: 3222458 - DNA, 25 bp, Homo sapien
ttcagctgaaatgcagtttccaaat

SEQ ID NO: 3222459 - DNA, 25 bp, Homo sapien
taatcctcctaaaatcccgcttgtg

SEQ ID NO: 3222460 - DNA, 25 bp, Homo sapien
gaatctcatgggaattgcctaagag

SEQ ID NO: 3222461 - DNA, 25 bp, Homo sapien
gctggaaagccataacattgttgac

SEQ ID NO: 3222462 - DNA, 25 bp, Homo sapien
cccgcttgtgttgaaaaagactacg

SEQ ID NO: 3222463 - DNA, 25 bp, Homo sapien
cagtgttccagcatggtttgagagg

SEQ ID NO: 3222464 - DNA, 25 bp, Homo sapien
ggtctgcccagatcatcaattctcg

SEQ ID NO: 3222465 - DNA, 25 bp, Homo sapien
tgggatctgagtcttccataagcag

SEQ ID NO: 3222466 - DNA, 25 bp, Homo sapien
tcttccataagcagttccccaggtc

SEQ ID NO: 3222467 - DNA, 25 bp, Homo sapien
gagtaacccctagataatgattgag

SEQ ID NO: 3222468 - DNA, 25 bp, Homo sapien
gatccaaacaagacaacggcagctt

SEQ ID NO: 3222469 - DNA, 25 bp, Homo sapien
tatccagagcgtgggacagatccaa

SEQ ID NO: 3222470 - DNA, 25 bp, Homo sapien
gctgaactgtcattggaaccaccca

SEQ ID NO: 3222471 - DNA, 25 bp, Homo sapien
catctgtctgtgtagaaaatcccaa

SEQ ID NO: 3222472 - DNA, 25 bp, Homo sapien
aattttttcccacgcaatctctaga

SEQ ID NO: 3222473 - DNA, 25 bp, Homo sapien
tgcaatagaaacatttactaggagc

SEQ ID NO: 3222474 - DNA, 25 bp, Homo sapien
aatctaacaaaatagcacagggttc

SEQ ID NO: 3222475 - DNA, 25 bp, Homo sapien
tcatatctccttcgcaggaatggca

SEQ ID NO: 3222476 - DNA, 25 bp, Homo sapien
ggaatggcaaggatgtcacactggt

SEQ ID NO: 3222477 - DNA, 25 bp, Homo sapien
taagcctattgtgtagccttctaga

SEQ ID NO: 3222478 - DNA, 25 bp, Homo sapien
ctctgccttttgagtataggctctg

SEQ ID NO: 3222479 - DNA, 25 bp, Homo sapien
tattcggaccacagcatttattact

SEQ ID NO: 3222480 - DNA, 25 bp, Homo sapien
tgaagaggacacagatattcggacc

SEQ ID NO: 3222481 - DNA, 25 bp, Homo sapien
ggcaaatgagctgccttagcccact

SEQ ID NO: 3222482 - DNA, 25 bp, Homo sapien
ctggttacttaatgggatgtcccca

SEQ ID NO: 3222483 - DNA, 25 bp, Homo sapien
ccattatgtgatatagttggtaacc

SEQ ID NO: 3222484 - DNA, 25 bp, Homo sapien
ttcatttaatccttaggaccattat

SEQ ID NO: 3222485 - DNA, 25 bp, Homo sapien
tccttaggaccattatgtgatatag

SEQ ID NO: 3222486 - DNA, 25 bp, Homo sapien
taggaccattatgtgatatagttgg

SEQ ID NO: 3222487 - DNA, 25 bp, Homo sapien
cagctggctctgtgaattattaacc

SEQ ID NO: 3222488 - DNA, 25 bp, Homo sapien
tgggagactgatttgtgtagaaata

SEQ ID NO: 3222489 - DNA, 25 bp, Homo sapien
tttccccaaccttgataaatcagct

SEQ ID NO: 3222490 - DNA, 25 bp, Homo sapien
gaaataaaactctggtattctattc

SEQ ID NO: 3222491 - DNA, 25 bp, Homo sapien
aggtctctcgtgagggctccaccct

SEQ ID NO: 3222492 - DNA, 25 bp, Homo sapien
aggtagaaaatggtgaggtctctcg

SEQ ID NO: 3222493 - DNA, 25 bp, Homo sapien
ctgcgatatagacaggagacaggga

SEQ ID NO: 3222494 - DNA, 25 bp, Homo sapien
cagggaaatactaggtagaaaatgg

SEQ ID NO: 3222495 - DNA, 25 bp, Homo sapien
attctgatgaggatgcaatgtccac

SEQ ID NO: 3222496 - DNA, 25 bp, Homo sapien
cagccttcaggtaattactttgtgt

SEQ ID NO: 3222497 - DNA, 25 bp, Homo sapien
aatgtccactccaatctgttcagcc

SEQ ID NO: 3222498 - DNA, 25 bp, Homo sapien
tttacacggctactgaattctgatg

SEQ ID NO: 3222499 - DNA, 25 bp, Homo sapien
taagatgccttctaatgaccatgca

SEQ ID NO: 3222500 - DNA, 25 bp, Homo sapien
caaggtcttaaaaagcacgtttcag

SEQ ID NO: 3222501 - DNA, 25 bp, Homo sapien
tgagtcctcattctctgctacacag

SEQ ID NO: 3222502 - DNA, 25 bp, Homo sapien
cagtcccttggcttcaatttaatgc

SEQ ID NO: 3222503 - DNA, 25 bp, Homo sapien
caattagtggaaaatccctctagaa

SEQ ID NO: 3222504 - DNA, 25 bp, Homo sapien
atggatggacaattagtggaaaatc

SEQ ID NO: 3222505 - DNA, 25 bp, Homo sapien
gatggacaattagtggaaaatccct

SEQ ID NO: 3222506 - DNA, 25 bp, Homo sapien
tggacaattagtggaaaatccctct

SEQ ID NO: 3222507 - DNA, 25 bp, Homo sapien
gacctttggtccatgatagacttca

SEQ ID NO: 3222508 - DNA, 25 bp, Homo sapien
ctagccttagatcaattctgcagcc

SEQ ID NO: 3222509 - DNA, 25 bp, Homo sapien
tgtgataaatggtagcaagtcctgc

SEQ ID NO: 3222510 - DNA, 25 bp, Homo sapien
aacagtaagtcctgctagccttaga

SEQ ID NO: 3222511 - DNA, 25 bp, Homo sapien
ctgtcacttcctttagcctagacat

SEQ ID NO: 3222512 - DNA, 25 bp, Homo sapien
gcttctgtcacttcctttagcctag

SEQ ID NO: 3222513 - DNA, 25 bp, Homo sapien
ttggcgttgtcaccctgttctgctt

SEQ ID NO: 3222514 - DNA, 25 bp, Homo sapien
tgttctgcttctgtcacttccttta

SEQ ID NO: 3222515 - DNA, 25 bp, Homo sapien
aaatatttgctcttaacgtcataca

SEQ ID NO: 3222516 - DNA, 25 bp, Homo sapien
caaatatttgctcttaacgtcatac

SEQ ID NO: 3222517 - DNA, 25 bp, Homo sapien
aatatttgctcttaacgtcatacat

SEQ ID NO: 3222518 - DNA, 25 bp, Homo sapien
cgtagatgaagggaatagttactct

SEQ ID NO: 3222519 - DNA, 25 bp, Homo sapien
tcataaatattgtcgaacaagtatc

SEQ ID NO: 3222520 - DNA, 25 bp, Homo sapien
taagctctgatatacgtagatgaag

SEQ ID NO: 3222521 - DNA, 25 bp, Homo sapien
gtatctcagataccagtaagctctg

SEQ ID NO: 3222522 - DNA, 25 bp, Homo sapien
taaatggtccacactgtggcttggg

SEQ ID NO: 3222523 - DNA, 25 bp, Homo sapien
tgactttaaatggtccacactccat

SEQ ID NO: 3222524 - DNA, 25 bp, Homo sapien
ccatgactttaaatggtccacactc

SEQ ID NO: 3222525 - DNA, 25 bp, Homo sapien
ccatgactttaaatggtccacactg

SEQ ID NO: 3222526 - DNA, 25 bp, Homo sapien
gggccacattgtggatggccaacat

SEQ ID NO: 3222527 - DNA, 25 bp, Homo sapien
acaatgtccagacccttgcacttct

SEQ ID NO: 3222528 - DNA, 25 bp, Homo sapien
ctgggccacattgtggatggccaac

SEQ ID NO: 3222529 - DNA, 25 bp, Homo sapien
tatgatatgtattgcaacaatgtcc

SEQ ID NO: 3222530 - DNA, 25 bp, Homo sapien
gattttcaatggcataaaatactgt

SEQ ID NO: 3222531 - DNA, 25 bp, Homo sapien
ttacaaagtcataaacataataatc

SEQ ID NO: 3222532 - DNA, 25 bp, Homo sapien
ctgaagattttcaatggcataaaat

SEQ ID NO: 3222533 - DNA, 25 bp, Homo sapien
tactgtttttacaaagtcataaaca

SEQ ID NO: 3222534 - DNA, 25 bp, Homo sapien
cctttaataaggatacactggtatt

SEQ ID NO: 3222535 - DNA, 25 bp, Homo sapien
taataaggatacactggtattactt

SEQ ID NO: 3222536 - DNA, 25 bp, Homo sapien
attctttcagaagtacatctttcag

SEQ ID NO: 3222537 - DNA, 25 bp, Homo sapien
tattctttcagaagtacatctttca

SEQ ID NO: 3222538 - DNA, 25 bp, Homo sapien
tttttggatgtcagatattctttca

SEQ ID NO: 3222539 - DNA, 25 bp, Homo sapien
atattgtatctttttggatgtcaga

SEQ ID NO: 3222540 - DNA, 25 bp, Homo sapien
aatctcttctcagtgacaagcctca

SEQ ID NO: 3222541 - DNA, 25 bp, Homo sapien
ttaggagctccagtcatgatcatgt

SEQ ID NO: 3222542 - DNA, 25 bp, Homo sapien
catagcaactcaacgtggtattcct

SEQ ID NO: 3222543 - DNA, 25 bp, Homo sapien
ggcagtatagtcacaggaaatccat

SEQ ID NO: 3222544 - DNA, 25 bp, Homo sapien
ttttcatgtaaatattagggtgctc

SEQ ID NO: 3222545 - DNA, 25 bp, Homo sapien
tcttttcatgtaaatattagggtgc

SEQ ID NO: 3222546 - DNA, 25 bp, Homo sapien
tcatgtaaatattagggtgctccat

SEQ ID NO: 3222547 - DNA, 25 bp, Homo sapien
cttgaagaggtaatttaatccaaat

SEQ ID NO: 3222548 - DNA, 25 bp, Homo sapien
gctagtgttttcacagttcctaaaa

SEQ ID NO: 3222549 - DNA, 25 bp, Homo sapien
cagtttttcacctggtattgcataa

SEQ ID NO: 3222550 - DNA, 25 bp, Homo sapien
gggtgccactaaagagattgatgtt

SEQ ID NO: 3222551 - DNA, 25 bp, Homo sapien
aaagttggaacataccacactgagg

SEQ ID NO: 3222552 - DNA, 25 bp, Homo sapien
tcttggccttttttggtagtccatc

SEQ ID NO: 3222553 - DNA, 25 bp, Homo sapien
ttttttggtagtccatcatcaagac

SEQ ID NO: 3222554 - DNA, 25 bp, Homo sapien
ggccttttttggtagtccatcatca

SEQ ID NO: 3222555 - DNA, 25 bp, Homo sapien
ccttttttggtagtccatcatcaag

SEQ ID NO: 3222556 - DNA, 25 bp, Homo sapien
cagtgtaccacaagaggtggctttc

SEQ ID NO: 3222557 - DNA, 25 bp, Homo sapien
tcagtgtaccacaagaggtggcttt

SEQ ID NO: 3222558 - DNA, 25 bp, Homo sapien
ggatatcaatgatcagatttgttgt

SEQ ID NO: 3222559 - DNA, 25 bp, Homo sapien
gatatcaatgatcagatttgttgtc

SEQ ID NO: 3222560 - DNA, 25 bp, Homo sapien
tatcaatgatcagatttgttgtcat

SEQ ID NO: 3222561 - DNA, 25 bp, Homo sapien
taggatatcaatgatcagatttgtt

SEQ ID NO: 3222562 - DNA, 25 bp, Homo sapien
agaactcggctgcacttcccaatgg

SEQ ID NO: 3222563 - DNA, 25 bp, Homo sapien
caaaatatcggtcagaactcggctg

SEQ ID NO: 3222564 - DNA, 25 bp, Homo sapien
ggctgcacttcccaatggatcccat

SEQ ID NO: 3222565 - DNA, 25 bp, Homo sapien
tatcggtcagaactcggctgcactt

SEQ ID NO: 3222566 - DNA, 25 bp, Homo sapien
ttgagaggatgataggaatcatttt

SEQ ID NO: 3222567 - DNA, 25 bp, Homo sapien
tgagaggatgataggaatcattttt

SEQ ID NO: 3222568 - DNA, 25 bp, Homo sapien
gagaggatgataggaatcatttttg

SEQ ID NO: 3222569 - DNA, 25 bp, Homo sapien
cttgagaggatgataggaatcattt

SEQ ID NO: 3222570 - DNA, 25 bp, Homo sapien
cattcaaccagatactcgacgatga

SEQ ID NO: 3222571 - DNA, 25 bp, Homo sapien
cacattcaaccagatactcgacgat

SEQ ID NO: 3222572 - DNA, 25 bp, Homo sapien
aaggcacattcaaccagatactcga

SEQ ID NO: 3222573 - DNA, 25 bp, Homo sapien
ggcacattcaaccagatactcgacg

SEQ ID NO: 3222574 - DNA, 25 bp, Homo sapien
cttggagacattctatggtgcttct

SEQ ID NO: 3222575 - DNA, 25 bp, Homo sapien
caggtgcactataaactaaagcatg

SEQ ID NO: 3222576 - DNA, 25 bp, Homo sapien
tgtggtttggatccatcaccaatac

SEQ ID NO: 3222577 - DNA, 25 bp, Homo sapien
atgtggtttggatccatcaccaata

SEQ ID NO: 3222578 - DNA, 25 bp, Homo sapien
gcactataaactaaagcatgtggtt

SEQ ID NO: 3222579 - DNA, 25 bp, Homo sapien
tgaagccatcggtaaatgtcacaat

SEQ ID NO: 3222580 - DNA, 25 bp, Homo sapien
atgtcacaataagcaattccaactg

SEQ ID NO: 3222581 - DNA, 25 bp, Homo sapien
gttttgtcacaataggaggtctgag

SEQ ID NO: 3222582 - DNA, 25 bp, Homo sapien
tgccaacagttgctattttgaagcc

SEQ ID NO: 3222583 - DNA, 25 bp, Homo sapien
gaaatcagtgcccaaattgtgtcca

SEQ ID NO: 3222584 - DNA, 25 bp, Homo sapien
gcccaaattgtgtccatctagttgc

SEQ ID NO: 3222585 - DNA, 25 bp, Homo sapien
cacaatatgtgatctctggcaacac

SEQ ID NO: 3222586 - DNA, 25 bp, Homo sapien
ttctgccacaatatgtgatctctgg

SEQ ID NO: 3222587 - DNA, 25 bp, Homo sapien
ggtgtttgacaaatctaagtataga

SEQ ID NO: 3222588 - DNA, 25 bp, Homo sapien
actgaagaagactgattgacatcct

SEQ ID NO: 3222589 - DNA, 25 bp, Homo sapien
taaccttctatagcgtggagatact

SEQ ID NO: 3222590 - DNA, 25 bp, Homo sapien
ccagcagctaccagtgaatttctgt

SEQ ID NO: 3222591 - DNA, 25 bp, Homo sapien
tgggaaatcacacttataatgactg

SEQ ID NO: 3222592 - DNA, 25 bp, Homo sapien
tagcaccccttgtttacttgtagga

SEQ ID NO: 3222593 - DNA, 25 bp, Homo sapien
tctcttaatgccaaacatctcggtt

SEQ ID NO: 3222594 - DNA, 25 bp, Homo sapien
tacatctcaacaaaagctataggcg

SEQ ID NO: 3222595 - DNA, 25 bp, Homo sapien
tgtcattgttcagtccgtggaatct

SEQ ID NO: 3222596 - DNA, 25 bp, Homo sapien
cgtggaatctgtattgtcctcccat

SEQ ID NO: 3222597 - DNA, 25 bp, Homo sapien
gtctgttttgtcattgttcagtccg

SEQ ID NO: 3222598 - DNA, 25 bp, Homo sapien
tcagtccgtggaatctgtattgtcc

SEQ ID NO: 3222599 - DNA, 25 bp, Homo sapien
tatttgcaagtaatcgaatatgcct

SEQ ID NO: 3222600 - DNA, 25 bp, Homo sapien
ttttgtgtaagatatttgcaagtaa

SEQ ID NO: 3222601 - DNA, 25 bp, Homo sapien
gccttatgttcttgccatctaagtt

SEQ ID NO: 3222602 - DNA, 25 bp, Homo sapien
gcaagtaatcgaatatgccttatgt

SEQ ID NO: 3222603 - DNA, 25 bp, Homo sapien
tgtaggagaaggcattgccggtgag

SEQ ID NO: 3222604 - DNA, 25 bp, Homo sapien
tgcatctgatgtaggagaaggcatt

SEQ ID NO: 3222605 - DNA, 25 bp, Homo sapien
aaacagctgcatctgatgtaggaga

SEQ ID NO: 3222606 - DNA, 25 bp, Homo sapien
ttaaacagctgcatctgatgtagga

SEQ ID NO: 3222607 - DNA, 25 bp, Homo sapien
tagctagactcaagttattcttcat

SEQ ID NO: 3222608 - DNA, 25 bp, Homo sapien
cttagctagactcaagttattcttc

SEQ ID NO: 3222609 - DNA, 25 bp, Homo sapien
ttgatcttagctagactcaagttat

SEQ ID NO: 3222610 - DNA, 25 bp, Homo sapien
gatcttagctagactcaagttattc

SEQ ID NO: 3222611 - DNA, 25 bp, Homo sapien
ttaaacatgtcaattcatctgggta

SEQ ID NO: 3222612 - DNA, 25 bp, Homo sapien
aaacatgtcaattcatctgggtatt

SEQ ID NO: 3222613 - DNA, 25 bp, Homo sapien
aacatgtcaattcatctgggtattt

SEQ ID NO: 3222614 - DNA, 25 bp, Homo sapien
taaacatgtcaattcatctgggtat

SEQ ID NO: 3222615 - DNA, 25 bp, Homo sapien
tgttttgtcttctcagatactcctt

SEQ ID NO: 3222616 - DNA, 25 bp, Homo sapien
tataggcatatctgaagtgagtgta

SEQ ID NO: 3222617 - DNA, 25 bp, Homo sapien
ccctcttcatgcattgttctttgac

SEQ ID NO: 3222618 - DNA, 25 bp, Homo sapien
tgtttgttaccctctataggcatat

SEQ ID NO: 3222619 - DNA, 25 bp, Homo sapien
gctaccacttggcagttagagacag

SEQ ID NO: 3222620 - DNA, 25 bp, Homo sapien
tctgctaccacttggcagttagaga

SEQ ID NO: 3222621 - DNA, 25 bp, Homo sapien
ccacttggcagttagagacagtctg

SEQ ID NO: 3222622 - DNA, 25 bp, Homo sapien
taccacttggcagttagagacagtc

SEQ ID NO: 3222623 - DNA, 25 bp, Homo sapien
tcaaacatcataacaatagttattc

SEQ ID NO: 3222624 - DNA, 25 bp, Homo sapien
tgttcatcgtcagagaagtctcttg

SEQ ID NO: 3222625 - DNA, 25 bp, Homo sapien
tcagagaagtctcttgacaggagga

SEQ ID NO: 3222626 - DNA, 25 bp, Homo sapien
tctgaactaaatgttcatcgtcaga

SEQ ID NO: 3222627 - DNA, 25 bp, Homo sapien
ttacgagtaggacaaggtaggagac

SEQ ID NO: 3222628 - DNA, 25 bp, Homo sapien
agtgacgccctagttttacgagtag

SEQ ID NO: 3222629 - DNA, 25 bp, Homo sapien
tctgggcctacttctctgattataa

SEQ ID NO: 3222630 - DNA, 25 bp, Homo sapien
gagtggatcacgagatgagcctgac

SEQ ID NO: 3222631 - DNA, 25 bp, Homo sapien
atggctagcttcattggtagtttgg

SEQ ID NO: 3222632 - DNA, 25 bp, Homo sapien
tcttctgtccggagaagcaaaaatg

SEQ ID NO: 3222633 - DNA, 25 bp, Homo sapien
ccccagggaacaggcaaggttccat

SEQ ID NO: 3222634 - DNA, 25 bp, Homo sapien
ccacagatcttcaccatgtgctcag

SEQ ID NO: 3222635 - DNA, 25 bp, Homo sapien
tcttcttagcagaaacatgcgaggt

SEQ ID NO: 3222636 - DNA, 25 bp, Homo sapien
tctgtagacactgcttgataaaagg

SEQ ID NO: 3222637 - DNA, 25 bp, Homo sapien
catgtggatgctctgtctgtagaca

SEQ ID NO: 3222638 - DNA, 25 bp, Homo sapien
taatgggctgttgaaatgacctcca

SEQ ID NO: 3222639 - DNA, 25 bp, Homo sapien
cattggcatatacacacttgggagg

SEQ ID NO: 3222640 - DNA, 25 bp, Homo sapien
tcaatagtgatgtgacgggcactcc

SEQ ID NO: 3222641 - DNA, 25 bp, Homo sapien
cagaagaatggccttggaaccggaa

SEQ ID NO: 3222642 - DNA, 25 bp, Homo sapien
catggtggacggtgtaactgactca

SEQ ID NO: 3222643 - DNA, 25 bp, Homo sapien
tcagggcataggaatataagcaccc

SEQ ID NO: 3222644 - DNA, 25 bp, Homo sapien
taatttactagctgaagccgggatg

SEQ ID NO: 3222645 - DNA, 25 bp, Homo sapien
catcttcgaagaggttccggaaaca

SEQ ID NO: 3222646 - DNA, 25 bp, Homo sapien
tcatattaccgcattacccttgtgg

SEQ ID NO: 3222647 - DNA, 25 bp, Homo sapien
tcccctgcctgaattggtgactaca

SEQ ID NO: 3222648 - DNA, 25 bp, Homo sapien
ggtgactacacagcgatctcttaaa

SEQ ID NO: 3222649 - DNA, 25 bp, Homo sapien
tcaatctgaccatctgcgggcatag

SEQ ID NO: 3222650 - DNA, 25 bp, Homo sapien
aatgtccagggatagtttgccaaga

SEQ ID NO: 3222651 - DNA, 25 bp, Homo sapien
tcttttcgacggcttctttttgcac

SEQ ID NO: 3222652 - DNA, 25 bp, Homo sapien
tttctttacatccatagccttttcc

SEQ ID NO: 3222653 - DNA, 25 bp, Homo sapien
tctaaacagctttgacttgtgcggg

SEQ ID NO: 3222654 - DNA, 25 bp, Homo sapien
tatgcttggtagtcttttctaaaca

SEQ ID NO: 3222655 - DNA, 25 bp, Homo sapien
ggactgaaacgaaggggagagagag

SEQ ID NO: 3222656 - DNA, 25 bp, Homo sapien
gcatatttgtcatattctagcatgt

SEQ ID NO: 3222657 - DNA, 25 bp, Homo sapien
atagtaaccttcttgtatgggggtg

SEQ ID NO: 3222658 - DNA, 25 bp, Homo sapien
gggaatgtaggactaggggagaaca

SEQ ID NO: 3222659 - DNA, 25 bp, Homo sapien
cagctgctatctgttgtttgttctg

SEQ ID NO: 3222660 - DNA, 25 bp, Homo sapien
tctgctgagcatctttgaccccatt

SEQ ID NO: 3222661 - DNA, 25 bp, Homo sapien
ccttgtttcagtgttgacaatggaa

SEQ ID NO: 3222662 - DNA, 25 bp, Homo sapien
gttctgcccttgtttcagtgttgac

SEQ ID NO: 3222663 - DNA, 25 bp, Homo sapien
ctggttgataaagataaaaatatgt

SEQ ID NO: 3222664 - DNA, 25 bp, Homo sapien
tggttgataaagataaaaatatgtg

SEQ ID NO: 3222665 - DNA, 25 bp, Homo sapien
ggttgataaagataaaaatatgtgc

SEQ ID NO: 3222666 - DNA, 25 bp, Homo sapien
gttgataaagataaaaatatgtgca

SEQ ID NO: 3222667 - DNA, 25 bp, Homo sapien
aatctggaactaaagtttggcatac

SEQ ID NO: 3222668 - DNA, 25 bp, Homo sapien
aattcagcagtatctacaaaacata

SEQ ID NO: 3222669 - DNA, 25 bp, Homo sapien
actgtagcaccggcttctctgctgc

SEQ ID NO: 3222670 - DNA, 25 bp, Homo sapien
gcttccggtaggacttctgcataga

SEQ ID NO: 3222671 - DNA, 25 bp, Homo sapien
tctctgtgcttattgaaattttcca

SEQ ID NO: 3222672 - DNA, 25 bp, Homo sapien
ctcttaaatgtgcaatgtcccaatc

SEQ ID NO: 3222673 - DNA, 25 bp, Homo sapien
ccgtgagggagacactttgcagtgt

SEQ ID NO: 3222674 - DNA, 25 bp, Homo sapien
tgcagtgtgacatagccatatgact

SEQ ID NO: 3222675 - DNA, 25 bp, Homo sapien
tgtcccaatcaaacaagcccgtgag

SEQ ID NO: 3222676 - DNA, 25 bp, Homo sapien
cagatactgatccataagacctcta

SEQ ID NO: 3222677 - DNA, 25 bp, Homo sapien
aagagaggttctccatccccagtgg

SEQ ID NO: 3222678 - DNA, 25 bp, Homo sapien
tcagatactgatccataagacctct

SEQ ID NO: 3222679 - DNA, 25 bp, Homo sapien
ggaagagaggttctccatccccagt

SEQ ID NO: 3222680 - DNA, 25 bp, Homo sapien
aacggaacttttgctttgactctgc

SEQ ID NO: 3222681 - DNA, 25 bp, Homo sapien
catcattaccatttgcagtgttaca

SEQ ID NO: 3222682 - DNA, 25 bp, Homo sapien
tctagactgcatcttcacatcatta

SEQ ID NO: 3222683 - DNA, 25 bp, Homo sapien
ttcagtttgatttctagactgcatc

SEQ ID NO: 3222684 - DNA, 25 bp, Homo sapien
attcaacacatttggacttttccat

SEQ ID NO: 3222685 - DNA, 25 bp, Homo sapien
gattcaacacatttggacttttcca

SEQ ID NO: 3222686 - DNA, 25 bp, Homo sapien
tgattcaacacatttggacttttcc

SEQ ID NO: 3222687 - DNA, 25 bp, Homo sapien
ttgattcaacacatttggacttttc

SEQ ID NO: 3222688 - DNA, 25 bp, Homo sapien
tttctttcttacccatgacattttc

SEQ ID NO: 3222689 - DNA, 25 bp, Homo sapien
ttgtttttctttcttacccatgaca

SEQ ID NO: 3222690 - DNA, 25 bp, Homo sapien
ctttggagcatcactttgtttttct

SEQ ID NO: 3222691 - DNA, 25 bp, Homo sapien
ctttcttacccatgacattttccat

SEQ ID NO: 3222692 - DNA, 25 bp, Homo sapien
tcataattcagtatcgtttttgctt

SEQ ID NO: 3222693 - DNA, 25 bp, Homo sapien
cataattcagtatcgtttttgctta

SEQ ID NO: 3222694 - DNA, 25 bp, Homo sapien
taattcagtatcgtttttgcttaaa

SEQ ID NO: 3222695 - DNA, 25 bp, Homo sapien
ttcagtatcgtttttgcttaaaata

SEQ ID NO: 3222696 - DNA, 25 bp, Homo sapien
cagcaaacaaaagtacacaagtaaa

SEQ ID NO: 3222697 - DNA, 25 bp, Homo sapien
gagcacatacatttcgaactggtta

SEQ ID NO: 3222698 - DNA, 25 bp, Homo sapien
cacatttagacctcaaactgtagtc

SEQ ID NO: 3222699 - DNA, 25 bp, Homo sapien
attcaaggtatgcattaaagtaagc

SEQ ID NO: 3222700 - DNA, 25 bp, Homo sapien
tatttgacttgtgctcccgagagta

SEQ ID NO: 3222701 - DNA, 25 bp, Homo sapien
gctcccgagagtacatggaatcact

SEQ ID NO: 3222702 - DNA, 25 bp, Homo sapien
ccgagagtacatggaatcactttcc

SEQ ID NO: 3222703 - DNA, 25 bp, Homo sapien
acttgtgctcccgagagtacatgga

SEQ ID NO: 3222704 - DNA, 25 bp, Homo sapien
aagacagcctcacatccttcaatgc

SEQ ID NO: 3222705 - DNA, 25 bp, Homo sapien
tcactgtaaagacagcctcacatcc

SEQ ID NO: 3222706 - DNA, 25 bp, Homo sapien
tcaaatctgaacagaccggcagccc

SEQ ID NO: 3222707 - DNA, 25 bp, Homo sapien
gagccgatcttaaggcccatagaga

SEQ ID NO: 3222708 - DNA, 25 bp, Homo sapien
tcaagtagtaggtcagcaatgattt

SEQ ID NO: 3222709 - DNA, 25 bp, Homo sapien
cagatgaagtttcccagtaatctgc

SEQ ID NO: 3222710 - DNA, 25 bp, Homo sapien
tttgctttggtacaacagatgaagt

SEQ ID NO: 3222711 - DNA, 25 bp, Homo sapien
ctgtgtcgggaattagttgaggatt

SEQ ID NO: 3222712 - DNA, 25 bp, Homo sapien
aactagtgcctttaaactctagcaa

SEQ ID NO: 3222713 - DNA, 25 bp, Homo sapien
tagtgcctttaaactctagcaattt

SEQ ID NO: 3222714 - DNA, 25 bp, Homo sapien
tcaactagtgcctttaaactctagc

SEQ ID NO: 3222715 - DNA, 25 bp, Homo sapien
ctctagcaattttatatcagcaagg

SEQ ID NO: 3222716 - DNA, 25 bp, Homo sapien
gataaagagagcttccttgaggcac

SEQ ID NO: 3222717 - DNA, 25 bp, Homo sapien
aggataaagagagcttccttgaggc

SEQ ID NO: 3222718 - DNA, 25 bp, Homo sapien
actgaataacctgggctgtagccag

SEQ ID NO: 3222719 - DNA, 25 bp, Homo sapien
cactgaataacctgggctgtagcca

SEQ ID NO: 3222720 - DNA, 25 bp, Homo sapien
gctttcatcacattgcctatctgtg

SEQ ID NO: 3222721 - DNA, 25 bp, Homo sapien
tcacattgcctatctgtgattttcc

SEQ ID NO: 3222722 - DNA, 25 bp, Homo sapien
gatgctttcatcacattgcctatct

SEQ ID NO: 3222723 - DNA, 25 bp, Homo sapien
tcatcacattgcctatctgtgattt

SEQ ID NO: 3222724 - DNA, 25 bp, Homo sapien
taaccctggtccgtctgcttaaggc

SEQ ID NO: 3222725 - DNA, 25 bp, Homo sapien
atgaataaccctggtccgtctgctt

SEQ ID NO: 3222726 - DNA, 25 bp, Homo sapien
ccctggtccgtctgcttaaggctga

SEQ ID NO: 3222727 - DNA, 25 bp, Homo sapien
ggtccgtctgcttaaggctgataag

SEQ ID NO: 3222728 - DNA, 25 bp, Homo sapien
gatcccattcccgtctcactggttt

SEQ ID NO: 3222729 - DNA, 25 bp, Homo sapien
ttgggatcccattcccgtctcactg

SEQ ID NO: 3222730 - DNA, 25 bp, Homo sapien
tgggatcccattcccgtctcactgg

SEQ ID NO: 3222731 - DNA, 25 bp, Homo sapien
tttcttgggatcccattcccgtctc

SEQ ID NO: 3222732 - DNA, 25 bp, Homo sapien
gtttgtaggcatatttttttaatgc

SEQ ID NO: 3222733 - DNA, 25 bp, Homo sapien
tgaggtttgtaggcatattttttta

SEQ ID NO: 3222734 - DNA, 25 bp, Homo sapien
cttgaggtttgtaggcatatttttt

SEQ ID NO: 3222735 - DNA, 25 bp, Homo sapien
gcattggctgccctcatacagtgca

SEQ ID NO: 3222736 - DNA, 25 bp, Homo sapien
tgcttaaatccaggatgtttagcac

SEQ ID NO: 3222737 - DNA, 25 bp, Homo sapien
ctctgcgagtgatgtggcattggct

SEQ ID NO: 3222738 - DNA, 25 bp, Homo sapien
ttggcttctgagatccatgaggctc

SEQ ID NO: 3222739 - DNA, 25 bp, Homo sapien
ttgtttcatttaagatatgacctcc

SEQ ID NO: 3222740 - DNA, 25 bp, Homo sapien
cttgtgcctaaaactctttccaggg

SEQ ID NO: 3222741 - DNA, 25 bp, Homo sapien
gtttcatttaagatatgacctccag

SEQ ID NO: 3222742 - DNA, 25 bp, Homo sapien
catccacctcttaatcttgtgccta

SEQ ID NO: 3222743 - DNA, 25 bp, Homo sapien
cagaggctctctagattgttgatac

SEQ ID NO: 3222744 - DNA, 25 bp, Homo sapien
ttccatgttgggtcatctgtgtgtc

SEQ ID NO: 3222745 - DNA, 25 bp, Homo sapien
aagggtagttacacttcagaggctc

SEQ ID NO: 3222746 - DNA, 25 bp, Homo sapien
catttccccacaactgaatgacttt

SEQ ID NO: 3222747 - DNA, 25 bp, Homo sapien
ccctatattgtggtggttgaactcc

SEQ ID NO: 3222748 - DNA, 25 bp, Homo sapien
tcatactgtgctcttgaaaacgtca

SEQ ID NO: 3222749 - DNA, 25 bp, Homo sapien
ccccagggccaaagggtattctctg

SEQ ID NO: 3222750 - DNA, 25 bp, Homo sapien
gccaaagggtattctctgttgatgt

SEQ ID NO: 3222751 - DNA, 25 bp, Homo sapien
aaatcaatttatccctgtggctaca

SEQ ID NO: 3222752 - DNA, 25 bp, Homo sapien
tatagtctcatcaacgggaatagtg

SEQ ID NO: 3222753 - DNA, 25 bp, Homo sapien
caccttctgtagcatatcttttctg

SEQ ID NO: 3222754 - DNA, 25 bp, Homo sapien
gttttgttcatcctgtatagtctca

SEQ ID NO: 3222755 - DNA, 25 bp, Homo sapien
ccgtgccaggcctgcttcatataac

SEQ ID NO: 3222756 - DNA, 25 bp, Homo sapien
gtgccaggcctgcttcatataactt

SEQ ID NO: 3222757 - DNA, 25 bp, Homo sapien
accgtgccaggcctgcttcatataa

SEQ ID NO: 3222758 - DNA, 25 bp, Homo sapien
cgtgccaggcctgcttcatataact

SEQ ID NO: 3222759 - DNA, 25 bp, Homo sapien
agcttagtagtacaaaacaataatg

SEQ ID NO: 3222760 - DNA, 25 bp, Homo sapien
tgcaatattgacttcatggcagtgg

SEQ ID NO: 3222761 - DNA, 25 bp, Homo sapien
tagatcttccccatagttcgtgtca

SEQ ID NO: 3222762 - DNA, 25 bp, Homo sapien
ggaactgatcctgcaatattttgag

SEQ ID NO: 3222763 - DNA, 25 bp, Homo sapien
atggcacaaccgtcatcccctggag

SEQ ID NO: 3222764 - DNA, 25 bp, Homo sapien
tagaaatgctgctctgcatggcaca

SEQ ID NO: 3222765 - DNA, 25 bp, Homo sapien
gagagctccatgaaccctccagttg

SEQ ID NO: 3222766 - DNA, 25 bp, Homo sapien
aaactagaccatgatttttgggcac

SEQ ID NO: 3222767 - DNA, 25 bp, Homo sapien
aatctctttacttgcatggaaaccc

SEQ ID NO: 3222768 - DNA, 25 bp, Homo sapien
tatcttgctaatagtgggccttctt

SEQ ID NO: 3222769 - DNA, 25 bp, Homo sapien
tacattcctgatgtaaagagcatcc

SEQ ID NO: 3222770 - DNA, 25 bp, Homo sapien
cattggctacctgcactacttgtga

SEQ ID NO: 3222771 - DNA, 25 bp, Homo sapien
gacacacaaaatcaaatgtctccat

SEQ ID NO: 3222772 - DNA, 25 bp, Homo sapien
aagacacacaaaatcaaatgtctcc

SEQ ID NO: 3222773 - DNA, 25 bp, Homo sapien
gtgaagacacacaaaatcaaatgtc

SEQ ID NO: 3222774 - DNA, 25 bp, Homo sapien
ctgtgaagacacacaaaatcaaatg

SEQ ID NO: 3222775 - DNA, 25 bp, Homo sapien
tgcaacctgctgcacgcaggccttt

SEQ ID NO: 3222776 - DNA, 25 bp, Homo sapien
tttgcaacctgctgcacgcaggcct

SEQ ID NO: 3222777 - DNA, 25 bp, Homo sapien
gcaacctgctgcacgcaggcctttc

SEQ ID NO: 3222778 - DNA, 25 bp, Homo sapien
tgtttgcaacctgctgcacgcaggc

SEQ ID NO: 3222779 - DNA, 25 bp, Homo sapien
tagcagtatgagtaatttctaagtt

SEQ ID NO: 3222780 - DNA, 25 bp, Homo sapien
ggtgcatttttattgcctctaagaa

SEQ ID NO: 3222781 - DNA, 25 bp, Homo sapien
tcatttcaacgttgtaatggcaggg

SEQ ID NO: 3222782 - DNA, 25 bp, Homo sapien
ttatgcccaatgcaaaaactatata

SEQ ID NO: 3222783 - DNA, 25 bp, Homo sapien
cttgatcttctttgcagtccatctt

SEQ ID NO: 3222784 - DNA, 25 bp, Homo sapien
tcccacagagtccacttaaattttg

SEQ ID NO: 3222785 - DNA, 25 bp, Homo sapien
aattttgagcatgatcctgccctat

SEQ ID NO: 3222786 - DNA, 25 bp, Homo sapien
caaaagtcagacatctgtgtgtcag

SEQ ID NO: 3222787 - DNA, 25 bp, Homo sapien
tttccaacactctgggtgtctgagg

SEQ ID NO: 3222788 - DNA, 25 bp, Homo sapien
tgatactcctaataccatttccaac

SEQ ID NO: 3222789 - DNA, 25 bp, Homo sapien
tactgaaagtactgtcgcttgatac

SEQ ID NO: 3222790 - DNA, 25 bp, Homo sapien
tactgtcgcttgatactcctaatac

SEQ ID NO: 3222791 - DNA, 25 bp, Homo sapien
ggcgattgtgtgtttatcacctgtg

SEQ ID NO: 3222792 - DNA, 25 bp, Homo sapien
tggctgtctgaaggcgattgtgtgt

SEQ ID NO: 3222793 - DNA, 25 bp, Homo sapien
tctgaaggcgattgtgtgtttatca

SEQ ID NO: 3222794 - DNA, 25 bp, Homo sapien
gaaggcgattgtgtgtttatcacct

SEQ ID NO: 3222795 - DNA, 25 bp, Homo sapien
ggaagggaggtacacttcactatca

SEQ ID NO: 3222796 - DNA, 25 bp, Homo sapien
cggttctagtcctttaagaacagag

SEQ ID NO: 3222797 - DNA, 25 bp, Homo sapien
tctgggcccaaccagttatactggg

SEQ ID NO: 3222798 - DNA, 25 bp, Homo sapien
gaagaagccattatgctttccggtt

SEQ ID NO: 3222799 - DNA, 25 bp, Homo sapien
gaatagtgaaacttctatttcaggc

SEQ ID NO: 3222800 - DNA, 25 bp, Homo sapien
acttctatttcaggcatactccaca

SEQ ID NO: 3222801 - DNA, 25 bp, Homo sapien
cactaaatggcagaatagtgaaact

SEQ ID NO: 3222802 - DNA, 25 bp, Homo sapien
ctaaatggcagaatagtgaaacttc

SEQ ID NO: 3222803 - DNA, 25 bp, Homo sapien
actctactgtcaatcagactctgag

SEQ ID NO: 3222804 - DNA, 25 bp, Homo sapien
ccctctgtagttacatgtccctttt

SEQ ID NO: 3222805 - DNA, 25 bp, Homo sapien
gccacagcaattgctgtgactctac

SEQ ID NO: 3222806 - DNA, 25 bp, Homo sapien
cacttaggattatggaatctggctc

SEQ ID NO: 3222807 - DNA, 25 bp, Homo sapien
gcacccccgggttgagtggcagcag

SEQ ID NO: 3222808 - DNA, 25 bp, Homo sapien
atgcaaaatagttacgtcagatggt

SEQ ID NO: 3222809 - DNA, 25 bp, Homo sapien
ctctcggcgagttgatatgcaaaat

SEQ ID NO: 3222810 - DNA, 25 bp, Homo sapien
caaaatagttacgtcagatggtggg

SEQ ID NO: 3222811 - DNA, 25 bp, Homo sapien
gatgcccacgctgacgttaagcctg

SEQ ID NO: 3222812 - DNA, 25 bp, Homo sapien
tgtgcccgcagcgatcttagagtgc

SEQ ID NO: 3222813 - DNA, 25 bp, Homo sapien
ggctccagcaccgtcaaagcgttta

SEQ ID NO: 3222814 - DNA, 25 bp, Homo sapien
ttagagtgcgcagaaacggcagtcc

SEQ ID NO: 3222815 - DNA, 25 bp, Homo sapien
ttgggtcatacggtttggaaggatc

SEQ ID NO: 3222816 - DNA, 25 bp, Homo sapien
tgggtcatacggtttggaaggatct

SEQ ID NO: 3222817 - DNA, 25 bp, Homo sapien
tttgaacatgccaaaatttgtagcc

SEQ ID NO: 3222818 - DNA, 25 bp, Homo sapien
tgtacaggtaattcgctaagaagcc

SEQ ID NO: 3222819 - DNA, 25 bp, Homo sapien
aatgattgctcatgaacttttgcac

SEQ ID NO: 3222820 - DNA, 25 bp, Homo sapien
cactgcacccgaccattaaatttct

SEQ ID NO: 3222821 - DNA, 25 bp, Homo sapien
ttcagtagcataacattcttcctca

SEQ ID NO: 3222822 - DNA, 25 bp, Homo sapien
gccttcagtagcataacattcttcc

SEQ ID NO: 3222823 - DNA, 25 bp, Homo sapien
ccttcagtagcataacattcttcct

SEQ ID NO: 3222824 - DNA, 25 bp, Homo sapien
tgttgccttcagtagcataacattc

SEQ ID NO: 3222825 - DNA, 25 bp, Homo sapien
gcatttgcactattaatacttcggg

SEQ ID NO: 3222826 - DNA, 25 bp, Homo sapien
aatacttcgggtaattctttcatgg

SEQ ID NO: 3222827 - DNA, 25 bp, Homo sapien
tcagttaggcatttgcactattaat

SEQ ID NO: 3222828 - DNA, 25 bp, Homo sapien
cttcgggtaattctttcatgggatc

SEQ ID NO: 3222829 - DNA, 25 bp, Homo sapien
gaaattgctggaagagcatcatcag

SEQ ID NO: 3222830 - DNA, 25 bp, Homo sapien
ttattaccttcagtagacacagttc

SEQ ID NO: 3222831 - DNA, 25 bp, Homo sapien
tctaattttgatcttaaggtcatta

SEQ ID NO: 3222832 - DNA, 25 bp, Homo sapien
ctgtccacataaaattttcagggtg

SEQ ID NO: 3222833 - DNA, 25 bp, Homo sapien
tcactaaataaatggtctttggaga

SEQ ID NO: 3222834 - DNA, 25 bp, Homo sapien
taaaattggtcaaggtcactaaata

SEQ ID NO: 3222835 - DNA, 25 bp, Homo sapien
tctttggagatgagtgctgcgatgg

SEQ ID NO: 3222836 - DNA, 25 bp, Homo sapien
gctgcgatggacaatcggattttga

SEQ ID NO: 3222837 - DNA, 25 bp, Homo sapien
tattcaggagacttgtagcctggtg

SEQ ID NO: 3222838 - DNA, 25 bp, Homo sapien
aaaatattcaggagacttgtagcct

SEQ ID NO: 3222839 - DNA, 25 bp, Homo sapien
aggagacttgtagcctggtgttccc

SEQ ID NO: 3222840 - DNA, 25 bp, Homo sapien
ctgatcccgaaaatattcaggagac

SEQ ID NO: 3222841 - DNA, 25 bp, Homo sapien
tttctctctatgagtcagaaagcag

SEQ ID NO: 3222842 - DNA, 25 bp, Homo sapien
cttggacaggctttgcaataatttc

SEQ ID NO: 3222843 - DNA, 25 bp, Homo sapien
cttatgcttatgcttacatgacaca

SEQ ID NO: 3222844 - DNA, 25 bp, Homo sapien
gcagaactgtattctcaatatatat

SEQ ID NO: 3222845 - DNA, 25 bp, Homo sapien
gatggtgagcactggatgccgttta

SEQ ID NO: 3222846 - DNA, 25 bp, Homo sapien
ccccggctggtgtatagtgacactg

SEQ ID NO: 3222847 - DNA, 25 bp, Homo sapien
aaattttcgccgagtttgctgaaga

SEQ ID NO: 3222848 - DNA, 25 bp, Homo sapien
tgttcagcggtacggtgtccagagc

SEQ ID NO: 3222849 - DNA, 25 bp, Homo sapien
agtgtagccctaacagcacagtgca

SEQ ID NO: 3222850 - DNA, 25 bp, Homo sapien
ggtacctaagtgtagccctaacagc

SEQ ID NO: 3222851 - DNA, 25 bp, Homo sapien
tggtaggccaggtacctaagtgtag

SEQ ID NO: 3222852 - DNA, 25 bp, Homo sapien
gccaggtacctaagtgtagccctaa

SEQ ID NO: 3222853 - DNA, 25 bp, Homo sapien
acttcctgtttgatcggctgagcca

SEQ ID NO: 3222854 - DNA, 25 bp, Homo sapien
cttcctgtttgatcggctgagccat

SEQ ID NO: 3222855 - DNA, 25 bp, Homo sapien
tctggagaaacagcgttatgggtct

SEQ ID NO: 3222856 - DNA, 25 bp, Homo sapien
gaatactggttccatgaaatactgg

SEQ ID NO: 3222857 - DNA, 25 bp, Homo sapien
tggatgtgatctggaataagcccct

SEQ ID NO: 3222858 - DNA, 25 bp, Homo sapien
gatcccataattgctaaacccaagt

SEQ ID NO: 3222859 - DNA, 25 bp, Homo sapien
ctgggacgaacaccccaaggaactg

SEQ ID NO: 3222860 - DNA, 25 bp, Homo sapien
tgcctgaggcagatactacaatatc

SEQ ID NO: 3222861 - DNA, 25 bp, Homo sapien
tctcctcccttgatatctgctgtga

SEQ ID NO: 3222862 - DNA, 25 bp, Homo sapien
ttaacaccacaactgtcctgggacg

SEQ ID NO: 3222863 - DNA, 25 bp, Homo sapien
cctgtagcgtagaactgaccatgcc

SEQ ID NO: 3222864 - DNA, 25 bp, Homo sapien
cctgttaccagtggcaaaccatgtc

SEQ ID NO: 3222865 - DNA, 25 bp, Homo sapien
tcttgggcatcagctacagcactgg

SEQ ID NO: 3222866 - DNA, 25 bp, Homo sapien
tctgaagagtagtttcttgggcatc

SEQ ID NO: 3222867 - DNA, 25 bp, Homo sapien
attcatccctttcaagggttgtgca

SEQ ID NO: 3222868 - DNA, 25 bp, Homo sapien
tccctttcaagggttgtgcacatct

SEQ ID NO: 3222869 - DNA, 25 bp, Homo sapien
catctcaaattttctgtattgaaaa

SEQ ID NO: 3222870 - DNA, 25 bp, Homo sapien
ctttcaagggttgtgcacatctcaa

SEQ ID NO: 3222871 - DNA, 25 bp, Homo sapien
tgagcctcaacagagactggttaaa

SEQ ID NO: 3222872 - DNA, 25 bp, Homo sapien
caggtgccagatattctctggaaat

SEQ ID NO: 3222873 - DNA, 25 bp, Homo sapien
cctttcaggtgccagatattctctg

SEQ ID NO: 3222874 - DNA, 25 bp, Homo sapien
aaacctttcaggtgccagatattct

SEQ ID NO: 3222875 - DNA, 25 bp, Homo sapien
tgaggtggctcagaagcgaaggtga

SEQ ID NO: 3222876 - DNA, 25 bp, Homo sapien
ggtgaaagacgatgcaaaggcaatg

SEQ ID NO: 3222877 - DNA, 25 bp, Homo sapien
ggcaatgggaatgaggacaagctga

SEQ ID NO: 3222878 - DNA, 25 bp, Homo sapien
ctcagaagcgaaggtgaaagacgat

SEQ ID NO: 3222879 - DNA, 25 bp, Homo sapien
ccaggacagttgtagttgattagag

SEQ ID NO: 3222880 - DNA, 25 bp, Homo sapien
tagagtagaatcagaaggttcattt

SEQ ID NO: 3222881 - DNA, 25 bp, Homo sapien
tctggagaatccaggacagttgtag

SEQ ID NO: 3222882 - DNA, 25 bp, Homo sapien
gttgattagagtagaatcagaaggt

SEQ ID NO: 3222883 - DNA, 25 bp, Homo sapien
tttcaacagtaaccacaagcatatc

SEQ ID NO: 3222884 - DNA, 25 bp, Homo sapien
cagtagtgataattgtgttacagaa

SEQ ID NO: 3222885 - DNA, 25 bp, Homo sapien
ctttgttgcataaatattttagcac

SEQ ID NO: 3222886 - DNA, 25 bp, Homo sapien
gctgtgcacttaggattcacacaat

SEQ ID NO: 3222887 - DNA, 25 bp, Homo sapien
gctttgagtctatcgcgaatgcgac

SEQ ID NO: 3222888 - DNA, 25 bp, Homo sapien
gagctttgagtctatcgcgaatgcg

SEQ ID NO: 3222889 - DNA, 25 bp, Homo sapien
ctgtgagctttgagtctatcgcgaa

SEQ ID NO: 3222890 - DNA, 25 bp, Homo sapien
tcactgtgagctttgagtctatcgc

SEQ ID NO: 3222891 - DNA, 25 bp, Homo sapien
caatggctgtatgcctgtgctctta

SEQ ID NO: 3222892 - DNA, 25 bp, Homo sapien
tttgctttttattgcgcaatggctg

SEQ ID NO: 3222893 - DNA, 25 bp, Homo sapien
gccatcatgtggttacatgaagaaa

SEQ ID NO: 3222894 - DNA, 25 bp, Homo sapien
tgtgctcttatcctttgctgccatc

SEQ ID NO: 3222895 - DNA, 25 bp, Homo sapien
gaccttctttgtagtagccacagag

SEQ ID NO: 3222896 - DNA, 25 bp, Homo sapien
gtcactaacttcatggtgttgggca

SEQ ID NO: 3222897 - DNA, 25 bp, Homo sapien
cacttaaagttcctgaccttctttg

SEQ ID NO: 3222898 - DNA, 25 bp, Homo sapien
tgtgatattgacagcggacaggagc

SEQ ID NO: 3222899 - DNA, 25 bp, Homo sapien
aggatcaggtttgcggtagttcgga

SEQ ID NO: 3222900 - DNA, 25 bp, Homo sapien
tgaggatcaggtttgcggtagttcg

SEQ ID NO: 3222901 - DNA, 25 bp, Homo sapien
catgaggatcaggtttgcggtagtt

SEQ ID NO: 3222902 - DNA, 25 bp, Homo sapien
atcaggtttgcggtagttcggaagg

SEQ ID NO: 3222903 - DNA, 25 bp, Homo sapien
gtccttcatgtgcagctgttgccat

SEQ ID NO: 3222904 - DNA, 25 bp, Homo sapien
ggtccttcatgtgcagctgttgcca

SEQ ID NO: 3222905 - DNA, 25 bp, Homo sapien
ctggtccttcatgtgcagctgttgc

SEQ ID NO: 3222906 - DNA, 25 bp, Homo sapien
tggtccttcatgtgcagctgttgcc

SEQ ID NO: 3222907 - DNA, 25 bp, Homo sapien
cattccttctggcagccgtttcggt

SEQ ID NO: 3222908 - DNA, 25 bp, Homo sapien
gccgtttcggtcctggttgctccat

SEQ ID NO: 3222909 - DNA, 25 bp, Homo sapien
aaagatagcagtaatcttctggatc

SEQ ID NO: 3222910 - DNA, 25 bp, Homo sapien
cccacagacagctcaaagatagcag

SEQ ID NO: 3222911 - DNA, 25 bp, Homo sapien
gatgttttgctaggggtggcaaata

SEQ ID NO: 3222912 - DNA, 25 bp, Homo sapien
ttattaggatgttttgctaggggtg

SEQ ID NO: 3222913 - DNA, 25 bp, Homo sapien
ttttgctaggggtggcaaatatctg

SEQ ID NO: 3222914 - DNA, 25 bp, Homo sapien
taggatgttttgctaggggtggcaa

SEQ ID NO: 3222915 - DNA, 25 bp, Homo sapien
cagttgttttcttttccagtaacat

SEQ ID NO: 3222916 - DNA, 25 bp, Homo sapien
atgacagttgttttcttttccagta

SEQ ID NO: 3222917 - DNA, 25 bp, Homo sapien
tgttttcttttccagtaacatccat

SEQ ID NO: 3222918 - DNA, 25 bp, Homo sapien
ctgtcttcatgacagttgttttctt

SEQ ID NO: 3222919 - DNA, 25 bp, Homo sapien
ctgtttggtgccttttaggtgagaa

SEQ ID NO: 3222920 - DNA, 25 bp, Homo sapien
ggaaagattttggagtaaatatgaa

SEQ ID NO: 3222921 - DNA, 25 bp, Homo sapien
gccttttaggtgagaaagtatgcag

SEQ ID NO: 3222922 - DNA, 25 bp, Homo sapien
gattttggagtaaatatgaatgaca

SEQ ID NO: 3222923 - DNA, 25 bp, Homo sapien
cagcattcttcttatgccctgtgcc

SEQ ID NO: 3222924 - DNA, 25 bp, Homo sapien
ctgcagcattcttcttatgccctgt

SEQ ID NO: 3222925 - DNA, 25 bp, Homo sapien
ctgtgcctacaacctcaccctcttt

SEQ ID NO: 3222926 - DNA, 25 bp, Homo sapien
ttcttatgccctgtgcctacaacct

SEQ ID NO: 3222927 - DNA, 25 bp, Homo sapien
gttttgcctcgccttcttagcctct

SEQ ID NO: 3222928 - DNA, 25 bp, Homo sapien
gcctctgatctacacagcagcatga

SEQ ID NO: 3222929 - DNA, 25 bp, Homo sapien
ctctgcgttgctattcaggttttgc

SEQ ID NO: 3222930 - DNA, 25 bp, Homo sapien
gtctgtggaaaactctgcgttgcta

SEQ ID NO: 3222931 - DNA, 25 bp, Homo sapien
aaagcctgagatattcattacgatt

SEQ ID NO: 3222932 - DNA, 25 bp, Homo sapien
gatattcattacgattggtccccat

SEQ ID NO: 3222933 - DNA, 25 bp, Homo sapien
ttctcaggcatgtccgtccagtgat

SEQ ID NO: 3222934 - DNA, 25 bp, Homo sapien
tccgtccagtgattcccactgaaag

SEQ ID NO: 3222935 - DNA, 25 bp, Homo sapien
aatgcaatgggtgagtttgaaggca

SEQ ID NO: 3222936 - DNA, 25 bp, Homo sapien
tctgtgcacattctaatgcaatggg

SEQ ID NO: 3222937 - DNA, 25 bp, Homo sapien
tgcacattctaatgcaatgggtgag

SEQ ID NO: 3222938 - DNA, 25 bp, Homo sapien
cattctaatgcaatgggtgagtttg

SEQ ID NO: 3222939 - DNA, 25 bp, Homo sapien
ggtgctctgtgttttctggatgcca

SEQ ID NO: 3222940 - DNA, 25 bp, Homo sapien
gtgctctgtgttttctggatgccat

SEQ ID NO: 3222941 - DNA, 25 bp, Homo sapien
ctgtctgatcacttcctatgttcct

SEQ ID NO: 3222942 - DNA, 25 bp, Homo sapien
tctgatcacttcctatgttcctagc

SEQ ID NO: 3222943 - DNA, 25 bp, Homo sapien
gaagcatatcgatggctttctgttg

SEQ ID NO: 3222944 - DNA, 25 bp, Homo sapien
gcatatcgatggctttctgttgcta

SEQ ID NO: 3222945 - DNA, 25 bp, Homo sapien
attgaagcatatcgatggctttctg

SEQ ID NO: 3222946 - DNA, 25 bp, Homo sapien
tcgatggctttctgttgctaacaga

SEQ ID NO: 3222947 - DNA, 25 bp, Homo sapien
cattcgtcatctcacattgtgtttg

SEQ ID NO: 3222948 - DNA, 25 bp, Homo sapien
caacagcctgctagtgcatcgaggt

SEQ ID NO: 3222949 - DNA, 25 bp, Homo sapien
tagtgcatcgaggtctccattcgtc

SEQ ID NO: 3222950 - DNA, 25 bp, Homo sapien
ggtctccattcgtcatctcacattg

SEQ ID NO: 3222951 - DNA, 25 bp, Homo sapien
gtactggcttcagctttgttgtttg

SEQ ID NO: 3222952 - DNA, 25 bp, Homo sapien
ctgagttgtactggcttcagctttg

SEQ ID NO: 3222953 - DNA, 25 bp, Homo sapien
gagttgtactggcttcagctttgtt

SEQ ID NO: 3222954 - DNA, 25 bp, Homo sapien
ctggcttcagctttgttgtttgcat

SEQ ID NO: 3222955 - DNA, 25 bp, Homo sapien
catccattcaggtacattgttcatg

SEQ ID NO: 3222956 - DNA, 25 bp, Homo sapien
ggcatccattcaggtacattgttca

SEQ ID NO: 3222957 - DNA, 25 bp, Homo sapien
ctaaggcatccattcaggtacattg

SEQ ID NO: 3222958 - DNA, 25 bp, Homo sapien
ccattcaggtacattgttcatgtac

SEQ ID NO: 3222959 - DNA, 25 bp, Homo sapien
ctcgctggctcaggaatgaagccgt

SEQ ID NO: 3222960 - DNA, 25 bp, Homo sapien
taaggtggcgcatctggagttttct

SEQ ID NO: 3222961 - DNA, 25 bp, Homo sapien
gctggctcaggaatgaagccgtgga

SEQ ID NO: 3222962 - DNA, 25 bp, Homo sapien
aggtggcgcatctggagttttctcc

SEQ ID NO: 3222963 - DNA, 25 bp, Homo sapien
gatcactgtgtttggaaatagccgg

SEQ ID NO: 3222964 - DNA, 25 bp, Homo sapien
gaaacagtttgcaatcaccaccgta

SEQ ID NO: 3222965 - DNA, 25 bp, Homo sapien
gacaccagccagtaaatgagagaag

SEQ ID NO: 3222966 - DNA, 25 bp, Homo sapien
tacacgcttgctagattacgatcag

SEQ ID NO: 3222967 - DNA, 25 bp, Homo sapien
ttcatattcaccattattatcatca

SEQ ID NO: 3222968 - DNA, 25 bp, Homo sapien
attatcatcatcagtagcagcatcc

SEQ ID NO: 3222969 - DNA, 25 bp, Homo sapien
tatcatcatcagtagcagcatcctt

SEQ ID NO: 3222970 - DNA, 25 bp, Homo sapien
catcatcagtagcagcatccttcat

SEQ ID NO: 3222971 - DNA, 25 bp, Homo sapien
ggtacaacggtagtactggctcagc

SEQ ID NO: 3222972 - DNA, 25 bp, Homo sapien
agggtacaacggtagtactggctca

SEQ ID NO: 3222973 - DNA, 25 bp, Homo sapien
gggtacaacggtagtactggctcag

SEQ ID NO: 3222974 - DNA, 25 bp, Homo sapien
gagttagcataactttggctccttc

SEQ ID NO: 3222975 - DNA, 25 bp, Homo sapien
ctaaaccagagttagcataactttg

SEQ ID NO: 3222976 - DNA, 25 bp, Homo sapien
ccagagttagcataactttggctcc

SEQ ID NO: 3222977 - DNA, 25 bp, Homo sapien
tccttctggctctgacagtttctca

SEQ ID NO: 3222978 - DNA, 25 bp, Homo sapien
tccttcttgccatagttgccacttt

SEQ ID NO: 3222979 - DNA, 25 bp, Homo sapien
ccaacataattagtgtccttttcct

SEQ ID NO: 3222980 - DNA, 25 bp, Homo sapien
tcagtgcctccttacagctctccat

SEQ ID NO: 3222981 - DNA, 25 bp, Homo sapien
cacttttgacccaacgtctccttat

SEQ ID NO: 3222982 - DNA, 25 bp, Homo sapien
gtcacattgacctgatagcctctca

SEQ ID NO: 3222983 - DNA, 25 bp, Homo sapien
tctcactgtgaagtttagctgcttg

SEQ ID NO: 3222984 - DNA, 25 bp, Homo sapien
tagctgcttgaaatcaggataacgt

SEQ ID NO: 3222985 - DNA, 25 bp, Homo sapien
gccaggcaggataaattgagctaca

SEQ ID NO: 3222986 - DNA, 25 bp, Homo sapien
ttgctactgttacaagcatcaaaag

SEQ ID NO: 3222987 - DNA, 25 bp, Homo sapien
ttggagggagcagctcaacctttgc

SEQ ID NO: 3222988 - DNA, 25 bp, Homo sapien
ggaggtacagtcttcaggtacttgt

SEQ ID NO: 3222989 - DNA, 25 bp, Homo sapien
atttggaggtacagtcttcaggtac

SEQ ID NO: 3222990 - DNA, 25 bp, Homo sapien
cattataactttaggtctcgggagc

SEQ ID NO: 3222991 - DNA, 25 bp, Homo sapien
tacttccacccattacaggatcagg

SEQ ID NO: 3222992 - DNA, 25 bp, Homo sapien
ttgtctagacctcagcagcctgctg

SEQ ID NO: 3222993 - DNA, 25 bp, Homo sapien
taaatatagcttaggcccagtctgt

SEQ ID NO: 3222994 - DNA, 25 bp, Homo sapien
tcgtttttgaacaaaggaccctgca

SEQ ID NO: 3222995 - DNA, 25 bp, Homo sapien
gattatgaatgtagtggccacagtg

SEQ ID NO: 3222996 - DNA, 25 bp, Homo sapien
tgcacagaccccagacatagatgag

SEQ ID NO: 3222997 - DNA, 25 bp, Homo sapien
ggtttgccacctgcaaagctgcaca

SEQ ID NO: 3222998 - DNA, 25 bp, Homo sapien
gcgccatcaagcctggctaatgttt

SEQ ID NO: 3222999 - DNA, 25 bp, Homo sapien
catgcgccatcaagcctggctaatg

SEQ ID NO: 3223000 - DNA, 25 bp, Homo sapien
tataggcatgcgccatcaagcctgg

SEQ ID NO: 3223001 - DNA, 25 bp, Homo sapien
ttataggcatgcgccatcaagcctg

SEQ ID NO: 3223002 - DNA, 25 bp, Homo sapien
gttatgggtcccacacaagtctaaa

SEQ ID NO: 3223003 - DNA, 25 bp, Homo sapien
tcacctgaatggctgttctcacaag

SEQ ID NO: 3223004 - DNA, 25 bp, Homo sapien
ttctcacaagctgttgagtgcctgc

SEQ ID NO: 3223005 - DNA, 25 bp, Homo sapien
cagcattaaatcaaaagtcccaggt

SEQ ID NO: 3223006 - DNA, 25 bp, Homo sapien
cttcgatgcccagcttgggctccat

SEQ ID NO: 3223007 - DNA, 25 bp, Homo sapien
ttgcatatctttcccgtccttttca

SEQ ID NO: 3223008 - DNA, 25 bp, Homo sapien
gcatatctttcccgtccttttcatt

SEQ ID NO: 3223009 - DNA, 25 bp, Homo sapien
catatctttcccgtccttttcattc

SEQ ID NO: 3223010 - DNA, 25 bp, Homo sapien
tttgcatatctttcccgtccttttc

SEQ ID NO: 3223011 - DNA, 25 bp, Homo sapien
actgcaaagggtccgtctgcaacct

SEQ ID NO: 3223012 - DNA, 25 bp, Homo sapien
cactgcaaagggtccgtctgcaacc

SEQ ID NO: 3223013 - DNA, 25 bp, Homo sapien
aggtacctagtacactcacagtttc

SEQ ID NO: 3223014 - DNA, 25 bp, Homo sapien
gaggtacctagtacactcacagttt

SEQ ID NO: 3223015 - DNA, 25 bp, Homo sapien
tcagtcttgataaaagctcttgttc

SEQ ID NO: 3223016 - DNA, 25 bp, Homo sapien
ctctgggacacctgctaaagcattg

SEQ ID NO: 3223017 - DNA, 25 bp, Homo sapien
taaatgcccataggagaaaatggga

SEQ ID NO: 3223018 - DNA, 25 bp, Homo sapien
tctgggacacctgctaaagcattgt

SEQ ID NO: 3223019 - DNA, 25 bp, Homo sapien
caagagtggatccttctcaagaggc

SEQ ID NO: 3223020 - DNA, 25 bp, Homo sapien
gaggccattagggtaggtaattcaa

SEQ ID NO: 3223021 - DNA, 25 bp, Homo sapien
agctggttcatctcatctgtactgg

SEQ ID NO: 3223022 - DNA, 25 bp, Homo sapien
gtactttgttacagccgccctaaga

SEQ ID NO: 3223023 - DNA, 25 bp, Homo sapien
tagtgagtcgcacacttcacggcag

SEQ ID NO: 3223024 - DNA, 25 bp, Homo sapien
aaagccaaaggctaaggatcctcga

SEQ ID NO: 3223025 - DNA, 25 bp, Homo sapien
tcacggcagccttgagaatctgagg

SEQ ID NO: 3223026 - DNA, 25 bp, Homo sapien
gatggtccattaaagcgcatactga

SEQ ID NO: 3223027 - DNA, 25 bp, Homo sapien
ttccccagggcagcctgaatccaac

SEQ ID NO: 3223028 - DNA, 25 bp, Homo sapien
ccagggcagcctgaatccaacccat

SEQ ID NO: 3223029 - DNA, 25 bp, Homo sapien
ctcaacaactcccttccccagggca

SEQ ID NO: 3223030 - DNA, 25 bp, Homo sapien
ccccagggcagcctgaatccaaccc

SEQ ID NO: 3223031 - DNA, 25 bp, Homo sapien
tctagcgccacaatcatggcttctg

SEQ ID NO: 3223032 - DNA, 25 bp, Homo sapien
actttctagcgccacaatcatggct

SEQ ID NO: 3223033 - DNA, 25 bp, Homo sapien
aaagagttacatgaaaagttgccag

SEQ ID NO: 3223034 - DNA, 25 bp, Homo sapien
ctgtactttctagcgccacaatcat

SEQ ID NO: 3223035 - DNA, 25 bp, Homo sapien
cagagtcctaggatctggcaagatc

SEQ ID NO: 3223036 - DNA, 25 bp, Homo sapien
gcaaaagggattgagctgaagtcca

SEQ ID NO: 3223037 - DNA, 25 bp, Homo sapien
gaagtccaaatctcaaggctggagc

SEQ ID NO: 3223038 - DNA, 25 bp, Homo sapien
gagaagtttggagaacttggcagca

SEQ ID NO: 3223039 - DNA, 25 bp, Homo sapien
gcttctcaagaagatatgttttcgt

SEQ ID NO: 3223040 - DNA, 25 bp, Homo sapien
tatgaacaagaacagtgacttagca

SEQ ID NO: 3223041 - DNA, 25 bp, Homo sapien
ttcgtctggtgcataatgcctggca

SEQ ID NO: 3223042 - DNA, 25 bp, Homo sapien
acttagcactggcttctcaagaaga

SEQ ID NO: 3223043 - DNA, 25 bp, Homo sapien
ctgtaaatctcttggagcaacaagt

SEQ ID NO: 3223044 - DNA, 25 bp, Homo sapien
tgttaatatttccgttaatgaacca

SEQ ID NO: 3223045 - DNA, 25 bp, Homo sapien
acatataagttgctgttaatatttc

SEQ ID NO: 3223046 - DNA, 25 bp, Homo sapien
aagtggagaagtacatataagttgc

SEQ ID NO: 3223047 - DNA, 25 bp, Homo sapien
gaaactgctgttcattagtgtgggc

SEQ ID NO: 3223048 - DNA, 25 bp, Homo sapien
gacaattagaagatcatgggagcca

SEQ ID NO: 3223049 - DNA, 25 bp, Homo sapien
caaatctctcgcattaggttaggaa

SEQ ID NO: 3223050 - DNA, 25 bp, Homo sapien
gaagacattcatggcagtgcacatt

SEQ ID NO: 3223051 - DNA, 25 bp, Homo sapien
gacatgatttggcactgttaggctc

SEQ ID NO: 3223052 - DNA, 25 bp, Homo sapien
ggcgatctaatatatgactgtggaa

SEQ ID NO: 3223053 - DNA, 25 bp, Homo sapien
tcaaattgctgttgtgtaggcgatc

SEQ ID NO: 3223054 - DNA, 25 bp, Homo sapien
cagaaaaatatttaccggcagaaga

SEQ ID NO: 3223055 - DNA, 25 bp, Homo sapien
tgtttcacgaaataggaaggcctga

SEQ ID NO: 3223056 - DNA, 25 bp, Homo sapien
cttagaggtcattatacggctagtg

SEQ ID NO: 3223057 - DNA, 25 bp, Homo sapien
cactgattgagatcgctataacaca

SEQ ID NO: 3223058 - DNA, 25 bp, Homo sapien
tgtcaacatgctgtcctcaataagc

SEQ ID NO: 3223059 - DNA, 25 bp, Homo sapien
taatgtcccacagtatgttttctgg

SEQ ID NO: 3223060 - DNA, 25 bp, Homo sapien
gcactgccagagtggtaatgtccca

SEQ ID NO: 3223061 - DNA, 25 bp, Homo sapien
agtttattagtatgccttttacatc

SEQ ID NO: 3223062 - DNA, 25 bp, Homo sapien
tcccctttattggagtgtgtctgtg

SEQ ID NO: 3223063 - DNA, 25 bp, Homo sapien
gcctctctggatctatccctttaaa

SEQ ID NO: 3223064 - DNA, 25 bp, Homo sapien
caggaatgtcgcctctctggatcta

SEQ ID NO: 3223065 - DNA, 25 bp, Homo sapien
tcaagcaggaatgtcgcctctctgg

SEQ ID NO: 3223066 - DNA, 25 bp, Homo sapien
tgtcgcctctctggatctatccctt

SEQ ID NO: 3223067 - DNA, 25 bp, Homo sapien
tggagttgacttttgctggcttatg

SEQ ID NO: 3223068 - DNA, 25 bp, Homo sapien
agtctgcctctttgtccgtttctca

SEQ ID NO: 3223069 - DNA, 25 bp, Homo sapien
ctctttgtccgtttctcagggctgg

SEQ ID NO: 3223070 - DNA, 25 bp, Homo sapien
cactgatagactcttgcatgaaagt

SEQ ID NO: 3223071 - DNA, 25 bp, Homo sapien
gaaattcaatggcaccgactttgga

SEQ ID NO: 3223072 - DNA, 25 bp, Homo sapien
cagaccgtggaggttaagcctgccg

SEQ ID NO: 3223073 - DNA, 25 bp, Homo sapien
tgtagttacctgagaaacgcgggaa

SEQ ID NO: 3223074 - DNA, 25 bp, Homo sapien
acagccgccgctacagtcgtttgag

SEQ ID NO: 3223075 - DNA, 25 bp, Homo sapien
atgcagcaataggaaaatccgacat

SEQ ID NO: 3223076 - DNA, 25 bp, Homo sapien
gaatgtatgacatgccactccctta

SEQ ID NO: 3223077 - DNA, 25 bp, Homo sapien
tgtgctagtaagttcgtatcccaag

SEQ ID NO: 3223078 - DNA, 25 bp, Homo sapien
taaagccttacttagtgctcacatg

SEQ ID NO: 3223079 - DNA, 25 bp, Homo sapien
gagctctgcttaatcattgtgctag

SEQ ID NO: 3223080 - DNA, 25 bp, Homo sapien
ccaaacagtcacataacctgctttt

SEQ ID NO: 3223081 - DNA, 25 bp, Homo sapien
caaacagtcacataacctgctttta

SEQ ID NO: 3223082 - DNA, 25 bp, Homo sapien
cagtcacataacctgcttttaatca

SEQ ID NO: 3223083 - DNA, 25 bp, Homo sapien
aacagtcacataacctgcttttaat

SEQ ID NO: 3223084 - DNA, 25 bp, Homo sapien
gcactggatctgttcggctattggg

SEQ ID NO: 3223085 - DNA, 25 bp, Homo sapien
tattgggttcaggagattaacctgc

SEQ ID NO: 3223086 - DNA, 25 bp, Homo sapien
gatctgttcggctattgggttcagg

SEQ ID NO: 3223087 - DNA, 25 bp, Homo sapien
cggctattgggttcaggagattaac

SEQ ID NO: 3223088 - DNA, 25 bp, Homo sapien
ggtaatacttcagctgacggcgaat

SEQ ID NO: 3223089 - DNA, 25 bp, Homo sapien
ttgcattggactgagtgactagggt

SEQ ID NO: 3223090 - DNA, 25 bp, Homo sapien
tagtgttaacgttagctaaatcttc

SEQ ID NO: 3223091 - DNA, 25 bp, Homo sapien
cttctaatgatcgtggtaatacttc

SEQ ID NO: 3223092 - DNA, 25 bp, Homo sapien
tctgggccatcctctataacttgtg

SEQ ID NO: 3223093 - DNA, 25 bp, Homo sapien
ccgataggtagagcttaaggagaac

SEQ ID NO: 3223094 - DNA, 25 bp, Homo sapien
tccccgaaggagcattcagaaacat

SEQ ID NO: 3223095 - DNA, 25 bp, Homo sapien
ttatcaactgttggacctcagggaa

SEQ ID NO: 3223096 - DNA, 25 bp, Homo sapien
aaatgagacagacttgactacccag

SEQ ID NO: 3223097 - DNA, 25 bp, Homo sapien
tccaccaaattgtctcccaagatct

SEQ ID NO: 3223098 - DNA, 25 bp, Homo sapien
tgactctccactcttctacttgttc

SEQ ID NO: 3223099 - DNA, 25 bp, Homo sapien
tctgcatatggtctagaacttcctt

SEQ ID NO: 3223100 - DNA, 25 bp, Homo sapien
gttcataacccggatgtgagtgtgg

SEQ ID NO: 3223101 - DNA, 25 bp, Homo sapien
gtactgcatgatgaaaataatctaa

SEQ ID NO: 3223102 - DNA, 25 bp, Homo sapien
tgtactgcatgatgaaaataatcta

SEQ ID NO: 3223103 - DNA, 25 bp, Homo sapien
gctgtactgcatgatgaaaataatc

SEQ ID NO: 3223104 - DNA, 25 bp, Homo sapien
gatgcaagtagatacccaagaactc

SEQ ID NO: 3223105 - DNA, 25 bp, Homo sapien
ccaagaactctattagataggaaca

SEQ ID NO: 3223106 - DNA, 25 bp, Homo sapien
gataggaacatcttactctcaggta

SEQ ID NO: 3223107 - DNA, 25 bp, Homo sapien
tctttatttctcaatggatgcaagt

SEQ ID NO: 3223108 - DNA, 25 bp, Homo sapien
ctgggaacaaccttgcctgccaggg

SEQ ID NO: 3223109 - DNA, 25 bp, Homo sapien
ctctgggaacaaccttgcctgccag

SEQ ID NO: 3223110 - DNA, 25 bp, Homo sapien
agggccaaggtctgcccaccaaaag

SEQ ID NO: 3223111 - DNA, 25 bp, Homo sapien
tgcccaccaaaagctctgggaacaa

SEQ ID NO: 3223112 - DNA, 25 bp, Homo sapien
caatcatactcctcttttgctcccc

SEQ ID NO: 3223113 - DNA, 25 bp, Homo sapien
tcaatgccaatcatactcctctttt

SEQ ID NO: 3223114 - DNA, 25 bp, Homo sapien
tgccaatcatactcctcttttgctc

SEQ ID NO: 3223115 - DNA, 25 bp, Homo sapien
aatgccaatcatactcctcttttgc

SEQ ID NO: 3223116 - DNA, 25 bp, Homo sapien
tctaatgatgattcccgcttgtgga

SEQ ID NO: 3223117 - DNA, 25 bp, Homo sapien
tagcctgctgctatgtaagacgcgc

SEQ ID NO: 3223118 - DNA, 25 bp, Homo sapien
cttaaggtcctctgatatggcttgg

SEQ ID NO: 3223119 - DNA, 25 bp, Homo sapien
ggaatccctgcccaaacagactcaa

SEQ ID NO: 3223120 - DNA, 25 bp, Homo sapien
tggccacactgacaagaagatggtg

SEQ ID NO: 3223121 - DNA, 25 bp, Homo sapien
aagatggtgcctcagaaggcgcaca

SEQ ID NO: 3223122 - DNA, 25 bp, Homo sapien
cactgacaagaagatggtgcctcag

SEQ ID NO: 3223123 - DNA, 25 bp, Homo sapien
gacaagaagatggtgcctcagaagg

SEQ ID NO: 3223124 - DNA, 25 bp, Homo sapien
ccacagatgcattggagttcaagaa

SEQ ID NO: 3223125 - DNA, 25 bp, Homo sapien
ccaaatatgttgatgagctactagt

SEQ ID NO: 3223126 - DNA, 25 bp, Homo sapien
cataatttttccttacccaagcctg

SEQ ID NO: 3223127 - DNA, 25 bp, Homo sapien
taaagtcaagggtcagccacagatg

SEQ ID NO: 3223128 - DNA, 25 bp, Homo sapien
tctctctggttctcattgctgtgga

SEQ ID NO: 3223129 - DNA, 25 bp, Homo sapien
ggtggagaccaaataatagacatgc

SEQ ID NO: 3223130 - DNA, 25 bp, Homo sapien
gctgtggaacgacatcagctgataa

SEQ ID NO: 3223131 - DNA, 25 bp, Homo sapien
cagctgataatcaaccctcgagggt

SEQ ID NO: 3223132 - DNA, 25 bp, Homo sapien
gatagacacccgaagcttttaatca

SEQ ID NO: 3223133 - DNA, 25 bp, Homo sapien
ttttcgcggagtaactggctgggat

SEQ ID NO: 3223134 - DNA, 25 bp, Homo sapien
gcttctcggctgcaatcgagccgcg

SEQ ID NO: 3223135 - DNA, 25 bp, Homo sapien
ggctctggccgcaccggagttttcg

SEQ ID NO: 3223136 - DNA, 25 bp, Homo sapien
ctcgagaacacgtgactgttccggg

SEQ ID NO: 3223137 - DNA, 25 bp, Homo sapien
gctccaaggcgcctgctccgcgcca

SEQ ID NO: 3223138 - DNA, 25 bp, Homo sapien
gcggcccagcgcgatcgctcctgca

SEQ ID NO: 3223139 - DNA, 25 bp, Homo sapien
tttaacggcgtctcgagaacacgtg

SEQ ID NO: 3223140 - DNA, 25 bp, Homo sapien
tcactcctgacaagtgcctgttccg

SEQ ID NO: 3223141 - DNA, 25 bp, Homo sapien
cgaaagaattcagcccagtaccctc

SEQ ID NO: 3223142 - DNA, 25 bp, Homo sapien
aggaggctccttcgcggatccccga

SEQ ID NO: 3223143 - DNA, 25 bp, Homo sapien
aaccggagggacctgctcggcacga

SEQ ID NO: 3223144 - DNA, 25 bp, Homo sapien
agccagagcgcgtccagccgggggc

SEQ ID NO: 3223145 - DNA, 25 bp, Homo sapien
agccgggggcagcgctttgtccatc

SEQ ID NO: 3223146 - DNA, 25 bp, Homo sapien
cagagcgcgtccagccgggggcagc

SEQ ID NO: 3223147 - DNA, 25 bp, Homo sapien
gggcagcgctttgtccatcccccgc

SEQ ID NO: 3223148 - DNA, 25 bp, Homo sapien
tgtgatcgtggaacagcagcatgat

SEQ ID NO: 3223149 - DNA, 25 bp, Homo sapien
cagagacccgctagggttgagccct

SEQ ID NO: 3223150 - DNA, 25 bp, Homo sapien
tatgaagacacctcgcaaacaggag

SEQ ID NO: 3223151 - DNA, 25 bp, Homo sapien
cgcaaaccttagagcgcagctgcct

SEQ ID NO: 3223152 - DNA, 25 bp, Homo sapien
ttttcctgaaaaacacaatgagcag

SEQ ID NO: 3223153 - DNA, 25 bp, Homo sapien
ctttttcctgaaaaacacaatgagc

SEQ ID NO: 3223154 - DNA, 25 bp, Homo sapien
tcctttttcctgaaaaacacaatga

SEQ ID NO: 3223155 - DNA, 25 bp, Homo sapien
ttcctgaaaaacacaatgagcagac

SEQ ID NO: 3223156 - DNA, 25 bp, Homo sapien
tcagttgttaccgatagcctttcct

SEQ ID NO: 3223157 - DNA, 25 bp, Homo sapien
agttgttaccgatagcctttccttg

SEQ ID NO: 3223158 - DNA, 25 bp, Homo sapien
ctttgtggcaggtcagttgttaccg

SEQ ID NO: 3223159 - DNA, 25 bp, Homo sapien
ctaactttgtggcaggtcagttgtt

SEQ ID NO: 3223160 - DNA, 25 bp, Homo sapien
tatagagcccaatcagaaaatactg

SEQ ID NO: 3223161 - DNA, 25 bp, Homo sapien
gcttttatagtcatcccagactggg

SEQ ID NO: 3223162 - DNA, 25 bp, Homo sapien
aatactcgtcgagctctaaatccat

SEQ ID NO: 3223163 - DNA, 25 bp, Homo sapien
agaattccgagtggcagcagtatta

SEQ ID NO: 3223164 - DNA, 25 bp, Homo sapien
aacagatggcaaaacctagtgtcca

SEQ ID NO: 3223165 - DNA, 25 bp, Homo sapien
tgtccagacagtagctatcagaaag

SEQ ID NO: 3223166 - DNA, 25 bp, Homo sapien
gaatcagatggccatgactcaacac

SEQ ID NO: 3223167 - DNA, 25 bp, Homo sapien
cagacgtcagtgtgaaaggtgagca

SEQ ID NO: 3223168 - DNA, 25 bp, Homo sapien
ggtctttctggagcaggtaacacac

SEQ ID NO: 3223169 - DNA, 25 bp, Homo sapien
agagagctgacttcttacagagcca

SEQ ID NO: 3223170 - DNA, 25 bp, Homo sapien
tttatggctgccagagagtttcacc

SEQ ID NO: 3223171 - DNA, 25 bp, Homo sapien
ggacccctggtatgaacttactgga

SEQ ID NO: 3223172 - DNA, 25 bp, Homo sapien
aatcagctttaatcccattattaag

SEQ ID NO: 3223173 - DNA, 25 bp, Homo sapien
gacagtgtataagggacactaaatc

SEQ ID NO: 3223174 - DNA, 25 bp, Homo sapien
gacaaatgcaatacaccaacttgaa

SEQ ID NO: 3223175 - DNA, 25 bp, Homo sapien
gaaacccatatagaattggattaag

SEQ ID NO: 3223176 - DNA, 25 bp, Homo sapien
ctaggacagtggagttaaattgaca

SEQ ID NO: 3223177 - DNA, 25 bp, Homo sapien
tctcaataggcaatagcattttcct

SEQ ID NO: 3223178 - DNA, 25 bp, Homo sapien
cattaagaagcctatggagtagaaa

SEQ ID NO: 3223179 - DNA, 25 bp, Homo sapien
gacactgactgcacaactaaataaa

SEQ ID NO: 3223180 - DNA, 25 bp, Homo sapien
acagcatatgagactacagtattga

SEQ ID NO: 3223181 - DNA, 25 bp, Homo sapien
tgaaacagtataaagtatattaatc

SEQ ID NO: 3223182 - DNA, 25 bp, Homo sapien
catatgagactacagtattgaaaca

SEQ ID NO: 3223183 - DNA, 25 bp, Homo sapien
cagtataaagtatattaatcattct

SEQ ID NO: 3223184 - DNA, 25 bp, Homo sapien
cctaaacttccactcaatgtgcaca

SEQ ID NO: 3223185 - DNA, 25 bp, Homo sapien
atcctaaacttccactcaatgtgca

SEQ ID NO: 3223186 - DNA, 25 bp, Homo sapien
tcctaaacttccactcaatgtgcac

SEQ ID NO: 3223187 - DNA, 25 bp, Homo sapien
tgaggattgcttcccagtattgtcc

SEQ ID NO: 3223188 - DNA, 25 bp, Homo sapien
tgggctcctctagttgccaccctct

SEQ ID NO: 3223189 - DNA, 25 bp, Homo sapien
atcacgtctgctcctaagtgaagat

SEQ ID NO: 3223190 - DNA, 25 bp, Homo sapien
gctcctaagtgaagatgtgctgagg

SEQ ID NO: 3223191 - DNA, 25 bp, Homo sapien
gccaaagaagtgaactaaagccagc

SEQ ID NO: 3223192 - DNA, 25 bp, Homo sapien
taaaaccttccttgaagctgtgaag

SEQ ID NO: 3223193 - DNA, 25 bp, Homo sapien
taaagccagcaggactgtttttaaa

SEQ ID NO: 3223194 - DNA, 25 bp, Homo sapien
ctagggtgatatgtgacctctgtct

SEQ ID NO: 3223195 - DNA, 25 bp, Homo sapien
gtatgttggtgtagaagtgtgcaaa

SEQ ID NO: 3223196 - DNA, 25 bp, Homo sapien
tggtatgttggtgtagaagtgtgca

SEQ ID NO: 3223197 - DNA, 25 bp, Homo sapien
tgttggtgtagaagtgtgcaaaatt

SEQ ID NO: 3223198 - DNA, 25 bp, Homo sapien
tatgttggtgtagaagtgtgcaaaa

SEQ ID NO: 3223199 - DNA, 25 bp, Homo sapien
tggtgctgtgccgaaaagctccggc

SEQ ID NO: 3223200 - DNA, 25 bp, Homo sapien
aaaattggagctgtgtgattgaagg

SEQ ID NO: 3223201 - DNA, 25 bp, Homo sapien
tagtatccgttcactggtgatttgg

SEQ ID NO: 3223202 - DNA, 25 bp, Homo sapien
tgtgattgaaggtttttagtatccg

SEQ ID NO: 3223203 - DNA, 25 bp, Homo sapien
agtaatttttggactcgataacaag

SEQ ID NO: 3223204 - DNA, 25 bp, Homo sapien
gaacgctgtatagtaatttttggac

SEQ ID NO: 3223205 - DNA, 25 bp, Homo sapien
tcttctcatgaacgctgtatagtaa

SEQ ID NO: 3223206 - DNA, 25 bp, Homo sapien
gctgtagtcttctcatgaacgctgt

SEQ ID NO: 3223207 - DNA, 25 bp, Homo sapien
aagcctagagaaccgcctttgctcc

SEQ ID NO: 3223208 - DNA, 25 bp, Homo sapien
ttaagcctagagaaccgcctttgct

SEQ ID NO: 3223209 - DNA, 25 bp, Homo sapien
ctgattaagcctagagaaccgcctt

SEQ ID NO: 3223210 - DNA, 25 bp, Homo sapien
gattaagcctagagaaccgcctttg

SEQ ID NO: 3223211 - DNA, 25 bp, Homo sapien
aatctggacaatgcatgatacctgt

SEQ ID NO: 3223212 - DNA, 25 bp, Homo sapien
atctggacaatgcatgatacctgta

SEQ ID NO: 3223213 - DNA, 25 bp, Homo sapien
tgcaatattcacgttggctccccaa

SEQ ID NO: 3223214 - DNA, 25 bp, Homo sapien
gcttcctgcatcagacacatattct

SEQ ID NO: 3223215 - DNA, 25 bp, Homo sapien
agggagagttctgcaatattcacgt

SEQ ID NO: 3223216 - DNA, 25 bp, Homo sapien
tgcttcctgcatcagacacatattc

SEQ ID NO: 3223217 - DNA, 25 bp, Homo sapien
gtgtctcttgacctgtggccaaaat

SEQ ID NO: 3223218 - DNA, 25 bp, Homo sapien
caattaagaagttgggcttcaacag

SEQ ID NO: 3223219 - DNA, 25 bp, Homo sapien
agtgaaccccgttgtttatctcttg

SEQ ID NO: 3223220 - DNA, 25 bp, Homo sapien
taacagctttttgatatctgaacca

SEQ ID NO: 3223221 - DNA, 25 bp, Homo sapien
gaggcgagtgcgtttctctaaagcg

SEQ ID NO: 3223222 - DNA, 25 bp, Homo sapien
ggtaatctcaccaaccgcaggagca

SEQ ID NO: 3223223 - DNA, 25 bp, Homo sapien
agcgtccccgttaactgagaccgcg

SEQ ID NO: 3223224 - DNA, 25 bp, Homo sapien
tgagaccgcgtctttttcgcccgtg

SEQ ID NO: 3223225 - DNA, 25 bp, Homo sapien
ctgcactttttccctttggtgcttt

SEQ ID NO: 3223226 - DNA, 25 bp, Homo sapien
tgcactttttccctttggtgctttg

SEQ ID NO: 3223227 - DNA, 25 bp, Homo sapien
gggcctctctcgtaatttgagctgc

SEQ ID NO: 3223228 - DNA, 25 bp, Homo sapien
tttgagctgcttttctactatatgg

SEQ ID NO: 3223229 - DNA, 25 bp, Homo sapien
tctactatatggatggatgactttt

SEQ ID NO: 3223230 - DNA, 25 bp, Homo sapien
ttgtttgtgggcctctctcgtaatt

SEQ ID NO: 3223231 - DNA, 25 bp, Homo sapien
gccaaaatgttgctatactgtgaaa

SEQ ID NO: 3223232 - DNA, 25 bp, Homo sapien
tgtcatacagtcctaaatcagagct

SEQ ID NO: 3223233 - DNA, 25 bp, Homo sapien
tcatatcaaagagccacttgctgct

SEQ ID NO: 3223234 - DNA, 25 bp, Homo sapien
cgggaatgtgctagtcttcaaacca

SEQ ID NO: 3223235 - DNA, 25 bp, Homo sapien
tttgttaatcttccattaggagtca

SEQ ID NO: 3223236 - DNA, 25 bp, Homo sapien
ttgttaatcttccattaggagtcat

SEQ ID NO: 3223237 - DNA, 25 bp, Homo sapien
gactgactgggaagatacacaaggg

SEQ ID NO: 3223238 - DNA, 25 bp, Homo sapien
gaatggactcagtgggaacctgaac

SEQ ID NO: 3223239 - DNA, 25 bp, Homo sapien
tcataaaaagttggagaatggctct

SEQ ID NO: 3223240 - DNA, 25 bp, Homo sapien
acatactgatcagggtggctacacc

SEQ ID NO: 3223241 - DNA, 25 bp, Homo sapien
cactatacacctactagattggcta

SEQ ID NO: 3223242 - DNA, 25 bp, Homo sapien
gcaaaagattcggacagattctcca

SEQ ID NO: 3223243 - DNA, 25 bp, Homo sapien
catactaggccaaaaccttctttat

SEQ ID NO: 3223244 - DNA, 25 bp, Homo sapien
taacaacagattaacccagtaccaa

SEQ ID NO: 3223245 - DNA, 25 bp, Homo sapien
caagatcaaaatgcactactgtcat

SEQ ID NO: 3223246 - DNA, 25 bp, Homo sapien
ccaagatcaaaatgcactactgtca

SEQ ID NO: 3223247 - DNA, 25 bp, Homo sapien
caccaagatcaaaatgcactactgt

SEQ ID NO: 3223248 - DNA, 25 bp, Homo sapien
ccaccaagatcaaaatgcactactg

SEQ ID NO: 3223249 - DNA, 25 bp, Homo sapien
tcagatgggttctgtaatatgcaga

SEQ ID NO: 3223250 - DNA, 25 bp, Homo sapien
taaaactctgacaataacaacgaaa

SEQ ID NO: 3223251 - DNA, 25 bp, Homo sapien
ttcctttaagcacctcaatgtctaa

SEQ ID NO: 3223252 - DNA, 25 bp, Homo sapien
aaaggaagcctatagaacaaaccag

SEQ ID NO: 3223253 - DNA, 25 bp, Homo sapien
aaggttgagacgcaaggccttttca

SEQ ID NO: 3223254 - DNA, 25 bp, Homo sapien
ggttgagacgcaaggccttttcatt

SEQ ID NO: 3223255 - DNA, 25 bp, Homo sapien
caacaaggttgagacgcaaggcctt

SEQ ID NO: 3223256 - DNA, 25 bp, Homo sapien
acaaggttgagacgcaaggcctttt

SEQ ID NO: 3223257 - DNA, 25 bp, Homo sapien
aagatgattttgaaaccattgcagt

SEQ ID NO: 3223258 - DNA, 25 bp, Homo sapien
tcaattagttcacaagcatctttct

SEQ ID NO: 3223259 - DNA, 25 bp, Homo sapien
ctttcaattagttcacaagcatctt

SEQ ID NO: 3223260 - DNA, 25 bp, Homo sapien
gggatcaagatgattttgaaaccat

SEQ ID NO: 3223261 - DNA, 25 bp, Homo sapien
ccagctcactgctgaatcgatttaa

SEQ ID NO: 3223262 - DNA, 25 bp, Homo sapien
gctcactgctgaatcgatttaagta

SEQ ID NO: 3223263 - DNA, 25 bp, Homo sapien
tgatgacggtctcccgggaacagtg

SEQ ID NO: 3223264 - DNA, 25 bp, Homo sapien
tcgtctgcttgatgacggtctcccg

SEQ ID NO: 3223265 - DNA, 25 bp, Homo sapien
gagaaatccatatgtgatactgcaa

SEQ ID NO: 3223266 - DNA, 25 bp, Homo sapien
gacaagttagggttgacaagatcaa

SEQ ID NO: 3223267 - DNA, 25 bp, Homo sapien
tcacggtaaaaaagacatgatgtca

SEQ ID NO: 3223268 - DNA, 25 bp, Homo sapien
actgcaaatttggagttctggagac

SEQ ID NO: 3223269 - DNA, 25 bp, Homo sapien
gaaatagttacaccacataaggagg

SEQ ID NO: 3223270 - DNA, 25 bp, Homo sapien
ggatggttctatctagtcttctcaa

SEQ ID NO: 3223271 - DNA, 25 bp, Homo sapien
tacaagaggcatgaacaacaaaaac

SEQ ID NO: 3223272 - DNA, 25 bp, Homo sapien
gggaaacggacacctgcaaactcat

SEQ ID NO: 3223273 - DNA, 25 bp, Homo sapien
tctagcatagaatccatgaaataaa

SEQ ID NO: 3223274 - DNA, 25 bp, Homo sapien
aaaacaaaatttcgaagtattgctg

SEQ ID NO: 3223275 - DNA, 25 bp, Homo sapien
gaagtattgctgtaattaacatgaa

SEQ ID NO: 3223276 - DNA, 25 bp, Homo sapien
aagtaatttatctccatgaggcaat

SEQ ID NO: 3223277 - DNA, 25 bp, Homo sapien
ttcagattacttgcatttagaatgt

SEQ ID NO: 3223278 - DNA, 25 bp, Homo sapien
tcagattacttgcatttagaatgtc

SEQ ID NO: 3223279 - DNA, 25 bp, Homo sapien
tcctcttgcacgtcttgggaattgc

SEQ ID NO: 3223280 - DNA, 25 bp, Homo sapien
tcatcgtttagttccaattccccca

SEQ ID NO: 3223281 - DNA, 25 bp, Homo sapien
taatttcttcagatcaaagtcccat

SEQ ID NO: 3223282 - DNA, 25 bp, Homo sapien
gcatcattagcgcaaatttttctca

SEQ ID NO: 3223283 - DNA, 25 bp, Homo sapien
ttattttcaattcaagtgaagacaa

SEQ ID NO: 3223284 - DNA, 25 bp, Homo sapien
ttatttattttcaattcaagtgaag

SEQ ID NO: 3223285 - DNA, 25 bp, Homo sapien
tgaagctctcaaattatttattttc

SEQ ID NO: 3223286 - DNA, 25 bp, Homo sapien
atttattttcaattcaagtgaagac

SEQ ID NO: 3223287 - DNA, 25 bp, Homo sapien
gactaaacaacttctgcagatcaca

SEQ ID NO: 3223288 - DNA, 25 bp, Homo sapien
gaaacaggttactgtccatttcaca

SEQ ID NO: 3223289 - DNA, 25 bp, Homo sapien
ttagttatattgctccctcccagcc

SEQ ID NO: 3223290 - DNA, 25 bp, Homo sapien
tcacagctcaaaaagtacccacagg

SEQ ID NO: 3223291 - DNA, 25 bp, Homo sapien
tgtgggagatcaacataacaatcat

SEQ ID NO: 3223292 - DNA, 25 bp, Homo sapien
gatatccagttaacctaatactgca

SEQ ID NO: 3223293 - DNA, 25 bp, Homo sapien
ccatttagctctggttcaaaagata

SEQ ID NO: 3223294 - DNA, 25 bp, Homo sapien
taacaaggcttagttgatatccagt

SEQ ID NO: 3223295 - DNA, 25 bp, Homo sapien
gcagctctatgctacagtgactcga

SEQ ID NO: 3223296 - DNA, 25 bp, Homo sapien
gatgcagaacccttagatagggagg

SEQ ID NO: 3223297 - DNA, 25 bp, Homo sapien
gacagtaagatgcaaaggtgcggcc

SEQ ID NO: 3223298 - DNA, 25 bp, Homo sapien
gctgagatgctgagtccatgctgca

SEQ ID NO: 3223299 - DNA, 25 bp, Homo sapien
ccagatgaactggtagtgctacata

SEQ ID NO: 3223300 - DNA, 25 bp, Homo sapien
gattatagtcccagacagacgacct

SEQ ID NO: 3223301 - DNA, 25 bp, Homo sapien
taaagtgagcccaacaacctgagat

SEQ ID NO: 3223302 - DNA, 25 bp, Homo sapien
caatgtaatctaaagcgggactgtc

SEQ ID NO: 3223303 - DNA, 25 bp, Homo sapien
caagtgacgcaaaccttagttgtgg

SEQ ID NO: 3223304 - DNA, 25 bp, Homo sapien
tagtagtggctgacactgagtccag

SEQ ID NO: 3223305 - DNA, 25 bp, Homo sapien
aacttgttataagcacagggaaagc

SEQ ID NO: 3223306 - DNA, 25 bp, Homo sapien
caaatctgggtatcacatggatgca

SEQ ID NO: 3223307 - DNA, 25 bp, Homo sapien
ttaaccatggcaccatatccaaggg

SEQ ID NO: 3223308 - DNA, 25 bp, Homo sapien
cagtgagctagattaacggtgatta

SEQ ID NO: 3223309 - DNA, 25 bp, Homo sapien
catccatatgaggtgtcaacttgac

SEQ ID NO: 3223310 - DNA, 25 bp, Homo sapien
cacatctctaaagggtaaaaatcca

SEQ ID NO: 3223311 - DNA, 25 bp, Homo sapien
gacaggatttcccttgctcagttag

SEQ ID NO: 3223312 - DNA, 25 bp, Homo sapien
atagaaacacaacagccacaaatgc

SEQ ID NO: 3223313 - DNA, 25 bp, Homo sapien
taaaattagagactaagcttctgct

SEQ ID NO: 3223314 - DNA, 25 bp, Homo sapien
aacacaacagccacaaatgcaggcc

SEQ ID NO: 3223315 - DNA, 25 bp, Homo sapien
ttggatagcacagccgtaaaattag

SEQ ID NO: 3223316 - DNA, 25 bp, Homo sapien
ggctgaaggcctacaaccgtgtgat

SEQ ID NO: 3223317 - DNA, 25 bp, Homo sapien
ggtagtgcctgtaccacaaacaggt

SEQ ID NO: 3223318 - DNA, 25 bp, Homo sapien
ggagcccatgaagtaatagcgtaaa

SEQ ID NO: 3223319 - DNA, 25 bp, Homo sapien
tatcagtctgatggaacctgttggg

SEQ ID NO: 3223320 - DNA, 25 bp, Homo sapien
tcttagggtacaaggtgcttcatca

SEQ ID NO: 3223321 - DNA, 25 bp, Homo sapien
cagaaagatcttgcaacatgagcta

SEQ ID NO: 3223322 - DNA, 25 bp, Homo sapien
catcaacaacagtgagaggcttttc

SEQ ID NO: 3223323 - DNA, 25 bp, Homo sapien
tcacttacgggaagacagctattgt

SEQ ID NO: 3223324 - DNA, 25 bp, Homo sapien
ttcctagcaatcaagggcagacatg

SEQ ID NO: 3223325 - DNA, 25 bp, Homo sapien
tagatgacacatttagagctcagca

SEQ ID NO: 3223326 - DNA, 25 bp, Homo sapien
gcttcacccaatgtcttaccctaga

SEQ ID NO: 3223327 - DNA, 25 bp, Homo sapien
ggcagacatgatacccttagattag

SEQ ID NO: 3223328 - DNA, 25 bp, Homo sapien
cattgggccctataagttttcatac

SEQ ID NO: 3223329 - DNA, 25 bp, Homo sapien
gacattttagccatgcgaagtttga

SEQ ID NO: 3223330 - DNA, 25 bp, Homo sapien
gagtgggttagcaccatggtttgac

SEQ ID NO: 3223331 - DNA, 25 bp, Homo sapien
tatccagcctaaatcgttggtggta

SEQ ID NO: 3223332 - DNA, 25 bp, Homo sapien
tgcagactctctctatacgggctgt

SEQ ID NO: 3223333 - DNA, 25 bp, Homo sapien
ctgcagactctctctatacgggctg

SEQ ID NO: 3223334 - DNA, 25 bp, Homo sapien
cagactctctctatacgggctgtcc

SEQ ID NO: 3223335 - DNA, 25 bp, Homo sapien
gactctctctatacgggctgtccct

SEQ ID NO: 3223336 - DNA, 25 bp, Homo sapien
ccttgatgatccagtgataactatt

SEQ ID NO: 3223337 - DNA, 25 bp, Homo sapien
ccaccttgatgatccagtgataact

SEQ ID NO: 3223338 - DNA, 25 bp, Homo sapien
tgatccagtgataactatttggttc

SEQ ID NO: 3223339 - DNA, 25 bp, Homo sapien
tgatgatccagtgataactatttgg

SEQ ID NO: 3223340 - DNA, 25 bp, Homo sapien
cattataagcaacatgaccagcagc

SEQ ID NO: 3223341 - DNA, 25 bp, Homo sapien
taacagcaaaatagcgcagcatctc

SEQ ID NO: 3223342 - DNA, 25 bp, Homo sapien
gaccagcagccacgtttgttgtaat

SEQ ID NO: 3223343 - DNA, 25 bp, Homo sapien
gaagtatctagcaacctaatggctg

SEQ ID NO: 3223344 - DNA, 25 bp, Homo sapien
cttctatagcttccggtctgttttt

SEQ ID NO: 3223345 - DNA, 25 bp, Homo sapien
tttgcttctatagcttccggtctgt

SEQ ID NO: 3223346 - DNA, 25 bp, Homo sapien
tgcttctatagcttccggtctgttt

SEQ ID NO: 3223347 - DNA, 25 bp, Homo sapien
gcttctatagcttccggtctgtttt

SEQ ID NO: 3223348 - DNA, 25 bp, Homo sapien
tcccatttttggcagcattttcggc

SEQ ID NO: 3223349 - DNA, 25 bp, Homo sapien
ttttcggcatctctcttcaatcata

SEQ ID NO: 3223350 - DNA, 25 bp, Homo sapien
caatcatatccttgaaagaaccttt

SEQ ID NO: 3223351 - DNA, 25 bp, Homo sapien
tatccttgaaagaaccttttacgca

SEQ ID NO: 3223352 - DNA, 25 bp, Homo sapien
atgttcaatctgtagaacactattt

SEQ ID NO: 3223353 - DNA, 25 bp, Homo sapien
tttcaacatcttctaatatatatgg

SEQ ID NO: 3223354 - DNA, 25 bp, Homo sapien
gtagaacactattttcaacatcttc

SEQ ID NO: 3223355 - DNA, 25 bp, Homo sapien
aatctgtagaacactattttcaaca

SEQ ID NO: 3223356 - DNA, 25 bp, Homo sapien
tctccagaagttctcagaagctcca

SEQ ID NO: 3223357 - DNA, 25 bp, Homo sapien
gaagctccatgaactttcagtctgc

SEQ ID NO: 3223358 - DNA, 25 bp, Homo sapien
taaaagcagctgtaattctccagaa

SEQ ID NO: 3223359 - DNA, 25 bp, Homo sapien
tcagcttgaagcaccagagaagtgc

SEQ ID NO: 3223360 - DNA, 25 bp, Homo sapien
tgcacatcttgctagtaattacatt

SEQ ID NO: 3223361 - DNA, 25 bp, Homo sapien
ttgcacatcttgctagtaattacat

SEQ ID NO: 3223362 - DNA, 25 bp, Homo sapien
gcacatcttgctagtaattacattt

SEQ ID NO: 3223363 - DNA, 25 bp, Homo sapien
acatcttgctagtaattacattttc

SEQ ID NO: 3223364 - DNA, 25 bp, Homo sapien
tagccttgattgttcataaataact

SEQ ID NO: 3223365 - DNA, 25 bp, Homo sapien
actatcttccaggtgttggtggtta

SEQ ID NO: 3223366 - DNA, 25 bp, Homo sapien
tatagccttgattgttcataaataa

SEQ ID NO: 3223367 - DNA, 25 bp, Homo sapien
taaataactatcttccaggtgttgg

SEQ ID NO: 3223368 - DNA, 25 bp, Homo sapien
ccctcttgcccaaatcccgtaccat

SEQ ID NO: 3223369 - DNA, 25 bp, Homo sapien
aactccactggatgcttcatccctc

SEQ ID NO: 3223370 - DNA, 25 bp, Homo sapien
gatgcttcatccctcttgcccaaat

SEQ ID NO: 3223371 - DNA, 25 bp, Homo sapien
tccactggatgcttcatccctcttg

SEQ ID NO: 3223372 - DNA, 25 bp, Homo sapien
tcttcacatggcagtaggaagagaa

SEQ ID NO: 3223373 - DNA, 25 bp, Homo sapien
cacatggcagtaggaagagaagtgc

SEQ ID NO: 3223374 - DNA, 25 bp, Homo sapien
attcagttacctgaattatatgtca

SEQ ID NO: 3223375 - DNA, 25 bp, Homo sapien
attatatgtcatgggtgcttcccat

SEQ ID NO: 3223376 - DNA, 25 bp, Homo sapien
tctgccgtgccctagagacattttc

SEQ ID NO: 3223377 - DNA, 25 bp, Homo sapien
cagtctcttggttagagcatagtaa

SEQ ID NO: 3223378 - DNA, 25 bp, Homo sapien
agagcatagtaagaacaacttttat

SEQ ID NO: 3223379 - DNA, 25 bp, Homo sapien
ctgtttcctctcgaatactttgctg

SEQ ID NO: 3223380 - DNA, 25 bp, Homo sapien
cgtatcgttgtgactcatctcggtc

SEQ ID NO: 3223381 - DNA, 25 bp, Homo sapien
ctcatctcggtctgtaataacatgc

SEQ ID NO: 3223382 - DNA, 25 bp, Homo sapien
gacatcagtggttgtatgagatgga

SEQ ID NO: 3223383 - DNA, 25 bp, Homo sapien
taaaggaaaaagtactgttcagctg

SEQ ID NO: 3223384 - DNA, 25 bp, Homo sapien
cttagtttctcctttcaaatacttg

SEQ ID NO: 3223385 - DNA, 25 bp, Homo sapien
cataaatgtcaaaagcggggatgtc

SEQ ID NO: 3223386 - DNA, 25 bp, Homo sapien
taaatgtcaaaagcggggatgtcgt

SEQ ID NO: 3223387 - DNA, 25 bp, Homo sapien
gggatgtcgttttcatcatactgaa

SEQ ID NO: 3223388 - DNA, 25 bp, Homo sapien
caaaagcggggatgtcgttttcatc

SEQ ID NO: 3223389 - DNA, 25 bp, Homo sapien
ttcccttgtgtatttgtatcagcgg

SEQ ID NO: 3223390 - DNA, 25 bp, Homo sapien
ggcgctcctccagcatgatgacctc

SEQ ID NO: 3223391 - DNA, 25 bp, Homo sapien
agcatgatgacctcattcagagctc

SEQ ID NO: 3223392 - DNA, 25 bp, Homo sapien
gtatcagcggggtcgagtatgttac

SEQ ID NO: 3223393 - DNA, 25 bp, Homo sapien
tttgataccggatagactctggcat

SEQ ID NO: 3223394 - DNA, 25 bp, Homo sapien
caatgtgtcatagctttgataccgg

SEQ ID NO: 3223395 - DNA, 25 bp, Homo sapien
acagatgacaacaatgtgtcatagc

SEQ ID NO: 3223396 - DNA, 25 bp, Homo sapien
catagctttgataccggatagactc

SEQ ID NO: 3223397 - DNA, 25 bp, Homo sapien
ggcaccttgcatcggtctttcccag

SEQ ID NO: 3223398 - DNA, 25 bp, Homo sapien
atttacaaggttagtcctagaggct

SEQ ID NO: 3223399 - DNA, 25 bp, Homo sapien
gttatctacaccaaggatagaatcc

SEQ ID NO: 3223400 - DNA, 25 bp, Homo sapien
agaggcttgtttattgtcgggcacc

SEQ ID NO: 3223401 - DNA, 25 bp, Homo sapien
aaagcatccctggagtatatctagg

SEQ ID NO: 3223402 - DNA, 25 bp, Homo sapien
gactgcaataagtggaaaggacttt

SEQ ID NO: 3223403 - DNA, 25 bp, Homo sapien
aagcatccctggagtatatctagga

SEQ ID NO: 3223404 - DNA, 25 bp, Homo sapien
ctaggattaacttcattgactgcaa

SEQ ID NO: 3223405 - DNA, 25 bp, Homo sapien
gagcttctctgagtaaagtagcttt

SEQ ID NO: 3223406 - DNA, 25 bp, Homo sapien
ttagaaaatccacggcatataaaca

SEQ ID NO: 3223407 - DNA, 25 bp, Homo sapien
tgtggtggtgttccacaaactgtgt

SEQ ID NO: 3223408 - DNA, 25 bp, Homo sapien
caaactgtgttgagcttctctgagt

SEQ ID NO: 3223409 - DNA, 25 bp, Homo sapien
gagcctgcgtgcacttctgtagaaa

SEQ ID NO: 3223410 - DNA, 25 bp, Homo sapien
gcctgcgtgcacttctgtagaaatt

SEQ ID NO: 3223411 - DNA, 25 bp, Homo sapien
agcctgcgtgcacttctgtagaaat

SEQ ID NO: 3223412 - DNA, 25 bp, Homo sapien
ctacaaggaaatctgagaaaagcag

SEQ ID NO: 3223413 - DNA, 25 bp, Homo sapien
acaaggaaatctgagaaaagcagtt

SEQ ID NO: 3223414 - DNA, 25 bp, Homo sapien
tacaaggaaatctgagaaaagcagt

SEQ ID NO: 3223415 - DNA, 25 bp, Homo sapien
caaggaaatctgagaaaagcagttt

SEQ ID NO: 3223416 - DNA, 25 bp, Homo sapien
gactatcttagtatgtttgggctgc

SEQ ID NO: 3223417 - DNA, 25 bp, Homo sapien
tacaatgtctattatttgactatct

SEQ ID NO: 3223418 - DNA, 25 bp, Homo sapien
tttattagcagttgaacatataagt

SEQ ID NO: 3223419 - DNA, 25 bp, Homo sapien
cagttctaaagtctggagtccaaga

SEQ ID NO: 3223420 - DNA, 25 bp, Homo sapien
gacaaggtctatagtgttactccat

SEQ ID NO: 3223421 - DNA, 25 bp, Homo sapien
ggccatagttgggtgaagatcaaga

SEQ ID NO: 3223422 - DNA, 25 bp, Homo sapien
tgagaatatgttaggcaagccacag

SEQ ID NO: 3223423 - DNA, 25 bp, Homo sapien
cagtaagttgtatatcccaatgagg

SEQ ID NO: 3223424 - DNA, 25 bp, Homo sapien
gcaggtacccatgtcatcatagcac

SEQ ID NO: 3223425 - DNA, 25 bp, Homo sapien
aaagcaggttgcactcctcatagga

SEQ ID NO: 3223426 - DNA, 25 bp, Homo sapien
caaccgcactcatgtaggccacgga

SEQ ID NO: 3223427 - DNA, 25 bp, Homo sapien
catggtgccgatcgatctcagctca

SEQ ID NO: 3223428 - DNA, 25 bp, Homo sapien
aaatctctaaataacaatactagac

SEQ ID NO: 3223429 - DNA, 25 bp, Homo sapien
tagacaaactgtacaccccacacat

SEQ ID NO: 3223430 - DNA, 25 bp, Homo sapien
gattagcagtgcacggtagtggtcc

SEQ ID NO: 3223431 - DNA, 25 bp, Homo sapien
gggactatagtcaatgattagcagt

SEQ ID NO: 3223432 - DNA, 25 bp, Homo sapien
gtgttttccaactggtgccacgtct

SEQ ID NO: 3223433 - DNA, 25 bp, Homo sapien
ttccaactggtgccacgtctgtcat

SEQ ID NO: 3223434 - DNA, 25 bp, Homo sapien
tttccaactggtgccacgtctgtca

SEQ ID NO: 3223435 - DNA, 25 bp, Homo sapien
gttttccaactggtgccacgtctgt

SEQ ID NO: 3223436 - DNA, 25 bp, Homo sapien
agcctctttttctttgttgattgtc

SEQ ID NO: 3223437 - DNA, 25 bp, Homo sapien
gccatttctgagtccctaggaaaaa

SEQ ID NO: 3223438 - DNA, 25 bp, Homo sapien
ctgccatttctgagtccctaggaaa

SEQ ID NO: 3223439 - DNA, 25 bp, Homo sapien
taggaaaaatttcagaagaagcctc

SEQ ID NO: 3223440 - DNA, 25 bp, Homo sapien
cagtatttagtcgacctctagcaca

SEQ ID NO: 3223441 - DNA, 25 bp, Homo sapien
ggcacctgcgctgcatgctgctata

SEQ ID NO: 3223442 - DNA, 25 bp, Homo sapien
tcgagatttgggtctaaaagacatc

SEQ ID NO: 3223443 - DNA, 25 bp, Homo sapien
cattcttagccctgtagctgtagct

SEQ ID NO: 3223444 - DNA, 25 bp, Homo sapien
tatggcttgtgggttacaaccggct

SEQ ID NO: 3223445 - DNA, 25 bp, Homo sapien
tttgggttggctctggacattgctg

SEQ ID NO: 3223446 - DNA, 25 bp, Homo sapien
tgaatgaagagaggagccagatcca

SEQ ID NO: 3223447 - DNA, 25 bp, Homo sapien
gccagatccatagggacacttccta

SEQ ID NO: 3223448 - DNA, 25 bp, Homo sapien
gcggcagccgctgcaaatgtgggag

SEQ ID NO: 3223449 - DNA, 25 bp, Homo sapien
cggcagccgctgcaaatgtgggagt

SEQ ID NO: 3223450 - DNA, 25 bp, Homo sapien
ttcagccgtctgcttatttacgtag

SEQ ID NO: 3223451 - DNA, 25 bp, Homo sapien
gaagagatttggctccaaataggac

SEQ ID NO: 3223452 - DNA, 25 bp, Homo sapien
gacactaagcttttcagccgtctgc

SEQ ID NO: 3223453 - DNA, 25 bp, Homo sapien
gcttatttacgtagtcagcaagatg

SEQ ID NO: 3223454 - DNA, 25 bp, Homo sapien
tctttctgtaacaccaggctagtga

SEQ ID NO: 3223455 - DNA, 25 bp, Homo sapien
gaaaacatatattgggctatgccac

SEQ ID NO: 3223456 - DNA, 25 bp, Homo sapien
gacagagtcacttagagaagtaaaa

SEQ ID NO: 3223457 - DNA, 25 bp, Homo sapien
taaattctctggatttgagagcaag

SEQ ID NO: 3223458 - DNA, 25 bp, Homo sapien
catttccatttttcagtttggctaa

SEQ ID NO: 3223459 - DNA, 25 bp, Homo sapien
ttccatttccatttttcagtttggc

SEQ ID NO: 3223460 - DNA, 25 bp, Homo sapien
ttattgtgaccatctgatttccatt

SEQ ID NO: 3223461 - DNA, 25 bp, Homo sapien
atttccatttccatttttcagtttg

SEQ ID NO: 3223462 - DNA, 25 bp, Homo sapien
ggagttcccaggcttcggagaatgt

SEQ ID NO: 3223463 - DNA, 25 bp, Homo sapien
caggcttcggagaatgtcctcttct

SEQ ID NO: 3223464 - DNA, 25 bp, Homo sapien
gttcccaggcttcggagaatgtcct

SEQ ID NO: 3223465 - DNA, 25 bp, Homo sapien
tcccaggcttcggagaatgtcctct

SEQ ID NO: 3223466 - DNA, 25 bp, Homo sapien
cagtgctaaaacttctactgaattg

SEQ ID NO: 3223467 - DNA, 25 bp, Homo sapien
tatttctagcctgaagggaccacca

SEQ ID NO: 3223468 - DNA, 25 bp, Homo sapien
gtgctaaaacttctactgaattgtc

SEQ ID NO: 3223469 - DNA, 25 bp, Homo sapien
ggagtttatttctagcctgaaggga

SEQ ID NO: 3223470 - DNA, 25 bp, Homo sapien
tctgggctggagatgcacaaatttt

SEQ ID NO: 3223471 - DNA, 25 bp, Homo sapien
cttctgggctggagatgcacaaatt

SEQ ID NO: 3223472 - DNA, 25 bp, Homo sapien
tcttctgggctggagatgcacaaat

SEQ ID NO: 3223473 - DNA, 25 bp, Homo sapien
ttctgggctggagatgcacaaattt

SEQ ID NO: 3223474 - DNA, 25 bp, Homo sapien
cactgttctgcccataccgcttcaa

SEQ ID NO: 3223475 - DNA, 25 bp, Homo sapien
tgttctgcccataccgcttcaactg

SEQ ID NO: 3223476 - DNA, 25 bp, Homo sapien
gttctgcccataccgcttcaactga

SEQ ID NO: 3223477 - DNA, 25 bp, Homo sapien
tctgcccataccgcttcaactgagt

SEQ ID NO: 3223478 - DNA, 25 bp, Homo sapien
agcagctcctcctctaatatctggg

SEQ ID NO: 3223479 - DNA, 25 bp, Homo sapien
tgggtttctctcatataaataccac

SEQ ID NO: 3223480 - DNA, 25 bp, Homo sapien
cctcctctaatatctgggtttctct

SEQ ID NO: 3223481 - DNA, 25 bp, Homo sapien
atctgggtttctctcatataaatac

SEQ ID NO: 3223482 - DNA, 25 bp, Homo sapien
ggccatactaaatatatctgagtta

SEQ ID NO: 3223483 - DNA, 25 bp, Homo sapien
agagaagagctagagtccataggcc

SEQ ID NO: 3223484 - DNA, 25 bp, Homo sapien
gattttacatgaactcatagggtaa

SEQ ID NO: 3223485 - DNA, 25 bp, Homo sapien
aatttatggtcattgcaaaaggcaa

SEQ ID NO: 3223486 - DNA, 25 bp, Homo sapien
actgtgtggattcatggtattcttg

SEQ ID NO: 3223487 - DNA, 25 bp, Homo sapien
tactgacccgaatctaaaaatggct

SEQ ID NO: 3223488 - DNA, 25 bp, Homo sapien
tactactgacccgaatctaaaaatg

SEQ ID NO: 3223489 - DNA, 25 bp, Homo sapien
tggattcatggtattcttgaccaaa

SEQ ID NO: 3223490 - DNA, 25 bp, Homo sapien
tgccttctttgcatgtagtggctcc

SEQ ID NO: 3223491 - DNA, 25 bp, Homo sapien
tcagtgccttctttgcatgtagtgg

SEQ ID NO: 3223492 - DNA, 25 bp, Homo sapien
gccttctttgcatgtagtggctcca

SEQ ID NO: 3223493 - DNA, 25 bp, Homo sapien
agtgccttctttgcatgtagtggct

SEQ ID NO: 3223494 - DNA, 25 bp, Homo sapien
ctccttgtcctcgaaccacgcctca

SEQ ID NO: 3223495 - DNA, 25 bp, Homo sapien
tcgaaccacgcctcaccgagtagca

SEQ ID NO: 3223496 - DNA, 25 bp, Homo sapien
aaccacgcctcaccgagtagcagca

SEQ ID NO: 3223497 - DNA, 25 bp, Homo sapien
gtcctcgaaccacgcctcaccgagt

SEQ ID NO: 3223498 - DNA, 25 bp, Homo sapien
taggtggtccccaggtcgacgcaga

SEQ ID NO: 3223499 - DNA, 25 bp, Homo sapien
acagacgcagcagtaggtggtcccc

SEQ ID NO: 3223500 - DNA, 25 bp, Homo sapien
cttgaacacacagacgcagcagtag

SEQ ID NO: 3223501 - DNA, 25 bp, Homo sapien
cacacagacgcagcagtaggtggtc

SEQ ID NO: 3223502 - DNA, 25 bp, Homo sapien
gattgttggcggtgatctccacgca

SEQ ID NO: 3223503 - DNA, 25 bp, Homo sapien
tgaagggcacataggaccgcgtgat

SEQ ID NO: 3223504 - DNA, 25 bp, Homo sapien
tcgtggcggcatcgccgatcagata

SEQ ID NO: 3223505 - DNA, 25 bp, Homo sapien
tgtcctgctgcatagacaggtcgtt

SEQ ID NO: 3223506 - DNA, 25 bp, Homo sapien
tatcaacttgaacgtatggtttagt

SEQ ID NO: 3223507 - DNA, 25 bp, Homo sapien
tccaatatcaacttgaacgtatggt

SEQ ID NO: 3223508 - DNA, 25 bp, Homo sapien
caatatcaacttgaacgtatggttt

SEQ ID NO: 3223509 - DNA, 25 bp, Homo sapien
ctccaatatcaacttgaacgtatgg

SEQ ID NO: 3223510 - DNA, 25 bp, Homo sapien
cagaaatttcttcaggagcaaatgt

SEQ ID NO: 3223511 - DNA, 25 bp, Homo sapien
ttcttcaggagcaaatgtctttgtt

SEQ ID NO: 3223512 - DNA, 25 bp, Homo sapien
catggcagaaatttcttcaggagca

SEQ ID NO: 3223513 - DNA, 25 bp, Homo sapien
cttcaggagcaaatgtctttgtttg

SEQ ID NO: 3223514 - DNA, 25 bp, Homo sapien
gccataggctcgttaatgatcctca

SEQ ID NO: 3223515 - DNA, 25 bp, Homo sapien
taaccaatagcagctgccataggct

SEQ ID NO: 3223516 - DNA, 25 bp, Homo sapien
agaggagacgcattgaaggttctgc

SEQ ID NO: 3223517 - DNA, 25 bp, Homo sapien
atctttggttgcttcgcattgggca

SEQ ID NO: 3223518 - DNA, 25 bp, Homo sapien
attagtggccacgactccgaagaca

SEQ ID NO: 3223519 - DNA, 25 bp, Homo sapien
tagtcttctgcacgcagatgagtat

SEQ ID NO: 3223520 - DNA, 25 bp, Homo sapien
tgagtatctccattagtggccacga

SEQ ID NO: 3223521 - DNA, 25 bp, Homo sapien
ctagtcatagtcttctgcacgcaga

SEQ ID NO: 3223522 - DNA, 25 bp, Homo sapien
ctttttgtacaacttgatgaaatgt

SEQ ID NO: 3223523 - DNA, 25 bp, Homo sapien
cagtcttctttttgtacaacttgat

SEQ ID NO: 3223524 - DNA, 25 bp, Homo sapien
tgtacaacttgatgaaatgttccat

SEQ ID NO: 3223525 - DNA, 25 bp, Homo sapien
tttgtacaacttgatgaaatgttcc

SEQ ID NO: 3223526 - DNA, 25 bp, Homo sapien
tgcacagccctatcgtctttcctga

SEQ ID NO: 3223527 - DNA, 25 bp, Homo sapien
tggagtttctgcacagccctatcgt

SEQ ID NO: 3223528 - DNA, 25 bp, Homo sapien
ggagtttctgcacagccctatcgtc

SEQ ID NO: 3223529 - DNA, 25 bp, Homo sapien
ttctgcacagccctatcgtctttcc

SEQ ID NO: 3223530 - DNA, 25 bp, Homo sapien
cttcaaatcagaattttccaacact

SEQ ID NO: 3223531 - DNA, 25 bp, Homo sapien
ttcaaatcagaattttccaacactt

SEQ ID NO: 3223532 - DNA, 25 bp, Homo sapien
tcaaatcagaattttccaacacttt

SEQ ID NO: 3223533 - DNA, 25 bp, Homo sapien
ctccttgccattgaaggacttttta

SEQ ID NO: 3223534 - DNA, 25 bp, Homo sapien
gaattcgagtagagccaccaagaac

SEQ ID NO: 3223535 - DNA, 25 bp, Homo sapien
catgacacctcccacagtttcaata

SEQ ID NO: 3223536 - DNA, 25 bp, Homo sapien
atgacacctcccacagtttcaatac

SEQ ID NO: 3223537 - DNA, 25 bp, Homo sapien
tcatgacacctcccacagtttcaat

SEQ ID NO: 3223538 - DNA, 25 bp, Homo sapien
gcccttgtgacctggcagatgggct

SEQ ID NO: 3223539 - DNA, 25 bp, Homo sapien
tgctgcccctgttgctgaccatgat

SEQ ID NO: 3223540 - DNA, 25 bp, Homo sapien
ggctggagggcattttcccagcggc

SEQ ID NO: 3223541 - DNA, 25 bp, Homo sapien
tgatgcagctctctatggattgccc

SEQ ID NO: 3223542 - DNA, 25 bp, Homo sapien
tcacccctgtgcgtgctgctctgga

SEQ ID NO: 3223543 - DNA, 25 bp, Homo sapien
gcctctacgtctggaagagcgaact

SEQ ID NO: 3223544 - DNA, 25 bp, Homo sapien
cctgctcctacgtgggcagcctcta

SEQ ID NO: 3223545 - DNA, 25 bp, Homo sapien
gctgggtgtcagtgttctcctgcct

SEQ ID NO: 3223546 - DNA, 25 bp, Homo sapien
gtcctggtggtgtccagtctctcac

SEQ ID NO: 3223547 - DNA, 25 bp, Homo sapien
cagggaccatcccgcggtcatcaag

SEQ ID NO: 3223548 - DNA, 25 bp, Homo sapien
cgcggtcatcaagcgacgcttcacc

SEQ ID NO: 3223549 - DNA, 25 bp, Homo sapien
ggagcaggaggaattccagtcagat

SEQ ID NO: 3223550 - DNA, 25 bp, Homo sapien
cagtcagatcaaatgtacccagaag

SEQ ID NO: 3223551 - DNA, 25 bp, Homo sapien
ctgtgggaccccacgaggagcagga

SEQ ID NO: 3223552 - DNA, 25 bp, Homo sapien
ggaggaattccagtcagatcaaatg

SEQ ID NO: 3223553 - DNA, 25 bp, Homo sapien
gctgtcactcgaagaataccattca

SEQ ID NO: 3223554 - DNA, 25 bp, Homo sapien
cagctgtcactcgaagaataccatt

SEQ ID NO: 3223555 - DNA, 25 bp, Homo sapien
tcgaagaataccattcacatctatc

SEQ ID NO: 3223556 - DNA, 25 bp, Homo sapien
tcttcagctgtcactcgaagaatac

SEQ ID NO: 3223557 - DNA, 25 bp, Homo sapien
gcttggtggctttccagccattcaa

SEQ ID NO: 3223558 - DNA, 25 bp, Homo sapien
tccagttccttcttgttagcttcga

SEQ ID NO: 3223559 - DNA, 25 bp, Homo sapien
caatgtcagcagcttggtggctttc

SEQ ID NO: 3223560 - DNA, 25 bp, Homo sapien
gttagcttcgaagtcttcaatgtca

SEQ ID NO: 3223561 - DNA, 25 bp, Homo sapien
ctgccgtatcctcttcgtggctggg

SEQ ID NO: 3223562 - DNA, 25 bp, Homo sapien
gtatcctcttcgtggctgggagagg

SEQ ID NO: 3223563 - DNA, 25 bp, Homo sapien
ccgtatcctcttcgtggctgggaga

SEQ ID NO: 3223564 - DNA, 25 bp, Homo sapien
gccgtatcctcttcgtggctgggag

SEQ ID NO: 3223565 - DNA, 25 bp, Homo sapien
cagtagcagatctgtgtctacaact

SEQ ID NO: 3223566 - DNA, 25 bp, Homo sapien
caatattacagcagtagcagatctg

SEQ ID NO: 3223567 - DNA, 25 bp, Homo sapien
ttacaatattacagcagtagcagat

SEQ ID NO: 3223568 - DNA, 25 bp, Homo sapien
atctgtgtctacaactcatcttttt

SEQ ID NO: 3223569 - DNA, 25 bp, Homo sapien
ccagggtttctgaatcagaggagct

SEQ ID NO: 3223570 - DNA, 25 bp, Homo sapien
tcctgatgcctgtcatagtatgcat

SEQ ID NO: 3223571 - DNA, 25 bp, Homo sapien
ttcctgatgcctgtcatagtatgca

SEQ ID NO: 3223572 - DNA, 25 bp, Homo sapien
tctgaattgtcttttgacaccttca

SEQ ID NO: 3223573 - DNA, 25 bp, Homo sapien
cactgctgagaaaattctcagtact

SEQ ID NO: 3223574 - DNA, 25 bp, Homo sapien
tgtcactgctgagaaaattctcagt

SEQ ID NO: 3223575 - DNA, 25 bp, Homo sapien
ccttcagcattacctttgacattct

SEQ ID NO: 3223576 - DNA, 25 bp, Homo sapien
agcaatgacgtgattttgatacgga

SEQ ID NO: 3223577 - DNA, 25 bp, Homo sapien
gtgattttgatacggaacggatgtg

SEQ ID NO: 3223578 - DNA, 25 bp, Homo sapien
ttcttaaagcaatgacgtgattttg

SEQ ID NO: 3223579 - DNA, 25 bp, Homo sapien
tgacgtgattttgatacggaacgga

SEQ ID NO: 3223580 - DNA, 25 bp, Homo sapien
taatctttaagagccttgatggcag

SEQ ID NO: 3223581 - DNA, 25 bp, Homo sapien
taagagccttgatggcagaatctgt

SEQ ID NO: 3223582 - DNA, 25 bp, Homo sapien
tcttcctctgttaatctttaagagc

SEQ ID NO: 3223583 - DNA, 25 bp, Homo sapien
cctctgttaatctttaagagccttg

SEQ ID NO: 3223584 - DNA, 25 bp, Homo sapien
ttcccaaatggctttgttctgaggc

SEQ ID NO: 3223585 - DNA, 25 bp, Homo sapien
cttcccaaatggctttgttctgagg

SEQ ID NO: 3223586 - DNA, 25 bp, Homo sapien
gcttcccaaatggctttgttctgag

SEQ ID NO: 3223587 - DNA, 25 bp, Homo sapien
tcccaaatggctttgttctgaggct

SEQ ID NO: 3223588 - DNA, 25 bp, Homo sapien
tttttgctactcatcctctccttaa

SEQ ID NO: 3223589 - DNA, 25 bp, Homo sapien
tttgcttcattggtatcttcataga

SEQ ID NO: 3223590 - DNA, 25 bp, Homo sapien
tggtatcttcatagaagttttgaac

SEQ ID NO: 3223591 - DNA, 25 bp, Homo sapien
tgttttcttatgaggactattttaa

SEQ ID NO: 3223592 - DNA, 25 bp, Homo sapien
gactgcatatatctaataggagctg

SEQ ID NO: 3223593 - DNA, 25 bp, Homo sapien
taataggagctgttttacaatgact

SEQ ID NO: 3223594 - DNA, 25 bp, Homo sapien
cctcaggagactgcatatatctaat

SEQ ID NO: 3223595 - DNA, 25 bp, Homo sapien
taggagctgttttacaatgacttgc

SEQ ID NO: 3223596 - DNA, 25 bp, Homo sapien
cagtcctagttcagcagcatttgga

SEQ ID NO: 3223597 - DNA, 25 bp, Homo sapien
tcttcagccatacaagtcaccagag

SEQ ID NO: 3223598 - DNA, 25 bp, Homo sapien
ccatacaagtcaccagaggcagtcc

SEQ ID NO: 3223599 - DNA, 25 bp, Homo sapien
tcaccagaggcagtcctagttcagc

SEQ ID NO: 3223600 - DNA, 25 bp, Homo sapien
gtgtagcagaaatagtagcttgatg

SEQ ID NO: 3223601 - DNA, 25 bp, Homo sapien
gaagtgtagcagaaatagtagcttg

SEQ ID NO: 3223602 - DNA, 25 bp, Homo sapien
ggatttatcttgaagtgtagcagaa

SEQ ID NO: 3223603 - DNA, 25 bp, Homo sapien
ttcagggatttatcttgaagtgtag

SEQ ID NO: 3223604 - DNA, 25 bp, Homo sapien
tgtagtgtttctccaagcatatcca

SEQ ID NO: 3223605 - DNA, 25 bp, Homo sapien
gtagtgtttctccaagcatatccat

SEQ ID NO: 3223606 - DNA, 25 bp, Homo sapien
ctcgggcaatcattgtaggcagcct

SEQ ID NO: 3223607 - DNA, 25 bp, Homo sapien
ctgcttctgaccgtggtccatgcag

SEQ ID NO: 3223608 - DNA, 25 bp, Homo sapien
taggcagcctttgactcagttgtgc

SEQ ID NO: 3223609 - DNA, 25 bp, Homo sapien
caagcttgcgctgagtatctttcac

SEQ ID NO: 3223610 - DNA, 25 bp, Homo sapien
ttccattacttatgagcacaggagt

SEQ ID NO: 3223611 - DNA, 25 bp, Homo sapien
caattccattacttatgagcacagg

SEQ ID NO: 3223612 - DNA, 25 bp, Homo sapien
taggcacaattccattacttatgag

SEQ ID NO: 3223613 - DNA, 25 bp, Homo sapien
ggcacaattccattacttatgagca

SEQ ID NO: 3223614 - DNA, 25 bp, Homo sapien
tcttgtgattcgtagagtgatagca

SEQ ID NO: 3223615 - DNA, 25 bp, Homo sapien
taccgtttttgacatccatagtgca

SEQ ID NO: 3223616 - DNA, 25 bp, Homo sapien
tctgcagtccctcatatagcatcta

SEQ ID NO: 3223617 - DNA, 25 bp, Homo sapien
cagtccttgctaagggcattgtctt

SEQ ID NO: 3223618 - DNA, 25 bp, Homo sapien
attcggaaggtgtaggtatgactga

SEQ ID NO: 3223619 - DNA, 25 bp, Homo sapien
aaatagggaatgcagaaggacttgg

SEQ ID NO: 3223620 - DNA, 25 bp, Homo sapien
ttggacatagaagattcggaaggtg

SEQ ID NO: 3223621 - DNA, 25 bp, Homo sapien
cagaaggacttggttggacatagaa

SEQ ID NO: 3223622 - DNA, 25 bp, Homo sapien
gtcccgtcaatagtaatgctgagtt

SEQ ID NO: 3223623 - DNA, 25 bp, Homo sapien
ctaagccctggtctgaaagtcccgt

SEQ ID NO: 3223624 - DNA, 25 bp, Homo sapien
tgcacctaagccctggtctgaaagt

SEQ ID NO: 3223625 - DNA, 25 bp, Homo sapien
tggtctgaaagtcccgtcaatagta

SEQ ID NO: 3223626 - DNA, 25 bp, Homo sapien
gcacagtttactaactcgctcttcc

SEQ ID NO: 3223627 - DNA, 25 bp, Homo sapien
ttactaactcgctcttcctgtgaat

SEQ ID NO: 3223628 - DNA, 25 bp, Homo sapien
tactaactcgctcttcctgtgaatg

SEQ ID NO: 3223629 - DNA, 25 bp, Homo sapien
tcctgtgaatgcctcccctgctgag

SEQ ID NO: 3223630 - DNA, 25 bp, Homo sapien
taaagttcttgacagtcagtgtctg

SEQ ID NO: 3223631 - DNA, 25 bp, Homo sapien
ataaagttcttgacagtcagtgtct

SEQ ID NO: 3223632 - DNA, 25 bp, Homo sapien
aataaagttcttgacagtcagtgtc

SEQ ID NO: 3223633 - DNA, 25 bp, Homo sapien
tgtctgcctgctcgagtcagcacaa

SEQ ID NO: 3223634 - DNA, 25 bp, Homo sapien
tggaacaaatagaggttttaccaca

SEQ ID NO: 3223635 - DNA, 25 bp, Homo sapien
gctcgagtcagcacaagcagtgaat

SEQ ID NO: 3223636 - DNA, 25 bp, Homo sapien
tagggaatgaaagaaccaactggaa

SEQ ID NO: 3223637 - DNA, 25 bp, Homo sapien
tgaacctccaaccattatctgagtg

SEQ ID NO: 3223638 - DNA, 25 bp, Homo sapien
tctgagactcccctcagtttgatct

SEQ ID NO: 3223639 - DNA, 25 bp, Homo sapien
cattatctgagtgagcaggtctctg

SEQ ID NO: 3223640 - DNA, 25 bp, Homo sapien
tgagactcccctcagtttgatcttt

SEQ ID NO: 3223641 - DNA, 25 bp, Homo sapien
aattcatttcccagtgcgcatgtgt

SEQ ID NO: 3223642 - DNA, 25 bp, Homo sapien
tactttatcaatcacaacaatatct

SEQ ID NO: 3223643 - DNA, 25 bp, Homo sapien
cacaatacttggtcttgggttttag

SEQ ID NO: 3223644 - DNA, 25 bp, Homo sapien
gggacacaggctaccctcttctgat

SEQ ID NO: 3223645 - DNA, 25 bp, Homo sapien
tgcacacacttctatgaaagtacat

SEQ ID NO: 3223646 - DNA, 25 bp, Homo sapien
tttttggaaatcaaccctggctatg

SEQ ID NO: 3223647 - DNA, 25 bp, Homo sapien
agtatcatcaccaaaccttttgcac

SEQ ID NO: 3223648 - DNA, 25 bp, Homo sapien
tctcatcaaaatcagtcaaatatct

SEQ ID NO: 3223649 - DNA, 25 bp, Homo sapien
ccaagctactaaatgccactgggtg

SEQ ID NO: 3223650 - DNA, 25 bp, Homo sapien
aagctactaaatgccactgggtgac

SEQ ID NO: 3223651 - DNA, 25 bp, Homo sapien
ccactgggtgactaggcaagtggtc

SEQ ID NO: 3223652 - DNA, 25 bp, Homo sapien
ggtgactaggcaagtggtcctcctg

SEQ ID NO: 3223653 - DNA, 25 bp, Homo sapien
gaaagcttagacagatgaagttctc

SEQ ID NO: 3223654 - DNA, 25 bp, Homo sapien
gattatttcccactgccattctgta

SEQ ID NO: 3223655 - DNA, 25 bp, Homo sapien
tagcccatccaaatataaaggcagg

SEQ ID NO: 3223656 - DNA, 25 bp, Homo sapien
ctcaggttggctcagatattacttg

SEQ ID NO: 3223657 - DNA, 25 bp, Homo sapien
gagcagagcccttcataaaattaat

SEQ ID NO: 3223658 - DNA, 25 bp, Homo sapien
tgcaatgtgagcagagcccttcata

SEQ ID NO: 3223659 - DNA, 25 bp, Homo sapien
gagcccttcataaaattaatcacat

SEQ ID NO: 3223660 - DNA, 25 bp, Homo sapien
gactacagctgcaatgtgagcagag

SEQ ID NO: 3223661 - DNA, 25 bp, Homo sapien
aaaatatagaacagttcacaatgtg

SEQ ID NO: 3223662 - DNA, 25 bp, Homo sapien
gtatagggttggtggacacagtggg

SEQ ID NO: 3223663 - DNA, 25 bp, Homo sapien
ctctggggtccagtatagggttggt

SEQ ID NO: 3223664 - DNA, 25 bp, Homo sapien
acccagaagctatggagtgaactgc

SEQ ID NO: 3223665 - DNA, 25 bp, Homo sapien
gacaactccacccagaagctatgga

SEQ ID NO: 3223666 - DNA, 25 bp, Homo sapien
cttcagaagatgtgttggaagaggg

SEQ ID NO: 3223667 - DNA, 25 bp, Homo sapien
ttcagaagatgtgttggaagagggt

SEQ ID NO: 3223668 - DNA, 25 bp, Homo sapien
tcagaagatgtgttggaagagggtg

SEQ ID NO: 3223669 - DNA, 25 bp, Homo sapien
taagcaggggttccaagctcaaatg

SEQ ID NO: 3223670 - DNA, 25 bp, Homo sapien
agttgcatgattgattgtaagcagg

SEQ ID NO: 3223671 - DNA, 25 bp, Homo sapien
taagtcagacaaactaaaggactgg

SEQ ID NO: 3223672 - DNA, 25 bp, Homo sapien
acattgtcttccaactgacagcttg

SEQ ID NO: 3223673 - DNA, 25 bp, Homo sapien
tccggagaggcctgcattacaactg

SEQ ID NO: 3223674 - DNA, 25 bp, Homo sapien
caaaatgccatgtttagcaaactcg

SEQ ID NO: 3223675 - DNA, 25 bp, Homo sapien
cagatatccggagaggcctgcatta

SEQ ID NO: 3223676 - DNA, 25 bp, Homo sapien
gtttagcaaactcggtgtatttcag

SEQ ID NO: 3223677 - DNA, 25 bp, Homo sapien
tagtatgatgactcttcaacactcc

SEQ ID NO: 3223678 - DNA, 25 bp, Homo sapien
cttgtagtatgatgactcttcaaca

SEQ ID NO: 3223679 - DNA, 25 bp, Homo sapien
ctccttgttgattacaaactctttg

SEQ ID NO: 3223680 - DNA, 25 bp, Homo sapien
cctcacctccttgttgattacaaac

SEQ ID NO: 3223681 - DNA, 25 bp, Homo sapien
tatcctgaaccataaagctcctttt

SEQ ID NO: 3223682 - DNA, 25 bp, Homo sapien
ctgtcaccttggaggcacaccagaa

SEQ ID NO: 3223683 - DNA, 25 bp, Homo sapien
caccagaaggtacatgattttatcc

SEQ ID NO: 3223684 - DNA, 25 bp, Homo sapien
tgcttgggctcagtctgtcaccttg

SEQ ID NO: 3223685 - DNA, 25 bp, Homo sapien
gttccttttaggtgttctgcaaaca

SEQ ID NO: 3223686 - DNA, 25 bp, Homo sapien
tatgtcccctaagtacagtgttcgc

SEQ ID NO: 3223687 - DNA, 25 bp, Homo sapien
tacagtgttcgcagttctgtgttcc

SEQ ID NO: 3223688 - DNA, 25 bp, Homo sapien
caactgcaatatttccagtgagctg

SEQ ID NO: 3223689 - DNA, 25 bp, Homo sapien
agtggggatggtcatagagtccata

SEQ ID NO: 3223690 - DNA, 25 bp, Homo sapien
ggatggtcatagagtccataataaa

SEQ ID NO: 3223691 - DNA, 25 bp, Homo sapien
agatacggaagaagccttcacaacc

SEQ ID NO: 3223692 - DNA, 25 bp, Homo sapien
tggggatggtcatagagtccataat

SEQ ID NO: 3223693 - DNA, 25 bp, Homo sapien
ccactgctggcaaatgggatgggta

SEQ ID NO: 3223694 - DNA, 25 bp, Homo sapien
acccataggagcaactccactggtg

SEQ ID NO: 3223695 - DNA, 25 bp, Homo sapien
tacttggcttttgcaggtatgacgg

SEQ ID NO: 3223696 - DNA, 25 bp, Homo sapien
tatgacggacattcctgccactgct

SEQ ID NO: 3223697 - DNA, 25 bp, Homo sapien
ctggacttggcctttttattgattc

SEQ ID NO: 3223698 - DNA, 25 bp, Homo sapien
ttggcctttttattgattctgctgg

SEQ ID NO: 3223699 - DNA, 25 bp, Homo sapien
gttagaggcttgaatgatgtgctcc

SEQ ID NO: 3223700 - DNA, 25 bp, Homo sapien
attgattctgctgggttagaggctt

SEQ ID NO: 3223701 - DNA, 25 bp, Homo sapien
gcaccattgcaattccaattcctag

SEQ ID NO: 3223702 - DNA, 25 bp, Homo sapien
ggtgcattgacagaacatcctcgca

SEQ ID NO: 3223703 - DNA, 25 bp, Homo sapien
aaaacacatcgcctccattcgtctg

SEQ ID NO: 3223704 - DNA, 25 bp, Homo sapien
gcaagggggcaccattgcaattcca

SEQ ID NO: 3223705 - DNA, 25 bp, Homo sapien
ccaatccctgctagtcccatgttag

SEQ ID NO: 3223706 - DNA, 25 bp, Homo sapien
aaagtaattgagcttactggccaga

SEQ ID NO: 3223707 - DNA, 25 bp, Homo sapien
caggaatcttggcagacaccgtaag

SEQ ID NO: 3223708 - DNA, 25 bp, Homo sapien
tgtgatatacggctgaattgtaccc

SEQ ID NO: 3223709 - DNA, 25 bp, Homo sapien
tgaacgctaccaggccatgaaaatg

SEQ ID NO: 3223710 - DNA, 25 bp, Homo sapien
tgaaaatgtaggcacttcctgatgc

SEQ ID NO: 3223711 - DNA, 25 bp, Homo sapien
gacttgactaagaggaatctgtacc

SEQ ID NO: 3223712 - DNA, 25 bp, Homo sapien
tggctaggaaggaacccgtgagtct

SEQ ID NO: 3223713 - DNA, 25 bp, Homo sapien
aaatgaatgccatttccaagttggt

SEQ ID NO: 3223714 - DNA, 25 bp, Homo sapien
tccggagtagtgtagatggaagcca

SEQ ID NO: 3223715 - DNA, 25 bp, Homo sapien
tgtcatccggagtagtgtagatgga

SEQ ID NO: 3223716 - DNA, 25 bp, Homo sapien
ccaagttggtgtagggaagctccat

SEQ ID NO: 3223717 - DNA, 25 bp, Homo sapien
tttctgacacatttgcatcatagct

SEQ ID NO: 3223718 - DNA, 25 bp, Homo sapien
caatactctccttgttacttgtgat

SEQ ID NO: 3223719 - DNA, 25 bp, Homo sapien
tcatagctccatacaatactctcct

SEQ ID NO: 3223720 - DNA, 25 bp, Homo sapien
tgacacatttgcatcatagctccat

SEQ ID NO: 3223721 - DNA, 25 bp, Homo sapien
taagtgcttggcagacagtgaacac

SEQ ID NO: 3223722 - DNA, 25 bp, Homo sapien
gctactgccgcgtcactatgtgcta

SEQ ID NO: 3223723 - DNA, 25 bp, Homo sapien
caaagacagggcctagtgtgcaggt

SEQ ID NO: 3223724 - DNA, 25 bp, Homo sapien
gaagcagtggtctgggtaacacaaa

SEQ ID NO: 3223725 - DNA, 25 bp, Homo sapien
attttagtgcatgtgttgccaaagt

SEQ ID NO: 3223726 - DNA, 25 bp, Homo sapien
tttagtgcatgtgttgccaaagtga

SEQ ID NO: 3223727 - DNA, 25 bp, Homo sapien
tagtgcatgtgttgccaaagtgaac

SEQ ID NO: 3223728 - DNA, 25 bp, Homo sapien
agtgcatgtgttgccaaagtgaaca

SEQ ID NO: 3223729 - DNA, 25 bp, Homo sapien
acctgggagaccgatgtttcagtga

SEQ ID NO: 3223730 - DNA, 25 bp, Homo sapien
tgggagaccgatgtttcagtgagcc

SEQ ID NO: 3223731 - DNA, 25 bp, Homo sapien
ttgaacctgggagaccgatgtttca

SEQ ID NO: 3223732 - DNA, 25 bp, Homo sapien
gaacctgggagaccgatgtttcagt

SEQ ID NO: 3223733 - DNA, 25 bp, Homo sapien
tgtaactgtggataagtagttccca

SEQ ID NO: 3223734 - DNA, 25 bp, Homo sapien
tgtcttcttagcgagaaatatcggt

SEQ ID NO: 3223735 - DNA, 25 bp, Homo sapien
tagttcccatggattgcttcctctg

SEQ ID NO: 3223736 - DNA, 25 bp, Homo sapien
aaatatcggtggctatgagatcata

SEQ ID NO: 3223737 - DNA, 25 bp, Homo sapien
tatggctcttaatagatattttgga

SEQ ID NO: 3223738 - DNA, 25 bp, Homo sapien
gcctttcccgagtattgagttcatt

SEQ ID NO: 3223739 - DNA, 25 bp, Homo sapien
tgagtcccagaaatgtgaagccttt

SEQ ID NO: 3223740 - DNA, 25 bp, Homo sapien
taatcaattgcagctagaatggtgt

SEQ ID NO: 3223741 - DNA, 25 bp, Homo sapien
aaattatcatgtgtgtcgcaggacc

SEQ ID NO: 3223742 - DNA, 25 bp, Homo sapien
tattcagcaacgatcctaggcactg

SEQ ID NO: 3223743 - DNA, 25 bp, Homo sapien
aactctgtggcaatggagacctgag

SEQ ID NO: 3223744 - DNA, 25 bp, Homo sapien
tcagatacggaagcaataacacagt

SEQ ID NO: 3223745 - DNA, 25 bp, Homo sapien
gagtgcctgaaatacaaaggtcttc

SEQ ID NO: 3223746 - DNA, 25 bp, Homo sapien
tagcgacccattagctccagcgttg

SEQ ID NO: 3223747 - DNA, 25 bp, Homo sapien
ccagcgttggactctgactgtgtca

SEQ ID NO: 3223748 - DNA, 25 bp, Homo sapien
tctcagtgaacagtatagcgaccca

SEQ ID NO: 3223749 - DNA, 25 bp, Homo sapien
taatatctttttccacaaggactta

SEQ ID NO: 3223750 - DNA, 25 bp, Homo sapien
tatctttttccacaaggacttagag

SEQ ID NO: 3223751 - DNA, 25 bp, Homo sapien
atatctttttccacaaggacttaga

SEQ ID NO: 3223752 - DNA, 25 bp, Homo sapien
aatatctttttccacaaggacttag

SEQ ID NO: 3223753 - DNA, 25 bp, Homo sapien
gatgtcaactagtccctttggaacc

SEQ ID NO: 3223754 - DNA, 25 bp, Homo sapien
tgtgatacatgtgagaccagcccct

SEQ ID NO: 3223755 - DNA, 25 bp, Homo sapien
tacaaaaacgggtgggcagctatgt

SEQ ID NO: 3223756 - DNA, 25 bp, Homo sapien
gtttgtcaacacctaccctaaggca

SEQ ID NO: 3223757 - DNA, 25 bp, Homo sapien
atagttaagtcaattcctaccaact

SEQ ID NO: 3223758 - DNA, 25 bp, Homo sapien
caactttaggtccttctctcctgtt

SEQ ID NO: 3223759 - DNA, 25 bp, Homo sapien
ccaactttaggtccttctctcctgt

SEQ ID NO: 3223760 - DNA, 25 bp, Homo sapien
accaactttaggtccttctctcctg

SEQ ID NO: 3223761 - DNA, 25 bp, Homo sapien
gtgtgtggggaagaacagaagattt

SEQ ID NO: 3223762 - DNA, 25 bp, Homo sapien
cacctgtcctgctgtagggtgtgtg

SEQ ID NO: 3223763 - DNA, 25 bp, Homo sapien
tgtgtggggaagaacagaagatttg

SEQ ID NO: 3223764 - DNA, 25 bp, Homo sapien
tgctgcctgcttcacctgtcctgct

SEQ ID NO: 3223765 - DNA, 25 bp, Homo sapien
tttgtttaatgttggtggtctctct

SEQ ID NO: 3223766 - DNA, 25 bp, Homo sapien
ttgtttaatgttggtggtctctctc

SEQ ID NO: 3223767 - DNA, 25 bp, Homo sapien
atttgtttaatgttggtggtctctc

SEQ ID NO: 3223768 - DNA, 25 bp, Homo sapien
aataaaggttacaattctttgtatg

SEQ ID NO: 3223769 - DNA, 25 bp, Homo sapien
tgttccagtcttgtgaaacccacac

SEQ ID NO: 3223770 - DNA, 25 bp, Homo sapien
ggtctcagccactctctcttgttaa

SEQ ID NO: 3223771 - DNA, 25 bp, Homo sapien
acagtatttgcacctgttcttccca

SEQ ID NO: 3223772 - DNA, 25 bp, Homo sapien
agtcctttgtagtctgtcttttgcc

SEQ ID NO: 3223773 - DNA, 25 bp, Homo sapien
ttgtgggcagttaaagcaatgtccc

SEQ ID NO: 3223774 - DNA, 25 bp, Homo sapien
ccagatattatttggagggaaaata

SEQ ID NO: 3223775 - DNA, 25 bp, Homo sapien
tgggcagttaaagcaatgtcccaga

SEQ ID NO: 3223776 - DNA, 25 bp, Homo sapien
cagttaaagcaatgtcccagatatt

SEQ ID NO: 3223777 - DNA, 25 bp, Homo sapien
ttgactgaagtgattggccaaatgg

SEQ ID NO: 3223778 - DNA, 25 bp, Homo sapien
ccaggctacttgactgaagtgattg

SEQ ID NO: 3223779 - DNA, 25 bp, Homo sapien
tacttgactgaagtgattggccaaa

SEQ ID NO: 3223780 - DNA, 25 bp, Homo sapien
ggctacttgactgaagtgattggcc

SEQ ID NO: 3223781 - DNA, 25 bp, Homo sapien
aaaactccttgaatgaacaaacttg

SEQ ID NO: 3223782 - DNA, 25 bp, Homo sapien
actccttgaatgaacaaacttgttc

SEQ ID NO: 3223783 - DNA, 25 bp, Homo sapien
gcagaaataaaaactccttgaatga

SEQ ID NO: 3223784 - DNA, 25 bp, Homo sapien
gaaataaaaactccttgaatgaaca

SEQ ID NO: 3223785 - DNA, 25 bp, Homo sapien
tcatagccttttcatcaccatagca

SEQ ID NO: 3223786 - DNA, 25 bp, Homo sapien
tcaccatagcatttaatgcgtccct

SEQ ID NO: 3223787 - DNA, 25 bp, Homo sapien
gtgggccataatacattcatcctgg

SEQ ID NO: 3223788 - DNA, 25 bp, Homo sapien
cagtttcttgagcacgtatggaatc

SEQ ID NO: 3223789 - DNA, 25 bp, Homo sapien
caaaagtagagcaatgactctcaat

SEQ ID NO: 3223790 - DNA, 25 bp, Homo sapien
gaattgctgaaatctcattttccta

SEQ ID NO: 3223791 - DNA, 25 bp, Homo sapien
taaaccaaacgatctgtaaatagtc

SEQ ID NO: 3223792 - DNA, 25 bp, Homo sapien
ggtctctgtccgctgataaggagaa

SEQ ID NO: 3223793 - DNA, 25 bp, Homo sapien
ggcaattgtgtttgcgcagttttct

SEQ ID NO: 3223794 - DNA, 25 bp, Homo sapien
caattgtgtttgcgcagttttcttc

SEQ ID NO: 3223795 - DNA, 25 bp, Homo sapien
attgtgtttgcgcagttttcttctc

SEQ ID NO: 3223796 - DNA, 25 bp, Homo sapien
ttgtgtttgcgcagttttcttctca

SEQ ID NO: 3223797 - DNA, 25 bp, Homo sapien
ctcagggaaagggtactcgtgaatg

SEQ ID NO: 3223798 - DNA, 25 bp, Homo sapien
ggtactcgtgaatggagaggcatac

SEQ ID NO: 3223799 - DNA, 25 bp, Homo sapien
gaaagggtactcgtgaatggagagg

SEQ ID NO: 3223800 - DNA, 25 bp, Homo sapien
aagggtactcgtgaatggagaggca

SEQ ID NO: 3223801 - DNA, 25 bp, Homo sapien
taatgccaggcgttaaggactttaa

SEQ ID NO: 3223802 - DNA, 25 bp, Homo sapien
ccagagcttgaatctagtaggtcca

SEQ ID NO: 3223803 - DNA, 25 bp, Homo sapien
agtatgtaactagtgctctgagagc

SEQ ID NO: 3223804 - DNA, 25 bp, Homo sapien
tccatttgacctacagcgggataac

SEQ ID NO: 3223805 - DNA, 25 bp, Homo sapien
tgaacaacatggtagagagcagcta

SEQ ID NO: 3223806 - DNA, 25 bp, Homo sapien
cagcacatatgaaggattggccatg

SEQ ID NO: 3223807 - DNA, 25 bp, Homo sapien
tggccatgtcttccgtaataccaag

SEQ ID NO: 3223808 - DNA, 25 bp, Homo sapien
ccagagaggtaaaggtataagtaca

SEQ ID NO: 3223809 - DNA, 25 bp, Homo sapien
tcttcttctgatagatccagtaaag

SEQ ID NO: 3223810 - DNA, 25 bp, Homo sapien
cacgctgttggcatcatgaagttct

SEQ ID NO: 3223811 - DNA, 25 bp, Homo sapien
ttttttgtgtaggaacttctaagca

SEQ ID NO: 3223812 - DNA, 25 bp, Homo sapien
tctaagcaatcacgctgttggcatc

SEQ ID NO: 3223813 - DNA, 25 bp, Homo sapien
gatttcaggttgagcagtttttaga

SEQ ID NO: 3223814 - DNA, 25 bp, Homo sapien
aaattcttgcactttttaccatgag

SEQ ID NO: 3223815 - DNA, 25 bp, Homo sapien
aaacgatttgggcttcagattggaa

SEQ ID NO: 3223816 - DNA, 25 bp, Homo sapien
ctattgtgcgaagccaaatggtcaa

SEQ ID NO: 3223817 - DNA, 25 bp, Homo sapien
cagtgagacaaaagcgtgccacttc

SEQ ID NO: 3223818 - DNA, 25 bp, Homo sapien
agacaaaagcgtgccacttctctcc

SEQ ID NO: 3223819 - DNA, 25 bp, Homo sapien
aatcccagcctataattgggaggtt

SEQ ID NO: 3223820 - DNA, 25 bp, Homo sapien
ccagcctataattgggaggttgagg

SEQ ID NO: 3223821 - DNA, 25 bp, Homo sapien
aagcctaataggatgatgagcactc

SEQ ID NO: 3223822 - DNA, 25 bp, Homo sapien
gatatcaccctgagtgggacttcat

SEQ ID NO: 3223823 - DNA, 25 bp, Homo sapien
tgtggcactaagctaacaatccttc

SEQ ID NO: 3223824 - DNA, 25 bp, Homo sapien
aatggttccagcctgagttcaagac

SEQ ID NO: 3223825 - DNA, 25 bp, Homo sapien
gccagggagttagcctagatcatgc

SEQ ID NO: 3223826 - DNA, 25 bp, Homo sapien
ccagggagttagcctagatcatgcc

SEQ ID NO: 3223827 - DNA, 25 bp, Homo sapien
gaagacaaactcgacagtgttgtca

SEQ ID NO: 3223828 - DNA, 25 bp, Homo sapien
cagatatgaacttgtggcccagcat

SEQ ID NO: 3223829 - DNA, 25 bp, Homo sapien
gaaagtaccattcatccgcaaagac

SEQ ID NO: 3223830 - DNA, 25 bp, Homo sapien
gcttctactcaaatgcacttgtgga

SEQ ID NO: 3223831 - DNA, 25 bp, Homo sapien
ttcaggacgggaccgaagacttcac

SEQ ID NO: 3223832 - DNA, 25 bp, Homo sapien
tgtgctcactcgttctagacctgtc

SEQ ID NO: 3223833 - DNA, 25 bp, Homo sapien
tagacctgtccctaaacagagggta

SEQ ID NO: 3223834 - DNA, 25 bp, Homo sapien
gattgctgagattttcggcacactc

SEQ ID NO: 3223835 - DNA, 25 bp, Homo sapien
ccttgaaatctgatcaactatcagt

SEQ ID NO: 3223836 - DNA, 25 bp, Homo sapien
agctcaagacccagtacacagtgga

SEQ ID NO: 3223837 - DNA, 25 bp, Homo sapien
gaccttgaaatctgatcaactatca

SEQ ID NO: 3223838 - DNA, 25 bp, Homo sapien
actgccacgaacacttcacagcctg

SEQ ID NO: 3223839 - DNA, 25 bp, Homo sapien
agatgggacagctagcctctgctcg

SEQ ID NO: 3223840 - DNA, 25 bp, Homo sapien
gtggacaaactgcaccttggacata

SEQ ID NO: 3223841 - DNA, 25 bp, Homo sapien
atttcagtcaaactacccagctggg

SEQ ID NO: 3223842 - DNA, 25 bp, Homo sapien
tccttccaggacataatgatgcagg

SEQ ID NO: 3223843 - DNA, 25 bp, Homo sapien
tcaggatctagtattacatctatac

SEQ ID NO: 3223844 - DNA, 25 bp, Homo sapien
ccagaaactggcaagcggagtgcag

SEQ ID NO: 3223845 - DNA, 25 bp, Homo sapien
tgaccttgggtacgagttcctgacc

SEQ ID NO: 3223846 - DNA, 25 bp, Homo sapien
cagtatctcagtgccttagtttcgg

SEQ ID NO: 3223847 - DNA, 25 bp, Homo sapien
gagggctccttgagagtattctgca

SEQ ID NO: 3223848 - DNA, 25 bp, Homo sapien
gaacattgcaaggaacacactccgg

SEQ ID NO: 3223849 - DNA, 25 bp, Homo sapien
tcaacttctgggtgagaccatggag

SEQ ID NO: 3223850 - DNA, 25 bp, Homo sapien
gactatacttgtccaacagcggtgg

SEQ ID NO: 3223851 - DNA, 25 bp, Homo sapien
taacagaccttacgctgaaccgcag

SEQ ID NO: 3223852 - DNA, 25 bp, Homo sapien
ctgcggctgcggcaactcctgctct

SEQ ID NO: 3223853 - DNA, 25 bp, Homo sapien
ggcttcacagggcattttgtgcagg

SEQ ID NO: 3223854 - DNA, 25 bp, Homo sapien
acagggcattttgtgcagggaacga

SEQ ID NO: 3223855 - DNA, 25 bp, Homo sapien
ctctgtagcagggacggtttctgtg

SEQ ID NO: 3223856 - DNA, 25 bp, Homo sapien
gtgtggacgtctgggtggaatcctg

SEQ ID NO: 3223857 - DNA, 25 bp, Homo sapien
cagctgggcttcttgtgtggacgtc

SEQ ID NO: 3223858 - DNA, 25 bp, Homo sapien
cttcttgtgtggacgtctgggtgga

SEQ ID NO: 3223859 - DNA, 25 bp, Homo sapien
ggcttcttgtgtggacgtctgggtg

SEQ ID NO: 3223860 - DNA, 25 bp, Homo sapien
gatttccggatagcgactctagtga

SEQ ID NO: 3223861 - DNA, 25 bp, Homo sapien
tgaccaattctatgtccttaacttc

SEQ ID NO: 3223862 - DNA, 25 bp, Homo sapien
ccccagaaactatgtaggtatccaa

SEQ ID NO: 3223863 - DNA, 25 bp, Homo sapien
aaagcagggctcttgcagacatttg

SEQ ID NO: 3223864 - DNA, 25 bp, Homo sapien
gaaaagttgctttcagatggttaca

SEQ ID NO: 3223865 - DNA, 25 bp, Homo sapien
tacattgttaattccataatggcac

SEQ ID NO: 3223866 - DNA, 25 bp, Homo sapien
gcagttactcctttgagacaccaag

SEQ ID NO: 3223867 - DNA, 25 bp, Homo sapien
ctcctttgagacaccaagaaaagtt

SEQ ID NO: 3223868 - DNA, 25 bp, Homo sapien
tatggactctgacggaaagcctggc

SEQ ID NO: 3223869 - DNA, 25 bp, Homo sapien
cttcgagtgctagctgtctatggac

SEQ ID NO: 3223870 - DNA, 25 bp, Homo sapien
atggtaccctcctcagcggcaggaa

SEQ ID NO: 3223871 - DNA, 25 bp, Homo sapien
acacagggatatggtaccctcctca

SEQ ID NO: 3223872 - DNA, 25 bp, Homo sapien
cttcttctctgattgcattttcagc

SEQ ID NO: 3223873 - DNA, 25 bp, Homo sapien
gcttataagcctgtggagagtttcc

SEQ ID NO: 3223874 - DNA, 25 bp, Homo sapien
tgcaattagcgtctggccaacgacc

SEQ ID NO: 3223875 - DNA, 25 bp, Homo sapien
gccaacgaccggctctgatgaacat

SEQ ID NO: 3223876 - DNA, 25 bp, Homo sapien
tgttcccttattggacagactctgg

SEQ ID NO: 3223877 - DNA, 25 bp, Homo sapien
aggattgctccatgcgcagcctgag

SEQ ID NO: 3223878 - DNA, 25 bp, Homo sapien
gagtgtcgccattttgtccagggtg

SEQ ID NO: 3223879 - DNA, 25 bp, Homo sapien
ggtcttccccaacgcataacgtggc

SEQ ID NO: 3223880 - DNA, 25 bp, Homo sapien
tactccactggctaggtctctgcaa

SEQ ID NO: 3223881 - DNA, 25 bp, Homo sapien
ggacatcttgtaggtcttcccagca

SEQ ID NO: 3223882 - DNA, 25 bp, Homo sapien
gggtgttgctcctgaggttctcatc

SEQ ID NO: 3223883 - DNA, 25 bp, Homo sapien
tctcatcagggcagtgacggaggca

SEQ ID NO: 3223884 - DNA, 25 bp, Homo sapien
gtggcacaactgggtgttgctcctg

SEQ ID NO: 3223885 - DNA, 25 bp, Homo sapien
taatttgtatgagaagactgcaggg

SEQ ID NO: 3223886 - DNA, 25 bp, Homo sapien
cagagccagacgctgactgtgcttc

SEQ ID NO: 3223887 - DNA, 25 bp, Homo sapien
catcaggcggtgatactggtggtca

SEQ ID NO: 3223888 - DNA, 25 bp, Homo sapien
ggtctgcccgaaaacacttctctgt

SEQ ID NO: 3223889 - DNA, 25 bp, Homo sapien
gtggagttggtgatgtaagaccatc

SEQ ID NO: 3223890 - DNA, 25 bp, Homo sapien
ggtgatgtaagaccatctctgggaa

SEQ ID NO: 3223891 - DNA, 25 bp, Homo sapien
gttggtgatgtaagaccatctctgg

SEQ ID NO: 3223892 - DNA, 25 bp, Homo sapien
tgtaagaccatctctgggaaatgtt

SEQ ID NO: 3223893 - DNA, 25 bp, Homo sapien
gacgcaacacagtccctacttcttg

SEQ ID NO: 3223894 - DNA, 25 bp, Homo sapien
gcagagctgtttcttcgtcgatcca

SEQ ID NO: 3223895 - DNA, 25 bp, Homo sapien
tgtttcttcgtcgatccaggtcaga

SEQ ID NO: 3223896 - DNA, 25 bp, Homo sapien
tcgatccaggtcagaagacgcaaca

SEQ ID NO: 3223897 - DNA, 25 bp, Homo sapien
ttcacggtctcacccggaagtcgaa

SEQ ID NO: 3223898 - DNA, 25 bp, Homo sapien
actgtggtacatggcgctgccccgg

SEQ ID NO: 3223899 - DNA, 25 bp, Homo sapien
tggtacatggcgctgccccggtctc

SEQ ID NO: 3223900 - DNA, 25 bp, Homo sapien
ggtctccaacgtcgcgccacacctt

SEQ ID NO: 3223901 - DNA, 25 bp, Homo sapien
gagaagaggacagctgccccgccgc

SEQ ID NO: 3223902 - DNA, 25 bp, Homo sapien
tggcaatttcggtggcgtgacagcc

SEQ ID NO: 3223903 - DNA, 25 bp, Homo sapien
ggccgccggtcagcgtataaggtct

SEQ ID NO: 3223904 - DNA, 25 bp, Homo sapien
gaaaacgattcgcttctcccaggat

SEQ ID NO: 3223905 - DNA, 25 bp, Homo sapien
agcaaagagacactgccatggcggc

SEQ ID NO: 3223906 - DNA, 25 bp, Homo sapien
cataacgattggtttagttttggct

SEQ ID NO: 3223907 - DNA, 25 bp, Homo sapien
ttacacttgctgtttcagatgtcag

SEQ ID NO: 3223908 - DNA, 25 bp, Homo sapien
cagagtttaatctcttcctctaata

SEQ ID NO: 3223909 - DNA, 25 bp, Homo sapien
gactatcttcggtagcattcatgta

SEQ ID NO: 3223910 - DNA, 25 bp, Homo sapien
gaacgattgccactctatgtagtgt

SEQ ID NO: 3223911 - DNA, 25 bp, Homo sapien
catctagtgtgcgtatcatatccta

SEQ ID NO: 3223912 - DNA, 25 bp, Homo sapien
gaggttagaaatcatacccagtgtg

SEQ ID NO: 3223913 - DNA, 25 bp, Homo sapien
tgggtggtgcgagagacctaaattc

SEQ ID NO: 3223914 - DNA, 25 bp, Homo sapien
ggctgggtccaaattatgagtgttg

SEQ ID NO: 3223915 - DNA, 25 bp, Homo sapien
cctctgtgcatatctttgtgtcaaa

SEQ ID NO: 3223916 - DNA, 25 bp, Homo sapien
tctttttataaggactgcagtgata

SEQ ID NO: 3223917 - DNA, 25 bp, Homo sapien
tgtttcctcatataatcttcctctg

SEQ ID NO: 3223918 - DNA, 25 bp, Homo sapien
gaaggattccctatcttggacctga

SEQ ID NO: 3223919 - DNA, 25 bp, Homo sapien
tggaatttgttacggccctggctga

SEQ ID NO: 3223920 - DNA, 25 bp, Homo sapien
tccactgtgtactgggtcttgagct

SEQ ID NO: 3223921 - DNA, 25 bp, Homo sapien
tggactacttgaaagacccagtgac

SEQ ID NO: 3223922 - DNA, 25 bp, Homo sapien
ccgggactcccaatgtttactgcaa

SEQ ID NO: 3223923 - DNA, 25 bp, Homo sapien
gatctggaagagataccgggactcc

SEQ ID NO: 3223924 - DNA, 25 bp, Homo sapien
gcttccacttgtatgggatatctaa

SEQ ID NO: 3223925 - DNA, 25 bp, Homo sapien
cagttgtcacaatacctaagaggtg

SEQ ID NO: 3223926 - DNA, 25 bp, Homo sapien
cacctgtcaggatggctatcaaata

SEQ ID NO: 3223927 - DNA, 25 bp, Homo sapien
acacctgtcaggatggctatcaaat

SEQ ID NO: 3223928 - DNA, 25 bp, Homo sapien
tgctgcattctgaggtccggctctt

SEQ ID NO: 3223929 - DNA, 25 bp, Homo sapien
tgaggtccggctcttctactcaaca

SEQ ID NO: 3223930 - DNA, 25 bp, Homo sapien
gcattctgaggtccggctcttctac

SEQ ID NO: 3223931 - DNA, 25 bp, Homo sapien
tctgaggtccggctcttctactcaa

SEQ ID NO: 3223932 - DNA, 25 bp, Homo sapien
ctgagcatgtcggatggaagcccac

SEQ ID NO: 3223933 - DNA, 25 bp, Homo sapien
tctggtgtctttataggtgttgctg

SEQ ID NO: 3223934 - DNA, 25 bp, Homo sapien
gcccacattgctgaatctggtgtct

SEQ ID NO: 3223935 - DNA, 25 bp, Homo sapien
ggtgttgctgtagccagaaagccag

SEQ ID NO: 3223936 - DNA, 25 bp, Homo sapien
gtgcggccgccattagaatgacctg

SEQ ID NO: 3223937 - DNA, 25 bp, Homo sapien
aggtgcggccgccattagaatgacc

SEQ ID NO: 3223938 - DNA, 25 bp, Homo sapien
ggtgcggccgccattagaatgacct

SEQ ID NO: 3223939 - DNA, 25 bp, Homo sapien
gtaggtgcggccgccattagaatga

SEQ ID NO: 3223940 - DNA, 25 bp, Homo sapien
ggcagggccaggctgtaaatgagct

SEQ ID NO: 3223941 - DNA, 25 bp, Homo sapien
tgggcagggccaggctgtaaatgag

SEQ ID NO: 3223942 - DNA, 25 bp, Homo sapien
gcagggccaggctgtaaatgagctc

SEQ ID NO: 3223943 - DNA, 25 bp, Homo sapien
ctgggcagggccaggctgtaaatga

SEQ ID NO: 3223944 - DNA, 25 bp, Homo sapien
gacccagatttatatgcaccagcag

SEQ ID NO: 3223945 - DNA, 25 bp, Homo sapien
tggattccttcacaagttgccggct

SEQ ID NO: 3223946 - DNA, 25 bp, Homo sapien
tgacacagtgttatagagcagcggg

SEQ ID NO: 3223947 - DNA, 25 bp, Homo sapien
gaggacactcttgcaccagactgag

SEQ ID NO: 3223948 - DNA, 25 bp, Homo sapien
agagcctgagaggcttactagagct

SEQ ID NO: 3223949 - DNA, 25 bp, Homo sapien
agcctgagaggcttactagagcttt

SEQ ID NO: 3223950 - DNA, 25 bp, Homo sapien
tagaagcaggtactgattctgaaat

SEQ ID NO: 3223951 - DNA, 25 bp, Homo sapien
tcttagaagcaggtactgattctga

SEQ ID NO: 3223952 - DNA, 25 bp, Homo sapien
ggcaggtcatagagcagttgggcaa

SEQ ID NO: 3223953 - DNA, 25 bp, Homo sapien
gtggcaggtcatagagcagttgggc

SEQ ID NO: 3223954 - DNA, 25 bp, Homo sapien
ctgtggcaggtcatagagcagttgg

SEQ ID NO: 3223955 - DNA, 25 bp, Homo sapien
aggtcatagagcagttgggcaagta

SEQ ID NO: 3223956 - DNA, 25 bp, Homo sapien
cctgtctgttgaagtcagtcgttga

SEQ ID NO: 3223957 - DNA, 25 bp, Homo sapien
gttgaagtcagtcgttgacgtcctc

SEQ ID NO: 3223958 - DNA, 25 bp, Homo sapien
tctgttgaagtcagtcgttgacgtc

SEQ ID NO: 3223959 - DNA, 25 bp, Homo sapien
aagtcagtcgttgacgtcctctggg

SEQ ID NO: 3223960 - DNA, 25 bp, Homo sapien
gaacgggattgctcaggtaatccag

SEQ ID NO: 3223961 - DNA, 25 bp, Homo sapien
tcctgtagatccagccaagactgtt

SEQ ID NO: 3223962 - DNA, 25 bp, Homo sapien
tgtgttcacattcaatgggaacggg

SEQ ID NO: 3223963 - DNA, 25 bp, Homo sapien
gaatgacagaagttgtgttcacatt

SEQ ID NO: 3223964 - DNA, 25 bp, Homo sapien
cttgtcctgcctgacgtcattgcct

SEQ ID NO: 3223965 - DNA, 25 bp, Homo sapien
catgggtctgagtgcacaggggaca

SEQ ID NO: 3223966 - DNA, 25 bp, Homo sapien
tggtggccttggtggtcatgggtct

SEQ ID NO: 3223967 - DNA, 25 bp, Homo sapien
gcatcttgtcctgcctgacgtcatt

SEQ ID NO: 3223968 - DNA, 25 bp, Homo sapien
ttcagggtctcaaggtaactgtgga

SEQ ID NO: 3223969 - DNA, 25 bp, Homo sapien
tcaaggtaactgtggagcctttccc

SEQ ID NO: 3223970 - DNA, 25 bp, Homo sapien
gggtctcaaggtaactgtggagcct

SEQ ID NO: 3223971 - DNA, 25 bp, Homo sapien
tgatgggaggcagcctcctctatgg

SEQ ID NO: 3223972 - DNA, 25 bp, Homo sapien
gaaaatgcccttatgtttgcaccga

SEQ ID NO: 3223973 - DNA, 25 bp, Homo sapien
caacaaacttcgttaggtgcttcaa

SEQ ID NO: 3223974 - DNA, 25 bp, Homo sapien
gaatgtccgtcttttcctcagctaa

SEQ ID NO: 3223975 - DNA, 25 bp, Homo sapien
cctcagctaatctacagaaagctgc

SEQ ID NO: 3223976 - DNA, 25 bp, Homo sapien
agtttcacatctgccatcacactca

SEQ ID NO: 3223977 - DNA, 25 bp, Homo sapien
tctgccatcacactcatctcggcca

SEQ ID NO: 3223978 - DNA, 25 bp, Homo sapien
tccatcagcagtttcacatctgcca

SEQ ID NO: 3223979 - DNA, 25 bp, Homo sapien
agcagtttcacatctgccatcacac

SEQ ID NO: 3223980 - DNA, 25 bp, Homo sapien
ttctgaagagccgagtactgcaggg

SEQ ID NO: 3223981 - DNA, 25 bp, Homo sapien
tcagagacacgcagatgaggatgtg

SEQ ID NO: 3223982 - DNA, 25 bp, Homo sapien
agtaatgccggccacactcaaatcc

SEQ ID NO: 3223983 - DNA, 25 bp, Homo sapien
gatgtgcactttcaggatccagagt

SEQ ID NO: 3223984 - DNA, 25 bp, Homo sapien
ccagcacatgctctgtcctgacagg

SEQ ID NO: 3223985 - DNA, 25 bp, Homo sapien
catgctctgtcctgacaggggccac

SEQ ID NO: 3223986 - DNA, 25 bp, Homo sapien
cacatgctctgtcctgacaggggcc

SEQ ID NO: 3223987 - DNA, 25 bp, Homo sapien
agctggatagcccagcacatgctct

SEQ ID NO: 3223988 - DNA, 25 bp, Homo sapien
gaatcatgccccatacagaaataag

SEQ ID NO: 3223989 - DNA, 25 bp, Homo sapien
ggttttgaatcatgccccatacaga

SEQ ID NO: 3223990 - DNA, 25 bp, Homo sapien
catacagaaataaggcttcagtact

SEQ ID NO: 3223991 - DNA, 25 bp, Homo sapien
ctaagaggttttgaatcatgcccca

SEQ ID NO: 3223992 - DNA, 25 bp, Homo sapien
atgtgcgtattgagcacattaaaca

SEQ ID NO: 3223993 - DNA, 25 bp, Homo sapien
ccccacaagtgttagcatggcaaaa

SEQ ID NO: 3223994 - DNA, 25 bp, Homo sapien
ggaatgccccacaagtgttagcatg

SEQ ID NO: 3223995 - DNA, 25 bp, Homo sapien
taatgtgcgtattgagcacattaaa

SEQ ID NO: 3223996 - DNA, 25 bp, Homo sapien
acagactccagatgcaattagtctc

SEQ ID NO: 3223997 - DNA, 25 bp, Homo sapien
cacagggtcagatgagcattttcca

SEQ ID NO: 3223998 - DNA, 25 bp, Homo sapien
cagactccagatgcaattagtctct

SEQ ID NO: 3223999 - DNA, 25 bp, Homo sapien
ctggccaatcacagggtcagatgag

SEQ ID NO: 3224000 - DNA, 25 bp, Homo sapien
caataaagtaccttgctcttggagc

SEQ ID NO: 3224001 - DNA, 25 bp, Homo sapien
taaactgggactatcgtcttgtcca

SEQ ID NO: 3224002 - DNA, 25 bp, Homo sapien
taataggttatttgacagagaggct

SEQ ID NO: 3224003 - DNA, 25 bp, Homo sapien
tgaagtactgttcacgtcaggaagg

SEQ ID NO: 3224004 - DNA, 25 bp, Homo sapien
gggcgcagagcggaaaccctcacac

SEQ ID NO: 3224005 - DNA, 25 bp, Homo sapien
tgcaggacccatggaaccccgcggg

SEQ ID NO: 3224006 - DNA, 25 bp, Homo sapien
tcacacaaccctgggcgccttggtt

SEQ ID NO: 3224007 - DNA, 25 bp, Homo sapien
gcgcagagcggaaaccctcacacaa

SEQ ID NO: 3224008 - DNA, 25 bp, Homo sapien
agcagttggaccggcggctcaggcc

SEQ ID NO: 3224009 - DNA, 25 bp, Homo sapien
ctggagcagttggaccggcggctca

SEQ ID NO: 3224010 - DNA, 25 bp, Homo sapien
ttggaccggcggctcaggcctgatg

SEQ ID NO: 3224011 - DNA, 25 bp, Homo sapien
ggagcagttggaccggcggctcagg

SEQ ID NO: 3224012 - DNA, 25 bp, Homo sapien
ccttaaccaatgatggggcaaactg

SEQ ID NO: 3224013 - DNA, 25 bp, Homo sapien
caccttaaccaatgatggggcaaac

SEQ ID NO: 3224014 - DNA, 25 bp, Homo sapien
aatgtagagaataccaccttaacca

SEQ ID NO: 3224015 - DNA, 25 bp, Homo sapien
ttataatgtagagaataccacctta

SEQ ID NO: 3224016 - DNA, 25 bp, Homo sapien
actgaagtcttgtttagtccactgc

SEQ ID NO: 3224017 - DNA, 25 bp, Homo sapien
tgatcaggtttaggtttcactagcc

SEQ ID NO: 3224018 - DNA, 25 bp, Homo sapien
cttgtagattgatcaggtttaggtt

SEQ ID NO: 3224019 - DNA, 25 bp, Homo sapien
taggtttcactagcctagcatgctg

SEQ ID NO: 3224020 - DNA, 25 bp, Homo sapien
ggtaacctccctttgatcagtcctg

SEQ ID NO: 3224021 - DNA, 25 bp, Homo sapien
tgcctccgtagagcgcaaacccagt

SEQ ID NO: 3224022 - DNA, 25 bp, Homo sapien
agtgagaagtggatacccctcccag

SEQ ID NO: 3224023 - DNA, 25 bp, Homo sapien
tgcgaacaaaggtaatgcataaggt

SEQ ID NO: 3224024 - DNA, 25 bp, Homo sapien
gacaggacagggaaaggtatcatct

SEQ ID NO: 3224025 - DNA, 25 bp, Homo sapien
caggtttgactgcacagacttgccc

SEQ ID NO: 3224026 - DNA, 25 bp, Homo sapien
cctgaagctcttgtatggaaagcaa

SEQ ID NO: 3224027 - DNA, 25 bp, Homo sapien
gatacactgaggcaggagcgacaga

SEQ ID NO: 3224028 - DNA, 25 bp, Homo sapien
gttaatctaaatgaaaagagttcag

SEQ ID NO: 3224029 - DNA, 25 bp, Homo sapien
ttgttaatctaaatgaaaagagttc

SEQ ID NO: 3224030 - DNA, 25 bp, Homo sapien
aggttttgatacttgtggtgcatac

SEQ ID NO: 3224031 - DNA, 25 bp, Homo sapien
agagttcagggcattttaggttttg

SEQ ID NO: 3224032 - DNA, 25 bp, Homo sapien
tcccagtaatgtcggccagaactaa

SEQ ID NO: 3224033 - DNA, 25 bp, Homo sapien
tcatgtatcgcccaattgcccagaa

SEQ ID NO: 3224034 - DNA, 25 bp, Homo sapien
gaaataaggccaaacggcttctgtg

SEQ ID NO: 3224035 - DNA, 25 bp, Homo sapien
gaatccgcccagaactgatggctga

SEQ ID NO: 3224036 - DNA, 25 bp, Homo sapien
aaatcgactctggttttcagtggta

SEQ ID NO: 3224037 - DNA, 25 bp, Homo sapien
tgaaacagacccatttaccagttcc

SEQ ID NO: 3224038 - DNA, 25 bp, Homo sapien
cattatgaacatcttatagttgcca

SEQ ID NO: 3224039 - DNA, 25 bp, Homo sapien
aacttaaagagtccagaaatgagat

SEQ ID NO: 3224040 - DNA, 25 bp, Homo sapien
gcctgccgctctctggacggctgcg

SEQ ID NO: 3224041 - DNA, 25 bp, Homo sapien
ccgctctctggacggctgcggcgta

SEQ ID NO: 3224042 - DNA, 25 bp, Homo sapien
tgcggcgtagagtggcaggcccaat

SEQ ID NO: 3224043 - DNA, 25 bp, Homo sapien
cggctgcggcgtagagtggcaggcc

SEQ ID NO: 3224044 - DNA, 25 bp, Homo sapien
acagcactccgtcggtaggtatctc

SEQ ID NO: 3224045 - DNA, 25 bp, Homo sapien
cagggggcacagcactccgtcggta

SEQ ID NO: 3224046 - DNA, 25 bp, Homo sapien
gggcacagcactccgtcggtaggta

SEQ ID NO: 3224047 - DNA, 25 bp, Homo sapien
ctcagctttcttgttggcaccaggg

SEQ ID NO: 3224048 - DNA, 25 bp, Homo sapien
tattcagtgcaaaataatcttctcc

SEQ ID NO: 3224049 - DNA, 25 bp, Homo sapien
aagtttattcagtgcaaaataatct

SEQ ID NO: 3224050 - DNA, 25 bp, Homo sapien
tttggctgtaagtttattcagtgca

SEQ ID NO: 3224051 - DNA, 25 bp, Homo sapien
ttggctgtaagtttattcagtgcaa

SEQ ID NO: 3224052 - DNA, 25 bp, Homo sapien
ctggttagctgaccctggctgtcct

SEQ ID NO: 3224053 - DNA, 25 bp, Homo sapien
gctgaccctggctgtcctccctcat

SEQ ID NO: 3224054 - DNA, 25 bp, Homo sapien
tagctgaccctggctgtcctccctc

SEQ ID NO: 3224055 - DNA, 25 bp, Homo sapien
ggttagctgaccctggctgtcctcc

SEQ ID NO: 3224056 - DNA, 25 bp, Homo sapien
tctgcttggagtccggtcagagctg

SEQ ID NO: 3224057 - DNA, 25 bp, Homo sapien
gttgctcctgaagtgcccctcttga

SEQ ID NO: 3224058 - DNA, 25 bp, Homo sapien
ttgacactggtgacgacagacaggg

SEQ ID NO: 3224059 - DNA, 25 bp, Homo sapien
tgtttctcgcacaaggtggtctctt

SEQ ID NO: 3224060 - DNA, 25 bp, Homo sapien
tctctcagttctaagggttttttgc

SEQ ID NO: 3224061 - DNA, 25 bp, Homo sapien
ctctcagttctaagggttttttgct

SEQ ID NO: 3224062 - DNA, 25 bp, Homo sapien
tggttgaggtgctcaaattcagagg

SEQ ID NO: 3224063 - DNA, 25 bp, Homo sapien
aactgcctgttgctcacggtctaaa

SEQ ID NO: 3224064 - DNA, 25 bp, Homo sapien
actgcctgttgctcacggtctaaaa

SEQ ID NO: 3224065 - DNA, 25 bp, Homo sapien
tgcctgttgctcacggtctaaaaac

SEQ ID NO: 3224066 - DNA, 25 bp, Homo sapien
gaactgcctgttgctcacggtctaa

SEQ ID NO: 3224067 - DNA, 25 bp, Homo sapien
gatcgatgggctactctcattttca

SEQ ID NO: 3224068 - DNA, 25 bp, Homo sapien
gctcactgagctctactaccttact

SEQ ID NO: 3224069 - DNA, 25 bp, Homo sapien
aatgaattgaaaagatcgatgggct

SEQ ID NO: 3224070 - DNA, 25 bp, Homo sapien
gctctactaccttacttaactggct

SEQ ID NO: 3224071 - DNA, 25 bp, Homo sapien
tacatagaaataaggccgaagaggc

SEQ ID NO: 3224072 - DNA, 25 bp, Homo sapien
tgagggtctcctcgcctttgtggga

SEQ ID NO: 3224073 - DNA, 25 bp, Homo sapien
tagtccaggaaaatgccaatggccc

SEQ ID NO: 3224074 - DNA, 25 bp, Homo sapien
aatgcctgccagaatgaaaatacgg

SEQ ID NO: 3224075 - DNA, 25 bp, Homo sapien
acaaaaatattagcaacattagctg

SEQ ID NO: 3224076 - DNA, 25 bp, Homo sapien
atacaaaaatattagcaacattagc

SEQ ID NO: 3224077 - DNA, 25 bp, Homo sapien
gtggtggtgcgcgcctgtaatccca

SEQ ID NO: 3224078 - DNA, 25 bp, Homo sapien
aaaatattagcaacattagctgggt

SEQ ID NO: 3224079 - DNA, 25 bp, Homo sapien
gatgcatgccactattttttagtac

SEQ ID NO: 3224080 - DNA, 25 bp, Homo sapien
tgcatgccactattttttagtacaa

SEQ ID NO: 3224081 - DNA, 25 bp, Homo sapien
gcatgccactattttttagtacaaa

SEQ ID NO: 3224082 - DNA, 25 bp, Homo sapien
atgcatgccactattttttagtaca

SEQ ID NO: 3224083 - DNA, 25 bp, Homo sapien
gtatcagaagtagcaaaacagctga

SEQ ID NO: 3224084 - DNA, 25 bp, Homo sapien
tctggaagagcctataaactttgcc

SEQ ID NO: 3224085 - DNA, 25 bp, Homo sapien
gggtgcctatgttcttatgtaatca

SEQ ID NO: 3224086 - DNA, 25 bp, Homo sapien
aacaccagtggtagatgattaactc

SEQ ID NO: 3224087 - DNA, 25 bp, Homo sapien
aatttttctcaccataggactgagg

SEQ ID NO: 3224088 - DNA, 25 bp, Homo sapien
ggaccatatagcttttatagagaat

SEQ ID NO: 3224089 - DNA, 25 bp, Homo sapien
tcaccaggtgatctactatgcaaat

SEQ ID NO: 3224090 - DNA, 25 bp, Homo sapien
taggactgaggtctcaccaggtgat

SEQ ID NO: 3224091 - DNA, 25 bp, Homo sapien
tagtcttcctacttggaggaggcag

SEQ ID NO: 3224092 - DNA, 25 bp, Homo sapien
ccatatgtagtcttcctacttggag

SEQ ID NO: 3224093 - DNA, 25 bp, Homo sapien
tatgtagtcttcctacttggaggag

SEQ ID NO: 3224094 - DNA, 25 bp, Homo sapien
ttgaatccatatgtagtcttcctac

SEQ ID NO: 3224095 - DNA, 25 bp, Homo sapien
acttggagtgacaacgacgctcggg

SEQ ID NO: 3224096 - DNA, 25 bp, Homo sapien
gaactggcagcttcacgtgatgcgc

SEQ ID NO: 3224097 - DNA, 25 bp, Homo sapien
gacctgtcgctatcatggcctggaa

SEQ ID NO: 3224098 - DNA, 25 bp, Homo sapien
gaggtcccttgccttggctctagag

SEQ ID NO: 3224099 - DNA, 25 bp, Homo sapien
cgacacgttggctccgggctaattt

SEQ ID NO: 3224100 - DNA, 25 bp, Homo sapien
gctccgggctaattttcccagtgga

SEQ ID NO: 3224101 - DNA, 25 bp, Homo sapien
gctccaggcggctgtgggatccgcg

SEQ ID NO: 3224102 - DNA, 25 bp, Homo sapien
tgtgggatccgcgacacgttggctc

SEQ ID NO: 3224103 - DNA, 25 bp, Homo sapien
agccaccgcccacagtccaggtctt

SEQ ID NO: 3224104 - DNA, 25 bp, Homo sapien
caggaaccgaggtggttcaggcggt

SEQ ID NO: 3224105 - DNA, 25 bp, Homo sapien
tggttcaggcggtagccaccgccca

SEQ ID NO: 3224106 - DNA, 25 bp, Homo sapien
gtccaggtcttctgggccggcacac

SEQ ID NO: 3224107 - DNA, 25 bp, Homo sapien
gaggagtagactgggcgcgatggct

SEQ ID NO: 3224108 - DNA, 25 bp, Homo sapien
gaaatgaggagtagactgggcgcga

SEQ ID NO: 3224109 - DNA, 25 bp, Homo sapien
taagaaatgaggagtagactgggcg

SEQ ID NO: 3224110 - DNA, 25 bp, Homo sapien
aatgaggagtagactgggcgcgatg

SEQ ID NO: 3224111 - DNA, 25 bp, Homo sapien
tcaagactgaggaaaccttcactct

SEQ ID NO: 3224112 - DNA, 25 bp, Homo sapien
tgtgtggaccggcatggtttctgat

SEQ ID NO: 3224113 - DNA, 25 bp, Homo sapien
tgatccacgacctgctcaagactga

SEQ ID NO: 3224114 - DNA, 25 bp, Homo sapien
gatgaacaagttcggccagtctccc

SEQ ID NO: 3224115 - DNA, 25 bp, Homo sapien
ttgaatgcttgtgccatggatggga

SEQ ID NO: 3224116 - DNA, 25 bp, Homo sapien
tatgaatccactgctattggtgctc

SEQ ID NO: 3224117 - DNA, 25 bp, Homo sapien
aagtggcaaggctctgacaagaacc

SEQ ID NO: 3224118 - DNA, 25 bp, Homo sapien
catgctcacctcctggaatcagcgt

SEQ ID NO: 3224119 - DNA, 25 bp, Homo sapien
aaagttcacccttaacctgagcgct

SEQ ID NO: 3224120 - DNA, 25 bp, Homo sapien
gcaaagttcacccttaacctgagcg

SEQ ID NO: 3224121 - DNA, 25 bp, Homo sapien
gttcacccttaacctgagcgcttca

SEQ ID NO: 3224122 - DNA, 25 bp, Homo sapien
tgcagcaaagttcacccttaacctg

SEQ ID NO: 3224123 - DNA, 25 bp, Homo sapien
gacagatagcagctcctgtagttac

SEQ ID NO: 3224124 - DNA, 25 bp, Homo sapien
tgacagatagcagctcctgtagtta

SEQ ID NO: 3224125 - DNA, 25 bp, Homo sapien
ctgacagatagcagctcctgtagtt

SEQ ID NO: 3224126 - DNA, 25 bp, Homo sapien
cagatagcagctcctgtagttactg

SEQ ID NO: 3224127 - DNA, 25 bp, Homo sapien
tgtctaatacgtgaacaaaatgtcc

SEQ ID NO: 3224128 - DNA, 25 bp, Homo sapien
atcaccttgtctaatacgtgaacaa

SEQ ID NO: 3224129 - DNA, 25 bp, Homo sapien
caccttgtctaatacgtgaacaaaa

SEQ ID NO: 3224130 - DNA, 25 bp, Homo sapien
ccttgtctaatacgtgaacaaaatg

SEQ ID NO: 3224131 - DNA, 25 bp, Homo sapien
tcctccttcttccacggtcctacca

SEQ ID NO: 3224132 - DNA, 25 bp, Homo sapien
ctccttcttccacggtcctaccaca

SEQ ID NO: 3224133 - DNA, 25 bp, Homo sapien
cttccacggtcctaccacacctcct

SEQ ID NO: 3224134 - DNA, 25 bp, Homo sapien
cttcttccacggtcctaccacacct

SEQ ID NO: 3224135 - DNA, 25 bp, Homo sapien
cgtattcctttaggactaagtgtgc

SEQ ID NO: 3224136 - DNA, 25 bp, Homo sapien
cactgctctcatgtctgtacaagac

SEQ ID NO: 3224137 - DNA, 25 bp, Homo sapien
gcttttagggtagaaatactgttga

SEQ ID NO: 3224138 - DNA, 25 bp, Homo sapien
tccagtatttcctctagccaccaag

SEQ ID NO: 3224139 - DNA, 25 bp, Homo sapien
cagaaatacgtttctggcaatgatg

SEQ ID NO: 3224140 - DNA, 25 bp, Homo sapien
ggcaatgatgtgcaatgaacttggc

SEQ ID NO: 3224141 - DNA, 25 bp, Homo sapien
tgccagaaatacgtttctggcaatg

SEQ ID NO: 3224142 - DNA, 25 bp, Homo sapien
ggccttgccataatactgttctttg

SEQ ID NO: 3224143 - DNA, 25 bp, Homo sapien
ctttgtctacaccatctcccaacat

SEQ ID NO: 3224144 - DNA, 25 bp, Homo sapien
taatacaaggtgtacgtttgacagt

SEQ ID NO: 3224145 - DNA, 25 bp, Homo sapien
ccaggaatccaggatgtatgaagaa

SEQ ID NO: 3224146 - DNA, 25 bp, Homo sapien
tagatatcaagcacacgaaacacgc

SEQ ID NO: 3224147 - DNA, 25 bp, Homo sapien
tgaaataacagtgagcagctttgag

SEQ ID NO: 3224148 - DNA, 25 bp, Homo sapien
gctgctaaggaaggcttactgccaa

SEQ ID NO: 3224149 - DNA, 25 bp, Homo sapien
ggaaggcttactgccaatttgctgt

SEQ ID NO: 3224150 - DNA, 25 bp, Homo sapien
aaggcttactgccaatttgctgtaa

SEQ ID NO: 3224151 - DNA, 25 bp, Homo sapien
taaggaaggcttactgccaatttgc

SEQ ID NO: 3224152 - DNA, 25 bp, Homo sapien
aactctgacttgagcacttaagaaa

SEQ ID NO: 3224153 - DNA, 25 bp, Homo sapien
tctgacttgagcacttaagaaagag

SEQ ID NO: 3224154 - DNA, 25 bp, Homo sapien
gataaactctgacttgagcacttaa

SEQ ID NO: 3224155 - DNA, 25 bp, Homo sapien
taaactctgacttgagcacttaaga

SEQ ID NO: 3224156 - DNA, 25 bp, Homo sapien
ggtaggcataaccaaccagtgtcct

SEQ ID NO: 3224157 - DNA, 25 bp, Homo sapien
ccagtgtccttacaaagggtggcac

SEQ ID NO: 3224158 - DNA, 25 bp, Homo sapien
ttctccgtgcagaaaaagggcggcc

SEQ ID NO: 3224159 - DNA, 25 bp, Homo sapien
gaacgcacggcgtaataatgctcgg

SEQ ID NO: 3224160 - DNA, 25 bp, Homo sapien
gcgctccgtctactgcgcggctccc

SEQ ID NO: 3224161 - DNA, 25 bp, Homo sapien
agccgcgttccatccgccccggagg

SEQ ID NO: 3224162 - DNA, 25 bp, Homo sapien
ggcgccgcgctctcctcaccgcgcg

SEQ ID NO: 3224163 - DNA, 25 bp, Homo sapien
gccgggcgcgctccgtctactgcgc

SEQ ID NO: 3224164 - DNA, 25 bp, Homo sapien
gcttcagaacgcaggcaccgaccaa

SEQ ID NO: 3224165 - DNA, 25 bp, Homo sapien
cctctcgggcttcagaacgcaggca

SEQ ID NO: 3224166 - DNA, 25 bp, Homo sapien
agaacgcaggcaccgaccaacacag

SEQ ID NO: 3224167 - DNA, 25 bp, Homo sapien
tcgggcttcagaacgcaggcaccga

SEQ ID NO: 3224168 - DNA, 25 bp, Homo sapien
cgggaggcagcggcggcgtctccat

SEQ ID NO: 3224169 - DNA, 25 bp, Homo sapien
gcgggaggcagcggcggcgtctcca

SEQ ID NO: 3224170 - DNA, 25 bp, Homo sapien
tagaaactgtcgttccagaatccca

SEQ ID NO: 3224171 - DNA, 25 bp, Homo sapien
actggtgcggtacaatcggcatgga

SEQ ID NO: 3224172 - DNA, 25 bp, Homo sapien
gaagcttgccaaatttgaccggaga

SEQ ID NO: 3224173 - DNA, 25 bp, Homo sapien
caaataaccacaagagactggtgcg

SEQ ID NO: 3224174 - DNA, 25 bp, Homo sapien
taccataaggcactttaagtccagg

SEQ ID NO: 3224175 - DNA, 25 bp, Homo sapien
ggccgtgcttccaaccataccataa

SEQ ID NO: 3224176 - DNA, 25 bp, Homo sapien
taaagctcaggctaaaaatctaact

SEQ ID NO: 3224177 - DNA, 25 bp, Homo sapien
ttaagtccaggtcatctttctttga

SEQ ID NO: 3224178 - DNA, 25 bp, Homo sapien
taaatgccttagaacatggtcaaca

SEQ ID NO: 3224179 - DNA, 25 bp, Homo sapien
tgacgacaagtctctagtaatgtgg

SEQ ID NO: 3224180 - DNA, 25 bp, Homo sapien
ttctgcctatgcatgaccacctctg

SEQ ID NO: 3224181 - DNA, 25 bp, Homo sapien
aaaagatatggttctatctgaggga

SEQ ID NO: 3224182 - DNA, 25 bp, Homo sapien
acaaacagaacacaatcaggcactt

SEQ ID NO: 3224183 - DNA, 25 bp, Homo sapien
caaacagaacacaatcaggcacttt

SEQ ID NO: 3224184 - DNA, 25 bp, Homo sapien
agaacacaatcaggcactttttgtc

SEQ ID NO: 3224185 - DNA, 25 bp, Homo sapien
acagaacacaatcaggcactttttg

SEQ ID NO: 3224186 - DNA, 25 bp, Homo sapien
ctgggcagtgtttttcggtattatc

SEQ ID NO: 3224187 - DNA, 25 bp, Homo sapien
ggcagtgtttttcggtattatcatc

SEQ ID NO: 3224188 - DNA, 25 bp, Homo sapien
actgtcactgggcagtgtttttcgg

SEQ ID NO: 3224189 - DNA, 25 bp, Homo sapien
tttcggtattatcatcttttgaatc

SEQ ID NO: 3224190 - DNA, 25 bp, Homo sapien
cttcttaattcgttcatgactttga

SEQ ID NO: 3224191 - DNA, 25 bp, Homo sapien
ttcttaattcgttcatgactttgaa

SEQ ID NO: 3224192 - DNA, 25 bp, Homo sapien
tccatactgcttgcaaacttgttcc

SEQ ID NO: 3224193 - DNA, 25 bp, Homo sapien
tgtccatactgcttgcaaacttgtt

SEQ ID NO: 3224194 - DNA, 25 bp, Homo sapien
catactgcttgcaaacttgttccca

SEQ ID NO: 3224195 - DNA, 25 bp, Homo sapien
acctgtccatactgcttgcaaactt

SEQ ID NO: 3224196 - DNA, 25 bp, Homo sapien
ctgccacaattgtgacatcgcacag

SEQ ID NO: 3224197 - DNA, 25 bp, Homo sapien
ggcatgaaaataaggactacaggcg

SEQ ID NO: 3224198 - DNA, 25 bp, Homo sapien
acatggcatgaaaataaggactaca

SEQ ID NO: 3224199 - DNA, 25 bp, Homo sapien
atgaaaataaggactacaggcggcc

SEQ ID NO: 3224200 - DNA, 25 bp, Homo sapien
cataaaaggctgaaaactgagcggg

SEQ ID NO: 3224201 - DNA, 25 bp, Homo sapien
gagactagagtgaaccccaagacat

SEQ ID NO: 3224202 - DNA, 25 bp, Homo sapien
tctctctagaaaagtgtccagcagt

SEQ ID NO: 3224203 - DNA, 25 bp, Homo sapien
gactagtctcacttcacgggtattg

SEQ ID NO: 3224204 - DNA, 25 bp, Homo sapien
gagcacaaagccaaacagccagtac

SEQ ID NO: 3224205 - DNA, 25 bp, Homo sapien
ccagtactcagttaagcgtgactta

SEQ ID NO: 3224206 - DNA, 25 bp, Homo sapien
gccccaataatatgcaaagcccttc

SEQ ID NO: 3224207 - DNA, 25 bp, Homo sapien
tacagagccccaataatatgcaaag

SEQ ID NO: 3224208 - DNA, 25 bp, Homo sapien
gagacaaaggccataactgattcac

SEQ ID NO: 3224209 - DNA, 25 bp, Homo sapien
ttgctggatcctgtgaatagttggg

SEQ ID NO: 3224210 - DNA, 25 bp, Homo sapien
tagttggggtataaactgatagtct

SEQ ID NO: 3224211 - DNA, 25 bp, Homo sapien
gacattctggtgattcccacttgga

SEQ ID NO: 3224212 - DNA, 25 bp, Homo sapien
aaaggaataagagtgatgttacagc

SEQ ID NO: 3224213 - DNA, 25 bp, Homo sapien
tccaatgccaatgtagattgataca

SEQ ID NO: 3224214 - DNA, 25 bp, Homo sapien
gattgatacatcttcttgccactca

SEQ ID NO: 3224215 - DNA, 25 bp, Homo sapien
aaggaataagagtgatgttacagca

SEQ ID NO: 3224216 - DNA, 25 bp, Homo sapien
cttttattctaactctctttgctcg

SEQ ID NO: 3224217 - DNA, 25 bp, Homo sapien
tattctaactctctttgctcggctc

SEQ ID NO: 3224218 - DNA, 25 bp, Homo sapien
tctaactctctttgctcggctctca

SEQ ID NO: 3224219 - DNA, 25 bp, Homo sapien
taactctctttgctcggctctcact

SEQ ID NO: 3224220 - DNA, 25 bp, Homo sapien
tctcaagcaggtccatctgaatctc

SEQ ID NO: 3224221 - DNA, 25 bp, Homo sapien
caagcaggtccatctgaatctctgt

SEQ ID NO: 3224222 - DNA, 25 bp, Homo sapien
tcaagcaggtccatctgaatctctg

SEQ ID NO: 3224223 - DNA, 25 bp, Homo sapien
catctcaagcaggtccatctgaatc

SEQ ID NO: 3224224 - DNA, 25 bp, Homo sapien
ccaaaagtctgatcaactctgaagg

SEQ ID NO: 3224225 - DNA, 25 bp, Homo sapien
gacctgcaaagccaagaaatagatt

SEQ ID NO: 3224226 - DNA, 25 bp, Homo sapien
ctgaaggagctaacaaaatagtttc

SEQ ID NO: 3224227 - DNA, 25 bp, Homo sapien
gggcaagcgatgtctaacccccact

SEQ ID NO: 3224228 - DNA, 25 bp, Homo sapien
aaatggtccacattattaaatctcc

SEQ ID NO: 3224229 - DNA, 25 bp, Homo sapien
tggtccacattattaaatctccaca

SEQ ID NO: 3224230 - DNA, 25 bp, Homo sapien
aatggtccacattattaaatctcca

SEQ ID NO: 3224231 - DNA, 25 bp, Homo sapien
atggtccacattattaaatctccac

SEQ ID NO: 3224232 - DNA, 25 bp, Homo sapien
ctatgatactgccattgtacaaagc

SEQ ID NO: 3224233 - DNA, 25 bp, Homo sapien
cattggctatgatactgccattgta

SEQ ID NO: 3224234 - DNA, 25 bp, Homo sapien
tggctatgatactgccattgtacaa

SEQ ID NO: 3224235 - DNA, 25 bp, Homo sapien
aatcatgcctcagataaacctcatt

SEQ ID NO: 3224236 - DNA, 25 bp, Homo sapien
tgaatgtaaagaggccctcgcccct

SEQ ID NO: 3224237 - DNA, 25 bp, Homo sapien
tagtgtatgcactgagggaaggcca

SEQ ID NO: 3224238 - DNA, 25 bp, Homo sapien
tatctctcttgggtacatctgcctc

SEQ ID NO: 3224239 - DNA, 25 bp, Homo sapien
tagttaagcacagaccatcatgcag

SEQ ID NO: 3224240 - DNA, 25 bp, Homo sapien
tcctaagcagttgacagggtgaagc

SEQ ID NO: 3224241 - DNA, 25 bp, Homo sapien
tgcataggtgttggccttgttcaga

SEQ ID NO: 3224242 - DNA, 25 bp, Homo sapien
gcatatcagcaaaagcccggattcc

SEQ ID NO: 3224243 - DNA, 25 bp, Homo sapien
cagaaggtcggtacatgcatgcata

SEQ ID NO: 3224244 - DNA, 25 bp, Homo sapien
cagtttcctcccaaattcagctgag

SEQ ID NO: 3224245 - DNA, 25 bp, Homo sapien
ggaatcatatcaaaaaccaagcagt

SEQ ID NO: 3224246 - DNA, 25 bp, Homo sapien
aatatgacatgactttccagagacc

SEQ ID NO: 3224247 - DNA, 25 bp, Homo sapien
ataaagcccagatccagaaatatga

SEQ ID NO: 3224248 - DNA, 25 bp, Homo sapien
ctaccatgagagaatactataaatt

SEQ ID NO: 3224249 - DNA, 25 bp, Homo sapien
accatgagagaatactataaattcc

SEQ ID NO: 3224250 - DNA, 25 bp, Homo sapien
aaaaaatccacaaaattgatagact

SEQ ID NO: 3224251 - DNA, 25 bp, Homo sapien
catgagagaatactataaattcctc

SEQ ID NO: 3224252 - DNA, 25 bp, Homo sapien
tttgagctctgtggtctgacttttc

SEQ ID NO: 3224253 - DNA, 25 bp, Homo sapien
cttggcctgttttgagctctgtggt

SEQ ID NO: 3224254 - DNA, 25 bp, Homo sapien
tgagctctgtggtctgacttttcat

SEQ ID NO: 3224255 - DNA, 25 bp, Homo sapien
gttttgagctctgtggtctgacttt

SEQ ID NO: 3224256 - DNA, 25 bp, Homo sapien
gattaagctgcacacttgttcgatg

SEQ ID NO: 3224257 - DNA, 25 bp, Homo sapien
ttgagattaagctgcacacttgttc

SEQ ID NO: 3224258 - DNA, 25 bp, Homo sapien
cacttgttcgatgccaagattgaga

SEQ ID NO: 3224259 - DNA, 25 bp, Homo sapien
gctgcacacttgttcgatgccaaga

SEQ ID NO: 3224260 - DNA, 25 bp, Homo sapien
cttctcttctgaagaaatggtaagt

SEQ ID NO: 3224261 - DNA, 25 bp, Homo sapien
cttctgaagaaatggtaagtttgtc

SEQ ID NO: 3224262 - DNA, 25 bp, Homo sapien
ctcttctgaagaaatggtaagtttg

SEQ ID NO: 3224263 - DNA, 25 bp, Homo sapien
tctgaagaaatggtaagtttgtcac

SEQ ID NO: 3224264 - DNA, 25 bp, Homo sapien
cgaggaagcaaaggtaaccgtacat

SEQ ID NO: 3224265 - DNA, 25 bp, Homo sapien
ggttcacccatgctattactgcttc

SEQ ID NO: 3224266 - DNA, 25 bp, Homo sapien
catgttccatcagtcgggccataaa

SEQ ID NO: 3224267 - DNA, 25 bp, Homo sapien
gggccataaactcttgcctcacatc

SEQ ID NO: 3224268 - DNA, 25 bp, Homo sapien
taaacggtatttgggtcagacctca

SEQ ID NO: 3224269 - DNA, 25 bp, Homo sapien
taatgctgaaatgttcctagcggga

SEQ ID NO: 3224270 - DNA, 25 bp, Homo sapien
taccagaagacccatgattacacag

SEQ ID NO: 3224271 - DNA, 25 bp, Homo sapien
tccctcagcttagaaataaagacag

SEQ ID NO: 3224272 - DNA, 25 bp, Homo sapien
ccttcaggtgaagacaatactaata

SEQ ID NO: 3224273 - DNA, 25 bp, Homo sapien
gctatggaatatgatgaactcttcg

SEQ ID NO: 3224274 - DNA, 25 bp, Homo sapien
gtttagataatacatccttcaggtg

SEQ ID NO: 3224275 - DNA, 25 bp, Homo sapien
gataaacttcaatgttagctatgga

SEQ ID NO: 3224276 - DNA, 25 bp, Homo sapien
tctgttggcagcaaatggtacttca

SEQ ID NO: 3224277 - DNA, 25 bp, Homo sapien
cagccgggtccggacactcttcatt

SEQ ID NO: 3224278 - DNA, 25 bp, Homo sapien
tgaggtaatctttgcaagcactgct

SEQ ID NO: 3224279 - DNA, 25 bp, Homo sapien
cattaatatacgctgctctgttggc

SEQ ID NO: 3224280 - DNA, 25 bp, Homo sapien
agccttttgcatgaggtaataacaa

SEQ ID NO: 3224281 - DNA, 25 bp, Homo sapien
cttataagccttttgcatgaggtaa

SEQ ID NO: 3224282 - DNA, 25 bp, Homo sapien
taagccttttgcatgaggtaataac

SEQ ID NO: 3224283 - DNA, 25 bp, Homo sapien
tcacttataagccttttgcatgagg

SEQ ID NO: 3224284 - DNA, 25 bp, Homo sapien
tatttccacgcaatagttcactttt

SEQ ID NO: 3224285 - DNA, 25 bp, Homo sapien
cacgcaatagttcacttttacacat

SEQ ID NO: 3224286 - DNA, 25 bp, Homo sapien
gatttctatttccacgcaatagttc

SEQ ID NO: 3224287 - DNA, 25 bp, Homo sapien
tccacgcaatagttcacttttacac

SEQ ID NO: 3224288 - DNA, 25 bp, Homo sapien
cacactccggatagcctttggtgct

SEQ ID NO: 3224289 - DNA, 25 bp, Homo sapien
ttccacactccggatagcctttggt

SEQ ID NO: 3224290 - DNA, 25 bp, Homo sapien
tagcattccacactccggatagcct

SEQ ID NO: 3224291 - DNA, 25 bp, Homo sapien
tcatagcattccacactccggatag

SEQ ID NO: 3224292 - DNA, 25 bp, Homo sapien
tttcaattttggatcttctagtgga

SEQ ID NO: 3224293 - DNA, 25 bp, Homo sapien
ctcccatagctttcaattttggatc

SEQ ID NO: 3224294 - DNA, 25 bp, Homo sapien
tcaattttggatcttctagtggata

SEQ ID NO: 3224295 - DNA, 25 bp, Homo sapien
aattttggatcttctagtggatatt

SEQ ID NO: 3224296 - DNA, 25 bp, Homo sapien
ggagtacagcatttaatgatcaaca

SEQ ID NO: 3224297 - DNA, 25 bp, Homo sapien
aaaggagtacagcatttaatgatca

SEQ ID NO: 3224298 - DNA, 25 bp, Homo sapien
caaaaggagtacagcatttaatgat

SEQ ID NO: 3224299 - DNA, 25 bp, Homo sapien
ctgcaaaaggagtacagcatttaat

SEQ ID NO: 3224300 - DNA, 25 bp, Homo sapien
cttcacagggtcgtaggaatctaca

SEQ ID NO: 3224301 - DNA, 25 bp, Homo sapien
tcatgttagcaacgctggtccactg

SEQ ID NO: 3224302 - DNA, 25 bp, Homo sapien
aaaacaagtccagccatgtagacca

SEQ ID NO: 3224303 - DNA, 25 bp, Homo sapien
tacagtgcgaactcttaatgagcca

SEQ ID NO: 3224304 - DNA, 25 bp, Homo sapien
cctccttgtattcatgggagctaca

SEQ ID NO: 3224305 - DNA, 25 bp, Homo sapien
gaaaccactcattagactttatgtt

SEQ ID NO: 3224306 - DNA, 25 bp, Homo sapien
tatgttgtatgcttccacagatgac

SEQ ID NO: 3224307 - DNA, 25 bp, Homo sapien
gtattcatgggagctacatgaaacc

SEQ ID NO: 3224308 - DNA, 25 bp, Homo sapien
gtagcattatagcattctactgtgc

SEQ ID NO: 3224309 - DNA, 25 bp, Homo sapien
ggtccactcatttgttgtagcatta

SEQ ID NO: 3224310 - DNA, 25 bp, Homo sapien
ctggtgctcatttctgctatatagg

SEQ ID NO: 3224311 - DNA, 25 bp, Homo sapien
tctactgtgctaagacactgacgtg

SEQ ID NO: 3224312 - DNA, 25 bp, Homo sapien
tcagttgctaaaacaggttcacatg

SEQ ID NO: 3224313 - DNA, 25 bp, Homo sapien
cagttgctaaaacaggttcacatgt

SEQ ID NO: 3224314 - DNA, 25 bp, Homo sapien
agttgctaaaacaggttcacatgta

SEQ ID NO: 3224315 - DNA, 25 bp, Homo sapien
gttgctaaaacaggttcacatgtac

SEQ ID NO: 3224316 - DNA, 25 bp, Homo sapien
tgcacatgttcatatctgcaacctg

SEQ ID NO: 3224317 - DNA, 25 bp, Homo sapien
tgcaacctgtctccatgcgttagtg

SEQ ID NO: 3224318 - DNA, 25 bp, Homo sapien
tactaaagggccatcatgacctcct

SEQ ID NO: 3224319 - DNA, 25 bp, Homo sapien
catatacttcaacactttttcgtac

SEQ ID NO: 3224320 - DNA, 25 bp, Homo sapien
aacttatactagagggcatcaaaga

SEQ ID NO: 3224321 - DNA, 25 bp, Homo sapien
gttgcaatgaacaaagatcccctga

SEQ ID NO: 3224322 - DNA, 25 bp, Homo sapien
aactgctgagtctaatggtaaatgc

SEQ ID NO: 3224323 - DNA, 25 bp, Homo sapien
aagaatcccgaataatgctgcccaa

SEQ ID NO: 3224324 - DNA, 25 bp, Homo sapien
gaattcgttttatattaggatagcc

SEQ ID NO: 3224325 - DNA, 25 bp, Homo sapien
ggtaatccagagacactaatttctt

SEQ ID NO: 3224326 - DNA, 25 bp, Homo sapien
tttatattaggatagccaggcacca

SEQ ID NO: 3224327 - DNA, 25 bp, Homo sapien
tatgagtatcactgtacatgtttag

SEQ ID NO: 3224328 - DNA, 25 bp, Homo sapien
taacagaccattaactgcacaaact

SEQ ID NO: 3224329 - DNA, 25 bp, Homo sapien
ctccctgtgctcatacacgatgaca

SEQ ID NO: 3224330 - DNA, 25 bp, Homo sapien
tactgacgccaagttacaggaacca

SEQ ID NO: 3224331 - DNA, 25 bp, Homo sapien
gacacaactgtccatttatcggttg

SEQ ID NO: 3224332 - DNA, 25 bp, Homo sapien
tacgcatcgctgaagagacaaactg

SEQ ID NO: 3224333 - DNA, 25 bp, Homo sapien
tataatactatctcatggagccaca

SEQ ID NO: 3224334 - DNA, 25 bp, Homo sapien
caatacagcaacaggagacggctat

SEQ ID NO: 3224335 - DNA, 25 bp, Homo sapien
aactttttactgagatacgcatcgc

SEQ ID NO: 3224336 - DNA, 25 bp, Homo sapien
aatggtttatcaataactgtgaccc

SEQ ID NO: 3224337 - DNA, 25 bp, Homo sapien
cataatggtttatcaataactgtga

SEQ ID NO: 3224338 - DNA, 25 bp, Homo sapien
tcataatggtttatcaataactgtg

SEQ ID NO: 3224339 - DNA, 25 bp, Homo sapien
taatggtttatcaataactgtgacc

SEQ ID NO: 3224340 - DNA, 25 bp, Homo sapien
tcattgcagaaaaagcctacacggt

SEQ ID NO: 3224341 - DNA, 25 bp, Homo sapien
ttcagtatctgaggcctataaaggc

SEQ ID NO: 3224342 - DNA, 25 bp, Homo sapien
agtcctgcagtccaagtttcttatg

SEQ ID NO: 3224343 - DNA, 25 bp, Homo sapien
agacgatcgtatcttctgctgagac

SEQ ID NO: 3224344 - DNA, 25 bp, Homo sapien
cacatggctactcacagaaagttct

SEQ ID NO: 3224345 - DNA, 25 bp, Homo sapien
gaaaaaattccgaagaccatgcaaa

SEQ ID NO: 3224346 - DNA, 25 bp, Homo sapien
tgtatctgatcaacacacatggcta

SEQ ID NO: 3224347 - DNA, 25 bp, Homo sapien
tattcaagtgtgttacaccaggtcc

SEQ ID NO: 3224348 - DNA, 25 bp, Homo sapien
taaaaatgcagatttgtgaagtgac

SEQ ID NO: 3224349 - DNA, 25 bp, Homo sapien
aaaatgcagatttgtgaagtgacaa

SEQ ID NO: 3224350 - DNA, 25 bp, Homo sapien
aggtgaggtcactttggcaataaat

SEQ ID NO: 3224351 - DNA, 25 bp, Homo sapien
tgtcttgtaggtgaggtcactttgg

SEQ ID NO: 3224352 - DNA, 25 bp, Homo sapien
cagccattggctccgcggatggagt

SEQ ID NO: 3224353 - DNA, 25 bp, Homo sapien
gacatcgtgtgactcgcgcgaacga

SEQ ID NO: 3224354 - DNA, 25 bp, Homo sapien
tgaggatagtgagacctgcagagcc

SEQ ID NO: 3224355 - DNA, 25 bp, Homo sapien
tcctgtcgttattggcctgcgagag

SEQ ID NO: 3224356 - DNA, 25 bp, Homo sapien
ttagcctaggcccaccttcactcca

SEQ ID NO: 3224357 - DNA, 25 bp, Homo sapien
cagcgcgtgcatccgcacccagaac

SEQ ID NO: 3224358 - DNA, 25 bp, Homo sapien
ctcgatctcacggagcaccgggtgg

SEQ ID NO: 3224359 - DNA, 25 bp, Homo sapien
gccccgtctcgggtaccactgccag

SEQ ID NO: 3224360 - DNA, 25 bp, Homo sapien
tgctgcaactatcttctacgtcctg

SEQ ID NO: 3224361 - DNA, 25 bp, Homo sapien
cttttgtataactttcgccagccta

SEQ ID NO: 3224362 - DNA, 25 bp, Homo sapien
tgtctcccgaagacaacacatttta

SEQ ID NO: 3224363 - DNA, 25 bp, Homo sapien
gaaacatgccctagcctagttccat

SEQ ID NO: 3224364 - DNA, 25 bp, Homo sapien
tgtgattgatgcacacgaggccctt

SEQ ID NO: 3224365 - DNA, 25 bp, Homo sapien
caaagttcaagggagtgcttgccct

SEQ ID NO: 3224366 - DNA, 25 bp, Homo sapien
taagcataaagatcaagccccgctg

SEQ ID NO: 3224367 - DNA, 25 bp, Homo sapien
ggaaatatcgttcccttacaggtga

SEQ ID NO: 3224368 - DNA, 25 bp, Homo sapien
gaaaccttgaagtttagctgtcagc

SEQ ID NO: 3224369 - DNA, 25 bp, Homo sapien
taacacggatttcaccagctccttc

SEQ ID NO: 3224370 - DNA, 25 bp, Homo sapien
gaagtttagctgtcagccagtctct

SEQ ID NO: 3224371 - DNA, 25 bp, Homo sapien
cagtctctgtcctttggcactttaa

SEQ ID NO: 3224372 - DNA, 25 bp, Homo sapien
tcttgggcaacctaaatgactggaa

SEQ ID NO: 3224373 - DNA, 25 bp, Homo sapien
gaatggatatactgttgctaaccga

SEQ ID NO: 3224374 - DNA, 25 bp, Homo sapien
gaagcctgttctggaacaggttgac

SEQ ID NO: 3224375 - DNA, 25 bp, Homo sapien
tacttttcacaaaggagcgagggaa

SEQ ID NO: 3224376 - DNA, 25 bp, Homo sapien
tacacagtgctatgaacttctagag

SEQ ID NO: 3224377 - DNA, 25 bp, Homo sapien
gagaattgaagctggaaagtttccc

SEQ ID NO: 3224378 - DNA, 25 bp, Homo sapien
gaaaggtgctatctaaactgagacc

SEQ ID NO: 3224379 - DNA, 25 bp, Homo sapien
tagtgaggaataacaactagtgtcc

SEQ ID NO: 3224380 - DNA, 25 bp, Homo sapien
taaagcgcttagttagcacaggacc

SEQ ID NO: 3224381 - DNA, 25 bp, Homo sapien
caattattgggcactttctgtgcca

SEQ ID NO: 3224382 - DNA, 25 bp, Homo sapien
ttccaatgagtccaagagacaatgc

SEQ ID NO: 3224383 - DNA, 25 bp, Homo sapien
taccacaccttcgtgaggtaggtat

SEQ ID NO: 3224384 - DNA, 25 bp, Homo sapien
aaaggttgcttaactcacccacaca

SEQ ID NO: 3224385 - DNA, 25 bp, Homo sapien
taaggcaaccatccaatcttaattt

SEQ ID NO: 3224386 - DNA, 25 bp, Homo sapien
aaggagagctctacataaagattgc

SEQ ID NO: 3224387 - DNA, 25 bp, Homo sapien
aactcactgagctacttgcaatctg

SEQ ID NO: 3224388 - DNA, 25 bp, Homo sapien
aaatctctgcagacagccttataat

SEQ ID NO: 3224389 - DNA, 25 bp, Homo sapien
tcaaatctctgcagacagccttata

SEQ ID NO: 3224390 - DNA, 25 bp, Homo sapien
caaatctctgcagacagccttataa

SEQ ID NO: 3224391 - DNA, 25 bp, Homo sapien
aatctctgcagacagccttataatt

SEQ ID NO: 3224392 - DNA, 25 bp, Homo sapien
caacatatagttccaagcattttta

SEQ ID NO: 3224393 - DNA, 25 bp, Homo sapien
attcaacatatagttccaagcattt

SEQ ID NO: 3224394 - DNA, 25 bp, Homo sapien
ttcatgaactataagggatccccat

SEQ ID NO: 3224395 - DNA, 25 bp, Homo sapien
gaaataaagggcttcatgaactata

SEQ ID NO: 3224396 - DNA, 25 bp, Homo sapien
cactgctttagcctcacaaaacaaa

SEQ ID NO: 3224397 - DNA, 25 bp, Homo sapien
ggatatcactgctttagcctcacaa

SEQ ID NO: 3224398 - DNA, 25 bp, Homo sapien
gcacccagcgatagtttacatttat

SEQ ID NO: 3224399 - DNA, 25 bp, Homo sapien
cctgcacccagcgatagtttacatt

SEQ ID NO: 3224400 - DNA, 25 bp, Homo sapien
cagagaatgtgtacagactgccatc

SEQ ID NO: 3224401 - DNA, 25 bp, Homo sapien
gagtactctcctttggccctcctat

SEQ ID NO: 3224402 - DNA, 25 bp, Homo sapien
tgcattatccccagagaggactaat

SEQ ID NO: 3224403 - DNA, 25 bp, Homo sapien
cctttggcctggagtccacagtcat

SEQ ID NO: 3224404 - DNA, 25 bp, Homo sapien
tgaaattttcgcctaactagcaagg

SEQ ID NO: 3224405 - DNA, 25 bp, Homo sapien
tagcaaggatgtgcattagctctcc

SEQ ID NO: 3224406 - DNA, 25 bp, Homo sapien
tagctctgaccaactagactacagc

SEQ ID NO: 3224407 - DNA, 25 bp, Homo sapien
cagggtatctgccttcgaaatgcat

SEQ ID NO: 3224408 - DNA, 25 bp, Homo sapien
agagaagaactttgaaacacttcca

SEQ ID NO: 3224409 - DNA, 25 bp, Homo sapien
gagaagaactttgaaacacttccat

SEQ ID NO: 3224410 - DNA, 25 bp, Homo sapien
ctgcacaaccaaagcatcttgccaa

SEQ ID NO: 3224411 - DNA, 25 bp, Homo sapien
caaccaaagcatcttgccaaaagaa

SEQ ID NO: 3224412 - DNA, 25 bp, Homo sapien
ccaaagcatcttgccaaaagaaaat

SEQ ID NO: 3224413 - DNA, 25 bp, Homo sapien
aaagcatcttgccaaaagaaaatac

SEQ ID NO: 3224414 - DNA, 25 bp, Homo sapien
aaatagtgccaagtatcttcaatga

SEQ ID NO: 3224415 - DNA, 25 bp, Homo sapien
tgaaactcatgatgaactttatgaa

SEQ ID NO: 3224416 - DNA, 25 bp, Homo sapien
tatacttgtatattcttttgtggtg

SEQ ID NO: 3224417 - DNA, 25 bp, Homo sapien
gatgaactttatgaatatacttgta

SEQ ID NO: 3224418 - DNA, 25 bp, Homo sapien
tgtatattcttttgtggtgtaagag

SEQ ID NO: 3224419 - DNA, 25 bp, Homo sapien
agaattaaatataactctcacatac

SEQ ID NO: 3224420 - DNA, 25 bp, Homo sapien
aagaattaaatataactctcacata

SEQ ID NO: 3224421 - DNA, 25 bp, Homo sapien
accaacaattttagaaaaatgctca

SEQ ID NO: 3224422 - DNA, 25 bp, Homo sapien
gtcaccaacaattttagaaaaatgc

SEQ ID NO: 3224423 - DNA, 25 bp, Homo sapien
caccaacaattttagaaaaatgctc

SEQ ID NO: 3224424 - DNA, 25 bp, Homo sapien
cgtcaccaacaattttagaaaaatg

SEQ ID NO: 3224425 - DNA, 25 bp, Homo sapien
tggctaggctatgatatccaactgt

SEQ ID NO: 3224426 - DNA, 25 bp, Homo sapien
ggctaggctatgatatccaactgtt

SEQ ID NO: 3224427 - DNA, 25 bp, Homo sapien
ctaggctatgatatccaactgtttg

SEQ ID NO: 3224428 - DNA, 25 bp, Homo sapien
cttggctaggctatgatatccaact

SEQ ID NO: 3224429 - DNA, 25 bp, Homo sapien
gaatggtcacccatgcccaaagaag

SEQ ID NO: 3224430 - DNA, 25 bp, Homo sapien
ccagttccaagaattagagtctcca

SEQ ID NO: 3224431 - DNA, 25 bp, Homo sapien
gcacgattccaatgaaaaatccagt

SEQ ID NO: 3224432 - DNA, 25 bp, Homo sapien
catgatcacacaaaagcacgattcc

SEQ ID NO: 3224433 - DNA, 25 bp, Homo sapien
caaatggcttcaaaaaagagtccca

SEQ ID NO: 3224434 - DNA, 25 bp, Homo sapien
tattctctgcctaggactagaagca

SEQ ID NO: 3224435 - DNA, 25 bp, Homo sapien
tatcaagtattaaaaagggcaggcc

SEQ ID NO: 3224436 - DNA, 25 bp, Homo sapien
catgagtacagaagtatgtcccaag

SEQ ID NO: 3224437 - DNA, 25 bp, Homo sapien
tggtggaaatcatgatgccgagaac

SEQ ID NO: 3224438 - DNA, 25 bp, Homo sapien
gagtctgttccaaaaattcgatccc

SEQ ID NO: 3224439 - DNA, 25 bp, Homo sapien
tgccgagaaccagcatagaaaggga

SEQ ID NO: 3224440 - DNA, 25 bp, Homo sapien
taggcattatactgagagtctgttc

SEQ ID NO: 3224441 - DNA, 25 bp, Homo sapien
accttcttggaagcttaggaacatg

SEQ ID NO: 3224442 - DNA, 25 bp, Homo sapien
caggcctatggttttactgggagaa

SEQ ID NO: 3224443 - DNA, 25 bp, Homo sapien
cttagtagccagaagacatgcttat

SEQ ID NO: 3224444 - DNA, 25 bp, Homo sapien
aatggaagttcttggtgccggcttt

SEQ ID NO: 3224445 - DNA, 25 bp, Homo sapien
ttctgtactttcaagtttaagaata

SEQ ID NO: 3224446 - DNA, 25 bp, Homo sapien
ctgcccctccctgttaagcgccaaa

SEQ ID NO: 3224447 - DNA, 25 bp, Homo sapien
tctgaactccaaacacaaatgcctg

SEQ ID NO: 3224448 - DNA, 25 bp, Homo sapien
cctccctgttaagcgccaaagaaat

SEQ ID NO: 3224449 - DNA, 25 bp, Homo sapien
ctgttaagcgccaaagaaattctct

SEQ ID NO: 3224450 - DNA, 25 bp, Homo sapien
ttaaagacatggcatagtccagatg

SEQ ID NO: 3224451 - DNA, 25 bp, Homo sapien
ccagatgcctgggaaagctaggaga

SEQ ID NO: 3224452 - DNA, 25 bp, Homo sapien
aaagctaggagaatgggcaccttcc

SEQ ID NO: 3224453 - DNA, 25 bp, Homo sapien
agacatggcatagtccagatgcctg

SEQ ID NO: 3224454 - DNA, 25 bp, Homo sapien
tgtgcttgattacatggtccagaag

SEQ ID NO: 3224455 - DNA, 25 bp, Homo sapien
agttgaattgatgtggatccagcca

SEQ ID NO: 3224456 - DNA, 25 bp, Homo sapien
tattttccactatgaccagtctgtg

SEQ ID NO: 3224457 - DNA, 25 bp, Homo sapien
tgtcactgtaaacacatggcactca

SEQ ID NO: 3224458 - DNA, 25 bp, Homo sapien
accttccccggctgaatgagtgtca

SEQ ID NO: 3224459 - DNA, 25 bp, Homo sapien
tcggaaccacgtcaacagccaaatg

SEQ ID NO: 3224460 - DNA, 25 bp, Homo sapien
gacgacgcaggtgaaatgacagcta

SEQ ID NO: 3224461 - DNA, 25 bp, Homo sapien
tcgggaacgttactgtcattgagac

SEQ ID NO: 3224462 - DNA, 25 bp, Homo sapien
ccgcaggcagccagtgccccgcaca

SEQ ID NO: 3224463 - DNA, 25 bp, Homo sapien
cacagagccagcagcgcgctgcccc

SEQ ID NO: 3224464 - DNA, 25 bp, Homo sapien
agtgccccgcacagagccagcagcg

SEQ ID NO: 3224465 - DNA, 25 bp, Homo sapien
caggcagccagtgccccgcacagag

SEQ ID NO: 3224466 - DNA, 25 bp, Homo sapien
ctgggcttcggcgcccaggagccac

SEQ ID NO: 3224467 - DNA, 25 bp, Homo sapien
cgccccgggctcctgggcttcggcg

SEQ ID NO: 3224468 - DNA, 25 bp, Homo sapien
ccgggctcctgggcttcggcgccca

SEQ ID NO: 3224469 - DNA, 25 bp, Homo sapien
gggctcctgggcttcggcgcccagg

SEQ ID NO: 3224470 - DNA, 25 bp, Homo sapien
ggtagcggtggtactcgaaggagat

SEQ ID NO: 3224471 - DNA, 25 bp, Homo sapien
gggtagcggtggtactcgaaggaga

SEQ ID NO: 3224472 - DNA, 25 bp, Homo sapien
gcggtggtactcgaaggagatgccg

SEQ ID NO: 3224473 - DNA, 25 bp, Homo sapien
tagcggtggtactcgaaggagatgc

SEQ ID NO: 3224474 - DNA, 25 bp, Homo sapien
atggcggtgcactgcagccacacgg

SEQ ID NO: 3224475 - DNA, 25 bp, Homo sapien
tgtcggacagctcgatgaccaggag

SEQ ID NO: 3224476 - DNA, 25 bp, Homo sapien
acacggacacgagcgcctcgcgcag

SEQ ID NO: 3224477 - DNA, 25 bp, Homo sapien
agctgcgccccaccgtgtaaatcct

SEQ ID NO: 3224478 - DNA, 25 bp, Homo sapien
gggtggcctaaggtctggggagatg

SEQ ID NO: 3224479 - DNA, 25 bp, Homo sapien
gaacatcagttggaataaagacccc

SEQ ID NO: 3224480 - DNA, 25 bp, Homo sapien
tactcctaggaaagacgaatacaga

SEQ ID NO: 3224481 - DNA, 25 bp, Homo sapien
gattggcaatatccctaagattccc

SEQ ID NO: 3224482 - DNA, 25 bp, Homo sapien
cagcagcgagtgtacctaatacgta

SEQ ID NO: 3224483 - DNA, 25 bp, Homo sapien
cactgtgttatgcagctattgatgg

SEQ ID NO: 3224484 - DNA, 25 bp, Homo sapien
gggtccccacttcatacagcttgca

SEQ ID NO: 3224485 - DNA, 25 bp, Homo sapien
tgtgtgccaaacatgagctgggtgc

SEQ ID NO: 3224486 - DNA, 25 bp, Homo sapien
tcataatgtatattcaagcccgctg

SEQ ID NO: 3224487 - DNA, 25 bp, Homo sapien
atttaactccgggtcgagtggtctg

SEQ ID NO: 3224488 - DNA, 25 bp, Homo sapien
ggtctgggaacacagaatccattac

SEQ ID NO: 3224489 - DNA, 25 bp, Homo sapien
tgagtactgtatttcgatgatggat

SEQ ID NO: 3224490 - DNA, 25 bp, Homo sapien
gtatttcgatgatggatatacatgc

SEQ ID NO: 3224491 - DNA, 25 bp, Homo sapien
catcaaaattatgtgtccttttcag

SEQ ID NO: 3224492 - DNA, 25 bp, Homo sapien
ttttcatcaaaattatgtgtccttt

SEQ ID NO: 3224493 - DNA, 25 bp, Homo sapien
tcattttcatcaaaattatgtgtcc

SEQ ID NO: 3224494 - DNA, 25 bp, Homo sapien
ttcatcaaaattatgtgtccttttc

SEQ ID NO: 3224495 - DNA, 25 bp, Homo sapien
tgaagttgtaacctatctcagaagg

SEQ ID NO: 3224496 - DNA, 25 bp, Homo sapien
tccagcacaaccaatacttgaagcc

SEQ ID NO: 3224497 - DNA, 25 bp, Homo sapien
ctaacagttttagcatgtttggcta

SEQ ID NO: 3224498 - DNA, 25 bp, Homo sapien
tttggctatgaaattagttctcaag

SEQ ID NO: 3224499 - DNA, 25 bp, Homo sapien
tcattgtgcgaagagcaaatctggt

SEQ ID NO: 3224500 - DNA, 25 bp, Homo sapien
cagggaccaaagacctcattgtgcg

SEQ ID NO: 3224501 - DNA, 25 bp, Homo sapien
tagccccgttaaagatgactccagg

SEQ ID NO: 3224502 - DNA, 25 bp, Homo sapien
catggtgggtcataccaacagttct

SEQ ID NO: 3224503 - DNA, 25 bp, Homo sapien
tcaagtgagtctgagtggtctcaaa

SEQ ID NO: 3224504 - DNA, 25 bp, Homo sapien
tctcaagtgagtctgagtggtctca

SEQ ID NO: 3224505 - DNA, 25 bp, Homo sapien
tggtctcaagtgagtctgagtggtc

SEQ ID NO: 3224506 - DNA, 25 bp, Homo sapien
tattatatttccgtctatcttattg

SEQ ID NO: 3224507 - DNA, 25 bp, Homo sapien
tattatatctgatgtaaataagcaa

SEQ ID NO: 3224508 - DNA, 25 bp, Homo sapien
tttagtatgaatgtacaagataaca

SEQ ID NO: 3224509 - DNA, 25 bp, Homo sapien
tggtacatgctcttatcaatctttt

SEQ ID NO: 3224510 - DNA, 25 bp, Homo sapien
taattgagaccagaacaatattctt

SEQ ID NO: 3224511 - DNA, 25 bp, Homo sapien
tgctcaagttcttatccacatgttg

SEQ ID NO: 3224512 - DNA, 25 bp, Homo sapien
tatgtctcactccaatgctcaagtt

SEQ ID NO: 3224513 - DNA, 25 bp, Homo sapien
tattaaacggcagacctggcagcct

SEQ ID NO: 3224514 - DNA, 25 bp, Homo sapien
caggtggatgtgcaaatccaaagct

SEQ ID NO: 3224515 - DNA, 25 bp, Homo sapien
tgcgagagttaaagctataacactc

SEQ ID NO: 3224516 - DNA, 25 bp, Homo sapien
tggatcaagatttaaatgcgagagt

SEQ ID NO: 3224517 - DNA, 25 bp, Homo sapien
tatgacgcaaagaggacaagaaaca

SEQ ID NO: 3224518 - DNA, 25 bp, Homo sapien
tatcaagaaagtaaggagacaacac

SEQ ID NO: 3224519 - DNA, 25 bp, Homo sapien
agacagttgctgtctgatttcacca

SEQ ID NO: 3224520 - DNA, 25 bp, Homo sapien
caatccattccataatgtgtcctgc

SEQ ID NO: 3224521 - DNA, 25 bp, Homo sapien
tatgtgctcaagagcttagctgctc

SEQ ID NO: 3224522 - DNA, 25 bp, Homo sapien
gctgctctaagcatacttgtggcca

SEQ ID NO: 3224523 - DNA, 25 bp, Homo sapien
gagactgcgtgggtgaaaaatttta

SEQ ID NO: 3224524 - DNA, 25 bp, Homo sapien
cactcccatcactttcccgtattca

SEQ ID NO: 3224525 - DNA, 25 bp, Homo sapien
tcactttcccgtattcagtgtcata

SEQ ID NO: 3224526 - DNA, 25 bp, Homo sapien
aacacagggagactgcgtgggtgaa

SEQ ID NO: 3224527 - DNA, 25 bp, Homo sapien
ttacagggcagtggcctaatcttgg

SEQ ID NO: 3224528 - DNA, 25 bp, Homo sapien
gttacagggcagtggcctaatcttg

SEQ ID NO: 3224529 - DNA, 25 bp, Homo sapien
gctgtgttggttgtcccctcctctg

SEQ ID NO: 3224530 - DNA, 25 bp, Homo sapien
tatctctatatctacgttatccagg

SEQ ID NO: 3224531 - DNA, 25 bp, Homo sapien
gcagaccagtcaatattcatcaaac

SEQ ID NO: 3224532 - DNA, 25 bp, Homo sapien
gacaataaccagctgtccctgcggt

SEQ ID NO: 3224533 - DNA, 25 bp, Homo sapien
tccctgcggtcatgtgaggtggtac

SEQ ID NO: 3224534 - DNA, 25 bp, Homo sapien
tctggagaccggcactattaacatt

SEQ ID NO: 3224535 - DNA, 25 bp, Homo sapien
gaagaaactcacctcgtctgctgcc

SEQ ID NO: 3224536 - DNA, 25 bp, Homo sapien
cagtagatcctacaaatgacagagg

SEQ ID NO: 3224537 - DNA, 25 bp, Homo sapien
taactcactgccatggaatcctgta

SEQ ID NO: 3224538 - DNA, 25 bp, Homo sapien
gctgctccaatctgcactcttccca

SEQ ID NO: 3224539 - DNA, 25 bp, Homo sapien
tgggtcttgaatgtcaatcagtggg

SEQ ID NO: 3224540 - DNA, 25 bp, Homo sapien
tgtatttttggatagctgctccaat

SEQ ID NO: 3224541 - DNA, 25 bp, Homo sapien
aatgtcaatcagtgggctgtactca

SEQ ID NO: 3224542 - DNA, 25 bp, Homo sapien
tactttggtgcattttcactcagaa

SEQ ID NO: 3224543 - DNA, 25 bp, Homo sapien
tgagaagtatatcaccaatattaac

SEQ ID NO: 3224544 - DNA, 25 bp, Homo sapien
ctaagaataagggtgaggatagcac

SEQ ID NO: 3224545 - DNA, 25 bp, Homo sapien
tctagaagacaaactggtgggaata

SEQ ID NO: 3224546 - DNA, 25 bp, Homo sapien
agaagtttccgcctggcacagtagc

SEQ ID NO: 3224547 - DNA, 25 bp, Homo sapien
tattatctttatagtaagcaacagt

SEQ ID NO: 3224548 - DNA, 25 bp, Homo sapien
ctttatagtaagcaacagtggaatt

SEQ ID NO: 3224549 - DNA, 25 bp, Homo sapien
taaaaagaagtttccgcctggcaca

SEQ ID NO: 3224550 - DNA, 25 bp, Homo sapien
caacgtatgggtgctttggactaca

SEQ ID NO: 3224551 - DNA, 25 bp, Homo sapien
ggaatacttccgtcagagccttggg

SEQ ID NO: 3224552 - DNA, 25 bp, Homo sapien
ggataaaccatcatagacagggagt

SEQ ID NO: 3224553 - DNA, 25 bp, Homo sapien
cacccttccctattgctagaggaga

SEQ ID NO: 3224554 - DNA, 25 bp, Homo sapien
gcacgatctcgattcattgcatcct

SEQ ID NO: 3224555 - DNA, 25 bp, Homo sapien
tctcgattcattgcatcctccactt

SEQ ID NO: 3224556 - DNA, 25 bp, Homo sapien
tcaagcaatctactcgtgttggcct

SEQ ID NO: 3224557 - DNA, 25 bp, Homo sapien
gcaatctactcgtgttggcctccca

SEQ ID NO: 3224558 - DNA, 25 bp, Homo sapien
ctccctttggatgtgcctttgtact

SEQ ID NO: 3224559 - DNA, 25 bp, Homo sapien
gtctccgactttgcctccctttgga

SEQ ID NO: 3224560 - DNA, 25 bp, Homo sapien
tgatgcatttgccacccagtgacat

SEQ ID NO: 3224561 - DNA, 25 bp, Homo sapien
tgcctttgtactgatgcatttgcca

SEQ ID NO: 3224562 - DNA, 25 bp, Homo sapien
cagagacaggccgtgatggaaattc

SEQ ID NO: 3224563 - DNA, 25 bp, Homo sapien
ggacgtactatgtcacaggaaagcc

SEQ ID NO: 3224564 - DNA, 25 bp, Homo sapien
caaatggagtcactgggacgtacta

SEQ ID NO: 3224565 - DNA, 25 bp, Homo sapien
ggaaagccaaggtccaccaagtgct

SEQ ID NO: 3224566 - DNA, 25 bp, Homo sapien
taaggttagcgagtctatgaagctg

SEQ ID NO: 3224567 - DNA, 25 bp, Homo sapien
taaaataaggttagcgagtctatga

SEQ ID NO: 3224568 - DNA, 25 bp, Homo sapien
aataaggttagcgagtctatgaagc

SEQ ID NO: 3224569 - DNA, 25 bp, Homo sapien
aaaataaggttagcgagtctatgaa

SEQ ID NO: 3224570 - DNA, 25 bp, Homo sapien
tgttacgggctaaatcgtgcaccct

SEQ ID NO: 3224571 - DNA, 25 bp, Homo sapien
tcagaatgctaggatggccaaggtc

SEQ ID NO: 3224572 - DNA, 25 bp, Homo sapien
aactttgggcaaggttactccatgc

SEQ ID NO: 3224573 - DNA, 25 bp, Homo sapien
aattcatatgttgacgcctggcttg

SEQ ID NO: 3224574 - DNA, 25 bp, Homo sapien
tatgaatatgcaataattcactgga

SEQ ID NO: 3224575 - DNA, 25 bp, Homo sapien
gactgtccacattctagcttatgaa

SEQ ID NO: 3224576 - DNA, 25 bp, Homo sapien
ctggatagtggactgacgatcaaaa

SEQ ID NO: 3224577 - DNA, 25 bp, Homo sapien
aaaatgacacagtaaggcagcccat

SEQ ID NO: 3224578 - DNA, 25 bp, Homo sapien
aacaagccatatttgtctctctggg

SEQ ID NO: 3224579 - DNA, 25 bp, Homo sapien
cttgaacaataacccctagcctcgg

SEQ ID NO: 3224580 - DNA, 25 bp, Homo sapien
tctgatcccagacaaacagggcact

SEQ ID NO: 3224581 - DNA, 25 bp, Homo sapien
tgcaagaggaccaaagtggcatgta

SEQ ID NO: 3224582 - DNA, 25 bp, Homo sapien
gatcattccacaagaggacgttcat

SEQ ID NO: 3224583 - DNA, 25 bp, Homo sapien
agatctagatgatgatgagtctctt

SEQ ID NO: 3224584 - DNA, 25 bp, Homo sapien
agatgatgatgagtctcttgtggga

SEQ ID NO: 3224585 - DNA, 25 bp, Homo sapien
caggagatcattccacaagaggacg

SEQ ID NO: 3224586 - DNA, 25 bp, Homo sapien
gaaagacttgcggtgtcgaacatgc

SEQ ID NO: 3224587 - DNA, 25 bp, Homo sapien
gaacatgcactggtttcggaaggag

SEQ ID NO: 3224588 - DNA, 25 bp, Homo sapien
aggagtaggccacgcagtagaatct

SEQ ID NO: 3224589 - DNA, 25 bp, Homo sapien
tttcggaaggagtaggccacgcagt

SEQ ID NO: 3224590 - DNA, 25 bp, Homo sapien
tcccaatgtatttaaattcaggctc

SEQ ID NO: 3224591 - DNA, 25 bp, Homo sapien
attcccaatgtatttaaattcaggc

SEQ ID NO: 3224592 - DNA, 25 bp, Homo sapien
ccaatgtatttaaattcaggctcac

SEQ ID NO: 3224593 - DNA, 25 bp, Homo sapien
cccaatgtatttaaattcaggctca

SEQ ID NO: 3224594 - DNA, 25 bp, Homo sapien
atgtgaatgcgggtactgtggatca

SEQ ID NO: 3224595 - DNA, 25 bp, Homo sapien
gttgcataggtactgggccaagaaa

SEQ ID NO: 3224596 - DNA, 25 bp, Homo sapien
caattgtctcgttccccttctggta

SEQ ID NO: 3224597 - DNA, 25 bp, Homo sapien
tgtggatcaggttgacaattgtctc

SEQ ID NO: 3224598 - DNA, 25 bp, Homo sapien
caggtctggaaagttccggttcaga

SEQ ID NO: 3224599 - DNA, 25 bp, Homo sapien
acagatgattatttggaccaccttc

SEQ ID NO: 3224600 - DNA, 25 bp, Homo sapien
cggttcagatctattccctgggcat

SEQ ID NO: 3224601 - DNA, 25 bp, Homo sapien
attcacgtacactatcctatccagg

SEQ ID NO: 3224602 - DNA, 25 bp, Homo sapien
caatgaatgacagccttggtctcag

SEQ ID NO: 3224603 - DNA, 25 bp, Homo sapien
tgaatgacagccttggtctcaggag

SEQ ID NO: 3224604 - DNA, 25 bp, Homo sapien
ccaatgaatgacagccttggtctca

SEQ ID NO: 3224605 - DNA, 25 bp, Homo sapien
aatccaatgaatgacagccttggtc

SEQ ID NO: 3224606 - DNA, 25 bp, Homo sapien
cagaaagcacaaaaggaatatccat

SEQ ID NO: 3224607 - DNA, 25 bp, Homo sapien
ggcagaaagcacaaaaggaatatcc

SEQ ID NO: 3224608 - DNA, 25 bp, Homo sapien
aaggtctcctccatggagattggca

SEQ ID NO: 3224609 - DNA, 25 bp, Homo sapien
ctcctccatggagattggcagaaag

SEQ ID NO: 3224610 - DNA, 25 bp, Homo sapien
cactccgcgtctcatcatatggata

SEQ ID NO: 3224611 - DNA, 25 bp, Homo sapien
ctccgcgtctcatcatatggataat

SEQ ID NO: 3224612 - DNA, 25 bp, Homo sapien
cgtctcatcatatggataattggcc

SEQ ID NO: 3224613 - DNA, 25 bp, Homo sapien
ccgcgtctcatcatatggataattg

SEQ ID NO: 3224614 - DNA, 25 bp, Homo sapien
gctttggaaaatggcgtcatctggg

SEQ ID NO: 3224615 - DNA, 25 bp, Homo sapien
gttgaaagaagagtatgcccgggcc

SEQ ID NO: 3224616 - DNA, 25 bp, Homo sapien
gaggagctgtattcgtgagcactac

SEQ ID NO: 3224617 - DNA, 25 bp, Homo sapien
catcattcttgcgacatggtggccg

SEQ ID NO: 3224618 - DNA, 25 bp, Homo sapien
ctaaggtaattgaagtcttgcatcc

SEQ ID NO: 3224619 - DNA, 25 bp, Homo sapien
aaacagttgctgctaaggtaattga

SEQ ID NO: 3224620 - DNA, 25 bp, Homo sapien
aagctccacggtgatctcaaaacag

SEQ ID NO: 3224621 - DNA, 25 bp, Homo sapien
ctaagctccacggtgatctcaaaac

SEQ ID NO: 3224622 - DNA, 25 bp, Homo sapien
tgctcaaggtagctaatgagggagt

SEQ ID NO: 3224623 - DNA, 25 bp, Homo sapien
ctcaaggtagctaatgagggagttt

SEQ ID NO: 3224624 - DNA, 25 bp, Homo sapien
ctgctcaaggtagctaatgagggag

SEQ ID NO: 3224625 - DNA, 25 bp, Homo sapien
gctcaaggtagctaatgagggagtt

SEQ ID NO: 3224626 - DNA, 25 bp, Homo sapien
caacttcaggtgagctgtctagcct

SEQ ID NO: 3224627 - DNA, 25 bp, Homo sapien
tctctggtaaagatccaggcttctg

SEQ ID NO: 3224628 - DNA, 25 bp, Homo sapien
ggccagtgtctacatactatgcagg

SEQ ID NO: 3224629 - DNA, 25 bp, Homo sapien
tattctggcagatggtgagatcccc

SEQ ID NO: 3224630 - DNA, 25 bp, Homo sapien
caaatcctttaactcctcggtgtat

SEQ ID NO: 3224631 - DNA, 25 bp, Homo sapien
tgaaggtctcggacaaatcctttaa

SEQ ID NO: 3224632 - DNA, 25 bp, Homo sapien
gatggtggcattcgcaattgggtta

SEQ ID NO: 3224633 - DNA, 25 bp, Homo sapien
cgcaattgggttaccttgaaggtct

SEQ ID NO: 3224634 - DNA, 25 bp, Homo sapien
taacatcgtggtctattccttccac

SEQ ID NO: 3224635 - DNA, 25 bp, Homo sapien
tgtaacatcgtggtctattccttcc

SEQ ID NO: 3224636 - DNA, 25 bp, Homo sapien
cggatgtaacatcgtggtctattcc

SEQ ID NO: 3224637 - DNA, 25 bp, Homo sapien
gatgtaacatcgtggtctattcctt

SEQ ID NO: 3224638 - DNA, 25 bp, Homo sapien
tattgccagatagcctggagctgag

SEQ ID NO: 3224639 - DNA, 25 bp, Homo sapien
gtttccaggtataagcaatctccag

SEQ ID NO: 3224640 - DNA, 25 bp, Homo sapien
cagggctgtaaggaactgccacttt

SEQ ID NO: 3224641 - DNA, 25 bp, Homo sapien
ggagctgaggctgtaagtttatagt

SEQ ID NO: 3224642 - DNA, 25 bp, Homo sapien
tcatcaggtctagggagaagccaca

SEQ ID NO: 3224643 - DNA, 25 bp, Homo sapien
caaaagcacgtatgtgtccaagcca

SEQ ID NO: 3224644 - DNA, 25 bp, Homo sapien
tggtatcccaaaccacaaggttctg

SEQ ID NO: 3224645 - DNA, 25 bp, Homo sapien
gaagccacacactccgcataaaagg

SEQ ID NO: 3224646 - DNA, 25 bp, Homo sapien
gaaaatgactccagttcaaaatcaa

SEQ ID NO: 3224647 - DNA, 25 bp, Homo sapien
ttcctttcagaaaatgactccagtt

SEQ ID NO: 3224648 - DNA, 25 bp, Homo sapien
attttccaccattccatcaattctt

SEQ ID NO: 3224649 - DNA, 25 bp, Homo sapien
aaaatttaaagtttctgacatcatt

SEQ ID NO: 3224650 - DNA, 25 bp, Homo sapien
gaccacattacatcatactacatta

SEQ ID NO: 3224651 - DNA, 25 bp, Homo sapien
agaccacattacatcatactacatt

SEQ ID NO: 3224652 - DNA, 25 bp, Homo sapien
aagaccacattacatcatactacat

SEQ ID NO: 3224653 - DNA, 25 bp, Homo sapien
gacattgtcaccaattacagtaaaa

SEQ ID NO: 3224654 - DNA, 25 bp, Homo sapien
tagagtgctcacaactccgagctgt

SEQ ID NO: 3224655 - DNA, 25 bp, Homo sapien
tgcatttaagcctaggatggcaaaa

SEQ ID NO: 3224656 - DNA, 25 bp, Homo sapien
catgcttatagttagtcagcacaag

SEQ ID NO: 3224657 - DNA, 25 bp, Homo sapien
tgggccactctacaaccaagagaaa

SEQ ID NO: 3224658 - DNA, 25 bp, Homo sapien
gaatgcaattctgggccactctaca

SEQ ID NO: 3224659 - DNA, 25 bp, Homo sapien
gttaacggactacataatataatag

SEQ ID NO: 3224660 - DNA, 25 bp, Homo sapien
aatataatagtattgctcctatatg

SEQ ID NO: 3224661 - DNA, 25 bp, Homo sapien
gcctgccacaataacatacatagag

SEQ ID NO: 3224662 - DNA, 25 bp, Homo sapien
tttcatcataagaccacaatgccag

SEQ ID NO: 3224663 - DNA, 25 bp, Homo sapien
tgagaagccgccattaagaggatac

SEQ ID NO: 3224664 - DNA, 25 bp, Homo sapien
caatgccagaccaaaaatcttagag

SEQ ID NO: 3224665 - DNA, 25 bp, Homo sapien
gatcctgttctaccactgcacactg

SEQ ID NO: 3224666 - DNA, 25 bp, Homo sapien
atcctgttctaccactgcacactgc

SEQ ID NO: 3224667 - DNA, 25 bp, Homo sapien
tcttgatcctgttctaccactgcac

SEQ ID NO: 3224668 - DNA, 25 bp, Homo sapien
ttgatcctgttctaccactgcacac

SEQ ID NO: 3224669 - DNA, 25 bp, Homo sapien
gatagagttgttctaccccgttagc

SEQ ID NO: 3224670 - DNA, 25 bp, Homo sapien
tagatctgtgaaccaaagagcctat

SEQ ID NO: 3224671 - DNA, 25 bp, Homo sapien
taatactctgtgactgccaactctc

SEQ ID NO: 3224672 - DNA, 25 bp, Homo sapien
tggaggtccttcaacacaaaaacat

SEQ ID NO: 3224673 - DNA, 25 bp, Homo sapien
ttgcctatttcttctactcctgagt

SEQ ID NO: 3224674 - DNA, 25 bp, Homo sapien
taaaacacagatcaatagacagaca

SEQ ID NO: 3224675 - DNA, 25 bp, Homo sapien
tcagaagcagttgaaaaataaaaca

SEQ ID NO: 3224676 - DNA, 25 bp, Homo sapien
actcctgagttcagaagcagttgaa

SEQ ID NO: 3224677 - DNA, 25 bp, Homo sapien
aaatgatggttttcggcctcccaca

SEQ ID NO: 3224678 - DNA, 25 bp, Homo sapien
aaatgccatccagtcctaaccacag

SEQ ID NO: 3224679 - DNA, 25 bp, Homo sapien
cagcaaaaccaggatgagcgtattt

SEQ ID NO: 3224680 - DNA, 25 bp, Homo sapien
cacagaagacaatcgtcatgggaat

SEQ ID NO: 3224681 - DNA, 25 bp, Homo sapien
gggcacgcgatccattcactcaagt

SEQ ID NO: 3224682 - DNA, 25 bp, Homo sapien
taaccaagtttgtgcgggcatgagc

SEQ ID NO: 3224683 - DNA, 25 bp, Homo sapien
aatctgggatgtcaataccgggcac

SEQ ID NO: 3224684 - DNA, 25 bp, Homo sapien
tatccagcttatgcggatgccagct

SEQ ID NO: 3224685 - DNA, 25 bp, Homo sapien
tcacaagggactgcaaacttaggcc

SEQ ID NO: 3224686 - DNA, 25 bp, Homo sapien
tcatggtctgcctctcactagttaa

SEQ ID NO: 3224687 - DNA, 25 bp, Homo sapien
taagcatgctttggtctccccaact

SEQ ID NO: 3224688 - DNA, 25 bp, Homo sapien
catctcagagacactaggtgcctgc

SEQ ID NO: 3224689 - DNA, 25 bp, Homo sapien
gctaccggaagtgatattatgttcc

SEQ ID NO: 3224690 - DNA, 25 bp, Homo sapien
gctactactccaccacaggtatggg

SEQ ID NO: 3224691 - DNA, 25 bp, Homo sapien
gtcttttctaatcactgctaccgga

SEQ ID NO: 3224692 - DNA, 25 bp, Homo sapien
ccatgataaacacccatagatgtaa

SEQ ID NO: 3224693 - DNA, 25 bp, Homo sapien
ttctccagcagtatccagccttatc

SEQ ID NO: 3224694 - DNA, 25 bp, Homo sapien
gcagtatccagccttatccagacct

SEQ ID NO: 3224695 - DNA, 25 bp, Homo sapien
tgactgctctcgctttgttctcagc

SEQ ID NO: 3224696 - DNA, 25 bp, Homo sapien
gagggtgtatgcagccagtttgact

SEQ ID NO: 3224697 - DNA, 25 bp, Homo sapien
aatctttcaccatcaagcatctcat

SEQ ID NO: 3224698 - DNA, 25 bp, Homo sapien
tctcattccatgcaaagtctgtagg

SEQ ID NO: 3224699 - DNA, 25 bp, Homo sapien
aagtctgtagggactcgagagccag

SEQ ID NO: 3224700 - DNA, 25 bp, Homo sapien
tccatgcaaagtctgtagggactcg

SEQ ID NO: 3224701 - DNA, 25 bp, Homo sapien
ttccaccagataaagtcattgttac

SEQ ID NO: 3224702 - DNA, 25 bp, Homo sapien
cttccaccagataaagtcattgtta

SEQ ID NO: 3224703 - DNA, 25 bp, Homo sapien
cttactcacaaacacccgcatgaga

SEQ ID NO: 3224704 - DNA, 25 bp, Homo sapien
caaatatttactgatggcagccaca

SEQ ID NO: 3224705 - DNA, 25 bp, Homo sapien
acaaacacccgcatgagagccctgt

SEQ ID NO: 3224706 - DNA, 25 bp, Homo sapien
aacacccgcatgagagccctgtcat

SEQ ID NO: 3224707 - DNA, 25 bp, Homo sapien
tgcaagtgactcgagcctgaggctg

SEQ ID NO: 3224708 - DNA, 25 bp, Homo sapien
tgctgatgctatctggaccaggagg

SEQ ID NO: 3224709 - DNA, 25 bp, Homo sapien
tgagattctaaggtaaccatgagag

SEQ ID NO: 3224710 - DNA, 25 bp, Homo sapien
gagtggtattctggtcatgggtaca

SEQ ID NO: 3224711 - DNA, 25 bp, Homo sapien
cctctctggtaatggctatgggaca

SEQ ID NO: 3224712 - DNA, 25 bp, Homo sapien
taatggctatgggacaagttgcctg

SEQ ID NO: 3224713 - DNA, 25 bp, Homo sapien
ccttcctagagcctctctggtaatg

SEQ ID NO: 3224714 - DNA, 25 bp, Homo sapien
tatgggacaagttgcctggcccctg

SEQ ID NO: 3224715 - DNA, 25 bp, Homo sapien
gtatttgtcctttatctacatgttg

SEQ ID NO: 3224716 - DNA, 25 bp, Homo sapien
tgttcaccaacctgcttcaagggag

SEQ ID NO: 3224717 - DNA, 25 bp, Homo sapien
cttgtggcaatgacggttgtgttca

SEQ ID NO: 3224718 - DNA, 25 bp, Homo sapien
tttatctacatgttgatgctgtctc

SEQ ID NO: 3224719 - DNA, 25 bp, Homo sapien
gatggtcctggggatatccacaagt

SEQ ID NO: 3224720 - DNA, 25 bp, Homo sapien
cagaattagttcactatgagctgta

SEQ ID NO: 3224721 - DNA, 25 bp, Homo sapien
tggggatatccacaagtcacttttc

SEQ ID NO: 3224722 - DNA, 25 bp, Homo sapien
tctccaatcctcatacagaattagt

SEQ ID NO: 3224723 - DNA, 25 bp, Homo sapien
ctggttcgttttccagcatccattt

SEQ ID NO: 3224724 - DNA, 25 bp, Homo sapien
ggttcgttttccagcatccattttg

SEQ ID NO: 3224725 - DNA, 25 bp, Homo sapien
cgttttccagcatccattttgaagg

SEQ ID NO: 3224726 - DNA, 25 bp, Homo sapien
gttcgttttccagcatccattttga

SEQ ID NO: 3224727 - DNA, 25 bp, Homo sapien
attgccatacaaactcctaaatccc

SEQ ID NO: 3224728 - DNA, 25 bp, Homo sapien
ttgccatacaaactcctaaatccca

SEQ ID NO: 3224729 - DNA, 25 bp, Homo sapien
tgccatacaaactcctaaatcccac

SEQ ID NO: 3224730 - DNA, 25 bp, Homo sapien
cagtactcatgttgtaaaaggatac

SEQ ID NO: 3224731 - DNA, 25 bp, Homo sapien
tcagagtccagaaacactcccacaa

SEQ ID NO: 3224732 - DNA, 25 bp, Homo sapien
ggcatagtccgaggttccagaatcc

SEQ ID NO: 3224733 - DNA, 25 bp, Homo sapien
gatgtggtagccagtactcatgttg

SEQ ID NO: 3224734 - DNA, 25 bp, Homo sapien
gaagatcccactggaaattgctagg

SEQ ID NO: 3224735 - DNA, 25 bp, Homo sapien
gcacacggcagttgtttaatgaagc

SEQ ID NO: 3224736 - DNA, 25 bp, Homo sapien
gacatctctgacaacaaataccagg

SEQ ID NO: 3224737 - DNA, 25 bp, Homo sapien
catgggcctgcggagagattacttc

SEQ ID NO: 3224738 - DNA, 25 bp, Homo sapien
atcttggatgagaaacttctctgga

SEQ ID NO: 3224739 - DNA, 25 bp, Homo sapien
ctttttctatcaggactaatcgatc

SEQ ID NO: 3224740 - DNA, 25 bp, Homo sapien
tcaggactaatcgatcctaagatcc

SEQ ID NO: 3224741 - DNA, 25 bp, Homo sapien
tttctatcaggactaatcgatccta

SEQ ID NO: 3224742 - DNA, 25 bp, Homo sapien
tctatcaggactaatcgatcctaag

SEQ ID NO: 3224743 - DNA, 25 bp, Homo sapien
gaataaagatgaaagaagctctatt

SEQ ID NO: 3224744 - DNA, 25 bp, Homo sapien
gaagcattatgcaatggaatgccgc

SEQ ID NO: 3224745 - DNA, 25 bp, Homo sapien
gaggtgcccttagttgacatcttga

SEQ ID NO: 3224746 - DNA, 25 bp, Homo sapien
taaggtctcgacctgttgagtcagt

SEQ ID NO: 3224747 - DNA, 25 bp, Homo sapien
aatgccgcatttccttaaggtctcg

SEQ ID NO: 3224748 - DNA, 25 bp, Homo sapien
aggcagtctccttgtaccagtctct

SEQ ID NO: 3224749 - DNA, 25 bp, Homo sapien
cgaggcagtctccttgtaccagtct

SEQ ID NO: 3224750 - DNA, 25 bp, Homo sapien
gaggcagtctccttgtaccagtctc

SEQ ID NO: 3224751 - DNA, 25 bp, Homo sapien
gcagtctccttgtaccagtctctca

SEQ ID NO: 3224752 - DNA, 25 bp, Homo sapien
ctgctcttgcgctctctgcttccac

SEQ ID NO: 3224753 - DNA, 25 bp, Homo sapien
aaggattgctttgcggcttagggac

SEQ ID NO: 3224754 - DNA, 25 bp, Homo sapien
ccacttgtgggtcccagcagaaatg

SEQ ID NO: 3224755 - DNA, 25 bp, Homo sapien
tgcttccacttgtgggtcccagcag

SEQ ID NO: 3224756 - DNA, 25 bp, Homo sapien
gggactgcctactggaaagcctact

SEQ ID NO: 3224757 - DNA, 25 bp, Homo sapien
gaccatctttggtcctgtatttgga

SEQ ID NO: 3224758 - DNA, 25 bp, Homo sapien
caggaaggatttagaccatctttgg

SEQ ID NO: 3224759 - DNA, 25 bp, Homo sapien
ttcattattgggactgcctactgga

SEQ ID NO: 3224760 - DNA, 25 bp, Homo sapien
caaagcagatgttcgctaggagcat

SEQ ID NO: 3224761 - DNA, 25 bp, Homo sapien
ccaaagcagatgttcgctaggagca

SEQ ID NO: 3224762 - DNA, 25 bp, Homo sapien
aaagcagatgttcgctaggagcatt

SEQ ID NO: 3224763 - DNA, 25 bp, Homo sapien
agcagatgttcgctaggagcatttt

SEQ ID NO: 3224764 - DNA, 25 bp, Homo sapien
taattctgagaaacacgatatgcgt

SEQ ID NO: 3224765 - DNA, 25 bp, Homo sapien
ggccttaatcatttgtgtcaacaca

SEQ ID NO: 3224766 - DNA, 25 bp, Homo sapien
ggcatgagtatttttaagcgtctga

SEQ ID NO: 3224767 - DNA, 25 bp, Homo sapien
gatatgcgttctgacaattttgtgc

SEQ ID NO: 3224768 - DNA, 25 bp, Homo sapien
gaagcctttttgcagataatcccct

SEQ ID NO: 3224769 - DNA, 25 bp, Homo sapien
ttgaagcctttttgcagataatccc

SEQ ID NO: 3224770 - DNA, 25 bp, Homo sapien
gcctttttgcagataatcccctttc

SEQ ID NO: 3224771 - DNA, 25 bp, Homo sapien
ttcttgaagcctttttgcagataat

SEQ ID NO: 3224772 - DNA, 25 bp, Homo sapien
gacctggatagaatttcccataaga

SEQ ID NO: 3224773 - DNA, 25 bp, Homo sapien
gaggaaaccaattagcattcttttc

SEQ ID NO: 3224774 - DNA, 25 bp, Homo sapien
tgtgtacggatcagtgataagagag

SEQ ID NO: 3224775 - DNA, 25 bp, Homo sapien
tgttatgatgacctggatagaattt

SEQ ID NO: 3224776 - DNA, 25 bp, Homo sapien
caggtagcagcgatagccatttagg

SEQ ID NO: 3224777 - DNA, 25 bp, Homo sapien
catttaggatccgttctcagaggtc

SEQ ID NO: 3224778 - DNA, 25 bp, Homo sapien
gaaccagttctctggtgagatgcca

SEQ ID NO: 3224779 - DNA, 25 bp, Homo sapien
tcagtagcagttaaaagcttcaacc

SEQ ID NO: 3224780 - DNA, 25 bp, Homo sapien
gtcgtgcaatgttttaggaccccag

SEQ ID NO: 3224781 - DNA, 25 bp, Homo sapien
tgcttttcaatacgttgcataacag

SEQ ID NO: 3224782 - DNA, 25 bp, Homo sapien
ttttcaatacgttgcataacagatg

SEQ ID NO: 3224783 - DNA, 25 bp, Homo sapien
aggaaaacacagtcgtgcaatgttt

SEQ ID NO: 3224784 - DNA, 25 bp, Homo sapien
tgaacaaatgtgtgccctccatgaa

SEQ ID NO: 3224785 - DNA, 25 bp, Homo sapien
aacacttatagtggtgctaggcaca

SEQ ID NO: 3224786 - DNA, 25 bp, Homo sapien
tcttggcgtgctcaattcaatcaga

SEQ ID NO: 3224787 - DNA, 25 bp, Homo sapien
tctgtccagatacccttgtgaaagg

SEQ ID NO: 3224788 - DNA, 25 bp, Homo sapien
caagcagctgtgctaactgttctct

SEQ ID NO: 3224789 - DNA, 25 bp, Homo sapien
tccaagcagctgtgctaactgttct

SEQ ID NO: 3224790 - DNA, 25 bp, Homo sapien
agcagctgtgctaactgttctctcc

SEQ ID NO: 3224791 - DNA, 25 bp, Homo sapien
cttccaagcagctgtgctaactgtt

SEQ ID NO: 3224792 - DNA, 25 bp, Homo sapien
ctactcagcatgacactcagagcac

SEQ ID NO: 3224793 - DNA, 25 bp, Homo sapien
tactctactcagcatgacactcaga

SEQ ID NO: 3224794 - DNA, 25 bp, Homo sapien
tgtcagacaggtggtgtcttcctct

SEQ ID NO: 3224795 - DNA, 25 bp, Homo sapien
taaataacaactgagcgtttctcag

SEQ ID NO: 3224796 - DNA, 25 bp, Homo sapien
gctccagagggcaccgcatattcat

SEQ ID NO: 3224797 - DNA, 25 bp, Homo sapien
agctccagagggcaccgcatattca

SEQ ID NO: 3224798 - DNA, 25 bp, Homo sapien
gagctccagagggcaccgcatattc

SEQ ID NO: 3224799 - DNA, 25 bp, Homo sapien
tttgccattgtcctcaccgaaggct

SEQ ID NO: 3224800 - DNA, 25 bp, Homo sapien
cagacataatcaattagccttgcgc

SEQ ID NO: 3224801 - DNA, 25 bp, Homo sapien
ttttccaaggtccttctgagctcca

SEQ ID NO: 3224802 - DNA, 25 bp, Homo sapien
gggtatattttcaccacagacataa

SEQ ID NO: 3224803 - DNA, 25 bp, Homo sapien
ttctctgtttttctaagtccaacat

SEQ ID NO: 3224804 - DNA, 25 bp, Homo sapien
ctccaccccctccaccctttctctg

SEQ ID NO: 3224805 - DNA, 25 bp, Homo sapien
tttctctgtttttctaagtccaaca

SEQ ID NO: 3224806 - DNA, 25 bp, Homo sapien
acttccacaggactggatccactga

SEQ ID NO: 3224807 - DNA, 25 bp, Homo sapien
ttcagggcgttcctgttactaacag

SEQ ID NO: 3224808 - DNA, 25 bp, Homo sapien
tcagtgcttgctgttagacaggtct

SEQ ID NO: 3224809 - DNA, 25 bp, Homo sapien
gacaggtctgcatccttggagctcc

SEQ ID NO: 3224810 - DNA, 25 bp, Homo sapien
tggtatctctatgtgagaaatttcc

SEQ ID NO: 3224811 - DNA, 25 bp, Homo sapien
gatactggtatctctatgtgagaaa

SEQ ID NO: 3224812 - DNA, 25 bp, Homo sapien
cagggatactggtatctctatgtga

SEQ ID NO: 3224813 - DNA, 25 bp, Homo sapien
tctctatgtgagaaatttccaatga

SEQ ID NO: 3224814 - DNA, 25 bp, Homo sapien
taagaaaaagcatcgttcttttggc

SEQ ID NO: 3224815 - DNA, 25 bp, Homo sapien
gaatcatgtcaggaaaagtcagtgc

SEQ ID NO: 3224816 - DNA, 25 bp, Homo sapien
tacagaatcatgtcaggaaaagtca

SEQ ID NO: 3224817 - DNA, 25 bp, Homo sapien
aaagatagaggacagccagcaaagg

SEQ ID NO: 3224818 - DNA, 25 bp, Homo sapien
tcatgtcaggaaaagtcagtgcagg

SEQ ID NO: 3224819 - DNA, 25 bp, Homo sapien
aagctttcagggatacaagtttgct

SEQ ID NO: 3224820 - DNA, 25 bp, Homo sapien
ggaagctttcagggatacaagtttg

SEQ ID NO: 3224821 - DNA, 25 bp, Homo sapien
gaagctttcagggatacaagtttgc

SEQ ID NO: 3224822 - DNA, 25 bp, Homo sapien
acaagtttgcttatacatttgtcca

SEQ ID NO: 3224823 - DNA, 25 bp, Homo sapien
aggtggagatgacaccacggaggac

SEQ ID NO: 3224824 - DNA, 25 bp, Homo sapien
tggagatgacaccacggaggacaat

SEQ ID NO: 3224825 - DNA, 25 bp, Homo sapien
tgacaccacggaggacaatttcctg

SEQ ID NO: 3224826 - DNA, 25 bp, Homo sapien
gatgacaccacggaggacaatttcc

SEQ ID NO: 3224827 - DNA, 25 bp, Homo sapien
tcacttgtagctggcagagatgctt

SEQ ID NO: 3224828 - DNA, 25 bp, Homo sapien
tccttctcgtacctgcttatcagtc

SEQ ID NO: 3224829 - DNA, 25 bp, Homo sapien
catgtattcattgttggcactttgg

SEQ ID NO: 3224830 - DNA, 25 bp, Homo sapien
tcacacctgtcccacagttgcttcc

SEQ ID NO: 3224831 - DNA, 25 bp, Homo sapien
ttctcgtacctgcttatcagtcatt

SEQ ID NO: 3224832 - DNA, 25 bp, Homo sapien
caatcagggtcaggatccggaccac

SEQ ID NO: 3224833 - DNA, 25 bp, Homo sapien
aaacagacaggagcgcgctgacaat

SEQ ID NO: 3224834 - DNA, 25 bp, Homo sapien
ttgatagccttagacaaacaaacag

SEQ ID NO: 3224835 - DNA, 25 bp, Homo sapien
tcttgacttcttttgatagccttag

SEQ ID NO: 3224836 - DNA, 25 bp, Homo sapien
gggccaggcatttctacgccgcgag

SEQ ID NO: 3224837 - DNA, 25 bp, Homo sapien
caggcatttctacgccgcgagacct

SEQ ID NO: 3224838 - DNA, 25 bp, Homo sapien
aaagcaactgactgcaagagagcaa

SEQ ID NO: 3224839 - DNA, 25 bp, Homo sapien
ctacgccgcgagaccttaaaagcct

SEQ ID NO: 3224840 - DNA, 25 bp, Homo sapien
agatgaatccggtctgcacatcagc

SEQ ID NO: 3224841 - DNA, 25 bp, Homo sapien
gatgaatccggtctgcacatcagca

SEQ ID NO: 3224842 - DNA, 25 bp, Homo sapien
ctccgagaagatgaatccggtctgc

SEQ ID NO: 3224843 - DNA, 25 bp, Homo sapien
cgagaagatgaatccggtctgcaca

SEQ ID NO: 3224844 - DNA, 25 bp, Homo sapien
caggactccgcggccgagcgcgagc

SEQ ID NO: 3224845 - DNA, 25 bp, Homo sapien
gactccgcggccgagcgcgagccgc

SEQ ID NO: 3224846 - DNA, 25 bp, Homo sapien
ctgccaggactccgcggccgagcgc

SEQ ID NO: 3224847 - DNA, 25 bp, Homo sapien
actccgcggccgagcgcgagccgcc

SEQ ID NO: 3224848 - DNA, 25 bp, Homo sapien
tggcgctcgcagcctgccaggtcgt

SEQ ID NO: 3224849 - DNA, 25 bp, Homo sapien
gggcaggtaaggaactctgcactcg

SEQ ID NO: 3224850 - DNA, 25 bp, Homo sapien
cgcaggcaaactcggctctggcggc

SEQ ID NO: 3224851 - DNA, 25 bp, Homo sapien
gtaaggaactctgcactcggaggcg

SEQ ID NO: 3224852 - DNA, 25 bp, Homo sapien
gagagggcaagcactgcctgttacc

SEQ ID NO: 3224853 - DNA, 25 bp, Homo sapien
ggtgctcaggtgtccggaaacatgt

SEQ ID NO: 3224854 - DNA, 25 bp, Homo sapien
acccagaggttaggcagccgcggtc

SEQ ID NO: 3224855 - DNA, 25 bp, Homo sapien
aaacatgtggatgccgccgggacag

SEQ ID NO: 3224856 - DNA, 25 bp, Homo sapien
gttttatcctcttcgttcccatcaa

SEQ ID NO: 3224857 - DNA, 25 bp, Homo sapien
cacgggtccttgtaatctatagtct

SEQ ID NO: 3224858 - DNA, 25 bp, Homo sapien
cataatcgaggccagcgcagaccca

SEQ ID NO: 3224859 - DNA, 25 bp, Homo sapien
cccatcaaaagtgtaatcataatcg

SEQ ID NO: 3224860 - DNA, 25 bp, Homo sapien
aaacaggtgagctcccaccgccacc

SEQ ID NO: 3224861 - DNA, 25 bp, Homo sapien
gcgccaccgtcccaacctggagagc

SEQ ID NO: 3224862 - DNA, 25 bp, Homo sapien
gcggcggaggggctgacgcgggagg

SEQ ID NO: 3224863 - DNA, 25 bp, Homo sapien
gcggctgccacttgcgggtggggaa

SEQ ID NO: 3224864 - DNA, 25 bp, Homo sapien
gaaagaagacggtgtcccttccata

SEQ ID NO: 3224865 - DNA, 25 bp, Homo sapien
tccatatgcataaagcccgctgagt

SEQ ID NO: 3224866 - DNA, 25 bp, Homo sapien
ttaaaacctacagcagcaagctata

SEQ ID NO: 3224867 - DNA, 25 bp, Homo sapien
agtggatcccactggcacagaactc

SEQ ID NO: 3224868 - DNA, 25 bp, Homo sapien
ggagccaaggtgtctccaggtagca

SEQ ID NO: 3224869 - DNA, 25 bp, Homo sapien
caactcgctctcgaacaagcgctgg

SEQ ID NO: 3224870 - DNA, 25 bp, Homo sapien
tttggggaaccctgccaactcgctc

SEQ ID NO: 3224871 - DNA, 25 bp, Homo sapien
tcgaacaagcgctgggaaaccgcgc

SEQ ID NO: 3224872 - DNA, 25 bp, Homo sapien
catctagaagtgagttcttccgaga

SEQ ID NO: 3224873 - DNA, 25 bp, Homo sapien
gaagtgagttcttccgagattgtca

SEQ ID NO: 3224874 - DNA, 25 bp, Homo sapien
agttcttccgagattgtcacaatcc

SEQ ID NO: 3224875 - DNA, 25 bp, Homo sapien
gaatcccatctagaagtgagttctt

SEQ ID NO: 3224876 - DNA, 25 bp, Homo sapien
tgccggtccgactgcatttccctgg

SEQ ID NO: 3224877 - DNA, 25 bp, Homo sapien
agcttcaggcagtgccggtccgact

SEQ ID NO: 3224878 - DNA, 25 bp, Homo sapien
caggcagtgccggtccgactgcatt

SEQ ID NO: 3224879 - DNA, 25 bp, Homo sapien
agtgccggtccgactgcatttccct

SEQ ID NO: 3224880 - DNA, 25 bp, Homo sapien
gcgcctccgaccttaggcggcgaga

SEQ ID NO: 3224881 - DNA, 25 bp, Homo sapien
gcagcggcgccagaggcgtagaagg

SEQ ID NO: 3224882 - DNA, 25 bp, Homo sapien
agcggccccgggcacgtgcgcctcc

SEQ ID NO: 3224883 - DNA, 25 bp, Homo sapien
ccttaggcggcgagagggaagcgcc

SEQ ID NO: 3224884 - DNA, 25 bp, Homo sapien
cagcccaatagagcaaggaaccagg

SEQ ID NO: 3224885 - DNA, 25 bp, Homo sapien
aaaagctagtcacagagcaaccccg

SEQ ID NO: 3224886 - DNA, 25 bp, Homo sapien
gaagttacttgtgcgtccacactga

SEQ ID NO: 3224887 - DNA, 25 bp, Homo sapien
cctcttgggatggaacctaacgtgc

SEQ ID NO: 3224888 - DNA, 25 bp, Homo sapien
tacacatggtgcaaatacttatctg

SEQ ID NO: 3224889 - DNA, 25 bp, Homo sapien
tgctgaggaaactaaacactaatgt

SEQ ID NO: 3224890 - DNA, 25 bp, Homo sapien
caggtgtgcactggtatgcctcttc

SEQ ID NO: 3224891 - DNA, 25 bp, Homo sapien
tgaagcctaaattcaaaagcagggt

SEQ ID NO: 3224892 - DNA, 25 bp, Homo sapien
aacaaatgccaagagagctagtgta

SEQ ID NO: 3224893 - DNA, 25 bp, Homo sapien
gagagctagtgtaatgccaagactg

SEQ ID NO: 3224894 - DNA, 25 bp, Homo sapien
agagagctagtgtaatgccaagact

SEQ ID NO: 3224895 - DNA, 25 bp, Homo sapien
tccctgcctgcttataaggggtaca

SEQ ID NO: 3224896 - DNA, 25 bp, Homo sapien
aaatatcctgcccttcatatcgata

SEQ ID NO: 3224897 - DNA, 25 bp, Homo sapien
tcttccctgcctgcttataaggggt

SEQ ID NO: 3224898 - DNA, 25 bp, Homo sapien
tatcgataaagtttatcaaattcac

SEQ ID NO: 3224899 - DNA, 25 bp, Homo sapien
tatgcaagtcttcatcaaagatgtg

SEQ ID NO: 3224900 - DNA, 25 bp, Homo sapien
gacttctttataggttgcatatgca

SEQ ID NO: 3224901 - DNA, 25 bp, Homo sapien
ttgcctaatggtctgtctatctgag

SEQ ID NO: 3224902 - DNA, 25 bp, Homo sapien
gcattttcctcatggctgatgttaa

SEQ ID NO: 3224903 - DNA, 25 bp, Homo sapien
ttaattcctcacatattccacacat

SEQ ID NO: 3224904 - DNA, 25 bp, Homo sapien
ccttttaattcctcacatattccac

SEQ ID NO: 3224905 - DNA, 25 bp, Homo sapien
aattcctcacatattccacacatac

SEQ ID NO: 3224906 - DNA, 25 bp, Homo sapien
ttttaattcctcacatattccacac

SEQ ID NO: 3224907 - DNA, 25 bp, Homo sapien
aacactgcttagagcagtggtcagt

SEQ ID NO: 3224908 - DNA, 25 bp, Homo sapien
ccaggcattgccccaacactgctta

SEQ ID NO: 3224909 - DNA, 25 bp, Homo sapien
aacttcaagggctcgggcagcccag

SEQ ID NO: 3224910 - DNA, 25 bp, Homo sapien
ttcttgaacttcaagggctcgggca

SEQ ID NO: 3224911 - DNA, 25 bp, Homo sapien
attaaaaacaacgatgttgtcactt

SEQ ID NO: 3224912 - DNA, 25 bp, Homo sapien
ttattaaaaacaacgatgttgtcac

SEQ ID NO: 3224913 - DNA, 25 bp, Homo sapien
tattaaaaacaacgatgttgtcact

SEQ ID NO: 3224914 - DNA, 25 bp, Homo sapien
tttattaaaaacaacgatgttgtca

SEQ ID NO: 3224915 - DNA, 25 bp, Homo sapien
tatttctgccgtcaacttctccacg

SEQ ID NO: 3224916 - DNA, 25 bp, Homo sapien
tgtcatcagattgtgccaggccaga

SEQ ID NO: 3224917 - DNA, 25 bp, Homo sapien
ctccacgtggtgtagaagggctcaa

SEQ ID NO: 3224918 - DNA, 25 bp, Homo sapien
agggctcaatgggatggtccgacac

SEQ ID NO: 3224919 - DNA, 25 bp, Homo sapien
tcagaagtcctgagcaacgaacagc

SEQ ID NO: 3224920 - DNA, 25 bp, Homo sapien
caaaggtctatacacataccagagg

SEQ ID NO: 3224921 - DNA, 25 bp, Homo sapien
tgacaaattcatagcgagcagtgag

SEQ ID NO: 3224922 - DNA, 25 bp, Homo sapien
cttagtggccaaatcagtaaagctg

SEQ ID NO: 3224923 - DNA, 25 bp, Homo sapien
gatgctttaagtacccattactgca

SEQ ID NO: 3224924 - DNA, 25 bp, Homo sapien
tgtacccagataacatctcagggag

SEQ ID NO: 3224925 - DNA, 25 bp, Homo sapien
gtgaatccactgaacaattatgcag

SEQ ID NO: 3224926 - DNA, 25 bp, Homo sapien
tgatgtcacaggacaacactgggct

SEQ ID NO: 3224927 - DNA, 25 bp, Homo sapien
ctcgagatgcgccatgatgatgacg

SEQ ID NO: 3224928 - DNA, 25 bp, Homo sapien
aacaccggaatcattgcctcccagg

SEQ ID NO: 3224929 - DNA, 25 bp, Homo sapien
tgatgacggtctgtgcagtctgcct

SEQ ID NO: 3224930 - DNA, 25 bp, Homo sapien
tgatttccatagtgaactgtacggg

SEQ ID NO: 3224931 - DNA, 25 bp, Homo sapien
tattctaggtaagaagccatccacg

SEQ ID NO: 3224932 - DNA, 25 bp, Homo sapien
ttcccatgggcaaagatgacatttg

SEQ ID NO: 3224933 - DNA, 25 bp, Homo sapien
ttctctaagtcctgtgcaagaggca

SEQ ID NO: 3224934 - DNA, 25 bp, Homo sapien
gagctgctcggacatactggaagaa

SEQ ID NO: 3224935 - DNA, 25 bp, Homo sapien
aattgccattgccagaattcttgcg

SEQ ID NO: 3224936 - DNA, 25 bp, Homo sapien
gaaggactggtctgcaagctccaag

SEQ ID NO: 3224937 - DNA, 25 bp, Homo sapien
cagcttggaggtaaggagacactct

SEQ ID NO: 3224938 - DNA, 25 bp, Homo sapien
agatggctacgctgtctttcaactc

SEQ ID NO: 3224939 - DNA, 25 bp, Homo sapien
ctctcataaagatatggtttaacac

SEQ ID NO: 3224940 - DNA, 25 bp, Homo sapien
ctgtaaacctgagcactgtcactgt

SEQ ID NO: 3224941 - DNA, 25 bp, Homo sapien
cataaagatatggtttaacacatgt

SEQ ID NO: 3224942 - DNA, 25 bp, Homo sapien
gaaatttttaataacgtgcagctga

SEQ ID NO: 3224943 - DNA, 25 bp, Homo sapien
gttctcagactcaatatgctgtggg

SEQ ID NO: 3224944 - DNA, 25 bp, Homo sapien
ggaatacgtatctatgctgacatga

SEQ ID NO: 3224945 - DNA, 25 bp, Homo sapien
gaatagaagatacatgtgcctgtct

SEQ ID NO: 3224946 - DNA, 25 bp, Homo sapien
gctccatagggttgaaatagctcta

SEQ ID NO: 3224947 - DNA, 25 bp, Homo sapien
tttattgtagatgcagcacctatgg

SEQ ID NO: 3224948 - DNA, 25 bp, Homo sapien
gatgcagcacctatggctgaatcta

SEQ ID NO: 3224949 - DNA, 25 bp, Homo sapien
tgtagatgcagcacctatggctgaa

SEQ ID NO: 3224950 - DNA, 25 bp, Homo sapien
tattgtagatgcagcacctatggct

SEQ ID NO: 3224951 - DNA, 25 bp, Homo sapien
catggatacggtttggataggcact

SEQ ID NO: 3224952 - DNA, 25 bp, Homo sapien
gaaaaaccatgctcggaagagtgct

SEQ ID NO: 3224953 - DNA, 25 bp, Homo sapien
tgaaaataaagtgccagctcacagt

SEQ ID NO: 3224954 - DNA, 25 bp, Homo sapien
cctgagacagcgcatatgagattgc

SEQ ID NO: 3224955 - DNA, 25 bp, Homo sapien
tccttgaataagaaggttactgatt

SEQ ID NO: 3224956 - DNA, 25 bp, Homo sapien
ttccttgaataagaaggttactgat

SEQ ID NO: 3224957 - DNA, 25 bp, Homo sapien
ccttgaataagaaggttactgatta

SEQ ID NO: 3224958 - DNA, 25 bp, Homo sapien
tttccttgaataagaaggttactga

SEQ ID NO: 3224959 - DNA, 25 bp, Homo sapien
caattgtcctatctatttgaaagat

SEQ ID NO: 3224960 - DNA, 25 bp, Homo sapien
tccaaaggggttctgcgtaaggtca

SEQ ID NO: 3224961 - DNA, 25 bp, Homo sapien
catcatctaaggcaatatcgcccca

SEQ ID NO: 3224962 - DNA, 25 bp, Homo sapien
tctaaggcaatatcgccccaaaata

SEQ ID NO: 3224963 - DNA, 25 bp, Homo sapien
ccctcgcttctttgacatagcatgg

SEQ ID NO: 3224964 - DNA, 25 bp, Homo sapien
caattcttcttatcctgtctataag

SEQ ID NO: 3224965 - DNA, 25 bp, Homo sapien
gagggcccctcgcttctttgacata

SEQ ID NO: 3224966 - DNA, 25 bp, Homo sapien
ctataagttggtagagggcccctcg

SEQ ID NO: 3224967 - DNA, 25 bp, Homo sapien
tgagaattgtagaggtacttttccc

SEQ ID NO: 3224968 - DNA, 25 bp, Homo sapien
ctgagaattgtagaggtacttttcc

SEQ ID NO: 3224969 - DNA, 25 bp, Homo sapien
ggctctgggaactcgatttttctca

SEQ ID NO: 3224970 - DNA, 25 bp, Homo sapien
gaataacgcctccaggccatattct

SEQ ID NO: 3224971 - DNA, 25 bp, Homo sapien
tctttccgttcttgatgtagcggct

SEQ ID NO: 3224972 - DNA, 25 bp, Homo sapien
cctcctataacataaggaataacgc

SEQ ID NO: 3224973 - DNA, 25 bp, Homo sapien
ggcctataggtgaatacaatgtaac

SEQ ID NO: 3224974 - DNA, 25 bp, Homo sapien
ccacaaggcctataggtgaatacaa

SEQ ID NO: 3224975 - DNA, 25 bp, Homo sapien
caaggcctataggtgaatacaatgt

SEQ ID NO: 3224976 - DNA, 25 bp, Homo sapien
cacaaggcctataggtgaatacaat

SEQ ID NO: 3224977 - DNA, 25 bp, Homo sapien
ccgatagagattgcctgaggtccat

SEQ ID NO: 3224978 - DNA, 25 bp, Homo sapien
tcgatctggtcttgtgtgttcatgc

SEQ ID NO: 3224979 - DNA, 25 bp, Homo sapien
tagttacgtggttatctcgatctgg

SEQ ID NO: 3224980 - DNA, 25 bp, Homo sapien
tttcctcgccgacctacataggagc

SEQ ID NO: 3224981 - DNA, 25 bp, Homo sapien
ccatcttcagaaaattgtactcttg

SEQ ID NO: 3224982 - DNA, 25 bp, Homo sapien
gtcaaaaggtataacctgagactcc

SEQ ID NO: 3224983 - DNA, 25 bp, Homo sapien
caaaaggtataacctgagactccaa

SEQ ID NO: 3224984 - DNA, 25 bp, Homo sapien
tcaaaaggtataacctgagactcca

SEQ ID NO: 3224985 - DNA, 25 bp, Homo sapien
aagtcaaaaggtataacctgagact

SEQ ID NO: 3224986 - DNA, 25 bp, Homo sapien
tgcaggacgtatgccattatcatca

SEQ ID NO: 3224987 - DNA, 25 bp, Homo sapien
tcttgcctgtgcgatatctcctttg

SEQ ID NO: 3224988 - DNA, 25 bp, Homo sapien
gacgggttcgctgaccaattgcagg

SEQ ID NO: 3224989 - DNA, 25 bp, Homo sapien
tatctcctttgcttagacgggttcg

SEQ ID NO: 3224990 - DNA, 25 bp, Homo sapien
acaatcaagtacagtcatgctcttg

SEQ ID NO: 3224991 - DNA, 25 bp, Homo sapien
agagcacaatcaagtacagtcatgc

SEQ ID NO: 3224992 - DNA, 25 bp, Homo sapien
tcaagtacagtcatgctcttgtgtt

SEQ ID NO: 3224993 - DNA, 25 bp, Homo sapien
gcacaatcaagtacagtcatgctct

SEQ ID NO: 3224994 - DNA, 25 bp, Homo sapien
acctggacgatatggctctgggacc

SEQ ID NO: 3224995 - DNA, 25 bp, Homo sapien
ccagtgatacctggacgatatggct

SEQ ID NO: 3224996 - DNA, 25 bp, Homo sapien
tgatacctggacgatatggctctgg

SEQ ID NO: 3224997 - DNA, 25 bp, Homo sapien
gttcagattcaggccagtgatacct

SEQ ID NO: 3224998 - DNA, 25 bp, Homo sapien
ctgaaaggaaaaaaatatataagat

SEQ ID NO: 3224999 - DNA, 25 bp, Homo sapien
tgaaaggaaaaaaatatataagatc

SEQ ID NO: 3225000 - DNA, 25 bp, Homo sapien
aaaggaaaaaaatatataagatcat

SEQ ID NO: 3225001 - DNA, 25 bp, Homo sapien
gaaaggaaaaaaatatataagatca

SEQ ID NO: 3225002 - DNA, 25 bp, Homo sapien
aaggttgccattggattcttgtaga

SEQ ID NO: 3225003 - DNA, 25 bp, Homo sapien
gaaatcctggagaggaaaggttgcc

SEQ ID NO: 3225004 - DNA, 25 bp, Homo sapien
tcctggagaggaaaggttgccattg

SEQ ID NO: 3225005 - DNA, 25 bp, Homo sapien
aatcctggagaggaaaggttgccat

SEQ ID NO: 3225006 - DNA, 25 bp, Homo sapien
tatttgaaggatgatgaacttttgt

SEQ ID NO: 3225007 - DNA, 25 bp, Homo sapien
gaaggatgatgaacttttgtactta

SEQ ID NO: 3225008 - DNA, 25 bp, Homo sapien
tagtgggcttgacggtataaactac

SEQ ID NO: 3225009 - DNA, 25 bp, Homo sapien
agaataaaatagtgggcttgacggt

SEQ ID NO: 3225010 - DNA, 25 bp, Homo sapien
cactgcgaatattacaaaatcctgg

SEQ ID NO: 3225011 - DNA, 25 bp, Homo sapien
tcatgtattccaagtcagttgtaac

SEQ ID NO: 3225012 - DNA, 25 bp, Homo sapien
caccacggctaatgagagtacttaa

SEQ ID NO: 3225013 - DNA, 25 bp, Homo sapien
aatcctggacaactccatacccatg

SEQ ID NO: 3225014 - DNA, 25 bp, Homo sapien
tgctaatggcgagagttttggaatt

SEQ ID NO: 3225015 - DNA, 25 bp, Homo sapien
ttatagataatcatacatacaagaa

SEQ ID NO: 3225016 - DNA, 25 bp, Homo sapien
tagctcaatgctaatggcgagagtt

SEQ ID NO: 3225017 - DNA, 25 bp, Homo sapien
ataaattagctcaatgctaatggcg

SEQ ID NO: 3225018 - DNA, 25 bp, Homo sapien
tataatgtaagctataggcaggacc

SEQ ID NO: 3225019 - DNA, 25 bp, Homo sapien
tatccacatgtacaagaatggtttc

SEQ ID NO: 3225020 - DNA, 25 bp, Homo sapien
gtagacaagtggtatgacatcaaac

SEQ ID NO: 3225021 - DNA, 25 bp, Homo sapien
tgtgcagccaactatatccagtgaa

SEQ ID NO: 3225022 - DNA, 25 bp, Homo sapien
gctaccatctcttcagtcatgcatg

SEQ ID NO: 3225023 - DNA, 25 bp, Homo sapien
catatcgctcaaaatctttattgaa

SEQ ID NO: 3225024 - DNA, 25 bp, Homo sapien
tctttattgaatgctaccatctctt

SEQ ID NO: 3225025 - DNA, 25 bp, Homo sapien
tcttcagtcatgcatggatcttcca

SEQ ID NO: 3225026 - DNA, 25 bp, Homo sapien
tgttttccaatgctggagagtgaag

SEQ ID NO: 3225027 - DNA, 25 bp, Homo sapien
agttgcaacgttgaatagatgtcac

SEQ ID NO: 3225028 - DNA, 25 bp, Homo sapien
gctgccaattgtgcttattaaagac

SEQ ID NO: 3225029 - DNA, 25 bp, Homo sapien
tctgttaggagtctaagttgcaacg

SEQ ID NO: 3225030 - DNA, 25 bp, Homo sapien
cacaaactactcttgtatagatcca

SEQ ID NO: 3225031 - DNA, 25 bp, Homo sapien
tcataccagcacaaactactcttgt

SEQ ID NO: 3225032 - DNA, 25 bp, Homo sapien
ccagcacaaactactcttgtataga

SEQ ID NO: 3225033 - DNA, 25 bp, Homo sapien
cataccagcacaaactactcttgta

SEQ ID NO: 3225034 - DNA, 25 bp, Homo sapien
tgattttctccagtacccgtctctt

SEQ ID NO: 3225035 - DNA, 25 bp, Homo sapien
gaagtaagaacttcaggcaatttgt

SEQ ID NO: 3225036 - DNA, 25 bp, Homo sapien
gaacttcaggcaatttgtccccaca

SEQ ID NO: 3225037 - DNA, 25 bp, Homo sapien
gctgtctgtagaagtaagaacttca

SEQ ID NO: 3225038 - DNA, 25 bp, Homo sapien
cttcaggcaatttgtccccacagaa

SEQ ID NO: 3225039 - DNA, 25 bp, Homo sapien
agccttttcctacccaattactgct

SEQ ID NO: 3225040 - DNA, 25 bp, Homo sapien
tgctgctacgaaactcaatccacat

SEQ ID NO: 3225041 - DNA, 25 bp, Homo sapien
tacccaattactgctgctacgaaac

SEQ ID NO: 3225042 - DNA, 25 bp, Homo sapien
caattactgctgctacgaaactcaa

SEQ ID NO: 3225043 - DNA, 25 bp, Homo sapien
gataattgggagactgaatctgtcc

SEQ ID NO: 3225044 - DNA, 25 bp, Homo sapien
tcagacactgttattttccacacac

SEQ ID NO: 3225045 - DNA, 25 bp, Homo sapien
cacacattctttcatcgggcgatag

SEQ ID NO: 3225046 - DNA, 25 bp, Homo sapien
aaaggtcagcccgacgtggtagctc

SEQ ID NO: 3225047 - DNA, 25 bp, Homo sapien
taacacaacgatgctgctgatctcc

SEQ ID NO: 3225048 - DNA, 25 bp, Homo sapien
gatgaatatttttaacgaggttgaa

SEQ ID NO: 3225049 - DNA, 25 bp, Homo sapien
ggttgaaagctcgtaagaacactta

SEQ ID NO: 3225050 - DNA, 25 bp, Homo sapien
tctgacccgtcatctaataacacaa

SEQ ID NO: 3225051 - DNA, 25 bp, Homo sapien
accggtctatttgaacagtatttgc

SEQ ID NO: 3225052 - DNA, 25 bp, Homo sapien
cagtatttgcaaacctattagtcca

SEQ ID NO: 3225053 - DNA, 25 bp, Homo sapien
tcaaataatggcaaaaccagtttcc

SEQ ID NO: 3225054 - DNA, 25 bp, Homo sapien
tggtctggagcataaaatacaacat

SEQ ID NO: 3225055 - DNA, 25 bp, Homo sapien
cagaaacgccctatcaaagggctat

SEQ ID NO: 3225056 - DNA, 25 bp, Homo sapien
ccacaaagtattggaggtagatctt

SEQ ID NO: 3225057 - DNA, 25 bp, Homo sapien
ttgtcataaccacagaaacgcccta

SEQ ID NO: 3225058 - DNA, 25 bp, Homo sapien
tccaggtagtcataagcacaattgt

SEQ ID NO: 3225059 - DNA, 25 bp, Homo sapien
taaaaaagttagcagcaaaccctgc

SEQ ID NO: 3225060 - DNA, 25 bp, Homo sapien
aatgtgggggaatactagtctgaaa

SEQ ID NO: 3225061 - DNA, 25 bp, Homo sapien
gggaatactagtctgaaagggagta

SEQ ID NO: 3225062 - DNA, 25 bp, Homo sapien
atactagtctgaaagggagtaatgc

SEQ ID NO: 3225063 - DNA, 25 bp, Homo sapien
tcaatgtgggggaatactagtctga

SEQ ID NO: 3225064 - DNA, 25 bp, Homo sapien
gcacactggtaactgcccagagtgt

SEQ ID NO: 3225065 - DNA, 25 bp, Homo sapien
cacggtcaggtttggcacactcatc

SEQ ID NO: 3225066 - DNA, 25 bp, Homo sapien
gctcacagcctccacggtcaggttt

SEQ ID NO: 3225067 - DNA, 25 bp, Homo sapien
gagtgttcagacatcgctgctcaca

SEQ ID NO: 3225068 - DNA, 25 bp, Homo sapien
taagtttggtaagaagtccaccaca

SEQ ID NO: 3225069 - DNA, 25 bp, Homo sapien
ggttggtgcaaccacttgccacaca

SEQ ID NO: 3225070 - DNA, 25 bp, Homo sapien
actgggttggtgcaaccacttgcca

SEQ ID NO: 3225071 - DNA, 25 bp, Homo sapien
cattgccttccaattcaaaaaactc

SEQ ID NO: 3225072 - DNA, 25 bp, Homo sapien
gcccttcttggatacagtattgtca

SEQ ID NO: 3225073 - DNA, 25 bp, Homo sapien
aaaaatgtgctttgaagcccttctt

SEQ ID NO: 3225074 - DNA, 25 bp, Homo sapien
gaactgggatgtgatcacttcaggc

SEQ ID NO: 3225075 - DNA, 25 bp, Homo sapien
ttgaattcaattctcatattgttga

SEQ ID NO: 3225076 - DNA, 25 bp, Homo sapien
tgctgacatccaccattatccttag

SEQ ID NO: 3225077 - DNA, 25 bp, Homo sapien
tgacacattcgtgctgacatccacc

SEQ ID NO: 3225078 - DNA, 25 bp, Homo sapien
tccaccattatccttagagcattca

SEQ ID NO: 3225079 - DNA, 25 bp, Homo sapien
cgtgttgacacattcgtgctgacat

SEQ ID NO: 3225080 - DNA, 25 bp, Homo sapien
tacggcattgacacatgtagctccc

SEQ ID NO: 3225081 - DNA, 25 bp, Homo sapien
tccattacggcattgacacatgtag

SEQ ID NO: 3225082 - DNA, 25 bp, Homo sapien
tagcacaaatccattacggcattga

SEQ ID NO: 3225083 - DNA, 25 bp, Homo sapien
cttccttgcaatcatgtttattgtc

SEQ ID NO: 3225084 - DNA, 25 bp, Homo sapien
ccagttgggactggtgatgaggcca

SEQ ID NO: 3225085 - DNA, 25 bp, Homo sapien
gccacttggactgtggatcttctgt

SEQ ID NO: 3225086 - DNA, 25 bp, Homo sapien
actgtggatcttctgttcacactca

SEQ ID NO: 3225087 - DNA, 25 bp, Homo sapien
ggccaggagtggcgctgatttccca

SEQ ID NO: 3225088 - DNA, 25 bp, Homo sapien
ttgtagtgaaagacaagggcagtca

SEQ ID NO: 3225089 - DNA, 25 bp, Homo sapien
gaaagacaagggcagtcagcttaat

SEQ ID NO: 3225090 - DNA, 25 bp, Homo sapien
caagggcagtcagcttaatggaaag

SEQ ID NO: 3225091 - DNA, 25 bp, Homo sapien
ggcagtcagcttaatggaaagaaaa

SEQ ID NO: 3225092 - DNA, 25 bp, Homo sapien
tactgttttgcagcaactttggtaa

SEQ ID NO: 3225093 - DNA, 25 bp, Homo sapien
tttgcagcaactttggtaatgcctt

SEQ ID NO: 3225094 - DNA, 25 bp, Homo sapien
ctgttttgcagcaactttggtaatg

SEQ ID NO: 3225095 - DNA, 25 bp, Homo sapien
gttttgcagcaactttggtaatgcc

SEQ ID NO: 3225096 - DNA, 25 bp, Homo sapien
ttaggataccagcaggtatgaccat

SEQ ID NO: 3225097 - DNA, 25 bp, Homo sapien
ttcttaggataccagcaggtatgac

SEQ ID NO: 3225098 - DNA, 25 bp, Homo sapien
tcttaggataccagcaggtatgacc

SEQ ID NO: 3225099 - DNA, 25 bp, Homo sapien
cttcttaggataccagcaggtatga

SEQ ID NO: 3225100 - DNA, 25 bp, Homo sapien
tgacagctggtctggtgccaactgg

SEQ ID NO: 3225101 - DNA, 25 bp, Homo sapien
caactggctacagctctttatcaaa

SEQ ID NO: 3225102 - DNA, 25 bp, Homo sapien
tatcaaattactggtggaatcagac

SEQ ID NO: 3225103 - DNA, 25 bp, Homo sapien
gggccatactgacagctggtctggt

SEQ ID NO: 3225104 - DNA, 25 bp, Homo sapien
tgtagaatgtgtagcttgaaagcct

SEQ ID NO: 3225105 - DNA, 25 bp, Homo sapien
gccacacagtcgtccaagaatcggt

SEQ ID NO: 3225106 - DNA, 25 bp, Homo sapien
caaatacttctaagtggtcataagc

SEQ ID NO: 3225107 - DNA, 25 bp, Homo sapien
gatgcatcagaaacaaaccgaacaa

SEQ ID NO: 3225108 - DNA, 25 bp, Homo sapien
gaattctgagaaatggaaaatgaag

SEQ ID NO: 3225109 - DNA, 25 bp, Homo sapien
agaattctgagaaatggaaaatgaa

SEQ ID NO: 3225110 - DNA, 25 bp, Homo sapien
cccagacatggacgacctgggttgg

SEQ ID NO: 3225111 - DNA, 25 bp, Homo sapien
cagacatggacgacctgggttggaa

SEQ ID NO: 3225112 - DNA, 25 bp, Homo sapien
tggagagtcagatagtgtcatgggt

SEQ ID NO: 3225113 - DNA, 25 bp, Homo sapien
gccccagacatggacgacctgggtt

SEQ ID NO: 3225114 - DNA, 25 bp, Homo sapien
tccagcgtcagatatgttttccaca

SEQ ID NO: 3225115 - DNA, 25 bp, Homo sapien
ctacttccagcgtcagatatgtttt

SEQ ID NO: 3225116 - DNA, 25 bp, Homo sapien
cttccagcgtcagatatgttttcca

SEQ ID NO: 3225117 - DNA, 25 bp, Homo sapien
ccagcgtcagatatgttttccacaa

SEQ ID NO: 3225118 - DNA, 25 bp, Homo sapien
ggtcaatgagctttaacgggtccaa

SEQ ID NO: 3225119 - DNA, 25 bp, Homo sapien
tcagtgtagtttcagtgtagcctag

SEQ ID NO: 3225120 - DNA, 25 bp, Homo sapien
taagatgagtaaggtcaatgagctt

SEQ ID NO: 3225121 - DNA, 25 bp, Homo sapien
tagcctagccattgtctaacttctg

SEQ ID NO: 3225122 - DNA, 25 bp, Homo sapien
aaggataattcaagtcgagagcccc

SEQ ID NO: 3225123 - DNA, 25 bp, Homo sapien
gagagccccgttctgatactaatag

SEQ ID NO: 3225124 - DNA, 25 bp, Homo sapien
tgaatcaagaccatcaaagagctcc

SEQ ID NO: 3225125 - DNA, 25 bp, Homo sapien
tgattctgctttcaatcgtccgcca

SEQ ID NO: 3225126 - DNA, 25 bp, Homo sapien
ttaatcatgtctagggtattctgtt

SEQ ID NO: 3225127 - DNA, 25 bp, Homo sapien
ggtattctgttggtggtatatttac

SEQ ID NO: 3225128 - DNA, 25 bp, Homo sapien
tcatgtctagggtattctgttggtg

SEQ ID NO: 3225129 - DNA, 25 bp, Homo sapien
tctagggtattctgttggtggtata

SEQ ID NO: 3225130 - DNA, 25 bp, Homo sapien
atcaatcatgaatcaataggcatct

SEQ ID NO: 3225131 - DNA, 25 bp, Homo sapien
catatcaatcatgaatcaataggca

SEQ ID NO: 3225132 - DNA, 25 bp, Homo sapien
cttgtgaatggtacacatatcaatc

SEQ ID NO: 3225133 - DNA, 25 bp, Homo sapien
caacttgtgaatggtacacatatca

SEQ ID NO: 3225134 - DNA, 25 bp, Homo sapien
aactgaatctccaattgaataaatc

SEQ ID NO: 3225135 - DNA, 25 bp, Homo sapien
tgtgtggtatctggatatcttatgc

SEQ ID NO: 3225136 - DNA, 25 bp, Homo sapien
ggtatctggatatcttatgcttttg

SEQ ID NO: 3225137 - DNA, 25 bp, Homo sapien
ttttggtatgtgtggtatctggata

SEQ ID NO: 3225138 - DNA, 25 bp, Homo sapien
tagtctacgggtgggttggctcaaa

SEQ ID NO: 3225139 - DNA, 25 bp, Homo sapien
tcagaggttaagctggcctgcaagt

SEQ ID NO: 3225140 - DNA, 25 bp, Homo sapien
tgttccacaggacaagtgctgccct

SEQ ID NO: 3225141 - DNA, 25 bp, Homo sapien
gctcatggacaggtaacagacacaa

SEQ ID NO: 3225142 - DNA, 25 bp, Homo sapien
cacacgggtaggagtagtatagaac

SEQ ID NO: 3225143 - DNA, 25 bp, Homo sapien
tagtgcacattcctagcacacgggt

SEQ ID NO: 3225144 - DNA, 25 bp, Homo sapien
gcacaaccaatatactgatgtaggg

SEQ ID NO: 3225145 - DNA, 25 bp, Homo sapien
aaaggctcatctacattgcaggcaa

SEQ ID NO: 3225146 - DNA, 25 bp, Homo sapien
tccagccagtataggaatgggatat

SEQ ID NO: 3225147 - DNA, 25 bp, Homo sapien
ataatgtcacatagggttgcagtcc

SEQ ID NO: 3225148 - DNA, 25 bp, Homo sapien
gagcgacaggtagcaaaaatccagc

SEQ ID NO: 3225149 - DNA, 25 bp, Homo sapien
ccatttaagttaagtcacgatctcc

SEQ ID NO: 3225150 - DNA, 25 bp, Homo sapien
gaccttctaagtgcctcaatctgtg

SEQ ID NO: 3225151 - DNA, 25 bp, Homo sapien
tatagtgaaacgtgctcagagccct

SEQ ID NO: 3225152 - DNA, 25 bp, Homo sapien
gataagccctgatcgctaggacctt

SEQ ID NO: 3225153 - DNA, 25 bp, Homo sapien
tggctggaactggagtcacgtgacc

SEQ ID NO: 3225154 - DNA, 25 bp, Homo sapien
ccattctgcagccttttctctggct

SEQ ID NO: 3225155 - DNA, 25 bp, Homo sapien
cttctctgtgggcttttgcttccat

SEQ ID NO: 3225156 - DNA, 25 bp, Homo sapien
cattctgcagccttttctctggctt

SEQ ID NO: 3225157 - DNA, 25 bp, Homo sapien
tggcttctctgtgggcttttgcttc

SEQ ID NO: 3225158 - DNA, 25 bp, Homo sapien
ggtcagctgacttaacttcatccaa

SEQ ID NO: 3225159 - DNA, 25 bp, Homo sapien
tggcaggcatcagggtcagctgact

SEQ ID NO: 3225160 - DNA, 25 bp, Homo sapien
gcatcagggtcagctgacttaactt

SEQ ID NO: 3225161 - DNA, 25 bp, Homo sapien
aaagatggcaggcatcagggtcagc

SEQ ID NO: 3225162 - DNA, 25 bp, Homo sapien
ctgctcctctctgaagaggtcttca

SEQ ID NO: 3225163 - DNA, 25 bp, Homo sapien
tctctgaagaggtcttcagtgaata

SEQ ID NO: 3225164 - DNA, 25 bp, Homo sapien
tgaagaggtcttcagtgaataagtg

SEQ ID NO: 3225165 - DNA, 25 bp, Homo sapien
aagaggtcttcagtgaataagtggg

SEQ ID NO: 3225166 - DNA, 25 bp, Homo sapien
caggtatgggcccaaagttcctact

SEQ ID NO: 3225167 - DNA, 25 bp, Homo sapien
tactcatagggacttgggaagaatg

SEQ ID NO: 3225168 - DNA, 25 bp, Homo sapien
gacaatggccttcttactcataggg

SEQ ID NO: 3225169 - DNA, 25 bp, Homo sapien
ccttcttactcatagggacttggga

SEQ ID NO: 3225170 - DNA, 25 bp, Homo sapien
tgggagttgttctgttccctctctt

SEQ ID NO: 3225171 - DNA, 25 bp, Homo sapien
ttgaatattggctactgccaccaag

SEQ ID NO: 3225172 - DNA, 25 bp, Homo sapien
tctcatttgaatattggctactgcc

SEQ ID NO: 3225173 - DNA, 25 bp, Homo sapien
gttctcatttgaatattggctactg

SEQ ID NO: 3225174 - DNA, 25 bp, Homo sapien
catttgaatattggctactgccacc

SEQ ID NO: 3225175 - DNA, 25 bp, Homo sapien
attgctgttcacatgggacccagtt

SEQ ID NO: 3225176 - DNA, 25 bp, Homo sapien
caggactcactgactccccctttca

SEQ ID NO: 3225177 - DNA, 25 bp, Homo sapien
gactcactgactccccctttcaatt

SEQ ID NO: 3225178 - DNA, 25 bp, Homo sapien
tgctgttcacatgggacccagttcc

SEQ ID NO: 3225179 - DNA, 25 bp, Homo sapien
cactagagaagcaagctactgggta

SEQ ID NO: 3225180 - DNA, 25 bp, Homo sapien
gacactggcattcaaaccgcagctc

SEQ ID NO: 3225181 - DNA, 25 bp, Homo sapien
aaaacgtgtggttgaggtgagcacc

SEQ ID NO: 3225182 - DNA, 25 bp, Homo sapien
cgcagctccacgtcatcaggttgag

SEQ ID NO: 3225183 - DNA, 25 bp, Homo sapien
tcttgtaagagctggtacaaggcca

SEQ ID NO: 3225184 - DNA, 25 bp, Homo sapien
tggtacaaggccacggtgttttcca

SEQ ID NO: 3225185 - DNA, 25 bp, Homo sapien
aattctcttgtaagagctggtacaa

SEQ ID NO: 3225186 - DNA, 25 bp, Homo sapien
gagctggtacaaggccacggtgttt

SEQ ID NO: 3225187 - DNA, 25 bp, Homo sapien
ggagctggcctcacactgaaaaacc

SEQ ID NO: 3225188 - DNA, 25 bp, Homo sapien
cagatttcttctcatgggagctggc

SEQ ID NO: 3225189 - DNA, 25 bp, Homo sapien
ttgaacagttatgaacacaaaagac

SEQ ID NO: 3225190 - DNA, 25 bp, Homo sapien
ctttgaacttggcagatttcttctc

SEQ ID NO: 3225191 - DNA, 25 bp, Homo sapien
caaaagctttttctgcacttagtga

SEQ ID NO: 3225192 - DNA, 25 bp, Homo sapien
tcctggctttctagggataaatccc

SEQ ID NO: 3225193 - DNA, 25 bp, Homo sapien
tcccacttgatcctggtgtgtaatg

SEQ ID NO: 3225194 - DNA, 25 bp, Homo sapien
catcaggtgttgaaccatcctggct

SEQ ID NO: 3225195 - DNA, 25 bp, Homo sapien
gatatcagctctgggcttattacat

SEQ ID NO: 3225196 - DNA, 25 bp, Homo sapien
tgataagtatgatatcagctctggg

SEQ ID NO: 3225197 - DNA, 25 bp, Homo sapien
gctcacgacataaatacttttggtt

SEQ ID NO: 3225198 - DNA, 25 bp, Homo sapien
gctctgggcttattacatatagcct

SEQ ID NO: 3225199 - DNA, 25 bp, Homo sapien
agggcttgcttccttatatctttaa

SEQ ID NO: 3225200 - DNA, 25 bp, Homo sapien
gggcttgcttccttatatctttaat

SEQ ID NO: 3225201 - DNA, 25 bp, Homo sapien
gggatatagggatgctgcagtaatt

SEQ ID NO: 3225202 - DNA, 25 bp, Homo sapien
atatagggatgctgcagtaattagg

SEQ ID NO: 3225203 - DNA, 25 bp, Homo sapien
tccagtcccgaatccaagacaacat

SEQ ID NO: 3225204 - DNA, 25 bp, Homo sapien
agctccagtcccgaatccaagacaa

SEQ ID NO: 3225205 - DNA, 25 bp, Homo sapien
actgagctccagtcccgaatccaag

SEQ ID NO: 3225206 - DNA, 25 bp, Homo sapien
cagtcccgaatccaagacaacatca

SEQ ID NO: 3225207 - DNA, 25 bp, Homo sapien
gctcccacactctcaactttagaaa

SEQ ID NO: 3225208 - DNA, 25 bp, Homo sapien
ttgctcccacactctcaactttaga

SEQ ID NO: 3225209 - DNA, 25 bp, Homo sapien
tcttgctcccacactctcaacttta

SEQ ID NO: 3225210 - DNA, 25 bp, Homo sapien
tcatcttgctcccacactctcaact

SEQ ID NO: 3225211 - DNA, 25 bp, Homo sapien
tctgattgggccagaatgttaacat

SEQ ID NO: 3225212 - DNA, 25 bp, Homo sapien
ttgtttctgattgggccagaatgtt

SEQ ID NO: 3225213 - DNA, 25 bp, Homo sapien
tgtttctgattgggccagaatgtta

SEQ ID NO: 3225214 - DNA, 25 bp, Homo sapien
tttctgattgggccagaatgttaac

SEQ ID NO: 3225215 - DNA, 25 bp, Homo sapien
ggaggaaattaccatgagtaaacac

SEQ ID NO: 3225216 - DNA, 25 bp, Homo sapien
tatacagaccgaacttaatacgtta

SEQ ID NO: 3225217 - DNA, 25 bp, Homo sapien
taacatataatcaatagaaggatgg

SEQ ID NO: 3225218 - DNA, 25 bp, Homo sapien
caatacttttgaagagtatatacag

SEQ ID NO: 3225219 - DNA, 25 bp, Homo sapien
ggagacttgtcctctctggtacaca

SEQ ID NO: 3225220 - DNA, 25 bp, Homo sapien
gagacttgtcctctctggtacacat

SEQ ID NO: 3225221 - DNA, 25 bp, Homo sapien
gggagacttgtcctctctggtacac

SEQ ID NO: 3225222 - DNA, 25 bp, Homo sapien
cggggagacttgtcctctctggtac

SEQ ID NO: 3225223 - DNA, 25 bp, Homo sapien
ctaaattaagtaaggaaaggctgat

SEQ ID NO: 3225224 - DNA, 25 bp, Homo sapien
tcactgagaaaccactatatttata

SEQ ID NO: 3225225 - DNA, 25 bp, Homo sapien
gtctccaagccatgctcacagaatc

SEQ ID NO: 3225226 - DNA, 25 bp, Homo sapien
gctcacagaatcaaatctatcacta

SEQ ID NO: 3225227 - DNA, 25 bp, Homo sapien
gaatcaaatctatcactagaagaca

SEQ ID NO: 3225228 - DNA, 25 bp, Homo sapien
ttcagtggtggagttagtttcattt

SEQ ID NO: 3225229 - DNA, 25 bp, Homo sapien
ttatcagaagttggcccaaacctac

SEQ ID NO: 3225230 - DNA, 25 bp, Homo sapien
ctacattttgcttgtgattatcaga

SEQ ID NO: 3225231 - DNA, 25 bp, Homo sapien
tgattatcagaagttggcccaaacc

SEQ ID NO: 3225232 - DNA, 25 bp, Homo sapien
agtcactgcaccaaatttcacttcc

SEQ ID NO: 3225233 - DNA, 25 bp, Homo sapien
cacttccatccttgtgaagagacca

SEQ ID NO: 3225234 - DNA, 25 bp, Homo sapien
ccaaatttcacttccatccttgtga

SEQ ID NO: 3225235 - DNA, 25 bp, Homo sapien
gagtcactgcaccaaatttcacttc

SEQ ID NO: 3225236 - DNA, 25 bp, Homo sapien
ttacctaaaccttggcatctgtgat

SEQ ID NO: 3225237 - DNA, 25 bp, Homo sapien
agttacctaaaccttggcatctgtg

SEQ ID NO: 3225238 - DNA, 25 bp, Homo sapien
cctaaaccttggcatctgtgatggt

SEQ ID NO: 3225239 - DNA, 25 bp, Homo sapien
gagagttacctaaaccttggcatct

SEQ ID NO: 3225240 - DNA, 25 bp, Homo sapien
tggttgggccgtttcttgccctgaa

SEQ ID NO: 3225241 - DNA, 25 bp, Homo sapien
gactgtttgtaaccaaatctgccac

SEQ ID NO: 3225242 - DNA, 25 bp, Homo sapien
tgccacttgtagttagcaaagccat

SEQ ID NO: 3225243 - DNA, 25 bp, Homo sapien
ggaccacaaactcgatttttcctga

SEQ ID NO: 3225244 - DNA, 25 bp, Homo sapien
ctggttgaattaacaaaggaacctg

SEQ ID NO: 3225245 - DNA, 25 bp, Homo sapien
tgaggcactgacacctttcattctt

SEQ ID NO: 3225246 - DNA, 25 bp, Homo sapien
cagggacgtagcatgatgaggcact

SEQ ID NO: 3225247 - DNA, 25 bp, Homo sapien
agtgcagggacgtagcatgatgagg

SEQ ID NO: 3225248 - DNA, 25 bp, Homo sapien
cgtagcatgatgaggcactgacacc

SEQ ID NO: 3225249 - DNA, 25 bp, Homo sapien
atggagaattttccgtggctgggcc

SEQ ID NO: 3225250 - DNA, 25 bp, Homo sapien
gagaattttccgtggctgggccaaa

SEQ ID NO: 3225251 - DNA, 25 bp, Homo sapien
gaatggagaattttccgtggctggg

SEQ ID NO: 3225252 - DNA, 25 bp, Homo sapien
tgggccaaatcctggaacaagtggg

SEQ ID NO: 3225253 - DNA, 25 bp, Homo sapien
caattgttagggcaccaaaacagac

SEQ ID NO: 3225254 - DNA, 25 bp, Homo sapien
caggatagtatcgatattttgcaat

SEQ ID NO: 3225255 - DNA, 25 bp, Homo sapien
aataaagtcaacaggatagtatcga

SEQ ID NO: 3225256 - DNA, 25 bp, Homo sapien
aacagacaactacaagcagattttt

SEQ ID NO: 3225257 - DNA, 25 bp, Homo sapien
ttgctactttattctcagcactact

SEQ ID NO: 3225258 - DNA, 25 bp, Homo sapien
ctactgatatagttgcaaacatgac

SEQ ID NO: 3225259 - DNA, 25 bp, Homo sapien
tgctactttattctcagcactactg

SEQ ID NO: 3225260 - DNA, 25 bp, Homo sapien
actactgatatagttgcaaacatga

SEQ ID NO: 3225261 - DNA, 25 bp, Homo sapien
tggataatgtgattctctgggccat

SEQ ID NO: 3225262 - DNA, 25 bp, Homo sapien
gataatgtgattctctgggccattc

SEQ ID NO: 3225263 - DNA, 25 bp, Homo sapien
cagactggataatgtgattctctgg

SEQ ID NO: 3225264 - DNA, 25 bp, Homo sapien
actggataatgtgattctctgggcc

SEQ ID NO: 3225265 - DNA, 25 bp, Homo sapien
ggcgtggaagcaatactgcaggctc

SEQ ID NO: 3225266 - DNA, 25 bp, Homo sapien
tgcagatatagccttcttgcacata

SEQ ID NO: 3225267 - DNA, 25 bp, Homo sapien
gaagaggcgtggaagcaatactgca

SEQ ID NO: 3225268 - DNA, 25 bp, Homo sapien
agctgcagatatagccttcttgcac

SEQ ID NO: 3225269 - DNA, 25 bp, Homo sapien
aagcagttgttgtttatacataagg

SEQ ID NO: 3225270 - DNA, 25 bp, Homo sapien
gttgtttatacataaggcacaccat

SEQ ID NO: 3225271 - DNA, 25 bp, Homo sapien
cagttgttgtttatacataaggcac

SEQ ID NO: 3225272 - DNA, 25 bp, Homo sapien
tgctgagccaactgcctgcttccaa

SEQ ID NO: 3225273 - DNA, 25 bp, Homo sapien
tctagacaaagatactgctgattct

SEQ ID NO: 3225274 - DNA, 25 bp, Homo sapien
agataattctcaattcattaatggc

SEQ ID NO: 3225275 - DNA, 25 bp, Homo sapien
cagaggatgagtgaatgtctttaac

SEQ ID NO: 3225276 - DNA, 25 bp, Homo sapien
atggcttctagacaaagatactgct

SEQ ID NO: 3225277 - DNA, 25 bp, Homo sapien
ctcagagacctgacattcctgtctt

SEQ ID NO: 3225278 - DNA, 25 bp, Homo sapien
ctctggcaggcaggagtaggggtcg

SEQ ID NO: 3225279 - DNA, 25 bp, Homo sapien
ggcaggcaggagtaggggtcgcaag

SEQ ID NO: 3225280 - DNA, 25 bp, Homo sapien
ctgagtgcaggcaggctgagtccaa

SEQ ID NO: 3225281 - DNA, 25 bp, Homo sapien
ctggcaggcaggagtaggggtcgca

SEQ ID NO: 3225282 - DNA, 25 bp, Homo sapien
tttttattcttccctccacaacaca

SEQ ID NO: 3225283 - DNA, 25 bp, Homo sapien
ttttattcttccctccacaacacat

SEQ ID NO: 3225284 - DNA, 25 bp, Homo sapien
tgaagtttttattcttccctccaca

SEQ ID NO: 3225285 - DNA, 25 bp, Homo sapien
tatggatgcggctacacctggatgt

SEQ ID NO: 3225286 - DNA, 25 bp, Homo sapien
acctggatgtgtaatgctccatgca

SEQ ID NO: 3225287 - DNA, 25 bp, Homo sapien
catgcattattatggatgcggctac

SEQ ID NO: 3225288 - DNA, 25 bp, Homo sapien
aagggcattcctagggcattgctca

SEQ ID NO: 3225289 - DNA, 25 bp, Homo sapien
ccactacgtggcaaagagtgtggcc

SEQ ID NO: 3225290 - DNA, 25 bp, Homo sapien
ggccacactctttgccacgtagtgg

SEQ ID NO: 3225291 - DNA, 25 bp, Homo sapien
tggcacaccatcacttttaactata

SEQ ID NO: 3225292 - DNA, 25 bp, Homo sapien
atggaaaaacctgttgaatgttacg

SEQ ID NO: 3225293 - DNA, 25 bp, Homo sapien
tttaaccgctgtatttaagttagca

SEQ ID NO: 3225294 - DNA, 25 bp, Homo sapien
cataccaatggttttgtgcccataa

SEQ ID NO: 3225295 - DNA, 25 bp, Homo sapien
ctccatcatatgaccagacttttgc

SEQ ID NO: 3225296 - DNA, 25 bp, Homo sapien
tatgaccagacttttgcagtacagg

SEQ ID NO: 3225297 - DNA, 25 bp, Homo sapien
tcatatgaccagacttttgcagtac

SEQ ID NO: 3225298 - DNA, 25 bp, Homo sapien
cagacttttgcagtacaggatgaca

SEQ ID NO: 3225299 - DNA, 25 bp, Homo sapien
caaaagggaatgctttcctagtaca

SEQ ID NO: 3225300 - DNA, 25 bp, Homo sapien
gaataaaatgaagtctaatgatgcc

SEQ ID NO: 3225301 - DNA, 25 bp, Homo sapien
tgaataaaatgaagtctaatgatgc

SEQ ID NO: 3225302 - DNA, 25 bp, Homo sapien
gctcagtgcagctcttgttgaccgt

SEQ ID NO: 3225303 - DNA, 25 bp, Homo sapien
ccttgggcggtgatatggtggccac

SEQ ID NO: 3225304 - DNA, 25 bp, Homo sapien
tgagtgaagaccatgctatctgcat

SEQ ID NO: 3225305 - DNA, 25 bp, Homo sapien
cttgttgaccgttgagtgaagacca

SEQ ID NO: 3225306 - DNA, 25 bp, Homo sapien
aactgctctgattaacagttccttc

SEQ ID NO: 3225307 - DNA, 25 bp, Homo sapien
atgttctaactgctctgattaacag

SEQ ID NO: 3225308 - DNA, 25 bp, Homo sapien
cctcttcgctatgccaccattgcca

SEQ ID NO: 3225309 - DNA, 25 bp, Homo sapien
cttcctcttcgctatgccaccattg

SEQ ID NO: 3225310 - DNA, 25 bp, Homo sapien
tggcttagcaccttgtgtgggagta

SEQ ID NO: 3225311 - DNA, 25 bp, Homo sapien
cttggcttagcaccttgtgtgggag

SEQ ID NO: 3225312 - DNA, 25 bp, Homo sapien
ttggcttagcaccttgtgtgggagt

SEQ ID NO: 3225313 - DNA, 25 bp, Homo sapien
tttcctaatgctctgatcagtgttt

SEQ ID NO: 3225314 - DNA, 25 bp, Homo sapien
agtgtttcccacagcttgttgccag

SEQ ID NO: 3225315 - DNA, 25 bp, Homo sapien
cctaatgctctgatcagtgtttccc

SEQ ID NO: 3225316 - DNA, 25 bp, Homo sapien
ctaatgctctgatcagtgtttccca

SEQ ID NO: 3225317 - DNA, 25 bp, Homo sapien
gagggaaaactacacctgtgtgatc

SEQ ID NO: 3225318 - DNA, 25 bp, Homo sapien
ggagggaaaactacacctgtgtgat

SEQ ID NO: 3225319 - DNA, 25 bp, Homo sapien
gggaaaactacacctgtgtgatcct

SEQ ID NO: 3225320 - DNA, 25 bp, Homo sapien
agggaaaactacacctgtgtgatcc

SEQ ID NO: 3225321 - DNA, 25 bp, Homo sapien
tgtgaaggctcggaacgaagtatca

SEQ ID NO: 3225322 - DNA, 25 bp, Homo sapien
tggagaaggtgtgaaggctcggaac

SEQ ID NO: 3225323 - DNA, 25 bp, Homo sapien
aaggctcggaacgaagtatcaattc

SEQ ID NO: 3225324 - DNA, 25 bp, Homo sapien
gctcggaacgaagtatcaattccca

SEQ ID NO: 3225325 - DNA, 25 bp, Homo sapien
ggtggactttgccattgatgttatt

SEQ ID NO: 3225326 - DNA, 25 bp, Homo sapien
aagatgaactggtggactttgccat

SEQ ID NO: 3225327 - DNA, 25 bp, Homo sapien
gatgaactggtggactttgccattg

SEQ ID NO: 3225328 - DNA, 25 bp, Homo sapien
gaactggtggactttgccattgatg

SEQ ID NO: 3225329 - DNA, 25 bp, Homo sapien
tgtagacacttctggggccatattc

SEQ ID NO: 3225330 - DNA, 25 bp, Homo sapien
ggccatattctgaatggctccttga

SEQ ID NO: 3225331 - DNA, 25 bp, Homo sapien
ctgaatggctccttgacagcaattt

SEQ ID NO: 3225332 - DNA, 25 bp, Homo sapien
ctcactttggttataaagaccatgt

SEQ ID NO: 3225333 - DNA, 25 bp, Homo sapien
taatattgtagaacaggttccaagg

SEQ ID NO: 3225334 - DNA, 25 bp, Homo sapien
gattacgtctaaactatagccagct

SEQ ID NO: 3225335 - DNA, 25 bp, Homo sapien
cctcttcacttggacggattacgtc

SEQ ID NO: 3225336 - DNA, 25 bp, Homo sapien
tcatctgagtgcaagaaaatgtggt

SEQ ID NO: 3225337 - DNA, 25 bp, Homo sapien
tactcacaggcgatatgagcatttt

SEQ ID NO: 3225338 - DNA, 25 bp, Homo sapien
tgttcagtgttttccacgatactca

SEQ ID NO: 3225339 - DNA, 25 bp, Homo sapien
tcactggtcctgaactatctgccat

SEQ ID NO: 3225340 - DNA, 25 bp, Homo sapien
caaaacgataaaactctggaaggct

SEQ ID NO: 3225341 - DNA, 25 bp, Homo sapien
gacacagtcagatatcctctgaagg

SEQ ID NO: 3225342 - DNA, 25 bp, Homo sapien
tcatcgagtgcacagatgccagcag

SEQ ID NO: 3225343 - DNA, 25 bp, Homo sapien
ggaagaaccaacaattgagcattgg

SEQ ID NO: 3225344 - DNA, 25 bp, Homo sapien
tagcatgccggaagaggaagaacca

SEQ ID NO: 3225345 - DNA, 25 bp, Homo sapien
tcaacttgtttaagacactgccagt

SEQ ID NO: 3225346 - DNA, 25 bp, Homo sapien
tttcaacttgtttaagacactgcca

SEQ ID NO: 3225347 - DNA, 25 bp, Homo sapien
cctttcaacttgtttaagacactgc

SEQ ID NO: 3225348 - DNA, 25 bp, Homo sapien
aacttgtttaagacactgccagttt

SEQ ID NO: 3225349 - DNA, 25 bp, Homo sapien
tctcagactttcacagtgtgcctgt

SEQ ID NO: 3225350 - DNA, 25 bp, Homo sapien
actttcacagtgtgcctgtggagcc

SEQ ID NO: 3225351 - DNA, 25 bp, Homo sapien
cagactttcacagtgtgcctgtgga

SEQ ID NO: 3225352 - DNA, 25 bp, Homo sapien
cttctgggctctcagactttcacag

SEQ ID NO: 3225353 - DNA, 25 bp, Homo sapien
ctgaaagtgtcctaatgatatagac

SEQ ID NO: 3225354 - DNA, 25 bp, Homo sapien
ccaactgaaagtgtcctaatgatat

SEQ ID NO: 3225355 - DNA, 25 bp, Homo sapien
tatctggacctgagttgtaaggaat

SEQ ID NO: 3225356 - DNA, 25 bp, Homo sapien
atatagacactagtatctggacctg

SEQ ID NO: 3225357 - DNA, 25 bp, Homo sapien
aaaattcatatttcggatattctgg

SEQ ID NO: 3225358 - DNA, 25 bp, Homo sapien
tcaagacatggaaagatctgtctaa

SEQ ID NO: 3225359 - DNA, 25 bp, Homo sapien
tatattctccaagttatcattgttc

SEQ ID NO: 3225360 - DNA, 25 bp, Homo sapien
ttctcaatttctacgaagaatgtag

SEQ ID NO: 3225361 - DNA, 25 bp, Homo sapien
gaggagacacgtgcaagccttctta

SEQ ID NO: 3225362 - DNA, 25 bp, Homo sapien
tagaggagacacgtgcaagccttct

SEQ ID NO: 3225363 - DNA, 25 bp, Homo sapien
tcttgagggagctcgtatatttaat

SEQ ID NO: 3225364 - DNA, 25 bp, Homo sapien
agggagctcgtatatttaatcttgg

SEQ ID NO: 3225365 - DNA, 25 bp, Homo sapien
cactcctccatactggattcctcat

SEQ ID NO: 3225366 - DNA, 25 bp, Homo sapien
ctcctccatactggattcctcataa

SEQ ID NO: 3225367 - DNA, 25 bp, Homo sapien
actcctccatactggattcctcata

SEQ ID NO: 3225368 - DNA, 25 bp, Homo sapien
tcctccatactggattcctcataat

SEQ ID NO: 3225369 - DNA, 25 bp, Homo sapien
cggcatcgaccctggctttgggcaa

SEQ ID NO: 3225370 - DNA, 25 bp, Homo sapien
cccagacctcagttgcttgctgttt

SEQ ID NO: 3225371 - DNA, 25 bp, Homo sapien
gggcaagttctagcctataactctt

SEQ ID NO: 3225372 - DNA, 25 bp, Homo sapien
tgttctgtccacaatccggcatcga

SEQ ID NO: 3225373 - DNA, 25 bp, Homo sapien
tctattgctggtccataatggtccg

SEQ ID NO: 3225374 - DNA, 25 bp, Homo sapien
tggtccgagccattcatcaccagga

SEQ ID NO: 3225375 - DNA, 25 bp, Homo sapien
gcagtatgatggtaaagttgccaga

SEQ ID NO: 3225376 - DNA, 25 bp, Homo sapien
ctaccagcaacagtatgagattttg

SEQ ID NO: 3225377 - DNA, 25 bp, Homo sapien
ccattcagggtgggccacgagggag

SEQ ID NO: 3225378 - DNA, 25 bp, Homo sapien
tccattcagggtgggccacgaggga

SEQ ID NO: 3225379 - DNA, 25 bp, Homo sapien
cctccattcagggtgggccacgagg

SEQ ID NO: 3225380 - DNA, 25 bp, Homo sapien
atcctccattcagggtgggccacga

SEQ ID NO: 3225381 - DNA, 25 bp, Homo sapien
tactgtcagtaaatagaataatctg

SEQ ID NO: 3225382 - DNA, 25 bp, Homo sapien
gttgaaacacttgaactctgactct

SEQ ID NO: 3225383 - DNA, 25 bp, Homo sapien
taagtcagggaccactgtactgtca

SEQ ID NO: 3225384 - DNA, 25 bp, Homo sapien
catgagcccttagaactgacttgat

SEQ ID NO: 3225385 - DNA, 25 bp, Homo sapien
ttgttgcttgcaaatttctccccat

SEQ ID NO: 3225386 - DNA, 25 bp, Homo sapien
cttgcaaatttctccccattgttcc

SEQ ID NO: 3225387 - DNA, 25 bp, Homo sapien
tctttgttgcttgcaaatttctccc

SEQ ID NO: 3225388 - DNA, 25 bp, Homo sapien
aaatttctccccattgttccatcct

SEQ ID NO: 3225389 - DNA, 25 bp, Homo sapien
gggtatccatttctcgcctttcatc

SEQ ID NO: 3225390 - DNA, 25 bp, Homo sapien
aacatcaaataaagtgccacttctg

SEQ ID NO: 3225391 - DNA, 25 bp, Homo sapien
taaacaaagtgcttacgggtatcca

SEQ ID NO: 3225392 - DNA, 25 bp, Homo sapien
gagatatttcactttgtgttgcaac

SEQ ID NO: 3225393 - DNA, 25 bp, Homo sapien
tagcttgtctaacatagcacgtggc

SEQ ID NO: 3225394 - DNA, 25 bp, Homo sapien
catgaggtccccataagtatgcggt

SEQ ID NO: 3225395 - DNA, 25 bp, Homo sapien
tctgcaggtagtaggtaaaatagct

SEQ ID NO: 3225396 - DNA, 25 bp, Homo sapien
tatgcggttactacatcattttgag

SEQ ID NO: 3225397 - DNA, 25 bp, Homo sapien
ccttgcatggcagcccacatccact

SEQ ID NO: 3225398 - DNA, 25 bp, Homo sapien
atggcagcccacatccacttcatat

SEQ ID NO: 3225399 - DNA, 25 bp, Homo sapien
gcccacatccacttcatatttgtac

SEQ ID NO: 3225400 - DNA, 25 bp, Homo sapien
ccacatccacttcatatttgtacat

SEQ ID NO: 3225401 - DNA, 25 bp, Homo sapien
tgctttttcagtatagtactccttg

SEQ ID NO: 3225402 - DNA, 25 bp, Homo sapien
gctgatggagcccattgctttttca

SEQ ID NO: 3225403 - DNA, 25 bp, Homo sapien
tatagtactccttgccgtactttgt

SEQ ID NO: 3225404 - DNA, 25 bp, Homo sapien
tcagtatagtactccttgccgtact

SEQ ID NO: 3225405 - DNA, 25 bp, Homo sapien
cttggcaacatctgatattctcctc

SEQ ID NO: 3225406 - DNA, 25 bp, Homo sapien
ggcaacatctgatattctcctcgga

SEQ ID NO: 3225407 - DNA, 25 bp, Homo sapien
atctgatattctcctcggatgtccc

SEQ ID NO: 3225408 - DNA, 25 bp, Homo sapien
catctgatattctcctcggatgtcc

SEQ ID NO: 3225409 - DNA, 25 bp, Homo sapien
tctgcagtgcactacgtggagatga

SEQ ID NO: 3225410 - DNA, 25 bp, Homo sapien
gacatttgagagaatttctcgtgga

SEQ ID NO: 3225411 - DNA, 25 bp, Homo sapien
ttctcgtggagtccatctgcagtgc

SEQ ID NO: 3225412 - DNA, 25 bp, Homo sapien
cactacgtggagatgagttaacttc

SEQ ID NO: 3225413 - DNA, 25 bp, Homo sapien
cttggtgcagtcagtctctcgcagc

SEQ ID NO: 3225414 - DNA, 25 bp, Homo sapien
tctcagtatgacaaggaagtcggac

SEQ ID NO: 3225415 - DNA, 25 bp, Homo sapien
gaagtcggacagtggaacaaattcc

SEQ ID NO: 3225416 - DNA, 25 bp, Homo sapien
caaattccgagacgtaagttccgcg

SEQ ID NO: 3225417 - DNA, 25 bp, Homo sapien
agaaagcagcgagttggcagagcag

SEQ ID NO: 3225418 - DNA, 25 bp, Homo sapien
cagaaagcagcgagttggcagagca

SEQ ID NO: 3225419 - DNA, 25 bp, Homo sapien
gggaatgcgacagcctttcttagag

SEQ ID NO: 3225420 - DNA, 25 bp, Homo sapien
gattgagcactcacaagagggaatg

SEQ ID NO: 3225421 - DNA, 25 bp, Homo sapien
tgcgacagcctttcttagagagcat

SEQ ID NO: 3225422 - DNA, 25 bp, Homo sapien
ctgaaggtcaacaggattgagcact

SEQ ID NO: 3225423 - DNA, 25 bp, Homo sapien
cttctaaccagcatcagactaacag

SEQ ID NO: 3225424 - DNA, 25 bp, Homo sapien
tccttctaaccagcatcagactaac

SEQ ID NO: 3225425 - DNA, 25 bp, Homo sapien
cagcatccttctaaccagcatcaga

SEQ ID NO: 3225426 - DNA, 25 bp, Homo sapien
gcatccttctaaccagcatcagact

SEQ ID NO: 3225427 - DNA, 25 bp, Homo sapien
aatgatgaaaattgcatttgccttc

SEQ ID NO: 3225428 - DNA, 25 bp, Homo sapien
aaggcttcttctaccgccttgcttc

SEQ ID NO: 3225429 - DNA, 25 bp, Homo sapien
atatcttctactaaggcttcttcta

SEQ ID NO: 3225430 - DNA, 25 bp, Homo sapien
gatgaaaattgcatttgccttctat

SEQ ID NO: 3225431 - DNA, 25 bp, Homo sapien
agagcagggctttcgtggacaaaca

SEQ ID NO: 3225432 - DNA, 25 bp, Homo sapien
cgaagagcagggctttcgtggacaa

SEQ ID NO: 3225433 - DNA, 25 bp, Homo sapien
cggaggagctttgccccacatgcaa

SEQ ID NO: 3225434 - DNA, 25 bp, Homo sapien
tttatacctgtatatcggaggagct

SEQ ID NO: 3225435 - DNA, 25 bp, Homo sapien
agccgggtgattgctaagcctgtcc

SEQ ID NO: 3225436 - DNA, 25 bp, Homo sapien
ttctcacgaggaacgcagaggatgg

SEQ ID NO: 3225437 - DNA, 25 bp, Homo sapien
gccacctcaggtcatatgaaaagat

SEQ ID NO: 3225438 - DNA, 25 bp, Homo sapien
cacaggcaactacaaagccgggtga

SEQ ID NO: 3225439 - DNA, 25 bp, Homo sapien
caaagccaacaacccagcgttctat

SEQ ID NO: 3225440 - DNA, 25 bp, Homo sapien
ccttgcatattcttgtccaaagcca

SEQ ID NO: 3225441 - DNA, 25 bp, Homo sapien
ttctcctgtttgctatgatactgct

SEQ ID NO: 3225442 - DNA, 25 bp, Homo sapien
agcgttctatatcagttccctccgg

SEQ ID NO: 3225443 - DNA, 25 bp, Homo sapien
caccattattgctacaggtagcgaa

SEQ ID NO: 3225444 - DNA, 25 bp, Homo sapien
gttcaacacggccaaccaaccatgt

SEQ ID NO: 3225445 - DNA, 25 bp, Homo sapien
ttgctacaggtagcgaaacctcata

SEQ ID NO: 3225446 - DNA, 25 bp, Homo sapien
tacaggtagcgaaacctcatatttg

SEQ ID NO: 3225447 - DNA, 25 bp, Homo sapien
caattgagtgtgactagatgaagca

SEQ ID NO: 3225448 - DNA, 25 bp, Homo sapien
aattcaaactgagtctcctcggtga

SEQ ID NO: 3225449 - DNA, 25 bp, Homo sapien
tgtctactgattgagatgtagctca

SEQ ID NO: 3225450 - DNA, 25 bp, Homo sapien
gtctcctcggtgaattgtctactga

SEQ ID NO: 3225451 - DNA, 25 bp, Homo sapien
cccactttgtcagcattacctatca

SEQ ID NO: 3225452 - DNA, 25 bp, Homo sapien
gatctctgtgcatcacagcccactt

SEQ ID NO: 3225453 - DNA, 25 bp, Homo sapien
tatagtctgtcaccctttgaactgg

SEQ ID NO: 3225454 - DNA, 25 bp, Homo sapien
tgtcaccctttgaactggtgatctc

SEQ ID NO: 3225455 - DNA, 25 bp, Homo sapien
tgtcataaaatatgtctgagagttt

SEQ ID NO: 3225456 - DNA, 25 bp, Homo sapien
aaaatatgtctgagagtttctctag

SEQ ID NO: 3225457 - DNA, 25 bp, Homo sapien
tgtcttggtgaattctcatacttct

SEQ ID NO: 3225458 - DNA, 25 bp, Homo sapien
ctttcttcttaagagtagatatgcc

SEQ ID NO: 3225459 - DNA, 25 bp, Homo sapien
ggccattgaatgttgatttgcccaa

SEQ ID NO: 3225460 - DNA, 25 bp, Homo sapien
gccttcacctcttttaccactgcta

SEQ ID NO: 3225461 - DNA, 25 bp, Homo sapien
tcacgtgtggccattgaatgttgat

SEQ ID NO: 3225462 - DNA, 25 bp, Homo sapien
gaaatcaagtgttgtacaaattcac

SEQ ID NO: 3225463 - DNA, 25 bp, Homo sapien
tgaatacagtcttcccaaccatgcg

SEQ ID NO: 3225464 - DNA, 25 bp, Homo sapien
tatggctggtatttcaggctccaca

SEQ ID NO: 3225465 - DNA, 25 bp, Homo sapien
cagcttttgcttacaggagtgggag

SEQ ID NO: 3225466 - DNA, 25 bp, Homo sapien
tcttggtcattaagctggagagagc

SEQ ID NO: 3225467 - DNA, 25 bp, Homo sapien
cgcagccagatagcctttacattct

SEQ ID NO: 3225468 - DNA, 25 bp, Homo sapien
tcgcagccagatagcctttacattc

SEQ ID NO: 3225469 - DNA, 25 bp, Homo sapien
ggaccaaaggtgaacaatgatgctc

SEQ ID NO: 3225470 - DNA, 25 bp, Homo sapien
gggatcataggctgtcaatgcacag

SEQ ID NO: 3225471 - DNA, 25 bp, Homo sapien
cttctgtagagtaatgaaagctgac

SEQ ID NO: 3225472 - DNA, 25 bp, Homo sapien
caatttctggaatgcgtgaatccac

SEQ ID NO: 3225473 - DNA, 25 bp, Homo sapien
ttctccactgtacttctggattttt

SEQ ID NO: 3225474 - DNA, 25 bp, Homo sapien
tacttctggatttttaaatagacca

SEQ ID NO: 3225475 - DNA, 25 bp, Homo sapien
ttaaatagaccatatcttcattcat

SEQ ID NO: 3225476 - DNA, 25 bp, Homo sapien
ttttaaatagaccatatcttcattc

SEQ ID NO: 3225477 - DNA, 25 bp, Homo sapien
aagattaaagattccgctggacgac

SEQ ID NO: 3225478 - DNA, 25 bp, Homo sapien
gattccgctggacgactccatgcta

SEQ ID NO: 3225479 - DNA, 25 bp, Homo sapien
ttaaagattccgctggacgactcca

SEQ ID NO: 3225480 - DNA, 25 bp, Homo sapien
cgctggacgactccatgctaggcat

SEQ ID NO: 3225481 - DNA, 25 bp, Homo sapien
taaacaagcacgagcatagaaagga

SEQ ID NO: 3225482 - DNA, 25 bp, Homo sapien
taaataaacaagcacgagcatagaa

SEQ ID NO: 3225483 - DNA, 25 bp, Homo sapien
ctgatgtaagaacaatgatgcaaac

SEQ ID NO: 3225484 - DNA, 25 bp, Homo sapien
acaagcacgagcatagaaaggaaga

SEQ ID NO: 3225485 - DNA, 25 bp, Homo sapien
tatacggtttaagtatatgctttac

SEQ ID NO: 3225486 - DNA, 25 bp, Homo sapien
cctgtgaatttagcgacacggaaca

SEQ ID NO: 3225487 - DNA, 25 bp, Homo sapien
cagaatgtttatacggtttaagtat

SEQ ID NO: 3225488 - DNA, 25 bp, Homo sapien
aaaattccaacctgtgaatttagcg

SEQ ID NO: 3225489 - DNA, 25 bp, Homo sapien
cactcatcattatcccctgagagaa

SEQ ID NO: 3225490 - DNA, 25 bp, Homo sapien
agagaaggaaaactgcaggatccac

SEQ ID NO: 3225491 - DNA, 25 bp, Homo sapien
aggatccactcatcattatcccctg

SEQ ID NO: 3225492 - DNA, 25 bp, Homo sapien
atagagaaggaaaactgcaggatcc

SEQ ID NO: 3225493 - DNA, 25 bp, Homo sapien
tctgtgtatttattcctagtataag

SEQ ID NO: 3225494 - DNA, 25 bp, Homo sapien
atgccctctgtatatagtgtcctca

SEQ ID NO: 3225495 - DNA, 25 bp, Homo sapien
ttatcaatgccctctgtatatagtg

SEQ ID NO: 3225496 - DNA, 25 bp, Homo sapien
tcaatgccctctgtatatagtgtcc

SEQ ID NO: 3225497 - DNA, 25 bp, Homo sapien
ttgacagcatcgaacatagctctca

SEQ ID NO: 3225498 - DNA, 25 bp, Homo sapien
tgacagcatcgaacatagctctcag

SEQ ID NO: 3225499 - DNA, 25 bp, Homo sapien
cttgacagcatcgaacatagctctc

SEQ ID NO: 3225500 - DNA, 25 bp, Homo sapien
ttcttgtctggccaacggtagccca

SEQ ID NO: 3225501 - DNA, 25 bp, Homo sapien
cactaatctctgcagactggtagat

SEQ ID NO: 3225502 - DNA, 25 bp, Homo sapien
ttgtctggccaacggtagcccaaag

SEQ ID NO: 3225503 - DNA, 25 bp, Homo sapien
gtctggccaacggtagcccaaagca

SEQ ID NO: 3225504 - DNA, 25 bp, Homo sapien
actgagggaaatgtagtggtcaagc

SEQ ID NO: 3225505 - DNA, 25 bp, Homo sapien
tttgaagtcaaaagcaactgaggga

SEQ ID NO: 3225506 - DNA, 25 bp, Homo sapien
tgaagtcaaaagcaactgagggaaa

SEQ ID NO: 3225507 - DNA, 25 bp, Homo sapien
aatgtagtggtcaagcagatctgca

SEQ ID NO: 3225508 - DNA, 25 bp, Homo sapien
cctcttccggaaatgctgtctttat

SEQ ID NO: 3225509 - DNA, 25 bp, Homo sapien
tcctcttccggaaatgctgtcttta

SEQ ID NO: 3225510 - DNA, 25 bp, Homo sapien
ttcctcttccggaaatgctgtcttt

SEQ ID NO: 3225511 - DNA, 25 bp, Homo sapien
tagctgcaaaattggagtagtcttc

SEQ ID NO: 3225512 - DNA, 25 bp, Homo sapien
tcagacatccaccatttgcttcttg

SEQ ID NO: 3225513 - DNA, 25 bp, Homo sapien
aacttttcatacagatatagctgca

SEQ ID NO: 3225514 - DNA, 25 bp, Homo sapien
gacatccaccatttgcttcttgttc

SEQ ID NO: 3225515 - DNA, 25 bp, Homo sapien
tattggcattgagtggggtaagggt

SEQ ID NO: 3225516 - DNA, 25 bp, Homo sapien
tgggatgggatattggcattgagtg

SEQ ID NO: 3225517 - DNA, 25 bp, Homo sapien
ttgggggatacaagaggaggatgca

SEQ ID NO: 3225518 - DNA, 25 bp, Homo sapien
tgggggatacaagaggaggatgcaa

SEQ ID NO: 3225519 - DNA, 25 bp, Homo sapien
cagtaatggagagtgttgatggacc

SEQ ID NO: 3225520 - DNA, 25 bp, Homo sapien
ccattatggtaaagaatcgaggata

SEQ ID NO: 3225521 - DNA, 25 bp, Homo sapien
gagtgttgatggaccattatggtaa

SEQ ID NO: 3225522 - DNA, 25 bp, Homo sapien
gatggaccattatggtaaagaatcg

SEQ ID NO: 3225523 - DNA, 25 bp, Homo sapien
actgaaaaggcttgttttgtcatat

SEQ ID NO: 3225524 - DNA, 25 bp, Homo sapien
ggtactgaaaaggcttgttttgtca

SEQ ID NO: 3225525 - DNA, 25 bp, Homo sapien
cttaataactaagctttgaatactt

SEQ ID NO: 3225526 - DNA, 25 bp, Homo sapien
tactgaaaaggcttgttttgtcata

SEQ ID NO: 3225527 - DNA, 25 bp, Homo sapien
gctcaatgttccagctgtctcaata

SEQ ID NO: 3225528 - DNA, 25 bp, Homo sapien
tatagagctcaatgttccagctgtc

SEQ ID NO: 3225529 - DNA, 25 bp, Homo sapien
gctctggaaaatatagagctcaatg

SEQ ID NO: 3225530 - DNA, 25 bp, Homo sapien
gaaaatatagagctcaatgttccag

SEQ ID NO: 3225531 - DNA, 25 bp, Homo sapien
cacgtccgaataactggcagactca

SEQ ID NO: 3225532 - DNA, 25 bp, Homo sapien
gctgtatgacaaacacgtccgaata

SEQ ID NO: 3225533 - DNA, 25 bp, Homo sapien
tatgacaaacacgtccgaataactg

SEQ ID NO: 3225534 - DNA, 25 bp, Homo sapien
caaacacgtccgaataactggcaga

SEQ ID NO: 3225535 - DNA, 25 bp, Homo sapien
tgacttctagaccagcacaaattga

SEQ ID NO: 3225536 - DNA, 25 bp, Homo sapien
ggtgtcattcactgcatcgctgact

SEQ ID NO: 3225537 - DNA, 25 bp, Homo sapien
tttccaaactatccaagggagctct

SEQ ID NO: 3225538 - DNA, 25 bp, Homo sapien
tatctgtcttcgacagcccttggag

SEQ ID NO: 3225539 - DNA, 25 bp, Homo sapien
aatttgccttgagttaatctgtctc

SEQ ID NO: 3225540 - DNA, 25 bp, Homo sapien
tgtgaggccactcaaacgctgatga

SEQ ID NO: 3225541 - DNA, 25 bp, Homo sapien
aacgctgatgagttgctattgcaaa

SEQ ID NO: 3225542 - DNA, 25 bp, Homo sapien
gagttgctattgcaaatttgccttg

SEQ ID NO: 3225543 - DNA, 25 bp, Homo sapien
agaggttgacatgtgagacagtgtg

SEQ ID NO: 3225544 - DNA, 25 bp, Homo sapien
gaggttgacatgtgagacagtgtgt

SEQ ID NO: 3225545 - DNA, 25 bp, Homo sapien
tatcaacactttgcattagtgtggt

SEQ ID NO: 3225546 - DNA, 25 bp, Homo sapien
tacgtttattacaatagatgaagca

SEQ ID NO: 3225547 - DNA, 25 bp, Homo sapien
tctgtgctgtacaattctatgggtt

SEQ ID NO: 3225548 - DNA, 25 bp, Homo sapien
caaaaataactgagcataaagtaca

SEQ ID NO: 3225549 - DNA, 25 bp, Homo sapien
gacacagacctataaacagtacttt

SEQ ID NO: 3225550 - DNA, 25 bp, Homo sapien
tcactagacacagacctataaacag

SEQ ID NO: 3225551 - DNA, 25 bp, Homo sapien
tttcctttggaagaccgcttatcaa

SEQ ID NO: 3225552 - DNA, 25 bp, Homo sapien
cgcttatcaaggacttttggattca

SEQ ID NO: 3225553 - DNA, 25 bp, Homo sapien
ttatgttctggaaatctgcagtaag

SEQ ID NO: 3225554 - DNA, 25 bp, Homo sapien
tatgttctggaaatctgcagtaagt

SEQ ID NO: 3225555 - DNA, 25 bp, Homo sapien
aaattgcaacgccaatatctgtgcg

SEQ ID NO: 3225556 - DNA, 25 bp, Homo sapien
aaaagtgtgaaggtcctggcgatgt

SEQ ID NO: 3225557 - DNA, 25 bp, Homo sapien
gacacgcgtcacctccaaattgcaa

SEQ ID NO: 3225558 - DNA, 25 bp, Homo sapien
tggcgatgtttataggcccagcttc

SEQ ID NO: 3225559 - DNA, 25 bp, Homo sapien
ctgtgaagccagaaagaattaaggt

SEQ ID NO: 3225560 - DNA, 25 bp, Homo sapien
tgtaaatatgttcactgttcacctc

SEQ ID NO: 3225561 - DNA, 25 bp, Homo sapien
aatgtaaatatgttcactgttcacc

SEQ ID NO: 3225562 - DNA, 25 bp, Homo sapien
agccagaaagaattaaggttcactg

SEQ ID NO: 3225563 - DNA, 25 bp, Homo sapien
taattgttaacctcagggatgaaaa

SEQ ID NO: 3225564 - DNA, 25 bp, Homo sapien
tgatcgattgcataaacttgtttca

SEQ ID NO: 3225565 - DNA, 25 bp, Homo sapien
ttgttaacctcagggatgaaaatat

SEQ ID NO: 3225566 - DNA, 25 bp, Homo sapien
aatatttgatcgattgcataaactt

SEQ ID NO: 3225567 - DNA, 25 bp, Homo sapien
tgcaatgtgggggatagtattccta

SEQ ID NO: 3225568 - DNA, 25 bp, Homo sapien
ttcctaagaactccatgaggccctc

SEQ ID NO: 3225569 - DNA, 25 bp, Homo sapien
gggatagtattcctaagaactccat

SEQ ID NO: 3225570 - DNA, 25 bp, Homo sapien
tgaggccctccatactttttgccac

SEQ ID NO: 3225571 - DNA, 25 bp, Homo sapien
ttcaatggctttaaacacagccaac

SEQ ID NO: 3225572 - DNA, 25 bp, Homo sapien
tgggattgaaattgggagctgggaa

SEQ ID NO: 3225573 - DNA, 25 bp, Homo sapien
ccttggagtgctcctcctagcattt

SEQ ID NO: 3225574 - DNA, 25 bp, Homo sapien
gagtgctcctcctagcatttgggca

SEQ ID NO: 3225575 - DNA, 25 bp, Homo sapien
caaatccttggagtgctcctcctag

SEQ ID NO: 3225576 - DNA, 25 bp, Homo sapien
gctcctcctagcatttgggcatcca

SEQ ID NO: 3225577 - DNA, 25 bp, Homo sapien
gttgatcagcatgtctttgtcacag

SEQ ID NO: 3225578 - DNA, 25 bp, Homo sapien
cattgcagcgctgagtcagaatgtt

SEQ ID NO: 3225579 - DNA, 25 bp, Homo sapien
ggtatgcctctgcaatcatcatcct

SEQ ID NO: 3225580 - DNA, 25 bp, Homo sapien
tacatgctctggtatgcctctgcaa

SEQ ID NO: 3225581 - DNA, 25 bp, Homo sapien
gctcttcctatacaacaacaaacag

SEQ ID NO: 3225582 - DNA, 25 bp, Homo sapien
acatgcatactaaatgtgctatgaa

SEQ ID NO: 3225583 - DNA, 25 bp, Homo sapien
tacatgcatactaaatgtgctatga

SEQ ID NO: 3225584 - DNA, 25 bp, Homo sapien
atatatgctcttcctatacaacaac

SEQ ID NO: 3225585 - DNA, 25 bp, Homo sapien
tgaagtgatccgaaagctgctccct

SEQ ID NO: 3225586 - DNA, 25 bp, Homo sapien
gcatcatacagtggtggtgggtaca

SEQ ID NO: 3225587 - DNA, 25 bp, Homo sapien
catggcatgccagagctcatgagca

SEQ ID NO: 3225588 - DNA, 25 bp, Homo sapien
ccagccatcacatctttgaagtgat

SEQ ID NO: 3225589 - DNA, 25 bp, Homo sapien
cagtaggcttctcgcatctggaaaa

SEQ ID NO: 3225590 - DNA, 25 bp, Homo sapien
gcttctcgcatctggaaaatttctc

SEQ ID NO: 3225591 - DNA, 25 bp, Homo sapien
ctagtatttcaatgaggcaattctc

SEQ ID NO: 3225592 - DNA, 25 bp, Homo sapien
gcaagcagtaggcttctcgcatctg

SEQ ID NO: 3225593 - DNA, 25 bp, Homo sapien
ctctgaagtgtcctgaggtctctga

SEQ ID NO: 3225594 - DNA, 25 bp, Homo sapien
aatgtcctcttggaggttattgctg

SEQ ID NO: 3225595 - DNA, 25 bp, Homo sapien
tcatgagagtatctctgaagtgtcc

SEQ ID NO: 3225596 - DNA, 25 bp, Homo sapien
tcctcttggaggttattgctgtatt

SEQ ID NO: 3225597 - DNA, 25 bp, Homo sapien
tttgcttagatagtgcaaagtaatg

SEQ ID NO: 3225598 - DNA, 25 bp, Homo sapien
ttatttgcttagatagtgcaaagta

SEQ ID NO: 3225599 - DNA, 25 bp, Homo sapien
tagatagtgcaaagtaatgtaaatt

SEQ ID NO: 3225600 - DNA, 25 bp, Homo sapien
gcttagatagtgcaaagtaatgtaa

SEQ ID NO: 3225601 - DNA, 25 bp, Homo sapien
tcatgaaaggtttctctgaccaaac

SEQ ID NO: 3225602 - DNA, 25 bp, Homo sapien
aaatcatcatgaaaggtttctctga

SEQ ID NO: 3225603 - DNA, 25 bp, Homo sapien
cgtgagagtaaaggtgaggctaaat

SEQ ID NO: 3225604 - DNA, 25 bp, Homo sapien
ctcccgtgagagtaaaggtgaggct

SEQ ID NO: 3225605 - DNA, 25 bp, Homo sapien
gcagggtctgtatatccttcctctc

SEQ ID NO: 3225606 - DNA, 25 bp, Homo sapien
cgcagggtctgtatatccttcctct

SEQ ID NO: 3225607 - DNA, 25 bp, Homo sapien
gagaagtagcatcagaaccactcca

SEQ ID NO: 3225608 - DNA, 25 bp, Homo sapien
cagagaagtagcatcagaaccactc

SEQ ID NO: 3225609 - DNA, 25 bp, Homo sapien
cactccagcccattttaacccaggt

SEQ ID NO: 3225610 - DNA, 25 bp, Homo sapien
agaagtagcatcagaaccactccag

SEQ ID NO: 3225611 - DNA, 25 bp, Homo sapien
gcacaggatcatttgcagcatggtt

SEQ ID NO: 3225612 - DNA, 25 bp, Homo sapien
agccgcagctgctggtagctcttgt

SEQ ID NO: 3225613 - DNA, 25 bp, Homo sapien
gctgctggtagctcttgttgcacag

SEQ ID NO: 3225614 - DNA, 25 bp, Homo sapien
catggttttgtgctcccccgtcttc

SEQ ID NO: 3225615 - DNA, 25 bp, Homo sapien
tttagggaatgtcaaacaaagggca

SEQ ID NO: 3225616 - DNA, 25 bp, Homo sapien
aatggccttgatgcagtattgactg

SEQ ID NO: 3225617 - DNA, 25 bp, Homo sapien
caaagggcaaactaacatgagtgca

SEQ ID NO: 3225618 - DNA, 25 bp, Homo sapien
tagggtaggccatctgttgaaaatt

SEQ ID NO: 3225619 - DNA, 25 bp, Homo sapien
gattccacgtgacctgcaatcccgt

SEQ ID NO: 3225620 - DNA, 25 bp, Homo sapien
acgggattgcaggtcacgtggaatc

SEQ ID NO: 3225621 - DNA, 25 bp, Homo sapien
ttagttatctgactaccccaggcaa

SEQ ID NO: 3225622 - DNA, 25 bp, Homo sapien
tctttatttcacgaacttagttatc

SEQ ID NO: 3225623 - DNA, 25 bp, Homo sapien
cacgaacttagttatctgactaccc

SEQ ID NO: 3225624 - DNA, 25 bp, Homo sapien
tagttctcatccattcttactgaaa

SEQ ID NO: 3225625 - DNA, 25 bp, Homo sapien
atatgagaattaagtgtaaaagtcc

SEQ ID NO: 3225626 - DNA, 25 bp, Homo sapien
gaattaagtgtaaaagtcctctctg

SEQ ID NO: 3225627 - DNA, 25 bp, Homo sapien
cctactagagcttaaatatgagaat

SEQ ID NO: 3225628 - DNA, 25 bp, Homo sapien
aacttcctactagagcttaaatatg

SEQ ID NO: 3225629 - DNA, 25 bp, Homo sapien
cttgcccagaaatattttgaaattc

SEQ ID NO: 3225630 - DNA, 25 bp, Homo sapien
atcttgcccagaaatattttgaaat

SEQ ID NO: 3225631 - DNA, 25 bp, Homo sapien
tcttgcccagaaatattttgaaatt

SEQ ID NO: 3225632 - DNA, 25 bp, Homo sapien
cataacattcattaatggcatctac

SEQ ID NO: 3225633 - DNA, 25 bp, Homo sapien
cagctcctgaaagtatccatcataa

SEQ ID NO: 3225634 - DNA, 25 bp, Homo sapien
agcagctcctgaaagtatccatcat

SEQ ID NO: 3225635 - DNA, 25 bp, Homo sapien
tcctgaaagtatccatcataacatt

SEQ ID NO: 3225636 - DNA, 25 bp, Homo sapien
agcaaaataggctggtttgtctcga

SEQ ID NO: 3225637 - DNA, 25 bp, Homo sapien
gctggtttgtctcgaacacagagaa

SEQ ID NO: 3225638 - DNA, 25 bp, Homo sapien
aaataggctggtttgtctcgaacac

SEQ ID NO: 3225639 - DNA, 25 bp, Homo sapien
taggctggtttgtctcgaacacaga

SEQ ID NO: 3225640 - DNA, 25 bp, Homo sapien
cttatggtcagcaggtctatttcac

SEQ ID NO: 3225641 - DNA, 25 bp, Homo sapien
tgtatcgtttccttatggtcagcag

SEQ ID NO: 3225642 - DNA, 25 bp, Homo sapien
ccatatcgctctttgtatcgtttcc

SEQ ID NO: 3225643 - DNA, 25 bp, Homo sapien
tgatatcatgaaatagggattttcc

SEQ ID NO: 3225644 - DNA, 25 bp, Homo sapien
aataaatcatgtgtcggaaacttac

SEQ ID NO: 3225645 - DNA, 25 bp, Homo sapien
tagagtctgccatgaagttatttga

SEQ ID NO: 3225646 - DNA, 25 bp, Homo sapien
gaatgagaacttttatctcagtttc

SEQ ID NO: 3225647 - DNA, 25 bp, Homo sapien
aatgtgggtccaaataaatcatgtg

SEQ ID NO: 3225648 - DNA, 25 bp, Homo sapien
aagttagcacctgccgatgttctaa

SEQ ID NO: 3225649 - DNA, 25 bp, Homo sapien
ctaagttagcacctgccgatgttct

SEQ ID NO: 3225650 - DNA, 25 bp, Homo sapien
gttagcacctgccgatgttctaaag

SEQ ID NO: 3225651 - DNA, 25 bp, Homo sapien
ttagcacctgccgatgttctaaaga

SEQ ID NO: 3225652 - DNA, 25 bp, Homo sapien
tgaatcattgctcctttgcccttca

SEQ ID NO: 3225653 - DNA, 25 bp, Homo sapien
gtactgaatcattgctcctttgccc

SEQ ID NO: 3225654 - DNA, 25 bp, Homo sapien
tcattgctcctttgcccttcaaggg

SEQ ID NO: 3225655 - DNA, 25 bp, Homo sapien
tcagtactgaatcattgctcctttg

SEQ ID NO: 3225656 - DNA, 25 bp, Homo sapien
tcttataatgccctgaagcaaaatt

SEQ ID NO: 3225657 - DNA, 25 bp, Homo sapien
accagcacagatggcaagcagtgct

SEQ ID NO: 3225658 - DNA, 25 bp, Homo sapien
ggcaaattcaggatagtaggcaaat

SEQ ID NO: 3225659 - DNA, 25 bp, Homo sapien
gtgcacagtactccaagtcctcttc

SEQ ID NO: 3225660 - DNA, 25 bp, Homo sapien
tgtctagaaagaggagtgcacagta

SEQ ID NO: 3225661 - DNA, 25 bp, Homo sapien
taatagtgccatgaacagtacaaat

SEQ ID NO: 3225662 - DNA, 25 bp, Homo sapien
ttgtataggagtctcaaaaattccc

SEQ ID NO: 3225663 - DNA, 25 bp, Homo sapien
cccaaactaggatggtcacactgca

SEQ ID NO: 3225664 - DNA, 25 bp, Homo sapien
taaagacggccttgagcagactctc

SEQ ID NO: 3225665 - DNA, 25 bp, Homo sapien
taaagcctgctgtagatgatcactc

SEQ ID NO: 3225666 - DNA, 25 bp, Homo sapien
taacaatttttactctgcgaagcca

SEQ ID NO: 3225667 - DNA, 25 bp, Homo sapien
gagttgcaatcaaacctgccatgtt

SEQ ID NO: 3225668 - DNA, 25 bp, Homo sapien
aaaatgcgagaatgttgtatgtgac

SEQ ID NO: 3225669 - DNA, 25 bp, Homo sapien
tacgatgaagtggaaagagcaaaca

SEQ ID NO: 3225670 - DNA, 25 bp, Homo sapien
ttctccatgttggttagtgtggtct

SEQ ID NO: 3225671 - DNA, 25 bp, Homo sapien
tccatgttggttagtgtggtctcga

SEQ ID NO: 3225672 - DNA, 25 bp, Homo sapien
tttctccatgttggttagtgtggtc

SEQ ID NO: 3225673 - DNA, 25 bp, Homo sapien
tctccatgttggttagtgtggtctc

SEQ ID NO: 3225674 - DNA, 25 bp, Homo sapien
aactttgtaacaaggattgagtagg

SEQ ID NO: 3225675 - DNA, 25 bp, Homo sapien
gccggataatgagataactttgtaa

SEQ ID NO: 3225676 - DNA, 25 bp, Homo sapien
acaaggattgagtagggcacatcca

SEQ ID NO: 3225677 - DNA, 25 bp, Homo sapien
cagccggataatgagataactttgt

SEQ ID NO: 3225678 - DNA, 25 bp, Homo sapien
ggtttcaggagcttgatgcctttca

SEQ ID NO: 3225679 - DNA, 25 bp, Homo sapien
tctatttccaatatatgaatgcata

SEQ ID NO: 3225680 - DNA, 25 bp, Homo sapien
gctgattacccaaattcactgctgt

SEQ ID NO: 3225681 - DNA, 25 bp, Homo sapien
tctgttctgtgttccctgtggagca

SEQ ID NO: 3225682 - DNA, 25 bp, Homo sapien
tttccttgtagacaaagcagcctgt

SEQ ID NO: 3225683 - DNA, 25 bp, Homo sapien
tcttctcgtccaaatgatcacaatt

SEQ ID NO: 3225684 - DNA, 25 bp, Homo sapien
caataaacgtaatcccaagaatgcc

SEQ ID NO: 3225685 - DNA, 25 bp, Homo sapien
catacacaattacaaagtcagcttc

SEQ ID NO: 3225686 - DNA, 25 bp, Homo sapien
gactgaagaattgatagaagtaggc

SEQ ID NO: 3225687 - DNA, 25 bp, Homo sapien
gggcacagcttcagcggatttaatc

SEQ ID NO: 3225688 - DNA, 25 bp, Homo sapien
gccagattgcttgtgtagattcctt

SEQ ID NO: 3225689 - DNA, 25 bp, Homo sapien
ggcatctctgaaggaaaggtaacag

SEQ ID NO: 3225690 - DNA, 25 bp, Homo sapien
ggattctcccagtacagttcaccag

SEQ ID NO: 3225691 - DNA, 25 bp, Homo sapien
gaagcaagccctcaacagaactgaa

SEQ ID NO: 3225692 - DNA, 25 bp, Homo sapien
gctgtgataaatgaatacggtactc

SEQ ID NO: 3225693 - DNA, 25 bp, Homo sapien
tataccctgtgaacccgaatatgga

SEQ ID NO: 3225694 - DNA, 25 bp, Homo sapien
tgatcaagagtacacttcctggcag

SEQ ID NO: 3225695 - DNA, 25 bp, Homo sapien
atgttcccacattcacaatatagat

SEQ ID NO: 3225696 - DNA, 25 bp, Homo sapien
ccacattcacaatatagatcaggca

SEQ ID NO: 3225697 - DNA, 25 bp, Homo sapien
tcccacattcacaatatagatcagg

SEQ ID NO: 3225698 - DNA, 25 bp, Homo sapien
acattcacaatatagatcaggcaca

SEQ ID NO: 3225699 - DNA, 25 bp, Homo sapien
tccctatgccgttaattacacccag

SEQ ID NO: 3225700 - DNA, 25 bp, Homo sapien
tatgctctagttagttccctatgcc

SEQ ID NO: 3225701 - DNA, 25 bp, Homo sapien
gctttgtaagtatggagacctgctg

SEQ ID NO: 3225702 - DNA, 25 bp, Homo sapien
tcatccacggctatgttgatgtggg

SEQ ID NO: 3225703 - DNA, 25 bp, Homo sapien
ggctcttcgccttctatcccaaaga

SEQ ID NO: 3225704 - DNA, 25 bp, Homo sapien
tgaagtttggtggaactcaggtgct

SEQ ID NO: 3225705 - DNA, 25 bp, Homo sapien
tagtgtgaatccttcctgatactct

SEQ ID NO: 3225706 - DNA, 25 bp, Homo sapien
taaatgagggtgagttatgcttcca

SEQ ID NO: 3225707 - DNA, 25 bp, Homo sapien
agggtgaagcctcgtcctttgagct

SEQ ID NO: 3225708 - DNA, 25 bp, Homo sapien
aacccaagtggtatgcagctagaga

SEQ ID NO: 3225709 - DNA, 25 bp, Homo sapien
tcagtagcataaagggtgaagcctc

SEQ ID NO: 3225710 - DNA, 25 bp, Homo sapien
tcagtcaatgatcataggtgtggac

SEQ ID NO: 3225711 - DNA, 25 bp, Homo sapien
gggagaatggaggttgtggccttgc

SEQ ID NO: 3225712 - DNA, 25 bp, Homo sapien
tgcctattcattagagactgcctgg

SEQ ID NO: 3225713 - DNA, 25 bp, Homo sapien
tgtggccttgcctattcattagaga

SEQ ID NO: 3225714 - DNA, 25 bp, Homo sapien
ggaggttgtggccttgcctattcat

SEQ ID NO: 3225715 - DNA, 25 bp, Homo sapien
ttggtcagtttgaagactccagaga

SEQ ID NO: 3225716 - DNA, 25 bp, Homo sapien
tttcaatgcttggtcagtttgaaga

SEQ ID NO: 3225717 - DNA, 25 bp, Homo sapien
aatgcttggtcagtttgaagactcc

SEQ ID NO: 3225718 - DNA, 25 bp, Homo sapien
gcttggtcagtttgaagactccaga

SEQ ID NO: 3225719 - DNA, 25 bp, Homo sapien
gtatattaagatacaccttacagac

SEQ ID NO: 3225720 - DNA, 25 bp, Homo sapien
tagttagtatattaagatacacctt

SEQ ID NO: 3225721 - DNA, 25 bp, Homo sapien
gttagtatattaagatacaccttac

SEQ ID NO: 3225722 - DNA, 25 bp, Homo sapien
tagtatattaagatacaccttacag

SEQ ID NO: 3225723 - DNA, 25 bp, Homo sapien
tctttgctgtaatttcaccgggaca

SEQ ID NO: 3225724 - DNA, 25 bp, Homo sapien
cctgaatttctaactggagctcagt

SEQ ID NO: 3225725 - DNA, 25 bp, Homo sapien
ttaactctagatggcctgaatttct

SEQ ID NO: 3225726 - DNA, 25 bp, Homo sapien
cagtaattgcaataccctttgacag

SEQ ID NO: 3225727 - DNA, 25 bp, Homo sapien
tgaacggtcttcatgcactctgtgt

SEQ ID NO: 3225728 - DNA, 25 bp, Homo sapien
tttgaacggtcttcatgcactctgt

SEQ ID NO: 3225729 - DNA, 25 bp, Homo sapien
gaacggtcttcatgcactctgtgtc

SEQ ID NO: 3225730 - DNA, 25 bp, Homo sapien
tgctttcagtaggaaggccagaggc

SEQ ID NO: 3225731 - DNA, 25 bp, Homo sapien
gcgagatctccttttccgagtcaaa

SEQ ID NO: 3225732 - DNA, 25 bp, Homo sapien
tatcctgaggtctcctcgaggcgtg

SEQ ID NO: 3225733 - DNA, 25 bp, Homo sapien
ggagtttttgcaccacgcttttcag

SEQ ID NO: 3225734 - DNA, 25 bp, Homo sapien
aaatcttctgtttcggagtcggcta

SEQ ID NO: 3225735 - DNA, 25 bp, Homo sapien
gacttgcggttgtgtggcactgcca

SEQ ID NO: 3225736 - DNA, 25 bp, Homo sapien
taaattagctgccttgtcacacagc

SEQ ID NO: 3225737 - DNA, 25 bp, Homo sapien
cagcttttggatgaatcgaggtgca

SEQ ID NO: 3225738 - DNA, 25 bp, Homo sapien
tacccactgtctggtgacgaggact

SEQ ID NO: 3225739 - DNA, 25 bp, Homo sapien
ctatgcataatacaaaaattcatac

SEQ ID NO: 3225740 - DNA, 25 bp, Homo sapien
agtgactggcctggttttaccctgt

SEQ ID NO: 3225741 - DNA, 25 bp, Homo sapien
cataagtggtgttcacacagtgtga

SEQ ID NO: 3225742 - DNA, 25 bp, Homo sapien
aaggttcatcatgccagctttcaaa

SEQ ID NO: 3225743 - DNA, 25 bp, Homo sapien
tgtgaagtacaaatgccttgccttg

SEQ ID NO: 3225744 - DNA, 25 bp, Homo sapien
actttcgtgagggttcagtgttaat

SEQ ID NO: 3225745 - DNA, 25 bp, Homo sapien
caataactttcgtgagggttcagtg

SEQ ID NO: 3225746 - DNA, 25 bp, Homo sapien
agaatgacaataactttcgtgaggg

SEQ ID NO: 3225747 - DNA, 25 bp, Homo sapien
tgacaataactttcgtgagggttca

SEQ ID NO: 3225748 - DNA, 25 bp, Homo sapien
tgtgcagcaacaggagtccaatagg

SEQ ID NO: 3225749 - DNA, 25 bp, Homo sapien
aacagagctttacactcaaggagtg

SEQ ID NO: 3225750 - DNA, 25 bp, Homo sapien
ttctaacacagaacccgagggccat

SEQ ID NO: 3225751 - DNA, 25 bp, Homo sapien
gaacttcagttgcaggtgtctatct

SEQ ID NO: 3225752 - DNA, 25 bp, Homo sapien
caaaaatttgaaggcagcctttcat

SEQ ID NO: 3225753 - DNA, 25 bp, Homo sapien
ctgggatatcctgtccaaaaatttg

SEQ ID NO: 3225754 - DNA, 25 bp, Homo sapien
tccaaaaatttgaaggcagcctttc

SEQ ID NO: 3225755 - DNA, 25 bp, Homo sapien
ggatatcctgtccaaaaatttgaag

SEQ ID NO: 3225756 - DNA, 25 bp, Homo sapien
gagtcattcacacctgccgattttt

SEQ ID NO: 3225757 - DNA, 25 bp, Homo sapien
gccaattttcttccgtcatggggac

SEQ ID NO: 3225758 - DNA, 25 bp, Homo sapien
cagtgtgagtcattcacacctgccg

SEQ ID NO: 3225759 - DNA, 25 bp, Homo sapien
aagatacgtgaatggtatcactcag

SEQ ID NO: 3225760 - DNA, 25 bp, Homo sapien
ttaaaattgctgcataagggatcat

SEQ ID NO: 3225761 - DNA, 25 bp, Homo sapien
taaaattgctgcataagggatcatt

SEQ ID NO: 3225762 - DNA, 25 bp, Homo sapien
aaaattgctgcataagggatcattc

SEQ ID NO: 3225763 - DNA, 25 bp, Homo sapien
agagtaggtaacaaattagtcctca

SEQ ID NO: 3225764 - DNA, 25 bp, Homo sapien
cccaggtttgtttttatccacattg

SEQ ID NO: 3225765 - DNA, 25 bp, Homo sapien
gatatctcctttacaaagagtaggt

SEQ ID NO: 3225766 - DNA, 25 bp, Homo sapien
attgatatctcctttacaaagagta

SEQ ID NO: 3225767 - DNA, 25 bp, Homo sapien
gacttggtatgtcatgacttggaaa

SEQ ID NO: 3225768 - DNA, 25 bp, Homo sapien
caatttgacttggtatgtcatgact

SEQ ID NO: 3225769 - DNA, 25 bp, Homo sapien
ggtatgtcatgacttggaaaaactt

SEQ ID NO: 3225770 - DNA, 25 bp, Homo sapien
tttgacttggtatgtcatgacttgg

SEQ ID NO: 3225771 - DNA, 25 bp, Homo sapien
aatggccattggtaatgaggagacg

SEQ ID NO: 3225772 - DNA, 25 bp, Homo sapien
taatgaggagacgaagggctctgca

SEQ ID NO: 3225773 - DNA, 25 bp, Homo sapien
ggaaggagtcccaaatggccattgg

SEQ ID NO: 3225774 - DNA, 25 bp, Homo sapien
aaggagtcccaaatggccattggta

SEQ ID NO: 3225775 - DNA, 25 bp, Homo sapien
aagatgaggaactgatttgcaggag

SEQ ID NO: 3225776 - DNA, 25 bp, Homo sapien
ttggtacaacacagtagcccgtagg

SEQ ID NO: 3225777 - DNA, 25 bp, Homo sapien
aggagccagggaagcgctgatctgc

SEQ ID NO: 3225778 - DNA, 25 bp, Homo sapien
gggatgagtaaacatgggacatgaa

SEQ ID NO: 3225779 - DNA, 25 bp, Homo sapien
gagctgctgttggtacaacacagta

SEQ ID NO: 3225780 - DNA, 25 bp, Homo sapien
tgttatctccaaaccataagcctgg

SEQ ID NO: 3225781 - DNA, 25 bp, Homo sapien
atacccagagggctggcgcctgact

SEQ ID NO: 3225782 - DNA, 25 bp, Homo sapien
aggaagggccacctctaccgctttg

SEQ ID NO: 3225783 - DNA, 25 bp, Homo sapien
ctctaccgctttgaaatgccttcct

SEQ ID NO: 3225784 - DNA, 25 bp, Homo sapien
gagaggtcatgtacttcacttaggg

SEQ ID NO: 3225785 - DNA, 25 bp, Homo sapien
gattacactgtcaacattgtgcaca

SEQ ID NO: 3225786 - DNA, 25 bp, Homo sapien
tagtgctttccagcgtctgccttgt

SEQ ID NO: 3225787 - DNA, 25 bp, Homo sapien
gttgctgcattgatcattacacccc

SEQ ID NO: 3225788 - DNA, 25 bp, Homo sapien
taatgaacagaggtacatgaaaaca

SEQ ID NO: 3225789 - DNA, 25 bp, Homo sapien
ggatttgcaggtaccttatacatac

SEQ ID NO: 3225790 - DNA, 25 bp, Homo sapien
aaccccatcactaaagtgtgtgtga

SEQ ID NO: 3225791 - DNA, 25 bp, Homo sapien
tacaggactaatgtaaagcacatgt

SEQ ID NO: 3225792 - DNA, 25 bp, Homo sapien
tcagacaagaatcctgattcattca

SEQ ID NO: 3225793 - DNA, 25 bp, Homo sapien
cagacaagaatcctgattcattcat

SEQ ID NO: 3225794 - DNA, 25 bp, Homo sapien
ctcagacaagaatcctgattcattc

SEQ ID NO: 3225795 - DNA, 25 bp, Homo sapien
tgtagattcaccatatgccgcacta

SEQ ID NO: 3225796 - DNA, 25 bp, Homo sapien
caagtctgatgtagattcaccatat

SEQ ID NO: 3225797 - DNA, 25 bp, Homo sapien
tatgccgcactaaccagttccagag

SEQ ID NO: 3225798 - DNA, 25 bp, Homo sapien
gttccagagcacatttggcctgcat

SEQ ID NO: 3225799 - DNA, 25 bp, Homo sapien
gcattctgccgataaaaccagattt

SEQ ID NO: 3225800 - DNA, 25 bp, Homo sapien
tgcattctgccgataaaaccagatt

SEQ ID NO: 3225801 - DNA, 25 bp, Homo sapien
ctgatgttcatagcatgaaatttac

SEQ ID NO: 3225802 - DNA, 25 bp, Homo sapien
gttgtggaaggctgatgttcatagc

SEQ ID NO: 3225803 - DNA, 25 bp, Homo sapien
actcaataagcagttgtggaaggct

SEQ ID NO: 3225804 - DNA, 25 bp, Homo sapien
agcagttgtggaaggctgatgttca

SEQ ID NO: 3225805 - DNA, 25 bp, Homo sapien
gcaccacgacaataccaataagagt

SEQ ID NO: 3225806 - DNA, 25 bp, Homo sapien
ttaattaagcaccacgacaatacca

SEQ ID NO: 3225807 - DNA, 25 bp, Homo sapien
taattaagcaccacgacaataccaa

SEQ ID NO: 3225808 - DNA, 25 bp, Homo sapien
taagcaccacgacaataccaataag

SEQ ID NO: 3225809 - DNA, 25 bp, Homo sapien
gctccaaagcctcgtcttttatttc

SEQ ID NO: 3225810 - DNA, 25 bp, Homo sapien
ctccacagataacattgaacatttc

SEQ ID NO: 3225811 - DNA, 25 bp, Homo sapien
tacatgggatttttggtgggcctgc

SEQ ID NO: 3225812 - DNA, 25 bp, Homo sapien
gactggaatcctcttgctttttggc

SEQ ID NO: 3225813 - DNA, 25 bp, Homo sapien
ggttctaaacatctgaccgtcaagt

SEQ ID NO: 3225814 - DNA, 25 bp, Homo sapien
gctggagcccatgatattcgaaaga

SEQ ID NO: 3225815 - DNA, 25 bp, Homo sapien
tcttgagcatgaaactagggtgaac

SEQ ID NO: 3225816 - DNA, 25 bp, Homo sapien
tctgaaaagaattacggtgcatgct

SEQ ID NO: 3225817 - DNA, 25 bp, Homo sapien
tctacaaggcacctagacacaggca

SEQ ID NO: 3225818 - DNA, 25 bp, Homo sapien
tctttgatgcggtatggctgtcaga

SEQ ID NO: 3225819 - DNA, 25 bp, Homo sapien
caccacgcccgcctaatttcttttg

SEQ ID NO: 3225820 - DNA, 25 bp, Homo sapien
gaggttttaccatgttagccaggat

SEQ ID NO: 3225821 - DNA, 25 bp, Homo sapien
aggttttaccatgttagccaggatg

SEQ ID NO: 3225822 - DNA, 25 bp, Homo sapien
gcgtctcgccgaggggcgcgtgtgc

SEQ ID NO: 3225823 - DNA, 25 bp, Homo sapien
cgaatgcgccgcgtctcgccgaggg

SEQ ID NO: 3225824 - DNA, 25 bp, Homo sapien
ccagcgcgcgaatgcgccgcgtctc

SEQ ID NO: 3225825 - DNA, 25 bp, Homo sapien
ggccgccggtctccagcgcgcgaat

SEQ ID NO: 3225826 - DNA, 25 bp, Homo sapien
ttctgggctctgaatgcgatctcgt

SEQ ID NO: 3225827 - DNA, 25 bp, Homo sapien
gggtctttcagatctcgcttattcc

SEQ ID NO: 3225828 - DNA, 25 bp, Homo sapien
agttgggcgcaaaacgccgtctgcc

SEQ ID NO: 3225829 - DNA, 25 bp, Homo sapien
cgtttgcagaatgcaacggagaaaa

SEQ ID NO: 3225830 - DNA, 25 bp, Homo sapien
aaaggttctgcgctgagatagcaca

SEQ ID NO: 3225831 - DNA, 25 bp, Homo sapien
gggagtcgctaccaagtgcgctctg

SEQ ID NO: 3225832 - DNA, 25 bp, Homo sapien
tggctttggtctccaggcgatggaa

SEQ ID NO: 3225833 - DNA, 25 bp, Homo sapien
agtgcgctctgagggagcctccact

SEQ ID NO: 3225834 - DNA, 25 bp, Homo sapien
tgtgccagtttgtggtagcccacat

SEQ ID NO: 3225835 - DNA, 25 bp, Homo sapien
tgggaacctgttcagaggtaatagg

SEQ ID NO: 3225836 - DNA, 25 bp, Homo sapien
taggtggtttactgtgccagtttgt

SEQ ID NO: 3225837 - DNA, 25 bp, Homo sapien
tgctggacagagatttgggaacctg

SEQ ID NO: 3225838 - DNA, 25 bp, Homo sapien
ctcagaccctgggttgatggctgcc

SEQ ID NO: 3225839 - DNA, 25 bp, Homo sapien
ggccctcagaccctgggttgatggc

SEQ ID NO: 3225840 - DNA, 25 bp, Homo sapien
cattacatcacagtcatggccctca

SEQ ID NO: 3225841 - DNA, 25 bp, Homo sapien
cagcaaccatgaagggttggtggga

SEQ ID NO: 3225842 - DNA, 25 bp, Homo sapien
ctgagtgggatcaaagcagagtgct

SEQ ID NO: 3225843 - DNA, 25 bp, Homo sapien
gctttctcatctggagcagccgagg

SEQ ID NO: 3225844 - DNA, 25 bp, Homo sapien
gggtgagagcatatctaagacctga

SEQ ID NO: 3225845 - DNA, 25 bp, Homo sapien
tttacagcggcatctggaaaggcct

SEQ ID NO: 3225846 - DNA, 25 bp, Homo sapien
tttcttcgctgacagcattctctct

SEQ ID NO: 3225847 - DNA, 25 bp, Homo sapien
ctttcacttatgacataatatagaa

SEQ ID NO: 3225848 - DNA, 25 bp, Homo sapien
catatggaccgaaaaagctttcact

SEQ ID NO: 3225849 - DNA, 25 bp, Homo sapien
tattaatttatacccatatggaccg

SEQ ID NO: 3225850 - DNA, 25 bp, Homo sapien
tttcactgctcaaggaactctctgc

SEQ ID NO: 3225851 - DNA, 25 bp, Homo sapien
ataagactatctgttgggaaaggaa

SEQ ID NO: 3225852 - DNA, 25 bp, Homo sapien
aggaaagtgcttttcactgctcaag

SEQ ID NO: 3225853 - DNA, 25 bp, Homo sapien
gaaagtgcttttcactgctcaagga

SEQ ID NO: 3225854 - DNA, 25 bp, Homo sapien
gagagcctggttatgcagagctgca

SEQ ID NO: 3225855 - DNA, 25 bp, Homo sapien
tatggaccttgcaccaactattctg

SEQ ID NO: 3225856 - DNA, 25 bp, Homo sapien
tagaagttcatgtttagaggtcagc

SEQ ID NO: 3225857 - DNA, 25 bp, Homo sapien
tcttagcaggtagcacttatggacc

SEQ ID NO: 3225858 - DNA, 25 bp, Homo sapien
gacatcagtaatacggcaagcccta

SEQ ID NO: 3225859 - DNA, 25 bp, Homo sapien
caaccaattagtgttggcccctgag

SEQ ID NO: 3225860 - DNA, 25 bp, Homo sapien
gcttttccagagcttatggcagaca

SEQ ID NO: 3225861 - DNA, 25 bp, Homo sapien
cattgatccccaactcggtttcaga

SEQ ID NO: 3225862 - DNA, 25 bp, Homo sapien
gtgtctgacactaggaatatacaga

SEQ ID NO: 3225863 - DNA, 25 bp, Homo sapien
gtctgacactaggaatatacagata

SEQ ID NO: 3225864 - DNA, 25 bp, Homo sapien
tagtgtctgacactaggaatataca

SEQ ID NO: 3225865 - DNA, 25 bp, Homo sapien
ctgacactaggaatatacagatatt

SEQ ID NO: 3225866 - DNA, 25 bp, Homo sapien
aataactgactttccctggctgtca

SEQ ID NO: 3225867 - DNA, 25 bp, Homo sapien
gtcaataactgactttccctggctg

SEQ ID NO: 3225868 - DNA, 25 bp, Homo sapien
ctggctgtcagttgctttccctgaa

SEQ ID NO: 3225869 - DNA, 25 bp, Homo sapien
cctgaaagcaatatgcatggctcat

SEQ ID NO: 3225870 - DNA, 25 bp, Homo sapien
gctgggattcgtagccaaacaggtg

SEQ ID NO: 3225871 - DNA, 25 bp, Homo sapien
ctatgatcagggtatggaggtcccc

SEQ ID NO: 3225872 - DNA, 25 bp, Homo sapien
gacctgtgtcgtcctcaaaggcctc

SEQ ID NO: 3225873 - DNA, 25 bp, Homo sapien
aacacctcagcagatgttgtgtctg

SEQ ID NO: 3225874 - DNA, 25 bp, Homo sapien
tgggccagttcttgaaggagctata

SEQ ID NO: 3225875 - DNA, 25 bp, Homo sapien
ggaatagtatatacactacagtgct

SEQ ID NO: 3225876 - DNA, 25 bp, Homo sapien
tcttcacctccacataatggagata

SEQ ID NO: 3225877 - DNA, 25 bp, Homo sapien
caaccaattaacagagcactcatca

SEQ ID NO: 3225878 - DNA, 25 bp, Homo sapien
ccctcttcggagctcataaagctat

SEQ ID NO: 3225879 - DNA, 25 bp, Homo sapien
cggagctcataaagctattcatttg

SEQ ID NO: 3225880 - DNA, 25 bp, Homo sapien
ttcggagctcataaagctattcatt

SEQ ID NO: 3225881 - DNA, 25 bp, Homo sapien
tcttcggagctcataaagctattca

SEQ ID NO: 3225882 - DNA, 25 bp, Homo sapien
tatccacaaggtccggtttaatcca

SEQ ID NO: 3225883 - DNA, 25 bp, Homo sapien
tccacaaggtccggtttaatccagc

SEQ ID NO: 3225884 - DNA, 25 bp, Homo sapien
ccacaaggtccggtttaatccagct

SEQ ID NO: 3225885 - DNA, 25 bp, Homo sapien
cacaaggtccggtttaatccagctt

SEQ ID NO: 3225886 - DNA, 25 bp, Homo sapien
gacgctggggctgacttgtttgaac

SEQ ID NO: 3225887 - DNA, 25 bp, Homo sapien
tgaacctggtcgtgtaggcaccgag

SEQ ID NO: 3225888 - DNA, 25 bp, Homo sapien
ggcaaatctcgaaacacaggcagga

SEQ ID NO: 3225889 - DNA, 25 bp, Homo sapien
ggcagtaacgggaggcaaatctcga

SEQ ID NO: 3225890 - DNA, 25 bp, Homo sapien
cgcagatcgtgcaaggagagaggag

SEQ ID NO: 3225891 - DNA, 25 bp, Homo sapien
taaagcttgtctggggacgaggcgc

SEQ ID NO: 3225892 - DNA, 25 bp, Homo sapien
gaggcgcagatcgtgcaaggagaga

SEQ ID NO: 3225893 - DNA, 25 bp, Homo sapien
gggacgaggcgcagatcgtgcaagg

SEQ ID NO: 3225894 - DNA, 25 bp, Homo sapien
caaattcatcgttgccctccctgtg

SEQ ID NO: 3225895 - DNA, 25 bp, Homo sapien
aacagtcatgtttaggtaactctgc

SEQ ID NO: 3225896 - DNA, 25 bp, Homo sapien
tgtcggctagattttcctagagcac

SEQ ID NO: 3225897 - DNA, 25 bp, Homo sapien
tctgtgtctaccatccagtgtaggc

SEQ ID NO: 3225898 - DNA, 25 bp, Homo sapien
ttcactgtcagaatctgttgaactg

SEQ ID NO: 3225899 - DNA, 25 bp, Homo sapien
ttggagatgatgatcctattgtcaa

SEQ ID NO: 3225900 - DNA, 25 bp, Homo sapien
aggaaagtaggcagtagtggttcca

SEQ ID NO: 3225901 - DNA, 25 bp, Homo sapien
tcggcagagatatgaagttggactg

SEQ ID NO: 3225902 - DNA, 25 bp, Homo sapien
cagtagtggttccatcaggtcggca

SEQ ID NO: 3225903 - DNA, 25 bp, Homo sapien
ggttccatcaggtcggcagagatat

SEQ ID NO: 3225904 - DNA, 25 bp, Homo sapien
tttcactcccttgccgaaaccactg

SEQ ID NO: 3225905 - DNA, 25 bp, Homo sapien
ttttctgtagaattcggaaatctgg

SEQ ID NO: 3225906 - DNA, 25 bp, Homo sapien
aattcggaaatctggagagtcttgg

SEQ ID NO: 3225907 - DNA, 25 bp, Homo sapien
tggccttccgccacggctgtgtttt

SEQ ID NO: 3225908 - DNA, 25 bp, Homo sapien
tatgcctgtatatagttcacgtgga

SEQ ID NO: 3225909 - DNA, 25 bp, Homo sapien
cgctgaaatataacctctgagtgca

SEQ ID NO: 3225910 - DNA, 25 bp, Homo sapien
tggcatctcactcgaacaaagacgt

SEQ ID NO: 3225911 - DNA, 25 bp, Homo sapien
tctcacacatggtaggctccctata

SEQ ID NO: 3225912 - DNA, 25 bp, Homo sapien
gcgataactagggtgcaaatctcct

SEQ ID NO: 3225913 - DNA, 25 bp, Homo sapien
tgaacatgtaaagatccctgcatct

SEQ ID NO: 3225914 - DNA, 25 bp, Homo sapien
agtgctggttgctgatccataatca

SEQ ID NO: 3225915 - DNA, 25 bp, Homo sapien
cttcagggaaagtctcagcgataac

SEQ ID NO: 3225916 - DNA, 25 bp, Homo sapien
gggttgttcacctgctggatctcag

SEQ ID NO: 3225917 - DNA, 25 bp, Homo sapien
gttagctttgccgttaatcagtcca

SEQ ID NO: 3225918 - DNA, 25 bp, Homo sapien
cagtccatttactccacggctggga

SEQ ID NO: 3225919 - DNA, 25 bp, Homo sapien
gctgggatggactccgttcgtttcc

SEQ ID NO: 3225920 - DNA, 25 bp, Homo sapien
cagcaaggtcccatgagtcaaggcc

SEQ ID NO: 3225921 - DNA, 25 bp, Homo sapien
ccttagctgtatgttggaagcccac

SEQ ID NO: 3225922 - DNA, 25 bp, Homo sapien
taacaactctctgctgtgcggtgcc

SEQ ID NO: 3225923 - DNA, 25 bp, Homo sapien
taattcagggtctcttgcgctatgg

SEQ ID NO: 3225924 - DNA, 25 bp, Homo sapien
gataagacgggctgtagatgcctct

SEQ ID NO: 3225925 - DNA, 25 bp, Homo sapien
tgtcatcctcttaatgaacgcgaag

SEQ ID NO: 3225926 - DNA, 25 bp, Homo sapien
tatctcactcacaagcaaatcctga

SEQ ID NO: 3225927 - DNA, 25 bp, Homo sapien
ggctgcaaagcagagctaaaagctg

SEQ ID NO: 3225928 - DNA, 25 bp, Homo sapien
ttataatattggaggcagggagcaa

SEQ ID NO: 3225929 - DNA, 25 bp, Homo sapien
gcatctactatttgtcaggccctgt

SEQ ID NO: 3225930 - DNA, 25 bp, Homo sapien
tcagggttcccattctcaggaagct

SEQ ID NO: 3225931 - DNA, 25 bp, Homo sapien
tctagggtcctagtgaaagagcaat

SEQ ID NO: 3225932 - DNA, 25 bp, Homo sapien
tgagatcttgaaccctaactagtag

SEQ ID NO: 3225933 - DNA, 25 bp, Homo sapien
caaagccacacgttggagttgaagc

SEQ ID NO: 3225934 - DNA, 25 bp, Homo sapien
tcaccacaagtctggcatctgatgg

SEQ ID NO: 3225935 - DNA, 25 bp, Homo sapien
gaagctgcagtccaacataaacagg

SEQ ID NO: 3225936 - DNA, 25 bp, Homo sapien
tgggttctcttgattgccaggaaat

SEQ ID NO: 3225937 - DNA, 25 bp, Homo sapien
ttcagcagatgccttcatcgcatac

SEQ ID NO: 3225938 - DNA, 25 bp, Homo sapien
ttttcgtgctttgtaatattaccca

SEQ ID NO: 3225939 - DNA, 25 bp, Homo sapien
tgtgggtttacactcttgaaattca

SEQ ID NO: 3225940 - DNA, 25 bp, Homo sapien
tcttaactgaagtctggctgtccct

SEQ ID NO: 3225941 - DNA, 25 bp, Homo sapien
tgcttgtcaccaacaaccttggtca

SEQ ID NO: 3225942 - DNA, 25 bp, Homo sapien
ccttctgagcaaggagggttctgca

SEQ ID NO: 3225943 - DNA, 25 bp, Homo sapien
tcttttgaagttggtgcactccacc

SEQ ID NO: 3225944 - DNA, 25 bp, Homo sapien
taaggcagctgttcagtatcaggaa

SEQ ID NO: 3225945 - DNA, 25 bp, Homo sapien
gaatttgcccctgtaactagcactg

SEQ ID NO: 3225946 - DNA, 25 bp, Homo sapien
cagtcacctggagcaagaatttgcc

SEQ ID NO: 3225947 - DNA, 25 bp, Homo sapien
ttcacatttgagttagaggatgccc

SEQ ID NO: 3225948 - DNA, 25 bp, Homo sapien
gagttatacctggtctccatgagga

SEQ ID NO: 3225949 - DNA, 25 bp, Homo sapien
cactgaggtcactagcaattggaag

SEQ ID NO: 3225950 - DNA, 25 bp, Homo sapien
gccttctgcaagtccaggaatgagt

SEQ ID NO: 3225951 - DNA, 25 bp, Homo sapien
gaggattccattcgcctttgctgga

SEQ ID NO: 3225952 - DNA, 25 bp, Homo sapien
ttttgcccgcactggaaagtcagaa

SEQ ID NO: 3225953 - DNA, 25 bp, Homo sapien
gaaaaatccagttgagcaccatcca

SEQ ID NO: 3225954 - DNA, 25 bp, Homo sapien
taggagctttccaggaccactgagc

SEQ ID NO: 3225955 - DNA, 25 bp, Homo sapien
tagcaaagctccctagatgctgggc

SEQ ID NO: 3225956 - DNA, 25 bp, Homo sapien
taaaggtgatggaaggtcactccca

SEQ ID NO: 3225957 - DNA, 25 bp, Homo sapien
caaggcccggtcatataaccacaag

SEQ ID NO: 3225958 - DNA, 25 bp, Homo sapien
catggcagataactggagtggcctc

SEQ ID NO: 3225959 - DNA, 25 bp, Homo sapien
ccttgaaagccttgaagaagcagca

SEQ ID NO: 3225960 - DNA, 25 bp, Homo sapien
catgcattgaatagacaccgaagtc

SEQ ID NO: 3225961 - DNA, 25 bp, Homo sapien
tactcttaagctcccacatgccaag

SEQ ID NO: 3225962 - DNA, 25 bp, Homo sapien
tagatcacataacttccttgcttgg

SEQ ID NO: 3225963 - DNA, 25 bp, Homo sapien
tctgttcactcacggcttaaaaacg

SEQ ID NO: 3225964 - DNA, 25 bp, Homo sapien
gcctttcacaagaactgtgcccctt

SEQ ID NO: 3225965 - DNA, 25 bp, Homo sapien
cgagttctatactgacgtgactgaa

SEQ ID NO: 3225966 - DNA, 25 bp, Homo sapien
tccaaggagcccgagttctatactg

SEQ ID NO: 3225967 - DNA, 25 bp, Homo sapien
agtctgattactgagaacagccttc

SEQ ID NO: 3225968 - DNA, 25 bp, Homo sapien
cagatagcacgcatggcagccaatt

SEQ ID NO: 3225969 - DNA, 25 bp, Homo sapien
acagatagcacgcatggcagccaat

SEQ ID NO: 3225970 - DNA, 25 bp, Homo sapien
tacagatagcacgcatggcagccaa

SEQ ID NO: 3225971 - DNA, 25 bp, Homo sapien
ctacagatagcacgcatggcagcca

SEQ ID NO: 3225972 - DNA, 25 bp, Homo sapien
tctacaatagagctattctcctgca

SEQ ID NO: 3225973 - DNA, 25 bp, Homo sapien
acttctacaatagagctattctcct

SEQ ID NO: 3225974 - DNA, 25 bp, Homo sapien
gtataacgcccttgatcatcttctg

SEQ ID NO: 3225975 - DNA, 25 bp, Homo sapien
tatatttttcgctcaagaaagttct

SEQ ID NO: 3225976 - DNA, 25 bp, Homo sapien
tatcctggtttttagctgttgtggt

SEQ ID NO: 3225977 - DNA, 25 bp, Homo sapien
gtcatttcctttaaggatgaactca

SEQ ID NO: 3225978 - DNA, 25 bp, Homo sapien
tagctgttgtggtttgctgagtcaa

SEQ ID NO: 3225979 - DNA, 25 bp, Homo sapien
ccaaaatgttctgatatcctggttt

SEQ ID NO: 3225980 - DNA, 25 bp, Homo sapien
taaatggtccctatgattaaatatg

SEQ ID NO: 3225981 - DNA, 25 bp, Homo sapien
aaccatgctcaaactgtcagagttg

SEQ ID NO: 3225982 - DNA, 25 bp, Homo sapien
catgctcaaactgtcagagttggag

SEQ ID NO: 3225983 - DNA, 25 bp, Homo sapien
gagcattttaaatggtccctatgat

SEQ ID NO: 3225984 - DNA, 25 bp, Homo sapien
gaagagcactcacaggtagagcgga

SEQ ID NO: 3225985 - DNA, 25 bp, Homo sapien
caatgatattgtggctcccagggta

SEQ ID NO: 3225986 - DNA, 25 bp, Homo sapien
tctgaaacgaattgccctgaaccta

SEQ ID NO: 3225987 - DNA, 25 bp, Homo sapien
acttgattgtggtcaggtgcatcca

SEQ ID NO: 3225988 - DNA, 25 bp, Homo sapien
tattgggtttgtcctgaagatcgcc

SEQ ID NO: 3225989 - DNA, 25 bp, Homo sapien
tgtgtgaacctccaatagcccagct

SEQ ID NO: 3225990 - DNA, 25 bp, Homo sapien
gatcgccagcacttgtgtatcaggc

SEQ ID NO: 3225991 - DNA, 25 bp, Homo sapien
tgttaaatgagcaggcagcactgga

SEQ ID NO: 3225992 - DNA, 25 bp, Homo sapien
ctgtggtcatttaagttttgggcat

SEQ ID NO: 3225993 - DNA, 25 bp, Homo sapien
ttgaggaggtttagtacttatcagt

SEQ ID NO: 3225994 - DNA, 25 bp, Homo sapien
ttttgaggaggtttagtacttatca

SEQ ID NO: 3225995 - DNA, 25 bp, Homo sapien
tgctgtggtcatttaagttttgggc

SEQ ID NO: 3225996 - DNA, 25 bp, Homo sapien
caattggaactgtgtacctctatca

SEQ ID NO: 3225997 - DNA, 25 bp, Homo sapien
gaagctggcctccactacagtgtca

SEQ ID NO: 3225998 - DNA, 25 bp, Homo sapien
tatggacaagaccaaagctcagctc

SEQ ID NO: 3225999 - DNA, 25 bp, Homo sapien
tgcaaagagggcacatacacgtaat

SEQ ID NO: 3226000 - DNA, 25 bp, Homo sapien
ccagtatttgctatcttaattgtga

SEQ ID NO: 3226001 - DNA, 25 bp, Homo sapien
tctcatgccttagtgcctcaagtag

SEQ ID NO: 3226002 - DNA, 25 bp, Homo sapien
caccgcactcagccagtatttgcta

SEQ ID NO: 3226003 - DNA, 25 bp, Homo sapien
ttctcatgccttagtgcctcaagta

SEQ ID NO: 3226004 - DNA, 25 bp, Homo sapien
agaaaagtggatccaaaacataatc

SEQ ID NO: 3226005 - DNA, 25 bp, Homo sapien
ggtgccccctctgggttcttcagga

SEQ ID NO: 3226006 - DNA, 25 bp, Homo sapien
tccaagacgaagaaaagtggatcca

SEQ ID NO: 3226007 - DNA, 25 bp, Homo sapien
gacgaagaaaagtggatccaaaaca

SEQ ID NO: 3226008 - DNA, 25 bp, Homo sapien
tctgcccctggccatacaccatgtc

SEQ ID NO: 3226009 - DNA, 25 bp, Homo sapien
gtcactgcaacatgctgtgctgcga

SEQ ID NO: 3226010 - DNA, 25 bp, Homo sapien
cactgcaacatgctgtgctgcgaca

SEQ ID NO: 3226011 - DNA, 25 bp, Homo sapien
tacaccatgtcatagttatcccctc

SEQ ID NO: 3226012 - DNA, 25 bp, Homo sapien
acagcatttgctccgaggcttcctg

SEQ ID NO: 3226013 - DNA, 25 bp, Homo sapien
caaacagcatttgctccgaggcttc

SEQ ID NO: 3226014 - DNA, 25 bp, Homo sapien
tcaatgctgacagcctgttcacctc

SEQ ID NO: 3226015 - DNA, 25 bp, Homo sapien
tccaaacagcatttgctccgaggct

SEQ ID NO: 3226016 - DNA, 25 bp, Homo sapien
agttgaggaacgaaggaaagcttct

SEQ ID NO: 3226017 - DNA, 25 bp, Homo sapien
cttgagttgaggaacgaaggaaagc

SEQ ID NO: 3226018 - DNA, 25 bp, Homo sapien
aaagtttgacgagtgggaggcttga

SEQ ID NO: 3226019 - DNA, 25 bp, Homo sapien
tgggaaagtttgacgagtgggaggc

SEQ ID NO: 3226020 - DNA, 25 bp, Homo sapien
cgggtcactatcacaggaactccat

SEQ ID NO: 3226021 - DNA, 25 bp, Homo sapien
tatcacaggaactccatccacagga

SEQ ID NO: 3226022 - DNA, 25 bp, Homo sapien
gggtcactatcacaggaactccatc

SEQ ID NO: 3226023 - DNA, 25 bp, Homo sapien
acaggaactccatccacaggaccat

SEQ ID NO: 3226024 - DNA, 25 bp, Homo sapien
ggccaggtgggcctggaaggagcct

SEQ ID NO: 3226025 - DNA, 25 bp, Homo sapien
ccaggtgggcctggaaggagcctac

SEQ ID NO: 3226026 - DNA, 25 bp, Homo sapien
tcaggccaggtgggcctggaaggag

SEQ ID NO: 3226027 - DNA, 25 bp, Homo sapien
caggccaggtgggcctggaaggagc

SEQ ID NO: 3226028 - DNA, 25 bp, Homo sapien
cccttaacaaaagtgtctggttctg

SEQ ID NO: 3226029 - DNA, 25 bp, Homo sapien
gacaaagcgggtaactgggcagact

SEQ ID NO: 3226030 - DNA, 25 bp, Homo sapien
gaaaaatagccagattaggatcaga

SEQ ID NO: 3226031 - DNA, 25 bp, Homo sapien
tgtgcaattttgaatgtgataccct

SEQ ID NO: 3226032 - DNA, 25 bp, Homo sapien
ccttatttggtcgctggaactgctc

SEQ ID NO: 3226033 - DNA, 25 bp, Homo sapien
tccttatttggtcgctggaactgct

SEQ ID NO: 3226034 - DNA, 25 bp, Homo sapien
ttccttatttggtcgctggaactgc

SEQ ID NO: 3226035 - DNA, 25 bp, Homo sapien
cttatttggtcgctggaactgctct

SEQ ID NO: 3226036 - DNA, 25 bp, Homo sapien
gcaattgccttgagtccctgacaca

SEQ ID NO: 3226037 - DNA, 25 bp, Homo sapien
ttactctccgcaattgccttgagtc

SEQ ID NO: 3226038 - DNA, 25 bp, Homo sapien
gccttgagtccctgacacacttcta

SEQ ID NO: 3226039 - DNA, 25 bp, Homo sapien
ctgacacacttctattctgaaatac

SEQ ID NO: 3226040 - DNA, 25 bp, Homo sapien
ctttatacgtatattcatctaattc

SEQ ID NO: 3226041 - DNA, 25 bp, Homo sapien
tctctttatacgtatattcatctaa

SEQ ID NO: 3226042 - DNA, 25 bp, Homo sapien
tatctgtatgtgtaataatacatta

SEQ ID NO: 3226043 - DNA, 25 bp, Homo sapien
aaacttctctttatacgtatattca

SEQ ID NO: 3226044 - DNA, 25 bp, Homo sapien
ggtgaagagtactttgctacctgcc

SEQ ID NO: 3226045 - DNA, 25 bp, Homo sapien
ttactagagcgttggtgaaacacaa

SEQ ID NO: 3226046 - DNA, 25 bp, Homo sapien
tcaaagcgcggagacaaaaatcagc

SEQ ID NO: 3226047 - DNA, 25 bp, Homo sapien
caaaaatccctgaagcacttggaag

SEQ ID NO: 3226048 - DNA, 25 bp, Homo sapien
ggttcaatctgctatgttcaaagga

SEQ ID NO: 3226049 - DNA, 25 bp, Homo sapien
taaaagccaggccttctgtaaatca

SEQ ID NO: 3226050 - DNA, 25 bp, Homo sapien
tgggtggtacaagtacaagcttgac

SEQ ID NO: 3226051 - DNA, 25 bp, Homo sapien
tacaggccccttaagtgagttatac

SEQ ID NO: 3226052 - DNA, 25 bp, Homo sapien
tagaaaacacccagatcagccatga

SEQ ID NO: 3226053 - DNA, 25 bp, Homo sapien
tcgcatttcatgtagatttccaggg

SEQ ID NO: 3226054 - DNA, 25 bp, Homo sapien
ccataacaaggaatcttgtgtcgca

SEQ ID NO: 3226055 - DNA, 25 bp, Homo sapien
tagatttccagggtgcttagaaaac

SEQ ID NO: 3226056 - DNA, 25 bp, Homo sapien
gaatttgcctgtttatgtgattctc

SEQ ID NO: 3226057 - DNA, 25 bp, Homo sapien
agaatttgcctgtttatgtgattct

SEQ ID NO: 3226058 - DNA, 25 bp, Homo sapien
ctctgaaggaatcatccacagattc

SEQ ID NO: 3226059 - DNA, 25 bp, Homo sapien
tctgaaggaatcatccacagattcc

SEQ ID NO: 3226060 - DNA, 25 bp, Homo sapien
ctgaaggaatcatccacagattcca

SEQ ID NO: 3226061 - DNA, 25 bp, Homo sapien
tgaaggaatcatccacagattccat

SEQ ID NO: 3226062 - DNA, 25 bp, Homo sapien
catgtcctgcttgatccacagtaga

SEQ ID NO: 3226063 - DNA, 25 bp, Homo sapien
tgatccacagtagaatctgactcac

SEQ ID NO: 3226064 - DNA, 25 bp, Homo sapien
ctaaacatgtcctgcttgatccaca

SEQ ID NO: 3226065 - DNA, 25 bp, Homo sapien
cctgcttgatccacagtagaatctg

SEQ ID NO: 3226066 - DNA, 25 bp, Homo sapien
caagcctcagaattgctaaaactag

SEQ ID NO: 3226067 - DNA, 25 bp, Homo sapien
ggccatcactttgaacaagcctcag

SEQ ID NO: 3226068 - DNA, 25 bp, Homo sapien
tagtatcagtagaagcactgatgag

SEQ ID NO: 3226069 - DNA, 25 bp, Homo sapien
cttggccatcactttgaacaagcct

SEQ ID NO: 3226070 - DNA, 25 bp, Homo sapien
cacgaaccgtgggaggtgtggatac

SEQ ID NO: 3226071 - DNA, 25 bp, Homo sapien
tcagtgccgaaatccatgaagattt

SEQ ID NO: 3226072 - DNA, 25 bp, Homo sapien
catgaagatttaaggcactgatgca

SEQ ID NO: 3226073 - DNA, 25 bp, Homo sapien
cagttttcacttttcagtgccgaaa

SEQ ID NO: 3226074 - DNA, 25 bp, Homo sapien
gacatacgcacttcctttactctga

SEQ ID NO: 3226075 - DNA, 25 bp, Homo sapien
tacaggtgcccggaaagatgcgtac

SEQ ID NO: 3226076 - DNA, 25 bp, Homo sapien
tttaccggccatggaagggactgtg

SEQ ID NO: 3226077 - DNA, 25 bp, Homo sapien
gaaggatgatccattagatctgtca

SEQ ID NO: 3226078 - DNA, 25 bp, Homo sapien
atggaactgcgagactggggctggg

SEQ ID NO: 3226079 - DNA, 25 bp, Homo sapien
ctgaaggaatggaactgcgagactg

SEQ ID NO: 3226080 - DNA, 25 bp, Homo sapien
gaaggaatggaactgcgagactggg

SEQ ID NO: 3226081 - DNA, 25 bp, Homo sapien
gaatggaactgcgagactggggctg

SEQ ID NO: 3226082 - DNA, 25 bp, Homo sapien
ttcctttacagactaaagagtgtcc

SEQ ID NO: 3226083 - DNA, 25 bp, Homo sapien
ggatgattctcctccggtgtttgtg

SEQ ID NO: 3226084 - DNA, 25 bp, Homo sapien
aataaacgcgactccagggcagcgt

SEQ ID NO: 3226085 - DNA, 25 bp, Homo sapien
cccatagatatgttgtcggcttgtt

SEQ ID NO: 3226086 - DNA, 25 bp, Homo sapien
gcagccaagctacaaatcgggcttt

SEQ ID NO: 3226087 - DNA, 25 bp, Homo sapien
tttgcatctttctggtcgcaggccc

SEQ ID NO: 3226088 - DNA, 25 bp, Homo sapien
gcatctttctggtcgcaggcccctt

SEQ ID NO: 3226089 - DNA, 25 bp, Homo sapien
gctttcctggaacgatcgagaagtg

SEQ ID NO: 3226090 - DNA, 25 bp, Homo sapien
gcaggtatcgggctttatacctcgc

SEQ ID NO: 3226091 - DNA, 25 bp, Homo sapien
gctgctgcccgattccgcgtccgga

SEQ ID NO: 3226092 - DNA, 25 bp, Homo sapien
attccgcgtccggagcgagcgggag

SEQ ID NO: 3226093 - DNA, 25 bp, Homo sapien
agctgcagcgggctccgcggaccgg

SEQ ID NO: 3226094 - DNA, 25 bp, Homo sapien
gttcggggcacgcagcgcaagaccc

SEQ ID NO: 3226095 - DNA, 25 bp, Homo sapien
ttcggggcacgcagcgcaagacccg

SEQ ID NO: 3226096 - DNA, 25 bp, Homo sapien
ctgttcggggcacgcagcgcaagac

SEQ ID NO: 3226097 - DNA, 25 bp, Homo sapien
tcggggcacgcagcgcaagacccgg

SEQ ID NO: 3226098 - DNA, 25 bp, Homo sapien
gaccagtaacgggactcggtgtgcc

SEQ ID NO: 3226099 - DNA, 25 bp, Homo sapien
ctgaagaccagtaacgggactcggt

SEQ ID NO: 3226100 - DNA, 25 bp, Homo sapien
ccagtaacgggactcggtgtgcccg

SEQ ID NO: 3226101 - DNA, 25 bp, Homo sapien
aagaccagtaacgggactcggtgtg

SEQ ID NO: 3226102 - DNA, 25 bp, Homo sapien
tctgaagcttgggtcggtccctctg

SEQ ID NO: 3226103 - DNA, 25 bp, Homo sapien
aatgtagagccagtcatctctggct

SEQ ID NO: 3226104 - DNA, 25 bp, Homo sapien
tggctcctagagactcccaggttga

SEQ ID NO: 3226105 - DNA, 25 bp, Homo sapien
tagtttctctgtgattacgcattaa

SEQ ID NO: 3226106 - DNA, 25 bp, Homo sapien
agggagactcggcactgacattagc

SEQ ID NO: 3226107 - DNA, 25 bp, Homo sapien
tggcagagctttggcagttgggcta

SEQ ID NO: 3226108 - DNA, 25 bp, Homo sapien
cagttgggctaacgcgcattgagca

SEQ ID NO: 3226109 - DNA, 25 bp, Homo sapien
ctgacattagctaaccatcccacat

SEQ ID NO: 3226110 - DNA, 25 bp, Homo sapien
tccatcaaataagccattacgcctt

SEQ ID NO: 3226111 - DNA, 25 bp, Homo sapien
tcaaataagccattacgccttccaa

SEQ ID NO: 3226112 - DNA, 25 bp, Homo sapien
aagccattacgccttccaacagtct

SEQ ID NO: 3226113 - DNA, 25 bp, Homo sapien
tcttttccatcaaataagccattac

SEQ ID NO: 3226114 - DNA, 25 bp, Homo sapien
agttgatctgggtaaaggtctggca

SEQ ID NO: 3226115 - DNA, 25 bp, Homo sapien
acacctctggtcgtttcactaagca

SEQ ID NO: 3226116 - DNA, 25 bp, Homo sapien
ggtctggcagcttcacacctctggt

SEQ ID NO: 3226117 - DNA, 25 bp, Homo sapien
gcatccaccacgcttctgagtagct

SEQ ID NO: 3226118 - DNA, 25 bp, Homo sapien
gaagggatgctgtatctgaaaccaa

SEQ ID NO: 3226119 - DNA, 25 bp, Homo sapien
cattgagcaaacattcaggagtcca

SEQ ID NO: 3226120 - DNA, 25 bp, Homo sapien
gagcagattacctcaagggcagaag

SEQ ID NO: 3226121 - DNA, 25 bp, Homo sapien
cagatattatagagccacagaagga

SEQ ID NO: 3226122 - DNA, 25 bp, Homo sapien
caaggaagataagcgctgaccaggt

SEQ ID NO: 3226123 - DNA, 25 bp, Homo sapien
tcccctggtctagaggttgtatcaa

SEQ ID NO: 3226124 - DNA, 25 bp, Homo sapien
ggtggagcctgtgattttgcaagcc

SEQ ID NO: 3226125 - DNA, 25 bp, Homo sapien
cctaacttgagctaaacaaggaaga

SEQ ID NO: 3226126 - DNA, 25 bp, Homo sapien
cacccatgaataagagaggtgccca

SEQ ID NO: 3226127 - DNA, 25 bp, Homo sapien
cagcccaggaaatgtctcaggtggc

SEQ ID NO: 3226128 - DNA, 25 bp, Homo sapien
cagtttttcgggcatgggcttgcca

SEQ ID NO: 3226129 - DNA, 25 bp, Homo sapien
caaaaagcctaatatggaaagcctc

SEQ ID NO: 3226130 - DNA, 25 bp, Homo sapien
tacgctgtgggatgccagagtccaa

SEQ ID NO: 3226131 - DNA, 25 bp, Homo sapien
tatgagctgctcaaccattctgaaa

SEQ ID NO: 3226132 - DNA, 25 bp, Homo sapien
gatggcacagtttttgacgagcgac

SEQ ID NO: 3226133 - DNA, 25 bp, Homo sapien
ttaacgcgtgaggaaaggacaccca

SEQ ID NO: 3226134 - DNA, 25 bp, Homo sapien
ttctccaatgatatagacaggtagg

SEQ ID NO: 3226135 - DNA, 25 bp, Homo sapien
ccagggatccagagggccaactatt

SEQ ID NO: 3226136 - DNA, 25 bp, Homo sapien
gacaggtaggaaatattttgttcga

SEQ ID NO: 3226137 - DNA, 25 bp, Homo sapien
gaccgtatcccttgatagaaagcac

SEQ ID NO: 3226138 - DNA, 25 bp, Homo sapien
gaggaagcctcactgattgagacca

SEQ ID NO: 3226139 - DNA, 25 bp, Homo sapien
aaaattccacatgggcttcctggag

SEQ ID NO: 3226140 - DNA, 25 bp, Homo sapien
tctcagattattgcaagaggaagcc

SEQ ID NO: 3226141 - DNA, 25 bp, Homo sapien
ggtatcctagaacagctacttgcca

SEQ ID NO: 3226142 - DNA, 25 bp, Homo sapien
tttcttctgcagctaagtcggccag

SEQ ID NO: 3226143 - DNA, 25 bp, Homo sapien
tgcagacgtctggaacgcattacaa

SEQ ID NO: 3226144 - DNA, 25 bp, Homo sapien
tgatgctatcggtttgccaaggaaa

SEQ ID NO: 3226145 - DNA, 25 bp, Homo sapien
tggattgaaaaccttctcagggtct

SEQ ID NO: 3226146 - DNA, 25 bp, Homo sapien
tacagtgtggcctaaaacagaagaa

SEQ ID NO: 3226147 - DNA, 25 bp, Homo sapien
ggtgtgctacgttttaagtccctca

SEQ ID NO: 3226148 - DNA, 25 bp, Homo sapien
catgaagccagcaagtacagtgtgg

SEQ ID NO: 3226149 - DNA, 25 bp, Homo sapien
tattgagctttacatctgtgccagc

SEQ ID NO: 3226150 - DNA, 25 bp, Homo sapien
gtaaaggctggtctagagggcatct

SEQ ID NO: 3226151 - DNA, 25 bp, Homo sapien
aaaggctggtctagagggcatctga

SEQ ID NO: 3226152 - DNA, 25 bp, Homo sapien
agctttggtaaaatgcgagctggga

SEQ ID NO: 3226153 - DNA, 25 bp, Homo sapien
ggtaaaatgcgagctgggagggagg

SEQ ID NO: 3226154 - DNA, 25 bp, Homo sapien
acctggaacccttgctctttgagac

SEQ ID NO: 3226155 - DNA, 25 bp, Homo sapien
ggctgttctcttcttgcatcttcag

SEQ ID NO: 3226156 - DNA, 25 bp, Homo sapien
cagctgcacggctgttctcttcttg

SEQ ID NO: 3226157 - DNA, 25 bp, Homo sapien
ggaacccttgctctttgagacctca

SEQ ID NO: 3226158 - DNA, 25 bp, Homo sapien
taagacatccacacatggtcagcat

SEQ ID NO: 3226159 - DNA, 25 bp, Homo sapien
caggaattatacagcagagcctcag

SEQ ID NO: 3226160 - DNA, 25 bp, Homo sapien
cacttctcacaagggttactgtctg

SEQ ID NO: 3226161 - DNA, 25 bp, Homo sapien
tcctactagaggttcgccagatgct

SEQ ID NO: 3226162 - DNA, 25 bp, Homo sapien
tagcactatcggcagttgatgaatc

SEQ ID NO: 3226163 - DNA, 25 bp, Homo sapien
gtggccttggaaaccaacaagtcca

SEQ ID NO: 3226164 - DNA, 25 bp, Homo sapien
tatgatatgtagatggagacacagg

SEQ ID NO: 3226165 - DNA, 25 bp, Homo sapien
tatcagctggttggtaccaaaggcc

SEQ ID NO: 3226166 - DNA, 25 bp, Homo sapien
tggtaatgcagctcctaatctggca

SEQ ID NO: 3226167 - DNA, 25 bp, Homo sapien
tgtgaaactcccaaacccgaatgag

SEQ ID NO: 3226168 - DNA, 25 bp, Homo sapien
cccgaatgagaacgtttgtgaacct

SEQ ID NO: 3226169 - DNA, 25 bp, Homo sapien
aatctggcatctgtgaggcgctcca

SEQ ID NO: 3226170 - DNA, 25 bp, Homo sapien
tagggagtgactcttgagagccagt

SEQ ID NO: 3226171 - DNA, 25 bp, Homo sapien
ctgatgtgaggattccctggcccca

SEQ ID NO: 3226172 - DNA, 25 bp, Homo sapien
gaccaggactatattggttctcaac

SEQ ID NO: 3226173 - DNA, 25 bp, Homo sapien
catgggtcagcttattcattcgggc

SEQ ID NO: 3226174 - DNA, 25 bp, Homo sapien
gagttgctggagcttcagagggtcc

SEQ ID NO: 3226175 - DNA, 25 bp, Homo sapien
ttctgcgcggcgatgaactgcttgg

SEQ ID NO: 3226176 - DNA, 25 bp, Homo sapien
gcgcgcgtagttgaaggagccggag

SEQ ID NO: 3226177 - DNA, 25 bp, Homo sapien
tgctccagtcggatttggttctgga

SEQ ID NO: 3226178 - DNA, 25 bp, Homo sapien
gcgacgggaggctggacgagctggg

SEQ ID NO: 3226179 - DNA, 25 bp, Homo sapien
gctggaggccggcgtgccgtggccc

SEQ ID NO: 3226180 - DNA, 25 bp, Homo sapien
ggaggccggcgtgccgtggcccgac

SEQ ID NO: 3226181 - DNA, 25 bp, Homo sapien
gggcgacgggaggctggacgagctg

SEQ ID NO: 3226182 - DNA, 25 bp, Homo sapien
cgggggcgcggccgaactgcctcgg

SEQ ID NO: 3226183 - DNA, 25 bp, Homo sapien
cacgggggcgcggccgaactgcctc

SEQ ID NO: 3226184 - DNA, 25 bp, Homo sapien
gggcgcggccgaactgcctcggcgt

SEQ ID NO: 3226185 - DNA, 25 bp, Homo sapien
gcgcggccgaactgcctcggcgtcg

SEQ ID NO: 3226186 - DNA, 25 bp, Homo sapien
gggcctcgggctcagcgccgaaggg

SEQ ID NO: 3226187 - DNA, 25 bp, Homo sapien
ggggcctcgggctcagcgccgaagg

SEQ ID NO: 3226188 - DNA, 25 bp, Homo sapien
acacgtcgggcaccgggaaggcagc

SEQ ID NO: 3226189 - DNA, 25 bp, Homo sapien
cagtgggaacacgtcgggcaccggg

SEQ ID NO: 3226190 - DNA, 25 bp, Homo sapien
gcggcagtgggaacacgtcgggcac

SEQ ID NO: 3226191 - DNA, 25 bp, Homo sapien
gaacacgtcgggcaccgggaaggca

SEQ ID NO: 3226192 - DNA, 25 bp, Homo sapien
gtggccgaagcgggtggcaggcgac

SEQ ID NO: 3226193 - DNA, 25 bp, Homo sapien
ctgtggccgaagcgggtggcaggcg

SEQ ID NO: 3226194 - DNA, 25 bp, Homo sapien
cgaagcgggtggcaggcgacgagca

SEQ ID NO: 3226195 - DNA, 25 bp, Homo sapien
gccgaagcgggtggcaggcgacgag

SEQ ID NO: 3226196 - DNA, 25 bp, Homo sapien
cagagcgctgaggaaggccgcgggc

SEQ ID NO: 3226197 - DNA, 25 bp, Homo sapien
gagcgctgaggaaggccgcgggcgt

SEQ ID NO: 3226198 - DNA, 25 bp, Homo sapien
agcgctgaggaaggccgcgggcgtc

SEQ ID NO: 3226199 - DNA, 25 bp, Homo sapien
gctgaggaaggccgcgggcgtctgg

SEQ ID NO: 3226200 - DNA, 25 bp, Homo sapien
cccagggcgttgacggccgccggcg

SEQ ID NO: 3226201 - DNA, 25 bp, Homo sapien
cagggcgttgacggccgccggcggc

SEQ ID NO: 3226202 - DNA, 25 bp, Homo sapien
agccccagggcgttgacggccgccg

SEQ ID NO: 3226203 - DNA, 25 bp, Homo sapien
gcagccccagggcgttgacggccgc

SEQ ID NO: 3226204 - DNA, 25 bp, Homo sapien
tggccacaaaatcggcacgacttct

SEQ ID NO: 3226205 - DNA, 25 bp, Homo sapien
gaagcaagtgctcctgttacttgag

SEQ ID NO: 3226206 - DNA, 25 bp, Homo sapien
caggaacgactggactcttgtggta

SEQ ID NO: 3226207 - DNA, 25 bp, Homo sapien
tcttaagaaggtttcaaagtcactg

SEQ ID NO: 3226208 - DNA, 25 bp, Homo sapien
cttgaggacaaaacggtaaccacat

SEQ ID NO: 3226209 - DNA, 25 bp, Homo sapien
tgaggacaaaacggtaaccacataa

SEQ ID NO: 3226210 - DNA, 25 bp, Homo sapien
taatggcttactgagcaggcatgga

SEQ ID NO: 3226211 - DNA, 25 bp, Homo sapien
ataatggcttactgagcaggcatgg

SEQ ID NO: 3226212 - DNA, 25 bp, Homo sapien
tacagagtacttcatgactttgtgt

SEQ ID NO: 3226213 - DNA, 25 bp, Homo sapien
atcattgcaattttagtattcacac

SEQ ID NO: 3226214 - DNA, 25 bp, Homo sapien
aatacagagtacttcatgactttgt

SEQ ID NO: 3226215 - DNA, 25 bp, Homo sapien
tagtattcacactgccaaagcaagc

SEQ ID NO: 3226216 - DNA, 25 bp, Homo sapien
aatgtacgtggctggagacatgcca

SEQ ID NO: 3226217 - DNA, 25 bp, Homo sapien
tatttggtgccttgtagatagcagg

SEQ ID NO: 3226218 - DNA, 25 bp, Homo sapien
tagcagggaccataagtgcatacca

SEQ ID NO: 3226219 - DNA, 25 bp, Homo sapien
ttattgagcatctagcagggcccag

SEQ ID NO: 3226220 - DNA, 25 bp, Homo sapien
agaactagaagagctaggttttgaa

SEQ ID NO: 3226221 - DNA, 25 bp, Homo sapien
tgagaactagaagagctaggttttg

SEQ ID NO: 3226222 - DNA, 25 bp, Homo sapien
ctagaagagctaggttttgaagtca

SEQ ID NO: 3226223 - DNA, 25 bp, Homo sapien
aactagaagagctaggttttgaagt

SEQ ID NO: 3226224 - DNA, 25 bp, Homo sapien
ccttttagtcatttgccctgaagtt

SEQ ID NO: 3226225 - DNA, 25 bp, Homo sapien
ggtaacactagactttacaaactca

SEQ ID NO: 3226226 - DNA, 25 bp, Homo sapien
tacctacagtggaaaatatgctaac

SEQ ID NO: 3226227 - DNA, 25 bp, Homo sapien
cctgctattctaggtttgtcccttt

SEQ ID NO: 3226228 - DNA, 25 bp, Homo sapien
gcgaagttttcgttccaggtcttga

SEQ ID NO: 3226229 - DNA, 25 bp, Homo sapien
tgaatttcctcatcggaggctattc

SEQ ID NO: 3226230 - DNA, 25 bp, Homo sapien
tattctagcagttctactggccttc

SEQ ID NO: 3226231 - DNA, 25 bp, Homo sapien
gaataacagcatcctttgtgccttg

SEQ ID NO: 3226232 - DNA, 25 bp, Homo sapien
gaaagcagtgaagactgaatagaag

SEQ ID NO: 3226233 - DNA, 25 bp, Homo sapien
aaagcagtgaagactgaatagaagg

SEQ ID NO: 3226234 - DNA, 25 bp, Homo sapien
agaaagcagtgaagactgaatagaa

SEQ ID NO: 3226235 - DNA, 25 bp, Homo sapien
cttctggctcctgaatattaaagac

SEQ ID NO: 3226236 - DNA, 25 bp, Homo sapien
gagccattctttcttcgtatgttaa

SEQ ID NO: 3226237 - DNA, 25 bp, Homo sapien
tattaaagacagttgcactgtcagc

SEQ ID NO: 3226238 - DNA, 25 bp, Homo sapien
tgtcagcacctagcagtcgacgagc

SEQ ID NO: 3226239 - DNA, 25 bp, Homo sapien
tccagaggactccctacagaagcat

SEQ ID NO: 3226240 - DNA, 25 bp, Homo sapien
agaggactccctacagaagcatgag

SEQ ID NO: 3226241 - DNA, 25 bp, Homo sapien
cagaggactccctacagaagcatga

SEQ ID NO: 3226242 - DNA, 25 bp, Homo sapien
ccagaggactccctacagaagcatg

SEQ ID NO: 3226243 - DNA, 25 bp, Homo sapien
tgatgcagggtggtacatctctcca

SEQ ID NO: 3226244 - DNA, 25 bp, Homo sapien
caataaggccctagaagacagtgat

SEQ ID NO: 3226245 - DNA, 25 bp, Homo sapien
catagtacatgtggcaagcagctgc

SEQ ID NO: 3226246 - DNA, 25 bp, Homo sapien
ccttctgtagggtaaaagctgatgc

SEQ ID NO: 3226247 - DNA, 25 bp, Homo sapien
ctgatgagtctctgttcacagctgg

SEQ ID NO: 3226248 - DNA, 25 bp, Homo sapien
cctttctagcctgtactctatttca

SEQ ID NO: 3226249 - DNA, 25 bp, Homo sapien
actgatgagtctctgttcacagctg

SEQ ID NO: 3226250 - DNA, 25 bp, Homo sapien
agcctgtactctatttcactgatga

SEQ ID NO: 3226251 - DNA, 25 bp, Homo sapien
gcttcatctcaaagaatggtgccat

SEQ ID NO: 3226252 - DNA, 25 bp, Homo sapien
ggatttccagccactctacatgtga

SEQ ID NO: 3226253 - DNA, 25 bp, Homo sapien
ggcacatctccatactgaacttcat

SEQ ID NO: 3226254 - DNA, 25 bp, Homo sapien
tacatgtgaaagttactggcattcc

SEQ ID NO: 3226255 - DNA, 25 bp, Homo sapien
tttagaggttacttaagattgttca

SEQ ID NO: 3226256 - DNA, 25 bp, Homo sapien
tactatgactcttaatatggtttgg

SEQ ID NO: 3226257 - DNA, 25 bp, Homo sapien
cattgagtacattgctctatgctta

SEQ ID NO: 3226258 - DNA, 25 bp, Homo sapien
tacacttctgtataccatgcagaac

SEQ ID NO: 3226259 - DNA, 25 bp, Homo sapien
ggtgtagtgatcactctttggagag

SEQ ID NO: 3226260 - DNA, 25 bp, Homo sapien
ctgtggtatggagggagcaggtccc

SEQ ID NO: 3226261 - DNA, 25 bp, Homo sapien
gcagccataattgtataattcccat

SEQ ID NO: 3226262 - DNA, 25 bp, Homo sapien
ggtcccatcgagatctctttgaatg

SEQ ID NO: 3226263 - DNA, 25 bp, Homo sapien
ggagtagaataacacctgatggaat

SEQ ID NO: 3226264 - DNA, 25 bp, Homo sapien
tcaaatgcctgtaagcactagacac

SEQ ID NO: 3226265 - DNA, 25 bp, Homo sapien
gaactgagcccagacctataccctt

SEQ ID NO: 3226266 - DNA, 25 bp, Homo sapien
ttctatcctctgaaaccaagatgga

SEQ ID NO: 3226267 - DNA, 25 bp, Homo sapien
gaacggagtacctagacacagaact

SEQ ID NO: 3226268 - DNA, 25 bp, Homo sapien
gagtacctagacacagaactgatcc

SEQ ID NO: 3226269 - DNA, 25 bp, Homo sapien
ctgtgggaacggagtacctagacac

SEQ ID NO: 3226270 - DNA, 25 bp, Homo sapien
tagacacagaactgatcctttacat

SEQ ID NO: 3226271 - DNA, 25 bp, Homo sapien
cacacagcaacaacatactgggtag

SEQ ID NO: 3226272 - DNA, 25 bp, Homo sapien
cctaagtcctttcccatggaggtga

SEQ ID NO: 3226273 - DNA, 25 bp, Homo sapien
tgtgctatgggtgtggccgtcctct

SEQ ID NO: 3226274 - DNA, 25 bp, Homo sapien
gggtagaaattccatcccaaattga

SEQ ID NO: 3226275 - DNA, 25 bp, Homo sapien
ccaaagggtagagcaaagaaccaga

SEQ ID NO: 3226276 - DNA, 25 bp, Homo sapien
ccttggctgaaatcacaggttggat

SEQ ID NO: 3226277 - DNA, 25 bp, Homo sapien
gagtagttattttacccttggctga

SEQ ID NO: 3226278 - DNA, 25 bp, Homo sapien
ggaataagggcagtaaccactctct

SEQ ID NO: 3226279 - DNA, 25 bp, Homo sapien
gaattgtaaaatatagcaggaggac

SEQ ID NO: 3226280 - DNA, 25 bp, Homo sapien
ccgtaacacatgatgttgaattgta

SEQ ID NO: 3226281 - DNA, 25 bp, Homo sapien
gcaaaggtctccgtaacacatgatg

SEQ ID NO: 3226282 - DNA, 25 bp, Homo sapien
gcaggaggacatcagtctcttgtga

SEQ ID NO: 3226283 - DNA, 25 bp, Homo sapien
taccattagccgtccagtacaactg

SEQ ID NO: 3226284 - DNA, 25 bp, Homo sapien
ttcgacctctttggttgacagcctg

SEQ ID NO: 3226285 - DNA, 25 bp, Homo sapien
tagccgtccagtacaactgatgcgg

SEQ ID NO: 3226286 - DNA, 25 bp, Homo sapien
gttgacagcctgtaccattagccgt

SEQ ID NO: 3226287 - DNA, 25 bp, Homo sapien
tgtaacacttctgggaaggaacatg

SEQ ID NO: 3226288 - DNA, 25 bp, Homo sapien
taacacttctgggaaggaacatgtt

SEQ ID NO: 3226289 - DNA, 25 bp, Homo sapien
atgtaacacttctgggaaggaacat

SEQ ID NO: 3226290 - DNA, 25 bp, Homo sapien
cacttctgggaaggaacatgttaaa

SEQ ID NO: 3226291 - DNA, 25 bp, Homo sapien
ggttcattttcgtctccactgtccc

SEQ ID NO: 3226292 - DNA, 25 bp, Homo sapien
gaagaatcgctcctgaattggttca

SEQ ID NO: 3226293 - DNA, 25 bp, Homo sapien
gaggtctgaagaatcgctcctgaat

SEQ ID NO: 3226294 - DNA, 25 bp, Homo sapien
aattggttcattttcgtctccactg

SEQ ID NO: 3226295 - DNA, 25 bp, Homo sapien
tgttgacacttaggctgatcccgta

SEQ ID NO: 3226296 - DNA, 25 bp, Homo sapien
cctcggatatataagcactagtaga

SEQ ID NO: 3226297 - DNA, 25 bp, Homo sapien
gaatgcagatattgctactgatttc

SEQ ID NO: 3226298 - DNA, 25 bp, Homo sapien
ggctgatcccgtatcctggctatta

SEQ ID NO: 3226299 - DNA, 25 bp, Homo sapien
cacatataagtaagatcctgtagta

SEQ ID NO: 3226300 - DNA, 25 bp, Homo sapien
ccgtctagcccgtggtaatcaccat

SEQ ID NO: 3226301 - DNA, 25 bp, Homo sapien
tattgcacatataagtaagatcctg

SEQ ID NO: 3226302 - DNA, 25 bp, Homo sapien
caggattataattttccactgtgtg

SEQ ID NO: 3226303 - DNA, 25 bp, Homo sapien
cgttattttacaagtggtctgtatg

SEQ ID NO: 3226304 - DNA, 25 bp, Homo sapien
aaaaattgtatgtaattctgcacat

SEQ ID NO: 3226305 - DNA, 25 bp, Homo sapien
cacaattccattttacacgtaaaat

SEQ ID NO: 3226306 - DNA, 25 bp, Homo sapien
tgttgtggaatacctaaactgagct

SEQ ID NO: 3226307 - DNA, 25 bp, Homo sapien
tgacccacgtgcctggccgattttt

SEQ ID NO: 3226308 - DNA, 25 bp, Homo sapien
taatggcaggcgttttaaggacagt

SEQ ID NO: 3226309 - DNA, 25 bp, Homo sapien
tatccaggtcagatcatcatagtga

SEQ ID NO: 3226310 - DNA, 25 bp, Homo sapien
acagttatgtgccagtccagtgaaa

SEQ ID NO: 3226311 - DNA, 25 bp, Homo sapien
tatacatgtgtagatgccggcatca

SEQ ID NO: 3226312 - DNA, 25 bp, Homo sapien
tctatgatcagagagtgcaccccgt

SEQ ID NO: 3226313 - DNA, 25 bp, Homo sapien
cacgtgacgtgactggctctatgat

SEQ ID NO: 3226314 - DNA, 25 bp, Homo sapien
ctgtcagggcgtacgggctttccat

SEQ ID NO: 3226315 - DNA, 25 bp, Homo sapien
ttcttggagtccatgctgctgttac

SEQ ID NO: 3226316 - DNA, 25 bp, Homo sapien
tttgctaggccttataaccatgtcc

SEQ ID NO: 3226317 - DNA, 25 bp, Homo sapien
gggccactatacacacaggaggtcg

SEQ ID NO: 3226318 - DNA, 25 bp, Homo sapien
tctctctttgccaggttagtgggag

SEQ ID NO: 3226319 - DNA, 25 bp, Homo sapien
tgactatgagggtagatgacagtgt

SEQ ID NO: 3226320 - DNA, 25 bp, Homo sapien
gcataagacttcatgtaacagcact

SEQ ID NO: 3226321 - DNA, 25 bp, Homo sapien
gtgaaaaagcaaatctgagtgtagt

SEQ ID NO: 3226322 - DNA, 25 bp, Homo sapien
gaatttacctacacaataatcagtg

SEQ ID NO: 3226323 - DNA, 25 bp, Homo sapien
tgttaccgatcattcacagcctcaa

SEQ ID NO: 3226324 - DNA, 25 bp, Homo sapien
tatcaatgatatacaaaaggagcac

SEQ ID NO: 3226325 - DNA, 25 bp, Homo sapien
cctaagtcattgctagcatctgtga

SEQ ID NO: 3226326 - DNA, 25 bp, Homo sapien
gatgctagtcccctctccaaattat

SEQ ID NO: 3226327 - DNA, 25 bp, Homo sapien
tttggagcttctcaataaacacagg

SEQ ID NO: 3226328 - DNA, 25 bp, Homo sapien
cacgacattccagccgcactgggta

SEQ ID NO: 3226329 - DNA, 25 bp, Homo sapien
gttttggagcttctcaataaacaca

SEQ ID NO: 3226330 - DNA, 25 bp, Homo sapien
aggtggtggcactcccaatacacga

SEQ ID NO: 3226331 - DNA, 25 bp, Homo sapien
gatacatcattaggactgaacagtt

SEQ ID NO: 3226332 - DNA, 25 bp, Homo sapien
aaaacatctatgtggcttttacaca

SEQ ID NO: 3226333 - DNA, 25 bp, Homo sapien
ctgaacagttaaggatcaggttctc

SEQ ID NO: 3226334 - DNA, 25 bp, Homo sapien
cattgggtaacgcatggtttttgtc

SEQ ID NO: 3226335 - DNA, 25 bp, Homo sapien
caggcagatgtagccgtggttgtcc

SEQ ID NO: 3226336 - DNA, 25 bp, Homo sapien
tgtagccgtggttgtcctggtgcat

SEQ ID NO: 3226337 - DNA, 25 bp, Homo sapien
ttttgtggctccctgaatgagcagg

SEQ ID NO: 3226338 - DNA, 25 bp, Homo sapien
tgtaaacgtccagcctggcagtaca

SEQ ID NO: 3226339 - DNA, 25 bp, Homo sapien
ttgggtatttgttctcctggtgtgg

SEQ ID NO: 3226340 - DNA, 25 bp, Homo sapien
tttgttctcctggtgtggttcacta

SEQ ID NO: 3226341 - DNA, 25 bp, Homo sapien
tatttgttctcctggtgtggttcac

SEQ ID NO: 3226342 - DNA, 25 bp, Homo sapien
ggtatttgttctcctggtgtggttc

SEQ ID NO: 3226343 - DNA, 25 bp, Homo sapien
tacagtagggaaggttgaggccaca

SEQ ID NO: 3226344 - DNA, 25 bp, Homo sapien
acaaaagtacgcattccaggatcaa

SEQ ID NO: 3226345 - DNA, 25 bp, Homo sapien
tggatgctttaacactaatcaactg

SEQ ID NO: 3226346 - DNA, 25 bp, Homo sapien
taatcaactgaaaggaatcgtacag

SEQ ID NO: 3226347 - DNA, 25 bp, Homo sapien
tttaatcaagatatacttggaaagc

SEQ ID NO: 3226348 - DNA, 25 bp, Homo sapien
agaatgtctagatagatgcaaggca

SEQ ID NO: 3226349 - DNA, 25 bp, Homo sapien
taatcaagatatacttggaaagcct

SEQ ID NO: 3226350 - DNA, 25 bp, Homo sapien
gtctagatagatgcaaggcacctga

SEQ ID NO: 3226351 - DNA, 25 bp, Homo sapien
ttggaacgctgctttgatgtctagt

SEQ ID NO: 3226352 - DNA, 25 bp, Homo sapien
ttctaccaaggcagtattcagtgtc

SEQ ID NO: 3226353 - DNA, 25 bp, Homo sapien
tagcgactggctgagggccgtactt

SEQ ID NO: 3226354 - DNA, 25 bp, Homo sapien
gtctagtccctggtccgaaagtgct

SEQ ID NO: 3226355 - DNA, 25 bp, Homo sapien
tatagtcaaaggtatgtttctgcct

SEQ ID NO: 3226356 - DNA, 25 bp, Homo sapien
gtttcagctttaacaagaatgctgg

SEQ ID NO: 3226357 - DNA, 25 bp, Homo sapien
taatttcttatagtcaaaggtatgt

SEQ ID NO: 3226358 - DNA, 25 bp, Homo sapien
caaaggaatatgttggtcaaggcaa

SEQ ID NO: 3226359 - DNA, 25 bp, Homo sapien
cattatctacttaaactaagtttgg

SEQ ID NO: 3226360 - DNA, 25 bp, Homo sapien
attagcattatctacttaaactaag

SEQ ID NO: 3226361 - DNA, 25 bp, Homo sapien
ttttaaattggacagtaaatgtgta

SEQ ID NO: 3226362 - DNA, 25 bp, Homo sapien
agttttaaattggacagtaaatgtg

SEQ ID NO: 3226363 - DNA, 25 bp, Homo sapien
ggcaaagtttcatggcagcagggaa

SEQ ID NO: 3226364 - DNA, 25 bp, Homo sapien
tgcatagaacatctgccacccggtg

SEQ ID NO: 3226365 - DNA, 25 bp, Homo sapien
cgagatgcctttacaaaccttggaa

SEQ ID NO: 3226366 - DNA, 25 bp, Homo sapien
gaaacttgaaccacactgcatagaa

SEQ ID NO: 3226367 - DNA, 25 bp, Homo sapien
ttattttgcttcacaaaactgcaac

SEQ ID NO: 3226368 - DNA, 25 bp, Homo sapien
tatttattttgcttcacaaaactgc

SEQ ID NO: 3226369 - DNA, 25 bp, Homo sapien
tttattttgcttcacaaaactgcaa

SEQ ID NO: 3226370 - DNA, 25 bp, Homo sapien
gaatatttattttgcttcacaaaac

SEQ ID NO: 3226371 - DNA, 25 bp, Homo sapien
tgtttcttgtaaggctagtcttccc

SEQ ID NO: 3226372 - DNA, 25 bp, Homo sapien
tgaggacttaactcttgtcgtttta

SEQ ID NO: 3226373 - DNA, 25 bp, Homo sapien
cccttagcttttgcatatctgaaaa

SEQ ID NO: 3226374 - DNA, 25 bp, Homo sapien
acttaaatagcctgtattatctgac

SEQ ID NO: 3226375 - DNA, 25 bp, Homo sapien
caagttgtactgagctcagattaat

SEQ ID NO: 3226376 - DNA, 25 bp, Homo sapien
ttgtactgagctcagattaatccct

SEQ ID NO: 3226377 - DNA, 25 bp, Homo sapien
ttctctgtggtcaagttgtactgag

SEQ ID NO: 3226378 - DNA, 25 bp, Homo sapien
tggtcaagttgtactgagctcagat

SEQ ID NO: 3226379 - DNA, 25 bp, Homo sapien
ttttagttcatggatctcatggaga

SEQ ID NO: 3226380 - DNA, 25 bp, Homo sapien
tttagttcatggatctcatggagaa

SEQ ID NO: 3226381 - DNA, 25 bp, Homo sapien
ttagttcatggatctcatggagaaa

SEQ ID NO: 3226382 - DNA, 25 bp, Homo sapien
aatccattgtggcataagacatctg

SEQ ID NO: 3226383 - DNA, 25 bp, Homo sapien
tctgaatgagtaagtaactctgctt

SEQ ID NO: 3226384 - DNA, 25 bp, Homo sapien
tgaatgagtaagtaactctgctttc

SEQ ID NO: 3226385 - DNA, 25 bp, Homo sapien
attgtggcataagacatctgtgttc

SEQ ID NO: 3226386 - DNA, 25 bp, Homo sapien
tgaaggcactggtcttaagtgagaa

SEQ ID NO: 3226387 - DNA, 25 bp, Homo sapien
gacagttattttgtgtaagcagaga

SEQ ID NO: 3226388 - DNA, 25 bp, Homo sapien
tatcaggcattaccaagtctaggca

SEQ ID NO: 3226389 - DNA, 25 bp, Homo sapien
aatgcaagacgtggtaatatacaga

SEQ ID NO: 3226390 - DNA, 25 bp, Homo sapien
tcaaacctgctgatgctacaaatgt

SEQ ID NO: 3226391 - DNA, 25 bp, Homo sapien
gattagcatcaagggcacactttgg

SEQ ID NO: 3226392 - DNA, 25 bp, Homo sapien
tacacacagatatgacgaaagactt

SEQ ID NO: 3226393 - DNA, 25 bp, Homo sapien
gaatcaccgtatattacagggcatg

SEQ ID NO: 3226394 - DNA, 25 bp, Homo sapien
gtggacatcttatctggcagataca

SEQ ID NO: 3226395 - DNA, 25 bp, Homo sapien
tagtgataggctaaaatcctgatgc

SEQ ID NO: 3226396 - DNA, 25 bp, Homo sapien
tgagtcctagaaacttacatcaaag

SEQ ID NO: 3226397 - DNA, 25 bp, Homo sapien
tagtgccccatctcacaattgttag

SEQ ID NO: 3226398 - DNA, 25 bp, Homo sapien
aatgttctgaatggcatatagaacg

SEQ ID NO: 3226399 - DNA, 25 bp, Homo sapien
ttctgaatggcatatagaacggtga

SEQ ID NO: 3226400 - DNA, 25 bp, Homo sapien
tgactgctatagacttataaaatgt

SEQ ID NO: 3226401 - DNA, 25 bp, Homo sapien
aggctccacttgtaattctgctcca

SEQ ID NO: 3226402 - DNA, 25 bp, Homo sapien
agcagttgggggttgtatactaact

SEQ ID NO: 3226403 - DNA, 25 bp, Homo sapien
aagccactcatatttagcagttggg

SEQ ID NO: 3226404 - DNA, 25 bp, Homo sapien
taggttctgataacccgctaccatc

SEQ ID NO: 3226405 - DNA, 25 bp, Homo sapien
tagtgacactactgttaataggttc

SEQ ID NO: 3226406 - DNA, 25 bp, Homo sapien
ggactatgattcaacaacagggagg

SEQ ID NO: 3226407 - DNA, 25 bp, Homo sapien
tctagctcagataggaagcacttct

SEQ ID NO: 3226408 - DNA, 25 bp, Homo sapien
tctcaagccaagttcaaaatgggac

SEQ ID NO: 3226409 - DNA, 25 bp, Homo sapien
tcagcttcatactaacctcttgggt

SEQ ID NO: 3226410 - DNA, 25 bp, Homo sapien
gagctggagaaacatttaggtcgag

SEQ ID NO: 3226411 - DNA, 25 bp, Homo sapien
tccagttgagtcgattttaacattg

SEQ ID NO: 3226412 - DNA, 25 bp, Homo sapien
caaaatacatttgaagagctggaga

SEQ ID NO: 3226413 - DNA, 25 bp, Homo sapien
ggtattaacaggttggtcacagatt

SEQ ID NO: 3226414 - DNA, 25 bp, Homo sapien
gttgcccgtgctggaccccaactcc

SEQ ID NO: 3226415 - DNA, 25 bp, Homo sapien
tgcccgtgctggaccccaactcctg

SEQ ID NO: 3226416 - DNA, 25 bp, Homo sapien
ccccaactcctgatttactggctct

SEQ ID NO: 3226417 - DNA, 25 bp, Homo sapien
ccaactcctgatttactggctctag

SEQ ID NO: 3226418 - DNA, 25 bp, Homo sapien
gtccaggcgcctaaagaaaatctcc

SEQ ID NO: 3226419 - DNA, 25 bp, Homo sapien
aatggcccggaaaggctaccgactg

SEQ ID NO: 3226420 - DNA, 25 bp, Homo sapien
tgtccagttgtatggccgcggtcca

SEQ ID NO: 3226421 - DNA, 25 bp, Homo sapien
ggttactcgatgtagccgcgtgcag

SEQ ID NO: 3226422 - DNA, 25 bp, Homo sapien
tcacgacacccttcgcgatgaatgg

SEQ ID NO: 3226423 - DNA, 25 bp, Homo sapien
gggaccatggctcatacttttctga

SEQ ID NO: 3226424 - DNA, 25 bp, Homo sapien
ttgtttctctacagcagccgaagct

SEQ ID NO: 3226425 - DNA, 25 bp, Homo sapien
tctgggcgggtagaggtccatttct

SEQ ID NO: 3226426 - DNA, 25 bp, Homo sapien
tcagaggatccgtctttgtccctac

SEQ ID NO: 3226427 - DNA, 25 bp, Homo sapien
cagaggatccgtctttgtccctacc

SEQ ID NO: 3226428 - DNA, 25 bp, Homo sapien
acttcagaggatccgtctttgtccc

SEQ ID NO: 3226429 - DNA, 25 bp, Homo sapien
ttcagaggatccgtctttgtcccta

SEQ ID NO: 3226430 - DNA, 25 bp, Homo sapien
tgtcttcttgccacaacttccatag

SEQ ID NO: 3226431 - DNA, 25 bp, Homo sapien
ggaattaagagttgtctctgggttg

SEQ ID NO: 3226432 - DNA, 25 bp, Homo sapien
gagaatctttcccttcttcagttgt

SEQ ID NO: 3226433 - DNA, 25 bp, Homo sapien
aatcacagagaaataactgagcggg

SEQ ID NO: 3226434 - DNA, 25 bp, Homo sapien
caagaatagtcaagaagagggacca

SEQ ID NO: 3226435 - DNA, 25 bp, Homo sapien
tattttaacatggtggcgctgggtc

SEQ ID NO: 3226436 - DNA, 25 bp, Homo sapien
tcagatacgggatgcagaagaacta

SEQ ID NO: 3226437 - DNA, 25 bp, Homo sapien
tgatggcaacagaagacgggcagat

SEQ ID NO: 3226438 - DNA, 25 bp, Homo sapien
gtcgctctattgcttctgcaggtca

SEQ ID NO: 3226439 - DNA, 25 bp, Homo sapien
agtggggtcgctctattgcttctgc

SEQ ID NO: 3226440 - DNA, 25 bp, Homo sapien
tctaacggcccggtcaccaccatgg

SEQ ID NO: 3226441 - DNA, 25 bp, Homo sapien
ttggaaagtggggtcgctctattgc

SEQ ID NO: 3226442 - DNA, 25 bp, Homo sapien
gtttccagcttaggcctgaatggaa

SEQ ID NO: 3226443 - DNA, 25 bp, Homo sapien
cagcttaggcctgaatggaagaaga

SEQ ID NO: 3226444 - DNA, 25 bp, Homo sapien
gccagtgtttatcagacagtggtgt

SEQ ID NO: 3226445 - DNA, 25 bp, Homo sapien
ttggtgtggccagtgtttatcagac

SEQ ID NO: 3226446 - DNA, 25 bp, Homo sapien
aaagctgatttactggaagattgct

SEQ ID NO: 3226447 - DNA, 25 bp, Homo sapien
ggatgactggtatgtttagactgaa

SEQ ID NO: 3226448 - DNA, 25 bp, Homo sapien
tttactggaagattgctatcacccc

SEQ ID NO: 3226449 - DNA, 25 bp, Homo sapien
ctttcaagtaggatgactggtatgt

SEQ ID NO: 3226450 - DNA, 25 bp, Homo sapien
aggctccagtcacaacaacatgaga

SEQ ID NO: 3226451 - DNA, 25 bp, Homo sapien
cagactgggccatagagaataggag

SEQ ID NO: 3226452 - DNA, 25 bp, Homo sapien
caacaacatgagattccaggccttt

SEQ ID NO: 3226453 - DNA, 25 bp, Homo sapien
gaacccgtgtgttcttctgagttgt

SEQ ID NO: 3226454 - DNA, 25 bp, Homo sapien
gaatgatggttgcattaccattgaa

SEQ ID NO: 3226455 - DNA, 25 bp, Homo sapien
gatgggaccttgtgctaacttaaag

SEQ ID NO: 3226456 - DNA, 25 bp, Homo sapien
tcttctcgccccaggaaaattagga

SEQ ID NO: 3226457 - DNA, 25 bp, Homo sapien
aaagtacattaaagtctcatcagaa

SEQ ID NO: 3226458 - DNA, 25 bp, Homo sapien
agtacctctgttcatagtttcctgg

SEQ ID NO: 3226459 - DNA, 25 bp, Homo sapien
gggcttgttacacagtgatatggta

SEQ ID NO: 3226460 - DNA, 25 bp, Homo sapien
tggttttttgcagacagtagaggga

SEQ ID NO: 3226461 - DNA, 25 bp, Homo sapien
tgcaatgacaagaggtttcatggtc

SEQ ID NO: 3226462 - DNA, 25 bp, Homo sapien
tgattctttccccacgtcttgcatg

SEQ ID NO: 3226463 - DNA, 25 bp, Homo sapien
tgcatgcccaggacacaagtaaaac

SEQ ID NO: 3226464 - DNA, 25 bp, Homo sapien
gatgcactcgtgttaagtcaaaggc

SEQ ID NO: 3226465 - DNA, 25 bp, Homo sapien
attttaccccaactgacctgcatgc

SEQ ID NO: 3226466 - DNA, 25 bp, Homo sapien
tgagagcaagagattcgttttgaca

SEQ ID NO: 3226467 - DNA, 25 bp, Homo sapien
tatgaaatgataggtaaggagaagc

SEQ ID NO: 3226468 - DNA, 25 bp, Homo sapien
gaatcagtatcaattagggcctggg

SEQ ID NO: 3226469 - DNA, 25 bp, Homo sapien
cgttttgacatagagtgaatgcatt

SEQ ID NO: 3226470 - DNA, 25 bp, Homo sapien
taatattttaaaggagaacaagaga

SEQ ID NO: 3226471 - DNA, 25 bp, Homo sapien
attttaaaggagaacaagagatgaa

SEQ ID NO: 3226472 - DNA, 25 bp, Homo sapien
tgaaaaggttgctttggctttaata

SEQ ID NO: 3226473 - DNA, 25 bp, Homo sapien
tgcttgctgaaaaggttgctttggc

SEQ ID NO: 3226474 - DNA, 25 bp, Homo sapien
aggctgccaaccttgctagtttgaa

SEQ ID NO: 3226475 - DNA, 25 bp, Homo sapien
tgaaagttagaagtagagcctttgg

SEQ ID NO: 3226476 - DNA, 25 bp, Homo sapien
gttcagggaattggaagtagaggat

SEQ ID NO: 3226477 - DNA, 25 bp, Homo sapien
tgttggtgggttcagggaattggaa

SEQ ID NO: 3226478 - DNA, 25 bp, Homo sapien
tgcactccagccaggactagatgct

SEQ ID NO: 3226479 - DNA, 25 bp, Homo sapien
gagactgcagtaaaccatgattgtg

SEQ ID NO: 3226480 - DNA, 25 bp, Homo sapien
cactccagccaggactagatgctgt

SEQ ID NO: 3226481 - DNA, 25 bp, Homo sapien
ctccagccaggactagatgctgttc

SEQ ID NO: 3226482 - DNA, 25 bp, Homo sapien
tagaatctcagctagttcatcaagt

SEQ ID NO: 3226483 - DNA, 25 bp, Homo sapien
agaatctcagctagttcatcaagta

SEQ ID NO: 3226484 - DNA, 25 bp, Homo sapien
gaatctcagctagttcatcaagtag

SEQ ID NO: 3226485 - DNA, 25 bp, Homo sapien
ttagaatctcagctagttcatcaag

SEQ ID NO: 3226486 - DNA, 25 bp, Homo sapien
catcagccttcgtggcttcgggttc

SEQ ID NO: 3226487 - DNA, 25 bp, Homo sapien
tcgggttccttctctttagtatcca

SEQ ID NO: 3226488 - DNA, 25 bp, Homo sapien
cagccttcgtggcttcgggttcctt

SEQ ID NO: 3226489 - DNA, 25 bp, Homo sapien
ccttctctttagtatccagcttctc

SEQ ID NO: 3226490 - DNA, 25 bp, Homo sapien
aataaggataggattttggccacag

SEQ ID NO: 3226491 - DNA, 25 bp, Homo sapien
tatatagcagatgaggaatatctgc

SEQ ID NO: 3226492 - DNA, 25 bp, Homo sapien
ttcctctaataaggataggattttg

SEQ ID NO: 3226493 - DNA, 25 bp, Homo sapien
ggccacagtggagcttccccttctt

SEQ ID NO: 3226494 - DNA, 25 bp, Homo sapien
ggctcagcagcttttgagacacatc

SEQ ID NO: 3226495 - DNA, 25 bp, Homo sapien
tgtggctcagcagcttttgagacac

SEQ ID NO: 3226496 - DNA, 25 bp, Homo sapien
tggctcgcagtttgtcacatgctga

SEQ ID NO: 3226497 - DNA, 25 bp, Homo sapien
tgactgaaggtttttgctgtggctc

SEQ ID NO: 3226498 - DNA, 25 bp, Homo sapien
ccagctgcttcgggaaaaccattct

SEQ ID NO: 3226499 - DNA, 25 bp, Homo sapien
ggaccagaggtccagtcaaagtaac

SEQ ID NO: 3226500 - DNA, 25 bp, Homo sapien
ttgaggaccagaggtccagtcaaag

SEQ ID NO: 3226501 - DNA, 25 bp, Homo sapien
gaggaccagaggtccagtcaaagta

SEQ ID NO: 3226502 - DNA, 25 bp, Homo sapien
ctagaggaactcaattgaggaccag

SEQ ID NO: 3226503 - DNA, 25 bp, Homo sapien
agatttttacattgcagataccaat

SEQ ID NO: 3226504 - DNA, 25 bp, Homo sapien
tttctgatcaaccttgcactggtca

SEQ ID NO: 3226505 - DNA, 25 bp, Homo sapien
tgatcaaccttgcactggtcatttc

SEQ ID NO: 3226506 - DNA, 25 bp, Homo sapien
ttctgatcaaccttgcactggtcat

SEQ ID NO: 3226507 - DNA, 25 bp, Homo sapien
tctgatcaaccttgcactggtcatt

SEQ ID NO: 3226508 - DNA, 25 bp, Homo sapien
ggttgttctgaagtcaaagctggca

SEQ ID NO: 3226509 - DNA, 25 bp, Homo sapien
ggttagccgggaccagatgatagaa

SEQ ID NO: 3226510 - DNA, 25 bp, Homo sapien
caagactgtggataataggtgctag

SEQ ID NO: 3226511 - DNA, 25 bp, Homo sapien
gccgttctgaggttaacaggcaaga

SEQ ID NO: 3226512 - DNA, 25 bp, Homo sapien
gaaagcttgttgcagaatggaaatc

SEQ ID NO: 3226513 - DNA, 25 bp, Homo sapien
ggaaatctaagggatttgcgttcac

SEQ ID NO: 3226514 - DNA, 25 bp, Homo sapien
gggatttgcgttcacaccatccacc

SEQ ID NO: 3226515 - DNA, 25 bp, Homo sapien
agcttgttgcagaatggaaatctaa

SEQ ID NO: 3226516 - DNA, 25 bp, Homo sapien
tgcaggtttctttagcattacatct

SEQ ID NO: 3226517 - DNA, 25 bp, Homo sapien
tctaagatgtttgatatattcacac

SEQ ID NO: 3226518 - DNA, 25 bp, Homo sapien
atgtggccaaagtttatgcaggttt

SEQ ID NO: 3226519 - DNA, 25 bp, Homo sapien
catctaagatgtttgatatattcac

SEQ ID NO: 3226520 - DNA, 25 bp, Homo sapien
tctataccctcaaaaccttcatcat

SEQ ID NO: 3226521 - DNA, 25 bp, Homo sapien
tttctataccctcaaaaccttcatc

SEQ ID NO: 3226522 - DNA, 25 bp, Homo sapien
ttctataccctcaaaaccttcatca

SEQ ID NO: 3226523 - DNA, 25 bp, Homo sapien
cagtgtatcgttctttacacttgaa

SEQ ID NO: 3226524 - DNA, 25 bp, Homo sapien
catatctggatagtcagtgtatcgt

SEQ ID NO: 3226525 - DNA, 25 bp, Homo sapien
caaggaaacagagtaaattattctc

SEQ ID NO: 3226526 - DNA, 25 bp, Homo sapien
tgtggtgtaatctcttcaaggaaac

SEQ ID NO: 3226527 - DNA, 25 bp, Homo sapien
tcctcgtggtcctgtaacttcacta

SEQ ID NO: 3226528 - DNA, 25 bp, Homo sapien
tcacacttgcaggacgtctggaatg

SEQ ID NO: 3226529 - DNA, 25 bp, Homo sapien
gaggaggcttttatcctcgtggtcc

SEQ ID NO: 3226530 - DNA, 25 bp, Homo sapien
gacgtctggaatgaggaggctttta

SEQ ID NO: 3226531 - DNA, 25 bp, Homo sapien
agtgaattacaacgatcacaagtac

SEQ ID NO: 3226532 - DNA, 25 bp, Homo sapien
attacaacgatcacaagtacatttt

SEQ ID NO: 3226533 - DNA, 25 bp, Homo sapien
gaattacaacgatcacaagtacatt

SEQ ID NO: 3226534 - DNA, 25 bp, Homo sapien
tgaattacaacgatcacaagtacat

SEQ ID NO: 3226535 - DNA, 25 bp, Homo sapien
ttagtacagctgagaaaagacttta

SEQ ID NO: 3226536 - DNA, 25 bp, Homo sapien
tacagctgagaaaagactttaccaa

SEQ ID NO: 3226537 - DNA, 25 bp, Homo sapien
agctgagaaaagactttaccaaata

SEQ ID NO: 3226538 - DNA, 25 bp, Homo sapien
tagtacagctgagaaaagactttac

SEQ ID NO: 3226539 - DNA, 25 bp, Homo sapien
tgtagcgacgacagatgggttttct

SEQ ID NO: 3226540 - DNA, 25 bp, Homo sapien
tctgtagcgacgacagatgggtttt

SEQ ID NO: 3226541 - DNA, 25 bp, Homo sapien
ttttctgtgttaagacctcatcccc

SEQ ID NO: 3226542 - DNA, 25 bp, Homo sapien
tttctgtgttaagacctcatcccca

SEQ ID NO: 3226543 - DNA, 25 bp, Homo sapien
ttttgaatgccttcgatgtgccaag

SEQ ID NO: 3226544 - DNA, 25 bp, Homo sapien
gacgactggtattttttgaatgcct

SEQ ID NO: 3226545 - DNA, 25 bp, Homo sapien
tgccaagattatgccaggcgctttc

SEQ ID NO: 3226546 - DNA, 25 bp, Homo sapien
gagtgaagagagacgactggtattt

SEQ ID NO: 3226547 - DNA, 25 bp, Homo sapien
agctcagggtgttgaaccaagcctt

SEQ ID NO: 3226548 - DNA, 25 bp, Homo sapien
gctcagggtgttgaaccaagccttg

SEQ ID NO: 3226549 - DNA, 25 bp, Homo sapien
cagctcagggtgttgaaccaagcct

SEQ ID NO: 3226550 - DNA, 25 bp, Homo sapien
tctgctcgttggcttctagatttct

SEQ ID NO: 3226551 - DNA, 25 bp, Homo sapien
caattgcctttacctctgggtcagg

SEQ ID NO: 3226552 - DNA, 25 bp, Homo sapien
atttcttcccaggtccgtccgctct

SEQ ID NO: 3226553 - DNA, 25 bp, Homo sapien
cagtgacaagctttggtgttctgct

SEQ ID NO: 3226554 - DNA, 25 bp, Homo sapien
gatttcctgtttctctgacctggtg

SEQ ID NO: 3226555 - DNA, 25 bp, Homo sapien
tgccttgatttcctgtttctctgac

SEQ ID NO: 3226556 - DNA, 25 bp, Homo sapien
ttcctgtttctctgacctggtgaca

SEQ ID NO: 3226557 - DNA, 25 bp, Homo sapien
gtttctctgacctggtgacacacat

SEQ ID NO: 3226558 - DNA, 25 bp, Homo sapien
tttgccaactgactttccttgattt

SEQ ID NO: 3226559 - DNA, 25 bp, Homo sapien
aatgaggcatgttggtagacagatg

SEQ ID NO: 3226560 - DNA, 25 bp, Homo sapien
attcactttgactgattggaaacaa

SEQ ID NO: 3226561 - DNA, 25 bp, Homo sapien
gattcactttgactgattggaaaca

SEQ ID NO: 3226562 - DNA, 25 bp, Homo sapien
catgtgaagtgtcagctagctgtgg

SEQ ID NO: 3226563 - DNA, 25 bp, Homo sapien
ttcatgtgaagtgtcagctagctgt

SEQ ID NO: 3226564 - DNA, 25 bp, Homo sapien
cttcaatcttcatgtgaagtgtcag

SEQ ID NO: 3226565 - DNA, 25 bp, Homo sapien
tgtgaagtgtcagctagctgtggac

SEQ ID NO: 3226566 - DNA, 25 bp, Homo sapien
cacatgtgtttcccgccttgtgaag

SEQ ID NO: 3226567 - DNA, 25 bp, Homo sapien
atgtcacatgtgtttcccgccttgt

SEQ ID NO: 3226568 - DNA, 25 bp, Homo sapien
cagtgccttaaagtgagtctgcgtg

SEQ ID NO: 3226569 - DNA, 25 bp, Homo sapien
gccttaaagtgagtctgcgtgttgg

SEQ ID NO: 3226570 - DNA, 25 bp, Homo sapien
tctgcgtgttggaggactgatgcca

SEQ ID NO: 3226571 - DNA, 25 bp, Homo sapien
ctgtcaatggaatgaatagatgttc

SEQ ID NO: 3226572 - DNA, 25 bp, Homo sapien
ctgagctggtctccctctttttagt

SEQ ID NO: 3226573 - DNA, 25 bp, Homo sapien
gagctggtctccctctttttagtct

SEQ ID NO: 3226574 - DNA, 25 bp, Homo sapien
gtctgagctggtctccctcttttta

SEQ ID NO: 3226575 - DNA, 25 bp, Homo sapien
caggcatgtggtaattggtctctct

SEQ ID NO: 3226576 - DNA, 25 bp, Homo sapien
tgtgtgcctttctgtatctcccttt

SEQ ID NO: 3226577 - DNA, 25 bp, Homo sapien
tcatttgctgctgttgtgtgccttt

SEQ ID NO: 3226578 - DNA, 25 bp, Homo sapien
ctaaagtcatttgctgctgttgtgt

SEQ ID NO: 3226579 - DNA, 25 bp, Homo sapien
aagtcatttgctgctgttgtgtgcc

SEQ ID NO: 3226580 - DNA, 25 bp, Homo sapien
ctcttaaaagtaactgggtctggct

SEQ ID NO: 3226581 - DNA, 25 bp, Homo sapien
taaactctgttctcgtgtccaggga

SEQ ID NO: 3226582 - DNA, 25 bp, Homo sapien
catgactgtgatttgtagagttccc

SEQ ID NO: 3226583 - DNA, 25 bp, Homo sapien
gagttcccttcattcgctcttgtga

SEQ ID NO: 3226584 - DNA, 25 bp, Homo sapien
tcagttcaggcatttgggattctga

SEQ ID NO: 3226585 - DNA, 25 bp, Homo sapien
gtttgctgattaagttgctcattac

SEQ ID NO: 3226586 - DNA, 25 bp, Homo sapien
atagggtagagggaggtggtttgct

SEQ ID NO: 3226587 - DNA, 25 bp, Homo sapien
gaggtggtttgctgattaagttgct

SEQ ID NO: 3226588 - DNA, 25 bp, Homo sapien
ggtggtttgctgattaagttgctca

SEQ ID NO: 3226589 - DNA, 25 bp, Homo sapien
gctagattttcaattacgtctctta

SEQ ID NO: 3226590 - DNA, 25 bp, Homo sapien
ttcaattacgtctcttaatgaaatg

SEQ ID NO: 3226591 - DNA, 25 bp, Homo sapien
cagagctgacaagtatgaaagagta

SEQ ID NO: 3226592 - DNA, 25 bp, Homo sapien
cttgtaagggcagagctgacaagta

SEQ ID NO: 3226593 - DNA, 25 bp, Homo sapien
gctaccttatgggtatgtataacca

SEQ ID NO: 3226594 - DNA, 25 bp, Homo sapien
gattcagctggagatataattccca

SEQ ID NO: 3226595 - DNA, 25 bp, Homo sapien
ctggtggtcaatgtaggcagctacc

SEQ ID NO: 3226596 - DNA, 25 bp, Homo sapien
ctgtgattcagctggagatataatt

SEQ ID NO: 3226597 - DNA, 25 bp, Homo sapien
tagaattgggtagaaagagatcatc

SEQ ID NO: 3226598 - DNA, 25 bp, Homo sapien
tagaaagagatcatctgtgcagtgg

SEQ ID NO: 3226599 - DNA, 25 bp, Homo sapien
ttgggtagaaagagatcatctgtgc

SEQ ID NO: 3226600 - DNA, 25 bp, Homo sapien
ctagaattgggtagaaagagatcat

SEQ ID NO: 3226601 - DNA, 25 bp, Homo sapien
cattctgccattgacggtgtagtgt

SEQ ID NO: 3226602 - DNA, 25 bp, Homo sapien
attctgccattgacggtgtagtgtg

SEQ ID NO: 3226603 - DNA, 25 bp, Homo sapien
ttctgccattgacggtgtagtgtgt

SEQ ID NO: 3226604 - DNA, 25 bp, Homo sapien
gatcttgaggacagttagttgatga

SEQ ID NO: 3226605 - DNA, 25 bp, Homo sapien
ttatccggttttctccaagtaggca

SEQ ID NO: 3226606 - DNA, 25 bp, Homo sapien
gatgttagaccaattggagctttgt

SEQ ID NO: 3226607 - DNA, 25 bp, Homo sapien
ccaagtaggcaagaatgggatcttg

SEQ ID NO: 3226608 - DNA, 25 bp, Homo sapien
gtttgcctcttcttgaccctctcca

SEQ ID NO: 3226609 - DNA, 25 bp, Homo sapien
ttcagtgtctgaacctttgtcctca

SEQ ID NO: 3226610 - DNA, 25 bp, Homo sapien
gtgtctgaacctttgtcctcagtca

SEQ ID NO: 3226611 - DNA, 25 bp, Homo sapien
ccagtttcagtgtctgaacctttgt

SEQ ID NO: 3226612 - DNA, 25 bp, Homo sapien
tatgttgatgttactgagcacacct

SEQ ID NO: 3226613 - DNA, 25 bp, Homo sapien
ttttaaacccaagagatgagcagta

SEQ ID NO: 3226614 - DNA, 25 bp, Homo sapien
tggaaacacctattaatcttggctg

SEQ ID NO: 3226615 - DNA, 25 bp, Homo sapien
tcttggctgtgtcgtgacttgagca

SEQ ID NO: 3226616 - DNA, 25 bp, Homo sapien
tttgaaggacgaaagccaacctcag

SEQ ID NO: 3226617 - DNA, 25 bp, Homo sapien
cattccttataggtgaggtcactct

SEQ ID NO: 3226618 - DNA, 25 bp, Homo sapien
gtcactgatgcattccttataggtg

SEQ ID NO: 3226619 - DNA, 25 bp, Homo sapien
ttttgaaggacgaaagccaacctca

SEQ ID NO: 3226620 - DNA, 25 bp, Homo sapien
cagagtcctcgctcttgtaggcaca

SEQ ID NO: 3226621 - DNA, 25 bp, Homo sapien
ggcttcaactgaaaaatacacttag

SEQ ID NO: 3226622 - DNA, 25 bp, Homo sapien
cacttagttggcacaaacacatgta

SEQ ID NO: 3226623 - DNA, 25 bp, Homo sapien
ggcacaccacctatcttttataggc

SEQ ID NO: 3226624 - DNA, 25 bp, Homo sapien
tccagaattccaaggtccatcggaa

SEQ ID NO: 3226625 - DNA, 25 bp, Homo sapien
gaattccaaggtccatcggaacaca

SEQ ID NO: 3226626 - DNA, 25 bp, Homo sapien
aaggtccatcggaacacattcacat

SEQ ID NO: 3226627 - DNA, 25 bp, Homo sapien
tccaaggtccatcggaacacattca

SEQ ID NO: 3226628 - DNA, 25 bp, Homo sapien
taatgttcccttagaagcccacact

SEQ ID NO: 3226629 - DNA, 25 bp, Homo sapien
tggatatgatcttggtgcattgagg

SEQ ID NO: 3226630 - DNA, 25 bp, Homo sapien
cacatttgcccattgacaccagtaa

SEQ ID NO: 3226631 - DNA, 25 bp, Homo sapien
tgcattgaggtgacatgtggctctc

SEQ ID NO: 3226632 - DNA, 25 bp, Homo sapien
tgcatcagctgctatagaacctgtg

SEQ ID NO: 3226633 - DNA, 25 bp, Homo sapien
tggcctgcaactgtggtctgttctt

SEQ ID NO: 3226634 - DNA, 25 bp, Homo sapien
tgagtgttaacttctctgccttgca

SEQ ID NO: 3226635 - DNA, 25 bp, Homo sapien
gccctggcctgcaactgtggtctgt

SEQ ID NO: 3226636 - DNA, 25 bp, Homo sapien
tggaggtccgtcttgttcttgagtt

SEQ ID NO: 3226637 - DNA, 25 bp, Homo sapien
gaggtccgtcttgttcttgagtttc

SEQ ID NO: 3226638 - DNA, 25 bp, Homo sapien
gctggaggtccgtcttgttcttgag

SEQ ID NO: 3226639 - DNA, 25 bp, Homo sapien
ttagctggaggtccgtcttgttctt

SEQ ID NO: 3226640 - DNA, 25 bp, Homo sapien
gccagcatacgttttgcaagcgatg

SEQ ID NO: 3226641 - DNA, 25 bp, Homo sapien
ccttgatgcttctgcgaaggtcttg

SEQ ID NO: 3226642 - DNA, 25 bp, Homo sapien
gctggtcagacttctggatggcatc

SEQ ID NO: 3226643 - DNA, 25 bp, Homo sapien
tcagatgtcccgagtgcaggactct

SEQ ID NO: 3226644 - DNA, 25 bp, Homo sapien
cttggcagattatgataatgatgct

SEQ ID NO: 3226645 - DNA, 25 bp, Homo sapien
gattcttggcagattatgataatga

SEQ ID NO: 3226646 - DNA, 25 bp, Homo sapien
gggtgattcttggcagattatgata

SEQ ID NO: 3226647 - DNA, 25 bp, Homo sapien
tcttggcagattatgataatgatgc

SEQ ID NO: 3226648 - DNA, 25 bp, Homo sapien
tgattctcctagtaaaagcatcaac

SEQ ID NO: 3226649 - DNA, 25 bp, Homo sapien
acataaaacttgattctcctagtaa

SEQ ID NO: 3226650 - DNA, 25 bp, Homo sapien
ttctcctagtaaaagcatcaaccat

SEQ ID NO: 3226651 - DNA, 25 bp, Homo sapien
cataaaacttgattctcctagtaaa

SEQ ID NO: 3226652 - DNA, 25 bp, Homo sapien
tcttcctcctatatggcacttccaa

SEQ ID NO: 3226653 - DNA, 25 bp, Homo sapien
cattaaaggtttgggcggcttctga

SEQ ID NO: 3226654 - DNA, 25 bp, Homo sapien
cagtatggttggagtgggccctcca

SEQ ID NO: 3226655 - DNA, 25 bp, Homo sapien
tcacgtcaatgaaatctgggtctgg

SEQ ID NO: 3226656 - DNA, 25 bp, Homo sapien
cctgcacaggtggactgaatggcta

SEQ ID NO: 3226657 - DNA, 25 bp, Homo sapien
gattacactgcttttgagctctagc

SEQ ID NO: 3226658 - DNA, 25 bp, Homo sapien
tgtgcagtctgctaataagccatca

SEQ ID NO: 3226659 - DNA, 25 bp, Homo sapien
ggaactgctgtcgattagcctttag

SEQ ID NO: 3226660 - DNA, 25 bp, Homo sapien
aagctaggactaagcccacggtggg

SEQ ID NO: 3226661 - DNA, 25 bp, Homo sapien
cagggtgattctaggagggccctct

SEQ ID NO: 3226662 - DNA, 25 bp, Homo sapien
cctgttctggactctgtgtagataa

SEQ ID NO: 3226663 - DNA, 25 bp, Homo sapien
gccgtatggactgaagaggattttt

SEQ ID NO: 3226664 - DNA, 25 bp, Homo sapien
gagattcaatgcgagtccgctgatt

SEQ ID NO: 3226665 - DNA, 25 bp, Homo sapien
agcagtgcagcaattgcctgcatgg

SEQ ID NO: 3226666 - DNA, 25 bp, Homo sapien
tgccagcagtgcagcaattgcctgc

SEQ ID NO: 3226667 - DNA, 25 bp, Homo sapien
gtgtggagcctgggctttgctaaaa

SEQ ID NO: 3226668 - DNA, 25 bp, Homo sapien
tctgcgagtgtaggcaaagttgccc

SEQ ID NO: 3226669 - DNA, 25 bp, Homo sapien
gaaaagtcacgagtgttgactgtgg

SEQ ID NO: 3226670 - DNA, 25 bp, Homo sapien
tcaaagaaaagtcacgagtgttgac

SEQ ID NO: 3226671 - DNA, 25 bp, Homo sapien
cattagctgaagtacagttggtcaa

SEQ ID NO: 3226672 - DNA, 25 bp, Homo sapien
gataatctaacctcaaacatgatga

SEQ ID NO: 3226673 - DNA, 25 bp, Homo sapien
gagttaattcttccatcagtgttga

SEQ ID NO: 3226674 - DNA, 25 bp, Homo sapien
ttttctcaaagccagtttaccagca

SEQ ID NO: 3226675 - DNA, 25 bp, Homo sapien
gactcattggtgtgttggaactgcc

SEQ ID NO: 3226676 - DNA, 25 bp, Homo sapien
caggaataaggctcacttgatcata

SEQ ID NO: 3226677 - DNA, 25 bp, Homo sapien
tgtttcaattttgtactcattattg

SEQ ID NO: 3226678 - DNA, 25 bp, Homo sapien
cagccttctttgtatatcttgtgaa

SEQ ID NO: 3226679 - DNA, 25 bp, Homo sapien
tttgttgtgcccttgccatattttg

SEQ ID NO: 3226680 - DNA, 25 bp, Homo sapien
agtcctcagtgacctacaaagagac

SEQ ID NO: 3226681 - DNA, 25 bp, Homo sapien
cataaagcaagtcctcagtgaccta

SEQ ID NO: 3226682 - DNA, 25 bp, Homo sapien
aagcaagtcctcagtgacctacaaa

SEQ ID NO: 3226683 - DNA, 25 bp, Homo sapien
aagtcctcagtgacctacaaagaga

SEQ ID NO: 3226684 - DNA, 25 bp, Homo sapien
tcctttcatagctggtaatcactta

SEQ ID NO: 3226685 - DNA, 25 bp, Homo sapien
tactgcttgctaagtgatgtaggtt

SEQ ID NO: 3226686 - DNA, 25 bp, Homo sapien
tcactgacatggagcaacaactttc

SEQ ID NO: 3226687 - DNA, 25 bp, Homo sapien
tataggaggagagtgttaggaaaca

SEQ ID NO: 3226688 - DNA, 25 bp, Homo sapien
tttccagtatcactgtagtgctccc

SEQ ID NO: 3226689 - DNA, 25 bp, Homo sapien
tagtgctccctaccattttaatacc

SEQ ID NO: 3226690 - DNA, 25 bp, Homo sapien
tcatgagctttagtgtaacatataa

SEQ ID NO: 3226691 - DNA, 25 bp, Homo sapien
tcctgagtagttgtgataccttttt

SEQ ID NO: 3226692 - DNA, 25 bp, Homo sapien
gactgccacacctagactgatgctt

SEQ ID NO: 3226693 - DNA, 25 bp, Homo sapien
taggaagactgccacacctagactg

SEQ ID NO: 3226694 - DNA, 25 bp, Homo sapien
gccacacctagactgatgcttatta

SEQ ID NO: 3226695 - DNA, 25 bp, Homo sapien
gaagactgccacacctagactgatg

SEQ ID NO: 3226696 - DNA, 25 bp, Homo sapien
ccataactcggaatctagagccgct

SEQ ID NO: 3226697 - DNA, 25 bp, Homo sapien
aatctagagccgctgttgcgaggca

SEQ ID NO: 3226698 - DNA, 25 bp, Homo sapien
gcacgtggcagtcaagtagcttccc

SEQ ID NO: 3226699 - DNA, 25 bp, Homo sapien
agtcaagtagcttcccagtcccgaa

SEQ ID NO: 3226700 - DNA, 25 bp, Homo sapien
aaagtattggcagccgtcgacgagc

SEQ ID NO: 3226701 - DNA, 25 bp, Homo sapien
ttggcagccgtcgacgagcacaggt

SEQ ID NO: 3226702 - DNA, 25 bp, Homo sapien
ggcagccgtcgacgagcacaggttc

SEQ ID NO: 3226703 - DNA, 25 bp, Homo sapien
gtattggcagccgtcgacgagcaca

SEQ ID NO: 3226704 - DNA, 25 bp, Homo sapien
ggatccactctagcgagagaccaca

SEQ ID NO: 3226705 - DNA, 25 bp, Homo sapien
gccaccttgtgggagatgttttcgt

SEQ ID NO: 3226706 - DNA, 25 bp, Homo sapien
ttttcgtgaggcaacagacgctggc

SEQ ID NO: 3226707 - DNA, 25 bp, Homo sapien
gcgtcacgcagagttcggatccact

SEQ ID NO: 3226708 - DNA, 25 bp, Homo sapien
tgaacggccgttcagcgtccggccg

SEQ ID NO: 3226709 - DNA, 25 bp, Homo sapien
ctacgttgacgtgaacggccgttca

SEQ ID NO: 3226710 - DNA, 25 bp, Homo sapien
gccactcgctgagtagcgtcggcgc

SEQ ID NO: 3226711 - DNA, 25 bp, Homo sapien
tccggccactcgctgagtagcgtcg

SEQ ID NO: 3226712 - DNA, 25 bp, Homo sapien
caggagtcaggagcccgaaaggtac

SEQ ID NO: 3226713 - DNA, 25 bp, Homo sapien
cacgggcgaactagaacactgggaa

SEQ ID NO: 3226714 - DNA, 25 bp, Homo sapien
cttgctcattattccgggtcacggg

SEQ ID NO: 3226715 - DNA, 25 bp, Homo sapien
aaggtacgccccagcgtcgacgcgt

SEQ ID NO: 3226716 - DNA, 25 bp, Homo sapien
aactgaatccatgctctaactcggg

SEQ ID NO: 3226717 - DNA, 25 bp, Homo sapien
tcagagacatagcaaaatcggtggc

SEQ ID NO: 3226718 - DNA, 25 bp, Homo sapien
gaagttaaatcctctcgctctggag

SEQ ID NO: 3226719 - DNA, 25 bp, Homo sapien
tacctgacgttttctaccgcagagg

SEQ ID NO: 3226720 - DNA, 25 bp, Homo sapien
gaaagcctaccactaacatgacctg

SEQ ID NO: 3226721 - DNA, 25 bp, Homo sapien
tcctgagccgtctgaaaattatgac

SEQ ID NO: 3226722 - DNA, 25 bp, Homo sapien
caaaacagcgatagtggccaaaccc

SEQ ID NO: 3226723 - DNA, 25 bp, Homo sapien
tgatataagacccaccacagagatc

SEQ ID NO: 3226724 - DNA, 25 bp, Homo sapien
taacccctagcaacccatagtctgt

SEQ ID NO: 3226725 - DNA, 25 bp, Homo sapien
taatgggaacatctcgcaaaactat

SEQ ID NO: 3226726 - DNA, 25 bp, Homo sapien
cacaggtatctctcatgttgccgtt

SEQ ID NO: 3226727 - DNA, 25 bp, Homo sapien
tcatccagggtgttacatgtgtcaa

SEQ ID NO: 3226728 - DNA, 25 bp, Homo sapien
ctatggaacagctgctcagactcca

SEQ ID NO: 3226729 - DNA, 25 bp, Homo sapien
tatagtagcctctatggaacagctg

SEQ ID NO: 3226730 - DNA, 25 bp, Homo sapien
gcagtgtcaccatctaataaattgt

SEQ ID NO: 3226731 - DNA, 25 bp, Homo sapien
ttgtagctgtttctatagtagcctc

SEQ ID NO: 3226732 - DNA, 25 bp, Homo sapien
tatccactttggtagtatctttgaa

SEQ ID NO: 3226733 - DNA, 25 bp, Homo sapien
agtaactagtattctcacacattgc

SEQ ID NO: 3226734 - DNA, 25 bp, Homo sapien
cattgctagtagaaatgtacatgct

SEQ ID NO: 3226735 - DNA, 25 bp, Homo sapien
ggtgctttaaaagaggcaatctaaa

SEQ ID NO: 3226736 - DNA, 25 bp, Homo sapien
aaagattagctggatttcattagaa

SEQ ID NO: 3226737 - DNA, 25 bp, Homo sapien
tgagactggcttagaataaaggaaa

SEQ ID NO: 3226738 - DNA, 25 bp, Homo sapien
gaagataactgcaataccgtacatg

SEQ ID NO: 3226739 - DNA, 25 bp, Homo sapien
tgatatcttcaccaaaagattcctt

SEQ ID NO: 3226740 - DNA, 25 bp, Homo sapien
tgtctgctaccactaactctgatcc

SEQ ID NO: 3226741 - DNA, 25 bp, Homo sapien
ctagcttccaaaggccactttcatt

SEQ ID NO: 3226742 - DNA, 25 bp, Homo sapien
aggtgtgtcagcagggcagtgttcc

SEQ ID NO: 3226743 - DNA, 25 bp, Homo sapien
cactttcattcctcggattatggcc

SEQ ID NO: 3226744 - DNA, 25 bp, Homo sapien
aacacccagtttactacatacgagg

SEQ ID NO: 3226745 - DNA, 25 bp, Homo sapien
gagggcaggctataaacaagtaaga

SEQ ID NO: 3226746 - DNA, 25 bp, Homo sapien
cagataaagtcaagaatgcaagcac

SEQ ID NO: 3226747 - DNA, 25 bp, Homo sapien
tgttgctcaatttaggaggagggca

SEQ ID NO: 3226748 - DNA, 25 bp, Homo sapien
tggtgggcccttatgcaatacagtt

SEQ ID NO: 3226749 - DNA, 25 bp, Homo sapien
tgctactctactgaataacccacca

SEQ ID NO: 3226750 - DNA, 25 bp, Homo sapien
gattacactaccattttggtgggcc

SEQ ID NO: 3226751 - DNA, 25 bp, Homo sapien
gataagtggcttatatcctgctact

SEQ ID NO: 3226752 - DNA, 25 bp, Homo sapien
gacagggtttagtcacattgcctgg

SEQ ID NO: 3226753 - DNA, 25 bp, Homo sapien
acagggtttagtcacattgcctggg

SEQ ID NO: 3226754 - DNA, 25 bp, Homo sapien
cagggtttagtcacattgcctgggc

SEQ ID NO: 3226755 - DNA, 25 bp, Homo sapien
taaatggcactaccaactgcatgtg

SEQ ID NO: 3226756 - DNA, 25 bp, Homo sapien
tatcactacctatagtcctagacac

SEQ ID NO: 3226757 - DNA, 25 bp, Homo sapien
caggctccagtaatggtcacgtccc

SEQ ID NO: 3226758 - DNA, 25 bp, Homo sapien
taagctcttgcaccataaggcagtg

SEQ ID NO: 3226759 - DNA, 25 bp, Homo sapien
ccagcggcttcttgtttcctttctt

SEQ ID NO: 3226760 - DNA, 25 bp, Homo sapien
cctccagcggcttcttgtttccttt

SEQ ID NO: 3226761 - DNA, 25 bp, Homo sapien
caatctcctccagcggcttcttgtt

SEQ ID NO: 3226762 - DNA, 25 bp, Homo sapien
tcctccagcggcttcttgtttcctt

SEQ ID NO: 3226763 - DNA, 25 bp, Homo sapien
ccgaataactgaagagttgaatagt

SEQ ID NO: 3226764 - DNA, 25 bp, Homo sapien
ctgaagagttgaatagtgttttatc

SEQ ID NO: 3226765 - DNA, 25 bp, Homo sapien
ttgaatagtgttttatcccactcac

SEQ ID NO: 3226766 - DNA, 25 bp, Homo sapien
aaaccgaataactgaagagttgaat

SEQ ID NO: 3226767 - DNA, 25 bp, Homo sapien
ttcgactcgctgaagcaactgggtt

SEQ ID NO: 3226768 - DNA, 25 bp, Homo sapien
cgtatgacaatgactaagctccaag

SEQ ID NO: 3226769 - DNA, 25 bp, Homo sapien
taatcaggtcctgctacgtatgaca

SEQ ID NO: 3226770 - DNA, 25 bp, Homo sapien
tctagcaaggcttagaggcggcaca

SEQ ID NO: 3226771 - DNA, 25 bp, Homo sapien
tcctcccccgtcataaggcaaataa

SEQ ID NO: 3226772 - DNA, 25 bp, Homo sapien
gcaaataagggtcggaagaagcatc

SEQ ID NO: 3226773 - DNA, 25 bp, Homo sapien
aggcaaataagggtcggaagaagca

SEQ ID NO: 3226774 - DNA, 25 bp, Homo sapien
aataagggtcggaagaagcatccat

SEQ ID NO: 3226775 - DNA, 25 bp, Homo sapien
taaaatctacatggtaattggcagc

SEQ ID NO: 3226776 - DNA, 25 bp, Homo sapien
aaaatctacatggtaattggcagca

SEQ ID NO: 3226777 - DNA, 25 bp, Homo sapien
tggtgtaaaatctacatggtaattg

SEQ ID NO: 3226778 - DNA, 25 bp, Homo sapien
tgtaaaatctacatggtaattggca

SEQ ID NO: 3226779 - DNA, 25 bp, Homo sapien
cactcacatccttatgctttagcag

SEQ ID NO: 3226780 - DNA, 25 bp, Homo sapien
atagaaaattgcagaagtggtgagc

SEQ ID NO: 3226781 - DNA, 25 bp, Homo sapien
tgcctttggttgcagtccacttttt

SEQ ID NO: 3226782 - DNA, 25 bp, Homo sapien
agtttacgatagtaatgcatcccca

SEQ ID NO: 3226783 - DNA, 25 bp, Homo sapien
gcatctcatagttcaggtattacca

SEQ ID NO: 3226784 - DNA, 25 bp, Homo sapien
tatgcctggtatggacacagaaaca

SEQ ID NO: 3226785 - DNA, 25 bp, Homo sapien
aatcgatgaactaaaactggcttgc

SEQ ID NO: 3226786 - DNA, 25 bp, Homo sapien
tataaagatcaagcatacctatgga

SEQ ID NO: 3226787 - DNA, 25 bp, Homo sapien
gtatcaatcaagataccttctcctc

SEQ ID NO: 3226788 - DNA, 25 bp, Homo sapien
ggtgaaggtatcaatcaagatacct

SEQ ID NO: 3226789 - DNA, 25 bp, Homo sapien
tgcatgcagtcctggtgaaggtatc

SEQ ID NO: 3226790 - DNA, 25 bp, Homo sapien
gcatgcagtcctggtgaaggtatca

SEQ ID NO: 3226791 - DNA, 25 bp, Homo sapien
cccagccgcgaccccatctgagaag

SEQ ID NO: 3226792 - DNA, 25 bp, Homo sapien
tgcccagccgcgaccccatctgaga

SEQ ID NO: 3226793 - DNA, 25 bp, Homo sapien
gcccagccgcgaccccatctgagaa

SEQ ID NO: 3226794 - DNA, 25 bp, Homo sapien
aatgtgtagaactgttaatgctgcc

SEQ ID NO: 3226795 - DNA, 25 bp, Homo sapien
tgtagaactgttaatgctgcctcca

SEQ ID NO: 3226796 - DNA, 25 bp, Homo sapien
tagtatggaaatcatcatatgtacc

SEQ ID NO: 3226797 - DNA, 25 bp, Homo sapien
tgtaccaacacctggaattggttca

SEQ ID NO: 3226798 - DNA, 25 bp, Homo sapien
ccaactcctgtgctgtatttttccc

SEQ ID NO: 3226799 - DNA, 25 bp, Homo sapien
tctggaacttggcttgttcttcccc

SEQ ID NO: 3226800 - DNA, 25 bp, Homo sapien
ctccatatctggaacttggcttgtt

SEQ ID NO: 3226801 - DNA, 25 bp, Homo sapien
atatctggaacttggcttgttcttc

SEQ ID NO: 3226802 - DNA, 25 bp, Homo sapien
caataagctttatttgggagccaaa

SEQ ID NO: 3226803 - DNA, 25 bp, Homo sapien
tttttccataggtaagagctatgca

SEQ ID NO: 3226804 - DNA, 25 bp, Homo sapien
cagaatcaaatgctgggaaaggaga

SEQ ID NO: 3226805 - DNA, 25 bp, Homo sapien
gggctgctcaaagcccaaaatcatg

SEQ ID NO: 3226806 - DNA, 25 bp, Homo sapien
ctagccatcctgaccacgcatcata

SEQ ID NO: 3226807 - DNA, 25 bp, Homo sapien
ccatcctgaccacgcatcatacaaa

SEQ ID NO: 3226808 - DNA, 25 bp, Homo sapien
gttactactagccatcctgaccacg

SEQ ID NO: 3226809 - DNA, 25 bp, Homo sapien
gccatcctgaccacgcatcatacaa

SEQ ID NO: 3226810 - DNA, 25 bp, Homo sapien
ggttgtaccacaacgcactaaggca

SEQ ID NO: 3226811 - DNA, 25 bp, Homo sapien
aatgtctattaatccggccagtgcc

SEQ ID NO: 3226812 - DNA, 25 bp, Homo sapien
tcattagatccccaacagcactgtt

SEQ ID NO: 3226813 - DNA, 25 bp, Homo sapien
taggtcagtcatccaatcggcagca

SEQ ID NO: 3226814 - DNA, 25 bp, Homo sapien
agttcatgatataagaaccaggacc

SEQ ID NO: 3226815 - DNA, 25 bp, Homo sapien
gtagttcatgatataagaaccagga

SEQ ID NO: 3226816 - DNA, 25 bp, Homo sapien
tagttcatgatataagaaccaggac

SEQ ID NO: 3226817 - DNA, 25 bp, Homo sapien
tgtagttcatgatataagaaccagg

SEQ ID NO: 3226818 - DNA, 25 bp, Homo sapien
caagtaacctctgatgatgaatcca

SEQ ID NO: 3226819 - DNA, 25 bp, Homo sapien
gaaaagatatttccgcagcaacagg

SEQ ID NO: 3226820 - DNA, 25 bp, Homo sapien
cagcaacaggcaacatgtaccaggg

SEQ ID NO: 3226821 - DNA, 25 bp, Homo sapien
taaactcaaacctgatgccacagcc

SEQ ID NO: 3226822 - DNA, 25 bp, Homo sapien
tccaggctaaaaagaactcctccaa

SEQ ID NO: 3226823 - DNA, 25 bp, Homo sapien
aaaaagaactcctccaattggtgca

SEQ ID NO: 3226824 - DNA, 25 bp, Homo sapien
aggctaaaaagaactcctccaattg

SEQ ID NO: 3226825 - DNA, 25 bp, Homo sapien
ctcttccaggctaaaaagaactcct

SEQ ID NO: 3226826 - DNA, 25 bp, Homo sapien
ggtaccatggtgtatgatactccac

SEQ ID NO: 3226827 - DNA, 25 bp, Homo sapien
catggtgtatgatactccacataaa

SEQ ID NO: 3226828 - DNA, 25 bp, Homo sapien
aacagttcaaaaaggtaccatggtg

SEQ ID NO: 3226829 - DNA, 25 bp, Homo sapien
aaaaaggtaccatggtgtatgatac

SEQ ID NO: 3226830 - DNA, 25 bp, Homo sapien
gcgtcgacgacaccaggcaatattt

SEQ ID NO: 3226831 - DNA, 25 bp, Homo sapien
caacaataatgacttccagaacggg

SEQ ID NO: 3226832 - DNA, 25 bp, Homo sapien
caaatttcgtggacttgcgtcgacg

SEQ ID NO: 3226833 - DNA, 25 bp, Homo sapien
ccaatgcctgctggacgatcaggaa

SEQ ID NO: 3226834 - DNA, 25 bp, Homo sapien
gaagatctgtatggttcgcccctga

SEQ ID NO: 3226835 - DNA, 25 bp, Homo sapien
cacctgaaactagcgatcggcagct

SEQ ID NO: 3226836 - DNA, 25 bp, Homo sapien
gctggtaagcaacaaacacctcagg

SEQ ID NO: 3226837 - DNA, 25 bp, Homo sapien
gaaatgcatttcctatggctacagc

SEQ ID NO: 3226838 - DNA, 25 bp, Homo sapien
ggtgtaatgcaatcagccccgacct

SEQ ID NO: 3226839 - DNA, 25 bp, Homo sapien
tgatagtaggcaagctgctccaccg

SEQ ID NO: 3226840 - DNA, 25 bp, Homo sapien
tgcgatcgctccaatggccatgctg

SEQ ID NO: 3226841 - DNA, 25 bp, Homo sapien
ctccttaaagataaaccagtcgtgg

SEQ ID NO: 3226842 - DNA, 25 bp, Homo sapien
cctttgatttacattaacgatgcaa

SEQ ID NO: 3226843 - DNA, 25 bp, Homo sapien
ctttgatttacattaacgatgcaag

SEQ ID NO: 3226844 - DNA, 25 bp, Homo sapien
tttgatttacattaacgatgcaagt

SEQ ID NO: 3226845 - DNA, 25 bp, Homo sapien
acaattttgccattttggtttagtg

SEQ ID NO: 3226846 - DNA, 25 bp, Homo sapien
cgactaaaacaattttgccattttg

SEQ ID NO: 3226847 - DNA, 25 bp, Homo sapien
tcatattttaaaaaagcaaagctta

SEQ ID NO: 3226848 - DNA, 25 bp, Homo sapien
tgtcaggacagctaagggaggatca

SEQ ID NO: 3226849 - DNA, 25 bp, Homo sapien
gtctcataacgtcagcagccagggt

SEQ ID NO: 3226850 - DNA, 25 bp, Homo sapien
ttttgcatccaagaaagggtatcca

SEQ ID NO: 3226851 - DNA, 25 bp, Homo sapien
agggcaaatcccactaatctctgag

SEQ ID NO: 3226852 - DNA, 25 bp, Homo sapien
caatactgcgggactataaggtaaa

SEQ ID NO: 3226853 - DNA, 25 bp, Homo sapien
tatctaggcttatctgagtgggaaa

SEQ ID NO: 3226854 - DNA, 25 bp, Homo sapien
ggtacaatgccagatcaaaagacaa

SEQ ID NO: 3226855 - DNA, 25 bp, Homo sapien
tctgcataaaacacaacaggactga

SEQ ID NO: 3226856 - DNA, 25 bp, Homo sapien
gaaattcttttgactgggtctagcc

SEQ ID NO: 3226857 - DNA, 25 bp, Homo sapien
tcccaaactgaacagggtgttctct

SEQ ID NO: 3226858 - DNA, 25 bp, Homo sapien
aaactaaaatgcttgaacggagcca

SEQ ID NO: 3226859 - DNA, 25 bp, Homo sapien
aaagctgtagcctgttcccaaactg

SEQ ID NO: 3226860 - DNA, 25 bp, Homo sapien
tgtgcaaaacacacccgagaactgc

SEQ ID NO: 3226861 - DNA, 25 bp, Homo sapien
gggctcatgtcaagaatgcttcgaa

SEQ ID NO: 3226862 - DNA, 25 bp, Homo sapien
tctgtcactgtaaaagggctcatgt

SEQ ID NO: 3226863 - DNA, 25 bp, Homo sapien
gcttcaatggccgaggactttctgc

SEQ ID NO: 3226864 - DNA, 25 bp, Homo sapien
taaaacaggtttttgcagtgctcca

SEQ ID NO: 3226865 - DNA, 25 bp, Homo sapien
cagtgctccatgcaggttaggtcca

SEQ ID NO: 3226866 - DNA, 25 bp, Homo sapien
caagtgaactgattcctgtggtacc

SEQ ID NO: 3226867 - DNA, 25 bp, Homo sapien
tataccataggacagactttcccac

SEQ ID NO: 3226868 - DNA, 25 bp, Homo sapien
tacgctgttcaggattagccatcca

SEQ ID NO: 3226869 - DNA, 25 bp, Homo sapien
tatgcataatccaagaataccctct

SEQ ID NO: 3226870 - DNA, 25 bp, Homo sapien
tggtatttgccttcggataaaacaa

SEQ ID NO: 3226871 - DNA, 25 bp, Homo sapien
gccatccagtttatgcataatccaa

SEQ ID NO: 3226872 - DNA, 25 bp, Homo sapien
ggaaaatcaacgcaaaatgtggctc

SEQ ID NO: 3226873 - DNA, 25 bp, Homo sapien
caagaaacaccagttcccatgagtt

SEQ ID NO: 3226874 - DNA, 25 bp, Homo sapien
catattataagttctgaggagttcc

SEQ ID NO: 3226875 - DNA, 25 bp, Homo sapien
taagagttaacagggcataacccag

SEQ ID NO: 3226876 - DNA, 25 bp, Homo sapien
tctttgtgatgatccccaagacaat

SEQ ID NO: 3226877 - DNA, 25 bp, Homo sapien
caagggttcgacgtgctgctttagt

SEQ ID NO: 3226878 - DNA, 25 bp, Homo sapien
cttctttgtgatgatccccaagaca

SEQ ID NO: 3226879 - DNA, 25 bp, Homo sapien
tagttgctcgagatgctctaatatg

SEQ ID NO: 3226880 - DNA, 25 bp, Homo sapien
aatgaggagatctgatatatctaat

SEQ ID NO: 3226881 - DNA, 25 bp, Homo sapien
atgaggagatctgatatatctaatc

SEQ ID NO: 3226882 - DNA, 25 bp, Homo sapien
tgaggagatctgatatatctaatca

SEQ ID NO: 3226883 - DNA, 25 bp, Homo sapien
ggaaagacagaactcaacagttcac

SEQ ID NO: 3226884 - DNA, 25 bp, Homo sapien
tatcagatacaaatgtaattggcag

SEQ ID NO: 3226885 - DNA, 25 bp, Homo sapien
attttatcagatacaaatgtaattg

SEQ ID NO: 3226886 - DNA, 25 bp, Homo sapien
tttatcagatacaaatgtaattggc

SEQ ID NO: 3226887 - DNA, 25 bp, Homo sapien
atcagatacaaatgtaattggcagc

SEQ ID NO: 3226888 - DNA, 25 bp, Homo sapien
gagaccggtgtatccactgaggtag

SEQ ID NO: 3226889 - DNA, 25 bp, Homo sapien
ccataagactaccacaagatcggga

SEQ ID NO: 3226890 - DNA, 25 bp, Homo sapien
tgaaaccactaggacataaagccag

SEQ ID NO: 3226891 - DNA, 25 bp, Homo sapien
tacaggtatgacaattgcagggcaa

SEQ ID NO: 3226892 - DNA, 25 bp, Homo sapien
tagagcaaagcaagcagcctgattt

SEQ ID NO: 3226893 - DNA, 25 bp, Homo sapien
gatttccatcacatgaagagagcag

SEQ ID NO: 3226894 - DNA, 25 bp, Homo sapien
taatagtatgacagcctttccaccg

SEQ ID NO: 3226895 - DNA, 25 bp, Homo sapien
tttccaccgagagtctgaggactgc

SEQ ID NO: 3226896 - DNA, 25 bp, Homo sapien
tcagttgaacattattgaagcgggg

SEQ ID NO: 3226897 - DNA, 25 bp, Homo sapien
gtttgccgtctgggccatatgccgg

SEQ ID NO: 3226898 - DNA, 25 bp, Homo sapien
ccatatgccggaggatatctttttt

SEQ ID NO: 3226899 - DNA, 25 bp, Homo sapien
tattgaagcggggtcttggtttgcc

SEQ ID NO: 3226900 - DNA, 25 bp, Homo sapien
taaagagttgtgctattcaacaaat

SEQ ID NO: 3226901 - DNA, 25 bp, Homo sapien
gagttgtgctattcaacaaataaac

SEQ ID NO: 3226902 - DNA, 25 bp, Homo sapien
gttgtgctattcaacaaataaactt

SEQ ID NO: 3226903 - DNA, 25 bp, Homo sapien
tattcaacaaataaacttcctcttc

SEQ ID NO: 3226904 - DNA, 25 bp, Homo sapien
tctgttagacgggaaatacctcact

SEQ ID NO: 3226905 - DNA, 25 bp, Homo sapien
gaacaataggagttgatacgctgct

SEQ ID NO: 3226906 - DNA, 25 bp, Homo sapien
caaaccatgttgcaaaaacccggct

SEQ ID NO: 3226907 - DNA, 25 bp, Homo sapien
tcatctctgttgaggcgcaagcctg

SEQ ID NO: 3226908 - DNA, 25 bp, Homo sapien
tgttttcggttttgagccacacggc

SEQ ID NO: 3226909 - DNA, 25 bp, Homo sapien
gccacacggcacacaatgagagatt

SEQ ID NO: 3226910 - DNA, 25 bp, Homo sapien
ggttaatggcacaagaaacactccc

SEQ ID NO: 3226911 - DNA, 25 bp, Homo sapien
aaggatacaccgatttaaagaggct

SEQ ID NO: 3226912 - DNA, 25 bp, Homo sapien
atgctcaacagcacttgtatatcat

SEQ ID NO: 3226913 - DNA, 25 bp, Homo sapien
gcacttgtatatcatagtagtagtt

SEQ ID NO: 3226914 - DNA, 25 bp, Homo sapien
gctcaacagcacttgtatatcatag

SEQ ID NO: 3226915 - DNA, 25 bp, Homo sapien
caacagcacttgtatatcatagtag

SEQ ID NO: 3226916 - DNA, 25 bp, Homo sapien
tttagtgcaagttatgaattacatt

SEQ ID NO: 3226917 - DNA, 25 bp, Homo sapien
agaatgactgatctaatttcaattt

SEQ ID NO: 3226918 - DNA, 25 bp, Homo sapien
aaaagaatgactgatctaatttcaa

SEQ ID NO: 3226919 - DNA, 25 bp, Homo sapien
gcaattaataccagatacagctaat

SEQ ID NO: 3226920 - DNA, 25 bp, Homo sapien
tacgaagctatctgcaaagaaaccg

SEQ ID NO: 3226921 - DNA, 25 bp, Homo sapien
gggtattcaaacaaggcgctacact

SEQ ID NO: 3226922 - DNA, 25 bp, Homo sapien
tcaaatatggacgtaacctagcccg

SEQ ID NO: 3226923 - DNA, 25 bp, Homo sapien
caattaagttatccagcagccatgc

SEQ ID NO: 3226924 - DNA, 25 bp, Homo sapien
ggtggtatgaacatcctgctgtcaa

SEQ ID NO: 3226925 - DNA, 25 bp, Homo sapien
tatcggcctacactgcgtagggcag

SEQ ID NO: 3226926 - DNA, 25 bp, Homo sapien
gctttgtaacctgagagaagcatta

SEQ ID NO: 3226927 - DNA, 25 bp, Homo sapien
gctccttgcttgcaaagtgtagaaa

SEQ ID NO: 3226928 - DNA, 25 bp, Homo sapien
tcctgtgcccaaatgaattcccaga

SEQ ID NO: 3226929 - DNA, 25 bp, Homo sapien
tcttaaccaccatataaactactct

SEQ ID NO: 3226930 - DNA, 25 bp, Homo sapien
ttttcctgtgcccaaatgaattccc

SEQ ID NO: 3226931 - DNA, 25 bp, Homo sapien
tgtggtttccattatcttacaaaaa

SEQ ID NO: 3226932 - DNA, 25 bp, Homo sapien
tacgctgacagaagacgctccttgc

SEQ ID NO: 3226933 - DNA, 25 bp, Homo sapien
agggccgctgtttcgcgctctgcag

SEQ ID NO: 3226934 - DNA, 25 bp, Homo sapien
cccgggcggcgctgaaattcggctt

SEQ ID NO: 3226935 - DNA, 25 bp, Homo sapien
ttggaccaggaaagtagctcctctg

SEQ ID NO: 3226936 - DNA, 25 bp, Homo sapien
gcagacagcatctgaaactattgat

SEQ ID NO: 3226937 - DNA, 25 bp, Homo sapien
tattttgcagacagcatctgaaact

SEQ ID NO: 3226938 - DNA, 25 bp, Homo sapien
ttgcagacagcatctgaaactattg

SEQ ID NO: 3226939 - DNA, 25 bp, Homo sapien
ctctttattttgcagacagcatctg

SEQ ID NO: 3226940 - DNA, 25 bp, Homo sapien
cttgaaagtgccatactcctacatg

SEQ ID NO: 3226941 - DNA, 25 bp, Homo sapien
aagtgccatactcctacatgtaggc

SEQ ID NO: 3226942 - DNA, 25 bp, Homo sapien
gccatactcctacatgtaggccttg

SEQ ID NO: 3226943 - DNA, 25 bp, Homo sapien
tactcctacatgtaggccttgacat

SEQ ID NO: 3226944 - DNA, 25 bp, Homo sapien
caatggtaggcggagctttcccaag

SEQ ID NO: 3226945 - DNA, 25 bp, Homo sapien
aaggtgcccaaccaaggagaacgcg

SEQ ID NO: 3226946 - DNA, 25 bp, Homo sapien
tgatcgtgaccgcaggaatgcagcc

SEQ ID NO: 3226947 - DNA, 25 bp, Homo sapien
gagaaagcaaagacccctgatcgtg

SEQ ID NO: 3226948 - DNA, 25 bp, Homo sapien
ggataatcattgatcatgaccagtg

SEQ ID NO: 3226949 - DNA, 25 bp, Homo sapien
tgaggataatcattgatcatgacca

SEQ ID NO: 3226950 - DNA, 25 bp, Homo sapien
gaggataatcattgatcatgaccag

SEQ ID NO: 3226951 - DNA, 25 bp, Homo sapien
gataatcattgatcatgaccagtga

SEQ ID NO: 3226952 - DNA, 25 bp, Homo sapien
aaagatcaatatagataaactgata

SEQ ID NO: 3226953 - DNA, 25 bp, Homo sapien
caaaagatcaatatagataaactga

SEQ ID NO: 3226954 - DNA, 25 bp, Homo sapien
aagatcaatatagataaactgatac

SEQ ID NO: 3226955 - DNA, 25 bp, Homo sapien
aaaagatcaatatagataaactgat

SEQ ID NO: 3226956 - DNA, 25 bp, Homo sapien
ttcctgtagcgtaagagaattatgc

SEQ ID NO: 3226957 - DNA, 25 bp, Homo sapien
ttatgcttatttccgcactaccacc

SEQ ID NO: 3226958 - DNA, 25 bp, Homo sapien
aagagaattatgcttatttccgcac

SEQ ID NO: 3226959 - DNA, 25 bp, Homo sapien
gcaaacaggaaagactcacaggatg

SEQ ID NO: 3226960 - DNA, 25 bp, Homo sapien
ccagacagtgggaaacttttgaaga

SEQ ID NO: 3226961 - DNA, 25 bp, Homo sapien
actggcccagacagtgggaaacttt

SEQ ID NO: 3226962 - DNA, 25 bp, Homo sapien
tagcagtagggagtgtggcaacaca

SEQ ID NO: 3226963 - DNA, 25 bp, Homo sapien
ttgaagaagctcatagcagtaggga

SEQ ID NO: 3226964 - DNA, 25 bp, Homo sapien
ccagtgagaatcttaatccagagcc

SEQ ID NO: 3226965 - DNA, 25 bp, Homo sapien
gagccatctaaccaagacaggtggc

SEQ ID NO: 3226966 - DNA, 25 bp, Homo sapien
gggtaccagtgctgaggcccttccc

SEQ ID NO: 3226967 - DNA, 25 bp, Homo sapien
tctcagcaatataaagggtaccagt

SEQ ID NO: 3226968 - DNA, 25 bp, Homo sapien
ctctcctagatagtcactttggtcc

SEQ ID NO: 3226969 - DNA, 25 bp, Homo sapien
acatacaaatgctctcctagatagt

SEQ ID NO: 3226970 - DNA, 25 bp, Homo sapien
atgctctcctagatagtcactttgg

SEQ ID NO: 3226971 - DNA, 25 bp, Homo sapien
aacatacaaatgctctcctagatag

SEQ ID NO: 3226972 - DNA, 25 bp, Homo sapien
tcttcgtcagcaacaaattcttttg

SEQ ID NO: 3226973 - DNA, 25 bp, Homo sapien
gatactggcagcttacagactgaga

SEQ ID NO: 3226974 - DNA, 25 bp, Homo sapien
ggccctctgccgttagatgagataa

SEQ ID NO: 3226975 - DNA, 25 bp, Homo sapien
catgtccttgttcttgcgcttccac

SEQ ID NO: 3226976 - DNA, 25 bp, Homo sapien
gttttgcaccaagtacaggatcacc

SEQ ID NO: 3226977 - DNA, 25 bp, Homo sapien
gtaaaaatctaatgcgttttgcacc

SEQ ID NO: 3226978 - DNA, 25 bp, Homo sapien
tgcaccaagtacaggatcaccagag

SEQ ID NO: 3226979 - DNA, 25 bp, Homo sapien
taatgcgttttgcaccaagtacagg

SEQ ID NO: 3226980 - DNA, 25 bp, Homo sapien
ttcaaatattcaggttgggtccagg

SEQ ID NO: 3226981 - DNA, 25 bp, Homo sapien
ctatttaagtacagggacacatggc

SEQ ID NO: 3226982 - DNA, 25 bp, Homo sapien
tctgttgtaaccaagaggacagctg

SEQ ID NO: 3226983 - DNA, 25 bp, Homo sapien
gacagctgcacattgcaaagggcca

SEQ ID NO: 3226984 - DNA, 25 bp, Homo sapien
cgttagaatttcttcgtgagtcttt

SEQ ID NO: 3226985 - DNA, 25 bp, Homo sapien
gggcttagccctgcttatgcaatgg

SEQ ID NO: 3226986 - DNA, 25 bp, Homo sapien
gagctagacgtgttggattccaatc

SEQ ID NO: 3226987 - DNA, 25 bp, Homo sapien
ggcatactattgaacccctctgtgt

SEQ ID NO: 3226988 - DNA, 25 bp, Homo sapien
taaccaaaggtgactagcagaatgg

SEQ ID NO: 3226989 - DNA, 25 bp, Homo sapien
aaactaaaccgtggtgatgattgca

SEQ ID NO: 3226990 - DNA, 25 bp, Homo sapien
gactgctggtaggtactaggctttg

SEQ ID NO: 3226991 - DNA, 25 bp, Homo sapien
gcatagccctatgcatatttagtga

SEQ ID NO: 3226992 - DNA, 25 bp, Homo sapien
agctaatgacaaaagaccaccgatt

SEQ ID NO: 3226993 - DNA, 25 bp, Homo sapien
gataaatgctactgttctctctttc

SEQ ID NO: 3226994 - DNA, 25 bp, Homo sapien
tcatgttccgatcctgtgagtaaag

SEQ ID NO: 3226995 - DNA, 25 bp, Homo sapien
catcgcagatagtagtcatgtgcac

SEQ ID NO: 3226996 - DNA, 25 bp, Homo sapien
gtaaaggagatgctgataaatgcta

SEQ ID NO: 3226997 - DNA, 25 bp, Homo sapien
agatgtactgcctaactgttctctc

SEQ ID NO: 3226998 - DNA, 25 bp, Homo sapien
gcatccaggtatacacacagctgca

SEQ ID NO: 3226999 - DNA, 25 bp, Homo sapien
caggaggaagagatgtactgcctaa

SEQ ID NO: 3227000 - DNA, 25 bp, Homo sapien
tctccctgacacattctctaaggca

SEQ ID NO: 3227001 - DNA, 25 bp, Homo sapien
tcctactccatcctgtaacatggtt

SEQ ID NO: 3227002 - DNA, 25 bp, Homo sapien
catcctgtaacatggttatcaggtg

SEQ ID NO: 3227003 - DNA, 25 bp, Homo sapien
gctgcctggagagcaaacatatttt

SEQ ID NO: 3227004 - DNA, 25 bp, Homo sapien
acatattttcactccatcctactcc

SEQ ID NO: 3227005 - DNA, 25 bp, Homo sapien
cagcgttttatgtcctgtgatgcac

SEQ ID NO: 3227006 - DNA, 25 bp, Homo sapien
tgtgatgcacaatgcttaaaagcct

SEQ ID NO: 3227007 - DNA, 25 bp, Homo sapien
cataaacattctgtagccccagcgt

SEQ ID NO: 3227008 - DNA, 25 bp, Homo sapien
tgtgacaggcagtatgaaccataaa

SEQ ID NO: 3227009 - DNA, 25 bp, Homo sapien
ctgcatccacgcctttgtcttgcct

SEQ ID NO: 3227010 - DNA, 25 bp, Homo sapien
aggaataacctccatacacaagcca

SEQ ID NO: 3227011 - DNA, 25 bp, Homo sapien
gcatccacgcctttgtcttgcctct

SEQ ID NO: 3227012 - DNA, 25 bp, Homo sapien
ataacctccatacacaagccatgct

SEQ ID NO: 3227013 - DNA, 25 bp, Homo sapien
catcccctagattaaatgttcccca

SEQ ID NO: 3227014 - DNA, 25 bp, Homo sapien
tttcaagaacagtaatcctggtctc

SEQ ID NO: 3227015 - DNA, 25 bp, Homo sapien
tttcttgacagctccaaggcatatg

SEQ ID NO: 3227016 - DNA, 25 bp, Homo sapien
tttcatttccgtaacatcctctggg

SEQ ID NO: 3227017 - DNA, 25 bp, Homo sapien
tttctataaaacctttgctcgccat

SEQ ID NO: 3227018 - DNA, 25 bp, Homo sapien
tatttctataaaacctttgctcgcc

SEQ ID NO: 3227019 - DNA, 25 bp, Homo sapien
atttctataaaacctttgctcgcca

SEQ ID NO: 3227020 - DNA, 25 bp, Homo sapien
tacggatcaaagtcaagctccccat

SEQ ID NO: 3227021 - DNA, 25 bp, Homo sapien
gacgccctaaatggctctcaattgt

SEQ ID NO: 3227022 - DNA, 25 bp, Homo sapien
ggctctcaattgtcatacggatcaa

SEQ ID NO: 3227023 - DNA, 25 bp, Homo sapien
atttcagacgccctaaatggctctc

SEQ ID NO: 3227024 - DNA, 25 bp, Homo sapien
tcttgcaagggagtcatccaaggcc

SEQ ID NO: 3227025 - DNA, 25 bp, Homo sapien
cttgcaagggagtcatccaaggccc

SEQ ID NO: 3227026 - DNA, 25 bp, Homo sapien
ttgcaagggagtcatccaaggccca

SEQ ID NO: 3227027 - DNA, 25 bp, Homo sapien
tgtatctgttcacaaatctgctgcc

SEQ ID NO: 3227028 - DNA, 25 bp, Homo sapien
gggctgcagttagcatattgtatct

SEQ ID NO: 3227029 - DNA, 25 bp, Homo sapien
tctgttcacaaatctgctgcccttc

SEQ ID NO: 3227030 - DNA, 25 bp, Homo sapien
attcattctggatcacctctctgga

SEQ ID NO: 3227031 - DNA, 25 bp, Homo sapien
ctgactccttcttattgtccggatt

SEQ ID NO: 3227032 - DNA, 25 bp, Homo sapien
tattgtccggattgctggacctcat

SEQ ID NO: 3227033 - DNA, 25 bp, Homo sapien
ccttcttattgtccggattgctgga

SEQ ID NO: 3227034 - DNA, 25 bp, Homo sapien
tcttattgtccggattgctggacct

SEQ ID NO: 3227035 - DNA, 25 bp, Homo sapien
tacacaggcaattgctgatatcctc

SEQ ID NO: 3227036 - DNA, 25 bp, Homo sapien
gttagccagatactcacagataggc

SEQ ID NO: 3227037 - DNA, 25 bp, Homo sapien
cattcttggtcaccatatgcacccc

SEQ ID NO: 3227038 - DNA, 25 bp, Homo sapien
gataggccagtgcttaaatttacac

SEQ ID NO: 3227039 - DNA, 25 bp, Homo sapien
ggatgttcaggagcaccgttcacac

SEQ ID NO: 3227040 - DNA, 25 bp, Homo sapien
gttcacaccgctcatggaaagaagg

SEQ ID NO: 3227041 - DNA, 25 bp, Homo sapien
gagcaccgttcacaccgctcatgga

SEQ ID NO: 3227042 - DNA, 25 bp, Homo sapien
catggaaagaaggacttctgtagct

SEQ ID NO: 3227043 - DNA, 25 bp, Homo sapien
caggccgcaaacagggcagcactgg

SEQ ID NO: 3227044 - DNA, 25 bp, Homo sapien
agggcagcactggtgaatctcattg

SEQ ID NO: 3227045 - DNA, 25 bp, Homo sapien
tcaggccgcaaacagggcagcactg

SEQ ID NO: 3227046 - DNA, 25 bp, Homo sapien
aacagggcagcactggtgaatctca

SEQ ID NO: 3227047 - DNA, 25 bp, Homo sapien
tggctaagacaggacttaatatgaa

SEQ ID NO: 3227048 - DNA, 25 bp, Homo sapien
ctcccttggctaagacaggacttaa

SEQ ID NO: 3227049 - DNA, 25 bp, Homo sapien
cccctgtgatattggtggtcttatc

SEQ ID NO: 3227050 - DNA, 25 bp, Homo sapien
ggtcttatccttacattcttctccc

SEQ ID NO: 3227051 - DNA, 25 bp, Homo sapien
gatgacatataaccaggtccacttt

SEQ ID NO: 3227052 - DNA, 25 bp, Homo sapien
tattggcttccaaacaggcttgcag

SEQ ID NO: 3227053 - DNA, 25 bp, Homo sapien
ggtccacttttatgaactgcatagc

SEQ ID NO: 3227054 - DNA, 25 bp, Homo sapien
cagggaccatatgctgttggatgac

SEQ ID NO: 3227055 - DNA, 25 bp, Homo sapien
ggaggtacctcattgacacgtcccg

SEQ ID NO: 3227056 - DNA, 25 bp, Homo sapien
tcagaaggcacagtcatgtgacagc

SEQ ID NO: 3227057 - DNA, 25 bp, Homo sapien
ctgtgttgccttattccgtagtcca

SEQ ID NO: 3227058 - DNA, 25 bp, Homo sapien
ttactcagggacaccagaaactgct

SEQ ID NO: 3227059 - DNA, 25 bp, Homo sapien
gatgcctgtcttgttagtgttctcc

SEQ ID NO: 3227060 - DNA, 25 bp, Homo sapien
tatgagaaactacaagcatagcctg

SEQ ID NO: 3227061 - DNA, 25 bp, Homo sapien
tgttggtattaccatcagatgcctg

SEQ ID NO: 3227062 - DNA, 25 bp, Homo sapien
actgttccaaaaagtggtacggatg

SEQ ID NO: 3227063 - DNA, 25 bp, Homo sapien
cgaaagagacgttttggtatccttg

SEQ ID NO: 3227064 - DNA, 25 bp, Homo sapien
acaggaaattgctggcagagagagc

SEQ ID NO: 3227065 - DNA, 25 bp, Homo sapien
ccagaggaatctagtaatggactga

SEQ ID NO: 3227066 - DNA, 25 bp, Homo sapien
cagctcatgctataggtaataaccc

SEQ ID NO: 3227067 - DNA, 25 bp, Homo sapien
tttttcactaatggaagggcaggct

SEQ ID NO: 3227068 - DNA, 25 bp, Homo sapien
ggaatacagacgtacacaaccttgg

SEQ ID NO: 3227069 - DNA, 25 bp, Homo sapien
cagaacgaattaatatactggcctt

SEQ ID NO: 3227070 - DNA, 25 bp, Homo sapien
tggaggctacgggaccttagttctc

SEQ ID NO: 3227071 - DNA, 25 bp, Homo sapien
tgatagaagattcggttggcaaacc

SEQ ID NO: 3227072 - DNA, 25 bp, Homo sapien
tgtgcccgtaatcattgccagaact

SEQ ID NO: 3227073 - DNA, 25 bp, Homo sapien
ccaccgctaagagtgtgactaacag

SEQ ID NO: 3227074 - DNA, 25 bp, Homo sapien
taaatggcactaacgtggtcttggg

SEQ ID NO: 3227075 - DNA, 25 bp, Homo sapien
ctttagattcccatatgcgtctgtt

SEQ ID NO: 3227076 - DNA, 25 bp, Homo sapien
ttagattcccatatgcgtctgtttg

SEQ ID NO: 3227077 - DNA, 25 bp, Homo sapien
actttagattcccatatgcgtctgt

SEQ ID NO: 3227078 - DNA, 25 bp, Homo sapien
tagattcccatatgcgtctgtttgt

SEQ ID NO: 3227079 - DNA, 25 bp, Homo sapien
gcacccagcgcaggtcatttctcag

SEQ ID NO: 3227080 - DNA, 25 bp, Homo sapien
cgcaggtcatttctcaggtaatgca

SEQ ID NO: 3227081 - DNA, 25 bp, Homo sapien
ggaaggcctcaacccctggcagtgc

SEQ ID NO: 3227082 - DNA, 25 bp, Homo sapien
cccctggcagtgcacccagcgcagg

SEQ ID NO: 3227083 - DNA, 25 bp, Homo sapien
cagtggatctttgacaccctgtgat

SEQ ID NO: 3227084 - DNA, 25 bp, Homo sapien
gtaactgtcgatatatgttcctgtg

SEQ ID NO: 3227085 - DNA, 25 bp, Homo sapien
attctgacaagaggggagagtcctg

SEQ ID NO: 3227086 - DNA, 25 bp, Homo sapien
ttccatctcttgtctggtgccccag

SEQ ID NO: 3227087 - DNA, 25 bp, Homo sapien
ctcgatgtgtttctgttagaagtta

SEQ ID NO: 3227088 - DNA, 25 bp, Homo sapien
ggctgttgctaagaacactcgatgt

SEQ ID NO: 3227089 - DNA, 25 bp, Homo sapien
cagttgggtactattaatactatcc

SEQ ID NO: 3227090 - DNA, 25 bp, Homo sapien
cacactggctgttgctaagaacact

SEQ ID NO: 3227091 - DNA, 25 bp, Homo sapien
gagagatcaactgactcccaggcgt

SEQ ID NO: 3227092 - DNA, 25 bp, Homo sapien
cctaagagatgggtctgaagctcgg

SEQ ID NO: 3227093 - DNA, 25 bp, Homo sapien
gtcttactcctggttgtcatgatca

SEQ ID NO: 3227094 - DNA, 25 bp, Homo sapien
tactatgatagatttggaaaggacc

SEQ ID NO: 3227095 - DNA, 25 bp, Homo sapien
gaacagctcggatttacacaaccag

SEQ ID NO: 3227096 - DNA, 25 bp, Homo sapien
gggccttggtcagaccccctgtgga

SEQ ID NO: 3227097 - DNA, 25 bp, Homo sapien
gatttacacaaccagcagttcttgg

SEQ ID NO: 3227098 - DNA, 25 bp, Homo sapien
caaggcccaaagacacgggccttgg

SEQ ID NO: 3227099 - DNA, 25 bp, Homo sapien
ggttgttagttcttgtgcctaagta

SEQ ID NO: 3227100 - DNA, 25 bp, Homo sapien
cctctcctcctttcactgggttgtt

SEQ ID NO: 3227101 - DNA, 25 bp, Homo sapien
taagtagtggatcaaatgttccaaa

SEQ ID NO: 3227102 - DNA, 25 bp, Homo sapien
aagttatggccgcctctcctccttt

SEQ ID NO: 3227103 - DNA, 25 bp, Homo sapien
gagtaaccagtgagcgttcttgctt

SEQ ID NO: 3227104 - DNA, 25 bp, Homo sapien
ggatggctgtggatagcataaactc

SEQ ID NO: 3227105 - DNA, 25 bp, Homo sapien
gatggctgtggatagcataaactct

SEQ ID NO: 3227106 - DNA, 25 bp, Homo sapien
ccagtgagcgttcttgcttctcagc

SEQ ID NO: 3227107 - DNA, 25 bp, Homo sapien
gtggcagtaatgaccaccctgagga

SEQ ID NO: 3227108 - DNA, 25 bp, Homo sapien
caagggctctatatttgtggcagta

SEQ ID NO: 3227109 - DNA, 25 bp, Homo sapien
tgaaattagcaagggctctatattt

SEQ ID NO: 3227110 - DNA, 25 bp, Homo sapien
tatatttgtggcagtaatgaccacc

SEQ ID NO: 3227111 - DNA, 25 bp, Homo sapien
ctagtaatgacatggtatgtggatt

SEQ ID NO: 3227112 - DNA, 25 bp, Homo sapien
catggtatgtggattggaggcaggc

SEQ ID NO: 3227113 - DNA, 25 bp, Homo sapien
taatgacatggtatgtggattggag

SEQ ID NO: 3227114 - DNA, 25 bp, Homo sapien
gacatggtatgtggattggaggcag

SEQ ID NO: 3227115 - DNA, 25 bp, Homo sapien
gtttcacactgttgacacaacgaag

SEQ ID NO: 3227116 - DNA, 25 bp, Homo sapien
gcgtaggacttgagtttcacactgt

SEQ ID NO: 3227117 - DNA, 25 bp, Homo sapien
ttgacacaacgaagacatggaatat

SEQ ID NO: 3227118 - DNA, 25 bp, Homo sapien
ctaggtcctgcgtaggacttgagtt

SEQ ID NO: 3227119 - DNA, 25 bp, Homo sapien
gctcagtgtcatgtgaaggagtttg

SEQ ID NO: 3227120 - DNA, 25 bp, Homo sapien
gagctcagtgtcatgtgaaggagtt

SEQ ID NO: 3227121 - DNA, 25 bp, Homo sapien
tgagctcagtgtcatgtgaaggagt

SEQ ID NO: 3227122 - DNA, 25 bp, Homo sapien
tcagtgtcatgtgaaggagtttgga

SEQ ID NO: 3227123 - DNA, 25 bp, Homo sapien
gcgaggagcgcggaatccactgcca

SEQ ID NO: 3227124 - DNA, 25 bp, Homo sapien
cgtaaccttccgagggcgaggagcg

SEQ ID NO: 3227125 - DNA, 25 bp, Homo sapien
catcctgggctcgaaccgtaacctt

SEQ ID NO: 3227126 - DNA, 25 bp, Homo sapien
ggtcgcaggatgcttcgagatccgt

SEQ ID NO: 3227127 - DNA, 25 bp, Homo sapien
tgtccttgaacacgcgtgcgatgcg

SEQ ID NO: 3227128 - DNA, 25 bp, Homo sapien
ggttcccatttagcgccccaggatg

SEQ ID NO: 3227129 - DNA, 25 bp, Homo sapien
tgcgacgcccacagaagttgcggtg

SEQ ID NO: 3227130 - DNA, 25 bp, Homo sapien
gaaggcctgagaagctttcggaagc

SEQ ID NO: 3227131 - DNA, 25 bp, Homo sapien
ttttcgcagcaacccaccgggaaga

SEQ ID NO: 3227132 - DNA, 25 bp, Homo sapien
ttggcacagcaatgcctgacccggc

SEQ ID NO: 3227133 - DNA, 25 bp, Homo sapien
ccgggagcgtcaatgtggaaagtcc

SEQ ID NO: 3227134 - DNA, 25 bp, Homo sapien
gactgagagttgctaaagctcctct

SEQ ID NO: 3227135 - DNA, 25 bp, Homo sapien
aaaatgtgttgctattcaagatgcc

SEQ ID NO: 3227136 - DNA, 25 bp, Homo sapien
cgcgctgtggtgcaattgtaaagaa

SEQ ID NO: 3227137 - DNA, 25 bp, Homo sapien
ggctttgactcactcatacgacaga

SEQ ID NO: 3227138 - DNA, 25 bp, Homo sapien
ttggcatgggcgacctgcccacgtg

SEQ ID NO: 3227139 - DNA, 25 bp, Homo sapien
gatgaatgaatctagggtaacgccc

SEQ ID NO: 3227140 - DNA, 25 bp, Homo sapien
gagacacagcccttgcgatcaggtt

SEQ ID NO: 3227141 - DNA, 25 bp, Homo sapien
tgggaagatcagaggacatcctgcc

SEQ ID NO: 3227142 - DNA, 25 bp, Homo sapien
gtgactgagaagatacgggtacccg

SEQ ID NO: 3227143 - DNA, 25 bp, Homo sapien
ctgaaagatgatccagaatgcccct

SEQ ID NO: 3227144 - DNA, 25 bp, Homo sapien
aaacctatgactctccatcttcagg

SEQ ID NO: 3227145 - DNA, 25 bp, Homo sapien
ctcatgtaccctgtgcggcggaact

SEQ ID NO: 3227146 - DNA, 25 bp, Homo sapien
gaactgggcttttagcttggactgc

SEQ ID NO: 3227147 - DNA, 25 bp, Homo sapien
ggtcttacaaacttcacgtgcctga

SEQ ID NO: 3227148 - DNA, 25 bp, Homo sapien
tagatacctctgctggatgggtctc

SEQ ID NO: 3227149 - DNA, 25 bp, Homo sapien
gatgggtctctcttggcagtcctga

SEQ ID NO: 3227150 - DNA, 25 bp, Homo sapien
caatagagttgatagatacctctgc

SEQ ID NO: 3227151 - DNA, 25 bp, Homo sapien
caagtttcctgcatcacagttagca

SEQ ID NO: 3227152 - DNA, 25 bp, Homo sapien
agacagactttgcaatcccagggac

SEQ ID NO: 3227153 - DNA, 25 bp, Homo sapien
tgcatcacagttagcaccacagaat

SEQ ID NO: 3227154 - DNA, 25 bp, Homo sapien
gcaatcccagggactccaagtttcc

SEQ ID NO: 3227155 - DNA, 25 bp, Homo sapien
atataatgtgtactttttctacttt

SEQ ID NO: 3227156 - DNA, 25 bp, Homo sapien
ggaaaatttaatgagagcttattgc

SEQ ID NO: 3227157 - DNA, 25 bp, Homo sapien
aatttaatgagagcttattgcaaaa

SEQ ID NO: 3227158 - DNA, 25 bp, Homo sapien
aaaatttaatgagagcttattgcaa

SEQ ID NO: 3227159 - DNA, 25 bp, Homo sapien
tttgccctcaaatactgctccctgc

SEQ ID NO: 3227160 - DNA, 25 bp, Homo sapien
cttttctagttagattaaacatttg

SEQ ID NO: 3227161 - DNA, 25 bp, Homo sapien
gctttttgcctgatgtaatttatct

SEQ ID NO: 3227162 - DNA, 25 bp, Homo sapien
tatctttctttaggaagctgtcctt

SEQ ID NO: 3227163 - DNA, 25 bp, Homo sapien
tcttacagtattttggctgtgcact

SEQ ID NO: 3227164 - DNA, 25 bp, Homo sapien
cattggaggcatcaagtaagctgaa

SEQ ID NO: 3227165 - DNA, 25 bp, Homo sapien
tatagttccttgaaaagcttgttct

SEQ ID NO: 3227166 - DNA, 25 bp, Homo sapien
aatctacttaggtttcattggaggc

SEQ ID NO: 3227167 - DNA, 25 bp, Homo sapien
caaattcttatagcctggactctgg

SEQ ID NO: 3227168 - DNA, 25 bp, Homo sapien
taactggtgagtggaacgtatattc

SEQ ID NO: 3227169 - DNA, 25 bp, Homo sapien
ttgcttctgcaatcaatgtactgag

SEQ ID NO: 3227170 - DNA, 25 bp, Homo sapien
tttctatagtaaccagaaggatgca

SEQ ID NO: 3227171 - DNA, 25 bp, Homo sapien
acatattgagcagaggaccaaaatc

SEQ ID NO: 3227172 - DNA, 25 bp, Homo sapien
cttggctggtggcttaccaaatcca

SEQ ID NO: 3227173 - DNA, 25 bp, Homo sapien
tccttttaagactgccgtaatcact

SEQ ID NO: 3227174 - DNA, 25 bp, Homo sapien
gcagaggaccaaaatcgatgatctc

SEQ ID NO: 3227175 - DNA, 25 bp, Homo sapien
ccaggctctgcgtgcagaaatgaaa

SEQ ID NO: 3227176 - DNA, 25 bp, Homo sapien
caggctctgcgtgcagaaatgaaat

SEQ ID NO: 3227177 - DNA, 25 bp, Homo sapien
gtacccctgtgcacgctcgcggtga

SEQ ID NO: 3227178 - DNA, 25 bp, Homo sapien
acgctcgcggtgagccaggctctgc

SEQ ID NO: 3227179 - DNA, 25 bp, Homo sapien
gttccctagcaagccaccgcttggt

SEQ ID NO: 3227180 - DNA, 25 bp, Homo sapien
cagcctctaaggagggttccctagc

SEQ ID NO: 3227181 - DNA, 25 bp, Homo sapien
gggtggggcattcctcgcacagcct

SEQ ID NO: 3227182 - DNA, 25 bp, Homo sapien
caagccaccgcttggttgcatccat

SEQ ID NO: 3227183 - DNA, 25 bp, Homo sapien
catccggaccatgagtgagaaacgg

SEQ ID NO: 3227184 - DNA, 25 bp, Homo sapien
tcacggcagcgagcgcagccagaaa

SEQ ID NO: 3227185 - DNA, 25 bp, Homo sapien
ggttcatcacggcagcgagcgcagc

SEQ ID NO: 3227186 - DNA, 25 bp, Homo sapien
ttctcccatccggaccatgagtgag

SEQ ID NO: 3227187 - DNA, 25 bp, Homo sapien
caggcaggacttgacgaggctcttt

SEQ ID NO: 3227188 - DNA, 25 bp, Homo sapien
ttgccagagtgaggagttagcaggc

SEQ ID NO: 3227189 - DNA, 25 bp, Homo sapien
agaagcttgatgcttggctgtcaga

SEQ ID NO: 3227190 - DNA, 25 bp, Homo sapien
ggtttttctagtcctcaaccactga

SEQ ID NO: 3227191 - DNA, 25 bp, Homo sapien
ttaggaccgggagaccgaacgcagc

SEQ ID NO: 3227192 - DNA, 25 bp, Homo sapien
ttcggcggcgttctccgggcaccgc

SEQ ID NO: 3227193 - DNA, 25 bp, Homo sapien
cgcgcgggaagccagacgcagcggg

SEQ ID NO: 3227194 - DNA, 25 bp, Homo sapien
agaccgaacgcagcgtccagccggg

SEQ ID NO: 3227195 - DNA, 25 bp, Homo sapien
gtggactttgccgggctcgccacac

SEQ ID NO: 3227196 - DNA, 25 bp, Homo sapien
atttagcatagccatggtctgagcg

SEQ ID NO: 3227197 - DNA, 25 bp, Homo sapien
tctgagcgggcaaaatgcacagtcc

SEQ ID NO: 3227198 - DNA, 25 bp, Homo sapien
gccgccagatggttcccgaggatta

SEQ ID NO: 3227199 - DNA, 25 bp, Homo sapien
ggattaggatcacgggcacttccgg

SEQ ID NO: 3227200 - DNA, 25 bp, Homo sapien
tcctgtcaacatgcctgcgagaaaa

SEQ ID NO: 3227201 - DNA, 25 bp, Homo sapien
ttgaagtctctgaacgcagaagcat

SEQ ID NO: 3227202 - DNA, 25 bp, Homo sapien
ggtttactagatactgtgcctggaa

SEQ ID NO: 3227203 - DNA, 25 bp, Homo sapien
cagacactcgcggtgtgttaacagt

SEQ ID NO: 3227204 - DNA, 25 bp, Homo sapien
catgatggaaatttgggccccagtt

SEQ ID NO: 3227205 - DNA, 25 bp, Homo sapien
atgccaagaagaaaccaggtccagg

SEQ ID NO: 3227206 - DNA, 25 bp, Homo sapien
caggtgatcctgtagcactgggcca

SEQ ID NO: 3227207 - DNA, 25 bp, Homo sapien
tgcaggcagtgaagatgcgcaagct

SEQ ID NO: 3227208 - DNA, 25 bp, Homo sapien
caaggtggacagtgctgaccatggc

SEQ ID NO: 3227209 - DNA, 25 bp, Homo sapien
acatcataggtaagatccagcctgc

SEQ ID NO: 3227210 - DNA, 25 bp, Homo sapien
catgttcatgcactaccgatacatc

SEQ ID NO: 3227211 - DNA, 25 bp, Homo sapien
tgcaaggtggacagtgctgaccatg

SEQ ID NO: 3227212 - DNA, 25 bp, Homo sapien
cactatgcatgtgcctgcaactggc

SEQ ID NO: 3227213 - DNA, 25 bp, Homo sapien
ggatcctaacaaccctcagagccat

SEQ ID NO: 3227214 - DNA, 25 bp, Homo sapien
ctgctggacgaagaggcaccactga

SEQ ID NO: 3227215 - DNA, 25 bp, Homo sapien
gagtgtatgcacactgtcagcccca

SEQ ID NO: 3227216 - DNA, 25 bp, Homo sapien
aactgatggcccagtactttaacaa

SEQ ID NO: 3227217 - DNA, 25 bp, Homo sapien
cagtactttaacaactggaaatggg

SEQ ID NO: 3227218 - DNA, 25 bp, Homo sapien
tggccagggccttagaactgatggc

SEQ ID NO: 3227219 - DNA, 25 bp, Homo sapien
ttacccctcagcaatacaatctcca

SEQ ID NO: 3227220 - DNA, 25 bp, Homo sapien
cttgaatttgagaggtttctccagc

SEQ ID NO: 3227221 - DNA, 25 bp, Homo sapien
cagaaaatttctcagcaacgcacat

SEQ ID NO: 3227222 - DNA, 25 bp, Homo sapien
ctcacccgtattgttcaatttgctt

SEQ ID NO: 3227223 - DNA, 25 bp, Homo sapien
caatttgctttacgctttcttgaat

SEQ ID NO: 3227224 - DNA, 25 bp, Homo sapien
tggccacattaagcctgtttccttc

SEQ ID NO: 3227225 - DNA, 25 bp, Homo sapien
gccacattagaatatgcaaggtttt

SEQ ID NO: 3227226 - DNA, 25 bp, Homo sapien
ttttggccacattaagcctgtttcc

SEQ ID NO: 3227227 - DNA, 25 bp, Homo sapien
gagtggccacattagaatatgcaag

SEQ ID NO: 3227228 - DNA, 25 bp, Homo sapien
caccatctcaggcacttcattggta

SEQ ID NO: 3227229 - DNA, 25 bp, Homo sapien
tgtgcacatgcatgctatcaccatc

SEQ ID NO: 3227230 - DNA, 25 bp, Homo sapien
gatagctttccacagttgacatcat

SEQ ID NO: 3227231 - DNA, 25 bp, Homo sapien
tcattggtaattccctcctgatagc

SEQ ID NO: 3227232 - DNA, 25 bp, Homo sapien
cagatttttctcagacaggctgctc

SEQ ID NO: 3227233 - DNA, 25 bp, Homo sapien
agacagcagcaacagatttttctca

SEQ ID NO: 3227234 - DNA, 25 bp, Homo sapien
ctagacagcagcaacagatttttct

SEQ ID NO: 3227235 - DNA, 25 bp, Homo sapien
gatttttctcagacaggctgctcat

SEQ ID NO: 3227236 - DNA, 25 bp, Homo sapien
tcccagatgattttctagctctgcc

SEQ ID NO: 3227237 - DNA, 25 bp, Homo sapien
taatggccttgggatggcactgcag

SEQ ID NO: 3227238 - DNA, 25 bp, Homo sapien
cacataatggccttgggatggcact

SEQ ID NO: 3227239 - DNA, 25 bp, Homo sapien
tcacataatggccttgggatggcac

SEQ ID NO: 3227240 - DNA, 25 bp, Homo sapien
cataatggccttgggatggcactgc

SEQ ID NO: 3227241 - DNA, 25 bp, Homo sapien
tgctgttctgtagaatcataaactc

SEQ ID NO: 3227242 - DNA, 25 bp, Homo sapien
atcaactttccctttggacctgaga

SEQ ID NO: 3227243 - DNA, 25 bp, Homo sapien
ggatgcaaacaggaaccttactctt

SEQ ID NO: 3227244 - DNA, 25 bp, Homo sapien
tgacaactggttgaaaagacagaag

SEQ ID NO: 3227245 - DNA, 25 bp, Homo sapien
tcacattggaatacggaggacctct

SEQ ID NO: 3227246 - DNA, 25 bp, Homo sapien
taaatcctgttgcagtggtcccttc

SEQ ID NO: 3227247 - DNA, 25 bp, Homo sapien
taaggccaacatatgatgcagtgct

SEQ ID NO: 3227248 - DNA, 25 bp, Homo sapien
tgcagtgctaagtgttccatgtctc

SEQ ID NO: 3227249 - DNA, 25 bp, Homo sapien
ctgtgaaacagaggaaaacctcctc

SEQ ID NO: 3227250 - DNA, 25 bp, Homo sapien
tgtgaaacagaggaaaacctcctcc

SEQ ID NO: 3227251 - DNA, 25 bp, Homo sapien
tcttggtgtagttgctctcctgctt

SEQ ID NO: 3227252 - DNA, 25 bp, Homo sapien
tcaacatgagagaatagtccgtgct

SEQ ID NO: 3227253 - DNA, 25 bp, Homo sapien
cctgcttgtatgtaaaaagtgccac

SEQ ID NO: 3227254 - DNA, 25 bp, Homo sapien
aagtgccacattcaacatgagagaa

SEQ ID NO: 3227255 - DNA, 25 bp, Homo sapien
catatccccatcatagaggtcacaa

SEQ ID NO: 3227256 - DNA, 25 bp, Homo sapien
tatccccatcatagaggtcacaatt

SEQ ID NO: 3227257 - DNA, 25 bp, Homo sapien
tccccatcatagaggtcacaattaa

SEQ ID NO: 3227258 - DNA, 25 bp, Homo sapien
ccccatcatagaggtcacaattaac

SEQ ID NO: 3227259 - DNA, 25 bp, Homo sapien
ctcattggctaagtgatcacatgcc

SEQ ID NO: 3227260 - DNA, 25 bp, Homo sapien
cattatcacatcgtttctacagcct

SEQ ID NO: 3227261 - DNA, 25 bp, Homo sapien
cacttctaatatggacctgcaactc

SEQ ID NO: 3227262 - DNA, 25 bp, Homo sapien
gaggaaagctcaatgtttacttcat

SEQ ID NO: 3227263 - DNA, 25 bp, Homo sapien
tgatgacacaaaatctcacagcaac

SEQ ID NO: 3227264 - DNA, 25 bp, Homo sapien
aacttgataaaatgcaatggacacc

SEQ ID NO: 3227265 - DNA, 25 bp, Homo sapien
gcaaccacagtgacaggagataagg

SEQ ID NO: 3227266 - DNA, 25 bp, Homo sapien
caggctgacctatagttaacttgat

SEQ ID NO: 3227267 - DNA, 25 bp, Homo sapien
tctctgtaggagaacaaggcataag

SEQ ID NO: 3227268 - DNA, 25 bp, Homo sapien
ggcaacaatcaggtcgggcgtgaaa

SEQ ID NO: 3227269 - DNA, 25 bp, Homo sapien
ggcgtgaaatcacaaacgttagagt

SEQ ID NO: 3227270 - DNA, 25 bp, Homo sapien
cgttagagtgaagccagacagctca

SEQ ID NO: 3227271 - DNA, 25 bp, Homo sapien
cttcgtcagtgctcttctcccaaac

SEQ ID NO: 3227272 - DNA, 25 bp, Homo sapien
gtcagtgctcttctcccaaacacat

SEQ ID NO: 3227273 - DNA, 25 bp, Homo sapien
tcttctcccaaacacattctgattt

SEQ ID NO: 3227274 - DNA, 25 bp, Homo sapien
gtgctcttctcccaaacacattctg

SEQ ID NO: 3227275 - DNA, 25 bp, Homo sapien
gtcagaagcggtcaaagagtgcatt

SEQ ID NO: 3227276 - DNA, 25 bp, Homo sapien
ggccgtgtgggatatatcactgaaa

SEQ ID NO: 3227277 - DNA, 25 bp, Homo sapien
gcattttcttggtcagtatggcaga

SEQ ID NO: 3227278 - DNA, 25 bp, Homo sapien
tatggcagatgactagttgtcccca

SEQ ID NO: 3227279 - DNA, 25 bp, Homo sapien
cttactattcttataggagagagta

SEQ ID NO: 3227280 - DNA, 25 bp, Homo sapien
ggagagagtatagggttgcttttca

SEQ ID NO: 3227281 - DNA, 25 bp, Homo sapien
gcattcgttacatagatccacccca

SEQ ID NO: 3227282 - DNA, 25 bp, Homo sapien
gccactcagtcttctgctatagcag

SEQ ID NO: 3227283 - DNA, 25 bp, Homo sapien
taataacctcttcgttttctcttca

SEQ ID NO: 3227284 - DNA, 25 bp, Homo sapien
acaacatgaatattgcttacctatt

SEQ ID NO: 3227285 - DNA, 25 bp, Homo sapien
tgtgaaaccaccacagtaatcagaa

SEQ ID NO: 3227286 - DNA, 25 bp, Homo sapien
caaaatactatttgcagcttcaggt

SEQ ID NO: 3227287 - DNA, 25 bp, Homo sapien
actggaagtgatgattgaaaggcca

SEQ ID NO: 3227288 - DNA, 25 bp, Homo sapien
tgaaaggccaaaagccacattaccc

SEQ ID NO: 3227289 - DNA, 25 bp, Homo sapien
tcacttttgatctcggctgaagtca

SEQ ID NO: 3227290 - DNA, 25 bp, Homo sapien
caagactatttccaattataacagc

SEQ ID NO: 3227291 - DNA, 25 bp, Homo sapien
gaagtcatctagttcttgcaattca

SEQ ID NO: 3227292 - DNA, 25 bp, Homo sapien
tatgcaggcaattaccagtaataag

SEQ ID NO: 3227293 - DNA, 25 bp, Homo sapien
ccgaacctccttaaggagcctcaag

SEQ ID NO: 3227294 - DNA, 25 bp, Homo sapien
tccttaaggagcctcaagaaaccaa

SEQ ID NO: 3227295 - DNA, 25 bp, Homo sapien
accaaactcctcatgctcgaggatt

SEQ ID NO: 3227296 - DNA, 25 bp, Homo sapien
tcatgctcgaggattctcattccca

SEQ ID NO: 3227297 - DNA, 25 bp, Homo sapien
ccattggtcaatagtaagctactta

SEQ ID NO: 3227298 - DNA, 25 bp, Homo sapien
tagtctagactttggcctggtggaa

SEQ ID NO: 3227299 - DNA, 25 bp, Homo sapien
tattgtctacgtttcattgcctatg

SEQ ID NO: 3227300 - DNA, 25 bp, Homo sapien
caagaatttgcaccatgacctgctt

SEQ ID NO: 3227301 - DNA, 25 bp, Homo sapien
tagtgaaacaccctaacaaggtaca

SEQ ID NO: 3227302 - DNA, 25 bp, Homo sapien
tgtagcgcacatgaattcactcttc

SEQ ID NO: 3227303 - DNA, 25 bp, Homo sapien
caaggtacaagtcaacaccgtggga

SEQ ID NO: 3227304 - DNA, 25 bp, Homo sapien
ccaaatttggagctcgaatctcaca

SEQ ID NO: 3227305 - DNA, 25 bp, Homo sapien
gcagtaatccttaggctttagtatt

SEQ ID NO: 3227306 - DNA, 25 bp, Homo sapien
aaagaatgaatctgctggttgaagt

SEQ ID NO: 3227307 - DNA, 25 bp, Homo sapien
taatcttttgtagtcatcttgccca

SEQ ID NO: 3227308 - DNA, 25 bp, Homo sapien
taagacatcttatttgcagtaatcc

SEQ ID NO: 3227309 - DNA, 25 bp, Homo sapien
gcttccttcagccgatcttgagcag

SEQ ID NO: 3227310 - DNA, 25 bp, Homo sapien
ccagaaaggatggtcctgttaattc

SEQ ID NO: 3227311 - DNA, 25 bp, Homo sapien
cagctccagaaaggatggtcctgtt

SEQ ID NO: 3227312 - DNA, 25 bp, Homo sapien
gctccagaaaggatggtcctgttaa

SEQ ID NO: 3227313 - DNA, 25 bp, Homo sapien
gaactcaaaagtcagcatacaataa

SEQ ID NO: 3227314 - DNA, 25 bp, Homo sapien
tttagaggcctaaaggcaagaagca

SEQ ID NO: 3227315 - DNA, 25 bp, Homo sapien
aactttaaggccctcttgatgacaa

SEQ ID NO: 3227316 - DNA, 25 bp, Homo sapien
tgatgacaagcaacccaacaaaaga

SEQ ID NO: 3227317 - DNA, 25 bp, Homo sapien
caaaacttcgttgcttcactttctg

SEQ ID NO: 3227318 - DNA, 25 bp, Homo sapien
aggagcaaccctcaaaacttcgttg

SEQ ID NO: 3227319 - DNA, 25 bp, Homo sapien
cattaaatgaggagcaaccctcaaa

SEQ ID NO: 3227320 - DNA, 25 bp, Homo sapien
ccctcaaaacttcgttgcttcactt

SEQ ID NO: 3227321 - DNA, 25 bp, Homo sapien
ggtagaatctgtagttcagaggagt

SEQ ID NO: 3227322 - DNA, 25 bp, Homo sapien
agttccaggtcatagtgtgccgatc

SEQ ID NO: 3227323 - DNA, 25 bp, Homo sapien
tcagccactggaatataaaatcagg

SEQ ID NO: 3227324 - DNA, 25 bp, Homo sapien
cagctggatatggtgtcaggagcct

SEQ ID NO: 3227325 - DNA, 25 bp, Homo sapien
ttgtccattcctcacggaccactgt

SEQ ID NO: 3227326 - DNA, 25 bp, Homo sapien
ccagatcccctctagtctacttgtt

SEQ ID NO: 3227327 - DNA, 25 bp, Homo sapien
tcccactcagagaatctgatcctat

SEQ ID NO: 3227328 - DNA, 25 bp, Homo sapien
tcccctctagtctacttgttctctg

SEQ ID NO: 3227329 - DNA, 25 bp, Homo sapien
tcgggctgcctgtcatatctacaga

SEQ ID NO: 3227330 - DNA, 25 bp, Homo sapien
cgtcgggctgcctgtcatatctaca

SEQ ID NO: 3227331 - DNA, 25 bp, Homo sapien
cttcgtcgggctgcctgtcatatct

SEQ ID NO: 3227332 - DNA, 25 bp, Homo sapien
catatctacagaatgctgatgcttt

SEQ ID NO: 3227333 - DNA, 25 bp, Homo sapien
aaacattttgccgttaaagttgctg

SEQ ID NO: 3227334 - DNA, 25 bp, Homo sapien
gccgttaaagttgctgaattaatta

SEQ ID NO: 3227335 - DNA, 25 bp, Homo sapien
ctggggatctcattataaggcaaac

SEQ ID NO: 3227336 - DNA, 25 bp, Homo sapien
gggcttttcgtgtcactggggatct

SEQ ID NO: 3227337 - DNA, 25 bp, Homo sapien
taattaggaatgaccaagtggtgcc

SEQ ID NO: 3227338 - DNA, 25 bp, Homo sapien
ggaatgtagcaagctgtgctcatca

SEQ ID NO: 3227339 - DNA, 25 bp, Homo sapien
gagacatgtagcatgcagttgcaac

SEQ ID NO: 3227340 - DNA, 25 bp, Homo sapien
aagtggtgccagaaataagaattcc

SEQ ID NO: 3227341 - DNA, 25 bp, Homo sapien
gctgcacaaggagcttaattaggaa

SEQ ID NO: 3227342 - DNA, 25 bp, Homo sapien
cacaaggagcttaattaggaacgtt

SEQ ID NO: 3227343 - DNA, 25 bp, Homo sapien
cacaggctttaagcttggtattaaa

SEQ ID NO: 3227344 - DNA, 25 bp, Homo sapien
tttatcacaggctttaagcttggta

SEQ ID NO: 3227345 - DNA, 25 bp, Homo sapien
ttgctcatttgcttggtatttacag

SEQ ID NO: 3227346 - DNA, 25 bp, Homo sapien
acctttagttcgtttgctcatttgc

SEQ ID NO: 3227347 - DNA, 25 bp, Homo sapien
gaatcttgggcacacctttagttcg

SEQ ID NO: 3227348 - DNA, 25 bp, Homo sapien
gtgttcagaatcttgggcacacctt

SEQ ID NO: 3227349 - DNA, 25 bp, Homo sapien
tactagttgggtgtggacactgtcg

SEQ ID NO: 3227350 - DNA, 25 bp, Homo sapien
cttctgccccttgggaggattcctg

SEQ ID NO: 3227351 - DNA, 25 bp, Homo sapien
tctatctgccaccactactagttgg

SEQ ID NO: 3227352 - DNA, 25 bp, Homo sapien
tgtcgttgcagctctgtgttatcct

SEQ ID NO: 3227353 - DNA, 25 bp, Homo sapien
gaatgaagtagtaaaatacgctttg

SEQ ID NO: 3227354 - DNA, 25 bp, Homo sapien
caaattagtggctacctagggtgag

SEQ ID NO: 3227355 - DNA, 25 bp, Homo sapien
ctttcacactcagtaagagaagcca

SEQ ID NO: 3227356 - DNA, 25 bp, Homo sapien
gatggctgtacaacttggtcatttt

SEQ ID NO: 3227357 - DNA, 25 bp, Homo sapien
caattaaggcaggtttggtgactcc

SEQ ID NO: 3227358 - DNA, 25 bp, Homo sapien
atcaattaaggcaggtttggtgact

SEQ ID NO: 3227359 - DNA, 25 bp, Homo sapien
attaaggcaggtttggtgactccag

SEQ ID NO: 3227360 - DNA, 25 bp, Homo sapien
cttgcgcacacatcaattaaggcag

SEQ ID NO: 3227361 - DNA, 25 bp, Homo sapien
tctcctgattccgtgaccttgtgag

SEQ ID NO: 3227362 - DNA, 25 bp, Homo sapien
gagttggagcggcacttgtcctctc

SEQ ID NO: 3227363 - DNA, 25 bp, Homo sapien
cagactgcctgcaaatgtgagggag

SEQ ID NO: 3227364 - DNA, 25 bp, Homo sapien
atggagactcccacgcatgcagact

SEQ ID NO: 3227365 - DNA, 25 bp, Homo sapien
agggtagggaagctggagcgggcac

SEQ ID NO: 3227366 - DNA, 25 bp, Homo sapien
gagaagcgagggtagggaagctgga

SEQ ID NO: 3227367 - DNA, 25 bp, Homo sapien
tagggaagctggagcgggcacacac

SEQ ID NO: 3227368 - DNA, 25 bp, Homo sapien
ggtagggaagctggagcgggcacac

SEQ ID NO: 3227369 - DNA, 25 bp, Homo sapien
gacagttggtggcactctgtgacca

SEQ ID NO: 3227370 - DNA, 25 bp, Homo sapien
tcagggggacagttggtggcactct

SEQ ID NO: 3227371 - DNA, 25 bp, Homo sapien
ggggacagttggtggcactctgtga

SEQ ID NO: 3227372 - DNA, 25 bp, Homo sapien
cagttggtggcactctgtgaccaga

SEQ ID NO: 3227373 - DNA, 25 bp, Homo sapien
tgggatttcggagttctgcttcagg

SEQ ID NO: 3227374 - DNA, 25 bp, Homo sapien
tctgggatttcggagttctgcttca

SEQ ID NO: 3227375 - DNA, 25 bp, Homo sapien
gagctctgggatttcggagttctgc

SEQ ID NO: 3227376 - DNA, 25 bp, Homo sapien
tcacagagctctgggatttcggagt

SEQ ID NO: 3227377 - DNA, 25 bp, Homo sapien
ttattcagtgagttttaatggagtc

SEQ ID NO: 3227378 - DNA, 25 bp, Homo sapien
gagacatttacaagtggtgatttcc

SEQ ID NO: 3227379 - DNA, 25 bp, Homo sapien
gcctaaataccatcttcaactgaag

SEQ ID NO: 3227380 - DNA, 25 bp, Homo sapien
taatggctttgaattcaggcctaaa

SEQ ID NO: 3227381 - DNA, 25 bp, Homo sapien
gatgttgagatgaccagaaaaagga

SEQ ID NO: 3227382 - DNA, 25 bp, Homo sapien
ttgctccaacgtctacactagttct

SEQ ID NO: 3227383 - DNA, 25 bp, Homo sapien
cgtctacactagttcttctaaccac

SEQ ID NO: 3227384 - DNA, 25 bp, Homo sapien
gctgatggagcagagatacgtgaat

SEQ ID NO: 3227385 - DNA, 25 bp, Homo sapien
ggagcagagatacgtgaatattgca

SEQ ID NO: 3227386 - DNA, 25 bp, Homo sapien
gaaaacttgtgaaccaatttttgca

SEQ ID NO: 3227387 - DNA, 25 bp, Homo sapien
gaaccaatttttgcatggtgaatgt

SEQ ID NO: 3227388 - DNA, 25 bp, Homo sapien
aacttgtgaaccaatttttgcatgg

SEQ ID NO: 3227389 - DNA, 25 bp, Homo sapien
tgtgaaccaatttttgcatggtgaa

SEQ ID NO: 3227390 - DNA, 25 bp, Homo sapien
catccagcaatggatacttgagtag

SEQ ID NO: 3227391 - DNA, 25 bp, Homo sapien
tcatccagcaatggatacttgagta

SEQ ID NO: 3227392 - DNA, 25 bp, Homo sapien
caagaggaagctaactggctttttc

SEQ ID NO: 3227393 - DNA, 25 bp, Homo sapien
ttacaagaggaagctaactggcttt

SEQ ID NO: 3227394 - DNA, 25 bp, Homo sapien
ggaaatacacaatggtcccaaagca

SEQ ID NO: 3227395 - DNA, 25 bp, Homo sapien
gaggaagctaactggctttttctct

SEQ ID NO: 3227396 - DNA, 25 bp, Homo sapien
ccgtacaactccattaggcaaattg

SEQ ID NO: 3227397 - DNA, 25 bp, Homo sapien
tgcggttatctttctcctgagagtg

SEQ ID NO: 3227398 - DNA, 25 bp, Homo sapien
taggcaaattgttgcggttatcttt

SEQ ID NO: 3227399 - DNA, 25 bp, Homo sapien
cttgaaataccgtacaactccatta

SEQ ID NO: 3227400 - DNA, 25 bp, Homo sapien
gatagagtggcaagttcagccctcg

SEQ ID NO: 3227401 - DNA, 25 bp, Homo sapien
tagagtggcaagttcagccctcgag

SEQ ID NO: 3227402 - DNA, 25 bp, Homo sapien
gtggcaagttcagccctcgagtcgc

SEQ ID NO: 3227403 - DNA, 25 bp, Homo sapien
caagttcagccctcgagtcgctaat

SEQ ID NO: 3227404 - DNA, 25 bp, Homo sapien
tctagaggactagtacatgcagaat

SEQ ID NO: 3227405 - DNA, 25 bp, Homo sapien
tagaggactagtacatgcagaattg

SEQ ID NO: 3227406 - DNA, 25 bp, Homo sapien
ttaacctatttctagaggactagta

SEQ ID NO: 3227407 - DNA, 25 bp, Homo sapien
tatttctagaggactagtacatgca

SEQ ID NO: 3227408 - DNA, 25 bp, Homo sapien
gctgggaaggcttacaatcacagga

SEQ ID NO: 3227409 - DNA, 25 bp, Homo sapien
catggaagcagtcaaggaagcatat

SEQ ID NO: 3227410 - DNA, 25 bp, Homo sapien
gggaaggcttacaatcacaggagaa

SEQ ID NO: 3227411 - DNA, 25 bp, Homo sapien
tggctgggaaggcttacaatcacag

SEQ ID NO: 3227412 - DNA, 25 bp, Homo sapien
aacagcatggcaaaaaaattgcccc

SEQ ID NO: 3227413 - DNA, 25 bp, Homo sapien
gaacagcatggcaaaaaaattgccc

SEQ ID NO: 3227414 - DNA, 25 bp, Homo sapien
gagaacagcatggcaaaaaaattgc

SEQ ID NO: 3227415 - DNA, 25 bp, Homo sapien
ggtgacctgaagattgaatgaactc

SEQ ID NO: 3227416 - DNA, 25 bp, Homo sapien
tccaaaattgtgctgcctctatctc

SEQ ID NO: 3227417 - DNA, 25 bp, Homo sapien
gaactctggcttgaataattcactt

SEQ ID NO: 3227418 - DNA, 25 bp, Homo sapien
cattagcttctctagaatgctggca

SEQ ID NO: 3227419 - DNA, 25 bp, Homo sapien
aggaagaagactcaatgatgatgga

SEQ ID NO: 3227420 - DNA, 25 bp, Homo sapien
cttcacggatcaaggaaaggaattt

SEQ ID NO: 3227421 - DNA, 25 bp, Homo sapien
acacgactcttcacggatcaaggaa

SEQ ID NO: 3227422 - DNA, 25 bp, Homo sapien
aagaagactcaatgatgatggaagc

SEQ ID NO: 3227423 - DNA, 25 bp, Homo sapien
aagcctcctctgaatcttgaagttg

SEQ ID NO: 3227424 - DNA, 25 bp, Homo sapien
tcttcttgactttttagaagctgag

SEQ ID NO: 3227425 - DNA, 25 bp, Homo sapien
tcctctgaatcttgaagttgctctt

SEQ ID NO: 3227426 - DNA, 25 bp, Homo sapien
ttcttgactttttagaagctgagct

SEQ ID NO: 3227427 - DNA, 25 bp, Homo sapien
agaggaccaagctgactacctggga

SEQ ID NO: 3227428 - DNA, 25 bp, Homo sapien
ttcctccagacagaggaccaagctg

SEQ ID NO: 3227429 - DNA, 25 bp, Homo sapien
ctacctgggacccacaatgcttaaa

SEQ ID NO: 3227430 - DNA, 25 bp, Homo sapien
aagctgactacctgggacccacaat

SEQ ID NO: 3227431 - DNA, 25 bp, Homo sapien
ccaaagctgtccatagcatacggct

SEQ ID NO: 3227432 - DNA, 25 bp, Homo sapien
agttgttccagagagcttagttcta

SEQ ID NO: 3227433 - DNA, 25 bp, Homo sapien
gtccatagcatacggctcaaacagg

SEQ ID NO: 3227434 - DNA, 25 bp, Homo sapien
catccatctgatgtctagttgtctc

SEQ ID NO: 3227435 - DNA, 25 bp, Homo sapien
cagtcaagcattggatggacaacac

SEQ ID NO: 3227436 - DNA, 25 bp, Homo sapien
tttccagaggaggacaaaaggagca

SEQ ID NO: 3227437 - DNA, 25 bp, Homo sapien
caggagggctcatccttgcatcaga

SEQ ID NO: 3227438 - DNA, 25 bp, Homo sapien
tagccattgcatgttggtatccacc

SEQ ID NO: 3227439 - DNA, 25 bp, Homo sapien
gaaacttaggttcattccatgactt

SEQ ID NO: 3227440 - DNA, 25 bp, Homo sapien
ctgagtattttgacctccagttaca

SEQ ID NO: 3227441 - DNA, 25 bp, Homo sapien
catggatatattgtggaaagctgag

SEQ ID NO: 3227442 - DNA, 25 bp, Homo sapien
tccatgactttgttactgcgactag

SEQ ID NO: 3227443 - DNA, 25 bp, Homo sapien
agaattatgtccgcctttgtattct

SEQ ID NO: 3227444 - DNA, 25 bp, Homo sapien
ataagaattatgtccgcctttgtat

SEQ ID NO: 3227445 - DNA, 25 bp, Homo sapien
attatgtccgcctttgtattcttta

SEQ ID NO: 3227446 - DNA, 25 bp, Homo sapien
taagaattatgtccgcctttgtatt

SEQ ID NO: 3227447 - DNA, 25 bp, Homo sapien
atctactcttactatgacagtgcat

SEQ ID NO: 3227448 - DNA, 25 bp, Homo sapien
acatatgcatactcacaaaggtctt

SEQ ID NO: 3227449 - DNA, 25 bp, Homo sapien
catatgcatactcacaaaggtcttt

SEQ ID NO: 3227450 - DNA, 25 bp, Homo sapien
ttgacacactgaaggctcttttcta

SEQ ID NO: 3227451 - DNA, 25 bp, Homo sapien
tctggacaaagtcgtatttactgct

SEQ ID NO: 3227452 - DNA, 25 bp, Homo sapien
gacaaagtcgtatttactgctctca

SEQ ID NO: 3227453 - DNA, 25 bp, Homo sapien
caaagtcgtatttactgctctcagt

SEQ ID NO: 3227454 - DNA, 25 bp, Homo sapien
cattctggacaaagtcgtatttact

SEQ ID NO: 3227455 - DNA, 25 bp, Homo sapien
aaagctgctcagttggctcatacac

SEQ ID NO: 3227456 - DNA, 25 bp, Homo sapien
ttattgtttagctgctcggtttttc

SEQ ID NO: 3227457 - DNA, 25 bp, Homo sapien
tattgtttagctgctcggtttttcc

SEQ ID NO: 3227458 - DNA, 25 bp, Homo sapien
ttgtttagctgctcggtttttccca

SEQ ID NO: 3227459 - DNA, 25 bp, Homo sapien
tgtttagctgctcggtttttcccat

SEQ ID NO: 3227460 - DNA, 25 bp, Homo sapien
tattaagtgttgacactccagtgaa

SEQ ID NO: 3227461 - DNA, 25 bp, Homo sapien
gaaacatcatagcagatctcgtact

SEQ ID NO: 3227462 - DNA, 25 bp, Homo sapien
tgatcttcaaaagtgaaatggtgat

SEQ ID NO: 3227463 - DNA, 25 bp, Homo sapien
agaatttttccttacatgcctgtgt

SEQ ID NO: 3227464 - DNA, 25 bp, Homo sapien
ctgattcttagtgacagcatgggaa

SEQ ID NO: 3227465 - DNA, 25 bp, Homo sapien
tcttagtgacagcatgggaaatttc

SEQ ID NO: 3227466 - DNA, 25 bp, Homo sapien
tgacagcatgggaaatttcttggtt

SEQ ID NO: 3227467 - DNA, 25 bp, Homo sapien
gattcttagtgacagcatgggaaat

SEQ ID NO: 3227468 - DNA, 25 bp, Homo sapien
ctttagcagaaagcaggaggaatac

SEQ ID NO: 3227469 - DNA, 25 bp, Homo sapien
tatgatttatcctttgatgatattt

SEQ ID NO: 3227470 - DNA, 25 bp, Homo sapien
aagaagatccagtatgatttatcct

SEQ ID NO: 3227471 - DNA, 25 bp, Homo sapien
tgatttatcctttgatgatatttcc

SEQ ID NO: 3227472 - DNA, 25 bp, Homo sapien
aaaagaagatccagtatgatttatc

SEQ ID NO: 3227473 - DNA, 25 bp, Homo sapien
tatgtagcacagtaagataaaaacc

SEQ ID NO: 3227474 - DNA, 25 bp, Homo sapien
ctaccctccaggaattgtgggtgac

SEQ ID NO: 3227475 - DNA, 25 bp, Homo sapien
gaatcatcacattagaaccaccaga

SEQ ID NO: 3227476 - DNA, 25 bp, Homo sapien
cagaaacttgtaataaccatggtta

SEQ ID NO: 3227477 - DNA, 25 bp, Homo sapien
accggtcttgggtatcacgtcagga

SEQ ID NO: 3227478 - DNA, 25 bp, Homo sapien
gggtatcacgtcaggaccaggctgt

SEQ ID NO: 3227479 - DNA, 25 bp, Homo sapien
agccaacgtgcccttgacatggtca

SEQ ID NO: 3227480 - DNA, 25 bp, Homo sapien
tcgtacccaccggtcttgggtatca

SEQ ID NO: 3227481 - DNA, 25 bp, Homo sapien
taaaagccttgagtctagtaaagcc

SEQ ID NO: 3227482 - DNA, 25 bp, Homo sapien
tagggacacttattgaagccaggaa

SEQ ID NO: 3227483 - DNA, 25 bp, Homo sapien
tatatgcaggttcattagggacact

SEQ ID NO: 3227484 - DNA, 25 bp, Homo sapien
tgtcaacacatgcataaaaccaggg

SEQ ID NO: 3227485 - DNA, 25 bp, Homo sapien
gaaactggtccaatattgagaagca

SEQ ID NO: 3227486 - DNA, 25 bp, Homo sapien
aaactggtccaatattgagaagcag

SEQ ID NO: 3227487 - DNA, 25 bp, Homo sapien
cagatttataatcgttgttcatgag

SEQ ID NO: 3227488 - DNA, 25 bp, Homo sapien
tcgttgttcatgagaggatactctc

SEQ ID NO: 3227489 - DNA, 25 bp, Homo sapien
gagaatattgctaaacataggccaa

SEQ ID NO: 3227490 - DNA, 25 bp, Homo sapien
ggatactctccatcatggcaagaga

SEQ ID NO: 3227491 - DNA, 25 bp, Homo sapien
tatctgagaactagttggcacctgg

SEQ ID NO: 3227492 - DNA, 25 bp, Homo sapien
gaaggtctagaaagtccctgggcat

SEQ ID NO: 3227493 - DNA, 25 bp, Homo sapien
tgttccaccaatacttagtctaggg

SEQ ID NO: 3227494 - DNA, 25 bp, Homo sapien
gactcacaagaagacaggcatgtca

SEQ ID NO: 3227495 - DNA, 25 bp, Homo sapien
tgattcccttcctttcgccggaatg

SEQ ID NO: 3227496 - DNA, 25 bp, Homo sapien
cgccggaatgttgggcaaagagcat

SEQ ID NO: 3227497 - DNA, 25 bp, Homo sapien
atgattcccttcctttcgccggaat

SEQ ID NO: 3227498 - DNA, 25 bp, Homo sapien
ttcctttcgccggaatgttgggcaa

SEQ ID NO: 3227499 - DNA, 25 bp, Homo sapien
tcatttcagataatggtaaatcctt

SEQ ID NO: 3227500 - DNA, 25 bp, Homo sapien
taatgcctattcttaaggagcttgc

SEQ ID NO: 3227501 - DNA, 25 bp, Homo sapien
gcgccctgtcgcactttattcaaca

SEQ ID NO: 3227502 - DNA, 25 bp, Homo sapien
atacagcagtctgtatactagacac

SEQ ID NO: 3227503 - DNA, 25 bp, Homo sapien
tctgctgtaggtgtctccggtagca

SEQ ID NO: 3227504 - DNA, 25 bp, Homo sapien
tgtgctaagtgttacacgggttaaa

SEQ ID NO: 3227505 - DNA, 25 bp, Homo sapien
ctgtaggtgtctccggtagcaggct

SEQ ID NO: 3227506 - DNA, 25 bp, Homo sapien
tccggtagcaggctgtgtgctaagt

SEQ ID NO: 3227507 - DNA, 25 bp, Homo sapien
caaaaggagcagttagcttttctag

SEQ ID NO: 3227508 - DNA, 25 bp, Homo sapien
gggtgcaaaaggagcagttagcttt

SEQ ID NO: 3227509 - DNA, 25 bp, Homo sapien
catagttgcaacagagggtgcaaaa

SEQ ID NO: 3227510 - DNA, 25 bp, Homo sapien
tagttgcaacagagggtgcaaaagg

SEQ ID NO: 3227511 - DNA, 25 bp, Homo sapien
ctcactgttcactaaattatgtaca

SEQ ID NO: 3227512 - DNA, 25 bp, Homo sapien
actgttcactaaattatgtacaaaa

SEQ ID NO: 3227513 - DNA, 25 bp, Homo sapien
cactgttcactaaattatgtacaaa

SEQ ID NO: 3227514 - DNA, 25 bp, Homo sapien
cctcactgttcactaaattatgtac

SEQ ID NO: 3227515 - DNA, 25 bp, Homo sapien
tgtcatgcccaaactcaaagataga

SEQ ID NO: 3227516 - DNA, 25 bp, Homo sapien
tcatgcccaaactcaaagatagaaa

SEQ ID NO: 3227517 - DNA, 25 bp, Homo sapien
tgggtgctttgggccatccctgctt

SEQ ID NO: 3227518 - DNA, 25 bp, Homo sapien
tggtgtcatgcccaaactcaaagat

SEQ ID NO: 3227519 - DNA, 25 bp, Homo sapien
agatgtggagtgaactgccggcact

SEQ ID NO: 3227520 - DNA, 25 bp, Homo sapien
acagtgcatgtgtggtcaccgtggg

SEQ ID NO: 3227521 - DNA, 25 bp, Homo sapien
tcaccgtggggtacaccagtgagat

SEQ ID NO: 3227522 - DNA, 25 bp, Homo sapien
aacaagtgtctggtccctgccacat

SEQ ID NO: 3227523 - DNA, 25 bp, Homo sapien
tccctggaggacatagtgccggtct

SEQ ID NO: 3227524 - DNA, 25 bp, Homo sapien
ttgaaggcccaaaagagtctccgag

SEQ ID NO: 3227525 - DNA, 25 bp, Homo sapien
caaaagtacataagttccctggagg

SEQ ID NO: 3227526 - DNA, 25 bp, Homo sapien
atatctctgtatggtggattttcca

SEQ ID NO: 3227527 - DNA, 25 bp, Homo sapien
tagtctgtgcttggatatttgattt

SEQ ID NO: 3227528 - DNA, 25 bp, Homo sapien
ttagtctgtgcttggatatttgatt

SEQ ID NO: 3227529 - DNA, 25 bp, Homo sapien
aagtaatttccgctgtggggatgat

SEQ ID NO: 3227530 - DNA, 25 bp, Homo sapien
cttcttacaaacctcatctagtcta

SEQ ID NO: 3227531 - DNA, 25 bp, Homo sapien
ttacaaacctcatctagtctaggtt

SEQ ID NO: 3227532 - DNA, 25 bp, Homo sapien
aaacctcatctagtctaggtttcaa

SEQ ID NO: 3227533 - DNA, 25 bp, Homo sapien
ttttaccagatatgtagcacctatg

SEQ ID NO: 3227534 - DNA, 25 bp, Homo sapien
gccaaataacactgcctgttttgtt

SEQ ID NO: 3227535 - DNA, 25 bp, Homo sapien
cagctccattgccaaataacactgc

SEQ ID NO: 3227536 - DNA, 25 bp, Homo sapien
tccattgccaaataacactgcctgt

SEQ ID NO: 3227537 - DNA, 25 bp, Homo sapien
taaaggcattttgtaggtgagcagt

SEQ ID NO: 3227538 - DNA, 25 bp, Homo sapien
gacacaatattgattacttcgaagt

SEQ ID NO: 3227539 - DNA, 25 bp, Homo sapien
gcttgttcgtattcctaaaggcatt

SEQ ID NO: 3227540 - DNA, 25 bp, Homo sapien
tgtaggtgagcagtatctttactgc

SEQ ID NO: 3227541 - DNA, 25 bp, Homo sapien
ccttcatccagaaaaaacgggcaga

SEQ ID NO: 3227542 - DNA, 25 bp, Homo sapien
catccagaaaaaacgggcagatttt

SEQ ID NO: 3227543 - DNA, 25 bp, Homo sapien
atttttgtagcctgaggtggaggta

SEQ ID NO: 3227544 - DNA, 25 bp, Homo sapien
tttgtagcctgaggtggaggtaaac

SEQ ID NO: 3227545 - DNA, 25 bp, Homo sapien
tcactgaaagggatctagtcccata

SEQ ID NO: 3227546 - DNA, 25 bp, Homo sapien
ggatctagtcccatagacaccaggg

SEQ ID NO: 3227547 - DNA, 25 bp, Homo sapien
gaaagggatctagtcccatagacac

SEQ ID NO: 3227548 - DNA, 25 bp, Homo sapien
catagacaccagggttagtcgtaaa

SEQ ID NO: 3227549 - DNA, 25 bp, Homo sapien
ccttggcatgagcttggactttgga

SEQ ID NO: 3227550 - DNA, 25 bp, Homo sapien
gattgcctgttttgtgtaaaccagc

SEQ ID NO: 3227551 - DNA, 25 bp, Homo sapien
tgacctcactgaagcaaggattgcc

SEQ ID NO: 3227552 - DNA, 25 bp, Homo sapien
tgagagtctccagcttacaaatgga

SEQ ID NO: 3227553 - DNA, 25 bp, Homo sapien
taaattgatctatgattccattttc

SEQ ID NO: 3227554 - DNA, 25 bp, Homo sapien
aataaattgatctatgattccattt

SEQ ID NO: 3227555 - DNA, 25 bp, Homo sapien
ataaattgatctatgattccatttt

SEQ ID NO: 3227556 - DNA, 25 bp, Homo sapien
tatcatcttgtaaatccctgggcat

SEQ ID NO: 3227557 - DNA, 25 bp, Homo sapien
ttatcatcttgtaaatccctgggca

SEQ ID NO: 3227558 - DNA, 25 bp, Homo sapien
tttatcatcttgtaaatccctgggc

SEQ ID NO: 3227559 - DNA, 25 bp, Homo sapien
cttttatcatcttgtaaatccctgg

SEQ ID NO: 3227560 - DNA, 25 bp, Homo sapien
cagcatttttgggttcaatataaat

SEQ ID NO: 3227561 - DNA, 25 bp, Homo sapien
tgtctgtagcctttgcagcattttt

SEQ ID NO: 3227562 - DNA, 25 bp, Homo sapien
tataacagacaattttaaggaattc

SEQ ID NO: 3227563 - DNA, 25 bp, Homo sapien
ttgggttcaatataaatactgcttt

SEQ ID NO: 3227564 - DNA, 25 bp, Homo sapien
cttgatattcctcataaaattccca

SEQ ID NO: 3227565 - DNA, 25 bp, Homo sapien
acaattctgctgatatacatgtcac

SEQ ID NO: 3227566 - DNA, 25 bp, Homo sapien
gagatgaaatctcaacttcgcaagt

SEQ ID NO: 3227567 - DNA, 25 bp, Homo sapien
gtcaccttactttgagctttaacaa

SEQ ID NO: 3227568 - DNA, 25 bp, Homo sapien
acttcgcaagtttggcagctgtcac

SEQ ID NO: 3227569 - DNA, 25 bp, Homo sapien
ttagttgatgcagtgtcgatggtct

SEQ ID NO: 3227570 - DNA, 25 bp, Homo sapien
tcaacacttgttgtctgtaaaagat

SEQ ID NO: 3227571 - DNA, 25 bp, Homo sapien
gacaaaatccctcaacacttgttgt

SEQ ID NO: 3227572 - DNA, 25 bp, Homo sapien
attagttgatgcagtgtcgatggtc

SEQ ID NO: 3227573 - DNA, 25 bp, Homo sapien
tctctgaaccatatcttcttttacc

SEQ ID NO: 3227574 - DNA, 25 bp, Homo sapien
tctgaaccatatcttcttttaccat

SEQ ID NO: 3227575 - DNA, 25 bp, Homo sapien
tggctccccttctctgaaccatatc

SEQ ID NO: 3227576 - DNA, 25 bp, Homo sapien
ccccttctctgaaccatatcttctt

SEQ ID NO: 3227577 - DNA, 25 bp, Homo sapien
atacagacagaacagagttatcttc

SEQ ID NO: 3227578 - DNA, 25 bp, Homo sapien
tcccataggcgtgactgaatcagaa

SEQ ID NO: 3227579 - DNA, 25 bp, Homo sapien
tctgactctgccagaatacagacag

SEQ ID NO: 3227580 - DNA, 25 bp, Homo sapien
taccagtgcataaaaccagtttctc

SEQ ID NO: 3227581 - DNA, 25 bp, Homo sapien
ggatgatctatgaacaagtacgcca

SEQ ID NO: 3227582 - DNA, 25 bp, Homo sapien
gctttggatgatctatgaacaagta

SEQ ID NO: 3227583 - DNA, 25 bp, Homo sapien
tttgctttggatgatctatgaacaa

SEQ ID NO: 3227584 - DNA, 25 bp, Homo sapien
gatgatctatgaacaagtacgccat

SEQ ID NO: 3227585 - DNA, 25 bp, Homo sapien
tcactgatgtcattatgaccagcag

SEQ ID NO: 3227586 - DNA, 25 bp, Homo sapien
gatgttaatgcccagattcatgtgg

SEQ ID NO: 3227587 - DNA, 25 bp, Homo sapien
cagggaaggtgggatgttaatgccc

SEQ ID NO: 3227588 - DNA, 25 bp, Homo sapien
cagattcatgtggttgtcagcagtg

SEQ ID NO: 3227589 - DNA, 25 bp, Homo sapien
taaggcggctgtctgagaacgtctc

SEQ ID NO: 3227590 - DNA, 25 bp, Homo sapien
cagattaggaagcacacaggcacct

SEQ ID NO: 3227591 - DNA, 25 bp, Homo sapien
ggcaccttgcttttcgaatttgcag

SEQ ID NO: 3227592 - DNA, 25 bp, Homo sapien
gaatttgcaggagccacatataagt

SEQ ID NO: 3227593 - DNA, 25 bp, Homo sapien
tcataatgtctgatgtctgctgttt

SEQ ID NO: 3227594 - DNA, 25 bp, Homo sapien
ctgatgtctgctgttttccacagga

SEQ ID NO: 3227595 - DNA, 25 bp, Homo sapien
cattcattggtggaatctgatgaaa

SEQ ID NO: 3227596 - DNA, 25 bp, Homo sapien
acatttggccattcattggtggaat

SEQ ID NO: 3227597 - DNA, 25 bp, Homo sapien
gtatttgcagaatatttctgtaact

SEQ ID NO: 3227598 - DNA, 25 bp, Homo sapien
gcagaatatttctgtaactcaacat

SEQ ID NO: 3227599 - DNA, 25 bp, Homo sapien
atttgcagaatatttctgtaactca

SEQ ID NO: 3227600 - DNA, 25 bp, Homo sapien
ttgcagaatatttctgtaactcaac

SEQ ID NO: 3227601 - DNA, 25 bp, Homo sapien
catgcaaccagatgagggtgtttca

SEQ ID NO: 3227602 - DNA, 25 bp, Homo sapien
gtaacctctcatgcaaccagatgag

SEQ ID NO: 3227603 - DNA, 25 bp, Homo sapien
gggagtaacttgctcacacttccag

SEQ ID NO: 3227604 - DNA, 25 bp, Homo sapien
aggagaatcgatttgctatctggta

SEQ ID NO: 3227605 - DNA, 25 bp, Homo sapien
ccctaagactgtggctggaacagct

SEQ ID NO: 3227606 - DNA, 25 bp, Homo sapien
tggtgattgggaaaaagctccctaa

SEQ ID NO: 3227607 - DNA, 25 bp, Homo sapien
ccacaggagtaatgctgctaggctt

SEQ ID NO: 3227608 - DNA, 25 bp, Homo sapien
gctaggcttcctgcataagaatcca

SEQ ID NO: 3227609 - DNA, 25 bp, Homo sapien
gaaagagcataatctgtaggcaggt

SEQ ID NO: 3227610 - DNA, 25 bp, Homo sapien
tggacgagtgtcctctggctgtcat

SEQ ID NO: 3227611 - DNA, 25 bp, Homo sapien
aattgcatggccaatatatctttct

SEQ ID NO: 3227612 - DNA, 25 bp, Homo sapien
tgatgttggaaaaccaatggacgag

SEQ ID NO: 3227613 - DNA, 25 bp, Homo sapien
ctgtacctgatagcttatgattatg

SEQ ID NO: 3227614 - DNA, 25 bp, Homo sapien
ttcgcattactatgtctgtacctga

SEQ ID NO: 3227615 - DNA, 25 bp, Homo sapien
tccagtgcagcaattcagattttct

SEQ ID NO: 3227616 - DNA, 25 bp, Homo sapien
ttcttggaaagtagtattcgcagat

SEQ ID NO: 3227617 - DNA, 25 bp, Homo sapien
gcagaatcacgttgtattcattgtt

SEQ ID NO: 3227618 - DNA, 25 bp, Homo sapien
cacgttgtattcattgtttaactgt

SEQ ID NO: 3227619 - DNA, 25 bp, Homo sapien
ggaaaagcagaatcacgttgtattc

SEQ ID NO: 3227620 - DNA, 25 bp, Homo sapien
tctatgtaggatttgaagcagtcat

SEQ ID NO: 3227621 - DNA, 25 bp, Homo sapien
acgggtgattgcctacaatcagcat

SEQ ID NO: 3227622 - DNA, 25 bp, Homo sapien
gcagggtacgggtgattgcctacaa

SEQ ID NO: 3227623 - DNA, 25 bp, Homo sapien
gatttgtcaccaatgagattgtggg

SEQ ID NO: 3227624 - DNA, 25 bp, Homo sapien
tgagatttgtcaccaatgagattgt

SEQ ID NO: 3227625 - DNA, 25 bp, Homo sapien
aggtgccaacctgcccatggttggg

SEQ ID NO: 3227626 - DNA, 25 bp, Homo sapien
ctgcccatggttgggcggtactttc

SEQ ID NO: 3227627 - DNA, 25 bp, Homo sapien
tgatcaaggtgccaacctgcccatg

SEQ ID NO: 3227628 - DNA, 25 bp, Homo sapien
caacctgcccatggttgggcggtac

SEQ ID NO: 3227629 - DNA, 25 bp, Homo sapien
tgaatcattcaaggaaggaccttga

SEQ ID NO: 3227630 - DNA, 25 bp, Homo sapien
ccttgactgaacaatatatctgcaa

SEQ ID NO: 3227631 - DNA, 25 bp, Homo sapien
gaatcattcaaggaaggaccttgac

SEQ ID NO: 3227632 - DNA, 25 bp, Homo sapien
ggaaggaccttgactgaacaatata

SEQ ID NO: 3227633 - DNA, 25 bp, Homo sapien
ggcatctcaccacttcaatataacc

SEQ ID NO: 3227634 - DNA, 25 bp, Homo sapien
tctcaccacttcaatataaccttta

SEQ ID NO: 3227635 - DNA, 25 bp, Homo sapien
caccacttcaatataacctttaatg

SEQ ID NO: 3227636 - DNA, 25 bp, Homo sapien
cacttcaatataacctttaatgtaa

SEQ ID NO: 3227637 - DNA, 25 bp, Homo sapien
tcgttgagttcacagaatgtctctt

SEQ ID NO: 3227638 - DNA, 25 bp, Homo sapien
aatcgttgagttcacagaatgtctc

SEQ ID NO: 3227639 - DNA, 25 bp, Homo sapien
cgttgagttcacagaatgtctcttt

SEQ ID NO: 3227640 - DNA, 25 bp, Homo sapien
ttaatcgttgagttcacagaatgtc

SEQ ID NO: 3227641 - DNA, 25 bp, Homo sapien
ttttttggacaattggttctcttca

SEQ ID NO: 3227642 - DNA, 25 bp, Homo sapien
tttttggacaattggttctcttcat

SEQ ID NO: 3227643 - DNA, 25 bp, Homo sapien
tatacagagtttgccttgtgtgttg

SEQ ID NO: 3227644 - DNA, 25 bp, Homo sapien
ccagggtcaactgccggaatctgac

SEQ ID NO: 3227645 - DNA, 25 bp, Homo sapien
ttgggaacgcctgcagtgcttgctg

SEQ ID NO: 3227646 - DNA, 25 bp, Homo sapien
tatgggaacgacatgacagacagct

SEQ ID NO: 3227647 - DNA, 25 bp, Homo sapien
ctgctggtgaatgtttgcaagtctc

SEQ ID NO: 3227648 - DNA, 25 bp, Homo sapien
gttgattgctctgaaggtactgctg

SEQ ID NO: 3227649 - DNA, 25 bp, Homo sapien
tactgctggtgaatgtttgcaagtc

SEQ ID NO: 3227650 - DNA, 25 bp, Homo sapien
aaggtactgctggtgaatgtttgca

SEQ ID NO: 3227651 - DNA, 25 bp, Homo sapien
gatgccattttcagcatagggtgaa

SEQ ID NO: 3227652 - DNA, 25 bp, Homo sapien
tgccattttcagcatagggtgaagc

SEQ ID NO: 3227653 - DNA, 25 bp, Homo sapien
atgccattttcagcatagggtgaag

SEQ ID NO: 3227654 - DNA, 25 bp, Homo sapien
tgccattcactgaagaagtgaactg

SEQ ID NO: 3227655 - DNA, 25 bp, Homo sapien
tatagtagattagttatgtccacag

SEQ ID NO: 3227656 - DNA, 25 bp, Homo sapien
tgatgaggagagaaagcgttcagca

SEQ ID NO: 3227657 - DNA, 25 bp, Homo sapien
cacagataacatgtggcatgctgca

SEQ ID NO: 3227658 - DNA, 25 bp, Homo sapien
tccacagtagaatagttaaccccag

SEQ ID NO: 3227659 - DNA, 25 bp, Homo sapien
gactcccgttttgaccatttgggca

SEQ ID NO: 3227660 - DNA, 25 bp, Homo sapien
ccgttttgaccatttgggcaaagct

SEQ ID NO: 3227661 - DNA, 25 bp, Homo sapien
tctggactcccgttttgaccatttg

SEQ ID NO: 3227662 - DNA, 25 bp, Homo sapien
ttttgaccatttgggcaaagcttct

SEQ ID NO: 3227663 - DNA, 25 bp, Homo sapien
ttgactggtgagtttagtgggtcct

SEQ ID NO: 3227664 - DNA, 25 bp, Homo sapien
agtgtgggataaggcgactccagtc

SEQ ID NO: 3227665 - DNA, 25 bp, Homo sapien
acagacaacgggcaatttagaacca

SEQ ID NO: 3227666 - DNA, 25 bp, Homo sapien
tgcacattgcatcttttcaccacag

SEQ ID NO: 3227667 - DNA, 25 bp, Homo sapien
cttcaccggtgataatgatcctgtg

SEQ ID NO: 3227668 - DNA, 25 bp, Homo sapien
tcatgactatatggcaggagggtgt

SEQ ID NO: 3227669 - DNA, 25 bp, Homo sapien
tttttggggattgcacattcttcac

SEQ ID NO: 3227670 - DNA, 25 bp, Homo sapien
tccatgtgtaaggccttgattctgc

SEQ ID NO: 3227671 - DNA, 25 bp, Homo sapien
tgctttggtgtggaaatctgaacca

SEQ ID NO: 3227672 - DNA, 25 bp, Homo sapien
atgctttggtgtggaaatctgaacc

SEQ ID NO: 3227673 - DNA, 25 bp, Homo sapien
catggatattaaagtaacccttttg

SEQ ID NO: 3227674 - DNA, 25 bp, Homo sapien
aagcctctcctttggcagatgcttt

SEQ ID NO: 3227675 - DNA, 25 bp, Homo sapien
cccttttgatcacgtgattgttgaa

SEQ ID NO: 3227676 - DNA, 25 bp, Homo sapien
cagtgcctttgagtacatggatatt

SEQ ID NO: 3227677 - DNA, 25 bp, Homo sapien
catcatatgggcaggattctactaa

SEQ ID NO: 3227678 - DNA, 25 bp, Homo sapien
tgggcaggattctactaaaggatcc

SEQ ID NO: 3227679 - DNA, 25 bp, Homo sapien
catcccttgttcatcatatgggcag

SEQ ID NO: 3227680 - DNA, 25 bp, Homo sapien
gattctactaaaggatcctgggtca

SEQ ID NO: 3227681 - DNA, 25 bp, Homo sapien
caattgtgtttgtggatccagtggc

SEQ ID NO: 3227682 - DNA, 25 bp, Homo sapien
agtttgtgactgagctctgccaaca

SEQ ID NO: 3227683 - DNA, 25 bp, Homo sapien
atgcaattgaacacagagttagccc

SEQ ID NO: 3227684 - DNA, 25 bp, Homo sapien
gatttccagtgctaatgcaattgaa

SEQ ID NO: 3227685 - DNA, 25 bp, Homo sapien
gcagtgtcatttgggcagaatgcac

SEQ ID NO: 3227686 - DNA, 25 bp, Homo sapien
tgaatctgaacctggcttcactgga

SEQ ID NO: 3227687 - DNA, 25 bp, Homo sapien
gggactgtctcagtgtcagcagtgt

SEQ ID NO: 3227688 - DNA, 25 bp, Homo sapien
gaacctggcttcactggacctcatc

SEQ ID NO: 3227689 - DNA, 25 bp, Homo sapien
caagtaagcaggggtcctttccaag

SEQ ID NO: 3227690 - DNA, 25 bp, Homo sapien
agcaggggtcctttccaagcctggc

SEQ ID NO: 3227691 - DNA, 25 bp, Homo sapien
agcctggctgctgaaggagcctcac

SEQ ID NO: 3227692 - DNA, 25 bp, Homo sapien
caagcctggctgctgaaggagcctc

SEQ ID NO: 3227693 - DNA, 25 bp, Homo sapien
gatttcagagtccatagttggaaaa

SEQ ID NO: 3227694 - DNA, 25 bp, Homo sapien
agatttcagagtccatagttggaaa

SEQ ID NO: 3227695 - DNA, 25 bp, Homo sapien
gtgggatctgattcttagtactagt

SEQ ID NO: 3227696 - DNA, 25 bp, Homo sapien
ttctgatcatctcgctcttcttcta

SEQ ID NO: 3227697 - DNA, 25 bp, Homo sapien
ttaggttgctcttcgctctgctggt

SEQ ID NO: 3227698 - DNA, 25 bp, Homo sapien
tctggacctgatatccacttcctgt

SEQ ID NO: 3227699 - DNA, 25 bp, Homo sapien
gcaggtagtggagcataagcctccg

SEQ ID NO: 3227700 - DNA, 25 bp, Homo sapien
aagcctccgtagaccatggaggaga

SEQ ID NO: 3227701 - DNA, 25 bp, Homo sapien
gagcataagcctccgtagaccatgg

SEQ ID NO: 3227702 - DNA, 25 bp, Homo sapien
tagtggagcataagcctccgtagac

SEQ ID NO: 3227703 - DNA, 25 bp, Homo sapien
cacatccaatgatgtctccagaaaa

SEQ ID NO: 3227704 - DNA, 25 bp, Homo sapien
gcaaggtagaatatagctgaggtca

SEQ ID NO: 3227705 - DNA, 25 bp, Homo sapien
gaatatagctgaggtcaggttcacc

SEQ ID NO: 3227706 - DNA, 25 bp, Homo sapien
ccttgtccttgtgcaaggtagaata

SEQ ID NO: 3227707 - DNA, 25 bp, Homo sapien
ccttgtcactgcgagggctacctgt

SEQ ID NO: 3227708 - DNA, 25 bp, Homo sapien
tccgcgatggccagaaaacgtggga

SEQ ID NO: 3227709 - DNA, 25 bp, Homo sapien
gatctggagctcacaactccggaag

SEQ ID NO: 3227710 - DNA, 25 bp, Homo sapien
cgtggagacccaaggcggctttatt

SEQ ID NO: 3227711 - DNA, 25 bp, Homo sapien
ggctgcaggcggttgtcccaggaat

SEQ ID NO: 3227712 - DNA, 25 bp, Homo sapien
ccaaagggcgccaggccagagattc

SEQ ID NO: 3227713 - DNA, 25 bp, Homo sapien
tcctggggaaaagtcgccggctgca

SEQ ID NO: 3227714 - DNA, 25 bp, Homo sapien
attcctggggaaaagtcgccggctg

SEQ ID NO: 3227715 - DNA, 25 bp, Homo sapien
ctgggaccgacagggatgccagcac

SEQ ID NO: 3227716 - DNA, 25 bp, Homo sapien
ggatgccagcaccccgtcatctcac

SEQ ID NO: 3227717 - DNA, 25 bp, Homo sapien
tgggaccgacagggatgccagcacc

SEQ ID NO: 3227718 - DNA, 25 bp, Homo sapien
gctatataaacagacccggacgcga

SEQ ID NO: 3227719 - DNA, 25 bp, Homo sapien
gaccatcacgagcacctaaagggca

SEQ ID NO: 3227720 - DNA, 25 bp, Homo sapien
tcccggcctccagacgctatataaa

SEQ ID NO: 3227721 - DNA, 25 bp, Homo sapien
tcttttctggcaactgaacgaaccc

SEQ ID NO: 3227722 - DNA, 25 bp, Homo sapien
cttcccccggtgacgctctcacgct

SEQ ID NO: 3227723 - DNA, 25 bp, Homo sapien
cccccggtgacgctctcacgctccg

SEQ ID NO: 3227724 - DNA, 25 bp, Homo sapien
tcccccggtgacgctctcacgctcc

SEQ ID NO: 3227725 - DNA, 25 bp, Homo sapien
ttcccccggtgacgctctcacgctc

SEQ ID NO: 3227726 - DNA, 25 bp, Homo sapien
ttcctcgcgcggtcctcggaatgcg

SEQ ID NO: 3227727 - DNA, 25 bp, Homo sapien
ccaggaagtggtggcgccgcgacgt

SEQ ID NO: 3227728 - DNA, 25 bp, Homo sapien
gaggctacagatgtcagcggagtcc

SEQ ID NO: 3227729 - DNA, 25 bp, Homo sapien
agaagtgagcgctctgcccatcaat

SEQ ID NO: 3227730 - DNA, 25 bp, Homo sapien
aggtccacgaagtgccggaccctcg

SEQ ID NO: 3227731 - DNA, 25 bp, Homo sapien
tccgggcagaactccggttcggatg

SEQ ID NO: 3227732 - DNA, 25 bp, Homo sapien
ttcggatggaggtccacgaagtgcc

SEQ ID NO: 3227733 - DNA, 25 bp, Homo sapien
cgcgctgtctacacgctcctctgca

SEQ ID NO: 3227734 - DNA, 25 bp, Homo sapien
ctgtgctccccttgggataacccac

SEQ ID NO: 3227735 - DNA, 25 bp, Homo sapien
ttttcctgtgctccccttgggataa

SEQ ID NO: 3227736 - DNA, 25 bp, Homo sapien
cttttcctgtgctccccttgggata

SEQ ID NO: 3227737 - DNA, 25 bp, Homo sapien
ttcctgtgctccccttgggataacc

SEQ ID NO: 3227738 - DNA, 25 bp, Homo sapien
tgtcaggaagaaaagtgtccgcttt

SEQ ID NO: 3227739 - DNA, 25 bp, Homo sapien
aagtgtccgcttttgacattggaac

SEQ ID NO: 3227740 - DNA, 25 bp, Homo sapien
ggaagaaaagtgtccgcttttgaca

SEQ ID NO: 3227741 - DNA, 25 bp, Homo sapien
tggctcaaccccttcaagtgtcagg

SEQ ID NO: 3227742 - DNA, 25 bp, Homo sapien
cagaacaaacgcacagttactttcc

SEQ ID NO: 3227743 - DNA, 25 bp, Homo sapien
gcagaacaaacgcacagttactttc

SEQ ID NO: 3227744 - DNA, 25 bp, Homo sapien
tgcagaacaaacgcacagttacttt

SEQ ID NO: 3227745 - DNA, 25 bp, Homo sapien
ctgcagaacaaacgcacagttactt

SEQ ID NO: 3227746 - DNA, 25 bp, Homo sapien
gcaggattcagagggagttggccat

SEQ ID NO: 3227747 - DNA, 25 bp, Homo sapien
tgcaggattcagagggagttggcca

SEQ ID NO: 3227748 - DNA, 25 bp, Homo sapien
tttcctctcccctgcgaagcaccag

SEQ ID NO: 3227749 - DNA, 25 bp, Homo sapien
cctctcccctgcgaagcaccagaaa

SEQ ID NO: 3227750 - DNA, 25 bp, Homo sapien
caaacttttgttgcgtgctcagcac

SEQ ID NO: 3227751 - DNA, 25 bp, Homo sapien
aaggagatggctccctgactgcttc

SEQ ID NO: 3227752 - DNA, 25 bp, Homo sapien
gccaccgtgaacaacaaagtcatct

SEQ ID NO: 3227753 - DNA, 25 bp, Homo sapien
gagaccagagaccaacgttaggcag

SEQ ID NO: 3227754 - DNA, 25 bp, Homo sapien
taaagccaccgtgaacaacaaagtc

SEQ ID NO: 3227755 - DNA, 25 bp, Homo sapien
gaccagagaccaacgttaggcagga

SEQ ID NO: 3227756 - DNA, 25 bp, Homo sapien
ctccgctgacttcaccaggtgctta

SEQ ID NO: 3227757 - DNA, 25 bp, Homo sapien
ccgctgacttcaccaggtgcttatc

SEQ ID NO: 3227758 - DNA, 25 bp, Homo sapien
ggctccgctgacttcaccaggtgct

SEQ ID NO: 3227759 - DNA, 25 bp, Homo sapien
gggctccgctgacttcaccaggtgc

SEQ ID NO: 3227760 - DNA, 25 bp, Homo sapien
catgtcacgatgttactggctgcaa

SEQ ID NO: 3227761 - DNA, 25 bp, Homo sapien
caagcgactgtgaaacggaatgaac

SEQ ID NO: 3227762 - DNA, 25 bp, Homo sapien
tgtttccaatatgacagcaagctgt

SEQ ID NO: 3227763 - DNA, 25 bp, Homo sapien
taataactctgcctgtgtgccccat

SEQ ID NO: 3227764 - DNA, 25 bp, Homo sapien
aattaattagcgctttatgttagct

SEQ ID NO: 3227765 - DNA, 25 bp, Homo sapien
cataatagcatattgactactaaag

SEQ ID NO: 3227766 - DNA, 25 bp, Homo sapien
gctataccagcaaatacttcagatg

SEQ ID NO: 3227767 - DNA, 25 bp, Homo sapien
aaaagtttcacatccaaagtgtcca

SEQ ID NO: 3227768 - DNA, 25 bp, Homo sapien
tggggagaagtatagtagtaaatgt

SEQ ID NO: 3227769 - DNA, 25 bp, Homo sapien
ggagaagtatagtagtaaatgtgtt

SEQ ID NO: 3227770 - DNA, 25 bp, Homo sapien
gggagaagtatagtagtaaatgtgt

SEQ ID NO: 3227771 - DNA, 25 bp, Homo sapien
cttggggagaagtatagtagtaaat

SEQ ID NO: 3227772 - DNA, 25 bp, Homo sapien
catgtgacttgtttgactagcctca

SEQ ID NO: 3227773 - DNA, 25 bp, Homo sapien
ttgactagcctcagtacttattgct

SEQ ID NO: 3227774 - DNA, 25 bp, Homo sapien
tgacttgtttgactagcctcagtac

SEQ ID NO: 3227775 - DNA, 25 bp, Homo sapien
catttgggcatgtgacttgtttgac

SEQ ID NO: 3227776 - DNA, 25 bp, Homo sapien
gatttcaattttgcagatcccaaac

SEQ ID NO: 3227777 - DNA, 25 bp, Homo sapien
taaaactgttatatcgatcctcttt

SEQ ID NO: 3227778 - DNA, 25 bp, Homo sapien
aactgttatatcgatcctctttggt

SEQ ID NO: 3227779 - DNA, 25 bp, Homo sapien
caattttgcagatcccaaaccataa

SEQ ID NO: 3227780 - DNA, 25 bp, Homo sapien
cagccatttagatcaatgctgacct

SEQ ID NO: 3227781 - DNA, 25 bp, Homo sapien
atttagatcaatgctgacctcacca

SEQ ID NO: 3227782 - DNA, 25 bp, Homo sapien
tcaatgctgacctcaccagtatcca

SEQ ID NO: 3227783 - DNA, 25 bp, Homo sapien
catccagccatttagatcaatgctg

SEQ ID NO: 3227784 - DNA, 25 bp, Homo sapien
gataaattcctgatcaaccagtcag

SEQ ID NO: 3227785 - DNA, 25 bp, Homo sapien
cagatatcccaaaaagtgtcctata

SEQ ID NO: 3227786 - DNA, 25 bp, Homo sapien
taggacatgatacgagcagtttcat

SEQ ID NO: 3227787 - DNA, 25 bp, Homo sapien
cccttctgtgtctagcaatctgtag

SEQ ID NO: 3227788 - DNA, 25 bp, Homo sapien
gaaagtaaatatccctggccggcac

SEQ ID NO: 3227789 - DNA, 25 bp, Homo sapien
tgggattccgagtaacacaagtgcc

SEQ ID NO: 3227790 - DNA, 25 bp, Homo sapien
cagcatgccagctccaaatgtggga

SEQ ID NO: 3227791 - DNA, 25 bp, Homo sapien
tatattttaagccagcgagccggtg

SEQ ID NO: 3227792 - DNA, 25 bp, Homo sapien
aaaggctacccacactcctaagcag

SEQ ID NO: 3227793 - DNA, 25 bp, Homo sapien
gcaaaagttagcagcacaaatcaca

SEQ ID NO: 3227794 - DNA, 25 bp, Homo sapien
tgcatttgtgcactatgagagaaaa

SEQ ID NO: 3227795 - DNA, 25 bp, Homo sapien
ccatcacgggtgaggaagcttttct

SEQ ID NO: 3227796 - DNA, 25 bp, Homo sapien
gaaagtgttctgtatgatacggtac

SEQ ID NO: 3227797 - DNA, 25 bp, Homo sapien
tacggtacgggtgaatatgtgccat

SEQ ID NO: 3227798 - DNA, 25 bp, Homo sapien
tcaatggtggagtgcaggagatttt

SEQ ID NO: 3227799 - DNA, 25 bp, Homo sapien
gacagtaaatagatccgtggttccc

SEQ ID NO: 3227800 - DNA, 25 bp, Homo sapien
caaccaggagatttataatatgcaa

SEQ ID NO: 3227801 - DNA, 25 bp, Homo sapien
acatgaatatgttactatacactaa

SEQ ID NO: 3227802 - DNA, 25 bp, Homo sapien
cacatgcttacatgtacatgaatat

SEQ ID NO: 3227803 - DNA, 25 bp, Homo sapien
tatacactaacattcaaccaggaga

SEQ ID NO: 3227804 - DNA, 25 bp, Homo sapien
tttctcttatggctcttttcactgg

SEQ ID NO: 3227805 - DNA, 25 bp, Homo sapien
cttatggctcttttcactggctccc

SEQ ID NO: 3227806 - DNA, 25 bp, Homo sapien
cttaagtgctgtttcccatcttttc

SEQ ID NO: 3227807 - DNA, 25 bp, Homo sapien
tctcttatggctcttttcactggct

SEQ ID NO: 3227808 - DNA, 25 bp, Homo sapien
gcttaggccatagttcagccacggc

SEQ ID NO: 3227809 - DNA, 25 bp, Homo sapien
ctggcttaggccatagttcagccac

SEQ ID NO: 3227810 - DNA, 25 bp, Homo sapien
taggccatagttcagccacggcttc

SEQ ID NO: 3227811 - DNA, 25 bp, Homo sapien
ggccatagttcagccacggcttcag

SEQ ID NO: 3227812 - DNA, 25 bp, Homo sapien
tctgcttccaaggtgatctttgtag

SEQ ID NO: 3227813 - DNA, 25 bp, Homo sapien
ccttgcaaacatacaatccagtaat

SEQ ID NO: 3227814 - DNA, 25 bp, Homo sapien
ctttgtagtctacttgtaaaatcat

SEQ ID NO: 3227815 - DNA, 25 bp, Homo sapien
cccacaggagcctcttcaagtagta

SEQ ID NO: 3227816 - DNA, 25 bp, Homo sapien
cactgtgttagcacaactgactttt

SEQ ID NO: 3227817 - DNA, 25 bp, Homo sapien
agctccagggatctgaaactgtctg

SEQ ID NO: 3227818 - DNA, 25 bp, Homo sapien
ccatcactcttcacatctgcagctc

SEQ ID NO: 3227819 - DNA, 25 bp, Homo sapien
cagcctctcttcaccatcactcttc

SEQ ID NO: 3227820 - DNA, 25 bp, Homo sapien
aaattcaaattcagacagcctctct

SEQ ID NO: 3227821 - DNA, 25 bp, Homo sapien
tatgtggtggtatatccaggaggct

SEQ ID NO: 3227822 - DNA, 25 bp, Homo sapien
gtatgtggtggtatatccaggaggc

SEQ ID NO: 3227823 - DNA, 25 bp, Homo sapien
cagccaactggctgtagggttgggt

SEQ ID NO: 3227824 - DNA, 25 bp, Homo sapien
ccaactggctgtagggttgggtgca

SEQ ID NO: 3227825 - DNA, 25 bp, Homo sapien
tcagaaggtgtgaaactgtttcacc

SEQ ID NO: 3227826 - DNA, 25 bp, Homo sapien
tggaagactctttgatcagaaggtg

SEQ ID NO: 3227827 - DNA, 25 bp, Homo sapien
gctgattccataattctatttcaac

SEQ ID NO: 3227828 - DNA, 25 bp, Homo sapien
tatgtaaccattctttacttgacca

SEQ ID NO: 3227829 - DNA, 25 bp, Homo sapien
ttcagtgttagctaatgaagggcaa

SEQ ID NO: 3227830 - DNA, 25 bp, Homo sapien
tcagtgttagctaatgaagggcaag

SEQ ID NO: 3227831 - DNA, 25 bp, Homo sapien
cagtgttagctaatgaagggcaaga

SEQ ID NO: 3227832 - DNA, 25 bp, Homo sapien
gttgacttcttatgagtcagatagg

SEQ ID NO: 3227833 - DNA, 25 bp, Homo sapien
cccaaagacattccctattctaaag

SEQ ID NO: 3227834 - DNA, 25 bp, Homo sapien
gagagaatggattgtacacctgctc

SEQ ID NO: 3227835 - DNA, 25 bp, Homo sapien
tacacctgctctttacctgttgact

SEQ ID NO: 3227836 - DNA, 25 bp, Homo sapien
gaaataatgctcacacaatgggtct

SEQ ID NO: 3227837 - DNA, 25 bp, Homo sapien
ggtaacctagctgaaccatcccaga

SEQ ID NO: 3227838 - DNA, 25 bp, Homo sapien
cagagaattattgcaccacagtgga

SEQ ID NO: 3227839 - DNA, 25 bp, Homo sapien
tagtccgtagcgaagtcaagtcaac

SEQ ID NO: 3227840 - DNA, 25 bp, Homo sapien
taattggcagccaattcactgcttt

SEQ ID NO: 3227841 - DNA, 25 bp, Homo sapien
gagccataatatctgattcaaaaag

SEQ ID NO: 3227842 - DNA, 25 bp, Homo sapien
gatatctgagtcatgaattgcgatg

SEQ ID NO: 3227843 - DNA, 25 bp, Homo sapien
agccaattcactgctttccactgaa

SEQ ID NO: 3227844 - DNA, 25 bp, Homo sapien
agtggccgctccaacagtctgggtg

SEQ ID NO: 3227845 - DNA, 25 bp, Homo sapien
tattagcaatgtttgagtggccgct

SEQ ID NO: 3227846 - DNA, 25 bp, Homo sapien
tctgggtgtggtctgaaatcactga

SEQ ID NO: 3227847 - DNA, 25 bp, Homo sapien
tcactgatgtgctacagttggctgt

SEQ ID NO: 3227848 - DNA, 25 bp, Homo sapien
caagacattgcaggacagaatcatg

SEQ ID NO: 3227849 - DNA, 25 bp, Homo sapien
cagcctgtgactagacatgagagga

SEQ ID NO: 3227850 - DNA, 25 bp, Homo sapien
gaattttgcaggagtgcttagcagc

SEQ ID NO: 3227851 - DNA, 25 bp, Homo sapien
ggaaaatgcagaggcataccaggca

SEQ ID NO: 3227852 - DNA, 25 bp, Homo sapien
tgaaatacggtaatatgcatatata

SEQ ID NO: 3227853 - DNA, 25 bp, Homo sapien
gtgaaatacggtaatatgcatatat

SEQ ID NO: 3227854 - DNA, 25 bp, Homo sapien
gtgttccacttcctgctccaagcat

SEQ ID NO: 3227855 - DNA, 25 bp, Homo sapien
ttgtgttccacttcctgctccaagc

SEQ ID NO: 3227856 - DNA, 25 bp, Homo sapien
tctcccacattcatcttgtgttcca

SEQ ID NO: 3227857 - DNA, 25 bp, Homo sapien
cttctcccacattcatcttgtgttc

SEQ ID NO: 3227858 - DNA, 25 bp, Homo sapien
gaagcatggagtaaaattgctgctg

SEQ ID NO: 3227859 - DNA, 25 bp, Homo sapien
gctgctgattcaggtattcgaggat

SEQ ID NO: 3227860 - DNA, 25 bp, Homo sapien
tcagccagtagatggagaagtttat

SEQ ID NO: 3227861 - DNA, 25 bp, Homo sapien
gattcaggtattcgaggattgtttt

SEQ ID NO: 3227862 - DNA, 25 bp, Homo sapien
tcaggaaaccagaggagaaaaggga

SEQ ID NO: 3227863 - DNA, 25 bp, Homo sapien
actgcccagggaccaacttcatcct

SEQ ID NO: 3227864 - DNA, 25 bp, Homo sapien
ctgcccagggaccaacttcatcctg

SEQ ID NO: 3227865 - DNA, 25 bp, Homo sapien
tactgcccagggaccaacttcatcc

SEQ ID NO: 3227866 - DNA, 25 bp, Homo sapien
tgcctgccagttttcagtactgact

SEQ ID NO: 3227867 - DNA, 25 bp, Homo sapien
ggtattaccgaagtatgcctgccag

SEQ ID NO: 3227868 - DNA, 25 bp, Homo sapien
tgactacgtgagaggaagcatattc

SEQ ID NO: 3227869 - DNA, 25 bp, Homo sapien
tgcctggagaatggtacttgcagtc

SEQ ID NO: 3227870 - DNA, 25 bp, Homo sapien
ttttcagtataatggtttgttgctc

SEQ ID NO: 3227871 - DNA, 25 bp, Homo sapien
gaaaaatcgtacaagctgctggaat

SEQ ID NO: 3227872 - DNA, 25 bp, Homo sapien
tgcatagtgattatacgctgaatag

SEQ ID NO: 3227873 - DNA, 25 bp, Homo sapien
tagtttgaaaaatcgtacaagctgc

SEQ ID NO: 3227874 - DNA, 25 bp, Homo sapien
cttgcatagtaattccccaaggtgg

SEQ ID NO: 3227875 - DNA, 25 bp, Homo sapien
tgcatagtaattccccaaggtgggt

SEQ ID NO: 3227876 - DNA, 25 bp, Homo sapien
taatgatacttgcatagtaattccc

SEQ ID NO: 3227877 - DNA, 25 bp, Homo sapien
gatacttgcatagtaattccccaag

SEQ ID NO: 3227878 - DNA, 25 bp, Homo sapien
catctgtccatgaatagaattgccc

SEQ ID NO: 3227879 - DNA, 25 bp, Homo sapien
tcatagtcatgccagtcctttcttc

SEQ ID NO: 3227880 - DNA, 25 bp, Homo sapien
tgagcgcatagcctctttctgaatg

SEQ ID NO: 3227881 - DNA, 25 bp, Homo sapien
gtccatgaatagaattgcccatctc

SEQ ID NO: 3227882 - DNA, 25 bp, Homo sapien
agacactgctgcgagtgaaatagca

SEQ ID NO: 3227883 - DNA, 25 bp, Homo sapien
ctttggcgtacactgagcttcatac

SEQ ID NO: 3227884 - DNA, 25 bp, Homo sapien
tgaaatagcactttggcgtacactg

SEQ ID NO: 3227885 - DNA, 25 bp, Homo sapien
cactgctgcgagtgaaatagcactt

SEQ ID NO: 3227886 - DNA, 25 bp, Homo sapien
attgccaaccttagaaccccagctg

SEQ ID NO: 3227887 - DNA, 25 bp, Homo sapien
ggcttgctgtacgtcccgccagtgt

SEQ ID NO: 3227888 - DNA, 25 bp, Homo sapien
gcttttccaactattgccaacctta

SEQ ID NO: 3227889 - DNA, 25 bp, Homo sapien
ttgattccgtttaactgcctgattg

SEQ ID NO: 3227890 - DNA, 25 bp, Homo sapien
gatgtctttaccaaactgtagctgc

SEQ ID NO: 3227891 - DNA, 25 bp, Homo sapien
gtctttaccaaactgtagctgctcc

SEQ ID NO: 3227892 - DNA, 25 bp, Homo sapien
tgtctttaccaaactgtagctgctc

SEQ ID NO: 3227893 - DNA, 25 bp, Homo sapien
tctttaccaaactgtagctgctcca

SEQ ID NO: 3227894 - DNA, 25 bp, Homo sapien
tctgagtgcccgtctagtattcctc

SEQ ID NO: 3227895 - DNA, 25 bp, Homo sapien
cacgatgctcctgaagttctgtttc

SEQ ID NO: 3227896 - DNA, 25 bp, Homo sapien
gttaggggtgtcttcacgatgctcc

SEQ ID NO: 3227897 - DNA, 25 bp, Homo sapien
tacaggaggtgaatattctgttgct

SEQ ID NO: 3227898 - DNA, 25 bp, Homo sapien
gtcatgacattcttacgacaatcca

SEQ ID NO: 3227899 - DNA, 25 bp, Homo sapien
tcccctggctttacatcagtcatga

SEQ ID NO: 3227900 - DNA, 25 bp, Homo sapien
agattcccctggctttacatcagtc

SEQ ID NO: 3227901 - DNA, 25 bp, Homo sapien
tggctttacatcagtcatgacattc

SEQ ID NO: 3227902 - DNA, 25 bp, Homo sapien
ctcagggcaaatctcccaaatgctt

SEQ ID NO: 3227903 - DNA, 25 bp, Homo sapien
agcttgcgatgatatggtaaacccc

SEQ ID NO: 3227904 - DNA, 25 bp, Homo sapien
gaacaaacaagctacacgtatgccc

SEQ ID NO: 3227905 - DNA, 25 bp, Homo sapien
agccttcctctcagcttgcgatgat

SEQ ID NO: 3227906 - DNA, 25 bp, Homo sapien
cttcagctgcttctaagaggtaaac

SEQ ID NO: 3227907 - DNA, 25 bp, Homo sapien
caccttcagctgcttctaagaggta

SEQ ID NO: 3227908 - DNA, 25 bp, Homo sapien
tgcaccttcagctgcttctaagagg

SEQ ID NO: 3227909 - DNA, 25 bp, Homo sapien
ccttcagctgcttctaagaggtaaa

SEQ ID NO: 3227910 - DNA, 25 bp, Homo sapien
ttccagtttaaagctgtatcttctg

SEQ ID NO: 3227911 - DNA, 25 bp, Homo sapien
ttctggataaactctgttaatttca

SEQ ID NO: 3227912 - DNA, 25 bp, Homo sapien
tctggataaactctgttaatttcaa

SEQ ID NO: 3227913 - DNA, 25 bp, Homo sapien
acttccagtttaaagctgtatcttc

SEQ ID NO: 3227914 - DNA, 25 bp, Homo sapien
cctgagtcctttagtgacatttctc

SEQ ID NO: 3227915 - DNA, 25 bp, Homo sapien
tccaaaatcattagcccataacctg

SEQ ID NO: 3227916 - DNA, 25 bp, Homo sapien
gaaggcccatgcactgtcttggacg

SEQ ID NO: 3227917 - DNA, 25 bp, Homo sapien
gacgttgaatttatgccttcttctg

SEQ ID NO: 3227918 - DNA, 25 bp, Homo sapien
agctgtgcagagcttgagggaacct

SEQ ID NO: 3227919 - DNA, 25 bp, Homo sapien
tagctgtgcagagcttgagggaacc

SEQ ID NO: 3227920 - DNA, 25 bp, Homo sapien
agagcttgagggaacctgagttcat

SEQ ID NO: 3227921 - DNA, 25 bp, Homo sapien
gtgcagagcttgagggaacctgagt

SEQ ID NO: 3227922 - DNA, 25 bp, Homo sapien
gaaaacaaaatgagattatcatctc

SEQ ID NO: 3227923 - DNA, 25 bp, Homo sapien
gagattatcatctctataaaagcca

SEQ ID NO: 3227924 - DNA, 25 bp, Homo sapien
caaaatgagattatcatctctataa

SEQ ID NO: 3227925 - DNA, 25 bp, Homo sapien
agattatcatctctataaaagccat

SEQ ID NO: 3227926 - DNA, 25 bp, Homo sapien
gacctctctagagcaatattgttgc

SEQ ID NO: 3227927 - DNA, 25 bp, Homo sapien
tcatcatggtcctcttcagtaaggg

SEQ ID NO: 3227928 - DNA, 25 bp, Homo sapien
ttagcatgacgaatatctggcagag

SEQ ID NO: 3227929 - DNA, 25 bp, Homo sapien
tattgttgctgacgaaaatattaaa

SEQ ID NO: 3227930 - DNA, 25 bp, Homo sapien
cggagaaagagattcgtgggtttgg

SEQ ID NO: 3227931 - DNA, 25 bp, Homo sapien
ccggagaaagagattcgtgggtttg

SEQ ID NO: 3227932 - DNA, 25 bp, Homo sapien
aaagcttactgtagttggccagctc

SEQ ID NO: 3227933 - DNA, 25 bp, Homo sapien
acaaagcttactgtagttggccagc

SEQ ID NO: 3227934 - DNA, 25 bp, Homo sapien
tgcagtctcatattgtacagaagga

SEQ ID NO: 3227935 - DNA, 25 bp, Homo sapien
gtcagaactagtcatgcagcccagg

SEQ ID NO: 3227936 - DNA, 25 bp, Homo sapien
aacactagttggaaggagggtctct

SEQ ID NO: 3227937 - DNA, 25 bp, Homo sapien
gatgatgtatccctaaaatggcaca

SEQ ID NO: 3227938 - DNA, 25 bp, Homo sapien
gaagtccaaccttcattatgaaatg

SEQ ID NO: 3227939 - DNA, 25 bp, Homo sapien
ttatactgtgtatggtccgcaggag

SEQ ID NO: 3227940 - DNA, 25 bp, Homo sapien
tctctcactgaagtcatctactaga

SEQ ID NO: 3227941 - DNA, 25 bp, Homo sapien
tgatttctgctatcagactccctgg

SEQ ID NO: 3227942 - DNA, 25 bp, Homo sapien
gaaatcacaacatagataaaacttc

SEQ ID NO: 3227943 - DNA, 25 bp, Homo sapien
aagtccttaatgattatgtgaatgg

SEQ ID NO: 3227944 - DNA, 25 bp, Homo sapien
ggtgaatattttacgaaatcacaac

SEQ ID NO: 3227945 - DNA, 25 bp, Homo sapien
tggtagcagaatcagataaaatgtt

SEQ ID NO: 3227946 - DNA, 25 bp, Homo sapien
tttggccaaaggatcttgtagagta

SEQ ID NO: 3227947 - DNA, 25 bp, Homo sapien
ttttggccaaaggatcttgtagagt

SEQ ID NO: 3227948 - DNA, 25 bp, Homo sapien
ttggccaaaggatcttgtagagtat

SEQ ID NO: 3227949 - DNA, 25 bp, Homo sapien
ctatggtcttaagtaagtcagcagg

SEQ ID NO: 3227950 - DNA, 25 bp, Homo sapien
tggtcttaagtaagtcagcagggca

SEQ ID NO: 3227951 - DNA, 25 bp, Homo sapien
ggtcttaagtaagtcagcagggcag

SEQ ID NO: 3227952 - DNA, 25 bp, Homo sapien
tatggtcttaagtaagtcagcaggg

SEQ ID NO: 3227953 - DNA, 25 bp, Homo sapien
ctgtatctttttaggtccactttga

SEQ ID NO: 3227954 - DNA, 25 bp, Homo sapien
tctgtccattagttgagcattctta

SEQ ID NO: 3227955 - DNA, 25 bp, Homo sapien
tcttactgtatctttttaggtccac

SEQ ID NO: 3227956 - DNA, 25 bp, Homo sapien
gagcattcttactgtatctttttag

SEQ ID NO: 3227957 - DNA, 25 bp, Homo sapien
tttcacaagattcgtccaaaaaatc

SEQ ID NO: 3227958 - DNA, 25 bp, Homo sapien
taaggagaagtgcttttttttcaca

SEQ ID NO: 3227959 - DNA, 25 bp, Homo sapien
gcttttttttcacaagattcgtcca

SEQ ID NO: 3227960 - DNA, 25 bp, Homo sapien
cacaagattcgtccaaaaaatcttc

SEQ ID NO: 3227961 - DNA, 25 bp, Homo sapien
ttgggttcagcaatgagggtagaat

SEQ ID NO: 3227962 - DNA, 25 bp, Homo sapien
ttttgggttcagcaatgagggtaga

SEQ ID NO: 3227963 - DNA, 25 bp, Homo sapien
tttgggttcagcaatgagggtagaa

SEQ ID NO: 3227964 - DNA, 25 bp, Homo sapien
tcataggagcagcttcatctgagta

SEQ ID NO: 3227965 - DNA, 25 bp, Homo sapien
ataggagcagcttcatctgagtatc

SEQ ID NO: 3227966 - DNA, 25 bp, Homo sapien
attttcaaaactcataggagcagct

SEQ ID NO: 3227967 - DNA, 25 bp, Homo sapien
ctattttcaaaactcataggagcag

SEQ ID NO: 3227968 - DNA, 25 bp, Homo sapien
gaatttacgtatataaggtcttaca

SEQ ID NO: 3227969 - DNA, 25 bp, Homo sapien
tggcttcttagtgaatacaatagat

SEQ ID NO: 3227970 - DNA, 25 bp, Homo sapien
catcaggaattattacaagtcagta

SEQ ID NO: 3227971 - DNA, 25 bp, Homo sapien
aaaatatttgtactaacacatcagg

SEQ ID NO: 3227972 - DNA, 25 bp, Homo sapien
tctctcctaagggtgtcgcagtggc

SEQ ID NO: 3227973 - DNA, 25 bp, Homo sapien
gaccatctttatcaacgggactgaa

SEQ ID NO: 3227974 - DNA, 25 bp, Homo sapien
tataaatgtgcaatgggcaggctct

SEQ ID NO: 3227975 - DNA, 25 bp, Homo sapien
tgtggaggacatagcaccatgcttg

SEQ ID NO: 3227976 - DNA, 25 bp, Homo sapien
gattgacagttgttgataccaggag

SEQ ID NO: 3227977 - DNA, 25 bp, Homo sapien
gggtacagcagtgacaagtttattc

SEQ ID NO: 3227978 - DNA, 25 bp, Homo sapien
caatatagagtctaaagctctggtg

SEQ ID NO: 3227979 - DNA, 25 bp, Homo sapien
acttgggcaccaattatttctaatc

SEQ ID NO: 3227980 - DNA, 25 bp, Homo sapien
gaggccaaaaagtcccaatatctgc

SEQ ID NO: 3227981 - DNA, 25 bp, Homo sapien
cccttaacatattggatgctgccca

SEQ ID NO: 3227982 - DNA, 25 bp, Homo sapien
tagctcacatggatatggaggccaa

SEQ ID NO: 3227983 - DNA, 25 bp, Homo sapien
gatggtgtaagtcctcctctgagcc

SEQ ID NO: 3227984 - DNA, 25 bp, Homo sapien
ttttatatcttaagacccacacaag

SEQ ID NO: 3227985 - DNA, 25 bp, Homo sapien
ctttttatatcttaagacccacaca

SEQ ID NO: 3227986 - DNA, 25 bp, Homo sapien
tttttatatcttaagacccacacaa

SEQ ID NO: 3227987 - DNA, 25 bp, Homo sapien
tctaaggctgaaaggaagtatgcaa

SEQ ID NO: 3227988 - DNA, 25 bp, Homo sapien
gtctaaggctgaaaggaagtatgca

SEQ ID NO: 3227989 - DNA, 25 bp, Homo sapien
tgtctaaggctgaaaggaagtatgc

SEQ ID NO: 3227990 - DNA, 25 bp, Homo sapien
ccttccatagacttggctcaactca

SEQ ID NO: 3227991 - DNA, 25 bp, Homo sapien
ttctcatgaccattcctgttctttg

SEQ ID NO: 3227992 - DNA, 25 bp, Homo sapien
gacttggctcaactcatctccaggt

SEQ ID NO: 3227993 - DNA, 25 bp, Homo sapien
tgtccccagactttccttccataga

SEQ ID NO: 3227994 - DNA, 25 bp, Homo sapien
atagagaccttctgtttcaatgagt

SEQ ID NO: 3227995 - DNA, 25 bp, Homo sapien
agagaccttctgtttcaatgagtcc

SEQ ID NO: 3227996 - DNA, 25 bp, Homo sapien
aatgagtccaattgtgtaaccatac

SEQ ID NO: 3227997 - DNA, 25 bp, Homo sapien
tcaatgagtccaattgtgtaaccat

SEQ ID NO: 3227998 - DNA, 25 bp, Homo sapien
taaggcagcgattctgcctgacttt

SEQ ID NO: 3227999 - DNA, 25 bp, Homo sapien
ctttactgtaacactgtggttatgt

SEQ ID NO: 3228000 - DNA, 25 bp, Homo sapien
agacatgagggaccgcacctagccc

SEQ ID NO: 3228001 - DNA, 25 bp, Homo sapien
cactgtggttatgtttgttaaggca

SEQ ID NO: 3228002 - DNA, 25 bp, Homo sapien
catatggcttgcaatacctttgcgc

SEQ ID NO: 3228003 - DNA, 25 bp, Homo sapien
cacggttgtcaaaatccatatggct

SEQ ID NO: 3228004 - DNA, 25 bp, Homo sapien
tagttaagtgtgacctttggagtcc

SEQ ID NO: 3228005 - DNA, 25 bp, Homo sapien
gactgtgcttaccaggtttcaggcc

SEQ ID NO: 3228006 - DNA, 25 bp, Homo sapien
gtacaaattgtctgttttaacagaa

SEQ ID NO: 3228007 - DNA, 25 bp, Homo sapien
caaattgtctgttttaacagaattt

SEQ ID NO: 3228008 - DNA, 25 bp, Homo sapien
aagtacaaattgtctgttttaacag

SEQ ID NO: 3228009 - DNA, 25 bp, Homo sapien
ctgaaaagtacaaattgtctgtttt

SEQ ID NO: 3228010 - DNA, 25 bp, Homo sapien
atatgcagttgccactccgaaattg

SEQ ID NO: 3228011 - DNA, 25 bp, Homo sapien
agttgccactccgaaattgtctgtt

SEQ ID NO: 3228012 - DNA, 25 bp, Homo sapien
ttaacaactgaaatatgcagttgcc

SEQ ID NO: 3228013 - DNA, 25 bp, Homo sapien
gaattaacaactgaaatatgcagtt

SEQ ID NO: 3228014 - DNA, 25 bp, Homo sapien
ctgaaagtccagacccacagctttt

SEQ ID NO: 3228015 - DNA, 25 bp, Homo sapien
tttcagagtccaagctctgaaagtc

SEQ ID NO: 3228016 - DNA, 25 bp, Homo sapien
ttccttgtagttaaaattatactga

SEQ ID NO: 3228017 - DNA, 25 bp, Homo sapien
ttatcttggtcctccagtctttggg

SEQ ID NO: 3228018 - DNA, 25 bp, Homo sapien
cttggtcctccagtctttggggagc

SEQ ID NO: 3228019 - DNA, 25 bp, Homo sapien
tatcttggtcctccagtctttgggg

SEQ ID NO: 3228020 - DNA, 25 bp, Homo sapien
atcttggtcctccagtctttgggga

SEQ ID NO: 3228021 - DNA, 25 bp, Homo sapien
cacacatattcatagatgatggtga

SEQ ID NO: 3228022 - DNA, 25 bp, Homo sapien
cacatattcatagatgatggtgaag

SEQ ID NO: 3228023 - DNA, 25 bp, Homo sapien
ggatatgttgcaatgataaaaaagt

SEQ ID NO: 3228024 - DNA, 25 bp, Homo sapien
aagttgatggggatatgttgcaatg

SEQ ID NO: 3228025 - DNA, 25 bp, Homo sapien
aatagtattgtgcaagcattgcatt

SEQ ID NO: 3228026 - DNA, 25 bp, Homo sapien
taatagtattgtgcaagcattgcat

SEQ ID NO: 3228027 - DNA, 25 bp, Homo sapien
gtaatagtattgtgcaagcattgca

SEQ ID NO: 3228028 - DNA, 25 bp, Homo sapien
agtaatagtattgtgcaagcattgc

SEQ ID NO: 3228029 - DNA, 25 bp, Homo sapien
ttcatccattcaccatgcttttagc

SEQ ID NO: 3228030 - DNA, 25 bp, Homo sapien
attcatccattcaccatgcttttag

SEQ ID NO: 3228031 - DNA, 25 bp, Homo sapien
tcatccattcaccatgcttttagca

SEQ ID NO: 3228032 - DNA, 25 bp, Homo sapien
gattatcatggacccataaacagga

SEQ ID NO: 3228033 - DNA, 25 bp, Homo sapien
ccctctcctggagagtgattatcat

SEQ ID NO: 3228034 - DNA, 25 bp, Homo sapien
gagtgattatcatggacccataaac

SEQ ID NO: 3228035 - DNA, 25 bp, Homo sapien
cccctctcctggagagtgattatca

SEQ ID NO: 3228036 - DNA, 25 bp, Homo sapien
tgtagcaagggcaaaggtggtaatt

SEQ ID NO: 3228037 - DNA, 25 bp, Homo sapien
gcaagggcaaaggtggtaattacag

SEQ ID NO: 3228038 - DNA, 25 bp, Homo sapien
ctgtagcaagggcaaaggtggtaat

SEQ ID NO: 3228039 - DNA, 25 bp, Homo sapien
tagcaagggcaaaggtggtaattac

SEQ ID NO: 3228040 - DNA, 25 bp, Homo sapien
ttgggaaatgattaagttttgagat

SEQ ID NO: 3228041 - DNA, 25 bp, Homo sapien
catgaattatccaatctaaggtata

SEQ ID NO: 3228042 - DNA, 25 bp, Homo sapien
tgaaaggaattgccttgccccttct

SEQ ID NO: 3228043 - DNA, 25 bp, Homo sapien
taaattttgttcatgaattatccaa

SEQ ID NO: 3228044 - DNA, 25 bp, Homo sapien
gtccaagatttaactgcctcagctc

SEQ ID NO: 3228045 - DNA, 25 bp, Homo sapien
gatgcacatactcaggactctcaaa

SEQ ID NO: 3228046 - DNA, 25 bp, Homo sapien
cttctctctccgtaccttctcatcc

SEQ ID NO: 3228047 - DNA, 25 bp, Homo sapien
ctgcccgggctcgtctggatgatgt

SEQ ID NO: 3228048 - DNA, 25 bp, Homo sapien
gcccgggctcgtctggatgatgtct

SEQ ID NO: 3228049 - DNA, 25 bp, Homo sapien
taggaggtaatagtcaataattgtc

SEQ ID NO: 3228050 - DNA, 25 bp, Homo sapien
gacttgctaggaggtaatagtcaat

SEQ ID NO: 3228051 - DNA, 25 bp, Homo sapien
cttgctaggaggtaatagtcaataa

SEQ ID NO: 3228052 - DNA, 25 bp, Homo sapien
tttcagtctggggagatatgggtgc

SEQ ID NO: 3228053 - DNA, 25 bp, Homo sapien
gcatttgctgtaagtgacctttggg

SEQ ID NO: 3228054 - DNA, 25 bp, Homo sapien
taccgctaattggagagcacaggag

SEQ ID NO: 3228055 - DNA, 25 bp, Homo sapien
gacctttgggtacacacagtcgtga

SEQ ID NO: 3228056 - DNA, 25 bp, Homo sapien
tatcggcaaggctaggaatcccctg

SEQ ID NO: 3228057 - DNA, 25 bp, Homo sapien
caattgaaatctgagccaaatatct

SEQ ID NO: 3228058 - DNA, 25 bp, Homo sapien
tccagttatttgacagtggaagaaa

SEQ ID NO: 3228059 - DNA, 25 bp, Homo sapien
ctgaagcagcagaattctctctaat

SEQ ID NO: 3228060 - DNA, 25 bp, Homo sapien
ccaaaggtggtgatgtcgtgacaga

SEQ ID NO: 3228061 - DNA, 25 bp, Homo sapien
atccatcttttcctaggtccttctt

SEQ ID NO: 3228062 - DNA, 25 bp, Homo sapien
gaagacttggtacagggagctccta

SEQ ID NO: 3228063 - DNA, 25 bp, Homo sapien
taaaatcctcccagtgataagcagg

SEQ ID NO: 3228064 - DNA, 25 bp, Homo sapien
tattgaccaaagacacattagggca

SEQ ID NO: 3228065 - DNA, 25 bp, Homo sapien
tctgccagagtgagggtacccaata

SEQ ID NO: 3228066 - DNA, 25 bp, Homo sapien
tagatcttcagccttggatgagtca

SEQ ID NO: 3228067 - DNA, 25 bp, Homo sapien
tggctagatcttcagccttggatga

SEQ ID NO: 3228068 - DNA, 25 bp, Homo sapien
ggttggctagatcttcagccttgga

SEQ ID NO: 3228069 - DNA, 25 bp, Homo sapien
ctggttggctagatcttcagccttg

SEQ ID NO: 3228070 - DNA, 25 bp, Homo sapien
tactaccttcataaaggacaatgtc

SEQ ID NO: 3228071 - DNA, 25 bp, Homo sapien
cctgccgccacatacaccagtgttg

SEQ ID NO: 3228072 - DNA, 25 bp, Homo sapien
atgtccataagagtttttccgaatt

SEQ ID NO: 3228073 - DNA, 25 bp, Homo sapien
cataaaggacaatgtccataagagt

SEQ ID NO: 3228074 - DNA, 25 bp, Homo sapien
tcatcataacgatgaagtagattct

SEQ ID NO: 3228075 - DNA, 25 bp, Homo sapien
tgaatcatcataacgatgaagtaga

SEQ ID NO: 3228076 - DNA, 25 bp, Homo sapien
taacgatgaagtagattcttctgaa

SEQ ID NO: 3228077 - DNA, 25 bp, Homo sapien
tcatgaatcatcataacgatgaagt

SEQ ID NO: 3228078 - DNA, 25 bp, Homo sapien
tgggagacagcataatgttcatggt

SEQ ID NO: 3228079 - DNA, 25 bp, Homo sapien
ctgagagtatgggatactggcatgg

SEQ ID NO: 3228080 - DNA, 25 bp, Homo sapien
ggatactggcatgggagacagcata

SEQ ID NO: 3228081 - DNA, 25 bp, Homo sapien
tggcatgggagacagcataatgttc

SEQ ID NO: 3228082 - DNA, 25 bp, Homo sapien
tcactgggtggttgactggccccat

SEQ ID NO: 3228083 - DNA, 25 bp, Homo sapien
ctacagagttcactgggtggttgac

SEQ ID NO: 3228084 - DNA, 25 bp, Homo sapien
tacagagttcactgggtggttgact

SEQ ID NO: 3228085 - DNA, 25 bp, Homo sapien
agttcactgggtggttgactggccc

SEQ ID NO: 3228086 - DNA, 25 bp, Homo sapien
gggaccagtgtccttgaccctctgc

SEQ ID NO: 3228087 - DNA, 25 bp, Homo sapien
cagaactcacactctccagtgtgag

SEQ ID NO: 3228088 - DNA, 25 bp, Homo sapien
gaccagtgtccttgaccctctgctt

SEQ ID NO: 3228089 - DNA, 25 bp, Homo sapien
tccagtgtgagtgcagctggctgaa

SEQ ID NO: 3228090 - DNA, 25 bp, Homo sapien
ctccaacaccaccaatcacgaaagg

SEQ ID NO: 3228091 - DNA, 25 bp, Homo sapien
gctcctccaacaccaccaatcacga

SEQ ID NO: 3228092 - DNA, 25 bp, Homo sapien
ccaacaccaccaatcacgaaaggcc

SEQ ID NO: 3228093 - DNA, 25 bp, Homo sapien
cctccaacaccaccaatcacgaaag

SEQ ID NO: 3228094 - DNA, 25 bp, Homo sapien
gtgtgcatatgcaaagccccagctg

SEQ ID NO: 3228095 - DNA, 25 bp, Homo sapien
aagccccagctgaattcactgtcat

SEQ ID NO: 3228096 - DNA, 25 bp, Homo sapien
gcaaagccccagctgaattcactgt

SEQ ID NO: 3228097 - DNA, 25 bp, Homo sapien
tgtgcatatgcaaagccccagctga

SEQ ID NO: 3228098 - DNA, 25 bp, Homo sapien
tgtgagcagcattgtagctctgata

SEQ ID NO: 3228099 - DNA, 25 bp, Homo sapien
ggagctgatgtagttgcagggccca

SEQ ID NO: 3228100 - DNA, 25 bp, Homo sapien
tgtcagcagccatagcaaacagacc

SEQ ID NO: 3228101 - DNA, 25 bp, Homo sapien
aagaaatcatctgtcctctcgtgtg

SEQ ID NO: 3228102 - DNA, 25 bp, Homo sapien
gcattttctctggatgtctgttcca

SEQ ID NO: 3228103 - DNA, 25 bp, Homo sapien
cattttctctggatgtctgttccat

SEQ ID NO: 3228104 - DNA, 25 bp, Homo sapien
ttcgtactttgtcaatgtatctagg

SEQ ID NO: 3228105 - DNA, 25 bp, Homo sapien
gattctgacgaagattcgtactttg

SEQ ID NO: 3228106 - DNA, 25 bp, Homo sapien
gcagggttgattctgacgaagattc

SEQ ID NO: 3228107 - DNA, 25 bp, Homo sapien
actttgtcaatgtatctaggaaggc

SEQ ID NO: 3228108 - DNA, 25 bp, Homo sapien
tgcagctgaattattcacggttgtt

SEQ ID NO: 3228109 - DNA, 25 bp, Homo sapien
aatcctggggtaacattcttgtctc

SEQ ID NO: 3228110 - DNA, 25 bp, Homo sapien
gagagtatgtgactgatgaatcctg

SEQ ID NO: 3228111 - DNA, 25 bp, Homo sapien
aaaacgcaaaacattagttgcagct

SEQ ID NO: 3228112 - DNA, 25 bp, Homo sapien
tctcttttcttggtgcgaacaatcc

SEQ ID NO: 3228113 - DNA, 25 bp, Homo sapien
cattgacctcgcagtgggagtccag

SEQ ID NO: 3228114 - DNA, 25 bp, Homo sapien
gagacgggtccggatgagtccttct

SEQ ID NO: 3228115 - DNA, 25 bp, Homo sapien
caatcctcactttggaaaatcgggc

SEQ ID NO: 3228116 - DNA, 25 bp, Homo sapien
taaatagaagcaaaccgctcagttc

SEQ ID NO: 3228117 - DNA, 25 bp, Homo sapien
atggtgcttagcaacctgtactcac

SEQ ID NO: 3228118 - DNA, 25 bp, Homo sapien
ctgaggcatcccaggatggtgctta

SEQ ID NO: 3228119 - DNA, 25 bp, Homo sapien
catcccaggatggtgcttagcaacc

SEQ ID NO: 3228120 - DNA, 25 bp, Homo sapien
aagaaagttatgtcccagagagact

SEQ ID NO: 3228121 - DNA, 25 bp, Homo sapien
tgtgatgggacagcgattaggtcca

SEQ ID NO: 3228122 - DNA, 25 bp, Homo sapien
tcccagagagacttgcagaagtcca

SEQ ID NO: 3228123 - DNA, 25 bp, Homo sapien
cgattaggtccaattagagttgttg

SEQ ID NO: 3228124 - DNA, 25 bp, Homo sapien
tcaaaagggtcgctgggatctgccc

SEQ ID NO: 3228125 - DNA, 25 bp, Homo sapien
tcaatgacatcgatcatgggacaca

SEQ ID NO: 3228126 - DNA, 25 bp, Homo sapien
gcttgtgcctcatacccgaagtgat

SEQ ID NO: 3228127 - DNA, 25 bp, Homo sapien
tacatttcccagtcgaaggctcctc

SEQ ID NO: 3228128 - DNA, 25 bp, Homo sapien
catagtcagagtcagcctgacaaaa

SEQ ID NO: 3228129 - DNA, 25 bp, Homo sapien
tcagcctgacaaaaatgttgactgt

SEQ ID NO: 3228130 - DNA, 25 bp, Homo sapien
tgactgtcagtgcaggcactgagaa

SEQ ID NO: 3228131 - DNA, 25 bp, Homo sapien
ccagctctgtggttaagcaaggtgc

SEQ ID NO: 3228132 - DNA, 25 bp, Homo sapien
aaggcaaacacggtttataagatca

SEQ ID NO: 3228133 - DNA, 25 bp, Homo sapien
cggtttataagatcaaagtggacac

SEQ ID NO: 3228134 - DNA, 25 bp, Homo sapien
aacacggtttataagatcaaagtgg

SEQ ID NO: 3228135 - DNA, 25 bp, Homo sapien
gcaaacacggtttataagatcaaag

SEQ ID NO: 3228136 - DNA, 25 bp, Homo sapien
gataatgaaattgccgatacgctgc

SEQ ID NO: 3228137 - DNA, 25 bp, Homo sapien
gagcacattcaggtgactgccgtga

SEQ ID NO: 3228138 - DNA, 25 bp, Homo sapien
gagaagcaagttttagcctaaagct

SEQ ID NO: 3228139 - DNA, 25 bp, Homo sapien
aaagctttacagctagagaagcaag

SEQ ID NO: 3228140 - DNA, 25 bp, Homo sapien
agtcactgtgtgaagttccagccag

SEQ ID NO: 3228141 - DNA, 25 bp, Homo sapien
ggagtcactgtgtgaagttccagcc

SEQ ID NO: 3228142 - DNA, 25 bp, Homo sapien
tgtgtgaagttccagccaggaacag

SEQ ID NO: 3228143 - DNA, 25 bp, Homo sapien
cactgtgtgaagttccagccaggaa

SEQ ID NO: 3228144 - DNA, 25 bp, Homo sapien
ccacctgtggccacgattttgtcct

SEQ ID NO: 3228145 - DNA, 25 bp, Homo sapien
cacctgtggccacgattttgtcctg

SEQ ID NO: 3228146 - DNA, 25 bp, Homo sapien
caccacctgtggccacgattttgtc

SEQ ID NO: 3228147 - DNA, 25 bp, Homo sapien
acctgtggccacgattttgtcctgt

SEQ ID NO: 3228148 - DNA, 25 bp, Homo sapien
gagctggtggggatcaccgcccctt

SEQ ID NO: 3228149 - DNA, 25 bp, Homo sapien
gctggtggggatcaccgccccttct

SEQ ID NO: 3228150 - DNA, 25 bp, Homo sapien
ctgcacaagataggtcttcccttca

SEQ ID NO: 3228151 - DNA, 25 bp, Homo sapien
caagataggtcttcccttcacgttt

SEQ ID NO: 3228152 - DNA, 25 bp, Homo sapien
gactgctccacatatagggcagaca

SEQ ID NO: 3228153 - DNA, 25 bp, Homo sapien
tctcttcacttaggccttctaaact

SEQ ID NO: 3228154 - DNA, 25 bp, Homo sapien
ggccttctaaactcctgggccatgt

SEQ ID NO: 3228155 - DNA, 25 bp, Homo sapien
cgctgtaatgggcaacgccatccat

SEQ ID NO: 3228156 - DNA, 25 bp, Homo sapien
ccttggcaggcagttctctcgggca

SEQ ID NO: 3228157 - DNA, 25 bp, Homo sapien
tggcaggcagttctctcgggcacag

SEQ ID NO: 3228158 - DNA, 25 bp, Homo sapien
gctggaagggcagcccatcctcttc

SEQ ID NO: 3228159 - DNA, 25 bp, Homo sapien
cctcttctttccttggcaggcagtt

SEQ ID NO: 3228160 - DNA, 25 bp, Homo sapien
caatggccatttgattagctggtgc

SEQ ID NO: 3228161 - DNA, 25 bp, Homo sapien
tagctggtgctctttctagatctct

SEQ ID NO: 3228162 - DNA, 25 bp, Homo sapien
acatgattgatgtcttcctgtccag

SEQ ID NO: 3228163 - DNA, 25 bp, Homo sapien
ctctccaagggtgcatttgtcaggg

SEQ ID NO: 3228164 - DNA, 25 bp, Homo sapien
tgaagcgcttcatgtactgccttgg

SEQ ID NO: 3228165 - DNA, 25 bp, Homo sapien
gaagctagagagtcacctttcatgc

SEQ ID NO: 3228166 - DNA, 25 bp, Homo sapien
gagtccacttctgttgcttgcaatg

SEQ ID NO: 3228167 - DNA, 25 bp, Homo sapien
caaggatgagaacaaggatgaagct

SEQ ID NO: 3228168 - DNA, 25 bp, Homo sapien
cccagttcctctggatcaaatagtg

SEQ ID NO: 3228169 - DNA, 25 bp, Homo sapien
ttggcatttttacggaatgggtcac

SEQ ID NO: 3228170 - DNA, 25 bp, Homo sapien
tgaagttattgtgcactagtgcacc

SEQ ID NO: 3228171 - DNA, 25 bp, Homo sapien
tcaaatagtgcagtgttggcatttt

SEQ ID NO: 3228172 - DNA, 25 bp, Homo sapien
tgtacgtttacaccctgcttaatga

SEQ ID NO: 3228173 - DNA, 25 bp, Homo sapien
tacaccctgcttaatgaccttaatt

SEQ ID NO: 3228174 - DNA, 25 bp, Homo sapien
gtttacaccctgcttaatgacctta

SEQ ID NO: 3228175 - DNA, 25 bp, Homo sapien
tttatactgtacgtttacaccctgc

SEQ ID NO: 3228176 - DNA, 25 bp, Homo sapien
gtcccgagcttcacaaagtcttttg

SEQ ID NO: 3228177 - DNA, 25 bp, Homo sapien
aggcctagagccgtgtgtcctgtcc

SEQ ID NO: 3228178 - DNA, 25 bp, Homo sapien
tgctaaagccacactgcgaatgtcc

SEQ ID NO: 3228179 - DNA, 25 bp, Homo sapien
tgtcctaggcttgagtgctaaagcc

SEQ ID NO: 3228180 - DNA, 25 bp, Homo sapien
gctatggtgcctgttgccagccccc

SEQ ID NO: 3228181 - DNA, 25 bp, Homo sapien
aaagagatttcatactgttctcctc

SEQ ID NO: 3228182 - DNA, 25 bp, Homo sapien
atttccgatccacagcaaagagacc

SEQ ID NO: 3228183 - DNA, 25 bp, Homo sapien
ggatcatagccacccaattcccaaa

SEQ ID NO: 3228184 - DNA, 25 bp, Homo sapien
tactgttctcctccccagatttcta

SEQ ID NO: 3228185 - DNA, 25 bp, Homo sapien
acagatatagtgtgaagagggtctt

SEQ ID NO: 3228186 - DNA, 25 bp, Homo sapien
cagatatagtgtgaagagggtcttg

SEQ ID NO: 3228187 - DNA, 25 bp, Homo sapien
cacagagcaacatgctgatattcta

SEQ ID NO: 3228188 - DNA, 25 bp, Homo sapien
ggtcacagagcaacatgctgatatt

SEQ ID NO: 3228189 - DNA, 25 bp, Homo sapien
ggtaagtgtgagctggcttggcccc

SEQ ID NO: 3228190 - DNA, 25 bp, Homo sapien
ttgggtaagtgtgagctggcttggc

SEQ ID NO: 3228191 - DNA, 25 bp, Homo sapien
gggtaagtgtgagctggcttggccc

SEQ ID NO: 3228192 - DNA, 25 bp, Homo sapien
gggttgggtaagtgtgagctggctt

SEQ ID NO: 3228193 - DNA, 25 bp, Homo sapien
tgggacaagcctagctggtcaggcc

SEQ ID NO: 3228194 - DNA, 25 bp, Homo sapien
caatcttggcacagaaggtttggga

SEQ ID NO: 3228195 - DNA, 25 bp, Homo sapien
ctggaactgcccagcaatcttggca

SEQ ID NO: 3228196 - DNA, 25 bp, Homo sapien
cctacagcgtggaacacctggaact

SEQ ID NO: 3228197 - DNA, 25 bp, Homo sapien
ttctagacaaaaacgatagggctgc

SEQ ID NO: 3228198 - DNA, 25 bp, Homo sapien
tttctagacaaaaacgatagggctg

SEQ ID NO: 3228199 - DNA, 25 bp, Homo sapien
aacgatagggctgcattccaattat

SEQ ID NO: 3228200 - DNA, 25 bp, Homo sapien
tgcattccaattatatcgttcagaa

SEQ ID NO: 3228201 - DNA, 25 bp, Homo sapien
gaggggagtccgtgagagggaatga

SEQ ID NO: 3228202 - DNA, 25 bp, Homo sapien
gagtccgtgagagggaatgaaatgg

SEQ ID NO: 3228203 - DNA, 25 bp, Homo sapien
ggagtccgtgagagggaatgaaatg

SEQ ID NO: 3228204 - DNA, 25 bp, Homo sapien
ggggagtccgtgagagggaatgaaa

SEQ ID NO: 3228205 - DNA, 25 bp, Homo sapien
tggtgaagcggaaaatgaaagcccg

SEQ ID NO: 3228206 - DNA, 25 bp, Homo sapien
aagcccgagagctttcagcggccat

SEQ ID NO: 3228207 - DNA, 25 bp, Homo sapien
ctctctggtggtgaagcggaaaatg

SEQ ID NO: 3228208 - DNA, 25 bp, Homo sapien
gcggaaaatgaaagcccgagagctt

SEQ ID NO: 3228209 - DNA, 25 bp, Homo sapien
tggaactttgtatggaacgtacttc

SEQ ID NO: 3228210 - DNA, 25 bp, Homo sapien
cttcctgtagatatgaccaactcta

SEQ ID NO: 3228211 - DNA, 25 bp, Homo sapien
tgtatggaacgtacttcctgtagat

SEQ ID NO: 3228212 - DNA, 25 bp, Homo sapien
ccaactctagaacatggaacatcaa

SEQ ID NO: 3228213 - DNA, 25 bp, Homo sapien
taagcaatggaaataagactctgag

SEQ ID NO: 3228214 - DNA, 25 bp, Homo sapien
tctgtacactggagagcttttctca

SEQ ID NO: 3228215 - DNA, 25 bp, Homo sapien
gaaagccatatcaaccccagtctgt

SEQ ID NO: 3228216 - DNA, 25 bp, Homo sapien
caaggttggttactctggttacaga

SEQ ID NO: 3228217 - DNA, 25 bp, Homo sapien
gaccctccaaggaaactctcatggg

SEQ ID NO: 3228218 - DNA, 25 bp, Homo sapien
gataatcagctggtatgtttagccg

SEQ ID NO: 3228219 - DNA, 25 bp, Homo sapien
aagaccactgctgtgtgataatcag

SEQ ID NO: 3228220 - DNA, 25 bp, Homo sapien
ggccaagttgttcccatgaagacca

SEQ ID NO: 3228221 - DNA, 25 bp, Homo sapien
ttaacagacagatgatcagagtcaa

SEQ ID NO: 3228222 - DNA, 25 bp, Homo sapien
tgcttttggtggacggtgggcacca

SEQ ID NO: 3228223 - DNA, 25 bp, Homo sapien
ttgtccctgctcttcattctctgtg

SEQ ID NO: 3228224 - DNA, 25 bp, Homo sapien
gctccatccactccgtgtgttcagt

SEQ ID NO: 3228225 - DNA, 25 bp, Homo sapien
tcccagcaggtctctcctgtctgac

SEQ ID NO: 3228226 - DNA, 25 bp, Homo sapien
gccacagcagccatgaaccatttga

SEQ ID NO: 3228227 - DNA, 25 bp, Homo sapien
aggtctcagctacccgcttcaggtt

SEQ ID NO: 3228228 - DNA, 25 bp, Homo sapien
tggagagatgcctgtactccggccg

SEQ ID NO: 3228229 - DNA, 25 bp, Homo sapien
ccactggagggtagtatttaggcac

SEQ ID NO: 3228230 - DNA, 25 bp, Homo sapien
cattatttcattttgattaagctgc

SEQ ID NO: 3228231 - DNA, 25 bp, Homo sapien
gcatttcaaatccttcacttgcctc

SEQ ID NO: 3228232 - DNA, 25 bp, Homo sapien
tttcattttgattaagctgcatttc

SEQ ID NO: 3228233 - DNA, 25 bp, Homo sapien
cattttgattaagctgcatttcaaa

SEQ ID NO: 3228234 - DNA, 25 bp, Homo sapien
ggagtgactgtctagtgtgccctgg

SEQ ID NO: 3228235 - DNA, 25 bp, Homo sapien
gggagtgactgtctagtgtgccctg

SEQ ID NO: 3228236 - DNA, 25 bp, Homo sapien
gagtgactgtctagtgtgccctggg

SEQ ID NO: 3228237 - DNA, 25 bp, Homo sapien
cttttagcggcacagtcaccacact

SEQ ID NO: 3228238 - DNA, 25 bp, Homo sapien
gtcaccacacttctcagagcttggg

SEQ ID NO: 3228239 - DNA, 25 bp, Homo sapien
acagtcaccacacttctcagagctt

SEQ ID NO: 3228240 - DNA, 25 bp, Homo sapien
cacacttctcagagcttggggcagt

SEQ ID NO: 3228241 - DNA, 25 bp, Homo sapien
tctcaaactttctgtgtggaccagg

SEQ ID NO: 3228242 - DNA, 25 bp, Homo sapien
cttttctttaggctgctgtctctca

SEQ ID NO: 3228243 - DNA, 25 bp, Homo sapien
gagtcagtttcatgcatccagcctt

SEQ ID NO: 3228244 - DNA, 25 bp, Homo sapien
aggttttcaaagaggagagtcagtt

SEQ ID NO: 3228245 - DNA, 25 bp, Homo sapien
ttagttggtgacaatcagtcctggg

SEQ ID NO: 3228246 - DNA, 25 bp, Homo sapien
tgcattttagttggtgacaatcagt

SEQ ID NO: 3228247 - DNA, 25 bp, Homo sapien
cattttagttggtgacaatcagtcc

SEQ ID NO: 3228248 - DNA, 25 bp, Homo sapien
ttttagttggtgacaatcagtcctg

SEQ ID NO: 3228249 - DNA, 25 bp, Homo sapien
acacatacacatgggcccaaactta

SEQ ID NO: 3228250 - DNA, 25 bp, Homo sapien
taggacacgggatattaaatatgtc

SEQ ID NO: 3228251 - DNA, 25 bp, Homo sapien
aaatatgtctatggcagaatcaatc

SEQ ID NO: 3228252 - DNA, 25 bp, Homo sapien
catgggcccaaacttaggacacggg

SEQ ID NO: 3228253 - DNA, 25 bp, Homo sapien
gtccacctgcttctctccagcacat

SEQ ID NO: 3228254 - DNA, 25 bp, Homo sapien
tgtccacctgcttctctccagcaca

SEQ ID NO: 3228255 - DNA, 25 bp, Homo sapien
ctgtccacctgcttctctccagcac

SEQ ID NO: 3228256 - DNA, 25 bp, Homo sapien
cctatgtcggctggcatttgaactc

SEQ ID NO: 3228257 - DNA, 25 bp, Homo sapien
tctcctatgtcggctggcatttgaa

SEQ ID NO: 3228258 - DNA, 25 bp, Homo sapien
tcctatgtcggctggcatttgaact

SEQ ID NO: 3228259 - DNA, 25 bp, Homo sapien
tatgtcggctggcatttgaactcac

SEQ ID NO: 3228260 - DNA, 25 bp, Homo sapien
gaactctgagcaggcctttcttttc

SEQ ID NO: 3228261 - DNA, 25 bp, Homo sapien
ctgacagaactctgagcaggccttt

SEQ ID NO: 3228262 - DNA, 25 bp, Homo sapien
cagaactctgagcaggcctttcttt

SEQ ID NO: 3228263 - DNA, 25 bp, Homo sapien
tgacagaactctgagcaggcctttc

SEQ ID NO: 3228264 - DNA, 25 bp, Homo sapien
tctagaatttgtgaagccaagctta

SEQ ID NO: 3228265 - DNA, 25 bp, Homo sapien
tctctagaatttgtgaagccaagct

SEQ ID NO: 3228266 - DNA, 25 bp, Homo sapien
tagaatttgtgaagccaagcttaaa

SEQ ID NO: 3228267 - DNA, 25 bp, Homo sapien
ctctagaatttgtgaagccaagctt

SEQ ID NO: 3228268 - DNA, 25 bp, Homo sapien
tctgttccggtggctccatgcttgc

SEQ ID NO: 3228269 - DNA, 25 bp, Homo sapien
agaaccatccttgacacagatgtcc

SEQ ID NO: 3228270 - DNA, 25 bp, Homo sapien
gctctgttccggtggctccatgctt

SEQ ID NO: 3228271 - DNA, 25 bp, Homo sapien
ttcagaaccatccttgacacagatg

SEQ ID NO: 3228272 - DNA, 25 bp, Homo sapien
catctgcaccattcggagatttgtt

SEQ ID NO: 3228273 - DNA, 25 bp, Homo sapien
tgcaccattcggagatttgttccag

SEQ ID NO: 3228274 - DNA, 25 bp, Homo sapien
gtgtctgcatcagcccccgactggt

SEQ ID NO: 3228275 - DNA, 25 bp, Homo sapien
cattcggagatttgttccagctgca

SEQ ID NO: 3228276 - DNA, 25 bp, Homo sapien
gctgaagtcagaattgcttgttgga

SEQ ID NO: 3228277 - DNA, 25 bp, Homo sapien
aattgcttgttggagttaacagtcc

SEQ ID NO: 3228278 - DNA, 25 bp, Homo sapien
cgatagcttctaaagccttctctct

SEQ ID NO: 3228279 - DNA, 25 bp, Homo sapien
cattcctcaggtccccagtaacatc

SEQ ID NO: 3228280 - DNA, 25 bp, Homo sapien
cacaaccattgctctcaatagctct

SEQ ID NO: 3228281 - DNA, 25 bp, Homo sapien
caatagctcttgcaatgatctccaa

SEQ ID NO: 3228282 - DNA, 25 bp, Homo sapien
gtcatgcactttatcaaccttggag

SEQ ID NO: 3228283 - DNA, 25 bp, Homo sapien
catctaatcaatgaccaagtcttac

SEQ ID NO: 3228284 - DNA, 25 bp, Homo sapien
gaagagcatttgcttgagttatttg

SEQ ID NO: 3228285 - DNA, 25 bp, Homo sapien
gggaagagcatttgcttgagttatt

SEQ ID NO: 3228286 - DNA, 25 bp, Homo sapien
ggggaagagcatttgcttgagttat

SEQ ID NO: 3228287 - DNA, 25 bp, Homo sapien
agagcatttgcttgagttatttgaa

SEQ ID NO: 3228288 - DNA, 25 bp, Homo sapien
ggctcaccgggtcgaatatcttctc

SEQ ID NO: 3228289 - DNA, 25 bp, Homo sapien
cagaatttccgggtatgcagtggct

SEQ ID NO: 3228290 - DNA, 25 bp, Homo sapien
tgtgtgagatcgcatcaaagcagaa

SEQ ID NO: 3228291 - DNA, 25 bp, Homo sapien
catgacagtcatagagtgtaacggg

SEQ ID NO: 3228292 - DNA, 25 bp, Homo sapien
gttcaactgaacatagccccagcat

SEQ ID NO: 3228293 - DNA, 25 bp, Homo sapien
tctccttttgtggtggcaaagagcc

SEQ ID NO: 3228294 - DNA, 25 bp, Homo sapien
tgttattgtaggaaacagctgttca

SEQ ID NO: 3228295 - DNA, 25 bp, Homo sapien
tagccccagcatcatagaataagga

SEQ ID NO: 3228296 - DNA, 25 bp, Homo sapien
tttcagtgcatgctggcccggatgt

SEQ ID NO: 3228297 - DNA, 25 bp, Homo sapien
ttcagtgcatgctggcccggatgtc

SEQ ID NO: 3228298 - DNA, 25 bp, Homo sapien
tctccggccttaagaatggttctgt

SEQ ID NO: 3228299 - DNA, 25 bp, Homo sapien
aggactttctccggccttaagaatg

SEQ ID NO: 3228300 - DNA, 25 bp, Homo sapien
gcagcagtctccttcgctgtcttct

SEQ ID NO: 3228301 - DNA, 25 bp, Homo sapien
caggcagcagtctccttcgctgtct

SEQ ID NO: 3228302 - DNA, 25 bp, Homo sapien
gtcctagatatttgctgtcccagat

SEQ ID NO: 3228303 - DNA, 25 bp, Homo sapien
agcagtctccttcgctgtcttctct

SEQ ID NO: 3228304 - DNA, 25 bp, Homo sapien
ttccttacacaaagagggctcctga

SEQ ID NO: 3228305 - DNA, 25 bp, Homo sapien
tcctgagatctccttgccattttct

SEQ ID NO: 3228306 - DNA, 25 bp, Homo sapien
tacaaaggcttgctattctcttctg

SEQ ID NO: 3228307 - DNA, 25 bp, Homo sapien
tcattaattccacccgtgtctgacc

SEQ ID NO: 3228308 - DNA, 25 bp, Homo sapien
ttattgatataatgcaggtgttcca

SEQ ID NO: 3228309 - DNA, 25 bp, Homo sapien
ccagtgctgccgttctcattgcttt

SEQ ID NO: 3228310 - DNA, 25 bp, Homo sapien
tgttccagtgctgccgttctcattg

SEQ ID NO: 3228311 - DNA, 25 bp, Homo sapien
gagcttcagtctcctctcaatccct

SEQ ID NO: 3228312 - DNA, 25 bp, Homo sapien
tgcggggttgcaatccatgcagctg

SEQ ID NO: 3228313 - DNA, 25 bp, Homo sapien
tctctgcggggttgcaatccatgca

SEQ ID NO: 3228314 - DNA, 25 bp, Homo sapien
tgaaaatcttcttctctgcggggtt

SEQ ID NO: 3228315 - DNA, 25 bp, Homo sapien
gtcacatctggccatgaaaatcttc

SEQ ID NO: 3228316 - DNA, 25 bp, Homo sapien
gaatggcaccaaagagtacagctca

SEQ ID NO: 3228317 - DNA, 25 bp, Homo sapien
tagctactcactactgcaggatttg

SEQ ID NO: 3228318 - DNA, 25 bp, Homo sapien
cagcaagggaactgctagtctcgag

SEQ ID NO: 3228319 - DNA, 25 bp, Homo sapien
cgaaagaatgggaacactggatgtc

SEQ ID NO: 3228320 - DNA, 25 bp, Homo sapien
taactggattcatagaagggcactg

SEQ ID NO: 3228321 - DNA, 25 bp, Homo sapien
tctttggagtaacttgatagcatag

SEQ ID NO: 3228322 - DNA, 25 bp, Homo sapien
tagaaattcagtggattcatggagc

SEQ ID NO: 3228323 - DNA, 25 bp, Homo sapien
tatgactggacaaatatcagacttt

SEQ ID NO: 3228324 - DNA, 25 bp, Homo sapien
gaaaagatctggtggagaggatata

SEQ ID NO: 3228325 - DNA, 25 bp, Homo sapien
aaagatctggtggagaggatataga

SEQ ID NO: 3228326 - DNA, 25 bp, Homo sapien
tgggaaaagatctggtggagaggat

SEQ ID NO: 3228327 - DNA, 25 bp, Homo sapien
tttgggaaaagatctggtggagagg

SEQ ID NO: 3228328 - DNA, 25 bp, Homo sapien
tttgtatctttagcaacatgcatta

SEQ ID NO: 3228329 - DNA, 25 bp, Homo sapien
ctttagcaacatgcattaccctcat

SEQ ID NO: 3228330 - DNA, 25 bp, Homo sapien
tgtatctttagcaacatgcattacc

SEQ ID NO: 3228331 - DNA, 25 bp, Homo sapien
tatctttagcaacatgcattaccct

SEQ ID NO: 3228332 - DNA, 25 bp, Homo sapien
gcatgaagcgaggtaaaggcatttt

SEQ ID NO: 3228333 - DNA, 25 bp, Homo sapien
tattatgggatgcagacaagcctag

SEQ ID NO: 3228334 - DNA, 25 bp, Homo sapien
ctatttgagtatattatgggatgca

SEQ ID NO: 3228335 - DNA, 25 bp, Homo sapien
gatggtgctataagaagtttatctg

SEQ ID NO: 3228336 - DNA, 25 bp, Homo sapien
ctccagggactgtcttctcttggtg

SEQ ID NO: 3228337 - DNA, 25 bp, Homo sapien
cacagtagcctctgtttcttaacat

SEQ ID NO: 3228338 - DNA, 25 bp, Homo sapien
tgccacagtagcctctgtttcttaa

SEQ ID NO: 3228339 - DNA, 25 bp, Homo sapien
gccacagtagcctctgtttcttaac

SEQ ID NO: 3228340 - DNA, 25 bp, Homo sapien
ccacagtagcctctgtttcttaaca

SEQ ID NO: 3228341 - DNA, 25 bp, Homo sapien
tgctgcgaccaccaagggtaaggct

SEQ ID NO: 3228342 - DNA, 25 bp, Homo sapien
gaagttaccatcacctttctagagg

SEQ ID NO: 3228343 - DNA, 25 bp, Homo sapien
tatcagaagtactggccaaagcgag

SEQ ID NO: 3228344 - DNA, 25 bp, Homo sapien
ggtttcaccacagtttaggagctgg

SEQ ID NO: 3228345 - DNA, 25 bp, Homo sapien
atcctgttccttccttgtgccccac

SEQ ID NO: 3228346 - DNA, 25 bp, Homo sapien
ccgatcctgttccttccttgtgccc

SEQ ID NO: 3228347 - DNA, 25 bp, Homo sapien
gatcctgttccttccttgtgcccca

SEQ ID NO: 3228348 - DNA, 25 bp, Homo sapien
gcccgatcctgttccttccttgtgc

SEQ ID NO: 3228349 - DNA, 25 bp, Homo sapien
gctactgccactgaagtctgcaagt

SEQ ID NO: 3228350 - DNA, 25 bp, Homo sapien
agtgctggaacctctaattctaaag

SEQ ID NO: 3228351 - DNA, 25 bp, Homo sapien
tagtcagtgctggaacctctaattc

SEQ ID NO: 3228352 - DNA, 25 bp, Homo sapien
acatactgctactgccactgaagtc

SEQ ID NO: 3228353 - DNA, 25 bp, Homo sapien
cgtgatcccagtacggatcagcacg

SEQ ID NO: 3228354 - DNA, 25 bp, Homo sapien
gatcccagtacggatcagcacggaa

SEQ ID NO: 3228355 - DNA, 25 bp, Homo sapien
tcccagtacggatcagcacggaagt

SEQ ID NO: 3228356 - DNA, 25 bp, Homo sapien
gtgatcccagtacggatcagcacgg

SEQ ID NO: 3228357 - DNA, 25 bp, Homo sapien
gtgtttagccaaatgccccaccctg

SEQ ID NO: 3228358 - DNA, 25 bp, Homo sapien
gaaaggctgtcgtcttatgccaaaa

SEQ ID NO: 3228359 - DNA, 25 bp, Homo sapien
tcacgggctggtaagtttcaaatcc

SEQ ID NO: 3228360 - DNA, 25 bp, Homo sapien
caataccaaccttgttcacgggctg

SEQ ID NO: 3228361 - DNA, 25 bp, Homo sapien
cttgctttttcacacggctccttaa

SEQ ID NO: 3228362 - DNA, 25 bp, Homo sapien
aaatatcactggattggaggagctc

SEQ ID NO: 3228363 - DNA, 25 bp, Homo sapien
atatcactggattggaggagctcac

SEQ ID NO: 3228364 - DNA, 25 bp, Homo sapien
tcttgctttttcacacggctcctta

SEQ ID NO: 3228365 - DNA, 25 bp, Homo sapien
gcgagagactcacagcccggcgcag

SEQ ID NO: 3228366 - DNA, 25 bp, Homo sapien
tcctccggcggcgagagactcacag

SEQ ID NO: 3228367 - DNA, 25 bp, Homo sapien
ttcctccggcggcgagagactcaca

SEQ ID NO: 3228368 - DNA, 25 bp, Homo sapien
ggcggcgagagactcacagcccggc

SEQ ID NO: 3228369 - DNA, 25 bp, Homo sapien
agggaagaccagaggaccactagcc

SEQ ID NO: 3228370 - DNA, 25 bp, Homo sapien
tcatcctgctcagcgggcttgggtc

SEQ ID NO: 3228371 - DNA, 25 bp, Homo sapien
agatgaacccaatcttcagcctcat

SEQ ID NO: 3228372 - DNA, 25 bp, Homo sapien
cagcaaactgcgtaagatgaaccca

SEQ ID NO: 3228373 - DNA, 25 bp, Homo sapien
ggcccatcctttgtttgcactaata

SEQ ID NO: 3228374 - DNA, 25 bp, Homo sapien
caagtgatgctgatgttccgccacc

SEQ ID NO: 3228375 - DNA, 25 bp, Homo sapien
tattccacgagttggcaagtgatgc

SEQ ID NO: 3228376 - DNA, 25 bp, Homo sapien
taaaagatcatcagaagggcgggac

SEQ ID NO: 3228377 - DNA, 25 bp, Homo sapien
gagattaaggacaaggagtatttcc

SEQ ID NO: 3228378 - DNA, 25 bp, Homo sapien
gaatatgatcggaaatgtaaggtca

SEQ ID NO: 3228379 - DNA, 25 bp, Homo sapien
tatcgaggtttgattgctgtgtggt

SEQ ID NO: 3228380 - DNA, 25 bp, Homo sapien
ttcacatcattcacttcagagaaag

SEQ ID NO: 3228381 - DNA, 25 bp, Homo sapien
gcaacaaacccactgtaaacttgaa

SEQ ID NO: 3228382 - DNA, 25 bp, Homo sapien
tacaaggggttacaccctgcaacaa

SEQ ID NO: 3228383 - DNA, 25 bp, Homo sapien
tctctttcatattaccatgtacaga

SEQ ID NO: 3228384 - DNA, 25 bp, Homo sapien
catgtacagatgttcctcgacttac

SEQ ID NO: 3228385 - DNA, 25 bp, Homo sapien
gacaaacctgtcaaagcacggtgat

SEQ ID NO: 3228386 - DNA, 25 bp, Homo sapien
aaaactgtggcaagtggcccaatgc

SEQ ID NO: 3228387 - DNA, 25 bp, Homo sapien
tactctgtacataacatgggctgtc

SEQ ID NO: 3228388 - DNA, 25 bp, Homo sapien
gctacacactttcacggagtggtga

SEQ ID NO: 3228389 - DNA, 25 bp, Homo sapien
tggataggatgggttgtagataatt

SEQ ID NO: 3228390 - DNA, 25 bp, Homo sapien
caaatctatacatatcctaacaaca

SEQ ID NO: 3228391 - DNA, 25 bp, Homo sapien
tactgtggactatgtctatgtatag

SEQ ID NO: 3228392 - DNA, 25 bp, Homo sapien
gcaagaaatacaccaatagctaatg

SEQ ID NO: 3228393 - DNA, 25 bp, Homo sapien
gcttttaacgtaccaatgtatgccg

SEQ ID NO: 3228394 - DNA, 25 bp, Homo sapien
caaggcagaattcagcgagcagagg

SEQ ID NO: 3228395 - DNA, 25 bp, Homo sapien
tttacacagctggatgataccatgc

SEQ ID NO: 3228396 - DNA, 25 bp, Homo sapien
caagtggtcaggaaaatcttcagag

SEQ ID NO: 3228397 - DNA, 25 bp, Homo sapien
cagacttttgcttataaccttccat

SEQ ID NO: 3228398 - DNA, 25 bp, Homo sapien
ctctcaatgctgctatgcaaatcca

SEQ ID NO: 3228399 - DNA, 25 bp, Homo sapien
aatccacagacttttgcttataacc

SEQ ID NO: 3228400 - DNA, 25 bp, Homo sapien
tcaatgctgctatgcaaatccacag

SEQ ID NO: 3228401 - DNA, 25 bp, Homo sapien
atcaaagctaacacactactcatta

SEQ ID NO: 3228402 - DNA, 25 bp, Homo sapien
cattatttgggaggttggtaaatgc

SEQ ID NO: 3228403 - DNA, 25 bp, Homo sapien
gatcaacaaaaagctaagtatcact

SEQ ID NO: 3228404 - DNA, 25 bp, Homo sapien
cttcatgtatgtgatttgagggtcc

SEQ ID NO: 3228405 - DNA, 25 bp, Homo sapien
tactgcaaatgtggacgtgttgaca

SEQ ID NO: 3228406 - DNA, 25 bp, Homo sapien
tgaaaccgcctctgaaacaactgct

SEQ ID NO: 3228407 - DNA, 25 bp, Homo sapien
taatcaaagactcacatgaaaccgc

SEQ ID NO: 3228408 - DNA, 25 bp, Homo sapien
aatatggtgcatactagccctaggg

SEQ ID NO: 3228409 - DNA, 25 bp, Homo sapien
gaatgctactatggctgaaaaccag

SEQ ID NO: 3228410 - DNA, 25 bp, Homo sapien
ctgaatgctactatggctgaaaacc

SEQ ID NO: 3228411 - DNA, 25 bp, Homo sapien
cagtctgaatgctactatggctgaa

SEQ ID NO: 3228412 - DNA, 25 bp, Homo sapien
gctactatggctgaaaaccagatta

SEQ ID NO: 3228413 - DNA, 25 bp, Homo sapien
ttttctatcaagaagtgcatagaaa

SEQ ID NO: 3228414 - DNA, 25 bp, Homo sapien
tttctatcaagaagtgcatagaaat

SEQ ID NO: 3228415 - DNA, 25 bp, Homo sapien
ttctatcaagaagtgcatagaaatt

SEQ ID NO: 3228416 - DNA, 25 bp, Homo sapien
cttttctatcaagaagtgcatagaa

SEQ ID NO: 3228417 - DNA, 25 bp, Homo sapien
tgtttgaggtttgcctggagtcact

SEQ ID NO: 3228418 - DNA, 25 bp, Homo sapien
taaggaatcctttggagtaacagga

SEQ ID NO: 3228419 - DNA, 25 bp, Homo sapien
tggagtcactgaaaagcccttacat

SEQ ID NO: 3228420 - DNA, 25 bp, Homo sapien
tctaaaagccctcagtctaaaatca

SEQ ID NO: 3228421 - DNA, 25 bp, Homo sapien
tgtcaatcaactctttgagttattg

SEQ ID NO: 3228422 - DNA, 25 bp, Homo sapien
gaagattatccaaaaccatctacat

SEQ ID NO: 3228423 - DNA, 25 bp, Homo sapien
gagttattgaagataacctcatatg

SEQ ID NO: 3228424 - DNA, 25 bp, Homo sapien
agtgcaatcccctcccttctggaga

SEQ ID NO: 3228425 - DNA, 25 bp, Homo sapien
tgcagttacaagtgggcaagtctgt

SEQ ID NO: 3228426 - DNA, 25 bp, Homo sapien
aacttaagcagggtaaccaggctga

SEQ ID NO: 3228427 - DNA, 25 bp, Homo sapien
gaaacactgggactcttgacaatgg

SEQ ID NO: 3228428 - DNA, 25 bp, Homo sapien
ttttgagccaattaaatgccacccc

SEQ ID NO: 3228429 - DNA, 25 bp, Homo sapien
tctctctgcttagttacagctggat

SEQ ID NO: 3228430 - DNA, 25 bp, Homo sapien
tttcagagcactgagcgatgactgc

SEQ ID NO: 3228431 - DNA, 25 bp, Homo sapien
gactagacatttccggctgactgaa

SEQ ID NO: 3228432 - DNA, 25 bp, Homo sapien
cactgagcgatgactgcattgggag

SEQ ID NO: 3228433 - DNA, 25 bp, Homo sapien
gggaatgtggagtgcaccagcctca

SEQ ID NO: 3228434 - DNA, 25 bp, Homo sapien
ttaaattggtcactctgcatagggc

SEQ ID NO: 3228435 - DNA, 25 bp, Homo sapien
tatgatgttgatgtgtaggctgctc

SEQ ID NO: 3228436 - DNA, 25 bp, Homo sapien
tcaaaacatccaaaagggcatgtag

SEQ ID NO: 3228437 - DNA, 25 bp, Homo sapien
tagtagtcaagggatcgctaagtct

SEQ ID NO: 3228438 - DNA, 25 bp, Homo sapien
tcaacatgaggccatggtaccacag

SEQ ID NO: 3228439 - DNA, 25 bp, Homo sapien
gagctagtccattgccgcctcggtt

SEQ ID NO: 3228440 - DNA, 25 bp, Homo sapien
tcaaagttaccgaggatccctgggc

SEQ ID NO: 3228441 - DNA, 25 bp, Homo sapien
tctggtcccaaaaccaatggcttgg

SEQ ID NO: 3228442 - DNA, 25 bp, Homo sapien
ttgtaattgcaactaagatagcttt

SEQ ID NO: 3228443 - DNA, 25 bp, Homo sapien
tttgtaattgcaactaagatagctt

SEQ ID NO: 3228444 - DNA, 25 bp, Homo sapien
tgtaattgcaactaagatagctttt

SEQ ID NO: 3228445 - DNA, 25 bp, Homo sapien
tgcaggaagaggcaataccacaaaa

SEQ ID NO: 3228446 - DNA, 25 bp, Homo sapien
gctcgagtgataacagctgcacacc

SEQ ID NO: 3228447 - DNA, 25 bp, Homo sapien
gcatgccacaaagttcaggctcgag

SEQ ID NO: 3228448 - DNA, 25 bp, Homo sapien
gctgcttgctggctggttctattca

SEQ ID NO: 3228449 - DNA, 25 bp, Homo sapien
tgaggtggggtgtctctagttttac

SEQ ID NO: 3228450 - DNA, 25 bp, Homo sapien
tctagttttactggatatgaaacat

SEQ ID NO: 3228451 - DNA, 25 bp, Homo sapien
tttactggatatgaaacatcctagc

SEQ ID NO: 3228452 - DNA, 25 bp, Homo sapien
tagttttactggatatgaaacatcc

SEQ ID NO: 3228453 - DNA, 25 bp, Homo sapien
tcatttccggaatcaattgagttat

SEQ ID NO: 3228454 - DNA, 25 bp, Homo sapien
ctcatttccggaatcaattgagtta

SEQ ID NO: 3228455 - DNA, 25 bp, Homo sapien
gcagcagaggagacgacagcagtga

SEQ ID NO: 3228456 - DNA, 25 bp, Homo sapien
agcagcagaggagacgacagcagtg

SEQ ID NO: 3228457 - DNA, 25 bp, Homo sapien
ccttttggtgaggacattagaggcg

SEQ ID NO: 3228458 - DNA, 25 bp, Homo sapien
tcacagctgacagttgttaagagtg

SEQ ID NO: 3228459 - DNA, 25 bp, Homo sapien
ttagaggcgtcaggtcctatgaccg

SEQ ID NO: 3228460 - DNA, 25 bp, Homo sapien
tgaccgtggagtcactaagcactgg

SEQ ID NO: 3228461 - DNA, 25 bp, Homo sapien
gatcctcaaacacagtaacggtacg

SEQ ID NO: 3228462 - DNA, 25 bp, Homo sapien
aaagagctgcaccatgatctgccag

SEQ ID NO: 3228463 - DNA, 25 bp, Homo sapien
ttaccatggctgaatcctagggctg

SEQ ID NO: 3228464 - DNA, 25 bp, Homo sapien
tacggttagaattcacgaaggaagc

SEQ ID NO: 3228465 - DNA, 25 bp, Homo sapien
ggccaaaatggagataagtccccat

SEQ ID NO: 3228466 - DNA, 25 bp, Homo sapien
gtgagggccaaaatggagataagtc

SEQ ID NO: 3228467 - DNA, 25 bp, Homo sapien
gagggccaaaatggagataagtccc

SEQ ID NO: 3228468 - DNA, 25 bp, Homo sapien
gggccaaaatggagataagtcccca

SEQ ID NO: 3228469 - DNA, 25 bp, Homo sapien
taaggaataggatgacatgtggcaa

SEQ ID NO: 3228470 - DNA, 25 bp, Homo sapien
ctctatgggatggaaggcttaagac

SEQ ID NO: 3228471 - DNA, 25 bp, Homo sapien
cacgacaggctcttgtagacaagcg

SEQ ID NO: 3228472 - DNA, 25 bp, Homo sapien
gggagcccagacgtttccacatgct

SEQ ID NO: 3228473 - DNA, 25 bp, Homo sapien
catgctcctaactacgctgaaagga

SEQ ID NO: 3228474 - DNA, 25 bp, Homo sapien
taaaaactgtcaacttgcctgcttc

SEQ ID NO: 3228475 - DNA, 25 bp, Homo sapien
catggatttgcatgcaaggtgtgta

SEQ ID NO: 3228476 - DNA, 25 bp, Homo sapien
gggaacaaatagaagtgaccatgct

SEQ ID NO: 3228477 - DNA, 25 bp, Homo sapien
gcaggccttgcgttcttacagagga

SEQ ID NO: 3228478 - DNA, 25 bp, Homo sapien
gatttacaacggacaccagaattgg

SEQ ID NO: 3228479 - DNA, 25 bp, Homo sapien
tctaaggcagaagatagcaacttgg

SEQ ID NO: 3228480 - DNA, 25 bp, Homo sapien
taaaccaggttgtgtgccagaataa

SEQ ID NO: 3228481 - DNA, 25 bp, Homo sapien
tctcatgagggttgaccatccttca

SEQ ID NO: 3228482 - DNA, 25 bp, Homo sapien
tggaagacaatgacaacgctcgaag

SEQ ID NO: 3228483 - DNA, 25 bp, Homo sapien
tacactgtggactgttctcatgagg

SEQ ID NO: 3228484 - DNA, 25 bp, Homo sapien
gagcaagttttcatcataatgccaa

SEQ ID NO: 3228485 - DNA, 25 bp, Homo sapien
gccttctgagcaccaatacttcgtg

SEQ ID NO: 3228486 - DNA, 25 bp, Homo sapien
tccacagcttaatatattcatccag

SEQ ID NO: 3228487 - DNA, 25 bp, Homo sapien
tcatttcgaaataccttcactaggc

SEQ ID NO: 3228488 - DNA, 25 bp, Homo sapien
tacttcgtgcttgaattaaaccttc

SEQ ID NO: 3228489 - DNA, 25 bp, Homo sapien
cagtgggcatcaaggtatatcaaaa

SEQ ID NO: 3228490 - DNA, 25 bp, Homo sapien
tacaagtggtgcataccagttaact

SEQ ID NO: 3228491 - DNA, 25 bp, Homo sapien
cagttaactgccacctcacagtggg

SEQ ID NO: 3228492 - DNA, 25 bp, Homo sapien
gagctacaagtggtgcataccagtt

SEQ ID NO: 3228493 - DNA, 25 bp, Homo sapien
tctggcaaaaccatcttcatcccca

SEQ ID NO: 3228494 - DNA, 25 bp, Homo sapien
tgtggcttagaggaatacgtttcca

SEQ ID NO: 3228495 - DNA, 25 bp, Homo sapien
tgtggttcaatggaataatcattcc

SEQ ID NO: 3228496 - DNA, 25 bp, Homo sapien
tattagaggcacagtacatgtagtt

SEQ ID NO: 3228497 - DNA, 25 bp, Homo sapien
gcgtatgtatggacccacacattta

SEQ ID NO: 3228498 - DNA, 25 bp, Homo sapien
aagatcaaatggaagcgtatgtatg

SEQ ID NO: 3228499 - DNA, 25 bp, Homo sapien
tgttgatggcagcaaagatcaaatg

SEQ ID NO: 3228500 - DNA, 25 bp, Homo sapien
ccacacatttatacgagttcatggg

SEQ ID NO: 3228501 - DNA, 25 bp, Homo sapien
tataagcggcacagtgcaaatggtt

SEQ ID NO: 3228502 - DNA, 25 bp, Homo sapien
ctataagcggcacagtgcaaatggt

SEQ ID NO: 3228503 - DNA, 25 bp, Homo sapien
ttccagagcatactccaatcccatg

SEQ ID NO: 3228504 - DNA, 25 bp, Homo sapien
tgctcctcgggcatacccatcttca

SEQ ID NO: 3228505 - DNA, 25 bp, Homo sapien
gggtcagaggcacccgtttccagag

SEQ ID NO: 3228506 - DNA, 25 bp, Homo sapien
gggtataatttcatatgtgttgcca

SEQ ID NO: 3228507 - DNA, 25 bp, Homo sapien
tacgtctcagtagtggacatcacat

SEQ ID NO: 3228508 - DNA, 25 bp, Homo sapien
cggcatgaacgtggaaataaaagtc

SEQ ID NO: 3228509 - DNA, 25 bp, Homo sapien
caagaggttaataggttagcagcaa

SEQ ID NO: 3228510 - DNA, 25 bp, Homo sapien
caattacaatggagcaaatggagca

SEQ ID NO: 3228511 - DNA, 25 bp, Homo sapien
atggtcaccagtgagttaatcaaca

SEQ ID NO: 3228512 - DNA, 25 bp, Homo sapien
cccattcatctcagtatatacttga

SEQ ID NO: 3228513 - DNA, 25 bp, Homo sapien
atcaacagataacctccctttaatt

SEQ ID NO: 3228514 - DNA, 25 bp, Homo sapien
caccagtgagttaatcaacagataa

SEQ ID NO: 3228515 - DNA, 25 bp, Homo sapien
cacagaattggtccctcatccttca

SEQ ID NO: 3228516 - DNA, 25 bp, Homo sapien
ggtctcagcctaaatgacactttgt

SEQ ID NO: 3228517 - DNA, 25 bp, Homo sapien
tcccaagctggattaggttcatctt

SEQ ID NO: 3228518 - DNA, 25 bp, Homo sapien
catactacttatcacagctgctgtt

SEQ ID NO: 3228519 - DNA, 25 bp, Homo sapien
gagacctggatcatagagacccaat

SEQ ID NO: 3228520 - DNA, 25 bp, Homo sapien
caccccaaatctggagacctggatc

SEQ ID NO: 3228521 - DNA, 25 bp, Homo sapien
caaagaagaactctcgttcaatggc

SEQ ID NO: 3228522 - DNA, 25 bp, Homo sapien
ctctcgttcaatggcaaataatccc

SEQ ID NO: 3228523 - DNA, 25 bp, Homo sapien
caacacgagaacaaggaacaaataa

SEQ ID NO: 3228524 - DNA, 25 bp, Homo sapien
cttgccagccctcaagacggtagat

SEQ ID NO: 3228525 - DNA, 25 bp, Homo sapien
ctcaagacggtagatatgtccaaca

SEQ ID NO: 3228526 - DNA, 25 bp, Homo sapien
acataaatgggcggaggatttcctt

SEQ ID NO: 3228527 - DNA, 25 bp, Homo sapien
tcaggacgactagcatagaagtagt

SEQ ID NO: 3228528 - DNA, 25 bp, Homo sapien
agcatagaagtagtctttatattca

SEQ ID NO: 3228529 - DNA, 25 bp, Homo sapien
ctgcgattcaggacgactagcatag

SEQ ID NO: 3228530 - DNA, 25 bp, Homo sapien
gacgactagcatagaagtagtcttt

SEQ ID NO: 3228531 - DNA, 25 bp, Homo sapien
tgcagttgtgatcttctcgaaattt

SEQ ID NO: 3228532 - DNA, 25 bp, Homo sapien
aattttttcagctccgatatatccc

SEQ ID NO: 3228533 - DNA, 25 bp, Homo sapien
ggtgatatcataagctatttcttcc

SEQ ID NO: 3228534 - DNA, 25 bp, Homo sapien
ccgatatatccccatatggtaatgc

SEQ ID NO: 3228535 - DNA, 25 bp, Homo sapien
tggagactaccagaaaggactttgt

SEQ ID NO: 3228536 - DNA, 25 bp, Homo sapien
tgtaggctctgaaacactagtgaac

SEQ ID NO: 3228537 - DNA, 25 bp, Homo sapien
tatgaagtgcgagacaaagacagga

SEQ ID NO: 3228538 - DNA, 25 bp, Homo sapien
tagaccaggcaacaagggatcagat

SEQ ID NO: 3228539 - DNA, 25 bp, Homo sapien
cctgcctggaggagctccaaagact

SEQ ID NO: 3228540 - DNA, 25 bp, Homo sapien
agactgccccaagagacacctttaa

SEQ ID NO: 3228541 - DNA, 25 bp, Homo sapien
caagagacacctttaaaacaggtag

SEQ ID NO: 3228542 - DNA, 25 bp, Homo sapien
ggagctccaaagactgccccaagag

SEQ ID NO: 3228543 - DNA, 25 bp, Homo sapien
gggacctctcccaaatggctatgca

SEQ ID NO: 3228544 - DNA, 25 bp, Homo sapien
ggtaataaacactggcctggcccta

SEQ ID NO: 3228545 - DNA, 25 bp, Homo sapien
catgaccaggcagtgaggcttttct

SEQ ID NO: 3228546 - DNA, 25 bp, Homo sapien
tatgaagaggtgcaagtcatggtcc

SEQ ID NO: 3228547 - DNA, 25 bp, Homo sapien
tttcccatgctatcaatgcagtaag

SEQ ID NO: 3228548 - DNA, 25 bp, Homo sapien
cagtaagcagtttcgaagcctctga

SEQ ID NO: 3228549 - DNA, 25 bp, Homo sapien
gggtcctagttcaacaaagcctcca

SEQ ID NO: 3228550 - DNA, 25 bp, Homo sapien
cccatcctgtggcagggtcctagtt

SEQ ID NO: 3228551 - DNA, 25 bp, Homo sapien
catactgcatgagttgatttgcttc

SEQ ID NO: 3228552 - DNA, 25 bp, Homo sapien
tgtcaaacactggtcatactgcatg

SEQ ID NO: 3228553 - DNA, 25 bp, Homo sapien
ccttaaattcatttagattacagtg

SEQ ID NO: 3228554 - DNA, 25 bp, Homo sapien
cagtgtgtaatcataacttttgatc

SEQ ID NO: 3228555 - DNA, 25 bp, Homo sapien
tcctgaaggaatatgagtaaatctg

SEQ ID NO: 3228556 - DNA, 25 bp, Homo sapien
tgaatacttgatgcaggacctctga

SEQ ID NO: 3228557 - DNA, 25 bp, Homo sapien
tttactggagtcacaattggagatg

SEQ ID NO: 3228558 - DNA, 25 bp, Homo sapien
ggacctctgagcgatctaaacactt

SEQ ID NO: 3228559 - DNA, 25 bp, Homo sapien
caagggcttggaaagtcttacctca

SEQ ID NO: 3228560 - DNA, 25 bp, Homo sapien
tatatgaaagtctggctactccaac

SEQ ID NO: 3228561 - DNA, 25 bp, Homo sapien
cagcaggtttcaggcggttttcagt

SEQ ID NO: 3228562 - DNA, 25 bp, Homo sapien
cacaggttgcacagcttaggttata

SEQ ID NO: 3228563 - DNA, 25 bp, Homo sapien
gttaaaatggttgatcacagatcag

SEQ ID NO: 3228564 - DNA, 25 bp, Homo sapien
gagctaagcttggaagaaacaaatt

SEQ ID NO: 3228565 - DNA, 25 bp, Homo sapien
gcttaacttacttgccattctgctc

SEQ ID NO: 3228566 - DNA, 25 bp, Homo sapien
taatgataccatgattacaggatca

SEQ ID NO: 3228567 - DNA, 25 bp, Homo sapien
aaatggagcctatttgcaaacacac

SEQ ID NO: 3228568 - DNA, 25 bp, Homo sapien
aaatagtcattatggcagcagcttc

SEQ ID NO: 3228569 - DNA, 25 bp, Homo sapien
gccacctttcttaggcctatgcata

SEQ ID NO: 3228570 - DNA, 25 bp, Homo sapien
taacgaattgcacaaagtacccatt

SEQ ID NO: 3228571 - DNA, 25 bp, Homo sapien
tcccacagagttagagggatattga

SEQ ID NO: 3228572 - DNA, 25 bp, Homo sapien
agccctgaggttcttgatagtctag

SEQ ID NO: 3228573 - DNA, 25 bp, Homo sapien
tgagtactggacttgattatgtcct

SEQ ID NO: 3228574 - DNA, 25 bp, Homo sapien
ttcctggcaccaaataaatattcat

SEQ ID NO: 3228575 - DNA, 25 bp, Homo sapien
tagttcttagacacagttgacctag

SEQ ID NO: 3228576 - DNA, 25 bp, Homo sapien
ggctcaaagaagaagaacgaaccag

SEQ ID NO: 3228577 - DNA, 25 bp, Homo sapien
tatggtagcacagcaaacttgtagg

SEQ ID NO: 3228578 - DNA, 25 bp, Homo sapien
gaattcaagtgcagctcaatactag

SEQ ID NO: 3228579 - DNA, 25 bp, Homo sapien
gacgcggatctgtcaacatgggtaa

SEQ ID NO: 3228580 - DNA, 25 bp, Homo sapien
caatttcgcggaattctccaagaag

SEQ ID NO: 3228581 - DNA, 25 bp, Homo sapien
gccttaggcaggtagtaggcaactc

SEQ ID NO: 3228582 - DNA, 25 bp, Homo sapien
ggcaaaatgtcctcgtacgccttct

SEQ ID NO: 3228583 - DNA, 25 bp, Homo sapien
aaaacaagaggctgaggattgcgtt

SEQ ID NO: 3228584 - DNA, 25 bp, Homo sapien
tcaagttgccgtggcgcggagaact

SEQ ID NO: 3228585 - DNA, 25 bp, Homo sapien
ccccgtgagggaagcgtctccgttg

SEQ ID NO: 3228586 - DNA, 25 bp, Homo sapien
gattgcgttagagataaaccagttc

SEQ ID NO: 3228587 - DNA, 25 bp, Homo sapien
gcgtgaggcccgccatttttcaaac

SEQ ID NO: 3228588 - DNA, 25 bp, Homo sapien
ccctcggcgggaagcatcttacttt

SEQ ID NO: 3228589 - DNA, 25 bp, Homo sapien
gacctcttctgttaccttagcgcca

SEQ ID NO: 3228590 - DNA, 25 bp, Homo sapien
gagttctacgacaacctcagcgaca

SEQ ID NO: 3228591 - DNA, 25 bp, Homo sapien
catttattattctctgggcggcgca

SEQ ID NO: 3228592 - DNA, 25 bp, Homo sapien
cacaccaggatgtcaattaaagtcc

SEQ ID NO: 3228593 - DNA, 25 bp, Homo sapien
aaagcagcttgtgacgctggtaagc

SEQ ID NO: 3228594 - DNA, 25 bp, Homo sapien
gtaaacctagataaacaactgctgg

SEQ ID NO: 3228595 - DNA, 25 bp, Homo sapien
taacatgtgccaacgaacttactga

SEQ ID NO: 3228596 - DNA, 25 bp, Homo sapien
acccattcctaagtgtacaattcac

SEQ ID NO: 3228597 - DNA, 25 bp, Homo sapien
cattcctaagtgtacaattcactgg

SEQ ID NO: 3228598 - DNA, 25 bp, Homo sapien
ttacccattcctaagtgtacaattc

SEQ ID NO: 3228599 - DNA, 25 bp, Homo sapien
cattttacccattcctaagtgtaca

SEQ ID NO: 3228600 - DNA, 25 bp, Homo sapien
cagatctttgcctcttcagtggaag

SEQ ID NO: 3228601 - DNA, 25 bp, Homo sapien
tttgcctcttcagtggaagagggag

SEQ ID NO: 3228602 - DNA, 25 bp, Homo sapien
tgttttctggatttcattacctctc

SEQ ID NO: 3228603 - DNA, 25 bp, Homo sapien
caaaatggtctgcattctcacagat

SEQ ID NO: 3228604 - DNA, 25 bp, Homo sapien
agctaacagtccgcaattccttggt

SEQ ID NO: 3228605 - DNA, 25 bp, Homo sapien
gaagctaacagtccgcaattccttg

SEQ ID NO: 3228606 - DNA, 25 bp, Homo sapien
ttgaagctaacagtccgcaattcct

SEQ ID NO: 3228607 - DNA, 25 bp, Homo sapien
ctaacagtccgcaattccttggtgg

SEQ ID NO: 3228608 - DNA, 25 bp, Homo sapien
ccagtgcttcatgcaggtccttctc

SEQ ID NO: 3228609 - DNA, 25 bp, Homo sapien
ccctcctccagtgcttcatgcaggt

SEQ ID NO: 3228610 - DNA, 25 bp, Homo sapien
ccaaccatcccctcattttcaccaa

SEQ ID NO: 3228611 - DNA, 25 bp, Homo sapien
tccctagctagttttgaatcctcaa

SEQ ID NO: 3228612 - DNA, 25 bp, Homo sapien
ctaagtgggctactgacaactataa

SEQ ID NO: 3228613 - DNA, 25 bp, Homo sapien
tgacaactataacattcttcttcat

SEQ ID NO: 3228614 - DNA, 25 bp, Homo sapien
ttctatagttatagccttggtgtca

SEQ ID NO: 3228615 - DNA, 25 bp, Homo sapien
gcagatgggaacatctacataactg

SEQ ID NO: 3228616 - DNA, 25 bp, Homo sapien
caatacaaacgctggtcgaatgttc

SEQ ID NO: 3228617 - DNA, 25 bp, Homo sapien
ctgcattagctctaccgggcgcggg

SEQ ID NO: 3228618 - DNA, 25 bp, Homo sapien
aacgctggtcgaatgttcccagaaa

SEQ ID NO: 3228619 - DNA, 25 bp, Homo sapien
ccagaaacttccctgcattagctct

SEQ ID NO: 3228620 - DNA, 25 bp, Homo sapien
aagttggccgcctcctgaggtggag

SEQ ID NO: 3228621 - DNA, 25 bp, Homo sapien
gtggagtacggaccagttgacaaca

SEQ ID NO: 3228622 - DNA, 25 bp, Homo sapien
ttgacaacagggctccttttcacct

SEQ ID NO: 3228623 - DNA, 25 bp, Homo sapien
tacggaccagttgacaacagggctc

SEQ ID NO: 3228624 - DNA, 25 bp, Homo sapien
tctgtttctagggaattcgggctgt

SEQ ID NO: 3228625 - DNA, 25 bp, Homo sapien
cgggaaaacaggagcgtgtgattgg

SEQ ID NO: 3228626 - DNA, 25 bp, Homo sapien
gctgctggaatatcgtagaattggt

SEQ ID NO: 3228627 - DNA, 25 bp, Homo sapien
gaattcgggctgtgtttagctgctg

SEQ ID NO: 3228628 - DNA, 25 bp, Homo sapien
cgcgcggccccatgggaattgtagt

SEQ ID NO: 3228629 - DNA, 25 bp, Homo sapien
gggacttcagcagttggaccgctac

SEQ ID NO: 3228630 - DNA, 25 bp, Homo sapien
gggaccccgctcactgtcacatggg

SEQ ID NO: 3228631 - DNA, 25 bp, Homo sapien
cgccatgagggacggaggaactact

SEQ ID NO: 3228632 - DNA, 25 bp, Homo sapien
agggccgggacgcagactcgagcgt

SEQ ID NO: 3228633 - DNA, 25 bp, Homo sapien
ggccgggacgcagactcgagcgtct

SEQ ID NO: 3228634 - DNA, 25 bp, Homo sapien
gccgggacgcagactcgagcgtctc

SEQ ID NO: 3228635 - DNA, 25 bp, Homo sapien
ctgagggccgggacgcagactcgag

SEQ ID NO: 3228636 - DNA, 25 bp, Homo sapien
ctgctggcaccgaaacagtggacag

SEQ ID NO: 3228637 - DNA, 25 bp, Homo sapien
gctggcaccgaaacagtggacagtg

SEQ ID NO: 3228638 - DNA, 25 bp, Homo sapien
tgctggcaccgaaacagtggacagt

SEQ ID NO: 3228639 - DNA, 25 bp, Homo sapien
tgcacaccaagttagacagcggcac

SEQ ID NO: 3228640 - DNA, 25 bp, Homo sapien
gttagacagcggcacggccaaacac

SEQ ID NO: 3228641 - DNA, 25 bp, Homo sapien
agcggcacggccaaacaccaactgt

SEQ ID NO: 3228642 - DNA, 25 bp, Homo sapien
gctccgcctctctccgctccggcag

SEQ ID NO: 3228643 - DNA, 25 bp, Homo sapien
gtctccgagctcccgaggccggcgc

SEQ ID NO: 3228644 - DNA, 25 bp, Homo sapien
cggcagcgaccactgcggccactgc

SEQ ID NO: 3228645 - DNA, 25 bp, Homo sapien
actgcggccactgcggcggccgcat

SEQ ID NO: 3228646 - DNA, 25 bp, Homo sapien
gccgcggctcatctcgtcaggcgtg

SEQ ID NO: 3228647 - DNA, 25 bp, Homo sapien
ctcatctcgtcaggcgtgaagccgt

SEQ ID NO: 3228648 - DNA, 25 bp, Homo sapien
gctcttatccagctcgatcttcacc

SEQ ID NO: 3228649 - DNA, 25 bp, Homo sapien
tcttatccagctcgatcttcacctt

SEQ ID NO: 3228650 - DNA, 25 bp, Homo sapien
ctcttatccagctcgatcttcacct

SEQ ID NO: 3228651 - DNA, 25 bp, Homo sapien
tctcctagacgacgggatttagtac

SEQ ID NO: 3228652 - DNA, 25 bp, Homo sapien
tgttcgtgaaggtcctccgctttct

SEQ ID NO: 3228653 - DNA, 25 bp, Homo sapien
acaggatcttccttgttcgtgaagg

SEQ ID NO: 3228654 - DNA, 25 bp, Homo sapien
gaggagacggaacacagaaaagaac

SEQ ID NO: 3228655 - DNA, 25 bp, Homo sapien
atcttgaacaggtgaatcacctcca

SEQ ID NO: 3228656 - DNA, 25 bp, Homo sapien
gtttttatgataatcacatatgtaa

SEQ ID NO: 3228657 - DNA, 25 bp, Homo sapien
tcttgaacaggtgaatcacctccat

SEQ ID NO: 3228658 - DNA, 25 bp, Homo sapien
tgaattaagtttttatgataatcac

SEQ ID NO: 3228659 - DNA, 25 bp, Homo sapien
gtgtatttacttgtaattggtataa

SEQ ID NO: 3228660 - DNA, 25 bp, Homo sapien
agtgtatttacttgtaattggtata

SEQ ID NO: 3228661 - DNA, 25 bp, Homo sapien
aacaagttgtgctttattaagtcct

SEQ ID NO: 3228662 - DNA, 25 bp, Homo sapien
tagaagaataatagacttacctggg

SEQ ID NO: 3228663 - DNA, 25 bp, Homo sapien
cagacgtaagagatcacatgcatca

SEQ ID NO: 3228664 - DNA, 25 bp, Homo sapien
acttttgctagtagagaaaccaaca

SEQ ID NO: 3228665 - DNA, 25 bp, Homo sapien
gaaggatgtttacctgcttccttgc

SEQ ID NO: 3228666 - DNA, 25 bp, Homo sapien
aagaaaaagtgctatgtgataaggg

SEQ ID NO: 3228667 - DNA, 25 bp, Homo sapien
tataacaggtttcataaactacgta

SEQ ID NO: 3228668 - DNA, 25 bp, Homo sapien
aaattttagatataacaggtttcat

SEQ ID NO: 3228669 - DNA, 25 bp, Homo sapien
aaaaagtgctatgtgataagggcta

SEQ ID NO: 3228670 - DNA, 25 bp, Homo sapien
tagacctaaagtggcaaccaactat

SEQ ID NO: 3228671 - DNA, 25 bp, Homo sapien
cactggaatagacctaaagtggcaa

SEQ ID NO: 3228672 - DNA, 25 bp, Homo sapien
tgaacaccactatcaaccttgagat

SEQ ID NO: 3228673 - DNA, 25 bp, Homo sapien
ctagtgaacaccactatcaaccttg

SEQ ID NO: 3228674 - DNA, 25 bp, Homo sapien
atgagtttccaactaattattagag

SEQ ID NO: 3228675 - DNA, 25 bp, Homo sapien
aattattagagtcagaaacaaagaa

SEQ ID NO: 3228676 - DNA, 25 bp, Homo sapien
gagtttccaactaattattagagtc

SEQ ID NO: 3228677 - DNA, 25 bp, Homo sapien
ccaactaattattagagtcagaaac

SEQ ID NO: 3228678 - DNA, 25 bp, Homo sapien
gcggagtgactatgtatggctgttt

SEQ ID NO: 3228679 - DNA, 25 bp, Homo sapien
ggttcatccaatttgcagtacttca

SEQ ID NO: 3228680 - DNA, 25 bp, Homo sapien
gaagatatataagtggccaagagca

SEQ ID NO: 3228681 - DNA, 25 bp, Homo sapien
tatttacgtaccagcagttctactg

SEQ ID NO: 3228682 - DNA, 25 bp, Homo sapien
gtattctggagaacaccattcctga

SEQ ID NO: 3228683 - DNA, 25 bp, Homo sapien
gattccttgcaacaatcaatgagaa

SEQ ID NO: 3228684 - DNA, 25 bp, Homo sapien
aaagatctctttcgtgattccttgc

SEQ ID NO: 3228685 - DNA, 25 bp, Homo sapien
cagagacgttttctttggaccaaag

SEQ ID NO: 3228686 - DNA, 25 bp, Homo sapien
gacctgacacagattgatgtcaatg

SEQ ID NO: 3228687 - DNA, 25 bp, Homo sapien
ttactgcaacttcagcgaattgctc

SEQ ID NO: 3228688 - DNA, 25 bp, Homo sapien
acttcagcgaattgctctgctgccc

SEQ ID NO: 3228689 - DNA, 25 bp, Homo sapien
agattgatgtcaatgtccaggatca

SEQ ID NO: 3228690 - DNA, 25 bp, Homo sapien
aagcaaaacagtagctccttccggg

SEQ ID NO: 3228691 - DNA, 25 bp, Homo sapien
tccttccgggaatcaaggcatcaac

SEQ ID NO: 3228692 - DNA, 25 bp, Homo sapien
cctgagcgatgttaagaggcaaagc

SEQ ID NO: 3228693 - DNA, 25 bp, Homo sapien
cagagacagagtatcagcaagggca

SEQ ID NO: 3228694 - DNA, 25 bp, Homo sapien
cacagactcaggattatagcaagca

SEQ ID NO: 3228695 - DNA, 25 bp, Homo sapien
taagccacttggaatcaaagctccc

SEQ ID NO: 3228696 - DNA, 25 bp, Homo sapien
gaaaagattacccaaggcaaagagc

SEQ ID NO: 3228697 - DNA, 25 bp, Homo sapien
taagctagagattctcaacctggga

SEQ ID NO: 3228698 - DNA, 25 bp, Homo sapien
tgccctgcctatcctcacaagaaag

SEQ ID NO: 3228699 - DNA, 25 bp, Homo sapien
cacacgttctcaccttcctagagga

SEQ ID NO: 3228700 - DNA, 25 bp, Homo sapien
ttcaccttaggtgggccatctgctt

SEQ ID NO: 3228701 - DNA, 25 bp, Homo sapien
caagctcctacagctttcctggagg

SEQ ID NO: 3228702 - DNA, 25 bp, Homo sapien
tcttataaagcagaactcttgcagc

SEQ ID NO: 3228703 - DNA, 25 bp, Homo sapien
tgaaatccggagagttctaggctat

SEQ ID NO: 3228704 - DNA, 25 bp, Homo sapien
ccagaggtgctgtttagttttaaca

SEQ ID NO: 3228705 - DNA, 25 bp, Homo sapien
ccaggtggcgctaaataacaactaa

SEQ ID NO: 3228706 - DNA, 25 bp, Homo sapien
tgtgcagttttcatgatcgacgcta

SEQ ID NO: 3228707 - DNA, 25 bp, Homo sapien
ccaaattgtttgtgcggtaatccac

SEQ ID NO: 3228708 - DNA, 25 bp, Homo sapien
caatctgaggcatcattaatgtgca

SEQ ID NO: 3228709 - DNA, 25 bp, Homo sapien
gacgctaatcactaccgccaaattg

SEQ ID NO: 3228710 - DNA, 25 bp, Homo sapien
cctgccaggatagggactgtcaaca

SEQ ID NO: 3228711 - DNA, 25 bp, Homo sapien
catgactggctttgacactgggtgg

SEQ ID NO: 3228712 - DNA, 25 bp, Homo sapien
tagctcctcatactttaagtggtgg

SEQ ID NO: 3228713 - DNA, 25 bp, Homo sapien
tcaaaaatcagtctcctagggaagc

SEQ ID NO: 3228714 - DNA, 25 bp, Homo sapien
taaatatgctattcagcaggtgagg

SEQ ID NO: 3228715 - DNA, 25 bp, Homo sapien
tactgccagatcaaataagtggtat

SEQ ID NO: 3228716 - DNA, 25 bp, Homo sapien
ggagggcaaatgagttaataagacc

SEQ ID NO: 3228717 - DNA, 25 bp, Homo sapien
aagttattgcgttaagtactgccag

SEQ ID NO: 3228718 - DNA, 25 bp, Homo sapien
tactgtcttttcctgcaattaagat

SEQ ID NO: 3228719 - DNA, 25 bp, Homo sapien
ttggcactgcctatgttttttcatt

SEQ ID NO: 3228720 - DNA, 25 bp, Homo sapien
aatccgtgtttctatactgtctttt

SEQ ID NO: 3228721 - DNA, 25 bp, Homo sapien
ctgctgtttttaaatccgtgtttct

SEQ ID NO: 3228722 - DNA, 25 bp, Homo sapien
tttctgatagtgtccatagcaaagc

SEQ ID NO: 3228723 - DNA, 25 bp, Homo sapien
caaagctacaaagtcttggtgtttc

SEQ ID NO: 3228724 - DNA, 25 bp, Homo sapien
tgtttcttggaatgatgtggtatag

SEQ ID NO: 3228725 - DNA, 25 bp, Homo sapien
tcagtgtgatatttgaaaccgttct

SEQ ID NO: 3228726 - DNA, 25 bp, Homo sapien
accacaattttgatcaaaccaactg

SEQ ID NO: 3228727 - DNA, 25 bp, Homo sapien
caaccacaattttgatcaaaccaac

SEQ ID NO: 3228728 - DNA, 25 bp, Homo sapien
cacaattttgatcaaaccaactgac

SEQ ID NO: 3228729 - DNA, 25 bp, Homo sapien
ccacaattttgatcaaaccaactga

SEQ ID NO: 3228730 - DNA, 25 bp, Homo sapien
ttggaaaccatgtaggtgtccagga

SEQ ID NO: 3228731 - DNA, 25 bp, Homo sapien
attaagtcccaaaagcaatagttga

SEQ ID NO: 3228732 - DNA, 25 bp, Homo sapien
cagggcctgcaaatatttagaatcc

SEQ ID NO: 3228733 - DNA, 25 bp, Homo sapien
tctacgataattattgtccactaca

SEQ ID NO: 3228734 - DNA, 25 bp, Homo sapien
cacaggtgtcctccactgtaattga

SEQ ID NO: 3228735 - DNA, 25 bp, Homo sapien
gacagagtctgcctatgatggccag

SEQ ID NO: 3228736 - DNA, 25 bp, Homo sapien
cctccactgtaattgactagttttt

SEQ ID NO: 3228737 - DNA, 25 bp, Homo sapien
aactgatccttccacagcggcatcc

SEQ ID NO: 3228738 - DNA, 25 bp, Homo sapien
gagcagctgaagtcgtttgaagaaa

SEQ ID NO: 3228739 - DNA, 25 bp, Homo sapien
tctaagaggcacatcagagacatgg

SEQ ID NO: 3228740 - DNA, 25 bp, Homo sapien
tgatcccgaatgtatttgccccagc

SEQ ID NO: 3228741 - DNA, 25 bp, Homo sapien
gagaaaggtcctgcatcatctgttc

SEQ ID NO: 3228742 - DNA, 25 bp, Homo sapien
tgttataggtgatgacagacaacca

SEQ ID NO: 3228743 - DNA, 25 bp, Homo sapien
gggtttcacaaggacactctactta

SEQ ID NO: 3228744 - DNA, 25 bp, Homo sapien
gattcattgacacaaaatcagctca

SEQ ID NO: 3228745 - DNA, 25 bp, Homo sapien
tgatcagctgctcgagtcctattgc

SEQ ID NO: 3228746 - DNA, 25 bp, Homo sapien
ccctatggccctatgcgtgagcact

SEQ ID NO: 3228747 - DNA, 25 bp, Homo sapien
tgccaggtgcctgtagaatccagag

SEQ ID NO: 3228748 - DNA, 25 bp, Homo sapien
ccttatcaggatggctagactcacc

SEQ ID NO: 3228749 - DNA, 25 bp, Homo sapien
tagagcaagtgcaggaccaaacaat

SEQ ID NO: 3228750 - DNA, 25 bp, Homo sapien
tgctataaccactccatgactactg

SEQ ID NO: 3228751 - DNA, 25 bp, Homo sapien
tggagtaacacgagtacccctgtga

SEQ ID NO: 3228752 - DNA, 25 bp, Homo sapien
gatactgccttgatagtcttggaca

SEQ ID NO: 3228753 - DNA, 25 bp, Homo sapien
ttcagggcagcaagattttccaggc

SEQ ID NO: 3228754 - DNA, 25 bp, Homo sapien
aagactgagttaagcatttggactc

SEQ ID NO: 3228755 - DNA, 25 bp, Homo sapien
gagatatatatgtcccttgtcctaa

SEQ ID NO: 3228756 - DNA, 25 bp, Homo sapien
cactcatgagcaaggtgactagatt

SEQ ID NO: 3228757 - DNA, 25 bp, Homo sapien
gatgatccacatacttcagatgcag

SEQ ID NO: 3228758 - DNA, 25 bp, Homo sapien
attgctttcaacgtcagctcctctc

SEQ ID NO: 3228759 - DNA, 25 bp, Homo sapien
ggagcccacactatctgcctctcat

SEQ ID NO: 3228760 - DNA, 25 bp, Homo sapien
ccaggagcccacactatctgcctct

SEQ ID NO: 3228761 - DNA, 25 bp, Homo sapien
agaattgctttcaacgtcagctcct

SEQ ID NO: 3228762 - DNA, 25 bp, Homo sapien
aaagagaagaagatgggagggaaat

SEQ ID NO: 3228763 - DNA, 25 bp, Homo sapien
ggaaagagaagaagatgggagggaa

SEQ ID NO: 3228764 - DNA, 25 bp, Homo sapien
gagaagaagatgggagggaaatttc

SEQ ID NO: 3228765 - DNA, 25 bp, Homo sapien
agaagatgggagggaaatttccctg

SEQ ID NO: 3228766 - DNA, 25 bp, Homo sapien
ggtttacagtagtcatgcatgcttg

SEQ ID NO: 3228767 - DNA, 25 bp, Homo sapien
ccttactgtgggaatgacggctagt

SEQ ID NO: 3228768 - DNA, 25 bp, Homo sapien
cagtgtacgaacaagccaggcctta

SEQ ID NO: 3228769 - DNA, 25 bp, Homo sapien
catgcttggactcgtaaattgggca

SEQ ID NO: 3228770 - DNA, 25 bp, Homo sapien
tggaagtagtcttttcctttatcat

SEQ ID NO: 3228771 - DNA, 25 bp, Homo sapien
taatgtctgtagtacttaggcgcag

SEQ ID NO: 3228772 - DNA, 25 bp, Homo sapien
tacttaggcgcagtttgagaaagaa

SEQ ID NO: 3228773 - DNA, 25 bp, Homo sapien
cacatatggtagtctctgaaggcct

SEQ ID NO: 3228774 - DNA, 25 bp, Homo sapien
aagacccggtgttgctcaatatgga

SEQ ID NO: 3228775 - DNA, 25 bp, Homo sapien
gcaaagatctgagcacaaagtaggt

SEQ ID NO: 3228776 - DNA, 25 bp, Homo sapien
taattggatgcaaagacgcgcggtg

SEQ ID NO: 3228777 - DNA, 25 bp, Homo sapien
gtctcactaggttcacgcgcaggta

SEQ ID NO: 3228778 - DNA, 25 bp, Homo sapien
cgcgcggtggttcctgtgtgtatcc

SEQ ID NO: 3228779 - DNA, 25 bp, Homo sapien
tcttggtggccgcagagtgccttca

SEQ ID NO: 3228780 - DNA, 25 bp, Homo sapien
tgaggcggcgatgtccataactcgg

SEQ ID NO: 3228781 - DNA, 25 bp, Homo sapien
gaaatgtaattctcccctgcacttg

SEQ ID NO: 3228782 - DNA, 25 bp, Homo sapien
caaacccctccatgtgtgttggcgg

SEQ ID NO: 3228783 - DNA, 25 bp, Homo sapien
gaagttgctagatctccacgttgga

SEQ ID NO: 3228784 - DNA, 25 bp, Homo sapien
tggatgtgcctacctacttgtggag

SEQ ID NO: 3228785 - DNA, 25 bp, Homo sapien
caaaagcgcttgtggatctggtgac

SEQ ID NO: 3228786 - DNA, 25 bp, Homo sapien
tgaagttgccctggagtactggccg

SEQ ID NO: 3228787 - DNA, 25 bp, Homo sapien
aaatgggcctttagggttcatctgc

SEQ ID NO: 3228788 - DNA, 25 bp, Homo sapien
taaagatgctcttggtacccggcca

SEQ ID NO: 3228789 - DNA, 25 bp, Homo sapien
aaaacggtatagagggccaggccag

SEQ ID NO: 3228790 - DNA, 25 bp, Homo sapien
tacccggccagcatgaatgtagcac

SEQ ID NO: 3228791 - DNA, 25 bp, Homo sapien
gtccatcttggaacgctctcttacg

SEQ ID NO: 3228792 - DNA, 25 bp, Homo sapien
tcttggaacgctctcttacgcagta

SEQ ID NO: 3228793 - DNA, 25 bp, Homo sapien
aataaatactcttggggcgtccctg

SEQ ID NO: 3228794 - DNA, 25 bp, Homo sapien
gcctttctccggcagtccatcttgg

SEQ ID NO: 3228795 - DNA, 25 bp, Homo sapien
gatactccaagtctcttcgtgtgaa

SEQ ID NO: 3228796 - DNA, 25 bp, Homo sapien
gccgctactgtatggcagattgagt

SEQ ID NO: 3228797 - DNA, 25 bp, Homo sapien
tttaattaacgtgccgcgaagacgc

SEQ ID NO: 3228798 - DNA, 25 bp, Homo sapien
tcaggcgcgcagacatcctttgatt

SEQ ID NO: 3228799 - DNA, 25 bp, Homo sapien
tcgctcagaaggtgtaaaggtgctc

SEQ ID NO: 3228800 - DNA, 25 bp, Homo sapien
tagtctctagaaggaagatctgggc

SEQ ID NO: 3228801 - DNA, 25 bp, Homo sapien
gagttgtgaggagaaccccggcatt

SEQ ID NO: 3228802 - DNA, 25 bp, Homo sapien
ccagctggagaacgctgagtagtct

SEQ ID NO: 3228803 - DNA, 25 bp, Homo sapien
tgaaaactctgggtcgcgatcgatc

SEQ ID NO: 3228804 - DNA, 25 bp, Homo sapien
catctggagtaagagaaaaggcccc

SEQ ID NO: 3228805 - DNA, 25 bp, Homo sapien
gctgcataatcgagtgacctcccga

SEQ ID NO: 3228806 - DNA, 25 bp, Homo sapien
gatagagctatgtccacgaagggcc

SEQ ID NO: 3228807 - DNA, 25 bp, Homo sapien
gccgtggagcaaggcgggaaccgga

SEQ ID NO: 3228808 - DNA, 25 bp, Homo sapien
aagcaggagccgaagcgcgggccgt

SEQ ID NO: 3228809 - DNA, 25 bp, Homo sapien
gcacctttgtatgagcacgagagga

SEQ ID NO: 3228810 - DNA, 25 bp, Homo sapien
agaggattctgcctccgcgcagcag

SEQ ID NO: 3228811 - DNA, 25 bp, Homo sapien
cgggcttggattcccgagactccgc

SEQ ID NO: 3228812 - DNA, 25 bp, Homo sapien
cagactcgcccctggattccgggtt

SEQ ID NO: 3228813 - DNA, 25 bp, Homo sapien
gcccgggcttggattcccgagactc

SEQ ID NO: 3228814 - DNA, 25 bp, Homo sapien
tagcttcggtgccaggaccgcggcc

SEQ ID NO: 3228815 - DNA, 25 bp, Homo sapien
ttgcattatcctctgactgataaaa

SEQ ID NO: 3228816 - DNA, 25 bp, Homo sapien
tttaatagtgaagcatctgttaaac

SEQ ID NO: 3228817 - DNA, 25 bp, Homo sapien
acttgcattatcctctgactgataa

SEQ ID NO: 3228818 - DNA, 25 bp, Homo sapien
acacttgcattatcctctgactgat

SEQ ID NO: 3228819 - DNA, 25 bp, Homo sapien
gtaacttggtgggtaactcaatagc

SEQ ID NO: 3228820 - DNA, 25 bp, Homo sapien
aacttggtgggtaactcaatagcca

SEQ ID NO: 3228821 - DNA, 25 bp, Homo sapien
actcaatagccactgagaccggcgt

SEQ ID NO: 3228822 - DNA, 25 bp, Homo sapien
tagccactgagaccggcgtttcgag

SEQ ID NO: 3228823 - DNA, 25 bp, Homo sapien
tctccaaagtttgccgcaataacgt

SEQ ID NO: 3228824 - DNA, 25 bp, Homo sapien
aataacgtgagccaccccaaacagc

SEQ ID NO: 3228825 - DNA, 25 bp, Homo sapien
atgttcgcccggaggactcagccgt

SEQ ID NO: 3228826 - DNA, 25 bp, Homo sapien
tacaatcggcttgacatgttcgccc

SEQ ID NO: 3228827 - DNA, 25 bp, Homo sapien
gaggtgcccgcacttcaaaatcgcc

SEQ ID NO: 3228828 - DNA, 25 bp, Homo sapien
caaaatcgcccaaggtcttcgtagg

SEQ ID NO: 3228829 - DNA, 25 bp, Homo sapien
gggaacaccgataccagccacacta

SEQ ID NO: 3228830 - DNA, 25 bp, Homo sapien
gccacactacagattcggggaatcg

SEQ ID NO: 3228831 - DNA, 25 bp, Homo sapien
agggaggcaggaatgcagagatata

SEQ ID NO: 3228832 - DNA, 25 bp, Homo sapien
gcaggaatgcagagatatatttata

SEQ ID NO: 3228833 - DNA, 25 bp, Homo sapien
cttttatgagggaggcaggaatgca

SEQ ID NO: 3228834 - DNA, 25 bp, Homo sapien
gaggcaggaatgcagagatatattt

SEQ ID NO: 3228835 - DNA, 25 bp, Homo sapien
aagtggagatccattttccgttata

SEQ ID NO: 3228836 - DNA, 25 bp, Homo sapien
tgcctcttaaactggcgtttaatgg

SEQ ID NO: 3228837 - DNA, 25 bp, Homo sapien
ttataatgcgttcaagatcaccaag

SEQ ID NO: 3228838 - DNA, 25 bp, Homo sapien
agtctcaacatccacgagccgtcct

SEQ ID NO: 3228839 - DNA, 25 bp, Homo sapien
gggcgctgcggcccgggtgccccgc

SEQ ID NO: 3228840 - DNA, 25 bp, Homo sapien
ggcgctgcggcccgggtgccccgcg

SEQ ID NO: 3228841 - DNA, 25 bp, Homo sapien
gcgctgcggcccgggtgccccgcgg

SEQ ID NO: 3228842 - DNA, 25 bp, Homo sapien
gctgcggcccgggtgccccgcggcc

SEQ ID NO: 3228843 - DNA, 25 bp, Homo sapien
ctgcatatacacatcagcctcccct

SEQ ID NO: 3228844 - DNA, 25 bp, Homo sapien
tatacacatcagcctcccctctcgg

SEQ ID NO: 3228845 - DNA, 25 bp, Homo sapien
atatacacatcagcctcccctctcg

SEQ ID NO: 3228846 - DNA, 25 bp, Homo sapien
gcatatacacatcagcctcccctct

SEQ ID NO: 3228847 - DNA, 25 bp, Homo sapien
cctccaaagggcgatgctcaaggtg

SEQ ID NO: 3228848 - DNA, 25 bp, Homo sapien
caaccactttgtcggcggtgagcaa

SEQ ID NO: 3228849 - DNA, 25 bp, Homo sapien
ttgggctaacctggcctgaccagcg

SEQ ID NO: 3228850 - DNA, 25 bp, Homo sapien
gggctcctgttgacaccgttttcca

SEQ ID NO: 3228851 - DNA, 25 bp, Homo sapien
cccaagactctagggctagtggagg

SEQ ID NO: 3228852 - DNA, 25 bp, Homo sapien
ggcagagcccgagcacagagtcaac

SEQ ID NO: 3228853 - DNA, 25 bp, Homo sapien
tcaactgcaacaccgaagttgggcg

SEQ ID NO: 3228854 - DNA, 25 bp, Homo sapien
cagccgcggcaaacctgaaatatat

SEQ ID NO: 3228855 - DNA, 25 bp, Homo sapien
ttaatccctattctaggttcaatgc

SEQ ID NO: 3228856 - DNA, 25 bp, Homo sapien
cctggcgcttaccaacgagcctagt

SEQ ID NO: 3228857 - DNA, 25 bp, Homo sapien
tttgttccgagctcaactgcaagcc

SEQ ID NO: 3228858 - DNA, 25 bp, Homo sapien
cgagcctagtttcagttaatcccta

SEQ ID NO: 3228859 - DNA, 25 bp, Homo sapien
aattgcagacccacgcaagttgggg

SEQ ID NO: 3228860 - DNA, 25 bp, Homo sapien
attgcagacccacgcaagttggggg

SEQ ID NO: 3228861 - DNA, 25 bp, Homo sapien
aaattgcagacccacgcaagttggg

SEQ ID NO: 3228862 - DNA, 25 bp, Homo sapien
aaaattgcagacccacgcaagttgg

SEQ ID NO: 3228863 - DNA, 25 bp, Homo sapien
ccaggtctttaaaaggctctccttg

SEQ ID NO: 3228864 - DNA, 25 bp, Homo sapien
aggtctttaaaaggctctccttgtg

SEQ ID NO: 3228865 - DNA, 25 bp, Homo sapien
caggtctttaaaaggctctccttgt

SEQ ID NO: 3228866 - DNA, 25 bp, Homo sapien
tgagggcaaacttgagatggcatcc

SEQ ID NO: 3228867 - DNA, 25 bp, Homo sapien
tttttatatgttcccagccccagtg

SEQ ID NO: 3228868 - DNA, 25 bp, Homo sapien
tctggagccacgaggtaattcattc

SEQ ID NO: 3228869 - DNA, 25 bp, Homo sapien
tagggtagagctcaaccagtcaggg

SEQ ID NO: 3228870 - DNA, 25 bp, Homo sapien
ctacactagtgcagcccaggagtgg

SEQ ID NO: 3228871 - DNA, 25 bp, Homo sapien
tgctgacatcgatgtcagggactgt

SEQ ID NO: 3228872 - DNA, 25 bp, Homo sapien
cccatgctgacatcgatgtcaggga

SEQ ID NO: 3228873 - DNA, 25 bp, Homo sapien
catcagcagctacactagtgcagcc

SEQ ID NO: 3228874 - DNA, 25 bp, Homo sapien
tagcagtgacggcaaagagacaaga

SEQ ID NO: 3228875 - DNA, 25 bp, Homo sapien
gaccctctggcctgattctttttgg

SEQ ID NO: 3228876 - DNA, 25 bp, Homo sapien
cagtttctggacacgagtaaggccg

SEQ ID NO: 3228877 - DNA, 25 bp, Homo sapien
tgaaggcagttgacatgtgcagtac

SEQ ID NO: 3228878 - DNA, 25 bp, Homo sapien
cagagctatcagagtgtcgcaagaa

SEQ ID NO: 3228879 - DNA, 25 bp, Homo sapien
gcaagaagcactgtccttggagcag

SEQ ID NO: 3228880 - DNA, 25 bp, Homo sapien
ttcttaagggaacggtcagagtcac

SEQ ID NO: 3228881 - DNA, 25 bp, Homo sapien
tctgaggctcatctcatgtaagagc

SEQ ID NO: 3228882 - DNA, 25 bp, Homo sapien
gaaggattcataagcaatcagcccc

SEQ ID NO: 3228883 - DNA, 25 bp, Homo sapien
taagcaagccctgattttctccacc

SEQ ID NO: 3228884 - DNA, 25 bp, Homo sapien
ttctgagcatcctaaacatcctggg

SEQ ID NO: 3228885 - DNA, 25 bp, Homo sapien
tcacaagacacaagggcagcttttc

SEQ ID NO: 3228886 - DNA, 25 bp, Homo sapien
taatcccaaatgctgctagacggca

SEQ ID NO: 3228887 - DNA, 25 bp, Homo sapien
tagacggcaaattacaagggagaac

SEQ ID NO: 3228888 - DNA, 25 bp, Homo sapien
tccagtgcagcaacatatctaccag

SEQ ID NO: 3228889 - DNA, 25 bp, Homo sapien
gatttacagacacacttagacacct

SEQ ID NO: 3228890 - DNA, 25 bp, Homo sapien
gagtgatttcctcccggcttgaaag

SEQ ID NO: 3228891 - DNA, 25 bp, Homo sapien
acagttaaaactgggaatgttcctg

SEQ ID NO: 3228892 - DNA, 25 bp, Homo sapien
tactatttccgtagaacacgtatga

SEQ ID NO: 3228893 - DNA, 25 bp, Homo sapien
tgaaccccataatacactgcagact

SEQ ID NO: 3228894 - DNA, 25 bp, Homo sapien
actcccctgtctataagcaaaggcc

SEQ ID NO: 3228895 - DNA, 25 bp, Homo sapien
aacctgaaacctaaccatcctggtg

SEQ ID NO: 3228896 - DNA, 25 bp, Homo sapien
taaaaatcgaggtttgccattaata

SEQ ID NO: 3228897 - DNA, 25 bp, Homo sapien
gccttgtaaaaatcgaggtttgcca

SEQ ID NO: 3228898 - DNA, 25 bp, Homo sapien
tatgttgtactcaggtaaaaatctc

SEQ ID NO: 3228899 - DNA, 25 bp, Homo sapien
tgcagttaattgtctaagctccaga

SEQ ID NO: 3228900 - DNA, 25 bp, Homo sapien
tctgccaaaagattacctataacat

SEQ ID NO: 3228901 - DNA, 25 bp, Homo sapien
ttaggagcaaaattgcagttaattg

SEQ ID NO: 3228902 - DNA, 25 bp, Homo sapien
caaccgaggacgtagttcacacaag

SEQ ID NO: 3228903 - DNA, 25 bp, Homo sapien
tcatggcattgcaaccgaggacgta

SEQ ID NO: 3228904 - DNA, 25 bp, Homo sapien
actgaaacaggctcatggcattgca

SEQ ID NO: 3228905 - DNA, 25 bp, Homo sapien
agttcacacaagattttcttaaggg

SEQ ID NO: 3228906 - DNA, 25 bp, Homo sapien
gaccgaatgacccaaaggctgatta

SEQ ID NO: 3228907 - DNA, 25 bp, Homo sapien
gagacttggtgtacccaaattacca

SEQ ID NO: 3228908 - DNA, 25 bp, Homo sapien
gattatctatcattaactggagact

SEQ ID NO: 3228909 - DNA, 25 bp, Homo sapien
gagacctcagtctgccggatcctta

SEQ ID NO: 3228910 - DNA, 25 bp, Homo sapien
cctcaaagttgtggcctgtgttaac

SEQ ID NO: 3228911 - DNA, 25 bp, Homo sapien
cctgtttataactttggtgcctgca

SEQ ID NO: 3228912 - DNA, 25 bp, Homo sapien
gcttcgcaagcagaatgcaattcca

SEQ ID NO: 3228913 - DNA, 25 bp, Homo sapien
caaagtagcacttctccaagcaggg

SEQ ID NO: 3228914 - DNA, 25 bp, Homo sapien
gtagactgcgaaagtgaagatcccc

SEQ ID NO: 3228915 - DNA, 25 bp, Homo sapien
gatccccaggcggtggagaggactg

SEQ ID NO: 3228916 - DNA, 25 bp, Homo sapien
ttcggttatacatccccatgaatga

SEQ ID NO: 3228917 - DNA, 25 bp, Homo sapien
tggagtcacaggcagtcgtagactg

SEQ ID NO: 3228918 - DNA, 25 bp, Homo sapien
gtcaagaggtgccagacccacagtt

SEQ ID NO: 3228919 - DNA, 25 bp, Homo sapien
taatttgaacactgcgttgaccaca

SEQ ID NO: 3228920 - DNA, 25 bp, Homo sapien
aacctatggcttgagagtggacacc

SEQ ID NO: 3228921 - DNA, 25 bp, Homo sapien
cacagttgcggacgaagtaggagtc

SEQ ID NO: 3228922 - DNA, 25 bp, Homo sapien
tgagccagcgcaagttgatgcagac

SEQ ID NO: 3228923 - DNA, 25 bp, Homo sapien
taagacttagagacgcctaggtcct

SEQ ID NO: 3228924 - DNA, 25 bp, Homo sapien
cacaggaggtgacatatgcatgccc

SEQ ID NO: 3228925 - DNA, 25 bp, Homo sapien
cagtatctggaaaggctccctggag

SEQ ID NO: 3228926 - DNA, 25 bp, Homo sapien
tttcccatttactctagcctgccca

SEQ ID NO: 3228927 - DNA, 25 bp, Homo sapien
caccccaggtacgtgtcattatcca

SEQ ID NO: 3228928 - DNA, 25 bp, Homo sapien
ggaactaacagtgcgacccgctctg

SEQ ID NO: 3228929 - DNA, 25 bp, Homo sapien
tctggctggcgctttgattttccca

SEQ ID NO: 3228930 - DNA, 25 bp, Homo sapien
tggaaagctggcgacctaaatcggg

SEQ ID NO: 3228931 - DNA, 25 bp, Homo sapien
cacaatgagaatttaaccaggatgg

SEQ ID NO: 3228932 - DNA, 25 bp, Homo sapien
ccccatgcgagttgggagagcagct

SEQ ID NO: 3228933 - DNA, 25 bp, Homo sapien
cagtggccatcgcagtgactggaaa

SEQ ID NO: 3228934 - DNA, 25 bp, Homo sapien
gtagccacaagccaacccgtaattg

SEQ ID NO: 3228935 - DNA, 25 bp, Homo sapien
tgacaagatctacgcttttgccgcc

SEQ ID NO: 3228936 - DNA, 25 bp, Homo sapien
aaagcgagcggctgcagatttgccc

SEQ ID NO: 3228937 - DNA, 25 bp, Homo sapien
tattgcgtatagctcagtgactgtc

SEQ ID NO: 3228938 - DNA, 25 bp, Homo sapien
tctgctgatacaaactaggctggcc

SEQ ID NO: 3228939 - DNA, 25 bp, Homo sapien
catgcactgaagaaaagcgaaacgg

SEQ ID NO: 3228940 - DNA, 25 bp, Homo sapien
ggaagctggtaaggacacgacactg

SEQ ID NO: 3228941 - DNA, 25 bp, Homo sapien
caggagtccatccaaagggctaggt

SEQ ID NO: 3228942 - DNA, 25 bp, Homo sapien
aagtgcttctcggtatagaacaaag

SEQ ID NO: 3228943 - DNA, 25 bp, Homo sapien
aaaagtgcttctcggtatagaacaa

SEQ ID NO: 3228944 - DNA, 25 bp, Homo sapien
agtgcttctcggtatagaacaaagt

SEQ ID NO: 3228945 - DNA, 25 bp, Homo sapien
taaaagtgcttctcggtatagaaca

SEQ ID NO: 3228946 - DNA, 25 bp, Homo sapien
tgaaataccaaagcaatcagctaga

SEQ ID NO: 3228947 - DNA, 25 bp, Homo sapien
gcatgcacggctatatggactcaaa

SEQ ID NO: 3228948 - DNA, 25 bp, Homo sapien
tattgcaataggagggtgatacaga

SEQ ID NO: 3228949 - DNA, 25 bp, Homo sapien
cgtgaaggagattgcttattggcca

SEQ ID NO: 3228950 - DNA, 25 bp, Homo sapien
aatgcaatgcccgttcagagaagaa

SEQ ID NO: 3228951 - DNA, 25 bp, Homo sapien
gatggaccacaagcagtctcatggg

SEQ ID NO: 3228952 - DNA, 25 bp, Homo sapien
tctgcagagggtaggcagtctgtcc

SEQ ID NO: 3228953 - DNA, 25 bp, Homo sapien
taggaaagtgctcccagctgaaagc

SEQ ID NO: 3228954 - DNA, 25 bp, Homo sapien
agttgcatagaacttaacaatgttt

SEQ ID NO: 3228955 - DNA, 25 bp, Homo sapien
caagttgcatagaacttaacaatgt

SEQ ID NO: 3228956 - DNA, 25 bp, Homo sapien
tagcacaagttgcatagaacttaac

SEQ ID NO: 3228957 - DNA, 25 bp, Homo sapien
gcacaagttgcatagaacttaacaa

SEQ ID NO: 3228958 - DNA, 25 bp, Homo sapien
ttttccttacccactcatctgttga

SEQ ID NO: 3228959 - DNA, 25 bp, Homo sapien
attttccttacccactcatctgttg

SEQ ID NO: 3228960 - DNA, 25 bp, Homo sapien
ctaggcctccctggttgctgggact

SEQ ID NO: 3228961 - DNA, 25 bp, Homo sapien
catattttccttacccactcatctg

SEQ ID NO: 3228962 - DNA, 25 bp, Homo sapien
gaagaactgcgtccaaatgcagcca

SEQ ID NO: 3228963 - DNA, 25 bp, Homo sapien
tttccacagttatgctgcggcaaag

SEQ ID NO: 3228964 - DNA, 25 bp, Homo sapien
aaattcatcaagatcctttccacag

SEQ ID NO: 3228965 - DNA, 25 bp, Homo sapien
tccccaggtccaaattcatcaagat

SEQ ID NO: 3228966 - DNA, 25 bp, Homo sapien
cacaatcatgtttctaatactttcc

SEQ ID NO: 3228967 - DNA, 25 bp, Homo sapien
aatgttctatgagcacttgggtctc

SEQ ID NO: 3228968 - DNA, 25 bp, Homo sapien
ctttgcaaacacaatcatgtttcta

SEQ ID NO: 3228969 - DNA, 25 bp, Homo sapien
tctctgttgactctttggaatgttc

SEQ ID NO: 3228970 - DNA, 25 bp, Homo sapien
taagtgatttccgaatagaaggtag

SEQ ID NO: 3228971 - DNA, 25 bp, Homo sapien
caaagagggcacaagggatgtcaca

SEQ ID NO: 3228972 - DNA, 25 bp, Homo sapien
gaccttactgtgagcgtcttgagct

SEQ ID NO: 3228973 - DNA, 25 bp, Homo sapien
ggtagagcctttccaaccacaaaga

SEQ ID NO: 3228974 - DNA, 25 bp, Homo sapien
tgaccctcatgccagaaaacaagat

SEQ ID NO: 3228975 - DNA, 25 bp, Homo sapien
gagatgtggctataacagggaccag

SEQ ID NO: 3228976 - DNA, 25 bp, Homo sapien
ctccaatcatagagagagatgtggc

SEQ ID NO: 3228977 - DNA, 25 bp, Homo sapien
gtctttgctgcaataaggaaggtca

SEQ ID NO: 3228978 - DNA, 25 bp, Homo sapien
ccactcagaggcgaggcactttgga

SEQ ID NO: 3228979 - DNA, 25 bp, Homo sapien
ttggagtatactgtctactttgaca

SEQ ID NO: 3228980 - DNA, 25 bp, Homo sapien
ctgtcttttgaggactggaaggata

SEQ ID NO: 3228981 - DNA, 25 bp, Homo sapien
gaggcgaggcactttggagtatact

SEQ ID NO: 3228982 - DNA, 25 bp, Homo sapien
taggttgctccataggaattttggc

SEQ ID NO: 3228983 - DNA, 25 bp, Homo sapien
ggagaggaatccgataacttatcaa

SEQ ID NO: 3228984 - DNA, 25 bp, Homo sapien
tcagacagcgccactatcggaatct

SEQ ID NO: 3228985 - DNA, 25 bp, Homo sapien
tgaccagctgattccggagaggaat

SEQ ID NO: 3228986 - DNA, 25 bp, Homo sapien
ccagctccattcatagcctgcatga

SEQ ID NO: 3228987 - DNA, 25 bp, Homo sapien
tctggggtcatatggcctgcgttca

SEQ ID NO: 3228988 - DNA, 25 bp, Homo sapien
tctaagggttcaagaacatgggctc

SEQ ID NO: 3228989 - DNA, 25 bp, Homo sapien
gtcagccactccaactaagcagctg

SEQ ID NO: 3228990 - DNA, 25 bp, Homo sapien
gaagaagagaatgcgaaagaacaga

SEQ ID NO: 3228991 - DNA, 25 bp, Homo sapien
gccactccacgggaggaacgggatc

SEQ ID NO: 3228992 - DNA, 25 bp, Homo sapien
ccctagaagtcatccggaagggaag

SEQ ID NO: 3228993 - DNA, 25 bp, Homo sapien
taatgttcaacatgcagggaaaaaa

SEQ ID NO: 3228994 - DNA, 25 bp, Homo sapien
tctaggatttgaatacactaaacac

SEQ ID NO: 3228995 - DNA, 25 bp, Homo sapien
tatgtaattgcccacagaaagttgg

SEQ ID NO: 3228996 - DNA, 25 bp, Homo sapien
atcaatattacccagatcccttggg

SEQ ID NO: 3228997 - DNA, 25 bp, Homo sapien
aagattcccttaagtccagacctgg

SEQ ID NO: 3228998 - DNA, 25 bp, Homo sapien
tggcctttctgaagtccagaacggg

SEQ ID NO: 3228999 - DNA, 25 bp, Homo sapien
cgctaaagataagctaaggccttcc

SEQ ID NO: 3229000 - DNA, 25 bp, Homo sapien
tgtatgaggcgctaaagataagcta

SEQ ID NO: 3229001 - DNA, 25 bp, Homo sapien
ccagaacgggtgtatgaggcgctaa

SEQ ID NO: 3229002 - DNA, 25 bp, Homo sapien
tgttaataacactcatcagtgctgg

SEQ ID NO: 3229003 - DNA, 25 bp, Homo sapien
gatttattatggaatcccagccagg

SEQ ID NO: 3229004 - DNA, 25 bp, Homo sapien
tgggactgacatcctatctctgagg

SEQ ID NO: 3229005 - DNA, 25 bp, Homo sapien
aaagaatgctctaggccatccctca

SEQ ID NO: 3229006 - DNA, 25 bp, Homo sapien
accagtgaaaccagttgcatagccc

SEQ ID NO: 3229007 - DNA, 25 bp, Homo sapien
tgcatgcctatgtggggcttaacca

SEQ ID NO: 3229008 - DNA, 25 bp, Homo sapien
caaaaccaatacatagagatgtacc

SEQ ID NO: 3229009 - DNA, 25 bp, Homo sapien
taacattaacagttctagagccaga

SEQ ID NO: 3229010 - DNA, 25 bp, Homo sapien
taatgacaagtagctgttctaaaaa

SEQ ID NO: 3229011 - DNA, 25 bp, Homo sapien
ttcaatgcagcaagccacaactggt

SEQ ID NO: 3229012 - DNA, 25 bp, Homo sapien
tgcttgcaaaccagagcctcagtaa

SEQ ID NO: 3229013 - DNA, 25 bp, Homo sapien
gaaggaattccatgcagttccaacc

SEQ ID NO: 3229014 - DNA, 25 bp, Homo sapien
caaaacatgatcgtgagcttgggaa

SEQ ID NO: 3229015 - DNA, 25 bp, Homo sapien
cacttctgacatgcataagacctag

SEQ ID NO: 3229016 - DNA, 25 bp, Homo sapien
gcaagtagctacctccatgacagag

SEQ ID NO: 3229017 - DNA, 25 bp, Homo sapien
gaacccaagggcaaatacatgagaa

SEQ ID NO: 3229018 - DNA, 25 bp, Homo sapien
aagtaattttcctcagacctccaga

SEQ ID NO: 3229019 - DNA, 25 bp, Homo sapien
taacaagaacctggatgtctctaca

SEQ ID NO: 3229020 - DNA, 25 bp, Homo sapien
ggatagttcgtccacactaacaaga

SEQ ID NO: 3229021 - DNA, 25 bp, Homo sapien
taatggttatacagtgccttgctca

SEQ ID NO: 3229022 - DNA, 25 bp, Homo sapien
actgcagtcatggagaaaaatccct

SEQ ID NO: 3229023 - DNA, 25 bp, Homo sapien
cataggctgtatgcacagtcaacaa

SEQ ID NO: 3229024 - DNA, 25 bp, Homo sapien
tacgaaatgggcatggatatgttcc

SEQ ID NO: 3229025 - DNA, 25 bp, Homo sapien
tgtttttatacaggaccaggcagca

SEQ ID NO: 3229026 - DNA, 25 bp, Homo sapien
taagaactaagtagccatcctctgg

SEQ ID NO: 3229027 - DNA, 25 bp, Homo sapien
aacccataaaagcacacattttcca

SEQ ID NO: 3229028 - DNA, 25 bp, Homo sapien
taaacccataaaagcacacattttc

SEQ ID NO: 3229029 - DNA, 25 bp, Homo sapien
ttttataaacccataaaagcacaca

SEQ ID NO: 3229030 - DNA, 25 bp, Homo sapien
tataaacccataaaagcacacattt

SEQ ID NO: 3229031 - DNA, 25 bp, Homo sapien
taatacttttctcttaggaccaatg

SEQ ID NO: 3229032 - DNA, 25 bp, Homo sapien
cgggtatggagataatacttttctc

SEQ ID NO: 3229033 - DNA, 25 bp, Homo sapien
ctggtcgggtatggagataatactt

SEQ ID NO: 3229034 - DNA, 25 bp, Homo sapien
ctcttaggaccaatgaagtcatttt

SEQ ID NO: 3229035 - DNA, 25 bp, Homo sapien
tgtcttgggatttgggaactccacc

SEQ ID NO: 3229036 - DNA, 25 bp, Homo sapien
aaaaaattgatgaattgccgtgacc

SEQ ID NO: 3229037 - DNA, 25 bp, Homo sapien
caactgtgagtctgcgaatatgtga

SEQ ID NO: 3229038 - DNA, 25 bp, Homo sapien
gccgaattggtaatgtgtcttggga

SEQ ID NO: 3229039 - DNA, 25 bp, Homo sapien
tcattcataacttctcctgtcttca

SEQ ID NO: 3229040 - DNA, 25 bp, Homo sapien
cataacttctcctgtcttcatctgc

SEQ ID NO: 3229041 - DNA, 25 bp, Homo sapien
taacttctcctgtcttcatctgctt

SEQ ID NO: 3229042 - DNA, 25 bp, Homo sapien
acttctcctgtcttcatctgcttca

SEQ ID NO: 3229043 - DNA, 25 bp, Homo sapien
tgtggagcatatccaagctttgatg

SEQ ID NO: 3229044 - DNA, 25 bp, Homo sapien
gattctacatatccagtgccgaccg

SEQ ID NO: 3229045 - DNA, 25 bp, Homo sapien
gctttgatgcattgaggattctaca

SEQ ID NO: 3229046 - DNA, 25 bp, Homo sapien
tgccaatggtagcagcgctagtgcc

SEQ ID NO: 3229047 - DNA, 25 bp, Homo sapien
gttgaggtaagaggcttgggtcagc

SEQ ID NO: 3229048 - DNA, 25 bp, Homo sapien
agctcggaaccctgagcagtgcatg

SEQ ID NO: 3229049 - DNA, 25 bp, Homo sapien
gaggcttgggtcagctcggaaccct

SEQ ID NO: 3229050 - DNA, 25 bp, Homo sapien
tcggaaccctgagcagtgcatgtcc

SEQ ID NO: 3229051 - DNA, 25 bp, Homo sapien
tatctctaataccaccaccctgagt

SEQ ID NO: 3229052 - DNA, 25 bp, Homo sapien
tctctcccagagtagaaatgacccc

SEQ ID NO: 3229053 - DNA, 25 bp, Homo sapien
agtgacacccccactgtagatgccg

SEQ ID NO: 3229054 - DNA, 25 bp, Homo sapien
cccagggagccttgccagatttttc

SEQ ID NO: 3229055 - DNA, 25 bp, Homo sapien
tgaagaatctcctactccatcgcct

SEQ ID NO: 3229056 - DNA, 25 bp, Homo sapien
catcgcctgccccaagaatgaaatt

SEQ ID NO: 3229057 - DNA, 25 bp, Homo sapien
tgtgaagaatctcctactccatcgc

SEQ ID NO: 3229058 - DNA, 25 bp, Homo sapien
tccgtagtacgcttcttttccttca

SEQ ID NO: 3229059 - DNA, 25 bp, Homo sapien
gtgttccgaatgaacttccttggtg

SEQ ID NO: 3229060 - DNA, 25 bp, Homo sapien
tcagcgtgtgttccgaatgaacttc

SEQ ID NO: 3229061 - DNA, 25 bp, Homo sapien
tactaaagttcagcgtgtgttccga

SEQ ID NO: 3229062 - DNA, 25 bp, Homo sapien
tgattactgctactaaagttcagcg

SEQ ID NO: 3229063 - DNA, 25 bp, Homo sapien
cagtcatgcttacatgcaccagtgc

SEQ ID NO: 3229064 - DNA, 25 bp, Homo sapien
caaagacccgtggatttctacagga

SEQ ID NO: 3229065 - DNA, 25 bp, Homo sapien
caccagtgcttggtgtgggagatat

SEQ ID NO: 3229066 - DNA, 25 bp, Homo sapien
tcagaggtttttccagggtcaatcc

SEQ ID NO: 3229067 - DNA, 25 bp, Homo sapien
atccagggaaactctgacttcctct

SEQ ID NO: 3229068 - DNA, 25 bp, Homo sapien
tccccacctctcagatttgggggat

SEQ ID NO: 3229069 - DNA, 25 bp, Homo sapien
ccacctctcagatttgggggatttc

SEQ ID NO: 3229070 - DNA, 25 bp, Homo sapien
tcatctcctgttgggcatcccatcc

SEQ ID NO: 3229071 - DNA, 25 bp, Homo sapien
tgttcacatgtcctctctagccctg

SEQ ID NO: 3229072 - DNA, 25 bp, Homo sapien
tagggatctgtgaatcccctctgcc

SEQ ID NO: 3229073 - DNA, 25 bp, Homo sapien
gatcctatatgcctctactgaaccc

SEQ ID NO: 3229074 - DNA, 25 bp, Homo sapien
ctgggatcccttggccgtgtgctgc

SEQ ID NO: 3229075 - DNA, 25 bp, Homo sapien
tttcctcatacatcaaaacctccag

SEQ ID NO: 3229076 - DNA, 25 bp, Homo sapien
tcatacatcaaaacctccagctgct

SEQ ID NO: 3229077 - DNA, 25 bp, Homo sapien
taatctttcctcatacatcaaaacc

SEQ ID NO: 3229078 - DNA, 25 bp, Homo sapien
tacatcaaaacctccagctgcttaa

SEQ ID NO: 3229079 - DNA, 25 bp, Homo sapien
tctgacaatgtatcagagagcagtc

SEQ ID NO: 3229080 - DNA, 25 bp, Homo sapien
tttcatttgcaagagtggcacagtc

SEQ ID NO: 3229081 - DNA, 25 bp, Homo sapien
gtggcacagtccagatgctgattaa

SEQ ID NO: 3229082 - DNA, 25 bp, Homo sapien
gtccagatgctgattaatgctgagg

SEQ ID NO: 3229083 - DNA, 25 bp, Homo sapien
tgcaagagtggcacagtccagatgc

SEQ ID NO: 3229084 - DNA, 25 bp, Homo sapien
ctggagaggcctcacaattatggca

SEQ ID NO: 3229085 - DNA, 25 bp, Homo sapien
acaattatggcagaaggcaaggaat

SEQ ID NO: 3229086 - DNA, 25 bp, Homo sapien
tcacaattatggcagaaggcaagga

SEQ ID NO: 3229087 - DNA, 25 bp, Homo sapien
cctcacaattatggcagaaggcaag

SEQ ID NO: 3229088 - DNA, 25 bp, Homo sapien
gggtgagaagtgtgtgatcaaatca

SEQ ID NO: 3229089 - DNA, 25 bp, Homo sapien
aagttcttcttttgccagtctgtat

SEQ ID NO: 3229090 - DNA, 25 bp, Homo sapien
tattaatctggccactctccgtgca

SEQ ID NO: 3229091 - DNA, 25 bp, Homo sapien
gatcaaatcactttgccaagttctt

SEQ ID NO: 3229092 - DNA, 25 bp, Homo sapien
gcaacaagcattatactcgttcttt

SEQ ID NO: 3229093 - DNA, 25 bp, Homo sapien
caagcattatactcgttctttttag

SEQ ID NO: 3229094 - DNA, 25 bp, Homo sapien
aagcaacaagcattatactcgttct

SEQ ID NO: 3229095 - DNA, 25 bp, Homo sapien
gcattatactcgttctttttaggca

SEQ ID NO: 3229096 - DNA, 25 bp, Homo sapien
ctctcgagtaaaatgctgcagagcc

SEQ ID NO: 3229097 - DNA, 25 bp, Homo sapien
gcagagcctctgagaagacattcat

SEQ ID NO: 3229098 - DNA, 25 bp, Homo sapien
ctcgagtaaaatgctgcagagcctc

SEQ ID NO: 3229099 - DNA, 25 bp, Homo sapien
ctgcagagcctctgagaagacattc

SEQ ID NO: 3229100 - DNA, 25 bp, Homo sapien
caggaagccttattagcatgagtgc

SEQ ID NO: 3229101 - DNA, 25 bp, Homo sapien
ctatttcctaatttcagccttggtg

SEQ ID NO: 3229102 - DNA, 25 bp, Homo sapien
tgcttggttgatgaagaggcatttg

SEQ ID NO: 3229103 - DNA, 25 bp, Homo sapien
ggttgatgaagaggcatttgttcca

SEQ ID NO: 3229104 - DNA, 25 bp, Homo sapien
ttaggagtgggacataggggctttc

SEQ ID NO: 3229105 - DNA, 25 bp, Homo sapien
gaatgaagtaatagaggggcttttg

SEQ ID NO: 3229106 - DNA, 25 bp, Homo sapien
tccagcgtgctgaagaatgaagtaa

SEQ ID NO: 3229107 - DNA, 25 bp, Homo sapien
gggcttttgattcaacagggactgc

SEQ ID NO: 3229108 - DNA, 25 bp, Homo sapien
tagtcttagattcattcccaaatgt

SEQ ID NO: 3229109 - DNA, 25 bp, Homo sapien
gatgtgtagtcttagattcattccc

SEQ ID NO: 3229110 - DNA, 25 bp, Homo sapien
agatgtgtagtcttagattcattcc

SEQ ID NO: 3229111 - DNA, 25 bp, Homo sapien
gtgtagtcttagattcattcccaaa

SEQ ID NO: 3229112 - DNA, 25 bp, Homo sapien
atgcattatcagtgcaggtgcttct

SEQ ID NO: 3229113 - DNA, 25 bp, Homo sapien
tggatgagtcaattgatcagaggac

SEQ ID NO: 3229114 - DNA, 25 bp, Homo sapien
aatttgagactatagaagacttgac

SEQ ID NO: 3229115 - DNA, 25 bp, Homo sapien
gttaatattgcctacagaacccaga

SEQ ID NO: 3229116 - DNA, 25 bp, Homo sapien
tgtggagcacatcgagaaagactgt

SEQ ID NO: 3229117 - DNA, 25 bp, Homo sapien
tcactcaggtgtaagtggcctcgca

SEQ ID NO: 3229118 - DNA, 25 bp, Homo sapien
gatagaacttatgaggacccagacc

SEQ ID NO: 3229119 - DNA, 25 bp, Homo sapien
gaagtttcctattgttgtctcaccc

SEQ ID NO: 3229120 - DNA, 25 bp, Homo sapien
ggcatggtgagaacaccccggtcaa

SEQ ID NO: 3229121 - DNA, 25 bp, Homo sapien
aaagggcatggtgagaacaccccgg

SEQ ID NO: 3229122 - DNA, 25 bp, Homo sapien
atggtgagaacaccccggtcaagag

SEQ ID NO: 3229123 - DNA, 25 bp, Homo sapien
ttgtagaaagggcatggtgagaaca

SEQ ID NO: 3229124 - DNA, 25 bp, Homo sapien
tcatattgagaccaaacagctctca

SEQ ID NO: 3229125 - DNA, 25 bp, Homo sapien
cttgtccattagtggcccttgtcat

SEQ ID NO: 3229126 - DNA, 25 bp, Homo sapien
tcctctttaccatactgagaataat

SEQ ID NO: 3229127 - DNA, 25 bp, Homo sapien
catgatcgctaaactggctgctaac

SEQ ID NO: 3229128 - DNA, 25 bp, Homo sapien
aacacattctcctacgctgtccttg

SEQ ID NO: 3229129 - DNA, 25 bp, Homo sapien
gtgtaatgctccatctccccgatca

SEQ ID NO: 3229130 - DNA, 25 bp, Homo sapien
tctgcagtagtactcgagttgaaga

SEQ ID NO: 3229131 - DNA, 25 bp, Homo sapien
caaggataagatacttcgtgatcaa

SEQ ID NO: 3229132 - DNA, 25 bp, Homo sapien
tagatttgtcctaacttcagtaaca

SEQ ID NO: 3229133 - DNA, 25 bp, Homo sapien
gatcaatagcgtgtcccagaagaag

SEQ ID NO: 3229134 - DNA, 25 bp, Homo sapien
ttcctgttttgggaagctatgaggt

SEQ ID NO: 3229135 - DNA, 25 bp, Homo sapien
gggaaggtaatacaggatgcgatac

SEQ ID NO: 3229136 - DNA, 25 bp, Homo sapien
cctgttttgggaagctatgaggtca

SEQ ID NO: 3229137 - DNA, 25 bp, Homo sapien
atacaggatgcgatacattgccttc

SEQ ID NO: 3229138 - DNA, 25 bp, Homo sapien
gaggaagcacgaggtgccacctgtc

SEQ ID NO: 3229139 - DNA, 25 bp, Homo sapien
aatgggctctcccttcggaggaagc

SEQ ID NO: 3229140 - DNA, 25 bp, Homo sapien
cagggactccatgttcatttcatgc

SEQ ID NO: 3229141 - DNA, 25 bp, Homo sapien
ttctccctggaagccatgccttctc

SEQ ID NO: 3229142 - DNA, 25 bp, Homo sapien
gcagtccaggccacgtaggtgtcta

SEQ ID NO: 3229143 - DNA, 25 bp, Homo sapien
taggtgtctatgctccacaaggttg

SEQ ID NO: 3229144 - DNA, 25 bp, Homo sapien
cattagggtatagaccaagagattc

SEQ ID NO: 3229145 - DNA, 25 bp, Homo sapien
tcatccataggaatcacatctgcat

SEQ ID NO: 3229146 - DNA, 25 bp, Homo sapien
cagatcctgaaaacatcatactgag

SEQ ID NO: 3229147 - DNA, 25 bp, Homo sapien
aacatcatactgagacaggccgcag

SEQ ID NO: 3229148 - DNA, 25 bp, Homo sapien
catcatactgagacaggccgcagct

SEQ ID NO: 3229149 - DNA, 25 bp, Homo sapien
catactgagacaggccgcagctcta

SEQ ID NO: 3229150 - DNA, 25 bp, Homo sapien
taaactgtacattggataggggcat

SEQ ID NO: 3229151 - DNA, 25 bp, Homo sapien
gtgaagtgtcatccatctcactaaa

SEQ ID NO: 3229152 - DNA, 25 bp, Homo sapien
ttgaactgccagtgagtgaagtgtc

SEQ ID NO: 3229153 - DNA, 25 bp, Homo sapien
tgtcatccatctcactaaactgtac

SEQ ID NO: 3229154 - DNA, 25 bp, Homo sapien
ggggaacgactcatcattttcctgc

SEQ ID NO: 3229155 - DNA, 25 bp, Homo sapien
caggattatggggaacgactcatca

SEQ ID NO: 3229156 - DNA, 25 bp, Homo sapien
gattatggggaacgactcatcattt

SEQ ID NO: 3229157 - DNA, 25 bp, Homo sapien
tatggggaacgactcatcattttcc

SEQ ID NO: 3229158 - DNA, 25 bp, Homo sapien
tatctcctgccaataagcctctttc

SEQ ID NO: 3229159 - DNA, 25 bp, Homo sapien
tgctggtccgtcagttggtggatcc

SEQ ID NO: 3229160 - DNA, 25 bp, Homo sapien
ctgggaatttgctggtccgtcagtt

SEQ ID NO: 3229161 - DNA, 25 bp, Homo sapien
cagttggtggatcctcattgcctcc

SEQ ID NO: 3229162 - DNA, 25 bp, Homo sapien
ctcagctgcaggctctccatggctc

SEQ ID NO: 3229163 - DNA, 25 bp, Homo sapien
tcagctgcaggctctccatggctcc

SEQ ID NO: 3229164 - DNA, 25 bp, Homo sapien
gacaggtccattcgttggcaactca

SEQ ID NO: 3229165 - DNA, 25 bp, Homo sapien
ggtccattcgttggcaactcatcca

SEQ ID NO: 3229166 - DNA, 25 bp, Homo sapien
gaggcaggtccaatgacaggtccat

SEQ ID NO: 3229167 - DNA, 25 bp, Homo sapien
ggtccaatgacaggtccattcgttg

SEQ ID NO: 3229168 - DNA, 25 bp, Homo sapien
tacgaccttcaccacacacttggtt

SEQ ID NO: 3229169 - DNA, 25 bp, Homo sapien
ttttttgcacagctggggtcgttcc

SEQ ID NO: 3229170 - DNA, 25 bp, Homo sapien
gtcgttcctgacactgtcaatgtaa

SEQ ID NO: 3229171 - DNA, 25 bp, Homo sapien
caagcggccagatatagtctctacg

SEQ ID NO: 3229172 - DNA, 25 bp, Homo sapien
tgaacatttccgtttaaacctgcag

SEQ ID NO: 3229173 - DNA, 25 bp, Homo sapien
tccgtttaaacctgcagttgtgtaa

SEQ ID NO: 3229174 - DNA, 25 bp, Homo sapien
ctggatcttgaacatttccgtttaa

SEQ ID NO: 3229175 - DNA, 25 bp, Homo sapien
cagttgtgtaatgccttcaggttgg

SEQ ID NO: 3229176 - DNA, 25 bp, Homo sapien
gattgtgacaccagattaaagccac

SEQ ID NO: 3229177 - DNA, 25 bp, Homo sapien
tggctactacaacttaggaactgag

SEQ ID NO: 3229178 - DNA, 25 bp, Homo sapien
ggtgactgtgaaaatactcgcccct

SEQ ID NO: 3229179 - DNA, 25 bp, Homo sapien
tctaatgcctgatgtcgctggtcca

SEQ ID NO: 3229180 - DNA, 25 bp, Homo sapien
gggaacctatcacttccagtaatgg

SEQ ID NO: 3229181 - DNA, 25 bp, Homo sapien
tactgataaccactgatgggagagt

SEQ ID NO: 3229182 - DNA, 25 bp, Homo sapien
gagaaagctaatagccttcacagcc

SEQ ID NO: 3229183 - DNA, 25 bp, Homo sapien
ccagtaatggtcctatcaaccagac

SEQ ID NO: 3229184 - DNA, 25 bp, Homo sapien
tgaaggggacctaacttcagatttg

SEQ ID NO: 3229185 - DNA, 25 bp, Homo sapien
tctctggttggatggaagctttctc

SEQ ID NO: 3229186 - DNA, 25 bp, Homo sapien
tggaagctttctcagtacgcagtag

SEQ ID NO: 3229187 - DNA, 25 bp, Homo sapien
ttctcagtacgcagtagcagcacac

SEQ ID NO: 3229188 - DNA, 25 bp, Homo sapien
gaagattcccatgcctttatcacct

SEQ ID NO: 3229189 - DNA, 25 bp, Homo sapien
gactgtacattgctgggagaaaaaa

SEQ ID NO: 3229190 - DNA, 25 bp, Homo sapien
tcatcaggatgaatgtgctcagcat

SEQ ID NO: 3229191 - DNA, 25 bp, Homo sapien
cagcttaagtatgtgaatgattccc

SEQ ID NO: 3229192 - DNA, 25 bp, Homo sapien
tcagccaggctctcacctatgcaat

SEQ ID NO: 3229193 - DNA, 25 bp, Homo sapien
tctgggaagcttacaacattgacac

SEQ ID NO: 3229194 - DNA, 25 bp, Homo sapien
catggtccactgcagtttgaacgcc

SEQ ID NO: 3229195 - DNA, 25 bp, Homo sapien
tctcctactctagcgaagaccagag

SEQ ID NO: 3229196 - DNA, 25 bp, Homo sapien
agtttgcaggactatgccccttgga

SEQ ID NO: 3229197 - DNA, 25 bp, Homo sapien
taaatattgtgtctatctctctgca

SEQ ID NO: 3229198 - DNA, 25 bp, Homo sapien
aataaagcatggaaacttctaaggc

SEQ ID NO: 3229199 - DNA, 25 bp, Homo sapien
tatagacaaagctccagtttgcagg

SEQ ID NO: 3229200 - DNA, 25 bp, Homo sapien
agtccttagtatcgcgctgttgccc

SEQ ID NO: 3229201 - DNA, 25 bp, Homo sapien
cgctgtccacagattattgttcact

SEQ ID NO: 3229202 - DNA, 25 bp, Homo sapien
attattgttcacttgagtcaagtcc

SEQ ID NO: 3229203 - DNA, 25 bp, Homo sapien
cgcgctgttgcccagcatctggtag

SEQ ID NO: 3229204 - DNA, 25 bp, Homo sapien
aaattgctggtgtcacgtacattca

SEQ ID NO: 3229205 - DNA, 25 bp, Homo sapien
tgctggtgtcacgtacattcagcaa

SEQ ID NO: 3229206 - DNA, 25 bp, Homo sapien
ttgctggtgtcacgtacattcagca

SEQ ID NO: 3229207 - DNA, 25 bp, Homo sapien
caaattgctggtgtcacgtacattc

SEQ ID NO: 3229208 - DNA, 25 bp, Homo sapien
taactctgacctctcgctttgccag

SEQ ID NO: 3229209 - DNA, 25 bp, Homo sapien
aataaatattgttaactctgacctc

SEQ ID NO: 3229210 - DNA, 25 bp, Homo sapien
ccaggactgataaggcaattgtttg

SEQ ID NO: 3229211 - DNA, 25 bp, Homo sapien
ctcgctttgccaggactgataaggc

SEQ ID NO: 3229212 - DNA, 25 bp, Homo sapien
catatctcccatatgagtggtaaag

SEQ ID NO: 3229213 - DNA, 25 bp, Homo sapien
aaagcaatgatccattcaaagtctc

SEQ ID NO: 3229214 - DNA, 25 bp, Homo sapien
tcccatatgagtggtaaagagcttc

SEQ ID NO: 3229215 - DNA, 25 bp, Homo sapien
tatgagtggtaaagagcttcgcctc

SEQ ID NO: 3229216 - DNA, 25 bp, Homo sapien
tgttgtttccttgatcccatgaaaa

SEQ ID NO: 3229217 - DNA, 25 bp, Homo sapien
catataaaaccagtgtgacacaaaa

SEQ ID NO: 3229218 - DNA, 25 bp, Homo sapien
ccagagctttaaagatacgagctgt

SEQ ID NO: 3229219 - DNA, 25 bp, Homo sapien
ttctcccagtgactttatggcttct

SEQ ID NO: 3229220 - DNA, 25 bp, Homo sapien
tggttgtaaccagtgccggcacttt

SEQ ID NO: 3229221 - DNA, 25 bp, Homo sapien
tatattctgcccatgcgctttacac

SEQ ID NO: 3229222 - DNA, 25 bp, Homo sapien
tctctttctgtataacctcttctct

SEQ ID NO: 3229223 - DNA, 25 bp, Homo sapien
gctttacactcggattctcactctc

SEQ ID NO: 3229224 - DNA, 25 bp, Homo sapien
cagtaggaaacctgtgtcacctttg

SEQ ID NO: 3229225 - DNA, 25 bp, Homo sapien
gctttcttgagcgtctctcacctgg

SEQ ID NO: 3229226 - DNA, 25 bp, Homo sapien
ggatgcttgtgtcctgcagcggctt

SEQ ID NO: 3229227 - DNA, 25 bp, Homo sapien
tcagtaggaaacctgtgtcaccttt

SEQ ID NO: 3229228 - DNA, 25 bp, Homo sapien
cataaagaagcgtgcagccttccat

SEQ ID NO: 3229229 - DNA, 25 bp, Homo sapien
gactagaatagccacagtcataaag

SEQ ID NO: 3229230 - DNA, 25 bp, Homo sapien
cttctctgactagaatagccacagt

SEQ ID NO: 3229231 - DNA, 25 bp, Homo sapien
tagccacagtcataaagaagcgtgc

SEQ ID NO: 3229232 - DNA, 25 bp, Homo sapien
ttccatagctgtggcccgttgggat

SEQ ID NO: 3229233 - DNA, 25 bp, Homo sapien
cgttgggatctcctaacaatgtgga

SEQ ID NO: 3229234 - DNA, 25 bp, Homo sapien
gttgctatcatgacacatggctgga

SEQ ID NO: 3229235 - DNA, 25 bp, Homo sapien
gaccgactgatattgctcatagaaa

SEQ ID NO: 3229236 - DNA, 25 bp, Homo sapien
caaatctgagttgttggatcagaaa

SEQ ID NO: 3229237 - DNA, 25 bp, Homo sapien
cagttcttggttccccaaatctgag

SEQ ID NO: 3229238 - DNA, 25 bp, Homo sapien
ccccaaatctgagttgttggatcag

SEQ ID NO: 3229239 - DNA, 25 bp, Homo sapien
tcagttcttggttccccaaatctga

SEQ ID NO: 3229240 - DNA, 25 bp, Homo sapien
agcttactccaatactttctcccat

SEQ ID NO: 3229241 - DNA, 25 bp, Homo sapien
aagcttactccaatactttctccca

SEQ ID NO: 3229242 - DNA, 25 bp, Homo sapien
cagtccatttgccaagcttactcca

SEQ ID NO: 3229243 - DNA, 25 bp, Homo sapien
ccagtccatttgccaagcttactcc

SEQ ID NO: 3229244 - DNA, 25 bp, Homo sapien
aatgtaatcaatgtgctctctaaac

SEQ ID NO: 3229245 - DNA, 25 bp, Homo sapien
tgctctctaaaccttctccggttgt

SEQ ID NO: 3229246 - DNA, 25 bp, Homo sapien
ctcttgatcagcataataaataagc

SEQ ID NO: 3229247 - DNA, 25 bp, Homo sapien
tgaggctgttggcctattttcttcc

SEQ ID NO: 3229248 - DNA, 25 bp, Homo sapien
tgccccagatgtgtctaagtgttgg

SEQ ID NO: 3229249 - DNA, 25 bp, Homo sapien
gcttttgccatcaggtgccccagat

SEQ ID NO: 3229250 - DNA, 25 bp, Homo sapien
ggctgcttagttagaatactcctag

SEQ ID NO: 3229251 - DNA, 25 bp, Homo sapien
aagttattctgtggatgaggtcagc

SEQ ID NO: 3229252 - DNA, 25 bp, Homo sapien
ctttctggaatcctagaccctctct

SEQ ID NO: 3229253 - DNA, 25 bp, Homo sapien
tcagcagtttggaatatacctttct

SEQ ID NO: 3229254 - DNA, 25 bp, Homo sapien
tctggaatcctagaccctctctgtc

SEQ ID NO: 3229255 - DNA, 25 bp, Homo sapien
agcagtttggaatatacctttctgg

SEQ ID NO: 3229256 - DNA, 25 bp, Homo sapien
aagttgtgggagacttcttgtagtc

SEQ ID NO: 3229257 - DNA, 25 bp, Homo sapien
gcagccaaagctccattttgatgga

SEQ ID NO: 3229258 - DNA, 25 bp, Homo sapien
gatgtttgatagaaggcagccaaag

SEQ ID NO: 3229259 - DNA, 25 bp, Homo sapien
tttgatggaagatcaagttgtggga

SEQ ID NO: 3229260 - DNA, 25 bp, Homo sapien
ggaaatgggaacaagcctctttgtg

SEQ ID NO: 3229261 - DNA, 25 bp, Homo sapien
aagaactgacgggattgagtccaca

SEQ ID NO: 3229262 - DNA, 25 bp, Homo sapien
tcattccgtggctttggtccgagat

SEQ ID NO: 3229263 - DNA, 25 bp, Homo sapien
tgactgatattcctccgtggtagac

SEQ ID NO: 3229264 - DNA, 25 bp, Homo sapien
tcagtgcaacaacctgggaagccgg

SEQ ID NO: 3229265 - DNA, 25 bp, Homo sapien
tgccaggtccccatcagtggcgttg

SEQ ID NO: 3229266 - DNA, 25 bp, Homo sapien
cctagttactaggtggcaaatggaa

SEQ ID NO: 3229267 - DNA, 25 bp, Homo sapien
taactggaaggactagtgccaggtc

SEQ ID NO: 3229268 - DNA, 25 bp, Homo sapien
gccatgtggctgcataaaaagcaca

SEQ ID NO: 3229269 - DNA, 25 bp, Homo sapien
ttcagactaaagctacccaaggact

SEQ ID NO: 3229270 - DNA, 25 bp, Homo sapien
ttattcgaaatacccgtcgcgctgc

SEQ ID NO: 3229271 - DNA, 25 bp, Homo sapien
tacaatcaagcttcagtgtgcaacc

SEQ ID NO: 3229272 - DNA, 25 bp, Homo sapien
accctgatttaatgcgagaacttgg

SEQ ID NO: 3229273 - DNA, 25 bp, Homo sapien
caaccctgatttaatgcgagaactt

SEQ ID NO: 3229274 - DNA, 25 bp, Homo sapien
cctgatttaatgcgagaacttggcc

SEQ ID NO: 3229275 - DNA, 25 bp, Homo sapien
ccctgatttaatgcgagaacttggc

SEQ ID NO: 3229276 - DNA, 25 bp, Homo sapien
tttctggtattctcatcgcggtcac

SEQ ID NO: 3229277 - DNA, 25 bp, Homo sapien
cctctaccggtgtggacaagtaaag

SEQ ID NO: 3229278 - DNA, 25 bp, Homo sapien
tcaaaattgggatagtcggcagttc

SEQ ID NO: 3229279 - DNA, 25 bp, Homo sapien
tgcagctggaggtaccctgagttct

SEQ ID NO: 3229280 - DNA, 25 bp, Homo sapien
cagagtggctcgtgctacgaagtga

SEQ ID NO: 3229281 - DNA, 25 bp, Homo sapien
cgcaagaccttcaaagctgggagct

SEQ ID NO: 3229282 - DNA, 25 bp, Homo sapien
taaaaatgcgtctccgttaagagtc

SEQ ID NO: 3229283 - DNA, 25 bp, Homo sapien
aagactcctgtgaagagcgactccg

SEQ ID NO: 3229284 - DNA, 25 bp, Homo sapien
aaccagtcgctacagccaggcgcct

SEQ ID NO: 3229285 - DNA, 25 bp, Homo sapien
cgcgccgaccgtttgtatttggaat

SEQ ID NO: 3229286 - DNA, 25 bp, Homo sapien
ggaattgtgggttcctgcccgccac

SEQ ID NO: 3229287 - DNA, 25 bp, Homo sapien
ggcgcctgcgcccagaagcgcttct

SEQ ID NO: 3229288 - DNA, 25 bp, Homo sapien
acagggagaggaaaacggagcatat

SEQ ID NO: 3229289 - DNA, 25 bp, Homo sapien
gaaaacggagcatatgcaaccatac

SEQ ID NO: 3229290 - DNA, 25 bp, Homo sapien
tttcaaaggcccagcacgacaggga

SEQ ID NO: 3229291 - DNA, 25 bp, Homo sapien
gccaccagcaaagaagccggtttca

SEQ ID NO: 3229292 - DNA, 25 bp, Homo sapien
tgggtatataagcaaggctcccctc

SEQ ID NO: 3229293 - DNA, 25 bp, Homo sapien
aataccaggcgcagccttgccgtct

SEQ ID NO: 3229294 - DNA, 25 bp, Homo sapien
gaaaaggcggatctggtcattcgtc

SEQ ID NO: 3229295 - DNA, 25 bp, Homo sapien
gatgagctaccacgatacttcccac

SEQ ID NO: 3229296 - DNA, 25 bp, Homo sapien
ggaaatgccaacaaggaaaacacga

SEQ ID NO: 3229297 - DNA, 25 bp, Homo sapien
tcaccccagaggatccaataggaat

SEQ ID NO: 3229298 - DNA, 25 bp, Homo sapien
ttatagtcaggagccgtttgtatcc

SEQ ID NO: 3229299 - DNA, 25 bp, Homo sapien
gaaaacacgaactgctgtcctgtct

SEQ ID NO: 3229300 - DNA, 25 bp, Homo sapien
cacaaatcaggtacacttgatgctt

SEQ ID NO: 3229301 - DNA, 25 bp, Homo sapien
gagcacagaccagccaatcccatct

SEQ ID NO: 3229302 - DNA, 25 bp, Homo sapien
ctaatatttaggaggaaaccaactg

SEQ ID NO: 3229303 - DNA, 25 bp, Homo sapien
aactgaagcaagataggttcacaaa

SEQ ID NO: 3229304 - DNA, 25 bp, Homo sapien
tacttaacatcagattcagctccaa

SEQ ID NO: 3229305 - DNA, 25 bp, Homo sapien
ttaacatcagattcagctccaattc

SEQ ID NO: 3229306 - DNA, 25 bp, Homo sapien
ttcagctccaattcttgaaatcgtc

SEQ ID NO: 3229307 - DNA, 25 bp, Homo sapien
gctccaattcttgaaatcgtctaat

SEQ ID NO: 3229308 - DNA, 25 bp, Homo sapien
atttagcaagcggagcacctgttct

SEQ ID NO: 3229309 - DNA, 25 bp, Homo sapien
agcacctgttctaggttccgtaagc

SEQ ID NO: 3229310 - DNA, 25 bp, Homo sapien
ggataatttagcaagcggagcacct

SEQ ID NO: 3229311 - DNA, 25 bp, Homo sapien
cctgttctaggttccgtaagcttct

SEQ ID NO: 3229312 - DNA, 25 bp, Homo sapien
ggtaaaagaatagctgatgatgggc

SEQ ID NO: 3229313 - DNA, 25 bp, Homo sapien
gcgcaagtcattttttgctatgagc

SEQ ID NO: 3229314 - DNA, 25 bp, Homo sapien
tagacagcatctataaagcgcaagt

SEQ ID NO: 3229315 - DNA, 25 bp, Homo sapien
tataagttctgttacataaggtgag

SEQ ID NO: 3229316 - DNA, 25 bp, Homo sapien
gcatcttgatttcaatagagactac

SEQ ID NO: 3229317 - DNA, 25 bp, Homo sapien
gggcaaacaatagccaacaacaaat

SEQ ID NO: 3229318 - DNA, 25 bp, Homo sapien
aaagcaaacatgaattgcatcttga

SEQ ID NO: 3229319 - DNA, 25 bp, Homo sapien
tatcctgtcaattgtatatgctgca

SEQ ID NO: 3229320 - DNA, 25 bp, Homo sapien
tgctttttcatcacacaattcaaaa

SEQ ID NO: 3229321 - DNA, 25 bp, Homo sapien
tgaagactgcttaattccttgtgct

SEQ ID NO: 3229322 - DNA, 25 bp, Homo sapien
tataattaaattgatcacgaagaag

SEQ ID NO: 3229323 - DNA, 25 bp, Homo sapien
tgcaaacccacattggataaactgc

SEQ ID NO: 3229324 - DNA, 25 bp, Homo sapien
caaaggaggttctgacttaccagaa

SEQ ID NO: 3229325 - DNA, 25 bp, Homo sapien
tttctcattgcccaaaggaggttct

SEQ ID NO: 3229326 - DNA, 25 bp, Homo sapien
ttctcattgcccaaaggaggttctg

SEQ ID NO: 3229327 - DNA, 25 bp, Homo sapien
tgccactgatatcaacgccaacagc

SEQ ID NO: 3229328 - DNA, 25 bp, Homo sapien
taaacctgccactgatatcaacgcc

SEQ ID NO: 3229329 - DNA, 25 bp, Homo sapien
tgaggtcataaacctgccactgata

SEQ ID NO: 3229330 - DNA, 25 bp, Homo sapien
ctttcctgaggtcataaacctgcca

SEQ ID NO: 3229331 - DNA, 25 bp, Homo sapien
tacaagtgacgaatcaccacagctt

SEQ ID NO: 3229332 - DNA, 25 bp, Homo sapien
tcttcattatacaagtgacgaatca

SEQ ID NO: 3229333 - DNA, 25 bp, Homo sapien
cattatacaagtgacgaatcaccac

SEQ ID NO: 3229334 - DNA, 25 bp, Homo sapien
attatcttcattatacaagtgacga

SEQ ID NO: 3229335 - DNA, 25 bp, Homo sapien
tggacttaatgtatcctcagaaatg

SEQ ID NO: 3229336 - DNA, 25 bp, Homo sapien
taagtcagacacatcaactgcttca

SEQ ID NO: 3229337 - DNA, 25 bp, Homo sapien
tttacttcaggcatctttatttcag

SEQ ID NO: 3229338 - DNA, 25 bp, Homo sapien
ttaacatctgttattggacttaatg

SEQ ID NO: 3229339 - DNA, 25 bp, Homo sapien
taaccttttctctatcgaagtcagt

SEQ ID NO: 3229340 - DNA, 25 bp, Homo sapien
ctgtttcaagaagagtgacacgact

SEQ ID NO: 3229341 - DNA, 25 bp, Homo sapien
gacacgactaagaagattagtccag

SEQ ID NO: 3229342 - DNA, 25 bp, Homo sapien
agtttgtagtgcagtaatctcagga

SEQ ID NO: 3229343 - DNA, 25 bp, Homo sapien
tacatatactgcatattcctacata

SEQ ID NO: 3229344 - DNA, 25 bp, Homo sapien
tatggaagcagatagcaagctactt

SEQ ID NO: 3229345 - DNA, 25 bp, Homo sapien
tacttgacttcaccttctaggaagg

SEQ ID NO: 3229346 - DNA, 25 bp, Homo sapien
atataaaggtagcatgataaatgtt

SEQ ID NO: 3229347 - DNA, 25 bp, Homo sapien
tacaagaagcgtagtcttcactaac

SEQ ID NO: 3229348 - DNA, 25 bp, Homo sapien
gaggattcagaaggtccatgtcact

SEQ ID NO: 3229349 - DNA, 25 bp, Homo sapien
tcttcactaacttcattaaactcta

SEQ ID NO: 3229350 - DNA, 25 bp, Homo sapien
ggtccatgtcactacaagaagcgta

SEQ ID NO: 3229351 - DNA, 25 bp, Homo sapien
gacaggcagaccataagataaagtt

SEQ ID NO: 3229352 - DNA, 25 bp, Homo sapien
taagcctgagcatgcaaaatcaaac

SEQ ID NO: 3229353 - DNA, 25 bp, Homo sapien
gccaaggagttaacatctaggagac

SEQ ID NO: 3229354 - DNA, 25 bp, Homo sapien
taaaagcaccgacatactttctgtg

SEQ ID NO: 3229355 - DNA, 25 bp, Homo sapien
ccttcaggtgctcacatgtaccctt

SEQ ID NO: 3229356 - DNA, 25 bp, Homo sapien
tcttctgtggtagcacacctttttt

SEQ ID NO: 3229357 - DNA, 25 bp, Homo sapien
aggaacaaaccacactcttctgtgg

SEQ ID NO: 3229358 - DNA, 25 bp, Homo sapien
ggtgctcacatgtacccttcctgct

SEQ ID NO: 3229359 - DNA, 25 bp, Homo sapien
cagaggaatacttgctggcctctct

SEQ ID NO: 3229360 - DNA, 25 bp, Homo sapien
tggcctctctacttcgctttttctg

SEQ ID NO: 3229361 - DNA, 25 bp, Homo sapien
ggagttgaatctgatgatgctgtac

SEQ ID NO: 3229362 - DNA, 25 bp, Homo sapien
ttcaaaccacagtaattaacagtag

SEQ ID NO: 3229363 - DNA, 25 bp, Homo sapien
agcaacaaatttagatgatttctca

SEQ ID NO: 3229364 - DNA, 25 bp, Homo sapien
catcaaagatggaccgagaatgtac

SEQ ID NO: 3229365 - DNA, 25 bp, Homo sapien
caacaaaagctaatgcttgcttgtt

SEQ ID NO: 3229366 - DNA, 25 bp, Homo sapien
gagagactaagattcgcgtttgcta

SEQ ID NO: 3229367 - DNA, 25 bp, Homo sapien
catcctttccattttctggattgtt

SEQ ID NO: 3229368 - DNA, 25 bp, Homo sapien
tcatcctttccattttctggattgt

SEQ ID NO: 3229369 - DNA, 25 bp, Homo sapien
tcctttccattttctggattgttgt

SEQ ID NO: 3229370 - DNA, 25 bp, Homo sapien
tttcatcctttccattttctggatt

SEQ ID NO: 3229371 - DNA, 25 bp, Homo sapien
gtaatccaatacaattccctataga

SEQ ID NO: 3229372 - DNA, 25 bp, Homo sapien
cacatgcacattctatatatactgt

SEQ ID NO: 3229373 - DNA, 25 bp, Homo sapien
tccaatacaattccctatagagaaa

SEQ ID NO: 3229374 - DNA, 25 bp, Homo sapien
aatccaatacaattccctatagaga

SEQ ID NO: 3229375 - DNA, 25 bp, Homo sapien
cagtaactctgcagtttcttcaaac

SEQ ID NO: 3229376 - DNA, 25 bp, Homo sapien
gatttggacatttcagtaactctgc

SEQ ID NO: 3229377 - DNA, 25 bp, Homo sapien
ctacaagtagtgatttggacatttc

SEQ ID NO: 3229378 - DNA, 25 bp, Homo sapien
ttggacatttcagtaactctgcagt

SEQ ID NO: 3229379 - DNA, 25 bp, Homo sapien
tatgtatagtaaccaaagtcctaga

SEQ ID NO: 3229380 - DNA, 25 bp, Homo sapien
ggaatccaaattgtcaaaaactgca

SEQ ID NO: 3229381 - DNA, 25 bp, Homo sapien
tgacacaaggtaaagcagtataatc

SEQ ID NO: 3229382 - DNA, 25 bp, Homo sapien
gcagtattgcagtatattaaaattg

SEQ ID NO: 3229383 - DNA, 25 bp, Homo sapien
cactctgtaagagaaatatactgga

SEQ ID NO: 3229384 - DNA, 25 bp, Homo sapien
gagaaatatactggaacatgagttt

SEQ ID NO: 3229385 - DNA, 25 bp, Homo sapien
aaatatactggaacatgagtttttc

SEQ ID NO: 3229386 - DNA, 25 bp, Homo sapien
tcactctgtaagagaaatatactgg

SEQ ID NO: 3229387 - DNA, 25 bp, Homo sapien
gcctgtttcccagtacaaaaggaga

SEQ ID NO: 3229388 - DNA, 25 bp, Homo sapien
tgtaaaccatagtcctcaagcctgt

SEQ ID NO: 3229389 - DNA, 25 bp, Homo sapien
agtgttacgccggaggccaagacag

SEQ ID NO: 3229390 - DNA, 25 bp, Homo sapien
caagatggtatatatgagagcctcc

SEQ ID NO: 3229391 - DNA, 25 bp, Homo sapien
ttgacagtgtaatatagaattatac

SEQ ID NO: 3229392 - DNA, 25 bp, Homo sapien
gacagtgtaatatagaattatacat

SEQ ID NO: 3229393 - DNA, 25 bp, Homo sapien
gatttctactcatataacaatattt

SEQ ID NO: 3229394 - DNA, 25 bp, Homo sapien
atttctactcatataacaatatttt

SEQ ID NO: 3229395 - DNA, 25 bp, Homo sapien
ccaggcatgacggtacaggcctata

SEQ ID NO: 3229396 - DNA, 25 bp, Homo sapien
tgggcgagtagctttagctcacgag

SEQ ID NO: 3229397 - DNA, 25 bp, Homo sapien
ggtgggcgagtagctttagctcacg

SEQ ID NO: 3229398 - DNA, 25 bp, Homo sapien
gccaggcatgacggtacaggcctat

SEQ ID NO: 3229399 - DNA, 25 bp, Homo sapien
tctttaccgagacctattcagagca

SEQ ID NO: 3229400 - DNA, 25 bp, Homo sapien
tactggcatgttaaccacaaggtgg

SEQ ID NO: 3229401 - DNA, 25 bp, Homo sapien
ggcagcacaagcaactgacaccttt

SEQ ID NO: 3229402 - DNA, 25 bp, Homo sapien
tcagagcataacatagacagggcag

SEQ ID NO: 3229403 - DNA, 25 bp, Homo sapien
aaatcagtggtaatgagaaatctca

SEQ ID NO: 3229404 - DNA, 25 bp, Homo sapien
tatgtaaatgtccacttatggctcc

SEQ ID NO: 3229405 - DNA, 25 bp, Homo sapien
aatgtgccaaattctattaattcta

SEQ ID NO: 3229406 - DNA, 25 bp, Homo sapien
gctcctatctagaagtaaaattggt

SEQ ID NO: 3229407 - DNA, 25 bp, Homo sapien
tactccattgtgatgagcatacact

SEQ ID NO: 3229408 - DNA, 25 bp, Homo sapien
gcatatcctgaaagcacatcctaaa

SEQ ID NO: 3229409 - DNA, 25 bp, Homo sapien
gggtgtaaagacatcagtagatatc

SEQ ID NO: 3229410 - DNA, 25 bp, Homo sapien
gatatcaagtgccttaaccactgca

SEQ ID NO: 3229411 - DNA, 25 bp, Homo sapien
ggatgtagcactccatgcaggaaaa

SEQ ID NO: 3229412 - DNA, 25 bp, Homo sapien
taaccttatgcattttctagagccg

SEQ ID NO: 3229413 - DNA, 25 bp, Homo sapien
taagtgttacccatgtagcaggaag

SEQ ID NO: 3229414 - DNA, 25 bp, Homo sapien
tacaaaagatggtcttggccttgcc

SEQ ID NO: 3229415 - DNA, 25 bp, Homo sapien
taaaatgtgggctcaacatcctggt

SEQ ID NO: 3229416 - DNA, 25 bp, Homo sapien
taaatgactattgggcctttgccag

SEQ ID NO: 3229417 - DNA, 25 bp, Homo sapien
tgcaatgaataaagccaaggcctat

SEQ ID NO: 3229418 - DNA, 25 bp, Homo sapien
ccagctgtggaaaggtatgcatact

SEQ ID NO: 3229419 - DNA, 25 bp, Homo sapien
caaggcttttaggatttaaggctgg

SEQ ID NO: 3229420 - DNA, 25 bp, Homo sapien
gcaaggcttttaggatttaaggctg

SEQ ID NO: 3229421 - DNA, 25 bp, Homo sapien
ttccagcaatgcattaacttttaca

SEQ ID NO: 3229422 - DNA, 25 bp, Homo sapien
ttacactaacaagtattaatgtagt

SEQ ID NO: 3229423 - DNA, 25 bp, Homo sapien
aacaagtattaatgtagttcctgta

SEQ ID NO: 3229424 - DNA, 25 bp, Homo sapien
gattttttacaaggcttttccagca

SEQ ID NO: 3229425 - DNA, 25 bp, Homo sapien
gaggtgctcctctagatgactgccg

SEQ ID NO: 3229426 - DNA, 25 bp, Homo sapien
catattacccaagaagagaggagga

SEQ ID NO: 3229427 - DNA, 25 bp, Homo sapien
caccattagataggactcttagcca

SEQ ID NO: 3229428 - DNA, 25 bp, Homo sapien
caaaagtatgacaggttacgcagct

SEQ ID NO: 3229429 - DNA, 25 bp, Homo sapien
tatatatgtgtactagaactggaac

SEQ ID NO: 3229430 - DNA, 25 bp, Homo sapien
aggatatggagcaactatactctca

SEQ ID NO: 3229431 - DNA, 25 bp, Homo sapien
tgctgctgataggaattgtacgact

SEQ ID NO: 3229432 - DNA, 25 bp, Homo sapien
gactactttcggaaacagcttggca

SEQ ID NO: 3229433 - DNA, 25 bp, Homo sapien
gaaacattagatccttgttgtcaga

SEQ ID NO: 3229434 - DNA, 25 bp, Homo sapien
ggaaacattagatccttgttgtcag

SEQ ID NO: 3229435 - DNA, 25 bp, Homo sapien
tgggaaacattagatccttgttgtc

SEQ ID NO: 3229436 - DNA, 25 bp, Homo sapien
aacattagatccttgttgtcagaat

SEQ ID NO: 3229437 - DNA, 25 bp, Homo sapien
atggcaaaacacactctccaagcat

SEQ ID NO: 3229438 - DNA, 25 bp, Homo sapien
catggcaaaacacactctccaagca

SEQ ID NO: 3229439 - DNA, 25 bp, Homo sapien
ctcgcagcacatggcaaaacacact

SEQ ID NO: 3229440 - DNA, 25 bp, Homo sapien
tcatgtgtagtggttcccctttcct

SEQ ID NO: 3229441 - DNA, 25 bp, Homo sapien
ctcatgtgtagtggttcccctttcc

SEQ ID NO: 3229442 - DNA, 25 bp, Homo sapien
catgtgtagtggttcccctttcctc

SEQ ID NO: 3229443 - DNA, 25 bp, Homo sapien
ccagtccttctcagtagcaaaacaa

SEQ ID NO: 3229444 - DNA, 25 bp, Homo sapien
ccttctcagtagcaaaacaacacat

SEQ ID NO: 3229445 - DNA, 25 bp, Homo sapien
cagtccttctcagtagcaaaacaac

SEQ ID NO: 3229446 - DNA, 25 bp, Homo sapien
gtccttctcagtagcaaaacaacac

SEQ ID NO: 3229447 - DNA, 25 bp, Homo sapien
ttataagcacaatagactttcctga

SEQ ID NO: 3229448 - DNA, 25 bp, Homo sapien
ataagcacaatagactttcctgatg

SEQ ID NO: 3229449 - DNA, 25 bp, Homo sapien
atttataagcacaatagactttcct

SEQ ID NO: 3229450 - DNA, 25 bp, Homo sapien
aagcatttataagcacaatagactt

SEQ ID NO: 3229451 - DNA, 25 bp, Homo sapien
taaaacagctcctttactgtgtttg

SEQ ID NO: 3229452 - DNA, 25 bp, Homo sapien
gggtcaacatgaggtgctaccagat

SEQ ID NO: 3229453 - DNA, 25 bp, Homo sapien
tgctaccagatataaaacagctcct

SEQ ID NO: 3229454 - DNA, 25 bp, Homo sapien
gaggtgctaccagatataaaacagc

SEQ ID NO: 3229455 - DNA, 25 bp, Homo sapien
tggagcataacccagtatggaggtc

SEQ ID NO: 3229456 - DNA, 25 bp, Homo sapien
ctggagcataacccagtatggaggt

SEQ ID NO: 3229457 - DNA, 25 bp, Homo sapien
ctccaattccaattacagagacttt

SEQ ID NO: 3229458 - DNA, 25 bp, Homo sapien
tccaattccaattacagagactttc

SEQ ID NO: 3229459 - DNA, 25 bp, Homo sapien
cctccaattccaattacagagactt

SEQ ID NO: 3229460 - DNA, 25 bp, Homo sapien
caacaccaacaactcggttgaccta

SEQ ID NO: 3229461 - DNA, 25 bp, Homo sapien
cagtctccataatgaccaaccatag

SEQ ID NO: 3229462 - DNA, 25 bp, Homo sapien
ccaaccatagtttgaatgctggaga

SEQ ID NO: 3229463 - DNA, 25 bp, Homo sapien
taatgaccaaccatagtttgaatgc

SEQ ID NO: 3229464 - DNA, 25 bp, Homo sapien
attccaacagaaaacccttgctgga

SEQ ID NO: 3229465 - DNA, 25 bp, Homo sapien
ttccaacagaaaacccttgctggac

SEQ ID NO: 3229466 - DNA, 25 bp, Homo sapien
cttggagcaagccacggaagattgc

SEQ ID NO: 3229467 - DNA, 25 bp, Homo sapien
caagccacggaagattgcaattgga

SEQ ID NO: 3229468 - DNA, 25 bp, Homo sapien
cacttactttggctgagtgaacttt

SEQ ID NO: 3229469 - DNA, 25 bp, Homo sapien
gccttggaatagtggtaaactctac

SEQ ID NO: 3229470 - DNA, 25 bp, Homo sapien
tgaaaacaccaatatgatcctgtcc

SEQ ID NO: 3229471 - DNA, 25 bp, Homo sapien
ttagtagcatggtcatctaggtgcc

SEQ ID NO: 3229472 - DNA, 25 bp, Homo sapien
catggacagctccatccttagggta

SEQ ID NO: 3229473 - DNA, 25 bp, Homo sapien
gtcatggacagctccatccttaggg

SEQ ID NO: 3229474 - DNA, 25 bp, Homo sapien
tcatggacagctccatccttagggt

SEQ ID NO: 3229475 - DNA, 25 bp, Homo sapien
tctcaggaggggttttgcttgcgtt

SEQ ID NO: 3229476 - DNA, 25 bp, Homo sapien
gcttttacactgtctaccttagtgc

SEQ ID NO: 3229477 - DNA, 25 bp, Homo sapien
tagtgccttcacagctaaacaccct

SEQ ID NO: 3229478 - DNA, 25 bp, Homo sapien
tgcttgcgttattgcttttacactg

SEQ ID NO: 3229479 - DNA, 25 bp, Homo sapien
aagattttggatccccttaggccag

SEQ ID NO: 3229480 - DNA, 25 bp, Homo sapien
gccatgcctgaatggcaggctaagt

SEQ ID NO: 3229481 - DNA, 25 bp, Homo sapien
tcccactaaaactatggcgatttgt

SEQ ID NO: 3229482 - DNA, 25 bp, Homo sapien
gccagatttctggaattggaagcga

SEQ ID NO: 3229483 - DNA, 25 bp, Homo sapien
taacccttctcttcaagggctgctc

SEQ ID NO: 3229484 - DNA, 25 bp, Homo sapien
ttctaacccttctcttcaagggctg

SEQ ID NO: 3229485 - DNA, 25 bp, Homo sapien
tcaagggctgctcttctatccacat

SEQ ID NO: 3229486 - DNA, 25 bp, Homo sapien
tcttcaagggctgctcttctatcca

SEQ ID NO: 3229487 - DNA, 25 bp, Homo sapien
ttaggtttgttgttgcttggcggca

SEQ ID NO: 3229488 - DNA, 25 bp, Homo sapien
cggatacgttaggtttgttgttgct

SEQ ID NO: 3229489 - DNA, 25 bp, Homo sapien
gggaagccaatgccggatacgttag

SEQ ID NO: 3229490 - DNA, 25 bp, Homo sapien
ccaatgccggatacgttaggtttgt

SEQ ID NO: 3229491 - DNA, 25 bp, Homo sapien
tctcttgttagcgtcccttctaggc

SEQ ID NO: 3229492 - DNA, 25 bp, Homo sapien
tctaggcagctctttcacatgatca

SEQ ID NO: 3229493 - DNA, 25 bp, Homo sapien
acagttgctgccataaggtctccat

SEQ ID NO: 3229494 - DNA, 25 bp, Homo sapien
caaaagggaaatttactggtgcata

SEQ ID NO: 3229495 - DNA, 25 bp, Homo sapien
gaccaaaggctaggttgtaatcttg

SEQ ID NO: 3229496 - DNA, 25 bp, Homo sapien
taaaaatgtgatgtggaccaaaggc

SEQ ID NO: 3229497 - DNA, 25 bp, Homo sapien
tcaaaccagatgtaaaacactcaca

SEQ ID NO: 3229498 - DNA, 25 bp, Homo sapien
catatcccagatgaaaactgctgta

SEQ ID NO: 3229499 - DNA, 25 bp, Homo sapien
tctattggagaacttgagagtgccc

SEQ ID NO: 3229500 - DNA, 25 bp, Homo sapien
tcagggacaatattggcatacacaa

SEQ ID NO: 3229501 - DNA, 25 bp, Homo sapien
gagagtgccccaataaacttacagg

SEQ ID NO: 3229502 - DNA, 25 bp, Homo sapien
tcctgtttccggctactcacttaaa

SEQ ID NO: 3229503 - DNA, 25 bp, Homo sapien
atcttagcactctttgggagtccaa

SEQ ID NO: 3229504 - DNA, 25 bp, Homo sapien
cagccacctttcccagtaaagaagg

SEQ ID NO: 3229505 - DNA, 25 bp, Homo sapien
taattccagagcagagtgccagtga

SEQ ID NO: 3229506 - DNA, 25 bp, Homo sapien
gactattgcctctaattccacaaga

SEQ ID NO: 3229507 - DNA, 25 bp, Homo sapien
atatcatatgctcccactgttgcag

SEQ ID NO: 3229508 - DNA, 25 bp, Homo sapien
aacttgtgcagttactcatacagca

SEQ ID NO: 3229509 - DNA, 25 bp, Homo sapien
gaaagtctcgttacttagcaccacc

SEQ ID NO: 3229510 - DNA, 25 bp, Homo sapien
tgcagacatagatacagataccttg

SEQ ID NO: 3229511 - DNA, 25 bp, Homo sapien
gagacgccagatctttctagtactg

SEQ ID NO: 3229512 - DNA, 25 bp, Homo sapien
cattgtagaagctgtagatactcga

SEQ ID NO: 3229513 - DNA, 25 bp, Homo sapien
cctccaggtttgttcacggcagctc

SEQ ID NO: 3229514 - DNA, 25 bp, Homo sapien
catagccatgtgtaaatttctggtc

SEQ ID NO: 3229515 - DNA, 25 bp, Homo sapien
gaatgtcatttgttgggattaataa

SEQ ID NO: 3229516 - DNA, 25 bp, Homo sapien
tggtctctggtacccatcacgttct

SEQ ID NO: 3229517 - DNA, 25 bp, Homo sapien
tacattggaatctcgtttttgctct

SEQ ID NO: 3229518 - DNA, 25 bp, Homo sapien
caccttcaaattaattggtgggagt

SEQ ID NO: 3229519 - DNA, 25 bp, Homo sapien
gcaaagatgtaaatgagtgacagta

SEQ ID NO: 3229520 - DNA, 25 bp, Homo sapien
taggagggatatggtcaccttcaaa

SEQ ID NO: 3229521 - DNA, 25 bp, Homo sapien
catggtggagtcaatatagggttgc

SEQ ID NO: 3229522 - DNA, 25 bp, Homo sapien
caatatagggttgccaaactttatg

SEQ ID NO: 3229523 - DNA, 25 bp, Homo sapien
ggagtcaatatagggttgccaaact

SEQ ID NO: 3229524 - DNA, 25 bp, Homo sapien
tcctgccactgatgcgggctgcctt

SEQ ID NO: 3229525 - DNA, 25 bp, Homo sapien
ctctaccacctgacaggttccccat

SEQ ID NO: 3229526 - DNA, 25 bp, Homo sapien
cctctaccacctgacaggttcccca

SEQ ID NO: 3229527 - DNA, 25 bp, Homo sapien
cacctctaccacctgacaggttccc

SEQ ID NO: 3229528 - DNA, 25 bp, Homo sapien
ttcacctctaccacctgacaggttc

SEQ ID NO: 3229529 - DNA, 25 bp, Homo sapien
cccttgccagatttaggtcactgcc

SEQ ID NO: 3229530 - DNA, 25 bp, Homo sapien
acccttgccagatttaggtcactgc

SEQ ID NO: 3229531 - DNA, 25 bp, Homo sapien
gacccttgccagatttaggtcactg

SEQ ID NO: 3229532 - DNA, 25 bp, Homo sapien
tattcactggacaccgagtctggct

SEQ ID NO: 3229533 - DNA, 25 bp, Homo sapien
cggaacgccaagggagacaattccg

SEQ ID NO: 3229534 - DNA, 25 bp, Homo sapien
tgcttctacttccggaacgccaagg

SEQ ID NO: 3229535 - DNA, 25 bp, Homo sapien
ccgagtctggcttaaggtgatgagt

SEQ ID NO: 3229536 - DNA, 25 bp, Homo sapien
tccttgtatgcatgagggaactgac

SEQ ID NO: 3229537 - DNA, 25 bp, Homo sapien
agttgattcactagttcaaagccca

SEQ ID NO: 3229538 - DNA, 25 bp, Homo sapien
tcaaagcccatagatttacccacca

SEQ ID NO: 3229539 - DNA, 25 bp, Homo sapien
tgcttaaattcactagtaagtagca

SEQ ID NO: 3229540 - DNA, 25 bp, Homo sapien
tacatccgagcataggggttcttag

SEQ ID NO: 3229541 - DNA, 25 bp, Homo sapien
ctgagagaagtgttatgtacaatca

SEQ ID NO: 3229542 - DNA, 25 bp, Homo sapien
tcatggactcggtagtccgcaaaat

SEQ ID NO: 3229543 - DNA, 25 bp, Homo sapien
tcatgctgatggtcactgcgtttcc

SEQ ID NO: 3229544 - DNA, 25 bp, Homo sapien
agctagtatattttggtcttttgtc

SEQ ID NO: 3229545 - DNA, 25 bp, Homo sapien
tagtatattttggtcttttgtcttc

SEQ ID NO: 3229546 - DNA, 25 bp, Homo sapien
gtatattttggtcttttgtcttcac

SEQ ID NO: 3229547 - DNA, 25 bp, Homo sapien
tcagctagtatattttggtcttttg

SEQ ID NO: 3229548 - DNA, 25 bp, Homo sapien
caatttcactaaggcttcttggtgg

SEQ ID NO: 3229549 - DNA, 25 bp, Homo sapien
ttccaatttcactaaggcttcttgg

SEQ ID NO: 3229550 - DNA, 25 bp, Homo sapien
cttcttggtggaaatgtttaaccat

SEQ ID NO: 3229551 - DNA, 25 bp, Homo sapien
gcttcttggtggaaatgtttaacca

SEQ ID NO: 3229552 - DNA, 25 bp, Homo sapien
ttcatagatcctcaccagtggattc

SEQ ID NO: 3229553 - DNA, 25 bp, Homo sapien
gggcagccaagttcatagatcctca

SEQ ID NO: 3229554 - DNA, 25 bp, Homo sapien
ctctagggcagccaagttcatagat

SEQ ID NO: 3229555 - DNA, 25 bp, Homo sapien
catagatcctcaccagtggattctt

SEQ ID NO: 3229556 - DNA, 25 bp, Homo sapien
gatgcctgttcagactccaactctg

SEQ ID NO: 3229557 - DNA, 25 bp, Homo sapien
aactctgcaagccaggatggcccca

SEQ ID NO: 3229558 - DNA, 25 bp, Homo sapien
atctccttgtgtagatgcctgttca

SEQ ID NO: 3229559 - DNA, 25 bp, Homo sapien
tgaagccttcctcaggttcatctcc

SEQ ID NO: 3229560 - DNA, 25 bp, Homo sapien
gaaagcagtattcctgtgaatccgc

SEQ ID NO: 3229561 - DNA, 25 bp, Homo sapien
ccgctgagaactaattagtagttga

SEQ ID NO: 3229562 - DNA, 25 bp, Homo sapien
gcagttgtcatttaactaaaccaca

SEQ ID NO: 3229563 - DNA, 25 bp, Homo sapien
caagacacataatcgggaattagca

SEQ ID NO: 3229564 - DNA, 25 bp, Homo sapien
gacattgaagtaatatccggacaaa

SEQ ID NO: 3229565 - DNA, 25 bp, Homo sapien
taatatccggacaaaggctccacat

SEQ ID NO: 3229566 - DNA, 25 bp, Homo sapien
ttgaagtaatatccggacaaaggct

SEQ ID NO: 3229567 - DNA, 25 bp, Homo sapien
agaggacattgaagtaatatccgga

SEQ ID NO: 3229568 - DNA, 25 bp, Homo sapien
ctagcaaataatgtttgccttttct

SEQ ID NO: 3229569 - DNA, 25 bp, Homo sapien
ggagtgtgtcggattggtcatctaa

SEQ ID NO: 3229570 - DNA, 25 bp, Homo sapien
gattggtcatctaatactttaggtg

SEQ ID NO: 3229571 - DNA, 25 bp, Homo sapien
gtcatctaatactttaggtggaagc

SEQ ID NO: 3229572 - DNA, 25 bp, Homo sapien
cacagaagcaatcacctcaatggta

SEQ ID NO: 3229573 - DNA, 25 bp, Homo sapien
aatggtacaattaggaatagcatac

SEQ ID NO: 3229574 - DNA, 25 bp, Homo sapien
aagcttactgaatggaagcatttcc

SEQ ID NO: 3229575 - DNA, 25 bp, Homo sapien
cgtaggcaacgtgatgcacagaagc

SEQ ID NO: 3229576 - DNA, 25 bp, Homo sapien
agagatgcttttaggaggaagtatt

SEQ ID NO: 3229577 - DNA, 25 bp, Homo sapien
agatgcttttaggaggaagtattac

SEQ ID NO: 3229578 - DNA, 25 bp, Homo sapien
gatgcttttaggaggaagtattact

SEQ ID NO: 3229579 - DNA, 25 bp, Homo sapien
tgcttttaggaggaagtattactag

SEQ ID NO: 3229580 - DNA, 25 bp, Homo sapien
tgaagtccaataactagagtaacta

SEQ ID NO: 3229581 - DNA, 25 bp, Homo sapien
tctttattgctatgtcgatttttca

SEQ ID NO: 3229582 - DNA, 25 bp, Homo sapien
tatgcatactgatttctacttgaag

SEQ ID NO: 3229583 - DNA, 25 bp, Homo sapien
tttcaaaggaggattgaagtccaat

SEQ ID NO: 3229584 - DNA, 25 bp, Homo sapien
cagggaagaacgaacattcttcctt

SEQ ID NO: 3229585 - DNA, 25 bp, Homo sapien
tcccgctgtgcggtcgtgattggtc

SEQ ID NO: 3229586 - DNA, 25 bp, Homo sapien
ggcgtcctctttccggctgttgctg

SEQ ID NO: 3229587 - DNA, 25 bp, Homo sapien
gcaggtggagaggcgtcctctttcc

SEQ ID NO: 3229588 - DNA, 25 bp, Homo sapien
actccgtcccgctgtgcggtcgtga

SEQ ID NO: 3229589 - DNA, 25 bp, Homo sapien
ctccagtcgccgtttggtttgtttg

SEQ ID NO: 3229590 - DNA, 25 bp, Homo sapien
acctcgctccagtcgccgtttggtt

SEQ ID NO: 3229591 - DNA, 25 bp, Homo sapien
taatccacaaaaccgctgactttcc

SEQ ID NO: 3229592 - DNA, 25 bp, Homo sapien
caggtggctttttccgcccacctcg

SEQ ID NO: 3229593 - DNA, 25 bp, Homo sapien
cttgcgtctctagcagccatctctt

SEQ ID NO: 3229594 - DNA, 25 bp, Homo sapien
tgaagatgtaaaacgggaaagacca

SEQ ID NO: 3229595 - DNA, 25 bp, Homo sapien
aaaatggtgggaagccttgcgtctc

SEQ ID NO: 3229596 - DNA, 25 bp, Homo sapien
agctggccaggcttgagaggattct

SEQ ID NO: 3229597 - DNA, 25 bp, Homo sapien
ttaaccacactggtctacaattgct

SEQ ID NO: 3229598 - DNA, 25 bp, Homo sapien
taagcatgatgaagatcgatatccc

SEQ ID NO: 3229599 - DNA, 25 bp, Homo sapien
taagctccgaagtcccatgtcctat

SEQ ID NO: 3229600 - DNA, 25 bp, Homo sapien
gatatgagggcttgtaaccgtcact

SEQ ID NO: 3229601 - DNA, 25 bp, Homo sapien
gccagacactgttagacacaaacat

SEQ ID NO: 3229602 - DNA, 25 bp, Homo sapien
tgccagacactgttagacacaaaca

SEQ ID NO: 3229603 - DNA, 25 bp, Homo sapien
catcttcatggagtattcaaacaag

SEQ ID NO: 3229604 - DNA, 25 bp, Homo sapien
tcatcttcatggagtattcaaacaa

SEQ ID NO: 3229605 - DNA, 25 bp, Homo sapien
tctgagattgagtccatctcaatag

SEQ ID NO: 3229606 - DNA, 25 bp, Homo sapien
tctctgagattgagtccatctcaat

SEQ ID NO: 3229607 - DNA, 25 bp, Homo sapien
atctctgagattgagtccatctcaa

SEQ ID NO: 3229608 - DNA, 25 bp, Homo sapien
tgagattgagtccatctcaatagaa

SEQ ID NO: 3229609 - DNA, 25 bp, Homo sapien
tagtccaggacaaacagcagtcagt

SEQ ID NO: 3229610 - DNA, 25 bp, Homo sapien
tgagtcagttacattcccaggaagt

SEQ ID NO: 3229611 - DNA, 25 bp, Homo sapien
gagggcatctttctacatgagacgg

SEQ ID NO: 3229612 - DNA, 25 bp, Homo sapien
tgaggaattgtaagacccagcagtc

SEQ ID NO: 3229613 - DNA, 25 bp, Homo sapien
gacgtactggcctatgtgttcatct

SEQ ID NO: 3229614 - DNA, 25 bp, Homo sapien
agacgtactggcctatgtgttcatc

SEQ ID NO: 3229615 - DNA, 25 bp, Homo sapien
acgtactggcctatgtgttcatctg

SEQ ID NO: 3229616 - DNA, 25 bp, Homo sapien
caagacgtactggcctatgtgttca

SEQ ID NO: 3229617 - DNA, 25 bp, Homo sapien
gaattgttaggacatatatagagcg

SEQ ID NO: 3229618 - DNA, 25 bp, Homo sapien
aaagctgctggtatacttgcaatcc

SEQ ID NO: 3229619 - DNA, 25 bp, Homo sapien
gaactgaatggagggccaatgataa

SEQ ID NO: 3229620 - DNA, 25 bp, Homo sapien
tgttgtctgcaagctagaggcttag

SEQ ID NO: 3229621 - DNA, 25 bp, Homo sapien
cttttattttataggagatactcac

SEQ ID NO: 3229622 - DNA, 25 bp, Homo sapien
ctgcttgtgatcgagggcgtcctca

SEQ ID NO: 3229623 - DNA, 25 bp, Homo sapien
tgcttgtgatcgagggcgtcctcag

SEQ ID NO: 3229624 - DNA, 25 bp, Homo sapien
ggagatactcacaccaccccatttg

SEQ ID NO: 3229625 - DNA, 25 bp, Homo sapien
cttcaatttgtgtaaagagtacagg

SEQ ID NO: 3229626 - DNA, 25 bp, Homo sapien
gtaaggcaaggtttaaatagctata

SEQ ID NO: 3229627 - DNA, 25 bp, Homo sapien
taaggcaaggtttaaatagctataa

SEQ ID NO: 3229628 - DNA, 25 bp, Homo sapien
tgtgtaaagagtacaggtaaggcaa

SEQ ID NO: 3229629 - DNA, 25 bp, Homo sapien
cgaaatcatgaaccatcccaaaaca

SEQ ID NO: 3229630 - DNA, 25 bp, Homo sapien
tcgaaatcatgaaccatcccaaaac

SEQ ID NO: 3229631 - DNA, 25 bp, Homo sapien
ttcgaaatcatgaaccatcccaaaa

SEQ ID NO: 3229632 - DNA, 25 bp, Homo sapien
tttcgaaatcatgaaccatcccaaa

SEQ ID NO: 3229633 - DNA, 25 bp, Homo sapien
tctgattccacgcaaagaggactgg

SEQ ID NO: 3229634 - DNA, 25 bp, Homo sapien
cacaggagtattgacgagttatgca

SEQ ID NO: 3229635 - DNA, 25 bp, Homo sapien
tcacagttcgtgagactgcagggag

SEQ ID NO: 3229636 - DNA, 25 bp, Homo sapien
gctgatggttatacgatcacaggag

SEQ ID NO: 3229637 - DNA, 25 bp, Homo sapien
catgccagtgttggcatttcagtga

SEQ ID NO: 3229638 - DNA, 25 bp, Homo sapien
ggcattgctgtttagaagtaagtcc

SEQ ID NO: 3229639 - DNA, 25 bp, Homo sapien
aatagaaaatgtctgcgcacatgcc

SEQ ID NO: 3229640 - DNA, 25 bp, Homo sapien
ttttcacctctcatgcttgttggca

SEQ ID NO: 3229641 - DNA, 25 bp, Homo sapien
aatctggcattgattcttgctcctg

SEQ ID NO: 3229642 - DNA, 25 bp, Homo sapien
cattgattcttgctcctgttgttca

SEQ ID NO: 3229643 - DNA, 25 bp, Homo sapien
ctgttgttcaggaaagtcacattct

SEQ ID NO: 3229644 - DNA, 25 bp, Homo sapien
gctcctgttgttcaggaaagtcaca

SEQ ID NO: 3229645 - DNA, 25 bp, Homo sapien
gttggtcagtgtgtagtgctaatca

SEQ ID NO: 3229646 - DNA, 25 bp, Homo sapien
ttggcagagttgaaccatcagagct

SEQ ID NO: 3229647 - DNA, 25 bp, Homo sapien
cctgttatggaaacactggtccaga

SEQ ID NO: 3229648 - DNA, 25 bp, Homo sapien
tcattaaagatccatcttttggcag

SEQ ID NO: 3229649 - DNA, 25 bp, Homo sapien
cattatgtcattgaagcgagcccaa

SEQ ID NO: 3229650 - DNA, 25 bp, Homo sapien
caagtagaaccatcagtcagagtgc

SEQ ID NO: 3229651 - DNA, 25 bp, Homo sapien
catctgggcacttatgggaagtacc

SEQ ID NO: 3229652 - DNA, 25 bp, Homo sapien
gagggtcccacagataattgcaatg

SEQ ID NO: 3229653 - DNA, 25 bp, Homo sapien
gatggagtttgaacatcttgctgct

SEQ ID NO: 3229654 - DNA, 25 bp, Homo sapien
ggaggtaactcatgaggtcgacgct

SEQ ID NO: 3229655 - DNA, 25 bp, Homo sapien
tatacacagataacagaacttcttt

SEQ ID NO: 3229656 - DNA, 25 bp, Homo sapien
ttttacaaagtcgataaagacaaca

SEQ ID NO: 3229657 - DNA, 25 bp, Homo sapien
cacaggaggttgactctgagaaggc

SEQ ID NO: 3229658 - DNA, 25 bp, Homo sapien
ctctgggaaggcgtcaactgaggat

SEQ ID NO: 3229659 - DNA, 25 bp, Homo sapien
ggcatcacccgaggttgactctggg

SEQ ID NO: 3229660 - DNA, 25 bp, Homo sapien
gatgactctgggaaggcatcacagg

SEQ ID NO: 3229661 - DNA, 25 bp, Homo sapien
gaaggcatcaactgaggttgcctct

SEQ ID NO: 3229662 - DNA, 25 bp, Homo sapien
ctaggagggcgtcacaggaggttga

SEQ ID NO: 3229663 - DNA, 25 bp, Homo sapien
ctgggaaggcatcaactgaggttgc

SEQ ID NO: 3229664 - DNA, 25 bp, Homo sapien
ttgcctctgggagggtgtcacagga

SEQ ID NO: 3229665 - DNA, 25 bp, Homo sapien
cttttactccggtaaggtgtcacat

SEQ ID NO: 3229666 - DNA, 25 bp, Homo sapien
agtttttggaattggtactgattgc

SEQ ID NO: 3229667 - DNA, 25 bp, Homo sapien
gggtgtcacccgaggttggctctgg

SEQ ID NO: 3229668 - DNA, 25 bp, Homo sapien
gtaaggtgtcacatgaggttgactc

SEQ ID NO: 3229669 - DNA, 25 bp, Homo sapien
ctatcttccctcatgtaatttgttc

SEQ ID NO: 3229670 - DNA, 25 bp, Homo sapien
tagcaagtgaaatctatagaatcag

SEQ ID NO: 3229671 - DNA, 25 bp, Homo sapien
ctctaacagtgggatttttgtgtgt

SEQ ID NO: 3229672 - DNA, 25 bp, Homo sapien
actatgaggcctataattcaaatga

SEQ ID NO: 3229673 - DNA, 25 bp, Homo sapien
cttcaataagcttttgctgttgacc

SEQ ID NO: 3229674 - DNA, 25 bp, Homo sapien
tctatggtgttaccatccttgacca

SEQ ID NO: 3229675 - DNA, 25 bp, Homo sapien
tgacctatggccatcacctctatgg

SEQ ID NO: 3229676 - DNA, 25 bp, Homo sapien
ggccatcacctctatggtgttacca

SEQ ID NO: 3229677 - DNA, 25 bp, Homo sapien
ttccaggagagcatgttggtctttg

SEQ ID NO: 3229678 - DNA, 25 bp, Homo sapien
gacaatagggtgatcttccaggaga

SEQ ID NO: 3229679 - DNA, 25 bp, Homo sapien
catgttggtctttgtaggtgaacac

SEQ ID NO: 3229680 - DNA, 25 bp, Homo sapien
agcagtcattccagacaatagggtg

SEQ ID NO: 3229681 - DNA, 25 bp, Homo sapien
gtaatttatctgtagcgttccttga

SEQ ID NO: 3229682 - DNA, 25 bp, Homo sapien
agatgtggcagaaggccttttgggt

SEQ ID NO: 3229683 - DNA, 25 bp, Homo sapien
tggcagaaggccttttgggtgtcat

SEQ ID NO: 3229684 - DNA, 25 bp, Homo sapien
aatttatctgtagcgttccttgaaa

SEQ ID NO: 3229685 - DNA, 25 bp, Homo sapien
cacacaatcgtaaggatccacagtc

SEQ ID NO: 3229686 - DNA, 25 bp, Homo sapien
tattttgcacacaatcgtaaggatc

SEQ ID NO: 3229687 - DNA, 25 bp, Homo sapien
tgcacacaatcgtaaggatccacag

SEQ ID NO: 3229688 - DNA, 25 bp, Homo sapien
tttgcacacaatcgtaaggatccac

SEQ ID NO: 3229689 - DNA, 25 bp, Homo sapien
ccacaggtattaatttctctgtagc

SEQ ID NO: 3229690 - DNA, 25 bp, Homo sapien
cactgttcgtagttaatacatccct

SEQ ID NO: 3229691 - DNA, 25 bp, Homo sapien
tggtaaccacaggtattaatttctc

SEQ ID NO: 3229692 - DNA, 25 bp, Homo sapien
aaatttgcctacactgttcgtagtt

SEQ ID NO: 3229693 - DNA, 25 bp, Homo sapien
aagatatctgagatattatatctta

SEQ ID NO: 3229694 - DNA, 25 bp, Homo sapien
agatatctgagatattatatcttac

SEQ ID NO: 3229695 - DNA, 25 bp, Homo sapien
caaaagatatctgagatattatatc

SEQ ID NO: 3229696 - DNA, 25 bp, Homo sapien
aaaagatatctgagatattatatct

SEQ ID NO: 3229697 - DNA, 25 bp, Homo sapien
cagataatgtaatgccttgtaaggc

SEQ ID NO: 3229698 - DNA, 25 bp, Homo sapien
tctgaatctgcttgcataattttca

SEQ ID NO: 3229699 - DNA, 25 bp, Homo sapien
gtggattcagattgacagcaagtga

SEQ ID NO: 3229700 - DNA, 25 bp, Homo sapien
tctaagggcaaaaaacacaagtgga

SEQ ID NO: 3229701 - DNA, 25 bp, Homo sapien
gccccagtttcgtgcctgctgcagc

SEQ ID NO: 3229702 - DNA, 25 bp, Homo sapien
aaggccccagtttcgtgcctgctgc

SEQ ID NO: 3229703 - DNA, 25 bp, Homo sapien
tgaagacacttggacaggcggtaat

SEQ ID NO: 3229704 - DNA, 25 bp, Homo sapien
caggactctggttcgctgagtggac

SEQ ID NO: 3229705 - DNA, 25 bp, Homo sapien
tttccaggacggcaagagcggttcc

SEQ ID NO: 3229706 - DNA, 25 bp, Homo sapien
gccttacgggccagcatgagtttgc

SEQ ID NO: 3229707 - DNA, 25 bp, Homo sapien
gccttccgaagggtcagtcaggctg

SEQ ID NO: 3229708 - DNA, 25 bp, Homo sapien
tcaagggaacttgttcacgccttcc

SEQ ID NO: 3229709 - DNA, 25 bp, Homo sapien
acgccttccgaagggtcagtcaggc

SEQ ID NO: 3229710 - DNA, 25 bp, Homo sapien
cttgttcacgccttccgaagggtca

SEQ ID NO: 3229711 - DNA, 25 bp, Homo sapien
tagaatggctcctagcaaaaagatg

SEQ ID NO: 3229712 - DNA, 25 bp, Homo sapien
tcaccagggacaagcaaattaaagt

SEQ ID NO: 3229713 - DNA, 25 bp, Homo sapien
gtaatctagcagtaccacttctgga

SEQ ID NO: 3229714 - DNA, 25 bp, Homo sapien
ttaaagttgcaaaacaaggtatcac

SEQ ID NO: 3229715 - DNA, 25 bp, Homo sapien
ggtttaatgcttccacatacttcaa

SEQ ID NO: 3229716 - DNA, 25 bp, Homo sapien
tatccgggtacttcttcatctggtt

SEQ ID NO: 3229717 - DNA, 25 bp, Homo sapien
tttcctatccgggtacttcttcatc

SEQ ID NO: 3229718 - DNA, 25 bp, Homo sapien
tcaatacactactcaaatcttgctt

SEQ ID NO: 3229719 - DNA, 25 bp, Homo sapien
ctagttcacagctgcgtttcaacat

SEQ ID NO: 3229720 - DNA, 25 bp, Homo sapien
tctactagttcacagctgcgtttca

SEQ ID NO: 3229721 - DNA, 25 bp, Homo sapien
gatctactagttcacagctgcgttt

SEQ ID NO: 3229722 - DNA, 25 bp, Homo sapien
ctgatctactagttcacagctgcgt

SEQ ID NO: 3229723 - DNA, 25 bp, Homo sapien
ctgcctatcctgttgagtctgtttc

SEQ ID NO: 3229724 - DNA, 25 bp, Homo sapien
tgttgagtctgtttctctgacgtca

SEQ ID NO: 3229725 - DNA, 25 bp, Homo sapien
gttgagtctgtttctctgacgtcat

SEQ ID NO: 3229726 - DNA, 25 bp, Homo sapien
tcctgttgagtctgtttctctgacg

SEQ ID NO: 3229727 - DNA, 25 bp, Homo sapien
aaacattcctttcagtatagtcatc

SEQ ID NO: 3229728 - DNA, 25 bp, Homo sapien
aaaaacattcctttcagtatagtca

SEQ ID NO: 3229729 - DNA, 25 bp, Homo sapien
acattcctttcagtatagtcatcat

SEQ ID NO: 3229730 - DNA, 25 bp, Homo sapien
tctaaaaacattcctttcagtatag

SEQ ID NO: 3229731 - DNA, 25 bp, Homo sapien
ttcaaagcaacctgtgctttttggc

SEQ ID NO: 3229732 - DNA, 25 bp, Homo sapien
gctttttggctcctaggaaacagag

SEQ ID NO: 3229733 - DNA, 25 bp, Homo sapien
gctcctaggaaacagagtagtctcc

SEQ ID NO: 3229734 - DNA, 25 bp, Homo sapien
gtcttttcaaagcaacctgtgcttt

SEQ ID NO: 3229735 - DNA, 25 bp, Homo sapien
ctggaaatagaccatccatggcaac

SEQ ID NO: 3229736 - DNA, 25 bp, Homo sapien
tccatggcaacttcctggtaaattt

SEQ ID NO: 3229737 - DNA, 25 bp, Homo sapien
ggaaatagaccatccatggcaactt

SEQ ID NO: 3229738 - DNA, 25 bp, Homo sapien
catggcaacttcctggtaaatttcc

SEQ ID NO: 3229739 - DNA, 25 bp, Homo sapien
gttttgtaaggacttctgcggtcat

SEQ ID NO: 3229740 - DNA, 25 bp, Homo sapien
tgcggtcattggacaatggttctcc

SEQ ID NO: 3229741 - DNA, 25 bp, Homo sapien
accatcgtgtagagcctttggtgca

SEQ ID NO: 3229742 - DNA, 25 bp, Homo sapien
gttcttttagatgtaccatcgtgta

SEQ ID NO: 3229743 - DNA, 25 bp, Homo sapien
gaagccttcattaaaacctgtccat

SEQ ID NO: 3229744 - DNA, 25 bp, Homo sapien
taagtgtgaggcatattccagcaac

SEQ ID NO: 3229745 - DNA, 25 bp, Homo sapien
tcttcgtgaatattaagcctccagt

SEQ ID NO: 3229746 - DNA, 25 bp, Homo sapien
gcaacaggtgtccaactccaggaag

SEQ ID NO: 3229747 - DNA, 25 bp, Homo sapien
tctttgcttgtttcgttgctgtctc

SEQ ID NO: 3229748 - DNA, 25 bp, Homo sapien
cttgtctttgcttgtttcgttgctg

SEQ ID NO: 3229749 - DNA, 25 bp, Homo sapien
ttgtctttgcttgtttcgttgctgt

SEQ ID NO: 3229750 - DNA, 25 bp, Homo sapien
ttctacagatgatacctgtttagca

SEQ ID NO: 3229751 - DNA, 25 bp, Homo sapien
tctacagatgatacctgtttagcat

SEQ ID NO: 3229752 - DNA, 25 bp, Homo sapien
ttgttccaggatattcaaattctac

SEQ ID NO: 3229753 - DNA, 25 bp, Homo sapien
cctgccccatgagggtacctattaa

SEQ ID NO: 3229754 - DNA, 25 bp, Homo sapien
gctgataagtatttgacagtcaact

SEQ ID NO: 3229755 - DNA, 25 bp, Homo sapien
tgattagctgataagtatttgacag

SEQ ID NO: 3229756 - DNA, 25 bp, Homo sapien
acctgctgtgatagtttattctcta

SEQ ID NO: 3229757 - DNA, 25 bp, Homo sapien
ttcatttccataacctgctgtgata

SEQ ID NO: 3229758 - DNA, 25 bp, Homo sapien
tttaacttcagcaaatagacattca

SEQ ID NO: 3229759 - DNA, 25 bp, Homo sapien
ccatagccaacaaattgaatttcag

SEQ ID NO: 3229760 - DNA, 25 bp, Homo sapien
gaatttcagattgctttaacttcag

SEQ ID NO: 3229761 - DNA, 25 bp, Homo sapien
tagctccatagccaacaaattgaat

SEQ ID NO: 3229762 - DNA, 25 bp, Homo sapien
gctttagaggatagctcagcataaa

SEQ ID NO: 3229763 - DNA, 25 bp, Homo sapien
tagtgccgtagtgctatagcaggtc

SEQ ID NO: 3229764 - DNA, 25 bp, Homo sapien
tcttgggtcctatccaaaaagcctg

SEQ ID NO: 3229765 - DNA, 25 bp, Homo sapien
aaaagcctgctttagaggatagctc

SEQ ID NO: 3229766 - DNA, 25 bp, Homo sapien
tgctccgttccctagaaatggaggg

SEQ ID NO: 3229767 - DNA, 25 bp, Homo sapien
tgaaatacgtttcctgcacatgagg

SEQ ID NO: 3229768 - DNA, 25 bp, Homo sapien
caggcaaaggtcttccagtggaaca

SEQ ID NO: 3229769 - DNA, 25 bp, Homo sapien
cagtgatatgatcccctgctccgtt

SEQ ID NO: 3229770 - DNA, 25 bp, Homo sapien
gctgacaaggcaaaataacgaacaa

SEQ ID NO: 3229771 - DNA, 25 bp, Homo sapien
tgatgaagggccatttgctctggac

SEQ ID NO: 3229772 - DNA, 25 bp, Homo sapien
gcaaaataacgaacaagaacagaac

SEQ ID NO: 3229773 - DNA, 25 bp, Homo sapien
ctttattgtggaacgtcatctctga

SEQ ID NO: 3229774 - DNA, 25 bp, Homo sapien
ttccaactgctcagcgcaccagccc

SEQ ID NO: 3229775 - DNA, 25 bp, Homo sapien
tccatctgaatgtaggagcgttcct

SEQ ID NO: 3229776 - DNA, 25 bp, Homo sapien
gtaggagcgttcctggagtctgttc

SEQ ID NO: 3229777 - DNA, 25 bp, Homo sapien
tctgaatgtaggagcgttcctggag

SEQ ID NO: 3229778 - DNA, 25 bp, Homo sapien
tggaattccatcgtggccccagtct

SEQ ID NO: 3229779 - DNA, 25 bp, Homo sapien
catggtctgtgagtgatggaattcc

SEQ ID NO: 3229780 - DNA, 25 bp, Homo sapien
gcatggtctgtgagtgatggaattc

SEQ ID NO: 3229781 - DNA, 25 bp, Homo sapien
tgagtgatggaattccatcgtggcc

SEQ ID NO: 3229782 - DNA, 25 bp, Homo sapien
gatggctgcttttcaaataccaagg

SEQ ID NO: 3229783 - DNA, 25 bp, Homo sapien
gaaaggatgtcagcattccccagat

SEQ ID NO: 3229784 - DNA, 25 bp, Homo sapien
cagtgcttaggattattaccgcttc

SEQ ID NO: 3229785 - DNA, 25 bp, Homo sapien
tcctgtggtgagaaagtatactgtc

SEQ ID NO: 3229786 - DNA, 25 bp, Homo sapien
gagtagctttaacagcagcctgaac

SEQ ID NO: 3229787 - DNA, 25 bp, Homo sapien
ggtttcatacaaatctagcagcagt

SEQ ID NO: 3229788 - DNA, 25 bp, Homo sapien
gggcctcctcgaagtctaggtttca

SEQ ID NO: 3229789 - DNA, 25 bp, Homo sapien
gtaaataggtggaagtagcacccca

SEQ ID NO: 3229790 - DNA, 25 bp, Homo sapien
ctggaggagtttggctgcgggggcg

SEQ ID NO: 3229791 - DNA, 25 bp, Homo sapien
gcagcagctcatgggtggcagatgc

SEQ ID NO: 3229792 - DNA, 25 bp, Homo sapien
catgggtggcagatgcatgctgcat

SEQ ID NO: 3229793 - DNA, 25 bp, Homo sapien
cagctcatgggtggcagatgcatgc

SEQ ID NO: 3229794 - DNA, 25 bp, Homo sapien
gaaaatttctttgcgagaacttcca

SEQ ID NO: 3229795 - DNA, 25 bp, Homo sapien
tcagaaaatttctttgcgagaactt

SEQ ID NO: 3229796 - DNA, 25 bp, Homo sapien
aaaatttctttgcgagaacttccat

SEQ ID NO: 3229797 - DNA, 25 bp, Homo sapien
cagaaaatttctttgcgagaacttc

SEQ ID NO: 3229798 - DNA, 25 bp, Homo sapien
cccatggacttgtctggactgtcag

SEQ ID NO: 3229799 - DNA, 25 bp, Homo sapien
catggacttgtctggactgtcagaa

SEQ ID NO: 3229800 - DNA, 25 bp, Homo sapien
tgtgcccatggacttgtctggactg

SEQ ID NO: 3229801 - DNA, 25 bp, Homo sapien
ctctgtgcccatggacttgtctgga

SEQ ID NO: 3229802 - DNA, 25 bp, Homo sapien
tcatgaggctgttagagctgttgac

SEQ ID NO: 3229803 - DNA, 25 bp, Homo sapien
ttccaagttcattcctatggttgct

SEQ ID NO: 3229804 - DNA, 25 bp, Homo sapien
ctccatagggcttttcacaacgtgg

SEQ ID NO: 3229805 - DNA, 25 bp, Homo sapien
tctgctaccaggtctctcatgaggc

SEQ ID NO: 3229806 - DNA, 25 bp, Homo sapien
tttggccactgacaagtagttcgtg

SEQ ID NO: 3229807 - DNA, 25 bp, Homo sapien
tgacactggctgagatgcccattct

SEQ ID NO: 3229808 - DNA, 25 bp, Homo sapien
ggccactgacaagtagttcgtgcat

SEQ ID NO: 3229809 - DNA, 25 bp, Homo sapien
tcctttggccactgacaagtagttc

SEQ ID NO: 3229810 - DNA, 25 bp, Homo sapien
aaggggatattcgactttgcacgca

SEQ ID NO: 3229811 - DNA, 25 bp, Homo sapien
tgctgaggggttgctgctatgacat

SEQ ID NO: 3229812 - DNA, 25 bp, Homo sapien
ctgaaaagcaaaggggatattcgac

SEQ ID NO: 3229813 - DNA, 25 bp, Homo sapien
tgctgctatgacatctcttttacac

SEQ ID NO: 3229814 - DNA, 25 bp, Homo sapien
gactgagtcgcgttgccttgggcta

SEQ ID NO: 3229815 - DNA, 25 bp, Homo sapien
cctcaaggaatcaagcagcagtcct

SEQ ID NO: 3229816 - DNA, 25 bp, Homo sapien
cgttgccttgggctatagttttctt

SEQ ID NO: 3229817 - DNA, 25 bp, Homo sapien
agtcctgtggactgagtcgcgttgc

SEQ ID NO: 3229818 - DNA, 25 bp, Homo sapien
tggggcatggaaaactgcttctgcc

SEQ ID NO: 3229819 - DNA, 25 bp, Homo sapien
ggggcatggaaaactgcttctgcca

SEQ ID NO: 3229820 - DNA, 25 bp, Homo sapien
gggcatggaaaactgcttctgccat

SEQ ID NO: 3229821 - DNA, 25 bp, Homo sapien
ttggggcatggaaaactgcttctgc

SEQ ID NO: 3229822 - DNA, 25 bp, Homo sapien
caaaagaaccttccccatagagcgg

SEQ ID NO: 3229823 - DNA, 25 bp, Homo sapien
cacagggcgatgctcaagcggattc

SEQ ID NO: 3229824 - DNA, 25 bp, Homo sapien
tgggatcacccataacaactgactt

SEQ ID NO: 3229825 - DNA, 25 bp, Homo sapien
tacttctttgacgtgatgataggca

SEQ ID NO: 3229826 - DNA, 25 bp, Homo sapien
cagattagtctctttctttgcacca

SEQ ID NO: 3229827 - DNA, 25 bp, Homo sapien
catgcaggagaccaaaatgctggct

SEQ ID NO: 3229828 - DNA, 25 bp, Homo sapien
tttcttctgcagattagtctctttc

SEQ ID NO: 3229829 - DNA, 25 bp, Homo sapien
tctcgctcacggcacacttggcttc

SEQ ID NO: 3229830 - DNA, 25 bp, Homo sapien
tagcttgcatggtaaaacggagggc

SEQ ID NO: 3229831 - DNA, 25 bp, Homo sapien
gaggtggtcctgaacgtaagctgaa

SEQ ID NO: 3229832 - DNA, 25 bp, Homo sapien
gaaacagcacagcatgagttccttg

SEQ ID NO: 3229833 - DNA, 25 bp, Homo sapien
ctttgggcactagccattgcttggc

SEQ ID NO: 3229834 - DNA, 25 bp, Homo sapien
gattataacagggtgccattcagga

SEQ ID NO: 3229835 - DNA, 25 bp, Homo sapien
gaaggaccctccaagatcatttaac

SEQ ID NO: 3229836 - DNA, 25 bp, Homo sapien
ggctgtgcgatagtaaattaaccca

SEQ ID NO: 3229837 - DNA, 25 bp, Homo sapien
cccagcatggcagtttctagattat

SEQ ID NO: 3229838 - DNA, 25 bp, Homo sapien
tcctctccagccagtcatttggaaa

SEQ ID NO: 3229839 - DNA, 25 bp, Homo sapien
taggaaggggccattctgtttccag

SEQ ID NO: 3229840 - DNA, 25 bp, Homo sapien
tgttgagttgcccattttcagattg

SEQ ID NO: 3229841 - DNA, 25 bp, Homo sapien
tctgggccaaactctataggaaggg

SEQ ID NO: 3229842 - DNA, 25 bp, Homo sapien
ttttctgccactgggtacacaatcc

SEQ ID NO: 3229843 - DNA, 25 bp, Homo sapien
ctgccactgggtacacaatccttac

SEQ ID NO: 3229844 - DNA, 25 bp, Homo sapien
ttctgccactgggtacacaatcctt

SEQ ID NO: 3229845 - DNA, 25 bp, Homo sapien
atcttttctgccactgggtacacaa

SEQ ID NO: 3229846 - DNA, 25 bp, Homo sapien
tgttggtgaaatagtccacagtctc

SEQ ID NO: 3229847 - DNA, 25 bp, Homo sapien
gaaatagtccacagtctcttgaggc

SEQ ID NO: 3229848 - DNA, 25 bp, Homo sapien
aagcactgttggtgaaatagtccac

SEQ ID NO: 3229849 - DNA, 25 bp, Homo sapien
agtccacagtctcttgaggcactga

SEQ ID NO: 3229850 - DNA, 25 bp, Homo sapien
aaggaggttgataatatccgccagt

SEQ ID NO: 3229851 - DNA, 25 bp, Homo sapien
taatatccgccagtgcctttccatt

SEQ ID NO: 3229852 - DNA, 25 bp, Homo sapien
ggttgataatatccgccagtgcctt

SEQ ID NO: 3229853 - DNA, 25 bp, Homo sapien
gataatatccgccagtgcctttcca

SEQ ID NO: 3229854 - DNA, 25 bp, Homo sapien
ttgacctatggccatgacctgtatc

SEQ ID NO: 3229855 - DNA, 25 bp, Homo sapien
gatctttagccattgacctatggcc

SEQ ID NO: 3229856 - DNA, 25 bp, Homo sapien
aactcatccacaatgatctttagcc

SEQ ID NO: 3229857 - DNA, 25 bp, Homo sapien
tatggccatgacctgtatcatatta

SEQ ID NO: 3229858 - DNA, 25 bp, Homo sapien
acagcagaagggtgatcttcacatg

SEQ ID NO: 3229859 - DNA, 25 bp, Homo sapien
cctttatggagccacgactatgaat

SEQ ID NO: 3229860 - DNA, 25 bp, Homo sapien
catgcaccaggtgttctcctatagc

SEQ ID NO: 3229861 - DNA, 25 bp, Homo sapien
agaagggtgatcttcacatgcacca

SEQ ID NO: 3229862 - DNA, 25 bp, Homo sapien
aaacctcaaggagagtaccctgctc

SEQ ID NO: 3229863 - DNA, 25 bp, Homo sapien
gacagtgtgtctctggaccccaaat

SEQ ID NO: 3229864 - DNA, 25 bp, Homo sapien
ccatgtaaccatgatagcagcagtc

SEQ ID NO: 3229865 - DNA, 25 bp, Homo sapien
gggttcccttccatgtaaccatgat

SEQ ID NO: 3229866 - DNA, 25 bp, Homo sapien
tttcataaacaatgacatttacctt

SEQ ID NO: 3229867 - DNA, 25 bp, Homo sapien
tcaaatgtggtagaaagtcttttgg

SEQ ID NO: 3229868 - DNA, 25 bp, Homo sapien
ttcaaatgtggtagaaagtcttttg

SEQ ID NO: 3229869 - DNA, 25 bp, Homo sapien
aatttcataaacaatgacatttacc

SEQ ID NO: 3229870 - DNA, 25 bp, Homo sapien
caaccacaccattcatacagcatgg

SEQ ID NO: 3229871 - DNA, 25 bp, Homo sapien
aaccacagtcataatcctcattttc

SEQ ID NO: 3229872 - DNA, 25 bp, Homo sapien
tcaaccacaccattcatacagcatg

SEQ ID NO: 3229873 - DNA, 25 bp, Homo sapien
gtgcagttcgccaaaccacgtgaat

SEQ ID NO: 3229874 - DNA, 25 bp, Homo sapien
ctgatgggatgaactgcaacgaagc

SEQ ID NO: 3229875 - DNA, 25 bp, Homo sapien
gcaacgaagccccaaagcacaagca

SEQ ID NO: 3229876 - DNA, 25 bp, Homo sapien
aactgcaacgaagccccaaagcaca

SEQ ID NO: 3229877 - DNA, 25 bp, Homo sapien
tctgggattgagtgtgtagctgagc

SEQ ID NO: 3229878 - DNA, 25 bp, Homo sapien
gcattggtaatcgtgcaaggtgctt

SEQ ID NO: 3229879 - DNA, 25 bp, Homo sapien
tactgcattggtaatcgtgcaaggt

SEQ ID NO: 3229880 - DNA, 25 bp, Homo sapien
ctggctctgggattgagtgtgtagc

SEQ ID NO: 3229881 - DNA, 25 bp, Homo sapien
tttgcttgcttgataagaggtggga

SEQ ID NO: 3229882 - DNA, 25 bp, Homo sapien
tagtttgcttgcttgataagaggtg

SEQ ID NO: 3229883 - DNA, 25 bp, Homo sapien
ttgcttgcttgataagaggtgggat

SEQ ID NO: 3229884 - DNA, 25 bp, Homo sapien
cagttccgtgtcttaacagtttgtg

SEQ ID NO: 3229885 - DNA, 25 bp, Homo sapien
tatctgtggcatgattatgcattcc

SEQ ID NO: 3229886 - DNA, 25 bp, Homo sapien
tgtagcaggcattacaattaatctg

SEQ ID NO: 3229887 - DNA, 25 bp, Homo sapien
caatgactagtcatgcatcatcagt

SEQ ID NO: 3229888 - DNA, 25 bp, Homo sapien
tgatgtagcctgacaagacattttt

SEQ ID NO: 3229889 - DNA, 25 bp, Homo sapien
gtagtattgtgcactgatttgacca

SEQ ID NO: 3229890 - DNA, 25 bp, Homo sapien
tatttctaatgctacaagaatgctg

SEQ ID NO: 3229891 - DNA, 25 bp, Homo sapien
cagtattattggaccaaatttggtg

SEQ ID NO: 3229892 - DNA, 25 bp, Homo sapien
gatcagtggccatattactgtaggc

SEQ ID NO: 3229893 - DNA, 25 bp, Homo sapien
taagattgtgacaccaggcttacct

SEQ ID NO: 3229894 - DNA, 25 bp, Homo sapien
catgttttcatcaatctaaggtgca

SEQ ID NO: 3229895 - DNA, 25 bp, Homo sapien
taatgctaatgcatggctagttgcc

SEQ ID NO: 3229896 - DNA, 25 bp, Homo sapien
ggctcacggtaacactggtctccca

SEQ ID NO: 3229897 - DNA, 25 bp, Homo sapien
tggctcacggtaacactggtctccc

SEQ ID NO: 3229898 - DNA, 25 bp, Homo sapien
gctcacggtaacactggtctcccag

SEQ ID NO: 3229899 - DNA, 25 bp, Homo sapien
ttggctcacggtaacactggtctcc

SEQ ID NO: 3229900 - DNA, 25 bp, Homo sapien
ctaagggaacagtagatgatggagc

SEQ ID NO: 3229901 - DNA, 25 bp, Homo sapien
ggagcacctaaaggctgatgcttga

SEQ ID NO: 3229902 - DNA, 25 bp, Homo sapien
gggtaccattgctaagggaacagta

SEQ ID NO: 3229903 - DNA, 25 bp, Homo sapien
cagtagatgatggagcacctaaagg

SEQ ID NO: 3229904 - DNA, 25 bp, Homo sapien
gcatggaacgcactaaaacagctga

SEQ ID NO: 3229905 - DNA, 25 bp, Homo sapien
tccaattagaatgtgccagagatta

SEQ ID NO: 3229906 - DNA, 25 bp, Homo sapien
aagcaggagctaggacactgtggcc

SEQ ID NO: 3229907 - DNA, 25 bp, Homo sapien
tcttcccgctacagacatacagagg

SEQ ID NO: 3229908 - DNA, 25 bp, Homo sapien
ttcatgaaactgatttcccggggca

SEQ ID NO: 3229909 - DNA, 25 bp, Homo sapien
ttcttcgttgttgctaacccttgtc

SEQ ID NO: 3229910 - DNA, 25 bp, Homo sapien
cttcgttgttgctaacccttgtcat

SEQ ID NO: 3229911 - DNA, 25 bp, Homo sapien
catgaaactgatttcccggggcagc

SEQ ID NO: 3229912 - DNA, 25 bp, Homo sapien
cttgagagccatgagacctgaaaag

SEQ ID NO: 3229913 - DNA, 25 bp, Homo sapien
attcttgagagccatgagacctgaa

SEQ ID NO: 3229914 - DNA, 25 bp, Homo sapien
tcttgagagccatgagacctgaaaa

SEQ ID NO: 3229915 - DNA, 25 bp, Homo sapien
ctagggatgcgtggagcagactgtc

SEQ ID NO: 3229916 - DNA, 25 bp, Homo sapien
ttattttgctggtgaatttgttgac

SEQ ID NO: 3229917 - DNA, 25 bp, Homo sapien
ttgacagaaagtaattgggtcactg

SEQ ID NO: 3229918 - DNA, 25 bp, Homo sapien
atctcattaatgtgttagccccttt

SEQ ID NO: 3229919 - DNA, 25 bp, Homo sapien
cccctttattttgctggtgaatttg

SEQ ID NO: 3229920 - DNA, 25 bp, Homo sapien
gcctggtcctgtaccacatgaacct

SEQ ID NO: 3229921 - DNA, 25 bp, Homo sapien
tggtcctgtaccacatgaacctctc

SEQ ID NO: 3229922 - DNA, 25 bp, Homo sapien
aggcctggtcctgtaccacatgaac

SEQ ID NO: 3229923 - DNA, 25 bp, Homo sapien
gcaggcctggtcctgtaccacatga

SEQ ID NO: 3229924 - DNA, 25 bp, Homo sapien
tagtcagtaaaagagttatgttgcc

SEQ ID NO: 3229925 - DNA, 25 bp, Homo sapien
cagtaaaagagttatgttgcctctc

SEQ ID NO: 3229926 - DNA, 25 bp, Homo sapien
ctatctgtgatagtcagtaaaagag

SEQ ID NO: 3229927 - DNA, 25 bp, Homo sapien
tgtgatagtcagtaaaagagttatg

SEQ ID NO: 3229928 - DNA, 25 bp, Homo sapien
tacatgtggcatgactcaatggagt

SEQ ID NO: 3229929 - DNA, 25 bp, Homo sapien
tctaggatgagtttacaaggctgtt

SEQ ID NO: 3229930 - DNA, 25 bp, Homo sapien
agacagaatgtcctttaatcttgaa

SEQ ID NO: 3229931 - DNA, 25 bp, Homo sapien
ccttagatagaataacactccaaaa

SEQ ID NO: 3229932 - DNA, 25 bp, Homo sapien
gctagaaacataaaagagattgttc

SEQ ID NO: 3229933 - DNA, 25 bp, Homo sapien
ctccatcaaagagaggaattggatg

SEQ ID NO: 3229934 - DNA, 25 bp, Homo sapien
gaatgatgctagaaacataaaagag

SEQ ID NO: 3229935 - DNA, 25 bp, Homo sapien
tccctgagaatgatgctagaaacat

SEQ ID NO: 3229936 - DNA, 25 bp, Homo sapien
tggcacagctgtggattagctgaca

SEQ ID NO: 3229937 - DNA, 25 bp, Homo sapien
tccatgtgctttcaagttgtgacca

SEQ ID NO: 3229938 - DNA, 25 bp, Homo sapien
ggatattcttaatccaacagtaact

SEQ ID NO: 3229939 - DNA, 25 bp, Homo sapien
tccttttggatagcatccatactaa

SEQ ID NO: 3229940 - DNA, 25 bp, Homo sapien
ttttatccatctagtggacagactt

SEQ ID NO: 3229941 - DNA, 25 bp, Homo sapien
catctagtggacagacttcgtctca

SEQ ID NO: 3229942 - DNA, 25 bp, Homo sapien
gacagacttcgtctcagcaaatgct

SEQ ID NO: 3229943 - DNA, 25 bp, Homo sapien
aaaagggaactgattttatccatct

SEQ ID NO: 3229944 - DNA, 25 bp, Homo sapien
gcctgccatcgcctcagtggaatca

SEQ ID NO: 3229945 - DNA, 25 bp, Homo sapien
ctcagggactgggtcactagcagat

SEQ ID NO: 3229946 - DNA, 25 bp, Homo sapien
gtgctgtccatatcaaccactgact

SEQ ID NO: 3229947 - DNA, 25 bp, Homo sapien
tcactagcagatgtagatgatcaag

SEQ ID NO: 3229948 - DNA, 25 bp, Homo sapien
cacttgcagtaatgtctggcacgaa

SEQ ID NO: 3229949 - DNA, 25 bp, Homo sapien
taagtaccgaaatgcagagtcgagt

SEQ ID NO: 3229950 - DNA, 25 bp, Homo sapien
tgatttcacacttgccgagctgggt

SEQ ID NO: 3229951 - DNA, 25 bp, Homo sapien
tattagtgagaagagcattgcggta

SEQ ID NO: 3229952 - DNA, 25 bp, Homo sapien
tgtggatgtgcaccatgaaactccc

SEQ ID NO: 3229953 - DNA, 25 bp, Homo sapien
gatgtgcaccatgaaactccccatt

SEQ ID NO: 3229954 - DNA, 25 bp, Homo sapien
tgtgcaccatgaaactccccatttg

SEQ ID NO: 3229955 - DNA, 25 bp, Homo sapien
gcaccatgaaactccccatttgatt

SEQ ID NO: 3229956 - DNA, 25 bp, Homo sapien
gaaccggcattcttgtgatccagat

SEQ ID NO: 3229957 - DNA, 25 bp, Homo sapien
tcttgtgatccagatgttcccctgt

SEQ ID NO: 3229958 - DNA, 25 bp, Homo sapien
ccttattgtctttgggaaccggcat

SEQ ID NO: 3229959 - DNA, 25 bp, Homo sapien
tgtctttgggaaccggcattcttgt

SEQ ID NO: 3229960 - DNA, 25 bp, Homo sapien
tgaggtacgaagctagctgctgttg

SEQ ID NO: 3229961 - DNA, 25 bp, Homo sapien
agatgatggcttcgcagtgcagaaa

SEQ ID NO: 3229962 - DNA, 25 bp, Homo sapien
cctgcttagtgggaaagtctgaaat

SEQ ID NO: 3229963 - DNA, 25 bp, Homo sapien
tccttccctcgatggaaatgcttct

SEQ ID NO: 3229964 - DNA, 25 bp, Homo sapien
ttgggggaaatactccttacactca

SEQ ID NO: 3229965 - DNA, 25 bp, Homo sapien
tgggggaaatactccttacactcac

SEQ ID NO: 3229966 - DNA, 25 bp, Homo sapien
caatagatctgataaccaggaaggc

SEQ ID NO: 3229967 - DNA, 25 bp, Homo sapien
gaggcacgtcctaggcagaatggaa

SEQ ID NO: 3229968 - DNA, 25 bp, Homo sapien
tacctggttgacgttgatcagagca

SEQ ID NO: 3229969 - DNA, 25 bp, Homo sapien
tgactgagtggtgggcagcatccac

SEQ ID NO: 3229970 - DNA, 25 bp, Homo sapien
aagagtaatgaagatttcctgattt

SEQ ID NO: 3229971 - DNA, 25 bp, Homo sapien
aaagagtaatgaagatttcctgatt

SEQ ID NO: 3229972 - DNA, 25 bp, Homo sapien
aaggcaaaccctctgtggatctcca

SEQ ID NO: 3229973 - DNA, 25 bp, Homo sapien
tatgagatgttctacccttactggt

SEQ ID NO: 3229974 - DNA, 25 bp, Homo sapien
caatgtctaccctgtgacttgagaa

SEQ ID NO: 3229975 - DNA, 25 bp, Homo sapien
taactactgaggcaaaactcttctc

SEQ ID NO: 3229976 - DNA, 25 bp, Homo sapien
tcgggctgtttccttttgcactcat

SEQ ID NO: 3229977 - DNA, 25 bp, Homo sapien
cactaagagtcaagcagttttgctg

SEQ ID NO: 3229978 - DNA, 25 bp, Homo sapien
taatctgaatttgtcgtccatgcca

SEQ ID NO: 3229979 - DNA, 25 bp, Homo sapien
taggaatagtgttgcgctggtttcc

SEQ ID NO: 3229980 - DNA, 25 bp, Homo sapien
tttcttacttgagtgttctgctccg

SEQ ID NO: 3229981 - DNA, 25 bp, Homo sapien
gagttgtaagtaatatgcacccgta

SEQ ID NO: 3229982 - DNA, 25 bp, Homo sapien
ttgtaagtaatatgcacccgtatta

SEQ ID NO: 3229983 - DNA, 25 bp, Homo sapien
agttgtaagtaatatgcacccgtat

SEQ ID NO: 3229984 - DNA, 25 bp, Homo sapien
ctgagttgtaagtaatatgcacccg

SEQ ID NO: 3229985 - DNA, 25 bp, Homo sapien
tatgcacccgtattactgagttgta

SEQ ID NO: 3229986 - DNA, 25 bp, Homo sapien
actgagttgtacgtaatatgcaccc

SEQ ID NO: 3229987 - DNA, 25 bp, Homo sapien
tactgagttgtacgtaatatgcacc

SEQ ID NO: 3229988 - DNA, 25 bp, Homo sapien
ctgagttgtacgtaatatgcacccg

SEQ ID NO: 3229989 - DNA, 25 bp, Homo sapien
ccagcactggcttgaaaagtccaga

SEQ ID NO: 3229990 - DNA, 25 bp, Homo sapien
tccagaggtcaagtgcaggcttcgt

SEQ ID NO: 3229991 - DNA, 25 bp, Homo sapien
gcttgttggaacagatggaattgct

SEQ ID NO: 3229992 - DNA, 25 bp, Homo sapien
catggaccccagtaacaggtgtggt

SEQ ID NO: 3229993 - DNA, 25 bp, Homo sapien
agggccaaagactttaaccagattg

SEQ ID NO: 3229994 - DNA, 25 bp, Homo sapien
caaagactttaaccagattggcaac

SEQ ID NO: 3229995 - DNA, 25 bp, Homo sapien
tgtagggccaaagactttaaccaga

SEQ ID NO: 3229996 - DNA, 25 bp, Homo sapien
aagactttaaccagattggcaacat

SEQ ID NO: 3229997 - DNA, 25 bp, Homo sapien
tcactgggtccggatggtgcacagc

SEQ ID NO: 3229998 - DNA, 25 bp, Homo sapien
actgggtccggatggtgcacagcat

SEQ ID NO: 3229999 - DNA, 25 bp, Homo sapien
gggtccggatggtgcacagcatggg

SEQ ID NO: 3230000 - DNA, 25 bp, Homo sapien
tgtcactgggtccggatggtgcaca

SEQ ID NO: 3230001 - DNA, 25 bp, Homo sapien
cttgggttgatgcttgatgtcctgt

SEQ ID NO: 3230002 - DNA, 25 bp, Homo sapien
ggttgatgcttgatgtcctgtaaca

SEQ ID NO: 3230003 - DNA, 25 bp, Homo sapien
tgggttgatgcttgatgtcctgtaa

SEQ ID NO: 3230004 - DNA, 25 bp, Homo sapien
gttgatgcttgatgtcctgtaacat

SEQ ID NO: 3230005 - DNA, 25 bp, Homo sapien
tgttccaccatcatgaactgactcc

SEQ ID NO: 3230006 - DNA, 25 bp, Homo sapien
gcaaagaaagcaggtgctcgatcac

SEQ ID NO: 3230007 - DNA, 25 bp, Homo sapien
catataggaggtcaatgttctcttg

SEQ ID NO: 3230008 - DNA, 25 bp, Homo sapien
tttacttctggtgtctgtggtgttg

SEQ ID NO: 3230009 - DNA, 25 bp, Homo sapien
agggtggagtggtctctcagcaaca

SEQ ID NO: 3230010 - DNA, 25 bp, Homo sapien
tgtgttttaaggaacaataatatct

SEQ ID NO: 3230011 - DNA, 25 bp, Homo sapien
atatttcggcgtcattgtgttttaa

SEQ ID NO: 3230012 - DNA, 25 bp, Homo sapien
cacagtggaatatttcggcgtcatt

SEQ ID NO: 3230013 - DNA, 25 bp, Homo sapien
tctgaaagtaattgctgaattggtc

SEQ ID NO: 3230014 - DNA, 25 bp, Homo sapien
tgtaaactctgttgacgtggactgc

SEQ ID NO: 3230015 - DNA, 25 bp, Homo sapien
gccccaaggctcaatattcacgata

SEQ ID NO: 3230016 - DNA, 25 bp, Homo sapien
agagtagacactgaatgccccaagg

SEQ ID NO: 3230017 - DNA, 25 bp, Homo sapien
gaccacctcaaaggagtcacagctt

SEQ ID NO: 3230018 - DNA, 25 bp, Homo sapien
aaaggtgcacaaccagcaaaatatg

SEQ ID NO: 3230019 - DNA, 25 bp, Homo sapien
ggcctccctctctacccacaatgct

SEQ ID NO: 3230020 - DNA, 25 bp, Homo sapien
ttcactctgggcagttcggaaaggt

SEQ ID NO: 3230021 - DNA, 25 bp, Homo sapien
agttcggaaaggtgcacaaccagca

SEQ ID NO: 3230022 - DNA, 25 bp, Homo sapien
ccagaggtgtatggtccttagagac

SEQ ID NO: 3230023 - DNA, 25 bp, Homo sapien
aagtgcctattgtgcagtgttacca

SEQ ID NO: 3230024 - DNA, 25 bp, Homo sapien
gtgcagtgttaccaccagaggtgta

SEQ ID NO: 3230025 - DNA, 25 bp, Homo sapien
attttgccatgaagtgcctattgtg

SEQ ID NO: 3230026 - DNA, 25 bp, Homo sapien
gagtaatacatatcacaggcttcca

SEQ ID NO: 3230027 - DNA, 25 bp, Homo sapien
gcaaacagaatttagagtaatacat

SEQ ID NO: 3230028 - DNA, 25 bp, Homo sapien
gaatttagagtaatacatatcacag

SEQ ID NO: 3230029 - DNA, 25 bp, Homo sapien
catgcaaacagaatttagagtaata

SEQ ID NO: 3230030 - DNA, 25 bp, Homo sapien
ccatttcaaaaactaccaggtgctt

SEQ ID NO: 3230031 - DNA, 25 bp, Homo sapien
catttcaaaaactaccaggtgctta

SEQ ID NO: 3230032 - DNA, 25 bp, Homo sapien
caaaaactaccaggtgcttagacat

SEQ ID NO: 3230033 - DNA, 25 bp, Homo sapien
tttcaaaaactaccaggtgcttaga

SEQ ID NO: 3230034 - DNA, 25 bp, Homo sapien
actttgtaagtaacgaggatggcct

SEQ ID NO: 3230035 - DNA, 25 bp, Homo sapien
tgtaagtaacgaggatggcctctgt

SEQ ID NO: 3230036 - DNA, 25 bp, Homo sapien
ttgtaagtaacgaggatggcctctg

SEQ ID NO: 3230037 - DNA, 25 bp, Homo sapien
ttcactttgtaagtaacgaggatgg

SEQ ID NO: 3230038 - DNA, 25 bp, Homo sapien
tagcaacaggaagaaacccagggac

SEQ ID NO: 3230039 - DNA, 25 bp, Homo sapien
caacaggaagaaacccagggaccat

SEQ ID NO: 3230040 - DNA, 25 bp, Homo sapien
tgtagcaacaggaagaaacccaggg

SEQ ID NO: 3230041 - DNA, 25 bp, Homo sapien
catgtagcaacaggaagaaacccag

SEQ ID NO: 3230042 - DNA, 25 bp, Homo sapien
ggccaccgcctagaatgtatgggca

SEQ ID NO: 3230043 - DNA, 25 bp, Homo sapien
tgaggccaccgcctagaatgtatgg

SEQ ID NO: 3230044 - DNA, 25 bp, Homo sapien
tctactgaggccaccgcctagaatg

SEQ ID NO: 3230045 - DNA, 25 bp, Homo sapien
cgcctagaatgtatgggcatggtct

SEQ ID NO: 3230046 - DNA, 25 bp, Homo sapien
gtggcttggacttatgtctctgctg

SEQ ID NO: 3230047 - DNA, 25 bp, Homo sapien
gaaattctcctaccattacttgcca

SEQ ID NO: 3230048 - DNA, 25 bp, Homo sapien
ccagaaattctcctaccattacttg

SEQ ID NO: 3230049 - DNA, 25 bp, Homo sapien
tgctggactgtctccccagaaattc

SEQ ID NO: 3230050 - DNA, 25 bp, Homo sapien
gctttgggcagagggtttgcactga

SEQ ID NO: 3230051 - DNA, 25 bp, Homo sapien
aaggcgcagctcctccgtactggag

SEQ ID NO: 3230052 - DNA, 25 bp, Homo sapien
cctccgtactggagcgaggctttgg

SEQ ID NO: 3230053 - DNA, 25 bp, Homo sapien
agaaagtgtgttgaaggcgcagctc

SEQ ID NO: 3230054 - DNA, 25 bp, Homo sapien
ggcgggcgcagctgcgaggcgagca

SEQ ID NO: 3230055 - DNA, 25 bp, Homo sapien
ggcgagcaccaccaacgcgcggacc

SEQ ID NO: 3230056 - DNA, 25 bp, Homo sapien
gagcaccaccaacgcgcggaccctc

SEQ ID NO: 3230057 - DNA, 25 bp, Homo sapien
cgggcgcagctgcgaggcgagcacc

SEQ ID NO: 3230058 - DNA, 25 bp, Homo sapien
agggaggtcagagcccctctcgcat

SEQ ID NO: 3230059 - DNA, 25 bp, Homo sapien
tcgcatgacgccgcgacagttccag

SEQ ID NO: 3230060 - DNA, 25 bp, Homo sapien
gagcttgccttggtatctctgcggc

SEQ ID NO: 3230061 - DNA, 25 bp, Homo sapien
agcatcacccacatcaatcctgagc

SEQ ID NO: 3230062 - DNA, 25 bp, Homo sapien
tcaggcaccatggtgtgcaaagccc

SEQ ID NO: 3230063 - DNA, 25 bp, Homo sapien
caggcaccatggtgtgcaaagccct

SEQ ID NO: 3230064 - DNA, 25 bp, Homo sapien
aggcaccatggtgtgcaaagccctg

SEQ ID NO: 3230065 - DNA, 25 bp, Homo sapien
catcaggcaccatggtgtgcaaagc

SEQ ID NO: 3230066 - DNA, 25 bp, Homo sapien
cctgagcatttctgagtttaccttt

SEQ ID NO: 3230067 - DNA, 25 bp, Homo sapien
atgcttgagtttacctgagcatttc

SEQ ID NO: 3230068 - DNA, 25 bp, Homo sapien
gcttgagtttacctgagcatttctg

SEQ ID NO: 3230069 - DNA, 25 bp, Homo sapien
agcatttctgagtttaccttttaca

SEQ ID NO: 3230070 - DNA, 25 bp, Homo sapien
gaacattgatgtgatgctgtcgctg

SEQ ID NO: 3230071 - DNA, 25 bp, Homo sapien
tcttgcatccccgaaggaaaggcca

SEQ ID NO: 3230072 - DNA, 25 bp, Homo sapien
taacactattgttgcaccatcttca

SEQ ID NO: 3230073 - DNA, 25 bp, Homo sapien
gatgctgcaattctaacactattgt

SEQ ID NO: 3230074 - DNA, 25 bp, Homo sapien
ggcaattggaaactcggcatcagaa

SEQ ID NO: 3230075 - DNA, 25 bp, Homo sapien
atcaaggcaattggaaactcggcat

SEQ ID NO: 3230076 - DNA, 25 bp, Homo sapien
gaaactcggcatcagaatagtcagc

SEQ ID NO: 3230077 - DNA, 25 bp, Homo sapien
agaatgtttctactttaatcaaggc

SEQ ID NO: 3230078 - DNA, 25 bp, Homo sapien
tctttgtagtccttcataccaatca

SEQ ID NO: 3230079 - DNA, 25 bp, Homo sapien
ttgaaatgtaagtcatccaagccat

SEQ ID NO: 3230080 - DNA, 25 bp, Homo sapien
ccaatttgaaatgtaagtcatccaa

SEQ ID NO: 3230081 - DNA, 25 bp, Homo sapien
ttgtagtccttcataccaatcatct

SEQ ID NO: 3230082 - DNA, 25 bp, Homo sapien
tattcacgctcagaactttgcaatg

SEQ ID NO: 3230083 - DNA, 25 bp, Homo sapien
tgcaatgcgaaaatgtccacgatat

SEQ ID NO: 3230084 - DNA, 25 bp, Homo sapien
ttattcacgctcagaactttgcaat

SEQ ID NO: 3230085 - DNA, 25 bp, Homo sapien
gaactttgcaatgcgaaaatgtcca

SEQ ID NO: 3230086 - DNA, 25 bp, Homo sapien
tgggctgaagtgcatatggggtaga

SEQ ID NO: 3230087 - DNA, 25 bp, Homo sapien
ggtagatttattctaccttctcatt

SEQ ID NO: 3230088 - DNA, 25 bp, Homo sapien
ctgaagtgcatatggggtagattta

SEQ ID NO: 3230089 - DNA, 25 bp, Homo sapien
agtgcatatggggtagatttattct

SEQ ID NO: 3230090 - DNA, 25 bp, Homo sapien
ctggcagcacatacatccttgttcc

SEQ ID NO: 3230091 - DNA, 25 bp, Homo sapien
aatatagatagccagggtcgcacaa

SEQ ID NO: 3230092 - DNA, 25 bp, Homo sapien
gcagcacatacatccttgttccatg

SEQ ID NO: 3230093 - DNA, 25 bp, Homo sapien
ggtcgcacaatatgcaaacctgtct

SEQ ID NO: 3230094 - DNA, 25 bp, Homo sapien
cggtttttggctctataaattgtga

SEQ ID NO: 3230095 - DNA, 25 bp, Homo sapien
tggctctataaattgtgaactgata

SEQ ID NO: 3230096 - DNA, 25 bp, Homo sapien
tgaagaaattcaggcggtttttggc

SEQ ID NO: 3230097 - DNA, 25 bp, Homo sapien
tcaggcggtttttggctctataaat

SEQ ID NO: 3230098 - DNA, 25 bp, Homo sapien
gaagtttgaattcattataacggtg

SEQ ID NO: 3230099 - DNA, 25 bp, Homo sapien
aattgcgtgaagtttgaattcatta

SEQ ID NO: 3230100 - DNA, 25 bp, Homo sapien
tgaattcattataacggtgatccaa

SEQ ID NO: 3230101 - DNA, 25 bp, Homo sapien
gtttgaattcattataacggtgatc

SEQ ID NO: 3230102 - DNA, 25 bp, Homo sapien
gatcaggattatgtggacaccaaga

SEQ ID NO: 3230103 - DNA, 25 bp, Homo sapien
agatcaggattatgtggacaccaag

SEQ ID NO: 3230104 - DNA, 25 bp, Homo sapien
gatcactaaattatcagtactgcca

SEQ ID NO: 3230105 - DNA, 25 bp, Homo sapien
aatgatcactaaattatcagtactg

SEQ ID NO: 3230106 - DNA, 25 bp, Homo sapien
attatcagtactgccacttgcaaac

SEQ ID NO: 3230107 - DNA, 25 bp, Homo sapien
taaattatcagtactgccacttgca

SEQ ID NO: 3230108 - DNA, 25 bp, Homo sapien
tccaaatgaacagtgggcctctgtg

SEQ ID NO: 3230109 - DNA, 25 bp, Homo sapien
agatggtccaaatgaacagtgggcc

SEQ ID NO: 3230110 - DNA, 25 bp, Homo sapien
caaatgaacagtgggcctctgtggg

SEQ ID NO: 3230111 - DNA, 25 bp, Homo sapien
tggtccaaatgaacagtgggcctct

SEQ ID NO: 3230112 - DNA, 25 bp, Homo sapien
tgtgtacaatcactccactatctgg

SEQ ID NO: 3230113 - DNA, 25 bp, Homo sapien
catctgaacatacagatatcagaca

SEQ ID NO: 3230114 - DNA, 25 bp, Homo sapien
caagaagctatgagcatctttgtgt

SEQ ID NO: 3230115 - DNA, 25 bp, Homo sapien
gatagacttccatcaatatgaccaa

SEQ ID NO: 3230116 - DNA, 25 bp, Homo sapien
ccagttataaacatcccaggagcac

SEQ ID NO: 3230117 - DNA, 25 bp, Homo sapien
taccaggcgaattccataatgcaaa

SEQ ID NO: 3230118 - DNA, 25 bp, Homo sapien
gataatcagtagatagtgggtccca

SEQ ID NO: 3230119 - DNA, 25 bp, Homo sapien
gtcccattccaaggccgtaactgga

SEQ ID NO: 3230120 - DNA, 25 bp, Homo sapien
atatacacgtatttaaaactctggg

SEQ ID NO: 3230121 - DNA, 25 bp, Homo sapien
caacgaaagaatatatacacgtatt

SEQ ID NO: 3230122 - DNA, 25 bp, Homo sapien
cacgtatttaaaactctgggttatg

SEQ ID NO: 3230123 - DNA, 25 bp, Homo sapien
tcctaaattcaacgaaagaatatat

SEQ ID NO: 3230124 - DNA, 25 bp, Homo sapien
cattccaaatgcgtaaaacacccac

SEQ ID NO: 3230125 - DNA, 25 bp, Homo sapien
aatgcgtaaaacacccacttgagaa

SEQ ID NO: 3230126 - DNA, 25 bp, Homo sapien
taagtacatgtaagcagtgaaatcc

SEQ ID NO: 3230127 - DNA, 25 bp, Homo sapien
gattatcaataggtgttgttcttga

SEQ ID NO: 3230128 - DNA, 25 bp, Homo sapien
cgcttgttgaggatgtataatgatt

SEQ ID NO: 3230129 - DNA, 25 bp, Homo sapien
tcttagctcccatatcataaagtcc

SEQ ID NO: 3230130 - DNA, 25 bp, Homo sapien
caagtctctaagaaaatcccacttc

SEQ ID NO: 3230131 - DNA, 25 bp, Homo sapien
gtggaactgcttcgcttgttgagga

SEQ ID NO: 3230132 - DNA, 25 bp, Homo sapien
aatgtgtttatatcccagactttta

SEQ ID NO: 3230133 - DNA, 25 bp, Homo sapien
taggatcgtcaggtttgaatttgca

SEQ ID NO: 3230134 - DNA, 25 bp, Homo sapien
ctgttgctaaaagattaggatcgtc

SEQ ID NO: 3230135 - DNA, 25 bp, Homo sapien
tagtgccatcaaatgaagctgttgc

SEQ ID NO: 3230136 - DNA, 25 bp, Homo sapien
tattgctagccaaggtaacctacag

SEQ ID NO: 3230137 - DNA, 25 bp, Homo sapien
gcaataatcaacagaataggctcag

SEQ ID NO: 3230138 - DNA, 25 bp, Homo sapien
tggaggcccaaatattcaaagttaa

SEQ ID NO: 3230139 - DNA, 25 bp, Homo sapien
caaggtgactgcactggctggtcca

SEQ ID NO: 3230140 - DNA, 25 bp, Homo sapien
taattttgcccttttgaacattcca

SEQ ID NO: 3230141 - DNA, 25 bp, Homo sapien
caaataaaagcaccatttcgggaag

SEQ ID NO: 3230142 - DNA, 25 bp, Homo sapien
tataattttgcccttttgaacattc

SEQ ID NO: 3230143 - DNA, 25 bp, Homo sapien
aaaatgtaaaatacctatcaataag

SEQ ID NO: 3230144 - DNA, 25 bp, Homo sapien
caaaaaatgtaaaatacctatcaat

SEQ ID NO: 3230145 - DNA, 25 bp, Homo sapien
ttcaaaaaatgtaaaatacctatca

SEQ ID NO: 3230146 - DNA, 25 bp, Homo sapien
aaatgtaaaatacctatcaataaga

SEQ ID NO: 3230147 - DNA, 25 bp, Homo sapien
gctgcaggttgctattcttttagaa

SEQ ID NO: 3230148 - DNA, 25 bp, Homo sapien
ttagaatctttatgactccaggcaa

SEQ ID NO: 3230149 - DNA, 25 bp, Homo sapien
ttttagaatctttatgactccaggc

SEQ ID NO: 3230150 - DNA, 25 bp, Homo sapien
ctgctgcaggttgctattcttttag

SEQ ID NO: 3230151 - DNA, 25 bp, Homo sapien
tggtagagctgtacaaatgaaatct

SEQ ID NO: 3230152 - DNA, 25 bp, Homo sapien
gaaatctcatggatacacagttgga

SEQ ID NO: 3230153 - DNA, 25 bp, Homo sapien
cattgagaaagcaattgaatgcctc

SEQ ID NO: 3230154 - DNA, 25 bp, Homo sapien
gcttaaaaataacgcctctgagagt

SEQ ID NO: 3230155 - DNA, 25 bp, Homo sapien
cgaagatggctatacccatagacag

SEQ ID NO: 3230156 - DNA, 25 bp, Homo sapien
tatcgaagatggctatacccataga

SEQ ID NO: 3230157 - DNA, 25 bp, Homo sapien
ctatcgaagatggctatacccatag

SEQ ID NO: 3230158 - DNA, 25 bp, Homo sapien
tcgaagatggctatacccatagaca

SEQ ID NO: 3230159 - DNA, 25 bp, Homo sapien
gaactatgagtgtctataccaccta

SEQ ID NO: 3230160 - DNA, 25 bp, Homo sapien
caagaactatgagtgtctataccac

SEQ ID NO: 3230161 - DNA, 25 bp, Homo sapien
tcaagaactatgagtgtctatacca

SEQ ID NO: 3230162 - DNA, 25 bp, Homo sapien
tatgagtgtctataccacctatcca

SEQ ID NO: 3230163 - DNA, 25 bp, Homo sapien
gcactttaccatcaattgttcgaat

SEQ ID NO: 3230164 - DNA, 25 bp, Homo sapien
actttaccatcaattgttcgaataa

SEQ ID NO: 3230165 - DNA, 25 bp, Homo sapien
cactttaccatcaattgttcgaata

SEQ ID NO: 3230166 - DNA, 25 bp, Homo sapien
tgagacagccaatatgcaaccagcc

SEQ ID NO: 3230167 - DNA, 25 bp, Homo sapien
cattctgactgcaacatggagaggt

SEQ ID NO: 3230168 - DNA, 25 bp, Homo sapien
ttatctatctcccacccaggtaggg

SEQ ID NO: 3230169 - DNA, 25 bp, Homo sapien
tgcaaggagtaagggaaagcaagcc

SEQ ID NO: 3230170 - DNA, 25 bp, Homo sapien
gcaaagaattccctctctcagagga

SEQ ID NO: 3230171 - DNA, 25 bp, Homo sapien
aaacacttttgctgtatgcccacta

SEQ ID NO: 3230172 - DNA, 25 bp, Homo sapien
ctcagaggagaccatttaacatgaa

SEQ ID NO: 3230173 - DNA, 25 bp, Homo sapien
catttgtgtcttcacagccagtggc

SEQ ID NO: 3230174 - DNA, 25 bp, Homo sapien
tgtaggggccactagaacaggtgtc

SEQ ID NO: 3230175 - DNA, 25 bp, Homo sapien
ctttgaagtcccaatgcatgttttt

SEQ ID NO: 3230176 - DNA, 25 bp, Homo sapien
tcatgacatgttaggtagttaggct

SEQ ID NO: 3230177 - DNA, 25 bp, Homo sapien
gaaaggcttttataggccccactgc

SEQ ID NO: 3230178 - DNA, 25 bp, Homo sapien
tgtatctagagtattaacatattct

SEQ ID NO: 3230179 - DNA, 25 bp, Homo sapien
cattcaagttataatgtatctagag

SEQ ID NO: 3230180 - DNA, 25 bp, Homo sapien
tattatgggtgtgataacattcaag

SEQ ID NO: 3230181 - DNA, 25 bp, Homo sapien
ttatgtctcaagatataaggttctc

SEQ ID NO: 3230182 - DNA, 25 bp, Homo sapien
tattccacattaatcctctcacagg

SEQ ID NO: 3230183 - DNA, 25 bp, Homo sapien
caagttccttctcgagtgtcccata

SEQ ID NO: 3230184 - DNA, 25 bp, Homo sapien
gcaagcatcctgagtataatcccag

SEQ ID NO: 3230185 - DNA, 25 bp, Homo sapien
tacatctgcaccgtgatcatacaca

SEQ ID NO: 3230186 - DNA, 25 bp, Homo sapien
gggcgactgggatggcaggttaaac

SEQ ID NO: 3230187 - DNA, 25 bp, Homo sapien
ttcttcccaagatctgtctgccaga

SEQ ID NO: 3230188 - DNA, 25 bp, Homo sapien
taaggctgttaatgaccagagtctc

SEQ ID NO: 3230189 - DNA, 25 bp, Homo sapien
cactgtagagtcacgggagcaagag

SEQ ID NO: 3230190 - DNA, 25 bp, Homo sapien
gtctaatatctcttgacactttacc

SEQ ID NO: 3230191 - DNA, 25 bp, Homo sapien
ttttcacttgagaattagcagttag

SEQ ID NO: 3230192 - DNA, 25 bp, Homo sapien
tttttcacttgagaattagcagtta

SEQ ID NO: 3230193 - DNA, 25 bp, Homo sapien
tctatttcctgtctaatatctcttg

SEQ ID NO: 3230194 - DNA, 25 bp, Homo sapien
tcctttgcagtagttctgaggaagt

SEQ ID NO: 3230195 - DNA, 25 bp, Homo sapien
gctatcatcctgtccttttatcaca

SEQ ID NO: 3230196 - DNA, 25 bp, Homo sapien
ttgcagtagttctgaggaagtaagc

SEQ ID NO: 3230197 - DNA, 25 bp, Homo sapien
tgaggaagtaagctatcatcctgtc

SEQ ID NO: 3230198 - DNA, 25 bp, Homo sapien
tccaagttcaaccataagttcacag

SEQ ID NO: 3230199 - DNA, 25 bp, Homo sapien
caccaaatttagacatcttgactgt

SEQ ID NO: 3230200 - DNA, 25 bp, Homo sapien
gttcacagtatctctgaatttgtcc

SEQ ID NO: 3230201 - DNA, 25 bp, Homo sapien
agcaggtacaccaataccaccacca

SEQ ID NO: 3230202 - DNA, 25 bp, Homo sapien
agactcctggtgcaattgacagggc

SEQ ID NO: 3230203 - DNA, 25 bp, Homo sapien
tcctggtgcaattgacagggctttg

SEQ ID NO: 3230204 - DNA, 25 bp, Homo sapien
tggtgcaattgacagggctttgtcc

SEQ ID NO: 3230205 - DNA, 25 bp, Homo sapien
tcacagagactcctggtgcaattga

SEQ ID NO: 3230206 - DNA, 25 bp, Homo sapien
cttctttaagctgacctcttgacat

SEQ ID NO: 3230207 - DNA, 25 bp, Homo sapien
gctttttcacatcaccaatggctat

SEQ ID NO: 3230208 - DNA, 25 bp, Homo sapien
gaaaaaatggactagctttttcaca

SEQ ID NO: 3230209 - DNA, 25 bp, Homo sapien
ttcctggattaattggtcagctctc

SEQ ID NO: 3230210 - DNA, 25 bp, Homo sapien
gaatatgaagctcctttaggcacgg

SEQ ID NO: 3230211 - DNA, 25 bp, Homo sapien
cattaaagtcttccttgtagatatc

SEQ ID NO: 3230212 - DNA, 25 bp, Homo sapien
cacggaaacatgtaagggctgcata

SEQ ID NO: 3230213 - DNA, 25 bp, Homo sapien
gatatcatcagaatatgaagctcct

SEQ ID NO: 3230214 - DNA, 25 bp, Homo sapien
atggcaagatggcaacatgcggcta

SEQ ID NO: 3230215 - DNA, 25 bp, Homo sapien
tagtactgctcgaccatcttgaaaa

SEQ ID NO: 3230216 - DNA, 25 bp, Homo sapien
tctgccagttctttactgactttgt

SEQ ID NO: 3230217 - DNA, 25 bp, Homo sapien
cagttctttactgactttgtgcagg

SEQ ID NO: 3230218 - DNA, 25 bp, Homo sapien
tttcattcacataaaccagttttaa

SEQ ID NO: 3230219 - DNA, 25 bp, Homo sapien
ggcttcgaagacatgcaaaaccaga

SEQ ID NO: 3230220 - DNA, 25 bp, Homo sapien
ttactcaggcttcgaagacatgcaa

SEQ ID NO: 3230221 - DNA, 25 bp, Homo sapien
caggcttcgaagacatgcaaaacca

SEQ ID NO: 3230222 - DNA, 25 bp, Homo sapien
ctcaggcttcgaagacatgcaaaac

SEQ ID NO: 3230223 - DNA, 25 bp, Homo sapien
tcgccagtaattctaaggcatagtg

SEQ ID NO: 3230224 - DNA, 25 bp, Homo sapien
tcatcatgcactttctcgccagtaa

SEQ ID NO: 3230225 - DNA, 25 bp, Homo sapien
catttccgcgaatcaggtatgccat

SEQ ID NO: 3230226 - DNA, 25 bp, Homo sapien
tgctggtgctgcagactctcctagt

SEQ ID NO: 3230227 - DNA, 25 bp, Homo sapien
tgtagttcattatcaggaatcatca

SEQ ID NO: 3230228 - DNA, 25 bp, Homo sapien
gtagttcattatcaggaatcatcag

SEQ ID NO: 3230229 - DNA, 25 bp, Homo sapien
tagttcattatcaggaatcatcaga

SEQ ID NO: 3230230 - DNA, 25 bp, Homo sapien
aatgtagttcattatcaggaatcat

SEQ ID NO: 3230231 - DNA, 25 bp, Homo sapien
ataccaataggaagggctttttcag

SEQ ID NO: 3230232 - DNA, 25 bp, Homo sapien
tgcacgggctgtctcagctaactgc

SEQ ID NO: 3230233 - DNA, 25 bp, Homo sapien
acagtttcaaatatattgtcatctg

SEQ ID NO: 3230234 - DNA, 25 bp, Homo sapien
tgcatacattcttccactgtgggta

SEQ ID NO: 3230235 - DNA, 25 bp, Homo sapien
tatccaaagtccagtctgagctact

SEQ ID NO: 3230236 - DNA, 25 bp, Homo sapien
tatatggtatccaaagtccagtctg

SEQ ID NO: 3230237 - DNA, 25 bp, Homo sapien
tacacgtatgcaagagtaatttttc

SEQ ID NO: 3230238 - DNA, 25 bp, Homo sapien
tatagctcagtaggtcaagaacagg

SEQ ID NO: 3230239 - DNA, 25 bp, Homo sapien
aagtgctggaacaatgctttggtac

SEQ ID NO: 3230240 - DNA, 25 bp, Homo sapien
gctttggtactgtcttctgatagcc

SEQ ID NO: 3230241 - DNA, 25 bp, Homo sapien
taatatcagcaactcatttcgagct

SEQ ID NO: 3230242 - DNA, 25 bp, Homo sapien
tgatagccagtaatgcaccaatgta

SEQ ID NO: 3230243 - DNA, 25 bp, Homo sapien
ctgacacctcccgacgttttaatag

SEQ ID NO: 3230244 - DNA, 25 bp, Homo sapien
ttggtggactgtgtgcaagctctcc

SEQ ID NO: 3230245 - DNA, 25 bp, Homo sapien
ctgttggtggactgtgtgcaagctc

SEQ ID NO: 3230246 - DNA, 25 bp, Homo sapien
gactgtgtgcaagctctccatgcat

SEQ ID NO: 3230247 - DNA, 25 bp, Homo sapien
ggtgtatacggagagtcttctaatg

SEQ ID NO: 3230248 - DNA, 25 bp, Homo sapien
ggtccaataattcctttcagtgact

SEQ ID NO: 3230249 - DNA, 25 bp, Homo sapien
gatccagtcacataatctggtccaa

SEQ ID NO: 3230250 - DNA, 25 bp, Homo sapien
tggaagatttgatccagtcacataa

SEQ ID NO: 3230251 - DNA, 25 bp, Homo sapien
gcccacatcaaagcatcattcaagg

SEQ ID NO: 3230252 - DNA, 25 bp, Homo sapien
tccagtccctaaaggtgagaatgga

SEQ ID NO: 3230253 - DNA, 25 bp, Homo sapien
agatagcagatttcccgtcttcaag

SEQ ID NO: 3230254 - DNA, 25 bp, Homo sapien
gattgagtcgtattccagtccctaa

SEQ ID NO: 3230255 - DNA, 25 bp, Homo sapien
tagtccaactgaaatatctgtagtc

SEQ ID NO: 3230256 - DNA, 25 bp, Homo sapien
taacttacacctttacaatgggaca

SEQ ID NO: 3230257 - DNA, 25 bp, Homo sapien
caacctctggcacttgagcaacaaa

SEQ ID NO: 3230258 - DNA, 25 bp, Homo sapien
taaggtaatgctaacccatgaaagt

SEQ ID NO: 3230259 - DNA, 25 bp, Homo sapien
tgcatctctgagttgtgtatattct

SEQ ID NO: 3230260 - DNA, 25 bp, Homo sapien
ttgcatctctgagttgtgtatattc

SEQ ID NO: 3230261 - DNA, 25 bp, Homo sapien
ccattgcatctctgagttgtgtata

SEQ ID NO: 3230262 - DNA, 25 bp, Homo sapien
cattgcatctctgagttgtgtatat

SEQ ID NO: 3230263 - DNA, 25 bp, Homo sapien
tcagacagaaattgggtggctattc

SEQ ID NO: 3230264 - DNA, 25 bp, Homo sapien
catatgtgccagttaataatcctcc

SEQ ID NO: 3230265 - DNA, 25 bp, Homo sapien
gaatgacagtaggattgagactgcc

SEQ ID NO: 3230266 - DNA, 25 bp, Homo sapien
caaggacctgaaatacgtacataca

SEQ ID NO: 3230267 - DNA, 25 bp, Homo sapien
cgactatggtaagttcccaagaatc

SEQ ID NO: 3230268 - DNA, 25 bp, Homo sapien
tgtgttcaatctcctgaaagagctc

SEQ ID NO: 3230269 - DNA, 25 bp, Homo sapien
cactcatggcccgactatggtaagt

SEQ ID NO: 3230270 - DNA, 25 bp, Homo sapien
tcatggcccgactatggtaagttcc

SEQ ID NO: 3230271 - DNA, 25 bp, Homo sapien
ctctgtagtaggcagaatgagcccc

SEQ ID NO: 3230272 - DNA, 25 bp, Homo sapien
gtgtcctcggactgcattctccaca

SEQ ID NO: 3230273 - DNA, 25 bp, Homo sapien
tcccttccaagagtaactatcatcc

SEQ ID NO: 3230274 - DNA, 25 bp, Homo sapien
caagagtaactatcatcctgctgcc

SEQ ID NO: 3230275 - DNA, 25 bp, Homo sapien
ttgccatcagcagaggattggcttg

SEQ ID NO: 3230276 - DNA, 25 bp, Homo sapien
ttttggcaacactgatactgggtgg

SEQ ID NO: 3230277 - DNA, 25 bp, Homo sapien
ttttcctgggataattgccatcagc

SEQ ID NO: 3230278 - DNA, 25 bp, Homo sapien
ctgatactgggtggtaggaatgtaa

SEQ ID NO: 3230279 - DNA, 25 bp, Homo sapien
ttacaagcgtgagaagctctaagcg

SEQ ID NO: 3230280 - DNA, 25 bp, Homo sapien
tgagtggccgctgctaatgaaggtt

SEQ ID NO: 3230281 - DNA, 25 bp, Homo sapien
gctctaagcgaacagcacgtgtaca

SEQ ID NO: 3230282 - DNA, 25 bp, Homo sapien
tgttggtctgatgggtgcatgcacc

SEQ ID NO: 3230283 - DNA, 25 bp, Homo sapien
cacacccaggctcccgttccggcgg

SEQ ID NO: 3230284 - DNA, 25 bp, Homo sapien
ggctccctgcgatccgcgccgtctg

SEQ ID NO: 3230285 - DNA, 25 bp, Homo sapien
cgatcgtctcccacgagtccggact

SEQ ID NO: 3230286 - DNA, 25 bp, Homo sapien
tgcggtgcgcgcgttccgggagcgc

SEQ ID NO: 3230287 - DNA, 25 bp, Homo sapien
cagcgagaaggcgaacagtgagttc

SEQ ID NO: 3230288 - DNA, 25 bp, Homo sapien
atgaagcagccgaaggtgagcgccg

SEQ ID NO: 3230289 - DNA, 25 bp, Homo sapien
ctcctgtctttgaaggcggtggtga

SEQ ID NO: 3230290 - DNA, 25 bp, Homo sapien
agcatgatccgcgagacgtgcagcc

SEQ ID NO: 3230291 - DNA, 25 bp, Homo sapien
caaaaatctcgctgtatcagaaggc

SEQ ID NO: 3230292 - DNA, 25 bp, Homo sapien
tatccgcggtcaatctggtgtgaaa

SEQ ID NO: 3230293 - DNA, 25 bp, Homo sapien
caaacagggcaaactcgggtgatga

SEQ ID NO: 3230294 - DNA, 25 bp, Homo sapien
tacgacgattaaagacaaaagtgcc

SEQ ID NO: 3230295 - DNA, 25 bp, Homo sapien
tctttctctaggtccagtgaaatct

SEQ ID NO: 3230296 - DNA, 25 bp, Homo sapien
tctctaggtccagtgaaatcttcta

SEQ ID NO: 3230297 - DNA, 25 bp, Homo sapien
tctaggtccagtgaaatcttctaca

SEQ ID NO: 3230298 - DNA, 25 bp, Homo sapien
taggtccagtgaaatcttctacatt

SEQ ID NO: 3230299 - DNA, 25 bp, Homo sapien
tcaaatgtgataaatcccagatcac

SEQ ID NO: 3230300 - DNA, 25 bp, Homo sapien
tactgatgaaaaaggcggaatttcc

SEQ ID NO: 3230301 - DNA, 25 bp, Homo sapien
ccaaggtttggctgattcaatgaga

SEQ ID NO: 3230302 - DNA, 25 bp, Homo sapien
ctacagaaaacgcaacgaaatattt

SEQ ID NO: 3230303 - DNA, 25 bp, Homo sapien
tagtcacactgtatcccaaatcatt

SEQ ID NO: 3230304 - DNA, 25 bp, Homo sapien
aacaactgcttaacattccaatcaa

SEQ ID NO: 3230305 - DNA, 25 bp, Homo sapien
gaaacaactgcttaacattccaatc

SEQ ID NO: 3230306 - DNA, 25 bp, Homo sapien
aaacaactgcttaacattccaatca

SEQ ID NO: 3230307 - DNA, 25 bp, Homo sapien
tgttaatgaattcaacttgaggagc

SEQ ID NO: 3230308 - DNA, 25 bp, Homo sapien
cagaaataccatcttatcacttcaa

SEQ ID NO: 3230309 - DNA, 25 bp, Homo sapien
taatgaattcaacttgaggagcttg

SEQ ID NO: 3230310 - DNA, 25 bp, Homo sapien
aaattaattagataactcatcagaa

SEQ ID NO: 3230311 - DNA, 25 bp, Homo sapien
tatcacctctcaaaacaatcttgtc

SEQ ID NO: 3230312 - DNA, 25 bp, Homo sapien
tcagcagcagcttcggattatcacc

SEQ ID NO: 3230313 - DNA, 25 bp, Homo sapien
cccataggacaacttggttcagagc

SEQ ID NO: 3230314 - DNA, 25 bp, Homo sapien
tgagaccatttccatcgtcaaagaa

SEQ ID NO: 3230315 - DNA, 25 bp, Homo sapien
aactcttcgttatttcatatgtatc

SEQ ID NO: 3230316 - DNA, 25 bp, Homo sapien
gaaatgggacagatacgtgtcctga

SEQ ID NO: 3230317 - DNA, 25 bp, Homo sapien
tggtacgacgttccaagacagggtc

SEQ ID NO: 3230318 - DNA, 25 bp, Homo sapien
tgtcacaagaggtagaattccagca

SEQ ID NO: 3230319 - DNA, 25 bp, Homo sapien
taagactgcaggcttatcgcacatg

SEQ ID NO: 3230320 - DNA, 25 bp, Homo sapien
tgggagccaggcagtttagcattca

SEQ ID NO: 3230321 - DNA, 25 bp, Homo sapien
tgcaaggcactacactaggcgctgg

SEQ ID NO: 3230322 - DNA, 25 bp, Homo sapien
tatgaattggctgacgagacccacc

SEQ ID NO: 3230323 - DNA, 25 bp, Homo sapien
caactgcccctgataagatctaatg

SEQ ID NO: 3230324 - DNA, 25 bp, Homo sapien
ccccatggtttggtcacattagaaa

SEQ ID NO: 3230325 - DNA, 25 bp, Homo sapien
cagcacttacaaaggaggacggtat

SEQ ID NO: 3230326 - DNA, 25 bp, Homo sapien
ggtcacagcaactagagcaagagca

SEQ ID NO: 3230327 - DNA, 25 bp, Homo sapien
ctatactcaacagatacacaagtgg

SEQ ID NO: 3230328 - DNA, 25 bp, Homo sapien
tcattcctggtaacatacacttagg

SEQ ID NO: 3230329 - DNA, 25 bp, Homo sapien
gaaagttctggtatacacttgccca

SEQ ID NO: 3230330 - DNA, 25 bp, Homo sapien
gaattcttaacacttcactgggaga

SEQ ID NO: 3230331 - DNA, 25 bp, Homo sapien
gcttgattgatcaaaaggaaccatg

SEQ ID NO: 3230332 - DNA, 25 bp, Homo sapien
aagataccattggttattcaccagc

SEQ ID NO: 3230333 - DNA, 25 bp, Homo sapien
caaatttaggcaaagagaactcaca

SEQ ID NO: 3230334 - DNA, 25 bp, Homo sapien
gaaaagcctgatacatttgattata

SEQ ID NO: 3230335 - DNA, 25 bp, Homo sapien
tttgaaaggactgatccgcctggcc

SEQ ID NO: 3230336 - DNA, 25 bp, Homo sapien
tacaaagcttcagggtatcaggtct

SEQ ID NO: 3230337 - DNA, 25 bp, Homo sapien
catgagctgtatcaccagagggcac

SEQ ID NO: 3230338 - DNA, 25 bp, Homo sapien
taggcctttgcatccgtcaggagaa

SEQ ID NO: 3230339 - DNA, 25 bp, Homo sapien
cagtaaacccatgaccttcagcatg

SEQ ID NO: 3230340 - DNA, 25 bp, Homo sapien
ccccctcaggcttggaattgcctgc

SEQ ID NO: 3230341 - DNA, 25 bp, Homo sapien
agtaaacccatgaccttcagcatgg

SEQ ID NO: 3230342 - DNA, 25 bp, Homo sapien
aacccatgaccttcagcatgggtgt

SEQ ID NO: 3230343 - DNA, 25 bp, Homo sapien
gcaatcaactaaacgggctttacaa

SEQ ID NO: 3230344 - DNA, 25 bp, Homo sapien
tctgtgggttcctgtaccttgactc

SEQ ID NO: 3230345 - DNA, 25 bp, Homo sapien
tcgttgatttctatagtctgtgggt

SEQ ID NO: 3230346 - DNA, 25 bp, Homo sapien
taccttgactctggccacgtctgtg

SEQ ID NO: 3230347 - DNA, 25 bp, Homo sapien
ctctcctctgacacatttggtggcc

SEQ ID NO: 3230348 - DNA, 25 bp, Homo sapien
tctgacacatttggtggcctttctc

SEQ ID NO: 3230349 - DNA, 25 bp, Homo sapien
tctcctctgacacatttggtggcct

SEQ ID NO: 3230350 - DNA, 25 bp, Homo sapien
tcctctgacacatttggtggccttt

SEQ ID NO: 3230351 - DNA, 25 bp, Homo sapien
atcttctgctgatagtgatatcacc

SEQ ID NO: 3230352 - DNA, 25 bp, Homo sapien
ggccccggtcttgttgcatcttctg

SEQ ID NO: 3230353 - DNA, 25 bp, Homo sapien
acacggcatccagctgttaggtcca

SEQ ID NO: 3230354 - DNA, 25 bp, Homo sapien
gcagtggccccggtcttgttgcatc

SEQ ID NO: 3230355 - DNA, 25 bp, Homo sapien
tctccctggttgtaatctgagttcc

SEQ ID NO: 3230356 - DNA, 25 bp, Homo sapien
tacgcattgttttgctatcaaagta

SEQ ID NO: 3230357 - DNA, 25 bp, Homo sapien
gactgtcttctatggtcaccgctga

SEQ ID NO: 3230358 - DNA, 25 bp, Homo sapien
tctgagttcctcaggtgccttacgc

SEQ ID NO: 3230359 - DNA, 25 bp, Homo sapien
cacataaaaggacactcattagtgg

SEQ ID NO: 3230360 - DNA, 25 bp, Homo sapien
aaaaggacactcattagtggacaaa

SEQ ID NO: 3230361 - DNA, 25 bp, Homo sapien
aggacactcattagtggacaaaggc

SEQ ID NO: 3230362 - DNA, 25 bp, Homo sapien
ccagtcacataaaaggacactcatt

SEQ ID NO: 3230363 - DNA, 25 bp, Homo sapien
atacagccatccgaaggcctcagtg

SEQ ID NO: 3230364 - DNA, 25 bp, Homo sapien
cagctgcgagttgattgacggtcca

SEQ ID NO: 3230365 - DNA, 25 bp, Homo sapien
cgccgccatttttggcacgttgcca

SEQ ID NO: 3230366 - DNA, 25 bp, Homo sapien
cacaaatggattaatttgcgccgcc

SEQ ID NO: 3230367 - DNA, 25 bp, Homo sapien
tgtgtagccacacgaagctgatgct

SEQ ID NO: 3230368 - DNA, 25 bp, Homo sapien
taatttgagagcacacaacaatgcc

SEQ ID NO: 3230369 - DNA, 25 bp, Homo sapien
tgactctagagccactgtgtagcca

SEQ ID NO: 3230370 - DNA, 25 bp, Homo sapien
tccgtgaccctacgtgcagaataca

SEQ ID NO: 3230371 - DNA, 25 bp, Homo sapien
caggtaaagggccaggatggctatg

SEQ ID NO: 3230372 - DNA, 25 bp, Homo sapien
aaagggccaggatggctatgggcac

SEQ ID NO: 3230373 - DNA, 25 bp, Homo sapien
gtaaagggccaggatggctatgggc

SEQ ID NO: 3230374 - DNA, 25 bp, Homo sapien
ggtaaagggccaggatggctatggg

SEQ ID NO: 3230375 - DNA, 25 bp, Homo sapien
ttaagctagcagccgtgaccctaac

SEQ ID NO: 3230376 - DNA, 25 bp, Homo sapien
taacaggtgttacccctaccacatg

SEQ ID NO: 3230377 - DNA, 25 bp, Homo sapien
ggttaagtgtgagtcctgatcctgt

SEQ ID NO: 3230378 - DNA, 25 bp, Homo sapien
ccacatgcaatgtgaatgctgctcc

SEQ ID NO: 3230379 - DNA, 25 bp, Homo sapien
tgctgctccatagagttgggttaag

SEQ ID NO: 3230380 - DNA, 25 bp, Homo sapien
cacagcctgctagttcctcgtggca

SEQ ID NO: 3230381 - DNA, 25 bp, Homo sapien
ctgctgcagagtttgactgtgtgac

SEQ ID NO: 3230382 - DNA, 25 bp, Homo sapien
gacaaactgaccaccctcacacagg

SEQ ID NO: 3230383 - DNA, 25 bp, Homo sapien
caggcacagcctgctagttcctcgt

SEQ ID NO: 3230384 - DNA, 25 bp, Homo sapien
ataagaaaactcagtcctgctaggg

SEQ ID NO: 3230385 - DNA, 25 bp, Homo sapien
aacagtcacactcacacattgctgg

SEQ ID NO: 3230386 - DNA, 25 bp, Homo sapien
gaagtaccttggtacaagtcttaca

SEQ ID NO: 3230387 - DNA, 25 bp, Homo sapien
attgctggtggaagtaccttggtac

SEQ ID NO: 3230388 - DNA, 25 bp, Homo sapien
tcaggcatcttctacgacaggactg

SEQ ID NO: 3230389 - DNA, 25 bp, Homo sapien
ctacgacaggactggcttctactgc

SEQ ID NO: 3230390 - DNA, 25 bp, Homo sapien
ccccactcagaatctaagtcagttt

SEQ ID NO: 3230391 - DNA, 25 bp, Homo sapien
agaatctaagtcagtttttaagaag

SEQ ID NO: 3230392 - DNA, 25 bp, Homo sapien
gctgggatgtgcgtaatcaccaaat

SEQ ID NO: 3230393 - DNA, 25 bp, Homo sapien
tgagataagctcctgatcatctgtg

SEQ ID NO: 3230394 - DNA, 25 bp, Homo sapien
tagtttgaggcaagctgagataagc

SEQ ID NO: 3230395 - DNA, 25 bp, Homo sapien
tattgcaattagcaacagatgggct

SEQ ID NO: 3230396 - DNA, 25 bp, Homo sapien
tggtgcttgtgacacggtagagaac

SEQ ID NO: 3230397 - DNA, 25 bp, Homo sapien
gagaacttgtaaatcctgcagatct

SEQ ID NO: 3230398 - DNA, 25 bp, Homo sapien
gtagttctagtggtgcttgtgacac

SEQ ID NO: 3230399 - DNA, 25 bp, Homo sapien
agagaacttgtaaatcctgcagatc

SEQ ID NO: 3230400 - DNA, 25 bp, Homo sapien
gcaaaccttataaccttcaccatct

SEQ ID NO: 3230401 - DNA, 25 bp, Homo sapien
tatttcctccctatcactgtaatac

SEQ ID NO: 3230402 - DNA, 25 bp, Homo sapien
ctccttgcaaaccttataaccttca

SEQ ID NO: 3230403 - DNA, 25 bp, Homo sapien
cttgcaaaccttataaccttcacca

SEQ ID NO: 3230404 - DNA, 25 bp, Homo sapien
caagagattcattataattgttcat

SEQ ID NO: 3230405 - DNA, 25 bp, Homo sapien
tcaagagattcattataattgttca

SEQ ID NO: 3230406 - DNA, 25 bp, Homo sapien
ctttttgtgtgtcttacatgaggac

SEQ ID NO: 3230407 - DNA, 25 bp, Homo sapien
tatactaagtctaggataatcctgc

SEQ ID NO: 3230408 - DNA, 25 bp, Homo sapien
catgcctttcttgtcacgtatacta

SEQ ID NO: 3230409 - DNA, 25 bp, Homo sapien
tgctgcgaatgtgaggtgtagcctc

SEQ ID NO: 3230410 - DNA, 25 bp, Homo sapien
tctacacccgtaaggtggcttgtta

SEQ ID NO: 3230411 - DNA, 25 bp, Homo sapien
tgaaaagtttagtccatatagacgt

SEQ ID NO: 3230412 - DNA, 25 bp, Homo sapien
gttagtgatgctaaactggttttcc

SEQ ID NO: 3230413 - DNA, 25 bp, Homo sapien
tatagacgttgtggcgccagtcctt

SEQ ID NO: 3230414 - DNA, 25 bp, Homo sapien
cagtggatttgctactgcaggattt

SEQ ID NO: 3230415 - DNA, 25 bp, Homo sapien
tactgcaggatttgtcacgtccctg

SEQ ID NO: 3230416 - DNA, 25 bp, Homo sapien
cacgtccctgggtggatacttgctg

SEQ ID NO: 3230417 - DNA, 25 bp, Homo sapien
gaactagagtagcaaggaggtcttg

SEQ ID NO: 3230418 - DNA, 25 bp, Homo sapien
gaaaattgggctcttggcctgtatg

SEQ ID NO: 3230419 - DNA, 25 bp, Homo sapien
aattgggctcttggcctgtatggtc

SEQ ID NO: 3230420 - DNA, 25 bp, Homo sapien
ttgaaaattgggctcttggcctgta

SEQ ID NO: 3230421 - DNA, 25 bp, Homo sapien
aaaattgggctcttggcctgtatgg

SEQ ID NO: 3230422 - DNA, 25 bp, Homo sapien
gaaatacagttgcatatgttatgtg

SEQ ID NO: 3230423 - DNA, 25 bp, Homo sapien
tgttatgtggacagcaaaaaccaca

SEQ ID NO: 3230424 - DNA, 25 bp, Homo sapien
cttcctgaccctgaaatacagttgc

SEQ ID NO: 3230425 - DNA, 25 bp, Homo sapien
ggtccttgacaaagatgctcaaggc

SEQ ID NO: 3230426 - DNA, 25 bp, Homo sapien
gatgggaatactgccaaataagatg

SEQ ID NO: 3230427 - DNA, 25 bp, Homo sapien
gccaaataagatgcaatgagcaaag

SEQ ID NO: 3230428 - DNA, 25 bp, Homo sapien
tattttgatgggaatactgccaaat

SEQ ID NO: 3230429 - DNA, 25 bp, Homo sapien
gaatactgccaaataagatgcaatg

SEQ ID NO: 3230430 - DNA, 25 bp, Homo sapien
ttctgcaggcaggtccgccatcatt

SEQ ID NO: 3230431 - DNA, 25 bp, Homo sapien
gcaggtccgccatcattagggggac

SEQ ID NO: 3230432 - DNA, 25 bp, Homo sapien
gaaagagcacagtcactactgcttt

SEQ ID NO: 3230433 - DNA, 25 bp, Homo sapien
gcaggcaggtccgccatcattaggg

SEQ ID NO: 3230434 - DNA, 25 bp, Homo sapien
gtcttcaaaacatgttgtttccaag

SEQ ID NO: 3230435 - DNA, 25 bp, Homo sapien
tgaaaatttgagaaaatcaaccaca

SEQ ID NO: 3230436 - DNA, 25 bp, Homo sapien
caaaacatgttgtttccaagaatgc

SEQ ID NO: 3230437 - DNA, 25 bp, Homo sapien
accacagtcttcaaaacatgttgtt

SEQ ID NO: 3230438 - DNA, 25 bp, Homo sapien
ctaccatgggtcagcggtgttgttc

SEQ ID NO: 3230439 - DNA, 25 bp, Homo sapien
tagaacactgtttctaccatgggtc

SEQ ID NO: 3230440 - DNA, 25 bp, Homo sapien
tctaccatgggtcagcggtgttgtt

SEQ ID NO: 3230441 - DNA, 25 bp, Homo sapien
agaacactgtttctaccatgggtca

SEQ ID NO: 3230442 - DNA, 25 bp, Homo sapien
gcccagatattgatggggcttcatt

SEQ ID NO: 3230443 - DNA, 25 bp, Homo sapien
cactttgctagtacagatctggatg

SEQ ID NO: 3230444 - DNA, 25 bp, Homo sapien
ctttcactttgctagtacagatctg

SEQ ID NO: 3230445 - DNA, 25 bp, Homo sapien
ttcactttgctagtacagatctgga

SEQ ID NO: 3230446 - DNA, 25 bp, Homo sapien
caccaggaaaaacgctccacctgct

SEQ ID NO: 3230447 - DNA, 25 bp, Homo sapien
tcaccaggaaaaacgctccacctgc

SEQ ID NO: 3230448 - DNA, 25 bp, Homo sapien
atcaccaggaaaaacgctccacctg

SEQ ID NO: 3230449 - DNA, 25 bp, Homo sapien
gaaacagatggtggatctatctcac

SEQ ID NO: 3230450 - DNA, 25 bp, Homo sapien
cgaaattggtctgataggctaggca

SEQ ID NO: 3230451 - DNA, 25 bp, Homo sapien
ccagtcgcattggaacatagtgcac

SEQ ID NO: 3230452 - DNA, 25 bp, Homo sapien
gaagctgtgtctaggattattccag

SEQ ID NO: 3230453 - DNA, 25 bp, Homo sapien
tgttgagcaccaattacattcaaga

SEQ ID NO: 3230454 - DNA, 25 bp, Homo sapien
tcctgccttgtatgcatattgttga

SEQ ID NO: 3230455 - DNA, 25 bp, Homo sapien
ccaattacattcaagatgcagtact

SEQ ID NO: 3230456 - DNA, 25 bp, Homo sapien
cattcttttactcctgccttgtatg

SEQ ID NO: 3230457 - DNA, 25 bp, Homo sapien
caaagttgcaccgtggttggctgta

SEQ ID NO: 3230458 - DNA, 25 bp, Homo sapien
ttaggactcgcctgtaagtaatcat

SEQ ID NO: 3230459 - DNA, 25 bp, Homo sapien
tgtatttggtgtgctatcggcagag

SEQ ID NO: 3230460 - DNA, 25 bp, Homo sapien
gcatgtgttttaggactcgcctgta

SEQ ID NO: 3230461 - DNA, 25 bp, Homo sapien
gttggatatttcaccctctttggat

SEQ ID NO: 3230462 - DNA, 25 bp, Homo sapien
gctacaatgtacttggtcatttttc

SEQ ID NO: 3230463 - DNA, 25 bp, Homo sapien
tatacatcaaactgacagtagtaat

SEQ ID NO: 3230464 - DNA, 25 bp, Homo sapien
catcctgtaaatatgctacaatgta

SEQ ID NO: 3230465 - DNA, 25 bp, Homo sapien
tgctgctgccactaggcttgcgaga

SEQ ID NO: 3230466 - DNA, 25 bp, Homo sapien
gctggtgccctctatactttctcca

SEQ ID NO: 3230467 - DNA, 25 bp, Homo sapien
agtgaatgatagtagctccacatcc

SEQ ID NO: 3230468 - DNA, 25 bp, Homo sapien
gcttgcgagagctctgctggtgccc

SEQ ID NO: 3230469 - DNA, 25 bp, Homo sapien
cacttgcattcaaatccaagagaaa

SEQ ID NO: 3230470 - DNA, 25 bp, Homo sapien
gcattcaaatccaagagaaaagtaa

SEQ ID NO: 3230471 - DNA, 25 bp, Homo sapien
cttgcattcaaatccaagagaaaag

SEQ ID NO: 3230472 - DNA, 25 bp, Homo sapien
tgcattcaaatccaagagaaaagta

SEQ ID NO: 3230473 - DNA, 25 bp, Homo sapien
caatatcagatggtagttgcattct

SEQ ID NO: 3230474 - DNA, 25 bp, Homo sapien
caatgaatcagtcaattactccatt

SEQ ID NO: 3230475 - DNA, 25 bp, Homo sapien
tagatagaagtcagatccctagaac

SEQ ID NO: 3230476 - DNA, 25 bp, Homo sapien
tattttagtgtcagggataccacag

SEQ ID NO: 3230477 - DNA, 25 bp, Homo sapien
tcaaaggaatcagatgtggcttcac

SEQ ID NO: 3230478 - DNA, 25 bp, Homo sapien
caagctatcactgacattggcaata

SEQ ID NO: 3230479 - DNA, 25 bp, Homo sapien
cagatgtggcttcactactttcata

SEQ ID NO: 3230480 - DNA, 25 bp, Homo sapien
ttaaacagttagttcatagctagag

SEQ ID NO: 3230481 - DNA, 25 bp, Homo sapien
tcttagaaccctgtgcggaggaagg

SEQ ID NO: 3230482 - DNA, 25 bp, Homo sapien
ggcatcagagtctaaatgatgcttt

SEQ ID NO: 3230483 - DNA, 25 bp, Homo sapien
cagcttcgttgccactcaggggcat

SEQ ID NO: 3230484 - DNA, 25 bp, Homo sapien
tctgtgtactcattcttagaaccct

SEQ ID NO: 3230485 - DNA, 25 bp, Homo sapien
ctgataacattaggaaagcccctga

SEQ ID NO: 3230486 - DNA, 25 bp, Homo sapien
catgaagatttgactccagagtcac

SEQ ID NO: 3230487 - DNA, 25 bp, Homo sapien
ttcacagcagctgacctctgagcac

SEQ ID NO: 3230488 - DNA, 25 bp, Homo sapien
agcttgaagctgtgatgggatcaca

SEQ ID NO: 3230489 - DNA, 25 bp, Homo sapien
gtgggattcagaagcttcagctgaa

SEQ ID NO: 3230490 - DNA, 25 bp, Homo sapien
agtgggattcagaagcttcagctga

SEQ ID NO: 3230491 - DNA, 25 bp, Homo sapien
agtcccccaaagcaataaactctga

SEQ ID NO: 3230492 - DNA, 25 bp, Homo sapien
tcaaagcacgtaataaaagtccaaa

SEQ ID NO: 3230493 - DNA, 25 bp, Homo sapien
ttcacttagggacacaggagacttc

SEQ ID NO: 3230494 - DNA, 25 bp, Homo sapien
aagtccaaacaggtcttcacttagg

SEQ ID NO: 3230495 - DNA, 25 bp, Homo sapien
aataggactatctcccagcacaggc

SEQ ID NO: 3230496 - DNA, 25 bp, Homo sapien
catctgcaacatgactttgggccat

SEQ ID NO: 3230497 - DNA, 25 bp, Homo sapien
gaggtatggctgctggaatgcccca

SEQ ID NO: 3230498 - DNA, 25 bp, Homo sapien
caccgaccttttgtgttagcagcaa

SEQ ID NO: 3230499 - DNA, 25 bp, Homo sapien
agagaacctcactgtactcttccct

SEQ ID NO: 3230500 - DNA, 25 bp, Homo sapien
gggccatccaatgtccctgtacaga

SEQ ID NO: 3230501 - DNA, 25 bp, Homo sapien
ggggccagggccatccaatgtccct

SEQ ID NO: 3230502 - DNA, 25 bp, Homo sapien
ctgtaatttctcgtcttcttcccaa

SEQ ID NO: 3230503 - DNA, 25 bp, Homo sapien
tgtcactgccacgtcttgcaaatgt

SEQ ID NO: 3230504 - DNA, 25 bp, Homo sapien
tgttgtcactgccacgtcttgcaaa

SEQ ID NO: 3230505 - DNA, 25 bp, Homo sapien
ttgttgtcactgccacgtcttgcaa

SEQ ID NO: 3230506 - DNA, 25 bp, Homo sapien
ttgtcactgccacgtcttgcaaatg

SEQ ID NO: 3230507 - DNA, 25 bp, Homo sapien
tttccaaagcattcagtcagttttc

SEQ ID NO: 3230508 - DNA, 25 bp, Homo sapien
aagcattcagtcagttttcctagat

SEQ ID NO: 3230509 - DNA, 25 bp, Homo sapien
ctagattttctagtaatttttccat

SEQ ID NO: 3230510 - DNA, 25 bp, Homo sapien
cattcagtcagttttcctagatttt

SEQ ID NO: 3230511 - DNA, 25 bp, Homo sapien
gagtcgtcgcatatccagcataagg

SEQ ID NO: 3230512 - DNA, 25 bp, Homo sapien
caagaagggcttttgactcccctgg

SEQ ID NO: 3230513 - DNA, 25 bp, Homo sapien
gaacacgctcgttcttagattagaa

SEQ ID NO: 3230514 - DNA, 25 bp, Homo sapien
ccccggattgcaacaccgatgatat

SEQ ID NO: 3230515 - DNA, 25 bp, Homo sapien
tactcacagaggaatatctacacgg

SEQ ID NO: 3230516 - DNA, 25 bp, Homo sapien
tacacggcactctaagattgaagct

SEQ ID NO: 3230517 - DNA, 25 bp, Homo sapien
tgaactaagtctgtatcctctgtgc

SEQ ID NO: 3230518 - DNA, 25 bp, Homo sapien
tgttgcttcctatacaccaaaggca

SEQ ID NO: 3230519 - DNA, 25 bp, Homo sapien
cacctcccgagtctcagcatgttaa

SEQ ID NO: 3230520 - DNA, 25 bp, Homo sapien
acctcccgagtctcagcatgttaat

SEQ ID NO: 3230521 - DNA, 25 bp, Homo sapien
accacctcccgagtctcagcatgtt

SEQ ID NO: 3230522 - DNA, 25 bp, Homo sapien
gtgtccctaggcaaatcaccacctc

SEQ ID NO: 3230523 - DNA, 25 bp, Homo sapien
tacgaaccgccagaaggcttgtgag

SEQ ID NO: 3230524 - DNA, 25 bp, Homo sapien
tgaagaagtgtgtcgttgtgtccct

SEQ ID NO: 3230525 - DNA, 25 bp, Homo sapien
aataccttggtagcatgatgaatcc

SEQ ID NO: 3230526 - DNA, 25 bp, Homo sapien
ttacagacggccatgtacgaaccgc

SEQ ID NO: 3230527 - DNA, 25 bp, Homo sapien
attttcagaaggatatagatactaa

SEQ ID NO: 3230528 - DNA, 25 bp, Homo sapien
tattcctactgtaataaccaagagg

SEQ ID NO: 3230529 - DNA, 25 bp, Homo sapien
tttcttcccttatactgcaaagtac

SEQ ID NO: 3230530 - DNA, 25 bp, Homo sapien
tccaattttacctatatattcctac

SEQ ID NO: 3230531 - DNA, 25 bp, Homo sapien
tacaaggctgaagagtgtggatgct

SEQ ID NO: 3230532 - DNA, 25 bp, Homo sapien
tgccggtggctccattcgtaataca

SEQ ID NO: 3230533 - DNA, 25 bp, Homo sapien
ggttctgtaaactttcttgtgacac

SEQ ID NO: 3230534 - DNA, 25 bp, Homo sapien
aaagcaccaagcatctgccacacat

SEQ ID NO: 3230535 - DNA, 25 bp, Homo sapien
cttccatctgcctgaaagcacttcc

SEQ ID NO: 3230536 - DNA, 25 bp, Homo sapien
tcgtctcttctctgatcccttccat

SEQ ID NO: 3230537 - DNA, 25 bp, Homo sapien
tccatctgcctgaaagcacttcctt

SEQ ID NO: 3230538 - DNA, 25 bp, Homo sapien
gccttcgtctcttctctgatccctt

SEQ ID NO: 3230539 - DNA, 25 bp, Homo sapien
tcttccaactctgaattctagcact

SEQ ID NO: 3230540 - DNA, 25 bp, Homo sapien
gaattctagcactctctgctgtttc

SEQ ID NO: 3230541 - DNA, 25 bp, Homo sapien
caggctgatggcttcttccaactct

SEQ ID NO: 3230542 - DNA, 25 bp, Homo sapien
tttctctgtcttgggccagattttc

SEQ ID NO: 3230543 - DNA, 25 bp, Homo sapien
tagatcccacactgtgtgatcatga

SEQ ID NO: 3230544 - DNA, 25 bp, Homo sapien
tgttgatttgtagatcccacactgt

SEQ ID NO: 3230545 - DNA, 25 bp, Homo sapien
tcctgtgttgatttgtagatcccac

SEQ ID NO: 3230546 - DNA, 25 bp, Homo sapien
tgatttgtagatcccacactgtgtg

SEQ ID NO: 3230547 - DNA, 25 bp, Homo sapien
aatatagggcacagttgtgctgctt

SEQ ID NO: 3230548 - DNA, 25 bp, Homo sapien
aaatatagggcacagttgtgctgct

SEQ ID NO: 3230549 - DNA, 25 bp, Homo sapien
gaaatatagggcacagttgtgctgc

SEQ ID NO: 3230550 - DNA, 25 bp, Homo sapien
tctttggccgttgcaccatatttta

SEQ ID NO: 3230551 - DNA, 25 bp, Homo sapien
ccactgtgtgtcagtatcaggatgt

SEQ ID NO: 3230552 - DNA, 25 bp, Homo sapien
tcttgtacgactcttctgtaggtgg

SEQ ID NO: 3230553 - DNA, 25 bp, Homo sapien
tgccataaatctttggccgttgcac

SEQ ID NO: 3230554 - DNA, 25 bp, Homo sapien
ctcgcttcacctcgcgggctccgaa

SEQ ID NO: 3230555 - DNA, 25 bp, Homo sapien
gatgtccggtttcctgtgaggcttt

SEQ ID NO: 3230556 - DNA, 25 bp, Homo sapien
ggagctcggatgtccggtttcctgt

SEQ ID NO: 3230557 - DNA, 25 bp, Homo sapien
ctgtgaggcttttacctgacacccg

SEQ ID NO: 3230558 - DNA, 25 bp, Homo sapien
atttctgacattaggccactcagag

SEQ ID NO: 3230559 - DNA, 25 bp, Homo sapien
aggtctagcaacaggatgatcttcc

SEQ ID NO: 3230560 - DNA, 25 bp, Homo sapien
caagagctggcactgcacatgttcc

SEQ ID NO: 3230561 - DNA, 25 bp, Homo sapien
tgttccaggacctacatctgaatgt

SEQ ID NO: 3230562 - DNA, 25 bp, Homo sapien
gtttcagatggtgccactttgcatc

SEQ ID NO: 3230563 - DNA, 25 bp, Homo sapien
ttctcactgattgtttcatgtgtcc

SEQ ID NO: 3230564 - DNA, 25 bp, Homo sapien
catgtgtcccaaattgctgacccat

SEQ ID NO: 3230565 - DNA, 25 bp, Homo sapien
actttgcatcttatcctgatcccac

SEQ ID NO: 3230566 - DNA, 25 bp, Homo sapien
cgacataccaaaggtgttttggaga

SEQ ID NO: 3230567 - DNA, 25 bp, Homo sapien
aatggaataagtgtaaaacattctc

SEQ ID NO: 3230568 - DNA, 25 bp, Homo sapien
acaacgaaagttctggttctctttg

SEQ ID NO: 3230569 - DNA, 25 bp, Homo sapien
taagtgtaaatggaataagtgtaaa

SEQ ID NO: 3230570 - DNA, 25 bp, Homo sapien
taaaacattctcacaacgaaagttc

SEQ ID NO: 3230571 - DNA, 25 bp, Homo sapien
aagaaacagagtaattctcgtggaa

SEQ ID NO: 3230572 - DNA, 25 bp, Homo sapien
gagtaattctcgtggaatacttgaa

SEQ ID NO: 3230573 - DNA, 25 bp, Homo sapien
gaacttcccatgattataccacaaa

SEQ ID NO: 3230574 - DNA, 25 bp, Homo sapien
actctgcccttaggtgaacttccca

SEQ ID NO: 3230575 - DNA, 25 bp, Homo sapien
catctggtctcttaagaataagctc

SEQ ID NO: 3230576 - DNA, 25 bp, Homo sapien
tgggtaaagaagaatgttaatatct

SEQ ID NO: 3230577 - DNA, 25 bp, Homo sapien
tcttaagaataagctctgtgttcct

SEQ ID NO: 3230578 - DNA, 25 bp, Homo sapien
tggtctcttaagaataagctctgtg

SEQ ID NO: 3230579 - DNA, 25 bp, Homo sapien
tgttcctgagattcaatttgatggc

SEQ ID NO: 3230580 - DNA, 25 bp, Homo sapien
ttgttcctgagattcaatttgatgg

SEQ ID NO: 3230581 - DNA, 25 bp, Homo sapien
tggatattctcaggaacgaagccca

SEQ ID NO: 3230582 - DNA, 25 bp, Homo sapien
acctaaattggaaggccatcttcca

SEQ ID NO: 3230583 - DNA, 25 bp, Homo sapien
ccaatttagatctcttggactcctg

SEQ ID NO: 3230584 - DNA, 25 bp, Homo sapien
ttgcttcataaaaacctggccttct

SEQ ID NO: 3230585 - DNA, 25 bp, Homo sapien
tctggcggcctctgaatatgtcctg

SEQ ID NO: 3230586 - DNA, 25 bp, Homo sapien
tctgaggagcttaatcggaaatggc

SEQ ID NO: 3230587 - DNA, 25 bp, Homo sapien
gaaaccttgacaacataggtggctg

SEQ ID NO: 3230588 - DNA, 25 bp, Homo sapien
tatgtcctgggactccagtcgagcc

SEQ ID NO: 3230589 - DNA, 25 bp, Homo sapien
tttatatccaagttttcagcacaga

SEQ ID NO: 3230590 - DNA, 25 bp, Homo sapien
aaatctaagcgccactgagtttttc

SEQ ID NO: 3230591 - DNA, 25 bp, Homo sapien
aatagttatagattgttttagtcac

SEQ ID NO: 3230592 - DNA, 25 bp, Homo sapien
tgcttcctgctgctaaatctaagcg

SEQ ID NO: 3230593 - DNA, 25 bp, Homo sapien
tttagtcactttgcgttgcttcctg

SEQ ID NO: 3230594 - DNA, 25 bp, Homo sapien
tatgtgcaaatcaactctgaattct

SEQ ID NO: 3230595 - DNA, 25 bp, Homo sapien
cacttgttttgcttcgtatgtgcaa

SEQ ID NO: 3230596 - DNA, 25 bp, Homo sapien
ttcagagtagtttacttcattagac

SEQ ID NO: 3230597 - DNA, 25 bp, Homo sapien
ttcattagacatagatattggaagc

SEQ ID NO: 3230598 - DNA, 25 bp, Homo sapien
tcttccttctgtacgtttcctcaaa

SEQ ID NO: 3230599 - DNA, 25 bp, Homo sapien
agtgtaccatttttgcctttgatac

SEQ ID NO: 3230600 - DNA, 25 bp, Homo sapien
ctttgatactcaactctggactgag

SEQ ID NO: 3230601 - DNA, 25 bp, Homo sapien
tcttaatttgaacaatttcaaacac

SEQ ID NO: 3230602 - DNA, 25 bp, Homo sapien
tttcaaacactttcagtgtaccatt

SEQ ID NO: 3230603 - DNA, 25 bp, Homo sapien
cttccacaaggattatgtcaattgc

SEQ ID NO: 3230604 - DNA, 25 bp, Homo sapien
ccacaaggattatgtcaattgccat

SEQ ID NO: 3230605 - DNA, 25 bp, Homo sapien
ccaaaagtgtaattgtggttatcac

SEQ ID NO: 3230606 - DNA, 25 bp, Homo sapien
tatcactacttgatggccttccaca

SEQ ID NO: 3230607 - DNA, 25 bp, Homo sapien
gatacttccgcattccgtaagcaca

SEQ ID NO: 3230608 - DNA, 25 bp, Homo sapien
gatacgtagactggatacttccgca

SEQ ID NO: 3230609 - DNA, 25 bp, Homo sapien
cgcattccgtaagcacacacataac

SEQ ID NO: 3230610 - DNA, 25 bp, Homo sapien
tttttatagagatacgtagactgga

SEQ ID NO: 3230611 - DNA, 25 bp, Homo sapien
aatgaggatttggaacggagccagg

SEQ ID NO: 3230612 - DNA, 25 bp, Homo sapien
ttctggtcaaggatggggcaagttt

SEQ ID NO: 3230613 - DNA, 25 bp, Homo sapien
atgaggatttggaacggagccaggg

SEQ ID NO: 3230614 - DNA, 25 bp, Homo sapien
gaatgaggatttggaacggagccag

SEQ ID NO: 3230615 - DNA, 25 bp, Homo sapien
ctttctcacatatcggattcctccc

SEQ ID NO: 3230616 - DNA, 25 bp, Homo sapien
gctgttgttgaactgagatttatag

SEQ ID NO: 3230617 - DNA, 25 bp, Homo sapien
ctgttgttgaactgagatttataga

SEQ ID NO: 3230618 - DNA, 25 bp, Homo sapien
cacatatcggattcctcccttcctc

SEQ ID NO: 3230619 - DNA, 25 bp, Homo sapien
tacgtaagcacacacgcattctttg

SEQ ID NO: 3230620 - DNA, 25 bp, Homo sapien
gcctgcttttttggcaagcgctgtc

SEQ ID NO: 3230621 - DNA, 25 bp, Homo sapien
cttgttcgaatcaaaggcagctgcc

SEQ ID NO: 3230622 - DNA, 25 bp, Homo sapien
ctttgacaaagggtgaaggattaat

SEQ ID NO: 3230623 - DNA, 25 bp, Homo sapien
ccttccagctggcaatgaaaaagta

SEQ ID NO: 3230624 - DNA, 25 bp, Homo sapien
ttccttccagctggcaatgaaaaag

SEQ ID NO: 3230625 - DNA, 25 bp, Homo sapien
tccagctggcaatgaaaaagtaaag

SEQ ID NO: 3230626 - DNA, 25 bp, Homo sapien
tttccttccagctggcaatgaaaaa

SEQ ID NO: 3230627 - DNA, 25 bp, Homo sapien
ttaatgttcctcaatgaattctcat

SEQ ID NO: 3230628 - DNA, 25 bp, Homo sapien
aattctcatttacttctaagagtcg

SEQ ID NO: 3230629 - DNA, 25 bp, Homo sapien
ctaagagtcgtttttgtagacccat

SEQ ID NO: 3230630 - DNA, 25 bp, Homo sapien
catccaaaaacgcttaatgttcctc

SEQ ID NO: 3230631 - DNA, 25 bp, Homo sapien
gggaaagttgaccatatgattgggc

SEQ ID NO: 3230632 - DNA, 25 bp, Homo sapien
atcttccaacagcattcgcagctct

SEQ ID NO: 3230633 - DNA, 25 bp, Homo sapien
cagcattcgcagctctgattctgag

SEQ ID NO: 3230634 - DNA, 25 bp, Homo sapien
gccaaattccaccataactactgat

SEQ ID NO: 3230635 - DNA, 25 bp, Homo sapien
gtgcttgtaaccggtcgctttcctg

SEQ ID NO: 3230636 - DNA, 25 bp, Homo sapien
cattcaaattactggttttaataat

SEQ ID NO: 3230637 - DNA, 25 bp, Homo sapien
tttgtgcttgtaaccggtcgctttc

SEQ ID NO: 3230638 - DNA, 25 bp, Homo sapien
tgcaatttaattgcattcaaattac

SEQ ID NO: 3230639 - DNA, 25 bp, Homo sapien
ttcttcaatagtaaactctccttta

SEQ ID NO: 3230640 - DNA, 25 bp, Homo sapien
tcttcaatagtaaactctcctttac

SEQ ID NO: 3230641 - DNA, 25 bp, Homo sapien
tcacacaattgctgcttttaaccaa

SEQ ID NO: 3230642 - DNA, 25 bp, Homo sapien
ttaaccaatgcagttgcatttcttc

SEQ ID NO: 3230643 - DNA, 25 bp, Homo sapien
cataattagattgccgactcctact

SEQ ID NO: 3230644 - DNA, 25 bp, Homo sapien
ttccataattagattgccgactcct

SEQ ID NO: 3230645 - DNA, 25 bp, Homo sapien
ttagattgccgactcctactgtcag

SEQ ID NO: 3230646 - DNA, 25 bp, Homo sapien
aattagattgccgactcctactgtc

SEQ ID NO: 3230647 - DNA, 25 bp, Homo sapien
cgtctgagatctttacctgctagaa

SEQ ID NO: 3230648 - DNA, 25 bp, Homo sapien
gagtttgtcgtctgagatctttacc

SEQ ID NO: 3230649 - DNA, 25 bp, Homo sapien
aactttctgaaagctgagtttgtcg

SEQ ID NO: 3230650 - DNA, 25 bp, Homo sapien
aaagctgagtttgtcgtctgagatc

SEQ ID NO: 3230651 - DNA, 25 bp, Homo sapien
tgtcacgaatggttcctgtcatctt

SEQ ID NO: 3230652 - DNA, 25 bp, Homo sapien
tactcatgaaatcgaacaaaaacag

SEQ ID NO: 3230653 - DNA, 25 bp, Homo sapien
gttttcttggatgtgatcctgatcc

SEQ ID NO: 3230654 - DNA, 25 bp, Homo sapien
tatttgatccaaattgtcacgaatg

SEQ ID NO: 3230655 - DNA, 25 bp, Homo sapien
cttgtgctcatagccagacctcagc

SEQ ID NO: 3230656 - DNA, 25 bp, Homo sapien
ctgagattgcagaaaccctgagttc

SEQ ID NO: 3230657 - DNA, 25 bp, Homo sapien
tgttttctgaacaccaaaccttgtg

SEQ ID NO: 3230658 - DNA, 25 bp, Homo sapien
cgctgagattgcagaaaccctgagt

SEQ ID NO: 3230659 - DNA, 25 bp, Homo sapien
aaattcaattccaaggttgcttgct

SEQ ID NO: 3230660 - DNA, 25 bp, Homo sapien
ggaaattcaattccaaggttgcttg

SEQ ID NO: 3230661 - DNA, 25 bp, Homo sapien
attcaattccaaggttgcttgcttt

SEQ ID NO: 3230662 - DNA, 25 bp, Homo sapien
tgctcacatgtttgaaggctctctg

SEQ ID NO: 3230663 - DNA, 25 bp, Homo sapien
cagggtgacaagatcaagagagagt

SEQ ID NO: 3230664 - DNA, 25 bp, Homo sapien
tctttttcttctagccccagggtga

SEQ ID NO: 3230665 - DNA, 25 bp, Homo sapien
agccccagggtgacaagatcaagag

SEQ ID NO: 3230666 - DNA, 25 bp, Homo sapien
cccagggtgacaagatcaagagaga

SEQ ID NO: 3230667 - DNA, 25 bp, Homo sapien
tcaaagacgaatgggcaatgacatt

SEQ ID NO: 3230668 - DNA, 25 bp, Homo sapien
tgtgaacagctgttggaacaattgt

SEQ ID NO: 3230669 - DNA, 25 bp, Homo sapien
gctaagtggcccctttatatggtga

SEQ ID NO: 3230670 - DNA, 25 bp, Homo sapien
tcccaactggaagtgcataagctca

SEQ ID NO: 3230671 - DNA, 25 bp, Homo sapien
tgagtgcaatcgaatgaacaaatgt

SEQ ID NO: 3230672 - DNA, 25 bp, Homo sapien
taaatgtgcagactgaagcgtagtc

SEQ ID NO: 3230673 - DNA, 25 bp, Homo sapien
tgtaaccaatctggccactccacat

SEQ ID NO: 3230674 - DNA, 25 bp, Homo sapien
tagcttgctgcagtttaattttctg

SEQ ID NO: 3230675 - DNA, 25 bp, Homo sapien
ttacactctggctccccggagagga

SEQ ID NO: 3230676 - DNA, 25 bp, Homo sapien
tctcgttgtgttacactctggctcc

SEQ ID NO: 3230677 - DNA, 25 bp, Homo sapien
tgtgttacactctggctccccggag

SEQ ID NO: 3230678 - DNA, 25 bp, Homo sapien
cgttgtgttacactctggctccccg

SEQ ID NO: 3230679 - DNA, 25 bp, Homo sapien
cattgtacgaatggcacctaaccct

SEQ ID NO: 3230680 - DNA, 25 bp, Homo sapien
tacggtaagcattctcccttggaga

SEQ ID NO: 3230681 - DNA, 25 bp, Homo sapien
taaaactctgaaggcatccaaaact

SEQ ID NO: 3230682 - DNA, 25 bp, Homo sapien
tccctgcataggttatccaagacat

SEQ ID NO: 3230683 - DNA, 25 bp, Homo sapien
tgtaagctaccctgaaggcccagga

SEQ ID NO: 3230684 - DNA, 25 bp, Homo sapien
ccaggacatgggcactttacaagta

SEQ ID NO: 3230685 - DNA, 25 bp, Homo sapien
tataccaagatagaatgtgaggcac

SEQ ID NO: 3230686 - DNA, 25 bp, Homo sapien
tgggcactttacaagtataccaaga

SEQ ID NO: 3230687 - DNA, 25 bp, Homo sapien
ccctgaatatctgtgccaactcaga

SEQ ID NO: 3230688 - DNA, 25 bp, Homo sapien
tacctggatctaggtgaagactcca

SEQ ID NO: 3230689 - DNA, 25 bp, Homo sapien
taatggacctagtagcttcactggt

SEQ ID NO: 3230690 - DNA, 25 bp, Homo sapien
gttcatcaggtggaataatggacct

SEQ ID NO: 3230691 - DNA, 25 bp, Homo sapien
ggatattatagtggccacccctgca

SEQ ID NO: 3230692 - DNA, 25 bp, Homo sapien
ttcagggtcagactgataaattagg

SEQ ID NO: 3230693 - DNA, 25 bp, Homo sapien
actgagggtgacagtaatctctgcc

SEQ ID NO: 3230694 - DNA, 25 bp, Homo sapien
tccctctggcatgtactctactttg

SEQ ID NO: 3230695 - DNA, 25 bp, Homo sapien
actgtggcaatgattcctccgatct

SEQ ID NO: 3230696 - DNA, 25 bp, Homo sapien
tccgatctcagtcagcattgctgtg

SEQ ID NO: 3230697 - DNA, 25 bp, Homo sapien
tcctccgatctcagtcagcattgct

SEQ ID NO: 3230698 - DNA, 25 bp, Homo sapien
aatgattcctccgatctcagtcagc

SEQ ID NO: 3230699 - DNA, 25 bp, Homo sapien
taacctggactttaacaggctcctg

SEQ ID NO: 3230700 - DNA, 25 bp, Homo sapien
aacctggactttaacaggctcctgc

SEQ ID NO: 3230701 - DNA, 25 bp, Homo sapien
ctggactttaacaggctcctgctct

SEQ ID NO: 3230702 - DNA, 25 bp, Homo sapien
tgctctgcttgtactgggggcgggt

SEQ ID NO: 3230703 - DNA, 25 bp, Homo sapien
ctttaatagtggtacacttttgtga

SEQ ID NO: 3230704 - DNA, 25 bp, Homo sapien
cttttgtgatgagtcacttgttcct

SEQ ID NO: 3230705 - DNA, 25 bp, Homo sapien
taatagtggtacacttttgtgatga

SEQ ID NO: 3230706 - DNA, 25 bp, Homo sapien
cacttttgtgatgagtcacttgttc

SEQ ID NO: 3230707 - DNA, 25 bp, Homo sapien
gacgacacttgtcatctgctggccc

SEQ ID NO: 3230708 - DNA, 25 bp, Homo sapien
tatgggccctcaaaaacccagaagc

SEQ ID NO: 3230709 - DNA, 25 bp, Homo sapien
agctttggtcttctcagacgacact

SEQ ID NO: 3230710 - DNA, 25 bp, Homo sapien
ctgaacgatgttatgggccctcaaa

SEQ ID NO: 3230711 - DNA, 25 bp, Homo sapien
gattctcatggagccagcggtttct

SEQ ID NO: 3230712 - DNA, 25 bp, Homo sapien
cagcggtttctattctctgacagga

SEQ ID NO: 3230713 - DNA, 25 bp, Homo sapien
gtctgagagtgatcctgagtccttg

SEQ ID NO: 3230714 - DNA, 25 bp, Homo sapien
attgccacccacgtttctcctagtg

SEQ ID NO: 3230715 - DNA, 25 bp, Homo sapien
atgttggtcctcttcaggcgagtgt

SEQ ID NO: 3230716 - DNA, 25 bp, Homo sapien
gagggacacccatggagccagatca

SEQ ID NO: 3230717 - DNA, 25 bp, Homo sapien
aggagggacacccatggagccagat

SEQ ID NO: 3230718 - DNA, 25 bp, Homo sapien
cttcaggcgagtgtgagcttcagga

SEQ ID NO: 3230719 - DNA, 25 bp, Homo sapien
catacataagggctctattcagaca

SEQ ID NO: 3230720 - DNA, 25 bp, Homo sapien
tgcccagcatacataagggctctat

SEQ ID NO: 3230721 - DNA, 25 bp, Homo sapien
aatatgcccagcatacataagggct

SEQ ID NO: 3230722 - DNA, 25 bp, Homo sapien
cagcatacataagggctctattcag

SEQ ID NO: 3230723 - DNA, 25 bp, Homo sapien
cctaaatctgtgaggaccttgtcat

SEQ ID NO: 3230724 - DNA, 25 bp, Homo sapien
ccttggctgtctagatatgaatagt

SEQ ID NO: 3230725 - DNA, 25 bp, Homo sapien
tgtgaggaccttgtcattgattgta

SEQ ID NO: 3230726 - DNA, 25 bp, Homo sapien
gtcattgattgtaccttggctgtct

SEQ ID NO: 3230727 - DNA, 25 bp, Homo sapien
atgcatggctctttgagaaccttgg

SEQ ID NO: 3230728 - DNA, 25 bp, Homo sapien
ctttgagaaccttgggttgatctct

SEQ ID NO: 3230729 - DNA, 25 bp, Homo sapien
ccttatttactcctgtgagctggag

SEQ ID NO: 3230730 - DNA, 25 bp, Homo sapien
ctcccttatttactcctgtgagctg

SEQ ID NO: 3230731 - DNA, 25 bp, Homo sapien
ccactggctctcagtggattttgtg

SEQ ID NO: 3230732 - DNA, 25 bp, Homo sapien
ggatttcctgatgcacggtttctgt

SEQ ID NO: 3230733 - DNA, 25 bp, Homo sapien
aggatttcctgatgcacggtttctg

SEQ ID NO: 3230734 - DNA, 25 bp, Homo sapien
gatttcctgatgcacggtttctgtc

SEQ ID NO: 3230735 - DNA, 25 bp, Homo sapien
tcaggatgatagagcccatggattt

SEQ ID NO: 3230736 - DNA, 25 bp, Homo sapien
aggatgatagagcccatggattttc

SEQ ID NO: 3230737 - DNA, 25 bp, Homo sapien
caggatgatagagcccatggatttt

SEQ ID NO: 3230738 - DNA, 25 bp, Homo sapien
atcatgtgactgctatttcgaactt

SEQ ID NO: 3230739 - DNA, 25 bp, Homo sapien
gactgctatttcgaactttggcaga

SEQ ID NO: 3230740 - DNA, 25 bp, Homo sapien
ctatttcgaactttggcagaaactg

SEQ ID NO: 3230741 - DNA, 25 bp, Homo sapien
tgtgactgctatttcgaactttggc

SEQ ID NO: 3230742 - DNA, 25 bp, Homo sapien
caacatttggaggtagccggtgagc

SEQ ID NO: 3230743 - DNA, 25 bp, Homo sapien
ccggtgagcactgccatttctttta

SEQ ID NO: 3230744 - DNA, 25 bp, Homo sapien
taagtgtacttgtgagtatttcaac

SEQ ID NO: 3230745 - DNA, 25 bp, Homo sapien
tatttagtaagtgtacttgtgagta

SEQ ID NO: 3230746 - DNA, 25 bp, Homo sapien
tggttaccttccttccctccattca

SEQ ID NO: 3230747 - DNA, 25 bp, Homo sapien
tgcaagtagcaagctgtgctgcatt

SEQ ID NO: 3230748 - DNA, 25 bp, Homo sapien
gaacctttcagagtgcttgatgata

SEQ ID NO: 3230749 - DNA, 25 bp, Homo sapien
tcagtgactgtttaggtcatcaatc

SEQ ID NO: 3230750 - DNA, 25 bp, Homo sapien
caggtaaagctttgccctttggcta

SEQ ID NO: 3230751 - DNA, 25 bp, Homo sapien
ggaaggcgaggcaccagttactgat

SEQ ID NO: 3230752 - DNA, 25 bp, Homo sapien
caccagttactgatacgtatgtctg

SEQ ID NO: 3230753 - DNA, 25 bp, Homo sapien
cagaatagcagcctgttaggcggcg

SEQ ID NO: 3230754 - DNA, 25 bp, Homo sapien
actgatacgtatgtctgagagcgag

SEQ ID NO: 3230755 - DNA, 25 bp, Homo sapien
gcgggaaacatccagagcgggctca

SEQ ID NO: 3230756 - DNA, 25 bp, Homo sapien
cgggaaacatccagagcgggctcac

SEQ ID NO: 3230757 - DNA, 25 bp, Homo sapien
agcgggaaacatccagagcgggctc

SEQ ID NO: 3230758 - DNA, 25 bp, Homo sapien
tcagcgggaaacatccagagcgggc

SEQ ID NO: 3230759 - DNA, 25 bp, Homo sapien
gcatctcggagattcactccattcc

SEQ ID NO: 3230760 - DNA, 25 bp, Homo sapien
tcacatctgatggagcatctcggag

SEQ ID NO: 3230761 - DNA, 25 bp, Homo sapien
cttcacagggagaatacatcttcac

SEQ ID NO: 3230762 - DNA, 25 bp, Homo sapien
gcttttgtaagcatgtgtggggtca

SEQ ID NO: 3230763 - DNA, 25 bp, Homo sapien
ctccgtaccctgcgtgctcctaggg

SEQ ID NO: 3230764 - DNA, 25 bp, Homo sapien
tccgtaccctgcgtgctcctaggga

SEQ ID NO: 3230765 - DNA, 25 bp, Homo sapien
cgtaccctgcgtgctcctagggacg

SEQ ID NO: 3230766 - DNA, 25 bp, Homo sapien
taccctgcgtgctcctagggacgcc

SEQ ID NO: 3230767 - DNA, 25 bp, Homo sapien
ttgtggtaaagtaatttgtgtacat

SEQ ID NO: 3230768 - DNA, 25 bp, Homo sapien
cttgtggtaaagtaatttgtgtaca

SEQ ID NO: 3230769 - DNA, 25 bp, Homo sapien
tgtggtaaagtaatttgtgtacatt

SEQ ID NO: 3230770 - DNA, 25 bp, Homo sapien
tgtgcaactcaacgctgcgcgggca

SEQ ID NO: 3230771 - DNA, 25 bp, Homo sapien
taccgctgtgcaactcaacgctgcg

SEQ ID NO: 3230772 - DNA, 25 bp, Homo sapien
gagaataccgctgtgcaactcaacg

SEQ ID NO: 3230773 - DNA, 25 bp, Homo sapien
ctggtgagaataccgctgtgcaact

SEQ ID NO: 3230774 - DNA, 25 bp, Homo sapien
cactgtggcccaccgattgcagggc

SEQ ID NO: 3230775 - DNA, 25 bp, Homo sapien
ggccggcactgtggcccaccgattg

SEQ ID NO: 3230776 - DNA, 25 bp, Homo sapien
ggcactgtggcccaccgattgcagg

SEQ ID NO: 3230777 - DNA, 25 bp, Homo sapien
tgtggccggcactgtggcccaccga

SEQ ID NO: 3230778 - DNA, 25 bp, Homo sapien
tcagagtacagcctggtccttccac

SEQ ID NO: 3230779 - DNA, 25 bp, Homo sapien
gagaccacaaccgtggaggctgcga

SEQ ID NO: 3230780 - DNA, 25 bp, Homo sapien
gggagcacccgcgcgcgaatcttct

SEQ ID NO: 3230781 - DNA, 25 bp, Homo sapien
gccctgcagactccgcagagcgctt

SEQ ID NO: 3230782 - DNA, 25 bp, Homo sapien
taaacaggctcaagacattctggct

SEQ ID NO: 3230783 - DNA, 25 bp, Homo sapien
gctcaagacattctggctggaatca

SEQ ID NO: 3230784 - DNA, 25 bp, Homo sapien
cattctggctggaatcattattcag

SEQ ID NO: 3230785 - DNA, 25 bp, Homo sapien
tggctggaatcattattcagtgcag

SEQ ID NO: 3230786 - DNA, 25 bp, Homo sapien
tggtccaaagtacataaagagctcc

SEQ ID NO: 3230787 - DNA, 25 bp, Homo sapien
cttttggtccaaagtacataaagag

SEQ ID NO: 3230788 - DNA, 25 bp, Homo sapien
taaagcttttggtccaaagtacata

SEQ ID NO: 3230789 - DNA, 25 bp, Homo sapien
cataaagagctccttccccaaagtt

SEQ ID NO: 3230790 - DNA, 25 bp, Homo sapien
tgatgaatttaaagacgtaggaccc

SEQ ID NO: 3230791 - DNA, 25 bp, Homo sapien
ctgatgaatttaaagacgtaggacc

SEQ ID NO: 3230792 - DNA, 25 bp, Homo sapien
aacaggtctctgtcgttttctcaga

SEQ ID NO: 3230793 - DNA, 25 bp, Homo sapien
tagatccatcagtatccaagctggg

SEQ ID NO: 3230794 - DNA, 25 bp, Homo sapien
gattcagaaatggacacctgtccca

SEQ ID NO: 3230795 - DNA, 25 bp, Homo sapien
ccaagggtgggcattaacctgttca

SEQ ID NO: 3230796 - DNA, 25 bp, Homo sapien
ttatactcaagtggattaatcatga

SEQ ID NO: 3230797 - DNA, 25 bp, Homo sapien
tgagttctactgatgagtcaaagaa

SEQ ID NO: 3230798 - DNA, 25 bp, Homo sapien
gctgcacttccaaaacaggagaagc

SEQ ID NO: 3230799 - DNA, 25 bp, Homo sapien
tgatgaagcctttcattccgaaatg

SEQ ID NO: 3230800 - DNA, 25 bp, Homo sapien
tactccaggcaatacgttctgatcc

SEQ ID NO: 3230801 - DNA, 25 bp, Homo sapien
cattagcacatcacctagcatccgg

SEQ ID NO: 3230802 - DNA, 25 bp, Homo sapien
tttgatgatgttccctactccaggc

SEQ ID NO: 3230803 - DNA, 25 bp, Homo sapien
actttctgctctcaagaaactaaat

SEQ ID NO: 3230804 - DNA, 25 bp, Homo sapien
cacaagcgtgtgcagaacatgtact

SEQ ID NO: 3230805 - DNA, 25 bp, Homo sapien
catgtacttaatatgccagagagag

SEQ ID NO: 3230806 - DNA, 25 bp, Homo sapien
gtgagttagttcattcacatattcc

SEQ ID NO: 3230807 - DNA, 25 bp, Homo sapien
caaatattaatatctaatgcctacc

SEQ ID NO: 3230808 - DNA, 25 bp, Homo sapien
caacagcagcttctaatgtcaccaa

SEQ ID NO: 3230809 - DNA, 25 bp, Homo sapien
cagcagcttctaatgtcaccaacag

SEQ ID NO: 3230810 - DNA, 25 bp, Homo sapien
tccacaacagcagcttctaatgtca

SEQ ID NO: 3230811 - DNA, 25 bp, Homo sapien
cacaacagcagcttctaatgtcacc

SEQ ID NO: 3230812 - DNA, 25 bp, Homo sapien
aactcatgtcttgccctggaatccc

SEQ ID NO: 3230813 - DNA, 25 bp, Homo sapien
tggaatcccctctagcaagccaata

SEQ ID NO: 3230814 - DNA, 25 bp, Homo sapien
tattttcccttcactccggcctatg

SEQ ID NO: 3230815 - DNA, 25 bp, Homo sapien
taaaataaccaactcatgtcttgcc

SEQ ID NO: 3230816 - DNA, 25 bp, Homo sapien
cattttcatgaggtgatggatctgt

SEQ ID NO: 3230817 - DNA, 25 bp, Homo sapien
atgctgaaatcacgtatcattttca

SEQ ID NO: 3230818 - DNA, 25 bp, Homo sapien
tcattttcatgaggtgatggatctg

SEQ ID NO: 3230819 - DNA, 25 bp, Homo sapien
gaatgctgaaatcacgtatcatttt

SEQ ID NO: 3230820 - DNA, 25 bp, Homo sapien
ttctgttattgtccccaaagcggca

SEQ ID NO: 3230821 - DNA, 25 bp, Homo sapien
ggcactgaccacaattaggacgctt

SEQ ID NO: 3230822 - DNA, 25 bp, Homo sapien
cagttattctgcagtggcactgacc

SEQ ID NO: 3230823 - DNA, 25 bp, Homo sapien
taggacgcttgtaaaccttatagtg

SEQ ID NO: 3230824 - DNA, 25 bp, Homo sapien
ttggaatgcttcaatcaacagcact

SEQ ID NO: 3230825 - DNA, 25 bp, Homo sapien
agttggaatgcttcaatcaacagca

SEQ ID NO: 3230826 - DNA, 25 bp, Homo sapien
atcaacagcactgtgccgacagcct

SEQ ID NO: 3230827 - DNA, 25 bp, Homo sapien
gcttcaatcaacagcactgtgccga

SEQ ID NO: 3230828 - DNA, 25 bp, Homo sapien
tctgagatgatagctgaatctggta

SEQ ID NO: 3230829 - DNA, 25 bp, Homo sapien
cagaaatggtctgagatgatagctg

SEQ ID NO: 3230830 - DNA, 25 bp, Homo sapien
aatggtctgagatgatagctgaatc

SEQ ID NO: 3230831 - DNA, 25 bp, Homo sapien
ctgaatctggtagtattcgccatca

SEQ ID NO: 3230832 - DNA, 25 bp, Homo sapien
ttttgttccttacatataattacac

SEQ ID NO: 3230833 - DNA, 25 bp, Homo sapien
aaggtaaccttgtctcctgtgacat

SEQ ID NO: 3230834 - DNA, 25 bp, Homo sapien
ccttacatataattacactagtttt

SEQ ID NO: 3230835 - DNA, 25 bp, Homo sapien
gttccttacatataattacactagt

SEQ ID NO: 3230836 - DNA, 25 bp, Homo sapien
aatcattgttattattgccttgttc

SEQ ID NO: 3230837 - DNA, 25 bp, Homo sapien
cattgttattattgccttgttcttg

SEQ ID NO: 3230838 - DNA, 25 bp, Homo sapien
tcattgttattattgccttgttctt

SEQ ID NO: 3230839 - DNA, 25 bp, Homo sapien
ttaatcattgttattattgccttgt

SEQ ID NO: 3230840 - DNA, 25 bp, Homo sapien
caccctgctagatgtccaactgatt

SEQ ID NO: 3230841 - DNA, 25 bp, Homo sapien
cctgctagatgtccaactgattata

SEQ ID NO: 3230842 - DNA, 25 bp, Homo sapien
gatccaccctgctagatgtccaact

SEQ ID NO: 3230843 - DNA, 25 bp, Homo sapien
acatgatccaccctgctagatgtcc

SEQ ID NO: 3230844 - DNA, 25 bp, Homo sapien
cacatgccttagaagagggcttatt

SEQ ID NO: 3230845 - DNA, 25 bp, Homo sapien
agcatcacatgccttagaagagggc

SEQ ID NO: 3230846 - DNA, 25 bp, Homo sapien
attgattaaagtacacaccacacag

SEQ ID NO: 3230847 - DNA, 25 bp, Homo sapien
ccacacaggtccagtgctcttccga

SEQ ID NO: 3230848 - DNA, 25 bp, Homo sapien
catggtttacatgtgaaaactggca

SEQ ID NO: 3230849 - DNA, 25 bp, Homo sapien
cctgactttgtataattaaccctct

SEQ ID NO: 3230850 - DNA, 25 bp, Homo sapien
tgaataattcattagaaacagtaga

SEQ ID NO: 3230851 - DNA, 25 bp, Homo sapien
tgttatagcacaaacatgctttccc

SEQ ID NO: 3230852 - DNA, 25 bp, Homo sapien
caagagttgtagttccaaatgcagt

SEQ ID NO: 3230853 - DNA, 25 bp, Homo sapien
ttacacgggtacttcattaagtggc

SEQ ID NO: 3230854 - DNA, 25 bp, Homo sapien
tatccagggttgcagcttttaagct

SEQ ID NO: 3230855 - DNA, 25 bp, Homo sapien
taagctctggtgatgagtattgggc

SEQ ID NO: 3230856 - DNA, 25 bp, Homo sapien
ttaaagaccaaggttaaaagcatca

SEQ ID NO: 3230857 - DNA, 25 bp, Homo sapien
tttaaggtacgagggccatctgtca

SEQ ID NO: 3230858 - DNA, 25 bp, Homo sapien
ctgtcaggatttaaggtacgagggc

SEQ ID NO: 3230859 - DNA, 25 bp, Homo sapien
tcaggatttaaggtacgagggccat

SEQ ID NO: 3230860 - DNA, 25 bp, Homo sapien
gatttaaggtacgagggccatctgt

SEQ ID NO: 3230861 - DNA, 25 bp, Homo sapien
gtgcttctctaggtagaggacaggc

SEQ ID NO: 3230862 - DNA, 25 bp, Homo sapien
ccacattgtgcttctctaggtagag

SEQ ID NO: 3230863 - DNA, 25 bp, Homo sapien
atccttccccacaactcggagaatg

SEQ ID NO: 3230864 - DNA, 25 bp, Homo sapien
aatgcagaggcggttgtgtttactg

SEQ ID NO: 3230865 - DNA, 25 bp, Homo sapien
tttctgcccactggaaaaaattgca

SEQ ID NO: 3230866 - DNA, 25 bp, Homo sapien
tggttgcagaatgggaaggacaaat

SEQ ID NO: 3230867 - DNA, 25 bp, Homo sapien
tgttaggtccaatcttcaatactgt

SEQ ID NO: 3230868 - DNA, 25 bp, Homo sapien
tgttttcatggtggaacgcttgcca

SEQ ID NO: 3230869 - DNA, 25 bp, Homo sapien
aagaaaagacgtagccaacaatgga

SEQ ID NO: 3230870 - DNA, 25 bp, Homo sapien
catagaacgttcatcaaggcaaaag

SEQ ID NO: 3230871 - DNA, 25 bp, Homo sapien
tccccagttacaagagactaaaagc

SEQ ID NO: 3230872 - DNA, 25 bp, Homo sapien
tgaagagactaaatgccagagaatc

SEQ ID NO: 3230873 - DNA, 25 bp, Homo sapien
tcaatgtggttgatgtgggacaata

SEQ ID NO: 3230874 - DNA, 25 bp, Homo sapien
aagcataaggactaacagatgcagg

SEQ ID NO: 3230875 - DNA, 25 bp, Homo sapien
taaggactaacagatgcaggctctg

SEQ ID NO: 3230876 - DNA, 25 bp, Homo sapien
tgtgggacaatagcaaccgcttccc

SEQ ID NO: 3230877 - DNA, 25 bp, Homo sapien
cattcaaaccatggcttgtgtgaca

SEQ ID NO: 3230878 - DNA, 25 bp, Homo sapien
taaagacatgcaattctgggtacag

SEQ ID NO: 3230879 - DNA, 25 bp, Homo sapien
tgatgcggaccatagtatactccag

SEQ ID NO: 3230880 - DNA, 25 bp, Homo sapien
gaatagcttattcagggtgtgggca

SEQ ID NO: 3230881 - DNA, 25 bp, Homo sapien
aaccatgtgaccctacaatctgctc

SEQ ID NO: 3230882 - DNA, 25 bp, Homo sapien
tccatgcacttgaagccacaatctc

SEQ ID NO: 3230883 - DNA, 25 bp, Homo sapien
tcatggggtgaaaccatgtgaccct

SEQ ID NO: 3230884 - DNA, 25 bp, Homo sapien
tgctcctccagaaacactatatagt

SEQ ID NO: 3230885 - DNA, 25 bp, Homo sapien
gaccaatttgaggatgcaagaccat

SEQ ID NO: 3230886 - DNA, 25 bp, Homo sapien
ccactggagttgaccatggatcaaa

SEQ ID NO: 3230887 - DNA, 25 bp, Homo sapien
cagccccattggaaagcactggaca

SEQ ID NO: 3230888 - DNA, 25 bp, Homo sapien
gctttgaagattttcaccactggag

SEQ ID NO: 3230889 - DNA, 25 bp, Homo sapien
ctataatctttgatggcttcttcat

SEQ ID NO: 3230890 - DNA, 25 bp, Homo sapien
aatctttgatggcttcttcatccat

SEQ ID NO: 3230891 - DNA, 25 bp, Homo sapien
ctttctataatctttgatggcttct

SEQ ID NO: 3230892 - DNA, 25 bp, Homo sapien
ataatctttgatggcttcttcatcc

SEQ ID NO: 3230893 - DNA, 25 bp, Homo sapien
tcatgtcatcaatctctcgatatac

SEQ ID NO: 3230894 - DNA, 25 bp, Homo sapien
taactgcttcatgctcaataaggct

SEQ ID NO: 3230895 - DNA, 25 bp, Homo sapien
ggaaaaccagttatgcctgagacat

SEQ ID NO: 3230896 - DNA, 25 bp, Homo sapien
tatgaagttgttccctgtggcagct

SEQ ID NO: 3230897 - DNA, 25 bp, Homo sapien
aatccatctttactgtcaacatctg

SEQ ID NO: 3230898 - DNA, 25 bp, Homo sapien
ggaaaaagtggactgcatctaatcc

SEQ ID NO: 3230899 - DNA, 25 bp, Homo sapien
gtgctgcttgcaataaactttcaac

SEQ ID NO: 3230900 - DNA, 25 bp, Homo sapien
tagtttcatggtttataattccgaa

SEQ ID NO: 3230901 - DNA, 25 bp, Homo sapien
ctatgctggtgcgttcctttcgaca

SEQ ID NO: 3230902 - DNA, 25 bp, Homo sapien
catgccggtgtgctcctatgctggt

SEQ ID NO: 3230903 - DNA, 25 bp, Homo sapien
agcccctgtattctctgcctatatg

SEQ ID NO: 3230904 - DNA, 25 bp, Homo sapien
ggtatggcggcctgactcttctctg

SEQ ID NO: 3230905 - DNA, 25 bp, Homo sapien
taagaaataacttaataggcccaca

SEQ ID NO: 3230906 - DNA, 25 bp, Homo sapien
aatgccaatcaagtaaatagcctat

SEQ ID NO: 3230907 - DNA, 25 bp, Homo sapien
tacaatcaggtagtaacatcaaatg

SEQ ID NO: 3230908 - DNA, 25 bp, Homo sapien
gaaacacagtaccacaatgctctaa

SEQ ID NO: 3230909 - DNA, 25 bp, Homo sapien
agctatcattgtacctttgaatagc

SEQ ID NO: 3230910 - DNA, 25 bp, Homo sapien
tatcattgtacctttgaatagccac

SEQ ID NO: 3230911 - DNA, 25 bp, Homo sapien
tgagctatcattgtacctttgaata

SEQ ID NO: 3230912 - DNA, 25 bp, Homo sapien
agtgagctatcattgtacctttgaa

SEQ ID NO: 3230913 - DNA, 25 bp, Homo sapien
ccacatggcaacattccagggccat

SEQ ID NO: 3230914 - DNA, 25 bp, Homo sapien
cattccagggccattcatactatac

SEQ ID NO: 3230915 - DNA, 25 bp, Homo sapien
ggagataagggtttactgccacatg

SEQ ID NO: 3230916 - DNA, 25 bp, Homo sapien
ctatttgcgttcatgggtcttggct

SEQ ID NO: 3230917 - DNA, 25 bp, Homo sapien
tactgttagccccagttagtccagg

SEQ ID NO: 3230918 - DNA, 25 bp, Homo sapien
taataatttccgtgaaatcaaggcc

SEQ ID NO: 3230919 - DNA, 25 bp, Homo sapien
gcttatattgctactgttagcccca

SEQ ID NO: 3230920 - DNA, 25 bp, Homo sapien
ccccagttagtccagggaatggaat

SEQ ID NO: 3230921 - DNA, 25 bp, Homo sapien
tttcatcgagtcaaaagcacgtgct

SEQ ID NO: 3230922 - DNA, 25 bp, Homo sapien
gagtcacgtcgtagggtcttctaaa

SEQ ID NO: 3230923 - DNA, 25 bp, Homo sapien
gcaatcggatgaaggtgaggccact

SEQ ID NO: 3230924 - DNA, 25 bp, Homo sapien
ctctctcaaagatcagggtgctgta

SEQ ID NO: 3230925 - DNA, 25 bp, Homo sapien
tgcactgattggaaatgtgtggact

SEQ ID NO: 3230926 - DNA, 25 bp, Homo sapien
acagccattaacattcgttagcaaa

SEQ ID NO: 3230927 - DNA, 25 bp, Homo sapien
aaatgtgtggactggcatacagcca

SEQ ID NO: 3230928 - DNA, 25 bp, Homo sapien
ttaacattcgttagcaaaattagat

SEQ ID NO: 3230929 - DNA, 25 bp, Homo sapien
tccaaccctatggacctgggtgagg

SEQ ID NO: 3230930 - DNA, 25 bp, Homo sapien
gaaaagtcaattagcttgcccaagg

SEQ ID NO: 3230931 - DNA, 25 bp, Homo sapien
gcccaaggttacaaataaggttgca

SEQ ID NO: 3230932 - DNA, 25 bp, Homo sapien
catgtacacagagacattttactga

SEQ ID NO: 3230933 - DNA, 25 bp, Homo sapien
cgatatcatacgctattgaagcaga

SEQ ID NO: 3230934 - DNA, 25 bp, Homo sapien
gaacagagctttagaggcttcagcg

SEQ ID NO: 3230935 - DNA, 25 bp, Homo sapien
gcctccaaagtcagggttccgatat

SEQ ID NO: 3230936 - DNA, 25 bp, Homo sapien
tatatttcaggatgtctgaagcctc

SEQ ID NO: 3230937 - DNA, 25 bp, Homo sapien
taagtctaggtgtatgttgaccaga

SEQ ID NO: 3230938 - DNA, 25 bp, Homo sapien
tcaatctagtagctcactggcagct

SEQ ID NO: 3230939 - DNA, 25 bp, Homo sapien
gggttgcatacttgtacaagctatc

SEQ ID NO: 3230940 - DNA, 25 bp, Homo sapien
gattctgcgtgcttaaaatctcagg

SEQ ID NO: 3230941 - DNA, 25 bp, Homo sapien
tgttgacttttatccttccctatca

SEQ ID NO: 3230942 - DNA, 25 bp, Homo sapien
agcagttgagtggtataaactgttg

SEQ ID NO: 3230943 - DNA, 25 bp, Homo sapien
ttaaaagcagttgagtggtataaac

SEQ ID NO: 3230944 - DNA, 25 bp, Homo sapien
tccctatcatgagttgcttattctt

SEQ ID NO: 3230945 - DNA, 25 bp, Homo sapien
atccacacaaaggttttccaaagca

SEQ ID NO: 3230946 - DNA, 25 bp, Homo sapien
gattagttagatagagtatccacac

SEQ ID NO: 3230947 - DNA, 25 bp, Homo sapien
tttccaaagcaccaccagagtagct

SEQ ID NO: 3230948 - DNA, 25 bp, Homo sapien
tagtcacaggctgctgattggtatg

SEQ ID NO: 3230949 - DNA, 25 bp, Homo sapien
tgtgatggtcagagtggtgtatggt

SEQ ID NO: 3230950 - DNA, 25 bp, Homo sapien
tgatggtcagagtggtgtatggtgt

SEQ ID NO: 3230951 - DNA, 25 bp, Homo sapien
gatggtcagagtggtgtatggtgtt

SEQ ID NO: 3230952 - DNA, 25 bp, Homo sapien
tggtcagagtggtgtatggtgttac

SEQ ID NO: 3230953 - DNA, 25 bp, Homo sapien
tccagatcatctttaagcaggcaaa

SEQ ID NO: 3230954 - DNA, 25 bp, Homo sapien
caacaatatcatggagagacctgca

SEQ ID NO: 3230955 - DNA, 25 bp, Homo sapien
agttgggcggttgctcagtaattca

SEQ ID NO: 3230956 - DNA, 25 bp, Homo sapien
tatattctattgtgagtctgagctg

SEQ ID NO: 3230957 - DNA, 25 bp, Homo sapien
taaactactaagctagaagagtcca

SEQ ID NO: 3230958 - DNA, 25 bp, Homo sapien
tattgtatgtccagatcccaagccc

SEQ ID NO: 3230959 - DNA, 25 bp, Homo sapien
gctgatggtgcagaactagactgta

SEQ ID NO: 3230960 - DNA, 25 bp, Homo sapien
ggattggtcacattccattgcgtga

SEQ ID NO: 3230961 - DNA, 25 bp, Homo sapien
aacagtttagagaatgtgattatag

SEQ ID NO: 3230962 - DNA, 25 bp, Homo sapien
attcaacagtttagagaatgtgatt

SEQ ID NO: 3230963 - DNA, 25 bp, Homo sapien
caacagtttagagaatgtgattata

SEQ ID NO: 3230964 - DNA, 25 bp, Homo sapien
cacatggcatcaccacattcgaaga

SEQ ID NO: 3230965 - DNA, 25 bp, Homo sapien
ttccacatggcatcaccacattcga

SEQ ID NO: 3230966 - DNA, 25 bp, Homo sapien
catggcatcaccacattcgaagagc

SEQ ID NO: 3230967 - DNA, 25 bp, Homo sapien
atggcatcaccacattcgaagagcc

SEQ ID NO: 3230968 - DNA, 25 bp, Homo sapien
gcaaggtctaccatcaatagaacaa

SEQ ID NO: 3230969 - DNA, 25 bp, Homo sapien
tagtttggtccagtgtcttgaagca

SEQ ID NO: 3230970 - DNA, 25 bp, Homo sapien
taatgggaacattctgtcactttca

SEQ ID NO: 3230971 - DNA, 25 bp, Homo sapien
tataggaaagcatcacgcaaggtct

SEQ ID NO: 3230972 - DNA, 25 bp, Homo sapien
tctttctgtccctttgtttctcatt

SEQ ID NO: 3230973 - DNA, 25 bp, Homo sapien
atctttctgtccctttgtttctcat

SEQ ID NO: 3230974 - DNA, 25 bp, Homo sapien
cactgcgaccagcccattttgtctc

SEQ ID NO: 3230975 - DNA, 25 bp, Homo sapien
tgcgaccagcccattttgtctctct

SEQ ID NO: 3230976 - DNA, 25 bp, Homo sapien
tagacagaattgaccaccagggaga

SEQ ID NO: 3230977 - DNA, 25 bp, Homo sapien
tagagtcctgtctcgggctgctgac

SEQ ID NO: 3230978 - DNA, 25 bp, Homo sapien
gctaagggccaggaccccttctgaa

SEQ ID NO: 3230979 - DNA, 25 bp, Homo sapien
tgaaatgaggatcttataacccaca

SEQ ID NO: 3230980 - DNA, 25 bp, Homo sapien
caaagcaactatgtaaaacagttac

SEQ ID NO: 3230981 - DNA, 25 bp, Homo sapien
tagccactctaaacaaacccagaag

SEQ ID NO: 3230982 - DNA, 25 bp, Homo sapien
cacccggccatatctcttgagtact

SEQ ID NO: 3230983 - DNA, 25 bp, Homo sapien
cccagaagcctaaattactgacaca

SEQ ID NO: 3230984 - DNA, 25 bp, Homo sapien
tgctttaggaaagaactctgtatga

SEQ ID NO: 3230985 - DNA, 25 bp, Homo sapien
ggaaagaactctgtatgatacttgt

SEQ ID NO: 3230986 - DNA, 25 bp, Homo sapien
taggaaagaactctgtatgatactt

SEQ ID NO: 3230987 - DNA, 25 bp, Homo sapien
ttaggaaagaactctgtatgatact

SEQ ID NO: 3230988 - DNA, 25 bp, Homo sapien
agatgagagcttttaaagaggtcat

SEQ ID NO: 3230989 - DNA, 25 bp, Homo sapien
ttggaaatgagatgagagcttttaa

SEQ ID NO: 3230990 - DNA, 25 bp, Homo sapien
tccttttggaaatgagatgagagct

SEQ ID NO: 3230991 - DNA, 25 bp, Homo sapien
aatgagatgagagcttttaaagagg

SEQ ID NO: 3230992 - DNA, 25 bp, Homo sapien
aacatcacacatgggggcctatcgt

SEQ ID NO: 3230993 - DNA, 25 bp, Homo sapien
aaaaaacaaagcttcacagaccagc

SEQ ID NO: 3230994 - DNA, 25 bp, Homo sapien
acaaaaaacaaagcttcacagacca

SEQ ID NO: 3230995 - DNA, 25 bp, Homo sapien
aaacaaagcttcacagaccagctta

SEQ ID NO: 3230996 - DNA, 25 bp, Homo sapien
cagacatttgaaatgccatgtattc

SEQ ID NO: 3230997 - DNA, 25 bp, Homo sapien
tttgaaatgccatgtattcttcagc

SEQ ID NO: 3230998 - DNA, 25 bp, Homo sapien
acagtaatgcagacatttgaaatgc

SEQ ID NO: 3230999 - DNA, 25 bp, Homo sapien
aatgcagacatttgaaatgccatgt

SEQ ID NO: 3231000 - DNA, 25 bp, Homo sapien
caatgttttgttacatctgataaaa

SEQ ID NO: 3231001 - DNA, 25 bp, Homo sapien
ttcaaacaatgttttgttacatctg

SEQ ID NO: 3231002 - DNA, 25 bp, Homo sapien
gatgttgatggctaggaaaagcaga

SEQ ID NO: 3231003 - DNA, 25 bp, Homo sapien
cctaagatgttgatggctaggaaaa

SEQ ID NO: 3231004 - DNA, 25 bp, Homo sapien
aaaaggtgccagtatatcatatatc

SEQ ID NO: 3231005 - DNA, 25 bp, Homo sapien
aaaatgttcctgatggcctttatat

SEQ ID NO: 3231006 - DNA, 25 bp, Homo sapien
gcctttatattaaaaggtgccagta

SEQ ID NO: 3231007 - DNA, 25 bp, Homo sapien
aatgttcctgatggcctttatatta

SEQ ID NO: 3231008 - DNA, 25 bp, Homo sapien
ttggtggaggcaacccatagtcatc

SEQ ID NO: 3231009 - DNA, 25 bp, Homo sapien
tcaaacagcaggttctaactttggt

SEQ ID NO: 3231010 - DNA, 25 bp, Homo sapien
cccatagtcatcagagctattaacc

SEQ ID NO: 3231011 - DNA, 25 bp, Homo sapien
gcaggttctaactttggtggaggca

SEQ ID NO: 3231012 - DNA, 25 bp, Homo sapien
caagaggacttttcatggatgatca

SEQ ID NO: 3231013 - DNA, 25 bp, Homo sapien
tacctaataccctagaggaacagag

SEQ ID NO: 3231014 - DNA, 25 bp, Homo sapien
tgctagttatataccaaatgggaag

SEQ ID NO: 3231015 - DNA, 25 bp, Homo sapien
aaaggaacataagaggccacatgca

SEQ ID NO: 3231016 - DNA, 25 bp, Homo sapien
tttaatccttcataagatttgacgg

SEQ ID NO: 3231017 - DNA, 25 bp, Homo sapien
tccttcataagatttgacggtcagc

SEQ ID NO: 3231018 - DNA, 25 bp, Homo sapien
taagatttgacggtcagctgccagg

SEQ ID NO: 3231019 - DNA, 25 bp, Homo sapien
ttgacggtcagctgccaggtataca

SEQ ID NO: 3231020 - DNA, 25 bp, Homo sapien
tcccctctttccgaatttgagcagg

SEQ ID NO: 3231021 - DNA, 25 bp, Homo sapien
tctttccgaatttgagcaggcttgt

SEQ ID NO: 3231022 - DNA, 25 bp, Homo sapien
ttccgaatttgagcaggcttgtgac

SEQ ID NO: 3231023 - DNA, 25 bp, Homo sapien
ccgaatttgagcaggcttgtgactg

SEQ ID NO: 3231024 - DNA, 25 bp, Homo sapien
caggtggttctcatcaaccagcgag

SEQ ID NO: 3231025 - DNA, 25 bp, Homo sapien
ggtggttctcatcaaccagcgagtg

SEQ ID NO: 3231026 - DNA, 25 bp, Homo sapien
tggttctcatcaaccagcgagtggt

SEQ ID NO: 3231027 - DNA, 25 bp, Homo sapien
ttctcatcaaccagcgagtggttac

SEQ ID NO: 3231028 - DNA, 25 bp, Homo sapien
gacaaaggcctatgaaataaaggca

SEQ ID NO: 3231029 - DNA, 25 bp, Homo sapien
gggtctgacaaaggcctatgaaata

SEQ ID NO: 3231030 - DNA, 25 bp, Homo sapien
tctgacaaaggcctatgaaataaag

SEQ ID NO: 3231031 - DNA, 25 bp, Homo sapien
ccagggtctgacaaaggcctatgaa

SEQ ID NO: 3231032 - DNA, 25 bp, Homo sapien
ctcctggagccctggatatttagga

SEQ ID NO: 3231033 - DNA, 25 bp, Homo sapien
tcctggagccctggatatttaggaa

SEQ ID NO: 3231034 - DNA, 25 bp, Homo sapien
tgatgaaattcataggatggacaaa

SEQ ID NO: 3231035 - DNA, 25 bp, Homo sapien
tctaagacaaactgctgttccttcc

SEQ ID NO: 3231036 - DNA, 25 bp, Homo sapien
atgaaattcataggatggacaaaaa

SEQ ID NO: 3231037 - DNA, 25 bp, Homo sapien
aaattgagctgctctaagacaaact

SEQ ID NO: 3231038 - DNA, 25 bp, Homo sapien
taagctgtcctgttatttaagttct

SEQ ID NO: 3231039 - DNA, 25 bp, Homo sapien
ggagccctcataagctaatcacctg

SEQ ID NO: 3231040 - DNA, 25 bp, Homo sapien
gatgtgatgagtggttaagctgtcc

SEQ ID NO: 3231041 - DNA, 25 bp, Homo sapien
aaccacagcagtaaccaatcatgaa

SEQ ID NO: 3231042 - DNA, 25 bp, Homo sapien
actttgcaatcacaacttacattaa

SEQ ID NO: 3231043 - DNA, 25 bp, Homo sapien
cagctatagaattgaaaaacaggac

SEQ ID NO: 3231044 - DNA, 25 bp, Homo sapien
tttggaggacataagcttaaatcct

SEQ ID NO: 3231045 - DNA, 25 bp, Homo sapien
tactagccttgtaaattgtgcccct

SEQ ID NO: 3231046 - DNA, 25 bp, Homo sapien
ctgtggttggacgccagcctggcat

SEQ ID NO: 3231047 - DNA, 25 bp, Homo sapien
tgtggttggacgccagcctggcatc

SEQ ID NO: 3231048 - DNA, 25 bp, Homo sapien
gtggttggacgccagcctggcatca

SEQ ID NO: 3231049 - DNA, 25 bp, Homo sapien
gtccccttctaaagctagtctagga

SEQ ID NO: 3231050 - DNA, 25 bp, Homo sapien
ggcacatttgcacatcaactaaagc

SEQ ID NO: 3231051 - DNA, 25 bp, Homo sapien
tgctgggacggtccccttctaaagc

SEQ ID NO: 3231052 - DNA, 25 bp, Homo sapien
caactaaagcttccactcggttctg

SEQ ID NO: 3231053 - DNA, 25 bp, Homo sapien
caaagatagcgaaggatacatgtct

SEQ ID NO: 3231054 - DNA, 25 bp, Homo sapien
tccttggaagagacatcttgctcga

SEQ ID NO: 3231055 - DNA, 25 bp, Homo sapien
tgctcgaatttgatttgtatatgaa

SEQ ID NO: 3231056 - DNA, 25 bp, Homo sapien
caaatctcttgtcctacaaagatag

SEQ ID NO: 3231057 - DNA, 25 bp, Homo sapien
gctgagtaccgcagtttgatccata

SEQ ID NO: 3231058 - DNA, 25 bp, Homo sapien
tgtctgatgcagtgttagtcctcaa

SEQ ID NO: 3231059 - DNA, 25 bp, Homo sapien
caaactgagagaacacttcccggaa

SEQ ID NO: 3231060 - DNA, 25 bp, Homo sapien
taaccacagtgcaatgagaaaccca

SEQ ID NO: 3231061 - DNA, 25 bp, Homo sapien
gctactctggttgctgaggtaggag

SEQ ID NO: 3231062 - DNA, 25 bp, Homo sapien
ctactctggttgctgaggtaggagg

SEQ ID NO: 3231063 - DNA, 25 bp, Homo sapien
caaggctactgtgagctatgatcat

SEQ ID NO: 3231064 - DNA, 25 bp, Homo sapien
ctactgtgagctatgatcataccat

SEQ ID NO: 3231065 - DNA, 25 bp, Homo sapien
tagaataccaaacgttgatggctcc

SEQ ID NO: 3231066 - DNA, 25 bp, Homo sapien
gatggctcccctcttacataagcta

SEQ ID NO: 3231067 - DNA, 25 bp, Homo sapien
tcttataacaggaagggccccattg

SEQ ID NO: 3231068 - DNA, 25 bp, Homo sapien
cacatcgtccttatatgtgggaaca

SEQ ID NO: 3231069 - DNA, 25 bp, Homo sapien
ctcaatggtatgagtattaataaac

SEQ ID NO: 3231070 - DNA, 25 bp, Homo sapien
gctttcatcttgcaggcttgctgtt

SEQ ID NO: 3231071 - DNA, 25 bp, Homo sapien
atcctcaatggtatgagtattaata

SEQ ID NO: 3231072 - DNA, 25 bp, Homo sapien
cctcaatggtatgagtattaataaa

SEQ ID NO: 3231073 - DNA, 25 bp, Homo sapien
gatatctgcaagtactgattgggac

SEQ ID NO: 3231074 - DNA, 25 bp, Homo sapien
gtactgattgggaccaaaatccaat

SEQ ID NO: 3231075 - DNA, 25 bp, Homo sapien
ggtgatatctgcaagtactgattgg

SEQ ID NO: 3231076 - DNA, 25 bp, Homo sapien
tctgcaagtactgattgggaccaaa

SEQ ID NO: 3231077 - DNA, 25 bp, Homo sapien
aacacccataactcatatgggttag

SEQ ID NO: 3231078 - DNA, 25 bp, Homo sapien
tgtctaagtgacaactgcttgtcag

SEQ ID NO: 3231079 - DNA, 25 bp, Homo sapien
gatgccccagcaacgtttaccactt

SEQ ID NO: 3231080 - DNA, 25 bp, Homo sapien
ggttaggttgataaatggccctcat

SEQ ID NO: 3231081 - DNA, 25 bp, Homo sapien
ctatatagcagatattattgtcaac

SEQ ID NO: 3231082 - DNA, 25 bp, Homo sapien
ttctaatgcttctttgtctacttat

SEQ ID NO: 3231083 - DNA, 25 bp, Homo sapien
tctaatgcttctttgtctacttatt

SEQ ID NO: 3231084 - DNA, 25 bp, Homo sapien
gcagatattattgtcaactatagta

SEQ ID NO: 3231085 - DNA, 25 bp, Homo sapien
gaaggcctataatttcaccactgtt

SEQ ID NO: 3231086 - DNA, 25 bp, Homo sapien
aatgatgtggaaagttgcatttgat

SEQ ID NO: 3231087 - DNA, 25 bp, Homo sapien
tgatttttgttccatatgttgtgtt

SEQ ID NO: 3231088 - DNA, 25 bp, Homo sapien
gggagttgatgttacatcctcattc

SEQ ID NO: 3231089 - DNA, 25 bp, Homo sapien
tgcttggtgtattatcctaatttgc

SEQ ID NO: 3231090 - DNA, 25 bp, Homo sapien
tctgcttggtgtattatcctaattt

SEQ ID NO: 3231091 - DNA, 25 bp, Homo sapien
ctgcttggtgtattatcctaatttg

SEQ ID NO: 3231092 - DNA, 25 bp, Homo sapien
atctgcttggtgtattatcctaatt

SEQ ID NO: 3231093 - DNA, 25 bp, Homo sapien
tgttgtctgcttgaccaataagaag

SEQ ID NO: 3231094 - DNA, 25 bp, Homo sapien
tgtctgcttgaccaataagaagttg

SEQ ID NO: 3231095 - DNA, 25 bp, Homo sapien
ttgtctgcttgaccaataagaagtt

SEQ ID NO: 3231096 - DNA, 25 bp, Homo sapien
gttgtctgcttgaccaataagaagt

SEQ ID NO: 3231097 - DNA, 25 bp, Homo sapien
actccaatctgcgtgacagtgagac

SEQ ID NO: 3231098 - DNA, 25 bp, Homo sapien
tgcactccaatctgcgtgacagtga

SEQ ID NO: 3231099 - DNA, 25 bp, Homo sapien
actgcactccaatctgcgtgacagt

SEQ ID NO: 3231100 - DNA, 25 bp, Homo sapien
ctccaatctgcgtgacagtgagact

SEQ ID NO: 3231101 - DNA, 25 bp, Homo sapien
tatttatacgaagagaatgcatgtc

SEQ ID NO: 3231102 - DNA, 25 bp, Homo sapien
ttctcacaatgctgaagtagggtca

SEQ ID NO: 3231103 - DNA, 25 bp, Homo sapien
gatgagatgcacacaagttcctcag

SEQ ID NO: 3231104 - DNA, 25 bp, Homo sapien
ttgttcagcaaatatcatagttacg

SEQ ID NO: 3231105 - DNA, 25 bp, Homo sapien
aaaagtgcaatagggcaacgagggc

SEQ ID NO: 3231106 - DNA, 25 bp, Homo sapien
tatactaagggaattagttctggcc

SEQ ID NO: 3231107 - DNA, 25 bp, Homo sapien
taatgttcccataggcatgtctact

SEQ ID NO: 3231108 - DNA, 25 bp, Homo sapien
aaaattagcagctttatgcctcggg

SEQ ID NO: 3231109 - DNA, 25 bp, Homo sapien
tagtgagctagaaactcagtggcca

SEQ ID NO: 3231110 - DNA, 25 bp, Homo sapien
ggctaagagatagtccaccttcaaa

SEQ ID NO: 3231111 - DNA, 25 bp, Homo sapien
gtcttgaaaatatccagggtcctct

SEQ ID NO: 3231112 - DNA, 25 bp, Homo sapien
tggtctaggcctgcatcatctcttg

SEQ ID NO: 3231113 - DNA, 25 bp, Homo sapien
cagaaccaaatttcaaactccagtc

SEQ ID NO: 3231114 - DNA, 25 bp, Homo sapien
gcttctagagattgaactactaaca

SEQ ID NO: 3231115 - DNA, 25 bp, Homo sapien
ttgtgaaacgtaacatacaaataag

SEQ ID NO: 3231116 - DNA, 25 bp, Homo sapien
taagtctctcaaggtagtttgtgaa

SEQ ID NO: 3231117 - DNA, 25 bp, Homo sapien
ttcacgagtgcttacatttagtgac

SEQ ID NO: 3231118 - DNA, 25 bp, Homo sapien
tcttcttcacgagtgcttacattta

SEQ ID NO: 3231119 - DNA, 25 bp, Homo sapien
gaactttcttcttcacgagtgctta

SEQ ID NO: 3231120 - DNA, 25 bp, Homo sapien
ttcctgaactttcttcttcacgagt

SEQ ID NO: 3231121 - DNA, 25 bp, Homo sapien
ctagattttccacagagcccaaatg

SEQ ID NO: 3231122 - DNA, 25 bp, Homo sapien
ccacagagcccaaatgcatgcatgg

SEQ ID NO: 3231123 - DNA, 25 bp, Homo sapien
aatgcatgcatggagcctgctcctt

SEQ ID NO: 3231124 - DNA, 25 bp, Homo sapien
aaatgcatgcatggagcctgctcct

SEQ ID NO: 3231125 - DNA, 25 bp, Homo sapien
tggaagtggatcttagagctctccc

SEQ ID NO: 3231126 - DNA, 25 bp, Homo sapien
cagtctgggaatcttcgtgggaagt

SEQ ID NO: 3231127 - DNA, 25 bp, Homo sapien
gaagcagagaaatccactgggccca

SEQ ID NO: 3231128 - DNA, 25 bp, Homo sapien
gtgggaagtccactctgggcctgtc

SEQ ID NO: 3231129 - DNA, 25 bp, Homo sapien
ttcaagaacactcacgggccatagg

SEQ ID NO: 3231130 - DNA, 25 bp, Homo sapien
tgggtggatgaacgccagatagctt

SEQ ID NO: 3231131 - DNA, 25 bp, Homo sapien
gaaatcttcggctcgtgatgacgta

SEQ ID NO: 3231132 - DNA, 25 bp, Homo sapien
gaatacggtttcttcagcagcttac

SEQ ID NO: 3231133 - DNA, 25 bp, Homo sapien
ttagagatccgagtttcaagaaaag

SEQ ID NO: 3231134 - DNA, 25 bp, Homo sapien
taaaaggcagatgtcaattaagtcc

SEQ ID NO: 3231135 - DNA, 25 bp, Homo sapien
ttaagtccacttcatcttgacatac

SEQ ID NO: 3231136 - DNA, 25 bp, Homo sapien
tatttcccaaatcgcctagaataag

SEQ ID NO: 3231137 - DNA, 25 bp, Homo sapien
atggtagaaggcaaaccagaagaaa

SEQ ID NO: 3231138 - DNA, 25 bp, Homo sapien
tactgtcagagctcctaaaccttgc

SEQ ID NO: 3231139 - DNA, 25 bp, Homo sapien
ggtactgtcagagctcctaaacctt

SEQ ID NO: 3231140 - DNA, 25 bp, Homo sapien
actgtcagagctcctaaaccttgcc

SEQ ID NO: 3231141 - DNA, 25 bp, Homo sapien
tggtactgtcagagctcctaaacct

SEQ ID NO: 3231142 - DNA, 25 bp, Homo sapien
ctaactttcaacaattgcagctgtt

SEQ ID NO: 3231143 - DNA, 25 bp, Homo sapien
taactttcaacaattgcagctgtta

SEQ ID NO: 3231144 - DNA, 25 bp, Homo sapien
tgcccattgaaataagcgtatcctc

SEQ ID NO: 3231145 - DNA, 25 bp, Homo sapien
ttgaaataagcgtatcctctcctgc

SEQ ID NO: 3231146 - DNA, 25 bp, Homo sapien
agcccctacatagtcccactgccca

SEQ ID NO: 3231147 - DNA, 25 bp, Homo sapien
tcccactgcccattgaaataagcgt

SEQ ID NO: 3231148 - DNA, 25 bp, Homo sapien
cgtaaagaacccatggtgaattgca

SEQ ID NO: 3231149 - DNA, 25 bp, Homo sapien
cctttaacagcgtaaagaacccatg

SEQ ID NO: 3231150 - DNA, 25 bp, Homo sapien
gaacccatggtgaattgcacactga

SEQ ID NO: 3231151 - DNA, 25 bp, Homo sapien
ttaacagcgtaaagaacccatggtg

SEQ ID NO: 3231152 - DNA, 25 bp, Homo sapien
atcctgatggcaaatagtaacagct

SEQ ID NO: 3231153 - DNA, 25 bp, Homo sapien
tcctgatggcaaatagtaacagctt

SEQ ID NO: 3231154 - DNA, 25 bp, Homo sapien
ctgtcgtttacgtttttcatcctga

SEQ ID NO: 3231155 - DNA, 25 bp, Homo sapien
tacgtttttcatcctgatggcaaat

SEQ ID NO: 3231156 - DNA, 25 bp, Homo sapien
cattttcgacccactgaagaggaga

SEQ ID NO: 3231157 - DNA, 25 bp, Homo sapien
caggctggccagtatcgttcatgaa

SEQ ID NO: 3231158 - DNA, 25 bp, Homo sapien
gcttattggctggtgcaccttgaca

SEQ ID NO: 3231159 - DNA, 25 bp, Homo sapien
caggaagcagcttcatcaaggtgga

SEQ ID NO: 3231160 - DNA, 25 bp, Homo sapien
tcaagtagcctatttgccagcaggc

SEQ ID NO: 3231161 - DNA, 25 bp, Homo sapien
tgttgtctttgccgcaacagcagct

SEQ ID NO: 3231162 - DNA, 25 bp, Homo sapien
ccttgcttctcgctttactgtctga

SEQ ID NO: 3231163 - DNA, 25 bp, Homo sapien
ccctgaggatagttatcttcataac

SEQ ID NO: 3231164 - DNA, 25 bp, Homo sapien
ttatttctatcagcccctgatgcat

SEQ ID NO: 3231165 - DNA, 25 bp, Homo sapien
tcagcccctgatgcattgttcctgc

SEQ ID NO: 3231166 - DNA, 25 bp, Homo sapien
cctgatgcattgttcctgcaaagga

SEQ ID NO: 3231167 - DNA, 25 bp, Homo sapien
tctatcagcccctgatgcattgttc

SEQ ID NO: 3231168 - DNA, 25 bp, Homo sapien
caagtagtggtaatatttctgggag

SEQ ID NO: 3231169 - DNA, 25 bp, Homo sapien
ctcaggtacgggaaatattgcaaca

SEQ ID NO: 3231170 - DNA, 25 bp, Homo sapien
caatatgcgctatttagtacaagca

SEQ ID NO: 3231171 - DNA, 25 bp, Homo sapien
caaatgaagactaaagctgcatcca

SEQ ID NO: 3231172 - DNA, 25 bp, Homo sapien
ctccagttctgtcccgcacgggtgc

SEQ ID NO: 3231173 - DNA, 25 bp, Homo sapien
gctccagttctgtcccgcacgggtg

SEQ ID NO: 3231174 - DNA, 25 bp, Homo sapien
cattgctccctggagccttagagtc

SEQ ID NO: 3231175 - DNA, 25 bp, Homo sapien
cctggagccttagagtcagctccag

SEQ ID NO: 3231176 - DNA, 25 bp, Homo sapien
ctttctgccacttctcacttatgat

SEQ ID NO: 3231177 - DNA, 25 bp, Homo sapien
tgatgagaatcacgttgttgaacac

SEQ ID NO: 3231178 - DNA, 25 bp, Homo sapien
tcccactctggataagtatgcattt

SEQ ID NO: 3231179 - DNA, 25 bp, Homo sapien
acttatgatcagtgcaaaggccata

SEQ ID NO: 3231180 - DNA, 25 bp, Homo sapien
gctacaagttcacaattctgtacca

SEQ ID NO: 3231181 - DNA, 25 bp, Homo sapien
gattctagaatttcgatttcaaagg

SEQ ID NO: 3231182 - DNA, 25 bp, Homo sapien
caggcatgctctatctatggcatat

SEQ ID NO: 3231183 - DNA, 25 bp, Homo sapien
ccagcagttttgtggcagcggttgc

SEQ ID NO: 3231184 - DNA, 25 bp, Homo sapien
caggtcgtgcaccacggtatgagaa

SEQ ID NO: 3231185 - DNA, 25 bp, Homo sapien
ttctccggagtcttggacttctggc

SEQ ID NO: 3231186 - DNA, 25 bp, Homo sapien
ccacggtatgagaacagtctgagtc

SEQ ID NO: 3231187 - DNA, 25 bp, Homo sapien
tgagtcatgattgacttctccggag

SEQ ID NO: 3231188 - DNA, 25 bp, Homo sapien
tccagaaacaatttttgtaagggca

SEQ ID NO: 3231189 - DNA, 25 bp, Homo sapien
tgcttccagaaacaatttttgtaag

SEQ ID NO: 3231190 - DNA, 25 bp, Homo sapien
ccagaaacaatttttgtaagggcat

SEQ ID NO: 3231191 - DNA, 25 bp, Homo sapien
tttcccaagaaagagaatctgggga

SEQ ID NO: 3231192 - DNA, 25 bp, Homo sapien
tcaatttgtggagttctaccatggg

SEQ ID NO: 3231193 - DNA, 25 bp, Homo sapien
ctttcatctcaatttgtggagttct

SEQ ID NO: 3231194 - DNA, 25 bp, Homo sapien
catctcaatttgtggagttctacca

SEQ ID NO: 3231195 - DNA, 25 bp, Homo sapien
tttgtggagttctaccatgggtcat

SEQ ID NO: 3231196 - DNA, 25 bp, Homo sapien
tcaagaaaattcataagcattttgt

SEQ ID NO: 3231197 - DNA, 25 bp, Homo sapien
caagaaaattcataagcattttgta

SEQ ID NO: 3231198 - DNA, 25 bp, Homo sapien
aagaaaattcataagcattttgtag

SEQ ID NO: 3231199 - DNA, 25 bp, Homo sapien
gaaaattcataagcattttgtagtc

SEQ ID NO: 3231200 - DNA, 25 bp, Homo sapien
ggagaagtcagcaaacggatggaca

SEQ ID NO: 3231201 - DNA, 25 bp, Homo sapien
tattacggaatgtgagtcctggaga

SEQ ID NO: 3231202 - DNA, 25 bp, Homo sapien
tcagaattcccagcaggtattacgg

SEQ ID NO: 3231203 - DNA, 25 bp, Homo sapien
tggacaattgggaaactttctctgt

SEQ ID NO: 3231204 - DNA, 25 bp, Homo sapien
gacacatgtatctcacctagagctg

SEQ ID NO: 3231205 - DNA, 25 bp, Homo sapien
ggagacagtgtacctacttctaaaa

SEQ ID NO: 3231206 - DNA, 25 bp, Homo sapien
cctggattcttgtggtgctattaga

SEQ ID NO: 3231207 - DNA, 25 bp, Homo sapien
gagactgccttatgcatacctggat

SEQ ID NO: 3231208 - DNA, 25 bp, Homo sapien
gaaaggctgccttgagcattttatt

SEQ ID NO: 3231209 - DNA, 25 bp, Homo sapien
ggccacaaaaggtatgacatagatg

SEQ ID NO: 3231210 - DNA, 25 bp, Homo sapien
gctgggcaccccagaatatgagaaa

SEQ ID NO: 3231211 - DNA, 25 bp, Homo sapien
acatcagtttagacaagagaaaagg

SEQ ID NO: 3231212 - DNA, 25 bp, Homo sapien
ctcagaggtaagtggtatccaaatg

SEQ ID NO: 3231213 - DNA, 25 bp, Homo sapien
gctgtgaattcagattcaacacttc

SEQ ID NO: 3231214 - DNA, 25 bp, Homo sapien
tggattcttttgatccccggaaaga

SEQ ID NO: 3231215 - DNA, 25 bp, Homo sapien
tttccagattgcataaagcagctgt

SEQ ID NO: 3231216 - DNA, 25 bp, Homo sapien
ccaggattgggccactgcactccag

SEQ ID NO: 3231217 - DNA, 25 bp, Homo sapien
gaggtggaaggatgccttgagccca

SEQ ID NO: 3231218 - DNA, 25 bp, Homo sapien
ccaggaggcagaggttgcagtgagc

SEQ ID NO: 3231219 - DNA, 25 bp, Homo sapien
ggaaggatgccttgagcccaggagg

SEQ ID NO: 3231220 - DNA, 25 bp, Homo sapien
gaatcagacacattctgtaggctct

SEQ ID NO: 3231221 - DNA, 25 bp, Homo sapien
tcattctagctgacctcattgtctt

SEQ ID NO: 3231222 - DNA, 25 bp, Homo sapien
gaaaacatacattgacttgctcaac

SEQ ID NO: 3231223 - DNA, 25 bp, Homo sapien
gccccagtgatgacaatccatcatt

SEQ ID NO: 3231224 - DNA, 25 bp, Homo sapien
ataaaagtagcggactagttccagg

SEQ ID NO: 3231225 - DNA, 25 bp, Homo sapien
aagtagcggactagttccagggaat

SEQ ID NO: 3231226 - DNA, 25 bp, Homo sapien
ataagtcagataaaagtagcggact

SEQ ID NO: 3231227 - DNA, 25 bp, Homo sapien
gtcagataaaagtagcggactagtt

SEQ ID NO: 3231228 - DNA, 25 bp, Homo sapien
tcactgtgcagcttgcttccccagg

SEQ ID NO: 3231229 - DNA, 25 bp, Homo sapien
gtcactgtgcagcttgcttccccag

SEQ ID NO: 3231230 - DNA, 25 bp, Homo sapien
gaacattggactttacgtgactaca

SEQ ID NO: 3231231 - DNA, 25 bp, Homo sapien
gcttttacagtagcaggcacatttc

SEQ ID NO: 3231232 - DNA, 25 bp, Homo sapien
cttgggtgaaagcatgcagagtgac

SEQ ID NO: 3231233 - DNA, 25 bp, Homo sapien
ggtactgcaaaactcgaacattgga

SEQ ID NO: 3231234 - DNA, 25 bp, Homo sapien
catgctaatgacaggttctgcatca

SEQ ID NO: 3231235 - DNA, 25 bp, Homo sapien
tgttatttattatccgccatgccaa

SEQ ID NO: 3231236 - DNA, 25 bp, Homo sapien
aactagtattggtagtgcactgacc

SEQ ID NO: 3231237 - DNA, 25 bp, Homo sapien
aatccccacaaagtcccgaatgttg

SEQ ID NO: 3231238 - DNA, 25 bp, Homo sapien
tccttaatccgtcctgttcactcag

SEQ ID NO: 3231239 - DNA, 25 bp, Homo sapien
tgaaagctacaagttccatggagtt

SEQ ID NO: 3231240 - DNA, 25 bp, Homo sapien
caaaaagagtatcctgtcctgggtc

SEQ ID NO: 3231241 - DNA, 25 bp, Homo sapien
gagttaccaagggagcaattctcct

SEQ ID NO: 3231242 - DNA, 25 bp, Homo sapien
atatatcttgcagggtcatgtgtgc

SEQ ID NO: 3231243 - DNA, 25 bp, Homo sapien
caagtggagtcgcatattggttata

SEQ ID NO: 3231244 - DNA, 25 bp, Homo sapien
cttgagagagcattcatgtaggaga

SEQ ID NO: 3231245 - DNA, 25 bp, Homo sapien
tgctcctaatagaagtgctctttta

SEQ ID NO: 3231246 - DNA, 25 bp, Homo sapien
tgcagagagtgatttgcctgatgtc

SEQ ID NO: 3231247 - DNA, 25 bp, Homo sapien
tgatgtcttcgggattttttggtcc

SEQ ID NO: 3231248 - DNA, 25 bp, Homo sapien
tcaattctgtatgctgtgcagagag

SEQ ID NO: 3231249 - DNA, 25 bp, Homo sapien
gccttgggtcgtggcagctgatcca

SEQ ID NO: 3231250 - DNA, 25 bp, Homo sapien
cttctcttcataatgagaagaaacc

SEQ ID NO: 3231251 - DNA, 25 bp, Homo sapien
tcacgtttcttctcttcataatgag

SEQ ID NO: 3231252 - DNA, 25 bp, Homo sapien
tctcttcataatgagaagaaaccat

SEQ ID NO: 3231253 - DNA, 25 bp, Homo sapien
ttcttcacgtttcttctcttcataa

SEQ ID NO: 3231254 - DNA, 25 bp, Homo sapien
cttttctgggatgtagttgtcaggc

SEQ ID NO: 3231255 - DNA, 25 bp, Homo sapien
agttgtcaggccagattggactcac

SEQ ID NO: 3231256 - DNA, 25 bp, Homo sapien
tgggatgtagttgtcaggccagatt

SEQ ID NO: 3231257 - DNA, 25 bp, Homo sapien
gatgtagttgtcaggccagattgga

SEQ ID NO: 3231258 - DNA, 25 bp, Homo sapien
tcccaaaggctaaagcgccttccca

SEQ ID NO: 3231259 - DNA, 25 bp, Homo sapien
ctccacatcccaaaggctaaagcgc

SEQ ID NO: 3231260 - DNA, 25 bp, Homo sapien
ccacatcccaaaggctaaagcgcct

SEQ ID NO: 3231261 - DNA, 25 bp, Homo sapien
acatcccaaaggctaaagcgccttc

SEQ ID NO: 3231262 - DNA, 25 bp, Homo sapien
ttaagcatattgatgaactcggatg

SEQ ID NO: 3231263 - DNA, 25 bp, Homo sapien
tgaactcggatgtgcaaatagaaaa

SEQ ID NO: 3231264 - DNA, 25 bp, Homo sapien
actcggatgtgcaaatagaaaataa

SEQ ID NO: 3231265 - DNA, 25 bp, Homo sapien
gatgaactcggatgtgcaaatagaa

SEQ ID NO: 3231266 - DNA, 25 bp, Homo sapien
gactattaatcttccttggacaacc

SEQ ID NO: 3231267 - DNA, 25 bp, Homo sapien
taatcttccttggacaaccaaggtg

SEQ ID NO: 3231268 - DNA, 25 bp, Homo sapien
cttccttggacaaccaaggtgattt

SEQ ID NO: 3231269 - DNA, 25 bp, Homo sapien
cagattgaaagactattaatcttcc

SEQ ID NO: 3231270 - DNA, 25 bp, Homo sapien
gtaaagaagaatgctcgctgtccaa

SEQ ID NO: 3231271 - DNA, 25 bp, Homo sapien
catttagatcactggatgggagggc

SEQ ID NO: 3231272 - DNA, 25 bp, Homo sapien
aaaacatttagatcactggatggga

SEQ ID NO: 3231273 - DNA, 25 bp, Homo sapien
gtccaaactcttcatgcccacacag

SEQ ID NO: 3231274 - DNA, 25 bp, Homo sapien
catcttgttggataatctactgatt

SEQ ID NO: 3231275 - DNA, 25 bp, Homo sapien
tcttgttggataatctactgattaa

SEQ ID NO: 3231276 - DNA, 25 bp, Homo sapien
atcttgttggataatctactgatta

SEQ ID NO: 3231277 - DNA, 25 bp, Homo sapien
agtgaaagggacataccactttcta

SEQ ID NO: 3231278 - DNA, 25 bp, Homo sapien
ttaatatctctggcagccagaaata

SEQ ID NO: 3231279 - DNA, 25 bp, Homo sapien
taatatctctggcagccagaaatac

SEQ ID NO: 3231280 - DNA, 25 bp, Homo sapien
tatctctggcagccagaaatactgt

SEQ ID NO: 3231281 - DNA, 25 bp, Homo sapien
cgtgagttgacattggcgatttcac

SEQ ID NO: 3231282 - DNA, 25 bp, Homo sapien
cagcagaggatgctagaggcgagcc

SEQ ID NO: 3231283 - DNA, 25 bp, Homo sapien
tttcactggtctcaccgggatccaa

SEQ ID NO: 3231284 - DNA, 25 bp, Homo sapien
caggcacaggcttaaggatgatcag

SEQ ID NO: 3231285 - DNA, 25 bp, Homo sapien
cgtgatcttctctggcattcgggca

SEQ ID NO: 3231286 - DNA, 25 bp, Homo sapien
catccacgtgatcttctctggcatt

SEQ ID NO: 3231287 - DNA, 25 bp, Homo sapien
agcagcaggcgcagaatcctcattc

SEQ ID NO: 3231288 - DNA, 25 bp, Homo sapien
tcgggcattggctgtacccttttgc

SEQ ID NO: 3231289 - DNA, 25 bp, Homo sapien
tacatgtagcaatcaatcttcttag

SEQ ID NO: 3231290 - DNA, 25 bp, Homo sapien
gtgatacatgtagcaatcaatcttc

SEQ ID NO: 3231291 - DNA, 25 bp, Homo sapien
aggctgtgatacatgtagcaatcaa

SEQ ID NO: 3231292 - DNA, 25 bp, Homo sapien
gctgtgatacatgtagcaatcaatc

SEQ ID NO: 3231293 - DNA, 25 bp, Homo sapien
tggctgtgttccctgagaatccact

SEQ ID NO: 3231294 - DNA, 25 bp, Homo sapien
ctgtgttccctgagaatccacttgt

SEQ ID NO: 3231295 - DNA, 25 bp, Homo sapien
ctatcttagcttgtggctgtgttcc

SEQ ID NO: 3231296 - DNA, 25 bp, Homo sapien
tatcttagcttgtggctgtgttccc

SEQ ID NO: 3231297 - DNA, 25 bp, Homo sapien
tcacttggtcatagaccagctggcc

SEQ ID NO: 3231298 - DNA, 25 bp, Homo sapien
cagctggcctcagcctggtcagcca

SEQ ID NO: 3231299 - DNA, 25 bp, Homo sapien
tcagccaggagcttcttgcgggccc

SEQ ID NO: 3231300 - DNA, 25 bp, Homo sapien
gccaggagcttcttgcgggccctgt

SEQ ID NO: 3231301 - DNA, 25 bp, Homo sapien
acaccggtctggattctacagatat

SEQ ID NO: 3231302 - DNA, 25 bp, Homo sapien
tgaaaatccaggtgtcacatcacca

SEQ ID NO: 3231303 - DNA, 25 bp, Homo sapien
catgtatagtccactccacaccggt

SEQ ID NO: 3231304 - DNA, 25 bp, Homo sapien
caggtgtcacatcaccatgtatagt

SEQ ID NO: 3231305 - DNA, 25 bp, Homo sapien
tggagcctgtagcagaccctctcat

SEQ ID NO: 3231306 - DNA, 25 bp, Homo sapien
tagccttgaatgaggtggcccttgg

SEQ ID NO: 3231307 - DNA, 25 bp, Homo sapien
gcccttggagcctgtagcagaccct

SEQ ID NO: 3231308 - DNA, 25 bp, Homo sapien
cctgaggagacatagccttgaatga

SEQ ID NO: 3231309 - DNA, 25 bp, Homo sapien
tacctgcctgtaggttactggaaca

SEQ ID NO: 3231310 - DNA, 25 bp, Homo sapien
tatgtagtaactcactctgccaaca

SEQ ID NO: 3231311 - DNA, 25 bp, Homo sapien
tctgccaacaactgacgattaacag

SEQ ID NO: 3231312 - DNA, 25 bp, Homo sapien
caaatatttgggaatcttgtgaccc

SEQ ID NO: 3231313 - DNA, 25 bp, Homo sapien
catcaagtcccacaacttcctgcca

SEQ ID NO: 3231314 - DNA, 25 bp, Homo sapien
ttacttggaatcagttctgcactac

SEQ ID NO: 3231315 - DNA, 25 bp, Homo sapien
tgcactacccaggatgccatcaagt

SEQ ID NO: 3231316 - DNA, 25 bp, Homo sapien
tggaatcagttctgcactacccagg

SEQ ID NO: 3231317 - DNA, 25 bp, Homo sapien
gaggacacgtatacttcagatgaca

SEQ ID NO: 3231318 - DNA, 25 bp, Homo sapien
gaatcacctcttcgctggcttctga

SEQ ID NO: 3231319 - DNA, 25 bp, Homo sapien
ccaccacaggaagtgtatacaccag

SEQ ID NO: 3231320 - DNA, 25 bp, Homo sapien
ggcatagggcttcacgtaatactct

SEQ ID NO: 3231321 - DNA, 25 bp, Homo sapien
gaaattgagggggtccagtggagga

SEQ ID NO: 3231322 - DNA, 25 bp, Homo sapien
ggggtccagtggaggacttggtaga

SEQ ID NO: 3231323 - DNA, 25 bp, Homo sapien
catcgtccaccacatatgccagagt

SEQ ID NO: 3231324 - DNA, 25 bp, Homo sapien
tcgtccaccacatatgccagagtgg

SEQ ID NO: 3231325 - DNA, 25 bp, Homo sapien
ctaatgtaagtttcctgttccatat

SEQ ID NO: 3231326 - DNA, 25 bp, Homo sapien
tccatatccaggagatgtgtccata

SEQ ID NO: 3231327 - DNA, 25 bp, Homo sapien
ccatatccaggagatgtgtccatat

SEQ ID NO: 3231328 - DNA, 25 bp, Homo sapien
tttttaggcactctctcatacaagt

SEQ ID NO: 3231329 - DNA, 25 bp, Homo sapien
tatttttaggcactctctcatacaa

SEQ ID NO: 3231330 - DNA, 25 bp, Homo sapien
atttttaggcactctctcatacaag

SEQ ID NO: 3231331 - DNA, 25 bp, Homo sapien
gttatttttaggcactctctcatac

SEQ ID NO: 3231332 - DNA, 25 bp, Homo sapien
ttgtcggcacttgaataagttgaaa

SEQ ID NO: 3231333 - DNA, 25 bp, Homo sapien
ctccattgtcggcacttgaataagt

SEQ ID NO: 3231334 - DNA, 25 bp, Homo sapien
cattgtcggcacttgaataagttga

SEQ ID NO: 3231335 - DNA, 25 bp, Homo sapien
tccattgtcggcacttgaataagtt

SEQ ID NO: 3231336 - DNA, 25 bp, Homo sapien
gcatgcttcattcgtaaatcaaaag

SEQ ID NO: 3231337 - DNA, 25 bp, Homo sapien
cttgcgcatgcttcattcgtaaatc

SEQ ID NO: 3231338 - DNA, 25 bp, Homo sapien
gcgcatgcttcattcgtaaatcaaa

SEQ ID NO: 3231339 - DNA, 25 bp, Homo sapien
cttcattcgtaaatcaaaagcatca

SEQ ID NO: 3231340 - DNA, 25 bp, Homo sapien
tatttggtccgatcttactcttctg

SEQ ID NO: 3231341 - DNA, 25 bp, Homo sapien
tcctatggctatattccccaactgt

SEQ ID NO: 3231342 - DNA, 25 bp, Homo sapien
tactctgacctctacgattatgata

SEQ ID NO: 3231343 - DNA, 25 bp, Homo sapien
caatgtccctaaatagcctccaaga

SEQ ID NO: 3231344 - DNA, 25 bp, Homo sapien
gaatgactttgtgtgctttgatagg

SEQ ID NO: 3231345 - DNA, 25 bp, Homo sapien
aatgactttgtgtgctttgataggc

SEQ ID NO: 3231346 - DNA, 25 bp, Homo sapien
atgactttgtgtgctttgataggca

SEQ ID NO: 3231347 - DNA, 25 bp, Homo sapien
tgactttgtgtgctttgataggcat

SEQ ID NO: 3231348 - DNA, 25 bp, Homo sapien
cataaagtgatacgacgtggcttct

SEQ ID NO: 3231349 - DNA, 25 bp, Homo sapien
gctgccatcaggcagaggatcttca

SEQ ID NO: 3231350 - DNA, 25 bp, Homo sapien
cagagatgaacacgctgccatcagg

SEQ ID NO: 3231351 - DNA, 25 bp, Homo sapien
aagccctttgcttgtgcccaagtca

SEQ ID NO: 3231352 - DNA, 25 bp, Homo sapien
aaggtagagaacaactatagccaac

SEQ ID NO: 3231353 - DNA, 25 bp, Homo sapien
cacaggctgtactgaaggtagagaa

SEQ ID NO: 3231354 - DNA, 25 bp, Homo sapien
ttatacatgccttctggtcacaggc

SEQ ID NO: 3231355 - DNA, 25 bp, Homo sapien
tctggtcacaggctgtactgaaggt

SEQ ID NO: 3231356 - DNA, 25 bp, Homo sapien
caccataaagagttttgaagttgtt

SEQ ID NO: 3231357 - DNA, 25 bp, Homo sapien
gttctgcaccataaagagttttgaa

SEQ ID NO: 3231358 - DNA, 25 bp, Homo sapien
tgcaccataaagagttttgaagttg

SEQ ID NO: 3231359 - DNA, 25 bp, Homo sapien
tctgcaccataaagagttttgaagt

SEQ ID NO: 3231360 - DNA, 25 bp, Homo sapien
gcaggttagcaaatcctcactttga

SEQ ID NO: 3231361 - DNA, 25 bp, Homo sapien
gtcagaggaactaattgaaatttcc

SEQ ID NO: 3231362 - DNA, 25 bp, Homo sapien
tatgataacattggtgcaggttagc

SEQ ID NO: 3231363 - DNA, 25 bp, Homo sapien
cattccaggtgggaacggagatgtc

SEQ ID NO: 3231364 - DNA, 25 bp, Homo sapien
atgatggactcatccatgatgtctt

SEQ ID NO: 3231365 - DNA, 25 bp, Homo sapien
ccatgatgtcttcgtcagactgtgt

SEQ ID NO: 3231366 - DNA, 25 bp, Homo sapien
cttcctgcctgatgatggactcatc

SEQ ID NO: 3231367 - DNA, 25 bp, Homo sapien
gatgtcttcgtcagactgtgtactt

SEQ ID NO: 3231368 - DNA, 25 bp, Homo sapien
gatactatatgagccagtgacatcc

SEQ ID NO: 3231369 - DNA, 25 bp, Homo sapien
ctttggtcctgaacagagggtagca

SEQ ID NO: 3231370 - DNA, 25 bp, Homo sapien
cctgaaagaggtagcagtgctgtac

SEQ ID NO: 3231371 - DNA, 25 bp, Homo sapien
gctgtacatatttggcatatctgca

SEQ ID NO: 3231372 - DNA, 25 bp, Homo sapien
taaaaatagtagtcagcgtaggata

SEQ ID NO: 3231373 - DNA, 25 bp, Homo sapien
aaatagtagtcagcgtaggatattt

SEQ ID NO: 3231374 - DNA, 25 bp, Homo sapien
ttaaaaatagtagtcagcgtaggat

SEQ ID NO: 3231375 - DNA, 25 bp, Homo sapien
aaaaatagtagtcagcgtaggatat

SEQ ID NO: 3231376 - DNA, 25 bp, Homo sapien
gtaagacaactgatccttcatgtag

SEQ ID NO: 3231377 - DNA, 25 bp, Homo sapien
cactgggctgttgccagtaagacaa

SEQ ID NO: 3231378 - DNA, 25 bp, Homo sapien
tcggagattttctgaggcggcttga

SEQ ID NO: 3231379 - DNA, 25 bp, Homo sapien
agttttcctgtccatagagtttgag

SEQ ID NO: 3231380 - DNA, 25 bp, Homo sapien
cataggttgacaaaggatagttaac

SEQ ID NO: 3231381 - DNA, 25 bp, Homo sapien
cattatgagtacaaaggctgtgcta

SEQ ID NO: 3231382 - DNA, 25 bp, Homo sapien
gaagagtcagtttatatccactagt

SEQ ID NO: 3231383 - DNA, 25 bp, Homo sapien
gagggtattcttgaagtctgacaca

SEQ ID NO: 3231384 - DNA, 25 bp, Homo sapien
aatgtgcaagagattagtacaaatt

SEQ ID NO: 3231385 - DNA, 25 bp, Homo sapien
gtgaaaaaaactataggtgaagcat

SEQ ID NO: 3231386 - DNA, 25 bp, Homo sapien
atcataaactgcagacttcctcagt

SEQ ID NO: 3231387 - DNA, 25 bp, Homo sapien
cctcagttacgatggttcaatttat

SEQ ID NO: 3231388 - DNA, 25 bp, Homo sapien
cacttccccctgtctgatgttctgc

SEQ ID NO: 3231389 - DNA, 25 bp, Homo sapien
tcccttctggcagtcaagcatctca

SEQ ID NO: 3231390 - DNA, 25 bp, Homo sapien
tgtttgtctcctaggacgttatttc

SEQ ID NO: 3231391 - DNA, 25 bp, Homo sapien
gcctgtttgtctcctaggacgttat

SEQ ID NO: 3231392 - DNA, 25 bp, Homo sapien
aagtttatcgtgcatggtcccaaca

SEQ ID NO: 3231393 - DNA, 25 bp, Homo sapien
aacagggtgcttctgctgaatacgg

SEQ ID NO: 3231394 - DNA, 25 bp, Homo sapien
gaggcattgcaaatacagctgggta

SEQ ID NO: 3231395 - DNA, 25 bp, Homo sapien
tggacaattgagaccaacagggtgc

SEQ ID NO: 3231396 - DNA, 25 bp, Homo sapien
cttactaatttttgcaattcgggca

SEQ ID NO: 3231397 - DNA, 25 bp, Homo sapien
agcatatctctccactaccagtcag

SEQ ID NO: 3231398 - DNA, 25 bp, Homo sapien
ctggagcatatctctccactaccag

SEQ ID NO: 3231399 - DNA, 25 bp, Homo sapien
ggagcatatctctccactaccagtc

SEQ ID NO: 3231400 - DNA, 25 bp, Homo sapien
gaaaagttaccttacgaatgatcag

SEQ ID NO: 3231401 - DNA, 25 bp, Homo sapien
caaaggcaacaatagatgttagaag

SEQ ID NO: 3231402 - DNA, 25 bp, Homo sapien
ccttacgaatgatcagacttagaaa

SEQ ID NO: 3231403 - DNA, 25 bp, Homo sapien
cagacttagaaaattcccaacagat

SEQ ID NO: 3231404 - DNA, 25 bp, Homo sapien
ttgtaaatgtttgtctccactgagc

SEQ ID NO: 3231405 - DNA, 25 bp, Homo sapien
ggttgtaaatgtttgtctccactga

SEQ ID NO: 3231406 - DNA, 25 bp, Homo sapien
taaatgtttgtctccactgagccat

SEQ ID NO: 3231407 - DNA, 25 bp, Homo sapien
tgtaaatgtttgtctccactgagcc

SEQ ID NO: 3231408 - DNA, 25 bp, Homo sapien
acagagaagatgaatcaactctcat

SEQ ID NO: 3231409 - DNA, 25 bp, Homo sapien
tgtaagcagaaatccctggcgatgc

SEQ ID NO: 3231410 - DNA, 25 bp, Homo sapien
acttcattatagctggattggtcac

SEQ ID NO: 3231411 - DNA, 25 bp, Homo sapien
ggtcacatgaccttgctctgttaag

SEQ ID NO: 3231412 - DNA, 25 bp, Homo sapien
agaggctgaaagctctattgtcagc

SEQ ID NO: 3231413 - DNA, 25 bp, Homo sapien
gagctctggatcttagctctggagg

SEQ ID NO: 3231414 - DNA, 25 bp, Homo sapien
tggattcagacaatatcaattcctg

SEQ ID NO: 3231415 - DNA, 25 bp, Homo sapien
gatctggctaaaatgacaacagtga

SEQ ID NO: 3231416 - DNA, 25 bp, Homo sapien
tcctggatctggctaaaatgacaac

SEQ ID NO: 3231417 - DNA, 25 bp, Homo sapien
ctctgcctgcggtgatgatgcggga

SEQ ID NO: 3231418 - DNA, 25 bp, Homo sapien
ctgcctgcggtgatgatgcgggaga

SEQ ID NO: 3231419 - DNA, 25 bp, Homo sapien
tctgcctgcggtgatgatgcgggag

SEQ ID NO: 3231420 - DNA, 25 bp, Homo sapien
gctctgcctgcggtgatgatgcggg

SEQ ID NO: 3231421 - DNA, 25 bp, Homo sapien
gtttgggattgaagcactgttatta

SEQ ID NO: 3231422 - DNA, 25 bp, Homo sapien
gggattgaagcactgttattaatct

SEQ ID NO: 3231423 - DNA, 25 bp, Homo sapien
tgggattgaagcactgttattaatc

SEQ ID NO: 3231424 - DNA, 25 bp, Homo sapien
tttgggattgaagcactgttattaa

SEQ ID NO: 3231425 - DNA, 25 bp, Homo sapien
tgaaaggagagctgataaaaggtat

SEQ ID NO: 3231426 - DNA, 25 bp, Homo sapien
gatgagtgggtgggtttattgctaa

SEQ ID NO: 3231427 - DNA, 25 bp, Homo sapien
tgctaactgaaaggagagctgataa

SEQ ID NO: 3231428 - DNA, 25 bp, Homo sapien
ttattgctaactgaaaggagagctg

SEQ ID NO: 3231429 - DNA, 25 bp, Homo sapien
ttcatttcctcaggactgtgaagtt

SEQ ID NO: 3231430 - DNA, 25 bp, Homo sapien
cttcatttcctcaggactgtgaagt

SEQ ID NO: 3231431 - DNA, 25 bp, Homo sapien
ctggccagaagtcatcgaatcgctc

SEQ ID NO: 3231432 - DNA, 25 bp, Homo sapien
atcttactgcaaaacttctgtgttt

SEQ ID NO: 3231433 - DNA, 25 bp, Homo sapien
aaatgctttgctcacaggcttctgg

SEQ ID NO: 3231434 - DNA, 25 bp, Homo sapien
tcatcgaatcgctcactcaaccaaa

SEQ ID NO: 3231435 - DNA, 25 bp, Homo sapien
taccattggtctttcagggcttact

SEQ ID NO: 3231436 - DNA, 25 bp, Homo sapien
tcttcaaacaatagactctggactg

SEQ ID NO: 3231437 - DNA, 25 bp, Homo sapien
tgcttgctccacagttaatgcccat

SEQ ID NO: 3231438 - DNA, 25 bp, Homo sapien
ctctggactgagaactggcttagtt

SEQ ID NO: 3231439 - DNA, 25 bp, Homo sapien
ctcagaaatgccagggacattacca

SEQ ID NO: 3231440 - DNA, 25 bp, Homo sapien
tcagaaatgccagggacattaccat

SEQ ID NO: 3231441 - DNA, 25 bp, Homo sapien
gagcaattgcattgggaagactcag

SEQ ID NO: 3231442 - DNA, 25 bp, Homo sapien
aatgtgctgctcaggtatctgcaga

SEQ ID NO: 3231443 - DNA, 25 bp, Homo sapien
gcaactaatgtgctgctcaggtatc

SEQ ID NO: 3231444 - DNA, 25 bp, Homo sapien
caaagcaactaatgtgctgctcagg

SEQ ID NO: 3231445 - DNA, 25 bp, Homo sapien
ctaatctgtcaaagcaactaatgtg

SEQ ID NO: 3231446 - DNA, 25 bp, Homo sapien
ttttgcttgcttcacggacagggcc

SEQ ID NO: 3231447 - DNA, 25 bp, Homo sapien
aatctttttgcttgcttcacggaca

SEQ ID NO: 3231448 - DNA, 25 bp, Homo sapien
tctgtcctcagaatctttttgcttg

SEQ ID NO: 3231449 - DNA, 25 bp, Homo sapien
ttgcttgcttcacggacagggccca

SEQ ID NO: 3231450 - DNA, 25 bp, Homo sapien
ggttgactcgtatcttgcatctgaa

SEQ ID NO: 3231451 - DNA, 25 bp, Homo sapien
tgcccacattcagccgtgactggtt

SEQ ID NO: 3231452 - DNA, 25 bp, Homo sapien
aagcagatgtgatttattctgccca

SEQ ID NO: 3231453 - DNA, 25 bp, Homo sapien
aatcttgtctctacctgtgtcgtag

SEQ ID NO: 3231454 - DNA, 25 bp, Homo sapien
catttaagggaattatatttgcatg

SEQ ID NO: 3231455 - DNA, 25 bp, Homo sapien
gtacaacacttctctccttgtgact

SEQ ID NO: 3231456 - DNA, 25 bp, Homo sapien
ctttctcatttaagggaattatatt

SEQ ID NO: 3231457 - DNA, 25 bp, Homo sapien
ttctctgtacaacacttctctcctt

SEQ ID NO: 3231458 - DNA, 25 bp, Homo sapien
ctttcttgtgtaaggtgacatcccc

SEQ ID NO: 3231459 - DNA, 25 bp, Homo sapien
actataccacgtaagtgaaatgaaa

SEQ ID NO: 3231460 - DNA, 25 bp, Homo sapien
cctgcaaaccaagttcaaccacata

SEQ ID NO: 3231461 - DNA, 25 bp, Homo sapien
taagccactataccacgtaagtgaa

SEQ ID NO: 3231462 - DNA, 25 bp, Homo sapien
taatgcatccaaacttttggtgtcg

SEQ ID NO: 3231463 - DNA, 25 bp, Homo sapien
atatttggttctggtcttatgcaat

SEQ ID NO: 3231464 - DNA, 25 bp, Homo sapien
acttttggtgtcgtctcttccttga

SEQ ID NO: 3231465 - DNA, 25 bp, Homo sapien
gaaagtctctaatgcatccaaactt

SEQ ID NO: 3231466 - DNA, 25 bp, Homo sapien
cactgagatgttagtgaaggttgaa

SEQ ID NO: 3231467 - DNA, 25 bp, Homo sapien
tagtgaaggttgaactgaatggcga

SEQ ID NO: 3231468 - DNA, 25 bp, Homo sapien
gatggtggttttatagagtgttaag

SEQ ID NO: 3231469 - DNA, 25 bp, Homo sapien
tgaatggcgaatactgtgcaaggaa

SEQ ID NO: 3231470 - DNA, 25 bp, Homo sapien
gcataacctactggaatcactcttg

SEQ ID NO: 3231471 - DNA, 25 bp, Homo sapien
tattgctctcttatgtcctattaca

SEQ ID NO: 3231472 - DNA, 25 bp, Homo sapien
tcactcaggaattgaagctggcgtt

SEQ ID NO: 3231473 - DNA, 25 bp, Homo sapien
cctattacagttgacatgtcgcata

SEQ ID NO: 3231474 - DNA, 25 bp, Homo sapien
cctaggtggcaccaggtttttgcct

SEQ ID NO: 3231475 - DNA, 25 bp, Homo sapien
taggtggcaccaggtttttgcctag

SEQ ID NO: 3231476 - DNA, 25 bp, Homo sapien
aggtggcaccaggtttttgcctaga

SEQ ID NO: 3231477 - DNA, 25 bp, Homo sapien
ttcctaggtggcaccaggtttttgc

SEQ ID NO: 3231478 - DNA, 25 bp, Homo sapien
tgagcagggagcgccgcttccaccc

SEQ ID NO: 3231479 - DNA, 25 bp, Homo sapien
agcagggagcgccgcttccaccctc

SEQ ID NO: 3231480 - DNA, 25 bp, Homo sapien
tgtgagcagggagcgccgcttccac

SEQ ID NO: 3231481 - DNA, 25 bp, Homo sapien
gtgtgagcagggagcgccgcttcca

SEQ ID NO: 3231482 - DNA, 25 bp, Homo sapien
acctttggctacaactctggaacga

SEQ ID NO: 3231483 - DNA, 25 bp, Homo sapien
ctctggaacgaataaccaccaccat

SEQ ID NO: 3231484 - DNA, 25 bp, Homo sapien
tacaactctggaacgaataaccacc

SEQ ID NO: 3231485 - DNA, 25 bp, Homo sapien
tggctacaactctggaacgaataac

SEQ ID NO: 3231486 - DNA, 25 bp, Homo sapien
tggcaaacttgtgagaaattcttcc

SEQ ID NO: 3231487 - DNA, 25 bp, Homo sapien
ttggcaaacttgtgagaaattcttc

SEQ ID NO: 3231488 - DNA, 25 bp, Homo sapien
tctttattggcaaacttgtgagaaa

SEQ ID NO: 3231489 - DNA, 25 bp, Homo sapien
ttattggcaaacttgtgagaaattc

SEQ ID NO: 3231490 - DNA, 25 bp, Homo sapien
tgagataaaggatcttgcagaccat

SEQ ID NO: 3231491 - DNA, 25 bp, Homo sapien
gtctgagataaaggatcttgcagac

SEQ ID NO: 3231492 - DNA, 25 bp, Homo sapien
taaaggatcttgcagaccattaagt

SEQ ID NO: 3231493 - DNA, 25 bp, Homo sapien
ggatcttgcagaccattaagtttca

SEQ ID NO: 3231494 - DNA, 25 bp, Homo sapien
tgatgttccgggacctctgggtaac

SEQ ID NO: 3231495 - DNA, 25 bp, Homo sapien
gttagcatgatgttccgggacctct

SEQ ID NO: 3231496 - DNA, 25 bp, Homo sapien
gcctttgttccgttcagcagctctg

SEQ ID NO: 3231497 - DNA, 25 bp, Homo sapien
ctctgggtaactggcctttgttccg

SEQ ID NO: 3231498 - DNA, 25 bp, Homo sapien
aactgatgctgaaatagccaactga

SEQ ID NO: 3231499 - DNA, 25 bp, Homo sapien
tgatgctgaaatagccaactgattt

SEQ ID NO: 3231500 - DNA, 25 bp, Homo sapien
attgaatgtaaacgtcgtttcagtc

SEQ ID NO: 3231501 - DNA, 25 bp, Homo sapien
ctgatgctgaaatagccaactgatt

SEQ ID NO: 3231502 - DNA, 25 bp, Homo sapien
acatccaacctctggtggattgcag

SEQ ID NO: 3231503 - DNA, 25 bp, Homo sapien
cgtgggttctgttcgcctgccagct

SEQ ID NO: 3231504 - DNA, 25 bp, Homo sapien
cagttgaggagggaatgttcacatc

SEQ ID NO: 3231505 - DNA, 25 bp, Homo sapien
tgcttgaaatactcagcagttgagg

SEQ ID NO: 3231506 - DNA, 25 bp, Homo sapien
gtcaaaaggataccgatcttttgtg

SEQ ID NO: 3231507 - DNA, 25 bp, Homo sapien
aaggataccgatcttttgtggtcat

SEQ ID NO: 3231508 - DNA, 25 bp, Homo sapien
tcaaaaggataccgatcttttgtgg

SEQ ID NO: 3231509 - DNA, 25 bp, Homo sapien
aaaggataccgatcttttgtggtca

SEQ ID NO: 3231510 - DNA, 25 bp, Homo sapien
cttcattcgacacaatcgagtggtg

SEQ ID NO: 3231511 - DNA, 25 bp, Homo sapien
tcaattccaccttcattcgacacaa

SEQ ID NO: 3231512 - DNA, 25 bp, Homo sapien
tccaccttcattcgacacaatcgag

SEQ ID NO: 3231513 - DNA, 25 bp, Homo sapien
tcgacacaatcgagtggtgtataac

SEQ ID NO: 3231514 - DNA, 25 bp, Homo sapien
tctttactttcatcaggtattggac

SEQ ID NO: 3231515 - DNA, 25 bp, Homo sapien
catcaggtattggacaaccctcagg

SEQ ID NO: 3231516 - DNA, 25 bp, Homo sapien
tattggacaaccctcaggacatgac

SEQ ID NO: 3231517 - DNA, 25 bp, Homo sapien
caaccctcaggacatgactgtttcc

SEQ ID NO: 3231518 - DNA, 25 bp, Homo sapien
tgcacaggggccttagtggataatg

SEQ ID NO: 3231519 - DNA, 25 bp, Homo sapien
taagtacatgcacaggggccttagt

SEQ ID NO: 3231520 - DNA, 25 bp, Homo sapien
gggccttagtggataatgttgatat

SEQ ID NO: 3231521 - DNA, 25 bp, Homo sapien
cgttttaagtacatgcacaggggcc

SEQ ID NO: 3231522 - DNA, 25 bp, Homo sapien
agcttgcgatcaacatccctcaggt

SEQ ID NO: 3231523 - DNA, 25 bp, Homo sapien
ttttcacttccaacagcttgcgatc

SEQ ID NO: 3231524 - DNA, 25 bp, Homo sapien
cttgcgatcaacatccctcaggtta

SEQ ID NO: 3231525 - DNA, 25 bp, Homo sapien
tgcgatcaacatccctcaggttatt

SEQ ID NO: 3231526 - DNA, 25 bp, Homo sapien
aaataacaaacagaaagtgcaggag

SEQ ID NO: 3231527 - DNA, 25 bp, Homo sapien
ataacaaacagaaagtgcaggagag

SEQ ID NO: 3231528 - DNA, 25 bp, Homo sapien
taacaaacagaaagtgcaggagaga

SEQ ID NO: 3231529 - DNA, 25 bp, Homo sapien
ttaaataacaaacagaaagtgcagg

SEQ ID NO: 3231530 - DNA, 25 bp, Homo sapien
tgttttggaatgtagagcctcgctc

SEQ ID NO: 3231531 - DNA, 25 bp, Homo sapien
tggaattttgattggcacgcctttg

SEQ ID NO: 3231532 - DNA, 25 bp, Homo sapien
taaccccgcattgaaccaggtcaag

SEQ ID NO: 3231533 - DNA, 25 bp, Homo sapien
gattaaagctaaatgtaaccccgca

SEQ ID NO: 3231534 - DNA, 25 bp, Homo sapien
cattctggggctctaaacttaacaa

SEQ ID NO: 3231535 - DNA, 25 bp, Homo sapien
agtttaagaatgtcaacgtgattac

SEQ ID NO: 3231536 - DNA, 25 bp, Homo sapien
caagtctggcgaaagtgcattctgg

SEQ ID NO: 3231537 - DNA, 25 bp, Homo sapien
caaaggaatgggaagtttaagaatg

SEQ ID NO: 3231538 - DNA, 25 bp, Homo sapien
caagggtaactgtacttcaaagagg

SEQ ID NO: 3231539 - DNA, 25 bp, Homo sapien
aaggcattacaacaccatatgtctg

SEQ ID NO: 3231540 - DNA, 25 bp, Homo sapien
aattgtgcctgaccttaaatgaaga

SEQ ID NO: 3231541 - DNA, 25 bp, Homo sapien
caattgagatcagaaagccttacct

SEQ ID NO: 3231542 - DNA, 25 bp, Homo sapien
taggggctgtattatggatgctgac

SEQ ID NO: 3231543 - DNA, 25 bp, Homo sapien
ctccttggtgctaaagtcaatttgg

SEQ ID NO: 3231544 - DNA, 25 bp, Homo sapien
tggatgctgactctattagcacaga

SEQ ID NO: 3231545 - DNA, 25 bp, Homo sapien
gcacagaaggtattatgaatccaca

SEQ ID NO: 3231546 - DNA, 25 bp, Homo sapien
cagttactctgaagcatctccaaaa

SEQ ID NO: 3231547 - DNA, 25 bp, Homo sapien
tctgaagcatctccaaaacgttctc

SEQ ID NO: 3231548 - DNA, 25 bp, Homo sapien
ctcaccctttcctgaaagttcaggt

SEQ ID NO: 3231549 - DNA, 25 bp, Homo sapien
catctccaaaacgttctcacccttt

SEQ ID NO: 3231550 - DNA, 25 bp, Homo sapien
tctcactgcgtggtaaacaggccat

SEQ ID NO: 3231551 - DNA, 25 bp, Homo sapien
tgcccaagtctgaaaggagtgctct

SEQ ID NO: 3231552 - DNA, 25 bp, Homo sapien
tgacacttcacaggtcttcccagat

SEQ ID NO: 3231553 - DNA, 25 bp, Homo sapien
aaccaccagtgttcctagcagctct

SEQ ID NO: 3231554 - DNA, 25 bp, Homo sapien
gctggagttcaagccttgtggttac

SEQ ID NO: 3231555 - DNA, 25 bp, Homo sapien
gccattgccgtggttcaggaacaca

SEQ ID NO: 3231556 - DNA, 25 bp, Homo sapien
ctgctgtcccgccattgccgtggtt

SEQ ID NO: 3231557 - DNA, 25 bp, Homo sapien
tttaagtaccttgctgttgtcagtt

SEQ ID NO: 3231558 - DNA, 25 bp, Homo sapien
aaacatcacttggtttcataataga

SEQ ID NO: 3231559 - DNA, 25 bp, Homo sapien
cttatctgcaggtatcgccccagaa

SEQ ID NO: 3231560 - DNA, 25 bp, Homo sapien
cacgatactgtatgggcctggtaac

SEQ ID NO: 3231561 - DNA, 25 bp, Homo sapien
cctccttccgaaataatccacgata

SEQ ID NO: 3231562 - DNA, 25 bp, Homo sapien
gatatacggatatgcgtgaatacca

SEQ ID NO: 3231563 - DNA, 25 bp, Homo sapien
tatgcgtgaataccattatgtctaa

SEQ ID NO: 3231564 - DNA, 25 bp, Homo sapien
ttagatatacggatatgcgtgaata

SEQ ID NO: 3231565 - DNA, 25 bp, Homo sapien
tacggatatgcgtgaataccattat

SEQ ID NO: 3231566 - DNA, 25 bp, Homo sapien
cctctcagtgattgaaggatcctac

SEQ ID NO: 3231567 - DNA, 25 bp, Homo sapien
ctgtgaataggcatgtagtgctgct

SEQ ID NO: 3231568 - DNA, 25 bp, Homo sapien
tgatattacccacaaataccttagg

SEQ ID NO: 3231569 - DNA, 25 bp, Homo sapien
ggatcctacaatactacctccatga

SEQ ID NO: 3231570 - DNA, 25 bp, Homo sapien
tgagacatagaatgacacacaagag

SEQ ID NO: 3231571 - DNA, 25 bp, Homo sapien
ggctagtaagtgactgccagttctc

SEQ ID NO: 3231572 - DNA, 25 bp, Homo sapien
cagagggctagtaagtgactgccag

SEQ ID NO: 3231573 - DNA, 25 bp, Homo sapien
gaaatacaaggagtcataagcagag

SEQ ID NO: 3231574 - DNA, 25 bp, Homo sapien
ccaaacaaagatcttataatgctgg

SEQ ID NO: 3231575 - DNA, 25 bp, Homo sapien
caaagatcttataatgctggcttgc

SEQ ID NO: 3231576 - DNA, 25 bp, Homo sapien
aaacaaagatcttataatgctggct

SEQ ID NO: 3231577 - DNA, 25 bp, Homo sapien
actgccaaacaaagatcttataatg

SEQ ID NO: 3231578 - DNA, 25 bp, Homo sapien
caatgagggacattttcagattttg

SEQ ID NO: 3231579 - DNA, 25 bp, Homo sapien
gtactctgtaatttggcccaggctc

SEQ ID NO: 3231580 - DNA, 25 bp, Homo sapien
tcttcagtactctgtaatttggccc

SEQ ID NO: 3231581 - DNA, 25 bp, Homo sapien
gcccaggctcacagaattgagtgga

SEQ ID NO: 3231582 - DNA, 25 bp, Homo sapien
cagcagggtatttgctgtcaataac

SEQ ID NO: 3231583 - DNA, 25 bp, Homo sapien
gggtatttgctgtcaataactggca

SEQ ID NO: 3231584 - DNA, 25 bp, Homo sapien
tcctcagagattacagcagggtatt

SEQ ID NO: 3231585 - DNA, 25 bp, Homo sapien
gattacagcagggtatttgctgtca

SEQ ID NO: 3231586 - DNA, 25 bp, Homo sapien
aaggaccagtttctcactgaacaac

SEQ ID NO: 3231587 - DNA, 25 bp, Homo sapien
aaacaaggaccagtttctcactgaa

SEQ ID NO: 3231588 - DNA, 25 bp, Homo sapien
gaccagtttctcactgaacaacaaa

SEQ ID NO: 3231589 - DNA, 25 bp, Homo sapien
caaggaccagtttctcactgaacaa

SEQ ID NO: 3231590 - DNA, 25 bp, Homo sapien
ccctgcagtatttaattgaacatag

SEQ ID NO: 3231591 - DNA, 25 bp, Homo sapien
ctgcagagagtcgttccctgcagta

SEQ ID NO: 3231592 - DNA, 25 bp, Homo sapien
tagttgtggggctaggcctgcagag

SEQ ID NO: 3231593 - DNA, 25 bp, Homo sapien
gtcgttccctgcagtatttaattga

SEQ ID NO: 3231594 - DNA, 25 bp, Homo sapien
ctactgcacggattcaaatctactt

SEQ ID NO: 3231595 - DNA, 25 bp, Homo sapien
gattcaaatctacttgcatatttgc

SEQ ID NO: 3231596 - DNA, 25 bp, Homo sapien
actgcacggattcaaatctacttgc

SEQ ID NO: 3231597 - DNA, 25 bp, Homo sapien
cacggattcaaatctacttgcatat

SEQ ID NO: 3231598 - DNA, 25 bp, Homo sapien
tgaggacctgaactggtttgtcccc

SEQ ID NO: 3231599 - DNA, 25 bp, Homo sapien
atttaatccattcactgcctttatt

SEQ ID NO: 3231600 - DNA, 25 bp, Homo sapien
cttctatgaggacctgaactggttt

SEQ ID NO: 3231601 - DNA, 25 bp, Homo sapien
tatgaggacctgaactggtttgtcc

SEQ ID NO: 3231602 - DNA, 25 bp, Homo sapien
tataacgcactgagtccagaaagct

SEQ ID NO: 3231603 - DNA, 25 bp, Homo sapien
tatcaatcactataacgcactgagt

SEQ ID NO: 3231604 - DNA, 25 bp, Homo sapien
gacaatatcaatcactataacgcac

SEQ ID NO: 3231605 - DNA, 25 bp, Homo sapien
gcactgagtccagaaagctagtcct

SEQ ID NO: 3231606 - DNA, 25 bp, Homo sapien
ccagagagacggcaggcccccgaga

SEQ ID NO: 3231607 - DNA, 25 bp, Homo sapien
ggtcccagaaacatgcattgcaagg

SEQ ID NO: 3231608 - DNA, 25 bp, Homo sapien
caggcccccgagaggagctatccat

SEQ ID NO: 3231609 - DNA, 25 bp, Homo sapien
gctgtcctgtctgatatgtcagctg

SEQ ID NO: 3231610 - DNA, 25 bp, Homo sapien
cagtagttgcctaatatcatctcat

SEQ ID NO: 3231611 - DNA, 25 bp, Homo sapien
ctggattttgttcagggtctcagca

SEQ ID NO: 3231612 - DNA, 25 bp, Homo sapien
ttaaatcccttgtgttggttgctga

SEQ ID NO: 3231613 - DNA, 25 bp, Homo sapien
ggttgctgacagtagttgcctaata

SEQ ID NO: 3231614 - DNA, 25 bp, Homo sapien
catatttgcgtgtaaatggaaagga

SEQ ID NO: 3231615 - DNA, 25 bp, Homo sapien
tctgagcatatttgcgtgtaaatgg

SEQ ID NO: 3231616 - DNA, 25 bp, Homo sapien
gaagggtctgagcatatttgcgtgt

SEQ ID NO: 3231617 - DNA, 25 bp, Homo sapien
cctgtaggaagggtctgagcatatt

SEQ ID NO: 3231618 - DNA, 25 bp, Homo sapien
gactctggacattgatcctgatgct

SEQ ID NO: 3231619 - DNA, 25 bp, Homo sapien
ttgatcctgatgctatactgggact

SEQ ID NO: 3231620 - DNA, 25 bp, Homo sapien
gatcctgatgctatactgggactca

SEQ ID NO: 3231621 - DNA, 25 bp, Homo sapien
tcctgtgactctggacattgatcct

SEQ ID NO: 3231622 - DNA, 25 bp, Homo sapien
tccaaattctgaggtttagtagagg

SEQ ID NO: 3231623 - DNA, 25 bp, Homo sapien
gtttagtagaggttagcataagccc

SEQ ID NO: 3231624 - DNA, 25 bp, Homo sapien
ttctgaggtttagtagaggttagca

SEQ ID NO: 3231625 - DNA, 25 bp, Homo sapien
ttagcataagcccatcagtgccatc

SEQ ID NO: 3231626 - DNA, 25 bp, Homo sapien
tggataaattggagattgagaaatc

SEQ ID NO: 3231627 - DNA, 25 bp, Homo sapien
gaatggataaattggagattgagaa

SEQ ID NO: 3231628 - DNA, 25 bp, Homo sapien
ctgcaattccaacatcccatgagaa

SEQ ID NO: 3231629 - DNA, 25 bp, Homo sapien
ccaacatcccatgagaatggataaa

SEQ ID NO: 3231630 - DNA, 25 bp, Homo sapien
gatttgtggaatacagctcttagtg

SEQ ID NO: 3231631 - DNA, 25 bp, Homo sapien
ggaatacagctcttagtgattctgc

SEQ ID NO: 3231632 - DNA, 25 bp, Homo sapien
tgtggaatacagctcttagtgattc

SEQ ID NO: 3231633 - DNA, 25 bp, Homo sapien
cagatgatttgtggaatacagctct

SEQ ID NO: 3231634 - DNA, 25 bp, Homo sapien
cctttgaggatacttcaagaacatt

SEQ ID NO: 3231635 - DNA, 25 bp, Homo sapien
tcctttgaggatacttcaagaacat

SEQ ID NO: 3231636 - DNA, 25 bp, Homo sapien
atcttcctttgaggatacttcaaga

SEQ ID NO: 3231637 - DNA, 25 bp, Homo sapien
cttcctttgaggatacttcaagaac

SEQ ID NO: 3231638 - DNA, 25 bp, Homo sapien
aagcctctcatgctggttgttctgt

SEQ ID NO: 3231639 - DNA, 25 bp, Homo sapien
cctgcatcatgttgatcacttccac

SEQ ID NO: 3231640 - DNA, 25 bp, Homo sapien
cctctcatgctggttgttctgtgga

SEQ ID NO: 3231641 - DNA, 25 bp, Homo sapien
gctcctgcatcatgttgatcacttc

SEQ ID NO: 3231642 - DNA, 25 bp, Homo sapien
ctagtgtcactgtccatgctcagaa

SEQ ID NO: 3231643 - DNA, 25 bp, Homo sapien
gacatcactagtgtcactgtccatg

SEQ ID NO: 3231644 - DNA, 25 bp, Homo sapien
aactaatgacatcactagtgtcact

SEQ ID NO: 3231645 - DNA, 25 bp, Homo sapien
tcactagtgtcactgtccatgctca

SEQ ID NO: 3231646 - DNA, 25 bp, Homo sapien
tacaaacactcctcttcagctgtgt

SEQ ID NO: 3231647 - DNA, 25 bp, Homo sapien
cttcagctgtgtgtgctgtctgcac

SEQ ID NO: 3231648 - DNA, 25 bp, Homo sapien
cctcttcagctgtgtgtgctgtctg

SEQ ID NO: 3231649 - DNA, 25 bp, Homo sapien
ttacaaacactcctcttcagctgtg

SEQ ID NO: 3231650 - DNA, 25 bp, Homo sapien
caaaaaccgtgatgaacaaaacatc

SEQ ID NO: 3231651 - DNA, 25 bp, Homo sapien
ttcactttattattagtgttctttg

SEQ ID NO: 3231652 - DNA, 25 bp, Homo sapien
aagaattaattcaaaaaccgtgatg

SEQ ID NO: 3231653 - DNA, 25 bp, Homo sapien
caagaattaattcaaaaaccgtgat

SEQ ID NO: 3231654 - DNA, 25 bp, Homo sapien
tatttatttcctcctcccggctcca

SEQ ID NO: 3231655 - DNA, 25 bp, Homo sapien
gggccggccgcggcggtcgctccag

SEQ ID NO: 3231656 - DNA, 25 bp, Homo sapien
cggctccatccctcctccccgcgcc

SEQ ID NO: 3231657 - DNA, 25 bp, Homo sapien
tccccgcgcctccctctccggcttc

SEQ ID NO: 3231658 - DNA, 25 bp, Homo sapien
cggtggctctctggtcgcgtcttgc

SEQ ID NO: 3231659 - DNA, 25 bp, Homo sapien
aagcgccacgtaccttgctgcggtg

SEQ ID NO: 3231660 - DNA, 25 bp, Homo sapien
ggcactcggcgagagcaacacgttt

SEQ ID NO: 3231661 - DNA, 25 bp, Homo sapien
ctcgctcttattggcgcggaggtga

SEQ ID NO: 3231662 - DNA, 25 bp, Homo sapien
tctcggttcccatcagcgagcggag

SEQ ID NO: 3231663 - DNA, 25 bp, Homo sapien
tttgacaaatgatgaccactccggg

SEQ ID NO: 3231664 - DNA, 25 bp, Homo sapien
caaacttgtacgtccttccgtgcag

SEQ ID NO: 3231665 - DNA, 25 bp, Homo sapien
ggtaagacctgcgagttattccgaa

SEQ ID NO: 3231666 - DNA, 25 bp, Homo sapien
agaaagggttactcctctcttggag

SEQ ID NO: 3231667 - DNA, 25 bp, Homo sapien
aaaccatagcggctactgcaaagaa

SEQ ID NO: 3231668 - DNA, 25 bp, Homo sapien
cgccgctgcttcaaaaccatagcgg

SEQ ID NO: 3231669 - DNA, 25 bp, Homo sapien
gcttcaaaaccatagcggctactgc

SEQ ID NO: 3231670 - DNA, 25 bp, Homo sapien
tccagtcacagacgggacaacgtgc

SEQ ID NO: 3231671 - DNA, 25 bp, Homo sapien
ttttcccccgcagcgtctttgcagg

SEQ ID NO: 3231672 - DNA, 25 bp, Homo sapien
gcagctccagagttgcgctctccga

SEQ ID NO: 3231673 - DNA, 25 bp, Homo sapien
agagttgcgctctccgacgaggcag

SEQ ID NO: 3231674 - DNA, 25 bp, Homo sapien
catgaactaattcagcaggtggctt

SEQ ID NO: 3231675 - DNA, 25 bp, Homo sapien
tcccagtaggtgatacgttacaaac

SEQ ID NO: 3231676 - DNA, 25 bp, Homo sapien
tatggcacggaagatacgtttccca

SEQ ID NO: 3231677 - DNA, 25 bp, Homo sapien
caattcattgcaggtttgcacaccg

SEQ ID NO: 3231678 - DNA, 25 bp, Homo sapien
cactgggagttctaagccttcttgg

SEQ ID NO: 3231679 - DNA, 25 bp, Homo sapien
tttaatctgtgtggcaacaggcggg

SEQ ID NO: 3231680 - DNA, 25 bp, Homo sapien
aagtctttgccgttctgcctgtgaa

SEQ ID NO: 3231681 - DNA, 25 bp, Homo sapien
gaaacggtgcaacaaagcaggtgcc

SEQ ID NO: 3231682 - DNA, 25 bp, Homo sapien
aggcacccggttttctctgaagaca

SEQ ID NO: 3231683 - DNA, 25 bp, Homo sapien
caaaattatgtcaatcttatcagca

SEQ ID NO: 3231684 - DNA, 25 bp, Homo sapien
tgaaaacgctcagtactatacgaag

SEQ ID NO: 3231685 - DNA, 25 bp, Homo sapien
gacatatatcacatgagcaatgacc

SEQ ID NO: 3231686 - DNA, 25 bp, Homo sapien
caatatttccctccataaacttgaa

SEQ ID NO: 3231687 - DNA, 25 bp, Homo sapien
ccaatatttccctccataaacttga

SEQ ID NO: 3231688 - DNA, 25 bp, Homo sapien
actgatgacccatgtgtgtatgtat

SEQ ID NO: 3231689 - DNA, 25 bp, Homo sapien
aaactgatgacccatgtgtgtatgt

SEQ ID NO: 3231690 - DNA, 25 bp, Homo sapien
gtttttcatttctgtgaatacaaat

SEQ ID NO: 3231691 - DNA, 25 bp, Homo sapien
tttcatttctgtgaatacaaatcaa

SEQ ID NO: 3231692 - DNA, 25 bp, Homo sapien
catttctgtgaatacaaatcaacag

SEQ ID NO: 3231693 - DNA, 25 bp, Homo sapien
tttctgtgaatacaaatcaacagca

SEQ ID NO: 3231694 - DNA, 25 bp, Homo sapien
tcttgcagcccgtgtactcttcctt

SEQ ID NO: 3231695 - DNA, 25 bp, Homo sapien
caaaatttctactgcctgagagcta

SEQ ID NO: 3231696 - DNA, 25 bp, Homo sapien
gagagctatttacatcacagtgaag

SEQ ID NO: 3231697 - DNA, 25 bp, Homo sapien
gtgcagggtcaacgggttgcccaaa

SEQ ID NO: 3231698 - DNA, 25 bp, Homo sapien
ggtgccagtggtcgtttcatgctca

SEQ ID NO: 3231699 - DNA, 25 bp, Homo sapien
cgtagcagagcatgaaaaggtctat

SEQ ID NO: 3231700 - DNA, 25 bp, Homo sapien
tagctttcctgaacgagaacgtagc

SEQ ID NO: 3231701 - DNA, 25 bp, Homo sapien
ataatacaaggccaccatggtgcca

SEQ ID NO: 3231702 - DNA, 25 bp, Homo sapien
catttttctagtcgttcgaatcttt

SEQ ID NO: 3231703 - DNA, 25 bp, Homo sapien
ggcatcatagattgtggtcaaaatg

SEQ ID NO: 3231704 - DNA, 25 bp, Homo sapien
tggtcaaaatgtagttgtgacgatc

SEQ ID NO: 3231705 - DNA, 25 bp, Homo sapien
accccacactgtgaagggtgtgaag

SEQ ID NO: 3231706 - DNA, 25 bp, Homo sapien
gacgatcaaatatggaccccacact

SEQ ID NO: 3231707 - DNA, 25 bp, Homo sapien
gacaatgaaggtgtaatggttccca

SEQ ID NO: 3231708 - DNA, 25 bp, Homo sapien
ttgacaaatgtctggctgaaactag

SEQ ID NO: 3231709 - DNA, 25 bp, Homo sapien
cagagggagtgcatgagctgacaaa

SEQ ID NO: 3231710 - DNA, 25 bp, Homo sapien
tgccaaggccaagagatctgaattt

SEQ ID NO: 3231711 - DNA, 25 bp, Homo sapien
ccacttcaaatgtgtaagagccact

SEQ ID NO: 3231712 - DNA, 25 bp, Homo sapien
aaactatttcctggagcacacgctg

SEQ ID NO: 3231713 - DNA, 25 bp, Homo sapien
ctggagcacacgctggacatgcaca

SEQ ID NO: 3231714 - DNA, 25 bp, Homo sapien
agccacttcggccacaaactatttc

SEQ ID NO: 3231715 - DNA, 25 bp, Homo sapien
gagcataccccaggtatcgtttccc

SEQ ID NO: 3231716 - DNA, 25 bp, Homo sapien
gtcaatgagagagcataccccaggt

SEQ ID NO: 3231717 - DNA, 25 bp, Homo sapien
caggtatcgtttcccactctgtggc

SEQ ID NO: 3231718 - DNA, 25 bp, Homo sapien
tgagagagcataccccaggtatcgt

SEQ ID NO: 3231719 - DNA, 25 bp, Homo sapien
catagggacagagtgtgcacaggtc

SEQ ID NO: 3231720 - DNA, 25 bp, Homo sapien
gtcagcaaaggcctaaaggtaatag

SEQ ID NO: 3231721 - DNA, 25 bp, Homo sapien
cactgtgtaattcctccgtggagaa

SEQ ID NO: 3231722 - DNA, 25 bp, Homo sapien
taggacaactcagcaggctcaagga

SEQ ID NO: 3231723 - DNA, 25 bp, Homo sapien
tagaaataattggtacacagaagcc

SEQ ID NO: 3231724 - DNA, 25 bp, Homo sapien
tagtgtatagtacagatttagcaca

SEQ ID NO: 3231725 - DNA, 25 bp, Homo sapien
gaggaaagcagtaccttcttataat

SEQ ID NO: 3231726 - DNA, 25 bp, Homo sapien
tagcacaggttagatcacagtgttg

SEQ ID NO: 3231727 - DNA, 25 bp, Homo sapien
aacaaagttagcgtgcaggaaattt

SEQ ID NO: 3231728 - DNA, 25 bp, Homo sapien
cattgaatgtgtacataactttggg

SEQ ID NO: 3231729 - DNA, 25 bp, Homo sapien
agtatgggcattgtaacaacattaa

SEQ ID NO: 3231730 - DNA, 25 bp, Homo sapien
gagtcccttatggttccatacgaat

SEQ ID NO: 3231731 - DNA, 25 bp, Homo sapien
atctatgacaatgggatgactttcc

SEQ ID NO: 3231732 - DNA, 25 bp, Homo sapien
cattgtctttttgactagaaaatga

SEQ ID NO: 3231733 - DNA, 25 bp, Homo sapien
tattcgctgggtcctcttaaagcaa

SEQ ID NO: 3231734 - DNA, 25 bp, Homo sapien
ttatgtaatggatatacatagatct

SEQ ID NO: 3231735 - DNA, 25 bp, Homo sapien
gaccattgtctttttgactagaaaa

SEQ ID NO: 3231736 - DNA, 25 bp, Homo sapien
tccatcttcagcattccacagttgt

SEQ ID NO: 3231737 - DNA, 25 bp, Homo sapien
tctgtcacctaccacagtgaagttt

SEQ ID NO: 3231738 - DNA, 25 bp, Homo sapien
gttcctgtgacttggcacattctgc

SEQ ID NO: 3231739 - DNA, 25 bp, Homo sapien
tcttttgcactacgacagcacttta

SEQ ID NO: 3231740 - DNA, 25 bp, Homo sapien
aatagggccattgaacggtgtatca

SEQ ID NO: 3231741 - DNA, 25 bp, Homo sapien
ctactccggggttccttgagcctgg

SEQ ID NO: 3231742 - DNA, 25 bp, Homo sapien
tgaatagggccattgaacggtgtat

SEQ ID NO: 3231743 - DNA, 25 bp, Homo sapien
gcatgaatagggccattgaacggtg

SEQ ID NO: 3231744 - DNA, 25 bp, Homo sapien
ctttgctttccttgtagccaggtcc

SEQ ID NO: 3231745 - DNA, 25 bp, Homo sapien
tgccggtttggctttgctttccttg

SEQ ID NO: 3231746 - DNA, 25 bp, Homo sapien
ctgccggtttggctttgctttcctt

SEQ ID NO: 3231747 - DNA, 25 bp, Homo sapien
tgctttccttgtagccaggtcctga

SEQ ID NO: 3231748 - DNA, 25 bp, Homo sapien
tcttccccatcacaataatagcgga

SEQ ID NO: 3231749 - DNA, 25 bp, Homo sapien
tacttgccatgaagaagtttgtttc

SEQ ID NO: 3231750 - DNA, 25 bp, Homo sapien
tcctgtaattgtcaacagaacccaa

SEQ ID NO: 3231751 - DNA, 25 bp, Homo sapien
gcggatggaatcagtatacttgcca

SEQ ID NO: 3231752 - DNA, 25 bp, Homo sapien
atgagtattgccgaacaaatatgac

SEQ ID NO: 3231753 - DNA, 25 bp, Homo sapien
gtattgccgaacaaatatgactcat

SEQ ID NO: 3231754 - DNA, 25 bp, Homo sapien
tgagtattgccgaacaaatatgact

SEQ ID NO: 3231755 - DNA, 25 bp, Homo sapien
tccatgagtattgccgaacaaatat

SEQ ID NO: 3231756 - DNA, 25 bp, Homo sapien
tgaccactagttgcaaggatttacg

SEQ ID NO: 3231757 - DNA, 25 bp, Homo sapien
tggtggatcctttaaaggcccagaa

SEQ ID NO: 3231758 - DNA, 25 bp, Homo sapien
tatgggcctacagccttgagatggc

SEQ ID NO: 3231759 - DNA, 25 bp, Homo sapien
tagcgtccactgatatgtacactct

SEQ ID NO: 3231760 - DNA, 25 bp, Homo sapien
tgcccaaatcatgggagcttcagtt

SEQ ID NO: 3231761 - DNA, 25 bp, Homo sapien
gatgctgttgctaagtagacgctat

SEQ ID NO: 3231762 - DNA, 25 bp, Homo sapien
atttcagggatctggtgagctcccc

SEQ ID NO: 3231763 - DNA, 25 bp, Homo sapien
tgcagcccacatctaactggactct

SEQ ID NO: 3231764 - DNA, 25 bp, Homo sapien
tatgttattgccctctacgtgtcca

SEQ ID NO: 3231765 - DNA, 25 bp, Homo sapien
tttgttggacgattatttcatcacc

SEQ ID NO: 3231766 - DNA, 25 bp, Homo sapien
aattcatggttacatatgcaggttt

SEQ ID NO: 3231767 - DNA, 25 bp, Homo sapien
atagtgaggtaatgaacatacaggt

SEQ ID NO: 3231768 - DNA, 25 bp, Homo sapien
tcagtttcataagagcacaggtttg

SEQ ID NO: 3231769 - DNA, 25 bp, Homo sapien
ggactacttatctaacaagccttga

SEQ ID NO: 3231770 - DNA, 25 bp, Homo sapien
aatacgcctcaaagttaaatctagc

SEQ ID NO: 3231771 - DNA, 25 bp, Homo sapien
tcggaaactcgataaataactctgt

SEQ ID NO: 3231772 - DNA, 25 bp, Homo sapien
gaattccaggactgtaccactatgc

SEQ ID NO: 3231773 - DNA, 25 bp, Homo sapien
ccaggactgtaccactatgcacggc

SEQ ID NO: 3231774 - DNA, 25 bp, Homo sapien
gtgcgattacggctgactggctgac

SEQ ID NO: 3231775 - DNA, 25 bp, Homo sapien
tattaggaaatatgttacttgtatg

SEQ ID NO: 3231776 - DNA, 25 bp, Homo sapien
aagggtatgaaagctcacaacactt

SEQ ID NO: 3231777 - DNA, 25 bp, Homo sapien
ggtgctgtggcagcactccgtgggg

SEQ ID NO: 3231778 - DNA, 25 bp, Homo sapien
tgctgtggcagcactccgtggggag

SEQ ID NO: 3231779 - DNA, 25 bp, Homo sapien
ctgtcttgaggaatccctgctgtgg

SEQ ID NO: 3231780 - DNA, 25 bp, Homo sapien
tagtgtactctgctaattcacaacc

SEQ ID NO: 3231781 - DNA, 25 bp, Homo sapien
cgaatttttccctatgcacacagta

SEQ ID NO: 3231782 - DNA, 25 bp, Homo sapien
tctcaccctgaaactgccgaatttt

SEQ ID NO: 3231783 - DNA, 25 bp, Homo sapien
cacaacctctcacaagatatatgag

SEQ ID NO: 3231784 - DNA, 25 bp, Homo sapien
tattcatatatccttgggcacccgg

SEQ ID NO: 3231785 - DNA, 25 bp, Homo sapien
caccagtcacatgcttcaaatagat

SEQ ID NO: 3231786 - DNA, 25 bp, Homo sapien
tctgtttatgaattggtaagctcct

SEQ ID NO: 3231787 - DNA, 25 bp, Homo sapien
aatagcaacccagcatttcaccagt

SEQ ID NO: 3231788 - DNA, 25 bp, Homo sapien
gatagcctaatcaatcacaagtcgt

SEQ ID NO: 3231789 - DNA, 25 bp, Homo sapien
catgaagattggtgataatcataga

SEQ ID NO: 3231790 - DNA, 25 bp, Homo sapien
tgaggtccagagatagaaactgttt

SEQ ID NO: 3231791 - DNA, 25 bp, Homo sapien
ttaaattgtgaggattgaaaagtca

SEQ ID NO: 3231792 - DNA, 25 bp, Homo sapien
attctatggagatcttaaactaagc

SEQ ID NO: 3231793 - DNA, 25 bp, Homo sapien
acagtatgtaccttagtcaacctgg

SEQ ID NO: 3231794 - DNA, 25 bp, Homo sapien
tgtgtatacagaatcaactcagaga

SEQ ID NO: 3231795 - DNA, 25 bp, Homo sapien
gatgaggactgctcaacatattgac

SEQ ID NO: 3231796 - DNA, 25 bp, Homo sapien
atagactcatgtatataatccttca

SEQ ID NO: 3231797 - DNA, 25 bp, Homo sapien
gcatactaaatattatagactcatg

SEQ ID NO: 3231798 - DNA, 25 bp, Homo sapien
ccttgcatactaaatattatagact

SEQ ID NO: 3231799 - DNA, 25 bp, Homo sapien
tattaatccttgcatactaaatatt

SEQ ID NO: 3231800 - DNA, 25 bp, Homo sapien
ctaacgtagatttatgaagaatttc

SEQ ID NO: 3231801 - DNA, 25 bp, Homo sapien
aatattttattcatgtattcattca

SEQ ID NO: 3231802 - DNA, 25 bp, Homo sapien
aaatattttattcatgtattcattc

SEQ ID NO: 3231803 - DNA, 25 bp, Homo sapien
ctgctaacgtagatttatgaagaat

SEQ ID NO: 3231804 - DNA, 25 bp, Homo sapien
gatataattcatgtttatgactaag

SEQ ID NO: 3231805 - DNA, 25 bp, Homo sapien
cccgggcacacggtccagattgata

SEQ ID NO: 3231806 - DNA, 25 bp, Homo sapien
tcagtcaacatgctatgaattgtca

SEQ ID NO: 3231807 - DNA, 25 bp, Homo sapien
tacagagtccccgaagctgcatttt

SEQ ID NO: 3231808 - DNA, 25 bp, Homo sapien
tgaacaacttctggcacagatggga

SEQ ID NO: 3231809 - DNA, 25 bp, Homo sapien
actgagtccccagttagtgtggtga

SEQ ID NO: 3231810 - DNA, 25 bp, Homo sapien
ccctgggtgagtcctggtgtttctg

SEQ ID NO: 3231811 - DNA, 25 bp, Homo sapien
agaacaccacggactccctgggtga

SEQ ID NO: 3231812 - DNA, 25 bp, Homo sapien
tacaaaagatacgacatatgccata

SEQ ID NO: 3231813 - DNA, 25 bp, Homo sapien
attagcaagtattttagtctgccct

SEQ ID NO: 3231814 - DNA, 25 bp, Homo sapien
gccatataacggttgtcaatcaata

SEQ ID NO: 3231815 - DNA, 25 bp, Homo sapien
gcaagtattttagtctgccctaaat

SEQ ID NO: 3231816 - DNA, 25 bp, Homo sapien
aaataaatatgctgagattaatcat

SEQ ID NO: 3231817 - DNA, 25 bp, Homo sapien
gcatgacgactaaagtcaccagctg

SEQ ID NO: 3231818 - DNA, 25 bp, Homo sapien
ctcaccagctgcatgacgactaaag

SEQ ID NO: 3231819 - DNA, 25 bp, Homo sapien
caccagctgcatagggactaagctc

SEQ ID NO: 3231820 - DNA, 25 bp, Homo sapien
accagctgcatagggactaagctca

SEQ ID NO: 3231821 - DNA, 25 bp, Homo sapien
tttccagctggcatcataggccgtg

SEQ ID NO: 3231822 - DNA, 25 bp, Homo sapien
gactaaagctgcataagtggtttcc

SEQ ID NO: 3231823 - DNA, 25 bp, Homo sapien
cacaggtttgcctgcgtgcagtgta

SEQ ID NO: 3231824 - DNA, 25 bp, Homo sapien
gcatagttcaatgtgtctcaagttg

SEQ ID NO: 3231825 - DNA, 25 bp, Homo sapien
tctttgatggagtatccgaggcctc

SEQ ID NO: 3231826 - DNA, 25 bp, Homo sapien
agcacagggagtaagggcggcacct

SEQ ID NO: 3231827 - DNA, 25 bp, Homo sapien
tgcaaggttgcccttctttgatgga

SEQ ID NO: 3231828 - DNA, 25 bp, Homo sapien
gagtaagggcggcacctggtcccgc

SEQ ID NO: 3231829 - DNA, 25 bp, Homo sapien
ccctttcatgatgcccaatctcaag

SEQ ID NO: 3231830 - DNA, 25 bp, Homo sapien
caatctcaagaggtgcccctctgca

SEQ ID NO: 3231831 - DNA, 25 bp, Homo sapien
agaggtgcccctctgcaaacagtta

SEQ ID NO: 3231832 - DNA, 25 bp, Homo sapien
tgatgcccaatctcaagaggtgccc

SEQ ID NO: 3231833 - DNA, 25 bp, Homo sapien
ctttcccactttctcctgtggatat

SEQ ID NO: 3231834 - DNA, 25 bp, Homo sapien
ccactttctcctgtggatatttagt

SEQ ID NO: 3231835 - DNA, 25 bp, Homo sapien
ttcccactttctcctgtggatattt

SEQ ID NO: 3231836 - DNA, 25 bp, Homo sapien
ctctaaacactcctttagctgtgac

SEQ ID NO: 3231837 - DNA, 25 bp, Homo sapien
atccaactggtcctgggcatttttg

SEQ ID NO: 3231838 - DNA, 25 bp, Homo sapien
tctttgcacttctggtagaatctgg

SEQ ID NO: 3231839 - DNA, 25 bp, Homo sapien
tgggcatttttggctggtaggctat

SEQ ID NO: 3231840 - DNA, 25 bp, Homo sapien
tcctgggcatttttggctggtaggc

SEQ ID NO: 3231841 - DNA, 25 bp, Homo sapien
tgaatatagaccagaaactcctgaa

SEQ ID NO: 3231842 - DNA, 25 bp, Homo sapien
gaaagcttatgaggaatgttgaaga

SEQ ID NO: 3231843 - DNA, 25 bp, Homo sapien
aatgaatatagaccagaaactcctg

SEQ ID NO: 3231844 - DNA, 25 bp, Homo sapien
atcatgatgaaagcttatgaggaat

SEQ ID NO: 3231845 - DNA, 25 bp, Homo sapien
aagtatccttggattaaatccatgg

SEQ ID NO: 3231846 - DNA, 25 bp, Homo sapien
agtatccttggattaaatccatggg

SEQ ID NO: 3231847 - DNA, 25 bp, Homo sapien
catgtggatgtccaactgacttcaa

SEQ ID NO: 3231848 - DNA, 25 bp, Homo sapien
tacagccatctaagtggccatcatt

SEQ ID NO: 3231849 - DNA, 25 bp, Homo sapien
ggccatcattcagtggcaacaaaga

SEQ ID NO: 3231850 - DNA, 25 bp, Homo sapien
agatggcagcatcacgtagcataca

SEQ ID NO: 3231851 - DNA, 25 bp, Homo sapien
tcacgtagcatacagccatctaagt

SEQ ID NO: 3231852 - DNA, 25 bp, Homo sapien
ttccacattgattccacttaattag

SEQ ID NO: 3231853 - DNA, 25 bp, Homo sapien
tgattccacttaattaggggaccaa

SEQ ID NO: 3231854 - DNA, 25 bp, Homo sapien
ccacattgattccacttaattaggg

SEQ ID NO: 3231855 - DNA, 25 bp, Homo sapien
cattgattccacttaattaggggac

SEQ ID NO: 3231856 - DNA, 25 bp, Homo sapien
tgaaggttgacgtccacatgagcaa

SEQ ID NO: 3231857 - DNA, 25 bp, Homo sapien
gagttttgaaggttgacgtccacat

SEQ ID NO: 3231858 - DNA, 25 bp, Homo sapien
caggaaagtgtcagtctgccgctga

SEQ ID NO: 3231859 - DNA, 25 bp, Homo sapien
caatggctttggaagaggaacaaac

SEQ ID NO: 3231860 - DNA, 25 bp, Homo sapien
aacttccgtagtttcagcttccaca

SEQ ID NO: 3231861 - DNA, 25 bp, Homo sapien
catttttgttctatcccgttctctg

SEQ ID NO: 3231862 - DNA, 25 bp, Homo sapien
ttagttgaacgaccatttggcagta

SEQ ID NO: 3231863 - DNA, 25 bp, Homo sapien
gttctatcccgttctctgaacaaag

SEQ ID NO: 3231864 - DNA, 25 bp, Homo sapien
aaacatttgcggctttcctcgtaat

SEQ ID NO: 3231865 - DNA, 25 bp, Homo sapien
tgtgaaactttgatggcccaaggat

SEQ ID NO: 3231866 - DNA, 25 bp, Homo sapien
gagggattccctcctcagatttggg

SEQ ID NO: 3231867 - DNA, 25 bp, Homo sapien
gagtcccaaactatggcttcagtca

SEQ ID NO: 3231868 - DNA, 25 bp, Homo sapien
tacccatgcattgttatcagtgttc

SEQ ID NO: 3231869 - DNA, 25 bp, Homo sapien
ggaaaatgtgaataacctggcgtct

SEQ ID NO: 3231870 - DNA, 25 bp, Homo sapien
gttatcagtgttcctggaaaatgtg

SEQ ID NO: 3231871 - DNA, 25 bp, Homo sapien
tgtgaataacctggcgtctgcaaac

SEQ ID NO: 3231872 - DNA, 25 bp, Homo sapien
tatcatttctaatagtcacctatga

SEQ ID NO: 3231873 - DNA, 25 bp, Homo sapien
cttgtttcttacgaaaaatgttcag

SEQ ID NO: 3231874 - DNA, 25 bp, Homo sapien
aagatttccctatcctttatgaatt

SEQ ID NO: 3231875 - DNA, 25 bp, Homo sapien
ttgcatatgcaaactaggtttattc

SEQ ID NO: 3231876 - DNA, 25 bp, Homo sapien
tctgtgagctgacactctacttgtt

SEQ ID NO: 3231877 - DNA, 25 bp, Homo sapien
ttcctactctaacagctgaagcatg

SEQ ID NO: 3231878 - DNA, 25 bp, Homo sapien
gactttcaatagtcagcaataacct

SEQ ID NO: 3231879 - DNA, 25 bp, Homo sapien
gacactctacttgttctcttcccat

SEQ ID NO: 3231880 - DNA, 25 bp, Homo sapien
agggactgaagattcagttgatcat

SEQ ID NO: 3231881 - DNA, 25 bp, Homo sapien
taagaggaggtttttgtatgcaaat

SEQ ID NO: 3231882 - DNA, 25 bp, Homo sapien
catccgtagatttctcaggaggcaa

SEQ ID NO: 3231883 - DNA, 25 bp, Homo sapien
gccctggtttctagcacacagctcc

SEQ ID NO: 3231884 - DNA, 25 bp, Homo sapien
catttccacatctagtccacatgaa

SEQ ID NO: 3231885 - DNA, 25 bp, Homo sapien
catatacaactctcttccatatcat

SEQ ID NO: 3231886 - DNA, 25 bp, Homo sapien
cacatctagtccacatgaacaaata

SEQ ID NO: 3231887 - DNA, 25 bp, Homo sapien
ctcttccatatcatacagggagaat

SEQ ID NO: 3231888 - DNA, 25 bp, Homo sapien
gataggagagagtgcgttacaatgt

SEQ ID NO: 3231889 - DNA, 25 bp, Homo sapien
tacgcatcttcatgggataggagag

SEQ ID NO: 3231890 - DNA, 25 bp, Homo sapien
ggagatgctggccttaaatccctgg

SEQ ID NO: 3231891 - DNA, 25 bp, Homo sapien
aatgtaggagtgtttcgccacctgg

SEQ ID NO: 3231892 - DNA, 25 bp, Homo sapien
agaggctccgcaggatcagtgaagg

SEQ ID NO: 3231893 - DNA, 25 bp, Homo sapien
tcagaggctccgcaggatcagtgaa

SEQ ID NO: 3231894 - DNA, 25 bp, Homo sapien
gagatcagaggctccgcaggatcag

SEQ ID NO: 3231895 - DNA, 25 bp, Homo sapien
gatcagaggctccgcaggatcagtg

SEQ ID NO: 3231896 - DNA, 25 bp, Homo sapien
tcctcccgcagtgcctcagatctct

SEQ ID NO: 3231897 - DNA, 25 bp, Homo sapien
agctgggctcatggggtcctgcatt

SEQ ID NO: 3231898 - DNA, 25 bp, Homo sapien
cccgcagtgcctcagatctcttggt

SEQ ID NO: 3231899 - DNA, 25 bp, Homo sapien
gggtcctgcattgtcgggctcctcc

SEQ ID NO: 3231900 - DNA, 25 bp, Homo sapien
gccttgtctaatacgttcccaaagc

SEQ ID NO: 3231901 - DNA, 25 bp, Homo sapien
tattgggaccggcacttctctccac

SEQ ID NO: 3231902 - DNA, 25 bp, Homo sapien
tctctccacacttcgagtgaatttc

SEQ ID NO: 3231903 - DNA, 25 bp, Homo sapien
gccactggctgccttgtctaatacg

SEQ ID NO: 3231904 - DNA, 25 bp, Homo sapien
tcaactgccagccttcttaggaatt

SEQ ID NO: 3231905 - DNA, 25 bp, Homo sapien
aaagtctgcttaggatttgaatctc

SEQ ID NO: 3231906 - DNA, 25 bp, Homo sapien
ggcaggtatgaaggaacacaagctt

SEQ ID NO: 3231907 - DNA, 25 bp, Homo sapien
ccacttgtgatcattccaggattca

SEQ ID NO: 3231908 - DNA, 25 bp, Homo sapien
ggatgatagaggcagcaactccccc

SEQ ID NO: 3231909 - DNA, 25 bp, Homo sapien
aggatgatagaggcagcaactcccc

SEQ ID NO: 3231910 - DNA, 25 bp, Homo sapien
ctgtcatcgcacacgaagacatttt

SEQ ID NO: 3231911 - DNA, 25 bp, Homo sapien
gtcgttagtgtgattatgacattca

SEQ ID NO: 3231912 - DNA, 25 bp, Homo sapien
tttctttgtcgttagtgtgattatg

SEQ ID NO: 3231913 - DNA, 25 bp, Homo sapien
aaatatgtttcttgagtgccacaca

SEQ ID NO: 3231914 - DNA, 25 bp, Homo sapien
tactggtcgtgtgcaccgctgttgc
